(19) United States
(12) Patent Application Publication
(10) Pub. No.: US 2021/0061914 A1
(43) Pub. Date: Mar. 4, 2021

(54) Antigen-Binding Proteins Targeting Shared Antigens

(71) Applicant: Gritstone Oncology, Inc., Emeryville, CA (US)

(72) Inventors: Karin Jooss, Emeryville, CA (US); Wade Blair, Emeryville, CA (US); Brendan Bulik-Sullivan, Emeryville, CA (US); Michele Anne Busby, Emeryville, CA (US); Jennifer Busby, Emeryville, CA (US); Joshua Michael Francis, Emeryville, CA (US); Gijsbert Marnix Grotenbreg, Emeryville, CA (US); Mojca Skoberne, Emeryville, CA (US); Roman Yelensky, Emeryville, CA (US)

(21) Appl. No.: 16/958,615

(22) PCT Filed: Dec. 28, 2018
(86) PCT No.: PCT/US18/67931

§ 371 Date: Jun. 26, 2020

Related U.S. Application Data
(60) Provisional application No. 62/611,403, filed on Dec. 28, 2017.
(60) Provisional application No. 62/756,508, filed on Nov. 6, 2018.

(51) Int. Cl. C07K 16/28; C07K 14/725; C07K 14/705

(52) U.S. Cl. CPC C07K 16/2833; C07K 14/7051; C07K 14/70521; C07K 2319/03; C07K 2317/622; C07K 2317/31; C07K 2317/24; C07K 2317/565

(57) ABSTRACT

Provided herein are HLA-PEPTIDE targets and antigen binding proteins that bind HLA-PEPTIDE targets. Also disclosed are methods for identifying the HLA-PEPTIDE targets as well as identifying one or more antigen binding proteins that bind a given HLA-PEPTIDE target.

### CROSS REFERENCE TO RELATED APPLICATIONS

[0001] This application claims the benefit of U.S. Provisional Application No. 62/611,403, filed Dec. 28, 2017, and of U.S. Provisional Application No. 62/756,508, filed Nov. 6, 2018, which are each hereby incorporated in their entirety by reference for all purposes.

### SEQUENCE LISTING

[0002] The instant application contains a Sequence Listing which has been submitted via EFS-Web and is hereby incorporated by reference in its entirety. Said ASCII copy, created on Dec. 28, 2018, is named 41174WO_CRF_sequencelisting.txt, and is 25,492,888 bytes in size.

### BACKGROUND

[0003] The immune system employs two types of adaptive immune responses to provide antigen specific protection from pathogens; humoral immune responses, and cellular immune responses, which involve specific recognition of pathogen antigens via B lymphocytes and T lymphocytes, respectively.

[0004] T lymphocytes, by virtue of being the antigen specific effectors of cellular immunity, play a central role in the body's defense against diseases mediated by intracellular pathogens, such as viruses, intracellular bacteria, mycoplasmas, and intracellular parasites, and against cancer cells by directly cytolysing the affected cells. The specificity of T lymphocyte responses is conferred by, and activated through T-cell receptors (TCRs) binding to (major histocompatibility complex) WIC molecules on the surface of affected cells. T-cell receptors are antigen specific receptors clonally distributed on individual T lymphocytes whose repertoire of antigenic specificity is generated via somatic gene rearrangement mechanisms analogous to those involved in generating the antibody gene repertoire. T-cell receptors include a heterodimer of transmembrane molecules, the main type being composed of an alpha-beta polypeptide dimer and a smaller subset of a gamma-delta polypeptide dimer. T lymphocyte receptor subunits comprise a variable and constant region similar to immunoglobulins in the extracellular domain, a short hinge region with cysteine that promotes alpha and beta chain pairing, a transmembrane and a short cytoplasmic region. Signal transduction triggered by TCRs is indirectly mediated via CD3-zeta, an associated multi-subunit complex comprising signal transducing subunits.

[0005] T lymphocyte receptors do not generally recognize native antigens but rather recognize cell-surface displayed complexes comprising an intracellularly processed fragment of an antigen in association with a major histocompatibility complex (WIC) for presentation of peptide antigens. Major histocompatibility complex genes are highly polymorphic across species populations, comprising multiple common alleles for each individual gene. In humans, WIC is referred to as human leukocyte antigen (HLA).

[0006] Major histocompatibility complex class I molecules are expressed on the surface of virtually all nucleated cells in the body and are dimeric molecules comprising a transmembrane heavy chain, comprising the peptide antigen binding cleft, and a smaller extracellular chain termed beta2-microglobulin. WIC class I molecules present peptides derived from the degradation of cytosolic proteins by the proteasome, a multi-unit structure in the cytoplasm, (Niedermann G., 2002. Curr Top Microbiol Immunol. 268:91-136; for processing of bacterial antigens, refer to Wick M J, and Ljunggren H G., 1999. Immunol Rev. 172:153-62). Cleaved peptides are transported into the lumen of the endoplasmic reticulum (ER) by the transporter associated with antigen processing (TAP) where they are bound to the groove of the assembled class I molecule, and the resultant MHC/peptide complex is transported to the cell membrane to enable antigen presentation to T lymphocytes (Yewdell J W., 2001. Trends Cell Biol. 11:294-7; Yewdell J W. and Bennink J R., 2001. Curr Opin Immunol. 13:13-8). Alternatively, cleaved peptides can be loaded onto MHC class I molecules in a TAP-independent manner and can also present extracellularly-derived proteins through a process of cross-presentation. As such, a given MHC/peptide complex presents a novel protein structure on the cell surface that can be targeted by a novel antigen-binding protein (e.g., antibodies or TCRs) once the identity of the complex's structure (peptide sequence and MHC subtype) is determined.

[0007] Tumor cells can express antigens and may display such antigens on the surface of the tumor cell. Such tumor-associated antigens can be used for development of novel immunotherapeutic reagents for the specific targeting of tumor cells. For example, tumor-associated antigens can be used to identify therapeutic antigen binding proteins, e.g., TCRs, antibodies, or antigen-binding fragments. Such tumor-associated antigens may also be utilized in pharmaceutical compositions, e.g., vaccines.

### SUMMARY

[0008] Provided herein is an isolated antigen binding protein (ABP) that specifically binds to a human leukocyte antigen (HLA)-PEPTIDE target, wherein the HLA-PEPTIDE target comprises an HLA-restricted peptide complexed with an HLA Class I molecule, wherein the HLA-restricted peptide is located in the peptide binding groove of an α1/α2 heterodimer portion of the HLA Class I molecule, and wherein: the HLA Class I molecule is HLA subtype B*35:01 and the HLA-restricted peptide comprises the sequence EVDPIGHVY, the HLA Class I molecule is HLA subtype A*02:01 and the HLA-restricted peptide comprises the sequence AIFPGAVPAA, the HLA Class I molecule is HLA subtype A*01:01 and the HLA-restricted peptide comprises the sequence ASSLPTTMNY, or the HLA Class I molecule is HLA subtype A*01:01 and the HLA-restricted peptide comprises the sequence HSEVGLPVY.

[0009] In some embodiments, the HLA-restricted peptide is between about 5-15 amino acids in length. In some embodiments, the HLA-restricted peptide is between about 8-12 amino acids in length. In some embodiments, the HLA Class I molecule is HLA subtype B*35:01 and the HLA-restricted peptide consists of the sequence EVDPIGHVY, the HLA Class I molecule is HLA subtype A*02:01 and the HLA-restricted peptide consists of the sequence AIFPGAVPAA, the HLA Class I molecule is HLA subtype A*01:01 and the HLA-restricted peptide consists of the sequence ASSLPTTMNY, or the HLA Class I molecule is HLA subtype A*01:01 and the HLA-restricted peptide consists of the sequence HSEVGLPVY.

[0010] In some embodiments, the ABP comprises an antibody or antigen-binding fragment thereof.

[0011] In some embodiments of the ABP comprising an antibody or antigen-binding fragment thereof, the HLA Class I molecule is HLA subtype B*35:01 and the HLA-restricted peptide comprises the sequence EVDPIGHVY. In some embodiments, the HLA Class I molecule is HLA subtype B*35:01 and the HLA-restricted peptide consists of the sequence EVDPIGHVY.

[0012] In some embodiments, the ABP comprises a CDR-H3 comprising a sequence selected from: CARDGVRYYGMDVW, CARGVRGYDRSAGYW, CASHDYGDYGEYFQHW, CARVSWYCSSTSCGVNWFDPW, CAKVNWNDGPYFDYW, CATPTNSGYYGPYYYYGMDVW, CARDVMDVW, CAREGYGMDVW, CARDNGVGVDYW, CARGIADSGSYYGNGRDYYYGMDVW, CARGDYYFDYW, CARDGTRYYGMDVW, CARDVVANFDYW, CARGHSSGWYYYYGMDVW, CAKDLGSYGGYYW, CARS WFGGFNYHYYGMDVW, CARELPIGYGMDVW, and CARGGSYYYYGMDVW.

[0013] In some embodiments, the ABP comprises a CDR-L3 comprising a sequence selected from: CMQGLQTPITF, CMQALQTPPTF, CQQAISFPLTF, CQQANSFPLTF, CQQANSFPLTF, CQQSYSIPLTF, CQQTYMMPYTF, CQQSYITPWTF, CQQSYITPYTF, CQQYYTTPYTF, CQQSYSTPLTF, CMQALQTPLTF, CQQYGSWPRTF, CQQSYSTPVTF, CMQALQTPYTF, CQQANSFPFTF, CMQALQTPLTF, and CQQSYSTPLTF.

[0014] In some embodiments, the ABP comprises the CDR-H3 and the CDR-L3 from the scFv designated G5_P7_E7, G5_P7_B3, G5_P7_A5, G5_P7_F6, G5-P1B12, G5-P1C12, G5-P1-E05, G5-P3G01, G5-P3G08, G5-P4B02, G5-P4E04, G5R4-P1D06, G5R4-P1H11, G5R4-P2B10, G5R4-P2H8, G5R4-P3G05, G5R4-P4A07, or G5R4-P4B01.

[0015] In some embodiments, the ABP comprises all three heavy chain CDRs and all three light chain CDRs from the scFv designated G5_P7_E7, G5_P7_B3, G5_P7_A5, G5_P7_F6, G5-P1B12, G5-P1C12, G5-P1-E05, G5-P3G01, G5-P3G08, G5-P4B02, G5-P4E04, G5R4-P1D06, G5R4-P1H11, G5R4-P2B10, G5R4-P2H8, G5R4-P3G05, G5R4-P4A07, or G5R4-P4B01.

[0016] In some embodiments, the ABP comprises a VH sequence selected from

QVQLVQSGAEVKKPGASVKVSCKASGYTFTSYDINWVRQAPGQGLEWMGI
INPRSGSTKYAQKFQGRVTMTRDTSTSTVYMELSSLRSEDTAVYYCARDG
VRYYGMDVWGQGTTVTVSSAS,
QVQLVQSGAEVKKPGSSVKVSCKASGYTFTSHDINWVRQAPGQGLEWMGW
MNPNSGDTGYAQKFQGRVTITADESTSTAYMELSSLRSEDTAVYYCARGV
RGYDRSAGYWGQGTLVIVSSAS,
EVQLLESGGGLVKPGGSLRLSCAASGFSFSSYWMSWVRQAPGKGLEWISY
ISGDSGYTNYADSVKGRFTISRDDSKNTLYLQMNSLKTEDTAVYYCASHD
YGDYGEYFQHWGQGTLVTVSSAS,
EVQLLQSGGGLVQPGGSLRLSCAASGFTFSNSDMNWVRQAPGKGLEWVAY
ISSGSSTIYYADSVKGRFTISRDNSKNTLYLQMNSLRAEDTAVYYCARVS
WYCSSTSCGVNWFDPWGQGTLVTVSSAS,
EVQLLESGGGLVQPGGSLRLSCAASGFTFSNSDMNWVRQAPGKGLEWVAS
ISSSGGYINYADSVKGRFTISRDNSKNTLYLQMNSLRAEDTAVYYCAKVN
WNDGPYFDYWGQGTLVTVSS,
QVQLVQSGAEVKKPGSSVKVSCKASGGTFSNFGVSWLRQAPGQGLEWMGG
IIPILGTANYAQKFQGRVTITADESTSTAYMELSSLRSEDTAVYYCATPT
NSGYYGPYYYYGMDVWGQGTTVTVSS,
QVQLVQSGAEVKKPGASVKVSCKASGYTFTSYNMHWVRQAPGQGLEWMGW
INPNSGGTNYAQKFQGRVTMTRDTSTSTVYMELSSLRSEDTAVYYCARDV
MDVWGQGTTVTVSS,
QVQLVQSGAEVKKPGASVKVSCKASGGTFSGYLVSWVRQAPGQGLEWMGW
INPNSGGTNTAQKFQGRVTMTRDTSTSTVYMELSSLRSEDTAVYYCAREG
YGMDVWGQGTTVTVSS,
QVQLVQSGAEVKKPGASVKVSCKASGYIFRNYPMHWVRQAPGQGLEWMGW
INPDSGGTKYAQKFQGRVTMTRDTSTSTVYMELSSLRSEDTAVYYCARDN
GVGVDYWGQGTLVTVSS,
QVQLVQSGAEVKKPGASVKVSCKASGYTFTGYYMHWVRQAPGQGLEWMGW
MNPNIGNTGYAQKFQGRVTMTRDTSTSTVYMELSSLRSEDTAVYYCARGI
ADSGSYYGNGRDYYYGMDVWGQGTTVTVSS,
QVQLVQSGAEVKKPGASVKVSCKASGGTFSSYGISWVRQAPGQGLEWMGW
INPNSGVTKYAQKFQGRVTMTRDTSTSTVYMELSSLRSEDTAVYYCARGD
YYFDYWGQGTLVTVSS,
QVQLVQSGAEVKKPGASVKVSCKASGYTFTSYDINWVRQAPGQGLEWMGW
INPNSGDTKYSQKFQGRVTMTRDTSTSTVYMELSSLRSEDTAVYYCARDG
TRYYGMDVWGQGTTVTVSS,
EVQLLESGGGLVKPGGSLRLSCAASGFTFSDYYMSWVRQAPGKGLEWVSY
ISSSSSYTNYADSVKGRFTISRDDSKNTLYLQMNSLKTEDTAVYYCARDV
VANFDYWGQGTLVTVSS,
QVQLVQSGAEVKKPGASVKVSCKASGGTFSSYAISWVRQAPGQGLEWMGW
MNPDSGSTGYAQRFQGRVTMTRDTSTSTVYMELSSLRSEDTAVYYCARGH
SSGWYYYYGMDVWGQGTTVTVSS,
EVQLLESGGGLVQPGGSLRLSCAASGFTFTSYSMHWVRQAPGKGLEWVSS
ITSFTNTMYYADSVKGRFTISRDNSKNTLYLQMNSLRAEDTAVYYCAKDL
GSYGGYYWGQGTLVTVSS,
QVQLVQSGAEVKKPGASVKVSCKASGYTFTNYYMHWVRQAPGQGLEWMGI
INPSGGSTSYAQKFQGRVTMTRDTSTSTVYMELSSLRSEDTAVYYCARSW
FGGFNYHYYGMDVWGQGTTVTVSS,
QVQLVQSGAEVKKPGASVKVSCKASGYTFTSYYMHWVRQAPGQGLEWMGW
MNPNSGNTGYAQKFQGRVTMTRDTSTSTVYMELSSLRSEDTAVYYCAREL
PIGYGMDVWGQGTTVTVSS,
and
QVQLVQSGAEVKKPGSSVKVSCKASGGTFSSYAISWVRQAPGQGLEWMGG
IIPIVGTANYAQKFQGRVTITADESTSTAYMELSSLRSEDTAVYYCARGG
SYYYYGMDVWGQGTTVTVSS.

[0017] In some embodiments, the ABP comprises a VL sequence selected from

DIVMTQSPLSLPVTPGEPASISCRSSQSLLHSNGYNYLDWYLQKPGQSPQ
LLIYLGSYRASGVPDRFSGSGSGTDFTLKISRVEAEDVGVYYCMQGLQTP
ITFGQGTRLEIK,
DIVMTQSPLSLPVTPGEPASISCRSSQSLLHSNGYNYLDWYLQKPGQSPQ
LLIYLGSSRASGVPDRFSGSGSGTDFTLKISRVEAEDVGVYYCMQALQTP
PTFGPGTKVDIK,
DIQMTQSPSSLSASVGDRVTITCQASQDISNYLNWYQQKPGKAPKLLIYA
ASSLQSGVPSRFSGSGSGTDFTLTISSLQPEDFATYYCQQAISFPLTFGQ
STKVEIK,
DIQMTQSPSSLSASVGDRVTITCRASQSISSWLAWYQQKPGKAPKLLIYS
ASTLQSGVPSRFSGSGSGTDFTLTISSLQPEDFATYYCQQANSFPLTFGG
GTKVEIK,
DIQMTQSPSSLSASVGDRVTITCRASQSISSWLAWYQQKPGKAPKLLIYA
ASSLQSGVPSRFSGSGSGTDFTLTISSLQPEDFATYYCQQANSFPLTFGG
GTKVEIK,
DIQMTQSPSSLSASVGDRVTITCRASQSISSWLAWYQQKPGKAPKLLIYA
ASTLQSGVPSRFSGSGSGTDFTLTISSLQPEDFATYYCQQSYSIPLTFGG
GTKVEIK,
DIQMTQSPSSLSASVGDRVTITCRASQGISNYLNWYQQKPGKAPKLLIYY
ASSLQSGVPSRFSGSGSGTDFTLTISSLQPEDFATYYCQQTYMMPYTFGQ
GTKVEIK,
DIQMTQSPSSLSASVGDRVTITCRASQSISSYLNWYQQKPGKAPKLLIGA
SSLQSGVPSRFSGSGSGTDFTLTISSLQPEDFATYYCQQSYITPWTFGQG
TKVEIK,
DIQMTQSPSSLSASVGDRVTITCRASQGISNYLAWYQQKPGKAPKLLIYA
ASSLQSGVPSRFSGSGSGTDFTLTISSLQPEDFATYYCQQSYITPYTFGQ
GTKLEIK,
DIVMTQSPDSLAVSLGERATINCKTSQSVLYRPNNENYLAWYQQKPGQPP
KLLIYQASIREPGVPDRFSGSGSGTDFTLTISSLQAEDVAVYYCQQYYTT
PYTFGQGTKLEIK,
DIQMTQSPSSLSASVGDRVTITCRASQSISRFLNWYQQKPGKAPKLLIGA
SRPQSGVPSRFSGSGSGTDFTLTISSLQPEDFATYYCQQSYSTPLTFGQG
TKVEIK,
DIVMTQSPLSLPVTPGEPASISCRSSQSLLHSNGYNYLDWYLQKPGQSPQ
LLIYLGSHRASGVPDRFSGSGSGTDFTLKISRVEAEDVGVYYCMQALQTP
LTFGGGTKVEIK,
EIVMTQSPATLSVSPGERATLSCRASQSVSSNLAWYQQKPGQAPRLLIYA
ASARASGIPARFSGSGSGTEFTLTISSLQSEDFAVYYCQQYGSWPRTFGQ
GTKVEIK,
DIQMTQSPSSLSASVGDRVTITCRASQSISSYLNWYQQKPGKAPKLLIYG
ASRLQSGVPSRFSGSGSGTDFTLTISSLQPEDFATYYCQQSYSTPVTFGQ
GTKVEIK,
DIVMTQSPLSLPVTPGEPASISCRSSQSLLHSNGYNYLDWYLQKPGQSPQ
LLIYLGSNRASGVPDRFSGSGSGTDFTLKISRVEAEDVGVYYCMQALQTP
YTFGQGTKVEIK,
DIQMTQSPSSLSASVGDRVTITCQASEDISNHLNWYQQKPGKAPKLLIYD
ALSLQSGVPSRFSGSGSGTDFTLTISSLQPEDFATYYCQQANSFPFTFGP
GTKVDIK,
DIVMTQSPLSLPVTPGEPASISCRSSQSLLHSNGYNYLDWYLQKPGQSPQ
LLIYLGSNRASGVPDRFSGSGSGTDFTLKISRVEAEDVGVYYCMQALQTP
LTFGQGTKVEIK,
and
DIQMTQSPSSLSASVGDRVTITCRASQSISSYLNWYQQKPGKAPKLLIYA
ASSLQSGVPSRFSGSGSGTDFTLTISSLQPEDFATYYCQQSYSTPLTFGG
GTKVEIK.

[0018] In some embodiments, the ABP comprises the VH sequence and VL sequence from the scFv designated G5_P7_E7, G5_P7_B3, G5_P7_A5, G5_P7_F6, G5-P1B12, G5-P1C12, G5-P1-E05, G5-P3G01, G5-P3G08, G5-P4B02, G5-P4E04, G5R4-P1D06, G5R4-P1H11, G5R4-P2B10, G5R4-P2H8, G5R4-P3G05, G5R4-P4A07, and G5R4-P4B01.

[0019] In some embodiments, the ABP binds to any one or more of amino acid positions 2-8 on the restricted peptide EVDPIGHVY.

[0020] In some embodiments of the ABP comprising an antibody or antigen-binding fragment thereof, the HLA Class I molecule is HLA subtype A*02:01 and the HLA-restricted peptide comprises the sequence AIFPGAVPAA. In some embodiments of the ABP comprising an antibody or antigen-binding fragment thereof, the HLA Class I molecule is HLA subtype A*02:01 and the HLA-restricted peptide consists of the sequence AIFPGAVPAA.

[0021] In some embodiments, the ABP comprises a CDR-H3 comprising a sequence selected from: CARDDYGDYVAYFQHW, CARDLSYYYGMDVW, CARVYDFWSVLSGFDIW, CARVEQGYDIYYYYYMDVW, CARSYDYGDYLNFDYW, CARASGSGYYYYYGMDVW, CAASTWIQPFDYW, CASNGNYYGSGSYYNYW, CARAVYYDFWSGPFDYW, CAKGGIYYGSGSYPSW, CARGLYYMDVW, CARGLYGDYFLYYGMDVW, CARGLLGFGEFLTYGMDVW, CARDRDSSWTYYYYGMDVW, CARGLYGDYFLYYGMDVW, CARGDYYDSSGYYFPVYFDYW, and CAKDPFWSGHYYYYGMDVW.

[0022] In some embodiments, the ABP comprises a CDR-L3 comprising a sequence selected from: CQQNYNSVTF, CQQSYNTPWTF, CGQSYSTPPTF, CQQSYSAPYTF, CQQSYSIPPTF, CQQSYSAPYTF, CQQHNSYPPTF, CQQYSTYPITI, CQQANSFPWTF, CQQSHSTPQTF, CQQSYSTPLTF, CQQSYSTPLTF, CQQTYSTPWTF, CQQYGSSPYTF, CQQSHSTPLTF, CQQANGFPLTF, and CQQSYSTPLTF.

[0023] In some embodiments, the ABP comprises the CDR-H3 and the CDR-L3 from the scFv designated G8-P1A03, G8-P1A04, G8-P1A06, G8-P1B03, G8-P1C11, G8-P1D02, G8-P1H08, G8-P2B05, G8-P2E06, R3G8-P2C10, R3G8-P2E04, R3G8-P4F05, R3G8-P5C03, R3G8-P5F02, R3G8-P5G08, G8-P1C01, or G8-P2C11.

[0024] In some embodiments, the ABP comprises all three heavy chain CDRs and all three light chain CDRs from the scFv designated G8-P1A03, G8-P1A04, G8-P1A06, G8-P1B03, G8-P1C11, G8-P1D02, G8-P1H08, G8-P2B05, G8-P2E06, R3G8-P2C10, R3G8-P2E04, R3G8-P4F05, R3G8-P5C03, R3G8-P5F02, R3G8-P5G08, G8-P1C01, or G8-P2C11.

[0025] In some embodiments, the ABP comprises a VH sequence selected from:

QVQLVQSGAEVKKPGASVKVSCKASGGTFSRSAITWVRQAPGQGLEWMGW
INPNSGATNYAQKFQGRVTMTRDTSTSTVYMELSSLRSEDTAVYYCARDD
YGDYVAYFQHWGQGTLVTVSS,
QVQLVQSGAEVKKPGASVKVSCKASGYPFIGQYLHWVRQAPGQGLEWMGI
INPSGDSATYAQKFQGRVTMTRDTSTSTVYMELSSLRSEDTAVYYCARDL
SYYYGMDVWGQGTTVTVSS,
QVQLVQSGAEVKKPGASVKVSCKASGYTFTNYYMHWVRQAPGQGLEWMGW
MNPIGGGTGYAQKFQGRVTMTRDTSTSTVYMELSSLRSEDTAVYYCARVY
DFWSVLSGFDIWGQGTLVTVSS,
EVQLLESGGGLVQPGGSLRLSCAASGFTFSDYYMSWVRQAPGKGLEWVSG
INWNGGSTGYADSVKGRFTISRDNSKNTLYLQMNSLRAEDTAVYYCARVE
QGYDIYYYYYMDVWGKGTTVTVSS,
QVQLVQSGAEVKKPGASVKVSCKASGGTLSSYPINWVRQAPGQGLEWMGW
ISTYSGHADYAQKLQGRVTMTRDTSTSTVYMELSSLRSEDTAVYYCARSY
DYGDYLNFDYWGQGTLVTVSS,
EVQLLESGGGLVQPGGSLRLSCAASGFTFSSYWMSWVRQAPGKGLEWVSS
ISGRGDNTYYADSVKGRFTISRDNSKNTLYLQMNSLRAEDTAVYYCARAS
GSGYYYYYGMDVWGQGTTVTVSS,
QVQLVQSGAEVKKPGASVKVSCKASGYTFGNYFMHWVRQAPGQGLEWMGM
VNPSGGSETFAQKFQGRVTMTRDTSTSTVYMELSSLRSEDTAVYYCAAST
WIQPFDYWGQGTLVTVSS,
EVQLLESGGGLVQPGGSLRLSCAASGFDFSIYSMNWVRQAPGKGLEWVSA
ISGSGGSTYYADSVKGRFTISRDNSKNTLYLQMNSLRAEDTAVYYCASNG
NYYGSGSYYNYWGQGTLVTVSS.
QVQLVQSGAEVKKPGASVKVSCKASGYTLTTYYMHWVRQAPGQGLEWMGW
INPNSGGTNYAQKFQGRVTMTRDTSTSTVYMELSSLRSEDTAVYYCARAV
YYDFWSGPFDYWGQGTLVTVSS,
QVQLVQSGAEVKKPGASVKVSCKASGYTFTSYYMHWVRQAPGQGLEWMGW
INPYSGGTNYAQKFQGRVTMTRDTSTSTVYMELSSLRSEDTAVYYCAKGG
IYYGSGSYPSWGQGTLVTVSS,
QVQLVQSGAEVKKPGSSVKVSCKASGGTFSSYGVSWVRQAPGQGLEWMGW
ISPYSGNTDYAQKFQGRVTITADESTSTAYMELSSLRSEDTAVYYCARGL
YYMDVWGKGTTVTVSS,
QVQLVQSGAEVKKPGASVKVSCKASGYTFSNMYLHWVRQAPGQGLEWMGW
INPNTGDTNYAQTFQGRVTMTRDTSTSTVYMELSSLRSEDTAVYYCARGL
YGDYFLYYGMDVWGQGTKVTVSS,
QVQLVQSGAEVKKPGASVKVSCKASGYTFTSYYMHWVRQAPGQGLEWMGW
MNPNSGNTGYAQKFQGRVTMTRDTSTSTVYMELSSLRSEDTAVYYCARGL
LGFGEFLTYGMDVWGQGTLVTVSS,
QVQLVQSGAEVKKPGASVKVSCKASGYTFTGYYTHWVRQAPGQGLEWMGV
INPSGGSTTYAQKLQGRVTMTRDTSTSTVYMELSSLRSEDTAVYYCARDR
DSSWTYYYYGMDVWGQGTTVTVSS,
QVQLVQSGAEVKKPGASVKVSCKASGYTFTSNYMHWVRQAPGQGLEWMGW
MNPNSGNTGYAQKFQGRVTMTRDTSTSTVYMELSSLRSEDTAVYYCARGL
YGDYFLYYGMDVWGQGTTVTVSS,
QVQLVQSGAEVKKPGASVKVSCKASGGTFSSHAISWVRQAPGQGLEWMGV
IIPSGGTSYTQKFQGRVTMTRDTSTSTVYMELSSLRSEDTAVYYCARGDY
YDSSGYYFPVYFDYWGQGTLVTVSS,
and
QVQLVQSGAEVKKPGASVKVSCKASGYTFTSYAMNWVRQAPGQGLEWMGW
INPNSGGTNYAQKFQGRVTMTRDTSTSTVYMELSSLRSEDTAVYYCARDP
FWSGHYYYYGMDVWGQGTTVTVSS.

[0026] In some embodiments, the ABP comprises a VL sequence selected from:

DIQMTQSPSSLSASVGDRVTITCRASQSITSYLNWYQQKPGKAPKLLIDA
SNLETGVPSRFSGSGSGTDFTLTISSLQPEDFATYYCQQNYNSVTFGQGT
KLEIK,
DIQMTQSPSSLSASVGDRVTITCWASQGISSYLAWYQQKPGKAPKLLIYA
ASSLQSGVPSRFSGSGSGTDFTLTISSLQPEDFATYYCQQSYNTPWTFGP
GTKVDIK,
DIQMTQSPSSLSASVGDRVTITCRASQAISNSLAWYQQKPGKAPKLLIYA
ASTLQSGVPSRFSGSGSGTDFTLTISSLQPEDFATYYCGQSYSTPPTFGQ
GTKLEIK,
DIQMTQSPSSLSASVGDRVTITCRASQSISSYLNWYQQKPGKAPKLLIKA
SSLESGVPSRFSGSGSGTDFTLTISSLQPEDFATYYCQQSYSAPYTFGPG
TKVDIK,
DIQMTQSPSSLSASVGDRVTITCQASQDISNYLNWYQQKPGKAPKLLIYA
ASSLQSGVPSRFSGSGSGTDFTLTISSLQPEDFATYYCQQSYSIPPTFGG
GTKVDIK,
DIQMTQSPSSLSASVGDRVTITCQASQDISNYLNWYQQKPGKAPKLLIYA
ASSLQSGVPSRFSGSGSGTDFTLTISSLQPEDFATYYCQQSYSAPYTFGG
GTKVEIK,
DIQMTQSPSSLSASVGDRVTITCRASQGINSYLAWYQQKPGKAPKLLIYD
ASNLETGVPSRFSGSGSGTDFTLTISSLQPEDFATYYCQQHNSYPPTFGQ
GTKLEIK,
DIQMTQSPSSLSASVGDRVTITCRASQSISRWLAWYQQKPGKAPKLLIYA
ASSLQSGVPSRFSGSGSGTDFTLTISSLQPEDFATYYCQQYSTYPITIGQ
GTKVEIK,
DIQMTQSPSSLSASVGDRVTITCRASQGISNSLAWYQQKPGKAPKLLIYA
ASSLQSGVPSRFSGSGSGTDFTLTISSLQPEDFATYYCQQANSFPWTFGQ
GTKLEIK,
DIQMTQSPSSLSASVGDRVTITCRASQDVSTWLAWYQQKPGKAPKLLIYA
ASSLQSGVPSRFSGSGSGTDFTLTISSLQPEDFATYYCQQSHSTPQTFGQ
GTKVEIK,
DIQMTQSPSSLSASVGDRVTITCRASQSISSWLAWYQQKPGKAPKLLIYD
ASNLETGVPSRFSGSGSGTDFTLTISSLQPEDFATYYCQQSYSTPLTFGG
GTKLEIK,
DIQMTQSPSSLSASVGDRVTITCRASQGISNYLAWYQQKPGKAPKLLIYA
ASTLQSGVPSRFSGSGSGTDFTLTISSLQPEDFATYYCQQSYSTPLTFGG
GTKVEIK,
DIQMTQSPSSLSASVGDRVTITCRASQGISNWLAWYQQKPGKAPKLLIYA
ASTLQSGVPSRFSGSGSGTDFTLTISSLQPEDFATYYCQQTYSTPWTFGQ
GTKLEIK,
EIVMTQSPATLSVSPGERATLSCRASQSVGNSLAWYQQKPGQAPRLLIYG
ASTRATGIPARFSGSGSGTEFTLTISSLQSEDFAVYYCQQYGSSPYTFGQ
GTKVEIK,
DIQMTQSPSSLSASVGDRVTITCRASQSISGYLNWYQQKPGKAPKLLIYA
ASSLQSGVPSRFSGSGSGTDFTLTISSLQPEDFATYYCQQSHSTPLTFGQ
GTKVEIK,
DIQMTQSPSSLSASVGDRVTITCRASQNIYTYLNWYQQKPGKAPKLLIYD
ASNLETGVPSRFSGSGSGTDFTLTISSLQPEDFATYYCQQANGFPLTFGG
GTKVEIK,
and
DIQMTQSPSSLSASVGDRVTITCRASQSISSYLNWYQQKPGKAPKLLIYA
ASSLQSGVPSRFSGSGSGTDFTLTISSLQPEDFATYYCQQSYSTPLTFGG
GTKVEIK.

[0027] In some embodiments, the ABP comprises the VH sequence and VL sequence from the scFv designated G8-P1A03, G8-P1A04, G8-P1A06, G8-P1B03, G8-P1C11, G8-P1D02, G8-P1H08, G8-P2B05, G8-P2E06, R3G8-P2C10, R3G8-P2E04, R3G8-P4F05, R3G8-P5C03, R3G8-P5F02, R3G8-P5G08, G8-P1C01, or G8-P2C11.

[0028] In some embodiments, the ABP binds to any one or more of amino acid positions 1-5 of the restricted peptide AIFPGAVPAA. In some embodiments, the ABP binds to one or both of amino acid positions 4 and 5 of the restricted peptide AIFPGAVPAA.

[0029] In some embodiments, the ABP binds to any one or more of amino acid positions 45-60 of HLA subtype A*02:01.

[0030] In some embodiments, the ABP binds to any one or more of amino acid positions 56, 59, 60, 63, 64, 66, 67, 70, 73, 74, 132, 150-153, 155, 156, 158-160, 162-164, 166-168, 170, and 171 of HLA subtype A*02:01.

[0031] In some embodiments of the ABP comprising an antibody or antigen-binding fragment thereof, the HLA Class I molecule is HLA subtype A*01:01 and the HLA-restricted peptide comprises the sequence ASSLPTTMNY. In some embodiments of the ABP comprising an antibody or antigen-binding fragment thereof, the HLA Class I molecule is HLA subtype A*01:01 and the HLA-restricted peptide consists of the sequence ASSLPTTMNY.

[0032] In some embodiments, the ABP comprises a CDR-H3 comprising a sequence selected from: CARDQDTIFGVVITWFDPW, CARDKVYGDGFDPW, CAREDDSMDVW, CARDSSGLDPW, CARGVGNLDYW, CARDAHQYYDFWSGYYSGTYYYGMDVW, CAREQWPSYWYFDLW, CARDRGYSYGYFDYW, CARGSGDPNYYYYYGLDVW, CARDTGDHFDYW, CARAENGMDVW, CARDPGGYMDVW, CARDGDAFDIW, CARDMGDAFDIW, CAREEDGMDVW, CARDTGDHFDYW, CARGEYSSGFFFVGWFDLW, and CARETGDDAFDIW.

[0033] In some embodiments, the ABP comprises a CDR-L3 comprising a sequence selected from: CQQYFTTPYTF, CQQAEAFPYTF, CQQSYSTPITF, CQQSYIIPYTF, CHQTYSTPLTF, CQQAYSFPWTF, CQQGYSTPLTF, CQQANSFPRTF, CQQANSLPYTF, CQQSYSTPFTF, CQQSYSTPFTF, CQQSYGVPTF, CQQSYSTPLTF, CQQSYSTPLTF, CQQYYSYPWTF, CQQSYSTPFTF, CMQTLKTPLSF, and CQQSYSTPLTF.

[0034] In some embodiments, the ABP comprises the CDR-H3 and the CDR-L3 from the scFv designated R3G10-P1A07, R3G10-P1B07, R3G10-P1E12, R3G10-P1F06, R3G10-P1H01, R3G10-P1H08, R3G10-P2C04, R3G10-P2G11, R3G10-P3E04, R3G10-P4A02, R3G10-P4C05, R3G10-P4D04, R3G10-P4D10, R3G10-P4E07, R3G10-P4E12, R3G10-P4G06, R3G10-P5A08, or R3G10-P5C08.

[0035] In some embodiments, the ABP comprises all three heavy chain CDRs and all three light chain CDRs from the scFv designated R3G10-P1A07, R3G10-P1B07, R3G10-P1E12, R3G10-P1F06, R3G10-P1H01, R3G10-P1H08, R3G10-P2C04, R3G10-P2G11, R3G10-P3E04, R3G10-P4A02, R3G10-P4C05, R3G10-P4D04, R3G10-P4D10, R3G10-P4E07, R3G10-P4E12, R3G10-P4G06, R3G10-P5A08, or R3G10-P5C08.

[0036] In some embodiments, the ABP comprises a VH sequence selected from:

EVQLLESGGGLVKPGGSLRLSCAASGFTFSSYWMSWVRQAPGKGLEWVSG
ISARSGRTYYADSVKGRFTISRDDSKNTLYLQMNSLKTEDTAVYYCARDQ
DTIFGVVITWFDPWGQGTLVTVSS,
QVQLVQSGAEVKKPGASVKVSCKASGYTFTSYYMHWVRQAPGQGLEWMGI
IHPGGGTTSYAQKFQGRVTMTRDTSTSTVYMELSSLRSEDTAVYYCARDK
VYGDGFDPWGQGTLVTVSS,
QVQLVQSGAEVKKPGASVKVSCKASGYIFTGYYMHWVRQAPGQGLEWMGM
IGPSDGSTSYAQKFQGRVTMTRDTSTSTVYMELSSLRSEDTAVYYCARED
DSMDVWGKGTTVTVSS,
QVQLVQSGAEVKKPGASVKVSCKASGYTFIGYYMHWVRQAPGQGLEWMGM
IGPSDGSTSYAQKFQGRVTMTRDTSTSTVYMELSSLRSEDTAVYYCARDS
SGLDPWGQGTLVTVSS,
QVQLVQSGAEVKKPGASVKVSCKASGYTFTGYYMHWVRQAPGQGLEWMGM
IGPSDGSTSYAQKFQGRVTMTRDTSTSTVYMELSSLRSEDTAVYYCARGV
GNLDYWGQGTLVTVSS,
QVQLVQSGAEVKKPGASVKVSCKASGVTFSTSAISWVRQAPGQGLEWMGW
ISPYNGNTDYAQMLQGRVTMTRDTSTSTVYMELSSLRSEDTAVYYCARDA
HQYYDFWSGYYSGTYYYGMDVWGQGTTVTVSS,
QVQLVQSGAEVKKPGASVKVSCKASGGTFSNSIINWVRQAPGQGLEWMGW
MNPNSGNTNYAQKFQGRVTMTRDTSTSTVYMELSSLRSEDTAVYYCAREQ
WPSYWYFDLWGRGTLVTVSS,
QVQLVQSGAEVKKPGASVKVSCKASGGTFSTHDINWVRQAPGQGLEWMGV
INPSGGSAIYAQKFQGRVTMTRDTSTSTVYMELSSLRSEDTAVYYCARDR
GYSYGYFDYWGQGTLVTVSS,
QVQLVQSGAEVKKPGASVKVSCKASGNTFIGYYVHWVRQAPGQGLEWVGI
INPNGGSISYAQKFQGRVTMTRDTSTSTVYMELSSLRSEDTAVYYCARGS
GDPNYYYYYGLDVWGQGTTVTVSS,
QVQLVQSGAEVKKPGASVKVSCKASGYTLSYYYMHWVRQAPGQGLEWMGM
IGPSDGSTSYAQRFQGRVTMTRDTSTGTVYMELSSLRSEDTAVYYCARDT
GDHFDYWGQGTLVTVSS,
QVQLVQSGAEVKKPGASVKVSCKASGYTFTGYYMHWVRQAPGQGLEWMGI
IGPSDGSTTYAQKFQGRVTMTRDTSTSTVYMELSSLRSEDTAVYYCARAE
NGMDVWGQGTTVTVSS,
QVQLVQSGAEVKKPGASVKVSCKASGYTFTGYYVHWVRQAPGQGLEWMGI
IAPSDGSTNYAQKFQGRVTMTRDTSTSTVYMELSSLRSEDTAVYYCARDP
GGYMDVWGKGTTVTVSS,
QVQLVQSGAEVKKPGASVKVSCKASGYTFTGYYLHWVRQAPGQGLEWMGM
IGPSDGSTSYAQKFQGRVTMTRDTSTSTVYMELSSLRSEDTAVYYCARDG
DAFDIWGQGTMVTVSS,
QVQLVQSGAEVKKPGSSVKVSCKASGYTFTGYYMHWVRQAPGQGLEWMGR
ISPSDGSTTYAPKFQGRVTITADESTSTAYMELSSLRSEDTAVYYCARDM
GDAFDIWGQGTTVTVSS,
QVQLVQSGAEVKKPGASVKVSCKASGYTFTGYYMHWVRQAPGQGLEWMGM
IGPSDGSTSYAQRFQGRVTMTRDTSTSTVYMELSSLRSEDTAVYYCAREE
DGMDVWGQGTTVTVSS,
QVQLVQSGAEVKKPGASVKVSCKASGYTLSYYYMHWVRQAPGQGLEWMGM
IGPSDGSTSYAQRFQGRVTMTRDTSTGTVYMELSSLRSEDTAVYYCARDT
GDHFDYWGQGTLVTVSS,
QVQLVQSGAEVKKPGSSVKVSCKASGGTFNNFAISWVRQAPGQGLEWMGG
IIPIFDATNYAQKFQGRVTFTADESTSTAYMELSSLRSEDTAVYYCARGE
YSSGFFFVGWFDLWGRGTQVTVSS,
and
QVQLVQSGAEVKKPGASVKVSCKASGYNFTGYYMHWVRQAPGQGLEWMGI
IAPSDGSTNYAQKFQGRVTMTRDTSTSTVYMELSSLRSEDTAVYYCARET
GDDAFDIWGQGTMVTVSS.

[0037] In some embodiments, the ABP comprises a VL sequence selected:

DIQMTQSPSSLSASVGDRVTITCRASQGISNYLAWYQQKPGKAPKLLIYA
ASSLQGGVPSRFSGSGSGTDFTLTISSLQPEDFATYYCQQYFTTPYTFGQ
GTKLEIK,
DIQMTQSPSSLSASVGDRVTITCRASQSISRWLAWYQQKPGKAPKLLIFD
ASRLQSGVPSRFSGSGSGTDFTLTISSLQPEDFATYYCQQAEAFPYTFGQ
GTKVEIK,
DIQMTQSPSSLSASVGDRVTITCRASQSISSYLNWYQQKPGKAPKLLIYA
ASSLQSGVPSRFSGSGSGTDFTLTISSLQPEDFATYYCQQSYSTPITFGQ
GTRLEIK,
DIQMTQSPSSLSASVGDRVTITCRASQSISNYLNWYQQKPGKAPKLLIYK
ASSLESGVPSRFSGSGSGTDFTLTISSLQPEDFATYYCQQSYIIPYTFGQ
GTKLEIK,
DIQMTQSPSSLSASVGDRVTITCRASQSISNYLNWYQQKPGKAPKLLIYA
ASSLQSGVPSRFSGSGSGTDFTLTISSLQPEDFATYYCHQTYSTPLTFGQ
GTKVEIK,
DIQMTQSPSSLSASVGDRVTITCRASQGISNYLAWYQQKPGKAPKLLIYS
ASNLQSGVPSRFSGSGSGTDFTLTISSLQPEDFATYYCQQAYSFPWTFGQ
GTKVEIK,
DIQMTQSPSSLSASVGDRVTITCRASQNISSYLNWYQQKPGKAPKLLIYA
ASSLQSGVPSRFSGSGSGTDFTLTISSLQPEDFATYYCQQGYSTPLTFGQ
GTRLEIK,
DIQMTQSPSSLSASVGDRVTITCRASQDISRYLAWYQQKPGKAPKLLIYD
ASNLETGVPSRFSGSGSGTDFTLTISSLQPEDFATYYCQQANSFPRTFGQ
GTKVEIK,
DIQMTQSPSSLSASVGDRVTITCQASQDISNYLNWYQQKPGKAPKLLIYA
ASNLQSGVPSRFSGSGSGTDFTLTISSLQPEDFATYYCQQANSLPYTFGQ
GTKVEIK,
DIQMTQSPSSLSASVGDRVTITCRASQSISSYLNWYQQKPGKAPKLLIYA
ASTLQNGVPSRFSGSGSGTDFTLTISSLQPEDFATYYCQQSYSTPFTFGP
GTKVDIK,
DIQMTQSPSSLSASVGDRVTITCRASQRISSYLNWYQQKPGKAPKLLIYS
ASTLQSGVPSRFSGSGSGTDFTLTISSLQPEDFATYYCQQSYSTPFTFGP
GTKVDIK,
DIQMTQSPSSLSASVGDRVTITCRASQSISSYLAWYQQKPGKAPKLLIYD
ASKLETGVPSRFSGSGSGTDFTLTISSLQPEDFATYYCQQSYGVPTFGQG
TKLEIK,
DIQMTQSPSSLSASVGDRVTITCRASQGISSWLAWYQQKPGKAPKLLIYD
ASNLETGVPSRFSGSGSGTDFTLTISSLQPEDFATYYCQQSYSTPLTFGG
GTKVEIK,
DIQMTQSPSSLSASVGDRVTITCRASQSISSYLNWYQQKPGKAPKLLIYA
ASSLQSGVPSRFSGSGSGTDFTLTISSLQPEDFATYYCQQSYSTPLTFGG
GTKVEIK,
DIQMTQSPSSLSASVGDRVTITCRASQGISTYLAWYQQKPGKAPKLLIYD
ASSLQSGVPSRFSGSGSGTDFTLTISSLQPEDFATYYCQQYYSYPWTFGQ
GTRLEIK,
DIQMTQSPSSLSASVGDRVTITCRASQSISSYLNWYQQKPGKAPKLLIYA
ASTLQNGVPSRFSGSGSGTDFTLTISSLQPEDFATYYCQQSYSTPFTFGP
GTKVDIK,
DIVMTQSPLSLPVTPGEPASISCRSSQSLLHSNGYNYLDWYLQKPGQSPQ
LLIYLGSNRASGVPDRFSGSGSGTDFTLKISRVEAEDVGVYYCMQTLKTP
LSFGGGTKVEIK,
and
DIQMTQSPSSLSASVGDRVTITCRASQSISSYLNWYQQKPGKAPKLLIYA
ASSLQSGVPSRFSGSGSGTDFTLTISSLQPEDFATYYCQQSYSTPLTFGG
GTKVEIK.

[0038] In some embodiments, the ABP comprises the VH sequence and VL sequence from the scFv designated R3G10-P1A07, R3G10-P1B07, R3G10-P1E12, R3G10-P1F06, R3G10-P1H01, R3G10-P1H08, R3G10-P2C04, R3G10-P2G11, R3G10-P3E04, R3G10-P4A02, R3G10-P4C05, R3G10-P4D04, R3G10-P4D10, R3G10-P4E07, R3G10-P4E12, R3G10-P4G06, R3G10-P5A08, or R3G10-P5C08.

[0039] In some embodiments, the ABP binds to any one or more of amino acid positions 4, 6, and 7 of the restricted peptide ASSLPTTMNY.

[0040] In some embodiments, the ABP binds to any one or more of amino acid positions 49-56 of HLA subtype A*01:01.

[0041] Also provided herein is an isolated antigen binding protein (ABP) that specifically binds to a human leukocyte antigen (HLA)-PEPTIDE target, wherein the HLA-PEPTIDE target comprises an HLA-restricted peptide complexed with an HLA Class I molecule, wherein the HLA-restricted peptide is located in in the peptide binding groove of an α1/α2 portion of the HLA Class I molecule, and wherein the HLA-PEPTIDE target is selected from Table A.

[0042] In some embodiments, the HLA-restricted peptide is between about 5-15 amino acids in length. In some embodiments, the HLA-restricted peptide is between about 8-12 amino acids in length.

[0043] In some embodiments, the ABP comprises an antibody or antigen-binding fragment thereof. In some embodiments, the antigen binding protein is linked to a scaffold, optionally the scaffold comprises serum albumin or Fc, optionally wherein Fc is human Fc and is an IgG (IgG1, IgG2, IgG3, IgG4), an IgA (IgA1, IgA2), an IgD, an IgE, or an IgM isotype Fc. In some embodiments, the antigen binding protein is linked to a scaffold via a linker, optionally the linker is a peptide linker, optionally the peptide linker is a hinge region of a human antibody. In some embodiments, the antigen binding protein comprises an Fv fragment, a Fab fragment, a F(ab′)2 fragment, a Fab′ fragment, an scFv fragment, an scFv-Fc fragment, and/or a single-domain antibody or antigen binding fragment thereof. In some embodiments, the antigen binding protein comprises an scFv fragment. In some embodiments, the antigen binding protein comprises one or more antibody complementarity determining regions (CDRs), optionally six antibody CDRs. In some embodiments, the antigen binding protein comprises an antibody. In some embodiments, the antigen binding protein is a monoclonal antibody. In some embodiments, the antigen binding protein is a humanized, human, or chimeric antibody. In some embodiments, the antigen binding protein is multispecific, optionally bispecific. In some embodiments, the antigen binding protein binds greater than one antigen or greater than one epitope on a single antigen. In some embodiments, the antigen binding protein comprises a heavy chain constant region of a class selected from IgG, IgA, IgD, IgE, and IgM. In some embodiments, the antigen binding protein comprises a heavy chain constant region of the class human IgG and a subclass selected from IgG1, IgG4, IgG2, and IgG3. In some embodiments, the antigen binding protein comprises one or more modifications that extend half-life. In some embodiments, the antigen binding protein comprises a modified Fc, optionally the modified Fc comprises one or more mutations that extend half-life, optionally the one or more mutations that extend half-life is YTE.

[0044] In some embodiments of the isolated ABP, the ABP comprises a T cell receptor (TCR) or an antigen-binding portion thereof. In some embodiments, the TCR or antigen-binding portion thereof comprises a TCR variable region. In some embodiments, the TCR or antigen-binding portion thereof comprises one or more TCR complementarity determining regions (CDRs).

[0045] In some embodiments, the TCR comprises an alpha chain and a beta chain. In some embodiments, the TCR comprises a gamma chain and a delta chain.

[0046] In some embodiments, the antigen binding protein is a portion of a chimeric antigen receptor (CAR) comprising: an extracellular portion comprising the antigen binding protein; and an intracellular signaling domain. In some embodiments, the antigen binding protein comprises an scFv and the intracellular signaling domain comprises an immunoreceptor tyrosine-based activation motif (ITAM). In some embodiments, the intracellular signaling domain comprises a signaling domain of a zeta chain of a CD3-zeta (CD3) chain.

[0047] In some embodiments, the ABP further comprises a transmembrane domain linking the extracellular domain and the intracellular signaling domain. In some embodiments, the transmembrane domain comprises a transmembrane portion of CD28.

[0048] In some embodiments, the ABP further comprises an intracellular signaling domain of a T cell costimulatory molecule. In some embodiments, the T cell costimulatory molecule is CD28, 4-1BB, OX-40, ICOS, or any combination thereof.

[0049] In some embodiments of an ABP comprising a TCR or antigen-binding portion thereof, the HLA Class I molecule is HLA subtype A*01:01 and the HLA-restricted peptide comprises the sequence ASSLPTTMNY. In some embodiments, the HLA Class I molecule is HLA subtype A*01:01 and the HLA-restricted peptide consists of the sequence ASSLPTTMNY. In some embodiments, the ABP comprises a TCR alpha CDR3 sequence selected from Table 15. In some embodiments, the ABP comprises a TCR beta CDR3 sequence selected from Table 15. In some embodiments, the ABP comprises an alpha CDR3 and a beta CDR3 sequence from any one of TCR clonotype ID #s: 1-344. In some embodiments, the ABP comprises a TCR alpha variable (TRAV) amino acid sequence, a TCR alpha joining (TRAJ) amino acid sequence, a TCR beta variable (TRBV) amino acid sequence, a TCR beta diversity (TRBD) amino acid sequence, and a TCR beta joining (TRBJ) amino acid sequence, wherein each of the TRAV, TRAJ, TRBV, TRBD, and TRBJ amino acid sequences are at least 95%, 96%, 97%, 98%, 99%, or 100% identical to the corresponding TRAV, TRAJ, TRBV, TRBD, and TRBJ amino acid sequences for any one of the TCR clonotypes selected from TCR clonotype ID #s: 1-344.

[0050] In some embodiments, the ABP comprises a TCR alpha constant (TRAC) amino acid sequence. In some embodiments, the ABP comprises a TCR beta constant (TRBC) amino acid sequence.

[0051] In some embodiments, the ABP comprises a TCR alpha VJ sequence having at least 95%, 96%, 97%, 98%, 99%, or 100% identity to an alpha VJ sequence selected from Table 16. In some embodiments, the ABP comprises a TCR beta V(D)J sequence having at least 95%, 96%, 97%, 98%, 99%, or 100% identity to a beta V(D)J sequence selected from Table 16. In some embodiments, the ABP comprises a TCR alpha VJ amino acid sequence and a TCR beta V(D)J amino acid sequence, wherein each of the TCR alpha VJ and the TCR beta V(D)J amino acid sequences are at least 95%, 96%, 97%, 98%, 99%, or 100% identical to the corresponding TCR alpha VJ and TCR beta V(D)J amino acid sequences for any one of the TCR clonotypes selected from TCR clonotype ID #s: 1-344.

[0052] In some embodiments of an ABP comprising a TCR or antigen-binding portion thereof, the HLA Class I molecule is HLA subtype A*01:01 and the HLA-restricted peptide comprises the sequence HSEVGLPVY. In some embodiments, the HLA Class I molecule is HLA subtype A*01:01 and the HLA-restricted peptide consists of the sequence HSEVGLPVY.

[0053] In some embodiments, the ABP comprises a TCR alpha CDR3 sequence selected from Table 18. In some embodiments, the ABP comprises a TCR beta CDR3 sequence selected from Table 18. In some embodiments, the ABP comprises an alpha CDR3 and a beta CDR3 sequence from any one of TCR clonotype ID #s: 345-447. In some embodiments, the ABP comprises a TCR alpha variable (TRAV) amino acid sequence, a TCR alpha joining (TRAJ) amino acid sequence, a TCR beta variable (TRBV) amino acid sequence, a TCR beta diversity (TRBD) amino acid sequence, and a TCR beta joining (TRBJ) amino acid sequence, wherein each of the TRAV, TRAJ, TRBV, TRBD, and TRBJ amino acid sequences are at least 95%, 96%, 97%, 98%, 99%, or 100% identical to the corresponding TRAV, TRAJ, TRBV, TRBD, and TRBJ amino acid sequences for any one of the TCR clonotypes selected from TCR clonotype ID #s: 345-447. In some embodiments, the ABP comprises a TCR alpha constant (TRAC) amino acid sequence. In some embodiments, the ABP comprises a TCR beta constant (TRBC) amino acid sequence.

[0054] In some embodiments, the ABP comprises a TCR alpha VJ sequence having at least 95%, 96%, 97%, 98%, 99%, or 100% identity to an alpha VJ sequence selected from Table 19. In some embodiments, the ABP comprises a TCR beta V(D)J sequence having at least 95%, 96%, 97%, 98%, 99%, or 100% identity to a beta V(D)J sequence selected from Table 19. In some embodiments, the ABP comprises a TCR alpha VJ amino acid sequence and a TCR beta V(D)J amino acid sequence, wherein each of the TCR alpha VJ and the TCR beta V(D)J amino acid sequences are at least 95%, 96%, 97%, 98%, 99%, or 100% identical to the corresponding TCR alpha VJ and TCR beta V(D)J amino acid sequences for any one of the TCR clonotypes selected from TCR clonotype ID #s: 345-447.

[0055] Also provided herein is an isolated HLA-PEPTIDE target, wherein the HLA-PEPTIDE target comprises an HLA-restricted peptide complexed with an HLA Class I molecule, wherein the HLA-restricted peptide is located in in the peptide binding groove of an α1/α2 heterodimer portion of the HLA Class I molecule, and wherein the HLA-PEPTIDE target is selected from Table A.

[0056] In some embodiments, the HLA Class I molecule is HLA subtype B*35:01 and the HLA-restricted peptide comprises the sequence EVDPIGHVY, the HLA Class I molecule is HLA subtype A*02:01 and the HLA-restricted peptide comprises the sequence AIFPGAVPAA, or the HLA Class I molecule is HLA subtype A*01:01 and the HLA-restricted peptide comprises the sequence ASSLPTTMNY. In some embodiments, the HLA Class I molecule is HLA subtype B*35:01 and the HLA-restricted peptide consists of the sequence EVDPIGHVY, the HLA Class I molecule is HLA subtype A*02:01 and the HLA-restricted peptide consists of the sequence AIFPGAVPAA, or the HLA Class I molecule is HLA subtype A*01:01 and the HLA-restricted peptide consists of the sequence ASSLPTTMNY.

[0057] In some embodiments, the HLA-restricted peptide is between about 5-15 amino acids in length. In some embodiments, the HLA-restricted peptide is between about 8-12 amino acids in length.

[0058] In some embodiments, the association of the HLA subtype with the restricted peptide stabilizes non-covalent association of the β2-microglobulin subunit of the HLA subtype with the α-subunit of the HLA subtype. In some embodiments, the stabilized association of the β2-microglobulin subunit of the HLA subtype with the α-subunit of the HLA subtype is demonstrated by conditional peptide exchange.

[0059] In some embodiments, the isolated HLA-PEPTIDE target further comprises an affinity tag. In some embodiments, the affinity tag is a biotin tag. In some embodiments, the isolated HLA-PEPTIDE target is complexed with a detectable label. In some embodiments, the detectable label comprises a β2-microglobulin binding molecule. In some embodiments, the β2-microglobulin binding molecule is a labeled antibody. In some embodiments, the labeled antibody is a fluorochrome-labeled antibody.

[0060] Also provided herein is a composition comprising an HLA-PEPTIDE target as described herein attached to a solid support. In some embodiments, the solid support comprises a bead, well, membrane, tube, column, plate, sepharose, magnetic bead, or chip.

[0061] In some embodiments, the HLA-PEPTIDE target comprises a first member of an affinity binding pair and the solid support comprises a second member of the affinity binding pair. In some embodiments, the first member is streptavidin and the second member is biotin.

[0062] Also provided herein is a reaction mixture comprising an isolated and purified α-subunit of an HLA subtype from an HLA-PEPTIDE target as described in Table A; an isolated and purified β2-microglobulin subunit of the HLA subtype; an isolated and purified restricted peptide from the HLA-PEPTIDE target as described in Table A; and a reaction buffer.

[0063] Also provided herein is a reaction mixture comprising an isolated HLA-PEPTIDE target as described herein; and a plurality of T-cells isolated from a human subject. In some embodiments, the T-cells are CD8+ T-cells.

[0064] Also provided herein is an isolated polynucleotide comprising a first nucleic acid sequence encoding an HLA-restricted peptide as described herein, operably linked to a promoter, and a second nucleic acid sequence encoding an HLA subtype as described herein, wherein the second nucleic acid is operably linked to the same or different promoter as the first nucleic acid sequence, and wherein the encoded peptide and encoded HLA subtype form an HLA/peptide complex as described herein.

[0065] Also provided herein is a kit for expressing a stable HLA-PEPTIDE target as described herein, comprising a first construct comprising a first nucleic acid sequence encoding an HLA-restricted peptide described herein operably linked to a promoter; and instructions for use in expressing the stable HLA-PEPTIDE complex. In some embodiments, the first construct further comprises a second nucleic acid sequence encoding an HLA subtype as defined herein. In some embodiments, the second nucleic acid sequence is operably linked to the same or a different promoter. In some embodiments, the kit further comprises a second construct comprising a second nucleic acid sequence encoding an HLA subtype as described herein. In some embodiments, one or both of the first and second constructs are lentiviral vector constructs.

[0066] Also provided herein is a host cell comprising a heterologous HLA-PEPTIDE target as described herein. Also provided herein is a host cell which expresses an HLA subtype as defined by any one of the targets in Table A. Also provided herein is a host cell comprising a polynucleotide encoding an HLA-restricted peptide as described in Table A, e.g., a polynucleotide encoding an HLA-restricted peptide described herein.

[0067] In some embodiments, the host cell does not comprise endogenous MHC. In some embodiments, the host cell comprises an exogenous HLA. In some embodiments, the host cell is a K562 or A375 cell.

[0068] In some embodiments, the host cell is a cultured cell from a tumor cell line. In some embodiments, the tumor cell line expresses an HLA subtype as defined by any one of the targets in Table A. In some embodiments, the tumor cell line expresses a gene target and an HLA subtype as defined by any one of the targets in Table A. For example, the tumor cell line may express the gene ABCB5 and HLA subtype HLA-C*16:01, as defined by target #1 in Table A. In some embodiments, the tumor cell line is selected from a database or catalog of tumor cell lines. The selection may be based upon known expression of a gene target from any of the targets listed in Table A. The selection may be based upon known expression of an HLA subtype from any of the targets listed in Table A. The selection may be based upon known expression of a gene target and HLA subtype from any of the targets listed in Table A. One exemplary catalog of tumor cell lines includes, e.g., the American Type Culture Collection (ATCC), available at https://www.atcc.org/Products/Cells_and_Microorganisms/By_Disease_Model/Cancer/Tumor_Cell_Panels/Panels_by_Tissue_Type.aspx. Another exemplary catalog of tumor cell lines, based on HLA type and HLA expression, is described in Boegel, Sebastian et al. “A Catalog of HLA Type, HLA Expression, and Neo-Epitope Candidates in Human Cancer Cell Lines.” Oncoimmunology 3.8 (2014): e954893. PMC. Web. 8 Oct. 2018, which is hereby incorporated by reference in its entirety. In some embodiments, the tumor cell line is selected from the group consisting of HCC-1599, NCI-H510A, A375, LN229, NCI-H358, ZR-75-1, MS751, 0E19, MOR, BV173, MCF-7, NCI-H82, Colo829, and NCI-H146.

[0069] Also provided herein is a cell culture system comprising a host cell as defined herein, and a cell culture medium. In some embodiments, the host cell expresses an HLA subtype as defined by any one of the targets in Table A, and wherein the cell culture medium comprises a restricted peptide as defined by the target in Table A. In some embodiments, the host cell is a K562 cell which comprises an exogenous HLA, wherein the exogenous HLA is an HLA subtype as defined by any one of the targets in Table A, and wherein the cell culture medium comprises a restricted peptide as defined by the target in Table A.

[0070] In some embodiments of the ABP, the antigen binding protein binds to the HLA-PEPTIDE target through a contact point with the HLA Class I molecule and through a contact point with the HLA-restricted peptide of the HLA-PEPTIDE target. In some embodiments of the ABP, the binding of the ABP to the amino acid positions on the restricted peptide or HLA subtype, or the contact points or residues that impact binding, directly or indirectly, of the HLA-PEPTIDE target with the ABP are determined via positional scanning, hydrogen-deuterium exchange, or protein crystallography.

[0071] In some embodiments, the ABP may be for use as a medicament. In some embodiments, the ABP may be for use in treatment of cancer, optionally wherein the cancer expresses or is predicted to express the HLA-PEPTIDE target. In some embodiments, the ABP may be for use in treatment of cancer, wherein the cancer is selected from a solid tumor and a hematological tumor.

[0072] Also provided herein is an ABP which is a conservatively modified variant of the ABP as described herein. Also provided herein is an antigen binding protein (ABP) that competes for binding with the antigen binding protein as described herein. Also provided herein is an antigen binding protein (ABP) that binds the same HLA-PEPTIDE epitope bound by the antigen binding protein as described herein.

[0073] Also provided herein is an engineered cell expressing a receptor comprising the antigen binding protein as described herein. In some embodiments, the engineered cell is a T cell, optionally a cytotoxic T cell (CTL). In some embodiments of the engineered cell, the antigen binding protein is expressed from a heterologous promoter.

[0074] Also provided herein is an isolated polynucleotide or set of polynucleotides encoding the antigen binding protein described herein or an antigen-binding portion thereof.

[0075] Also provided herein is an isolated polynucleotide or set of polynucleotides encoding the HLA/peptide targets described herein.

[0076] Also provided herein is a vector or set of vectors comprising the polynucleotide or set of polynucleotides described herein.

[0077] Also provided herein is a host cell comprising the polynucleotide or set of polynucleotides a described herein, or the vector or set of vectors described herein, optionally wherein the host cell is CHO or HEK293, or optionally wherein the host cell is a T cell.

[0078] Also provided herein is a method of producing an antigen binding protein comprising expressing the antigen binding protein with the host cell described herein and isolating the expressed antigen binding protein.

[0079] Also provided herein is a pharmaceutical composition comprising the antigen binding protein as described herein and a pharmaceutically acceptable excipient.

[0080] Also provided herein is a method of treating cancer in a subject, comprising administering to the subject an effective amount of the antigen binding protein as described herein or a pharmaceutical composition described herein, optionally wherein the cancer is selected from a solid tumor and a hematological tumor. In some embodiments, the cancer expresses or is predicted to express the HLA-PEPTIDE target.

[0081] Also provided herein is a kit comprising the antigen binding protein described herein or a pharmaceutical composition described herein and instructions for use.

[0082] Also provided herein is a composition comprising at least one HLA-PEPTIDE target described herein and an adjuvant.

[0083] Also provided herein is a composition comprising at least one HLA-PEPTIDE target described herein and a pharmaceutically acceptable excipient.

[0084] Also provided herein is a composition comprising an amino acid sequence comprising a polypeptide of at least one HLA-PEPTIDE target disclosed in Table A, optionally the amino acid sequence consisting essentially of or consisting of the polypeptide.

[0085] Also provided herein is a virus comprising the isolated polynucleotide or set of polynucleotides as described herein. In some embodiments, the virus is a filamentous phage.

[0086] Also provided herein is a yeast cell comprising the isolated polynucleotide or set of polynucleotides as described herein.

[0087] Also provided herein is a method of identifying an antigen binding protein as described herein, comprising providing at least one HLA-PEPTIDE target listed in Table A; and binding the at least one target with the antigen binding protein, thereby identifying the antigen binding protein.

[0088] In some embodiments, the antigen binding protein is present in a phage display library comprising a plurality of distinct antigen binding proteins. In some embodiments, the phage display library is substantially free of antigen binding proteins that non-specifically bind the HLA of the HLA-PEPTIDE target.

[0089] In some embodiments, the antigen binding protein is present in a TCR library comprising a plurality of distinct TCRs or antigen binding fragments thereof.

[0090] In some embodiments, the binding step is performed more than once, optionally at least three times.

[0091] In some embodiments, the method further comprises contacting the antigen binding protein with one or more peptide-HLA complexes that are distinct from the HLA-PEPTIDE target to determine if the antigen binding protein selectively binds the HLA-PEPTIDE target, optionally wherein selectivity is determined by measuring binding affinity of the antigen binding protein to soluble target HLA-PEPTIDE complexes versus soluble HLA-PEPTIDE complexes that are distinct from target complexes, optionally wherein selectivity is determined by measuring binding affinity of the antigen binding protein to target HLA-PEPTIDE complexes expressed on the surface of one or more cells versus HLA-PEPTIDE complexes that are distinct from target complexes expressed on the surface of one or more cells.

[0092] Also provided herein is a method of identifying an antigen binding protein as described herein, comprising obtaining at least one HLA-PEPTIDE target listed in Table A; administering the HLA-PEPTIDE target to a subject, optionally in combination with an adjuvant; and isolating the antigen binding protein from the subject.

[0093] In some embodiments, isolating the antigen binding protein comprises screening the serum of the subject to identify the antigen binding protein.

[0094] In some embodiments, the method further comprises contacting the antigen binding protein with one or more peptide-HLA complexes that are distinct from the HLA-PEPTIDE target to determine if the antigen binding protein selectively binds to the HLA-PEPTIDE target, optionally wherein selectivity is determined by measuring binding affinity of the antigen binding protein to soluble target HLA-PEPTIDE complexes versus soluble HLA-PEPTIDE complexes that are distinct from target complexes, optionally wherein selectivity is determined by measuring binding affinity of the antigen binding protein to target HLA-PEPTIDE complexes expressed on the surface of one or more cells versus HLA-PEPTIDE complexes that are distinct from target complexes expressed on the surface of one or more cells.

[0095] In some embodiments, the subject is a mouse, a rabbit, or a llama.

[0096] In some embodiments, isolating the antigen binding protein comprises isolating a B cell from the subject that expresses the antigen binding protein and optionally directly cloning sequences encoding the antigen binding protein from the isolated B cell. In some embodiments, the method further comprises creating a hybridoma using the B cell. In some embodiments, the method further comprises cloning CDRs from the B cell. In some embodiments, the method further comprises immortalizing the B cell, optionally via Epstein-Barr virus (EBV) transformation. In some embodiments, the method further comprises creating a library that comprises the antigen binding protein of the B cell, optionally wherein the library is phage display or yeast display.

[0097] In some embodiments, the method further comprises humanizing the antigen binding protein.

[0098] Also provided herein is a method of identifying an antigen binding protein as described herein, comprising obtaining a cell comprising the antigen binding protein; contacting the cell with an HLA-multimer comprising at least one HLA-PEPTIDE target listed in Table A; and identifying the antigen binding protein via binding between the HLA-multimer and the antigen binding protein.

[0099] Also provided herein is a method of identifying an antigen binding protein as described herein, comprising obtaining one or more cells comprising the antigen binding protein; activating the one or more cells with at least one HLA-PEPTIDE target listed in Table A presented on a natural or an artificial antigen presenting cell (APC); and identifying the antigen binding protein via selection of one or more cells activated by interaction with at least one HLA-PEPTIDE target listed in Table A. In some embodiments, the cell is a T cell, optionally a CTL. In some embodiments, the method further comprises isolating the cell, optionally using flow cytometry, magnetic separation, or single cell separation. In some embodiments, the method further comprises sequencing the antigen binding protein.

[0100] Also provided herein is a method of identifying an antigen binding protein as described herein, comprising providing at least one HLA-PEPTIDE target listed in Table A; and identifying the antigen binding protein using the target.

### BRIEF DESCRIPTION OF THE SEVERAL VIEWS OF THE DRAWINGS

[0101] These and other features, aspects, and advantages of the present invention will become better understood with regard to the following description, and accompanying drawings, where:

[0102] FIG. 1 shows the general structure of a Human Leukocyte Antigen (HLA) Class I molecule. By User atropos235 on en.wikipedia—Own work, CC BY 2.5, https://commons.wikimedia.org/w/index.php?curid=1805424

[0103] FIG. 2 depicts exemplary construct elements for cloning TCRs into expression systems for therapy development.

[0104] FIG. 3 shows the target and minipool negative control design for HLA-PEPTIDE target “G5”.

[0105] FIG. 4 shows the target and minipool negative control design for HLA-PEPTIDE targets “G8” and “G10”.

[0106] FIGS. 5A and 5B show HLA stability results for the G5 counterscreen “minipool” and G5 target.

[0107] FIGS. 6A-6E show HLA stability results for the G5 “complete” pool counterscreen peptides.

[0108] FIGS. 7A and 7B show HLA stability results for counterscreen peptides and G8 target.

[0109] FIGS. 8A and 8B show HLA stability results for the G10 counterscreen “minipool” and G10 target.

[0110] FIGS. 9A-9D show HLA stability results for the additional G8 and G10 “complete” pool counterscreen peptides.

[0111] FIGS. 10A-10C show phage supernatant ELISA results, indicating progressive enrichment of G5-, G8 and G10 binding phage with successive panning rounds.

[0112] FIG. 11 shows a flow chart describing the antibody selection process, including criteria and intended application for the scFv, Fab, and IgG formats.

[0113] FIGS. 12A, 12B, and 12C depict bio-layer interferometry (BLI) results for Fab clone G5-P7A05 to HLA-PEPTIDE target B*35:01-EVDPIGHVY, Fab clones R3G8-P2C10 and G8-P1C11 to HLA-PEPTIDE target A*02:01-AIFPGAVPAA, and Fab clone R3G10-P1B07 to HLA-PEPTIDE target A*01:01-ASSLPTTMNY.

[0114] FIG. 13 shows a general experimental design for the positional scanning experiments.

[0115] FIG. 14A shows stability results for the G5 positional variant-HLAs.

[0116] FIG. 14B shows binding affinity of Fab clone G5-P7A05 to the G5 positional variant-HLAs.

[0117] FIG. 15A shows stability results for the G8 positional variant-HLAs.

[0118] FIG. 15B shows binding affinity of Fab clone G8-P2C10 to the G8 positional variant-HLAs.

[0119] FIG. 16A shows stability results for the G10 positional variant-HLAs.

[0120] FIG. 16B shows binding affinity of Fab clone G10-P1B07 to the G10 positional variant-HLAs.

[0121] FIGS. 17A, 17B, and 17C show representative examples of antibody binding to either G5-, G8- or G10-presenting K562 cells, as detected by flow cytometry.

[0122] FIGS. 18A-18C show histogram plots of K562 cell binding to generated target-specific antibodies.

[0123] FIGS. 19A-19C show histogram plots of cell binding assays using tumor cell lines which express HLA subtypes and target genes of selected HLA-PEPTIDE targets.

[0124] FIGS. 20A and 20B shows number of target-specific T cells (A) and number of target-specific unique TCR clonotypes (B) from tested donors.

[0125] FIG. 21A shows an exemplary heatmap for scFv G8-P1H08, visualized across the HLA portion of HLA-PEPTIDE target G8 in its entirety using a consolidated perturbation view. FIG. 21B shows an example of HDX data from scFv G8-P1H08 plotted on a crystal structure PDB5bs0.

[0126] FIG. 22A shows heat maps across the HLA α1 helix for all ABPs tested for HLA-PEPTIDE target G8 (HLA-A*02:01_AIFPGAVPAA). FIG. 22B shows heat maps across the HLA α2 helix for all ABPs tested for HLA-PEPTIDE target G8 (HLA-A*02:01_AIFPGAVPAA. FIG. 22C shows resulting heat maps across the restricted peptide AIFPGAVPAA for all ABPs tested.

[0127] FIG. 23A shows an exemplary heatmap for scFv R3G10-P2G11, visualized across the HLA portion of HLA-PEPTIDE target G10 in its entirety using a consolidated perturbation view.

[0128] FIG. 23B shows an example of HDX data from scFv R3G10-P2G11 plotted on a crystal structure PDB5bs0.

[0129] FIG. 24A shows resulting heat maps across the HLA α1 helix for all ABPs tested for HLA-PEPTIDE target G10 (HLA-A*01:01_ASSLPTTMNY). FIG. 24B shows resulting heat maps across the HLA α2 helix for all ABPs tested for HLA-PEPTIDE target G10 (HLA-A*01:01_ASSLPTTMNY). FIG. 24C shows resulting heat maps across the restricted peptide ASSLPTTMNY for all ABPs tested.

[0130] FIG. 25 depicts exemplary spectral data for peptide EVDPIGHVY. The figure contains the peptide fragmentation information as well as information related to the patient sample, including HLA types.

[0131] FIG. 26 depicts exemplary spectral data for peptide AIFPGAVPAA. The figure contains the peptide fragmentation information as well as information related to the patient sample, including HLA types.

[0132] FIG. 27 depicts exemplary spectral data for peptide ASSLPTTMNY. The figure contains the peptide fragmentation information as well as information related to the patient sample, including HLA types.

[0133] FIGS. 28A and 28B depict size exclusion chromatography fractions (A) and SDS-PAGE analysis of the chromatography fractions under reducing conditions (B).

[0134] FIG. 29 depicts photomicrographs of an exemplary crystal of a complex comprising Fab clone G8-P1C11 and HLA-PEPTIDE target A*02:01_AIFPGAVPAA (“G8”).

[0135] FIG. 30 depicts the overall structure of a complex formed by binding of Fab clone G8-P1C11 to HLA-PEPTIDE target A*02:01_AIFPGAVPAA (“G8”).

[0136] FIG. 31 depicts a refinement electron density region of the crystal structure of Fab clone G8-P1C11 complexed with HLA-PEPTIDE target A*02:01_AIFPGAVPAA (“G8”), the region depicted corresponding to the restricted peptide AIFPGAVPAA.

[0137] FIG. 32 depicts a LigPlot of the interactions between the HLA and restricted peptide. The crystal structure corresponds to Fab clone G8-P1C11 complexed with HLA-PEPTIDE target A*02:01_AIFPGAVPAA (“G8”).

[0138] FIG. 33 depicts a plot of interacting residues between the Fab VH and VL chains and the restricted peptide. The crystal structure corresponds to Fab clone G8-P1C11 complexed with HLA-PEPTIDE target A*02:01_AIFPGAVPAA (“G8”).

[0139] FIG. 34 depicts a LigPlot of the interactions between the restricted peptide and Fab chains. The crystal structure corresponds to Fab clone G8-P1C11 complexed with HLA-PEPTIDE target A*02:01_AIFPGAVPAA (“G8”).

[0140] FIG. 35 depicts a LigPlot of the interactions between the Fab VH chain and the HLA. The crystal structure corresponds to Fab clone G8-P1C11 complexed with HLA-PEPTIDE target A*02:01_AIFPGAVPAA (“G8”).

[0141] FIG. 36 depicts a LigPlot of the interactions between the Fab VL chain and the HLA. The crystal structure corresponds to Fab clone G8-P1C11 complexed with HLA-PEPTIDE target A*02:01_AIFPGAVPAA (“G8”).

[0142] FIG. 37 depicts the interface summary of a Pisa analysis of interactions between HLA and restricted peptide. The crystal structure corresponds to Fab clone G8-P1C11 complexed with HLA-PEPTIDE target A*02:01_AIFPGAVPAA (“G8”).

[0143] FIG. 38 depicts Pisa analysis of the interacting residues between the HLA and restricted peptide. The crystal structure corresponds to Fab clone G8-P1C11 complexed with HLA-PEPTIDE target A*02:01_AIFPGAVPAA (“G8”).

[0144] FIG. 39 depicts Pisa analysis of the interacting residues between the Fab VH chain and the restricted peptide. The crystal structure corresponds to Fab clone G8-P1C11 complexed with HLA-PEPTIDE target A*02:01_AIFPGAVPAA (“G8”).

[0145] FIG. 40 depicts Pisa analysis of the interacting residues between the Fab VL chain and the restricted peptide. The crystal structure corresponds to Fab clone G8-P1C11 complexed with HLA-PEPTIDE target A*02:01_AIFPGAVPAA (“G8”).

[0146] FIG. 41 depicts the interface summary of a Pisa analysis of interactions between the Fab VH chain and HLA. The crystal structure corresponds to Fab clone G8-P1C11 complexed with HLA-PEPTIDE target A*02:01_AIFPGAVPAA (“G8”).

[0147] FIG. 42 depicts Pisa analysis of the interacting residues between the Fab VH chain and HLA. The crystal structure corresponds to Fab clone G8-P1C11 complexed with HLA-PEPTIDE target A*02:01_AIFPGAVPAA (“G8”).

[0148] FIG. 43 depicts the interface summary of a Pisa analysis of interactions between the Fab VL chain and HLA. The crystal structure corresponds to Fab clone G8-P1C11 complexed with HLA-PEPTIDE target A*02:01_AIFPGAVPAA (“G8”).

[0149] FIG. 44 depicts Pisa analysis of the interacting residues between the Fab VL chain and HLA. The crystal structure corresponds to Fab clone G8-P1C11 complexed with HLA-PEPTIDE target A*02:01_AIFPGAVPAA (“G8”).

[0150] FIG. 45A depicts an exemplary heatmap of the HLA portion of the G8 HLA-PEPTIDE complex when incubated with scFv clone G8-P1C11, visualized in its entirety using a consolidated perturbation view.

[0151] FIG. 45B depicts an example of the HDX data from scFv G8-P1C11 plotted on a crystal structure of Fab clone G8-P1C11 complexed with HLA-PEPTIDE target A*02:01_AIFPGAVPAA (“G8”).

[0152] FIG. 46 depicts binding affinity of Fab clone G8-P1C11 to the G8 positional variant-HLAs.

[0153] FIG. 47 shows histogram plots of K562 cell binding to G8-P1C11, a target-specific antibody to HLA-PEPTIDE target A*02:01_AIFPGAVPAA (“G8”).

### DETAILED DESCRIPTION

[0154] Unless otherwise defined, all terms of art, notations and other scientific terminology used herein are intended to have the meanings commonly understood by those of skill in the art. In some cases, terms with commonly understood meanings are defined herein for clarity and/or for ready reference, and the inclusion of such definitions herein should not necessarily be construed to represent a difference over what is generally understood in the art. The techniques and procedures described or referenced herein are generally well understood and commonly employed using conventional methodologies by those skilled in the art, such as, for example, the widely utilized molecular cloning methodologies described in Sambrook et al., Molecular Cloning: A Laboratory Manual 4th ed. (2012) Cold Spring Harbor Laboratory Press, Cold Spring Harbor, N.Y. As appropriate, procedures involving the use of commercially available kits and reagents are generally carried out in accordance with manufacturer-defined protocols and conditions unless otherwise noted.

[0155] As used herein, the singular forms “a,” “an,” and “the” include the plural referents unless the context clearly indicates otherwise. The terms “include,” “such as,” and the like are intended to convey inclusion without limitation, unless otherwise specifically indicated.

[0156] As used herein, the term “comprising” also specifically includes embodiments “consisting of” and “consisting essentially of” the recited elements, unless specifically indicated otherwise. For example, a multispecific ABP “comprising a diabody” includes a multispecific ABP “consisting of a diabody” and a multispecific ABP “consisting essentially of a diabody.”

[0157] The term “about” indicates and encompasses an indicated value and a range above and below that value. In certain embodiments, the term “about” indicates the designated value ±10%, ±5%, or ±1%. In certain embodiments, where applicable, the term “about” indicates the designated value(s)±one standard deviation of that value(s).

[0158] The term “immunoglobulin” refers to a class of structurally related proteins generally comprising two pairs of polypeptide chains: one pair of light (L) chains and one pair of heavy (H) chains. In an “intact immunoglobulin,” all four of these chains are interconnected by disulfide bonds. The structure of immunoglobulins has been well characterized. See, e.g., Paul, Fundamental Immunology 7th ed., Ch. 5 (2013) Lippincott Williams & Wilkins, Philadelphia, Pa. Briefly, each heavy chain typically comprises a heavy chain variable region (VH) and a heavy chain constant region (C_{H}). The heavy chain constant region typically comprises three domains, abbreviated C_{H}1, C_{H}2, and C_{H}3. Each light chain typically comprises a light chain variable region (V_{L}) and a light chain constant region. The light chain constant region typically comprises one domain, abbreviated C_{L}.

[0159] The term “antigen binding protein” or “ABP” is used herein in its broadest sense and includes certain types of molecules comprising one or more antigen-binding domains that specifically bind to an antigen or epitope.

[0160] In some embodiments, the ABP comprises an antibody. In some embodiments, the ABP consists of an antibody. In some embodiments, the ABP consists essentially of an antibody. An ABP specifically includes intact antibodies (e.g., intact immunoglobulins), antibody fragments, ABP fragments, and multi-specific antibodies. In some embodiments, the ABP comprises an alternative scaffold. In some embodiments, the ABP consists of an alternative scaffold. In some embodiments, the ABP consists essentially of an alternative scaffold. In some embodiments, the ABP comprises an antibody fragment. In some embodiments, the ABP consists of an antibody fragment. In some embodiments, the ABP consists essentially of an antibody fragment. In some embodiments, the ABP comprises a TCR or antigen binding portion thereof. In some embodiments, the ABP consists of a TCR or antigen binding portion thereof. In some embodiments, the ABP consists essentially of a TCR or antigen binding portion thereof. In some embodiments, a CAR comprises an ABP. An “HLA-PEPTIDE ABP,” “anti-HLA-PEPTIDE ABP,” or “HLA-PEPTIDE-specific ABP” is an ABP, as provided herein, which specifically binds to the antigen HLA-PEPTIDE. An ABP includes proteins comprising one or more antigen-binding domains that specifically bind to an antigen or epitope via a variable region, such as a variable region derived from a B cell (e.g., antibody) or T cell (e.g., TCR).

[0161] The term “antibody” herein is used in the broadest sense and includes polyclonal and monoclonal antibodies, including intact antibodies and functional (antigen-binding) antibody fragments, including fragment antigen binding (Fab) fragments, F(ab′)2 fragments, Fab′ fragments, Fv fragments, recombinant IgG (rIgG) fragments, variable heavy chain (VH) regions capable of specifically binding the antigen, single chain antibody fragments, including single chain variable fragments (scFv), and single domain antibodies (e.g., sdAb, sdFv, nanobody) fragments. The term encompasses genetically engineered and/or otherwise modified forms of immunoglobulins, such as intrabodies, peptibodies, chimeric antibodies, fully human antibodies, humanized antibodies, and heteroconjugate antibodies, multispecific, e.g., bispecific, antibodies, diabodies, triabodies, and tetrabodies, tandem di-scFv, tandem tri-scFv. Unless otherwise stated, the term “antibody” should be understood to encompass functional antibody fragments thereof. The term also encompasses intact or full-length antibodies, including antibodies of any class or sub-class, including IgG and sub-classes thereof, IgM, IgE, IgA, and IgD.

[0162] As used herein, “variable region” refers to a variable nucleotide sequence that arises from a recombination event, for example, it can include a V, J, and/or D region of an immunoglobulin or T cell receptor (TCR) sequence from a B cell or T cell, such as an activated T cell or an activated B cell.

[0163] The term “antigen-binding domain” means the portion of an ABP that is capable of specifically binding to an antigen or epitope. One example of an antigen-binding domain is an antigen-binding domain formed by an antibody V_{H}-V_{L} dimer of an ABP. Another example of an antigen-binding domain is an antigen-binding domain formed by diversification of certain loops from the tenth fibronectin type III domain of an Adnectin. An antigen-binding domain can include antibody CDRs 1, 2, and 3 from a heavy chain in that order; and antibody CDRs 1, 2, and 3 from a light chain in that order. An antigen-binding domain can include TCR CDRs, e.g., αCDR1, αCDR2, αCDR3, βCDR1, βCDR2, and βCDR3. TCR CDRs are described herein.

[0164] The antibody V_{H} and V_{L} regions may be further subdivided into regions of hypervariability (“hypervariable regions (HVRs);” also called “complementarity determining regions” (CDRs)) interspersed with regions that are more conserved. The more conserved regions are called framework regions (FRs). Each V_{H} and V_{L} generally comprises three antibody CDRs and four FRs, arranged in the following order (from N-terminus to C-terminus): FR1-CDR1-FR2-CDR2-FR3-CDR3-FR4. The antibody CDRs are involved in antigen binding, and influence antigen specificity and binding affinity of the ABP. See Kabat et al., Sequences of Proteins of Immunological Interest 5th ed. (1991) Public Health Service, National Institutes of Health, Bethesda, Md., incorporated by reference in its entirety.

[0165] The light chain from any vertebrate species can be assigned to one of two types, called kappa (κ) and lambda (λ), based on the sequence of its constant domain.

[0166] The heavy chain from any vertebrate species can be assigned to one of five different classes (or isotypes): IgA, IgD, IgE, IgG, and IgM. These classes are also designated α, δ, ε, γ, and μ, respectively. The IgG and IgA classes are further divided into subclasses on the basis of differences in sequence and function. Humans express the following subclasses: IgG1, IgG2, IgG3, IgG4, IgA1, and IgA2.

[0167] The amino acid sequence boundaries of an antibody CDR can be determined by one of skill in the art using any of a number of known numbering schemes, including those described by Kabat et al., supra (“Kabat” numbering scheme); Al-Lazikani et al., 1997, J Mol. Biol., 273:927-948 (“Chothia” numbering scheme); MacCallum et al., 1996, J. Mol. Biol. 262:732-745 (“Contact” numbering scheme); Lefranc et al., Dev. Comp. Immunol., 2003, 27:55-77 (“IMGT” numbering scheme); and Honegge and Plückthun, J. Mol. Biol., 2001, 309:657-70 (“AHo” numbering scheme); each of which is incorporated by reference in its entirety.

[0168] Table 20 provides the positions of antibody CDR-L1, CDR-L2, CDR-L3, CDR-H1, CDR-H2, and CDR-H3 as identified by the Kabat and Chothia schemes. For CDR-H1, residue numbering is provided using both the Kabat and Chothia numbering schemes.

[0169] Antibody CDRs may be assigned, for example, using ABP numbering software, such as Abnum, available at www.bioinf.org.uk/abs/abnum/, and described in Abhinandan and Martin, Immunology, 2008, 45:3832-3839, incorporated by reference in its entirety.

TABLE 20
Residues in CDRs according to Kabat
and Chothia numbering schemes

| CDR | Kabat | Chothia |
|---|---|---|
| L1 | L24-L34 | L24-L34 |
| L2 | L50-L56 | L50-L56 |
| L3 | L89-L97 | L89-L97 |
| H1 (Kabat Numbering) | H31-H35B | H26-H32 or H34* |
| H1 (Chothia Numbering) | H31-H35 | H26-H32 |
| H2 | H50-H65 | H52-H56 |
| H3 | H95-H102 | H95-H102 |

*The C-terminus of CDR-H1, when numbered using the Kabat numbering convention, varies between H32 and H34, depending on the length of the CDR.

[0170] The “EU numbering scheme” is generally used when referring to a residue in an ABP heavy chain constant region (e.g., as reported in Kabat et al., supra). Unless stated otherwise, the EU numbering scheme is used to refer to residues in ABP heavy chain constant regions described herein.

[0171] The terms “full length antibody,” “intact antibody,” and “whole antibody” are used herein interchangeably to refer to an antibody having a structure substantially similar to a naturally occurring antibody structure and having heavy chains that comprise an Fc region. For example, when used to refer to an IgG molecule, a “full length antibody” is an antibody that comprises two heavy chains and two light chains.

[0172] The amino acid sequence boundaries of a TCR CDR can be determined by one of skill in the art using any of a number of known numbering schemes, including but not limited to the IMGT unique numbering, as described by LeFranc, M.-P, Immunol Today. 1997 November; 18(11):509; Lefranc, M.-P., “IMGT Locus on Focus: A new section of Experimental and Clinical Immunogenetics”, Exp. Clin. Immunogenet., 15, 1-7 (1998); Lefranc and Lefranc, The T Cell Receptor FactsBook; and M.-P. Lefranc/Developmental and Comparative Immunology 27 (2003) 55-77, all of which are incorporated by reference.

[0173] An “ABP fragment” comprises a portion of an intact ABP, such as the antigen-binding or variable region of an intact ABP. ABP fragments include, for example, Fv fragments, Fab fragments, F(ab′)2fragments, Fab′ fragments, scFv (sFv) fragments, and scFv-Fc fragments. ABP fragments include antibody fragments. Antibody fragments can include Fv fragments, Fab fragments, F(ab′)2fragments, Fab′ fragments, scFv (sFv) fragments, scFv-Fc fragments, and TCR fragments.

[0174] “Fv” fragments comprise a non-covalently-linked dimer of one heavy chain variable domain and one light chain variable domain.

[0175] “Fab” fragments comprise, in addition to the heavy and light chain variable domains, the constant domain of the light chain and the first constant domain (C_{H1}) of the heavy chain. Fab fragments may be generated, for example, by recombinant methods or by papain digestion of a full-length ABP.

[0176] “F(ab′)₂” fragments contain two Fab′ fragments joined, near the hinge region, by disulfide bonds. F(ab′)₂ fragments may be generated, for example, by recombinant methods or by pepsin digestion of an intact ABP. The F(ab′) fragments can be dissociated, for example, by treatment with β-mercaptoethanol.

[0177] “Single-chain Fv” or “sFv” or “scFv” fragments comprise a V_{H} domain and a V_{L} domain in a single polypeptide chain. The V_{H} and V_{L} are generally linked by a peptide linker. See Plückthun A. (1994). Any suitable linker may be used. In some embodiments, the linker is a (GGGGS)ₙ. In some embodiments, n=1, 2, 3, 4, 5, or 6. See ABPs from Escherichia coli. In Rosenberg M. & Moore G. P. (Eds.), The Pharmacology of Monoclonal ABPs vol. 113 (pp. 269-315). Springer-Verlag, New York, incorporated by reference in its entirety.

[0178] “scFv-Fc” fragments comprise an scFv attached to an Fc domain. For example, an Fc domain may be attached to the C-terminal of the scFv. The Fc domain may follow the V_{H} or V_{L}, depending on the orientation of the variable domains in the scFv (i.e., V_{H}-V_{L} or V_{L}-V_{H}). Any suitable Fc domain known in the art or described herein may be used. In some cases, the Fc domain comprises an IgG4 Fc domain.

[0179] The term “single domain antibody” refers to a molecule in which one variable domain of an ABP specifically binds to an antigen without the presence of the other variable domain. Single domain ABPs, and fragments thereof, are described in Arabi Ghahroudi et al., FEBS Letters, 1998, 414:521-526 and Muyldermans et al., Trends in Biochem. Sci., 2001, 26:230-245, each of which is incorporated by reference in its entirety. Single domain ABPs are also known as sdAbs or nanobodies.

[0180] The term “Fc region” or “Fc” means the C-terminal region of an immunoglobulin heavy chain that, in naturally occurring antibodies, interacts with Fc receptors and certain proteins of the complement system. The structures of the Fc regions of various immunoglobulins, and the glycosylation sites contained therein, are known in the art. See Schroeder and Cavacini, J. Allergy Clin. Immunol., 2010, 125:S41-52, incorporated by reference in its entirety. The Fc region may be a naturally occurring Fc region, or an Fc region modified as described in the art or elsewhere in this disclosure.

[0181] The term “alternative scaffold” refers to a molecule in which one or more regions may be diversified to produce one or more antigen-binding domains that specifically bind to an antigen or epitope. In some embodiments, the antigen-binding domain binds the antigen or epitope with specificity and affinity similar to that of an ABP. Exemplary alternative scaffolds include those derived from fibronectin (e.g., Adnectins™), the β-sandwich (e.g., iMab), lipocalin (e.g., Anticalins®), EETI-II/AGRP, BPTI/LACI-D1/ITI-D2 (e.g., Kunitz domains), thioredoxin peptide aptamers, protein A (e.g., Affibody®), ankyrin repeats (e.g., DARPins), gamma-B-crystallin/ubiquitin (e.g., Affilins), CTLD3 (e.g., Tetranectins), Fynomers, and (LDLR-A module) (e.g., Avimers). Additional information on alternative scaffolds is provided in Binz et al., Nat. Biotechnol., 2005 23:1257-1268; Skerra, Current Opin. in Biotech., 2007 18:295-304; and Silacci et al., J. Biol. Chem., 2014, 289:14392-14398; each of which is incorporated by reference in its entirety. An alternative scaffold is one type of ABP.

[0182] A “multi specific ABP” is an ABP that comprises two or more different antigen-binding domains that collectively specifically bind two or more different epitopes. The two or more different epitopes may be epitopes on the same antigen (e.g., a single HLA-PEPTIDE molecule expressed by a cell) or on different antigens (e.g., different HLA-PEPTIDE molecules expressed by the same cell, or a HLA-PEPTIDE molecule and a non-HLA-PEPTIDE molecule). In some aspects, a multi-specific ABP binds two different epitopes (i.e., a “bispecific ABP”). In some aspects, a multi-specific ABP binds three different epitopes (i.e., a “tri specific ABP”).

[0183] A “monospecific ABP” is an ABP that comprises one or more binding sites that specifically bind to a single epitope. An example of a monospecific ABP is a naturally occurring IgG molecule which, while divalent (i.e., having two antigen-binding domains), recognizes the same epitope at each of the two antigen-binding domains. The binding specificity may be present in any suitable valency.

[0184] The term “monoclonal antibody” refers to an antibody from a population of substantially homogeneous antibodies. A population of substantially homogeneous antibodies comprises antibodies that are substantially similar and that bind the same epitope(s), except for variants that may normally arise during production of the monoclonal antibody. Such variants are generally present in only minor amounts. A monoclonal antibody is typically obtained by a process that includes the selection of a single antibody from a plurality of antibodies. For example, the selection process can be the selection of a unique clone from a plurality of clones, such as a pool of hybridoma clones, phage clones, yeast clones, bacterial clones, or other recombinant DNA clones. The selected antibody can be further altered, for example, to improve affinity for the target (“affinity maturation”), to humanize the antibody, to improve its production in cell culture, and/or to reduce its immunogenicity in a subject.

[0185] The term “chimeric antibody” refers to an antibody in which a portion of the heavy and/or light chain is derived from a particular source or species, while the remainder of the heavy and/or light chain is derived from a different source or species.

[0186] “Humanized” forms of non-human antibodies are chimeric antibodies that contain minimal sequence derived from the non-human antibody. A humanized antibody is generally a human antibody (recipient antibody) in which residues from one or more CDRs are replaced by residues from one or more CDRs of a non-human antibody (donor antibody). The donor antibody can be any suitable non-human antibody, such as a mouse, rat, rabbit, chicken, or non-human primate antibody having a desired specificity, affinity, or biological effect. In some instances, selected framework region residues of the recipient antibody are replaced by the corresponding framework region residues from the donor antibody. Humanized antibodies may also comprise residues that are not found in either the recipient antibody or the donor antibody. Such modifications may be made to further refine antibody function. For further details, see Jones et al., Nature, 1986, 321:522-525; Riechmann et al., Nature, 1988, 332:323-329; and Presta, Curr. Op. Struct. Biol., 1992, 2:593-596, each of which is incorporated by reference in its entirety.

[0187] A “human antibody” is one which possesses an amino acid sequence corresponding to that of an antibody produced by a human or a human cell, or derived from a non-human source that utilizes a human antibody repertoire or human antibody-encoding sequences (e.g., obtained from human sources or designed de novo). Human antibodies specifically exclude humanized antibodies.

[0188] “Affinity” refers to the strength of the sum total of non-covalent interactions between a single binding site of a molecule (e.g., an ABP) and its binding partner (e.g., an antigen or epitope). Unless indicated otherwise, as used herein, “affinity” refers to intrinsic binding affinity, which reflects a 1:1 interaction between members of a binding pair (e.g., ABP and antigen or epitope). The affinity of a molecule X for its partner Y can be represented by the dissociation equilibrium constant (K_{D}). The kinetic components that contribute to the dissociation equilibrium constant are described in more detail below. Affinity can be measured by common methods known in the art, including those described herein, such as surface plasmon resonance (SPR) technology (e.g., BIACORE®) or biolayer interferometry (e.g., FORTEBIO®).

[0189] With regard to the binding of an ABP to a target molecule, the terms “bind,” “specific binding,” “specifically binds to,” “specific for,” “selectively binds,” and “selective for” a particular antigen (e.g., a polypeptide target) or an epitope on a particular antigen mean binding that is measurably different from a non-specific or non-selective interaction (e.g., with a non-target molecule). Specific binding can be measured, for example, by measuring binding to a target molecule and comparing it to binding to a non-target molecule. Specific binding can also be determined by competition with a control molecule that mimics the epitope recognized on the target molecule. In that case, specific binding is indicated if the binding of the ABP to the target molecule is competitively inhibited by the control molecule. In some aspects, the affinity of a HLA-PEPTIDE ABP for a non-target molecule is less than about 50% of the affinity for HLA-PEPTIDE. In some aspects, the affinity of a HLA-PEPTIDE ABP for a non-target molecule is less than about 40% of the affinity for HLA-PEPTIDE. In some aspects, the affinity of a HLA-PEPTIDE ABP for a non-target molecule is less than about 30% of the affinity for HLA-PEPTIDE. In some aspects, the affinity of a HLA-PEPTIDE ABP for a non-target molecule is less than about 20% of the affinity for HLA-PEPTIDE. In some aspects, the affinity of a HLA-PEPTIDE ABP for a non-target molecule is less than about 10% of the affinity for HLA-PEPTIDE. In some aspects, the affinity of a HLA-PEPTIDE ABP for a non-target molecule is less than about 1% of the affinity for HLA-PEPTIDE. In some aspects, the affinity of a HLA-PEPTIDE ABP for a non-target molecule is less than about 0.1% of the affinity for HLA-PEPTIDE.

[0190] The term “k_{d}” (sec⁻¹), as used herein, refers to the dissociation rate constant of a particular ABP—antigen interaction. This value is also referred to as the k_{off} value.

[0191] The term “kₐ” (M⁻¹×sec⁻¹), as used herein, refers to the association rate constant of a particular ABP-antigen interaction. This value is also referred to as the kₒₙ value.

[0192] The term “K_{D}” (M), as used herein, refers to the dissociation equilibrium constant of a particular ABP-antigen interaction. K_{D}=k_{d}/kₐ. In some embodiments, the affinity of an ABP is described in terms of the K_{D} for an interaction between such ABP and its antigen. For clarity, as known in the art, a smaller K_{D} value indicates a higher affinity interaction, while a larger K_{D} value indicates a lower affinity interaction.

[0193] The term “K_{A}” (M⁻¹), as used herein, refers to the association equilibrium constant of a particular ABP-antigen interaction. K_{A}=kₐ/k_{d}.

[0194] An “immunoconjugate” is an ABP conjugated to one or more heterologous molecule(s), such as a therapeutic (cytokine, for example) or diagnostic agent.

[0195] “Fc effector functions” refer to those biological activities mediated by the Fc region of an ABP having an Fc region, which activities may vary depending on isotype. Examples of ABP effector functions include C1q binding to activate complement dependent cytotoxicity (CDC), Fc receptor binding to activate ABP-dependent cellular cytotoxicity (ADCC), and ABP dependent cellular phagocytosis (ADCP).

[0196] When used herein in the context of two or more ABPs, the term “competes with” or “cross-competes with” indicates that the two or more ABPs compete for binding to an antigen (e.g., HLA-PEPTIDE). In one exemplary assay, HLA-PEPTIDE is coated on a surface and contacted with a first HLA-PEPTIDE ABP, after which a second HLA-PEPTIDE ABP is added. In another exemplary assay, a first HLA-PEPTIDE ABP is coated on a surface and contacted with HLA-PEPTIDE, and then a second HLA-PEPTIDE ABP is added. If the presence of the first HLA-PEPTIDE ABP reduces binding of the second HLA-PEPTIDE ABP, in either assay, then the ABPs compete with each other. The term “competes with” also includes combinations of ABPs where one ABP reduces binding of another ABP, but where no competition is observed when the ABPs are added in the reverse order. However, in some embodiments, the first and second ABPs inhibit binding of each other, regardless of the order in which they are added. In some embodiments, one ABP reduces binding of another ABP to its antigen by at least 25%, at least 50%, at least 60%, at least 70%, at least 80%, at least 85%, at least 90%, or at least 95%. A skilled artisan can select the concentrations of the ABPs used in the competition assays based on the affinities of the ABPs for HLA-PEPTIDE and the valency of the ABPs. The assays described in this definition are illustrative, and a skilled artisan can utilize any suitable assay to determine if ABPs compete with each other. Suitable assays are described, for example, in Cox et al., “Immunoassay Methods,” in Assay Guidance Manual [Internet], Updated Dec. 24, 2014 (www.ncbi.nlm.nih.gov/books/NBK92434/; accessed Sep. 29, 2015); Silman et al., Cytometry, 2001, 44:30-37; and Finco et al., J. Pharm. Biomed. Anal., 2011, 54:351-358; each of which is incorporated by reference in its entirety.

[0197] The term “epitope” means a portion of an antigen that specifically binds to an ABP. Epitopes frequently consist of surface-accessible amino acid residues and/or sugar side chains and may have specific three dimensional structural characteristics, as well as specific charge characteristics. Conformational and non-conformational epitopes are distinguished in that the binding to the former but not the latter may be lost in the presence of denaturing solvents. An epitope may comprise amino acid residues that are directly involved in the binding, and other amino acid residues, which are not directly involved in the binding. The epitope to which an ABP binds can be determined using known techniques for epitope determination such as, for example, testing for ABP binding to HLA-PEPTIDE variants with different point-mutations, or to chimeric HLA-PEPTIDE variants.

[0198] Percent “identity” between a polypeptide sequence and a reference sequence, is defined as the percentage of amino acid residues in the polypeptide sequence that are identical to the amino acid residues in the reference sequence, after aligning the sequences and introducing gaps, if necessary, to achieve the maximum percent sequence identity. Alignment for purposes of determining percent amino acid sequence identity can be achieved in various ways that are within the skill in the art, for instance, using publicly available computer software such as BLAST, BLAST-2, ALIGN, MEGALIGN (DNASTAR), CLUSTALW, CLUSTAL OMEGA, or MUSCLE software. Those skilled in the art can determine appropriate parameters for aligning sequences, including any algorithms needed to achieve maximal alignment over the full length of the sequences being compared.

[0199] A “conservative substitution” or a “conservative amino acid substitution,” refers to the substitution an amino acid with a chemically or functionally similar amino acid. Conservative substitution tables providing similar amino acids are well known in the art. By way of example, the groups of amino acids provided in Tables 21-23 are, in some embodiments, considered conservative substitutions for one another.

TABLE 21
Selected groups of amino acids that are considered conservative
substitutions for one another, in certain embodiments.

| | |
|---|---|
| Acidic Residues | D and E |
| Basic Residues | K, R, and H |
| Hydrophilic Uncharged Residues | S, T, N, and Q |
| Aliphatic Uncharged Residues | G, A, V, L, and I |
| Non-polar Uncharged Residues | C, M, and P |
| Aromatic Residues | F, Y, and W |

TABLE 22
Additional selected groups of amino acids that
are considered conservative substitutions
for one another, in certain embodiments.

| | |
|---|---|
| Group 1 | A, S, and T |
| Group 2 | D and E |
| Group 3 | N and Q |
| Group 4 | R and K |
| Group 5 | I, L, and M |
| Group 6 | F, Y, and W |

TABLE 23
Further selected groups of amino acids that are considered conservative
substitutions for one another, in certain embodiments.

| | |
|---|---|
| Group A | A and G |
| Group B | D and E |
| Group C | N and Q |
| Group D | R, K, and H |
| Group E | I, L, M, V |
| Group F | F, Y, and W |
| Group G | S and T |
| Group H | C and M |

[0200] Additional conservative substitutions may be found, for example, in Creighton, Proteins: Structures and Molecular Properties 2nd ed. (1993) W. H. Freeman & Co., New York, N.Y. An ABP generated by making one or more conservative substitutions of amino acid residues in a parent ABP is referred to as a “conservatively modified variant.”

[0201] The term “amino acid” refers to the twenty common naturally occurring amino acids. Naturally occurring amino acids include alanine (Ala; A), arginine (Arg; R), asparagine (Asn; N), aspartic acid (Asp; D), cysteine (Cys; C); glutamic acid (Glu; E), glutamine (Gln; Q), Glycine (Gly; G); histidine (His; H), isoleucine (Ile; I), leucine (Leu; L), lysine (Lys; K), methionine (Met; M), phenylalanine (Phe; F), proline (Pro; P), serine (Ser; S), threonine (Thr; T), tryptophan (Trp; W), tyrosine (Tyr; Y), and valine (Val; V).

[0202] The term “vector,” as used herein, refers to a nucleic acid molecule capable of propagating another nucleic acid to which it is linked. The term includes the vector as a self-replicating nucleic acid structure as well as the vector incorporated into the genome of a host cell into which it has been introduced. Certain vectors are capable of directing the expression of nucleic acids to which they are operatively linked. Such vectors are referred to herein as “expression vectors.”

[0203] The terms “host cell,” “host cell line,” and “host cell culture” are used interchangeably and refer to cells into which an exogenous nucleic acid has been introduced, and the progeny of such cells. Host cells include “transformants” (or “transformed cells”) and “transfectants” (or “transfected cells”), which each include the primary transformed or transfected cell and progeny derived therefrom. Such progeny may not be completely identical in nucleic acid content to a parent cell, and may contain mutations.

[0204] The term “treating” (and variations thereof such as “treat” or “treatment”) refers to clinical intervention in an attempt to alter the natural course of a disease or condition in a subject in need thereof. Treatment can be performed both for prophylaxis and during the course of clinical pathology. Desirable effects of treatment include preventing occurrence or recurrence of disease, alleviation of symptoms, diminishment of any direct or indirect pathological consequences of the disease, preventing metastasis, decreasing the rate of disease progression, amelioration or palliation of the disease state, and remission or improved prognosis.

[0205] As used herein, the term “therapeutically effective amount” or “effective amount” refers to an amount of an ABP or pharmaceutical composition provided herein that, when administered to a subject, is effective to treat a disease or disorder.

[0206] As used herein, the term “subject” means a mammalian subject. Exemplary subjects include humans, monkeys, dogs, cats, mice, rats, cows, horses, camels, goats, rabbits, and sheep. In certain embodiments, the subject is a human. In some embodiments the subject has a disease or condition that can be treated with an ABP provided herein. In some aspects, the disease or condition is a cancer. In some aspects, the disease or condition is a viral infection.

[0207] The term “package insert” is used to refer to instructions customarily included in commercial packages of therapeutic or diagnostic products (e.g., kits) that contain information about the indications, usage, dosage, administration, combination therapy, contraindications and/or warnings concerning the use of such therapeutic or diagnostic products.

[0208] The term “tumor” refers to all neoplastic cell growth and proliferation, whether malignant or benign, and all pre-cancerous and cancerous cells and tissues. The terms “cancer,” “cancerous,” “cell proliferative disorder,” “proliferative disorder” and “tumor” are not mutually exclusive as referred to herein. The terms “cell proliferative disorder” and “proliferative disorder” refer to disorders that are associated with some degree of abnormal cell proliferation. In some embodiments, the cell proliferative disorder is a cancer. In some aspects, the tumor is a solid tumor. In some aspects, the tumor is a hematologic malignancy.

[0209] The term “pharmaceutical composition” refers to a preparation which is in such form as to permit the biological activity of an active ingredient contained therein to be effective in treating a subject, and which contains no additional components which are unacceptably toxic to the subject in the amounts provided in the pharmaceutical composition.

[0210] The terms “modulate” and “modulation” refer to reducing or inhibiting or, alternatively, activating or increasing, a recited variable.

[0211] The terms “increase” and “activate” refer to an increase of 10%, 20%, 30%, 40%, 50%, 60%, 70%, 75%, 80%, 85%, 90%, 95%, 100%, 2-fold, 3-fold, 4-fold, 5-fold, 10-fold, 20-fold, 50-fold, 100-fold, or greater in a recited variable.

[0212] The terms “reduce” and “inhibit” refer to a decrease of 10%, 20%, 30%, 40%, 50%, 60%, 70%, 75%, 80%, 85%, 90%, 95%, 2-fold, 3-fold, 4-fold, 5-fold, 10-fold, 20-fold, 50-fold, 100-fold, or greater in a recited variable.

[0213] The term “agonize” refers to the activation of receptor signaling to induce a biological response associated with activation of the receptor. An “agonist” is an entity that binds to and agonizes a receptor.

[0214] The term “antagonize” refers to the inhibition of receptor signaling to inhibit a biological response associated with activation of the receptor. An “antagonist” is an entity that binds to and antagonizes a receptor.

[0215] The terms “nucleic acids” and “polynucleotides” may be used interchangeably herein to refer to polymeric form of nucleotides of any length, either deoxyribonucleotides or ribonucleotides, or analogs thereof. Polynucleotides can include, but are not limited to coding or non-coding regions of a gene or gene fragment, loci (locus) defined from linkage analysis, exons, introns, messenger RNA (mRNA), cDNA, recombinant polynucleotides, branched polynucleotides, plasmids, vectors, isolated DNA, isolated RNA, nucleic acid probes, and primers. A polynucleotide may comprise modified nucleotides, such as methylated nucleotides and nucleotide analogs. Exemplary modified nucleotides include, e.g., 5-fluorouracil, 5-bromouracil, 5-chlorouracil, 5-iodouracil, hypoxanthine, xanthine, 4-acetylcytosine, 5-(carboxyhydroxymethyl) uracil, 5-carboxymethylaminomethyl-2-thiouridine, 5-carboxymethylaminomethyluracil, dihydrouracil, beta-D-galactosylqueosine, inosine, N6-isopentenyladenine, 1-methylguanine, 1-methylinosine, 2,2-dimethylguanine, 2-methyladenine, 2-methylguanine, 3-methylcytosine, 5-methylcytosine, N6-substituted adenine, 7-methylguanine, 5-methylaminomethyluracil, 5-methoxyaminomethyl-2-thiouracil, beta-D-mannosylqueosine, 5′-methoxycarboxymethyluracil, 5-methoxyuracil, 2-methylthioN6-isopentenyladenine, uracil-5-oxyacetic acid (v), wybutoxosine, pseudouracil, queosine, 2-thiocytosine, 5-methyl-2-thiouracil, 2-thiouracil, 4-thiouracil, 5-methyluracil, uracil-5-oxyacetic acid methylester, 3-(3-amino-3-N-2-carboxypropyl) uracil, and 2,6-diaminopurine.

[0216] Isolated HLA-Peptide Targets

[0217] The major histocompatibility complex (MHC) is a complex of antigens encoded by a group of linked loci, which are collectively termed H-2 in the mouse and HLA in humans. The two principal classes of the MHC antigens, class I and class II, each comprise a set of cell surface glycoproteins which play a role in determining tissue type and transplant compatibility. In transplantation reactions, cytotoxic T-cells (CTLs) respond mainly against class I glycoproteins, while helper T-cells respond mainly against class II glycoproteins.

[0218] Human major histocompatibility complex (MHC) class I molecules, referred to interchangeably herein as HLA Class I molecules, are expressed on the surface of nearly all cells. These molecules function in presenting peptides which are mainly derived from endogenously synthesized proteins to, e.g., CD8+ T cells via an interaction with the alpha-beta T-cell receptor. The class I MHC molecule comprises a heterodimer composed of a 46-kDa a chain which is non-covalently associated with the 12-kDa light chain beta-2 microglobulin. The a chain generally comprises α1 and α2 domains which form a groove for presenting an HLA-restricted peptide, and an α3 plasma membrane-spanning domain which interacts with the CD8 co-receptor of T-cells. FIG. 1 (prior art) depicts the general structure of a Class I HLA molecule. Some TCRs can bind MHC class I independently of CD8 coreceptor (see, e.g., Kerry S E, Buslepp J, Cramer L A, et al. Interplay between TCR Affinity and Necessity of Coreceptor Ligation: High-Affinity Peptide-MHC/TCR Interaction Overcomes Lack of CD8 Engagement. Journal of immunology (Baltimore, Md.: 1950). 2003; 171(9):4493-4503.)

[0219] Class I MHC-restricted peptides (also referred to interchangeably herein as HLA-restricted antigens, HLA-restricted peptides, MHC-restricted antigens, restricted peptides, or peptides) generally bind to the heavy chain alpha1-alpha2 groove via about two or three anchor residues that interact with corresponding binding pockets in the MHC molecule. The beta-2 microglobulin chain plays an important role in MHC class I intracellular transport, peptide binding, and conformational stability. For most class I molecules, the formation of a heterotrimeric complex of the MHC class I heavy chain, peptide (self, non-self, and/or antigenic) and beta-2 microglobulin leads to protein maturation and export to the cell-surface.

[0220] Binding of a given HLA subtype to an HLA-restricted peptide forms a complex with a unique and novel surface that can be specifically recognized by an ABP such as, e.g., a TCR on a T cell or an antibody or antigen-binding fragment thereof. HLA complexed with an HLA-restricted peptide is referred to herein as an HLA-PEPTIDE or HLA-PEPTIDE target. In some cases the restricted peptide is located in the α1/α2 groove of the HLA molecule. In some cases the restricted peptide is bound to the α1/α2 groove of the HLA molecule via about two or three anchor residues that interact with corresponding binding pockets in the HLA molecule.

[0221] Accordingly, provided herein are antigens comprising HLA-PEPTIDE targets. The HLA-PEPTIDE targets may comprise a specific HLA-restricted peptide having a defined amino acid sequence complexed with a specific HLA subtype.

[0222] HLA-PEPTIDE targets identified herein may be useful for cancer immunotherapy. In some embodiments, the HLA-PEPTIDE targets identified herein are presented on the surface of a tumor cell. The HLA-PEPTIDE targets identified herein may be expressed by tumor cells in a human subject. The HLA-PEPTIDE targets identified herein may be expressed by tumor cells in a population of human subjects. For example, the HLA-PEPTIDE targets identified herein may be shared antigens which are commonly expressed in a population of human subjects with cancer.

[0223] The HLA-PEPTIDE targets identified herein may have a prevalence with an individual tumor type The prevalence with an individual tumor type may be about 0.1%, 0.2%, 0.3%, 0.4%, 0.5%, 0.6%, 0.7%, 0.8%, 0.9%, 1%, 1%, 2%, 3%, 4%, 5%, 6%, 7%, 8%, 9%, 10%, 11%, 12%, 13%, 14%, 15%, 16%, 17%, 18%, 19%, 20%, 21%, 22%, 23%, 24%, 25%, 26%, 27%, 28%, 29%, 30%, 31%, 32%, 33%, 34%, 35%, 36%, 37%, 38%, 39%, 40%, 41%, 42%, 43%, 44%, 45%, 46%, 47%, 48%, 49%, 50%, 51%, 52%, 53%, 54%, 55%, 56%, 57%, 58%, 59%, 60%, 61%, 62%, 63%, 64%, 65%, 66%, 67%, 68%, 69%, 70%, 71%, 72%, 73%, 74%, 75%, 76%, 77%, 78%, 79%, 80%, 81%, 82%, 83%, 84%, 85%, 86%, 87%, 88%, 89%, 90%, 91%, 92%, 93%, 94%, 95%, 96%, 97%, 98%, 99%, or 100%. The prevalence with an individual tumor type may be about 0.1%-100%, 0.2-50%, 0.5-25%, or 1-10%.

[0224] Preferably, HLA-PEPTIDE targets are not generally expressed in most normal tissues. For example, the HLA-PEPTIDE targets may in some cases not be expressed in tissues in the Genotype-Tissue Expression (GTEx) Project, or may in some cases be expressed only in immune privileged or non-essential tissues. Exemplary immune privileged or non-essential tissues include testis, minor salivary glands, the endocervix, and the thyroid. In some cases, an HLA-PEPTIDE target may be deemed to not be expressed on essential tissues or non-immune privileged tissues if the median expression of a gene from which the restricted peptide is derived is less than 0.5 RPKM (Reads Per Kilobase of transcript per Million napped reads) across GTEx samples, if the gene is not expressed with greater than 10 RPKM across GTEX samples, if the gene was expressed at >=5 RPKM in no more two samples across all essential tissue samples, or any combination thereof.

[0225] Exemplary HLA Class I Subtypes of the HLA-PEPTIDE Targets

[0226] In humans, there are many MHC haplotypes (referred to interchangeably herein as MHC subtypes, HLA subtypes, MHC types, and HLA types). Exemplary HLA subtypes include, by way of example only, HLA-A*01:01, HLA-A*02:01, HLA-A*02:03, HLA-A*02:04, HLA-A*02:07, HLA-A*03:01, HLA-A*03:02, HLA-A*11:01, HLA-A*23:01, HLA-A*24:02, HLA-A*25:01, HLA-A*26:01, HLA-A*29:02, HLA-A*30:01, HLA-A*30:02, HLA-A*31:01, HLA-A*32:01, HLA-A*33:01, HLA-A*33:03, HLA-A*68:01, HLA-A*68:02, HLA-B*07:02, HLA-B*08:01, HLA-B*13:02, HLA-B*15:01, HLA-B*15:03, HLA-B*18:01, HLA-B*27:02, HLA-B*27:05, HLA-B*35:01, HLA-B*35:03, HLA-B*37:01, HLA-B*38:01, HLA-B*39:01, HLA-B*40:01, HLA-B*40:02, HLA-B*44:02, HLA-B*44:03, HLA-B*46:01, HLA-B*49:01, HLA-B*51:01, HLA-B*54:01, HLA-B*55:01, HLA-B*56:01, HLA-B*57:01, HLA-B*58:01, HLA-C*01:02, HLA-C*02:02, HLA-C*03:03, HLA-C*03:04, HLA-C*04:01, HLA-C*05:01, HLA-C*06:02, HLA-C*07:01, HLA-C*07:02, HLA-C*07:04, HLA-C*07:06, HLA-C*12:03, HLA-C*14:02, HLA-C*16:01, HLA-C*16:02, HLA-C*16:04, and all subtypes thereof, including, e.g., 4 digit, 6 digit, and 8 digit subtypes. As is known to those skilled in the art there are allelic variants of the above HLA types, all of which are encompassed by the present invention. A full list of HLA Class Alleles can be found on http://hla.alleles.org/alleles/. For example, a full list of HLA Class I Alleles can be found on http://hla.alleles.org/alleles/class1.html.

[0227] HLA-Restricted Peptides

[0228] The HLA-restricted peptides (referred to interchangeably herein) as “restricted peptides” can be peptide fragments of tumor-specific genes, e.g., cancer-specific genes. Preferably, the cancer-specific genes are expressed in cancer samples. Genes which are aberrantly expressed in cancer samples can be identified through a database. Exemplary databases include, by way of example only, The Cancer Genome Atlas (TCGA) Research Network: http://cancergenome.nih.gov/; the International Cancer Genome Consortium: https://dcc.icgc.org/. In some embodiments, the cancer-specific gene has an observed expression of at least 10 RPKM in at least 5 samples from the TCGA database. The cancer-specific gene may have an observable bimodal distribution

[0229] The cancer-specific gene may have an observed expression of greater than 10, 20, 30, 40, 50, 60, 70, 80, 90, or 100 transcripts per million (TPM) in at least one TCGA tumor tissue. In preferred embodiments, the cancer-specific gene has an observed expression of greater than 100 TPM in at least one TCGA tumor tissue. In some cases, the cancer specific gene has an observed bimodal distribution of expression across TCGA samples. Without wishing to be bound by theory, such bimodal expression pattern is consistent with a biological model in which there is minimal expression at baseline in all tumor samples and higher expression in a subset of tumors experiencing epigenetic dysregulation.

[0230] Preferably, the cancer-specific gene is not generally expressed in most normal tissues. For example, the cancer-specific gene may in some cases not be expressed in tissues in the Genotype-Tissue Expression (GTEx) Project, or may in some cases be expressed in immune privileged or non-essential tissues. Exemplary immune privileged or non-essential tissues include testis, minor salivary glands, the endocervix, and thyroid. In some cases, an cancer-specific gene may be deemed to not be expressed an essential tissues or non-immune privileged tissue if the median expression of the cancer-specific gene is less than 0.5 RPKM (Reads Per Kilobase of transcript per Million napped reads) across GTEx samples, if the gene is not expressed with greater than 10 RPKM across GTEX samples, if the gene was expressed at >=5 RPKM in no more two samples across all essential tissue samples, or any combination thereof.

[0231] In some embodiments, the cancer-specific gene meets the following criteria by assessment of the GTEx: (1) median GTEx expression in brain, heart, or lung is less than 0.1 transcripts per million (TPM), with no one sample exceeding 5 TPM, (2) median GTEx expression in other essential organs (excluding testis, thyroid, minor salivary gland) is less than 2 TPM with no one sample exceeding 10 TPM.

[0232] In some embodiments, the cancer-specific gene is not likely expressed in immune cells generally, e.g., is not an interferon family gene, is not an eye-related gene, not an olfactory or taste receptor gene, and is not a gene related to the circadian cycle (e.g., not a CLOCK, PERIOD, CRY gene)

[0233] The restricted peptide preferably may be presented on the surface of a tumor.

[0234] The restricted peptides may have a size of about 5, about 6, about 7, about 8, about 9, about 10, about 11, about 12, about 13, about 14, or about 15 amino molecule residues, and any range derivable therein. In particular embodiments, the restricted peptide has a size of about 8, about 9, about 10, about 11, or about 12 amino molecule residues. The restricted peptide may be about 5-15 amino acids in length, preferably may be about 7-12 amino acids in length, or more preferably may be about 8-11 amino acids in length.

[0235] Exemplary HLA-PEPTIDE Targets

[0236] Exemplary HLA-PEPTIDE targets are shown in Table A. In each row of Table A the HLA allele and corresponding HLA-restricted peptide sequence of each complex is shown. The peptide sequence can consist of the respective sequence shown in each row of Table A. Alternatively the peptide sequence can comprise the respective sequence shown in each row of Table A. Alternatively the peptide sequence can consist essentially of the respective sequence shown in each row of Table A.

[0237] In some embodiments, the HLA-PEPTIDE target is a target as shown in Table A.

[0238] In some embodiments, the HLA-restricted peptide is not from a gene selected from WT1 or MART1.

[0239] HLA Class I molecules which do not associate with a restricted peptide ligand are generally unstable. Accordingly, the association of the restricted peptide with the α1/α2 groove of the HLA molecule may stabilize the non-covalent association of the β2-microglobulin subunit of the HLA subtype with the α-subunit of the HLA subtype.

[0240] Stability of the non-covalent association of the β2-microglobulin subunit of the HLA subtype with the α-subunit of the HLA subtype can be determined using any suitable means. For example, such stability may be assessed by dissolving insoluble aggregates of HLA molecules in high concentrations of urea (e.g., about 8M urea), and determining the ability of the HLA molecule to refold in the presence of the restricted peptide during urea removal, e.g., urea removal by dialysis. Such refolding approaches are described in, e.g., Proc. Natl. Acad. Sci. USA Vol. 89, pp. 3429-3433, April 1992, hereby incorporated by reference.

[0241] For other example, such stability may be assessed using conditional HLA Class I ligands. Conditional HLA Class I ligands are generally designed as short restricted peptides which stabilize the association of the β2 and α subunits of the HLA Class I molecule by binding to the α1/α2 groove of the HLA molecule, and which contain one or more amino acid modifications allowing cleavage of the restricted peptide upon exposure to a conditional stimulus. Upon cleavage of the conditional ligand, the β2 and α-subunits of the HLA molecule dissociate, unless such conditional ligand is exchanged for a restricted peptide which binds to the α1/α2 groove and stabilizes the HLA molecule. Conditional ligands can be designed by introducing amino acid modifications in either known HLA peptide ligands or in predicted high-affinity HLA peptide ligands. For HLA alleles for which structural information is available, water-accessibility of side chains may also be used to select positions for introduction of the amino acid modifications. Use of conditional HLA ligands may be advantageous by allowing the batch preparation of stable HLA-peptide complexes which may be used to interrogate test restricted peptides in a high throughput manner. Conditional HLA Class I ligands, and methods of production, are described in, e.g., Proc Natl Acad Sci USA. 2008 Mar. 11; 105(10): 3831-3836; Proc Natl Acad Sci USA. 2008 Mar. 11; 105(10): 3825-3830; J Exp Med. 2018 May 7; 215(5): 1493-1504; Choo, J. A. L. et al. Bioorthogonal cleavage and exchange of major histocompatibility complex ligands by employing azobenzene-containing peptides. Angew Chem Int Ed Engl 53, 13390-13394 (2014); Amore, A. et al. Development of a Hypersensitive Periodate-Cleavable Amino Acid that is Methionine- and Disulfide-Compatible and its Application in MHC Exchange Reagents for T Cell Characterisation. ChemBioChem 14, 123-131 (2012); Rodenko, B. et al. Class I Major Histocompatibility Complexes Loaded by a Periodate Trigger. J Am Chem Soc 131, 12305-12313 (2009); and Chang, C. X. L. et al. Conditional ligands for Asian HLA variants facilitate the definition of CD8+ T-cell responses in acute and chronic viral diseases. Eur J Immunol 43, 1109-1120 (2013). These references are incorporated by reference in their entirety.

[0242] Accordingly, in some embodiments, the ability of an HLA-restricted peptide described herein, e.g., described in Table A, to stabilize the association of the β2- and α-subunits of the HLA molecule, is assessed by performing a conditional ligand mediated-exchange reaction and assay for HLA stability. HLA stability can be assayed using any suitable method, including, e.g., mass spectrometry analysis, immunoassays (e.g., ELISA), size exclusion chromatography, and HLA multimer staining followed by flow cytometry assessment of T cells.

[0243] Other exemplary methods for assessing stability of the non-covalent association of the β2-microglobulin subunit of the HLA subtype with the α-subunit of the HLA subtype include peptide exchange using dipeptides. Peptide exchange using dipeptides has been described in, e.g., Proc Natl Acad Sci USA. 2013 Sep. 17, 110(38):15383-8; Proc Natl Acad Sci USA. 2015 Jan. 6, 112(1):202-7, which is hereby incorporated by reference.

[0244] Provided herein are useful antigens comprising an HLA-PEPTIDE target. The HLA-PEPTIDE targets may comprise a specific HLA-restricted peptide having a defined amino acid sequence complexed with a specific HLA subtype allele.

[0245] The HLA-PEPTIDE target may be isolated and/or in substantially pure form. For example, the HLA-PEPTIDE targets may be isolated from their natural environment, or may be produced by means of a technical process. In some cases, the HLA-PEPTIDE target is provided in a form which is substantially free of other peptides or proteins.

[0246] THE HLA-PEPTIDE targets may be presented in soluble form, and optionally may be a recombinant HLA-PEPTIDE target complex. The skilled artisan may use any suitable method for producing and purifying recombinant HLA-PEPTIDE targets. Suitable methods include, e.g., use of E. coli expression systems, insect cells, and the like. Other methods include synthetic production, e.g., using cell free systems. An exemplary suitable cell free system is described in WO2017089756, which is hereby incorporated by reference in its entirety.

[0247] Also provided herein are compositions comprising an HLA-PEPTIDE target.

[0248] In some cases, the composition comprises an HLA-PEPTIDE target attached to a solid support. Exemplary solid supports include, but are not limited to, beads, wells, membranes, tubes, columns, plates, sepharose, magnetic beads, and chips. Exemplary solid supports are described in, e.g., Catalysts 2018, 8, 92; doi:10.3390/cata18020092, which is hereby incorporated by reference in its entirety.

[0249] The HLA-PEPTIDE target may be attached to the solid support by any suitable methods known in the art. In some cases, the HLA-PEPTIDE target is covalently attached to the solid support.

[0250] In some cases, the HLA-PEPTIDE target is attached to the solid support by way of an affinity binding pair. Affinity binding pairs generally involved specific interactions between two molecules. A ligand having an affinity for its binding partner molecule can be covalently attached to the solid support, and thus used as bait for immobilizing Common affinity binding pairs include, e.g., streptavidin and biotin, avidin and biotin; polyhistidine tags with metal ions such as copper, nickel, zinc, and cobalt; and the like.

[0251] The HLA-PEPTIDE target may comprise a detectable label.

[0252] Pharmaceutical compositions comprising HLA-PEPTIDE targets.

[0253] The composition comprising an HLA-PEPTIDE target may be a pharmaceutical composition. Such a composition may comprise multiple HLA-PEPTIDE targets. Exemplary pharmaceutical compositions are described herein. The composition may be capable of eliciting an immune response. The composition may comprise an adjuvant. Suitable adjuvants include, but are not limited to 1018 ISS, alum, aluminium salts, Amplivax, AS15, BCG, CP-870,893, CpG7909, CyaA, dSLIM, GM-CSF, IC30, IC31, Imiquimod, ImuFact IMP321, IS Patch, ISS, ISCOMATRIX, Juvlmmune, LipoVac, MF59, monophosphoryl lipid A, Montanide IMS 1312, Montanide ISA 206, Montanide ISA 50V, Montanide ISA-51, OK-432, OM-174, OM-197-MP-EC, ONTAK, PepTel vector system, PLG microparticles, resiquimod, SRL172, Virosomes and other Virus-like particles, YF-17D, VEGF trap, R848, beta-glucan, Pam3Cys, Aquila's QS21 stimulon (Aquila Biotech, Worcester, Mass., USA) which is derived from saponin, mycobacterial extracts and synthetic bacterial cell wall mimics, and other proprietary adjuvants such as Ribi's Detox. Quil or Superfos. Adjuvants such as incomplete Freund's or GM-CSF are useful. Several immunological adjuvants (e.g., MF59) specific for dendritic cells and their preparation have been described previously (Dupuis M, et al., Cell Immunol. 1998; 186(1):18-27; Allison A C; Dev Biol Stand. 1998; 92:3-11). Also cytokines can be used. Several cytokines have been directly linked to influencing dendritic cell migration to lymphoid tissues (e.g., TNF-alpha), accelerating the maturation of dendritic cells into efficient antigen-presenting cells for T-lymphocytes (e.g., GM-CSF, IL-1 and IL-4) (U.S. Pat. No. 5,849,589, specifically incorporated herein by reference in its entirety) and acting as immunoadjuvants (e.g., IL-12) (Gabrilovich D I, et al., J Immunother Emphasis Tumor Immunol. 1996 (6):414-418). HLA surface expression and processing of intracellular proteins into peptides to present on HLA can also be enhanced by interferon-gamma (IFN-γ). See, e.g., York I A, Goldberg A L, Mo X Y, Rock K L. Proteolysis and class I major histocompatibility complex antigen presentation. Immunol Rev. 1999; 172:49-66; and Rock K L, Goldberg A L. Degradation of cell proteins and the generation of MHC class I-presented peptides. Ann Rev Immunol. 1999; 17: 12. 739-779, which are incorporated herein by reference in their entirety.

[0254] HLA-Peptide ABPS

[0255] Also provided herein are ABPs that specifically bind to HLA-PEPTIDE target as disclosed herein.

[0256] The HLA-PEPTIDE target may be expressed on the surface of any suitable target cell including a tumor cell.

[0257] The ABP can specifically bind to a human leukocyte antigen (HLA)-PEPTIDE target, wherein the HLA-PEPTIDE target comprises an HLA-restricted peptide complexed with an HLA Class I molecule, wherein the HLA-restricted peptide is located in the peptide binding groove of an α1/α2 heterodimer portion of the HLA Class I molecule.

[0258] In some aspects, the ABP does not bind HLA class I in the absence of HLA-restricted peptide. In some aspects, the ABP does not bind HLA-restricted peptide in the absence of human MHC class I. In some aspects, the ABP binds tumor cells presenting human MHC class I being complexed with HLA—restricted peptide, optionally wherein the HLA restricted peptide is a tumor antigen characterizing the cancer.

[0259] An ABP can bind to each portion of an HLA-PEPTIDE complex (i.e., HLA and peptide representing each portion of the complex), which when bound together form a novel target and protein surface for interaction with and binding by the ABP, distinct from a surface presented by the peptide alone or HLA subtype alone. Generally the novel target and protein surface formed by binding of HLA to peptide does not exist in the absence of each portion of the HLA-PEPTIDE complex.

[0260] An ABP can be capable of specifically binding a complex comprising HLA and an HLA-restricted peptide (HLA-PEPTIDE), e.g., derived from a tumor. In some aspects, the ABP does not bind HLA in an absence of the HLA-restricted peptide derived from the tumor. In some aspects, the ABP does not bind the HLA-restricted peptide derived from the tumor in an absence of HLA. In some aspects, the ABP binds a complex comprising HLA and HLA-restricted peptide when naturally presented on a cell such as a tumor cell.

[0261] In some embodiments, an ABP provided herein modulates binding of HLA-PEPTIDE to one or more ligands of HLA-PEPTIDE.

[0262] The ABP may specifically bind to any one of the HLA-PEPTIDE targets as disclosed in Table A. In some embodiments, the HLA-restricted peptide is not from a gene selected from WT1 or MART1.

[0263] In more particular embodiments, the ABP specifically binds to an HLA-PEPTIDE target selected from any one of HLA subtype B*35:01 complexed with an HLA-restricted peptide comprising the sequence EVDPIGHVY, HLA subtype A*02:01 complexed with an HLA-restricted peptide comprising the sequence AIFPGAVPAA, and HLA subtype A*01:01 complexed with an HLA-restricted peptide comprising the sequence ASSLPTTMNY.

[0264] In yet more particular embodiments, the ABP specifically binds to an HLA-PEPTIDE target selected from any one of HLA subtype B*35:01 complexed with an HLA-restricted peptide consisting essentially of the sequence EVDPIGHVY, HLA subtype A*02:01 complexed with an HLA-restricted peptide consisting essentially of the sequence AIFPGAVPAA, and HLA subtype A*01:01 complexed with an HLA-restricted peptide consisting essentially of the sequence ASSLPTTMNY.

[0265] In some embodiments, the ABP specifically binds to an HLA-PEPTIDE target selected from any one of HLA subtype B*35:01 complexed with an HLA-restricted peptide consisting of the sequence EVDPIGHVY, HLA subtype A*02:01 complexed with an HLA-restricted peptide consisting of the sequence AIFPGAVPAA, and HLA subtype A*01:01 complexed with an HLA-restricted peptide consisting of the sequence ASSLPTTMNY.

[0266] In some embodiments, an ABP is an ABP that competes with an illustrative ABP provided herein. In some aspects, the ABP that competes with the illustrative ABP provided herein binds the same epitope as an illustrative ABP provided herein.

[0267] In some embodiments, the ABPs described herein are referred to herein as “variants.” In some embodiments, such variants are derived from a sequence provided herein, for example, by affinity maturation, site directed mutagenesis, random mutagenesis, or any other method known in the art or described herein. In some embodiments, such variants are not derived from a sequence provided herein and may, for example, be isolated de novo according to the methods provided herein for obtaining ABPs. In some embodiments, a variant is derived from any of the sequences provided herein, wherein one or more conservative amino acid substitutions are made. In some embodiments, a variant is derived from any of the sequences provided herein, wherein one or more nonconservative amino acid substitutions are made. Conservative amino acid substitutions are described herein. Exemplary nonconservative amino acid substitutions include those described in J Immunol. 2008 May 1; 180(9):6116-31, which is hereby incorporated by reference in its entirety. In preferred embodiments, the non-conservative amino acid substitution does not interfere with or inhibit the biological activity of the functional variant. In yet more preferred embodiments, the non-conservative amino acid substitution enhances the biological activity of the functional variant, such that the biological activity of the functional variant is increased as compared to the parent ABP.

[0268] ABPs Comprising an Antibody or Antigen-Binding Fragment Thereof

[0269] An ABP may comprise an antibody or antigen-binding fragment thereof.

[0270] In some embodiments, the ABPs provided herein comprise a light chain. In some aspects, the light chain is a kappa light chain. In some aspects, the light chain is a lambda light chain.

[0271] In some embodiments, the ABPs provided herein comprise a heavy chain. In some aspects, the heavy chain is an IgA. In some aspects, the heavy chain is an IgD. In some aspects, the heavy chain is an IgE. In some aspects, the heavy chain is an IgG. In some aspects, the heavy chain is an IgM. In some aspects, the heavy chain is an IgG1. In some aspects, the heavy chain is an IgG2. In some aspects, the heavy chain is an IgG3. In some aspects, the heavy chain is an IgG4. In some aspects, the heavy chain is an IgA1. In some aspects, the heavy chain is an IgA2.

[0272] In some embodiments, the ABPs provided herein comprise an antibody fragment. In some embodiments, the ABPs provided herein consist of an antibody fragment. In some embodiments, the ABPs provided herein consist essentially of an antibody fragment. In some aspects, the ABP fragment is an Fv fragment. In some aspects, the ABP fragment is a Fab fragment. In some aspects, the ABP fragment is a F(ab′)₂ fragment. In some aspects, the ABP fragment is a Fab′ fragment. In some aspects, the ABP fragment is an scFv (sFv) fragment. In some aspects, the ABP fragment is an scFv-Fc fragment. In some aspects, the ABP fragment is a fragment of a single domain ABP.

[0273] In some embodiments, an ABP fragment provided herein is derived from an illustrative ABP provided herein. In some embodiments, an ABP fragments provided herein is not derived from an illustrative ABP provided herein and may, for example, be isolated de novo according to the methods provided herein for obtaining ABP fragments.

[0274] In some embodiments, an ABP fragment provided herein retains the ability to bind the HLA-PEPTIDE target, as measured by one or more assays or biological effects described herein. In some embodiments, an ABP fragment provided herein retains the ability to prevent HLA-PEPTIDE from interacting with one or more of its ligands, as described herein.

[0275] In some embodiments, the ABPs provided herein are monoclonal ABPs. In some embodiments, the ABPs provided herein are polyclonal ABPs.

[0276] In some embodiments, the ABPs provided herein comprise a chimeric ABP. In some embodiments, the ABPs provided herein consist of a chimeric ABP. In some embodiments, the ABPs provided herein consist essentially of a chimeric ABP. In some embodiments, the ABPs provided herein comprise a humanized ABP. In some embodiments, the ABPs provided herein consist of a humanized ABP. In some embodiments, the ABPs provided herein consist essentially of a humanized ABP. In some embodiments, the ABPs provided herein comprise a human ABP. In some embodiments, the ABPs provided herein consist of a human ABP. In some embodiments, the ABPs provided herein consist essentially of a human ABP.

[0277] In some embodiments, the ABPs provided herein comprise an alternative scaffold. In some embodiments, the ABPs provided herein consist of an alternative scaffold. In some embodiments, the ABPs provided herein consist essentially of an alternative scaffold. Any suitable alternative scaffold may be used. In some aspects, the alternative scaffold is selected from an Adnectin™, an iMab, an Anticalin®, an EETI-II/AGRP, a Kunitz domain, a thioredoxin peptide aptamer, an Affibody®, a DARPin, an Affilin, a Tetranectin, a Fynomer, and an Avimer.

[0278] Also disclosed herein is an isolated humanized, human, or chimeric ABP that competes for binding to an HLA-PEPTIDE with an ABP disclosed herein.

[0279] Also disclosed herein is an isolated humanized, human, or chimeric ABP that binds an HLA-PEPTIDE epitope bound by an ABP disclosed herein.

[0280] In certain aspects, an ABP comprises a human Fc region comprising at least one modification that reduces binding to a human Fc receptor.

[0281] It is known that when an ABP is expressed in cells, the ABP is modified after translation. Examples of the posttranslational modification include cleavage of lysine at the C terminus of the heavy chain by a carboxypeptidase; modification of glutamine or glutamic acid at the N terminus of the heavy chain and the light chain to pyroglutamic acid by pyroglutamylation; glycosylation; oxidation; deamidation; and glycation, and it is known that such posttranslational modifications occur in various ABPs (See Journal of Pharmaceutical Sciences, 2008, Vol. 97, p. 2426-2447, incorporated by reference in its entirety). In some embodiments, an ABP is an ABP or antigen-binding fragment thereof which has undergone posttranslational modification. Examples of an ABP or antigen-binding fragment thereof which have undergone posttranslational modification include an ABP or antigen-binding fragments thereof which have undergone pyroglutamylation at the N terminus of the heavy chain variable region and/or deletion of lysine at the C terminus of the heavy chain. It is known in the art that such posttranslational modification due to pyroglutamylation at the N terminus and deletion of lysine at the C terminus does not have any influence on the activity of the ABP or fragment thereof (Analytical Biochemistry, 2006, Vol. 348, p. 24-39, incorporated by reference in its entirety).

### Monospecific and Multispecific HLA-Peptide ABPs

[0282] In some embodiments, the ABPs provided herein are monospecific ABPs.

[0283] In some embodiments, the ABPs provided herein are multispecific ABPs.

[0284] In some embodiments, a multispecific ABP provided herein binds more than one antigen. In some embodiments, a multispecific ABP binds 2 antigens. In some embodiments, a multispecific ABP binds 3 antigens. In some embodiments, a multispecific ABP binds 4 antigens. In some embodiments, a multispecific ABP binds 5 antigens.

[0285] In some embodiments, a multispecific ABP provided herein binds more than one epitope on a HLA-PEPTIDE antigen. In some embodiments, a multispecific ABP binds 2 epitopes on a HLA-PEPTIDE antigen. In some embodiments, a multispecific ABP binds 3 epitopes on a HLA-PEPTIDE antigen.

[0286] Many multispecific ABP constructs are known in the art, and the ABPs provided herein may be provided in the form of any suitable multispecific suitable construct.

[0287] In some embodiments, the multispecific ABP comprises an immunoglobulin comprising at least two different heavy chain variable regions each paired with a common light chain variable region (i.e., a “common light chain ABP”). The common light chain variable region forms a distinct antigen-binding domain with each of the two different heavy chain variable regions. See Merchant et al., Nature Biotechnol., 1998, 16:677-681, incorporated by reference in its entirety.

[0288] In some embodiments, the multispecific ABP comprises an immunoglobulin comprising an ABP or fragment thereof attached to one or more of the N- or C-termini of the heavy or light chains of such immunoglobulin. See Coloma and Morrison, Nature Biotechnol., 1997, 15:159-163, incorporated by reference in its entirety. In some aspects, such ABP comprises a tetravalent bispecific ABP.

[0289] In some embodiments, the multispecific ABP comprises a hybrid immunoglobulin comprising at least two different heavy chain variable regions and at least two different light chain variable regions. See Milstein and Cuello, Nature, 1983, 305:537-540; and Staerz and Bevan, Proc. Natl. Acad. Sci. USA, 1986, 83:1453-1457; each of which is incorporated by reference in its entirety.

[0290] In some embodiments, the multispecific ABP comprises immunoglobulin chains with alterations to reduce the formation of side products that do not have multispecificity. In some aspects, the ABPs comprise one or more “knobs-into-holes” modifications as described in U.S. Pat. No. 5,731,168, incorporated by reference in its entirety.

[0291] In some embodiments, the multispecific ABP comprises immunoglobulin chains with one or more electrostatic modifications to promote the assembly of Fc hetero-multimers. See WO 2009/089004, incorporated by reference in its entirety.

[0292] In some embodiments, the multispecific ABP comprises a bispecific single chain molecule. See Traunecker et al., EMBO J., 1991, 10:3655-3659; and Gruber et al., J. Immunol., 1994, 152:5368-5374; each of which is incorporated by reference in its entirety.

[0293] In some embodiments, the multispecific ABP comprises a heavy chain variable domain and a light chain variable domain connected by a polypeptide linker, where the length of the linker is selected to promote assembly of multispecific ABP with the desired multispecificity. For example, monospecific scFvs generally form when a heavy chain variable domain and light chain variable domain are connected by a polypeptide linker of more than 12 amino acid residues. See U.S. Pat. Nos. 4,946,778 and 5,132,405, each of which is incorporated by reference in its entirety. In some embodiments, reduction of the polypeptide linker length to less than 12 amino acid residues prevents pairing of heavy and light chain variable domains on the same polypeptide chain, thereby allowing pairing of heavy and light chain variable domains from one chain with the complementary domains on another chain. The resulting ABP therefore has multispecificity, with the specificity of each binding site contributed by more than one polypeptide chain. Polypeptide chains comprising heavy and light chain variable domains that are joined by linkers between 3 and 12 amino acid residues form predominantly dimers (termed diabodies). With linkers between 0 and 2 amino acid residues, trimers (termed triabodies) and tetramers (termed tetrabodies) are favored. However, the exact type of oligomerization appears to depend on the amino acid residue composition and the order of the variable domain in each polypeptide chain (e.g., V_{H}-linker-V_{L} vs. V_{L}-linker-V_{H}), in addition to the linker length. A skilled person can select the appropriate linker length based on the desired multispecificity.

### Fc Region and Variants

[0294] In certain embodiments, an ABP provided herein comprises an Fc region. An Fc region can be wild-type or a variant thereof. In certain embodiments, an ABP provided herein comprises an Fc region with one or more amino acid substitutions, insertions, or deletions in comparison to a naturally occurring Fc region. In some aspects, such substitutions, insertions, or deletions yield ABP with altered stability, glycosylation, or other characteristics. In some aspects, such substitutions, insertions, or deletions yield a glycosylated ABP.

[0295] A “variant Fc region” or “engineered Fc region” comprises an amino acid sequence that differs from that of a native-sequence Fc region by virtue of at least one amino acid modification, preferably one or more amino acid substitution(s). Preferably, the variant Fc region has at least one amino acid substitution compared to a native-sequence Fc region or to the Fc region of a parent polypeptide, e.g., from about one to about ten amino acid substitutions, and preferably from about one to about five amino acid substitutions in a native-sequence Fc region or in the Fc region of the parent polypeptide. The variant Fc region herein will preferably possess at least about 80% homology with a native-sequence Fc region and/or with an Fc region of a parent polypeptide, and most preferably at least about 90% homology therewith, more preferably at least about 95% homology therewith.

[0296] The term “Fc-region-comprising ABP” refers to an ABP that comprises an Fc region. The C-terminal lysine (residue 447 according to the EU numbering system) of the Fc region may be removed, for example, during purification of the ABP or by recombinant engineering the nucleic acid encoding the ABP. Accordingly, an ABP having an Fc region can comprise an ABP with or without K447.

[0297] In some aspects, the Fc region of an ABP provided herein is modified to yield an ABP with altered affinity for an Fc receptor, or an ABP that is more immunologically inert. In some embodiments, the ABP variants provided herein possess some, but not all, effector functions. Such ABPs may be useful, for example, when the half-life of the ABP is important in vivo, but when certain effector functions (e.g., complement activation and ADCC) are unnecessary or deleterious.

[0298] In some embodiments, the Fc region of an ABP provided herein is a human IgG4 Fc region comprising one or more of the hinge stabilizing mutations S228P and L235E. See Aalberse et al., Immunology, 2002, 105:9-19, incorporated by reference in its entirety. In some embodiments, the IgG4 Fc region comprises one or more of the following mutations: E233P, F234V, and L235A. See Armour et al., Mol. Immunol., 2003, 40:585-593, incorporated by reference in its entirety. In some embodiments, the IgG4 Fc region comprises a deletion at position G236.

[0299] In some embodiments, the Fc region of an ABP provided herein is a human IgG1 Fc region comprising one or more mutations to reduce Fc receptor binding. In some aspects, the one or more mutations are in residues selected from S228 (e.g., S228A), L234 (e.g., L234A), L235 (e.g., L235A), D265 (e.g., D265A), and N297 (e.g., N297A). In some aspects, the ABP comprises a PVA236 mutation. PVA236 means that the amino acid sequence ELLG, from amino acid position 233 to 236 of IgG1 or EFLG of IgG4, is replaced by PVA. See U.S. Pat. No. 9,150,641, incorporated by reference in its entirety.

[0300] In some embodiments, the Fc region of an ABP provided herein is modified as described in Armour et al., Eur. J. Immunol., 1999, 29:2613-2624; WO 1999/058572; and/or U.K. Pat. App. No. 98099518; each of which is incorporated by reference in its entirety.

[0301] In some embodiments, the Fc region of an ABP provided herein is a human IgG2 Fc region comprising one or more of mutations A330S and P331S.

[0302] In some embodiments, the Fc region of an ABP provided herein has an amino acid substitution at one or more positions selected from 238, 265, 269, 270, 297, 327 and 329. See U.S. Pat. No. 6,737,056, incorporated by reference in its entirety. Such Fc mutants include Fc mutants with substitutions at two or more of amino acid positions 265, 269, 270, 297 and 327, including the so-called “DANA” Fc mutant with substitution of residues 265 and 297 with alanine. See U.S. Pat. No. 7,332,581, incorporated by reference in its entirety. In some embodiments, the ABP comprises an alanine at amino acid position 265. In some embodiments, the ABP comprises an alanine at amino acid position 297.

[0303] In certain embodiments, an ABP provided herein comprises an Fc region with one or more amino acid substitutions which improve ADCC, such as a substitution at one or more of positions 298, 333, and 334 of the Fc region. In some embodiments, an ABP provided herein comprises an Fc region with one or more amino acid substitutions at positions 239, 332, and 330, as described in Lazar et al., Proc. Natl. Acad. Sci. USA, 2006, 103:4005-4010, incorporated by reference in its entirety.

[0304] In some embodiments, an ABP provided herein comprises one or more alterations that improves or diminishes C1q binding and/or CDC. See U.S. Pat. No. 6,194,551; WO 99/51642; and Idusogie et al., J. Immunol., 2000, 164:4178-4184; each of which is incorporated by reference in its entirety.

[0305] In some embodiments, an ABP provided herein comprises one or more alterations to increase half-life. ABPs with increased half-lives and improved binding to the neonatal Fc receptor (FcRn) are described, for example, in Hinton et al., J. Immunol., 2006, 176:346-356; and U.S. Pat. Pub. No. 2005/0014934; each of which is incorporated by reference in its entirety. Such Fc variants include those with substitutions at one or more of Fc region residues: 238, 250, 256, 265, 272, 286, 303, 305, 307, 311, 312, 314, 317, 340, 356, 360, 362, 376, 378, 380, 382, 413, 424, 428, and 434 of an IgG. In some embodiments, the ABP comprises one or more non-Fc modifications that extend half-life. Exemplary non-Fc modifications that extend half-life are described in, e.g., US20170218078, which is hereby incorporated by reference in its entirety.

[0306] In some embodiments, an ABP provided herein comprises one or more Fc region variants as described in U.S. Pat. Nos. 7,371,826 5,648,260, and 5,624,821; Duncan and Winter, Nature, 1988, 322:738-740; and WO 94/29351; each of which is incorporated by reference in its entirety.

[0307] Antibodies Specific for B*35:01_EVDPIGHVY (HLA-Peptide Target “G5”)

[0308] In some aspects, provided herein are ABPs comprising antibodies or antigen-binding fragments thereof that specifically bind an HLA-PEPTIDE target, wherein the HLA Class I molecule of the HLA-PEPTIDE target is HLA subtype B*35:01 and the HLA-restricted peptide of the HLA-PEPTIDE target comprises, consists of, or essentially consists of the sequence EVDPIGHVY (“G5”).

[0309] CDRs

[0310] The ABP specific for B*35:01_EVDPIGHVY may comprise one or more antibody complementarity determining region (CDR) sequences, e.g., may comprise three heavy chain CDRs (CDR-H1, CDR-H2, CDR-H3) and three light chain CDRs (CDR-L1, CDR-L2, CDR-L3).

[0311] The ABP specific for B*35:01_EVDPIGHVY may comprise a CDR-H3 sequence. The CDR-H3 sequence may be selected from CARDGVRYYGMDVW, CARGVRGYDRSAGYW, CASHDYGDYGEYFQHW, CARVSWYCSSTSCGVNWFDPW, CAKVNWNDGPYFDYW, CATPTNSGYYGPYYYYGMDVW, CARDVMDVW, CAREGYGMDVW, CARDNGVGVDYW, CARGIADSGSYYGNGRDYYYGMDVW, CARGDYYFDYW, CARDGTRYYGMDVW, CARDVVANFDYW, CARGHSSGWYYYYGMDVW, CAKDLGSYGGYYW, CARS WFGGFNYHYYGMDVW, CARELPIGYGMDVW, and CARGGSYYYYGMDVW.

[0312] The ABP specific for B*35:01_EVDPIGHVY may comprise a CDR-L3 sequence. The CDR-L3 sequence may be selected from CMQGLQTPITF, CMQALQTPPTF, CQQAISFPLTF, CQQANSFPLTF, CQQANSFPLTF, CQQSYSIPLTF, CQQTYMMPYTF, CQQSYITPWTF, CQQSYITPYTF, CQQYYTTPYTF, CQQSYSTPLTF, CMQALQTPLTF, CQQYGSWPRTF, CQQSYSTPVTF, CMQALQTPYTF, CQQANSFPFTF, CMQALQTPLTF, and CQQSYSTPLTF.

[0313] The ABP specific for B*35:01_EVDPIGHVY may comprise a particular heavy chain CDR3 (CDR-H3) sequence and a particular light chain CDR3 (CDR-L3) sequence. In some embodiments, the ABP comprises the CDR-H3 and the CDR-L3 from the scFv designated G5_P7_E7, G5_P7_B3, G5_P7_A5, G5_P7_F6, G5-P1B12, G5-P1C12, G5-P1-E05, G5-P3G01, G5-P3G08, G5-P4B02, G5-P4E04, G5R4-P1D06, G5R4-P1H11, G5R4-P2B10, G5R4-P2H8, G5R4-P3G05, G5R4-P4A07, or G5R4-P4B01. CDR sequences of identified scFvs that specifically bind B*35:01_EVDPIGHVY are shown in Table 5. For clarity, each identified scFv hit is designated a clone name, and each row contains the CDR sequences for that particular clone name. For example, the scFv identified by clone name G5_P7_E7 comprises the heavy chain CDR3 sequence CARDGVRYYGMDVW and the light chain CDR3 sequence CMQGLQTPITF.

[0314] The ABP specific for B*35:01_EVDPIGHVY may comprise all six CDRs from the scFv designated G5_P7_E7, G5_P7_B3, G5_P7_A5, G5_P7_F6, G5-P1B12, G5-P1C12, G5-P1-E05, G5-P3G01, G5-P3G08, G5-P4B02, G5-P4E04, G5R4-P1D06, G5R4-P1H11, G5R4-P2B10, G5R4-P2H8, G5R4-P3G05, G5R4-P4A07, or G5R4-P4B01.

[0315] VH

[0316] The ABP specific for B*35:01_EVDPIGHVY may comprise a VH sequence. The VH sequence may be selected from

QVQLVQSGAEVKKPGASVKVSCKASGYTFTSYDINWVRQAPGQGLEWMGI
INPRSGSTKYAQKFQGRVTMTRDTSTSTVYMELSSLRSEDTAVYYCARDG
VRYYGMDVWGQGTTVTVSSAS,
QVQLVQSGAEVKKPGSSVKVSCKASGYTFTSHDINWVRQAPGQGLEWMGW
MNPNSGDTGYAQKFQGRVTITADESTSTAYMELSSLRSEDTAVYYCARGV
RGYDRSAGYWGQGTLVIVSSAS,
EVQLLESGGGLVKPGGSLRLSCAASGFSFSSYWMSWVRQAPGKGLEWISY
ISGDSGYTNYADSVKGRFTISRDDSKNTLYLQMNSLKTEDTAVYYCASHD
YGDYGEYFQHWGQGTLVTVSSAS,
EVQLLQSGGGLVQPGGSLRLSCAASGFTFSNSDMNWVRQAPGKGLEWVAY
ISSGSSTIYYADSVKGRFTISRDNSKNTLYLQMNSLRAEDTAVYYCARVS
WYCSSTSCGVNWFDPWGQGTLVTVSSAS,
EVQLLESGGGLVQPGGSLRLSCAASGFTFSNSDMNWVRQAPGKGLEWVAS
ISSSGGYINYADSVKGRFTISRDNSKNTLYLQMNSLRAEDTAVYYCAKVN
WNDGPYFDYWGQGTLVTVSS,
QVQLVQSGAEVKKPGSSVKVSCKASGGTFSNFGVSWLRQAPGQGLEWMGG
IIPILGTANYAQKFQGRVTITADESTSTAYMELSSLRSEDTAVYYCATPT
NSGYYGPYYYYGMDVWGQGTTVTVSS,
QVQLVQSGAEVKKPGASVKVSCKASGYTFTSYNMHWVRQAPGQGLEWMGW
INPNSGGTNYAQKFQGRVTMTRDTSTSTVYMELSSLRSEDTAVYYCARDV
MDVWGQGTTVTVSS,
QVQLVQSGAEVKKPGASVKVSCKASGGTFSGYLVSWVRQAPGQGLEWMGW
INPNSGGTNTAQKFQGRVTMTRDTSTSTVYMELSSLRSEDTAVYYCAREG
YGMDVWGQGTTVTVSS,
QVQLVQSGAEVKKPGASVKVSCKASGYIFRNYPMHWVRQAPGQGLEWMGW
INPDSGGTKYAQKFQGRVTMTRDTSTSTVYMELSSLRSEDTAVYYCARDN
GVGVDYWGQGTLVTVSS,
QVQLVQSGAEVKKPGASVKVSCKASGYTFTGYYMHWVRQAPGQGLEWMGW
MNPNIGNTGYAQKFQGRVTMTRDTSTSTVYMELSSLRSEDTAVYYCARGI
ADSGSYYGNGRDYYYGMDVWGQGTTVTVSS,
QVQLVQSGAEVKKPGASVKVSCKASGGTFSSYGISWVRQAPGQGLEWMGW
INPNSGVTKYAQKFQGRVTMTRDTSTSTVYMELSSLRSEDTAVYYCARGD
YYFDYWGQGTLVTVSS,
QVQLVQSGAEVKKPGASVKVSCKASGYTFTSYDINWVRQAPGQGLEWMGW
INPNSGDTKYSQKFQGRVTMTRDTSTSTVYMELSSLRSEDTAVYYCARDG
TRYYGMDVWGQGTTVTVSS,
EVQLLESGGGLVKPGGSLRLSCAASGFTFSDYYMSWVRQAPGKGLEWVSY
ISSSSSYTNYADSVKGRFTISRDDSKNTLYLQMNSLKTEDTAVYYCARDV
VANFDYWGQGTLVTVSS,
QVQLVQSGAEVKKPGASVKVSCKASGGTFSSYAISWVRQAPGQGLEWMGW
MNPDSGSTGYAQRFQGRVTMTRDTSTSTVYMELSSLRSEDTAVYYCARGH
SSGWYYYYGMDVWGQGTTVTVSS,
EVQLLESGGGLVQPGGSLRLSCAASGFTFTSYSMHWVRQAPGKGLEWVSS
ITSFTNTMYYADSVKGRFTISRDNSKNTLYLQMNSLRAEDTAVYYCAKDL
GSYGGYYWGQGTLVTVSS,
QVQLVQSGAEVKKPGASVKVSCKASGYTFTNYYMHWVRQAPGQGLEWMGI
INPSGGSTSYAQKFQGRVTMTRDTSTSTVYMELSSLRSEDTAVYYCARSW
FGGFNYHYYGMDVWGQGTTVTVSS,
QVQLVQSGAEVKKPGASVKVSCKASGYTFTSYYMHWVRQAPGQGLEWMGW
MNPNSGNTGYAQKFQGRVTMTRDTSTSTVYMELSSLRSEDTAVYYCAREL
PIGYGMDVWGQGTTVTVSS,
and
QVQLVQSGAEVKKPGSSVKVSCKASGGTFSSYAISWVRQAPGQGLEWMGG
IIPIVGTANYAQKFQGRVTITADESTSTAYMELSSLRSEDTAVYYCARGG
SYYYYGMDVWGQGTTVTVSS.

[0317] VL

[0318] The ABP specific for B*35:01_EVDPIGHVY may comprise a VL sequence. The VL sequence may be selected from

DIVMTQSPLSLPVTPGEPASISCRSSQSLLHSNGYNYLDWYLQKPGQSPQ
LLIYLGSYRASGVPDRFSGSGSGTDFTLKISRVEAEDVGVYYCMQGLQTP
ITFGQGTRLEIK,
DIVMTQSPLSLPVTPGEPASISCRSSQSLLHSNGYNYLDWYLQKPGQSPQ
LLIYLGSSRASGVPDRFSGSGSGTDFTLKISRVEAEDVGVYYCMQALQTP
PTFGPGTKVDIK,
DIQMTQSPSSLSASVGDRVTITCQASQDISNYLNWYQQKPGKAPKLLIYA
ASSLQSGVPSRFSGSGSGTDFTLTISSLQPEDFATYYCQQAISFPLTFGQ
STKVEIK,
DIQMTQSPSSLSASVGDRVTITCRASQSISSWLAWYQQKPGKAPKLLIYS
ASTLQSGVPSRFSGSGSGTDFTLTISSLQPEDFATYYCQQANSFPLTFGG
GTKVEIK,
DIQMTQSPSSLSASVGDRVTITCRASQSISSWLAWYQQKPGKAPKLLIYA
ASSLQSGVPSRFSGSGSGTDFTLTISSLQPEDFATYYCQQANSFPLTFGG
GTKVEIK,
DIQMTQSPSSLSASVGDRVTITCRASQSISSWLAWYQQKPGKAPKLLIYA
ASTLQSGVPSRFSGSGSGTDFTLTISSLQPEDFATYYCQQSYSIPLTFGG
GTKVEIK,
DIQMTQSPSSLSASVGDRVTITCRASQGISNYLNWYQQKPGKAPKLLIYY
ASSLQSGVPSRFSGSGSGTDFTLTISSLQPEDFATYYCQQTYMMPYTFGQ
GTKVEIK,
DIQMTQSPSSLSASVGDRVTITCRASQSISSYLNWYQQKPGKAPKLLIYG
ASSLQSGVPSRFSGSGSGTDFTLTISSLQPEDFATYYCQQSYITPWTFGQ
GTKVEIK,
DIQMTQSPSSLSASVGDRVTITCRASQGISNYLAWYQQKPGKAPKLLIYA
ASSLQSGVPSRFSGSGSGTDFTLTISSLQPEDFATYYCQQSYITPYTFGQ
GTKLEIK,
DIVMTQSPDSLAVSLGERATINCKTSQSVLYRPNNENYLAWYQQKPGQPP
KLLIYQASIREPGVPDRFSGSGSGTDFTLTISSLQAEDVAVYYCQQYYTT
PYTFGQGTKLEIK,
DIQMTQSPSSLSASVGDRVTITCRASQSISRFLNWYQQKPGKAPKLLIYG
ASRPQSGVPSRFSGSGSGTDFTLTISSLQPEDFATYYCQQSYSTPLTFGQ
GTKVEIK,
DIVMTQSPLSLPVTPGEPASISCRSSQSLLHSNGYNYLDWYLQKPGQSPQ
LLIYLGSHRASGVPDRFSGSGSGTDFTLKISRVEAEDVGVYYCMQALQTP
LTFGGGTKVEIK,
EIVMTQSPATLSVSPGERATLSCRASQSVSSNLAWYQQKPGQAPRLLIYA
ASARASGIPARFSGSGSGTEFTLTISSLQSEDFAVYYCQQYGSWPRTFGQ
GTKVEIK,
DIQMTQSPSSLSASVGDRVTITCRASQSISSYLNWYQQKPGKAPKLLIYG
ASRLQSGVPSRFSGSGSGTDFTLTISSLQPEDFATYYCQQSYSTPVTFGQ
GTKVEIK,
DIVMTQSPLSLPVTPGEPASISCRSSQSLLHSNGYNYLDWYLQKPGQSPQ
LLIYLGSNRASGVPDRFSGSGSGTDFTLKISRVEAEDVGVYYCMQALQTP
YTFGQGTKVEIK,
DIQMTQSPSSLSASVGDRVTITCQASEDISNHLNWYQQKPGKAPKLLIYD
ALSLQSGVPSRFSGSGSGTDFTLTISSLQPEDFATYYCQQANSFPFTFGP
GTKVDIK,
DIVMTQSPLSLPVTPGEPASISCRSSQSLLHSNGYNYLDWYLQKPGQSPQ
LLIYLGSNRASGVPDRFSGSGSGTDFTLKISRVEAEDVGVYYCMQALQTP
LTFGQGTKVEIK,
and
DIQMTQSPSSLSASVGDRVTITCRASQSISSYLNWYQQKPGKAPKLLIYA
ASSLQSGVPSRFSGSGSGTDFTLTISSLQPEDFATYYCQQSYSTPLTFGG
GTKVEIK.

[0319] VH-VL combinations

[0320] The ABP specific for B*35:01_EVDPIGHVY may comprise a particular VH sequence and a particular VL sequence. In some embodiments, the ABP specific for B*35:01_EVDPIGHVY comprises a VH sequence and VL sequence from the scFv designated G5_P7_E7, G5_P7_B3, G5_P7_A5, G5_P7_F6, G5-P1B12, G5-P1C12, G5-P1-E05, G5-P3G01, G5-P3G08, G5-P4B02, G5-P4E04, G5R4-P1D06, G5R4-P1H11, G5R4-P2B10, G5R4-P2H8, G5R4-P3G05, G5R4-P4A07, and G5R4-P4B01. The VH and VL sequences of identified scFvs that specifically bind B*35:01_EVDPIGHVY are shown in Table 4. For clarity, each identified scFv hit is designated a clone name, and each row contains the VH and VL sequences for that particular clone name. For example, the scFv identified by clone name G5_P7_E7 comprises the VH sequence QVQLVQSGAEVKKPGASVKVSCKASGYTFTSYDINWVRQAPGQGLEWMGIINPRSG STKYAQKFQGRVTMTRDTSTSTVYMELSSLRSEDTAVYYCARDGVRYYGMDVWG QGTTVTVSSAS and the VL sequence DIVMTQSPLSLPVTPGEPASISCRSSQSLLHSNGYNYLDWYLQKPGQSPQLLIYLGSY RASGVPDRFSGSGSGTDFTLKISRVEAEDVGVYYCMQGLQTPITFGQGTRLEIK.

[0321] Antibodies Specific for A*02:01_AIFPGAVPAA (HLA-Peptide Target “G8”)

[0322] In some aspects, provided herein are ABPs comprising antibodies or antigen-binding fragments thereof that specifically bind an HLA-PEPTIDE target, wherein the HLA Class I molecule of the HLA-PEPTIDE target is HLA subtype A*02:01 and the HLA-restricted peptide of the HLA-PEPTIDE target comprises, consists of, or essentially consists of the sequence AIFPGAVPAA (“G8”).

[0323] CDRs

[0324] The ABP specific for A*02:01_AIFPGAVPAA may comprise one or more antibody complementarity determining region (CDR) sequences, e.g., may comprise three heavy chain CDRs (CDR-H1, CDR-H2, CDR-H3) and three light chain CDRs (CDR-L1, CDR-L2, CDR-L3).

[0325] The ABP specific for A*02:01_AIFPGAVPAA may comprise a CDR-H3 sequence. The CDR-H3 sequence may be selected from CARDDYGDYVAYFQHW, CARDLSYYYGMDVW, CARVYDFWSVLSGFDIW, CARVEQGYDIYYYYYMDVW, CARSYDYGDYLNFDYW, CARASGSGYYYYYGMDVW, CAASTWIQPFDYW, CASNGNYYGSGSYYNYW, CARAVYYDFWSGPFDYW, CAKGGIYYGSGSYPSW, CARGLYYMDVW, CARGLYGDYFLYYGMDVW, CARGLLGFGEFLTYGMDVW, CARDRDSSWTYYYYGMDVW, CARGLYGDYFLYYGMDVW, CARGDYYDSSGYYFPVYFDYW, and CAKDPFWSGHYYYYGMDVW.

[0326] The ABP specific for A*02:01_AIFPGAVPAA may comprise a CDR-L3 sequence. The CDR-L3 sequence may be selected from CQQNYNSVTF, CQQSYNTPWTF, CGQSYSTPPTF, CQQSYSAPYTF, CQQSYSIPPTF, CQQSYSAPYTF, CQQHNSYPPTF, CQQYSTYPITI, CQQANSFPWTF, CQQSHSTPQTF, CQQSYSTPLTF, CQQSYSTPLTF, CQQTYSTPWTF, CQQYGSSPYTF, CQQSHSTPLTF, CQQANGFPLTF, and CQQSYSTPLTF.

[0327] The ABP specific for A*02:01_AIFPGAVPAA may comprise a particular heavy chain CDR3 (CDR-H3) sequence and a particular light chain CDR3 (CDR-L3) sequence. In some embodiments, the ABP comprises the CDR-H3 and the CDR-L3 from the scFv designated G8-P1A03, G8-P1A04, G8-P1A06, G8-P1B03, G8-P1C11, G8-P1D02, G8-P1H08, G8-P2B05, G8-P2E06, R3G8-P2C10, R3G8-P2E04, R3G8-P4F05, R3G8-P5C03, R3G8-P5F02, R3G8-P5G08, G8-P1C01, or G8-P2C11. CDR sequences of identified scFvs that specifically bind A*02:01_AIFPGAVPAA are shown in Table 7. For clarity, each identified scFv hit is designated a clone name, and each row contains the CDR sequences for that particular clone name. For example, the scFv identified by clone name G8-P1A03 comprises the heavy chain CDR3 sequence CARDDYGDYVAYFQHW and the light chain CDR3 sequence CQQNYNSVTF.

[0328] The ABP specific for A*02:01_AIFPGAVPAA may comprise all six CDRs from the scFv designated G8-P1A03, G8-P1A04, G8-P1A06, G8-P1B03, G8-P1C11, G8-P1D02, G8-P1H08, G8-P2B05, G8-P2E06, R3G8-P2C10, R3G8-P2E04, R3G8-P4F05, R3G8-P5C03, R3G8-P5F02, R3G8-P5G08, G8-P1C01, or G8-P2C11.

[0329] VH

[0330] The ABP specific for A*02:01_AIFPGAVPAA may comprise a VH sequence. The VH sequence may be selected from

QVQLVQSGAEVKKPGASVKVSCKASGGTFSRSAITWVRQAPGQGLEWMGW
INPNSGATNYAQKFQGRVTMTRDTSTSTVYMELSSLRSEDTAVYYCARDD
YGDYVAYFQHWGQGTLVTVSS,
QVQLVQSGAEVKKPGASVKVSCKASGYPFIGQYLHWVRQAPGQGLEWMGI
INPSGDSATYAQKFQGRVTMTRDTSTSTVYMELSSLRSEDTAVYYCARDL
SYYYGMDVWGQGTTVTVSS,
QVQLVQSGAEVKKPGASVKVSCKASGYTFTNYYMHWVRQAPGQGLEWMGW
MNPIGGGTGYAQKFQGRVTMTRDTSTSTVYMELSSLRSEDTAVYYCARVY
DFWSVLSGFDIWGQGTLVTVSS,
EVQLLESGGGLVQPGGSLRLSCAASGFTFSDYYMSWVRQAPGKGLEWVSG
INWNGGSTGYADSVKGRFTISRDNSKNTLYLQMNSLRAEDTAVYYCARVE
QGYDIYYYYYMDVWGKGTTVTVSS,
QVQLVQSGAEVKKPGASVKVSCKASGGTLSSYPINWVRQAPGQGLEWMGW
ISTYSGHADYAQKLQGRVTMTRDTSTSTVYMELSSLRSEDTAVYYCARSY
DYGDYLNFDYWGQGTLVTVSS,
EVQLLESGGGLVQPGGSLRLSCAASGFTFSSYWMSWVRQAPGKGLEWVSS
ISGRGDNTYYADSVKGRFTISRDNSKNTLYLQMNSLRAEDTAVYYCARAS
GSGYYYYYGMDVWGQGTTVTVSS,
QVQLVQSGAEVKKPGASVKVSCKASGYTFGNYFMHWVRQAPGQGLEWMGM
VNPSGGSETFAQKFQGRVTMTRDTSTSTVYMELSSLRSEDTAVYYCAAST
WIQPFDYWGQGTLVTVSS,
EVQLLESGGGLVQPGGSLRLSCAASGFDFSIYSMNWVRQAPGKGLEWVSA
ISGSGGSTYYADSVKGRFTISRDNSKNTLYLQMNSLRAEDTAVYYCASNG
NYYGSGSYYNYWGQGTLVTVSS,
QVQLVQSGAEVKKPGASVKVSCKASGYTLTTYYMHWVRQAPGQGLEWMGW
INPNSGGTNYAQKFQGRVTMTRDTSTSTVYMELSSLRSEDTAVYYCARAV
YYDFWSGPFDYWGQGTLVTVSS,
QVQLVQSGAEVKKPGASVKVSCKASGYTFTSYYMHWVRQAPGQGLEWMGW
INPYSGGTNYAQKFQGRVTMTRDTSTSTVYMELSSLRSEDTAVYYCAKGG
IYYGSGSYPSWGQGTLVTVSS,
QVQLVQSGAEVKKPGSSVKVSCKASGGTFSSYGVSWVRQAPGQGLEWMGW
ISPYSGNTDYAQKFQGRVTITADESTSTAYMELSSLRSEDTAVYYCARGL
YYMDVWGKGTTVTVSS,
QVQLVQSGAEVKKPGASVKVSCKASGYTFSNMYLHWVRQAPGQGLEWMGW
INPNTGDTNYAQTFQGRVTMTRDTSTSTVYMELSSLRSEDTAVYYCARGL
YGDYFLYYGMDVWGQGTKVTVSS,
QVQLVQSGAEVKKPGASVKVSCKASGYTFTSYYMHWVRQAPGQGLEWMGW
MNPNSGNTGYAQKFQGRVTMTRDTSTSTVYMELSSLRSEDTAVYYCARGL
LGFGEFLTYGMDVWGQGTLVTVSS,
QVQLVQSGAEVKKPGASVKVSCKASGYTFTGYYIHWVRQAPGQGLEWMGV
INPSGGSTTYAQKLQGRVTMTRDTSTSTVYMELSSLRSEDTAVYYCARDR
DSSWTYYYYGMDVWGQGTTVTVSS,
QVQLVQSGAEVKKPGASVKVSCKASGYTFTSNYMHWVRQAPGQGLEWMGW
MNPNSGNTGYAQKFQGRVTMTRDTSTSTVYMELSSLRSEDTAVYYCARGL
YGDYFLYYGMDVWGQGTTVTVSS,
QVQLVQSGAEVKKPGASVKVSCKASGGTFSSHAISWVRQAPGQGLEWMGV
IIPSGGTSYTQKFQGRVTMTRDTSTSTVYMELSSLRSEDTAVYYCARGDY
YDSSGYYFPVYFDYWGQGTLVTVSS,
and
QVQLVQSGAEVKKPGASVKVSCKASGYTFTSYAMNWVRQAPGQGLEWMGW
INPNSGGTNYAQKFQGRVTMTRDTSTSTVYMELSSLRSEDTAVYYCARDP
FWSGHYYYYGMDVWGQGTTVTVSS.

[0331] VL

[0332] The ABP specific for A*02:01_AIFPGAVPAA may comprise a VL sequence. The VL sequence may be selected from

DIQMTQSPSSLSASVGDRVTITCRASQSITSYLNWYQQKPGKAPKLLIYD
ASNLETGVPSRFSGSGSGTDFTLTISSLQPEDFATYYCQQNYNSVTFGQG
TKLEIK,
DIQMTQSPSSLSASVGDRVTITCWASQGISSYLAWYQQKPGKAPKLLIYA
ASSLQSGVPSRFSGSGSGTDFTLTISSLQPEDFATYYCQQSYNTPWTFGP
GTKVDIK,
DIQMTQSPSSLSASVGDRVTITCRASQAISNSLAWYQQKPGKAPKLLIYA
ASTLQSGVPSRFSGSGSGTDFTLTISSLQPEDFATYYCGQSYSTPPTFGQ
GTKLEIK,
DIQMTQSPSSLSASVGDRVTITCRASQSISSYLNWYQQKPGKAPKLLIYK
ASSLESGVPSRFSGSGSGTDFTLTISSLQPEDFATYYCQQSYSAPYTFGP
GTKVDIK,
DIQMTQSPSSLSASVGDRVTITCQASQDISNYLNWYQQKPGKAPKLLIYA
ASSLQSGVPSRFSGSGSGTDFTLTISSLQPEDFATYYCQQSYSIPPTFGG
GTKVDIK,
DIQMTQSPSSLSASVGDRVTITCQASQDISNYLNWYQQKPGKAPKLLIYA
ASSLQSGVPSRFSGSGSGTDFTLTISSLQPEDFATYYCQQSYSAPYTFGG
GTKVEIK,
DIQMTQSPSSLSASVGDRVTITCRASQGINSYLAWYQQKPGKAPKLLIYD
ASNLETGVPSRFSGSGSGTDFTLTISSLQPEDFATYYCQQHNSYPPTFGQ
GTKLEIK,
DIQMTQSPSSLSASVGDRVTITCRASQSISRWLAWYQQKPGKAPKLLIYA
ASSLQSGVPSRFSGSGSGTDFTLTISSLQPEDFATYYCQQYSTYPITIGQ
GTKVEIK,
DIQMTQSPSSLSASVGDRVTITCRASQGISNSLAWYQQKPGKAPKLLIYA
ASSLQSGVPSRFSGSGSGTDFTLTISSLQPEDFATYYCQQANSFPWTFGQ
GTKLEIK,
DIQMTQSPSSLSASVGDRVTITCRASQDVSTWLAWYQQKPGKAPKLLIYA
ASSLQSGVPSRFSGSGSGTDFTLTISSLQPEDFATYYCQQSHSTPQTFGQ
GTKVEIK,
DIQMTQSPSSLSASVGDRVTITCRASQSISSWLAWYQQKPGKAPKLLIYD
ASNLETGVPSRFSGSGSGTDFTLTISSLQPEDFATYYCQQSYSTPLTFGG
GTKLEIK,
DIQMTQSPSSLSASVGDRVTITCRASQGISNYLAWYQQKPGKAPKLLIYA
ASTLQSGVPSRFSGSGSGTDFTLTISSLQPEDFATYYCQQSYSTPLTFGG
GTKVEIK,
DIQMTQSPSSLSASVGDRVTITCRASQGISNWLAWYQQKPGKAPKLLIYA
ASTLQSGVPSRFSGSGSGTDFTLTISSLQPEDFATYYCQQTYSTPWTFGQ
GTKLEIK,
EIVMTQSPATLSVSPGERATLSCRASQSVGNSLAWYQQKPGQAPRLLIYG
ASTRATGIPARFSGSGSGTEFTLTISSLQSEDFAVYYCQQYGSSPYTFGQ
GTKVEIK,
DIQMTQSPSSLSASVGDRVTITCRASQSISGYLNWYQQKPGKAPKLLIYA
ASSLQSGVPSRFSGSGSGTDFTLTISSLQPEDFATYYCQQSHSTPLTFGQ
GTKVEIK,
DIQMTQSPSSLSASVGDRVTITCRASQNIYTYLNWYQQKPGKAPKLLIYD
ASNLETGVPSRFSGSGSGTDFTLTISSLQPEDFATYYCQQANGFPLTFGG
GTKVEIK,
and
DIQMTQSPSSLSASVGDRVTITCRASQSISSYLNWYQQKPGKAPKLLIYA
ASSLQSGVPSRFSGSGSGTDFTLTISSLQPEDFATYYCQQSYSTPLTFGG
GTKVEIK.

[0333] VH-VL Combinations

[0334] The ABP specific for A*02:01_AIFPGAVPAA may comprise a particular VH sequence and a particular VL sequence. In some embodiments, the ABP specific for A*02:01_AIFPGAVPAA comprises a VH sequence and VL sequence from the scFv designated G8-P1A03, G8-P1A04, G8-P1A06, G8-P1B03, G8-P1C11, G8-P1D02, G8-P1H08, G8-P2B05, G8-P2E06, R3G8-P2C10, R3G8-P2E04, R3G8-P4F05, R3G8-P5C03, R3G8-P5F02, R3G8-P5G08, G8-P1C01, or G8-P2C11. The VH and VL sequences of identified scFvs that specifically bind A*02:01_AIFPGAVPAA are shown in Table 6. For clarity, each identified scFv hit is designated a clone name, and each row contains the VH and VL sequences for that particular clone name. For example, the scFv identified by clone name G8-P1A03 comprises the VH sequence QVQLVQSGAEVKKPGASVKVSCKASGGTFSRSAITWVRQAPGQGLEWMGWINPNS GATNYAQKFQGRVTMTRDTSTSTVYMELSSLRSEDTAVYYCARDDYGDYVAYFQH WGQGTLVTVSS and the VL sequence DIQMTQSPSSLSASVGDRVTITCRASQSITSYLNWYQQKPGKAPKLLIYDASNLETGV PSRFSGSGSGTDFTLTISSLQPEDFATYYCQQNYNSVTFGQGTKLEIK.

[0335] Antibodies Specific for A*01:01_ASSLPTTMNY (HLA-Peptide Target “G10”)

[0336] In some aspects, provided herein are ABPs comprising antibodies or antigen-binding fragments thereof that specifically bind an HLA-PEPTIDE target, wherein the HLA Class I molecule of the HLA-PEPTIDE target is HLA subtype A*01:01 and the HLA-restricted peptide of the HLA-PEPTIDE target comprises, consists of, or essentially consists of the sequence ASSLPTTMNY (“G10”).

[0337] CDRs

[0338] The ABP specific for A*01:01_ASSLPTTMNY may comprise one or more antibody complementarity determining region (CDR) sequences, e.g., may comprise three heavy chain CDRs (CDR-H1, CDR-H2, CDR-H3) and three light chain CDRs (CDR-L1, CDR-L2, CDR-L3).

[0339] The ABP specific for A*01:01_ASSLPTTMNY may comprise a CDR-H3 sequence. The CDR-H3 sequence may be selected from CARDQDTIFGVVITWFDPW, CARDKVYGDGFDPW, CAREDDSMDVW, CARDSSGLDPW, CARGVGNLDYW, CARDAHQYYDFWSGYYSGTYYYGMDVW, CAREQWPSYWYFDLW, CARDRGYSYGYFDYW, CARGSGDPNYYYYYGLDVW, CARDTGDHFDYW, CARAENGMDVW, CARDPGGYMDVW, CARDGDAFDIW, CARDMGDAFDIW, CAREEDGMDVW, CARDTGDHFDYW, CARGEYSSGFFFVGWFDLW, and CARETGDDAFDIW.

[0340] The ABP specific for A*01:01_ASSLPTTMNY may comprise a CDR-L3 sequence. The CDR-L3 sequence may be selected from CQQYFTTPYTF, CQQAEAFPYTF, CQQSYSTPITF, CQQSYIIPYTF, CHQTYSTPLTF, CQQAYSFPWTF, CQQGYSTPLTF, CQQANSFPRTF, CQQANSLPYTF, CQQSYSTPFTF, CQQSYSTPFTF, CQQSYGVPTF, CQQSYSTPLTF, CQQSYSTPLTF, CQQYYSYPWTF, CQQSYSTPFTF, CMQTLKTPLSF, and CQQSYSTPLTF.

[0341] The ABP specific for A*01:01_ASSLPTTMNY may comprise a particular heavy chain CDR3 (CDR-H3) sequence and a particular light chain CDR3 (CDR-L3) sequence. In some embodiments, the ABP comprises the CDR-H3 and the CDR-L3 from the scFv designated R3G10-P1A07, R3G10-P1B07, R3G10-P1E12, R3G10-P1F06, R3G10-P1H01, R3G10-P1H08, R3G10-P2C04, R3G10-P2G11, R3G10-P3E04, R3G10-P4A02, R3G10-P4C05, R3G10-P4D04, R3G10-P4D10, R3G10-P4E07, R3G10-P4E12, R3G10-P4G06, R3G10-P5A08, or R3G10-P5C08. CDR sequences of identified scFvs that specifically bind A*01:01_ASSLPTTMNY are shown in Table 9. For clarity, each identified scFv hit is designated a clone name, and each row contains the CDR sequences for that particular clone name. For example, the scFv identified by clone name R3G10-P1A07 comprises the heavy chain CDR3 sequence CARDQDTIFGVVITWFDPW and the light chain CDR3 sequence CQQYFTTPYTF.

[0342] The ABP specific for A*01:01_ASSLPTTMNY may comprise all six CDRs from the scFv designated R3G10-P1A07, R3G10-P1B07, R3G10-P1E12, R3G10-P1F06, R3G10-P1H01, R3G10-P1H08, R3G10-P2C04, R3G10-P2G11, R3G10-P3E04, R3G10-P4A02, R3G10-P4C05, R3G10-P4D04, R3G10-P4D10, R3G10-P4E07, R3G10-P4E12, R3G10-P4G06, R3G10-P5A08, or R3G10-P5C08.

[0343] VH

[0344] The ABP specific for A*01:01_ASSLPTTMNY may comprise a VH sequence. The VH sequence may be selected from

EVQLLESGGGLVKPGGSLRLSCAASGFTFSSYWMSWVRQAPGKGLEWVSG
ISARSGRTYYADSVKGRFTISRDDSKNTLYLQMNSLKTEDTAVYYCARDQ
DTIFGVVITWFDPWGQGTLVTVSS,
QVQLVQSGAEVKKPGASVKVSCKASGYTFTSYYMHWVRQAPGQGLEWMGI
IHPGGGTTSYAQKFQGRVTMTRDTSTSTVYMELSSLRSEDTAVYYCARDK
VYGDGFDPWGQGTLVTVSS,
QVQLVQSGAEVKKPGASVKVSCKASGYIFTGYYMHWVRQAPGQGLEWMGM
IGPSDGSTSYAQKFQGRVTMTRDTSTSTVYMELSSLRSEDTAVYYCARED
DSMDVWGKGTTVTVSS,
QVQLVQSGAEVKKPGASVKVSCKASGYTFIGYYMHWVRQAPGQGLEWMGM
IGPSDGSTSYAQKFQGRVTMTRDTSTSTVYMELSSLRSEDTAVYYCARDS
SGLDPWGQGTLVTVSS,
QVQLVQSGAEVKKPGASVKVSCKASGYTFTGYYMHWVRQAPGQGLEWMGM
IGPSDGSTSYAQKFQGRVTMTRDTSTSTVYMELSSLRSEDTAVYYCARGV
GNLDYWGQGTLVTVSS,
QVQLVQSGAEVKKPGASVKVSCKASGVTFSTSAISWVRQAPGQGLEWMGW
ISPYNGNTDYAQMLQGRVTMTRDTSTSTVYMELSSLRSEDTAVYYCARDA
HQYYDFWSGYYSGTYYYGMDVWGQGTTVTVSS,
QVQLVQSGAEVKKPGASVKVSCKASGGTFSNSIINWVRQAPGQGLEWMGW
MNPNSGNTNYAQKFQGRVTMTRDTSTSTVYMELSSLRSEDTAVYYCAREQ
WPSYWYFDLWGRGTLVTVSS,
QVQLVQSGAEVKKPGASVKVSCKASGGTFSTHDINWVRQAPGQGLEWMGV
INPSGGSAIYAQKFQGRVTMTRDTSTSTVYMELSSLRSEDTAVYYCARDR
GYSYGYFDYWGQGTLVTVSS,
QVQLVQSGAEVKKPGASVKVSCKASGNTFIGYYVHWVRQAPGQGLEWVGI
INPNGGSISYAQKFQGRVTMTRDTSTSTVYMELSSLRSEDTAVYYCARGS
GDPNYYYYYGLDVWGQGTTVTVSS,
QVQLVQSGAEVKKPGASVKVSCKASGYTLSYYYMHWVRQAPGQGLEWMGM
IGPSDGSTSYAQRFQGRVTMTRDTSTGTVYMELSSLRSEDTAVYYCARDT
GDHFDYWGQGTLVTVSS,
QVQLVQSGAEVKKPGASVKVSCKASGYTFTGYYMHWVRQAPGQGLEWMGI
IGPSDGSTTYAQKFQGRVTMTRDTSTSTVYMELSSLRSEDTAVYYCARAE
NGMDVWGQGTTVTVSS,
QVQLVQSGAEVKKPGASVKVSCKASGYTFTGYYVHWVRQAPGQGLEWMGI
IAPSDGSTNYAQKFQGRVTMTRDTSTSTVYMELSSLRSEDTAVYYCARDP
GGYMDVWGKGTTVTVSS,
QVQLVQSGAEVKKPGASVKVSCKASGYTFTGYYLHWVRQAPGQGLEWMGM
IGPSDGSTSYAQKFQGRVTMTRDTSTSTVYMELSSLRSEDTAVYYCARDG
DAFDIWGQGTMVTVSS,
QVQLVQSGAEVKKPGSSVKVSCKASGYTFTGYYMHWVRQAPGQGLEWMGR
ISPSDGSTTYAPKFQGRVTITADESTSTAYMELSSLRSEDTAVYYCARDM
GDAFDIWGQGTTVTVSS,
QVQLVQSGAEVKKPGASVKVSCKASGYTFTGYYMHWVRQAPGQGLEWMGM
IGPSDGSTSYAQRFQGRVTMTRDTSTSTVYMELSSLRSEDTAVYYCAREE
DGMDVWGQGTTVTVSS,
QVQLVQSGAEVKKPGASVKVSCKASGYTLSYYYMHWVRQAPGQGLEWMGM
IGPSDGSTSYAQRFQGRVTMTRDTSTGTVYMELSSLRSEDTAVYYCARDT
GDHFDYWGQGTLVTVSS,
QVQLVQSGAEVKKPGSSVKVSCKASGGTFNNFAISWVRQAPGQGLEWMGG
IIPIFDATNYAQKFQGRVTFTADESTSTAYMELSSLRSEDTAVYYCARGE
YSSGFFFVGWFDLWGRGTQVTVSS,
and
QVQLVQSGAEVKKPGASVKVSCKASGYNFTGYYMHWVRQAPGQGLEWMGI
IAPSDGSTNYAQKFQGRVTMTRDTSTSTVYMELSSLRSEDTAVYYCARET
GDDAFDIWGQGTMVTVSS.

[0345] The ABP specific for A*01:01_ASSLPTTMNY may comprise a VL sequence. The VL sequence may be selected from

DIQMTQSPSSLSASVGDRVTITCRASQGISNYLAWYQQKPGKAPKLLIYA
ASSLQGGVPSRFSGSGSGTDFTLTISSLQPEDFATYYCQQYFTTPYTFGQ
GTKLEIK,
DIQMTQSPSSLSASVGDRVTITCRASQSISRWLAWYQQKPGKAPKLLIFD
ASRLQSGVPSRFSGSGSGTDFTLTISSLQPEDFATYYCQQAEAFPYTFGQ
GTKVEIK,
DIQMTQSPSSLSASVGDRVTITCRASQSISSYLNWYQQKPGKAPKLLIYA
ASSLQSGVPSRFSGSGSGTDFTLTISSLQPEDFATYYCQQSYSTPITFGQ
GTRLEIK,
DIQMTQSPSSLSASVGDRVTITCRASQSISNYLNWYQQKPGKAPKLLIYK
ASSLESGVPSRFSGSGSGTDFTLTISSLQPEDFATYYCQQSYIIPYTFGQ
GTKLEIK,
DIQMTQSPSSLSASVGDRVTITCRASQSISNYLNWYQQKPGKAPKLLIYA
ASSLQSGVPSRFSGSGSGTDFTLTISSLQPEDFATYYCHQTYSTPLTFGQ
GTKVEIK,
DIQMTQSPSSLSASVGDRVTITCRASQGISNYLAWYQQKPGKAPKLLIYS
ASNLQSGVPSRFSGSGSGTDFTLTISSLQPEDFATYYCQQAYSFPWTFGQ
GTKVEIK,
DIQMTQSPSSLSASVGDRVTITCRASQNISSYLNWYQQKPGKAPKLLIYA
ASSLQSGVPSRFSGSGSGTDFTLTISSLQPEDFATYYCQQGYSTPLTFGQ
GTRLEIK,
DIQMTQSPSSLSASVGDRVTITCRASQDISRYLAWYQQKPGKAPKLLIYD
ASNLETGVPSRFSGSGSGTDFTLTISSLQPEDFATYYCQQANSFPRTFGQ
GTKVEIK,
DIQMTQSPSSLSASVGDRVTITCQASQDISNYLNWYQQKPGKAPKLLIYA
ASNLQSGVPSRFSGSGSGTDFTLTISSLQPEDFATYYCQQANSLPYTFGQ
GTKVEIK,
DIQMTQSPSSLSASVGDRVTITCRASQSISSYLNWYQQKPGKAPKLLIYA
ASTLQNGVPSRFSGSGSGTDFTLTISSLQPEDFATYYCQQSYSTPFTFGP
GTKVDIK,
DIQMTQSPSSLSASVGDRVTITCRASQRISSYLNWYQQKPGKAPKLLIYS
ASTLQSGVPSRFSGSGSGTDFTLTISSLQPEDFATYYCQQSYSTPFTFGP
GTKVDIK,
DIQMTQSPSSLSASVGDRVTITCRASQSISSYLAWYQQKPGKAPKLLIYD
ASKLETGVPSRFSGSGSGTDFTLTISSLQPEDFATYYCQQSYGVPTFGQG
TKLEIK,
DIQMTQSPSSLSASVGDRVTITCRASQGISSWLAWYQQKPGKAPKLLIYD
ASNLETGVPSRFSGSGSGTDFTLTISSLQPEDFATYYCQQSYSTPLTFGG
GTKVEIK,
DIQMTQSPSSLSASVGDRVTITCRASQSISSYLNWYQQKPGKAPKLLIYA
ASSLQSGVPSRFSGSGSGTDFTLTISSLQPEDFATYYCQQSYSTPLTFGG
GTKVEIK,
DIQMTQSPSSLSASVGDRVTITCRASQGISTYLAWYQQKPGKAPKLLIYD
ASSLQSGVPSRFSGSGSGTDFTLTISSLQPEDFATYYCQQYYSYPWTFGQ
GTRLEIK,
DIQMTQSPSSLSASVGDRVTITCRASQSISSYLNWYQQKPGKAPKLLIYA
ASTLQNGVPSRFSGSGSGTDFTLTISSLQPEDFATYYCQQSYSTPFTFGP
GTKVDIK,
DIVMTQSPLSLPVTPGEPASISCRSSQSLLHSNGYNYLDWYLQKPGQSPQ
LLIYLGSNRASGVPDRFSGSGSGTDFTLKISRVEAEDVGVYYCMQTLKTP
LSFGGGTKVEIK,
and
DIQMTQSPSSLSASVGDRVTITCRASQSISSYLNWYQQKPGKAPKLLIYA
ASSLQSGVPSRFSGSGSGTDFTLTISSLQPEDFATYYCQQSYSTPLTFGG
GTKVEIK.

[0346] VH-VL Combinations

[0347] The ABP specific for A*01:01_ASSLPTTMNY may comprise a particular VH sequence and a particular VL sequence. In some embodiments, the ABP specific for A*01:01_ASSLPTTMNY comprises a VH sequence and VL sequence from the scFv designated R3G10-P1A07, R3G10-P1B07, R3G10-P1E12, R3G10-P1F06, R3G10-P1H01, R3G10-P1H08, R3G10-P2C04, R3G10-P2G11, R3G10-P3E04, R3G10-P4A02, R3G10-P4C05, R3G10-P4D04, R3G10-P4D10, R3G10-P4E07, R3G10-P4E12, R3G10-P4G06, R3G10-P5A08, or R3G10-P5C08. The VH and VL sequences of identified scFvs that specifically bind A*01:01_ASSLPTTMNY are shown in Table 8. For clarity, each identified scFv hit is designated a clone name, and each row contains the VH and VL sequences for that particular clone name. For example, the scFv identified by clone name R3G10-P1A07 comprises the VH sequence EVQLLESGGGLVKPGGSLRLSCAASGFTFSSYWMSWVRQAPGKGLEWVSGISARSG RTYYADSVKGRFTISRDDSKNTLYLQMNSLKTEDTAVYYCARDQDTIFGVVITWFDP WGQGTLVTVSS and the VL sequence DIQMTQSPSSLSASVGDRVTITCRASQGISNYLAWYQQKPGKAPKLLIYAASSLQGG VPSRFSGSGSGTDFTLTISSLQPEDFATYYCQQYFTTPYTFGQGTKLEIK.

[0348] Receptors

[0349] Among the provided ABPs, e.g., HLA-PEPTIDE ABPs, are receptors. The receptors can include antigen receptors and other chimeric receptors that specifically bind an HLA-PEPTIDE target disclosed herein. The receptor may be a T cell receptor (TCR). The receptor may be a chimeric antigen receptor (CAR).

[0350] TCRs can be soluble or membrane-bound. Among the antigen receptors are functional non-TCR antigen receptors, such as chimeric antigen receptors (CARs). Also provided are cells expressing the receptors and uses thereof in adoptive cell therapy, such as treatment of diseases and disorders associated with HLA-PEPTIDE expression, including cancer.

[0351] Exemplary antigen receptors, including CARs, and methods for engineering and introducing such receptors into cells, include those described, for example, in international patent application publication numbers WO200014257, WO2013126726, WO2012/129514, WO2014031687, WO2013/166321, WO2013/071154, WO2013/123061 U.S. patent application publication numbers US2002131960, US2013287748, US20130149337, U.S. Pat. Nos. 6,451,995, 7,446,190, 8,252,592, 8,339,645, 8,398,282, 7,446,179, 6,410,319, 7,070,995, 7,265,209, 7,354,762, 7,446,191, 8,324,353, and 8,479,118, and European patent application number EP2537416, and/or those described by Sadelain et al., Cancer Discov. 2013 April; 3(4): 388-398; Davila et al. (2013) PLoS ONE 8(4): e61338; Turtle et al., Curr. Opin. Immunol., 2012 October; 24(5): 633-39; Wu et al., Cancer, 2012 Mar. 18(2): 160-75. In some aspects, the antigen receptors include a CAR as described in U.S. Pat. No. 7,446,190, and those described in International Patent Application Publication No.: WO/2014055668 A1. Exemplary of the CARs include CARs as disclosed in any of the aforementioned publications, such as WO2014031687, U.S. Pat. Nos. 8,339,645, 7,446,179, US 2013/0149337, U.S. Pat. Nos. 7,446,190, 8,389,282, e.g., and in which the antigen-binding portion, e.g., scFv, is replaced by an antibody, e.g., as provided herein.

[0352] Among the chimeric receptors are chimeric antigen receptors (CARs). The chimeric receptors, such as CARs, generally include an extracellular antigen binding domain that includes, is, or is comprised within, one of the provided anti-HLA-PEPTIDE ABPs such as anti-HLA-PEPTIDE antibodies. Thus, the chimeric receptors, e.g., CARs, typically include in their extracellular portions one or more HLA-PEPTIDE-ABPs, such as one or more antigen-binding fragment, domain, or portion, or one or more antibody variable domains, and/or antibody molecules, such as those described herein. In some embodiments, the CAR includes a HLA-PEPTIDE-binding portion or portions of the ABP (e.g., antibody) molecule, such as a variable heavy (VH) chain region and/or variable light (VL) chain region of the antibody, e.g., an scFv antibody fragment.

[0353] TCRs

[0354] In an aspect, the ABPs provided herein, e.g., ABPs that specifically bind HLA-PEPTIDE targets disclosed herein, include T cell receptors (TCRs). The TCRs may be isolated and purified.

[0355] In a majority of T-cells, the TCR is a heterodimer polypeptide having an alpha (a) chain and beta-(β) chain, encoded by TRA and TRB, respectively. The alpha chain generally comprises an alpha variable region, encoded by TRAV, an alpha joining region, encoded by TRAJ, and an alpha constant region, encoded by TRAC. The beta chain generally comprises a beta variable region, encoded by TRBV, a beta diversity region, encoded by TRBD, a beta joining region, encoded by TRBJ, and a beta constant region, encoded by TRBC. The TCR-alpha chain is generated by VJ recombination, and the beta chain receptor is generated by V(D)J recombination. Additional TCR diversity stems from junctional diversity. Several bases may be deleted and others added (called N and P nucleotides) at each of the junctions. In a minority of T-cells, the TCRs include gamma and delta chains. The TCR gamma chain is generated by VJ recombination, and the TCR delta chain is generated by V(D)J recombination (Kenneth Murphy, Paul Travers, and Mark Walport, Janeway's Immunology 7th edition, Garland Science, 2007, which is herein incorporated by reference in its entirety). The antigen binding site of a TCR generally comprises six complementarity determining regions (CDRs). The alpha chain contributes three CDRs, alpha CDR1, alpha CDR2, and αCDR3. The beta chain also contributes three CDR: beta CDR1, beta CDR2, and βCDR3. The αCDR3 and βCDR3 are the regions most affected by V(D)J recombination and account for most of the variation in a TCR repertoire.

[0356] TCRs can specifically recognize HLA-PEPTIDE targets, such as an HLA-PEPTIDE target disclosed in Table A; thus TCRs can be ABPs that specifically bind to HLA-PEPTIDE. TCRs can be soluble, e.g., similar to an antibody secreted by a B cell. TCRs can also be membrane-bound, e.g., on a cell such as a T cell or natural killer (NK) cell. Thus, TCRs can be used in a context that corresponds to soluble antibodies and/or membrane-bound CARs.

[0357] Any of the TCRs disclosed herein may comprise an alpha variable region, an alpha joining region, optionally an alpha constant region, a beta variable region, optionally a beta diversity region, a beta joining region, and optionally a beta constant region.

[0358] In some embodiments, the TCR or CAR is a recombinant TCR or CAR. The recombinant TCR or CAR may include any of the TCRs identified herein but include one or more modifications. Exemplary modifications, e.g., amino acid substitutions, are described herein. Amino acid substitutions described herein may be made with reference to IMGT nomenclature and amino acid numbering as found at www.imgt.org.

[0359] The recombinant TCR or CAR may be a human TCR or CAR, comprising fully human sequences, e.g., natural human sequences. The recombinant TCR or CAR may retain its natural human variable domain sequences but contain modifications to the α constant region, β constant region, or both α and β constant regions. Such modifications to the TCR constant regions may improve TCR assembly and expression for TCR gene therapy by, e.g., driving preferential pairings of the exogenous TCR chains.

[0360] In some embodiments, the α and β constant regions are modified by substituting the entire human constant region sequences for mouse constant region sequences. Such “murinized” TCRs and methods of making them are described in Cancer Res. 2006 Sep. 1; 66(17):8878-86, which is hereby incorporated by reference in its entirety.

[0361] In some embodiments, the α and β constant regions are modified by making one or more amino acid substitutions in the human TCR α constant (TRAC) region, the TCR β constant (TRBC) region, or the TRAC and TRAB regions, which swap particular human residues for murine residues (human→murine amino acid exchange). The one or more amino acid substitutions in the TRAC region may include a Ser substitution at residue 90, an Asp substitution at residue 91, a Val substitution at residue 92, a Pro substitution at residue 93, or any combination thereof. The one or more amino acid substitutions in the human TRBC region may include a Lys substitution at residue 18, an Ala substitution at residue 22, an Ile substitution at residue 133, a His substitution at residue 139, or any combination of the above. Such targeted amino acid substitutions are described in J Immunol Jun. 1, 2010, 184 (11) 6223-6231, which is hereby incorporated by reference in its entirety.

[0362] In some embodiments, the human TRAC contains an Asp substitution at residue 210 and the human TRBC contains a Lys substitution at residue 134. Such substitutions may promote the formation of a salt bridge between the alpha and beta chains and formation of the TCR interchain disulfide bond. These targeted substitutions are described in J Immunol Jun. 1, 2010, 184 (11) 6232-6241, which is hereby incorporated by reference in its entirety.

[0363] In some embodiments, the human TRAC and human TRBC regions are modified to contain introduced cysteines which may improve preferential pairing of the exogenous TCR chains through formation of an additional disulfide bond. For example, the human TRAC may contain a Cys substitution at residue 48 and the human TRBC may contain a Cys substitution at residue 57, described in Cancer Res. 2007 Apr. 15; 67(8):3898-903 and Blood. 2007 Mar. 15; 109(6):2331-8, which are hereby incorporated by reference in their entirety.

[0364] The recombinant TCR or CAR may comprise other modifications to the α and β chains.

[0365] In some embodiments, the α and β chains are modified by linking the extracellular domains of the α and β chains to a complete human CD3ζ (CD3-zeta) molecule. Such modifications are described in J Immunol Jun. 1, 2008, 180 (11) 7736-7746; Gene Ther. 2000 August; 7(16):1369-77; and The Open Gene Therapy Journal, 2011, 4: 11-22, which are hereby incorporated by reference in their entirety.

[0366] In some embodiments, the a chain is modified by introducing hydrophobic amino acid substitutions in the transmembrane region of the a chain, as described in J Immunol Jun. 1, 2012, 188 (11) 5538-5546; hereby incorporated by reference in their entirety.

[0367] The alpha or beta chain may be modified by altering any one of the N-glycosylation sites in the amino acid sequence, as described in J Exp Med. 2009 Feb. 16; 206(2): 463-475; hereby incorporated by reference in its entirety.

[0368] The alpha and beta chain may each comprise a dimerization domain, e.g., a heterologous dimerization domain. Such a heterologous domain may be a leucine zipper, a 5H3 domain or hydrophobic proline rich counter domains, or other similar modalities, as known in the art. In one example, the alpha and beta chains may be modified by introducing 30mer segments to the carboxyl termini of the alpha and beta extracellular domains, wherein the segments selectively associate to form a stable leucine zipper. Such modifications are described in PNAS Nov. 22, 1994. 91 (24) 11408-11412; https://doi.org/10.1073/pnas.91.24.11408; hereby incorporated by reference in its entirety.

[0369] TCRs identified herein may be modified to include mutations that result in increased affinity or half-life, such as those described in WO2012/013913, hereby incorporated by reference in its entirety.

[0370] The recombinant TCR or CAR may be a single chain TCR (scTCR). Such scTCR may comprise an α chain variable region sequence fused to the N terminus of a TCR α chain constant region extracellular sequence, a TCR β chain variable region fused to the N terminus of a TCR β chain constant region extracellular sequence, and a linker sequence linking the C terminus of the α segment to the N terminus of the β segment, or vice versa. In some embodiments, the constant region extracellular sequences of the α and β segments of the scTCR are linked by a disulfide bond. In some embodiments, the length of the linker sequence and the position of the disulfide bond being such that the variable region sequences of the α and β segments are mutually orientated substantially as in native αβ T cell receptors. Exemplary scTCRs are described in U.S. Pat. No. 7,569,664, which is hereby incorporated by reference in its entirety.

[0371] In some cases, the variable regions of the scTCR may be covalently joined by a short peptide linker, such as described in Gene Therapy volume 7, pages 1369-1377 (2000). The short peptide linker may be a serine rich or glycine rich linker. For example, the linker may be (Gly₄Ser)₃, as described in Cancer Gene Therapy (2004) 11, 487-496, incorporated by reference in its entirety.

[0372] The recombinant TCR or antigen binding fragment thereof may be expressed as a fusion protein. For instance, the TCR or antigen binding fragment thereof may be fused with a toxin. Such fusion proteins are described in Cancer Res. 2002 Mar. 15; 62(6):1757-60. The TCR or antigen binding fragment thereof may be fused with an antibody Fc region. Such fusion proteins are described in J Immunol May 1, 2017, 198 (1 Supplement) 120.9.

[0373] In some embodiments, the recombinant receptor such as a TCR or CAR, such as the antibody portion thereof, further includes a spacer, which may be or include at least a portion of an immunoglobulin constant region or variant or modified version thereof, such as a hinge region, e.g., an IgG4 hinge region, and/or a CH1/CL and/or Fc region. In some embodiments, the constant region or portion is of a human IgG, such as IgG4 or IgG1. In some aspects, the portion of the constant region serves as a spacer region between the antigen-recognition component, e.g., scFv, and transmembrane domain. The spacer can be of a length that provides for increased responsiveness of the cell following antigen binding, as compared to in the absence of the spacer. In some examples, the spacer is at or about 12 amino acids in length or is no more than 12 amino acids in length. Exemplary spacers include those having at least about 10 to 229 amino acids, about 10 to 200 amino acids, about 10 to 175 amino acids, about 10 to 150 amino acids, about 10 to 125 amino acids, about 10 to 100 amino acids, about 10 to 75 amino acids, about 10 to 50 amino acids, about 10 to 40 amino acids, about 10 to 30 amino acids, about 10 to 20 amino acids, or about 10 to 15 amino acids, and including any integer between the endpoints of any of the listed ranges. In some embodiments, a spacer region has about 12 amino acids or less, about 119 amino acids or less, or about 229 amino acids or less. Exemplary spacers include IgG4 hinge alone, IgG4 hinge linked to CH2 and CH3 domains, or IgG4 hinge linked to the CH3 domain. Exemplary spacers include, but are not limited to, those described in Hudecek et al. (2013) Clin. Cancer Res., 19:3153 or international patent application publication number WO2014031687. In some embodiments, the constant region or portion is of IgD.

[0374] The antigen recognition domain of a receptor such as a TCR or CAR can be linked to one or more intracellular signaling components, such as signaling components that mimic activation through an antigen receptor complex, such as a TCR complex, in the case of a CAR, and/or signal via another cell surface receptor. Thus, in some embodiments, the HLA-PEPTIDE-specific binding component (e.g., ABP such as antibody or TCR) is linked to one or more transmembrane and intracellular signaling domains. In some embodiments, the transmembrane domain is fused to the extracellular domain. In one embodiment, a transmembrane domain that naturally is associated with one of the domains in the receptor, e.g., CAR, is used. In some instances, the transmembrane domain is selected or modified by amino acid substitution to avoid binding of such domains to the transmembrane domains of the same or different surface membrane proteins to minimize interactions with other members of the receptor complex.

[0375] The transmembrane domain in some embodiments is derived either from a natural or from a synthetic source. Where the source is natural, the domain in some aspects is derived from any membrane-bound or transmembrane protein. Transmembrane regions include those derived from (i.e. comprise at least the transmembrane region(s) of) the alpha, beta or zeta chain of the T-cell receptor, CD28, CD3 epsilon, CD45, CD4, CD5, CD5, CD9, CD 16, CD22, CD33, CD37, CD64, CD80, CD86, CD 134, CD137, and/or CD 154. Alternatively the transmembrane domain in some embodiments is synthetic. In some aspects, the synthetic transmembrane domain comprises predominantly hydrophobic residues such as leucine and valine. In some aspects, a triplet of phenylalanine, tryptophan and valine will be found at each end of a synthetic transmembrane domain. In some embodiments, the linkage is by linkers, spacers, and/or transmembrane domain(s).

[0376] Among the intracellular signaling domains are those that mimic or approximate a signal through a natural antigen receptor, a signal through such a receptor in combination with a costimulatory receptor, and/or a signal through a costimulatory receptor alone. In some embodiments, a short oligo- or polypeptide linker, for example, a linker of between 2 and 10 amino acids in length, such as one containing glycines and serines, e.g., glycine-serine doublet, is present and forms a linkage between the transmembrane domain and the cytoplasmic signaling domain of the receptor.

[0377] The receptor, e.g., the TCR or CAR, can include at least one intracellular signaling component or components. In some embodiments, the receptor includes an intracellular component of a TCR complex, such as a TCR CD3 chain that mediates T-cell activation and cytotoxicity, e.g., CD3 zeta chain. Thus, in some aspects, the HLA-PEPTIDE-binding ABP (e.g., antibody) is linked to one or more cell signaling modules. In some embodiments, cell signaling modules include CD3 transmembrane domain, CD3 intracellular signaling domains, and/or other CD transmembrane domains. In some embodiments, the receptor, e.g., CAR, further includes a portion of one or more additional molecules such as Fc receptor-gamma, CD8, CD4, CD25, or CD16. For example, in some aspects, the CAR includes a chimeric molecule between CD3-zeta or Fc receptor-gamma and CD8, CD4, CD25 or CD16.

[0378] In some embodiments, upon ligation of the TCR or CAR, the cytoplasmic domain or intracellular signaling domain of the receptor activates at least one of the normal effector functions or responses of the immune cell, e.g., T cell engineered to express the receptor. For example, in some contexts, the receptor induces a function of a T cell such as cytolytic activity or T-helper activity, such as secretion of cytokines or other factors. In some embodiments, a truncated portion of an intracellular signaling domain of an antigen receptor component or costimulatory molecule is used in place of an intact immunostimulatory chain, for example, if it transduces the effector function signal. In some embodiments, the intracellular signaling domain or domains include the cytoplasmic sequences of the T cell receptor (TCR), and in some aspects also those of co-receptors that in the natural context act in concert with such receptor to initiate signal transduction following antigen receptor engagement, and/or any derivative or variant of such molecules, and/or any synthetic sequence that has the same functional capability.

[0379] In the context of a natural TCR, full activation generally requires not only signaling through the TCR, but also a costimulatory signal. Thus, in some embodiments, to promote full activation, a component for generating secondary or co-stimulatory signal is also included in the receptor. In other embodiments, the receptor does not include a component for generating a costimulatory signal. In some aspects, an additional receptor is expressed in the same cell and provides the component for generating the secondary or costimulatory signal.

[0380] T cell activation is in some aspects described as being mediated by two classes of cytoplasmic signaling sequences: those that initiate antigen-dependent primary activation through the TCR (primary cytoplasmic signaling sequences), and those that act in an antigen-independent manner to provide a secondary or co-stimulatory signal (secondary cytoplasmic signaling sequences). In some aspects, the receptor includes one or both of such signaling components.

[0381] In some aspects, the receptor includes a primary cytoplasmic signaling sequence that regulates primary activation of the TCR complex. Primary cytoplasmic signaling sequences that act in a stimulatory manner may contain signaling motifs which are known as immunoreceptor tyrosine-based activation motifs or ITAMs. Examples of ITAM containing primary cytoplasmic signaling sequences include those derived from TCR or CD3 zeta, FcR gamma, FcR beta, CD3 gamma, CD3 delta, CD3 epsilon, CD5, CD22, CD79a, CD79b, and CD66d. In some embodiments, cytoplasmic signaling molecule(s) in the CAR contain(s) a cytoplasmic signaling domain, portion thereof, or sequence derived from CD3 zeta.

[0382] In some embodiments, the receptor includes a signaling domain and/or transmembrane portion of a costimulatory receptor, such as CD28, 4-1BB, OX40, DAP10, and ICOS. In some aspects, the same receptor includes both the activating and costimulatory components.

[0383] In some embodiments, the activating domain is included within one receptor, whereas the costimulatory component is provided by another receptor recognizing another antigen. In some embodiments, the receptors include activating or stimulatory receptors, and costimulatory receptors, both expressed on the same cell (see WO2014/055668). In some aspects, the HLA-PEPTIDE-targeting receptor is the stimulatory or activating receptor; in other aspects, it is the costimulatory receptor. In some embodiments, the cells further include inhibitory receptors (e.g., iCARs, see Fedorov et al., Sci. Transl. Medicine, 5(215) (December, 2013), such as a receptor recognizing an antigen other than HLA-PEPTIDE, whereby an activating signal delivered through the HLA-PEPTIDE-targeting receptor is diminished or inhibited by binding of the inhibitory receptor to its ligand, e.g., to reduce off-target effects.

[0384] In certain embodiments, the intracellular signaling domain comprises a CD28 transmembrane and signaling domain linked to a CD3 (e.g., CD3-zeta) intracellular domain. In some embodiments, the intracellular signaling domain comprises a chimeric CD28 and CD137 (4-1BB, TNFRSF9) co-stimulatory domains, linked to a CD3 zeta intracellular domain.

[0385] In some embodiments, the receptor encompasses one or more, e.g., two or more, costimulatory domains and an activation domain, e.g., primary activation domain, in the cytoplasmic portion. Exemplary receptors include intracellular components of CD3-zeta, CD28, and 4-1BB.

[0386] In some embodiments, the CAR or other antigen receptor such as a TCR further includes a marker, such as a cell surface marker, which may be used to confirm transduction or engineering of the cell to express the receptor, such as a truncated version of a cell surface receptor, such as truncated EGFR (tEGFR). In some aspects, the marker includes all or part (e.g., truncated form) of CD34, a nerve growth factor receptor (NGFR), or epidermal growth factor receptor (e.g., tEGFR). In some embodiments, the nucleic acid encoding the marker is operably linked to a polynucleotide encoding for a linker sequence, such as a cleavable linker sequence or a ribosomal skip sequence, e.g., T2A. See WO2014031687. In some embodiments, introduction of a construct encoding the CAR and EGFRt separated by a T2A ribosome switch can express two proteins from the same construct, such that the EGFRt can be used as a marker to detect cells expressing such construct. In some embodiments, a marker, and optionally a linker sequence, can be any as disclosed in published patent application No. WO2014031687. For example, the marker can be a truncated EGFR (tEGFR) that is, optionally, linked to a linker sequence, such as a T2A ribosomal skip sequence.

[0387] In some embodiments, the marker is a molecule, e.g., cell surface protein, not naturally found on T cells or not naturally found on the surface of T cells, or a portion thereof.

[0388] In some embodiments, the molecule is a non-self molecule, e.g., non-self protein, i.e., one that is not recognized as “self” by the immune system of the host into which the cells will be adoptively transferred.

[0389] In some embodiments, the marker serves no therapeutic function and/or produces no effect other than to be used as a marker for genetic engineering, e.g., for selecting cells successfully engineered. In other embodiments, the marker may be a therapeutic molecule or molecule otherwise exerting some desired effect, such as a ligand for a cell to be encountered in vivo, such as a costimulatory or immune checkpoint molecule to enhance and/or dampen responses of the cells upon adoptive transfer and encounter with ligand.

[0390] The TCR or CAR may comprise one or modified synthetic amino acids in place of one or more naturally-occurring amino acids. Exemplary modified amino acids include, but are not limited to, aminocyclohexane carboxylic acid, norleucine, α-amino n-decanoic acid, homoserine, S-acetylaminomethylcysteine, trans-3- and trans-4-hydroxyproline, 4-aminophenylalanine, 4-nitrophenylalanine, 4-chlorophenylalanine, 4-carboxyphenylalanine, (3-phenylserine (3-hydroxyphenylalanine, phenylglycine, α-naphthylalanine, cyclohexylalanine, cyclohexylglycine, indoline-2-carboxylic acid, 1,2,3,4-tetrahydroisoquinoline-3-carboxylic acid, aminomalonic acid, aminomalonic acid monoamide, N′-benzyl-N′-methyl-lysine, N′,N′-dibenzyl-lysine, 6-hydroxylysine, ornithine, α-aminocyclopentane carboxylic acid, α-aminocyclohexane carboxylic acid, α-aminocycloheptane carboxylic acid, α-(2-amino-2-norbomane)-carboxylic acid, α,γ-diaminobutyric acid, α,γ-diaminopropionic acid, homophenylalanine, and α-tertbutylglycine.

[0391] In some cases, CARs are referred to as first, second, and/or third generation CARs. In some aspects, a first generation CAR is one that solely provides a CD3-chain induced signal upon antigen binding; in some aspects, a second-generation CARs is one that provides such a signal and costimulatory signal, such as one including an intracellular signaling domain from a costimulatory receptor such as CD28 or CD137; in some aspects, a third generation CAR in some aspects is one that includes multiple costimulatory domains of different costimulatory receptors.

[0392] In some embodiments, the chimeric antigen receptor includes an extracellular portion containing an antibody or fragment described herein. In some aspects, the chimeric antigen receptor includes an extracellular portion containing an antibody or fragment described herein and an intracellular signaling domain. In some embodiments, an antibody or fragment includes an scFv or a single-domain VH antibody and the intracellular domain contains an ITAM. In some aspects, the intracellular signaling domain includes a signaling domain of a zeta chain of a CD3-zeta (CD3) chain. In some embodiments, the chimeric antigen receptor includes a transmembrane domain linking the extracellular domain and the intracellular signaling domain.

[0393] In some aspects, the transmembrane domain contains a transmembrane portion of CD28. The extracellular domain and transmembrane can be linked directly or indirectly. In some embodiments, the extracellular domain and transmembrane are linked by a spacer, such as any described herein. In some embodiments, the chimeric antigen receptor contains an intracellular domain of a T cell costimulatory molecule, such as between the transmembrane domain and intracellular signaling domain. In some aspects, the T cell costimulatory molecule is CD28 or 41BB.

[0394] In some embodiments, the CAR contains an antibody, e.g., an antibody fragment, a transmembrane domain that is or contains a transmembrane portion of CD28 or a functional variant thereof, and an intracellular signaling domain containing a signaling portion of CD28 or functional variant thereof and a signaling portion of CD3 zeta or functional variant thereof. In some embodiments, the CAR contains an antibody, e.g., antibody fragment, a transmembrane domain that is or contains a transmembrane portion of CD28 or a functional variant thereof, and an intracellular signaling domain containing a signaling portion of a 4-1BB or functional variant thereof and a signaling portion of CD3 zeta or functional variant thereof. In some such embodiments, the receptor further includes a spacer containing a portion of an Ig molecule, such as a human Ig molecule, such as an Ig hinge, e.g. an IgG4 hinge, such as a hinge-only spacer.

[0395] In some embodiments, the transmembrane domain of the receptor, e.g., the CAR, is a transmembrane domain of human CD28 or variant thereof, e.g., a 27-amino acid transmembrane domain of a human CD28 (Accession No.: P10747.1).

[0396] In some embodiments, the chimeric antigen receptor contains an intracellular domain of a T cell costimulatory molecule. In some aspects, the T cell costimulatory molecule is CD28 or 41BB.

[0397] In some embodiments, the intracellular signaling domain comprises an intracellular costimulatory signaling domain of human CD28 or functional variant or portion thereof, such as a 41 amino acid domain thereof and/or such a domain with an LL to GG substitution at positions 186-187 of a native CD28 protein. In some embodiments, the intracellular domain comprises an intracellular costimulatory signaling domain of 41BB or functional variant or portion thereof, such as a 42-amino acid cytoplasmic domain of a human 4-1BB (Accession No. Q07011.1) or functional variant or portion thereof.

[0398] In some embodiments, the intracellular signaling domain comprises a human CD3 zeta stimulatory signaling domain or functional variant thereof, such as a 112 AA cytoplasmic domain of isoform 3 of human CD3.zeta. (Accession No.: P20963.2) or a CD3 zeta signaling domain as described in U.S. Pat. No. 7,446,190 or 8,911,993.

[0399] In some aspects, the spacer contains only a hinge region of an IgG, such as only a hinge of IgG4 or IgG1. In other embodiments, the spacer is an Ig hinge, e.g., and IgG4 hinge, linked to a CH2 and/or CH3 domains. In some embodiments, the spacer is an Ig hinge, e.g., an IgG4 hinge, linked to CH2 and CH3 domains. In some embodiments, the spacer is an Ig hinge, e.g., an IgG4 hinge, linked to a CH3 domain only. In some embodiments, the spacer is or comprises a glycine-serine rich sequence or other flexible linker such as known flexible linkers.

[0400] For example, in some embodiments, the CAR includes an antibody or fragment thereof, such as any of the HLA-PEPTIDE antibodies, including single chain antibodies (sdAbs, e.g. containing only the VH region) and scFvs, described herein, a spacer such as any of the Ig-hinge containing spacers, a CD28 transmembrane domain, a CD28 intracellular signaling domain, and a CD3 zeta signaling domain. In some embodiments, the CAR includes an antibody or fragment, such as any of the HLA-PEPTIDE antibodies, including sdAbs and scFvs described herein, a spacer such as any of the Ig-hinge containing spacers, a CD28 transmembrane domain, a CD28 intracellular signaling domain, and a CD3 zeta signaling domain.

[0401] Target-Specific TCRs to A*01:01_ASSLPTTMNY (SEQ ID NO:) [G10]

[0402] In some aspects, provided herein are ABPs comprising TCRs or antigen-binding fragments thereof that specifically bind an HLA-PEPTIDE target, wherein the HLA Class I molecule of the HLA-PEPTIDE target is HLA subtype A*01:01 and the HLA-restricted peptide of the HLA-PEPTIDE target comprises the sequence ASSLPTTMNY (“G10”).

[0403] The TCR specific for A*01:01_ASSLPTTMNY may comprise an αCDR3 sequence. The αCDR3 sequence may be any one of the αCDR3 sequences in Table 15. Alpha and beta CDR3 sequences of the identified TCR clonotypes are shown in Table 15.

[0404] The TCR specific for A*01:01_ASSLPTTMNY may comprise a βCDR3 sequence. The βCDR3 sequence may be any one of the βCDR3 sequences in Table 15

[0405] The TCR specific for A*01:01_ASSLPTTMNY may comprise a particular αCDR3 sequence and a particular βCDR3 sequence. For example, the TCR specific for A*01:01_ASSLPTTMNY may comprise the αCDR3 sequence and βCDR3 sequence from any one of TCRs identified in Table 15. For clarity, each identified TCR was assigned a TCR ID number. For example TCR ID #1 comprises the αCDR3 sequence CAGPGNTGKLIF and the βCDR3 sequence CASSNAGDQPQHF.

[0406] The TCR specific for A*01:01_ASSLPTTMNY may comprise a TRAV, a TRAJ, a TRBV, optionally a TRBD, and a TRBJ amino acid sequence, optionally a TRAC sequence and optionally a TRBC sequence. For example, the TCR specific for A*01:01_ASSLPTTMNY may comprise the TRAV, TRAJ, TRBV, TRBD, TRBJ amino acid sequence, TRAC sequence and TRBC sequence from any one of the TCRs identified in Table 14. For clarity, each identified TCR was assigned a TCR ID number. For example the TCR assigned TCR ID #1 comprises a TRAV25 sequence, a TRAJ37 sequence, a TRAC sequence, a TRBV19 sequence, a TRBD1 sequence, a TRBJ1-5 sequence, and a TRBC1 sequence.

[0407] The TCR specific for A*01:01_ASSLPTTMNY may comprise an alpha VJ sequence. The alpha VJ sequence may be any one of the alpha VJ sequences in Table 16.

[0408] The TCR specific for A*01:01_ASSLPTTMNY may comprise a beta V(D)J sequence. The beta V(D)J sequence may be any one of the beta V(D)J sequences in Table 16.

[0409] The TCR specific for A*01:01_ASSLPTTMNY may comprise an alpha VJ sequence and a beta V(D)J sequence. For example, the TCR specific for A*01:01_ASSLPTTMNY may comprise the alpha VJ sequence and the beta V(D)J sequence from any one of the TCRs identified in Table 16. Full length alpha V(J) and beta V(D)J sequences of the identified TCR clonotypes are shown in Table 16. For example TCR ID #1 comprises the alpha V(J) sequence MLLITSMLVLWMQLSQVNGQQVMQIPQYQHVQEGEDFTTYCNSSTTLSNIQWYKQ RPGGHPVFLIQLVKSGEVKKQKRLTFQFGEAKKNSSLHITATQTTDVGTYFCAGPGN TGKLIFGQGTTLQVK and the beta V(D)J sequence MSNQVLCCVVLCFLGANTVDGGITQSPKYLFRKEGQNVTLSCEQNLNHDAMYWYR QDPGQGLRLIYYSQIVNDFQKGDIAEGYSVSREKKESFPLTVTSAQKNPTAFYLCAS S NAGDQPQHFGDGTRLSIL.

### Target-Specific TCRs to A*01:01_HSEVGLPVY

[0410] In some aspects, provided herein are ABPs comprising TCRs or antigen-binding fragments thereof that specifically bind an HLA-PEPTIDE target, wherein the HLA Class I molecule of the HLA-PEPTIDE target is HLA subtype A*01:01 and the HLA-restricted peptide of the HLA-PEPTIDE target comprises the sequence HSEVGLPVY.

[0411] The TCR specific for A*01:01_HSEVGLPVY may comprise an αCDR3 sequence. The αCDR3 sequence may be any one of the αCDR3 sequences in Table 18. Alpha and beta CDR3 sequences of the identified TCR clonotypes are shown in Table 18.

[0412] The TCR specific for A*01:01_HSEVGLPVY may comprise a βCDR3 sequence. The βCDR3 sequence may be any one of the βCDR3 sequences in Table 18.

[0413] The TCR specific for A*01:01_HSEVGLPVY may comprise a particular αCDR3 sequence and a particular βCDR3 sequence. For example, the TCR specific for A*01:01 HSEVGLPVY may comprise the αCDR3 sequence and βCDR3 sequence from any one of TCRs identified in Table 18. For clarity, each identified TCR was assigned a TCR ID number. For example TCR ID #345 comprises the αCDR3 sequence CAANPGDYKLSF and the βCDR3 sequence CASSSNYEQYF.

[0414] The TCR specific for A*01:01_HSEVGLPVY may comprise a TRAV, a TRAJ, a TRBV, optionally a TRBD, and a TRBJ amino acid sequence, optionally a TRAC sequence and optionally a TRBC sequence. For example, the TCR specific for A*01:01_HSEVGLPVY may comprise the TRAV, TRAJ, TRBV, TRBD, TRBJ amino acid sequence, TRAC sequence and TRBC sequence from any one of the TCRs identified in Table 17. For clarity, each identified TCR was assigned a TCR ID number. For example, the TCR assigned TCR ID #345 comprises a TRAV13-1 sequence, a TRAJ20 sequence, a TRAC sequence, a TRBV7-9 sequence, a TRBJ2-7 sequence, and a TRBC2 sequence.

[0415] The TCR specific for A*01:01_HSEVGLPVY may comprise an alpha VJ sequence. The alpha VJ sequence may be any one of the alpha VJ sequences in Table 19.

[0416] The TCR specific for A*01:01_HSEVGLPVY may comprise a beta V(D)J sequence. The beta V(D)J sequence may be any one of the beta V(D)J sequences in Table 19.

[0417] The TCR specific for A*01:01_HSEVGLPVY may comprise an alpha VJ sequence and a beta V(D)J sequence. For example, the TCR specific for A*01:01_HSEVGLPVY may comprise the alpha VJ sequence and the beta V(D)J sequence from any one of the TCRs identified in Table 19. Full length alpha V(J) and beta V(D)J sequences of the identified TCR clonotypes are shown in Table 19. For example TCR ID #345 comprises the alpha V(J) sequence MTSIRAVFIFLWLQLDLVNGENVEQHPSTLSVQEGDSAVIKCTYSDSASNYFPWYKQEL GKGPQLIIDIRSNVGEKKDQRIAVTLNKTAKHFSLHITETQPEDSAVYFCAANPGDYKLS FGAGTTVTVR and the beta V(D)J sequence MGTSLLCWMALCLLGADHADTGVSQNPRHKITKRGQNVTFRCDPISEHNRLYWYRQT LGQGPEFLTYFQNEAQLEKSRLLSDRFSAERPKGSFSTLEIQRTEQGDSAMYLCASSSNY EQYFGPGTRLTVT.

### Engineered Cells

[0418] Also provided are cells such as cells that contain an antigen receptor, e.g., that contains an extracellular domain including an anti-HLA-PEPTIDE ABP (e.g., a CAR or TCR), described herein. Also provided are populations of such cells, and compositions containing such cells. In some embodiments, compositions or populations are enriched for such cells, such as in which cells expressing the HLA-PEPTIDE ABP make up at least 1, 5, 10, 20, 30, 40, 50, 60, 70, 80, 90, 91, 92, 93, 94, 95, 96, 97, 98, 99, or more than 99 percent of the total cells in the composition or cells of a certain type such as T cells or CD8+ or CD4+ cells. In some embodiments, a composition comprises at least one cell containing an antigen receptor disclosed herein. Among the compositions are pharmaceutical compositions and formulations for administration, such as for adoptive cell therapy. Also provided are therapeutic methods for administering the cells and compositions to subjects, e.g., patients.

[0419] Thus also provided are genetically engineered cells expressing an ABP comprising a receptor, e.g., a TCR or CAR. The cells generally are eukaryotic cells, such as mammalian cells, and typically are human cells. In some embodiments, the cells are derived from the blood, bone marrow, lymph, or lymphoid organs, are cells of the immune system, such as cells of the innate or adaptive immunity, e.g., myeloid or lymphoid cells, including lymphocytes, typically T cells and/or NK cells. Other exemplary cells include stem cells, such as multipotent and pluripotent stem cells, including induced pluripotent stem cells (iPSCs). The cells typically are primary cells, such as those isolated directly from a subject and/or isolated from a subject and frozen. In some embodiments, the cells include one or more subsets of T cells or other cell types, such as whole T cell populations, CD4+ cells, CD8+ cells, and subpopulations thereof, such as those defined by function, activation state, maturity, potential for differentiation, expansion, recirculation, localization, and/or persistence capacities, antigen-specificity, type of antigen receptor, presence in a particular organ or compartment, marker or cytokine secretion profile, and/or degree of differentiation. With reference to the subject to be treated, the cells may be allogeneic and/or autologous. Among the methods include off-the-shelf methods. In some aspects, such as for off-the-shelf technologies, the cells are pluripotent and/or multipotent, such as stem cells, such as induced pluripotent stem cells (iPSCs). In some embodiments, the methods include isolating cells from the subject, preparing, processing, culturing, and/or engineering them, as described herein, and re-introducing them into the same patient, before or after cryopreservation.

[0420] Among the sub-types and subpopulations of T cells and/or of CD4+ and/or of CD8+ T cells are naive T (TN) cells, effector T cells (TEFF), memory T cells and sub-types thereof, such as stem cell memory T (TSCM), central memory T (TCM), effector memory T (TEM), or terminally differentiated effector memory T cells, tumor-infiltrating lymphocytes (TIL), immature T cells, mature T cells, helper T cells, cytotoxic T cells, mucosa-associated invariant T (MALT) cells, naturally occurring and adaptive regulatory T (Treg) cells, helper T cells, such as TH1 cells, TH2 cells, TH3 cells, TH17 cells, TH9 cells, TH22 cells, follicular helper T cells, alpha/beta T cells, and delta/gamma T cells.

[0421] In some embodiments, the cells are natural killer (NK) cells. In some embodiments, the cells are monocytes or granulocytes, e.g., myeloid cells, macrophages, neutrophils, dendritic cells, mast cells, eosinophils, and/or basophils.

[0422] The cells may be genetically modified to reduce expression or knock out endogenous TCRs. Such modifications are described in Mol Ther Nucleic Acids. 2012 December; 1(12): e63; Blood. 2011 Aug. 11; 118(6):1495-503; Blood. 2012 Jun. 14; 119(24): 5697-5705; Torikai, Hiroki et al “HLA and TCR Knockout by Zinc Finger Nucleases: Toward “off-the-Shelf” Allogeneic T-Cell Therapy for CD19+ Malignancies..” Blood 116.21 (2010): 3766; Blood. 2018 Jan. 18; 131(3):311-322. doi: 10.1182/blood-2017-05-787598; and WO2016069283, which are incorporated by reference in their entirety.

[0423] The cells may be genetically modified to promote cytokine secretion. Such modifications are described in Hsu C, Hughes M S, Zheng Z, Bray R B, Rosenberg S A, Morgan R A. Primary human T lymphocytes engineered with a codon-optimized IL-15 gene resist cytokine withdrawal-induced apoptosis and persist long-term in the absence of exogenous cytokine. J Immunol. 2005; 175:7226-34; Quintarelli C, Vera J F, Savoldo B, Giordano Attianese G M, Pule M, Foster A E, Co-expression of cytokine and suicide genes to enhance the activity and safety of tumor-specific cytotoxic T lymphocytes. Blood. 2007; 110:2793-802; and Hsu C, Jones S A, Cohen C J, Zheng Z, Kerstann K, Zhou J, Cytokine-independent growth and clonal expansion of a primary human CD8+ T-cell clone following retroviral transduction with the IL-15 gene. Blood. 2007; 109:5168-77.

[0424] Mismatching of chemokine receptors on T cells and tumor-secreted chemokines has been shown to account for the suboptimal trafficking of T cells into the tumor microenvironment. To improve efficacy of therapy, the cells may be genetically modified to increase recognition of chemokines in tumor micro environment. Examples of such modifications are described in Moon et al., Expression of a functional CCR2 receptor enhances tumor localization and tumor eradication by retargeted human T cells expressing a mesothelin-specific chimeric antibody receptor. Clin Cancer Res. 2011; 17: 4719-4730; and Craddock et al., Enhanced tumor trafficking of GD2 chimeric antigen receptor T cells by expression of the chemokine receptor CCR2b. J Immunother. 2010; 33: 780-788.

[0425] The cells may be genetically modified to enhance expression of costimulatory/enhancing receptors, such as CD28 and 41BB.

[0426] Adverse effects of T cell therapy can include cytokine release syndrome and prolonged B-cell depletion. Introduction of a suicide/safety switch in the recipient cells may improve the safety profile of a cell-based therapy. Accordingly, the cells may be genetically modified to include a suicide/safety switch. The suicide/safety switch may be a gene that confers sensitivity to an agent, e.g., a drug, upon the cell in which the gene is expressed, and which causes the cell to die when the cell is contacted with or exposed to the agent. Exemplary suicide/safety switches are described in Protein Cell. 2017 August; 8(8): 573-589. The suicide/safety switch may be HSV-TK. The suicide/safety switch may be cytosine deaminase, purine nucleoside phosphorylase, or nitroreductase. The suicide/safety switch may be RapaCIDe™, described in U.S. Patent Application Pub. No. US20170166877A1. The suicide/safety switch system may be CD20/Rituximab, described in Haematologica. 2009 September; 94(9): 1316-1320. These references are incorporated by reference in their entirety.

[0427] The TCR or CAR may be introduced into the recipient cell as a split receptor which assembles only in the presence of a heterodimerizing small molecule. Such systems are described in Science. 2015 Oct. 16; 350(6258): aab4077, and in U.S. Pat. No. 9,587,020, which are hereby incorporated by reference.

[0428] In some embodiments, the cells include one or more nucleic acids, e.g., a polynucleotide encoding a TCR or CAR disclosed herein, wherein the polynucleotide is introduced via genetic engineering, and thereby express recombinant or genetically engineered TCRs or CARs as disclosed herein. In some embodiments, the nucleic acids are heterologous, i.e., normally not present in a cell or sample obtained from the cell, such as one obtained from another organism or cell, which for example, is not ordinarily found in the cell being engineered and/or an organism from which such cell is derived. In some embodiments, the nucleic acids are not naturally occurring, such as a nucleic acid not found in nature, including one comprising chimeric combinations of nucleic acids encoding various domains from multiple different cell types.

[0429] The nucleic acids may include a codon-optimized nucleotide sequence. Without being bound to a particular theory or mechanism, it is believed that codon optimization of the nucleotide sequence increases the translation efficiency of the mRNA transcripts. Codon optimization of the nucleotide sequence may involve substituting a native codon for another codon that encodes the same amino acid, but can be translated by tRNA that is more readily available within a cell, thus increasing translation efficiency. Optimization of the nucleotide sequence may also reduce secondary mRNA structures that would interfere with translation, thus increasing translation efficiency.

[0430] A construct or vector may be used to introduce the TCR or CAR into the recipient cell. Exemplary constructs are described herein. Polynucleotides encoding the alpha and beta chains of the TCR or CAR may in a single construct or in separate constructs. The polynucleotides encoding the alpha and beta chains may be operably linked to a promoter, e.g., a heterologous promoter. The heterologous promoter may be a strong promoter, e.g., EF1alpha, CMV, PGK1, Ubc, beta actin, CAG promoter, and the like. The heterologous promoter may be a weak promoter. The heterologous promoter may be an inducible promoter. Exemplary inducible promoters include, but are not limited to TRE, NFAT, GAL4, LAC, and the like. Other exemplary inducible expression systems are described in U.S. Pat. Nos. 5,514,578; 6,245,531; 7,091,038 and European Patent No. 0517805, which are incorporated by reference in their entirety.

[0431] The construct for introducing the TCR or CAR into the recipient cell may also comprise a polynucleotide encoding a signal peptide (signal peptide element). The signal peptide may promote surface trafficking of the introduced TCR or CAR. Exemplary signal peptides include, but are not limited to CD8 signal peptide, immunoglobulin signal peptides, where specific examples include GM-CSF and IgG kappa. Such signal peptides are described in Trends Biochem Sci. 2006 October; 31(10):563-71. Epub 2006 Aug. 21; and An, et al. “Construction of a New Anti-CD19 Chimeric Antigen Receptor and the Anti-Leukemia Function Study of the Transduced T Cells.” Oncotarget 7.9 (2016): 10638-10649. PMC. Web. 16 Aug. 2018; which are hereby incorporated by reference.

[0432] In some cases, e.g., cases where the alpha and beta chains are expressed from a single construct or open reading frame, or cases wherein a marker gene is included in the construct, the construct may comprise a ribosomal skip sequence. The ribosomal skip sequence may be a 2A peptide, e.g., a P2A or T2A peptide. Exemplary P2A and T2A peptides are described in Scientific Reports volume 7, Article number: 2193 (2017), hereby incorporated by reference in its entirety. In some cases, a FURIN/PACE cleavage site is introduced upstream of the 2A element. FURIN/PACE cleavage sites are described in, e.g., http://www.nuolan.net/substrates.html. The cleavage peptide may also be a factor Xa cleavage site. In cases where the alpha and beta chains are expressed from a single construct or open reading frame, the construct may comprise an internal ribosome entry site (IRES).

[0433] The construct may further comprise one or more marker genes. Exemplary marker genes include but are not limited to GFP, luciferase, HA, lacZ. The marker may be a selectable marker, such as an antibiotic resistance marker, a heavy metal resistance marker, or a biocide resistant marker, as is known to those of skill in the art. The marker may be a complementation marker for use in an auxotrophic host. Exemplary complementation markers and auxotrophic hosts are described in Gene. 2001 Jan. 24; 263(1-2):159-69. Such markers may be expressed via an IRES, a frameshift sequence, a 2A peptide linker, a fusion with the TCR or CAR, or expressed separately from a separate promoter.

[0434] Exemplary vectors or systems for introducing TCRs or CARs into recipient cells include, but are not limited to Adeno-associated virus, Adenovirus, Adenovirus+Modified vaccinia, Ankara virus (MVA), Adenovirus+Retrovirus, Adenovirus+Sendai virus, Adenovirus+Vaccinia virus, Alphavirus (VEE) Replicon Vaccine, Antisense oligonucleotide, Bifidobacterium longum, CRISPR-Cas9, E. coli, Flavivirus, Gene gun, Herpesviruses, Herpes simplex virus, Lactococcus lactis, Electroporation, Lentivirus, Lipofection, Listeria monocytogenes, Measles virus, Modified Vaccinia Ankara virus (MVA), mRNA Electroporation, Naked/Plasmid DNA, Naked/Plasmid DNA+Adenovirus, Naked/Plasmid DNA+Modified Vaccinia Ankara virus (MVA), Naked/Plasmid DNA+RNA transfer, Naked/Plasmid DNA+Vaccinia virus, Naked/Plasmid DNA+Vesicular stomatitis virus, Newcastle disease virus, Non-viral, PiggyBac™ (PB) Transposon, nanoparticle-based systems, Poliovirus, Poxvirus, Poxvirus+Vaccinia virus, Retrovirus, RNA transfer, RNA transfer+Naked/Plasmid DNA, RNA virus, Saccharomyces cerevisiae, Salmonella typhimurium, Semliki forest virus, Sendai virus, Shigella dysenteriae, Simian virus, siRNA, Sleeping Beauty transposon, Streptococcus mutans, Vaccinia virus, Venezuelan equine encephalitis virus replicon, Vesicular stomatitis virus, and Vibrio cholera.

[0435] In preferred embodiments, the TCR or CAR is introduced into the recipient cell via adeno associated virus (AAV), adenovirus, CRISPR-CAS9, herpesvirus, lentivirus, lipofection, mRNA electroporation, PiggyBac™ (PB) Transposon, retrovirus, RNA transfer, or Sleeping Beauty transposon.

[0436] In some embodiments, a vector for introducing a TCR or CAR into a recipient cell is a viral vector. Exemplary viral vectors include adenoviral vectors, adeno-associated viral (AAV) vectors, lentiviral vectors, herpes viral vectors, retroviral vectors, and the like. Such vectors are described herein.

[0437] Exemplary embodiments of TCR constructs for introducing a TCR or CAR into recipient cells is shown in FIG. 2. In some embodiments, a TCR construct includes, from the 5′-3′ direction, the following polynucleotide sequences: a promoter sequence, a signal peptide sequence, a TCR β variable (TCRβv) sequence, a TCR β constant ((TCRβc) sequence, a cleavage peptide (e.g., P2A), a signal peptide sequence, a TCR α variable (TCRαv) sequence, and a TCR α constant (TCRαc) sequence. In some embodiments, the TCRβc and TCRαc sequences of the construct include one or more murine regions, e.g., full murine constant sequences or human 4 murine amino acid exchanges as described herein. In some embodiments, the construct further includes, 3′ of the TCRαc sequence, a cleavage peptide sequence (e.g., T2A) followed by a reporter gene. In an embodiment, the construct includes, from the 5′-3′ direction, the following polynucleotide sequences: a promoter sequence, a signal peptide sequence, a TCR β variable (TCRβv) sequence, a TCR β constant ((TCRβc) sequence containing one or more murine regions, a cleavage peptide (e.g., P2A), a signal peptide sequence, a TCR α variable (TCRαv) sequence, and a TCR α constant (TCRαc) sequence containing one or more murine regions, a cleavage peptide (e.g., T2A), and a reporter gene.

[0438] FIG. 3 depicts an exemplary construct backbone sequence for cloning TCRs into expression systems for therapy development.

[0439] FIG. 4 depicts an exemplary construct sequence for cloning an identified A*0201 LLASSILCA-specific TCR into expression systems for therapy development.

[0440] FIG. 5 depicts an exemplary construct sequence for cloning an identified A*0101 EVDPIGHLY-specific TCR into expression systems for therapy development.

[0441] Nucleotides, Vectors, Host Cells, and Related Methods

[0442] Also provided are isolated nucleic acids encoding HLA-PEPTIDE ABPs, vectors comprising the nucleic acids, and host cells comprising the vectors and nucleic acids, as well as recombinant techniques for the production of the ABPs.

[0443] The nucleic acids may be recombinant. The recombinant nucleic acids may be constructed outside living cells by joining natural or synthetic nucleic acid segments to nucleic acid molecules that can replicate in a living cell, or replication products thereof. For purposes herein, the replication can be in vitro replication or in vivo replication.

[0444] For recombinant production of an ABP, the nucleic acid(s) encoding it may be isolated and inserted into a replicable vector for further cloning (i.e., amplification of the DNA) or expression. In some aspects, the nucleic acid may be produced by homologous recombination, for example as described in U.S. Pat. No. 5,204,244, incorporated by reference in its entirety.

[0445] Many different vectors are known in the art. The vector components generally include one or more of the following: a signal sequence, an origin of replication, one or more marker genes, an enhancer element, a promoter, and a transcription termination sequence, for example as described in U.S. Pat. No. 5,534,615, incorporated by reference in its entirety.

[0446] Exemplary vectors or constructs suitable for expressing an ABP, e.g., a TCR, CAR, antibody, or antigen binding fragment thereof, include, e.g., the pUC series (Fermentas Life Sciences), the pBluescript series (Stratagene, LaJolla, Calif.), the pET series (Novagen, Madison, Wis.), the pGEX series (Pharmacia Biotech, Uppsala, Sweden), and the pEX series (Clontech, Palo Alto, Calif.). Bacteriophage vectors, such as AGTlO, AGTl 1, AZapII (Stratagene), AEMBL4, and ANMl 149, are also suitable for expressing an ABP disclosed herein.

[0447] Illustrative examples of suitable host cells are provided below. These host cells are not meant to be limiting, and any suitable host cell may be used to produce the ABPs provided herein.

[0448] Suitable host cells include any prokaryotic (e.g., bacterial), lower eukaryotic (e.g., yeast), or higher eukaryotic (e.g., mammalian) cells. Suitable prokaryotes include eubacteria, such as Gram-negative or Gram-positive organisms, for example, Enterobacteriaceae such as Escherichia (E. coli), Enterobacter, Envinia, Klebsiella, Proteus, Salmonella (S. typhimurium), Serratia (S. marcescans), Shigella, Bacilli (B. subtilis and B. licheniformis), Pseudomonas (P. aeruginosa), and Streptomyces. One useful E. coli cloning host is E. coli 294, although other strains such as E. coli B, E. coli X1776, and E. coli W3110 are also suitable.

[0449] In addition to prokaryotes, eukaryotic microbes such as filamentous fungi or yeast are also suitable cloning or expression hosts for HLA-PEPTIDE ABP-encoding vectors. Saccharomyces cerevisiae, or common baker's yeast, is a commonly used lower eukaryotic host microorganism. However, a number of other genera, species, and strains are available and useful, such as Schizosaccharomyces pombe, Kluyveromyces (K. lactis, K fragilis, K. bulgaricus K. wickeramii, K. waltii, K, drosophilarum, K. thermotolerans, and K. marxianus), Yarrowia, Pichia pastoris, Candida (C. albicans), Trichoderma reesia, Neurospora crassa, Schwanniomyces (S. occidentalis), and filamentous fungi such as, for example Penicillium, Tolypocladium, and Aspergillus (A. nidulans and A. niger).

[0450] Useful mammalian host cells include COS-7 cells, HEK293 cells; baby hamster kidney (BHK) cells; Chinese hamster ovary (CHO); mouse sertoli cells; African green monkey kidney cells (VERO-76), and the like.

[0451] The host cells used to produce the HLA-PEPTIDE ABP may be cultured in a variety of media. Commercially available media such as, for example, Ham's F10, Minimal Essential Medium (MEM), RPMI-1640, and Dulbecco's Modified Eagle's Medium (DMEM) are suitable for culturing the host cells. In addition, any of the media described in Ham et al., Meth. Enz., 1979, 58:44; Barnes et al., Anal. Biochem., 1980, 102:255; and U.S. Pat. Nos. 4,767,704, 4,657,866, 4,927,762, 4,560,655, and 5,122,469; or WO 90/03430 and WO 87/00195 may be used. Each of the foregoing references is incorporated by reference in its entirety.

[0452] Any of these media may be supplemented as necessary with hormones and/or other growth factors (such as insulin, transferrin, or epidermal growth factor), salts (such as sodium chloride, calcium, magnesium, and phosphate), buffers (such as HEPES), nucleotides (such as adenosine and thymidine), antibiotics, trace elements (defined as inorganic compounds usually present at final concentrations in the micromolar range), and glucose or an equivalent energy source. Any other necessary supplements may also be included at appropriate concentrations that would be known to those skilled in the art.

[0453] The culture conditions, such as temperature, pH, and the like, are those previously used with the host cell selected for expression, and will be apparent to the ordinarily skilled artisan.

[0454] When using recombinant techniques, the ABP can be produced intracellularly, in the periplasmic space, or directly secreted into the medium. If the ABP is produced intracellularly, as a first step, the particulate debris, either host cells or lysed fragments, is removed, for example, by centrifugation or ultrafiltration. For example, Carter et al. (Bio/Technology, 1992, 10:163-167, incorporated by reference in its entirety) describes a procedure for isolating ABPs which are secreted to the periplasmic space of E. coli. Briefly, cell paste is thawed in the presence of sodium acetate (pH 3.5), EDTA, and phenylmethylsulfonylfluoride (PMSF) over about 30 min. Cell debris can be removed by centrifugation.

[0455] In some embodiments, the ABP is produced in a cell-free system. In some aspects, the cell-free system is an in vitro transcription and translation system as described in Yin et al., mAbs, 2012, 4:217-225, incorporated by reference in its entirety. In some aspects, the cell-free system utilizes a cell-free extract from a eukaryotic cell or from a prokaryotic cell. In some aspects, the prokaryotic cell is E. coli. Cell-free expression of the ABP may be useful, for example, where the ABP accumulates in a cell as an insoluble aggregate, or where yields from periplasmic expression are low.

[0456] Where the ABP is secreted into the medium, supernatants from such expression systems are generally first concentrated using a commercially available protein concentration filter, for example, an Amicon® or Millipore® Pellcon® ultrafiltration unit. A protease inhibitor such as PMSF may be included in any of the foregoing steps to inhibit proteolysis and antibiotics may be included to prevent the growth of adventitious contaminants.

[0457] The ABP composition prepared from the cells can be purified using, for example, hydroxylapatite chromatography, gel electrophoresis, dialysis, and affinity chromatography, with affinity chromatography being a particularly useful purification technique. The suitability of protein A as an affinity ligand depends on the species and isotype of any immunoglobulin Fc domain that is present in the ABP. Protein A can be used to purify ABPs that comprise human γ1, γ2, or γ4 heavy chains (Lindmark et al., J. Immunol. Meth., 1983, 62:1-13, incorporated by reference in its entirety). Protein G is useful for all mouse isotypes and for human γ3 (Guss et al., EMBO J., 1986, 5:1567-1575, incorporated by reference in its entirety).

[0458] The matrix to which the affinity ligand is attached is most often agarose, but other matrices are available. Mechanically stable matrices such as controlled pore glass or poly(styrenedivinyl)benzene allow for faster flow rates and shorter processing times than can be achieved with agarose. Where the ABP comprises a C_{H3} domain, the BakerBond ABX® resin is useful for purification.

[0459] Other techniques for protein purification, such as fractionation on an ion-exchange column, ethanol precipitation, Reverse Phase HPLC, chromatography on silica, chromatography on heparin Sepharose®, chromatofocusing, SDS-PAGE, and ammonium sulfate precipitation are also available, and can be applied by one of skill in the art.

[0460] Following any preliminary purification step(s), the mixture comprising the ABP of interest and contaminants may be subjected to low pH hydrophobic interaction chromatography using an elution buffer at a pH between about 2.5 to about 4.5, generally performed at low salt concentrations (e.g., from about 0 to about 0.25 M salt).

[0461] Methods of Making HLA-Peptide ABPs

### HLA-Peptide Antigen Preparation

[0462] The HLA-PEPTIDE antigen used for isolation or creation of the ABPs provided herein may be intact HLA-PEPTIDE or a fragment of HLA-PEPTIDE. The HLA-PEPTIDE antigen may be, for example, in the form of isolated protein or a protein expressed on the surface of a cell.

[0463] In some embodiments, the HLA-PEPTIDE antigen is a non-naturally occurring variant of HLA-PEPTIDE, such as a HLA-PEPTIDE protein having an amino acid sequence or post-translational modification that does not occur in nature.

[0464] In some embodiments, the HLA-PEPTIDE antigen is truncated by removal of, for example, intracellular or membrane-spanning sequences, or signal sequences. In some embodiments, the HLA-PEPTIDE antigen is fused at its C-terminus to a human IgG1 Fc domain or a polyhistidine tag.

### Methods of Identifying ABPs

[0465] ABPs that bind HLA-PEPTIDE can be identified using any method known in the art, e.g., phage display or immunization of a subject.

[0466] One method of identifying an antigen binding protein includes providing at least one HLA-PEPTIDE target; and binding the at least one target with an antigen binding protein, thereby identifying the antigen binding protein. The antigen binding protein can be present in a library comprising a plurality of distinct antigen binding proteins.

[0467] In some embodiments, the library is a phage display library. The phage display library can be developed so that it is substantially free of antigen binding proteins that non-specifically bind the HLA of the HLA-PEPTIDE target. The antigen binding protein can be present in a yeast display library comprising a plurality of distinct antigen binding proteins. The yeast display library can be developed so that it is substantially free of antigen binding proteins that non-specifically bind the HLA of the HLA-PEPTIDE target.

[0468] In some embodiments, the library is a yeast display library.

[0469] In some embodiments, the library is a TCR display library. Exemplary TCR display libraries and methods of using such TCR display libraries are described in WO 98/39482; WO 01/62908; WO 2004/044004: WO20051 16646, WO2014018863, WO2015136072, WO2017046198; and Helmut et al, (2000) PNAS 97 (26) 14578-14583, which are hereby incorporated by reference in their entirety.

[0470] In some aspects, the binding step is performed more than once, optionally at least three times, e.g., at least 1, 2, 3, 4, 5, 6, 7, 8, 9, or 10×.

[0471] In addition, the method can also include contacting the antigen binding protein with one or more peptide-HLA complexes that are distinct from the HLA-PEPTIDE target to determine if the antigen binding protein selectively binds the HLA-PEPTIDE target.

[0472] Another method of identifying an antigen binding protein can include obtaining at least one HLA-PEPTIDE target; administering the HLA-PEPTIDE target to a subject (e.g., a mouse, rabbit or a llama), optionally in combination with an adjuvant; and isolating the antigen binding protein from the subject. Isolating the antigen binding protein can include screening the serum of the subject to identify the antigen binding protein. The method can also include contacting the antigen binding protein with one or more peptide-HLA complexes that are distinct from the HLA-PEPTIDE target, e.g., to determine if the antigen binding protein selectively binds to the HLA-PEPTIDE target. An antigen binding protein that is identified can be humanized.

[0473] In some aspects, isolating the antigen binding protein comprises isolating a B cell from the subject that expresses the antigen binding protein. The B cell can be used to create a hybridoma. The B cell can also be used for cloning one or more of its CDRs. The B cell can also be immortalized, for example, by using EBV transformation. Sequences encoding an antigen binding protein can be cloned from immortalized B cells or can be cloned directly from B cells isolated from an immunized subject. A library that comprises the antigen binding protein of the B cell can also be created, optionally wherein the library is phage display or yeast display.

[0474] Another method of identifying an antigen binding protein can include obtaining a cell comprising the antigen binding protein; contacting the cell with an HLA-multimer (e.g., a tetramer) comprising at least one HLA-PEPTIDE target; and identifying the antigen binding protein via binding between the HLA-multimer and the antigen binding protein.

[0475] The cell can be, e.g., a T cell, optionally a cytotoxic T lymphocyte (CTL), or a natural killer (NK) cell, for example. The method can further include isolating the cell, optionally using flow cytometry, magnetic separation, or single cell separation. The method can further include sequencing the antigen binding protein.

[0476] Another method of identifying an antigen binding protein can include obtaining one or more cells comprising the antigen binding protein; activating the one or more cells with at least one HLA-PEPTIDE target presented on at least one antigen presenting cell (APC); and identifying the antigen binding protein via selection of one or more cells activated by interaction with at least one HLA-PEPTIDE target.

[0477] The cell can be, e.g., a T cell, optionally a CTL, or an NK cell, for example. The method can further include isolating the cell, optionally using flow cytometry, magnetic separation, or single cell separation. The method can further include sequencing the antigen binding protein.

### Methods of Making Monoclonal ABPs

[0478] Monoclonal ABPs may be obtained, for example, using the hybridoma method first described by Kohler et al., Nature, 1975, 256:495-497 (incorporated by reference in its entirety), and/or by recombinant DNA methods (see e.g., U.S. Pat. No. 4,816,567, incorporated by reference in its entirety). Monoclonal ABPs may also be obtained, for example, using phage or yeast-based libraries. See e.g., U.S. Pat. Nos. 8,258,082 and 8,691,730, each of which is incorporated by reference in its entirety.

[0479] In the hybridoma method, a mouse or other appropriate host animal is immunized to elicit lymphocytes that produce or are capable of producing ABPs that will specifically bind to the protein used for immunization. Alternatively, lymphocytes may be immunized in vitro. Lymphocytes are then fused with myeloma cells using a suitable fusing agent, such as polyethylene glycol, to form a hybridoma cell. See Goding J. W., Monoclonal ABPs: Principles and Practice 3^{rd} ed. (1986) Academic Press, San Diego, Calif., incorporated by reference in its entirety.

[0480] The hybridoma cells are seeded and grown in a suitable culture medium that contains one or more substances that inhibit the growth or survival of the unfused, parental myeloma cells. For example, if the parental myeloma cells lack the enzyme hypoxanthine guanine phosphoribosyl transferase (HGPRT or HPRT), the culture medium for the hybridomas typically will include hypoxanthine, aminopterin, and thymidine (HAT medium), which substances prevent the growth of HGPRT-deficient cells.

[0481] Useful myeloma cells are those that fuse efficiently, support stable high-level production of ABP by the selected ABP-producing cells, and are sensitive media conditions, such as the presence or absence of HAT medium. Among these, preferred myeloma cell lines are murine myeloma lines, such as those derived from MOPC-21 and MC-11 mouse tumors (available from the Salk Institute Cell Distribution Center, San Diego, Calif.), and SP-2 or X63-Ag8-653 cells (available from the American Type Culture Collection, Rockville, Md.). Human myeloma and mouse-human heteromyeloma cell lines also have been described for the production of human monoclonal ABPs. See e.g., Kozbor, J. Immunol., 1984, 133:3001, incorporated by reference in its entirety.

[0482] After the identification of hybridoma cells that produce ABPs of the desired specificity, affinity, and/or biological activity, selected clones may be subcloned by limiting dilution procedures and grown by standard methods. See Goding, supra. Suitable culture media for this purpose include, for example, D-MEM or RPMI-1640 medium. In addition, the hybridoma cells may be grown in vivo as ascites tumors in an animal.

[0483] DNA encoding the monoclonal ABPs may be readily isolated and sequenced using conventional procedures (e.g., by using oligonucleotide probes that are capable of binding specifically to genes encoding the heavy and light chains of the monoclonal ABPs). Thus, the hybridoma cells can serve as a useful source of DNA encoding ABPs with the desired properties. Once isolated, the DNA may be placed into expression vectors, which are then transfected into host cells such as bacteria (e.g., E. coli), yeast (e.g., Saccharomyces or Pichia sp.), COS cells, Chinese hamster ovary (CHO) cells, or myeloma cells that do not otherwise produce ABP, to produce the monoclonal ABPs.

### Methods of Making Chimeric ABPs

[0484] Illustrative methods of making chimeric ABPs are described, for example, in U.S. Pat. No. 4,816,567; and Morrison et al., Proc. Natl. Acad. Sci. USA, 1984, 81:6851-6855; each of which is incorporated by reference in its entirety. In some embodiments, a chimeric ABP is made by using recombinant techniques to combine a non-human variable region (e.g., a variable region derived from a mouse, rat, hamster, rabbit, or non-human primate, such as a monkey) with a human constant region.

### Methods of Making Humanized ABPs

[0485] Humanized ABPs may be generated by replacing most, or all, of the structural portions of a non-human monoclonal ABP with corresponding human ABP sequences. Consequently, a hybrid molecule is generated in which only the antigen-specific variable, or CDR, is composed of non-human sequence. Methods to obtain humanized ABPs include those described in, for example, Winter and Milstein, Nature, 1991, 349:293-299; Rader et al., Proc. Nat. Acad. Sci. U.S.A., 1998, 95:8910-8915; Steinberger et al., J. Biol. Chem., 2000, 275:36073-36078; Queen et al., Proc. Natl. Acad. Sci. U.S.A., 1989, 86:10029-10033; and U.S. Pat. Nos. 5,585,089, 5,693,761, 5,693,762, and 6,180,370; each of which is incorporated by reference in its entirety.

### Methods of Making Human ABPs

[0486] Human ABPs can be generated by a variety of techniques known in the art, for example by using transgenic animals (e.g., humanized mice). See, e.g., Jakobovits et al., Proc. Natl. Acad. Sci. U.S.A., 1993, 90:2551; Jakobovits et al., Nature, 1993, 362:255-258; Bruggermann et al., Year in Immuno., 1993, 7:33; and U.S. Pat. Nos. 5,591,669, 5,589,369 and 5,545,807; each of which is incorporated by reference in its entirety. Human ABPs can also be derived from phage-display libraries (see e.g., Hoogenboom et al., J. Mol. Biol., 1991, 227:381-388; Marks et al., J. Mol. Biol., 1991, 222:581-597; and U.S. Pat. Nos. 5,565,332 and 5,573,905; each of which is incorporated by reference in its entirety). Human ABPs may also be generated by in vitro activated B cells (see e.g., U.S. Pat. Nos. 5,567,610 and 5,229,275, each of which is incorporated by reference in its entirety). Human ABPs may also be derived from yeast-based libraries (see e.g., U.S. Pat. No. 8,691,730, incorporated by reference in its entirety).

### Methods of Making ABP Fragments

[0487] The ABP fragments provided herein may be made by any suitable method, including the illustrative methods described herein or those known in the art. Suitable methods include recombinant techniques and proteolytic digestion of whole ABPs. Illustrative methods of making ABP fragments are described, for example, in Hudson et al., Nat. Med., 2003, 9:129-134, incorporated by reference in its entirety. Methods of making scFv ABPs are described, for example, in Plückthun, in The Pharmacology of Monoclonal ABPs, vol. 113, Rosenburg and Moore eds., Springer-Verlag, New York, pp. 269-315 (1994); WO 93/16185; and U.S. Pat. Nos. 5,571,894 and 5,587,458; each of which is incorporated by reference in its entirety.

### Methods of Making Alternative Scaffolds

[0488] The alternative scaffolds provided herein may be made by any suitable method, including the illustrative methods described herein or those known in the art. For example, methods of preparing Adnectins™ are described in Emanuel et al., mAbs, 2011, 3:38-48, incorporated by reference in its entirety. Methods of preparing iMabs are described in U.S. Pat. Pub. No. 2003/0215914, incorporated by reference in its entirety. Methods of preparing Anticalins® are described in Vogt and Skerra, Chem. Biochem., 2004, 5:191-199, incorporated by reference in its entirety. Methods of preparing Kunitz domains are described in Wagner et al., Biochem. &Biophys. Res. Comm., 1992, 186:118-1145, incorporated by reference in its entirety. Methods of preparing thioredoxin peptide aptamers are provided in Geyer and Brent, Meth. Enzymol., 2000, 328:171-208, incorporated by reference in its entirety. Methods of preparing Affibodies are provided in Fernandez, Curr. Opinion in Biotech., 2004, 15:364-373, incorporated by reference in its entirety. Methods of preparing DARPins are provided in Zahnd et al., J. Mol. Biol., 2007, 369:1015-1028, incorporated by reference in its entirety. Methods of preparing Affilins are provided in Ebersbach et al., J. Mol. Biol., 2007, 372:172-185, incorporated by reference in its entirety. Methods of preparing Tetranectins are provided in Graversen et al., J. Biol. Chem., 2000, 275:37390-37396, incorporated by reference in its entirety. Methods of preparing Avimers are provided in Silverman et al., Nature Biotech., 2005, 23:1556-1561, incorporated by reference in its entirety. Methods of preparing Fynomers are provided in Silacci et al., J. Biol. Chem., 2014, 289:14392-14398, incorporated by reference in its entirety. Further information on alternative scaffolds is provided in Binz et al., Nat. Biotechnol., 2005 23:1257-1268; and Skerra, Current Opin. in Biotech., 2007 18:295-304, each of which is incorporated by reference in its entirety.

### Methods of Making Multispecific ABPs

[0489] The multispecific ABPs provided herein may be made by any suitable method, including the illustrative methods described herein or those known in the art. Methods of making common light chain ABPs are described in Merchant et al., Nature Biotechnol., 1998, 16:677-681, incorporated by reference in its entirety. Methods of making tetravalent bispecific ABPs are described in Coloma and Morrison, Nature Biotechnol., 1997, 15:159-163, incorporated by reference in its entirety. Methods of making hybrid immunoglobulins are described in Milstein and Cuello, Nature, 1983, 305:537-540; and Staerz and Bevan, Proc. Natl. Acad. Sci. USA, 1986, 83:1453-1457; each of which is incorporated by reference in its entirety. Methods of making immunoglobulins with knobs-into-holes modification are described in U.S. Pat. No. 5,731,168, incorporated by reference in its entirety. Methods of making immunoglobulins with electrostatic modifications are provided in WO 2009/089004, incorporated by reference in its entirety. Methods of making bispecific single chain ABPs are described in Traunecker et al., EMBO J. 1991, 10:3655-3659; and Gruber et al., J. Immunol., 1994, 152:5368-5374; each of which is incorporated by reference in its entirety. Methods of making single-chain ABPs, whose linker length may be varied, are described in U.S. Pat. Nos. 4,946,778 and 5,132,405, each of which is incorporated by reference in its entirety. Methods of making diabodies are described in Hollinger et al., Proc. Natl. Acad. Sci. USA, 1993, 90:6444-6448, incorporated by reference in its entirety. Methods of making triabodies and tetrabodies are described in Todorovska et al., J. Immunol. Methods, 2001, 248:47-66, incorporated by reference in its entirety. Methods of making trispecific F(ab′)3 derivatives are described in Tutt et al. J. Immunol., 1991, 147:60-69, incorporated by reference in its entirety. Methods of making cross-linked ABPs are described in U.S. Pat. No. 4,676,980; Brennan et al., Science, 1985, 229:81-83; Staerz, et al. Nature, 1985, 314:628-631; and EP 0453082; each of which is incorporated by reference in its entirety. Methods of making antigen-binding domains assembled by leucine zippers are described in Kostelny et al., J. Immunol., 1992, 148:1547-1553, incorporated by reference in its entirety. Methods of making ABPs via the DNL approach are described in U.S. Pat. Nos. 7,521,056; 7,550,143; 7,534,866; and 7,527,787; each of which is incorporated by reference in its entirety. Methods of making hybrids of ABP and non-ABP molecules are described in WO 93/08829, incorporated by reference in its entirety, for examples of such ABPs. Methods of making DAF ABPs are described in U.S. Pat. Pub. No. 2008/0069820, incorporated by reference in its entirety. Methods of making ABPs via reduction and oxidation are described in Carlring et al., PLoS One, 2011, 6:e22533, incorporated by reference in its entirety. Methods of making DVD-Igs™ are described in U.S. Pat. No. 7,612,181, incorporated by reference in its entirety. Methods of making DARTS' are described in Moore et al., Blood, 2011, 117:454-451, incorporated by reference in its entirety. Methods of making DuoBodies® are described in Labrijn et al., Proc. Natl. Acad. Sci. USA, 2013, 110:5145-5150; Gramer et al., mAbs, 2013, 5:962-972; and Labrijn et al., Nature Protocols, 2014, 9:2450-2463; each of which is incorporated by reference in its entirety. Methods of making ABPs comprising scFvs fused to the C-terminus of the CH3 from an IgG are described in Coloma and Morrison, Nature Biotechnol., 1997, 15:159-163, incorporated by reference in its entirety. Methods of making ABPs in which a Fab molecule is attached to the constant region of an immunoglobulin are described in Miler et al., J. Immunol., 2003, 170:4854-4861, incorporated by reference in its entirety. Methods of making CovX-Bodies are described in Doppalapudi et al., Proc. Natl. Acad. Sci. USA, 2010, 107:22611-22616, incorporated by reference in its entirety. Methods of making Fcab ABPs are described in Wozniak-Knopp et al., Protein Eng. Des. Sel., 2010, 23:289-297, incorporated by reference in its entirety. Methods of making TandAb® ABPs are described in Kipriyanov et al., J. Mol. Biol., 1999, 293:41-56 and Zhukovsky et al., Blood, 2013, 122:5116, each of which is incorporated by reference in its entirety. Methods of making tandem Fabs are described in WO 2015/103072, incorporated by reference in its entirety. Methods of making Zybodies™ are described in LaFleur et al., mAbs, 2013, 5:208-218, incorporated by reference in its entirety.

### Methods of Making Variants

[0490] Any suitable method can be used to introduce variability into a polynucleotide sequence(s) encoding an ABP, including error-prone PCR, chain shuffling, and oligonucleotide-directed mutagenesis such as trinucleotide-directed mutagenesis (TRIM). In some aspects, several CDR residues (e.g., 4-6 residues at a time) are randomized. CDR residues involved in antigen binding may be specifically identified, for example, using alanine scanning mutagenesis or modeling. CDR-H3 and CDR-L3 in particular are often targeted for mutation.

[0491] The introduction of diversity into the variable regions and/or CDRs can be used to produce a secondary library. The secondary library is then screened to identify ABP variants with improved affinity. Affinity maturation by constructing and reselecting from secondary libraries has been described, for example, in Hoogenboom et al., Methods in Molecular Biology, 2001, 178:1-37, incorporated by reference in its entirety.

[0492] Methods for Engineering Cells with ABPs

[0493] Also provided are methods, nucleic acids, compositions, and kits, for expressing the ABPs, including receptors comprising antibodies, CARs, and TCRs, and for producing genetically engineered cells expressing such ABPs. The genetic engineering generally involves introduction of a nucleic acid encoding the recombinant or engineered component into the cell, such as by retroviral transduction, transfection, or transformation.

[0494] In some embodiments, gene transfer is accomplished by first stimulating the cell, such as by combining it with a stimulus that induces a response such as proliferation, survival, and/or activation, e.g., as measured by expression of a cytokine or activation marker, followed by transduction of the activated cells, and expansion in culture to numbers sufficient for clinical applications.

[0495] In some contexts, overexpression of a stimulatory factor (for example, a lymphokine or a cytokine) may be toxic to a subject. Thus, in some contexts, the engineered cells include gene segments that cause the cells to be susceptible to negative selection in vivo, such as upon administration in adoptive immunotherapy. For example in some aspects, the cells are engineered so that they can be eliminated as a result of a change in the in vivo condition of the patient to which they are administered. The negative selectable phenotype may result from the insertion of a gene that confers sensitivity to an administered agent, for example, a compound. Negative selectable genes include the Herpes simplex virus type I thymidine kinase (HSV-I TK) gene (Wigler et al., Cell II: 223, 1977) which confers ganciclovir sensitivity; the cellular hypoxanthine phosphribosyltransferase (HPRT) gene, the cellular adenine phosphoribosyltransferase (APRT) gene, bacterial cytosine deaminase, (Mullen et al., Proc. Natl. Acad. Sci. USA. 89:33 (1992)).

[0496] In some aspects, the cells further are engineered to promote expression of cytokines or other factors. Various methods for the introduction of genetically engineered components, e.g., antigen receptors, e.g., CARs, are well known and may be used with the provided methods and compositions. Exemplary methods include those for transfer of nucleic acids encoding the receptors, including via viral, e.g., retroviral or lentiviral, transduction, transposons, and electroporation.

[0497] In some embodiments, recombinant nucleic acids are transferred into cells using recombinant infectious virus particles, such as, e.g., vectors derived from simian virus 40 (SV40), adenoviruses, adeno-associated virus (AAV). In some embodiments, recombinant nucleic acids are transferred into T cells using recombinant lentiviral vectors or retroviral vectors, such as gamma-retroviral vectors (see, e.g., Koste et al. (2014) Gene Therapy 2014 Apr. 3. doi: 10.1038/gt.2014.25; Carlens et al. (2000) Exp Hematol 28(10): 1137-46; Alonso-Camino et al. (2013) Mol Ther Nucl Acids 2, e93; Park et al., Trends Biotechnol. 2011 Nov. 29(11): 550-557.

[0498] In some embodiments, the retroviral vector has a long terminal repeat sequence (LTR), e.g., a retroviral vector derived from the Moloney murine leukemia virus (MoMLV), myeloproliferative sarcoma virus (MPSV), murine embryonic stem cell virus (MESV), murine stem cell virus (MSCV), spleen focus forming virus (SFFV), or adeno-associated virus (AAV). Most retroviral vectors are derived from murine retroviruses. In some embodiments, the retroviruses include those derived from any avian or mammalian cell source. The retroviruses typically are amphotropic, meaning that they are capable of infecting host cells of several species, including humans. In one embodiment, the gene to be expressed replaces the retroviral gag, pol and/or env sequences. A number of illustrative retroviral systems have been described (e.g., U.S. Pat. Nos. 5,219,740; 6,207,453; 5,219,740; Miller and Rosman (1989) BioTechniques 7:980-990; Miller, A. D. (1990) Human Gene Therapy 1:5-14; Scarpa et al. (1991) Virology 180:849-852; Burns et al. (1993) Proc. Natl. Acad. Sci. USA 90:8033-8037; and Boris-Lawrie and Temin (1993) Cur. Opin. Genet. Develop. 3:102-109.

[0499] Methods of lentiviral transduction are known. Exemplary methods are described in, e.g., Wang et al. (2012) J. Immunother. 35(9): 689-701; Cooper et al. (2003) Blood. 101:1637-1644; Verhoeyen et al. (2009) Methods Mol Biol. 506: 97-114; and Cavalieri et al. (2003) Blood. 102(2): 497-505.

[0500] In some embodiments, recombinant nucleic acids are transferred into T cells via electroporation (see, e.g., Chicaybam et al, (2013) PLoS ONE 8(3): e60298; Van Tedeloo et al. (2000) Gene Therapy 7(16): 1431-1437; and Roth et al. (2018) Nature 559:405-409). In some embodiments, recombinant nucleic acids are transferred into T cells via transposition (see, e.g., Manuri et al. (2010) Hum Gene Ther 21(4): 427-437; Sharma et al. (2013) Molec Ther Nucl Acids 2, e74; and Huang et al. (2009) Methods Mol Biol 506: 115-126). Other methods of introducing and expressing genetic material in immune cells include calcium phosphate transfection (e.g., as described in Current Protocols in Molecular Biology, John Wiley & Sons, New York. N.Y.), protoplast fusion, cationic liposome-mediated transfection; tungsten particle-facilitated microparticle bombardment (Johnston, Nature, 346: 776-777 (1990)); and strontium phosphate DNA co-precipitation (Brash et al., Mol. Cell Biol., 7: 2031-2034 (1987)).

[0501] Other approaches and vectors for transfer of the nucleic acids encoding the recombinant products are those described, e.g., in international patent application, Publication No.: WO2014055668, and U.S. Pat. No. 7,446,190.

[0502] Among additional nucleic acids, e.g., genes for introduction are those to improve the efficacy of therapy, such as by promoting viability and/or function of transferred cells; genes to provide a genetic marker for selection and/or evaluation of the cells, such as to assess in vivo survival or localization; genes to improve safety, for example, by making the cell susceptible to negative selection in vivo as described by Lupton S. D. et al., Mol. and Cell Biol., 11:6 (1991); and Riddell et al., Human Gene Therapy 3:319-338 (1992); see also the publications of PCT/US91/08442 and PCT/US94/05601 by Lupton et al. describing the use of bifunctional selectable fusion genes derived from fusing a dominant positive selectable marker with a negative selectable marker. See, e.g., Riddell et al., U.S. Pat. No. 6,040,177, at columns 14-17.

[0503] Preparation of Engineered Cells

[0504] In some embodiments, preparation of the engineered cells includes one or more culture and/or preparation steps. The cells for introduction of the HLA-PEPTIDE-ABP, e.g., TCR or CAR, can be isolated from a sample, such as a biological sample, e.g., one obtained from or derived from a subject. In some embodiments, the subject from which the cell is isolated is one having the disease or condition or in need of a cell therapy or to which cell therapy will be administered. The subject in some embodiments is a human in need of a particular therapeutic intervention, such as the adoptive cell therapy for which cells are being isolated, processed, and/or engineered.

[0505] Accordingly, the cells in some embodiments are primary cells, e.g., primary human cells. The samples include tissue, fluid, and other samples taken directly from the subject, as well as samples resulting from one or more processing steps, such as separation, centrifugation, genetic engineering (e.g. transduction with viral vector), washing, and/or incubation. The biological sample can be a sample obtained directly from a biological source or a sample that is processed. Biological samples include, but are not limited to, body fluids, such as blood, plasma, serum, cerebrospinal fluid, synovial fluid, urine and sweat, tissue and organ samples, including processed samples derived therefrom.

[0506] In some aspects, the sample from which the cells are derived or isolated is blood or a blood-derived sample, or is or is derived from an apheresis or leukapheresis product. Exemplary samples include whole blood, peripheral blood mononuclear cells (PBMCs), leukocytes, bone marrow, thymus, tissue biopsy, tumor, leukemia, lymphoma, lymph node, gut associated lymphoid tissue, mucosa associated lymphoid tissue, spleen, other lymphoid tissues, liver, lung, stomach, intestine, colon, kidney, pancreas, breast, bone, prostate, cervix, testes, ovaries, tonsil, or other organ, and/or cells derived therefrom. Samples include, in the context of cell therapy, e.g., adoptive cell therapy, samples from autologous and allogeneic sources.

[0507] In some embodiments, the cells are derived from cell lines, e.g., T cell lines. The cells in some embodiments are obtained from a xenogeneic source, for example, from mouse, rat, non-human primate, or pig.

[0508] In some embodiments, isolation of the cells includes one or more preparation and/or non-affinity based cell separation steps. In some examples, cells are washed, centrifuged, and/or incubated in the presence of one or more reagents, for example, to remove unwanted components, enrich for desired components, lyse or remove cells sensitive to particular reagents. In some examples, cells are separated based on one or more property, such as density, adherent properties, size, sensitivity and/or resistance to particular components.

[0509] In some examples, cells from the circulating blood of a subject are obtained, e.g., by apheresis or leukapheresis. The samples, in some aspects, contain lymphocytes, including T cells, monocytes, granulocytes, B cells, other nucleated white blood cells, red blood cells, and/or platelets, and in some aspects contains cells other than red blood cells and platelets.

[0510] In some embodiments, the blood cells collected from the subject are washed, e.g., to remove the plasma fraction and to place the cells in an appropriate buffer or media for subsequent processing steps. In some embodiments, the cells are washed with phosphate buffered saline (PBS). In some embodiments, the wash solution lacks calcium and/or magnesium and/or many or all divalent cations. In some aspects, a washing step is accomplished a semi-automated “flow-through” centrifuge (for example, the Cobe 2991 cell processor, Baxter) according to the manufacturer's instructions. In some aspects, a washing step is accomplished by tangential flow filtration (TFF) according to the manufacturer's instructions. In some embodiments, the cells are resuspended in a variety of biocompatible buffers after washing, such as, for example, Ca++/Mg++ free PBS. In certain embodiments, components of a blood cell sample are removed and the cells directly resuspended in culture media.

[0511] In some embodiments, the methods include density-based cell separation methods, such as the preparation of white blood cells from peripheral blood by lysing the red blood cells and centrifugation through a Percoll or Ficoll gradient.

[0512] In some embodiments, the isolation methods include the separation of different cell types based on the expression or presence in the cell of one or more specific molecules, such as surface markers, e.g., surface proteins, intracellular markers, or nucleic acid. In some embodiments, any known method for separation based on such markers may be used. In some embodiments, the separation is affinity- or immunoaffinity-based separation. For example, the isolation in some aspects includes separation of cells and cell populations based on the cells' expression or expression level of one or more markers, typically cell surface markers, for example, by incubation with an antibody or binding partner that specifically binds to such markers, followed generally by washing steps and separation of cells having bound the antibody or binding partner, from those cells having not bound to the antibody or binding partner.

[0513] Such separation steps can be based on positive selection, in which the cells having bound the reagents are retained for further use, and/or negative selection, in which the cells having not bound to the antibody or binding partner are retained. In some examples, both fractions are retained for further use. In some aspects, negative selection can be particularly useful where no antibody is available that specifically identifies a cell type in a heterogeneous population, such that separation is best carried out based on markers expressed by cells other than the desired population.

[0514] The separation need not result in 100% enrichment or removal of a particular cell population or cells expressing a particular marker. For example, positive selection of or enrichment for cells of a particular type, such as those expressing a marker, refers to increasing the number or percentage of such cells, but need not result in a complete absence of cells not expressing the marker. Likewise, negative selection, removal, or depletion of cells of a particular type, such as those expressing a marker, refers to decreasing the number or percentage of such cells, but need not result in a complete removal of all such cells.

[0515] In some examples, multiple rounds of separation steps are carried out, where the positively or negatively selected fraction from one step is subjected to another separation step, such as a subsequent positive or negative selection. In some examples, a single separation step can deplete cells expressing multiple markers simultaneously, such as by incubating cells with a plurality of antibodies or binding partners, each specific for a marker targeted for negative selection. Likewise, multiple cell types can simultaneously be positively selected by incubating cells with a plurality of antibodies or binding partners expressed on the various cell types.

[0516] For example, in some aspects, specific subpopulations of T cells, such as cells positive or expressing high levels of one or more surface markers, e.g., CD28+, CD62L+, CCR7+, CD27+, CD127+, CD4+, CD8+, CD45RA+, and/or CD45RO+ T cells, are isolated by positive or negative selection techniques.

[0517] For example, CD3+, CD28+ T cells can be positively selected using CD3/CD28 conjugated magnetic beads (e.g., DYNABEADS® M-450 CD3/CD28 T Cell Expander).

[0518] In some embodiments, isolation is carried out by enrichment for a particular cell population by positive selection, or depletion of a particular cell population, by negative selection. In some embodiments, positive or negative selection is accomplished by incubating cells with one or more antibodies or other binding agent that specifically bind to one or more surface markers expressed or expressed (marker+) at a relatively higher level (marker^{high}) on the positively or negatively selected cells, respectively.

[0519] In some embodiments, T cells are separated from a peripheral blood mononuclear cell (PBMC) sample by negative selection of markers expressed on non-T cells, such as B cells, monocytes, or other white blood cells, such as CD14. In some aspects, a CD4+ or CD8+ selection step is used to separate CD4+ helper and CD8+ cytotoxic T cells. Such CD4+ and CD8+ populations can be further sorted into sub-populations by positive or negative selection for markers expressed or expressed to a relatively higher degree on one or more naive, memory, and/or effector T cell subpopulations.

[0520] In some embodiments, CD8+ cells are further enriched for or depleted of naive, central memory, effector memory, and/or central memory stem cells, such as by positive or negative selection based on surface antigens associated with the respective subpopulation. In some embodiments, enrichment for central memory T (TCM) cells is carried out to increase efficacy, such as to improve long-term survival, expansion, and/or engraftment following administration, which in some aspects is particularly robust in such sub-populations. See Terakura et al. (2012) Blood. 1:72-82; Wang et al. (2012) J Immunother. 35(9):689-701. In some embodiments, combining TCM-enriched CD8+ T cells and CD4+ T cells further enhances efficacy.

[0521] In embodiments, memory T cells are present in both CD62L+ and CD62L-subsets of CD8+ peripheral blood lymphocytes. Peripheral blood mononuclear cell (PBMC) can be enriched for or depleted of CD62L-CD8+ and/or CD62L+CD8+ fractions, such as using anti-CD8 and anti-CD62L antibodies.

[0522] In some embodiments, the enrichment for central memory T (TCM) cells is based on positive or high surface expression of CD45RO, CD62L, CCR7, CD28, CD3, and/or CD 127; in some aspects, it is based on negative selection for cells expressing or highly expressing CD45RA and/or granzyme B. In some aspects, isolation of a CD8+ population enriched for TCM cells is carried out by depletion of cells expressing CD4, CD14, CD45RA, and positive selection or enrichment for cells expressing CD62L. In one aspect, enrichment for central memory T (TCM) cells is carried out starting with a negative fraction of cells selected based on CD4 expression, which is subjected to a negative selection based on expression of CD14 and CD45RA, and a positive selection based on CD62L. Such selections in some aspects are carried out simultaneously and in other aspects are carried out sequentially, in either order. In some aspects, the same CD4 expression-based selection step used in preparing the CD8+ cell population or subpopulation, also is used to generate the CD4+ cell population or sub-population, such that both the positive and negative fractions from the CD4-based separation are retained and used in subsequent steps of the methods, optionally following one or more further positive or negative selection steps.

[0523] In a particular example, a sample of PBMCs or other white blood cell sample is subjected to selection of CD4+ cells, where both the negative and positive fractions are retained. The negative fraction then is subjected to negative selection based on expression of CD14 and CD45RA or ROR1, and positive selection based on a marker characteristic of central memory T cells, such as CD62L or CCR7, where the positive and negative selections are carried out in either order.

[0524] CD4+T helper cells are sorted into naive, central memory, and effector cells by identifying cell populations that have cell surface antigens. CD4+ lymphocytes can be obtained by standard methods. In some embodiments, naive CD4+T lymphocytes are CD45RO−, CD45RA+, CD62L+, CD4+ T cells. In some embodiments, central memory CD4+ cells are CD62L+ and CD45RO+. In some embodiments, effector CD4+ cells are CD62L- and CD45RO−.

[0525] In one example, to enrich for CD4+ cells by negative selection, a monoclonal antibody cocktail typically includes antibodies to CD14, CD20, CD11b, CD16, HLA-DR, and CD8. In some embodiments, the antibody or binding partner is bound to a solid support or matrix, such as a magnetic bead or paramagnetic bead, to allow for separation of cells for positive and/or negative selection. For example, in some embodiments, the cells and cell populations are separated or isolated using immune-magnetic (or affinity-magnetic) separation techniques (reviewed in Methods in Molecular Medicine, vol. 58: Metastasis Research Protocols, Vol. 2: Cell Behavior In Vitro and In Vivo, p 17-25 Edited by: S. A. Brooks and U. Schumacher Humana Press Inc., Totowa, N.J.).

[0526] In some aspects, the sample or composition of cells to be separated is incubated with small, magnetizable or magnetically responsive material, such as magnetically responsive particles or microparticles, such as paramagnetic beads (e.g., such as Dynabeads or MACS beads). The magnetically responsive material, e.g., particle, generally is directly or indirectly attached to a binding partner, e.g., an antibody, that specifically binds to a molecule, e.g., surface marker, present on the cell, cells, or population of cells that it is desired to separate, e.g., that it is desired to negatively or positively select.

[0527] In some embodiments, the magnetic particle or bead comprises a magnetically responsive material bound to a specific binding member, such as an antibody or other binding partner. There are many well-known magnetically responsive materials used in magnetic separation methods. Suitable magnetic particles include those described in Molday, U.S. Pat. No. 4,452,773, and in European Patent Specification EP 452342 B, which are hereby incorporated by reference. Colloidal sized particles, such as those described in Owen U.S. Pat. No. 4,795,698, and Liberti et al., U.S. Pat. No. 5,200,084 are other examples.

[0528] The incubation generally is carried out under conditions whereby the antibodies or binding partners, or molecules, such as secondary antibodies or other reagents, which specifically bind to such antibodies or binding partners, which are attached to the magnetic particle or bead, specifically bind to cell surface molecules if present on cells within the sample.

[0529] In some aspects, the sample is placed in a magnetic field, and those cells having magnetically responsive or magnetizable particles attached thereto will be attracted to the magnet and separated from the unlabeled cells. For positive selection, cells that are attracted to the magnet are retained; for negative selection, cells that are not attracted (unlabeled cells) are retained. In some aspects, a combination of positive and negative selection is performed during the same selection step, where the positive and negative fractions are retained and further processed or subject to further separation steps.

[0530] In certain embodiments, the magnetically responsive particles are coated in primary antibodies or other binding partners, secondary antibodies, lectins, enzymes, or streptavidin. In certain embodiments, the magnetic particles are attached to cells via a coating of primary antibodies specific for one or more markers. In certain embodiments, the cells, rather than the beads, are labeled with a primary antibody or binding partner, and then cell-type specific secondary antibody- or other binding partner (e.g., streptavidin)-coated magnetic particles, are added. In certain embodiments, streptavidin-coated magnetic particles are used in conjunction with biotinylated primary or secondary antibodies.

[0531] In some embodiments, the magnetically responsive particles are left attached to the cells that are to be subsequently incubated, cultured and/or engineered; in some aspects, the particles are left attached to the cells for administration to a patient. In some embodiments, the magnetizable or magnetically responsive particles are removed from the cells. Methods for removing magnetizable particles from cells are known and include, e.g., the use of competing non-labeled antibodies, magnetizable particles or antibodies conjugated to cleavable linkers, etc. In some embodiments, the magnetizable particles are biodegradable.

[0532] In some embodiments, the affinity-based selection is via magnetic-activated cell sorting (MACS) (Miltenyi Biotech, Auburn, Calif.). Magnetic Activated Cell Sorting (MACS) systems are capable of high-purity selection of cells having magnetized particles attached thereto. In certain embodiments, MACS operates in a mode wherein the non-target and target species are sequentially eluted after the application of the external magnetic field. That is, the cells attached to magnetized particles are held in place while the unattached species are eluted. Then, after this first elution step is completed, the species that were trapped in the magnetic field and were prevented from being eluted are freed in some manner such that they can be eluted and recovered. In certain embodiments, the non-target cells are labelled and depleted from the heterogeneous population of cells.

[0533] In certain embodiments, the isolation or separation is carried out using a system, device, or apparatus that carries out one or more of the isolation, cell preparation, separation, processing, incubation, culture, and/or formulation steps of the methods. In some aspects, the system is used to carry out each of these steps in a closed or sterile environment, for example, to minimize error, user handling and/or contamination. In one example, the system is a system as described in International Patent Application, Publication Number WO2009/072003, or US 20110003380 A1.

[0534] In some embodiments, the system or apparatus carries out one or more, e.g., all, of the isolation, processing, engineering, and formulation steps in an integrated or self-contained system, and/or in an automated or programmable fashion. In some aspects, the system or apparatus includes a computer and/or computer program in communication with the system or apparatus, which allows a user to program, control, assess the outcome of, and/or adjust various aspects of the processing, isolation, engineering, and formulation steps.

[0535] In some aspects, the separation and/or other steps is carried out using CliniMACS system (Miltenyi Biotec), for example, for automated separation of cells on a clinical-scale level in a closed and sterile system. Components can include an integrated microcomputer, magnetic separation unit, peristaltic pump, and various pinch valves. The integrated computer in some aspects controls all components of the instrument and directs the system to perform repeated procedures in a standardized sequence. The magnetic separation unit in some aspects includes a movable permanent magnet and a holder for the selection column. The peristaltic pump controls the flow rate throughout the tubing set and, together with the pinch valves, ensures the controlled flow of buffer through the system and continual suspension of cells.

[0536] The CliniMACS system in some aspects uses antibody-coupled magnetizable particles that are supplied in a sterile, non-pyrogenic solution. In some embodiments, after labelling of cells with magnetic particles the cells are washed to remove excess particles. A cell preparation bag is then connected to the tubing set, which in turn is connected to a bag containing buffer and a cell collection bag. The tubing set consists of pre-assembled sterile tubing, including a pre-column and a separation column, and are for single use only. After initiation of the separation program, the system automatically applies the cell sample onto the separation column. Labeled cells are retained within the column, while unlabeled cells are removed by a series of washing steps. In some embodiments, the cell populations for use with the methods described herein are unlabeled and are not retained in the column. In some embodiments, the cell populations for use with the methods described herein are labeled and are retained in the column. In some embodiments, the cell populations for use with the methods described herein are eluted from the column after removal of the magnetic field, and are collected within the cell collection bag.

[0537] In certain embodiments, separation and/or other steps are carried out using the CliniMACS Prodigy system (Miltenyi Biotec). The CliniMACS Prodigy system in some aspects is equipped with a cell processing unity that permits automated washing and fractionation of cells by centrifugation. The CliniMACS Prodigy system can also include an onboard camera and image recognition software that determines the optimal cell fractionation endpoint by discerning the macroscopic layers of the source cell product. For example, peripheral blood may be automatically separated into erythrocytes, white blood cells and plasma layers. The CliniMACS Prodigy system can also include an integrated cell cultivation chamber which accomplishes cell culture protocols such as, e.g., cell differentiation and expansion, antigen loading, and long-term cell culture. Input ports can allow for the sterile removal and replenishment of media and cells can be monitored using an integrated microscope. See, e.g., Klebanoff et al. (2012) J Immunother. 35(9): 651-660, Terakura et al. (2012) Blood. 1:72-82, and Wang et al. (2012) J Immunother. 35(9):689-701.

[0538] In some embodiments, a cell population described herein is collected and enriched (or depleted) via flow cytometry, in which cells stained for multiple cell surface markers are carried in a fluidic stream. In some embodiments, a cell population described herein is collected and enriched (or depleted) via preparative scale fluorescence activated cell sorting (FACS). In certain embodiments, a cell population described herein is collected and enriched (or depleted) by use of microelectromechanical systems (MEMS) chips in combination with a FACS-based detection system (see, e.g., WO 2010/033140, Cho et al. (2010) Lab Chip 10, 1567-1573; and Godin et al. (2008) J Biophoton. 1(5):355-376. In both cases, cells can be labeled with multiple markers, allowing for the isolation of well-defined T cell subsets at high purity.

[0539] In some embodiments, the antibodies or binding partners are labeled with one or more detectable marker, to facilitate separation for positive and/or negative selection. For example, separation may be based on binding to fluorescently labeled antibodies. In some examples, separation of cells based on binding of antibodies or other binding partners specific for one or more cell surface markers are carried in a fluidic stream, such as by fluorescence-activated cell sorting (FACS), including preparative scale (FACS) and/or microelectromechanical systems (MEMS) chips, e.g., in combination with a flow-cytometric detection system. Such methods allow for positive and negative selection based on multiple markers simultaneously.

[0540] In some embodiments, the preparation methods include steps for freezing, e.g., cryopreserving, the cells, either before or after isolation, incubation, and/or engineering. In some embodiments, the freeze and subsequent thaw step removes granulocytes and, to some extent, monocytes in the cell population. In some embodiments, the cells are suspended in a freezing solution, e.g., following a washing step to remove plasma and platelets. Any of a variety of known freezing solutions and parameters in some aspects may be used. One example involves using PBS containing 20% DMSO and 8% human serum albumin (HSA), or other suitable cell freezing media. This can then be diluted 1:1 with media so that the final concentration of DMSO and HSA are 10% and 4%, respectively. Other examples include Cryostor®, CTL-Cryo™ ABC freezing media, and the like. The cells are then frozen to −80 degrees C. at a rate of 1 degree per minute and stored in the vapor phase of a liquid nitrogen storage tank.

[0541] In some embodiments, the provided methods include cultivation, incubation, culture, and/or genetic engineering steps. For example, in some embodiments, provided are methods for incubating and/or engineering the depleted cell populations and culture-initiating compositions.

[0542] Thus, in some embodiments, the cell populations are incubated in a culture-initiating composition. The incubation and/or engineering may be carried out in a culture vessel, such as a unit, chamber, well, column, tube, tubing set, valve, vial, culture dish, bag, or other container for culture or cultivating cells.

[0543] In some embodiments, the cells are incubated and/or cultured prior to or in connection with genetic engineering. The incubation steps can include culture, cultivation, stimulation, activation, and/or propagation. In some embodiments, the compositions or cells are incubated in the presence of stimulating conditions or a stimulatory agent. Such conditions include those designed to induce proliferation, expansion, activation, and/or survival of cells in the population, to mimic antigen exposure, and/or to prime the cells for genetic engineering, such as for the introduction of a recombinant antigen receptor.

[0544] The conditions can include one or more of particular media, temperature, oxygen content, carbon dioxide content, time, agents, e.g., nutrients, amino acids, antibiotics, ions, and/or stimulatory factors, such as cytokines, chemokines, antigens, binding partners, fusion proteins, recombinant soluble receptors, and any other agents designed to activate the cells.

[0545] In some embodiments, the stimulating conditions or agents include one or more agent, e.g., ligand, which is capable of activating an intracellular signaling domain of a TCR complex. In some aspects, the agent turns on or initiates TCR/CD3 intracellular signaling cascade in a T cell. Such agents can include antibodies, such as those specific for a TCR component and/or costimulatory receptor, e.g., anti-CD3, anti-CD28, for example, bound to solid support such as a bead, and/or one or more cytokines. Optionally, the expansion method may further comprise the step of adding anti-CD3 and/or anti CD28 antibody to the culture medium (e.g., at a concentration of at least about 0.5 ng/ml). In some embodiments, the stimulating agents include IL-2 and/or IL-15, for example, an IL-2 concentration of at least about 10 units/mL.

[0546] In some aspects, incubation is carried out in accordance with techniques such as those described in U.S. Pat. No. 6,040,177 to Riddell et al., Klebanoff et al. (2012) J Immunother. 35(9): 651-660, Terakura et al. (2012) Blood. 1:72-82, and/or Wang et al. (2012) J Immunother. 35(9):689-701.

[0547] In some embodiments, the T cells are expanded by adding to the culture-initiating composition feeder cells, such as non-dividing peripheral blood mononuclear cells (PBMC), (e.g., such that the resulting population of cells contains at least about 5, 10, 20, or 40 or more PBMC feeder cells for each T lymphocyte in the initial population to be expanded); and incubating the culture (e.g. for a time sufficient to expand the numbers of T cells). In some aspects, the non-dividing feeder cells can comprise gamma-irradiated PBMC feeder cells. In some embodiments, the PBMC are irradiated with gamma rays in the range of about 3000 to 3600 rads to prevent cell division. In some embodiments, the PBMC feeder cells are inactivated with Mytomicin C. In some aspects, the feeder cells are added to culture medium prior to the addition of the populations of T cells.

[0548] In some embodiments, the stimulating conditions include temperature suitable for the growth of human T lymphocytes, for example, at least about 25 degrees Celsius, generally at least about 30 degrees, and generally at or about 37 degrees Celsius. Optionally, the incubation may further comprise adding non-dividing EBV-transformed lymphoblastoid cells (LCL) as feeder cells. LCL can be irradiated with gamma rays in the range of about 6000 to 10,000 rads. The LCL feeder cells in some aspects is provided in any suitable amount, such as a ratio of LCL feeder cells to initial T lymphocytes of at least about 10:1.

[0549] In embodiments, antigen-specific T cells, such as antigen-specific CD4+ and/or CD8+ T cells, are obtained by stimulating naive or antigen specific T lymphocytes with antigen. For example, antigen-specific T cell lines or clones can be generated to cytomegalovirus antigens by isolating T cells from infected subjects and stimulating the cells in vitro with the same antigen.

[0550] Assays

[0551] A variety of assays known in the art may be used to identify and characterize an HLA-PEPTIDE ABP provided herein.

### Binding, Competition, and Epitope Mapping Assays

[0552] Specific antigen-binding activity of an ABP provided herein may be evaluated by any suitable method, including using SPR, BLI, RIA and MSD-SET, as described elsewhere in this disclosure. Additionally, antigen-binding activity may be evaluated by ELISA assays, using flow cytometry, and/or Western blot assays.

[0553] Assays for measuring competition between two ABPs, or an ABP and another molecule (e.g., one or more ligands of HLA-PEPTIDE such as a TCR) are described elsewhere in this disclosure and, for example, in Harlow and Lane, ABPs: A Laboratory Manual ch. 14, 1988, Cold Spring Harbor Laboratory, Cold Spring Harbor, N.Y., incorporated by reference in its entirety.

[0554] Assays for mapping the epitopes to which an ABP provided herein bind are described, for example, in Morris “Epitope Mapping Protocols,” in Methods in Molecular Biology vol. 66, 1996, Humana Press, Totowa, N.J., incorporated by reference in its entirety. In some embodiments, the epitope is determined by peptide competition. In some embodiments, the epitope is determined by mass spectrometry. In some embodiments, the epitope is determined by mutagenesis. In some embodiments, the epitope is determined by crystallography.

### Assays for Effector Functions

[0555] Effector function following treatment with an ABP and/or cell provided herein may be evaluated using a variety of in vitro and in vivo assays known in the art, including those described in Ravetch and Kinet, Annu. Rev. Immunol., 1991, 9:457-492; U.S. Pat. Nos. 5,500,362, 5,821,337; Hellstrom et al., Proc. Nat'l Acad. Sci. USA, 1986, 83:7059-7063; Hellstrom et al., Proc. Nat'l Acad. Sci. USA, 1985, 82:1499-1502; Bruggemann et al., J. Exp. Med., 1987, 166:1351-1361; Clynes et al., Proc. Nat'l Acad. Sci. USA, 1998, 95:652-656; WO 2006/029879; WO 2005/100402; Gazzano-Santoro et al., J. Immunol. Methods, 1996, 202:163-171; Cragg et al., Blood, 2003, 101:1045-1052; Cragg et al. Blood, 2004, 103:2738-2743; and Petkova et al., Int'l. Immunol., 2006, 18:1759-1769; each of which is incorporated by reference in its entirety.

[0556] Pharmaceutical Compositions

[0557] An ABP, cell, or HLA-PEPTIDE target provided herein can be formulated in any appropriate pharmaceutical composition and administered by any suitable route of administration. Suitable routes of administration include, but are not limited to, the intra-arterial, intradermal, intramuscular, intraperitoneal, intravenous, nasal, parenteral, pulmonary, and subcutaneous routes.

[0558] The pharmaceutical composition may comprise one or more pharmaceutical excipients. Any suitable pharmaceutical excipient may be used, and one of ordinary skill in the art is capable of selecting suitable pharmaceutical excipients. Accordingly, the pharmaceutical excipients provided below are intended to be illustrative, and not limiting. Additional pharmaceutical excipients include, for example, those described in the Handbook of Pharmaceutical Excipients, Rowe et al. (Eds.) 6th Ed. (2009), incorporated by reference in its entirety.

[0559] In some embodiments, the pharmaceutical composition comprises an anti-foaming agent. Any suitable anti-foaming agent may be used. In some aspects, the anti-foaming agent is selected from an alcohol, an ether, an oil, a wax, a silicone, a surfactant, and combinations thereof. In some aspects, the anti-foaming agent is selected from a mineral oil, a vegetable oil, ethylene bis stearamide, a paraffin wax, an ester wax, a fatty alcohol wax, a long chain fatty alcohol, a fatty acid soap, a fatty acid ester, a silicon glycol, a fluorosilicone, a polyethylene glycol-polypropylene glycol copolymer, polydimethylsiloxane-silicon dioxide, ether, octyl alcohol, capryl alcohol, sorbitan trioleate, ethyl alcohol, 2-ethyl-hexanol, dimethicone, oleyl alcohol, simethicone, and combinations thereof.

[0560] In some embodiments, the pharmaceutical composition comprises a co-solvent. Illustrative examples of co-solvents include ethanol, poly(ethylene) glycol, butylene glycol, dimethylacetamide, glycerin, propylene glycol, and combinations thereof.

[0561] In some embodiments, the pharmaceutical composition comprises a buffer. Illustrative examples of buffers include acetate, borate, carbonate, lactate, malate, phosphate, citrate, hydroxide, diethanolamine, monoethanolamine, glycine, methionine, guar gum, monosodium glutamate, and combinations thereof.

[0562] In some embodiments, the pharmaceutical composition comprises a carrier or filler. Illustrative examples of carriers or fillers include lactose, maltodextrin, mannitol, sorbitol, chitosan, stearic acid, xanthan gum, guar gum, and combinations thereof.

[0563] In some embodiments, the pharmaceutical composition comprises a surfactant. Illustrative examples of surfactants include d-alpha tocopherol, benzalkonium chloride, benzethonium chloride, cetrimide, cetylpyridinium chloride, docusate sodium, glyceryl behenate, glyceryl monooleate, lauric acid, macrogol 15 hydroxystearate, myristyl alcohol, phospholipids, polyoxyethylene alkyl ethers, polyoxyethylene sorbitan fatty acid esters, polyoxyethylene stearates, polyoxylglycerides, sodium lauryl sulfate, sorbitan esters, vitamin E polyethylene(glycol) succinate, and combinations thereof.

[0564] In some embodiments, the pharmaceutical composition comprises an anti-caking agent. Illustrative examples of anti-caking agents include calcium phosphate (tribasic), hydroxymethyl cellulose, hydroxypropyl cellulose, magnesium oxide, and combinations thereof.

[0565] Other excipients that may be used with the pharmaceutical compositions include, for example, albumin, antioxidants, antibacterial agents, antifungal agents, bioabsorbable polymers, chelating agents, controlled release agents, diluents, dispersing agents, dissolution enhancers, emulsifying agents, gelling agents, ointment bases, penetration enhancers, preservatives, solubilizing agents, solvents, stabilizing agents, sugars, and combinations thereof. Specific examples of each of these agents are described, for example, in the Handbook of Pharmaceutical Excipients, Rowe et al. (Eds.) 6th Ed. (2009), The Pharmaceutical Press, incorporated by reference in its entirety.

[0566] In some embodiments, the pharmaceutical composition comprises a solvent. In some aspects, the solvent is saline solution, such as a sterile isotonic saline solution or dextrose solution. In some aspects, the solvent is water for injection.

[0567] In some embodiments, the pharmaceutical compositions are in a particulate form, such as a microparticle or a nanoparticle. Microparticles and nanoparticles may be formed from any suitable material, such as a polymer or a lipid. In some aspects, the microparticles or nanoparticles are micelles, liposomes, or polymersomes.

[0568] Further provided herein are anhydrous pharmaceutical compositions and dosage forms comprising an ABP, since water can facilitate the degradation of some ABPs.

[0569] Anhydrous pharmaceutical compositions and dosage forms provided herein can be prepared using anhydrous or low moisture containing ingredients and low moisture or low humidity conditions. Pharmaceutical compositions and dosage forms that comprise lactose and at least one active ingredient that comprises a primary or secondary amine can be anhydrous if substantial contact with moisture and/or humidity during manufacturing, packaging, and/or storage is expected.

[0570] An anhydrous pharmaceutical composition should be prepared and stored such that its anhydrous nature is maintained. Accordingly, anhydrous compositions can be packaged using materials known to prevent exposure to water such that they can be included in suitable formulary kits. Examples of suitable packaging include, but are not limited to, hermetically sealed foils, plastics, unit dose containers (e.g., vials), blister packs, and strip packs.

[0571] In certain embodiments, an ABP and/or cell provided herein is formulated as parenteral dosage forms. Parenteral dosage forms can be administered to subjects by various routes including, but not limited to, subcutaneous, intravenous (including infusions and bolus injections), intramuscular, and intra-arterial. Because their administration typically bypasses subjects' natural defenses against contaminants, parenteral dosage forms are typically, sterile or capable of being sterilized prior to administration to a subject. Examples of parenteral dosage forms include, but are not limited to, solutions ready for injection, dry (e.g., lyophilized) products ready to be dissolved or suspended in a pharmaceutically acceptable vehicle for injection, suspensions ready for injection, and emulsions.

[0572] Suitable vehicles that can be used to provide parenteral dosage forms are well known to those skilled in the art. Examples include, but are not limited to: Water for Injection USP; aqueous vehicles such as, but not limited to, Sodium Chloride Injection, Ringer's Injection, Dextrose Injection, Dextrose and Sodium Chloride Injection, and Lactated Ringer's Injection; water miscible vehicles such as, but not limited to, ethyl alcohol, polyethylene glycol, and polypropylene glycol; and non-aqueous vehicles such as, but not limited to, corn oil, cottonseed oil, peanut oil, sesame oil, ethyl oleate, isopropyl myristate, and benzyl benzoate.

[0573] Excipients that increase the solubility of one or more of the ABPs and/or cells disclosed herein can also be incorporated into the parenteral dosage forms.

[0574] In some embodiments, the parenteral dosage form is lyophilized. Exemplary lyophilized formulations are described, for example, in U.S. Pat. Nos. 6,267,958 and 6,171,586; and WO 2006/044908; each of which is incorporated by reference in its entirety.

[0575] In human therapeutics, the doctor will determine the posology which he considers most appropriate according to a preventive or curative treatment and according to the age, weight, condition and other factors specific to the subject to be treated.

[0576] In certain embodiments, a composition provided herein is a pharmaceutical composition or a single unit dosage form. Pharmaceutical compositions and single unit dosage forms provided herein comprise a prophylactically or therapeutically effective amount of one or more prophylactic or therapeutic ABP.

[0577] The amount of the ABP, cell, or composition which will be effective in the prevention or treatment of a disorder or one or more symptoms thereof will vary with the nature and severity of the disease or condition, and the route by which the ABP and/or cell is administered. The frequency and dosage will also vary according to factors specific for each subject depending on the specific therapy (e.g., therapeutic or prophylactic agents) administered, the severity of the disorder, disease, or condition, the route of administration, as well as age, body, weight, response, and the past medical history of the subject. Effective doses may be extrapolated from dose-response curves derived from in vitro or animal model test systems.

[0578] Different therapeutically effective amounts may be applicable for different diseases and conditions, as will be readily known by those of ordinary skill in the art. Similarly, amounts sufficient to prevent, manage, treat or ameliorate such disorders, but insufficient to cause, or sufficient to reduce, adverse effects associated with the ABPs and/or cells provided herein are also encompassed by the dosage amounts and dose frequency schedules provided herein. Further, when a subject is administered multiple dosages of a composition provided herein, not all of the dosages need be the same. For example, the dosage administered to the subject may be increased to improve the prophylactic or therapeutic effect of the composition or it may be decreased to reduce one or more side effects that a particular subject is experiencing.

[0579] In certain embodiments, treatment or prevention can be initiated with one or more loading doses of an ABP or composition provided herein followed by one or more maintenance doses.

[0580] In certain embodiments, a dose of an ABP, cell, or composition provided herein can be administered to achieve a steady-state concentration of the ABP and/or cell in blood or serum of the subject. The steady-state concentration can be determined by measurement according to techniques available to those of skill or can be based on the physical characteristics of the subject such as height, weight and age.

[0581] As discussed in more detail elsewhere in this disclosure, an ABP and/or cell provided herein may optionally be administered with one or more additional agents useful to prevent or treat a disease or disorder. The effective amount of such additional agents may depend on the amount of ABP present in the formulation, the type of disorder or treatment, and the other factors known in the art or described herein.

[0582] Therapeutic Applications

[0583] For therapeutic applications, ABPs and/or cells are administered to a mammal, generally a human, in a pharmaceutically acceptable dosage form such as those known in the art and those discussed above. For example, ABPs and/or cells may be administered to a human intravenously as a bolus or by continuous infusion over a period of time, by intramuscular, intraperitoneal, intra-cerebrospinal, subcutaneous, intra-articular, intrasynovial, intrathecal, or intratumoral routes. The ABPs also are suitably administered by peritumoral, intralesional, or perilesional routes, to exert local as well as systemic therapeutic effects. The intraperitoneal route may be particularly useful, for example, in the treatment of ovarian tumors.

[0584] The ABPs and/or cells provided herein can be useful for the treatment of any disease or condition involving HLA-PEPTIDE. In some embodiments, the disease or condition is a disease or condition that can benefit from treatment with an anti-HLA-PEPTIDE ABP and/or cell. In some embodiments, the disease or condition is a tumor. In some embodiments, the disease or condition is a cell proliferative disorder. In some embodiments, the disease or condition is a cancer.

[0585] In some embodiments, the ABPs and/or cells provided herein are provided for use as a medicament. In some embodiments, the ABPs and/or cells provided herein are provided for use in the manufacture or preparation of a medicament. In some embodiments, the medicament is for the treatment of a disease or condition that can benefit from an anti-HLA-PEPTIDE ABP and/or cell. In some embodiments, the disease or condition is a tumor. In some embodiments, the disease or condition is a cell proliferative disorder. In some embodiments, the disease or condition is a cancer.

[0586] In some embodiments, provided herein is a method of treating a disease or condition in a subject in need thereof by administering an effective amount of an ABP and/or cell provided herein to the subject. In some aspects, the disease or condition is a cancer.

[0587] In some embodiments, provided herein is a method of treating a disease or condition in a subject in need thereof by administering an effective amount of an ABP and/or cell provided herein to the subject, wherein the disease or condition is a cancer, and the cancer is selected from a solid tumor and a hematological tumor.

[0588] In some embodiments, provided herein is a method of modulating an immune response in a subject in need thereof, comprising administering to the subject an effective amount of an ABP and/or cell or a pharmaceutical composition disclosed herein.

[0589] Combination Therapies

[0590] In some embodiments, an ABP and/or cell provided herein is administered with at least one additional therapeutic agent. Any suitable additional therapeutic agent may be administered with an ABP and/or cell provided herein. An additional therapeutic agent can be fused to an ABP. In some aspects, the additional therapeutic agent is selected from radiation, a cytotoxic agent, a toxin, a chemotherapeutic agent, a cytostatic agent, an anti-hormonal agent, an EGFR inhibitor, an immunomodulatory agent, an anti-angiogenic agent, and combinations thereof. In some embodiments, the additional therapeutic agent is an ABP.

[0591] Diagnostic Methods

[0592] Also provided are methods for predicting and/or detecting the presence of a given HLA-PEPTIDE on a cell from a subject. Such methods may be used, for example, to predict and evaluate responsiveness to treatment with an ABP and/or cell provided herein.

[0593] In some embodiments, a blood or tumor sample is obtained from a subject and the fraction of cells expressing HLA-PEPTIDE is determined. In some aspects, the relative amount of HLA-PEPTIDE expressed by such cells is determined. The fraction of cells expressing HLA-PEPTIDE and the relative amount of HLA-PEPTIDE expressed by such cells can be determined by any suitable method. In some embodiments, flow cytometry is used to make such measurements. In some embodiments, fluorescence assisted cell sorting (FACS) is used to make such measurement. See Li et al., J. Autoimmunity, 2003, 21:83-92 for methods of evaluating expression of HLA-PEPTIDE in peripheral blood.

[0594] In some embodiments, detecting the presence of a given HLA-PEPTIDE on a cell from a subject is performed using immunoprecipitation and mass spectrometry. This can be performed by obtaining a tumor sample (e.g., a frozen tumor sample) such as a primary tumor specimen and applying immunoprecipitation to isolate one or more peptides. The HLA alleles of the tumor sample can be determined experimentally or obtained from a third party source. The one or more peptides can be subjected to mass spectrometry (MS) to determine their sequence(s). The spectra from the MS can then be searched against a database. An example is provided in the Examples section below.

[0595] In some embodiments, predicting the presence of a given HLA-PEPTIDE on a cell from a subject is performed using a computer-based model applied to the peptide sequence and/or RNA measurements of one or more genes comprising that peptide sequence (e.g., RNA seq or RT-PCR, or nanostring) from a tumor sample. The model used can be as described in international patent application no. PCT/US2016/067159, herein incorporated by reference, in its entirety, for all purposes.

[0596] Kits

[0597] Also provided are kits comprising an ABP and/or cell provided herein. The kits may be used for the treatment, prevention, and/or diagnosis of a disease or disorder, as described herein.

[0598] In some embodiments, the kit comprises a container and a label or package insert on or associated with the container. Suitable containers include, for example, bottles, vials, syringes, and IV solution bags. The containers may be formed from a variety of materials, such as glass or plastic. The container holds a composition that is by itself, or when combined with another composition, effective for treating, preventing and/or diagnosing a disease or disorder. The container may have a sterile access port. For example, if the container is an intravenous solution bag or a vial, it may have a port that can be pierced by a needle. At least one active agent in the composition is an ABP provided herein. The label or package insert indicates that the composition is used for treating the selected condition.

[0599] In some embodiments, the kit comprises (a) a first container with a first composition contained therein, wherein the first composition comprises an ABP and/or cell provided herein; and (b) a second container with a second composition contained therein, wherein the second composition comprises a further therapeutic agent. The kit in this embodiment can further comprise a package insert indicating that the compositions can be used to treat a particular condition, e.g., cancer.

[0600] Alternatively, or additionally, the kit may further comprise a second (or third) container comprising a pharmaceutically-acceptable excipient. In some aspects, the excipient is a buffer. The kit may further include other materials desirable from a commercial and user standpoint, including filters, needles, and syringes.

### EXAMPLES

[0601] Below are examples of specific embodiments for carrying out the present invention. The examples are offered for illustrative purposes only, and are not intended to limit the scope of the present invention in any way. Efforts have been made to ensure accuracy with respect to numbers used (e.g., amounts, temperatures, etc.), but some experimental error and deviation should, of course, be allowed for.

[0602] The practice of the present invention will employ, unless otherwise indicated, conventional methods of protein chemistry, biochemistry, recombinant DNA techniques and pharmacology, within the skill of the art. Such techniques are explained fully in the literature. See, e.g., T. E. Creighton, Proteins: Structures and Molecular Properties (W.H. Freeman and Company, 1993); A. L. Lehninger, Biochemistry (Worth Publishers, Inc., current addition); Sambrook, et al., Molecular Cloning: A Laboratory Manual (2nd Edition, 1989); Methods In Enzymology (S. Colowick and N. Kaplan eds., Academic Press, Inc.); Remington's Pharmaceutical Sciences, 18th Edition (Easton, Pa.: Mack Publishing Company, 1990); Carey and Sundberg Advanced Organic Chemistry 3^{rd} Ed. (Plenum Press) Vols A and B(1992).

### Example 1: Identification of Predicted HLA-Peptide Complexes

[0603] We identified two classes of cancer specific HLA-peptide targets: The first class (cancer testis antigens, CTAs) are not expressed or are expressed at minimal levels in most normal tissues and expressed in tumor samples. The second class (tumor associated antigens, TAAs) are expressed highly in tumor samples and may have low expression in normal tissues.

[0604] We identified gene targets using three computational steps: First, we identified genes with low or no expression in most normal tissues using data available through the Genotype-Tissue Expression (GTEx) Project [1]. We obtained aggregated gene expression data from the Genotype-Tissue Expression (GTEx) Project (version V7p2). This dataset comprised 11,688 post-mortem samples from 714 individuals and fifty-three different tissue types. Expression was measured using RNA-Seq and computationally processed according to the GTEx standard pipeline (https://www.gtexportal.org/home/documentationPage). Gene expression was calculated using the sum of isoform expression that were calculated using RSEM v1.2.22 [2].

[0605] Next, we identified which of those genes are aberrantly expressed in cancer samples using data from The Cancer Genome Atlas (TCGA) Research Network: http://cancergenome.nih.gov/. We examined 11,093 samples available from TCGA (Data Release 6.0). Because GTEx and TCGA use different annotations of the human genome in their computational analyses, we only included genes for which there were available ENCODE mappings between the two datasets.

[0606] Finally, in these genes, we identified which peptides are likely to be presented as cell surface antigens by MEW Class I proteins using a deep learning model trained on HLA presented peptides sequenced by tandem mass spectrometry (MS/MS), as described in international patent application no. PCT/US2016/067159, herein incorporated by reference, in its entirety, for all purposes.

[0607] Specific criteria for the two classes of genes is given below.

[0608] CTA Inclusion Criteria

[0609] To identify the CTAs, we sought to define a criteria to exclude genes that were expressed in normal tissue that was strict enough to ensure tumor specificity, but would not exclude non-zero measurements arising from potential artifacts such as read misalignment. Genes were eligible for inclusion as CTAs if they met the following criteria: The median GTEx expression in each organ that was a part of the brain, heart, or lung was less than 0.1 transcripts per million (TPM) with no one sample exceeding 5 TPM. The median GTEx expression in other essential organs was less than 2 TPM with no one sample exceeding 10 TPM. Expression was ignored for organs classified as non-essential (testis, thyroid, and minor salivary gland). Genes were considered expressed in tumor samples if they had expression in TCGA of greater than 20 TPM in at least 30 samples.

[0610] We then examined the distribution of the expression of the remaining genes across the TCGA samples. When we examined the known CTAs, e.g. the MAGE family of genes, we observed that the expression these genes in log space was generally characterized by a bimodal distribution. This distribution consisted of a left mode around a lower expression value and a right mode (or thick tail) at a higher expression level. This expression pattern is consistent with a biological model in which some minimal expression is detected at baseline in all samples and higher expression of the gene is observed in a subset of tumors experiencing epigenetic dysregulation. We reviewed the distribution of expression of each gene across TCGA samples and discarded those where we observed only a unimodal distribution with no significant right-hand tail.

[0611] TAA Inclusion Criteria

[0612] The TAAs were identified by focusing on genes with much higher expression in tumor tissues than in normal tissue: We first identified genes with a median TPM of less than 10 in all GTEx essential, normal tissues and then selected the subset which had expression of greater than 100 TPM in at least one TCGA tumor tissues. Then, we examined the distribution of each of these genes and selected those with a bimodal distribution of expression, as well as additional evidence of significantly elevated expression in one or more tumor types.

[0613] Lists were further reviewed to eliminate genes which are known to have expression in tissues not adequately represented in GTEx or which could have originated from immune cell infiltrates within the tumor. These steps left of us with a final list of 56 CTA and 58 TAA genes.

[0614] We also added peptides from two additional proteins known to be present in cancer. We added the junction peptides from the EGFR-SEPT14 fusion protein [3] and we added peptides from KLK3 (PSA). We also added peptides from two genes from the same gene family as PSA: KLK2 and KLK4.

[0615] To identify the peptides that are likely to be presented as cell surface antigens by MEW Class I proteins, we used a sliding window to parse each of these proteins into its constituent 8-11 amino acid sequences. We processed these peptides and their flanking sequences with the HLA peptide presentation deep learning model to calculate the likelihood of presentation of each peptide at the max expression level observed for this gene in TCGA. We considered a peptide likely to be presented (i.e., a candidate target) if its quantile normalized probability of presentation calculated by our model was greater than 0.001.

[0616] The results are shown in Table A. For clarity, each HLA-PEPTIDE was assigned a target number in Table A. For example, HLA-PEPTIDE target 1 is HLA-C*16:01_AAACSRMVI, HLA-PEPTIDE target 2 is HLA-C*16:02_AAACSRMVI, and so forth.

[0617] In summary, the example provides a large set of tumor-specific HLA-PEPTIDEs that can be pursued as candidate targets for ABP development.

### REFERENCES

[0618] 1. Consortium, G. T., The Genotype-Tissue Expression (GTEx) project. Nat Genet, 2013. 45(6): p. 580-5.
[0619] 2. Li B, Dewey C N., RSEM: accurate transcript quantification from RNA-Seq data with or without a reference genome. BMC Bioinformatics. 2011 Aug. 4; 12:323.
[0620] 3. Frattini V, Trifonov V, Chan J M, Castano A, Lia M, Abate F, Keir S T, Ji A X, Zoppoli P, Niola F, Danussi C, Dolgalev I, Porrati P, Pellegatta S, Heguy A, Gupta G, Pisapia D J, Canoll P, Bruce J N, McLendon R E, Yan H, Aldape K, Finocchiaro G, Mikkelsen T, Privé G G, Bigner D D, Lasorella A, Rabadan R, Iavarone A. The integrated landscape of driver genomic alterations in glioblastoma. Nat Genet. 2013 October; 45(10):1141-9.

### Example 2: Validation of Predicted HLA-PEPTIDE Complexes

[0621] The presence of peptides from the HLA-PEPTIDE complexes of Table A is determined using mass spectrometry (MS) on tumor samples known to be positive for each given HLA allele from the respective HLA-PEPTIDE complex.

[0622] Isolation of HLA-peptide molecules is performed using classic immunoprecipitation (IP) methods after lysis and solubilization of the tissue sample (1-4). Fresh frozen tissue is first frozen in liquid nitrogen and pulverized (CryoPrep; Covaris, Woburn, Mass.). Lysis buffer (1% CHAPS, 20 mM Tris-HCl, 150 mM NaCl, protease and phosphatase inhibitors, pH=8) is added to solubilize the tissue and 1/10^{th} of the sample is aliquoted for proteomics and genomic sequencing efforts. The remainder of the sample is spun at 4° C. for 2 hrs to pellet debris. The clarified lysate is used for the HLA specific IP.

[0623] Immunoprecipitation is performed using antibodies coupled to beads where the antibody is specific for HLA molecules. For a pan-Class I HLA immunoprecipitation, the antibody W6/32 (5) is used, for Class II HLA-DR, antibody L243 (6) is used. Antibody is covalently attached to NHS-sepharose beads during overnight incubation. After covalent attachment, the beads are washed and aliquoted for IP. Additional methods for IP can be used including but not limited to Protein A/G capture of antibody, magnetic bead isolation, or other methods commonly used for immunoprecipitation.

[0624] The lysate is added to the antibody beads and rotated at 4° C. overnight for the immunoprecipitation. After immunoprecipitation, the beads are removed from the lysate and the lysate is stored for additional experiments, including additional IPs. The IP beads are washed to remove non-specific binding and the HLA/peptide complex is eluted from the beads with 2N acetic acid. The protein components are removed from the peptides using a molecular weight spin column. The resultant peptides are taken to dryness by SpeedVac evaporation and can be stored at −20° C. prior to MS analysis.

[0625] Dried peptides are reconstituted in HPLC buffer A and loaded onto a C-18 microcapillary HPLC column for gradient elution in to the mass spectrometer. A gradient of 0-40% B (solvent A—0.1% formic acid, solvent B— 0.1% formic acid in 80% acetonitrile) in 180 minutes is used to elute the peptides into the Fusion Lumos mass spectrometer (Thermo). MS1 spectra of peptide mass/charge (m/z) are collected in the Orbitrap detector with 120,000 resolution followed by 20 MS2 scans. Selection of MS2 ions is performed using data dependent acquisition mode and dynamic exclusion of 30 sec after MS2 selection of an ion. Automatic gain control (AGC) for MS1 scans is set to 4×105 and for MS2 scans is set to 1×104. For sequencing HLA peptides, +1, +2 and +3 charge states can be selected for MS2 fragmentation. Alternatively, MS2 spectra can be acquired using mass targeting methods where only masses listed in the inclusion list are selected for isolation and fragmentation. This is commonly referred to as Targeted Mass Spectrometry and is performed in either a qualitative manner or can be quantitative. Quantitation methods require each peptide to be quantitated to be synthesized using heavy labeled amino acids. (Doerr 2013)

[0626] MS2 spectra from each analysis are searched against a protein database using Comet (7-8) and the peptide identification is scored using Percolator (9-11) or using the integrated de novo sequencing and database search algorithm of PEAKS. Peptides from targeted MS2 experiments are analyzed using Skyline (Lindsay K. Pino et al. 2017) or other method to analyze predicted fragment ions.

[0627] The presence of multiple peptides from the predicted HLA-PEPTIDE complexes is determined using mass spectrometry (MS) on various tumor samples known to be positive for each given HLA allele from the respective HLA-PEPTIDE complex.

[0628] The spontaneous modification of amino acids can occur to many amino acids. Cysteine is especially susceptible to this modification and can be oxidized or modified with a free cysteine. Additionally N-terminal glutamine amino acids can be converted to pyro-glutamic acid. Since each of these modifications results in a change in mass, they can be definitively assigned in the MS2 spectra. To use these peptides in preparation of ABPs the peptide may need to contain the same modification as seen in the mass spectrometer. These modifications can be created using simple laboratory and peptide synthesis methods (Lee et al.; Ref 14).

### REFERENCES

[0629] (1) Hunt D F, Henderson R A, Shabanowitz J, Sakaguchi K, Michel H, Sevilir N, Cox A L, Appella E, Engelhard V H. Characterization of peptides bound to the class I WIC molecule HLA-A2.1 by mass spectrometry. Science 1992. 255: 1261-1263.
[0630] (2) Zarling A L, Polefrone J M, Evans A M, Mikesh L M, Shabanowitz J, Lewis S T, Engelhard V H, Hunt D F. Identification of class I WIC-associated phosphopeptides as targets for cancer immunotherapy._Proc Natl Acad Sci USA. 2006 Oct. 3; 103(40):14889-94.
[0631] (3) Bassani-Sternberg M, Pletscher-Frankild S, Jensen L J, Mann M. Mass spectrometry of human leukocyte antigen class I peptidomes reveals strong effects of protein abundance and turnover on antigen presentation. Mol Cell Proteomics. 2015 March; 14(3):658-73. doi: 10.1074/mcp.M114.042812.
[0632] (4) Abelin J G, Trantham P D, Penny S A, Patterson A M, Ward S T, Hildebrand W H, Cobbold M, Bai D L, Shabanowitz J, Hunt D F. Complementary IMAC enrichment methods for HLA-associated phosphopeptide identification by mass spectrometry. Nat Protoc. 2015 September; 10(9):1308-18. doi: 10.1038/nprot.2015.086. Epub 2015 Aug. 6
[0633] (5) Barnstable C J, Bodmer W F, Brown G, Galfre G, Milstein C, Williams A F, Ziegler A. Production of monoclonal antibodies to group A erythrocytes, HLA and other human cell surface antigens-new tools for genetic analysis. Cell. 1978 May; 14(1):9-20.
[0634] (6) Goldman J M, Hibbin J, Kearney L, Orchard K, Th'ng K H. HLA-D R monoclonal antibodies inhibit the proliferation of normal and chronic granulocytic leukaemia myeloid progenitor cells. Br J Haematol. 1982 November; 52(3):411-20.
[0635] (7) Eng J K, Jahan T A, Hoopmann M R. Comet: an open-source M S/M S sequence database search tool. Proteomics. 2013 January; 13(1):22-4. doi: 10.1002/pmic.201200439. Epub 2012 Dec. 4.
[0636] (8) Eng J K, Hoopmann M R, Jahan T A, Egertson J D, Noble W S, MacCoss M J. A deeper look into Comet—implementation and features. J Am Soc Mass Spectrom. 2015 November; 26(11):1865-74. doi: 10.1007/s13361-015-1179-x. Epub 2015 Jun. 27.
[0637] (9) Lukas Käll, Jesse Canterbury, Jason Weston, William Stafford Noble and Michael J. MacCoss. Semi-supervised learning for peptide identification from shotgun proteomics datasets. Nature Methods 4:923-925, November 2007
[0638] (10) Lukas Käll, John D. Storey, Michael J. MacCoss and William Stafford Noble. Assigning confidence measures to peptides identified by tandem mass spectrometry. Journal of Proteome Research, 7(1):29-34, January 2008
[0639] (11) Lukas Käll, John D. Storey and William Stafford Noble. Nonparametric estimation of posterior error probabilities associated with peptides identified by tandem mass spectrometry. Bioinformatics, 24(16):i42-i48, August 2008
[0640] (12) Doerr, A. (2013) Mass Spectrometry-based targeted proteomics. Nature Methods, 10, 23.
[0641] (13) Lindsay K. Pino, Brian C. Searle, James G. Bollinger, Brook Nunn, Brendan MacLean & M. J. MacCoss (2017) The Skyline ecosystem: Informatics for quantitative mass spectrometry proteomics. Mass Spectrometry Reviews.
[0642] (14) Lee W Thompson; Kevin T Hogan; Jennifer A Caldwell; Richard A Pierce; Ronald C Hendrickson; Donna H Deacon; Robert E Settlage; Laurence H Brinckerhoff; Victor H Engelhard; Jeffrey Shabanowitz; Donald F Hunt; Craig L Slingluff. Preventing the spontaneous modification of an HLA-A2-restricted peptide at an N-terminal glutamine or an internal cysteine residue enhances peptide antigenicity. Journal of Immunotherapy (Hagerstown, Md.: 1997). 27(3):177-83, May 2004.

### Example 3: Identification of Antibodies and Antigen Binding Fragments Thereof that Bind HLA-Peptide Targets

[0643] Overview

[0644] The following exemplification demonstrates that antibodies (Abs) can be identified that recognize tumor-specific HLA-restricted peptides. The overall epitope that is recognized by such Abs generally comprises a composite surface of both the peptide as well as the HLA protein presenting that particular peptide. Abs that recognize HLA complexes in a peptide-specific manner are often referred to as T cell receptor (TCR)-like Abs or TCR-mimetic Abs. The HLA-PEPTIDE target antigens that were selected for antibody discovery, derived from the tumor-specific gene product MAGEA6, FOXE1, MAGE3/6, were HLA-B*35:01_EVDPIGHVY (HLA-PEPTIDE target “G5”), HLA-A*02:01_AIFPGAVPAA (HLA-PEPTIDE target “G8”), and HLA-A*01:01_ASSLPTTMNY (HLA-PEPTIDE target “G10”), respectively. Cell surface presentation of these HLA-PEPTIDE targets was confirmed by mass spectrometry analysis of HLA complexes obtained from tumor samples as described in Example 2. Representative plots are depicted in FIGS. 25-27.

[0645] HLA-Peptide Target Complexes and Counterscreen Peptide-HLA Complexes

[0646] The HLA-PEPTIDE targets G5, G8, G10, as well as counterscreen negative control peptide-HLAs, were produced recombinantly using conditional ligands for HLA molecules using established methods. In all, 18 counterscreen HLA-peptides were generated for each of the HLA-PEPTIDE targets. The 18 counterscreen HLA-peptides were designed such that (A) the negative control peptide was known to be presented by the same HLA subtype (i.e. the HLA-related controls) or (B) the negative control peptides were known to be presented by a different HLA subtype. The grouping of the target and the negative control peptide-HLA complexes for screen 1 is shown in FIG. 3 (with detailed sequence information provided in Table 1), and for screen 2 shown in FIG. 4 (with detailed sequence information provided in Table 2.

TABLE 1
HLA-PEPTIDE sequence design for Screen 1 negative
control peptides and “G5” target

| Group | HLA | Peptide | Gene | Target |
|---|---|---|---|---|
| G1 | HLA-A*02: 01 | LLFGYPVYV | | Neg Ctrl 1 |
| | HLA-A*02: 01 | GILGFVFTL | | Neg Ctrl 2 |
| | HLA-A*02: 01 | FLLTRILTI | | Neg Ctrl 3 |
| G2 | HLA-A*01: 01 | YSEHPTFTSQY | | Neg Ctrl 1 |
| | HLA-A*01: 01 | VSDGGPNLY | | Neg Ctrl 2 |
| | HLA-A*01: 01 | ATDALMTGY | | Neg Ctrl 3 |
| G3 | HLA-A*11: 01 | IVTDFSVIK | | Neg Ctrl 1 |
| | HLA-A*11: 01 | KSMREEYRK | | Neg Ctrl 2 |
| | HLA-A*11: 01 | SSCSSCPLSK | | Neg Ctrl 3 |
| G4 | HLA-A*11: 01 | ATIGTAMYK | | Neg Ctrl 1 |
| | HLA-A*11: 01 | AVFDRKSDAK | | Neg Ctrl 2 |
| | HLA-A*11: 01 | SIIPSGPLK | | Neg Ctrl 3 |
| G5 | HLA-B*35: 01 | EVDPIGHVY | MAGEA6 | Target |
| | HLA-B*35: 01 | IPSINVHHY | | Neg Ctrl 1 |
| | HLA-B*35: 01 | EPLPQGQLTAY | | Neg Ctrl 2 |
| | HLA-B*35: 01 | VPLDEDFRKY | | Neg Ctrl 3 |
| G6 | HLA-A*03: 01 | RLRAEAQVK | | Neg Ctrl 1 |
| | HLA-A*03: 01 | RLRPGGKKK | | Neg Ctrl 2 |
| | HLA-A*03: 01 | QVPLRPMTYK | | Neg Ctrl 3 |

TABLE 2
HLA-PEPTIDE sequence design for Screen 2 negative
control peptides, G8, and G10 targets*

| Group | HLA | Peptide | Gene | Target |
|---|---|---|---|---|
| G7/G8^{‡} | A*02: 01 | LLFGYPVYV | | Neg Ctrl 1 |
| | A*02: 01 | GILGFVFTL | | Neg Ctrl 2 |
| | A*02: 01 | FLLTRILTI | | Neg Ctrl 3 |
| G9 | A*24: 02 | TYGPVFMCL | | Neg Ctrl 1 |
| | A*24: 02 | RYLKDQQLL | | Neg Ctrl 2 |
| | A*24: 02 | PYLFWLAAI | | Neg Ctrl 3 |
| G10 | A*01: 01 | ASSLPTTMNY | MAGE3/6 | Target |
| | A*01: 01 | YSEHPTFTSQY | | Neg Ctrl 1 |
| | A*01: 01 | VSDGGPNLY | | Neg Ctrl 2 |
| | A*01: 01 | ATDALMTGY | | Neg Ctrl 3 |
| G11 (=G3) | A*11: 01 | IVTDFSVIK | | Neg Ctrl 1 |
| | A*11: 01 | KSMREEYRK | | Neg Ctrl 2 |
| | A*11: 01 | SSCSSCPLSK | | Neg Ctrl 3 |
| G12 (=G6) | A*03: 01 | RLRAEAQVK | | Neg Ctrl 1 |
| | A*03: 01 | RLRPGGKKK | | Neg Ctrl 2 |
| | A*03: 01 | QVPLRPMTYK | | Neg Ctrl 3 |

### Generation and Stability Analysis of HLA-Peptide Target Complexes and Counterscreen Peptide-HLA Complexes

[0647] Results for the G5 counterscreen “minipool” and G2 target are shown in FIG. 5. All three counterscreen peptides and the G5 peptide rescued the HLA complex from dissociation.

[0648] Results for the additional G5 “complete” pool counterscreen peptides are shown in FIG. 6, demonstrating that they also form stable HLA-peptide complexes.

[0649] Results for counterscreen peptides and G8 target are shown in FIG. 7. All three counterscreen peptides and the G8 peptide rescued the HLA complex from dissociation.

[0650] Results for the G10 counterscreen “minipool” and G10 target are shown in FIG. 8. All three counterscreen peptides and the G10 peptide rescued the HLA complex from dissociation.

[0651] Results for the additional G8 and G10 “complete” pool counterscreen peptides are shown in FIG. 9, demonstrating that they also form stable HLA-peptide complexes.

[0652] Phage Library Screening

[0653] The highly diverse SuperHuman 2.0 synthetic naïve scFv library from Distributed Bio Inc was used as input material for phage display, which has a 7.6×10¹⁰ total diversity on ultra-stable and diverse VH/VL scaffolds. For both screen 1 (see FIG. 3) and screen 2 (see FIG. 4) three to four rounds of bead-based phage panning with the target pHLA complex (as shown in Table 3) were conducted using established protocols to identify scFv binders to pHLAs G5, G8 and G10, respectively. For each round of panning, the phage library was initially depleted with 18 pooled negative pHLA complexes prior to the binding step with the target pHLAs. The phage titer was determined at every round of panning to establish removal of non-binding phage. The output phage supernatant was also tested for target binding by ELISA and suggested progressive enrichment of G5-, G8 and G10 binding phage (see FIG. 10).

TABLE 3
Phage library screening strategy

| Round | Antigen concentration | | Washes |
|---|---|---|---|
| R1 | 100 | pmol | 3X PBST + 3X PBS (5 min washes) |
| R2 | 25 | pmol | 5 PBST (2 × 30 sec, 3 × 5 min) + |
| | | | 5 PBS (2 × 30 sec, 3 × 5 min) |
| R3 | 10 | pmol | 8 PBST (4 × 30 sec, 4 × 5 min) + |
| | | | 8 PBS (4 × 30 sec, 4 × 5 min) |

| | | |
|---|---|---|
| R4 | 5 pmol, 10 pmol | 30 min PBST + 30 min PBS |

[0654] Bacterial periplasmic extracts (PPEs) of individual output clones were subsequently generated in 96-well plates using well-established protocols. The PPEs were used to test for binding to the target pHLA antigen by high throughput PPE ELISA. Positive clones were sequenced and re-arrayed to select sequence-unique clones. Sequence unique clones were then tested in a secondary ELISA for binding to target pHLA versus the panel of HLA-matched negative control pHLA complexes, thus establishing target specificity. The G8 negative control HLA complexes (i.e. A*24:02) did not HLA-match with the G8 target HLA complex (i.e. A*02:01). Therefore, HLA-A*02:01 complexes presenting the peptides LLFGYPVYV, GILGFVFTL or FLLTRILTI from G7 were used as HLA-matched minipool of negative controls for G8 in further biochemical and functional characterization assays for the TCR-mimetic Abs retrieved from the scFv library.

[0655] Isolation of scFv Hits

[0656] Individual, soluble scFv protein fragments were produced and purified for the scFv clones that were found to be selective when expressed in PPEs. As shown by scFv PPE ELISA, these clones exhibited at least three-fold selective binding to the target pHLA as compared to binding to the minipool of negative control pHLAs. Soluble scFv production allowed for further biochemical and functional characterization.

[0657] The resulting VH and VL sequences for the scFvs that bind target G5 are shown in Table 4. To clarify the organization of Table 4, each scFv was assigned a clone name in Table 4. For example, the scFv from clone G5_P7_E7 has the VH sequence QVQLVQSGAEVKKPGASVKVSCKASGYTFTSYDINWVRQAPGQGLEWMGIINPRSG STKYAQKFQGRVTMTRDTSTSTVYMELSSLRSEDTAVYYCARDGVRYYGMDVWG QGTTVTVSSAS and the VL sequence DIVMTQSPLSLPVTPGEPASISCRSSQSLLHSNGYNYLDWYLQKPGQSPQLLIYLGSY RASGVPDRFSGSGSGTDFTLKISRVEAEDVGVYYCMQGLQTPITFGQGTRLEIK.

[0658] The resulting CDR sequences for the scFvs that bind target G5 are shown in Table 5. To clarify the organization of Table 5, each scFv was assigned a clone name in Table 5. For example, the scFv from clone G5_P7_E7 has an HCDR1 sequence that is YTFTSYDIN, an HCDR2 sequence that is GIINPRSGSTKYA, an HCDR3 sequence that is CARDGVRYYGMDVW, an LCDR1 sequence that is RSSQSLLHSNGYNYLD, an LCDR2 sequence that is LGSYRAS, and an LCDR3 sequence that is CMQGLQTPITF, according to the Kabat numbering system.

[0659] The resulting VH and VL sequences for the scFvs that bind target G8 are shown in Table 6. Table 6 is organized similarly to Table 4.

[0660] The resulting CDR sequences for the scFvs that bind target G8 are shown in Table 7. Table 7 is organized similarly to Table 5.

[0661] The resulting VH and VL sequences for the scFvs that bind target G10 are shown in Table 8. Table 8 is organized similarly to Table 4.

[0662] The resulting CDR sequences for the scFvs that bind target G8 are shown in Table 9. Table 9 is organized similarly to Table 5.

[0663] A number of clones were formatted into scFv, Fab, and IgG to facilitate biochemical, structural, and functional characterization (see Table 10).

TABLE 10
Hit rate of the screening campaigns. Clones were reformatted into
(a) IgG for biochemical and functional characterization, (b)
Fab constructs for protein crystallography and HDX mass spectrometry,
and (c) scFv constructs for HDX mass spectrometry.

| Group | G5 | G8 | G10 |
|---|---|---|---|
| HLA | B*35:01 | A*02:01 | A*01:01 |
| Peptide | MAGEA6 | FOXE1 | MAGE3/6 |
| Sequence Unique | 81 | 17 | 23 |
| Binders | | | |
| Selective Binders | 18 | 17 | 18 |
| IgG | 18 | 17 | 18 |
| Fab | 4 | 3 | 2 |
| scFv | 8 | 7 | 6 |

[0664] FIG. 11 depicts a flow chart describing the antibody selection process, including criteria and intended application for the scFv, Fab, and IgG formats. Briefly, clones were selected for further characterization based on sequence diversity, binding affinity, selectivity, and CDR3 diversity.

[0665] To assess sequence diversity, dendrograms were produced using clustal software. The predicted 3D structures of the scFv sequences, based on the VH type, were also taken into consideration. Binding affinity as determined by the equilibrium dissociation constant (K_{D}) was measured using an Octet HTX (ForteBio). Selectivity for the specific peptide-HLA complexes was determined with an ELISA titration of the purified scFvs as compared to the minipool of negative control pHLA complexes or streptavidin alone. Cutoff values for the K_{D} and selectivity were determined for each target set based on the range of values obtained for the Fabs within each set. Final clones were selected based on diversity in sequence families and CDR3 sequences.

[0666] The overall number of hits following phage library screening and scFv isolation are listed in Table 10, above.

[0667] Materials and Methods

[0668] HLA Expression and Purification:

[0669] Recombinant proteins were obtained through bacterial expression using established procedures (Garboczi, Hung, & Wiley, 1992). Briefly, the a chain and β2 microglobulin chain of various human leukocyte antigens (HLA) were expressed separately in BL21 competent E. Coli cells (New England Biolabs). Following auto-induction, cells were lysed via sonication in Bugbuster® plus benzonase protein extraction reagent (Novagen). The resulting inclusion bodies were washed and sonicated in wash buffer with and without 0.5% Triton X-100 (50 mM Tris, 100 mM NaCl, 1 mM EDTA). After the final centrifugation, inclusion pellets were dissolved in urea solution (8 M urea, 25 mM MES, 10 mM EDTA, 0.1 mM DTT, pH 6.0). Bradford assay (Biorad) was used to quantify the concentration and the inclusion bodies were stored at −80° C.

[0670] Refold of pHLA and Purification:

[0671] HLA complexes were obtained by refolding of recombinantly produced subunits and a synthetically obtained peptide using established procedures. (Garboczi et al., 1992) Briefly, the purified α and β2 microglobulin chains were refolded in refold buffer (100 mM Tris pH 8.0, 400 mM L-Arginine HCl, 2 mM EDTA, 50 mM oxidized glutathione, 5 mM reduced glutathione, protease inhibitor tablet) with either the target peptide or a cleavable ligand. The refold solution was concentrated with a Vivaflow 50 or 50R crossflow cassette (Sartorius Stedim). Three rounds of dialyses in 20 mM Tris pH 8.0 were performed for at least 8 hours each. For the antibody screening and functional assays, the refolded HLA was enzymatically biotinylated using BirA biotin ligase (Avidity). Refolded protein complexes were purified using a HiPrep (16/60 Sephacryl 5200) size exclusion column attached to an AKTA FPLC system. Biotinylation was confirmed in a streptavidin gel-shift assay under non-reducing conditions by incubating the refolded protein with an excess of streptavidin at room temperature for 15 minutes prior to SDS-PAGE. The peptide-HLA complexes were aliquoted and stored at −80° C.

[0672] Peptide Exchange:

[0673] HLA-peptide stability was assessed by conditional ligand peptide exchange and stability ELISA assay. Briefly, conditional ligand-HLA complexes were subjected to ±conditional stimulus in the presence or absence of the counterscreen or test peptides. Exposure to the conditional stimulus cleaves the conditional ligand from the HLA complex, resulting in dissociation of the HLA complex. If the counterscreen or test peptide stably binds the α1/α2 groove of the HLA complex, it “rescues” the HLA complex from disassociation. In short, a mixture of 100 μL of 50 μM of the novel peptide (Genscript) and 0.5 μM recombinantly produced cleavable ligand-loaded HLA in 20 mM Tris HCl and 50 mM NaCl at pH 8 was placed on ice. The mixture was irradiated for 15 min in a UV cross-linker (CL-1000, UVP) equipped with 365-nm UV lamps at ˜10 cm distance.

[0674] MHC Stability Assay:

[0675] The MHC stability ELISA was performed using established procedures. (Chew et al., 2011; Rodenko et al., 2006) A 384-well clear flat bottom polystyrene microplate (Corning) was precoated with 50 μl of streptavidin (Invitrogen) at 2 μg/mL in PBS. Following 2 h of incubation at 37° C., the wells were washed with 0.05% Tween 20 in PBS (four times, 50 μL) wash buffer, treated with 50 μl of blocking buffer (2% BSA in PBS), and incubated for 30 min at room temperature. Subsequently, 25 μl of peptide-exchanged samples that were 300× diluted with 20 mM Tris HCl/50 mM NaCl were added in quadruplicate. The samples were incubated for 15 min at RT, washed with 0.05% Tween wash buffer (4×50 μL), treated for 15 min with 25 μL of HRP-conjugated anti-β2m (1 μg/mL in PBS) at RT, washed with 0.05% Tween wash buffer (4×50 μL), and developed for 10-15 min with 25 μL of ABTS-solution (Invitrogen). The reactions were stopped by the addition of 12.5 μL of stop buffer (0.01% sodium azide in 0.1 M citric acid). Absorbance was subsequently measured at 415 nm using a spectrophotometer (SpectraMax i3x; Molecular Devices).

[0676] Phage Panning:

[0677] For each round of panning, an aliquot of starting phage was set aside for input titering and the remaining phage was depleted three times against Dynabead M-280 streptavidin beads (Life Technologies) followed by a depletion against Streptavidin beads pre-bound with 100 pmoles of pooled negative peptide-HLA complexes. For the first round of panning, 100 pmoles of peptide-HLA complex bound to streptavidin beads was incubated with depleted phage for 2 hours at room temperature with rotation. Three five-minute washes with 0.5% BSA in 1×PBST (PBS+0.05% Tween-20) followed by three five-minute washes with 0.5% BSA in 1×PBS were utilized to remove any unbound phage to the peptide-HLA complex bound beads. To elute the bound phage from the washed beads, 1 mL 0.1M TEA was added and incubated for 10 minutes at room temperature with rotation. The eluted phage was collected from the beads and neutralized with 0.5 mL 1M Tris-HCl pH 7.5. The neutralized phage was then used to infect log growth TG-1 cells (0D600=0.5) and after an hour of infection at 37° C., cells were plated onto 2YT media with 100m/mL carbenicillin and 2% glucose (2YTCG) agar plates for output titer and bacterial growth for subsequent panning rounds. For subsequent rounds of panning, selection antigen concentrations were lowered while washes increased by amount and length of wash times at show in Table 3.

[0678] Input/Output Phage Titer:

[0679] Each round of input titer was serially diluted in 2YT media to 10¹⁰. Log phase TG-1 cells are infected with diluted phage titers (10⁷-10¹⁰) and incubated at 37° C. for 30 minutes without shaking followed by another 30 minutes with gentle shaking. Infected cells are plated onto 2YTCG plates and incubated overnight at 30° C. Individual colonies were counted to determine input titer. Output titers were performed following 1 h infection of eluted phage into TG-1 cells. 1, 0.1, 0.01, and 0.001 μL of infected cells were plated onto 2YTCG platers and incubated overnight at 30° C. Individual colonies were counted to determine output titer.

[0680] Selective Target Binding of Bacterial Periplasmic Extracts:

[0681] For scFv PPE ELISAs, 96-well and/or 384-well streptavidin coated plates (Pierce) were coated with 2 μg/mL peptide-HLA complex in HLA buffer and incubated overnight at 4° C. Plates were washed three times between each step with PBST (PBS+0.05% Tween-20). The antigen coated plates were blocked with 3% BSA in PBS (blocking buffer) for 1 hour at room temperature. After washing, scFv PPEs were added to the plates and incubated at room temperature for 1 hour. Following washing, mouse anti-v5 antibody (Invitrogen) in blocking buffer was added to detect scFv and incubated at room temperature for 1 hour. After washing, HRP-goat anti-mouse antibody (Jackson ImmunoResearch) was added and incubated at room temperature for 1 hour. The plates were then washed three times with PBST and 3 times with PBS before HRP activity was detected with TMB 1-component Microwell Peroxidase Substrate (Seracare) and neutralized with 2N sulfuric acid.

[0682] For negative peptide-HLA complex counterscreening, the scFv PPE ELISAs were performed as described above, except for the coating antigen. Namely, the HLA mini-pools (see Tables 1 and 2) were used that consisted of 2 μg/mL of each of the three negative peptide-HLA complexes pooled and coated onto streptavidin plates for comparison binding to their particular pHLA complex. Alternatively, HLA complete pools consisted of 2 μg/mL of each of all 18 negative peptide-HLA complexes pooled together and coated onto streptavidin plates for comparison binding to their particular pHLA complex.

[0683] Construction and Production of scFv Protein Fragments:

[0684] The expression plasmid was transformed into BL21(DE3) strain and co-expressed with a periplasmid chaperone in a 400 mL E. coli culture. The cell pellet was reconstituted as follows: 10 mL/1 g biomass with (25 mM HEPES, pH7.4, 0.3M NaCl, 10 mM MgCl2, 10% glycerol, 0.75% CHAPS, 1 mM DTT) plus lysozyme, and benzonase and Lake Pharma protease inhibitor cocktail. The cell suspension was incubated on a shaking platform at RT for 30 minutes. Lysates were clarified by centrifugation at 4° C., 13,000×rpm for 15 min. The clarified lysate was loaded onto 5 mL of Ni NTA resin pre-equilibrated in IMAC Buffer A (20 mM Tris-HCl, Ph7.5; 300 mM NaCl/10% Glycerol/1 mM DTT). The resin was washed with 10 column volumes (CVs) of Buffer A (or until a stable baseline was reached), followed by 10 CVs of 8% IMAC Buffer B (20 mM Tris-HCl, Ph7.5; 300 mM NaCl/10% Glycerol/1 mM DTT/250 mM Imidazole). The target protein was eluted in a 20CV gradient to 100% IMAC Buffer B. The column was washed with 5CVs of 100% IMAC B to ensure complete protein removal. Elution fractions were analyzed by SDS-PAGE and Western blot (anti-His) and pooled accordingly. The pool was dialyzed with the final formulation buffer (20 mM Tris-HCl, Ph7.5; 300 mM NaCl/10% glycerol/1 mM DTT), concentrated to a final protein concentration >0.3 mg/mL, aliquoted into 1 mL vials, and flash frozen in liquid nitrogen. Final QC steps included SDS-PAGE and A280 absorbance measurements.

[0685] Construction and Production of Fab Protein Fragments:

[0686] The constructs of selected G5, G8 and G10 Fabs were cloned into a vector optimized for mammalian expression. Each DNA construct was scaled up for transfection and sequences were confirmed. A 100 mL transient production was completed in HEK293 cells (Tuna293™ Process) for each. The proteins were purified by anti-CH1 purification subsequently purified by size exclusion chromatography (SEC) via HiLoad 16/600 Superdex 200. The mobile phase used for SEC-polishing was 20 mM Tris, 50 mM NaCl, pH 7. Final confirmatory CE-SDS analysis was performed.

[0687] Construction and Production of IgG Proteins:

[0688] The expression constructs of the G series antibodies were cloned into a vector optimized for mammalian expression. Each DNA construct was scaled up for transfection and sequences were confirmed. A 10 mL transient production was completed in HEK293 cells (Tuna293™ Process) for each. The proteins were purified by Protein A purification and final CE-SDS analysis was performed.

### Example 4: Affinity of Fab Clones for the HLA-Peptide Target

[0689] Fab-formatted antibodies allow for accurate assessment of monomeric binding to their respective HLA-PEPTIDE targets, while avoiding confounding effects of bivalent interactions with the IgG antibody format. Binding affinity was assessed by bio-layer interferometry (BLI) using an Octet Qke (ForteBio). Briefly, biotinylated pHLA complexes in kinetics buffer were loaded onto streptavidin sensors for 300 seconds, at concentrations which gave the optimal nm shift response (approximately 0.6 nm) for each Fab at the highest concentration used. The ligand-loaded tips were subsequently equilibrated in the kinetics buffer for 120 seconds. The ligand-loaded biosensors were then dipped for 200 seconds in the Fab solution titrated into 2-fold dilutions. Starting Fab concentrations ranged from 100 nM to 2 μM, iteratively optimized based on the K_{D} values of the Fab. The dissociation step in the kinetics buffer was measured for 200 seconds. Data were analyzed using the ForteBio data analysis software using a 1:1 binding model.

[0690] Results are shown in Table 11, below. The Fab-formatted antibodies bind to their respective HLA-PEPTIDE targets with high affinity.

TABLE 11
Optimized Octet BLI affinity measurements of Fabs
binding to their target peptide-HLA complex

| Target | Fab clone | KD (M) | Kon (1/Ms) | Kdis (1/s) | Full R\hat{ }2 |
|---|---|---|---|---|---|
| G5 | G5-P7A05 | 1.19E−07 | 4.10E+05 | 4.87E−02 | 0.997 |
| G5 | G5-P7B3 | 2.54E−07 | 4.42E+05 | 9.09E−02 | 0.993 |
| G5 | G5-P7E7 | 2.82E−08 | 9.02E+05 | 2.48E−02 | 0.991 |
| G5 | G5-P7F6 | 3.37E−08 | 9.15E+05 | 3.06E−02 | 0.995 |
| G8 | R3G8-P2C10 | 1.77E−08 | 7.50E+04 | 1.30E−03 | 0.997 |
| G8 | R3G8-P1C11 | 1.78E−07 | 1.90E+05 | 3.38E−02 | 0.997 |
| G8 | R3G8-P2E04 | 2.86E−07 | 5.45E+05 | 7.89E−02 | 0.842 |
| G10 | R3G10-P1B07 | 3.75E−08 | 1.65E+05 | 6.15E−03 | 0.997 |
| G10 | R3G10-P4E07 | 4.28E−07 | 4.77E+05 | 1.11E−01 | 0.990 |

[0691] FIGS. 12A, 12B, and 12C depicts BLI results for Fab clone G5-P7A05 to HLA-PEPTIDE target B*35:01-EVDPIGHVY (12A), Fab clones R3G8-P2C10 and G8-P1C11 to HLA-PEPTIDE target A*02:01-AIFPGAVPAA (12B, P2C10 on left and P1C11 on right), and Fab clone R3G10-P1B07 to HLA-PEPTIDE target A*01:01-ASSLPTTMNY (12C), respectively.

### Example 5: Positional Scanning of G5, G8, and G10 Restricted Peptide Sequences

[0692] Positional scanning of the G5, G8, and G10 restricted peptides was carried out to determine the amino acid residues which act as contact points for selected Fab clones or critical residues that impact, directly or indirectly, the interaction of the HLA-PEPTIDE target with the Fab.

[0693] FIG. 13 depicts a general experimental design for the positional scanning experiments. Positional scanning libraries of variant G5, G8, and G10 restricted peptides were generated with amino acid substitutions at a single position in the G5, G8, and G10 peptide sequence, scanning across all positions. The amino acid substitutions at a given position were either alanine (conservative substitution), arginine (positively charged), or aspartate (negatively charged). Peptide-HLA complexes comprising the positional scanning library members and the HLA subtype allele were generated as described in Example 3. Stability of the resulting complexes was determined using conditional ligand peptide exchange and stability ELISA as described in Example 3. Such stability analysis may identify residues on the restricted peptide which are important for binding and stabilizing the HLA molecule. Binding affinity of the selected Fab clone to the variant peptide-HLA complexes was assessed by BLI as described in Example 4. Positional variants that result in stable HLA complex formation and weakened Fab binding may identify residues that are important contact points for antibodies which selectively bind the HLA-PEPTIDE target.

[0694] FIG. 14A depicts stability results for the G5 positional variant-HLAs, indicating that the majority of peptide mutations does not impact binding of those peptides to the relevant pHLA.

[0695] FIG. 14B depicts binding affinity of Fab clone G5-P7A05 to the G5 positional variant-HLAs, indicating positions P2-P8 of the restricted peptide as likely involved, directly or indirectly, in determining the interaction of the peptide-HLA complex with the Fab clone.

[0696] FIG. 15A depicts stability results for the G8 positional variant-HLAs, indicating that positions P2, P7 and P10 were not amenable to substitution with the Arg- or Asp-residue and therefore are likely to be important for the peptide to bind the HLA protein.

[0697] FIG. 15B depicts binding affinity of Fab clone G8-P2C10 to the G8 positional variant-HLAs, indicating positions P1-P5 of the restricted peptide as likely involved, directly or indirectly, in determining the interaction of the peptide-HLA complex with the Fab clone.

[0698] FIG. 46 depicts binding affinity of Fab clone G8-P1C11 to the G8 positional variant-HLAs, indicating positions P3-P6 of the restricted peptide as likely involved, directly or indirectly, in determining the interaction of the peptide-HLA complex with the Fab clone.

[0699] FIG. 16A depicts stability results for the G10 positional variant-HLAs, indicating that positions 2, 5, 8, and 10 were not amenable to amino acid substitution and therefore are likely to be important for the peptide to bind the HLA protein.

[0700] FIG. 16B depicts binding affinity of Fab clone G10-P1B07 to the G10 positional variant-HLAs, indicating positions P4, P6, and P7 of the restricted peptide as likely involved, directly or indirectly, in determining the interaction of the peptide-HLA complex with the Fab clone.

### Example 6: Antibodies Bind Cells Presenting HLA-PEPTIDE Target Antigens

[0701] To verify that the identified TCR-like antibodies bind their pHLA target G5, G8 and G10 in their natural context, e.g., on the surface of antigen-presenting cells, selected clones were reformatted to IgG and used in binding experiments with K562 cells expressing the cognate HLA-PEPTIDE target. Briefly, cells were transduced with either HLA-B*35:01 for the G5 target peptide, HLA-A*02:01 for the G8 target peptide, or HLA-A*01:01 for the G10 target peptide. The cells were then exogenously pulsed with target or negative control peptide as specified in Tables 1 and 2, using established methods to generate the relevant pHLA complexes on the cell surface.

[0702] Four representative examples of antibody binding to either G5-, G8- or G10-presenting K562 cells, as detected by flow cytometry, are shown in FIGS. 17A, 17B, and 17C. Antibody binding was observed in a dose-dependent manner that was selective for the relevant target peptides.

[0703] In another flow cytometry experiment, HLA-transduced K562 cells were pulsed with 50 μM of target or control peptides as listed in Table 1 for G5 and in Table 2 for G8 and G10, and pHLA-specific antibodies were detected by flow cytometry. HLA-transduced K562 cells were pulsed with 50 μM of target or negative control peptides and antibody binding histograms were plotted for G5-P7A05 at 20 μg/mL, G8-2C10 at 30 μg/mL, G10-P1B07 at 30 μg/mL, and G8-P1C11 at 30 μg/mL. Histograms are depicted in FIG. 18 and FIG. 47.

[0704] Materials and Methods

[0705] K562 Cell Line Generation

[0706] The Phoenix-AMPHO cells (ATCC®, CRL-3213™) were cultured in DMEM (Corning™, 17-205-CV) supplemented with 10% FBS (Seradigm, 97068-091) and Glutamax (Gibco™, 35050079). K-562 cells (ATCC®, CRL-243™) were cultured in IMDM (Gibco™, 31980097) supplemented with 10% FBS. Lipofectamine LTX PLUS (Fisher Scientific, 15338100) contains a Lipofectamine reagent and a PLUS reagent. Opti-MEM (Gibco™, 31985062) was purchased from Fisher Scientific.

[0707] Phoenix cells were plated at 5×10⁵ cells/well in a 6 well plate and incubated overnight at 37° C. For the transfection, 10 μg plasmid, 104, Plus reagent and 100 μL Opti-MEM were incubated at room temperature for 15 minutes. Simultaneously, 8 μL Lipofectamine was incubated with 92 μL Opti-MEM at room temperature for 15 minutes. These two reactions were combined and incubated again for 15 minutes at room temperature after which 800 μL Opti-MEM was added. The culture media was aspirated from the Phoenix cells and they were washed with 5 mL pre-warmed Opti-MEM. The Opti-MEM was aspirated from the cells and the lipofectamine mixture was added. The cells were incubated for 3 hours at 37° C. and 3 mL complete culture medium was added. The plate was then incubated overnight at 37° C. The media was replaced with Phoenix culture medium and the plate incubated an additional 2 days at 37° C.

[0708] The media was collected and filtered through a 45 μm filter into a clean 6 well dish. 20 μL Plus reagent was added to each virus suspension and incubated at room temperature for 15 minutes followed by the addition of 8 μL/well of Lipofectamine and another 15 min room temperature incubation. K562 cells were counted and resuspended to 5E6 cells/mL and 100 μL added to each virus suspension. The 6 well plate was centrifuged at 700 g for 30 minutes and then incubated at 37° C. for 5-6 hours. The cells and virus suspension were then transferred to a T25 flask and 7 mL K562 culture medium was added. The cells were then incubated for three days. The transduced K562 cells were then cultured in medium supplemented with 0.6 μg/mL Puromycin (Invivogen, ant-pr-1) and selection monitored by flow cytometry.

[0709] Flow Cytometry Methods:

[0710] HLA-transduced K562 cells were pulsed the night before with 50 μM of peptide (Genscript) in IDMEM containing 1% FBS in 6 well plates and incubated under standard tissue culture conditions. Cells were harvested, washed in PBS, and stained with eBioscience Fixable Viability Dye eFluor 450 for 15 minutes at room temperature. Following another wash in PBS+2% FBS, cells were resuspended with IgGs at varying concentrations. Cells were incubated with antibodies for 1 hour at 4° C. After another wash, PE-conjugated goat anti-human IgG secondary antibody (Jackson ImmunoResearch) was added at 1:100 for 30 minutes at 4° C. After washing in PBS+2% FBS, cells were resuspended in PBS+2% FBS and analyzed by flow cytometry. Flow cytometric analysis was performed on the Attune NxT Flow Cytometer (ThermoFisher) using the Attune NxT Software. Data was analyzed using FlowJo.

### Example 7: Antibodies Bind to Tumor Cell Lines that Express the Target Gene and HLA Subtype

[0711] Tumor cell lines were chosen based on expression of the HLA subtype and target gene of interest, as assessed by a publicly available database (TRON http://celllines.tron-mainz.de). The selection of the tumor cell line for cell binding assays is shown in Table 12 below.

TABLE 12
selection of tumor cell lines for cell binding assay

| Cell line | Target expression | HLA type |
|---|---|---|
| LN229 (G5) | MAGEA6 (137.6 RPKM) | B*35:01; B*35:01 |
| | | (26.53 RPKM) |
| BV173 (G8) | FOXE1 (18.1 RPKM) | A*30:01; A*02:01 |
| | | (142.25 RPKM) |
| Colo829 (G10) | MAGEA3 (119.3 RPKM) | A*01:01; A*0101 |
| | MAGEA6 (215.4 RPKM) | (143.7 RPKM) |

[0712] The LN229, BV173, and Colo829 tumor cell lines were propagated under standard tissue culture conditions. Flow cytometry was performed as described in Example 6. Cells were incubated with 30 μg/mL or 0 μg/mL antibody followed by PE conjugated anti-human secondary IgG.

[0713] Results are depicted in FIG. 19. Panel A shows a histogram plot for G5-P7A05 binding to glioblastoma line LN229. Panel B shows a histogram plot for G8-P2C10 binding to leukemia line BV173. Panel C shows a histogram plot for G10-P1B07 binding to CRC line Colo829.

### Example 8: Identification of TCRs that Bind HLA-Peptide Target HLA-A*01:01 ASSLPTTMNY or HLA-Peptide Target HLA-A*01:01_HSEVGLPVY

[0714] Peripheral blood mononuclear cells (PBMCs) were obtained by processing leukapheresis samples from healthy donors. Frozen PBMCs were thawed and incubated with cocktail of biotinylated CD45RO, CD14, CD15, CD16, CD19, CD25, CD34, CD36, CD57, CD123, anti-HLA-DR, CD235a (Glycophorin A), CD244, and CD4 antibodies and were subsequently magnetically labeled with anti-biotin microbeads for removal from PBMC population. Enriched naïve CD8 T cells were labelled with tetramers comprising target peptide and appropriate MHC molecule, stained with live/dead and lineage markers and sorted by flow cytometry cell sorter. Following polyclonal expansion, one of two paths may be taken. If a large fraction of population is specific for the HLA-PEPTIDE target, the T cell population may be sequenced as a whole. Alternatively, the cells harboring TCRs specific for the HLA-PEPTIDE target may be resorted, and only cells isolated after resort are sequenced using 10× Genomics single cell resolution paired immune TCR profiling approach. Here, cells harboring TCRs specific for the HLA-PEPTIDE target HLA-A*01:01_ASSLPTTMNY were resorted and sequenced as described above. Specifically, two-to-eight thousand live T cells were partitioned into single cell emulsions for subsequent single cell cDNA generation and full-length TCR profiling (5′ UTR through constant region—ensuring alpha and beta pairing). This approach utilized a molecularly barcoded template switching oligo at the 5′ end of the transcript. An alternative approach utilizes a molecularly barcoded constant region oligo at the 3′ end. Another alternative approach couples an RNA polymerase promoter to either the 5′ or 3′ end of a TCR. All of these approaches enable the identification and deconvolution of alpha and beta TCR pairs at the single-cell level. The resulting barcoded cDNA transcripts underwent an optimized enzymatic and library construction workflow to reduce bias and ensure accurate representation of clonotypes within the pool of cells. Libraries were sequenced on Illumina's MiSeq or HiSeq4000 instruments (paired-end 150 cycles) for a target sequencing depth of about five to fifty thousand reads per cell.

[0715] Sequencing reads were processed through the 10× provided software Cell Ranger. Sequencing reads are tagged with a Chromium cellular barcodes and UMIs, which are used to assemble the V(D)J transcripts cell by cell. The assembled contigs for each cell were then annotated by mapping the assembled contigs to the Ensemble v87 V(D)J reference sequences. Clonotypes were defined as alpha, beta chain pairs of unique CDR3 amino acid sequences. Clonotypes were filtered for single alpha and single beta chain pairs present at frequency above 2 cells to yield the final list of clonotypes per target peptide in a specific donor.

[0716] Two different donors were analyzed over 6 experiments for ASSLPTTMNY and 2 experiments for HSEVGLPVY targets. FIGS. 20A and 20B show the number of target-specific T cells isolated per experiment and number of target-specific unique clonotypes identified per experiment, respectively. Each color represent data from one experiment.

[0717] Table 13 depicts the cumulative number of T cells and unique TCRs identified across all experiments and average number of target-specific T cells per 3 million of naïve CD8 T cells.

TABLE 13
cumulative data from TCR identification experiment

| | | | | Average | |
|---|---|---|---|---|---|
| | | | Cumulative | frequency | Cumulative |
| | | | number of | per 3E6 | number of |
| | | HLA | isolated | naïve CD8 | identified |
| Target sequence | Gene | restriction | cells | T cells | clonotypes |
| ASSLPTTMNY | MAGE | A*01:01 | 3516 | 464 | 550 |
| | A3/6 | | | | |
| HSEVGLPVY | DCAF12L1 | A*01:01 | 1762 | 539 | 142 |

[0718] Annotated sequences of the identified TCR clonotypes specific for HLA-PEPTIDE A*01:01_ASSLPTTMNY are shown in Table 14, below. For clarity, each identified TCR was assigned a TCR ID number. For example the TCR assigned TCR ID #1 comprises a TRAV25 sequence, a TRAJ37 sequence, a TRAC sequence, a TRBV19 sequence, a TRBD1 sequence, a TRBJ1-5 sequence, and a TRBC1 sequence.

TABLE 14
Annotated Sequences for TCRs binding HLA-PEPTIDE A*01:01_ASSLPTTMNY

| TCR ID# | TRAV | TRAJ | TRAC | TRBV | TRBD | TRBJ | TRBC |
|---|---|---|---|---|---|---|---|
| 1 | TRAV25 | TRAJ37 | TRAC | TRBV19 | TRBD1 | TRBJ1-5 | TRBC1 |
| 2 | TRAV30 | TRAJ48 | TRAC | TRBV19 | TRBD2 | TRBJ2-3 | TRBC2 |
| 3 | TRAV30 | TRAJ48 | TRAC | TRBV19 | None | TRBJ1-2 | TRBC1 |
| 4 | TRAV30 | TRAJ48 | TRAC | TRBV19 | TRBD1 | TRBJ1-2 | TRBC1 |
| 5 | TRAV30 | TRAJ48 | TRAC | TRBV19 | None | TRBJ2-7 | TRBC2 |
| 6 | TRAV30 | TRAJ48 | TRAC | TRBV19 | TRBD1 | TRBJ2-7 | TRBC2 |
| 7 | TRAV12-3 | TRAJ45 | TRAC | TRBV19 | TRBD2 | TRBJ2-7 | TRBC2 |
| 8 | TRAV12-3 | TRAJ45 | TRAC | TRBV19 | TRBD1 | TRBJ1-2 | TRBC1 |
| 9 | TRAV12-3 | TRAJ45 | TRAC | TRBV19 | TRBD1 | TRBJ2-7 | TRBC1 |
| 10 | TRAV14DV4 | TRAJ45 | TRAC | TRBV19 | TRBD2 | TRBJ2-1 | TRBC2 |
| 11 | TRAV14DV4 | TRAJ45 | TRAC | TRBV19 | TRBD2 | TRBJ2-3 | TRBC1 |
| 12 | TRAV25 | TRAJ30 | TRAC | TRBV14 | TRBD2 | TRBJ2-1 | TRBC2 |
| 13 | TRAV25 | TRAJ30 | TRAC | TRBV4-2 | TRBD1 | TRBJ2-7 | TRBC2 |
| 14 | TRAV25 | TRAJ30 | TRAC | TRBV19 | TRBD1 | TRBJ1-5 | TRBC1 |
| 15 | TRAV25 | TRAJ30 | TRAC | TRBV19 | TRBD2 | TRBJ2-1 | TRBC2 |
| 16 | TRAV13-1 | TRAJ30 | TRAC | TRBV19 | None | TRBJ1-5 | TRBC1 |
| 17 | TRAV19 | TRAJ30 | TRAC | TRBV19 | None | TRBJ2-7 | TRBC2 |
| 18 | TRAV19 | TRAJ30 | None | TRBV19 | None | TRBJ2-7 | TRBC2 |
| 19 | TRAV35 | TRAJ54 | TRAC | TRBV19 | TRBD1 | TRBJ2-7 | TRBC2 |
| 20 | TRAV35 | TRAJ54 | TRAC | TRBV19 | TRBD2 | TRBJ2-3 | TRBC2 |
| 21 | TRAV35 | TRAJ54 | TRAC | TRBV19 | TRBD1 | TRBJ1-2 | TRBC1 |
| 22 | TRAV1-2 | TRAJ13 | TRAC | TRBV19 | TRBD2 | TRBJ2-3 | TRBC2 |
| 23 | TRAV1-2 | TRAJ13 | TRAC | TRBV19 | TRBD1 | TRBJ1-2 | TRBC1 |
| 24 | TRAV1-2 | TRAJ13 | TRAC | TRBV4-2 | TRBD1 | TRBJ2-7 | TRBC2 |
| 25 | TRAV1-2 | TRAJ13 | TRAC | TRBV19 | None | TRBJ1-2 | TRBC1 |
| 26 | TRAV12-3 | TRAJ54 | TRAC | TRBV19 | None | TRBJ1-1 | TRBC1 |
| 27 | TRAV1-2 | TRAJ20 | TRAC | TRBV19 | TRBD2 | TRBJ2-3 | TRBC2 |
| 28 | TRAV27 | TRAJ32 | TRAC | TRBV19 | TRBD1 | TRBJ1-2 | TRBC1 |
| 29 | TRAV35 | TRAJ31 | TRAC | TRBV18 | None | TRBJ1-1 | TRBC1 |
| 30 | TRAV1-2 | TRAJ20 | TRAC | TRBV4-2 | TRBD1 | TRBJ2-7 | TRBC2 |
| 31 | TRAV27 | TRAJ32 | TRAC | TRBV19 | TRBD1 | TRBJ1-2 | TRBC1 |
| 32 | TRAV17 | TRAJ41 | TRAC | TRBV7-9 | TRBD2 | TRBJ2-2 | TRBC2 |
| 33 | TRAV1-2 | TRAJ20 | TRAC | TRBV19 | None | TRBJ1-2 | TRBC1 |
| 34 | TRAV1-2 | TRAJ20 | TRAC | TRBV19 | TRBD1 | TRBJ2-7 | TRBC2 |
| 35 | TRAV25 | TRAJ47 | TRAC | TRBV19 | TRBD1 | TRBJ1-1 | TRBC1 |
| 36 | TRAV27 | TRAJ32 | TRAC | TRBV19 | TRBD2 | TRBJ2-3 | TRBC2 |
| 37 | TRAV1-2 | TRAJ20 | TRAC | TRBV19 | TRBD1 | TRBJ1-2 | TRBC1 |
| 38 | TRAV25 | TRAJ39 | TRAC | TRBV19 | TRBD2 | TRBJ2-1 | TRBC2 |
| 39 | TRAV30 | TRAJ20 | TRAC | TRBV19 | TRBD1 | TRBJ1-1 | TRBC1 |
| 40 | TRAV30 | TRAJ20 | TRAC | TRBV19 | None | TRBJ1-2 | TRBC1 |
| 41 | TRAV30 | TRAJ20 | TRAC | TRBV4-2 | TRBD1 | TRBJ2-7 | TRBC2 |
| 42 | TRAV30 | TRAJ47 | TRAC | TRBV19 | None | TRBJ1-2 | TRBC1 |
| 43 | TRAV26-1 | TRAJ52 | TRAC | TRBV19 | TRBD1 | TRBJ2-7 | TRBC1 |
| 44 | TRAV17 | TRAJ31 | TRAC | TRBV19 | None | TRBJ2-7 | TRBC2 |
| 45 | TRAV27 | TRAJ33 | TRAC | TRBV19 | TRBD1 | TRBJ1-2 | TRBC1 |
| 46 | TRAV26-1 | TRAJ52 | TRAC | TRBV4-2 | TRBD1 | TRBJ2-7 | TRBC2 |
| 47 | TRAV17 | TRAJ31 | TRAC | TRBV19 | None | TRBJ1-2 | TRBC1 |
| 48 | TRAV27 | TRAJ33 | TRAC | TRBV19 | TRBD1 | TRBJ2-7 | TRBC2 |
| 49 | TRAV30 | TRAJ47 | TRAC | TRBV4-2 | TRBD1 | TRBJ2-7 | TRBC2 |
| 50 | TRAV30 | TRAJ47 | TRAC | TRBV19 | TRBD2 | TRBJ2-3 | TRBC2 |
| 51 | TRAV26-1 | TRAJ52 | TRAC | TRBV19 | TRBD2 | TRBJ2-3 | TRBC2 |
| 52 | TRAV30 | TRAJ47 | TRAC | TRBV19 | TRBD1 | TRBJ1-2 | TRBC1 |
| 53 | TRAV13-1 | TRAJ11 | TRAC | TRBV19 | None | TRBJ2-7 | TRBC2 |
| 54 | TRAV13-1 | TRAJ47 | TRAC | TRBV19 | TRBD1 | TRBJ2-1 | TRBC2 |
| 55 | TRAV13-1 | TRAJ15 | TRAC | TRBV19 | None | TRBJ2-7 | TRBC1 |
| 56 | TRAV17 | TRAJ47 | TRAC | TRBV19 | None | TRBJ1-6 | TRBC1 |
| 57 | TRAV17 | TRAJ39 | TRAC | TRBV19 | None | TRBJ2-7 | TRBC1 |
| 58 | TRAV9-2 | TRAJ57 | TRAC | TRBV19 | TRBD1 | TRBJ2-7 | TRBC1 |
| 59 | TRAV13-1 | TRAJ41 | TRAC | TRBV19 | TRBD1 | TRBJ1-2 | TRBC1 |
| 60 | TRAV24 | TRAJ4 | TRAC | TRBV19 | TRBD2 | TRBJ1-1 | TRBC1 |
| 61 | TRAV12-1 | TRAJ29 | TRAC | TRBV27 | TRBD2 | TRBJ2-7 | TRBC2 |
| 62 | TRAV13-1 | TRAJ40 | TRAC | TRBV19 | TRBD2 | TRBJ1-5 | TRBC1 |
| 63 | TRAV17 | TRAJ7 | TRAC | TRBV19 | None | TRBJ2-7 | TRBC2 |
| 64 | TRAV17 | TRAJ47 | TRAC | TRBV19 | TRBD2 | TRBJ2-3 | TRBC2 |
| 65 | TRAV17 | TRAJ58 | TRAC | TRBV19 | TRBD1 | TRBJ1-2 | TRBC1 |
| 66 | TRAV12-3 | TRAJ26 | TRAC | TRBV19 | TRBD1 | TRBJ2-1 | TRBC2 |
| 67 | TRAV17 | TRAJ58 | TRAC | TRBV19 | TRBD2 | TRBJ2-3 | TRBC2 |
| 68 | TRAV17 | TRAJ58 | TRAC | TRBV19 | None | TRBJ1-2 | TRBC1 |
| 69 | TRAV17 | TRAJ58 | TRAC | TRBV19 | TRBD1 | TRBJ1-2 | TRBC1 |
| 70 | TRAV17 | TRAJ58 | TRAC | TRBV4-2 | TRBD1 | TRBJ2-7 | TRBC2 |
| 71 | TRAV17 | TRAJ58 | TRAC | TRBV19 | None | TRBJ2-7 | TRBC2 |
| 72 | TRAV17 | TRAJ23 | TRAC | TRBV19 | TRBD1 | TRBJ2-7 | TRBC2 |
| 73 | TRAV17 | TRAJ58 | TRAC | TRBV19 | TRBD1 | TRBJ1-1 | TRBC1 |
| 74 | TRAV17 | TRAJ58 | TRAC | TRBV19 | TRBD2 | TRBJ2-7 | TRBC2 |
| 75 | TRAV17 | TRAJ58 | TRAC | TRBV7-9 | TRBD2 | TRBJ2-2 | TRBC2 |
| 76 | TRAV17 | TRAJ58 | TRAC | TRBV19 | TRBD1 | TRBJ2-7 | TRBC2 |
| 77 | TRAV17 | TRAJ58 | TRAC | TRBV19 | None | TRBJ1-5 | TRBC1 |
| 78 | TRAV17 | TRAJ58 | TRAC | TRBV19 | TRBD1 | TRBJ1-2 | TRBC1 |
| 79 | TRAV17 | TRAJ58 | TRAC | TRBV19 | TRBD1 | TRBJ2-1 | TRBC2 |
| 80 | TRAV3 | TRAJ32 | TRAC | TRBV19 | None | TRBJ1-1 | TRBC1 |
| 81 | TRAV19 | TRAJ31 | TRAC | TRBV19 | None | TRBJ2-2 | TRBC1 |
| 82 | TRAV21 | TRAJ18 | TRAC | TRBV19 | None | TRBJ2-7 | TRBC2 |
| 83 | TRAV19 | TRAJ31 | TRAC | TRBV19 | TRBD2 | TRBJ2-3 | TRBC2 |
| 84 | TRAV19 | TRAJ31 | TRAC | TRBV19 | TRBD1 | TRBJ1-2 | TRBC1 |
| 85 | TRAV3 | TRAJ32 | TRAC | TRBV19 | TRBD1 | TRBJ1-2 | TRBC1 |
| 86 | TRAV19 | TRAJ31 | TRAC | TRBV19 | None | TRBJ1-2 | TRBC1 |
| 87 | TRAV3 | TRAJ32 | TRAC | TRBV19 | None | TRBJ1-2 | TRBC1 |
| 88 | TRAV3 | TRAJ32 | TRAC | TRBV19 | TRBD1 | TRBJ2-7 | TRBC2 |
| 89 | TRAV35 | TRAJ54 | TRAC | TRBV18 | None | TRBJ1-1 | TRBC1 |
| 90 | TRAV19 | TRAJ26 | TRAC | TRBV19 | TRBD2 | TRBJ2-2 | TRBC2 |
| 91 | TRAV3 | TRAJ7 | TRAC | TRBV19 | TRBD2 | TRBJ2-7 | TRBC2 |
| 92 | TRAV8-4 | TRAJ32 | TRAC | TRBV19 | TRBD1 | TRBJ2-7 | TRBC2 |
| 93 | TRAV24 | TRAJ18 | TRAC | TRBV4-2 | TRBD1 | TRBJ2-7 | TRBC2 |
| 94 | TRAV19 | TRAJ39 | TRAC | TRBV9 | TRBD1 | TRBJ1-1 | TRBC1 |
| 95 | TRAV24 | TRAJ18 | TRAC | TRBV19 | TRBD2 | TRBJ1-1 | TRBC1 |
| 96 | TRAV19 | TRAJ21 | TRAC | TRBV19 | TRBD2 | TRBJ2-3 | TRBC2 |
| 97 | TRAV24 | TRAJ18 | TRAC | TRBV19 | None | TRBJ1-2 | TRBC1 |
| 98 | TRAV14DV4 | TRAJ9 | TRAC | TRBV19 | TRBD1 | TRBJ2-7 | TRBC2 |
| 99 | TRAV24 | TRAJ18 | TRAC | TRBV14 | TRBD2 | TRBJ2-1 | TRBC2 |
| 100 | TRAV14DV4 | TRAJ23 | TRAC | TRBV19 | None | TRBJ2-2 | TRBC2 |
| 101 | TRAV29DV5 | TRAJ29 | TRAC | TRBV19 | TRBD1 | TRBJ1-5 | TRBC1 |
| 102 | TRAV29DV5 | TRAJ32 | TRAC | TRBV14 | TRBD2 | TRBJ2-1 | TRBC2 |
| 103 | TRAV19 | TRAJ32 | TRAC | TRBV19 | TRBD2 | TRBJ2-3 | TRBC2 |
| 104 | TRAV19 | TRAJ32 | TRAC | TRBV19 | None | TRBJ1-2 | TRBC1 |
| 105 | TRAV19 | TRAJ32 | TRAC | TRBV19 | TRBD1 | TRBJ1-2 | TRBC1 |
| 106 | TRAV19 | TRAJ32 | TRAC | TRBV19 | TRBD1 | TRBJ1-2 | TRBC1 |
| 107 | TRAV19 | TRAJ32 | TRAC | TRBV19 | TRBD1 | TRBJ2-7 | TRBC2 |
| 108 | TRAV6 | TRAJ40 | TRAC | TRBV19 | None | TRBJ2-7 | TRBC2 |
| 109 | TRAV12-1 | TRAJ50 | TRAC | TRBV19 | TRBD2 | TRBJ2-7 | TRBC2 |
| 110 | TRAV30 | TRAJ37 | TRAC | TRBV19 | TRBD2 | TRBJ2-7 | TRBC2 |
| 111 | TRAV30 | TRAJ37 | TRAC | TRBV19 | TRBD2 | TRBJ2-7 | TRBC2 |
| 112 | TRAV13-1 | TRAJ48 | TRAC | TRBV19 | TRBD2 | TRBJ2-7 | TRBC2 |
| 113 | TRAV13-1 | TRAJ48 | TRAC | TRBV19 | None | TRBJ2-7 | TRBC2 |
| 114 | TRAV13-1 | TRAJ48 | TRAC | TRBV19 | None | TRBJ2-7 | TRBC2 |
| 115 | TRAV19 | TRAJ30 | TRAC | TRBV19 | TRBD2 | TRBJ2-7 | TRBC2 |
| 116 | TRAV19 | TRAJ30 | TRAC | TRBV19 | None | TRBJ2-7 | TRBC2 |
| 117 | TRAV19 | TRAJ30 | TRAC | TRBV19 | TRBD2 | TRBJ2-7 | TRBC2 |
| 118 | TRAV19 | TRAJ30 | TRAC | TRBV19 | None | TRBJ2-7 | TRBC2 |
| 119 | TRAV19 | TRAJ30 | TRAC | TRBV19 | TRBD1 | TRBJ2-1 | TRBC2 |
| 120 | TRAV19 | TRAJ30 | TRAC | TRBV19 | None | TRBJ2-7 | TRBC2 |
| 121 | TRAV19 | TRAJ30 | TRAC | TRBV19 | None | TRBJ2-1 | TRBC2 |
| 122 | TRAV19 | TRAJ30 | TRAC | TRBV4-2 | TRBD1 | TRBJ2-7 | TRBC2 |
| 123 | TRAV19 | TRAJ30 | TRAC | TRBV19 | None | TRBJ2-7 | TRBC2 |
| 124 | TRAV19 | TRAJ30 | TRAC | TRBV4-2 | TRBD1 | TRBJ2-7 | TRBC2 |
| 125 | TRAV19 | TRAJ30 | TRAC | TRBV19 | None | TRBJ2-7 | TRBC2 |
| 126 | TRAV19 | TRAJ30 | TRAC | TRBV19 | TRBD1 | TRBJ2-7 | TRBC2 |
| 127 | TRAV9-2 | TRAJ54 | TRAC | TRBV19 | TRBD2 | TRBJ2-7 | TRBC2 |
| 128 | TRAV39 | TRAJ40 | TRAC | TRBV19 | TRBD1 | TRBJ2-7 | TRBC2 |
| 129 | TRAV25 | TRAJ4 | TRAC | TRBV19 | TRBD1 | TRBJ2-7 | TRBC2 |
| 130 | TRAV25 | TRAJ4 | TRAC | TRBV19 | TRBD2 | TRBJ2-7 | TRBC2 |
| 131 | TRAV38-2DV8 | TRAJ54 | TRAC | TRBV19 | TRBD2 | TRBJ2-7 | TRBC2 |
| 132 | TRAV38-2DV8 | TRAJ54 | TRAC | TRBV19 | TRBD1 | TRBJ2-7 | TRBC2 |
| 133 | TRAV17 | TRAJ23 | TRAC | TRBV19 | None | TRBJ2-7 | TRBC2 |
| 134 | TRAV17 | TRAJ23 | TRAC | TRBV19 | TRBD2 | TRBJ2-7 | TRBC2 |
| 135 | TRAV35 | TRAJ23 | TRAC | TRBV19 | TRBD2 | TRBJ2-7 | TRBC2 |
| 136 | TRAV35 | TRAJ23 | TRAC | TRBV19 | TRBD2 | TRBJ2-7 | TRBC2 |
| 137 | TRAV21 | TRAJ17 | TRAC | TRBV19 | TRBD2 | TRBJ2-7 | TRBC2 |
| 138 | TRAV17 | TRAJ47 | TRAC | TRBV19 | None | TRBJ2-7 | TRBC2 |
| 139 | TRAV17 | TRAJ47 | TRAC | TRBV19 | TRBD2 | TRBJ2-7 | TRBC2 |
| 140 | TRAV17 | TRAJ23 | TRAC | TRBV19 | TRBD2 | TRBJ2-7 | TRBC2 |
| 141 | TRAV17 | TRAJ23 | TRAC | TRBV19 | None | TRBJ2-7 | TRBC2 |
| 142 | TRAV21 | TRAJ17 | TRAC | TRBV4-2 | TRBD1 | TRBJ2-7 | TRBC2 |
| 143 | TRAV21 | TRAJ17 | TRAC | TRBV19 | None | TRBJ2-7 | TRBC2 |
| 144 | TRAV8-3 | TRAJ24 | TRAC | TRBV19 | None | TRBJ2-7 | TRBC2 |
| 145 | TRAV21 | TRAJ17 | TRAC | TRBV19 | TRBD1 | TRBJ1-1 | TRBC1 |
| 146 | TRAV5 | TRAJ26 | TRAC | TRBV19 | TRBD1 | TRBJ1-2 | TRBC1 |
| 147 | TRAV5 | TRAJ26 | TRAC | TRBV19 | TRBD2 | TRBJ2-7 | TRBC2 |
| 148 | TRAV12-2 | TRAJ42 | TRAC | TRBV19 | TRBD2 | TRBJ2-7 | TRBC2 |
| 149 | TRAV12-2 | TRAJ42 | TRAC | TRBV19 | TRBD1 | TRBJ1-1 | TRBC1 |
| 150 | TRAV8-3 | TRAJ34 | TRAC | TRBV19 | None | TRBJ2-7 | TRBC2 |
| 151 | TRAV8-3 | TRAJ34 | TRAC | TRBV19 | TRBD2 | TRBJ2-7 | TRBC2 |
| 152 | TRAV12-2 | TRAJ42 | TRAC | TRBV19 | None | TRBJ2-7 | TRBC2 |
| 153 | TRAV3 | TRAJ4 | TRAC | TRBV19 | TRBD2 | TRBJ2-7 | TRBC2 |
| 154 | TRAV3 | TRAJ4 | TRAC | TRBV19 | None | TRBJ1-5 | TRBC1 |
| 155 | TRAV19 | TRAJ34 | TRAC | TRBV19 | TRBD2 | TRBJ2-7 | TRBC1 |
| 156 | TRAV19 | TRAJ34 | TRAC | TRBV19 | TRBD1 | TRBJ2-1 | TRBC2 |
| 157 | TRAV38-1 | TRAJ39 | TRAC | TRBV19 | None | TRBJ2-7 | TRBC2 |
| 158 | TRAV10 | TRAJ18 | TRAC | TRBV19 | TRBD2 | TRBJ2-7 | TRBC2 |
| 159 | TRAV24 | TRAJ18 | TRAC | TRBV4-2 | TRBD1 | TRBJ2-7 | TRBC2 |
| 160 | TRAV19 | TRAJ4 | TRAC | TRBV19 | TRBD1 | TRBJ2-7 | TRBC2 |
| 161 | TRAV19 | TRAJ4 | TRAC | TRBV19 | TRBD2 | TRBJ2-7 | TRBC2 |
| 162 | TRAV19 | TRAJ17 | TRAC | TRBV19 | TRBD2 | TRBJ2-7 | TRBC2 |
| 163 | TRAV19 | TRAJ52 | TRAC | TRBV19 | None | TRBJ2-1 | TRBC2 |
| 164 | TRAV19 | TRAJ52 | TRAC | TRBV19 | TRBD2 | TRBJ2-7 | TRBC2 |
| 165 | TRAV38-2DV8 | TRAJ52 | TRAC | TRBV19 | TRBD2 | TRBJ2-7 | TRBC2 |
| 166 | TRAV6 | TRAJ15 | TRAC | TRBV19 | TRBD2 | TRBJ2-7 | TRBC2 |
| 167 | TRAV21 | TRAJ32 | TRAC | TRBV19 | TRBD1 | TRBJ1-5 | TRBC1 |
| 168 | TRAV19 | TRAJ37 | TRAC | TRBV5-6 | TRBD1 | TRBJ1-4 | TRBC1 |
| 169 | TRAV19 | TRAJ27 | TRAC | TRBV19 | TRBD2 | TRBJ2-1 | TRBC2 |
| 170 | TRAV19 | TRAJ4 | TRAC | TRBV19 | TRBD1 | TRBJ2-5 | TRBC2 |
| 171 | TRAV29DV5 | TRAJ29 | TRAC | TRBV19 | TRBD2 | TRBJ2-7 | TRBC2 |
| 172 | TRAV38-1 | TRAJ38 | TRAC | TRBV19 | None | TRBJ2-2 | TRBC2 |
| 173 | TRAV21 | TRAJ32 | TRAC | TRBV19 | TRBD2 | TRBJ2-2 | TRBC2 |
| 174 | TRAV13-2 | TRAJ29 | TRAC | TRBV19 | TRBD1 | TRBJ1-5 | TRBC1 |
| 175 | TRAV19 | TRAJ9 | TRAC | TRBV6-6 | TRBD1 | TRBJ2-3 | TRBC2 |
| 176 | TRAV36DV7 | TRAJ47 | TRAC | TRBV19 | TRBD1 | TRBJ1-1 | TRBC1 |
| 177 | TRAV20 | TRAJ45 | TRAC | TRBV19 | TRBD1 | TRBJ2-7 | TRBC2 |
| 178 | TRAV39 | TRAJ54 | TRAC | TRBV19 | TRBD2 | TRBJ2-7 | TRBC2 |
| 179 | TRAV29DV5 | TRAJ57 | TRAC | TRBV5-6 | TRBD2 | TRBJ1-3 | TRBC1 |
| 180 | TRAV29DV5 | TRAJ31 | TRAC | TRBV19 | TRBD1 | TRBJ2-7 | TRBC2 |
| 181 | TRAV27 | TRAJ11 | TRAC | TRBV19 | None | TRBJ1-5 | TRBC1 |
| 182 | TRAV13-1 | TRAJ36 | TRAC | TRBV19 | None | TRBJ2-3 | TRBC2 |
| 183 | TRAV19 | TRAJ37 | TRAC | TRBV19 | None | TRBJ2-7 | TRBC2 |
| 184 | TRAV19 | TRAJ48 | TRAC | TRBV6-5 | None | TRBJ2-2 | TRBC2 |
| 185 | TRAV38-1 | TRAJ44 | TRAC | TRBV19 | TRBD2 | TRBJ2-1 | TRBC2 |
| 186 | TRAV19 | TRAJ31 | TRAC | TRBV19 | TRBD2 | TRBJ2-7 | TRBC2 |
| 187 | TRAV13-1 | TRAJ40 | TRAC | TRBV19 | TRBD1 | TRBJ1-2 | TRBC1 |
| 188 | TRAV17 | TRAJ34 | TRAC | TRBV19 | None | TRBJ2-7 | TRBC2 |
| 189 | TRAV19 | TRAJ31 | TRAC | TRBV19 | TRBD2 | TRBJ2-1 | TRBC2 |
| 190 | TRAV19 | TRAJ3 | TRAC | TRBV6-5 | TRBD1 | TRBJ2-1 | TRBC2 |
| 191 | TRAV27 | TRAJ20 | TRAC | TRBV19 | None | TRBJ2-1 | TRBC2 |
| 192 | TRAV8-3 | TRAJ4 | TRAC | TRBV19 | TRBD2 | TRBJ2-1 | TRBC2 |
| 193 | TRAV5 | TRAJ4 | TRAC | TRBV24-1 | TRBD1 | TRBJ2-7 | TRBC2 |
| 194 | TRAV19 | TRAJ10 | TRAC | TRBV19 | TRBD1 | TRBJ2-3 | TRBC2 |
| 195 | TRAV19 | TRAJ54 | TRAC | TRBV9 | TRBD2 | TRBJ2-3 | TRBC2 |
| 196 | TRAV19 | TRAJ39 | TRAC | TRBV19 | TRBD2 | TRBJ1-1 | TRBC1 |
| 197 | TRAV24 | TRAJ48 | TRAC | TRBV19 | None | TRBJ2-7 | TRBC2 |
| 198 | TRAV38-1 | TRAJ54 | TRAC | TRBV24-1 | TRBD2 | TRBJ1-1 | TRBC1 |
| 199 | TRAV21 | TRAJ31 | TRAC | TRBV19 | None | TRBJ2-2 | TRBC2 |
| 200 | TRAV17 | TRAJ34 | TRAC | TRBV19 | TRBD1 | TRBJ2-7 | TRBC2 |
| 201 | TRAV19 | TRAJ27 | TRAC | TRBV19 | TRBD2 | TRBJ2-1 | TRBC2 |
| 202 | TRAV19 | TRAJ23 | TRAC | TRBV19 | TRBD1 | TRBJ2-5 | TRBC2 |
| 203 | TRAV1-1 | TRAJ29 | TRAC | TRBV19 | TRBD2 | TRBJ2-7 | TRBC2 |
| 204 | TRAV8-3 | TRAJ47 | TRAC | TRBV19 | None | TRBJ2-7 | TRBC2 |
| 205 | TRAV19 | TRAJ38 | TRAC | TRBV19 | TRBD1 | TRBJ1-1 | TRBC1 |
| 206 | TRAV19 | TRAJ47 | TRAC | TRBV19 | TRBD1 | TRBJ2-5 | TRBC2 |
| 207 | TRAV13-1 | TRAJ48 | TRAC | TRBV19 | TRBD2 | TRBJ2-1 | TRBC2 |
| 208 | TRAV24 | TRAJ50 | TRAC | TRBV19 | TRBD1 | TRBJ2-1 | TRBC2 |
| 209 | TRAV19 | TRAJ18 | TRAC | TRBV19 | TRBD1 | TRBJ2-7 | TRBC2 |
| 210 | TRAV1-1 | TRAJ23 | TRAC | TRBV19 | None | TRBJ2-4 | TRBC2 |
| 211 | TRAV1-2 | TRAJ33 | TRAC | TRBV20-1 | TRBD1 | TRBJ1-3 | TRBC1 |
| 212 | TRAV34 | TRAJ54 | TRAC | TRBV19 | TRBD1 | TRBJ2-1 | TRBC2 |
| 213 | TRAV17 | TRAJ50 | TRAC | TRBV19 | TRBD2 | TRBJ2-7 | TRBC2 |
| 214 | TRAV17 | TRAJ33 | TRAC | TRBV19 | TRBD2 | TRBJ2-7 | TRBC2 |
| 215 | TRAV19 | TRAJ20 | TRAC | TRBV19 | TRBD2 | TRBJ2-1 | TRBC2 |
| 216 | TRAV17 | TRAJ32 | TRAC | TRBV19 | None | TRBJ2-7 | TRBC2 |
| 217 | TRAV19 | TRAJ10 | TRAC | TRBV19 | TRBD1 | TRBJ1-2 | TRBC1 |
| 218 | TRAV21 | TRAJ11 | TRAC | TRBV19 | TRBD1 | TRBJ2-2 | TRBC2 |
| 219 | TRAV12-2 | TRAJ43 | TRAC | TRBV19 | TRBD1 | TRBJ1-1 | TRBC1 |
| 220 | TRAV19 | TRAJ34 | TRAC | TRBV5-4 | None | TRBJ2-7 | TRBC2 |
| 221 | TRAV19 | TRAJ52 | TRAC | TRBV9 | TRBD1 | TRBJ2-1 | TRBC2 |
| 222 | TRAV19 | TRAJ11 | TRAC | TRBV19 | None | TRBJ2-1 | TRBC2 |
| 223 | TRAV23DV6 | TRAJ23 | TRAC | TRBV5-4 | None | TRBJ2-3 | TRBC2 |
| 224 | TRAV19 | TRAJ37 | TRAC | TRBV5-6 | None | TRBJ2-7 | TRBC2 |
| 225 | TRAV3 | TRAJ7 | TRAC | TRBV19 | TRBD2 | TRBJ2-7 | TRBC2 |
| 226 | TRAV12-2 | TRAJ6 | TRAC | TRBV4-3 | TRBD1 | TRBJ2-7 | TRBC2 |
| 227 | TRAV19 | TRAJ26 | TRAC | TRBV5-4 | None | TRBJ2-3 | TRBC2 |
| 228 | TRAV25 | TRAJ24 | TRAC | TRBV19 | None | TRBJ2-7 | TRBC2 |
| 229 | TRAV5 | TRAJ6 | TRAC | TRBV6-5 | TRBD1 | TRBJ1-2 | TRBC1 |
| 230 | TRAV2 | TRAJ31 | TRAC | TRBV19 | None | TRBJ1-1 | TRBC1 |
| 231 | TRAV17 | TRAJ57 | TRAC | TRBV19 | None | TRBJ2-7 | TRBC2 |
| 232 | TRAV14DV4 | TRAJ4 | TRAC | TRBV19 | TRBD1 | TRBJ2-5 | TRBC2 |
| 233 | TRAV3 | TRAJ37 | TRAC | TRBV19 | TRBD1 | TRBJ1-2 | TRBC1 |
| 234 | TRAV19 | TRAJ21 | TRAC | TRBV19 | TRBD1 | TRBJ1-1 | TRBC1 |
| 235 | TRAV19 | TRAJ18 | TRAC | TRBV19 | TRBD2 | TRBJ2-7 | TRBC2 |
| 236 | TRAV26-2 | TRAJ36 | TRAC | TRBV19 | TRBD2 | TRBJ2-7 | TRBC2 |
| 237 | TRAV21 | TRAJ33 | TRAC | TRBV7-8 | TRBD1 | TRBJ2-3 | TRBC2 |
| 238 | TRAV8-3 | TRAJ7 | TRAC | TRBV19 | None | TRBJ1-5 | TRBC1 |
| 239 | TRAV12-3 | TRAJ11 | TRAC | TRBV19 | TRBD1 | TRBJ2-7 | TRBC2 |
| 240 | TRAV29DV5 | TRAJ31 | TRAC | TRBV9 | TRBD2 | TRBJ2-7 | TRBC2 |
| 241 | TRAV19 | TRAJ23 | TRAC | TRBV19 | TRBD1 | TRBJ2-1 | TRBC2 |
| 242 | TRAV6 | TRAJ39 | TRAC | TRBV27 | None | TRBJ2-3 | TRBC2 |
| 243 | TRAV27 | TRAJ37 | TRAC | TRBV19 | None | TRBJ2-7 | TRBC2 |
| 244 | TRAV13-1 | TRAJ37 | TRAC | TRBV19 | TRBD2 | TRBJ2-7 | TRBC2 |
| 245 | TRAV26-2 | TRAJ26 | TRAC | TRBV19 | TRBD1 | TRBJ2-7 | TRBC2 |
| 246 | TRAV13-1 | TRAJ49 | TRAC | TRBV19 | TRBD1 | TRBJ2-1 | TRBC2 |
| 247 | TRAV19 | TRAJ58 | TRAC | TRBV19 | TRBD1 | TRBJ2-7 | TRBC2 |
| 248 | TRAV19 | TRAJ13 | TRAC | TRBV19 | TRBD1 | TRBJ1-1 | TRBC1 |
| 249 | TRAV19 | TRAJ8 | TRAC | TRBV19 | TRBD1 | TRBJ2-7 | TRBC2 |
| 250 | TRAV19 | TRAJ4 | TRAC | TRBV9 | TRBD2 | TRBJ2-3 | TRBC2 |
| 251 | TRAV4 | TRAJ20 | TRAC | TRBV19 | TRBD2 | TRBJ2-7 | TRBC2 |
| 252 | TRAV21 | TRAJ33 | TRAC | TRBV19 | None | TRBJ2-1 | TRBC2 |
| 253 | TRAV21 | TRAJ32 | TRAC | TRBV19 | None | TRBJ1-1 | TRBC1 |
| 254 | TRAV13-1 | TRAJ27 | TRAC | TRBV19 | TRBD2 | TRBJ2-7 | TRBC2 |
| 255 | TRAV21 | TRAJ15 | TRAC | TRBV7-6 | TRBD2 | TRBJ2-7 | TRBC2 |
| 256 | TRAV8-2 | TRAJ26 | TRAC | TRBV19 | TRBD1 | TRBJ2-1 | TRBC2 |
| 257 | TRAV13-1 | TRAJ15 | TRAC | TRBV19 | None | TRBJ2-1 | TRBC2 |
| 258 | TRAV14DV4 | TRAJ39 | TRAC | TRBV19 | TRBD2 | TRBJ2-7 | TRBC2 |
| 259 | TRAV19 | TRAJ26 | TRAC | TRBV19 | TRBD1 | TRBJ2-7 | TRBC2 |
| 260 | TRAV19 | TRAJ27 | TRAC | TRBV5-6 | TRBD1 | TRBJ1-4 | TRBC1 |
| 261 | TRAV19 | TRAJ31 | TRAC | TRBV19 | TRBD2 | TRBJ1-4 | TRBC1 |
| 262 | TRAV3 | TRAJ41 | TRAC | TRBV19 | TRBD1 | TRBJ2-1 | TRBC2 |
| 263 | TRAV19 | TRAJ28 | TRAC | TRBV19 | TRBD1 | TRBJ2-3 | TRBC2 |
| 264 | TRAV19 | TRAJ37 | TRAC | TRBV19 | TRBD1 | TRBJ2-2 | TRBC2 |
| 265 | TRAV17 | TRAJ45 | TRAC | TRBV19 | TRBD1 | TRBJ2-7 | TRBC2 |
| 266 | TRAV19 | TRAJ30 | TRAC | TRBV19 | TRBD1 | TRBJ2-7 | TRBC2 |
| 267 | TRAV19 | TRAJ30 | TRAC | TRBV19 | None | TRBJ2-7 | TRBC2 |
| 268 | TRAV8-2 | TRAJ54 | TRAC | TRBV19 | TRBD2 | TRBJ2-7 | TRBC2 |
| 269 | TRAV1-1 | TRAJ29 | TRAC | TRBV9 | TRBD1 | TRBJ2-3 | TRBC2 |
| 270 | TRAV16 | TRAJ6 | TRAC | TRBV19 | None | TRBJ1-2 | TRBC1 |
| 271 | TRAV21 | TRAJ31 | TRAC | TRBV3-1 | TRBD1 | TRBJ2-7 | TRBC2 |
| 272 | TRAV25 | TRAJ13 | TRAC | TRBV19 | TRBD1 | TRBJ2-7 | TRBC2 |
| 273 | TRAV21 | TRAJ11 | TRAC | TRBV19 | TRBD2 | TRBJ1-2 | TRBC1 |
| 274 | TRAV21 | TRAJ32 | TRAC | TRBV7-8 | TRBD1 | TRBJ2-3 | TRBC2 |
| 275 | TRAV26-1 | TRAJ53 | TRAC | TRBV19 | None | TRBJ2-7 | TRBC2 |
| 276 | TRAV21 | TRAJ32 | TRAC | TRBV6-5 | None | TRBJ2-2 | TRBC2 |
| 277 | TRAV21 | TRAJ32 | TRAC | TRBV5-6 | TRBD1 | TRBJ1-4 | TRBC1 |
| 278 | TRAV30 | TRAJ32 | TRAC | TRBV19 | TRBD1 | TRBJ2-1 | TRBC2 |
| 279 | TRAV25 | TRAJ23 | TRAC | TRBV19 | None | TRBJ2-3 | TRBC2 |
| 280 | TRAV8-3 | TRAJ47 | TRAC | TRBV19 | TRBD1 | TRBJ2-1 | TRBC2 |
| 281 | TRAV21 | TRAJ33 | TRAC | TRBV9 | TRBD2 | TRBJ2-7 | TRBC2 |
| 282 | TRAV5 | TRAJ34 | TRAC | TRBV9 | None | TRBJ2-2 | TRBC2 |
| 283 | TRAV17 | TRAJ31 | TRAC | TRBV19 | TRBD1 | TRBJ2-5 | TRBC2 |
| 284 | TRAV21 | TRAJ43 | TRAC | TRBV19 | TRBD2 | TRBJ1-1 | TRBC1 |
| 285 | TRAV20 | TRAJ40 | TRAC | TRBV19 | None | TRBJ2-7 | TRBC2 |
| 286 | TRAV12-1 | TRAJ29 | TRAC | TRBV19 | None | TRBJ2-1 | TRBC2 |
| 287 | TRAV21 | TRAJ33 | TRAC | TRBV19 | None | TRBJ2-7 | TRBC2 |
| 288 | TRAV14DV4 | TRAJ43 | TRAC | TRBV19 | TRBD1 | TRBJ2-1 | TRBC2 |
| 289 | TRAV19 | TRAJ52 | TRAC | TRBV19 | TRBD2 | TRBJ2-1 | TRBC2 |
| 290 | TRAV12-2 | TRAJ4 | TRAC | TRBV6-5 | TRBD1 | TRBJ1-2 | TRBC1 |
| 291 | TRAV19 | TRAJ20 | TRAC | TRBV19 | None | TRBJ1-1 | TRBC1 |
| 292 | TRAV19 | TRAJ27 | TRAC | TRBV9 | TRBD1 | TRBJ2-3 | TRBC2 |
| 293 | TRAV14DV4 | TRAJ44 | TRAC | TRBV9 | TRBD1 | TRBJ2-3 | TRBC2 |
| 294 | TRAV29DV5 | TRAJ31 | TRAC | TRBV19 | None | TRBJ2-7 | TRBC2 |
| 295 | TRAV19 | TRAJ18 | TRAC | TRBV19 | TRBD1 | TRBJ2-7 | TRBC2 |
| 296 | TRAV19 | TRAJ28 | TRAC | TRBV19 | TRBD2 | TRBJ2-7 | TRBC2 |
| 297 | TRAV38-1 | TRAJ54 | TRAC | TRBV19 | TRBD2 | TRBJ2-7 | TRBC2 |
| 298 | TRAV25 | TRAJ30 | TRAC | TRBV19 | TRBD2 | TRBJ2-7 | TRBC2 |
| 299 | TRAV21 | TRAJ48 | TRAC | TRBV19 | TRBD2 | TRBJ2-7 | TRBC2 |
| 300 | TRAV38-1 | TRAJ54 | TRAC | TRBV19 | TRBD1 | TRBJ1-1 | TRBC1 |
| 301 | TRAV25 | TRAJ30 | TRAC | TRBV19 | TRBD1 | TRBJ2-7 | TRBC2 |
| 302 | TRAV20 | TRAJ58 | TRAC | TRBV19 | TRBD2 | TRBJ2-7 | TRBC2 |
| 303 | TRAV12-2 | TRAJ21 | TRAC | TRBV19 | TRBD2 | TRBJ2-7 | TRBC2 |
| 304 | TRAV35 | TRAJ47 | TRAC | TRBV19 | None | TRBJ1-6 | TRBC1 |
| 305 | TRAV19 | TRAJ48 | TRAC | TRBV11-3 | TRBD1 | TRBJ2-3 | TRBC2 |
| 306 | TRAV25 | TRAJ57 | TRAC | TRBV6-4 | TRBD2 | TRBJ2-3 | TRBC2 |
| 307 | TRAV8-6 | TRAJ43 | TRAC | TRBV19 | TRBD1 | TRBJ2-1 | TRBC2 |
| 308 | TRAV19 | TRAJ34 | TRAC | TRBV19 | TRBD2 | TRBJ2-1 | TRBC2 |
| 309 | TRAV25 | TRAJ31 | TRAC | TRBV19 | None | TRBJ1-5 | TRBC1 |
| 310 | TRAV13-1 | TRAJ21 | TRAC | TRBV19 | TRBD2 | TRBJ2-1 | TRBC2 |
| 311 | TRAV17 | TRAJ23 | TRAC | TRBV19 | None | TRBJ2-1 | TRBC2 |
| 312 | TRAV14DV4 | TRAJ49 | TRAC | TRBV19 | TRBD1 | TRBJ1-1 | TRBC1 |
| 313 | TRAV13-1 | TRAJ53 | TRAC | TRBV19 | None | TRBJ2-1 | TRBC2 |
| 314 | TRAV24 | TRAJ12 | TRAC | TRBV19 | TRBD1 | TRBJ1-5 | TRBC1 |
| 315 | TRAV25 | TRAJ57 | TRAC | TRBV19 | TRBD2 | TRBJ2-1 | TRBC2 |
| 316 | TRAV35 | TRAJ52 | TRAC | TRBV19 | TRBD1 | TRBJ2-5 | TRBC2 |
| 317 | TRAV21 | TRAJ54 | TRAC | TRBV19 | TRBD2 | TRBJ2-1 | TRBC2 |
| 318 | TRAV17 | TRAJ18 | TRAC | TRBV19 | TRBD1 | TRBJ2-1 | TRBC2 |
| 319 | TRAV17 | TRAJ43 | TRAC | TRBV19 | None | TRBJ2-1 | TRBC2 |
| 320 | TRAV19 | TRAJ21 | TRAC | TRBV19 | TRBD1 | TRBJ2-7 | TRBC2 |
| 321 | TRAV8-2 | TRAJ21 | TRAC | TRBV19 | None | TRBJ2-1 | TRBC2 |
| 322 | TRAV19 | TRAJ37 | TRAC | TRBV19 | TRBD2 | TRBJ2-1 | TRBC2 |
| 323 | TRAV17 | TRAJ13 | TRAC | TRBV19 | TRBD1 | TRBJ1-5 | TRBC1 |
| 324 | TRAV25 | TRAJ9 | TRAC | TRBV19 | None | TRBJ2-3 | TRBC2 |
| 325 | TRAV25 | TRAJ23 | TRAC | TRBV19 | None | TRBJ2-1 | TRBC2 |
| 326 | TRAV21 | TRAJ37 | TRAC | TRBV19 | TRBD1 | TRBJ2-1 | TRBC2 |
| 327 | TRAV21 | TRAJ31 | TRAC | TRBV19 | None | TRBJ2-7 | TRBC2 |
| 328 | TRAV17 | TRAJ47 | TRAC | TRBV19 | TRBD2 | TRBJ2-1 | TRBC2 |
| 329 | TRAV1-1 | TRAJ21 | TRAC | TRBV19 | None | TRBJ1-4 | TRBC1 |
| 330 | TRAV38-1 | TRAJ21 | TRAC | TRBV19 | None | TRBJ2-7 | TRBC2 |
| 331 | TRAV8-3 | TRAJ21 | TRAC | TRBV19 | TRBD2 | TRBJ2-5 | TRBC2 |
| 332 | TRAV19 | TRAJ3 | TRAC | TRBV19 | None | TRBJ2-7 | TRBC2 |
| 333 | TRAV12-3 | TRAJ18 | TRAC | TRBV19 | None | TRBJ2-3 | TRBC2 |
| 334 | TRAV19 | TRAJ57 | TRAC | TRBV20-1 | None | TRBJ1-2 | TRBC1 |
| 335 | TRAV19 | TRAJ31 | TRAC | TRBV19 | TRBD2 | TRBJ2-1 | TRBC2 |
| 336 | TRAV6 | TRAJ15 | TRAC | TRBV19 | TRBD2 | TRBJ2-1 | TRBC2 |
| 337 | TRAV3 | TRAJ10 | TRAC | TRBV19 | TRBD2 | TRBJ2-1 | TRBC2 |
| 338 | TRAV19 | TRAJ30 | TRAC | TRBV6-1 | None | TRBJ2-7 | TRBC2 |
| 339 | TRAV24 | TRAJ18 | TRAC | TRBV4-2 | TRBD1 | TRBJ2-7 | TRBC2 |
| 340 | TRAV3 | TRAJ15 | TRAC | TRBV19 | TRBD2 | TRBJ1-5 | TRBC1 |
| 341 | TRAV19 | TRAJ31 | TRAC | TRBV19 | None | TRBJ2-1 | TRBC2 |
| 342 | TRAV29DV5 | TRAJ42 | TRAC | TRBV19 | TRBD1 | TRBJ2-7 | TRBC2 |
| 343 | TRAV17 | TRAJ23 | TRAC | TRBV19 | TRBD1 | TRBJ2-7 | TRBC2 |
| 344 | TRAV27 | TRAJ31 | TRAC | TRBV10-3 | TRBD1 | TRBJ2-7 | TRBC2 |

[0719] Alpha and beta CDR3 sequences of the identified TCR clonotypes specific for HLA-PEPTIDE A*01:01_ASSLPTTMNY are shown in Table 15. For clarity, as in Table 14, each identified TCR was assigned a TCR ID number. For example TCR ID #1 comprises the αCDR3 sequence CAGPGNTGKLIF and the βCDR3 sequence CASSNAGDQPQHF.

[0720] Full length alpha V(J) and beta V(D)J sequences of the identified TCR clonotypes specific for HLA-PEPTIDE A*01:01_ASSLPTTMNY are shown in Table 16. For example TCR ID #1 comprises the alpha V(J) sequence MLLITSMLVLWMQLSQVNGQQVMQIPQYQHVQEGEDFTTYCNSSTTLSNIQWYKQ RPGGHPVFLIQLVKSGEVKKQKRLTFQFGEAKKNSSLHITATQTTDVGTYFCAGPGN TGKLIFGQGTTLQVK and the beta V(D)J sequence MSNQVLCCVVLCFLGANTVDGGITQSPKYLFRKEGQNVTLSCEQNLNHDAMYWYR QDPGQGLRLIYYSQIVNDFQKGDIAEGYSVSREKKESFPLTVTSAQKNPTAFYLCAS S NAGDQPQHFGDGTRLSIL.

[0721] Annotated sequences of the identified TCR clonotypes specific for HLA-PEPTIDE A*01:01_HSEVGLPVY are shown in Table 17, below. For clarity, each identified TCR was assigned a TCR ID number. For example, the TCR assigned TCR ID #345 comprises a TRAV13-1 sequence, a TRAJ20 sequence, a TRAC sequence, a TRBV7-9 sequence, a TRBJ2-7 sequence, and a TRBC2 sequence.

TABLE 17
Annotated Sequences for TCRs binding HLA-PEPTIDE A*01:01_HSEVGLPVY

| TCR ID# | TRAV | TRAJ | TRAC | TRBV | TRBD | TRBJ | TRB |
|---|---|---|---|---|---|---|---|
| 345 | TRAV13-1 | TRAJ20 | TRAC | TRBV7-9 | None | TRBJ2-7 | TRBC2 |
| 346 | TRAV5 | TRAJ47 | TRAC | TRBV20-1 | TRBD1 | TRBJ1-2 | TRBC1 |
| 347 | TRAV19 | TRAJ4 | TRAC | TRBV20-1 | TRBD2 | TRBJ2-7 | TRBC2 |
| 348 | TRAV27 | TRAJ40 | TRAC | TRBV20-1 | TRBD2 | TRBJ2-7 | TRBC2 |
| 349 | TRAV12-1 | TRAJ13 | TRAC | TRBV11-2 | None | TRBJ2-1 | TRBC2 |
| 350 | TRAV21 | TRAJ31 | TRAC | TRBV13 | TRBD2 | TRBJ2-3 | TRBC2 |
| 351 | TRAV12-1 | TRAJ43 | TRAC | TRBV28 | TRBD2 | TRBJ1-2 | TRBC1 |
| 352 | TRAV21 | TRAJ37 | TRAC | TRBV11-2 | None | TRBJ2-1 | TRBC2 |
| 353 | TRAV12-1 | TRAJ30 | TRAC | TRBV24-1 | TRBD1 | TRBJ2-2 | TRBC2 |
| 354 | TRAV29DV5 | TRAJ54 | TRAC | TRBV14 | TRBD2 | TRBJ2-7 | TRBC2 |
| 355 | TRAV29DV5 | TRAJ42 | TRAC | TRBV9 | None | TRBJ1-2 | TRBC1 |
| 356 | TRAV13-2 | TRAJ13 | TRAC | TRBV9 | None | TRBJ1-3 | TRBC1 |
| 357 | TRAV21 | TRAJ9 | TRAC | TRBV7-2 | TRBD2 | TRBJ2-5 | TRBC2 |
| 358 | TRAV29DV5 | TRAJ26 | TRAC | TRBV18 | TRBD1 | TRBJ1-1 | TRBC1 |
| 359 | TRAV5 | TRAJ31 | TRAC | TRBV12-5 | TRBD1 | TRBJ1-5 | TRBC1 |
| 360 | TRAV38-2DV8 | TRAJ22 | TRAC | TRBV9 | None | TRBJ2-3 | TRBC2 |
| 361 | TRAV12-1 | TRAJ24 | TRAC | TRBV24-1 | TRBD2 | TRBJ2-5 | TRBC2 |
| 362 | TRAV39 | TRAJ42 | TRAC | TRBV9 | TRBD2 | TRBJ2-7 | TRBC2 |
| 363 | TRAV12-1 | TRAJ28 | TRAC | TRBV9 | TRBD1 | TRBJ2-7 | TRBC2 |
| 364 | TRAV17 | TRAJ6 | TRAC | TRBV19 | TRBD2 | TRBJ2-1 | TRBC2 |
| 365 | TRAV12-3 | TRAJ49 | TRAC | TRBV6-1 | None | TRBJ2-7 | TRBC2 |
| 366 | TRAV17 | TRAJ49 | TRAC | TRBV6-6 | None | TRBJ1-5 | TRBC1 |
| 367 | TRAV4 | TRAJ27 | TRAC | TRBV29-1 | TRBD2 | TRBJ2-1 | TRBC2 |
| 368 | TRAV29DV5 | TRAJ49 | TRAC | TRBV27 | TRBD2 | TRBJ2-1 | TRBC2 |
| 369 | TRAV6 | TRAJ36 | TRAC | TRBV7-9 | TRBD1 | TRBJ2-1 | TRBC2 |
| 370 | TRAV29DV5 | TRAJ28 | TRAC | TRBV12-5 | TRBD1 | TRBJ1-2 | TRBC1 |
| 371 | TRAV12-1 | TRAJ21 | TRAC | TRBV24-1 | None | TRBJ2-3 | TRBC2 |
| 372 | TRAV29DV5 | TRAJ43 | TRAC | TRBV7-8 | TRBD1 | TRBJ2-7 | TRBC2 |
| 373 | TRAV17 | TRAJ10 | TRAC | TRBV11-2 | TRBD2 | TRBJ2-2 | TRBC2 |
| 374 | TRAV29DV5 | TRAJ33 | TRAC | TRBV12-5 | None | TRBJ1-2 | TRBC1 |
| 375 | TRAV19 | TRAJ28 | TRAC | TRBV19 | TRBD2 | TRBJ2-1 | TRBC2 |
| 376 | TRAV14DV4 | TRAJ34 | TRAC | TRBV4-1 | TRBD2 | TRBJ2-2 | TRBC2 |
| 377 | TRAV19 | TRAJ9 | TRAC | TRBV18 | TRBD1 | TRBJ1-5 | TRBC1 |
| 378 | TRAV24 | TRAJ31 | TRAC | TRBV10-3 | TRBD2 | TRBJ1-6 | TRBC1 |
| 379 | TRAV19 | TRAJ31 | TRAC | TRBV5-4 | TRBD2 | TRBJ2-3 | TRBC2 |
| 380 | TRAV12-1 | TRAJ23 | TRAC | TRBV15 | TRBD2 | TRBJ2-5 | TRBC2 |
| 381 | TRAV12-1 | TRAJ21 | TRAC | TRBV28 | TRBD2 | TRBJ2-5 | TRBC2 |
| 382 | TRAV12-1 | TRAJ49 | TRAC | TRBV10-2 | TRBD2 | TRBJ2-7 | TRBC2 |
| 383 | TRAV25 | TRAJ10 | TRAC | TRBV2 | TRBD1 | TRBJ2-7 | TRBC2 |
| 384 | TRAV12-3 | TRAJ43 | TRAC | TRBV6-5 | TRBD1 | TRBJ1-2 | TRBC1 |
| 385 | TRAV12-1 | TRAJ31 | TRAC | TRBV24-1 | TRBD1 | TRBJ2-7 | TRBC2 |
| 386 | TRAV12-1 | TRAJ6 | TRAC | TRBV7-8 | None | TRBJ2-7 | TRBC2 |
| 387 | TRAV12-1 | TRAJ31 | TRAC | TRBV24-1 | None | TRBJ2-1 | TRBC2 |
| 388 | TRAV27 | TRAJ20 | TRAC | TRBV19 | None | TRBJ2-7 | TRBC2 |
| 389 | TRAV25 | TRAJ47 | TRAC | TRBV2 | TRBD1 | TRBJ2-7 | TRBC2 |
| 390 | TRAV25 | TRAJ47 | TRAC | TRBV27 | TRBD2 | TRBJ2-7 | TRBC2 |
| 391 | TRAV1-2 | TRAJ11 | TRAC | TRBV7-8 | TRBD2 | TRBJ2-3 | TRBC2 |
| 392 | TRAV29DV5 | TRAJ43 | TRAC | TRBV9 | TRBD2 | TRBJ2-4 | TRBC2 |
| 393 | TRAV1-1 | TRAJ12 | TRAC | TRBV3-1 | None | TRBJ2-7 | TRBC2 |
| 394 | TRAV29DV5 | TRAJ57 | TRAC | TRBV7-9 | None | TRBJ2-7 | TRBC2 |
| 395 | TRAV29DV5 | TRAJ53 | TRAC | TRBV7-2 | TRBD2 | TRBJ1-2 | TRBC1 |
| 396 | TRAV26-2 | TRAJ39 | TRAC | TRBV15 | TRBD1 | TRBJ1-5 | TRBC1 |
| 397 | TRAV6 | TRAJ43 | TRAC | TRBV6-5 | TRBD1 | TRBJ1-5 | TRBC1 |
| 398 | TRAV19 | TRAJ40 | TRAC | TRBV7-9 | TRBD1 | TRBJ2-7 | TRBC2 |
| 399 | TRAV29DV5 | TRAJ47 | TRAC | TRBV13 | TRBD1 | TRBJ2-1 | TRBC2 |
| 400 | TRAV19 | TRAJ30 | TRAC | TRBV7-2 | TRBD2 | TRBJ1-2 | TRBC1 |
| 401 | TRAV9-2 | TRAJ26 | TRAC | TRBV9 | None | TRBJ1-6 | TRBC1 |
| 402 | TRAV12-3 | TRAJ23 | TRAC | TRBV7-8 | None | TRBJ1-1 | TRBC1 |
| 403 | TRAV12-1 | TRAJ27 | TRAC | TRBV12-4 | TRBD1 | TRBJ2-3 | TRBC2 |
| 404 | TRAV12-1 | TRAJ30 | TRAC | TRBV24-1 | None | TRBJ2-3 | TRBC2 |
| 405 | TRAV14DV4 | TRAJ30 | TRAC | TRBV6-6 | TRBD2 | TRBJ2-1 | TRBC2 |
| 406 | TRAV29DV5 | TRAJ47 | TRAC | TRBV19 | TRBD1 | TRBJ1-2 | TRBC1 |
| 407 | TRAV19 | TRAJ22 | TRAC | TRBV12-4 | TRBD1 | TRBJ2-3 | TRBC2 |
| 408 | TRAV41 | TRAJ49 | TRAC | TRBV27 | TRBD1 | TRBJ2-2 | TRBC2 |
| 409 | TRAV12-3 | TRAJ34 | TRAC | TRBV3-1 | None | TRBJ1-5 | TRBC1 |
| 410 | TRAV19 | TRAJ58 | TRAC | TRBV19 | TRBD2 | TRBJ2-7 | TRBC2 |
| 411 | TRAV12-2 | TRAJ34 | TRAC | TRBV11-3 | None | TRBJ2-7 | TRBC2 |
| 412 | TRAV1-1 | TRAJ21 | TRAC | TRBV3-1 | None | TRBJ1-6 | TRBC1 |
| 413 | TRAV12-1 | TRAJ27 | TRAC | TRBV2 | None | TRBJ1-2 | TRBC1 |
| 414 | TRAV13-1 | TRAJ48 | TRAC | TRBV11-2 | TRBD1 | TRBJ2-5 | TRBC2 |
| 415 | TRAV25 | TRAJ54 | TRAC | TRBV11-2 | TRBD2 | TRBJ1-2 | TRBC1 |
| 416 | TRAV40 | TRAJ34 | TRAC | TRBV7-3 | TRBD1 | TRBJ2-7 | TRBC2 |
| 417 | TRAV25 | TRAJ50 | TRAC | TRBV27 | TRBD2 | TRBJ2-1 | TRBC2 |
| 418 | TRAV2 | TRAJ10 | TRAC | TRBV3-1 | None | TRBJ1-6 | TRBC1 |
| 419 | TRAV8-4 | TRAJ41 | TRAC | TRBV9 | None | TRBJ2-3 | TRBC2 |
| 420 | TRAV19 | TRAJ48 | TRAC | TRBV9 | TRBD2 | TRBJ2-7 | TRBC2 |
| 421 | TRAV29DV5 | TRAJ32 | TRAC | TRBV19 | TRBD2 | TRBJ2-7 | TRBC2 |
| 422 | TRAV24 | TRAJ32 | TRAC | TRBV9 | None | TRBJ2-3 | TRBC2 |
| 423 | TRAV9-2 | TRAJ41 | TRAC | TRBV6-5 | TRBD1 | TRBJ1-2 | TRBC1 |
| 424 | TRAV24 | TRAJ42 | TRAC | TRBV9 | TRBD1 | TRBJ2-3 | TRBC2 |
| 425 | TRAV17 | TRAJ7 | TRAC | TRBV19 | None | TRBJ1-5 | TRBC1 |
| 426 | TRAV34 | TRAJ33 | TRAC | TRBV11-2 | TRBD1 | TRBJ2-7 | TRBC2 |
| 427 | TRAV29DV5 | TRAJ34 | TRAC | TRBV7-9 | TRBD2 | TRBJ1-1 | TRBC1 |
| 428 | TRAV39 | TRAJ43 | TRAC | TRBV19 | TRBD2 | TRBJ2-7 | TRBC2 |
| 429 | TRAV12-1 | TRAJ24 | TRAC | TRBV6-6 | None | TRBJ2-2 | TRBC2 |
| 430 | TRAV12-2 | TRAJ9 | TRAC | TRBV6-5 | TRBD2 | TRBJ1-2 | TRBC1 |
| 431 | TRAV8-1 | TRAJ18 | TRAC | TRBV29-1 | TRBD1 | TRBJ2-7 | TRBC2 |
| 432 | TRAV5 | TRAJ42 | TRAC | TRBV6-5 | TRBD1 | TRBJ1-2 | TRBC1 |
| 433 | TRAV24 | TRAJ42 | TRAC | TRBV9 | None | TRBJ2-3 | TRBC2 |
| 434 | TRAV6 | TRAJ6 | TRAC | TRBV19 | TRBD1 | TRBJ2-1 | TRBC2 |
| 435 | TRAV12-1 | TRAJ49 | TRAC | TRBV20-1 | None | TRBJ1-5 | TRBC1 |
| 436 | TRAV26-1 | TRAJ20 | TRAC | TRBV7-9 | TRBD1 | TRBJ2-7 | TRBC2 |
| 437 | TRAV38-2DV8 | TRAJ40 | TRAC | TRBV11-2 | TRBD1 | TRBJ2-4 | TRBC2 |
| 438 | TRAV1-1 | TRAJ9 | TRAC | TRBV2 | TRBD1 | TRBJ2-3 | TRBC2 |
| 439 | TRAV4 | TRAJ20 | TRAC | TRBV7-9 | TRBD2 | TRBJ2-7 | TRBC2 |
| 440 | TRAV29DV5 | TRAJ27 | TRAC | TRBV9 | None | TRBJ2-4 | TRBC2 |
| 441 | TRAV6 | TRAJ9 | TRAC | TRBV7-9 | TRBD1 | TRBJ2-6 | TRBC2 |
| 442 | TRAV9-2 | TRAJ32 | TRAC | TRBV7-8 | TRBD2 | TRBJ1-5 | TRBC1 |
| 443 | TRAV12-1 | TRAJ26 | TRAC | TRBV28 | TRBD1 | TRBJ2-5 | TRBC2 |
| 444 | TRAV29DV5 | TRAJ41 | TRAC | TRBV10-3 | TRBD1 | TRBJ1-1 | TRBC1 |
| 445 | TRAV13-1 | TRAJ20 | TRAC | TRBV7-9 | TRBD2 | TRBJ2-1 | TRBC2 |
| 446 | TRAV29DV5 | TRAJ53 | TRAC | TRBV19 | TRBD2 | TRBJ2-7 | TRBC2 |
| 447 | TRAV19 | TRAJ4 | TRAC | TRBV19 | TRBD1 | TRBJ2-1 | TRBC2 |

[0722] Alpha and beta CDR3 sequences of the identified TCR clonotypes specific for HLA-PEPTIDE A*01:01_HSEVGLPVY are shown in Table 18. For clarity, as in Table 17, each identified TCR was assigned a TCR ID number. For example TCR ID #345 comprises the αCDR3 sequence CAANPGDYKLSF and the βCDR3 sequence CASSSNYEQYF.

[0723] Full length alpha V(J) and beta V(D)J sequences of the identified TCR clonotypes specific for HLA-PEPTIDE A*01:01_HSEVGLPVY are shown in Table 19. For clarity, as in Table 17, each identified TCR was assigned a TCR ID number. For example TCR ID #345 comprises the alpha V(J) sequence MTSIRAVFIFLWLQLDLVNGENVEQHPSTLSVQEGDSAVIKCTYSDSASNYFPWYKQ ELGKGPQLIIDIRSNVGEKKDQRIAVTLNKTAKHFSLHITETQPEDSAVYFCAANPGD YKLSFGAGTTVTVR and the beta V(D)J sequence MGTSLLCWMALCLLGADHADTGVSQNPRHKITKRGQNVTFRCDPISEHNRLYWYR QTLGQGPEFLTYFQNEAQLEKSRLLSDRFSAERPKGSFSTLEIQRTEQGDSAMYLCAS SSNYEQYFGPGTRLTVT.

### Example 9: Identification of Antibodies or Antigen-Binding Fragments Thereof that Bind HLA-Peptide Complexes

[0724] Identification of Single-Chain Variable Fragment (scFv) Antibodies Targeting MHC Class I Molecules Presenting Tumor Antigens

[0725] Potent and selective single chain antibodies targeting human class I MHC molecules presenting tumor antigens of interest are identified using phage display. Phage libraries are prepared for screening by removing non-specific class I MHC binders. Multiple soluble human peptide-MHC (pMHC) molecules different from the target pMHCs are utilized to pan pre-existing phage libraries to remove scFvs that non-specifically bind class I MHC. To identify scFvs that selectively bind pMHCs of interest, target pMHCs are utilized for at least 1-3 rounds of panning with the prepared phage library. scFv hits identified in the screen are then evaluated against a panel of irrelevant pMHCs to identify scFv leads that bind selectively to the target pMHCs. Lead scFvs are characterized to determine target binding specificity and affinity. Lead scFvs that demonstrate potent and selective binding are converted to full-length IgG monoclonal antibody (mAb) constructs. In addition, the lead scFvs are incorporated into bi-specific mAb constructs and chimeric antigen receptor (CAR) constructs that can be used to generate CAR T-cells. Full-length bi-specifics or scFV-based bi-specifics can be constructed.

[0726] Demonstrate Targeting of Human Tumor Cells In Vitro

[0727] Immunohistochemistry techniques are utilized to demonstrate specific binding of lead antibodies to human tumor cells or cell lines expressing target pMHC molecules. T-cell lines transfected with CAR-T constructs are incubated with human tumor cells to demonstrate killing of tumor cells in vitro. Alternatively, tumor cells expressing the target are incubated with bi-specific constructs (encoding the ABP and an effector domain) and PBMCs or T cells.

[0728] In Vivo Proof-of-Concept

[0729] Lead antibody or CAR-T constructs are evaluated in vivo to demonstrate directed tumor killing in humanized mouse tumor models. Lead antibody or CAR-T constructs are evaluated in xenograft tumor models engrafted with human tumors and PBMCs. Anti-tumor activity is measured and compared to control constructs to demonstrate target-specific tumor killing.

[0730] Identification of Monoclonal Antibodies (mAbs) that Target MHC Class I Molecules Presenting Tumor Antigens Using Rabbit B Cell Cloning Technologies

[0731] Potent and selective mAbs targeting human class I MHC molecules presenting tumor antigens of interest are identified. Soluble human pMHC molecules presenting human tumor antigens are utilized for multiple mouse or rabbit immunizations followed by screening of B cells derived from the immunized animals to identify B cells that express mAbs that bind to target class I MHC molecules. Sequences encoding the mAbs identified from the mouse or rabbit screens will be cloned from the isolated B cells. The recovered mAbs are then evaluated against a panel of irrelevant pMHCs to identify lead mAbs that bind selectively to the target pMHCs. Lead mAbs will be fully characterized to determine target binding affinity and selectivity. Lead mAbs that demonstrate potent and selective binding are humanized to generate full-length human IgG monoclonal antibody (mAb) constructs. In addition, the lead mAbs are incorporated into bi-specific mAb constructs and chimeric antigen receptor (CAR) constructs that can be used to generate CAR T-cells. Full-length bi-specifics or scFV-based bi-specifics can be constructed.

[0732] Demonstrate Targeting of Human Tumor Cells In Vitro

[0733] Immunohistochemistry techniques are utilized to demonstrate specific binding of lead antibodies to human tumor cells expressing target pMHC molecules. T-cell lines transfected with CAR-T constructs are incubated with human tumor cells to demonstrate killing of tumor cells in vitro. Alternatively, tumor cells expressing the target are incubated with bi-specific constructs (encoding the ABP and an effector domain) and PBMCs or T cells.

[0734] In Vivo Proof-of-Concept

[0735] Lead antibody or CAR-T constructs are evaluated in vivo to demonstrate directed tumor killing in humanized mouse tumor models. Lead antibody or CAR-T constructs are evaluated in xenograft tumor models engrafted with human PBMCs. Anti-tumor activity is measured and compared to control constructs to demonstrate target-dependent tumor killing.

[0736] Potent and selective ABPs that selectively target human class I WIC molecules presenting tumor antigens will be identified using phage display or B cell cloning technologies. The utility of the ABPs will be demonstrated by showing that the ABPs mediated tumor cell killing in vitro and in vivo when incorporated into antibody or CAR-T cell constructs.

### Example 10: Identification of TCRs that Bind HLA-Peptide Complexes

[0737] To select natural high affinity TCRs, specifically recognizing shared antigen MHC/peptide targets (SAT), the following experimental steps are taken:

[0738] 1. Identification and isolation of MHC/peptide target-reactive TCRs

[0739] 2. Production of engineered TCR T cells

[0740] 3. Verification of TCR specificity

[0741] Identification of MHC/Peptide Target-Reactive TCRs

[0742] T cells are isolated from blood, lymph nodes, or tumors of patients. Patients are HLA-matched to SAT, and are selected based on expression of target-harboring protein. T cells are then enriched for SAT-specific T cells, e.g., by sorting SAT-MHC tetramer binding cells or by sorting activated cells stimulated in an in vitro co-culture of T cells and SAT-pulsed antigen presenting cells.

[0743] SAT-relevant alpha-beta TCR dimers are identified by single cell sequencing of TCRs of SAT-specific T cells. Alternatively, bulk TCR sequencing of SAT-specific T cells is performed and alpha-beta pairs with a high probability of matching are determined using a TCR pairing method.

[0744] Alternatively or in addition, SAT-specific T cells can be obtained through in vitro priming of naïve T cells from healthy donors. T cells obtained from PBMCs, lymph nodes, or cord blood are repeatedly stimulated by SAT-pulsed antigen presenting cells to prime differentiation of antigen-experienced T cells. TCRs are then identified similarly as described above for SAT-specific T cells from patients.

[0745] Production of Engineered TCR T Cells

[0746] TCR alpha and beta chain sequences are cloned into appropriate constructs. TCR-autologous or heterologous bulk T cells are transduced with the constructs to produce engineered TCR T cells. These T cells are expanded in the presence of anti-CD3 antibodies and IL-2 cytokine for use in subsequent experiments. In certain instances, native TCR is deleted or the inserted TCR is modified to increase proper multimerization.

[0747] In Vitro Verification of TCR Specificity

[0748] First, T cells bearing engineered TCRs are screened for target recognition using antigen presenting cells expressing the appropriate MEW and pulsed with appropriate target(s).

[0749] TCRs identified in the first round of screening are then tested for recognition of natural target. Lead TCRs are nominated based on specific recognition of HLA-matched primary tumors and tumor cell lines expressing SAT-harboring protein.

[0750] To assure specificity, lead TCRs are de-selected based on off-target recognition. They are screened against a panel of HLA matched and mismatched cell lines, covering multiple tissues and organ types, and with HLA-matched and mismatched antigen presenting cells pulsed with a panel of infectious disease antigens. TCRs with specific and non-specific off-target recognition of self-antigens or common non-self-antigens are de-selected.

### Example 11: Identification of MHC/Peptide Target-Reactive TCRs

[0751] T cells are isolated from blood, lymph nodes, or tumors of patients. Patients are HLA-matched to SAT, and are selected based on expression of target-harboring protein. T cells are then enriched for SAT-specific T cells, e.g., by sorting SAT-MHC tetramer binding cells or by sorting activated cells stimulated in an in vitro co-culture of T cells and SAT-pulsed antigen presenting cells.

[0752] SAT-relevant alpha-beta TCR dimers are identified by single cell sequencing of TCRs of SAT-specific T cells. Alternatively, bulk TCR sequencing of SAT-specific T cells is performed and alpha-beta pairs with a high probability of matching are determined using a TCR pairing method.

[0753] Alternatively or in addition, SAT-specific T cells can be obtained through in vitro priming of naïve T cells from healthy donors. T cells obtained from PBMCs, lymph nodes, or cord blood are repeatedly stimulated by SAT-pulsed antigen presenting cells to prime differentiation of antigen-experienced T cells. TCRs are then identified similarly as described above for SAT-specific T cells from patients.

### Example 12: Production of Engineered TCR T Cells

[0754] TCR alpha and beta chain sequences are cloned into appropriate constructs. TCR-autologous or heterologous bulk T cells are transduced with the constructs to produce engineered TCR T cells. These T cells are expanded in the presence of anti-CD3 antibodies and IL-2 cytokine for use in subsequent experiments. In certain instances, native TCR is deleted or the inserted TCR is modified to increase proper multimerization.

[0755] In Vitro Verification of TCR Specificity

[0756] First, T cells bearing engineered TCRs are screened for target recognition using antigen presenting cells expressing the appropriate MEW and pulsed with appropriate target(s).

[0757] TCRs identified in the first round of screening are then tested for recognition of natural target. Lead TCRs are nominated based on specific recognition of HLA-matched primary tumors and tumor cell lines expressing SAT-harboring protein.

[0758] To assure specificity, lead TCRs are de-selected based on off-target recognition. They are screened against a panel of HLA matched and mismatched cell lines, covering multiple tissues and organ types, and with HLA-matched and mismatched antigen presenting cells pulsed with a panel of infectious disease antigens. TCRs with specific and non-specific off-target recognition of self-antigens or common non-self-antigens are de-selected.

### Example 13: Identification of Monoclonal Antibodies (mAbs) that Target MHC Class I Molecules Presenting Tumor Antigens Using Rabbit B Cell Cloning Technologies

[0759] Potent and selective mAbs targeting human class I MEW molecules presenting tumor antigens of interest are identified. Soluble human pMHC molecules presenting human tumor antigens are utilized for multiple mouse or rabbit immunizations followed by screening of B cells derived from the immunized animals to identify B cells that express mAbs that bind to target class I MHC molecules. Sequences encoding the mAbs identified from the mouse or rabbit screens will be cloned from the isolated B cells. The recovered mAbs are then evaluated against a panel of irrelevant pMHCs to identify lead mAbs that bind selectively to the target pMHCs. Lead mAbs will be fully characterized to determine target binding affinity and selectivity. Lead mAbs that demonstrate potent and selective binding are humanized to generate full-length human IgG monoclonal antibody (mAb) constructs. In addition, the lead mAbs are incorporated into bi-specific mAb constructs and chimeric antigen receptor (CAR) constructs that can be used to generate CAR T-cells. Full-length bi-specifics or scFV-based bi-specifics can be constructed.

[0760] Demonstrate Targeting of Human Tumor Cells In Vitro

[0761] Immunohistochemistry techniques are utilized to demonstrate specific binding of lead antibodies to human tumor cells expressing target pMHC molecules. T-cell lines transfected with CAR-T constructs are incubated with human tumor cells to demonstrate killing of tumor cells in vitro. Alternatively, tumor cells expressing the target are incubated with bi-specific constructs (encoding the ABP and an effector domain) and PBMCs or T cells.

[0762] In vivo proof-of-concept

[0763] Lead antibody or CAR-T constructs are evaluated in vivo to demonstrate directed tumor killing in humanized mouse tumor models. Lead antibody or CAR-T constructs are evaluated in xenograft tumor models engrafted with human PBMCs. Anti-tumor activity is measured and compared to control constructs to demonstrate target-dependent tumor killing.

[0764] Potent and selective ABPs that selectively target human class I MHC molecules presenting tumor antigens will be identified using phage display or B cell cloning technologies. The utility of the ABPs will be demonstrated by showing that the ABPs mediated tumor cell killing in vitro and in vivo when incorporated into antibody or CAR-T cell constructs.

### Example 14: Assessment of scFv-pHLA or Fab-pHLA Structures by Hydrogen/Deuterium Exchange and Mass Spectrometry

[0765] Experimental Procedures

[0766] Hydrogen/Deuterium Exchange.

[0767] 20 μM of HLA-peptide was incubated with a 3-fold molar excess of scFv proteins for 20 min at room temperature (20-25° C.) to generate complexes for the exchange experiments. For the Apo control, the HLA-peptide was incubated with an equal volume of 50 mM NaCl, 20 mM Tris pH 8.0. All subsequent reaction steps were performed at 4° C. by an automated HDX PAL system controlled by Chronos 4.8.0 software (Leap Technologies, Morrisville, N.C.). Deuterium exchange was carried out in duplicate. 5 μl of protein complexes were diluted 10-fold into 50 mM NaCl, 20 mM Tris pH 8.0 (for the 0 min. control time-point) or the same buffer made with D₂O for 30s prior to quenching in 0.8 M guanidine hydrochloride, 0.4% acetic acid (v/v), and 75 mM tris(2-carboxyethyl) phosphine for 3 min. ˜50 pmol of quenched protein complexes were transferred onto an immobilized Protein XIII/Pepsin column (NovaBioAssays, Woburn, Mass.) for integrated on-line protein digestion.

[0768] Liquid Chromatography, Mass Spectrometry, and HDX Analysis

[0769] Chromatographic separation of peptides was carried out using an UltiMate 3000 Basic Manual UHPLC System (ThermoFisher Scientific, Waltham, Mass.), which contained a trap C18 column (5 μM particle size and 2.1 mm diameter) and an analytical C18 column (1.9 μM particle size and 1 mm diameter). Samples were desalted with 10% acetonitrile, 0.05% trifluoro acetic acid at a 40 μl/min flow rate for 2 min and peptides were eluted at a 40 μl/min flow rate with an increasing concentration of 95% acetonitrile, 0.05% trifluoro acetic acid. Mass spectrometry was performed with an Orbitrap Fusion Lumos mass spectrometer (ThermoFisher, Waltham, Mass.) with the ESI source set at a positive ion voltage of 3800 V. Prior to performing hydrogen-deuterium exchange experiments, peptide fragments of each HLA-peptide complex were analyzed by data-dependent LC/MS/MS and the data searched using PEAKS Studio (Bioinformatics Solutions Inc., Waterloo, ON, Canada) with a peptide precursor mass tolerance of 10 ppm and fragment ion mass tolerance of 0.1 Da. The sequences of the HLA, β2M, and the peptide were searched, and false detection rates identified using a decoy-database strategy. Peptides from the hydrogen-deuterium experiments were detected by LC/MS and analyzed by HDX Workbench (Omics Informatics, Honolulu, Hi.) with a retention time window size of 0.22 min and a 7.0 ppm error. Differences in deuterium uptake were mapped to relevant protein crystallographic structures using Pymol (Schrödinger, Cambridge, Mass.).

[0770] Results

[0771] FIG. 21A shows an exemplary heatmap of the HLA portion of the G8 HLA-PEPTIDE complex when incubated with scFv clone G8-P1H08, visualized in its entirety using a consolidated perturbation view.

[0772] An example of the data from scFv G8-P1H08 plotted on the crystal structure described in Example 15 is shown in FIG. 21B.

[0773] FIG. 45A shows an exemplary heatmap of the HLA portion of the G8 HLA-PEPTIDE complex when incubated with scFv clone G8-P1C11, visualized in its entirety using a consolidated perturbation view.

[0774] An example of the data from scFv G8-P1C11 plotted on the crystal structure described in Example 15 is shown in FIG. 45B.

[0775] FIG. 23A shows an exemplary heatmap of the HLA portion of the G10 HLA-PEPTIDE complex when incubated with scFv clone R3G10-P2G11, visualized in its entirety using a consolidated perturbation view.

[0776] An example of the data from scFv R3G10-P2G11 plotted on a crystal structure PDB5bs0 is shown in FIG. 23B. The crystal structure, depicting a restricted peptide in the HLA binding cleft formed by the α1 and α2 helices, can be found at URL https://www.rcsb.org/structure/5bs0 (Raman et al).

[0777] To better compare the data across the ABPs tested for a given HLA-PEPTIDE target, data for each ABP was exported, and a heat map was generated in Excel. FIG. 22A shows resulting heat maps across the HLA α1 helix for all ABPs tested for HLA-PEPTIDE target G8 (HLA-A*02:01_AIFPGAVPAA). FIG. 22B shows resulting heat maps across the HLA α2 helix for all ABPs tested for HLA-PEPTIDE target G8 (HLA-A*02:01_AIFPGAVPAA. FIG. 22C shows resulting heat maps across the restricted peptide AIFPGAVPAA for all ABPs tested. The heat maps indicate positions 45-60 of the HLA protein (in the α1 helix) of HLA-PEPTIDE target G8 (HLA-A*02:01_AIFPGAVPAA) as likely involved, directly or indirectly, in determining the interaction between the HLA-PEPTIDE target and G8-specific antibody-based ABPs.

[0778] FIG. 24A shows resulting heat maps across the HLA α1 helix for all ABPs tested for HLA-PEPTIDE target G10 (HLA-A*01:01_ASSLPTTMNY). FIG. 24B shows resulting heat maps across the HLA α2 helix for all ABPs tested for HLA-PEPTIDE target G10 (HLA-A*01:01_ASSLPTTMNY). FIG. 24C shows resulting heat maps across the restricted peptide ASSLPTTMNY for all ABPs tested. The heat maps indicate positions 49-56 of the HLA protein (in the α1 helix) of HLA-PEPTIDE target G10 (HLA-A*01:01_ASSLPTTMNY) as likely involved, directly or indirectly, in determining the interaction between the HLA-PEPTIDE target and G10-specific antibody-based ABPs.

### Example 15: Assessment of Fab-pHLA Structures by Crystallography

[0779] Materials and Methods

[0780] Complex Purification and Crystal Screening

[0781] Fab fragments corresponding to, e.g., HLA-PEPTIDE target G8 (A*02:01_AIFPGAVPAA) were concentrated to reach 5 mg/mL (100 μM) before addition of its corresponding HLA-MHC (1:1 molar ratio) and incubated for 30 minutes at 4° C. The mixture was then injected on size exclusion chromatography column (S200 16/60) equilibrated in 1×PBS buffer for complex purification. Fractions containing both Fab and HLA and with an elution volume coherent with a complex of ˜94 kDa were pooled and concentrated to 10-12 mg/mL (1AU=1 mg/mL) Each purified complex was screened for crystallization conditions using commercial screens: PEGIon (Hampton research), JCSG+(Molecular Dimensions) and JBS Screen 3 and 4 (Jena Biosciences). The choice of the kits was driven by the characteristic of known crystal conditions of HLA-Fab complexes that are mainly based on the use of PEG3350 or PEG4000 as precipitant. 3 to 4 weeks after screen, diffraction suitable crystals appeared for HLA-Fab combinations in several crystallization conditions (Table 24). The protein nature of the crystals was checked by UV. Crystals were transferred into a cryoprotectant solution (crystallization solution supplemented with 25% Glycerol) and flash frozen in liquid nitrogen.

[0782] Data Collection and Processing

[0783] Diffraction data was collected on the Proxima 2A beamline at SOLEIL synchrotron (Gif sur Yvette, France). Data processing and scaling was performed using XDS (1). Molecular replacement was performed using MolRep and Arp/Warp from the CCP4 suite (2) using PDB 5E61 for HLA (100% sequence identity) and SAZE (90% sequence identity with VH) and 5115 (97% sequence identity with VL) for Fab as entry models. Refinement was performed using Buster TNT (GlobalPhasing, Inc) and manual model modifications in Coot (CCP4 suite).

[0784] Complex Purification

[0785] Combinations produced a good separation between the individual protein peak and the formed complex peak (FIG. 28A). Increasing incubation time to 16 hours (overnight) did not change the ratio of complex formed (˜50% of the protein is present in complex and 50% as free proteins). Peak analysis by SDS PAGE under reducing conditions showed the presence of both Fab chains (30 kDa), HLA heavy chain (˜35 kDa), and HLA light chain (BLM, <10 kDa) in the pooled fractions (FIG. 28B).

[0786] Crystallization and Data Collection

Complex pooled fractions were concentrated and screened. After 3-4 weeks crystals appeared for some of the HLA-Fab combinations. A summary of the crystallography conditions for the A*02:01_AIFPGAVPAA-G8-P1C11 Fab complex and resulting crystal formation is shown in Table 24.

TABLE 24
Crystallography conditions

| Commercial | | Crystals Obtained |
|---|---|---|
| Kit | Experimental Conditions | (Y/N) |
| JBS | 20% PEG4000, 200 mM Magnesium sulfate, | No |
| | 10% glycerol (GOL) | |
| JBS | 20% PEG4000, 200 mM Magnesium sulfate, | Yes |
| | 5% 2-Propanol | |
| JBS | 20% w/v Polyethylene glycol 4,000 10% w/v | No |
| | 2-Propanol, 100 mM HEPES; pH 7.5 | |
| JCSG | 20% (w/v) PEG 3350 200 mM Ammonium | No |
| | chloride | |
| JCSG | 30% (w/v) PEG 2000 MME 100 mM Potassium | No |
| | thiocyanate | |
| JCSG | 25% (w/v) PEG 3350 100 mM Bis-Tris/ | Yes |
| | Hydrochloric acid pH 5.5 | (integrated into P1 |
| | | Space group) |
| JCSG | 30% v/v Jeffamine ® M-600, 0.1M HEPES pH | Yes |
| | 7.0 | |
| JCSG | 25% (w/v) PEG 3350 100 mM Bis-Tris/ | No |
| | Hydrochloric acid pH 5.5, 200 mM Lithium | |
| | sulfate | |
| PEGion | 0.2M Ammonium tartrate dibasic pH 7.0, 20% | Yes |
| | w/v Polyethylene glycol 3,350 | (integrated into P1 |
| | | Space group) |
| PEGion | 2% v/v TacsimateTM pH 6.0 0.1M BIS-TRIS | No |
| | pH 6.5 20% PEG3350 | |
| PEGion | 1% w/v Tryptone 0.001M Sodium azide, | No |
| | 0.05M HEPES sodium pH 7.0, 20% w/v | |
| | Polyethylene glycol 3,350 | |

[0787] Out of the tested conditions, four yielded crystals. Two yielded crystals which diffracted well (1.7 to 2.0 Å resolution) and were integrated into a P1 space group (Table 24). Structure resolution was possible by combining molecular replacement (MolRep) and software automated model building using Arp/Warp.

[0788] An exemplary crystal of a complex comprising Fab clone G8-P1C11 and HLA-PEPTIDE target A*02:01_AIFPGAVPAA (“G8”) is shown in FIG. 29. This crystal was grown using the commercial screen JCSG, using 25% (w/v) PEG 3350 100 mM Bis-Tris/Hydrochloric acid pH 5.5. This crystal was used to generate the structural data below.

[0789] Structural Analysis

[0790] The overall structure of a complex formed by binding of Fab clone G8-P1C11 to HLA-PEPTIDE target A*02:01_AIFPGAVPAA (“G8”) is shown in FIG. 30. The individual proteins are represented as surfaces. The interface area between the HLA and the VH and VL is 747 Å² and 285 Å², respectively.

[0791] During refinement electron density region corresponding to the peptide was clearly visible and allowed peptide side chain unambiguous positioning (FIG. 31) with the provided 10 residue peptide sequence AIFPGAVPAA. All areas relevant to interaction interfaces are refined; however, some refinement is still required in antibody constant regions.

[0792] Coding of monomers in the complex, which is referred to in the following data, is provided in Table 25 below.

TABLE 25
monomer coding used in crystal analysis

| Monomer | Monomer Code (ID) |
|---|---|
| HLA heavy chain (α1, α2, α3) | A |
| HLA β2 microglobulin (light chain) | B |
| Restricted peptide | I |
| Fab heavy chain (VH-CH1) | C |
| Fab light chain (VL-CL) | D |

[0793] HLA-Peptide Interaction

[0794] The restricted peptide AIFPGAVPAA is mainly buried in the HLA A*02:01 binding pocket with the residues P4G5A6 protruding towards the Fab. The interaction surface between the peptide and the HLA is 926 Å² and represents 76% of the total peptide solvent accessible surface (1215 Å²). The binding of the peptide to the HLA involves 9 hydrogen bonds and van der Waals interactions (FIG. 32) and yields a binding energy of −16.4 kcal/mol.

[0795] A list of hydrogen interactions is shown in table 26, below.

TABLE 26
Hydrogen bond interactions between restricted peptide and HLA.

| | Distance | |
|---|---|---|
| Peptide | (Angstroms) | HLA |
| I:ALA 1[N] | 2.72 | A:TYR 172[OH] |
| I:ALA 1[N] | 2.86 | A:TYR 8[OH] |
| I:ILE 2[N] | 2.81 | A:GLU 64[OE1] |
| I:ILE 2[N] | 3.71 | A:TYR 8[OH] |
| I:PHE 3[N] | 2.94 | A:TYR 100[OH] |
| I:ALA 1[O] | 2.67 ] | A:TYR 160[OH |
| I:PRO 8[O] | 2.93 | A:ARG 98[NH2] |
| I:PRO 8[O] | 2.89 | A:ARG 98[NH1] |
| I:ALA 9[O] | 2.71 | A:TRP 148[NE1] |
| I:ALA 1[N] | 2.72 | A:TYR 172[OH] |

[0796] A complete interface summary of the HLA and restricted peptide is shown in FIG. 37.

[0797] A complete list of the interacting residues from the restricted peptide and HLA is shown in FIG. 38.

[0798] Fab-Restricted Peptide Interactions

[0799] As most of the peptide is buried in the binding pocket of the HLA, only part of it available for interactions with the Fab chains. This is confirmed by the observation that 76% of the solvent accessible area of the peptide is occupied by its interaction with the HLA. Interaction surface between the peptide and the heavy chain and the light chain of the Fab is 114.3 and 113.9 Å² respectively. This corresponds to 18% of the total peptide solvent accessible area. PISA analysis showed that only two hydrogen bonds are involved in the interaction between the Fab and the peptide: hydroxyl group of Tyr32 from the light chain interacts with the backbone carbonyl of Gly5 of the peptide and the Tyr100A backbone amide interacting with the backbone carbonyl group of Pro4 of the peptide (See Table 27 for a list of the hydrogen interactions, below).

TABLE 27
Fab/restricted peptide H bond interactions

| Peptide | Distance (A) | Fab |
|---|---|---|
| I:PRO 4[O] | 3.0 | C:TYR 100A[OH] (VH) |
| I:GLY 5[O] | 3.7 | D:TRY 32[OH] (VL) |

[0800] The recognition mode of the Fab towards the restricted peptide is mainly through hydrophobic interactions and hydrogen bonds involving solvent molecules (FIGS. 33 and 34). The binding energy of the interaction between the Fab and restricted peptide is −2.0 and −1.9 kcal/mol with the VH and VL chains respectively.

[0801] A complete interface summary of the Fab VH chain and restricted peptide, and a complete list of the interacting residues from the Fab VH chain and restricted peptide, is shown in FIG. 39.

[0802] A complete interface summary of the Fab VL chain and restricted peptide, and a complete list of the interacting residues from the Fab VL chain and restricted peptide, is shown in FIG. 40.

[0803] Fab-HLA Interactions

[0804] The Fab and the HLA moieties interacts extensively as shown by interface area between the HLA and the Fab with a total of 1032 Å². The interaction between the HLA and the VH chain is composed of hydrophobic interactions, 6 H bonds and 3 salt bridges (FIG. 35, interaction between VH and HLA; and FIG. 36, interaction between VL and HLA). This interaction represents the major interaction are with 747 Å² (72% of the total contact area).

[0805] A table of the hydrogen bond contacts between the VH chain of the Fab and the HLA protein is shown below.

TABLE 28
hydrogen bond contacts between VH and HLA.

| Fab VH | Distance | HLA |
|---|---|---|
| C:SER 31[OG] | 2.71 | A:THR 164[OG1] |
| C:TYR 100A[OH] | 2.55 | A:THR 164[OG1] |
| C:SER 31[N] | 3.17 | A:GLU 167[OE1] |
| C:SER 30[N] | 2.86 | A:GLU 167[OE2] |
| C:TYR 32[OH] | 2.80 | A:LYS 67[NZ] |
| C:TYR 98[O] | 2.94 | A:ARG 66[NH2 ] |
| C:ASP 100[OD1] | 2.88 | A:ARG 66[NH1] |

[0806] A table of the salt bridge contacts between the VH chain of the Fab and the HLA protein is shown below.

TABLE 29
salt bridge contacts between VH and HLA.

| Fab VH | Distance | HLA |
|---|---|---|
| C:ASP 100[OD1] | 2.88 | A:ARG 66[NH1] |
| C:ASP 100[OD1] | 3.39 | A:ARG 66[NH2] |
| C:ASP 100[OD2] | 3.40 | A:ARG 66[NH1] |

[0807] A complete interface summary of the Fab VH chain HLA protein is shown in FIG. 41.

[0808] A complete list of the interacting residues from the Fab VH chain and HLA protein is shown in FIG. 42.

[0809] A table of the hydrogen bond contacts between the VL chain of the Fab and the HLA protein is shown in Table 30 below.

TABLE 30
hydrogen bonds between VL and HLA.

| Fab VL | Distance | HLA |
|---|---|---|
| D:ILE 94[N] | 3.56 | A:ALA 151[O] |
| D:SER 30[OG] | 2.84 | A:GLN 73[NE2] |
| D:ILE 94[O] | 3.00 | A:HIS 152[ND1] |

[0810] A complete interface summary of the Fab VL chain HLA protein is shown in FIG. 43.

[0811] A complete list of the interacting residues from the Fab VL chain and HLA protein is shown in FIG. 44.

[0812] While the invention has been particularly shown and described with reference to a preferred embodiment and various alternate embodiments, it will be understood by persons skilled in the relevant art that various changes in form and details can be made therein without departing from the spirit and scope of the invention.

[0813] All references, issued patents and patent applications cited within the body of the instant specification are hereby incorporated by reference in their entirety, for all purposes.

### Sequences

TABLE 4
VH and VL sequences of scFv hits that bind target G5
Table 4: VH and VLsequences of scFv hits that bind target G5

| Target | Clone | | |
|---|---|---|---|
| group | name | V_{H} | V_{L} |
| G5 | G5_P7_ | QVQLVQSGAEVKKPGASVKVSCK | DIVMTQSPLSLPVTPGEPASISCRSS |
| | E7 | ASGYTFTSYDINWVRQAPGQGLE | QSLLHSNGYNYLDWYLQKPGQSP |
| | | WMGIINPRSGSTKYAQKFQGRVT | QLLIYLGSYRASGVPDRFSGSGSGT |
| | | MTRDTSTSTVYMELSSLRSEDTAV | DFTLKISRVEAEDVGVYYCMQGL |
| | | YYCARDGVRYYGMDVWGQGTTV | QTPITFGQGTRLEIK |
| | | TVSSAS | |
| G5 | G5_P7_ | QVQLVQSGAEVKKPGSSVKVSCK | DIVMTQSPLSLPVTPGEPASISCRSS |
| | B3 | ASGYTFTSHDINWVRQAPGQGLE | QSLLHSNGYNYLDWYLQKPGQSP |
| | | WMGWMNPNSGDTGYAQKFQGR | QLLIYLGSSRASGVPDRFSGSGSGT |
| | | VTITADESTSTAYMELSSLRSEDTA | DFTLKISRVEAEDVGVYYCMQAL |
| | | VYYCARGVRGYDRSAGYWGQGT | QTPPTFGPGTKVDIK |
| | | LVIVSSAS | |
| G5 | G5_P7_ | EVQLLESGGGLVKPGGSLRLSCAA | DIQMTQSPSSLSASVGDRVTITCQA |
| | A5 | SGFSFSSYWMSWVRQAPGKGLEW | SQDISNYLNWYQQKPGKAPKLLIY |
| | | ISYISGDSGYTNYADSVKGRFTISR | AASSLQSGVPSRFSGSGSGTDFTLT |
| | | DDSKNTLYLQMNSLKTEDTAVYY | ISSLQPEDFATYYCQQAISFPLTFG |
| | | CASHDYGDYGEYFQHWGQGTLV | QSTKVEIK |
| | | TVSSAS | |
| G5 | G5_P7_ | EVQLLQSGGGLVQPGGSLRLSCAA | DIQMTQSPSSLSASVGDRVTITCRA |
| | F6 | SGFTFSNSDMNWVRQAPGKGLEW | SQSISSWLAWYQQKPGKAPKLLIY |
| | | VAYISSGSSTIYYADSVKGRFTISR | SASTLQSGVPSRFSGSGSGTDFTLT |
| | | DNSKNTLYLQMNSLRAEDTAVYY | ISSLQPEDFATYYCQQANSFPLTFG |
| | | CARVSWYCSSTSCGVNWFDPWGQ | GGTKVEIK |
| | | GTLVTVSSAS | |
| G5 | G5- | EVQLLESGGGLVQPGGSLRLSCAA | DIQMTQSPSSLSASVGDRVTITCRA |
| | P1B12 | SGFTFSNSDMNWVRQAPGKGLEW | SQSISSWLAWYQQKPGKAPKLLIY |
| | | VASISSSGGYINYADSVKGRFTISR | AASSLQSGVPSRFSGSGSGTDFTLT |
| | | DNSKNTLYLQMNSLRAEDTAVYY | ISSLQPEDFATYYCQQANSFPLTFG |
| | | CAKVNWNDGPYFDYWGQGTLVT | GGTKVEIK |
| | | VSS | |
| G5 | G5- | QVQLVQSGAEVKKPGSSVKVSCK | DIQMTQSPSSLSASVGDRVTITCRA |
| | P1C12 | ASGGTFSNFGVSWLRQAPGQGLE | SQSISSWLAWYQQKPGKAPKLLIY |
| | | WMGGIIPILGTANYAQKFQGRVTI | AASTLQSGVPSRFSGSGSGTDFTLT |
| | | TADESTSTAYMELSSLRSEDTAVY | ISSLQPEDFATYYCQQSYSIPLTFG |
| | | YCATPTNSGYYGPYYYYGMDVW | GGTKVEIK |
| | | GQGTTVTVSS | |
| G5 | G5-P1- | QVQLVQSGAEVKKPGASVKVSCK | DIQMTQSPSSLSASVGDRVTITCRA |
| | E05 | ASGYTFTSYNMHWVRQAPGQGLE | SQGISNYLNWYQQKPGKAPKLLIY |
| | | WMGWINPNSGGTNYAQKFQGRV | YASSLQSGVPSRFSGSGSGTDFTLT |
| | | TMTRDTSTSTVYMELSSLRSEDTA | ISSLQPEDFATYYCQQTYMMPYTF |
| | | VYYCARDVMDVWGQGTTVTVSS | GQGTKVEIK |
| G5 | G5- | QVQLVQSGAEVKKPGASVKVSCK | DIQMTQSPSSLSASVGDRVTITCRA |
| | P3G01 | ASGGTFSGYLVSWVRQAPGQGLE | SQSISSYLNWYQQKPGKAPKLLIY |
| | | WMGWINPNSGGTNTAQKFQGRVT | GASSLQSGVPSRFSGSGSGTDFTLT |
| | | MTRDTSTSTVYMELSSLRSEDTAV | ISSLQPEDFATYYCQQSYITPWTFG |
| | | YYCAREGYGMDVWGQGTTVTVS | QGTKVEIK |
| | | S | |
| G5 | G5- | QVQLVQSGAEVKKPGASVKVSCK | DIQMTQSPSSLSASVGDRVTITCRA |
| | P3G08 | ASGYIFRNYPMHWVRQAPGQGLE | SQGISNYLAWYQQKPGKAPKLLIY |
| | | WMGWINPDSGGTKYAQKFQGRV | AASSLQSGVPSRFSGSGSGTDFTLT |
| | | TMTRDTSTSTVYMELSSLRSEDTA | ISSLQPEDFATYYCQQSYITPYTFG |
| | | VYYCARDNGVGVDYWGQGTLVT | QGTKLEIK |
| | | VSS | |
| G5 | G5- | QVQLVQSGAEVKKPGASVKVSCK | DIVMTQSPDSLAVSLGERATINCK |
| | P4B02 | ASGYTFTGYYMHWVRQAPGQGL | TSQSVLYRPNNENYLAWYQQKPG |
| | | EWMGWMNPNIGNTGYAQKFQGR | QPPKLLIYQASIREPGVPDRFSGSG |
| | | VTMTRDTSTSTVYMELSSLRSEDT | SGTDFTLTISSLQAEDVAVYYCQQ |
| | | AVYYCARGIADSGSYYGNGRDYY | YYTTPYTFGQGTKLEIK |
| | | YGMDVWGQGTTVTVSS | |
| G5 | G5- | QVQLVQSGAEVKKPGASVKVSCK | DIQMTQSPSSLSASVGDRVTITCRA |
| | P4E04 | ASGGTFSSYGISWVRQAPGQGLE | SQSISRFLNWYQQKPGKAPKLLIY |
| | | WMGWINPNSGVTKYAQKFQGRV | GASRPQSGVPSRFSGSGSGTDFTLT |
| | | TMTRDTSTSTVYMELSSLRSEDTA | ISSLQPEDFATYYCQQSYSTPLTFG |
| | | VYYCARGDYYFDYWGQGTLVTV | QGTKVEIK |
| | | SS | |
| G5 | G5R4- | QVQLVQSGAEVKKPGASVKVSCK | DIVMTQSPLSLPVTPGEPASISCRSS |
| | P1D06 | ASGYTFTSYDINWVRQAPGQGLE | QSLLHSNGYNYLDWYLQKPGQSP |
| | | WMGWINPNSGDTKYSQKFQGRVT | QLLIYLGSHRASGVPDRFSGSGSGT |
| | | MTRDTSTSTVYMELSSLRSEDTAV | DFTLKISRVEAEDVGVYYCMQAL |
| | | YYCARDGTRYYGMDVWGQGTTV | QTPLTFGGGTKVEIK |
| | | TVSS | |
| G5 | G5R4- | EVQLLESGGGLVKPGGSLRLSCAA | EIVMTQSPATLSVSPGERATLSCRA |
| | P1H11 | SGFTFSDYYMSWVRQAPGKGLEW | SQSVSSNLAWYQQKPGQAPRLLIY |
| | | VSYISSSSSYTNYADSVKGRFTISR | AASARASGIPARFSGSGSGTEFTLT |
| | | DDSKNTLYLQMNSLKTEDTAVYY | ISSLQSEDFAVYYCQQYGSWPRTF |
| | | CARDVVANFDYWGQGTLVTVSS | GQGTKVEIK |
| G5 | G5R4- | QVQLVQSGAEVKKPGASVKVSCK | DIQMTQSPSSLSASVGDRVTITCRA |
| | P2B10 | ASGGTFSSYAISWVRQAPGQGLE | SQSISSYLNWYQQKPGKAPKLLIY |
| | | WMGWMNPDSGSTGYAQRFQGRV | GASRLQSGVPSRFSGSGSGTDFTLT |
| | | TMTRDTSTSTVYMELSSLRSEDTA | ISSLQPEDFATYYCQQSYSTPVTFG |
| | | VYYCARGHSSGWYYYYGMDVW | QGTKVEIK |
| | | GQGTTVTVSS | |
| G5 | G5R4- | EVQLLESGGGLVQPGGSLRLSCAA | DIVMTQSPLSLPVTPGEPASISCRSS |
| | P2H8 | SGFTFTSYSMHWVRQAPGKGLEW | QSLLHSNGYNYLDWYLQKPGQSP |
| | | VSSITSFTNTMYYADSVKGRFTISR | QLLIYLGSNRASGVPDRFSGSGSGT |
| | | DNSKNTLYLQMNSLRAEDTAVYY | DFTLKISRVEAEDVGVYYCMQAL |
| | | CAKDLGSYGGYYWGQGTLVTVSS | QTPYTFGQGTKVEIK |
| G5 | G5R4- | QVQLVQSGAEVKKPGASVKVSCK | DIQMTQSPSSLSASVGDRVTITCQA |
| | P3G05 | ASGYTFTNYYMHWVRQAPGQGL | SEDISNHLNWYQQKPGKAPKLLIY |
| | | EWMGIINPSGGSTSYAQKFQGRVT | DALSLQSGVPSRFSGSGSGTDFTLT |
| | | MTRDTSTSTVYMELSSLRSEDTAV | ISSLQPEDFATYYCQQANSFPFTFG |
| | | YYCARSWFGGFNYHYYGMDVWG | PGTKVDIK |
| | | QGTTVTVSS | |
| G5 | G5R4- | QVQLVQSGAEVKKPGASVKVSCK | DIVMTQSPLSLPVTPGEPASISCRSS |
| | P4A07 | ASGYTFTSYYMHWVRQAPGQGLE | QSLLHSNGYNYLDWYLQKPGQSP |
| | | WMGWMNPNSGNTGYAQKFQGR | QLLIYLGSNRASGVPDRFSGSGSGT |
| | | VTMTRDTSTSTVYMELSSLRSEDT | DFTLKISRVEAEDVGVYYCMQAL |
| | | AVYYCARELPIGYGMDVWGQGTT | QTPLTFGQGTKVEIK |
| | | VTVSS | |
| G5 | G5R4- | QVQLVQSGAEVKKPGSSVKVSCK | DIQMTQSPSSLSASVGDRVTITCRA |
| | P4B01 | ASGGTFSSYAISWVRQAPGQGLE | SQSISSYLNWYQQKPGKAPKLLIY |
| | | WMGGIIPIVGTANYAQKFQGRVTI | AASSLQSGVPSRFSGSGSGTDFTLT |
| | | TADESTSTAYMELSSLRSEDTAVY | ISSLQPEDFATYYCQQSYSTPLTFG |
| | | YCARGGSYYYYGMDVWGQGTTV | GGTKVEIK |
| | | TVSS | |

TABLE 5
CDR sequences of identified scFvs to G5, numbered according to the
Kabat numbering scheme
Table 5: CDR sequences of identified scFvs to G5, numbered according to the Kabat
numbering scheme

| Target | Clone | | | | | | |
|---|---|---|---|---|---|---|---|
| group | name | HCDR1 | HCDR2 | HCDR3 | LCDR1 | LCDR2 | LCDR3 |
| G5 | G5_P7_ | YTFTS | GIINPRS | CARDGVR | RSSQSLLH | LGSYR | CMQGLQ |
| | E7 | YDIN | GSTKYA | YYGMDV | SNGYNYL | AS | TPITF |
| | | | | W | D | | |
| G5 | G5_P7_ | YTFTS | GWMNP | CARGVRG | RSSQSLLH | LGSSR | CMQALQ |
| | B3 | HDIN | NSGDTG | YDRSAGY | SNGYNYL | AS | TPPTF |
| | | | YA | W | D | | |
| G5 | G5_P7_ | FSFSSY | SYISGDS | CASHDYG | QASQDISN | AASSL | CQQAISF |
| | A5 | WMS | GYTNYA | DYGEYFQ | YLN | QS | PLTF |
| | | | | HW | | | |
| G5 | G5_P7_ | FTFSNS | AYISSGS | CARVSWY | RASQSISS | SASTLQ | CQQANS |
| | F6 | DMN | STIYYA | CSSTSCGV | WLA | S | FPLTF |
| | | | | NWFDPW | | | |
| G5 | G5- | FTFSNS | ASISSSG | CAKVNW | RASQSISS | AASSL | CQQANS |
| | P1B12 | DMN | GYINYA | NDGPYFD | WLA | QS | FPLTF |
| | | | | YW | | | |
| G5 | G5- | GTFSNF | GGIIPILG | CATPTNS | RASQSISS | AASTL | CQQSYSI |
| | P1C12 | GVS | TANYA | GYYGPYY | WLA | QS | PLTF |
| | | | | YYGMDV | | | |
| | | | | W | | | |
| G5 | G5-P1- | YTFTS | GWINPN | CARDVM | RASQGISN | YASSL | CQQTYM |
| | E05 | YNMH | SGGTNY | DVW | YLN | QS | MPYTF |
| | | | A | | | | |
| G5 | G5- | GTFSG | GWINPN | CAREGYG | RASQSISS | GASSL | CQQSYIT |
| | P3G01 | YLVS | SGGTNT | MDVW | YLN | QS | PWTF |
| | | | A | | | | |
| G5 | G5- | YIFRNY | GWINPD | CARDNGV | RASQGISN | AASSL | CQQSYIT |
| | P3G08 | PMH | SGGTKY | GVDYW | YLA | QS | PYTF |
| | | | A | | | | |
| G5 | G5- | YTFTG | GWMNP | CARGIAD | KTSQSVL | QASIRE | CQQYYT |
| | P4B02 | YYMH | NIGNTG | SGSYYGN | YRPNNEN | P | TPYTF |
| | | | YA | GRDYYYG | YLA | | |
| | | | | MDVW | | | |
| G5 | G5- | GTFSSY | GWINPN | CARGDYY | RASQSISR | GASRP | CQQSYS |
| | P4E04 | GIS | SGVTKY | FDYW | FLN | QS | TPLTF |
| | | | A | | | | |
| G5 | G5R4- | YTFTS | GWINPN | CARDGTR | RSSQSLLH | LGSHR | CMQALQ |
| | P1D06 | YDIN | SGDTKY | YYGMDV | SNGYNYL | AS | TPLTF |
| | | | S | W | D | | |
| G5 | G5R4- | FTFSDY | SYISSSSS | CARDVVA | RASQSVSS | AASAR | CQQYGS |
| | P1H11 | YMS | YTNYA | NFDYW | NLA | AS | WPRTF |
| G5 | G5R4- | GTFSSY | GWMNP | CARGHSS | RASQSISS | GASRL | CQQSYS |
| | P2B10 | AIS | DSGSTG | GWYYYY | YLN | QS | TPVTF |
| | | | YA | GMDVW | | | |
| G5 | G5R4- | FTFTSY | SSITSFTN | CAKDLGS | RSSQSLLH | LGSNR | CMQALQ |
| | P2H8 | SMH | TMYYA | YGGYYW | SNGYNYL | AS | TPYTF |
| | | | | | D | | |
| G5 | G5R4- | YTFTN | GIINPSG | CARSWFG | QASEDISN | DALSL | CQQANS |
| | P3G05 | YYMH | GSTSYA | GFNYHYY | HLN | QS | FPFTF |
| | | | | GMDVW | | | |
| G5 | G5R4- | YTFTS | GWMNP | CARELPIG | RSSQSLLH | LGSNR | CMQALQ |
| | P4A07 | YYMH | NSGNTG | YGMDVW | SNGYNYL | AS | TPLTF |
| | | | YA | | D | | |
| G5 | G5R4- | GTFSSY | GGIIPVM | CARGGSY | RASQSISS | AASSL | CQQSYS |
| | P4B01 | AIS | GTGNYA | YYYGMD | YLN | QS | TPLTF |
| | | | | VW | | | |

TABLE 6
VH and VL sequences of scFv hits that bind target G8
Table 6: VH and VL sequences of scFv hits that bind target G8

| Target | Clone | | |
|---|---|---|---|
| group | name | V_{H} | V_{L} |
| G8 | G8- | QVQLVQSGAEVKKPGASVKVSCK | DIQMTQSPSSLSASVGDRVTITCRA |
| | P1A03 | ASGGTFSRSAITWVRQAPGQGLE | SQSITSYLNWYQQKPGKAPKLLIY |
| | | WMGWINPNSGATNYAQKFQGRV | DASNLETGVPSRFSGSGSGTDFTLT |
| | | TMTRDTSTSTVYMELSSLRSEDTA | ISSLQPEDFATYYCQQNYNSVTFG |
| | | VYYCARDDYGDYVAYFQHWGQG | QGTKLEIK |
| | | TLVTVSS | |
| G8 | G8- | QVQLVQSGAEVKKPGASVKVSCK | DIQMTQSPSSLSASVGDRVTITCW |
| | P1A04 | ASGYPFIGQYLHWVRQAPGQGLE | ASQGISSYLAWYQQKPGKAPKLLI |
| | | WMGIINPSGDSATYAQKFQGRVT | YAASSLQSGVPSRFSGSGSGTDFTL |
| | | MTRDTSTSTVYMELSSLRSEDTAV | TISSLQPEDFATYYCQQSYNTPWT |
| | | YYCARDLSYYYGMDVWGQGTTV | FGPGTKVDIK |
| | | TVSS | |
| G8 | G8- | QVQLVQSGAEVKKPGASVKVSCK | DIQMTQSPSSLSASVGDRVTITCRA |
| | P1A06 | ASGYTFTNYYMHWVRQAPGQGL | SQAISNSLAWYQQKPGKAPKLLIY |
| | | EWMGWMNPIGGGTGYAQKFQGR | AASTLQSGVPSRFSGSGSGTDFTLT |
| | | VTMTRDTSTSTVYMELSSLRSEDT | ISSLQPEDFATYYCGQSYSTPPTFG |
| | | AVYYCARVYDFWSVLSGFDIWGQ | QGTKLEIK |
| | | GTLVTVSS | |
| G8 | G8- | EVQLLESGGGLVQPGGSLRLSCAA | DIQMTQSPSSLSASVGDRVTITCRA |
| | P1B03 | SGFTFSDYYMSWVRQAPGKGLEW | SQSISSYLNWYQQKPGKAPKLLIY |
| | | VSGINWNGGSTGYADSVKGRFTIS | KASSLESGVPSRFSGSGSGTDFTLT |
| | | RDNSKNTLYLQMNSLRAEDTAVY | ISSLQPEDFATYYCQQSYSAPYTFG |
| | | YCARVEQGYDIYYYYYMDVWGK | PGTKVDIK |
| | | GTTVTVSS | |
| G8 | G8- | QVQLVQSGAEVKKPGASVKVSCK | DIQMTQSPSSLSASVGDRVTITCQA |
| | P1C11 | ASGGTLSSYPINWVRQAPGQGLE | SQDISNYLNWYQQKPGKAPKLLIY |
| | | WMGWISTYSGHADYAQKLQGRV | AASSLQSGVPSRFSGSGSGTDFTLT |
| | | TMTRDTSTSTVYMELSSLRSEDTA | ISSLQPEDFATYYCQQSYSIPPTFG |
| | | VYYCARSYDYGDYLNFDYWGQG | GGTKVDIK |
| | | TLVTVSS | |
| G8 | G8- | EVQLLESGGGLVQPGGSLRLSCAA | DIQMTQSPSSLSASVGDRVTITCQA |
| | P1D02 | SGFTFSSYWMSWVRQAPGKGLEW | SQDISNYLNWYQQKPGKAPKLLIY |
| | | VSSISGRGDNTYYADSVKGRFTISR | AASSLQSGVPSRFSGSGSGTDFTLT |
| | | DNSKNTLYLQMNSLRAEDTAVYY | ISSLQPEDFATYYCQQSYSAPYTFG |
| | | CARASGSGYYYYYGMDVWGQGT | GGTKVEIK |
| | | TVTVSS | |
| G8 | G8- | QVQLVQSGAEVKKPGASVKVSCK | DIQMTQSPSSLSASVGDRVTITCRA |
| | P1H08 | ASGYTFGNYFMHWVRQAPGQGLE | SQGINSYLAWYQQKPGKAPKLLIY |
| | | WMGMVNPSGGSETFAQKFQGRVT | DASNLETGVPSRFSGSGSGTDFTLT |
| | | MTRDTSTSTVYMELSSLRSEDTAV | ISSLQPEDFATYYCQQHNSYPPTFG |
| | | YYCAASTWIQPFDYWGQGTLVTV | QGTKLEIK |
| | | SS | |
| G8 | G8- | EVQLLESGGGLVQPGGSLRLSCAA | DIQMTQSPSSLSASVGDRVTITCRA |
| | P2B05 | SGFDFSIYSMNWVRQAPGKGLEW | SQSISRWLAWYQQKPGKAPKLLIY |
| | | VSAISGSGGSTYYADSVKGRFTISR | AASSLQSGVPSRFSGSGSGTDFTLT |
| | | DNSKNTLYLQMNSLRAEDTAVYY | ISSLQPEDFATYYCQQYSTYPITIG |
| | | CASNGNYYGSGSYYNYWGQGTL | QGTKVEIK |
| | | VTVSS | |
| G8 | G8- | QVQLVQSGAEVKKPGASVKVSCK | DIQMTQSPSSLSASVGDRVTITCRA |
| | P2E06 | ASGYTLTTYYMHWVRQAPGQGLE | SQGISNSLAWYQQKPGKAPKLLIY |
| | | WMGWINPNSGGTNYAQKFQGRV | AASSLQSGVPSRFSGSGSGTDFTLT |
| | | TMTRDTSTSTVYMELSSLRSEDTA | ISSLQPEDFATYYCQQANSFPWTF |
| | | VYYCARAVYYDFWSGPFDYWGQ | GQGTKLEIK |
| | | GTLVTVSS | |
| G8 | R3G8- | QVQLVQSGAEVKKPGASVKVSCK | DIQMTQSPSSLSASVGDRVTITCRA |
| | P2C10 | ASGYTFTSYYMHWVRQAPGQGLE | SQDVSTWLAWYQQKPGKAPKLLI |
| | | WMGWINPYSGGTNYAQKFQGRV | YAASSLQSGVPSRFSGSGSGTDFTL |
| | | TMTRDTSTSTVYMELSSLRSEDTA | TISSLQPEDFATYYCQQSHSTPQTF |
| | | VYYCAKGGIYYGSGSYPSWGQGT | GQGTKVEIK |
| | | LVTVSS | |
| G8 | R3G8- | QVQLVQSGAEVKKPGSSVKVSCK | DIQMTQSPSSLSASVGDRVTITCRA |
| | P2E04 | ASGGTFSSYGVSWVRQAPGQGLE | SQSISSWLAWYQQKPGKAPKLLIY |
| | | WMGWISPYSGNTDYAQKFQGRVT | DASNLETGVPSRFSGSGSGTDFTLT |
| | | ITADESTSTAYMELSSLRSEDTAVY | ISSLQPEDFATYYCQQSYSTPLTFG |
| | | YCARGLYYMDVWGKGTTVTVSS | GGTKLEIK |
| G8 | R3G8- | QVQLVQSGAEVKKPGASVKVSCK | DIQMTQSPSSLSASVGDRVTITCRA |
| | P4F05 | ASGYTFSNMYLHWVRQAPGQGLE | SQGISNYLAWYQQKPGKAPKLLIY |
| | | WMGWINPNTGDTNYAQTFQGRV | AASTLQSGVPSRFSGSGSGTDFTLT |
| | | TMTRDTSTSTVYMELSSLRSEDTA | ISSLQPEDFATYYCQQSYSTPLTFG |
| | | VYYCARGLYGDYFLYYGMDVWG | GGTKVEIK |
| | | QGTKVTVSS | |
| G8 | R3G8- | QVQLVQSGAEVKKPGASVKVSCK | DIQMTQSPSSLSASVGDRVTITCRA |
| | P5C03 | ASGYTFTSYYMHWVRQAPGQGLE | SQGISNWLAWYQQKPGKAPKLLI |
| | | WMGWMNPNSGNTGYAQKFQGR | YAASTLQSGVPSRFSGSGSGTDFTL |
| | | VTMTRDTSTSTVYMELSSLRSEDT | TISSLQPEDFATYYCQQTYSTPWTF |
| | | AVYYCARGLLGFGEFLTYGMDV | GQGTKLEIK |
| | | WGQGTLVTVSS | |
| G8 | R3G8- | QVQLVQSGAEVKKPGASVKVSCK | EIVMTQSPATLSVSPGERATLSCRA |
| | P5F02 | ASGYTFTGYYIHWVRQAPGQGLE | SQSVGNSLAWYQQKPGQAPRLLIY |
| | | WMGVINPSGGSTTYAQKLQGRVT | GASTRATGIPARFSGSGSGTEFTLTI |
| | | MTRDTSTSTVYMELSSLRSEDTAV | SSLQSEDFAVYYCQQYGSSPYTFG |
| | | YYCARDRDSSWTYYYYGMDVWG | QGTKVEIK |
| | | QGTTVTVSS | |
| G8 | R3G8- | QVQLVQSGAEVKKPGASVKVSCK | DIQMTQSPSSLSASVGDRVTITCRA |
| | P5G08 | ASGYTFTSNYMHWVRQAPGQGLE | SQSISGYLNWYQQKPGKAPKLLIY |
| | | WMGWMNPNSGNTGYAQKFQGR | AASSLQSGVPSRFSGSGSGTDFTLT |
| | | VTMTRDTSTSTVYMELSSLRSEDT | ISSLQPEDFATYYCQQSHSTPLTFG |
| | | AVYYCARGLYGDYFLYYGMDVW | QGTKVEIK |
| | | GQGTTVTVSS | |
| G8 | G8- | QVQLVQSGAEVKKPGASVKVSCK | DIQMTQSPSSLSASVGDRVTITCRA |
| | P1C01 | ASGGTFSSHAISWVRQAPGQGLE | SQNIYTYLNWYQQKPGKAPKLLIY |
| | | WMGVIIPSGGTSYTQKFQGRVTMT | DASNLETGVPSRFSGSGSGTDFTLT |
| | | RDTSTSTVYMELSSLRSEDTAVYY | ISSLQPEDFATYYCQQANGFPLTFG |
| | | CARGDYYDSSGYYFPVYFDYWGQ | GGTKVEIK |
| | | GTLVTVSS | |
| G8 | G8- | QVQLVQSGAEVKKPGASVKVSCK | DIQMTQSPSSLSASVGDRVTITCRA |
| | P2C11 | ASGYTFTSYAMNWVRQAPGQGLE | SQSISSYLNWYQQKPGKAPKLLIY |
| | | WMGWINPNSGGTNYAQKFQGRV | AASSLQSGVPSRFSGSGSGTDFTLT |
| | | TMTRDTSTSTVYMELSSLRSEDTA | ISSLQPEDFATYYCQQSYSTPLTFG |
| | | VYYCARDPFWSGHYYYYGMDVW | GGTKVEIK |
| | | GQGTTVTVSS | |

TABLE 7
CDR sequences of identified scFvs to G8, numbered according to the
Kabat numbering scheme
Table 7: CDR sequences of identified scFvs to G8, numbered according to the Kabat
numbering scheme

| Target | Clone | | | | | | |
|---|---|---|---|---|---|---|---|
| group | name | HCDR1 | HCDR2 | HCDR3 | LCDR1 | LCDR2 | LCDR3 |
| G8 | G8- | GTFSRS | GWINPN | CARDDYG | RASQSITS | DASNL | CQQNYN |
| | P1A03 | AIT | SGATNY | DYVAYFQ | YLN | ET | SVTF |
| | | | A | HW | | | |
| G8 | G8- | YPFIGQ | GIINPSG | CARDLSY | WASQGISS | AASSL | CQQSYN |
| | P1A04 | YLH | DSATYA | YYGMDV | YLA | QS | TPWTF |
| | | | | W | | | |
| G8 | G8- | YTFTN | GWMNPI | CARVYDF | RASQAISN | AASTL | CGQSYS |
| | P1A06 | YYMH | GGGTGY | WSVLSGF | SLA | QS | TPPTF |
| | | | A | DIW | | | |
| G8 | G8- | FTFSDY | SGINWN | CARVEQG | RASQSISS | KASSLE | CQQSYS |
| | P1B03 | YMS | GGSTGY | YDIYYYY | YLN | S | APYTF |
| | | | A | YMDVW | | | |
| G8 | G8- | GTLSS | GWISTYS | CARSYDY | QASQDISN | AASSL | CQQSYSI |
| | P1C11 | YPIN | GHADYA | GDYLNFD | YLN | QS | PPTF |
| | | | | YW | | | |
| G8 | G8- | FTFSSY | SSISGRG | CARASGS | QASQDISN | AASSL | CQQSYS |
| | P1D02 | WMS | DNTYYA | GYYYYYG | YLN | QS | APYTF |
| | | | | MDVW | | | |
| G8 | G8- | YTFGN | GMVNPS | CAASTWI | RASQGINS | DASNL | CQQHNS |
| | P1H08 | YFMH | GGSETFA | QPFDYW | YLA | ET | YPPTF |
| G8 | G8- | FDFSIY | SAISGSG | CASNGNY | RASQSISR | AASSL | CQQYST |
| | P2B05 | SMN | GSTYYA | YGSGSYY | WLA | QS | YPITI |
| | | | | NYW | | | |
| G8 | G8- | YTLTT | GWINPN | CARAVYY | RASQGISN | AASSL | CQQANS |
| | P2E06 | YYMH | SGGTNY | DFWSGPF | SLA | QS | FPWTF |
| | | | A | DYW | | | |
| G8 | R3G8- | YTFTS | GWINPY | CAKGGIY | RASQDVS | AASSL | CQQSHS |
| | P2C10 | YYMH | SGGTNY | YGSGSYP | TWLA | QS | TPQTF |
| | | | A | SW | | | |
| G8 | R3G8- | GTFSSY | GWISPYS | CARGLYY | RASQSISS | DASNL | CQQSYS |
| | P2E04 | GVS | GNTDYA | MDVW | WLA | ET | TPLTF |
| G8 | R3G8- | YTFSN | GWINPN | CARGLYG | RASQGISN | AASTL | CQQSYS |
| | P4F05 | MYLH | TGDTNY | DYFLYYG | YLA | QS | TPLTF |
| | | | A | MDVW | | | |
| G8 | R3G8- | YTFTS | GWMNP | CARGLLG | RASQGISN | AASTL | CQQTYS |
| | P5C03 | YYMH | NSGNTG | FGEFLTY | WLA | QS | TPWTF |
| | | | YA | GMDVW | | | |
| G8 | R3G8- | YTFTG | GVINPSG | CARDRDS | RASQSVG | GASTR | CQQYGS |
| | P5F02 | YYIH | GSTTYA | SWTYYYY | NSLA | AT | SPYTF |
| | | | | GMDVW | | | |
| G8 | R3G8- | YTFTS | GWMNP | CARGLYG | RASQSISG | AASSL | CQQSHS |
| | P5G08 | NYMH | NSGNTG | DYFLYYG | YLN | QS | TPLTF |
| | | | YA | MDVW | | | |
| G8 | G8- | GTFSSH | GVIIPSG | CARGDYY | RASQNIYT | DASNL | CQQANG |
| | P1C01 | AIS | GTSYT | DSSGYYF | YLN | ET | FPLTF |
| | | | | PVYFDYW | | | |
| G8 | G8- | YTFTS | GWINPN | CAKDPFW | RASQSISS | AASSL | CQQSYS |
| | P2C11 | YAMN | SGGTNY | SGHYYYY | YLN | QS | TPLTF |
| | | | A | GMDVW | | | |

TABLE 8
VH and VL sequences of scFv hits that bind target G10
Table 8: VH and VL sequences of scFv hits that bind target G10

| Target | Clone | | |
|---|---|---|---|
| group | name | V_{H} | V_{L} |
| G10 | R3G10- | EVQLLESGGGLVKPGGSLRLSCAAS | [sequence omitted] |
| | P1A07 | GFTFSSYWMSWVRQAPGKGLEWVS | QGISNYLAWYQQKPGKAPKLLIYAAS |
| | | GISARSGRTYYADSVKGRFTISRDDS | SLQGGVPSRFSGSGSGTDFTLTISSL |
| | | KNTLYLQMNSLKTEDTAVYYCARDQ | QPEDFATYYCQQYFTTPYTFGQGTKL |
| | | DTIFGVVITWFDPWGQGTLVTVSS | EIK |
| G10 | R3G10- | [sequence omitted] | [sequence omitted] |
| | P1B07 | GYTFTSYYMHWVRQAPGQGLEWMG | QSISRWLAWYQQKPGKAPKLLIFDAS |
| | | IIHPGGGTTSYAQKFQGRVTMTRDTS | RLQSGVPSRFSGSGSGTDFTLTISSL |
| | | TSTVYMELSSLRSEDTAVYYCARDKV | QPEDFATYYCQQAEAFPYTFGQGTK |
| | | YGDGFDPWGQGTLVTVSS | VEIK |
| G10 | R3G10- | [sequence omitted] | [sequence omitted] |
| | P1E12 | GYIFTGYYMHWVRQAPGQGLEWMG | QSISSYLNWYQQKPGKAPKLLIYAAS |
| | | MIGPSDGSTSYAQKFQGRVTMTRDT | SLQSGVPSRFSGSGSGTDFTLTISSL |
| | | STSTVYMELSSLRSEDTAVYYCARED | QPEDFATYYCQQSYSTPITFGQGTRL |
| | | DSMDVWGKGTTVTVSS | EIK |
| G10 | R3G10- | [sequence omitted] | [sequence omitted] |
| | P1F06 | GYTFIGYYMHWVRQAPGQGLEWMG | QSISNYLNWYQQKPGKAPKLLIYKAS |
| | | MIGPSDGSTSYAQKFQGRVTMTRDT | SLESGVPSRFSGSGSGTDFTLTISSL |
| | | STSTVYMELSSLRSEDTAVYYCARDS | QPEDFATYYCQQSYIIPYTFGQGTKL |
| | | SGLDPWGQGTLVTVSS | EIK |
| G10 | R3G10- | [sequence omitted] | [sequence omitted] |
| | P1H01 | GYTFTGYYMHWVRQAPGQGLEWMG | QSISNYLNWYQQKPGKAPKLLIYAAS |
| | | MIGPSDGSTSYAQKFQGRVTMTRDT | SLQSGVPSRFSGSGSGTDFTLTISSL |
| | | STSTVYMELSSLRSEDTAVYYCARGV | QPEDFATYYCHQTYSTPLTFGQGTKV |
| | | GNLDYWGQGTLVTVSS | EIK |
| G10 | R3G10- | [sequence omitted] | [sequence omitted] |
| | P1H08 | GVTFSTSAISWVRQAPGQGLEWMG | QGISNYLAWYQQKPGKAPKWYSAS |
| | | WISPYNGNTDYAQMLQGRVTMTRDT | NLQSGVPSRFSGSGSGTDFTLTISSL |
| | | STSTVYMELSSLRSEDTAVYYCARDA | QPEDFATYYCQQAYSFPVVTFGQGTK |
| | | HQYYDFWSGYYSGTYYYGMDVWGQ | VEIK |
| | | GTTVTVSS | |
| G10 | R3G10- | [sequence omitted] | [sequence omitted] |
| | P2C04 | GGTFSNSIINWVRQAPGQGLEWMG | QNISSYLNWYQQKPGKAPKLLIYAAS |
| | | WMNPNSGNTNYAQKFQGRVTMTRD | SLQSGVPSRFSGSGSGTDFTLTISSL |
| | | TSTSTVYMELSSLRSEDTAVYYCARE | QPEDFATYYCQQGYSTPLTFGQGTR |
| | | QWPSYWYFDLWGRGTLVTVSS | LEIK |
| G10 | R3G10- | [sequence omitted] | [sequence omitted] |
| | P2G11 | GGTFSTHDINWVRQAPGQGLEWMG | QDISRYLAWYQQKPGKAPKLLIYDAS |
| | | VINPSGGSAIYAQKFQGRVTMTRDTS | NLETGVPSRFSGSGSGTDFTLTISSL |
| | | TSTVYMELSSLRSEDTAVYYCARDRG | QPEDFATYYCQQANSFPRTFGQGTK |
| | | YSYGYFDYWGQGTLVTVSS | VEIK |
| G10 | R3G10- | [sequence omitted] | DIQMTQSPSSLSASVGDRVTITCQAS |
| | P3E04 | GNTFIGYYVHWVRQAPGQGLEWVGII | QDISNYLNWYQQKPGKAPKLLIYAAS |
| | | NPNGGSISYAQKFQGRVTMTRDTST | NLQSGVPSRFSGSGSGTDFTLTISSL |
| | | STVYMELSSLRSEDTAVYYCARGSG | QPEDFATYYCQQANSLPYTFGQGTK |
| | | DPNYYYYYGLDVWGQGTTVTVSS | VEIK |
| G10 | R3G10- | [sequence omitted] | [sequence omitted] |
| | P4A02 | GYTLSYYYMHWVRQAPGQGLEWMG | QSISSYLNWYQQKPGKAPKLLIYAAS |
| | | MIGPSDGSTSYAQRFQGRVTMTRDT | TLQNGVPSRFSGSGSGTDFTLTISSL |
| | | STGTVYMELSSLRSEDTAVYYCARDT | QPEDFATYYCQQSYSTPFTFGPGTK |
| | | GDHFDYWGQGTLVTVSS | VDIK |
| G10 | R3G10- | [sequence omitted] | [sequence omitted] |
| | P4C05 | GYTFTGYYMHWVRQAPGQGLEWMG | QRISSYLNWYQQKPGKAPKWYSAS |
| | | IIGPSDGSTTYAQKFQGRVTMTRDTS | TLQSGVPSRFSGSGSGTDFTLTISSL |
| | | TSTVYMELSSLRSEDTAVYYCARAEN | QPEDFATYYCQQSYSTPFTFGPGTK |
| | | GMDVWGQGTTVTVSS | VDIK |
| G10 | R3G10- | [sequence omitted] | [sequence omitted] |
| | P4D04 | GYTFTGYYVHWVRQAPGQGLEWMG | QSISSYLAWYQQKPGKAPKLLIYDAS |
| | | IIAPSDGSTNYAQKFQGRVTMTRDTS | KLETGVPSRFSGSGSGTDFTLTISSL |
| | | TSTVYMELSSLRSEDTAVYYCARDPG | QPEDFATYYCQQSYGVPTFGQGTKL |
| | | GYMDVWGKGTTVTVSS | EIK |
| G10 | R3G10- | [sequence omitted] | [sequence omitted] |
| | P4D10 | GYTFTGYYLHWVRQAPGQGLEWMG | QGISSWLAWYQQKPGKAPKLLIYDAS |
| | | MIGPSDGSTSYAQKFQGRVTMTRDT | NLETGVPSRFSGSGSGTDFTLTISSL |
| | | STSTVYMELSSLRSEDTAVYYCARDG | QPEDFATYYCQQSYSTPLTFGGGTK |
| | | DAFDIWGQGTMVTVSS | VEIK |
| G10 | R3G10- | [sequence omitted] | [sequence omitted] |
| | P4E07 | GYTFTGYYMHWVRQAPGQGLEWMG | QSISSYLNWYQQKPGKAPKLLIYAAS |
| | | RISPSDGSTTYAPKFQGRVTITADEST | SLQSGVPSRFSGSGSGTDFTLTISSL |
| | | STAYMELSSLRSEDTAVYYCARDMG | QPEDFATYYCQQSYSTPLTFGGGTK |
| | | DAFDIWGQGTTVTVSS | VEIK |
| G10 | R3G10- | [sequence omitted] | [sequence omitted] |
| | P4E12 | GYTFTGYYMHWVRQAPGQGLEWMG | QGISTYLAWYQQKPGKAPKLLIYDAS |
| | | MIGPSDGSTSYAQRFQGRVTMTRDT | SLQSGVPSRFSGSGSGTDFTLTISSL |
| | | STSTVYMELSSLRSEDTAVYYCAREE | QPEDFATYYCQQYYSYPWTFGQGTR |
| | | DGMDVWGQGTTVTVSS | LEIK |
| G10 | R3G10- | [sequence omitted] | [sequence omitted] |
| | P4G06 | GYTLSYYYMHWVRQAPGQGLEWMG | QSISSYLNWYQQKPGKAPKLLIYAAS |
| | | MIGPSDGSTSYAQRFQGRVTMTRDT | TLQNGVPSRFSGSGSGTDFTLTISSL |
| | | STGTVYMELSSLRSEDTAVYYCARDT | QPEDFATYYCQQSYSTPFTFGPGTK |
| | | GDHFDYWGQGTLVTVSS | VDIK |
| G10 | R3G10- | [sequence omitted] | DIVMTQSPLSLPVTPGEPASISCRSSQ |
| | P5A08 | GGTFNNFAISWVRQAPGQGLEWMG | SLLHSNGYNYLDWYLQKPGQSPQLLI |
| | | GIIPIFDATNYAQKFQGRVTFTADEST | YLGSNRASGVPDRFSGSGSGTDFTL |
| | | STAYMELSSLRSEDTAVYYCARGEYS | KISRVEAEDVGVYYCMQTLKTPLSFG |
| | | SGFFFVGWFDLWGRGTQVTVSS | GGTKVEIK |
| G10 | R3G10- | [sequence omitted] | [sequence omitted] |
| | P5C08 | GYNFTGYYMHWVRQAPGQGLEWM | QSISSYLNWYQQKPGKAPKLLIYAAS |
| | | GIIAPSDGSTNYAQKFQGRVTMTRDT | SLQSGVPSRFSGSGSGTDFTLTISSL |
| | | STSTVYMELSSLRSEDTAVYYCARET | QPEDFATYYCQQSYSTPLTFGGGTK |
| | | GDDAFDIWGQGTMVTVSS | VEIK |

TABLE 9
CDR sequences of identified scFvs to G10, numbered according to the
Kabat numbering scheme
Table 9: CDR sequences of identified scFvs to G10, numbered according to the Kabat
numbering scheme

| Target | Clone | | | | | | |
|---|---|---|---|---|---|---|---|
| group | name | HCDR1 | HCDR2 | HCDR3 | LCDR1 | LCDR2 | LCDR3 |
| G10 | R3G10- | FTFSSYW | SGISARS | CARDQDTI | RASQGISN | AASSLQ | CQQYFTT |
| | P1A07 | MS | GRTYYA | FGVVITWF | YLA | G | PYTF |
| | | | | DPW | | | |
| G10 | R3G10- | YTFTSYY | GIIHPGG | CARDKVYG | RASQSISR | DASRLQ | CQQAEAF |
| | P1B07 | MH | GTTSYA | DGFDPW | WLA | S | PYTF |
| G10 | R3G10- | YIFTGYYM | GMIGPSD | CAREDDS | RASQSISS | AASSLQ | CQQSYST |
| | P1E12 | H | GSTSYA | MDVW | YLN | S | PITF |
| G10 | R3G10- | YTFIGYYM | GMIGPSD | CARDSSGL | RASQSISN | KASSLE | CQQSYIIP |
| | P1F06 | H | GSTSYA | DPW | YLN | S | YTF |
| G10 | R3G10- | YTFTGYY | GMIGPSD | CARGVGNL | RASQSISN | AASSLQ | CHQTYST |
| | P1H01 | MH | GSTSYA | DYW | YLN | S | PLTF |
| G10 | R3G10- | VTFSTSAI | GWISPYN | CARDAHQ | RASQGISN | SASNLQ | CQQAYSF |
| | P1H08 | S | GNTDYA | YYDFWSG | YLA | S | PVVTF |
| | | | | YYSGTYYY | | | |
| | | | | GMDVW | | | |
| G10 | R3G10- | GTFSNSII | GWMNPN | CAREQWP | RASQNISS | AASSLQ | CQQGYS |
| | P2C04 | N | SGNTNYA | SYWYFDL | YLN | S | TPLTF |
| | | | | W | | | |
| G10 | R3G10- | GTFSTHDI | GVINPSG | CARDRGY | RASQDISR | DASNLE | CQQANS |
| | P2G11 | N | GSAIYA | SYGYFDY | YLA | T | FPRTF |
| | | | | W | | | |
| G10 | R3G10- | NTFIGYYV | GIINPNG | CARGSGD | QASQDISN | AASNLQ | CQQANSL |
| | P3E04 | H | GSISYA | PNYYYYYG | YLN | S | PYTF |
| | | | | LDVW | | | |
| G10 | R3G10- | YTLSYYY | GMIGPSD | CARDTGD | RASQSISS | AASTLQ | CQQSYST |
| | P4A02 | MH | GSTSYA | HFDYW | YLN | N | PFTF |
| G10 | R3G10- | YTFTGYY | GIIGPSDG | CARAENG | RASQRISS | SASTLQ | CQQSYST |
| | P4C05 | MH | STTYA | MDVVV | YLN | S | PFTF |
| G10 | R3G10- | YTFTGYY | GIIAPSDG | CARDPGG | RASQSISS | DASKLE | CQQSYG |
| | P4D04 | VH | STNYA | YMDVW | YLA | T | VPTF |
| G10 | R3G10- | YTFTGYYL | GMIGPSD | CARDGDAF | RASQGISS | DASNLE | CQQSYST |
| | P4D10 | H | GSTSYA | DIW | WLA | T | PLTF |
| G10 | R3G10- | YTFTGYY | GRISPSD | CARDMGD | RASQSISS | AASSLQ | CQQSYST |
| | P4E07 | MH | GSTTYA | AFDIW | YLN | S | PLTF |
| G10 | R3G10- | YTFTGYY | GMIGPSD | CAREEDG | RASQG1ST | DASSLQ | CQQYYS |
| | P4E12 | MH | GSTSYA | MDVVV | YLA | S | YPVVTF |
| G10 | R3G10- | YTLSYYY | GMIGPSD | CARDTGD | RASQSISS | AASTLQ | CQQSYST |
| | P4G06 | MH | GSTSYA | HFDYW | YLN | N | PFTF |
| G10 | R3G10- | GTFNNFAI | GGIIPIFD | CARGEYSS | RSSQSLLH | LGSNRA | CMQTLKT |
| | P5A08 | S | ATNYA | GFFFVGWF | SNGYNYLD | S | PLSF |
| | | | | DLW | | | |
| G10 | R3G10- | YNFTGYY | GIIAPSDG | CARETGDD | RASQSISS | AASSLQ | CQQSYST |
| | P5C08 | MH | STNYA | AFDIW | YLN | S | PLTF |

TABLE 15
(CDR3 sequences for G10 TCRs)
Table 15: CDR3 Sequences for TCRs binding HLA-
PEPTIDE A*01: 01_ASSLPTTMNY

| TCR ID# | ALPHA CDR3 | BETA CDR3 |
|---|---|---|
| 1 | CAGPGNTGKLIF | CASSNAGDQPQHF |
| 2 | CGTASNFGNEKLTF | CASSITSGGDTQYF |
| 3 | CGTASNFGNEKLTF | CASSMAANYGYTF |
| 4 | CGTASNFGNEKLTF | CASSMAGPYYGYTF |
| 5 | CGTASNFGNEKLTF | CASGPTSSSSYEQYF |
| 6 | CGTASNFGNEKLTF | CASSIDRDYEQYF |
| 7 | CAIAGGGGADGLTF | CASSLGTNYEQYF |
| 8 | CAIAGGGGADGLTF | CASSMAGPYYGYTF |
| 9 | CAIAGGGGADGLTF | CASSIDRDYEQYF |
| 10 | CAMREGWSGGGADGLTF | CASSRTSGGYNEQFF |
| 11 | CAMREGWSGGGADGLTF | CASSITSGGDTQYF |
| 12 | CAAARGRDDKIIF | CASSLSPRGDYNNEQFF |
| 13 | CAAARGRDDKIIF | CASSQVGTGSYEQYF |
| 14 | CAAARGRDDKIIF | CASSNAGDQPQHF |
| 15 | CAAARGRDDKIIF | CASSFSGLYNEQFF |
| 16 | CAARWGPSSDDKIIF | CASSSWVYQPQHF |
| 17 | CALSEATKDDKIIF | CASSIWGNEQYF |
| 18 | CALSEENRDDKIIF | CASTSGYEQYF |
| 19 | CAGQLGIQGAQKLVF | CASSTGVGVSYEQYF |
| 20 | CAGQLGIQGAQKLVF | CASSITSGGDTQYF |
| 21 | CAGQLGIQGAQKLVF | CASSMAGPYYGYTF |
| 22 | CAVRGSYQKVTF | CASSITSGGDTQYF |
| 23 | CAVRGSYQKVTF | CASSMAGPYYGYTF |
| 24 | CAVRGSYQKVTF | CASSQVGTGSYEQYF |
| 25 | CAVRGSYQKVTF | CASSMAANYGYTF |
| 26 | CAMSAEENQGAQKLVF | CASSIFAGAHLTEAFF |
| 27 | CAVRENPNDYKLSF | CASSITSGGDTQYF |
| 28 | CARGGATNKLIF | CASSYPGQPYGYTF |
| 29 | CAGQVENARLMF | CASSPLKGNTEAFF |
| 30 | CAVRENPNDYKLSF | CASSQVGTGSYEQYF |
| 31 | CARGGATNKLIF | CASSMAGPYYGYTF |
| 32 | CAISGYALNF | CASSPEPAGNTGELFF |
| 33 | CAVRENPNDYKLSF | CASSMAANYGYTF |
| 34 | CAVRENPNDYKLSF | CASSIDRDYEQYF |
| 35 | CAGPEYGNKLVF | CLSNTGEGTEAFF |
| 36 | CARGGATNKLIF | CASSITSGGDTQYF |
| 37 | CAVRENPNDYKLSF | CASSMAGPYYGYTF |
| 38 | CAGFNNAGNMLTF | CASSFSGLYNEQFF |
| 39 | CGTGGDYKLSF | CASSRTVNTEAFF |
| 40 | CGTGGDYKLSF | CASSMAANYGYTF |
| 41 | CGTGGDYKLSF | CASSQVGTGSYEQYF |
| 42 | CGTEMDGNKLVF | CASSMAANYGYTF |
| 43 | CIVTNAGGTSYGKLTF | CASSIDRDYEQYF |
| 44 | CATVNNNARLMF | CASSKSLSYEQYF |
| 45 | CAALGWDSNYQLIW | CASSKTGGYTF |
| 46 | CIVTNAGGTSYGKLTF | CASSQVGTGSYEQYF |
| 47 | CATVNNNARLMF | CASSMAANYGYTF |
| 48 | CAALGWDSNYQLIW | CASSIDRDYEQYF |
| 49 | CGTEMDGNKLVF | CASSQVGTGSYEQYF |
| 50 | CGTEMDGNKLVF | CASSITSGGDTQYF |
| 51 | CIVTNAGGTSYGKLTF | CASSITSGGDTQYF |
| 52 | CGTEMDGNKLVF | CASSMAGPYYGYTF |
| 53 | CAASYSGYSTLTF | CASSIDHSYEQYF |
| 54 | CALTMEYGNKLVF | CASSRDRDNEQFF |
| 55 | CAASMKAGTALIF | CASSISSGPYEQYF |
| 56 | CATDAKEYGNKLVF | CASSIGSSYNSPLHF |
| 57 | CATANHNAGNMLTF | CASSVNQEYEQYF |
| 58 | CALSVEGGSEKLVF | CASSIVAGNVYEQYF |
| 59 | CAASNSNSGYALNF | CASSLGTGGYYGYTF |
| 60 | CALGGYNKLIF | CASSGTVNTEAFF |
| 61 | CVVNPRSGNTPLVF | CASTEGWGYEQYF |
| 62 | CAASFTSGTYKYIF | CASSIRDSNQPQHF |
| 63 | CATDLAYGNNRLAF | CASSVSSSYEQYF |
| 64 | CATDAKEYGNKLVF | CASSITSGGDTQYF |
| 65 | CATDARETSGSRLTF | CASSWFAGGRDYGYTF |
| 66 | CAMSNNYGQNFVF | CASSFDRDNEQFF |
| 67 | CATDARETSGSRLTF | CASSITSGGDTQYF |
| 68 | CATDARETSGSRLTF | CASSMAANYGYTF |
| 69 | CATDARETSGSRLTF | CASSMAGPYYGYTF |
| 70 | CATDARETSGSRLTF | CASSQVGTGSYEQYF |
| 71 | CATDARETSGSRLTF | CASSIDHSYEQYF |
| 72 | CATGPLYNQGGKLIF | CASSIVAGNEQYF |
| 73 | CATDARETSGSRLTF | CASSRTVNTEAFF |
| 74 | CATDARETSGSRLTF | CASSIGAGDSYEQYF |
| 75 | CATDARETSGSRLTF | CASSPEPAGNTGELFF |
| 76 | CATDARETSGSRLTF | CASSIDRDYEQYF |
| 77 | CATDARETSGSRLTF | CASSSWVYQPQHF |
| 78 | CATDARETSGSRLTF | CASSYPGQPYGYTF |
| 79 | CATDARETSGSRLTF | CASSITGDSYNEQFF |
| 80 | CAVRDSWGATNKLIF | CASRREPEAFF |
| 81 | CALSDSNNARLMF | CASNTGFTGELFF |
| 82 | CAVDSDRGSTLGRLYF | CASSVQVLYEQYF |
| 83 | CALSDSNNARLMF | CASSITSGGDTQYF |
| 84 | CALSDSNNARLMF | CASSMAGPYYGYTF |
| 85 | CAVRDSWGATNKLIF | CASSMAGPYYGYTF |
| 86 | CALSDSNNARLMF | CASSMAANYGYTF |
| 87 | CAVRDSWGATNKLIF | CASSMAANYGYTF |
| 88 | CAVRDSWGATNKLIF | CASSIDSGSGYEQYF |
| 89 | CAGQLGIQGAQKLVF | CASSPLKGNTEAFF |
| 90 | CALSFDNYGQNFVF | CASIRENGELFF |
| 91 | CAVRAPPLARGNNRLAF | CASSIGAGDSYEQYF |
| 92 | CAVTFMNYGGATNKLIF | CASSIGGDWGRYEQYF |
| 93 | CASPVDRGSTLGRLYF | CASSQVGTGSYEQYF |
| 94 | CALSEGGYNAGNMLTF | CASSPGNEAFF |
| 95 | CASPVDRGSTLGRLYF | CASSGTVNTEAFF |
| 96 | CALSRGGLYNFNKFYF | CASSITSGGDTQYF |
| 97 | CASPVDRGSTLGRLYF | CASSMAANYGYTF |
| 98 | CAMREGWSTGGFKTIF | CASSIGAGQIYEQYF |
| 99 | CASPVDRGSTLGRLYF | CASSLSPRGDYNNEQFF |
| 100 | CAMREGPFYNQGGKLIF | CASSPLYTNTGELFF |
| 101 | CAASLGSGNTPLVF | CASSIWGQPQHF |
| 102 | CAASGEGGATNKLIF | CASSLSPRGDYNNEQFF |
| 103 | CALSVTGQAEGGATNKLIF | CASSITSGGDTQYF |
| 104 | CALSVTGQAEGGATNKLIF | CASSMAANYGYTF |
| 105 | CALSVTGQAEGGATNKLIF | CASSMAGPYYGYTF |
| 106 | CALSVTGQAEGGATNKLIF | CAISTSPGYGYTF |
| 107 | CALSVTGQAEGGATNKLIF | CASSIDRDYEQYF |
| 108 | CALYSGTYKYIF | CASSITADAPYEQYF |
| 109 | CVVNRLWGTSYDKVIF | CASSLGTNYEQYF |
| 110 | CGTHGSSNTGKLIF | CASSIGAGTHYEQYF |
| 111 | CGTHGSSNTGKLIF | CASSIGISGDYEQYF |
| 112 | CAAIFLFGNEKLTF | CASSIGAGTHYEQYF |
| 113 | CAAIFLFGNEKLTF | CASSYGVSYEQYF |
| 114 | CAAIFLFGNEKLTF | CASSTSYEQYF |
| 115 | CALSEAGRDDKIIF | CASSIGAGTHYEQYF |
| 116 | CALSEAGRDDKIIF | CASSTSYEQYF |
| 117 | CALSEAGRDDKIIF | CASSIGAGTHYEQYF |
| 118 | CALSEAGRDDKIIF | CASSSTYEQYF |
| 119 | CALSEAGRDDKIIF | CASKRTSYNEQFF |
| 120 | CALSEAGRDDKIIF | CASSSTYEQYF |
| 121 | CALSEAGRDDKIIF | CASSSMGLNEQFF |
| 122 | CALSEAGRDDKIIF | CASSQVGTGSYEQYF |
| 123 | CALSEAGRDDKIIF | CASSTSYEQYF |
| 124 | CALSEAGRDDKIIF | CASSQVGTGSYEQYF |
| 125 | CALSEAGRDDKIIF | CASSISLDYEQYF |
| 126 | CALSEAGRDDKIIF | CASSISTDYEQYF |
| 127 | CALMRGIQGAQKLVF | CASSIGAGTHYEQYF |
| 128 | CAVDRNKYIF | CASSRDRDFEQYF |
| 129 | CFSGGYNKLIF | CASSINRDYEQYF |
| 130 | CFSGGYNKLIF | CASSIGAGTHYEQYF |
| 131 | CAYRYLIQGAQKLVF | CASSIGAGTHYEQYF |
| 132 | CAYRYLIQGAQKLVF | CASSLGTGGGYEQYF |
| 133 | CALRRGKLIF | CASSIAPAAYEQYF |
| 134 | CALRRGKLIF | CASSIGAGTHYEQYF |
| 135 | CAGQGYNQGGKLIF | CASSRDGSYEQYF |
| 136 | CAGQGYNQGGKLIF | CASSIGAGTHYEQYF |
| 137 | CADDKAAGNKLTF | CASSIGAGTHYEQYF |
| 138 | CATVWEYGNKLVF | CASSISLDYEQYF |
| 139 | CATVWEYGNKLVF | CASSIGAGTHYEQYF |
| 140 | CATAYNQGGKLIF | CASSIGAGTHYEQYF |
| 141 | CATAYNQGGKLIF | CASSIGHTYEQYF |
| 142 | CADDKAAGNKLTF | CASSQVGTGSYEQYF |
| 143 | CADDKAAGNKLTF | CASSTSYEQYF |
| 144 | CAVGDSWGKLQF | CASSIAPAAYEQYF |
| 145 | CADDKAAGNKLTF | CASSPWGAEAFF |
| 146 | CAPRNYGQNFVF | CASSIQAGGEYGYTF |
| 147 | CAPRNYGQNFVF | CASSIGAGTHYEQYF |
| 148 | CAVYGGSQGNLIF | CASSIGAGTHYEQYF |
| 149 | CAVYGGSQGNLIF | CASSPWGAEAFF |
| 150 | CAVGTYNTDKLIF | CASSISPDYEQYF |
| 151 | CAVGTYNTDKLIF | CASSIGAGTHYEQYF |
| 152 | CAVYGGSQGNLIF | CASSTSYEQYF |
| 153 | CAVEFSGGYNKLIF | CASSIGAGTHYEQYF |
| 154 | CAVEFSGGYNKLIF | CASRDPNQPQHF |
| 155 | CALSGGNTDKLIF | CASSIGAGTHYEQYF |
| 156 | CALSGGNTDKLIF | CASKRTSYNEQFF |
| 157 | CAFMKLWAGNMLTF | CASSIDMTYEQYF |
| 158 | CVVSDRGSTLGRLYF | CASSLSADTFYEQYF |
| 159 | CASPVDRGSTLGRLYF | CASSQVGTGSYEQYF |
| 160 | CALSEPYSGGYNKLIF | CASSISTDYEQYF |
| 161 | CALSEPYSGGYNKLIF | CASSIGAGTHYEQYF |
| 162 | CALSGEGKKAAGNKLTF | CASSIGAGTHYEQYF |
| 163 | CALSEAGAGGTSYGKLTF | CASSSMGLNEQFF |
| 164 | CALSEAGAGGTSYGKLTF | CASSIGAGTHYEQYF |
| 165 | CAYRIPINAGGTSYGKLTF | CASSIGAGTHYEQYF |
| 166 | CALENQAGTALIF | CASSIGAGTHYEQYF |
| 167 | CAAWGATNKLIF | CASMPPGEPQHF |
| 168 | CALSGGNTGKLIF | CASSYSGGKLFF |
| 169 | CALSEAWTNAGKSTF | CASSIGAEVYNEQFF |
| 170 | CALWGSGGYNKLIF | CASSPQGETQYF |
| 171 | CAAILNSGNTPLVF | CASSITREYEQYF |
| 172 | CAFMKQDYAGNNRKLIW | CASSIAVGFAGELFF |
| 173 | CAVWGATNKLIF | CASQMAGELFF |
| 174 | CAENRPPSGNTPLVF | CASSFSVDQPQHF |
| 175 | CALKNTGGFKTIF | CASSFDRDFSTDTQYF |
| 176 | CATPVEYGNKLVF | CASSMDSGGYTEAFF |
| 177 | CAVQKKESGGGADGLTF | CASSFGGYYEQYF |
| 178 | CAVDVGRRGAQKLVF | CASSLTSGSSYEQYF |
| 179 | CAATQGGSEKLVF | CASSPLGSNTIYF |
| 180 | CAANLGARLMF | CASSAWGAFEQYF |
| 181 | CAGPGYSTLTF | CASSIVSNQPQHF |
| 182 | CAASGWANNLFF | CASSGGTDTQYF |
| 183 | CAVQSGNTGKLIF | CASSISLTYEQYF |
| 184 | CALCNFGNEKLTF | CASSWQAPGELFF |
| 185 | CALGPGTASKLTF | CASSQDSGGYNEQFF |
| 186 | CALSGANARLMF | CASKSGGDYYEQYF |
| 187 | CAASSTSGTYKYIF | CASSTDISYGYTF |
| 188 | CATPLSYNTDKLIF | CASSLGDEQYF |
| 189 | CALSDDNNARLMF | CATLAGGPYNEQFF |
| 190 | CALSEWRSASKIIF | CASSYGQGNGGEQFF |
| 191 | CAGAADYKLSF | CASSLVAYNEQFF |
| 192 | CAVFSGGYNKLIF | CACGGNYNEQFF |
| 193 | CAESKDGYNKLIF | CATSGSRDRGDYEQYF |
| 194 | CALSDLTGGGNKLTF | CASSPGGTQYF |
| 195 | CALSEEGYQGAQKLVF | CASSVYGNTQYF |
| 196 | CALSEVNNNAGNMLTF | CASSMGESEAFF |
| 197 | CAFANFGNEKLTF | CASSISASSSYEQYF |
| 198 | CAFTELIQGAQKLVF | CATSDWALGGAFF |
| 199 | CAVSLAYNARLMF | CASSPSSSALMNGELFF |
| 200 | CATPGSYNTDKLIF | CASSTNRDYEQYF |
| 201 | CALSVTNAGKSTF | CASSRDSSSYNEQFF |
| 202 | CALSFLPYNQGGKLIF | CASSGGLQETQYF |
| 203 | CACSGNTPLVF | CASSTTRDGEQYF |
| 204 | CAVGATMEYGNKLVF | CATADLYEQYF |
| 205 | CALSNGNNRKLIW | CATRGGGTEAFF |
| 206 | CALSEWGGNKLVF | CASSITGQETQYF |
| 207 | CAASFNFGNEKLTF | CASSRAGGSYNEQFF |
| 208 | CAFGKTSYDKVIF | CASQNRGPYNEQFF |
| 209 | CALSEAGGSTLGRLYF | CASSTTATYEQYF |
| 210 | CAVPYNQGGKLIF | CASSIASTGKNIQYF |
| 211 | CAVGAPYYQLIW | CSAYDGADTIYF |
| 212 | CGADRLAIIQGAQKLVF | CASSIDSQGIPTDEQFF |
| 213 | CARTSYDKVIF | CASSIDLANEQYF |
| 214 | CATGDSNYQLIW | CASSIEAGTYEQYF |
| 215 | CALSNDYKLSF | CASSVSVNSYNEQFF |
| 216 | CATDGGYGGATNKLIF | CASSMSQPHEQYF |
| 217 | CALRTFTGGGNKLTF | CASSPGQEYTF |
| 218 | CAVGKGYSTLTF | CASRVGGSNTGELFF |
| 219 | CAVNNNNDMRF | CASGDRGTEAFF |
| 220 | CALSGGNTDKLIF | CASSLGSEQYF |
| 221 | CALSVTSYGKLTF | CASSVEWDRGVNEQFF |
| 222 | CALSELRGYSTLTF | CASSINTDNEQFF |
| 223 | CAASNRTQGGKLIF | CASSLDQTDTQYF |
| 224 | CALSVGNTGKLIF | CASSLGVHEQYF |
| 225 | CAVRSSYGNNRLAF | CASSISSGETYEQYF |
| 226 | CAVNTFSSGGSYIPTF | CASSQNAGTGGYEQYF |
| 227 | CALSEDNNYGQNFVF | CASSLDQTDTQYF |
| 228 | CAGGDSWGKLQF | CASSIEHTYEQYF |
| 229 | CAPGGSYIPTF | CASSYSGGRANYGYTF |
| 230 | CAVEDQNARLMF | CASSIPGYTEAFF |
| 231 | CATVIQGGSEKLVF | CASSIVAGPYEQYF |
| 232 | CAMREGWGSGGYNKLIF | CASSMQGLGQETQYF |
| 233 | CAVRDIRSGNTGKLIF | CASSTWDSYGYTF |
| 234 | CASWGYNFNKFYF | CASSIGGAEAFF |
| 235 | CALSADRGSTLGRLYF | CASSSASGDYEQYF |
| 236 | CILRDGFGTGANNLFF | CASSETLAGVYEQYF |
| 237 | CALYGDSNYQLIW | CASSSGQGSTDTQYF |
| 238 | CAVGNGNNRLAF | CASRNSNQPQHF |
| 239 | CAMGQHSGYSTLTF | CASTFGQEQYF |
| 240 | CAAFFDRLMF | CASSAPGLDYEQYF |
| 241 | CALSEAGFNQGGKLIF | CASSRDNNEQFF |
| 242 | CALDGSNAGNMLTF | CASGWPPPRQYF |
| 243 | CAGPRPSNTGKLIF | CASSIDISYEQYF |
| 244 | CAPESGNTGKLIF | CATAPASGPYEQYF |
| 245 | CILRDVKMYYGQNFVF | CASSITGESYEQYF |
| 246 | CAATPPGTGNQFYF | CATLTGYNEQFF |
| 247 | CAQETSGSRLTF | CASSINRDSEQYF |
| 248 | CALSALYQKVTF | CASNTGGANTEAFF |
| 249 | CALSATGFQKLVF | CASTPGAYNEQYF |
| 250 | CALWGSGGYNKLIF | CASSVYGNTQYF |
| 251 | CLPEGGSNDYKLSF | CASSTSRDYYEQYF |
| 252 | CAVSGSNYQLIW | CASSISSPNFYNEQFF |
| 253 | CAVIDGATNKLIF | CASSFMNTEAFF |
| 254 | CAASTWTNAGKSTF | CASSIDGGTYEQYF |
| 255 | CAVRCNQAGTALIF | CASSEGLGYEQYF |
| 256 | CVVSGDNYGQNFVF | CASSISRERYNEQFF |
| 257 | CAAVPWDQAGTALIF | CASSSDLDNEQFF |
| 258 | CAMRSFRAGNMLTF | CASSEGEGPLSEQYF |
| 259 | CALSEASNYGQNFVF | CASSDRDRGYEQYF |
| 260 | CALSEAWTNAGKSTF | CASSYSGGKLFF |
| 261 | CALSEAARDNARLMF | CASSRRERNEKLFF |
| 262 | CAVRQGGTSNSGYALNF | CASSPPVGVYNEQFF |
| 263 | CALSEARHSGAGSYQLTF | CASSFGGDTQYF |
| 264 | CALSPGNTGKLIF | CASSGRQGPGELFF |
| 265 | CATDPMYSGGGADGLTF | CASSIDPTGFYEQYF |
| 266 | CALSEAFRDDKIIF | CASSIDRDYEQYF |
| 267 | CALSVMNRDDKIIF | CASLDGYEQYF |
| 268 | CVVSVSQEGAQKLVF | CASSISSGTTYEQYF |
| 269 | CACSGNTPLVF | CASSGGPPDTQYF |
| 270 | CAPGGSYIPTF | CASTDGYGYTF |
| 271 | CAVNNARLMF | CASSQDRGVEQYF |
| 272 | CAAPGGYQKVTF | CASSIGQVYEQYF |
| 273 | CAASGYSTLTF | CASSTGLDYGYTF |
| 274 | CAVWGATNKLIF | CASSSGQGSTDTQYF |
| 275 | CIVCPNSGGSNYKLTF | CASSINIAYEQYF |
| 276 | CAAWGATNKLIF | CASSWQAPGELFF |
| 277 | CAAWGATNKLIF | CASSYSGGKLFF |
| 278 | CAWGGATNKLIF | CASSWDSSYNEQFF |
| 279 | CAAPSFYNQGGKLIF | CASSLTSTDTQYF |
| 280 | CAVGAYGNKLVF | CASSMGGNEQFF |
| 281 | CALYGDSNYQLIW | CASSRLPLAGGRDEQYF |
| 282 | CAEDYNTDKLIF | CASSDLDTGELFF |
| 283 | CATASHNNARLMF | CASSIQGQETQYF |
| 284 | CAVTSNNNNDMRF | CASGSWRGAFF |
| 285 | CAVQANGGTYKYIF | CASKVDIGYFYEQYF |
| 286 | CVVNSLSGNTPLVF | CASSIDLDNEQFF |
| 287 | CAVGTLDSNYQLIW | CASSTDISYEQYF |
| 288 | CAMRSYNNNDMRF | CATLTGYNEQFF |
| 289 | CALSEAYYGKLTF | CASSASVDNEQFF |
| 290 | CAVRRVSGGYNKLIF | CASSYSGGRANYGYTF |
| 291 | CALSGSNDYKLSF | CASRDGNTEAFF |
| 292 | CALSEAWTNAGKSTF | CASSGGPPDTQYF |
| 293 | CAMRESLGTASKLTF | CASSGGPPDTQYF |
| 294 | CAANGHARLMF | CASSISSTYEQYF |
| 295 | CALSEAGGSTLGRLYF | CASSMGTVSYEQYF |
| 296 | CALSEARQYSGAGSYQLTF | CASSLEWGPYEQYF |
| 297 | CALIQGAQKLVF | CASSLEWGPYEQYF |
| 298 | CAGQGNRDDKIIF | CASSLEWGPYEQYF |
| 299 | CAVKSNFGNEKLTF | CASSLEWGPYEQYF |
| 300 | CALIQGAQKLVF | CASSPWIGGDTEAFF |
| 301 | CAGQGNRDDKIIF | CASSNTGHFYEQYF |
| 302 | CAVQGKETSGSRLTF | CASSLEWGPYEQYF |
| 303 | CAVNLYNFNKFYF | CASSLEWGPYEQYF |
| 304 | CAGHNEYGNKLVF | CASSISLPSPLHF |
| 305 | CALSDLFGNEKLTF | CASSPAGGTDTQYF |
| 306 | CAGPGRGGSEKLVF | CASSDGGLAGPYGTDTQYF |
| 307 | CAVSGGLGNNDMRF | CASSFGTPNEQFF |
| 308 | CALSAYNTDKLIF | CASSITGYNEQFF |
| 309 | CAGPNNNARLMF | CASSISGDQPQHF |
| 310 | CAASPYNFNKFYF | CASSITSGGYNEQFF |
| 311 | CATDAGGGKLIF | CASSLSSSYNEQFF |
| 312 | CAMRDNTNTGNQFYF | CASSMWTGGRDTEAFF |
| 313 | CAASIIGGSNYKLTF | CASSIDLDNEQFF |
| 314 | CASLDSSYKLIF | CASSMWGPNQPQHF |
| 315 | CAGPGRGGSEKLVF | CASSIGAGGYNEQFF |
| 316 | CAGPTSYGKLTF | CASSIVGAETQYF |
| 317 | CAVKVDQGAQKLVF | CASSISSGAYNEQFF |
| 318 | CATAYDRGSTLGRLYF | CASSIDSTGYNEQFF |
| 319 | CATDATNNNDMRF | CASSWEASSYNEQFF |
| 320 | CALSEWGNFNKFYF | CASSTQGHEQYF |
| 321 | CVVSDWNFNKFYF | CASSADNNEQFF |
| 322 | CALSEQGSSNTGKLIF | CASSIVAGNEQFF |
| 323 | CWPGGYQKVTF | CASSWDRDQPQHF |
| 324 | CAGQDTGGFKTIF | CASSSLLEWYF |
| 325 | CAGRVYNQGGKLIF | CASSIASEYNEQFF |
| 326 | CAVGSSNTGKLIF | CASSIYSGAEQFF |
| 327 | CAVPDNARLMF | CASSIGAAEYGYEQYF |
| 328 | CATYGEYGNKLVF | CASSIGAGGYNEQFF |
| 329 | CAVGEYNFNKFYF | CASSMGNEKLFF |
| 330 | CAFMGGYNFNKFYF | CASSIDGSSYEQYF |
| 331 | CAVGDNNFNKFYF | CASSFWDGEETQYF |
| 332 | CALSEAGYSSASKIIF | CASSIDSYEQYF |
| 333 | CAMNDRGSTLGRLYF | CASSMASTDTQYF |
| 334 | CALNVQGGSEKLVF | CSVGNYGYTF |
| 335 | CALSRANNARLMF | CASSIVADSYNEQFF |
| 336 | CALDRNQAGTALIF | CASSINSGGNNEQFF |
| 337 | CAVRDVGFIGGGNKLTF | CASSFYIGEYNEQFF |
| 338 | CALSEVGRDDKIIF | CASSAYEQYF |
| 339 | CASPVDRGSTLGRLYF | CASSQVGTGSYEQYF |
| 340 | CAVRDVFSNQAGTALIF | CASSWDSNGNQPQHF |
| 341 | CALSAPGARLMF | CASSRGAYNEQFF |
| 342 | CAAMYGGSQGNLIF | CASSPTGDYEQYF |
| 343 | CATDRPYNQGGKLIF | CASSIVGGSYEQYF |
| 344 | CAGPNNNARLMF | CAIDQGLGYEQYF |

TABLE 16
full length alpha and beta TCR sequences (G10)
Table 16: full length alpha VJ and beta V(D)J sequences for TCRs binding HLA-PEPTIDE
A*01: 01_ASSLPTTMNY

| TCR | | |
|---|---|---|
| ID# | FULL LENGTH ALPHA VJ | FULL LENGTH BETA V(D)J |
| 1 | MLLITSMLVLWMQLSQVNGQQVMQIPQYQ | MSNQVLCCVVLCFLGANTVDGGIT |
| | HVQEGEDFTTYCNSSTTLSNIQWYKQRPGGH | QSPKYLFRKEGQNVTLSCEQNLNH |
| | PVFLIQLVKSGEVKKQKRLTFQFGEAKKNSS | DAMYWYRQDPGQGLRLIYYSQIVN |
| | LHITATQTTDVGTYFCAGPGNTGKLIFGQGT | DFQKGDIAEGYSVSREKKESFPLTV |
| | TLQVK | TSAQKNPTAFYLCASSNAGDQPQH |
| | | FGDGTRLSIL |
| 2 | METLLKVLSGTLLWQLTWVRSQQPVQSPQA | MSNQVLCCVVLCLLGANTVDGGIT |
| | VILREGEDAVINCSSSKALYSVHWYRQKHGE | QSPKYLFRKEGQNVTLSCEQNLNH |
| | APVFLMILLKGGEQKGHEKISASFNEKKQQS | DAMYWYRQDPGQGLRLIYYSQIVN |
| | SLYLTASQLSYSGTYFCGTASNFGNEKLTFG | DFQKGDIAEGYSVSREKKESFPLTV |
| | TGTRLTII | TSAQKNPTAFYLCASSITSGGDTQY |
| | | FGPGTRLTVL |
| 3 | METLLKVLSGTLLWQLTWVRSQQPVQSPQA | MSNQVLCCVVLCLLGANTVDGGIT |
| | VILREGEDAVINCSSSKALYSVHWYRQKHGE | QSPKYLFRKEGQNVTLSCEQNLNH |
| | APVFLMILLKGGEQKGHEKISASFNEKKQQS | DAMYWYRQDPGQGLRLIYYSQIVN |
| | SLYLTASQLSYSGTYFCGTASNFGNEKLTFG | DFQKGDIAEGYSVSREKKESFPLTV |
| | TGTRLTII | TSAQKNPTAFYLCASSMAANYGYT |
| | | FGSGTRLTVV |
| 4 | METLLKVLSGTLLWQLTWVRSQQPVQSPQA | MSNQVLCCVVLCLLGANTVDGGIT |
| | VILREGEDAVINCSSSKALYSVHWYRQKHGE | QSPKYLFRKEGQNVTLSCEQNLNH |
| | APVFLMILLKGGEQKGHEKISASFNEKKQQS | DAMYWYRQDPGQGLRLIYYSQIVN |
| | SLYLTASQLSYSGTYFCGTASNFGNEKLTFG | DFQKGDIAEGYSVSREKKESFPLTV |
| | TGTRLTII | TSAQKNPTAFYLCASSMAGPYYGY |
| | | TFGSGTRLTVV |
| 5 | METLLKVLSGTLLWQLTWVRSQQPVQSPQA | MSNQVLCCVVLCLLGANTVDGGIT |
| | VILREGEDAVINCSSSKALYSVHWYRQKHGE | QSPKYLFRKEGQNVTLSCEQNLNH |
| | APVFLMILLKGGEQKGHEKISASFNEKKQQS | DAMYWYRQDPGQGLRLIYYSQIVN |
| | SLYLTASQLSYSGTYFCGTASNFGNEKLTFG | DFQKGDIAEGYSVSREKKESFPLTV |
| | TGTRLTII | TSAQKNPTAFYLCASGPTSSSSYEQ |
| | | YFGPGTRLTVT |
| 6 | METLLKVLSGTLLWQLTWVRSQQPVQSPQA | MSNQVLCCVVLCLLGANTVDGGIT |
| | VILREGEDAVINCSSSKALYSVHWYRQKHGE | QSPKYLFRKEGQNVTLSCEQNLNH |
| | APVFLMILLKGGEQKGHEKISASFNEKKQQS | DAMYWYRQDPGQGLRLIYYSQIVN |
| | SLYLTASQLSYSGTYFCGTASNFGNEKLTFG | DFQKGDIAEGYSVSREKKESFPLTV |
| | TGTRLTII | TSAQKNPTAFYLCASSIDRDYEQYF |
| | | GPGTRLTVT |
| 7 | MMKSLRVLLVILWLQLSWVWSQQKEVEQD | MSNQVLCCVVLCLLGANTVDGGIT |
| | PGPLSVPEGAIVSLNCTYSNSAFQYFMWYRQ | QSPKYLFRKEGQNVTLSCEQNLNH |
| | YSRKGPELLMYTYSSGNKEDGRFTAQVDKS | DAMYWYRQDPGQGLRLIYYSQIVN |
| | SKYISLFIRDSQPSDSATYLCAIAGGGGADGL | DFQKGDIAEGYSVSREKKESFPLTV |
| | TFGKGTHLIIQ | TSAQKNPTAFYLCASSLGTNYEQYF |
| | | GPGTRLTVT |
| 8 | MMKSLRVLLVILWLQLSWVWSQQKEVEQD | MSNQVLCCVVLCLLGANTVDGGIT |
| | PGPLSVPEGAIVSLNCTYSNSAFQYFMWYRQ | QSPKYLFRKEGQNVTLSCEQNLNH |
| | YSRKGPELLMYTYSSGNKEDGRFTAQVDKS | DAMYWYRQDPGQGLRLIYYSQIVN |
| | SKYISLFIRDSQPSDSATYLCAIAGGGGADGL | DFQKGDIAEGYSVSREKKESFPLTV |
| | TFGKGTHLIIQ | TSAQKNPTAFYLCASSMAGPYYGY |
| | | TFGSGTRLTVV |
| 9 | MMKSLRVLLVILWLQLSWVWSQQKEVEQD | MSNQVLCCVVLCLLGANTVDGGIT |
| | PGPLSVPEGAIVSLNCTYSNSAFQYFMWYRQ | QSPKYLFRKEGQNVTLSCEQNLNH |
| | YSRKGPELLMYTYSSGNKEDGRFTAQVDKS | DAMYWYRQDPGQGLRLIYYSQIVN |
| | SKYISLFIRDSQPSDSATYLCAIAGGGGADGL | DFQKGDIAEGYSVSREKKESFPLTV |
| | TFGKGTHLIIQ | TSAQKNPTAFYLCASSIDRDYEQYF |
| | | GPGTRLTVT |
| 10 | MSLSSLLKVVTASLWLGPGIAQKITQTQPGM | MSNQVLCCVVLCLLGANTVDGGIT |
| | FVQEKEAVTLDCTYDTSDQSYGLFWYKQPS | QSPKYLFRKEGQNVTLSCEQNLNH |
| | SGEMIFLIYQGSYDEQNATEGRYSLNFQKAR | DAMYWYRQDPGQGLRLIYYSQIVN |
| | KSANLVISASQLGDSAMYFCAMREGWSGGG | DFQKGDIAEGYSVSREKKESFPLTV |
| | ADGLTFGKGTHLIIQ | TSAQKNPTAFYLCASSRTSGGYNEQ |
| | | FFGPGTRLTVL |
| 11 | MSLSSLLKVVTASLWLGPGIAQKITQTQPGM | MSNQVLCCVVLCLLGANTVDGGIT |
| | FVQEKEAVTLDCTYDTSDQSYGLFWYKQPS | QSPKYLFRKEGQNVTLSCEQNLNH |
| | SGEMIFLIYQGSYDEQNATEGRYSLNFQKAR | DAMYWYRQDPGQGLRLIYYSQIVN |
| | KSANLVISASQLGDSAMYFCAMREGWSGGG | DFQKGDIAEGYSVSREKKESFPLTV |
| | ADGLTFGKGTHLIIQ | TSAQKNPTAFYLCASSITSGGDTQY |
| | | FGPGTRLTVL |
| 12 | MLLITSMLVLWMQLSQVNGQQVMQIPQYQ | MVSRLLSLVSLCLLGAKHIEAGVTQ |
| | HVQEGEDFTTYCNSSTTLSNIQWYKQRPGGH | FPSHSVIEKGQTVTLRCDPISGHDNL |
| | PVFLIQLVKSGEVKKQKRLTFQFGEAKKNSS | YWYRRVMGKEIKFLLHFVKESKQD |
| | LHITATQTTDVGTYFCAAARGRDDKIIFGKG | ESGMPNNRFLAERTGGTYSTLKVQ |
| | TRLHIL | PAELEDSGVYFCASSLSPRGDYNNE |
| | | QFFGPGTRLTVL |
| 13 | MLLITSMLVLWMQLSQVNGQQVMQIPQYQ | MGCRLLCCAVLCLLGAVPMETGVT |
| | HVQEGEDFTTYCNSSTTLSNIQWYKQRPGGH | QTPRHLVMGMTNKKSLKCEQHLG |
| | PVFLIQLVKSGEVKKQKRLTFQFGEAKKNSS | HNAMYWYKQSAKKPLELMFVYNF |
| | LHITATQTTDVGTYFCAAARGRDDKIIFGKG | KEQTENNSVPSRFSPECPNSSHLFLH |
| | TRLHIL | LHTLQPEDSALYLCASSQVGTGSYE |
| | | QYFGPGTRLTVT |
| 14 | MLLITSMLVLWMQLSQVNGQQVMQIPQYQ | MSNQVLCCVVLCFLGANTVDGGIT |
| | HVQEGEDFTTYCNSSTTLSNIQWYKQRPGGH | QSPKYLFRKEGQNVTLSCEQNLNH |
| | PVFLIQLVKSGEVKKQKRLTFQFGEAKKNSS | DAMYWYRQDPGQGLRLIYYSQIVN |
| | LHITATQTTDVGTYFCAAARGRDDKIIFGKG | DFQKGDIAEGYSVSREKKESFPLTV |
| | TRLHIL | TSAQKNPTAFYLCASSNAGDQPQH |
| | | FGDGTRLSIL |
| 15 | MLLITSMLVLWMQLSQVNGQQVMQIPQYQ | MSNQVLCCVVLCFLGANTVDGGIT |
| | HVQEGEDFTTYCNSSTTLSNIQWYKQRPGGH | QSPKYLFRKEGQNVTLSCEQNLNH |
| | PVFLIQLVKSGEVKKQKRLTFQFGEAKKNSS | DAMYWYRQDPGQGLRLIYYSQIVN |
| | LHITATQTTDVGTYFCAAARGRDDKIIFGKG | DFQKGDIAEGYSVSREKKESFPLTV |
| | TRLHIL | TSAQKNPTAFYLCASSFSGLYNEQF |
| | | FGPGTRLTVL |
| 16 | MTSIRAVFIFLWLQLDLVNGENVEQHPSTLS | MSNQVLCCVVLCLLGANTVDGGIT |
| | VQEGDSAVIKCTYSDSASNYFPWYKQELGK | QSPKYLFRKEGQNVTLSCEQNLNH |
| | GPQLIIDIRSNVGEKKDQRIAVTLNKTAKHFS | DAMYWYRQDPGQGLRLIYYSQIVN |
| | LHITETQPEDSAVYFCAARWGPSSDDKIIFGK | DFQKGDIAEGYSVSREKKESFPLTV |
| | GTRLHIL | TSAQKNPTAFYLCASSSWVYQPQH |
| | | FGDGTRLSIL |
| 17 | MLTASLLRAVIASICVVSSMAQKVTQAQTEI | MSNQVLCCVVLCFLGANTVDGGIT |
| | SVVEKEDVTLDCVYETRDTTYYLFWYKQPP | QSPKYLFRKEGQNVTLSCEQNLNH |
| | SGELVFLIRRNSFDEQNEISGRYSWNFQKSTS | DAMYWYRQDPGQGLRLIYYSQIVN |
| | SFNFTITASQVVDSAVYFCALSEATKDDKIIF | DFQKGDIAEGYSVSREKKESFPLTV |
| | GKGTRLHIL | TSAQKNPTAFYLCASSIWGNEQYFG |
| | | PGTRLTVT |
| 18 | MLTASLLRAVIASICVVSSMAQKVTQAQTEI | MSNQVLCCVVLCLLGANTVDGGIT |
| | SVVEKEDVTLDCVYETRDTTYYLFWYKQPP | QSPKYLFRKEGQNVTLSCEQNLNH |
| | SGELVFLIRRNSFDEQNEISGRYSWNFQKSTS | DAMYWYRQDPGQGLRLIYYSQIVN |
| | SFNFTITASQVVDSAVYFCALSEATKDDKIIF | DFQKGDIAEGYSVSREKKESFPLTV |
| | GKGTRLHIL | TSAQKNPTAFYLCASTSGYEQYFGP |
| | | GTRLTVT |
| 19 | MLLEHLLIILWMQLTWVSGQQLNQSPQSMFI | MSNQVLCCVVLCLLGANTVDGGIT |
| | QEGEDVSMNCTSSSIFNTWLWYKQDPGEGP | QSPKYLFRKEGQNVTLSCEQNLNH |
| | VLLIALYKAGELTSNGRLTAQFGITRKDSFLN | DAMYWYRQDPGQGLRLIYYSQIVN |
| | ISASIPSDVGIYFCAGQLGIQGAQKLVFGQGT | DFQKGDIAEGYSVSREKKESFPLTV |
| | RLTIN | TSAQKNPTAFYLCASSTGVGVSYE |
| | | QYFGPGTRLTVT |
| 20 | MLLEHLLIILWMQLTWVSGQQLNQSPQSMFI | MSNQVLCCVVLCLLGANTVDGGIT |
| | QEGEDVSMNCTSSSIFNTWLWYKQDPGEGP | QSPKYLFRKEGQNVTLSCEQNLNH |
| | VLLIALYKAGELTSNGRLTAQFGITRKDSFLN | DAMYWYRQDPGQGLRLIYYSQIVN |
| | ISASIPSDVGIYFCAGQLGIQGAQKLVFGQGT | DFQKGDIAEGYSVSREKKESFPLTV |
| | RLTIN | TSAQKNPTAFYLCASSITSGGDTQY |
| | | FGPGTRLTVL |
| 21 | MLLEHLLIILWMQLTWVSGQQLNQSPQSMFI | MSNQVLCCVVLCLLGANTVDGGIT |
| | QEGEDVSMNCTSSSIFNTWLWYKQDPGEGP | QSPKYLFRKEGQNVTLSCEQNLNH |
| | VLLIALYKAGELTSNGRLTAQFGITRKDSFLN | DAMYWYRQDPGQGLRLIYYSQIVN |
| | ISASIPSDVGIYFCAGQLGIQGAQKLVFGQGT | DFQKGDIAEGYSVSREKKESFPLTV |
| | RLTIN | TSAQKNPTAFYLCASSMAGPYYGY |
| | | TFGSGTRLTVV |
| 22 | MWGVFLLYVSMKMGGTTGQNIDQPTEMTA | MSNQVLCCVVLCFLGANTVDGGIT |
| | TEGAIVQINCTYQTSGFNGLFWYQQHAGEAP | QSPKYLFRKEGQNVTLSCEQNLNH |
| | TFLSYNVLDGLEEKGRFSSFLSRSKGYSYLLL | DAMYWYRQDPGQGLRLIYYSQIVN |
| | KELQMKDSASYLCAVRGSYQKVTFGTGTKL | DFQKGDIAEGYSVSREKKESFPLTV |
| | QVI | TSAQKNPTAFYLCASSITSGGDTQY |
| | | FGPGTRLTVL |
| 23 | MWGVFLLYVSMKMGGTTGQNIDQPTEMTA | MSNQVLCCVVLCFLGANTVDGGIT |
| | TEGAIVQINCTYQTSGFNGLFWYQQHAGEAP | QSPKYLFRKEGQNVTLSCEQNLNH |
| | TFLSYNVLDGLEEKGRFSSFLSRSKGYSYLLL | DAMYWYRQDPGQGLRLIYYSQIVN |
| | KELQMKDSASYLCAVRGSYQKVTFGTGTKL | DFQKGDIAEGYSVSREKKESFPLTV |
| | QVI | TSAQKNPTAFYLCASSMAGPYYGY |
| | | TFGSGTRLTVV |
| 24 | MWGVFLLYVSMKMGGTTGQNIDQPTEMTA | MGCRLLCCAVLCLLGAVPMETGVT |
| | TEGAIVQINCTYQTSGFNGLFWYQQHAGEAP | QTPRHLVMGMTNKKSLKCEQHLG |
| | TFLSYNVLDGLEEKGRFSSFLSRSKGYSYLLL | HNAMYWYKQSAKKPLELMFVYNF |
| | KELQMKDSASYLCAVRGSYQKVTFGTGTKL | KEQTENNSVPSRFSPECPNSSHLFLH |
| | QVI | LHTLQPEDSALYLCASSQVGTGSYE |
| | | QYFGPGTRLTVT |
| 25 | MWGVFLLYVSMKMGGTTGQNIDQPTEMTA | MSNQVLCCVVLCFLGANTVDGGIT |
| | TEGAIVQINCTYQTSGFNGLFWYQQHAGEAP | QSPKYLFRKEGQNVTLSCEQNLNH |
| | TFLSYNVLDGLEEKGRFSSFLSRSKGYSYLLL | DAMYWYRQDPGQGLRLIYYSQIVN |
| | KELQMKDSASYLCAVRGSYQKVTFGTGTKL | DFQKGDIAEGYSVSREKKESFPLTV |
| | QVI | TSAQKNPTAFYLCASSMAANYGYT |
| | | FGSGTRLTVV |
| 26 | MMKSLRVLLVILWLQLSWVWSQQKEVEQD | MSNQVLCCVVLCLLGANTVDGGIT |
| | PGPLSVPEGAIVSLNCTYSNSAFQYFMWYRQ | QSPKYLFRKEGQNVTLSCEQNLNH |
| | YSRKGPELLMYTYSSGNKEDGRFTAQVDKS | DAMYWYRQDPGQGLRLIYYSQIVN |
| | SKYISLFIRDSQPSDSATYLCAMSAEENQGAQ | DFQKGDIAEGYSVSREKKESFPLTV |
| | KLVFGQGTRLTIN | TSAQKNPTAFYLCASSIFAGAHLTE |
| | | AFFGQGTRLTVV |
| 27 | MWGVFLLYVSMKMGGTTGQNIDQPTEMTA | MSNQVLCCVVLCFLGANTVDGGIT |
| | TEGAIVQINCTYQTSGFNGLFWYQQHAGEAP | QSPKYLFRKEGQNVTLSCEQNLNH |
| | TFLSYNVLDGLEEKGRFSSFLSRSKGYSYLLL | DAMYWYRQDPGQGLRLIYYSQIVN |
| | KELQMKDSASYLCAVRENPNDYKLSFGAGT | DFQKGDIAEGYSVSREKKESFPLTV |
| | TVTVR | TSAQKNPTAFYLCASSITSGGDTQY |
| | | FGPGTRLTVL |
| 28 | MVLKFSVSILWIQLAWVSTQLLEQSPQFLSIQ | MSNQVLCCVVLCFLGANTVDGGIT |
| | EGENLTVYCNSSSVFSSLQWYRQEPGEGPVL | QSPKYLFRKEGQNVTLSCEQNLNH |
| | LVTVVTGGEVKKLKRLTFQFGDARKDSSLHI | DAMYWYRQDPGQGLRLIYYSQIVN |
| | TAAQPGDTGLYLCARGGATNKLIFGTGTLLA | DFQKGDIAEGYSVSREKKESFPLTV |
| | VQ | TSAQKNPTAFYLCASSYPGQPYGYT |
| | | FGSGTRLTVV |
| 29 | MLLEHLLIILWMQLTWVSGQQLNQSPQSMFI | MDTRLLCCAVICLLGAGLSNAGVM |
| | QEGEDVSMNCTSSSIFNTWLWYKQDPGEGP | QNPRHLVRRRGQEARLRCSPMKGH |
| | VLLIALYKAGELTSNGRLTAQFGITRKDSFLN | SHVYWYRQLPEEGLKFMVYLQKE |
| | ISASIPSDVGIYFCAGQVENARLMFGDGTQL | NIIDESGMPKERFSAEFPKEGPSILRI |
| | VVK | QQVVRGDSAAYFCASSPLKGNTEA |
| | | FFGQGTRLTVV |
| 30 | MWGVFLLYVSMKMGGTTGQNIDQPTEMTA | MGCRLLCCAVLCLLGAVPMETGVT |
| | TEGAIVQINCTYQTSGFNGLFWYQQHAGEAP | QTPRHLVMGMTNKKSLKCEQHLG |
| | TFLSYNVLDGLEEKGRFSSFLSRSKGYSYLLL | HNAMYWYKQSAKKPLELMFVYNF |
| | KELQMKDSASYLCAVRENPNDYKLSFGAGT | KEQTENNSVPSRFSPECPNSSHLFLH |
| | TVTVR | LHTLQPEDSALYLCASSQVGTGSYE |
| | | QYFGPGTRLTVT |
| 31 | MVLKFSVSILWIQLAWVSTQLLEQSPQFLSIQ | MSNQVLCCVVLCFLGANTVDGGIT |
| | EGENLTVYCNSSSVFSSLQWYRQEPGEGPVL | QSPKYLFRKEGQNVTLSCEQNLNH |
| | LVTVVTGGEVKKLKRLTFQFGDARKDSSLHI | DAMYWYRQDPGQGLRLIYYSQIVN |
| | TAAQPGDTGLYLCARGGATNKLIFGTGTLLA | DFQKGDIAEGYSVSREKKESFPLTV |
| | VQ | TSAQKNPTAFYLCASSMAGPYYGY |
| | | TFGSGTRLTVV |
| 32 | METLLGVSLVILWLQLARVNSQQGEEDPQA | MGTSLLCWMALCLLGADHADTGV |
| | LSIQEGENATMNCSYKTSINNLQWYRQNSGR | SQDPRHKITKRGQNVTFRCDPISEH |
| | GLVHLILIRSNEREKHSGRLRVTLDTSKKSSS | NRLYWYRQTLGQGPEFLTYFQNEA |
| | LLITASRAADTASYFCAISGYALNFGKGTSLL | QLEKSRLLSDRFSAERPKGSFSTLEI |
| | VT | QRTEQGDSAMYLCASSPEPAGNTG |
| | | ELFFGEGSRLTVL |
| 33 | MWGVFLLYVSMKMGGTTGQNIDQPTEMTA | MSNQVLCCVVLCFLGANTVDGGIT |
| | TEGAIVQINCTYQTSGFNGLFWYQQHAGEAP | QSPKYLFRKEGQNVTLSCEQNLNH |
| | TFLSYNVLDGLEEKGRFSSFLSRSKGYSYLLL | DAMYWYRQDPGQGLRLIYYSQIVN |
| | KELQMKDSASYLCAVRENPNDYKLSFGAGT | DFQKGDIAEGYSVSREKKESFPLTV |
| | TVTVR | TSAQKNPTAFYLCASSMAANYGYT |
| | | FGSGTRLTVV |
| 34 | MWGVFLLYVSMKMGGTTGQNIDQPTEMTA | MSNQVLCCVVLCFLGANTVDGGIT |
| | TEGAIVQINCTYQTSGFNGLFWYQQHAGEAP | QSPKYLFRKEGQNVTLSCEQNLNH |
| | TFLSYNVLDGLEEKGRFSSFLSRSKGYSYLLL | DAMYWYRQDPGQGLRLIYYSQIVN |
| | KELQMKDSASYLCAVRENPNDYKLSFGAGT | DFQKGDIAEGYSVSREKKESFPLTV |
| | TVTVR | TSAQKNPTAFYLCASSIDRDYEQYF |
| | | GPGTRLTVT |
| 35 | MLLITSMLVLWMQLSQVNGQQVMQIPQYQ | MSNQVLCCVVLCLLGANTVDGGIT |
| | HVQEGEDFTTYCNSSTTLSNIQWYKQRPGGH | QSPKYLFRKEGQNVTLSCEQNLNH |
| | PVFLIQLVKSGEVKKQKRLTFQFGEAKKNSS | DAMYWYRQDPGQGLRLIYYSQIVN |
| | LHITATQTTDVGTYFCAGPEYGNKLVFGAGT | DFQKGDIAEGYSVSREKKESFPLTV |
| | ILRVK | TSAQKNPTAFYLCLSNTGEGTEAFF |
| | | GQGTRLTVV |
| 36 | MVLKFSVSILWIQLAWVSTQLLEQSPQFLSIQ | MSNQVLCCVVLCFLGANTVDGGIT |
| | EGENLTVYCNSSSVFSSLQWYRQEPGEGPVL | QSPKYLFRKEGQNVTLSCEQNLNH |
| | LVTVVTGGEVKKLKRLTFQFGDARKDSSLHI | DAMYWYRQDPGQGLRLIYYSQIVN |
| | TAAQPGDTGLYLCARGGATNKLIFGTGTLLA | DFQKGDIAEGYSVSREKKESFPLTV |
| | VQ | TSAQKNPTAFYLCASSITSGGDTQY |
| | | FGPGTRLTVL |
| 37 | MWGVFLLYVSMKMGGTTGQNIDQPTEMTA | MSNQVLCCVVLCFLGANTVDGGIT |
| | TEGAIVQINCTYQTSGFNGLFWYQQHAGEAP | QSPKYLFRKEGQNVTLSCEQNLNH |
| | TFLSYNVLDGLEEKGRFSSFLSRSKGYSYLLL | DAMYWYRQDPGQGLRLIYYSQIVN |
| | KELQMKDSASYLCAVRENPNDYKLSFGAGT | DFQKGDIAEGYSVSREKKESFPLTV |
| | TVTVR | TSAQKNPTAFYLCASSMAGPYYGY |
| | | TFGSGTRLTVV |
| 38 | MLLITSMLVLWMQLSQVNGQQVMQIPQYQ | MSNQVLCCVVLCFLGANTVDGGIT |
| | HVQEGEDFTTYCNSSTTLSNIQWYKQRPGGH | QSPKYLFRKEGQNVTLSCEQNLNH |
| | PVFLIQLVKSGEVKKQKRLTFQFGEAKKNSS | DAMYWYRQDPGQGLRLIYYSQIVN |
| | LHITATQTTDVGTYFCAGFNNAGNMLTFGG | DFQKGDIAEGYSVSREKKESFPLTV |
| | GTRLMVK | TSAQKNPTAFYLCASSFSGLYNEQF |
| | | FGPGTRLTVL |
| 39 | METLLKVLSGTLLWQLTWVRSQQPVQSPQA | MSNQVLCCVVLCFLGANTVDGGIT |
| | VILREGEDAVINCSSSKALYSVHWYRQKHGE | QSPKYLFRKEGQNVTLSCEQNLNH |
| | APVFLMILLKGGEQKGHEKISASFNEKKQQS | DAMYWYRQDPGQGLRLIYYSQIVN |
| | SLYLTASQLSYSGTYFCGTGGDYKLSFGAGT | DFQKGDIAEGYSVSREKKESFPLTV |
| | TVTVR | TSAQKNPTAFYLCASSRTVNTEAFF |
| | | GQGTRLTVV |
| 40 | METLLKVLSGTLLWQLTWVRSQQPVQSPQA | MSNQVLCCVVLCFLGANTVDGGIT |
| | VILREGEDAVINCSSSKALYSVHWYRQKHGE | QSPKYLFRKEGQNVTLSCEQNLNH |
| | APVFLMILLKGGEQKGHEKISASFNEKKQQS | DAMYWYRQDPGQGLRLIYYSQIVN |
| | SLYLTASQLSYSGTYFCGTGGDYKLSFGAGT | DFQKGDIAEGYSVSREKKESFPLTV |
| | TVTVR | TSAQKNPTAFYLCASSMAANYGYT |
| | | FGSGTRLTVV |
| 41 | METLLKVLSGTLLWQLTWVRSQQPVQSPQA | MGCRLLCCAVLCLLGAVPMETGVT |
| | VILREGEDAVINCSSSKALYSVHWYRQKHGE | QTPRHLVMGMTNKKSLKCEQHLG |
| | APVFLMILLKGGEQKGHEKISASFNEKKQQS | HNAMYWYKQSAKKPLELMFVYNF |
| | SLYLTASQLSYSGTYFCGTGGDYKLSFGAGT | KEQTENNSVPSRFSPECPNSSHLFLH |
| | TVTVR | LHTLQPEDSALYLCASSQVGTGSYE |
| | | QYFGPGTRLTVT |
| 42 | METLLKVLSGTLLWQLTWVRSQQPVQSPQA | MSNQVLCCVVLCFLGANTVDGGIT |
| | VILREGEDAVINCSSSKALYSVHWYRQKHGE | QSPKYLFRKEGQNVTLSCEQNLNH |
| | APVFLMILLKGGEQKGHEKISASFNEKKQQS | DAMYWYRQDPGQGLRLIYYSQIVN |
| | SLYLTASQLSYSGTYFCGTEMDGNKLVFGA | DFQKGDIAEGYSVSREKKESFPLTV |
| | GTILRVK | TSAQKNPTAFYLCASSMAANYGYT |
| | | FGSGTRLTVV |
| 43 | MRLVARVTVFLTFGTIIDAKTTQPPSMDCAE | MSNQVLCCVVLCLLGANTVDGGIT |
| | GRAANLPCNHSTISGNEYVYWYRQIHSQGPQ | QSPKYLFRKEGQNVTLSCEQNLNH |
| | YIIHGLKNNETNEMASLIITEDRKSSTLILPHA | DAMYWYRQDPGQGLRLIYYSQIVN |
| | TLRDTAVYYCIVTNAGGTSYGKLTFGQGTIL | DFQKGDIAEGYSVSREKKESFPLTV |
| | TVH | TSAQKNPTAFYLCASSIDRDYEQYF |
| | | GPGTRLTVT |
| 44 | METLLGVSLVILWLQLARVNSQQGEEDPQA | MSNQVLCCVVLCLLGANTVDGGIT |
| | LSIQEGENATMNCSYKTSINNLQWYRQNSGR | QSPKYLFRKEGQNVTLSCEQNLNH |
| | GLVHLILIRSNEREKHSGRLRVTLDTSKKSSS | DAMYWYRQDPGQGLRLIYYSQIVN |
| | LLITASRAADTASYFCATVNNNARLMFGDG | DFQKGDIAEGYSVSREKKESFPLTV |
| | TQLVVK | TSAQKNPTAFYLCASSKSLSYEQYF |
| | | GPGTRLTVT |
| 45 | MVLKFSVSILWIQLAWVSTQLLEQSPQFLSIQ | MSNQVLCCVVLCLLGANTVDGGIT |
| | EGENLTVYCNSSSVFSSLQWYRQEPGEGPVL | QSPKYLFRKEGQNVTLSCEQNLNH |
| | LVTVVTGGEVKKLKRLTFQFGDARKDSSLHI | DAMYWYRQDPGQGLRLIYYSQIVN |
| | TAAQPGDTGLYLCAALGWDSNYQLIWGAG | DFQKGDIAEGYSVSREKKESFPLTV |
| | TKLIIK | TSAQKNPTAFYLCASSKTGGYTFGS |
| | | GTRLTVV |
| 46 | MRLVARVTVFLTFGTIIDAKTTQPPSMDCAE | MGCRLLCCAVLCLLGAVPMETGVT |
| | GRAANLPCNHSTISGNEYVYWYRQIHSQGPQ | QTPRHLVMGMTNKKSLKCEQHLG |
| | YIIHGLKNNETNEMASLIITEDRKSSTLILPHA | HNAMYWYKQSAKKPLELMFVYNF |
| | TLRDTAVYYCIVTNAGGTSYGKLTFGQGTIL | KEQTENNSVPSRFSPECPNSSHLFLH |
| | TVH | LHTLQPEDSALYLCASSQVGTGSYE |
| | | QYFGPGTRLTVT |
| 47 | METLLGVSLVILWLQLARVNSQQGEEDPQA | MSNQVLCCVVLCFLGANTVDGGIT |
| | LSIQEGENATMNCSYKTSINNLQWYRQNSGR | QSPKYLFRKEGQNVTLSCEQNLNH |
| | GLVHLILIRSNEREKHSGRLRVTLDTSKKSSS | DAMYWYRQDPGQGLRLIYYSQIVN |
| | LLITASRAADTASYFCATVNNNARLMFGDG | DFQKGDIAEGYSVSREKKESFPLTV |
| | TQLVVK | TSAQKNPTAFYLCASSMAANYGYT |
| | | FGSGTRLTVV |
| 48 | MVLKFSVSILWIQLAWVSTQLLEQSPQFLSIQ | MSNQVLCCVVLCLLGANTVDGGIT |
| | EGENLTVYCNSSSVFSSLQWYRQEPGEGPVL | QSPKYLFRKEGQNVTLSCEQNLNH |
| | LVTVVTGGEVKKLKRLTFQFGDARKDSSLHI | DAMYWYRQDPGQGLRLIYYSQIVN |
| | TAAQPGDTGLYLCAALGWDSNYQLIWGAG | DFQKGDIAEGYSVSREKKESFPLTV |
| | TKLIIK | TSAQKNPTAFYLCASSIDRDYEQYF |
| | | GPGTRLTVT |
| 49 | METLLKVLSGTLLWQLTWVRSQQPVQSPQA | MGCRLLCCAVLCLLGAVPMETGVT |
| | VILREGEDAVINCSSSKALYSVHWYRQKHGE | QTPRHLVMGMTNKKSLKCEQHLG |
| | APVFLMILLKGGEQKGHEKISASFNEKKQQS | HNAMYWYKQSAKKPLELMFVYNF |
| | SLYLTASQLSYSGTYFCGTEMDGNKLVFGA | KEQTENNSVPSRFSPECPNSSHLFLH |
| | GTILRVK | LHTLQPEDSALYLCASSQVGTGSYE |
| | | QYFGPGTRLTVT |
| 50 | METLLKVLSGTLLWQLTWVRSQQPVQSPQA | MSNQVLCCVVLCFLGANTVDGGIT |
| | VILREGEDAVINCSSSKALYSVHWYRQKHGE | QSPKYLFRKEGQNVTLSCEQNLNH |
| | APVFLMILLKGGEQKGHEKISASFNEKKQQS | DAMYWYRQDPGQGLRLIYYSQIVN |
| | SLYLTASQLSYSGTYFCGTEMDGNKLVFGA | DFQKGDIAEGYSVSREKKESFPLTV |
| | GTILRVK | TSAQKNPTAFYLCASSITSGGDTQY |
| | | FGPGTRLTVL |
| 51 | MRLVARVTVFLTFGTIIDAKTTQPPSMDCAE | MSNQVLCCVVLCLLGANTVDGGIT |
| | GRAANLPCNHSTISGNEYVYWYRQIHSQGPQ | QSPKYLFRKEGQNVTLSCEQNLNH |
| | YIIHGLKNNETNEMASLIITEDRKSSTLILPHA | DAMYWYRQDPGQGLRLIYYSQIVN |
| | TLRDTAVYYCIVTNAGGTSYGKLTFGQGTIL | DFQKGDIAEGYSVSREKKESFPLTV |
| | TVH | TSAQKNPTAFYLCASSITSGGDTQY |
| | | FGPGTRLTVL |
| 52 | METLLKVLSGTLLWQLTWVRSQQPVQSPQA | MSNQVLCCVVLCFLGANTVDGGIT |
| | VILREGEDAVINCSSSKALYSVHWYRQKHGE | QSPKYLFRKEGQNVTLSCEQNLNH |
| | APVFLMILLKGGEQKGHEKISASFNEKKQQS | DAMYWYRQDPGQGLRLIYYSQIVN |
| | SLYLTASQLSYSGTYFCGTEMDGNKLVFGA | DFQKGDIAEGYSVSREKKESFPLTV |
| | GTILRVK | TSAQKNPTAFYLCASSMAGPYYGY |
| | | TFGSGTRLTVV |
| 53 | MTSIRAVFIFLWLQLDLVNGENVEQHPSTLS | MSNQVLCCVVLCFLGANTVDGGIT |
| | VQEGDSAVIKCTYSDSASNYFPWYKQELGK | QSPKYLFRKEGQNVTLSCEQNLNH |
| | GPQLIIDIRSNVGEKKDQRIAVTLNKTAKHFS | DAMYWYRQDPGQGLRLIYYSQIVN |
| | LHITETQPEDSAVYFCAASYSGYSTLTFGKGT | DFQKGDIAEGYSVSREKKESFPLTV |
| | MLLVS | TSAQKNPTAFYLCASSIDHSYEQYF |
| | | GPGTRLTVT |
| 54 | MTSIRAVFIFLWLQLDLVNGENVEQHPSTLS | MSNQVLCCVVLCFLGANTVDGGIT |
| | VQEGDSAVIKCTYSDSASNYFPWYKQELGK | QSPKYLFRKEGQNVTLSCEQNLNH |
| | GPQLIIDIRSNVGEKKDQRIAVTLNKTAKHFS | DAMYWYRQDPGQGLRLIYYSQIVN |
| | LHITETQPEDSAVYFCALTMEYGNKLVFGAG | DFQKGDIAEGYSVSREKKESFPLTV |
| | TILRVK | TSAQKNPTAFYLCASSRDRDNEQFF |
| | | GPGTRLTVL |
| 55 | MTSIRAVFIFLWLQLDLVNGENVEQHPSTLS | MSNQVLCCVVLCLLGANTVDGGIT |
| | VQEGDSAVIKCTYSDSASNYFPWYKQELGK | QSPKYLFRKEGQNVTLSCEQNLNH |
| | GPQLIIDIRSNVGEKKDQRIAVTLNKTAKHFS | DAMYWYRQDPGQGLRLIYYSQIVN |
| | LHITETQPEDSAVYFCAASMKAGTALIFGKG | DFQKGDIAEGYSVSREKKESFPLTV |
| | TTLSVS | TSAQKNPTAFYLCASSISSGPYEQYF |
| | | GPGTRLTVT |
| 56 | METLLGVSLVILWLQLARVNSQQGEEDPQA | MSNQVLCCVVLCLLGANTVDGGIT |
| | LSIQEGENATMNCSYKTSINNLQWYRQNSGR | QSPKYLFRKEGQNVTLSCEQNLNH |
| | GLVHLILIRSNEREKHSGRLRVTLDTSKKSSS | DAMYWYRQDPGQGLRLIYYSQIVN |
| | LLITASRAADTASYFCATDAKEYGNKLVFGA | DFQKGDIAEGYSVSREKKESFPLTV |
| | GTILRVK | TSAQKNPTAFYLCASSIGSSYNSPLH |
| | | FGNGTRLTVT |
| 57 | METLLGVSLVILWLQLARVNSQQGEEDPQA | MSNQVLCCVVLCFLGANTVDGGIT |
| | LSIQEGENATMNCSYKTSINNLQWYRQNSGR | QSPKYLFRKEGQNVTLSCEQNLNH |
| | GLVHLILIRSNEREKHSGRLRVTLDTSKKSSS | DAMYWYRQDPGQGLRLIYYSQIVN |
| | LLITASRAADTASYFCATANHNAGNMLTFG | DFQKGDIAEGYSVSREKKESFPLTV |
| | GGTRLMVK | TSAQKNPTAFYLCASSVNQEYEQY |
| | | FGPGTRLTVT |
| 58 | MNYSPGLVSLILLLLGRTRGDSVTQMEGPVT | MSNQVLCCVVLCLLGANTVDGGIT |
| | LSEEAFLTINCTYTATGYPSLFWYVQYPGEG | QSPKYLFRKEGQNVTLSCEQNLNH |
| | LQLLLKATKADDKGSNKGFEATYRKETTSF | DAMYWYRQDPGQGLRLIYYSQIVN |
| | HLEKGSVQVSDSAVYFCALSVEGGSEKLVFG | DFQKGDIAEGYSVSREKKESFPLTV |
| | KGTKLTVN | TSAQKNPTAFYLCASSIVAGNVYEQ |
| | | YFGPGTRLTVT |
| 59 | MTSIRAVFIFLWLQLDLVNGENVEQHPSTLS | MSNQVLCCVVLCFLGANTVDGGIT |
| | VQEGDSAVIKCTYSDSASNYFPWYKQELGK | QSPKYLFRKEGQNVTLSCEQNLNH |
| | GPQLIIDIRSNVGEKKDQRIAVTLNKTAKHFS | DAMYWYRQDPGQGLRLIYYSQIVN |
| | LHITETQPEDSAVYFCAASNSNSGYALNFGK | DFQKGDIAEGYSVSREKKESFPLTV |
| | GTSLLVT | TSAQKNPTAFYLCASSLGTGGYYG |
| | | YTFGSGTRLTVV |
| 60 | MEKNPLAAPLLILWFHLDCVSSILNVEQSPQS | MSNQVLCCVVLCFLGANTVDGGIT |
| | LHVQEGDSTNFTCSFPSSNFYALHWYRWET | QSPKYLFRKEGQNVTLSCEQNLNH |
| | AKSPEALFVMTLNGDEKKKGRISATLNTKEG | DAMYWYRQDPGQGLRLIYYSQIVN |
| | YSYLYIKGSQPEDSATYLCALGGYNKLIFGA | DFQKGDIAEGYSVSREKKESFPLTV |
| | GTRLAVH | TSAQKNPTAFYLCASSGTVNTEAFF |
| | | GQGTRLTVV |
| 61 | MISLRVLLVILWLQLSWVWSQRKEVEQDPG | MGPQLLGYVVLCLLGAGPLEAQVT |
| | PFNVPEGATVAFNCTYSNSASQSFFWYRQDC | QNPRYLITVTGKKLTVTCSQNMNH |
| | RKEPKLLMSVYSSGNEDGRFTAQLNRASQYI | EYMSWYRQDPGLGLRQIYYSMNVE |
| | SLLIRDSKLSDSATYLCVVNPRSGNTPLVFGK | VTDKGDVPEGYKVSRKEKRNFPLIL |
| | GTRLSVI | ESPSPNQTSLYFCASTEGWGYEQYF |
| | | GPGTRLTVT |
| 62 | MTSIRAVFIFLWLQLDLVNGENVEQHPSTLS | MSNQVLCCVVLCFLGANTVDGGIT |
| | VQEGDSAVIKCTYSDSASNYFPWYKQELGK | QSPKYLFRKEGQNVTLSCEQNLNH |
| | GPQLIIDIRSNVGEKKDQRIAVTLNKTAKHFS | DAMYWYRQDPGQGLRLIYYSQIVN |
| | LHITETQPEDSAVYFCAASFTSGTYKYIFGTG | DFQKGDIAEGYSVSREKKESFPLTV |
| | TRLKVL | TSAQKNPTAFYLCASSIRDSNQPQH |
| | | FGDGTRLSIL |
| 63 | METLLGVSLVILWLQLARVNSQQGEEDPQA | MSNQVLCCVVLCLLGANTVDGGIT |
| | LSIQEGENATMNCSYKTSINNLQWYRQNSGR | QSPKYLFRKEGQNVTLSCEQNLNH |
| | GLVHLILIRSNEREKHSGRLRVTLDTSKKSSS | DAMYWYRQDPGQGLRLIYYSQIVN |
| | LLITASRAADTASYFCATDLAYGNNRLAFGK | DFQKGDIAEGYSVSREKKESFPLTV |
| | GNQVVVI | TSAQKNPTAFYLCASSVSSSYEQYF |
| | | GPGTRLTVT |
| 64 | METLLGVSLVILWLQLARVNSQQGEEDPQA | MSNQVLCCVVLCLLGANTVDGGIT |
| | LSIQEGENATMNCSYKTSINNLQWYRQNSGR | QSPKYLFRKEGQNVTLSCEQNLNH |
| | GLVHLILIRSNEREKHSGRLRVTLDTSKKSSS | DAMYWYRQDPGQGLRLIYYSQIVN |
| | LLITASRAADTASYFCATDAKEYGNKLVFGA | DFQKGDIAEGYSVSREKKESFPLTV |
| | GTILRVK | TSAQKNPTAFYLCASSITSGGDTQY |
| | | FGPGTRLTVL |
| 65 | METLLGVSLVILWLQLARVNSQQGEEDPQA | MSNQVLCCVVLCFLGANTVDGGIT |
| | LSIQEGENATMNCSYKTSINNLQWYRQNSGR | QSPKYLFRKEGQNVTLSCEQNLNH |
| | GLVHLILIRSNEREKHSGRLRVTLDTSKKSSS | DAMYWYRQDPGQGLRLIYYSQIVN |
| | LLITASRAADTASYFCATDARETSGSRLTFGE | DFQKGDIAEGYSVSREKKESFPLTV |
| | GTQLTVN | TSAQKNPTAFYLCASSWFAGGRDY |
| | | GYTFGSGTRLTVV |
| 66 | MMKSLRVLLVILWLQLSWVWSQQKEVEQD | MSNQVLCCVVLCFLGANTVDGGIT |
| | PGPLSVPEGAIVSLNCTYSNSAFQYFMWYRQ | QSPKYLFRKEGQNVTLSCEQNLNH |
| | YSRKGPELLMYTYSSGNKEDGRFTAQVDKS | DAMYWYRQDPGQGLRLIYYSQIVN |
| | SKYISLFIRDSQPSDSATYLCAMSNNYGQNF | DFQKGDIAEGYSVSREKKESFPLTV |
| | VFGPGTRLSVL | TSAQKNPTAFYLCASSFDRDNEQFF |
| | | GPGTRLTVL |
| 67 | METLLGVSLVILWLQLARVNSQQGEEDPQA | MSNQVLCCVVLCFLGANTVDGGIT |
| | LSIQEGENATMNCSYKTSINNLQWYRQNSGR | QSPKYLFRKEGQNVTLSCEQNLNH |
| | GLVHLILIRSNEREKHSGRLRVTLDTSKKSSS | DAMYWYRQDPGQGLRLIYYSQIVN |
| | LLITASRAADTASYFCATDARETSGSRLTFGE | DFQKGDIAEGYSVSREKKESFPLTV |
| | GTQLTVN | TSAQKNPTAFYLCASSITSGGDTQY |
| | | FGPGTRLTVL |
| 68 | METLLGVSLVILWLQLARVNSQQGEEDPQA | MSNQVLCCVVLCFLGANTVDGGIT |
| | LSIQEGENATMNCSYKTSINNLQWYRQNSGR | QSPKYLFRKEGQNVTLSCEQNLNH |
| | GLVHLILIRSNEREKHSGRLRVTLDTSKKSSS | DAMYWYRQDPGQGLRLIYYSQIVN |
| | LLITASRAADTASYFCATDARETSGSRLTFGE | DFQKGDIAEGYSVSREKKESFPLTV |
| | GTQLTVN | TSAQKNPTAFYLCASSMAANYGYT |
| | | FGSGTRLTVV |
| 69 | METLLGVSLVILWLQLARVNSQQGEEDPQA | MSNQVLCCVVLCFLGANTVDGGIT |
| | LSIQEGENATMNCSYKTSINNLQWYRQNSGR | QSPKYLFRKEGQNVTLSCEQNLNH |
| | GLVHLILIRSNEREKHSGRLRVTLDTSKKSSS | DAMYWYRQDPGQGLRLIYYSQIVN |
| | LLITASRAADTASYFCATDARETSGSRLTFGE | DFQKGDIAEGYSVSREKKESFPLTV |
| | GTQLTVN | TSAQKNPTAFYLCASSMAGPYYGY |
| | | TFGSGTRLTVV |
| 70 | METLLGVSLVILWLQLARVNSQQGEEDPQA | MGCRLLCCAVLCLLGAVPMETGVT |
| | LSIQEGENATMNCSYKTSINNLQWYRQNSGR | QTPRHLVMGMTNKKSLKCEQHLG |
| | GLVHLILIRSNEREKHSGRLRVTLDTSKKSSS | HNAMYWYKQSAKKPLELMFVYNF |
| | LLITASRAADTASYFCATDARETSGSRLTFGE | KEQTENNSVPSRFSPECPNSSHLFLH |
| | GTQLTVN | LHTLQPEDSALYLCASSQVGTGSYE |
| | | QYFGPGTRLTVT |
| 71 | METLLGVSLVILWLQLARVNSQQGEEDPQA | MSNQVLCCVVLCFLGANTVDGGIT |
| | LSIQEGENATMNCSYKTSINNLQWYRQNSGR | QSPKYLFRKEGQNVTLSCEQNLNH |
| | GLVHLILIRSNEREKHSGRLRVTLDTSKKSSS | DAMYWYRQDPGQGLRLIYYSQIVN |
| | LLITASRAADTASYFCATDARETSGSRLTFGE | DFQKGDIAEGYSVSREKKESFPLTV |
| | GTQLTVN | TSAQKNPTAFYLCASSIDHSYEQYF |
| | | GPGTRLTVT |
| 72 | METLLGVSLVILWLQLARVNSQQGEEDPQA | MSNQVLCCVVLCLLGANTVDGGIT |
| | LSIQEGENATMNCSYKTSINNLQWYRQNSGR | QSPKYLFRKEGQNVTLSCEQNLNH |
| | GLVHLILIRSNEREKHSGRLRVTLDTSKKSSS | DAMYWYRQDPGQGLRLIYYSQIVN |
| | LLITASRAADTASYFCATGPLYNQGGKLIFG | DFQKGDIAEGYSVSREKKESFPLTV |
| | QGTELSVK | TSAQKNPTAFYLCASSIVAGNEQYF |
| | | GPGTRLTVT |
| 73 | METLLGVSLVILWLQLARVNSQQGEEDPQA | MSNQVLCCVVLCFLGANTVDGGIT |
| | LSIQEGENATMNCSYKTSINNLQWYRQNSGR | QSPKYLFRKEGQNVTLSCEQNLNH |
| | GLVHLILIRSNEREKHSGRLRVTLDTSKKSSS | DAMYWYRQDPGQGLRLIYYSQIVN |
| | LLITASRAADTASYFCATDARETSGSRLTFGE | DFQKGDIAEGYSVSREKKESFPLTV |
| | GTQLTVN | TSAQKNPTAFYLCASSRTVNTEAFF |
| | | GQGTRLTVV |
| 74 | METLLGVSLVILWLQLARVNSQQGEEDPQA | MSNQVLCCVVLCFLGANTVDGGIT |
| | LSIQEGENATMNCSYKTSINNLQWYRQNSGR | QSPKYLFRKEGQNVTLSCEQNLNH |
| | GLVHLILIRSNEREKHSGRLRVTLDTSKKSSS | DAMYWYRQDPGQGLRLIYYSQIVN |
| | LLITASRAADTASYFCATDARETSGSRLTFGE | DFQKGDIAEGYSVSREKKESFPLTV |
| | GTQLTVN | TSAQKNPTAFYLCASSIGAGDSYEQ |
| | | YFGPGTRLTVT |
| 75 | METLLGVSLVILWLQLARVNSQQGEEDPQA | MGTSLLCWMALCLLGADHADTGV |
| | LSIQEGENATMNCSYKTSINNLQWYRQNSGR | SQDPRHKITKRGQNVTFRCDPISEH |
| | GLVHLILIRSNEREKHSGRLRVTLDTSKKSSS | NRLYWYRQTLGQGPEFLTYFQNEA |
| | LLITASRAADTASYFCATDARETSGSRLTFGE | QLEKSRLLSDRFSAERPKGSFSTLEI |
| | GTQLTVN | QRTEQGDSAMYLCASSPEPAGNTG |
| | | ELFFGEGSRLTVL |
| 76 | METLLGVSLVILWLQLARVNSQQGEEDPQA | MSNQVLCCVVLCFLGANTVDGGIT |
| | LSIQEGENATMNCSYKTSINNLQWYRQNSGR | QSPKYLFRKEGQNVTLSCEQNLNH |
| | GLVHLILIRSNEREKHSGRLRVTLDTSKKSSS | DAMYWYRQDPGQGLRLIYYSQIVN |
| | LLITASRAADTASYFCATDARETSGSRLTFGE | DFQKGDIAEGYSVSREKKESFPLTV |
| | GTQLTVN | TSAQKNPTAFYLCASSIDRDYEQYF |
| | | GPGTRLTVT |
| 77 | METLLGVSLVILWLQLARVNSQQGEEDPQA | MSNQVLCCVVLCFLGANTVDGGIT |
| | LSIQEGENATMNCSYKTSINNLQWYRQNSGR | QSPKYLFRKEGQNVTLSCEQNLNH |
| | GLVHLILIRSNEREKHSGRLRVTLDTSKKSSS | DAMYWYRQDPGQGLRLIYYSQIVN |
| | LLITASRAADTASYFCATDARETSGSRLTFGE | DFQKGDIAEGYSVSREKKESFPLTV |
| | GTQLTVN | TSAQKNPTAFYLCASSSWVYQPQH |
| | | FGDGTRLSIL |
| 78 | METLLGVSLVILWLQLARVNSQQGEEDPQA | MSNQVLCCVVLCFLGANTVDGGIT |
| | LSIQEGENATMNCSYKTSINNLQWYRQNSGR | QSPKYLFRKEGQNVTLSCEQNLNH |
| | GLVHLILIRSNEREKHSGRLRVTLDTSKKSSS | DAMYWYRQDPGQGLRLIYYSQIVN |
| | LLITASRAADTASYFCATDARETSGSRLTFGE | DFQKGDIAEGYSVSREKKESFPLTV |
| | GTQLTVN | TSAQKNPTAFYLCASSYPGQPYGYT |
| | | FGSGTRLTVV |
| 79 | METLLGVSLVILWLQLARVNSQQGEEDPQA | MSNQVLCCVVLCFLGANTVDGGIT |
| | LSIQEGENATMNCSYKTSINNLQWYRQNSGR | QSPKYLFRKEGQNVTLSCEQNLNH |
| | GLVHLILIRSNEREKHSGRLRVTLDTSKKSSS | DAMYWYRQDPGQGLRLIYYSQIVN |
| | LLITASRAADTASYFCATDARETSGSRLTFGE | DFQKGDIAEGYSVSREKKESFPLTV |
| | GTQLTVN | TSAQKNPTAFYLCASSITGDSYNEQ |
| | | FFGPGTRLTVL |
| 80 | MASAPISMLAMLFTLSGLRAQSVAQPEDQV | MSNQVLCCVVLCLLGANTVDGGIT |
| | NVAEGNPLTVKCTYSVSGNPYLFWYVQYPN | QSPKYLFRKEGQNVTLSCEQNLNH |
| | RGLQFLLKYITGDNLVKGSYGFEAEFNKSQT | DAMYWYRQDPGQGLRLIYYSQIVN |
| | SFHLKKPSALVSDSALYFCAVRDSWGATNK | DFQKGDIAEGYSVSREKKESFPLTV |
| | LIFGTGTLLAVQ | TSAQKNPTAFYLCASRREPEAFFGQ |
| | | GTRLTVV |
| 81 | MLTASLLRAVIASICVVSSMAQKVTQAQTEI | MSNQVLCCVVLCFLGANTVDGGIT |
| | SVVEKEDVTLDCVYETRDTTYYLFWYKQPP | QSPKYLFRKEGQNVTLSCEQNLNH |
| | SGELVFLIRRNSFDEQNEISGRYSWNFQKSTS | DAMYWYRQDPGQGLRLIYYSQIVN |
| | SFNFTITASQVVDSAVYFCALSDSNNARLMF | DFQKGDIAEGYSVSREKKESFPLTV |
| | GDGTQLVVK | TSAQKNPTAFYLCASNTGFTGELFF |
| | | GEGSRLTVL |
| 82 | METLLGLLILWLQLQWVSSKQEVTQIPAALS | MSNQVLCCVVLCLLGANTVDGGIT |
| | VPEGENLVLNCSFTDSAIYNLQWFRQDPGKG | QSPKYLFRKEGQNVTLSCEQNLNH |
| | LTSLLLIQSSQREQTSGRLNASLDKSSGRSTL | DAMYWYRQDPGQGLRLIYYSQIVN |
| | YIAASQPGDSATYLCAVDSDRGSTLGRLYFG | DFQKGDIAEGYSVSREKKESFPLTV |
| | RGTQLTVW | TSAQKNPTAFYLCASSVQVLYEQY |
| | | FGPGTRLTVT |
| 83 | MLTASLLRAVIASICVVSSMAQKVTQAQTEI | MSNQVLCCVVLCFLGANTVDGGIT |
| | SVVEKEDVTLDCVYETRDTTYYLFWYKQPP | QSPKYLFRKEGQNVTLSCEQNLNH |
| | SGELVFLIRRNSFDEQNEISGRYSWNFQKSTS | DAMYWYRQDPGQGLRLIYYSQIVN |
| | SFNFTITASQVVDSAVYFCALSDSNNARLMF | DFQKGDIAEGYSVSREKKESFPLTV |
| | GDGTQLVVK | TSAQKNPTAFYLCASSITSGGDTQY |
| | | FGPGTRLTVL |
| 84 | MLTASLLRAVIASICVVSSMAQKVTQAQTEI | MSNQVLCCVVLCFLGANTVDGGIT |
| | SVVEKEDVTLDCVYETRDTTYYLFWYKQPP | QSPKYLFRKEGQNVTLSCEQNLNH |
| | SGELVFLIRRNSFDEQNEISGRYSWNFQKSTS | DAMYWYRQDPGQGLRLIYYSQIVN |
| | SFNFTITASQVVDSAVYFCALSDSNNARLMF | DFQKGDIAEGYSVSREKKESFPLTV |
| | GDGTQLVVK | TSAQKNPTAFYLCASSMAGPYYGY |
| | | TFGSGTRLTVV |
| 85 | MASAPISMLAMLFTLSGLRAQSVAQPEDQV | MSNQVLCCVVLCLLGANTVDGGIT |
| | NVAEGNPLTVKCTYSVSGNPYLFWYVQYPN | QSPKYLFRKEGQNVTLSCEQNLNH |
| | RGLQFLLKYITGDNLVKGSYGFEAEFNKSQT | DAMYWYRQDPGQGLRLIYYSQIVN |
| | SFHLKKPSALVSDSALYFCAVRDSWGATNK | DFQKGDIAEGYSVSREKKESFPLTV |
| | LIFGTGTLLAVQ | TSAQKNPTAFYLCASSMAGPYYGY |
| | | TFGSGTRLTVV |
| 86 | MLTASLLRAVIASICVVSSMAQKVTQAQTEI | MSNQVLCCVVLCFLGANTVDGGIT |
| | SVVEKEDVTLDCVYETRDTTYYLFWYKQPP | QSPKYLFRKEGQNVTLSCEQNLNH |
| | SGELVFLIRRNSFDEQNEISGRYSWNFQKSTS | DAMYWYRQDPGQGLRLIYYSQIVN |
| | SFNFTITASQVVDSAVYFCALSDSNNARLMF | DFQKGDIAEGYSVSREKKESFPLTV |
| | GDGTQLVVK | TSAQKNPTAFYLCASSMAANYGYT |
| | | FGSGTRLTVV |
| 87 | MASAPISMLAMLFTLSGLRAQSVAQPEDQV | MSNQVLCCVVLCLLGANTVDGGIT |
| | NVAEGNPLTVKCTYSVSGNPYLFWYVQYPN | QSPKYLFRKEGQNVTLSCEQNLNH |
| | RGLQFLLKYITGDNLVKGSYGFEAEFNKSQT | DAMYWYRQDPGQGLRLIYYSQIVN |
| | SFHLKKPSALVSDSALYFCAVRDSWGATNK | DFQKGDIAEGYSVSREKKESFPLTV |
| | LIFGTGTLLAVQ | TSAQKNPTAFYLCASSMAANYGYT |
| | | FGSGTRLTVV |
| 88 | MASAPISMLAMLFTLSGLRAQSVAQPEDQV | MSNQVLCCVVLCLLGANTVDGGIT |
| | NVAEGNPLTVKCTYSVSGNPYLFWYVQYPN | QSPKYLFRKEGQNVTLSCEQNLNH |
| | RGLQFLLKYITGDNLVKGSYGFEAEFNKSQT | DAMYWYRQDPGQGLRLIYYSQIVN |
| | SFHLKKPSALVSDSALYFCAVRDSWGATNK | DFQKGDIAEGYSVSREKKESFPLTV |
| | LIFGTGTLLAVQ | TSAQKNPTAFYLCASSIDSGSGYEQ |
| | | YFGPGTRLTVT |
| 89 | MDTRLLCCAVICLLGAGLSNAGVMQNPRHL | MDTRLLCCAVICLLGAGLSNAGVM |
| | VRRRGQEARLRCSPMKGHSHVYWYRQLPEE | QNPRHLVRRRGQEARLRCSPMKGH |
| | GLKFMVYLQKENIIDESGMPKERFSAEFPKE | SHVYWYRQLPEEGLKFMVYLQKE |
| | GPSILRIQQVVRGDSAAYFCASSPLKGNTEAF | NIIDESGMPKERFSAEFPKEGPSILRI |
| | FGQGTRLTVV | QQVVRGDSAAYFCASSPLKGNTEA |
| | | FFGQGTRLTVV |
| 90 | MLTASLLRAVIASICVVSSMAQKVTQAQTEI | MSNQVLCCVVLCLLGANTVDGGIT |
| | SVVEKEDVTLDCVYETRDTTYYLFWYKQPP | QSPKYLFRKEGQNVTLSCEQNLNH |
| | SGELVFLIRRNSFDEQNEISGRYSWNFQKSTS | DAMYWYRQDPGQGLRLIYYSQIVN |
| | SFNFTITASQVVDSAVYFCALSFDNYGQNFV | DFQKGDIAEGYSVSREKKESFPLTV |
| | FGPGTRLSVL | TSAQKNPTAFYLCASIRENGELFFG |
| | | EGSRLTVL |
| 91 | MASAPISMLAMLFTLSGLRAQSVAQPEDQV | MSNQVLCCVVLCFLGANTVDGGIT |
| | NVAEGNPLTVKCTYSVSGNPYLFWYVQYPN | QSPKYLFRKEGQNVTLSCEQNLNH |
| | RGLQFLLKYITGDNLVKGSYGFEAEFNKSQT | DAMYWYRQDPGQGLRLIYYSQIVN |
| | SFHLKKPSALVSDSALYFCAVRAPPLARGNN | DFQKGDIAEGYSVSREKKESFPLTV |
| | RLAFGKGNQVVVI | TSAQKNPTAFYLCASSIGAGDSYEQ |
| | | YFGPGTRLTVT |
| 92 | MLLLLVPVLEVIFTLGGTRAQSVTQLGSHVS | MSNQVLCCVVLCLLGANTVDGGIT |
| | VSEGALVLLRCNYSSSVPPYLFWYVQYPNQ | QSPKYLFRKEGQNVTLSCEQNLNH |
| | GLQLLLKYTSAATLVKGINGFEAEFKKSETSF | DAMYWYRQDPGQGLRLIYYSQIVN |
| | HLTKPSAHMSDAAEYFCAVTFMNYGGATN | DFQKGDIAEGYSVSREKKESFPLTV |
| | KLIFGTGTLLAVQ | TSAQKNPTAFYLCASSIGGDWGRY |
| | | EQYFGPGTRLTVT |
| 93 | MEKNPLAAPLLILWFHLDCVSSILNVEQSPQS | MGCRLLCCAVLCLLGAVPMETGVT |
| | LHVQEGDSTNFTCSFPSSNFYALHWYRWET | QTPRHLVMGMTNKKSLKCEQHLG |
| | AKSPEALFVMTLNGDEKKKGRISATLNTKEG | HNAMYWYKQSAKKPLELMFVYNF |
| | YSYLYIKGSQPEDSATYLCASPVDRGSTLGR | KEQTENNSVPSRFSPECPNSSHLFLH |
| | LYFGRGTQLTVW | LHTLQPEDSALYLCASSQVGTGSYE |
| | | QYFGPGTRLTVT |
| 94 | MLTASLLRAVIASICVVSSMAQKVTQAQTEI | MSNQVLCCVVLCLLGANTVDGGIT |
| | SVVEKEDVTLDCVYETRDTTYYLFWYKQPP | QSPKYLFRKEGQNVTLSCEQNLNH |
| | SGELVFLIRRNSFDEQNEISGRYSWNFQKSTS | DAMYWYRQDPGQGLRLIYYSQIVN |
| | SFNFTITASQVVDSAVYFCALSEGGYNAGNM | DFQKGDIAEGYSVSREKKESFPLTV |
| | LTFGGGTRLMVK | TSAQKNPTAFYLCASSPGNEAFFGQ |
| | | GTRLTVV |
| 95 | MEKNPLAAPLLILWFHLDCVSSILNVEQSPQS | MSNQVLCCVVLCFLGANTVDGGIT |
| | LHVQEGDSTNFTCSFPSSNFYALHWYRWET | QSPKYLFRKEGQNVTLSCEQNLNH |
| | AKSPEALFVMTLNGDEKKKGRISATLNTKEG | DAMYWYRQDPGQGLRLIYYSQIVN |
| | YSYLYIKGSQPEDSATYLCASPVDRGSTLGR | DFQKGDIAEGYSVSREKKESFPLTV |
| | LYFGRGTQLTVW | TSAQKNPTAFYLCASSGTVNTEAFF |
| | | GQGTRLTVV |
| 96 | MLTASLLRAVIASICVVSSMAQKVTQAQTEI | MSNQVLCCVVLCFLGANTVDGGIT |
| | SVVEKEDVTLDCVYETRDTTYYLFWYKQPP | QSPKYLFRKEGQNVTLSCEQNLNH |
| | SGELVFLIRRNSFDEQNEISGRYSWNFQKSTS | DAMYWYRQDPGQGLRLIYYSQIVN |
| | SFNFTITASQVVDSAVYFCALSRGGLYNFNK | DFQKGDIAEGYSVSREKKESFPLTV |
| | FYFGSGTKLNVK | TSAQKNPTAFYLCASSITSGGDTQY |
| | | FGPGTRLTVL |
| 97 | MEKNPLAAPLLILWFHLDCVSSILNVEQSPQS | MSNQVLCCVVLCLLGANTVDGGIT |
| | LHVQEGDSTNFTCSFPSSNFYALHWYRWET | QSPKYLFRKEGQNVTLSCEQNLNH |
| | AKSPEALFVMTLNGDEKKKGRISATLNTKEG | DAMYWYRQDPGQGLRLIYYSQIVN |
| | YSYLYIKGSQPEDSATYLCASPVDRGSTLGR | DFQKGDIAEGYSVSREKKESFPLTV |
| | LYFGRGTQLTVW | TSAQKNPTAFYLCASSMAANYGYT |
| | | FGSGTRLTVV |
| 98 | MSLSSLLKVVTASLWLGPGIAQKITQTQPGM | MSNQVLCCVVLCFLGANTVDGGIT |
| | FVQEKEAVTLDCTYDTSDQSYGLFWYKQPS | QSPKYLFRKEGQNVTLSCEQNLNH |
| | SGEMIFLIYQGSYDEQNATEGRYSLNFQKAR | DAMYWYRQDPGQGLRLIYYSQIVN |
| | KSTNLVISASQLGDSAMYFCAMREGWSTGG | DFQKGDIAEGYSVSREKKESFPLTV |
| | FKTIFGAGTRLFVK | TSAQKNPTAFYLCASSIGAGQIYEQ |
| | | YFGPGTRLTVT |
| 99 | MEKNPLAAPLLILWFHLDCVSSILNVEQSPQS | MVSRLLSLVSLCLLGAKHIEAGVTQ |
| | LHVQEGDSTNFTCSFPSSNFYALHWYRWET | FPSHSVIEKGQTVTLRCDPISGHDNL |
| | AKSPEALFVMTLNGDEKKKGRISATLNTKEG | YWYRRVMGKEIKFLLHFVKESKQD |
| | YSYLYIKGSQPEDSATYLCASPVDRGSTLGR | ESGMPNNRFLAERTGGTYSTLKVQ |
| | LYFGRGTQLTVW | PAELEDSGVYFCASSLSPRGDYNNE |
| | | QFFGPGTRLTVL |
| 100 | MSLSSLLKVVTASLWLGPGIAQKITQTQPGM | MSNQVLCCVVLCLLGANTVDGGIT |
| | FVQEKEAVTLDCTYDTSDQSYGLFWYKQPS | QSPKYLFRKEGQNVTLSCEQNLNH |
| | SGEMIFLIYQGSYDEQNATEGRYSLNFQKAR | DAMYWYRQDPGQGLRLIYYSQIVN |
| | KSANLVISASQLGDSAMYFCAMREGPFYNQ | DFQKGDIAEGYSVSREKKESFPLTV |
| | GGKLIFGQGTELSVK | TSAQKNPTAFYLCASSPLYTNTGEL |
| | | FFGEGSRLTVL |
| 101 | MAMLLGASVLILWLQPDWVNSQQKNDDQQ | MSNQVLCCVVLCLLGANTVDGGIT |
| | VKQNSPSLSVQEGRISILNCDYTNSMFDYFL | QSPKYLFRKEGQNVTLSCEQNLNH |
| | WYKKYPAEGPTFLISISSIKDKNEDGRFTVFL | DAMYWYRQDPGQGLRLIYYSQIVN |
| | NKSAKHLSLHIVPSQPGDSAVYFCAASLGSG | DFQKGDIAEGYSVSREKKESFPLTV |
| | NTPLVFGKGTRLSVI | TSAQKNPTAFYLCASSIWGQPQHFG |
| | | DGTRLSIL |
| 102 | MAMLLGASVLILWLQPDWVNSQQKNDDQQ | MVSRLLSLVSLCLLGAKHIEAGVTQ |
| | VKQNSPSLSVQEGRISILNCDYTNSMFDYFL | FPSHSVIEKGQTVTLRCDPISGHDNL |
| | WYKKYPAEGPTFLISISSIKDKNEDGRFTVFL | YWYRRVMGKEIKFLLHFVKESKQD |
| | NKSAKHLSLHIVPSQPGDSAVYFCAASGEGG | ESGMPNNRFLAERTGGTYSTLKVQ |
| | ATNKLIFGTGTLLAVQ | PAELEDSGVYFCASSLSPRGDYNNE |
| | | QFFGPGTRLTVL |
| 103 | MLTASLLRAVIASICVVSSMAQKVTQAQTEI | MSNQVLCCVVLCLLGANTVDGGIT |
| | SVVEKEDVTLDCVYETRDTTYYLFWYKQPP | QSPKYLFRKEGQNVTLSCEQNLNH |
| | SGELVFLIRRNSFDEQNEISGRYSWNFQKSTS | DAMYWYRQDPGQGLRLIYYSQIVN |
| | SFNFTITASQVVDSAVYFCALSVTGQAEGGA | DFQKGDIAEGYSVSREKKESFPLTV |
| | TNKLIFGTGTLLAVQ | TSAQKNPTAFYLCASSITSGGDTQY |
| | | FGPGTRLTVL |
| 104 | MLTASLLRAVIASICVVSSMAQKVTQAQTEI | MSNQVLCCVVLCLLGANTVDGGIT |
| | SVVEKEDVTLDCVYETRDTTYYLFWYKQPP | QSPKYLFRKEGQNVTLSCEQNLNH |
| | SGELVFLIRRNSFDEQNEISGRYSWNFQKSTS | DAMYWYRQDPGQGLRLIYYSQIVN |
| | SFNFTITASQVVDSAVYFCALSVTGQAEGGA | DFQKGDIAEGYSVSREKKESFPLTV |
| | TNKLIFGTGTLLAVQ | TSAQKNPTAFYLCASSMAANYGYT |
| | | FGSGTRLTVV |
| 105 | MLTASLLRAVIASICVVSSMAQKVTQAQTEI | MSNQVLCCVVLCLLGANTVDGGIT |
| | SVVEKEDVTLDCVYETRDTTYYLFWYKQPP | QSPKYLFRKEGQNVTLSCEQNLNH |
| | SGELVFLIRRNSFDEQNEISGRYSWNFQKSTS | DAMYWYRQDPGQGLRLIYYSQIVN |
| | SFNFTITASQVVDSAVYFCALSVTGQAEGGA | DFQKGDIAEGYSVSREKKESFPLTV |
| | TNKLIFGTGTLLAVQ | TSAQKNPTAFYLCASSMAGPYYGY |
| | | TFGSGTRLTVV |
| 106 | MLTASLLRAVIASICVVSSMAQKVTQAQTEI | MSNQVLCCVVLCLLGANTVDGGIT |
| | SVVEKEDVTLDCVYETRDTTYYLFWYKQPP | QSPKYLFRKEGQNVTLSCEQNLNH |
| | SGELVFLIRRNSFDEQNEISGRYSWNFQKSTS | DAMYWYRQDPGQGLRLIYYSQIVN |
| | SFNFTITASQVVDSAVYFCALSVTGQAEGGA | DFQKGDIAEGYSVSREKKESFPLTV |
| | TNKLIFGTGTLLAVQ | TSAQKNPTAFYLCAISTSPGYGYTF |
| | | GSGTRLTVV |
| 107 | MLTASLLRAVIASICVVSSMAQKVTQAQTEI | MSNQVLCCVVLCLLGANTVDGGIT |
| | SVVEKEDVTLDCVYETRDTTYYLFWYKQPP | QSPKYLFRKEGQNVTLSCEQNLNH |
| | SGELVFLIRRNSFDEQNEISGRYSWNFQKSTS | DAMYWYRQDPGQGLRLIYYSQIVN |
| | SFNFTITASQVVDSAVYFCALSVTGQAEGGA | DFQKGDIAEGYSVSREKKESFPLTV |
| | TNKLIFGTGTLLAVQ | TSAQKNPTAFYLCASSIDRDYEQYF |
| | | GPGTRLTVT |
| 108 | MAFWLRRLGLHFRPHLGRRMESFLGGVLLIL | MSNQVLCCVVLCFLGANTVDGGIT |
| | WLQVDWVKSQKIEQNSEALNIQEGKTATLT | QSPKYLFRKEGQNVTLSCEQNLNH |
| | CNYTNYSPAYLQWYRQDPGRGPVFLLLIREN | DAMYWYRQDPGQGLRLIYYSQIVN |
| | EKEKRKERLKVTFDTTLKQSLFHITASQPADS | DFQKGDIAEGYSVSREKKESFPLTV |
| | ATYLCALYSGTYKYIFGTGTRLKVL | TSAQKNPTAFYLCASSITADAPYEQ |
| | | YFGPGTRLTVT |
| 110 | METLLKVLSGTLLWQLTWVRSQQPVQSPQA | MSNQVLCCVVLCFLGANTVDGGIT |
| | VILREGEDAVINCSSSKALYSVHWYRQKHGE | QSPKYLFRKEGQNVTLSCEQNLNH |
| | APVFLMILLKGGEQKGHEKISASFNEKKQQS | DAMYWYRQDPGQGLRLIYYSQIVN |
| | SLYLTASQLSYSGTYFCGTHGSSNTGKLIFGQ | DFQKGDIAEGYSVSREKKESFPLTV |
| | GTTLQVK | TSAQKNPTAFYLCASSIGAGTHYEQ |
| | | YFGPGTRLTVT |
| 111 | METLLKVLSGTLLWQLTWVRSQQPVQSPQA | MSNQVLCCVVLCFLGANTVDGGIT |
| | VILREGEDAVINCSSSKALYSVHWYRQKHGE | QSPKYLFRKEGQNVTLSCEQNLNH |
| | APVFLMILLKGGEQKGHEKISASFNEKKQQS | DAMYWYRQDPGQGLRLIYYSQIVN |
| | SLYLTASQLSYSGTYFCGTHGSSNTGKLIFGQ | DFQKGDIAEGYSVSREKKESFPLTV |
| | GTTLQVK | TSAQKNPTAFYLCASSIGISGDYEQ |
| | | YFGPGTRLTVT |
| 112 | MTSIRAVFIFLWLQLDLVNGENVEQHPSTLS | MSNQVLCCVVLCLLGANTVDGGIT |
| | VQEGDSAVIKCTYSDSASNYFPWYKQELGK | QSPKYLFRKEGQNVTLSCEQNLNH |
| | GPQLIIDIRSNVGEKKDQRIAVTLNKTAKHFS | DAMYWYRQDPGQGLRLIYYSQIVN |
| | LHITETQPEDSAVYFCAAIFLFGNEKLTFGTG | DFQKGDIAEGYSVSREKKESFPLTV |
| | TRLTII | TSAQKNPTAFYLCASSIGAGTHYEQ |
| | | YFGPGTRLTVT |
| 113 | MTSIRAVFIFLWLQLDLVNGENVEQHPSTLS | MSNQVLCCVVLCLLGANTVDGGIT |
| | VQEGDSAVIKCTYSDSASNYFPWYKQELGK | QSPKYLFRKEGQNVTLSCEQNLNH |
| | GPQLIIDIRSNVGEKKDQRIAVTLNKTAKHFS | DAMYWYRQDPGQGLRLIYYSQIVN |
| | LHITETQPEDSAVYFCAAIFLFGNEKLTFGTG | DFQKGDIAEGYSVSREKKESFPLTV |
| | TRLTII | TSAQKNPTAFYLCASSYGVSYEQYF |
| | | GPGTRLTVT |
| 114 | MTSIRAVFIFLWLQLDLVNGENVEQHPSTLS | MSNQVLCCVVLCLLGANTVDGGIT |
| | VQEGDSAVIKCTYSDSASNYFPWYKQELGK | QSPKYLFRKEGQNVTLSCEQNLNH |
| | GPQLIIDIRSNVGEKKDQRIAVTLNKTAKHFS | DAMYWYRQDPGQGLRLIYYSQIVN |
| | LHITETQPEDSAVYFCAAIFLFGNEKLTFGTG | DFQKGDIAEGYSVSREKKESFPLTV |
| | TRLTII | TSAQKNPTAFYLCASSTSYEQYFGP |
| | | GTRLTVT |
| 115 | MLTASLLRAVIASICVVSSMAQKVTQAQTEI | MSNQVLCCVVLCFLGANTVDGGIT |
| | SVVEKEDVTLDCVYETRDTTYYLFWYKQPP | QSPKYLFRKEGQNVTLSCEQNLNH |
| | SGELVFLIRRNSFDEQNEISGRYSWNFQKSTS | DAMYWYRQDPGQGLRLIYYSQIVN |
| | SFNFTITASQVVDSAVYFCALSEAGRDDKIIF | DFQKGDIAEGYSVSREKKESFPLTV |
| | GKGTRLHIL | TSAQKNPTAFYLCASSIGAGTHYEQ |
| | | YFGPGTRLTVT |
| 116 | MLTASLLRAVIASICVVSSMAQKVTQAQTEI | MSNQVLCCVVLCFLGANTVDGGIT |
| | SVVEKEDVTLDCVYETRDTTYYLFWYKQPP | QSPKYLFRKEGQNVTLSCEQNLNH |
| | SGELVFLIRRNSFDEQNEISGRYSWNFQKSTS | DAMYWYRQDPGQGLRLIYYSQIVN |
| | SFNFTITASQVVDSAVYFCALSEAGRDDKIIF | DFQKGDIAEGYSVSREKKESFPLTV |
| | GKGTRLHIL | TSAQKNPTAFYLCASSTSYEQYFGP |
| | | GTRLTVT |
| 117 | MLTASLLRAVIASICVVSSMAQKVTQAQTEI | MSNQVLCCVVLCFLGANTVDGGIT |
| | SVVEKEDVTLDCVYETRDTTYYLFWYKQPP | QSPKYLFRKEGQNVTLSCEQNLNH |
| | SGELVFLIRRNSFDEQNEISGRYSWNFQKSTS | DAMYWYRQDPGQGLRLIYYSQIVN |
| | SFNFTITASQVVDSAVYFCALSEAGRDDKIIF | DFQKGDIAEGYSVSREKKESFPLTV |
| | GKGTRLHIL | TSAQKNPTAFYLCASSIGAGTHYEQ |
| | | YFGPGTRLTVT |
| 118 | MLTASLLRAVIASICVVSSMAQKVTQAQTEI | MSNQVLCCVVLCFLGANTVDGGIT |
| | SVVEKEDVTLDCVYETRDTTYYLFWYKQPP | QSPKYLFRKEGQNVTLSCEQNLNH |
| | SGELVFLIRRNSFDEQNEISGRYSWNFQKSTS | DAMYWYRQDPGQGLRLIYYSQIVN |
| | SFNFTITASQVVDSAVYFCALSEAGRDDKIIF | DFQKGDIAEGYSVSREKKESFPLTV |
| | GKGTRLHIL | TSAQKNPTAFYLCASSSTYEQYFGP |
| | | GTRLTVT |
| 119 | MLTASLLRAVIASICVVSSMAQKVTQAQTEI | MSNQVLCCVVLCLLGANTVDGGIT |
| | SVVEKEDVTLDCVYETRDTTYYLFWYKQPP | QSPKYLFRKEGQNVTLSCEQNLNH |
| | SGELVFLIRRNSFDEQNEISGRYSWNFQKSTS | DAMYWYRQDPGQGLRLIYYSQIVN |
| | SFNFTITASQVVDSAVYFCALSEAGRDDKIIF | DFQKGDIAEGYSVSREKKESFPLTV |
| | GKGTRLHIL | TSAQKNPTAFYLCASKRTSYNEQFF |
| | | GPGTRLTVL |
| 120 | MLTASLLRAVIASICVVSSMAQKVTQAQTEI | MSNQVLCCVVLCFLGANTVDGGIT |
| | SVVEKEDVTLDCVYETRDTTYYLFWYKQPP | QSPKYLFRKEGQNVTLSCEQNLNH |
| | SGELVFLIRRNSFDEQNEISGRYSWNFQKSTS | DAMYWYRQDPGQGLRLIYYSQIVN |
| | SFNFTITASQVVDSAVYFCALSEAGRDDKIIF | DFQKGDIAEGYSVSREKKESFPLTV |
| | GKGTRLHIL | TSAQKNPTAFYLCASSSTYEQYFGP |
| | | GTRLTVT |
| 121 | MLTASLLRAVIASICVVSSMAQKVTQAQTEI | MSNQVLCCVVLCLLGANTVDGGIT |
| | SVVEKEDVTLDCVYETRDTTYYLFWYKQPP | QSPKYLFRKEGQNVTLSCEQNLNH |
| | SGELVFLIRRNSFDEQNEISGRYSWNFQKSTS | DAMYWYRQDPGQGLRLIYYSQIVN |
| | SFNFTITASQVVDSAVYFCALSEAGRDDKIIF | DFQKGDIAEGYSVSREKKESFPLTV |
| | GKGTRLHIL | TSAQKNPTAFYLCASSSMGLNEQFF |
| | | GPGTRLTVL |
| 122 | MLTASLLRAVIASICVVSSMAQKVTQAQTEI | MGCRLLCCAVLCLLGAVPMETGVT |
| | SVVEKEDVTLDCVYETRDTTYYLFWYKQPP | QTPRHLVMGMTNKKSLKCEQHLG |
| | SGELVFLIRRNSFDEQNEISGRYSWNFQKSTS | HNAMYWYKQSAKKPLELMFVYNF |
| | SFNFTITASQVVDSAVYFCALSEAGRDDKIIF | KEQTENNSVPSRFSPECPNSSHLFLH |
| | GKGTRLHIL | LHTLQPEDSALYLCASSQVGTGSYE |
| | | QYFGPGTRLTVT |
| 123 | MLTASLLRAVIASICVVSSMAQKVTQAQTEI | MSNQVLCCVVLCFLGANTVDGGIT |
| | SVVEKEDVTLDCVYETRDTTYYLFWYKQPP | QSPKYLFRKEGQNVTLSCEQNLNH |
| | SGELVFLIRRNSFDEQNEISGRYSWNFQKSTS | DAMYWYRQDPGQGLRLIYYSQIVN |
| | SFNFTITASQVVDSAVYFCALSEAGRDDKIIF | DFQKGDIAEGYSVSREKKESFPLTV |
| | GKGTRLHIL | TSAQKNPTAFYLCASSTSYEQYFGP |
| | | GTRLTVT |
| 124 | MLTASLLRAVIASICVVSSMAQKVTQAQTEI | MGCRLLCCAVLCLLGAVPMETGVT |
| | SVVEKEDVTLDCVYETRDTTYYLFWYKQPP | QTPRHLVMGMTNKKSLKCEQHLG |
| | SGELVFLIRRNSFDEQNEISGRYSWNFQKSTS | HNAMYWYKQSAKKPLELMFVYNF |
| | SFNFTITASQVVDSAVYFCALSEAGRDDKIIF | KEQTENNSVPSRFSPECPNSSHLFLH |
| | GKGTRLHIL | LHTLQPEDSALYLCASSQVGTGSYE |
| | | QYFGPGTRLTVT |
| 125 | MLTASLLRAVIASICVVSSMAQKVTQAQTEI | MSNQVLCCVVLCFLGANTVDGGIT |
| | SVVEKEDVTLDCVYETRDTTYYLFWYKQPP | QSPKYLFRKEGQNVTLSCEQNLNH |
| | SGELVFLIRRNSFDEQNEISGRYSWNFQKSTS | DAMYWYRQDPGQGLRLIYYSQIVN |
| | SFNFTITASQVVDSAVYFCALSEAGRDDKIIF | DFQKGDIAEGYSVSREKKESFPLTV |
| | GKGTRLHIL | TSAQKNPTAFYLCASSISLDYEQYF |
| | | GPGTRLTVT |
| 126 | MLTASLLRAVIASICVVSSMAQKVTQAQTEI | MSNQVLCCVVLCLLGANTVDGGIT |
| | SVVEKEDVTLDCVYETRDTTYYLFWYKQPP | QSPKYLFRKEGQNVTLSCEQNLNH |
| | SGELVFLIRRNSFDEQNEISGRYSWNFQKSTS | DAMYWYRQDPGQGLRLIYYSQIVN |
| | SFNFTITASQVVDSAVYFCALSEAGRDDKIIF | DFQKGDIAEGYSVSREKKESFPLTV |
| | GKGTRLHIL | TSAQKNPTAFYLCASSISTDYEQYF |
| | | GPGTRLTVT |
| 127 | MNYSPGLVSLILLLLGRTRGDSVTQMEGPVT | MSNQVLCCVVLCFLGANTVDGGIT |
| | LSEEAFLTINCTYTATGYPSLFWYVQYPGEG | QSPKYLFRKEGQNVTLSCEQNLNH |
| | LQLLLKATKADDKGSNKGFEATYRKETTSF | DAMYWYRQDPGQGLRLIYYSQIVN |
| | HLEKGSVQVSDSAVYFCALMRGIQGAQKLV | DFQKGDIAEGYSVSREKKESFPLTV |
| | F | TSAQKNPTAFYLCASSIGAGTHYEQ |
| | | YFGPGTRLTVT |
| 128 | MKKLLAMILWLQLDRLSGELKVEQNPLFLS | MSNQVLCCVVLCLLGANTVDGGIT |
| | MQEGKNYTIYCNYSTTSDRLYWYRQDPGKS | QSPKYLFRKEGQNVTLSCEQNLNH |
| | LESLFVLLSNGAVKQEGRLMASLDTKARLST | DAMYWYRQDPGQGLRLIYYSQIVN |
| | LHITAAVHDLSATYFCAVDRNKYIFGTGTRL | DFQKGDIAEGYSVSREKKESFPLTV |
| | KVL | TSAQKNPTAFYLCASSRDRDFEQYF |
| | | GPGTRLTVT |
| 129 | MLLITSMLVLWMQLSQVNGQQVMQIPQYQ | MSNQVLCCVVLCFLGANTVDGGIT |
| | HVQEGEDFTTYCNSSTTLSNIQWYKQRPGGH | QSPKYLFRKEGQNVTLSCEQNLNH |
| | PVFLIQLVKSGEVKKQKRLTFQFGEAKKNSS | DAMYWYRQDPGQGLRLIYYSQIVN |
| | LHITATQTTDVGTYFCFSGGYNKLIFGAGTR | DFQKGDIAEGYSVSREKKESFPLTV |
| | LAVH | TSAQKNPTAFYLCASSINRDYEQYF |
| | | GPGTRLTVT |
| 130 | MLLITSMLVLWMQLSQVNGQQVMQIPQYQ | MSNQVLCCVVLCFLGANTVDGGIT |
| | HVQEGEDFTTYCNSSTTLSNIQWYKQRPGGH | QSPKYLFRKEGQNVTLSCEQNLNH |
| | PVFLIQLVKSGEVKKQKRLTFQFGEAKKNSS | DAMYWYRQDPGQGLRLIYYSQIVN |
| | LHITATQTTDVGTYFCFSGGYNKLIFGAGTR | DFQKGDIAEGYSVSREKKESFPLTV |
| | LAVH | TSAQKNPTAFYLCASSIGAGTHYEQ |
| | | YFGPGTRLTVT |
| 131 | MACPGFLWALVISTCLEFSMAQTVTQSQPE | MSNQVLCCVVLCFLGANTVDGGIT |
| | MSVQEAETVTLSCTYDTSESDYYLFWYKQP | QSPKYLFRKEGQNVTLSCEQNLNH |
| | PSRQMILVIRQEAYKQQNATENRFSVNFQKA | DAMYWYRQDPGQGLRLIYYSQIVN |
| | AKSFSLKISDSQLGDAAMYFCAYRYLIQGAQ | DFQKGDIAEGYSVSREKKESFPLTV |
| | KLVF | TSAQKNPTAFYLCASSIGAGTHYEQ |
| | | YFGPGTRLTVT |
| 132 | MACPGFLWALVISTCLEFSMAQTVTQSQPE | MSNQVLCCVVLCFLGANTVDGGIT |
| | MSVQEAETVTLSCTYDTSESDYYLFWYKQP | QSPKYLFRKEGQNVTLSCEQNLNH |
| | PSRQMILVIRQEAYKQQNATENRFSVNFQKA | DAMYWYRQDPGQGLRLIYYSQIVN |
| | AKSFSLKISDSQLGDAAMYFCAYRYLIQGAQ | DFQKGDIAEGYSVSREKKESFPLTV |
| | KLVF | TSAQKNPTAFYLCASSLGTGGGYE |
| | | QYFGPGTRLTVT |
| 133 | METLLGVSLVILWLQLARVNSQQGEEDPQA | MSNQVLCCVVLCLLGANTVDGGIT |
| | LSIQEGENATMNCSYKTSINNLQWYRQNSGR | QSPKYLFRKEGQNVTLSCEQNLNH |
| | GLVHLILIRSNEREKHSGRLRVTLDTSKKSSS | DAMYWYRQDPGQGLRLIYYSQIVN |
| | LLITASRAADTASYFCALRRGKLIFGQGTELS | DFQKGDIAEGYSVSREKKESFPLTV |
| | VK | TSAQKNPTAFYLCASSIAPAAYEQY |
| | | FGPGTRLTVT |
| 134 | METLLGVSLVILWLQLARVNSQQGEEDPQA | MSNQVLCCVVLCLLGANTVDGGIT |
| | LSIQEGENATMNCSYKTSINNLQWYRQNSGR | QSPKYLFRKEGQNVTLSCEQNLNH |
| | GLVHLILIRSNEREKHSGRLRVTLDTSKKSSS | DAMYWYRQDPGQGLRLIYYSQIVN |
| | LLITASRAADTASYFCALRRGKLIFGQGTELS | DFQKGDIAEGYSVSREKKESFPLTV |
| | VK | TSAQKNPTAFYLCASSIGAGTHYEQ |
| | | YFGPGTRLTVT |
| 135 | MLLEHLLIILWMQLTWVSGQQLNQSPQSMFI | MSNQVLCCVVLCLLGANTVDGGIT |
| | QEGEDVSMNCTSSSIFNTWLWYKQDPGEGP | QSPKYLFRKEGQNVTLSCEQNLNH |
| | VLLIALYKAGELTSNGRLTAQFGITRKDSFLN | DAMYWYRQDPGQGLRLIYYSQIVN |
| | ISASIPSDVGIYFCAGQGYNQGGKLIFGQGTE | DFQKGDIAEGYSVSREKKESFPLTV |
| | LSVK | TSAQKNPTAFYLCASSRDGSYEQYF |
| | | GPGTRLTVT |
| 136 | MLLEHLLIILWMQLTWVSGQQLNQSPQSMFI | MSNQVLCCVVLCLLGANTVDGGIT |
| | QEGEDVSMNCTSSSIFNTWLWYKQDPGEGP | QSPKYLFRKEGQNVTLSCEQNLNH |
| | VLLIALYKAGELTSNGRLTAQFGITRKDSFLN | DAMYWYRQDPGQGLRLIYYSQIVN |
| | ISASIPSDVGIYFCAGQGYNQGGKLIFGQGTE | DFQKGDIAEGYSVSREKKESFPLTV |
| | LSVK | TSAQKNPTAFYLCASSIGAGTHYEQ |
| | | YFGPGTRLTVT |
| 137 | METLLGLLILWLQLQWVSSKQEVTQIPAALS | MSNQVLCCVVLCFLGANTVDGGIT |
| | VPEGENLVLNCSFTDSAIYNLQWFRQDPGKG | QSPKYLFRKEGQNVTLSCEQNLNH |
| | LTSLLLIQSSQREQTSGRLNASLDKSSGRSTL | DAMYWYRQDPGQGLRLIYYSQIVN |
| | YIAASQPGDSATYLCADDKAAGNKLTFGGG | DFQKGDIAEGYSVSREKKESFPLTV |
| | TRVLVK | TSAQKNPTAFYLCASSIGAGTHYEQ |
| | | YFGPGTRLTVT |
| 138 | METLLGVSLVILWLQLARVNSQQGEEDPQA | MSNQVLCCVVLCFLGANTVDGGIT |
| | LSIQEGENATMNCSYKTSINNLQWYRQNSGR | QSPKYLFRKEGQNVTLSCEQNLNH |
| | GLVHLILIRSNEREKHSGRLRVTLDTSKKSSS | DAMYWYRQDPGQGLRLIYYSQIVN |
| | LLITASRAADTASYFCATVWEYGNKLVFGA | DFQKGDIAEGYSVSREKKESFPLTV |
| | GTILRVK | TSAQKNPTAFYLCASSISLDYEQYF |
| | | GPGTRLTVT |
| 139 | METLLGVSLVILWLQLARVNSQQGEEDPQA | MSNQVLCCVVLCFLGANTVDGGIT |
| | LSIQEGENATMNCSYKTSINNLQWYRQNSGR | QSPKYLFRKEGQNVTLSCEQNLNH |
| | GLVHLILIRSNEREKHSGRLRVTLDTSKKSSS | DAMYWYRQDPGQGLRLIYYSQIVN |
| | LLITASRAADTASYFCATVWEYGNKLVFGA | DFQKGDIAEGYSVSREKKESFPLTV |
| | GTILRVK | TSAQKNPTAFYLCASSIGAGTHYEQ |
| | | YFGPGTRLTVT |
| 140 | METLLGVSLVILWLQLARVNSQQGEEDPQA | MSNQVLCCVVLCLLGANTVDGGIT |
| | LSIQEGENATMNCSYKTSINNLQWYRQNSGR | QSPKYLFRKEGQNVTLSCEQNLNH |
| | GLVHLILIRSNEREKHSGRLRVTLDTSKKSSS | DAMYWYRQDPGQGLRLIYYSQIVN |
| | LLITASRAADTASYFCATAYNQGGKLIFGQG | DFQKGDIAEGYSVSREKKESFPLTV |
| | TELSVK | TSAQKNPTAFYLCASSIGAGTHYEQ |
| | | YFGPGTRLTVT |
| 141 | METLLGVSLVILWLQLARVNSQQGEEDPQA | MSNQVLCCVVLCLLGANTVDGGIT |
| | LSIQEGENATMNCSYKTSINNLQWYRQNSGR | QSPKYLFRKEGQNVTLSCEQNLNH |
| | GLVHLILIRSNEREKHSGRLRVTLDTSKKSSS | DAMYWYRQDPGQGLRLIYYSQIVN |
| | LLITASRAADTASYFCATAYNQGGKLIFGQG | DFQKGDIAEGYSVSREKKESFPLTV |
| | TELSVK | TSAQKNPTAFYLCASSIGHTYEQYF |
| | | GPGTRLTVT |
| 142 | METLLGLLILWLQLQWVSSKQEVTQIPAALS | MGCRLLCCAVLCLLGAVPMETGVT |
| | VPEGENLVLNCSFTDSAIYNLQWFRQDPGKG | QTPRHLVMGMTNKKSLKCEQHLG |
| | LTSLLLIQSSQREQTSGRLNASLDKSSGRSTL | HNAMYWYKQSAKKPLELMFVYNF |
| | YIAASQPGDSATYLCADDKAAGNKLTFGGG | KEQTENNSVPSRFSPECPNSSHLFLH |
| | TRVLVK | LHTLQPEDSALYLCASSQVGTGSYE |
| | | QYFGPGTRLTVT |
| 143 | METLLGLLILWLQLQWVSSKQEVTQIPAALS | MSNQVLCCVVLCFLGANTVDGGIT |
| | VPEGENLVLNCSFTDSAIYNLQWFRQDPGKG | QSPKYLFRKEGQNVTLSCEQNLNH |
| | LTSLLLIQSSQREQTSGRLNASLDKSSGRSTL | DAMYWYRQDPGQGLRLIYYSQIVN |
| | YIAASQPGDSATYLCADDKAAGNKLTFGGG | DFQKGDIAEGYSVSREKKESFPLTV |
| | TRVLVK | TSAQKNPTAFYLCASSTSYEQYFGP |
| | | GTRLTVT |
| 144 | MLLELIPLLGIHFVLRTARAQSVTQPDIHITVS | MSNQVLCCVVLCLLGANTVDGGIT |
| | EGASLELRCNYSYGATPYLFWYVQSPGQGL | QSPKYLFRKEGQNVTLSCEQNLNH |
| | QLLLKYFSGDTLVQGIKGFEAEFKRSQSSFNL | DAMYWYRQDPGQGLRLIYYSQIVN |
| | RKPSVHWSDAAEYFCAVGDSWGKLQFGAG | DFQKGDIAEGYSVSREKKESFPLTV |
| | TQVVVT | TSAQKNPTAFYLCASSIAPAAYEQY |
| | | FGPGTRLTVT |
| 145 | METLLGLLILWLQLQWVSSKQEVTQIPAALS | MSNQVLCCVVLCFLGANTVDGGIT |
| | VPEGENLVLNCSFTDSAIYNLQWFRQDPGKG | QSPKYLFRKEGQNVTLSCEQNLNH |
| | LTSLLLIQSSQREQTSGRLNASLDKSSGRSTL | DAMYWYRQDPGQGLRLIYYSQIVN |
| | YIAASQPGDSATYLCADDKAAGNKLTFGGG | DFQKGDIAEGYSVSREKKESFPLTV |
| | TRVLVK | TSAQKNPTAFYLCASSPWGAEAFF |
| | | GQGTRLTVV |
| 146 | MKTFAGFSFLFLWLQLDCMSRGEDVEQSLFL | MSNQVLCCVVLCLLGANTVDGGIT |
| | SVREGDSSVINCTYTDSSSTYLYWYKQEPGA | QSPKYLFRKEGQNVTLSCEQNLNH |
| | GLQLLTYIFSNMDMKQDQRLTVLLNKKDKH | DAMYWYRQDPGQGLRLIYYSQIVN |
| | LSLRIADTQTGDSAIYFCAPRNYGQNFVFGP | DFQKGDIAEGYSVSREKKESFPLTV |
| | GTRLSVL | TSAQKNPTAFYLCASSIQAGGEYGY |
| | | TFGSGTRLTVV |
| 147 | MKTFAGFSFLFLWLQLDCMSRGEDVEQSLFL | MSNQVLCCVVLCFLGANTVDGGIT |
| | SVREGDSSVINCTYTDSSSTYLYWYKQEPGA | QSPKYLFRKEGQNVTLSCEQNLNH |
| | GLQLLTYIFSNMDMKQDQRLTVLLNKKDKH | DAMYWYRQDPGQGLRLIYYSQIVN |
| | LSLRIADTQTGDSAIYFCAPRNYGQNFVFGP | DFQKGDIAEGYSVSREKKESFPLTV |
| | GTRLSVL | TSAQKNPTAFYLCASSIGAGTHYEQ |
| | | YFGPGTRLTVT |
| 148 | MKSLRVLLVILWLQLSWVWSQQKEVEQNSG | MSNQVLCCVVLCFLGANTVDGGIT |
| | PLSVPEGAIASLNCTYSDRGSQSFFWYRQYS | QSPKYLFRKEGQNVTLSCEQNLNH |
| | GKSPELIMFIYSNGDKEDGRFTAQLNKASQY | DAMYWYRQDPGQGLRLIYYSQIVN |
| | VSLLIRDSQPSDSATYLCAVYGGSQGNLIFGK | DFQKGDIAEGYSVSREKKESFPLTV |
| | GTKLSVK | TSAQKNPTAFYLCASSIGAGTHYEQ |
| | | YFGPGTRLTVT |
| 149 | MKSLRVLLVILWLQLSWVWSQQKEVEQNSG | MSNQVLCCVVLCFLGANTVDGGIT |
| | PLSVPEGAIASLNCTYSDRGSQSFFWYRQYS | QSPKYLFRKEGQNVTLSCEQNLNH |
| | GKSPELIMFIYSNGDKEDGRFTAQLNKASQY | DAMYWYRQDPGQGLRLIYYSQIVN |
| | VSLLIRDSQPSDSATYLCAVYGGSQGNLIFGK | DFQKGDIAEGYSVSREKKESFPLTV |
| | GTKLSVK | TSAQKNPTAFYLCASSPWGAEAFF |
| | | GQGTRLTVV |
| 150 | MLLELIPLLGIHFVLRTARAQSVTQPDIHITVS | MSNQVLCCVVLCFLGANTVDGGIT |
| | EGASLELRCNYSYGATPYLFWYVQSPGQGL | QSPKYLFRKEGQNVTLSCEQNLNH |
| | QLLLKYFSGDTLVQGIKGFEAEFKRSQSSFNL | DAMYWYRQDPGQGLRLIYYSQIVN |
| | RKPSVHWSDAAEYFCAVGTYNTDKLIFGTG | DFQKGDIAEGYSVSREKKESFPLTV |
| | TRLQVF | TSAQKNPTAFYLCASSISPDYEQYF |
| | | GPGTRLTVT |
| 151 | MLLELIPLLGIHFVLRTARAQSVTQPDIHITVS | MSNQVLCCVVLCFLGANTVDGGIT |
| | EGASLELRCNYSYGATPYLFWYVQSPGQGL | QSPKYLFRKEGQNVTLSCEQNLNH |
| | QLLLKYFSGDTLVQGIKGFEAEFKRSQSSFNL | DAMYWYRQDPGQGLRLIYYSQIVN |
| | RKPSVHWSDAAEYFCAVGTYNTDKLIFGTG | DFQKGDIAEGYSVSREKKESFPLTV |
| | TRLQVF | TSAQKNPTAFYLCASSIGAGTHYEQ |
| | | YFGPGTRLTVT |
| 152 | MKSLRVLLVILWLQLSWVWSQQKEVEQNSG | MSNQVLCCVVLCFLGANTVDGGIT |
| | PLSVPEGAIASLNCTYSDRGSQSFFWYRQYS | QSPKYLFRKEGQNVTLSCEQNLNH |
| | GKSPELIMFIYSNGDKEDGRFTAQLNKASQY | DAMYWYRQDPGQGLRLIYYSQIVN |
| | VSLLIRDSQPSDSATYLCAVYGGSQGNLIFGK | DFQKGDIAEGYSVSREKKESFPLTV |
| | GTKLSVK | TSAQKNPTAFYLCASSTSYEQYFGP |
| | | GTRLTVT |
| 153 | MASAPISMLAMLFTLSGLRAQSVAQPEDQV | MSNQVLCCVVLCLLGANTVDGGIT |
| | NVAEGNPLTVKCTYSVSGNPYLFWYVQYPN | QSPKYLFRKEGQNVTLSCEQNLNH |
| | RGLQFLLKYITGDNLVKGSYGFEAEFNKSQT | DAMYWYRQDPGQGLRLIYYSQIVN |
| | SFHLKKPSALVSDSALYFCAVEFSGGYNKLIF | DFQKGDIAEGYSVSREKKESFPLTV |
| | GAGTRLAVH | TSAQKNPTAFYLCASSIGAGTHYEQ |
| | | YFGPGTRLTVT |
| 154 | MASAPISMLAMLFTLSGLRAQSVAQPEDQV | MSNQVLCCVVLCLLGANTVDGGIT |
| | NVAEGNPLTVKCTYSVSGNPYLFWYVQYPN | QSPKYLFRKEGQNVTLSCEQNLNH |
| | RGLQFLLKYITGDNLVKGSYGFEAEFNKSQT | DAMYWYRQDPGQGLRLIYYSQIVN |
| | SFHLKKPSALVSDSALYFCAVEFSGGYNKLIF | DFQKGDIAEGYSVSREKKESFPLTV |
| | GAGTRLAVH | TSAQKNPTAFYLCASRDPNQPQHF |
| | | GDGTRLSIL |
| 155 | MLTASLLRAVIASICVVSSMAQKVTQAQTEI | MSNQVLCCVVLCLLGANTVDGGIT |
| | SVVEKEDVTLDCVYETRDTTYYLFWYKQPP | QSPKYLFRKEGQNVTLSCEQNLNH |
| | SGELVFLIRRNSFDEQNEISGRYSWNFQKSTS | DAMYWYRQDPGQGLRLIYYSQIVN |
| | SFNFTITASQVVDSAVYFCALSGGNTDKLIFG | DFQKGDIAEGYSVSREKKESFPLTV |
| | TGTRLQVF | TSAQKNPTAFYLCASSIGAGTHYEQ |
| | | YFGPGTRLTVT |
| 156 | MLTASLLRAVIASICVVSSMAQKVTQAQTEI | MSNQVLCCVVLCLLGANTVDGGIT |
| | SVVEKEDVTLDCVYETRDTTYYLFWYKQPP | QSPKYLFRKEGQNVTLSCEQNLNH |
| | SGELVFLIRRNSFDEQNEISGRYSWNFQKSTS | DAMYWYRQDPGQGLRLIYYSQIVN |
| | SFNFTITASQVVDSAVYFCALSGGNTDKLIFG | DFQKGDIAEGYSVSREKKESFPLTV |
| | TGTRLQVF | TSAQKNPTAFYLCASKRTSYNEQFF |
| | | GPGTRLTVL |
| 157 | MTRVSLLWAVVVSTCLESGMAQTVTQSQPE | MSNQVLCCVVLCFLGANTVDGGIT |
| | MSVQEAETVTLSCTYDTSENNYYLFWYKQP | QSPKYLFRKEGQNVTLSCEQNLNH |
| | PSRQMILVIRQEAYKQQNATENRFSVNFQKA | DAMYWYRQDPGQGLRLIYYSQIVN |
| | AKSFSLKISDSQLGDTAMYFCAFMKLWAGN | DFQKGDIAEGYSVSREKKESFPLTV |
| | MLTFGGGTRLMVK | TSAQKNPTAFYLCASSIDMTYEQYF |
| | | GPGTRLTVT |
| 158 | MKKHLTTFLVILWLYFYRGNGKNQVEQSPQ | MSNQVLCCVVLCFLGANTVDGGIT |
| | SLIILEGKNCTLQCNYTVSPFSNLRWYKQDT | QSPKYLFRKEGQNVTLSCEQNLNH |
| | GRGPVSLTIMTFSENTKSNGRYTATLDADTK | DAMYWYRQDPGQGLRLIYYSQIVN |
| | QSSLHITASQLSDSASYICVVSDRGSTLGRLY | DFQKGDIAEGYSVSREKKESFPLTV |
| | FGRGTQLTVW | TSAQKNPTAFYLCASSLSADTFYEQ |
| | | YFGPGTRLTVT |
| 159 | MEKNPLAAPLLILWFHLDCVSSILNVEQSPQS | MGCRLLCCAVLCLLGAVPMETGVT |
| | LHVQEGDSTNFTCSFPSSNFYALHWYRWET | QTPRHLVMGMTNKKSLKCEQHLG |
| | AKSPEALFVMTLNGDEKKKGRISATLNTKEG | HNAMYWYKQSAKKPLELMFVYNF |
| | YSYLYIKGSQPEDSATYLCASPVDRGSTLGR | KEQTENNSVPSRFSPECPNSSHLFLH |
| | LYFGRGTQLTVW | LHTLQPEDSALYLCASSQVGTGSYE |
| | | QYFGPGTRLTVT |
| 160 | MLTASLLRAVIASICVVSSMAQKVTQAQTEI | MSNQVLCCVVLCLLGANTVDGGIT |
| | SVVEKEDVTLDCVYETRDTTYYLFWYKQPP | QSPKYLFRKEGQNVTLSCEQNLNH |
| | SGELVFLIRRNSFDEQNEISGRYSWNFQKSTS | DAMYWYRQDPGQGLRLIYYSQIVN |
| | SFNFTITASQVVDSAVYFCALSEPYSGGYNK | DFQKGDIAEGYSVSREKKESFPLTV |
| | LIFGAGTRLAVH | TSAQKNPTAFYLCASSISTDYEQYF |
| | | GPGTRLTVT |
| 161 | MLTASLLRAVIASICVVSSMAQKVTQAQTEI | MSNQVLCCVVLCLLGANTVDGGIT |
| | SVVEKEDVTLDCVYETRDTTYYLFWYKQPP | QSPKYLFRKEGQNVTLSCEQNLNH |
| | SGELVFLIRRNSFDEQNEISGRYSWNFQKSTS | DAMYWYRQDPGQGLRLIYYSQIVN |
| | SFNFTITASQVVDSAVYFCALSEPYSGGYNK | DFQKGDIAEGYSVSREKKESFPLTV |
| | LIFGAGTRLAVH | TSAQKNPTAFYLCASSIGAGTHYEQ |
| | | YFGPGTRLTVT |
| 162 | MLTASLLRAVIASICVVSSMAQKVTQAQTEI | MSNQVLCCVVLCLLGANTVDGGIT |
| | SVVEKEDVTLDCVYETRDTTYYLFWYKQPP | QSPKYLFRKEGQNVTLSCEQNLNH |
| | SGELVFLIRRNSFDEQNEISGRYSWNFQKSTS | DAMYWYRQDPGQGLRLIYYSQIVN |
| | SFNFTITASQVVDSAVYFCALSGEGKKAAGN | DFQKGDIAEGYSVSREKKESFPLTV |
| | KLTFGGGTRVLVK | TSAQKNPTAFYLCASSIGAGTHYEQ |
| | | YFGPGTRLTVT |
| 163 | MLTASLLRAVIASICVVSSMAQKVTQAQTEI | MSNQVLCCVVLCLLGANTVDGGIT |
| | SVVEKEDVTLDCVYETRDTTYYLFWYKQPP | QSPKYLFRKEGQNVTLSCEQNLNH |
| | SGELVFLIRRNSFDEQNEISGRYSWNFQKSTS | DAMYWYRQDPGQGLRLIYYSQIVN |
| | SFNFTITASQVVDSAVYFCALSEAGAGGTSY | DFQKGDIAEGYSVSREKKESFPLTV |
| | GKLTFGQGTILTVH | TSAQKNPTAFYLCASSSMGLNEQFF |
| | | GPGTRLTVL |
| 164 | MLTASLLRAVIASICVVSSMAQKVTQAQTEI | MSNQVLCCVVLCLLGANTVDGGIT |
| | SVVEKEDVTLDCVYETRDTTYYLFWYKQPP | QSPKYLFRKEGQNVTLSCEQNLNH |
| | SGELVFLIRRNSFDEQNEISGRYSWNFQKSTS | DAMYWYRQDPGQGLRLIYYSQIVN |
| | SFNFTITASQVVDSAVYFCALSEAGAGGTSY | DFQKGDIAEGYSVSREKKESFPLTV |
| | GKLTFGQGTILTVH | TSAQKNPTAFYLCASSIGAGTHYEQ |
| | | YFGPGTRLTVT |
| 165 | MACPGFLWALVISTCLEFSMAQTVTQSQPE | MSNQVLCCVVLCFLGANTVDGGIT |
| | MSVQEAETVTLSCTYDTSESDYYLFWYKQP | QSPKYLFRKEGQNVTLSCEQNLNH |
| | PSRQMILVIRQEAYKQQNATENRFSVNFQKA | DAMYWYRQDPGQGLRLIYYSQIVN |
| | AKSFSLKISDSQLGDAAMYFCAYRIPINAGGT | DFQKGDIAEGYSVSREKKESFPLTV |
| | SYGKLTFGQGTILTVH | TSAQKNPTAFYLCASSIGAGTHYEQ |
| | | YFGPGTRLTVT |
| 166 | MAFWLRRLGLHFRPHLGRRMESFLGGVLLIL | MSNQVLCCVVLCFLGANTVDGGIT |
| | WLQVDWVKSQKIEQNSEALNIQEGKTATLT | QSPKYLFRKEGQNVTLSCEQNLNH |
| | CNYTNYSPAYLQWYRQDPGRGPVFLLLIREN | DAMYWYRQDPGQGLRLIYYSQIVN |
| | EKEKRKERLKVTFDTTLKQSLFHITASQPADS | DFQKGDIAEGYSVSREKKESFPLTV |
| | ATYLCALENQAGTALIFGKGTTLSVS | TSAQKNPTAFYLCASSIGAGTHYEQ |
| | | YFGPGTRLTVT |
| 167 | METLLGLLILWLQLQWVSSKQEVTQIPAALS | MSNQVLCCVVLCFLGANTVDGGIT |
| | VPEGENLVLNCSFTDSAIYNLQWFRQDPGKG | QSPKYLFRKEGQNVTLSCEQNLNH |
| | LTSLLLIQSSQREQTSGRLNASLDKSSGRSTL | DAMYWYRQDPGQGLRLIYYSQIVN |
| | YIAASQPGDSATYLCAAWGATNKLIFGTGTL | DFQKGDIAEGYSVSREKKESFPLTV |
| | LAVQ | TSAQKNPTAFYLCASMPPGEPQHFG |
| | | DGTRLSIL |
| 168 | MLTASLLRAVIASICVVSSMAQKVTQAQTEI | MGPGLLCWALLCLLGAGLVDAGV |
| | SVVEKEDVTLDCVYETRDTTYYLFWYKQPP | TQSPTHLIKTRGQQVTLRCSPKSGH |
| | SGELVFLIRRNSFDEQNEISGRYSWNFQKSTS | DTVSWYQQALGQGPQFIFQYYEEE |
| | SFNFTITASQVVDSAVYFCALSGGNTGKLIFG | ERQRGNFPDRFSGHQFPNYSSELNV |
| | QGTTLQVK | NALLLGDSALYLCASSYSGGKLFFG |
| | | SGTQLSVL |
| 169 | MLTASLLRAVIASICVVSSMAQKVTQAQTEI | MSNQVLCCVVLCFLGANTVDGGIT |
| | SVVEKEDVTLDCVYETRDTTYYLFWYKQPP | QSPKYLFRKEGQNVTLSCEQNLNH |
| | SGELVFLIRRNSFDEQNEISGRYSWNFQKSTS | DAMYWYRQDPGQGLRLIYYSQIVN |
| | SFNFTITASQVVDSAVYFCALSEAWTNAGKS | DFQKGDIAEGYSVSREKKESFPLTV |
| | TFGDGTTLTVK | TSAQKNPTAFYLCASSIGAEVYNEQ |
| | | FFGPGTRLTVL |
| 170 | MLTASLLRAVIASICVVSSMAQKVTQAQTEI | MSNQVLCCVVLCFLGANTVDGGIT |
| | SVVEKEDVTLDCVYETRDTTYYLFWYKQPP | QSPKYLFRKEGQNVTLSCEQNLNH |
| | SGELVFLIRRNSFDEQNEISGRYSWNFQKSTS | DAMYWYRQDPGQGLRLIYYSQIVN |
| | SFNFTITASQVVDSAVYFCALWGSGGYNKLI | DFQKGDIAEGYSVSREKKESFPLTV |
| | FGAGTRLAVH | TSAQKNPTAFYLCASSPQGETQYFG |
| | | PGTRLLVL |
| 171 | MAMLLGASVLILWLQPDWVNSQQKNDDQQ | MSNQVLCCVVLCFLGANTVDGGIT |
| | VKQNSPSLSVQEGRISILNCDYTNSMFDYFL | QSPKYLFRKEGQNVTLSCEQNLNH |
| | WYKKYPAEGPTFLISISSIKDKNEDGRFTVFL | DAMYWYRQDPGQGLRLIYYSQIVN |
| | NKSAKHLSLHIVPSQPGDSAVYFCAAILNSG | DFQKGDIAEGYSVSREKKESFPLTV |
| | NTPLVFGKGTRLSVI | TSAQKNPTAFYLCASSITREYEQYF |
| | | GPGTRLTVT |
| 172 | MTRVSLLWAVVVSTCLESGMAQTVTQSQPE | MSNQVLCCVVLCFLGANTVDGGIT |
| | MSVQEAETVTLSCTYDTSENNYYLFWYKQP | QSPKYLFRKEGQNVTLSCEQNLNH |
| | PSRQMILVIRQEAYKQQNATENRFSVNFQKA | DAMYWYRQDPGQGLRLIYYSQIVN |
| | AKSFSLKISDSQLGDTAMYFCAFMKQDYAG | DFQKGDIAEGYSVSREKKESFPLTV |
| | NNRKLIWGLGTSLAVN | TSAQKNPTAFYLCASSIAVGFAGEL |
| | | FFGEGSRLTVL |
| 173 | METLLGLLILWLQLQWVSSKQEVTQIPAALS | MSNQVLCCVVLCFLGANTVDGGIT |
| | VPEGENLVLNCSFTDSAIYNLQWFRQDPGKG | QSPKYLFRKEGQNVTLSCEQNLNH |
| | LTSLLLIQSSQREQTSGRLNASLDKSSGRSTL | DAMYWYRQDPGQGLRLIYYSQIVN |
| | YIAASQPGDSATYLCAVWGATNKLIFGTGTL | DFQKGDIAEGYSVSREKKESFPLTV |
| | LAVQ | TSAQKNPTAFYLCASQMAGELFFG |
| | | EGSRLTVL |
| 174 | MAGIRALFMYLWLQLDWVSRGENVGLHLP | MSNQVLCCVVLCFLGANTVDGGIT |
| | TLSVQEGDNSIINCAYSNSASDYFIWYKQESG | QSPKYLFRKEGQNVTLSCEQNLNH |
| | KGPQFIIDIRSNMDKRQGQRVTVLLNKTVKH | DAMYWYRQDPGQGLRLIYYSQIVN |
| | LSLQIAATQPGDSAVYFCAENRPPSGNTPLVF | DFQKGDIAEGYSVSREKKESFPLTV |
| | GKGTRLSVI | TSAQKNPTAFYLCASSFSVDQPQHF |
| | | GDGTRLSIL |
| 175 | MLTASLLRAVIASICVVSSMAQKVTQAQTEI | MSISLLCCAAFPLLWAGPVNAGVT |
| | SVVEKEDVTLDCVYETRDTTYYLFWYKQPP | QTPKFRILKIGQSMTLQCTQDMNHN |
| | SGELVFLIRRNSFDEQNEISGRYSWNFQKSTS | YMYWYRQDPGMGLKLIYYSVGAG |
| | SFNFTITASQVVDSAVYFCALKNTGGFKTIFG | ITDKGEVPNGYNVSRSTTEDFPLRL |
| | AGTRLFVK | ELAAPSQTSVYFCASSFDRDFSTDT |
| | | QYFGPGTRLTVL |
| 176 | MMKCPQALLAIFWLLLSWVSSEDKVVQSPL | MSNQVLCCVVLCFLGANTVDGGIT |
| | SLVVHEGDTVTLNCSYEVTNFRSLLWYKQE | QSPKYLFRKEGQNVTLSCEQNLNH |
| | KKAPTFLFMLTSSGIEKKSGRLSSILDKKELFS | DAMYWYRQDPGQGLRLIYYSQIVN |
| | ILNITATQTGDSAVYLCATPVEYGNKLVFGA | DFQKGDIAEGYSVSREKKESFPLTV |
| | GTILRVK | TSAQKNPTAFYLCASSMDSGGYTE |
| | | AFFGQGTRLTVV |
| 177 | MEKMLECAFIVLWLQLGWLSGEDQVTQSPE | MSNQVLCCVVLCFLGANTVDGGIT |
| | ALRLQEGESSSLNCSYTVSGLRGLFWYRQDP | QSPKYLFRKEGQNVTLSCEQNLNH |
| | GKGPEFLFTLYSAGEEKEKERLKATLTKKES | DAMYWYRQDPGQGLRLIYYSQIVN |
| | FLHITAPKPEDSATYLCAVQKKESGGGADGL | DFQKGDIAEGYSVSREKKESFPLTV |
| | TFGKGTHLIIQ | TSAQKNPTAFYLCASSFGGYYEQYF |
| | | GPGTRLTVT |
| 178 | MKKLLAMILWLQLDRLSGELKVEQNPLFLS | MSNQVLCCVVLCFLGANTVDGGIT |
| | MQEGKNYTIYCNYSTTSDRLYWYRQDPGKS | QSPKYLFRKEGQNVTLSCEQNLNH |
| | LESLFVLLSNGAVKQEGRLMASLDTKARLST | DAMYWYRQDPGQGLRLIYYSQIVN |
| | LHITAAVHDLSATYFCAVDVGRRGAQKLVF | DFQKGDIAEGYSVSREKKESFPLTV |
| | GQGTRLTIN | TSAQKNPTAFYLCASSLTSGSSYEQ |
| | | YFGPGTRLTVT |
| 179 | MAMLLGASVLILWLQPDWVNSQQKNDDQQ | MGPGLLCWALLCLLGAGLVDAGV |
| | VKQNSPSLSVQEGRISILNCDYTNSMFDYFL | TQSPTHLIKTRGQQVTLRCSPKSGH |
| | WYKKYPAEGPTFLISISSIKDKNEDGRFTVFL | DTVSWYQQALGQGPQFIFQYYEEE |
| | NKSAKHLSLHIVPSQPGDSAVYFCAATQGGS | ERQRGNFPDRFSGHQFPNYSSELNV |
| | EKLVFGKGTKLTVN | NALLLGDSALYLCASSPLGSNTIYF |
| | | GEGSWLTVV |
| 180 | MAMLLGASVLILWLQPDWVNSQQKNDDQQ | MSNQVLCCVVLCFLGANTVDGGIT |
| | VKQNSPSLSVQEGRISILNCDYTNSMFDYFL | QSPKYLFRKEGQNVTLSCEQNLNH |
| | WYKKYPAEGPTFLISISSIKDKNEDGRFTVFL | DAMYWYRQDPGQGLRLIYYSQIVN |
| | NKSAKHLSLHIVPSQPGDSAVYFCAANLGAR | DFQKGDIAEGYSVSREKKESFPLTV |
| | LMFGDGTQLVVK | TSAQKNPTAFYLCASSAWGAFEQY |
| | | FGPGTRLTVT |
| 181 | MVLKFSVSILWIQLAWVSTQLLEQSPQFLSIQ | MSNQVLCCVVLCFLGANTVDGGIT |
| | EGENLTVYCNSSSVFSSLQWYRQEPGEGPVL | QSPKYLFRKEGQNVTLSCEQNLNH |
| | LVTVVTGGEVKKLKRLTFQFGDARKDSSLHI | DAMYWYRQDPGQGLRLIYYSQIVN |
| | TAAQPGDTGLYLCAGPGYSTLTFGKGTMLL | DFQKGDIAEGYSVSREKKESFPLTV |
| | VS | TSAQKNPTAFYLCASSIVSNQPQHF |
| | | GDGTRLSIL |
| 182 | MTSIRAVFIFLWLQLDLVNGENVEQHPSTLS | MSNQVLCCVVLCFLGANTVDGGIT |
| | VQEGDSAVIKCTYSDSASNYFPWYKQELGK | QSPKYLFRKEGQNVTLSCEQNLNH |
| | RPQLIIDIRSNVGEKKDQRIAVTLNKTAKHFS | DAMYWYRQDPGQGLRLIYYSQIVN |
| | LHITETQPEDSAVYFCAASGWANNLFFGTGT | DFQKGDIAEGYSVSREKKESFPLTV |
| | RLTVI | TSAQKNPTAFYLCASSGGTDTQYF |
| | | GPGTRLTVL |
| 183 | MLTASLLRAVIASICVVSSMAQKVTQAQTEI | MSNQVLCCVVLCFLGANTVDGGIT |
| | SVVEKEDVTLDCVYETRDTTYYLFWYKQPP | QSPKYLFRKEGQNVTLSCEQNLNH |
| | SGELVFLIRRNSFDEQNEISGRYSWNFQKSTS | DAMYWYRQDPGQGLRLIYYSQIVN |
| | SFNFTITASQVVDSAVYFCAVQSGNTGKLIFG | DFQKGDIAEGYSVSREKKESFPLTV |
| | QGTTLQVK | TSAQKNPTAFYLCASSISLTYEQYF |
| | | GPGTRLTVT |
| 184 | MLTASLLRAVIASICVVSSMAQKVTQAQTEI | MSIGLLCCAALSLLWAGPVNAGVT |
| | SVVEKEDVTLDCVYETRDTTYYLFWYKQPP | QTPKFQVLKTGQSMTLQCAQDMN |
| | SGELVFLIRRNSFDEQNEISGRYSWNFQKSTS | HEYMSWYRQDPGMGLRLIHYSVG |
| | SFNFTITASQVVDSAVYFCALCNFGNEKLTF | AGITDQGEVPNGYNVSRSTTEDFPL |
| | GTGTRLTII | RLLSAAPSQTSVYFCASSWQAPGEL |
| | | FFGEGSRLTVL |
| 185 | MTRVSLLWAVVVSTCLESGMAQTVTQSQPE | MSNQVLCCVVLCFLGANTVDGGIT |
| | MSVQEAETVTLSCTYDTSENNYYLFWYKQP | QSPKYLFRKEGQNVTLSCEQNLNH |
| | PSRQMILVIRQEAYKQQNATENRFSVNFQKA | DAMYWYRQDPGQGLRLIYYSQIVN |
| | AKSFSLKISDSQLGDTAMYFCALGPGTASKL | DFQKGDIAEGYSVSREKKESFPLTV |
| | TFGTGTRLQVT | TSAQKNPTAFYLCASSQDSGGYNE |
| | | QFFGPGTRLTVL |
| 186 | MLTASLLRAVIASICVVSSMAQKVTQAQTEI | MSNQVLCCVVLCFLGANTVDGGIT |
| | SVVEKEDVTLDCVYETRDTTYYLFWYKQPP | QSPKYLFRKEGQNVTLSCEQNLNH |
| | SGELVFLIRRNSFDEQNEISGRYSWNFQKSTS | DAMYWYRQDPGQGLRLIYYSQIVN |
| | SFNFTITASQVVDSAVYFCALSGANARLMFG | DFQKGDIAEGYSVSREKKESFPLTV |
| | DGTQLVVK | TSAQKNPTAFYLCASKSGGDYYEQ |
| | | YFGPGTRLTVT |
| 187 | MTSIRAVFIFLWLQLDLVNGENVEQHPSTLS | MSNQVLCCVVLCFLGANTVDGGIT |
| | VQEGDSAVIKCTYSDSASNYFPWYKQELGK | QSPKYLFRKEGQNVTLSCEQNLNH |
| | RPQLIIDIRSNVGEKKDQRIAVTLNKTAKHFS | DAMYWYRQDPGQGLRLIYYSQIVN |
| | LHITETQPEDSAVYFCAASSTSGTYKYIFGTG | DFQKGDIAEGYSVSREKKESFPLTV |
| | TRLKVL | TSAQKNPTAFYLCASSTDISYGYTF |
| | | GSGTRLTVV |
| 188 | METLLGVSLVILWLQLARVNSQQGEEDPQA | MSNQVLCCVVLCFLGANTVDGGIT |
| | LSIQEGENATMNCSYKTSINNLQWYRQNSGR | QSPKYLFRKEGQNVTLSCEQNLNH |
| | GLVHLILIRSNEREKHSGRLRVTLDTSKKSSS | DAMYWYRQDPGQGLRLIYYSQIVN |
| | LLITASRAADTASYFCATPLSYNTDKLIFGTG | DFQKGDIAEGYSVSREKKESFPLTV |
| | TRLQVF | TSAQKNPTAFYLCASSLGDEQYFGP |
| | | GTRLTVT |
| 189 | MLTASLLRAVIASICVVSSMAQKVTQAQTEI | MSNQVLCCVVLCFLGANTVDGGIT |
| | SVVEKEDVTLDCVYETRDTTYYLFWYKQPP | QSPKYLFRKEGQNVTLSCEQNLNH |
| | SGELVFLIRRNSFDEQNEISGRYSWNFQKSTS | DAMYWYRQDPGQGLRLIYYSQIVN |
| | SFNFTITASQVVDSAVYFCALSDDNNARLMF | DFQKGDIAEGYSVSREKKESFPLTV |
| | GDGTQLVVK | TSAQKNPTAFYLCATLAGGPYNEQ |
| | | FFGPGTRLTVL |
| 190 | MLTASLLRAVIASICVVSSMAQKVTQAQTEI | MSIGLLCCAALSLLWAGPVNAGVT |
| | SVVEKEDVTLDCVYETRDTTYYLFWYKQPP | QTPKFQVLKTGQSMTLQCAQDMN |
| | SGELVFLIRRNSFDEQNEISGRYSWNFQKSTS | HEYMSWYRQDPGMGLRLIHYSVG |
| | SFNFTITASQVVDSAVYFCALSEWRSASKIIF | AGITDQGEVPNGYNVSRSTTEDFPL |
| | GSGTRLSIR | RLLSAAPSQTSVYFCASSYGQGNG |
| | | GEQFFGPGTRLTVL |
| 191 | MVLKFSVSILWIQLAWVSTQLLEQSPQFLSIQ | MSNQVLCCVVLCFLGANTVDGGIT |
| | EGENLTVYCNSSSVFSSLQWYRQEPGEGPVL | QSPKYLFRKEGQNVTLSCEQNLNH |
| | LVTVVTGGEVKKLKRLTFQFGDARKDSSLHI | DAMYWYRQDPGQGLRLIYYSQIVN |
| | TAAQPGDTGLYLCAGAADYKLSFGAGTTVT | DFQKGDIAEGYSVSREKKESFPLTV |
| | VR | TSAQKNPTAFYLCASSLVAYNEQFF |
| | | GPGTRLTVL |
| 192 | MLLELIPLLGIHFVLRTARAQSVTQPDIHITVS | MSNQVLCCVVLCFLGANTVDGGIT |
| | EGASLELRCNYSYGATPYLFWYVQSPGQGL | QSPKYLFRKEGQNVTLSCEQNLNH |
| | QLLLKYFSGDTLVQGIKGFEAEFKRSQSSFNL | DAMYWYRQDPGQGLRLIYYSQIVN |
| | RKPSVHWSDAAEYFCAVFSGGYNKLIFGAG | DFQKGDIAEGYSVSREKKESFPLTV |
| | TRLAVH | TSAQKNPTAFYLCACGGNYNEQFF |
| | | GPGTRLTVL |
| 193 | MKTFAGFSFLFLWLQLDCMSRGEDVEQSLFL | MASLLFFCGAFYLLGTGSMDADVT |
| | SVREGDSSVINCTYTDSSSTYLYWYKQEPGA | QTPRNRITKTGKRIMLECSQTKGHD |
| | GLQLLTYIFSNMDMKQDQRLTVLLNKKDKH | RMYWYRQDPGLGLRLIYYSFDVKD |
| | LSLRIADTQTGDSAIYFCAESKDGYNKLIFGA | INKGEISDGYSVSRQAQAKFSLSLES |
| | GTRLAVH | AIPNQTALYFCATSGSRDRGDYEQY |
| | | FGPGTRLTVT |
| 194 | MLTASLLRAVIASICVVSSMAQKVTQAQTEI | MSNQVLCCVVLCFLGANTVDGGIT |
| | SVVEKEDVTLDCVYETRDTTYYLFWYKQPP | QSPKYLFRKEGQNVTLSCEQNLNH |
| | SGELVFLIRRNSFDEQNEISGRYSWNFQKSTS | DAMYWYRQDPGQGLRLIYYSQIVN |
| | SFNFTITASQVVDSAVYFCALSDLTGGGNKL | DFQKGDIAEGYSVSREKKESFPLTV |
| | TFGTGTQLKVE | TSAQKNPTAFYLCASSPGGTQYFGP |
| | | GTRLTVL |
| 195 | MLTASLLRAVIASICVVSSMAQKVTQAQTEI | MGFRLLCCVAFCLLGAGPVDSGVT |
| | SVVEKEDVTLDCVYETRDTTYYLFWYKQPP | QTPKHLITATGQRVTLRCSPRSGDL |
| | SGELVFLIRRNSFDEQNEISGRYSWNFQKSTS | SVYWYQQSLDQGLQFLIQYYNGEE |
| | SFNFTITASQVVDSAVYFCALSEEGYQGAQK | RAKGNILERFSAQQFPDLHSELNLS |
| | LVF | SLELGDSALYFCASSVYGNTQYFGP |
| | | GTRLTVL |
| 196 | MLTASLLRAVIASICVVSSMAQKVTQAQTEI | MSNQVLCCVVLCFLGANTVDGGIT |
| | SVVEKEDVTLDCVYETRDTTYYLFWYKQPP | QSPKYLFRKEGQNVTLSCEQNLNH |
| | SGELVFLIRRNSFDEQNEISGRYSWNFQKSTS | DAMYWYRQDPGQGLRLIYYSQIVN |
| | SFNFTITASQVVDSAVYFCALSEVNNNAGNM | DFQKGDIAEGYSVSREKKESFPLTV |
| | LTFGGGTRLMVK | TSAQKNPTAFYLCASSMGESEAFFG |
| | | QGTRLTVV |
| 197 | MSNQVLCCVVLCFLGANTVDGGITQSPKYLF | MSNQVLCCVVLCFLGANTVDGGIT |
| | RKEGQNVTLSCEQNLNHDAMYWYRQDPGQ | QSPKYLFRKEGQNVTLSCEQNLNH |
| | GLRLIYYSQIVNDFQKGDIAEGYSVSREKKES | DAMYWYRQDPGQGLRLIYYSQIVN |
| | FPLTVTSAQKNPTAFYLCASSISASSSYEQYF | DFQKGDIAEGYSVSREKKESFPLTV |
| | GPGTRLTVT | TSAQKNPTAFYLCASSISASSSYEQY |
| | | FGPGTRLTVT |
| 198 | MTRVSLLWAVVVSTCLESGMAQTVTQSQPE | MASLLFFCGAFYLLGTGSMDADVT |
| | MSVQEAETVTLSCTYDTSENNYYLFWYKQP | QTPRNRITKTGKRIMLECSQTKGHD |
| | PSRQMILVIRQEAYKQQNATENRFSVNFQKA | RMYWYRQDPGLGLRLIYYSFDVKD |
| | AKSFSLKISDSQLGDTAMYFCAFTELIQGAQ | INKGEISDGYSVSRQAQAKFSLSLES |
| | KLVF | AIPNQTALYFCATSDWALGGAFFG |
| | | QGTRLTVV |
| 199 | METLLGLLILWLQLQWVSSKQEVTQIPAALS | MSNQVLCCVVLCFLGANTVDGGIT |
| | VPEGENLVLNCSFTDSAIYNLQWFRQDPGKG | QSPKYLFRKEGQNVTLSCEQNLNH |
| | LTSLLLIQSSQREQTSGRLNASLDKSSGRSTL | DAMYWYRQDPGQGLRLIYYSQIVN |
| | YIAASQPGDSATYLCAVSLAYNARLMFGDG | DFQKGDIAEGYSVSREKKESFPLTV |
| | TQLVVK | TSAQKNPTAFYLCASSPSSSALMNG |
| | | ELFFGEGSRLTVL |
| 200 | METLLGVSLVILWLQLARVNSQQGEEDPQA | MSNQVLCCVVLCFLGANTVDGGIT |
| | LSIQEGENATMNCSYKTSINNLQWYRQNSGR | QSPKYLFRKEGQNVTLSCEQNLNH |
| | GLVHLILIRSNEREKHSGRLRVTLDTSKKSSS | DAMYWYRQDPGQGLRLIYYSQIVN |
| | LLITASRAADTASYFCATPGSYNTDKLIFGTG | DFQKGDIAEGYSVSREKKESFPLTV |
| | TRLQVF | TSAQKNPTAFYLCASSTNRDYEQYF |
| | | GPGTRLTVT |
| 201 | MLTASLLRAVIASICVVSSMAQKVTQAQTEI | MSNQVLCCVVLCFLGANTVDGGIT |
| | SVVEKEDVTLDCVYETRDTTYYLFWYKQPP | QSPKYLFRKEGQNVTLSCEQNLNH |
| | SGELVFLIRRNSFDEQNEISGRYSWNFQKSTS | DAMYWYRQDPGQGLRLIYYSQIVN |
| | SFNFTITASQVVDSAVYFCALSVTNAGKSTF | DFQKGDIAEGYSVSREKKESFPLTV |
| | GDGTTLTVK | TSAQKNPTAFYLCASSRDSSSYNEQ |
| | | FFGPGTRLTVL |
| 202 | MLTASLLRAVIASICVVSSMAQKVTQAQTEI | MSNQVLCCVVLCFLGANTVDGGIT |
| | SVVEKEDVTLDCVYETRDTTYYLFWYKQPP | QSPKYLFRKEGQNVTLSCEQNLNH |
| | SGELVFLIRRNSFDEQNEISGRYSWNFQKSTS | DAMYWYRQDPGQGLRLIYYSQIVN |
| | SFNFTITASQVVDSAVYFCALSFLPYNQGGK | DFQKGDIAEGYSVSREKKESFPLTV |
| | LIFGQGTELSVK | TSAQKNPTAFYLCASSGGLQETQYF |
| | | GPGTRLLVL |
| 203 | MWGAFLLYVSMKMGGTAGQSLEQPSEVTA | MSNQVLCCVVLCFLGANTVDGGIT |
| | VEGAIVQINCTYQTSGFYGLSWYQQHDGGA | QSPKYLFRKEGQNVTLSCEQNLNH |
| | PTFLSYNALDGLEETGRFSSFLSRSDSYGYLL | DAMYWYRQDPGQGLRLIYYSQIVN |
| | LQELQMKDSASYFCACSGNTPLVFGKGTRLS | DFQKGDIAEGYSVSREKKESFPLTV |
| | VI | TSAQKNPTAFYLCASSTTRDGEQYF |
| | | GPGTRLTVT |
| 204 | MLLELIPLLGIHFVLRTARAQSVTQPDIHITVS | MSNQVLCCVVLCFLGANTVDGGIT |
| | EGASLELRCNYSYGATPYLFWYVQSPGQGL | QSPKYLFRKEGQNVTLSCEQNLNH |
| | QLLLKYFSGDTLVQGIKGFEAEFKRSQSSFNL | DAMYWYRQDPGQGLRLIYYSQIVN |
| | RKPSVHWSDAAEYFCAVGATMEYGNKLVF | DFQKGDIAEGYSVSREKKESFPLTV |
| | GAGTILRVK | TSAQKNPTAFYLCATADLYEQYFG |
| | | PGTRLTVT |
| 205 | MLTASLLRAVIASICVVSSMAQKVTQAQTEI | MSNQVLCCVVLCFLGANTVDGGIT |
| | SVVEKEDVTLDCVYETRDTTYYLFWYKQPP | QSPKYLFRKEGQNVTLSCEQNLNH |
| | SGELVFLIRRNSFDEQNEISGRYSWNFQKSTS | DAMYWYRQDPGQGLRLIYYSQIVN |
| | SFNFTITASQVVDSAVYFCALSNGNNRKLIW | DFQKGDIAEGYSVSREKKESFPLTV |
| | GLGTSLAVN | TSAQKNPTAFYLCATRGGGTEAFF |
| | | GQGTRLTVV |
| 206 | MLTASLLRAVIASICVVSSMAQKVTQAQTEI | MSNQVLCCVVLCFLGANTVDGGIT |
| | SVVEKEDVTLDCVYETRDTTYYLFWYKQPP | QSPKYLFRKEGQNVTLSCEQNLNH |
| | SGELVFLIRRNSFDEQNEISGRYSWNFQKSTS | DAMYWYRQDPGQGLRLIYYSQIVN |
| | SFNFTITASQVVDSAVYFCALSEWGGNKLVF | DFQKGDIAEGYSVSREKKESFPLTV |
| | GAGTILRVK | TSAQKNPTAFYLCASSITGQETQYF |
| | | GPGTRLLVL |
| 207 | MSNQVLCCVVLCFLGANTVDGGITQSPKYLF | MSNQVLCCVVLCFLGANTVDGGIT |
| | RKEGQNVTLSCEQNLNHDAMYWYRQDPGQ | QSPKYLFRKEGQNVTLSCEQNLNH |
| | GLRLIYYSQIVNDFQKGDIAEGYSVSREKKES | DAMYWYRQDPGQGLRLIYYSQIVN |
| | FPLTVTSAQKNPTAFYLCASSRAGGSYNEQF | DFQKGDIAEGYSVSREKKESFPLTV |
| | FGPGTRLTVL | TSAQKNPTAFYLCASSRAGGSYNE |
| | | QFFGPGTRLTVL |
| 208 | MEKNPLAAPLLILWFHLDCVSSILNVEQSPQS | MSNQVLCCVVLCFLGANTVDGGIT |
| | LHVQEGDSTNFTCSFPSSNFYALHWYRWET | QSPKYLFRKEGQNVTLSCEQNLNH |
| | AKSPEALFVMTLNGDEKKKGRISATLNTKEG | DAMYWYRQDPGQGLRLIYYSQIVN |
| | YSYLYIKGSQPEDSATYLCAFGKTSYDKVIF | DFQKGDIAEGYSVSREKKESFPLTV |
| | GPGTSLSVI | TSAQKNPTAFYLCASQNRGPYNEQ |
| | | FFGPGTRLTVL |
| 209 | MLTASLLRAVIASICVVSSMAQKVTQAQTEI | MSNQVLCCVVLCFLGANTVDGGIT |
| | SVVEKEDVTLDCVYETRDTTYYLFWYKQPP | QSPKYLFRKEGQNVTLSCEQNLNH |
| | SGELVFLIRRNSFDEQNEISGRYSWNFQKSTS | DAMYWYRQDPGQGLRLIYYSQIVN |
| | SFNFTITASQVVDSAVYFCALSEAGGSTLGRL | DFQKGDIAEGYSVSREKKESFPLTV |
| | YFGRGTQLTVW | TSAQKNPTAFYLCASSTTATYEQYF |
| | | GPGTRLTVT |
| 210 | MWGAFLLYVSMKMGGTAGQSLEQPSEVTA | MSNQVLCCVVLCFLGANTVDGGIT |
| | VEGAIVQINCTYQTSGFYGLSWYQQHDGGA | QSPKYLFRKEGQNVTLSCEQNLNH |
| | PTFLSYNALDGLEETGRFSSFLSRSDSYGYLL | DAMYWYRQDPGQGLRLIYYSQIVN |
| | LQELQMKDSASYFCAVPYNQGGKLIFGQGT | DFQKGDIAEGYSVSREKKESFPLTV |
| | ELSVK | TSAQKNPTAFYLCASSIASTGKNIQ |
| | | YFGAGTRLSVL |
| 211 | MWGVFLLYVSMKMGGTTGQNIDQPTEMTA | MLLLLLLLGPGSGLGAVVSQHPSW |
| | TEGAIVQINCTYQTSGFNGLFWYQQHAGEAP | VICKSGTSVKIECRSLDFQATTMFW |
| | TFLSYNVLDGLEEKGRFSSFLSRSKGYSYLLL | YRQFPKQSLMLMATSNEGSKATYE |
| | KELQMKDSASYLCAVGAPYYQLIWGAGTKL | QGVEKDKFLINHASLTLSTLTVTSA |
| | IIK | HPEDSSFYICSAYDGADTIYFGEGS |
| | | WLTVV |
| 212 | METVLQVLLGILGFQAAWVSSQELEQSPQSL | MSNQVLCCVVLCFLGANTVDGGIT |
| | IVQEGKNLTINCTSSKTLYGLYWYKQKYGE | QSPKYLFRKEGQNVTLSCEQNLNH |
| | GLIFLMMLQKGGEEKSHEKITAKLDEKKQQS | DAMYWYRQDPGQGLRLIYYSQIVN |
| | SLHITASQPSHAGIYLCGADRLAIIQGAQKLV | DFQKGDIAEGYSVSREKKESFPLTV |
| | F | TSAQKNPTAFYLCASSIDSQGIPTDE |
| | | QFFGPGTRLTVL |
| 213 | METLLGVSLVILWLQLARVNSQQGEEDPQA | MSNQVLCCVVLCFLGANTVDGGIT |
| | LSIQEGENATMNCSYKTSINNLQWYRQNSGR | QSPKYLFRKEGQNVTLSCEQNLNH |
| | GLVHLILIRSNEREKHSGRLRVTLDTSKKSSS | DAMYWYRQDPGQGLRLIYYSQIVN |
| | LLITASRAADTASYFCARTSYDKVIFGPGTSL | DFQKGDIAEGYSVSREKKESFPLTV |
| | SVI | TSAQKNPTAFYLCASSIDLANEQYF |
| | | GPGTRLTVT |
| 214 | METLLGVSLVILWLQLARVNSQQGEEDPQA | MSNQVLCCVVLCFLGANTVDGGIT |
| | LSIQEGENATMNCSYKTSINNLQWYRQNSGR | QSPKYLFRKEGQNVTLSCEQNLNH |
| | GLVHLILIRSNEREKHSGRLRVTLDTSKKSSS | DAMYWYRQDPGQGLRLIYYSQIVN |
| | LLITASRAADTASYFCATGDSNYQLIWGAGT | DFQKGDIAEGYSVSREKKESFPLTV |
| | KLIIK | TSAQKNPTAFYLCASSIEAGTYEQY |
| | | FGPGTRLTVT |
| 215 | MLTASLLRAVIASICVVSSMAQKVTQAQTEI | MSNQVLCCVVLCFLGANTVDGGIT |
| | SVVEKEDVTLDCVYETRDTTYYLFWYKQPP | QSPKYLFRKEGQNVTLSCEQNLNH |
| | SGELVFLIRRNSFDEQNEISGRYSWNFQKSTS | DAMYWYRQDPGQGLRLIYYSQIVN |
| | SFNFTITASQVVDSAVYFCALSNDYKLSFGA | DFQKGDIAEGYSVSREKKESFPLTV |
| | GTTVTVR | TSAQKNPTAFYLCASSVSVNSYNEQ |
| | | FFGPGTRLTVL |
| 216 | METLLGVSLVILWLQLARVNSQQGEEDPQA | MSNQVLCCVVLCFLGANTVDGGIT |
| | LSIQEGENATMNCSYKTSINNLQWYRQNSGR | QSPKYLFRKEGQNVTLSCEQNLNH |
| | GLVHLILIRSNEREKHSGRLRVTLDTSKKSSS | DAMYWYRQDPGQGLRLIYYSQIVN |
| | LLITASRAADTASYFCATDGGYGGATNKLIF | DFQKGDIAEGYSVSREKKESFPLTV |
| | GTGTLLAVQ | TSAQKNPTAFYLCASSMSQPHEQYF |
| | | GPGTRLTVT |
| 217 | MLTASLLRAVIASICVVSSMAQKVTQAQTEI | MSNQVLCCVVLCFLGANTVDGGIT |
| | SVVEKEDVTLDCVYETRDTTYYLFWYKQPP | QSPKYLFRKEGQNVTLSCEQNLNH |
| | SGELVFLIRRNSFDEQNEISGRYSWNFQKSTS | DAMYWYRQDPGQGLRLIYYSQIVN |
| | SFNFTITASQVVDSAVYFCALRTFTGGGNKL | DFQKGDIAEGYSVSREKKESFPLTV |
| | TFGTGTQLKVE | TSAQKNPTAFYLCASSPGQEYTFGS |
| | | GTRLTVV |
| 218 | METLLGLLILWLQLQWVSSKQEVTQIPAALS | MSNQVLCCVVLCFLGANTVDGGIT |
| | VPEGENLVLNCSFTDSAIYNLQWFRQDPGKG | QSPKYLFRKEGQNVTLSCEQNLNH |
| | LTSLLLIQSSQREQTSGRLNASLDKSSGRSTL | DAMYWYRQDPGQGLRLIYYSQIVN |
| | YIAASQPGDSATYLCAVGKGYSTLTFGKGT | DFQKGDIAEGYSVSREKKESFPLTV |
| | MLLVS | TSAQKNPTAFYLCASRVGGSNTGE |
| | | LFFGEGSRLTVL |
| 219 | MKSLRVLLVILWLQLSWVWSQQKEVEQNSG | MSNQVLCCVVLCFLGANTVDGGIT |
| | PLSVPEGAIASLNCTYSDRGSQSFFWYRQYS | QSPKYLFRKEGQNVTLSCEQNLNH |
| | GKSPELIMFIYSNGDKEDGRFTAQLNKASQY | DAMYWYRQDPGQGLRLIYYSQIVN |
| | VSLLIRDSQPSDSATYLCAVNNNNDMRFGA | DFQKGDIAEGYSVSREKKESFPLTV |
| | GTRLTVK | TSAQKNPTAFYLCASGDRGTEAFFG |
| | | QGTRLTVV |
| 220 | MLTASLLRAVIASICVVSSMAQKVTQAQTEI | MGPGLLCWVLLCLLGAGSVETGVT |
| | SVVEKEDVTLDCVYETRDTTYYLFWYKQPP | QSPTHLIKTRGQQVTLRCSSQSGHN |
| | SGELVFLIRRNSFDEQNEISGRYSWNFQKSTS | TVSWYQQALGQGPQFIFQYYREEE |
| | SFNFTITASQVVDSAVYFCALSGGNTDKLIFG | NGRGNFPPRFSGLQFPNYSSELNVN |
| | TGTRLQVF | ALELDDSALYLCASSLGSEQYFGPG |
| | | TRLTVT |
| 221 | MLTASLLRAVIASICVVSSMAQKVTQAQTEI | MGFRLLCCVAFCLLGAGPVDSGVT |
| | SVVEKEDVTLDCVYETRDTTYYLFWYKQPP | QTPKHLITATGQRVTLRCSPRSGDL |
| | SGELVFLIRRNSFDEQNEISGRYSWNFQKSTS | SVYWYQQSLDQGLQFLIQYYNGEE |
| | SFNFTITASQVVDSAVYFCALSVTSYGKLTFG | RAKGNILERFSAQQFPDLHSELNLS |
| | QGTILTVH | SLELGDSALYFCASSVEWDRGVNE |
| | | QFFGPGTRLTVL |
| 222 | MLTASLLRAVIASICVVSSMAQKVTQAQTEI | MSNQVLCCVVLCFLGANTVDGGIT |
| | SVVEKEDVTLDCVYETRDTTYYLFWYKQPP | QSPKYLFRKEGQNVTLSCEQNLNH |
| | SGELVFLIRRNSFDEQNEISGRYSWNFQKSTS | DAMYWYRQDPGQGLRLIYYSQIVN |
| | SFNFTITASQVVDSAVYFCALSELRGYSTLTF | DFQKGDIAEGYSVSREKKESFPLTV |
| | GKGTMLLVS | TSAQKNPTAFYLCASSINTDNEQFF |
| | | GPGTRLTVL |
| 223 | MDKILGASFLVLWLQLCWVSGQQKEKSDQQ | MGPGLLCWVLLCLLGAGSVETGVT |
| | QVKQSPQSLIVQKGGISIINCAYENTAFDYFP | QSPTHLIKTRGQQVTLRCSSQSGHN |
| | WYQQFPGKGPALLIAIRPDVSEKKEGRFTISF | TVSWYQQALGQGPQFIFQYYREEE |
| | NKSAKQFSLHIMDSQPGDSATYFCAASNRTQ | NGRGNFPPRFSGLQFPNYSSELNVN |
| | GGKLIFGQGTELSVK | ALELDDSALYLCASSLDQTDTQYFG |
| | | PGTRLTVL |
| 224 | MLTASLLRAVIASICVVSSMAQKVTQAQTEI | MGPGLLCWALLCLLGAGLVDAGV |
| | SVVEKEDVTLDCVYETRDTTYYLFWYKQPP | TQSPTHLIKTRGQQVTLRCSPKSGH |
| | SGELVFLIRRNSFDEQNEISGRYSWNFQKSTS | DTVSWYQQALGQGPQFIFQYYEEE |
| | SFNFTITASQVVDSAVYFCALSVGNTGKLIFG | ERQRGNFPDRFSGHQFPNYSSELNV |
| | QGTTLQVK | NALLLGDSALYLCASSLGVHEQYF |
| | | GPGTRLTVT |
| 225 | MASAPISMLAMLFTLSGLRAQSVAQPEDQV | MSNQVLCCVVLCFLGANTVDGGIT |
| | NVAEGNPLTVKCTYSVSGNPYLFWYVQYPN | QSPKYLFRKEGQNVTLSCEQNLNH |
| | RGLQFLLKYITGDNLVKGSYGFEAEFNKSQT | DAMYWYRQDPGQGLRLIYYSQIVN |
| | SFHLKKPSALVSDSALYFCAVRSSYGNNRLA | DFQKGDIAEGYSVSREKKESFPLTV |
| | FGKGNQVVVI | TSAQKNPTAFYLCASSISSGETYEQ |
| | | YFGPGTRLTVT |
| 226 | MKSLRVLLVILWLQLSWVWSQQKEVEQNSG | MGCRLLCCAVLCLLGAVPMETGVT |
| | PLSVPEGAIASLNCTYSDRGSQSFFWYRQYS | QTPRHLVMGMTNKKSLKCEQHLG |
| | GKSPELIMFIYSNGDKEDGRFTAQLNKASQY | HNAMYWYKQSAKKPLELMFVYSL |
| | VSLLIRDSQPSDSATYLCAVNTFSSGGSYIPTF | EERVENNSVPSRFSPECPNSSHLFLH |
| | GRGTSLIVH | LHTLQPEDSALYLCASSQNAGTGG |
| | | YEQYFGPGTRLTVT |
| 227 | MLTASLLRAVIASICVVSSMAQKVTQAQTEI | MGPGLLCWVLLCLLGAGSVETGVT |
| | SVVEKEDVTLDCVYETRDTTYYLFWYKQPP | QSPTHLIKTRGQQVTLRCSSQSGHN |
| | SGELVFLIRRNSFDEQNEISGRYSWNFQKSTS | TVSWYQQALGQGPQFIFQYYREEE |
| | SFNFTITASQVVDSAVYFCALSEDNNYGQNF | NGRGNFPPRFSGLQFPNYSSELNVN |
| | VFGPGTRLSVL | ALELDDSALYLCASSLDQTDTQYFG |
| | | PGTRLTVL |
| 228 | MLLITSMLVLWMQLSQVNGQQVMQIPQYQ | MSNQVLCCVVLCFLGANTVDGGIT |
| | HVQEGEDFTTYCNSSTTLSNIQWYKQRPGGH | QSPKYLFRKEGQNVTLSCEQNLNH |
| | PVFLIQLVKSGEVKKQKRLTFQFGEAKKNSS | DAMYWYRQDPGQGLRLIYYSQIVN |
| | LHITATQTTDVGTYFCAGGDSWGKLQFGAG | DFQKGDIAEGYSVSREKKESFPLTV |
| | TQVVVT | TSAQKNPTAFYLCASSIEHTYEQYF |
| | | GPGTRLTVT |
| 229 | MKTFAGFSFLFLWLQLDCMSRGEDVEQSLFL | MSIGLLCCAALSLLWAGPVNAGVT |
| | SVREGDSSVINCTYTDSSSTYLYWYKQEPGA | QTPKFQVLKTGQSMTLQCAQDMN |
| | GLQLLTYIFSNMDMKQDQRLTVLLNKKDKH | HEYMSWYRQDPGMGLRLIHYSVG |
| | LSLRIADTQTGDSAIYFCAPGGSYIPTFGRGTS | AGITDQGEVPNGYNVSRSTTEDFPL |
| | LIVH | RLLSAAPSQTSVYFCASSYSGGRAN |
| | | YGYTFGSGTRLTVV |
| 230 | MALQSTLGAVWLGLLLNSLWKVAESKDQV | MSNQVLCCVVLCFLGANTVDGGIT |
| | FQPSTVASSEGAVVEIFCNHSVSNAYNFFWY | QSPKYLFRKEGQNVTLSCEQNLNH |
| | LHFPGCAPRLLVKGSKPSQQGRYNMTYERFS | DAMYWYRQDPGQGLRLIYYSQIVN |
| | SSLLILQVREADAAVYYCAVEDQNARLMFG | DFQKGDIAEGYSVSREKKESFPLTV |
| | DGTQLVVK | TSAQKNPTAFYLCASSIPGYTEAFF |
| | | GQGTRLTVV |
| 231 | METLLGVSLVILWLQLARVNSQQGEEDPQA | MSNQVLCCVVLCFLGANTVDGGIT |
| | LSIQEGENATMNCSYKTSINNLQWYRQNSGR | QSPKYLFRKEGQNVTLSCEQNLNH |
| | GLVHLILIRSNEREKHSGRLRVTLDTSKKSSS | DAMYWYRQDPGQGLRLIYYSQIVN |
| | LLITASRAADTASYFCATVIQGGSEKLVFGK | DFQKGDIAEGYSVSREKKESFPLTV |
| | GTKLTVN | TSAQKNPTAFYLCASSIVAGPYEQY |
| | | FGPGTRLTVT |
| 232 | MSLSSLLKVVTASLWLGPGIAQKITQTQPGM | MSNQVLCCVVLCFLGANTVDGGIT |
| | FVQEKEAVTLDCTYDTSDQSYGLFWYKQPS | QSPKYLFRKEGQNVTLSCEQNLNH |
| | SGEMIFLIYQGSYDEQNATEGRYSLNFQKAR | DAMYWYRQDPGQGLRLIYYSQIVN |
| | KSANLVISASQLGDSAMYFCAMREGWGSGG | DFQKGDIAEGYSVSREKKESFPLTV |
| | YNKLIFGAGTRLAVH | TSAQKNPTAFYLCASSMQGLGQET |
| | | QYFGPGTRLLVL |
| 233 | MASAPISMLAMLFTLSGLRAQSVAQPEDQV | MSNQVLCCVVLCFLGANTVDGGIT |
| | NVAEGNPLTVKCTYSVSGNPYLFWYVQYPN | QSPKYLFRKEGQNVTLSCEQNLNH |
| | RGLQFLLKYITGDNLVKGSYGFEAEFNKSQT | DAMYWYRQDPGQGLRLIYYSQIVN |
| | SFHLKKPSALVSDSALYFCAVRDIRSGNTGK | DFQKGDIAEGYSVSREKKESFPLTV |
| | LIFGQGTTLQVK | TSAQKNPTAFYLCASSTWDSYGYT |
| | | FGSGTRLTVV |
| 234 | MLTASLLRAVIASICVVSSMAQKVTQAQTEI | MSNQVLCCVVLCFLGANTVDGGIT |
| | SVVEKEDVTLDCVYETRDTTYYLFWYKQPP | QSPKYLFRKEGQNVTLSCEQNLNH |
| | SGELVFLIRRNSFDEQNEISGRYSWNFQKSTS | DAMYWYRQDPGQGLRLIYYSQIVN |
| | SFNFTITASQVVDSAVYFCASWGYNFNKFYF | DFQKGDIAEGYSVSREKKESFPLTV |
| | GSGTKLNVK | TSAQKNPTAFYLCASSIGGAEAFFG |
| | | QGTRLTVV |
| 235 | MLTASLLRAVIASICVVSSMAQKVTQAQTEI | MSNQVLCCVVLCFLGANTVDGGIT |
| | SVVEKEDVTLDCVYETRDTTYYLFWYKQPP | QSPKYLFRKEGQNVTLSCEQNLNH |
| | SGELVFLIRRNSFDEQNEISGRYSWNFQKSTS | DAMYWYRQDPGQGLRLIYYSQIVN |
| | SFNFTITASQVVDSAVYFCALSADRGSTLGR | DFQKGDIAEGYSVSREKKESFPLTV |
| | LYFGRGTQLTVW | TSAQKNPTAFYLCASSSASGDYEQY |
| | | FGPGTRLTVT |
| 236 | MKLVTSITVLLSLGIMGDAKTTQPNSMESNE | MSNQVLCCVVLCFLGANTVDGGIT |
| | EEPVHLPCNHSTISGTDYIHWYRQLPSQGPEY | QSPKYLFRKEGQNVTLSCEQNLNH |
| | VIHGLTSNVNNRMASLAIAEDRKSSTLILHRA | DAMYWYRQDPGQGLRLIYYSQIVN |
| | TLRDAAVYYCILRDGFGTGANNLFFGTGTRL | DFQKGDIAEGYSVSREKKESFPLTV |
| | TVI | TSAQKNPTAFYLCASSETLAGVYEQ |
| | | YFGPGTRLTVT |
| 237 | METLLGLLILWLQLQWVSSKQEVTQIPAALS | MGTRLLCWVVLGFLGTDHTGAGV |
| | VPEGENLVLNCSFTDSAIYNLQWFRQDPGKG | SQSPRYKVAKRGQDVALRCDPISG |
| | LTSLLLIQSSQREQTSGRLNASLDKSSGRSTL | HVSLFWYQQALGQGPEFLTYFQNE |
| | YIAASQPGDSATYLCALYGDSNYQLIWGAG | AQLDKSGLPSDRFFAERPEGSVSTL |
| | TKLIIK | KIQRTQQEDSAVYLCASSSGQGSTD |
| | | TQYFGPGTRLTVL |
| 238 | MLLELIPLLGIHFVLRTARAQSVTQPDIHITVS | MSNQVLCCVVLCFLGANTVDGGIT |
| | EGASLELRCNYSYGATPYLFWYVQSPGQGL | QSPKYLFRKEGQNVTLSCEQNLNH |
| | QLLLKYFSGDTLVQGIKGFEAEFKRSQSSFNL | DAMYWYRQDPGQGLRLIYYSQIVN |
| | RKPSVHWSDAAEYFCAVGNGNNRLAFGKG | DFQKGDIAEGYSVSREKKESFPLTV |
| | NQVVVI | TSAQKNPTAFYLCASRNSNQPQHF |
| | | GDGTRLSIL |
| 239 | MMKSLRVLLVILWLQLSWVWSQQKEVEQD | MSNQVLCCVVLCFLGANTVDGGIT |
| | PGPLSVPEGAIVSLNCTYSNSAFQYFMWYRQ | QSPKYLFRKEGQNVTLSCEQNLNH |
| | YSRKGPELLMYTYSSGNKEDGRFTAQVDKS | DAMYWYRQDPGQGLRLIYYSQIVN |
| | SKYISLFIRDSQPSDSATYLCAMGQHSGYSTL | DFQKGDIAEGYSVSREKKESFPLTV |
| | TFGKGTMLLVS | TSAQKNPTAFYLCASTFGQEQYFGP |
| | | GTRLTVT |
| 240 | MAMLLGASVLILWLQPDWVNSQQKNDDQQ | MGFRLLCCVAFCLLGAGPVDSGVT |
| | VKQNSPSLSVQEGRISILNCDYTNSMFDYFL | QTPKHLITATGQRVTLRCSPRSGDL |
| | WYKKYPAEGPTFLISISSIKDKNEDGRFTVFL | SVYWYQQSLDQGLQFLIQYYNGEE |
| | NKSAKHLSLHIVPSQPGDSAVYFCAAFFDRL | RAKGNILERFSAQQFPDLHSELNLS |
| | MFGDGTQLVVK | SLELGDSALYFCASSAPGLDYEQYF |
| | | GPGTRLTVT |
| 241 | MLTASLLRAVIASICVVSSMAQKVTQAQTEI | MSNQVLCCVVLCFLGANTVDGGIT |
| | SVVEKEDVTLDCVYETRDTTYYLFWYKQPP | QSPKYLFRKEGQNVTLSCEQNLNH |
| | SGELVFLIRRNSFDEQNEISGRYSWNFQKSTS | DAMYWYRQDPGQGLRLIYYSQIVN |
| | SFNFTITASQVVDSAVYFCALSEAGFNQGGK | DFQKGDIAEGYSVSREKKESFPLTV |
| | LIFGQGTELSVK | TSAQKNPTAFYLCASSRDNNEQFFG |
| | | PGTRLTVL |
| 242 | MAFWLRRLGLHFRPHLGRRMESFLGGVLLIL | MGPQLLGYVVLCLLGAGPLEAQVT |
| | WLQVDWVKSQKIEQNSEALNIQEGKTATLT | QNPRYLITVTGKKLTVTCSQNMNH |
| | CNYTNYSPAYLQWYRQDPGRGPVFLLLIREN | EYMSWYRQDPGLGLRQIYYSMNVE |
| | EKEKRKERLKVTFDTTLKQSLFHITASQPADS | VTDKGDVPEGYKVSRKEKRNFPLIL |
| | ATYLCALDGSNAGNMLTFGGGTRLMVK | ESPSPNQTSLYFCASGWPPPRQYFG |
| | | PGTRLTVL |
| 243 | MVLKFSVSILWIQLAWVSTQLLEQSPQFLSIQ | MSNQVLCCVVLCFLGANTVDGGIT |
| | EGENLTVYCNSSSVFSSLQWYRQEPGEGPVL | QSPKYLFRKEGQNVTLSCEQNLNH |
| | LVTVVTGGEVKKLKRLTFQFGDARKDSSLHI | DAMYWYRQDPGQGLRLIYYSQIVN |
| | TAAQPGDTGLYLCAGPRPSNTGKLIFGQGTT | DFQKGDIAEGYSVSREKKESFPLTV |
| | LQVK | TSAQKNPTAFYLCASSIDISYEQYFG |
| | | PGTRLTVT |
| 244 | MTSIRAVFIFLWLQLDLVNGENVEQHPSTLS | MSNQVLCCVVLCFLGANTVDGGIT |
| | VQEGDSAVIKCTYSDSASNYFPWYKQELGK | QSPKYLFRKEGQNVTLSCEQNLNH |
| | RPQLIIDIRSNVGEKKDQRIAVTLNKTAKHFS | DAMYWYRQDPGQGLRLIYYSQIVN |
| | LHITETQPEDSAVYFCAPESGNTGKLIFGQGT | DFQKGDIAEGYSVSREKKESFPLTV |
| | TLQVK | TSAQKNPTAFYLCATAPASGPYEQ |
| | | YFGPGTRLTVT |
| 245 | MKLVTSITVLLSLGIMGDAKTTQPNSMESNE | MSNQVLCCVVLCFLGANTVDGGIT |
| | EEPVHLPCNHSTISGTDYIHWYRQLPSQGPEY | QSPKYLFRKEGQNVTLSCEQNLNH |
| | VIHGLTSNVNNRMASLAIAEDRKSSTLILHRA | DAMYWYRQDPGQGLRLIYYSQIVN |
| | TLRDAAVYYCILRDVKMYYGQNFVFGPGTR | DFQKGDIAEGYSVSREKKESFPLTV |
| | LSVL | TSAQKNPTAFYLCASSITGESYEQY |
| | | FGPGTRLTVT |
| 246 | MTSIRAVFIFLWLQLDLVNGENVEQHPSTLS | MSNQVLCCVVLCFLGANTVDGGIT |
| | VQEGDSAVIKCTYSDSASNYFPWYKQELGK | QSPKYLFRKEGQNVTLSCEQNLNH |
| | RPQLIIDIRSNVGEKKDQRIAVTLNKTAKHFS | DAMYWYRQDPGQGLRLIYYSQIVN |
| | LHITETQPEDSAVYFCAATPPGTGNQFYFGT | DFQKGDIAEGYSVSREKKESFPLTV |
| | GTSLTVI | TSAQKNPTAFYLCATLTGYNEQFFG |
| | | PGTRLTVL |
| 247 | MLTASLLRAVIASICVVSSMAQKVTQAQTEI | MSNQVLCCVVLCFLGANTVDGGIT |
| | SVVEKEDVTLDCVYETRDTTYYLFWYKQPP | QSPKYLFRKEGQNVTLSCEQNLNH |
| | SGELVFLIRRNSFDEQNEISGRYSWNFQKSTS | DAMYWYRQDPGQGLRLIYYSQIVN |
| | SFNFTITASQVVDSAVYFCAQETSGSRLTFGE | DFQKGDIAEGYSVSREKKESFPLTV |
| | GTQLTVN | TSAQKNPTAFYLCASSINRDSEQYF |
| | | GPGTRLTVT |
| 248 | MLTASLLRAVIASICVVSSMAQKVTQAQTEI | MSNQVLCCVVLCFLGANTVDGGIT |
| | SVVEKEDVTLDCVYETRDTTYYLFWYKQPP | QSPKYLFRKEGQNVTLSCEQNLNH |
| | SGELVFLIRRNSFDEQNEISGRYSWNFQKSTS | DAMYWYRQDPGQGLRLIYYSQIVN |
| | SFNFTITASQVVDSAVYFCALSALYQKVTFGI | DFQKGDIAEGYSVSREKKESFPLTV |
| | GTKLQVI | TSAQKNPTAFYLCASNTGGANTEA |
| | | FFGQGTRLTVV |
| 249 | MLTASLLRAVIASICVVSSMAQKVTQAQTEI | MSNQVLCCVVLCFLGANTVDGGIT |
| | SVVEKEDVTLDCVYETRDTTYYLFWYKQPP | QSPKYLFRKEGQNVTLSCEQNLNH |
| | SGELVFLIRRNSFDEQNEISGRYSWNFQKSTS | DAMYWYRQDPGQGLRLIYYSQIVN |
| | SFNFTITASQVVDSAVYFCALSATGFQKLVF | DFQKGDIAEGYSVSREKKESFPLTV |
| | GTGTRLLVS | TSAQKNPTAFYLCASTPGAYNEQY |
| | | FGPGTRLTVT |
| 250 | MLTASLLRAVIASICVVSSMAQKVTQAQTEI | MGFRLLCCVAFCLLGAGPVDSGVT |
| | SVVEKEDVTLDCVYETRDTTYYLFWYKQPP | QTPKHLITATGQRVTLRCSPRSGDL |
| | SGELVFLIRRNSFDEQNEISGRYSWNFQKSTS | SVYWYQQSLDQGLQFLIQYYNGEE |
| | SFNFTITASQVVDSAVYFCALWGSGGYNKLI | RAKGNILERFSAQQFPDLHSELNLS |
| | FGAGTRLAVH | SLELGDSALYFCASSVYGNTQYFGP |
| | | GTRLTVL |
| 251 | MRQVARVIVFLTLSTLSLAKTTQPISMDSYE | MSNQVLCCVVLCFLGANTVDGGIT |
| | GQEVNITCSHNNIATNDYITWYQQFPSQGPR | QSPKYLFRKEGQNVTLSCEQNLNH |
| | FIIQGYKTKVTNEVASLFIPADRKSSTLSLPRV | DAMYWYRQDPGQGLRLIYYSQIVN |
| | SLSDTAVYYCLPEGGSNDYKLSFGAGTTVTV | DFQKGDIAEGYSVSREKKESFPLTV |
| | R | TSAQKNPTAFYLCASSTSRDYYEQY |
| | | FGPGTRLTVT |
| 252 | METLLGLLILWLQLQWVSSKQEVTQIPAALS | MSNQVLCCVVLCFLGANTVDGGIT |
| | VPEGENLVLNCSFTDSAIYNLQWFRQDPGKG | QSPKYLFRKEGQNVTLSCEQNLNH |
| | LTSLLLIQSSQREQTSGRLNASLDKSSGRSTL | DAMYWYRQDPGQGLRLIYYSQIVN |
| | YIAASQPGDSATYLCAVSGSNYQLIWGAGTK | DFQKGDIAEGYSVSREKKESFPLTV |
| | LIIK | TSAQKNPTAFYLCASSISSPNFYNEQ |
| | | FFGPGTRLTVL |
| 253 | METLLGLLILWLQLQWVSSKQEVTQIPAALS | MSNQVLCCVVLCFLGANTVDGGIT |
| | VPEGENLVLNCSFTDSAIYNLQWFRQDPGKG | QSPKYLFRKEGQNVTLSCEQNLNH |
| | LTSLLLIQSSQREQTSGRLNASLDKSSGRSTL | DAMYWYRQDPGQGLRLIYYSQIVN |
| | YIAASQPGDSATYLCAVIDGATNKLIFGTGTL | DFQKGDIAEGYSVSREKKESFPLTV |
| | LAVQ | TSAQKNPTAFYLCASSFMNTEAFFG |
| | | QGTRLTVV |
| 254 | MTSIRAVFIFLWLQLDLVNGENVEQHPSTLS | MSNQVLCCVVLCFLGANTVDGGIT |
| | VQEGDSAVIKCTYSDSASNYFPWYKQELGK | QSPKYLFRKEGQNVTLSCEQNLNH |
| | RPQLIIDIRSNVGEKKDQRIAVTLNKTAKHFS | DAMYWYRQDPGQGLRLIYYSQIVN |
| | LHITETQPEDSAVYFCAASTWTNAGKSTFGD | DFQKGDIAEGYSVSREKKESFPLTV |
| | GTTLTVK | TSAQKNPTAFYLCASSIDGGTYEQY |
| | | FGPGTRLTVT |
| 255 | METLLGLLILWLQLQWVSSKQEVTQIPAALS | MGTSLLCWVVLGFLGTDHTGAGVS |
| | VPEGENLVLNCSFTDSAIYNLQWFRQDPGKG | QSPRYKVTKRGQDVALRCDPISGH |
| | LTSLLLIQSSQREQTSGRLNASLDKSSGRSTL | VSLYWYRQALGQGPEFLTYFNYEA |
| | YIAASQPGDSATYLCAVRCNQAGTALIFGKG | QQDKSGLPNDRFSAERPEGSISTLTI |
| | TTLSVS | QRTEQRDSAMYRCASSEGLGYEQY |
| | | FGPGTRLTVT |
| 256 | MLLLLVPVLEVIFTLGGTRAQSVTQLDSHVS | MSNQVLCCVVLCFLGANTVDGGIT |
| | VSEGTPVLLRCNYSSSYSPSLFWYVQHPNKG | QSPKYLFRKEGQNVTLSCEQNLNH |
| | LQLLLKYTSAATLVKGINGFEAEFKKSETSFH | DAMYWYRQDPGQGLRLIYYSQIVN |
| | LTKPSAHMSDAAEYFCVVSGDNYGQNFVFG | DFQKGDIAEGYSVSREKKESFPLTV |
| | PGTRLSVL | TSAQKNPTAFYLCASSISRERYNEQ |
| | | FFGPGTRLTVL |
| 257 | MTSIRAVFIFLWLQLDLVNGENVEQHPSTLS | MSNQVLCCVVLCFLGANTVDGGIT |
| | VQEGDSAVIKCTYSDSASNYFPWYKQELGK | QSPKYLFRKEGQNVTLSCEQNLNH |
| | RPQLIIDIRSNVGEKKDQRIAVTLNKTAKHFS | DAMYWYRQDPGQGLRLIYYSQIVN |
| | LHITETQPEDSAVYFCAAVPWDQAGTALIFG | DFQKGDIAEGYSVSREKKESFPLTV |
| | KGTTLSVS | TSAQKNPTAFYLCASSSDLDNEQFF |
| | | GPGTRLTVL |
| 258 | MSLSSLLKVVTASLWLGPGIAQKITQTQPGM | MSNQVLCCVVLCFLGANTVDGGIT |
| | FVQEKEAVTLDCTYDTSDQSYGLFWYKQPS | QSPKYLFRKEGQNVTLSCEQNLNH |
| | SGEMIFLIYQGSYDEQNATEGRYSLNFQKAR | DAMYWYRQDPGQGLRLIYYSQIVN |
| | KSANLVISASQLGDSAMYFCAMRSFRAGNM | DFQKGDIAEGYSVSREKKESFPLTV |
| | LTFGGGTRLMVK | TSAQKNPTAFYLCASSEGEGPLSEQ |
| | | YFGPGTRLTVT |
| 259 | MLTASLLRAVIASICVVSSMAQKVTQAQTEI | MSNQVLCCVVLCFLGANTVDGGIT |
| | SVVEKEDVTLDCVYETRDTTYYLFWYKQPP | QSPKYLFRKEGQNVTLSCEQNLNH |
| | SGELVFLIRRNSFDEQNEISGRYSWNFQKSTS | DAMYWYRQDPGQGLRLIYYSQIVN |
| | SFNFTITASQVVDSAVYFCALSEASNYGQNF | DFQKGDIAEGYSVSREKKESFPLTV |
| | VFGPGTRLSVL | TSAQKNPTAFYLCASSDRDRGYEQ |
| | | YFGPGTRLTVT |
| 260 | MLTASLLRAVIASICVVSSMAQKVTQAQTEI | MGPGLLCWALLCLLGAGLVDAGV |
| | SVVEKEDVTLDCVYETRDTTYYLFWYKQPP | TQSPTHLIKTRGQQVTLRCSPKSGH |
| | SGELVFLIRRNSFDEQNEISGRYSWNFQKSTS | DTVSWYQQALGQGPQFIFQYYEEE |
| | SFNFTITASQVVDSAVYFCALSEAWTNAGKS | ERQRGNFPDRFSGHQFPNYSSELNV |
| | TFGDGTTLTVK | NALLLGDSALYLCASSYSGGKLFFG |
| | | SGTQLSVL |
| 261 | MLTASLLRAVIASICVVSSMAQKVTQAQTEI | MSNQVLCCVVLCFLGANTVDGGIT |
| | SVVEKEDVTLDCVYETRDTTYYLFWYKQPP | QSPKYLFRKEGQNVTLSCEQNLNH |
| | SGELVFLIRRNSFDEQNEISGRYSWNFQKSTS | DAMYWYRQDPGQGLRLIYYSQIVN |
| | SFNFTITASQVVDSAVYFCALSEAARDNARL | DFQKGDIAEGYSVSREKKESFPLTV |
| | MFGDGTQLVVK | TSAQKNPTAFYLCASSRRERNEKLF |
| | | FGSGTQLSVL |
| 262 | MASAPISMLAMLFTLSGLRAQSVAQPEDQV | MSNQVLCCVVLCFLGANTVDGGIT |
| | NVAEGNPLTVKCTYSVSGNPYLFWYVQYPN | QSPKYLFRKEGQNVTLSCEQNLNH |
| | RGLQFLLKYITGDNLVKGSYGFEAEFNKSQT | DAMYWYRQDPGQGLRLIYYSQIVN |
| | SFHLKKPSALVSDSALYFCAVRQGGTSNSGY | DFQKGDIAEGYSVSREKKESFPLTV |
| | ALNFGKGTSLLVT | TSAQKNPTAFYLCASSPPVGVYNEQ |
| | | FFGPGTRLTVL |
| 263 | MLTASLLRAVIASICVVSSMAQKVTQAQTEI | MSNQVLCCVVLCFLGANTVDGGIT |
| | SVVEKEDVTLDCVYETRDTTYYLFWYKQPP | QSPKYLFRKEGQNVTLSCEQNLNH |
| | SGELVFLIRRNSFDEQNEISGRYSWNFQKSTS | DAMYWYRQDPGQGLRLIYYSQIVN |
| | SFNFTITASQVVDSAVYFCALSEARHSGAGS | DFQKGDIAEGYSVSREKKESFPLTV |
| | YQLTFGKGTKLSVI | TSAQKNPTAFYLCASSFGGDTQYFG |
| | | PGTRLTVL |
| 264 | MLTASLLRAVIASICVVSSMAQKVTQAQTEI | MSNQVLCCVVLCFLGANTVDGGIT |
| | SVVEKEDVTLDCVYETRDTTYYLFWYKQPP | QSPKYLFRKEGQNVTLSCEQNLNH |
| | SGELVFLIRRNSFDEQNEISGRYSWNFQKSTS | DAMYWYRQDPGQGLRLIYYSQIVN |
| | SFNFTITASQVVDSAVYFCALSPGNTGKLIFG | DFQKGDIAEGYSVSREKKESFPLTV |
| | QGTTLQVK | TSAQKNPTAFYLCASSGRQGPGELF |
| | | FGEGSRLTVL |
| 265 | MSNQVLCCVVLCFLGANTVDGGITQSPKYLF | MSNQVLCCVVLCFLGANTVDGGIT |
| | RKEGQNVTLSCEQNLNHDAMYWYRQDPGQ | QSPKYLFRKEGQNVTLSCEQNLNH |
| | GLRLIYYSQIVNDFQKGDIAEGYSVSREKKES | DAMYWYRQDPGQGLRLIYYSQIVN |
| | FPLTVTSAQKNPTAFYLCASSIDPTGFYEQYF | DFQKGDIAEGYSVSREKKESFPLTV |
| | GPGTRLTVT | TSAQKNPTAFYLCASSIDPTGFYEQ |
| | | YFGPGTRLTVT |
| 266 | MLTASLLRAVIASICVVSSMAQKVTQAQTEI | MSNQVLCCVVLCFLGANTVDGGIT |
| | SVVEKEDVTLDCVYETRDTTYYLFWYKQPP | QSPKYLFRKEGQNVTLSCEQNLNH |
| | SGELVFLIRRNSFDEQNEISGRYSWNFQKSTS | DAMYWYRQDPGQGLRLIYYSQIVN |
| | SFNFTITASQVVDSAVYFCALSEAFRDDKIIF | DFQKGDIAEGYSVSREKKESFPLTV |
| | GKGTRLHIL | TSAQKNPTAFYLCASSIDRDYEQYF |
| | | GPGTRLTVT |
| 267 | MLTASLLRAVIASICVVSSMAQKVTQAQTEI | MSNQVLCCVVLCFLGANTVDGGIT |
| | SVVEKEDVTLDCVYETRDTTYYLFWYKQPP | QSPKYLFRKEGQNVTLSCEQNLNH |
| | SGELVFLIRRNSFDEQNEISGRYSWNFQKSTS | DAMYWYRQDPGQGLRLIYYSQIVN |
| | SFNFTITASQVVDSAVYFCALSVMNRDDKIIF | DFQKGDIAEGYSVSREKKESFPLTV |
| | GKGTRLHIL | TSAQKNPTAFYLCASLDGYEQYFG |
| | | PGTRLTVT |
| 268 | MLLLLVPVLEVIFTLGGTRAQSVTQLDSHVS | MSNQVLCCVVLCFLGANTVDGGIT |
| | VSEGTPVLLRCNYSSSYSPSLFWYVQHPNKG | QSPKYLFRKEGQNVTLSCEQNLNH |
| | LQLLLKYTSAATLVKGINGFEAEFKKSETSFH | DAMYWYRQDPGQGLRLIYYSQIVN |
| | LTKPSAHMSDAAEYFCVVSVSQEGAQKLVF | DFQKGDIAEGYSVSREKKESFPLTV |
| | | TSAQKNPTAFYLCASSISSGTTYEQ |
| | | YFGPGTRLTVT |
| 269 | MWGAFLLYVSMKMGGTAGQSLEQPSEVTA | MGFRLLCCVAFCLLGAGPVDSGVT |
| | VEGAIVQINCTYQTSGFYGLSWYQQHDGGA | QTPKHLITATGQRVTLRCSPRSGDL |
| | PTFLSYNALDGLEETGRFSSFLSRSDSYGYLL | SVYWYQQSLDQGLQFLIQYYNGEE |
| | LQELQMKDSASYFCACSGNTPLVFGKGTRLS | RAKGNILERFSAQQFPDLHSELNLS |
| | VI | SLELGDSALYFCASSGGPPDTQYFG |
| | | PGTRLTVL |
| 270 | MKPTLISVLVIIFILRGTRAQRVTQPEKLLSVF | MSNQVLCCVVLCFLGANTVDGGIT |
| | KGAPVELKCNYSYSGSPELFWYVQYSRQRL | QSPKYLFRKEGQNVTLSCEQNLNH |
| | QLLLRHISRESIKGFTADLNKGETSFHLKKPF | DAMYWYRQDPGQGLRLIYYSQIVN |
| | AQEEDSAMYYCAPGGSYIPTFGRGTSLIVH | DFQKGDIAEGYSVSREKKESFPLTV |
| | | TSAQKNPTAFYLCASTDGYGYTFG |
| | | SGTRLTVV |
| 271 | METLLGLLILWLQLQWVSSKQEVTQIPAALS | MGCRLLCCVVFCLLQAGPLDTAVS |
| | VPEGENLVLNCSFTDSAIYNLQWFRQDPGKG | QTPKYLVTQMGNDKSIKCEQNLGH |
| | LTSLLLIQSSQREQTSGRLNASLDKSSGRSTL | DTMYWYKQDSKKFLKIMFSYNNK |
| | YIAASQPGDSATYLCAVNNARLMFGDGTQL | ELIINETVPNRFSPKSPDKAHLNLHI |
| | VVK | NSLELGDSAVYFCASSQDRGVEQY |
| | | FGPGTRLTVT |
| 272 | MLLITSMLVLWMQLSQVNGQQVMQIPQYQ | MSNQVLCCVVLCFLGANTVDGGIT |
| | HVQEGEDFTTYCNSSTTLSNIQWYKQRPGGH | QSPKYLFRKEGQNVTLSCEQNLNH |
| | PVFLIQLVKSGEVKKQKRLTFQFGEAKKNSS | DAMYWYRQDPGQGLRLIYYSQIVN |
| | LHITATQTTDVGTYFCAAPGGYQKVTFGIGT | DFQKGDIAEGYSVSREKKESFPLTV |
| | KLQVI | TSAQKNPTAFYLCASSIGQVYEQYF |
| | | GPGTRLTVT |
| 273 | METLLGLLILWLQLQWVSSKQEVTQIPAALS | MSNQVLCCVVLCFLGANTVDGGIT |
| | VPEGENLVLNCSFTDSAIYNLQWFRQDPGKG | QSPKYLFRKEGQNVTLSCEQNLNH |
| | LTSLLLIQSSQREQTSGRLNASLDKSSGRSTL | DAMYWYRQDPGQGLRLIYYSQIVN |
| | YIAASQPGDSATYLCAASGYSTLTFGKGTML | DFQKGDIAEGYSVSREKKESFPLTV |
| | LVS | TSAQKNPTAFYLCASSTGLDYGYTF |
| | | GSGTRLTVV |
| 274 | METLLGLLILWLQLQWVSSKQEVTQIPAALS | MGTRLLCWVVLGFLGTDHTGAGV |
| | VPEGENLVLNCSFTDSAIYNLQWFRQDPGKG | SQSPRYKVAKRGQDVALRCDPISG |
| | LTSLLLIQSSQREQTSGRLNASLDKSSGRSTL | HVSLFWYQQALGQGPEFLTYFQNE |
| | YIAASQPGDSATYLCAVWGATNKLIFGTGTL | AQLDKSGLPSDRFFAERPEGSVSTL |
| | LAVQ | KIQRTQQEDSAVYLCASSSGQGSTD |
| | | TQYFGPGTRLTVL |
| 275 | MRLVARVTVFLTFGTIIDAKTTQPPSMDCAE | MSNQVLCCVVLCFLGANTVDGGIT |
| | GRAANLPCNHSTISGNEYVYWYRQIHSQGPQ | QSPKYLFRKEGQNVTLSCEQNLNH |
| | YIIHGLKNNETNEMASLIITEDRKSSTLILPHA | DAMYWYRQDPGQGLRLIYYSQIVN |
| | TLRDTAVYYCIVCPNSGGSNYKLTFGKGTLL | DFQKGDIAEGYSVSREKKESFPLTV |
| | TVN | TSAQKNPTAFYLCASSINIAYEQYF |
| | | GPGTRLTVT |
| 276 | METLLGLLILWLQLQWVSSKQEVTQIPAALS | MSIGLLCCAALSLLWAGPVNAGVT |
| | VPEGENLVLNCSFTDSAIYNLQWFRQDPGKG | QTPKFQVLKTGQSMTLQCAQDMN |
| | LTSLLLIQSSQREQTSGRLNASLDKSSGRSTL | HEYMSWYRQDPGMGLRLIHYSVG |
| | YIAASQPGDSATYLCAAWGATNKLIFGTGTL | AGITDQGEVPNGYNVSRSTTEDFPL |
| | LAVQ | RLLSAAPSQTSVYFCASSWQAPGEL |
| | | FFGEGSRLTVL |
| 277 | METLLGLLILWLQLQWVSSKQEVTQIPAALS | MGPGLLCWALLCLLGAGLVDAGV |
| | VPEGENLVLNCSFTDSAIYNLQWFRQDPGKG | TQSPTHLIKTRGQQVTLRCSPKSGH |
| | LTSLLLIQSSQREQTSGRLNASLDKSSGRSTL | DTVSWYQQALGQGPQFIFQYYEEE |
| | YIAASQPGDSATYLCAAWGATNKLIFGTGTL | ERQRGNFPDRFSGHQFPNYSSELNV |
| | LAVQ | NALLLGDSALYLCASSYSGGKLFFG |
| | | SGTQLSVL |
| 278 | METLLKVLSGTLLWQLTWVRSQQPVQSPQA | MSNQVLCCVVLCFLGANTVDGGIT |
| | VILREGEDAVINCSSSKALYSVHWYRQKHGE | QSPKYLFRKEGQNVTLSCEQNLNH |
| | APVFLMILLKGGEQKGHEKISASFNEKKQQS | DAMYWYRQDPGQGLRLIYYSQIVN |
| | SLYLTASQLSYSGTYFCAWGGATNKLIFGTG | DFQKGDIAEGYSVSREKKESFPLTV |
| | TLLAVQ | TSAQKNPTAFYLCASSWDSSYNEQ |
| | | FFGPGTRLTVL |
| 279 | MLLITSMLVLWMQLSQVNGQQVMQIPQYQ | MSNQVLCCVVLCFLGANTVDGGIT |
| | HVQEGEDFTTYCNSSTTLSNIQWYKQRPGGH | QSPKYLFRKEGQNVTLSCEQNLNH |
| | PVFLIQLVKSGEVKKQKRLTFQFGEAKKNSS | DAMYWYRQDPGQGLRLIYYSQIVN |
| | LHITATQTTDVGTYFCAAPSFYNQGGKLIFG | DFQKGDIAEGYSVSREKKESFPLTV |
| | QGTELSVK | TSAQKNPTAFYLCASSLTSTDTQYF |
| | | GPGTRLTVL |
| 280 | MLLELIPLLGIHFVLRTARAQSVTQPDIHITVS | MSNQVLCCVVLCFLGANTVDGGIT |
| | EGASLELRCNYSYGATPYLFWYVQSPGQGL | QSPKYLFRKEGQNVTLSCEQNLNH |
| | QLLLKYFSGDTLVQGIKGFEAEFKRSQSSFNL | DAMYWYRQDPGQGLRLIYYSQIVN |
| | RKPSVHWSDAAEYFCAVGAYGNKLVFGAG | DFQKGDIAEGYSVSREKKESFPLTV |
| | TILRVK | TSAQKNPTAFYLCASSMGGNEQFF |
| | | GPGTRLTVL |
| 281 | METLLGLLILWLQLQWVSSKQEVTQIPAALS | MGFRLLCCVAFCLLGAGPVDSGVT |
| | VPEGENLVLNCSFTDSAIYNLQWFRQDPGKG | QTPKHLITATGQRVTLRCSPRSGDL |
| | LTSLLLIQSSQREQTSGRLNASLDKSSGRSTL | SVYWYQQSLDQGLQFLIQYYNGEE |
| | YIAASQPGDSATYLCALYGDSNYQLIWGAG | RAKGNILERFSAQQFPDLHSELNLS |
| | TKLIIK | SLELGDSALYFCASSRLPLAGGRDE |
| | | QYFGPGTRLTVT |
| 282 | MKTFAGFSFLFLWLQLDCMSRGEDVEQSLFL | MGFRLLCCVAFCLLGAGPVDSGVT |
| | SVREGDSSVINCTYTDSSSTYLYWYKQEPGA | QTPKHLITATGQRVTLRCSPRSGDL |
| | GLQLLTYIFSNMDMKQDQRLTVLLNKKDKH | SVYWYQQSLDQGLQFLIQYYNGEE |
| | LSLRIADTQTGDSAIYFCAEDYNTDKLIFGTG | RAKGNILERFSAQQFPDLHSELNLS |
| | TRLQVF | SLELGDSALYFCASSDLDTGELFFG |
| | | EGSRLTVL |
| 283 | METLLGVSLVILWLQLARVNSQQGEEDPQA | MSNQVLCCVVLCFLGANTVDGGIT |
| | LSIQEGENATMNCSYKTSINNLQWYRQNSGR | QSPKYLFRKEGQNVTLSCEQNLNH |
| | GLVHLILIRSNEREKHSGRLRVTLDTSKKSSS | DAMYWYRQDPGQGLRLIYYSQIVN |
| | LLITASRAADTASYFCATASHNNARLMFGDG | DFQKGDIAEGYSVSREKKESFPLTV |
| | TQLVVK | TSAQKNPTAFYLCASSIQGQETQYF |
| | | GPGTRLLVL |
| 284 | METLLGLLILWLQLQWVSSKQEVTQIPAALS | MSNQVLCCVVLCFLGANTVDGGIT |
| | VPEGENLVLNCSFTDSAIYNLQWFRQDPGKG | QSPKYLFRKEGQNVTLSCEQNLNH |
| | LTSLLLIQSSQREQTSGRLNASLDKSSGRSTL | DAMYWYRQDPGQGLRLIYYSQIVN |
| | YIAASQPGDSATYLCAVTSNNNNDMRFGAG | DFQKGDIAEGYSVSREKKESFPLTV |
| | TRLTVK | TSAQKNPTAFYLCASGSWRGAFFG |
| | | QGTRLTVV |
| 285 | MEKMLECAFIVLWLQLGWLSGEDQVTQSPE | MSNQVLCCVVLCFLGANTVDGGIT |
| | ALRLQEGESSSLNCSYTVSGLRGLFWYRQDP | QSPKYLFRKEGQNVTLSCEQNLNH |
| | GKGPEFLFTLYSAGEEKEKERLKATLTKKES | DAMYWYRQDPGQGLRLIYYSQIVN |
| | FLHITAPKPEDSATYLCAVQANGGTYKYIFG | DFQKGDIAEGYSVSREKKESFPLTV |
| | TGTRLKVL | TSAQKNPTAFYLCASKVDIGYFYEQ |
| | | YFGPGTRLTVT |
| 286 | MISLRVLLVILWLQLSWVWSQRKEVEQDPG | MSNQVLCCVVLCFLGANTVDGGIT |
| | PFNVPEGATVAFNCTYSNSASQSFFWYRQDC | QSPKYLFRKEGQNVTLSCEQNLNH |
| | RKEPKLLMSVYSSGNEDGRFTAQLNRASQYI | DAMYWYRQDPGQGLRLIYYSQIVN |
| | SLLIRDSKLSDSATYLCVVNSLSGNTPLVFGK | DFQKGDIAEGYSVSREKKESFPLTV |
| | GTRLSVI | TSAQKNPTAFYLCASSIDLDNEQFF |
| | | GPGTRLTVL |
| 287 | METLLGLLILWLQLQWVSSKQEVTQIPAALS | MSNQVLCCVVLCFLGANTVDGGIT |
| | VPEGENLVLNCSFTDSAIYNLQWFRQDPGKG | QSPKYLFRKEGQNVTLSCEQNLNH |
| | LTSLLLIQSSQREQTSGRLNASLDKSSGRSTL | DAMYWYRQDPGQGLRLIYYSQIVN |
| | YIAASQPGDSATYLCAVGTLDSNYQLIWGA | DFQKGDIAEGYSVSREKKESFPLTV |
| | GTKLIIK | TSAQKNPTAFYLCASSTDISYEQYF |
| | | GPGTRLTVT |
| 288 | MSLSSLLKVVTASLWLGPGIAQKITQTQPGM | MSNQVLCCVVLCFLGANTVDGGIT |
| | FVQEKEAVTLDCTYDTSDQSYGLFWYKQPS | QSPKYLFRKEGQNVTLSCEQNLNH |
| | SGEMIFLIYQGSYDEQNATEGRYSLNFQKAR | DAMYWYRQDPGQGLRLIYYSQIVN |
| | KSANLVISASQLGDSAMYFCAMRSYNNNDM | DFQKGDIAEGYSVSREKKESFPLTV |
| | RFGAGTRLTVK | TSAQKNPTAFYLCATLTGYNEQFFG |
| | | PGTRLTVL |
| 289 | MLTASLLRAVIASICVVSSMAQKVTQAQTEI | MSNQVLCCVVLCFLGANTVDGGIT |
| | SVVEKEDVTLDCVYETRDTTYYLFWYKQPP | QSPKYLFRKEGQNVTLSCEQNLNH |
| | SGELVFLIRRNSFDEQNEISGRYSWNFQKSTS | DAMYWYRQDPGQGLRLIYYSQIVN |
| | SFNFTITASQVVDSAVYFCALSEAYYGKLTF | DFQKGDIAEGYSVSREKKESFPLTV |
| | GQGTILTVH | TSAQKNPTAFYLCASSASVDNEQFF |
| | | GPGTRLTVL |
| 290 | MKSLRVLLVILWLQLSWVWSQQKEVEQNSG | MSIGLLCCAALSLLWAGPVNAGVT |
| | PLSVPEGAIASLNCTYSDRGSQSFFWYRQYS | QTPKFQVLKTGQSMTLQCAQDMN |
| | GKSPELIMFIYSNGDKEDGRFTAQLNKASQY | HEYMSWYRQDPGMGLRLIHYSVG |
| | VSLLIRDSQPSDSATYLCAVRRVSGGYNKLIF | AGITDQGEVPNGYNVSRSTTEDFPL |
| | GAGTRLAVH | RLLSAAPSQTSVYFCASSYSGGRAN |
| | | YGYTFGSGTRLTVV |
| 291 | MLTASLLRAVIASICVVSSMAQKVTQAQTEI | MSNQVLCCVVLCFLGANTVDGGIT |
| | SVVEKEDVTLDCVYETRDTTYYLFWYKQPP | QSPKYLFRKEGQNVTLSCEQNLNH |
| | SGELVFLIRRNSFDEQNEISGRYSWNFQKSTS | DAMYWYRQDPGQGLRLIYYSQIVN |
| | SFNFTITASQVVDSAVYFCALSGSNDYKLSF | DFQKGDIAEGYSVSREKKESFPLTV |
| | GAGTTVTVR | TSAQKNPTAFYLCASRDGNTEAFFG |
| | | QGTRLTVV |
| 292 | MLTASLLRAVIASICVVSSMAQKVTQAQTEI | MGFRLLCCVAFCLLGAGPVDSGVT |
| | SVVEKEDVTLDCVYETRDTTYYLFWYKQPP | QTPKHLITATGQRVTLRCSPRSGDL |
| | SGELVFLIRRNSFDEQNEISGRYSWNFQKSTS | SVYWYQQSLDQGLQFLIQYYNGEE |
| | SFNFTITASQVVDSAVYFCALSEAWTNAGKS | RAKGNILERFSAQQFPDLHSELNLS |
| | TFGDGTTLTVK | SLELGDSALYFCASSGGPPDTQYFG |
| | | PGTRLTVL |
| 293 | MSLSSLLKVVTASLWLGPGIAQKITQTQPGM | MGFRLLCCVAFCLLGAGPVDSGVT |
| | FVQEKEAVTLDCTYDTSDQSYGLFWYKQPS | QTPKHLITATGQRVTLRCSPRSGDL |
| | SGEMIFLIYQGSYDEQNATEGRYSLNFQKAR | SVYWYQQSLDQGLQFLIQYYNGEE |
| | KSANLVISASQLGDSAMYFCAMRESLGTASK | RAKGNILERFSAQQFPDLHSELNLS |
| | LTFGTGTRLQVT | SLELGDSALYFCASSGGPPDTQYFG |
| | | PGTRLTVL |
| 294 | MAMLLGASVLILWLQPDWVNSQQKNDDQQ | MSNQVLCCVVLCFLGANTVDGGIT |
| | VKQNSPSLSVQEGRISILNCDYTNSMFDYFL | QSPKYLFRKEGQNVTLSCEQNLNH |
| | WYKKYPAEGPTFLISISSIKDKNEDGRFTVFL | DAMYWYRQDPGQGLRLIYYSQIVN |
| | NKSAKHLSLHIVPSQPGDSAVYFCAANGHAR | DFQKGDIAEGYSVSREKKESFPLTV |
| | LMFGDGTQLVVK | TSAQKNPTAFYLCASSISSTYEQYF |
| | | GPGTRLTVT |
| 295 | MLTASLLRAVIASICVVSSMAQKVTQAQTEI | MSNQVLCCVVLCFLGANTVDGGIT |
| | SVVEKEDVTLDCVYETRDTTYYLFWYKQPP | QSPKYLFRKEGQNVTLSCEQNLNH |
| | SGELVFLIRRNSFDEQNEISGRYSWNFQKSTS | DAMYWYRQDPGQGLRLIYYSQIVN |
| | SFNFTITASQVVDSAVYFCALSEAGGSTLGRL | DFQKGDIAEGYSVSREKKESFPLTV |
| | YFGRGTQLTVW | TSAQKNPTAFYLCASSMGTVSYEQ |
| | | YFGPGTRLTVT |
| 296 | MLTASLLRAVIASICVVSSMAQKVTQAQTEI | MSNQVLCCVVLCFLGANTVDGGIT |
| | SVVEKEDVTLDCVYETRDTTYYLFWYKQPP | QSPKYLFRKEGQNVTLSCEQNLNH |
| | SGELVFLIRRNSFDEQNEISGRYSWNFQKSTS | DAMYWYRQDPGQGLRLIYYSQIVN |
| | SFNFTITASQVVDSAVYFCALSEARQYSGAG | DFQKGDIAEGYSVSREKKESFPLTV |
| | SYQLTFGKGTKLSVI | TSAQKNPTAFYLCASSLEWGPYEQ |
| | YFGPGTRLTVT | |
| 297 | MTRVSLLWAVVVSTCLESGMAQTVTQSQPE | MSNQVLCCVVLCFLGANTVDGGIT |
| | MSVQEAETVTLSCTYDTSENNYYLFWYKQP | QSPKYLFRKEGQNVTLSCEQNLNH |
| | PSRQMILVIRQEAYKQQNATENRFSVNFQKA | DAMYWYRQDPGQGLRLIYYSQIVN |
| | AKSFSLKISDSQLGDTAMYFCALIQGAQKLV | DFQKGDIAEGYSVSREKKESFPLTV |
| | F | TSAQKNPTAFYLCASSLEWGPYEQ |
| | | YFGPGTRLTVT |
| 298 | MLLITSMLVLWMQLSQVNGQQVMQIPQYQ | MSNQVLCCVVLCFLGANTVDGGIT |
| | HVQEGEDFTTYCNSSTTLSNIQWYKQRPGGH | QSPKYLFRKEGQNVTLSCEQNLNH |
| | PVFLIQLVKSGEVKKQKRLTFQFGEAKKNSS | DAMYWYRQDPGQGLRLIYYSQIVN |
| | LHITATQTTDVGTYFCAGQGNRDDKIIFGKG | DFQKGDIAEGYSVSREKKESFPLTV |
| | TRLHIL | TSAQKNPTAFYLCASSLEWGPYEQ |
| | | YFGPGTRLTVT |
| 299 | METLLGLLILWLQLQWVSSKQEVTQIPAALS | MSNQVLCCVVLCLLGANTVDGGIT |
| | VPEGENLVLNCSFTDSAIYNLQWFRQDPGKG | QSPKYLFRKEGQNVTLSCEQNLNH |
| | LTSLLLIQSSQREQTSGRLNASLDKSSGRSTL | DAMYWYRQDPGQGLRLIYYSQIVN |
| | YIAASQPGDSATYLCAVKSNFGNEKLTFGTG | DFQKGDIAEGYSVSREKKESFPLTV |
| | TRLTII | TSAQKNPTAFYLCASSLEWGPYEQ |
| | | YFGPGTRLTVT |
| 300 | MTRVSLLWAVVVSTCLESGMAQTVTQSQPE | MSNQVLCCVVLCFLGANTVDGGIT |
| | MSVQEAETVTLSCTYDTSENNYYLFWYKQP | QSPKYLFRKEGQNVTLSCEQNLNH |
| | PSRQMILVIRQEAYKQQNATENRFSVNFQKA | DAMYWYRQDPGQGLRLIYYSQIVN |
| | AKSFSLKISDSQLGDTAMYFCALIQGAQKLV | DFQKGDIAEGYSVSREKKESFPLTV |
| | F | TSAQKNPTAFYLCASSPWIGGDTEA |
| | | FFGQGTRLTVV |
| 301 | MLLITSMLVLWMQLSQVNGQQVMQIPQYQ | MSNQVLCCVVLCFLGANTVDGGIT |
| | HVQEGEDFTTYCNSSTTLSNIQWYKQRPGGH | QSPKYLFRKEGQNVTLSCEQNLNH |
| | PVFLIQLVKSGEVKKQKRLTFQFGEAKKNSS | DAMYWYRQDPGQGLRLIYYSQIVN |
| | LHITATQTTDVGTYFCAGQGNRDDKIIFGKG | DFQKGDIAEGYSVSREKKESFPLTV |
| | TRLHIL | TSAQKNPTAFYLCASSNTGHFYEQ |
| | | YFGPGTRLTVT |
| 302 | MEKMLECAFIVLWLQLGWLSGEDQVTQSPE | MSNQVLCCVVLCLLGANTVDGGIT |
| | ALRLQEGESSSLNCSYTVSGLRGLFWYRQDP | QSPKYLFRKEGQNVTLSCEQNLNH |
| | GKGPEFLFTLYSAGEEKEKERLKATLTKKES | DAMYWYRQDPGQGLRLIYYSQIVN |
| | FLHITAPKPEDSATYLCAVQGKETSGSRLTFG | DFQKGDIAEGYSVSREKKESFPLTV |
| | EGTQLTVN | TSAQKNPTAFYLCASSLEWGPYEQ |
| | | YFGPGTRLTVT |
| 303 | MKSLRVLLVILWLQLSWVWSQQKEVEQNSG | MSNQVLCCVVLCLLGANTVDGGIT |
| | PLSVPEGAIASLNCTYSDRGSQSFFWYRQYS | QSPKYLFRKEGQNVTLSCEQNLNH |
| | GKSPELIMFIYSNGDKEDGRFTAQLNKASQY | DAMYWYRQDPGQGLRLIYYSQIVN |
| | VSLLIRDSQPSDSATYLCAVNLYNFNKFYFG | DFQKGDIAEGYSVSREKKESFPLTV |
| | SGTKLNVK | TSAQKNPTAFYLCASSLEWGPYEQ |
| | | YFGPGTRLTVT |
| 304 | MLLEHLLIILWMQLTWVSGQQLNQSPQSMFI | MSNQVLCCVVLCLLGANTVDGGIT |
| | QEGEDVSMNCTSSSIFNTWLWYKQDPGEGP | QSPKYLFRKEGQNVTLSCEQNLNH |
| | VLLIALYKAGELTSNGRLTAQFGITRKDSFLN | DAMYWYRQDPGQGLRLIYYSQIVN |
| | ISASIPSDVGIYFCAGHNEYGNKLVFGAGTIL | DFQKGDIAEGYSVSREKKESFPLTV |
| | RVK | TSAQKNPTAFYLCASSISLPSPLHFG |
| | | NGTRLTVT |
| 305 | MLTASLLRAVIASICVVSSMAQKVTQAQTEI | MGTRLLCWVAFCLLVEELIEAGVV |
| | SVVEKEDVTLDCVYETRDTTYYLFWYKQPP | QSPRYKIIEKKQPVAFWCNPISGHN |
| | SGELVFLIRRNSFDEQNEISGRYSWNFQKSTS | TLYWYLQNLGQGPELLIRYENEEA |
| | SFNFTITASQVVDSAVYFCALSDLFGNEKLTF | VDDSQLPKDRFSAERLKGVDSTLKI |
| | GTGTRLTII | QPAELGDSAVYLCASSPAGGTDTQ |
| | | YFGPGTRLTVL |
| 306 | MLLITSMLVLWMQLSQVNGQQVMQIPQYQ | MRIRLLCCVAFSLLWAGPVIAGITQ |
| | HVQEGEDFTTYCNSSTTLSNIQWYKQRPGGH | APTSQILAAGRRMTLRCTQDMRHN |
| | PVFLIQLVKSGEVKKQKRLTFQFGEAKKNSS | AMYWYRQDLGLGLRLIHYSNTAGT |
| | LHITATQTTDVGTYFCAGPGRGGSEKLVFGK | TGKGEVPDGYSVSRANTDDFPLTL |
| | GTKLTVN | ASAVPSQTSVYFCASSDGGLAGPY |
| | | GTDTQYFGPGTRLTVL |
| 307 | MLLLLVPAFQVIFTLGGTRAQSVTQLDSQVP | MSNQVLCCVVLCFLGANTVDGGIT |
| | VFEEAPVELRCNYSSSVSVYLFWYVQYPNQ | QSPKYLFRKEGQNVTLSCEQNLNH |
| | GLQLLLKYLSGSTLVKGINGFEAEFNKSQTSF | DAMYWYRQDPGQGLRLIYYSQIVN |
| | HLRKPSVHISDTAEYFCAVSGGLGNNDMRF | DFQKGDIAEGYSVSREKKESFPLTV |
| | GAGTRLTVK | TSAQKNPTAFYLCASSFGTPNEQFF |
| | | GPGTRLTVL |
| 308 | MLTASLLRAVIASICVVSSMAQKVTQAQTEI | MSNQVLCCVVLCLLGANTVDGGIT |
| | SVVEKEDVTLDCVYETRDTTYYLFWYKQPP | QSPKYLFRKEGQNVTLSCEQNLNH |
| | SGELVFLIRRNSFDEQNEISGRYSWNFQKSTS | DAMYWYRQDPGQGLRLIYYSQIVN |
| | SFNFTITASQVVDSAVYFCALSAYNTDKLIFG | DFQKGDIAEGYSVSREKKESFPLTV |
| | TGTRLQVF | TSAQKNPTAFYLCASSITGYNEQFF |
| | | GPGTRLTVL |
| 309 | MLLITSMLVLWMQLSQVNGQQVMQIPQYQ | MSNQVLCCVVLCLLGANTVDGGIT |
| | HVQEGEDFTTYCNSSTTLSNIQWYKQRPGGH | QSPKYLFRKEGQNVTLSCEQNLNH |
| | PVFLIQLVKSGEVKKQKRLTFQFGEAKKNSS | DAMYWYRQDPGQGLRLIYYSQIVN |
| | LHITATQTTDVGTYFCAGPNNNARLMFGDG | DFQKGDIAEGYSVSREKKESFPLTV |
| | TQLVVK | TSAQKNPTAFYLCASSISGDQPQHF |
| | | GDGTRLSIL |
| 310 | MTSIRAVFIFLWLQLDLVNGENVEQHPSTLS | MSNQVLCCVVLCLLGANTVDGGIT |
| | VQEGDSAVIKCTYSDSASNYFPWYKQELGK | QSPKYLFRKEGQNVTLSCEQNLNH |
| | GPQLIIDIRSNVGEKKDQRIAVTLNKTAKHFS | DAMYWYRQDPGQGLRLIYYSQIVN |
| | LHITETQPEDSAVYFCAASPYNFNKFYFGSGT | DFQKGDIAEGYSVSREKKESFPLTV |
| | KLNVK | TSAQKNPTAFYLCASSITSGGYNEQ |
| | | FFGPGTRLTVL |
| 311 | METLLGVSLVILWLQLARVNSQQGEEDPQA | MSNQVLCCVVLCLLGANTVDGGIT |
| | LSIQEGENATMNCSYKTSINNLQWYRQNSGR | QSPKYLFRKEGQNVTLSCEQNLNH |
| | GLVHLILIRSNEREKHSGRLRVTLDTSKKSSS | DAMYWYRQDPGQGLRLIYYSQIVN |
| | LLITASRAADTASYFCATDAGGGKLIFGQGT | DFQKGDIAEGYSVSREKKESFPLTV |
| | ELSVK | TSAQKNPTAFYLCASSLSSSYNEQF |
| | | FGPGTRLTVL |
| 312 | MSLSSLLKVVTASLWLGPGIAQKITQTQPGM | MSNQVLCCVVLCFLGANTVDGGIT |
| | FVQEKEAVTLDCTYDTSDQSYGLFWYKQPS | QSPKYLFRKEGQNVTLSCEQNLNH |
| | SGEMIFLIYQGSYDEQNATEGRYSLNFQKAR | DAMYWYRQDPGQGLRLIYYSQIVN |
| | KSANLVISASQLGDSAMYFCAMRDNTNTGN | DFQKGDIAEGYSVSREKKESFPLTV |
| | QFYFGTGTSLTVI | TSAQKNPTAFYLCASSMWTGGRDT |
| | | EAFFGQGTRLTVV |
| 313 | MTSIRAVFIFLWLQLDLVNGENVEQHPSTLS | MSNQVLCCVVLCFLGANTVDGGIT |
| | VQEGDSAVIKCTYSDSASNYFPWYKQELGK | QSPKYLFRKEGQNVTLSCEQNLNH |
| | GPQLIIDIRSNVGEKKDQRIAVTLNKTAKHFS | DAMYWYRQDPGQGLRLIYYSQIVN |
| | LHITETQPEDSAVYFCAASIIGGSNYKLTFGK | DFQKGDIAEGYSVSREKKESFPLTV |
| | GTLLTVN | TSAQKNPTAFYLCASSIDLDNEQFF |
| | | GPGTRLTVL |
| 314 | MEKNPLAAPLLILWFHLDCVSSILNVEQSPQS | MSNQVLCCVVLCFLGANTVDGGIT |
| | LHVQEGDSTNFTCSFPSSNFYALHWYRWET | QSPKYLFRKEGQNVTLSCEQNLNH |
| | AKSPEALFVMTLNGDEKKKGRISATLNTKEG | DAMYWYRQDPGQGLRLIYYSQIVN |
| | YSYLYIKGSQPEDSATYLCASLDSSYKLIFGS | DFQKGDIAEGYSVSREKKESFPLTV |
| | GTRLLVR | TSAQKNPTAFYLCASSMWGPNQPQ |
| | | HFGDGTRLSIL |
| 315 | MLLITSMLVLWMQLSQVNGQQVMQIPQYQ | MSNQVLCCVVLCFLGANTVDGGIT |
| | HVQEGEDFTTYCNSSTTLSNIQWYKQRPGGH | QSPKYLFRKEGQNVTLSCEQNLNH |
| | PVFLIQLVKSGEVKKQKRLTFQFGEAKKNSS | DAMYWYRQDPGQGLRLIYYSQIVN |
| | LHITATQTTDVGTYFCAGPGRGGSEKLVFGK | DFQKGDIAEGYSVSREKKESFPLTV |
| | GTKLTVN | TSAQKNPTAFYLCASSIGAGGYNEQ |
| | | FFGPGTRLTVL |
| 316 | MLLEHLLIILWMQLTWVSGQQLNQSPQSMFI | MSNQVLCCVVLCLLGANTVDGGIT |
| | QEGEDVSMNCTSSSIFNTWLWYKQDPGEGP | QSPKYLFRKEGQNVTLSCEQNLNH |
| | VLLIALYKAGELTSNGRLTAQFGITRKDSFLN | DAMYWYRQDPGQGLRLIYYSQIVN |
| | ISASIPSDVGIYFCAGPTSYGKLTFGQGTILTV | DFQKGDIAEGYSVSREKKESFPLTV |
| | H | TSAQKNPTAFYLCASSIVGAETQYF |
| | | GPGTRLLVL |
| 317 | METLLGLLILWLQLQWVSSKQEVTQIPAALS | MSNQVLCCVVLCFLGANTVDGGIT |
| | VPEGENLVLNCSFTDSAIYNLQWFRQDPGKG | QSPKYLFRKEGQNVTLSCEQNLNH |
| | LTSLLLIQSSQREQTSGRLNASLDKSSGRSTL | DAMYWYRQDPGQGLRLIYYSQIVN |
| | YIAASQPGDSATYLCAVKVDQGAQKLVF | DFQKGDIAEGYSVSREKKESFPLTV |
| | | TSAQKNPTAFYLCASSISSGAYNEQ |
| | | FFGPGTRLTVL |
| 318 | METLLGVSLVILWLQLARVNSQQGEEDPQA | MSNQVLCCVVLCFLGANTVDGGIT |
| | LSIQEGENATMNCSYKTSINNLQWYRQNSGR | QSPKYLFRKEGQNVTLSCEQNLNH |
| | GLVHLILIRSNEREKHSGRLRVTLDTSKKSSS | DAMYWYRQDPGQGLRLIYYSQIVN |
| | LLITASRAADTASYFCATAYDRGSTLGRLYF | DFQKGDIAEGYSVSREKKESFPLTV |
| | GRGTQLTVW | TSAQKNPTAFYLCASSIDSTGYNEQ |
| | | FFGPGTRLTVL |
| 319 | METLLGVSLVILWLQLARVNSQQGEEDPQA | MSNQVLCCVVLCLLGANTVDGGIT |
| | LSIQEGENATMNCSYKTSINNLQWYRQNSGR | QSPKYLFRKEGQNVTLSCEQNLNH |
| | GLVHLILIRSNEREKHSGRLRVTLDTSKKSSS | DAMYWYRQDPGQGLRLIYYSQIVN |
| | LLITASRAADTASYFCATDATNNNDMRFGA | DFQKGDIAEGYSVSREKKESFPLTV |
| | GTRLTVK | TSAQKNPTAFYLCASSWEASSYNE |
| | | QFFGPGTRLTVL |
| 320 | MLTASLLRAVIASICVVSSMAQKVTQAQTEI | MSNQVLCCVVLCLLGANTVDGGIT |
| | SVVEKEDVTLDCVYETRDTTYYLFWYKQPP | QSPKYLFRKEGQNVTLSCEQNLNH |
| | SGELVFLIRRNSFDEQNEISGRYSWNFQKSTS | DAMYWYRQDPGQGLRLIYYSQIVN |
| | SFNFTITASQVVDSAVYFCALSEWGNFNKFY | DFQKGDIAEGYSVSREKKESFPLTV |
| | FGSGTKLNVK | TSAQKNPTAFYLCASSTQGHEQYF |
| | | GPGTRLTVT |
| 321 | MLLLLVPVLEVIFTLGGTRAQSVTQLDSHVS | MSNQVLCCVVLCLLGANTVDGGIT |
| | VSEGTPVLLRCNYSSSYSPSLFWYVQHPNKG | QSPKYLFRKEGQNVTLSCEQNLNH |
| | LQLLLKYTSAATLVKGINGFEAEFKKSETSFH | DAMYWYRQDPGQGLRLIYYSQIVN |
| | LTKPSAHMSDAAEYFCVVSDWNFNKFYFGS | DFQKGDIAEGYSVSREKKESFPLTV |
| | GTKLNVK | TSAQKNPTAFYLCASSADNNEQFFG |
| | | PGTRLTVL |
| 322 | MLTASLLRAVIASICVVSSMAQKVTQAQTEI | MSNQVLCCVVLCFLGANTVDGGIT |
| | SVVEKEDVTLDCVYETRDTTYYLFWYKQPP | QSPKYLFRKEGQNVTLSCEQNLNH |
| | SGELVFLIRRNSFDEQNEISGRYSWNFQKSTS | DAMYWYRQDPGQGLRLIYYSQIVN |
| | SFNFTITASQVVDSAVYFCALSEQGSSNTGKL | DFQKGDIAEGYSVSREKKESFPLTV |
| | IFGQGTTLQVK | TSAQKNPTAFYLCASSIVAGNEQFF |
| | | GPGTRLTVL |
| 323 | METLLGVSLVILWLQLARVNSQQGEEDPQA | MSNQVLCCVVLCLLGANTVDGGIT |
| | LSIQEGENATMNCSYKTSINNLQWYRQNSGR | QSPKYLFRKEGQNVTLSCEQNLNH |
| | GLVHLILIRSNEREKHSGRLRVTLDTSKKSSS | DAMYWYRQDPGQGLRLIYYSQIVN |
| | LLITASRAADTASYFCWPGGYQKVTFGTGTK | DFQKGDIAEGYSVSREKKESFPLTV |
| | LQVI | TSAQKNPTAFYLCASSWDRDQPQH |
| | | FGDGTRLSIL |
| 324 | MLLITSMLVLWMQLSQVNGQQVMQIPQYQ | MSNQVLCCVVLCFLGANTVDGGIT |
| | HVQEGEDFTTYCNSSTTLSNIQWYKQRPGGH | QSPKYLFRKEGQNVTLSCEQNLNH |
| | PVFLIQLVKSGEVKKQKRLTFQFGEAKKNSS | DAMYWYRQDPGQGLRLIYYSQIVN |
| | LHITATQTTDVGTYFCAGQDTGGFKTIFGAG | DFQKGDIAEGYSVSREKKESFPLTV |
| | TRLFVK | TSAQKNPTAFYLCASSSLLEWYFGP |
| | | GTRLTVL |
| 325 | MLLITSMLVLWMQLSQVNGQQVMQIPQYQ | MSNQVLCCVVLCFLGANTVDGGIT |
| | HVQEGEDFTTYCNSSTTLSNIQWYKQRPGGH | QSPKYLFRKEGQNVTLSCEQNLNH |
| | PVFLIQLVKSGEVKKQKRLTFQFGEAKKNSS | DAMYWYRQDPGQGLRLIYYSQIVN |
| | LHITATQTTDVGTYFCAGRVYNQGGKLIFGQ | DFQKGDIAEGYSVSREKKESFPLTV |
| | GTELSVK | TSAQKNPTAFYLCASSIASEYNEQF |
| | | FGPGTRLTVL |
| 326 | METLLGLLILWLQLQWVSSKQEVTQIPAALS | MSNQVLCCVVLCFLGANTVDGGIT |
| | VPEGENLVLNCSFTDSAIYNLQWFRQDPGKG | QSPKYLFRKEGQNVTLSCEQNLNH |
| | LTSLLLIQSSQREQTSGRLNASLDKSSGRSTL | DAMYWYRQDPGQGLRLIYYSQIVN |
| | YIAASQPGDSATYLCAVGSSNTGKLIFGQGT | DFQKGDIAEGYSVSREKKESFPLTV |
| | TLQVK | TSAQKNPTAFYLCASSIYSGAEQFF |
| | | GPGTRLTVL |
| 327 | METLLGLLILWLQLQWVSSKQEVTQIPAALS | MSNQVLCCVVLCFLGANTVDGGIT |
| | VPEGENLVLNCSFTDSAIYNLQWFRQDPGKG | QSPKYLFRKEGQNVTLSCEQNLNH |
| | LTSLLLIQSSQREQTSGRLNASLDKSSGRSTL | DAMYWYRQDPGQGLRLIYYSQIVN |
| | YIAASQPGDSATYLCAVPDNARLMFGDGTQ | DFQKGDIAEGYSVSREKKESFPLTV |
| | LVVK | TSAQKNPTAFYLCASSIGAAEYGYE |
| | | QYFGPGTRLTVT |
| 328 | METLLGVSLVILWLQLARVNSQQGEEDPQA | MSNQVLCCVVLCLLGANTVDGGIT |
| | LSIQEGENATMNCSYKTSINNLQWYRQNSGR | QSPKYLFRKEGQNVTLSCEQNLNH |
| | GLVHLILIRSNEREKHSGRLRVTLDTSKKSSS | DAMYWYRQDPGQGLRLIYYSQIVN |
| | LLITASRAADTASYFCATYGEYGNKLVFGAG | DFQKGDIAEGYSVSREKKESFPLTV |
| | TILRVK | TSAQKNPTAFYLCASSIGAGGYNEQ |
| | | FFGPGTRLTVL |
| 329 | MWGAFLLYVSMKMGGTAGQSLEQPSEVTA | MSNQVLCCVVLCLLGANTVDGGIT |
| | VEGAIVQINCTYQTSGFYGLSWYQQHDGGA | QSPKYLFRKEGQNVTLSCEQNLNH |
| | PTFLSYNALDGLEETGRFSSFLSRSDSYGYLL | DAMYWYRQDPGQGLRLIYYSQIVN |
| | LQELQMKDSASYFCAVGEYNFNKFYFGSGT | DFQKGDIAEGYSVSREKKESFPLTV |
| | KLNVK | TSAQKNPTAFYLCASSMGNEKLFF |
| | | GSGTQLSVL |
| 330 | MTRVSLLWAVVVSTCLESGMAQTVTQSQPE | MSNQVLCCVVLCLLGANTVDGGIT |
| | MSVQEAETVTLSCTYDTSENNYYLFWYKQP | QSPKYLFRKEGQNVTLSCEQNLNH |
| | PSRQMILVIRQEAYKQQNATENRFSVNFQKA | DAMYWYRQDPGQGLRLIYYSQIVN |
| | AKSFSLKISDSQLGDTAMYFCAFMGGYNFN | DFQKGDIAEGYSVSREKKESFPLTV |
| | KFYFGSGTKLNVK | TSAQKNPTAFYLCASSIDGSSYEQY |
| | | FGPGTRLTVT |
| 331 | MLLELIPLLGIHFVLRTARAQSVTQPDIHITVS | MSNQVLCCVVLCLLGANTVDGGIT |
| | EGASLELRCNYSYGATPYLFWYVQSPGQGL | QSPKYLFRKEGQNVTLSCEQNLNH |
| | QLLLKYFSGDTLVQGIKGFEAEFKRSQSSFNL | DAMYWYRQDPGQGLRLIYYSQIVN |
| | RKPSVHWSDAAEYFCAVGDNNFNKFYFGSG | DFQKGDIAEGYSVSREKKESFPLTV |
| | TKLNVK | TSAQKNPTAFYLCASSFWDGEETQ |
| | | YFGPGTRLLVL |
| 332 | MLTASLLRAVIASICVVSSMAQKVTQAQTEI | MSNQVLCCVVLCLLGANTVDGGIT |
| | SVVEKEDVTLDCVYETRDTTYYLFWYKQPP | QSPKYLFRKEGQNVTLSCEQNLNH |
| | SGELVFLIRRNSFDEQNEISGRYSWNFQKSTS | DAMYWYRQDPGQGLRLIYYSQIVN |
| | SFNFTITASQVVDSAVYFCALSEAGYSSASKII | DFQKGDIAEGYSVSREKKESFPLTV |
| | FGSGTRLSIR | TSAQKNPTAFYLCASSIDSYEQYFG |
| | | PGTRLTVT |
| 333 | MMKSLRVLLVILWLQLSWVWSQQKEVEQD | MSNQVLCCVVLCLLGANTVDGGIT |
| | PGPLSVPEGAIVSLNCTYSNSAFQYFMWYRQ | QSPKYLFRKEGQNVTLSCEQNLNH |
| | YSRKGPELLMYTYSSGNKEDGRFTAQVDKS | DAMYWYRQDPGQGLRLIYYSQIVN |
| | SKYISLFIRDSQPSDSATYLCAMNDRGSTLGR | DFQKGDIAEGYSVSREKKESFPLTV |
| | LYFGRGTQLTVW | TSAQKNPTAFYLCASSMASTDTQY |
| | | FGPGTRLTVL |
| 334 | MLTASLLRAVIASICVVSSMAQKVTQAQTEI | MLLLLLLLGPGSGLGAVVSQHPSRV |
| | SVVEKEDVTLDCVYETRDTTYYLFWYKQPP | ICKSGTSVKIECRSLDFQATTMFWY |
| | SGELVFLIRRNSFDEQNEISGRYSWNFQKSTS | RQFPKQSLMLMATSNEGSKATYEQ |
| | SFNFTITASQVVDSAVYFCALNVQGGSEKLV | GVEKDKFLINHASLTLSTLTVTSAH |
| | FGKGTKLTVN | PEDSSFYICSVGNYGYTFGSGTRLT |
| | | VV |
| 335 | MLTASLLRAVIASICVVSSMAQKVTQAQTEI | MSNQVLCCVVLCLLGANTVDGGIT |
| | SVVEKEDVTLDCVYETRDTTYYLFWYKQPP | QSPKYLFRKEGQNVTLSCEQNLNH |
| | SGELVFLIRRNSFDEQNEISGRYSWNFQKSTS | DAMYWYRQDPGQGLRLIYYSQIVN |
| | SFNFTITASQVVDSAVYFCALSRANNARLMF | DFQKGDIAEGYSVSREKKESFPLTV |
| | GDGTQLVVK | TSAQKNPTAFYLCASSIVADSYNEQ |
| | | FFGPGTRLTVL |
| 336 | MAFWLRRLGLHFRPHLGRRMESFLGGVLLIL | MSNQVLCCVVLCFLGANTVDGGIT |
| | WLQVDWVKSQKIEQNSEALNIQEGKTATLT | QSPKYLFRKEGQNVTLSCEQNLNH |
| | CNYTNYSPAYLQWYRQDPGRGPVFLLLIREN | DAMYWYRQDPGQGLRLIYYSQIVN |
| | EKEKRKERLKVTFDTTLKQSLFHITASQPADS | DFQKGDIAEGYSVSREKKESFPLTV |
| | ATYLCALDRNQAGTALIFGKGTTLSVS | TSAQKNPTAFYLCASSINSGGNNEQ |
| | | FFGPGTRLTVL |
| 337 | MASAPISMLAMLFTLSGLRAQSVAQPEDQV | MSNQVLCCVVLCLLGANTVDGGIT |
| | NVAEGNPLTVKCTYSVSGNPYLFWYVQYPN | QSPKYLFRKEGQNVTLSCEQNLNH |
| | RGLQFLLKYITGDNLVKGSYGFEAEFNKSQT | DAMYWYRQDPGQGLRLIYYSQIVN |
| | SFHLKKPSALVSDSALYFCAVRDVGFIGGGN | DFQKGDIAEGYSVSREKKESFPLTV |
| | KLTFGTGTQLKVE | TSAQKNPTAFYLCASSFYIGEYNEQ |
| | | FFGPGTRLTVL |
| 338 | MLTASLLRAVIASICVVSSMAQKVTQAQTEI | MSIGLLCCVAFSLLWASPVNAGVT |
| | SVVEKEDVTLDCVYETRDTTYYLFWYKQPP | QTPKFQVLKTGQSMTLQCAQDMN |
| | SGELVFLIRRNSFDEQNEISGRYSWNFQKSTS | HNSMYWYRQDPGMGLRLIYYSASE |
| | SFNFTITASQVVDSAVYFCALSEVGRDDKIIF | GTTDKGEVPNGYNVSRLNKREFSL |
| | GKGTRLHIL | RLESAAPSQTSVYFCASSAYEQYFG |
| | | PGTRLTVT |
| 339 | MEKNPLAAPLLILWFHLDCVSSILNVEQSPQS | MGCRLLCCAVLCLLGAVPMETGVT |
| | LHVQEGDSTNFTCSFPSSNFYALHWYRWET | QTPRHLVMGMTNKKSLKCEQHLG |
| | AKSPEALFVMTLNGDEKKKGRISATLNTKEG | HNAMYWYKQSAKKPLELMFVYNF |
| | YSYLYIKGSQPEDSATYLCASPVDRGSTLGR | KEQTENNSVPSRFSPECPNSSHLFLH |
| | LYFGRGTQLTVW | LHTLQPEDSALYLCASSQVGTGSYE |
| | | QYFGPGTRLTVT |
| 340 | MASAPISMLAMLFTLSGLRAQSVAQPEDQV | MSNQVLCCVVLCLLGANTVDGGIT |
| | NVAEGNPLTVKCTYSVSGNPYLFWYVQYPN | QSPKYLFRKEGQNVTLSCEQNLNH |
| | RGLQFLLKYITGDNLVKGSYGFEAEFNKSQT | DAMYWYRQDPGQGLRLIYYSQIVN |
| | SFHLKKPSALVSDSALYFCAVRDVFSNQAGT | DFQKGDIAEGYSVSREKKESFPLTV |
| | ALIFGKGTTLSVS | TSAQKNPTAFYLCASSWDSNGNQP |
| | | QHFGDGTRLSIL |
| 341 | MLTASLLRAVIASICVVSSMAQKVTQAQTEI | MSNQVLCCVVLCFLGANTVDGGIT |
| | SVVEKEDVTLDCVYETRDTTYYLFWYKQPP | QSPKYLFRKEGQNVTLSCEQNLNH |
| | SGELVFLIRRNSFDEQNEISGRYSWNFQKSTS | DAMYWYRQDPGQGLRLIYYSQIVN |
| | SFNFTITASQVVDSAVYFCALSAPGARLMFG | DFQKGDIAEGYSVSREKKESFPLTV |
| | DGTQLVVK | TSAQKNPTAFYLCASSRGAYNEQFF |
| | | GPGTRLTVL |
| 342 | MAMLLGASVLILWLQPDWVNSQQKNDDQQ | MSNQVLCCVVLCFLGANTVDGGIT |
| | VKQNSPSLSVQEGRISILNCDYTNSMFDYFL | QSPKYLFRKEGQNVTLSCEQNLNH |
| | WYKKYPAEGPTFLISISSIKDKNEDGRFTVFL | DAMYWYRQDPGQGLRLIYYSQIVN |
| | NKSAKHLSLHIVPSQPGDSAVYFCAAMYGG | DFQKGDIAEGYSVSREKKESFPLTV |
| | SQGNLIFGKGTKLSVK | TSAQKNPTAFYLCASSPTGDYEQYF |
| | | GPGTRLTVT |
| 343 | METLLGVSLVILWLQLARVNSQQGEEDPQA | MSNQVLCCVVLCLLGANTVDGGIT |
| | LSIQEGENATMNCSYKTSINNLQWYRQNSGR | QSPKYLFRKEGQNVTLSCEQNLNH |
| | GLVHLILIRSNEREKHSGRLRVTLDTSKKSSS | DAMYWYRQDPGQGLRLIYYSQIVN |
| | LLITASRAADTASYFCATDRPYNQGGKLIFG | DFQKGDIAEGYSVSREKKESFPLTV |
| | QGTELSVK | TSAQKNPTAFYLCASSIVGGSYEQY |
| | | FGPGTRLTVT |
| 344 | MVLKFSVSILWIQLAWVSTQLLEQSPQFLSIQ | MRSWPGPEMGTRLFFYVALCLLWT |
| | EGENLTVYCNSSSVFSSLQWYRQEPGEGPVL | GHVDAGITQSPRHKVTETGTPVTLR |
| | LVTVVTGGEVKKLKRLTFQFGDARKDSSLHI | CHQTENHRYMYWYRQDPGHGLRL |
| | TAAQPGDTGLYLCAGPNNNARLMFGDGTQL | IHYSYGVKDTDKGEVSDGYSVSRS |
| | VVK | KTEDFLLTLESATSSQTSVYFCAIDQ |
| | | GLGYEQYFGPGTRLTVT |

TABLE 18
CDR3 sequences for TCR clonotypes specific for
HLA-PEPTIDE A*01:01_HSEVGLPVY
Table 18: CDR3 sequences for TCR clonotypes
specific for HLA-PEPTIDE A*01:01_HSEVGLPVY

| TCR ID # | ALPHA CDR3 | BETA CDR3 |
|---|---|---|
| 345 | CAANPGDYKLSF | CASSSNYEQYF |
| 346 | CAVTLEYGNKLVF | CSAEDRTNYGYTF |
| 347 | CALSVALFSGGYNKLIF | CSARNPTRAYEQYF |
| 348 | CAGDLLGSSGTYKYIF | CSARVAGGRYEQYF |
| 349 | CVVIGGGYQKVTF | CASSLDDPYNEQFF |
| 350 | CAVRNNNARLMF | CASSLRLAGTDTQYF |
| 351 | CVVTYNDMRF | CASSLLSGSGYTF |
| 352 | CAVFSSNTGKLIF | CASSQDGYNEQFF |
| 353 | CVVKWDKIIF | CATSDFASGSGQGNTGELFF |
| 354 | CAASPGGAQKLVF | CASSQVAGSADEQYF |
| 355 | CAASGGSQGNLIF | CASSDDTTYGYTF |
| 356 | CAENSGGYQKVTF | CASSVGDHTIYF |
| 357 | CAVRGTGGFKTIF | CASSLDASGGETQYF |
| 358 | CAASAVSYGQNFVF | CASSPGHLNTEAFF |
| 359 | CAESIGNNARLMF | CASTNDRSSNQPQHF |
| 360 | CAYWAGSARQLTF | CASSVEGGTDTQYF |
| 361 | CVVSWGKLQF | CATSDPQTGAGEEETQYF |
| 362 | CASGGSQGNLIF | CASSYEGGPYEQYF |
| 363 | CVVNSGAGSYQLTF | CASSPLGTGDYEQYF |
| 364 | CATDSGGSYIPTF | CASSPAVSSYNEQFF |
| 365 | CAMSPSNTGNQFYF | CASSEMGVAYEQYF |
| 366 | CATDLGNQFYF | CASTYSGVSNQPQHF |
| 367 | CLVVNTNAGKSTF | CSVVPLLTSGGQYNEQFF |
| 368 | CAASDGNQFYF | CASSFSSGLAGGNEQFF |
| 369 | CASQTGANNLFF | CASREAPGLYNEQFF |
| 370 | CAASVYYSGAGSYQLTF | CASGPADSPYGYTF |
| 371 | CVVKNFNKFYF | CATSDLSSTDTQYF |
| 372 | CAASAGNDMRF | CASSLGGYEQYF |
| 373 | CATDGKRVTGGGNKLTF | CASSLWRTGELFF |
| 374 | CAASEGSNYQLIW | CASGLTDDIYYGYTF |
| 375 | CALSAYSGAGSYQLTF | CAIRDGSSYNEQFF |
| 376 | CAMRGSSYNTDKLIF | CASSQEELGYTGELFF |
| 377 | CALRDTGGFKTIF | CASSPESGRNQPQHF |
| 378 | CAFMWGNNARLMF | CAISDGGSSYNSPLHF |
| 379 | CALSEANNNARLMF | CASSPTSQDTQYF |
| 380 | CVVSSHNQGGKLIF | CATSIGTLETQYF |
| 381 | CVVNWEKFYF | CASSLMGGGETQYF |
| 382 | CVVNIGNQFYF | CASSGGSGGAFYEQYF |
| 383 | CAGPRWLTGGGNKLTF | CASSVGGQGEVVQYF |
| 384 | CAIVDNNDMRF | CASSYSTGGYTF |
| 385 | CVVNYARLMF | CATSDLGQGAEQYF |
| 386 | CVVNKRGSYIPTF | CASSALGEQYF |
| 387 | CVVNWARLMF | CATSGANDEQFF |
| 388 | CAVNDYKLSF | CASSIGWNYEQYF |
| 389 | CAGPREYGNKLVF | CASSVGGQGEVVQYF |
| 390 | CAGPREYGNKLVF | CASSYGGGSLVEQYF |
| 391 | CAAEEWGYSTLTF | CASSLGTSGGDTQYF |
| 392 | CVNNNDMRF | CASSQALAKNIQYF |
| 393 | CADAPGSSYKLIF | CASSQVPHEQYF |
| 394 | CAATQGGSEKLVF | CASSLWGEQYF |
| 395 | CAASPGSNYKLTF | CASSPVDQLLNYGYTF |
| 396 | CILPNAGNMLTF | CATRGTGTQPQHF |
| 397 | CALGPNDMRF | CASRSGVGVSNQPQHF |
| 398 | CALSGTATSGTYKYIF | CASSSPGAFSYEQYF |
| 399 | CAASVGGNKLVF | CASSLGQTYNEQFF |
| 400 | CALSEMNRDDKIIF | CASSPVDQLLNYGYTF |
| 401 | CALTEGQNFVF | CASSVEDRSPLHF |
| 402 | CAKGVWLIF | CASSLEGFNTEAFF |
| 403 | CVVNAGKSTF | CASTPDFVGGDTQYF |
| 404 | CVVKWDKIIF | CATSDLSSTDTQYF |
| 405 | CAMREGYRDDKIIF | CASSFSSGGAHEQFF |
| 406 | CAASGYGNKLVF | CASKTGTGAGYTF |
| 407 | CAPPRQLTF | CASTPDFVGGDTQYF |
| 408 | CAVRLGNQFYF | CASSLIGGADTGELFF |
| 409 | CAMSYLGLNTDKLIF | CASSQDADQPQHF |
| 410 | CALTFFETSGSRLTF | CASSTAGDLREQYF |
| 411 | CAVTNDKLIF | CASSFPTYEQYF |
| 412 | CAVQGDNFNKFYF | CASSQGGLGIYNSPLHF |
| 413 | CVVPAGKSTF | CASSEALPGLGYGYTF |
| 414 | CAAGISNFGNEKLTF | CASSYAPRGYQETQYF |
| 415 | CAGLGWAQKLVF | CASSLDLGGGYTF |
| 416 | CLLGDPGDSTDKLIF | CASSEGGDSSYEQYF |
| 417 | CAGVTYDKVIF | CASSLGGGAIIHEQFF |
| 418 | CAVTGGGNKLTF | CASSQGGLGIYNSPLHF |
| 419 | CAVNSGYALNF | CASSVEGGTDTQYF |
| 420 | CALSSGGNEKLTF | CASSVGASGGLYEQYF |
| 421 | CAERGGATNKLIF | CASGPRDFYEQYF |
| 422 | CAFFSGGATNKLIF | CASSVEGGTDTQYF |
| 423 | CALKVWWALNF | CASSEGTGANYGYTF |
| 424 | CARLSQGNLIF | CASSVEGGTDTQYF |
| 425 | CATDGNNRLAF | CASSALSNSNQPQHF |
| 426 | CGADVSNYQLIW | CASGPGTGTYEQYF |
| 427 | CAAKTDKLIF | CASSLGEGVEAFF |
| 428 | CAVDISWNDMRF | CASSMAAGYEQYF |
| 429 | CVVSWGKLQF | CASSLPGDPGELFF |
| 430 | CAEGGFKTIF | CASSRGDGYTF |
| 431 | CAVEGRGSTLGRLYF | CSVEGQGGSYEQYF |
| 432 | CAERGGSQGNLIF | CASSEGTGANYGYTF |
| 433 | CAFYGGSQGNLIF | CASSVEGGTDTQYF |
| 434 | CAPGGSYIPTF | CASSPGQGVEQFF |
| 435 | CVVKWSQFYF | CSAWDGNQPQHF |
| 436 | CIVRVNDYKLSF | CASSFGGSYEQYF |
| 437 | CAYKTGTYKYIF | CASSFDPDRNLAKNIQYF |
| 438 | CAVRAGGFKTIF | CASIEPQVGDTQYF |
| 439 | CLASLGDYKLSF | CASSSGLASYEQYF |
| 440 | CAANLNAGKSTF | CASSAGDAKNIQYF |
| 441 | CALGDTGGFKTIF | CASSPEWTGSPGANVLTF |
| 442 | CALSDSGATNKLIF | CASSRSLGPTGNQPQHF |
| 443 | CVVNDDNYGQNFVF | CASSPTGFGETQYF |
| 444 | CAASAGSGYALNF | CAISELDRVTEAFF |
| 445 | CAAPRDYKLSF | CASSLVEGLAGGNSYNEQFF |
| 446 | CAAIVGSNYKLTF | CASGPRDFYEQYF |
| 447 | CALSEGGYNKLIF | CASIAAGTPIGEQFF |

TABLE 19
full length alpha V(J) and beta V(D)J sequences of identified TCR
clonotypes specific for HLA-PEPTIDE A*01:01_HSEVGLPVY
Table 19: full length alpha V(J) and beta V(D)J sequences of identified
TCR clonotypes specific for HLA-PEPTIDE A*01:01_HSEVGLPVY

| TCR | | |
|---|---|---|
| ID # | FULL LENGTH ALPHA VJ | FULL LENGTH BETA V(D)J |
| 345 | MTSIRAVFIFLWLQLDLVNGENVEQHPSTLSV | MGTSLLCWMALCLLGADHADTGVS |
| | QEGDSAVIKCTYSDSASNYFPWYKQELGKGP | QNPRHKITKRGQNVTFRCDPISEHNR |
| | QLIIDIRSNVGEKKDQRIAVTLNKTAKHFSLHI | LYWYRQTLGQGPEFLTYFQNEAQLE |
| | TETQPEDSAVYFCAANPGDYKLSFGAGTTVT | KSRLLSDRFSAERPKGSFSTLEIQRTE |
| | VR | QGDSAMYLCASSSNYEQYFGPGTRL |
| | | TVT |
| 346 | MKTFAGFSFLFLWLQLDCMSRGEDVEQSLFL | MLLLLLLLGPGSGLGAVVSQHPSRVI |
| | SVREGDSSVINCTYTDSSSTYLYWYKQEPGA | CKSGTSVKIECRSLDFQATTMFWYR |
| | GLQLLTYIFSNMDMKQDQRLTVLLNKKDKH | QFPKQSLMLMATSNEGSKATYEQGV |
| | LSLRIADTQTGDSAIYFCAVTLEYGNKLVFGA | EKDKFLINHASLTLSTLTVTSAHPEDS |
| | GTILRVK | SFYICSAEDRTNYGYTFGSGTRLTVV |
| 347 | MLTASLLRAVIASICVVSSMAQKVTQAQTEIS | MLLLLLLLGPGSGLGAVVSQHPSRVI |
| | VVEKEDVTLDCVYETRDTTYYLFWYKQPPS | CKSGTSVKIECRSLDFQATTMFWYR |
| | GELVFLIRRNSFDEQNEISGRYSWNFQKSTSS | QFPKQSLMLMATSNEGSKATYEQGV |
| | FNFTITASQVVDSAVYFCALSVALFSGGYNK | EKDKFLINHASLTLSTLTVTSAHPEDS |
| | LIFGAGTRLAVH | SFYICSARNPTRAYEQYFGPGTRLTV |
| | | T |
| 348 | MVLKFSVSILWIQLAWVSTQLLEQSPQFLSIQ | MLLLLLLLGPGSGLGAVVSQHPSWV |
| | EGENLTVYCNSSSVFSSLQWYRQEPGEGPVL | ICKSGTSVKIECRSLDFQATTMFWYR |
| | LVTVVTGGEVKKLKRLTFQFGDARKDSSLHI | QFPKQSLMLMATSNEGSKATYEQGV |
| | TAAQPGDTGLYLCAGDLLGSSGTYKYIFGTG | EKDKFLINHASLTLSTLTVTSAHPEDS |
| | TRLKVL | SFYICSARVAGGRYEQYFGPGTRLTV |
| | | T |
| 349 | MISLRVLLVILWLQLSWVWSQRKEVEQDPGP | MGTRLLCWAALCLLGAELTEAGVA |
| | FNVPEGATVAFNCTYSNSASQSFFWYRQDCR | QSPRYKIIEKRQSVAFWCNPISGHAT |
| | KEPKLLMSVYSSGNEDGRFTAQLNRASQYIS | LYWYQQILGQGPKLLIQFQNNGVVD |
| | LLIRDSKLSDSATYLCVVIGGGYQKVTFGIGT | DSQLPKDRFSAERLKGVDSTLKIQPA |
| | KLQVI | KLEDSAVYLCASSLDDPYNEQFFGPG |
| | | TRLTVL |
| 350 | METLLGLLILWLQLQWVSSKQEVTQIPAALS | MLSPDLPDSAWNTRLLCRVMLCLLG |
| | VPEGENLVLNCSFTDSAIYNLQWFRQDPGKG | AGSVAAGVIQSPRHLIKEKRETATLK |
| | LTSLLLIQSSQREQTSGRLNASLDKSSGRSTL | CYPIPRHDTVYWYQQGPGQDPQFLIS |
| | YIAASQPGDSATYLCAVRNNNARLMFGDGT | FYEKMQSDKGSIPDRFSAQQFSDYHS |
| | QLVVK | ELNMSSLELGDSALYFCASSLRLAGT |
| | | DTQYFGPGTRLTVL |
| 351 | MISLRVLLVILWLQLSWVWSQRKEVEQDPGP | MGIRLLCRVAFCFLAVGLVDVKVTQ |
| | FNVPEGATVAFNCTYSNSASQSFFWYRQDCR | SSRYLVKRTGEKVFLECVQDMDHEN |
| | KEPKLLMSVYSSGNEDGRFTAQLNRASQYIS | MFWYRQDPGLGLRLIYFSYDVKMKE |
| | LLIRDSKLSDSATYLCVVTYNDMRFGAGTRL | KGDIPEGYSVSREKKERFSLILESAST |
| | TVK | NQTSMYLCASSLLSGSGYTFGSGTRL |
| | | TVV |
| 352 | METLLGLLILWLQLQWVSSKQEVTQIPAALS | MGTRLLCWAALCLLGAELTEAGVA |
| | VPEGENLVLNCSFTDSAIYNLQWFRQDPGKG | QSPRYKIIEKRQSVAFWCNPISGHAT |
| | LTSLLLIQSSQREQTSGRLNASLDKSSGRSTL | LYWYQQILGQGPKLLIQFQNNGVVD |
| | YIAASQPGDSATYLCAVFSSNTGKLIFGQGTT | DSQLPKDRFSAERLKGVDSTLKIQPA |
| | LQVK | KLEDSAVYLCASSQDGYNEQFFGPG |
| | | TRLTVL |
| 353 | MISLRVLLVILWLQLSWVWSQRKEVEQDPGP | MASLLFFCGAFYLLGTGSMDADVTQ |
| | FNVPEGATVAFNCTYSNSASQSFFWYRQDCR | TPRNRITKTGKRIMLECSQTKGHDR |
| | KEPKLLMSVYSSGNEDGRFTAQLNRASQYIS | MYWYRQDPGLGLRLIYYSFDVKDIN |
| | LLIRDSKLSDSATYLCVVKWDKIIFGKGTRLH | KGEISDGYSVSRQAQAKFSLSLESAIP |
| | IL | NQTALYFCATSDFASGSGQGNTGEL |
| | | FFGEGSRLTVL |
| 354 | MAMLLGASVLILWLQPDWVNSQQKNDDQQ | MVSRLLSLVSLCLLGAKHIEAGVTQF |
| | VKQNSPSLSVQEGRISILNCDYTNSMFDYFL | PSHSVIEKGQTVTLRCDPISGHDNLY |
| | WYKKYPAEGPTFLISISSIKDKNEDGRFTVFL | WYRRVMGKEIKFLLHFVKESKQDES |
| | NKSAKHLSLHIVPSQPGDSAVYFCAASPGGA | GMPNNRFLAERTGGTYSTLKVQPAE |
| | QKLVF | LEDSGVYFCASSQVAGSADEQYFGP |
| | | GTRLTVT |
| 355 | MAMLLGASVLILWLQPDWVNSQQKNDDQQ | MGFRLLCCVAFCLLGAGPVDSGVTQ |
| | VKQNSPSLSVQEGRISILNCDYTNSMFDYFL | TPKHLITATGQRVTLRCSPRSGDLSV |
| | WYKKYPAEGPTFLISISSIKDKNEDGRFTVFL | YWYQQSLDQGLQFLIQYYNGEERAK |
| | NKSAKHLSLHIVPSQPGDSAVYFCAASGGSQ | GNILERFSAQQFPDLHSELNLSSLELG |
| | GNLIFGKGTKLSVK | DSALYFCASSDDTTYGYTFGSGTRLT |
| | | VV |
| 356 | MAGIRALFMYLWLQLDWVSRGESVGLHLPT | MGFRLLCCVAFCLLGAGPVDSGVTQ |
| | LSVQEGDNSIINCAYSNSASDYFIWYKQESGK | TPKHLITATGQRVTLRCSPRSGDLSV |
| | GPQFIIDIRSNMDKRQGQRVTVLLNKTVKHL | YWYQQSLDQGLQFLIQYYNGEERAK |
| | SLQIAATQPGDSAVYFCAENSGGYQKVTFGT | GNILERFSAQQFPDLHSELNLSSLELG |
| | GTKLQVI | DSALYFCASSVGDHTIYFGEGSWLTV |
| | | V |
| 357 | METLLGLLILWLQLQWVSSKQEVTQIPAALS | MGTRLLFWVAFCLLGADHTGAGVS |
| | VPEGENLVLNCSFTDSAIYNLQWFRQDPGKG | QSPSNKVTEKGKDVELRCDPISGHTA |
| | LTSLLLIQSSQREQTSGRLNASLDKSSGRSTL | LYWYRQSLGQGLEFLIYFQGNSAPD |
| | YIAASQPGDSATYLCAVRGTGGFKTIFGAGT | KSGLPSDRFSAERTGGSVSTLTIQRTQ |
| | RLFVK | QEDSAVYLCASSLDASGGETQYFGP |
| | | GTRLLVL |
| 358 | MAMLLGASVLILWLQPDWVNSQQKNDDQQ | MDTRVLCCAVICLLGAGLSNAGVM |
| | VKQNSPSLSVQEGRISILNCDYTNSMFDYFL | QNPRHLVRRRGQEARLRCSPMKGHS |
| | WYKKYPAEGPTFLISISSIKDKNEDGRFTVFL | HVYWYRQLPEEGLKFMVYLQKENII |
| | NKSAKHLSLHIVPSQPGDSAVYFCAASAVSY | DESGMPKERFSAEFPKEGPSILRIQQV |
| | GQNFVFGPGTRLSVL | VRGDSAAYFCASSPGHLNTEAFFGQ |
| | | GTRLTVV |
| 359 | MKTFAGFSFLFLWLQLDCMSRGEDVEQSLFL | MATRLLCCVVLCLLGEELIDARVTQ |
| | SVREGDSSVINCTYTDSSSTYLYWYKQEPGA | TPRHKVTEMGQEVTMRCQPILGHNT |
| | GLQLLTYIFSNMDMKQDQRLTVLLNKKDKH | VFWYRQTMMQGLELLAYFRNRAPL |
| | LSLRIADTQTGDSAIYFCAESIGNNARLMFGD | DDSGMPKDRFSAEMPDATLATLKIQ |
| | GTQLVVK | PSEPRDSAVYFCASTNDRSSNQPQHF |
| | | GDGTRLSIL |
| 360 | MACPGFLWALVISTCLEFSMAQTVTQSQPEM | MGFRLLCCVAFCLLGAGPVDSGVTQ |
| | SVQEAETVTLSCTYDTSESDYYLFWYKQPPS | TPKHLITATGQRVTLRCSPRSGDLSV |
| | RQMILVIRQEAYKQQNATENRFSVNFQKAAK | YWYQQSLDQGLQFLIQYYNGEERAK |
| | SFSLKISDSQLGDAAMYFCAYWAGSARQLTF | GNILERFSAQQFPDLHSELNLSSLELG |
| | GSGTQLTVL | DSALYFCASSVEGGTDTQYFGPGTRL |
| | | TVL |
| 361 | MISLRVLLVILWLQLSWVWSQRKEVEQDPGP | MASLLFFCGAFYLLGTGSMDADVTQ |
| | FNVPEGATVAFNCTYSNSASQSFFWYRQDCR | TPRNRITKTGKRIMLECSQTKGHDR |
| | KEPKLLMSVYSSGNEDGRFTAQLNRASQYIS | MYWYRQDPGLGLRLIYYSFDVKDIN |
| | LLIRDSKLSDSATYLCVVSWGKLQFGAGTQV | KGEISDGYSVSRQAQAKFSLSLESAIP |
| | VVT | NQTALYFCATSDPQTGAGEEETQYF |
| | | GPGTRLLVL |
| 362 | MKKLLAMILWLQLDRLSGELKVEQNPLFLS | MGFRLLCCVAFCLLGAGPVDSGVTQ |
| | MQEGKNYTIYCNYSTTSDRLYWYRQDPGKS | TPKHLITATGQRVTLRCSPRSGDLSV |
| | LESLFVLLSNGAVKQEGRLMASLDTKARLST | YWYQQSLDQGLQFLIQYYNGEERAK |
| | LHITAAVHDLSATYFCASGGSQGNLIFGKGT | GNILERFSAQQFPDLHSELNLSSLELG |
| | KLSVK | DSALYFCASSYEGGPYEQYFGPGTRL |
| | | TVT |
| 363 | MISLRVLLVILWLQLSWVWSQRKEVEQDPGP | MGFRLLCCVAFCLLGAGPVDSGVTQ |
| | FNVPEGATVAFNCTYSNSASQSFFWYRQDCR | TPKHLITATGQRVTLRCSPRSGDLSV |
| | KEPKLLMSVYSSGNEDGRFTAQLNRASQYIS | YWYQQSLDQGLQFLIQYYNGEERAK |
| | LLIRDSKLSDSATYLCVVNSGAGSYQLTFGK | GNILERFSAQQFPDLHSELNLSSLELG |
| | GTKLSVI | DSALYFCASSPLGTGDYEQYFGPGTR |
| | | LTVT |
| 364 | METLLGVSLVILWLQLARVNSQQGEEDPQAL | MSNQVLCCVVLCFLGANTVDGGITQ |
| | SIQEGENATMNCSYKTSINNLQWYRQNSGRG | SPKYLFRKEGQNVTLSCEQNLNHDA |
| | LVHLILIRSNEREKHSGRLRVTLDTSKKSSSLL | MYWYRQDPGQGLRLIYYSQIVNDFQ |
| | ITASRAADTASYFCATDSGGSYIPTFGRGTSLI | KGDIAEGYSVSREKKESFPLTVTSAQ |
| | VEI | KNPTAFYLCASSPAVSSYNEQFFGPG |
| | | TRLTVL |
| 365 | MMKSLRVLLVILWLQLSWVWSQQKEVEQDP | MSIGLLCCVAFSLLWASPVNAGVTQ |
| | GPLSVPEGAIVSLNCTYSNSAFQYFMWYRQY | TPKFQVLKTGQSMTLQCAQDMNHN |
| | SRKGPELLMYTYSSGNKEDGRFTAQVDKSSK | SMYWYRQDPGMGLRLIYYSASEGTT |
| | YISLFIRDSQPSDSATYLCAMSPSNTGNQFYF | DKGEVPNGYNVSRLNKREFSLRLES |
| | GTGTSLTVI | AAPSQTSVYFCASSEMGVAYEQYFG |
| | | PGTRLTVT |
| 366 | METLLGVSLVILWLQLARVNSQQGEEDPQAL | MSISLLCCAAFPLLWAGPVNAGVTQ |
| | SIQEGENATMNCSYKTSINNLQWYRQNSGRG | TPKFRILKIGQSMTLQCTQDMNHNY |
| | LVHLILIRSNEREKHSGRLRVTLDTSKKSSSLL | MYWYRQDPGMGLKLIYYSVGAGIT |
| | ITASRAADTASYFCATDLGNQFYFGTGTSLT | DKGEVPNGYNVSRSTTEDFPLRLELA |
| | VI | APSQTSVYFCASTYSGVSNQPQHFGD |
| | | GTRLSIL |
| 367 | MRQVARVIVFLTLSTLSLAKTTQPISMDSYEG | MLSLLLLLLGLGSVFSAVISQKPSRDI |
| | QEVNITCSHNNIATNDYITWYQQFPSQGPRFII | CQRGTSLTIQCQVDSQVTMMFWYR |
| | QGYKTKVTNEVASLFIPADRKSSTLSLPRVSL | QQPGQSLTLIATANQGSEATYESGFV |
| | SDTAVYYCLVVNTNAGKSTFGDGTTLTVK | IDKFPISRPNLTFSTLTVSNMSPEDSSI |
| | | YLCSVVPLLTSGGQYNEQFFGPGTRL |
| | | TVL |
| 368 | MAMLLGASVLILWLQPDWVNSQQKNDDQQ | MGPQLLGYVVLCLLGAGPLEAQVTQ |
| | VKQNSPSLSVQEGRISILNCDYTNSMFDYFL | NPRYLITVTGKKLTVTCSQNMNHEY |
| | WYKKYPAEGPTFLISISSIKDKNEDGRFTVFL | MSWYRQDPGLGLRQIYYSMNVEVT |
| | NKSAKHLSLHIVPSQPGDSAVYFCAASDGNQ | DKGDVPEGYKVSRKEKRNFPLILESP |
| | FYFGTGTSLTVI | SPNQTSLYFCASSFSSGLAGGNEQFF |
| | | GPGTRLTVL |
| 369 | MAFWLRRLGLHFRPHLGRRMESFLGGVLLIL | MGTSLLCWMALCLLGADHADTGVS |
| | WLQVDWVKSQKIEQNSEALNIQEGKTATLTC | QNPRHKITKRGQNVTFRCDPISEHNR |
| | NYTNYSPAYLQWYRQDPGRGPVFLLLIRENE | LYWYRQTLGQGPEFLTYFQNEAQLE |
| | KEKRKERLKVTFDTTLKQSLFHITASQPADSA | KSRLLSDRFSAERPKGSFSTLEIQRTE |
| | TYLCASQTGANNLFFGTGTRLTVI | QGDSAMYLCASREAPGLYNEQFFGP |
| | | GTRLTVL |
| 370 | MAMLLGASVLILWLQPDWVNSQQKNDDQQ | MATRLLCCVVLCLLGEELIDARVTQ |
| | VKQNSPSLSVQEGRISILNCDYTNSMFDYFL | TPRHKVTEMGQEVTMRCQPILGHNT |
| | WYKKYPAEGPTFLISISSIKDKNEDGRFTVFL | VFWYRQTMMQGLELLAYFRNRAPL |
| | NKSAKHLSLHIVPSQPGDSAVYFCAASVYYS | DDSGMPKDRFSAEMPDATLATLKIQ |
| | GAGSYQLTFGKGTKLSVI | PSEPRDSAVYFCASGPADSPYGYTFG |
| | | SGTRLTVV |
| 371 | MISLRVLLVILWLQLSWVWSQRKEVEQDPGP | MASLLFFCGAFYLLGTGSMDADVTQ |
| | FNVPEGATVAFNCTYSNSASQSFFWYRQDCR | TPRNRITKTGKRIMLECSQTKGHDR |
| | KEPKLLMSVYSSGNEDGRFTAQLNRASQYIS | MYWYRQDPGLGLRLIYYSFDVKDIN |
| | LLIRDSKLSDSATYLCVVKNFNKFYFGSGTKL | KGEISDGYSVSRQAQAKFSLSLESAIP |
| | NVK | NQTALYFCATSDLSSTDTQYFGPGTR |
| | | LTVL |
| 372 | MAMLLGASVLILWLQPDWVNSQQKNDDQQ | MGTRLLCWVVLGFLGTDHTGAGVS |
| | VKQNSPSLSVQEGRISILNCDYTNSMFDYFL | QSPRYKVAKRGQDVALRCDPISGHV |
| | WYKKYPAEGPTFLISISSIKDKNEDGRFTVFL | SLFWYQQALGQGPEFLTYFQNEAQL |
| | NKSAKHLSLHIVPSQPGDSAVYFCAASAGND | DKSGLPSDRFFAERPEGSVSTLKIQRT |
| | MRFGAGTRLTVK | QQEDSAVYLCASSLGGYEQYFGPGT |
| | | RLTVT |
| 373 | METLLGVSLVILWLQLARVNSQQGEEDPQAL | MGTRLLCWAALCLLGAELTEAGVA |
| | SIQEGENATMNCSYKTSINNLQWYRQNSGRG | QSPRYKIIEKRQSVAFWCNPISGHAT |
| | LVHLILIRSNEREKHSGRLRVTLDTSKKSSSLL | LYWYQQILGQGPKLLIQFQNNGVVD |
| | ITASRAADTASYFCATDGKRVTGGGNKLTFG | DSQLPKDRFSAERLKGVDSTLKIQPA |
| | TGTQLKVE | KLEDSAVYLCASSLWRTGELFFGEGS |
| | | RLTVL |
| 374 | MAMLLGASVLILWLQPDWVNSQQKNDDQQ | MATRLLCCVVLCLLGEELIDARVTQ |
| | VKQNSPSLSVQEGRISILNCDYTNSMFDYFL | TPRHKVTEMGQEVTMRCQPILGHNT |
| | WYKKYPAEGPTFLISISSIKDKNEDGRFTVFL | VFWYRQTMMQGLELLAYFRNRAPL |
| | NKSAKHLSLHIVPSQPGDSAVYFCAASEGSN | DDSGMPKDRFSAEMPDATLATLKIQ |
| | YQLIWGAGTKLIIK | PSEPRDSAVYFCASGLTDDIYYGYTF |
| | | GSGTRLTVV |
| 375 | MLTASLLRAVIASICVVSSMAQKVTQAQTEIS | MSNQVLCCVVLCLLGANTVDGGITQ |
| | VVEKEDVTLDCVYETRDTTYYLFWYKQPPS | SPKYLFRKEGQNVTLSCEQNLNHDA |
| | GELVFLIRRNSFDEQNEISGRYSWNFQKSTSS | MYWYRQDPGQGLRLIYYSQIVNDFQ |
| | FNFTITASQVVDSAVYFCALSAYSGAGSYQL | KGDIAEGYSVSREKKESFPLTVTSAQ |
| | TFGKGTKLSVI | KNPTAFYLCAIRDGSSYNEQFFGPGT |
| | | RLTVL |
| 376 | MSLSSLLKVVTASLWLGPGIAQKITQTQPGM | MGCRLLCCAVLCLLGAVPIDTEVTQ |
| | FVQEKEAVTLDCTYDTSDQSYGLFWYKQPSS | TPKHLVMGMTNKKSLKCEQHMGHR |
| | GEMIFLIYQGSYDEQNATEGRYSLNFQKARK | AMYWYKQKAKKPPELMFVYSYEKL |
| | STNLVISASQLGDSAMYFCAMRGYNTDKL | SINESVPSRFSPECPNSSLLNLHLHAL |
| | IFGTGTRLQVF | QPEDSALYLCASSQEELGYTGELFFG |
| | | EGSRLTVL |
| 377 | MLTASLLRAVIASICVVSSMAQKVTQAQTEIS | MDTRLLCCAVICLLGAGLSNAGVMQ |
| | VVEKEDVTLDCVYETRDTTYYLFWYKQPPS | NPRHLVRRRGQEARLRCSPMKGHSH |
| | GELVFLIRRNSFDEQNEISGRYSWNFQKST | VYWYRQLPEEGLKFMVYLQKENIID |
| | FNFTITASQVVDSAVYFCALRDTGGFKTIFGA | ESGMPKERFSAEFPKEGPSILRIQQVV |
| | GTRLFVK | RGDSAAYFCASSPESGRNQPQHFGD |
| | | GTRLSIL |
| 378 | MEKNPLAAPLLILWFHLDCVILNVEQSPQS | MRSWPGPEMGTRLFFYVALCLLWT |
| | LHVQEGDSTNFTCSFPSSNFYALHWYRWETA | GHVDAGITQSPRHKVTETGTPVTLRC |
| | KSPEALFVMTLNGDEKKKGRISATLNTKEGY | HQTENHRYMYWYRQDPGHGLRLIH |
| | SYLYIKGSQPEDSATYLCAFMWGNNARLMF | YSYGVKDTDKGEVSDGYSVSRSKTE |
| | GDGTQLVVK | DFLLTLESATSSQTSVYFCAISDGGSS |
| | | YNSPLHFGNGTRLTVT |
| 379 | MLTASLLRAVIASICVVSSMAQKVTQAQTEIS | MGPGLLCWALLCLLGAGSVETGVTQ |
| | VVEKEDVTLDCVYETRDTTYYLFWYKQPPS | SPTHLIKTRGQQVTLRCQSGHNTV |
| | GELVFLIRRNSFDEQNEISGRYSWNFQKST | SWYQQALGQGPQFIFQYYREEENGR |
| | FNFTITASQVVDSAVYFCALSEANNNARLMF | GNFPPRFSGLQFPNYELNVNALEL |
| | GDGTQLVVK | DDSALYLCASSPTSQDTQYFGPGTRL |
| | | TVL |
| 380 | MISLRVLLVILWLQLSWVWSQRKEVEQDPGP | MGPGLLHWMALCLLGTGHGDAMVI |
| | FNVPEGATVAFNCTYSNSASQSFFWYRQDCR | QNPRYQVTQFGKPVTLSCSQTLNHN |
| | KEPKLLMSVYGNEDGRFTAQLNRASQYIS | VMYWYQQKSSQAPKLLFHYYDKDF |
| | LLIRDSKLSDSATYLCVVHNQGGKLIFGQG | NNEADTPDNFQSRRPNTSFCFLDIRSP |
| | TELSVK | GLGDAAMYLCATSIGTLETQYFGPG |
| | | TRLLVL |
| 381 | MISLRVLLVILWLQLSWVWSQRKEVEQDPGP | MGIRLLCRVAFCFLAVGLVDVKVTQ |
| | FNVPEGATVAFNCTYSNSASQSFFWYRQDCR | RYLVKRTGEKVFLECVQDMDHEN |
| | KEPKLLMSVYGNEDGRFTAQLNRASQYIS | MFWYRQDPGLGLRLIYFSYDVKMKE |
| | LLIRDSKLSDSATYLCVVNWEKFYFGSGTKL | KGDIPEGYSVSREKKERFSLILESAST |
| | NVK | NQTSMYLCASSLMGGGETQYFGPGT |
| | | RLLVL |
| 382 | MISLRVLLVILWLQLSWVWSQRKEVEQDPGP | MGTRLFFYVALCLLWAGHRDAGITQ |
| | FNVPEGATVAFNCTYSNSASQSFFWYRQDCR | SPRYKITETGRQVTLMCHQTWSHSY |
| | KEPKLLMSVYGNEDGRFTAQLNRASQYIS | MFWYRQDLGHGLRLIYYSAAADITD |
| | LLIRDSKLSDSATYLCVVNIGNQFYFGTGTSL | KGEVPDGYVVSRSKTENFPLTLESAT |
| | TVI | RSQTSVYFCASSGGSGGAFYEQYFGP |
| | | GTRLTVT |
| 383 | MLLITSMLVLWMQLSQVNGQQVMQIPQYQH | MDTWLVCWAIFSLLKAGLTEPEVTQ |
| | VQEGEDFTTYCNSSTTLSNIQWYKQRPGGHP | TPSHQVTQMGQEVILRCVPISNHLYF |
| | VFLIQLVKSGEVKKQKRLTFQFGEAKKNL | YWYRQILGQKVEFLVSFYNNEISEKS |
| | HITATQTTDVGTYFCAGPRWLTGGGNKLTFG | EIFDDQFSVERPDGSNFTLKIRSTKLE |
| | TGTQLKVE | DSAMYFCASSVGGQGEVVQYFGPGT |
| | | RLTVT |
| 384 | MMKSLRVLLVILWLQLSWVWSQQKEVEQDP | MSIGLLCCAALSLLWAGPVNAGVTQ |
| | GPLSVPEGAIVSLNCTYSNSAFQYFMWYRQY | TPKFQVLKTGQSMTLQCAQDMNHE |
| | SRKGPELLMYTYSSGNKEDGRFTAQVDKSSK | YMSWYRQDPGMGLRLIHYSVGAGIT |
| | YISLFIRDSQPSDSATYLCAIVDNNDMRFGAG | DQGEVPNGYNVSRSTTEDFPLRLLSA |
| | TRLTVK | APSQTSVYFCASSYSTGGYTFGSGTR |
| | | LTVV |
| 385 | MISLRVLLVILWLQLSWVWSQRKEVEQDPGP | MASLLFFCGAFYLLGTGSMDADVTQ |
| | FNVPEGATVAFNCTYSNSASQSFFWYRQDCR | TPRNRITKTGKRIMLECSQTKGHDR |
| | KEPKLLMSVYSSGNEDGRFTAQLNRASQYIS | MYWYRQDPGLGLRLIYYSFDVKDIN |
| | LLIRDSKLSDSATYLCVVNYARLMFGDGTQL | KGEISDGYSVSRQAQAKFSLSLESAIP |
| | VVK | NQTALYFCATSDLGQGAEQYFGPGT |
| | | RLTVT |
| 386 | MISLRVLLVILWLQLSWVWSQRKEVEQDPGP | MGTRLLCWVVLGFLGTDHTGAGVS |
| | FNVPEGATVAFNCTYSNSASQSFFWYRQDCR | QSPRYKVAKRGQDVALRCDPISGHV |
| | KEPKLLMSVYSSGNEDGRFTAQLNRASQYIS | SLFWYQQALGQGPEFLTYFQNEAQL |
| | LLIRDSKLSDSATYLCVVNKRGSYIPTFGRGT | DKSGLPSDRFFAERPEGSVSTLKIQRT |
| | SLIVH | QQEDSAVYLCASSALGEQYFGPGTR |
| | | LTVT |
| 387 | MISLRVLLVILWLQLSWVWSQRKEVEQDPGP | MASLLFFCGAFYLLGTGSMDADVTQ |
| | FNVPEGATVAFNCTYSNSASQSFFWYRQDCR | TPRNRITKTGKRIMLECSQTKGHDR |
| | KEPKLLMSVYSSGNEDGRFTAQLNRASQYIS | MYWYRQDPGLGLQLIYYSFDVKDIN |
| | LLIRDSKLSDSATYLCVVNWARLMFGDGTQL | KGEISDGYSVSRQAQAKFSLSLESAIP |
| | VVK | NQTALYFCATSGANDEQFFGPGTRL |
| | | TVL |
| 388 | MVLKFSVSILWIQLAWVSTQLLEQSPQFLSIQ | MSNQVLCCVVLCFLGANTVDGGITQ |
| | EGENLTVYCNSSSVFSSLQWYRQEPGEGPVL | SPKYLFRKEGQNVTLSCEQNLNHDA |
| | LVTVVTGGEVKKLKRLTFQFGDARKDSSLHI | MYWYRQDPGQGLRLIYYSQIVNDFQ |
| | TAAQPGDTGLYLCAVNDYKLSFGAGTTVTV | KGDIAEGYSVSREKKESFPLTVTSAQ |
| | R | KNPTAFYLCASSIGWNYEQYFGPGT |
| | | RLTVT |
| 389 | MLLITSMLVLWMQLSQVNGQQVMQIPQYQH | MDTWLVCWAIFSLLKAGLTEPEVTQ |
| | VQEGEDFTTYCNSSTTLSNIQWYKQRPGGHP | TPSHQVTQMGQEVILRCVPISNHLYF |
| | VFLIQLVKSGEVKKQKRLTFQFGEAKKNSSL | YWYRQILGQKVEFLVSFYNNEISEKS |
| | HITATQTTDVGTYFCAGPREYGNKLVFGAGT | EIFDDQFSVERPDGSNFTLKIRSTKLE |
| | ILRVK | DSAMYFCASSVGGQGEVVQYFGPGT |
| | | RLTVT |
| 390 | MLLITSMLVLWMQLSQVNGQQVMQIPQYQH | MGPQLLGYVVLCLLGAGPLEAQVTQ |
| | VQEGEDFTTYCNSSTTLSNIQWYKQRPGGHP | NPRYLITVTGKKLTVTCSQNMNHEY |
| | VFLIQLVKSGEVKKQKRLTFQFGEAKKNSSL | MSWYRQDPGLGLRQIYYSMNVEVT |
| | HITATQTTDVGTYFCAGPREYGNKLVFGAGT | DKGDVPEGYKVSRKEKRNFPLILESP |
| | ILRVK | SPNQTSLYFCASSYGGGSLVEQYFGP |
| | | GTRLTVT |
| 391 | MWGVFLLYVSMKMGGTTGQNIDQPTEMTA | MGTRLLCWVVLGFLGTDHTGAGVS |
| | TEGAIVQINCTYQTSGFNGLFWYQQHAGEAP | QSPRYKVAKRGQDVALRCDPISGHV |
| | TFLSYNVLDGLEEKGRFSSFLSRSKGYSYLLL | SLFWYQQALGQGPEFLTYFQNEAQL |
| | KELQMKDSASYLCAAEEWGYSTLTFGKGTM | DKSGLPSDRFFAERPEGSVSTLKIQRT |
| | LLVS | QQEDSAVYLCASSLGTSGGDTQYFG |
| | | PGTRLTVL |
| 392 | MAMLLGASVLILWLQPDWVNSQQKNDDQQ | MGFRLLCCVAFCLLGAGPVDSGVTQ |
| | VKQNSPSLSVQEGRISILNCDYTNSMFDYFL | TPKHLITATGQRVTLRCSPRSGDLSV |
| | WYKKYPAEGPTFLISISSIKDKNEDGRFTVFL | YWYQQSLDQGLQFLIQYYNGEERAK |
| | NKSAKHLSLHIVPSQPGDSAVYFCVNNNDMR | GNILERFSAQQFPDLHSELNLSSLELG |
| | FGAGTRLTVK | DSALYFCASSQALAKNIQYFGAGTRL |
| | | SVL |
| 393 | MWGAFLLYVSMKMGGTAGQSLEQPSEVTA | MGCRLLCCVVFCLLQAGPLDTAVSQ |
| | VEGAIVQINCTYQTSGFYGLSWYQQHDGGAP | TPKYLVTQMGNDKSIKCEQNLGHDT |
| | TFLSYNALDGLEETGRFSSFLSRSDSYGYLLL | MYWYKQDSKKFLKIMFSYNNKELII |
| | QELQMKDSASYFCADAPGSSYKLIFGSGTRL | NETVPNRFSPKSPDKAHLNLHINSLE |
| | LVR | LGDSAVYFCASSQVPHEQYFGPGTR |
| | | LTVT |
| 394 | MAMLLGASVLILWLQPDWVNSQQKNDDQQ | MGTSLLCWMALCLLGADHADTGVS |
| | VKQNSPSLSVQEGRISILNCDYTNSMFDYFL | QDPRHKITKRGQNVTFRCDPISEHNR |
| | WYKKYPAEGPTFLISISSIKDKNEDGRFTVFL | LYWYRQTLGQGPEFLTYFQNEAQLE |
| | NKSAKHLSLHIVPSQPGDSAVYFCAATQGGS | KSRLLSDRFSAERPKGSFSTLEIQRTE |
| | EKLVFGKGTKLTVN | QGDSAMYLCASSLWGEQYFGPGTRL |
| | | TVT |
| 395 | MAMLLGASVLILWLQPDWVNSQQKNDDQQ | MGTRLLFWVAFCLLGAYHTGAGVS |
| | VKQNSPSLSVQEGRISILNCDYTNSMFDYFL | QSPSNKVTEKGKDVELRCDPISGHTA |
| | WYKKYPAEGPTFLISISSIKDKNEDGRFTVFL | LYWYRQRLGQGLEFLIYFQGNSAPD |
| | NKSAKHLSLHIVPSQPGDSAVYFCAASPGSN | KSGLPSDRFSAERTGESVSTLTIQRTQ |
| | YKLTFGKGTLLTVN | QEDSAVYLCASSPVDQLLNYGYTFG |
| | | SGTRLTVV |
| 396 | MKLVTSITVLLSLGIMGDAKTTQPNSMESNE | MGPGLLHWMALCLLGTGHGDAMVI |
| | EEPVHLPCNHSTISGTDYIHWYRQLPSQGPEY | QNPRYQVTQFGKPVTLSCSQTLNHN |
| | VIHGLTSNVNNRMASLAIAEDRKSSTLILHRA | VMYWYQQKSSQAPKLLFHYYDKDF |
| | TLRDAAVYYCILPNAGNMLTFGGGTRLMVK | NNEADTPDNFQSRRPNTSFCFLDIRSP |
| | | GLGDAAMYLCATRGTGTQPQHFGD |
| | | GTRLSIL |
| 397 | MAFWLRRLGLHFRPHLGRRMESFLGGVLLIL | MSIGLLCCAALSLLWAGPVNAGVTQ |
| | WLQVDWVKSQKIEQNSEALNIQEGKTATLTC | TPKFQVLKTGQSMTLQCAQDMNHE |
| | NYTNYSPAYLQWYRQDPGRGPVFLLLIRENE | YMSWYRQDPGMGLRLIHYSVGAGIT |
| | KEKRKERLKVTFDTTLKQSLFHITASQPADSA | DQGEVPNGYNVSRSTTEDFPLRLLSA |
| | TYLCALGPNDMRFGAGTRLTVK | APSQTSVYFCASRSGVGVSNQPQHF |
| | | GDGTRLSIL |
| 398 | MLTASLLRAVIASICVVSSMAQKVTQAQTEIS | MGTSLLCWMALCLLGADHADTGVS |
| | VVEKEDVTLDCVYETRDTTYYLFWYKQPPS | QNPRHKITKRGQNVTFRCDPISEHNR |
| | GELVFLIRRNSFDEQNEISGRYSWNFQKSTSS | LYWYRQTLGQGPEFLTYFQNEAQLE |
| | FNFTITASQVVDSAVYFCALSGTATSGTYKYI | KSRLLSDRFSAERPKGSFSTLEIQRTE |
| | FGTGTRLKVL | QGDSAMYLCASSSPGAFSYEQYFGP |
| | | GTRLTVT |
| 399 | MAMLLGASVLILWLQPDWVNSQQKNDDQQ | MLSPDLPDSAWNTRLLCRVMLCLLG |
| | VKQNSPSLSVQEGRISILNCDYTNSMFDYFL | AGSVAAGVIQSPRHLIKEKRETATLK |
| | WYKKYPAEGPTFLISISSIKDKNEDGRFTVFL | CYPIPRHDTVYWYQQGPGQDPQFLIS |
| | NKSAKHLSLHIVPSQPGDSAVYFCAASVGGN | FYEKMQSDKGSIPDRFSAQQFSDYHS |
| | KLVFGAGTILRVK | ELNMSSLELGDSALYFCASSLGQTYN |
| | | EQFFGPGTRLTVL |
| 400 | MLTASLLRAVIASICVVSSMAQKVTQAQTEIS | MGTRLLFWVAFCLLGAYHTGAGVS |
| | VVEKEDVTLDCVYETRDTTYYLFWYKQPPS | QSPSNKVTEKGKDVELRCDPISGHTA |
| | GELVFLIRRNSFDEQNEISGRYSWNFQKSTSS | LYWYRQRLGQGLEFLIYFQGNSAPD |
| | FNFTITASQVVDSAVYFCALSEMNRDDKIIFG | KSGLPSDRFSAERTGESVSTLTIQRTQ |
| | KGTRLHIL | QEDSAVYLCASSPVDQLLNYGYTFG |
| | | SGTRLTVV |
| 401 | MNYSPGLVSLILLLLGRTRGDSVTQMEGPVT | MGFRLLCCVAFCLLGAGPVDSGVTQ |
| | LSEEAFLTINCTYTATGYPSLFWYVQYPGEGL | TPKHLITATGQRVTLRCSPRSGDLSV |
| | QLLLKATKADDKGSNKGFEATYRKETTSFHL | YWYQQSLDQGLQFLIQYYNGEERAK |
| | EKGSVQVSDSAVYFCALTEGQNFVFGPGTRL | GNILERFSAQQFPDLHSELNLSSLELG |
| | SVL | DSALYFCASSVEDRSPLHFGNGTRLT |
| | | VT |
| 402 | MMKSLRVLLVILWLQLSWVWSQQKEVEQDP | MGTRLLCWVVLGFLGTDHTGAGVS |
| | GPLSVPEGAIVSLNCTYSNSAFQYFMWYRQY | QSPRYKVAKRGQDVALRCDPISGHV |
| | SRKGPELLMYTYSSGNKEDGRFTAQVDKSSK | SLFWYQQALGQGPEFLTYFQNEAQL |
| | YISLFIRDSQPSDSATYLCAKGVWLIFGQGTE | DKSGLPSDRFFAERPEGSVSTLKIQRT |
| | LSVK | QQEDSAVYLCASSLEGFNTEAFFGQ |
| | | GTRLTVV |
| 403 | MISLRVLLVILWLQLSWVWSQRKEVEQDPGP | MGSWTLCCVSLCILVAKHTDAGVIQ |
| | FNVPEGATVAFNCTYSNSASQSFFWYRQDCR | SPRHEVTEMGQEVTLRCKPISGHDYL |
| | KEPKLLMSVYSSGNEDGRFTAQLNRASQYIS | FWYRQTMMRGLELLIYFNNNVPIDD |
| | LLIRDSKLSDSATYLCVVNAGKSTFGDGTTLT | SGMPEDRFSAKMPNASFSTLKIQPSE |
| | VK | PRDSAVYFCASTPDFVGGDTQYFGP |
| | | GTRLTVL |
| 404 | MISLRVLLVILWLQLSWVWSQRKEVEQDPGP | MASLLFFCGAFYLLGTGSMDADVTQ |
| | FNVPEGATVAFNCTYSNSASQSFFWYRQDCR | TPRNRITKTGKRIMLECSQTKGHDR |
| | KEPKLLMSVYSSGNEDGRFTAQLNRASQYIS | MYWYRQDPGLGLRLIYYSFDVKDIN |
| | LLIRDSKLSDSATYLCVVKWDKIIFGKGTRLH | KGEISDGYSVSRQAQAKFSLSLESAIP |
| | IL | NQTALYFCATSDLSSTDTQYFGPGTR |
| | | LTVL |
| 405 | MSLSSLLKVVTASLWLGPGIAQKITQTQPGM | MSISLLCCAAFPLLWAGPVNAGVTQ |
| | FVQEKEAVTLDCTYDTSDQSYGLFWYKQPSS | TPKFRILKIGQSMTLQCTQDMNHNY |
| | GEMIFLIYQGSYDEQNATEGRYSLNFQKARK | MYWYRQDPGMGLKLIYYSVGAGIT |
| | SANLVISASQLGDSAMYFCAMREGYRDDKII | DKGEVPNGYNVSRSTTEDFPLRLELA |
| | FGKGTRLHIL | APSQTSVYFCASSFSSGGAHEQFFGP |
| | | GTRLTVL |
| 406 | MAMLLGASVLILWLQPDWVNSQQKNDDQQ | MSNQVLCCVVLCLLGANTVDGGITQ |
| | VKQNSPSLSVQEGRISILNCDYTNSMFDYFL | SPKYLFRKEGQNVTLSCEQNLNHDA |
| | WYKKYPAEGPTFLISISSIKDKNEDGRFTVFL | MYWYRQDPGQGLRLIYYSQIVNDFQ |
| | NKSAKHLSLHIVPSQPGDSAVYFCAASGYGN | KGDIAEGYSVSREKKESFPLTVTSAQ |
| | KLVFGAGTILRVK | KNPTAFYLCASKTGTGAGYTFGSGT |
| | | RLTVV |
| 407 | MLTASLLRAVIASICVVSSMAQKVTQAQTEIS | MGSWTLCCVSLCILVAKHTDAGVIQ |
| | VVEKEDVTLDCVYETRDTTYYLFWYKQPPS | SPRHEVTEMGQEVTLRCKPISGHDYL |
| | GELVFLIRRNSFDEQNEISGRYSWNFQKSTSS | FWYRQTMMRGLELLIYFNNNVPIDD |
| | FNFTITASQVVDSAVYFCAPPRQLTFGSGTQL | SGMPEDRFSAKMPNASFSTLKIQPSE |
| | TVL | PRDSAVYFCASTPDFVGGDTQYFGP |
| | | GTRLTVL |
| 408 | MVKIRQFLLAILWLQLSCVSAAKNEVEQSPQ | MGPQLLGYVVLCLLGAGPLEAQVTQ |
| | NLTAQEGEFITINCSYSVGISALHWLQQHPGG | NPRYLITVTGKKLTVTCSQNMNHEY |
| | GIVSLFMLGKKKHGRLIATINIQEKHSSLHI | MSWYRQDPGLGLRQIYYSMNVEVT |
| | TASHPRDSAVYICAVRLGNQFYFGTGTSLTVI | DKGDVPEGYKVSRKEKRNFPLILESP |
| | | SPNQTSLYFCASSLIGGADTGELFFGE |
| | | GSRLTVL |
| 409 | MMKSLRVLLVILWLQLSWVWSQQKEVEQDP | MGCRLLCCVVFCLLQAGPLDTAVSQ |
| | GPLSVPEGAIVSLNCTYSNSAFQYFMWYRQY | TPKYLVTQMGNDKSIKCEQNLGHDT |
| | SRKGPELLMYTYGNKEDGRFTAQVDKSSK | MYWYKQDSKKFLKIMFSYNNKELII |
| | YISLFIRDSQPSDSATYLCAMSYLGLNTDKLIF | NETVPNRFSPKSPDKAHLNLHINSLE |
| | GTGTRLQVF | LGDSAVYFCASSQDADQPQHFGDGT |
| | | RLSIL |
| 410 | MLTASLLRAVIASICVVSSMAQKVTQAQTEIS | MSNQVLCCVVLCLLGANTVDGGITQ |
| | VVEKEDVTLDCVYETRDTTYYLFWYKQPPS | SPKYLFRKEGQNVTLSCEQNLNHDA |
| | GELVFLIRRNSFDEQNEISGRYSWNFQKST | MYWYRQDPGQGLRLIYYSQIVNDFQ |
| | FNFTITASQVVDSAVYFCALTFFETSGSRLTF | KGDIAEGYSVSREKKESFPLTVTSAQ |
| | GEGTQLTVN | KNPTAFYLCASSTAGDLREQYFGPGT |
| | | RLTVT |
| 411 | MKSLRVLLVILWLQLSWVWSQQKEVEQNSG | MGTRLLCWVAFCLLVEELIEAGVVQ |
| | PLSVPEGAIASLNCTYSDRGSQSFFWYRQYSG | SPRYKIIEKKQPVAFWCNPISGHNTL |
| | KSPELIMFIYSNGDKEDGRFTAQLNKASQYV | YWYRQNLGQGPELLIRYENEEAVDD |
| | SLLIRDSQPSDSATYLCAVTNDKLIFGTGTRL | SQLPKDRFSAERLKGVDSTLKIQPAE |
| | QVF | LGDSAVYLCASSFPTYEQYFGPGTRL |
| | | TVT |
| 412 | MWGAFLLYVSMKMGGTAGQSLEQPSEVTA | MGCRLLCCVVFCLLQAGPLDTAVSQ |
| | VEGAIVQINCTYQTSGFYGLSWYQQHDGGAP | TPKYLVTQMGNDKSIKCEQNLGHDT |
| | TFLSYNALDGLEETGRFFLSRSDSYGYLLL | MYWYKQDSKKFLKIMFSYNNKELII |
| | QELQMKDSASYFCAVQGDNFNKFYFGSGTK | NETVPNRFSPKSPDKAHLNLHINSLE |
| | LNVK | LGDSAVYFCASSQGGLGIYNSPLHFG |
| | | NGTRLTVT |
| 413 | MISLRVLLVILWLQLSWVWSQRKEVEQDPGP | MDTWLVCWAIFSLLKAGLTEPEVTQ |
| | FNVPEGATVAFNCTYSNSASQSFFWYRQDCR | TPSHQVTQMGQEVILRCVPISNHLYF |
| | KEPKLLMSVYGNEDGRFTAQLNRASQYIS | YWYRQILGQKVEFLVSFYNNEISEKS |
| | LLIRDSKLSDSATYLCVVPAGKSTFGDGTTLT | EIFDDQFSVERPDGSNFTLKIRSTKLE |
| | VK | DSAMYFCASSEALPGLGYGYTFGSG |
| | | TRLTVV |
| 414 | MTSIRAVFIFLWLQLDLVNGENVEQHPSTLSV | MGTRLLCWAALCLLGAELTEAGVA |
| | QEGDSAVIKCTYSDSASNYFPWYKQELGKGP | QSPRYKIIEKRQSVAFWCNPISGHAT |
| | QLIIDIRSNVGEKKDQRIAVTLNKTAKHFSLHI | LYWYQQILGQGPKLLIQFQNNGVVD |
| | TETQPEDSAVYFCAAGISNFGNEKLTFGTGTR | DSQLPKDRFSAERLKGVDSTLKIQPA |
| | LTII | KLEDSAVYLCASSYAPRGYQETQYF |
| | | GPGTRLLVL |
| 415 | MLLITSMLVLWMQLSQVNGQQVMQIPQYQH | MGTRLLCWAALCLLGAELTEAGVA |
| | VQEGEDFTTYCNSSTTLSNIQWYKQRPGGHP | QSPRYKIIEKRQSVAFWCNPISGHAT |
| | VFLIQLVKSGEVKKQKRLTFQFGEAKKNL | LYWYQQILGQGPKLLIQFQNNGVVD |
| | HITATQTTDVGTYFCAGLGWAQKLVFGQGT | DSQLPKDRFSAERLKGVDSTLKIQPA |
| | RLTIN | KLEDSAVYLCASSLDLGGGYTFGSG |
| | | TRLTVV |
| 416 | MNLDFLILILMFGGTNSVKQTGQITVSE | MGTRLLCWAALCLLGADHTGAGVS |
| | GASVTMNCTYTSTGYPTLFWYVEYPSKPLQL | QTPSNKVTEKGKYVELRCDPISGHTA |
| | LQRETMENSKNFGGGNIKDKNSPIVKYSVQV | LYWYRQSLGQGPEFLIYFQGTGAAD |
| | SDSAVYYCLLGDPGDSTDKLIFGTGTRLQVF | DSGLPNDRFFAVRPEGSVSTLKIQRT |
| | | ERGDSAVYLCASSEGGDSSYEQYFG |
| | | PGTRLTVT |
| 417 | MLLITSMLVLWMQLSQVNGQQVMQIPQYQH | MGPQLLGYVVLCLLGAGPLEAQVTQ |
| | VQEGEDFTTYCNSSTTLSNIQWYKQRPGGHP | NPRYLITVTGKKLTVTCSQNMNHEY |
| | VFLIQLVKSGEVKKQKRLTFQFGEAKKNL | MSWYRQDPGLGLRQIYYSMNVEVT |
| | HITATQTTDVGTYFCAGVTYDKVIFGPGTSLS | DKGDVPEGYKVSRKEKRNFPLILESP |
| | VI | SPNQTSLYFCASSLGGGAIIHEQFFGP |
| | | GTRLTVL |
| 418 | MALQSTLGAVWLGLLLNSLWKVAESKDQVF | MGCRLLCCVVFCLLQAGPLDTAVSQ |
| | QPSTVAEGAVVEIFCNHSVSNAYNFFWYL | TPKYLVTQMGNDKSIKCEQNLGHDT |
| | HFPGCAPRLLVKGSKPSQQGRYNMTYERFSS | MYWYKQDSKKFLKIMFSYNNKELII |
| | SLLILQVREADAAVYYCAVTGGGNKLTFGTG | NETVPNRFSPKSPDKAHLNLHINSLE |
| | TQLKVE | LGDSAVYFCASSQGGLGIYNSPLHFG |
| | | NGTRLTVT |
| 419 | MLLLLVPVLEVIFTLGGTRAQSVTQLGSHVS | MGFRLLCCVAFCLLGAGPVDSGVTQ |
| | VSEGALVLLRCNYSVPPYLFWYVQYPNQG | TPKHLITATGQRVTLRCSPRSGDLSV |
| | LQLLLKYTSAATLVKGINGFEAEFKKSETSFH | YWYQQSLDQGLQFLIQYYNGEERAK |
| | LTKPSAHMSDAAEYFCAVNSGYALNFGKGT | GNILERFSAQQFPDLHSELNLLELG |
| | SLLVT | DSALYFCASSVEGGTDTQYFGPGTRL |
| | | TVL |
| 420 | MLTASLLRAVIASICVVSSMAQKVTQAQTEIS | MGFRLLCCVAFCLLGAGPVDSGVTQ |
| | VVEKEDVTLDCVYETRDTTYYLFWYKQPPS | TPKHLITATGQRVTLRCSPRSGDLSV |
| | GELVFLIRRNSFDEQNEISGRYSWNFQKST | YWYQQSLDQGLQFLIQYYNGEERAK |
| | FNFTITASQVVDSAVYFCALGGNEKLTFGT | GNILERFSAQQFPDLHSELNLLELG |
| | GTRLTII | DSALYFCASSVGASGGLYEQYFGPG |
| | | TRLTVT |
| 421 | MAMLLGASVLILWLQPDWVNSQQKNDDQQ | MSNQVLCCVVLCFLGANTVDGGITQ |
| | VKQNSPSLSVQEGRISILNCDYTNSMFDYFL | SPKYLFRKEGQNVTLSCEQNLNHDA |
| | WYKKYPAEGPTFLISISSIKDKNEDGRFTVFL | MYWYRQDPGQGLRLIYYSQIVNDFQ |
| | NKSAKHLSLHIVPSQPGDSAVYFCAERGGAT | KGDIAEGYSVSREKKESFPLTVTSAQ |
| | NKLIFGTGTLLAVQ | KNPTAFYLCASGPRDFYEQYFGPGTR |
| | | LTVT |
| 422 | MEKNPLAAPLLILWFHLDCVILNVEQSPQS | MGFRLLCCVAFCLLGAGPVDSGVTQ |
| | LHVQEGDSTNFTCSFPSSNFYALHWYRWETA | TPKHLITATGQRVTLRCSPRSGDLSV |
| | KSPEALFVMTLNGDEKKKGRISATLNTKEGY | YWYQQSLDQGLQFLIQYYNGEERAK |
| | SYLYIKGSQPEDSATYLCAFFSGGATNKLIFG | GNILERFSAQQFPDLHSELNLLELG |
| | TGTLLAVQ | DSALYFCASSVEGGTDTQYFGPGTRL |
| | | TVL |
| 423 | MNYSPGLVSLILLLLGRTRGNSVTQMEGPVT | MSIGLLCCAALSLLWAGPVNAGVTQ |
| | LSEEAFLTINCTYTATGYPSLFWYVQYPGEGL | TPKFQVLKTGQSMTLQCAQDMNHE |
| | QLLLKATKADDKGSNKGFEATYRKETTSFHL | YMSWYRQDPGMGLRLIHYSVGAGIT |
| | EKGSVQVSDSAVYFCALKVWWALNFGKGTS | DQGEVPNGYNVSRSTTEDFPLRLLSA |
| | LLVT | APSQTSVYFCASSEGTGANYGYTFGS |
| | | GTRLTVV |
| 424 | MEKNPLAAPLLILWFHLDCVSSILNVEQSPQS | MGFRLLCCVAFCLLGAGPVDSGVTQ |
| | LHVQEGDSTNFTCSFPSSNFYALHWYRWETA | TPKHLITATGQRVTLRCSPRSGDLSV |
| | KSPEALFVMTLNGDEKKKGRISATLNTKEGY | YWYQQSLDQGLQFLIQYYNGEERAK |
| | SYLYIKGSQPEDSATYLCARLSQGNLIFGKGT | GNILERFSAQQFPDLHSELNLLELG |
| | KLSVK | DSALYFCASSVEGGTDTQYFGPGTRL |
| | | TVL |
| 425 | METLLGVSLVILWLQLARVNSQQGEEDPQAL | MSNQVLCCVVLCLLGANTVDGGITQ |
| | SIQEGENATMNCSYKTSINNLQWYRQNSGRG | SPKYLFRKEGQNVTLSCEQNLNHDA |
| | LVHLILIRSNEREKHSGRLRVTLDTSKKSLL | MYWYRQDPGQGLRLIYYSQIVNDFQ |
| | ITASRAADTASYFCATDGNNRLAFGKGNQV | KGDIAEGYSVSREKKESFPLTVTSAQ |
| | VVI | KNPTAFYLCASSALSNSNQPQHFGD |
| | | GTRLSIL |
| 426 | METVLQVLLGILGFQAAWVSSQELEQSPQSLI | MGTRLLCWAALCLLGAELTEAGVA |
| | VQEGKNLTINCTSSKTLYGLYWYKQKYGEG | QSPRYKIIEKRQSVAFWCNPISGHAT |
| | LIFLMMLQKGGEEKSHEKITAKLDEKKQQSS | LYWYQQILGQGPKLLIQFQNNGVVD |
| | LHITASQPSHAGIYLCGADVSNYQLIWGAGT | DSQLPKDRFSAERLKGVDSTLKIQPA |
| | KLIIK | KLEDSAVYLCASGPGTGTYEQYFGP |
| | | GTRLTVT |
| 427 | MAMLLGASVLILWLQPDWVNSQQKNDDQQ | MGTSLLCWMALCLLGADHADTGVS |
| | VKQNSPSLSVQEGRISILNCDYTNSMFDYFL | QNPRHKITKRGQNVTFRCDPISEHNR |
| | WYKKYPAEGPTFLISISSIKDKNEDGRFTVFL | LYWYRQTLGQGPEFLTYFQNEAQLE |
| | NKSAKHLSLHIVPSQPGDSAVYFCAAKTDKLI | KSRLLSDRFSAERPKGSFSTLEIQRTE |
| | FGTGTRLQVF | QGDSAMYLCASSLGEGVEAFFGQGT |
| | | RLTVV |
| 428 | MKKLLAMILWLQLDRLSGELKVEQNPLFLS | MSNQVLCCVVLCLLGANTVDGGITQ |
| | MQEGKNYTIYCNYSTTSDRLYWYRQDPGKS | SPKYLFRKEGQNVTLSCEQNLNHDA |
| | LESLFVLLSNGAVKQEGRLMASLDTKARLST | MYWYRQDPGQGLRLIYYSQIVNDFQ |
| | LHITAAVHDLSATYFCAVDISWNDMRFGAGT | KGDIAEGYSVSREKKESFPLTVTSAQ |
| | RLTVK | KNPTAFYLCASSMAAGYEQYFGPGT |
| | | RLTVT |
| 429 | MISLRVLLVILWLQLSWVWSQRKEVEQDPGP | MSISLLCCAAFPLLWAGPVNAGVTQ |
| | FNVPEGATVAFNCTYSNSASQSFFWYRQDCR | TPKFRILKIGQSMTLQCAQDMNHNY |
| | KEPKLLMSVYSSGNEDGRFTAQLNRASQYIS | MYWYRQDPGMGLKLIYYSVGAGIT |
| | LLIRDSKLSDSATYLCVVSWGKLQFGAGTQV | DKGEVPNGYNVSRSTTEDFPLRLELA |
| | VVT | APSQTSVYFCASSLPGDPGELFFGEG |
| | | SRLTVL |
| 430 | MKSLRVLLVILWLQLSWVWSQQKEVEQNSG | MSIGLLCCAALSLLWAGPVNAGVTQ |
| | PLSVPEGAIASLNCTYSDRGSQSFFWYRQYSG | TPKFQVLKTGQSMTLQCAQDMNHE |
| | KSPELIMFIYSNGDKEDGRFTAQLNKASQYV | YMSWYRQDPGMGLRLIHYSVGAGIT |
| | SLLIRDSQPSDSATYLCAEGGFKTIFGAGTRLF | DQGEVPNGYNVSRSTTEDFPLRLLSA |
| | VK | APSQTSVYFCASSRGDGYTFGSGTRL |
| | | TVV |
| 431 | MLLLLIPVLGMIFALRDARAQSVSQHNEIHVI | MLSLLLLLLGLGSVFSAVISQKPSRDI |
| | LSEAASLELGCNYSYGGTVNLFWYVQYPGQ | CQRGTSLTIQCQVDSQVTMMFWYR |
| | HLQLLLKYFSGDPLVKGIKGFEAEFIKSKFSF | QQPGQSLTLIATANQGSEATYESGFV |
| | NLRKPSVQWSDTAEYFCAVEGRGSTLGRLYF | IDKFPISRPNLTFSTLTVSNMSPEDI |
| | GRGTQLTVW | YLCSVEGQGGSYEQYFGPGTRLTVT |
| 432 | MKTFAGFSFLFLWLQLDCMSRGEDVEQSLFL | MSIGLLCCAALSLLWAGPVNAGVTQ |
| | SVREGDSSVINCTYTDSSSTYLYWYKQEPGA | TPKFQVLKTGQSMTLQCAQDMNHE |
| | GLQLLTYIFSNMDMKQDQRLTVLLNKKDKH | YMSWYRQDPGMGLRLIHYSVGAGIT |
| | LSLRIADTQTGDSAIYFCAERGGSQGNLIFGK | DQGEVPNGYNVSRSTTEDFPLRLLSA |
| | GTKLSVK | APSQTSVYFCASSEGTGANYGYTFGS |
| | | GTRLTVV |
| 433 | MEKNPLAAPLLILWFHLDCVSSILNVEQSPQS | MGFRLLCCVAFCLLGAGPVDSGVTQ |
| | LHVQEGDSTNFTCSFPSSNFYALHWYRWETA | TPKHLITATGQRVTLRCSPRSGDLSV |
| | KSPEALFVMTLNGDEKKKGRISATLNTKEGY | YWYQQSLDQGLQFLIQYYNGEERAK |
| | SYLYIKGSQPEDSATYLCAFYGGSQGNLIFGK | GNILERFSAQQFPDLHSELNLLELG |
| | GTKLSVK | DSALYFCASSVEGGTDTQYFGPGTRL |
| | | TVL |
| 434 | MAFWLRRLGLHFRPHLGRRMESFLGGVLLIL | MSNQVLCCVVLCLLGANTVDGGITQ |
| | WLQVDWVKSQKIEQNSEALNIQEGKTATLTC | SPKYLFRKEGQNVTLSCEQNLNHDA |
| | NYTNYSPAYLQWYRQDPGRGPVFLLLIRENE | MYWYRQDPGQGLRLIYYSQIVNDFQ |
| | KEKRKERLKVTFDTTLKQSLFHITASQPADSA | KGDIAEGYSVSREKKESFPLTVTSAQ |
| | TYLCAPGGSYIPTFGRGTSLIVH | KNPTAFYLCASSPGQGVEQFFGPGTR |
| | | LTVL |
| 435 | MISLRVLLVILWLQLSWVWSQRKEVEQDPGP | MLLLLLLLGPGSGLGAVVSQHPSWV |
| | FNVPEGATVAFNCTYSNSASQSFFWYRQDCR | ICKSGTSVKIECRSLDFQATTMFWYR |
| | KEPKLLMSVYSSGNEDGRFTAQLNRASQYIS | QFPKQSLMLMATSNEGSKATYEQGV |
| | LLIRDSKLSDSATYLCVVKWSQFYFGTGTSLT | EKDKFLINHASLTLSTLTVTSAHPEDS |
| | VI | SFYICSAWDGNQPQHFGDGTRLSIL |
| 436 | MRLVARVTVFLTFGTIIDAKTTQPTSMDCAE | MGTSLLCWMALCLLGADHADTGVS |
| | GRAANLPCNHSTISGNEYVYWYRQIHSQGPQ | QNPRHKITKRGQNVTFRCDPISEHNR |
| | YIIHGLKNNETNEMASLIITEDRKSSTLILPHA | LYWYRQTLGQGPEFLTYFQNEAQLE |
| | TLRDTAVYYCIVRVNDYKLSFGAGTTVTVR | KSRLLSDRFSAERPKGSFSTLEIQRTE |
| | | QGDSAMYLCASSFGGSYEQYFGPGT |
| | | RLTVT |
| 437 | MACPGFLWALVISTCLEFSMAQTVTQSQPEM | MGTRLLCWAALCLLGAELTEAGVA |
| | SVQEAETVTLSCTYDTSESDYYLFWYKQPPS | QSPRYKIIEKRQSVAFWCNPISGHAT |
| | RQMILVIRQEAYKQQNATENRFSVNFQKAAK | LYWYQQILGQGPKLLIQFQNNGVVD |
| | SFSLKISDSQLGDAAMYFCAYKTGTYKYIFG | DSQLPKDRFSAERLKGVDSTLKIQPA |
| | TGTRLKVL | KLEDSAVYLCASSFDPDRNLAKNIQY |
| | | FGAGTRLSVL |
| 438 | MWGAFLLYVSMKMGGTAGQSLEQPSEVTA | MDTWLVCWAIFSLLKAGLTEPEVTQ |
| | VEGAIVQINCTYQTSGFYGLSWYQQHDGGAP | TPSHQVTQMGQEVILRCVPISNHLYF |
| | TFLSYNALDGLEETGRFSSFLSRSDSYGYLLL | YWYRQILGQKVEFLVSFYNNEISEKS |
| | QELQMKDSASYFCAVRAGGFKTIFGAGTRLF | EIFDDQFSVERPDGSNFTLKIRSTKLE |
| | VK | DSAMYFCASIEPQVGDTQYFGPGTRL |
| | | TVL |
| 439 | MRQVARVIVFLTLSTLSLAKTTQPISMDSYEG | MGTSLLCWMALCLLGADHADTGVS |
| | QEVNITCSHNNIATNDYITWYQQFPSQGPRFII | QDPRHKITKRGQNVTFRCDPISEHNR |
| | QGYKTKVTNEVASLFIPADRKSSTLSLPRVSL | LYWYRQTLGQGPEFLTYFQNEAQLE |
| | SDTAVYYCLASLGDYKLSFGAGTTVTVR | KSRLLSDRFSAERPKGSFSTLEIQRTE |
| | | QGDSAMYLCASSSGLASYEQYFGPG |
| | | TRLTVT |
| 440 | MAMLLGASVLILWLQPDWVNSQQKNDDQQ | MGFRLLCCVAFCLLGAGPVDSGVTQ |
| | VKQNSPSLSVQEGRISILNCDYTNSMFDYFL | TPKHLITATGQRVTLRCSPRSGDLSV |
| | WYKKYPAEGPTFLISISSIKDKNEDGRFTVFL | YWYQQSLDQGLQFLIQYYNGEERAK |
| | NKSAKHLSLHIVPSQPGDSAVYFCAANLNAG | GNILERFSAQQFPDLHSELNLSSLELG |
| | KSTFGDGTTLTVK | DSALYFCASSAGDAKNIQYFGAGTR |
| | | LSVL |
| 441 | MAFWLRRLGLHFRPHLGRRMESFLGGVLLIL | MGTSLLCWMALCLLGADHADTGVS |
| | WLQVDWVKSQKIEQNSEALNIQEGKTATLTC | QNPRHKITKRGQNVTFRCDPISEHNR |
| | NYTNYSPAYLQWYRQDPGRGPVFLLLIRENE | LYWYRQTLGQGPEFLTYFQNEAQLE |
| | KEKRKERLKVTFDTTLKQSLFHITASQPADSA | KSRLLSDRFSAERPKGSFSTLEIQRTE |
| | TYLCALGDTGGFKTIFGAGTRLFVK | QGDSAMYLCASSPEWTGSPGANVLT |
| | | FGAGSRLTVL |
| 442 | MNYSPGLVSLILLLLGRTRGNSVTQMEGPVT | MGTRLLCWVVLGFLGTDHTGAGVS |
| | LSEEAFLTINCTYTATGYPSLFWYVQYPGEGL | QSPRYKVAKRGQDVALRCDPISGHV |
| | QLLLKATKADDKGSNKGFEATYRKETTSFHL | SLFWYQQALGQGPEFLTYFQNEAQL |
| | EKGSVQVSDSAVYFCALSDSGATNKLIFGTG | DKSGLPSDRFFAERPEGSVSTLKIQRT |
| | TLLAVQ | QQEDSAVYLCASSRSLGPTGNQPQH |
| | | FGDGTRLSIL |
| 443 | MISLRVLLVILWLQLSWVWSQRKEVEQDPGP | MGIRLLCRVAFCFLAVGLVDVKVTQ |
| | FNVPEGATVAFNCTYSNSASQSFFWYRQDCR | SSRYLVKRTGEKVFLECVQDMDHEN |
| | KEPKLLMSVYSSGNEDGRFTAQLNRASQYIS | MFWYRQDPGLGLRLIYFSYDVKMKE |
| | LLIRDSKLSDSATYLCVVNDDNYGQNFVFGP | KGDIPEGYSVSREKKERFSLILESAST |
| | GTRLSVL | NQTSMYLCASSPTGFGETQYFGPGTR |
| | | LLVL |
| 444 | MAMLLGASVLILWLQPDWVNSQQKNDDQQ | MRSWPGPEMGTRLFFYVALCLLWT |
| | VKQNSPSLSVQEGRISILNCDYTNSMFDYFL | GHVDAGITQSPRHKVTETGTPVTLRC |
| | WYKKYPAEGPTFLISISSIKDKNEDGRFTVFL | HQTENHRYMYWYRQDPGHGLRLIH |
| | NKSAKHLSLHIVPSQPGDSAVYFCAASAGSG | YSYGVKDTDKGEVSDGYSVSRSKTE |
| | YALNFGKGTSLLVT | DFLLTLESATSSQTSVYFCAISELDRV |
| | | TEAFFGQGTRLTVV |
| 445 | MTSIRAVFIFLWLQLDLVNGENVEQHPSTLSV | MGTSLLCWMALCLLGADHADTGVS |
| | QEGDSAVIKCTYSDSASNYFPWYKQELGKGP | QDPRHKITKRGQNVTFRCDPISEHNR |
| | QLIIDIRSNVGEKKDQRIAVTLNKTAKHFSLHI | LYWYRQTLGQGPEFLTYFQNEAQLE |
| | TETQPEDSAVYFCAAPRDYKLSFGAGTTVTV | KSRLLSDRFSAERPKGSFSTLEIQRTE |
| | R | QGDSAMYLCASSLVEGLAGGNSYNE |
| | | QFFGPGTRLTVL |
| 446 | MAMLLGASVLILWLQPDWVNSQQKNDDQQ | MSNQVLCCVVLCFLGANTVDGGITQ |
| | VKQNSPSLSVQEGRISILNCDYTNSMFDYFL | SPKYLFRKEGQNVTLSCEQNLNHDA |
| | WYKKYPAEGPTFLISISSIKDKNEDGRFTVFL | MYWYRQDPGQGLRLIYYSQIVNDFQ |
| | NKSAKHLSLHIVPSQPGDSAVYFCAAIVGSN | KGDIAEGYSVSREKKESFPLTVTSAQ |
| | YKLTFGKGTLLTVN | KNPTAFYLCASGPRDFYEQYFGPGTR |
| | | LTVT |
| 447 | MLTASLLRAVIASICVVSSMAQKVTQAQTEIS | MSNQVLCCVVLCFLGANTVDGGITQ |
| | VVEKEDVTLDCVYETRDTTYYLFWYKQPPS | SPKYLFRKEGQNVTLSCEQNLNHDA |
| | GELVFLIRRNSFDEQNEISGRYSWNFQKSTSS | MYWYRQDPGQGLRLIYYSQIVNDFQ |
| | FNFTITASQVVDSAVYFCALSEGGYNKLIFGA | KGDIAEGYSVSREKKESFPLTVTSAQ |
| | GTRLAVH | KNPTAFYLCASIAAGTPIGEQFFGPGT |
| | | RLTVL |

### Table A

[0815] Refer to Sequence Listing, SEQ ID NOS. 1-102842. For clarity, each HLA-PEPTIDE target is assigned a unique SEQ ID. NO. Each of the above sequence identifiers is associated with a Table A target number, HLA subtype, the gene name corresponding to the restricted peptide, the gene Ensemble ID, whether the target type is a tumor-associated antigen (TAA) or cancer/testis antigen (CTA), and the amino acid sequence of the restricted peptide. For example, SEQ ID NO: 1 refers to Table A, target 1. Table A, target 1 refers to HLA-PEPTIDE target C*16:01_AAACSRMVI, the restricted peptide AAACSRMVI corresponding to gene ABCB5, Ensemble ID ENSG00000004846, which is a TAA.
Table A is disclosed in its entirety in U.S. Provisional Application No. 62/611,403, filed Dec. 28, 2017, which is hereby incorporated by reference in its entirety.

1. An isolated antigen binding protein (ABP) that specifically binds to a human leukocyte antigen (HLA)-PEPTIDE target, wherein the HLA-PEPTIDE target comprises an HLA-restricted peptide complexed with an HLA Class I molecule, wherein the HLA-restricted peptide is located in the peptide binding groove of an α1/α2 heterodimer portion of the HLA Class I molecule, and wherein:
a. the HLA Class I molecule is HLA subtype B*35:01 and the HLA-restricted peptide comprises the sequence EVDPIGHVY,
b. the HLA Class I molecule is HLA subtype A*02:01 and the HLA-restricted peptide comprises the sequence AIFPGAVPAA,
c. the HLA Class I molecule is HLA subtype A*01:01 and the HLA-restricted peptide comprises the sequence ASSLPTTMNY; or
d. the HLA Class I molecule is HLA subtype A*01:01 and the HLA-restricted peptide comprises the sequence HSEVGLPVY.

2. The isolated ABP of claim 1, wherein the HLA-restricted peptide is between about 5-15 amino acids in length.

3. The isolated ABP of claim 2, wherein the HLA-restricted peptide is between about 8-12 amino acids in length.

4. The isolated ABP of any one of claims 1-3, wherein
a. the HLA Class I molecule is HLA subtype B*35:01 and the HLA-restricted peptide consists of the sequence EVDPIGHVY,
b. the HLA Class I molecule is HLA subtype A*02:01 and the HLA-restricted peptide consists of the sequence AIFPGAVPAA,
c. the HLA Class I molecule is HLA subtype A*01:01 and the HLA-restricted peptide consists of the sequence ASSLPTTMNY; or
d. the HLA Class I molecule is HLA subtype A*01:01 and the HLA-restricted peptide consists of the sequence HSEVGLPVY.

5. The isolated ABP of any of the preceding claims, wherein the ABP comprises an antibody or antigen-binding fragment thereof.

6. The isolated ABP of claim 5, wherein the HLA Class I molecule is HLA subtype B*35:01 and the HLA-restricted peptide comprises the sequence EVDPIGHVY.

7. The isolated ABP of claim 6, wherein the HLA Class I molecule is HLA subtype B*35:01 and the HLA-restricted peptide consists of the sequence EVDPIGHVY.

8. The isolated ABP of claim 6 or 7, wherein the ABP comprises a CDR-H3 comprising a sequence selected from: CARDGVRYYGMDVW, CARGVRGYDRSAGYW, CASHDYGDYGEYFQHW, CARVSWYCSSTSCGVNWFDPW, CAKVNWNDGPYFDYW, CATPTNSGYYGPYYYYGMDVW, CARDVMDVW, CAREGYGMDVW, CARDNGVGVDYW, CARGIADSGSYYGNGRDYYYGMDVW, CARGDYYFDYW, CARDGTRYYGMDVW, CARDVVANFDYW, CARGHSSGWYYYYGMDVW, CAKDLGSYGGYYW, CARSWFGGFNYHYYGMDVW, CARELPIGYGMDVW, and CARGGSYYYYGMDVW.

9. The isolated ABP of any one of claims 6-8, wherein the ABP comprises a CDR-L3 comprising a sequence selected from: CMQGLQTPITF, CMQALQTPPTF, CQQAISFPLTF, CQQANSFPLTF, CQQANSFPLTF, CQQSYSIPLTF, CQQTYMMPYTF, CQQSYITPWTF, CQQSYITPYTF, CQQYYTTPYTF, CQQSYSTPLTF, CMQALQTPLTF, CQQYGSWPRTF, CQQSYSTPVTF, CMQALQTPYTF, CQQANSFPFTF, CMQALQTPLTF, and CQQSYSTPLTF.

10. The isolated ABP of any one of claims 6-9, wherein the ABP comprises the CDR-H3 and the CDR-L3 from the scFv designated G5_P7_E7, G5_P7_B3, G5_P7_A5, G5_P7_F6, G5-P1B12, G5-P1C12, G5-P1-E05, G5-P3 G01, G5-P3G08, G5-P4B02, G5-P4E04, G5R4-P1D06, G5R4-P1H11, G5R4-P2B10, G5R4-P2H8, G5R4-P3G05, G5R4-P4A07, or G5R4-P4B01.

11. The isolated ABP of any one of claims 6-10, wherein the ABP comprises all three heavy chain CDRs and all three light chain CDRs from the scFv designated G5_P7_E7, G5_P7_B3, G5_P7_A5, G5_P7_F6, G5-P1B12, G5-P1C12, G5-P1-E05, G5-P3G01, G5-P3G08, G5-P4B02, G5-P4E04, G5R4-P1D06, G5R4-P1H11, G5R4-P2B10, G5R4-P2H8, G5R4-P3G05, G5R4-P4A07, or G5R4-P4B01.

12. The isolated ABP of any one of claims 6-11, wherein the ABP comprises a VH sequence selected from
QVQLVQSGAEVKKPGASVKVSCKASGYTFTSYDINWVRQAPGQGLEWMGI
INPRSGSTKYAQKFQGRVTMTRDTSTSTVYMELSSLRSEDTAVYYCARDG
VRYYGMDVWGQGTTVTVAS,
QVQLVQSGAEVKKPGSSVKVSCKASGYTFTSHDINWVRQAPGQGLEWMGW
MNPNSGDTGYAQKFQGRVTITADESTSTAYMELSSLRSEDTAVYYCARGV
RGYDRSAGYWGQGTLVIVAS,
EVQLLESGGGLVKPGGSLRLSCAASGFSFSSYWMSWVRQAPGKGLEWISY
ISGDSGYTNYADSVKGRFTISRDDSKNTLYLQMNSLKTEDTAVYYCASHD
YGDYGEYFQHWGQGTLVTVSSAS,
EVQLLQSGGGLVQPGGSLRLSCAASGFTFSNSDMNWVRQAPGKGLEWVAY
ISSGSSTIYYADSVKGRFTISRDNSKNTLYLQMNSLRAEDTAVYYCARVS
WYCSSTSCGVNWFDPWGQGTLVTVAS,
EVQLLESGGGLVQPGGSLRLSCAASGFTFSNSDMNWVRQAPGKGLEWVAS
ISSSGGYINYADSVKGRFTISRDNSKNTLYLQMNSLRAEDTAVYYCAKVN
WNDGPYFDYWGQGTLVTVSS,
QVQLVQSGAEVKKPGSSVKVSCKASGGTFSNFGVSWLRQAPGQGLEWMGG
IIPILGTANYAQKFQGRVTITADESTSTAYMELSSLRSEDTAVYYCATPT
NSGYYGPYYYYGMDVWGQGTTVTVSS,
QVQLVQSGAEVKKPGASVKVSCKASGYTFTSYNMHWVRQAPGQGLEWMGW
INPNSGGTNYAQKFQGRVTMTRDTSTSTVYMELSSLRSEDTAVYYCARDV
MDVWGQGTTVTVSS,
QVQLVQSGAEVKKPGASVKVSCKASGGTFSGYLVSWVRQAPGQGLEWMGW
INPNSGGTNTAQKFQGRVTMTRDTSTSTVYMELSSLRSEDTAVYYCAREG
YGMDVWGQGTTVTVSS,
QVQLVQSGAEVKKPGASVKVSCKASGYIFRNYPMHWVRQAPGQGLEWMGW
INPDSGGTKYAQKFQGRVTMTRDTSTSTVYMELSSLRSEDTAVYYCARDN
GVGVDYWGQGTLVTVSS,
QVQLVQSGAEVKKPGASVKVSCKASGYTFTGYYMHWVRQAPGQGLEWMGW
MNPNIGNTGYAQKFQGRVTMTRDTSTSTVYMELSSLRSEDTAVYYCARGI
ADSGSYYGNGRDYYYGMDVWGQGTTVTVSS,
QVQLVQSGAEVKKPGASVKVSCKASGGTFSSYGISWVRQAPGQGLEWMGW
INPNSGVTKYAQKFQGRVTMTRDTSTSTVYMELSSLRSEDTAVYYCARGD
YYFDYWGQGTLVTVSS,
QVQLVQSGAEVKKPGASVKVSCKASGYTFTSYDINWVRQAPGQGLEWMGW
INPNSGDTKYSQKFQGRVTMTRDTSTSTVYMELSSLRSEDTAVYYCARDG
TRYYGMDVWGQGTTVTVSS,
EVQLLESGGGLVKPGGSLRLSCAASGFTFSDYYMSWVRQAPGKGLEWVSY
ISSSSSYTNYADSVKGRFTISRDDSKNTLYLQMNSLKTEDTAVYYCARDV
VANFDYWGQGTLVTVSS,
QVQLVQSGAEVKKPGASVKVSCKASGGTFSSYAISWVRQAPGQGLEWMGW
MNPDSGSTGYAQRFQGRVTMTRDTSTSTVYMELSSLRSEDTAVYYCARGH
SSGWYYYYGMDVWGQGTTVTVSS,
EVQLLESGGGLVQPGGSLRLSCAASGFTFTSYSMHWVRQAPGKGLEWVSS
ITSFTNTMYYADSVKGRFTISRDNSKNTLYLQMNSLRAEDTAVYYCAKDL
GSYGGYYWGQGTLVTVSS,
QVQLVQSGAEVKKPGASVKVSCKASGYTFTNYYMHWVRQAPGQGLEWMGI
INPSGGSTSYAQKFQGRVTMTRDTSTSTVYMELSSLRSEDTAVYYCARSW
FGGFNYHYYGMDVWGQGTTVTVSS,
QVQLVQSGAEVKKPGASVKVSCKASGYTFTSYYMHWVRQAPGQGLEWMGW
MNPNSGNTGYAQKFQGRVTMTRDTSTSTVYMELSSLRSEDTAVYYCAREL
PIGYGMDVWGQGTTVTVSS,
and
QVQLVQSGAEVKKPGSSVKVSCKASGGTFSSYAISWVRQAPGQGLEWMGG
IIPIVGTANYAQKFQGRVTITADESTSTAYMELSSLRSEDTAVYYCARGG
SYYYYGMDVWGQGTTVTVSS.

13. The isolated ABP of any one of claims 6-12, wherein the ABP comprises a VL sequence selected from
DIVMTQSPLSLPVTPGEPASISCRSSQSLLHSNGYNYLDWYLQKPGQSPQ
LLIYLGSYRASGVPDRFSGSGSGTDFTLKISRVEAEDVGVYYCMQGLQTP
ITFGQGTRLEIK,
DIVMTQSPLSLPVTPGEPASISCRSSQSLLHSNGYNYLDWYLQKPGQSPQ
LLIYLGSSRASGVPDRFSGSGSGTDFTLKISRVEAEDVGVYYCMQALQTP
PTFGPGTKVDIK,
DIQMTQSPSSLSASVGDRVTITCQASQDISNYLNWYQQKPGKAPKLLIYA
ASSLQSGVPSRFSGSGSGTDFTLTISSLQPEDFATYYCQQAISFPLTFGQ
STKVEIK,
DIQMTQSPSSLSASVGDRVTITCRASQSISSWLAWYQQKPGKAPKLLIYS
ASTLQSGVPSRFSGSGSGTDFTLTISSLQPEDFATYYCQQANSFPLTFGG
GTKVEIK,
DIQMTQSPSSLSASVGDRVTITCRASQSISSWLAWYQQKPGKAPKLLIYA
ASSLQSGVPSRFSGSGSGTDFTLTISSLQPEDFATYYCQQANSFPLTFGG
GTKVEIK,
DIQMTQSPSSLSASVGDRVTITCRASQSISSWLAWYQQKPGKAPKLLIYA
ASTLQSGVPSRFSGSGSGTDFTLTISSLQPEDFATYYCQQSYSIPLTFGG
GTKVEIK,
DIQMTQSPSSLSASVGDRVTITCRASQGISNYLNWYQQKPGKAPKLLIYY
ASSLQSGVPSRFSGSGSGTDFTLTISSLQPEDFATYYCQQTYMNIPYTFG
QGTKVEIK,
DIQMTQSPSSLSASVGDRVTITCRASQSISSYLNWYQQKPGKAPKWYGAS
SLQSGVPSRFSGSGSGTDFTLTISSLQPEDFATYYCQQSYITPWTFGQGT
KVEIK,
DIQMTQSPSSLSASVGDRVTITCRASQGISNYLAWYQQKPGKAPKLLIYA
ASSLQSGVPSRFSGSGSGTDFTLTISSLQPEDFATYYCQQSYITPYTFGQ
GTKLEIK,
DIVMTQSPDSLAVSLGERATINCKTSQSVLYRPNNENYLAWYQQKPGQPP
KLLIYQASIREPGVPDRFSGSGSGTDFTLTISSLQAEDVAVYYCQQYYTT
PYTFGQGTKLEIK,
DIQMTQSPSSLSASVGDRVTITCRASQSISRFLNWYQQKPGKAPKLLIYG
ASRPQSGVPSRFSGSGSGTDFTLTISSLQPEDFATYYCQQSYSTPLTFGQ
GTKVEIK,
DIVMTQSPLSLPVTPGEPASISCRSSQSLLHSNGYNYLDWYLQKPGQSPQ
LLIYLGSHRASGVPDRFSGSGSGTDFTLKISRVEAEDVGVYYCMQALQTP
LTFGGGTKVEIK,
EIVMTQSPATLSVSPGERATLSCRASQSVSSNLAWYQQKPGQAPRLLIYA
ASARASGIPARFSGSGSGTEFTLTISSLQSEDFAVYYCQQYGSWPRTFGQ
GTKVEIK,
DIQMTQSPSSLSASVGDRVTITCRASQSISSYLNWYQQKPGKAPKLLIYG
ASRLQSGVPSRFSGSGSGTDFTLTISSLQPEDFATYYCQQSYSTPVTFGQ
GTKVEIK,
DIVMTQSPLSLPVTPGEPASISCRSSQSLLHSNGYNYLDWYLQKPGQSPQ
LLIYLGSNRASGVPDRFSGSGSGTDFTLKISRVEAEDVGVYYCMQALQTP
YTFGQGTKVEIK,
DIQMTQSPSSLSASVGDRVTITCQASEDISNHLNWYQQKPGKAPKLLIYD
ALSLQSGVPSRFSGSGSGTDFTLTISSLQPEDFATYYCQQANSFPFTFGP
GTKVDIK,
DIVMTQSPLSLPVTPGEPASISCRSSQSLLHSNGYNYLDWYLQKPGQSPQ
LLIYLGSNRASGVPDRFSGSGSGTDFTLKISRVEAEDVGVYYCMQALQTP
LTFGQGTKVEIK,
and
DIQMTQSPSSLSASVGDRVTITCRASQSISSYLNWYQQKPGKAPKLLIYA
ASSLQSGVPSRFSGSGSGTDFTLTISSLQPEDFATYYCQQSYSTPLTFGG
GTKVEIK.

14. The isolated ABP of any one of claims 6-13, wherein the ABP comprises the VH sequence and VL sequence from the scFv designated G5_P7_E7, G5_P7_B3, G5_P7_A5, G5_P7_F6, G5-P1B12, G5-P1C12, G5-P1-E05, G5-P3G01, G5-P3G08, G5-P4B02, G5-P4E04, G5R4-P1D06, G5R4-P1H11, G5R4-P2B10, G5R4-P2H8, G5R4-P3G05, G5R4-P4A07, and G5R4-P4B01.

15. The isolated ABP of any one of claims 6-14, wherein the ABP binds to any one or more of amino acid positions 2-8 on the restricted peptide EVDPIGHVY.

16. The isolated ABP of claim 5, wherein the HLA Class I molecule is HLA subtype A*02:01 and the HLA-restricted peptide comprises the sequence AIFPGAVPAA.

17. The isolated ABP of claim 16, wherein the HLA Class I molecule is HLA subtype A*02:01 and the HLA-restricted peptide consists of the sequence AIFPGAVPAA.

18. The isolated ABP of claim 16 or 17, wherein the ABP comprises a CDR-H3 comprising a sequence selected from: CARDDYGDYVAYFQHW, CARDLSYYYGMDVW, CARVYDFWSVLSGFDIW, CARVEQGYDIYYYYYMDVW, CARSYDYGDYLNFDYW, CARASGSGYYYYYGMDVW, CAASTWIQPFDYW, CASNGNYYGSGSYYNYW, CARAVYYDFWSGPFDYW, CAKGGIYYGSGSYPSW, CARGLYYMDVW, CARGLYGDYFLYYGMDVW, CARGLLGFGEFLTYGMDVW, CARDRDSSWTYYYYGMDVW, CARGLYGDYFLYYGMDVW, CARGDYYDSSGYYFPVYFDYW, and CAKDPFWSGHYYYYGMDVW.

19. The isolated ABP of any one of claims 16-18, wherein the ABP comprises a CDR-L3 comprising a sequence selected from: CQQNYNSVTF, CQQSYNTPWTF, CGQSYSTPPTF, CQQSYSAPYTF, CQQSYSIPPTF, CQQSYSAPYTF, CQQHNSYPPTF, CQQYSTYPITI, CQQANSFPWTF, CQQSHSTPQTF, CQQSYSTPLTF, CQQSYSTPLTF, CQQTYSTPWTF, CQQYGSSPYTF, CQQSHSTPLTF, CQQANGFPLTF, and CQQSYSTPLTF.

20. The isolated ABP of any one of claims 16-19, wherein the ABP comprises the CDR-H3 and the CDR-L3 from the scFv designated G8-P1A03, G8-P1A04, G8-P1A06, G8-P1B03, G8-P1C11, G8-P1D02, G8-P1H08, G8-P2B05, G8-P2E06, R3G8-P2C10, R3G8-P2E04, R3G8-P4F05, R3G8-P5C03, R3G8-P5F02, R3G8-P5G08, G8-P1C01, or G8-P2C11.

21. The isolated ABP of any one of claims 16-20, wherein the ABP comprises all three heavy chain CDRs and all three light chain CDRs from the scFv designated G8-P1A03, G8-P1A04, G8-P1A06, G8-P1B03, G8-P1C11, G8-P1D02, G8-P1H08, G8-P2B05, G8-P2E06, R3G8-P2C10, R3G8-P2E04, R3G8-P4F05, R3G8-P5C03, R3G8-P5F02, R3G8-P5G08, G8-P1C01, or G8-P2C11.

22. The isolated ABP of any one of claims 16-21, wherein the ABP comprises a VH sequence selected from:
QVQLVQSGAEVKKPGASVKVSCKASGGTFSRSAITWVRQAPGQGLEWMGW
INPNSGATNYAQKFQGRVTMTRDTSTSTVYMELSSLRSEDTAVYYCARDD
YGDYVAYFQHWGQGTLVTVSS,
QVQLVQSGAEVKKPGASVKVSCKASGYPFIGQYLHWVRQAPGQGLEWMGI
INPSGDSATYAQKFQGRVTMTRDTSTSTVYMELSSLRSEDTAVYYCARDL
SYYYGMDVWGQGTTVTVSS,
QVQLVQSGAEVKKPGASVKVSCKASGYTFTNYYMHWVRQAPGQGLEWMGW
MNPIGGGTGYAQKFQGRVTMTRDTSTSTVYMELSSLRSEDTAVYYCARVY
DFWSVLSGFDIWGQGTLVTVSS,
EVQLLESGGGLVQPGGSLRLSCAASGFTFSDYYMSWVRQAPGKGLEWVSG
INWNGGSTGYADSVKGRFTISRDNSKNTLYLQMNSLRAEDTAVYYCARVE
QGYDIYYYYYMDVWGKGTTVTVSS,
QVQLVQSGAEVKKPGASVKVSCKASGGTLSSYPINWVRQAPGQGLEWMGW
ISTYSGHADYAQKLQGRVTMTRDTSTSTVYMELSSLRSEDTAVYYCARSY
DYGDYLNFDYWGQGTLVTVSS,
EVQLLESGGGLVQPGGSLRLSCAASGFTFSSYWMSWVRQAPGKGLEWVSS
ISGRGDNTYYADSVKGRFTISRDNSKNTLYLQMNSLRAEDTAVYYCARAS
GSGYYYYYGMDVWGQGTTVTVSS,
QVQLVQSGAEVKKPGASVKVSCKASGYTFGNYFMHWVRQAPGQGLEWMGM
VNPSGGSETFAQKFQGRVTMTRDTSTSTVYMELSSLRSEDTAVYYCAAST
WIQPFDYWGQGTLVTVSS,
EVQLLESGGGLVQPGGSLRLSCAASGFDFSIYSMNWVRQAPGKGLEWVSA
ISGSGGSTYYADSVKGRFTISRDNSKNTLYLQMNSLRAEDTAVYYCASNG
NYYGSGSYYNYWGQGTLVTVSS,
QVQLVQSGAEVKKPGASVKVSCKASGYTLTTYYMHWVRQAPGQGLEWMGW
INPNSGGTNYAQKFQGRVTMTRDTSTSTVYMELSSLRSEDTAVYYCARAV
YYDFWSGPFDYWGQGTLVTVSS,
QVQLVQSGAEVKKPGASVKVSCKASGYTFTSYYMHWVRQAPGQGLEWMGW
INPYSGGTNYAQKFQGRVTMTRDTSTSTVYMELSSLRSEDTAVYYCAKGG
IYYGSGSYPSWGQGTLVTVSS,
QVQLVQSGAEVKKPGVKVSCKASGGTFSSYGVSWVRQAPGQGLEWMGWIS
PYSGNTDYAQKFQGRVTITADESTSTAYMELSSLRSEDTAVYYCARGLYY
MDVWGKGTTVTVSS,
QVQLVQSGAEVKKPGASVKVSCKASGYTFSNMYLHWVRQAPGQGLEWMGW
INPNTGDTNYAQTFQGRVTMTRDTSTSTVYMELSSLRSEDTAVYYCARGL
YGDYFLYYGMDVWGQGTKVTVSS,
QVQLVQSGAEVKKPGASVKVSCKASGYTFTSYYMHWVRQAPGQGLEWMGW
MNPNSGNTGYAQKFQGRVTMTRDTSTSTVYMELSSLRSEDTAVYYCARGL
LGFGEFLTYGMDVWGQGTLVTVSS,
QVQLVQSGAEVKKPGASVKVSCKASGYTFTGYYTHWVRQAPGQGLEWMGV
INPSGGSTTYAQKLQGRVTMTRDTSTSTVYMELSSLRSEDTAVYYCARDR
DSSWTYYYYGMDVWGQGTTVTVSS,
QVQLVQSGAEVKKPGASVKVSCKASGYTFTSNYMHWVRQAPGQGLEWMGW
MNPNSGNTGYAQKFQGRVTMTRDTSTSTVYMELSSLRSEDTAVYYCARGL
YGDYFLYYGMDVWGQGTTVTVSS,
QVQLVQSGAEVKKPGASVKVSCKASGGTFHAISWVRQAPGQGLEWMGVII
PSGGTSYTQKFQGRVTMTRDTSTSTVYMELSSLRSEDTAVYYCARGDYYD
SSGYYFPVYFDYWGQGTLVTVSS,
and
QVQLVQSGAEVKKPGASVKVSCKASGYTFTSYAMNWVRQAPGQGLEWMGW
INPNSGGTNYAQKFQGRVTMTRDTSTSTVYMELSSLRSEDTAVYYCARDP
FWSGHYYYYGMDVWGQGTTVTVSS.

23. The isolated ABP of any one of claims 16-22, wherein the ABP comprises a VL sequence selected from:
DIQMTQSPSSLSASVGDRVTITCRASQSITSYLNWYQQKPGKAPKLLIYD
ASNLETGVPSRFSGSGSGTDFTLTISSLQPEDFATYYCQQNYNSVTFGQG
TKLEIK,
DIQMTQSPSSLSASVGDRVTITCWASQGISSYLAWYQQKPGKAPKLLIYA
ASSLQSGVPSRFSGSGSGTDFTLTISSLQPEDFATYYCQQSYNTPWTFGP
GTKVDIK,
DIQMTQSPSSLSASVGDRVTITCRASQAISNSLAWYQQKPGKAPKLLIYA
ASTLQSGVPSRFSGSGSGTDFTLTISSLQPEDFATYYCGQSYSTPPTFGQ
GTKLEIK,
DIQMTQSPSSLSASVGDRVTITCRASQSISSYLNWYQQKPGKAPKLLIYK
ASSLESGVPSRFSGSGSGTDFTLTISSLQPEDFATYYCQQSYSAPYTFGP
GTKVDIK,
DIQMTQSPSSLSASVGDRVTITCQASQDISNYLNWYQQKPGKAPKLLIYA
ASSLQSGVPSRFSGSGSGTDFTLTISSLQPEDFATYYCQQSYSIPPTFGG
GTKVDIK,
DIQMTQSPSSLSASVGDRVTITCQASQDISNYLNWYQQKPGKAPKLLIYA
ASSLQSGVPSRFSGSGSGTDFTLTISSLQPEDFATYYCQQSYSAPYTFGG
GTKVEIK,
DIQMTQSPSSLSASVGDRVTITCRASQGINSYLAWYQQKPGKAPKLLIYD
ASNLETGVPSRFSGSGSGTDFTLTISSLQPEDFATYYCQQHNSYPPTFGQ
GTKLEIK,
DIQMTQSPSSLSASVGDRVTITCRASQSISRWLAWYQQKPGKAPKLLIYA
ASSLQSGVPSRFSGSGSGTDFTLTISSLQPEDFATYYCQQYSTYPITIGQ
GTKVEIK,
DIQMTQSPSSLSASVGDRVTITCRASQGISNSLAWYQQKPGKAPKLLIYA
ASSLQSGVPSRFSGSGSGTDFTLTISSLQPEDFATYYCQQANSFPWTFGQ
GTKLEIK,
DIQMTQSPSSLSASVGDRVTITCRASQDVSTWLAWYQQKPGKAPKLLIYA
ASSLQSGVPSRFSGSGSGTDFTLTISSLQPEDFATYYCQQSHSTPQTFGQ
GTKVEIK,
DIQMTQSPSSLSASVGDRVTITCRASQSISSWLAWYQQKPGKAPKLLIYD
ASNLETGVPSRFSGSGSGTDFTLTISSLQPEDFATYYCQQSYSTPLTFGG
GTKLEIK,
DIQMTQSPSSLSASVGDRVTITCRASQGISNYLAWYQQKPGKAPKLLIYA
ASTLQSGVPSRFSGSGSGTDFTLTISSLQPEDFATYYCQQSYSTPLTFGG
GTKVEIK,
DIQMTQSPSSLSASVGDRVTITCRASQGISNWLAWYQQKPGKAPKLLIYA
ASTLQSGVPSRFSGSGSGTDFTLTISSLQPEDFATYYCQQTYSTPWTFGQ
GTKLEIK,
EIVMTQSPATLSVSPGERATLSCRASQSVGNSLAWYQQKPGQAPRLLIYG
ASTRATGIPARFSGSGSGTEFTLTISSLQSEDFAVYYCQQYGSSPYTFGQ
GTKVEIK,
DIQMTQSPSSLSASVGDRVTITCRASQSISGYLNWYQQKPGKAPKLLIYA
ASSLQSGVPSRFSGSGSGTDFTLTISSLQPEDFATYYCQQSHSTPLTFGQ
GTKVEIK,
DIQMTQSPSSLSASVGDRVTITCRASQNIYTYLNWYQQKPGKAPKLLIYD
ASNLETGVPSRFSGSGSGTDFTLTISSLQPEDFATYYCQQANGFPLTFGG
GTKVEIK,
and
DIQMTQSPSSLSASVGDRVTITCRASQSISSYLNWYQQKPGKAPKLLIYA
ASSLQSGVPSRFSGSGSGTDFTLTISSLQPEDFATYYCQQSYSTPLTFGG
GTKVEIK.

24. The isolated ABP of any one of claims 16-23, wherein the ABP comprises the VH sequence and VL sequence from the scFv designated G8-P1A03, G8-P1A04, G8-P1A06, G8-P1B03, G8-P1C11, G8-P1D02, G8-P1H08, G8-P2B05, G8-P2E06, R3G8-P2C10, R3G8-P2E04, R3G8-P4F05, R3G8-P5C03, R3G8-P5F02, R3G8-P5G08, G8-P1C01, or G8-P2C11.

25. The isolated ABP of any one of claims 16-24, wherein the ABP binds to any one or more of amino acid positions 1-5 of the restricted peptide AIFPGAVPAA.

26. The isolated ABP of claim 25, wherein the ABP binds to one or both of amino acid positions 4 and 5 of the restricted peptide AIFPGAVPAA.

27. The isolated ABP of any one of claims 16-26, wherein the ABP binds to any one or more of amino acid positions 45-60 of HLA subtype A*02:01.

28. The isolated ABP of any one of claims 16-27, wherein the ABP binds to any one or more of amino acid positions 56, 59, 60, 63, 64, 66, 67, 70, 73, 74, 132, 150-153, 155, 156, 158-160, 162-164, 166-168, 170, and 171 of HLA subtype A*02:01.

29. The isolated ABP of claim 5, wherein the HLA Class I molecule is HLA subtype A*01:01 and the HLA-restricted peptide comprises the sequence ASSLPTTMNY.

30. The isolated ABP of claim 29, wherein the HLA Class I molecule is HLA subtype A*01:01 and the HLA-restricted peptide consists of the sequence ASSLPTTMNY.

31. The isolated ABP of claim 29 or 30, wherein the ABP comprises a CDR-H3 comprising a sequence selected from: CARDQDTIFGVVITWFDPW, CARDKVYGDGFDPW, CAREDDSMDVW, CARDSSGLDPW, CARGVGNLDYW, CARDAHQYYDFWSGYYSGTYYYGMDVW, CAREQWPSYWYFDLW, CARDRGYSYGYFDYW, CARGSGDPNYYYYYGLDVW, CARDTGDHFDYW, CARAENGMDVW, CARDPGGYMDVW, CARDGDAFDIW, CARDMGDAFDIW, CAREEDGMDVW, CARDTGDHFDYW, CARGEYSSGFFFVGWFDLW, and CARETGDDAFDIW.

32. The isolated ABP of any one of claims 29-31, wherein the ABP comprises a CDR-L3 comprising a sequence selected from: CQQYFTTPYTF, CQQAEAFPYTF, CQQSYSTPITF, CQQSYIIPYTF, CHQTYSTPLTF, CQQAYSFPWTF, CQQGYSTPLTF, CQQANSFPRTF, CQQANSLPYTF, CQQSYSTPFTF, CQQSYSTPFTF, CQQSYGVPTF, CQQSYSTPLTF, CQQSYSTPLTF, CQQYYSYPWTF, CQQSYSTPFTF, CMQTLKTPLSF, and CQQSYSTPLTF.

33. The isolated ABP of any one of claims 29-32, wherein the ABP comprises the CDR-H3 and the CDR-L3 from the scFv designated R3G10-P1A07, R3G10-P1B07, R3G10-P1E12, R3G10-P1F06, R3G10-P1H01, R3G10-P1H08, R3G10-P2C04, R3G10-P2G11, R3G10-P3E04, R3G10-P4A02, R3G10-P4C05, R3G10-P4D04, R3G10-P4D10, R3G10-P4E07, R3G10-P4E12, R3G10-P4G06, R3G10-P5A08, or R3G10-P5C08.

34. The isolated ABP of any one of claims 29-33, wherein the ABP comprises all three heavy chain CDRs and all three light chain CDRs from the scFv designated R3G10-P1A07, R3G10-P1B07, R3G10-P1E12, R3G10-P1F06, R3G10-P1H01, R3G10-P1H08, R3G10-P2C04, R3G10-P2G11, R3G10-P3E04, R3G10-P4A02, R3G10-P4C05, R3G10-P4D04, R3G10-P4D10, R3G10-P4E07, R3G10-P4E12, R3G10-P4G06, R3G10-P5A08, or R3G10-P5C08.

35. The isolated ABP of any one of claims 29-34, wherein the ABP comprises a VH sequence selected from:
EVQLLESGGGLVKPGGSLRLSCAASGFTFSSYWMSWVRQAPGKGLEWVSG
ISARSGRTYYADSVKGRFTISRDDSKNTLYLQMNSLKTEDTAVYYCARDQ
DTIFGVVITWFDPWGQGTLVTVSS,
QVQLVQSGAEVKKPGASVKVSCKASGYTFTSYYMHWVRQAPGQGLEWMGI
IHPGGGTTSYAQKFQGRVTMTRDTSTSTVYMELSSLRSEDTAVYYCARDK
VYGDGFDPWGQGTLVTVSS,
QVQLVQSGAEVKKPGASVKVSCKASGYIFTGYYMHWVRQAPGQGLEWMGM
IGPSDGSTSYAQKFQGRVTMTRDTSTSTVYMELSSLRSEDTAVYYCARED
DSMDVWGKGTTVTVSS,
QVQLVQSGAEVKKPGASVKVSCKASGYTFIGYYMHWVRQAPGQGLEWMGM
IGPSDGSTSYAQKFQGRVTMTRDTSTSTVYMELSSLRSEDTAVYYCARDS
SGLDPWGQGTLVTVSS,
QVQLVQSGAEVKKPGASVKVSCKASGYTFTGYYMHWVRQAPGQGLEWMGM
IGPSDGSTSYAQKFQGRVTMTRDTSTSTVYMELSSLRSEDTAVYYCARGV
GNLDYWGQGTLVTVSS,
QVQLVQSGAEVKKPGASVKVSCKASGVTFSTSAISWVRQAPGQGLEWMGW
ISPYNGNTDYAQMLQGRVTMTRDTSTSTVYMELSSLRSEDTAVYYCARDA
HQYYDFWSGYYSGTYYYGMDVWGQGTTVTVSS,
QVQLVQSGAEVKKPGASVKVSCKASGGTFSNSIINWVRQAPGQGLEWMGW
MNPNSGNTNYAQKFQGRVTMTRDTSTSTVYMELSSLRSEDTAVYYCAREQ
WPSYWYFDLWGRGTLVTVSS,
QVQLVQSGAEVKKPGASVKVSCKASGGTFSTHDINWVRQAPGQGLEWMGV
INPSGGSAIYAQKFQGRVTMTRDTSTSTVYMELSSLRSEDTAVYYCARDR
GYSYGYFDYWGQGTLVTVSS,
QVQLVQSGAEVKKPGASVKVSCKASGNTFIGYYVHWVRQAPGQGLEWVGI
INPNGGSISYAQKFQGRVTMTRDTSTSTVYMELSSLRSEDTAVYYCARGS
GDPNYYYYYGLDVWGQGTTVTVSS,
QVQLVQSGAEVKKPGASVKVSCKASGYTLSYYYMHWVRQAPGQGLEWMGM
IGPSDGSTSYAQRFQGRVTMTRDTSTGTVYMELSSLRSEDTAVYYCARDT
GDHFDYWGQGTLVTVSS,
QVQLVQSGAEVKKPGASVKVSCKASGYTFTGYYMHWVRQAPGQGLEWMGI
IGPSDGSTTYAQKFQGRVTMTRDTSTSTVYMELSSLRSEDTAVYYCARAE
NGMDVWGQGTTVTVSS,
QVQLVQSGAEVKKPGASVKVSCKASGYTFTGYYVHWVRQAPGQGLEWMGI
IAPSDGSTNYAQKFQGRVTMTRDTSTSTVYMELSSLRSEDTAVYYCARDP
GGYMDVWGKGTTVTVSS,
QVQLVQSGAEVKKPGASVKVSCKASGYTFTGYYLHWVRQAPGQGLEWMGM
IGPSDGSTSYAQKFQGRVTMTRDTSTSTVYMELSSLRSEDTAVYYCARDG
DAFDIWGQGTMVTVSS,
QVQLVQSGAEVKKPGSSVKVSCKASGYTFTGYYMHWVRQAPGQGLEWMGR
ISPSDGSTTYAPKFQGRVTITADESTSTAYMELSSLRSEDTAVYYCARDM
GDAFDIWGQGTTVTVSS,
QVQLVQSGAEVKKPGASVKVSCKASGYTFTGYYMHWVRQAPGQGLEWMGM
IGPSDGSTSYAQRFQGRVTMTRDTSTSTVYMELLRSEDTAVYYCAREEDG
MDVWGQGTTVTVSS,
QVQLVQSGAEVKKPGASVKVSCKASGYTLSYYYMHWVRQAPGQGLEWMGM
IGPSDGSTSYAQRFQGRVTMTRDTSTGTVYMELSSLRSEDTAVYYCARDT
GDHFDYWGQGTLVTVSS,
QVQLVQSGAEVKKPGSSVKVSCKASGGTFNNFAISWVRQAPGQGLEWMGG
IIPIFDATNYAQKFQGRVTFTADESTSTAYMELSSLRSEDTAVYYCARGE
YSSGFFFVGWFDLWGRGTQVTVSS,
and
QVQLVQSGAEVKKPGASVKVSCKASGYNFTGYYMHWVRQAPGQGLEWMGI
IAPSDGSTNYAQKFQGRVTMTRDTSTSTVYMELSSLRSEDTAVYYCARET
GDDAFDIWGQGTMVTVSS.

36. The isolated ABP of any one of claims 29-35, wherein the ABP comprises a VL sequence selected:
DIQMTQSPSSLSASVGDRVTITCRASQGISNYLAWYQQKPGKAPKLLIYA
ASSLQGGVPSRFSGSGSGTDFTLTISSLQPEDFATYYCQQYFTTPYTFGQ
GTKLEIK,
DIQMTQSPSSLSASVGDRVTITCRASQSISRWLAWYQQKPGKAPKLLIFD
ASRLQSGVPSRFSGSGSGTDFTLTISSLQPEDFATYYCQQAEAFPYTFGQ
GTKVEIK,
DIQMTQSPSSLSASVGDRVTITCRASQSISSYLNWYQQKPGKAPKLLIYA
ASSLQSGVPSRFSGSGSGTDFTLTISSLQPEDFATYYCQQSYSTPITFGQ
GTRLEIK,
DIQMTQSPSSLSASVGDRVTITCRASQSISNYLNWYQQKPGKAPKLLIYK
ASSLESGVPSRFSGSGSGTDFTLTISSLQPEDFATYYCQQSYIIPYTFGQ
GTKLEIK,
DIQMTQSPSSLSASVGDRVTITCRASQSISNYLNWYQQKPGKAPKLLIYA
ASSLQSGVPSRFSGSGSGTDFTLTISSLQPEDFATYYCHQTYSTPLTFGQ
GTKVEIK,
DIQMTQSPSSLSASVGDRVTITCRASQGISNYLAWYQQKPGKAPKLLIYS
ASNLQSGVPSRFSGSGSGTDFTLTISSLQPEDFATYYCQQAYSFPWTFGQ
GTKVEIK,
DIQMTQSPSSLSASVGDRVTITCRASQNISSYLNWYQQKPGKAPKLLIYA
ASSLQSGVPSRFSGSGSGTDFTLTISSLQPEDFATYYCQQGYSTPLTFGQ
GTRLEIK,
DIQMTQSPSSLSASVGDRVTITCRASQDISRYLAWYQQKPGKAPKLLIYD
ASNLETGVPSRFSGSGSGTDFTLTISSLQPEDFATYYCQQANSFPRTFGQ
GTKVEIK,
DIQMTQSPSSLSASVGDRVTITCQASQDISNYLNWYQQKPGKAPKLLIYA
ASNLQSGVPSRFSGSGSGTDFTLTISSLQPEDFATYYCQQANSLPYTFGQ
GTKVEIK,
DIQMTQSPSSLSASVGDRVTITCRASQSISSYLNWYQQKPGKAPKLLIYA
ASTLQNGVPSRFSGSGSGTDFTLTISSLQPEDFATYYCQQSYSTPFTFGP
GTKVDIK,
DIQMTQSPSSLSASVGDRVTITCRASQRISSYLNWYQQKPGKAPKLLIYS
ASTLQSGVPSRFSGSGSGTDFTLTISSLQPEDFATYYCQQSYSTPFTFGP
GTKVDIK,
DIQMTQSPSSLSASVGDRVTITCRASQSISSYLAWYQQKPGKAPKLLIYD
ASKLETGVPSRFSGSGSGTDFTLTISSLQPEDFATYYCQQSYGVPTFGQG
TKLEIK,
DIQMTQSPSSLSASVGDRVTITCRASQGISSWLAWYQQKPGKAPKLLIYD
ASNLETGVPSRFSGSGSGTDFTLTISSLQPEDFATYYCQQSYSTPLTFGG
GTKVEIK,
DIQMTQSPSSLSASVGDRVTITCRASQSISSYLNWYQQKPGKAPKLLIYA
ASSLQSGVPSRFSGSGSGTDFTLTISSLQPEDFATYYCQQSYSTPLTFGG
GTKVEIK,
DIQMTQSPSSLSASVGDRVTITCRASQGISTYLAWYQQKPGKAPKLLIYD
ASSLQSGVPSRFSGSGSGTDFTLTISSLQPEDFATYYCQQYYSYPWTFGQ
GTRLEIK,
DIQMTQSPSSLSASVGDRVTITCRASQSISSYLNWYQQKPGKAPKLLIYA
ASTLQNGVPSRFSGSGSGTDFTLTISSLQPEDFATYYCQQSYSTPFTFGP
GTKVDIK,
DIVMTQSPLSLPVTPGEPASISCRSSQSLLHSNGYNYLDWYLQKPGQSPQ
LLIYLGSNRASGVPDRFSGSGSGTDFTLKISRVEAEDVGVYYCMQTLKTP
LSFGGGTKVEIK,
and
DIQMTQSPSSLSASVGDRVTITCRASQSISSYLNWYQQKPGKAPKLLIYA
ASSLQSGVPSRFSGSGSGTDFTLTISSLQPEDFATYYCQQSYSTPLTFGG
GTKVEIK.

37. The isolated ABP of any one of claims 29-36, wherein the ABP comprises the VH sequence and VL sequence from the scFv designated R3G10-P1A07, R3G10-P1B07, R3G10-P1E12, R3G10-P1F06, R3G10-P1H01, R3G10-P1H08, R3G10-P2C04, R3G10-P2G11, R3G10-P3E04, R3G10-P4A02, R3G10-P4C05, R3G10-P4D04, R3G10-P4D10, R3G10-P4E07, R3G10-P4E12, R3G10-P4G06, R3G10-P5A08, or R3G10-P5C08.

38. The isolated ABP of any one of claims 29-37, wherein the ABP binds to any one or more of amino acid positions 4, 6, and 7 of the restricted peptide ASSLPTTMNY.

39. The isolated ABP of any one of claims 29-38, wherein the ABP binds to any one or more of amino acid positions 49-56 of HLA subtype A*01:01.

40. An isolated antigen binding protein (ABP) that specifically binds to a human leukocyte antigen (HLA)-PEPTIDE target, wherein the HLA-PEPTIDE target comprises an HLA-restricted peptide complexed with an HLA Class I molecule, wherein the HLA-restricted peptide is located in in the peptide binding groove of an α1/α2 heterodimer portion of the HLA Class I molecule, and wherein the HLA-PEPTIDE target is selected from Table A.

41. The isolated ABP of claim 40, wherein the HLA-restricted peptide is between about 5-15 amino acids in length.

42. The isolated ABP of claim 41, wherein the HLA-restricted peptide is between about 8-12 amino acids in length.

43. The isolated ABP of any of claims 40-42, wherein the ABP comprises an antibody or antigen-binding fragment thereof.

44. The antigen binding protein of any of the above claims, wherein the antigen binding protein is linked to a scaffold, optionally wherein the scaffold comprises serum albumin or Fc, optionally wherein Fc is human Fc and is an IgG (IgG1, IgG2, IgG3, IgG4), an IgA (IgA1, IgA2), an IgD, an IgE, or an IgM isotype Fc.

45. The antigen binding protein of any of the above claims, wherein the antigen binding protein is linked to a scaffold via a linker, optionally wherein the linker is a peptide linker, optionally wherein the peptide linker is a hinge region of a human antibody.

46. The antigen binding protein of any of the above claims, wherein the antigen binding protein comprises an Fv fragment, a Fab fragment, a F(ab′)₂ fragment, a Fab′ fragment, an scFv fragment, an scFv-Fc fragment, and/or a single-domain antibody or antigen binding fragment thereof.

47. The antigen binding protein of any of the above claims, wherein the antigen binding protein comprises an scFv fragment.

48. The antigen binding protein of any of the above claims, wherein the antigen binding protein comprises one or more antibody complementarity determining regions (CDRs), optionally six antibody CDRs.

49. The antigen binding protein of any of the above claims, wherein the antigen binding protein comprises an antibody.

50. The antigen binding protein of any of the above claims, wherein the antigen binding protein is a monoclonal antibody.

51. The antigen binding protein of any of the above claims, wherein the antigen binding protein is a humanized, human, or chimeric antibody.

52. The antigen binding protein of any of the above claims, wherein the antigen binding protein is multispecific, optionally bispecific.

53. The antigen binding protein of any of the above claims, wherein the antigen binding protein binds greater than one antigen or greater than one epitope on a single antigen.

54. The antigen binding protein of any of the above claims, wherein the antigen binding protein comprises a heavy chain constant region of a class selected from IgG, IgA, IgD, IgE, and IgM.

55. The antigen binding protein of any one of the above claims, wherein the antigen binding protein comprises a heavy chain constant region of the class human IgG and a subclass selected from IgG1, IgG4, IgG2, and IgG3.

56. The antigen binding protein of any one of the above claims, wherein the antigen binding protein comprises a modification that extends half-life.

57. The antigen binding protein of any one of the above claims, wherein the antigen binding protein comprises a modified Fc, optionally wherein the modified Fc comprises one or more mutations that extend half-life, optionally wherein the one or more mutations that extend half-life is YTE.

58. The isolated ABP of any one of the preceding claims, wherein the ABP comprises a T cell receptor (TCR) or an antigen-binding portion thereof.

59. The antigen binding protein of claim 58, wherein the TCR or antigen-binding portion thereof comprises a TCR variable region.

60. The antigen binding protein of claim 58 or 59, wherein the TCR or antigen-binding portion thereof comprises one or more TCR complementarity determining regions (CDRs).

61. The antigen binding protein of any one of claims 58-60, wherein the TCR comprises an alpha chain and a beta chain.

62. The antigen binding protein of any one of claims 58-61, wherein the TCR comprises a gamma chain and a delta chain.

63. The antigen binding protein of any of the above claims, wherein the antigen binding protein is a portion of a chimeric antigen receptor (CAR) comprising: an extracellular portion comprising the antigen binding protein; and an intracellular signaling domain.

64. The antigen binding protein of claim 63, wherein the antigen binding protein comprises an scFv and the intracellular signaling domain comprises an ITAM.

65. The antigen binding protein of claim 63 or 64, wherein the intracellular signaling domain comprises a signaling domain of a zeta chain of a CD3-zeta (CD3) chain.

66. The antigen binding protein of any of claims 63-65, further comprising a transmembrane domain linking the extracellular domain and the intracellular signaling domain.

67. The antigen binding protein of claim 66, wherein the transmembrane domain comprises a transmembrane portion of CD28.

68. The antigen binding protein of any of claims 63-67, further comprising an intracellular signaling domain of a T cell costimulatory molecule.

69. The antigen binding protein of claim 68, wherein the T cell costimulatory molecule is CD28, 4-1BB, OX-40, ICOS, or any combination thereof.

70. The isolated ABP of any one of claims 58-69, wherein the HLA Class I molecule is HLA subtype A*01:01 and the HLA-restricted peptide comprises the sequence ASSLPTTMNY.

71. The isolated ABP of claim 70, wherein the HLA Class I molecule is HLA subtype A*01:01 and the HLA-restricted peptide consists of the sequence ASSLPTTMNY.

72. The isolated ABP of claim 70 or 71, wherein the ABP comprises a TCR alpha CDR3 sequence selected from Table 15.

73. The isolated ABP of any one of claims 70-72, wherein the ABP comprises a TCR beta CDR3 sequence selected from Table 15.

74. The isolated ABP of any one of claims 70-73, wherein the ABP comprises an alpha CDR3 and a beta CDR3 sequence from any one of TCR clonotype ID #s: 1-344.

75. The isolated ABP of any one of claims 70-74, wherein the ABP comprises a TCR alpha variable (TRAV) amino acid sequence, a TCR alpha joining (TRAJ) amino acid sequence, a TCR beta variable (TRBV) amino acid sequence, a TCR beta diversity (TRBD) amino acid sequence, and a TCR beta joining (TRBJ) amino acid sequence, wherein each of the TRAV, TRAJ, TRBV, TRBD, and TRBJ amino acid sequences are at least 95%, 96%, 97%, 98%, 99%, or 100% identical to the corresponding TRAV, TRAJ, TRBV, TRBD, and TRBJ amino acid sequences for any one of the TCR clonotypes selected from TCR clonotype ID #s: 1-344.

76. The isolated ABP of any one of claims 70-75, wherein the ABP comprises a TCR alpha constant (TRAC) amino acid sequence.

77. The isolated ABP of any one of claims 70-76, wherein the ABP comprises a TCR beta constant (TRBC) amino acid sequence.

78. The isolated ABP of any one of claims 70-77, wherein the ABP comprises a TCR alpha VJ sequence having at least 95%, 96%, 97%, 98%, 99%, or 100% identity to an alpha VJ sequence selected from Table 16.

79. The isolated ABP of any one of claims 70-78, wherein the ABP comprises a TCR beta V(D)J sequence having at least 95%, 96%, 97%, 98%, 99%, or 100% identity to a beta V(D)J sequence selected from Table 16.

80. The isolated ABP of any one of claims 70-79, wherein the ABP comprises a TCR alpha VJ amino acid sequence and a TCR beta V(D)J amino acid sequence, wherein each of the TCR alpha VJ and the TCR beta V(D)J amino acid sequences are at least 95%, 96%, 97%, 98%, 99%, or 100% identical to the corresponding TCR alpha VJ and TCR beta V(D)J amino acid sequences for any one of the TCR clonotypes selected from TCR clonotype ID #s: 1-344.

81. The isolated ABP of any one of claims 58-69, wherein the HLA Class I molecule is HLA subtype A*01:01 and the HLA-restricted peptide comprises the sequence HSEVGLPVY.

82. The isolated ABP of claim 81, wherein the HLA Class I molecule is HLA subtype A*01:01 and the HLA-restricted peptide consists of the sequence HSEVGLPVY.

83. The isolated ABP of claim 81 or 82, wherein the ABP comprises a TCR alpha CDR3 sequence selected from Table 18.

84. The isolated ABP of any one of claims 81-83, wherein the ABP comprises a TCR beta CDR3 sequence selected from Table 18.

85. The isolated ABP of any one of claims 81-84, wherein the ABP comprises an alpha CDR3 and a beta CDR3 sequence from any one of TCR clonotype ID #s: 345-447.

86. The isolated ABP of any one of claims 81-85, wherein the ABP comprises a TCR alpha variable (TRAV) amino acid sequence, a TCR alpha joining (TRAJ) amino acid sequence, a TCR beta variable (TRBV) amino acid sequence, a TCR beta diversity (TRBD) amino acid sequence, and a TCR beta joining (TRBJ) amino acid sequence, wherein each of the TRAV, TRAJ, TRBV, TRBD, and TRBJ amino acid sequences are at least 95%, 96%, 97%, 98%, 99%, or 100% identical to the corresponding TRAV, TRAJ, TRBV, TRBD, and TRBJ amino acid sequences for any one of the TCR clonotypes selected from TCR clonotype ID #s: 345-447.

87. The isolated ABP of any one of claims 81-86, wherein the ABP comprises a TCR alpha constant (TRAC) amino acid sequence.

88. The isolated ABP of any one of claims 81-87, wherein the ABP comprises a TCR beta constant (TRBC) amino acid sequence.

89. The isolated ABP of any one of claims 81-88, wherein the ABP comprises a TCR alpha VJ sequence having at least 95%, 96%, 97%, 98%, 99%, or 100% identity to an alpha VJ sequence selected from Table 19.

90. The isolated ABP of any one of claims 81-89, wherein the ABP comprises a TCR beta V(D)J sequence having at least 95%, 96%, 97%, 98%, 99%, or 100% identity to a beta V(D)J sequence selected from Table 19.

91. The isolated ABP of any one of claims 81-90, wherein the ABP comprises a TCR alpha VJ amino acid sequence and a TCR beta V(D)J amino acid sequence, wherein each of the TCR alpha VJ and the TCR beta V(D)J amino acid sequences are at least 95%, 96%, 97%, 98%, 99%, or 100% identical to the corresponding TCR alpha VJ and TCR beta V(D)J amino acid sequences for any one of the TCR clonotypes selected from TCR clonotype ID #s: 345-447.

92. An isolated HLA-PEPTIDE target, wherein the HLA-PEPTIDE target comprises an HLA-restricted peptide complexed with an HLA Class I molecule, wherein the HLA-restricted peptide is located in in the peptide binding groove of an α1/α2 heterodimer portion of the HLA Class I molecule, and wherein the HLA-PEPTIDE target is selected from Table A.

93. The isolated HLA-PEPTIDE target of claim 92, wherein
a. the HLA Class I molecule is HLA subtype B*35:01 and the HLA-restricted peptide comprises the sequence EVDPIGHVY,
b. the HLA Class I molecule is HLA subtype A*02:01 and the HLA-restricted peptide comprises the sequence AIFPGAVPAA, or
the HLA Class I molecule is HLA subtype A*01:01 and the HLA-restricted peptide comprises the sequence ASSLPTTMNY.

94. The isolated HLA-PEPTIDE target of claim 93, wherein
a. the HLA Class I molecule is HLA subtype B*35:01 and the HLA-restricted peptide consists of the sequence EVDPIGHVY,
b. the HLA Class I molecule is HLA subtype A*02:01 and the HLA-restricted peptide consists of the sequence AIFPGAVPAA, or
c. the HLA Class I molecule is HLA subtype A*01:01 and the HLA-restricted peptide consists of the sequence ASSLPTTMNY.

95. The isolated HLA-PEPTIDE target of any of claims 92-94, wherein the HLA-restricted peptide is between about 5-15 amino acids in length.

96. The isolated HLA-PEPTIDE target of any of claims 92-95, wherein the HLA-restricted peptide is between about 8-12 amino acids in length.

97. The isolated HLA-PEPTIDE target of any of claims 92-96, wherein the association of the HLA subtype with the restricted peptide stabilizes non-covalent association of the β₂-microglobulin subunit of the HLA subtype with the α-subunit of the HLA subtype.

98. The isolated HLA-PEPTIDE target of claim 97, wherein the stabilized association of the β₂-microglobulin subunit of the HLA subtype with the α-subunit of the HLA subtype is demonstrated by conditional peptide exchange.

99. The isolated HLA-PEPTIDE target of any of the preceding claims, further comprising an affinity tag.

100. The isolated HLA-PEPTIDE target of claim 99, wherein the affinity tag is a biotin tag.

101. The isolated HLA-PEPTIDE target of any of the above claims, wherein the isolated HLA-PEPTIDE target is complexed with a detectable label.

102. The isolated HLA-PEPTIDE target of claim 101, wherein the detectable label comprises a β₂-microglobulin binding molecule.

103. The isolated HLA-PEPTIDE target of claim 102, wherein the β₂-microglobulin binding molecule is a labeled antibody.

104. The isolated HLA-PEPTIDE target of claim 103, wherein the labeled antibody is a fluorochrome-labeled antibody.

105. A composition comprising an HLA-PEPTIDE target of any of the preceding claims attached to a solid support.

106. The composition of claim 105, wherein the solid support comprises a bead, well, membrane, tube, column, plate, sepharose, magnetic bead, or chip.

107. The composition of claim 105 or 106, wherein the HLA-PEPTIDE target comprises a first member of an affinity binding pair and the solid support comprises a second member of the affinity binding pair.

108. The composition of claim 107, wherein the first member is streptavidin and the second member is biotin.

109. A reaction mixture comprising
a. an isolated and purified α-subunit of an HLA subtype from an HLA-PEPTIDE target as described in Table A;
a. an isolated and purified β2-microglobulin subunit of the HLA subtype;
b. an isolated and purified restricted peptide from the HLA-PEPTIDE target as described in Table A; and
c. a reaction buffer.

110. A reaction mixture comprising
a. an isolated HLA-PEPTIDE target of any of the preceding claims; and
b. a plurality of T-cells isolated from a human subject.

111. The reaction mixture of claim 110, wherein the T-cells are CD8+ T-cells.

112. An isolated polynucleotide comprising a first nucleic acid sequence encoding an HLA-restricted peptide as defined in any one of claims 92-94, operably linked to a promoter, and a second nucleic acid sequence encoding an HLA subtype as defined in any one of claims 92-94, wherein the second nucleic acid is operably linked to the same or different promoter as the first nucleic acid sequence, and wherein the encoded peptide and encoded HLA subtype form an HLA/peptide complex as defined in any one of claims 92-94.

113. A kit for expressing a stable HLA-PEPTIDE target of claim, comprising a first construct comprising a first nucleic acid sequence encoding an HLA-restricted peptide as defined in any one of claims 92-94 operably linked to a promoter; and instructions for use in expressing the stable HLA-PEPTIDE complex.

114. The kit of claim 113, wherein the first construct further comprises a second nucleic acid sequence encoding an HLA subtype as defined in any one of claims 92-94.

115. The kit of claim 114, wherein the second nucleic acid sequence is operably linked to the same or a different promoter.

116. The kit of claim 113, further comprising a second construct comprising a second nucleic acid sequence encoding an HLA subtype as defined in any one of claims 92-94.

117. The kit of any of claims 113-116, wherein one or both of the first and second constructs are lentiviral vector constructs.

118. A host cell comprising a heterologous HLA-PEPTIDE target of any one of claims 92-94.

119. A host cell which expresses an HLA subtype as defined by any one of the targets in Table A.

120. A host cell comprising a polynucleotide encoding an HLA-restricted peptide as described in Table A, e.g., a polynucleotide encoding an HLA-restricted peptide described in any one of claims 92-94.

121. The host cell of claim 120, which does not comprise endogenous MHC.

122. The host cell of claim 121, comprising an exogenous HLA.

123. The host cell of claim 122, which is a K562 or A375 cell.

124. The host cell of any of the preceding claims, which is a cultured cell from a tumor cell line.

125. The host cell of claim 124, wherein the tumor cell line expresses an HLA subtype as defined by any one of the targets in Table A.

126. The host cell of claim 124, wherein the tumor cell line is selected from the group consisting of HCC-1599, NCI-H510A, A375, LN229, NCI-H358, ZR-75-1, MS751, 0E19, MOR, BV173, MCF-7, NCI-H82, Colo829, and NCI-H146.

127. A cell culture system comprising
a. a host cell of any one of the preceding claims, and
b. a cell culture medium.

128. The cell culture system of claim 127, wherein the host cell expresses an HLA subtype as defined by any one of the targets in Table A, and wherein the cell culture medium comprises a restricted peptide as defined by the target in Table A.

129. The host cell of claim 127, wherein the host cell is a K562 cell which comprises an exogenous HLA, wherein the exogenous HLA is an HLA subtype as defined by any one of the targets in Table A, and wherein the cell culture medium comprises a restricted peptide as defined by the target in Table A.

130. The ABP of any of the above claims, wherein the antigen binding protein binds to the HLA-PEPTIDE target through a contact point with the HLA Class I molecule and through a contact point with the HLA-restricted peptide of the HLA-PEPTIDE target.

131. The ABP of any one of claim 12, 25, 27, 38, 39, or 130, wherein the binding of the ABP to the amino acid positions on the restricted peptide or HLA subtype, or the contact points are determined via positional scanning, hydrogen-deuterium exchange, or protein crystallography.

132. The antigen binding protein of any of the above claims for use as a medicament.

133. The antigen binding protein of any of the above claims for use in treatment of cancer, optionally wherein the cancer expresses or is predicted to express the HLA-PEPTIDE target.

134. The antigen binding protein of any of the above claims for use in treatment of cancer, wherein the cancer is selected from a solid tumor and a hematological tumor.

135. An ABP which is a conservatively modified variant of the ABP of any one of the preceding claims.

136. An antigen binding protein (ABP) that competes for binding with the antigen binding protein of any of the above claims.

137. An antigen binding protein (ABP) that binds the same HLA-PEPTIDE epitope bound by the antigen binding protein of any of the above claims.

138. An engineered cell expressing a receptor comprising the antigen binding protein of any one of the preceding claims.

139. The engineered cell of claim 138, which is a T cell, optionally a cytotoxic T cell (CTL).

140. The engineered cell of claim 138 or 139, wherein the antigen binding protein is expressed from a heterologous promoter.

141. An isolated polynucleotide or set of polynucleotides encoding the antigen binding protein of any of the above claims or an antigen-binding portion thereof.

142. An isolated polynucleotide or set of polynucleotides encoding the HLA/peptide targets of any of the above claims.

143. A vector or set of vectors comprising the polynucleotide or set of polynucleotides of claim 141 or 142.

144. A host cell comprising the polynucleotide or set of polynucleotides of any of the preceding claims or the vector or set of vectors of claim 143, optionally wherein the host cell is CHO or HEK293, or optionally wherein the host cell is a T cell.

145. A method of producing an antigen binding protein comprising expressing the antigen binding protein with the host cell of claim 144 and isolating the expressed antigen binding protein.

146. A pharmaceutical composition comprising the antigen binding protein of any of the preceding claims and a pharmaceutically acceptable excipient.

147. A method of treating cancer in a subject, comprising administering to the subject an effective amount of the antigen binding protein of any of the preceding claims or a pharmaceutical composition of claim 146, optionally wherein the cancer is selected from a solid tumor and a hematological tumor.

148. The method of claim 147, wherein the cancer expresses or is predicted to express the HLA-PEPTIDE target.

149. A kit comprising the antigen binding protein of any of the preceding claims or a pharmaceutical composition of claim 146 and instructions for use.

150. A composition comprising at least one HLA-PEPTIDE target of claim 92 and an adjuvant.

151. A composition comprising at least one HLA-PEPTIDE target of claim 92 and a pharmaceutically acceptable excipient.

152. A composition comprising an amino acid sequence comprising a polypeptide of at least one HLA-PEPTIDE target disclosed in Table A, optionally the amino acid sequence consisting essentially of or consisting of the polypeptide.

153. A virus comprising the isolated polynucleotide or set of polynucleotides of any of the preceding claims.

154. The virus of claim 153, wherein the virus is a filamentous phage.

155. A yeast cell comprising the isolated polynucleotide or set of polynucleotides of any of the preceding claims.

156. A method of identifying an antigen binding protein of any of the preceding claims, comprising providing at least one HLA-PEPTIDE target listed in Table A; and binding the at least one target with the antigen binding protein, thereby identifying the antigen binding protein.

157. The method of claim 156, wherein the antigen binding protein is present in a phage display library comprising a plurality of distinct antigen binding proteins.

158. The method of claim 157, wherein the phage display library is substantially free of antigen binding proteins that non-specifically bind the HLA of the HLA-PEPTIDE target.

159. The method of claim 156, wherein the antigen binding protein is present in a TCR library comprising a plurality of distinct TCRs or antigen binding fragments thereof.

160. The method of any one of claims 156-159, wherein the binding step is performed more than once, optionally at least three times.

161. The method of any one of claims 156-160, further comprising contacting the antigen binding protein with one or more peptide-HLA complexes that are distinct from the HLA-PEPTIDE target to determine if the antigen binding protein selectively binds the HLA-PEPTIDE target, optionally wherein selectivity is determined by measuring binding affinity of the antigen binding protein to soluble target HLA-PEPTIDE complexes versus soluble HLA-PEPTIDE complexes that are distinct from target complexes, optionally wherein selectivity is determined by measuring binding affinity of the antigen binding protein to target HLA-PEPTIDE complexes expressed on the surface of one or more cells versus HLA-PEPTIDE complexes that are distinct from target complexes expressed on the surface of one or more cells.

162. A method of identifying an antigen binding protein of any of the preceding claims, comprising obtaining at least one HLA-PEPTIDE target listed in Table A; administering the HLA-PEPTIDE target to a subject, optionally in combination with an adjuvant; and isolating the antigen binding protein from the subject.

163. The method of claim 162, wherein isolating the antigen binding protein comprises screening the serum of the subject to identify the antigen binding protein.

164. The method of claim 162, further comprising contacting the antigen binding protein with one or more peptide-HLA complexes that are distinct from the HLA-PEPTIDE target to determine if the antigen binding protein selectively binds to the HLA-PEPTIDE target, optionally wherein selectivity is determined by measuring binding affinity of the antigen binding protein to soluble target HLA-PEPTIDE complexes versus soluble HLA-PEPTIDE complexes that are distinct from target complexes, optionally wherein selectivity is determined by measuring binding affinity of the antigen binding protein to target HLA-PEPTIDE complexes expressed on the surface of one or more cells versus HLA-PEPTIDE complexes that are distinct from target complexes expressed on the surface of one or more cells.

165. The method of claim 162, wherein the subject is a mouse, a rabbit, or a llama.

166. The method of claim 162, wherein isolating the antigen binding protein comprises isolating a B cell from the subject that expresses the antigen binding protein and optionally directly cloning sequences encoding the antigen binding protein from the isolated B cell.

167. The method of claim 166, further comprising creating a hybridoma using the B cell.

168. The method of claim 166, further comprising cloning CDRs from the B cell.

169. The method of claim 166, further comprising immortalizing the B cell, optionally via EBV transformation.

170. The method of claim 166, further comprising creating a library that comprises the antigen binding protein of the B cell, optionally wherein the library is phage display or yeast display.

171. The method of claim 162, further comprising humanizing the antigen binding protein.

172. A method of identifying an antigen binding protein of any of the preceding claims, comprising obtaining a cell comprising the antigen binding protein; contacting the cell with an HLA-multimer comprising at least one HLA-PEPTIDE target listed in Table A; and
identifying the antigen binding protein via binding between the HLA-multimer and the antigen binding protein.

173. A method of identifying an antigen binding protein of any of the preceding claims, comprising obtaining one or more cells comprising the antigen binding protein; activating the one or more cells with at least one HLA-PEPTIDE target listed in Table A presented on a natural or an artificial antigen presenting cell (APC); and identifying the antigen binding protein via selection of one or more cells activated by interaction with at least one HLA-PEPTIDE target listed in Table A.

174. The method of claim 172 or 173, wherein the cell is a T cell, optionally a CTL.

175. The method of claim 172 or 173, further comprising isolating the cell, optionally using flow cytometry, magnetic separation, or single cell separation.

176. The method of claim 175, further comprising sequencing the antigen binding protein.

177. A method of identifying an antigen binding protein of any of the preceding claims, comprising providing at least one HLA-PEPTIDE target listed in Table A; and identifying the antigen binding protein using the target.

The application's sequence listing, which the Patent Office published only in electronic form, follows.

SEQUENCE LISTING (102842 sequences)

SEQ ID NO: 1 - protein, 9 aa, Homo sapiens
  Table A; Target 1; HLA-C*16:01; ABCB5; ENSG00000004846; TAA
AAACSRMVI

SEQ ID NO: 2 - protein, 9 aa, Homo sapiens
  Table A; Target 2; HLA-C*16:02; ABCB5; ENSG00000004846; TAA
AAACSRMVI

SEQ ID NO: 3 - protein, 8 aa, Homo sapiens
  Table A; Target 3; HLA-B*08:01; ABCB5; ENSG00000004846; TAA
AACSRMVI

SEQ ID NO: 4 - protein, 8 aa, Homo sapiens
  Table A; Target 4; HLA-C*16:01; ABCB5; ENSG00000004846; TAA
AACSRMVI

SEQ ID NO: 5 - protein, 8 aa, Homo sapiens
  Table A; Target 5; HLA-A*02:03; ABCB5; ENSG00000004846; TAA
AAFHIFQV

SEQ ID NO: 6 - protein, 8 aa, Homo sapiens
  Table A; Target 6; HLA-A*02:04; ABCB5; ENSG00000004846; TAA
AAFHIFQV

SEQ ID NO: 7 - protein, 8 aa, Homo sapiens
  Table A; Target 7; HLA-B*13:02; ABCB5; ENSG00000004846; TAA
AAFHIFQV

SEQ ID NO: 8 - protein, 8 aa, Homo sapiens
  Table A; Target 8; HLA-B*51:01; ABCB5; ENSG00000004846; TAA
AAFHIFQV

SEQ ID NO: 9 - protein, 8 aa, Homo sapiens
  Table A; Target 9; HLA-C*02:02; ABCB5; ENSG00000004846; TAA
AAFHIFQV

SEQ ID NO: 10 - protein, 8 aa, Homo sapiens
  Table A; Target 10; HLA-C*12:03; ABCB5; ENSG00000004846; TAA
AAFHIFQV

SEQ ID NO: 11 - protein, 9 aa, Homo sapiens
  Table A; Target 11; HLA-A*02:04; ABCB5; ENSG00000004846; TAA
AAFHIFQVI

SEQ ID NO: 12 - protein, 9 aa, Homo sapiens
  Table A; Target 12; HLA-A*02:07; ABCB5; ENSG00000004846; TAA
AAFHIFQVI

SEQ ID NO: 13 - protein, 9 aa, Homo sapiens
  Table A; Target 13; HLA-A*68:02; ABCB5; ENSG00000004846; TAA
AAFHIFQVI

SEQ ID NO: 14 - protein, 9 aa, Homo sapiens
  Table A; Target 14; HLA-B*13:02; ABCB5; ENSG00000004846; TAA
AAFHIFQVI

SEQ ID NO: 15 - protein, 9 aa, Homo sapiens
  Table A; Target 15; HLA-B*51:01; ABCB5; ENSG00000004846; TAA
AAFHIFQVI

SEQ ID NO: 16 - protein, 9 aa, Homo sapiens
  Table A; Target 16; HLA-B*54:01; ABCB5; ENSG00000004846; TAA
AAFHIFQVI

SEQ ID NO: 17 - protein, 9 aa, Homo sapiens
  Table A; Target 17; HLA-B*56:01; ABCB5; ENSG00000004846; TAA
AAFHIFQVI

SEQ ID NO: 18 - protein, 9 aa, Homo sapiens
  Table A; Target 18; HLA-B*57:01; ABCB5; ENSG00000004846; TAA
AAFHIFQVI

SEQ ID NO: 19 - protein, 9 aa, Homo sapiens
  Table A; Target 19; HLA-C*02:02; ABCB5; ENSG00000004846; TAA
AAFHIFQVI

SEQ ID NO: 20 - protein, 9 aa, Homo sapiens
  Table A; Target 20; HLA-C*12:03; ABCB5; ENSG00000004846; TAA
AAFHIFQVI

SEQ ID NO: 21 - protein, 9 aa, Homo sapiens
  Table A; Target 21; HLA-A*01:01; ABCB5; ENSG00000004846; TAA
AAGFRFGAY

SEQ ID NO: 22 - protein, 9 aa, Homo sapiens
  Table A; Target 22; HLA-A*30:02; ABCB5; ENSG00000004846; TAA
AAGFRFGAY

SEQ ID NO: 23 - protein, 9 aa, Homo sapiens
  Table A; Target 23; HLA-C*02:02; ABCB5; ENSG00000004846; TAA
AAGFRFGAY

SEQ ID NO: 24 - protein, 9 aa, Homo sapiens
  Table A; Target 24; HLA-C*16:01; ABCB5; ENSG00000004846; TAA
AAGFRFGAY

SEQ ID NO: 25 - protein, 9 aa, Homo sapiens
  Table A; Target 25; HLA-A*03:01; ABCB5; ENSG00000004846; TAA
AAMTGFANK

SEQ ID NO: 26 - protein, 9 aa, Homo sapiens
  Table A; Target 26; HLA-A*03:02; ABCB5; ENSG00000004846; TAA
AAMTGFANK

SEQ ID NO: 27 - protein, 9 aa, Homo sapiens
  Table A; Target 27; HLA-A*11:01; ABCB5; ENSG00000004846; TAA
AAMTGFANK

SEQ ID NO: 28 - protein, 9 aa, Homo sapiens
  Table A; Target 28; HLA-A*31:01; ABCB5; ENSG00000004846; TAA
AAMTGFANK

SEQ ID NO: 29 - protein, 9 aa, Homo sapiens
  Table A; Target 29; HLA-A*33:01; ABCB5; ENSG00000004846; TAA
AAMTGFANK

SEQ ID NO: 30 - protein, 9 aa, Homo sapiens
  Table A; Target 30; HLA-A*33:03; ABCB5; ENSG00000004846; TAA
AAMTGFANK

SEQ ID NO: 31 - protein, 9 aa, Homo sapiens
  Table A; Target 31; HLA-A*68:01; ABCB5; ENSG00000004846; TAA
AAMTGFANK

SEQ ID NO: 32 - protein, 9 aa, Homo sapiens
  Table A; Target 32; HLA-B*57:01; ABCB5; ENSG00000004846; TAA
AAMTGFANK

SEQ ID NO: 33 - protein, 9 aa, Homo sapiens
  Table A; Target 33; HLA-B*58:01; ABCB5; ENSG00000004846; TAA
AAMTGFANK

SEQ ID NO: 34 - protein, 9 aa, Homo sapiens
  Table A; Target 34; HLA-C*01:02; ABCB5; ENSG00000004846; TAA
AAMTGFANK

SEQ ID NO: 35 - protein, 9 aa, Homo sapiens
  Table A; Target 35; HLA-C*07:06; ABCB5; ENSG00000004846; TAA
AAMTGFANK

SEQ ID NO: 36 - protein, 10 aa, Homo sapiens
  Table A; Target 36; HLA-A*25:01; ABCB5; ENSG00000004846; TAA
AANAANIHSF

SEQ ID NO: 37 - protein, 10 aa, Homo sapiens
  Table A; Target 37; HLA-A*26:01; ABCB5; ENSG00000004846; TAA
AANAANIHSF

SEQ ID NO: 38 - protein, 10 aa, Homo sapiens
  Table A; Target 38; HLA-A*30:02; ABCB5; ENSG00000004846; TAA
AANAANIHSF

SEQ ID NO: 39 - protein, 10 aa, Homo sapiens
  Table A; Target 39; HLA-A*32:01; ABCB5; ENSG00000004846; TAA
AANAANIHSF

SEQ ID NO: 40 - protein, 10 aa, Homo sapiens
  Table A; Target 40; HLA-B*15:01; ABCB5; ENSG00000004846; TAA
AANAANIHSF

SEQ ID NO: 41 - protein, 10 aa, Homo sapiens
  Table A; Target 41; HLA-B*44:02; ABCB5; ENSG00000004846; TAA
AANAANIHSF

SEQ ID NO: 42 - protein, 10 aa, Homo sapiens
  Table A; Target 42; HLA-B*44:03; ABCB5; ENSG00000004846; TAA
AANAANIHSF

SEQ ID NO: 43 - protein, 10 aa, Homo sapiens
  Table A; Target 43; HLA-B*46:01; ABCB5; ENSG00000004846; TAA
AANAANIHSF

SEQ ID NO: 44 - protein, 10 aa, Homo sapiens
  Table A; Target 44; HLA-B*57:01; ABCB5; ENSG00000004846; TAA
AANAANIHSF

SEQ ID NO: 45 - protein, 10 aa, Homo sapiens
  Table A; Target 45; HLA-B*58:01; ABCB5; ENSG00000004846; TAA
AANAANIHSF

SEQ ID NO: 46 - protein, 10 aa, Homo sapiens
  Table A; Target 46; HLA-C*02:02; ABCB5; ENSG00000004846; TAA
AANAANIHSF

SEQ ID NO: 47 - protein, 10 aa, Homo sapiens
  Table A; Target 47; HLA-C*03:04; ABCB5; ENSG00000004846; TAA
AANAANIHSF

SEQ ID NO: 48 - protein, 10 aa, Homo sapiens
  Table A; Target 48; HLA-C*16:02; ABCB5; ENSG00000004846; TAA
AANAANIHSF

SEQ ID NO: 49 - protein, 10 aa, Homo sapiens
  Table A; Target 49; HLA-C*16:04; ABCB5; ENSG00000004846; TAA
AANAANIHSF

SEQ ID NO: 50 - protein, 8 aa, Homo sapiens
  Table A; Target 50; HLA-A*30:02; ABCB5; ENSG00000004846; TAA
AAREANAY

SEQ ID NO: 51 - protein, 8 aa, Homo sapiens
  Table A; Target 51; HLA-B*15:01; ABCB5; ENSG00000004846; TAA
AAREANAY

SEQ ID NO: 52 - protein, 8 aa, Homo sapiens
  Table A; Target 52; HLA-B*15:03; ABCB5; ENSG00000004846; TAA
AAREANAY

SEQ ID NO: 53 - protein, 8 aa, Homo sapiens
  Table A; Target 53; HLA-B*46:01; ABCB5; ENSG00000004846; TAA
AAREANAY

SEQ ID NO: 54 - protein, 8 aa, Homo sapiens
  Table A; Target 54; HLA-C*01:02; ABCB5; ENSG00000004846; TAA
AAREANAY

SEQ ID NO: 55 - protein, 8 aa, Homo sapiens
  Table A; Target 55; HLA-C*14:02; ABCB5; ENSG00000004846; TAA
AAREANAY

SEQ ID NO: 56 - protein, 8 aa, Homo sapiens
  Table A; Target 56; HLA-C*16:01; ABCB5; ENSG00000004846; TAA
AAREANAY

SEQ ID NO: 57 - protein, 8 aa, Homo sapiens
  Table A; Target 57; HLA-C*16:02; ABCB5; ENSG00000004846; TAA
AAREANAY

SEQ ID NO: 58 - protein, 9 aa, Homo sapiens
  Table A; Target 58; HLA-A*02:07; ABCB5; ENSG00000004846; TAA
AAVPHFETF

SEQ ID NO: 59 - protein, 9 aa, Homo sapiens
  Table A; Target 59; HLA-A*23:01; ABCB5; ENSG00000004846; TAA
AAVPHFETF

SEQ ID NO: 60 - protein, 9 aa, Homo sapiens
  Table A; Target 60; HLA-A*24:02; ABCB5; ENSG00000004846; TAA
AAVPHFETF

SEQ ID NO: 61 - protein, 9 aa, Homo sapiens
  Table A; Target 61; HLA-A*25:01; ABCB5; ENSG00000004846; TAA
AAVPHFETF

SEQ ID NO: 62 - protein, 9 aa, Homo sapiens
  Table A; Target 62; HLA-A*26:01; ABCB5; ENSG00000004846; TAA
AAVPHFETF

SEQ ID NO: 63 - protein, 9 aa, Homo sapiens
  Table A; Target 63; HLA-A*30:01; ABCB5; ENSG00000004846; TAA
AAVPHFETF

SEQ ID NO: 64 - protein, 9 aa, Homo sapiens
  Table A; Target 64; HLA-A*30:02; ABCB5; ENSG00000004846; TAA
AAVPHFETF

SEQ ID NO: 65 - protein, 9 aa, Homo sapiens
  Table A; Target 65; HLA-A*32:01; ABCB5; ENSG00000004846; TAA
AAVPHFETF

SEQ ID NO: 66 - protein, 9 aa, Homo sapiens
  Table A; Target 66; HLA-A*68:02; ABCB5; ENSG00000004846; TAA
AAVPHFETF

SEQ ID NO: 67 - protein, 9 aa, Homo sapiens
  Table A; Target 67; HLA-B*07:02; ABCB5; ENSG00000004846; TAA
AAVPHFETF

SEQ ID NO: 68 - protein, 9 aa, Homo sapiens
  Table A; Target 68; HLA-B*15:01; ABCB5; ENSG00000004846; TAA
AAVPHFETF

SEQ ID NO: 69 - protein, 9 aa, Homo sapiens
  Table A; Target 69; HLA-B*15:03; ABCB5; ENSG00000004846; TAA
AAVPHFETF

SEQ ID NO: 70 - protein, 9 aa, Homo sapiens
  Table A; Target 70; HLA-B*18:01; ABCB5; ENSG00000004846; TAA
AAVPHFETF

SEQ ID NO: 71 - protein, 9 aa, Homo sapiens
  Table A; Target 71; HLA-B*27:02; ABCB5; ENSG00000004846; TAA
AAVPHFETF

SEQ ID NO: 72 - protein, 9 aa, Homo sapiens
  Table A; Target 72; HLA-B*35:01; ABCB5; ENSG00000004846; TAA
AAVPHFETF

SEQ ID NO: 73 - protein, 9 aa, Homo sapiens
  Table A; Target 73; HLA-B*35:03; ABCB5; ENSG00000004846; TAA
AAVPHFETF

SEQ ID NO: 74 - protein, 9 aa, Homo sapiens
  Table A; Target 74; HLA-B*37:01; ABCB5; ENSG00000004846; TAA
AAVPHFETF

SEQ ID NO: 75 - protein, 9 aa, Homo sapiens
  Table A; Target 75; HLA-B*38:01; ABCB5; ENSG00000004846; TAA
AAVPHFETF

SEQ ID NO: 76 - protein, 9 aa, Homo sapiens
  Table A; Target 76; HLA-B*40:01; ABCB5; ENSG00000004846; TAA
AAVPHFETF

SEQ ID NO: 77 - protein, 9 aa, Homo sapiens
  Table A; Target 77; HLA-B*44:02; ABCB5; ENSG00000004846; TAA
AAVPHFETF

SEQ ID NO: 78 - protein, 9 aa, Homo sapiens
  Table A; Target 78; HLA-B*44:03; ABCB5; ENSG00000004846; TAA
AAVPHFETF

SEQ ID NO: 79 - protein, 9 aa, Homo sapiens
  Table A; Target 79; HLA-B*46:01; ABCB5; ENSG00000004846; TAA
AAVPHFETF

SEQ ID NO: 80 - protein, 9 aa, Homo sapiens
  Table A; Target 80; HLA-B*51:01; ABCB5; ENSG00000004846; TAA
AAVPHFETF

SEQ ID NO: 81 - protein, 9 aa, Homo sapiens
  Table A; Target 81; HLA-B*54:01; ABCB5; ENSG00000004846; TAA
AAVPHFETF

SEQ ID NO: 82 - protein, 9 aa, Homo sapiens
  Table A; Target 82; HLA-B*55:01; ABCB5; ENSG00000004846; TAA
AAVPHFETF

SEQ ID NO: 83 - protein, 9 aa, Homo sapiens
  Table A; Target 83; HLA-B*57:01; ABCB5; ENSG00000004846; TAA
AAVPHFETF

SEQ ID NO: 84 - protein, 9 aa, Homo sapiens
  Table A; Target 84; HLA-B*58:01; ABCB5; ENSG00000004846; TAA
AAVPHFETF

SEQ ID NO: 85 - protein, 9 aa, Homo sapiens
  Table A; Target 85; HLA-C*01:02; ABCB5; ENSG00000004846; TAA
AAVPHFETF

SEQ ID NO: 86 - protein, 9 aa, Homo sapiens
  Table A; Target 86; HLA-C*02:02; ABCB5; ENSG00000004846; TAA
AAVPHFETF

SEQ ID NO: 87 - protein, 9 aa, Homo sapiens
  Table A; Target 87; HLA-C*03:03; ABCB5; ENSG00000004846; TAA
AAVPHFETF

SEQ ID NO: 88 - protein, 9 aa, Homo sapiens
  Table A; Target 88; HLA-C*03:04; ABCB5; ENSG00000004846; TAA
AAVPHFETF

SEQ ID NO: 89 - protein, 9 aa, Homo sapiens
  Table A; Target 89; HLA-C*05:01; ABCB5; ENSG00000004846; TAA
AAVPHFETF

SEQ ID NO: 90 - protein, 9 aa, Homo sapiens
  Table A; Target 90; HLA-C*07:06; ABCB5; ENSG00000004846; TAA
AAVPHFETF

SEQ ID NO: 91 - protein, 9 aa, Homo sapiens
  Table A; Target 91; HLA-C*12:03; ABCB5; ENSG00000004846; TAA
AAVPHFETF

SEQ ID NO: 92 - protein, 9 aa, Homo sapiens
  Table A; Target 92; HLA-C*14:02; ABCB5; ENSG00000004846; TAA
AAVPHFETF

SEQ ID NO: 93 - protein, 9 aa, Homo sapiens
  Table A; Target 93; HLA-C*16:01; ABCB5; ENSG00000004846; TAA
AAVPHFETF

SEQ ID NO: 94 - protein, 9 aa, Homo sapiens
  Table A; Target 94; HLA-C*16:02; ABCB5; ENSG00000004846; TAA
AAVPHFETF

SEQ ID NO: 95 - protein, 9 aa, Homo sapiens
  Table A; Target 95; HLA-C*16:04; ABCB5; ENSG00000004846; TAA
AAVPHFETF

SEQ ID NO: 96 - protein, 9 aa, Homo sapiens
  Table A; Target 96; HLA-B*40:02; ABCB5; ENSG00000004846; TAA
ACSRMVISL

SEQ ID NO: 97 - protein, 9 aa, Homo sapiens
  Table A; Target 97; HLA-C*12:03; ABCB5; ENSG00000004846; TAA
ACSRMVISL

SEQ ID NO: 98 - protein, 9 aa, Homo sapiens
  Table A; Target 98; HLA-A*30:01; ABCB5; ENSG00000004846; TAA
ADGLDITLM

SEQ ID NO: 99 - protein, 9 aa, Homo sapiens
  Table A; Target 99; HLA-B*37:01; ABCB5; ENSG00000004846; TAA
ADGLDITLM

SEQ ID NO: 100 - protein, 8 aa, Homo sapiens
  Table A; Target 100; HLA-B*27:02; ABCB5; ENSG00000004846; TAA
ADLIVTLK

SEQ ID NO: 101 - protein, 8 aa, Homo sapiens
  Table A; Target 101; HLA-B*37:01; ABCB5; ENSG00000004846; TAA
ADLIVTLK

SEQ ID NO: 102 - protein, 8 aa, Homo sapiens
  Table A; Target 102; HLA-B*37:01; ABCB5; ENSG00000004846; TAA
ADLIVVLH

SEQ ID NO: 103 - protein, 8 aa, Homo sapiens
  Table A; Target 103; HLA-C*04:01; ABCB5; ENSG00000004846; TAA
ADLIVVLH

SEQ ID NO: 104 - protein, 8 aa, Homo sapiens
  Table A; Target 104; HLA-C*16:04; ABCB5; ENSG00000004846; TAA
AEEMQENY

SEQ ID NO: 105 - protein, 10 aa, Homo sapiens
  Table A; Target 105; HLA-B*27:02; ABCB5; ENSG00000004846; TAA
AEESTQSKEI

SEQ ID NO: 106 - protein, 10 aa, Homo sapiens
  Table A; Target 106; HLA-B*40:01; ABCB5; ENSG00000004846; TAA
AEESTQSKEI

SEQ ID NO: 107 - protein, 10 aa, Homo sapiens
  Table A; Target 107; HLA-B*44:02; ABCB5; ENSG00000004846; TAA
AEESTQSKEI

SEQ ID NO: 108 - protein, 10 aa, Homo sapiens
  Table A; Target 108; HLA-B*44:03; ABCB5; ENSG00000004846; TAA
AEESTQSKEI

SEQ ID NO: 109 - protein, 10 aa, Homo sapiens
  Table A; Target 109; HLA-B*49:01; ABCB5; ENSG00000004846; TAA
AEESTQSKEI

SEQ ID NO: 110 - protein, 8 aa, Homo sapiens
  Table A; Target 110; HLA-B*49:01; ABCB5; ENSG00000004846; TAA
AEEVLSSI

SEQ ID NO: 111 - protein, 11 aa, Homo sapiens
  Table A; Target 111; HLA-A*30:01; ABCB5; ENSG00000004846; TAA
AEEVLSSIRTV

SEQ ID NO: 112 - protein, 11 aa, Homo sapiens
  Table A; Target 112; HLA-B*40:01; ABCB5; ENSG00000004846; TAA
AEEVLSSIRTV

SEQ ID NO: 113 - protein, 11 aa, Homo sapiens
  Table A; Target 113; HLA-B*40:02; ABCB5; ENSG00000004846; TAA
AEEVLSSIRTV

SEQ ID NO: 114 - protein, 11 aa, Homo sapiens
  Table A; Target 114; HLA-B*44:02; ABCB5; ENSG00000004846; TAA
AEEVLSSIRTV

SEQ ID NO: 115 - protein, 11 aa, Homo sapiens
  Table A; Target 115; HLA-B*49:01; ABCB5; ENSG00000004846; TAA
AEEVLSSIRTV

SEQ ID NO: 116 - protein, 8 aa, Homo sapiens
  Table A; Target 116; HLA-B*44:02; ABCB5; ENSG00000004846; TAA
AEIYSMIF

SEQ ID NO: 117 - protein, 9 aa, Homo sapiens
  Table A; Target 117; HLA-B*49:01; ABCB5; ENSG00000004846; TAA
AEIYSMIFV

SEQ ID NO: 118 - protein, 10 aa, Homo sapiens
  Table A; Target 118; HLA-B*44:02; ABCB5; ENSG00000004846; TAA
AEIYSMIFVI

SEQ ID NO: 119 - protein, 10 aa, Homo sapiens
  Table A; Target 119; HLA-B*49:01; ABCB5; ENSG00000004846; TAA
AEIYSMIFVI

SEQ ID NO: 120 - protein, 9 aa, Homo sapiens
  Table A; Target 120; HLA-A*30:01; ABCB5; ENSG00000004846; TAA
AEKGAHAEL

SEQ ID NO: 121 - protein, 9 aa, Homo sapiens
  Table A; Target 121; HLA-B*07:02; ABCB5; ENSG00000004846; TAA
AEKGAHAEL

SEQ ID NO: 122 - protein, 9 aa, Homo sapiens
  Table A; Target 122; HLA-B*37:01; ABCB5; ENSG00000004846; TAA
AEKGAHAEL

SEQ ID NO: 123 - protein, 9 aa, Homo sapiens
  Table A; Target 123; HLA-B*40:01; ABCB5; ENSG00000004846; TAA
AEKGAHAEL

SEQ ID NO: 124 - protein, 9 aa, Homo sapiens
  Table A; Target 124; HLA-B*40:02; ABCB5; ENSG00000004846; TAA
AEKGAHAEL

SEQ ID NO: 125 - protein, 9 aa, Homo sapiens
  Table A; Target 125; HLA-B*44:02; ABCB5; ENSG00000004846; TAA
AEKGAHAEL

SEQ ID NO: 126 - protein, 9 aa, Homo sapiens
  Table A; Target 126; HLA-B*44:03; ABCB5; ENSG00000004846; TAA
AEKGAHAEL

SEQ ID NO: 127 - protein, 9 aa, Homo sapiens
  Table A; Target 127; HLA-B*49:01; ABCB5; ENSG00000004846; TAA
AEKGAHAEL

SEQ ID NO: 128 - protein, 9 aa, Homo sapiens
  Table A; Target 128; HLA-C*02:02; ABCB5; ENSG00000004846; TAA
AEKGAHAEL

SEQ ID NO: 129 - protein, 9 aa, Homo sapiens
  Table A; Target 129; HLA-C*16:04; ABCB5; ENSG00000004846; TAA
AEKGAHAEL

SEQ ID NO: 130 - protein, 10 aa, Homo sapiens
  Table A; Target 130; HLA-A*30:01; ABCB5; ENSG00000004846; TAA
AEKGAHAELM

SEQ ID NO: 131 - protein, 10 aa, Homo sapiens
  Table A; Target 131; HLA-B*37:01; ABCB5; ENSG00000004846; TAA
AEKGAHAELM

SEQ ID NO: 132 - protein, 10 aa, Homo sapiens
  Table A; Target 132; HLA-B*40:01; ABCB5; ENSG00000004846; TAA
AEKGAHAELM

SEQ ID NO: 133 - protein, 10 aa, Homo sapiens
  Table A; Target 133; HLA-B*40:02; ABCB5; ENSG00000004846; TAA
AEKGAHAELM

SEQ ID NO: 134 - protein, 10 aa, Homo sapiens
  Table A; Target 134; HLA-B*44:02; ABCB5; ENSG00000004846; TAA
AEKGAHAELM

SEQ ID NO: 135 - protein, 10 aa, Homo sapiens
  Table A; Target 135; HLA-B*44:03; ABCB5; ENSG00000004846; TAA
AEKGAHAELM

SEQ ID NO: 136 - protein, 10 aa, Homo sapiens
  Table A; Target 136; HLA-B*49:01; ABCB5; ENSG00000004846; TAA
AEKGAHAELM

SEQ ID NO: 137 - protein, 9 aa, Homo sapiens
  Table A; Target 137; HLA-B*44:02; ABCB5; ENSG00000004846; TAA
AELMAKRGL

SEQ ID NO: 138 - protein, 9 aa, Homo sapiens
  Table A; Target 138; HLA-B*44:03; ABCB5; ENSG00000004846; TAA
AELMAKRGL

SEQ ID NO: 139 - protein, 10 aa, Homo sapiens
  Table A; Target 139; HLA-B*44:02; ABCB5; ENSG00000004846; TAA
AELMAKRGLY

SEQ ID NO: 140 - protein, 10 aa, Homo sapiens
  Table A; Target 140; HLA-B*44:03; ABCB5; ENSG00000004846; TAA
AELMAKRGLY

SEQ ID NO: 141 - protein, 11 aa, Homo sapiens
  Table A; Target 141; HLA-B*44:02; ABCB5; ENSG00000004846; TAA
AELMAKRGLYY

SEQ ID NO: 142 - protein, 11 aa, Homo sapiens
  Table A; Target 142; HLA-B*44:03; ABCB5; ENSG00000004846; TAA
AELMAKRGLYY

SEQ ID NO: 143 - protein, 8 aa, Homo sapiens
  Table A; Target 143; HLA-A*29:02; ABCB5; ENSG00000004846; TAA
AFSHAFIY

SEQ ID NO: 144 - protein, 9 aa, Homo sapiens
  Table A; Target 144; HLA-A*23:01; ABCB5; ENSG00000004846; TAA
AFSHAFIYF

SEQ ID NO: 145 - protein, 9 aa, Homo sapiens
  Table A; Target 145; HLA-A*24:02; ABCB5; ENSG00000004846; TAA
AFSHAFIYF

SEQ ID NO: 146 - protein, 9 aa, Homo sapiens
  Table A; Target 146; HLA-A*29:02; ABCB5; ENSG00000004846; TAA
AFSHAFIYF

SEQ ID NO: 147 - protein, 11 aa, Homo sapiens
  Table A; Target 147; HLA-A*29:02; ABCB5; ENSG00000004846; TAA
AFSHAFIYFAY

SEQ ID NO: 148 - protein, 9 aa, Homo sapiens
  Table A; Target 148; HLA-B*40:01; ABCB5; ENSG00000004846; TAA
AGAVAEEVL

SEQ ID NO: 149 - protein, 9 aa, Homo sapiens
  Table A; Target 149; HLA-C*01:02; ABCB5; ENSG00000004846; TAA
AGAVAEEVL

SEQ ID NO: 150 - protein, 8 aa, Homo sapiens
  Table A; Target 150; HLA-A*30:02; ABCB5; ENSG00000004846; TAA
AGFRFGAY

SEQ ID NO: 151 - protein, 9 aa, Homo sapiens
  Table A; Target 151; HLA-B*08:01; ABCB5; ENSG00000004846; TAA
AGKIATEAL

SEQ ID NO: 152 - protein, 9 aa, Homo sapiens
  Table A; Target 152; HLA-B*15:01; ABCB5; ENSG00000004846; TAA
AGKIATEAL

SEQ ID NO: 153 - protein, 9 aa, Homo sapiens
  Table A; Target 153; HLA-B*40:02; ABCB5; ENSG00000004846; TAA
AGKIATEAL

SEQ ID NO: 154 - protein, 9 aa, Homo sapiens
  Table A; Target 154; HLA-B*46:01; ABCB5; ENSG00000004846; TAA
AGKIATEAL

SEQ ID NO: 155 - protein, 9 aa, Homo sapiens
  Table A; Target 155; HLA-C*01:02; ABCB5; ENSG00000004846; TAA
AGKIATEAL

SEQ ID NO: 156 - protein, 9 aa, Homo sapiens
  Table A; Target 156; HLA-C*14:02; ABCB5; ENSG00000004846; TAA
AGKIATEAL

SEQ ID NO: 157 - protein, 8 aa, Homo sapiens
  Table A; Target 157; HLA-B*13:02; ABCB5; ENSG00000004846; TAA
AGYKPESI

SEQ ID NO: 158 - protein, 9 aa, Homo sapiens
  Table A; Target 158; HLA-B*27:05; ABCB5; ENSG00000004846; TAA
AHAELMAKR

SEQ ID NO: 159 - protein, 9 aa, Homo sapiens
  Table A; Target 159; HLA-C*07:06; ABCB5; ENSG00000004846; TAA
AHAELMAKR

SEQ ID NO: 160 - protein, 9 aa, Homo sapiens
  Table A; Target 160; HLA-A*03:01; ABCB5; ENSG00000004846; TAA
AIARALLQK

SEQ ID NO: 161 - protein, 9 aa, Homo sapiens
  Table A; Target 161; HLA-A*03:02; ABCB5; ENSG00000004846; TAA
AIARALLQK

SEQ ID NO: 162 - protein, 9 aa, Homo sapiens
  Table A; Target 162; HLA-A*11:01; ABCB5; ENSG00000004846; TAA
AIARALLQK

SEQ ID NO: 163 - protein, 8 aa, Homo sapiens
  Table A; Target 163; HLA-A*32:01; ABCB5; ENSG00000004846; TAA
AIARGAAF

SEQ ID NO: 164 - protein, 8 aa, Homo sapiens
  Table A; Target 164; HLA-B*15:01; ABCB5; ENSG00000004846; TAA
AIARGAAF

SEQ ID NO: 165 - protein, 8 aa, Homo sapiens
  Table A; Target 165; HLA-B*46:01; ABCB5; ENSG00000004846; TAA
AIARGAAF

SEQ ID NO: 166 - protein, 8 aa, Homo sapiens
  Table A; Target 166; HLA-C*01:02; ABCB5; ENSG00000004846; TAA
AIARGAAF

SEQ ID NO: 167 - protein, 8 aa, Homo sapiens
  Table A; Target 167; HLA-C*03:04; ABCB5; ENSG00000004846; TAA
AIARGAAF

SEQ ID NO: 168 - protein, 8 aa, Homo sapiens
  Table A; Target 168; HLA-C*14:02; ABCB5; ENSG00000004846; TAA
AIARGAAF

SEQ ID NO: 169 - protein, 8 aa, Homo sapiens
  Table A; Target 169; HLA-C*16:01; ABCB5; ENSG00000004846; TAA
AIARGAAF

SEQ ID NO: 170 - protein, 9 aa, Homo sapiens
  Table A; Target 170; HLA-B*13:02; ABCB5; ENSG00000004846; TAA
AIAYGAMAI

SEQ ID NO: 171 - protein, 9 aa, Homo sapiens
  Table A; Target 171; HLA-C*01:02; ABCB5; ENSG00000004846; TAA
AIAYGAMAI

SEQ ID NO: 172 - protein, 11 aa, Homo sapiens
  Table A; Target 172; HLA-A*02:04; ABCB5; ENSG00000004846; TAA
AIQNADLIVVL

SEQ ID NO: 173 - protein, 9 aa, Homo sapiens
  Table A; Target 173; HLA-A*02:01; ABCB5; ENSG00000004846; TAA
AIVPQEPVL

SEQ ID NO: 174 - protein, 9 aa, Homo sapiens
  Table A; Target 174; HLA-A*02:04; ABCB5; ENSG00000004846; TAA
AIVPQEPVL

SEQ ID NO: 175 - protein, 9 aa, Homo sapiens
  Table A; Target 175; HLA-A*23:01; ABCB5; ENSG00000004846; TAA
AIVPQEPVL

SEQ ID NO: 176 - protein, 9 aa, Homo sapiens
  Table A; Target 176; HLA-A*30:01; ABCB5; ENSG00000004846; TAA
AIVPQEPVL

SEQ ID NO: 177 - protein, 9 aa, Homo sapiens
  Table A; Target 177; HLA-B*15:01; ABCB5; ENSG00000004846; TAA
AIVPQEPVL

SEQ ID NO: 178 - protein, 9 aa, Homo sapiens
  Table A; Target 178; HLA-B*15:03; ABCB5; ENSG00000004846; TAA
AIVPQEPVL

SEQ ID NO: 179 - protein, 9 aa, Homo sapiens
  Table A; Target 179; HLA-B*35:03; ABCB5; ENSG00000004846; TAA
AIVPQEPVL

SEQ ID NO: 180 - protein, 9 aa, Homo sapiens
  Table A; Target 180; HLA-B*38:01; ABCB5; ENSG00000004846; TAA
AIVPQEPVL

SEQ ID NO: 181 - protein, 9 aa, Homo sapiens
  Table A; Target 181; HLA-B*39:01; ABCB5; ENSG00000004846; TAA
AIVPQEPVL

SEQ ID NO: 182 - protein, 9 aa, Homo sapiens
  Table A; Target 182; HLA-B*40:01; ABCB5; ENSG00000004846; TAA
AIVPQEPVL

SEQ ID NO: 183 - protein, 9 aa, Homo sapiens
  Table A; Target 183; HLA-B*58:01; ABCB5; ENSG00000004846; TAA
AIVPQEPVL

SEQ ID NO: 184 - protein, 9 aa, Homo sapiens
  Table A; Target 184; HLA-C*02:02; ABCB5; ENSG00000004846; TAA
AIVPQEPVL

SEQ ID NO: 185 - protein, 9 aa, Homo sapiens
  Table A; Target 185; HLA-C*03:03; ABCB5; ENSG00000004846; TAA
AIVPQEPVL

SEQ ID NO: 186 - protein, 9 aa, Homo sapiens
  Table A; Target 186; HLA-C*03:04; ABCB5; ENSG00000004846; TAA
AIVPQEPVL

SEQ ID NO: 187 - protein, 9 aa, Homo sapiens
  Table A; Target 187; HLA-C*07:04; ABCB5; ENSG00000004846; TAA
AIVPQEPVL

SEQ ID NO: 188 - protein, 9 aa, Homo sapiens
  Table A; Target 188; HLA-C*16:04; ABCB5; ENSG00000004846; TAA
AIVPQEPVL

SEQ ID NO: 189 - protein, 10 aa, Homo sapiens
  Table A; Target 189; HLA-A*23:01; ABCB5; ENSG00000004846; TAA
AIVPQEPVLF

SEQ ID NO: 190 - protein, 10 aa, Homo sapiens
  Table A; Target 190; HLA-B*58:01; ABCB5; ENSG00000004846; TAA
AIVPQEPVLF

SEQ ID NO: 191 - protein, 9 aa, Homo sapiens
  Table A; Target 191; HLA-B*15:03; ABCB5; ENSG00000004846; TAA
AKSGAAHLF

SEQ ID NO: 192 - protein, 8 aa, Homo sapiens
  Table A; Target 192; HLA-C*05:01; ABCB5; ENSG00000004846; TAA
ALDNDSEK

SEQ ID NO: 193 - protein, 9 aa, Homo sapiens
  Table A; Target 193; HLA-A*02:01; ABCB5; ENSG00000004846; TAA
ALDNDSEKV

SEQ ID NO: 194 - protein, 9 aa, Homo sapiens
  Table A; Target 194; HLA-A*02:07; ABCB5; ENSG00000004846; TAA
ALDNDSEKV

SEQ ID NO: 195 - protein, 9 aa, Homo sapiens
  Table A; Target 195; HLA-B*55:01; ABCB5; ENSG00000004846; TAA
ALDNDSEKV

SEQ ID NO: 196 - protein, 9 aa, Homo sapiens
  Table A; Target 196; HLA-C*05:01; ABCB5; ENSG00000004846; TAA
ALDNDSEKV

SEQ ID NO: 197 - protein, 10 aa, Homo sapiens
  Table A; Target 197; HLA-A*02:01; ABCB5; ENSG00000004846; TAA
ALDNDSEKVV

SEQ ID NO: 198 - protein, 9 aa, Homo sapiens
  Table A; Target 198; HLA-B*55:01; ABCB5; ENSG00000004846; TAA
ALDSESKSA

SEQ ID NO: 199 - protein, 10 aa, Homo sapiens
  Table A; Target 199; HLA-A*01:01; ABCB5; ENSG00000004846; TAA
ALDSESKSAV

SEQ ID NO: 200 - protein, 10 aa, Homo sapiens
  Table A; Target 200; HLA-A*02:01; ABCB5; ENSG00000004846; TAA
ALDSESKSAV

SEQ ID NO: 201 - protein, 10 aa, Homo sapiens
  Table A; Target 201; HLA-B*55:01; ABCB5; ENSG00000004846; TAA
ALDSESKSAV

SEQ ID NO: 202 - protein, 11 aa, Homo sapiens
  Table A; Target 202; HLA-A*01:01; ABCB5; ENSG00000004846; TAA
ALDSESKSAVQ

SEQ ID NO: 203 - protein, 11 aa, Homo sapiens
  Table A; Target 203; HLA-A*02:01; ABCB5; ENSG00000004846; TAA
ALENIRTIVSL

SEQ ID NO: 204 - protein, 11 aa, Homo sapiens
  Table A; Target 204; HLA-A*02:04; ABCB5; ENSG00000004846; TAA
ALENIRTIVSL

SEQ ID NO: 205 - protein, 11 aa, Homo sapiens
  Table A; Target 205; HLA-A*02:07; ABCB5; ENSG00000004846; TAA
ALENIRTIVSL

SEQ ID NO: 206 - protein, 9 aa, Homo sapiens
  Table A; Target 206; HLA-A*02:01; ABCB5; ENSG00000004846; TAA
ALIFGYIQI

SEQ ID NO: 207 - protein, 9 aa, Homo sapiens
  Table A; Target 207; HLA-A*02:04; ABCB5; ENSG00000004846; TAA
ALIFGYIQI

SEQ ID NO: 208 - protein, 9 aa, Homo sapiens
  Table A; Target 208; HLA-A*02:01; ABCB5; ENSG00000004846; TAA
ALLEKKPNI

SEQ ID NO: 209 - protein, 9 aa, Homo sapiens
  Table A; Target 209; HLA-A*02:04; ABCB5; ENSG00000004846; TAA
ALLEKKPNI

SEQ ID NO: 210 - protein, 9 aa, Homo sapiens
  Table A; Target 210; HLA-B*55:01; ABCB5; ENSG00000004846; TAA
ALLEKKPNI

SEQ ID NO: 211 - protein, 11 aa, Homo sapiens
  Table A; Target 211; HLA-A*02:01; ABCB5; ENSG00000004846; TAA
ALLQKPKILLL

SEQ ID NO: 212 - protein, 11 aa, Homo sapiens
  Table A; Target 212; HLA-A*02:03; ABCB5; ENSG00000004846; TAA
ALLQKPKILLL

SEQ ID NO: 213 - protein, 11 aa, Homo sapiens
  Table A; Target 213; HLA-A*02:04; ABCB5; ENSG00000004846; TAA
ALLQKPKILLL

SEQ ID NO: 214 - protein, 10 aa, Homo sapiens
  Table A; Target 214; HLA-A*03:01; ABCB5; ENSG00000004846; TAA
ALVGLNGSGK

SEQ ID NO: 215 - protein, 10 aa, Homo sapiens
  Table A; Target 215; HLA-A*03:02; ABCB5; ENSG00000004846; TAA
ALVGLNGSGK

SEQ ID NO: 216 - protein, 11 aa, Homo sapiens
  Table A; Target 216; HLA-A*02:04; ABCB5; ENSG00000004846; TAA
ALVRNPKILIL

SEQ ID NO: 217 - protein, 8 aa, Homo sapiens
  Table A; Target 217; HLA-B*37:01; ABCB5; ENSG00000004846; TAA
AMAIGETL

SEQ ID NO: 218 - protein, 8 aa, Homo sapiens
  Table A; Target 218; HLA-C*01:02; ABCB5; ENSG00000004846; TAA
AMAIGETL

SEQ ID NO: 219 - protein, 8 aa, Homo sapiens
  Table A; Target 219; HLA-C*14:02; ABCB5; ENSG00000004846; TAA
AMAIGETL

SEQ ID NO: 220 - protein, 9 aa, Homo sapiens
  Table A; Target 220; HLA-A*02:01; ABCB5; ENSG00000004846; TAA
AMAIGETLV

SEQ ID NO: 221 - protein, 9 aa, Homo sapiens
  Table A; Target 221; HLA-A*02:03; ABCB5; ENSG00000004846; TAA
AMAIGETLV

SEQ ID NO: 222 - protein, 9 aa, Homo sapiens
  Table A; Target 222; HLA-B*13:02; ABCB5; ENSG00000004846; TAA
AMAIGETLV

SEQ ID NO: 223 - protein, 8 aa, Homo sapiens
  Table A; Target 223; HLA-A*03:01; ABCB5; ENSG00000004846; TAA
AMTGFANK

SEQ ID NO: 224 - protein, 8 aa, Homo sapiens
  Table A; Target 224; HLA-A*03:02; ABCB5; ENSG00000004846; TAA
AMTGFANK

SEQ ID NO: 225 - protein, 9 aa, Homo sapiens
  Table A; Target 225; HLA-A*24:02; ABCB5; ENSG00000004846; TAA
ANAANIHSF

SEQ ID NO: 226 - protein, 9 aa, Homo sapiens
  Table A; Target 226; HLA-A*25:01; ABCB5; ENSG00000004846; TAA
ANAANIHSF

SEQ ID NO: 227 - protein, 9 aa, Homo sapiens
  Table A; Target 227; HLA-A*26:01; ABCB5; ENSG00000004846; TAA
ANAANIHSF

SEQ ID NO: 228 - protein, 9 aa, Homo sapiens
  Table A; Target 228; HLA-A*30:02; ABCB5; ENSG00000004846; TAA
ANAANIHSF

SEQ ID NO: 229 - protein, 9 aa, Homo sapiens
  Table A; Target 229; HLA-A*32:01; ABCB5; ENSG00000004846; TAA
ANAANIHSF

SEQ ID NO: 230 - protein, 9 aa, Homo sapiens
  Table A; Target 230; HLA-B*15:01; ABCB5; ENSG00000004846; TAA
ANAANIHSF

SEQ ID NO: 231 - protein, 9 aa, Homo sapiens
  Table A; Target 231; HLA-B*15:03; ABCB5; ENSG00000004846; TAA
ANAANIHSF

SEQ ID NO: 232 - protein, 9 aa, Homo sapiens
  Table A; Target 232; HLA-B*37:01; ABCB5; ENSG00000004846; TAA
ANAANIHSF

SEQ ID NO: 233 - protein, 9 aa, Homo sapiens
  Table A; Target 233; HLA-B*44:02; ABCB5; ENSG00000004846; TAA
ANAANIHSF

SEQ ID NO: 234 - protein, 9 aa, Homo sapiens
  Table A; Target 234; HLA-B*44:03; ABCB5; ENSG00000004846; TAA
ANAANIHSF

SEQ ID NO: 235 - protein, 9 aa, Homo sapiens
  Table A; Target 235; HLA-B*46:01; ABCB5; ENSG00000004846; TAA
ANAANIHSF

SEQ ID NO: 236 - protein, 9 aa, Homo sapiens
  Table A; Target 236; HLA-B*57:01; ABCB5; ENSG00000004846; TAA
ANAANIHSF

SEQ ID NO: 237 - protein, 9 aa, Homo sapiens
  Table A; Target 237; HLA-B*58:01; ABCB5; ENSG00000004846; TAA
ANAANIHSF

SEQ ID NO: 238 - protein, 9 aa, Homo sapiens
  Table A; Target 238; HLA-C*02:02; ABCB5; ENSG00000004846; TAA
ANAANIHSF

SEQ ID NO: 239 - protein, 9 aa, Homo sapiens
  Table A; Target 239; HLA-C*14:02; ABCB5; ENSG00000004846; TAA
ANAANIHSF

SEQ ID NO: 240 - protein, 9 aa, Homo sapiens
  Table A; Target 240; HLA-C*16:01; ABCB5; ENSG00000004846; TAA
ANAANIHSF

SEQ ID NO: 241 - protein, 9 aa, Homo sapiens
  Table A; Target 241; HLA-C*16:02; ABCB5; ENSG00000004846; TAA
ANAANIHSF

SEQ ID NO: 242 - protein, 9 aa, Homo sapiens
  Table A; Target 242; HLA-C*16:04; ABCB5; ENSG00000004846; TAA
ANAANIHSF

SEQ ID NO: 243 - protein, 8 aa, Homo sapiens
  Table A; Target 243; HLA-B*08:01; ABCB5; ENSG00000004846; TAA
ANKDKQEL

SEQ ID NO: 244 - protein, 8 aa, Homo sapiens
  Table A; Target 244; HLA-B*56:01; ABCB5; ENSG00000004846; TAA
APVLAVTG

SEQ ID NO: 245 - protein, 9 aa, Homo sapiens
  Table A; Target 245; HLA-B*07:02; ABCB5; ENSG00000004846; TAA
APVLAVTGM

SEQ ID NO: 246 - protein, 9 aa, Homo sapiens
  Table A; Target 246; HLA-B*35:01; ABCB5; ENSG00000004846; TAA
APVLAVTGM

SEQ ID NO: 247 - protein, 9 aa, Homo sapiens
  Table A; Target 247; HLA-B*35:03; ABCB5; ENSG00000004846; TAA
APVLAVTGM

SEQ ID NO: 248 - protein, 9 aa, Homo sapiens
  Table A; Target 248; HLA-B*55:01; ABCB5; ENSG00000004846; TAA
APVLAVTGM

SEQ ID NO: 249 - protein, 9 aa, Homo sapiens
  Table A; Target 249; HLA-B*56:01; ABCB5; ENSG00000004846; TAA
APVLAVTGM

SEQ ID NO: 250 - protein, 9 aa, Homo sapiens
  Table A; Target 250; HLA-C*07:02; ABCB5; ENSG00000004846; TAA
APVLAVTGM

SEQ ID NO: 251 - protein, 9 aa, Homo sapiens
  Table A; Target 251; HLA-A*01:01; ABCB5; ENSG00000004846; TAA
AQEKELQRY

SEQ ID NO: 252 - protein, 9 aa, Homo sapiens
  Table A; Target 252; HLA-A*30:02; ABCB5; ENSG00000004846; TAA
AQEKELQRY

SEQ ID NO: 253 - protein, 9 aa, Homo sapiens
  Table A; Target 253; HLA-A*32:01; ABCB5; ENSG00000004846; TAA
AQEKELQRY

SEQ ID NO: 254 - protein, 9 aa, Homo sapiens
  Table A; Target 254; HLA-B*15:01; ABCB5; ENSG00000004846; TAA
AQEKELQRY

SEQ ID NO: 255 - protein, 9 aa, Homo sapiens
  Table A; Target 255; HLA-B*15:03; ABCB5; ENSG00000004846; TAA
AQEKELQRY

SEQ ID NO: 256 - protein, 9 aa, Homo sapiens
  Table A; Target 256; HLA-B*27:02; ABCB5; ENSG00000004846; TAA
AQEKELQRY

SEQ ID NO: 257 - protein, 9 aa, Homo sapiens
  Table A; Target 257; HLA-B*44:02; ABCB5; ENSG00000004846; TAA
AQEKELQRY

SEQ ID NO: 258 - protein, 9 aa, Homo sapiens
  Table A; Target 258; HLA-B*44:03; ABCB5; ENSG00000004846; TAA
AQEKELQRY

SEQ ID NO: 259 - protein, 9 aa, Homo sapiens
  Table A; Target 259; HLA-B*58:01; ABCB5; ENSG00000004846; TAA
AQEKELQRY

SEQ ID NO: 260 - protein, 9 aa, Homo sapiens
  Table A; Target 260; HLA-C*07:04; ABCB5; ENSG00000004846; TAA
AQEKELQRY

SEQ ID NO: 261 - protein, 9 aa, Homo sapiens
  Table A; Target 261; HLA-C*16:02; ABCB5; ENSG00000004846; TAA
AQEKELQRY

SEQ ID NO: 262 - protein, 8 aa, Homo sapiens
  Table A; Target 262; HLA-A*30:02; ABCB5; ENSG00000004846; TAA
AQIIGSCY

SEQ ID NO: 263 - protein, 8 aa, Homo sapiens
  Table A; Target 263; HLA-B*13:02; ABCB5; ENSG00000004846; TAA
AQIIGSCY

SEQ ID NO: 264 - protein, 8 aa, Homo sapiens
  Table A; Target 264; HLA-B*15:01; ABCB5; ENSG00000004846; TAA
AQIIGSCY

SEQ ID NO: 265 - protein, 8 aa, Homo sapiens
  Table A; Target 265; HLA-B*15:03; ABCB5; ENSG00000004846; TAA
AQIIGSCY

SEQ ID NO: 266 - protein, 8 aa, Homo sapiens
  Table A; Target 266; HLA-B*18:01; ABCB5; ENSG00000004846; TAA
AQIIGSCY

SEQ ID NO: 267 - protein, 8 aa, Homo sapiens
  Table A; Target 267; HLA-B*27:02; ABCB5; ENSG00000004846; TAA
AQIIGSCY

SEQ ID NO: 268 - protein, 8 aa, Homo sapiens
  Table A; Target 268; HLA-B*46:01; ABCB5; ENSG00000004846; TAA
AQIIGSCY

SEQ ID NO: 269 - protein, 8 aa, Homo sapiens
  Table A; Target 269; HLA-C*07:04; ABCB5; ENSG00000004846; TAA
AQIIGSCY

SEQ ID NO: 270 - protein, 8 aa, Homo sapiens
  Table A; Target 270; HLA-C*14:02; ABCB5; ENSG00000004846; TAA
AQIIGSCY

SEQ ID NO: 271 - protein, 8 aa, Homo sapiens
  Table A; Target 271; HLA-C*16:04; ABCB5; ENSG00000004846; TAA
AQIIGSCY

SEQ ID NO: 272 - protein, 9 aa, Homo sapiens
  Table A; Target 272; HLA-B*13:02; ABCB5; ENSG00000004846; TAA
AQIIGSCYA

SEQ ID NO: 273 - protein, 10 aa, Homo sapiens
  Table A; Target 273; HLA-B*15:01; ABCB5; ENSG00000004846; TAA
AQIIGSCYAF

SEQ ID NO: 274 - protein, 10 aa, Homo sapiens
  Table A; Target 274; HLA-B*15:03; ABCB5; ENSG00000004846; TAA
AQIIGSCYAF

SEQ ID NO: 275 - protein, 11 aa, Homo sapiens
  Table A; Target 275; HLA-B*13:02; ABCB5; ENSG00000004846; TAA
AQIQGATGSRI

SEQ ID NO: 276 - protein, 11 aa, Homo sapiens
  Table A; Target 276; HLA-B*13:02; ABCB5; ENSG00000004846; TAA
AQMSGGQKQRI

SEQ ID NO: 277 - protein, 11 aa, Homo sapiens
  Table A; Target 277; HLA-B*38:01; ABCB5; ENSG00000004846; TAA
AQMSGGQKQRI

SEQ ID NO: 278 - protein, 9 aa, Homo sapiens
  Table A; Target 278; HLA-B*27:05; ABCB5; ENSG00000004846; TAA
ARALLQKPK

SEQ ID NO: 279 - protein, 9 aa, Homo sapiens
  Table A; Target 279; HLA-B*27:05; ABCB5; ENSG00000004846; TAA
ARALVRNPK

SEQ ID NO: 280 - protein, 9 aa, Homo sapiens
  Table A; Target 280; HLA-B*27:02; ABCB5; ENSG00000004846; TAA
AREANAYDF

SEQ ID NO: 281 - protein, 9 aa, Homo sapiens
  Table A; Target 281; HLA-B*27:05; ABCB5; ENSG00000004846; TAA
AREANAYDF

SEQ ID NO: 282 - protein, 9 aa, Homo sapiens
  Table A; Target 282; HLA-C*16:04; ABCB5; ENSG00000004846; TAA
AREANAYDF

SEQ ID NO: 283 - protein, 9 aa, Homo sapiens
  Table A; Target 283; HLA-C*12:03; ABCB5; ENSG00000004846; TAA
ASKGRTTIV

SEQ ID NO: 284 - protein, 10 aa, Homo sapiens
  Table A; Target 284; HLA-A*30:02; ABCB5; ENSG00000004846; TAA
ASKVSLGAVY

SEQ ID NO: 285 - protein, 10 aa, Homo sapiens
  Table A; Target 285; HLA-A*32:01; ABCB5; ENSG00000004846; TAA
ASKVSLGAVY

SEQ ID NO: 286 - protein, 10 aa, Homo sapiens
  Table A; Target 286; HLA-B*15:01; ABCB5; ENSG00000004846; TAA
ASKVSLGAVY

SEQ ID NO: 287 - protein, 10 aa, Homo sapiens
  Table A; Target 287; HLA-B*15:03; ABCB5; ENSG00000004846; TAA
ASKVSLGAVY

SEQ ID NO: 288 - protein, 10 aa, Homo sapiens
  Table A; Target 288; HLA-B*46:01; ABCB5; ENSG00000004846; TAA
ASKVSLGAVY

SEQ ID NO: 289 - protein, 11 aa, Homo sapiens
  Table A; Target 289; HLA-B*57:01; ABCB5; ENSG00000004846; TAA
ASKVSLGAVYF

SEQ ID NO: 290 - protein, 9 aa, Homo sapiens
  Table A; Target 290; HLA-C*12:03; ABCB5; ENSG00000004846; TAA
ATGSRIGVL

SEQ ID NO: 291 - protein, 11 aa, Homo sapiens
  Table A; Target 291; HLA-A*11:01; ABCB5; ENSG00000004846; TAA
ATSALDNDSEK

SEQ ID NO: 292 - protein, 10 aa, Homo sapiens
  Table A; Target 292; HLA-A*03:02; ABCB5; ENSG00000004846; TAA
ATSALDSESK

SEQ ID NO: 293 - protein, 10 aa, Homo sapiens
  Table A; Target 293; HLA-A*11:01; ABCB5; ENSG00000004846; TAA
ATSALDSESK

SEQ ID NO: 294 - protein, 10 aa, Homo sapiens
  Table A; Target 294; HLA-B*27:02; ABCB5; ENSG00000004846; TAA
ATSALDSESK

SEQ ID NO: 295 - protein, 10 aa, Homo sapiens
  Table A; Target 295; HLA-A*02:01; ABCB5; ENSG00000004846; TAA
AVAEEVLSSI

SEQ ID NO: 296 - protein, 10 aa, Homo sapiens
  Table A; Target 296; HLA-A*02:03; ABCB5; ENSG00000004846; TAA
AVAEEVLSSI

SEQ ID NO: 297 - protein, 10 aa, Homo sapiens
  Table A; Target 297; HLA-A*03:01; ABCB5; ENSG00000004846; TAA
AVAEEVLSSI

SEQ ID NO: 298 - protein, 10 aa, Homo sapiens
  Table A; Target 298; HLA-A*25:01; ABCB5; ENSG00000004846; TAA
AVAEEVLSSI

SEQ ID NO: 299 - protein, 10 aa, Homo sapiens
  Table A; Target 299; HLA-A*26:01; ABCB5; ENSG00000004846; TAA
AVAEEVLSSI

SEQ ID NO: 300 - protein, 10 aa, Homo sapiens
  Table A; Target 300; HLA-B*13:02; ABCB5; ENSG00000004846; TAA
AVAEEVLSSI

SEQ ID NO: 301 - protein, 10 aa, Homo sapiens
  Table A; Target 301; HLA-C*07:06; ABCB5; ENSG00000004846; TAA
AVAEEVLSSI

SEQ ID NO: 302 - protein, 11 aa, Homo sapiens
  Table A; Target 302; HLA-A*11:01; ABCB5; ENSG00000004846; TAA
AVAEEVLSSIR

SEQ ID NO: 303 - protein, 11 aa, Homo sapiens
  Table A; Target 303; HLA-A*33:03; ABCB5; ENSG00000004846; TAA
AVAEEVLSSIR

SEQ ID NO: 304 - protein, 11 aa, Homo sapiens
  Table A; Target 304; HLA-A*68:01; ABCB5; ENSG00000004846; TAA
AVAEEVLSSIR

SEQ ID NO: 305 - protein, 11 aa, Homo sapiens
  Table A; Target 305; HLA-C*07:06; ABCB5; ENSG00000004846; TAA
AVAEEVLSSIR

SEQ ID NO: 306 - protein, 11 aa, Homo sapiens
  Table A; Target 306; HLA-A*29:02; ABCB5; ENSG00000004846; TAA
AVFFSVIHSSY

SEQ ID NO: 307 - protein, 11 aa, Homo sapiens
  Table A; Target 307; HLA-A*30:02; ABCB5; ENSG00000004846; TAA
AVFFSVIHSSY

SEQ ID NO: 308 - protein, 9 aa, Homo sapiens
  Table A; Target 308; HLA-A*11:01; ABCB5; ENSG00000004846; TAA
AVGSIEIFR

SEQ ID NO: 309 - protein, 9 aa, Homo sapiens
  Table A; Target 309; HLA-A*31:01; ABCB5; ENSG00000004846; TAA
AVGSIEIFR

SEQ ID NO: 310 - protein, 9 aa, Homo sapiens
  Table A; Target 310; HLA-A*33:03; ABCB5; ENSG00000004846; TAA
AVGSIEIFR

SEQ ID NO: 311 - protein, 9 aa, Homo sapiens
  Table A; Target 311; HLA-A*68:01; ABCB5; ENSG00000004846; TAA
AVGSIEIFR

SEQ ID NO: 312 - protein, 9 aa, Homo sapiens
  Table A; Target 312; HLA-C*07:06; ABCB5; ENSG00000004846; TAA
AVGSIEIFR

SEQ ID NO: 313 - protein, 10 aa, Homo sapiens
  Table A; Target 313; HLA-A*02:04; ABCB5; ENSG00000004846; TAA
AVGSIEIFRF

SEQ ID NO: 314 - protein, 10 aa, Homo sapiens
  Table A; Target 314; HLA-A*29:02; ABCB5; ENSG00000004846; TAA
AVGSIEIFRF

SEQ ID NO: 315 - protein, 10 aa, Homo sapiens
  Table A; Target 315; HLA-A*02:07; ABCB5; ENSG00000004846; TAA
AVPHFETFAI

SEQ ID NO: 316 - protein, 8 aa, Homo sapiens
  Table A; Target 316; HLA-A*03:02; ABCB5; ENSG00000004846; TAA
AVQAALEK

SEQ ID NO: 317 - protein, 8 aa, Homo sapiens
  Table A; Target 317; HLA-A*11:01; ABCB5; ENSG00000004846; TAA
AVQAALEK

SEQ ID NO: 318 - protein, 8 aa, Homo sapiens
  Table A; Target 318; HLA-B*27:02; ABCB5; ENSG00000004846; TAA
AVQAALEK

SEQ ID NO: 319 - protein, 9 aa, Homo sapiens
  Table A; Target 319; HLA-B*56:01; ABCB5; ENSG00000004846; TAA
AVQAALEKA

SEQ ID NO: 320 - protein, 11 aa, Homo sapiens
  Table A; Target 320; HLA-A*03:02; ABCB5; ENSG00000004846; TAA
AVQAALEKASK

SEQ ID NO: 321 - protein, 11 aa, Homo sapiens
  Table A; Target 321; HLA-A*11:01; ABCB5; ENSG00000004846; TAA
AVQAALEKASK

SEQ ID NO: 322 - protein, 9 aa, Homo sapiens
  Table A; Target 322; HLA-A*02:03; ABCB5; ENSG00000004846; TAA
AVTGMIETA

SEQ ID NO: 323 - protein, 9 aa, Homo sapiens
  Table A; Target 323; HLA-B*55:01; ABCB5; ENSG00000004846; TAA
AVTGMIETA

SEQ ID NO: 324 - protein, 9 aa, Homo sapiens
  Table A; Target 324; HLA-B*56:01; ABCB5; ENSG00000004846; TAA
AVTGMIETA

SEQ ID NO: 325 - protein, 10 aa, Homo sapiens
  Table A; Target 325; HLA-A*29:02; ABCB5; ENSG00000004846; TAA
AVYFFMNGTY

SEQ ID NO: 326 - protein, 10 aa, Homo sapiens
  Table A; Target 326; HLA-A*30:02; ABCB5; ENSG00000004846; TAA
AVYFFMNGTY

SEQ ID NO: 327 - protein, 8 aa, Homo sapiens
  Table A; Target 327; HLA-A*23:01; ABCB5; ENSG00000004846; TAA
AYAAGFRF

SEQ ID NO: 328 - protein, 8 aa, Homo sapiens
  Table A; Target 328; HLA-A*24:02; ABCB5; ENSG00000004846; TAA
AYAAGFRF

SEQ ID NO: 329 - protein, 8 aa, Homo sapiens
  Table A; Target 329; HLA-B*35:01; ABCB5; ENSG00000004846; TAA
AYDFIMEF

SEQ ID NO: 330 - protein, 8 aa, Homo sapiens
  Table A; Target 330; HLA-C*04:01; ABCB5; ENSG00000004846; TAA
AYDFIMEF

SEQ ID NO: 331 - protein, 11 aa, Homo sapiens
  Table A; Target 331; HLA-A*23:01; ABCB5; ENSG00000004846; TAA
AYGAMAIGETL

SEQ ID NO: 332 - protein, 11 aa, Homo sapiens
  Table A; Target 332; HLA-A*24:02; ABCB5; ENSG00000004846; TAA
AYGAMAIGETL

SEQ ID NO: 333 - protein, 9 aa, Homo sapiens
  Table A; Target 333; HLA-C*14:02; ABCB5; ENSG00000004846; TAA
AYGDNSRVV

SEQ ID NO: 334 - protein, 9 aa, Homo sapiens
  Table A; Target 334; HLA-C*16:01; ABCB5; ENSG00000004846; TAA
AYGDNSRVV

SEQ ID NO: 335 - protein, 9 aa, Homo sapiens
  Table A; Target 335; HLA-C*16:02; ABCB5; ENSG00000004846; TAA
AYGDNSRVV

SEQ ID NO: 336 - protein, 9 aa, Homo sapiens
  Table A; Target 336; HLA-A*23:01; ABCB5; ENSG00000004846; TAA
AYLIQAGRM

SEQ ID NO: 337 - protein, 9 aa, Homo sapiens
  Table A; Target 337; HLA-A*24:02; ABCB5; ENSG00000004846; TAA
AYLIQAGRM

SEQ ID NO: 338 - protein, 9 aa, Homo sapiens
  Table A; Target 338; HLA-C*14:02; ABCB5; ENSG00000004846; TAA
AYLIQAGRM

SEQ ID NO: 339 - protein, 8 aa, Homo sapiens
  Table A; Target 339; HLA-C*14:02; ABCB5; ENSG00000004846; TAA
AYSKAGAV

SEQ ID NO: 340 - protein, 9 aa, Homo sapiens
  Table A; Target 340; HLA-C*14:02; ABCB5; ENSG00000004846; TAA
AYSKAGAVA

SEQ ID NO: 341 - protein, 9 aa, Homo sapiens
  Table A; Target 341; HLA-A*24:02; ABCB5; ENSG00000004846; TAA
CLPLMPLVL

SEQ ID NO: 342 - protein, 10 aa, Homo sapiens
  Table A; Target 342; HLA-A*29:02; ABCB5; ENSG00000004846; TAA
CLVQTNTTNY

SEQ ID NO: 343 - protein, 10 aa, Homo sapiens
  Table A; Target 343; HLA-A*30:02; ABCB5; ENSG00000004846; TAA
CLVQTNTTNY

SEQ ID NO: 344 - protein, 10 aa, Homo sapiens
  Table A; Target 344; HLA-B*15:01; ABCB5; ENSG00000004846; TAA
CLVQTNTTNY

SEQ ID NO: 345 - protein, 10 aa, Homo sapiens
  Table A; Target 345; HLA-B*15:03; ABCB5; ENSG00000004846; TAA
CLVQTNTTNY

SEQ ID NO: 346 - protein, 10 aa, Homo sapiens
  Table A; Target 346; HLA-B*46:01; ABCB5; ENSG00000004846; TAA
CLVQTNTTNY

SEQ ID NO: 347 - protein, 10 aa, Homo sapiens
  Table A; Target 347; HLA-C*07:04; ABCB5; ENSG00000004846; TAA
CLVQTNTTNY

SEQ ID NO: 348 - protein, 9 aa, Homo sapiens
  Table A; Target 348; HLA-A*01:01; ABCB5; ENSG00000004846; TAA
CSIAENIAY

SEQ ID NO: 349 - protein, 9 aa, Homo sapiens
  Table A; Target 349; HLA-A*29:02; ABCB5; ENSG00000004846; TAA
CSIAENIAY

SEQ ID NO: 350 - protein, 9 aa, Homo sapiens
  Table A; Target 350; HLA-A*30:02; ABCB5; ENSG00000004846; TAA
CSIAENIAY

SEQ ID NO: 351 - protein, 9 aa, Homo sapiens
  Table A; Target 351; HLA-B*15:01; ABCB5; ENSG00000004846; TAA
CSIAENIAY

SEQ ID NO: 352 - protein, 9 aa, Homo sapiens
  Table A; Target 352; HLA-B*15:03; ABCB5; ENSG00000004846; TAA
CSIAENIAY

SEQ ID NO: 353 - protein, 9 aa, Homo sapiens
  Table A; Target 353; HLA-B*27:05; ABCB5; ENSG00000004846; TAA
CSIAENIAY

SEQ ID NO: 354 - protein, 9 aa, Homo sapiens
  Table A; Target 354; HLA-B*35:01; ABCB5; ENSG00000004846; TAA
CSIAENIAY

SEQ ID NO: 355 - protein, 9 aa, Homo sapiens
  Table A; Target 355; HLA-B*46:01; ABCB5; ENSG00000004846; TAA
CSIAENIAY

SEQ ID NO: 356 - protein, 9 aa, Homo sapiens
  Table A; Target 356; HLA-B*58:01; ABCB5; ENSG00000004846; TAA
CSIAENIAY

SEQ ID NO: 357 - protein, 9 aa, Homo sapiens
  Table A; Target 357; HLA-C*02:02; ABCB5; ENSG00000004846; TAA
CSIAENIAY

SEQ ID NO: 358 - protein, 9 aa, Homo sapiens
  Table A; Target 358; HLA-C*07:04; ABCB5; ENSG00000004846; TAA
CSIAENIAY

SEQ ID NO: 359 - protein, 9 aa, Homo sapiens
  Table A; Target 359; HLA-C*12:03; ABCB5; ENSG00000004846; TAA
CSIAENIAY

SEQ ID NO: 360 - protein, 9 aa, Homo sapiens
  Table A; Target 360; HLA-C*16:01; ABCB5; ENSG00000004846; TAA
CSIAENIAY

SEQ ID NO: 361 - protein, 9 aa, Homo sapiens
  Table A; Target 361; HLA-C*16:04; ABCB5; ENSG00000004846; TAA
CSIAENIAY

SEQ ID NO: 362 - protein, 11 aa, Homo sapiens
  Table A; Target 362; HLA-A*24:02; ABCB5; ENSG00000004846; TAA
CYAFSHAFIYF

SEQ ID NO: 363 - protein, 8 aa, Homo sapiens
  Table A; Target 363; HLA-B*51:01; ABCB5; ENSG00000004846; TAA
DAEIYSMI

SEQ ID NO: 364 - protein, 9 aa, Homo sapiens
  Table A; Target 364; HLA-B*35:01; ABCB5; ENSG00000004846; TAA
DAEIYSMIF

SEQ ID NO: 365 - protein, 9 aa, Homo sapiens
  Table A; Target 365; HLA-B*35:03; ABCB5; ENSG00000004846; TAA
DAEIYSMIF

SEQ ID NO: 366 - protein, 9 aa, Homo sapiens
  Table A; Target 366; HLA-A*26:01; ABCB5; ENSG00000004846; TAA
DAKDFGIKR

SEQ ID NO: 367 - protein, 9 aa, Homo sapiens
  Table A; Target 367; HLA-A*31:01; ABCB5; ENSG00000004846; TAA
DAKDFGIKR

SEQ ID NO: 368 - protein, 9 aa, Homo sapiens
  Table A; Target 368; HLA-A*33:01; ABCB5; ENSG00000004846; TAA
DAKDFGIKR

SEQ ID NO: 369 - protein, 9 aa, Homo sapiens
  Table A; Target 369; HLA-A*33:03; ABCB5; ENSG00000004846; TAA
DAKDFGIKR

SEQ ID NO: 370 - protein, 9 aa, Homo sapiens
  Table A; Target 370; HLA-A*68:01; ABCB5; ENSG00000004846; TAA
DAKDFGIKR

SEQ ID NO: 371 - protein, 9 aa, Homo sapiens
  Table A; Target 371; HLA-A*68:02; ABCB5; ENSG00000004846; TAA
DAKDFGIKR

SEQ ID NO: 372 - protein, 9 aa, Homo sapiens
  Table A; Target 372; HLA-C*07:06; ABCB5; ENSG00000004846; TAA
DAKDFGIKR

SEQ ID NO: 373 - protein, 9 aa, Homo sapiens
  Table A; Target 373; HLA-A*25:01; ABCB5; ENSG00000004846; TAA
DAKELNVQW

SEQ ID NO: 374 - protein, 9 aa, Homo sapiens
  Table A; Target 374; HLA-A*26:01; ABCB5; ENSG00000004846; TAA
DAKELNVQW

SEQ ID NO: 375 - protein, 9 aa, Homo sapiens
  Table A; Target 375; HLA-A*33:01; ABCB5; ENSG00000004846; TAA
DAKELNVQW

SEQ ID NO: 376 - protein, 9 aa, Homo sapiens
  Table A; Target 376; HLA-A*33:03; ABCB5; ENSG00000004846; TAA
DAKELNVQW

SEQ ID NO: 377 - protein, 9 aa, Homo sapiens
  Table A; Target 377; HLA-B*57:01; ABCB5; ENSG00000004846; TAA
DAKELNVQW

SEQ ID NO: 378 - protein, 9 aa, Homo sapiens
  Table A; Target 378; HLA-C*07:06; ABCB5; ENSG00000004846; TAA
DAKELNVQW

SEQ ID NO: 379 - protein, 11 aa, Homo sapiens
  Table A; Target 379; HLA-A*33:01; ABCB5; ENSG00000004846; TAA
DAKELNVQWLR

SEQ ID NO: 380 - protein, 10 aa, Homo sapiens
  Table A; Target 380; HLA-A*68:01; ABCB5; ENSG00000004846; TAA
DDVTDEEMER

SEQ ID NO: 381 - protein, 9 aa, Homo sapiens
  Table A; Target 381; HLA-B*18:01; ABCB5; ENSG00000004846; TAA
DEIKEAANA

SEQ ID NO: 382 - protein, 10 aa, Homo sapiens
  Table A; Target 382; HLA-B*18:01; ABCB5; ENSG00000004846; TAA
DEIKEAANAA

SEQ ID NO: 383 - protein, 8 aa, Homo sapiens
  Table A; Target 383; HLA-B*18:01; ABCB5; ENSG00000004846; TAA
DENDIRAL

SEQ ID NO: 384 - protein, 8 aa, Homo sapiens
  Table A; Target 384; HLA-B*44:02; ABCB5; ENSG00000004846; TAA
DENDIRAL

SEQ ID NO: 385 - protein, 10 aa, Homo sapiens
  Table A; Target 385; HLA-A*30:01; ABCB5; ENSG00000004846; TAA
DENDIRALNV

SEQ ID NO: 386 - protein, 10 aa, Homo sapiens
  Table A; Target 386; HLA-B*18:01; ABCB5; ENSG00000004846; TAA
DENDIRALNV

SEQ ID NO: 387 - protein, 10 aa, Homo sapiens
  Table A; Target 387; HLA-B*44:02; ABCB5; ENSG00000004846; TAA
DENDIRALNV

SEQ ID NO: 388 - protein, 10 aa, Homo sapiens
  Table A; Target 388; HLA-B*44:03; ABCB5; ENSG00000004846; TAA
DENDIRALNV

SEQ ID NO: 389 - protein, 10 aa, Homo sapiens
  Table A; Target 389; HLA-B*49:01; ABCB5; ENSG00000004846; TAA
DENDIRALNV

SEQ ID NO: 390 - protein, 10 aa, Homo sapiens
  Table A; Target 390; HLA-B*51:01; ABCB5; ENSG00000004846; TAA
DENDIRALNV

SEQ ID NO: 391 - protein, 11 aa, Homo sapiens
  Table A; Target 391; HLA-B*18:01; ABCB5; ENSG00000004846; TAA
DENDIRALNVR

SEQ ID NO: 392 - protein, 9 aa, Homo sapiens
  Table A; Target 392; HLA-A*25:01; ABCB5; ENSG00000004846; TAA
DEQMESMTY

SEQ ID NO: 393 - protein, 9 aa, Homo sapiens
  Table A; Target 393; HLA-B*15:03; ABCB5; ENSG00000004846; TAA
DEQMESMTY

SEQ ID NO: 394 - protein, 9 aa, Homo sapiens
  Table A; Target 394; HLA-B*18:01; ABCB5; ENSG00000004846; TAA
DEQMESMTY

SEQ ID NO: 395 - protein, 9 aa, Homo sapiens
  Table A; Target 395; HLA-B*27:02; ABCB5; ENSG00000004846; TAA
DEQMESMTY

SEQ ID NO: 396 - protein, 9 aa, Homo sapiens
  Table A; Target 396; HLA-B*39:01; ABCB5; ENSG00000004846; TAA
DEQMESMTY

SEQ ID NO: 397 - protein, 9 aa, Homo sapiens
  Table A; Target 397; HLA-B*44:02; ABCB5; ENSG00000004846; TAA
DEQMESMTY

SEQ ID NO: 398 - protein, 9 aa, Homo sapiens
  Table A; Target 398; HLA-B*44:03; ABCB5; ENSG00000004846; TAA
DEQMESMTY

SEQ ID NO: 399 - protein, 9 aa, Homo sapiens
  Table A; Target 399; HLA-C*07:01; ABCB5; ENSG00000004846; TAA
DEQMESMTY

SEQ ID NO: 400 - protein, 9 aa, Homo sapiens
  Table A; Target 400; HLA-C*07:04; ABCB5; ENSG00000004846; TAA
DEQMESMTY

SEQ ID NO: 401 - protein, 9 aa, Homo sapiens
  Table A; Target 401; HLA-C*16:04; ABCB5; ENSG00000004846; TAA
DEQMESMTY

SEQ ID NO: 402 - protein, 8 aa, Homo sapiens
  Table A; Target 402; HLA-B*08:01; ABCB5; ENSG00000004846; TAA
DFGIKRTI

SEQ ID NO: 403 - protein, 9 aa, Homo sapiens
  Table A; Target 403; HLA-A*33:01; ABCB5; ENSG00000004846; TAA
DFIMEFPNK

SEQ ID NO: 404 - protein, 9 aa, Homo sapiens
  Table A; Target 404; HLA-B*35:03; ABCB5; ENSG00000004846; TAA
DGIGDKIAL

SEQ ID NO: 405 - protein, 8 aa, Homo sapiens
  Table A; Target 405; HLA-B*51:01; ABCB5; ENSG00000004846; TAA
DGLDITLM

SEQ ID NO: 406 - protein, 9 aa, Homo sapiens
  Table A; Target 406; HLA-B*51:01; ABCB5; ENSG00000004846; TAA
DGLDITLMI

SEQ ID NO: 407 - protein, 8 aa, Homo sapiens
  Table A; Target 407; HLA-B*51:01; ABCB5; ENSG00000004846; TAA
DGVDAKEL

SEQ ID NO: 408 - protein, 10 aa, Homo sapiens
  Table A; Target 408; HLA-A*25:01; ABCB5; ENSG00000004846; TAA
DIAQIQGATG

SEQ ID NO: 409 - protein, 10 aa, Homo sapiens
  Table A; Target 409; HLA-A*26:01; ABCB5; ENSG00000004846; TAA
DIAQIQGATG

SEQ ID NO: 410 - protein, 10 aa, Homo sapiens
  Table A; Target 410; HLA-A*68:01; ABCB5; ENSG00000004846; TAA
DIAQIQGATG

SEQ ID NO: 411 - protein, 8 aa, Homo sapiens
  Table A; Target 411; HLA-A*33:01; ABCB5; ENSG00000004846; TAA
DIGELNTR

SEQ ID NO: 412 - protein, 8 aa, Homo sapiens
  Table A; Target 412; HLA-A*33:03; ABCB5; ENSG00000004846; TAA
DIGELNTR

SEQ ID NO: 413 - protein, 9 aa, Homo sapiens
  Table A; Target 413; HLA-A*26:01; ABCB5; ENSG00000004846; TAA
DIGELNTRM

SEQ ID NO: 414 - protein, 9 aa, Homo sapiens
  Table A; Target 414; HLA-B*08:01; ABCB5; ENSG00000004846; TAA
DIKKADEQM

SEQ ID NO: 415 - protein, 8 aa, Homo sapiens
  Table A; Target 415; HLA-A*33:01; ABCB5; ENSG00000004846; TAA
DIRALNVR

SEQ ID NO: 416 - protein, 11 aa, Homo sapiens
  Table A; Target 416; HLA-A*33:01; ABCB5; ENSG00000004846; TAA
DIRALNVRHYR

SEQ ID NO: 417 - protein, 9 aa, Homo sapiens
  Table A; Target 417; HLA-A*68:02; ABCB5; ENSG00000004846; TAA
DIYFKLVNA

SEQ ID NO: 418 - protein, 9 aa, Homo sapiens
  Table A; Target 418; HLA-B*08:01; ABCB5; ENSG00000004846; TAA
DIYFKLVNA

SEQ ID NO: 419 - protein, 9 aa, Homo sapiens
  Table A; Target 419; HLA-B*54:01; ABCB5; ENSG00000004846; TAA
DIYFKLVNA

SEQ ID NO: 420 - protein, 11 aa, Homo sapiens
  Table A; Target 420; HLA-B*38:01; ABCB5; ENSG00000004846; TAA
DKISDGIGDKI

SEQ ID NO: 421 - protein, 8 aa, Homo sapiens
  Table A; Target 421; HLA-B*18:01; ABCB5; ENSG00000004846; TAA
DMTLLTLY

SEQ ID NO: 422 - protein, 9 aa, Homo sapiens
  Table A; Target 422; HLA-A*01:01; ABCB5; ENSG00000004846; TAA
DMTLLTLYY

SEQ ID NO: 423 - protein, 9 aa, Homo sapiens
  Table A; Target 423; HLA-A*26:01; ABCB5; ENSG00000004846; TAA
DMTLLTLYY

SEQ ID NO: 424 - protein, 9 aa, Homo sapiens
  Table A; Target 424; HLA-A*29:02; ABCB5; ENSG00000004846; TAA
DMTLLTLYY

SEQ ID NO: 425 - protein, 8 aa, Homo sapiens
  Table A; Target 425; HLA-A*26:01; ABCB5; ENSG00000004846; TAA
DNFSTAGY

SEQ ID NO: 426 - protein, 8 aa, Homo sapiens
  Table A; Target 426; HLA-B*18:01; ABCB5; ENSG00000004846; TAA
DNFSTAGY

SEQ ID NO: 427 - protein, 8 aa, Homo sapiens
  Table A; Target 427; HLA-B*35:03; ABCB5; ENSG00000004846; TAA
DPDDGFIM

SEQ ID NO: 428 - protein, 8 aa, Homo sapiens
  Table A; Target 428; HLA-B*55:01; ABCB5; ENSG00000004846; TAA
DPDDGFIM

SEQ ID NO: 429 - protein, 9 aa, Homo sapiens
  Table A; Target 429; HLA-B*35:03; ABCB5; ENSG00000004846; TAA
DPDDGFIMV

SEQ ID NO: 430 - protein, 9 aa, Homo sapiens
  Table A; Target 430; HLA-B*38:01; ABCB5; ENSG00000004846; TAA
DPDDGFIMV

SEQ ID NO: 431 - protein, 9 aa, Homo sapiens
  Table A; Target 431; HLA-B*39:01; ABCB5; ENSG00000004846; TAA
DPDDGFIMV

SEQ ID NO: 432 - protein, 9 aa, Homo sapiens
  Table A; Target 432; HLA-B*51:01; ABCB5; ENSG00000004846; TAA
DPDDGFIMV

SEQ ID NO: 433 - protein, 9 aa, Homo sapiens
  Table A; Target 433; HLA-B*54:01; ABCB5; ENSG00000004846; TAA
DPDDGFIMV

SEQ ID NO: 434 - protein, 9 aa, Homo sapiens
  Table A; Target 434; HLA-B*55:01; ABCB5; ENSG00000004846; TAA
DPDDGFIMV

SEQ ID NO: 435 - protein, 9 aa, Homo sapiens
  Table A; Target 435; HLA-C*05:01; ABCB5; ENSG00000004846; TAA
DPDDGFIMV

SEQ ID NO: 436 - protein, 8 aa, Homo sapiens
  Table A; Target 436; HLA-B*08:01; ABCB5; ENSG00000004846; TAA
DPVQGQVL

SEQ ID NO: 437 - protein, 8 aa, Homo sapiens
  Table A; Target 437; HLA-B*35:01; ABCB5; ENSG00000004846; TAA
DPVQGQVL

SEQ ID NO: 438 - protein, 8 aa, Homo sapiens
  Table A; Target 438; HLA-B*35:03; ABCB5; ENSG00000004846; TAA
DPVQGQVL

SEQ ID NO: 439 - protein, 8 aa, Homo sapiens
  Table A; Target 439; HLA-B*51:01; ABCB5; ENSG00000004846; TAA
DPVQGQVL

SEQ ID NO: 440 - protein, 9 aa, Homo sapiens
  Table A; Target 440; HLA-B*18:01; ABCB5; ENSG00000004846; TAA
DPVQGQVLF

SEQ ID NO: 441 - protein, 9 aa, Homo sapiens
  Table A; Target 441; HLA-B*35:01; ABCB5; ENSG00000004846; TAA
DPVQGQVLF

SEQ ID NO: 442 - protein, 9 aa, Homo sapiens
  Table A; Target 442; HLA-B*35:03; ABCB5; ENSG00000004846; TAA
DPVQGQVLF

SEQ ID NO: 443 - protein, 11 aa, Homo sapiens
  Table A; Target 443; HLA-A*33:01; ABCB5; ENSG00000004846; TAA
DSCDIGELNTR

SEQ ID NO: 444 - protein, 11 aa, Homo sapiens
  Table A; Target 444; HLA-A*33:03; ABCB5; ENSG00000004846; TAA
DSCDIGELNTR

SEQ ID NO: 445 - protein, 11 aa, Homo sapiens
  Table A; Target 445; HLA-A*68:01; ABCB5; ENSG00000004846; TAA
DSCDIGELNTR

SEQ ID NO: 446 - protein, 9 aa, Homo sapiens
  Table A; Target 446; HLA-A*25:01; ABCB5; ENSG00000004846; TAA
DTCEGNLEF

SEQ ID NO: 447 - protein, 9 aa, Homo sapiens
  Table A; Target 447; HLA-A*26:01; ABCB5; ENSG00000004846; TAA
DTCEGNLEF

SEQ ID NO: 448 - protein, 10 aa, Homo sapiens
  Table A; Target 448; HLA-A*33:01; ABCB5; ENSG00000004846; TAA
DTCEGNLEFR

SEQ ID NO: 449 - protein, 10 aa, Homo sapiens
  Table A; Target 449; HLA-A*68:02; ABCB5; ENSG00000004846; TAA
DVFILRGLSL

SEQ ID NO: 450 - protein, 10 aa, Homo sapiens
  Table A; Target 450; HLA-B*08:01; ABCB5; ENSG00000004846; TAA
DVFILRGLSL

SEQ ID NO: 451 - protein, 9 aa, Homo sapiens
  Table A; Target 451; HLA-A*26:01; ABCB5; ENSG00000004846; TAA
DVTDEEMER

SEQ ID NO: 452 - protein, 9 aa, Homo sapiens
  Table A; Target 452; HLA-A*33:01; ABCB5; ENSG00000004846; TAA
DVTDEEMER

SEQ ID NO: 453 - protein, 9 aa, Homo sapiens
  Table A; Target 453; HLA-A*33:03; ABCB5; ENSG00000004846; TAA
DVTDEEMER

SEQ ID NO: 454 - protein, 9 aa, Homo sapiens
  Table A; Target 454; HLA-A*68:01; ABCB5; ENSG00000004846; TAA
DVTDEEMER

SEQ ID NO: 455 - protein, 9 aa, Homo sapiens
  Table A; Target 455; HLA-C*07:06; ABCB5; ENSG00000004846; TAA
DVTDEEMER

SEQ ID NO: 456 - protein, 8 aa, Homo sapiens
  Table A; Target 456; HLA-B*51:01; ABCB5; ENSG00000004846; TAA
EAANAANI

SEQ ID NO: 457 - protein, 11 aa, Homo sapiens
  Table A; Target 457; HLA-A*25:01; ABCB5; ENSG00000004846; TAA
EAANAANIHSF

SEQ ID NO: 458 - protein, 11 aa, Homo sapiens
  Table A; Target 458; HLA-A*26:01; ABCB5; ENSG00000004846; TAA
EAANAANIHSF

SEQ ID NO: 459 - protein, 11 aa, Homo sapiens
  Table A; Target 459; HLA-A*33:01; ABCB5; ENSG00000004846; TAA
EAANAANIHSF

SEQ ID NO: 460 - protein, 11 aa, Homo sapiens
  Table A; Target 460; HLA-A*33:03; ABCB5; ENSG00000004846; TAA
EAANAANIHSF

SEQ ID NO: 461 - protein, 11 aa, Homo sapiens
  Table A; Target 461; HLA-A*68:01; ABCB5; ENSG00000004846; TAA
EAANAANIHSF

SEQ ID NO: 462 - protein, 11 aa, Homo sapiens
  Table A; Target 462; HLA-A*68:02; ABCB5; ENSG00000004846; TAA
EAANAANIHSF

SEQ ID NO: 463 - protein, 11 aa, Homo sapiens
  Table A; Target 463; HLA-B*27:02; ABCB5; ENSG00000004846; TAA
EAANAANIHSF

SEQ ID NO: 464 - protein, 11 aa, Homo sapiens
  Table A; Target 464; HLA-B*35:01; ABCB5; ENSG00000004846; TAA
EAANAANIHSF

SEQ ID NO: 465 - protein, 11 aa, Homo sapiens
  Table A; Target 465; HLA-B*44:03; ABCB5; ENSG00000004846; TAA
EAANAANIHSF

SEQ ID NO: 466 - protein, 11 aa, Homo sapiens
  Table A; Target 466; HLA-C*07:06; ABCB5; ENSG00000004846; TAA
EAANAANIHSF

SEQ ID NO: 467 - protein, 11 aa, Homo sapiens
  Table A; Target 467; HLA-C*16:04; ABCB5; ENSG00000004846; TAA
EAANAANIHSF

SEQ ID NO: 468 - protein, 9 aa, Homo sapiens
  Table A; Target 468; HLA-A*23:01; ABCB5; ENSG00000004846; TAA
EALENIRTI

SEQ ID NO: 469 - protein, 9 aa, Homo sapiens
  Table A; Target 469; HLA-A*25:01; ABCB5; ENSG00000004846; TAA
EALENIRTI

SEQ ID NO: 470 - protein, 9 aa, Homo sapiens
  Table A; Target 470; HLA-A*26:01; ABCB5; ENSG00000004846; TAA
EALENIRTI

SEQ ID NO: 471 - protein, 9 aa, Homo sapiens
  Table A; Target 471; HLA-A*33:01; ABCB5; ENSG00000004846; TAA
EALENIRTI

SEQ ID NO: 472 - protein, 9 aa, Homo sapiens
  Table A; Target 472; HLA-B*51:01; ABCB5; ENSG00000004846; TAA
EALENIRTI

SEQ ID NO: 473 - protein, 9 aa, Homo sapiens
  Table A; Target 473; HLA-C*03:04; ABCB5; ENSG00000004846; TAA
EALENIRTI

SEQ ID NO: 474 - protein, 9 aa, Homo sapiens
  Table A; Target 474; HLA-C*12:03; ABCB5; ENSG00000004846; TAA
EALENIRTI

SEQ ID NO: 475 - protein, 9 aa, Homo sapiens
  Table A; Target 475; HLA-C*16:02; ABCB5; ENSG00000004846; TAA
EALENIRTI

SEQ ID NO: 476 - protein, 10 aa, Homo sapiens
  Table A; Target 476; HLA-B*51:01; ABCB5; ENSG00000004846; TAA
EALENIRTIV

SEQ ID NO: 477 - protein, 9 aa, Homo sapiens
  Table A; Target 477; HLA-B*35:01; ABCB5; ENSG00000004846; TAA
EANAYDFIM

SEQ ID NO: 478 - protein, 9 aa, Homo sapiens
  Table A; Target 478; HLA-B*35:03; ABCB5; ENSG00000004846; TAA
EANAYDFIM

SEQ ID NO: 479 - protein, 9 aa, Homo sapiens
  Table A; Target 479; HLA-B*55:01; ABCB5; ENSG00000004846; TAA
EANAYDFIM

SEQ ID NO: 480 - protein, 11 aa, Homo sapiens
  Table A; Target 480; HLA-A*68:01; ABCB5; ENSG00000004846; TAA
EATSALDSESK

SEQ ID NO: 481 - protein, 11 aa, Homo sapiens
  Table A; Target 481; HLA-B*27:02; ABCB5; ENSG00000004846; TAA
EATSALDSESK

SEQ ID NO: 482 - protein, 8 aa, Homo sapiens
  Table A; Target 482; HLA-B*51:01; ABCB5; ENSG00000004846; TAA
EAVGSIEI

SEQ ID NO: 483 - protein, 9 aa, Homo sapiens
  Table A; Target 483; HLA-A*25:01; ABCB5; ENSG00000004846; TAA
EAVGSIEIF

SEQ ID NO: 484 - protein, 9 aa, Homo sapiens
  Table A; Target 484; HLA-A*26:01; ABCB5; ENSG00000004846; TAA
EAVGSIEIF

SEQ ID NO: 485 - protein, 9 aa, Homo sapiens
  Table A; Target 485; HLA-A*68:01; ABCB5; ENSG00000004846; TAA
EAVGSIEIF

SEQ ID NO: 486 - protein, 9 aa, Homo sapiens
  Table A; Target 486; HLA-B*35:01; ABCB5; ENSG00000004846; TAA
EAVGSIEIF

SEQ ID NO: 487 - protein, 9 aa, Homo sapiens
  Table A; Target 487; HLA-B*35:03; ABCB5; ENSG00000004846; TAA
EAVGSIEIF

SEQ ID NO: 488 - protein, 9 aa, Homo sapiens
  Table A; Target 488; HLA-C*07:06; ABCB5; ENSG00000004846; TAA
EAVGSIEIF

SEQ ID NO: 489 - protein, 9 aa, Homo sapiens
  Table A; Target 489; HLA-C*12:03; ABCB5; ENSG00000004846; TAA
EAVGSIEIF

SEQ ID NO: 490 - protein, 10 aa, Homo sapiens
  Table A; Target 490; HLA-A*33:01; ABCB5; ENSG00000004846; TAA
EAVGSIEIFR

SEQ ID NO: 491 - protein, 10 aa, Homo sapiens
  Table A; Target 491; HLA-A*33:03; ABCB5; ENSG00000004846; TAA
EAVGSIEIFR

SEQ ID NO: 492 - protein, 10 aa, Homo sapiens
  Table A; Target 492; HLA-A*68:01; ABCB5; ENSG00000004846; TAA
EAVGSIEIFR

SEQ ID NO: 493 - protein, 10 aa, Homo sapiens
  Table A; Target 493; HLA-A*68:02; ABCB5; ENSG00000004846; TAA
EAVGSIEIFR

SEQ ID NO: 494 - protein, 10 aa, Homo sapiens
  Table A; Target 494; HLA-B*27:02; ABCB5; ENSG00000004846; TAA
EAVGSIEIFR

SEQ ID NO: 495 - protein, 10 aa, Homo sapiens
  Table A; Target 495; HLA-C*07:06; ABCB5; ENSG00000004846; TAA
EAVGSIEIFR

SEQ ID NO: 496 - protein, 11 aa, Homo sapiens
  Table A; Target 496; HLA-A*26:01; ABCB5; ENSG00000004846; TAA
EAVGSIEIFRF

SEQ ID NO: 497 - protein, 9 aa, Homo sapiens
  Table A; Target 497; HLA-A*26:01; ABCB5; ENSG00000004846; TAA
EDMTLLTLY

SEQ ID NO: 498 - protein, 9 aa, Homo sapiens
  Table A; Target 498; HLA-A*29:02; ABCB5; ENSG00000004846; TAA
EDMTLLTLY

SEQ ID NO: 499 - protein, 9 aa, Homo sapiens
  Table A; Target 499; HLA-B*18:01; ABCB5; ENSG00000004846; TAA
EDMTLLTLY

SEQ ID NO: 500 - protein, 9 aa, Homo sapiens
  Table A; Target 500; HLA-B*44:02; ABCB5; ENSG00000004846; TAA
EDMTLLTLY

SEQ ID NO: 501 - protein, 9 aa, Homo sapiens
  Table A; Target 501; HLA-B*44:03; ABCB5; ENSG00000004846; TAA
EDMTLLTLY

SEQ ID NO: 502 - protein, 10 aa, Homo sapiens
  Table A; Target 502; HLA-B*44:02; ABCB5; ENSG00000004846; TAA
EDMTLLTLYY

SEQ ID NO: 503 - protein, 8 aa, Homo sapiens
  Table A; Target 503; HLA-B*18:01; ABCB5; ENSG00000004846; TAA
EEMLQTQH

SEQ ID NO: 504 - protein, 9 aa, Homo sapiens
  Table A; Target 504; HLA-A*33:03; ABCB5; ENSG00000004846; TAA
EEMLQTQHR

SEQ ID NO: 505 - protein, 9 aa, Homo sapiens
  Table A; Target 505; HLA-B*44:02; ABCB5; ENSG00000004846; TAA
EEMLQTQHR

SEQ ID NO: 506 - protein, 9 aa, Homo sapiens
  Table A; Target 506; HLA-B*44:03; ABCB5; ENSG00000004846; TAA
EEMLQTQHR

SEQ ID NO: 507 - protein, 9 aa, Homo sapiens
  Table A; Target 507; HLA-A*33:03; ABCB5; ENSG00000004846; TAA
EEMQENYQR

SEQ ID NO: 508 - protein, 9 aa, Homo sapiens
  Table A; Target 508; HLA-B*44:02; ABCB5; ENSG00000004846; TAA
EEMQENYQR

SEQ ID NO: 509 - protein, 9 aa, Homo sapiens
  Table A; Target 509; HLA-B*44:03; ABCB5; ENSG00000004846; TAA
EEMQENYQR

SEQ ID NO: 510 - protein, 10 aa, Homo sapiens
  Table A; Target 510; HLA-B*44:02; ABCB5; ENSG00000004846; TAA
EEMQENYQRN

SEQ ID NO: 511 - protein, 9 aa, Homo sapiens
  Table A; Target 511; HLA-B*44:02; ABCB5; ENSG00000004846; TAA
EESTQSKEI

SEQ ID NO: 512 - protein, 9 aa, Homo sapiens
  Table A; Target 512; HLA-B*44:03; ABCB5; ENSG00000004846; TAA
EESTQSKEI

SEQ ID NO: 513 - protein, 9 aa, Homo sapiens
  Table A; Target 513; HLA-B*49:01; ABCB5; ENSG00000004846; TAA
EESTQSKEI

SEQ ID NO: 514 - protein, 9 aa, Homo sapiens
  Table A; Target 514; HLA-C*16:04; ABCB5; ENSG00000004846; TAA
EESTQSKEI

SEQ ID NO: 515 - protein, 11 aa, Homo sapiens
  Table A; Target 515; HLA-A*30:01; ABCB5; ENSG00000004846; TAA
EESTQSKEISL

SEQ ID NO: 516 - protein, 11 aa, Homo sapiens
  Table A; Target 516; HLA-B*40:01; ABCB5; ENSG00000004846; TAA
EESTQSKEISL

SEQ ID NO: 517 - protein, 9 aa, Homo sapiens
  Table A; Target 517; HLA-B*44:03; ABCB5; ENSG00000004846; TAA
EEVLSSIRT

SEQ ID NO: 518 - protein, 10 aa, Homo sapiens
  Table A; Target 518; HLA-B*49:01; ABCB5; ENSG00000004846; TAA
EEVLSSIRTV

SEQ ID NO: 519 - protein, 11 aa, Homo sapiens
  Table A; Target 519; HLA-B*44:02; ABCB5; ENSG00000004846; TAA
EEVLSSIRTVI

SEQ ID NO: 520 - protein, 11 aa, Homo sapiens
  Table A; Target 520; HLA-B*44:03; ABCB5; ENSG00000004846; TAA
EEVLSSIRTVI

SEQ ID NO: 521 - protein, 9 aa, Homo sapiens
  Table A; Target 521; HLA-A*23:01; ABCB5; ENSG00000004846; TAA
EFKNVSFNY

SEQ ID NO: 522 - protein, 9 aa, Homo sapiens
  Table A; Target 522; HLA-A*29:02; ABCB5; ENSG00000004846; TAA
EFKNVSFNY

SEQ ID NO: 523 - protein, 9 aa, Homo sapiens
  Table A; Target 523; HLA-A*30:02; ABCB5; ENSG00000004846; TAA
EFKNVSFNY

SEQ ID NO: 524 - protein, 9 aa, Homo sapiens
  Table A; Target 524; HLA-A*33:03; ABCB5; ENSG00000004846; TAA
EFKNVSFNY

SEQ ID NO: 525 - protein, 9 aa, Homo sapiens
  Table A; Target 525; HLA-A*23:01; ABCB5; ENSG00000004846; TAA
EFPNKFNTL

SEQ ID NO: 526 - protein, 9 aa, Homo sapiens
  Table A; Target 526; HLA-A*24:02; ABCB5; ENSG00000004846; TAA
EFPNKFNTL

SEQ ID NO: 527 - protein, 9 aa, Homo sapiens
  Table A; Target 527; HLA-A*25:01; ABCB5; ENSG00000004846; TAA
EFPNKFNTL

SEQ ID NO: 528 - protein, 9 aa, Homo sapiens
  Table A; Target 528; HLA-A*33:03; ABCB5; ENSG00000004846; TAA
EFPNKFNTL

SEQ ID NO: 529 - protein, 9 aa, Homo sapiens
  Table A; Target 529; HLA-B*08:01; ABCB5; ENSG00000004846; TAA
EFPNKFNTL

SEQ ID NO: 530 - protein, 9 aa, Homo sapiens
  Table A; Target 530; HLA-C*01:02; ABCB5; ENSG00000004846; TAA
EFPNKFNTL

SEQ ID NO: 531 - protein, 9 aa, Homo sapiens
  Table A; Target 531; HLA-C*14:02; ABCB5; ENSG00000004846; TAA
EFPNKFNTL

SEQ ID NO: 532 - protein, 9 aa, Homo sapiens
  Table A; Target 532; HLA-A*29:02; ABCB5; ENSG00000004846; TAA
EFREVSFFY

SEQ ID NO: 533 - protein, 9 aa, Homo sapiens
  Table A; Target 533; HLA-B*51:01; ABCB5; ENSG00000004846; TAA
EGNLEFREV

SEQ ID NO: 534 - protein, 9 aa, Homo sapiens
  Table A; Target 534; HLA-A*68:02; ABCB5; ENSG00000004846; TAA
EIFRFADGL

SEQ ID NO: 535 - protein, 9 aa, Homo sapiens
  Table A; Target 535; HLA-B*35:03; ABCB5; ENSG00000004846; TAA
EISLPEVSL

SEQ ID NO: 536 - protein, 9 aa, Homo sapiens
  Table A; Target 536; HLA-B*38:01; ABCB5; ENSG00000004846; TAA
EISLPEVSL

SEQ ID NO: 537 - protein, 9 aa, Homo sapiens
  Table A; Target 537; HLA-B*39:01; ABCB5; ENSG00000004846; TAA
EISLPEVSL

SEQ ID NO: 538 - protein, 9 aa, Homo sapiens
  Table A; Target 538; HLA-A*68:02; ABCB5; ENSG00000004846; TAA
EIYSMIFVI

SEQ ID NO: 539 - protein, 10 aa, Homo sapiens
  Table A; Target 539; HLA-A*68:02; ABCB5; ENSG00000004846; TAA
EIYSMIFVIL

SEQ ID NO: 540 - protein, 9 aa, Homo sapiens
  Table A; Target 540; HLA-C*07:01; ABCB5; ENSG00000004846; TAA
EKGAHAELM

SEQ ID NO: 541 - protein, 9 aa, Homo sapiens
  Table A; Target 541; HLA-A*33:01; ABCB5; ENSG00000004846; TAA
EKKPNIDSR

SEQ ID NO: 542 - protein, 9 aa, Homo sapiens
  Table A; Target 542; HLA-A*33:03; ABCB5; ENSG00000004846; TAA
EKKPNIDSR

SEQ ID NO: 543 - protein, 9 aa, Homo sapiens
  Table A; Target 543; HLA-B*15:03; ABCB5; ENSG00000004846; TAA
EKYNTQVGL

SEQ ID NO: 544 - protein, 8 aa, Homo sapiens
  Table A; Target 544; HLA-B*08:01; ABCB5; ENSG00000004846; TAA
ELMAKRGL

SEQ ID NO: 545 - protein, 9 aa, Homo sapiens
  Table A; Target 545; HLA-A*26:01; ABCB5; ENSG00000004846; TAA
ELMAKRGLY

SEQ ID NO: 546 - protein, 10 aa, Homo sapiens
  Table A; Target 546; HLA-A*33:01; ABCB5; ENSG00000004846; TAA
ELMAKRGLYY

SEQ ID NO: 547 - protein, 9 aa, Homo sapiens
  Table A; Target 547; HLA-A*02:04; ABCB5; ENSG00000004846; TAA
ELQRYTQNL

SEQ ID NO: 548 - protein, 9 aa, Homo sapiens
  Table A; Target 548; HLA-B*08:01; ABCB5; ENSG00000004846; TAA
ELQRYTQNL

SEQ ID NO: 549 - protein, 8 aa, Homo sapiens
  Table A; Target 549; HLA-A*33:01; ABCB5; ENSG00000004846; TAA
EMLQTQHR

SEQ ID NO: 550 - protein, 8 aa, Homo sapiens
  Table A; Target 550; HLA-A*33:03; ABCB5; ENSG00000004846; TAA
EMLQTQHR

SEQ ID NO: 551 - protein, 8 aa, Homo sapiens
  Table A; Target 551; HLA-A*33:01; ABCB5; ENSG00000004846; TAA
EMQENYQR

SEQ ID NO: 552 - protein, 8 aa, Homo sapiens
  Table A; Target 552; HLA-A*33:03; ABCB5; ENSG00000004846; TAA
EMQENYQR

SEQ ID NO: 553 - protein, 9 aa, Homo sapiens
  Table A; Target 553; HLA-A*68:02; ABCB5; ENSG00000004846; TAA
EMTFLILSI

SEQ ID NO: 554 - protein, 9 aa, Homo sapiens
  Table A; Target 554; HLA-B*13:02; ABCB5; ENSG00000004846; TAA
EMTFLILSI

SEQ ID NO: 555 - protein, 10 aa, Homo sapiens
  Table A; Target 555; HLA-A*33:03; ABCB5; ENSG00000004846; TAA
ENIAYGDNSR

SEQ ID NO: 556 - protein, 10 aa, Homo sapiens
  Table A; Target 556; HLA-A*68:01; ABCB5; ENSG00000004846; TAA
ENIAYGDNSR

SEQ ID NO: 557 - protein, 9 aa, Homo sapiens
  Table A; Target 557; HLA-A*23:01; ABCB5; ENSG00000004846; TAA
ENIRTIVSL

SEQ ID NO: 558 - protein, 9 aa, Homo sapiens
  Table A; Target 558; HLA-A*25:01; ABCB5; ENSG00000004846; TAA
ENIRTIVSL

SEQ ID NO: 559 - protein, 9 aa, Homo sapiens
  Table A; Target 559; HLA-A*26:01; ABCB5; ENSG00000004846; TAA
ENIRTIVSL

SEQ ID NO: 560 - protein, 9 aa, Homo sapiens
  Table A; Target 560; HLA-A*33:01; ABCB5; ENSG00000004846; TAA
ENIRTIVSL

SEQ ID NO: 561 - protein, 9 aa, Homo sapiens
  Table A; Target 561; HLA-A*33:03; ABCB5; ENSG00000004846; TAA
ENIRTIVSL

SEQ ID NO: 562 - protein, 9 aa, Homo sapiens
  Table A; Target 562; HLA-A*68:01; ABCB5; ENSG00000004846; TAA
ENIRTIVSL

SEQ ID NO: 563 - protein, 9 aa, Homo sapiens
  Table A; Target 563; HLA-A*68:02; ABCB5; ENSG00000004846; TAA
ENIRTIVSL

SEQ ID NO: 564 - protein, 9 aa, Homo sapiens
  Table A; Target 564; HLA-B*08:01; ABCB5; ENSG00000004846; TAA
ENIRTIVSL

SEQ ID NO: 565 - protein, 9 aa, Homo sapiens
  Table A; Target 565; HLA-B*40:02; ABCB5; ENSG00000004846; TAA
ENIRTIVSL

SEQ ID NO: 566 - protein, 10 aa, Homo sapiens
  Table A; Target 566; HLA-A*68:01; ABCB5; ENSG00000004846; TAA
EPGYTIGTVL

SEQ ID NO: 567 - protein, 10 aa, Homo sapiens
  Table A; Target 567; HLA-B*35:03; ABCB5; ENSG00000004846; TAA
EPGYTIGTVL

SEQ ID NO: 568 - protein, 9 aa, Homo sapiens
  Table A; Target 568; HLA-A*25:01; ABCB5; ENSG00000004846; TAA
EPVLFGTTI

SEQ ID NO: 569 - protein, 9 aa, Homo sapiens
  Table A; Target 569; HLA-A*26:01; ABCB5; ENSG00000004846; TAA
EPVLFGTTI

SEQ ID NO: 570 - protein, 9 aa, Homo sapiens
  Table A; Target 570; HLA-A*68:02; ABCB5; ENSG00000004846; TAA
EPVLFGTTI

SEQ ID NO: 571 - protein, 9 aa, Homo sapiens
  Table A; Target 571; HLA-B*07:02; ABCB5; ENSG00000004846; TAA
EPVLFGTTI

SEQ ID NO: 572 - protein, 9 aa, Homo sapiens
  Table A; Target 572; HLA-B*08:01; ABCB5; ENSG00000004846; TAA
EPVLFGTTI

SEQ ID NO: 573 - protein, 9 aa, Homo sapiens
  Table A; Target 573; HLA-B*35:01; ABCB5; ENSG00000004846; TAA
EPVLFGTTI

SEQ ID NO: 574 - protein, 9 aa, Homo sapiens
  Table A; Target 574; HLA-B*35:03; ABCB5; ENSG00000004846; TAA
EPVLFGTTI

SEQ ID NO: 575 - protein, 9 aa, Homo sapiens
  Table A; Target 575; HLA-B*49:01; ABCB5; ENSG00000004846; TAA
EPVLFGTTI

SEQ ID NO: 576 - protein, 9 aa, Homo sapiens
  Table A; Target 576; HLA-B*51:01; ABCB5; ENSG00000004846; TAA
EPVLFGTTI

SEQ ID NO: 577 - protein, 9 aa, Homo sapiens
  Table A; Target 577; HLA-B*54:01; ABCB5; ENSG00000004846; TAA
EPVLFGTTI

SEQ ID NO: 578 - protein, 9 aa, Homo sapiens
  Table A; Target 578; HLA-B*56:01; ABCB5; ENSG00000004846; TAA
EPVLFGTTI

SEQ ID NO: 579 - protein, 9 aa, Homo sapiens
  Table A; Target 579; HLA-C*07:02; ABCB5; ENSG00000004846; TAA
EPVLFGTTI

SEQ ID NO: 580 - protein, 9 aa, Homo sapiens
  Table A; Target 580; HLA-B*51:01; ABCB5; ENSG00000004846; TAA
EPVLFNCSI

SEQ ID NO: 581 - protein, 9 aa, Homo sapiens
  Table A; Target 581; HLA-B*38:01; ABCB5; ENSG00000004846; TAA
EQGTHQELL

SEQ ID NO: 582 - protein, 8 aa, Homo sapiens
  Table A; Target 582; HLA-A*25:01; ABCB5; ENSG00000004846; TAA
EQMESMTY

SEQ ID NO: 583 - protein, 8 aa, Homo sapiens
  Table A; Target 583; HLA-A*26:01; ABCB5; ENSG00000004846; TAA
EQMESMTY

SEQ ID NO: 584 - protein, 8 aa, Homo sapiens
  Table A; Target 584; HLA-A*30:02; ABCB5; ENSG00000004846; TAA
EQMESMTY

SEQ ID NO: 585 - protein, 8 aa, Homo sapiens
  Table A; Target 585; HLA-B*15:01; ABCB5; ENSG00000004846; TAA
EQMESMTY

SEQ ID NO: 586 - protein, 8 aa, Homo sapiens
  Table A; Target 586; HLA-B*15:03; ABCB5; ENSG00000004846; TAA
EQMESMTY

SEQ ID NO: 587 - protein, 8 aa, Homo sapiens
  Table A; Target 587; HLA-B*18:01; ABCB5; ENSG00000004846; TAA
EQMESMTY

SEQ ID NO: 588 - protein, 8 aa, Homo sapiens
  Table A; Target 588; HLA-B*27:02; ABCB5; ENSG00000004846; TAA
EQMESMTY

SEQ ID NO: 589 - protein, 8 aa, Homo sapiens
  Table A; Target 589; HLA-B*35:01; ABCB5; ENSG00000004846; TAA
EQMESMTY

SEQ ID NO: 590 - protein, 8 aa, Homo sapiens
  Table A; Target 590; HLA-B*39:01; ABCB5; ENSG00000004846; TAA
EQMESMTY

SEQ ID NO: 591 - protein, 8 aa, Homo sapiens
  Table A; Target 591; HLA-B*46:01; ABCB5; ENSG00000004846; TAA
EQMESMTY

SEQ ID NO: 592 - protein, 8 aa, Homo sapiens
  Table A; Target 592; HLA-C*07:01; ABCB5; ENSG00000004846; TAA
EQMESMTY

SEQ ID NO: 593 - protein, 8 aa, Homo sapiens
  Table A; Target 593; HLA-C*07:04; ABCB5; ENSG00000004846; TAA
EQMESMTY

SEQ ID NO: 594 - protein, 8 aa, Homo sapiens
  Table A; Target 594; HLA-C*14:02; ABCB5; ENSG00000004846; TAA
EQMESMTY

SEQ ID NO: 595 - protein, 8 aa, Homo sapiens
  Table A; Target 595; HLA-C*16:04; ABCB5; ENSG00000004846; TAA
EQMESMTY

SEQ ID NO: 596 - protein, 10 aa, Homo sapiens
  Table A; Target 596; HLA-B*27:02; ABCB5; ENSG00000004846; TAA
ERAEEMQENY

SEQ ID NO: 597 - protein, 9 aa, Homo sapiens
  Table A; Target 597; HLA-A*23:01; ABCB5; ENSG00000004846; TAA
ESIEGTVEF

SEQ ID NO: 598 - protein, 9 aa, Homo sapiens
  Table A; Target 598; HLA-A*25:01; ABCB5; ENSG00000004846; TAA
ESIEGTVEF

SEQ ID NO: 599 - protein, 9 aa, Homo sapiens
  Table A; Target 599; HLA-A*26:01; ABCB5; ENSG00000004846; TAA
ESIEGTVEF

SEQ ID NO: 600 - protein, 9 aa, Homo sapiens
  Table A; Target 600; HLA-A*32:01; ABCB5; ENSG00000004846; TAA
ESIEGTVEF

SEQ ID NO: 601 - protein, 9 aa, Homo sapiens
  Table A; Target 601; HLA-A*33:03; ABCB5; ENSG00000004846; TAA
ESIEGTVEF

SEQ ID NO: 602 - protein, 9 aa, Homo sapiens
  Table A; Target 602; HLA-A*68:01; ABCB5; ENSG00000004846; TAA
ESIEGTVEF

SEQ ID NO: 603 - protein, 9 aa, Homo sapiens
  Table A; Target 603; HLA-B*15:01; ABCB5; ENSG00000004846; TAA
ESIEGTVEF

SEQ ID NO: 604 - protein, 9 aa, Homo sapiens
  Table A; Target 604; HLA-B*18:01; ABCB5; ENSG00000004846; TAA
ESIEGTVEF

SEQ ID NO: 605 - protein, 9 aa, Homo sapiens
  Table A; Target 605; HLA-B*35:01; ABCB5; ENSG00000004846; TAA
ESIEGTVEF

SEQ ID NO: 606 - protein, 9 aa, Homo sapiens
  Table A; Target 606; HLA-B*35:03; ABCB5; ENSG00000004846; TAA
ESIEGTVEF

SEQ ID NO: 607 - protein, 9 aa, Homo sapiens
  Table A; Target 607; HLA-B*46:01; ABCB5; ENSG00000004846; TAA
ESIEGTVEF

SEQ ID NO: 608 - protein, 9 aa, Homo sapiens
  Table A; Target 608; HLA-B*58:01; ABCB5; ENSG00000004846; TAA
ESIEGTVEF

SEQ ID NO: 609 - protein, 9 aa, Homo sapiens
  Table A; Target 609; HLA-C*02:02; ABCB5; ENSG00000004846; TAA
ESIEGTVEF

SEQ ID NO: 610 - protein, 9 aa, Homo sapiens
  Table A; Target 610; HLA-C*03:03; ABCB5; ENSG00000004846; TAA
ESIEGTVEF

SEQ ID NO: 611 - protein, 9 aa, Homo sapiens
  Table A; Target 611; HLA-C*05:01; ABCB5; ENSG00000004846; TAA
ESIEGTVEF

SEQ ID NO: 612 - protein, 9 aa, Homo sapiens
  Table A; Target 612; HLA-C*07:06; ABCB5; ENSG00000004846; TAA
ESIEGTVEF

SEQ ID NO: 613 - protein, 10 aa, Homo sapiens
  Table A; Target 613; HLA-A*68:01; ABCB5; ENSG00000004846; TAA
ESIEGTVEFK

SEQ ID NO: 614 - protein, 10 aa, Homo sapiens
  Table A; Target 614; HLA-A*25:01; ABCB5; ENSG00000004846; TAA
ESKSAVQAAL

SEQ ID NO: 615 - protein, 10 aa, Homo sapiens
  Table A; Target 615; HLA-A*33:03; ABCB5; ENSG00000004846; TAA
ESKSAVQAAL

SEQ ID NO: 616 - protein, 9 aa, Homo sapiens
  Table A; Target 616; HLA-A*26:01; ABCB5; ENSG00000004846; TAA
ESMTYSTER

SEQ ID NO: 617 - protein, 9 aa, Homo sapiens
  Table A; Target 617; HLA-A*33:01; ABCB5; ENSG00000004846; TAA
ESMTYSTER

SEQ ID NO: 618 - protein, 9 aa, Homo sapiens
  Table A; Target 618; HLA-A*33:03; ABCB5; ENSG00000004846; TAA
ESMTYSTER

SEQ ID NO: 619 - protein, 9 aa, Homo sapiens
  Table A; Target 619; HLA-A*68:01; ABCB5; ENSG00000004846; TAA
ESMTYSTER

SEQ ID NO: 620 - protein, 9 aa, Homo sapiens
  Table A; Target 620; HLA-C*07:06; ABCB5; ENSG00000004846; TAA
ESMTYSTER

SEQ ID NO: 621 - protein, 10 aa, Homo sapiens
  Table A; Target 621; HLA-A*68:01; ABCB5; ENSG00000004846; TAA
ESMTYSTERK

SEQ ID NO: 622 - protein, 10 aa, Homo sapiens
  Table A; Target 622; HLA-C*07:06; ABCB5; ENSG00000004846; TAA
ESMTYSTERK

SEQ ID NO: 623 - protein, 8 aa, Homo sapiens
  Table A; Target 623; HLA-A*25:01; ABCB5; ENSG00000004846; TAA
ETAAMTGF

SEQ ID NO: 624 - protein, 8 aa, Homo sapiens
  Table A; Target 624; HLA-A*26:01; ABCB5; ENSG00000004846; TAA
ETAAMTGF

SEQ ID NO: 625 - protein, 11 aa, Homo sapiens
  Table A; Target 625; HLA-A*03:02; ABCB5; ENSG00000004846; TAA
ETAAMTGFANK

SEQ ID NO: 626 - protein, 11 aa, Homo sapiens
  Table A; Target 626; HLA-A*11:01; ABCB5; ENSG00000004846; TAA
ETAAMTGFANK

SEQ ID NO: 627 - protein, 11 aa, Homo sapiens
  Table A; Target 627; HLA-A*26:01; ABCB5; ENSG00000004846; TAA
ETAAMTGFANK

SEQ ID NO: 628 - protein, 11 aa, Homo sapiens
  Table A; Target 628; HLA-A*33:01; ABCB5; ENSG00000004846; TAA
ETAAMTGFANK

SEQ ID NO: 629 - protein, 11 aa, Homo sapiens
  Table A; Target 629; HLA-A*33:03; ABCB5; ENSG00000004846; TAA
ETAAMTGFANK

SEQ ID NO: 630 - protein, 11 aa, Homo sapiens
  Table A; Target 630; HLA-A*68:01; ABCB5; ENSG00000004846; TAA
ETAAMTGFANK

SEQ ID NO: 631 - protein, 11 aa, Homo sapiens
  Table A; Target 631; HLA-C*07:06; ABCB5; ENSG00000004846; TAA
ETAAMTGFANK

SEQ ID NO: 632 - protein, 9 aa, Homo sapiens
  Table A; Target 632; HLA-A*26:01; ABCB5; ENSG00000004846; TAA
ETFAIARGA

SEQ ID NO: 633 - protein, 9 aa, Homo sapiens
  Table A; Target 633; HLA-A*68:02; ABCB5; ENSG00000004846; TAA
ETFAIARGA

SEQ ID NO: 634 - protein, 11 aa, Homo sapiens
  Table A; Target 634; HLA-A*25:01; ABCB5; ENSG00000004846; TAA
ETFAIARGAAF

SEQ ID NO: 635 - protein, 11 aa, Homo sapiens
  Table A; Target 635; HLA-A*26:01; ABCB5; ENSG00000004846; TAA
ETFAIARGAAF

SEQ ID NO: 636 - protein, 11 aa, Homo sapiens
  Table A; Target 636; HLA-A*68:02; ABCB5; ENSG00000004846; TAA
ETFAIARGAAF

SEQ ID NO: 637 - protein, 9 aa, Homo sapiens
  Table A; Target 637; HLA-A*01:01; ABCB5; ENSG00000004846; TAA
ETLVLAPEY

SEQ ID NO: 638 - protein, 9 aa, Homo sapiens
  Table A; Target 638; HLA-A*25:01; ABCB5; ENSG00000004846; TAA
ETLVLAPEY

SEQ ID NO: 639 - protein, 9 aa, Homo sapiens
  Table A; Target 639; HLA-A*26:01; ABCB5; ENSG00000004846; TAA
ETLVLAPEY

SEQ ID NO: 640 - protein, 9 aa, Homo sapiens
  Table A; Target 640; HLA-A*29:02; ABCB5; ENSG00000004846; TAA
ETLVLAPEY

SEQ ID NO: 641 - protein, 9 aa, Homo sapiens
  Table A; Target 641; HLA-A*30:02; ABCB5; ENSG00000004846; TAA
ETLVLAPEY

SEQ ID NO: 642 - protein, 9 aa, Homo sapiens
  Table A; Target 642; HLA-A*33:01; ABCB5; ENSG00000004846; TAA
ETLVLAPEY

SEQ ID NO: 643 - protein, 9 aa, Homo sapiens
  Table A; Target 643; HLA-A*33:03; ABCB5; ENSG00000004846; TAA
ETLVLAPEY

SEQ ID NO: 644 - protein, 9 aa, Homo sapiens
  Table A; Target 644; HLA-B*18:01; ABCB5; ENSG00000004846; TAA
ETLVLAPEY

SEQ ID NO: 645 - protein, 9 aa, Homo sapiens
  Table A; Target 645; HLA-B*35:01; ABCB5; ENSG00000004846; TAA
ETLVLAPEY

SEQ ID NO: 646 - protein, 9 aa, Homo sapiens
  Table A; Target 646; HLA-B*44:03; ABCB5; ENSG00000004846; TAA
ETLVLAPEY

SEQ ID NO: 647 - protein, 9 aa, Homo sapiens
  Table A; Target 647; HLA-B*57:01; ABCB5; ENSG00000004846; TAA
ETLVLAPEY

SEQ ID NO: 648 - protein, 9 aa, Homo sapiens
  Table A; Target 648; HLA-C*07:01; ABCB5; ENSG00000004846; TAA
ETLVLAPEY

SEQ ID NO: 649 - protein, 9 aa, Homo sapiens
  Table A; Target 649; HLA-C*07:06; ABCB5; ENSG00000004846; TAA
ETLVLAPEY

SEQ ID NO: 650 - protein, 9 aa, Homo sapiens
  Table A; Target 650; HLA-A*26:01; ABCB5; ENSG00000004846; TAA
ETVALVGLN

SEQ ID NO: 651 - protein, 10 aa, Homo sapiens
  Table A; Target 651; HLA-A*26:01; ABCB5; ENSG00000004846; TAA
ETVALVGLNG

SEQ ID NO: 652 - protein, 10 aa, Homo sapiens
  Table A; Target 652; HLA-A*68:01; ABCB5; ENSG00000004846; TAA
ETVALVGLNG

SEQ ID NO: 653 - protein, 10 aa, Homo sapiens
  Table A; Target 653; HLA-A*68:02; ABCB5; ENSG00000004846; TAA
ETVALVGLNG

SEQ ID NO: 654 - protein, 9 aa, Homo sapiens
  Table A; Target 654; HLA-A*02:03; ABCB5; ENSG00000004846; TAA
EVLSSIRTV

SEQ ID NO: 655 - protein, 9 aa, Homo sapiens
  Table A; Target 655; HLA-A*25:01; ABCB5; ENSG00000004846; TAA
EVLSSIRTV

SEQ ID NO: 656 - protein, 9 aa, Homo sapiens
  Table A; Target 656; HLA-A*26:01; ABCB5; ENSG00000004846; TAA
EVLSSIRTV

SEQ ID NO: 657 - protein, 9 aa, Homo sapiens
  Table A; Target 657; HLA-A*68:02; ABCB5; ENSG00000004846; TAA
EVLSSIRTV

SEQ ID NO: 658 - protein, 9 aa, Homo sapiens
  Table A; Target 658; HLA-B*08:01; ABCB5; ENSG00000004846; TAA
EVLSSIRTV

SEQ ID NO: 659 - protein, 9 aa, Homo sapiens
  Table A; Target 659; HLA-B*51:01; ABCB5; ENSG00000004846; TAA
EVLSSIRTV

SEQ ID NO: 660 - protein, 10 aa, Homo sapiens
  Table A; Target 660; HLA-A*25:01; ABCB5; ENSG00000004846; TAA
EVLSSIRTVI

SEQ ID NO: 661 - protein, 10 aa, Homo sapiens
  Table A; Target 661; HLA-A*26:01; ABCB5; ENSG00000004846; TAA
EVLSSIRTVI

SEQ ID NO: 662 - protein, 10 aa, Homo sapiens
  Table A; Target 662; HLA-A*33:03; ABCB5; ENSG00000004846; TAA
EVLSSIRTVI

SEQ ID NO: 663 - protein, 10 aa, Homo sapiens
  Table A; Target 663; HLA-A*68:02; ABCB5; ENSG00000004846; TAA
EVLSSIRTVI

SEQ ID NO: 664 - protein, 9 aa, Homo sapiens
  Table A; Target 664; HLA-A*33:03; ABCB5; ENSG00000004846; TAA
EVSLLKILK

SEQ ID NO: 665 - protein, 9 aa, Homo sapiens
  Table A; Target 665; HLA-A*02:07; ABCB5; ENSG00000004846; TAA
FADGLDITL

SEQ ID NO: 666 - protein, 9 aa, Homo sapiens
  Table A; Target 666; HLA-A*68:02; ABCB5; ENSG00000004846; TAA
FADGLDITL

SEQ ID NO: 667 - protein, 9 aa, Homo sapiens
  Table A; Target 667; HLA-B*35:01; ABCB5; ENSG00000004846; TAA
FADGLDITL

SEQ ID NO: 668 - protein, 9 aa, Homo sapiens
  Table A; Target 668; HLA-B*35:03; ABCB5; ENSG00000004846; TAA
FADGLDITL

SEQ ID NO: 669 - protein, 9 aa, Homo sapiens
  Table A; Target 669; HLA-B*38:01; ABCB5; ENSG00000004846; TAA
FADGLDITL

SEQ ID NO: 670 - protein, 9 aa, Homo sapiens
  Table A; Target 670; HLA-B*39:01; ABCB5; ENSG00000004846; TAA
FADGLDITL

SEQ ID NO: 671 - protein, 9 aa, Homo sapiens
  Table A; Target 671; HLA-B*40:01; ABCB5; ENSG00000004846; TAA
FADGLDITL

SEQ ID NO: 672 - protein, 9 aa, Homo sapiens
  Table A; Target 672; HLA-B*55:01; ABCB5; ENSG00000004846; TAA
FADGLDITL

SEQ ID NO: 673 - protein, 9 aa, Homo sapiens
  Table A; Target 673; HLA-C*02:02; ABCB5; ENSG00000004846; TAA
FADGLDITL

SEQ ID NO: 674 - protein, 9 aa, Homo sapiens
  Table A; Target 674; HLA-C*03:03; ABCB5; ENSG00000004846; TAA
FADGLDITL

SEQ ID NO: 675 - protein, 9 aa, Homo sapiens
  Table A; Target 675; HLA-C*03:04; ABCB5; ENSG00000004846; TAA
FADGLDITL

SEQ ID NO: 676 - protein, 9 aa, Homo sapiens
  Table A; Target 676; HLA-C*04:01; ABCB5; ENSG00000004846; TAA
FADGLDITL

SEQ ID NO: 677 - protein, 9 aa, Homo sapiens
  Table A; Target 677; HLA-C*05:01; ABCB5; ENSG00000004846; TAA
FADGLDITL

SEQ ID NO: 678 - protein, 9 aa, Homo sapiens
  Table A; Target 678; HLA-C*07:04; ABCB5; ENSG00000004846; TAA
FADGLDITL

SEQ ID NO: 679 - protein, 10 aa, Homo sapiens
  Table A; Target 679; HLA-A*01:01; ABCB5; ENSG00000004846; TAA
FADGLDITLM

SEQ ID NO: 680 - protein, 10 aa, Homo sapiens
  Table A; Target 680; HLA-B*35:01; ABCB5; ENSG00000004846; TAA
FADGLDITLM

SEQ ID NO: 681 - protein, 10 aa, Homo sapiens
  Table A; Target 681; HLA-B*35:03; ABCB5; ENSG00000004846; TAA
FADGLDITLM

SEQ ID NO: 682 - protein, 10 aa, Homo sapiens
  Table A; Target 682; HLA-B*55:01; ABCB5; ENSG00000004846; TAA
FADGLDITLM

SEQ ID NO: 683 - protein, 10 aa, Homo sapiens
  Table A; Target 683; HLA-C*05:01; ABCB5; ENSG00000004846; TAA
FADGLDITLM

SEQ ID NO: 684 - protein, 10 aa, Homo sapiens
  Table A; Target 684; HLA-C*07:04; ABCB5; ENSG00000004846; TAA
FADGLDITLM

SEQ ID NO: 685 - protein, 9 aa, Homo sapiens
  Table A; Target 685; HLA-A*23:01; ABCB5; ENSG00000004846; TAA
FAIARGAAF

SEQ ID NO: 686 - protein, 9 aa, Homo sapiens
  Table A; Target 686; HLA-A*25:01; ABCB5; ENSG00000004846; TAA
FAIARGAAF

SEQ ID NO: 687 - protein, 9 aa, Homo sapiens
  Table A; Target 687; HLA-A*26:01; ABCB5; ENSG00000004846; TAA
FAIARGAAF

SEQ ID NO: 688 - protein, 9 aa, Homo sapiens
  Table A; Target 688; HLA-A*32:01; ABCB5; ENSG00000004846; TAA
FAIARGAAF

SEQ ID NO: 689 - protein, 9 aa, Homo sapiens
  Table A; Target 689; HLA-B*07:02; ABCB5; ENSG00000004846; TAA
FAIARGAAF

SEQ ID NO: 690 - protein, 9 aa, Homo sapiens
  Table A; Target 690; HLA-B*08:01; ABCB5; ENSG00000004846; TAA
FAIARGAAF

SEQ ID NO: 691 - protein, 9 aa, Homo sapiens
  Table A; Target 691; HLA-B*15:01; ABCB5; ENSG00000004846; TAA
FAIARGAAF

SEQ ID NO: 692 - protein, 9 aa, Homo sapiens
  Table A; Target 692; HLA-B*15:03; ABCB5; ENSG00000004846; TAA
FAIARGAAF

SEQ ID NO: 693 - protein, 9 aa, Homo sapiens
  Table A; Target 693; HLA-B*35:01; ABCB5; ENSG00000004846; TAA
FAIARGAAF

SEQ ID NO: 694 - protein, 9 aa, Homo sapiens
  Table A; Target 694; HLA-B*35:03; ABCB5; ENSG00000004846; TAA
FAIARGAAF

SEQ ID NO: 695 - protein, 9 aa, Homo sapiens
  Table A; Target 695; HLA-B*37:01; ABCB5; ENSG00000004846; TAA
FAIARGAAF

SEQ ID NO: 696 - protein, 9 aa, Homo sapiens
  Table A; Target 696; HLA-B*46:01; ABCB5; ENSG00000004846; TAA
FAIARGAAF

SEQ ID NO: 697 - protein, 9 aa, Homo sapiens
  Table A; Target 697; HLA-B*54:01; ABCB5; ENSG00000004846; TAA
FAIARGAAF

SEQ ID NO: 698 - protein, 9 aa, Homo sapiens
  Table A; Target 698; HLA-B*58:01; ABCB5; ENSG00000004846; TAA
FAIARGAAF

SEQ ID NO: 699 - protein, 9 aa, Homo sapiens
  Table A; Target 699; HLA-C*01:02; ABCB5; ENSG00000004846; TAA
FAIARGAAF

SEQ ID NO: 700 - protein, 9 aa, Homo sapiens
  Table A; Target 700; HLA-C*02:02; ABCB5; ENSG00000004846; TAA
FAIARGAAF

SEQ ID NO: 701 - protein, 9 aa, Homo sapiens
  Table A; Target 701; HLA-C*03:03; ABCB5; ENSG00000004846; TAA
FAIARGAAF

SEQ ID NO: 702 - protein, 9 aa, Homo sapiens
  Table A; Target 702; HLA-C*03:04; ABCB5; ENSG00000004846; TAA
FAIARGAAF

SEQ ID NO: 703 - protein, 9 aa, Homo sapiens
  Table A; Target 703; HLA-C*05:01; ABCB5; ENSG00000004846; TAA
FAIARGAAF

SEQ ID NO: 704 - protein, 9 aa, Homo sapiens
  Table A; Target 704; HLA-C*07:02; ABCB5; ENSG00000004846; TAA
FAIARGAAF

SEQ ID NO: 705 - protein, 9 aa, Homo sapiens
  Table A; Target 705; HLA-C*07:04; ABCB5; ENSG00000004846; TAA
FAIARGAAF

SEQ ID NO: 706 - protein, 9 aa, Homo sapiens
  Table A; Target 706; HLA-C*12:03; ABCB5; ENSG00000004846; TAA
FAIARGAAF

SEQ ID NO: 707 - protein, 9 aa, Homo sapiens
  Table A; Target 707; HLA-C*14:02; ABCB5; ENSG00000004846; TAA
FAIARGAAF

SEQ ID NO: 708 - protein, 9 aa, Homo sapiens
  Table A; Target 708; HLA-C*16:01; ABCB5; ENSG00000004846; TAA
FAIARGAAF

SEQ ID NO: 709 - protein, 9 aa, Homo sapiens
  Table A; Target 709; HLA-C*16:02; ABCB5; ENSG00000004846; TAA
FAIARGAAF

SEQ ID NO: 710 - protein, 9 aa, Homo sapiens
  Table A; Target 710; HLA-C*16:04; ABCB5; ENSG00000004846; TAA
FAIARGAAF

SEQ ID NO: 711 - protein, 8 aa, Homo sapiens
  Table A; Target 711; HLA-B*08:01; ABCB5; ENSG00000004846; TAA
FAKIITMF

SEQ ID NO: 712 - protein, 8 aa, Homo sapiens
  Table A; Target 712; HLA-B*46:01; ABCB5; ENSG00000004846; TAA
FAKIITMF

SEQ ID NO: 713 - protein, 8 aa, Homo sapiens
  Table A; Target 713; HLA-C*02:02; ABCB5; ENSG00000004846; TAA
FAKIITMF

SEQ ID NO: 714 - protein, 9 aa, Homo sapiens
  Table A; Target 714; HLA-B*07:02; ABCB5; ENSG00000004846; TAA
FANKDKQEL

SEQ ID NO: 715 - protein, 9 aa, Homo sapiens
  Table A; Target 715; HLA-B*08:01; ABCB5; ENSG00000004846; TAA
FANKDKQEL

SEQ ID NO: 716 - protein, 9 aa, Homo sapiens
  Table A; Target 716; HLA-B*35:01; ABCB5; ENSG00000004846; TAA
FANKDKQEL

SEQ ID NO: 717 - protein, 9 aa, Homo sapiens
  Table A; Target 717; HLA-B*35:03; ABCB5; ENSG00000004846; TAA
FANKDKQEL

SEQ ID NO: 718 - protein, 9 aa, Homo sapiens
  Table A; Target 718; HLA-B*38:01; ABCB5; ENSG00000004846; TAA
FANKDKQEL

SEQ ID NO: 719 - protein, 9 aa, Homo sapiens
  Table A; Target 719; HLA-B*40:01; ABCB5; ENSG00000004846; TAA
FANKDKQEL

SEQ ID NO: 720 - protein, 9 aa, Homo sapiens
  Table A; Target 720; HLA-B*46:01; ABCB5; ENSG00000004846; TAA
FANKDKQEL

SEQ ID NO: 721 - protein, 9 aa, Homo sapiens
  Table A; Target 721; HLA-B*54:01; ABCB5; ENSG00000004846; TAA
FANKDKQEL

SEQ ID NO: 722 - protein, 9 aa, Homo sapiens
  Table A; Target 722; HLA-B*55:01; ABCB5; ENSG00000004846; TAA
FANKDKQEL

SEQ ID NO: 723 - protein, 9 aa, Homo sapiens
  Table A; Target 723; HLA-B*58:01; ABCB5; ENSG00000004846; TAA
FANKDKQEL

SEQ ID NO: 724 - protein, 9 aa, Homo sapiens
  Table A; Target 724; HLA-C*01:02; ABCB5; ENSG00000004846; TAA
FANKDKQEL

SEQ ID NO: 725 - protein, 9 aa, Homo sapiens
  Table A; Target 725; HLA-C*02:02; ABCB5; ENSG00000004846; TAA
FANKDKQEL

SEQ ID NO: 726 - protein, 9 aa, Homo sapiens
  Table A; Target 726; HLA-C*03:03; ABCB5; ENSG00000004846; TAA
FANKDKQEL

SEQ ID NO: 727 - protein, 9 aa, Homo sapiens
  Table A; Target 727; HLA-C*03:04; ABCB5; ENSG00000004846; TAA
FANKDKQEL

SEQ ID NO: 728 - protein, 9 aa, Homo sapiens
  Table A; Target 728; HLA-C*05:01; ABCB5; ENSG00000004846; TAA
FANKDKQEL

SEQ ID NO: 729 - protein, 9 aa, Homo sapiens
  Table A; Target 729; HLA-C*07:02; ABCB5; ENSG00000004846; TAA
FANKDKQEL

SEQ ID NO: 730 - protein, 9 aa, Homo sapiens
  Table A; Target 730; HLA-C*07:04; ABCB5; ENSG00000004846; TAA
FANKDKQEL

SEQ ID NO: 731 - protein, 9 aa, Homo sapiens
  Table A; Target 731; HLA-C*12:03; ABCB5; ENSG00000004846; TAA
FANKDKQEL

SEQ ID NO: 732 - protein, 9 aa, Homo sapiens
  Table A; Target 732; HLA-C*14:02; ABCB5; ENSG00000004846; TAA
FANKDKQEL

SEQ ID NO: 733 - protein, 9 aa, Homo sapiens
  Table A; Target 733; HLA-C*16:01; ABCB5; ENSG00000004846; TAA
FANKDKQEL

SEQ ID NO: 734 - protein, 9 aa, Homo sapiens
  Table A; Target 734; HLA-C*16:02; ABCB5; ENSG00000004846; TAA
FANKDKQEL

SEQ ID NO: 735 - protein, 9 aa, Homo sapiens
  Table A; Target 735; HLA-A*29:02; ABCB5; ENSG00000004846; TAA
FAYAAGFRF

SEQ ID NO: 736 - protein, 9 aa, Homo sapiens
  Table A; Target 736; HLA-C*02:02; ABCB5; ENSG00000004846; TAA
FAYAAGFRF

SEQ ID NO: 737 - protein, 8 aa, Homo sapiens
  Table A; Target 737; HLA-B*18:01; ABCB5; ENSG00000004846; TAA
FEQMYEEM

SEQ ID NO: 738 - protein, 9 aa, Homo sapiens
  Table A; Target 738; HLA-A*30:01; ABCB5; ENSG00000004846; TAA
FEQMYEEML

SEQ ID NO: 739 - protein, 9 aa, Homo sapiens
  Table A; Target 739; HLA-B*40:01; ABCB5; ENSG00000004846; TAA
FEQMYEEML

SEQ ID NO: 740 - protein, 9 aa, Homo sapiens
  Table A; Target 740; HLA-B*40:02; ABCB5; ENSG00000004846; TAA
FEQMYEEML

SEQ ID NO: 741 - protein, 9 aa, Homo sapiens
  Table A; Target 741; HLA-A*23:01; ABCB5; ENSG00000004846; TAA
FFMNGTYGL

SEQ ID NO: 742 - protein, 9 aa, Homo sapiens
  Table A; Target 742; HLA-A*24:02; ABCB5; ENSG00000004846; TAA
FFMNGTYGL

SEQ ID NO: 743 - protein, 9 aa, Homo sapiens
  Table A; Target 743; HLA-A*29:02; ABCB5; ENSG00000004846; TAA
FFMNGTYGL

SEQ ID NO: 744 - protein, 9 aa, Homo sapiens
  Table A; Target 744; HLA-C*14:02; ABCB5; ENSG00000004846; TAA
FFMNGTYGL

SEQ ID NO: 745 - protein, 11 aa, Homo sapiens
  Table A; Target 745; HLA-A*23:01; ABCB5; ENSG00000004846; TAA
FFMNGTYGLAF

SEQ ID NO: 746 - protein, 11 aa, Homo sapiens
  Table A; Target 746; HLA-A*29:02; ABCB5; ENSG00000004846; TAA
FFMNGTYGLAF

SEQ ID NO: 747 - protein, 9 aa, Homo sapiens
  Table A; Target 747; HLA-A*23:01; ABCB5; ENSG00000004846; TAA
FFSVIHSSY

SEQ ID NO: 748 - protein, 9 aa, Homo sapiens
  Table A; Target 748; HLA-A*24:02; ABCB5; ENSG00000004846; TAA
FFSVIHSSY

SEQ ID NO: 749 - protein, 9 aa, Homo sapiens
  Table A; Target 749; HLA-A*29:02; ABCB5; ENSG00000004846; TAA
FFSVIHSSY

SEQ ID NO: 750 - protein, 9 aa, Homo sapiens
  Table A; Target 750; HLA-A*30:02; ABCB5; ENSG00000004846; TAA
FFSVIHSSY

SEQ ID NO: 751 - protein, 9 aa, Homo sapiens
  Table A; Target 751; HLA-B*15:03; ABCB5; ENSG00000004846; TAA
FFSVIHSSY

SEQ ID NO: 752 - protein, 9 aa, Homo sapiens
  Table A; Target 752; HLA-B*35:01; ABCB5; ENSG00000004846; TAA
FFSVIHSSY

SEQ ID NO: 753 - protein, 9 aa, Homo sapiens
  Table A; Target 753; HLA-B*46:01; ABCB5; ENSG00000004846; TAA
FFSVIHSSY

SEQ ID NO: 754 - protein, 9 aa, Homo sapiens
  Table A; Target 754; HLA-C*01:02; ABCB5; ENSG00000004846; TAA
FFSVIHSSY

SEQ ID NO: 755 - protein, 9 aa, Homo sapiens
  Table A; Target 755; HLA-C*02:02; ABCB5; ENSG00000004846; TAA
FFSVIHSSY

SEQ ID NO: 756 - protein, 9 aa, Homo sapiens
  Table A; Target 756; HLA-C*14:02; ABCB5; ENSG00000004846; TAA
FFSVIHSSY

SEQ ID NO: 757 - protein, 9 aa, Homo sapiens
  Table A; Target 757; HLA-C*16:01; ABCB5; ENSG00000004846; TAA
FFSVIHSSY

SEQ ID NO: 758 - protein, 9 aa, Homo sapiens
  Table A; Target 758; HLA-A*23:01; ABCB5; ENSG00000004846; TAA
FGNNDKTTL

SEQ ID NO: 759 - protein, 9 aa, Homo sapiens
  Table A; Target 759; HLA-B*07:02; ABCB5; ENSG00000004846; TAA
FGNNDKTTL

SEQ ID NO: 760 - protein, 9 aa, Homo sapiens
  Table A; Target 760; HLA-B*08:01; ABCB5; ENSG00000004846; TAA
FGNNDKTTL

SEQ ID NO: 761 - protein, 9 aa, Homo sapiens
  Table A; Target 761; HLA-B*27:05; ABCB5; ENSG00000004846; TAA
FGNNDKTTL

SEQ ID NO: 762 - protein, 9 aa, Homo sapiens
  Table A; Target 762; HLA-B*35:03; ABCB5; ENSG00000004846; TAA
FGNNDKTTL

SEQ ID NO: 763 - protein, 9 aa, Homo sapiens
  Table A; Target 763; HLA-B*38:01; ABCB5; ENSG00000004846; TAA
FGNNDKTTL

SEQ ID NO: 764 - protein, 9 aa, Homo sapiens
  Table A; Target 764; HLA-B*39:01; ABCB5; ENSG00000004846; TAA
FGNNDKTTL

SEQ ID NO: 765 - protein, 9 aa, Homo sapiens
  Table A; Target 765; HLA-B*40:01; ABCB5; ENSG00000004846; TAA
FGNNDKTTL

SEQ ID NO: 766 - protein, 9 aa, Homo sapiens
  Table A; Target 766; HLA-B*46:01; ABCB5; ENSG00000004846; TAA
FGNNDKTTL

SEQ ID NO: 767 - protein, 9 aa, Homo sapiens
  Table A; Target 767; HLA-B*55:01; ABCB5; ENSG00000004846; TAA
FGNNDKTTL

SEQ ID NO: 768 - protein, 9 aa, Homo sapiens
  Table A; Target 768; HLA-B*58:01; ABCB5; ENSG00000004846; TAA
FGNNDKTTL

SEQ ID NO: 769 - protein, 9 aa, Homo sapiens
  Table A; Target 769; HLA-C*01:02; ABCB5; ENSG00000004846; TAA
FGNNDKTTL

SEQ ID NO: 770 - protein, 9 aa, Homo sapiens
  Table A; Target 770; HLA-C*02:02; ABCB5; ENSG00000004846; TAA
FGNNDKTTL

SEQ ID NO: 771 - protein, 9 aa, Homo sapiens
  Table A; Target 771; HLA-C*03:03; ABCB5; ENSG00000004846; TAA
FGNNDKTTL

SEQ ID NO: 772 - protein, 9 aa, Homo sapiens
  Table A; Target 772; HLA-C*03:04; ABCB5; ENSG00000004846; TAA
FGNNDKTTL

SEQ ID NO: 773 - protein, 9 aa, Homo sapiens
  Table A; Target 773; HLA-C*05:01; ABCB5; ENSG00000004846; TAA
FGNNDKTTL

SEQ ID NO: 774 - protein, 9 aa, Homo sapiens
  Table A; Target 774; HLA-C*07:04; ABCB5; ENSG00000004846; TAA
FGNNDKTTL

SEQ ID NO: 775 - protein, 9 aa, Homo sapiens
  Table A; Target 775; HLA-C*12:03; ABCB5; ENSG00000004846; TAA
FGNNDKTTL

SEQ ID NO: 776 - protein, 9 aa, Homo sapiens
  Table A; Target 776; HLA-C*14:02; ABCB5; ENSG00000004846; TAA
FGNNDKTTL

SEQ ID NO: 777 - protein, 9 aa, Homo sapiens
  Table A; Target 777; HLA-C*16:01; ABCB5; ENSG00000004846; TAA
FGNNDKTTL

SEQ ID NO: 778 - protein, 9 aa, Homo sapiens
  Table A; Target 778; HLA-C*16:02; ABCB5; ENSG00000004846; TAA
FGNNDKTTL

SEQ ID NO: 779 - protein, 10 aa, Homo sapiens
  Table A; Target 779; HLA-A*03:02; ABCB5; ENSG00000004846; TAA
FGNNDKTTLK

SEQ ID NO: 780 - protein, 9 aa, Homo sapiens
  Table A; Target 780; HLA-A*32:01; ABCB5; ENSG00000004846; TAA
FGTTISNNI

SEQ ID NO: 781 - protein, 9 aa, Homo sapiens
  Table A; Target 781; HLA-B*13:02; ABCB5; ENSG00000004846; TAA
FGTTISNNI

SEQ ID NO: 782 - protein, 9 aa, Homo sapiens
  Table A; Target 782; HLA-C*12:03; ABCB5; ENSG00000004846; TAA
FGTTISNNI

SEQ ID NO: 783 - protein, 9 aa, Homo sapiens
  Table A; Target 783; HLA-C*16:02; ABCB5; ENSG00000004846; TAA
FGTTISNNI

SEQ ID NO: 784 - protein, 9 aa, Homo sapiens
  Table A; Target 784; HLA-B*38:01; ABCB5; ENSG00000004846; TAA
FHSVLAQDI

SEQ ID NO: 785 - protein, 9 aa, Homo sapiens
  Table A; Target 785; HLA-B*39:01; ABCB5; ENSG00000004846; TAA
FHSVLAQDI

SEQ ID NO: 786 - protein, 9 aa, Homo sapiens
  Table A; Target 786; HLA-A*01:01; ABCB5; ENSG00000004846; TAA
FIEGLPEKY

SEQ ID NO: 787 - protein, 9 aa, Homo sapiens
  Table A; Target 787; HLA-A*29:02; ABCB5; ENSG00000004846; TAA
FIEGLPEKY

SEQ ID NO: 788 - protein, 9 aa, Homo sapiens
  Table A; Target 788; HLA-A*30:02; ABCB5; ENSG00000004846; TAA
FIEGLPEKY

SEQ ID NO: 789 - protein, 9 aa, Homo sapiens
  Table A; Target 789; HLA-B*15:03; ABCB5; ENSG00000004846; TAA
FIEGLPEKY

SEQ ID NO: 790 - protein, 9 aa, Homo sapiens
  Table A; Target 790; HLA-B*18:01; ABCB5; ENSG00000004846; TAA
FIEGLPEKY

SEQ ID NO: 791 - protein, 9 aa, Homo sapiens
  Table A; Target 791; HLA-B*35:01; ABCB5; ENSG00000004846; TAA
FIEGLPEKY

SEQ ID NO: 792 - protein, 9 aa, Homo sapiens
  Table A; Target 792; HLA-C*02:02; ABCB5; ENSG00000004846; TAA
FIEGLPEKY

SEQ ID NO: 793 - protein, 9 aa, Homo sapiens
  Table A; Target 793; HLA-C*05:01; ABCB5; ENSG00000004846; TAA
FIEGLPEKY

SEQ ID NO: 794 - protein, 9 aa, Homo sapiens
  Table A; Target 794; HLA-C*07:04; ABCB5; ENSG00000004846; TAA
FIEGLPEKY

SEQ ID NO: 795 - protein, 9 aa, Homo sapiens
  Table A; Target 795; HLA-C*12:03; ABCB5; ENSG00000004846; TAA
FIEGLPEKY

SEQ ID NO: 796 - protein, 8 aa, Homo sapiens
  Table A; Target 796; HLA-C*03:04; ABCB5; ENSG00000004846; TAA
FILRGLSL

SEQ ID NO: 797 - protein, 9 aa, Homo sapiens
  Table A; Target 797; HLA-A*02:07; ABCB5; ENSG00000004846; TAA
FIMEFPNKF

SEQ ID NO: 798 - protein, 9 aa, Homo sapiens
  Table A; Target 798; HLA-A*25:01; ABCB5; ENSG00000004846; TAA
FIMEFPNKF

SEQ ID NO: 799 - protein, 9 aa, Homo sapiens
  Table A; Target 799; HLA-A*26:01; ABCB5; ENSG00000004846; TAA
FIMEFPNKF

SEQ ID NO: 800 - protein, 9 aa, Homo sapiens
  Table A; Target 800; HLA-C*02:02; ABCB5; ENSG00000004846; TAA
FIMEFPNKF

SEQ ID NO: 801 - protein, 9 aa, Homo sapiens
  Table A; Target 801; HLA-A*29:02; ABCB5; ENSG00000004846; TAA
FIVFTAIAY

SEQ ID NO: 802 - protein, 9 aa, Homo sapiens
  Table A; Target 802; HLA-B*35:01; ABCB5; ENSG00000004846; TAA
FIVFTAIAY

SEQ ID NO: 803 - protein, 9 aa, Homo sapiens
  Table A; Target 803; HLA-B*46:01; ABCB5; ENSG00000004846; TAA
FIVFTAIAY

SEQ ID NO: 804 - protein, 9 aa, Homo sapiens
  Table A; Target 804; HLA-C*02:02; ABCB5; ENSG00000004846; TAA
FIVFTAIAY

SEQ ID NO: 805 - protein, 9 aa, Homo sapiens
  Table A; Target 805; HLA-C*07:04; ABCB5; ENSG00000004846; TAA
FIVFTAIAY

SEQ ID NO: 806 - protein, 9 aa, Homo sapiens
  Table A; Target 806; HLA-B*15:03; ABCB5; ENSG00000004846; TAA
FKLVNAQSV

SEQ ID NO: 807 - protein, 10 aa, Homo sapiens
  Table A; Target 807; HLA-A*02:04; ABCB5; ENSG00000004846; TAA
FLILSIAPVL

SEQ ID NO: 808 - protein, 8 aa, Homo sapiens
  Table A; Target 808; HLA-C*07:02; ABCB5; ENSG00000004846; TAA
FMNGTYGL

SEQ ID NO: 809 - protein, 10 aa, Homo sapiens
  Table A; Target 809; HLA-A*29:02; ABCB5; ENSG00000004846; TAA
FMNGTYGLAF

SEQ ID NO: 810 - protein, 9 aa, Homo sapiens
  Table A; Target 810; HLA-A*31:01; ABCB5; ENSG00000004846; TAA
FMQGLFYGR

SEQ ID NO: 811 - protein, 9 aa, Homo sapiens
  Table A; Target 811; HLA-A*33:01; ABCB5; ENSG00000004846; TAA
FMQGLFYGR

SEQ ID NO: 812 - protein, 9 aa, Homo sapiens
  Table A; Target 812; HLA-A*23:01; ABCB5; ENSG00000004846; TAA
FNYPSRPSI

SEQ ID NO: 813 - protein, 9 aa, Homo sapiens
  Table A; Target 813; HLA-A*24:02; ABCB5; ENSG00000004846; TAA
FNYPSRPSI

SEQ ID NO: 814 - protein, 9 aa, Homo sapiens
  Table A; Target 814; HLA-B*51:01; ABCB5; ENSG00000004846; TAA
FNYPSRPSI

SEQ ID NO: 815 - protein, 9 aa, Homo sapiens
  Table A; Target 815; HLA-B*54:01; ABCB5; ENSG00000004846; TAA
FNYPSRPSI

SEQ ID NO: 816 - protein, 9 aa, Homo sapiens
  Table A; Target 816; HLA-C*03:03; ABCB5; ENSG00000004846; TAA
FNYPSRPSI

SEQ ID NO: 817 - protein, 9 aa, Homo sapiens
  Table A; Target 817; HLA-C*03:04; ABCB5; ENSG00000004846; TAA
FNYPSRPSI

SEQ ID NO: 818 - protein, 9 aa, Homo sapiens
  Table A; Target 818; HLA-C*16:01; ABCB5; ENSG00000004846; TAA
FNYPSRPSI

SEQ ID NO: 819 - protein, 8 aa, Homo sapiens
  Table A; Target 819; HLA-B*07:02; ABCB5; ENSG00000004846; TAA
FPNKFNTL

SEQ ID NO: 820 - protein, 8 aa, Homo sapiens
  Table A; Target 820; HLA-B*08:01; ABCB5; ENSG00000004846; TAA
FPNKFNTL

SEQ ID NO: 821 - protein, 8 aa, Homo sapiens
  Table A; Target 821; HLA-B*35:01; ABCB5; ENSG00000004846; TAA
FPNKFNTL

SEQ ID NO: 822 - protein, 8 aa, Homo sapiens
  Table A; Target 822; HLA-B*35:03; ABCB5; ENSG00000004846; TAA
FPNKFNTL

SEQ ID NO: 823 - protein, 8 aa, Homo sapiens
  Table A; Target 823; HLA-B*51:01; ABCB5; ENSG00000004846; TAA
FPNKFNTL

SEQ ID NO: 824 - protein, 8 aa, Homo sapiens
  Table A; Target 824; HLA-B*54:01; ABCB5; ENSG00000004846; TAA
FPNKFNTL

SEQ ID NO: 825 - protein, 8 aa, Homo sapiens
  Table A; Target 825; HLA-B*56:01; ABCB5; ENSG00000004846; TAA
FPNKFNTL

SEQ ID NO: 826 - protein, 8 aa, Homo sapiens
  Table A; Target 826; HLA-C*03:03; ABCB5; ENSG00000004846; TAA
FPNKFNTL

SEQ ID NO: 827 - protein, 8 aa, Homo sapiens
  Table A; Target 827; HLA-C*03:04; ABCB5; ENSG00000004846; TAA
FPNKFNTL

SEQ ID NO: 828 - protein, 8 aa, Homo sapiens
  Table A; Target 828; HLA-C*07:02; ABCB5; ENSG00000004846; TAA
FPNKFNTL

SEQ ID NO: 829 - protein, 8 aa, Homo sapiens
  Table A; Target 829; HLA-C*16:01; ABCB5; ENSG00000004846; TAA
FPNKFNTL

SEQ ID NO: 830 - protein, 9 aa, Homo sapiens
  Table A; Target 830; HLA-B*51:01; ABCB5; ENSG00000004846; TAA
FPNKFNTLV

SEQ ID NO: 831 - protein, 9 aa, Homo sapiens
  Table A; Target 831; HLA-B*54:01; ABCB5; ENSG00000004846; TAA
FPNKFNTLV

SEQ ID NO: 832 - protein, 9 aa, Homo sapiens
  Table A; Target 832; HLA-B*55:01; ABCB5; ENSG00000004846; TAA
FPNKFNTLV

SEQ ID NO: 833 - protein, 9 aa, Homo sapiens
  Table A; Target 833; HLA-B*56:01; ABCB5; ENSG00000004846; TAA
FPNKFNTLV

SEQ ID NO: 834 - protein, 10 aa, Homo sapiens
  Table A; Target 834; HLA-B*54:01; ABCB5; ENSG00000004846; TAA
FPNKFNTLVG

SEQ ID NO: 835 - protein, 9 aa, Homo sapiens
  Table A; Target 835; HLA-B*13:02; ABCB5; ENSG00000004846; TAA
FQNMSTFSI

SEQ ID NO: 836 - protein, 9 aa, Homo sapiens
  Table A; Target 836; HLA-B*54:01; ABCB5; ENSG00000004846; TAA
FSHAFIYFA

SEQ ID NO: 837 - protein, 10 aa, Homo sapiens
  Table A; Target 837; HLA-A*29:02; ABCB5; ENSG00000004846; TAA
FSHAFIYFAY

SEQ ID NO: 838 - protein, 9 aa, Homo sapiens
  Table A; Target 838; HLA-A*02:07; ABCB5; ENSG00000004846; TAA
FSIGLAVGL

SEQ ID NO: 839 - protein, 9 aa, Homo sapiens
  Table A; Target 839; HLA-A*68:02; ABCB5; ENSG00000004846; TAA
FSIGLAVGL

SEQ ID NO: 840 - protein, 9 aa, Homo sapiens
  Table A; Target 840; HLA-C*02:02; ABCB5; ENSG00000004846; TAA
FSIGLAVGL

SEQ ID NO: 841 - protein, 9 aa, Homo sapiens
  Table A; Target 841; HLA-C*03:03; ABCB5; ENSG00000004846; TAA
FSIGLAVGL

SEQ ID NO: 842 - protein, 9 aa, Homo sapiens
  Table A; Target 842; HLA-C*03:04; ABCB5; ENSG00000004846; TAA
FSIGLAVGL

SEQ ID NO: 843 - protein, 9 aa, Homo sapiens
  Table A; Target 843; HLA-C*12:03; ABCB5; ENSG00000004846; TAA
FSIGLAVGL

SEQ ID NO: 844 - protein, 8 aa, Homo sapiens
  Table A; Target 844; HLA-A*32:01; ABCB5; ENSG00000004846; TAA
FSVIHSSY

SEQ ID NO: 845 - protein, 8 aa, Homo sapiens
  Table A; Target 845; HLA-B*08:01; ABCB5; ENSG00000004846; TAA
FSVIHSSY

SEQ ID NO: 846 - protein, 8 aa, Homo sapiens
  Table A; Target 846; HLA-B*15:01; ABCB5; ENSG00000004846; TAA
FSVIHSSY

SEQ ID NO: 847 - protein, 8 aa, Homo sapiens
  Table A; Target 847; HLA-B*15:03; ABCB5; ENSG00000004846; TAA
FSVIHSSY

SEQ ID NO: 848 - protein, 8 aa, Homo sapiens
  Table A; Target 848; HLA-B*46:01; ABCB5; ENSG00000004846; TAA
FSVIHSSY

SEQ ID NO: 849 - protein, 8 aa, Homo sapiens
  Table A; Target 849; HLA-C*01:02; ABCB5; ENSG00000004846; TAA
FSVIHSSY

SEQ ID NO: 850 - protein, 8 aa, Homo sapiens
  Table A; Target 850; HLA-C*02:02; ABCB5; ENSG00000004846; TAA
FSVIHSSY

SEQ ID NO: 851 - protein, 8 aa, Homo sapiens
  Table A; Target 851; HLA-C*07:01; ABCB5; ENSG00000004846; TAA
FSVIHSSY

SEQ ID NO: 852 - protein, 8 aa, Homo sapiens
  Table A; Target 852; HLA-C*07:04; ABCB5; ENSG00000004846; TAA
FSVIHSSY

SEQ ID NO: 853 - protein, 8 aa, Homo sapiens
  Table A; Target 853; HLA-C*12:03; ABCB5; ENSG00000004846; TAA
FSVIHSSY

SEQ ID NO: 854 - protein, 8 aa, Homo sapiens
  Table A; Target 854; HLA-C*14:02; ABCB5; ENSG00000004846; TAA
FSVIHSSY

SEQ ID NO: 855 - protein, 8 aa, Homo sapiens
  Table A; Target 855; HLA-C*16:01; ABCB5; ENSG00000004846; TAA
FSVIHSSY

SEQ ID NO: 856 - protein, 9 aa, Homo sapiens
  Table A; Target 856; HLA-A*25:01; ABCB5; ENSG00000004846; TAA
FTAIAYGAM

SEQ ID NO: 857 - protein, 9 aa, Homo sapiens
  Table A; Target 857; HLA-A*26:01; ABCB5; ENSG00000004846; TAA
FTAIAYGAM

SEQ ID NO: 858 - protein, 9 aa, Homo sapiens
  Table A; Target 858; HLA-B*46:01; ABCB5; ENSG00000004846; TAA
FTAIAYGAM

SEQ ID NO: 859 - protein, 9 aa, Homo sapiens
  Table A; Target 859; HLA-C*01:02; ABCB5; ENSG00000004846; TAA
FTAIAYGAM

SEQ ID NO: 860 - protein, 9 aa, Homo sapiens
  Table A; Target 860; HLA-C*02:02; ABCB5; ENSG00000004846; TAA
FTAIAYGAM

SEQ ID NO: 861 - protein, 9 aa, Homo sapiens
  Table A; Target 861; HLA-C*03:03; ABCB5; ENSG00000004846; TAA
FTAIAYGAM

SEQ ID NO: 862 - protein, 9 aa, Homo sapiens
  Table A; Target 862; HLA-C*03:04; ABCB5; ENSG00000004846; TAA
FTAIAYGAM

SEQ ID NO: 863 - protein, 8 aa, Homo sapiens
  Table A; Target 863; HLA-C*12:03; ABCB5; ENSG00000004846; TAA
FVGSSGCG

SEQ ID NO: 864 - protein, 9 aa, Homo sapiens
  Table A; Target 864; HLA-A*03:01; ABCB5; ENSG00000004846; TAA
FVGSSGCGK

SEQ ID NO: 865 - protein, 9 aa, Homo sapiens
  Table A; Target 865; HLA-A*03:02; ABCB5; ENSG00000004846; TAA
FVGSSGCGK

SEQ ID NO: 866 - protein, 9 aa, Homo sapiens
  Table A; Target 866; HLA-A*11:01; ABCB5; ENSG00000004846; TAA
FVGSSGCGK

SEQ ID NO: 867 - protein, 9 aa, Homo sapiens
  Table A; Target 867; HLA-A*25:01; ABCB5; ENSG00000004846; TAA
FVILGVICF

SEQ ID NO: 868 - protein, 9 aa, Homo sapiens
  Table A; Target 868; HLA-A*26:01; ABCB5; ENSG00000004846; TAA
FVILGVICF

SEQ ID NO: 869 - protein, 9 aa, Homo sapiens
  Table A; Target 869; HLA-C*02:02; ABCB5; ENSG00000004846; TAA
FVILGVICF

SEQ ID NO: 870 - protein, 9 aa, Homo sapiens
  Table A; Target 870; HLA-A*68:02; ABCB5; ENSG00000004846; TAA
FVSYFMQGL

SEQ ID NO: 871 - protein, 8 aa, Homo sapiens
  Table A; Target 871; HLA-C*14:02; ABCB5; ENSG00000004846; TAA
FYGRAGEI

SEQ ID NO: 872 - protein, 9 aa, Homo sapiens
  Table A; Target 872; HLA-A*24:02; ABCB5; ENSG00000004846; TAA
FYGRAGEIL

SEQ ID NO: 873 - protein, 11 aa, Homo sapiens
  Table A; Target 873; HLA-A*24:02; ABCB5; ENSG00000004846; TAA
FYGRAGEILTM

SEQ ID NO: 874 - protein, 9 aa, Homo sapiens
  Table A; Target 874; HLA-A*24:02; ABCB5; ENSG00000004846; TAA
FYPCRPDVF

SEQ ID NO: 875 - protein, 11 aa, Homo sapiens
  Table A; Target 875; HLA-A*24:02; ABCB5; ENSG00000004846; TAA
FYPCRPDVFIL

SEQ ID NO: 876 - protein, 9 aa, Homo sapiens
  Table A; Target 876; HLA-A*02:01; ABCB5; ENSG00000004846; TAA
GAAFHIFQV

SEQ ID NO: 877 - protein, 9 aa, Homo sapiens
  Table A; Target 877; HLA-A*02:03; ABCB5; ENSG00000004846; TAA
GAAFHIFQV

SEQ ID NO: 878 - protein, 9 aa, Homo sapiens
  Table A; Target 878; HLA-A*02:04; ABCB5; ENSG00000004846; TAA
GAAFHIFQV

SEQ ID NO: 879 - protein, 9 aa, Homo sapiens
  Table A; Target 879; HLA-A*68:02; ABCB5; ENSG00000004846; TAA
GAAFHIFQV

SEQ ID NO: 880 - protein, 9 aa, Homo sapiens
  Table A; Target 880; HLA-B*13:02; ABCB5; ENSG00000004846; TAA
GAAFHIFQV

SEQ ID NO: 881 - protein, 9 aa, Homo sapiens
  Table A; Target 881; HLA-C*02:02; ABCB5; ENSG00000004846; TAA
GAAFHIFQV

SEQ ID NO: 882 - protein, 9 aa, Homo sapiens
  Table A; Target 882; HLA-C*12:03; ABCB5; ENSG00000004846; TAA
GAAFHIFQV

SEQ ID NO: 883 - protein, 9 aa, Homo sapiens
  Table A; Target 883; HLA-C*16:02; ABCB5; ENSG00000004846; TAA
GAAFHIFQV

SEQ ID NO: 884 - protein, 9 aa, Homo sapiens
  Table A; Target 884; HLA-C*16:04; ABCB5; ENSG00000004846; TAA
GAAFHIFQV

SEQ ID NO: 885 - protein, 9 aa, Homo sapiens
  Table A; Target 885; HLA-C*02:02; ABCB5; ENSG00000004846; TAA
GAAHLFALL

SEQ ID NO: 886 - protein, 9 aa, Homo sapiens
  Table A; Target 886; HLA-C*16:01; ABCB5; ENSG00000004846; TAA
GAAVPHFET

SEQ ID NO: 887 - protein, 10 aa, Homo sapiens
  Table A; Target 887; HLA-A*25:01; ABCB5; ENSG00000004846; TAA
GAAVPHFETF

SEQ ID NO: 888 - protein, 10 aa, Homo sapiens
  Table A; Target 888; HLA-B*15:03; ABCB5; ENSG00000004846; TAA
GAAVPHFETF

SEQ ID NO: 889 - protein, 10 aa, Homo sapiens
  Table A; Target 889; HLA-B*38:01; ABCB5; ENSG00000004846; TAA
GAAVPHFETF

SEQ ID NO: 890 - protein, 10 aa, Homo sapiens
  Table A; Target 890; HLA-B*46:01; ABCB5; ENSG00000004846; TAA
GAAVPHFETF

SEQ ID NO: 891 - protein, 10 aa, Homo sapiens
  Table A; Target 891; HLA-B*57:01; ABCB5; ENSG00000004846; TAA
GAAVPHFETF

SEQ ID NO: 892 - protein, 10 aa, Homo sapiens
  Table A; Target 892; HLA-B*58:01; ABCB5; ENSG00000004846; TAA
GAAVPHFETF

SEQ ID NO: 893 - protein, 10 aa, Homo sapiens
  Table A; Target 893; HLA-C*02:02; ABCB5; ENSG00000004846; TAA
GAAVPHFETF

SEQ ID NO: 894 - protein, 10 aa, Homo sapiens
  Table A; Target 894; HLA-C*16:04; ABCB5; ENSG00000004846; TAA
GAAVPHFETF

SEQ ID NO: 895 - protein, 9 aa, Homo sapiens
  Table A; Target 895; HLA-A*03:01; ABCB5; ENSG00000004846; TAA
GAHAELMAK

SEQ ID NO: 896 - protein, 9 aa, Homo sapiens
  Table A; Target 896; HLA-A*03:02; ABCB5; ENSG00000004846; TAA
GAHAELMAK

SEQ ID NO: 897 - protein, 9 aa, Homo sapiens
  Table A; Target 897; HLA-A*11:01; ABCB5; ENSG00000004846; TAA
GAHAELMAK

SEQ ID NO: 898 - protein, 9 aa, Homo sapiens
  Table A; Target 898; HLA-B*27:05; ABCB5; ENSG00000004846; TAA
GAHAELMAK

SEQ ID NO: 899 - protein, 10 aa, Homo sapiens
  Table A; Target 899; HLA-C*07:06; ABCB5; ENSG00000004846; TAA
GAHAELMAKR

SEQ ID NO: 900 - protein, 9 aa, Homo sapiens
  Table A; Target 900; HLA-A*23:01; ABCB5; ENSG00000004846; TAA
GAMAIGETL

SEQ ID NO: 901 - protein, 9 aa, Homo sapiens
  Table A; Target 901; HLA-A*25:01; ABCB5; ENSG00000004846; TAA
GAMAIGETL

SEQ ID NO: 902 - protein, 9 aa, Homo sapiens
  Table A; Target 902; HLA-A*30:01; ABCB5; ENSG00000004846; TAA
GAMAIGETL

SEQ ID NO: 903 - protein, 9 aa, Homo sapiens
  Table A; Target 903; HLA-A*32:01; ABCB5; ENSG00000004846; TAA
GAMAIGETL

SEQ ID NO: 904 - protein, 9 aa, Homo sapiens
  Table A; Target 904; HLA-B*07:02; ABCB5; ENSG00000004846; TAA
GAMAIGETL

SEQ ID NO: 905 - protein, 9 aa, Homo sapiens
  Table A; Target 905; HLA-B*13:02; ABCB5; ENSG00000004846; TAA
GAMAIGETL

SEQ ID NO: 906 - protein, 9 aa, Homo sapiens
  Table A; Target 906; HLA-B*15:01; ABCB5; ENSG00000004846; TAA
GAMAIGETL

SEQ ID NO: 907 - protein, 9 aa, Homo sapiens
  Table A; Target 907; HLA-B*15:03; ABCB5; ENSG00000004846; TAA
GAMAIGETL

SEQ ID NO: 908 - protein, 9 aa, Homo sapiens
  Table A; Target 908; HLA-B*27:05; ABCB5; ENSG00000004846; TAA
GAMAIGETL

SEQ ID NO: 909 - protein, 9 aa, Homo sapiens
  Table A; Target 909; HLA-B*35:01; ABCB5; ENSG00000004846; TAA
GAMAIGETL

SEQ ID NO: 910 - protein, 9 aa, Homo sapiens
  Table A; Target 910; HLA-B*35:03; ABCB5; ENSG00000004846; TAA
GAMAIGETL

SEQ ID NO: 911 - protein, 9 aa, Homo sapiens
  Table A; Target 911; HLA-B*38:01; ABCB5; ENSG00000004846; TAA
GAMAIGETL

SEQ ID NO: 912 - protein, 9 aa, Homo sapiens
  Table A; Target 912; HLA-B*39:01; ABCB5; ENSG00000004846; TAA
GAMAIGETL

SEQ ID NO: 913 - protein, 9 aa, Homo sapiens
  Table A; Target 913; HLA-B*40:01; ABCB5; ENSG00000004846; TAA
GAMAIGETL

SEQ ID NO: 914 - protein, 9 aa, Homo sapiens
  Table A; Target 914; HLA-B*46:01; ABCB5; ENSG00000004846; TAA
GAMAIGETL

SEQ ID NO: 915 - protein, 9 aa, Homo sapiens
  Table A; Target 915; HLA-B*55:01; ABCB5; ENSG00000004846; TAA
GAMAIGETL

SEQ ID NO: 916 - protein, 9 aa, Homo sapiens
  Table A; Target 916; HLA-B*58:01; ABCB5; ENSG00000004846; TAA
GAMAIGETL

SEQ ID NO: 917 - protein, 9 aa, Homo sapiens
  Table A; Target 917; HLA-C*01:02; ABCB5; ENSG00000004846; TAA
GAMAIGETL

SEQ ID NO: 918 - protein, 9 aa, Homo sapiens
  Table A; Target 918; HLA-C*02:02; ABCB5; ENSG00000004846; TAA
GAMAIGETL

SEQ ID NO: 919 - protein, 9 aa, Homo sapiens
  Table A; Target 919; HLA-C*03:03; ABCB5; ENSG00000004846; TAA
GAMAIGETL

SEQ ID NO: 920 - protein, 9 aa, Homo sapiens
  Table A; Target 920; HLA-C*03:04; ABCB5; ENSG00000004846; TAA
GAMAIGETL

SEQ ID NO: 921 - protein, 9 aa, Homo sapiens
  Table A; Target 921; HLA-C*05:01; ABCB5; ENSG00000004846; TAA
GAMAIGETL

SEQ ID NO: 922 - protein, 9 aa, Homo sapiens
  Table A; Target 922; HLA-C*07:02; ABCB5; ENSG00000004846; TAA
GAMAIGETL

SEQ ID NO: 923 - protein, 9 aa, Homo sapiens
  Table A; Target 923; HLA-C*07:06; ABCB5; ENSG00000004846; TAA
GAMAIGETL

SEQ ID NO: 924 - protein, 9 aa, Homo sapiens
  Table A; Target 924; HLA-C*14:02; ABCB5; ENSG00000004846; TAA
GAMAIGETL

SEQ ID NO: 925 - protein, 9 aa, Homo sapiens
  Table A; Target 925; HLA-C*16:02; ABCB5; ENSG00000004846; TAA
GAMAIGETL

SEQ ID NO: 926 - protein, 9 aa, Homo sapiens
  Table A; Target 926; HLA-C*16:04; ABCB5; ENSG00000004846; TAA
GAMAIGETL

SEQ ID NO: 927 - protein, 9 aa, Homo sapiens
  Table A; Target 927; HLA-C*16:01; ABCB5; ENSG00000004846; TAA
GATGSRIGV

SEQ ID NO: 928 - protein, 9 aa, Homo sapiens
  Table A; Target 928; HLA-C*16:02; ABCB5; ENSG00000004846; TAA
GATGSRIGV

SEQ ID NO: 929 - protein, 9 aa, Homo sapiens
  Table A; Target 929; HLA-A*31:01; ABCB5; ENSG00000004846; TAA
GAYLIQAGR

SEQ ID NO: 930 - protein, 9 aa, Homo sapiens
  Table A; Target 930; HLA-A*33:03; ABCB5; ENSG00000004846; TAA
GAYLIQAGR

SEQ ID NO: 931 - protein, 9 aa, Homo sapiens
  Table A; Target 931; HLA-A*68:01; ABCB5; ENSG00000004846; TAA
GAYLIQAGR

SEQ ID NO: 932 - protein, 9 aa, Homo sapiens
  Table A; Target 932; HLA-C*07:06; ABCB5; ENSG00000004846; TAA
GAYLIQAGR

SEQ ID NO: 933 - protein, 11 aa, Homo sapiens
  Table A; Target 933; HLA-A*30:02; ABCB5; ENSG00000004846; TAA
GCLVQTNTTNY

SEQ ID NO: 934 - protein, 11 aa, Homo sapiens
  Table A; Target 934; HLA-B*15:01; ABCB5; ENSG00000004846; TAA
GCLVQTNTTNY

SEQ ID NO: 935 - protein, 11 aa, Homo sapiens
  Table A; Target 935; HLA-B*15:03; ABCB5; ENSG00000004846; TAA
GCLVQTNTTNY

SEQ ID NO: 936 - protein, 11 aa, Homo sapiens
  Table A; Target 936; HLA-C*07:01; ABCB5; ENSG00000004846; TAA
GCLVQTNTTNY

SEQ ID NO: 937 - protein, 8 aa, Homo sapiens
  Table A; Target 937; HLA-B*37:01; ABCB5; ENSG00000004846; TAA
GDKIALLF

SEQ ID NO: 938 - protein, 9 aa, Homo sapiens
  Table A; Target 938; HLA-B*37:01; ABCB5; ENSG00000004846; TAA
GDNSRVVPL

SEQ ID NO: 939 - protein, 8 aa, Homo sapiens
  Table A; Target 939; HLA-A*30:01; ABCB5; ENSG00000004846; TAA
GEILTMRL

SEQ ID NO: 940 - protein, 8 aa, Homo sapiens
  Table A; Target 940; HLA-B*37:01; ABCB5; ENSG00000004846; TAA
GEILTMRL

SEQ ID NO: 941 - protein, 8 aa, Homo sapiens
  Table A; Target 941; HLA-B*40:01; ABCB5; ENSG00000004846; TAA
GEILTMRL

SEQ ID NO: 942 - protein, 8 aa, Homo sapiens
  Table A; Target 942; HLA-B*44:02; ABCB5; ENSG00000004846; TAA
GEILTMRL

SEQ ID NO: 943 - protein, 8 aa, Homo sapiens
  Table A; Target 943; HLA-B*44:03; ABCB5; ENSG00000004846; TAA
GEILTMRL

SEQ ID NO: 944 - protein, 8 aa, Homo sapiens
  Table A; Target 944; HLA-B*49:01; ABCB5; ENSG00000004846; TAA
GEILTMRL

SEQ ID NO: 945 - protein, 8 aa, Homo sapiens
  Table A; Target 945; HLA-B*49:01; ABCB5; ENSG00000004846; TAA
GEMSDNLI

SEQ ID NO: 946 - protein, 10 aa, Homo sapiens
  Table A; Target 946; HLA-B*40:01; ABCB5; ENSG00000004846; TAA
GEMSDNLISG

SEQ ID NO: 947 - protein, 10 aa, Homo sapiens
  Table A; Target 947; HLA-B*49:01; ABCB5; ENSG00000004846; TAA
GEMSDNLISG

SEQ ID NO: 948 - protein, 11 aa, Homo sapiens
  Table A; Target 948; HLA-B*49:01; ABCB5; ENSG00000004846; TAA
GEMSDNLISGC

SEQ ID NO: 949 - protein, 9 aa, Homo sapiens
  Table A; Target 949; HLA-B*40:01; ABCB5; ENSG00000004846; TAA
GEPGYTIGT

SEQ ID NO: 950 - protein, 10 aa, Homo sapiens
  Table A; Target 950; HLA-A*30:01; ABCB5; ENSG00000004846; TAA
GEPGYTIGTV

SEQ ID NO: 951 - protein, 10 aa, Homo sapiens
  Table A; Target 951; HLA-B*40:01; ABCB5; ENSG00000004846; TAA
GEPGYTIGTV

SEQ ID NO: 952 - protein, 10 aa, Homo sapiens
  Table A; Target 952; HLA-B*40:02; ABCB5; ENSG00000004846; TAA
GEPGYTIGTV

SEQ ID NO: 953 - protein, 10 aa, Homo sapiens
  Table A; Target 953; HLA-B*49:01; ABCB5; ENSG00000004846; TAA
GEPGYTIGTV

SEQ ID NO: 954 - protein, 11 aa, Homo sapiens
  Table A; Target 954; HLA-A*30:01; ABCB5; ENSG00000004846; TAA
GEPGYTIGTVL

SEQ ID NO: 955 - protein, 11 aa, Homo sapiens
  Table A; Target 955; HLA-B*40:01; ABCB5; ENSG00000004846; TAA
GEPGYTIGTVL

SEQ ID NO: 956 - protein, 11 aa, Homo sapiens
  Table A; Target 956; HLA-B*40:02; ABCB5; ENSG00000004846; TAA
GEPGYTIGTVL

SEQ ID NO: 957 - protein, 11 aa, Homo sapiens
  Table A; Target 957; HLA-B*49:01; ABCB5; ENSG00000004846; TAA
GEPGYTIGTVL

SEQ ID NO: 958 - protein, 10 aa, Homo sapiens
  Table A; Target 958; HLA-A*30:02; ABCB5; ENSG00000004846; TAA
GETLVLAPEY

SEQ ID NO: 959 - protein, 10 aa, Homo sapiens
  Table A; Target 959; HLA-B*18:01; ABCB5; ENSG00000004846; TAA
GETLVLAPEY

SEQ ID NO: 960 - protein, 10 aa, Homo sapiens
  Table A; Target 960; HLA-B*27:02; ABCB5; ENSG00000004846; TAA
GETLVLAPEY

SEQ ID NO: 961 - protein, 10 aa, Homo sapiens
  Table A; Target 961; HLA-B*27:05; ABCB5; ENSG00000004846; TAA
GETLVLAPEY

SEQ ID NO: 962 - protein, 10 aa, Homo sapiens
  Table A; Target 962; HLA-B*40:01; ABCB5; ENSG00000004846; TAA
GETLVLAPEY

SEQ ID NO: 963 - protein, 10 aa, Homo sapiens
  Table A; Target 963; HLA-B*44:02; ABCB5; ENSG00000004846; TAA
GETLVLAPEY

SEQ ID NO: 964 - protein, 10 aa, Homo sapiens
  Table A; Target 964; HLA-B*44:03; ABCB5; ENSG00000004846; TAA
GETLVLAPEY

SEQ ID NO: 965 - protein, 10 aa, Homo sapiens
  Table A; Target 965; HLA-C*16:04; ABCB5; ENSG00000004846; TAA
GETLVLAPEY

SEQ ID NO: 966 - protein, 8 aa, Homo sapiens
  Table A; Target 966; HLA-B*49:01; ABCB5; ENSG00000004846; TAA
GETVALVG

SEQ ID NO: 967 - protein, 9 aa, Homo sapiens
  Table A; Target 967; HLA-A*30:01; ABCB5; ENSG00000004846; TAA
GETVALVGL

SEQ ID NO: 968 - protein, 9 aa, Homo sapiens
  Table A; Target 968; HLA-B*18:01; ABCB5; ENSG00000004846; TAA
GETVALVGL

SEQ ID NO: 969 - protein, 9 aa, Homo sapiens
  Table A; Target 969; HLA-B*27:05; ABCB5; ENSG00000004846; TAA
GETVALVGL

SEQ ID NO: 970 - protein, 9 aa, Homo sapiens
  Table A; Target 970; HLA-B*37:01; ABCB5; ENSG00000004846; TAA
GETVALVGL

SEQ ID NO: 971 - protein, 9 aa, Homo sapiens
  Table A; Target 971; HLA-B*40:01; ABCB5; ENSG00000004846; TAA
GETVALVGL

SEQ ID NO: 972 - protein, 9 aa, Homo sapiens
  Table A; Target 972; HLA-B*40:02; ABCB5; ENSG00000004846; TAA
GETVALVGL

SEQ ID NO: 973 - protein, 9 aa, Homo sapiens
  Table A; Target 973; HLA-B*44:02; ABCB5; ENSG00000004846; TAA
GETVALVGL

SEQ ID NO: 974 - protein, 9 aa, Homo sapiens
  Table A; Target 974; HLA-B*44:03; ABCB5; ENSG00000004846; TAA
GETVALVGL

SEQ ID NO: 975 - protein, 9 aa, Homo sapiens
  Table A; Target 975; HLA-B*49:01; ABCB5; ENSG00000004846; TAA
GETVALVGL

SEQ ID NO: 976 - protein, 9 aa, Homo sapiens
  Table A; Target 976; HLA-B*13:02; ABCB5; ENSG00000004846; TAA
GGLTTILAI

SEQ ID NO: 977 - protein, 9 aa, Homo sapiens
  Table A; Target 977; HLA-A*02:04; ABCB5; ENSG00000004846; TAA
GIGDKIALL

SEQ ID NO: 978 - protein, 10 aa, Homo sapiens
  Table A; Target 978; HLA-A*29:02; ABCB5; ENSG00000004846; TAA
GIGDKIALLF

SEQ ID NO: 979 - protein, 9 aa, Homo sapiens
  Table A; Target 979; HLA-A*03:01; ABCB5; ENSG00000004846; TAA
GIKRTIASK

SEQ ID NO: 980 - protein, 8 aa, Homo sapiens
  Table A; Target 980; HLA-B*15:03; ABCB5; ENSG00000004846; TAA
GKIATEAL

SEQ ID NO: 981 - protein, 9 aa, Homo sapiens
  Table A; Target 981; HLA-B*15:03; ABCB5; ENSG00000004846; TAA
GKSTVVQLL

SEQ ID NO: 982 - protein, 10 aa, Homo sapiens
  Table A; Target 982; HLA-A*02:04; ABCB5; ENSG00000004846; TAA
GLAFWYGTSL

SEQ ID NO: 983 - protein, 8 aa, Homo sapiens
  Table A; Target 983; HLA-A*03:01; ABCB5; ENSG00000004846; TAA
GLAVGLVK

SEQ ID NO: 984 - protein, 10 aa, Homo sapiens
  Table A; Target 984; HLA-A*25:01; ABCB5; ENSG00000004846; TAA
GLAVGLVKGW

SEQ ID NO: 985 - protein, 9 aa, Homo sapiens
  Table A; Target 985; HLA-A*02:07; ABCB5; ENSG00000004846; TAA
GLDITLMIL

SEQ ID NO: 986 - protein, 10 aa, Homo sapiens
  Table A; Target 986; HLA-A*02:03; ABCB5; ENSG00000004846; TAA
GLFYGRAGEI

SEQ ID NO: 987 - protein, 10 aa, Homo sapiens
  Table A; Target 987; HLA-A*02:03; ABCB5; ENSG00000004846; TAA
GLNGSGKSTV

SEQ ID NO: 988 - protein, 11 aa, Homo sapiens
  Table A; Target 988; HLA-A*02:03; ABCB5; ENSG00000004846; TAA
GLNGSGKSTVV

SEQ ID NO: 989 - protein, 11 aa, Homo sapiens
  Table A; Target 989; HLA-B*55:01; ABCB5; ENSG00000004846; TAA
GLNGSGKSTVV

SEQ ID NO: 990 - protein, 10 aa, Homo sapiens
  Table A; Target 990; HLA-A*02:01; ABCB5; ENSG00000004846; TAA
GLPEKYNTQV

SEQ ID NO: 991 - protein, 10 aa, Homo sapiens
  Table A; Target 991; HLA-A*02:03; ABCB5; ENSG00000004846; TAA
GLPEKYNTQV

SEQ ID NO: 992 - protein, 10 aa, Homo sapiens
  Table A; Target 992; HLA-A*02:07; ABCB5; ENSG00000004846; TAA
GLPEKYNTQV

SEQ ID NO: 993 - protein, 10 aa, Homo sapiens
  Table A; Target 993; HLA-A*03:01; ABCB5; ENSG00000004846; TAA
GLSLSIERGK

SEQ ID NO: 994 - protein, 10 aa, Homo sapiens
  Table A; Target 994; HLA-A*03:02; ABCB5; ENSG00000004846; TAA
GLSLSIERGK

SEQ ID NO: 995 - protein, 8 aa, Homo sapiens
  Table A; Target 995; HLA-B*37:01; ABCB5; ENSG00000004846; TAA
GLSVIISF

SEQ ID NO: 996 - protein, 9 aa, Homo sapiens
  Table A; Target 996; HLA-A*02:01; ABCB5; ENSG00000004846; TAA
GLSVIISFI

SEQ ID NO: 997 - protein, 9 aa, Homo sapiens
  Table A; Target 997; HLA-A*02:03; ABCB5; ENSG00000004846; TAA
GLSVIISFI

SEQ ID NO: 998 - protein, 9 aa, Homo sapiens
  Table A; Target 998; HLA-A*02:04; ABCB5; ENSG00000004846; TAA
GLSVIISFI

SEQ ID NO: 999 - protein, 9 aa, Homo sapiens
  Table A; Target 999; HLA-A*30:01; ABCB5; ENSG00000004846; TAA
GLSVIISFI

SEQ ID NO: 1000 - protein, 9 aa, Homo sapiens
  Table A; Target 1000; HLA-B*13:02; ABCB5; ENSG00000004846; TAA
GLSVIISFI

SEQ ID NO: 1001 - protein, 10 aa, Homo sapiens
  Table A; Target 1001; HLA-A*29:02; ABCB5; ENSG00000004846; TAA
GLSVIISFIY

SEQ ID NO: 1002 - protein, 8 aa, Homo sapiens
  Table A; Target 1002; HLA-B*13:02; ABCB5; ENSG00000004846; TAA
GLTTILAI

SEQ ID NO: 1003 - protein, 10 aa, Homo sapiens
  Table A; Target 1003; HLA-A*02:04; ABCB5; ENSG00000004846; TAA
GLVKGWKLTL

SEQ ID NO: 1004 - protein, 9 aa, Homo sapiens
  Table A; Target 1004; HLA-A*02:03; ABCB5; ENSG00000004846; TAA
GMFIVFTAI

SEQ ID NO: 1005 - protein, 9 aa, Homo sapiens
  Table A; Target 1005; HLA-A*02:07; ABCB5; ENSG00000004846; TAA
GMFIVFTAI

SEQ ID NO: 1006 - protein, 9 aa, Homo sapiens
  Table A; Target 1006; HLA-B*13:02; ABCB5; ENSG00000004846; TAA
GMFIVFTAI

SEQ ID NO: 1007 - protein, 8 aa, Homo sapiens
  Table A; Target 1007; HLA-B*15:01; ABCB5; ENSG00000004846; TAA
GMIETAAM

SEQ ID NO: 1008 - protein, 8 aa, Homo sapiens
  Table A; Target 1008; HLA-B*46:01; ABCB5; ENSG00000004846; TAA
GMIETAAM

SEQ ID NO: 1009 - protein, 8 aa, Homo sapiens
  Table A; Target 1009; HLA-C*14:02; ABCB5; ENSG00000004846; TAA
GMIETAAM

SEQ ID NO: 1010 - protein, 11 aa, Homo sapiens
  Table A; Target 1010; HLA-A*23:01; ABCB5; ENSG00000004846; TAA
GMIETAAMTGF

SEQ ID NO: 1011 - protein, 11 aa, Homo sapiens
  Table A; Target 1011; HLA-A*26:01; ABCB5; ENSG00000004846; TAA
GMIETAAMTGF

SEQ ID NO: 1012 - protein, 11 aa, Homo sapiens
  Table A; Target 1012; HLA-A*29:02; ABCB5; ENSG00000004846; TAA
GMIETAAMTGF

SEQ ID NO: 1013 - protein, 11 aa, Homo sapiens
  Table A; Target 1013; HLA-B*15:01; ABCB5; ENSG00000004846; TAA
GMIETAAMTGF

SEQ ID NO: 1014 - protein, 11 aa, Homo sapiens
  Table A; Target 1014; HLA-B*15:03; ABCB5; ENSG00000004846; TAA
GMIETAAMTGF

SEQ ID NO: 1015 - protein, 11 aa, Homo sapiens
  Table A; Target 1015; HLA-B*46:01; ABCB5; ENSG00000004846; TAA
GMIETAAMTGF

SEQ ID NO: 1016 - protein, 11 aa, Homo sapiens
  Table A; Target 1016; HLA-B*58:01; ABCB5; ENSG00000004846; TAA
GMIETAAMTGF

SEQ ID NO: 1017 - protein, 11 aa, Homo sapiens
  Table A; Target 1017; HLA-C*14:02; ABCB5; ENSG00000004846; TAA
GMIETAAMTGF

SEQ ID NO: 1018 - protein, 11 aa, Homo sapiens
  Table A; Target 1018; HLA-C*16:04; ABCB5; ENSG00000004846; TAA
GMIETAAMTGF

SEQ ID NO: 1019 - protein, 8 aa, Homo sapiens
  Table A; Target 1019; HLA-B*08:01; ABCB5; ENSG00000004846; TAA
GNNDKTTL

SEQ ID NO: 1020 - protein, 9 aa, Homo sapiens
  Table A; Target 1020; HLA-A*03:01; ABCB5; ENSG00000004846; TAA
GNNDKTTLK

SEQ ID NO: 1021 - protein, 9 aa, Homo sapiens
  Table A; Target 1021; HLA-A*03:02; ABCB5; ENSG00000004846; TAA
GNNDKTTLK

SEQ ID NO: 1022 - protein, 9 aa, Homo sapiens
  Table A; Target 1022; HLA-A*11:01; ABCB5; ENSG00000004846; TAA
GNNDKTTLK

SEQ ID NO: 1023 - protein, 8 aa, Homo sapiens
  Table A; Target 1023; HLA-B*08:01; ABCB5; ENSG00000004846; TAA
GQKQRIAI

SEQ ID NO: 1024 - protein, 9 aa, Homo sapiens
  Table A; Target 1024; HLA-B*08:01; ABCB5; ENSG00000004846; TAA
GQKQRIAIA

SEQ ID NO: 1025 - protein, 10 aa, Homo sapiens
  Table A; Target 1025; HLA-A*31:01; ABCB5; ENSG00000004846; TAA
GQKQRIAIAR

SEQ ID NO: 1026 - protein, 10 aa, Homo sapiens
  Table A; Target 1026; HLA-A*31:01; ABCB5; ENSG00000004846; TAA
GQKQRLAIAR

SEQ ID NO: 1027 - protein, 8 aa, Homo sapiens
  Table A; Target 1027; HLA-B*13:02; ABCB5; ENSG00000004846; TAA
GQVLFDGV

SEQ ID NO: 1028 - protein, 9 aa, Homo sapiens
  Table A; Target 1028; HLA-B*27:02; ABCB5; ENSG00000004846; TAA
GRAGEILTM

SEQ ID NO: 1029 - protein, 9 aa, Homo sapiens
  Table A; Target 1029; HLA-B*27:05; ABCB5; ENSG00000004846; TAA
GRAGEILTM

SEQ ID NO: 1030 - protein, 9 aa, Homo sapiens
  Table A; Target 1030; HLA-B*38:01; ABCB5; ENSG00000004846; TAA
GRAGEILTM

SEQ ID NO: 1031 - protein, 9 aa, Homo sapiens
  Table A; Target 1031; HLA-B*39:01; ABCB5; ENSG00000004846; TAA
GRAGEILTM

SEQ ID NO: 1032 - protein, 9 aa, Homo sapiens
  Table A; Target 1032; HLA-C*06:02; ABCB5; ENSG00000004846; TAA
GRAGEILTM

SEQ ID NO: 1033 - protein, 9 aa, Homo sapiens
  Table A; Target 1033; HLA-C*16:04; ABCB5; ENSG00000004846; TAA
GRAGEILTM

SEQ ID NO: 1034 - protein, 10 aa, Homo sapiens
  Table A; Target 1034; HLA-B*27:05; ABCB5; ENSG00000004846; TAA
GRAGEILTMR

SEQ ID NO: 1035 - protein, 9 aa, Homo sapiens
  Table A; Target 1035; HLA-C*16:04; ABCB5; ENSG00000004846; TAA
GRMTPEGMF

SEQ ID NO: 1036 - protein, 9 aa, Homo sapiens
  Table A; Target 1036; HLA-B*27:05; ABCB5; ENSG00000004846; TAA
GRTCLVVTH

SEQ ID NO: 1037 - protein, 9 aa, Homo sapiens
  Table A; Target 1037; HLA-B*27:02; ABCB5; ENSG00000004846; TAA
GRTTIVVAH

SEQ ID NO: 1038 - protein, 9 aa, Homo sapiens
  Table A; Target 1038; HLA-B*27:05; ABCB5; ENSG00000004846; TAA
GRTTIVVAH

SEQ ID NO: 1039 - protein, 9 aa, Homo sapiens
  Table A; Target 1039; HLA-C*16:04; ABCB5; ENSG00000004846; TAA
GRTTIVVAH

SEQ ID NO: 1040 - protein, 10 aa, Homo sapiens
  Table A; Target 1040; HLA-B*27:05; ABCB5; ENSG00000004846; TAA
GRTTIVVAHR

SEQ ID NO: 1041 - protein, 8 aa, Homo sapiens
  Table A; Target 1041; HLA-B*57:01; ABCB5; ENSG00000004846; TAA
GSIEIFRF

SEQ ID NO: 1042 - protein, 9 aa, Homo sapiens
  Table A; Target 1042; HLA-A*02:01; ABCB5; ENSG00000004846; TAA
GTAEEQPKL

SEQ ID NO: 1043 - protein, 9 aa, Homo sapiens
  Table A; Target 1043; HLA-A*02:04; ABCB5; ENSG00000004846; TAA
GTAEEQPKL

SEQ ID NO: 1044 - protein, 9 aa, Homo sapiens
  Table A; Target 1044; HLA-A*11:01; ABCB5; ENSG00000004846; TAA
GTAEEQPKL

SEQ ID NO: 1045 - protein, 9 aa, Homo sapiens
  Table A; Target 1045; HLA-A*26:01; ABCB5; ENSG00000004846; TAA
GTAEEQPKL

SEQ ID NO: 1046 - protein, 9 aa, Homo sapiens
  Table A; Target 1046; HLA-A*30:01; ABCB5; ENSG00000004846; TAA
GTAEEQPKL

SEQ ID NO: 1047 - protein, 9 aa, Homo sapiens
  Table A; Target 1047; HLA-A*68:02; ABCB5; ENSG00000004846; TAA
GTAEEQPKL

SEQ ID NO: 1048 - protein, 9 aa, Homo sapiens
  Table A; Target 1048; HLA-B*13:02; ABCB5; ENSG00000004846; TAA
GTAEEQPKL

SEQ ID NO: 1049 - protein, 9 aa, Homo sapiens
  Table A; Target 1049; HLA-B*27:05; ABCB5; ENSG00000004846; TAA
GTAEEQPKL

SEQ ID NO: 1050 - protein, 9 aa, Homo sapiens
  Table A; Target 1050; HLA-B*38:01; ABCB5; ENSG00000004846; TAA
GTAEEQPKL

SEQ ID NO: 1051 - protein, 9 aa, Homo sapiens
  Table A; Target 1051; HLA-B*39:01; ABCB5; ENSG00000004846; TAA
GTAEEQPKL

SEQ ID NO: 1052 - protein, 9 aa, Homo sapiens
  Table A; Target 1052; HLA-B*40:01; ABCB5; ENSG00000004846; TAA
GTAEEQPKL

SEQ ID NO: 1053 - protein, 9 aa, Homo sapiens
  Table A; Target 1053; HLA-B*55:01; ABCB5; ENSG00000004846; TAA
GTAEEQPKL

SEQ ID NO: 1054 - protein, 9 aa, Homo sapiens
  Table A; Target 1054; HLA-B*58:01; ABCB5; ENSG00000004846; TAA
GTAEEQPKL

SEQ ID NO: 1055 - protein, 9 aa, Homo sapiens
  Table A; Target 1055; HLA-C*02:02; ABCB5; ENSG00000004846; TAA
GTAEEQPKL

SEQ ID NO: 1056 - protein, 9 aa, Homo sapiens
  Table A; Target 1056; HLA-C*03:03; ABCB5; ENSG00000004846; TAA
GTAEEQPKL

SEQ ID NO: 1057 - protein, 9 aa, Homo sapiens
  Table A; Target 1057; HLA-C*03:04; ABCB5; ENSG00000004846; TAA
GTAEEQPKL

SEQ ID NO: 1058 - protein, 9 aa, Homo sapiens
  Table A; Target 1058; HLA-C*16:01; ABCB5; ENSG00000004846; TAA
GTAEEQPKL

SEQ ID NO: 1059 - protein, 9 aa, Homo sapiens
  Table A; Target 1059; HLA-C*16:02; ABCB5; ENSG00000004846; TAA
GTAEEQPKL

SEQ ID NO: 1060 - protein, 9 aa, Homo sapiens
  Table A; Target 1060; HLA-C*16:04; ABCB5; ENSG00000004846; TAA
GTAEEQPKL

SEQ ID NO: 1061 - protein, 10 aa, Homo sapiens
  Table A; Target 1061; HLA-A*11:01; ABCB5; ENSG00000004846; TAA
GTAEEQPKLR

SEQ ID NO: 1062 - protein, 10 aa, Homo sapiens
  Table A; Target 1062; HLA-A*31:01; ABCB5; ENSG00000004846; TAA
GTAEEQPKLR

SEQ ID NO: 1063 - protein, 10 aa, Homo sapiens
  Table A; Target 1063; HLA-A*33:03; ABCB5; ENSG00000004846; TAA
GTAEEQPKLR

SEQ ID NO: 1064 - protein, 10 aa, Homo sapiens
  Table A; Target 1064; HLA-A*68:01; ABCB5; ENSG00000004846; TAA
GTAEEQPKLR

SEQ ID NO: 1065 - protein, 10 aa, Homo sapiens
  Table A; Target 1065; HLA-C*07:06; ABCB5; ENSG00000004846; TAA
GTAEEQPKLR

SEQ ID NO: 1066 - protein, 11 aa, Homo sapiens
  Table A; Target 1066; HLA-A*03:02; ABCB5; ENSG00000004846; TAA
GTAEEQPKLRK

SEQ ID NO: 1067 - protein, 11 aa, Homo sapiens
  Table A; Target 1067; HLA-A*11:01; ABCB5; ENSG00000004846; TAA
GTAEEQPKLRK

SEQ ID NO: 1068 - protein, 10 aa, Homo sapiens
  Table A; Target 1068; HLA-A*31:01; ABCB5; ENSG00000004846; TAA
GTHQELLRNR

SEQ ID NO: 1069 - protein, 9 aa, Homo sapiens
  Table A; Target 1069; HLA-A*03:02; ABCB5; ENSG00000004846; TAA
GTTISNNIK

SEQ ID NO: 1070 - protein, 9 aa, Homo sapiens
  Table A; Target 1070; HLA-A*11:01; ABCB5; ENSG00000004846; TAA
GTTISNNIK

SEQ ID NO: 1071 - protein, 10 aa, Homo sapiens
  Table A; Target 1071; HLA-A*01:01; ABCB5; ENSG00000004846; TAA
GTTISNNIKY

SEQ ID NO: 1072 - protein, 10 aa, Homo sapiens
  Table A; Target 1072; HLA-A*29:02; ABCB5; ENSG00000004846; TAA
GTTISNNIKY

SEQ ID NO: 1073 - protein, 10 aa, Homo sapiens
  Table A; Target 1073; HLA-A*30:02; ABCB5; ENSG00000004846; TAA
GTTISNNIKY

SEQ ID NO: 1074 - protein, 10 aa, Homo sapiens
  Table A; Target 1074; HLA-B*58:01; ABCB5; ENSG00000004846; TAA
GTTISNNIKY

SEQ ID NO: 1075 - protein, 10 aa, Homo sapiens
  Table A; Target 1075; HLA-A*25:01; ABCB5; ENSG00000004846; TAA
GTVEFKNVSF

SEQ ID NO: 1076 - protein, 10 aa, Homo sapiens
  Table A; Target 1076; HLA-A*26:01; ABCB5; ENSG00000004846; TAA
GTVEFKNVSF

SEQ ID NO: 1077 - protein, 10 aa, Homo sapiens
  Table A; Target 1077; HLA-A*32:01; ABCB5; ENSG00000004846; TAA
GTVEFKNVSF

SEQ ID NO: 1078 - protein, 10 aa, Homo sapiens
  Table A; Target 1078; HLA-B*15:01; ABCB5; ENSG00000004846; TAA
GTVEFKNVSF

SEQ ID NO: 1079 - protein, 10 aa, Homo sapiens
  Table A; Target 1079; HLA-B*46:01; ABCB5; ENSG00000004846; TAA
GTVEFKNVSF

SEQ ID NO: 1080 - protein, 10 aa, Homo sapiens
  Table A; Target 1080; HLA-B*57:01; ABCB5; ENSG00000004846; TAA
GTVEFKNVSF

SEQ ID NO: 1081 - protein, 10 aa, Homo sapiens
  Table A; Target 1081; HLA-B*58:01; ABCB5; ENSG00000004846; TAA
GTVEFKNVSF

SEQ ID NO: 1082 - protein, 10 aa, Homo sapiens
  Table A; Target 1082; HLA-C*02:02; ABCB5; ENSG00000004846; TAA
GTVEFKNVSF

SEQ ID NO: 1083 - protein, 9 aa, Homo sapiens
  Table A; Target 1083; HLA-A*68:02; ABCB5; ENSG00000004846; TAA
GTVHPVFSI

SEQ ID NO: 1084 - protein, 9 aa, Homo sapiens
  Table A; Target 1084; HLA-B*57:01; ABCB5; ENSG00000004846; TAA
GTVHPVFSI

SEQ ID NO: 1085 - protein, 9 aa, Homo sapiens
  Table A; Target 1085; HLA-A*29:02; ABCB5; ENSG00000004846; TAA
GTYGLAFWY

SEQ ID NO: 1086 - protein, 9 aa, Homo sapiens
  Table A; Target 1086; HLA-A*30:02; ABCB5; ENSG00000004846; TAA
GTYGLAFWY

SEQ ID NO: 1087 - protein, 9 aa, Homo sapiens
  Table A; Target 1087; HLA-A*25:01; ABCB5; ENSG00000004846; TAA
GVAALIFGY

SEQ ID NO: 1088 - protein, 9 aa, Homo sapiens
  Table A; Target 1088; HLA-A*26:01; ABCB5; ENSG00000004846; TAA
GVAALIFGY

SEQ ID NO: 1089 - protein, 9 aa, Homo sapiens
  Table A; Target 1089; HLA-A*29:02; ABCB5; ENSG00000004846; TAA
GVAALIFGY

SEQ ID NO: 1090 - protein, 9 aa, Homo sapiens
  Table A; Target 1090; HLA-A*30:02; ABCB5; ENSG00000004846; TAA
GVAALIFGY

SEQ ID NO: 1091 - protein, 9 aa, Homo sapiens
  Table A; Target 1091; HLA-B*15:01; ABCB5; ENSG00000004846; TAA
GVAALIFGY

SEQ ID NO: 1092 - protein, 9 aa, Homo sapiens
  Table A; Target 1092; HLA-C*02:02; ABCB5; ENSG00000004846; TAA
GVAALIFGY

SEQ ID NO: 1093 - protein, 10 aa, Homo sapiens
  Table A; Target 1093; HLA-A*68:02; ABCB5; ENSG00000004846; TAA
GVAALIFGYI

SEQ ID NO: 1094 - protein, 9 aa, Homo sapiens
  Table A; Target 1094; HLA-A*02:01; ABCB5; ENSG00000004846; TAA
GVDAKELNV

SEQ ID NO: 1095 - protein, 9 aa, Homo sapiens
  Table A; Target 1095; HLA-A*02:07; ABCB5; ENSG00000004846; TAA
GVDAKELNV

SEQ ID NO: 1096 - protein, 9 aa, Homo sapiens
  Table A; Target 1096; HLA-B*13:02; ABCB5; ENSG00000004846; TAA
GVDAKELNV

SEQ ID NO: 1097 - protein, 9 aa, Homo sapiens
  Table A; Target 1097; HLA-C*05:01; ABCB5; ENSG00000004846; TAA
GVDAKELNV

SEQ ID NO: 1098 - protein, 9 aa, Homo sapiens
  Table A; Target 1098; HLA-A*30:01; ABCB5; ENSG00000004846; TAA
GVVSQEPVL

SEQ ID NO: 1099 - protein, 9 aa, Homo sapiens
  Table A; Target 1099; HLA-B*15:01; ABCB5; ENSG00000004846; TAA
GVVSQEPVL

SEQ ID NO: 1100 - protein, 9 aa, Homo sapiens
  Table A; Target 1100; HLA-B*35:03; ABCB5; ENSG00000004846; TAA
GVVSQEPVL

SEQ ID NO: 1101 - protein, 9 aa, Homo sapiens
  Table A; Target 1101; HLA-B*40:01; ABCB5; ENSG00000004846; TAA
GVVSQEPVL

SEQ ID NO: 1102 - protein, 9 aa, Homo sapiens
  Table A; Target 1102; HLA-C*03:03; ABCB5; ENSG00000004846; TAA
GVVSQEPVL

SEQ ID NO: 1103 - protein, 9 aa, Homo sapiens
  Table A; Target 1103; HLA-C*03:04; ABCB5; ENSG00000004846; TAA
GVVSQEPVL

SEQ ID NO: 1104 - protein, 8 aa, Homo sapiens
  Table A; Target 1104; HLA-C*14:02; ABCB5; ENSG00000004846; TAA
GYTIGTVL

SEQ ID NO: 1105 - protein, 11 aa, Homo sapiens
  Table A; Target 1105; HLA-A*23:01; ABCB5; ENSG00000004846; TAA
GYTIGTVLAVF

SEQ ID NO: 1106 - protein, 11 aa, Homo sapiens
  Table A; Target 1106; HLA-A*24:02; ABCB5; ENSG00000004846; TAA
GYTIGTVLAVF

SEQ ID NO: 1107 - protein, 8 aa, Homo sapiens
  Table A; Target 1107; HLA-A*29:02; ABCB5; ENSG00000004846; TAA
HAFIYFAY

SEQ ID NO: 1108 - protein, 9 aa, Homo sapiens
  Table A; Target 1108; HLA-A*68:02; ABCB5; ENSG00000004846; TAA
HAFIYFAYA

SEQ ID NO: 1109 - protein, 9 aa, Homo sapiens
  Table A; Target 1109; HLA-B*54:01; ABCB5; ENSG00000004846; TAA
HAFIYFAYA

SEQ ID NO: 1110 - protein, 10 aa, Homo sapiens
  Table A; Target 1110; HLA-B*54:01; ABCB5; ENSG00000004846; TAA
HAFIYFAYAA

SEQ ID NO: 1111 - protein, 9 aa, Homo sapiens
  Table A; Target 1111; HLA-B*54:01; ABCB5; ENSG00000004846; TAA
HAGKIATEA

SEQ ID NO: 1112 - protein, 9 aa, Homo sapiens
  Table A; Target 1112; HLA-B*56:01; ABCB5; ENSG00000004846; TAA
HAGKIATEA

SEQ ID NO: 1113 - protein, 10 aa, Homo sapiens
  Table A; Target 1113; HLA-B*35:03; ABCB5; ENSG00000004846; TAA
HAGKIATEAL

SEQ ID NO: 1114 - protein, 8 aa, Homo sapiens
  Table A; Target 1114; HLA-A*30:01; ABCB5; ENSG00000004846; TAA
HDAEIYSM

SEQ ID NO: 1115 - protein, 8 aa, Homo sapiens
  Table A; Target 1115; HLA-B*18:01; ABCB5; ENSG00000004846; TAA
HDAEIYSM

SEQ ID NO: 1116 - protein, 8 aa, Homo sapiens
  Table A; Target 1116; HLA-B*37:01; ABCB5; ENSG00000004846; TAA
HDAEIYSM

SEQ ID NO: 1117 - protein, 9 aa, Homo sapiens
  Table A; Target 1117; HLA-A*68:02; ABCB5; ENSG00000004846; TAA
HDAEIYSMI

SEQ ID NO: 1118 - protein, 9 aa, Homo sapiens
  Table A; Target 1118; HLA-B*49:01; ABCB5; ENSG00000004846; TAA
HDAEIYSMI

SEQ ID NO: 1119 - protein, 9 aa, Homo sapiens
  Table A; Target 1119; HLA-A*33:01; ABCB5; ENSG00000004846; TAA
HFETFAIAR

SEQ ID NO: 1120 - protein, 9 aa, Homo sapiens
  Table A; Target 1120; HLA-A*33:03; ABCB5; ENSG00000004846; TAA
HFETFAIAR

SEQ ID NO: 1121 - protein, 8 aa, Homo sapiens
  Table A; Target 1121; HLA-B*27:02; ABCB5; ENSG00000004846; TAA
HIFQVIDK

SEQ ID NO: 1122 - protein, 8 aa, Homo sapiens
  Table A; Target 1122; HLA-B*08:01; ABCB5; ENSG00000004846; TAA
HLAFKAML

SEQ ID NO: 1123 - protein, 9 aa, Homo sapiens
  Table A; Target 1123; HLA-A*01:01; ABCB5; ENSG00000004846; TAA
HLAFKAMLY

SEQ ID NO: 1124 - protein, 9 aa, Homo sapiens
  Table A; Target 1124; HLA-A*03:01; ABCB5; ENSG00000004846; TAA
HLAFKAMLY

SEQ ID NO: 1125 - protein, 9 aa, Homo sapiens
  Table A; Target 1125; HLA-A*29:02; ABCB5; ENSG00000004846; TAA
HLAFKAMLY

SEQ ID NO: 1126 - protein, 8 aa, Homo sapiens
  Table A; Target 1126; HLA-A*03:01; ABCB5; ENSG00000004846; TAA
HLFALLEK

SEQ ID NO: 1127 - protein, 8 aa, Homo sapiens
  Table A; Target 1127; HLA-B*35:01; ABCB5; ENSG00000004846; TAA
HPVFSIIF

SEQ ID NO: 1128 - protein, 9 aa, Homo sapiens
  Table A; Target 1128; HLA-B*54:01; ABCB5; ENSG00000004846; TAA
HPVFSIIFA

SEQ ID NO: 1129 - protein, 9 aa, Homo sapiens
  Table A; Target 1129; HLA-B*56:01; ABCB5; ENSG00000004846; TAA
HPVFSIIFA

SEQ ID NO: 1130 - protein, 9 aa, Homo sapiens
  Table A; Target 1130; HLA-B*54:01; ABCB5; ENSG00000004846; TAA
HRLSTIRSA

SEQ ID NO: 1131 - protein, 10 aa, Homo sapiens
  Table A; Target 1131; HLA-A*01:01; ABCB5; ENSG00000004846; TAA
HSFIEGLPEK

SEQ ID NO: 1132 - protein, 10 aa, Homo sapiens
  Table A; Target 1132; HLA-A*11:01; ABCB5; ENSG00000004846; TAA
HSFIEGLPEK

SEQ ID NO: 1133 - protein, 11 aa, Homo sapiens
  Table A; Target 1133; HLA-A*01:01; ABCB5; ENSG00000004846; TAA
HSFIEGLPEKY

SEQ ID NO: 1134 - protein, 11 aa, Homo sapiens
  Table A; Target 1134; HLA-A*29:02; ABCB5; ENSG00000004846; TAA
HSFIEGLPEKY

SEQ ID NO: 1135 - protein, 11 aa, Homo sapiens
  Table A; Target 1135; HLA-B*57:01; ABCB5; ENSG00000004846; TAA
HSFIEGLPEKY

SEQ ID NO: 1136 - protein, 10 aa, Homo sapiens
  Table A; Target 1136; HLA-B*57:01; ABCB5; ENSG00000004846; TAA
HSVLAQDIGW

SEQ ID NO: 1137 - protein, 10 aa, Homo sapiens
  Table A; Target 1137; HLA-B*58:01; ABCB5; ENSG00000004846; TAA
HSVLAQDIGW

SEQ ID NO: 1138 - protein, 8 aa, Homo sapiens
  Table A; Target 1138; HLA-B*51:01; ABCB5; ENSG00000004846; TAA
IAFRAQEK

SEQ ID NO: 1139 - protein, 8 aa, Homo sapiens
  Table A; Target 1139; HLA-B*08:01; ABCB5; ENSG00000004846; TAA
IAIARALV

SEQ ID NO: 1140 - protein, 8 aa, Homo sapiens
  Table A; Target 1140; HLA-B*51:01; ABCB5; ENSG00000004846; TAA
IAIARALV

SEQ ID NO: 1141 - protein, 9 aa, Homo sapiens
  Table A; Target 1141; HLA-B*57:01; ABCB5; ENSG00000004846; TAA
IAIARALVR

SEQ ID NO: 1142 - protein, 9 aa, Homo sapiens
  Table A; Target 1142; HLA-C*02:02; ABCB5; ENSG00000004846; TAA
IAIARALVR

SEQ ID NO: 1143 - protein, 9 aa, Homo sapiens
  Table A; Target 1143; HLA-C*07:06; ABCB5; ENSG00000004846; TAA
IAIARALVR

SEQ ID NO: 1144 - protein, 9 aa, Homo sapiens
  Table A; Target 1144; HLA-C*12:03; ABCB5; ENSG00000004846; TAA
IAIARALVR

SEQ ID NO: 1145 - protein, 9 aa, Homo sapiens
  Table A; Target 1145; HLA-C*16:02; ABCB5; ENSG00000004846; TAA
IAIARALVR

SEQ ID NO: 1146 - protein, 9 aa, Homo sapiens
  Table A; Target 1146; HLA-B*46:01; ABCB5; ENSG00000004846; TAA
IAIVPQEPV

SEQ ID NO: 1147 - protein, 9 aa, Homo sapiens
  Table A; Target 1147; HLA-B*51:01; ABCB5; ENSG00000004846; TAA
IAIVPQEPV

SEQ ID NO: 1148 - protein, 9 aa, Homo sapiens
  Table A; Target 1148; HLA-B*54:01; ABCB5; ENSG00000004846; TAA
IAIVPQEPV

SEQ ID NO: 1149 - protein, 9 aa, Homo sapiens
  Table A; Target 1149; HLA-B*56:01; ABCB5; ENSG00000004846; TAA
IAIVPQEPV

SEQ ID NO: 1150 - protein, 9 aa, Homo sapiens
  Table A; Target 1150; HLA-C*01:02; ABCB5; ENSG00000004846; TAA
IAIVPQEPV

SEQ ID NO: 1151 - protein, 9 aa, Homo sapiens
  Table A; Target 1151; HLA-C*03:03; ABCB5; ENSG00000004846; TAA
IAIVPQEPV

SEQ ID NO: 1152 - protein, 9 aa, Homo sapiens
  Table A; Target 1152; HLA-C*03:04; ABCB5; ENSG00000004846; TAA
IAIVPQEPV

SEQ ID NO: 1153 - protein, 9 aa, Homo sapiens
  Table A; Target 1153; HLA-C*16:04; ABCB5; ENSG00000004846; TAA
IAIVPQEPV

SEQ ID NO: 1154 - protein, 10 aa, Homo sapiens
  Table A; Target 1154; HLA-A*23:01; ABCB5; ENSG00000004846; TAA
IAIVPQEPVL

SEQ ID NO: 1155 - protein, 10 aa, Homo sapiens
  Table A; Target 1155; HLA-B*35:03; ABCB5; ENSG00000004846; TAA
IAIVPQEPVL

SEQ ID NO: 1156 - protein, 10 aa, Homo sapiens
  Table A; Target 1156; HLA-B*58:01; ABCB5; ENSG00000004846; TAA
IAIVPQEPVL

SEQ ID NO: 1157 - protein, 10 aa, Homo sapiens
  Table A; Target 1157; HLA-C*02:02; ABCB5; ENSG00000004846; TAA
IAIVPQEPVL

SEQ ID NO: 1158 - protein, 10 aa, Homo sapiens
  Table A; Target 1158; HLA-C*03:03; ABCB5; ENSG00000004846; TAA
IAIVPQEPVL

SEQ ID NO: 1159 - protein, 10 aa, Homo sapiens
  Table A; Target 1159; HLA-C*03:04; ABCB5; ENSG00000004846; TAA
IAIVPQEPVL

SEQ ID NO: 1160 - protein, 10 aa, Homo sapiens
  Table A; Target 1160; HLA-C*05:01; ABCB5; ENSG00000004846; TAA
IAIVPQEPVL

SEQ ID NO: 1161 - protein, 11 aa, Homo sapiens
  Table A; Target 1161; HLA-A*23:01; ABCB5; ENSG00000004846; TAA
IAIVPQEPVLF

SEQ ID NO: 1162 - protein, 11 aa, Homo sapiens
  Table A; Target 1162; HLA-A*24:02; ABCB5; ENSG00000004846; TAA
IAIVPQEPVLF

SEQ ID NO: 1163 - protein, 11 aa, Homo sapiens
  Table A; Target 1163; HLA-B*57:01; ABCB5; ENSG00000004846; TAA
IAIVPQEPVLF

SEQ ID NO: 1164 - protein, 11 aa, Homo sapiens
  Table A; Target 1164; HLA-C*02:02; ABCB5; ENSG00000004846; TAA
IAIVPQEPVLF

SEQ ID NO: 1165 - protein, 9 aa, Homo sapiens
  Table A; Target 1165; HLA-C*01:02; ABCB5; ENSG00000004846; TAA
IAPVLAVTG

SEQ ID NO: 1166 - protein, 10 aa, Homo sapiens
  Table A; Target 1166; HLA-B*57:01; ABCB5; ENSG00000004846; TAA
IARGAAFHIF

SEQ ID NO: 1167 - protein, 9 aa, Homo sapiens
  Table A; Target 1167; HLA-B*13:02; ABCB5; ENSG00000004846; TAA
IASKVSLGA

SEQ ID NO: 1168 - protein, 9 aa, Homo sapiens
  Table A; Target 1168; HLA-B*54:01; ABCB5; ENSG00000004846; TAA
IASKVSLGA

SEQ ID NO: 1169 - protein, 9 aa, Homo sapiens
  Table A; Target 1169; HLA-B*56:01; ABCB5; ENSG00000004846; TAA
IASKVSLGA

SEQ ID NO: 1170 - protein, 11 aa, Homo sapiens
  Table A; Target 1170; HLA-A*01:01; ABCB5; ENSG00000004846; TAA
IASKVSLGAVY

SEQ ID NO: 1171 - protein, 11 aa, Homo sapiens
  Table A; Target 1171; HLA-A*30:02; ABCB5; ENSG00000004846; TAA
IASKVSLGAVY

SEQ ID NO: 1172 - protein, 11 aa, Homo sapiens
  Table A; Target 1172; HLA-B*35:01; ABCB5; ENSG00000004846; TAA
IASKVSLGAVY

SEQ ID NO: 1173 - protein, 11 aa, Homo sapiens
  Table A; Target 1173; HLA-C*03:03; ABCB5; ENSG00000004846; TAA
IASKVSLGAVY

SEQ ID NO: 1174 - protein, 9 aa, Homo sapiens
  Table A; Target 1174; HLA-A*23:01; ABCB5; ENSG00000004846; TAA
IATEALENI

SEQ ID NO: 1175 - protein, 9 aa, Homo sapiens
  Table A; Target 1175; HLA-B*51:01; ABCB5; ENSG00000004846; TAA
IATEALENI

SEQ ID NO: 1176 - protein, 9 aa, Homo sapiens
  Table A; Target 1176; HLA-B*58:01; ABCB5; ENSG00000004846; TAA
IATEALENI

SEQ ID NO: 1177 - protein, 9 aa, Homo sapiens
  Table A; Target 1177; HLA-C*05:01; ABCB5; ENSG00000004846; TAA
IATEALENI

SEQ ID NO: 1178 - protein, 9 aa, Homo sapiens
  Table A; Target 1178; HLA-C*16:02; ABCB5; ENSG00000004846; TAA
IATEALENI

SEQ ID NO: 1179 - protein, 10 aa, Homo sapiens
  Table A; Target 1179; HLA-B*27:02; ABCB5; ENSG00000004846; TAA
IATEALENIR

SEQ ID NO: 1180 - protein, 10 aa, Homo sapiens
  Table A; Target 1180; HLA-C*07:06; ABCB5; ENSG00000004846; TAA
IATEALENIR

SEQ ID NO: 1181 - protein, 8 aa, Homo sapiens
  Table A; Target 1181; HLA-A*23:01; ABCB5; ENSG00000004846; TAA
IAYGAMAI

SEQ ID NO: 1182 - protein, 8 aa, Homo sapiens
  Table A; Target 1182; HLA-B*13:02; ABCB5; ENSG00000004846; TAA
IAYGAMAI

SEQ ID NO: 1183 - protein, 8 aa, Homo sapiens
  Table A; Target 1183; HLA-B*15:03; ABCB5; ENSG00000004846; TAA
IAYGAMAI

SEQ ID NO: 1184 - protein, 8 aa, Homo sapiens
  Table A; Target 1184; HLA-B*40:02; ABCB5; ENSG00000004846; TAA
IAYGAMAI

SEQ ID NO: 1185 - protein, 8 aa, Homo sapiens
  Table A; Target 1185; HLA-B*46:01; ABCB5; ENSG00000004846; TAA
IAYGAMAI

SEQ ID NO: 1186 - protein, 8 aa, Homo sapiens
  Table A; Target 1186; HLA-B*49:01; ABCB5; ENSG00000004846; TAA
IAYGAMAI

SEQ ID NO: 1187 - protein, 8 aa, Homo sapiens
  Table A; Target 1187; HLA-B*51:01; ABCB5; ENSG00000004846; TAA
IAYGAMAI

SEQ ID NO: 1188 - protein, 8 aa, Homo sapiens
  Table A; Target 1188; HLA-B*58:01; ABCB5; ENSG00000004846; TAA
IAYGAMAI

SEQ ID NO: 1189 - protein, 8 aa, Homo sapiens
  Table A; Target 1189; HLA-C*02:02; ABCB5; ENSG00000004846; TAA
IAYGAMAI

SEQ ID NO: 1190 - protein, 8 aa, Homo sapiens
  Table A; Target 1190; HLA-C*03:03; ABCB5; ENSG00000004846; TAA
IAYGAMAI

SEQ ID NO: 1191 - protein, 8 aa, Homo sapiens
  Table A; Target 1191; HLA-C*03:04; ABCB5; ENSG00000004846; TAA
IAYGAMAI

SEQ ID NO: 1192 - protein, 8 aa, Homo sapiens
  Table A; Target 1192; HLA-C*05:01; ABCB5; ENSG00000004846; TAA
IAYGAMAI

SEQ ID NO: 1193 - protein, 8 aa, Homo sapiens
  Table A; Target 1193; HLA-C*06:02; ABCB5; ENSG00000004846; TAA
IAYGAMAI

SEQ ID NO: 1194 - protein, 8 aa, Homo sapiens
  Table A; Target 1194; HLA-C*12:03; ABCB5; ENSG00000004846; TAA
IAYGAMAI

SEQ ID NO: 1195 - protein, 8 aa, Homo sapiens
  Table A; Target 1195; HLA-C*16:02; ABCB5; ENSG00000004846; TAA
IAYGAMAI

SEQ ID NO: 1196 - protein, 8 aa, Homo sapiens
  Table A; Target 1196; HLA-C*16:04; ABCB5; ENSG00000004846; TAA
IAYGAMAI

SEQ ID NO: 1197 - protein, 9 aa, Homo sapiens
  Table A; Target 1197; HLA-B*51:01; ABCB5; ENSG00000004846; TAA
IAYGDNSRV

SEQ ID NO: 1198 - protein, 9 aa, Homo sapiens
  Table A; Target 1198; HLA-C*02:02; ABCB5; ENSG00000004846; TAA
IAYGDNSRV

SEQ ID NO: 1199 - protein, 9 aa, Homo sapiens
  Table A; Target 1199; HLA-C*05:01; ABCB5; ENSG00000004846; TAA
IAYGDNSRV

SEQ ID NO: 1200 - protein, 9 aa, Homo sapiens
  Table A; Target 1200; HLA-C*16:02; ABCB5; ENSG00000004846; TAA
IAYGDNSRV

SEQ ID NO: 1201 - protein, 10 aa, Homo sapiens
  Table A; Target 1201; HLA-B*51:01; ABCB5; ENSG00000004846; TAA
IAYGDNSRVV

SEQ ID NO: 1202 - protein, 10 aa, Homo sapiens
  Table A; Target 1202; HLA-C*02:02; ABCB5; ENSG00000004846; TAA
IAYGDNSRVV

SEQ ID NO: 1203 - protein, 10 aa, Homo sapiens
  Table A; Target 1203; HLA-C*03:03; ABCB5; ENSG00000004846; TAA
IAYGDNSRVV

SEQ ID NO: 1204 - protein, 10 aa, Homo sapiens
  Table A; Target 1204; HLA-C*03:04; ABCB5; ENSG00000004846; TAA
IAYGDNSRVV

SEQ ID NO: 1205 - protein, 10 aa, Homo sapiens
  Table A; Target 1205; HLA-C*12:03; ABCB5; ENSG00000004846; TAA
IAYGDNSRVV

SEQ ID NO: 1206 - protein, 10 aa, Homo sapiens
  Table A; Target 1206; HLA-C*16:02; ABCB5; ENSG00000004846; TAA
IAYGDNSRVV

SEQ ID NO: 1207 - protein, 10 aa, Homo sapiens
  Table A; Target 1207; HLA-C*16:04; ABCB5; ENSG00000004846; TAA
IAYGDNSRVV

SEQ ID NO: 1208 - protein, 9 aa, Homo sapiens
  Table A; Target 1208; HLA-A*30:01; ABCB5; ENSG00000004846; TAA
IDIAQIQGA

SEQ ID NO: 1209 - protein, 9 aa, Homo sapiens
  Table A; Target 1209; HLA-B*37:01; ABCB5; ENSG00000004846; TAA
IDIAQIQGA

SEQ ID NO: 1210 - protein, 11 aa, Homo sapiens
  Table A; Target 1210; HLA-C*04:01; ABCB5; ENSG00000004846; TAA
IDIAQIQGATG

SEQ ID NO: 1211 - protein, 11 aa, Homo sapiens
  Table A; Target 1211; HLA-B*27:02; ABCB5; ENSG00000004846; TAA
IDKAEESTQSK

SEQ ID NO: 1212 - protein, 8 aa, Homo sapiens
  Table A; Target 1212; HLA-B*37:01; ABCB5; ENSG00000004846; TAA
IDKISDGI

SEQ ID NO: 1213 - protein, 8 aa, Homo sapiens
  Table A; Target 1213; HLA-C*07:04; ABCB5; ENSG00000004846; TAA
IDKISDGI

SEQ ID NO: 1214 - protein, 9 aa, Homo sapiens
  Table A; Target 1214; HLA-A*30:02; ABCB5; ENSG00000004846; TAA
IDNFSTAGY

SEQ ID NO: 1215 - protein, 9 aa, Homo sapiens
  Table A; Target 1215; HLA-B*15:03; ABCB5; ENSG00000004846; TAA
IDNFSTAGY

SEQ ID NO: 1216 - protein, 9 aa, Homo sapiens
  Table A; Target 1216; HLA-B*37:01; ABCB5; ENSG00000004846; TAA
IDNFSTAGY

SEQ ID NO: 1217 - protein, 8 aa, Homo sapiens
  Table A; Target 1217; HLA-A*01:01; ABCB5; ENSG00000004846; TAA
IEGLPEKY

SEQ ID NO: 1218 - protein, 8 aa, Homo sapiens
  Table A; Target 1218; HLA-B*15:03; ABCB5; ENSG00000004846; TAA
IEGLPEKY

SEQ ID NO: 1219 - protein, 8 aa, Homo sapiens
  Table A; Target 1219; HLA-B*18:01; ABCB5; ENSG00000004846; TAA
IEGLPEKY

SEQ ID NO: 1220 - protein, 8 aa, Homo sapiens
  Table A; Target 1220; HLA-B*37:01; ABCB5; ENSG00000004846; TAA
IEGLPEKY

SEQ ID NO: 1221 - protein, 8 aa, Homo sapiens
  Table A; Target 1221; HLA-B*44:02; ABCB5; ENSG00000004846; TAA
IEGLPEKY

SEQ ID NO: 1222 - protein, 8 aa, Homo sapiens
  Table A; Target 1222; HLA-B*44:03; ABCB5; ENSG00000004846; TAA
IEGLPEKY

SEQ ID NO: 1223 - protein, 8 aa, Homo sapiens
  Table A; Target 1223; HLA-C*07:01; ABCB5; ENSG00000004846; TAA
IEGLPEKY

SEQ ID NO: 1224 - protein, 8 aa, Homo sapiens
  Table A; Target 1224; HLA-C*12:03; ABCB5; ENSG00000004846; TAA
IEGLPEKY

SEQ ID NO: 1225 - protein, 8 aa, Homo sapiens
  Table A; Target 1225; HLA-C*16:01; ABCB5; ENSG00000004846; TAA
IEGLPEKY

SEQ ID NO: 1226 - protein, 8 aa, Homo sapiens
  Table A; Target 1226; HLA-C*16:04; ABCB5; ENSG00000004846; TAA
IEGLPEKY

SEQ ID NO: 1227 - protein, 8 aa, Homo sapiens
  Table A; Target 1227; HLA-B*27:02; ABCB5; ENSG00000004846; TAA
IEGTVEFK

SEQ ID NO: 1228 - protein, 10 aa, Homo sapiens
  Table A; Target 1228; HLA-B*44:03; ABCB5; ENSG00000004846; TAA
IEGTVEFKNV

SEQ ID NO: 1229 - protein, 10 aa, Homo sapiens
  Table A; Target 1229; HLA-B*49:01; ABCB5; ENSG00000004846; TAA
IEGTVEFKNV

SEQ ID NO: 1230 - protein, 9 aa, Homo sapiens
  Table A; Target 1230; HLA-A*30:01; ABCB5; ENSG00000004846; TAA
IERGKTVAF

SEQ ID NO: 1231 - protein, 9 aa, Homo sapiens
  Table A; Target 1231; HLA-B*08:01; ABCB5; ENSG00000004846; TAA
IERGKTVAF

SEQ ID NO: 1232 - protein, 9 aa, Homo sapiens
  Table A; Target 1232; HLA-B*15:03; ABCB5; ENSG00000004846; TAA
IERGKTVAF

SEQ ID NO: 1233 - protein, 9 aa, Homo sapiens
  Table A; Target 1233; HLA-B*18:01; ABCB5; ENSG00000004846; TAA
IERGKTVAF

SEQ ID NO: 1234 - protein, 9 aa, Homo sapiens
  Table A; Target 1234; HLA-B*37:01; ABCB5; ENSG00000004846; TAA
IERGKTVAF

SEQ ID NO: 1235 - protein, 9 aa, Homo sapiens
  Table A; Target 1235; HLA-B*40:02; ABCB5; ENSG00000004846; TAA
IERGKTVAF

SEQ ID NO: 1236 - protein, 9 aa, Homo sapiens
  Table A; Target 1236; HLA-B*44:02; ABCB5; ENSG00000004846; TAA
IERGKTVAF

SEQ ID NO: 1237 - protein, 9 aa, Homo sapiens
  Table A; Target 1237; HLA-B*46:01; ABCB5; ENSG00000004846; TAA
IERGKTVAF

SEQ ID NO: 1238 - protein, 9 aa, Homo sapiens
  Table A; Target 1238; HLA-B*57:01; ABCB5; ENSG00000004846; TAA
IERGKTVAF

SEQ ID NO: 1239 - protein, 8 aa, Homo sapiens
  Table A; Target 1239; HLA-C*07:04; ABCB5; ENSG00000004846; TAA
IETAAMTG

SEQ ID NO: 1240 - protein, 9 aa, Homo sapiens
  Table A; Target 1240; HLA-A*23:01; ABCB5; ENSG00000004846; TAA
IETAAMTGF

SEQ ID NO: 1241 - protein, 9 aa, Homo sapiens
  Table A; Target 1241; HLA-A*24:02; ABCB5; ENSG00000004846; TAA
IETAAMTGF

SEQ ID NO: 1242 - protein, 9 aa, Homo sapiens
  Table A; Target 1242; HLA-A*25:01; ABCB5; ENSG00000004846; TAA
IETAAMTGF

SEQ ID NO: 1243 - protein, 9 aa, Homo sapiens
  Table A; Target 1243; HLA-A*30:01; ABCB5; ENSG00000004846; TAA
IETAAMTGF

SEQ ID NO: 1244 - protein, 9 aa, Homo sapiens
  Table A; Target 1244; HLA-B*15:01; ABCB5; ENSG00000004846; TAA
IETAAMTGF

SEQ ID NO: 1245 - protein, 9 aa, Homo sapiens
  Table A; Target 1245; HLA-B*15:03; ABCB5; ENSG00000004846; TAA
IETAAMTGF

SEQ ID NO: 1246 - protein, 9 aa, Homo sapiens
  Table A; Target 1246; HLA-B*18:01; ABCB5; ENSG00000004846; TAA
IETAAMTGF

SEQ ID NO: 1247 - protein, 9 aa, Homo sapiens
  Table A; Target 1247; HLA-B*27:02; ABCB5; ENSG00000004846; TAA
IETAAMTGF

SEQ ID NO: 1248 - protein, 9 aa, Homo sapiens
  Table A; Target 1248; HLA-B*37:01; ABCB5; ENSG00000004846; TAA
IETAAMTGF

SEQ ID NO: 1249 - protein, 9 aa, Homo sapiens
  Table A; Target 1249; HLA-B*40:01; ABCB5; ENSG00000004846; TAA
IETAAMTGF

SEQ ID NO: 1250 - protein, 9 aa, Homo sapiens
  Table A; Target 1250; HLA-B*40:02; ABCB5; ENSG00000004846; TAA
IETAAMTGF

SEQ ID NO: 1251 - protein, 9 aa, Homo sapiens
  Table A; Target 1251; HLA-B*44:02; ABCB5; ENSG00000004846; TAA
IETAAMTGF

SEQ ID NO: 1252 - protein, 9 aa, Homo sapiens
  Table A; Target 1252; HLA-B*44:03; ABCB5; ENSG00000004846; TAA
IETAAMTGF

SEQ ID NO: 1253 - protein, 9 aa, Homo sapiens
  Table A; Target 1253; HLA-B*49:01; ABCB5; ENSG00000004846; TAA
IETAAMTGF

SEQ ID NO: 1254 - protein, 9 aa, Homo sapiens
  Table A; Target 1254; HLA-C*02:02; ABCB5; ENSG00000004846; TAA
IETAAMTGF

SEQ ID NO: 1255 - protein, 9 aa, Homo sapiens
  Table A; Target 1255; HLA-C*07:04; ABCB5; ENSG00000004846; TAA
IETAAMTGF

SEQ ID NO: 1256 - protein, 9 aa, Homo sapiens
  Table A; Target 1256; HLA-C*14:02; ABCB5; ENSG00000004846; TAA
IETAAMTGF

SEQ ID NO: 1257 - protein, 9 aa, Homo sapiens
  Table A; Target 1257; HLA-C*16:04; ABCB5; ENSG00000004846; TAA
IETAAMTGF

SEQ ID NO: 1258 - protein, 8 aa, Homo sapiens
  Table A; Target 1258; HLA-A*23:01; ABCB5; ENSG00000004846; TAA
IFAKIITM

SEQ ID NO: 1259 - protein, 8 aa, Homo sapiens
  Table A; Target 1259; HLA-B*18:01; ABCB5; ENSG00000004846; TAA
IFAKIITM

SEQ ID NO: 1260 - protein, 9 aa, Homo sapiens
  Table A; Target 1260; HLA-A*23:01; ABCB5; ENSG00000004846; TAA
IFAKIITMF

SEQ ID NO: 1261 - protein, 9 aa, Homo sapiens
  Table A; Target 1261; HLA-A*24:02; ABCB5; ENSG00000004846; TAA
IFAKIITMF

SEQ ID NO: 1262 - protein, 9 aa, Homo sapiens
  Table A; Target 1262; HLA-A*29:02; ABCB5; ENSG00000004846; TAA
IFAKIITMF

SEQ ID NO: 1263 - protein, 9 aa, Homo sapiens
  Table A; Target 1263; HLA-A*23:01; ABCB5; ENSG00000004846; TAA
IFGYIQISL

SEQ ID NO: 1264 - protein, 9 aa, Homo sapiens
  Table A; Target 1264; HLA-C*01:02; ABCB5; ENSG00000004846; TAA
IFGYIQISL

SEQ ID NO: 1265 - protein, 9 aa, Homo sapiens
  Table A; Target 1265; HLA-C*14:02; ABCB5; ENSG00000004846; TAA
IFGYIQISL

SEQ ID NO: 1266 - protein, 11 aa, Homo sapiens
  Table A; Target 1266; HLA-A*23:01; ABCB5; ENSG00000004846; TAA
IGAAVPHFETF

SEQ ID NO: 1267 - protein, 11 aa, Homo sapiens
  Table A; Target 1267; HLA-A*24:02; ABCB5; ENSG00000004846; TAA
IGAAVPHFETF

SEQ ID NO: 1268 - protein, 11 aa, Homo sapiens
  Table A; Target 1268; HLA-B*57:01; ABCB5; ENSG00000004846; TAA
IGAAVPHFETF

SEQ ID NO: 1269 - protein, 8 aa, Homo sapiens
  Table A; Target 1269; HLA-C*05:01; ABCB5; ENSG00000004846; TAA
IGDKIALL

SEQ ID NO: 1270 - protein, 9 aa, Homo sapiens
  Table A; Target 1270; HLA-A*02:07; ABCB5; ENSG00000004846; TAA
IGDKIALLF

SEQ ID NO: 1271 - protein, 8 aa, Homo sapiens
  Table A; Target 1271; HLA-C*05:01; ABCB5; ENSG00000004846; TAA
IGELNTRM

SEQ ID NO: 1272 - protein, 9 aa, Homo sapiens
  Table A; Target 1272; HLA-A*11:01; ABCB5; ENSG00000004846; TAA
IGLAVGLVK

SEQ ID NO: 1273 - protein, 11 aa, Homo sapiens
  Table A; Target 1273; HLA-B*57:01; ABCB5; ENSG00000004846; TAA
IGLAVGLVKGW

SEQ ID NO: 1274 - protein, 8 aa, Homo sapiens
  Table A; Target 1274; HLA-B*46:01; ABCB5; ENSG00000004846; TAA
IGTVLAVF

SEQ ID NO: 1275 - protein, 10 aa, Homo sapiens
  Table A; Target 1275; HLA-C*04:01; ABCB5; ENSG00000004846; TAA
IGVLTQNATN

SEQ ID NO: 1276 - protein, 9 aa, Homo sapiens
  Table A; Target 1276; HLA-A*02:03; ABCB5; ENSG00000004846; TAA
IIFAKIITM

SEQ ID NO: 1277 - protein, 9 aa, Homo sapiens
  Table A; Target 1277; HLA-A*02:04; ABCB5; ENSG00000004846; TAA
IIFAKIITM

SEQ ID NO: 1278 - protein, 9 aa, Homo sapiens
  Table A; Target 1278; HLA-A*02:07; ABCB5; ENSG00000004846; TAA
IIFAKIITM

SEQ ID NO: 1279 - protein, 9 aa, Homo sapiens
  Table A; Target 1279; HLA-A*03:01; ABCB5; ENSG00000004846; TAA
IIFAKIITM

SEQ ID NO: 1280 - protein, 9 aa, Homo sapiens
  Table A; Target 1280; HLA-A*32:01; ABCB5; ENSG00000004846; TAA
IIFAKIITM

SEQ ID NO: 1281 - protein, 9 aa, Homo sapiens
  Table A; Target 1281; HLA-B*08:01; ABCB5; ENSG00000004846; TAA
IIFAKIITM

SEQ ID NO: 1282 - protein, 9 aa, Homo sapiens
  Table A; Target 1282; HLA-B*35:01; ABCB5; ENSG00000004846; TAA
IIFAKIITM

SEQ ID NO: 1283 - protein, 9 aa, Homo sapiens
  Table A; Target 1283; HLA-B*46:01; ABCB5; ENSG00000004846; TAA
IIFAKIITM

SEQ ID NO: 1284 - protein, 9 aa, Homo sapiens
  Table A; Target 1284; HLA-B*51:01; ABCB5; ENSG00000004846; TAA
IIFAKIITM

SEQ ID NO: 1285 - protein, 9 aa, Homo sapiens
  Table A; Target 1285; HLA-C*02:02; ABCB5; ENSG00000004846; TAA
IIFAKIITM

SEQ ID NO: 1286 - protein, 9 aa, Homo sapiens
  Table A; Target 1286; HLA-C*03:04; ABCB5; ENSG00000004846; TAA
IIFAKIITM

SEQ ID NO: 1287 - protein, 9 aa, Homo sapiens
  Table A; Target 1287; HLA-C*07:04; ABCB5; ENSG00000004846; TAA
IIFAKIITM

SEQ ID NO: 1288 - protein, 9 aa, Homo sapiens
  Table A; Target 1288; HLA-C*07:06; ABCB5; ENSG00000004846; TAA
IIFAKIITM

SEQ ID NO: 1289 - protein, 9 aa, Homo sapiens
  Table A; Target 1289; HLA-C*12:03; ABCB5; ENSG00000004846; TAA
IIFAKIITM

SEQ ID NO: 1290 - protein, 9 aa, Homo sapiens
  Table A; Target 1290; HLA-C*16:01; ABCB5; ENSG00000004846; TAA
IIFAKIITM

SEQ ID NO: 1291 - protein, 8 aa, Homo sapiens
  Table A; Target 1291; HLA-C*07:01; ABCB5; ENSG00000004846; TAA
IIGSCYAF

SEQ ID NO: 1292 - protein, 9 aa, Homo sapiens
  Table A; Target 1292; HLA-A*32:01; ABCB5; ENSG00000004846; TAA
IITAARQTK

SEQ ID NO: 1293 - protein, 9 aa, Homo sapiens
  Table A; Target 1293; HLA-C*16:01; ABCB5; ENSG00000004846; TAA
IITAARQTK

SEQ ID NO: 1294 - protein, 10 aa, Homo sapiens
  Table A; Target 1294; HLA-B*38:01; ABCB5; ENSG00000004846; TAA
IKEQGTHQEL

SEQ ID NO: 1295 - protein, 9 aa, Homo sapiens
  Table A; Target 1295; HLA-B*15:03; ABCB5; ENSG00000004846; TAA
IKSGETVAL

SEQ ID NO: 1296 - protein, 9 aa, Homo sapiens
  Table A; Target 1296; HLA-B*38:01; ABCB5; ENSG00000004846; TAA
IKSGETVAL

SEQ ID NO: 1297 - protein, 9 aa, Homo sapiens
  Table A; Target 1297; HLA-B*39:01; ABCB5; ENSG00000004846; TAA
IKSGETVAL

SEQ ID NO: 1298 - protein, 9 aa, Homo sapiens
  Table A; Target 1298; HLA-A*02:01; ABCB5; ENSG00000004846; TAA
ILAIDIAQI

SEQ ID NO: 1299 - protein, 9 aa, Homo sapiens
  Table A; Target 1299; HLA-A*02:03; ABCB5; ENSG00000004846; TAA
ILAIDIAQI

SEQ ID NO: 1300 - protein, 9 aa, Homo sapiens
  Table A; Target 1300; HLA-A*02:04; ABCB5; ENSG00000004846; TAA
ILAIDIAQI

SEQ ID NO: 1301 - protein, 9 aa, Homo sapiens
  Table A; Target 1301; HLA-B*13:02; ABCB5; ENSG00000004846; TAA
ILAIDIAQI

SEQ ID NO: 1302 - protein, 9 aa, Homo sapiens
  Table A; Target 1302; HLA-B*38:01; ABCB5; ENSG00000004846; TAA
ILAIDIAQI

SEQ ID NO: 1303 - protein, 9 aa, Homo sapiens
  Table A; Target 1303; HLA-B*55:01; ABCB5; ENSG00000004846; TAA
ILAIDIAQI

SEQ ID NO: 1304 - protein, 9 aa, Homo sapiens
  Table A; Target 1304; HLA-A*02:01; ABCB5; ENSG00000004846; TAA
ILASLVNGA

SEQ ID NO: 1305 - protein, 9 aa, Homo sapiens
  Table A; Target 1305; HLA-A*02:03; ABCB5; ENSG00000004846; TAA
ILASLVNGA

SEQ ID NO: 1306 - protein, 9 aa, Homo sapiens
  Table A; Target 1306; HLA-A*02:04; ABCB5; ENSG00000004846; TAA
ILASLVNGA

SEQ ID NO: 1307 - protein, 9 aa, Homo sapiens
  Table A; Target 1307; HLA-B*13:02; ABCB5; ENSG00000004846; TAA
ILASLVNGA

SEQ ID NO: 1308 - protein, 9 aa, Homo sapiens
  Table A; Target 1308; HLA-B*55:01; ABCB5; ENSG00000004846; TAA
ILASLVNGA

SEQ ID NO: 1309 - protein, 8 aa, Homo sapiens
  Table A; Target 1309; HLA-C*05:01; ABCB5; ENSG00000004846; TAA
ILDEATSA

SEQ ID NO: 1310 - protein, 9 aa, Homo sapiens
  Table A; Target 1310; HLA-A*01:01; ABCB5; ENSG00000004846; TAA
ILDEATSAL

SEQ ID NO: 1311 - protein, 9 aa, Homo sapiens
  Table A; Target 1311; HLA-A*02:01; ABCB5; ENSG00000004846; TAA
ILDEATSAL

SEQ ID NO: 1312 - protein, 9 aa, Homo sapiens
  Table A; Target 1312; HLA-A*02:03; ABCB5; ENSG00000004846; TAA
ILDEATSAL

SEQ ID NO: 1313 - protein, 9 aa, Homo sapiens
  Table A; Target 1313; HLA-A*02:04; ABCB5; ENSG00000004846; TAA
ILDEATSAL

SEQ ID NO: 1314 - protein, 9 aa, Homo sapiens
  Table A; Target 1314; HLA-A*02:07; ABCB5; ENSG00000004846; TAA
ILDEATSAL

SEQ ID NO: 1315 - protein, 9 aa, Homo sapiens
  Table A; Target 1315; HLA-A*32:01; ABCB5; ENSG00000004846; TAA
ILDEATSAL

SEQ ID NO: 1316 - protein, 9 aa, Homo sapiens
  Table A; Target 1316; HLA-B*07:02; ABCB5; ENSG00000004846; TAA
ILDEATSAL

SEQ ID NO: 1317 - protein, 9 aa, Homo sapiens
  Table A; Target 1317; HLA-B*15:01; ABCB5; ENSG00000004846; TAA
ILDEATSAL

SEQ ID NO: 1318 - protein, 9 aa, Homo sapiens
  Table A; Target 1318; HLA-B*35:03; ABCB5; ENSG00000004846; TAA
ILDEATSAL

SEQ ID NO: 1319 - protein, 9 aa, Homo sapiens
  Table A; Target 1319; HLA-B*38:01; ABCB5; ENSG00000004846; TAA
ILDEATSAL

SEQ ID NO: 1320 - protein, 9 aa, Homo sapiens
  Table A; Target 1320; HLA-B*39:01; ABCB5; ENSG00000004846; TAA
ILDEATSAL

SEQ ID NO: 1321 - protein, 9 aa, Homo sapiens
  Table A; Target 1321; HLA-B*46:01; ABCB5; ENSG00000004846; TAA
ILDEATSAL

SEQ ID NO: 1322 - protein, 9 aa, Homo sapiens
  Table A; Target 1322; HLA-B*55:01; ABCB5; ENSG00000004846; TAA
ILDEATSAL

SEQ ID NO: 1323 - protein, 9 aa, Homo sapiens
  Table A; Target 1323; HLA-C*01:02; ABCB5; ENSG00000004846; TAA
ILDEATSAL

SEQ ID NO: 1324 - protein, 9 aa, Homo sapiens
  Table A; Target 1324; HLA-C*03:03; ABCB5; ENSG00000004846; TAA
ILDEATSAL

SEQ ID NO: 1325 - protein, 9 aa, Homo sapiens
  Table A; Target 1325; HLA-C*03:04; ABCB5; ENSG00000004846; TAA
ILDEATSAL

SEQ ID NO: 1326 - protein, 9 aa, Homo sapiens
  Table A; Target 1326; HLA-C*04:01; ABCB5; ENSG00000004846; TAA
ILDEATSAL

SEQ ID NO: 1327 - protein, 9 aa, Homo sapiens
  Table A; Target 1327; HLA-C*05:01; ABCB5; ENSG00000004846; TAA
ILDEATSAL

SEQ ID NO: 1328 - protein, 9 aa, Homo sapiens
  Table A; Target 1328; HLA-C*07:02; ABCB5; ENSG00000004846; TAA
ILDEATSAL

SEQ ID NO: 1329 - protein, 9 aa, Homo sapiens
  Table A; Target 1329; HLA-C*07:04; ABCB5; ENSG00000004846; TAA
ILDEATSAL

SEQ ID NO: 1330 - protein, 9 aa, Homo sapiens
  Table A; Target 1330; HLA-C*14:02; ABCB5; ENSG00000004846; TAA
ILDEATSAL

SEQ ID NO: 1331 - protein, 9 aa, Homo sapiens
  Table A; Target 1331; HLA-A*02:03; ABCB5; ENSG00000004846; TAA
ILKGLNLRI

SEQ ID NO: 1332 - protein, 8 aa, Homo sapiens
  Table A; Target 1332; HLA-A*30:02; ABCB5; ENSG00000004846; TAA
ILNGEPGY

SEQ ID NO: 1333 - protein, 8 aa, Homo sapiens
  Table A; Target 1333; HLA-B*15:03; ABCB5; ENSG00000004846; TAA
ILNGEPGY

SEQ ID NO: 1334 - protein, 8 aa, Homo sapiens
  Table A; Target 1334; HLA-B*39:01; ABCB5; ENSG00000004846; TAA
ILNGEPGY

SEQ ID NO: 1335 - protein, 10 aa, Homo sapiens
  Table A; Target 1335; HLA-A*02:01; ABCB5; ENSG00000004846; TAA
ILNGEPGYTI

SEQ ID NO: 1336 - protein, 10 aa, Homo sapiens
  Table A; Target 1336; HLA-A*02:03; ABCB5; ENSG00000004846; TAA
ILNGEPGYTI

SEQ ID NO: 1337 - protein, 10 aa, Homo sapiens
  Table A; Target 1337; HLA-A*02:04; ABCB5; ENSG00000004846; TAA
ILNGEPGYTI

SEQ ID NO: 1338 - protein, 10 aa, Homo sapiens
  Table A; Target 1338; HLA-A*23:01; ABCB5; ENSG00000004846; TAA
ILNGEPGYTI

SEQ ID NO: 1339 - protein, 10 aa, Homo sapiens
  Table A; Target 1339; HLA-B*13:02; ABCB5; ENSG00000004846; TAA
ILNGEPGYTI

SEQ ID NO: 1340 - protein, 10 aa, Homo sapiens
  Table A; Target 1340; HLA-B*15:01; ABCB5; ENSG00000004846; TAA
ILNGEPGYTI

SEQ ID NO: 1341 - protein, 10 aa, Homo sapiens
  Table A; Target 1341; HLA-B*38:01; ABCB5; ENSG00000004846; TAA
ILNGEPGYTI

SEQ ID NO: 1342 - protein, 11 aa, Homo sapiens
  Table A; Target 1342; HLA-A*31:01; ABCB5; ENSG00000004846; TAA
ILRGLSLSIER

SEQ ID NO: 1343 - protein, 8 aa, Homo sapiens
  Table A; Target 1343; HLA-B*13:02; ABCB5; ENSG00000004846; TAA
ILSIAPVL

SEQ ID NO: 1344 - protein, 8 aa, Homo sapiens
  Table A; Target 1344; HLA-B*37:01; ABCB5; ENSG00000004846; TAA
ILSIAPVL

SEQ ID NO: 1345 - protein, 8 aa, Homo sapiens
  Table A; Target 1345; HLA-C*03:03; ABCB5; ENSG00000004846; TAA
ILSIAPVL

SEQ ID NO: 1346 - protein, 8 aa, Homo sapiens
  Table A; Target 1346; HLA-C*03:04; ABCB5; ENSG00000004846; TAA
ILSIAPVL

SEQ ID NO: 1347 - protein, 8 aa, Homo sapiens
  Table A; Target 1347; HLA-C*16:01; ABCB5; ENSG00000004846; TAA
ILSIAPVL

SEQ ID NO: 1348 - protein, 9 aa, Homo sapiens
  Table A; Target 1348; HLA-A*02:01; ABCB5; ENSG00000004846; TAA
ILSIAPVLA

SEQ ID NO: 1349 - protein, 10 aa, Homo sapiens
  Table A; Target 1349; HLA-A*02:03; ABCB5; ENSG00000004846; TAA
ILSIAPVLAV

SEQ ID NO: 1350 - protein, 8 aa, Homo sapiens
  Table A; Target 1350; HLA-C*05:01; ABCB5; ENSG00000004846; TAA
IMEFPNKF

SEQ ID NO: 1351 - protein, 11 aa, Homo sapiens
  Table A; Target 1351; HLA-A*02:01; ABCB5; ENSG00000004846; TAA
IMVDENDIRAL

SEQ ID NO: 1352 - protein, 11 aa, Homo sapiens
  Table A; Target 1352; HLA-A*02:03; ABCB5; ENSG00000004846; TAA
IMVDENDIRAL

SEQ ID NO: 1353 - protein, 11 aa, Homo sapiens
  Table A; Target 1353; HLA-A*02:04; ABCB5; ENSG00000004846; TAA
IMVDENDIRAL

SEQ ID NO: 1354 - protein, 11 aa, Homo sapiens
  Table A; Target 1354; HLA-A*02:07; ABCB5; ENSG00000004846; TAA
IMVDENDIRAL

SEQ ID NO: 1355 - protein, 11 aa, Homo sapiens
  Table A; Target 1355; HLA-B*46:01; ABCB5; ENSG00000004846; TAA
IMVDENDIRAL

SEQ ID NO: 1356 - protein, 11 aa, Homo sapiens
  Table A; Target 1356; HLA-B*55:01; ABCB5; ENSG00000004846; TAA
IMVDENDIRAL

SEQ ID NO: 1357 - protein, 9 aa, Homo sapiens
  Table A; Target 1357; HLA-B*13:02; ABCB5; ENSG00000004846; TAA
IQGATGSRI

SEQ ID NO: 1358 - protein, 9 aa, Homo sapiens
  Table A; Target 1358; HLA-B*38:01; ABCB5; ENSG00000004846; TAA
IQGATGSRI

SEQ ID NO: 1359 - protein, 9 aa, Homo sapiens
  Table A; Target 1359; HLA-A*02:01; ABCB5; ENSG00000004846; TAA
IQNADLIVV

SEQ ID NO: 1360 - protein, 9 aa, Homo sapiens
  Table A; Target 1360; HLA-A*02:04; ABCB5; ENSG00000004846; TAA
IQNADLIVV

SEQ ID NO: 1361 - protein, 9 aa, Homo sapiens
  Table A; Target 1361; HLA-A*30:01; ABCB5; ENSG00000004846; TAA
IQNADLIVV

SEQ ID NO: 1362 - protein, 9 aa, Homo sapiens
  Table A; Target 1362; HLA-B*13:02; ABCB5; ENSG00000004846; TAA
IQNADLIVV

SEQ ID NO: 1363 - protein, 9 aa, Homo sapiens
  Table A; Target 1363; HLA-B*38:01; ABCB5; ENSG00000004846; TAA
IQNADLIVV

SEQ ID NO: 1364 - protein, 9 aa, Homo sapiens
  Table A; Target 1364; HLA-B*39:01; ABCB5; ENSG00000004846; TAA
IQNADLIVV

SEQ ID NO: 1365 - protein, 10 aa, Homo sapiens
  Table A; Target 1365; HLA-B*38:01; ABCB5; ENSG00000004846; TAA
IQNADLIVVL

SEQ ID NO: 1366 - protein, 9 aa, Homo sapiens
  Table A; Target 1366; HLA-C*06:02; ABCB5; ENSG00000004846; TAA
IRALNVRHY

SEQ ID NO: 1367 - protein, 9 aa, Homo sapiens
  Table A; Target 1367; HLA-C*07:01; ABCB5; ENSG00000004846; TAA
IRALNVRHY

SEQ ID NO: 1368 - protein, 9 aa, Homo sapiens
  Table A; Target 1368; HLA-C*16:04; ABCB5; ENSG00000004846; TAA
IRALNVRHY

SEQ ID NO: 1369 - protein, 10 aa, Homo sapiens
  Table A; Target 1369; HLA-B*38:01; ABCB5; ENSG00000004846; TAA
IRSADLIVTL

SEQ ID NO: 1370 - protein, 9 aa, Homo sapiens
  Table A; Target 1370; HLA-B*27:05; ABCB5; ENSG00000004846; TAA
IRTIVSLTR

SEQ ID NO: 1371 - protein, 9 aa, Homo sapiens
  Table A; Target 1371; HLA-A*01:01; ABCB5; ENSG00000004846; TAA
ISDGIGDKI

SEQ ID NO: 1372 - protein, 9 aa, Homo sapiens
  Table A; Target 1372; HLA-A*02:07; ABCB5; ENSG00000004846; TAA
ISDGIGDKI

SEQ ID NO: 1373 - protein, 9 aa, Homo sapiens
  Table A; Target 1373; HLA-B*38:01; ABCB5; ENSG00000004846; TAA
ISDGIGDKI

SEQ ID NO: 1374 - protein, 9 aa, Homo sapiens
  Table A; Target 1374; HLA-C*05:01; ABCB5; ENSG00000004846; TAA
ISDGIGDKI

SEQ ID NO: 1375 - protein, 11 aa, Homo sapiens
  Table A; Target 1375; HLA-C*05:01; ABCB5; ENSG00000004846; TAA
ISDGIGDKIAL

SEQ ID NO: 1376 - protein, 9 aa, Homo sapiens
  Table A; Target 1376; HLA-A*02:04; ABCB5; ENSG00000004846; TAA
ISLPEVSLL

SEQ ID NO: 1377 - protein, 9 aa, Homo sapiens
  Table A; Target 1377; HLA-A*23:01; ABCB5; ENSG00000004846; TAA
ISLPEVSLL

SEQ ID NO: 1378 - protein, 9 aa, Homo sapiens
  Table A; Target 1378; HLA-A*24:02; ABCB5; ENSG00000004846; TAA
ISLPEVSLL

SEQ ID NO: 1379 - protein, 9 aa, Homo sapiens
  Table A; Target 1379; HLA-B*57:01; ABCB5; ENSG00000004846; TAA
ISLPEVSLL

SEQ ID NO: 1380 - protein, 9 aa, Homo sapiens
  Table A; Target 1380; HLA-B*58:01; ABCB5; ENSG00000004846; TAA
ISLPEVSLL

SEQ ID NO: 1381 - protein, 9 aa, Homo sapiens
  Table A; Target 1381; HLA-C*03:04; ABCB5; ENSG00000004846; TAA
ISLPEVSLL

SEQ ID NO: 1382 - protein, 9 aa, Homo sapiens
  Table A; Target 1382; HLA-C*05:01; ABCB5; ENSG00000004846; TAA
ISLPEVSLL

SEQ ID NO: 1383 - protein, 10 aa, Homo sapiens
  Table A; Target 1383; HLA-A*11:01; ABCB5; ENSG00000004846; TAA
ISLPEVSLLK

SEQ ID NO: 1384 - protein, 8 aa, Homo sapiens
  Table A; Target 1384; HLA-B*58:01; ABCB5; ENSG00000004846; TAA
ISLTSKEL

SEQ ID NO: 1385 - protein, 8 aa, Homo sapiens
  Table A; Target 1385; HLA-C*01:02; ABCB5; ENSG00000004846; TAA
ISLTSKEL

SEQ ID NO: 1386 - protein, 8 aa, Homo sapiens
  Table A; Target 1386; HLA-C*03:03; ABCB5; ENSG00000004846; TAA
ISLTSKEL

SEQ ID NO: 1387 - protein, 8 aa, Homo sapiens
  Table A; Target 1387; HLA-C*03:04; ABCB5; ENSG00000004846; TAA
ISLTSKEL

SEQ ID NO: 1388 - protein, 8 aa, Homo sapiens
  Table A; Target 1388; HLA-C*16:01; ABCB5; ENSG00000004846; TAA
ISLTSKEL

SEQ ID NO: 1389 - protein, 11 aa, Homo sapiens
  Table A; Target 1389; HLA-A*01:01; ABCB5; ENSG00000004846; TAA
ISLTSKELSAY

SEQ ID NO: 1390 - protein, 11 aa, Homo sapiens
  Table A; Target 1390; HLA-A*30:02; ABCB5; ENSG00000004846; TAA
ISLTSKELSAY

SEQ ID NO: 1391 - protein, 11 aa, Homo sapiens
  Table A; Target 1391; HLA-B*15:01; ABCB5; ENSG00000004846; TAA
ISLTSKELSAY

SEQ ID NO: 1392 - protein, 11 aa, Homo sapiens
  Table A; Target 1392; HLA-B*46:01; ABCB5; ENSG00000004846; TAA
ISLTSKELSAY

SEQ ID NO: 1393 - protein, 11 aa, Homo sapiens
  Table A; Target 1393; HLA-B*57:01; ABCB5; ENSG00000004846; TAA
ISLTSKELSAY

SEQ ID NO: 1394 - protein, 11 aa, Homo sapiens
  Table A; Target 1394; HLA-B*58:01; ABCB5; ENSG00000004846; TAA
ISLTSKELSAY

SEQ ID NO: 1395 - protein, 11 aa, Homo sapiens
  Table A; Target 1395; HLA-C*16:02; ABCB5; ENSG00000004846; TAA
ISLTSKELSAY

SEQ ID NO: 1396 - protein, 9 aa, Homo sapiens
  Table A; Target 1396; HLA-B*54:01; ABCB5; ENSG00000004846; TAA
ISLWIITAA

SEQ ID NO: 1397 - protein, 9 aa, Homo sapiens
  Table A; Target 1397; HLA-A*31:01; ABCB5; ENSG00000004846; TAA
ISNNIKYGR

SEQ ID NO: 1398 - protein, 9 aa, Homo sapiens
  Table A; Target 1398; HLA-A*33:01; ABCB5; ENSG00000004846; TAA
ISNNIKYGR

SEQ ID NO: 1399 - protein, 9 aa, Homo sapiens
  Table A; Target 1399; HLA-A*33:03; ABCB5; ENSG00000004846; TAA
ISNNIKYGR

SEQ ID NO: 1400 - protein, 9 aa, Homo sapiens
  Table A; Target 1400; HLA-B*57:01; ABCB5; ENSG00000004846; TAA
ISNNIKYGR

SEQ ID NO: 1401 - protein, 8 aa, Homo sapiens
  Table A; Target 1401; HLA-C*16:01; ABCB5; ENSG00000004846; TAA
ITAARQTK

SEQ ID NO: 1402 - protein, 9 aa, Homo sapiens
  Table A; Target 1402; HLA-A*03:02; ABCB5; ENSG00000004846; TAA
ITMFGNNDK

SEQ ID NO: 1403 - protein, 9 aa, Homo sapiens
  Table A; Target 1403; HLA-A*11:01; ABCB5; ENSG00000004846; TAA
ITMFGNNDK

SEQ ID NO: 1404 - protein, 8 aa, Homo sapiens
  Table A; Target 1404; HLA-A*29:02; ABCB5; ENSG00000004846; TAA
IVFTAIAY

SEQ ID NO: 1405 - protein, 8 aa, Homo sapiens
  Table A; Target 1405; HLA-A*30:02; ABCB5; ENSG00000004846; TAA
IVFTAIAY

SEQ ID NO: 1406 - protein, 8 aa, Homo sapiens
  Table A; Target 1406; HLA-A*32:01; ABCB5; ENSG00000004846; TAA
IVFTAIAY

SEQ ID NO: 1407 - protein, 8 aa, Homo sapiens
  Table A; Target 1407; HLA-B*15:01; ABCB5; ENSG00000004846; TAA
IVFTAIAY

SEQ ID NO: 1408 - protein, 8 aa, Homo sapiens
  Table A; Target 1408; HLA-B*15:03; ABCB5; ENSG00000004846; TAA
IVFTAIAY

SEQ ID NO: 1409 - protein, 8 aa, Homo sapiens
  Table A; Target 1409; HLA-B*18:01; ABCB5; ENSG00000004846; TAA
IVFTAIAY

SEQ ID NO: 1410 - protein, 8 aa, Homo sapiens
  Table A; Target 1410; HLA-B*35:01; ABCB5; ENSG00000004846; TAA
IVFTAIAY

SEQ ID NO: 1411 - protein, 8 aa, Homo sapiens
  Table A; Target 1411; HLA-B*46:01; ABCB5; ENSG00000004846; TAA
IVFTAIAY

SEQ ID NO: 1412 - protein, 8 aa, Homo sapiens
  Table A; Target 1412; HLA-B*58:01; ABCB5; ENSG00000004846; TAA
IVFTAIAY

SEQ ID NO: 1413 - protein, 8 aa, Homo sapiens
  Table A; Target 1413; HLA-C*01:02; ABCB5; ENSG00000004846; TAA
IVFTAIAY

SEQ ID NO: 1414 - protein, 8 aa, Homo sapiens
  Table A; Target 1414; HLA-C*02:02; ABCB5; ENSG00000004846; TAA
IVFTAIAY

SEQ ID NO: 1415 - protein, 8 aa, Homo sapiens
  Table A; Target 1415; HLA-C*03:03; ABCB5; ENSG00000004846; TAA
IVFTAIAY

SEQ ID NO: 1416 - protein, 8 aa, Homo sapiens
  Table A; Target 1416; HLA-C*07:04; ABCB5; ENSG00000004846; TAA
IVFTAIAY

SEQ ID NO: 1417 - protein, 8 aa, Homo sapiens
  Table A; Target 1417; HLA-C*12:03; ABCB5; ENSG00000004846; TAA
IVFTAIAY

SEQ ID NO: 1418 - protein, 8 aa, Homo sapiens
  Table A; Target 1418; HLA-C*14:02; ABCB5; ENSG00000004846; TAA
IVFTAIAY

SEQ ID NO: 1419 - protein, 8 aa, Homo sapiens
  Table A; Target 1419; HLA-C*16:01; ABCB5; ENSG00000004846; TAA
IVFTAIAY

SEQ ID NO: 1420 - protein, 9 aa, Homo sapiens
  Table A; Target 1420; HLA-A*02:07; ABCB5; ENSG00000004846; TAA
IVPQEPVLF

SEQ ID NO: 1421 - protein, 9 aa, Homo sapiens
  Table A; Target 1421; HLA-A*23:01; ABCB5; ENSG00000004846; TAA
IVPQEPVLF

SEQ ID NO: 1422 - protein, 9 aa, Homo sapiens
  Table A; Target 1422; HLA-A*24:02; ABCB5; ENSG00000004846; TAA
IVPQEPVLF

SEQ ID NO: 1423 - protein, 8 aa, Homo sapiens
  Table A; Target 1423; HLA-B*08:01; ABCB5; ENSG00000004846; TAA
IVTLKDGM

SEQ ID NO: 1424 - protein, 9 aa, Homo sapiens
  Table A; Target 1424; HLA-A*23:01; ABCB5; ENSG00000004846; TAA
IYFAYAAGF

SEQ ID NO: 1425 - protein, 9 aa, Homo sapiens
  Table A; Target 1425; HLA-A*24:02; ABCB5; ENSG00000004846; TAA
IYFAYAAGF

SEQ ID NO: 1426 - protein, 9 aa, Homo sapiens
  Table A; Target 1426; HLA-A*29:02; ABCB5; ENSG00000004846; TAA
IYFAYAAGF

SEQ ID NO: 1427 - protein, 9 aa, Homo sapiens
  Table A; Target 1427; HLA-C*14:02; ABCB5; ENSG00000004846; TAA
IYFAYAAGF

SEQ ID NO: 1428 - protein, 11 aa, Homo sapiens
  Table A; Target 1428; HLA-A*24:02; ABCB5; ENSG00000004846; TAA
IYFAYAAGFRF

SEQ ID NO: 1429 - protein, 8 aa, Homo sapiens
  Table A; Target 1429; HLA-A*24:02; ABCB5; ENSG00000004846; TAA
IYGWEMTF

SEQ ID NO: 1430 - protein, 9 aa, Homo sapiens
  Table A; Target 1430; HLA-A*24:02; ABCB5; ENSG00000004846; TAA
IYGWEMTFL

SEQ ID NO: 1431 - protein, 8 aa, Homo sapiens
  Table A; Target 1431; HLA-A*24:02; ABCB5; ENSG00000004846; TAA
IYSMIFVI

SEQ ID NO: 1432 - protein, 9 aa, Homo sapiens
  Table A; Target 1432; HLA-A*23:01; ABCB5; ENSG00000004846; TAA
IYSMIFVIL

SEQ ID NO: 1433 - protein, 9 aa, Homo sapiens
  Table A; Target 1433; HLA-A*24:02; ABCB5; ENSG00000004846; TAA
IYSMIFVIL

SEQ ID NO: 1434 - protein, 9 aa, Homo sapiens
  Table A; Target 1434; HLA-B*55:01; ABCB5; ENSG00000004846; TAA
KADEQMESM

SEQ ID NO: 1435 - protein, 9 aa, Homo sapiens
  Table A; Target 1435; HLA-B*58:01; ABCB5; ENSG00000004846; TAA
KADEQMESM

SEQ ID NO: 1436 - protein, 9 aa, Homo sapiens
  Table A; Target 1436; HLA-C*03:04; ABCB5; ENSG00000004846; TAA
KADEQMESM

SEQ ID NO: 1437 - protein, 9 aa, Homo sapiens
  Table A; Target 1437; HLA-C*05:01; ABCB5; ENSG00000004846; TAA
KADEQMESM

SEQ ID NO: 1438 - protein, 11 aa, Homo sapiens
  Table A; Target 1438; HLA-A*01:01; ABCB5; ENSG00000004846; TAA
KADEQMESMTY

SEQ ID NO: 1439 - protein, 11 aa, Homo sapiens
  Table A; Target 1439; HLA-A*30:02; ABCB5; ENSG00000004846; TAA
KADEQMESMTY

SEQ ID NO: 1440 - protein, 11 aa, Homo sapiens
  Table A; Target 1440; HLA-B*15:01; ABCB5; ENSG00000004846; TAA
KADEQMESMTY

SEQ ID NO: 1441 - protein, 11 aa, Homo sapiens
  Table A; Target 1441; HLA-B*55:01; ABCB5; ENSG00000004846; TAA
KADEQMESMTY

SEQ ID NO: 1442 - protein, 11 aa, Homo sapiens
  Table A; Target 1442; HLA-B*58:01; ABCB5; ENSG00000004846; TAA
KADEQMESMTY

SEQ ID NO: 1443 - protein, 10 aa, Homo sapiens
  Table A; Target 1443; HLA-C*16:04; ABCB5; ENSG00000004846; TAA
KAFEQMYEEM

SEQ ID NO: 1444 - protein, 9 aa, Homo sapiens
  Table A; Target 1444; HLA-B*46:01; ABCB5; ENSG00000004846; TAA
KAGAVAEEV

SEQ ID NO: 1445 - protein, 9 aa, Homo sapiens
  Table A; Target 1445; HLA-B*58:01; ABCB5; ENSG00000004846; TAA
KAGAVAEEV

SEQ ID NO: 1446 - protein, 9 aa, Homo sapiens
  Table A; Target 1446; HLA-C*16:02; ABCB5; ENSG00000004846; TAA
KAGAVAEEV

SEQ ID NO: 1447 - protein, 9 aa, Homo sapiens
  Table A; Target 1447; HLA-C*16:04; ABCB5; ENSG00000004846; TAA
KAGAVAEEV

SEQ ID NO: 1448 - protein, 10 aa, Homo sapiens
  Table A; Target 1448; HLA-A*30:02; ABCB5; ENSG00000004846; TAA
KAKSGAAHLF

SEQ ID NO: 1449 - protein, 10 aa, Homo sapiens
  Table A; Target 1449; HLA-B*57:01; ABCB5; ENSG00000004846; TAA
KAKSGAAHLF

SEQ ID NO: 1450 - protein, 10 aa, Homo sapiens
  Table A; Target 1450; HLA-B*57:01; ABCB5; ENSG00000004846; TAA
KAMLYQDIAW

SEQ ID NO: 1451 - protein, 9 aa, Homo sapiens
  Table A; Target 1451; HLA-A*26:01; ABCB5; ENSG00000004846; TAA
KAQIIGSCY

SEQ ID NO: 1452 - protein, 9 aa, Homo sapiens
  Table A; Target 1452; HLA-A*30:02; ABCB5; ENSG00000004846; TAA
KAQIIGSCY

SEQ ID NO: 1453 - protein, 9 aa, Homo sapiens
  Table A; Target 1453; HLA-A*32:01; ABCB5; ENSG00000004846; TAA
KAQIIGSCY

SEQ ID NO: 1454 - protein, 9 aa, Homo sapiens
  Table A; Target 1454; HLA-B*15:01; ABCB5; ENSG00000004846; TAA
KAQIIGSCY

SEQ ID NO: 1455 - protein, 9 aa, Homo sapiens
  Table A; Target 1455; HLA-B*15:03; ABCB5; ENSG00000004846; TAA
KAQIIGSCY

SEQ ID NO: 1456 - protein, 9 aa, Homo sapiens
  Table A; Target 1456; HLA-B*27:05; ABCB5; ENSG00000004846; TAA
KAQIIGSCY

SEQ ID NO: 1457 - protein, 9 aa, Homo sapiens
  Table A; Target 1457; HLA-B*39:01; ABCB5; ENSG00000004846; TAA
KAQIIGSCY

SEQ ID NO: 1458 - protein, 9 aa, Homo sapiens
  Table A; Target 1458; HLA-B*46:01; ABCB5; ENSG00000004846; TAA
KAQIIGSCY

SEQ ID NO: 1459 - protein, 9 aa, Homo sapiens
  Table A; Target 1459; HLA-B*58:01; ABCB5; ENSG00000004846; TAA
KAQIIGSCY

SEQ ID NO: 1460 - protein, 9 aa, Homo sapiens
  Table A; Target 1460; HLA-C*01:02; ABCB5; ENSG00000004846; TAA
KAQIIGSCY

SEQ ID NO: 1461 - protein, 9 aa, Homo sapiens
  Table A; Target 1461; HLA-C*02:02; ABCB5; ENSG00000004846; TAA
KAQIIGSCY

SEQ ID NO: 1462 - protein, 9 aa, Homo sapiens
  Table A; Target 1462; HLA-C*03:03; ABCB5; ENSG00000004846; TAA
KAQIIGSCY

SEQ ID NO: 1463 - protein, 9 aa, Homo sapiens
  Table A; Target 1463; HLA-C*07:04; ABCB5; ENSG00000004846; TAA
KAQIIGSCY

SEQ ID NO: 1464 - protein, 9 aa, Homo sapiens
  Table A; Target 1464; HLA-C*12:03; ABCB5; ENSG00000004846; TAA
KAQIIGSCY

SEQ ID NO: 1465 - protein, 9 aa, Homo sapiens
  Table A; Target 1465; HLA-C*14:02; ABCB5; ENSG00000004846; TAA
KAQIIGSCY

SEQ ID NO: 1466 - protein, 9 aa, Homo sapiens
  Table A; Target 1466; HLA-C*16:01; ABCB5; ENSG00000004846; TAA
KAQIIGSCY

SEQ ID NO: 1467 - protein, 9 aa, Homo sapiens
  Table A; Target 1467; HLA-C*16:02; ABCB5; ENSG00000004846; TAA
KAQIIGSCY

SEQ ID NO: 1468 - protein, 9 aa, Homo sapiens
  Table A; Target 1468; HLA-C*16:04; ABCB5; ENSG00000004846; TAA
KAQIIGSCY

SEQ ID NO: 1469 - protein, 9 aa, Homo sapiens
  Table A; Target 1469; HLA-B*58:01; ABCB5; ENSG00000004846; TAA
KASKGRTTI

SEQ ID NO: 1470 - protein, 8 aa, Homo sapiens
  Table A; Target 1470; HLA-A*03:02; ABCB5; ENSG00000004846; TAA
KDGMLAEK

SEQ ID NO: 1471 - protein, 8 aa, Homo sapiens
  Table A; Target 1471; HLA-B*27:02; ABCB5; ENSG00000004846; TAA
KDGMLAEK

SEQ ID NO: 1472 - protein, 9 aa, Homo sapiens
  Table A; Target 1472; HLA-A*30:01; ABCB5; ENSG00000004846; TAA
KEAANAANI

SEQ ID NO: 1473 - protein, 9 aa, Homo sapiens
  Table A; Target 1473; HLA-B*37:01; ABCB5; ENSG00000004846; TAA
KEAANAANI

SEQ ID NO: 1474 - protein, 9 aa, Homo sapiens
  Table A; Target 1474; HLA-B*40:01; ABCB5; ENSG00000004846; TAA
KEAANAANI

SEQ ID NO: 1475 - protein, 9 aa, Homo sapiens
  Table A; Target 1475; HLA-B*44:03; ABCB5; ENSG00000004846; TAA
KEAANAANI

SEQ ID NO: 1476 - protein, 9 aa, Homo sapiens
  Table A; Target 1476; HLA-B*49:01; ABCB5; ENSG00000004846; TAA
KEAANAANI

SEQ ID NO: 1477 - protein, 9 aa, Homo sapiens
  Table A; Target 1477; HLA-A*30:01; ABCB5; ENSG00000004846; TAA
KEAVGSIEI

SEQ ID NO: 1478 - protein, 9 aa, Homo sapiens
  Table A; Target 1478; HLA-B*13:02; ABCB5; ENSG00000004846; TAA
KEAVGSIEI

SEQ ID NO: 1479 - protein, 9 aa, Homo sapiens
  Table A; Target 1479; HLA-B*37:01; ABCB5; ENSG00000004846; TAA
KEAVGSIEI

SEQ ID NO: 1480 - protein, 9 aa, Homo sapiens
  Table A; Target 1480; HLA-B*40:01; ABCB5; ENSG00000004846; TAA
KEAVGSIEI

SEQ ID NO: 1481 - protein, 9 aa, Homo sapiens
  Table A; Target 1481; HLA-B*44:02; ABCB5; ENSG00000004846; TAA
KEAVGSIEI

SEQ ID NO: 1482 - protein, 9 aa, Homo sapiens
  Table A; Target 1482; HLA-B*44:03; ABCB5; ENSG00000004846; TAA
KEAVGSIEI

SEQ ID NO: 1483 - protein, 9 aa, Homo sapiens
  Table A; Target 1483; HLA-B*49:01; ABCB5; ENSG00000004846; TAA
KEAVGSIEI

SEQ ID NO: 1484 - protein, 10 aa, Homo sapiens
  Table A; Target 1484; HLA-A*30:01; ABCB5; ENSG00000004846; TAA
KEAVGSIEIF

SEQ ID NO: 1485 - protein, 10 aa, Homo sapiens
  Table A; Target 1485; HLA-B*40:01; ABCB5; ENSG00000004846; TAA
KEAVGSIEIF

SEQ ID NO: 1486 - protein, 10 aa, Homo sapiens
  Table A; Target 1486; HLA-B*44:02; ABCB5; ENSG00000004846; TAA
KEAVGSIEIF

SEQ ID NO: 1487 - protein, 10 aa, Homo sapiens
  Table A; Target 1487; HLA-B*44:03; ABCB5; ENSG00000004846; TAA
KEAVGSIEIF

SEQ ID NO: 1488 - protein, 8 aa, Homo sapiens
  Table A; Target 1488; HLA-A*30:01; ABCB5; ENSG00000004846; TAA
KEISLPEV

SEQ ID NO: 1489 - protein, 8 aa, Homo sapiens
  Table A; Target 1489; HLA-B*18:01; ABCB5; ENSG00000004846; TAA
KEISLPEV

SEQ ID NO: 1490 - protein, 8 aa, Homo sapiens
  Table A; Target 1490; HLA-B*37:01; ABCB5; ENSG00000004846; TAA
KEISLPEV

SEQ ID NO: 1491 - protein, 8 aa, Homo sapiens
  Table A; Target 1491; HLA-B*40:02; ABCB5; ENSG00000004846; TAA
KEISLPEV

SEQ ID NO: 1492 - protein, 8 aa, Homo sapiens
  Table A; Target 1492; HLA-B*49:01; ABCB5; ENSG00000004846; TAA
KEISLPEV

SEQ ID NO: 1493 - protein, 10 aa, Homo sapiens
  Table A; Target 1493; HLA-A*30:01; ABCB5; ENSG00000004846; TAA
KEISLPEVSL

SEQ ID NO: 1494 - protein, 10 aa, Homo sapiens
  Table A; Target 1494; HLA-B*37:01; ABCB5; ENSG00000004846; TAA
KEISLPEVSL

SEQ ID NO: 1495 - protein, 10 aa, Homo sapiens
  Table A; Target 1495; HLA-B*40:01; ABCB5; ENSG00000004846; TAA
KEISLPEVSL

SEQ ID NO: 1496 - protein, 10 aa, Homo sapiens
  Table A; Target 1496; HLA-B*40:02; ABCB5; ENSG00000004846; TAA
KEISLPEVSL

SEQ ID NO: 1497 - protein, 10 aa, Homo sapiens
  Table A; Target 1497; HLA-B*44:02; ABCB5; ENSG00000004846; TAA
KEISLPEVSL

SEQ ID NO: 1498 - protein, 10 aa, Homo sapiens
  Table A; Target 1498; HLA-B*44:03; ABCB5; ENSG00000004846; TAA
KEISLPEVSL

SEQ ID NO: 1499 - protein, 10 aa, Homo sapiens
  Table A; Target 1499; HLA-B*49:01; ABCB5; ENSG00000004846; TAA
KEISLPEVSL

SEQ ID NO: 1500 - protein, 11 aa, Homo sapiens
  Table A; Target 1500; HLA-A*30:01; ABCB5; ENSG00000004846; TAA
KEISLPEVSLL

SEQ ID NO: 1501 - protein, 11 aa, Homo sapiens
  Table A; Target 1501; HLA-B*40:01; ABCB5; ENSG00000004846; TAA
KEISLPEVSLL

SEQ ID NO: 1502 - protein, 11 aa, Homo sapiens
  Table A; Target 1502; HLA-B*44:02; ABCB5; ENSG00000004846; TAA
KEISLPEVSLL

SEQ ID NO: 1503 - protein, 10 aa, Homo sapiens
  Table A; Target 1503; HLA-B*40:01; ABCB5; ENSG00000004846; TAA
KELQRYTQNL

SEQ ID NO: 1504 - protein, 10 aa, Homo sapiens
  Table A; Target 1504; HLA-B*40:02; ABCB5; ENSG00000004846; TAA
KELQRYTQNL

SEQ ID NO: 1505 - protein, 10 aa, Homo sapiens
  Table A; Target 1505; HLA-B*40:01; ABCB5; ENSG00000004846; TAA
KENSTGGLTT

SEQ ID NO: 1506 - protein, 10 aa, Homo sapiens
  Table A; Target 1506; HLA-B*49:01; ABCB5; ENSG00000004846; TAA
KENSTGGLTT

SEQ ID NO: 1507 - protein, 11 aa, Homo sapiens
  Table A; Target 1507; HLA-A*30:01; ABCB5; ENSG00000004846; TAA
KENSTGGLTTI

SEQ ID NO: 1508 - protein, 11 aa, Homo sapiens
  Table A; Target 1508; HLA-B*40:01; ABCB5; ENSG00000004846; TAA
KENSTGGLTTI

SEQ ID NO: 1509 - protein, 11 aa, Homo sapiens
  Table A; Target 1509; HLA-B*40:02; ABCB5; ENSG00000004846; TAA
KENSTGGLTTI

SEQ ID NO: 1510 - protein, 11 aa, Homo sapiens
  Table A; Target 1510; HLA-B*44:02; ABCB5; ENSG00000004846; TAA
KENSTGGLTTI

SEQ ID NO: 1511 - protein, 11 aa, Homo sapiens
  Table A; Target 1511; HLA-B*44:03; ABCB5; ENSG00000004846; TAA
KENSTGGLTTI

SEQ ID NO: 1512 - protein, 11 aa, Homo sapiens
  Table A; Target 1512; HLA-B*49:01; ABCB5; ENSG00000004846; TAA
KENSTGGLTTI

SEQ ID NO: 1513 - protein, 9 aa, Homo sapiens
  Table A; Target 1513; HLA-A*30:01; ABCB5; ENSG00000004846; TAA
KEQGTHQEL

SEQ ID NO: 1514 - protein, 9 aa, Homo sapiens
  Table A; Target 1514; HLA-B*37:01; ABCB5; ENSG00000004846; TAA
KEQGTHQEL

SEQ ID NO: 1515 - protein, 9 aa, Homo sapiens
  Table A; Target 1515; HLA-B*40:01; ABCB5; ENSG00000004846; TAA
KEQGTHQEL

SEQ ID NO: 1516 - protein, 9 aa, Homo sapiens
  Table A; Target 1516; HLA-B*40:02; ABCB5; ENSG00000004846; TAA
KEQGTHQEL

SEQ ID NO: 1517 - protein, 9 aa, Homo sapiens
  Table A; Target 1517; HLA-B*44:02; ABCB5; ENSG00000004846; TAA
KEQGTHQEL

SEQ ID NO: 1518 - protein, 9 aa, Homo sapiens
  Table A; Target 1518; HLA-B*44:03; ABCB5; ENSG00000004846; TAA
KEQGTHQEL

SEQ ID NO: 1519 - protein, 10 aa, Homo sapiens
  Table A; Target 1519; HLA-A*30:01; ABCB5; ENSG00000004846; TAA
KEQGTHQELL

SEQ ID NO: 1520 - protein, 10 aa, Homo sapiens
  Table A; Target 1520; HLA-B*37:01; ABCB5; ENSG00000004846; TAA
KEQGTHQELL

SEQ ID NO: 1521 - protein, 10 aa, Homo sapiens
  Table A; Target 1521; HLA-B*40:01; ABCB5; ENSG00000004846; TAA
KEQGTHQELL

SEQ ID NO: 1522 - protein, 10 aa, Homo sapiens
  Table A; Target 1522; HLA-B*40:02; ABCB5; ENSG00000004846; TAA
KEQGTHQELL

SEQ ID NO: 1523 - protein, 10 aa, Homo sapiens
  Table A; Target 1523; HLA-A*03:02; ABCB5; ENSG00000004846; TAA
KGAQLSGGQK

SEQ ID NO: 1524 - protein, 10 aa, Homo sapiens
  Table A; Target 1524; HLA-C*04:01; ABCB5; ENSG00000004846; TAA
KGAQLSGGQK

SEQ ID NO: 1525 - protein, 10 aa, Homo sapiens
  Table A; Target 1525; HLA-C*07:02; ABCB5; ENSG00000004846; TAA
KGAQLSGGQK

SEQ ID NO: 1526 - protein, 11 aa, Homo sapiens
  Table A; Target 1526; HLA-A*31:01; ABCB5; ENSG00000004846; TAA
KGRTTIVVAHR

SEQ ID NO: 1527 - protein, 9 aa, Homo sapiens
  Table A; Target 1527; HLA-B*38:01; ABCB5; ENSG00000004846; TAA
KHDAEIYSM

SEQ ID NO: 1528 - protein, 9 aa, Homo sapiens
  Table A; Target 1528; HLA-B*39:01; ABCB5; ENSG00000004846; TAA
KHDAEIYSM

SEQ ID NO: 1529 - protein, 9 aa, Homo sapiens
  Table A; Target 1529; HLA-A*03:02; ABCB5; ENSG00000004846; TAA
KISDGIGDK

SEQ ID NO: 1530 - protein, 10 aa, Homo sapiens
  Table A; Target 1530; HLA-B*15:03; ABCB5; ENSG00000004846; TAA
KKAQIIGSCY

SEQ ID NO: 1531 - protein, 9 aa, Homo sapiens
  Table A; Target 1531; HLA-A*02:01; ABCB5; ENSG00000004846; TAA
KLNEDMTLL

SEQ ID NO: 1532 - protein, 9 aa, Homo sapiens
  Table A; Target 1532; HLA-A*02:03; ABCB5; ENSG00000004846; TAA
KLNEDMTLL

SEQ ID NO: 1533 - protein, 9 aa, Homo sapiens
  Table A; Target 1533; HLA-A*02:04; ABCB5; ENSG00000004846; TAA
KLNEDMTLL

SEQ ID NO: 1534 - protein, 9 aa, Homo sapiens
  Table A; Target 1534; HLA-A*02:07; ABCB5; ENSG00000004846; TAA
KLNEDMTLL

SEQ ID NO: 1535 - protein, 9 aa, Homo sapiens
  Table A; Target 1535; HLA-A*03:02; ABCB5; ENSG00000004846; TAA
KLNEDMTLL

SEQ ID NO: 1536 - protein, 9 aa, Homo sapiens
  Table A; Target 1536; HLA-B*15:01; ABCB5; ENSG00000004846; TAA
KLNEDMTLL

SEQ ID NO: 1537 - protein, 9 aa, Homo sapiens
  Table A; Target 1537; HLA-B*55:01; ABCB5; ENSG00000004846; TAA
KLNEDMTLL

SEQ ID NO: 1538 - protein, 11 aa, Homo sapiens
  Table A; Target 1538; HLA-A*02:04; ABCB5; ENSG00000004846; TAA
KLNEDMTLLTL

SEQ ID NO: 1539 - protein, 11 aa, Homo sapiens
  Table A; Target 1539; HLA-A*02:07; ABCB5; ENSG00000004846; TAA
KLNEDMTLLTL

SEQ ID NO: 1540 - protein, 8 aa, Homo sapiens
  Table A; Target 1540; HLA-B*13:02; ABCB5; ENSG00000004846; TAA
KLVNAQSV

SEQ ID NO: 1541 - protein, 9 aa, Homo sapiens
  Table A; Target 1541; HLA-B*07:02; ABCB5; ENSG00000004846; TAA
KLVNAQSVQ

SEQ ID NO: 1542 - protein, 9 aa, Homo sapiens
  Table A; Target 1542; HLA-C*04:01; ABCB5; ENSG00000004846; TAA
KLVNAQSVQ

SEQ ID NO: 1543 - protein, 9 aa, Homo sapiens
  Table A; Target 1543; HLA-C*06:02; ABCB5; ENSG00000004846; TAA
KLVNAQSVQ

SEQ ID NO: 1544 - protein, 9 aa, Homo sapiens
  Table A; Target 1544; HLA-C*07:01; ABCB5; ENSG00000004846; TAA
KLVNAQSVQ

SEQ ID NO: 1545 - protein, 11 aa, Homo sapiens
  Table A; Target 1545; HLA-B*07:02; ABCB5; ENSG00000004846; TAA
KPESIEGTVEF

SEQ ID NO: 1546 - protein, 11 aa, Homo sapiens
  Table A; Target 1546; HLA-B*35:01; ABCB5; ENSG00000004846; TAA
KPESIEGTVEF

SEQ ID NO: 1547 - protein, 11 aa, Homo sapiens
  Table A; Target 1547; HLA-B*35:03; ABCB5; ENSG00000004846; TAA
KPESIEGTVEF

SEQ ID NO: 1548 - protein, 11 aa, Homo sapiens
  Table A; Target 1548; HLA-B*55:01; ABCB5; ENSG00000004846; TAA
KPESIEGTVEF

SEQ ID NO: 1549 - protein, 11 aa, Homo sapiens
  Table A; Target 1549; HLA-C*05:01; ABCB5; ENSG00000004846; TAA
KPESIEGTVEF

SEQ ID NO: 1550 - protein, 11 aa, Homo sapiens
  Table A; Target 1550; HLA-C*07:02; ABCB5; ENSG00000004846; TAA
KPESIEGTVEF

SEQ ID NO: 1551 - protein, 10 aa, Homo sapiens
  Table A; Target 1551; HLA-B*56:01; ABCB5; ENSG00000004846; TAA
KPKILLLDEA

SEQ ID NO: 1552 - protein, 10 aa, Homo sapiens
  Table A; Target 1552; HLA-B*07:02; ABCB5; ENSG00000004846; TAA
KPSIDNFSTA

SEQ ID NO: 1553 - protein, 10 aa, Homo sapiens
  Table A; Target 1553; HLA-B*56:01; ABCB5; ENSG00000004846; TAA
KPSIDNFSTA

SEQ ID NO: 1554 - protein, 8 aa, Homo sapiens
  Table A; Target 1554; HLA-B*58:01; ABCB5; ENSG00000004846; TAA
KSAVQAAL

SEQ ID NO: 1555 - protein, 8 aa, Homo sapiens
  Table A; Target 1555; HLA-C*03:04; ABCB5; ENSG00000004846; TAA
KSAVQAAL

SEQ ID NO: 1556 - protein, 8 aa, Homo sapiens
  Table A; Target 1556; HLA-C*16:01; ABCB5; ENSG00000004846; TAA
KSAVQAAL

SEQ ID NO: 1557 - protein, 10 aa, Homo sapiens
  Table A; Target 1557; HLA-A*03:01; ABCB5; ENSG00000004846; TAA
KSAVQAALEK

SEQ ID NO: 1558 - protein, 10 aa, Homo sapiens
  Table A; Target 1558; HLA-A*03:02; ABCB5; ENSG00000004846; TAA
KSAVQAALEK

SEQ ID NO: 1559 - protein, 10 aa, Homo sapiens
  Table A; Target 1559; HLA-A*11:01; ABCB5; ENSG00000004846; TAA
KSAVQAALEK

SEQ ID NO: 1560 - protein, 11 aa, Homo sapiens
  Table A; Target 1560; HLA-C*06:02; ABCB5; ENSG00000004846; TAA
KSAVQAALEKA

SEQ ID NO: 1561 - protein, 8 aa, Homo sapiens
  Table A; Target 1561; HLA-A*32:01; ABCB5; ENSG00000004846; TAA
KSGAAHLF

SEQ ID NO: 1562 - protein, 8 aa, Homo sapiens
  Table A; Target 1562; HLA-B*57:01; ABCB5; ENSG00000004846; TAA
KSGAAHLF

SEQ ID NO: 1563 - protein, 8 aa, Homo sapiens
  Table A; Target 1563; HLA-B*58:01; ABCB5; ENSG00000004846; TAA
KSGAAHLF

SEQ ID NO: 1564 - protein, 8 aa, Homo sapiens
  Table A; Target 1564; HLA-B*58:01; ABCB5; ENSG00000004846; TAA
KSGETVAL

SEQ ID NO: 1565 - protein, 8 aa, Homo sapiens
  Table A; Target 1565; HLA-C*16:01; ABCB5; ENSG00000004846; TAA
KSGETVAL

SEQ ID NO: 1566 - protein, 10 aa, Homo sapiens
  Table A; Target 1566; HLA-A*11:01; ABCB5; ENSG00000004846; TAA
KSIKSDFIDK

SEQ ID NO: 1567 - protein, 8 aa, Homo sapiens
  Table A; Target 1567; HLA-B*58:01; ABCB5; ENSG00000004846; TAA
KSTSVQLL

SEQ ID NO: 1568 - protein, 10 aa, Homo sapiens
  Table A; Target 1568; HLA-A*31:01; ABCB5; ENSG00000004846; TAA
KSTSVQLLQR

SEQ ID NO: 1569 - protein, 8 aa, Homo sapiens
  Table A; Target 1569; HLA-B*58:01; ABCB5; ENSG00000004846; TAA
KSTVVQLL

SEQ ID NO: 1570 - protein, 10 aa, Homo sapiens
  Table A; Target 1570; HLA-A*02:03; ABCB5; ENSG00000004846; TAA
KTNSLPLHSV

SEQ ID NO: 1571 - protein, 10 aa, Homo sapiens
  Table A; Target 1571; HLA-A*31:01; ABCB5; ENSG00000004846; TAA
KTNSLPLHSV

SEQ ID NO: 1572 - protein, 10 aa, Homo sapiens
  Table A; Target 1572; HLA-A*32:01; ABCB5; ENSG00000004846; TAA
KTNSLPLHSV

SEQ ID NO: 1573 - protein, 10 aa, Homo sapiens
  Table A; Target 1573; HLA-B*56:01; ABCB5; ENSG00000004846; TAA
KTNSLPLHSV

SEQ ID NO: 1574 - protein, 11 aa, Homo sapiens
  Table A; Target 1574; HLA-A*03:01; ABCB5; ENSG00000004846; TAA
KTNSLPLHSVK

SEQ ID NO: 1575 - protein, 11 aa, Homo sapiens
  Table A; Target 1575; HLA-A*03:02; ABCB5; ENSG00000004846; TAA
KTNSLPLHSVK

SEQ ID NO: 1576 - protein, 11 aa, Homo sapiens
  Table A; Target 1576; HLA-A*31:01; ABCB5; ENSG00000004846; TAA
KTNSLPLHSVK

SEQ ID NO: 1577 - protein, 10 aa, Homo sapiens
  Table A; Target 1577; HLA-B*40:02; ABCB5; ENSG00000004846; TAA
KTVAFVGSSG

SEQ ID NO: 1578 - protein, 8 aa, Homo sapiens
  Table A; Target 1578; HLA-A*30:02; ABCB5; ENSG00000004846; TAA
KVSLGAVY

SEQ ID NO: 1579 - protein, 8 aa, Homo sapiens
  Table A; Target 1579; HLA-B*15:01; ABCB5; ENSG00000004846; TAA
KVSLGAVY

SEQ ID NO: 1580 - protein, 8 aa, Homo sapiens
  Table A; Target 1580; HLA-C*16:01; ABCB5; ENSG00000004846; TAA
KVSLGAVY

SEQ ID NO: 1581 - protein, 9 aa, Homo sapiens
  Table A; Target 1581; HLA-A*03:01; ABCB5; ENSG00000004846; TAA
KVVQHALDK

SEQ ID NO: 1582 - protein, 9 aa, Homo sapiens
  Table A; Target 1582; HLA-A*03:02; ABCB5; ENSG00000004846; TAA
KVVQHALDK

SEQ ID NO: 1583 - protein, 9 aa, Homo sapiens
  Table A; Target 1583; HLA-A*11:01; ABCB5; ENSG00000004846; TAA
KVVQHALDK

SEQ ID NO: 1584 - protein, 8 aa, Homo sapiens
  Table A; Target 1584; HLA-A*23:01; ABCB5; ENSG00000004846; TAA
KYNTQVGL

SEQ ID NO: 1585 - protein, 8 aa, Homo sapiens
  Table A; Target 1585; HLA-C*14:02; ABCB5; ENSG00000004846; TAA
KYNTQVGL

SEQ ID NO: 1586 - protein, 10 aa, Homo sapiens
  Table A; Target 1586; HLA-A*24:02; ABCB5; ENSG00000004846; TAA
KYNTQVGLKG

SEQ ID NO: 1587 - protein, 10 aa, Homo sapiens
  Table A; Target 1587; HLA-B*35:03; ABCB5; ENSG00000004846; TAA
LAEKGAHAEL

SEQ ID NO: 1588 - protein, 10 aa, Homo sapiens
  Table A; Target 1588; HLA-B*40:01; ABCB5; ENSG00000004846; TAA
LAEKGAHAEL

SEQ ID NO: 1589 - protein, 10 aa, Homo sapiens
  Table A; Target 1589; HLA-C*03:04; ABCB5; ENSG00000004846; TAA
LAEKGAHAEL

SEQ ID NO: 1590 - protein, 10 aa, Homo sapiens
  Table A; Target 1590; HLA-C*05:01; ABCB5; ENSG00000004846; TAA
LAEKGAHAEL

SEQ ID NO: 1591 - protein, 8 aa, Homo sapiens
  Table A; Target 1591; HLA-B*15:03; ABCB5; ENSG00000004846; TAA
LAFKAMLY

SEQ ID NO: 1592 - protein, 8 aa, Homo sapiens
  Table A; Target 1592; HLA-B*35:01; ABCB5; ENSG00000004846; TAA
LAFKAMLY

SEQ ID NO: 1593 - protein, 8 aa, Homo sapiens
  Table A; Target 1593; HLA-B*46:01; ABCB5; ENSG00000004846; TAA
LAFKAMLY

SEQ ID NO: 1594 - protein, 8 aa, Homo sapiens
  Table A; Target 1594; HLA-C*02:02; ABCB5; ENSG00000004846; TAA
LAFKAMLY

SEQ ID NO: 1595 - protein, 8 aa, Homo sapiens
  Table A; Target 1595; HLA-C*07:01; ABCB5; ENSG00000004846; TAA
LAFKAMLY

SEQ ID NO: 1596 - protein, 8 aa, Homo sapiens
  Table A; Target 1596; HLA-C*12:03; ABCB5; ENSG00000004846; TAA
LAFKAMLY

SEQ ID NO: 1597 - protein, 9 aa, Homo sapiens
  Table A; Target 1597; HLA-B*46:01; ABCB5; ENSG00000004846; TAA
LAFWYGTSL

SEQ ID NO: 1598 - protein, 9 aa, Homo sapiens
  Table A; Target 1598; HLA-B*54:01; ABCB5; ENSG00000004846; TAA
LAFWYGTSL

SEQ ID NO: 1599 - protein, 9 aa, Homo sapiens
  Table A; Target 1599; HLA-C*02:02; ABCB5; ENSG00000004846; TAA
LAFWYGTSL

SEQ ID NO: 1600 - protein, 9 aa, Homo sapiens
  Table A; Target 1600; HLA-C*03:03; ABCB5; ENSG00000004846; TAA
LAFWYGTSL

SEQ ID NO: 1601 - protein, 9 aa, Homo sapiens
  Table A; Target 1601; HLA-C*03:04; ABCB5; ENSG00000004846; TAA
LAFWYGTSL

SEQ ID NO: 1602 - protein, 8 aa, Homo sapiens
  Table A; Target 1602; HLA-B*08:01; ABCB5; ENSG00000004846; TAA
LAIARALL

SEQ ID NO: 1603 - protein, 8 aa, Homo sapiens
  Table A; Target 1603; HLA-A*23:01; ABCB5; ENSG00000004846; TAA
LAIDIAQI

SEQ ID NO: 1604 - protein, 8 aa, Homo sapiens
  Table A; Target 1604; HLA-B*51:01; ABCB5; ENSG00000004846; TAA
LAIDIAQI

SEQ ID NO: 1605 - protein, 9 aa, Homo sapiens
  Table A; Target 1605; HLA-C*02:02; ABCB5; ENSG00000004846; TAA
LAIDIAQIQ

SEQ ID NO: 1606 - protein, 9 aa, Homo sapiens
  Table A; Target 1606; HLA-C*12:03; ABCB5; ENSG00000004846; TAA
LAIDIAQIQ

SEQ ID NO: 1607 - protein, 11 aa, Homo sapiens
  Table A; Target 1607; HLA-B*54:01; ABCB5; ENSG00000004846; TAA
LAIDIAQIQGA

SEQ ID NO: 1608 - protein, 9 aa, Homo sapiens
  Table A; Target 1608; HLA-C*01:02; ABCB5; ENSG00000004846; TAA
LAPEYSKAK

SEQ ID NO: 1609 - protein, 8 aa, Homo sapiens
  Table A; Target 1609; HLA-B*51:01; ABCB5; ENSG00000004846; TAA
LAVFFSVI

SEQ ID NO: 1610 - protein, 9 aa, Homo sapiens
  Table A; Target 1610; HLA-A*25:01; ABCB5; ENSG00000004846; TAA
LAVGLVKGW

SEQ ID NO: 1611 - protein, 9 aa, Homo sapiens
  Table A; Target 1611; HLA-B*44:02; ABCB5; ENSG00000004846; TAA
LAVGLVKGW

SEQ ID NO: 1612 - protein, 9 aa, Homo sapiens
  Table A; Target 1612; HLA-B*57:01; ABCB5; ENSG00000004846; TAA
LAVGLVKGW

SEQ ID NO: 1613 - protein, 9 aa, Homo sapiens
  Table A; Target 1613; HLA-C*12:03; ABCB5; ENSG00000004846; TAA
LAVGLVKGW

SEQ ID NO: 1614 - protein, 10 aa, Homo sapiens
  Table A; Target 1614; HLA-B*54:01; ABCB5; ENSG00000004846; TAA
LAVTGMIETA

SEQ ID NO: 1615 - protein, 9 aa, Homo sapiens
  Table A; Target 1615; HLA-B*37:01; ABCB5; ENSG00000004846; TAA
LDSESKSAV

SEQ ID NO: 1616 - protein, 8 aa, Homo sapiens
  Table A; Target 1616; HLA-B*18:01; ABCB5; ENSG00000004846; TAA
LEFREVSF

SEQ ID NO: 1617 - protein, 9 aa, Homo sapiens
  Table A; Target 1617; HLA-B*44:02; ABCB5; ENSG00000004846; TAA
LEFREVSFF

SEQ ID NO: 1618 - protein, 10 aa, Homo sapiens
  Table A; Target 1618; HLA-A*30:01; ABCB5; ENSG00000004846; TAA
LENIRTIVSL

SEQ ID NO: 1619 - protein, 10 aa, Homo sapiens
  Table A; Target 1619; HLA-B*40:02; ABCB5; ENSG00000004846; TAA
LENIRTIVSL

SEQ ID NO: 1620 - protein, 10 aa, Homo sapiens
  Table A; Target 1620; HLA-C*04:01; ABCB5; ENSG00000004846; TAA
LFDGVDAKEL

SEQ ID NO: 1621 - protein, 8 aa, Homo sapiens
  Table A; Target 1621; HLA-A*23:01; ABCB5; ENSG00000004846; TAA
LFQNMSTF

SEQ ID NO: 1622 - protein, 8 aa, Homo sapiens
  Table A; Target 1622; HLA-A*24:02; ABCB5; ENSG00000004846; TAA
LFQNMSTF

SEQ ID NO: 1623 - protein, 8 aa, Homo sapiens
  Table A; Target 1623; HLA-C*04:01; ABCB5; ENSG00000004846; TAA
LFQNMSTF

SEQ ID NO: 1624 - protein, 8 aa, Homo sapiens
  Table A; Target 1624; HLA-C*14:02; ABCB5; ENSG00000004846; TAA
LFQNMSTF

SEQ ID NO: 1625 - protein, 8 aa, Homo sapiens
  Table A; Target 1625; HLA-C*03:04; ABCB5; ENSG00000004846; TAA
LGTLASVL

SEQ ID NO: 1626 - protein, 9 aa, Homo sapiens
  Table A; Target 1626; HLA-A*02:01; ABCB5; ENSG00000004846; TAA
LILDEATSA

SEQ ID NO: 1627 - protein, 10 aa, Homo sapiens
  Table A; Target 1627; HLA-C*01:02; ABCB5; ENSG00000004846; TAA
LILDEATSAL

SEQ ID NO: 1628 - protein, 9 aa, Homo sapiens
  Table A; Target 1628; HLA-A*29:02; ABCB5; ENSG00000004846; TAA
LILNGEPGY

SEQ ID NO: 1629 - protein, 9 aa, Homo sapiens
  Table A; Target 1629; HLA-A*30:02; ABCB5; ENSG00000004846; TAA
LILNGEPGY

SEQ ID NO: 1630 - protein, 9 aa, Homo sapiens
  Table A; Target 1630; HLA-B*39:01; ABCB5; ENSG00000004846; TAA
LILNGEPGY

SEQ ID NO: 1631 - protein, 9 aa, Homo sapiens
  Table A; Target 1631; HLA-A*02:01; ABCB5; ENSG00000004846; TAA
LILSIAPVL

SEQ ID NO: 1632 - protein, 9 aa, Homo sapiens
  Table A; Target 1632; HLA-A*02:04; ABCB5; ENSG00000004846; TAA
LILSIAPVL

SEQ ID NO: 1633 - protein, 9 aa, Homo sapiens
  Table A; Target 1633; HLA-A*02:07; ABCB5; ENSG00000004846; TAA
LILSIAPVL

SEQ ID NO: 1634 - protein, 9 aa, Homo sapiens
  Table A; Target 1634; HLA-A*23:01; ABCB5; ENSG00000004846; TAA
LILSIAPVL

SEQ ID NO: 1635 - protein, 8 aa, Homo sapiens
  Table A; Target 1635; HLA-C*05:01; ABCB5; ENSG00000004846; TAA
LLDEATSA

SEQ ID NO: 1636 - protein, 9 aa, Homo sapiens
  Table A; Target 1636; HLA-A*01:01; ABCB5; ENSG00000004846; TAA
LLDEATSAL

SEQ ID NO: 1637 - protein, 9 aa, Homo sapiens
  Table A; Target 1637; HLA-A*02:01; ABCB5; ENSG00000004846; TAA
LLDEATSAL

SEQ ID NO: 1638 - protein, 9 aa, Homo sapiens
  Table A; Target 1638; HLA-A*02:03; ABCB5; ENSG00000004846; TAA
LLDEATSAL

SEQ ID NO: 1639 - protein, 9 aa, Homo sapiens
  Table A; Target 1639; HLA-A*02:07; ABCB5; ENSG00000004846; TAA
LLDEATSAL

SEQ ID NO: 1640 - protein, 9 aa, Homo sapiens
  Table A; Target 1640; HLA-A*32:01; ABCB5; ENSG00000004846; TAA
LLDEATSAL

SEQ ID NO: 1641 - protein, 9 aa, Homo sapiens
  Table A; Target 1641; HLA-B*35:03; ABCB5; ENSG00000004846; TAA
LLDEATSAL

SEQ ID NO: 1642 - protein, 9 aa, Homo sapiens
  Table A; Target 1642; HLA-B*38:01; ABCB5; ENSG00000004846; TAA
LLDEATSAL

SEQ ID NO: 1643 - protein, 9 aa, Homo sapiens
  Table A; Target 1643; HLA-B*39:01; ABCB5; ENSG00000004846; TAA
LLDEATSAL

SEQ ID NO: 1644 - protein, 9 aa, Homo sapiens
  Table A; Target 1644; HLA-B*55:01; ABCB5; ENSG00000004846; TAA
LLDEATSAL

SEQ ID NO: 1645 - protein, 9 aa, Homo sapiens
  Table A; Target 1645; HLA-C*01:02; ABCB5; ENSG00000004846; TAA
LLDEATSAL

SEQ ID NO: 1646 - protein, 9 aa, Homo sapiens
  Table A; Target 1646; HLA-C*03:03; ABCB5; ENSG00000004846; TAA
LLDEATSAL

SEQ ID NO: 1647 - protein, 9 aa, Homo sapiens
  Table A; Target 1647; HLA-C*03:04; ABCB5; ENSG00000004846; TAA
LLDEATSAL

SEQ ID NO: 1648 - protein, 9 aa, Homo sapiens
  Table A; Target 1648; HLA-C*04:01; ABCB5; ENSG00000004846; TAA
LLDEATSAL

SEQ ID NO: 1649 - protein, 9 aa, Homo sapiens
  Table A; Target 1649; HLA-C*05:01; ABCB5; ENSG00000004846; TAA
LLDEATSAL

SEQ ID NO: 1650 - protein, 9 aa, Homo sapiens
  Table A; Target 1650; HLA-C*07:04; ABCB5; ENSG00000004846; TAA
LLDEATSAL

SEQ ID NO: 1651 - protein, 9 aa, Homo sapiens
  Table A; Target 1651; HLA-C*14:02; ABCB5; ENSG00000004846; TAA
LLDEATSAL

SEQ ID NO: 1652 - protein, 9 aa, Homo sapiens
  Table A; Target 1652; HLA-A*25:01; ABCB5; ENSG00000004846; TAA
LLFQNMSTF

SEQ ID NO: 1653 - protein, 9 aa, Homo sapiens
  Table A; Target 1653; HLA-B*15:01; ABCB5; ENSG00000004846; TAA
LLFQNMSTF

SEQ ID NO: 1654 - protein, 9 aa, Homo sapiens
  Table A; Target 1654; HLA-B*15:03; ABCB5; ENSG00000004846; TAA
LLFQNMSTF

SEQ ID NO: 1655 - protein, 9 aa, Homo sapiens
  Table A; Target 1655; HLA-B*46:01; ABCB5; ENSG00000004846; TAA
LLFQNMSTF

SEQ ID NO: 1656 - protein, 9 aa, Homo sapiens
  Table A; Target 1656; HLA-C*02:02; ABCB5; ENSG00000004846; TAA
LLFQNMSTF

SEQ ID NO: 1657 - protein, 9 aa, Homo sapiens
  Table A; Target 1657; HLA-A*02:01; ABCB5; ENSG00000004846; TAA
LLLDEATSA

SEQ ID NO: 1658 - protein, 10 aa, Homo sapiens
  Table A; Target 1658; HLA-A*02:01; ABCB5; ENSG00000004846; TAA
LLLDEATSAL

SEQ ID NO: 1659 - protein, 10 aa, Homo sapiens
  Table A; Target 1659; HLA-A*02:03; ABCB5; ENSG00000004846; TAA
LLLDEATSAL

SEQ ID NO: 1660 - protein, 10 aa, Homo sapiens
  Table A; Target 1660; HLA-A*02:04; ABCB5; ENSG00000004846; TAA
LLLDEATSAL

SEQ ID NO: 1661 - protein, 10 aa, Homo sapiens
  Table A; Target 1661; HLA-C*01:02; ABCB5; ENSG00000004846; TAA
LLLDEATSAL

SEQ ID NO: 1662 - protein, 10 aa, Homo sapiens
  Table A; Target 1662; HLA-C*14:02; ABCB5; ENSG00000004846; TAA
LLLDEATSAL

SEQ ID NO: 1663 - protein, 9 aa, Homo sapiens
  Table A; Target 1663; HLA-A*02:04; ABCB5; ENSG00000004846; TAA
LLQKPKILL

SEQ ID NO: 1664 - protein, 10 aa, Homo sapiens
  Table A; Target 1664; HLA-A*02:04; ABCB5; ENSG00000004846; TAA
LLQKPKILLL

SEQ ID NO: 1665 - protein, 9 aa, Homo sapiens
  Table A; Target 1665; HLA-A*01:01; ABCB5; ENSG00000004846; TAA
LMAKRGLYY

SEQ ID NO: 1666 - protein, 9 aa, Homo sapiens
  Table A; Target 1666; HLA-A*03:01; ABCB5; ENSG00000004846; TAA
LMAKRGLYY

SEQ ID NO: 1667 - protein, 9 aa, Homo sapiens
  Table A; Target 1667; HLA-A*29:02; ABCB5; ENSG00000004846; TAA
LMAKRGLYY

SEQ ID NO: 1668 - protein, 9 aa, Homo sapiens
  Table A; Target 1668; HLA-A*02:07; ABCB5; ENSG00000004846; TAA
LMPLVLGEM

SEQ ID NO: 1669 - protein, 11 aa, Homo sapiens
  Table A; Target 1669; HLA-A*01:01; ABCB5; ENSG00000004846; TAA
LNEDMTLLTLY

SEQ ID NO: 1670 - protein, 11 aa, Homo sapiens
  Table A; Target 1670; HLA-A*29:02; ABCB5; ENSG00000004846; TAA
LNEDMTLLTLY

SEQ ID NO: 1671 - protein, 9 aa, Homo sapiens
  Table A; Target 1671; HLA-A*23:01; ABCB5; ENSG00000004846; TAA
LNGTVHPVF

SEQ ID NO: 1672 - protein, 9 aa, Homo sapiens
  Table A; Target 1672; HLA-B*35:03; ABCB5; ENSG00000004846; TAA
LPEKYNTQV

SEQ ID NO: 1673 - protein, 9 aa, Homo sapiens
  Table A; Target 1673; HLA-B*51:01; ABCB5; ENSG00000004846; TAA
LPEKYNTQV

SEQ ID NO: 1674 - protein, 9 aa, Homo sapiens
  Table A; Target 1674; HLA-B*55:01; ABCB5; ENSG00000004846; TAA
LPEKYNTQV

SEQ ID NO: 1675 - protein, 11 aa, Homo sapiens
  Table A; Target 1675; HLA-B*35:03; ABCB5; ENSG00000004846; TAA
LPEKYNTQVGL

SEQ ID NO: 1676 - protein, 9 aa, Homo sapiens
  Table A; Target 1676; HLA-B*51:01; ABCB5; ENSG00000004846; TAA
LPEVSLLKI

SEQ ID NO: 1677 - protein, 9 aa, Homo sapiens
  Table A; Target 1677; HLA-B*08:01; ABCB5; ENSG00000004846; TAA
LPLHSVKSI

SEQ ID NO: 1678 - protein, 9 aa, Homo sapiens
  Table A; Target 1678; HLA-B*51:01; ABCB5; ENSG00000004846; TAA
LPLHSVKSI

SEQ ID NO: 1679 - protein, 9 aa, Homo sapiens
  Table A; Target 1679; HLA-B*54:01; ABCB5; ENSG00000004846; TAA
LPLHSVKSI

SEQ ID NO: 1680 - protein, 9 aa, Homo sapiens
  Table A; Target 1680; HLA-B*56:01; ABCB5; ENSG00000004846; TAA
LPLHSVKSI

SEQ ID NO: 1681 - protein, 8 aa, Homo sapiens
  Table A; Target 1681; HLA-B*35:01; ABCB5; ENSG00000004846; TAA
LPLMPLVL

SEQ ID NO: 1682 - protein, 8 aa, Homo sapiens
  Table A; Target 1682; HLA-B*35:03; ABCB5; ENSG00000004846; TAA
LPLMPLVL

SEQ ID NO: 1683 - protein, 8 aa, Homo sapiens
  Table A; Target 1683; HLA-B*51:01; ABCB5; ENSG00000004846; TAA
LPLMPLVL

SEQ ID NO: 1684 - protein, 8 aa, Homo sapiens
  Table A; Target 1684; HLA-B*08:01; ABCB5; ENSG00000004846; TAA
LQKPKILL

SEQ ID NO: 1685 - protein, 9 aa, Homo sapiens
  Table A; Target 1685; HLA-A*02:03; ABCB5; ENSG00000004846; TAA
LQKPKILLL

SEQ ID NO: 1686 - protein, 9 aa, Homo sapiens
  Table A; Target 1686; HLA-A*02:04; ABCB5; ENSG00000004846; TAA
LQKPKILLL

SEQ ID NO: 1687 - protein, 9 aa, Homo sapiens
  Table A; Target 1687; HLA-B*08:01; ABCB5; ENSG00000004846; TAA
LQKPKILLL

SEQ ID NO: 1688 - protein, 11 aa, Homo sapiens
  Table A; Target 1688; HLA-B*27:05; ABCB5; ENSG00000004846; TAA
LRIKSGETVAL

SEQ ID NO: 1689 - protein, 9 aa, Homo sapiens
  Table A; Target 1689; HLA-A*02:03; ABCB5; ENSG00000004846; TAA
LSIAPVLAV

SEQ ID NO: 1690 - protein, 9 aa, Homo sapiens
  Table A; Target 1690; HLA-A*02:07; ABCB5; ENSG00000004846; TAA
LSIAPVLAV

SEQ ID NO: 1691 - protein, 9 aa, Homo sapiens
  Table A; Target 1691; HLA-A*68:02; ABCB5; ENSG00000004846; TAA
LSIAPVLAV

SEQ ID NO: 1692 - protein, 9 aa, Homo sapiens
  Table A; Target 1692; HLA-B*13:02; ABCB5; ENSG00000004846; TAA
LSIAPVLAV

SEQ ID NO: 1693 - protein, 9 aa, Homo sapiens
  Table A; Target 1693; HLA-B*46:01; ABCB5; ENSG00000004846; TAA
LSIAPVLAV

SEQ ID NO: 1694 - protein, 9 aa, Homo sapiens
  Table A; Target 1694; HLA-B*51:01; ABCB5; ENSG00000004846; TAA
LSIAPVLAV

SEQ ID NO: 1695 - protein, 9 aa, Homo sapiens
  Table A; Target 1695; HLA-B*54:01; ABCB5; ENSG00000004846; TAA
LSIAPVLAV

SEQ ID NO: 1696 - protein, 9 aa, Homo sapiens
  Table A; Target 1696; HLA-B*56:01; ABCB5; ENSG00000004846; TAA
LSIAPVLAV

SEQ ID NO: 1697 - protein, 9 aa, Homo sapiens
  Table A; Target 1697; HLA-C*02:02; ABCB5; ENSG00000004846; TAA
LSIAPVLAV

SEQ ID NO: 1698 - protein, 9 aa, Homo sapiens
  Table A; Target 1698; HLA-C*03:03; ABCB5; ENSG00000004846; TAA
LSIAPVLAV

SEQ ID NO: 1699 - protein, 9 aa, Homo sapiens
  Table A; Target 1699; HLA-C*03:04; ABCB5; ENSG00000004846; TAA
LSIAPVLAV

SEQ ID NO: 1700 - protein, 9 aa, Homo sapiens
  Table A; Target 1700; HLA-B*51:01; ABCB5; ENSG00000004846; TAA
LSIERGKTV

SEQ ID NO: 1701 - protein, 9 aa, Homo sapiens
  Table A; Target 1701; HLA-C*03:04; ABCB5; ENSG00000004846; TAA
LSIERGKTV

SEQ ID NO: 1702 - protein, 9 aa, Homo sapiens
  Table A; Target 1702; HLA-C*16:02; ABCB5; ENSG00000004846; TAA
LSIERGKTV

SEQ ID NO: 1703 - protein, 9 aa, Homo sapiens
  Table A; Target 1703; HLA-C*16:01; ABCB5; ENSG00000004846; TAA
LSTIRSADL

SEQ ID NO: 1704 - protein, 9 aa, Homo sapiens
  Table A; Target 1704; HLA-B*54:01; ABCB5; ENSG00000004846; TAA
LSTSPLIMA

SEQ ID NO: 1705 - protein, 10 aa, Homo sapiens
  Table A; Target 1705; HLA-A*68:02; ABCB5; ENSG00000004846; TAA
LTLYYVGIGV

SEQ ID NO: 1706 - protein, 9 aa, Homo sapiens
  Table A; Target 1706; HLA-A*01:01; ABCB5; ENSG00000004846; TAA
LTSKELSAY

SEQ ID NO: 1707 - protein, 9 aa, Homo sapiens
  Table A; Target 1707; HLA-A*25:01; ABCB5; ENSG00000004846; TAA
LTSKELSAY

SEQ ID NO: 1708 - protein, 9 aa, Homo sapiens
  Table A; Target 1708; HLA-A*26:01; ABCB5; ENSG00000004846; TAA
LTSKELSAY

SEQ ID NO: 1709 - protein, 9 aa, Homo sapiens
  Table A; Target 1709; HLA-A*29:02; ABCB5; ENSG00000004846; TAA
LTSKELSAY

SEQ ID NO: 1710 - protein, 9 aa, Homo sapiens
  Table A; Target 1710; HLA-A*30:02; ABCB5; ENSG00000004846; TAA
LTSKELSAY

SEQ ID NO: 1711 - protein, 9 aa, Homo sapiens
  Table A; Target 1711; HLA-A*32:01; ABCB5; ENSG00000004846; TAA
LTSKELSAY

SEQ ID NO: 1712 - protein, 9 aa, Homo sapiens
  Table A; Target 1712; HLA-B*15:01; ABCB5; ENSG00000004846; TAA
LTSKELSAY

SEQ ID NO: 1713 - protein, 9 aa, Homo sapiens
  Table A; Target 1713; HLA-B*46:01; ABCB5; ENSG00000004846; TAA
LTSKELSAY

SEQ ID NO: 1714 - protein, 9 aa, Homo sapiens
  Table A; Target 1714; HLA-B*58:01; ABCB5; ENSG00000004846; TAA
LTSKELSAY

SEQ ID NO: 1715 - protein, 9 aa, Homo sapiens
  Table A; Target 1715; HLA-C*02:02; ABCB5; ENSG00000004846; TAA
LTSKELSAY

SEQ ID NO: 1716 - protein, 9 aa, Homo sapiens
  Table A; Target 1716; HLA-C*07:01; ABCB5; ENSG00000004846; TAA
LTSKELSAY

SEQ ID NO: 1717 - protein, 9 aa, Homo sapiens
  Table A; Target 1717; HLA-C*07:04; ABCB5; ENSG00000004846; TAA
LTSKELSAY

SEQ ID NO: 1718 - protein, 9 aa, Homo sapiens
  Table A; Target 1718; HLA-C*16:01; ABCB5; ENSG00000004846; TAA
LTSKELSAY

SEQ ID NO: 1719 - protein, 9 aa, Homo sapiens
  Table A; Target 1719; HLA-C*16:02; ABCB5; ENSG00000004846; TAA
LTSKELSAY

SEQ ID NO: 1720 - protein, 11 aa, Homo sapiens
  Table A; Target 1720; HLA-A*03:02; ABCB5; ENSG00000004846; TAA
LTSKELSAYSK

SEQ ID NO: 1721 - protein, 11 aa, Homo sapiens
  Table A; Target 1721; HLA-A*11:01; ABCB5; ENSG00000004846; TAA
LTSKELSAYSK

SEQ ID NO: 1722 - protein, 9 aa, Homo sapiens
  Table A; Target 1722; HLA-A*26:01; ABCB5; ENSG00000004846; TAA
LVGEKGAQM

SEQ ID NO: 1723 - protein, 9 aa, Homo sapiens
  Table A; Target 1723; HLA-B*08:01; ABCB5; ENSG00000004846; TAA
LVGEKGAQM

SEQ ID NO: 1724 - protein, 9 aa, Homo sapiens
  Table A; Target 1724; HLA-B*46:01; ABCB5; ENSG00000004846; TAA
LVGEKGAQM

SEQ ID NO: 1725 - protein, 9 aa, Homo sapiens
  Table A; Target 1725; HLA-C*05:01; ABCB5; ENSG00000004846; TAA
LVGEKGAQM

SEQ ID NO: 1726 - protein, 9 aa, Homo sapiens
  Table A; Target 1726; HLA-C*07:04; ABCB5; ENSG00000004846; TAA
LVGEKGAQM

SEQ ID NO: 1727 - protein, 9 aa, Homo sapiens
  Table A; Target 1727; HLA-C*14:02; ABCB5; ENSG00000004846; TAA
LVGEKGAQM

SEQ ID NO: 1728 - protein, 9 aa, Homo sapiens
  Table A; Target 1728; HLA-A*03:02; ABCB5; ENSG00000004846; TAA
LVGLNGSGK

SEQ ID NO: 1729 - protein, 9 aa, Homo sapiens
  Table A; Target 1729; HLA-A*11:01; ABCB5; ENSG00000004846; TAA
LVLAPEYSK

SEQ ID NO: 1730 - protein, 9 aa, Homo sapiens
  Table A; Target 1730; HLA-A*03:01; ABCB5; ENSG00000004846; TAA
LVMSQDIKK

SEQ ID NO: 1731 - protein, 9 aa, Homo sapiens
  Table A; Target 1731; HLA-A*03:02; ABCB5; ENSG00000004846; TAA
LVMSQDIKK

SEQ ID NO: 1732 - protein, 9 aa, Homo sapiens
  Table A; Target 1732; HLA-A*11:01; ABCB5; ENSG00000004846; TAA
LVMSQDIKK

SEQ ID NO: 1733 - protein, 9 aa, Homo sapiens
  Table A; Target 1733; HLA-A*01:01; ABCB5; ENSG00000004846; TAA
LVQTNTTNY

SEQ ID NO: 1734 - protein, 9 aa, Homo sapiens
  Table A; Target 1734; HLA-A*25:01; ABCB5; ENSG00000004846; TAA
LVQTNTTNY

SEQ ID NO: 1735 - protein, 9 aa, Homo sapiens
  Table A; Target 1735; HLA-A*26:01; ABCB5; ENSG00000004846; TAA
LVQTNTTNY

SEQ ID NO: 1736 - protein, 9 aa, Homo sapiens
  Table A; Target 1736; HLA-A*29:02; ABCB5; ENSG00000004846; TAA
LVQTNTTNY

SEQ ID NO: 1737 - protein, 9 aa, Homo sapiens
  Table A; Target 1737; HLA-A*30:02; ABCB5; ENSG00000004846; TAA
LVQTNTTNY

SEQ ID NO: 1738 - protein, 9 aa, Homo sapiens
  Table A; Target 1738; HLA-A*32:01; ABCB5; ENSG00000004846; TAA
LVQTNTTNY

SEQ ID NO: 1739 - protein, 9 aa, Homo sapiens
  Table A; Target 1739; HLA-B*15:01; ABCB5; ENSG00000004846; TAA
LVQTNTTNY

SEQ ID NO: 1740 - protein, 9 aa, Homo sapiens
  Table A; Target 1740; HLA-B*15:03; ABCB5; ENSG00000004846; TAA
LVQTNTTNY

SEQ ID NO: 1741 - protein, 9 aa, Homo sapiens
  Table A; Target 1741; HLA-B*46:01; ABCB5; ENSG00000004846; TAA
LVQTNTTNY

SEQ ID NO: 1742 - protein, 9 aa, Homo sapiens
  Table A; Target 1742; HLA-B*58:01; ABCB5; ENSG00000004846; TAA
LVQTNTTNY

SEQ ID NO: 1743 - protein, 9 aa, Homo sapiens
  Table A; Target 1743; HLA-C*01:02; ABCB5; ENSG00000004846; TAA
LVQTNTTNY

SEQ ID NO: 1744 - protein, 9 aa, Homo sapiens
  Table A; Target 1744; HLA-C*02:02; ABCB5; ENSG00000004846; TAA
LVQTNTTNY

SEQ ID NO: 1745 - protein, 9 aa, Homo sapiens
  Table A; Target 1745; HLA-C*03:03; ABCB5; ENSG00000004846; TAA
LVQTNTTNY

SEQ ID NO: 1746 - protein, 9 aa, Homo sapiens
  Table A; Target 1746; HLA-C*07:04; ABCB5; ENSG00000004846; TAA
LVQTNTTNY

SEQ ID NO: 1747 - protein, 9 aa, Homo sapiens
  Table A; Target 1747; HLA-C*14:02; ABCB5; ENSG00000004846; TAA
LVQTNTTNY

SEQ ID NO: 1748 - protein, 9 aa, Homo sapiens
  Table A; Target 1748; HLA-C*16:01; ABCB5; ENSG00000004846; TAA
LVQTNTTNY

SEQ ID NO: 1749 - protein, 9 aa, Homo sapiens
  Table A; Target 1749; HLA-C*16:02; ABCB5; ENSG00000004846; TAA
LVQTNTTNY

SEQ ID NO: 1750 - protein, 9 aa, Homo sapiens
  Table A; Target 1750; HLA-C*03:03; ABCB5; ENSG00000004846; TAA
LVTLSTSPL

SEQ ID NO: 1751 - protein, 9 aa, Homo sapiens
  Table A; Target 1751; HLA-C*03:04; ABCB5; ENSG00000004846; TAA
LVTLSTSPL

SEQ ID NO: 1752 - protein, 8 aa, Homo sapiens
  Table A; Target 1752; HLA-C*04:01; ABCB5; ENSG00000004846; TAA
LYDPDDGF

SEQ ID NO: 1753 - protein, 8 aa, Homo sapiens
  Table A; Target 1753; HLA-C*05:01; ABCB5; ENSG00000004846; TAA
LYDPDDGF

SEQ ID NO: 1754 - protein, 10 aa, Homo sapiens
  Table A; Target 1754; HLA-B*35:03; ABCB5; ENSG00000004846; TAA
LYDPDDGFIM

SEQ ID NO: 1755 - protein, 9 aa, Homo sapiens
  Table A; Target 1755; HLA-A*01:01; ABCB5; ENSG00000004846; TAA
LYDPVQGQV

SEQ ID NO: 1756 - protein, 9 aa, Homo sapiens
  Table A; Target 1756; HLA-A*02:07; ABCB5; ENSG00000004846; TAA
LYDPVQGQV

SEQ ID NO: 1757 - protein, 9 aa, Homo sapiens
  Table A; Target 1757; HLA-A*23:01; ABCB5; ENSG00000004846; TAA
LYDPVQGQV

SEQ ID NO: 1758 - protein, 9 aa, Homo sapiens
  Table A; Target 1758; HLA-A*24:02; ABCB5; ENSG00000004846; TAA
LYDPVQGQV

SEQ ID NO: 1759 - protein, 9 aa, Homo sapiens
  Table A; Target 1759; HLA-B*35:03; ABCB5; ENSG00000004846; TAA
LYDPVQGQV

SEQ ID NO: 1760 - protein, 9 aa, Homo sapiens
  Table A; Target 1760; HLA-C*04:01; ABCB5; ENSG00000004846; TAA
LYDPVQGQV

SEQ ID NO: 1761 - protein, 9 aa, Homo sapiens
  Table A; Target 1761; HLA-C*05:01; ABCB5; ENSG00000004846; TAA
LYDPVQGQV

SEQ ID NO: 1762 - protein, 10 aa, Homo sapiens
  Table A; Target 1762; HLA-A*02:07; ABCB5; ENSG00000004846; TAA
LYDPVQGQVL

SEQ ID NO: 1763 - protein, 10 aa, Homo sapiens
  Table A; Target 1763; HLA-A*23:01; ABCB5; ENSG00000004846; TAA
LYDPVQGQVL

SEQ ID NO: 1764 - protein, 10 aa, Homo sapiens
  Table A; Target 1764; HLA-A*24:02; ABCB5; ENSG00000004846; TAA
LYDPVQGQVL

SEQ ID NO: 1765 - protein, 10 aa, Homo sapiens
  Table A; Target 1765; HLA-A*32:01; ABCB5; ENSG00000004846; TAA
LYDPVQGQVL

SEQ ID NO: 1766 - protein, 10 aa, Homo sapiens
  Table A; Target 1766; HLA-B*35:01; ABCB5; ENSG00000004846; TAA
LYDPVQGQVL

SEQ ID NO: 1767 - protein, 10 aa, Homo sapiens
  Table A; Target 1767; HLA-B*35:03; ABCB5; ENSG00000004846; TAA
LYDPVQGQVL

SEQ ID NO: 1768 - protein, 10 aa, Homo sapiens
  Table A; Target 1768; HLA-B*38:01; ABCB5; ENSG00000004846; TAA
LYDPVQGQVL

SEQ ID NO: 1769 - protein, 10 aa, Homo sapiens
  Table A; Target 1769; HLA-B*39:01; ABCB5; ENSG00000004846; TAA
LYDPVQGQVL

SEQ ID NO: 1770 - protein, 10 aa, Homo sapiens
  Table A; Target 1770; HLA-B*40:01; ABCB5; ENSG00000004846; TAA
LYDPVQGQVL

SEQ ID NO: 1771 - protein, 10 aa, Homo sapiens
  Table A; Target 1771; HLA-C*03:03; ABCB5; ENSG00000004846; TAA
LYDPVQGQVL

SEQ ID NO: 1772 - protein, 10 aa, Homo sapiens
  Table A; Target 1772; HLA-C*03:04; ABCB5; ENSG00000004846; TAA
LYDPVQGQVL

SEQ ID NO: 1773 - protein, 10 aa, Homo sapiens
  Table A; Target 1773; HLA-C*04:01; ABCB5; ENSG00000004846; TAA
LYDPVQGQVL

SEQ ID NO: 1774 - protein, 10 aa, Homo sapiens
  Table A; Target 1774; HLA-C*05:01; ABCB5; ENSG00000004846; TAA
LYDPVQGQVL

SEQ ID NO: 1775 - protein, 10 aa, Homo sapiens
  Table A; Target 1775; HLA-C*07:04; ABCB5; ENSG00000004846; TAA
LYDPVQGQVL

SEQ ID NO: 1776 - protein, 10 aa, Homo sapiens
  Table A; Target 1776; HLA-C*14:02; ABCB5; ENSG00000004846; TAA
LYDPVQGQVL

SEQ ID NO: 1777 - protein, 11 aa, Homo sapiens
  Table A; Target 1777; HLA-A*23:01; ABCB5; ENSG00000004846; TAA
LYDPVQGQVLF

SEQ ID NO: 1778 - protein, 11 aa, Homo sapiens
  Table A; Target 1778; HLA-A*24:02; ABCB5; ENSG00000004846; TAA
LYDPVQGQVLF

SEQ ID NO: 1779 - protein, 11 aa, Homo sapiens
  Table A; Target 1779; HLA-A*29:02; ABCB5; ENSG00000004846; TAA
LYDPVQGQVLF

SEQ ID NO: 1780 - protein, 11 aa, Homo sapiens
  Table A; Target 1780; HLA-B*38:01; ABCB5; ENSG00000004846; TAA
LYDPVQGQVLF

SEQ ID NO: 1781 - protein, 11 aa, Homo sapiens
  Table A; Target 1781; HLA-C*04:01; ABCB5; ENSG00000004846; TAA
LYDPVQGQVLF

SEQ ID NO: 1782 - protein, 8 aa, Homo sapiens
  Table A; Target 1782; HLA-C*14:02; ABCB5; ENSG00000004846; TAA
LYYVGIGV

SEQ ID NO: 1783 - protein, 9 aa, Homo sapiens
  Table A; Target 1783; HLA-C*14:02; ABCB5; ENSG00000004846; TAA
LYYVGIGVA

SEQ ID NO: 1784 - protein, 10 aa, Homo sapiens
  Table A; Target 1784; HLA-B*54:01; ABCB5; ENSG00000004846; TAA
LYYVGIGVAA

SEQ ID NO: 1785 - protein, 10 aa, Homo sapiens
  Table A; Target 1785; HLA-C*14:02; ABCB5; ENSG00000004846; TAA
LYYVGIGVAA

SEQ ID NO: 1786 - protein, 9 aa, Homo sapiens
  Table A; Target 1786; HLA-A*23:01; ABCB5; ENSG00000004846; TAA
MAIGETLVL

SEQ ID NO: 1787 - protein, 9 aa, Homo sapiens
  Table A; Target 1787; HLA-A*25:01; ABCB5; ENSG00000004846; TAA
MAIGETLVL

SEQ ID NO: 1788 - protein, 9 aa, Homo sapiens
  Table A; Target 1788; HLA-A*30:01; ABCB5; ENSG00000004846; TAA
MAIGETLVL

SEQ ID NO: 1789 - protein, 9 aa, Homo sapiens
  Table A; Target 1789; HLA-B*15:01; ABCB5; ENSG00000004846; TAA
MAIGETLVL

SEQ ID NO: 1790 - protein, 9 aa, Homo sapiens
  Table A; Target 1790; HLA-B*35:01; ABCB5; ENSG00000004846; TAA
MAIGETLVL

SEQ ID NO: 1791 - protein, 9 aa, Homo sapiens
  Table A; Target 1791; HLA-B*35:03; ABCB5; ENSG00000004846; TAA
MAIGETLVL

SEQ ID NO: 1792 - protein, 9 aa, Homo sapiens
  Table A; Target 1792; HLA-B*38:01; ABCB5; ENSG00000004846; TAA
MAIGETLVL

SEQ ID NO: 1793 - protein, 9 aa, Homo sapiens
  Table A; Target 1793; HLA-B*39:01; ABCB5; ENSG00000004846; TAA
MAIGETLVL

SEQ ID NO: 1794 - protein, 9 aa, Homo sapiens
  Table A; Target 1794; HLA-B*40:01; ABCB5; ENSG00000004846; TAA
MAIGETLVL

SEQ ID NO: 1795 - protein, 9 aa, Homo sapiens
  Table A; Target 1795; HLA-B*46:01; ABCB5; ENSG00000004846; TAA
MAIGETLVL

SEQ ID NO: 1796 - protein, 9 aa, Homo sapiens
  Table A; Target 1796; HLA-B*51:01; ABCB5; ENSG00000004846; TAA
MAIGETLVL

SEQ ID NO: 1797 - protein, 9 aa, Homo sapiens
  Table A; Target 1797; HLA-B*54:01; ABCB5; ENSG00000004846; TAA
MAIGETLVL

SEQ ID NO: 1798 - protein, 9 aa, Homo sapiens
  Table A; Target 1798; HLA-B*55:01; ABCB5; ENSG00000004846; TAA
MAIGETLVL

SEQ ID NO: 1799 - protein, 9 aa, Homo sapiens
  Table A; Target 1799; HLA-B*58:01; ABCB5; ENSG00000004846; TAA
MAIGETLVL

SEQ ID NO: 1800 - protein, 9 aa, Homo sapiens
  Table A; Target 1800; HLA-C*02:02; ABCB5; ENSG00000004846; TAA
MAIGETLVL

SEQ ID NO: 1801 - protein, 9 aa, Homo sapiens
  Table A; Target 1801; HLA-C*03:03; ABCB5; ENSG00000004846; TAA
MAIGETLVL

SEQ ID NO: 1802 - protein, 9 aa, Homo sapiens
  Table A; Target 1802; HLA-C*03:04; ABCB5; ENSG00000004846; TAA
MAIGETLVL

SEQ ID NO: 1803 - protein, 9 aa, Homo sapiens
  Table A; Target 1803; HLA-C*05:01; ABCB5; ENSG00000004846; TAA
MAIGETLVL

SEQ ID NO: 1804 - protein, 9 aa, Homo sapiens
  Table A; Target 1804; HLA-C*07:04; ABCB5; ENSG00000004846; TAA
MAIGETLVL

SEQ ID NO: 1805 - protein, 9 aa, Homo sapiens
  Table A; Target 1805; HLA-C*07:06; ABCB5; ENSG00000004846; TAA
MAIGETLVL

SEQ ID NO: 1806 - protein, 9 aa, Homo sapiens
  Table A; Target 1806; HLA-C*12:03; ABCB5; ENSG00000004846; TAA
MAIGETLVL

SEQ ID NO: 1807 - protein, 9 aa, Homo sapiens
  Table A; Target 1807; HLA-C*14:02; ABCB5; ENSG00000004846; TAA
MAIGETLVL

SEQ ID NO: 1808 - protein, 9 aa, Homo sapiens
  Table A; Target 1808; HLA-C*16:04; ABCB5; ENSG00000004846; TAA
MAIGETLVL

SEQ ID NO: 1809 - protein, 10 aa, Homo sapiens
  Table A; Target 1809; HLA-B*54:01; ABCB5; ENSG00000004846; TAA
MAIGETLVLA

SEQ ID NO: 1810 - protein, 10 aa, Homo sapiens
  Table A; Target 1810; HLA-B*56:01; ABCB5; ENSG00000004846; TAA
MAIGETLVLA

SEQ ID NO: 1811 - protein, 9 aa, Homo sapiens
  Table A; Target 1811; HLA-A*33:03; ABCB5; ENSG00000004846; TAA
MASAAACSR

SEQ ID NO: 1812 - protein, 9 aa, Homo sapiens
  Table A; Target 1812; HLA-A*68:01; ABCB5; ENSG00000004846; TAA
MASAAACSR

SEQ ID NO: 1813 - protein, 9 aa, Homo sapiens
  Table A; Target 1813; HLA-C*07:06; ABCB5; ENSG00000004846; TAA
MASAAACSR

SEQ ID NO: 1814 - protein, 10 aa, Homo sapiens
  Table A; Target 1814; HLA-A*25:01; ABCB5; ENSG00000004846; TAA
MEFPNKFNTL

SEQ ID NO: 1815 - protein, 10 aa, Homo sapiens
  Table A; Target 1815; HLA-A*30:01; ABCB5; ENSG00000004846; TAA
MEFPNKFNTL

SEQ ID NO: 1816 - protein, 10 aa, Homo sapiens
  Table A; Target 1816; HLA-A*68:02; ABCB5; ENSG00000004846; TAA
MEFPNKFNTL

SEQ ID NO: 1817 - protein, 10 aa, Homo sapiens
  Table A; Target 1817; HLA-B*18:01; ABCB5; ENSG00000004846; TAA
MEFPNKFNTL

SEQ ID NO: 1818 - protein, 10 aa, Homo sapiens
  Table A; Target 1818; HLA-B*37:01; ABCB5; ENSG00000004846; TAA
MEFPNKFNTL

SEQ ID NO: 1819 - protein, 10 aa, Homo sapiens
  Table A; Target 1819; HLA-B*40:01; ABCB5; ENSG00000004846; TAA
MEFPNKFNTL

SEQ ID NO: 1820 - protein, 10 aa, Homo sapiens
  Table A; Target 1820; HLA-B*40:02; ABCB5; ENSG00000004846; TAA
MEFPNKFNTL

SEQ ID NO: 1821 - protein, 10 aa, Homo sapiens
  Table A; Target 1821; HLA-B*44:02; ABCB5; ENSG00000004846; TAA
MEFPNKFNTL

SEQ ID NO: 1822 - protein, 10 aa, Homo sapiens
  Table A; Target 1822; HLA-B*44:03; ABCB5; ENSG00000004846; TAA
MEFPNKFNTL

SEQ ID NO: 1823 - protein, 10 aa, Homo sapiens
  Table A; Target 1823; HLA-B*49:01; ABCB5; ENSG00000004846; TAA
MEFPNKFNTL

SEQ ID NO: 1824 - protein, 10 aa, Homo sapiens
  Table A; Target 1824; HLA-C*02:02; ABCB5; ENSG00000004846; TAA
MEFPNKFNTL

SEQ ID NO: 1825 - protein, 10 aa, Homo sapiens
  Table A; Target 1825; HLA-C*16:04; ABCB5; ENSG00000004846; TAA
MEFPNKFNTL

SEQ ID NO: 1826 - protein, 11 aa, Homo sapiens
  Table A; Target 1826; HLA-B*49:01; ABCB5; ENSG00000004846; TAA
MEFPNKFNTLV

SEQ ID NO: 1827 - protein, 10 aa, Homo sapiens
  Table A; Target 1827; HLA-B*40:01; ABCB5; ENSG00000004846; TAA
MENSERAEEM

SEQ ID NO: 1828 - protein, 8 aa, Homo sapiens
  Table A; Target 1828; HLA-B*18:01; ABCB5; ENSG00000004846; TAA
MESMTYST

SEQ ID NO: 1829 - protein, 8 aa, Homo sapiens
  Table A; Target 1829; HLA-B*37:01; ABCB5; ENSG00000004846; TAA
MESMTYST

SEQ ID NO: 1830 - protein, 8 aa, Homo sapiens
  Table A; Target 1830; HLA-C*07:04; ABCB5; ENSG00000004846; TAA
MESMTYST

SEQ ID NO: 1831 - protein, 10 aa, Homo sapiens
  Table A; Target 1831; HLA-A*29:02; ABCB5; ENSG00000004846; TAA
MFIVFTAIAY

SEQ ID NO: 1832 - protein, 10 aa, Homo sapiens
  Table A; Target 1832; HLA-A*25:01; ABCB5; ENSG00000004846; TAA
MIETAAMTGF

SEQ ID NO: 1833 - protein, 10 aa, Homo sapiens
  Table A; Target 1833; HLA-A*26:01; ABCB5; ENSG00000004846; TAA
MIETAAMTGF

SEQ ID NO: 1834 - protein, 9 aa, Homo sapiens
  Table A; Target 1834; HLA-A*02:01; ABCB5; ENSG00000004846; TAA
MILGILASL

SEQ ID NO: 1835 - protein, 9 aa, Homo sapiens
  Table A; Target 1835; HLA-A*02:04; ABCB5; ENSG00000004846; TAA
MILGILASL

SEQ ID NO: 1836 - protein, 9 aa, Homo sapiens
  Table A; Target 1836; HLA-A*02:07; ABCB5; ENSG00000004846; TAA
MILGILASL

SEQ ID NO: 1837 - protein, 9 aa, Homo sapiens
  Table A; Target 1837; HLA-A*23:01; ABCB5; ENSG00000004846; TAA
MILGILASL

SEQ ID NO: 1838 - protein, 9 aa, Homo sapiens
  Table A; Target 1838; HLA-A*02:03; ABCB5; ENSG00000004846; TAA
MLAEKGAHA

SEQ ID NO: 1839 - protein, 11 aa, Homo sapiens
  Table A; Target 1839; HLA-A*02:01; ABCB5; ENSG00000004846; TAA
MLAEKGAHAEL

SEQ ID NO: 1840 - protein, 11 aa, Homo sapiens
  Table A; Target 1840; HLA-A*02:03; ABCB5; ENSG00000004846; TAA
MLAEKGAHAEL

SEQ ID NO: 1841 - protein, 11 aa, Homo sapiens
  Table A; Target 1841; HLA-A*02:04; ABCB5; ENSG00000004846; TAA
MLAEKGAHAEL

SEQ ID NO: 1842 - protein, 8 aa, Homo sapiens
  Table A; Target 1842; HLA-B*08:01; ABCB5; ENSG00000004846; TAA
MPLVLGEM

SEQ ID NO: 1843 - protein, 8 aa, Homo sapiens
  Table A; Target 1843; HLA-B*35:01; ABCB5; ENSG00000004846; TAA
MPLVLGEM

SEQ ID NO: 1844 - protein, 8 aa, Homo sapiens
  Table A; Target 1844; HLA-B*35:03; ABCB5; ENSG00000004846; TAA
MPLVLGEM

SEQ ID NO: 1845 - protein, 8 aa, Homo sapiens
  Table A; Target 1845; HLA-B*51:01; ABCB5; ENSG00000004846; TAA
MPLVLGEM

SEQ ID NO: 1846 - protein, 8 aa, Homo sapiens
  Table A; Target 1846; HLA-B*54:01; ABCB5; ENSG00000004846; TAA
MPLVLGEM

SEQ ID NO: 1847 - protein, 8 aa, Homo sapiens
  Table A; Target 1847; HLA-B*55:01; ABCB5; ENSG00000004846; TAA
MPLVLGEM

SEQ ID NO: 1848 - protein, 8 aa, Homo sapiens
  Table A; Target 1848; HLA-B*56:01; ABCB5; ENSG00000004846; TAA
MPLVLGEM

SEQ ID NO: 1849 - protein, 11 aa, Homo sapiens
  Table A; Target 1849; HLA-A*01:01; ABCB5; ENSG00000004846; TAA
MSDNLISGCLV

SEQ ID NO: 1850 - protein, 8 aa, Homo sapiens
  Table A; Target 1850; HLA-C*07:04; ABCB5; ENSG00000004846; TAA
MSTFSIGL

SEQ ID NO: 1851 - protein, 10 aa, Homo sapiens
  Table A; Target 1851; HLA-A*68:02; ABCB5; ENSG00000004846; TAA
MSTFSIGLAV

SEQ ID NO: 1852 - protein, 8 aa, Homo sapiens
  Table A; Target 1852; HLA-A*01:01; ABCB5; ENSG00000004846; TAA
MTDDIDKI

SEQ ID NO: 1853 - protein, 8 aa, Homo sapiens
  Table A; Target 1853; HLA-B*38:01; ABCB5; ENSG00000004846; TAA
MTDDIDKI

SEQ ID NO: 1854 - protein, 8 aa, Homo sapiens
  Table A; Target 1854; HLA-C*05:01; ABCB5; ENSG00000004846; TAA
MTDDIDKI

SEQ ID NO: 1855 - protein, 8 aa, Homo sapiens
  Table A; Target 1855; HLA-A*01:01; ABCB5; ENSG00000004846; TAA
MTLLTLYY

SEQ ID NO: 1856 - protein, 8 aa, Homo sapiens
  Table A; Target 1856; HLA-A*29:02; ABCB5; ENSG00000004846; TAA
MTLLTLYY

SEQ ID NO: 1857 - protein, 8 aa, Homo sapiens
  Table A; Target 1857; HLA-C*07:01; ABCB5; ENSG00000004846; TAA
MTLLTLYY

SEQ ID NO: 1858 - protein, 8 aa, Homo sapiens
  Table A; Target 1858; HLA-B*51:01; ABCB5; ENSG00000004846; TAA
MTPEGMFI

SEQ ID NO: 1859 - protein, 9 aa, Homo sapiens
  Table A; Target 1859; HLA-A*02:07; ABCB5; ENSG00000004846; TAA
MTPEGMFIV

SEQ ID NO: 1860 - protein, 10 aa, Homo sapiens
  Table A; Target 1860; HLA-A*02:07; ABCB5; ENSG00000004846; TAA
MTPEGMFIVF

SEQ ID NO: 1861 - protein, 10 aa, Homo sapiens
  Table A; Target 1861; HLA-A*24:02; ABCB5; ENSG00000004846; TAA
MTPEGMFIVF

SEQ ID NO: 1862 - protein, 10 aa, Homo sapiens
  Table A; Target 1862; HLA-A*25:01; ABCB5; ENSG00000004846; TAA
MTPEGMFIVF

SEQ ID NO: 1863 - protein, 10 aa, Homo sapiens
  Table A; Target 1863; HLA-A*68:02; ABCB5; ENSG00000004846; TAA
MTPEGMFIVF

SEQ ID NO: 1864 - protein, 10 aa, Homo sapiens
  Table A; Target 1864; HLA-A*02:07; ABCB5; ENSG00000004846; TAA
MVDENDIRAL

SEQ ID NO: 1865 - protein, 10 aa, Homo sapiens
  Table A; Target 1865; HLA-A*25:01; ABCB5; ENSG00000004846; TAA
MVDENDIRAL

SEQ ID NO: 1866 - protein, 10 aa, Homo sapiens
  Table A; Target 1866; HLA-B*07:02; ABCB5; ENSG00000004846; TAA
MVDENDIRAL

SEQ ID NO: 1867 - protein, 10 aa, Homo sapiens
  Table A; Target 1867; HLA-B*35:01; ABCB5; ENSG00000004846; TAA
MVDENDIRAL

SEQ ID NO: 1868 - protein, 10 aa, Homo sapiens
  Table A; Target 1868; HLA-B*35:03; ABCB5; ENSG00000004846; TAA
MVDENDIRAL

SEQ ID NO: 1869 - protein, 10 aa, Homo sapiens
  Table A; Target 1869; HLA-B*38:01; ABCB5; ENSG00000004846; TAA
MVDENDIRAL

SEQ ID NO: 1870 - protein, 10 aa, Homo sapiens
  Table A; Target 1870; HLA-B*39:01; ABCB5; ENSG00000004846; TAA
MVDENDIRAL

SEQ ID NO: 1871 - protein, 10 aa, Homo sapiens
  Table A; Target 1871; HLA-B*40:01; ABCB5; ENSG00000004846; TAA
MVDENDIRAL

SEQ ID NO: 1872 - protein, 10 aa, Homo sapiens
  Table A; Target 1872; HLA-B*55:01; ABCB5; ENSG00000004846; TAA
MVDENDIRAL

SEQ ID NO: 1873 - protein, 10 aa, Homo sapiens
  Table A; Target 1873; HLA-C*01:02; ABCB5; ENSG00000004846; TAA
MVDENDIRAL

SEQ ID NO: 1874 - protein, 10 aa, Homo sapiens
  Table A; Target 1874; HLA-C*03:03; ABCB5; ENSG00000004846; TAA
MVDENDIRAL

SEQ ID NO: 1875 - protein, 10 aa, Homo sapiens
  Table A; Target 1875; HLA-C*03:04; ABCB5; ENSG00000004846; TAA
MVDENDIRAL

SEQ ID NO: 1876 - protein, 10 aa, Homo sapiens
  Table A; Target 1876; HLA-C*05:01; ABCB5; ENSG00000004846; TAA
MVDENDIRAL

SEQ ID NO: 1877 - protein, 8 aa, Homo sapiens
  Table A; Target 1877; HLA-A*11:01; ABCB5; ENSG00000004846; TAA
MVISLTSK

SEQ ID NO: 1878 - protein, 10 aa, Homo sapiens
  Table A; Target 1878; HLA-A*25:01; ABCB5; ENSG00000004846; TAA
MVISLTSKEL

SEQ ID NO: 1879 - protein, 10 aa, Homo sapiens
  Table A; Target 1879; HLA-A*26:01; ABCB5; ENSG00000004846; TAA
MVISLTSKEL

SEQ ID NO: 1880 - protein, 10 aa, Homo sapiens
  Table A; Target 1880; HLA-B*35:03; ABCB5; ENSG00000004846; TAA
MVISLTSKEL

SEQ ID NO: 1881 - protein, 10 aa, Homo sapiens
  Table A; Target 1881; HLA-C*03:03; ABCB5; ENSG00000004846; TAA
MVISLTSKEL

SEQ ID NO: 1882 - protein, 10 aa, Homo sapiens
  Table A; Target 1882; HLA-C*03:04; ABCB5; ENSG00000004846; TAA
MVISLTSKEL

SEQ ID NO: 1883 - protein, 10 aa, Homo sapiens
  Table A; Target 1883; HLA-C*07:06; ABCB5; ENSG00000004846; TAA
MVISLTSKEL

SEQ ID NO: 1884 - protein, 11 aa, Homo sapiens
  Table A; Target 1884; HLA-A*33:03; ABCB5; ENSG00000004846; TAA
MYEEMLQTQHR

SEQ ID NO: 1885 - protein, 8 aa, Homo sapiens
  Table A; Target 1885; HLA-A*25:01; ABCB5; ENSG00000004846; TAA
NAANIHSF

SEQ ID NO: 1886 - protein, 8 aa, Homo sapiens
  Table A; Target 1886; HLA-A*32:01; ABCB5; ENSG00000004846; TAA
NAANIHSF

SEQ ID NO: 1887 - protein, 8 aa, Homo sapiens
  Table A; Target 1887; HLA-B*35:01; ABCB5; ENSG00000004846; TAA
NAANIHSF

SEQ ID NO: 1888 - protein, 8 aa, Homo sapiens
  Table A; Target 1888; HLA-B*46:01; ABCB5; ENSG00000004846; TAA
NAANIHSF

SEQ ID NO: 1889 - protein, 8 aa, Homo sapiens
  Table A; Target 1889; HLA-B*58:01; ABCB5; ENSG00000004846; TAA
NAANIHSF

SEQ ID NO: 1890 - protein, 8 aa, Homo sapiens
  Table A; Target 1890; HLA-C*02:02; ABCB5; ENSG00000004846; TAA
NAANIHSF

SEQ ID NO: 1891 - protein, 8 aa, Homo sapiens
  Table A; Target 1891; HLA-C*03:03; ABCB5; ENSG00000004846; TAA
NAANIHSF

SEQ ID NO: 1892 - protein, 8 aa, Homo sapiens
  Table A; Target 1892; HLA-C*03:04; ABCB5; ENSG00000004846; TAA
NAANIHSF

SEQ ID NO: 1893 - protein, 8 aa, Homo sapiens
  Table A; Target 1893; HLA-C*16:01; ABCB5; ENSG00000004846; TAA
NAANIHSF

SEQ ID NO: 1894 - protein, 8 aa, Homo sapiens
  Table A; Target 1894; HLA-C*16:02; ABCB5; ENSG00000004846; TAA
NAANIHSF

SEQ ID NO: 1895 - protein, 9 aa, Homo sapiens
  Table A; Target 1895; HLA-A*68:01; ABCB5; ENSG00000004846; TAA
NAANIHSFI

SEQ ID NO: 1896 - protein, 9 aa, Homo sapiens
  Table A; Target 1896; HLA-A*68:02; ABCB5; ENSG00000004846; TAA
NAANIHSFI

SEQ ID NO: 1897 - protein, 9 aa, Homo sapiens
  Table A; Target 1897; HLA-B*13:02; ABCB5; ENSG00000004846; TAA
NAANIHSFI

SEQ ID NO: 1898 - protein, 9 aa, Homo sapiens
  Table A; Target 1898; HLA-B*38:01; ABCB5; ENSG00000004846; TAA
NAANIHSFI

SEQ ID NO: 1899 - protein, 9 aa, Homo sapiens
  Table A; Target 1899; HLA-B*51:01; ABCB5; ENSG00000004846; TAA
NAANIHSFI

SEQ ID NO: 1900 - protein, 9 aa, Homo sapiens
  Table A; Target 1900; HLA-C*02:02; ABCB5; ENSG00000004846; TAA
NAANIHSFI

SEQ ID NO: 1901 - protein, 9 aa, Homo sapiens
  Table A; Target 1901; HLA-C*12:03; ABCB5; ENSG00000004846; TAA
NAANIHSFI

SEQ ID NO: 1902 - protein, 9 aa, Homo sapiens
  Table A; Target 1902; HLA-C*16:02; ABCB5; ENSG00000004846; TAA
NAANIHSFI

SEQ ID NO: 1903 - protein, 8 aa, Homo sapiens
  Table A; Target 1903; HLA-B*35:01; ABCB5; ENSG00000004846; TAA
NADLIVVL

SEQ ID NO: 1904 - protein, 8 aa, Homo sapiens
  Table A; Target 1904; HLA-B*35:03; ABCB5; ENSG00000004846; TAA
NADLIVVL

SEQ ID NO: 1905 - protein, 8 aa, Homo sapiens
  Table A; Target 1905; HLA-B*38:01; ABCB5; ENSG00000004846; TAA
NADLIVVL

SEQ ID NO: 1906 - protein, 8 aa, Homo sapiens
  Table A; Target 1906; HLA-B*55:01; ABCB5; ENSG00000004846; TAA
NADLIVVL

SEQ ID NO: 1907 - protein, 8 aa, Homo sapiens
  Table A; Target 1907; HLA-C*03:03; ABCB5; ENSG00000004846; TAA
NADLIVVL

SEQ ID NO: 1908 - protein, 8 aa, Homo sapiens
  Table A; Target 1908; HLA-C*03:04; ABCB5; ENSG00000004846; TAA
NADLIVVL

SEQ ID NO: 1909 - protein, 8 aa, Homo sapiens
  Table A; Target 1909; HLA-C*04:01; ABCB5; ENSG00000004846; TAA
NADLIVVL

SEQ ID NO: 1910 - protein, 8 aa, Homo sapiens
  Table A; Target 1910; HLA-C*05:01; ABCB5; ENSG00000004846; TAA
NADLIVVL

SEQ ID NO: 1911 - protein, 8 aa, Homo sapiens
  Table A; Target 1911; HLA-C*07:04; ABCB5; ENSG00000004846; TAA
NADLIVVL

SEQ ID NO: 1912 - protein, 8 aa, Homo sapiens
  Table A; Target 1912; HLA-C*12:03; ABCB5; ENSG00000004846; TAA
NADLIVVL

SEQ ID NO: 1913 - protein, 9 aa, Homo sapiens
  Table A; Target 1913; HLA-A*01:01; ABCB5; ENSG00000004846; TAA
NADLIVVLH

SEQ ID NO: 1914 - protein, 9 aa, Homo sapiens
  Table A; Target 1914; HLA-A*33:01; ABCB5; ENSG00000004846; TAA
NADLIVVLH

SEQ ID NO: 1915 - protein, 9 aa, Homo sapiens
  Table A; Target 1915; HLA-B*35:01; ABCB5; ENSG00000004846; TAA
NADLIVVLH

SEQ ID NO: 1916 - protein, 9 aa, Homo sapiens
  Table A; Target 1916; HLA-C*05:01; ABCB5; ENSG00000004846; TAA
NADLIVVLH

SEQ ID NO: 1917 - protein, 9 aa, Homo sapiens
  Table A; Target 1917; HLA-C*07:06; ABCB5; ENSG00000004846; TAA
NADLIVVLH

SEQ ID NO: 1918 - protein, 9 aa, Homo sapiens
  Table A; Target 1918; HLA-B*13:02; ABCB5; ENSG00000004846; TAA
NATNMGLSV

SEQ ID NO: 1919 - protein, 9 aa, Homo sapiens
  Table A; Target 1919; HLA-B*39:01; ABCB5; ENSG00000004846; TAA
NATNMGLSV

SEQ ID NO: 1920 - protein, 9 aa, Homo sapiens
  Table A; Target 1920; HLA-B*51:01; ABCB5; ENSG00000004846; TAA
NATNMGLSV

SEQ ID NO: 1921 - protein, 9 aa, Homo sapiens
  Table A; Target 1921; HLA-B*54:01; ABCB5; ENSG00000004846; TAA
NATNMGLSV

SEQ ID NO: 1922 - protein, 9 aa, Homo sapiens
  Table A; Target 1922; HLA-C*01:02; ABCB5; ENSG00000004846; TAA
NATNMGLSV

SEQ ID NO: 1923 - protein, 9 aa, Homo sapiens
  Table A; Target 1923; HLA-C*02:02; ABCB5; ENSG00000004846; TAA
NATNMGLSV

SEQ ID NO: 1924 - protein, 9 aa, Homo sapiens
  Table A; Target 1924; HLA-C*03:03; ABCB5; ENSG00000004846; TAA
NATNMGLSV

SEQ ID NO: 1925 - protein, 9 aa, Homo sapiens
  Table A; Target 1925; HLA-C*03:04; ABCB5; ENSG00000004846; TAA
NATNMGLSV

SEQ ID NO: 1926 - protein, 9 aa, Homo sapiens
  Table A; Target 1926; HLA-C*05:01; ABCB5; ENSG00000004846; TAA
NATNMGLSV

SEQ ID NO: 1927 - protein, 9 aa, Homo sapiens
  Table A; Target 1927; HLA-C*16:01; ABCB5; ENSG00000004846; TAA
NATNMGLSV

SEQ ID NO: 1928 - protein, 9 aa, Homo sapiens
  Table A; Target 1928; HLA-C*16:02; ABCB5; ENSG00000004846; TAA
NATNMGLSV

SEQ ID NO: 1929 - protein, 9 aa, Homo sapiens
  Table A; Target 1929; HLA-C*16:04; ABCB5; ENSG00000004846; TAA
NATNMGLSV

SEQ ID NO: 1930 - protein, 9 aa, Homo sapiens
  Table A; Target 1930; HLA-A*02:04; ABCB5; ENSG00000004846; TAA
NAYDFIMEF

SEQ ID NO: 1931 - protein, 9 aa, Homo sapiens
  Table A; Target 1931; HLA-A*02:07; ABCB5; ENSG00000004846; TAA
NAYDFIMEF

SEQ ID NO: 1932 - protein, 9 aa, Homo sapiens
  Table A; Target 1932; HLA-A*25:01; ABCB5; ENSG00000004846; TAA
NAYDFIMEF

SEQ ID NO: 1933 - protein, 9 aa, Homo sapiens
  Table A; Target 1933; HLA-A*26:01; ABCB5; ENSG00000004846; TAA
NAYDFIMEF

SEQ ID NO: 1934 - protein, 9 aa, Homo sapiens
  Table A; Target 1934; HLA-A*29:02; ABCB5; ENSG00000004846; TAA
NAYDFIMEF

SEQ ID NO: 1935 - protein, 9 aa, Homo sapiens
  Table A; Target 1935; HLA-A*33:01; ABCB5; ENSG00000004846; TAA
NAYDFIMEF

SEQ ID NO: 1936 - protein, 9 aa, Homo sapiens
  Table A; Target 1936; HLA-A*68:02; ABCB5; ENSG00000004846; TAA
NAYDFIMEF

SEQ ID NO: 1937 - protein, 9 aa, Homo sapiens
  Table A; Target 1937; HLA-B*18:01; ABCB5; ENSG00000004846; TAA
NAYDFIMEF

SEQ ID NO: 1938 - protein, 9 aa, Homo sapiens
  Table A; Target 1938; HLA-B*27:02; ABCB5; ENSG00000004846; TAA
NAYDFIMEF

SEQ ID NO: 1939 - protein, 9 aa, Homo sapiens
  Table A; Target 1939; HLA-B*35:01; ABCB5; ENSG00000004846; TAA
NAYDFIMEF

SEQ ID NO: 1940 - protein, 9 aa, Homo sapiens
  Table A; Target 1940; HLA-B*35:03; ABCB5; ENSG00000004846; TAA
NAYDFIMEF

SEQ ID NO: 1941 - protein, 9 aa, Homo sapiens
  Table A; Target 1941; HLA-B*46:01; ABCB5; ENSG00000004846; TAA
NAYDFIMEF

SEQ ID NO: 1942 - protein, 9 aa, Homo sapiens
  Table A; Target 1942; HLA-B*51:01; ABCB5; ENSG00000004846; TAA
NAYDFIMEF

SEQ ID NO: 1943 - protein, 9 aa, Homo sapiens
  Table A; Target 1943; HLA-B*54:01; ABCB5; ENSG00000004846; TAA
NAYDFIMEF

SEQ ID NO: 1944 - protein, 9 aa, Homo sapiens
  Table A; Target 1944; HLA-B*57:01; ABCB5; ENSG00000004846; TAA
NAYDFIMEF

SEQ ID NO: 1945 - protein, 9 aa, Homo sapiens
  Table A; Target 1945; HLA-C*02:02; ABCB5; ENSG00000004846; TAA
NAYDFIMEF

SEQ ID NO: 1946 - protein, 9 aa, Homo sapiens
  Table A; Target 1946; HLA-C*03:03; ABCB5; ENSG00000004846; TAA
NAYDFIMEF

SEQ ID NO: 1947 - protein, 9 aa, Homo sapiens
  Table A; Target 1947; HLA-C*07:06; ABCB5; ENSG00000004846; TAA
NAYDFIMEF

SEQ ID NO: 1948 - protein, 9 aa, Homo sapiens
  Table A; Target 1948; HLA-C*12:03; ABCB5; ENSG00000004846; TAA
NAYDFIMEF

SEQ ID NO: 1949 - protein, 9 aa, Homo sapiens
  Table A; Target 1949; HLA-C*16:04; ABCB5; ENSG00000004846; TAA
NAYDFIMEF

SEQ ID NO: 1950 - protein, 10 aa, Homo sapiens
  Table A; Target 1950; HLA-C*03:03; ABCB5; ENSG00000004846; TAA
NCSIAENIAY

SEQ ID NO: 1951 - protein, 10 aa, Homo sapiens
  Table A; Target 1951; HLA-C*07:01; ABCB5; ENSG00000004846; TAA
NCSIAENIAY

SEQ ID NO: 1952 - protein, 8 aa, Homo sapiens
  Table A; Target 1952; HLA-B*37:01; ABCB5; ENSG00000004846; TAA
NDIRALNV

SEQ ID NO: 1953 - protein, 8 aa, Homo sapiens
  Table A; Target 1953; HLA-B*40:02; ABCB5; ENSG00000004846; TAA
NDIRALNV

SEQ ID NO: 1954 - protein, 8 aa, Homo sapiens
  Table A; Target 1954; HLA-B*49:01; ABCB5; ENSG00000004846; TAA
NDIRALNV

SEQ ID NO: 1955 - protein, 8 aa, Homo sapiens
  Table A; Target 1955; HLA-B*51:01; ABCB5; ENSG00000004846; TAA
NDIRALNV

SEQ ID NO: 1956 - protein, 8 aa, Homo sapiens
  Table A; Target 1956; HLA-C*06:02; ABCB5; ENSG00000004846; TAA
NDIRALNV

SEQ ID NO: 1957 - protein, 9 aa, Homo sapiens
  Table A; Target 1957; HLA-B*37:01; ABCB5; ENSG00000004846; TAA
NDSEKVVQH

SEQ ID NO: 1958 - protein, 9 aa, Homo sapiens
  Table A; Target 1958; HLA-C*12:03; ABCB5; ENSG00000004846; TAA
NDSEKVVQH

SEQ ID NO: 1959 - protein, 9 aa, Homo sapiens
  Table A; Target 1959; HLA-C*16:02; ABCB5; ENSG00000004846; TAA
NDSEKVVQH

SEQ ID NO: 1960 - protein, 9 aa, Homo sapiens
  Table A; Target 1960; HLA-A*30:01; ABCB5; ENSG00000004846; TAA
NEDMTLLTL

SEQ ID NO: 1961 - protein, 9 aa, Homo sapiens
  Table A; Target 1961; HLA-B*18:01; ABCB5; ENSG00000004846; TAA
NEDMTLLTL

SEQ ID NO: 1962 - protein, 9 aa, Homo sapiens
  Table A; Target 1962; HLA-B*38:01; ABCB5; ENSG00000004846; TAA
NEDMTLLTL

SEQ ID NO: 1963 - protein, 9 aa, Homo sapiens
  Table A; Target 1963; HLA-B*39:01; ABCB5; ENSG00000004846; TAA
NEDMTLLTL

SEQ ID NO: 1964 - protein, 9 aa, Homo sapiens
  Table A; Target 1964; HLA-B*40:01; ABCB5; ENSG00000004846; TAA
NEDMTLLTL

SEQ ID NO: 1965 - protein, 9 aa, Homo sapiens
  Table A; Target 1965; HLA-B*44:02; ABCB5; ENSG00000004846; TAA
NEDMTLLTL

SEQ ID NO: 1966 - protein, 9 aa, Homo sapiens
  Table A; Target 1966; HLA-B*44:03; ABCB5; ENSG00000004846; TAA
NEDMTLLTL

SEQ ID NO: 1967 - protein, 9 aa, Homo sapiens
  Table A; Target 1967; HLA-B*49:01; ABCB5; ENSG00000004846; TAA
NEDMTLLTL

SEQ ID NO: 1968 - protein, 10 aa, Homo sapiens
  Table A; Target 1968; HLA-A*01:01; ABCB5; ENSG00000004846; TAA
NEDMTLLTLY

SEQ ID NO: 1969 - protein, 10 aa, Homo sapiens
  Table A; Target 1969; HLA-B*18:01; ABCB5; ENSG00000004846; TAA
NEDMTLLTLY

SEQ ID NO: 1970 - protein, 10 aa, Homo sapiens
  Table A; Target 1970; HLA-B*44:02; ABCB5; ENSG00000004846; TAA
NEDMTLLTLY

SEQ ID NO: 1971 - protein, 10 aa, Homo sapiens
  Table A; Target 1971; HLA-B*44:03; ABCB5; ENSG00000004846; TAA
NEDMTLLTLY

SEQ ID NO: 1972 - protein, 9 aa, Homo sapiens
  Table A; Target 1972; HLA-B*39:01; ABCB5; ENSG00000004846; TAA
NGSGKSTVV

SEQ ID NO: 1973 - protein, 8 aa, Homo sapiens
  Table A; Target 1973; HLA-B*08:01; ABCB5; ENSG00000004846; TAA
NGTVHPVF

SEQ ID NO: 1974 - protein, 8 aa, Homo sapiens
  Table A; Target 1974; HLA-B*15:03; ABCB5; ENSG00000004846; TAA
NGTVHPVF

SEQ ID NO: 1975 - protein, 8 aa, Homo sapiens
  Table A; Target 1975; HLA-B*18:01; ABCB5; ENSG00000004846; TAA
NGTVHPVF

SEQ ID NO: 1976 - protein, 8 aa, Homo sapiens
  Table A; Target 1976; HLA-C*03:03; ABCB5; ENSG00000004846; TAA
NGTVHPVF

SEQ ID NO: 1977 - protein, 8 aa, Homo sapiens
  Table A; Target 1977; HLA-C*03:04; ABCB5; ENSG00000004846; TAA
NGTVHPVF

SEQ ID NO: 1978 - protein, 8 aa, Homo sapiens
  Table A; Target 1978; HLA-C*07:01; ABCB5; ENSG00000004846; TAA
NGTVHPVF

SEQ ID NO: 1979 - protein, 8 aa, Homo sapiens
  Table A; Target 1979; HLA-C*07:04; ABCB5; ENSG00000004846; TAA
NGTVHPVF

SEQ ID NO: 1980 - protein, 8 aa, Homo sapiens
  Table A; Target 1980; HLA-C*12:03; ABCB5; ENSG00000004846; TAA
NGTVHPVF

SEQ ID NO: 1981 - protein, 8 aa, Homo sapiens
  Table A; Target 1981; HLA-C*16:01; ABCB5; ENSG00000004846; TAA
NGTVHPVF

SEQ ID NO: 1982 - protein, 9 aa, Homo sapiens
  Table A; Target 1982; HLA-A*02:04; ABCB5; ENSG00000004846; TAA
NIHSFIEGL

SEQ ID NO: 1983 - protein, 9 aa, Homo sapiens
  Table A; Target 1983; HLA-A*02:07; ABCB5; ENSG00000004846; TAA
NIHSFIEGL

SEQ ID NO: 1984 - protein, 9 aa, Homo sapiens
  Table A; Target 1984; HLA-A*68:02; ABCB5; ENSG00000004846; TAA
NIHSFIEGL

SEQ ID NO: 1985 - protein, 8 aa, Homo sapiens
  Table A; Target 1985; HLA-B*08:01; ABCB5; ENSG00000004846; TAA
NIRTIVSL

SEQ ID NO: 1986 - protein, 8 aa, Homo sapiens
  Table A; Target 1986; HLA-C*07:02; ABCB5; ENSG00000004846; TAA
NIRTIVSL

SEQ ID NO: 1987 - protein, 10 aa, Homo sapiens
  Table A; Target 1987; HLA-A*33:01; ABCB5; ENSG00000004846; TAA
NIRTIVSLTR

SEQ ID NO: 1988 - protein, 9 aa, Homo sapiens
  Table A; Target 1988; HLA-A*02:01; ABCB5; ENSG00000004846; TAA
NMSTFSIGL

SEQ ID NO: 1989 - protein, 9 aa, Homo sapiens
  Table A; Target 1989; HLA-A*02:04; ABCB5; ENSG00000004846; TAA
NMSTFSIGL

SEQ ID NO: 1990 - protein, 9 aa, Homo sapiens
  Table A; Target 1990; HLA-A*02:07; ABCB5; ENSG00000004846; TAA
NMSTFSIGL

SEQ ID NO: 1991 - protein, 9 aa, Homo sapiens
  Table A; Target 1991; HLA-A*68:02; ABCB5; ENSG00000004846; TAA
NMSTFSIGL

SEQ ID NO: 1992 - protein, 9 aa, Homo sapiens
  Table A; Target 1992; HLA-B*55:01; ABCB5; ENSG00000004846; TAA
NMSTFSIGL

SEQ ID NO: 1993 - protein, 9 aa, Homo sapiens
  Table A; Target 1993; HLA-A*68:01; ABCB5; ENSG00000004846; TAA
NVSFNYPSR

SEQ ID NO: 1994 - protein, 10 aa, Homo sapiens
  Table A; Target 1994; HLA-A*24:02; ABCB5; ENSG00000004846; TAA
NYPSRPSIKI

SEQ ID NO: 1995 - protein, 10 aa, Homo sapiens
  Table A; Target 1995; HLA-A*31:01; ABCB5; ENSG00000004846; TAA
PCRPDVFILR

SEQ ID NO: 1996 - protein, 11 aa, Homo sapiens
  Table A; Target 1996; HLA-B*27:02; ABCB5; ENSG00000004846; TAA
PESIEGTVEFK

SEQ ID NO: 1997 - protein, 9 aa, Homo sapiens
  Table A; Target 1997; HLA-C*07:02; ABCB5; ENSG00000004846; TAA
PSRPSIKIL

SEQ ID NO: 1998 - protein, 8 aa, Homo sapiens
  Table A; Target 1998; HLA-B*18:01; ABCB5; ENSG00000004846; TAA
QEKELQRY

SEQ ID NO: 1999 - protein, 10 aa, Homo sapiens
  Table A; Target 1999; HLA-A*30:01; ABCB5; ENSG00000004846; TAA
QEKLNEDMTL

SEQ ID NO: 2000 - protein, 10 aa, Homo sapiens
  Table A; Target 2000; HLA-B*40:01; ABCB5; ENSG00000004846; TAA
QEKLNEDMTL

SEQ ID NO: 2001 - protein, 10 aa, Homo sapiens
  Table A; Target 2001; HLA-B*40:02; ABCB5; ENSG00000004846; TAA
QEKLNEDMTL

SEQ ID NO: 2002 - protein, 11 aa, Homo sapiens
  Table A; Target 2002; HLA-A*30:01; ABCB5; ENSG00000004846; TAA
QEKLNEDMTLL

SEQ ID NO: 2003 - protein, 11 aa, Homo sapiens
  Table A; Target 2003; HLA-B*40:01; ABCB5; ENSG00000004846; TAA
QEKLNEDMTLL

SEQ ID NO: 2004 - protein, 9 aa, Homo sapiens
  Table A; Target 2004; HLA-B*49:01; ABCB5; ENSG00000004846; TAA
QEPVLFGTT

SEQ ID NO: 2005 - protein, 10 aa, Homo sapiens
  Table A; Target 2005; HLA-A*30:01; ABCB5; ENSG00000004846; TAA
QEPVLFGTTI

SEQ ID NO: 2006 - protein, 10 aa, Homo sapiens
  Table A; Target 2006; HLA-B*40:01; ABCB5; ENSG00000004846; TAA
QEPVLFGTTI

SEQ ID NO: 2007 - protein, 10 aa, Homo sapiens
  Table A; Target 2007; HLA-B*44:02; ABCB5; ENSG00000004846; TAA
QEPVLFGTTI

SEQ ID NO: 2008 - protein, 10 aa, Homo sapiens
  Table A; Target 2008; HLA-B*44:03; ABCB5; ENSG00000004846; TAA
QEPVLFGTTI

SEQ ID NO: 2009 - protein, 10 aa, Homo sapiens
  Table A; Target 2009; HLA-B*49:01; ABCB5; ENSG00000004846; TAA
QEPVLFGTTI

SEQ ID NO: 2010 - protein, 9 aa, Homo sapiens
  Table A; Target 2010; HLA-A*23:01; ABCB5; ENSG00000004846; TAA
QIIGSCYAF

SEQ ID NO: 2011 - protein, 9 aa, Homo sapiens
  Table A; Target 2011; HLA-A*26:01; ABCB5; ENSG00000004846; TAA
QIIGSCYAF

SEQ ID NO: 2012 - protein, 9 aa, Homo sapiens
  Table A; Target 2012; HLA-B*15:01; ABCB5; ENSG00000004846; TAA
QIIGSCYAF

SEQ ID NO: 2013 - protein, 9 aa, Homo sapiens
  Table A; Target 2013; HLA-A*02:04; ABCB5; ENSG00000004846; TAA
QISLWIITA

SEQ ID NO: 2014 - protein, 9 aa, Homo sapiens
  Table A; Target 2014; HLA-A*68:02; ABCB5; ENSG00000004846; TAA
QNADLIVVL

SEQ ID NO: 2015 - protein, 9 aa, Homo sapiens
  Table A; Target 2015; HLA-B*35:03; ABCB5; ENSG00000004846; TAA
QNADLIVVL

SEQ ID NO: 2016 - protein, 9 aa, Homo sapiens
  Table A; Target 2016; HLA-B*38:01; ABCB5; ENSG00000004846; TAA
QNADLIVVL

SEQ ID NO: 2017 - protein, 9 aa, Homo sapiens
  Table A; Target 2017; HLA-C*12:03; ABCB5; ENSG00000004846; TAA
QNADLIVVL

SEQ ID NO: 2018 - protein, 10 aa, Homo sapiens
  Table A; Target 2018; HLA-C*07:02; ABCB5; ENSG00000004846; TAA
QNCTQSQEKL

SEQ ID NO: 2019 - protein, 9 aa, Homo sapiens
  Table A; Target 2019; HLA-B*08:01; ABCB5; ENSG00000004846; TAA
QPKLRKEAV

SEQ ID NO: 2020 - protein, 9 aa, Homo sapiens
  Table A; Target 2020; HLA-B*07:02; ABCB5; ENSG00000004846; TAA
QRIAIARAL

SEQ ID NO: 2021 - protein, 9 aa, Homo sapiens
  Table A; Target 2021; HLA-B*27:02; ABCB5; ENSG00000004846; TAA
QRIAIARAL

SEQ ID NO: 2022 - protein, 9 aa, Homo sapiens
  Table A; Target 2022; HLA-B*27:05; ABCB5; ENSG00000004846; TAA
QRIAIARAL

SEQ ID NO: 2023 - protein, 9 aa, Homo sapiens
  Table A; Target 2023; HLA-C*06:02; ABCB5; ENSG00000004846; TAA
QRIAIARAL

SEQ ID NO: 2024 - protein, 9 aa, Homo sapiens
  Table A; Target 2024; HLA-C*07:02; ABCB5; ENSG00000004846; TAA
QRIAIARAL

SEQ ID NO: 2025 - protein, 9 aa, Homo sapiens
  Table A; Target 2025; HLA-C*16:04; ABCB5; ENSG00000004846; TAA
QRIAIARAL

SEQ ID NO: 2026 - protein, 9 aa, Homo sapiens
  Table A; Target 2026; HLA-B*27:05; ABCB5; ENSG00000004846; TAA
QRLAIARAL

SEQ ID NO: 2027 - protein, 9 aa, Homo sapiens
  Table A; Target 2027; HLA-C*06:02; ABCB5; ENSG00000004846; TAA
QRLAIARAL

SEQ ID NO: 2028 - protein, 10 aa, Homo sapiens
  Table A; Target 2028; HLA-B*27:02; ABCB5; ENSG00000004846; TAA
QRLYDPDDGF

SEQ ID NO: 2029 - protein, 9 aa, Homo sapiens
  Table A; Target 2029; HLA-B*07:02; ABCB5; ENSG00000004846; TAA
QVGLKGAQL

SEQ ID NO: 2030 - protein, 9 aa, Homo sapiens
  Table A; Target 2030; HLA-B*08:01; ABCB5; ENSG00000004846; TAA
QVGLKGAQL

SEQ ID NO: 2031 - protein, 9 aa, Homo sapiens
  Table A; Target 2031; HLA-A*24:02; ABCB5; ENSG00000004846; TAA
QVIDKKPSI

SEQ ID NO: 2032 - protein, 9 aa, Homo sapiens
  Table A; Target 2032; HLA-A*25:01; ABCB5; ENSG00000004846; TAA
QVIDKKPSI

SEQ ID NO: 2033 - protein, 9 aa, Homo sapiens
  Table A; Target 2033; HLA-A*26:01; ABCB5; ENSG00000004846; TAA
QVIDKKPSI

SEQ ID NO: 2034 - protein, 9 aa, Homo sapiens
  Table A; Target 2034; HLA-A*32:01; ABCB5; ENSG00000004846; TAA
QVIDKKPSI

SEQ ID NO: 2035 - protein, 9 aa, Homo sapiens
  Table A; Target 2035; HLA-B*08:01; ABCB5; ENSG00000004846; TAA
QVIDKKPSI

SEQ ID NO: 2036 - protein, 10 aa, Homo sapiens
  Table A; Target 2036; HLA-A*03:02; ABCB5; ENSG00000004846; TAA
QVLFDGVDAK

SEQ ID NO: 2037 - protein, 10 aa, Homo sapiens
  Table A; Target 2037; HLA-A*11:01; ABCB5; ENSG00000004846; TAA
QVLFDGVDAK

SEQ ID NO: 2038 - protein, 10 aa, Homo sapiens
  Table A; Target 2038; HLA-B*27:02; ABCB5; ENSG00000004846; TAA
QVLFDGVDAK

SEQ ID NO: 2039 - protein, 9 aa, Homo sapiens
  Table A; Target 2039; HLA-A*30:02; ABCB5; ENSG00000004846; TAA
RAAREANAY

SEQ ID NO: 2040 - protein, 9 aa, Homo sapiens
  Table A; Target 2040; HLA-B*15:01; ABCB5; ENSG00000004846; TAA
RAAREANAY

SEQ ID NO: 2041 - protein, 9 aa, Homo sapiens
  Table A; Target 2041; HLA-B*15:03; ABCB5; ENSG00000004846; TAA
RAAREANAY

SEQ ID NO: 2042 - protein, 9 aa, Homo sapiens
  Table A; Target 2042; HLA-B*46:01; ABCB5; ENSG00000004846; TAA
RAAREANAY

SEQ ID NO: 2043 - protein, 9 aa, Homo sapiens
  Table A; Target 2043; HLA-B*58:01; ABCB5; ENSG00000004846; TAA
RAAREANAY

SEQ ID NO: 2044 - protein, 9 aa, Homo sapiens
  Table A; Target 2044; HLA-C*16:01; ABCB5; ENSG00000004846; TAA
RAAREANAY

SEQ ID NO: 2045 - protein, 9 aa, Homo sapiens
  Table A; Target 2045; HLA-C*16:02; ABCB5; ENSG00000004846; TAA
RAAREANAY

SEQ ID NO: 2046 - protein, 9 aa, Homo sapiens
  Table A; Target 2046; HLA-A*01:01; ABCB5; ENSG00000004846; TAA
RAEEMQENY

SEQ ID NO: 2047 - protein, 9 aa, Homo sapiens
  Table A; Target 2047; HLA-A*30:02; ABCB5; ENSG00000004846; TAA
RAEEMQENY

SEQ ID NO: 2048 - protein, 9 aa, Homo sapiens
  Table A; Target 2048; HLA-B*35:01; ABCB5; ENSG00000004846; TAA
RAEEMQENY

SEQ ID NO: 2049 - protein, 9 aa, Homo sapiens
  Table A; Target 2049; HLA-B*55:01; ABCB5; ENSG00000004846; TAA
RAEEMQENY

SEQ ID NO: 2050 - protein, 9 aa, Homo sapiens
  Table A; Target 2050; HLA-B*58:01; ABCB5; ENSG00000004846; TAA
RAEEMQENY

SEQ ID NO: 2051 - protein, 9 aa, Homo sapiens
  Table A; Target 2051; HLA-C*05:01; ABCB5; ENSG00000004846; TAA
RAEEMQENY

SEQ ID NO: 2052 - protein, 8 aa, Homo sapiens
  Table A; Target 2052; HLA-B*58:01; ABCB5; ENSG00000004846; TAA
RAGEILTM

SEQ ID NO: 2053 - protein, 8 aa, Homo sapiens
  Table A; Target 2053; HLA-C*12:03; ABCB5; ENSG00000004846; TAA
RAGEILTM

SEQ ID NO: 2054 - protein, 9 aa, Homo sapiens
  Table A; Target 2054; HLA-A*31:01; ABCB5; ENSG00000004846; TAA
RAGEILTMR

SEQ ID NO: 2055 - protein, 9 aa, Homo sapiens
  Table A; Target 2055; HLA-A*33:01; ABCB5; ENSG00000004846; TAA
RAGEILTMR

SEQ ID NO: 2056 - protein, 9 aa, Homo sapiens
  Table A; Target 2056; HLA-A*33:03; ABCB5; ENSG00000004846; TAA
RAGEILTMR

SEQ ID NO: 2057 - protein, 9 aa, Homo sapiens
  Table A; Target 2057; HLA-A*68:01; ABCB5; ENSG00000004846; TAA
RAGEILTMR

SEQ ID NO: 2058 - protein, 9 aa, Homo sapiens
  Table A; Target 2058; HLA-C*07:06; ABCB5; ENSG00000004846; TAA
RAGEILTMR

SEQ ID NO: 2059 - protein, 8 aa, Homo sapiens
  Table A; Target 2059; HLA-B*57:01; ABCB5; ENSG00000004846; TAA
RALNVRHY

SEQ ID NO: 2060 - protein, 9 aa, Homo sapiens
  Table A; Target 2060; HLA-A*31:01; ABCB5; ENSG00000004846; TAA
RALNVRHYR

SEQ ID NO: 2061 - protein, 9 aa, Homo sapiens
  Table A; Target 2061; HLA-A*31:01; ABCB5; ENSG00000004846; TAA
RAQEKELQR

SEQ ID NO: 2062 - protein, 10 aa, Homo sapiens
  Table A; Target 2062; HLA-A*30:02; ABCB5; ENSG00000004846; TAA
RAQEKELQRY

SEQ ID NO: 2063 - protein, 8 aa, Homo sapiens
  Table A; Target 2063; HLA-B*18:01; ABCB5; ENSG00000004846; TAA
REANAYDF

SEQ ID NO: 2064 - protein, 8 aa, Homo sapiens
  Table A; Target 2064; HLA-B*37:01; ABCB5; ENSG00000004846; TAA
REANAYDF

SEQ ID NO: 2065 - protein, 9 aa, Homo sapiens
  Table A; Target 2065; HLA-B*49:01; ABCB5; ENSG00000004846; TAA
REANAYDFI

SEQ ID NO: 2066 - protein, 8 aa, Homo sapiens
  Table A; Target 2066; HLA-B*37:01; ABCB5; ENSG00000004846; TAA
REKAFEQM

SEQ ID NO: 2067 - protein, 9 aa, Homo sapiens
  Table A; Target 2067; HLA-B*44:02; ABCB5; ENSG00000004846; TAA
REKAFEQMY

SEQ ID NO: 2068 - protein, 9 aa, Homo sapiens
  Table A; Target 2068; HLA-B*44:03; ABCB5; ENSG00000004846; TAA
REKAFEQMY

SEQ ID NO: 2069 - protein, 10 aa, Homo sapiens
  Table A; Target 2069; HLA-A*23:01; ABCB5; ENSG00000004846; TAA
RFADGLDITL

SEQ ID NO: 2070 - protein, 9 aa, Homo sapiens
  Table A; Target 2070; HLA-A*31:01; ABCB5; ENSG00000004846; TAA
RGLSLSIER

SEQ ID NO: 2071 - protein, 11 aa, Homo sapiens
  Table A; Target 2071; HLA-A*03:01; ABCB5; ENSG00000004846; TAA
RLAIARALLQK

SEQ ID NO: 2072 - protein, 11 aa, Homo sapiens
  Table A; Target 2072; HLA-A*02:04; ABCB5; ENSG00000004846; TAA
RLYDPDDGFIM

SEQ ID NO: 2073 - protein, 11 aa, Homo sapiens
  Table A; Target 2073; HLA-A*02:07; ABCB5; ENSG00000004846; TAA
RLYDPDDGFIM

SEQ ID NO: 2074 - protein, 9 aa, Homo sapiens
  Table A; Target 2074; HLA-A*03:01; ABCB5; ENSG00000004846; TAA
RLYDPVQGQ

SEQ ID NO: 2075 - protein, 10 aa, Homo sapiens
  Table A; Target 2075; HLA-A*02:01; ABCB5; ENSG00000004846; TAA
RLYDPVQGQV

SEQ ID NO: 2076 - protein, 10 aa, Homo sapiens
  Table A; Target 2076; HLA-A*02:03; ABCB5; ENSG00000004846; TAA
RLYDPVQGQV

SEQ ID NO: 2077 - protein, 10 aa, Homo sapiens
  Table A; Target 2077; HLA-A*02:04; ABCB5; ENSG00000004846; TAA
RLYDPVQGQV

SEQ ID NO: 2078 - protein, 10 aa, Homo sapiens
  Table A; Target 2078; HLA-A*02:07; ABCB5; ENSG00000004846; TAA
RLYDPVQGQV

SEQ ID NO: 2079 - protein, 10 aa, Homo sapiens
  Table A; Target 2079; HLA-A*03:01; ABCB5; ENSG00000004846; TAA
RLYDPVQGQV

SEQ ID NO: 2080 - protein, 10 aa, Homo sapiens
  Table A; Target 2080; HLA-B*13:02; ABCB5; ENSG00000004846; TAA
RLYDPVQGQV

SEQ ID NO: 2081 - protein, 10 aa, Homo sapiens
  Table A; Target 2081; HLA-B*55:01; ABCB5; ENSG00000004846; TAA
RLYDPVQGQV

SEQ ID NO: 2082 - protein, 11 aa, Homo sapiens
  Table A; Target 2082; HLA-A*02:01; ABCB5; ENSG00000004846; TAA
RLYDPVQGQVL

SEQ ID NO: 2083 - protein, 11 aa, Homo sapiens
  Table A; Target 2083; HLA-A*02:03; ABCB5; ENSG00000004846; TAA
RLYDPVQGQVL

SEQ ID NO: 2084 - protein, 11 aa, Homo sapiens
  Table A; Target 2084; HLA-A*02:04; ABCB5; ENSG00000004846; TAA
RLYDPVQGQVL

SEQ ID NO: 2085 - protein, 11 aa, Homo sapiens
  Table A; Target 2085; HLA-A*02:07; ABCB5; ENSG00000004846; TAA
RLYDPVQGQVL

SEQ ID NO: 2086 - protein, 11 aa, Homo sapiens
  Table A; Target 2086; HLA-A*03:01; ABCB5; ENSG00000004846; TAA
RLYDPVQGQVL

SEQ ID NO: 2087 - protein, 11 aa, Homo sapiens
  Table A; Target 2087; HLA-A*03:02; ABCB5; ENSG00000004846; TAA
RLYDPVQGQVL

SEQ ID NO: 2088 - protein, 11 aa, Homo sapiens
  Table A; Target 2088; HLA-A*23:01; ABCB5; ENSG00000004846; TAA
RLYDPVQGQVL

SEQ ID NO: 2089 - protein, 11 aa, Homo sapiens
  Table A; Target 2089; HLA-A*31:01; ABCB5; ENSG00000004846; TAA
RLYDPVQGQVL

SEQ ID NO: 2090 - protein, 11 aa, Homo sapiens
  Table A; Target 2090; HLA-A*32:01; ABCB5; ENSG00000004846; TAA
RLYDPVQGQVL

SEQ ID NO: 2091 - protein, 11 aa, Homo sapiens
  Table A; Target 2091; HLA-B*13:02; ABCB5; ENSG00000004846; TAA
RLYDPVQGQVL

SEQ ID NO: 2092 - protein, 11 aa, Homo sapiens
  Table A; Target 2092; HLA-B*15:01; ABCB5; ENSG00000004846; TAA
RLYDPVQGQVL

SEQ ID NO: 2093 - protein, 11 aa, Homo sapiens
  Table A; Target 2093; HLA-B*15:03; ABCB5; ENSG00000004846; TAA
RLYDPVQGQVL

SEQ ID NO: 2094 - protein, 11 aa, Homo sapiens
  Table A; Target 2094; HLA-C*03:04; ABCB5; ENSG00000004846; TAA
RLYDPVQGQVL

SEQ ID NO: 2095 - protein, 11 aa, Homo sapiens
  Table A; Target 2095; HLA-C*16:02; ABCB5; ENSG00000004846; TAA
RLYDPVQGQVL

SEQ ID NO: 2096 - protein, 9 aa, Homo sapiens
  Table A; Target 2096; HLA-A*02:01; ABCB5; ENSG00000004846; TAA
RMTDDIDKI

SEQ ID NO: 2097 - protein, 9 aa, Homo sapiens
  Table A; Target 2097; HLA-B*13:02; ABCB5; ENSG00000004846; TAA
RMTDDIDKI

SEQ ID NO: 2098 - protein, 9 aa, Homo sapiens
  Table A; Target 2098; HLA-B*55:01; ABCB5; ENSG00000004846; TAA
RMTDDIDKI

SEQ ID NO: 2099 - protein, 11 aa, Homo sapiens
  Table A; Target 2099; HLA-A*24:02; ABCB5; ENSG00000004846; TAA
RMTPEGMFIVF

SEQ ID NO: 2100 - protein, 11 aa, Homo sapiens
  Table A; Target 2100; HLA-B*57:01; ABCB5; ENSG00000004846; TAA
RMTPEGMFIVF

SEQ ID NO: 2101 - protein, 9 aa, Homo sapiens
  Table A; Target 2101; HLA-A*03:01; ABCB5; ENSG00000004846; TAA
RMVISLTSK

SEQ ID NO: 2102 - protein, 9 aa, Homo sapiens
  Table A; Target 2102; HLA-A*03:02; ABCB5; ENSG00000004846; TAA
RMVISLTSK

SEQ ID NO: 2103 - protein, 9 aa, Homo sapiens
  Table A; Target 2103; HLA-A*02:04; ABCB5; ENSG00000004846; TAA
RSADLIVTL

SEQ ID NO: 2104 - protein, 9 aa, Homo sapiens
  Table A; Target 2104; HLA-A*23:01; ABCB5; ENSG00000004846; TAA
RSADLIVTL

SEQ ID NO: 2105 - protein, 9 aa, Homo sapiens
  Table A; Target 2105; HLA-A*32:01; ABCB5; ENSG00000004846; TAA
RSADLIVTL

SEQ ID NO: 2106 - protein, 9 aa, Homo sapiens
  Table A; Target 2106; HLA-A*68:02; ABCB5; ENSG00000004846; TAA
RSADLIVTL

SEQ ID NO: 2107 - protein, 9 aa, Homo sapiens
  Table A; Target 2107; HLA-B*27:05; ABCB5; ENSG00000004846; TAA
RSADLIVTL

SEQ ID NO: 2108 - protein, 9 aa, Homo sapiens
  Table A; Target 2108; HLA-B*57:01; ABCB5; ENSG00000004846; TAA
RSADLIVTL

SEQ ID NO: 2109 - protein, 9 aa, Homo sapiens
  Table A; Target 2109; HLA-B*58:01; ABCB5; ENSG00000004846; TAA
RSADLIVTL

SEQ ID NO: 2110 - protein, 9 aa, Homo sapiens
  Table A; Target 2110; HLA-C*02:02; ABCB5; ENSG00000004846; TAA
RSADLIVTL

SEQ ID NO: 2111 - protein, 9 aa, Homo sapiens
  Table A; Target 2111; HLA-C*12:03; ABCB5; ENSG00000004846; TAA
RSADLIVTL

SEQ ID NO: 2112 - protein, 10 aa, Homo sapiens
  Table A; Target 2112; HLA-A*03:01; ABCB5; ENSG00000004846; TAA
RSADLIVTLK

SEQ ID NO: 2113 - protein, 10 aa, Homo sapiens
  Table A; Target 2113; HLA-A*03:02; ABCB5; ENSG00000004846; TAA
RSADLIVTLK

SEQ ID NO: 2114 - protein, 10 aa, Homo sapiens
  Table A; Target 2114; HLA-A*11:01; ABCB5; ENSG00000004846; TAA
RSADLIVTLK

SEQ ID NO: 2115 - protein, 10 aa, Homo sapiens
  Table A; Target 2115; HLA-B*27:02; ABCB5; ENSG00000004846; TAA
RSADLIVTLK

SEQ ID NO: 2116 - protein, 10 aa, Homo sapiens
  Table A; Target 2116; HLA-B*57:01; ABCB5; ENSG00000004846; TAA
RSADLIVTLK

SEQ ID NO: 2117 - protein, 9 aa, Homo sapiens
  Table A; Target 2117; HLA-A*03:01; ABCB5; ENSG00000004846; TAA
RTCLVVTHR

SEQ ID NO: 2118 - protein, 9 aa, Homo sapiens
  Table A; Target 2118; HLA-A*31:01; ABCB5; ENSG00000004846; TAA
RTCLVVTHR

SEQ ID NO: 2119 - protein, 9 aa, Homo sapiens
  Table A; Target 2119; HLA-A*32:01; ABCB5; ENSG00000004846; TAA
RTIASKVSL

SEQ ID NO: 2120 - protein, 9 aa, Homo sapiens
  Table A; Target 2120; HLA-B*58:01; ABCB5; ENSG00000004846; TAA
RTIASKVSL

SEQ ID NO: 2121 - protein, 9 aa, Homo sapiens
  Table A; Target 2121; HLA-C*03:04; ABCB5; ENSG00000004846; TAA
RTIASKVSL

SEQ ID NO: 2122 - protein, 10 aa, Homo sapiens
  Table A; Target 2122; HLA-A*03:01; ABCB5; ENSG00000004846; TAA
RTIVSLTREK

SEQ ID NO: 2123 - protein, 10 aa, Homo sapiens
  Table A; Target 2123; HLA-A*11:01; ABCB5; ENSG00000004846; TAA
RTIVSLTREK

SEQ ID NO: 2124 - protein, 9 aa, Homo sapiens
  Table A; Target 2124; HLA-A*03:01; ABCB5; ENSG00000004846; TAA
RTTIVVAHR

SEQ ID NO: 2125 - protein, 9 aa, Homo sapiens
  Table A; Target 2125; HLA-A*03:02; ABCB5; ENSG00000004846; TAA
RTTIVVAHR

SEQ ID NO: 2126 - protein, 9 aa, Homo sapiens
  Table A; Target 2126; HLA-A*11:01; ABCB5; ENSG00000004846; TAA
RTTIVVAHR

SEQ ID NO: 2127 - protein, 9 aa, Homo sapiens
  Table A; Target 2127; HLA-A*31:01; ABCB5; ENSG00000004846; TAA
RTTIVVAHR

SEQ ID NO: 2128 - protein, 9 aa, Homo sapiens
  Table A; Target 2128; HLA-A*33:01; ABCB5; ENSG00000004846; TAA
RTTIVVAHR

SEQ ID NO: 2129 - protein, 9 aa, Homo sapiens
  Table A; Target 2129; HLA-A*33:03; ABCB5; ENSG00000004846; TAA
RTTIVVAHR

SEQ ID NO: 2130 - protein, 9 aa, Homo sapiens
  Table A; Target 2130; HLA-A*68:01; ABCB5; ENSG00000004846; TAA
RTTIVVAHR

SEQ ID NO: 2131 - protein, 9 aa, Homo sapiens
  Table A; Target 2131; HLA-B*57:01; ABCB5; ENSG00000004846; TAA
RTTIVVAHR

SEQ ID NO: 2132 - protein, 9 aa, Homo sapiens
  Table A; Target 2132; HLA-C*07:06; ABCB5; ENSG00000004846; TAA
RTTIVVAHR

SEQ ID NO: 2133 - protein, 9 aa, Homo sapiens
  Table A; Target 2133; HLA-C*06:02; ABCB5; ENSG00000004846; TAA
SAAACSRMV

SEQ ID NO: 2134 - protein, 9 aa, Homo sapiens
  Table A; Target 2134; HLA-C*16:02; ABCB5; ENSG00000004846; TAA
SAAACSRMV

SEQ ID NO: 2135 - protein, 8 aa, Homo sapiens
  Table A; Target 2135; HLA-B*35:03; ABCB5; ENSG00000004846; TAA
SADLIVTL

SEQ ID NO: 2136 - protein, 8 aa, Homo sapiens
  Table A; Target 2136; HLA-B*38:01; ABCB5; ENSG00000004846; TAA
SADLIVTL

SEQ ID NO: 2137 - protein, 8 aa, Homo sapiens
  Table A; Target 2137; HLA-C*03:04; ABCB5; ENSG00000004846; TAA
SADLIVTL

SEQ ID NO: 2138 - protein, 8 aa, Homo sapiens
  Table A; Target 2138; HLA-C*04:01; ABCB5; ENSG00000004846; TAA
SADLIVTL

SEQ ID NO: 2139 - protein, 8 aa, Homo sapiens
  Table A; Target 2139; HLA-C*05:01; ABCB5; ENSG00000004846; TAA
SADLIVTL

SEQ ID NO: 2140 - protein, 8 aa, Homo sapiens
  Table A; Target 2140; HLA-C*07:04; ABCB5; ENSG00000004846; TAA
SADLIVTL

SEQ ID NO: 2141 - protein, 9 aa, Homo sapiens
  Table A; Target 2141; HLA-A*01:01; ABCB5; ENSG00000004846; TAA
SADLIVTLK

SEQ ID NO: 2142 - protein, 9 aa, Homo sapiens
  Table A; Target 2142; HLA-A*03:02; ABCB5; ENSG00000004846; TAA
SADLIVTLK

SEQ ID NO: 2143 - protein, 9 aa, Homo sapiens
  Table A; Target 2143; HLA-A*11:01; ABCB5; ENSG00000004846; TAA
SADLIVTLK

SEQ ID NO: 2144 - protein, 9 aa, Homo sapiens
  Table A; Target 2144; HLA-C*05:01; ABCB5; ENSG00000004846; TAA
SADLIVTLK

SEQ ID NO: 2145 - protein, 9 aa, Homo sapiens
  Table A; Target 2145; HLA-C*07:06; ABCB5; ENSG00000004846; TAA
SADLIVTLK

SEQ ID NO: 2146 - protein, 11 aa, Homo sapiens
  Table A; Target 2146; HLA-C*01:02; ABCB5; ENSG00000004846; TAA
SALDSESKSAV

SEQ ID NO: 2147 - protein, 11 aa, Homo sapiens
  Table A; Target 2147; HLA-C*03:03; ABCB5; ENSG00000004846; TAA
SALDSESKSAV

SEQ ID NO: 2148 - protein, 11 aa, Homo sapiens
  Table A; Target 2148; HLA-C*03:04; ABCB5; ENSG00000004846; TAA
SALDSESKSAV

SEQ ID NO: 2149 - protein, 11 aa, Homo sapiens
  Table A; Target 2149; HLA-C*16:02; ABCB5; ENSG00000004846; TAA
SALDSESKSAV

SEQ ID NO: 2150 - protein, 11 aa, Homo sapiens
  Table A; Target 2150; HLA-C*16:04; ABCB5; ENSG00000004846; TAA
SALDSESKSAV

SEQ ID NO: 2151 - protein, 9 aa, Homo sapiens
  Table A; Target 2151; HLA-A*03:01; ABCB5; ENSG00000004846; TAA
SAVQAALEK

SEQ ID NO: 2152 - protein, 9 aa, Homo sapiens
  Table A; Target 2152; HLA-A*03:02; ABCB5; ENSG00000004846; TAA
SAVQAALEK

SEQ ID NO: 2153 - protein, 9 aa, Homo sapiens
  Table A; Target 2153; HLA-A*11:01; ABCB5; ENSG00000004846; TAA
SAVQAALEK

SEQ ID NO: 2154 - protein, 9 aa, Homo sapiens
  Table A; Target 2154; HLA-A*68:01; ABCB5; ENSG00000004846; TAA
SAVQAALEK

SEQ ID NO: 2155 - protein, 9 aa, Homo sapiens
  Table A; Target 2155; HLA-C*03:03; ABCB5; ENSG00000004846; TAA
SAVQAALEK

SEQ ID NO: 2156 - protein, 9 aa, Homo sapiens
  Table A; Target 2156; HLA-C*07:06; ABCB5; ENSG00000004846; TAA
SAVQAALEK

SEQ ID NO: 2157 - protein, 8 aa, Homo sapiens
  Table A; Target 2157; HLA-B*08:01; ABCB5; ENSG00000004846; TAA
SAYSKAGA

SEQ ID NO: 2158 - protein, 9 aa, Homo sapiens
  Table A; Target 2158; HLA-A*02:03; ABCB5; ENSG00000004846; TAA
SAYSKAGAV

SEQ ID NO: 2159 - protein, 9 aa, Homo sapiens
  Table A; Target 2159; HLA-B*08:01; ABCB5; ENSG00000004846; TAA
SAYSKAGAV

SEQ ID NO: 2160 - protein, 9 aa, Homo sapiens
  Table A; Target 2160; HLA-B*13:02; ABCB5; ENSG00000004846; TAA
SAYSKAGAV

SEQ ID NO: 2161 - protein, 9 aa, Homo sapiens
  Table A; Target 2161; HLA-B*51:01; ABCB5; ENSG00000004846; TAA
SAYSKAGAV

SEQ ID NO: 2162 - protein, 9 aa, Homo sapiens
  Table A; Target 2162; HLA-B*56:01; ABCB5; ENSG00000004846; TAA
SAYSKAGAV

SEQ ID NO: 2163 - protein, 9 aa, Homo sapiens
  Table A; Target 2163; HLA-C*02:02; ABCB5; ENSG00000004846; TAA
SAYSKAGAV

SEQ ID NO: 2164 - protein, 9 aa, Homo sapiens
  Table A; Target 2164; HLA-C*03:03; ABCB5; ENSG00000004846; TAA
SAYSKAGAV

SEQ ID NO: 2165 - protein, 9 aa, Homo sapiens
  Table A; Target 2165; HLA-C*03:04; ABCB5; ENSG00000004846; TAA
SAYSKAGAV

SEQ ID NO: 2166 - protein, 9 aa, Homo sapiens
  Table A; Target 2166; HLA-C*12:03; ABCB5; ENSG00000004846; TAA
SAYSKAGAV

SEQ ID NO: 2167 - protein, 9 aa, Homo sapiens
  Table A; Target 2167; HLA-C*16:02; ABCB5; ENSG00000004846; TAA
SAYSKAGAV

SEQ ID NO: 2168 - protein, 10 aa, Homo sapiens
  Table A; Target 2168; HLA-B*56:01; ABCB5; ENSG00000004846; TAA
SAYSKAGAVA

SEQ ID NO: 2169 - protein, 8 aa, Homo sapiens
  Table A; Target 2169; HLA-B*37:01; ABCB5; ENSG00000004846; TAA
SDNLISGC

SEQ ID NO: 2170 - protein, 9 aa, Homo sapiens
  Table A; Target 2170; HLA-A*30:01; ABCB5; ENSG00000004846; TAA
SDNLISGCL

SEQ ID NO: 2171 - protein, 9 aa, Homo sapiens
  Table A; Target 2171; HLA-B*37:01; ABCB5; ENSG00000004846; TAA
SDNLISGCL

SEQ ID NO: 2172 - protein, 8 aa, Homo sapiens
  Table A; Target 2172; HLA-B*37:01; ABCB5; ENSG00000004846; TAA
SEKVVQHA

SEQ ID NO: 2173 - protein, 9 aa, Homo sapiens
  Table A; Target 2173; HLA-A*30:01; ABCB5; ENSG00000004846; TAA
SEKVVQHAL

SEQ ID NO: 2174 - protein, 9 aa, Homo sapiens
  Table A; Target 2174; HLA-B*07:02; ABCB5; ENSG00000004846; TAA
SEKVVQHAL

SEQ ID NO: 2175 - protein, 9 aa, Homo sapiens
  Table A; Target 2175; HLA-B*08:01; ABCB5; ENSG00000004846; TAA
SEKVVQHAL

SEQ ID NO: 2176 - protein, 9 aa, Homo sapiens
  Table A; Target 2176; HLA-B*18:01; ABCB5; ENSG00000004846; TAA
SEKVVQHAL

SEQ ID NO: 2177 - protein, 9 aa, Homo sapiens
  Table A; Target 2177; HLA-B*27:02; ABCB5; ENSG00000004846; TAA
SEKVVQHAL

SEQ ID NO: 2178 - protein, 9 aa, Homo sapiens
  Table A; Target 2178; HLA-B*37:01; ABCB5; ENSG00000004846; TAA
SEKVVQHAL

SEQ ID NO: 2179 - protein, 9 aa, Homo sapiens
  Table A; Target 2179; HLA-B*40:01; ABCB5; ENSG00000004846; TAA
SEKVVQHAL

SEQ ID NO: 2180 - protein, 9 aa, Homo sapiens
  Table A; Target 2180; HLA-B*40:02; ABCB5; ENSG00000004846; TAA
SEKVVQHAL

SEQ ID NO: 2181 - protein, 9 aa, Homo sapiens
  Table A; Target 2181; HLA-B*44:02; ABCB5; ENSG00000004846; TAA
SEKVVQHAL

SEQ ID NO: 2182 - protein, 9 aa, Homo sapiens
  Table A; Target 2182; HLA-B*44:03; ABCB5; ENSG00000004846; TAA
SEKVVQHAL

SEQ ID NO: 2183 - protein, 9 aa, Homo sapiens
  Table A; Target 2183; HLA-B*49:01; ABCB5; ENSG00000004846; TAA
SEKVVQHAL

SEQ ID NO: 2184 - protein, 9 aa, Homo sapiens
  Table A; Target 2184; HLA-C*16:04; ABCB5; ENSG00000004846; TAA
SEKVVQHAL

SEQ ID NO: 2185 - protein, 11 aa, Homo sapiens
  Table A; Target 2185; HLA-A*30:02; ABCB5; ENSG00000004846; TAA
SERAEEMQENY

SEQ ID NO: 2186 - protein, 9 aa, Homo sapiens
  Table A; Target 2186; HLA-A*30:01; ABCB5; ENSG00000004846; TAA
SESKSAVQA

SEQ ID NO: 2187 - protein, 9 aa, Homo sapiens
  Table A; Target 2187; HLA-B*40:01; ABCB5; ENSG00000004846; TAA
SESKSAVQA

SEQ ID NO: 2188 - protein, 9 aa, Homo sapiens
  Table A; Target 2188; HLA-B*49:01; ABCB5; ENSG00000004846; TAA
SESKSAVQA

SEQ ID NO: 2189 - protein, 11 aa, Homo sapiens
  Table A; Target 2189; HLA-A*30:01; ABCB5; ENSG00000004846; TAA
SESKSAVQAAL

SEQ ID NO: 2190 - protein, 11 aa, Homo sapiens
  Table A; Target 2190; HLA-B*40:01; ABCB5; ENSG00000004846; TAA
SESKSAVQAAL

SEQ ID NO: 2191 - protein, 11 aa, Homo sapiens
  Table A; Target 2191; HLA-B*44:03; ABCB5; ENSG00000004846; TAA
SESKSAVQAAL

SEQ ID NO: 2192 - protein, 10 aa, Homo sapiens
  Table A; Target 2192; HLA-A*23:01; ABCB5; ENSG00000004846; TAA
SFIEGLPEKY

SEQ ID NO: 2193 - protein, 10 aa, Homo sapiens
  Table A; Target 2193; HLA-A*29:02; ABCB5; ENSG00000004846; TAA
SFIEGLPEKY

SEQ ID NO: 2194 - protein, 10 aa, Homo sapiens
  Table A; Target 2194; HLA-A*30:02; ABCB5; ENSG00000004846; TAA
SFIEGLPEKY

SEQ ID NO: 2195 - protein, 9 aa, Homo sapiens
  Table A; Target 2195; HLA-A*02:04; ABCB5; ENSG00000004846; TAA
SGAAHLFAL

SEQ ID NO: 2196 - protein, 9 aa, Homo sapiens
  Table A; Target 2196; HLA-C*16:01; ABCB5; ENSG00000004846; TAA
SGAAHLFAL

SEQ ID NO: 2197 - protein, 9 aa, Homo sapiens
  Table A; Target 2197; HLA-B*08:01; ABCB5; ENSG00000004846; TAA
SGCGKSTSV

SEQ ID NO: 2198 - protein, 9 aa, Homo sapiens
  Table A; Target 2198; HLA-A*29:02; ABCB5; ENSG00000004846; TAA
SHAFIYFAY

SEQ ID NO: 2199 - protein, 8 aa, Homo sapiens
  Table A; Target 2199; HLA-A*30:02; ABCB5; ENSG00000004846; TAA
SIAENIAY

SEQ ID NO: 2200 - protein, 8 aa, Homo sapiens
  Table A; Target 2200; HLA-B*15:01; ABCB5; ENSG00000004846; TAA
SIAENIAY

SEQ ID NO: 2201 - protein, 8 aa, Homo sapiens
  Table A; Target 2201; HLA-B*39:01; ABCB5; ENSG00000004846; TAA
SIAENIAY

SEQ ID NO: 2202 - protein, 8 aa, Homo sapiens
  Table A; Target 2202; HLA-B*46:01; ABCB5; ENSG00000004846; TAA
SIAENIAY

SEQ ID NO: 2203 - protein, 8 aa, Homo sapiens
  Table A; Target 2203; HLA-C*01:02; ABCB5; ENSG00000004846; TAA
SIAENIAY

SEQ ID NO: 2204 - protein, 8 aa, Homo sapiens
  Table A; Target 2204; HLA-C*03:03; ABCB5; ENSG00000004846; TAA
SIAENIAY

SEQ ID NO: 2205 - protein, 8 aa, Homo sapiens
  Table A; Target 2205; HLA-C*07:04; ABCB5; ENSG00000004846; TAA
SIAENIAY

SEQ ID NO: 2206 - protein, 8 aa, Homo sapiens
  Table A; Target 2206; HLA-C*14:02; ABCB5; ENSG00000004846; TAA
SIAENIAY

SEQ ID NO: 2207 - protein, 8 aa, Homo sapiens
  Table A; Target 2207; HLA-C*16:01; ABCB5; ENSG00000004846; TAA
SIAENIAY

SEQ ID NO: 2208 - protein, 9 aa, Homo sapiens
  Table A; Target 2208; HLA-A*26:01; ABCB5; ENSG00000004846; TAA
SIAENIAYG

SEQ ID NO: 2209 - protein, 8 aa, Homo sapiens
  Table A; Target 2209; HLA-A*02:03; ABCB5; ENSG00000004846; TAA
SIAPVLAV

SEQ ID NO: 2210 - protein, 8 aa, Homo sapiens
  Table A; Target 2210; HLA-B*13:02; ABCB5; ENSG00000004846; TAA
SIAPVLAV

SEQ ID NO: 2211 - protein, 9 aa, Homo sapiens
  Table A; Target 2211; HLA-B*46:01; ABCB5; ENSG00000004846; TAA
SIAPVLAVT

SEQ ID NO: 2212 - protein, 11 aa, Homo sapiens
  Table A; Target 2212; HLA-A*26:01; ABCB5; ENSG00000004846; TAA
SIAPVLAVTGM

SEQ ID NO: 2213 - protein, 8 aa, Homo sapiens
  Table A; Target 2213; HLA-C*05:01; ABCB5; ENSG00000004846; TAA
SIDNFSTA

SEQ ID NO: 2214 - protein, 10 aa, Homo sapiens
  Table A; Target 2214; HLA-A*01:01; ABCB5; ENSG00000004846; TAA
SIDNFSTAGY

SEQ ID NO: 2215 - protein, 10 aa, Homo sapiens
  Table A; Target 2215; HLA-A*25:01; ABCB5; ENSG00000004846; TAA
SIDNFSTAGY

SEQ ID NO: 2216 - protein, 10 aa, Homo sapiens
  Table A; Target 2216; HLA-A*26:01; ABCB5; ENSG00000004846; TAA
SIDNFSTAGY

SEQ ID NO: 2217 - protein, 10 aa, Homo sapiens
  Table A; Target 2217; HLA-A*29:02; ABCB5; ENSG00000004846; TAA
SIDNFSTAGY

SEQ ID NO: 2218 - protein, 10 aa, Homo sapiens
  Table A; Target 2218; HLA-A*30:02; ABCB5; ENSG00000004846; TAA
SIDNFSTAGY

SEQ ID NO: 2219 - protein, 10 aa, Homo sapiens
  Table A; Target 2219; HLA-A*32:01; ABCB5; ENSG00000004846; TAA
SIDNFSTAGY

SEQ ID NO: 2220 - protein, 10 aa, Homo sapiens
  Table A; Target 2220; HLA-B*15:01; ABCB5; ENSG00000004846; TAA
SIDNFSTAGY

SEQ ID NO: 2221 - protein, 10 aa, Homo sapiens
  Table A; Target 2221; HLA-B*46:01; ABCB5; ENSG00000004846; TAA
SIDNFSTAGY

SEQ ID NO: 2222 - protein, 10 aa, Homo sapiens
  Table A; Target 2222; HLA-C*07:04; ABCB5; ENSG00000004846; TAA
SIDNFSTAGY

SEQ ID NO: 2223 - protein, 11 aa, Homo sapiens
  Table A; Target 2223; HLA-A*03:01; ABCB5; ENSG00000004846; TAA
SIDNFSTAGYK

SEQ ID NO: 2224 - protein, 11 aa, Homo sapiens
  Table A; Target 2224; HLA-A*03:02; ABCB5; ENSG00000004846; TAA
SIDNFSTAGYK

SEQ ID NO: 2225 - protein, 11 aa, Homo sapiens
  Table A; Target 2225; HLA-A*11:01; ABCB5; ENSG00000004846; TAA
SIDNFSTAGYK

SEQ ID NO: 2226 - protein, 8 aa, Homo sapiens
  Table A; Target 2226; HLA-C*05:01; ABCB5; ENSG00000004846; TAA
SIEGTVEF

SEQ ID NO: 2227 - protein, 9 aa, Homo sapiens
  Table A; Target 2227; HLA-A*03:02; ABCB5; ENSG00000004846; TAA
SIEGTVEFK

SEQ ID NO: 2228 - protein, 9 aa, Homo sapiens
  Table A; Target 2228; HLA-A*11:01; ABCB5; ENSG00000004846; TAA
SIEGTVEFK

SEQ ID NO: 2229 - protein, 8 aa, Homo sapiens
  Table A; Target 2229; HLA-C*01:02; ABCB5; ENSG00000004846; TAA
SIGLAVGL

SEQ ID NO: 2230 - protein, 10 aa, Homo sapiens
  Table A; Target 2230; HLA-A*03:01; ABCB5; ENSG00000004846; TAA
SIGLAVGLVK

SEQ ID NO: 2231 - protein, 10 aa, Homo sapiens
  Table A; Target 2231; HLA-A*03:02; ABCB5; ENSG00000004846; TAA
SIGLAVGLVK

SEQ ID NO: 2232 - protein, 10 aa, Homo sapiens
  Table A; Target 2232; HLA-A*11:01; ABCB5; ENSG00000004846; TAA
SIGLAVGLVK

SEQ ID NO: 2233 - protein, 10 aa, Homo sapiens
  Table A; Target 2233; HLA-B*27:02; ABCB5; ENSG00000004846; TAA
SIGLAVGLVK

SEQ ID NO: 2234 - protein, 9 aa, Homo sapiens
  Table A; Target 2234; HLA-A*03:01; ABCB5; ENSG00000004846; TAA
SIKSDFIDK

SEQ ID NO: 2235 - protein, 9 aa, Homo sapiens
  Table A; Target 2235; HLA-A*03:02; ABCB5; ENSG00000004846; TAA
SIKSDFIDK

SEQ ID NO: 2236 - protein, 9 aa, Homo sapiens
  Table A; Target 2236; HLA-A*11:01; ABCB5; ENSG00000004846; TAA
SIKSDFIDK

SEQ ID NO: 2237 - protein, 9 aa, Homo sapiens
  Table A; Target 2237; HLA-A*31:01; ABCB5; ENSG00000004846; TAA
SIKSDFIDK

SEQ ID NO: 2238 - protein, 9 aa, Homo sapiens
  Table A; Target 2238; HLA-A*33:01; ABCB5; ENSG00000004846; TAA
SIKSDFIDK

SEQ ID NO: 2239 - protein, 9 aa, Homo sapiens
  Table A; Target 2239; HLA-A*68:01; ABCB5; ENSG00000004846; TAA
SIKSDFIDK

SEQ ID NO: 2240 - protein, 9 aa, Homo sapiens
  Table A; Target 2240; HLA-B*27:02; ABCB5; ENSG00000004846; TAA
SIKSDFIDK

SEQ ID NO: 2241 - protein, 8 aa, Homo sapiens
  Table A; Target 2241; HLA-B*08:01; ABCB5; ENSG00000004846; TAA
SIRTVIAF

SEQ ID NO: 2242 - protein, 8 aa, Homo sapiens
  Table A; Target 2242; HLA-B*15:01; ABCB5; ENSG00000004846; TAA
SIRTVIAF

SEQ ID NO: 2243 - protein, 8 aa, Homo sapiens
  Table A; Target 2243; HLA-B*37:01; ABCB5; ENSG00000004846; TAA
SIRTVIAF

SEQ ID NO: 2244 - protein, 9 aa, Homo sapiens
  Table A; Target 2244; HLA-A*03:01; ABCB5; ENSG00000004846; TAA
SIRTVIAFR

SEQ ID NO: 2245 - protein, 9 aa, Homo sapiens
  Table A; Target 2245; HLA-A*31:01; ABCB5; ENSG00000004846; TAA
SIRTVIAFR

SEQ ID NO: 2246 - protein, 9 aa, Homo sapiens
  Table A; Target 2246; HLA-A*33:01; ABCB5; ENSG00000004846; TAA
SIRTVIAFR

SEQ ID NO: 2247 - protein, 9 aa, Homo sapiens
  Table A; Target 2247; HLA-A*33:03; ABCB5; ENSG00000004846; TAA
SIRTVIAFR

SEQ ID NO: 2248 - protein, 11 aa, Homo sapiens
  Table A; Target 2248; HLA-B*38:01; ABCB5; ENSG00000004846; TAA
SKAGAVAEEVL

SEQ ID NO: 2249 - protein, 9 aa, Homo sapiens
  Table A; Target 2249; HLA-B*15:03; ABCB5; ENSG00000004846; TAA
SKSAVQAAL

SEQ ID NO: 2250 - protein, 9 aa, Homo sapiens
  Table A; Target 2250; HLA-B*38:01; ABCB5; ENSG00000004846; TAA
SKSAVQAAL

SEQ ID NO: 2251 - protein, 9 aa, Homo sapiens
  Table A; Target 2251; HLA-B*39:01; ABCB5; ENSG00000004846; TAA
SKSAVQAAL

SEQ ID NO: 2252 - protein, 9 aa, Homo sapiens
  Table A; Target 2252; HLA-C*01:02; ABCB5; ENSG00000004846; TAA
SKSAVQAAL

SEQ ID NO: 2253 - protein, 9 aa, Homo sapiens
  Table A; Target 2253; HLA-B*15:03; ABCB5; ENSG00000004846; TAA
SKVSLGAVY

SEQ ID NO: 2254 - protein, 10 aa, Homo sapiens
  Table A; Target 2254; HLA-B*15:03; ABCB5; ENSG00000004846; TAA
SKVSLGAVYF

SEQ ID NO: 2255 - protein, 9 aa, Homo sapiens
  Table A; Target 2255; HLA-A*02:04; ABCB5; ENSG00000004846; TAA
SLGAVYFFM

SEQ ID NO: 2256 - protein, 9 aa, Homo sapiens
  Table A; Target 2256; HLA-A*02:07; ABCB5; ENSG00000004846; TAA
SLGAVYFFM

SEQ ID NO: 2257 - protein, 10 aa, Homo sapiens
  Table A; Target 2257; HLA-A*30:02; ABCB5; ENSG00000004846; TAA
SLILNGEPGY

SEQ ID NO: 2258 - protein, 10 aa, Homo sapiens
  Table A; Target 2258; HLA-B*15:01; ABCB5; ENSG00000004846; TAA
SLILNGEPGY

SEQ ID NO: 2259 - protein, 8 aa, Homo sapiens
  Table A; Target 2259; HLA-A*02:04; ABCB5; ENSG00000004846; TAA
SLLKILKL

SEQ ID NO: 2260 - protein, 8 aa, Homo sapiens
  Table A; Target 2260; HLA-A*02:07; ABCB5; ENSG00000004846; TAA
SLPEVSLL

SEQ ID NO: 2261 - protein, 9 aa, Homo sapiens
  Table A; Target 2261; HLA-A*03:01; ABCB5; ENSG00000004846; TAA
SLPEVSLLK

SEQ ID NO: 2262 - protein, 9 aa, Homo sapiens
  Table A; Target 2262; HLA-A*03:02; ABCB5; ENSG00000004846; TAA
SLPEVSLLK

SEQ ID NO: 2263 - protein, 9 aa, Homo sapiens
  Table A; Target 2263; HLA-A*11:01; ABCB5; ENSG00000004846; TAA
SLPEVSLLK

SEQ ID NO: 2264 - protein, 10 aa, Homo sapiens
  Table A; Target 2264; HLA-A*02:03; ABCB5; ENSG00000004846; TAA
SLPEVSLLKI

SEQ ID NO: 2265 - protein, 10 aa, Homo sapiens
  Table A; Target 2265; HLA-A*02:07; ABCB5; ENSG00000004846; TAA
SLPEVSLLKI

SEQ ID NO: 2266 - protein, 11 aa, Homo sapiens
  Table A; Target 2266; HLA-A*02:04; ABCB5; ENSG00000004846; TAA
SLPEVSLLKIL

SEQ ID NO: 2267 - protein, 11 aa, Homo sapiens
  Table A; Target 2267; HLA-A*02:07; ABCB5; ENSG00000004846; TAA
SLPEVSLLKIL

SEQ ID NO: 2268 - protein, 8 aa, Homo sapiens
  Table A; Target 2268; HLA-C*07:01; ABCB5; ENSG00000004846; TAA
SLPLHSVK

SEQ ID NO: 2269 - protein, 10 aa, Homo sapiens
  Table A; Target 2269; HLA-A*01:01; ABCB5; ENSG00000004846; TAA
SLTSKELSAY

SEQ ID NO: 2270 - protein, 10 aa, Homo sapiens
  Table A; Target 2270; HLA-A*25:01; ABCB5; ENSG00000004846; TAA
SLTSKELSAY

SEQ ID NO: 2271 - protein, 10 aa, Homo sapiens
  Table A; Target 2271; HLA-A*30:02; ABCB5; ENSG00000004846; TAA
SLTSKELSAY

SEQ ID NO: 2272 - protein, 10 aa, Homo sapiens
  Table A; Target 2272; HLA-B*15:01; ABCB5; ENSG00000004846; TAA
SLTSKELSAY

SEQ ID NO: 2273 - protein, 10 aa, Homo sapiens
  Table A; Target 2273; HLA-B*15:03; ABCB5; ENSG00000004846; TAA
SLTSKELSAY

SEQ ID NO: 2274 - protein, 10 aa, Homo sapiens
  Table A; Target 2274; HLA-B*46:01; ABCB5; ENSG00000004846; TAA
SLTSKELSAY

SEQ ID NO: 2275 - protein, 9 aa, Homo sapiens
  Table A; Target 2275; HLA-A*31:01; ABCB5; ENSG00000004846; TAA
SLWIITAAR

SEQ ID NO: 2276 - protein, 9 aa, Homo sapiens
  Table A; Target 2276; HLA-A*02:01; ABCB5; ENSG00000004846; TAA
SMIFVILGV

SEQ ID NO: 2277 - protein, 9 aa, Homo sapiens
  Table A; Target 2277; HLA-A*02:03; ABCB5; ENSG00000004846; TAA
SMIFVILGV

SEQ ID NO: 2278 - protein, 9 aa, Homo sapiens
  Table A; Target 2278; HLA-A*02:04; ABCB5; ENSG00000004846; TAA
SMIFVILGV

SEQ ID NO: 2279 - protein, 9 aa, Homo sapiens
  Table A; Target 2279; HLA-A*02:07; ABCB5; ENSG00000004846; TAA
SMIFVILGV

SEQ ID NO: 2280 - protein, 9 aa, Homo sapiens
  Table A; Target 2280; HLA-B*13:02; ABCB5; ENSG00000004846; TAA
SMIFVILGV

SEQ ID NO: 2281 - protein, 9 aa, Homo sapiens
  Table A; Target 2281; HLA-A*03:02; ABCB5; ENSG00000004846; TAA
SMTYSTERK

SEQ ID NO: 2282 - protein, 8 aa, Homo sapiens
  Table A; Target 2282; HLA-B*54:01; ABCB5; ENSG00000004846; TAA
SPLIMASA

SEQ ID NO: 2283 - protein, 8 aa, Homo sapiens
  Table A; Target 2283; HLA-B*55:01; ABCB5; ENSG00000004846; TAA
SPLIMASA

SEQ ID NO: 2284 - protein, 8 aa, Homo sapiens
  Table A; Target 2284; HLA-B*56:01; ABCB5; ENSG00000004846; TAA
SPLIMASA

SEQ ID NO: 2285 - protein, 9 aa, Homo sapiens
  Table A; Target 2285; HLA-B*54:01; ABCB5; ENSG00000004846; TAA
SPLIMASAA

SEQ ID NO: 2286 - protein, 9 aa, Homo sapiens
  Table A; Target 2286; HLA-B*55:01; ABCB5; ENSG00000004846; TAA
SPLIMASAA

SEQ ID NO: 2287 - protein, 9 aa, Homo sapiens
  Table A; Target 2287; HLA-B*56:01; ABCB5; ENSG00000004846; TAA
SPLIMASAA

SEQ ID NO: 2288 - protein, 10 aa, Homo sapiens
  Table A; Target 2288; HLA-B*56:01; ABCB5; ENSG00000004846; TAA
SPLIMASAAA

SEQ ID NO: 2289 - protein, 11 aa, Homo sapiens
  Table A; Target 2289; HLA-B*38:01; ABCB5; ENSG00000004846; TAA
SQEKLNEDMTL

SEQ ID NO: 2290 - protein, 11 aa, Homo sapiens
  Table A; Target 2290; HLA-B*38:01; ABCB5; ENSG00000004846; TAA
SQEPVLFGTTI

SEQ ID NO: 2291 - protein, 9 aa, Homo sapiens
  Table A; Target 2291; HLA-B*27:05; ABCB5; ENSG00000004846; TAA
SRIGVLTQN

SEQ ID NO: 2292 - protein, 10 aa, Homo sapiens
  Table A; Target 2292; HLA-B*27:05; ABCB5; ENSG00000004846; TAA
SRIGVLTQNA

SEQ ID NO: 2293 - protein, 10 aa, Homo sapiens
  Table A; Target 2293; HLA-B*27:05; ABCB5; ENSG00000004846; TAA
SRMVISLTSK

SEQ ID NO: 2294 - protein, 9 aa, Homo sapiens
  Table A; Target 2294; HLA-C*16:04; ABCB5; ENSG00000004846; TAA
SRVVPLDEI

SEQ ID NO: 2295 - protein, 9 aa, Homo sapiens
  Table A; Target 2295; HLA-A*23:01; ABCB5; ENSG00000004846; TAA
SSIRTVIAF

SEQ ID NO: 2296 - protein, 9 aa, Homo sapiens
  Table A; Target 2296; HLA-A*25:01; ABCB5; ENSG00000004846; TAA
SSIRTVIAF

SEQ ID NO: 2297 - protein, 9 aa, Homo sapiens
  Table A; Target 2297; HLA-A*26:01; ABCB5; ENSG00000004846; TAA
SSIRTVIAF

SEQ ID NO: 2298 - protein, 9 aa, Homo sapiens
  Table A; Target 2298; HLA-A*32:01; ABCB5; ENSG00000004846; TAA
SSIRTVIAF

SEQ ID NO: 2299 - protein, 9 aa, Homo sapiens
  Table A; Target 2299; HLA-B*15:01; ABCB5; ENSG00000004846; TAA
SSIRTVIAF

SEQ ID NO: 2300 - protein, 9 aa, Homo sapiens
  Table A; Target 2300; HLA-B*15:03; ABCB5; ENSG00000004846; TAA
SSIRTVIAF

SEQ ID NO: 2301 - protein, 9 aa, Homo sapiens
  Table A; Target 2301; HLA-B*44:02; ABCB5; ENSG00000004846; TAA
SSIRTVIAF

SEQ ID NO: 2302 - protein, 9 aa, Homo sapiens
  Table A; Target 2302; HLA-B*44:03; ABCB5; ENSG00000004846; TAA
SSIRTVIAF

SEQ ID NO: 2303 - protein, 9 aa, Homo sapiens
  Table A; Target 2303; HLA-B*46:01; ABCB5; ENSG00000004846; TAA
SSIRTVIAF

SEQ ID NO: 2304 - protein, 9 aa, Homo sapiens
  Table A; Target 2304; HLA-B*57:01; ABCB5; ENSG00000004846; TAA
SSIRTVIAF

SEQ ID NO: 2305 - protein, 9 aa, Homo sapiens
  Table A; Target 2305; HLA-B*58:01; ABCB5; ENSG00000004846; TAA
SSIRTVIAF

SEQ ID NO: 2306 - protein, 9 aa, Homo sapiens
  Table A; Target 2306; HLA-C*01:02; ABCB5; ENSG00000004846; TAA
SSIRTVIAF

SEQ ID NO: 2307 - protein, 9 aa, Homo sapiens
  Table A; Target 2307; HLA-C*02:02; ABCB5; ENSG00000004846; TAA
SSIRTVIAF

SEQ ID NO: 2308 - protein, 9 aa, Homo sapiens
  Table A; Target 2308; HLA-C*03:04; ABCB5; ENSG00000004846; TAA
SSIRTVIAF

SEQ ID NO: 2309 - protein, 9 aa, Homo sapiens
  Table A; Target 2309; HLA-C*12:03; ABCB5; ENSG00000004846; TAA
SSIRTVIAF

SEQ ID NO: 2310 - protein, 9 aa, Homo sapiens
  Table A; Target 2310; HLA-C*16:01; ABCB5; ENSG00000004846; TAA
SSIRTVIAF

SEQ ID NO: 2311 - protein, 10 aa, Homo sapiens
  Table A; Target 2311; HLA-A*31:01; ABCB5; ENSG00000004846; TAA
SSIRTVIAFR

SEQ ID NO: 2312 - protein, 9 aa, Homo sapiens
  Table A; Target 2312; HLA-A*02:03; ABCB5; ENSG00000004846; TAA
STFSIGLAV

SEQ ID NO: 2313 - protein, 9 aa, Homo sapiens
  Table A; Target 2313; HLA-A*03:01; ABCB5; ENSG00000004846; TAA
STFSIGLAV

SEQ ID NO: 2314 - protein, 9 aa, Homo sapiens
  Table A; Target 2314; HLA-A*11:01; ABCB5; ENSG00000004846; TAA
STFSIGLAV

SEQ ID NO: 2315 - protein, 9 aa, Homo sapiens
  Table A; Target 2315; HLA-A*26:01; ABCB5; ENSG00000004846; TAA
STFSIGLAV

SEQ ID NO: 2316 - protein, 9 aa, Homo sapiens
  Table A; Target 2316; HLA-A*68:02; ABCB5; ENSG00000004846; TAA
STFSIGLAV

SEQ ID NO: 2317 - protein, 9 aa, Homo sapiens
  Table A; Target 2317; HLA-B*13:02; ABCB5; ENSG00000004846; TAA
STFSIGLAV

SEQ ID NO: 2318 - protein, 9 aa, Homo sapiens
  Table A; Target 2318; HLA-B*54:01; ABCB5; ENSG00000004846; TAA
STFSIGLAV

SEQ ID NO: 2319 - protein, 9 aa, Homo sapiens
  Table A; Target 2319; HLA-B*56:01; ABCB5; ENSG00000004846; TAA
STFSIGLAV

SEQ ID NO: 2320 - protein, 9 aa, Homo sapiens
  Table A; Target 2320; HLA-C*02:02; ABCB5; ENSG00000004846; TAA
STFSIGLAV

SEQ ID NO: 2321 - protein, 9 aa, Homo sapiens
  Table A; Target 2321; HLA-C*03:03; ABCB5; ENSG00000004846; TAA
STFSIGLAV

SEQ ID NO: 2322 - protein, 9 aa, Homo sapiens
  Table A; Target 2322; HLA-C*03:04; ABCB5; ENSG00000004846; TAA
STFSIGLAV

SEQ ID NO: 2323 - protein, 9 aa, Homo sapiens
  Table A; Target 2323; HLA-C*12:03; ABCB5; ENSG00000004846; TAA
STFSIGLAV

SEQ ID NO: 2324 - protein, 9 aa, Homo sapiens
  Table A; Target 2324; HLA-C*16:04; ABCB5; ENSG00000004846; TAA
STFSIGLAV

SEQ ID NO: 2325 - protein, 11 aa, Homo sapiens
  Table A; Target 2325; HLA-A*02:04; ABCB5; ENSG00000004846; TAA
STFSIGLAVGL

SEQ ID NO: 2326 - protein, 11 aa, Homo sapiens
  Table A; Target 2326; HLA-A*68:02; ABCB5; ENSG00000004846; TAA
STFSIGLAVGL

SEQ ID NO: 2327 - protein, 9 aa, Homo sapiens
  Table A; Target 2327; HLA-C*07:04; ABCB5; ENSG00000004846; TAA
STGGLTTIL

SEQ ID NO: 2328 - protein, 8 aa, Homo sapiens
  Table A; Target 2328; HLA-C*03:03; ABCB5; ENSG00000004846; TAA
STIRSADL

SEQ ID NO: 2329 - protein, 9 aa, Homo sapiens
  Table A; Target 2329; HLA-B*58:01; ABCB5; ENSG00000004846; TAA
STIRSADLI

SEQ ID NO: 2330 - protein, 9 aa, Homo sapiens
  Table A; Target 2330; HLA-A*11:01; ABCB5; ENSG00000004846; TAA
STSPLIMAS

SEQ ID NO: 2331 - protein, 10 aa, Homo sapiens
  Table A; Target 2331; HLA-A*68:02; ABCB5; ENSG00000004846; TAA
STSPLIMASA

SEQ ID NO: 2332 - protein, 10 aa, Homo sapiens
  Table A; Target 2332; HLA-B*56:01; ABCB5; ENSG00000004846; TAA
STSPLIMASA

SEQ ID NO: 2333 - protein, 9 aa, Homo sapiens
  Table A; Target 2333; HLA-A*03:01; ABCB5; ENSG00000004846; TAA
STSVQLLQR

SEQ ID NO: 2334 - protein, 9 aa, Homo sapiens
  Table A; Target 2334; HLA-A*11:01; ABCB5; ENSG00000004846; TAA
STSVQLLQR

SEQ ID NO: 2335 - protein, 9 aa, Homo sapiens
  Table A; Target 2335; HLA-A*31:01; ABCB5; ENSG00000004846; TAA
STSVQLLQR

SEQ ID NO: 2336 - protein, 9 aa, Homo sapiens
  Table A; Target 2336; HLA-A*33:01; ABCB5; ENSG00000004846; TAA
STSVQLLQR

SEQ ID NO: 2337 - protein, 9 aa, Homo sapiens
  Table A; Target 2337; HLA-A*33:03; ABCB5; ENSG00000004846; TAA
STSVQLLQR

SEQ ID NO: 2338 - protein, 9 aa, Homo sapiens
  Table A; Target 2338; HLA-A*68:01; ABCB5; ENSG00000004846; TAA
STSVQLLQR

SEQ ID NO: 2339 - protein, 9 aa, Homo sapiens
  Table A; Target 2339; HLA-C*07:06; ABCB5; ENSG00000004846; TAA
STSVQLLQR

SEQ ID NO: 2340 - protein, 9 aa, Homo sapiens
  Table A; Target 2340; HLA-A*11:01; ABCB5; ENSG00000004846; TAA
STVVQLLQR

SEQ ID NO: 2341 - protein, 9 aa, Homo sapiens
  Table A; Target 2341; HLA-A*31:01; ABCB5; ENSG00000004846; TAA
STVVQLLQR

SEQ ID NO: 2342 - protein, 9 aa, Homo sapiens
  Table A; Target 2342; HLA-A*33:01; ABCB5; ENSG00000004846; TAA
STVVQLLQR

SEQ ID NO: 2343 - protein, 9 aa, Homo sapiens
  Table A; Target 2343; HLA-A*33:03; ABCB5; ENSG00000004846; TAA
STVVQLLQR

SEQ ID NO: 2344 - protein, 9 aa, Homo sapiens
  Table A; Target 2344; HLA-A*68:01; ABCB5; ENSG00000004846; TAA
STVVQLLQR

SEQ ID NO: 2345 - protein, 9 aa, Homo sapiens
  Table A; Target 2345; HLA-C*07:06; ABCB5; ENSG00000004846; TAA
STVVQLLQR

SEQ ID NO: 2346 - protein, 9 aa, Homo sapiens
  Table A; Target 2346; HLA-B*13:02; ABCB5; ENSG00000004846; TAA
SVIHSSYCI

SEQ ID NO: 2347 - protein, 9 aa, Homo sapiens
  Table A; Target 2347; HLA-A*30:02; ABCB5; ENSG00000004846; TAA
SVKSIKSDF

SEQ ID NO: 2348 - protein, 9 aa, Homo sapiens
  Table A; Target 2348; HLA-A*32:01; ABCB5; ENSG00000004846; TAA
SVKSIKSDF

SEQ ID NO: 2349 - protein, 9 aa, Homo sapiens
  Table A; Target 2349; HLA-B*46:01; ABCB5; ENSG00000004846; TAA
SVKSIKSDF

SEQ ID NO: 2350 - protein, 9 aa, Homo sapiens
  Table A; Target 2350; HLA-B*57:01; ABCB5; ENSG00000004846; TAA
SVLAQDIGW

SEQ ID NO: 2351 - protein, 9 aa, Homo sapiens
  Table A; Target 2351; HLA-B*58:01; ABCB5; ENSG00000004846; TAA
SVLAQDIGW

SEQ ID NO: 2352 - protein, 10 aa, Homo sapiens
  Table A; Target 2352; HLA-A*02:01; ABCB5; ENSG00000004846; TAA
SVLNGTVHPV

SEQ ID NO: 2353 - protein, 11 aa, Homo sapiens
  Table A; Target 2353; HLA-A*23:01; ABCB5; ENSG00000004846; TAA
SVLNGTVHPVF

SEQ ID NO: 2354 - protein, 11 aa, Homo sapiens
  Table A; Target 2354; HLA-A*25:01; ABCB5; ENSG00000004846; TAA
SVLNGTVHPVF

SEQ ID NO: 2355 - protein, 11 aa, Homo sapiens
  Table A; Target 2355; HLA-A*29:02; ABCB5; ENSG00000004846; TAA
SVLNGTVHPVF

SEQ ID NO: 2356 - protein, 11 aa, Homo sapiens
  Table A; Target 2356; HLA-A*30:02; ABCB5; ENSG00000004846; TAA
SVLNGTVHPVF

SEQ ID NO: 2357 - protein, 11 aa, Homo sapiens
  Table A; Target 2357; HLA-A*32:01; ABCB5; ENSG00000004846; TAA
SVLNGTVHPVF

SEQ ID NO: 2358 - protein, 11 aa, Homo sapiens
  Table A; Target 2358; HLA-B*57:01; ABCB5; ENSG00000004846; TAA
SVLNGTVHPVF

SEQ ID NO: 2359 - protein, 11 aa, Homo sapiens
  Table A; Target 2359; HLA-B*58:01; ABCB5; ENSG00000004846; TAA
SVLNGTVHPVF

SEQ ID NO: 2360 - protein, 9 aa, Homo sapiens
  Table A; Target 2360; HLA-A*29:02; ABCB5; ENSG00000004846; TAA
SVQLLQRLY

SEQ ID NO: 2361 - protein, 9 aa, Homo sapiens
  Table A; Target 2361; HLA-A*30:02; ABCB5; ENSG00000004846; TAA
SVQLLQRLY

SEQ ID NO: 2362 - protein, 8 aa, Homo sapiens
  Table A; Target 2362; HLA-C*14:02; ABCB5; ENSG00000004846; TAA
SYCIGAAV

SEQ ID NO: 2363 - protein, 9 aa, Homo sapiens
  Table A; Target 2363; HLA-A*24:02; ABCB5; ENSG00000004846; TAA
SYFMQGLFY

SEQ ID NO: 2364 - protein, 9 aa, Homo sapiens
  Table A; Target 2364; HLA-A*29:02; ABCB5; ENSG00000004846; TAA
SYFMQGLFY

SEQ ID NO: 2365 - protein, 9 aa, Homo sapiens
  Table A; Target 2365; HLA-A*30:02; ABCB5; ENSG00000004846; TAA
SYFMQGLFY

SEQ ID NO: 2366 - protein, 11 aa, Homo sapiens
  Table A; Target 2366; HLA-A*31:01; ABCB5; ENSG00000004846; TAA
SYFMQGLFYGR

SEQ ID NO: 2367 - protein, 10 aa, Homo sapiens
  Table A; Target 2367; HLA-A*03:02; ABCB5; ENSG00000004846; TAA
TAAMTGFANK

SEQ ID NO: 2368 - protein, 10 aa, Homo sapiens
  Table A; Target 2368; HLA-A*11:01; ABCB5; ENSG00000004846; TAA
TAAMTGFANK

SEQ ID NO: 2369 - protein, 10 aa, Homo sapiens
  Table A; Target 2369; HLA-A*68:01; ABCB5; ENSG00000004846; TAA
TAAMTGFANK

SEQ ID NO: 2370 - protein, 9 aa, Homo sapiens
  Table A; Target 2370; HLA-B*51:01; ABCB5; ENSG00000004846; TAA
TAARQTKRI

SEQ ID NO: 2371 - protein, 8 aa, Homo sapiens
  Table A; Target 2371; HLA-B*35:03; ABCB5; ENSG00000004846; TAA
TAEEQPKL

SEQ ID NO: 2372 - protein, 8 aa, Homo sapiens
  Table A; Target 2372; HLA-B*51:01; ABCB5; ENSG00000004846; TAA
TAEEQPKL

SEQ ID NO: 2373 - protein, 8 aa, Homo sapiens
  Table A; Target 2373; HLA-C*03:03; ABCB5; ENSG00000004846; TAA
TAEEQPKL

SEQ ID NO: 2374 - protein, 8 aa, Homo sapiens
  Table A; Target 2374; HLA-C*03:04; ABCB5; ENSG00000004846; TAA
TAEEQPKL

SEQ ID NO: 2375 - protein, 8 aa, Homo sapiens
  Table A; Target 2375; HLA-C*05:01; ABCB5; ENSG00000004846; TAA
TAEEQPKL

SEQ ID NO: 2376 - protein, 8 aa, Homo sapiens
  Table A; Target 2376; HLA-C*16:02; ABCB5; ENSG00000004846; TAA
TAEEQPKL

SEQ ID NO: 2377 - protein, 9 aa, Homo sapiens
  Table A; Target 2377; HLA-A*33:01; ABCB5; ENSG00000004846; TAA
TAEEQPKLR

SEQ ID NO: 2378 - protein, 9 aa, Homo sapiens
  Table A; Target 2378; HLA-A*33:03; ABCB5; ENSG00000004846; TAA
TAEEQPKLR

SEQ ID NO: 2379 - protein, 9 aa, Homo sapiens
  Table A; Target 2379; HLA-A*68:01; ABCB5; ENSG00000004846; TAA
TAEEQPKLR

SEQ ID NO: 2380 - protein, 9 aa, Homo sapiens
  Table A; Target 2380; HLA-C*05:01; ABCB5; ENSG00000004846; TAA
TAEEQPKLR

SEQ ID NO: 2381 - protein, 9 aa, Homo sapiens
  Table A; Target 2381; HLA-C*07:06; ABCB5; ENSG00000004846; TAA
TAEEQPKLR

SEQ ID NO: 2382 - protein, 9 aa, Homo sapiens
  Table A; Target 2382; HLA-C*16:02; ABCB5; ENSG00000004846; TAA
TAEEQPKLR

SEQ ID NO: 2383 - protein, 9 aa, Homo sapiens
  Table A; Target 2383; HLA-B*51:01; ABCB5; ENSG00000004846; TAA
TAGYKPESI

SEQ ID NO: 2384 - protein, 8 aa, Homo sapiens
  Table A; Target 2384; HLA-B*39:01; ABCB5; ENSG00000004846; TAA
TAIAYGAM

SEQ ID NO: 2385 - protein, 8 aa, Homo sapiens
  Table A; Target 2385; HLA-B*46:01; ABCB5; ENSG00000004846; TAA
TAIAYGAM

SEQ ID NO: 2386 - protein, 8 aa, Homo sapiens
  Table A; Target 2386; HLA-C*03:04; ABCB5; ENSG00000004846; TAA
TAIAYGAM

SEQ ID NO: 2387 - protein, 9 aa, Homo sapiens
  Table A; Target 2387; HLA-B*35:03; ABCB5; ENSG00000004846; TAA
TAIAYGAMA

SEQ ID NO: 2388 - protein, 9 aa, Homo sapiens
  Table A; Target 2388; HLA-B*54:01; ABCB5; ENSG00000004846; TAA
TAIAYGAMA

SEQ ID NO: 2389 - protein, 9 aa, Homo sapiens
  Table A; Target 2389; HLA-B*56:01; ABCB5; ENSG00000004846; TAA
TAIAYGAMA

SEQ ID NO: 2390 - protein, 9 aa, Homo sapiens
  Table A; Target 2390; HLA-C*03:03; ABCB5; ENSG00000004846; TAA
TAIAYGAMA

SEQ ID NO: 2391 - protein, 9 aa, Homo sapiens
  Table A; Target 2391; HLA-C*03:04; ABCB5; ENSG00000004846; TAA
TAIAYGAMA

SEQ ID NO: 2392 - protein, 10 aa, Homo sapiens
  Table A; Target 2392; HLA-B*07:02; ABCB5; ENSG00000004846; TAA
TAIAYGAMAI

SEQ ID NO: 2393 - protein, 10 aa, Homo sapiens
  Table A; Target 2393; HLA-B*49:01; ABCB5; ENSG00000004846; TAA
TAIAYGAMAI

SEQ ID NO: 2394 - protein, 10 aa, Homo sapiens
  Table A; Target 2394; HLA-B*51:01; ABCB5; ENSG00000004846; TAA
TAIAYGAMAI

SEQ ID NO: 2395 - protein, 10 aa, Homo sapiens
  Table A; Target 2395; HLA-C*03:03; ABCB5; ENSG00000004846; TAA
TAIAYGAMAI

SEQ ID NO: 2396 - protein, 10 aa, Homo sapiens
  Table A; Target 2396; HLA-C*03:04; ABCB5; ENSG00000004846; TAA
TAIAYGAMAI

SEQ ID NO: 2397 - protein, 10 aa, Homo sapiens
  Table A; Target 2397; HLA-C*06:02; ABCB5; ENSG00000004846; TAA
TAIAYGAMAI

SEQ ID NO: 2398 - protein, 10 aa, Homo sapiens
  Table A; Target 2398; HLA-C*12:03; ABCB5; ENSG00000004846; TAA
TAIAYGAMAI

SEQ ID NO: 2399 - protein, 10 aa, Homo sapiens
  Table A; Target 2399; HLA-C*16:02; ABCB5; ENSG00000004846; TAA
TAIAYGAMAI

SEQ ID NO: 2400 - protein, 10 aa, Homo sapiens
  Table A; Target 2400; HLA-A*30:01; ABCB5; ENSG00000004846; TAA
TEALENIRTI

SEQ ID NO: 2401 - protein, 10 aa, Homo sapiens
  Table A; Target 2401; HLA-B*44:02; ABCB5; ENSG00000004846; TAA
TEALENIRTI

SEQ ID NO: 2402 - protein, 10 aa, Homo sapiens
  Table A; Target 2402; HLA-B*49:01; ABCB5; ENSG00000004846; TAA
TEALENIRTI

SEQ ID NO: 2403 - protein, 8 aa, Homo sapiens
  Table A; Target 2403; HLA-B*37:01; ABCB5; ENSG00000004846; TAA
TERKTNSL

SEQ ID NO: 2404 - protein, 8 aa, Homo sapiens
  Table A; Target 2404; HLA-B*40:02; ABCB5; ENSG00000004846; TAA
TERKTNSL

SEQ ID NO: 2405 - protein, 9 aa, Homo sapiens
  Table A; Target 2405; HLA-B*08:01; ABCB5; ENSG00000004846; TAA
TGMIETAAM

SEQ ID NO: 2406 - protein, 9 aa, Homo sapiens
  Table A; Target 2406; HLA-B*15:01; ABCB5; ENSG00000004846; TAA
TGMIETAAM

SEQ ID NO: 2407 - protein, 9 aa, Homo sapiens
  Table A; Target 2407; HLA-B*15:03; ABCB5; ENSG00000004846; TAA
TGMIETAAM

SEQ ID NO: 2408 - protein, 9 aa, Homo sapiens
  Table A; Target 2408; HLA-B*18:01; ABCB5; ENSG00000004846; TAA
TGMIETAAM

SEQ ID NO: 2409 - protein, 9 aa, Homo sapiens
  Table A; Target 2409; HLA-B*35:01; ABCB5; ENSG00000004846; TAA
TGMIETAAM

SEQ ID NO: 2410 - protein, 9 aa, Homo sapiens
  Table A; Target 2410; HLA-B*35:03; ABCB5; ENSG00000004846; TAA
TGMIETAAM

SEQ ID NO: 2411 - protein, 9 aa, Homo sapiens
  Table A; Target 2411; HLA-B*37:01; ABCB5; ENSG00000004846; TAA
TGMIETAAM

SEQ ID NO: 2412 - protein, 9 aa, Homo sapiens
  Table A; Target 2412; HLA-B*39:01; ABCB5; ENSG00000004846; TAA
TGMIETAAM

SEQ ID NO: 2413 - protein, 9 aa, Homo sapiens
  Table A; Target 2413; HLA-B*46:01; ABCB5; ENSG00000004846; TAA
TGMIETAAM

SEQ ID NO: 2414 - protein, 9 aa, Homo sapiens
  Table A; Target 2414; HLA-B*55:01; ABCB5; ENSG00000004846; TAA
TGMIETAAM

SEQ ID NO: 2415 - protein, 9 aa, Homo sapiens
  Table A; Target 2415; HLA-C*01:02; ABCB5; ENSG00000004846; TAA
TGMIETAAM

SEQ ID NO: 2416 - protein, 9 aa, Homo sapiens
  Table A; Target 2416; HLA-C*03:03; ABCB5; ENSG00000004846; TAA
TGMIETAAM

SEQ ID NO: 2417 - protein, 9 aa, Homo sapiens
  Table A; Target 2417; HLA-C*03:04; ABCB5; ENSG00000004846; TAA
TGMIETAAM

SEQ ID NO: 2418 - protein, 9 aa, Homo sapiens
  Table A; Target 2418; HLA-C*07:04; ABCB5; ENSG00000004846; TAA
TGMIETAAM

SEQ ID NO: 2419 - protein, 9 aa, Homo sapiens
  Table A; Target 2419; HLA-C*14:02; ABCB5; ENSG00000004846; TAA
TGMIETAAM

SEQ ID NO: 2420 - protein, 9 aa, Homo sapiens
  Table A; Target 2420; HLA-C*16:04; ABCB5; ENSG00000004846; TAA
TGMIETAAM

SEQ ID NO: 2421 - protein, 9 aa, Homo sapiens
  Table A; Target 2421; HLA-A*31:01; ABCB5; ENSG00000004846; TAA
THQELLRNR

SEQ ID NO: 2422 - protein, 9 aa, Homo sapiens
  Table A; Target 2422; HLA-A*33:03; ABCB5; ENSG00000004846; TAA
THQELLRNR

SEQ ID NO: 2423 - protein, 8 aa, Homo sapiens
  Table A; Target 2423; HLA-B*07:02; ABCB5; ENSG00000004846; TAA
TIASKVSL

SEQ ID NO: 2424 - protein, 8 aa, Homo sapiens
  Table A; Target 2424; HLA-B*08:01; ABCB5; ENSG00000004846; TAA
TIASKVSL

SEQ ID NO: 2425 - protein, 8 aa, Homo sapiens
  Table A; Target 2425; HLA-C*16:01; ABCB5; ENSG00000004846; TAA
TIASKVSL

SEQ ID NO: 2426 - protein, 9 aa, Homo sapiens
  Table A; Target 2426; HLA-A*23:01; ABCB5; ENSG00000004846; TAA
TIGTVLAVF

SEQ ID NO: 2427 - protein, 9 aa, Homo sapiens
  Table A; Target 2427; HLA-B*46:01; ABCB5; ENSG00000004846; TAA
TIGTVLAVF

SEQ ID NO: 2428 - protein, 9 aa, Homo sapiens
  Table A; Target 2428; HLA-C*07:04; ABCB5; ENSG00000004846; TAA
TIGTVLAVF

SEQ ID NO: 2429 - protein, 10 aa, Homo sapiens
  Table A; Target 2429; HLA-A*02:04; ABCB5; ENSG00000004846; TAA
TILAIDIAQI

SEQ ID NO: 2430 - protein, 11 aa, Homo sapiens
  Table A; Target 2430; HLA-A*31:01; ABCB5; ENSG00000004846; TAA
TIRSADLIVTL

SEQ ID NO: 2431 - protein, 8 aa, Homo sapiens
  Table A; Target 2431; HLA-A*30:02; ABCB5; ENSG00000004846; TAA
TISNNIKY

SEQ ID NO: 2432 - protein, 8 aa, Homo sapiens
  Table A; Target 2432; HLA-C*16:01; ABCB5; ENSG00000004846; TAA
TISNNIKY

SEQ ID NO: 2433 - protein, 10 aa, Homo sapiens
  Table A; Target 2433; HLA-A*68:01; ABCB5; ENSG00000004846; TAA
TISNNIKYGR

SEQ ID NO: 2434 - protein, 9 aa, Homo sapiens
  Table A; Target 2434; HLA-A*03:01; ABCB5; ENSG00000004846; TAA
TIVSLTREK

SEQ ID NO: 2435 - protein, 9 aa, Homo sapiens
  Table A; Target 2435; HLA-A*03:02; ABCB5; ENSG00000004846; TAA
TIVSLTREK

SEQ ID NO: 2436 - protein, 9 aa, Homo sapiens
  Table A; Target 2436; HLA-C*16:01; ABCB5; ENSG00000004846; TAA
TIVSLTREK

SEQ ID NO: 2437 - protein, 9 aa, Homo sapiens
  Table A; Target 2437; HLA-A*02:03; ABCB5; ENSG00000004846; TAA
TLASVLNGT

SEQ ID NO: 2438 - protein, 10 aa, Homo sapiens
  Table A; Target 2438; HLA-A*02:03; ABCB5; ENSG00000004846; TAA
TLASVLNGTV

SEQ ID NO: 2439 - protein, 10 aa, Homo sapiens
  Table A; Target 2439; HLA-A*03:01; ABCB5; ENSG00000004846; TAA
TLKDGMLAEK

SEQ ID NO: 2440 - protein, 9 aa, Homo sapiens
  Table A; Target 2440; HLA-B*15:01; ABCB5; ENSG00000004846; TAA
TLKHDAEIY

SEQ ID NO: 2441 - protein, 8 aa, Homo sapiens
  Table A; Target 2441; HLA-A*02:01; ABCB5; ENSG00000004846; TAA
TLLTLYYV

SEQ ID NO: 2442 - protein, 8 aa, Homo sapiens
  Table A; Target 2442; HLA-A*02:04; ABCB5; ENSG00000004846; TAA
TLLTLYYV

SEQ ID NO: 2443 - protein, 8 aa, Homo sapiens
  Table A; Target 2443; HLA-B*13:02; ABCB5; ENSG00000004846; TAA
TLSTSPLI

SEQ ID NO: 2444 - protein, 9 aa, Homo sapiens
  Table A; Target 2444; HLA-B*13:02; ABCB5; ENSG00000004846; TAA
TLSTSPLIM

SEQ ID NO: 2445 - protein, 9 aa, Homo sapiens
  Table A; Target 2445; HLA-B*35:01; ABCB5; ENSG00000004846; TAA
TLSTSPLIM

SEQ ID NO: 2446 - protein, 9 aa, Homo sapiens
  Table A; Target 2446; HLA-B*35:03; ABCB5; ENSG00000004846; TAA
TLSTSPLIM

SEQ ID NO: 2447 - protein, 9 aa, Homo sapiens
  Table A; Target 2447; HLA-B*39:01; ABCB5; ENSG00000004846; TAA
TLSTSPLIM

SEQ ID NO: 2448 - protein, 9 aa, Homo sapiens
  Table A; Target 2448; HLA-C*03:04; ABCB5; ENSG00000004846; TAA
TLSTSPLIM

SEQ ID NO: 2449 - protein, 9 aa, Homo sapiens
  Table A; Target 2449; HLA-C*07:04; ABCB5; ENSG00000004846; TAA
TLSTSPLIM

SEQ ID NO: 2450 - protein, 9 aa, Homo sapiens
  Table A; Target 2450; HLA-C*12:03; ABCB5; ENSG00000004846; TAA
TLSTSPLIM

SEQ ID NO: 2451 - protein, 9 aa, Homo sapiens
  Table A; Target 2451; HLA-C*16:01; ABCB5; ENSG00000004846; TAA
TLSTSPLIM

SEQ ID NO: 2452 - protein, 10 aa, Homo sapiens
  Table A; Target 2452; HLA-A*02:01; ABCB5; ENSG00000004846; TAA
TLSTSPLIMA

SEQ ID NO: 2453 - protein, 10 aa, Homo sapiens
  Table A; Target 2453; HLA-A*02:03; ABCB5; ENSG00000004846; TAA
TLSTSPLIMA

SEQ ID NO: 2454 - protein, 10 aa, Homo sapiens
  Table A; Target 2454; HLA-A*26:01; ABCB5; ENSG00000004846; TAA
TLVGEKGAQM

SEQ ID NO: 2455 - protein, 10 aa, Homo sapiens
  Table A; Target 2455; HLA-B*15:01; ABCB5; ENSG00000004846; TAA
TLVGEKGAQM

SEQ ID NO: 2456 - protein, 10 aa, Homo sapiens
  Table A; Target 2456; HLA-C*07:04; ABCB5; ENSG00000004846; TAA
TLVGEKGAQM

SEQ ID NO: 2457 - protein, 8 aa, Homo sapiens
  Table A; Target 2457; HLA-B*15:01; ABCB5; ENSG00000004846; TAA
TLVLAPEY

SEQ ID NO: 2458 - protein, 8 aa, Homo sapiens
  Table A; Target 2458; HLA-B*15:03; ABCB5; ENSG00000004846; TAA
TLVLAPEY

SEQ ID NO: 2459 - protein, 8 aa, Homo sapiens
  Table A; Target 2459; HLA-B*18:01; ABCB5; ENSG00000004846; TAA
TLVLAPEY

SEQ ID NO: 2460 - protein, 8 aa, Homo sapiens
  Table A; Target 2460; HLA-B*35:01; ABCB5; ENSG00000004846; TAA
TLVLAPEY

SEQ ID NO: 2461 - protein, 8 aa, Homo sapiens
  Table A; Target 2461; HLA-B*39:01; ABCB5; ENSG00000004846; TAA
TLVLAPEY

SEQ ID NO: 2462 - protein, 8 aa, Homo sapiens
  Table A; Target 2462; HLA-B*46:01; ABCB5; ENSG00000004846; TAA
TLVLAPEY

SEQ ID NO: 2463 - protein, 8 aa, Homo sapiens
  Table A; Target 2463; HLA-C*07:04; ABCB5; ENSG00000004846; TAA
TLVLAPEY

SEQ ID NO: 2464 - protein, 8 aa, Homo sapiens
  Table A; Target 2464; HLA-C*16:01; ABCB5; ENSG00000004846; TAA
TLVLAPEY

SEQ ID NO: 2465 - protein, 10 aa, Homo sapiens
  Table A; Target 2465; HLA-B*27:02; ABCB5; ENSG00000004846; TAA
TLVLAPEYSK

SEQ ID NO: 2466 - protein, 9 aa, Homo sapiens
  Table A; Target 2466; HLA-A*02:01; ABCB5; ENSG00000004846; TAA
TLYYVGIGV

SEQ ID NO: 2467 - protein, 9 aa, Homo sapiens
  Table A; Target 2467; HLA-A*02:03; ABCB5; ENSG00000004846; TAA
TLYYVGIGV

SEQ ID NO: 2468 - protein, 9 aa, Homo sapiens
  Table A; Target 2468; HLA-A*02:04; ABCB5; ENSG00000004846; TAA
TLYYVGIGV

SEQ ID NO: 2469 - protein, 9 aa, Homo sapiens
  Table A; Target 2469; HLA-A*02:07; ABCB5; ENSG00000004846; TAA
TLYYVGIGV

SEQ ID NO: 2470 - protein, 9 aa, Homo sapiens
  Table A; Target 2470; HLA-A*30:01; ABCB5; ENSG00000004846; TAA
TLYYVGIGV

SEQ ID NO: 2471 - protein, 9 aa, Homo sapiens
  Table A; Target 2471; HLA-A*68:02; ABCB5; ENSG00000004846; TAA
TLYYVGIGV

SEQ ID NO: 2472 - protein, 9 aa, Homo sapiens
  Table A; Target 2472; HLA-B*13:02; ABCB5; ENSG00000004846; TAA
TLYYVGIGV

SEQ ID NO: 2473 - protein, 9 aa, Homo sapiens
  Table A; Target 2473; HLA-B*55:01; ABCB5; ENSG00000004846; TAA
TLYYVGIGV

SEQ ID NO: 2474 - protein, 9 aa, Homo sapiens
  Table A; Target 2474; HLA-C*04:01; ABCB5; ENSG00000004846; TAA
TLYYVGIGV

SEQ ID NO: 2475 - protein, 10 aa, Homo sapiens
  Table A; Target 2475; HLA-A*02:03; ABCB5; ENSG00000004846; TAA
TLYYVGIGVA

SEQ ID NO: 2476 - protein, 11 aa, Homo sapiens
  Table A; Target 2476; HLA-B*54:01; ABCB5; ENSG00000004846; TAA
TLYYVGIGVAA

SEQ ID NO: 2477 - protein, 11 aa, Homo sapiens
  Table A; Target 2477; HLA-B*56:01; ABCB5; ENSG00000004846; TAA
TLYYVGIGVAA

SEQ ID NO: 2478 - protein, 11 aa, Homo sapiens
  Table A; Target 2478; HLA-A*02:01; ABCB5; ENSG00000004846; TAA
TMFGNNDKTTL

SEQ ID NO: 2479 - protein, 11 aa, Homo sapiens
  Table A; Target 2479; HLA-A*02:03; ABCB5; ENSG00000004846; TAA
TMFGNNDKTTL

SEQ ID NO: 2480 - protein, 11 aa, Homo sapiens
  Table A; Target 2480; HLA-B*15:01; ABCB5; ENSG00000004846; TAA
TMFGNNDKTTL

SEQ ID NO: 2481 - protein, 11 aa, Homo sapiens
  Table A; Target 2481; HLA-B*38:01; ABCB5; ENSG00000004846; TAA
TMFGNNDKTTL

SEQ ID NO: 2482 - protein, 11 aa, Homo sapiens
  Table A; Target 2482; HLA-B*55:01; ABCB5; ENSG00000004846; TAA
TMFGNNDKTTL

SEQ ID NO: 2483 - protein, 9 aa, Homo sapiens
  Table A; Target 2483; HLA-A*33:01; ABCB5; ENSG00000004846; TAA
TNSLPLHSV

SEQ ID NO: 2484 - protein, 9 aa, Homo sapiens
  Table A; Target 2484; HLA-A*68:02; ABCB5; ENSG00000004846; TAA
TNSLPLHSV

SEQ ID NO: 2485 - protein, 9 aa, Homo sapiens
  Table A; Target 2485; HLA-B*13:02; ABCB5; ENSG00000004846; TAA
TNSLPLHSV

SEQ ID NO: 2486 - protein, 9 aa, Homo sapiens
  Table A; Target 2486; HLA-B*37:01; ABCB5; ENSG00000004846; TAA
TNSLPLHSV

SEQ ID NO: 2487 - protein, 9 aa, Homo sapiens
  Table A; Target 2487; HLA-B*38:01; ABCB5; ENSG00000004846; TAA
TNSLPLHSV

SEQ ID NO: 2488 - protein, 9 aa, Homo sapiens
  Table A; Target 2488; HLA-B*54:01; ABCB5; ENSG00000004846; TAA
TNSLPLHSV

SEQ ID NO: 2489 - protein, 9 aa, Homo sapiens
  Table A; Target 2489; HLA-B*55:01; ABCB5; ENSG00000004846; TAA
TNSLPLHSV

SEQ ID NO: 2490 - protein, 9 aa, Homo sapiens
  Table A; Target 2490; HLA-B*56:01; ABCB5; ENSG00000004846; TAA
TNSLPLHSV

SEQ ID NO: 2491 - protein, 9 aa, Homo sapiens
  Table A; Target 2491; HLA-C*06:02; ABCB5; ENSG00000004846; TAA
TNSLPLHSV

SEQ ID NO: 2492 - protein, 9 aa, Homo sapiens
  Table A; Target 2492; HLA-C*16:01; ABCB5; ENSG00000004846; TAA
TNSLPLHSV

SEQ ID NO: 2493 - protein, 9 aa, Homo sapiens
  Table A; Target 2493; HLA-C*16:02; ABCB5; ENSG00000004846; TAA
TNSLPLHSV

SEQ ID NO: 2494 - protein, 9 aa, Homo sapiens
  Table A; Target 2494; HLA-B*35:01; ABCB5; ENSG00000004846; TAA
TPEGMFIVF

SEQ ID NO: 2495 - protein, 9 aa, Homo sapiens
  Table A; Target 2495; HLA-B*35:03; ABCB5; ENSG00000004846; TAA
TPEGMFIVF

SEQ ID NO: 2496 - protein, 9 aa, Homo sapiens
  Table A; Target 2496; HLA-B*55:01; ABCB5; ENSG00000004846; TAA
TPEGMFIVF

SEQ ID NO: 2497 - protein, 9 aa, Homo sapiens
  Table A; Target 2497; HLA-C*03:03; ABCB5; ENSG00000004846; TAA
TPEGMFIVF

SEQ ID NO: 2498 - protein, 9 aa, Homo sapiens
  Table A; Target 2498; HLA-A*32:01; ABCB5; ENSG00000004846; TAA
TQNATNMGL

SEQ ID NO: 2499 - protein, 9 aa, Homo sapiens
  Table A; Target 2499; HLA-B*13:02; ABCB5; ENSG00000004846; TAA
TQNATNMGL

SEQ ID NO: 2500 - protein, 9 aa, Homo sapiens
  Table A; Target 2500; HLA-B*15:01; ABCB5; ENSG00000004846; TAA
TQNATNMGL

SEQ ID NO: 2501 - protein, 9 aa, Homo sapiens
  Table A; Target 2501; HLA-B*15:03; ABCB5; ENSG00000004846; TAA
TQNATNMGL

SEQ ID NO: 2502 - protein, 9 aa, Homo sapiens
  Table A; Target 2502; HLA-B*27:05; ABCB5; ENSG00000004846; TAA
TQNATNMGL

SEQ ID NO: 2503 - protein, 9 aa, Homo sapiens
  Table A; Target 2503; HLA-B*38:01; ABCB5; ENSG00000004846; TAA
TQNATNMGL

SEQ ID NO: 2504 - protein, 9 aa, Homo sapiens
  Table A; Target 2504; HLA-B*39:01; ABCB5; ENSG00000004846; TAA
TQNATNMGL

SEQ ID NO: 2505 - protein, 9 aa, Homo sapiens
  Table A; Target 2505; HLA-C*07:04; ABCB5; ENSG00000004846; TAA
TQNATNMGL

SEQ ID NO: 2506 - protein, 10 aa, Homo sapiens
  Table A; Target 2506; HLA-A*30:01; ABCB5; ENSG00000004846; TAA
TQVGLKGAQL

SEQ ID NO: 2507 - protein, 10 aa, Homo sapiens
  Table A; Target 2507; HLA-B*27:05; ABCB5; ENSG00000004846; TAA
TQVGLKGAQL

SEQ ID NO: 2508 - protein, 10 aa, Homo sapiens
  Table A; Target 2508; HLA-B*38:01; ABCB5; ENSG00000004846; TAA
TQVGLKGAQL

SEQ ID NO: 2509 - protein, 10 aa, Homo sapiens
  Table A; Target 2509; HLA-B*39:01; ABCB5; ENSG00000004846; TAA
TQVGLKGAQL

SEQ ID NO: 2510 - protein, 10 aa, Homo sapiens
  Table A; Target 2510; HLA-B*40:01; ABCB5; ENSG00000004846; TAA
TQVGLKGAQL

SEQ ID NO: 2511 - protein, 10 aa, Homo sapiens
  Table A; Target 2511; HLA-B*40:02; ABCB5; ENSG00000004846; TAA
TQVGLKGAQL

SEQ ID NO: 2512 - protein, 10 aa, Homo sapiens
  Table A; Target 2512; HLA-C*07:04; ABCB5; ENSG00000004846; TAA
TQVGLKGAQL

SEQ ID NO: 2513 - protein, 10 aa, Homo sapiens
  Table A; Target 2513; HLA-B*38:01; ABCB5; ENSG00000004846; TAA
TRMTDDIDKI

SEQ ID NO: 2514 - protein, 8 aa, Homo sapiens
  Table A; Target 2514; HLA-A*30:02; ABCB5; ENSG00000004846; TAA
TSKELSAY

SEQ ID NO: 2515 - protein, 8 aa, Homo sapiens
  Table A; Target 2515; HLA-A*32:01; ABCB5; ENSG00000004846; TAA
TSKELSAY

SEQ ID NO: 2516 - protein, 8 aa, Homo sapiens
  Table A; Target 2516; HLA-B*08:01; ABCB5; ENSG00000004846; TAA
TSKELSAY

SEQ ID NO: 2517 - protein, 8 aa, Homo sapiens
  Table A; Target 2517; HLA-B*15:01; ABCB5; ENSG00000004846; TAA
TSKELSAY

SEQ ID NO: 2518 - protein, 8 aa, Homo sapiens
  Table A; Target 2518; HLA-B*15:03; ABCB5; ENSG00000004846; TAA
TSKELSAY

SEQ ID NO: 2519 - protein, 8 aa, Homo sapiens
  Table A; Target 2519; HLA-B*18:01; ABCB5; ENSG00000004846; TAA
TSKELSAY

SEQ ID NO: 2520 - protein, 8 aa, Homo sapiens
  Table A; Target 2520; HLA-B*46:01; ABCB5; ENSG00000004846; TAA
TSKELSAY

SEQ ID NO: 2521 - protein, 8 aa, Homo sapiens
  Table A; Target 2521; HLA-C*07:01; ABCB5; ENSG00000004846; TAA
TSKELSAY

SEQ ID NO: 2522 - protein, 8 aa, Homo sapiens
  Table A; Target 2522; HLA-C*07:04; ABCB5; ENSG00000004846; TAA
TSKELSAY

SEQ ID NO: 2523 - protein, 8 aa, Homo sapiens
  Table A; Target 2523; HLA-C*12:03; ABCB5; ENSG00000004846; TAA
TSKELSAY

SEQ ID NO: 2524 - protein, 8 aa, Homo sapiens
  Table A; Target 2524; HLA-C*14:02; ABCB5; ENSG00000004846; TAA
TSKELSAY

SEQ ID NO: 2525 - protein, 8 aa, Homo sapiens
  Table A; Target 2525; HLA-C*16:01; ABCB5; ENSG00000004846; TAA
TSKELSAY

SEQ ID NO: 2526 - protein, 8 aa, Homo sapiens
  Table A; Target 2526; HLA-C*16:02; ABCB5; ENSG00000004846; TAA
TSKELSAY

SEQ ID NO: 2527 - protein, 10 aa, Homo sapiens
  Table A; Target 2527; HLA-A*03:02; ABCB5; ENSG00000004846; TAA
TSKELSAYSK

SEQ ID NO: 2528 - protein, 10 aa, Homo sapiens
  Table A; Target 2528; HLA-A*11:01; ABCB5; ENSG00000004846; TAA
TSKELSAYSK

SEQ ID NO: 2529 - protein, 10 aa, Homo sapiens
  Table A; Target 2529; HLA-A*31:01; ABCB5; ENSG00000004846; TAA
TSKELSAYSK

SEQ ID NO: 2530 - protein, 10 aa, Homo sapiens
  Table A; Target 2530; HLA-A*68:01; ABCB5; ENSG00000004846; TAA
TSKELSAYSK

SEQ ID NO: 2531 - protein, 10 aa, Homo sapiens
  Table A; Target 2531; HLA-B*27:02; ABCB5; ENSG00000004846; TAA
TSKELSAYSK

SEQ ID NO: 2532 - protein, 10 aa, Homo sapiens
  Table A; Target 2532; HLA-C*07:02; ABCB5; ENSG00000004846; TAA
TSKELSAYSK

SEQ ID NO: 2533 - protein, 11 aa, Homo sapiens
  Table A; Target 2533; HLA-A*30:02; ABCB5; ENSG00000004846; TAA
TSLILNGEPGY

SEQ ID NO: 2534 - protein, 9 aa, Homo sapiens
  Table A; Target 2534; HLA-B*54:01; ABCB5; ENSG00000004846; TAA
TSPLIMASA

SEQ ID NO: 2535 - protein, 9 aa, Homo sapiens
  Table A; Target 2535; HLA-B*56:01; ABCB5; ENSG00000004846; TAA
TSPLIMASA

SEQ ID NO: 2536 - protein, 10 aa, Homo sapiens
  Table A; Target 2536; HLA-B*57:01; ABCB5; ENSG00000004846; TAA
TSVQLLQRLY

SEQ ID NO: 2537 - protein, 11 aa, Homo sapiens
  Table A; Target 2537; HLA-A*68:02; ABCB5; ENSG00000004846; TAA
TTILAIDIAQI

SEQ ID NO: 2538 - protein, 9 aa, Homo sapiens
  Table A; Target 2538; HLA-A*01:01; ABCB5; ENSG00000004846; TAA
TTISNNIKY

SEQ ID NO: 2539 - protein, 9 aa, Homo sapiens
  Table A; Target 2539; HLA-A*11:01; ABCB5; ENSG00000004846; TAA
TTISNNIKY

SEQ ID NO: 2540 - protein, 9 aa, Homo sapiens
  Table A; Target 2540; HLA-A*23:01; ABCB5; ENSG00000004846; TAA
TTISNNIKY

SEQ ID NO: 2541 - protein, 9 aa, Homo sapiens
  Table A; Target 2541; HLA-A*25:01; ABCB5; ENSG00000004846; TAA
TTISNNIKY

SEQ ID NO: 2542 - protein, 9 aa, Homo sapiens
  Table A; Target 2542; HLA-A*26:01; ABCB5; ENSG00000004846; TAA
TTISNNIKY

SEQ ID NO: 2543 - protein, 9 aa, Homo sapiens
  Table A; Target 2543; HLA-A*29:02; ABCB5; ENSG00000004846; TAA
TTISNNIKY

SEQ ID NO: 2544 - protein, 9 aa, Homo sapiens
  Table A; Target 2544; HLA-A*30:02; ABCB5; ENSG00000004846; TAA
TTISNNIKY

SEQ ID NO: 2545 - protein, 9 aa, Homo sapiens
  Table A; Target 2545; HLA-A*32:01; ABCB5; ENSG00000004846; TAA
TTISNNIKY

SEQ ID NO: 2546 - protein, 9 aa, Homo sapiens
  Table A; Target 2546; HLA-A*33:03; ABCB5; ENSG00000004846; TAA
TTISNNIKY

SEQ ID NO: 2547 - protein, 9 aa, Homo sapiens
  Table A; Target 2547; HLA-A*68:01; ABCB5; ENSG00000004846; TAA
TTISNNIKY

SEQ ID NO: 2548 - protein, 9 aa, Homo sapiens
  Table A; Target 2548; HLA-B*15:01; ABCB5; ENSG00000004846; TAA
TTISNNIKY

SEQ ID NO: 2549 - protein, 9 aa, Homo sapiens
  Table A; Target 2549; HLA-B*35:01; ABCB5; ENSG00000004846; TAA
TTISNNIKY

SEQ ID NO: 2550 - protein, 9 aa, Homo sapiens
  Table A; Target 2550; HLA-B*44:03; ABCB5; ENSG00000004846; TAA
TTISNNIKY

SEQ ID NO: 2551 - protein, 9 aa, Homo sapiens
  Table A; Target 2551; HLA-B*46:01; ABCB5; ENSG00000004846; TAA
TTISNNIKY

SEQ ID NO: 2552 - protein, 9 aa, Homo sapiens
  Table A; Target 2552; HLA-B*57:01; ABCB5; ENSG00000004846; TAA
TTISNNIKY

SEQ ID NO: 2553 - protein, 9 aa, Homo sapiens
  Table A; Target 2553; HLA-B*58:01; ABCB5; ENSG00000004846; TAA
TTISNNIKY

SEQ ID NO: 2554 - protein, 9 aa, Homo sapiens
  Table A; Target 2554; HLA-C*02:02; ABCB5; ENSG00000004846; TAA
TTISNNIKY

SEQ ID NO: 2555 - protein, 9 aa, Homo sapiens
  Table A; Target 2555; HLA-C*07:04; ABCB5; ENSG00000004846; TAA
TTISNNIKY

SEQ ID NO: 2556 - protein, 9 aa, Homo sapiens
  Table A; Target 2556; HLA-C*07:06; ABCB5; ENSG00000004846; TAA
TTISNNIKY

SEQ ID NO: 2557 - protein, 9 aa, Homo sapiens
  Table A; Target 2557; HLA-C*12:03; ABCB5; ENSG00000004846; TAA
TTISNNIKY

SEQ ID NO: 2558 - protein, 9 aa, Homo sapiens
  Table A; Target 2558; HLA-C*16:01; ABCB5; ENSG00000004846; TAA
TTISNNIKY

SEQ ID NO: 2559 - protein, 9 aa, Homo sapiens
  Table A; Target 2559; HLA-C*16:02; ABCB5; ENSG00000004846; TAA
TTISNNIKY

SEQ ID NO: 2560 - protein, 9 aa, Homo sapiens
  Table A; Target 2560; HLA-C*16:04; ABCB5; ENSG00000004846; TAA
TTISNNIKY

SEQ ID NO: 2561 - protein, 10 aa, Homo sapiens
  Table A; Target 2561; HLA-C*12:03; ABCB5; ENSG00000004846; TAA
TTISNNIKYG

SEQ ID NO: 2562 - protein, 11 aa, Homo sapiens
  Table A; Target 2562; HLA-A*31:01; ABCB5; ENSG00000004846; TAA
TTISNNIKYGR

SEQ ID NO: 2563 - protein, 11 aa, Homo sapiens
  Table A; Target 2563; HLA-A*33:01; ABCB5; ENSG00000004846; TAA
TTISNNIKYGR

SEQ ID NO: 2564 - protein, 11 aa, Homo sapiens
  Table A; Target 2564; HLA-A*33:03; ABCB5; ENSG00000004846; TAA
TTISNNIKYGR

SEQ ID NO: 2565 - protein, 11 aa, Homo sapiens
  Table A; Target 2565; HLA-A*68:01; ABCB5; ENSG00000004846; TAA
TTISNNIKYGR

SEQ ID NO: 2566 - protein, 8 aa, Homo sapiens
  Table A; Target 2566; HLA-A*31:01; ABCB5; ENSG00000004846; TAA
TTIVVAHR

SEQ ID NO: 2567 - protein, 8 aa, Homo sapiens
  Table A; Target 2567; HLA-A*33:01; ABCB5; ENSG00000004846; TAA
TTIVVAHR

SEQ ID NO: 2568 - protein, 8 aa, Homo sapiens
  Table A; Target 2568; HLA-A*33:03; ABCB5; ENSG00000004846; TAA
TTIVVAHR

SEQ ID NO: 2569 - protein, 8 aa, Homo sapiens
  Table A; Target 2569; HLA-A*68:01; ABCB5; ENSG00000004846; TAA
TTIVVAHR

SEQ ID NO: 2570 - protein, 8 aa, Homo sapiens
  Table A; Target 2570; HLA-C*07:06; ABCB5; ENSG00000004846; TAA
TTIVVAHR

SEQ ID NO: 2571 - protein, 9 aa, Homo sapiens
  Table A; Target 2571; HLA-A*02:07; ABCB5; ENSG00000004846; TAA
TTIVVAHRL

SEQ ID NO: 2572 - protein, 9 aa, Homo sapiens
  Table A; Target 2572; HLA-A*23:01; ABCB5; ENSG00000004846; TAA
TTIVVAHRL

SEQ ID NO: 2573 - protein, 9 aa, Homo sapiens
  Table A; Target 2573; HLA-A*24:02; ABCB5; ENSG00000004846; TAA
TTIVVAHRL

SEQ ID NO: 2574 - protein, 9 aa, Homo sapiens
  Table A; Target 2574; HLA-A*31:01; ABCB5; ENSG00000004846; TAA
TTIVVAHRL

SEQ ID NO: 2575 - protein, 9 aa, Homo sapiens
  Table A; Target 2575; HLA-A*33:03; ABCB5; ENSG00000004846; TAA
TTIVVAHRL

SEQ ID NO: 2576 - protein, 9 aa, Homo sapiens
  Table A; Target 2576; HLA-A*68:01; ABCB5; ENSG00000004846; TAA
TTIVVAHRL

SEQ ID NO: 2577 - protein, 9 aa, Homo sapiens
  Table A; Target 2577; HLA-A*68:02; ABCB5; ENSG00000004846; TAA
TTIVVAHRL

SEQ ID NO: 2578 - protein, 9 aa, Homo sapiens
  Table A; Target 2578; HLA-B*57:01; ABCB5; ENSG00000004846; TAA
TTIVVAHRL

SEQ ID NO: 2579 - protein, 9 aa, Homo sapiens
  Table A; Target 2579; HLA-B*58:01; ABCB5; ENSG00000004846; TAA
TTIVVAHRL

SEQ ID NO: 2580 - protein, 9 aa, Homo sapiens
  Table A; Target 2580; HLA-C*03:03; ABCB5; ENSG00000004846; TAA
TTIVVAHRL

SEQ ID NO: 2581 - protein, 9 aa, Homo sapiens
  Table A; Target 2581; HLA-C*03:04; ABCB5; ENSG00000004846; TAA
TTIVVAHRL

SEQ ID NO: 2582 - protein, 9 aa, Homo sapiens
  Table A; Target 2582; HLA-C*07:06; ABCB5; ENSG00000004846; TAA
TTIVVAHRL

SEQ ID NO: 2583 - protein, 9 aa, Homo sapiens
  Table A; Target 2583; HLA-C*16:02; ABCB5; ENSG00000004846; TAA
TTIVVAHRL

SEQ ID NO: 2584 - protein, 11 aa, Homo sapiens
  Table A; Target 2584; HLA-B*27:05; ABCB5; ENSG00000004846; TAA
TVAFVGSSGCG

SEQ ID NO: 2585 - protein, 11 aa, Homo sapiens
  Table A; Target 2585; HLA-C*04:01; ABCB5; ENSG00000004846; TAA
TVAFVGSSGCG

SEQ ID NO: 2586 - protein, 11 aa, Homo sapiens
  Table A; Target 2586; HLA-C*06:02; ABCB5; ENSG00000004846; TAA
TVAFVGSSGCG

SEQ ID NO: 2587 - protein, 11 aa, Homo sapiens
  Table A; Target 2587; HLA-C*06:02; ABCB5; ENSG00000004846; TAA
TVALVGLNGSG

SEQ ID NO: 2588 - protein, 9 aa, Homo sapiens
  Table A; Target 2588; HLA-C*05:01; ABCB5; ENSG00000004846; TAA
TVEFKNVSF

SEQ ID NO: 2589 - protein, 9 aa, Homo sapiens
  Table A; Target 2589; HLA-C*07:04; ABCB5; ENSG00000004846; TAA
TVEFKNVSF

SEQ ID NO: 2590 - protein, 9 aa, Homo sapiens
  Table A; Target 2590; HLA-A*24:02; ABCB5; ENSG00000004846; TAA
TVHPVFSII

SEQ ID NO: 2591 - protein, 9 aa, Homo sapiens
  Table A; Target 2591; HLA-A*25:01; ABCB5; ENSG00000004846; TAA
TVHPVFSII

SEQ ID NO: 2592 - protein, 9 aa, Homo sapiens
  Table A; Target 2592; HLA-A*68:02; ABCB5; ENSG00000004846; TAA
TVHPVFSII

SEQ ID NO: 2593 - protein, 10 aa, Homo sapiens
  Table A; Target 2593; HLA-A*03:01; ABCB5; ENSG00000004846; TAA
TVIAFRAQEK

SEQ ID NO: 2594 - protein, 10 aa, Homo sapiens
  Table A; Target 2594; HLA-A*11:01; ABCB5; ENSG00000004846; TAA
TVIAFRAQEK

SEQ ID NO: 2595 - protein, 10 aa, Homo sapiens
  Table A; Target 2595; HLA-A*68:01; ABCB5; ENSG00000004846; TAA
TVIAFRAQEK

SEQ ID NO: 2596 - protein, 9 aa, Homo sapiens
  Table A; Target 2596; HLA-A*02:01; ABCB5; ENSG00000004846; TAA
TVLAVFFSV

SEQ ID NO: 2597 - protein, 9 aa, Homo sapiens
  Table A; Target 2597; HLA-A*02:04; ABCB5; ENSG00000004846; TAA
TVLAVFFSV

SEQ ID NO: 2598 - protein, 9 aa, Homo sapiens
  Table A; Target 2598; HLA-A*02:07; ABCB5; ENSG00000004846; TAA
TVLAVFFSV

SEQ ID NO: 2599 - protein, 9 aa, Homo sapiens
  Table A; Target 2599; HLA-A*68:02; ABCB5; ENSG00000004846; TAA
TVLAVFFSV

SEQ ID NO: 2600 - protein, 9 aa, Homo sapiens
  Table A; Target 2600; HLA-A*68:02; ABCB5; ENSG00000004846; TAA
TVVQLLQRL

SEQ ID NO: 2601 - protein, 10 aa, Homo sapiens
  Table A; Target 2601; HLA-A*29:02; ABCB5; ENSG00000004846; TAA
TVVQLLQRLY

SEQ ID NO: 2602 - protein, 11 aa, Homo sapiens
  Table A; Target 2602; HLA-C*14:02; ABCB5; ENSG00000004846; TAA
TYSTERKTNSL

SEQ ID NO: 2603 - protein, 9 aa, Homo sapiens
  Table A; Target 2603; HLA-B*51:01; ABCB5; ENSG00000004846; TAA
VAALIFGYI

SEQ ID NO: 2604 - protein, 9 aa, Homo sapiens
  Table A; Target 2604; HLA-A*23:01; ABCB5; ENSG00000004846; TAA
VAEEVLSSI

SEQ ID NO: 2605 - protein, 9 aa, Homo sapiens
  Table A; Target 2605; HLA-B*46:01; ABCB5; ENSG00000004846; TAA
VAEEVLSSI

SEQ ID NO: 2606 - protein, 9 aa, Homo sapiens
  Table A; Target 2606; HLA-B*51:01; ABCB5; ENSG00000004846; TAA
VAEEVLSSI

SEQ ID NO: 2607 - protein, 9 aa, Homo sapiens
  Table A; Target 2607; HLA-C*01:02; ABCB5; ENSG00000004846; TAA
VAEEVLSSI

SEQ ID NO: 2608 - protein, 9 aa, Homo sapiens
  Table A; Target 2608; HLA-C*03:03; ABCB5; ENSG00000004846; TAA
VAEEVLSSI

SEQ ID NO: 2609 - protein, 9 aa, Homo sapiens
  Table A; Target 2609; HLA-C*03:04; ABCB5; ENSG00000004846; TAA
VAEEVLSSI

SEQ ID NO: 2610 - protein, 9 aa, Homo sapiens
  Table A; Target 2610; HLA-C*05:01; ABCB5; ENSG00000004846; TAA
VAEEVLSSI

SEQ ID NO: 2611 - protein, 9 aa, Homo sapiens
  Table A; Target 2611; HLA-C*16:02; ABCB5; ENSG00000004846; TAA
VAEEVLSSI

SEQ ID NO: 2612 - protein, 9 aa, Homo sapiens
  Table A; Target 2612; HLA-C*16:04; ABCB5; ENSG00000004846; TAA
VAEEVLSSI

SEQ ID NO: 2613 - protein, 10 aa, Homo sapiens
  Table A; Target 2613; HLA-B*27:02; ABCB5; ENSG00000004846; TAA
VAEEVLSSIR

SEQ ID NO: 2614 - protein, 8 aa, Homo sapiens
  Table A; Target 2614; HLA-B*39:01; ABCB5; ENSG00000004846; TAA
VAFVGSSG

SEQ ID NO: 2615 - protein, 8 aa, Homo sapiens
  Table A; Target 2615; HLA-B*46:01; ABCB5; ENSG00000004846; TAA
VAFVGSSG

SEQ ID NO: 2616 - protein, 8 aa, Homo sapiens
  Table A; Target 2616; HLA-C*01:02; ABCB5; ENSG00000004846; TAA
VAFVGSSG

SEQ ID NO: 2617 - protein, 8 aa, Homo sapiens
  Table A; Target 2617; HLA-C*03:03; ABCB5; ENSG00000004846; TAA
VAFVGSSG

SEQ ID NO: 2618 - protein, 8 aa, Homo sapiens
  Table A; Target 2618; HLA-C*03:04; ABCB5; ENSG00000004846; TAA
VAFVGSSG

SEQ ID NO: 2619 - protein, 8 aa, Homo sapiens
  Table A; Target 2619; HLA-C*14:02; ABCB5; ENSG00000004846; TAA
VAFVGSSG

SEQ ID NO: 2620 - protein, 9 aa, Homo sapiens
  Table A; Target 2620; HLA-B*46:01; ABCB5; ENSG00000004846; TAA
VAFVGSSGC

SEQ ID NO: 2621 - protein, 9 aa, Homo sapiens
  Table A; Target 2621; HLA-C*03:04; ABCB5; ENSG00000004846; TAA
VAFVGSSGC

SEQ ID NO: 2622 - protein, 9 aa, Homo sapiens
  Table A; Target 2622; HLA-C*12:03; ABCB5; ENSG00000004846; TAA
VAFVGSSGC

SEQ ID NO: 2623 - protein, 10 aa, Homo sapiens
  Table A; Target 2623; HLA-C*04:01; ABCB5; ENSG00000004846; TAA
VAFVGSSGCG

SEQ ID NO: 2624 - protein, 10 aa, Homo sapiens
  Table A; Target 2624; HLA-C*07:01; ABCB5; ENSG00000004846; TAA
VAFVGSSGCG

SEQ ID NO: 2625 - protein, 10 aa, Homo sapiens
  Table A; Target 2625; HLA-C*16:04; ABCB5; ENSG00000004846; TAA
VAFVGSSGCG

SEQ ID NO: 2626 - protein, 11 aa, Homo sapiens
  Table A; Target 2626; HLA-A*03:01; ABCB5; ENSG00000004846; TAA
VAFVGSSGCGK

SEQ ID NO: 2627 - protein, 11 aa, Homo sapiens
  Table A; Target 2627; HLA-A*03:02; ABCB5; ENSG00000004846; TAA
VAFVGSSGCGK

SEQ ID NO: 2628 - protein, 11 aa, Homo sapiens
  Table A; Target 2628; HLA-A*11:01; ABCB5; ENSG00000004846; TAA
VAFVGSSGCGK

SEQ ID NO: 2629 - protein, 11 aa, Homo sapiens
  Table A; Target 2629; HLA-B*27:02; ABCB5; ENSG00000004846; TAA
VAFVGSSGCGK

SEQ ID NO: 2630 - protein, 8 aa, Homo sapiens
  Table A; Target 2630; HLA-B*51:01; ABCB5; ENSG00000004846; TAA
VAHRLSTI

SEQ ID NO: 2631 - protein, 10 aa, Homo sapiens
  Table A; Target 2631; HLA-B*44:02; ABCB5; ENSG00000004846; TAA
VDAKELNVQW

SEQ ID NO: 2632 - protein, 10 aa, Homo sapiens
  Table A; Target 2632; HLA-B*44:03; ABCB5; ENSG00000004846; TAA
VDAKELNVQW

SEQ ID NO: 2633 - protein, 10 aa, Homo sapiens
  Table A; Target 2633; HLA-B*57:01; ABCB5; ENSG00000004846; TAA
VDAKELNVQW

SEQ ID NO: 2634 - protein, 9 aa, Homo sapiens
  Table A; Target 2634; HLA-A*30:01; ABCB5; ENSG00000004846; TAA
VDENDIRAL

SEQ ID NO: 2635 - protein, 9 aa, Homo sapiens
  Table A; Target 2635; HLA-B*40:01; ABCB5; ENSG00000004846; TAA
VDENDIRAL

SEQ ID NO: 2636 - protein, 9 aa, Homo sapiens
  Table A; Target 2636; HLA-B*40:02; ABCB5; ENSG00000004846; TAA
VDENDIRAL

SEQ ID NO: 2637 - protein, 9 aa, Homo sapiens
  Table A; Target 2637; HLA-C*03:04; ABCB5; ENSG00000004846; TAA
VDENDIRAL

SEQ ID NO: 2638 - protein, 8 aa, Homo sapiens
  Table A; Target 2638; HLA-A*30:01; ABCB5; ENSG00000004846; TAA
VEFKNVSF

SEQ ID NO: 2639 - protein, 8 aa, Homo sapiens
  Table A; Target 2639; HLA-B*15:03; ABCB5; ENSG00000004846; TAA
VEFKNVSF

SEQ ID NO: 2640 - protein, 8 aa, Homo sapiens
  Table A; Target 2640; HLA-B*18:01; ABCB5; ENSG00000004846; TAA
VEFKNVSF

SEQ ID NO: 2641 - protein, 8 aa, Homo sapiens
  Table A; Target 2641; HLA-B*37:01; ABCB5; ENSG00000004846; TAA
VEFKNVSF

SEQ ID NO: 2642 - protein, 8 aa, Homo sapiens
  Table A; Target 2642; HLA-B*40:01; ABCB5; ENSG00000004846; TAA
VEFKNVSF

SEQ ID NO: 2643 - protein, 8 aa, Homo sapiens
  Table A; Target 2643; HLA-B*40:02; ABCB5; ENSG00000004846; TAA
VEFKNVSF

SEQ ID NO: 2644 - protein, 8 aa, Homo sapiens
  Table A; Target 2644; HLA-B*44:03; ABCB5; ENSG00000004846; TAA
VEFKNVSF

SEQ ID NO: 2645 - protein, 8 aa, Homo sapiens
  Table A; Target 2645; HLA-B*49:01; ABCB5; ENSG00000004846; TAA
VEFKNVSF

SEQ ID NO: 2646 - protein, 10 aa, Homo sapiens
  Table A; Target 2646; HLA-B*44:02; ABCB5; ENSG00000004846; TAA
VEFKNVSFNY

SEQ ID NO: 2647 - protein, 10 aa, Homo sapiens
  Table A; Target 2647; HLA-B*44:03; ABCB5; ENSG00000004846; TAA
VEFKNVSFNY

SEQ ID NO: 2648 - protein, 10 aa, Homo sapiens
  Table A; Target 2648; HLA-A*23:01; ABCB5; ENSG00000004846; TAA
VFFSVIHSSY

SEQ ID NO: 2649 - protein, 10 aa, Homo sapiens
  Table A; Target 2649; HLA-A*24:02; ABCB5; ENSG00000004846; TAA
VFFSVIHSSY

SEQ ID NO: 2650 - protein, 10 aa, Homo sapiens
  Table A; Target 2650; HLA-A*29:02; ABCB5; ENSG00000004846; TAA
VFFSVIHSSY

SEQ ID NO: 2651 - protein, 10 aa, Homo sapiens
  Table A; Target 2651; HLA-A*30:02; ABCB5; ENSG00000004846; TAA
VFFSVIHSSY

SEQ ID NO: 2652 - protein, 10 aa, Homo sapiens
  Table A; Target 2652; HLA-C*14:02; ABCB5; ENSG00000004846; TAA
VFFSVIHSSY

SEQ ID NO: 2653 - protein, 9 aa, Homo sapiens
  Table A; Target 2653; HLA-A*23:01; ABCB5; ENSG00000004846; TAA
VFILRGLSL

SEQ ID NO: 2654 - protein, 9 aa, Homo sapiens
  Table A; Target 2654; HLA-A*24:02; ABCB5; ENSG00000004846; TAA
VFILRGLSL

SEQ ID NO: 2655 - protein, 9 aa, Homo sapiens
  Table A; Target 2655; HLA-B*08:01; ABCB5; ENSG00000004846; TAA
VFILRGLSL

SEQ ID NO: 2656 - protein, 9 aa, Homo sapiens
  Table A; Target 2656; HLA-C*14:02; ABCB5; ENSG00000004846; TAA
VFILRGLSL

SEQ ID NO: 2657 - protein, 9 aa, Homo sapiens
  Table A; Target 2657; HLA-A*23:01; ABCB5; ENSG00000004846; TAA
VFSIIFAKI

SEQ ID NO: 2658 - protein, 9 aa, Homo sapiens
  Table A; Target 2658; HLA-A*24:02; ABCB5; ENSG00000004846; TAA
VFSIIFAKI

SEQ ID NO: 2659 - protein, 8 aa, Homo sapiens
  Table A; Target 2659; HLA-C*03:04; ABCB5; ENSG00000004846; TAA
VGEKGAQM

SEQ ID NO: 2660 - protein, 8 aa, Homo sapiens
  Table A; Target 2660; HLA-C*05:01; ABCB5; ENSG00000004846; TAA
VGEKGAQM

SEQ ID NO: 2661 - protein, 8 aa, Homo sapiens
  Table A; Target 2661; HLA-C*03:04; ABCB5; ENSG00000004846; TAA
VGIGVAAL

SEQ ID NO: 2662 - protein, 9 aa, Homo sapiens
  Table A; Target 2662; HLA-A*23:01; ABCB5; ENSG00000004846; TAA
VGIGVAALI

SEQ ID NO: 2663 - protein, 9 aa, Homo sapiens
  Table A; Target 2663; HLA-B*13:02; ABCB5; ENSG00000004846; TAA
VGIGVAALI

SEQ ID NO: 2664 - protein, 9 aa, Homo sapiens
  Table A; Target 2664; HLA-B*51:01; ABCB5; ENSG00000004846; TAA
VGIGVAALI

SEQ ID NO: 2665 - protein, 8 aa, Homo sapiens
  Table A; Target 2665; HLA-B*08:01; ABCB5; ENSG00000004846; TAA
VGLKGAQL

SEQ ID NO: 2666 - protein, 8 aa, Homo sapiens
  Table A; Target 2666; HLA-C*01:02; ABCB5; ENSG00000004846; TAA
VGLKGAQL

SEQ ID NO: 2667 - protein, 8 aa, Homo sapiens
  Table A; Target 2667; HLA-C*03:03; ABCB5; ENSG00000004846; TAA
VGLKGAQL

SEQ ID NO: 2668 - protein, 8 aa, Homo sapiens
  Table A; Target 2668; HLA-C*03:04; ABCB5; ENSG00000004846; TAA
VGLKGAQL

SEQ ID NO: 2669 - protein, 8 aa, Homo sapiens
  Table A; Target 2669; HLA-C*14:02; ABCB5; ENSG00000004846; TAA
VGLKGAQL

SEQ ID NO: 2670 - protein, 9 aa, Homo sapiens
  Table A; Target 2670; HLA-A*03:01; ABCB5; ENSG00000004846; TAA
VIAFRAQEK

SEQ ID NO: 2671 - protein, 9 aa, Homo sapiens
  Table A; Target 2671; HLA-A*03:02; ABCB5; ENSG00000004846; TAA
VIAFRAQEK

SEQ ID NO: 2672 - protein, 9 aa, Homo sapiens
  Table A; Target 2672; HLA-A*02:01; ABCB5; ENSG00000004846; TAA
VILGVICFV

SEQ ID NO: 2673 - protein, 9 aa, Homo sapiens
  Table A; Target 2673; HLA-A*02:03; ABCB5; ENSG00000004846; TAA
VILGVICFV

SEQ ID NO: 2674 - protein, 9 aa, Homo sapiens
  Table A; Target 2674; HLA-A*02:04; ABCB5; ENSG00000004846; TAA
VILGVICFV

SEQ ID NO: 2675 - protein, 9 aa, Homo sapiens
  Table A; Target 2675; HLA-A*02:07; ABCB5; ENSG00000004846; TAA
VILGVICFV

SEQ ID NO: 2676 - protein, 9 aa, Homo sapiens
  Table A; Target 2676; HLA-C*01:02; ABCB5; ENSG00000004846; TAA
VISLTSKEL

SEQ ID NO: 2677 - protein, 9 aa, Homo sapiens
  Table A; Target 2677; HLA-C*03:03; ABCB5; ENSG00000004846; TAA
VISLTSKEL

SEQ ID NO: 2678 - protein, 9 aa, Homo sapiens
  Table A; Target 2678; HLA-C*03:04; ABCB5; ENSG00000004846; TAA
VISLTSKEL

SEQ ID NO: 2679 - protein, 9 aa, Homo sapiens
  Table A; Target 2679; HLA-C*16:01; ABCB5; ENSG00000004846; TAA
VISLTSKEL

SEQ ID NO: 2680 - protein, 8 aa, Homo sapiens
  Table A; Target 2680; HLA-A*03:02; ABCB5; ENSG00000004846; TAA
VLAPEYSK

SEQ ID NO: 2681 - protein, 9 aa, Homo sapiens
  Table A; Target 2681; HLA-A*02:01; ABCB5; ENSG00000004846; TAA
VLAPEYSKA

SEQ ID NO: 2682 - protein, 9 aa, Homo sapiens
  Table A; Target 2682; HLA-A*02:03; ABCB5; ENSG00000004846; TAA
VLAPEYSKA

SEQ ID NO: 2683 - protein, 9 aa, Homo sapiens
  Table A; Target 2683; HLA-A*02:04; ABCB5; ENSG00000004846; TAA
VLAPEYSKA

SEQ ID NO: 2684 - protein, 9 aa, Homo sapiens
  Table A; Target 2684; HLA-B*55:01; ABCB5; ENSG00000004846; TAA
VLAPEYSKA

SEQ ID NO: 2685 - protein, 9 aa, Homo sapiens
  Table A; Target 2685; HLA-B*56:01; ABCB5; ENSG00000004846; TAA
VLAPEYSKA

SEQ ID NO: 2686 - protein, 10 aa, Homo sapiens
  Table A; Target 2686; HLA-A*03:01; ABCB5; ENSG00000004846; TAA
VLAPEYSKAK

SEQ ID NO: 2687 - protein, 10 aa, Homo sapiens
  Table A; Target 2687; HLA-A*03:02; ABCB5; ENSG00000004846; TAA
VLAPEYSKAK

SEQ ID NO: 2688 - protein, 9 aa, Homo sapiens
  Table A; Target 2688; HLA-A*03:01; ABCB5; ENSG00000004846; TAA
VLFDGVDAK

SEQ ID NO: 2689 - protein, 9 aa, Homo sapiens
  Table A; Target 2689; HLA-A*03:02; ABCB5; ENSG00000004846; TAA
VLFDGVDAK

SEQ ID NO: 2690 - protein, 9 aa, Homo sapiens
  Table A; Target 2690; HLA-A*11:01; ABCB5; ENSG00000004846; TAA
VLFDGVDAK

SEQ ID NO: 2691 - protein, 9 aa, Homo sapiens
  Table A; Target 2691; HLA-B*27:05; ABCB5; ENSG00000004846; TAA
VLFDGVDAK

SEQ ID NO: 2692 - protein, 9 aa, Homo sapiens
  Table A; Target 2692; HLA-C*01:02; ABCB5; ENSG00000004846; TAA
VLFDGVDAK

SEQ ID NO: 2693 - protein, 11 aa, Homo sapiens
  Table A; Target 2693; HLA-A*02:01; ABCB5; ENSG00000004846; TAA
VLFDGVDAKEL

SEQ ID NO: 2694 - protein, 11 aa, Homo sapiens
  Table A; Target 2694; HLA-A*02:03; ABCB5; ENSG00000004846; TAA
VLFDGVDAKEL

SEQ ID NO: 2695 - protein, 11 aa, Homo sapiens
  Table A; Target 2695; HLA-A*02:04; ABCB5; ENSG00000004846; TAA
VLFDGVDAKEL

SEQ ID NO: 2696 - protein, 11 aa, Homo sapiens
  Table A; Target 2696; HLA-A*02:07; ABCB5; ENSG00000004846; TAA
VLFDGVDAKEL

SEQ ID NO: 2697 - protein, 11 aa, Homo sapiens
  Table A; Target 2697; HLA-C*01:02; ABCB5; ENSG00000004846; TAA
VLFDGVDAKEL

SEQ ID NO: 2698 - protein, 11 aa, Homo sapiens
  Table A; Target 2698; HLA-C*16:02; ABCB5; ENSG00000004846; TAA
VLFDGVDAKEL

SEQ ID NO: 2699 - protein, 8 aa, Homo sapiens
  Table A; Target 2699; HLA-A*02:01; ABCB5; ENSG00000004846; TAA
VLGTLASV

SEQ ID NO: 2700 - protein, 8 aa, Homo sapiens
  Table A; Target 2700; HLA-A*02:03; ABCB5; ENSG00000004846; TAA
VLGTLASV

SEQ ID NO: 2701 - protein, 8 aa, Homo sapiens
  Table A; Target 2701; HLA-B*55:01; ABCB5; ENSG00000004846; TAA
VLGTLASV

SEQ ID NO: 2702 - protein, 9 aa, Homo sapiens
  Table A; Target 2702; HLA-C*01:02; ABCB5; ENSG00000004846; TAA
VLGTLASVL

SEQ ID NO: 2703 - protein, 9 aa, Homo sapiens
  Table A; Target 2703; HLA-A*02:01; ABCB5; ENSG00000004846; TAA
VLNGTVHPV

SEQ ID NO: 2704 - protein, 9 aa, Homo sapiens
  Table A; Target 2704; HLA-A*02:03; ABCB5; ENSG00000004846; TAA
VLNGTVHPV

SEQ ID NO: 2705 - protein, 9 aa, Homo sapiens
  Table A; Target 2705; HLA-A*02:04; ABCB5; ENSG00000004846; TAA
VLNGTVHPV

SEQ ID NO: 2706 - protein, 9 aa, Homo sapiens
  Table A; Target 2706; HLA-A*02:07; ABCB5; ENSG00000004846; TAA
VLNGTVHPV

SEQ ID NO: 2707 - protein, 9 aa, Homo sapiens
  Table A; Target 2707; HLA-A*32:01; ABCB5; ENSG00000004846; TAA
VLNGTVHPV

SEQ ID NO: 2708 - protein, 9 aa, Homo sapiens
  Table A; Target 2708; HLA-B*13:02; ABCB5; ENSG00000004846; TAA
VLNGTVHPV

SEQ ID NO: 2709 - protein, 9 aa, Homo sapiens
  Table A; Target 2709; HLA-B*37:01; ABCB5; ENSG00000004846; TAA
VLNGTVHPV

SEQ ID NO: 2710 - protein, 9 aa, Homo sapiens
  Table A; Target 2710; HLA-B*46:01; ABCB5; ENSG00000004846; TAA
VLNGTVHPV

SEQ ID NO: 2711 - protein, 9 aa, Homo sapiens
  Table A; Target 2711; HLA-B*55:01; ABCB5; ENSG00000004846; TAA
VLNGTVHPV

SEQ ID NO: 2712 - protein, 9 aa, Homo sapiens
  Table A; Target 2712; HLA-C*01:02; ABCB5; ENSG00000004846; TAA
VLNGTVHPV

SEQ ID NO: 2713 - protein, 9 aa, Homo sapiens
  Table A; Target 2713; HLA-C*02:02; ABCB5; ENSG00000004846; TAA
VLNGTVHPV

SEQ ID NO: 2714 - protein, 9 aa, Homo sapiens
  Table A; Target 2714; HLA-C*06:02; ABCB5; ENSG00000004846; TAA
VLNGTVHPV

SEQ ID NO: 2715 - protein, 9 aa, Homo sapiens
  Table A; Target 2715; HLA-C*14:02; ABCB5; ENSG00000004846; TAA
VLNGTVHPV

SEQ ID NO: 2716 - protein, 9 aa, Homo sapiens
  Table A; Target 2716; HLA-C*16:02; ABCB5; ENSG00000004846; TAA
VLNGTVHPV

SEQ ID NO: 2717 - protein, 10 aa, Homo sapiens
  Table A; Target 2717; HLA-A*03:02; ABCB5; ENSG00000004846; TAA
VLNGTVHPVF

SEQ ID NO: 2718 - protein, 10 aa, Homo sapiens
  Table A; Target 2718; HLA-A*23:01; ABCB5; ENSG00000004846; TAA
VLNGTVHPVF

SEQ ID NO: 2719 - protein, 10 aa, Homo sapiens
  Table A; Target 2719; HLA-A*24:02; ABCB5; ENSG00000004846; TAA
VLNGTVHPVF

SEQ ID NO: 2720 - protein, 10 aa, Homo sapiens
  Table A; Target 2720; HLA-A*30:02; ABCB5; ENSG00000004846; TAA
VLNGTVHPVF

SEQ ID NO: 2721 - protein, 10 aa, Homo sapiens
  Table A; Target 2721; HLA-A*32:01; ABCB5; ENSG00000004846; TAA
VLNGTVHPVF

SEQ ID NO: 2722 - protein, 10 aa, Homo sapiens
  Table A; Target 2722; HLA-B*15:01; ABCB5; ENSG00000004846; TAA
VLNGTVHPVF

SEQ ID NO: 2723 - protein, 10 aa, Homo sapiens
  Table A; Target 2723; HLA-C*02:02; ABCB5; ENSG00000004846; TAA
VLNGTVHPVF

SEQ ID NO: 2724 - protein, 8 aa, Homo sapiens
  Table A; Target 2724; HLA-A*02:03; ABCB5; ENSG00000004846; TAA
VLSSIRTV

SEQ ID NO: 2725 - protein, 9 aa, Homo sapiens
  Table A; Target 2725; HLA-A*02:01; ABCB5; ENSG00000004846; TAA
VLSSIRTVI

SEQ ID NO: 2726 - protein, 9 aa, Homo sapiens
  Table A; Target 2726; HLA-A*02:03; ABCB5; ENSG00000004846; TAA
VLSSIRTVI

SEQ ID NO: 2727 - protein, 9 aa, Homo sapiens
  Table A; Target 2727; HLA-A*02:04; ABCB5; ENSG00000004846; TAA
VLSSIRTVI

SEQ ID NO: 2728 - protein, 9 aa, Homo sapiens
  Table A; Target 2728; HLA-A*23:01; ABCB5; ENSG00000004846; TAA
VLSSIRTVI

SEQ ID NO: 2729 - protein, 9 aa, Homo sapiens
  Table A; Target 2729; HLA-A*24:02; ABCB5; ENSG00000004846; TAA
VLSSIRTVI

SEQ ID NO: 2730 - protein, 9 aa, Homo sapiens
  Table A; Target 2730; HLA-A*32:01; ABCB5; ENSG00000004846; TAA
VLSSIRTVI

SEQ ID NO: 2731 - protein, 9 aa, Homo sapiens
  Table A; Target 2731; HLA-B*13:02; ABCB5; ENSG00000004846; TAA
VLSSIRTVI

SEQ ID NO: 2732 - protein, 9 aa, Homo sapiens
  Table A; Target 2732; HLA-C*02:02; ABCB5; ENSG00000004846; TAA
VLSSIRTVI

SEQ ID NO: 2733 - protein, 9 aa, Homo sapiens
  Table A; Target 2733; HLA-C*12:03; ABCB5; ENSG00000004846; TAA
VLSSIRTVI

SEQ ID NO: 2734 - protein, 11 aa, Homo sapiens
  Table A; Target 2734; HLA-A*03:01; ABCB5; ENSG00000004846; TAA
VLSSIRTVIAF

SEQ ID NO: 2735 - protein, 9 aa, Homo sapiens
  Table A; Target 2735; HLA-C*01:02; ABCB5; ENSG00000004846; TAA
VLTQNATNM

SEQ ID NO: 2736 - protein, 9 aa, Homo sapiens
  Table A; Target 2736; HLA-C*14:02; ABCB5; ENSG00000004846; TAA
VLTQNATNM

SEQ ID NO: 2737 - protein, 9 aa, Homo sapiens
  Table A; Target 2737; HLA-C*16:02; ABCB5; ENSG00000004846; TAA
VLTQNATNM

SEQ ID NO: 2738 - protein, 9 aa, Homo sapiens
  Table A; Target 2738; HLA-A*02:03; ABCB5; ENSG00000004846; TAA
VMSQDIKKA

SEQ ID NO: 2739 - protein, 9 aa, Homo sapiens
  Table A; Target 2739; HLA-B*55:01; ABCB5; ENSG00000004846; TAA
VMSQDIKKA

SEQ ID NO: 2740 - protein, 9 aa, Homo sapiens
  Table A; Target 2740; HLA-B*51:01; ABCB5; ENSG00000004846; TAA
VPHFETFAI

SEQ ID NO: 2741 - protein, 9 aa, Homo sapiens
  Table A; Target 2741; HLA-B*54:01; ABCB5; ENSG00000004846; TAA
VPHFETFAI

SEQ ID NO: 2742 - protein, 10 aa, Homo sapiens
  Table A; Target 2742; HLA-B*54:01; ABCB5; ENSG00000004846; TAA
VPHFETFAIA

SEQ ID NO: 2743 - protein, 10 aa, Homo sapiens
  Table A; Target 2743; HLA-B*56:01; ABCB5; ENSG00000004846; TAA
VPHFETFAIA

SEQ ID NO: 2744 - protein, 9 aa, Homo sapiens
  Table A; Target 2744; HLA-B*54:01; ABCB5; ENSG00000004846; TAA
VPLDEIKEA

SEQ ID NO: 2745 - protein, 9 aa, Homo sapiens
  Table A; Target 2745; HLA-B*55:01; ABCB5; ENSG00000004846; TAA
VPLDEIKEA

SEQ ID NO: 2746 - protein, 9 aa, Homo sapiens
  Table A; Target 2746; HLA-B*56:01; ABCB5; ENSG00000004846; TAA
VPLDEIKEA

SEQ ID NO: 2747 - protein, 10 aa, Homo sapiens
  Table A; Target 2747; HLA-B*35:03; ABCB5; ENSG00000004846; TAA
VPLDEIKEAA

SEQ ID NO: 2748 - protein, 10 aa, Homo sapiens
  Table A; Target 2748; HLA-B*54:01; ABCB5; ENSG00000004846; TAA
VPLDEIKEAA

SEQ ID NO: 2749 - protein, 10 aa, Homo sapiens
  Table A; Target 2749; HLA-B*55:01; ABCB5; ENSG00000004846; TAA
VPLDEIKEAA

SEQ ID NO: 2750 - protein, 10 aa, Homo sapiens
  Table A; Target 2750; HLA-B*56:01; ABCB5; ENSG00000004846; TAA
VPLDEIKEAA

SEQ ID NO: 2751 - protein, 8 aa, Homo sapiens
  Table A; Target 2751; HLA-B*35:01; ABCB5; ENSG00000004846; TAA
VPQEPVLF

SEQ ID NO: 2752 - protein, 8 aa, Homo sapiens
  Table A; Target 2752; HLA-C*05:01; ABCB5; ENSG00000004846; TAA
VPQEPVLF

SEQ ID NO: 2753 - protein, 10 aa, Homo sapiens
  Table A; Target 2753; HLA-B*56:01; ABCB5; ENSG00000004846; TAA
VPQEPVLFNC

SEQ ID NO: 2754 - protein, 10 aa, Homo sapiens
  Table A; Target 2754; HLA-A*03:02; ABCB5; ENSG00000004846; TAA
VQAALEKASK

SEQ ID NO: 2755 - protein, 8 aa, Homo sapiens
  Table A; Target 2755; HLA-A*30:02; ABCB5; ENSG00000004846; TAA
VQTNTTNY

SEQ ID NO: 2756 - protein, 8 aa, Homo sapiens
  Table A; Target 2756; HLA-A*32:01; ABCB5; ENSG00000004846; TAA
VQTNTTNY

SEQ ID NO: 2757 - protein, 8 aa, Homo sapiens
  Table A; Target 2757; HLA-B*15:01; ABCB5; ENSG00000004846; TAA
VQTNTTNY

SEQ ID NO: 2758 - protein, 8 aa, Homo sapiens
  Table A; Target 2758; HLA-B*15:03; ABCB5; ENSG00000004846; TAA
VQTNTTNY

SEQ ID NO: 2759 - protein, 8 aa, Homo sapiens
  Table A; Target 2759; HLA-B*39:01; ABCB5; ENSG00000004846; TAA
VQTNTTNY

SEQ ID NO: 2760 - protein, 8 aa, Homo sapiens
  Table A; Target 2760; HLA-B*46:01; ABCB5; ENSG00000004846; TAA
VQTNTTNY

SEQ ID NO: 2761 - protein, 8 aa, Homo sapiens
  Table A; Target 2761; HLA-C*01:02; ABCB5; ENSG00000004846; TAA
VQTNTTNY

SEQ ID NO: 2762 - protein, 8 aa, Homo sapiens
  Table A; Target 2762; HLA-C*07:04; ABCB5; ENSG00000004846; TAA
VQTNTTNY

SEQ ID NO: 2763 - protein, 8 aa, Homo sapiens
  Table A; Target 2763; HLA-C*14:02; ABCB5; ENSG00000004846; TAA
VQTNTTNY

SEQ ID NO: 2764 - protein, 9 aa, Homo sapiens
  Table A; Target 2764; HLA-C*06:02; ABCB5; ENSG00000004846; TAA
VRNPKILIL

SEQ ID NO: 2765 - protein, 9 aa, Homo sapiens
  Table A; Target 2765; HLA-C*12:03; ABCB5; ENSG00000004846; TAA
VRNPKILIL

SEQ ID NO: 2766 - protein, 8 aa, Homo sapiens
  Table A; Target 2766; HLA-A*23:01; ABCB5; ENSG00000004846; TAA
VSLGAVYF

SEQ ID NO: 2767 - protein, 9 aa, Homo sapiens
  Table A; Target 2767; HLA-B*57:01; ABCB5; ENSG00000004846; TAA
VSLGAVYFF

SEQ ID NO: 2768 - protein, 9 aa, Homo sapiens
  Table A; Target 2768; HLA-A*32:01; ABCB5; ENSG00000004846; TAA
VSLTREKAF

SEQ ID NO: 2769 - protein, 9 aa, Homo sapiens
  Table A; Target 2769; HLA-B*57:01; ABCB5; ENSG00000004846; TAA
VSLTREKAF

SEQ ID NO: 2770 - protein, 9 aa, Homo sapiens
  Table A; Target 2770; HLA-C*16:01; ABCB5; ENSG00000004846; TAA
VSLTREKAF

SEQ ID NO: 2771 - protein, 8 aa, Homo sapiens
  Table A; Target 2771; HLA-B*58:01; ABCB5; ENSG00000004846; TAA
VSQEPVLF

SEQ ID NO: 2772 - protein, 10 aa, Homo sapiens
  Table A; Target 2772; HLA-A*01:01; ABCB5; ENSG00000004846; TAA
VSYFMQGLFY

SEQ ID NO: 2773 - protein, 8 aa, Homo sapiens
  Table A; Target 2773; HLA-C*05:01; ABCB5; ENSG00000004846; TAA
VTDEEMER

SEQ ID NO: 2774 - protein, 9 aa, Homo sapiens
  Table A; Target 2774; HLA-C*05:01; ABCB5; ENSG00000004846; TAA
VTDEEMERA

SEQ ID NO: 2775 - protein, 11 aa, Homo sapiens
  Table A; Target 2775; HLA-A*03:01; ABCB5; ENSG00000004846; TAA
VTLKDGMLAEK

SEQ ID NO: 2776 - protein, 11 aa, Homo sapiens
  Table A; Target 2776; HLA-A*03:02; ABCB5; ENSG00000004846; TAA
VTLKDGMLAEK

SEQ ID NO: 2777 - protein, 11 aa, Homo sapiens
  Table A; Target 2777; HLA-A*11:01; ABCB5; ENSG00000004846; TAA
VTLKDGMLAEK

SEQ ID NO: 2778 - protein, 11 aa, Homo sapiens
  Table A; Target 2778; HLA-A*33:01; ABCB5; ENSG00000004846; TAA
VTLKDGMLAEK

SEQ ID NO: 2779 - protein, 8 aa, Homo sapiens
  Table A; Target 2779; HLA-C*03:03; ABCB5; ENSG00000004846; TAA
VTLSTSPL

SEQ ID NO: 2780 - protein, 9 aa, Homo sapiens
  Table A; Target 2780; HLA-A*23:01; ABCB5; ENSG00000004846; TAA
VTLSTSPLI

SEQ ID NO: 2781 - protein, 9 aa, Homo sapiens
  Table A; Target 2781; HLA-A*24:02; ABCB5; ENSG00000004846; TAA
VTLSTSPLI

SEQ ID NO: 2782 - protein, 9 aa, Homo sapiens
  Table A; Target 2782; HLA-B*13:02; ABCB5; ENSG00000004846; TAA
VTLSTSPLI

SEQ ID NO: 2783 - protein, 10 aa, Homo sapiens
  Table A; Target 2783; HLA-C*12:03; ABCB5; ENSG00000004846; TAA
VTLSTSPLIM

SEQ ID NO: 2784 - protein, 11 aa, Homo sapiens
  Table A; Target 2784; HLA-A*02:04; ABCB5; ENSG00000004846; TAA
VTLSTSPLIMA

SEQ ID NO: 2785 - protein, 9 aa, Homo sapiens
  Table A; Target 2785; HLA-A*02:03; ABCB5; ENSG00000004846; TAA
VVAHRLSTI

SEQ ID NO: 2786 - protein, 9 aa, Homo sapiens
  Table A; Target 2786; HLA-A*25:01; ABCB5; ENSG00000004846; TAA
VVAHRLSTI

SEQ ID NO: 2787 - protein, 9 aa, Homo sapiens
  Table A; Target 2787; HLA-B*08:01; ABCB5; ENSG00000004846; TAA
VVAHRLSTI

SEQ ID NO: 2788 - protein, 9 aa, Homo sapiens
  Table A; Target 2788; HLA-B*51:01; ABCB5; ENSG00000004846; TAA
VVAHRLSTI

SEQ ID NO: 2789 - protein, 9 aa, Homo sapiens
  Table A; Target 2789; HLA-C*16:02; ABCB5; ENSG00000004846; TAA
VVAHRLSTI

SEQ ID NO: 2790 - protein, 9 aa, Homo sapiens
  Table A; Target 2790; HLA-A*02:01; ABCB5; ENSG00000004846; TAA
VVLGTLASV

SEQ ID NO: 2791 - protein, 9 aa, Homo sapiens
  Table A; Target 2791; HLA-A*02:03; ABCB5; ENSG00000004846; TAA
VVLGTLASV

SEQ ID NO: 2792 - protein, 9 aa, Homo sapiens
  Table A; Target 2792; HLA-A*02:04; ABCB5; ENSG00000004846; TAA
VVLGTLASV

SEQ ID NO: 2793 - protein, 9 aa, Homo sapiens
  Table A; Target 2793; HLA-A*02:07; ABCB5; ENSG00000004846; TAA
VVLGTLASV

SEQ ID NO: 2794 - protein, 9 aa, Homo sapiens
  Table A; Target 2794; HLA-B*13:02; ABCB5; ENSG00000004846; TAA
VVLGTLASV

SEQ ID NO: 2795 - protein, 9 aa, Homo sapiens
  Table A; Target 2795; HLA-B*46:01; ABCB5; ENSG00000004846; TAA
VVLGTLASV

SEQ ID NO: 2796 - protein, 9 aa, Homo sapiens
  Table A; Target 2796; HLA-B*55:01; ABCB5; ENSG00000004846; TAA
VVLGTLASV

SEQ ID NO: 2797 - protein, 9 aa, Homo sapiens
  Table A; Target 2797; HLA-B*56:01; ABCB5; ENSG00000004846; TAA
VVLGTLASV

SEQ ID NO: 2798 - protein, 9 aa, Homo sapiens
  Table A; Target 2798; HLA-A*29:02; ABCB5; ENSG00000004846; TAA
VVQLLQRLY

SEQ ID NO: 2799 - protein, 9 aa, Homo sapiens
  Table A; Target 2799; HLA-A*30:02; ABCB5; ENSG00000004846; TAA
VVQLLQRLY

SEQ ID NO: 2800 - protein, 8 aa, Homo sapiens
  Table A; Target 2800; HLA-C*05:01; ABCB5; ENSG00000004846; TAA
VVSQEPVL

SEQ ID NO: 2801 - protein, 9 aa, Homo sapiens
  Table A; Target 2801; HLA-A*23:01; ABCB5; ENSG00000004846; TAA
VVSQEPVLF

SEQ ID NO: 2802 - protein, 9 aa, Homo sapiens
  Table A; Target 2802; HLA-C*05:01; ABCB5; ENSG00000004846; TAA
VVSQEPVLF

SEQ ID NO: 2803 - protein, 9 aa, Homo sapiens
  Table A; Target 2803; HLA-C*07:04; ABCB5; ENSG00000004846; TAA
VVSQEPVLF

SEQ ID NO: 2804 - protein, 9 aa, Homo sapiens
  Table A; Target 2804; HLA-A*02:03; ABCB5; ENSG00000004846; TAA
VVTHRLSAI

SEQ ID NO: 2805 - protein, 9 aa, Homo sapiens
  Table A; Target 2805; HLA-B*08:01; ABCB5; ENSG00000004846; TAA
VVTHRLSAI

SEQ ID NO: 2806 - protein, 9 aa, Homo sapiens
  Table A; Target 2806; HLA-A*29:02; ABCB5; ENSG00000004846; TAA
VYFFMNGTY

SEQ ID NO: 2807 - protein, 9 aa, Homo sapiens
  Table A; Target 2807; HLA-A*30:02; ABCB5; ENSG00000004846; TAA
VYFFMNGTY

SEQ ID NO: 2808 - protein, 9 aa, Homo sapiens
  Table A; Target 2808; HLA-C*14:02; ABCB5; ENSG00000004846; TAA
VYFFMNGTY

SEQ ID NO: 2809 - protein, 9 aa, Homo sapiens
  Table A; Target 2809; HLA-B*54:01; ABCB5; ENSG00000004846; TAA
YAAGFRFGA

SEQ ID NO: 2810 - protein, 10 aa, Homo sapiens
  Table A; Target 2810; HLA-A*01:01; ABCB5; ENSG00000004846; TAA
YAAGFRFGAY

SEQ ID NO: 2811 - protein, 10 aa, Homo sapiens
  Table A; Target 2811; HLA-A*25:01; ABCB5; ENSG00000004846; TAA
YAAGFRFGAY

SEQ ID NO: 2812 - protein, 10 aa, Homo sapiens
  Table A; Target 2812; HLA-A*26:01; ABCB5; ENSG00000004846; TAA
YAAGFRFGAY

SEQ ID NO: 2813 - protein, 10 aa, Homo sapiens
  Table A; Target 2813; HLA-A*29:02; ABCB5; ENSG00000004846; TAA
YAAGFRFGAY

SEQ ID NO: 2814 - protein, 10 aa, Homo sapiens
  Table A; Target 2814; HLA-A*30:02; ABCB5; ENSG00000004846; TAA
YAAGFRFGAY

SEQ ID NO: 2815 - protein, 10 aa, Homo sapiens
  Table A; Target 2815; HLA-B*46:01; ABCB5; ENSG00000004846; TAA
YAAGFRFGAY

SEQ ID NO: 2816 - protein, 10 aa, Homo sapiens
  Table A; Target 2816; HLA-C*02:02; ABCB5; ENSG00000004846; TAA
YAAGFRFGAY

SEQ ID NO: 2817 - protein, 8 aa, Homo sapiens
  Table A; Target 2817; HLA-B*51:01; ABCB5; ENSG00000004846; TAA
YAFSHAFI

SEQ ID NO: 2818 - protein, 9 aa, Homo sapiens
  Table A; Target 2818; HLA-A*01:01; ABCB5; ENSG00000004846; TAA
YAFSHAFIY

SEQ ID NO: 2819 - protein, 9 aa, Homo sapiens
  Table A; Target 2819; HLA-A*29:02; ABCB5; ENSG00000004846; TAA
YAFSHAFIY

SEQ ID NO: 2820 - protein, 9 aa, Homo sapiens
  Table A; Target 2820; HLA-B*35:01; ABCB5; ENSG00000004846; TAA
YAFSHAFIY

SEQ ID NO: 2821 - protein, 9 aa, Homo sapiens
  Table A; Target 2821; HLA-B*46:01; ABCB5; ENSG00000004846; TAA
YAFSHAFIY

SEQ ID NO: 2822 - protein, 9 aa, Homo sapiens
  Table A; Target 2822; HLA-B*54:01; ABCB5; ENSG00000004846; TAA
YAFSHAFIY

SEQ ID NO: 2823 - protein, 9 aa, Homo sapiens
  Table A; Target 2823; HLA-C*02:02; ABCB5; ENSG00000004846; TAA
YAFSHAFIY

SEQ ID NO: 2824 - protein, 9 aa, Homo sapiens
  Table A; Target 2824; HLA-C*12:03; ABCB5; ENSG00000004846; TAA
YAFSHAFIY

SEQ ID NO: 2825 - protein, 9 aa, Homo sapiens
  Table A; Target 2825; HLA-C*16:04; ABCB5; ENSG00000004846; TAA
YAFSHAFIY

SEQ ID NO: 2826 - protein, 10 aa, Homo sapiens
  Table A; Target 2826; HLA-A*29:02; ABCB5; ENSG00000004846; TAA
YAFSHAFIYF

SEQ ID NO: 2827 - protein, 10 aa, Homo sapiens
  Table A; Target 2827; HLA-A*68:02; ABCB5; ENSG00000004846; TAA
YAFSHAFIYF

SEQ ID NO: 2828 - protein, 10 aa, Homo sapiens
  Table A; Target 2828; HLA-B*57:01; ABCB5; ENSG00000004846; TAA
YAFSHAFIYF

SEQ ID NO: 2829 - protein, 10 aa, Homo sapiens
  Table A; Target 2829; HLA-C*02:02; ABCB5; ENSG00000004846; TAA
YAFSHAFIYF

SEQ ID NO: 2830 - protein, 10 aa, Homo sapiens
  Table A; Target 2830; HLA-A*26:01; ABCB5; ENSG00000004846; TAA
YCIGAAVPHF

SEQ ID NO: 2831 - protein, 10 aa, Homo sapiens
  Table A; Target 2831; HLA-B*58:01; ABCB5; ENSG00000004846; TAA
YCIGAAVPHF

SEQ ID NO: 2832 - protein, 10 aa, Homo sapiens
  Table A; Target 2832; HLA-A*02:07; ABCB5; ENSG00000004846; TAA
YDPDDGFIMV

SEQ ID NO: 2833 - protein, 10 aa, Homo sapiens
  Table A; Target 2833; HLA-A*68:02; ABCB5; ENSG00000004846; TAA
YDPDDGFIMV

SEQ ID NO: 2834 - protein, 9 aa, Homo sapiens
  Table A; Target 2834; HLA-A*30:01; ABCB5; ENSG00000004846; TAA
YDPVQGQVL

SEQ ID NO: 2835 - protein, 9 aa, Homo sapiens
  Table A; Target 2835; HLA-B*37:01; ABCB5; ENSG00000004846; TAA
YDPVQGQVL

SEQ ID NO: 2836 - protein, 9 aa, Homo sapiens
  Table A; Target 2836; HLA-B*40:01; ABCB5; ENSG00000004846; TAA
YDPVQGQVL

SEQ ID NO: 2837 - protein, 9 aa, Homo sapiens
  Table A; Target 2837; HLA-B*40:02; ABCB5; ENSG00000004846; TAA
YDPVQGQVL

SEQ ID NO: 2838 - protein, 9 aa, Homo sapiens
  Table A; Target 2838; HLA-C*01:02; ABCB5; ENSG00000004846; TAA
YDPVQGQVL

SEQ ID NO: 2839 - protein, 9 aa, Homo sapiens
  Table A; Target 2839; HLA-C*07:04; ABCB5; ENSG00000004846; TAA
YDPVQGQVL

SEQ ID NO: 2840 - protein, 9 aa, Homo sapiens
  Table A; Target 2840; HLA-C*14:02; ABCB5; ENSG00000004846; TAA
YDPVQGQVL

SEQ ID NO: 2841 - protein, 10 aa, Homo sapiens
  Table A; Target 2841; HLA-C*04:01; ABCB5; ENSG00000004846; TAA
YDPVQGQVLF

SEQ ID NO: 2842 - protein, 8 aa, Homo sapiens
  Table A; Target 2842; HLA-C*07:04; ABCB5; ENSG00000004846; TAA
YEEMLQTQ

SEQ ID NO: 2843 - protein, 9 aa, Homo sapiens
  Table A; Target 2843; HLA-B*15:03; ABCB5; ENSG00000004846; TAA
YEEMLQTQH

SEQ ID NO: 2844 - protein, 9 aa, Homo sapiens
  Table A; Target 2844; HLA-B*18:01; ABCB5; ENSG00000004846; TAA
YEEMLQTQH

SEQ ID NO: 2845 - protein, 9 aa, Homo sapiens
  Table A; Target 2845; HLA-B*40:01; ABCB5; ENSG00000004846; TAA
YEEMLQTQH

SEQ ID NO: 2846 - protein, 9 aa, Homo sapiens
  Table A; Target 2846; HLA-B*49:01; ABCB5; ENSG00000004846; TAA
YEEMLQTQH

SEQ ID NO: 2847 - protein, 9 aa, Homo sapiens
  Table A; Target 2847; HLA-C*07:04; ABCB5; ENSG00000004846; TAA
YEEMLQTQH

SEQ ID NO: 2848 - protein, 8 aa, Homo sapiens
  Table A; Target 2848; HLA-C*14:02; ABCB5; ENSG00000004846; TAA
YFAYAAGF

SEQ ID NO: 2849 - protein, 10 aa, Homo sapiens
  Table A; Target 2849; HLA-A*24:02; ABCB5; ENSG00000004846; TAA
YFAYAAGFRF

SEQ ID NO: 2850 - protein, 10 aa, Homo sapiens
  Table A; Target 2850; HLA-A*29:02; ABCB5; ENSG00000004846; TAA
YFAYAAGFRF

SEQ ID NO: 2851 - protein, 8 aa, Homo sapiens
  Table A; Target 2851; HLA-A*29:02; ABCB5; ENSG00000004846; TAA
YFFMNGTY

SEQ ID NO: 2852 - protein, 8 aa, Homo sapiens
  Table A; Target 2852; HLA-B*15:03; ABCB5; ENSG00000004846; TAA
YFFMNGTY

SEQ ID NO: 2853 - protein, 8 aa, Homo sapiens
  Table A; Target 2853; HLA-C*14:02; ABCB5; ENSG00000004846; TAA
YFFMNGTY

SEQ ID NO: 2854 - protein, 8 aa, Homo sapiens
  Table A; Target 2854; HLA-A*29:02; ABCB5; ENSG00000004846; TAA
YFMQGLFY

SEQ ID NO: 2855 - protein, 10 aa, Homo sapiens
  Table A; Target 2855; HLA-A*29:02; ABCB5; ENSG00000004846; TAA
YFMQGLFYGR

SEQ ID NO: 2856 - protein, 10 aa, Homo sapiens
  Table A; Target 2856; HLA-A*30:01; ABCB5; ENSG00000004846; TAA
YGAMAIGETL

SEQ ID NO: 2857 - protein, 10 aa, Homo sapiens
  Table A; Target 2857; HLA-B*35:03; ABCB5; ENSG00000004846; TAA
YGAMAIGETL

SEQ ID NO: 2858 - protein, 10 aa, Homo sapiens
  Table A; Target 2858; HLA-B*38:01; ABCB5; ENSG00000004846; TAA
YGAMAIGETL

SEQ ID NO: 2859 - protein, 10 aa, Homo sapiens
  Table A; Target 2859; HLA-B*39:01; ABCB5; ENSG00000004846; TAA
YGAMAIGETL

SEQ ID NO: 2860 - protein, 10 aa, Homo sapiens
  Table A; Target 2860; HLA-B*40:01; ABCB5; ENSG00000004846; TAA
YGAMAIGETL

SEQ ID NO: 2861 - protein, 10 aa, Homo sapiens
  Table A; Target 2861; HLA-C*03:03; ABCB5; ENSG00000004846; TAA
YGAMAIGETL

SEQ ID NO: 2862 - protein, 10 aa, Homo sapiens
  Table A; Target 2862; HLA-C*03:04; ABCB5; ENSG00000004846; TAA
YGAMAIGETL

SEQ ID NO: 2863 - protein, 8 aa, Homo sapiens
  Table A; Target 2863; HLA-B*51:01; ABCB5; ENSG00000004846; TAA
YGDNSRVV

SEQ ID NO: 2864 - protein, 8 aa, Homo sapiens
  Table A; Target 2864; HLA-C*03:03; ABCB5; ENSG00000004846; TAA
YGDNSRVV

SEQ ID NO: 2865 - protein, 8 aa, Homo sapiens
  Table A; Target 2865; HLA-C*03:04; ABCB5; ENSG00000004846; TAA
YGDNSRVV

SEQ ID NO: 2866 - protein, 8 aa, Homo sapiens
  Table A; Target 2866; HLA-C*05:01; ABCB5; ENSG00000004846; TAA
YGDNSRVV

SEQ ID NO: 2867 - protein, 8 aa, Homo sapiens
  Table A; Target 2867; HLA-C*16:01; ABCB5; ENSG00000004846; TAA
YGDNSRVV

SEQ ID NO: 2868 - protein, 8 aa, Homo sapiens
  Table A; Target 2868; HLA-C*16:02; ABCB5; ENSG00000004846; TAA
YGDNSRVV

SEQ ID NO: 2869 - protein, 10 aa, Homo sapiens
  Table A; Target 2869; HLA-C*03:04; ABCB5; ENSG00000004846; TAA
YGDNSRVVPL

SEQ ID NO: 2870 - protein, 11 aa, Homo sapiens
  Table A; Target 2870; HLA-A*31:01; ABCB5; ENSG00000004846; TAA
YGRAGEILTMR

SEQ ID NO: 2871 - protein, 11 aa, Homo sapiens
  Table A; Target 2871; HLA-A*33:01; ABCB5; ENSG00000004846; TAA
YGRAGEILTMR

SEQ ID NO: 2872 - protein, 11 aa, Homo sapiens
  Table A; Target 2872; HLA-B*35:01; ABCB5; ENSG00000004846; TAA
YGRDDVTDEEM

SEQ ID NO: 2873 - protein, 8 aa, Homo sapiens
  Table A; Target 2873; HLA-B*27:02; ABCB5; ENSG00000004846; TAA
YNTQVGLK

SEQ ID NO: 2874 - protein, 9 aa, Homo sapiens
  Table A; Target 2874; HLA-B*07:02; ABCB5; ENSG00000004846; TAA
YPSRPSIKI

SEQ ID NO: 2875 - protein, 9 aa, Homo sapiens
  Table A; Target 2875; HLA-B*51:01; ABCB5; ENSG00000004846; TAA
YPSRPSIKI

SEQ ID NO: 2876 - protein, 9 aa, Homo sapiens
  Table A; Target 2876; HLA-B*54:01; ABCB5; ENSG00000004846; TAA
YPSRPSIKI

SEQ ID NO: 2877 - protein, 9 aa, Homo sapiens
  Table A; Target 2877; HLA-B*56:01; ABCB5; ENSG00000004846; TAA
YPSRPSIKI

SEQ ID NO: 2878 - protein, 9 aa, Homo sapiens
  Table A; Target 2878; HLA-C*07:02; ABCB5; ENSG00000004846; TAA
YPSRPSIKI

SEQ ID NO: 2879 - protein, 10 aa, Homo sapiens
  Table A; Target 2879; HLA-B*07:02; ABCB5; ENSG00000004846; TAA
YPSRPSIKIL

SEQ ID NO: 2880 - protein, 10 aa, Homo sapiens
  Table A; Target 2880; HLA-C*07:02; ABCB5; ENSG00000004846; TAA
YPSRPSIKIL

SEQ ID NO: 2881 - protein, 8 aa, Homo sapiens
  Table A; Target 2881; HLA-B*46:01; ABCB5; ENSG00000004846; TAA
YSKAGAVA

SEQ ID NO: 2882 - protein, 9 aa, Homo sapiens
  Table A; Target 2882; HLA-C*16:01; ABCB5; ENSG00000004846; TAA
YSTERKTNS

SEQ ID NO: 2883 - protein, 9 aa, Homo sapiens
  Table A; Target 2883; HLA-A*02:01; ABCB5; ENSG00000004846; TAA
YTIGTVLAV

SEQ ID NO: 2884 - protein, 9 aa, Homo sapiens
  Table A; Target 2884; HLA-A*02:03; ABCB5; ENSG00000004846; TAA
YTIGTVLAV

SEQ ID NO: 2885 - protein, 9 aa, Homo sapiens
  Table A; Target 2885; HLA-A*25:01; ABCB5; ENSG00000004846; TAA
YTIGTVLAV

SEQ ID NO: 2886 - protein, 9 aa, Homo sapiens
  Table A; Target 2886; HLA-A*26:01; ABCB5; ENSG00000004846; TAA
YTIGTVLAV

SEQ ID NO: 2887 - protein, 9 aa, Homo sapiens
  Table A; Target 2887; HLA-A*68:02; ABCB5; ENSG00000004846; TAA
YTIGTVLAV

SEQ ID NO: 2888 - protein, 9 aa, Homo sapiens
  Table A; Target 2888; HLA-B*13:02; ABCB5; ENSG00000004846; TAA
YTIGTVLAV

SEQ ID NO: 2889 - protein, 9 aa, Homo sapiens
  Table A; Target 2889; HLA-B*46:01; ABCB5; ENSG00000004846; TAA
YTIGTVLAV

SEQ ID NO: 2890 - protein, 9 aa, Homo sapiens
  Table A; Target 2890; HLA-C*02:02; ABCB5; ENSG00000004846; TAA
YTIGTVLAV

SEQ ID NO: 2891 - protein, 9 aa, Homo sapiens
  Table A; Target 2891; HLA-C*03:03; ABCB5; ENSG00000004846; TAA
YTIGTVLAV

SEQ ID NO: 2892 - protein, 9 aa, Homo sapiens
  Table A; Target 2892; HLA-C*03:04; ABCB5; ENSG00000004846; TAA
YTIGTVLAV

SEQ ID NO: 2893 - protein, 10 aa, Homo sapiens
  Table A; Target 2893; HLA-A*23:01; ABCB5; ENSG00000004846; TAA
YTIGTVLAVF

SEQ ID NO: 2894 - protein, 10 aa, Homo sapiens
  Table A; Target 2894; HLA-A*25:01; ABCB5; ENSG00000004846; TAA
YTIGTVLAVF

SEQ ID NO: 2895 - protein, 10 aa, Homo sapiens
  Table A; Target 2895; HLA-A*26:01; ABCB5; ENSG00000004846; TAA
YTIGTVLAVF

SEQ ID NO: 2896 - protein, 9 aa, Homo sapiens
  Table A; Target 2896; HLA-A*01:01; ABCB5; ENSG00000004846; TAA
YTQNLKDAK

SEQ ID NO: 2897 - protein, 8 aa, Homo sapiens
  Table A; Target 2897; HLA-B*54:01; ABCB5; ENSG00000004846; TAA
YVGIGVAA

SEQ ID NO: 2898 - protein, 8 aa, Homo sapiens
  Table A; Target 2898; HLA-B*56:01; ABCB5; ENSG00000004846; TAA
YVGIGVAA

SEQ ID NO: 2899 - protein, 8 aa, Homo sapiens
  Table A; Target 2899; HLA-C*03:03; ABCB5; ENSG00000004846; TAA
YVGIGVAA

SEQ ID NO: 2900 - protein, 8 aa, Homo sapiens
  Table A; Target 2900; HLA-C*14:02; ABCB5; ENSG00000004846; TAA
YVGIGVAA

SEQ ID NO: 2901 - protein, 9 aa, Homo sapiens
  Table A; Target 2901; HLA-B*08:01; ABCB5; ENSG00000004846; TAA
YVGIGVAAL

SEQ ID NO: 2902 - protein, 9 aa, Homo sapiens
  Table A; Target 2902; HLA-B*35:03; ABCB5; ENSG00000004846; TAA
YVGIGVAAL

SEQ ID NO: 2903 - protein, 9 aa, Homo sapiens
  Table A; Target 2903; HLA-B*39:01; ABCB5; ENSG00000004846; TAA
YVGIGVAAL

SEQ ID NO: 2904 - protein, 9 aa, Homo sapiens
  Table A; Target 2904; HLA-B*40:01; ABCB5; ENSG00000004846; TAA
YVGIGVAAL

SEQ ID NO: 2905 - protein, 9 aa, Homo sapiens
  Table A; Target 2905; HLA-B*46:01; ABCB5; ENSG00000004846; TAA
YVGIGVAAL

SEQ ID NO: 2906 - protein, 9 aa, Homo sapiens
  Table A; Target 2906; HLA-C*01:02; ABCB5; ENSG00000004846; TAA
YVGIGVAAL

SEQ ID NO: 2907 - protein, 9 aa, Homo sapiens
  Table A; Target 2907; HLA-C*03:04; ABCB5; ENSG00000004846; TAA
YVGIGVAAL

SEQ ID NO: 2908 - protein, 9 aa, Homo sapiens
  Table A; Target 2908; HLA-C*07:04; ABCB5; ENSG00000004846; TAA
YVGIGVAAL

SEQ ID NO: 2909 - protein, 9 aa, Homo sapiens
  Table A; Target 2909; HLA-C*14:02; ABCB5; ENSG00000004846; TAA
YVGIGVAAL

SEQ ID NO: 2910 - protein, 8 aa, Homo sapiens
  Table A; Target 2910; HLA-C*12:03; ABCB5; ENSG00000004846; TAA
YYVGIGVA

SEQ ID NO: 2911 - protein, 9 aa, Homo sapiens
  Table A; Target 2911; HLA-A*23:01; ABCB5; ENSG00000004846; TAA
YYVGIGVAA

SEQ ID NO: 2912 - protein, 9 aa, Homo sapiens
  Table A; Target 2912; HLA-B*54:01; ABCB5; ENSG00000004846; TAA
YYVGIGVAA

SEQ ID NO: 2913 - protein, 9 aa, Homo sapiens
  Table A; Target 2913; HLA-B*56:01; ABCB5; ENSG00000004846; TAA
YYVGIGVAA

SEQ ID NO: 2914 - protein, 9 aa, Homo sapiens
  Table A; Target 2914; HLA-C*02:02; ABCB5; ENSG00000004846; TAA
YYVGIGVAA

SEQ ID NO: 2915 - protein, 9 aa, Homo sapiens
  Table A; Target 2915; HLA-C*14:02; ABCB5; ENSG00000004846; TAA
YYVGIGVAA

SEQ ID NO: 2916 - protein, 10 aa, Homo sapiens
  Table A; Target 2916; HLA-A*23:01; ABCB5; ENSG00000004846; TAA
YYVGIGVAAL

SEQ ID NO: 2917 - protein, 10 aa, Homo sapiens
  Table A; Target 2917; HLA-A*24:02; ABCB5; ENSG00000004846; TAA
YYVGIGVAAL

SEQ ID NO: 2918 - protein, 10 aa, Homo sapiens
  Table A; Target 2918; HLA-C*14:02; ABCB5; ENSG00000004846; TAA
YYVGIGVAAL

SEQ ID NO: 2919 - protein, 11 aa, Homo sapiens
  Table A; Target 2919; HLA-A*23:01; ABCB5; ENSG00000004846; TAA
YYVGIGVAALI

SEQ ID NO: 2920 - protein, 11 aa, Homo sapiens
  Table A; Target 2920; HLA-A*24:02; ABCB5; ENSG00000004846; TAA
YYVGIGVAALI

SEQ ID NO: 2921 - protein, 8 aa, Homo sapiens
  Table A; Target 2921; HLA-B*37:01; ACTL8; ENSG00000117148; CTA
ADQLQMSL

SEQ ID NO: 2922 - protein, 9 aa, Homo sapiens
  Table A; Target 2922; HLA-A*30:02; ACTL8; ENSG00000117148; CTA
ADQLQMSLY

SEQ ID NO: 2923 - protein, 9 aa, Homo sapiens
  Table A; Target 2923; HLA-B*15:01; ACTL8; ENSG00000117148; CTA
ADQLQMSLY

SEQ ID NO: 2924 - protein, 9 aa, Homo sapiens
  Table A; Target 2924; HLA-B*27:02; ACTL8; ENSG00000117148; CTA
ADQLQMSLY

SEQ ID NO: 2925 - protein, 9 aa, Homo sapiens
  Table A; Target 2925; HLA-B*37:01; ACTL8; ENSG00000117148; CTA
ADQLQMSLY

SEQ ID NO: 2926 - protein, 9 aa, Homo sapiens
  Table A; Target 2926; HLA-B*44:02; ACTL8; ENSG00000117148; CTA
ADQLQMSLY

SEQ ID NO: 2927 - protein, 9 aa, Homo sapiens
  Table A; Target 2927; HLA-B*44:03; ACTL8; ENSG00000117148; CTA
ADQLQMSLY

SEQ ID NO: 2928 - protein, 9 aa, Homo sapiens
  Table A; Target 2928; HLA-C*04:01; ACTL8; ENSG00000117148; CTA
ADQLQMSLY

SEQ ID NO: 2929 - protein, 9 aa, Homo sapiens
  Table A; Target 2929; HLA-C*07:01; ACTL8; ENSG00000117148; CTA
ADQLQMSLY

SEQ ID NO: 2930 - protein, 9 aa, Homo sapiens
  Table A; Target 2930; HLA-C*07:04; ACTL8; ENSG00000117148; CTA
ADQLQMSLY

SEQ ID NO: 2931 - protein, 9 aa, Homo sapiens
  Table A; Target 2931; HLA-C*12:03; ACTL8; ENSG00000117148; CTA
ADQLQMSLY

SEQ ID NO: 2932 - protein, 9 aa, Homo sapiens
  Table A; Target 2932; HLA-C*16:02; ACTL8; ENSG00000117148; CTA
ADQLQMSLY

SEQ ID NO: 2933 - protein, 9 aa, Homo sapiens
  Table A; Target 2933; HLA-C*16:04; ACTL8; ENSG00000117148; CTA
ADQLQMSLY

SEQ ID NO: 2934 - protein, 8 aa, Homo sapiens
  Table A; Target 2934; HLA-A*30:02; ACTL8; ENSG00000117148; CTA
AGQDLSAY

SEQ ID NO: 2935 - protein, 8 aa, Homo sapiens
  Table A; Target 2935; HLA-A*32:01; ACTL8; ENSG00000117148; CTA
AGQDLSAY

SEQ ID NO: 2936 - protein, 8 aa, Homo sapiens
  Table A; Target 2936; HLA-B*15:01; ACTL8; ENSG00000117148; CTA
AGQDLSAY

SEQ ID NO: 2937 - protein, 8 aa, Homo sapiens
  Table A; Target 2937; HLA-B*46:01; ACTL8; ENSG00000117148; CTA
AGQDLSAY

SEQ ID NO: 2938 - protein, 8 aa, Homo sapiens
  Table A; Target 2938; HLA-C*14:02; ACTL8; ENSG00000117148; CTA
AGQDLSAY

SEQ ID NO: 2939 - protein, 11 aa, Homo sapiens
  Table A; Target 2939; HLA-A*03:01; ACTL8; ENSG00000117148; CTA
AGQDLSAYLLK

SEQ ID NO: 2940 - protein, 11 aa, Homo sapiens
  Table A; Target 2940; HLA-A*03:02; ACTL8; ENSG00000117148; CTA
AGQDLSAYLLK

SEQ ID NO: 2941 - protein, 11 aa, Homo sapiens
  Table A; Target 2941; HLA-A*31:01; ACTL8; ENSG00000117148; CTA
AGQDLSAYLLK

SEQ ID NO: 2942 - protein, 11 aa, Homo sapiens
  Table A; Target 2942; HLA-B*27:02; ACTL8; ENSG00000117148; CTA
AGQDLSAYLLK

SEQ ID NO: 2943 - protein, 10 aa, Homo sapiens
  Table A; Target 2943; HLA-B*27:02; ACTL8; ENSG00000117148; CTA
AHLSTYQSEW

SEQ ID NO: 2944 - protein, 10 aa, Homo sapiens
  Table A; Target 2944; HLA-B*38:01; ACTL8; ENSG00000117148; CTA
AHLSTYQSEW

SEQ ID NO: 2945 - protein, 10 aa, Homo sapiens
  Table A; Target 2945; HLA-B*44:02; ACTL8; ENSG00000117148; CTA
AHLSTYQSEW

SEQ ID NO: 2946 - protein, 9 aa, Homo sapiens
  Table A; Target 2946; HLA-A*02:01; ACTL8; ENSG00000117148; CTA
AIVESVESC

SEQ ID NO: 2947 - protein, 9 aa, Homo sapiens
  Table A; Target 2947; HLA-B*55:01; ACTL8; ENSG00000117148; CTA
AIVESVESC

SEQ ID NO: 2948 - protein, 8 aa, Homo sapiens
  Table A; Target 2948; HLA-A*01:01; ACTL8; ENSG00000117148; CTA
ALDESNTY

SEQ ID NO: 2949 - protein, 8 aa, Homo sapiens
  Table A; Target 2949; HLA-A*32:01; ACTL8; ENSG00000117148; CTA
ALDESNTY

SEQ ID NO: 2950 - protein, 8 aa, Homo sapiens
  Table A; Target 2950; HLA-B*15:01; ACTL8; ENSG00000117148; CTA
ALDESNTY

SEQ ID NO: 2951 - protein, 8 aa, Homo sapiens
  Table A; Target 2951; HLA-B*39:01; ACTL8; ENSG00000117148; CTA
ALDESNTY

SEQ ID NO: 2952 - protein, 8 aa, Homo sapiens
  Table A; Target 2952; HLA-C*05:01; ACTL8; ENSG00000117148; CTA
ALDESNTY

SEQ ID NO: 2953 - protein, 9 aa, Homo sapiens
  Table A; Target 2953; HLA-A*01:01; ACTL8; ENSG00000117148; CTA
ALDESNTYQ

SEQ ID NO: 2954 - protein, 10 aa, Homo sapiens
  Table A; Target 2954; HLA-A*02:04; ACTL8; ENSG00000117148; CTA
ALDESNTYQL

SEQ ID NO: 2955 - protein, 10 aa, Homo sapiens
  Table A; Target 2955; HLA-A*02:07; ACTL8; ENSG00000117148; CTA
ALDESNTYQL

SEQ ID NO: 2956 - protein, 10 aa, Homo sapiens
  Table A; Target 2956; HLA-B*38:01; ACTL8; ENSG00000117148; CTA
ALDESNTYQL

SEQ ID NO: 2957 - protein, 10 aa, Homo sapiens
  Table A; Target 2957; HLA-B*39:01; ACTL8; ENSG00000117148; CTA
ALDESNTYQL

SEQ ID NO: 2958 - protein, 10 aa, Homo sapiens
  Table A; Target 2958; HLA-B*40:01; ACTL8; ENSG00000117148; CTA
ALDESNTYQL

SEQ ID NO: 2959 - protein, 10 aa, Homo sapiens
  Table A; Target 2959; HLA-B*55:01; ACTL8; ENSG00000117148; CTA
ALDESNTYQL

SEQ ID NO: 2960 - protein, 10 aa, Homo sapiens
  Table A; Target 2960; HLA-C*05:01; ACTL8; ENSG00000117148; CTA
ALDESNTYQL

SEQ ID NO: 2961 - protein, 11 aa, Homo sapiens
  Table A; Target 2961; HLA-A*01:01; ACTL8; ENSG00000117148; CTA
ALDESNTYQLP

SEQ ID NO: 2962 - protein, 8 aa, Homo sapiens
  Table A; Target 2962; HLA-B*58:01; ACTL8; ENSG00000117148; CTA
ASGKTLEF

SEQ ID NO: 2963 - protein, 8 aa, Homo sapiens
  Table A; Target 2963; HLA-C*16:01; ACTL8; ENSG00000117148; CTA
ASGKTLEF

SEQ ID NO: 2964 - protein, 9 aa, Homo sapiens
  Table A; Target 2964; HLA-A*01:01; ACTL8; ENSG00000117148; CTA
ASGLLTGVV

SEQ ID NO: 2965 - protein, 10 aa, Homo sapiens
  Table A; Target 2965; HLA-B*40:02; ACTL8; ENSG00000117148; CTA
ASGLLTGVVV

SEQ ID NO: 2966 - protein, 9 aa, Homo sapiens
  Table A; Target 2966; HLA-B*58:01; ACTL8; ENSG00000117148; CTA
ASVVAHLST

SEQ ID NO: 2967 - protein, 10 aa, Homo sapiens
  Table A; Target 2967; HLA-A*01:01; ACTL8; ENSG00000117148; CTA
ASVVAHLSTY

SEQ ID NO: 2968 - protein, 10 aa, Homo sapiens
  Table A; Target 2968; HLA-A*25:01; ACTL8; ENSG00000117148; CTA
ASVVAHLSTY

SEQ ID NO: 2969 - protein, 10 aa, Homo sapiens
  Table A; Target 2969; HLA-A*26:01; ACTL8; ENSG00000117148; CTA
ASVVAHLSTY

SEQ ID NO: 2970 - protein, 10 aa, Homo sapiens
  Table A; Target 2970; HLA-A*30:02; ACTL8; ENSG00000117148; CTA
ASVVAHLSTY

SEQ ID NO: 2971 - protein, 10 aa, Homo sapiens
  Table A; Target 2971; HLA-B*15:01; ACTL8; ENSG00000117148; CTA
ASVVAHLSTY

SEQ ID NO: 2972 - protein, 10 aa, Homo sapiens
  Table A; Target 2972; HLA-B*15:03; ACTL8; ENSG00000117148; CTA
ASVVAHLSTY

SEQ ID NO: 2973 - protein, 10 aa, Homo sapiens
  Table A; Target 2973; HLA-B*44:03; ACTL8; ENSG00000117148; CTA
ASVVAHLSTY

SEQ ID NO: 2974 - protein, 10 aa, Homo sapiens
  Table A; Target 2974; HLA-B*46:01; ACTL8; ENSG00000117148; CTA
ASVVAHLSTY

SEQ ID NO: 2975 - protein, 10 aa, Homo sapiens
  Table A; Target 2975; HLA-B*58:01; ACTL8; ENSG00000117148; CTA
ASVVAHLSTY

SEQ ID NO: 2976 - protein, 10 aa, Homo sapiens
  Table A; Target 2976; HLA-C*02:02; ACTL8; ENSG00000117148; CTA
ASVVAHLSTY

SEQ ID NO: 2977 - protein, 10 aa, Homo sapiens
  Table A; Target 2977; HLA-C*16:04; ACTL8; ENSG00000117148; CTA
ASVVAHLSTY

SEQ ID NO: 2978 - protein, 9 aa, Homo sapiens
  Table A; Target 2978; HLA-A*11:01; ACTL8; ENSG00000117148; CTA
ATVWEGSNR

SEQ ID NO: 2979 - protein, 9 aa, Homo sapiens
  Table A; Target 2979; HLA-A*31:01; ACTL8; ENSG00000117148; CTA
ATVWEGSNR

SEQ ID NO: 2980 - protein, 9 aa, Homo sapiens
  Table A; Target 2980; HLA-A*68:01; ACTL8; ENSG00000117148; CTA
ATVWEGSNR

SEQ ID NO: 2981 - protein, 9 aa, Homo sapiens
  Table A; Target 2981; HLA-C*07:06; ACTL8; ENSG00000117148; CTA
ATVWEGSNR

SEQ ID NO: 2982 - protein, 11 aa, Homo sapiens
  Table A; Target 2982; HLA-B*57:01; ACTL8; ENSG00000117148; CTA
ATVWEGSNRNF

SEQ ID NO: 2983 - protein, 11 aa, Homo sapiens
  Table A; Target 2983; HLA-B*58:01; ACTL8; ENSG00000117148; CTA
ATVWEGSNRNF

SEQ ID NO: 2984 - protein, 9 aa, Homo sapiens
  Table A; Target 2984; HLA-A*30:02; ACTL8; ENSG00000117148; CTA
AVTQMNKCY

SEQ ID NO: 2985 - protein, 9 aa, Homo sapiens
  Table A; Target 2985; HLA-C*16:01; ACTL8; ENSG00000117148; CTA
AVTQMNKCY

SEQ ID NO: 2986 - protein, 8 aa, Homo sapiens
  Table A; Target 2986; HLA-A*23:01; ACTL8; ENSG00000117148; CTA
AYLLKSLF

SEQ ID NO: 2987 - protein, 8 aa, Homo sapiens
  Table A; Target 2987; HLA-A*24:02; ACTL8; ENSG00000117148; CTA
AYLLKSLF

SEQ ID NO: 2988 - protein, 9 aa, Homo sapiens
  Table A; Target 2988; HLA-A*30:01; ACTL8; ENSG00000117148; CTA
CEISLRPLL

SEQ ID NO: 2989 - protein, 9 aa, Homo sapiens
  Table A; Target 2989; HLA-B*18:01; ACTL8; ENSG00000117148; CTA
CEISLRPLL

SEQ ID NO: 2990 - protein, 9 aa, Homo sapiens
  Table A; Target 2990; HLA-B*40:01; ACTL8; ENSG00000117148; CTA
CEISLRPLL

SEQ ID NO: 2991 - protein, 9 aa, Homo sapiens
  Table A; Target 2991; HLA-B*40:02; ACTL8; ENSG00000117148; CTA
CEISLRPLL

SEQ ID NO: 2992 - protein, 9 aa, Homo sapiens
  Table A; Target 2992; HLA-B*44:02; ACTL8; ENSG00000117148; CTA
CEISLRPLL

SEQ ID NO: 2993 - protein, 9 aa, Homo sapiens
  Table A; Target 2993; HLA-B*44:03; ACTL8; ENSG00000117148; CTA
CEISLRPLL

SEQ ID NO: 2994 - protein, 9 aa, Homo sapiens
  Table A; Target 2994; HLA-B*49:01; ACTL8; ENSG00000117148; CTA
CEISLRPLL

SEQ ID NO: 2995 - protein, 10 aa, Homo sapiens
  Table A; Target 2995; HLA-B*49:01; ACTL8; ENSG00000117148; CTA
CEISLRPLLV

SEQ ID NO: 2996 - protein, 9 aa, Homo sapiens
  Table A; Target 2996; HLA-B*15:03; ACTL8; ENSG00000117148; CTA
CKENPGPSY

SEQ ID NO: 2997 - protein, 9 aa, Homo sapiens
  Table A; Target 2997; HLA-B*39:01; ACTL8; ENSG00000117148; CTA
CKENPGPSY

SEQ ID NO: 2998 - protein, 8 aa, Homo sapiens
  Table A; Target 2998; HLA-A*02:01; ACTL8; ENSG00000117148; CTA
CLFQLETV

SEQ ID NO: 2999 - protein, 8 aa, Homo sapiens
  Table A; Target 2999; HLA-A*02:03; ACTL8; ENSG00000117148; CTA
CLFQLETV

SEQ ID NO: 3000 - protein, 10 aa, Homo sapiens
  Table A; Target 3000; HLA-A*02:01; ACTL8; ENSG00000117148; CTA
CLFQLETVAV

SEQ ID NO: 3001 - protein, 10 aa, Homo sapiens
  Table A; Target 3001; HLA-A*02:03; ACTL8; ENSG00000117148; CTA
CLFQLETVAV

SEQ ID NO: 3002 - protein, 10 aa, Homo sapiens
  Table A; Target 3002; HLA-A*02:04; ACTL8; ENSG00000117148; CTA
CLFQLETVAV

SEQ ID NO: 3003 - protein, 8 aa, Homo sapiens
  Table A; Target 3003; HLA-A*30:01; ACTL8; ENSG00000117148; CTA
DESNTYQL

SEQ ID NO: 3004 - protein, 8 aa, Homo sapiens
  Table A; Target 3004; HLA-B*18:01; ACTL8; ENSG00000117148; CTA
DESNTYQL

SEQ ID NO: 3005 - protein, 8 aa, Homo sapiens
  Table A; Target 3005; HLA-B*27:05; ACTL8; ENSG00000117148; CTA
DESNTYQL

SEQ ID NO: 3006 - protein, 8 aa, Homo sapiens
  Table A; Target 3006; HLA-B*37:01; ACTL8; ENSG00000117148; CTA
DESNTYQL

SEQ ID NO: 3007 - protein, 8 aa, Homo sapiens
  Table A; Target 3007; HLA-B*40:01; ACTL8; ENSG00000117148; CTA
DESNTYQL

SEQ ID NO: 3008 - protein, 8 aa, Homo sapiens
  Table A; Target 3008; HLA-A*33:01; ACTL8; ENSG00000117148; CTA
DHGSGFLK

SEQ ID NO: 3009 - protein, 8 aa, Homo sapiens
  Table A; Target 3009; HLA-A*33:03; ACTL8; ENSG00000117148; CTA
DHGSGFLK

SEQ ID NO: 3010 - protein, 10 aa, Homo sapiens
  Table A; Target 3010; HLA-B*38:01; ACTL8; ENSG00000117148; CTA
DHVSSTKATV

SEQ ID NO: 3011 - protein, 10 aa, Homo sapiens
  Table A; Target 3011; HLA-B*39:01; ACTL8; ENSG00000117148; CTA
DHVSSTKATV

SEQ ID NO: 3012 - protein, 11 aa, Homo sapiens
  Table A; Target 3012; HLA-A*25:01; ACTL8; ENSG00000117148; CTA
DHVSSTKATVW

SEQ ID NO: 3013 - protein, 11 aa, Homo sapiens
  Table A; Target 3013; HLA-A*33:01; ACTL8; ENSG00000117148; CTA
DHVSSTKATVW

SEQ ID NO: 3014 - protein, 11 aa, Homo sapiens
  Table A; Target 3014; HLA-B*38:01; ACTL8; ENSG00000117148; CTA
DHVSSTKATVW

SEQ ID NO: 3015 - protein, 11 aa, Homo sapiens
  Table A; Target 3015; HLA-B*39:01; ACTL8; ENSG00000117148; CTA
DHVSSTKATVW

SEQ ID NO: 3016 - protein, 11 aa, Homo sapiens
  Table A; Target 3016; HLA-C*07:01; ACTL8; ENSG00000117148; CTA
DHVSSTKATVW

SEQ ID NO: 3017 - protein, 10 aa, Homo sapiens
  Table A; Target 3017; HLA-A*01:01; ACTL8; ENSG00000117148; CTA
DICHPDTFSY

SEQ ID NO: 3018 - protein, 10 aa, Homo sapiens
  Table A; Target 3018; HLA-A*26:01; ACTL8; ENSG00000117148; CTA
DICHPDTFSY

SEQ ID NO: 3019 - protein, 8 aa, Homo sapiens
  Table A; Target 3019; HLA-B*15:01; ACTL8; ENSG00000117148; CTA
DQLQMSLY

SEQ ID NO: 3020 - protein, 8 aa, Homo sapiens
  Table A; Target 3020; HLA-B*15:03; ACTL8; ENSG00000117148; CTA
DQLQMSLY

SEQ ID NO: 3021 - protein, 8 aa, Homo sapiens
  Table A; Target 3021; HLA-B*18:01; ACTL8; ENSG00000117148; CTA
DQLQMSLY

SEQ ID NO: 3022 - protein, 8 aa, Homo sapiens
  Table A; Target 3022; HLA-C*04:01; ACTL8; ENSG00000117148; CTA
DQLQMSLY

SEQ ID NO: 3023 - protein, 8 aa, Homo sapiens
  Table A; Target 3023; HLA-C*07:01; ACTL8; ENSG00000117148; CTA
DQLQMSLY

SEQ ID NO: 3024 - protein, 8 aa, Homo sapiens
  Table A; Target 3024; HLA-C*07:04; ACTL8; ENSG00000117148; CTA
DQLQMSLY

SEQ ID NO: 3025 - protein, 8 aa, Homo sapiens
  Table A; Target 3025; HLA-A*33:01; ACTL8; ENSG00000117148; CTA
DSGYGLTR

SEQ ID NO: 3026 - protein, 8 aa, Homo sapiens
  Table A; Target 3026; HLA-A*33:03; ACTL8; ENSG00000117148; CTA
DSGYGLTR

SEQ ID NO: 3027 - protein, 8 aa, Homo sapiens
  Table A; Target 3027; HLA-A*68:01; ACTL8; ENSG00000117148; CTA
DSGYGLTR

SEQ ID NO: 3028 - protein, 8 aa, Homo sapiens
  Table A; Target 3028; HLA-C*07:06; ACTL8; ENSG00000117148; CTA
DSGYGLTR

SEQ ID NO: 3029 - protein, 9 aa, Homo sapiens
  Table A; Target 3029; HLA-B*51:01; ACTL8; ENSG00000117148; CTA
DSGYGLTRV

SEQ ID NO: 3030 - protein, 9 aa, Homo sapiens
  Table A; Target 3030; HLA-A*11:01; ACTL8; ENSG00000117148; CTA
DTFSYPIER

SEQ ID NO: 3031 - protein, 9 aa, Homo sapiens
  Table A; Target 3031; HLA-A*26:01; ACTL8; ENSG00000117148; CTA
DTFSYPIER

SEQ ID NO: 3032 - protein, 9 aa, Homo sapiens
  Table A; Target 3032; HLA-A*31:01; ACTL8; ENSG00000117148; CTA
DTFSYPIER

SEQ ID NO: 3033 - protein, 9 aa, Homo sapiens
  Table A; Target 3033; HLA-A*33:03; ACTL8; ENSG00000117148; CTA
DTFSYPIER

SEQ ID NO: 3034 - protein, 9 aa, Homo sapiens
  Table A; Target 3034; HLA-A*68:02; ACTL8; ENSG00000117148; CTA
DTFSYPIER

SEQ ID NO: 3035 - protein, 9 aa, Homo sapiens
  Table A; Target 3035; HLA-B*27:02; ACTL8; ENSG00000117148; CTA
DTFSYPIER

SEQ ID NO: 3036 - protein, 9 aa, Homo sapiens
  Table A; Target 3036; HLA-B*35:01; ACTL8; ENSG00000117148; CTA
DTFSYPIER

SEQ ID NO: 3037 - protein, 9 aa, Homo sapiens
  Table A; Target 3037; HLA-C*07:06; ACTL8; ENSG00000117148; CTA
DTFSYPIER

SEQ ID NO: 3038 - protein, 10 aa, Homo sapiens
  Table A; Target 3038; HLA-A*68:02; ACTL8; ENSG00000117148; CTA
DTFSYPIERG

SEQ ID NO: 3039 - protein, 11 aa, Homo sapiens
  Table A; Target 3039; HLA-A*33:01; ACTL8; ENSG00000117148; CTA
DTFSYPIERGR

SEQ ID NO: 3040 - protein, 8 aa, Homo sapiens
  Table A; Target 3040; HLA-A*33:01; ACTL8; ENSG00000117148; CTA
EALDFRER

SEQ ID NO: 3041 - protein, 8 aa, Homo sapiens
  Table A; Target 3041; HLA-A*33:03; ACTL8; ENSG00000117148; CTA
EALDFRER

SEQ ID NO: 3042 - protein, 9 aa, Homo sapiens
  Table A; Target 3042; HLA-A*30:01; ACTL8; ENSG00000117148; CTA
EEYGEHMRM

SEQ ID NO: 3043 - protein, 9 aa, Homo sapiens
  Table A; Target 3043; HLA-B*18:01; ACTL8; ENSG00000117148; CTA
EEYGEHMRM

SEQ ID NO: 3044 - protein, 9 aa, Homo sapiens
  Table A; Target 3044; HLA-B*37:01; ACTL8; ENSG00000117148; CTA
EEYGEHMRM

SEQ ID NO: 3045 - protein, 9 aa, Homo sapiens
  Table A; Target 3045; HLA-B*38:01; ACTL8; ENSG00000117148; CTA
EEYGEHMRM

SEQ ID NO: 3046 - protein, 9 aa, Homo sapiens
  Table A; Target 3046; HLA-B*40:01; ACTL8; ENSG00000117148; CTA
EEYGEHMRM

SEQ ID NO: 3047 - protein, 9 aa, Homo sapiens
  Table A; Target 3047; HLA-B*40:02; ACTL8; ENSG00000117148; CTA
EEYGEHMRM

SEQ ID NO: 3048 - protein, 9 aa, Homo sapiens
  Table A; Target 3048; HLA-B*44:02; ACTL8; ENSG00000117148; CTA
EEYGEHMRM

SEQ ID NO: 3049 - protein, 9 aa, Homo sapiens
  Table A; Target 3049; HLA-B*44:03; ACTL8; ENSG00000117148; CTA
EEYGEHMRM

SEQ ID NO: 3050 - protein, 9 aa, Homo sapiens
  Table A; Target 3050; HLA-B*49:01; ACTL8; ENSG00000117148; CTA
EEYGEHMRM

SEQ ID NO: 3051 - protein, 9 aa, Homo sapiens
  Table A; Target 3051; HLA-C*16:04; ACTL8; ENSG00000117148; CTA
EEYGEHMRM

SEQ ID NO: 3052 - protein, 10 aa, Homo sapiens
  Table A; Target 3052; HLA-A*25:01; ACTL8; ENSG00000117148; CTA
EFAGQDLSAY

SEQ ID NO: 3053 - protein, 10 aa, Homo sapiens
  Table A; Target 3053; HLA-A*26:01; ACTL8; ENSG00000117148; CTA
EFAGQDLSAY

SEQ ID NO: 3054 - protein, 10 aa, Homo sapiens
  Table A; Target 3054; HLA-A*29:02; ACTL8; ENSG00000117148; CTA
EFAGQDLSAY

SEQ ID NO: 3055 - protein, 10 aa, Homo sapiens
  Table A; Target 3055; HLA-A*30:02; ACTL8; ENSG00000117148; CTA
EFAGQDLSAY

SEQ ID NO: 3056 - protein, 10 aa, Homo sapiens
  Table A; Target 3056; HLA-B*27:02; ACTL8; ENSG00000117148; CTA
EFAGQDLSAY

SEQ ID NO: 3057 - protein, 10 aa, Homo sapiens
  Table A; Target 3057; HLA-C*14:02; ACTL8; ENSG00000117148; CTA
EFAGQDLSAY

SEQ ID NO: 3058 - protein, 9 aa, Homo sapiens
  Table A; Target 3058; HLA-B*08:01; ACTL8; ENSG00000117148; CTA
EGSNRNFSV

SEQ ID NO: 3059 - protein, 10 aa, Homo sapiens
  Table A; Target 3059; HLA-A*25:01; ACTL8; ENSG00000117148; CTA
EGSNRNFSVW

SEQ ID NO: 3060 - protein, 9 aa, Homo sapiens
  Table A; Target 3060; HLA-A*68:02; ACTL8; ENSG00000117148; CTA
EILFELLHV

SEQ ID NO: 3061 - protein, 8 aa, Homo sapiens
  Table A; Target 3061; HLA-B*08:01; ACTL8; ENSG00000117148; CTA
EISLRPLL

SEQ ID NO: 3062 - protein, 9 aa, Homo sapiens
  Table A; Target 3062; HLA-A*68:02; ACTL8; ENSG00000117148; CTA
EISLRPLLV

SEQ ID NO: 3063 - protein, 9 aa, Homo sapiens
  Table A; Target 3063; HLA-B*08:01; ACTL8; ENSG00000117148; CTA
EISLRPLLV

SEQ ID NO: 3064 - protein, 10 aa, Homo sapiens
  Table A; Target 3064; HLA-A*25:01; ACTL8; ENSG00000117148; CTA
ELMGDHVSST

SEQ ID NO: 3065 - protein, 10 aa, Homo sapiens
  Table A; Target 3065; HLA-A*26:01; ACTL8; ENSG00000117148; CTA
ELMGDHVSST

SEQ ID NO: 3066 - protein, 11 aa, Homo sapiens
  Table A; Target 3066; HLA-A*03:02; ACTL8; ENSG00000117148; CTA
ELMGDHVSSTK

SEQ ID NO: 3067 - protein, 11 aa, Homo sapiens
  Table A; Target 3067; HLA-A*26:01; ACTL8; ENSG00000117148; CTA
ELMGDHVSSTK

SEQ ID NO: 3068 - protein, 11 aa, Homo sapiens
  Table A; Target 3068; HLA-A*33:03; ACTL8; ENSG00000117148; CTA
ELMGDHVSSTK

SEQ ID NO: 3069 - protein, 11 aa, Homo sapiens
  Table A; Target 3069; HLA-A*68:01; ACTL8; ENSG00000117148; CTA
ELMGDHVSSTK

SEQ ID NO: 3070 - protein, 11 aa, Homo sapiens
  Table A; Target 3070; HLA-C*07:06; ACTL8; ENSG00000117148; CTA
ELMGDHVSSTK

SEQ ID NO: 3071 - protein, 8 aa, Homo sapiens
  Table A; Target 3071; HLA-B*51:01; ACTL8; ENSG00000117148; CTA
EMFFSPQV

SEQ ID NO: 3072 - protein, 9 aa, Homo sapiens
  Table A; Target 3072; HLA-A*33:01; ACTL8; ENSG00000117148; CTA
ENPGPSYAR

SEQ ID NO: 3073 - protein, 9 aa, Homo sapiens
  Table A; Target 3073; HLA-A*33:03; ACTL8; ENSG00000117148; CTA
ENPGPSYAR

SEQ ID NO: 3074 - protein, 9 aa, Homo sapiens
  Table A; Target 3074; HLA-A*68:01; ACTL8; ENSG00000117148; CTA
ENPGPSYAR

SEQ ID NO: 3075 - protein, 9 aa, Homo sapiens
  Table A; Target 3075; HLA-C*07:06; ACTL8; ENSG00000117148; CTA
ENPGPSYAR

SEQ ID NO: 3076 - protein, 9 aa, Homo sapiens
  Table A; Target 3076; HLA-B*08:01; ACTL8; ENSG00000117148; CTA
EPADRKKML

SEQ ID NO: 3077 - protein, 9 aa, Homo sapiens
  Table A; Target 3077; HLA-B*51:01; ACTL8; ENSG00000117148; CTA
EPQMVFPNI

SEQ ID NO: 3078 - protein, 8 aa, Homo sapiens
  Table A; Target 3078; HLA-B*13:02; ACTL8; ENSG00000117148; CTA
EQEVPPVI

SEQ ID NO: 3079 - protein, 8 aa, Homo sapiens
  Table A; Target 3079; HLA-B*39:01; ACTL8; ENSG00000117148; CTA
EQEVPPVI

SEQ ID NO: 3080 - protein, 9 aa, Homo sapiens
  Table A; Target 3080; HLA-B*38:01; ACTL8; ENSG00000117148; CTA
EQEVPPVII

SEQ ID NO: 3081 - protein, 9 aa, Homo sapiens
  Table A; Target 3081; HLA-B*39:01; ACTL8; ENSG00000117148; CTA
EQEVPPVII

SEQ ID NO: 3082 - protein, 9 aa, Homo sapiens
  Table A; Target 3082; HLA-C*05:01; ACTL8; ENSG00000117148; CTA
EQEVPPVII

SEQ ID NO: 3083 - protein, 9 aa, Homo sapiens
  Table A; Target 3083; HLA-A*33:01; ACTL8; ENSG00000117148; CTA
EQPGPSIPR

SEQ ID NO: 3084 - protein, 9 aa, Homo sapiens
  Table A; Target 3084; HLA-A*33:03; ACTL8; ENSG00000117148; CTA
EQPGPSIPR

SEQ ID NO: 3085 - protein, 9 aa, Homo sapiens
  Table A; Target 3085; HLA-A*68:01; ACTL8; ENSG00000117148; CTA
EQPGPSIPR

SEQ ID NO: 3086 - protein, 9 aa, Homo sapiens
  Table A; Target 3086; HLA-C*07:06; ACTL8; ENSG00000117148; CTA
EQPGPSIPR

SEQ ID NO: 3087 - protein, 8 aa, Homo sapiens
  Table A; Target 3087; HLA-A*33:03; ACTL8; ENSG00000117148; CTA
ESCEISLR

SEQ ID NO: 3088 - protein, 8 aa, Homo sapiens
  Table A; Target 3088; HLA-A*25:01; ACTL8; ENSG00000117148; CTA
ETVAVTQM

SEQ ID NO: 3089 - protein, 8 aa, Homo sapiens
  Table A; Target 3089; HLA-A*26:01; ACTL8; ENSG00000117148; CTA
ETVAVTQM

SEQ ID NO: 3090 - protein, 8 aa, Homo sapiens
  Table A; Target 3090; HLA-A*33:03; ACTL8; ENSG00000117148; CTA
ETVAVTQM

SEQ ID NO: 3091 - protein, 8 aa, Homo sapiens
  Table A; Target 3091; HLA-B*18:01; ACTL8; ENSG00000117148; CTA
ETVAVTQM

SEQ ID NO: 3092 - protein, 8 aa, Homo sapiens
  Table A; Target 3092; HLA-B*40:02; ACTL8; ENSG00000117148; CTA
ETVAVTQM

SEQ ID NO: 3093 - protein, 8 aa, Homo sapiens
  Table A; Target 3093; HLA-C*04:01; ACTL8; ENSG00000117148; CTA
ETVAVTQM

SEQ ID NO: 3094 - protein, 8 aa, Homo sapiens
  Table A; Target 3094; HLA-C*07:01; ACTL8; ENSG00000117148; CTA
ETVAVTQM

SEQ ID NO: 3095 - protein, 8 aa, Homo sapiens
  Table A; Target 3095; HLA-C*12:03; ACTL8; ENSG00000117148; CTA
ETVAVTQM

SEQ ID NO: 3096 - protein, 9 aa, Homo sapiens
  Table A; Target 3096; HLA-A*68:02; ACTL8; ENSG00000117148; CTA
ETVAVTQMN

SEQ ID NO: 3097 - protein, 10 aa, Homo sapiens
  Table A; Target 3097; HLA-A*01:01; ACTL8; ENSG00000117148; CTA
ETVAVTQMNK

SEQ ID NO: 3098 - protein, 10 aa, Homo sapiens
  Table A; Target 3098; HLA-A*03:02; ACTL8; ENSG00000117148; CTA
ETVAVTQMNK

SEQ ID NO: 3099 - protein, 10 aa, Homo sapiens
  Table A; Target 3099; HLA-A*11:01; ACTL8; ENSG00000117148; CTA
ETVAVTQMNK

SEQ ID NO: 3100 - protein, 10 aa, Homo sapiens
  Table A; Target 3100; HLA-A*33:01; ACTL8; ENSG00000117148; CTA
ETVAVTQMNK

SEQ ID NO: 3101 - protein, 10 aa, Homo sapiens
  Table A; Target 3101; HLA-A*33:03; ACTL8; ENSG00000117148; CTA
ETVAVTQMNK

SEQ ID NO: 3102 - protein, 10 aa, Homo sapiens
  Table A; Target 3102; HLA-A*68:02; ACTL8; ENSG00000117148; CTA
ETVAVTQMNK

SEQ ID NO: 3103 - protein, 10 aa, Homo sapiens
  Table A; Target 3103; HLA-B*27:02; ACTL8; ENSG00000117148; CTA
ETVAVTQMNK

SEQ ID NO: 3104 - protein, 10 aa, Homo sapiens
  Table A; Target 3104; HLA-C*06:02; ACTL8; ENSG00000117148; CTA
ETVAVTQMNK

SEQ ID NO: 3105 - protein, 10 aa, Homo sapiens
  Table A; Target 3105; HLA-C*07:01; ACTL8; ENSG00000117148; CTA
ETVAVTQMNK

SEQ ID NO: 3106 - protein, 10 aa, Homo sapiens
  Table A; Target 3106; HLA-C*07:06; ACTL8; ENSG00000117148; CTA
ETVAVTQMNK

SEQ ID NO: 3107 - protein, 9 aa, Homo sapiens
  Table A; Target 3107; HLA-A*26:01; ACTL8; ENSG00000117148; CTA
EVPPVIITE

SEQ ID NO: 3108 - protein, 10 aa, Homo sapiens
  Table A; Target 3108; HLA-A*25:01; ACTL8; ENSG00000117148; CTA
EVPPVIITET

SEQ ID NO: 3109 - protein, 10 aa, Homo sapiens
  Table A; Target 3109; HLA-A*26:01; ACTL8; ENSG00000117148; CTA
EVPPVIITET

SEQ ID NO: 3110 - protein, 10 aa, Homo sapiens
  Table A; Target 3110; HLA-A*68:01; ACTL8; ENSG00000117148; CTA
EVPPVIITET

SEQ ID NO: 3111 - protein, 10 aa, Homo sapiens
  Table A; Target 3111; HLA-A*68:02; ACTL8; ENSG00000117148; CTA
EVPPVIITET

SEQ ID NO: 3112 - protein, 8 aa, Homo sapiens
  Table A; Target 3112; HLA-A*24:02; ACTL8; ENSG00000117148; CTA
EYGEHMRM

SEQ ID NO: 3113 - protein, 8 aa, Homo sapiens
  Table A; Target 3113; HLA-C*07:01; ACTL8; ENSG00000117148; CTA
EYGEHMRM

SEQ ID NO: 3114 - protein, 9 aa, Homo sapiens
  Table A; Target 3114; HLA-A*01:01; ACTL8; ENSG00000117148; CTA
FAGQDLSAY

SEQ ID NO: 3115 - protein, 9 aa, Homo sapiens
  Table A; Target 3115; HLA-A*25:01; ACTL8; ENSG00000117148; CTA
FAGQDLSAY

SEQ ID NO: 3116 - protein, 9 aa, Homo sapiens
  Table A; Target 3116; HLA-A*26:01; ACTL8; ENSG00000117148; CTA
FAGQDLSAY

SEQ ID NO: 3117 - protein, 9 aa, Homo sapiens
  Table A; Target 3117; HLA-A*29:02; ACTL8; ENSG00000117148; CTA
FAGQDLSAY

SEQ ID NO: 3118 - protein, 9 aa, Homo sapiens
  Table A; Target 3118; HLA-A*30:02; ACTL8; ENSG00000117148; CTA
FAGQDLSAY

SEQ ID NO: 3119 - protein, 9 aa, Homo sapiens
  Table A; Target 3119; HLA-B*15:01; ACTL8; ENSG00000117148; CTA
FAGQDLSAY

SEQ ID NO: 3120 - protein, 9 aa, Homo sapiens
  Table A; Target 3120; HLA-B*15:03; ACTL8; ENSG00000117148; CTA
FAGQDLSAY

SEQ ID NO: 3121 - protein, 9 aa, Homo sapiens
  Table A; Target 3121; HLA-B*18:01; ACTL8; ENSG00000117148; CTA
FAGQDLSAY

SEQ ID NO: 3122 - protein, 9 aa, Homo sapiens
  Table A; Target 3122; HLA-B*35:01; ACTL8; ENSG00000117148; CTA
FAGQDLSAY

SEQ ID NO: 3123 - protein, 9 aa, Homo sapiens
  Table A; Target 3123; HLA-B*39:01; ACTL8; ENSG00000117148; CTA
FAGQDLSAY

SEQ ID NO: 3124 - protein, 9 aa, Homo sapiens
  Table A; Target 3124; HLA-B*46:01; ACTL8; ENSG00000117148; CTA
FAGQDLSAY

SEQ ID NO: 3125 - protein, 9 aa, Homo sapiens
  Table A; Target 3125; HLA-B*55:01; ACTL8; ENSG00000117148; CTA
FAGQDLSAY

SEQ ID NO: 3126 - protein, 9 aa, Homo sapiens
  Table A; Target 3126; HLA-C*01:02; ACTL8; ENSG00000117148; CTA
FAGQDLSAY

SEQ ID NO: 3127 - protein, 9 aa, Homo sapiens
  Table A; Target 3127; HLA-C*02:02; ACTL8; ENSG00000117148; CTA
FAGQDLSAY

SEQ ID NO: 3128 - protein, 9 aa, Homo sapiens
  Table A; Target 3128; HLA-C*03:03; ACTL8; ENSG00000117148; CTA
FAGQDLSAY

SEQ ID NO: 3129 - protein, 9 aa, Homo sapiens
  Table A; Target 3129; HLA-C*03:04; ACTL8; ENSG00000117148; CTA
FAGQDLSAY

SEQ ID NO: 3130 - protein, 9 aa, Homo sapiens
  Table A; Target 3130; HLA-C*07:04; ACTL8; ENSG00000117148; CTA
FAGQDLSAY

SEQ ID NO: 3131 - protein, 9 aa, Homo sapiens
  Table A; Target 3131; HLA-C*07:06; ACTL8; ENSG00000117148; CTA
FAGQDLSAY

SEQ ID NO: 3132 - protein, 9 aa, Homo sapiens
  Table A; Target 3132; HLA-C*12:03; ACTL8; ENSG00000117148; CTA
FAGQDLSAY

SEQ ID NO: 3133 - protein, 9 aa, Homo sapiens
  Table A; Target 3133; HLA-C*14:02; ACTL8; ENSG00000117148; CTA
FAGQDLSAY

SEQ ID NO: 3134 - protein, 9 aa, Homo sapiens
  Table A; Target 3134; HLA-C*16:02; ACTL8; ENSG00000117148; CTA
FAGQDLSAY

SEQ ID NO: 3135 - protein, 9 aa, Homo sapiens
  Table A; Target 3135; HLA-C*16:04; ACTL8; ENSG00000117148; CTA
FAGQDLSAY

SEQ ID NO: 3136 - protein, 9 aa, Homo sapiens
  Table A; Target 3136; HLA-A*02:01; ACTL8; ENSG00000117148; CTA
FELLHVPSV

SEQ ID NO: 3137 - protein, 9 aa, Homo sapiens
  Table A; Target 3137; HLA-A*02:03; ACTL8; ENSG00000117148; CTA
FELLHVPSV

SEQ ID NO: 3138 - protein, 9 aa, Homo sapiens
  Table A; Target 3138; HLA-A*02:04; ACTL8; ENSG00000117148; CTA
FELLHVPSV

SEQ ID NO: 3139 - protein, 9 aa, Homo sapiens
  Table A; Target 3139; HLA-A*02:07; ACTL8; ENSG00000117148; CTA
FELLHVPSV

SEQ ID NO: 3140 - protein, 9 aa, Homo sapiens
  Table A; Target 3140; HLA-A*30:01; ACTL8; ENSG00000117148; CTA
FELLHVPSV

SEQ ID NO: 3141 - protein, 9 aa, Homo sapiens
  Table A; Target 3141; HLA-B*13:02; ACTL8; ENSG00000117148; CTA
FELLHVPSV

SEQ ID NO: 3142 - protein, 9 aa, Homo sapiens
  Table A; Target 3142; HLA-B*18:01; ACTL8; ENSG00000117148; CTA
FELLHVPSV

SEQ ID NO: 3143 - protein, 9 aa, Homo sapiens
  Table A; Target 3143; HLA-B*37:01; ACTL8; ENSG00000117148; CTA
FELLHVPSV

SEQ ID NO: 3144 - protein, 9 aa, Homo sapiens
  Table A; Target 3144; HLA-B*40:01; ACTL8; ENSG00000117148; CTA
FELLHVPSV

SEQ ID NO: 3145 - protein, 9 aa, Homo sapiens
  Table A; Target 3145; HLA-B*40:02; ACTL8; ENSG00000117148; CTA
FELLHVPSV

SEQ ID NO: 3146 - protein, 9 aa, Homo sapiens
  Table A; Target 3146; HLA-B*51:01; ACTL8; ENSG00000117148; CTA
FELLHVPSV

SEQ ID NO: 3147 - protein, 9 aa, Homo sapiens
  Table A; Target 3147; HLA-B*54:01; ACTL8; ENSG00000117148; CTA
FELLHVPSV

SEQ ID NO: 3148 - protein, 10 aa, Homo sapiens
  Table A; Target 3148; HLA-A*30:01; ACTL8; ENSG00000117148; CTA
FELLHVPSVL

SEQ ID NO: 3149 - protein, 10 aa, Homo sapiens
  Table A; Target 3149; HLA-B*40:01; ACTL8; ENSG00000117148; CTA
FELLHVPSVL

SEQ ID NO: 3150 - protein, 8 aa, Homo sapiens
  Table A; Target 3150; HLA-A*30:01; ACTL8; ENSG00000117148; CTA
FEQPGPSI

SEQ ID NO: 3151 - protein, 8 aa, Homo sapiens
  Table A; Target 3151; HLA-B*18:01; ACTL8; ENSG00000117148; CTA
FEQPGPSI

SEQ ID NO: 3152 - protein, 8 aa, Homo sapiens
  Table A; Target 3152; HLA-B*40:01; ACTL8; ENSG00000117148; CTA
FEQPGPSI

SEQ ID NO: 3153 - protein, 8 aa, Homo sapiens
  Table A; Target 3153; HLA-B*40:02; ACTL8; ENSG00000117148; CTA
FEQPGPSI

SEQ ID NO: 3154 - protein, 8 aa, Homo sapiens
  Table A; Target 3154; HLA-B*49:01; ACTL8; ENSG00000117148; CTA
FEQPGPSI

SEQ ID NO: 3155 - protein, 9 aa, Homo sapiens
  Table A; Target 3155; HLA-B*49:01; ACTL8; ENSG00000117148; CTA
FEQPGPSIP

SEQ ID NO: 3156 - protein, 10 aa, Homo sapiens
  Table A; Target 3156; HLA-A*11:01; ACTL8; ENSG00000117148; CTA
FEQPGPSIPR

SEQ ID NO: 3157 - protein, 10 aa, Homo sapiens
  Table A; Target 3157; HLA-A*31:01; ACTL8; ENSG00000117148; CTA
FEQPGPSIPR

SEQ ID NO: 3158 - protein, 10 aa, Homo sapiens
  Table A; Target 3158; HLA-A*33:01; ACTL8; ENSG00000117148; CTA
FEQPGPSIPR

SEQ ID NO: 3159 - protein, 10 aa, Homo sapiens
  Table A; Target 3159; HLA-A*33:03; ACTL8; ENSG00000117148; CTA
FEQPGPSIPR

SEQ ID NO: 3160 - protein, 10 aa, Homo sapiens
  Table A; Target 3160; HLA-A*68:01; ACTL8; ENSG00000117148; CTA
FEQPGPSIPR

SEQ ID NO: 3161 - protein, 10 aa, Homo sapiens
  Table A; Target 3161; HLA-B*27:02; ACTL8; ENSG00000117148; CTA
FEQPGPSIPR

SEQ ID NO: 3162 - protein, 10 aa, Homo sapiens
  Table A; Target 3162; HLA-B*27:05; ACTL8; ENSG00000117148; CTA
FEQPGPSIPR

SEQ ID NO: 3163 - protein, 10 aa, Homo sapiens
  Table A; Target 3163; HLA-C*06:02; ACTL8; ENSG00000117148; CTA
FEQPGPSIPR

SEQ ID NO: 3164 - protein, 10 aa, Homo sapiens
  Table A; Target 3164; HLA-C*07:06; ACTL8; ENSG00000117148; CTA
FEQPGPSIPR

SEQ ID NO: 3165 - protein, 9 aa, Homo sapiens
  Table A; Target 3165; HLA-A*25:01; ACTL8; ENSG00000117148; CTA
FLKAGTAGW

SEQ ID NO: 3166 - protein, 9 aa, Homo sapiens
  Table A; Target 3166; HLA-A*32:01; ACTL8; ENSG00000117148; CTA
FLKAGTAGW

SEQ ID NO: 3167 - protein, 9 aa, Homo sapiens
  Table A; Target 3167; HLA-B*46:01; ACTL8; ENSG00000117148; CTA
FLKAGTAGW

SEQ ID NO: 3168 - protein, 8 aa, Homo sapiens
  Table A; Target 3168; HLA-B*35:01; ACTL8; ENSG00000117148; CTA
FPNIVNYL

SEQ ID NO: 3169 - protein, 8 aa, Homo sapiens
  Table A; Target 3169; HLA-B*51:01; ACTL8; ENSG00000117148; CTA
FPNIVNYL

SEQ ID NO: 3170 - protein, 8 aa, Homo sapiens
  Table A; Target 3170; HLA-B*54:01; ACTL8; ENSG00000117148; CTA
FPNIVNYL

SEQ ID NO: 3171 - protein, 9 aa, Homo sapiens
  Table A; Target 3171; HLA-B*54:01; ACTL8; ENSG00000117148; CTA
FPNIVNYLP

SEQ ID NO: 3172 - protein, 8 aa, Homo sapiens
  Table A; Target 3172; HLA-A*02:01; ACTL8; ENSG00000117148; CTA
FQLETVAV

SEQ ID NO: 3173 - protein, 8 aa, Homo sapiens
  Table A; Target 3173; HLA-A*30:01; ACTL8; ENSG00000117148; CTA
FQLETVAV

SEQ ID NO: 3174 - protein, 8 aa, Homo sapiens
  Table A; Target 3174; HLA-B*13:02; ACTL8; ENSG00000117148; CTA
FQLETVAV

SEQ ID NO: 3175 - protein, 8 aa, Homo sapiens
  Table A; Target 3175; HLA-C*03:04; ACTL8; ENSG00000117148; CTA
FQLETVAV

SEQ ID NO: 3176 - protein, 9 aa, Homo sapiens
  Table A; Target 3176; HLA-A*02:01; ACTL8; ENSG00000117148; CTA
FQLETVAVT

SEQ ID NO: 3177 - protein, 9 aa, Homo sapiens
  Table A; Target 3177; HLA-B*13:02; ACTL8; ENSG00000117148; CTA
FQLETVAVT

SEQ ID NO: 3178 - protein, 9 aa, Homo sapiens
  Table A; Target 3178; HLA-B*27:05; ACTL8; ENSG00000117148; CTA
FQLETVAVT

SEQ ID NO: 3179 - protein, 9 aa, Homo sapiens
  Table A; Target 3179; HLA-C*07:04; ACTL8; ENSG00000117148; CTA
FQLETVAVT

SEQ ID NO: 3180 - protein, 10 aa, Homo sapiens
  Table A; Target 3180; HLA-B*27:05; ACTL8; ENSG00000117148; CTA
FQLETVAVTQ

SEQ ID NO: 3181 - protein, 11 aa, Homo sapiens
  Table A; Target 3181; HLA-A*02:01; ACTL8; ENSG00000117148; CTA
FQLETVAVTQM

SEQ ID NO: 3182 - protein, 11 aa, Homo sapiens
  Table A; Target 3182; HLA-A*02:04; ACTL8; ENSG00000117148; CTA
FQLETVAVTQM

SEQ ID NO: 3183 - protein, 11 aa, Homo sapiens
  Table A; Target 3183; HLA-B*13:02; ACTL8; ENSG00000117148; CTA
FQLETVAVTQM

SEQ ID NO: 3184 - protein, 11 aa, Homo sapiens
  Table A; Target 3184; HLA-B*39:01; ACTL8; ENSG00000117148; CTA
FQLETVAVTQM

SEQ ID NO: 3185 - protein, 11 aa, Homo sapiens
  Table A; Target 3185; HLA-C*07:04; ACTL8; ENSG00000117148; CTA
FQLETVAVTQM

SEQ ID NO: 3186 - protein, 9 aa, Homo sapiens
  Table A; Target 3186; HLA-A*68:02; ACTL8; ENSG00000117148; CTA
FSVWLGASV

SEQ ID NO: 3187 - protein, 9 aa, Homo sapiens
  Table A; Target 3187; HLA-B*54:01; ACTL8; ENSG00000117148; CTA
FSVWLGASV

SEQ ID NO: 3188 - protein, 9 aa, Homo sapiens
  Table A; Target 3188; HLA-C*02:02; ACTL8; ENSG00000117148; CTA
FSVWLGASV

SEQ ID NO: 3189 - protein, 11 aa, Homo sapiens
  Table A; Target 3189; HLA-B*54:01; ACTL8; ENSG00000117148; CTA
FSVWLGASVVA

SEQ ID NO: 3190 - protein, 9 aa, Homo sapiens
  Table A; Target 3190; HLA-A*31:01; ACTL8; ENSG00000117148; CTA
FSYPIERGR

SEQ ID NO: 3191 - protein, 8 aa, Homo sapiens
  Table A; Target 3191; HLA-B*37:01; ACTL8; ENSG00000117148; CTA
GASVVAHL

SEQ ID NO: 3192 - protein, 8 aa, Homo sapiens
  Table A; Target 3192; HLA-C*03:04; ACTL8; ENSG00000117148; CTA
GASVVAHL

SEQ ID NO: 3193 - protein, 8 aa, Homo sapiens
  Table A; Target 3193; HLA-C*16:02; ACTL8; ENSG00000117148; CTA
GASVVAHL

SEQ ID NO: 3194 - protein, 11 aa, Homo sapiens
  Table A; Target 3194; HLA-A*30:02; ACTL8; ENSG00000117148; CTA
GASVVAHLSTY

SEQ ID NO: 3195 - protein, 11 aa, Homo sapiens
  Table A; Target 3195; HLA-B*15:01; ACTL8; ENSG00000117148; CTA
GASVVAHLSTY

SEQ ID NO: 3196 - protein, 11 aa, Homo sapiens
  Table A; Target 3196; HLA-B*15:03; ACTL8; ENSG00000117148; CTA
GASVVAHLSTY

SEQ ID NO: 3197 - protein, 11 aa, Homo sapiens
  Table A; Target 3197; HLA-B*46:01; ACTL8; ENSG00000117148; CTA
GASVVAHLSTY

SEQ ID NO: 3198 - protein, 11 aa, Homo sapiens
  Table A; Target 3198; HLA-C*02:02; ACTL8; ENSG00000117148; CTA
GASVVAHLSTY

SEQ ID NO: 3199 - protein, 11 aa, Homo sapiens
  Table A; Target 3199; HLA-C*03:03; ACTL8; ENSG00000117148; CTA
GASVVAHLSTY

SEQ ID NO: 3200 - protein, 11 aa, Homo sapiens
  Table A; Target 3200; HLA-C*04:01; ACTL8; ENSG00000117148; CTA
GASVVAHLSTY

SEQ ID NO: 3201 - protein, 11 aa, Homo sapiens
  Table A; Target 3201; HLA-C*16:04; ACTL8; ENSG00000117148; CTA
GASVVAHLSTY

SEQ ID NO: 3202 - protein, 8 aa, Homo sapiens
  Table A; Target 3202; HLA-B*27:05; ACTL8; ENSG00000117148; CTA
GDHVSSTK

SEQ ID NO: 3203 - protein, 8 aa, Homo sapiens
  Table A; Target 3203; HLA-B*37:01; ACTL8; ENSG00000117148; CTA
GDHVSSTK

SEQ ID NO: 3204 - protein, 8 aa, Homo sapiens
  Table A; Target 3204; HLA-C*06:02; ACTL8; ENSG00000117148; CTA
GDHVSSTK

SEQ ID NO: 3205 - protein, 11 aa, Homo sapiens
  Table A; Target 3205; HLA-A*03:02; ACTL8; ENSG00000117148; CTA
GGNTLYPGFTK

SEQ ID NO: 3206 - protein, 11 aa, Homo sapiens
  Table A; Target 3206; HLA-A*11:01; ACTL8; ENSG00000117148; CTA
GGNTLYPGFTK

SEQ ID NO: 3207 - protein, 8 aa, Homo sapiens
  Table A; Target 3207; HLA-A*02:01; ACTL8; ENSG00000117148; CTA
GLLTGVVV

SEQ ID NO: 3208 - protein, 8 aa, Homo sapiens
  Table A; Target 3208; HLA-A*02:04; ACTL8; ENSG00000117148; CTA
GLLTGVVV

SEQ ID NO: 3209 - protein, 8 aa, Homo sapiens
  Table A; Target 3209; HLA-B*13:02; ACTL8; ENSG00000117148; CTA
GLLTGVVV

SEQ ID NO: 3210 - protein, 10 aa, Homo sapiens
  Table A; Target 3210; HLA-A*02:01; ACTL8; ENSG00000117148; CTA
GLLTGVVVDS

SEQ ID NO: 3211 - protein, 8 aa, Homo sapiens
  Table A; Target 3211; HLA-B*37:01; ACTL8; ENSG00000117148; CTA
GLTRVQPF

SEQ ID NO: 3212 - protein, 10 aa, Homo sapiens
  Table A; Target 3212; HLA-B*27:02; ACTL8; ENSG00000117148; CTA
GNTLYPGFTK

SEQ ID NO: 3213 - protein, 10 aa, Homo sapiens
  Table A; Target 3213; HLA-B*27:05; ACTL8; ENSG00000117148; CTA
GNTLYPGFTK

SEQ ID NO: 3214 - protein, 9 aa, Homo sapiens
  Table A; Target 3214; HLA-B*07:02; ACTL8; ENSG00000117148; CTA
GPSIPRAIV

SEQ ID NO: 3215 - protein, 9 aa, Homo sapiens
  Table A; Target 3215; HLA-C*07:02; ACTL8; ENSG00000117148; CTA
GPSIPRAIV

SEQ ID NO: 3216 - protein, 11 aa, Homo sapiens
  Table A; Target 3216; HLA-B*07:02; ACTL8; ENSG00000117148; CTA
GPSYARRRVSL

SEQ ID NO: 3217 - protein, 8 aa, Homo sapiens
  Table A; Target 3217; HLA-B*38:01; ACTL8; ENSG00000117148; CTA
GQDLSAYL

SEQ ID NO: 3218 - protein, 8 aa, Homo sapiens
  Table A; Target 3218; HLA-C*05:01; ACTL8; ENSG00000117148; CTA
GQDLSAYL

SEQ ID NO: 3219 - protein, 9 aa, Homo sapiens
  Table A; Target 3219; HLA-A*02:07; ACTL8; ENSG00000117148; CTA
GQDLSAYLL

SEQ ID NO: 3220 - protein, 9 aa, Homo sapiens
  Table A; Target 3220; HLA-B*13:02; ACTL8; ENSG00000117148; CTA
GQDLSAYLL

SEQ ID NO: 3221 - protein, 9 aa, Homo sapiens
  Table A; Target 3221; HLA-B*15:01; ACTL8; ENSG00000117148; CTA
GQDLSAYLL

SEQ ID NO: 3222 - protein, 9 aa, Homo sapiens
  Table A; Target 3222; HLA-B*27:05; ACTL8; ENSG00000117148; CTA
GQDLSAYLL

SEQ ID NO: 3223 - protein, 9 aa, Homo sapiens
  Table A; Target 3223; HLA-B*38:01; ACTL8; ENSG00000117148; CTA
GQDLSAYLL

SEQ ID NO: 3224 - protein, 9 aa, Homo sapiens
  Table A; Target 3224; HLA-B*39:01; ACTL8; ENSG00000117148; CTA
GQDLSAYLL

SEQ ID NO: 3225 - protein, 9 aa, Homo sapiens
  Table A; Target 3225; HLA-B*40:01; ACTL8; ENSG00000117148; CTA
GQDLSAYLL

SEQ ID NO: 3226 - protein, 9 aa, Homo sapiens
  Table A; Target 3226; HLA-B*40:02; ACTL8; ENSG00000117148; CTA
GQDLSAYLL

SEQ ID NO: 3227 - protein, 9 aa, Homo sapiens
  Table A; Target 3227; HLA-C*04:01; ACTL8; ENSG00000117148; CTA
GQDLSAYLL

SEQ ID NO: 3228 - protein, 9 aa, Homo sapiens
  Table A; Target 3228; HLA-C*05:01; ACTL8; ENSG00000117148; CTA
GQDLSAYLL

SEQ ID NO: 3229 - protein, 9 aa, Homo sapiens
  Table A; Target 3229; HLA-C*07:04; ACTL8; ENSG00000117148; CTA
GQDLSAYLL

SEQ ID NO: 3230 - protein, 10 aa, Homo sapiens
  Table A; Target 3230; HLA-A*11:01; ACTL8; ENSG00000117148; CTA
GQDLSAYLLK

SEQ ID NO: 3231 - protein, 10 aa, Homo sapiens
  Table A; Target 3231; HLA-B*27:02; ACTL8; ENSG00000117148; CTA
GQDLSAYLLK

SEQ ID NO: 3232 - protein, 11 aa, Homo sapiens
  Table A; Target 3232; HLA-C*16:04; ACTL8; ENSG00000117148; CTA
GRILNWEGVQY

SEQ ID NO: 3233 - protein, 9 aa, Homo sapiens
  Table A; Target 3233; HLA-B*27:05; ACTL8; ENSG00000117148; CTA
GRPLPASGK

SEQ ID NO: 3234 - protein, 11 aa, Homo sapiens
  Table A; Target 3234; HLA-B*27:05; ACTL8; ENSG00000117148; CTA
GRPLPASGKTL

SEQ ID NO: 3235 - protein, 9 aa, Homo sapiens
  Table A; Target 3235; HLA-A*25:01; ACTL8; ENSG00000117148; CTA
GSNRNFSVW

SEQ ID NO: 3236 - protein, 9 aa, Homo sapiens
  Table A; Target 3236; HLA-A*32:01; ACTL8; ENSG00000117148; CTA
GSNRNFSVW

SEQ ID NO: 3237 - protein, 9 aa, Homo sapiens
  Table A; Target 3237; HLA-B*57:01; ACTL8; ENSG00000117148; CTA
GSNRNFSVW

SEQ ID NO: 3238 - protein, 9 aa, Homo sapiens
  Table A; Target 3238; HLA-B*58:01; ACTL8; ENSG00000117148; CTA
GSNRNFSVW

SEQ ID NO: 3239 - protein, 9 aa, Homo sapiens
  Table A; Target 3239; HLA-B*46:01; ACTL8; ENSG00000117148; CTA
GSRVELTPM

SEQ ID NO: 3240 - protein, 11 aa, Homo sapiens
  Table A; Target 3240; HLA-A*31:01; ACTL8; ENSG00000117148; CTA
GSRVELTPMQR

SEQ ID NO: 3241 - protein, 8 aa, Homo sapiens
  Table A; Target 3241; HLA-B*15:01; ACTL8; ENSG00000117148; CTA
GVVVDSGY

SEQ ID NO: 3242 - protein, 9 aa, Homo sapiens
  Table A; Target 3242; HLA-A*24:02; ACTL8; ENSG00000117148; CTA
GWNEPQMVF

SEQ ID NO: 3243 - protein, 10 aa, Homo sapiens
  Table A; Target 3243; HLA-A*24:02; ACTL8; ENSG00000117148; CTA
GYGLTRVQPF

SEQ ID NO: 3244 - protein, 9 aa, Homo sapiens
  Table A; Target 3244; HLA-A*25:01; ACTL8; ENSG00000117148; CTA
HLSTYQSEW

SEQ ID NO: 3245 - protein, 9 aa, Homo sapiens
  Table A; Target 3245; HLA-A*32:01; ACTL8; ENSG00000117148; CTA
HLSTYQSEW

SEQ ID NO: 3246 - protein, 9 aa, Homo sapiens
  Table A; Target 3246; HLA-B*57:01; ACTL8; ENSG00000117148; CTA
HLSTYQSEW

SEQ ID NO: 3247 - protein, 9 aa, Homo sapiens
  Table A; Target 3247; HLA-B*58:01; ACTL8; ENSG00000117148; CTA
HLSTYQSEW

SEQ ID NO: 3248 - protein, 10 aa, Homo sapiens
  Table A; Target 3248; HLA-B*35:03; ACTL8; ENSG00000117148; CTA
HVMACGGNTL

SEQ ID NO: 3249 - protein, 11 aa, Homo sapiens
  Table A; Target 3249; HLA-A*29:02; ACTL8; ENSG00000117148; CTA
HVMACGGNTLY

SEQ ID NO: 3250 - protein, 11 aa, Homo sapiens
  Table A; Target 3250; HLA-B*15:01; ACTL8; ENSG00000117148; CTA
HVMACGGNTLY

SEQ ID NO: 3251 - protein, 11 aa, Homo sapiens
  Table A; Target 3251; HLA-A*02:07; ACTL8; ENSG00000117148; CTA
HVPSVLLADQL

SEQ ID NO: 3252 - protein, 11 aa, Homo sapiens
  Table A; Target 3252; HLA-A*68:02; ACTL8; ENSG00000117148; CTA
HVPSVLLADQL

SEQ ID NO: 3253 - protein, 9 aa, Homo sapiens
  Table A; Target 3253; HLA-A*02:03; ACTL8; ENSG00000117148; CTA
HVSSTKATV

SEQ ID NO: 3254 - protein, 9 aa, Homo sapiens
  Table A; Target 3254; HLA-A*32:01; ACTL8; ENSG00000117148; CTA
HVSSTKATV

SEQ ID NO: 3255 - protein, 9 aa, Homo sapiens
  Table A; Target 3255; HLA-A*68:02; ACTL8; ENSG00000117148; CTA
HVSSTKATV

SEQ ID NO: 3256 - protein, 9 aa, Homo sapiens
  Table A; Target 3256; HLA-B*13:02; ACTL8; ENSG00000117148; CTA
HVSSTKATV

SEQ ID NO: 3257 - protein, 9 aa, Homo sapiens
  Table A; Target 3257; HLA-B*51:01; ACTL8; ENSG00000117148; CTA
HVSSTKATV

SEQ ID NO: 3258 - protein, 10 aa, Homo sapiens
  Table A; Target 3258; HLA-A*25:01; ACTL8; ENSG00000117148; CTA
HVSSTKATVW

SEQ ID NO: 3259 - protein, 10 aa, Homo sapiens
  Table A; Target 3259; HLA-A*32:01; ACTL8; ENSG00000117148; CTA
HVSSTKATVW

SEQ ID NO: 3260 - protein, 10 aa, Homo sapiens
  Table A; Target 3260; HLA-A*68:01; ACTL8; ENSG00000117148; CTA
HVSSTKATVW

SEQ ID NO: 3261 - protein, 10 aa, Homo sapiens
  Table A; Target 3261; HLA-B*44:03; ACTL8; ENSG00000117148; CTA
HVSSTKATVW

SEQ ID NO: 3262 - protein, 10 aa, Homo sapiens
  Table A; Target 3262; HLA-B*57:01; ACTL8; ENSG00000117148; CTA
HVSSTKATVW

SEQ ID NO: 3263 - protein, 10 aa, Homo sapiens
  Table A; Target 3263; HLA-B*58:01; ACTL8; ENSG00000117148; CTA
HVSSTKATVW

SEQ ID NO: 3264 - protein, 9 aa, Homo sapiens
  Table A; Target 3264; HLA-A*29:02; ACTL8; ENSG00000117148; CTA
ICHPDTFSY

SEQ ID NO: 3265 - protein, 9 aa, Homo sapiens
  Table A; Target 3265; HLA-A*30:02; ACTL8; ENSG00000117148; CTA
ICHPDTFSY

SEQ ID NO: 3266 - protein, 9 aa, Homo sapiens
  Table A; Target 3266; HLA-A*32:01; ACTL8; ENSG00000117148; CTA
ICHPDTFSY

SEQ ID NO: 3267 - protein, 9 aa, Homo sapiens
  Table A; Target 3267; HLA-B*15:01; ACTL8; ENSG00000117148; CTA
ICHPDTFSY

SEQ ID NO: 3268 - protein, 9 aa, Homo sapiens
  Table A; Target 3268; HLA-B*46:01; ACTL8; ENSG00000117148; CTA
ICHPDTFSY

SEQ ID NO: 3269 - protein, 8 aa, Homo sapiens
  Table A; Target 3269; HLA-B*40:02; ACTL8; ENSG00000117148; CTA
IDHGSGFL

SEQ ID NO: 3270 - protein, 8 aa, Homo sapiens
  Table A; Target 3270; HLA-C*06:02; ACTL8; ENSG00000117148; CTA
IDHGSGFL

SEQ ID NO: 3271 - protein, 8 aa, Homo sapiens
  Table A; Target 3271; HLA-C*07:01; ACTL8; ENSG00000117148; CTA
IDHGSGFL

SEQ ID NO: 3272 - protein, 8 aa, Homo sapiens
  Table A; Target 3272; HLA-C*07:04; ACTL8; ENSG00000117148; CTA
IDHGSGFL

SEQ ID NO: 3273 - protein, 9 aa, Homo sapiens
  Table A; Target 3273; HLA-A*03:01; ACTL8; ENSG00000117148; CTA
IDHGSGFLK

SEQ ID NO: 3274 - protein, 9 aa, Homo sapiens
  Table A; Target 3274; HLA-A*03:02; ACTL8; ENSG00000117148; CTA
IDHGSGFLK

SEQ ID NO: 3275 - protein, 9 aa, Homo sapiens
  Table A; Target 3275; HLA-A*11:01; ACTL8; ENSG00000117148; CTA
IDHGSGFLK

SEQ ID NO: 3276 - protein, 9 aa, Homo sapiens
  Table A; Target 3276; HLA-A*33:01; ACTL8; ENSG00000117148; CTA
IDHGSGFLK

SEQ ID NO: 3277 - protein, 9 aa, Homo sapiens
  Table A; Target 3277; HLA-B*27:02; ACTL8; ENSG00000117148; CTA
IDHGSGFLK

SEQ ID NO: 3278 - protein, 9 aa, Homo sapiens
  Table A; Target 3278; HLA-C*06:02; ACTL8; ENSG00000117148; CTA
IDHGSGFLK

SEQ ID NO: 3279 - protein, 9 aa, Homo sapiens
  Table A; Target 3279; HLA-C*07:01; ACTL8; ENSG00000117148; CTA
IDHGSGFLK

SEQ ID NO: 3280 - protein, 9 aa, Homo sapiens
  Table A; Target 3280; HLA-C*07:04; ACTL8; ENSG00000117148; CTA
IDHGSGFLK

SEQ ID NO: 3281 - protein, 9 aa, Homo sapiens
  Table A; Target 3281; HLA-A*24:02; ACTL8; ENSG00000117148; CTA
IDICHPDTF

SEQ ID NO: 3282 - protein, 9 aa, Homo sapiens
  Table A; Target 3282; HLA-B*37:01; ACTL8; ENSG00000117148; CTA
IDICHPDTF

SEQ ID NO: 3283 - protein, 9 aa, Homo sapiens
  Table A; Target 3283; HLA-B*44:02; ACTL8; ENSG00000117148; CTA
IERGRILNW

SEQ ID NO: 3284 - protein, 8 aa, Homo sapiens
  Table A; Target 3284; HLA-C*03:04; ACTL8; ENSG00000117148; CTA
IIDHGSGF

SEQ ID NO: 3285 - protein, 8 aa, Homo sapiens
  Table A; Target 3285; HLA-C*04:01; ACTL8; ENSG00000117148; CTA
IIDHGSGF

SEQ ID NO: 3286 - protein, 8 aa, Homo sapiens
  Table A; Target 3286; HLA-C*05:01; ACTL8; ENSG00000117148; CTA
IIDHGSGF

SEQ ID NO: 3287 - protein, 9 aa, Homo sapiens
  Table A; Target 3287; HLA-A*01:01; ACTL8; ENSG00000117148; CTA
IIDHGSGFL

SEQ ID NO: 3288 - protein, 9 aa, Homo sapiens
  Table A; Target 3288; HLA-A*02:07; ACTL8; ENSG00000117148; CTA
IIDHGSGFL

SEQ ID NO: 3289 - protein, 9 aa, Homo sapiens
  Table A; Target 3289; HLA-C*05:01; ACTL8; ENSG00000117148; CTA
IIDHGSGFL

SEQ ID NO: 3290 - protein, 10 aa, Homo sapiens
  Table A; Target 3290; HLA-A*01:01; ACTL8; ENSG00000117148; CTA
IIDHGSGFLK

SEQ ID NO: 3291 - protein, 10 aa, Homo sapiens
  Table A; Target 3291; HLA-A*03:01; ACTL8; ENSG00000117148; CTA
IIDHGSGFLK

SEQ ID NO: 3292 - protein, 10 aa, Homo sapiens
  Table A; Target 3292; HLA-A*03:02; ACTL8; ENSG00000117148; CTA
IIDHGSGFLK

SEQ ID NO: 3293 - protein, 10 aa, Homo sapiens
  Table A; Target 3293; HLA-A*11:01; ACTL8; ENSG00000117148; CTA
IIDHGSGFLK

SEQ ID NO: 3294 - protein, 11 aa, Homo sapiens
  Table A; Target 3294; HLA-A*02:07; ACTL8; ENSG00000117148; CTA
IIDHGSGFLKA

SEQ ID NO: 3295 - protein, 8 aa, Homo sapiens
  Table A; Target 3295; HLA-A*02:04; ACTL8; ENSG00000117148; CTA
ILFELLHV

SEQ ID NO: 3296 - protein, 11 aa, Homo sapiens
  Table A; Target 3296; HLA-A*02:01; ACTL8; ENSG00000117148; CTA
ILFELLHVPSV

SEQ ID NO: 3297 - protein, 11 aa, Homo sapiens
  Table A; Target 3297; HLA-A*02:03; ACTL8; ENSG00000117148; CTA
ILFELLHVPSV

SEQ ID NO: 3298 - protein, 11 aa, Homo sapiens
  Table A; Target 3298; HLA-A*02:04; ACTL8; ENSG00000117148; CTA
ILFELLHVPSV

SEQ ID NO: 3299 - protein, 9 aa, Homo sapiens
  Table A; Target 3299; HLA-A*01:01; ACTL8; ENSG00000117148; CTA
ILNWEGVQY

SEQ ID NO: 3300 - protein, 9 aa, Homo sapiens
  Table A; Target 3300; HLA-A*03:01; ACTL8; ENSG00000117148; CTA
ILNWEGVQY

SEQ ID NO: 3301 - protein, 9 aa, Homo sapiens
  Table A; Target 3301; HLA-A*03:02; ACTL8; ENSG00000117148; CTA
ILNWEGVQY

SEQ ID NO: 3302 - protein, 9 aa, Homo sapiens
  Table A; Target 3302; HLA-A*29:02; ACTL8; ENSG00000117148; CTA
ILNWEGVQY

SEQ ID NO: 3303 - protein, 9 aa, Homo sapiens
  Table A; Target 3303; HLA-A*30:02; ACTL8; ENSG00000117148; CTA
ILNWEGVQY

SEQ ID NO: 3304 - protein, 9 aa, Homo sapiens
  Table A; Target 3304; HLA-A*32:01; ACTL8; ENSG00000117148; CTA
ILNWEGVQY

SEQ ID NO: 3305 - protein, 9 aa, Homo sapiens
  Table A; Target 3305; HLA-B*15:01; ACTL8; ENSG00000117148; CTA
ILNWEGVQY

SEQ ID NO: 3306 - protein, 9 aa, Homo sapiens
  Table A; Target 3306; HLA-B*15:03; ACTL8; ENSG00000117148; CTA
ILNWEGVQY

SEQ ID NO: 3307 - protein, 9 aa, Homo sapiens
  Table A; Target 3307; HLA-B*46:01; ACTL8; ENSG00000117148; CTA
ILNWEGVQY

SEQ ID NO: 3308 - protein, 9 aa, Homo sapiens
  Table A; Target 3308; HLA-C*07:04; ACTL8; ENSG00000117148; CTA
ILNWEGVQY

SEQ ID NO: 3309 - protein, 10 aa, Homo sapiens
  Table A; Target 3309; HLA-A*02:03; ACTL8; ENSG00000117148; CTA
ILNWEGVQYL

SEQ ID NO: 3310 - protein, 10 aa, Homo sapiens
  Table A; Target 3310; HLA-A*02:04; ACTL8; ENSG00000117148; CTA
ILNWEGVQYL

SEQ ID NO: 3311 - protein, 9 aa, Homo sapiens
  Table A; Target 3311; HLA-B*07:02; ACTL8; ENSG00000117148; CTA
IPRAIVESV

SEQ ID NO: 3312 - protein, 9 aa, Homo sapiens
  Table A; Target 3312; HLA-B*08:01; ACTL8; ENSG00000117148; CTA
IPRAIVESV

SEQ ID NO: 3313 - protein, 9 aa, Homo sapiens
  Table A; Target 3313; HLA-B*51:01; ACTL8; ENSG00000117148; CTA
IPRAIVESV

SEQ ID NO: 3314 - protein, 9 aa, Homo sapiens
  Table A; Target 3314; HLA-B*54:01; ACTL8; ENSG00000117148; CTA
IPRAIVESV

SEQ ID NO: 3315 - protein, 9 aa, Homo sapiens
  Table A; Target 3315; HLA-B*55:01; ACTL8; ENSG00000117148; CTA
IPRAIVESV

SEQ ID NO: 3316 - protein, 9 aa, Homo sapiens
  Table A; Target 3316; HLA-B*56:01; ACTL8; ENSG00000117148; CTA
IPRAIVESV

SEQ ID NO: 3317 - protein, 9 aa, Homo sapiens
  Table A; Target 3317; HLA-C*07:02; ACTL8; ENSG00000117148; CTA
IPRAIVESV

SEQ ID NO: 3318 - protein, 8 aa, Homo sapiens
  Table A; Target 3318; HLA-B*51:01; ACTL8; ENSG00000117148; CTA
ISLRPLLV

SEQ ID NO: 3319 - protein, 10 aa, Homo sapiens
  Table A; Target 3319; HLA-C*05:01; ACTL8; ENSG00000117148; CTA
IVESVESCEI

SEQ ID NO: 3320 - protein, 8 aa, Homo sapiens
  Table A; Target 3320; HLA-A*30:02; ACTL8; ENSG00000117148; CTA
KENPGPSY

SEQ ID NO: 3321 - protein, 8 aa, Homo sapiens
  Table A; Target 3321; HLA-A*32:01; ACTL8; ENSG00000117148; CTA
KENPGPSY

SEQ ID NO: 3322 - protein, 8 aa, Homo sapiens
  Table A; Target 3322; HLA-B*15:03; ACTL8; ENSG00000117148; CTA
KENPGPSY

SEQ ID NO: 3323 - protein, 8 aa, Homo sapiens
  Table A; Target 3323; HLA-B*18:01; ACTL8; ENSG00000117148; CTA
KENPGPSY

SEQ ID NO: 3324 - protein, 8 aa, Homo sapiens
  Table A; Target 3324; HLA-B*27:02; ACTL8; ENSG00000117148; CTA
KENPGPSY

SEQ ID NO: 3325 - protein, 8 aa, Homo sapiens
  Table A; Target 3325; HLA-B*37:01; ACTL8; ENSG00000117148; CTA
KENPGPSY

SEQ ID NO: 3326 - protein, 8 aa, Homo sapiens
  Table A; Target 3326; HLA-B*39:01; ACTL8; ENSG00000117148; CTA
KENPGPSY

SEQ ID NO: 3327 - protein, 8 aa, Homo sapiens
  Table A; Target 3327; HLA-B*44:02; ACTL8; ENSG00000117148; CTA
KENPGPSY

SEQ ID NO: 3328 - protein, 8 aa, Homo sapiens
  Table A; Target 3328; HLA-B*44:03; ACTL8; ENSG00000117148; CTA
KENPGPSY

SEQ ID NO: 3329 - protein, 8 aa, Homo sapiens
  Table A; Target 3329; HLA-C*02:02; ACTL8; ENSG00000117148; CTA
KENPGPSY

SEQ ID NO: 3330 - protein, 8 aa, Homo sapiens
  Table A; Target 3330; HLA-C*14:02; ACTL8; ENSG00000117148; CTA
KENPGPSY

SEQ ID NO: 3331 - protein, 8 aa, Homo sapiens
  Table A; Target 3331; HLA-C*16:01; ACTL8; ENSG00000117148; CTA
KENPGPSY

SEQ ID NO: 3332 - protein, 8 aa, Homo sapiens
  Table A; Target 3332; HLA-C*16:02; ACTL8; ENSG00000117148; CTA
KENPGPSY

SEQ ID NO: 3333 - protein, 8 aa, Homo sapiens
  Table A; Target 3333; HLA-C*16:04; ACTL8; ENSG00000117148; CTA
KENPGPSY

SEQ ID NO: 3334 - protein, 9 aa, Homo sapiens
  Table A; Target 3334; HLA-B*37:01; ACTL8; ENSG00000117148; CTA
KENPGPSYA

SEQ ID NO: 3335 - protein, 9 aa, Homo sapiens
  Table A; Target 3335; HLA-B*40:01; ACTL8; ENSG00000117148; CTA
KENPGPSYA

SEQ ID NO: 3336 - protein, 9 aa, Homo sapiens
  Table A; Target 3336; HLA-B*40:02; ACTL8; ENSG00000117148; CTA
KENPGPSYA

SEQ ID NO: 3337 - protein, 9 aa, Homo sapiens
  Table A; Target 3337; HLA-B*49:01; ACTL8; ENSG00000117148; CTA
KENPGPSYA

SEQ ID NO: 3338 - protein, 10 aa, Homo sapiens
  Table A; Target 3338; HLA-A*03:02; ACTL8; ENSG00000117148; CTA
KENPGPSYAR

SEQ ID NO: 3339 - protein, 10 aa, Homo sapiens
  Table A; Target 3339; HLA-A*31:01; ACTL8; ENSG00000117148; CTA
KENPGPSYAR

SEQ ID NO: 3340 - protein, 10 aa, Homo sapiens
  Table A; Target 3340; HLA-B*27:05; ACTL8; ENSG00000117148; CTA
KENPGPSYAR

SEQ ID NO: 3341 - protein, 10 aa, Homo sapiens
  Table A; Target 3341; HLA-B*37:01; ACTL8; ENSG00000117148; CTA
KENPGPSYAR

SEQ ID NO: 3342 - protein, 10 aa, Homo sapiens
  Table A; Target 3342; HLA-B*40:01; ACTL8; ENSG00000117148; CTA
KENPGPSYAR

SEQ ID NO: 3343 - protein, 10 aa, Homo sapiens
  Table A; Target 3343; HLA-B*44:02; ACTL8; ENSG00000117148; CTA
KENPGPSYAR

SEQ ID NO: 3344 - protein, 10 aa, Homo sapiens
  Table A; Target 3344; HLA-B*44:03; ACTL8; ENSG00000117148; CTA
KENPGPSYAR

SEQ ID NO: 3345 - protein, 10 aa, Homo sapiens
  Table A; Target 3345; HLA-B*57:01; ACTL8; ENSG00000117148; CTA
KENPGPSYAR

SEQ ID NO: 3346 - protein, 10 aa, Homo sapiens
  Table A; Target 3346; HLA-C*16:04; ACTL8; ENSG00000117148; CTA
KENPGPSYAR

SEQ ID NO: 3347 - protein, 11 aa, Homo sapiens
  Table A; Target 3347; HLA-A*31:01; ACTL8; ENSG00000117148; CTA
KENPGPSYARR

SEQ ID NO: 3348 - protein, 9 aa, Homo sapiens
  Table A; Target 3348; HLA-A*02:01; ACTL8; ENSG00000117148; CTA
KMLEILFEL

SEQ ID NO: 3349 - protein, 9 aa, Homo sapiens
  Table A; Target 3349; HLA-A*02:04; ACTL8; ENSG00000117148; CTA
KMLEILFEL

SEQ ID NO: 3350 - protein, 9 aa, Homo sapiens
  Table A; Target 3350; HLA-A*02:07; ACTL8; ENSG00000117148; CTA
KMLEILFEL

SEQ ID NO: 3351 - protein, 9 aa, Homo sapiens
  Table A; Target 3351; HLA-A*31:01; ACTL8; ENSG00000117148; CTA
KMLEILFEL

SEQ ID NO: 3352 - protein, 10 aa, Homo sapiens
  Table A; Target 3352; HLA-A*02:01; ACTL8; ENSG00000117148; CTA
KMLEILFELL

SEQ ID NO: 3353 - protein, 10 aa, Homo sapiens
  Table A; Target 3353; HLA-A*02:04; ACTL8; ENSG00000117148; CTA
KMLEILFELL

SEQ ID NO: 3354 - protein, 10 aa, Homo sapiens
  Table A; Target 3354; HLA-A*02:07; ACTL8; ENSG00000117148; CTA
KMLEILFELL

SEQ ID NO: 3355 - protein, 10 aa, Homo sapiens
  Table A; Target 3355; HLA-A*32:01; ACTL8; ENSG00000117148; CTA
KTLEFAGQDL

SEQ ID NO: 3356 - protein, 10 aa, Homo sapiens
  Table A; Target 3356; HLA-B*40:02; ACTL8; ENSG00000117148; CTA
KTLEFAGQDL

SEQ ID NO: 3357 - protein, 10 aa, Homo sapiens
  Table A; Target 3357; HLA-B*57:01; ACTL8; ENSG00000117148; CTA
KTLEFAGQDL

SEQ ID NO: 3358 - protein, 10 aa, Homo sapiens
  Table A; Target 3358; HLA-B*58:01; ACTL8; ENSG00000117148; CTA
KTLEFAGQDL

SEQ ID NO: 3359 - protein, 10 aa, Homo sapiens
  Table A; Target 3359; HLA-C*01:02; ACTL8; ENSG00000117148; CTA
KTLEFAGQDL

SEQ ID NO: 3360 - protein, 10 aa, Homo sapiens
  Table A; Target 3360; HLA-C*03:04; ACTL8; ENSG00000117148; CTA
KTLEFAGQDL

SEQ ID NO: 3361 - protein, 10 aa, Homo sapiens
  Table A; Target 3361; HLA-C*06:02; ACTL8; ENSG00000117148; CTA
KTLEFAGQDL

SEQ ID NO: 3362 - protein, 9 aa, Homo sapiens
  Table A; Target 3362; HLA-A*01:01; ACTL8; ENSG00000117148; CTA
LADQLQMSL

SEQ ID NO: 3363 - protein, 9 aa, Homo sapiens
  Table A; Target 3363; HLA-A*02:07; ACTL8; ENSG00000117148; CTA
LADQLQMSL

SEQ ID NO: 3364 - protein, 9 aa, Homo sapiens
  Table A; Target 3364; HLA-B*35:01; ACTL8; ENSG00000117148; CTA
LADQLQMSL

SEQ ID NO: 3365 - protein, 9 aa, Homo sapiens
  Table A; Target 3365; HLA-B*35:03; ACTL8; ENSG00000117148; CTA
LADQLQMSL

SEQ ID NO: 3366 - protein, 9 aa, Homo sapiens
  Table A; Target 3366; HLA-B*38:01; ACTL8; ENSG00000117148; CTA
LADQLQMSL

SEQ ID NO: 3367 - protein, 9 aa, Homo sapiens
  Table A; Target 3367; HLA-B*39:01; ACTL8; ENSG00000117148; CTA
LADQLQMSL

SEQ ID NO: 3368 - protein, 9 aa, Homo sapiens
  Table A; Target 3368; HLA-C*02:02; ACTL8; ENSG00000117148; CTA
LADQLQMSL

SEQ ID NO: 3369 - protein, 9 aa, Homo sapiens
  Table A; Target 3369; HLA-C*03:03; ACTL8; ENSG00000117148; CTA
LADQLQMSL

SEQ ID NO: 3370 - protein, 9 aa, Homo sapiens
  Table A; Target 3370; HLA-C*03:04; ACTL8; ENSG00000117148; CTA
LADQLQMSL

SEQ ID NO: 3371 - protein, 9 aa, Homo sapiens
  Table A; Target 3371; HLA-C*05:01; ACTL8; ENSG00000117148; CTA
LADQLQMSL

SEQ ID NO: 3372 - protein, 10 aa, Homo sapiens
  Table A; Target 3372; HLA-A*01:01; ACTL8; ENSG00000117148; CTA
LADQLQMSLY

SEQ ID NO: 3373 - protein, 10 aa, Homo sapiens
  Table A; Target 3373; HLA-B*27:02; ACTL8; ENSG00000117148; CTA
LADQLQMSLY

SEQ ID NO: 3374 - protein, 10 aa, Homo sapiens
  Table A; Target 3374; HLA-C*05:01; ACTL8; ENSG00000117148; CTA
LADQLQMSLY

SEQ ID NO: 3375 - protein, 10 aa, Homo sapiens
  Table A; Target 3375; HLA-C*07:01; ACTL8; ENSG00000117148; CTA
LADQLQMSLY

SEQ ID NO: 3376 - protein, 9 aa, Homo sapiens
  Table A; Target 3376; HLA-B*38:01; ACTL8; ENSG00000117148; CTA
LDESNTYQL

SEQ ID NO: 3377 - protein, 9 aa, Homo sapiens
  Table A; Target 3377; HLA-B*40:01; ACTL8; ENSG00000117148; CTA
LDESNTYQL

SEQ ID NO: 3378 - protein, 8 aa, Homo sapiens
  Table A; Target 3378; HLA-A*30:01; ACTL8; ENSG00000117148; CTA
LEFAGQDL

SEQ ID NO: 3379 - protein, 8 aa, Homo sapiens
  Table A; Target 3379; HLA-B*18:01; ACTL8; ENSG00000117148; CTA
LEFAGQDL

SEQ ID NO: 3380 - protein, 8 aa, Homo sapiens
  Table A; Target 3380; HLA-B*37:01; ACTL8; ENSG00000117148; CTA
LEFAGQDL

SEQ ID NO: 3381 - protein, 8 aa, Homo sapiens
  Table A; Target 3381; HLA-B*40:01; ACTL8; ENSG00000117148; CTA
LEFAGQDL

SEQ ID NO: 3382 - protein, 8 aa, Homo sapiens
  Table A; Target 3382; HLA-B*40:02; ACTL8; ENSG00000117148; CTA
LEFAGQDL

SEQ ID NO: 3383 - protein, 8 aa, Homo sapiens
  Table A; Target 3383; HLA-B*49:01; ACTL8; ENSG00000117148; CTA
LEFAGQDL

SEQ ID NO: 3384 - protein, 10 aa, Homo sapiens
  Table A; Target 3384; HLA-A*30:01; ACTL8; ENSG00000117148; CTA
LEFAGQDLSA

SEQ ID NO: 3385 - protein, 10 aa, Homo sapiens
  Table A; Target 3385; HLA-B*40:01; ACTL8; ENSG00000117148; CTA
LEFAGQDLSA

SEQ ID NO: 3386 - protein, 10 aa, Homo sapiens
  Table A; Target 3386; HLA-B*40:02; ACTL8; ENSG00000117148; CTA
LEFAGQDLSA

SEQ ID NO: 3387 - protein, 10 aa, Homo sapiens
  Table A; Target 3387; HLA-B*49:01; ACTL8; ENSG00000117148; CTA
LEFAGQDLSA

SEQ ID NO: 3388 - protein, 10 aa, Homo sapiens
  Table A; Target 3388; HLA-B*54:01; ACTL8; ENSG00000117148; CTA
LEFAGQDLSA

SEQ ID NO: 3389 - protein, 11 aa, Homo sapiens
  Table A; Target 3389; HLA-A*30:02; ACTL8; ENSG00000117148; CTA
LEFAGQDLSAY

SEQ ID NO: 3390 - protein, 11 aa, Homo sapiens
  Table A; Target 3390; HLA-B*15:01; ACTL8; ENSG00000117148; CTA
LEFAGQDLSAY

SEQ ID NO: 3391 - protein, 11 aa, Homo sapiens
  Table A; Target 3391; HLA-B*15:03; ACTL8; ENSG00000117148; CTA
LEFAGQDLSAY

SEQ ID NO: 3392 - protein, 11 aa, Homo sapiens
  Table A; Target 3392; HLA-B*18:01; ACTL8; ENSG00000117148; CTA
LEFAGQDLSAY

SEQ ID NO: 3393 - protein, 11 aa, Homo sapiens
  Table A; Target 3393; HLA-B*27:02; ACTL8; ENSG00000117148; CTA
LEFAGQDLSAY

SEQ ID NO: 3394 - protein, 11 aa, Homo sapiens
  Table A; Target 3394; HLA-B*40:01; ACTL8; ENSG00000117148; CTA
LEFAGQDLSAY

SEQ ID NO: 3395 - protein, 11 aa, Homo sapiens
  Table A; Target 3395; HLA-B*44:02; ACTL8; ENSG00000117148; CTA
LEFAGQDLSAY

SEQ ID NO: 3396 - protein, 11 aa, Homo sapiens
  Table A; Target 3396; HLA-B*44:03; ACTL8; ENSG00000117148; CTA
LEFAGQDLSAY

SEQ ID NO: 3397 - protein, 11 aa, Homo sapiens
  Table A; Target 3397; HLA-B*46:01; ACTL8; ENSG00000117148; CTA
LEFAGQDLSAY

SEQ ID NO: 3398 - protein, 11 aa, Homo sapiens
  Table A; Target 3398; HLA-B*49:01; ACTL8; ENSG00000117148; CTA
LEFAGQDLSAY

SEQ ID NO: 3399 - protein, 11 aa, Homo sapiens
  Table A; Target 3399; HLA-C*02:02; ACTL8; ENSG00000117148; CTA
LEFAGQDLSAY

SEQ ID NO: 3400 - protein, 11 aa, Homo sapiens
  Table A; Target 3400; HLA-C*12:03; ACTL8; ENSG00000117148; CTA
LEFAGQDLSAY

SEQ ID NO: 3401 - protein, 11 aa, Homo sapiens
  Table A; Target 3401; HLA-C*16:04; ACTL8; ENSG00000117148; CTA
LEFAGQDLSAY

SEQ ID NO: 3402 - protein, 8 aa, Homo sapiens
  Table A; Target 3402; HLA-B*18:01; ACTL8; ENSG00000117148; CTA
LEILFELL

SEQ ID NO: 3403 - protein, 8 aa, Homo sapiens
  Table A; Target 3403; HLA-B*49:01; ACTL8; ENSG00000117148; CTA
LEILFELL

SEQ ID NO: 3404 - protein, 8 aa, Homo sapiens
  Table A; Target 3404; HLA-B*18:01; ACTL8; ENSG00000117148; CTA
LETVAVTQ

SEQ ID NO: 3405 - protein, 8 aa, Homo sapiens
  Table A; Target 3405; HLA-B*49:01; ACTL8; ENSG00000117148; CTA
LETVAVTQ

SEQ ID NO: 3406 - protein, 8 aa, Homo sapiens
  Table A; Target 3406; HLA-C*07:04; ACTL8; ENSG00000117148; CTA
LETVAVTQ

SEQ ID NO: 3407 - protein, 9 aa, Homo sapiens
  Table A; Target 3407; HLA-A*30:01; ACTL8; ENSG00000117148; CTA
LETVAVTQM

SEQ ID NO: 3408 - protein, 9 aa, Homo sapiens
  Table A; Target 3408; HLA-B*18:01; ACTL8; ENSG00000117148; CTA
LETVAVTQM

SEQ ID NO: 3409 - protein, 9 aa, Homo sapiens
  Table A; Target 3409; HLA-B*37:01; ACTL8; ENSG00000117148; CTA
LETVAVTQM

SEQ ID NO: 3410 - protein, 9 aa, Homo sapiens
  Table A; Target 3410; HLA-B*40:01; ACTL8; ENSG00000117148; CTA
LETVAVTQM

SEQ ID NO: 3411 - protein, 9 aa, Homo sapiens
  Table A; Target 3411; HLA-B*40:02; ACTL8; ENSG00000117148; CTA
LETVAVTQM

SEQ ID NO: 3412 - protein, 9 aa, Homo sapiens
  Table A; Target 3412; HLA-B*44:02; ACTL8; ENSG00000117148; CTA
LETVAVTQM

SEQ ID NO: 3413 - protein, 9 aa, Homo sapiens
  Table A; Target 3413; HLA-B*44:03; ACTL8; ENSG00000117148; CTA
LETVAVTQM

SEQ ID NO: 3414 - protein, 9 aa, Homo sapiens
  Table A; Target 3414; HLA-B*49:01; ACTL8; ENSG00000117148; CTA
LETVAVTQM

SEQ ID NO: 3415 - protein, 9 aa, Homo sapiens
  Table A; Target 3415; HLA-C*02:02; ACTL8; ENSG00000117148; CTA
LETVAVTQM

SEQ ID NO: 3416 - protein, 9 aa, Homo sapiens
  Table A; Target 3416; HLA-C*04:01; ACTL8; ENSG00000117148; CTA
LETVAVTQM

SEQ ID NO: 3417 - protein, 9 aa, Homo sapiens
  Table A; Target 3417; HLA-C*07:04; ACTL8; ENSG00000117148; CTA
LETVAVTQM

SEQ ID NO: 3418 - protein, 9 aa, Homo sapiens
  Table A; Target 3418; HLA-C*16:02; ACTL8; ENSG00000117148; CTA
LETVAVTQM

SEQ ID NO: 3419 - protein, 11 aa, Homo sapiens
  Table A; Target 3419; HLA-B*27:02; ACTL8; ENSG00000117148; CTA
LETVAVTQMNK

SEQ ID NO: 3420 - protein, 9 aa, Homo sapiens
  Table A; Target 3420; HLA-C*04:01; ACTL8; ENSG00000117148; CTA
LFQLETVAV

SEQ ID NO: 3421 - protein, 9 aa, Homo sapiens
  Table A; Target 3421; HLA-C*14:02; ACTL8; ENSG00000117148; CTA
LFQLETVAV

SEQ ID NO: 3422 - protein, 9 aa, Homo sapiens
  Table A; Target 3422; HLA-A*02:03; ACTL8; ENSG00000117148; CTA
LGASVVAHL

SEQ ID NO: 3423 - protein, 9 aa, Homo sapiens
  Table A; Target 3423; HLA-A*02:04; ACTL8; ENSG00000117148; CTA
LGASVVAHL

SEQ ID NO: 3424 - protein, 9 aa, Homo sapiens
  Table A; Target 3424; HLA-A*23:01; ACTL8; ENSG00000117148; CTA
LGASVVAHL

SEQ ID NO: 3425 - protein, 9 aa, Homo sapiens
  Table A; Target 3425; HLA-A*30:01; ACTL8; ENSG00000117148; CTA
LGASVVAHL

SEQ ID NO: 3426 - protein, 9 aa, Homo sapiens
  Table A; Target 3426; HLA-A*32:01; ACTL8; ENSG00000117148; CTA
LGASVVAHL

SEQ ID NO: 3427 - protein, 9 aa, Homo sapiens
  Table A; Target 3427; HLA-A*68:02; ACTL8; ENSG00000117148; CTA
LGASVVAHL

SEQ ID NO: 3428 - protein, 9 aa, Homo sapiens
  Table A; Target 3428; HLA-B*07:02; ACTL8; ENSG00000117148; CTA
LGASVVAHL

SEQ ID NO: 3429 - protein, 9 aa, Homo sapiens
  Table A; Target 3429; HLA-B*27:05; ACTL8; ENSG00000117148; CTA
LGASVVAHL

SEQ ID NO: 3430 - protein, 9 aa, Homo sapiens
  Table A; Target 3430; HLA-B*35:03; ACTL8; ENSG00000117148; CTA
LGASVVAHL

SEQ ID NO: 3431 - protein, 9 aa, Homo sapiens
  Table A; Target 3431; HLA-B*40:01; ACTL8; ENSG00000117148; CTA
LGASVVAHL

SEQ ID NO: 3432 - protein, 9 aa, Homo sapiens
  Table A; Target 3432; HLA-B*58:01; ACTL8; ENSG00000117148; CTA
LGASVVAHL

SEQ ID NO: 3433 - protein, 9 aa, Homo sapiens
  Table A; Target 3433; HLA-C*01:02; ACTL8; ENSG00000117148; CTA
LGASVVAHL

SEQ ID NO: 3434 - protein, 9 aa, Homo sapiens
  Table A; Target 3434; HLA-C*02:02; ACTL8; ENSG00000117148; CTA
LGASVVAHL

SEQ ID NO: 3435 - protein, 9 aa, Homo sapiens
  Table A; Target 3435; HLA-C*03:03; ACTL8; ENSG00000117148; CTA
LGASVVAHL

SEQ ID NO: 3436 - protein, 9 aa, Homo sapiens
  Table A; Target 3436; HLA-C*03:04; ACTL8; ENSG00000117148; CTA
LGASVVAHL

SEQ ID NO: 3437 - protein, 9 aa, Homo sapiens
  Table A; Target 3437; HLA-C*06:02; ACTL8; ENSG00000117148; CTA
LGASVVAHL

SEQ ID NO: 3438 - protein, 9 aa, Homo sapiens
  Table A; Target 3438; HLA-C*07:02; ACTL8; ENSG00000117148; CTA
LGASVVAHL

SEQ ID NO: 3439 - protein, 9 aa, Homo sapiens
  Table A; Target 3439; HLA-C*07:04; ACTL8; ENSG00000117148; CTA
LGASVVAHL

SEQ ID NO: 3440 - protein, 9 aa, Homo sapiens
  Table A; Target 3440; HLA-C*12:03; ACTL8; ENSG00000117148; CTA
LGASVVAHL

SEQ ID NO: 3441 - protein, 9 aa, Homo sapiens
  Table A; Target 3441; HLA-C*14:02; ACTL8; ENSG00000117148; CTA
LGASVVAHL

SEQ ID NO: 3442 - protein, 9 aa, Homo sapiens
  Table A; Target 3442; HLA-C*16:01; ACTL8; ENSG00000117148; CTA
LGASVVAHL

SEQ ID NO: 3443 - protein, 9 aa, Homo sapiens
  Table A; Target 3443; HLA-C*16:02; ACTL8; ENSG00000117148; CTA
LGASVVAHL

SEQ ID NO: 3444 - protein, 10 aa, Homo sapiens
  Table A; Target 3444; HLA-A*02:01; ACTL8; ENSG00000117148; CTA
LLADQLQMSL

SEQ ID NO: 3445 - protein, 10 aa, Homo sapiens
  Table A; Target 3445; HLA-A*02:03; ACTL8; ENSG00000117148; CTA
LLADQLQMSL

SEQ ID NO: 3446 - protein, 10 aa, Homo sapiens
  Table A; Target 3446; HLA-A*02:04; ACTL8; ENSG00000117148; CTA
LLADQLQMSL

SEQ ID NO: 3447 - protein, 11 aa, Homo sapiens
  Table A; Target 3447; HLA-A*01:01; ACTL8; ENSG00000117148; CTA
LLADQLQMSLY

SEQ ID NO: 3448 - protein, 11 aa, Homo sapiens
  Table A; Target 3448; HLA-A*29:02; ACTL8; ENSG00000117148; CTA
LLADQLQMSLY

SEQ ID NO: 3449 - protein, 11 aa, Homo sapiens
  Table A; Target 3449; HLA-A*30:02; ACTL8; ENSG00000117148; CTA
LLADQLQMSLY

SEQ ID NO: 3450 - protein, 11 aa, Homo sapiens
  Table A; Target 3450; HLA-B*15:01; ACTL8; ENSG00000117148; CTA
LLADQLQMSLY

SEQ ID NO: 3451 - protein, 8 aa, Homo sapiens
  Table A; Target 3451; HLA-B*08:01; ACTL8; ENSG00000117148; CTA
LLHVPSVL

SEQ ID NO: 3452 - protein, 8 aa, Homo sapiens
  Table A; Target 3452; HLA-C*03:03; ACTL8; ENSG00000117148; CTA
LLHVPSVL

SEQ ID NO: 3453 - protein, 8 aa, Homo sapiens
  Table A; Target 3453; HLA-C*03:04; ACTL8; ENSG00000117148; CTA
LLHVPSVL

SEQ ID NO: 3454 - protein, 9 aa, Homo sapiens
  Table A; Target 3454; HLA-A*02:01; ACTL8; ENSG00000117148; CTA
LLHVPSVLL

SEQ ID NO: 3455 - protein, 9 aa, Homo sapiens
  Table A; Target 3455; HLA-A*02:04; ACTL8; ENSG00000117148; CTA
LLHVPSVLL

SEQ ID NO: 3456 - protein, 9 aa, Homo sapiens
  Table A; Target 3456; HLA-A*02:07; ACTL8; ENSG00000117148; CTA
LLHVPSVLL

SEQ ID NO: 3457 - protein, 11 aa, Homo sapiens
  Table A; Target 3457; HLA-A*01:01; ACTL8; ENSG00000117148; CTA
LLTGVVVDSGY

SEQ ID NO: 3458 - protein, 11 aa, Homo sapiens
  Table A; Target 3458; HLA-A*30:02; ACTL8; ENSG00000117148; CTA
LLTGVVVDSGY

SEQ ID NO: 3459 - protein, 11 aa, Homo sapiens
  Table A; Target 3459; HLA-C*04:01; ACTL8; ENSG00000117148; CTA
LLTGVVVDSGY

SEQ ID NO: 3460 - protein, 11 aa, Homo sapiens
  Table A; Target 3460; HLA-C*07:01; ACTL8; ENSG00000117148; CTA
LLTGVVVDSGY

SEQ ID NO: 3461 - protein, 9 aa, Homo sapiens
  Table A; Target 3461; HLA-A*02:01; ACTL8; ENSG00000117148; CTA
LLVSHVMAC

SEQ ID NO: 3462 - protein, 9 aa, Homo sapiens
  Table A; Target 3462; HLA-A*02:03; ACTL8; ENSG00000117148; CTA
LLVSHVMAC

SEQ ID NO: 3463 - protein, 9 aa, Homo sapiens
  Table A; Target 3463; HLA-A*02:01; ACTL8; ENSG00000117148; CTA
LMGDHVSST

SEQ ID NO: 3464 - protein, 9 aa, Homo sapiens
  Table A; Target 3464; HLA-A*02:03; ACTL8; ENSG00000117148; CTA
LMGDHVSST

SEQ ID NO: 3465 - protein, 9 aa, Homo sapiens
  Table A; Target 3465; HLA-A*32:01; ACTL8; ENSG00000117148; CTA
LMGDHVSST

SEQ ID NO: 3466 - protein, 10 aa, Homo sapiens
  Table A; Target 3466; HLA-A*03:01; ACTL8; ENSG00000117148; CTA
LMGDHVSSTK

SEQ ID NO: 3467 - protein, 10 aa, Homo sapiens
  Table A; Target 3467; HLA-A*03:02; ACTL8; ENSG00000117148; CTA
LMGDHVSSTK

SEQ ID NO: 3468 - protein, 8 aa, Homo sapiens
  Table A; Target 3468; HLA-B*07:02; ACTL8; ENSG00000117148; CTA
LPASGKTL

SEQ ID NO: 3469 - protein, 8 aa, Homo sapiens
  Table A; Target 3469; HLA-B*08:01; ACTL8; ENSG00000117148; CTA
LPASGKTL

SEQ ID NO: 3470 - protein, 8 aa, Homo sapiens
  Table A; Target 3470; HLA-B*35:03; ACTL8; ENSG00000117148; CTA
LPASGKTL

SEQ ID NO: 3471 - protein, 8 aa, Homo sapiens
  Table A; Target 3471; HLA-B*51:01; ACTL8; ENSG00000117148; CTA
LPASGKTL

SEQ ID NO: 3472 - protein, 8 aa, Homo sapiens
  Table A; Target 3472; HLA-C*07:02; ACTL8; ENSG00000117148; CTA
LPASGKTL

SEQ ID NO: 3473 - protein, 10 aa, Homo sapiens
  Table A; Target 3473; HLA-B*07:02; ACTL8; ENSG00000117148; CTA
LPASGKTLEF

SEQ ID NO: 3474 - protein, 10 aa, Homo sapiens
  Table A; Target 3474; HLA-B*35:01; ACTL8; ENSG00000117148; CTA
LPASGKTLEF

SEQ ID NO: 3475 - protein, 10 aa, Homo sapiens
  Table A; Target 3475; HLA-B*35:03; ACTL8; ENSG00000117148; CTA
LPASGKTLEF

SEQ ID NO: 3476 - protein, 10 aa, Homo sapiens
  Table A; Target 3476; HLA-B*56:01; ACTL8; ENSG00000117148; CTA
LPASGKTLEF

SEQ ID NO: 3477 - protein, 10 aa, Homo sapiens
  Table A; Target 3477; HLA-C*07:02; ACTL8; ENSG00000117148; CTA
LPASGKTLEF

SEQ ID NO: 3478 - protein, 11 aa, Homo sapiens
  Table A; Target 3478; HLA-B*56:01; ACTL8; ENSG00000117148; CTA
LPASGKTLEFA

SEQ ID NO: 3479 - protein, 11 aa, Homo sapiens
  Table A; Target 3479; HLA-B*35:01; ACTL8; ENSG00000117148; CTA
LPCKENPGPSY

SEQ ID NO: 3480 - protein, 11 aa, Homo sapiens
  Table A; Target 3480; HLA-B*55:01; ACTL8; ENSG00000117148; CTA
LPCKENPGPSY

SEQ ID NO: 3481 - protein, 11 aa, Homo sapiens
  Table A; Target 3481; HLA-C*03:03; ACTL8; ENSG00000117148; CTA
LPCKENPGPSY

SEQ ID NO: 3482 - protein, 9 aa, Homo sapiens
  Table A; Target 3482; HLA-B*08:01; ACTL8; ENSG00000117148; CTA
LPDGSRVEL

SEQ ID NO: 3483 - protein, 9 aa, Homo sapiens
  Table A; Target 3483; HLA-B*35:01; ACTL8; ENSG00000117148; CTA
LPDGSRVEL

SEQ ID NO: 3484 - protein, 9 aa, Homo sapiens
  Table A; Target 3484; HLA-B*38:01; ACTL8; ENSG00000117148; CTA
LPDGSRVEL

SEQ ID NO: 3485 - protein, 9 aa, Homo sapiens
  Table A; Target 3485; HLA-B*39:01; ACTL8; ENSG00000117148; CTA
LPDGSRVEL

SEQ ID NO: 3486 - protein, 9 aa, Homo sapiens
  Table A; Target 3486; HLA-B*40:01; ACTL8; ENSG00000117148; CTA
LPDGSRVEL

SEQ ID NO: 3487 - protein, 9 aa, Homo sapiens
  Table A; Target 3487; HLA-B*51:01; ACTL8; ENSG00000117148; CTA
LPDGSRVEL

SEQ ID NO: 3488 - protein, 9 aa, Homo sapiens
  Table A; Target 3488; HLA-B*55:01; ACTL8; ENSG00000117148; CTA
LPDGSRVEL

SEQ ID NO: 3489 - protein, 9 aa, Homo sapiens
  Table A; Target 3489; HLA-B*56:01; ACTL8; ENSG00000117148; CTA
LPDGSRVEL

SEQ ID NO: 3490 - protein, 9 aa, Homo sapiens
  Table A; Target 3490; HLA-C*01:02; ACTL8; ENSG00000117148; CTA
LPDGSRVEL

SEQ ID NO: 3491 - protein, 9 aa, Homo sapiens
  Table A; Target 3491; HLA-C*03:03; ACTL8; ENSG00000117148; CTA
LPDGSRVEL

SEQ ID NO: 3492 - protein, 9 aa, Homo sapiens
  Table A; Target 3492; HLA-C*03:04; ACTL8; ENSG00000117148; CTA
LPDGSRVEL

SEQ ID NO: 3493 - protein, 9 aa, Homo sapiens
  Table A; Target 3493; HLA-C*04:01; ACTL8; ENSG00000117148; CTA
LPDGSRVEL

SEQ ID NO: 3494 - protein, 9 aa, Homo sapiens
  Table A; Target 3494; HLA-C*05:01; ACTL8; ENSG00000117148; CTA
LPDGSRVEL

SEQ ID NO: 3495 - protein, 9 aa, Homo sapiens
  Table A; Target 3495; HLA-C*07:02; ACTL8; ENSG00000117148; CTA
LPDGSRVEL

SEQ ID NO: 3496 - protein, 9 aa, Homo sapiens
  Table A; Target 3496; HLA-C*07:04; ACTL8; ENSG00000117148; CTA
LPDGSRVEL

SEQ ID NO: 3497 - protein, 9 aa, Homo sapiens
  Table A; Target 3497; HLA-C*06:02; ACTL8; ENSG00000117148; CTA
LRPLLVSHV

SEQ ID NO: 3498 - protein, 8 aa, Homo sapiens
  Table A; Target 3498; HLA-B*57:01; ACTL8; ENSG00000117148; CTA
LSTYQSEW

SEQ ID NO: 3499 - protein, 8 aa, Homo sapiens
  Table A; Target 3499; HLA-B*58:01; ACTL8; ENSG00000117148; CTA
LSTYQSEW

SEQ ID NO: 3500 - protein, 10 aa, Homo sapiens
  Table A; Target 3500; HLA-A*01:01; ACTL8; ENSG00000117148; CTA
LTGVVVDSGY

SEQ ID NO: 3501 - protein, 10 aa, Homo sapiens
  Table A; Target 3501; HLA-C*04:01; ACTL8; ENSG00000117148; CTA
LTGVVVDSGY

SEQ ID NO: 3502 - protein, 10 aa, Homo sapiens
  Table A; Target 3502; HLA-C*07:01; ACTL8; ENSG00000117148; CTA
LTGVVVDSGY

SEQ ID NO: 3503 - protein, 9 aa, Homo sapiens
  Table A; Target 3503; HLA-C*14:02; ACTL8; ENSG00000117148; CTA
LYASGLLTG

SEQ ID NO: 3504 - protein, 10 aa, Homo sapiens
  Table A; Target 3504; HLA-C*06:02; ACTL8; ENSG00000117148; CTA
LYASGLLTGV

SEQ ID NO: 3505 - protein, 10 aa, Homo sapiens
  Table A; Target 3505; HLA-C*07:02; ACTL8; ENSG00000117148; CTA
LYASGLLTGV

SEQ ID NO: 3506 - protein, 9 aa, Homo sapiens
  Table A; Target 3506; HLA-A*24:02; ACTL8; ENSG00000117148; CTA
LYPGFTKRL

SEQ ID NO: 3507 - protein, 10 aa, Homo sapiens
  Table A; Target 3507; HLA-A*24:02; ACTL8; ENSG00000117148; CTA
LYPGFTKRLF

SEQ ID NO: 3508 - protein, 8 aa, Homo sapiens
  Table A; Target 3508; HLA-C*01:02; ACTL8; ENSG00000117148; CTA
MACGGNTL

SEQ ID NO: 3509 - protein, 8 aa, Homo sapiens
  Table A; Target 3509; HLA-C*03:03; ACTL8; ENSG00000117148; CTA
MACGGNTL

SEQ ID NO: 3510 - protein, 8 aa, Homo sapiens
  Table A; Target 3510; HLA-C*03:04; ACTL8; ENSG00000117148; CTA
MACGGNTL

SEQ ID NO: 3511 - protein, 9 aa, Homo sapiens
  Table A; Target 3511; HLA-A*01:01; ACTL8; ENSG00000117148; CTA
MACGGNTLY

SEQ ID NO: 3512 - protein, 9 aa, Homo sapiens
  Table A; Target 3512; HLA-A*26:01; ACTL8; ENSG00000117148; CTA
MACGGNTLY

SEQ ID NO: 3513 - protein, 9 aa, Homo sapiens
  Table A; Target 3513; HLA-A*29:02; ACTL8; ENSG00000117148; CTA
MACGGNTLY

SEQ ID NO: 3514 - protein, 9 aa, Homo sapiens
  Table A; Target 3514; HLA-A*30:02; ACTL8; ENSG00000117148; CTA
MACGGNTLY

SEQ ID NO: 3515 - protein, 9 aa, Homo sapiens
  Table A; Target 3515; HLA-B*15:01; ACTL8; ENSG00000117148; CTA
MACGGNTLY

SEQ ID NO: 3516 - protein, 9 aa, Homo sapiens
  Table A; Target 3516; HLA-B*15:03; ACTL8; ENSG00000117148; CTA
MACGGNTLY

SEQ ID NO: 3517 - protein, 9 aa, Homo sapiens
  Table A; Target 3517; HLA-B*35:01; ACTL8; ENSG00000117148; CTA
MACGGNTLY

SEQ ID NO: 3518 - protein, 9 aa, Homo sapiens
  Table A; Target 3518; HLA-B*39:01; ACTL8; ENSG00000117148; CTA
MACGGNTLY

SEQ ID NO: 3519 - protein, 9 aa, Homo sapiens
  Table A; Target 3519; HLA-B*46:01; ACTL8; ENSG00000117148; CTA
MACGGNTLY

SEQ ID NO: 3520 - protein, 9 aa, Homo sapiens
  Table A; Target 3520; HLA-B*55:01; ACTL8; ENSG00000117148; CTA
MACGGNTLY

SEQ ID NO: 3521 - protein, 9 aa, Homo sapiens
  Table A; Target 3521; HLA-C*02:02; ACTL8; ENSG00000117148; CTA
MACGGNTLY

SEQ ID NO: 3522 - protein, 9 aa, Homo sapiens
  Table A; Target 3522; HLA-C*03:03; ACTL8; ENSG00000117148; CTA
MACGGNTLY

SEQ ID NO: 3523 - protein, 9 aa, Homo sapiens
  Table A; Target 3523; HLA-C*04:01; ACTL8; ENSG00000117148; CTA
MACGGNTLY

SEQ ID NO: 3524 - protein, 9 aa, Homo sapiens
  Table A; Target 3524; HLA-C*07:01; ACTL8; ENSG00000117148; CTA
MACGGNTLY

SEQ ID NO: 3525 - protein, 9 aa, Homo sapiens
  Table A; Target 3525; HLA-C*07:04; ACTL8; ENSG00000117148; CTA
MACGGNTLY

SEQ ID NO: 3526 - protein, 9 aa, Homo sapiens
  Table A; Target 3526; HLA-C*07:06; ACTL8; ENSG00000117148; CTA
MACGGNTLY

SEQ ID NO: 3527 - protein, 9 aa, Homo sapiens
  Table A; Target 3527; HLA-C*12:03; ACTL8; ENSG00000117148; CTA
MACGGNTLY

SEQ ID NO: 3528 - protein, 9 aa, Homo sapiens
  Table A; Target 3528; HLA-C*16:02; ACTL8; ENSG00000117148; CTA
MACGGNTLY

SEQ ID NO: 3529 - protein, 8 aa, Homo sapiens
  Table A; Target 3529; HLA-A*23:01; ACTL8; ENSG00000117148; CTA
MFFSPQVF

SEQ ID NO: 3530 - protein, 9 aa, Homo sapiens
  Table A; Target 3530; HLA-A*02:07; ACTL8; ENSG00000117148; CTA
MLEILFELL

SEQ ID NO: 3531 - protein, 8 aa, Homo sapiens
  Table A; Target 3531; HLA-B*08:01; ACTL8; ENSG00000117148; CTA
MQRVAPEM

SEQ ID NO: 3532 - protein, 8 aa, Homo sapiens
  Table A; Target 3532; HLA-B*15:01; ACTL8; ENSG00000117148; CTA
MQRVAPEM

SEQ ID NO: 3533 - protein, 8 aa, Homo sapiens
  Table A; Target 3533; HLA-B*15:03; ACTL8; ENSG00000117148; CTA
MQRVAPEM

SEQ ID NO: 3534 - protein, 8 aa, Homo sapiens
  Table A; Target 3534; HLA-B*18:01; ACTL8; ENSG00000117148; CTA
MQRVAPEM

SEQ ID NO: 3535 - protein, 8 aa, Homo sapiens
  Table A; Target 3535; HLA-B*37:01; ACTL8; ENSG00000117148; CTA
MQRVAPEM

SEQ ID NO: 3536 - protein, 8 aa, Homo sapiens
  Table A; Target 3536; HLA-B*46:01; ACTL8; ENSG00000117148; CTA
MQRVAPEM

SEQ ID NO: 3537 - protein, 8 aa, Homo sapiens
  Table A; Target 3537; HLA-C*16:01; ACTL8; ENSG00000117148; CTA
MQRVAPEM

SEQ ID NO: 3538 - protein, 9 aa, Homo sapiens
  Table A; Target 3538; HLA-B*15:01; ACTL8; ENSG00000117148; CTA
MQRVAPEMF

SEQ ID NO: 3539 - protein, 9 aa, Homo sapiens
  Table A; Target 3539; HLA-B*15:03; ACTL8; ENSG00000117148; CTA
MQRVAPEMF

SEQ ID NO: 3540 - protein, 10 aa, Homo sapiens
  Table A; Target 3540; HLA-C*04:01; ACTL8; ENSG00000117148; CTA
MSREEYGEHM

SEQ ID NO: 3541 - protein, 9 aa, Homo sapiens
  Table A; Target 3541; HLA-A*03:01; ACTL8; ENSG00000117148; CTA
MVFPNIVNY

SEQ ID NO: 3542 - protein, 9 aa, Homo sapiens
  Table A; Target 3542; HLA-A*11:01; ACTL8; ENSG00000117148; CTA
MVFPNIVNY

SEQ ID NO: 3543 - protein, 9 aa, Homo sapiens
  Table A; Target 3543; HLA-A*25:01; ACTL8; ENSG00000117148; CTA
MVFPNIVNY

SEQ ID NO: 3544 - protein, 9 aa, Homo sapiens
  Table A; Target 3544; HLA-A*26:01; ACTL8; ENSG00000117148; CTA
MVFPNIVNY

SEQ ID NO: 3545 - protein, 9 aa, Homo sapiens
  Table A; Target 3545; HLA-A*29:02; ACTL8; ENSG00000117148; CTA
MVFPNIVNY

SEQ ID NO: 3546 - protein, 9 aa, Homo sapiens
  Table A; Target 3546; HLA-A*30:02; ACTL8; ENSG00000117148; CTA
MVFPNIVNY

SEQ ID NO: 3547 - protein, 9 aa, Homo sapiens
  Table A; Target 3547; HLA-A*32:01; ACTL8; ENSG00000117148; CTA
MVFPNIVNY

SEQ ID NO: 3548 - protein, 9 aa, Homo sapiens
  Table A; Target 3548; HLA-A*33:03; ACTL8; ENSG00000117148; CTA
MVFPNIVNY

SEQ ID NO: 3549 - protein, 9 aa, Homo sapiens
  Table A; Target 3549; HLA-A*68:01; ACTL8; ENSG00000117148; CTA
MVFPNIVNY

SEQ ID NO: 3550 - protein, 9 aa, Homo sapiens
  Table A; Target 3550; HLA-B*15:01; ACTL8; ENSG00000117148; CTA
MVFPNIVNY

SEQ ID NO: 3551 - protein, 9 aa, Homo sapiens
  Table A; Target 3551; HLA-B*15:03; ACTL8; ENSG00000117148; CTA
MVFPNIVNY

SEQ ID NO: 3552 - protein, 9 aa, Homo sapiens
  Table A; Target 3552; HLA-B*18:01; ACTL8; ENSG00000117148; CTA
MVFPNIVNY

SEQ ID NO: 3553 - protein, 9 aa, Homo sapiens
  Table A; Target 3553; HLA-B*35:01; ACTL8; ENSG00000117148; CTA
MVFPNIVNY

SEQ ID NO: 3554 - protein, 9 aa, Homo sapiens
  Table A; Target 3554; HLA-B*44:03; ACTL8; ENSG00000117148; CTA
MVFPNIVNY

SEQ ID NO: 3555 - protein, 9 aa, Homo sapiens
  Table A; Target 3555; HLA-B*46:01; ACTL8; ENSG00000117148; CTA
MVFPNIVNY

SEQ ID NO: 3556 - protein, 9 aa, Homo sapiens
  Table A; Target 3556; HLA-B*57:01; ACTL8; ENSG00000117148; CTA
MVFPNIVNY

SEQ ID NO: 3557 - protein, 9 aa, Homo sapiens
  Table A; Target 3557; HLA-B*58:01; ACTL8; ENSG00000117148; CTA
MVFPNIVNY

SEQ ID NO: 3558 - protein, 9 aa, Homo sapiens
  Table A; Target 3558; HLA-C*02:02; ACTL8; ENSG00000117148; CTA
MVFPNIVNY

SEQ ID NO: 3559 - protein, 9 aa, Homo sapiens
  Table A; Target 3559; HLA-C*07:04; ACTL8; ENSG00000117148; CTA
MVFPNIVNY

SEQ ID NO: 3560 - protein, 9 aa, Homo sapiens
  Table A; Target 3560; HLA-C*07:06; ACTL8; ENSG00000117148; CTA
MVFPNIVNY

SEQ ID NO: 3561 - protein, 9 aa, Homo sapiens
  Table A; Target 3561; HLA-C*12:03; ACTL8; ENSG00000117148; CTA
MVFPNIVNY

SEQ ID NO: 3562 - protein, 9 aa, Homo sapiens
  Table A; Target 3562; HLA-C*16:01; ACTL8; ENSG00000117148; CTA
MVFPNIVNY

SEQ ID NO: 3563 - protein, 9 aa, Homo sapiens
  Table A; Target 3563; HLA-C*16:04; ACTL8; ENSG00000117148; CTA
MVFPNIVNY

SEQ ID NO: 3564 - protein, 10 aa, Homo sapiens
  Table A; Target 3564; HLA-A*25:01; ACTL8; ENSG00000117148; CTA
MVFPNIVNYL

SEQ ID NO: 3565 - protein, 10 aa, Homo sapiens
  Table A; Target 3565; HLA-A*26:01; ACTL8; ENSG00000117148; CTA
MVFPNIVNYL

SEQ ID NO: 3566 - protein, 10 aa, Homo sapiens
  Table A; Target 3566; HLA-A*68:02; ACTL8; ENSG00000117148; CTA
MVFPNIVNYL

SEQ ID NO: 3567 - protein, 8 aa, Homo sapiens
  Table A; Target 3567; HLA-A*33:03; ACTL8; ENSG00000117148; CTA
NPGPSYAR

SEQ ID NO: 3568 - protein, 8 aa, Homo sapiens
  Table A; Target 3568; HLA-B*35:01; ACTL8; ENSG00000117148; CTA
NPGPSYAR

SEQ ID NO: 3569 - protein, 9 aa, Homo sapiens
  Table A; Target 3569; HLA-A*03:01; ACTL8; ENSG00000117148; CTA
NTLYPGFTK

SEQ ID NO: 3570 - protein, 9 aa, Homo sapiens
  Table A; Target 3570; HLA-A*03:02; ACTL8; ENSG00000117148; CTA
NTLYPGFTK

SEQ ID NO: 3571 - protein, 9 aa, Homo sapiens
  Table A; Target 3571; HLA-A*11:01; ACTL8; ENSG00000117148; CTA
NTLYPGFTK

SEQ ID NO: 3572 - protein, 9 aa, Homo sapiens
  Table A; Target 3572; HLA-A*31:01; ACTL8; ENSG00000117148; CTA
NTLYPGFTK

SEQ ID NO: 3573 - protein, 9 aa, Homo sapiens
  Table A; Target 3573; HLA-A*33:01; ACTL8; ENSG00000117148; CTA
NTLYPGFTK

SEQ ID NO: 3574 - protein, 9 aa, Homo sapiens
  Table A; Target 3574; HLA-A*33:03; ACTL8; ENSG00000117148; CTA
NTLYPGFTK

SEQ ID NO: 3575 - protein, 9 aa, Homo sapiens
  Table A; Target 3575; HLA-A*68:01; ACTL8; ENSG00000117148; CTA
NTLYPGFTK

SEQ ID NO: 3576 - protein, 9 aa, Homo sapiens
  Table A; Target 3576; HLA-C*07:06; ACTL8; ENSG00000117148; CTA
NTLYPGFTK

SEQ ID NO: 3577 - protein, 10 aa, Homo sapiens
  Table A; Target 3577; HLA-A*33:01; ACTL8; ENSG00000117148; CTA
NTLYPGFTKR

SEQ ID NO: 3578 - protein, 10 aa, Homo sapiens
  Table A; Target 3578; HLA-A*33:03; ACTL8; ENSG00000117148; CTA
NTLYPGFTKR

SEQ ID NO: 3579 - protein, 10 aa, Homo sapiens
  Table A; Target 3579; HLA-A*68:01; ACTL8; ENSG00000117148; CTA
NTLYPGFTKR

SEQ ID NO: 3580 - protein, 10 aa, Homo sapiens
  Table A; Target 3580; HLA-A*11:01; ACTL8; ENSG00000117148; CTA
NTYQLPDGSR

SEQ ID NO: 3581 - protein, 10 aa, Homo sapiens
  Table A; Target 3581; HLA-A*33:01; ACTL8; ENSG00000117148; CTA
NTYQLPDGSR

SEQ ID NO: 3582 - protein, 10 aa, Homo sapiens
  Table A; Target 3582; HLA-A*33:03; ACTL8; ENSG00000117148; CTA
NTYQLPDGSR

SEQ ID NO: 3583 - protein, 10 aa, Homo sapiens
  Table A; Target 3583; HLA-A*68:01; ACTL8; ENSG00000117148; CTA
NTYQLPDGSR

SEQ ID NO: 3584 - protein, 10 aa, Homo sapiens
  Table A; Target 3584; HLA-C*07:06; ACTL8; ENSG00000117148; CTA
NTYQLPDGSR

SEQ ID NO: 3585 - protein, 11 aa, Homo sapiens
  Table A; Target 3585; HLA-A*68:02; ACTL8; ENSG00000117148; CTA
NTYQLPDGSRV

SEQ ID NO: 3586 - protein, 9 aa, Homo sapiens
  Table A; Target 3586; HLA-C*12:03; ACTL8; ENSG00000117148; CTA
PASGKTLEF

SEQ ID NO: 3587 - protein, 9 aa, Homo sapiens
  Table A; Target 3587; HLA-C*16:02; ACTL8; ENSG00000117148; CTA
PASGKTLEF

SEQ ID NO: 3588 - protein, 10 aa, Homo sapiens
  Table A; Target 3588; HLA-A*30:02; ACTL8; ENSG00000117148; CTA
PCKENPGPSY

SEQ ID NO: 3589 - protein, 8 aa, Homo sapiens
  Table A; Target 3589; HLA-B*07:02; ACTL8; ENSG00000117148; CTA
PDGSRVEL

SEQ ID NO: 3590 - protein, 9 aa, Homo sapiens
  Table A; Target 3590; HLA-B*49:01; ACTL8; ENSG00000117148; CTA
PEMFFSPQV

SEQ ID NO: 3591 - protein, 9 aa, Homo sapiens
  Table A; Target 3591; HLA-C*07:02; ACTL8; ENSG00000117148; CTA
PGPSIPRAI

SEQ ID NO: 3592 - protein, 8 aa, Homo sapiens
  Table A; Target 3592; HLA-C*04:01; ACTL8; ENSG00000117148; CTA
PLLVSHVM

SEQ ID NO: 3593 - protein, 8 aa, Homo sapiens
  Table A; Target 3593; HLA-C*07:01; ACTL8; ENSG00000117148; CTA
PLLVSHVM

SEQ ID NO: 3594 - protein, 9 aa, Homo sapiens
  Table A; Target 3594; HLA-C*01:02; ACTL8; ENSG00000117148; CTA
PLPASGKTL

SEQ ID NO: 3595 - protein, 11 aa, Homo sapiens
  Table A; Target 3595; HLA-A*24:02; ACTL8; ENSG00000117148; CTA
PLPASGKTLEF

SEQ ID NO: 3596 - protein, 11 aa, Homo sapiens
  Table A; Target 3596; HLA-B*07:02; ACTL8; ENSG00000117148; CTA
PLPASGKTLEF

SEQ ID NO: 3597 - protein, 8 aa, Homo sapiens
  Table A; Target 3597; HLA-A*30:01; ACTL8; ENSG00000117148; CTA
QDLSAYLL

SEQ ID NO: 3598 - protein, 8 aa, Homo sapiens
  Table A; Target 3598; HLA-B*37:01; ACTL8; ENSG00000117148; CTA
QDLSAYLL

SEQ ID NO: 3599 - protein, 8 aa, Homo sapiens
  Table A; Target 3599; HLA-B*40:02; ACTL8; ENSG00000117148; CTA
QDLSAYLL

SEQ ID NO: 3600 - protein, 8 aa, Homo sapiens
  Table A; Target 3600; HLA-C*07:04; ACTL8; ENSG00000117148; CTA
QDLSAYLL

SEQ ID NO: 3601 - protein, 9 aa, Homo sapiens
  Table A; Target 3601; HLA-A*11:01; ACTL8; ENSG00000117148; CTA
QDLSAYLLK

SEQ ID NO: 3602 - protein, 9 aa, Homo sapiens
  Table A; Target 3602; HLA-B*27:02; ACTL8; ENSG00000117148; CTA
QDLSAYLLK

SEQ ID NO: 3603 - protein, 8 aa, Homo sapiens
  Table A; Target 3603; HLA-A*30:01; ACTL8; ENSG00000117148; CTA
QEVPPVII

SEQ ID NO: 3604 - protein, 8 aa, Homo sapiens
  Table A; Target 3604; HLA-B*18:01; ACTL8; ENSG00000117148; CTA
QEVPPVII

SEQ ID NO: 3605 - protein, 8 aa, Homo sapiens
  Table A; Target 3605; HLA-B*40:01; ACTL8; ENSG00000117148; CTA
QEVPPVII

SEQ ID NO: 3606 - protein, 8 aa, Homo sapiens
  Table A; Target 3606; HLA-B*49:01; ACTL8; ENSG00000117148; CTA
QEVPPVII

SEQ ID NO: 3607 - protein, 9 aa, Homo sapiens
  Table A; Target 3607; HLA-B*44:03; ACTL8; ENSG00000117148; CTA
QEVPPVIIT

SEQ ID NO: 3608 - protein, 9 aa, Homo sapiens
  Table A; Target 3608; HLA-B*49:01; ACTL8; ENSG00000117148; CTA
QEVPPVIIT

SEQ ID NO: 3609 - protein, 10 aa, Homo sapiens
  Table A; Target 3609; HLA-A*31:01; ACTL8; ENSG00000117148; CTA
QGRPLPASGK

SEQ ID NO: 3610 - protein, 9 aa, Homo sapiens
  Table A; Target 3610; HLA-A*03:02; ACTL8; ENSG00000117148; CTA
QLETVAVTQ

SEQ ID NO: 3611 - protein, 10 aa, Homo sapiens
  Table A; Target 3611; HLA-B*55:01; ACTL8; ENSG00000117148; CTA
QLETVAVTQM

SEQ ID NO: 3612 - protein, 10 aa, Homo sapiens
  Table A; Target 3612; HLA-A*02:01; ACTL8; ENSG00000117148; CTA
QLPDGSRVEL

SEQ ID NO: 3613 - protein, 10 aa, Homo sapiens
  Table A; Target 3613; HLA-A*02:07; ACTL8; ENSG00000117148; CTA
QLPDGSRVEL

SEQ ID NO: 3614 - protein, 10 aa, Homo sapiens
  Table A; Target 3614; HLA-B*07:02; ACTL8; ENSG00000117148; CTA
QLPDGSRVEL

SEQ ID NO: 3615 - protein, 10 aa, Homo sapiens
  Table A; Target 3615; HLA-C*01:02; ACTL8; ENSG00000117148; CTA
QLPDGSRVEL

SEQ ID NO: 3616 - protein, 10 aa, Homo sapiens
  Table A; Target 3616; HLA-A*30:02; ACTL8; ENSG00000117148; CTA
QMVFPNIVNY

SEQ ID NO: 3617 - protein, 9 aa, Homo sapiens
  Table A; Target 3617; HLA-B*07:02; ACTL8; ENSG00000117148; CTA
QPFHQGRPL

SEQ ID NO: 3618 - protein, 9 aa, Homo sapiens
  Table A; Target 3618; HLA-C*07:02; ACTL8; ENSG00000117148; CTA
QPFHQGRPL

SEQ ID NO: 3619 - protein, 11 aa, Homo sapiens
  Table A; Target 3619; HLA-B*07:02; ACTL8; ENSG00000117148; CTA
QPFHQGRPLPA

SEQ ID NO: 3620 - protein, 11 aa, Homo sapiens
  Table A; Target 3620; HLA-B*54:01; ACTL8; ENSG00000117148; CTA
QPFHQGRPLPA

SEQ ID NO: 3621 - protein, 11 aa, Homo sapiens
  Table A; Target 3621; HLA-B*56:01; ACTL8; ENSG00000117148; CTA
QPFHQGRPLPA

SEQ ID NO: 3622 - protein, 9 aa, Homo sapiens
  Table A; Target 3622; HLA-B*54:01; ACTL8; ENSG00000117148; CTA
QPGPSIPRA

SEQ ID NO: 3623 - protein, 9 aa, Homo sapiens
  Table A; Target 3623; HLA-B*55:01; ACTL8; ENSG00000117148; CTA
QPGPSIPRA

SEQ ID NO: 3624 - protein, 9 aa, Homo sapiens
  Table A; Target 3624; HLA-B*56:01; ACTL8; ENSG00000117148; CTA
QPGPSIPRA

SEQ ID NO: 3625 - protein, 10 aa, Homo sapiens
  Table A; Target 3625; HLA-B*07:02; ACTL8; ENSG00000117148; CTA
QPGPSIPRAI

SEQ ID NO: 3626 - protein, 10 aa, Homo sapiens
  Table A; Target 3626; HLA-B*56:01; ACTL8; ENSG00000117148; CTA
QPGPSIPRAI

SEQ ID NO: 3627 - protein, 11 aa, Homo sapiens
  Table A; Target 3627; HLA-A*30:02; ACTL8; ENSG00000117148; CTA
QQSALDESNTY

SEQ ID NO: 3628 - protein, 11 aa, Homo sapiens
  Table A; Target 3628; HLA-A*32:01; ACTL8; ENSG00000117148; CTA
QQSALDESNTY

SEQ ID NO: 3629 - protein, 11 aa, Homo sapiens
  Table A; Target 3629; HLA-B*15:03; ACTL8; ENSG00000117148; CTA
QQSALDESNTY

SEQ ID NO: 3630 - protein, 11 aa, Homo sapiens
  Table A; Target 3630; HLA-B*27:02; ACTL8; ENSG00000117148; CTA
QQSALDESNTY

SEQ ID NO: 3631 - protein, 11 aa, Homo sapiens
  Table A; Target 3631; HLA-B*27:05; ACTL8; ENSG00000117148; CTA
QQSALDESNTY

SEQ ID NO: 3632 - protein, 11 aa, Homo sapiens
  Table A; Target 3632; HLA-B*38:01; ACTL8; ENSG00000117148; CTA
QQSALDESNTY

SEQ ID NO: 3633 - protein, 11 aa, Homo sapiens
  Table A; Target 3633; HLA-B*39:01; ACTL8; ENSG00000117148; CTA
QQSALDESNTY

SEQ ID NO: 3634 - protein, 11 aa, Homo sapiens
  Table A; Target 3634; HLA-C*07:04; ACTL8; ENSG00000117148; CTA
QQSALDESNTY

SEQ ID NO: 3635 - protein, 11 aa, Homo sapiens
  Table A; Target 3635; HLA-C*16:04; ACTL8; ENSG00000117148; CTA
QQSALDESNTY

SEQ ID NO: 3636 - protein, 10 aa, Homo sapiens
  Table A; Target 3636; HLA-A*01:01; ACTL8; ENSG00000117148; CTA
QSALDESNTY

SEQ ID NO: 3637 - protein, 10 aa, Homo sapiens
  Table A; Target 3637; HLA-A*30:02; ACTL8; ENSG00000117148; CTA
QSALDESNTY

SEQ ID NO: 3638 - protein, 10 aa, Homo sapiens
  Table A; Target 3638; HLA-B*15:01; ACTL8; ENSG00000117148; CTA
QSALDESNTY

SEQ ID NO: 3639 - protein, 10 aa, Homo sapiens
  Table A; Target 3639; HLA-B*58:01; ACTL8; ENSG00000117148; CTA
QSALDESNTY

SEQ ID NO: 3640 - protein, 10 aa, Homo sapiens
  Table A; Target 3640; HLA-A*01:01; ACTL8; ENSG00000117148; CTA
QSEWMSREEY

SEQ ID NO: 3641 - protein, 10 aa, Homo sapiens
  Table A; Target 3641; HLA-A*25:01; ACTL8; ENSG00000117148; CTA
QVFEQPGPSI

SEQ ID NO: 3642 - protein, 10 aa, Homo sapiens
  Table A; Target 3642; HLA-A*26:01; ACTL8; ENSG00000117148; CTA
QVFEQPGPSI

SEQ ID NO: 3643 - protein, 10 aa, Homo sapiens
  Table A; Target 3643; HLA-B*13:02; ACTL8; ENSG00000117148; CTA
QVFEQPGPSI

SEQ ID NO: 3644 - protein, 10 aa, Homo sapiens
  Table A; Target 3644; HLA-B*51:01; ACTL8; ENSG00000117148; CTA
QVFEQPGPSI

SEQ ID NO: 3645 - protein, 10 aa, Homo sapiens
  Table A; Target 3645; HLA-B*56:01; ACTL8; ENSG00000117148; CTA
QVFEQPGPSI

SEQ ID NO: 3646 - protein, 8 aa, Homo sapiens
  Table A; Target 3646; HLA-B*37:01; ACTL8; ENSG00000117148; CTA
REEYGEHM

SEQ ID NO: 3647 - protein, 8 aa, Homo sapiens
  Table A; Target 3647; HLA-B*37:01; ACTL8; ENSG00000117148; CTA
RELMGDHV

SEQ ID NO: 3648 - protein, 8 aa, Homo sapiens
  Table A; Target 3648; HLA-B*18:01; ACTL8; ENSG00000117148; CTA
REQEVPPV

SEQ ID NO: 3649 - protein, 8 aa, Homo sapiens
  Table A; Target 3649; HLA-B*37:01; ACTL8; ENSG00000117148; CTA
REQEVPPV

SEQ ID NO: 3650 - protein, 9 aa, Homo sapiens
  Table A; Target 3650; HLA-A*30:01; ACTL8; ENSG00000117148; CTA
REQEVPPVI

SEQ ID NO: 3651 - protein, 9 aa, Homo sapiens
  Table A; Target 3651; HLA-B*13:02; ACTL8; ENSG00000117148; CTA
REQEVPPVI

SEQ ID NO: 3652 - protein, 9 aa, Homo sapiens
  Table A; Target 3652; HLA-B*18:01; ACTL8; ENSG00000117148; CTA
REQEVPPVI

SEQ ID NO: 3653 - protein, 9 aa, Homo sapiens
  Table A; Target 3653; HLA-B*27:02; ACTL8; ENSG00000117148; CTA
REQEVPPVI

SEQ ID NO: 3654 - protein, 9 aa, Homo sapiens
  Table A; Target 3654; HLA-B*37:01; ACTL8; ENSG00000117148; CTA
REQEVPPVI

SEQ ID NO: 3655 - protein, 9 aa, Homo sapiens
  Table A; Target 3655; HLA-B*38:01; ACTL8; ENSG00000117148; CTA
REQEVPPVI

SEQ ID NO: 3656 - protein, 9 aa, Homo sapiens
  Table A; Target 3656; HLA-B*40:01; ACTL8; ENSG00000117148; CTA
REQEVPPVI

SEQ ID NO: 3657 - protein, 9 aa, Homo sapiens
  Table A; Target 3657; HLA-B*40:02; ACTL8; ENSG00000117148; CTA
REQEVPPVI

SEQ ID NO: 3658 - protein, 9 aa, Homo sapiens
  Table A; Target 3658; HLA-B*44:02; ACTL8; ENSG00000117148; CTA
REQEVPPVI

SEQ ID NO: 3659 - protein, 9 aa, Homo sapiens
  Table A; Target 3659; HLA-B*44:03; ACTL8; ENSG00000117148; CTA
REQEVPPVI

SEQ ID NO: 3660 - protein, 9 aa, Homo sapiens
  Table A; Target 3660; HLA-B*49:01; ACTL8; ENSG00000117148; CTA
REQEVPPVI

SEQ ID NO: 3661 - protein, 9 aa, Homo sapiens
  Table A; Target 3661; HLA-C*16:04; ACTL8; ENSG00000117148; CTA
REQEVPPVI

SEQ ID NO: 3662 - protein, 10 aa, Homo sapiens
  Table A; Target 3662; HLA-A*30:01; ACTL8; ENSG00000117148; CTA
REQEVPPVII

SEQ ID NO: 3663 - protein, 10 aa, Homo sapiens
  Table A; Target 3663; HLA-B*40:01; ACTL8; ENSG00000117148; CTA
REQEVPPVII

SEQ ID NO: 3664 - protein, 10 aa, Homo sapiens
  Table A; Target 3664; HLA-B*40:02; ACTL8; ENSG00000117148; CTA
REQEVPPVII

SEQ ID NO: 3665 - protein, 10 aa, Homo sapiens
  Table A; Target 3665; HLA-B*44:02; ACTL8; ENSG00000117148; CTA
REQEVPPVII

SEQ ID NO: 3666 - protein, 10 aa, Homo sapiens
  Table A; Target 3666; HLA-B*49:01; ACTL8; ENSG00000117148; CTA
REQEVPPVII

SEQ ID NO: 3667 - protein, 10 aa, Homo sapiens
  Table A; Target 3667; HLA-A*29:02; ACTL8; ENSG00000117148; CTA
RILNWEGVQY

SEQ ID NO: 3668 - protein, 11 aa, Homo sapiens
  Table A; Target 3668; HLA-A*02:04; ACTL8; ENSG00000117148; CTA
RILNWEGVQYL

SEQ ID NO: 3669 - protein, 8 aa, Homo sapiens
  Table A; Target 3669; HLA-B*07:02; ACTL8; ENSG00000117148; CTA
RPLLVSHV

SEQ ID NO: 3670 - protein, 8 aa, Homo sapiens
  Table A; Target 3670; HLA-B*08:01; ACTL8; ENSG00000117148; CTA
RPLLVSHV

SEQ ID NO: 3671 - protein, 8 aa, Homo sapiens
  Table A; Target 3671; HLA-B*51:01; ACTL8; ENSG00000117148; CTA
RPLLVSHV

SEQ ID NO: 3672 - protein, 9 aa, Homo sapiens
  Table A; Target 3672; HLA-B*07:02; ACTL8; ENSG00000117148; CTA
RPLLVSHVM

SEQ ID NO: 3673 - protein, 9 aa, Homo sapiens
  Table A; Target 3673; HLA-B*08:01; ACTL8; ENSG00000117148; CTA
RPLLVSHVM

SEQ ID NO: 3674 - protein, 9 aa, Homo sapiens
  Table A; Target 3674; HLA-B*35:01; ACTL8; ENSG00000117148; CTA
RPLLVSHVM

SEQ ID NO: 3675 - protein, 9 aa, Homo sapiens
  Table A; Target 3675; HLA-B*35:03; ACTL8; ENSG00000117148; CTA
RPLLVSHVM

SEQ ID NO: 3676 - protein, 9 aa, Homo sapiens
  Table A; Target 3676; HLA-B*40:02; ACTL8; ENSG00000117148; CTA
RPLLVSHVM

SEQ ID NO: 3677 - protein, 9 aa, Homo sapiens
  Table A; Target 3677; HLA-B*54:01; ACTL8; ENSG00000117148; CTA
RPLLVSHVM

SEQ ID NO: 3678 - protein, 9 aa, Homo sapiens
  Table A; Target 3678; HLA-B*55:01; ACTL8; ENSG00000117148; CTA
RPLLVSHVM

SEQ ID NO: 3679 - protein, 9 aa, Homo sapiens
  Table A; Target 3679; HLA-B*56:01; ACTL8; ENSG00000117148; CTA
RPLLVSHVM

SEQ ID NO: 3680 - protein, 9 aa, Homo sapiens
  Table A; Target 3680; HLA-C*03:03; ACTL8; ENSG00000117148; CTA
RPLLVSHVM

SEQ ID NO: 3681 - protein, 9 aa, Homo sapiens
  Table A; Target 3681; HLA-C*07:02; ACTL8; ENSG00000117148; CTA
RPLLVSHVM

SEQ ID NO: 3682 - protein, 10 aa, Homo sapiens
  Table A; Target 3682; HLA-B*54:01; ACTL8; ENSG00000117148; CTA
RPLLVSHVMA

SEQ ID NO: 3683 - protein, 10 aa, Homo sapiens
  Table A; Target 3683; HLA-B*56:01; ACTL8; ENSG00000117148; CTA
RPLLVSHVMA

SEQ ID NO: 3684 - protein, 10 aa, Homo sapiens
  Table A; Target 3684; HLA-B*07:02; ACTL8; ENSG00000117148; CTA
RPLPASGKTL

SEQ ID NO: 3685 - protein, 10 aa, Homo sapiens
  Table A; Target 3685; HLA-C*07:02; ACTL8; ENSG00000117148; CTA
RPLPASGKTL

SEQ ID NO: 3686 - protein, 11 aa, Homo sapiens
  Table A; Target 3686; HLA-B*57:01; ACTL8; ENSG00000117148; CTA
RTVIIDHGSGF

SEQ ID NO: 3687 - protein, 9 aa, Homo sapiens
  Table A; Target 3687; HLA-A*03:01; ACTL8; ENSG00000117148; CTA
RVELTPMQR

SEQ ID NO: 3688 - protein, 9 aa, Homo sapiens
  Table A; Target 3688; HLA-A*03:02; ACTL8; ENSG00000117148; CTA
RVELTPMQR

SEQ ID NO: 3689 - protein, 9 aa, Homo sapiens
  Table A; Target 3689; HLA-A*11:01; ACTL8; ENSG00000117148; CTA
RVELTPMQR

SEQ ID NO: 3690 - protein, 9 aa, Homo sapiens
  Table A; Target 3690; HLA-A*31:01; ACTL8; ENSG00000117148; CTA
RVELTPMQR

SEQ ID NO: 3691 - protein, 9 aa, Homo sapiens
  Table A; Target 3691; HLA-A*03:02; ACTL8; ENSG00000117148; CTA
RVQPFHQGR

SEQ ID NO: 3692 - protein, 9 aa, Homo sapiens
  Table A; Target 3692; HLA-A*11:01; ACTL8; ENSG00000117148; CTA
RVQPFHQGR

SEQ ID NO: 3693 - protein, 9 aa, Homo sapiens
  Table A; Target 3693; HLA-A*31:01; ACTL8; ENSG00000117148; CTA
RVQPFHQGR

SEQ ID NO: 3694 - protein, 9 aa, Homo sapiens
  Table A; Target 3694; HLA-A*23:01; ACTL8; ENSG00000117148; CTA
SALDESNTY

SEQ ID NO: 3695 - protein, 9 aa, Homo sapiens
  Table A; Target 3695; HLA-A*25:01; ACTL8; ENSG00000117148; CTA
SALDESNTY

SEQ ID NO: 3696 - protein, 9 aa, Homo sapiens
  Table A; Target 3696; HLA-A*26:01; ACTL8; ENSG00000117148; CTA
SALDESNTY

SEQ ID NO: 3697 - protein, 9 aa, Homo sapiens
  Table A; Target 3697; HLA-A*29:02; ACTL8; ENSG00000117148; CTA
SALDESNTY

SEQ ID NO: 3698 - protein, 9 aa, Homo sapiens
  Table A; Target 3698; HLA-A*30:02; ACTL8; ENSG00000117148; CTA
SALDESNTY

SEQ ID NO: 3699 - protein, 9 aa, Homo sapiens
  Table A; Target 3699; HLA-A*32:01; ACTL8; ENSG00000117148; CTA
SALDESNTY

SEQ ID NO: 3700 - protein, 9 aa, Homo sapiens
  Table A; Target 3700; HLA-B*15:01; ACTL8; ENSG00000117148; CTA
SALDESNTY

SEQ ID NO: 3701 - protein, 9 aa, Homo sapiens
  Table A; Target 3701; HLA-B*15:03; ACTL8; ENSG00000117148; CTA
SALDESNTY

SEQ ID NO: 3702 - protein, 9 aa, Homo sapiens
  Table A; Target 3702; HLA-B*18:01; ACTL8; ENSG00000117148; CTA
SALDESNTY

SEQ ID NO: 3703 - protein, 9 aa, Homo sapiens
  Table A; Target 3703; HLA-B*27:02; ACTL8; ENSG00000117148; CTA
SALDESNTY

SEQ ID NO: 3704 - protein, 9 aa, Homo sapiens
  Table A; Target 3704; HLA-B*27:05; ACTL8; ENSG00000117148; CTA
SALDESNTY

SEQ ID NO: 3705 - protein, 9 aa, Homo sapiens
  Table A; Target 3705; HLA-B*35:03; ACTL8; ENSG00000117148; CTA
SALDESNTY

SEQ ID NO: 3706 - protein, 9 aa, Homo sapiens
  Table A; Target 3706; HLA-B*38:01; ACTL8; ENSG00000117148; CTA
SALDESNTY

SEQ ID NO: 3707 - protein, 9 aa, Homo sapiens
  Table A; Target 3707; HLA-B*39:01; ACTL8; ENSG00000117148; CTA
SALDESNTY

SEQ ID NO: 3708 - protein, 9 aa, Homo sapiens
  Table A; Target 3708; HLA-B*46:01; ACTL8; ENSG00000117148; CTA
SALDESNTY

SEQ ID NO: 3709 - protein, 9 aa, Homo sapiens
  Table A; Target 3709; HLA-B*55:01; ACTL8; ENSG00000117148; CTA
SALDESNTY

SEQ ID NO: 3710 - protein, 9 aa, Homo sapiens
  Table A; Target 3710; HLA-B*58:01; ACTL8; ENSG00000117148; CTA
SALDESNTY

SEQ ID NO: 3711 - protein, 9 aa, Homo sapiens
  Table A; Target 3711; HLA-C*01:02; ACTL8; ENSG00000117148; CTA
SALDESNTY

SEQ ID NO: 3712 - protein, 9 aa, Homo sapiens
  Table A; Target 3712; HLA-C*02:02; ACTL8; ENSG00000117148; CTA
SALDESNTY

SEQ ID NO: 3713 - protein, 9 aa, Homo sapiens
  Table A; Target 3713; HLA-C*03:03; ACTL8; ENSG00000117148; CTA
SALDESNTY

SEQ ID NO: 3714 - protein, 9 aa, Homo sapiens
  Table A; Target 3714; HLA-C*03:04; ACTL8; ENSG00000117148; CTA
SALDESNTY

SEQ ID NO: 3715 - protein, 9 aa, Homo sapiens
  Table A; Target 3715; HLA-C*05:01; ACTL8; ENSG00000117148; CTA
SALDESNTY

SEQ ID NO: 3716 - protein, 9 aa, Homo sapiens
  Table A; Target 3716; HLA-C*07:04; ACTL8; ENSG00000117148; CTA
SALDESNTY

SEQ ID NO: 3717 - protein, 9 aa, Homo sapiens
  Table A; Target 3717; HLA-C*07:06; ACTL8; ENSG00000117148; CTA
SALDESNTY

SEQ ID NO: 3718 - protein, 9 aa, Homo sapiens
  Table A; Target 3718; HLA-C*12:03; ACTL8; ENSG00000117148; CTA
SALDESNTY

SEQ ID NO: 3719 - protein, 9 aa, Homo sapiens
  Table A; Target 3719; HLA-C*14:02; ACTL8; ENSG00000117148; CTA
SALDESNTY

SEQ ID NO: 3720 - protein, 9 aa, Homo sapiens
  Table A; Target 3720; HLA-C*16:01; ACTL8; ENSG00000117148; CTA
SALDESNTY

SEQ ID NO: 3721 - protein, 9 aa, Homo sapiens
  Table A; Target 3721; HLA-C*16:02; ACTL8; ENSG00000117148; CTA
SALDESNTY

SEQ ID NO: 3722 - protein, 9 aa, Homo sapiens
  Table A; Target 3722; HLA-C*16:04; ACTL8; ENSG00000117148; CTA
SALDESNTY

SEQ ID NO: 3723 - protein, 11 aa, Homo sapiens
  Table A; Target 3723; HLA-A*02:01; ACTL8; ENSG00000117148; CTA
SALDESNTYQL

SEQ ID NO: 3724 - protein, 11 aa, Homo sapiens
  Table A; Target 3724; HLA-A*02:04; ACTL8; ENSG00000117148; CTA
SALDESNTYQL

SEQ ID NO: 3725 - protein, 11 aa, Homo sapiens
  Table A; Target 3725; HLA-A*11:01; ACTL8; ENSG00000117148; CTA
SALDESNTYQL

SEQ ID NO: 3726 - protein, 11 aa, Homo sapiens
  Table A; Target 3726; HLA-B*35:03; ACTL8; ENSG00000117148; CTA
SALDESNTYQL

SEQ ID NO: 3727 - protein, 8 aa, Homo sapiens
  Table A; Target 3727; HLA-B*08:01; ACTL8; ENSG00000117148; CTA
SAYLLKSL

SEQ ID NO: 3728 - protein, 8 aa, Homo sapiens
  Table A; Target 3728; HLA-B*46:01; ACTL8; ENSG00000117148; CTA
SAYLLKSL

SEQ ID NO: 3729 - protein, 8 aa, Homo sapiens
  Table A; Target 3729; HLA-B*51:01; ACTL8; ENSG00000117148; CTA
SAYLLKSL

SEQ ID NO: 3730 - protein, 8 aa, Homo sapiens
  Table A; Target 3730; HLA-C*02:02; ACTL8; ENSG00000117148; CTA
SAYLLKSL

SEQ ID NO: 3731 - protein, 8 aa, Homo sapiens
  Table A; Target 3731; HLA-C*03:04; ACTL8; ENSG00000117148; CTA
SAYLLKSL

SEQ ID NO: 3732 - protein, 8 aa, Homo sapiens
  Table A; Target 3732; HLA-C*16:02; ACTL8; ENSG00000117148; CTA
SAYLLKSL

SEQ ID NO: 3733 - protein, 9 aa, Homo sapiens
  Table A; Target 3733; HLA-B*08:01; ACTL8; ENSG00000117148; CTA
SAYLLKSLF

SEQ ID NO: 3734 - protein, 9 aa, Homo sapiens
  Table A; Target 3734; HLA-B*44:02; ACTL8; ENSG00000117148; CTA
SAYLLKSLF

SEQ ID NO: 3735 - protein, 9 aa, Homo sapiens
  Table A; Target 3735; HLA-B*51:01; ACTL8; ENSG00000117148; CTA
SAYLLKSLF

SEQ ID NO: 3736 - protein, 9 aa, Homo sapiens
  Table A; Target 3736; HLA-B*57:01; ACTL8; ENSG00000117148; CTA
SAYLLKSLF

SEQ ID NO: 3737 - protein, 9 aa, Homo sapiens
  Table A; Target 3737; HLA-C*02:02; ACTL8; ENSG00000117148; CTA
SAYLLKSLF

SEQ ID NO: 3738 - protein, 9 aa, Homo sapiens
  Table A; Target 3738; HLA-C*12:03; ACTL8; ENSG00000117148; CTA
SAYLLKSLF

SEQ ID NO: 3739 - protein, 10 aa, Homo sapiens
  Table A; Target 3739; HLA-A*03:01; ACTL8; ENSG00000117148; CTA
SAYLLKSLFK

SEQ ID NO: 3740 - protein, 9 aa, Homo sapiens
  Table A; Target 3740; HLA-A*30:02; ACTL8; ENSG00000117148; CTA
SEWMSREEY

SEQ ID NO: 3741 - protein, 9 aa, Homo sapiens
  Table A; Target 3741; HLA-B*15:01; ACTL8; ENSG00000117148; CTA
SEWMSREEY

SEQ ID NO: 3742 - protein, 9 aa, Homo sapiens
  Table A; Target 3742; HLA-B*15:03; ACTL8; ENSG00000117148; CTA
SEWMSREEY

SEQ ID NO: 3743 - protein, 9 aa, Homo sapiens
  Table A; Target 3743; HLA-B*27:02; ACTL8; ENSG00000117148; CTA
SEWMSREEY

SEQ ID NO: 3744 - protein, 9 aa, Homo sapiens
  Table A; Target 3744; HLA-B*40:01; ACTL8; ENSG00000117148; CTA
SEWMSREEY

SEQ ID NO: 3745 - protein, 9 aa, Homo sapiens
  Table A; Target 3745; HLA-B*44:02; ACTL8; ENSG00000117148; CTA
SEWMSREEY

SEQ ID NO: 3746 - protein, 9 aa, Homo sapiens
  Table A; Target 3746; HLA-C*02:02; ACTL8; ENSG00000117148; CTA
SEWMSREEY

SEQ ID NO: 3747 - protein, 9 aa, Homo sapiens
  Table A; Target 3747; HLA-C*16:04; ACTL8; ENSG00000117148; CTA
SEWMSREEY

SEQ ID NO: 3748 - protein, 9 aa, Homo sapiens
  Table A; Target 3748; HLA-B*13:02; ACTL8; ENSG00000117148; CTA
SGLLTGVVV

SEQ ID NO: 3749 - protein, 9 aa, Homo sapiens
  Table A; Target 3749; HLA-B*46:01; ACTL8; ENSG00000117148; CTA
SGLLTGVVV

SEQ ID NO: 3750 - protein, 9 aa, Homo sapiens
  Table A; Target 3750; HLA-C*03:03; ACTL8; ENSG00000117148; CTA
SGLLTGVVV

SEQ ID NO: 3751 - protein, 9 aa, Homo sapiens
  Table A; Target 3751; HLA-C*03:04; ACTL8; ENSG00000117148; CTA
SGLLTGVVV

SEQ ID NO: 3752 - protein, 9 aa, Homo sapiens
  Table A; Target 3752; HLA-C*07:04; ACTL8; ENSG00000117148; CTA
SGLLTGVVV

SEQ ID NO: 3753 - protein, 8 aa, Homo sapiens
  Table A; Target 3753; HLA-B*08:01; ACTL8; ENSG00000117148; CTA
SGYGLTRV

SEQ ID NO: 3754 - protein, 8 aa, Homo sapiens
  Table A; Target 3754; HLA-B*51:01; ACTL8; ENSG00000117148; CTA
SGYGLTRV

SEQ ID NO: 3755 - protein, 8 aa, Homo sapiens
  Table A; Target 3755; HLA-C*06:02; ACTL8; ENSG00000117148; CTA
SGYGLTRV

SEQ ID NO: 3756 - protein, 9 aa, Homo sapiens
  Table A; Target 3756; HLA-C*06:02; ACTL8; ENSG00000117148; CTA
SGYGLTRVQ

SEQ ID NO: 3757 - protein, 9 aa, Homo sapiens
  Table A; Target 3757; HLA-C*12:03; ACTL8; ENSG00000117148; CTA
SGYGLTRVQ

SEQ ID NO: 3758 - protein, 11 aa, Homo sapiens
  Table A; Target 3758; HLA-B*38:01; ACTL8; ENSG00000117148; CTA
SHVMACGGNTL

SEQ ID NO: 3759 - protein, 9 aa, Homo sapiens
  Table A; Target 3759; HLA-A*31:01; ACTL8; ENSG00000117148; CTA
SLRPLLVSH

SEQ ID NO: 3760 - protein, 10 aa, Homo sapiens
  Table A; Target 3760; HLA-A*02:03; ACTL8; ENSG00000117148; CTA
SLRPLLVSHV

SEQ ID NO: 3761 - protein, 9 aa, Homo sapiens
  Table A; Target 3761; HLA-A*03:01; ACTL8; ENSG00000117148; CTA
SLYASGLLT

SEQ ID NO: 3762 - protein, 9 aa, Homo sapiens
  Table A; Target 3762; HLA-B*13:02; ACTL8; ENSG00000117148; CTA
SLYASGLLT

SEQ ID NO: 3763 - protein, 10 aa, Homo sapiens
  Table A; Target 3763; HLA-A*02:01; ACTL8; ENSG00000117148; CTA
SLYASGLLTG

SEQ ID NO: 3764 - protein, 10 aa, Homo sapiens
  Table A; Target 3764; HLA-A*02:03; ACTL8; ENSG00000117148; CTA
SLYASGLLTG

SEQ ID NO: 3765 - protein, 10 aa, Homo sapiens
  Table A; Target 3765; HLA-B*13:02; ACTL8; ENSG00000117148; CTA
SLYASGLLTG

SEQ ID NO: 3766 - protein, 11 aa, Homo sapiens
  Table A; Target 3766; HLA-A*02:03; ACTL8; ENSG00000117148; CTA
SLYASGLLTGV

SEQ ID NO: 3767 - protein, 11 aa, Homo sapiens
  Table A; Target 3767; HLA-A*02:04; ACTL8; ENSG00000117148; CTA
SLYASGLLTGV

SEQ ID NO: 3768 - protein, 11 aa, Homo sapiens
  Table A; Target 3768; HLA-A*02:07; ACTL8; ENSG00000117148; CTA
SLYASGLLTGV

SEQ ID NO: 3769 - protein, 11 aa, Homo sapiens
  Table A; Target 3769; HLA-B*13:02; ACTL8; ENSG00000117148; CTA
SLYASGLLTGV

SEQ ID NO: 3770 - protein, 11 aa, Homo sapiens
  Table A; Target 3770; HLA-B*55:01; ACTL8; ENSG00000117148; CTA
SLYASGLLTGV

SEQ ID NO: 3771 - protein, 10 aa, Homo sapiens
  Table A; Target 3771; HLA-B*27:05; ACTL8; ENSG00000117148; CTA
SRVELTPMQR

SEQ ID NO: 3772 - protein, 8 aa, Homo sapiens
  Table A; Target 3772; HLA-A*32:01; ACTL8; ENSG00000117148; CTA
SSTKATVW

SEQ ID NO: 3773 - protein, 8 aa, Homo sapiens
  Table A; Target 3773; HLA-B*57:01; ACTL8; ENSG00000117148; CTA
SSTKATVW

SEQ ID NO: 3774 - protein, 8 aa, Homo sapiens
  Table A; Target 3774; HLA-B*58:01; ACTL8; ENSG00000117148; CTA
SSTKATVW

SEQ ID NO: 3775 - protein, 8 aa, Homo sapiens
  Table A; Target 3775; HLA-C*16:01; ACTL8; ENSG00000117148; CTA
SSTKATVW

SEQ ID NO: 3776 - protein, 10 aa, Homo sapiens
  Table A; Target 3776; HLA-A*03:01; ACTL8; ENSG00000117148; CTA
STYQSEWMSR

SEQ ID NO: 3777 - protein, 10 aa, Homo sapiens
  Table A; Target 3777; HLA-A*11:01; ACTL8; ENSG00000117148; CTA
STYQSEWMSR

SEQ ID NO: 3778 - protein, 10 aa, Homo sapiens
  Table A; Target 3778; HLA-A*31:01; ACTL8; ENSG00000117148; CTA
STYQSEWMSR

SEQ ID NO: 3779 - protein, 10 aa, Homo sapiens
  Table A; Target 3779; HLA-A*33:01; ACTL8; ENSG00000117148; CTA
STYQSEWMSR

SEQ ID NO: 3780 - protein, 10 aa, Homo sapiens
  Table A; Target 3780; HLA-A*33:03; ACTL8; ENSG00000117148; CTA
STYQSEWMSR

SEQ ID NO: 3781 - protein, 10 aa, Homo sapiens
  Table A; Target 3781; HLA-A*68:01; ACTL8; ENSG00000117148; CTA
STYQSEWMSR

SEQ ID NO: 3782 - protein, 10 aa, Homo sapiens
  Table A; Target 3782; HLA-C*07:06; ACTL8; ENSG00000117148; CTA
STYQSEWMSR

SEQ ID NO: 3783 - protein, 9 aa, Homo sapiens
  Table A; Target 3783; HLA-C*05:01; ACTL8; ENSG00000117148; CTA
SVESCEISL

SEQ ID NO: 3784 - protein, 9 aa, Homo sapiens
  Table A; Target 3784; HLA-A*01:01; ACTL8; ENSG00000117148; CTA
SVVAHLSTY

SEQ ID NO: 3785 - protein, 9 aa, Homo sapiens
  Table A; Target 3785; HLA-A*02:03; ACTL8; ENSG00000117148; CTA
SVVAHLSTY

SEQ ID NO: 3786 - protein, 9 aa, Homo sapiens
  Table A; Target 3786; HLA-A*03:01; ACTL8; ENSG00000117148; CTA
SVVAHLSTY

SEQ ID NO: 3787 - protein, 9 aa, Homo sapiens
  Table A; Target 3787; HLA-A*03:02; ACTL8; ENSG00000117148; CTA
SVVAHLSTY

SEQ ID NO: 3788 - protein, 9 aa, Homo sapiens
  Table A; Target 3788; HLA-A*11:01; ACTL8; ENSG00000117148; CTA
SVVAHLSTY

SEQ ID NO: 3789 - protein, 9 aa, Homo sapiens
  Table A; Target 3789; HLA-A*23:01; ACTL8; ENSG00000117148; CTA
SVVAHLSTY

SEQ ID NO: 3790 - protein, 9 aa, Homo sapiens
  Table A; Target 3790; HLA-A*24:02; ACTL8; ENSG00000117148; CTA
SVVAHLSTY

SEQ ID NO: 3791 - protein, 9 aa, Homo sapiens
  Table A; Target 3791; HLA-A*25:01; ACTL8; ENSG00000117148; CTA
SVVAHLSTY

SEQ ID NO: 3792 - protein, 9 aa, Homo sapiens
  Table A; Target 3792; HLA-A*29:02; ACTL8; ENSG00000117148; CTA
SVVAHLSTY

SEQ ID NO: 3793 - protein, 9 aa, Homo sapiens
  Table A; Target 3793; HLA-A*32:01; ACTL8; ENSG00000117148; CTA
SVVAHLSTY

SEQ ID NO: 3794 - protein, 9 aa, Homo sapiens
  Table A; Target 3794; HLA-A*68:01; ACTL8; ENSG00000117148; CTA
SVVAHLSTY

SEQ ID NO: 3795 - protein, 9 aa, Homo sapiens
  Table A; Target 3795; HLA-B*15:03; ACTL8; ENSG00000117148; CTA
SVVAHLSTY

SEQ ID NO: 3796 - protein, 9 aa, Homo sapiens
  Table A; Target 3796; HLA-B*18:01; ACTL8; ENSG00000117148; CTA
SVVAHLSTY

SEQ ID NO: 3797 - protein, 9 aa, Homo sapiens
  Table A; Target 3797; HLA-B*27:02; ACTL8; ENSG00000117148; CTA
SVVAHLSTY

SEQ ID NO: 3798 - protein, 9 aa, Homo sapiens
  Table A; Target 3798; HLA-B*27:05; ACTL8; ENSG00000117148; CTA
SVVAHLSTY

SEQ ID NO: 3799 - protein, 9 aa, Homo sapiens
  Table A; Target 3799; HLA-B*39:01; ACTL8; ENSG00000117148; CTA
SVVAHLSTY

SEQ ID NO: 3800 - protein, 9 aa, Homo sapiens
  Table A; Target 3800; HLA-B*44:02; ACTL8; ENSG00000117148; CTA
SVVAHLSTY

SEQ ID NO: 3801 - protein, 9 aa, Homo sapiens
  Table A; Target 3801; HLA-B*44:03; ACTL8; ENSG00000117148; CTA
SVVAHLSTY

SEQ ID NO: 3802 - protein, 9 aa, Homo sapiens
  Table A; Target 3802; HLA-B*55:01; ACTL8; ENSG00000117148; CTA
SVVAHLSTY

SEQ ID NO: 3803 - protein, 9 aa, Homo sapiens
  Table A; Target 3803; HLA-B*57:01; ACTL8; ENSG00000117148; CTA
SVVAHLSTY

SEQ ID NO: 3804 - protein, 9 aa, Homo sapiens
  Table A; Target 3804; HLA-B*58:01; ACTL8; ENSG00000117148; CTA
SVVAHLSTY

SEQ ID NO: 3805 - protein, 9 aa, Homo sapiens
  Table A; Target 3805; HLA-C*01:02; ACTL8; ENSG00000117148; CTA
SVVAHLSTY

SEQ ID NO: 3806 - protein, 9 aa, Homo sapiens
  Table A; Target 3806; HLA-C*02:02; ACTL8; ENSG00000117148; CTA
SVVAHLSTY

SEQ ID NO: 3807 - protein, 9 aa, Homo sapiens
  Table A; Target 3807; HLA-C*03:03; ACTL8; ENSG00000117148; CTA
SVVAHLSTY

SEQ ID NO: 3808 - protein, 9 aa, Homo sapiens
  Table A; Target 3808; HLA-C*03:04; ACTL8; ENSG00000117148; CTA
SVVAHLSTY

SEQ ID NO: 3809 - protein, 9 aa, Homo sapiens
  Table A; Target 3809; HLA-C*04:01; ACTL8; ENSG00000117148; CTA
SVVAHLSTY

SEQ ID NO: 3810 - protein, 9 aa, Homo sapiens
  Table A; Target 3810; HLA-C*05:01; ACTL8; ENSG00000117148; CTA
SVVAHLSTY

SEQ ID NO: 3811 - protein, 9 aa, Homo sapiens
  Table A; Target 3811; HLA-C*07:04; ACTL8; ENSG00000117148; CTA
SVVAHLSTY

SEQ ID NO: 3812 - protein, 9 aa, Homo sapiens
  Table A; Target 3812; HLA-C*07:06; ACTL8; ENSG00000117148; CTA
SVVAHLSTY

SEQ ID NO: 3813 - protein, 9 aa, Homo sapiens
  Table A; Target 3813; HLA-C*12:03; ACTL8; ENSG00000117148; CTA
SVVAHLSTY

SEQ ID NO: 3814 - protein, 9 aa, Homo sapiens
  Table A; Target 3814; HLA-C*14:02; ACTL8; ENSG00000117148; CTA
SVVAHLSTY

SEQ ID NO: 3815 - protein, 9 aa, Homo sapiens
  Table A; Target 3815; HLA-C*16:01; ACTL8; ENSG00000117148; CTA
SVVAHLSTY

SEQ ID NO: 3816 - protein, 9 aa, Homo sapiens
  Table A; Target 3816; HLA-C*16:02; ACTL8; ENSG00000117148; CTA
SVVAHLSTY

SEQ ID NO: 3817 - protein, 9 aa, Homo sapiens
  Table A; Target 3817; HLA-C*16:04; ACTL8; ENSG00000117148; CTA
SVVAHLSTY

SEQ ID NO: 3818 - protein, 8 aa, Homo sapiens
  Table A; Target 3818; HLA-B*56:01; ACTL8; ENSG00000117148; CTA
SVWLGASV

SEQ ID NO: 3819 - protein, 9 aa, Homo sapiens
  Table A; Target 3819; HLA-A*02:01; ACTL8; ENSG00000117148; CTA
SVWLGASVV

SEQ ID NO: 3820 - protein, 9 aa, Homo sapiens
  Table A; Target 3820; HLA-A*02:03; ACTL8; ENSG00000117148; CTA
SVWLGASVV

SEQ ID NO: 3821 - protein, 9 aa, Homo sapiens
  Table A; Target 3821; HLA-A*68:02; ACTL8; ENSG00000117148; CTA
SVWLGASVV

SEQ ID NO: 3822 - protein, 9 aa, Homo sapiens
  Table A; Target 3822; HLA-B*13:02; ACTL8; ENSG00000117148; CTA
SVWLGASVV

SEQ ID NO: 3823 - protein, 9 aa, Homo sapiens
  Table A; Target 3823; HLA-B*51:01; ACTL8; ENSG00000117148; CTA
SVWLGASVV

SEQ ID NO: 3824 - protein, 9 aa, Homo sapiens
  Table A; Target 3824; HLA-B*54:01; ACTL8; ENSG00000117148; CTA
SVWLGASVV

SEQ ID NO: 3825 - protein, 9 aa, Homo sapiens
  Table A; Target 3825; HLA-B*55:01; ACTL8; ENSG00000117148; CTA
SVWLGASVV

SEQ ID NO: 3826 - protein, 9 aa, Homo sapiens
  Table A; Target 3826; HLA-B*56:01; ACTL8; ENSG00000117148; CTA
SVWLGASVV

SEQ ID NO: 3827 - protein, 9 aa, Homo sapiens
  Table A; Target 3827; HLA-C*06:02; ACTL8; ENSG00000117148; CTA
SVWLGASVV

SEQ ID NO: 3828 - protein, 10 aa, Homo sapiens
  Table A; Target 3828; HLA-B*54:01; ACTL8; ENSG00000117148; CTA
SVWLGASVVA

SEQ ID NO: 3829 - protein, 10 aa, Homo sapiens
  Table A; Target 3829; HLA-B*56:01; ACTL8; ENSG00000117148; CTA
SVWLGASVVA

SEQ ID NO: 3830 - protein, 9 aa, Homo sapiens
  Table A; Target 3830; HLA-B*35:01; ACTL8; ENSG00000117148; CTA
TAGWNEPQM

SEQ ID NO: 3831 - protein, 9 aa, Homo sapiens
  Table A; Target 3831; HLA-B*35:03; ACTL8; ENSG00000117148; CTA
TAGWNEPQM

SEQ ID NO: 3832 - protein, 9 aa, Homo sapiens
  Table A; Target 3832; HLA-B*55:01; ACTL8; ENSG00000117148; CTA
TAGWNEPQM

SEQ ID NO: 3833 - protein, 9 aa, Homo sapiens
  Table A; Target 3833; HLA-B*18:01; ACTL8; ENSG00000117148; CTA
TETPLREPA

SEQ ID NO: 3834 - protein, 9 aa, Homo sapiens
  Table A; Target 3834; HLA-A*01:01; ACTL8; ENSG00000117148; CTA
TGVVVDSGY

SEQ ID NO: 3835 - protein, 9 aa, Homo sapiens
  Table A; Target 3835; HLA-A*30:02; ACTL8; ENSG00000117148; CTA
TGVVVDSGY

SEQ ID NO: 3836 - protein, 9 aa, Homo sapiens
  Table A; Target 3836; HLA-B*15:01; ACTL8; ENSG00000117148; CTA
TGVVVDSGY

SEQ ID NO: 3837 - protein, 9 aa, Homo sapiens
  Table A; Target 3837; HLA-B*15:03; ACTL8; ENSG00000117148; CTA
TGVVVDSGY

SEQ ID NO: 3838 - protein, 9 aa, Homo sapiens
  Table A; Target 3838; HLA-B*35:01; ACTL8; ENSG00000117148; CTA
TGVVVDSGY

SEQ ID NO: 3839 - protein, 9 aa, Homo sapiens
  Table A; Target 3839; HLA-B*46:01; ACTL8; ENSG00000117148; CTA
TGVVVDSGY

SEQ ID NO: 3840 - protein, 9 aa, Homo sapiens
  Table A; Target 3840; HLA-C*04:01; ACTL8; ENSG00000117148; CTA
TGVVVDSGY

SEQ ID NO: 3841 - protein, 9 aa, Homo sapiens
  Table A; Target 3841; HLA-C*16:04; ACTL8; ENSG00000117148; CTA
TGVVVDSGY

SEQ ID NO: 3842 - protein, 9 aa, Homo sapiens
  Table A; Target 3842; HLA-B*39:01; ACTL8; ENSG00000117148; CTA
TLEFAGQDL

SEQ ID NO: 3843 - protein, 9 aa, Homo sapiens
  Table A; Target 3843; HLA-C*01:02; ACTL8; ENSG00000117148; CTA
TLEFAGQDL

SEQ ID NO: 3844 - protein, 8 aa, Homo sapiens
  Table A; Target 3844; HLA-A*03:01; ACTL8; ENSG00000117148; CTA
TLYPGFTK

SEQ ID NO: 3845 - protein, 8 aa, Homo sapiens
  Table A; Target 3845; HLA-A*03:02; ACTL8; ENSG00000117148; CTA
TLYPGFTK

SEQ ID NO: 3846 - protein, 8 aa, Homo sapiens
  Table A; Target 3846; HLA-A*11:01; ACTL8; ENSG00000117148; CTA
TLYPGFTK

SEQ ID NO: 3847 - protein, 8 aa, Homo sapiens
  Table A; Target 3847; HLA-B*27:05; ACTL8; ENSG00000117148; CTA
TLYPGFTK

SEQ ID NO: 3848 - protein, 8 aa, Homo sapiens
  Table A; Target 3848; HLA-C*06:02; ACTL8; ENSG00000117148; CTA
TLYPGFTK

SEQ ID NO: 3849 - protein, 9 aa, Homo sapiens
  Table A; Target 3849; HLA-A*03:01; ACTL8; ENSG00000117148; CTA
TLYPGFTKR

SEQ ID NO: 3850 - protein, 9 aa, Homo sapiens
  Table A; Target 3850; HLA-A*03:02; ACTL8; ENSG00000117148; CTA
TLYPGFTKR

SEQ ID NO: 3851 - protein, 9 aa, Homo sapiens
  Table A; Target 3851; HLA-A*11:01; ACTL8; ENSG00000117148; CTA
TLYPGFTKR

SEQ ID NO: 3852 - protein, 9 aa, Homo sapiens
  Table A; Target 3852; HLA-A*31:01; ACTL8; ENSG00000117148; CTA
TLYPGFTKR

SEQ ID NO: 3853 - protein, 9 aa, Homo sapiens
  Table A; Target 3853; HLA-A*33:01; ACTL8; ENSG00000117148; CTA
TLYPGFTKR

SEQ ID NO: 3854 - protein, 9 aa, Homo sapiens
  Table A; Target 3854; HLA-A*33:03; ACTL8; ENSG00000117148; CTA
TLYPGFTKR

SEQ ID NO: 3855 - protein, 9 aa, Homo sapiens
  Table A; Target 3855; HLA-A*68:01; ACTL8; ENSG00000117148; CTA
TLYPGFTKR

SEQ ID NO: 3856 - protein, 9 aa, Homo sapiens
  Table A; Target 3856; HLA-C*07:06; ACTL8; ENSG00000117148; CTA
TLYPGFTKR

SEQ ID NO: 3857 - protein, 10 aa, Homo sapiens
  Table A; Target 3857; HLA-A*02:03; ACTL8; ENSG00000117148; CTA
TLYPGFTKRL

SEQ ID NO: 3858 - protein, 10 aa, Homo sapiens
  Table A; Target 3858; HLA-A*02:04; ACTL8; ENSG00000117148; CTA
TLYPGFTKRL

SEQ ID NO: 3859 - protein, 10 aa, Homo sapiens
  Table A; Target 3859; HLA-A*03:01; ACTL8; ENSG00000117148; CTA
TLYPGFTKRL

SEQ ID NO: 3860 - protein, 8 aa, Homo sapiens
  Table A; Target 3860; HLA-B*08:01; ACTL8; ENSG00000117148; CTA
TPMQRVAP

SEQ ID NO: 3861 - protein, 8 aa, Homo sapiens
  Table A; Target 3861; HLA-B*56:01; ACTL8; ENSG00000117148; CTA
TPMQRVAP

SEQ ID NO: 3862 - protein, 10 aa, Homo sapiens
  Table A; Target 3862; HLA-B*07:02; ACTL8; ENSG00000117148; CTA
TPMQRVAPEM

SEQ ID NO: 3863 - protein, 10 aa, Homo sapiens
  Table A; Target 3863; HLA-B*35:01; ACTL8; ENSG00000117148; CTA
TPMQRVAPEM

SEQ ID NO: 3864 - protein, 10 aa, Homo sapiens
  Table A; Target 3864; HLA-B*35:03; ACTL8; ENSG00000117148; CTA
TPMQRVAPEM

SEQ ID NO: 3865 - protein, 10 aa, Homo sapiens
  Table A; Target 3865; HLA-B*55:01; ACTL8; ENSG00000117148; CTA
TPMQRVAPEM

SEQ ID NO: 3866 - protein, 10 aa, Homo sapiens
  Table A; Target 3866; HLA-C*07:02; ACTL8; ENSG00000117148; CTA
TPMQRVAPEM

SEQ ID NO: 3867 - protein, 9 aa, Homo sapiens
  Table A; Target 3867; HLA-A*03:02; ACTL8; ENSG00000117148; CTA
TVAVTQMNK

SEQ ID NO: 3868 - protein, 9 aa, Homo sapiens
  Table A; Target 3868; HLA-A*31:01; ACTL8; ENSG00000117148; CTA
TVAVTQMNK

SEQ ID NO: 3869 - protein, 9 aa, Homo sapiens
  Table A; Target 3869; HLA-A*33:03; ACTL8; ENSG00000117148; CTA
TVAVTQMNK

SEQ ID NO: 3870 - protein, 9 aa, Homo sapiens
  Table A; Target 3870; HLA-A*68:01; ACTL8; ENSG00000117148; CTA
TVAVTQMNK

SEQ ID NO: 3871 - protein, 9 aa, Homo sapiens
  Table A; Target 3871; HLA-C*06:02; ACTL8; ENSG00000117148; CTA
TVAVTQMNK

SEQ ID NO: 3872 - protein, 9 aa, Homo sapiens
  Table A; Target 3872; HLA-C*07:06; ACTL8; ENSG00000117148; CTA
TVAVTQMNK

SEQ ID NO: 3873 - protein, 10 aa, Homo sapiens
  Table A; Target 3873; HLA-A*25:01; ACTL8; ENSG00000117148; CTA
TVIIDHGSGF

SEQ ID NO: 3874 - protein, 10 aa, Homo sapiens
  Table A; Target 3874; HLA-A*26:01; ACTL8; ENSG00000117148; CTA
TVIIDHGSGF

SEQ ID NO: 3875 - protein, 10 aa, Homo sapiens
  Table A; Target 3875; HLA-A*32:01; ACTL8; ENSG00000117148; CTA
TVIIDHGSGF

SEQ ID NO: 3876 - protein, 10 aa, Homo sapiens
  Table A; Target 3876; HLA-B*15:01; ACTL8; ENSG00000117148; CTA
TVIIDHGSGF

SEQ ID NO: 3877 - protein, 10 aa, Homo sapiens
  Table A; Target 3877; HLA-B*35:01; ACTL8; ENSG00000117148; CTA
TVIIDHGSGF

SEQ ID NO: 3878 - protein, 8 aa, Homo sapiens
  Table A; Target 3878; HLA-A*31:01; ACTL8; ENSG00000117148; CTA
TVWEGSNR

SEQ ID NO: 3879 - protein, 8 aa, Homo sapiens
  Table A; Target 3879; HLA-A*33:03; ACTL8; ENSG00000117148; CTA
TVWEGSNR

SEQ ID NO: 3880 - protein, 8 aa, Homo sapiens
  Table A; Target 3880; HLA-C*07:06; ACTL8; ENSG00000117148; CTA
TVWEGSNR

SEQ ID NO: 3881 - protein, 10 aa, Homo sapiens
  Table A; Target 3881; HLA-A*25:01; ACTL8; ENSG00000117148; CTA
TVWEGSNRNF

SEQ ID NO: 3882 - protein, 10 aa, Homo sapiens
  Table A; Target 3882; HLA-A*30:02; ACTL8; ENSG00000117148; CTA
TVWEGSNRNF

SEQ ID NO: 3883 - protein, 10 aa, Homo sapiens
  Table A; Target 3883; HLA-B*57:01; ACTL8; ENSG00000117148; CTA
TVWEGSNRNF

SEQ ID NO: 3884 - protein, 10 aa, Homo sapiens
  Table A; Target 3884; HLA-B*58:01; ACTL8; ENSG00000117148; CTA
TVWEGSNRNF

SEQ ID NO: 3885 - protein, 9 aa, Homo sapiens
  Table A; Target 3885; HLA-A*33:01; ACTL8; ENSG00000117148; CTA
TYQLPDGSR

SEQ ID NO: 3886 - protein, 9 aa, Homo sapiens
  Table A; Target 3886; HLA-A*33:03; ACTL8; ENSG00000117148; CTA
TYQLPDGSR

SEQ ID NO: 3887 - protein, 9 aa, Homo sapiens
  Table A; Target 3887; HLA-A*31:01; ACTL8; ENSG00000117148; CTA
TYQSEWMSR

SEQ ID NO: 3888 - protein, 9 aa, Homo sapiens
  Table A; Target 3888; HLA-A*33:01; ACTL8; ENSG00000117148; CTA
TYQSEWMSR

SEQ ID NO: 3889 - protein, 9 aa, Homo sapiens
  Table A; Target 3889; HLA-A*33:03; ACTL8; ENSG00000117148; CTA
TYQSEWMSR

SEQ ID NO: 3890 - protein, 8 aa, Homo sapiens
  Table A; Target 3890; HLA-C*07:01; ACTL8; ENSG00000117148; CTA
VAHLSTYQ

SEQ ID NO: 3891 - protein, 11 aa, Homo sapiens
  Table A; Target 3891; HLA-B*57:01; ACTL8; ENSG00000117148; CTA
VAHLSTYQSEW

SEQ ID NO: 3892 - protein, 8 aa, Homo sapiens
  Table A; Target 3892; HLA-A*11:01; ACTL8; ENSG00000117148; CTA
VAVTQMNK

SEQ ID NO: 3893 - protein, 8 aa, Homo sapiens
  Table A; Target 3893; HLA-B*27:02; ACTL8; ENSG00000117148; CTA
VAVTQMNK

SEQ ID NO: 3894 - protein, 8 aa, Homo sapiens
  Table A; Target 3894; HLA-B*58:01; ACTL8; ENSG00000117148; CTA
VAVTQMNK

SEQ ID NO: 3895 - protein, 9 aa, Homo sapiens
  Table A; Target 3895; HLA-C*12:03; ACTL8; ENSG00000117148; CTA
VAVTQMNKC

SEQ ID NO: 3896 - protein, 10 aa, Homo sapiens
  Table A; Target 3896; HLA-B*58:01; ACTL8; ENSG00000117148; CTA
VAVTQMNKCY

SEQ ID NO: 3897 - protein, 10 aa, Homo sapiens
  Table A; Target 3897; HLA-C*12:03; ACTL8; ENSG00000117148; CTA
VAVTQMNKCY

SEQ ID NO: 3898 - protein, 10 aa, Homo sapiens
  Table A; Target 3898; HLA-C*16:02; ACTL8; ENSG00000117148; CTA
VAVTQMNKCY

SEQ ID NO: 3899 - protein, 9 aa, Homo sapiens
  Table A; Target 3899; HLA-A*68:01; ACTL8; ENSG00000117148; CTA
VDSGYGLTR

SEQ ID NO: 3900 - protein, 9 aa, Homo sapiens
  Table A; Target 3900; HLA-B*27:02; ACTL8; ENSG00000117148; CTA
VDSGYGLTR

SEQ ID NO: 3901 - protein, 9 aa, Homo sapiens
  Table A; Target 3901; HLA-A*30:01; ACTL8; ENSG00000117148; CTA
VELTPMQRV

SEQ ID NO: 3902 - protein, 9 aa, Homo sapiens
  Table A; Target 3902; HLA-B*44:02; ACTL8; ENSG00000117148; CTA
VELTPMQRV

SEQ ID NO: 3903 - protein, 9 aa, Homo sapiens
  Table A; Target 3903; HLA-B*44:03; ACTL8; ENSG00000117148; CTA
VELTPMQRV

SEQ ID NO: 3904 - protein, 9 aa, Homo sapiens
  Table A; Target 3904; HLA-B*49:01; ACTL8; ENSG00000117148; CTA
VELTPMQRV

SEQ ID NO: 3905 - protein, 9 aa, Homo sapiens
  Table A; Target 3905; HLA-A*30:01; ACTL8; ENSG00000117148; CTA
VESVESCEI

SEQ ID NO: 3906 - protein, 9 aa, Homo sapiens
  Table A; Target 3906; HLA-B*13:02; ACTL8; ENSG00000117148; CTA
VESVESCEI

SEQ ID NO: 3907 - protein, 9 aa, Homo sapiens
  Table A; Target 3907; HLA-B*39:01; ACTL8; ENSG00000117148; CTA
VESVESCEI

SEQ ID NO: 3908 - protein, 9 aa, Homo sapiens
  Table A; Target 3908; HLA-B*40:01; ACTL8; ENSG00000117148; CTA
VESVESCEI

SEQ ID NO: 3909 - protein, 9 aa, Homo sapiens
  Table A; Target 3909; HLA-B*49:01; ACTL8; ENSG00000117148; CTA
VESVESCEI

SEQ ID NO: 3910 - protein, 11 aa, Homo sapiens
  Table A; Target 3910; HLA-B*40:01; ACTL8; ENSG00000117148; CTA
VESVESCEISL

SEQ ID NO: 3911 - protein, 9 aa, Homo sapiens
  Table A; Target 3911; HLA-A*23:01; ACTL8; ENSG00000117148; CTA
VFEQPGPSI

SEQ ID NO: 3912 - protein, 9 aa, Homo sapiens
  Table A; Target 3912; HLA-A*24:02; ACTL8; ENSG00000117148; CTA
VFEQPGPSI

SEQ ID NO: 3913 - protein, 9 aa, Homo sapiens
  Table A; Target 3913; HLA-B*38:01; ACTL8; ENSG00000117148; CTA
VFEQPGPSI

SEQ ID NO: 3914 - protein, 9 aa, Homo sapiens
  Table A; Target 3914; HLA-C*01:02; ACTL8; ENSG00000117148; CTA
VFEQPGPSI

SEQ ID NO: 3915 - protein, 9 aa, Homo sapiens
  Table A; Target 3915; HLA-C*03:04; ACTL8; ENSG00000117148; CTA
VFEQPGPSI

SEQ ID NO: 3916 - protein, 9 aa, Homo sapiens
  Table A; Target 3916; HLA-C*04:01; ACTL8; ENSG00000117148; CTA
VFEQPGPSI

SEQ ID NO: 3917 - protein, 9 aa, Homo sapiens
  Table A; Target 3917; HLA-C*05:01; ACTL8; ENSG00000117148; CTA
VFEQPGPSI

SEQ ID NO: 3918 - protein, 9 aa, Homo sapiens
  Table A; Target 3918; HLA-C*14:02; ACTL8; ENSG00000117148; CTA
VFEQPGPSI

SEQ ID NO: 3919 - protein, 8 aa, Homo sapiens
  Table A; Target 3919; HLA-A*23:01; ACTL8; ENSG00000117148; CTA
VFPNIVNY

SEQ ID NO: 3920 - protein, 8 aa, Homo sapiens
  Table A; Target 3920; HLA-A*29:02; ACTL8; ENSG00000117148; CTA
VFPNIVNY

SEQ ID NO: 3921 - protein, 8 aa, Homo sapiens
  Table A; Target 3921; HLA-C*14:02; ACTL8; ENSG00000117148; CTA
VFPNIVNY

SEQ ID NO: 3922 - protein, 9 aa, Homo sapiens
  Table A; Target 3922; HLA-A*23:01; ACTL8; ENSG00000117148; CTA
VFPNIVNYL

SEQ ID NO: 3923 - protein, 9 aa, Homo sapiens
  Table A; Target 3923; HLA-A*24:02; ACTL8; ENSG00000117148; CTA
VFPNIVNYL

SEQ ID NO: 3924 - protein, 9 aa, Homo sapiens
  Table A; Target 3924; HLA-C*01:02; ACTL8; ENSG00000117148; CTA
VFPNIVNYL

SEQ ID NO: 3925 - protein, 9 aa, Homo sapiens
  Table A; Target 3925; HLA-C*14:02; ACTL8; ENSG00000117148; CTA
VFPNIVNYL

SEQ ID NO: 3926 - protein, 9 aa, Homo sapiens
  Table A; Target 3926; HLA-A*02:07; ACTL8; ENSG00000117148; CTA
VIIDHGSGF

SEQ ID NO: 3927 - protein, 9 aa, Homo sapiens
  Table A; Target 3927; HLA-A*23:01; ACTL8; ENSG00000117148; CTA
VIIDHGSGF

SEQ ID NO: 3928 - protein, 9 aa, Homo sapiens
  Table A; Target 3928; HLA-A*24:02; ACTL8; ENSG00000117148; CTA
VIIDHGSGF

SEQ ID NO: 3929 - protein, 9 aa, Homo sapiens
  Table A; Target 3929; HLA-A*25:01; ACTL8; ENSG00000117148; CTA
VIIDHGSGF

SEQ ID NO: 3930 - protein, 9 aa, Homo sapiens
  Table A; Target 3930; HLA-A*26:01; ACTL8; ENSG00000117148; CTA
VIIDHGSGF

SEQ ID NO: 3931 - protein, 9 aa, Homo sapiens
  Table A; Target 3931; HLA-A*29:02; ACTL8; ENSG00000117148; CTA
VIIDHGSGF

SEQ ID NO: 3932 - protein, 9 aa, Homo sapiens
  Table A; Target 3932; HLA-A*30:02; ACTL8; ENSG00000117148; CTA
VIIDHGSGF

SEQ ID NO: 3933 - protein, 9 aa, Homo sapiens
  Table A; Target 3933; HLA-A*32:01; ACTL8; ENSG00000117148; CTA
VIIDHGSGF

SEQ ID NO: 3934 - protein, 9 aa, Homo sapiens
  Table A; Target 3934; HLA-B*07:02; ACTL8; ENSG00000117148; CTA
VIIDHGSGF

SEQ ID NO: 3935 - protein, 9 aa, Homo sapiens
  Table A; Target 3935; HLA-B*15:03; ACTL8; ENSG00000117148; CTA
VIIDHGSGF

SEQ ID NO: 3936 - protein, 9 aa, Homo sapiens
  Table A; Target 3936; HLA-B*37:01; ACTL8; ENSG00000117148; CTA
VIIDHGSGF

SEQ ID NO: 3937 - protein, 9 aa, Homo sapiens
  Table A; Target 3937; HLA-B*44:02; ACTL8; ENSG00000117148; CTA
VIIDHGSGF

SEQ ID NO: 3938 - protein, 9 aa, Homo sapiens
  Table A; Target 3938; HLA-B*44:03; ACTL8; ENSG00000117148; CTA
VIIDHGSGF

SEQ ID NO: 3939 - protein, 9 aa, Homo sapiens
  Table A; Target 3939; HLA-B*46:01; ACTL8; ENSG00000117148; CTA
VIIDHGSGF

SEQ ID NO: 3940 - protein, 9 aa, Homo sapiens
  Table A; Target 3940; HLA-B*58:01; ACTL8; ENSG00000117148; CTA
VIIDHGSGF

SEQ ID NO: 3941 - protein, 9 aa, Homo sapiens
  Table A; Target 3941; HLA-C*01:02; ACTL8; ENSG00000117148; CTA
VIIDHGSGF

SEQ ID NO: 3942 - protein, 9 aa, Homo sapiens
  Table A; Target 3942; HLA-C*02:02; ACTL8; ENSG00000117148; CTA
VIIDHGSGF

SEQ ID NO: 3943 - protein, 9 aa, Homo sapiens
  Table A; Target 3943; HLA-C*03:03; ACTL8; ENSG00000117148; CTA
VIIDHGSGF

SEQ ID NO: 3944 - protein, 9 aa, Homo sapiens
  Table A; Target 3944; HLA-C*03:04; ACTL8; ENSG00000117148; CTA
VIIDHGSGF

SEQ ID NO: 3945 - protein, 9 aa, Homo sapiens
  Table A; Target 3945; HLA-C*05:01; ACTL8; ENSG00000117148; CTA
VIIDHGSGF

SEQ ID NO: 3946 - protein, 9 aa, Homo sapiens
  Table A; Target 3946; HLA-C*07:04; ACTL8; ENSG00000117148; CTA
VIIDHGSGF

SEQ ID NO: 3947 - protein, 9 aa, Homo sapiens
  Table A; Target 3947; HLA-C*12:03; ACTL8; ENSG00000117148; CTA
VIIDHGSGF

SEQ ID NO: 3948 - protein, 9 aa, Homo sapiens
  Table A; Target 3948; HLA-C*14:02; ACTL8; ENSG00000117148; CTA
VIIDHGSGF

SEQ ID NO: 3949 - protein, 9 aa, Homo sapiens
  Table A; Target 3949; HLA-C*16:01; ACTL8; ENSG00000117148; CTA
VIIDHGSGF

SEQ ID NO: 3950 - protein, 9 aa, Homo sapiens
  Table A; Target 3950; HLA-C*16:04; ACTL8; ENSG00000117148; CTA
VIIDHGSGF

SEQ ID NO: 3951 - protein, 10 aa, Homo sapiens
  Table A; Target 3951; HLA-A*02:03; ACTL8; ENSG00000117148; CTA
VIIDHGSGFL

SEQ ID NO: 3952 - protein, 10 aa, Homo sapiens
  Table A; Target 3952; HLA-A*03:01; ACTL8; ENSG00000117148; CTA
VIIDHGSGFL

SEQ ID NO: 3953 - protein, 11 aa, Homo sapiens
  Table A; Target 3953; HLA-A*03:02; ACTL8; ENSG00000117148; CTA
VIIDHGSGFLK

SEQ ID NO: 3954 - protein, 11 aa, Homo sapiens
  Table A; Target 3954; HLA-A*31:01; ACTL8; ENSG00000117148; CTA
VIIDHGSGFLK

SEQ ID NO: 3955 - protein, 9 aa, Homo sapiens
  Table A; Target 3955; HLA-A*11:01; ACTL8; ENSG00000117148; CTA
VIITETPLR

SEQ ID NO: 3956 - protein, 9 aa, Homo sapiens
  Table A; Target 3956; HLA-A*02:01; ACTL8; ENSG00000117148; CTA
VLLADQLQM

SEQ ID NO: 3957 - protein, 9 aa, Homo sapiens
  Table A; Target 3957; HLA-A*23:01; ACTL8; ENSG00000117148; CTA
VLLADQLQM

SEQ ID NO: 3958 - protein, 9 aa, Homo sapiens
  Table A; Target 3958; HLA-B*13:02; ACTL8; ENSG00000117148; CTA
VLLADQLQM

SEQ ID NO: 3959 - protein, 11 aa, Homo sapiens
  Table A; Target 3959; HLA-A*02:01; ACTL8; ENSG00000117148; CTA
VLLADQLQMSL

SEQ ID NO: 3960 - protein, 9 aa, Homo sapiens
  Table A; Target 3960; HLA-C*01:02; ACTL8; ENSG00000117148; CTA
VMACGGNTL

SEQ ID NO: 3961 - protein, 9 aa, Homo sapiens
  Table A; Target 3961; HLA-C*14:02; ACTL8; ENSG00000117148; CTA
VMACGGNTL

SEQ ID NO: 3962 - protein, 10 aa, Homo sapiens
  Table A; Target 3962; HLA-A*01:01; ACTL8; ENSG00000117148; CTA
VMACGGNTLY

SEQ ID NO: 3963 - protein, 10 aa, Homo sapiens
  Table A; Target 3963; HLA-A*29:02; ACTL8; ENSG00000117148; CTA
VMACGGNTLY

SEQ ID NO: 3964 - protein, 10 aa, Homo sapiens
  Table A; Target 3964; HLA-A*30:02; ACTL8; ENSG00000117148; CTA
VMACGGNTLY

SEQ ID NO: 3965 - protein, 10 aa, Homo sapiens
  Table A; Target 3965; HLA-B*15:01; ACTL8; ENSG00000117148; CTA
VMACGGNTLY

SEQ ID NO: 3966 - protein, 10 aa, Homo sapiens
  Table A; Target 3966; HLA-B*46:01; ACTL8; ENSG00000117148; CTA
VMACGGNTLY

SEQ ID NO: 3967 - protein, 10 aa, Homo sapiens
  Table A; Target 3967; HLA-C*07:01; ACTL8; ENSG00000117148; CTA
VMACGGNTLY

SEQ ID NO: 3968 - protein, 10 aa, Homo sapiens
  Table A; Target 3968; HLA-C*07:04; ACTL8; ENSG00000117148; CTA
VMACGGNTLY

SEQ ID NO: 3969 - protein, 9 aa, Homo sapiens
  Table A; Target 3969; HLA-B*51:01; ACTL8; ENSG00000117148; CTA
VPPVIITET

SEQ ID NO: 3970 - protein, 9 aa, Homo sapiens
  Table A; Target 3970; HLA-B*56:01; ACTL8; ENSG00000117148; CTA
VPPVIITET

SEQ ID NO: 3971 - protein, 8 aa, Homo sapiens
  Table A; Target 3971; HLA-B*56:01; ACTL8; ENSG00000117148; CTA
VPQNLGEA

SEQ ID NO: 3972 - protein, 9 aa, Homo sapiens
  Table A; Target 3972; HLA-B*07:02; ACTL8; ENSG00000117148; CTA
VPQNLGEAL

SEQ ID NO: 3973 - protein, 9 aa, Homo sapiens
  Table A; Target 3973; HLA-B*35:01; ACTL8; ENSG00000117148; CTA
VPQNLGEAL

SEQ ID NO: 3974 - protein, 9 aa, Homo sapiens
  Table A; Target 3974; HLA-B*35:03; ACTL8; ENSG00000117148; CTA
VPQNLGEAL

SEQ ID NO: 3975 - protein, 9 aa, Homo sapiens
  Table A; Target 3975; HLA-B*39:01; ACTL8; ENSG00000117148; CTA
VPQNLGEAL

SEQ ID NO: 3976 - protein, 9 aa, Homo sapiens
  Table A; Target 3976; HLA-B*56:01; ACTL8; ENSG00000117148; CTA
VPQNLGEAL

SEQ ID NO: 3977 - protein, 9 aa, Homo sapiens
  Table A; Target 3977; HLA-C*01:02; ACTL8; ENSG00000117148; CTA
VPQNLGEAL

SEQ ID NO: 3978 - protein, 9 aa, Homo sapiens
  Table A; Target 3978; HLA-C*03:03; ACTL8; ENSG00000117148; CTA
VPQNLGEAL

SEQ ID NO: 3979 - protein, 9 aa, Homo sapiens
  Table A; Target 3979; HLA-C*07:02; ACTL8; ENSG00000117148; CTA
VPQNLGEAL

SEQ ID NO: 3980 - protein, 9 aa, Homo sapiens
  Table A; Target 3980; HLA-C*14:02; ACTL8; ENSG00000117148; CTA
VPQNLGEAL

SEQ ID NO: 3981 - protein, 11 aa, Homo sapiens
  Table A; Target 3981; HLA-B*27:02; ACTL8; ENSG00000117148; CTA
VPQNLGEALDF

SEQ ID NO: 3982 - protein, 11 aa, Homo sapiens
  Table A; Target 3982; HLA-B*35:01; ACTL8; ENSG00000117148; CTA
VPQNLGEALDF

SEQ ID NO: 3983 - protein, 10 aa, Homo sapiens
  Table A; Target 3983; HLA-B*35:03; ACTL8; ENSG00000117148; CTA
VPSVLLADQL

SEQ ID NO: 3984 - protein, 10 aa, Homo sapiens
  Table A; Target 3984; HLA-A*03:01; ACTL8; ENSG00000117148; CTA
VQPFHQGRPL

SEQ ID NO: 3985 - protein, 8 aa, Homo sapiens
  Table A; Target 3985; HLA-C*16:01; ACTL8; ENSG00000117148; CTA
VSSTKATV

SEQ ID NO: 3986 - protein, 9 aa, Homo sapiens
  Table A; Target 3986; HLA-A*25:01; ACTL8; ENSG00000117148; CTA
VSSTKATVW

SEQ ID NO: 3987 - protein, 9 aa, Homo sapiens
  Table A; Target 3987; HLA-A*32:01; ACTL8; ENSG00000117148; CTA
VSSTKATVW

SEQ ID NO: 3988 - protein, 9 aa, Homo sapiens
  Table A; Target 3988; HLA-B*57:01; ACTL8; ENSG00000117148; CTA
VSSTKATVW

SEQ ID NO: 3989 - protein, 9 aa, Homo sapiens
  Table A; Target 3989; HLA-C*12:03; ACTL8; ENSG00000117148; CTA
VSSTKATVW

SEQ ID NO: 3990 - protein, 9 aa, Homo sapiens
  Table A; Target 3990; HLA-C*16:01; ACTL8; ENSG00000117148; CTA
VSSTKATVW

SEQ ID NO: 3991 - protein, 9 aa, Homo sapiens
  Table A; Target 3991; HLA-C*16:02; ACTL8; ENSG00000117148; CTA
VSSTKATVW

SEQ ID NO: 3992 - protein, 9 aa, Homo sapiens
  Table A; Target 3992; HLA-C*16:04; ACTL8; ENSG00000117148; CTA
VSSTKATVW

SEQ ID NO: 3993 - protein, 8 aa, Homo sapiens
  Table A; Target 3993; HLA-A*25:01; ACTL8; ENSG00000117148; CTA
VVAHLSTY

SEQ ID NO: 3994 - protein, 8 aa, Homo sapiens
  Table A; Target 3994; HLA-A*30:02; ACTL8; ENSG00000117148; CTA
VVAHLSTY

SEQ ID NO: 3995 - protein, 8 aa, Homo sapiens
  Table A; Target 3995; HLA-A*32:01; ACTL8; ENSG00000117148; CTA
VVAHLSTY

SEQ ID NO: 3996 - protein, 8 aa, Homo sapiens
  Table A; Target 3996; HLA-B*15:01; ACTL8; ENSG00000117148; CTA
VVAHLSTY

SEQ ID NO: 3997 - protein, 8 aa, Homo sapiens
  Table A; Target 3997; HLA-B*15:03; ACTL8; ENSG00000117148; CTA
VVAHLSTY

SEQ ID NO: 3998 - protein, 8 aa, Homo sapiens
  Table A; Target 3998; HLA-B*39:01; ACTL8; ENSG00000117148; CTA
VVAHLSTY

SEQ ID NO: 3999 - protein, 8 aa, Homo sapiens
  Table A; Target 3999; HLA-B*46:01; ACTL8; ENSG00000117148; CTA
VVAHLSTY

SEQ ID NO: 4000 - protein, 8 aa, Homo sapiens
  Table A; Target 4000; HLA-B*58:01; ACTL8; ENSG00000117148; CTA
VVAHLSTY

SEQ ID NO: 4001 - protein, 8 aa, Homo sapiens
  Table A; Target 4001; HLA-C*01:02; ACTL8; ENSG00000117148; CTA
VVAHLSTY

SEQ ID NO: 4002 - protein, 8 aa, Homo sapiens
  Table A; Target 4002; HLA-C*02:02; ACTL8; ENSG00000117148; CTA
VVAHLSTY

SEQ ID NO: 4003 - protein, 8 aa, Homo sapiens
  Table A; Target 4003; HLA-C*07:01; ACTL8; ENSG00000117148; CTA
VVAHLSTY

SEQ ID NO: 4004 - protein, 8 aa, Homo sapiens
  Table A; Target 4004; HLA-C*07:04; ACTL8; ENSG00000117148; CTA
VVAHLSTY

SEQ ID NO: 4005 - protein, 8 aa, Homo sapiens
  Table A; Target 4005; HLA-C*12:03; ACTL8; ENSG00000117148; CTA
VVAHLSTY

SEQ ID NO: 4006 - protein, 8 aa, Homo sapiens
  Table A; Target 4006; HLA-C*14:02; ACTL8; ENSG00000117148; CTA
VVAHLSTY

SEQ ID NO: 4007 - protein, 8 aa, Homo sapiens
  Table A; Target 4007; HLA-C*16:01; ACTL8; ENSG00000117148; CTA
VVAHLSTY

SEQ ID NO: 4008 - protein, 8 aa, Homo sapiens
  Table A; Target 4008; HLA-C*16:02; ACTL8; ENSG00000117148; CTA
VVAHLSTY

SEQ ID NO: 4009 - protein, 8 aa, Homo sapiens
  Table A; Target 4009; HLA-A*02:07; ACTL8; ENSG00000117148; CTA
VVDSGYGL

SEQ ID NO: 4010 - protein, 8 aa, Homo sapiens
  Table A; Target 4010; HLA-B*38:01; ACTL8; ENSG00000117148; CTA
VVDSGYGL

SEQ ID NO: 4011 - protein, 8 aa, Homo sapiens
  Table A; Target 4011; HLA-B*39:01; ACTL8; ENSG00000117148; CTA
VVDSGYGL

SEQ ID NO: 4012 - protein, 8 aa, Homo sapiens
  Table A; Target 4012; HLA-C*01:02; ACTL8; ENSG00000117148; CTA
VVDSGYGL

SEQ ID NO: 4013 - protein, 8 aa, Homo sapiens
  Table A; Target 4013; HLA-C*03:04; ACTL8; ENSG00000117148; CTA
VVDSGYGL

SEQ ID NO: 4014 - protein, 8 aa, Homo sapiens
  Table A; Target 4014; HLA-C*04:01; ACTL8; ENSG00000117148; CTA
VVDSGYGL

SEQ ID NO: 4015 - protein, 8 aa, Homo sapiens
  Table A; Target 4015; HLA-C*05:01; ACTL8; ENSG00000117148; CTA
VVDSGYGL

SEQ ID NO: 4016 - protein, 8 aa, Homo sapiens
  Table A; Target 4016; HLA-C*07:04; ACTL8; ENSG00000117148; CTA
VVDSGYGL

SEQ ID NO: 4017 - protein, 9 aa, Homo sapiens
  Table A; Target 4017; HLA-A*01:01; ACTL8; ENSG00000117148; CTA
VVDSGYGLT

SEQ ID NO: 4018 - protein, 9 aa, Homo sapiens
  Table A; Target 4018; HLA-C*05:01; ACTL8; ENSG00000117148; CTA
VVDSGYGLT

SEQ ID NO: 4019 - protein, 10 aa, Homo sapiens
  Table A; Target 4019; HLA-A*01:01; ACTL8; ENSG00000117148; CTA
VVDSGYGLTR

SEQ ID NO: 4020 - protein, 10 aa, Homo sapiens
  Table A; Target 4020; HLA-A*03:01; ACTL8; ENSG00000117148; CTA
VVDSGYGLTR

SEQ ID NO: 4021 - protein, 10 aa, Homo sapiens
  Table A; Target 4021; HLA-A*03:02; ACTL8; ENSG00000117148; CTA
VVDSGYGLTR

SEQ ID NO: 4022 - protein, 10 aa, Homo sapiens
  Table A; Target 4022; HLA-A*11:01; ACTL8; ENSG00000117148; CTA
VVDSGYGLTR

SEQ ID NO: 4023 - protein, 10 aa, Homo sapiens
  Table A; Target 4023; HLA-A*68:01; ACTL8; ENSG00000117148; CTA
VVDSGYGLTR

SEQ ID NO: 4024 - protein, 10 aa, Homo sapiens
  Table A; Target 4024; HLA-C*07:06; ACTL8; ENSG00000117148; CTA
VVDSGYGLTR

SEQ ID NO: 4025 - protein, 11 aa, Homo sapiens
  Table A; Target 4025; HLA-A*01:01; ACTL8; ENSG00000117148; CTA
VVDSGYGLTRV

SEQ ID NO: 4026 - protein, 11 aa, Homo sapiens
  Table A; Target 4026; HLA-A*02:01; ACTL8; ENSG00000117148; CTA
VVDSGYGLTRV

SEQ ID NO: 4027 - protein, 11 aa, Homo sapiens
  Table A; Target 4027; HLA-A*02:07; ACTL8; ENSG00000117148; CTA
VVDSGYGLTRV

SEQ ID NO: 4028 - protein, 11 aa, Homo sapiens
  Table A; Target 4028; HLA-C*05:01; ACTL8; ENSG00000117148; CTA
VVDSGYGLTRV

SEQ ID NO: 4029 - protein, 8 aa, Homo sapiens
  Table A; Target 4029; HLA-B*39:01; ACTL8; ENSG00000117148; CTA
VVVDSGYG

SEQ ID NO: 4030 - protein, 9 aa, Homo sapiens
  Table A; Target 4030; HLA-A*02:01; ACTL8; ENSG00000117148; CTA
VVVDSGYGL

SEQ ID NO: 4031 - protein, 9 aa, Homo sapiens
  Table A; Target 4031; HLA-A*02:04; ACTL8; ENSG00000117148; CTA
VVVDSGYGL

SEQ ID NO: 4032 - protein, 9 aa, Homo sapiens
  Table A; Target 4032; HLA-A*02:07; ACTL8; ENSG00000117148; CTA
VVVDSGYGL

SEQ ID NO: 4033 - protein, 9 aa, Homo sapiens
  Table A; Target 4033; HLA-A*23:01; ACTL8; ENSG00000117148; CTA
VVVDSGYGL

SEQ ID NO: 4034 - protein, 9 aa, Homo sapiens
  Table A; Target 4034; HLA-A*25:01; ACTL8; ENSG00000117148; CTA
VVVDSGYGL

SEQ ID NO: 4035 - protein, 9 aa, Homo sapiens
  Table A; Target 4035; HLA-A*26:01; ACTL8; ENSG00000117148; CTA
VVVDSGYGL

SEQ ID NO: 4036 - protein, 9 aa, Homo sapiens
  Table A; Target 4036; HLA-A*30:01; ACTL8; ENSG00000117148; CTA
VVVDSGYGL

SEQ ID NO: 4037 - protein, 9 aa, Homo sapiens
  Table A; Target 4037; HLA-A*32:01; ACTL8; ENSG00000117148; CTA
VVVDSGYGL

SEQ ID NO: 4038 - protein, 9 aa, Homo sapiens
  Table A; Target 4038; HLA-A*68:02; ACTL8; ENSG00000117148; CTA
VVVDSGYGL

SEQ ID NO: 4039 - protein, 9 aa, Homo sapiens
  Table A; Target 4039; HLA-B*13:02; ACTL8; ENSG00000117148; CTA
VVVDSGYGL

SEQ ID NO: 4040 - protein, 9 aa, Homo sapiens
  Table A; Target 4040; HLA-B*15:01; ACTL8; ENSG00000117148; CTA
VVVDSGYGL

SEQ ID NO: 4041 - protein, 9 aa, Homo sapiens
  Table A; Target 4041; HLA-B*15:03; ACTL8; ENSG00000117148; CTA
VVVDSGYGL

SEQ ID NO: 4042 - protein, 9 aa, Homo sapiens
  Table A; Target 4042; HLA-B*27:05; ACTL8; ENSG00000117148; CTA
VVVDSGYGL

SEQ ID NO: 4043 - protein, 9 aa, Homo sapiens
  Table A; Target 4043; HLA-B*35:03; ACTL8; ENSG00000117148; CTA
VVVDSGYGL

SEQ ID NO: 4044 - protein, 9 aa, Homo sapiens
  Table A; Target 4044; HLA-B*38:01; ACTL8; ENSG00000117148; CTA
VVVDSGYGL

SEQ ID NO: 4045 - protein, 9 aa, Homo sapiens
  Table A; Target 4045; HLA-B*39:01; ACTL8; ENSG00000117148; CTA
VVVDSGYGL

SEQ ID NO: 4046 - protein, 9 aa, Homo sapiens
  Table A; Target 4046; HLA-B*40:01; ACTL8; ENSG00000117148; CTA
VVVDSGYGL

SEQ ID NO: 4047 - protein, 9 aa, Homo sapiens
  Table A; Target 4047; HLA-B*46:01; ACTL8; ENSG00000117148; CTA
VVVDSGYGL

SEQ ID NO: 4048 - protein, 9 aa, Homo sapiens
  Table A; Target 4048; HLA-B*55:01; ACTL8; ENSG00000117148; CTA
VVVDSGYGL

SEQ ID NO: 4049 - protein, 9 aa, Homo sapiens
  Table A; Target 4049; HLA-B*58:01; ACTL8; ENSG00000117148; CTA
VVVDSGYGL

SEQ ID NO: 4050 - protein, 9 aa, Homo sapiens
  Table A; Target 4050; HLA-C*01:02; ACTL8; ENSG00000117148; CTA
VVVDSGYGL

SEQ ID NO: 4051 - protein, 9 aa, Homo sapiens
  Table A; Target 4051; HLA-C*02:02; ACTL8; ENSG00000117148; CTA
VVVDSGYGL

SEQ ID NO: 4052 - protein, 9 aa, Homo sapiens
  Table A; Target 4052; HLA-C*03:03; ACTL8; ENSG00000117148; CTA
VVVDSGYGL

SEQ ID NO: 4053 - protein, 9 aa, Homo sapiens
  Table A; Target 4053; HLA-C*03:04; ACTL8; ENSG00000117148; CTA
VVVDSGYGL

SEQ ID NO: 4054 - protein, 9 aa, Homo sapiens
  Table A; Target 4054; HLA-C*05:01; ACTL8; ENSG00000117148; CTA
VVVDSGYGL

SEQ ID NO: 4055 - protein, 9 aa, Homo sapiens
  Table A; Target 4055; HLA-C*07:04; ACTL8; ENSG00000117148; CTA
VVVDSGYGL

SEQ ID NO: 4056 - protein, 9 aa, Homo sapiens
  Table A; Target 4056; HLA-C*14:02; ACTL8; ENSG00000117148; CTA
VVVDSGYGL

SEQ ID NO: 4057 - protein, 9 aa, Homo sapiens
  Table A; Target 4057; HLA-C*16:04; ACTL8; ENSG00000117148; CTA
VVVDSGYGL

SEQ ID NO: 4058 - protein, 11 aa, Homo sapiens
  Table A; Target 4058; HLA-A*03:01; ACTL8; ENSG00000117148; CTA
VVVDSGYGLTR

SEQ ID NO: 4059 - protein, 11 aa, Homo sapiens
  Table A; Target 4059; HLA-A*03:02; ACTL8; ENSG00000117148; CTA
VVVDSGYGLTR

SEQ ID NO: 4060 - protein, 11 aa, Homo sapiens
  Table A; Target 4060; HLA-A*11:01; ACTL8; ENSG00000117148; CTA
VVVDSGYGLTR

SEQ ID NO: 4061 - protein, 11 aa, Homo sapiens
  Table A; Target 4061; HLA-A*31:01; ACTL8; ENSG00000117148; CTA
VVVDSGYGLTR

SEQ ID NO: 4062 - protein, 11 aa, Homo sapiens
  Table A; Target 4062; HLA-A*33:01; ACTL8; ENSG00000117148; CTA
VVVDSGYGLTR

SEQ ID NO: 4063 - protein, 11 aa, Homo sapiens
  Table A; Target 4063; HLA-A*33:03; ACTL8; ENSG00000117148; CTA
VVVDSGYGLTR

SEQ ID NO: 4064 - protein, 11 aa, Homo sapiens
  Table A; Target 4064; HLA-A*68:01; ACTL8; ENSG00000117148; CTA
VVVDSGYGLTR

SEQ ID NO: 4065 - protein, 11 aa, Homo sapiens
  Table A; Target 4065; HLA-B*27:02; ACTL8; ENSG00000117148; CTA
VVVDSGYGLTR

SEQ ID NO: 4066 - protein, 11 aa, Homo sapiens
  Table A; Target 4066; HLA-C*07:06; ACTL8; ENSG00000117148; CTA
VVVDSGYGLTR

SEQ ID NO: 4067 - protein, 11 aa, Homo sapiens
  Table A; Target 4067; HLA-A*23:01; ACTL8; ENSG00000117148; CTA
VWLGASVVAHL

SEQ ID NO: 4068 - protein, 8 aa, Homo sapiens
  Table A; Target 4068; HLA-B*08:01; ACTL8; ENSG00000117148; CTA
YARRRVSL

SEQ ID NO: 4069 - protein, 9 aa, Homo sapiens
  Table A; Target 4069; HLA-A*02:01; ACTL8; ENSG00000117148; CTA
YASGLLTGV

SEQ ID NO: 4070 - protein, 9 aa, Homo sapiens
  Table A; Target 4070; HLA-A*02:03; ACTL8; ENSG00000117148; CTA
YASGLLTGV

SEQ ID NO: 4071 - protein, 9 aa, Homo sapiens
  Table A; Target 4071; HLA-A*02:04; ACTL8; ENSG00000117148; CTA
YASGLLTGV

SEQ ID NO: 4072 - protein, 9 aa, Homo sapiens
  Table A; Target 4072; HLA-A*02:07; ACTL8; ENSG00000117148; CTA
YASGLLTGV

SEQ ID NO: 4073 - protein, 9 aa, Homo sapiens
  Table A; Target 4073; HLA-A*26:01; ACTL8; ENSG00000117148; CTA
YASGLLTGV

SEQ ID NO: 4074 - protein, 9 aa, Homo sapiens
  Table A; Target 4074; HLA-A*30:01; ACTL8; ENSG00000117148; CTA
YASGLLTGV

SEQ ID NO: 4075 - protein, 9 aa, Homo sapiens
  Table A; Target 4075; HLA-A*32:01; ACTL8; ENSG00000117148; CTA
YASGLLTGV

SEQ ID NO: 4076 - protein, 9 aa, Homo sapiens
  Table A; Target 4076; HLA-A*68:02; ACTL8; ENSG00000117148; CTA
YASGLLTGV

SEQ ID NO: 4077 - protein, 9 aa, Homo sapiens
  Table A; Target 4077; HLA-B*13:02; ACTL8; ENSG00000117148; CTA
YASGLLTGV

SEQ ID NO: 4078 - protein, 9 aa, Homo sapiens
  Table A; Target 4078; HLA-B*27:05; ACTL8; ENSG00000117148; CTA
YASGLLTGV

SEQ ID NO: 4079 - protein, 9 aa, Homo sapiens
  Table A; Target 4079; HLA-B*39:01; ACTL8; ENSG00000117148; CTA
YASGLLTGV

SEQ ID NO: 4080 - protein, 9 aa, Homo sapiens
  Table A; Target 4080; HLA-B*40:02; ACTL8; ENSG00000117148; CTA
YASGLLTGV

SEQ ID NO: 4081 - protein, 9 aa, Homo sapiens
  Table A; Target 4081; HLA-B*46:01; ACTL8; ENSG00000117148; CTA
YASGLLTGV

SEQ ID NO: 4082 - protein, 9 aa, Homo sapiens
  Table A; Target 4082; HLA-B*49:01; ACTL8; ENSG00000117148; CTA
YASGLLTGV

SEQ ID NO: 4083 - protein, 9 aa, Homo sapiens
  Table A; Target 4083; HLA-B*51:01; ACTL8; ENSG00000117148; CTA
YASGLLTGV

SEQ ID NO: 4084 - protein, 9 aa, Homo sapiens
  Table A; Target 4084; HLA-B*54:01; ACTL8; ENSG00000117148; CTA
YASGLLTGV

SEQ ID NO: 4085 - protein, 9 aa, Homo sapiens
  Table A; Target 4085; HLA-B*55:01; ACTL8; ENSG00000117148; CTA
YASGLLTGV

SEQ ID NO: 4086 - protein, 9 aa, Homo sapiens
  Table A; Target 4086; HLA-B*56:01; ACTL8; ENSG00000117148; CTA
YASGLLTGV

SEQ ID NO: 4087 - protein, 9 aa, Homo sapiens
  Table A; Target 4087; HLA-C*01:02; ACTL8; ENSG00000117148; CTA
YASGLLTGV

SEQ ID NO: 4088 - protein, 9 aa, Homo sapiens
  Table A; Target 4088; HLA-C*02:02; ACTL8; ENSG00000117148; CTA
YASGLLTGV

SEQ ID NO: 4089 - protein, 9 aa, Homo sapiens
  Table A; Target 4089; HLA-C*03:03; ACTL8; ENSG00000117148; CTA
YASGLLTGV

SEQ ID NO: 4090 - protein, 9 aa, Homo sapiens
  Table A; Target 4090; HLA-C*03:04; ACTL8; ENSG00000117148; CTA
YASGLLTGV

SEQ ID NO: 4091 - protein, 9 aa, Homo sapiens
  Table A; Target 4091; HLA-C*04:01; ACTL8; ENSG00000117148; CTA
YASGLLTGV

SEQ ID NO: 4092 - protein, 9 aa, Homo sapiens
  Table A; Target 4092; HLA-C*06:02; ACTL8; ENSG00000117148; CTA
YASGLLTGV

SEQ ID NO: 4093 - protein, 9 aa, Homo sapiens
  Table A; Target 4093; HLA-C*12:03; ACTL8; ENSG00000117148; CTA
YASGLLTGV

SEQ ID NO: 4094 - protein, 9 aa, Homo sapiens
  Table A; Target 4094; HLA-C*16:02; ACTL8; ENSG00000117148; CTA
YASGLLTGV

SEQ ID NO: 4095 - protein, 9 aa, Homo sapiens
  Table A; Target 4095; HLA-C*16:04; ACTL8; ENSG00000117148; CTA
YASGLLTGV

SEQ ID NO: 4096 - protein, 10 aa, Homo sapiens
  Table A; Target 4096; HLA-C*12:03; ACTL8; ENSG00000117148; CTA
YASGLLTGVV

SEQ ID NO: 4097 - protein, 11 aa, Homo sapiens
  Table A; Target 4097; HLA-A*68:02; ACTL8; ENSG00000117148; CTA
YASGLLTGVVV

SEQ ID NO: 4098 - protein, 11 aa, Homo sapiens
  Table A; Target 4098; HLA-B*35:03; ACTL8; ENSG00000117148; CTA
YASGLLTGVVV

SEQ ID NO: 4099 - protein, 11 aa, Homo sapiens
  Table A; Target 4099; HLA-B*39:01; ACTL8; ENSG00000117148; CTA
YASGLLTGVVV

SEQ ID NO: 4100 - protein, 11 aa, Homo sapiens
  Table A; Target 4100; HLA-B*54:01; ACTL8; ENSG00000117148; CTA
YASGLLTGVVV

SEQ ID NO: 4101 - protein, 11 aa, Homo sapiens
  Table A; Target 4101; HLA-C*02:02; ACTL8; ENSG00000117148; CTA
YASGLLTGVVV

SEQ ID NO: 4102 - protein, 11 aa, Homo sapiens
  Table A; Target 4102; HLA-C*12:03; ACTL8; ENSG00000117148; CTA
YASGLLTGVVV

SEQ ID NO: 4103 - protein, 9 aa, Homo sapiens
  Table A; Target 4103; HLA-A*02:04; ACTL8; ENSG00000117148; CTA
YGLTRVQPF

SEQ ID NO: 4104 - protein, 9 aa, Homo sapiens
  Table A; Target 4104; HLA-A*23:01; ACTL8; ENSG00000117148; CTA
YGLTRVQPF

SEQ ID NO: 4105 - protein, 9 aa, Homo sapiens
  Table A; Target 4105; HLA-A*24:02; ACTL8; ENSG00000117148; CTA
YGLTRVQPF

SEQ ID NO: 4106 - protein, 9 aa, Homo sapiens
  Table A; Target 4106; HLA-A*31:01; ACTL8; ENSG00000117148; CTA
YGLTRVQPF

SEQ ID NO: 4107 - protein, 9 aa, Homo sapiens
  Table A; Target 4107; HLA-A*33:01; ACTL8; ENSG00000117148; CTA
YGLTRVQPF

SEQ ID NO: 4108 - protein, 9 aa, Homo sapiens
  Table A; Target 4108; HLA-B*07:02; ACTL8; ENSG00000117148; CTA
YGLTRVQPF

SEQ ID NO: 4109 - protein, 9 aa, Homo sapiens
  Table A; Target 4109; HLA-B*08:01; ACTL8; ENSG00000117148; CTA
YGLTRVQPF

SEQ ID NO: 4110 - protein, 9 aa, Homo sapiens
  Table A; Target 4110; HLA-B*37:01; ACTL8; ENSG00000117148; CTA
YGLTRVQPF

SEQ ID NO: 4111 - protein, 9 aa, Homo sapiens
  Table A; Target 4111; HLA-B*40:02; ACTL8; ENSG00000117148; CTA
YGLTRVQPF

SEQ ID NO: 4112 - protein, 9 aa, Homo sapiens
  Table A; Target 4112; HLA-B*46:01; ACTL8; ENSG00000117148; CTA
YGLTRVQPF

SEQ ID NO: 4113 - protein, 9 aa, Homo sapiens
  Table A; Target 4113; HLA-B*57:01; ACTL8; ENSG00000117148; CTA
YGLTRVQPF

SEQ ID NO: 4114 - protein, 9 aa, Homo sapiens
  Table A; Target 4114; HLA-C*01:02; ACTL8; ENSG00000117148; CTA
YGLTRVQPF

SEQ ID NO: 4115 - protein, 9 aa, Homo sapiens
  Table A; Target 4115; HLA-C*02:02; ACTL8; ENSG00000117148; CTA
YGLTRVQPF

SEQ ID NO: 4116 - protein, 9 aa, Homo sapiens
  Table A; Target 4116; HLA-C*03:03; ACTL8; ENSG00000117148; CTA
YGLTRVQPF

SEQ ID NO: 4117 - protein, 9 aa, Homo sapiens
  Table A; Target 4117; HLA-C*03:04; ACTL8; ENSG00000117148; CTA
YGLTRVQPF

SEQ ID NO: 4118 - protein, 9 aa, Homo sapiens
  Table A; Target 4118; HLA-C*07:01; ACTL8; ENSG00000117148; CTA
YGLTRVQPF

SEQ ID NO: 4119 - protein, 9 aa, Homo sapiens
  Table A; Target 4119; HLA-C*07:02; ACTL8; ENSG00000117148; CTA
YGLTRVQPF

SEQ ID NO: 4120 - protein, 9 aa, Homo sapiens
  Table A; Target 4120; HLA-C*07:04; ACTL8; ENSG00000117148; CTA
YGLTRVQPF

SEQ ID NO: 4121 - protein, 9 aa, Homo sapiens
  Table A; Target 4121; HLA-C*12:03; ACTL8; ENSG00000117148; CTA
YGLTRVQPF

SEQ ID NO: 4122 - protein, 9 aa, Homo sapiens
  Table A; Target 4122; HLA-C*14:02; ACTL8; ENSG00000117148; CTA
YGLTRVQPF

SEQ ID NO: 4123 - protein, 9 aa, Homo sapiens
  Table A; Target 4123; HLA-C*16:01; ACTL8; ENSG00000117148; CTA
YGLTRVQPF

SEQ ID NO: 4124 - protein, 9 aa, Homo sapiens
  Table A; Target 4124; HLA-A*02:07; ACTL8; ENSG00000117148; CTA
YLWSFVLEN

SEQ ID NO: 4125 - protein, 8 aa, Homo sapiens
  Table A; Target 4125; HLA-B*51:01; ACTL8; ENSG00000117148; CTA
YPIERGRI

SEQ ID NO: 4126 - protein, 9 aa, Homo sapiens
  Table A; Target 4126; HLA-B*07:02; ACTL8; ENSG00000117148; CTA
YPIERGRIL

SEQ ID NO: 4127 - protein, 9 aa, Homo sapiens
  Table A; Target 4127; HLA-B*08:01; ACTL8; ENSG00000117148; CTA
YPIERGRIL

SEQ ID NO: 4128 - protein, 9 aa, Homo sapiens
  Table A; Target 4128; HLA-B*35:01; ACTL8; ENSG00000117148; CTA
YPIERGRIL

SEQ ID NO: 4129 - protein, 9 aa, Homo sapiens
  Table A; Target 4129; HLA-B*35:03; ACTL8; ENSG00000117148; CTA
YPIERGRIL

SEQ ID NO: 4130 - protein, 9 aa, Homo sapiens
  Table A; Target 4130; HLA-B*51:01; ACTL8; ENSG00000117148; CTA
YPIERGRIL

SEQ ID NO: 4131 - protein, 9 aa, Homo sapiens
  Table A; Target 4131; HLA-B*54:01; ACTL8; ENSG00000117148; CTA
YPIERGRIL

SEQ ID NO: 4132 - protein, 9 aa, Homo sapiens
  Table A; Target 4132; HLA-C*03:03; ACTL8; ENSG00000117148; CTA
YPIERGRIL

SEQ ID NO: 4133 - protein, 9 aa, Homo sapiens
  Table A; Target 4133; HLA-C*03:04; ACTL8; ENSG00000117148; CTA
YPIERGRIL

SEQ ID NO: 4134 - protein, 9 aa, Homo sapiens
  Table A; Target 4134; HLA-C*07:02; ACTL8; ENSG00000117148; CTA
YPIERGRIL

SEQ ID NO: 4135 - protein, 9 aa, Homo sapiens
  Table A; Target 4135; HLA-A*02:01; ACTL8; ENSG00000117148; CTA
YQLPDGSRV

SEQ ID NO: 4136 - protein, 9 aa, Homo sapiens
  Table A; Target 4136; HLA-A*02:04; ACTL8; ENSG00000117148; CTA
YQLPDGSRV

SEQ ID NO: 4137 - protein, 9 aa, Homo sapiens
  Table A; Target 4137; HLA-B*13:02; ACTL8; ENSG00000117148; CTA
YQLPDGSRV

SEQ ID NO: 4138 - protein, 9 aa, Homo sapiens
  Table A; Target 4138; HLA-B*27:05; ACTL8; ENSG00000117148; CTA
YQLPDGSRV

SEQ ID NO: 4139 - protein, 9 aa, Homo sapiens
  Table A; Target 4139; HLA-B*37:01; ACTL8; ENSG00000117148; CTA
YQLPDGSRV

SEQ ID NO: 4140 - protein, 9 aa, Homo sapiens
  Table A; Target 4140; HLA-B*38:01; ACTL8; ENSG00000117148; CTA
YQLPDGSRV

SEQ ID NO: 4141 - protein, 9 aa, Homo sapiens
  Table A; Target 4141; HLA-B*39:01; ACTL8; ENSG00000117148; CTA
YQLPDGSRV

SEQ ID NO: 4142 - protein, 9 aa, Homo sapiens
  Table A; Target 4142; HLA-B*49:01; ACTL8; ENSG00000117148; CTA
YQLPDGSRV

SEQ ID NO: 4143 - protein, 11 aa, Homo sapiens
  Table A; Target 4143; HLA-A*02:01; ACTL8; ENSG00000117148; CTA
YQLPDGSRVEL

SEQ ID NO: 4144 - protein, 11 aa, Homo sapiens
  Table A; Target 4144; HLA-A*02:04; ACTL8; ENSG00000117148; CTA
YQLPDGSRVEL

SEQ ID NO: 4145 - protein, 11 aa, Homo sapiens
  Table A; Target 4145; HLA-A*24:02; ACTL8; ENSG00000117148; CTA
YQLPDGSRVEL

SEQ ID NO: 4146 - protein, 11 aa, Homo sapiens
  Table A; Target 4146; HLA-A*30:01; ACTL8; ENSG00000117148; CTA
YQLPDGSRVEL

SEQ ID NO: 4147 - protein, 11 aa, Homo sapiens
  Table A; Target 4147; HLA-B*15:01; ACTL8; ENSG00000117148; CTA
YQLPDGSRVEL

SEQ ID NO: 4148 - protein, 11 aa, Homo sapiens
  Table A; Target 4148; HLA-B*38:01; ACTL8; ENSG00000117148; CTA
YQLPDGSRVEL

SEQ ID NO: 4149 - protein, 11 aa, Homo sapiens
  Table A; Target 4149; HLA-B*39:01; ACTL8; ENSG00000117148; CTA
YQLPDGSRVEL

SEQ ID NO: 4150 - protein, 11 aa, Homo sapiens
  Table A; Target 4150; HLA-B*15:01; ACTL8; ENSG00000117148; CTA
YQSEWMSREEY

SEQ ID NO: 4151 - protein, 9 aa, Homo sapiens
  Table A; Target 4151; HLA-A*02:07; ACTL8; ENSG00000117148; CTA
YVPQNLGEA

SEQ ID NO: 4152 - protein, 9 aa, Homo sapiens
  Table A; Target 4152; HLA-A*26:01; ACTL8; ENSG00000117148; CTA
YVPQNLGEA

SEQ ID NO: 4153 - protein, 10 aa, Homo sapiens
  Table A; Target 4153; HLA-A*02:07; ACTL8; ENSG00000117148; CTA
YVPQNLGEAL

SEQ ID NO: 4154 - protein, 10 aa, Homo sapiens
  Table A; Target 4154; HLA-A*25:01; ACTL8; ENSG00000117148; CTA
YVPQNLGEAL

SEQ ID NO: 4155 - protein, 10 aa, Homo sapiens
  Table A; Target 4155; HLA-C*01:02; ACTL8; ENSG00000117148; CTA
YVPQNLGEAL

SEQ ID NO: 4156 - protein, 10 aa, Homo sapiens
  Table A; Target 4156; HLA-C*07:04; ACTL8; ENSG00000117148; CTA
YVPQNLGEAL

SEQ ID NO: 4157 - protein, 10 aa, Homo sapiens
  Table A; Target 4157; HLA-C*14:02; ACTL8; ENSG00000117148; CTA
YVPQNLGEAL

SEQ ID NO: 4158 - protein, 9 aa, Homo sapiens
  Table A; Target 4158; HLA-B*37:01; ADAM2; ENSG00000104755; CTA
ADNLQCGKL

SEQ ID NO: 4159 - protein, 9 aa, Homo sapiens
  Table A; Target 4159; HLA-A*11:01; ADAM2; ENSG00000104755; CTA
ADVSLYNEK

SEQ ID NO: 4160 - protein, 9 aa, Homo sapiens
  Table A; Target 4160; HLA-B*27:02; ADAM2; ENSG00000104755; CTA
ADVSLYNEK

SEQ ID NO: 4161 - protein, 9 aa, Homo sapiens
  Table A; Target 4161; HLA-A*03:02; ADAM2; ENSG00000104755; CTA
AGGVVLHPR

SEQ ID NO: 4162 - protein, 9 aa, Homo sapiens
  Table A; Target 4162; HLA-A*11:01; ADAM2; ENSG00000104755; CTA
AGGVVLHPR

SEQ ID NO: 4163 - protein, 9 aa, Homo sapiens
  Table A; Target 4163; HLA-A*31:01; ADAM2; ENSG00000104755; CTA
AGGVVLHPR

SEQ ID NO: 4164 - protein, 9 aa, Homo sapiens
  Table A; Target 4164; HLA-A*33:01; ADAM2; ENSG00000104755; CTA
AGGVVLHPR

SEQ ID NO: 4165 - protein, 9 aa, Homo sapiens
  Table A; Target 4165; HLA-A*33:03; ADAM2; ENSG00000104755; CTA
AGGVVLHPR

SEQ ID NO: 4166 - protein, 9 aa, Homo sapiens
  Table A; Target 4166; HLA-A*68:01; ADAM2; ENSG00000104755; CTA
AGGVVLHPR

SEQ ID NO: 4167 - protein, 9 aa, Homo sapiens
  Table A; Target 4167; HLA-C*04:01; ADAM2; ENSG00000104755; CTA
AGGVVLHPR

SEQ ID NO: 4168 - protein, 9 aa, Homo sapiens
  Table A; Target 4168; HLA-C*06:02; ADAM2; ENSG00000104755; CTA
AGGVVLHPR

SEQ ID NO: 4169 - protein, 9 aa, Homo sapiens
  Table A; Target 4169; HLA-C*07:06; ADAM2; ENSG00000104755; CTA
AGGVVLHPR

SEQ ID NO: 4170 - protein, 8 aa, Homo sapiens
  Table A; Target 4170; HLA-B*13:02; ADAM2; ENSG00000104755; CTA
AIFVSFNI

SEQ ID NO: 4171 - protein, 8 aa, Homo sapiens
  Table A; Target 4171; HLA-B*08:01; ADAM2; ENSG00000104755; CTA
AIMVKVNF

SEQ ID NO: 4172 - protein, 8 aa, Homo sapiens
  Table A; Target 4172; HLA-B*37:01; ADAM2; ENSG00000104755; CTA
AIMVKVNF

SEQ ID NO: 4173 - protein, 10 aa, Homo sapiens
  Table A; Target 4173; HLA-A*31:01; ADAM2; ENSG00000104755; CTA
AIMVKVNFQR

SEQ ID NO: 4174 - protein, 9 aa, Homo sapiens
  Table A; Target 4174; HLA-B*15:03; ADAM2; ENSG00000104755; CTA
AKYIEMHVI

SEQ ID NO: 4175 - protein, 8 aa, Homo sapiens
  Table A; Target 4175; HLA-B*37:01; ADAM2; ENSG00000104755; CTA
ANELLHTF

SEQ ID NO: 4176 - protein, 9 aa, Homo sapiens
  Table A; Target 4176; HLA-A*23:01; ADAM2; ENSG00000104755; CTA
ANYAGGVVL

SEQ ID NO: 4177 - protein, 9 aa, Homo sapiens
  Table A; Target 4177; HLA-A*30:01; ADAM2; ENSG00000104755; CTA
ANYAGGVVL

SEQ ID NO: 4178 - protein, 9 aa, Homo sapiens
  Table A; Target 4178; HLA-A*32:01; ADAM2; ENSG00000104755; CTA
ANYAGGVVL

SEQ ID NO: 4179 - protein, 9 aa, Homo sapiens
  Table A; Target 4179; HLA-B*08:01; ADAM2; ENSG00000104755; CTA
ANYAGGVVL

SEQ ID NO: 4180 - protein, 9 aa, Homo sapiens
  Table A; Target 4180; HLA-B*13:02; ADAM2; ENSG00000104755; CTA
ANYAGGVVL

SEQ ID NO: 4181 - protein, 9 aa, Homo sapiens
  Table A; Target 4181; HLA-B*15:01; ADAM2; ENSG00000104755; CTA
ANYAGGVVL

SEQ ID NO: 4182 - protein, 9 aa, Homo sapiens
  Table A; Target 4182; HLA-B*15:03; ADAM2; ENSG00000104755; CTA
ANYAGGVVL

SEQ ID NO: 4183 - protein, 9 aa, Homo sapiens
  Table A; Target 4183; HLA-B*27:05; ADAM2; ENSG00000104755; CTA
ANYAGGVVL

SEQ ID NO: 4184 - protein, 9 aa, Homo sapiens
  Table A; Target 4184; HLA-B*35:03; ADAM2; ENSG00000104755; CTA
ANYAGGVVL

SEQ ID NO: 4185 - protein, 9 aa, Homo sapiens
  Table A; Target 4185; HLA-B*37:01; ADAM2; ENSG00000104755; CTA
ANYAGGVVL

SEQ ID NO: 4186 - protein, 9 aa, Homo sapiens
  Table A; Target 4186; HLA-B*38:01; ADAM2; ENSG00000104755; CTA
ANYAGGVVL

SEQ ID NO: 4187 - protein, 9 aa, Homo sapiens
  Table A; Target 4187; HLA-B*39:01; ADAM2; ENSG00000104755; CTA
ANYAGGVVL

SEQ ID NO: 4188 - protein, 9 aa, Homo sapiens
  Table A; Target 4188; HLA-B*40:01; ADAM2; ENSG00000104755; CTA
ANYAGGVVL

SEQ ID NO: 4189 - protein, 9 aa, Homo sapiens
  Table A; Target 4189; HLA-B*40:02; ADAM2; ENSG00000104755; CTA
ANYAGGVVL

SEQ ID NO: 4190 - protein, 9 aa, Homo sapiens
  Table A; Target 4190; HLA-B*46:01; ADAM2; ENSG00000104755; CTA
ANYAGGVVL

SEQ ID NO: 4191 - protein, 9 aa, Homo sapiens
  Table A; Target 4191; HLA-C*01:02; ADAM2; ENSG00000104755; CTA
ANYAGGVVL

SEQ ID NO: 4192 - protein, 9 aa, Homo sapiens
  Table A; Target 4192; HLA-C*02:02; ADAM2; ENSG00000104755; CTA
ANYAGGVVL

SEQ ID NO: 4193 - protein, 9 aa, Homo sapiens
  Table A; Target 4193; HLA-C*03:03; ADAM2; ENSG00000104755; CTA
ANYAGGVVL

SEQ ID NO: 4194 - protein, 9 aa, Homo sapiens
  Table A; Target 4194; HLA-C*03:04; ADAM2; ENSG00000104755; CTA
ANYAGGVVL

SEQ ID NO: 4195 - protein, 9 aa, Homo sapiens
  Table A; Target 4195; HLA-C*05:01; ADAM2; ENSG00000104755; CTA
ANYAGGVVL

SEQ ID NO: 4196 - protein, 9 aa, Homo sapiens
  Table A; Target 4196; HLA-C*07:04; ADAM2; ENSG00000104755; CTA
ANYAGGVVL

SEQ ID NO: 4197 - protein, 9 aa, Homo sapiens
  Table A; Target 4197; HLA-C*12:03; ADAM2; ENSG00000104755; CTA
ANYAGGVVL

SEQ ID NO: 4198 - protein, 9 aa, Homo sapiens
  Table A; Target 4198; HLA-C*14:02; ADAM2; ENSG00000104755; CTA
ANYAGGVVL

SEQ ID NO: 4199 - protein, 9 aa, Homo sapiens
  Table A; Target 4199; HLA-C*16:01; ADAM2; ENSG00000104755; CTA
ANYAGGVVL

SEQ ID NO: 4200 - protein, 9 aa, Homo sapiens
  Table A; Target 4200; HLA-C*16:02; ADAM2; ENSG00000104755; CTA
ANYAGGVVL

SEQ ID NO: 4201 - protein, 9 aa, Homo sapiens
  Table A; Target 4201; HLA-C*16:04; ADAM2; ENSG00000104755; CTA
ANYAGGVVL

SEQ ID NO: 4202 - protein, 10 aa, Homo sapiens
  Table A; Target 4202; HLA-A*03:02; ADAM2; ENSG00000104755; CTA
ANYAGGVVLH

SEQ ID NO: 4203 - protein, 8 aa, Homo sapiens
  Table A; Target 4203; HLA-B*13:02; ADAM2; ENSG00000104755; CTA
AQKVFQLI

SEQ ID NO: 4204 - protein, 8 aa, Homo sapiens
  Table A; Target 4204; HLA-B*15:01; ADAM2; ENSG00000104755; CTA
AQLLSLSM

SEQ ID NO: 4205 - protein, 10 aa, Homo sapiens
  Table A; Target 4205; HLA-B*13:02; ADAM2; ENSG00000104755; CTA
AQLLSLSMGI

SEQ ID NO: 4206 - protein, 11 aa, Homo sapiens
  Table A; Target 4206; HLA-B*57:01; ADAM2; ENSG00000104755; CTA
ASDHADSQKMW

SEQ ID NO: 4207 - protein, 11 aa, Homo sapiens
  Table A; Target 4207; HLA-B*58:01; ADAM2; ENSG00000104755; CTA
ASDHADSQKMW

SEQ ID NO: 4208 - protein, 9 aa, Homo sapiens
  Table A; Target 4208; HLA-A*31:01; ADAM2; ENSG00000104755; CTA
ASYKIVIEG

SEQ ID NO: 4209 - protein, 9 aa, Homo sapiens
  Table A; Target 4209; HLA-C*12:03; ADAM2; ENSG00000104755; CTA
ASYKIVIEG

SEQ ID NO: 4210 - protein, 10 aa, Homo sapiens
  Table A; Target 4210; HLA-A*03:01; ADAM2; ENSG00000104755; CTA
ASYKIVIEGK

SEQ ID NO: 4211 - protein, 10 aa, Homo sapiens
  Table A; Target 4211; HLA-A*03:02; ADAM2; ENSG00000104755; CTA
ASYKIVIEGK

SEQ ID NO: 4212 - protein, 10 aa, Homo sapiens
  Table A; Target 4212; HLA-A*11:01; ADAM2; ENSG00000104755; CTA
ASYKIVIEGK

SEQ ID NO: 4213 - protein, 9 aa, Homo sapiens
  Table A; Target 4213; HLA-C*03:03; ADAM2; ENSG00000104755; CTA
ATTGEANEL

SEQ ID NO: 4214 - protein, 9 aa, Homo sapiens
  Table A; Target 4214; HLA-C*03:04; ADAM2; ENSG00000104755; CTA
ATTGEANEL

SEQ ID NO: 4215 - protein, 9 aa, Homo sapiens
  Table A; Target 4215; HLA-C*16:02; ADAM2; ENSG00000104755; CTA
ATTGEANEL

SEQ ID NO: 4216 - protein, 11 aa, Homo sapiens
  Table A; Target 4216; HLA-A*11:01; ADAM2; ENSG00000104755; CTA
ATTGEANELLH

SEQ ID NO: 4217 - protein, 8 aa, Homo sapiens
  Table A; Target 4217; HLA-A*23:01; ADAM2; ENSG00000104755; CTA
AVILAQLL

SEQ ID NO: 4218 - protein, 8 aa, Homo sapiens
  Table A; Target 4218; HLA-B*37:01; ADAM2; ENSG00000104755; CTA
AVILAQLL

SEQ ID NO: 4219 - protein, 10 aa, Homo sapiens
  Table A; Target 4219; HLA-A*25:01; ADAM2; ENSG00000104755; CTA
AVILAQLLSL

SEQ ID NO: 4220 - protein, 8 aa, Homo sapiens
  Table A; Target 4220; HLA-B*37:01; ADAM2; ENSG00000104755; CTA
CDIATCRF

SEQ ID NO: 4221 - protein, 10 aa, Homo sapiens
  Table A; Target 4221; HLA-A*03:02; ADAM2; ENSG00000104755; CTA
CIMNPEAIHF

SEQ ID NO: 4222 - protein, 10 aa, Homo sapiens
  Table A; Target 4222; HLA-B*57:01; ADAM2; ENSG00000104755; CTA
CIMNPEAIHF

SEQ ID NO: 4223 - protein, 9 aa, Homo sapiens
  Table A; Target 4223; HLA-B*13:02; ADAM2; ENSG00000104755; CTA
CQCSGAVCI

SEQ ID NO: 4224 - protein, 9 aa, Homo sapiens
  Table A; Target 4224; HLA-B*57:01; ADAM2; ENSG00000104755; CTA
CSFEDFAHF

SEQ ID NO: 4225 - protein, 9 aa, Homo sapiens
  Table A; Target 4225; HLA-A*03:01; ADAM2; ENSG00000104755; CTA
CVLIAIMVK

SEQ ID NO: 4226 - protein, 9 aa, Homo sapiens
  Table A; Target 4226; HLA-A*11:01; ADAM2; ENSG00000104755; CTA
CVLIAIMVK

SEQ ID NO: 4227 - protein, 9 aa, Homo sapiens
  Table A; Target 4227; HLA-A*01:01; ADAM2; ENSG00000104755; CTA
CVSSSYLGY

SEQ ID NO: 4228 - protein, 9 aa, Homo sapiens
  Table A; Target 4228; HLA-A*03:01; ADAM2; ENSG00000104755; CTA
CVSSSYLGY

SEQ ID NO: 4229 - protein, 9 aa, Homo sapiens
  Table A; Target 4229; HLA-A*03:02; ADAM2; ENSG00000104755; CTA
CVSSSYLGY

SEQ ID NO: 4230 - protein, 9 aa, Homo sapiens
  Table A; Target 4230; HLA-A*11:01; ADAM2; ENSG00000104755; CTA
CVSSSYLGY

SEQ ID NO: 4231 - protein, 9 aa, Homo sapiens
  Table A; Target 4231; HLA-A*25:01; ADAM2; ENSG00000104755; CTA
CVSSSYLGY

SEQ ID NO: 4232 - protein, 9 aa, Homo sapiens
  Table A; Target 4232; HLA-A*26:01; ADAM2; ENSG00000104755; CTA
CVSSSYLGY

SEQ ID NO: 4233 - protein, 9 aa, Homo sapiens
  Table A; Target 4233; HLA-A*30:02; ADAM2; ENSG00000104755; CTA
CVSSSYLGY

SEQ ID NO: 4234 - protein, 9 aa, Homo sapiens
  Table A; Target 4234; HLA-A*32:01; ADAM2; ENSG00000104755; CTA
CVSSSYLGY

SEQ ID NO: 4235 - protein, 9 aa, Homo sapiens
  Table A; Target 4235; HLA-B*15:01; ADAM2; ENSG00000104755; CTA
CVSSSYLGY

SEQ ID NO: 4236 - protein, 9 aa, Homo sapiens
  Table A; Target 4236; HLA-C*02:02; ADAM2; ENSG00000104755; CTA
CVSSSYLGY

SEQ ID NO: 4237 - protein, 9 aa, Homo sapiens
  Table A; Target 4237; HLA-C*07:04; ADAM2; ENSG00000104755; CTA
CVSSSYLGY

SEQ ID NO: 4238 - protein, 9 aa, Homo sapiens
  Table A; Target 4238; HLA-C*14:02; ADAM2; ENSG00000104755; CTA
CVSSSYLGY

SEQ ID NO: 4239 - protein, 9 aa, Homo sapiens
  Table A; Target 4239; HLA-C*16:04; ADAM2; ENSG00000104755; CTA
CVSSSYLGY

SEQ ID NO: 4240 - protein, 8 aa, Homo sapiens
  Table A; Target 4240; HLA-B*51:01; ADAM2; ENSG00000104755; CTA
DANYAGGV

SEQ ID NO: 4241 - protein, 9 aa, Homo sapiens
  Table A; Target 4241; HLA-A*33:01; ADAM2; ENSG00000104755; CTA
DANYAGGVV

SEQ ID NO: 4242 - protein, 9 aa, Homo sapiens
  Table A; Target 4242; HLA-B*35:03; ADAM2; ENSG00000104755; CTA
DANYAGGVV

SEQ ID NO: 4243 - protein, 9 aa, Homo sapiens
  Table A; Target 4243; HLA-B*51:01; ADAM2; ENSG00000104755; CTA
DANYAGGVV

SEQ ID NO: 4244 - protein, 9 aa, Homo sapiens
  Table A; Target 4244; HLA-C*01:02; ADAM2; ENSG00000104755; CTA
DANYAGGVV

SEQ ID NO: 4245 - protein, 9 aa, Homo sapiens
  Table A; Target 4245; HLA-C*03:04; ADAM2; ENSG00000104755; CTA
DANYAGGVV

SEQ ID NO: 4246 - protein, 9 aa, Homo sapiens
  Table A; Target 4246; HLA-C*12:03; ADAM2; ENSG00000104755; CTA
DANYAGGVV

SEQ ID NO: 4247 - protein, 10 aa, Homo sapiens
  Table A; Target 4247; HLA-A*33:01; ADAM2; ENSG00000104755; CTA
DANYAGGVVL

SEQ ID NO: 4248 - protein, 10 aa, Homo sapiens
  Table A; Target 4248; HLA-A*68:01; ADAM2; ENSG00000104755; CTA
DANYAGGVVL

SEQ ID NO: 4249 - protein, 10 aa, Homo sapiens
  Table A; Target 4249; HLA-B*35:01; ADAM2; ENSG00000104755; CTA
DANYAGGVVL

SEQ ID NO: 4250 - protein, 10 aa, Homo sapiens
  Table A; Target 4250; HLA-B*35:03; ADAM2; ENSG00000104755; CTA
DANYAGGVVL

SEQ ID NO: 4251 - protein, 10 aa, Homo sapiens
  Table A; Target 4251; HLA-B*38:01; ADAM2; ENSG00000104755; CTA
DANYAGGVVL

SEQ ID NO: 4252 - protein, 10 aa, Homo sapiens
  Table A; Target 4252; HLA-B*39:01; ADAM2; ENSG00000104755; CTA
DANYAGGVVL

SEQ ID NO: 4253 - protein, 10 aa, Homo sapiens
  Table A; Target 4253; HLA-B*51:01; ADAM2; ENSG00000104755; CTA
DANYAGGVVL

SEQ ID NO: 4254 - protein, 10 aa, Homo sapiens
  Table A; Target 4254; HLA-C*01:02; ADAM2; ENSG00000104755; CTA
DANYAGGVVL

SEQ ID NO: 4255 - protein, 10 aa, Homo sapiens
  Table A; Target 4255; HLA-C*03:03; ADAM2; ENSG00000104755; CTA
DANYAGGVVL

SEQ ID NO: 4256 - protein, 10 aa, Homo sapiens
  Table A; Target 4256; HLA-C*03:04; ADAM2; ENSG00000104755; CTA
DANYAGGVVL

SEQ ID NO: 4257 - protein, 10 aa, Homo sapiens
  Table A; Target 4257; HLA-C*07:06; ADAM2; ENSG00000104755; CTA
DANYAGGVVL

SEQ ID NO: 4258 - protein, 11 aa, Homo sapiens
  Table A; Target 4258; HLA-A*33:01; ADAM2; ENSG00000104755; CTA
DANYAGGVVLH

SEQ ID NO: 4259 - protein, 11 aa, Homo sapiens
  Table A; Target 4259; HLA-A*33:03; ADAM2; ENSG00000104755; CTA
DANYAGGVVLH

SEQ ID NO: 4260 - protein, 11 aa, Homo sapiens
  Table A; Target 4260; HLA-A*68:01; ADAM2; ENSG00000104755; CTA
DANYAGGVVLH

SEQ ID NO: 4261 - protein, 11 aa, Homo sapiens
  Table A; Target 4261; HLA-C*07:06; ADAM2; ENSG00000104755; CTA
DANYAGGVVLH

SEQ ID NO: 4262 - protein, 8 aa, Homo sapiens
  Table A; Target 4262; HLA-B*18:01; ADAM2; ENSG00000104755; CTA
DENKIATT

SEQ ID NO: 4263 - protein, 9 aa, Homo sapiens
  Table A; Target 4263; HLA-B*18:01; ADAM2; ENSG00000104755; CTA
DENKIATTG

SEQ ID NO: 4264 - protein, 11 aa, Homo sapiens
  Table A; Target 4264; HLA-A*33:01; ADAM2; ENSG00000104755; CTA
DEQPESESEPK

SEQ ID NO: 4265 - protein, 11 aa, Homo sapiens
  Table A; Target 4265; HLA-B*27:02; ADAM2; ENSG00000104755; CTA
DEQPESESEPK

SEQ ID NO: 4266 - protein, 8 aa, Homo sapiens
  Table A; Target 4266; HLA-A*33:01; ADAM2; ENSG00000104755; CTA
DFAHFISK

SEQ ID NO: 4267 - protein, 8 aa, Homo sapiens
  Table A; Target 4267; HLA-A*33:03; ADAM2; ENSG00000104755; CTA
DFAHFISK

SEQ ID NO: 4268 - protein, 10 aa, Homo sapiens
  Table A; Target 4268; HLA-A*33:01; ADAM2; ENSG00000104755; CTA
DFAHFISKQK

SEQ ID NO: 4269 - protein, 8 aa, Homo sapiens
  Table A; Target 4269; HLA-B*38:01; ADAM2; ENSG00000104755; CTA
DHADSQKM

SEQ ID NO: 4270 - protein, 8 aa, Homo sapiens
  Table A; Target 4270; HLA-B*39:01; ADAM2; ENSG00000104755; CTA
DHADSQKM

SEQ ID NO: 4271 - protein, 9 aa, Homo sapiens
  Table A; Target 4271; HLA-B*38:01; ADAM2; ENSG00000104755; CTA
DHADSQKMW

SEQ ID NO: 4272 - protein, 10 aa, Homo sapiens
  Table A; Target 4272; HLA-B*38:01; ADAM2; ENSG00000104755; CTA
DHADSQKMWI

SEQ ID NO: 4273 - protein, 9 aa, Homo sapiens
  Table A; Target 4273; HLA-A*01:01; ADAM2; ENSG00000104755; CTA
DIESRDLSF

SEQ ID NO: 4274 - protein, 9 aa, Homo sapiens
  Table A; Target 4274; HLA-A*25:01; ADAM2; ENSG00000104755; CTA
DIESRDLSF

SEQ ID NO: 4275 - protein, 9 aa, Homo sapiens
  Table A; Target 4275; HLA-A*26:01; ADAM2; ENSG00000104755; CTA
DIESRDLSF

SEQ ID NO: 4276 - protein, 9 aa, Homo sapiens
  Table A; Target 4276; HLA-B*08:01; ADAM2; ENSG00000104755; CTA
DIESRDLSF

SEQ ID NO: 4277 - protein, 9 aa, Homo sapiens
  Table A; Target 4277; HLA-A*02:03; ADAM2; ENSG00000104755; CTA
DLSFKLQSV

SEQ ID NO: 4278 - protein, 9 aa, Homo sapiens
  Table A; Target 4278; HLA-A*68:02; ADAM2; ENSG00000104755; CTA
DLSFKLQSV

SEQ ID NO: 4279 - protein, 9 aa, Homo sapiens
  Table A; Target 4279; HLA-B*08:01; ADAM2; ENSG00000104755; CTA
DLSFKLQSV

SEQ ID NO: 4280 - protein, 9 aa, Homo sapiens
  Table A; Target 4280; HLA-B*51:01; ADAM2; ENSG00000104755; CTA
DLSFKLQSV

SEQ ID NO: 4281 - protein, 8 aa, Homo sapiens
  Table A; Target 4281; HLA-B*08:01; ADAM2; ENSG00000104755; CTA
DPFFKQQA

SEQ ID NO: 4282 - protein, 8 aa, Homo sapiens
  Table A; Target 4282; HLA-B*54:01; ADAM2; ENSG00000104755; CTA
DPFFKQQA

SEQ ID NO: 4283 - protein, 9 aa, Homo sapiens
  Table A; Target 4283; HLA-A*33:01; ADAM2; ENSG00000104755; CTA
DPFFKQQAV

SEQ ID NO: 4284 - protein, 9 aa, Homo sapiens
  Table A; Target 4284; HLA-A*68:01; ADAM2; ENSG00000104755; CTA
DPFFKQQAV

SEQ ID NO: 4285 - protein, 9 aa, Homo sapiens
  Table A; Target 4285; HLA-A*68:02; ADAM2; ENSG00000104755; CTA
DPFFKQQAV

SEQ ID NO: 4286 - protein, 9 aa, Homo sapiens
  Table A; Target 4286; HLA-B*07:02; ADAM2; ENSG00000104755; CTA
DPFFKQQAV

SEQ ID NO: 4287 - protein, 9 aa, Homo sapiens
  Table A; Target 4287; HLA-B*08:01; ADAM2; ENSG00000104755; CTA
DPFFKQQAV

SEQ ID NO: 4288 - protein, 9 aa, Homo sapiens
  Table A; Target 4288; HLA-B*35:01; ADAM2; ENSG00000104755; CTA
DPFFKQQAV

SEQ ID NO: 4289 - protein, 9 aa, Homo sapiens
  Table A; Target 4289; HLA-B*35:03; ADAM2; ENSG00000104755; CTA
DPFFKQQAV

SEQ ID NO: 4290 - protein, 9 aa, Homo sapiens
  Table A; Target 4290; HLA-B*54:01; ADAM2; ENSG00000104755; CTA
DPFFKQQAV

SEQ ID NO: 4291 - protein, 9 aa, Homo sapiens
  Table A; Target 4291; HLA-B*55:01; ADAM2; ENSG00000104755; CTA
DPFFKQQAV

SEQ ID NO: 4292 - protein, 9 aa, Homo sapiens
  Table A; Target 4292; HLA-B*56:01; ADAM2; ENSG00000104755; CTA
DPFFKQQAV

SEQ ID NO: 4293 - protein, 10 aa, Homo sapiens
  Table A; Target 4293; HLA-A*01:01; ADAM2; ENSG00000104755; CTA
DQDFQNFCHY

SEQ ID NO: 4294 - protein, 10 aa, Homo sapiens
  Table A; Target 4294; HLA-C*07:01; ADAM2; ENSG00000104755; CTA
DQDFQNFCHY

SEQ ID NO: 4295 - protein, 9 aa, Homo sapiens
  Table A; Target 4295; HLA-A*23:01; ADAM2; ENSG00000104755; CTA
DSLPVQITV

SEQ ID NO: 4296 - protein, 9 aa, Homo sapiens
  Table A; Target 4296; HLA-A*33:01; ADAM2; ENSG00000104755; CTA
DSLPVQITV

SEQ ID NO: 4297 - protein, 9 aa, Homo sapiens
  Table A; Target 4297; HLA-A*68:01; ADAM2; ENSG00000104755; CTA
DSLPVQITV

SEQ ID NO: 4298 - protein, 9 aa, Homo sapiens
  Table A; Target 4298; HLA-A*68:02; ADAM2; ENSG00000104755; CTA
DSLPVQITV

SEQ ID NO: 4299 - protein, 9 aa, Homo sapiens
  Table A; Target 4299; HLA-B*13:02; ADAM2; ENSG00000104755; CTA
DSLPVQITV

SEQ ID NO: 4300 - protein, 9 aa, Homo sapiens
  Table A; Target 4300; HLA-B*18:01; ADAM2; ENSG00000104755; CTA
DSLPVQITV

SEQ ID NO: 4301 - protein, 9 aa, Homo sapiens
  Table A; Target 4301; HLA-B*35:03; ADAM2; ENSG00000104755; CTA
DSLPVQITV

SEQ ID NO: 4302 - protein, 9 aa, Homo sapiens
  Table A; Target 4302; HLA-B*49:01; ADAM2; ENSG00000104755; CTA
DSLPVQITV

SEQ ID NO: 4303 - protein, 9 aa, Homo sapiens
  Table A; Target 4303; HLA-B*51:01; ADAM2; ENSG00000104755; CTA
DSLPVQITV

SEQ ID NO: 4304 - protein, 9 aa, Homo sapiens
  Table A; Target 4304; HLA-B*54:01; ADAM2; ENSG00000104755; CTA
DSLPVQITV

SEQ ID NO: 4305 - protein, 9 aa, Homo sapiens
  Table A; Target 4305; HLA-C*03:04; ADAM2; ENSG00000104755; CTA
DSLPVQITV

SEQ ID NO: 4306 - protein, 9 aa, Homo sapiens
  Table A; Target 4306; HLA-C*12:03; ADAM2; ENSG00000104755; CTA
DSLPVQITV

SEQ ID NO: 4307 - protein, 9 aa, Homo sapiens
  Table A; Target 4307; HLA-C*16:02; ADAM2; ENSG00000104755; CTA
DSLPVQITV

SEQ ID NO: 4308 - protein, 9 aa, Homo sapiens
  Table A; Target 4308; HLA-A*25:01; ADAM2; ENSG00000104755; CTA
DTFGKEVEF

SEQ ID NO: 4309 - protein, 9 aa, Homo sapiens
  Table A; Target 4309; HLA-A*26:01; ADAM2; ENSG00000104755; CTA
DTFGKEVEF

SEQ ID NO: 4310 - protein, 9 aa, Homo sapiens
  Table A; Target 4310; HLA-A*33:01; ADAM2; ENSG00000104755; CTA
DTFGKEVEF

SEQ ID NO: 4311 - protein, 9 aa, Homo sapiens
  Table A; Target 4311; HLA-A*33:03; ADAM2; ENSG00000104755; CTA
DTFGKEVEF

SEQ ID NO: 4312 - protein, 9 aa, Homo sapiens
  Table A; Target 4312; HLA-A*68:01; ADAM2; ENSG00000104755; CTA
DTFGKEVEF

SEQ ID NO: 4313 - protein, 9 aa, Homo sapiens
  Table A; Target 4313; HLA-A*68:02; ADAM2; ENSG00000104755; CTA
DTFGKEVEF

SEQ ID NO: 4314 - protein, 9 aa, Homo sapiens
  Table A; Target 4314; HLA-B*08:01; ADAM2; ENSG00000104755; CTA
DTFGKEVEF

SEQ ID NO: 4315 - protein, 9 aa, Homo sapiens
  Table A; Target 4315; HLA-B*18:01; ADAM2; ENSG00000104755; CTA
DTFGKEVEF

SEQ ID NO: 4316 - protein, 9 aa, Homo sapiens
  Table A; Target 4316; HLA-B*35:01; ADAM2; ENSG00000104755; CTA
DTFGKEVEF

SEQ ID NO: 4317 - protein, 9 aa, Homo sapiens
  Table A; Target 4317; HLA-B*35:03; ADAM2; ENSG00000104755; CTA
DTFGKEVEF

SEQ ID NO: 4318 - protein, 9 aa, Homo sapiens
  Table A; Target 4318; HLA-C*07:04; ADAM2; ENSG00000104755; CTA
DTFGKEVEF

SEQ ID NO: 4319 - protein, 9 aa, Homo sapiens
  Table A; Target 4319; HLA-C*07:06; ADAM2; ENSG00000104755; CTA
DTFGKEVEF

SEQ ID NO: 4320 - protein, 9 aa, Homo sapiens
  Table A; Target 4320; HLA-C*12:03; ADAM2; ENSG00000104755; CTA
DTFGKEVEF

SEQ ID NO: 4321 - protein, 8 aa, Homo sapiens
  Table A; Target 4321; HLA-A*03:02; ADAM2; ENSG00000104755; CTA
DTTVVAQK

SEQ ID NO: 4322 - protein, 8 aa, Homo sapiens
  Table A; Target 4322; HLA-A*33:01; ADAM2; ENSG00000104755; CTA
DTTVVAQK

SEQ ID NO: 4323 - protein, 8 aa, Homo sapiens
  Table A; Target 4323; HLA-A*33:03; ADAM2; ENSG00000104755; CTA
DTTVVAQK

SEQ ID NO: 4324 - protein, 8 aa, Homo sapiens
  Table A; Target 4324; HLA-A*68:01; ADAM2; ENSG00000104755; CTA
DTTVVAQK

SEQ ID NO: 4325 - protein, 8 aa, Homo sapiens
  Table A; Target 4325; HLA-B*27:02; ADAM2; ENSG00000104755; CTA
DTTVVAQK

SEQ ID NO: 4326 - protein, 9 aa, Homo sapiens
  Table A; Target 4326; HLA-A*25:01; ADAM2; ENSG00000104755; CTA
DTTVVAQKV

SEQ ID NO: 4327 - protein, 9 aa, Homo sapiens
  Table A; Target 4327; HLA-A*26:01; ADAM2; ENSG00000104755; CTA
DTTVVAQKV

SEQ ID NO: 4328 - protein, 9 aa, Homo sapiens
  Table A; Target 4328; HLA-A*33:01; ADAM2; ENSG00000104755; CTA
DTTVVAQKV

SEQ ID NO: 4329 - protein, 9 aa, Homo sapiens
  Table A; Target 4329; HLA-A*33:03; ADAM2; ENSG00000104755; CTA
DTTVVAQKV

SEQ ID NO: 4330 - protein, 9 aa, Homo sapiens
  Table A; Target 4330; HLA-A*68:01; ADAM2; ENSG00000104755; CTA
DTTVVAQKV

SEQ ID NO: 4331 - protein, 9 aa, Homo sapiens
  Table A; Target 4331; HLA-A*68:02; ADAM2; ENSG00000104755; CTA
DTTVVAQKV

SEQ ID NO: 4332 - protein, 9 aa, Homo sapiens
  Table A; Target 4332; HLA-B*13:02; ADAM2; ENSG00000104755; CTA
DTTVVAQKV

SEQ ID NO: 4333 - protein, 9 aa, Homo sapiens
  Table A; Target 4333; HLA-B*51:01; ADAM2; ENSG00000104755; CTA
DTTVVAQKV

SEQ ID NO: 4334 - protein, 9 aa, Homo sapiens
  Table A; Target 4334; HLA-C*07:06; ADAM2; ENSG00000104755; CTA
DTTVVAQKV

SEQ ID NO: 4335 - protein, 9 aa, Homo sapiens
  Table A; Target 4335; HLA-C*12:03; ADAM2; ENSG00000104755; CTA
DTTVVAQKV

SEQ ID NO: 4336 - protein, 9 aa, Homo sapiens
  Table A; Target 4336; HLA-C*16:02; ADAM2; ENSG00000104755; CTA
DTTVVAQKV

SEQ ID NO: 4337 - protein, 10 aa, Homo sapiens
  Table A; Target 4337; HLA-A*25:01; ADAM2; ENSG00000104755; CTA
DTTVVAQKVF

SEQ ID NO: 4338 - protein, 10 aa, Homo sapiens
  Table A; Target 4338; HLA-A*26:01; ADAM2; ENSG00000104755; CTA
DTTVVAQKVF

SEQ ID NO: 4339 - protein, 8 aa, Homo sapiens
  Table A; Target 4339; HLA-A*25:01; ADAM2; ENSG00000104755; CTA
DVAFLLVY

SEQ ID NO: 4340 - protein, 8 aa, Homo sapiens
  Table A; Target 4340; HLA-A*26:01; ADAM2; ENSG00000104755; CTA
DVAFLLVY

SEQ ID NO: 4341 - protein, 8 aa, Homo sapiens
  Table A; Target 4341; HLA-B*18:01; ADAM2; ENSG00000104755; CTA
DVAFLLVY

SEQ ID NO: 4342 - protein, 8 aa, Homo sapiens
  Table A; Target 4342; HLA-B*35:01; ADAM2; ENSG00000104755; CTA
DVAFLLVY

SEQ ID NO: 4343 - protein, 8 aa, Homo sapiens
  Table A; Target 4343; HLA-C*07:01; ADAM2; ENSG00000104755; CTA
DVAFLLVY

SEQ ID NO: 4344 - protein, 9 aa, Homo sapiens
  Table A; Target 4344; HLA-A*33:01; ADAM2; ENSG00000104755; CTA
DVAFLLVYR

SEQ ID NO: 4345 - protein, 9 aa, Homo sapiens
  Table A; Target 4345; HLA-A*33:03; ADAM2; ENSG00000104755; CTA
DVAFLLVYR

SEQ ID NO: 4346 - protein, 9 aa, Homo sapiens
  Table A; Target 4346; HLA-A*68:01; ADAM2; ENSG00000104755; CTA
DVAFLLVYR

SEQ ID NO: 4347 - protein, 9 aa, Homo sapiens
  Table A; Target 4347; HLA-A*68:02; ADAM2; ENSG00000104755; CTA
DVAFLLVYR

SEQ ID NO: 4348 - protein, 9 aa, Homo sapiens
  Table A; Target 4348; HLA-C*07:06; ADAM2; ENSG00000104755; CTA
DVAFLLVYR

SEQ ID NO: 4349 - protein, 8 aa, Homo sapiens
  Table A; Target 4349; HLA-B*51:01; ADAM2; ENSG00000104755; CTA
EAIHFSGV

SEQ ID NO: 4350 - protein, 10 aa, Homo sapiens
  Table A; Target 4350; HLA-A*25:01; ADAM2; ENSG00000104755; CTA
EAIHFSGVKI

SEQ ID NO: 4351 - protein, 10 aa, Homo sapiens
  Table A; Target 4351; HLA-A*68:01; ADAM2; ENSG00000104755; CTA
EAIHFSGVKI

SEQ ID NO: 4352 - protein, 10 aa, Homo sapiens
  Table A; Target 4352; HLA-A*68:02; ADAM2; ENSG00000104755; CTA
EAIHFSGVKI

SEQ ID NO: 4353 - protein, 9 aa, Homo sapiens
  Table A; Target 4353; HLA-A*23:01; ADAM2; ENSG00000104755; CTA
EANELLHTF

SEQ ID NO: 4354 - protein, 9 aa, Homo sapiens
  Table A; Target 4354; HLA-A*24:02; ADAM2; ENSG00000104755; CTA
EANELLHTF

SEQ ID NO: 4355 - protein, 9 aa, Homo sapiens
  Table A; Target 4355; HLA-A*25:01; ADAM2; ENSG00000104755; CTA
EANELLHTF

SEQ ID NO: 4356 - protein, 9 aa, Homo sapiens
  Table A; Target 4356; HLA-A*26:01; ADAM2; ENSG00000104755; CTA
EANELLHTF

SEQ ID NO: 4357 - protein, 9 aa, Homo sapiens
  Table A; Target 4357; HLA-A*30:02; ADAM2; ENSG00000104755; CTA
EANELLHTF

SEQ ID NO: 4358 - protein, 9 aa, Homo sapiens
  Table A; Target 4358; HLA-A*32:01; ADAM2; ENSG00000104755; CTA
EANELLHTF

SEQ ID NO: 4359 - protein, 9 aa, Homo sapiens
  Table A; Target 4359; HLA-A*33:01; ADAM2; ENSG00000104755; CTA
EANELLHTF

SEQ ID NO: 4360 - protein, 9 aa, Homo sapiens
  Table A; Target 4360; HLA-A*33:03; ADAM2; ENSG00000104755; CTA
EANELLHTF

SEQ ID NO: 4361 - protein, 9 aa, Homo sapiens
  Table A; Target 4361; HLA-A*68:01; ADAM2; ENSG00000104755; CTA
EANELLHTF

SEQ ID NO: 4362 - protein, 9 aa, Homo sapiens
  Table A; Target 4362; HLA-A*68:02; ADAM2; ENSG00000104755; CTA
EANELLHTF

SEQ ID NO: 4363 - protein, 9 aa, Homo sapiens
  Table A; Target 4363; HLA-B*18:01; ADAM2; ENSG00000104755; CTA
EANELLHTF

SEQ ID NO: 4364 - protein, 9 aa, Homo sapiens
  Table A; Target 4364; HLA-B*27:02; ADAM2; ENSG00000104755; CTA
EANELLHTF

SEQ ID NO: 4365 - protein, 9 aa, Homo sapiens
  Table A; Target 4365; HLA-B*35:03; ADAM2; ENSG00000104755; CTA
EANELLHTF

SEQ ID NO: 4366 - protein, 9 aa, Homo sapiens
  Table A; Target 4366; HLA-B*38:01; ADAM2; ENSG00000104755; CTA
EANELLHTF

SEQ ID NO: 4367 - protein, 9 aa, Homo sapiens
  Table A; Target 4367; HLA-B*44:02; ADAM2; ENSG00000104755; CTA
EANELLHTF

SEQ ID NO: 4368 - protein, 9 aa, Homo sapiens
  Table A; Target 4368; HLA-B*44:03; ADAM2; ENSG00000104755; CTA
EANELLHTF

SEQ ID NO: 4369 - protein, 9 aa, Homo sapiens
  Table A; Target 4369; HLA-B*46:01; ADAM2; ENSG00000104755; CTA
EANELLHTF

SEQ ID NO: 4370 - protein, 9 aa, Homo sapiens
  Table A; Target 4370; HLA-B*51:01; ADAM2; ENSG00000104755; CTA
EANELLHTF

SEQ ID NO: 4371 - protein, 9 aa, Homo sapiens
  Table A; Target 4371; HLA-B*55:01; ADAM2; ENSG00000104755; CTA
EANELLHTF

SEQ ID NO: 4372 - protein, 9 aa, Homo sapiens
  Table A; Target 4372; HLA-B*57:01; ADAM2; ENSG00000104755; CTA
EANELLHTF

SEQ ID NO: 4373 - protein, 9 aa, Homo sapiens
  Table A; Target 4373; HLA-B*58:01; ADAM2; ENSG00000104755; CTA
EANELLHTF

SEQ ID NO: 4374 - protein, 9 aa, Homo sapiens
  Table A; Target 4374; HLA-C*02:02; ADAM2; ENSG00000104755; CTA
EANELLHTF

SEQ ID NO: 4375 - protein, 9 aa, Homo sapiens
  Table A; Target 4375; HLA-C*03:03; ADAM2; ENSG00000104755; CTA
EANELLHTF

SEQ ID NO: 4376 - protein, 9 aa, Homo sapiens
  Table A; Target 4376; HLA-C*05:01; ADAM2; ENSG00000104755; CTA
EANELLHTF

SEQ ID NO: 4377 - protein, 9 aa, Homo sapiens
  Table A; Target 4377; HLA-C*07:06; ADAM2; ENSG00000104755; CTA
EANELLHTF

SEQ ID NO: 4378 - protein, 9 aa, Homo sapiens
  Table A; Target 4378; HLA-C*12:03; ADAM2; ENSG00000104755; CTA
EANELLHTF

SEQ ID NO: 4379 - protein, 9 aa, Homo sapiens
  Table A; Target 4379; HLA-C*16:01; ADAM2; ENSG00000104755; CTA
EANELLHTF

SEQ ID NO: 4380 - protein, 9 aa, Homo sapiens
  Table A; Target 4380; HLA-C*16:02; ADAM2; ENSG00000104755; CTA
EANELLHTF

SEQ ID NO: 4381 - protein, 9 aa, Homo sapiens
  Table A; Target 4381; HLA-C*16:04; ADAM2; ENSG00000104755; CTA
EANELLHTF

SEQ ID NO: 4382 - protein, 10 aa, Homo sapiens
  Table A; Target 4382; HLA-A*33:01; ADAM2; ENSG00000104755; CTA
EANELLHTFL

SEQ ID NO: 4383 - protein, 10 aa, Homo sapiens
  Table A; Target 4383; HLA-A*33:03; ADAM2; ENSG00000104755; CTA
EANELLHTFL

SEQ ID NO: 4384 - protein, 10 aa, Homo sapiens
  Table A; Target 4384; HLA-A*68:01; ADAM2; ENSG00000104755; CTA
EANELLHTFL

SEQ ID NO: 4385 - protein, 10 aa, Homo sapiens
  Table A; Target 4385; HLA-A*68:02; ADAM2; ENSG00000104755; CTA
EANELLHTFL

SEQ ID NO: 4386 - protein, 11 aa, Homo sapiens
  Table A; Target 4386; HLA-A*33:01; ADAM2; ENSG00000104755; CTA
EANELLHTFLR

SEQ ID NO: 4387 - protein, 9 aa, Homo sapiens
  Table A; Target 4387; HLA-A*33:01; ADAM2; ENSG00000104755; CTA
ECYSHLNSK

SEQ ID NO: 4388 - protein, 9 aa, Homo sapiens
  Table A; Target 4388; HLA-A*03:01; ADAM2; ENSG00000104755; CTA
EDFAHFISK

SEQ ID NO: 4389 - protein, 9 aa, Homo sapiens
  Table A; Target 4389; HLA-A*11:01; ADAM2; ENSG00000104755; CTA
EDFAHFISK

SEQ ID NO: 4390 - protein, 9 aa, Homo sapiens
  Table A; Target 4390; HLA-A*33:01; ADAM2; ENSG00000104755; CTA
EDFAHFISK

SEQ ID NO: 4391 - protein, 9 aa, Homo sapiens
  Table A; Target 4391; HLA-A*33:03; ADAM2; ENSG00000104755; CTA
EDFAHFISK

SEQ ID NO: 4392 - protein, 9 aa, Homo sapiens
  Table A; Target 4392; HLA-A*68:01; ADAM2; ENSG00000104755; CTA
EDFAHFISK

SEQ ID NO: 4393 - protein, 9 aa, Homo sapiens
  Table A; Target 4393; HLA-A*68:02; ADAM2; ENSG00000104755; CTA
EDFAHFISK

SEQ ID NO: 4394 - protein, 9 aa, Homo sapiens
  Table A; Target 4394; HLA-B*18:01; ADAM2; ENSG00000104755; CTA
EDFAHFISK

SEQ ID NO: 4395 - protein, 9 aa, Homo sapiens
  Table A; Target 4395; HLA-B*37:01; ADAM2; ENSG00000104755; CTA
EDFAHFISK

SEQ ID NO: 4396 - protein, 9 aa, Homo sapiens
  Table A; Target 4396; HLA-C*07:01; ADAM2; ENSG00000104755; CTA
EDFAHFISK

SEQ ID NO: 4397 - protein, 8 aa, Homo sapiens
  Table A; Target 4397; HLA-B*18:01; ADAM2; ENSG00000104755; CTA
EECDLPEY

SEQ ID NO: 4398 - protein, 9 aa, Homo sapiens
  Table A; Target 4398; HLA-A*25:01; ADAM2; ENSG00000104755; CTA
EGIESQASY

SEQ ID NO: 4399 - protein, 9 aa, Homo sapiens
  Table A; Target 4399; HLA-A*26:01; ADAM2; ENSG00000104755; CTA
EGIESQASY

SEQ ID NO: 4400 - protein, 9 aa, Homo sapiens
  Table A; Target 4400; HLA-A*30:02; ADAM2; ENSG00000104755; CTA
EGIESQASY

SEQ ID NO: 4401 - protein, 9 aa, Homo sapiens
  Table A; Target 4401; HLA-A*32:01; ADAM2; ENSG00000104755; CTA
EGIESQASY

SEQ ID NO: 4402 - protein, 9 aa, Homo sapiens
  Table A; Target 4402; HLA-B*15:01; ADAM2; ENSG00000104755; CTA
EGIESQASY

SEQ ID NO: 4403 - protein, 9 aa, Homo sapiens
  Table A; Target 4403; HLA-B*15:03; ADAM2; ENSG00000104755; CTA
EGIESQASY

SEQ ID NO: 4404 - protein, 9 aa, Homo sapiens
  Table A; Target 4404; HLA-B*18:01; ADAM2; ENSG00000104755; CTA
EGIESQASY

SEQ ID NO: 4405 - protein, 9 aa, Homo sapiens
  Table A; Target 4405; HLA-B*35:01; ADAM2; ENSG00000104755; CTA
EGIESQASY

SEQ ID NO: 4406 - protein, 9 aa, Homo sapiens
  Table A; Target 4406; HLA-B*39:01; ADAM2; ENSG00000104755; CTA
EGIESQASY

SEQ ID NO: 4407 - protein, 9 aa, Homo sapiens
  Table A; Target 4407; HLA-B*44:02; ADAM2; ENSG00000104755; CTA
EGIESQASY

SEQ ID NO: 4408 - protein, 9 aa, Homo sapiens
  Table A; Target 4408; HLA-B*44:03; ADAM2; ENSG00000104755; CTA
EGIESQASY

SEQ ID NO: 4409 - protein, 9 aa, Homo sapiens
  Table A; Target 4409; HLA-B*46:01; ADAM2; ENSG00000104755; CTA
EGIESQASY

SEQ ID NO: 4410 - protein, 9 aa, Homo sapiens
  Table A; Target 4410; HLA-C*01:02; ADAM2; ENSG00000104755; CTA
EGIESQASY

SEQ ID NO: 4411 - protein, 9 aa, Homo sapiens
  Table A; Target 4411; HLA-C*07:06; ADAM2; ENSG00000104755; CTA
EGIESQASY

SEQ ID NO: 4412 - protein, 9 aa, Homo sapiens
  Table A; Target 4412; HLA-C*14:02; ADAM2; ENSG00000104755; CTA
EGIESQASY

SEQ ID NO: 4413 - protein, 9 aa, Homo sapiens
  Table A; Target 4413; HLA-C*16:04; ADAM2; ENSG00000104755; CTA
EGIESQASY

SEQ ID NO: 4414 - protein, 10 aa, Homo sapiens
  Table A; Target 4414; HLA-A*68:01; ADAM2; ENSG00000104755; CTA
EGIESQASYK

SEQ ID NO: 4415 - protein, 9 aa, Homo sapiens
  Table A; Target 4415; HLA-A*33:03; ADAM2; ENSG00000104755; CTA
EGKPYTVNL

SEQ ID NO: 4416 - protein, 9 aa, Homo sapiens
  Table A; Target 4416; HLA-B*08:01; ADAM2; ENSG00000104755; CTA
EGKPYTVNL

SEQ ID NO: 4417 - protein, 8 aa, Homo sapiens
  Table A; Target 4417; HLA-B*08:01; ADAM2; ENSG00000104755; CTA
EGYPKSVV

SEQ ID NO: 4418 - protein, 8 aa, Homo sapiens
  Table A; Target 4418; HLA-B*51:01; ADAM2; ENSG00000104755; CTA
EGYPKSVV

SEQ ID NO: 4419 - protein, 8 aa, Homo sapiens
  Table A; Target 4419; HLA-C*07:01; ADAM2; ENSG00000104755; CTA
EGYPKSVV

SEQ ID NO: 4420 - protein, 8 aa, Homo sapiens
  Table A; Target 4420; HLA-C*12:03; ADAM2; ENSG00000104755; CTA
EGYPKSVV

SEQ ID NO: 4421 - protein, 9 aa, Homo sapiens
  Table A; Target 4421; HLA-A*25:01; ADAM2; ENSG00000104755; CTA
EGYPKSVVM

SEQ ID NO: 4422 - protein, 9 aa, Homo sapiens
  Table A; Target 4422; HLA-A*26:01; ADAM2; ENSG00000104755; CTA
EGYPKSVVM

SEQ ID NO: 4423 - protein, 9 aa, Homo sapiens
  Table A; Target 4423; HLA-A*30:01; ADAM2; ENSG00000104755; CTA
EGYPKSVVM

SEQ ID NO: 4424 - protein, 9 aa, Homo sapiens
  Table A; Target 4424; HLA-B*08:01; ADAM2; ENSG00000104755; CTA
EGYPKSVVM

SEQ ID NO: 4425 - protein, 9 aa, Homo sapiens
  Table A; Target 4425; HLA-B*15:01; ADAM2; ENSG00000104755; CTA
EGYPKSVVM

SEQ ID NO: 4426 - protein, 9 aa, Homo sapiens
  Table A; Target 4426; HLA-B*15:03; ADAM2; ENSG00000104755; CTA
EGYPKSVVM

SEQ ID NO: 4427 - protein, 9 aa, Homo sapiens
  Table A; Target 4427; HLA-B*18:01; ADAM2; ENSG00000104755; CTA
EGYPKSVVM

SEQ ID NO: 4428 - protein, 9 aa, Homo sapiens
  Table A; Target 4428; HLA-B*35:01; ADAM2; ENSG00000104755; CTA
EGYPKSVVM

SEQ ID NO: 4429 - protein, 9 aa, Homo sapiens
  Table A; Target 4429; HLA-B*35:03; ADAM2; ENSG00000104755; CTA
EGYPKSVVM

SEQ ID NO: 4430 - protein, 9 aa, Homo sapiens
  Table A; Target 4430; HLA-B*37:01; ADAM2; ENSG00000104755; CTA
EGYPKSVVM

SEQ ID NO: 4431 - protein, 9 aa, Homo sapiens
  Table A; Target 4431; HLA-B*38:01; ADAM2; ENSG00000104755; CTA
EGYPKSVVM

SEQ ID NO: 4432 - protein, 9 aa, Homo sapiens
  Table A; Target 4432; HLA-B*39:01; ADAM2; ENSG00000104755; CTA
EGYPKSVVM

SEQ ID NO: 4433 - protein, 9 aa, Homo sapiens
  Table A; Target 4433; HLA-B*40:01; ADAM2; ENSG00000104755; CTA
EGYPKSVVM

SEQ ID NO: 4434 - protein, 9 aa, Homo sapiens
  Table A; Target 4434; HLA-B*40:02; ADAM2; ENSG00000104755; CTA
EGYPKSVVM

SEQ ID NO: 4435 - protein, 9 aa, Homo sapiens
  Table A; Target 4435; HLA-B*46:01; ADAM2; ENSG00000104755; CTA
EGYPKSVVM

SEQ ID NO: 4436 - protein, 9 aa, Homo sapiens
  Table A; Target 4436; HLA-B*51:01; ADAM2; ENSG00000104755; CTA
EGYPKSVVM

SEQ ID NO: 4437 - protein, 9 aa, Homo sapiens
  Table A; Target 4437; HLA-B*55:01; ADAM2; ENSG00000104755; CTA
EGYPKSVVM

SEQ ID NO: 4438 - protein, 9 aa, Homo sapiens
  Table A; Target 4438; HLA-C*02:02; ADAM2; ENSG00000104755; CTA
EGYPKSVVM

SEQ ID NO: 4439 - protein, 9 aa, Homo sapiens
  Table A; Target 4439; HLA-C*03:03; ADAM2; ENSG00000104755; CTA
EGYPKSVVM

SEQ ID NO: 4440 - protein, 9 aa, Homo sapiens
  Table A; Target 4440; HLA-C*03:04; ADAM2; ENSG00000104755; CTA
EGYPKSVVM

SEQ ID NO: 4441 - protein, 9 aa, Homo sapiens
  Table A; Target 4441; HLA-C*05:01; ADAM2; ENSG00000104755; CTA
EGYPKSVVM

SEQ ID NO: 4442 - protein, 9 aa, Homo sapiens
  Table A; Target 4442; HLA-C*07:01; ADAM2; ENSG00000104755; CTA
EGYPKSVVM

SEQ ID NO: 4443 - protein, 9 aa, Homo sapiens
  Table A; Target 4443; HLA-C*07:04; ADAM2; ENSG00000104755; CTA
EGYPKSVVM

SEQ ID NO: 4444 - protein, 9 aa, Homo sapiens
  Table A; Target 4444; HLA-C*07:06; ADAM2; ENSG00000104755; CTA
EGYPKSVVM

SEQ ID NO: 4445 - protein, 9 aa, Homo sapiens
  Table A; Target 4445; HLA-C*12:03; ADAM2; ENSG00000104755; CTA
EGYPKSVVM

SEQ ID NO: 4446 - protein, 9 aa, Homo sapiens
  Table A; Target 4446; HLA-C*14:02; ADAM2; ENSG00000104755; CTA
EGYPKSVVM

SEQ ID NO: 4447 - protein, 9 aa, Homo sapiens
  Table A; Target 4447; HLA-C*16:01; ADAM2; ENSG00000104755; CTA
EGYPKSVVM

SEQ ID NO: 4448 - protein, 10 aa, Homo sapiens
  Table A; Target 4448; HLA-A*68:02; ADAM2; ENSG00000104755; CTA
EGYPKSVVMV

SEQ ID NO: 4449 - protein, 10 aa, Homo sapiens
  Table A; Target 4449; HLA-B*51:01; ADAM2; ENSG00000104755; CTA
EGYPKSVVMV

SEQ ID NO: 4450 - protein, 8 aa, Homo sapiens
  Table A; Target 4450; HLA-C*07:01; ADAM2; ENSG00000104755; CTA
EHVIYQVK

SEQ ID NO: 4451 - protein, 10 aa, Homo sapiens
  Table A; Target 4451; HLA-B*15:03; ADAM2; ENSG00000104755; CTA
EKSNYVGATF

SEQ ID NO: 4452 - protein, 10 aa, Homo sapiens
  Table A; Target 4452; HLA-B*38:01; ADAM2; ENSG00000104755; CTA
EKSNYVGATF

SEQ ID NO: 4453 - protein, 8 aa, Homo sapiens
  Table A; Target 4453; HLA-A*33:01; ADAM2; ENSG00000104755; CTA
EMHVIVEK

SEQ ID NO: 4454 - protein, 8 aa, Homo sapiens
  Table A; Target 4454; HLA-A*33:03; ADAM2; ENSG00000104755; CTA
EMHVIVEK

SEQ ID NO: 4455 - protein, 8 aa, Homo sapiens
  Table A; Target 4455; HLA-C*04:01; ADAM2; ENSG00000104755; CTA
EMHVIVEK

SEQ ID NO: 4456 - protein, 8 aa, Homo sapiens
  Table A; Target 4456; HLA-C*07:01; ADAM2; ENSG00000104755; CTA
EMHVIVEK

SEQ ID NO: 4457 - protein, 11 aa, Homo sapiens
  Table A; Target 4457; HLA-A*01:01; ADAM2; ENSG00000104755; CTA
EMHVIVEKQLY

SEQ ID NO: 4458 - protein, 10 aa, Homo sapiens
  Table A; Target 4458; HLA-A*33:01; ADAM2; ENSG00000104755; CTA
ENVSYGIEPL

SEQ ID NO: 4459 - protein, 9 aa, Homo sapiens
  Table A; Target 4459; HLA-A*23:01; ADAM2; ENSG00000104755; CTA
EPLESSVGF

SEQ ID NO: 4460 - protein, 9 aa, Homo sapiens
  Table A; Target 4460; HLA-A*25:01; ADAM2; ENSG00000104755; CTA
EPLESSVGF

SEQ ID NO: 4461 - protein, 9 aa, Homo sapiens
  Table A; Target 4461; HLA-A*26:01; ADAM2; ENSG00000104755; CTA
EPLESSVGF

SEQ ID NO: 4462 - protein, 9 aa, Homo sapiens
  Table A; Target 4462; HLA-A*33:03; ADAM2; ENSG00000104755; CTA
EPLESSVGF

SEQ ID NO: 4463 - protein, 9 aa, Homo sapiens
  Table A; Target 4463; HLA-B*18:01; ADAM2; ENSG00000104755; CTA
EPLESSVGF

SEQ ID NO: 4464 - protein, 9 aa, Homo sapiens
  Table A; Target 4464; HLA-B*35:01; ADAM2; ENSG00000104755; CTA
EPLESSVGF

SEQ ID NO: 4465 - protein, 9 aa, Homo sapiens
  Table A; Target 4465; HLA-B*35:03; ADAM2; ENSG00000104755; CTA
EPLESSVGF

SEQ ID NO: 4466 - protein, 9 aa, Homo sapiens
  Table A; Target 4466; HLA-B*55:01; ADAM2; ENSG00000104755; CTA
EPLESSVGF

SEQ ID NO: 4467 - protein, 9 aa, Homo sapiens
  Table A; Target 4467; HLA-C*03:03; ADAM2; ENSG00000104755; CTA
EPLESSVGF

SEQ ID NO: 4468 - protein, 9 aa, Homo sapiens
  Table A; Target 4468; HLA-C*07:06; ADAM2; ENSG00000104755; CTA
EPLESSVGF

SEQ ID NO: 4469 - protein, 11 aa, Homo sapiens
  Table A; Target 4469; HLA-A*33:03; ADAM2; ENSG00000104755; CTA
EPLESSVGFEH

SEQ ID NO: 4470 - protein, 11 aa, Homo sapiens
  Table A; Target 4470; HLA-B*35:01; ADAM2; ENSG00000104755; CTA
EPLESSVGFEH

SEQ ID NO: 4471 - protein, 9 aa, Homo sapiens
  Table A; Target 4471; HLA-A*25:01; ADAM2; ENSG00000104755; CTA
EPQQDFAKY

SEQ ID NO: 4472 - protein, 9 aa, Homo sapiens
  Table A; Target 4472; HLA-A*26:01; ADAM2; ENSG00000104755; CTA
EPQQDFAKY

SEQ ID NO: 4473 - protein, 9 aa, Homo sapiens
  Table A; Target 4473; HLA-A*30:02; ADAM2; ENSG00000104755; CTA
EPQQDFAKY

SEQ ID NO: 4474 - protein, 9 aa, Homo sapiens
  Table A; Target 4474; HLA-A*33:03; ADAM2; ENSG00000104755; CTA
EPQQDFAKY

SEQ ID NO: 4475 - protein, 9 aa, Homo sapiens
  Table A; Target 4475; HLA-B*35:01; ADAM2; ENSG00000104755; CTA
EPQQDFAKY

SEQ ID NO: 4476 - protein, 9 aa, Homo sapiens
  Table A; Target 4476; HLA-B*55:01; ADAM2; ENSG00000104755; CTA
EPQQDFAKY

SEQ ID NO: 4477 - protein, 9 aa, Homo sapiens
  Table A; Target 4477; HLA-C*03:03; ADAM2; ENSG00000104755; CTA
EPQQDFAKY

SEQ ID NO: 4478 - protein, 9 aa, Homo sapiens
  Table A; Target 4478; HLA-A*33:03; ADAM2; ENSG00000104755; CTA
ESLAVILAQ

SEQ ID NO: 4479 - protein, 9 aa, Homo sapiens
  Table A; Target 4479; HLA-C*07:06; ADAM2; ENSG00000104755; CTA
ESLAVILAQ

SEQ ID NO: 4480 - protein, 10 aa, Homo sapiens
  Table A; Target 4480; HLA-A*33:03; ADAM2; ENSG00000104755; CTA
ESLAVILAQL

SEQ ID NO: 4481 - protein, 10 aa, Homo sapiens
  Table A; Target 4481; HLA-A*68:02; ADAM2; ENSG00000104755; CTA
ESLAVILAQL

SEQ ID NO: 4482 - protein, 9 aa, Homo sapiens
  Table A; Target 4482; HLA-A*33:03; ADAM2; ENSG00000104755; CTA
ESRDLSFKL

SEQ ID NO: 4483 - protein, 9 aa, Homo sapiens
  Table A; Target 4483; HLA-A*68:02; ADAM2; ENSG00000104755; CTA
ESSVGFEHV

SEQ ID NO: 4484 - protein, 10 aa, Homo sapiens
  Table A; Target 4484; HLA-A*33:03; ADAM2; ENSG00000104755; CTA
ETCCDIATCR

SEQ ID NO: 4485 - protein, 10 aa, Homo sapiens
  Table A; Target 4485; HLA-A*68:01; ADAM2; ENSG00000104755; CTA
ETCCDIATCR

SEQ ID NO: 4486 - protein, 10 aa, Homo sapiens
  Table A; Target 4486; HLA-A*01:01; ADAM2; ENSG00000104755; CTA
EVEFGPSECY

SEQ ID NO: 4487 - protein, 10 aa, Homo sapiens
  Table A; Target 4487; HLA-A*25:01; ADAM2; ENSG00000104755; CTA
EVEFGPSECY

SEQ ID NO: 4488 - protein, 10 aa, Homo sapiens
  Table A; Target 4488; HLA-A*26:01; ADAM2; ENSG00000104755; CTA
EVEFGPSECY

SEQ ID NO: 4489 - protein, 10 aa, Homo sapiens
  Table A; Target 4489; HLA-A*30:02; ADAM2; ENSG00000104755; CTA
EVEFGPSECY

SEQ ID NO: 4490 - protein, 10 aa, Homo sapiens
  Table A; Target 4490; HLA-B*15:01; ADAM2; ENSG00000104755; CTA
EVEFGPSECY

SEQ ID NO: 4491 - protein, 9 aa, Homo sapiens
  Table A; Target 4491; HLA-A*33:01; ADAM2; ENSG00000104755; CTA
FAHFISKQK

SEQ ID NO: 4492 - protein, 9 aa, Homo sapiens
  Table A; Target 4492; HLA-A*68:02; ADAM2; ENSG00000104755; CTA
FAKYIEMHV

SEQ ID NO: 4493 - protein, 11 aa, Homo sapiens
  Table A; Target 4493; HLA-B*35:01; ADAM2; ENSG00000104755; CTA
FASDHADSQKM

SEQ ID NO: 4494 - protein, 8 aa, Homo sapiens
  Table A; Target 4494; HLA-B*37:01; ADAM2; ENSG00000104755; CTA
FDSLPVQI

SEQ ID NO: 4495 - protein, 8 aa, Homo sapiens
  Table A; Target 4495; HLA-B*38:01; ADAM2; ENSG00000104755; CTA
FDSLPVQI

SEQ ID NO: 4496 - protein, 8 aa, Homo sapiens
  Table A; Target 4496; HLA-B*49:01; ADAM2; ENSG00000104755; CTA
FDSLPVQI

SEQ ID NO: 4497 - protein, 8 aa, Homo sapiens
  Table A; Target 4497; HLA-C*07:04; ADAM2; ENSG00000104755; CTA
FDSLPVQI

SEQ ID NO: 4498 - protein, 10 aa, Homo sapiens
  Table A; Target 4498; HLA-A*68:02; ADAM2; ENSG00000104755; CTA
FDSLPVQITV

SEQ ID NO: 4499 - protein, 8 aa, Homo sapiens
  Table A; Target 4499; HLA-B*44:02; ADAM2; ENSG00000104755; CTA
FEDFAHFI

SEQ ID NO: 4500 - protein, 8 aa, Homo sapiens
  Table A; Target 4500; HLA-B*49:01; ADAM2; ENSG00000104755; CTA
FEDFAHFI

SEQ ID NO: 4501 - protein, 9 aa, Homo sapiens
  Table A; Target 4501; HLA-A*01:01; ADAM2; ENSG00000104755; CTA
FEECDLPEY

SEQ ID NO: 4502 - protein, 9 aa, Homo sapiens
  Table A; Target 4502; HLA-B*18:01; ADAM2; ENSG00000104755; CTA
FEECDLPEY

SEQ ID NO: 4503 - protein, 8 aa, Homo sapiens
  Table A; Target 4503; HLA-A*30:01; ADAM2; ENSG00000104755; CTA
FEHVIYQV

SEQ ID NO: 4504 - protein, 8 aa, Homo sapiens
  Table A; Target 4504; HLA-B*13:02; ADAM2; ENSG00000104755; CTA
FEHVIYQV

SEQ ID NO: 4505 - protein, 8 aa, Homo sapiens
  Table A; Target 4505; HLA-B*18:01; ADAM2; ENSG00000104755; CTA
FEHVIYQV

SEQ ID NO: 4506 - protein, 8 aa, Homo sapiens
  Table A; Target 4506; HLA-B*37:01; ADAM2; ENSG00000104755; CTA
FEHVIYQV

SEQ ID NO: 4507 - protein, 8 aa, Homo sapiens
  Table A; Target 4507; HLA-B*40:02; ADAM2; ENSG00000104755; CTA
FEHVIYQV

SEQ ID NO: 4508 - protein, 8 aa, Homo sapiens
  Table A; Target 4508; HLA-B*49:01; ADAM2; ENSG00000104755; CTA
FEHVIYQV

SEQ ID NO: 4509 - protein, 9 aa, Homo sapiens
  Table A; Target 4509; HLA-B*18:01; ADAM2; ENSG00000104755; CTA
FEHVIYQVK

SEQ ID NO: 4510 - protein, 9 aa, Homo sapiens
  Table A; Target 4510; HLA-B*27:02; ADAM2; ENSG00000104755; CTA
FEHVIYQVK

SEQ ID NO: 4511 - protein, 9 aa, Homo sapiens
  Table A; Target 4511; HLA-B*40:02; ADAM2; ENSG00000104755; CTA
FEHVIYQVK

SEQ ID NO: 4512 - protein, 9 aa, Homo sapiens
  Table A; Target 4512; HLA-B*44:02; ADAM2; ENSG00000104755; CTA
FEHVIYQVK

SEQ ID NO: 4513 - protein, 9 aa, Homo sapiens
  Table A; Target 4513; HLA-B*49:01; ADAM2; ENSG00000104755; CTA
FEHVIYQVK

SEQ ID NO: 4514 - protein, 8 aa, Homo sapiens
  Table A; Target 4514; HLA-B*18:01; ADAM2; ENSG00000104755; CTA
FENVSYGI

SEQ ID NO: 4515 - protein, 8 aa, Homo sapiens
  Table A; Target 4515; HLA-B*37:01; ADAM2; ENSG00000104755; CTA
FENVSYGI

SEQ ID NO: 4516 - protein, 8 aa, Homo sapiens
  Table A; Target 4516; HLA-B*49:01; ADAM2; ENSG00000104755; CTA
FENVSYGI

SEQ ID NO: 4517 - protein, 10 aa, Homo sapiens
  Table A; Target 4517; HLA-C*07:02; ADAM2; ENSG00000104755; CTA
FGPSECYSHL

SEQ ID NO: 4518 - protein, 8 aa, Homo sapiens
  Table A; Target 4518; HLA-A*02:04; ADAM2; ENSG00000104755; CTA
FLLQIPRA

SEQ ID NO: 4519 - protein, 10 aa, Homo sapiens
  Table A; Target 4519; HLA-A*02:03; ADAM2; ENSG00000104755; CTA
FLLQIPRATI

SEQ ID NO: 4520 - protein, 10 aa, Homo sapiens
  Table A; Target 4520; HLA-A*02:04; ADAM2; ENSG00000104755; CTA
FLLQIPRATI

SEQ ID NO: 4521 - protein, 11 aa, Homo sapiens
  Table A; Target 4521; HLA-A*02:04; ADAM2; ENSG00000104755; CTA
FLLQIPRATII

SEQ ID NO: 4522 - protein, 9 aa, Homo sapiens
  Table A; Target 4522; HLA-A*02:01; ADAM2; ENSG00000104755; CTA
FLLSGLGGL

SEQ ID NO: 4523 - protein, 9 aa, Homo sapiens
  Table A; Target 4523; HLA-A*02:03; ADAM2; ENSG00000104755; CTA
FLLSGLGGL

SEQ ID NO: 4524 - protein, 9 aa, Homo sapiens
  Table A; Target 4524; HLA-A*02:04; ADAM2; ENSG00000104755; CTA
FLLSGLGGL

SEQ ID NO: 4525 - protein, 9 aa, Homo sapiens
  Table A; Target 4525; HLA-A*02:07; ADAM2; ENSG00000104755; CTA
FLLSGLGGL

SEQ ID NO: 4526 - protein, 11 aa, Homo sapiens
  Table A; Target 4526; HLA-A*02:04; ADAM2; ENSG00000104755; CTA
FLLSGLGGLRM

SEQ ID NO: 4527 - protein, 11 aa, Homo sapiens
  Table A; Target 4527; HLA-A*29:02; ADAM2; ENSG00000104755; CTA
FLLSGLGGLRM

SEQ ID NO: 4528 - protein, 8 aa, Homo sapiens
  Table A; Target 4528; HLA-A*02:07; ADAM2; ENSG00000104755; CTA
FLPHNFRV

SEQ ID NO: 4529 - protein, 9 aa, Homo sapiens
  Table A; Target 4529; HLA-A*02:07; ADAM2; ENSG00000104755; CTA
FLPHNFRVY

SEQ ID NO: 4530 - protein, 9 aa, Homo sapiens
  Table A; Target 4530; HLA-A*24:02; ADAM2; ENSG00000104755; CTA
FLPHNFRVY

SEQ ID NO: 4531 - protein, 9 aa, Homo sapiens
  Table A; Target 4531; HLA-A*29:02; ADAM2; ENSG00000104755; CTA
FLPHNFRVY

SEQ ID NO: 4532 - protein, 11 aa, Homo sapiens
  Table A; Target 4532; HLA-A*29:02; ADAM2; ENSG00000104755; CTA
FLPHNFRVYSY

SEQ ID NO: 4533 - protein, 9 aa, Homo sapiens
  Table A; Target 4533; HLA-A*02:03; ADAM2; ENSG00000104755; CTA
FLRWKTSYL

SEQ ID NO: 4534 - protein, 9 aa, Homo sapiens
  Table A; Target 4534; HLA-A*02:04; ADAM2; ENSG00000104755; CTA
FLRWKTSYL

SEQ ID NO: 4535 - protein, 8 aa, Homo sapiens
  Table A; Target 4535; HLA-B*54:01; ADAM2; ENSG00000104755; CTA
FPPVAIPA

SEQ ID NO: 4536 - protein, 9 aa, Homo sapiens
  Table A; Target 4536; HLA-B*35:01; ADAM2; ENSG00000104755; CTA
FPPVAIPAR

SEQ ID NO: 4537 - protein, 9 aa, Homo sapiens
  Table A; Target 4537; HLA-B*54:01; ADAM2; ENSG00000104755; CTA
FPPVAIPAR

SEQ ID NO: 4538 - protein, 10 aa, Homo sapiens
  Table A; Target 4538; HLA-C*07:01; ADAM2; ENSG00000104755; CTA
FQGKMCDANY

SEQ ID NO: 4539 - protein, 9 aa, Homo sapiens
  Table A; Target 4539; HLA-A*02:03; ADAM2; ENSG00000104755; CTA
FVSFNITII

SEQ ID NO: 4540 - protein, 9 aa, Homo sapiens
  Table A; Target 4540; HLA-A*68:02; ADAM2; ENSG00000104755; CTA
FVSFNITII

SEQ ID NO: 4541 - protein, 8 aa, Homo sapiens
  Table A; Target 4541; HLA-C*16:02; ADAM2; ENSG00000104755; CTA
GATFQGKM

SEQ ID NO: 4542 - protein, 9 aa, Homo sapiens
  Table A; Target 4542; HLA-B*49:01; ADAM2; ENSG00000104755; CTA
GEANELLHT

SEQ ID NO: 4543 - protein, 10 aa, Homo sapiens
  Table A; Target 4543; HLA-A*25:01; ADAM2; ENSG00000104755; CTA
GEANELLHTF

SEQ ID NO: 4544 - protein, 10 aa, Homo sapiens
  Table A; Target 4544; HLA-A*30:01; ADAM2; ENSG00000104755; CTA
GEANELLHTF

SEQ ID NO: 4545 - protein, 10 aa, Homo sapiens
  Table A; Target 4545; HLA-A*30:02; ADAM2; ENSG00000104755; CTA
GEANELLHTF

SEQ ID NO: 4546 - protein, 10 aa, Homo sapiens
  Table A; Target 4546; HLA-B*15:01; ADAM2; ENSG00000104755; CTA
GEANELLHTF

SEQ ID NO: 4547 - protein, 10 aa, Homo sapiens
  Table A; Target 4547; HLA-B*15:03; ADAM2; ENSG00000104755; CTA
GEANELLHTF

SEQ ID NO: 4548 - protein, 10 aa, Homo sapiens
  Table A; Target 4548; HLA-B*18:01; ADAM2; ENSG00000104755; CTA
GEANELLHTF

SEQ ID NO: 4549 - protein, 10 aa, Homo sapiens
  Table A; Target 4549; HLA-B*27:02; ADAM2; ENSG00000104755; CTA
GEANELLHTF

SEQ ID NO: 4550 - protein, 10 aa, Homo sapiens
  Table A; Target 4550; HLA-B*27:05; ADAM2; ENSG00000104755; CTA
GEANELLHTF

SEQ ID NO: 4551 - protein, 10 aa, Homo sapiens
  Table A; Target 4551; HLA-B*37:01; ADAM2; ENSG00000104755; CTA
GEANELLHTF

SEQ ID NO: 4552 - protein, 10 aa, Homo sapiens
  Table A; Target 4552; HLA-B*38:01; ADAM2; ENSG00000104755; CTA
GEANELLHTF

SEQ ID NO: 4553 - protein, 10 aa, Homo sapiens
  Table A; Target 4553; HLA-B*40:01; ADAM2; ENSG00000104755; CTA
GEANELLHTF

SEQ ID NO: 4554 - protein, 10 aa, Homo sapiens
  Table A; Target 4554; HLA-B*40:02; ADAM2; ENSG00000104755; CTA
GEANELLHTF

SEQ ID NO: 4555 - protein, 10 aa, Homo sapiens
  Table A; Target 4555; HLA-B*49:01; ADAM2; ENSG00000104755; CTA
GEANELLHTF

SEQ ID NO: 4556 - protein, 10 aa, Homo sapiens
  Table A; Target 4556; HLA-B*57:01; ADAM2; ENSG00000104755; CTA
GEANELLHTF

SEQ ID NO: 4557 - protein, 10 aa, Homo sapiens
  Table A; Target 4557; HLA-C*02:02; ADAM2; ENSG00000104755; CTA
GEANELLHTF

SEQ ID NO: 4558 - protein, 10 aa, Homo sapiens
  Table A; Target 4558; HLA-C*16:04; ADAM2; ENSG00000104755; CTA
GEANELLHTF

SEQ ID NO: 4559 - protein, 11 aa, Homo sapiens
  Table A; Target 4559; HLA-A*30:01; ADAM2; ENSG00000104755; CTA
GEANELLHTFL

SEQ ID NO: 4560 - protein, 11 aa, Homo sapiens
  Table A; Target 4560; HLA-B*40:01; ADAM2; ENSG00000104755; CTA
GEANELLHTFL

SEQ ID NO: 4561 - protein, 11 aa, Homo sapiens
  Table A; Target 4561; HLA-B*44:02; ADAM2; ENSG00000104755; CTA
GEANELLHTFL

SEQ ID NO: 4562 - protein, 11 aa, Homo sapiens
  Table A; Target 4562; HLA-B*49:01; ADAM2; ENSG00000104755; CTA
GEANELLHTFL

SEQ ID NO: 4563 - protein, 9 aa, Homo sapiens
  Table A; Target 4563; HLA-B*15:03; ADAM2; ENSG00000104755; CTA
GHLCIAVEF

SEQ ID NO: 4564 - protein, 9 aa, Homo sapiens
  Table A; Target 4564; HLA-C*05:01; ADAM2; ENSG00000104755; CTA
GIEPLESSV

SEQ ID NO: 4565 - protein, 8 aa, Homo sapiens
  Table A; Target 4565; HLA-B*39:01; ADAM2; ENSG00000104755; CTA
GIESQASY

SEQ ID NO: 4566 - protein, 9 aa, Homo sapiens
  Table A; Target 4566; HLA-A*03:01; ADAM2; ENSG00000104755; CTA
GIESQASYK

SEQ ID NO: 4567 - protein, 9 aa, Homo sapiens
  Table A; Target 4567; HLA-A*03:02; ADAM2; ENSG00000104755; CTA
GIESQASYK

SEQ ID NO: 4568 - protein, 9 aa, Homo sapiens
  Table A; Target 4568; HLA-A*11:01; ADAM2; ENSG00000104755; CTA
GIESQASYK

SEQ ID NO: 4569 - protein, 9 aa, Homo sapiens
  Table A; Target 4569; HLA-A*03:02; ADAM2; ENSG00000104755; CTA
GITYDDINK

SEQ ID NO: 4570 - protein, 9 aa, Homo sapiens
  Table A; Target 4570; HLA-A*11:01; ADAM2; ENSG00000104755; CTA
GITYDDINK

SEQ ID NO: 4571 - protein, 9 aa, Homo sapiens
  Table A; Target 4571; HLA-B*27:02; ADAM2; ENSG00000104755; CTA
GITYDDINK

SEQ ID NO: 4572 - protein, 9 aa, Homo sapiens
  Table A; Target 4572; HLA-B*15:03; ADAM2; ENSG00000104755; CTA
GKPYTVNLM

SEQ ID NO: 4573 - protein, 8 aa, Homo sapiens
  Table A; Target 4573; HLA-B*13:02; ADAM2; ENSG00000104755; CTA
GLTNAIFV

SEQ ID NO: 4574 - protein, 10 aa, Homo sapiens
  Table A; Target 4574; HLA-A*02:04; ADAM2; ENSG00000104755; CTA
GLTNAIFVSF

SEQ ID NO: 4575 - protein, 10 aa, Homo sapiens
  Table A; Target 4575; HLA-A*23:01; ADAM2; ENSG00000104755; CTA
GLTNAIFVSF

SEQ ID NO: 4576 - protein, 10 aa, Homo sapiens
  Table A; Target 4576; HLA-A*24:02; ADAM2; ENSG00000104755; CTA
GLTNAIFVSF

SEQ ID NO: 4577 - protein, 10 aa, Homo sapiens
  Table A; Target 4577; HLA-A*25:01; ADAM2; ENSG00000104755; CTA
GLTNAIFVSF

SEQ ID NO: 4578 - protein, 10 aa, Homo sapiens
  Table A; Target 4578; HLA-A*29:02; ADAM2; ENSG00000104755; CTA
GLTNAIFVSF

SEQ ID NO: 4579 - protein, 10 aa, Homo sapiens
  Table A; Target 4579; HLA-B*15:01; ADAM2; ENSG00000104755; CTA
GLTNAIFVSF

SEQ ID NO: 4580 - protein, 10 aa, Homo sapiens
  Table A; Target 4580; HLA-B*15:03; ADAM2; ENSG00000104755; CTA
GLTNAIFVSF

SEQ ID NO: 4581 - protein, 10 aa, Homo sapiens
  Table A; Target 4581; HLA-C*07:01; ADAM2; ENSG00000104755; CTA
GNCGISDSGY

SEQ ID NO: 4582 - protein, 8 aa, Homo sapiens
  Table A; Target 4582; HLA-B*13:02; ADAM2; ENSG00000104755; CTA
GNFPPVAI

SEQ ID NO: 4583 - protein, 9 aa, Homo sapiens
  Table A; Target 4583; HLA-B*07:02; ADAM2; ENSG00000104755; CTA
GPSECYSHL

SEQ ID NO: 4584 - protein, 9 aa, Homo sapiens
  Table A; Target 4584; HLA-C*07:02; ADAM2; ENSG00000104755; CTA
GPSECYSHL

SEQ ID NO: 4585 - protein, 8 aa, Homo sapiens
  Table A; Target 4585; HLA-C*05:01; ADAM2; ENSG00000104755; CTA
GSDTTVVA

SEQ ID NO: 4586 - protein, 10 aa, Homo sapiens
  Table A; Target 4586; HLA-A*01:01; ADAM2; ENSG00000104755; CTA
GSDTTVVAQK

SEQ ID NO: 4587 - protein, 10 aa, Homo sapiens
  Table A; Target 4587; HLA-A*03:01; ADAM2; ENSG00000104755; CTA
GSDTTVVAQK

SEQ ID NO: 4588 - protein, 10 aa, Homo sapiens
  Table A; Target 4588; HLA-A*03:02; ADAM2; ENSG00000104755; CTA
GSDTTVVAQK

SEQ ID NO: 4589 - protein, 10 aa, Homo sapiens
  Table A; Target 4589; HLA-A*11:01; ADAM2; ENSG00000104755; CTA
GSDTTVVAQK

SEQ ID NO: 4590 - protein, 10 aa, Homo sapiens
  Table A; Target 4590; HLA-A*68:01; ADAM2; ENSG00000104755; CTA
GSDTTVVAQK

SEQ ID NO: 4591 - protein, 10 aa, Homo sapiens
  Table A; Target 4591; HLA-B*27:02; ADAM2; ENSG00000104755; CTA
GSDTTVVAQK

SEQ ID NO: 4592 - protein, 10 aa, Homo sapiens
  Table A; Target 4592; HLA-C*07:06; ADAM2; ENSG00000104755; CTA
GSDTTVVAQK

SEQ ID NO: 4593 - protein, 11 aa, Homo sapiens
  Table A; Target 4593; HLA-A*01:01; ADAM2; ENSG00000104755; CTA
GSDTTVVAQKV

SEQ ID NO: 4594 - protein, 11 aa, Homo sapiens
  Table A; Target 4594; HLA-C*06:02; ADAM2; ENSG00000104755; CTA
GSDTTVVAQKV

SEQ ID NO: 4595 - protein, 11 aa, Homo sapiens
  Table A; Target 4595; HLA-C*16:02; ADAM2; ENSG00000104755; CTA
GSDTTVVAQKV

SEQ ID NO: 4596 - protein, 10 aa, Homo sapiens
  Table A; Target 4596; HLA-A*11:01; ADAM2; ENSG00000104755; CTA
GSIDSGNFPP

SEQ ID NO: 4597 - protein, 11 aa, Homo sapiens
  Table A; Target 4597; HLA-A*11:01; ADAM2; ENSG00000104755; CTA
GSIDSGNFPPV

SEQ ID NO: 4598 - protein, 10 aa, Homo sapiens
  Table A; Target 4598; HLA-A*25:01; ADAM2; ENSG00000104755; CTA
GVLQFENVSY

SEQ ID NO: 4599 - protein, 10 aa, Homo sapiens
  Table A; Target 4599; HLA-A*26:01; ADAM2; ENSG00000104755; CTA
GVLQFENVSY

SEQ ID NO: 4600 - protein, 10 aa, Homo sapiens
  Table A; Target 4600; HLA-A*29:02; ADAM2; ENSG00000104755; CTA
GVLQFENVSY

SEQ ID NO: 4601 - protein, 10 aa, Homo sapiens
  Table A; Target 4601; HLA-A*30:02; ADAM2; ENSG00000104755; CTA
GVLQFENVSY

SEQ ID NO: 4602 - protein, 10 aa, Homo sapiens
  Table A; Target 4602; HLA-A*32:01; ADAM2; ENSG00000104755; CTA
GVLQFENVSY

SEQ ID NO: 4603 - protein, 10 aa, Homo sapiens
  Table A; Target 4603; HLA-B*15:01; ADAM2; ENSG00000104755; CTA
GVLQFENVSY

SEQ ID NO: 4604 - protein, 10 aa, Homo sapiens
  Table A; Target 4604; HLA-B*15:03; ADAM2; ENSG00000104755; CTA
GVLQFENVSY

SEQ ID NO: 4605 - protein, 10 aa, Homo sapiens
  Table A; Target 4605; HLA-B*27:02; ADAM2; ENSG00000104755; CTA
GVLQFENVSY

SEQ ID NO: 4606 - protein, 10 aa, Homo sapiens
  Table A; Target 4606; HLA-B*35:01; ADAM2; ENSG00000104755; CTA
GVLQFENVSY

SEQ ID NO: 4607 - protein, 10 aa, Homo sapiens
  Table A; Target 4607; HLA-B*39:01; ADAM2; ENSG00000104755; CTA
GVLQFENVSY

SEQ ID NO: 4608 - protein, 10 aa, Homo sapiens
  Table A; Target 4608; HLA-B*44:02; ADAM2; ENSG00000104755; CTA
GVLQFENVSY

SEQ ID NO: 4609 - protein, 10 aa, Homo sapiens
  Table A; Target 4609; HLA-B*44:03; ADAM2; ENSG00000104755; CTA
GVLQFENVSY

SEQ ID NO: 4610 - protein, 10 aa, Homo sapiens
  Table A; Target 4610; HLA-B*46:01; ADAM2; ENSG00000104755; CTA
GVLQFENVSY

SEQ ID NO: 4611 - protein, 10 aa, Homo sapiens
  Table A; Target 4611; HLA-B*57:01; ADAM2; ENSG00000104755; CTA
GVLQFENVSY

SEQ ID NO: 4612 - protein, 10 aa, Homo sapiens
  Table A; Target 4612; HLA-C*02:02; ADAM2; ENSG00000104755; CTA
GVLQFENVSY

SEQ ID NO: 4613 - protein, 10 aa, Homo sapiens
  Table A; Target 4613; HLA-C*04:01; ADAM2; ENSG00000104755; CTA
GVLQFENVSY

SEQ ID NO: 4614 - protein, 10 aa, Homo sapiens
  Table A; Target 4614; HLA-C*07:01; ADAM2; ENSG00000104755; CTA
GVLQFENVSY

SEQ ID NO: 4615 - protein, 10 aa, Homo sapiens
  Table A; Target 4615; HLA-C*07:04; ADAM2; ENSG00000104755; CTA
GVLQFENVSY

SEQ ID NO: 4616 - protein, 10 aa, Homo sapiens
  Table A; Target 4616; HLA-C*16:04; ADAM2; ENSG00000104755; CTA
GVLQFENVSY

SEQ ID NO: 4617 - protein, 9 aa, Homo sapiens
  Table A; Target 4617; HLA-A*02:03; ADAM2; ENSG00000104755; CTA
GVVLHPRTI

SEQ ID NO: 4618 - protein, 9 aa, Homo sapiens
  Table A; Target 4618; HLA-B*13:02; ADAM2; ENSG00000104755; CTA
GVVLHPRTI

SEQ ID NO: 4619 - protein, 8 aa, Homo sapiens
  Table A; Target 4619; HLA-A*33:03; ADAM2; ENSG00000104755; CTA
GYIEGYPK

SEQ ID NO: 4620 - protein, 10 aa, Homo sapiens
  Table A; Target 4620; HLA-C*14:02; ADAM2; ENSG00000104755; CTA
GYIEGYPKSV

SEQ ID NO: 4621 - protein, 9 aa, Homo sapiens
  Table A; Target 4621; HLA-A*24:02; ADAM2; ENSG00000104755; CTA
GYPKSVVMV

SEQ ID NO: 4622 - protein, 9 aa, Homo sapiens
  Table A; Target 4622; HLA-B*51:01; ADAM2; ENSG00000104755; CTA
HADSQKMWI

SEQ ID NO: 4623 - protein, 9 aa, Homo sapiens
  Table A; Target 4623; HLA-A*29:02; ADAM2; ENSG00000104755; CTA
HDVAFLLVY

SEQ ID NO: 4624 - protein, 9 aa, Homo sapiens
  Table A; Target 4624; HLA-B*44:03; ADAM2; ENSG00000104755; CTA
HDVAFLLVY

SEQ ID NO: 4625 - protein, 9 aa, Homo sapiens
  Table A; Target 4625; HLA-B*15:03; ADAM2; ENSG00000104755; CTA
HKKADVSLY

SEQ ID NO: 4626 - protein, 9 aa, Homo sapiens
  Table A; Target 4626; HLA-C*07:01; ADAM2; ENSG00000104755; CTA
HKKADVSLY

SEQ ID NO: 4627 - protein, 8 aa, Homo sapiens
  Table A; Target 4627; HLA-C*07:01; ADAM2; ENSG00000104755; CTA
HLCIAVEF

SEQ ID NO: 4628 - protein, 8 aa, Homo sapiens
  Table A; Target 4628; HLA-B*08:01; ADAM2; ENSG00000104755; CTA
HLNSKTDV

SEQ ID NO: 4629 - protein, 9 aa, Homo sapiens
  Table A; Target 4629; HLA-A*02:01; ADAM2; ENSG00000104755; CTA
HMGSDTTVV

SEQ ID NO: 4630 - protein, 9 aa, Homo sapiens
  Table A; Target 4630; HLA-A*02:03; ADAM2; ENSG00000104755; CTA
HMGSDTTVV

SEQ ID NO: 4631 - protein, 9 aa, Homo sapiens
  Table A; Target 4631; HLA-B*13:02; ADAM2; ENSG00000104755; CTA
HMGSDTTVV

SEQ ID NO: 4632 - protein, 9 aa, Homo sapiens
  Table A; Target 4632; HLA-B*35:03; ADAM2; ENSG00000104755; CTA
HMGSDTTVV

SEQ ID NO: 4633 - protein, 9 aa, Homo sapiens
  Table A; Target 4633; HLA-B*55:01; ADAM2; ENSG00000104755; CTA
HMGSDTTVV

SEQ ID NO: 4634 - protein, 9 aa, Homo sapiens
  Table A; Target 4634; HLA-A*33:01; ADAM2; ENSG00000104755; CTA
HNQPRLDPF

SEQ ID NO: 4635 - protein, 10 aa, Homo sapiens
  Table A; Target 4635; HLA-B*07:02; ADAM2; ENSG00000104755; CTA
HPRTISLESL

SEQ ID NO: 4636 - protein, 10 aa, Homo sapiens
  Table A; Target 4636; HLA-C*07:02; ADAM2; ENSG00000104755; CTA
HPRTISLESL

SEQ ID NO: 4637 - protein, 8 aa, Homo sapiens
  Table A; Target 4637; HLA-B*08:01; ADAM2; ENSG00000104755; CTA
HVIVEKQL

SEQ ID NO: 4638 - protein, 9 aa, Homo sapiens
  Table A; Target 4638; HLA-A*01:01; ADAM2; ENSG00000104755; CTA
HVIVEKQLY

SEQ ID NO: 4639 - protein, 9 aa, Homo sapiens
  Table A; Target 4639; HLA-A*25:01; ADAM2; ENSG00000104755; CTA
HVIVEKQLY

SEQ ID NO: 4640 - protein, 9 aa, Homo sapiens
  Table A; Target 4640; HLA-A*26:01; ADAM2; ENSG00000104755; CTA
HVIVEKQLY

SEQ ID NO: 4641 - protein, 9 aa, Homo sapiens
  Table A; Target 4641; HLA-A*29:02; ADAM2; ENSG00000104755; CTA
HVIVEKQLY

SEQ ID NO: 4642 - protein, 9 aa, Homo sapiens
  Table A; Target 4642; HLA-A*30:02; ADAM2; ENSG00000104755; CTA
HVIVEKQLY

SEQ ID NO: 4643 - protein, 9 aa, Homo sapiens
  Table A; Target 4643; HLA-A*32:01; ADAM2; ENSG00000104755; CTA
HVIVEKQLY

SEQ ID NO: 4644 - protein, 9 aa, Homo sapiens
  Table A; Target 4644; HLA-B*15:01; ADAM2; ENSG00000104755; CTA
HVIVEKQLY

SEQ ID NO: 4645 - protein, 9 aa, Homo sapiens
  Table A; Target 4645; HLA-B*15:03; ADAM2; ENSG00000104755; CTA
HVIVEKQLY

SEQ ID NO: 4646 - protein, 9 aa, Homo sapiens
  Table A; Target 4646; HLA-B*18:01; ADAM2; ENSG00000104755; CTA
HVIVEKQLY

SEQ ID NO: 4647 - protein, 9 aa, Homo sapiens
  Table A; Target 4647; HLA-B*35:01; ADAM2; ENSG00000104755; CTA
HVIVEKQLY

SEQ ID NO: 4648 - protein, 9 aa, Homo sapiens
  Table A; Target 4648; HLA-B*44:02; ADAM2; ENSG00000104755; CTA
HVIVEKQLY

SEQ ID NO: 4649 - protein, 9 aa, Homo sapiens
  Table A; Target 4649; HLA-B*44:03; ADAM2; ENSG00000104755; CTA
HVIVEKQLY

SEQ ID NO: 4650 - protein, 9 aa, Homo sapiens
  Table A; Target 4650; HLA-B*46:01; ADAM2; ENSG00000104755; CTA
HVIVEKQLY

SEQ ID NO: 4651 - protein, 9 aa, Homo sapiens
  Table A; Target 4651; HLA-B*55:01; ADAM2; ENSG00000104755; CTA
HVIVEKQLY

SEQ ID NO: 4652 - protein, 9 aa, Homo sapiens
  Table A; Target 4652; HLA-B*57:01; ADAM2; ENSG00000104755; CTA
HVIVEKQLY

SEQ ID NO: 4653 - protein, 9 aa, Homo sapiens
  Table A; Target 4653; HLA-B*58:01; ADAM2; ENSG00000104755; CTA
HVIVEKQLY

SEQ ID NO: 4654 - protein, 9 aa, Homo sapiens
  Table A; Target 4654; HLA-C*02:02; ADAM2; ENSG00000104755; CTA
HVIVEKQLY

SEQ ID NO: 4655 - protein, 9 aa, Homo sapiens
  Table A; Target 4655; HLA-C*03:03; ADAM2; ENSG00000104755; CTA
HVIVEKQLY

SEQ ID NO: 4656 - protein, 9 aa, Homo sapiens
  Table A; Target 4656; HLA-C*07:04; ADAM2; ENSG00000104755; CTA
HVIVEKQLY

SEQ ID NO: 4657 - protein, 9 aa, Homo sapiens
  Table A; Target 4657; HLA-A*03:01; ADAM2; ENSG00000104755; CTA
HVIYQVKHK

SEQ ID NO: 4658 - protein, 9 aa, Homo sapiens
  Table A; Target 4658; HLA-A*03:02; ADAM2; ENSG00000104755; CTA
HVIYQVKHK

SEQ ID NO: 4659 - protein, 9 aa, Homo sapiens
  Table A; Target 4659; HLA-A*11:01; ADAM2; ENSG00000104755; CTA
HVIYQVKHK

SEQ ID NO: 4660 - protein, 9 aa, Homo sapiens
  Table A; Target 4660; HLA-A*68:01; ADAM2; ENSG00000104755; CTA
HVIYQVKHK

SEQ ID NO: 4661 - protein, 9 aa, Homo sapiens
  Table A; Target 4661; HLA-A*29:02; ADAM2; ENSG00000104755; CTA
HYQGYIEGY

SEQ ID NO: 4662 - protein, 9 aa, Homo sapiens
  Table A; Target 4662; HLA-A*30:02; ADAM2; ENSG00000104755; CTA
HYQGYIEGY

SEQ ID NO: 4663 - protein, 9 aa, Homo sapiens
  Table A; Target 4663; HLA-C*07:04; ADAM2; ENSG00000104755; CTA
HYQGYIEGY

SEQ ID NO: 4664 - protein, 9 aa, Homo sapiens
  Table A; Target 4664; HLA-C*14:02; ADAM2; ENSG00000104755; CTA
HYQGYIEGY

SEQ ID NO: 4665 - protein, 9 aa, Homo sapiens
  Table A; Target 4665; HLA-A*23:01; ADAM2; ENSG00000104755; CTA
IAIMVKVNF

SEQ ID NO: 4666 - protein, 9 aa, Homo sapiens
  Table A; Target 4666; HLA-A*24:02; ADAM2; ENSG00000104755; CTA
IAIMVKVNF

SEQ ID NO: 4667 - protein, 9 aa, Homo sapiens
  Table A; Target 4667; HLA-A*32:01; ADAM2; ENSG00000104755; CTA
IAIMVKVNF

SEQ ID NO: 4668 - protein, 9 aa, Homo sapiens
  Table A; Target 4668; HLA-B*15:01; ADAM2; ENSG00000104755; CTA
IAIMVKVNF

SEQ ID NO: 4669 - protein, 9 aa, Homo sapiens
  Table A; Target 4669; HLA-B*15:03; ADAM2; ENSG00000104755; CTA
IAIMVKVNF

SEQ ID NO: 4670 - protein, 9 aa, Homo sapiens
  Table A; Target 4670; HLA-B*35:01; ADAM2; ENSG00000104755; CTA
IAIMVKVNF

SEQ ID NO: 4671 - protein, 9 aa, Homo sapiens
  Table A; Target 4671; HLA-B*38:01; ADAM2; ENSG00000104755; CTA
IAIMVKVNF

SEQ ID NO: 4672 - protein, 9 aa, Homo sapiens
  Table A; Target 4672; HLA-B*46:01; ADAM2; ENSG00000104755; CTA
IAIMVKVNF

SEQ ID NO: 4673 - protein, 9 aa, Homo sapiens
  Table A; Target 4673; HLA-B*57:01; ADAM2; ENSG00000104755; CTA
IAIMVKVNF

SEQ ID NO: 4674 - protein, 9 aa, Homo sapiens
  Table A; Target 4674; HLA-B*58:01; ADAM2; ENSG00000104755; CTA
IAIMVKVNF

SEQ ID NO: 4675 - protein, 9 aa, Homo sapiens
  Table A; Target 4675; HLA-C*02:02; ADAM2; ENSG00000104755; CTA
IAIMVKVNF

SEQ ID NO: 4676 - protein, 9 aa, Homo sapiens
  Table A; Target 4676; HLA-C*03:03; ADAM2; ENSG00000104755; CTA
IAIMVKVNF

SEQ ID NO: 4677 - protein, 9 aa, Homo sapiens
  Table A; Target 4677; HLA-C*03:04; ADAM2; ENSG00000104755; CTA
IAIMVKVNF

SEQ ID NO: 4678 - protein, 9 aa, Homo sapiens
  Table A; Target 4678; HLA-C*07:06; ADAM2; ENSG00000104755; CTA
IAIMVKVNF

SEQ ID NO: 4679 - protein, 9 aa, Homo sapiens
  Table A; Target 4679; HLA-C*12:03; ADAM2; ENSG00000104755; CTA
IAIMVKVNF

SEQ ID NO: 4680 - protein, 9 aa, Homo sapiens
  Table A; Target 4680; HLA-C*16:01; ADAM2; ENSG00000104755; CTA
IAIMVKVNF

SEQ ID NO: 4681 - protein, 9 aa, Homo sapiens
  Table A; Target 4681; HLA-C*16:02; ADAM2; ENSG00000104755; CTA
IAIMVKVNF

SEQ ID NO: 4682 - protein, 9 aa, Homo sapiens
  Table A; Target 4682; HLA-C*16:04; ADAM2; ENSG00000104755; CTA
IAIMVKVNF

SEQ ID NO: 4683 - protein, 10 aa, Homo sapiens
  Table A; Target 4683; HLA-B*35:03; ADAM2; ENSG00000104755; CTA
IATTGEANEL

SEQ ID NO: 4684 - protein, 10 aa, Homo sapiens
  Table A; Target 4684; HLA-B*38:01; ADAM2; ENSG00000104755; CTA
IATTGEANEL

SEQ ID NO: 4685 - protein, 10 aa, Homo sapiens
  Table A; Target 4685; HLA-B*39:01; ADAM2; ENSG00000104755; CTA
IATTGEANEL

SEQ ID NO: 4686 - protein, 10 aa, Homo sapiens
  Table A; Target 4686; HLA-B*40:01; ADAM2; ENSG00000104755; CTA
IATTGEANEL

SEQ ID NO: 4687 - protein, 10 aa, Homo sapiens
  Table A; Target 4687; HLA-C*03:03; ADAM2; ENSG00000104755; CTA
IATTGEANEL

SEQ ID NO: 4688 - protein, 10 aa, Homo sapiens
  Table A; Target 4688; HLA-C*03:04; ADAM2; ENSG00000104755; CTA
IATTGEANEL

SEQ ID NO: 4689 - protein, 10 aa, Homo sapiens
  Table A; Target 4689; HLA-C*16:01; ADAM2; ENSG00000104755; CTA
IATTGEANEL

SEQ ID NO: 4690 - protein, 10 aa, Homo sapiens
  Table A; Target 4690; HLA-C*16:02; ADAM2; ENSG00000104755; CTA
IATTGEANEL

SEQ ID NO: 4691 - protein, 8 aa, Homo sapiens
  Table A; Target 4691; HLA-C*07:04; ADAM2; ENSG00000104755; CTA
IDENKIAT

SEQ ID NO: 4692 - protein, 9 aa, Homo sapiens
  Table A; Target 4692; HLA-B*37:01; ADAM2; ENSG00000104755; CTA
IDSGNFPPV

SEQ ID NO: 4693 - protein, 9 aa, Homo sapiens
  Table A; Target 4693; HLA-C*04:01; ADAM2; ENSG00000104755; CTA
IDSGNFPPV

SEQ ID NO: 4694 - protein, 8 aa, Homo sapiens
  Table A; Target 4694; HLA-A*30:01; ADAM2; ENSG00000104755; CTA
IEGKPYTV

SEQ ID NO: 4695 - protein, 8 aa, Homo sapiens
  Table A; Target 4695; HLA-B*13:02; ADAM2; ENSG00000104755; CTA
IEGKPYTV

SEQ ID NO: 4696 - protein, 8 aa, Homo sapiens
  Table A; Target 4696; HLA-B*18:01; ADAM2; ENSG00000104755; CTA
IEGKPYTV

SEQ ID NO: 4697 - protein, 8 aa, Homo sapiens
  Table A; Target 4697; HLA-B*37:01; ADAM2; ENSG00000104755; CTA
IEGKPYTV

SEQ ID NO: 4698 - protein, 8 aa, Homo sapiens
  Table A; Target 4698; HLA-B*40:01; ADAM2; ENSG00000104755; CTA
IEGKPYTV

SEQ ID NO: 4699 - protein, 8 aa, Homo sapiens
  Table A; Target 4699; HLA-B*40:02; ADAM2; ENSG00000104755; CTA
IEGKPYTV

SEQ ID NO: 4700 - protein, 8 aa, Homo sapiens
  Table A; Target 4700; HLA-B*49:01; ADAM2; ENSG00000104755; CTA
IEGKPYTV

SEQ ID NO: 4701 - protein, 8 aa, Homo sapiens
  Table A; Target 4701; HLA-C*06:02; ADAM2; ENSG00000104755; CTA
IEGKPYTV

SEQ ID NO: 4702 - protein, 8 aa, Homo sapiens
  Table A; Target 4702; HLA-C*16:04; ADAM2; ENSG00000104755; CTA
IEGKPYTV

SEQ ID NO: 4703 - protein, 10 aa, Homo sapiens
  Table A; Target 4703; HLA-A*30:01; ADAM2; ENSG00000104755; CTA
IEGKPYTVNL

SEQ ID NO: 4704 - protein, 10 aa, Homo sapiens
  Table A; Target 4704; HLA-B*40:01; ADAM2; ENSG00000104755; CTA
IEGKPYTVNL

SEQ ID NO: 4705 - protein, 8 aa, Homo sapiens
  Table A; Target 4705; HLA-A*30:01; ADAM2; ENSG00000104755; CTA
IEGYPKSV

SEQ ID NO: 4706 - protein, 8 aa, Homo sapiens
  Table A; Target 4706; HLA-B*18:01; ADAM2; ENSG00000104755; CTA
IEGYPKSV

SEQ ID NO: 4707 - protein, 8 aa, Homo sapiens
  Table A; Target 4707; HLA-B*49:01; ADAM2; ENSG00000104755; CTA
IEGYPKSV

SEQ ID NO: 4708 - protein, 8 aa, Homo sapiens
  Table A; Target 4708; HLA-C*12:03; ADAM2; ENSG00000104755; CTA
IEGYPKSV

SEQ ID NO: 4709 - protein, 8 aa, Homo sapiens
  Table A; Target 4709; HLA-C*16:02; ADAM2; ENSG00000104755; CTA
IEGYPKSV

SEQ ID NO: 4710 - protein, 9 aa, Homo sapiens
  Table A; Target 4710; HLA-A*30:01; ADAM2; ENSG00000104755; CTA
IEGYPKSVV

SEQ ID NO: 4711 - protein, 9 aa, Homo sapiens
  Table A; Target 4711; HLA-B*18:01; ADAM2; ENSG00000104755; CTA
IEGYPKSVV

SEQ ID NO: 4712 - protein, 9 aa, Homo sapiens
  Table A; Target 4712; HLA-B*40:01; ADAM2; ENSG00000104755; CTA
IEGYPKSVV

SEQ ID NO: 4713 - protein, 9 aa, Homo sapiens
  Table A; Target 4713; HLA-B*40:02; ADAM2; ENSG00000104755; CTA
IEGYPKSVV

SEQ ID NO: 4714 - protein, 9 aa, Homo sapiens
  Table A; Target 4714; HLA-B*44:02; ADAM2; ENSG00000104755; CTA
IEGYPKSVV

SEQ ID NO: 4715 - protein, 9 aa, Homo sapiens
  Table A; Target 4715; HLA-B*44:03; ADAM2; ENSG00000104755; CTA
IEGYPKSVV

SEQ ID NO: 4716 - protein, 9 aa, Homo sapiens
  Table A; Target 4716; HLA-B*49:01; ADAM2; ENSG00000104755; CTA
IEGYPKSVV

SEQ ID NO: 4717 - protein, 10 aa, Homo sapiens
  Table A; Target 4717; HLA-A*30:01; ADAM2; ENSG00000104755; CTA
IEGYPKSVVM

SEQ ID NO: 4718 - protein, 10 aa, Homo sapiens
  Table A; Target 4718; HLA-B*40:01; ADAM2; ENSG00000104755; CTA
IEGYPKSVVM

SEQ ID NO: 4719 - protein, 9 aa, Homo sapiens
  Table A; Target 4719; HLA-A*03:02; ADAM2; ENSG00000104755; CTA
IEMHVIVEK

SEQ ID NO: 4720 - protein, 9 aa, Homo sapiens
  Table A; Target 4720; HLA-A*11:01; ADAM2; ENSG00000104755; CTA
IEMHVIVEK

SEQ ID NO: 4721 - protein, 9 aa, Homo sapiens
  Table A; Target 4721; HLA-B*18:01; ADAM2; ENSG00000104755; CTA
IEMHVIVEK

SEQ ID NO: 4722 - protein, 9 aa, Homo sapiens
  Table A; Target 4722; HLA-B*57:01; ADAM2; ENSG00000104755; CTA
IEMHVIVEK

SEQ ID NO: 4723 - protein, 11 aa, Homo sapiens
  Table A; Target 4723; HLA-B*44:02; ADAM2; ENSG00000104755; CTA
IEMHVIVEKQL

SEQ ID NO: 4724 - protein, 11 aa, Homo sapiens
  Table A; Target 4724; HLA-B*44:03; ADAM2; ENSG00000104755; CTA
IEMHVIVEKQL

SEQ ID NO: 4725 - protein, 8 aa, Homo sapiens
  Table A; Target 4725; HLA-B*18:01; ADAM2; ENSG00000104755; CTA
IENIYHSK

SEQ ID NO: 4726 - protein, 8 aa, Homo sapiens
  Table A; Target 4726; HLA-B*37:01; ADAM2; ENSG00000104755; CTA
IENIYHSK

SEQ ID NO: 4727 - protein, 8 aa, Homo sapiens
  Table A; Target 4727; HLA-B*49:01; ADAM2; ENSG00000104755; CTA
IEPLESSV

SEQ ID NO: 4728 - protein, 10 aa, Homo sapiens
  Table A; Target 4728; HLA-A*30:01; ADAM2; ENSG00000104755; CTA
IEPLESSVGF

SEQ ID NO: 4729 - protein, 10 aa, Homo sapiens
  Table A; Target 4729; HLA-B*18:01; ADAM2; ENSG00000104755; CTA
IEPLESSVGF

SEQ ID NO: 4730 - protein, 10 aa, Homo sapiens
  Table A; Target 4730; HLA-B*37:01; ADAM2; ENSG00000104755; CTA
IEPLESSVGF

SEQ ID NO: 4731 - protein, 10 aa, Homo sapiens
  Table A; Target 4731; HLA-B*40:01; ADAM2; ENSG00000104755; CTA
IEPLESSVGF

SEQ ID NO: 4732 - protein, 10 aa, Homo sapiens
  Table A; Target 4732; HLA-B*44:02; ADAM2; ENSG00000104755; CTA
IEPLESSVGF

SEQ ID NO: 4733 - protein, 10 aa, Homo sapiens
  Table A; Target 4733; HLA-B*44:03; ADAM2; ENSG00000104755; CTA
IEPLESSVGF

SEQ ID NO: 4734 - protein, 9 aa, Homo sapiens
  Table A; Target 4734; HLA-A*30:01; ADAM2; ENSG00000104755; CTA
IESQASYKI

SEQ ID NO: 4735 - protein, 9 aa, Homo sapiens
  Table A; Target 4735; HLA-B*13:02; ADAM2; ENSG00000104755; CTA
IESQASYKI

SEQ ID NO: 4736 - protein, 9 aa, Homo sapiens
  Table A; Target 4736; HLA-B*37:01; ADAM2; ENSG00000104755; CTA
IESQASYKI

SEQ ID NO: 4737 - protein, 9 aa, Homo sapiens
  Table A; Target 4737; HLA-B*38:01; ADAM2; ENSG00000104755; CTA
IESQASYKI

SEQ ID NO: 4738 - protein, 9 aa, Homo sapiens
  Table A; Target 4738; HLA-B*40:01; ADAM2; ENSG00000104755; CTA
IESQASYKI

SEQ ID NO: 4739 - protein, 9 aa, Homo sapiens
  Table A; Target 4739; HLA-B*40:02; ADAM2; ENSG00000104755; CTA
IESQASYKI

SEQ ID NO: 4740 - protein, 9 aa, Homo sapiens
  Table A; Target 4740; HLA-B*44:02; ADAM2; ENSG00000104755; CTA
IESQASYKI

SEQ ID NO: 4741 - protein, 9 aa, Homo sapiens
  Table A; Target 4741; HLA-B*44:03; ADAM2; ENSG00000104755; CTA
IESQASYKI

SEQ ID NO: 4742 - protein, 9 aa, Homo sapiens
  Table A; Target 4742; HLA-C*16:04; ADAM2; ENSG00000104755; CTA
IESQASYKI

SEQ ID NO: 4743 - protein, 10 aa, Homo sapiens
  Table A; Target 4743; HLA-B*49:01; ADAM2; ENSG00000104755; CTA
IESQASYKIV

SEQ ID NO: 4744 - protein, 11 aa, Homo sapiens
  Table A; Target 4744; HLA-B*49:01; ADAM2; ENSG00000104755; CTA
IESQASYKIVI

SEQ ID NO: 4745 - protein, 8 aa, Homo sapiens
  Table A; Target 4745; HLA-B*18:01; ADAM2; ENSG00000104755; CTA
IESRDLSF

SEQ ID NO: 4746 - protein, 8 aa, Homo sapiens
  Table A; Target 4746; HLA-B*37:01; ADAM2; ENSG00000104755; CTA
IESRDLSF

SEQ ID NO: 4747 - protein, 10 aa, Homo sapiens
  Table A; Target 4747; HLA-B*40:01; ADAM2; ENSG00000104755; CTA
IESRDLSFKL

SEQ ID NO: 4748 - protein, 9 aa, Homo sapiens
  Table A; Target 4748; HLA-A*23:01; ADAM2; ENSG00000104755; CTA
IFVSFNITI

SEQ ID NO: 4749 - protein, 9 aa, Homo sapiens
  Table A; Target 4749; HLA-A*24:02; ADAM2; ENSG00000104755; CTA
IFVSFNITI

SEQ ID NO: 4750 - protein, 11 aa, Homo sapiens
  Table A; Target 4750; HLA-A*23:01; ADAM2; ENSG00000104755; CTA
IGLTNAIFVSF

SEQ ID NO: 4751 - protein, 11 aa, Homo sapiens
  Table A; Target 4751; HLA-A*24:02; ADAM2; ENSG00000104755; CTA
IGLTNAIFVSF

SEQ ID NO: 4752 - protein, 11 aa, Homo sapiens
  Table A; Target 4752; HLA-B*57:01; ADAM2; ENSG00000104755; CTA
IGLTNAIFVSF

SEQ ID NO: 4753 - protein, 8 aa, Homo sapiens
  Table A; Target 4753; HLA-B*38:01; ADAM2; ENSG00000104755; CTA
IHFSGVKI

SEQ ID NO: 4754 - protein, 9 aa, Homo sapiens
  Table A; Target 4754; HLA-B*46:01; ADAM2; ENSG00000104755; CTA
IIKEGIESQ

SEQ ID NO: 4755 - protein, 9 aa, Homo sapiens
  Table A; Target 4755; HLA-C*01:02; ADAM2; ENSG00000104755; CTA
IIKEGIESQ

SEQ ID NO: 4756 - protein, 10 aa, Homo sapiens
  Table A; Target 4756; HLA-A*02:03; ADAM2; ENSG00000104755; CTA
IIKEGIESQA

SEQ ID NO: 4757 - protein, 9 aa, Homo sapiens
  Table A; Target 4757; HLA-B*57:01; ADAM2; ENSG00000104755; CTA
IILSSLELW

SEQ ID NO: 4758 - protein, 9 aa, Homo sapiens
  Table A; Target 4758; HLA-A*03:01; ADAM2; ENSG00000104755; CTA
IIYANISGH

SEQ ID NO: 4759 - protein, 11 aa, Homo sapiens
  Table A; Target 4759; HLA-B*15:03; ADAM2; ENSG00000104755; CTA
IKEGIESQASY

SEQ ID NO: 4760 - protein, 8 aa, Homo sapiens
  Table A; Target 4760; HLA-A*23:01; ADAM2; ENSG00000104755; CTA
ILAQLLSL

SEQ ID NO: 4761 - protein, 9 aa, Homo sapiens
  Table A; Target 4761; HLA-A*23:01; ADAM2; ENSG00000104755; CTA
IMKPLDQDF

SEQ ID NO: 4762 - protein, 9 aa, Homo sapiens
  Table A; Target 4762; HLA-A*29:02; ADAM2; ENSG00000104755; CTA
IMKPLDQDF

SEQ ID NO: 4763 - protein, 9 aa, Homo sapiens
  Table A; Target 4763; HLA-A*30:02; ADAM2; ENSG00000104755; CTA
IMKPLDQDF

SEQ ID NO: 4764 - protein, 9 aa, Homo sapiens
  Table A; Target 4764; HLA-A*32:01; ADAM2; ENSG00000104755; CTA
IMKPLDQDF

SEQ ID NO: 4765 - protein, 9 aa, Homo sapiens
  Table A; Target 4765; HLA-B*15:01; ADAM2; ENSG00000104755; CTA
IMKPLDQDF

SEQ ID NO: 4766 - protein, 9 aa, Homo sapiens
  Table A; Target 4766; HLA-B*15:03; ADAM2; ENSG00000104755; CTA
IMKPLDQDF

SEQ ID NO: 4767 - protein, 9 aa, Homo sapiens
  Table A; Target 4767; HLA-B*46:01; ADAM2; ENSG00000104755; CTA
IMKPLDQDF

SEQ ID NO: 4768 - protein, 9 aa, Homo sapiens
  Table A; Target 4768; HLA-B*57:01; ADAM2; ENSG00000104755; CTA
IMKPLDQDF

SEQ ID NO: 4769 - protein, 9 aa, Homo sapiens
  Table A; Target 4769; HLA-B*58:01; ADAM2; ENSG00000104755; CTA
IMKPLDQDF

SEQ ID NO: 4770 - protein, 9 aa, Homo sapiens
  Table A; Target 4770; HLA-C*07:04; ADAM2; ENSG00000104755; CTA
IMKPLDQDF

SEQ ID NO: 4771 - protein, 9 aa, Homo sapiens
  Table A; Target 4771; HLA-A*02:04; ADAM2; ENSG00000104755; CTA
IMNPEAIHF

SEQ ID NO: 4772 - protein, 9 aa, Homo sapiens
  Table A; Target 4772; HLA-A*02:07; ADAM2; ENSG00000104755; CTA
IMNPEAIHF

SEQ ID NO: 4773 - protein, 9 aa, Homo sapiens
  Table A; Target 4773; HLA-A*03:01; ADAM2; ENSG00000104755; CTA
IMNPEAIHF

SEQ ID NO: 4774 - protein, 9 aa, Homo sapiens
  Table A; Target 4774; HLA-A*03:02; ADAM2; ENSG00000104755; CTA
IMNPEAIHF

SEQ ID NO: 4775 - protein, 9 aa, Homo sapiens
  Table A; Target 4775; HLA-A*23:01; ADAM2; ENSG00000104755; CTA
IMNPEAIHF

SEQ ID NO: 4776 - protein, 9 aa, Homo sapiens
  Table A; Target 4776; HLA-A*24:02; ADAM2; ENSG00000104755; CTA
IMNPEAIHF

SEQ ID NO: 4777 - protein, 9 aa, Homo sapiens
  Table A; Target 4777; HLA-A*29:02; ADAM2; ENSG00000104755; CTA
IMNPEAIHF

SEQ ID NO: 4778 - protein, 9 aa, Homo sapiens
  Table A; Target 4778; HLA-A*30:02; ADAM2; ENSG00000104755; CTA
IMNPEAIHF

SEQ ID NO: 4779 - protein, 9 aa, Homo sapiens
  Table A; Target 4779; HLA-A*31:01; ADAM2; ENSG00000104755; CTA
IMNPEAIHF

SEQ ID NO: 4780 - protein, 9 aa, Homo sapiens
  Table A; Target 4780; HLA-A*32:01; ADAM2; ENSG00000104755; CTA
IMNPEAIHF

SEQ ID NO: 4781 - protein, 9 aa, Homo sapiens
  Table A; Target 4781; HLA-A*33:01; ADAM2; ENSG00000104755; CTA
IMNPEAIHF

SEQ ID NO: 4782 - protein, 9 aa, Homo sapiens
  Table A; Target 4782; HLA-B*15:01; ADAM2; ENSG00000104755; CTA
IMNPEAIHF

SEQ ID NO: 4783 - protein, 9 aa, Homo sapiens
  Table A; Target 4783; HLA-B*15:03; ADAM2; ENSG00000104755; CTA
IMNPEAIHF

SEQ ID NO: 4784 - protein, 9 aa, Homo sapiens
  Table A; Target 4784; HLA-B*27:05; ADAM2; ENSG00000104755; CTA
IMNPEAIHF

SEQ ID NO: 4785 - protein, 9 aa, Homo sapiens
  Table A; Target 4785; HLA-B*35:01; ADAM2; ENSG00000104755; CTA
IMNPEAIHF

SEQ ID NO: 4786 - protein, 9 aa, Homo sapiens
  Table A; Target 4786; HLA-B*37:01; ADAM2; ENSG00000104755; CTA
IMNPEAIHF

SEQ ID NO: 4787 - protein, 9 aa, Homo sapiens
  Table A; Target 4787; HLA-B*38:01; ADAM2; ENSG00000104755; CTA
IMNPEAIHF

SEQ ID NO: 4788 - protein, 9 aa, Homo sapiens
  Table A; Target 4788; HLA-B*46:01; ADAM2; ENSG00000104755; CTA
IMNPEAIHF

SEQ ID NO: 4789 - protein, 9 aa, Homo sapiens
  Table A; Target 4789; HLA-B*55:01; ADAM2; ENSG00000104755; CTA
IMNPEAIHF

SEQ ID NO: 4790 - protein, 9 aa, Homo sapiens
  Table A; Target 4790; HLA-B*57:01; ADAM2; ENSG00000104755; CTA
IMNPEAIHF

SEQ ID NO: 4791 - protein, 9 aa, Homo sapiens
  Table A; Target 4791; HLA-B*58:01; ADAM2; ENSG00000104755; CTA
IMNPEAIHF

SEQ ID NO: 4792 - protein, 9 aa, Homo sapiens
  Table A; Target 4792; HLA-C*01:02; ADAM2; ENSG00000104755; CTA
IMNPEAIHF

SEQ ID NO: 4793 - protein, 9 aa, Homo sapiens
  Table A; Target 4793; HLA-C*02:02; ADAM2; ENSG00000104755; CTA
IMNPEAIHF

SEQ ID NO: 4794 - protein, 9 aa, Homo sapiens
  Table A; Target 4794; HLA-C*03:03; ADAM2; ENSG00000104755; CTA
IMNPEAIHF

SEQ ID NO: 4795 - protein, 9 aa, Homo sapiens
  Table A; Target 4795; HLA-C*03:04; ADAM2; ENSG00000104755; CTA
IMNPEAIHF

SEQ ID NO: 4796 - protein, 9 aa, Homo sapiens
  Table A; Target 4796; HLA-C*04:01; ADAM2; ENSG00000104755; CTA
IMNPEAIHF

SEQ ID NO: 4797 - protein, 9 aa, Homo sapiens
  Table A; Target 4797; HLA-C*05:01; ADAM2; ENSG00000104755; CTA
IMNPEAIHF

SEQ ID NO: 4798 - protein, 9 aa, Homo sapiens
  Table A; Target 4798; HLA-C*07:04; ADAM2; ENSG00000104755; CTA
IMNPEAIHF

SEQ ID NO: 4799 - protein, 9 aa, Homo sapiens
  Table A; Target 4799; HLA-C*12:03; ADAM2; ENSG00000104755; CTA
IMNPEAIHF

SEQ ID NO: 4800 - protein, 9 aa, Homo sapiens
  Table A; Target 4800; HLA-C*14:02; ADAM2; ENSG00000104755; CTA
IMNPEAIHF

SEQ ID NO: 4801 - protein, 9 aa, Homo sapiens
  Table A; Target 4801; HLA-C*16:01; ADAM2; ENSG00000104755; CTA
IMNPEAIHF

SEQ ID NO: 4802 - protein, 9 aa, Homo sapiens
  Table A; Target 4802; HLA-C*16:02; ADAM2; ENSG00000104755; CTA
IMNPEAIHF

SEQ ID NO: 4803 - protein, 9 aa, Homo sapiens
  Table A; Target 4803; HLA-C*16:04; ADAM2; ENSG00000104755; CTA
IMNPEAIHF

SEQ ID NO: 4804 - protein, 9 aa, Homo sapiens
  Table A; Target 4804; HLA-A*31:01; ADAM2; ENSG00000104755; CTA
IMVKVNFQR

SEQ ID NO: 4805 - protein, 9 aa, Homo sapiens
  Table A; Target 4805; HLA-B*54:01; ADAM2; ENSG00000104755; CTA
IPFFIIFCV

SEQ ID NO: 4806 - protein, 8 aa, Homo sapiens
  Table A; Target 4806; HLA-B*35:01; ADAM2; ENSG00000104755; CTA
IPRATIIY

SEQ ID NO: 4807 - protein, 9 aa, Homo sapiens
  Table A; Target 4807; HLA-B*07:02; ADAM2; ENSG00000104755; CTA
IPRATIIYA

SEQ ID NO: 4808 - protein, 9 aa, Homo sapiens
  Table A; Target 4808; HLA-B*51:01; ADAM2; ENSG00000104755; CTA
IPRATIIYA

SEQ ID NO: 4809 - protein, 9 aa, Homo sapiens
  Table A; Target 4809; HLA-B*54:01; ADAM2; ENSG00000104755; CTA
IPRATIIYA

SEQ ID NO: 4810 - protein, 9 aa, Homo sapiens
  Table A; Target 4810; HLA-B*55:01; ADAM2; ENSG00000104755; CTA
IPRATIIYA

SEQ ID NO: 4811 - protein, 9 aa, Homo sapiens
  Table A; Target 4811; HLA-B*56:01; ADAM2; ENSG00000104755; CTA
IPRATIIYA

SEQ ID NO: 4812 - protein, 9 aa, Homo sapiens
  Table A; Target 4812; HLA-C*07:02; ADAM2; ENSG00000104755; CTA
IPRATIIYA

SEQ ID NO: 4813 - protein, 8 aa, Homo sapiens
  Table A; Target 4813; HLA-C*05:01; ADAM2; ENSG00000104755; CTA
ISDSGYTQ

SEQ ID NO: 4814 - protein, 9 aa, Homo sapiens
  Table A; Target 4814; HLA-C*05:01; ADAM2; ENSG00000104755; CTA
ISDSGYTQC

SEQ ID NO: 4815 - protein, 9 aa, Homo sapiens
  Table A; Target 4815; HLA-B*08:01; ADAM2; ENSG00000104755; CTA
ISKQKSQCL

SEQ ID NO: 4816 - protein, 8 aa, Homo sapiens
  Table A; Target 4816; HLA-B*08:01; ADAM2; ENSG00000104755; CTA
ITIILSSL

SEQ ID NO: 4817 - protein, 8 aa, Homo sapiens
  Table A; Target 4817; HLA-B*40:02; ADAM2; ENSG00000104755; CTA
ITIILSSL

SEQ ID NO: 4818 - protein, 8 aa, Homo sapiens
  Table A; Target 4818; HLA-B*46:01; ADAM2; ENSG00000104755; CTA
ITIILSSL

SEQ ID NO: 4819 - protein, 8 aa, Homo sapiens
  Table A; Target 4819; HLA-B*58:01; ADAM2; ENSG00000104755; CTA
ITIILSSL

SEQ ID NO: 4820 - protein, 8 aa, Homo sapiens
  Table A; Target 4820; HLA-C*01:02; ADAM2; ENSG00000104755; CTA
ITIILSSL

SEQ ID NO: 4821 - protein, 8 aa, Homo sapiens
  Table A; Target 4821; HLA-C*03:03; ADAM2; ENSG00000104755; CTA
ITIILSSL

SEQ ID NO: 4822 - protein, 8 aa, Homo sapiens
  Table A; Target 4822; HLA-C*03:04; ADAM2; ENSG00000104755; CTA
ITIILSSL

SEQ ID NO: 4823 - protein, 8 aa, Homo sapiens
  Table A; Target 4823; HLA-C*14:02; ADAM2; ENSG00000104755; CTA
ITIILSSL

SEQ ID NO: 4824 - protein, 11 aa, Homo sapiens
  Table A; Target 4824; HLA-B*57:01; ADAM2; ENSG00000104755; CTA
ITIILSSLELW

SEQ ID NO: 4825 - protein, 10 aa, Homo sapiens
  Table A; Target 4825; HLA-A*25:01; ADAM2; ENSG00000104755; CTA
ITVPEKIRSI

SEQ ID NO: 4826 - protein, 10 aa, Homo sapiens
  Table A; Target 4826; HLA-B*57:01; ADAM2; ENSG00000104755; CTA
ITVPEKIRSI

SEQ ID NO: 4827 - protein, 8 aa, Homo sapiens
  Table A; Target 4827; HLA-A*03:01; ADAM2; ENSG00000104755; CTA
ITYDDINK

SEQ ID NO: 4828 - protein, 8 aa, Homo sapiens
  Table A; Target 4828; HLA-A*03:02; ADAM2; ENSG00000104755; CTA
ITYDDINK

SEQ ID NO: 4829 - protein, 8 aa, Homo sapiens
  Table A; Target 4829; HLA-A*11:01; ADAM2; ENSG00000104755; CTA
ITYDDINK

SEQ ID NO: 4830 - protein, 9 aa, Homo sapiens
  Table A; Target 4830; HLA-A*02:03; ADAM2; ENSG00000104755; CTA
ITYDDINKC

SEQ ID NO: 4831 - protein, 9 aa, Homo sapiens
  Table A; Target 4831; HLA-A*68:02; ADAM2; ENSG00000104755; CTA
ITYDDINKC

SEQ ID NO: 4832 - protein, 9 aa, Homo sapiens
  Table A; Target 4832; HLA-C*12:03; ADAM2; ENSG00000104755; CTA
ITYDDINKC

SEQ ID NO: 4833 - protein, 9 aa, Homo sapiens
  Table A; Target 4833; HLA-A*03:02; ADAM2; ENSG00000104755; CTA
IVEKQLYNH

SEQ ID NO: 4834 - protein, 8 aa, Homo sapiens
  Table A; Target 4834; HLA-A*25:01; ADAM2; ENSG00000104755; CTA
IVIEGKPY

SEQ ID NO: 4835 - protein, 8 aa, Homo sapiens
  Table A; Target 4835; HLA-B*15:01; ADAM2; ENSG00000104755; CTA
IVIEGKPY

SEQ ID NO: 4836 - protein, 8 aa, Homo sapiens
  Table A; Target 4836; HLA-B*15:03; ADAM2; ENSG00000104755; CTA
IVIEGKPY

SEQ ID NO: 4837 - protein, 8 aa, Homo sapiens
  Table A; Target 4837; HLA-B*18:01; ADAM2; ENSG00000104755; CTA
IVIEGKPY

SEQ ID NO: 4838 - protein, 8 aa, Homo sapiens
  Table A; Target 4838; HLA-B*46:01; ADAM2; ENSG00000104755; CTA
IVIEGKPY

SEQ ID NO: 4839 - protein, 8 aa, Homo sapiens
  Table A; Target 4839; HLA-C*01:02; ADAM2; ENSG00000104755; CTA
IVIEGKPY

SEQ ID NO: 4840 - protein, 8 aa, Homo sapiens
  Table A; Target 4840; HLA-C*03:03; ADAM2; ENSG00000104755; CTA
IVIEGKPY

SEQ ID NO: 4841 - protein, 8 aa, Homo sapiens
  Table A; Target 4841; HLA-C*03:04; ADAM2; ENSG00000104755; CTA
IVIEGKPY

SEQ ID NO: 4842 - protein, 8 aa, Homo sapiens
  Table A; Target 4842; HLA-C*07:04; ADAM2; ENSG00000104755; CTA
IVIEGKPY

SEQ ID NO: 4843 - protein, 8 aa, Homo sapiens
  Table A; Target 4843; HLA-C*14:02; ADAM2; ENSG00000104755; CTA
IVIEGKPY

SEQ ID NO: 4844 - protein, 8 aa, Homo sapiens
  Table A; Target 4844; HLA-C*16:01; ADAM2; ENSG00000104755; CTA
IVIEGKPY

SEQ ID NO: 4845 - protein, 10 aa, Homo sapiens
  Table A; Target 4845; HLA-A*02:01; ADAM2; ENSG00000104755; CTA
IVIEGKPYTV

SEQ ID NO: 4846 - protein, 10 aa, Homo sapiens
  Table A; Target 4846; HLA-A*02:03; ADAM2; ENSG00000104755; CTA
IVIEGKPYTV

SEQ ID NO: 4847 - protein, 10 aa, Homo sapiens
  Table A; Target 4847; HLA-A*02:04; ADAM2; ENSG00000104755; CTA
IVIEGKPYTV

SEQ ID NO: 4848 - protein, 10 aa, Homo sapiens
  Table A; Target 4848; HLA-A*02:07; ADAM2; ENSG00000104755; CTA
IVIEGKPYTV

SEQ ID NO: 4849 - protein, 10 aa, Homo sapiens
  Table A; Target 4849; HLA-A*03:01; ADAM2; ENSG00000104755; CTA
IVIEGKPYTV

SEQ ID NO: 4850 - protein, 10 aa, Homo sapiens
  Table A; Target 4850; HLA-A*11:01; ADAM2; ENSG00000104755; CTA
IVIEGKPYTV

SEQ ID NO: 4851 - protein, 10 aa, Homo sapiens
  Table A; Target 4851; HLA-A*23:01; ADAM2; ENSG00000104755; CTA
IVIEGKPYTV

SEQ ID NO: 4852 - protein, 10 aa, Homo sapiens
  Table A; Target 4852; HLA-A*24:02; ADAM2; ENSG00000104755; CTA
IVIEGKPYTV

SEQ ID NO: 4853 - protein, 10 aa, Homo sapiens
  Table A; Target 4853; HLA-A*25:01; ADAM2; ENSG00000104755; CTA
IVIEGKPYTV

SEQ ID NO: 4854 - protein, 10 aa, Homo sapiens
  Table A; Target 4854; HLA-A*26:01; ADAM2; ENSG00000104755; CTA
IVIEGKPYTV

SEQ ID NO: 4855 - protein, 10 aa, Homo sapiens
  Table A; Target 4855; HLA-A*32:01; ADAM2; ENSG00000104755; CTA
IVIEGKPYTV

SEQ ID NO: 4856 - protein, 10 aa, Homo sapiens
  Table A; Target 4856; HLA-A*68:02; ADAM2; ENSG00000104755; CTA
IVIEGKPYTV

SEQ ID NO: 4857 - protein, 10 aa, Homo sapiens
  Table A; Target 4857; HLA-B*13:02; ADAM2; ENSG00000104755; CTA
IVIEGKPYTV

SEQ ID NO: 4858 - protein, 10 aa, Homo sapiens
  Table A; Target 4858; HLA-B*46:01; ADAM2; ENSG00000104755; CTA
IVIEGKPYTV

SEQ ID NO: 4859 - protein, 10 aa, Homo sapiens
  Table A; Target 4859; HLA-B*49:01; ADAM2; ENSG00000104755; CTA
IVIEGKPYTV

SEQ ID NO: 4860 - protein, 10 aa, Homo sapiens
  Table A; Target 4860; HLA-B*51:01; ADAM2; ENSG00000104755; CTA
IVIEGKPYTV

SEQ ID NO: 4861 - protein, 10 aa, Homo sapiens
  Table A; Target 4861; HLA-B*55:01; ADAM2; ENSG00000104755; CTA
IVIEGKPYTV

SEQ ID NO: 4862 - protein, 10 aa, Homo sapiens
  Table A; Target 4862; HLA-B*56:01; ADAM2; ENSG00000104755; CTA
IVIEGKPYTV

SEQ ID NO: 4863 - protein, 10 aa, Homo sapiens
  Table A; Target 4863; HLA-C*02:02; ADAM2; ENSG00000104755; CTA
IVIEGKPYTV

SEQ ID NO: 4864 - protein, 10 aa, Homo sapiens
  Table A; Target 4864; HLA-C*12:03; ADAM2; ENSG00000104755; CTA
IVIEGKPYTV

SEQ ID NO: 4865 - protein, 10 aa, Homo sapiens
  Table A; Target 4865; HLA-C*16:02; ADAM2; ENSG00000104755; CTA
IVIEGKPYTV

SEQ ID NO: 4866 - protein, 9 aa, Homo sapiens
  Table A; Target 4866; HLA-A*23:01; ADAM2; ENSG00000104755; CTA
IYANISGHL

SEQ ID NO: 4867 - protein, 9 aa, Homo sapiens
  Table A; Target 4867; HLA-A*29:02; ADAM2; ENSG00000104755; CTA
IYANISGHL

SEQ ID NO: 4868 - protein, 9 aa, Homo sapiens
  Table A; Target 4868; HLA-A*32:01; ADAM2; ENSG00000104755; CTA
IYANISGHL

SEQ ID NO: 4869 - protein, 9 aa, Homo sapiens
  Table A; Target 4869; HLA-B*27:05; ADAM2; ENSG00000104755; CTA
IYANISGHL

SEQ ID NO: 4870 - protein, 9 aa, Homo sapiens
  Table A; Target 4870; HLA-B*46:01; ADAM2; ENSG00000104755; CTA
IYANISGHL

SEQ ID NO: 4871 - protein, 9 aa, Homo sapiens
  Table A; Target 4871; HLA-B*58:01; ADAM2; ENSG00000104755; CTA
IYANISGHL

SEQ ID NO: 4872 - protein, 9 aa, Homo sapiens
  Table A; Target 4872; HLA-C*01:02; ADAM2; ENSG00000104755; CTA
IYANISGHL

SEQ ID NO: 4873 - protein, 9 aa, Homo sapiens
  Table A; Target 4873; HLA-C*02:02; ADAM2; ENSG00000104755; CTA
IYANISGHL

SEQ ID NO: 4874 - protein, 9 aa, Homo sapiens
  Table A; Target 4874; HLA-C*04:01; ADAM2; ENSG00000104755; CTA
IYANISGHL

SEQ ID NO: 4875 - protein, 9 aa, Homo sapiens
  Table A; Target 4875; HLA-C*06:02; ADAM2; ENSG00000104755; CTA
IYANISGHL

SEQ ID NO: 4876 - protein, 9 aa, Homo sapiens
  Table A; Target 4876; HLA-C*12:03; ADAM2; ENSG00000104755; CTA
IYANISGHL

SEQ ID NO: 4877 - protein, 9 aa, Homo sapiens
  Table A; Target 4877; HLA-C*14:02; ADAM2; ENSG00000104755; CTA
IYANISGHL

SEQ ID NO: 4878 - protein, 9 aa, Homo sapiens
  Table A; Target 4878; HLA-C*16:01; ADAM2; ENSG00000104755; CTA
IYANISGHL

SEQ ID NO: 4879 - protein, 9 aa, Homo sapiens
  Table A; Target 4879; HLA-C*16:02; ADAM2; ENSG00000104755; CTA
IYANISGHL

SEQ ID NO: 4880 - protein, 10 aa, Homo sapiens
  Table A; Target 4880; HLA-A*23:01; ADAM2; ENSG00000104755; CTA
IYANISGHLC

SEQ ID NO: 4881 - protein, 10 aa, Homo sapiens
  Table A; Target 4881; HLA-A*24:02; ADAM2; ENSG00000104755; CTA
IYANISGHLC

SEQ ID NO: 4882 - protein, 11 aa, Homo sapiens
  Table A; Target 4882; HLA-A*23:01; ADAM2; ENSG00000104755; CTA
IYANISGHLCI

SEQ ID NO: 4883 - protein, 11 aa, Homo sapiens
  Table A; Target 4883; HLA-A*24:02; ADAM2; ENSG00000104755; CTA
IYANISGHLCI

SEQ ID NO: 4884 - protein, 9 aa, Homo sapiens
  Table A; Target 4884; HLA-A*24:02; ADAM2; ENSG00000104755; CTA
IYHSKPMRW

SEQ ID NO: 4885 - protein, 10 aa, Homo sapiens
  Table A; Target 4885; HLA-A*03:02; ADAM2; ENSG00000104755; CTA
KADVSLYNEK

SEQ ID NO: 4886 - protein, 10 aa, Homo sapiens
  Table A; Target 4886; HLA-A*11:01; ADAM2; ENSG00000104755; CTA
KADVSLYNEK

SEQ ID NO: 4887 - protein, 10 aa, Homo sapiens
  Table A; Target 4887; HLA-B*27:02; ADAM2; ENSG00000104755; CTA
KADVSLYNEK

SEQ ID NO: 4888 - protein, 8 aa, Homo sapiens
  Table A; Target 4888; HLA-B*37:01; ADAM2; ENSG00000104755; CTA
KDIESRDL

SEQ ID NO: 4889 - protein, 10 aa, Homo sapiens
  Table A; Target 4889; HLA-A*24:02; ADAM2; ENSG00000104755; CTA
KDIESRDLSF

SEQ ID NO: 4890 - protein, 10 aa, Homo sapiens
  Table A; Target 4890; HLA-A*30:01; ADAM2; ENSG00000104755; CTA
KDIESRDLSF

SEQ ID NO: 4891 - protein, 10 aa, Homo sapiens
  Table A; Target 4891; HLA-A*32:01; ADAM2; ENSG00000104755; CTA
KDIESRDLSF

SEQ ID NO: 4892 - protein, 10 aa, Homo sapiens
  Table A; Target 4892; HLA-B*37:01; ADAM2; ENSG00000104755; CTA
KDIESRDLSF

SEQ ID NO: 4893 - protein, 10 aa, Homo sapiens
  Table A; Target 4893; HLA-B*40:02; ADAM2; ENSG00000104755; CTA
KDIESRDLSF

SEQ ID NO: 4894 - protein, 10 aa, Homo sapiens
  Table A; Target 4894; HLA-B*44:02; ADAM2; ENSG00000104755; CTA
KDIESRDLSF

SEQ ID NO: 4895 - protein, 10 aa, Homo sapiens
  Table A; Target 4895; HLA-B*44:03; ADAM2; ENSG00000104755; CTA
KDIESRDLSF

SEQ ID NO: 4896 - protein, 10 aa, Homo sapiens
  Table A; Target 4896; HLA-B*57:01; ADAM2; ENSG00000104755; CTA
KDIESRDLSF

SEQ ID NO: 4897 - protein, 10 aa, Homo sapiens
  Table A; Target 4897; HLA-C*16:01; ADAM2; ENSG00000104755; CTA
KDIESRDLSF

SEQ ID NO: 4898 - protein, 10 aa, Homo sapiens
  Table A; Target 4898; HLA-C*16:02; ADAM2; ENSG00000104755; CTA
KDIESRDLSF

SEQ ID NO: 4899 - protein, 10 aa, Homo sapiens
  Table A; Target 4899; HLA-C*16:04; ADAM2; ENSG00000104755; CTA
KDIESRDLSF

SEQ ID NO: 4900 - protein, 10 aa, Homo sapiens
  Table A; Target 4900; HLA-A*30:02; ADAM2; ENSG00000104755; CTA
KEGIESQASY

SEQ ID NO: 4901 - protein, 10 aa, Homo sapiens
  Table A; Target 4901; HLA-B*27:02; ADAM2; ENSG00000104755; CTA
KEGIESQASY

SEQ ID NO: 4902 - protein, 10 aa, Homo sapiens
  Table A; Target 4902; HLA-B*40:01; ADAM2; ENSG00000104755; CTA
KEGIESQASY

SEQ ID NO: 4903 - protein, 10 aa, Homo sapiens
  Table A; Target 4903; HLA-B*44:02; ADAM2; ENSG00000104755; CTA
KEGIESQASY

SEQ ID NO: 4904 - protein, 10 aa, Homo sapiens
  Table A; Target 4904; HLA-B*44:03; ADAM2; ENSG00000104755; CTA
KEGIESQASY

SEQ ID NO: 4905 - protein, 10 aa, Homo sapiens
  Table A; Target 4905; HLA-C*16:04; ADAM2; ENSG00000104755; CTA
KEGIESQASY

SEQ ID NO: 4906 - protein, 11 aa, Homo sapiens
  Table A; Target 4906; HLA-A*03:02; ADAM2; ENSG00000104755; CTA
KEGIESQASYK

SEQ ID NO: 4907 - protein, 10 aa, Homo sapiens
  Table A; Target 4907; HLA-A*30:01; ADAM2; ENSG00000104755; CTA
KEVEFGPSEC

SEQ ID NO: 4908 - protein, 10 aa, Homo sapiens
  Table A; Target 4908; HLA-B*40:01; ADAM2; ENSG00000104755; CTA
KEVEFGPSEC

SEQ ID NO: 4909 - protein, 10 aa, Homo sapiens
  Table A; Target 4909; HLA-B*40:02; ADAM2; ENSG00000104755; CTA
KEVEFGPSEC

SEQ ID NO: 4910 - protein, 10 aa, Homo sapiens
  Table A; Target 4910; HLA-B*49:01; ADAM2; ENSG00000104755; CTA
KEVEFGPSEC

SEQ ID NO: 4911 - protein, 11 aa, Homo sapiens
  Table A; Target 4911; HLA-A*30:01; ADAM2; ENSG00000104755; CTA
KEVEFGPSECY

SEQ ID NO: 4912 - protein, 11 aa, Homo sapiens
  Table A; Target 4912; HLA-A*30:02; ADAM2; ENSG00000104755; CTA
KEVEFGPSECY

SEQ ID NO: 4913 - protein, 11 aa, Homo sapiens
  Table A; Target 4913; HLA-B*15:01; ADAM2; ENSG00000104755; CTA
KEVEFGPSECY

SEQ ID NO: 4914 - protein, 11 aa, Homo sapiens
  Table A; Target 4914; HLA-B*15:03; ADAM2; ENSG00000104755; CTA
KEVEFGPSECY

SEQ ID NO: 4915 - protein, 11 aa, Homo sapiens
  Table A; Target 4915; HLA-B*18:01; ADAM2; ENSG00000104755; CTA
KEVEFGPSECY

SEQ ID NO: 4916 - protein, 11 aa, Homo sapiens
  Table A; Target 4916; HLA-B*27:02; ADAM2; ENSG00000104755; CTA
KEVEFGPSECY

SEQ ID NO: 4917 - protein, 11 aa, Homo sapiens
  Table A; Target 4917; HLA-B*40:01; ADAM2; ENSG00000104755; CTA
KEVEFGPSECY

SEQ ID NO: 4918 - protein, 11 aa, Homo sapiens
  Table A; Target 4918; HLA-B*40:02; ADAM2; ENSG00000104755; CTA
KEVEFGPSECY

SEQ ID NO: 4919 - protein, 11 aa, Homo sapiens
  Table A; Target 4919; HLA-B*44:02; ADAM2; ENSG00000104755; CTA
KEVEFGPSECY

SEQ ID NO: 4920 - protein, 11 aa, Homo sapiens
  Table A; Target 4920; HLA-B*44:03; ADAM2; ENSG00000104755; CTA
KEVEFGPSECY

SEQ ID NO: 4921 - protein, 11 aa, Homo sapiens
  Table A; Target 4921; HLA-C*16:04; ADAM2; ENSG00000104755; CTA
KEVEFGPSECY

SEQ ID NO: 4922 - protein, 11 aa, Homo sapiens
  Table A; Target 4922; HLA-B*27:05; ADAM2; ENSG00000104755; CTA
KIATTGEANEL

SEQ ID NO: 4923 - protein, 11 aa, Homo sapiens
  Table A; Target 4923; HLA-B*40:01; ADAM2; ENSG00000104755; CTA
KIATTGEANEL

SEQ ID NO: 4924 - protein, 11 aa, Homo sapiens
  Table A; Target 4924; HLA-B*58:01; ADAM2; ENSG00000104755; CTA
KIATTGEANEL

SEQ ID NO: 4925 - protein, 11 aa, Homo sapiens
  Table A; Target 4925; HLA-C*01:02; ADAM2; ENSG00000104755; CTA
KIATTGEANEL

SEQ ID NO: 4926 - protein, 11 aa, Homo sapiens
  Table A; Target 4926; HLA-A*02:01; ADAM2; ENSG00000104755; CTA
KIVIEGKPYTV

SEQ ID NO: 4927 - protein, 8 aa, Homo sapiens
  Table A; Target 4927; HLA-B*15:03; ADAM2; ENSG00000104755; CTA
KKADVSLY

SEQ ID NO: 4928 - protein, 11 aa, Homo sapiens
  Table A; Target 4928; HLA-A*03:02; ADAM2; ENSG00000104755; CTA
KLQSVEPQQDF

SEQ ID NO: 4929 - protein, 11 aa, Homo sapiens
  Table A; Target 4929; HLA-A*32:01; ADAM2; ENSG00000104755; CTA
KLQSVEPQQDF

SEQ ID NO: 4930 - protein, 11 aa, Homo sapiens
  Table A; Target 4930; HLA-B*15:01; ADAM2; ENSG00000104755; CTA
KLQSVEPQQDF

SEQ ID NO: 4931 - protein, 8 aa, Homo sapiens
  Table A; Target 4931; HLA-B*57:01; ADAM2; ENSG00000104755; CTA
KNFLPHNF

SEQ ID NO: 4932 - protein, 10 aa, Homo sapiens
  Table A; Target 4932; HLA-A*23:01; ADAM2; ENSG00000104755; CTA
KPLDQDFQNF

SEQ ID NO: 4933 - protein, 10 aa, Homo sapiens
  Table A; Target 4933; HLA-A*24:02; ADAM2; ENSG00000104755; CTA
KPLDQDFQNF

SEQ ID NO: 4934 - protein, 10 aa, Homo sapiens
  Table A; Target 4934; HLA-A*30:02; ADAM2; ENSG00000104755; CTA
KPLDQDFQNF

SEQ ID NO: 4935 - protein, 10 aa, Homo sapiens
  Table A; Target 4935; HLA-B*35:01; ADAM2; ENSG00000104755; CTA
KPLDQDFQNF

SEQ ID NO: 4936 - protein, 10 aa, Homo sapiens
  Table A; Target 4936; HLA-B*57:01; ADAM2; ENSG00000104755; CTA
KPLDQDFQNF

SEQ ID NO: 4937 - protein, 8 aa, Homo sapiens
  Table A; Target 4937; HLA-B*07:02; ADAM2; ENSG00000104755; CTA
KPYTVNLM

SEQ ID NO: 4938 - protein, 8 aa, Homo sapiens
  Table A; Target 4938; HLA-B*08:01; ADAM2; ENSG00000104755; CTA
KPYTVNLM

SEQ ID NO: 4939 - protein, 8 aa, Homo sapiens
  Table A; Target 4939; HLA-B*37:01; ADAM2; ENSG00000104755; CTA
KPYTVNLM

SEQ ID NO: 4940 - protein, 8 aa, Homo sapiens
  Table A; Target 4940; HLA-B*51:01; ADAM2; ENSG00000104755; CTA
KPYTVNLM

SEQ ID NO: 4941 - protein, 8 aa, Homo sapiens
  Table A; Target 4941; HLA-B*55:01; ADAM2; ENSG00000104755; CTA
KPYTVNLM

SEQ ID NO: 4942 - protein, 8 aa, Homo sapiens
  Table A; Target 4942; HLA-B*56:01; ADAM2; ENSG00000104755; CTA
KPYTVNLM

SEQ ID NO: 4943 - protein, 8 aa, Homo sapiens
  Table A; Target 4943; HLA-C*07:02; ADAM2; ENSG00000104755; CTA
KPYTVNLM

SEQ ID NO: 4944 - protein, 8 aa, Homo sapiens
  Table A; Target 4944; HLA-C*12:03; ADAM2; ENSG00000104755; CTA
KPYTVNLM

SEQ ID NO: 4945 - protein, 10 aa, Homo sapiens
  Table A; Target 4945; HLA-A*03:01; ADAM2; ENSG00000104755; CTA
KPYTVNLMQK

SEQ ID NO: 4946 - protein, 10 aa, Homo sapiens
  Table A; Target 4946; HLA-A*03:02; ADAM2; ENSG00000104755; CTA
KQQAVCGNAK

SEQ ID NO: 4947 - protein, 9 aa, Homo sapiens
  Table A; Target 4947; HLA-A*03:02; ADAM2; ENSG00000104755; CTA
KSNYVGATF

SEQ ID NO: 4948 - protein, 9 aa, Homo sapiens
  Table A; Target 4948; HLA-A*23:01; ADAM2; ENSG00000104755; CTA
KSNYVGATF

SEQ ID NO: 4949 - protein, 9 aa, Homo sapiens
  Table A; Target 4949; HLA-A*24:02; ADAM2; ENSG00000104755; CTA
KSNYVGATF

SEQ ID NO: 4950 - protein, 9 aa, Homo sapiens
  Table A; Target 4950; HLA-A*29:02; ADAM2; ENSG00000104755; CTA
KSNYVGATF

SEQ ID NO: 4951 - protein, 9 aa, Homo sapiens
  Table A; Target 4951; HLA-A*30:02; ADAM2; ENSG00000104755; CTA
KSNYVGATF

SEQ ID NO: 4952 - protein, 9 aa, Homo sapiens
  Table A; Target 4952; HLA-A*31:01; ADAM2; ENSG00000104755; CTA
KSNYVGATF

SEQ ID NO: 4953 - protein, 9 aa, Homo sapiens
  Table A; Target 4953; HLA-A*32:01; ADAM2; ENSG00000104755; CTA
KSNYVGATF

SEQ ID NO: 4954 - protein, 9 aa, Homo sapiens
  Table A; Target 4954; HLA-A*33:01; ADAM2; ENSG00000104755; CTA
KSNYVGATF

SEQ ID NO: 4955 - protein, 9 aa, Homo sapiens
  Table A; Target 4955; HLA-B*15:01; ADAM2; ENSG00000104755; CTA
KSNYVGATF

SEQ ID NO: 4956 - protein, 9 aa, Homo sapiens
  Table A; Target 4956; HLA-B*15:03; ADAM2; ENSG00000104755; CTA
KSNYVGATF

SEQ ID NO: 4957 - protein, 9 aa, Homo sapiens
  Table A; Target 4957; HLA-B*27:02; ADAM2; ENSG00000104755; CTA
KSNYVGATF

SEQ ID NO: 4958 - protein, 9 aa, Homo sapiens
  Table A; Target 4958; HLA-B*37:01; ADAM2; ENSG00000104755; CTA
KSNYVGATF

SEQ ID NO: 4959 - protein, 9 aa, Homo sapiens
  Table A; Target 4959; HLA-B*40:02; ADAM2; ENSG00000104755; CTA
KSNYVGATF

SEQ ID NO: 4960 - protein, 9 aa, Homo sapiens
  Table A; Target 4960; HLA-B*46:01; ADAM2; ENSG00000104755; CTA
KSNYVGATF

SEQ ID NO: 4961 - protein, 9 aa, Homo sapiens
  Table A; Target 4961; HLA-B*58:01; ADAM2; ENSG00000104755; CTA
KSNYVGATF

SEQ ID NO: 4962 - protein, 9 aa, Homo sapiens
  Table A; Target 4962; HLA-C*01:02; ADAM2; ENSG00000104755; CTA
KSNYVGATF

SEQ ID NO: 4963 - protein, 9 aa, Homo sapiens
  Table A; Target 4963; HLA-C*02:02; ADAM2; ENSG00000104755; CTA
KSNYVGATF

SEQ ID NO: 4964 - protein, 9 aa, Homo sapiens
  Table A; Target 4964; HLA-C*03:03; ADAM2; ENSG00000104755; CTA
KSNYVGATF

SEQ ID NO: 4965 - protein, 9 aa, Homo sapiens
  Table A; Target 4965; HLA-C*03:04; ADAM2; ENSG00000104755; CTA
KSNYVGATF

SEQ ID NO: 4966 - protein, 9 aa, Homo sapiens
  Table A; Target 4966; HLA-C*04:01; ADAM2; ENSG00000104755; CTA
KSNYVGATF

SEQ ID NO: 4967 - protein, 9 aa, Homo sapiens
  Table A; Target 4967; HLA-C*07:02; ADAM2; ENSG00000104755; CTA
KSNYVGATF

SEQ ID NO: 4968 - protein, 9 aa, Homo sapiens
  Table A; Target 4968; HLA-C*07:04; ADAM2; ENSG00000104755; CTA
KSNYVGATF

SEQ ID NO: 4969 - protein, 9 aa, Homo sapiens
  Table A; Target 4969; HLA-C*14:02; ADAM2; ENSG00000104755; CTA
KSNYVGATF

SEQ ID NO: 4970 - protein, 9 aa, Homo sapiens
  Table A; Target 4970; HLA-C*16:01; ADAM2; ENSG00000104755; CTA
KSNYVGATF

SEQ ID NO: 4971 - protein, 9 aa, Homo sapiens
  Table A; Target 4971; HLA-C*16:02; ADAM2; ENSG00000104755; CTA
KSNYVGATF

SEQ ID NO: 4972 - protein, 9 aa, Homo sapiens
  Table A; Target 4972; HLA-C*16:04; ADAM2; ENSG00000104755; CTA
KSNYVGATF

SEQ ID NO: 4973 - protein, 11 aa, Homo sapiens
  Table A; Target 4973; HLA-C*06:02; ADAM2; ENSG00000104755; CTA
KSNYVGATFQG

SEQ ID NO: 4974 - protein, 9 aa, Homo sapiens
  Table A; Target 4974; HLA-B*58:01; ADAM2; ENSG00000104755; CTA
KSVVMVSTC

SEQ ID NO: 4975 - protein, 8 aa, Homo sapiens
  Table A; Target 4975; HLA-A*31:01; ADAM2; ENSG00000104755; CTA
KTSYLVLR

SEQ ID NO: 4976 - protein, 8 aa, Homo sapiens
  Table A; Target 4976; HLA-A*02:04; ADAM2; ENSG00000104755; CTA
KVFQLIGL

SEQ ID NO: 4977 - protein, 8 aa, Homo sapiens
  Table A; Target 4977; HLA-A*23:01; ADAM2; ENSG00000104755; CTA
KYIEMHVI

SEQ ID NO: 4978 - protein, 8 aa, Homo sapiens
  Table A; Target 4978; HLA-A*24:02; ADAM2; ENSG00000104755; CTA
KYIEMHVI

SEQ ID NO: 4979 - protein, 9 aa, Homo sapiens
  Table A; Target 4979; HLA-A*24:02; ADAM2; ENSG00000104755; CTA
KYIEMHVIV

SEQ ID NO: 4980 - protein, 9 aa, Homo sapiens
  Table A; Target 4980; HLA-C*12:03; ADAM2; ENSG00000104755; CTA
KYIEMHVIV

SEQ ID NO: 4981 - protein, 11 aa, Homo sapiens
  Table A; Target 4981; HLA-A*31:01; ADAM2; ENSG00000104755; CTA
KYIEMHVIVEK

SEQ ID NO: 4982 - protein, 9 aa, Homo sapiens
  Table A; Target 4982; HLA-B*35:01; ADAM2; ENSG00000104755; CTA
LAQLLSLSM

SEQ ID NO: 4983 - protein, 9 aa, Homo sapiens
  Table A; Target 4983; HLA-C*03:03; ADAM2; ENSG00000104755; CTA
LAQLLSLSM

SEQ ID NO: 4984 - protein, 9 aa, Homo sapiens
  Table A; Target 4984; HLA-C*03:04; ADAM2; ENSG00000104755; CTA
LAQLLSLSM

SEQ ID NO: 4985 - protein, 8 aa, Homo sapiens
  Table A; Target 4985; HLA-B*51:01; ADAM2; ENSG00000104755; CTA
LAVILAQL

SEQ ID NO: 4986 - protein, 9 aa, Homo sapiens
  Table A; Target 4986; HLA-B*51:01; ADAM2; ENSG00000104755; CTA
LAVILAQLL

SEQ ID NO: 4987 - protein, 9 aa, Homo sapiens
  Table A; Target 4987; HLA-B*57:01; ADAM2; ENSG00000104755; CTA
LAVILAQLL

SEQ ID NO: 4988 - protein, 9 aa, Homo sapiens
  Table A; Target 4988; HLA-C*02:02; ADAM2; ENSG00000104755; CTA
LAVILAQLL

SEQ ID NO: 4989 - protein, 9 aa, Homo sapiens
  Table A; Target 4989; HLA-C*06:02; ADAM2; ENSG00000104755; CTA
LAVILAQLL

SEQ ID NO: 4990 - protein, 9 aa, Homo sapiens
  Table A; Target 4990; HLA-C*07:01; ADAM2; ENSG00000104755; CTA
LAVILAQLL

SEQ ID NO: 4991 - protein, 9 aa, Homo sapiens
  Table A; Target 4991; HLA-C*12:03; ADAM2; ENSG00000104755; CTA
LAVILAQLL

SEQ ID NO: 4992 - protein, 8 aa, Homo sapiens
  Table A; Target 4992; HLA-B*18:01; ADAM2; ENSG00000104755; CTA
LDQDFQNF

SEQ ID NO: 4993 - protein, 8 aa, Homo sapiens
  Table A; Target 4993; HLA-B*37:01; ADAM2; ENSG00000104755; CTA
LDQDFQNF

SEQ ID NO: 4994 - protein, 8 aa, Homo sapiens
  Table A; Target 4994; HLA-A*30:01; ADAM2; ENSG00000104755; CTA
LESLAVIL

SEQ ID NO: 4995 - protein, 8 aa, Homo sapiens
  Table A; Target 4995; HLA-B*18:01; ADAM2; ENSG00000104755; CTA
LESLAVIL

SEQ ID NO: 4996 - protein, 8 aa, Homo sapiens
  Table A; Target 4996; HLA-B*37:01; ADAM2; ENSG00000104755; CTA
LESLAVIL

SEQ ID NO: 4997 - protein, 8 aa, Homo sapiens
  Table A; Target 4997; HLA-B*40:01; ADAM2; ENSG00000104755; CTA
LESLAVIL

SEQ ID NO: 4998 - protein, 8 aa, Homo sapiens
  Table A; Target 4998; HLA-B*49:01; ADAM2; ENSG00000104755; CTA
LESLAVIL

SEQ ID NO: 4999 - protein, 9 aa, Homo sapiens
  Table A; Target 4999; HLA-B*49:01; ADAM2; ENSG00000104755; CTA
LESLAVILA

SEQ ID NO: 5000 - protein, 9 aa, Homo sapiens
  Table A; Target 5000; HLA-B*18:01; ADAM2; ENSG00000104755; CTA
LESSVGFEH

SEQ ID NO: 5001 - protein, 10 aa, Homo sapiens
  Table A; Target 5001; HLA-B*49:01; ADAM2; ENSG00000104755; CTA
LESSVGFEHV

SEQ ID NO: 5002 - protein, 11 aa, Homo sapiens
  Table A; Target 5002; HLA-B*49:01; ADAM2; ENSG00000104755; CTA
LESSVGFEHVI

SEQ ID NO: 5003 - protein, 9 aa, Homo sapiens
  Table A; Target 5003; HLA-A*24:02; ADAM2; ENSG00000104755; CTA
LFIPFFIIF

SEQ ID NO: 5004 - protein, 9 aa, Homo sapiens
  Table A; Target 5004; HLA-A*29:02; ADAM2; ENSG00000104755; CTA
LFIPFFIIF

SEQ ID NO: 5005 - protein, 8 aa, Homo sapiens
  Table A; Target 5005; HLA-B*08:01; ADAM2; ENSG00000104755; CTA
LFMSKERM

SEQ ID NO: 5006 - protein, 9 aa, Homo sapiens
  Table A; Target 5006; HLA-A*11:01; ADAM2; ENSG00000104755; CTA
LGYDCTTDK

SEQ ID NO: 5007 - protein, 10 aa, Homo sapiens
  Table A; Target 5007; HLA-A*01:01; ADAM2; ENSG00000104755; CTA
LLSLSMGITY

SEQ ID NO: 5008 - protein, 10 aa, Homo sapiens
  Table A; Target 5008; HLA-A*30:02; ADAM2; ENSG00000104755; CTA
LLSLSMGITY

SEQ ID NO: 5009 - protein, 10 aa, Homo sapiens
  Table A; Target 5009; HLA-B*15:01; ADAM2; ENSG00000104755; CTA
LLSLSMGITY

SEQ ID NO: 5010 - protein, 10 aa, Homo sapiens
  Table A; Target 5010; HLA-C*07:01; ADAM2; ENSG00000104755; CTA
LLSLSMGITY

SEQ ID NO: 5011 - protein, 8 aa, Homo sapiens
  Table A; Target 5011; HLA-B*35:01; ADAM2; ENSG00000104755; CTA
LPHNFRVY

SEQ ID NO: 5012 - protein, 8 aa, Homo sapiens
  Table A; Target 5012; HLA-B*51:01; ADAM2; ENSG00000104755; CTA
LPHNFRVY

SEQ ID NO: 5013 - protein, 8 aa, Homo sapiens
  Table A; Target 5013; HLA-B*54:01; ADAM2; ENSG00000104755; CTA
LPHNFRVY

SEQ ID NO: 5014 - protein, 9 aa, Homo sapiens
  Table A; Target 5014; HLA-B*54:01; ADAM2; ENSG00000104755; CTA
LPHNFRVYS

SEQ ID NO: 5015 - protein, 10 aa, Homo sapiens
  Table A; Target 5015; HLA-A*29:02; ADAM2; ENSG00000104755; CTA
LPHNFRVYSY

SEQ ID NO: 5016 - protein, 10 aa, Homo sapiens
  Table A; Target 5016; HLA-B*35:01; ADAM2; ENSG00000104755; CTA
LPHNFRVYSY

SEQ ID NO: 5017 - protein, 10 aa, Homo sapiens
  Table A; Target 5017; HLA-B*54:01; ADAM2; ENSG00000104755; CTA
LPHNFRVYSY

SEQ ID NO: 5018 - protein, 8 aa, Homo sapiens
  Table A; Target 5018; HLA-B*54:01; ADAM2; ENSG00000104755; CTA
LPVQITVP

SEQ ID NO: 5019 - protein, 8 aa, Homo sapiens
  Table A; Target 5019; HLA-B*56:01; ADAM2; ENSG00000104755; CTA
LPVQITVP

SEQ ID NO: 5020 - protein, 10 aa, Homo sapiens
  Table A; Target 5020; HLA-B*27:02; ADAM2; ENSG00000104755; CTA
LPVQITVPEK

SEQ ID NO: 5021 - protein, 10 aa, Homo sapiens
  Table A; Target 5021; HLA-B*35:01; ADAM2; ENSG00000104755; CTA
LPVQITVPEK

SEQ ID NO: 5022 - protein, 11 aa, Homo sapiens
  Table A; Target 5022; HLA-B*51:01; ADAM2; ENSG00000104755; CTA
LPVQITVPEKI

SEQ ID NO: 5023 - protein, 8 aa, Homo sapiens
  Table A; Target 5023; HLA-A*30:02; ADAM2; ENSG00000104755; CTA
LQFENVSY

SEQ ID NO: 5024 - protein, 8 aa, Homo sapiens
  Table A; Target 5024; HLA-A*32:01; ADAM2; ENSG00000104755; CTA
LQFENVSY

SEQ ID NO: 5025 - protein, 8 aa, Homo sapiens
  Table A; Target 5025; HLA-B*15:01; ADAM2; ENSG00000104755; CTA
LQFENVSY

SEQ ID NO: 5026 - protein, 8 aa, Homo sapiens
  Table A; Target 5026; HLA-B*15:03; ADAM2; ENSG00000104755; CTA
LQFENVSY

SEQ ID NO: 5027 - protein, 8 aa, Homo sapiens
  Table A; Target 5027; HLA-B*18:01; ADAM2; ENSG00000104755; CTA
LQFENVSY

SEQ ID NO: 5028 - protein, 8 aa, Homo sapiens
  Table A; Target 5028; HLA-B*39:01; ADAM2; ENSG00000104755; CTA
LQFENVSY

SEQ ID NO: 5029 - protein, 8 aa, Homo sapiens
  Table A; Target 5029; HLA-B*46:01; ADAM2; ENSG00000104755; CTA
LQFENVSY

SEQ ID NO: 5030 - protein, 8 aa, Homo sapiens
  Table A; Target 5030; HLA-C*02:02; ADAM2; ENSG00000104755; CTA
LQFENVSY

SEQ ID NO: 5031 - protein, 8 aa, Homo sapiens
  Table A; Target 5031; HLA-C*07:04; ADAM2; ENSG00000104755; CTA
LQFENVSY

SEQ ID NO: 5032 - protein, 8 aa, Homo sapiens
  Table A; Target 5032; HLA-C*12:03; ADAM2; ENSG00000104755; CTA
LQFENVSY

SEQ ID NO: 5033 - protein, 8 aa, Homo sapiens
  Table A; Target 5033; HLA-C*14:02; ADAM2; ENSG00000104755; CTA
LQFENVSY

SEQ ID NO: 5034 - protein, 8 aa, Homo sapiens
  Table A; Target 5034; HLA-C*16:04; ADAM2; ENSG00000104755; CTA
LQFENVSY

SEQ ID NO: 5035 - protein, 9 aa, Homo sapiens
  Table A; Target 5035; HLA-A*24:02; ADAM2; ENSG00000104755; CTA
LQIPRATII

SEQ ID NO: 5036 - protein, 9 aa, Homo sapiens
  Table A; Target 5036; HLA-B*13:02; ADAM2; ENSG00000104755; CTA
LQIPRATII

SEQ ID NO: 5037 - protein, 10 aa, Homo sapiens
  Table A; Target 5037; HLA-B*15:01; ADAM2; ENSG00000104755; CTA
LQIPRATIIY

SEQ ID NO: 5038 - protein, 10 aa, Homo sapiens
  Table A; Target 5038; HLA-B*15:03; ADAM2; ENSG00000104755; CTA
LQIPRATIIY

SEQ ID NO: 5039 - protein, 10 aa, Homo sapiens
  Table A; Target 5039; HLA-C*07:04; ADAM2; ENSG00000104755; CTA
LQIPRATIIY

SEQ ID NO: 5040 - protein, 10 aa, Homo sapiens
  Table A; Target 5040; HLA-B*15:01; ADAM2; ENSG00000104755; CTA
LQSVEPQQDF

SEQ ID NO: 5041 - protein, 10 aa, Homo sapiens
  Table A; Target 5041; HLA-B*39:01; ADAM2; ENSG00000104755; CTA
LQSVEPQQDF

SEQ ID NO: 5042 - protein, 10 aa, Homo sapiens
  Table A; Target 5042; HLA-B*27:02; ADAM2; ENSG00000104755; CTA
LRMDSNFDSL

SEQ ID NO: 5043 - protein, 10 aa, Homo sapiens
  Table A; Target 5043; HLA-B*39:01; ADAM2; ENSG00000104755; CTA
LRMDSNFDSL

SEQ ID NO: 5044 - protein, 9 aa, Homo sapiens
  Table A; Target 5044; HLA-A*01:01; ADAM2; ENSG00000104755; CTA
LSGLGGLRM

SEQ ID NO: 5045 - protein, 9 aa, Homo sapiens
  Table A; Target 5045; HLA-A*01:01; ADAM2; ENSG00000104755; CTA
LSLSMGITY

SEQ ID NO: 5046 - protein, 9 aa, Homo sapiens
  Table A; Target 5046; HLA-A*03:01; ADAM2; ENSG00000104755; CTA
LSLSMGITY

SEQ ID NO: 5047 - protein, 9 aa, Homo sapiens
  Table A; Target 5047; HLA-A*29:02; ADAM2; ENSG00000104755; CTA
LSLSMGITY

SEQ ID NO: 5048 - protein, 9 aa, Homo sapiens
  Table A; Target 5048; HLA-A*30:02; ADAM2; ENSG00000104755; CTA
LSLSMGITY

SEQ ID NO: 5049 - protein, 9 aa, Homo sapiens
  Table A; Target 5049; HLA-A*32:01; ADAM2; ENSG00000104755; CTA
LSLSMGITY

SEQ ID NO: 5050 - protein, 9 aa, Homo sapiens
  Table A; Target 5050; HLA-B*15:01; ADAM2; ENSG00000104755; CTA
LSLSMGITY

SEQ ID NO: 5051 - protein, 9 aa, Homo sapiens
  Table A; Target 5051; HLA-B*15:03; ADAM2; ENSG00000104755; CTA
LSLSMGITY

SEQ ID NO: 5052 - protein, 9 aa, Homo sapiens
  Table A; Target 5052; HLA-B*18:01; ADAM2; ENSG00000104755; CTA
LSLSMGITY

SEQ ID NO: 5053 - protein, 9 aa, Homo sapiens
  Table A; Target 5053; HLA-B*35:01; ADAM2; ENSG00000104755; CTA
LSLSMGITY

SEQ ID NO: 5054 - protein, 9 aa, Homo sapiens
  Table A; Target 5054; HLA-B*46:01; ADAM2; ENSG00000104755; CTA
LSLSMGITY

SEQ ID NO: 5055 - protein, 9 aa, Homo sapiens
  Table A; Target 5055; HLA-B*57:01; ADAM2; ENSG00000104755; CTA
LSLSMGITY

SEQ ID NO: 5056 - protein, 9 aa, Homo sapiens
  Table A; Target 5056; HLA-B*58:01; ADAM2; ENSG00000104755; CTA
LSLSMGITY

SEQ ID NO: 5057 - protein, 9 aa, Homo sapiens
  Table A; Target 5057; HLA-C*01:02; ADAM2; ENSG00000104755; CTA
LSLSMGITY

SEQ ID NO: 5058 - protein, 9 aa, Homo sapiens
  Table A; Target 5058; HLA-C*02:02; ADAM2; ENSG00000104755; CTA
LSLSMGITY

SEQ ID NO: 5059 - protein, 9 aa, Homo sapiens
  Table A; Target 5059; HLA-C*03:03; ADAM2; ENSG00000104755; CTA
LSLSMGITY

SEQ ID NO: 5060 - protein, 9 aa, Homo sapiens
  Table A; Target 5060; HLA-C*03:04; ADAM2; ENSG00000104755; CTA
LSLSMGITY

SEQ ID NO: 5061 - protein, 9 aa, Homo sapiens
  Table A; Target 5061; HLA-C*04:01; ADAM2; ENSG00000104755; CTA
LSLSMGITY

SEQ ID NO: 5062 - protein, 9 aa, Homo sapiens
  Table A; Target 5062; HLA-C*07:01; ADAM2; ENSG00000104755; CTA
LSLSMGITY

SEQ ID NO: 5063 - protein, 9 aa, Homo sapiens
  Table A; Target 5063; HLA-C*07:04; ADAM2; ENSG00000104755; CTA
LSLSMGITY

SEQ ID NO: 5064 - protein, 9 aa, Homo sapiens
  Table A; Target 5064; HLA-C*12:03; ADAM2; ENSG00000104755; CTA
LSLSMGITY

SEQ ID NO: 5065 - protein, 9 aa, Homo sapiens
  Table A; Target 5065; HLA-C*14:02; ADAM2; ENSG00000104755; CTA
LSLSMGITY

SEQ ID NO: 5066 - protein, 9 aa, Homo sapiens
  Table A; Target 5066; HLA-C*16:01; ADAM2; ENSG00000104755; CTA
LSLSMGITY

SEQ ID NO: 5067 - protein, 9 aa, Homo sapiens
  Table A; Target 5067; HLA-C*16:04; ADAM2; ENSG00000104755; CTA
LSLSMGITY

SEQ ID NO: 5068 - protein, 9 aa, Homo sapiens
  Table A; Target 5068; HLA-A*02:07; ADAM2; ENSG00000104755; CTA
LTNAIFVSF

SEQ ID NO: 5069 - protein, 9 aa, Homo sapiens
  Table A; Target 5069; HLA-A*11:01; ADAM2; ENSG00000104755; CTA
LTNAIFVSF

SEQ ID NO: 5070 - protein, 9 aa, Homo sapiens
  Table A; Target 5070; HLA-A*23:01; ADAM2; ENSG00000104755; CTA
LTNAIFVSF

SEQ ID NO: 5071 - protein, 9 aa, Homo sapiens
  Table A; Target 5071; HLA-A*24:02; ADAM2; ENSG00000104755; CTA
LTNAIFVSF

SEQ ID NO: 5072 - protein, 9 aa, Homo sapiens
  Table A; Target 5072; HLA-A*25:01; ADAM2; ENSG00000104755; CTA
LTNAIFVSF

SEQ ID NO: 5073 - protein, 9 aa, Homo sapiens
  Table A; Target 5073; HLA-A*26:01; ADAM2; ENSG00000104755; CTA
LTNAIFVSF

SEQ ID NO: 5074 - protein, 9 aa, Homo sapiens
  Table A; Target 5074; HLA-A*29:02; ADAM2; ENSG00000104755; CTA
LTNAIFVSF

SEQ ID NO: 5075 - protein, 9 aa, Homo sapiens
  Table A; Target 5075; HLA-A*30:02; ADAM2; ENSG00000104755; CTA
LTNAIFVSF

SEQ ID NO: 5076 - protein, 9 aa, Homo sapiens
  Table A; Target 5076; HLA-A*31:01; ADAM2; ENSG00000104755; CTA
LTNAIFVSF

SEQ ID NO: 5077 - protein, 9 aa, Homo sapiens
  Table A; Target 5077; HLA-A*32:01; ADAM2; ENSG00000104755; CTA
LTNAIFVSF

SEQ ID NO: 5078 - protein, 9 aa, Homo sapiens
  Table A; Target 5078; HLA-A*33:01; ADAM2; ENSG00000104755; CTA
LTNAIFVSF

SEQ ID NO: 5079 - protein, 9 aa, Homo sapiens
  Table A; Target 5079; HLA-A*33:03; ADAM2; ENSG00000104755; CTA
LTNAIFVSF

SEQ ID NO: 5080 - protein, 9 aa, Homo sapiens
  Table A; Target 5080; HLA-A*68:02; ADAM2; ENSG00000104755; CTA
LTNAIFVSF

SEQ ID NO: 5081 - protein, 9 aa, Homo sapiens
  Table A; Target 5081; HLA-B*15:01; ADAM2; ENSG00000104755; CTA
LTNAIFVSF

SEQ ID NO: 5082 - protein, 9 aa, Homo sapiens
  Table A; Target 5082; HLA-B*15:03; ADAM2; ENSG00000104755; CTA
LTNAIFVSF

SEQ ID NO: 5083 - protein, 9 aa, Homo sapiens
  Table A; Target 5083; HLA-B*27:02; ADAM2; ENSG00000104755; CTA
LTNAIFVSF

SEQ ID NO: 5084 - protein, 9 aa, Homo sapiens
  Table A; Target 5084; HLA-B*35:01; ADAM2; ENSG00000104755; CTA
LTNAIFVSF

SEQ ID NO: 5085 - protein, 9 aa, Homo sapiens
  Table A; Target 5085; HLA-B*46:01; ADAM2; ENSG00000104755; CTA
LTNAIFVSF

SEQ ID NO: 5086 - protein, 9 aa, Homo sapiens
  Table A; Target 5086; HLA-B*57:01; ADAM2; ENSG00000104755; CTA
LTNAIFVSF

SEQ ID NO: 5087 - protein, 9 aa, Homo sapiens
  Table A; Target 5087; HLA-B*58:01; ADAM2; ENSG00000104755; CTA
LTNAIFVSF

SEQ ID NO: 5088 - protein, 9 aa, Homo sapiens
  Table A; Target 5088; HLA-C*01:02; ADAM2; ENSG00000104755; CTA
LTNAIFVSF

SEQ ID NO: 5089 - protein, 9 aa, Homo sapiens
  Table A; Target 5089; HLA-C*02:02; ADAM2; ENSG00000104755; CTA
LTNAIFVSF

SEQ ID NO: 5090 - protein, 9 aa, Homo sapiens
  Table A; Target 5090; HLA-C*03:03; ADAM2; ENSG00000104755; CTA
LTNAIFVSF

SEQ ID NO: 5091 - protein, 9 aa, Homo sapiens
  Table A; Target 5091; HLA-C*03:04; ADAM2; ENSG00000104755; CTA
LTNAIFVSF

SEQ ID NO: 5092 - protein, 9 aa, Homo sapiens
  Table A; Target 5092; HLA-C*07:04; ADAM2; ENSG00000104755; CTA
LTNAIFVSF

SEQ ID NO: 5093 - protein, 9 aa, Homo sapiens
  Table A; Target 5093; HLA-C*12:03; ADAM2; ENSG00000104755; CTA
LTNAIFVSF

SEQ ID NO: 5094 - protein, 9 aa, Homo sapiens
  Table A; Target 5094; HLA-C*14:02; ADAM2; ENSG00000104755; CTA
LTNAIFVSF

SEQ ID NO: 5095 - protein, 9 aa, Homo sapiens
  Table A; Target 5095; HLA-C*16:01; ADAM2; ENSG00000104755; CTA
LTNAIFVSF

SEQ ID NO: 5096 - protein, 9 aa, Homo sapiens
  Table A; Target 5096; HLA-C*16:04; ADAM2; ENSG00000104755; CTA
LTNAIFVSF

SEQ ID NO: 5097 - protein, 10 aa, Homo sapiens
  Table A; Target 5097; HLA-B*57:01; ADAM2; ENSG00000104755; CTA
LVLRPHDVAF

SEQ ID NO: 5098 - protein, 9 aa, Homo sapiens
  Table A; Target 5098; HLA-A*03:01; ADAM2; ENSG00000104755; CTA
LVYREKSNY

SEQ ID NO: 5099 - protein, 9 aa, Homo sapiens
  Table A; Target 5099; HLA-A*26:01; ADAM2; ENSG00000104755; CTA
LVYREKSNY

SEQ ID NO: 5100 - protein, 9 aa, Homo sapiens
  Table A; Target 5100; HLA-A*29:02; ADAM2; ENSG00000104755; CTA
LVYREKSNY

SEQ ID NO: 5101 - protein, 9 aa, Homo sapiens
  Table A; Target 5101; HLA-A*30:02; ADAM2; ENSG00000104755; CTA
LVYREKSNY

SEQ ID NO: 5102 - protein, 9 aa, Homo sapiens
  Table A; Target 5102; HLA-B*15:01; ADAM2; ENSG00000104755; CTA
LVYREKSNY

SEQ ID NO: 5103 - protein, 9 aa, Homo sapiens
  Table A; Target 5103; HLA-C*02:02; ADAM2; ENSG00000104755; CTA
LVYREKSNY

SEQ ID NO: 5104 - protein, 10 aa, Homo sapiens
  Table A; Target 5104; HLA-A*31:01; ADAM2; ENSG00000104755; CTA
LYNEKDIESR

SEQ ID NO: 5105 - protein, 10 aa, Homo sapiens
  Table A; Target 5105; HLA-A*33:01; ADAM2; ENSG00000104755; CTA
LYNEKDIESR

SEQ ID NO: 5106 - protein, 10 aa, Homo sapiens
  Table A; Target 5106; HLA-A*33:03; ADAM2; ENSG00000104755; CTA
LYNEKDIESR

SEQ ID NO: 5107 - protein, 8 aa, Homo sapiens
  Table A; Target 5107; HLA-B*37:01; ADAM2; ENSG00000104755; CTA
MDSNFDSL

SEQ ID NO: 5108 - protein, 10 aa, Homo sapiens
  Table A; Target 5108; HLA-C*04:01; ADAM2; ENSG00000104755; CTA
MDSNFDSLPV

SEQ ID NO: 5109 - protein, 10 aa, Homo sapiens
  Table A; Target 5109; HLA-A*11:01; ADAM2; ENSG00000104755; CTA
MGITYDDINK

SEQ ID NO: 5110 - protein, 10 aa, Homo sapiens
  Table A; Target 5110; HLA-B*27:02; ADAM2; ENSG00000104755; CTA
MGITYDDINK

SEQ ID NO: 5111 - protein, 9 aa, Homo sapiens
  Table A; Target 5111; HLA-B*35:03; ADAM2; ENSG00000104755; CTA
MGSDTTVVA

SEQ ID NO: 5112 - protein, 9 aa, Homo sapiens
  Table A; Target 5112; HLA-B*54:01; ADAM2; ENSG00000104755; CTA
MGSDTTVVA

SEQ ID NO: 5113 - protein, 9 aa, Homo sapiens
  Table A; Target 5113; HLA-C*07:04; ADAM2; ENSG00000104755; CTA
MGSDTTVVA

SEQ ID NO: 5114 - protein, 10 aa, Homo sapiens
  Table A; Target 5114; HLA-B*07:02; ADAM2; ENSG00000104755; CTA
MGSDTTVVAQ

SEQ ID NO: 5115 - protein, 10 aa, Homo sapiens
  Table A; Target 5115; HLA-C*04:01; ADAM2; ENSG00000104755; CTA
MGSDTTVVAQ

SEQ ID NO: 5116 - protein, 10 aa, Homo sapiens
  Table A; Target 5116; HLA-C*07:06; ADAM2; ENSG00000104755; CTA
MGSDTTVVAQ

SEQ ID NO: 5117 - protein, 11 aa, Homo sapiens
  Table A; Target 5117; HLA-A*03:01; ADAM2; ENSG00000104755; CTA
MGSDTTVVAQK

SEQ ID NO: 5118 - protein, 11 aa, Homo sapiens
  Table A; Target 5118; HLA-A*03:02; ADAM2; ENSG00000104755; CTA
MGSDTTVVAQK

SEQ ID NO: 5119 - protein, 11 aa, Homo sapiens
  Table A; Target 5119; HLA-A*31:01; ADAM2; ENSG00000104755; CTA
MGSDTTVVAQK

SEQ ID NO: 5120 - protein, 11 aa, Homo sapiens
  Table A; Target 5120; HLA-A*33:01; ADAM2; ENSG00000104755; CTA
MGSDTTVVAQK

SEQ ID NO: 5121 - protein, 11 aa, Homo sapiens
  Table A; Target 5121; HLA-A*33:03; ADAM2; ENSG00000104755; CTA
MGSDTTVVAQK

SEQ ID NO: 5122 - protein, 11 aa, Homo sapiens
  Table A; Target 5122; HLA-A*68:01; ADAM2; ENSG00000104755; CTA
MGSDTTVVAQK

SEQ ID NO: 5123 - protein, 11 aa, Homo sapiens
  Table A; Target 5123; HLA-A*68:02; ADAM2; ENSG00000104755; CTA
MGSDTTVVAQK

SEQ ID NO: 5124 - protein, 11 aa, Homo sapiens
  Table A; Target 5124; HLA-B*27:02; ADAM2; ENSG00000104755; CTA
MGSDTTVVAQK

SEQ ID NO: 5125 - protein, 11 aa, Homo sapiens
  Table A; Target 5125; HLA-B*27:05; ADAM2; ENSG00000104755; CTA
MGSDTTVVAQK

SEQ ID NO: 5126 - protein, 11 aa, Homo sapiens
  Table A; Target 5126; HLA-C*07:02; ADAM2; ENSG00000104755; CTA
MGSDTTVVAQK

SEQ ID NO: 5127 - protein, 11 aa, Homo sapiens
  Table A; Target 5127; HLA-C*07:06; ADAM2; ENSG00000104755; CTA
MGSDTTVVAQK

SEQ ID NO: 5128 - protein, 9 aa, Homo sapiens
  Table A; Target 5128; HLA-B*38:01; ADAM2; ENSG00000104755; CTA
MHVIVEKQL

SEQ ID NO: 5129 - protein, 8 aa, Homo sapiens
  Table A; Target 5129; HLA-C*04:01; ADAM2; ENSG00000104755; CTA
MNPEAIHF

SEQ ID NO: 5130 - protein, 8 aa, Homo sapiens
  Table A; Target 5130; HLA-C*07:01; ADAM2; ENSG00000104755; CTA
MNPEAIHF

SEQ ID NO: 5131 - protein, 8 aa, Homo sapiens
  Table A; Target 5131; HLA-A*31:01; ADAM2; ENSG00000104755; CTA
MVKVNFQR

SEQ ID NO: 5132 - protein, 8 aa, Homo sapiens
  Table A; Target 5132; HLA-A*33:01; ADAM2; ENSG00000104755; CTA
MVKVNFQR

SEQ ID NO: 5133 - protein, 8 aa, Homo sapiens
  Table A; Target 5133; HLA-A*33:03; ADAM2; ENSG00000104755; CTA
MVKVNFQR

SEQ ID NO: 5134 - protein, 9 aa, Homo sapiens
  Table A; Target 5134; HLA-A*68:02; ADAM2; ENSG00000104755; CTA
NAIFVSFNI

SEQ ID NO: 5135 - protein, 9 aa, Homo sapiens
  Table A; Target 5135; HLA-B*51:01; ADAM2; ENSG00000104755; CTA
NAIFVSFNI

SEQ ID NO: 5136 - protein, 10 aa, Homo sapiens
  Table A; Target 5136; HLA-A*30:01; ADAM2; ENSG00000104755; CTA
NEKDIESRDL

SEQ ID NO: 5137 - protein, 10 aa, Homo sapiens
  Table A; Target 5137; HLA-B*40:01; ADAM2; ENSG00000104755; CTA
NEKDIESRDL

SEQ ID NO: 5138 - protein, 10 aa, Homo sapiens
  Table A; Target 5138; HLA-B*44:02; ADAM2; ENSG00000104755; CTA
NEKDIESRDL

SEQ ID NO: 5139 - protein, 8 aa, Homo sapiens
  Table A; Target 5139; HLA-B*18:01; ADAM2; ENSG00000104755; CTA
NELLHTFL

SEQ ID NO: 5140 - protein, 8 aa, Homo sapiens
  Table A; Target 5140; HLA-B*37:01; ADAM2; ENSG00000104755; CTA
NELLHTFL

SEQ ID NO: 5141 - protein, 10 aa, Homo sapiens
  Table A; Target 5141; HLA-B*44:02; ADAM2; ENSG00000104755; CTA
NELLHTFLRW

SEQ ID NO: 5142 - protein, 10 aa, Homo sapiens
  Table A; Target 5142; HLA-B*44:03; ADAM2; ENSG00000104755; CTA
NELLHTFLRW

SEQ ID NO: 5143 - protein, 9 aa, Homo sapiens
  Table A; Target 5143; HLA-A*02:07; ADAM2; ENSG00000104755; CTA
NFDSLPVQI

SEQ ID NO: 5144 - protein, 9 aa, Homo sapiens
  Table A; Target 5144; HLA-A*23:01; ADAM2; ENSG00000104755; CTA
NFDSLPVQI

SEQ ID NO: 5145 - protein, 9 aa, Homo sapiens
  Table A; Target 5145; HLA-A*24:02; ADAM2; ENSG00000104755; CTA
NFDSLPVQI

SEQ ID NO: 5146 - protein, 9 aa, Homo sapiens
  Table A; Target 5146; HLA-A*32:01; ADAM2; ENSG00000104755; CTA
NFDSLPVQI

SEQ ID NO: 5147 - protein, 9 aa, Homo sapiens
  Table A; Target 5147; HLA-B*35:01; ADAM2; ENSG00000104755; CTA
NFDSLPVQI

SEQ ID NO: 5148 - protein, 9 aa, Homo sapiens
  Table A; Target 5148; HLA-B*35:03; ADAM2; ENSG00000104755; CTA
NFDSLPVQI

SEQ ID NO: 5149 - protein, 9 aa, Homo sapiens
  Table A; Target 5149; HLA-B*38:01; ADAM2; ENSG00000104755; CTA
NFDSLPVQI

SEQ ID NO: 5150 - protein, 9 aa, Homo sapiens
  Table A; Target 5150; HLA-B*55:01; ADAM2; ENSG00000104755; CTA
NFDSLPVQI

SEQ ID NO: 5151 - protein, 9 aa, Homo sapiens
  Table A; Target 5151; HLA-C*05:01; ADAM2; ENSG00000104755; CTA
NFDSLPVQI

SEQ ID NO: 5152 - protein, 9 aa, Homo sapiens
  Table A; Target 5152; HLA-C*07:04; ADAM2; ENSG00000104755; CTA
NFDSLPVQI

SEQ ID NO: 5153 - protein, 9 aa, Homo sapiens
  Table A; Target 5153; HLA-C*14:02; ADAM2; ENSG00000104755; CTA
NFDSLPVQI

SEQ ID NO: 5154 - protein, 10 aa, Homo sapiens
  Table A; Target 5154; HLA-A*29:02; ADAM2; ENSG00000104755; CTA
NFLPHNFRVY

SEQ ID NO: 5155 - protein, 9 aa, Homo sapiens
  Table A; Target 5155; HLA-A*29:02; ADAM2; ENSG00000104755; CTA
NFPPVAIPA

SEQ ID NO: 5156 - protein, 9 aa, Homo sapiens
  Table A; Target 5156; HLA-C*14:02; ADAM2; ENSG00000104755; CTA
NFPPVAIPA

SEQ ID NO: 5157 - protein, 8 aa, Homo sapiens
  Table A; Target 5157; HLA-B*39:01; ADAM2; ENSG00000104755; CTA
NHMGSDTT

SEQ ID NO: 5158 - protein, 9 aa, Homo sapiens
  Table A; Target 5158; HLA-B*27:05; ADAM2; ENSG00000104755; CTA
NHMGSDTTV

SEQ ID NO: 5159 - protein, 9 aa, Homo sapiens
  Table A; Target 5159; HLA-B*38:01; ADAM2; ENSG00000104755; CTA
NHMGSDTTV

SEQ ID NO: 5160 - protein, 9 aa, Homo sapiens
  Table A; Target 5160; HLA-B*39:01; ADAM2; ENSG00000104755; CTA
NHMGSDTTV

SEQ ID NO: 5161 - protein, 10 aa, Homo sapiens
  Table A; Target 5161; HLA-B*38:01; ADAM2; ENSG00000104755; CTA
NHMGSDTTVV

SEQ ID NO: 5162 - protein, 10 aa, Homo sapiens
  Table A; Target 5162; HLA-B*39:01; ADAM2; ENSG00000104755; CTA
NHMGSDTTVV

SEQ ID NO: 5163 - protein, 11 aa, Homo sapiens
  Table A; Target 5163; HLA-B*38:01; ADAM2; ENSG00000104755; CTA
NHMGSDTTVVA

SEQ ID NO: 5164 - protein, 11 aa, Homo sapiens
  Table A; Target 5164; HLA-B*39:01; ADAM2; ENSG00000104755; CTA
NHMGSDTTVVA

SEQ ID NO: 5165 - protein, 9 aa, Homo sapiens
  Table A; Target 5165; HLA-A*68:02; ADAM2; ENSG00000104755; CTA
NITIILSSL

SEQ ID NO: 5166 - protein, 9 aa, Homo sapiens
  Table A; Target 5166; HLA-B*27:05; ADAM2; ENSG00000104755; CTA
NITIILSSL

SEQ ID NO: 5167 - protein, 9 aa, Homo sapiens
  Table A; Target 5167; HLA-C*01:02; ADAM2; ENSG00000104755; CTA
NITIILSSL

SEQ ID NO: 5168 - protein, 9 aa, Homo sapiens
  Table A; Target 5168; HLA-C*14:02; ADAM2; ENSG00000104755; CTA
NITIILSSL

SEQ ID NO: 5169 - protein, 8 aa, Homo sapiens
  Table A; Target 5169; HLA-B*08:01; ADAM2; ENSG00000104755; CTA
NLMQKNFL

SEQ ID NO: 5170 - protein, 9 aa, Homo sapiens
  Table A; Target 5170; HLA-A*24:02; ADAM2; ENSG00000104755; CTA
NQPRLDPFF

SEQ ID NO: 5171 - protein, 9 aa, Homo sapiens
  Table A; Target 5171; HLA-A*30:02; ADAM2; ENSG00000104755; CTA
NQRCVSSSY

SEQ ID NO: 5172 - protein, 9 aa, Homo sapiens
  Table A; Target 5172; HLA-A*32:01; ADAM2; ENSG00000104755; CTA
NQRCVSSSY

SEQ ID NO: 5173 - protein, 9 aa, Homo sapiens
  Table A; Target 5173; HLA-B*15:01; ADAM2; ENSG00000104755; CTA
NQRCVSSSY

SEQ ID NO: 5174 - protein, 9 aa, Homo sapiens
  Table A; Target 5174; HLA-B*15:03; ADAM2; ENSG00000104755; CTA
NQRCVSSSY

SEQ ID NO: 5175 - protein, 9 aa, Homo sapiens
  Table A; Target 5175; HLA-B*46:01; ADAM2; ENSG00000104755; CTA
NQRCVSSSY

SEQ ID NO: 5176 - protein, 9 aa, Homo sapiens
  Table A; Target 5176; HLA-C*07:04; ADAM2; ENSG00000104755; CTA
NQRCVSSSY

SEQ ID NO: 5177 - protein, 9 aa, Homo sapiens
  Table A; Target 5177; HLA-C*14:02; ADAM2; ENSG00000104755; CTA
NQRCVSSSY

SEQ ID NO: 5178 - protein, 9 aa, Homo sapiens
  Table A; Target 5178; HLA-A*68:02; ADAM2; ENSG00000104755; CTA
NVSYGIEPL

SEQ ID NO: 5179 - protein, 9 aa, Homo sapiens
  Table A; Target 5179; HLA-B*35:03; ADAM2; ENSG00000104755; CTA
NVSYGIEPL

SEQ ID NO: 5180 - protein, 9 aa, Homo sapiens
  Table A; Target 5180; HLA-C*01:02; ADAM2; ENSG00000104755; CTA
NVSYGIEPL

SEQ ID NO: 5181 - protein, 9 aa, Homo sapiens
  Table A; Target 5181; HLA-C*07:04; ADAM2; ENSG00000104755; CTA
NVSYGIEPL

SEQ ID NO: 5182 - protein, 8 aa, Homo sapiens
  Table A; Target 5182; HLA-A*23:01; ADAM2; ENSG00000104755; CTA
NYAGGVVL

SEQ ID NO: 5183 - protein, 8 aa, Homo sapiens
  Table A; Target 5183; HLA-B*35:03; ADAM2; ENSG00000104755; CTA
NYAGGVVL

SEQ ID NO: 5184 - protein, 8 aa, Homo sapiens
  Table A; Target 5184; HLA-B*39:01; ADAM2; ENSG00000104755; CTA
NYAGGVVL

SEQ ID NO: 5185 - protein, 8 aa, Homo sapiens
  Table A; Target 5185; HLA-C*01:02; ADAM2; ENSG00000104755; CTA
NYAGGVVL

SEQ ID NO: 5186 - protein, 8 aa, Homo sapiens
  Table A; Target 5186; HLA-C*03:04; ADAM2; ENSG00000104755; CTA
NYAGGVVL

SEQ ID NO: 5187 - protein, 8 aa, Homo sapiens
  Table A; Target 5187; HLA-C*04:01; ADAM2; ENSG00000104755; CTA
NYAGGVVL

SEQ ID NO: 5188 - protein, 8 aa, Homo sapiens
  Table A; Target 5188; HLA-C*14:02; ADAM2; ENSG00000104755; CTA
NYAGGVVL

SEQ ID NO: 5189 - protein, 9 aa, Homo sapiens
  Table A; Target 5189; HLA-A*24:02; ADAM2; ENSG00000104755; CTA
NYAGGVVLH

SEQ ID NO: 5190 - protein, 9 aa, Homo sapiens
  Table A; Target 5190; HLA-A*29:02; ADAM2; ENSG00000104755; CTA
NYAGGVVLH

SEQ ID NO: 5191 - protein, 9 aa, Homo sapiens
  Table A; Target 5191; HLA-A*33:03; ADAM2; ENSG00000104755; CTA
NYAGGVVLH

SEQ ID NO: 5192 - protein, 9 aa, Homo sapiens
  Table A; Target 5192; HLA-C*07:04; ADAM2; ENSG00000104755; CTA
NYAGGVVLH

SEQ ID NO: 5193 - protein, 10 aa, Homo sapiens
  Table A; Target 5193; HLA-C*06:02; ADAM2; ENSG00000104755; CTA
NYAGGVVLHP

SEQ ID NO: 5194 - protein, 10 aa, Homo sapiens
  Table A; Target 5194; HLA-C*07:02; ADAM2; ENSG00000104755; CTA
NYAGGVVLHP

SEQ ID NO: 5195 - protein, 11 aa, Homo sapiens
  Table A; Target 5195; HLA-A*31:01; ADAM2; ENSG00000104755; CTA
NYAGGVVLHPR

SEQ ID NO: 5196 - protein, 11 aa, Homo sapiens
  Table A; Target 5196; HLA-A*33:01; ADAM2; ENSG00000104755; CTA
NYAGGVVLHPR

SEQ ID NO: 5197 - protein, 11 aa, Homo sapiens
  Table A; Target 5197; HLA-A*33:03; ADAM2; ENSG00000104755; CTA
NYAGGVVLHPR

SEQ ID NO: 5198 - protein, 11 aa, Homo sapiens
  Table A; Target 5198; HLA-A*68:01; ADAM2; ENSG00000104755; CTA
NYAGGVVLHPR

SEQ ID NO: 5199 - protein, 8 aa, Homo sapiens
  Table A; Target 5199; HLA-C*07:01; ADAM2; ENSG00000104755; CTA
NYVGATFQ

SEQ ID NO: 5200 - protein, 8 aa, Homo sapiens
  Table A; Target 5200; HLA-C*07:02; ADAM2; ENSG00000104755; CTA
NYVGATFQ

SEQ ID NO: 5201 - protein, 9 aa, Homo sapiens
  Table A; Target 5201; HLA-A*24:02; ADAM2; ENSG00000104755; CTA
NYVGATFQG

SEQ ID NO: 5202 - protein, 9 aa, Homo sapiens
  Table A; Target 5202; HLA-C*07:01; ADAM2; ENSG00000104755; CTA
NYVGATFQG

SEQ ID NO: 5203 - protein, 10 aa, Homo sapiens
  Table A; Target 5203; HLA-A*33:03; ADAM2; ENSG00000104755; CTA
NYVGATFQGK

SEQ ID NO: 5204 - protein, 9 aa, Homo sapiens
  Table A; Target 5204; HLA-B*49:01; ADAM2; ENSG00000104755; CTA
PEAIHFSGV

SEQ ID NO: 5205 - protein, 9 aa, Homo sapiens
  Table A; Target 5205; HLA-A*02:07; ADAM2; ENSG00000104755; CTA
PLDQDFQNF

SEQ ID NO: 5206 - protein, 9 aa, Homo sapiens
  Table A; Target 5206; HLA-A*24:02; ADAM2; ENSG00000104755; CTA
PLDQDFQNF

SEQ ID NO: 5207 - protein, 8 aa, Homo sapiens
  Table A; Target 5207; HLA-A*30:02; ADAM2; ENSG00000104755; CTA
PQQDFAKY

SEQ ID NO: 5208 - protein, 9 aa, Homo sapiens
  Table A; Target 5208; HLA-C*07:02; ADAM2; ENSG00000104755; CTA
PRTISLESL

SEQ ID NO: 5209 - protein, 9 aa, Homo sapiens
  Table A; Target 5209; HLA-A*03:02; ADAM2; ENSG00000104755; CTA
PVQITVPEK

SEQ ID NO: 5210 - protein, 9 aa, Homo sapiens
  Table A; Target 5210; HLA-A*11:01; ADAM2; ENSG00000104755; CTA
PVQITVPEK

SEQ ID NO: 5211 - protein, 9 aa, Homo sapiens
  Table A; Target 5211; HLA-B*27:02; ADAM2; ENSG00000104755; CTA
PVQITVPEK

SEQ ID NO: 5212 - protein, 8 aa, Homo sapiens
  Table A; Target 5212; HLA-B*08:01; ADAM2; ENSG00000104755; CTA
QASYKIVI

SEQ ID NO: 5213 - protein, 8 aa, Homo sapiens
  Table A; Target 5213; HLA-C*07:04; ADAM2; ENSG00000104755; CTA
QASYKIVI

SEQ ID NO: 5214 - protein, 8 aa, Homo sapiens
  Table A; Target 5214; HLA-C*16:01; ADAM2; ENSG00000104755; CTA
QASYKIVI

SEQ ID NO: 5215 - protein, 9 aa, Homo sapiens
  Table A; Target 5215; HLA-C*07:01; ADAM2; ENSG00000104755; CTA
QCGKLICKY

SEQ ID NO: 5216 - protein, 9 aa, Homo sapiens
  Table A; Target 5216; HLA-C*04:01; ADAM2; ENSG00000104755; CTA
QCSGAVCIM

SEQ ID NO: 5217 - protein, 9 aa, Homo sapiens
  Table A; Target 5217; HLA-C*07:01; ADAM2; ENSG00000104755; CTA
QCSGAVCIM

SEQ ID NO: 5218 - protein, 9 aa, Homo sapiens
  Table A; Target 5218; HLA-A*30:01; ADAM2; ENSG00000104755; CTA
QDFAKYIEM

SEQ ID NO: 5219 - protein, 9 aa, Homo sapiens
  Table A; Target 5219; HLA-B*37:01; ADAM2; ENSG00000104755; CTA
QDFAKYIEM

SEQ ID NO: 5220 - protein, 9 aa, Homo sapiens
  Table A; Target 5220; HLA-B*18:01; ADAM2; ENSG00000104755; CTA
QDFQNFCHY

SEQ ID NO: 5221 - protein, 9 aa, Homo sapiens
  Table A; Target 5221; HLA-B*37:01; ADAM2; ENSG00000104755; CTA
QDFQNFCHY

SEQ ID NO: 5222 - protein, 9 aa, Homo sapiens
  Table A; Target 5222; HLA-B*44:02; ADAM2; ENSG00000104755; CTA
QDFQNFCHY

SEQ ID NO: 5223 - protein, 9 aa, Homo sapiens
  Table A; Target 5223; HLA-B*44:03; ADAM2; ENSG00000104755; CTA
QDFQNFCHY

SEQ ID NO: 5224 - protein, 9 aa, Homo sapiens
  Table A; Target 5224; HLA-C*07:01; ADAM2; ENSG00000104755; CTA
QDFQNFCHY

SEQ ID NO: 5225 - protein, 9 aa, Homo sapiens
  Table A; Target 5225; HLA-A*03:01; ADAM2; ENSG00000104755; CTA
QGYIEGYPK

SEQ ID NO: 5226 - protein, 9 aa, Homo sapiens
  Table A; Target 5226; HLA-A*03:02; ADAM2; ENSG00000104755; CTA
QGYIEGYPK

SEQ ID NO: 5227 - protein, 9 aa, Homo sapiens
  Table A; Target 5227; HLA-A*11:01; ADAM2; ENSG00000104755; CTA
QGYIEGYPK

SEQ ID NO: 5228 - protein, 9 aa, Homo sapiens
  Table A; Target 5228; HLA-A*31:01; ADAM2; ENSG00000104755; CTA
QGYIEGYPK

SEQ ID NO: 5229 - protein, 9 aa, Homo sapiens
  Table A; Target 5229; HLA-A*33:01; ADAM2; ENSG00000104755; CTA
QGYIEGYPK

SEQ ID NO: 5230 - protein, 9 aa, Homo sapiens
  Table A; Target 5230; HLA-B*27:02; ADAM2; ENSG00000104755; CTA
QGYIEGYPK

SEQ ID NO: 5231 - protein, 9 aa, Homo sapiens
  Table A; Target 5231; HLA-B*27:05; ADAM2; ENSG00000104755; CTA
QGYIEGYPK

SEQ ID NO: 5232 - protein, 9 aa, Homo sapiens
  Table A; Target 5232; HLA-C*06:02; ADAM2; ENSG00000104755; CTA
QGYIEGYPK

SEQ ID NO: 5233 - protein, 9 aa, Homo sapiens
  Table A; Target 5233; HLA-C*07:06; ADAM2; ENSG00000104755; CTA
QGYIEGYPK

SEQ ID NO: 5234 - protein, 11 aa, Homo sapiens
  Table A; Target 5234; HLA-C*07:01; ADAM2; ENSG00000104755; CTA
QGYIEGYPKSV

SEQ ID NO: 5235 - protein, 9 aa, Homo sapiens
  Table A; Target 5235; HLA-B*15:01; ADAM2; ENSG00000104755; CTA
QIPRATIIY

SEQ ID NO: 5236 - protein, 9 aa, Homo sapiens
  Table A; Target 5236; HLA-B*15:03; ADAM2; ENSG00000104755; CTA
QIPRATIIY

SEQ ID NO: 5237 - protein, 9 aa, Homo sapiens
  Table A; Target 5237; HLA-C*07:04; ADAM2; ENSG00000104755; CTA
QIPRATIIY

SEQ ID NO: 5238 - protein, 9 aa, Homo sapiens
  Table A; Target 5238; HLA-A*02:01; ADAM2; ENSG00000104755; CTA
QLIGLTNAI

SEQ ID NO: 5239 - protein, 9 aa, Homo sapiens
  Table A; Target 5239; HLA-A*02:03; ADAM2; ENSG00000104755; CTA
QLIGLTNAI

SEQ ID NO: 5240 - protein, 9 aa, Homo sapiens
  Table A; Target 5240; HLA-A*02:04; ADAM2; ENSG00000104755; CTA
QLIGLTNAI

SEQ ID NO: 5241 - protein, 9 aa, Homo sapiens
  Table A; Target 5241; HLA-A*02:07; ADAM2; ENSG00000104755; CTA
QLIGLTNAI

SEQ ID NO: 5242 - protein, 9 aa, Homo sapiens
  Table A; Target 5242; HLA-A*23:01; ADAM2; ENSG00000104755; CTA
QLIGLTNAI

SEQ ID NO: 5243 - protein, 9 aa, Homo sapiens
  Table A; Target 5243; HLA-A*25:01; ADAM2; ENSG00000104755; CTA
QLIGLTNAI

SEQ ID NO: 5244 - protein, 9 aa, Homo sapiens
  Table A; Target 5244; HLA-A*26:01; ADAM2; ENSG00000104755; CTA
QLIGLTNAI

SEQ ID NO: 5245 - protein, 9 aa, Homo sapiens
  Table A; Target 5245; HLA-A*32:01; ADAM2; ENSG00000104755; CTA
QLIGLTNAI

SEQ ID NO: 5246 - protein, 9 aa, Homo sapiens
  Table A; Target 5246; HLA-B*13:02; ADAM2; ENSG00000104755; CTA
QLIGLTNAI

SEQ ID NO: 5247 - protein, 9 aa, Homo sapiens
  Table A; Target 5247; HLA-B*15:01; ADAM2; ENSG00000104755; CTA
QLIGLTNAI

SEQ ID NO: 5248 - protein, 9 aa, Homo sapiens
  Table A; Target 5248; HLA-B*38:01; ADAM2; ENSG00000104755; CTA
QLIGLTNAI

SEQ ID NO: 5249 - protein, 9 aa, Homo sapiens
  Table A; Target 5249; HLA-B*46:01; ADAM2; ENSG00000104755; CTA
QLIGLTNAI

SEQ ID NO: 5250 - protein, 9 aa, Homo sapiens
  Table A; Target 5250; HLA-B*55:01; ADAM2; ENSG00000104755; CTA
QLIGLTNAI

SEQ ID NO: 5251 - protein, 9 aa, Homo sapiens
  Table A; Target 5251; HLA-C*01:02; ADAM2; ENSG00000104755; CTA
QLIGLTNAI

SEQ ID NO: 5252 - protein, 10 aa, Homo sapiens
  Table A; Target 5252; HLA-A*23:01; ADAM2; ENSG00000104755; CTA
QLIGLTNAIF

SEQ ID NO: 5253 - protein, 9 aa, Homo sapiens
  Table A; Target 5253; HLA-B*13:02; ADAM2; ENSG00000104755; CTA
QLLSLSMGI

SEQ ID NO: 5254 - protein, 11 aa, Homo sapiens
  Table A; Target 5254; HLA-A*29:02; ADAM2; ENSG00000104755; CTA
QLLSLSMGITY

SEQ ID NO: 5255 - protein, 11 aa, Homo sapiens
  Table A; Target 5255; HLA-A*30:02; ADAM2; ENSG00000104755; CTA
QLLSLSMGITY

SEQ ID NO: 5256 - protein, 8 aa, Homo sapiens
  Table A; Target 5256; HLA-C*07:01; ADAM2; ENSG00000104755; CTA
QRCVSSSY

SEQ ID NO: 5257 - protein, 9 aa, Homo sapiens
  Table A; Target 5257; HLA-C*07:01; ADAM2; ENSG00000104755; CTA
QRCVSSSYL

SEQ ID NO: 5258 - protein, 9 aa, Homo sapiens
  Table A; Target 5258; HLA-A*01:01; ADAM2; ENSG00000104755; CTA
QSVEPQQDF

SEQ ID NO: 5259 - protein, 9 aa, Homo sapiens
  Table A; Target 5259; HLA-B*15:01; ADAM2; ENSG00000104755; CTA
QSVEPQQDF

SEQ ID NO: 5260 - protein, 9 aa, Homo sapiens
  Table A; Target 5260; HLA-B*15:03; ADAM2; ENSG00000104755; CTA
QSVEPQQDF

SEQ ID NO: 5261 - protein, 9 aa, Homo sapiens
  Table A; Target 5261; HLA-B*35:01; ADAM2; ENSG00000104755; CTA
QSVEPQQDF

SEQ ID NO: 5262 - protein, 9 aa, Homo sapiens
  Table A; Target 5262; HLA-B*39:01; ADAM2; ENSG00000104755; CTA
QSVEPQQDF

SEQ ID NO: 5263 - protein, 9 aa, Homo sapiens
  Table A; Target 5263; HLA-B*46:01; ADAM2; ENSG00000104755; CTA
QSVEPQQDF

SEQ ID NO: 5264 - protein, 9 aa, Homo sapiens
  Table A; Target 5264; HLA-B*57:01; ADAM2; ENSG00000104755; CTA
QSVEPQQDF

SEQ ID NO: 5265 - protein, 9 aa, Homo sapiens
  Table A; Target 5265; HLA-B*58:01; ADAM2; ENSG00000104755; CTA
QSVEPQQDF

SEQ ID NO: 5266 - protein, 9 aa, Homo sapiens
  Table A; Target 5266; HLA-C*02:02; ADAM2; ENSG00000104755; CTA
QSVEPQQDF

SEQ ID NO: 5267 - protein, 9 aa, Homo sapiens
  Table A; Target 5267; HLA-C*03:03; ADAM2; ENSG00000104755; CTA
QSVEPQQDF

SEQ ID NO: 5268 - protein, 9 aa, Homo sapiens
  Table A; Target 5268; HLA-C*05:01; ADAM2; ENSG00000104755; CTA
QSVEPQQDF

SEQ ID NO: 5269 - protein, 9 aa, Homo sapiens
  Table A; Target 5269; HLA-C*16:04; ADAM2; ENSG00000104755; CTA
QSVEPQQDF

SEQ ID NO: 5270 - protein, 11 aa, Homo sapiens
  Table A; Target 5270; HLA-A*03:02; ADAM2; ENSG00000104755; CTA
QSVEPQQDFAK

SEQ ID NO: 5271 - protein, 11 aa, Homo sapiens
  Table A; Target 5271; HLA-A*11:01; ADAM2; ENSG00000104755; CTA
QSVEPQQDFAK

SEQ ID NO: 5272 - protein, 11 aa, Homo sapiens
  Table A; Target 5272; HLA-B*27:02; ADAM2; ENSG00000104755; CTA
QSVEPQQDFAK

SEQ ID NO: 5273 - protein, 11 aa, Homo sapiens
  Table A; Target 5273; HLA-C*07:06; ADAM2; ENSG00000104755; CTA
QSVEPQQDFAK

SEQ ID NO: 5274 - protein, 9 aa, Homo sapiens
  Table A; Target 5274; HLA-A*24:02; ADAM2; ENSG00000104755; CTA
RATIIYANI

SEQ ID NO: 5275 - protein, 9 aa, Homo sapiens
  Table A; Target 5275; HLA-B*57:01; ADAM2; ENSG00000104755; CTA
RATIIYANI

SEQ ID NO: 5276 - protein, 9 aa, Homo sapiens
  Table A; Target 5276; HLA-B*58:01; ADAM2; ENSG00000104755; CTA
RATIIYANI

SEQ ID NO: 5277 - protein, 9 aa, Homo sapiens
  Table A; Target 5277; HLA-C*02:02; ADAM2; ENSG00000104755; CTA
RATIIYANI

SEQ ID NO: 5278 - protein, 9 aa, Homo sapiens
  Table A; Target 5278; HLA-B*40:02; ADAM2; ENSG00000104755; CTA
REKSNYVGA

SEQ ID NO: 5279 - protein, 11 aa, Homo sapiens
  Table A; Target 5279; HLA-B*40:02; ADAM2; ENSG00000104755; CTA
REKSNYVGATF

SEQ ID NO: 5280 - protein, 11 aa, Homo sapiens
  Table A; Target 5280; HLA-B*44:02; ADAM2; ENSG00000104755; CTA
REKSNYVGATF

SEQ ID NO: 5281 - protein, 11 aa, Homo sapiens
  Table A; Target 5281; HLA-B*44:03; ADAM2; ENSG00000104755; CTA
REKSNYVGATF

SEQ ID NO: 5282 - protein, 11 aa, Homo sapiens
  Table A; Target 5282; HLA-B*57:01; ADAM2; ENSG00000104755; CTA
REKSNYVGATF

SEQ ID NO: 5283 - protein, 11 aa, Homo sapiens
  Table A; Target 5283; HLA-B*15:01; ADAM2; ENSG00000104755; CTA
RGVLQFENVSY

SEQ ID NO: 5284 - protein, 11 aa, Homo sapiens
  Table A; Target 5284; HLA-A*02:07; ADAM2; ENSG00000104755; CTA
RLDPFFKQQAV

SEQ ID NO: 5285 - protein, 11 aa, Homo sapiens
  Table A; Target 5285; HLA-A*02:07; ADAM2; ENSG00000104755; CTA
RLPERRYIENI

SEQ ID NO: 5286 - protein, 9 aa, Homo sapiens
  Table A; Target 5286; HLA-A*02:07; ADAM2; ENSG00000104755; CTA
RMDSNFDSL

SEQ ID NO: 5287 - protein, 9 aa, Homo sapiens
  Table A; Target 5287; HLA-C*05:01; ADAM2; ENSG00000104755; CTA
RMDSNFDSL

SEQ ID NO: 5288 - protein, 10 aa, Homo sapiens
  Table A; Target 5288; HLA-B*56:01; ADAM2; ENSG00000104755; CTA
RPHDVAFLLV

SEQ ID NO: 5289 - protein, 11 aa, Homo sapiens
  Table A; Target 5289; HLA-A*29:02; ADAM2; ENSG00000104755; CTA
RPHDVAFLLVY

SEQ ID NO: 5290 - protein, 11 aa, Homo sapiens
  Table A; Target 5290; HLA-B*35:01; ADAM2; ENSG00000104755; CTA
RPHDVAFLLVY

SEQ ID NO: 5291 - protein, 9 aa, Homo sapiens
  Table A; Target 5291; HLA-A*02:04; ADAM2; ENSG00000104755; CTA
RVLFLLSGL

SEQ ID NO: 5292 - protein, 10 aa, Homo sapiens
  Table A; Target 5292; HLA-A*02:03; ADAM2; ENSG00000104755; CTA
RVYSYSGTGI

SEQ ID NO: 5293 - protein, 10 aa, Homo sapiens
  Table A; Target 5293; HLA-A*03:01; ADAM2; ENSG00000104755; CTA
RVYSYSGTGI

SEQ ID NO: 5294 - protein, 10 aa, Homo sapiens
  Table A; Target 5294; HLA-A*24:02; ADAM2; ENSG00000104755; CTA
RYIENIYHSK

SEQ ID NO: 5295 - protein, 10 aa, Homo sapiens
  Table A; Target 5295; HLA-A*30:02; ADAM2; ENSG00000104755; CTA
RYIENIYHSK

SEQ ID NO: 5296 - protein, 10 aa, Homo sapiens
  Table A; Target 5296; HLA-A*31:01; ADAM2; ENSG00000104755; CTA
RYIENIYHSK

SEQ ID NO: 5297 - protein, 10 aa, Homo sapiens
  Table A; Target 5297; HLA-B*57:01; ADAM2; ENSG00000104755; CTA
RYIENIYHSK

SEQ ID NO: 5298 - protein, 9 aa, Homo sapiens
  Table A; Target 5298; HLA-A*30:02; ADAM2; ENSG00000104755; CTA
SASCPENHY

SEQ ID NO: 5299 - protein, 9 aa, Homo sapiens
  Table A; Target 5299; HLA-C*16:01; ADAM2; ENSG00000104755; CTA
SASCPENHY

SEQ ID NO: 5300 - protein, 9 aa, Homo sapiens
  Table A; Target 5300; HLA-C*16:02; ADAM2; ENSG00000104755; CTA
SASCPENHY

SEQ ID NO: 5301 - protein, 10 aa, Homo sapiens
  Table A; Target 5301; HLA-B*27:05; ADAM2; ENSG00000104755; CTA
SASCPENHYV

SEQ ID NO: 5302 - protein, 9 aa, Homo sapiens
  Table A; Target 5302; HLA-B*37:01; ADAM2; ENSG00000104755; CTA
SDHADSQKM

SEQ ID NO: 5303 - protein, 10 aa, Homo sapiens
  Table A; Target 5303; HLA-B*44:02; ADAM2; ENSG00000104755; CTA
SDHADSQKMW

SEQ ID NO: 5304 - protein, 10 aa, Homo sapiens
  Table A; Target 5304; HLA-B*44:03; ADAM2; ENSG00000104755; CTA
SDHADSQKMW

SEQ ID NO: 5305 - protein, 9 aa, Homo sapiens
  Table A; Target 5305; HLA-B*37:01; ADAM2; ENSG00000104755; CTA
SDLWPGGSI

SEQ ID NO: 5306 - protein, 8 aa, Homo sapiens
  Table A; Target 5306; HLA-B*37:01; ADAM2; ENSG00000104755; CTA
SDTTVVAQ

SEQ ID NO: 5307 - protein, 8 aa, Homo sapiens
  Table A; Target 5307; HLA-C*04:01; ADAM2; ENSG00000104755; CTA
SDTTVVAQ

SEQ ID NO: 5308 - protein, 9 aa, Homo sapiens
  Table A; Target 5308; HLA-A*03:01; ADAM2; ENSG00000104755; CTA
SDTTVVAQK

SEQ ID NO: 5309 - protein, 9 aa, Homo sapiens
  Table A; Target 5309; HLA-A*03:02; ADAM2; ENSG00000104755; CTA
SDTTVVAQK

SEQ ID NO: 5310 - protein, 9 aa, Homo sapiens
  Table A; Target 5310; HLA-A*11:01; ADAM2; ENSG00000104755; CTA
SDTTVVAQK

SEQ ID NO: 5311 - protein, 9 aa, Homo sapiens
  Table A; Target 5311; HLA-A*68:01; ADAM2; ENSG00000104755; CTA
SDTTVVAQK

SEQ ID NO: 5312 - protein, 9 aa, Homo sapiens
  Table A; Target 5312; HLA-B*27:02; ADAM2; ENSG00000104755; CTA
SDTTVVAQK

SEQ ID NO: 5313 - protein, 9 aa, Homo sapiens
  Table A; Target 5313; HLA-B*27:05; ADAM2; ENSG00000104755; CTA
SDTTVVAQK

SEQ ID NO: 5314 - protein, 9 aa, Homo sapiens
  Table A; Target 5314; HLA-C*04:01; ADAM2; ENSG00000104755; CTA
SDTTVVAQK

SEQ ID NO: 5315 - protein, 9 aa, Homo sapiens
  Table A; Target 5315; HLA-C*06:02; ADAM2; ENSG00000104755; CTA
SDTTVVAQK

SEQ ID NO: 5316 - protein, 9 aa, Homo sapiens
  Table A; Target 5316; HLA-C*07:06; ADAM2; ENSG00000104755; CTA
SDTTVVAQK

SEQ ID NO: 5317 - protein, 9 aa, Homo sapiens
  Table A; Target 5317; HLA-C*16:02; ADAM2; ENSG00000104755; CTA
SDTTVVAQK

SEQ ID NO: 5318 - protein, 10 aa, Homo sapiens
  Table A; Target 5318; HLA-A*68:02; ADAM2; ENSG00000104755; CTA
SDTTVVAQKV

SEQ ID NO: 5319 - protein, 10 aa, Homo sapiens
  Table A; Target 5319; HLA-C*06:02; ADAM2; ENSG00000104755; CTA
SDTTVVAQKV

SEQ ID NO: 5320 - protein, 9 aa, Homo sapiens
  Table A; Target 5320; HLA-A*24:02; ADAM2; ENSG00000104755; CTA
SFEDFAHFI

SEQ ID NO: 5321 - protein, 11 aa, Homo sapiens
  Table A; Target 5321; HLA-A*31:01; ADAM2; ENSG00000104755; CTA
SFEDFAHFISK

SEQ ID NO: 5322 - protein, 11 aa, Homo sapiens
  Table A; Target 5322; HLA-A*30:02; ADAM2; ENSG00000104755; CTA
SGNCGISDSGY

SEQ ID NO: 5323 - protein, 8 aa, Homo sapiens
  Table A; Target 5323; HLA-C*06:02; ADAM2; ENSG00000104755; CTA
SGTGIMKP

SEQ ID NO: 5324 - protein, 9 aa, Homo sapiens
  Table A; Target 5324; HLA-B*27:05; ADAM2; ENSG00000104755; CTA
SGTGIMKPL

SEQ ID NO: 5325 - protein, 9 aa, Homo sapiens
  Table A; Target 5325; HLA-C*03:04; ADAM2; ENSG00000104755; CTA
SGTGIMKPL

SEQ ID NO: 5326 - protein, 9 aa, Homo sapiens
  Table A; Target 5326; HLA-C*16:01; ADAM2; ENSG00000104755; CTA
SGTGIMKPL

SEQ ID NO: 5327 - protein, 9 aa, Homo sapiens
  Table A; Target 5327; HLA-C*16:02; ADAM2; ENSG00000104755; CTA
SGTGIMKPL

SEQ ID NO: 5328 - protein, 9 aa, Homo sapiens
  Table A; Target 5328; HLA-B*39:01; ADAM2; ENSG00000104755; CTA
SHLNSKTDV

SEQ ID NO: 5329 - protein, 10 aa, Homo sapiens
  Table A; Target 5329; HLA-A*01:01; ADAM2; ENSG00000104755; CTA
SIDSGNFPPV

SEQ ID NO: 5330 - protein, 10 aa, Homo sapiens
  Table A; Target 5330; HLA-A*02:01; ADAM2; ENSG00000104755; CTA
SIDSGNFPPV

SEQ ID NO: 5331 - protein, 10 aa, Homo sapiens
  Table A; Target 5331; HLA-A*02:07; ADAM2; ENSG00000104755; CTA
SIDSGNFPPV

SEQ ID NO: 5332 - protein, 9 aa, Homo sapiens
  Table A; Target 5332; HLA-A*02:01; ADAM2; ENSG00000104755; CTA
SLAVILAQL

SEQ ID NO: 5333 - protein, 9 aa, Homo sapiens
  Table A; Target 5333; HLA-A*02:03; ADAM2; ENSG00000104755; CTA
SLAVILAQL

SEQ ID NO: 5334 - protein, 9 aa, Homo sapiens
  Table A; Target 5334; HLA-A*02:04; ADAM2; ENSG00000104755; CTA
SLAVILAQL

SEQ ID NO: 5335 - protein, 9 aa, Homo sapiens
  Table A; Target 5335; HLA-A*02:07; ADAM2; ENSG00000104755; CTA
SLAVILAQL

SEQ ID NO: 5336 - protein, 9 aa, Homo sapiens
  Table A; Target 5336; HLA-A*68:02; ADAM2; ENSG00000104755; CTA
SLAVILAQL

SEQ ID NO: 5337 - protein, 9 aa, Homo sapiens
  Table A; Target 5337; HLA-B*55:01; ADAM2; ENSG00000104755; CTA
SLAVILAQL

SEQ ID NO: 5338 - protein, 9 aa, Homo sapiens
  Table A; Target 5338; HLA-A*02:04; ADAM2; ENSG00000104755; CTA
SLESLAVIL

SEQ ID NO: 5339 - protein, 9 aa, Homo sapiens
  Table A; Target 5339; HLA-A*02:07; ADAM2; ENSG00000104755; CTA
SLESLAVIL

SEQ ID NO: 5340 - protein, 9 aa, Homo sapiens
  Table A; Target 5340; HLA-B*35:03; ADAM2; ENSG00000104755; CTA
SLESLAVIL

SEQ ID NO: 5341 - protein, 9 aa, Homo sapiens
  Table A; Target 5341; HLA-C*07:04; ADAM2; ENSG00000104755; CTA
SLESLAVIL

SEQ ID NO: 5342 - protein, 8 aa, Homo sapiens
  Table A; Target 5342; HLA-A*30:02; ADAM2; ENSG00000104755; CTA
SLSMGITY

SEQ ID NO: 5343 - protein, 8 aa, Homo sapiens
  Table A; Target 5343; HLA-B*15:01; ADAM2; ENSG00000104755; CTA
SLSMGITY

SEQ ID NO: 5344 - protein, 8 aa, Homo sapiens
  Table A; Target 5344; HLA-B*15:03; ADAM2; ENSG00000104755; CTA
SLSMGITY

SEQ ID NO: 5345 - protein, 8 aa, Homo sapiens
  Table A; Target 5345; HLA-B*18:01; ADAM2; ENSG00000104755; CTA
SLSMGITY

SEQ ID NO: 5346 - protein, 8 aa, Homo sapiens
  Table A; Target 5346; HLA-B*37:01; ADAM2; ENSG00000104755; CTA
SLSMGITY

SEQ ID NO: 5347 - protein, 8 aa, Homo sapiens
  Table A; Target 5347; HLA-C*01:02; ADAM2; ENSG00000104755; CTA
SLSMGITY

SEQ ID NO: 5348 - protein, 8 aa, Homo sapiens
  Table A; Target 5348; HLA-C*07:04; ADAM2; ENSG00000104755; CTA
SLSMGITY

SEQ ID NO: 5349 - protein, 8 aa, Homo sapiens
  Table A; Target 5349; HLA-C*14:02; ADAM2; ENSG00000104755; CTA
SLSMGITY

SEQ ID NO: 5350 - protein, 8 aa, Homo sapiens
  Table A; Target 5350; HLA-C*16:01; ADAM2; ENSG00000104755; CTA
SLSMGITY

SEQ ID NO: 5351 - protein, 11 aa, Homo sapiens
  Table A; Target 5351; HLA-A*03:02; ADAM2; ENSG00000104755; CTA
SLYNEKDIESR

SEQ ID NO: 5352 - protein, 11 aa, Homo sapiens
  Table A; Target 5352; HLA-A*31:01; ADAM2; ENSG00000104755; CTA
SLYNEKDIESR

SEQ ID NO: 5353 - protein, 11 aa, Homo sapiens
  Table A; Target 5353; HLA-A*68:01; ADAM2; ENSG00000104755; CTA
SLYNEKDIESR

SEQ ID NO: 5354 - protein, 10 aa, Homo sapiens
  Table A; Target 5354; HLA-A*68:02; ADAM2; ENSG00000104755; CTA
SNFDSLPVQI

SEQ ID NO: 5355 - protein, 10 aa, Homo sapiens
  Table A; Target 5355; HLA-B*13:02; ADAM2; ENSG00000104755; CTA
SNFDSLPVQI

SEQ ID NO: 5356 - protein, 8 aa, Homo sapiens
  Table A; Target 5356; HLA-A*23:01; ADAM2; ENSG00000104755; CTA
SNYVGATF

SEQ ID NO: 5357 - protein, 8 aa, Homo sapiens
  Table A; Target 5357; HLA-A*25:01; ADAM2; ENSG00000104755; CTA
SNYVGATF

SEQ ID NO: 5358 - protein, 8 aa, Homo sapiens
  Table A; Target 5358; HLA-A*32:01; ADAM2; ENSG00000104755; CTA
SNYVGATF

SEQ ID NO: 5359 - protein, 8 aa, Homo sapiens
  Table A; Target 5359; HLA-B*08:01; ADAM2; ENSG00000104755; CTA
SNYVGATF

SEQ ID NO: 5360 - protein, 8 aa, Homo sapiens
  Table A; Target 5360; HLA-B*15:01; ADAM2; ENSG00000104755; CTA
SNYVGATF

SEQ ID NO: 5361 - protein, 8 aa, Homo sapiens
  Table A; Target 5361; HLA-B*15:03; ADAM2; ENSG00000104755; CTA
SNYVGATF

SEQ ID NO: 5362 - protein, 8 aa, Homo sapiens
  Table A; Target 5362; HLA-B*18:01; ADAM2; ENSG00000104755; CTA
SNYVGATF

SEQ ID NO: 5363 - protein, 8 aa, Homo sapiens
  Table A; Target 5363; HLA-B*37:01; ADAM2; ENSG00000104755; CTA
SNYVGATF

SEQ ID NO: 5364 - protein, 8 aa, Homo sapiens
  Table A; Target 5364; HLA-B*40:02; ADAM2; ENSG00000104755; CTA
SNYVGATF

SEQ ID NO: 5365 - protein, 8 aa, Homo sapiens
  Table A; Target 5365; HLA-B*46:01; ADAM2; ENSG00000104755; CTA
SNYVGATF

SEQ ID NO: 5366 - protein, 8 aa, Homo sapiens
  Table A; Target 5366; HLA-C*01:02; ADAM2; ENSG00000104755; CTA
SNYVGATF

SEQ ID NO: 5367 - protein, 8 aa, Homo sapiens
  Table A; Target 5367; HLA-C*02:02; ADAM2; ENSG00000104755; CTA
SNYVGATF

SEQ ID NO: 5368 - protein, 8 aa, Homo sapiens
  Table A; Target 5368; HLA-C*03:03; ADAM2; ENSG00000104755; CTA
SNYVGATF

SEQ ID NO: 5369 - protein, 8 aa, Homo sapiens
  Table A; Target 5369; HLA-C*03:04; ADAM2; ENSG00000104755; CTA
SNYVGATF

SEQ ID NO: 5370 - protein, 8 aa, Homo sapiens
  Table A; Target 5370; HLA-C*04:01; ADAM2; ENSG00000104755; CTA
SNYVGATF

SEQ ID NO: 5371 - protein, 8 aa, Homo sapiens
  Table A; Target 5371; HLA-C*05:01; ADAM2; ENSG00000104755; CTA
SNYVGATF

SEQ ID NO: 5372 - protein, 8 aa, Homo sapiens
  Table A; Target 5372; HLA-C*14:02; ADAM2; ENSG00000104755; CTA
SNYVGATF

SEQ ID NO: 5373 - protein, 8 aa, Homo sapiens
  Table A; Target 5373; HLA-C*16:01; ADAM2; ENSG00000104755; CTA
SNYVGATF

SEQ ID NO: 5374 - protein, 8 aa, Homo sapiens
  Table A; Target 5374; HLA-C*16:04; ADAM2; ENSG00000104755; CTA
SNYVGATF

SEQ ID NO: 5375 - protein, 11 aa, Homo sapiens
  Table A; Target 5375; HLA-A*11:01; ADAM2; ENSG00000104755; CTA
SNYVGATFQGK

SEQ ID NO: 5376 - protein, 9 aa, Homo sapiens
  Table A; Target 5376; HLA-A*30:01; ADAM2; ENSG00000104755; CTA
SQASYKIVI

SEQ ID NO: 5377 - protein, 9 aa, Homo sapiens
  Table A; Target 5377; HLA-A*32:01; ADAM2; ENSG00000104755; CTA
SQASYKIVI

SEQ ID NO: 5378 - protein, 9 aa, Homo sapiens
  Table A; Target 5378; HLA-B*08:01; ADAM2; ENSG00000104755; CTA
SQASYKIVI

SEQ ID NO: 5379 - protein, 9 aa, Homo sapiens
  Table A; Target 5379; HLA-B*13:02; ADAM2; ENSG00000104755; CTA
SQASYKIVI

SEQ ID NO: 5380 - protein, 9 aa, Homo sapiens
  Table A; Target 5380; HLA-B*38:01; ADAM2; ENSG00000104755; CTA
SQASYKIVI

SEQ ID NO: 5381 - protein, 9 aa, Homo sapiens
  Table A; Target 5381; HLA-B*39:01; ADAM2; ENSG00000104755; CTA
SQASYKIVI

SEQ ID NO: 5382 - protein, 9 aa, Homo sapiens
  Table A; Target 5382; HLA-B*40:02; ADAM2; ENSG00000104755; CTA
SQASYKIVI

SEQ ID NO: 5383 - protein, 9 aa, Homo sapiens
  Table A; Target 5383; HLA-C*02:02; ADAM2; ENSG00000104755; CTA
SQASYKIVI

SEQ ID NO: 5384 - protein, 9 aa, Homo sapiens
  Table A; Target 5384; HLA-C*06:02; ADAM2; ENSG00000104755; CTA
SQASYKIVI

SEQ ID NO: 5385 - protein, 9 aa, Homo sapiens
  Table A; Target 5385; HLA-C*07:04; ADAM2; ENSG00000104755; CTA
SQASYKIVI

SEQ ID NO: 5386 - protein, 9 aa, Homo sapiens
  Table A; Target 5386; HLA-C*12:03; ADAM2; ENSG00000104755; CTA
SQASYKIVI

SEQ ID NO: 5387 - protein, 9 aa, Homo sapiens
  Table A; Target 5387; HLA-C*16:01; ADAM2; ENSG00000104755; CTA
SQASYKIVI

SEQ ID NO: 5388 - protein, 10 aa, Homo sapiens
  Table A; Target 5388; HLA-A*01:01; ADAM2; ENSG00000104755; CTA
SSASCPENHY

SEQ ID NO: 5389 - protein, 10 aa, Homo sapiens
  Table A; Target 5389; HLA-A*30:02; ADAM2; ENSG00000104755; CTA
SSASCPENHY

SEQ ID NO: 5390 - protein, 9 aa, Homo sapiens
  Table A; Target 5390; HLA-A*68:02; ADAM2; ENSG00000104755; CTA
SSVGFEHVI

SEQ ID NO: 5391 - protein, 9 aa, Homo sapiens
  Table A; Target 5391; HLA-B*13:02; ADAM2; ENSG00000104755; CTA
SSVGFEHVI

SEQ ID NO: 5392 - protein, 9 aa, Homo sapiens
  Table A; Target 5392; HLA-B*58:01; ADAM2; ENSG00000104755; CTA
SSVGFEHVI

SEQ ID NO: 5393 - protein, 10 aa, Homo sapiens
  Table A; Target 5393; HLA-C*02:02; ADAM2; ENSG00000104755; CTA
SSVGFEHVIY

SEQ ID NO: 5394 - protein, 10 aa, Homo sapiens
  Table A; Target 5394; HLA-C*12:03; ADAM2; ENSG00000104755; CTA
SSVGFEHVIY

SEQ ID NO: 5395 - protein, 10 aa, Homo sapiens
  Table A; Target 5395; HLA-C*06:02; ADAM2; ENSG00000104755; CTA
SSYLGYDCTT

SEQ ID NO: 5396 - protein, 8 aa, Homo sapiens
  Table A; Target 5396; HLA-C*05:01; ADAM2; ENSG00000104755; CTA
SVEPQQDF

SEQ ID NO: 5397 - protein, 10 aa, Homo sapiens
  Table A; Target 5397; HLA-A*03:02; ADAM2; ENSG00000104755; CTA
SVEPQQDFAK

SEQ ID NO: 5398 - protein, 10 aa, Homo sapiens
  Table A; Target 5398; HLA-A*11:01; ADAM2; ENSG00000104755; CTA
SVEPQQDFAK

SEQ ID NO: 5399 - protein, 10 aa, Homo sapiens
  Table A; Target 5399; HLA-B*27:02; ADAM2; ENSG00000104755; CTA
SVEPQQDFAK

SEQ ID NO: 5400 - protein, 10 aa, Homo sapiens
  Table A; Target 5400; HLA-C*07:06; ADAM2; ENSG00000104755; CTA
SVEPQQDFAK

SEQ ID NO: 5401 - protein, 11 aa, Homo sapiens
  Table A; Target 5401; HLA-A*01:01; ADAM2; ENSG00000104755; CTA
SVEPQQDFAKY

SEQ ID NO: 5402 - protein, 11 aa, Homo sapiens
  Table A; Target 5402; HLA-A*25:01; ADAM2; ENSG00000104755; CTA
SVEPQQDFAKY

SEQ ID NO: 5403 - protein, 11 aa, Homo sapiens
  Table A; Target 5403; HLA-A*26:01; ADAM2; ENSG00000104755; CTA
SVEPQQDFAKY

SEQ ID NO: 5404 - protein, 11 aa, Homo sapiens
  Table A; Target 5404; HLA-A*29:02; ADAM2; ENSG00000104755; CTA
SVEPQQDFAKY

SEQ ID NO: 5405 - protein, 11 aa, Homo sapiens
  Table A; Target 5405; HLA-A*30:02; ADAM2; ENSG00000104755; CTA
SVEPQQDFAKY

SEQ ID NO: 5406 - protein, 9 aa, Homo sapiens
  Table A; Target 5406; HLA-A*29:02; ADAM2; ENSG00000104755; CTA
SVGFEHVIY

SEQ ID NO: 5407 - protein, 9 aa, Homo sapiens
  Table A; Target 5407; HLA-B*15:01; ADAM2; ENSG00000104755; CTA
SVGFEHVIY

SEQ ID NO: 5408 - protein, 9 aa, Homo sapiens
  Table A; Target 5408; HLA-C*07:04; ADAM2; ENSG00000104755; CTA
SVGFEHVIY

SEQ ID NO: 5409 - protein, 11 aa, Homo sapiens
  Table A; Target 5409; HLA-A*68:02; ADAM2; ENSG00000104755; CTA
SVGFEHVIYQV

SEQ ID NO: 5410 - protein, 10 aa, Homo sapiens
  Table A; Target 5410; HLA-C*04:01; ADAM2; ENSG00000104755; CTA
SVVMVSTCTG

SEQ ID NO: 5411 - protein, 10 aa, Homo sapiens
  Table A; Target 5411; HLA-C*06:02; ADAM2; ENSG00000104755; CTA
SVVMVSTCTG

SEQ ID NO: 5412 - protein, 9 aa, Homo sapiens
  Table A; Target 5412; HLA-A*31:01; ADAM2; ENSG00000104755; CTA
SYKIVIEGK

SEQ ID NO: 5413 - protein, 9 aa, Homo sapiens
  Table A; Target 5413; HLA-A*33:01; ADAM2; ENSG00000104755; CTA
SYKIVIEGK

SEQ ID NO: 5414 - protein, 9 aa, Homo sapiens
  Table A; Target 5414; HLA-A*33:03; ADAM2; ENSG00000104755; CTA
SYKIVIEGK

SEQ ID NO: 5415 - protein, 9 aa, Homo sapiens
  Table A; Target 5415; HLA-C*06:02; ADAM2; ENSG00000104755; CTA
SYKIVIEGK

SEQ ID NO: 5416 - protein, 9 aa, Homo sapiens
  Table A; Target 5416; HLA-C*07:02; ADAM2; ENSG00000104755; CTA
SYKIVIEGK

SEQ ID NO: 5417 - protein, 9 aa, Homo sapiens
  Table A; Target 5417; HLA-C*04:01; ADAM2; ENSG00000104755; CTA
SYLGYDCTT

SEQ ID NO: 5418 - protein, 9 aa, Homo sapiens
  Table A; Target 5418; HLA-A*23:01; ADAM2; ENSG00000104755; CTA
SYLPPDCSV

SEQ ID NO: 5419 - protein, 9 aa, Homo sapiens
  Table A; Target 5419; HLA-C*04:01; ADAM2; ENSG00000104755; CTA
SYLPPDCSV

SEQ ID NO: 5420 - protein, 9 aa, Homo sapiens
  Table A; Target 5420; HLA-C*14:02; ADAM2; ENSG00000104755; CTA
SYLPPDCSV

SEQ ID NO: 5421 - protein, 8 aa, Homo sapiens
  Table A; Target 5421; HLA-C*04:01; ADAM2; ENSG00000104755; CTA
SYSGTGIM

SEQ ID NO: 5422 - protein, 8 aa, Homo sapiens
  Table A; Target 5422; HLA-C*14:02; ADAM2; ENSG00000104755; CTA
SYSGTGIM

SEQ ID NO: 5423 - protein, 9 aa, Homo sapiens
  Table A; Target 5423; HLA-A*03:01; ADAM2; ENSG00000104755; CTA
SYSGTGIMK

SEQ ID NO: 5424 - protein, 9 aa, Homo sapiens
  Table A; Target 5424; HLA-A*03:02; ADAM2; ENSG00000104755; CTA
SYSGTGIMK

SEQ ID NO: 5425 - protein, 9 aa, Homo sapiens
  Table A; Target 5425; HLA-A*11:01; ADAM2; ENSG00000104755; CTA
SYSGTGIMK

SEQ ID NO: 5426 - protein, 9 aa, Homo sapiens
  Table A; Target 5426; HLA-A*31:01; ADAM2; ENSG00000104755; CTA
SYSGTGIMK

SEQ ID NO: 5427 - protein, 9 aa, Homo sapiens
  Table A; Target 5427; HLA-A*33:03; ADAM2; ENSG00000104755; CTA
SYSGTGIMK

SEQ ID NO: 5428 - protein, 9 aa, Homo sapiens
  Table A; Target 5428; HLA-A*68:01; ADAM2; ENSG00000104755; CTA
SYSGTGIMK

SEQ ID NO: 5429 - protein, 9 aa, Homo sapiens
  Table A; Target 5429; HLA-C*07:06; ADAM2; ENSG00000104755; CTA
SYSGTGIMK

SEQ ID NO: 5430 - protein, 10 aa, Homo sapiens
  Table A; Target 5430; HLA-B*07:02; ADAM2; ENSG00000104755; CTA
SYSGTGIMKP

SEQ ID NO: 5431 - protein, 10 aa, Homo sapiens
  Table A; Target 5431; HLA-C*06:02; ADAM2; ENSG00000104755; CTA
SYSGTGIMKP

SEQ ID NO: 5432 - protein, 10 aa, Homo sapiens
  Table A; Target 5432; HLA-C*07:02; ADAM2; ENSG00000104755; CTA
SYSGTGIMKP

SEQ ID NO: 5433 - protein, 10 aa, Homo sapiens
  Table A; Target 5433; HLA-C*16:02; ADAM2; ENSG00000104755; CTA
SYSGTGIMKP

SEQ ID NO: 5434 - protein, 9 aa, Homo sapiens
  Table A; Target 5434; HLA-C*07:01; ADAM2; ENSG00000104755; CTA
TCTGLRGVL

SEQ ID NO: 5435 - protein, 9 aa, Homo sapiens
  Table A; Target 5435; HLA-C*16:01; ADAM2; ENSG00000104755; CTA
TCTGLRGVL

SEQ ID NO: 5436 - protein, 8 aa, Homo sapiens
  Table A; Target 5436; HLA-B*37:01; ADAM2; ENSG00000104755; CTA
TDTFGKEV

SEQ ID NO: 5437 - protein, 8 aa, Homo sapiens
  Table A; Target 5437; HLA-C*16:02; ADAM2; ENSG00000104755; CTA
TDTFGKEV

SEQ ID NO: 5438 - protein, 10 aa, Homo sapiens
  Table A; Target 5438; HLA-C*07:01; ADAM2; ENSG00000104755; CTA
TDTFGKEVEF

SEQ ID NO: 5439 - protein, 9 aa, Homo sapiens
  Table A; Target 5439; HLA-C*04:01; ADAM2; ENSG00000104755; CTA
TDVSGNCGI

SEQ ID NO: 5440 - protein, 9 aa, Homo sapiens
  Table A; Target 5440; HLA-C*06:02; ADAM2; ENSG00000104755; CTA
TDVSGNCGI

SEQ ID NO: 5441 - protein, 9 aa, Homo sapiens
  Table A; Target 5441; HLA-A*29:02; ADAM2; ENSG00000104755; CTA
TFLRWKTSY

SEQ ID NO: 5442 - protein, 9 aa, Homo sapiens
  Table A; Target 5442; HLA-A*23:01; ADAM2; ENSG00000104755; CTA
TGLRGVLQF

SEQ ID NO: 5443 - protein, 9 aa, Homo sapiens
  Table A; Target 5443; HLA-B*35:03; ADAM2; ENSG00000104755; CTA
TIILSSLEL

SEQ ID NO: 5444 - protein, 9 aa, Homo sapiens
  Table A; Target 5444; HLA-C*01:02; ADAM2; ENSG00000104755; CTA
TIILSSLEL

SEQ ID NO: 5445 - protein, 9 aa, Homo sapiens
  Table A; Target 5445; HLA-C*03:03; ADAM2; ENSG00000104755; CTA
TIILSSLEL

SEQ ID NO: 5446 - protein, 9 aa, Homo sapiens
  Table A; Target 5446; HLA-C*03:04; ADAM2; ENSG00000104755; CTA
TIILSSLEL

SEQ ID NO: 5447 - protein, 9 aa, Homo sapiens
  Table A; Target 5447; HLA-B*13:02; ADAM2; ENSG00000104755; CTA
TISLESLAV

SEQ ID NO: 5448 - protein, 8 aa, Homo sapiens
  Table A; Target 5448; HLA-B*18:01; ADAM2; ENSG00000104755; CTA
TNAIFVSF

SEQ ID NO: 5449 - protein, 8 aa, Homo sapiens
  Table A; Target 5449; HLA-B*35:03; ADAM2; ENSG00000104755; CTA
TTGEANEL

SEQ ID NO: 5450 - protein, 8 aa, Homo sapiens
  Table A; Target 5450; HLA-C*01:02; ADAM2; ENSG00000104755; CTA
TTGEANEL

SEQ ID NO: 5451 - protein, 8 aa, Homo sapiens
  Table A; Target 5451; HLA-C*05:01; ADAM2; ENSG00000104755; CTA
TTGEANEL

SEQ ID NO: 5452 - protein, 8 aa, Homo sapiens
  Table A; Target 5452; HLA-C*14:02; ADAM2; ENSG00000104755; CTA
TTGEANEL

SEQ ID NO: 5453 - protein, 9 aa, Homo sapiens
  Table A; Target 5453; HLA-A*23:01; ADAM2; ENSG00000104755; CTA
TTVVAQKVF

SEQ ID NO: 5454 - protein, 9 aa, Homo sapiens
  Table A; Target 5454; HLA-A*25:01; ADAM2; ENSG00000104755; CTA
TTVVAQKVF

SEQ ID NO: 5455 - protein, 9 aa, Homo sapiens
  Table A; Target 5455; HLA-A*32:01; ADAM2; ENSG00000104755; CTA
TTVVAQKVF

SEQ ID NO: 5456 - protein, 9 aa, Homo sapiens
  Table A; Target 5456; HLA-B*15:03; ADAM2; ENSG00000104755; CTA
TTVVAQKVF

SEQ ID NO: 5457 - protein, 9 aa, Homo sapiens
  Table A; Target 5457; HLA-B*44:03; ADAM2; ENSG00000104755; CTA
TTVVAQKVF

SEQ ID NO: 5458 - protein, 9 aa, Homo sapiens
  Table A; Target 5458; HLA-B*57:01; ADAM2; ENSG00000104755; CTA
TTVVAQKVF

SEQ ID NO: 5459 - protein, 9 aa, Homo sapiens
  Table A; Target 5459; HLA-B*58:01; ADAM2; ENSG00000104755; CTA
TTVVAQKVF

SEQ ID NO: 5460 - protein, 9 aa, Homo sapiens
  Table A; Target 5460; HLA-C*02:02; ADAM2; ENSG00000104755; CTA
TTVVAQKVF

SEQ ID NO: 5461 - protein, 9 aa, Homo sapiens
  Table A; Target 5461; HLA-C*03:03; ADAM2; ENSG00000104755; CTA
TTVVAQKVF

SEQ ID NO: 5462 - protein, 9 aa, Homo sapiens
  Table A; Target 5462; HLA-C*03:04; ADAM2; ENSG00000104755; CTA
TTVVAQKVF

SEQ ID NO: 5463 - protein, 9 aa, Homo sapiens
  Table A; Target 5463; HLA-C*04:01; ADAM2; ENSG00000104755; CTA
TTVVAQKVF

SEQ ID NO: 5464 - protein, 9 aa, Homo sapiens
  Table A; Target 5464; HLA-C*12:03; ADAM2; ENSG00000104755; CTA
TTVVAQKVF

SEQ ID NO: 5465 - protein, 9 aa, Homo sapiens
  Table A; Target 5465; HLA-C*16:01; ADAM2; ENSG00000104755; CTA
TTVVAQKVF

SEQ ID NO: 5466 - protein, 11 aa, Homo sapiens
  Table A; Target 5466; HLA-A*68:02; ADAM2; ENSG00000104755; CTA
TTVVAQKVFQL

SEQ ID NO: 5467 - protein, 9 aa, Homo sapiens
  Table A; Target 5467; HLA-A*02:03; ADAM2; ENSG00000104755; CTA
TVPEKIRSI

SEQ ID NO: 5468 - protein, 9 aa, Homo sapiens
  Table A; Target 5468; HLA-A*02:07; ADAM2; ENSG00000104755; CTA
TVPEKIRSI

SEQ ID NO: 5469 - protein, 9 aa, Homo sapiens
  Table A; Target 5469; HLA-A*25:01; ADAM2; ENSG00000104755; CTA
TVPEKIRSI

SEQ ID NO: 5470 - protein, 9 aa, Homo sapiens
  Table A; Target 5470; HLA-A*26:01; ADAM2; ENSG00000104755; CTA
TVPEKIRSI

SEQ ID NO: 5471 - protein, 9 aa, Homo sapiens
  Table A; Target 5471; HLA-B*08:01; ADAM2; ENSG00000104755; CTA
TVPEKIRSI

SEQ ID NO: 5472 - protein, 9 aa, Homo sapiens
  Table A; Target 5472; HLA-B*51:01; ADAM2; ENSG00000104755; CTA
TVPEKIRSI

SEQ ID NO: 5473 - protein, 9 aa, Homo sapiens
  Table A; Target 5473; HLA-C*01:02; ADAM2; ENSG00000104755; CTA
TVPEKIRSI

SEQ ID NO: 5474 - protein, 8 aa, Homo sapiens
  Table A; Target 5474; HLA-A*31:01; ADAM2; ENSG00000104755; CTA
VAFLLVYR

SEQ ID NO: 5475 - protein, 8 aa, Homo sapiens
  Table A; Target 5475; HLA-A*33:01; ADAM2; ENSG00000104755; CTA
VAFLLVYR

SEQ ID NO: 5476 - protein, 8 aa, Homo sapiens
  Table A; Target 5476; HLA-B*37:01; ADAM2; ENSG00000104755; CTA
VAQKVFQL

SEQ ID NO: 5477 - protein, 8 aa, Homo sapiens
  Table A; Target 5477; HLA-C*16:02; ADAM2; ENSG00000104755; CTA
VAQKVFQL

SEQ ID NO: 5478 - protein, 9 aa, Homo sapiens
  Table A; Target 5478; HLA-A*23:01; ADAM2; ENSG00000104755; CTA
VAQKVFQLI

SEQ ID NO: 5479 - protein, 9 aa, Homo sapiens
  Table A; Target 5479; HLA-A*24:02; ADAM2; ENSG00000104755; CTA
VAQKVFQLI

SEQ ID NO: 5480 - protein, 9 aa, Homo sapiens
  Table A; Target 5480; HLA-B*13:02; ADAM2; ENSG00000104755; CTA
VAQKVFQLI

SEQ ID NO: 5481 - protein, 9 aa, Homo sapiens
  Table A; Target 5481; HLA-B*51:01; ADAM2; ENSG00000104755; CTA
VAQKVFQLI

SEQ ID NO: 5482 - protein, 9 aa, Homo sapiens
  Table A; Target 5482; HLA-B*58:01; ADAM2; ENSG00000104755; CTA
VAQKVFQLI

SEQ ID NO: 5483 - protein, 11 aa, Homo sapiens
  Table A; Target 5483; HLA-A*24:02; ADAM2; ENSG00000104755; CTA
VCIMNPEAIHF

SEQ ID NO: 5484 - protein, 8 aa, Homo sapiens
  Table A; Target 5484; HLA-B*40:02; ADAM2; ENSG00000104755; CTA
VEFASDHA

SEQ ID NO: 5485 - protein, 8 aa, Homo sapiens
  Table A; Target 5485; HLA-B*49:01; ADAM2; ENSG00000104755; CTA
VEFASDHA

SEQ ID NO: 5486 - protein, 8 aa, Homo sapiens
  Table A; Target 5486; HLA-B*18:01; ADAM2; ENSG00000104755; CTA
VEFGPSEC

SEQ ID NO: 5487 - protein, 8 aa, Homo sapiens
  Table A; Target 5487; HLA-B*49:01; ADAM2; ENSG00000104755; CTA
VEFGPSEC

SEQ ID NO: 5488 - protein, 8 aa, Homo sapiens
  Table A; Target 5488; HLA-C*12:03; ADAM2; ENSG00000104755; CTA
VEFGPSEC

SEQ ID NO: 5489 - protein, 9 aa, Homo sapiens
  Table A; Target 5489; HLA-A*26:01; ADAM2; ENSG00000104755; CTA
VEFGPSECY

SEQ ID NO: 5490 - protein, 9 aa, Homo sapiens
  Table A; Target 5490; HLA-A*29:02; ADAM2; ENSG00000104755; CTA
VEFGPSECY

SEQ ID NO: 5491 - protein, 9 aa, Homo sapiens
  Table A; Target 5491; HLA-A*30:01; ADAM2; ENSG00000104755; CTA
VEFGPSECY

SEQ ID NO: 5492 - protein, 9 aa, Homo sapiens
  Table A; Target 5492; HLA-A*30:02; ADAM2; ENSG00000104755; CTA
VEFGPSECY

SEQ ID NO: 5493 - protein, 9 aa, Homo sapiens
  Table A; Target 5493; HLA-A*32:01; ADAM2; ENSG00000104755; CTA
VEFGPSECY

SEQ ID NO: 5494 - protein, 9 aa, Homo sapiens
  Table A; Target 5494; HLA-B*15:01; ADAM2; ENSG00000104755; CTA
VEFGPSECY

SEQ ID NO: 5495 - protein, 9 aa, Homo sapiens
  Table A; Target 5495; HLA-B*15:03; ADAM2; ENSG00000104755; CTA
VEFGPSECY

SEQ ID NO: 5496 - protein, 9 aa, Homo sapiens
  Table A; Target 5496; HLA-B*27:02; ADAM2; ENSG00000104755; CTA
VEFGPSECY

SEQ ID NO: 5497 - protein, 9 aa, Homo sapiens
  Table A; Target 5497; HLA-B*35:01; ADAM2; ENSG00000104755; CTA
VEFGPSECY

SEQ ID NO: 5498 - protein, 9 aa, Homo sapiens
  Table A; Target 5498; HLA-B*37:01; ADAM2; ENSG00000104755; CTA
VEFGPSECY

SEQ ID NO: 5499 - protein, 9 aa, Homo sapiens
  Table A; Target 5499; HLA-B*39:01; ADAM2; ENSG00000104755; CTA
VEFGPSECY

SEQ ID NO: 5500 - protein, 9 aa, Homo sapiens
  Table A; Target 5500; HLA-B*40:01; ADAM2; ENSG00000104755; CTA
VEFGPSECY

SEQ ID NO: 5501 - protein, 9 aa, Homo sapiens
  Table A; Target 5501; HLA-B*40:02; ADAM2; ENSG00000104755; CTA
VEFGPSECY

SEQ ID NO: 5502 - protein, 9 aa, Homo sapiens
  Table A; Target 5502; HLA-B*44:02; ADAM2; ENSG00000104755; CTA
VEFGPSECY

SEQ ID NO: 5503 - protein, 9 aa, Homo sapiens
  Table A; Target 5503; HLA-B*44:03; ADAM2; ENSG00000104755; CTA
VEFGPSECY

SEQ ID NO: 5504 - protein, 9 aa, Homo sapiens
  Table A; Target 5504; HLA-B*46:01; ADAM2; ENSG00000104755; CTA
VEFGPSECY

SEQ ID NO: 5505 - protein, 9 aa, Homo sapiens
  Table A; Target 5505; HLA-B*49:01; ADAM2; ENSG00000104755; CTA
VEFGPSECY

SEQ ID NO: 5506 - protein, 9 aa, Homo sapiens
  Table A; Target 5506; HLA-C*02:02; ADAM2; ENSG00000104755; CTA
VEFGPSECY

SEQ ID NO: 5507 - protein, 9 aa, Homo sapiens
  Table A; Target 5507; HLA-C*07:01; ADAM2; ENSG00000104755; CTA
VEFGPSECY

SEQ ID NO: 5508 - protein, 9 aa, Homo sapiens
  Table A; Target 5508; HLA-C*07:04; ADAM2; ENSG00000104755; CTA
VEFGPSECY

SEQ ID NO: 5509 - protein, 9 aa, Homo sapiens
  Table A; Target 5509; HLA-C*12:03; ADAM2; ENSG00000104755; CTA
VEFGPSECY

SEQ ID NO: 5510 - protein, 9 aa, Homo sapiens
  Table A; Target 5510; HLA-C*14:02; ADAM2; ENSG00000104755; CTA
VEFGPSECY

SEQ ID NO: 5511 - protein, 9 aa, Homo sapiens
  Table A; Target 5511; HLA-C*16:04; ADAM2; ENSG00000104755; CTA
VEFGPSECY

SEQ ID NO: 5512 - protein, 9 aa, Homo sapiens
  Table A; Target 5512; HLA-A*30:01; ADAM2; ENSG00000104755; CTA
VEKQLYNHM

SEQ ID NO: 5513 - protein, 9 aa, Homo sapiens
  Table A; Target 5513; HLA-B*18:01; ADAM2; ENSG00000104755; CTA
VEKQLYNHM

SEQ ID NO: 5514 - protein, 9 aa, Homo sapiens
  Table A; Target 5514; HLA-B*37:01; ADAM2; ENSG00000104755; CTA
VEKQLYNHM

SEQ ID NO: 5515 - protein, 9 aa, Homo sapiens
  Table A; Target 5515; HLA-B*40:02; ADAM2; ENSG00000104755; CTA
VEKQLYNHM

SEQ ID NO: 5516 - protein, 9 aa, Homo sapiens
  Table A; Target 5516; HLA-B*44:02; ADAM2; ENSG00000104755; CTA
VEKQLYNHM

SEQ ID NO: 5517 - protein, 9 aa, Homo sapiens
  Table A; Target 5517; HLA-B*49:01; ADAM2; ENSG00000104755; CTA
VEKQLYNHM

SEQ ID NO: 5518 - protein, 9 aa, Homo sapiens
  Table A; Target 5518; HLA-B*27:02; ADAM2; ENSG00000104755; CTA
VEPQQDFAK

SEQ ID NO: 5519 - protein, 10 aa, Homo sapiens
  Table A; Target 5519; HLA-A*26:01; ADAM2; ENSG00000104755; CTA
VEPQQDFAKY

SEQ ID NO: 5520 - protein, 10 aa, Homo sapiens
  Table A; Target 5520; HLA-A*29:02; ADAM2; ENSG00000104755; CTA
VEPQQDFAKY

SEQ ID NO: 5521 - protein, 10 aa, Homo sapiens
  Table A; Target 5521; HLA-A*30:02; ADAM2; ENSG00000104755; CTA
VEPQQDFAKY

SEQ ID NO: 5522 - protein, 10 aa, Homo sapiens
  Table A; Target 5522; HLA-B*18:01; ADAM2; ENSG00000104755; CTA
VEPQQDFAKY

SEQ ID NO: 5523 - protein, 10 aa, Homo sapiens
  Table A; Target 5523; HLA-B*44:02; ADAM2; ENSG00000104755; CTA
VEPQQDFAKY

SEQ ID NO: 5524 - protein, 10 aa, Homo sapiens
  Table A; Target 5524; HLA-B*44:03; ADAM2; ENSG00000104755; CTA
VEPQQDFAKY

SEQ ID NO: 5525 - protein, 10 aa, Homo sapiens
  Table A; Target 5525; HLA-C*16:04; ADAM2; ENSG00000104755; CTA
VEPQQDFAKY

SEQ ID NO: 5526 - protein, 11 aa, Homo sapiens
  Table A; Target 5526; HLA-B*44:02; ADAM2; ENSG00000104755; CTA
VEPQQDFAKYI

SEQ ID NO: 5527 - protein, 11 aa, Homo sapiens
  Table A; Target 5527; HLA-B*49:01; ADAM2; ENSG00000104755; CTA
VEPQQDFAKYI

SEQ ID NO: 5528 - protein, 9 aa, Homo sapiens
  Table A; Target 5528; HLA-C*06:02; ADAM2; ENSG00000104755; CTA
VGATFQGKM

SEQ ID NO: 5529 - protein, 9 aa, Homo sapiens
  Table A; Target 5529; HLA-C*07:02; ADAM2; ENSG00000104755; CTA
VGATFQGKM

SEQ ID NO: 5530 - protein, 9 aa, Homo sapiens
  Table A; Target 5530; HLA-C*12:03; ADAM2; ENSG00000104755; CTA
VGATFQGKM

SEQ ID NO: 5531 - protein, 9 aa, Homo sapiens
  Table A; Target 5531; HLA-C*16:01; ADAM2; ENSG00000104755; CTA
VGATFQGKM

SEQ ID NO: 5532 - protein, 9 aa, Homo sapiens
  Table A; Target 5532; HLA-C*16:02; ADAM2; ENSG00000104755; CTA
VGATFQGKM

SEQ ID NO: 5533 - protein, 8 aa, Homo sapiens
  Table A; Target 5533; HLA-B*08:01; ADAM2; ENSG00000104755; CTA
VGFEHVIY

SEQ ID NO: 5534 - protein, 8 aa, Homo sapiens
  Table A; Target 5534; HLA-B*15:01; ADAM2; ENSG00000104755; CTA
VGFEHVIY

SEQ ID NO: 5535 - protein, 8 aa, Homo sapiens
  Table A; Target 5535; HLA-B*15:03; ADAM2; ENSG00000104755; CTA
VGFEHVIY

SEQ ID NO: 5536 - protein, 8 aa, Homo sapiens
  Table A; Target 5536; HLA-B*18:01; ADAM2; ENSG00000104755; CTA
VGFEHVIY

SEQ ID NO: 5537 - protein, 8 aa, Homo sapiens
  Table A; Target 5537; HLA-B*35:01; ADAM2; ENSG00000104755; CTA
VGFEHVIY

SEQ ID NO: 5538 - protein, 8 aa, Homo sapiens
  Table A; Target 5538; HLA-B*46:01; ADAM2; ENSG00000104755; CTA
VGFEHVIY

SEQ ID NO: 5539 - protein, 8 aa, Homo sapiens
  Table A; Target 5539; HLA-C*07:01; ADAM2; ENSG00000104755; CTA
VGFEHVIY

SEQ ID NO: 5540 - protein, 8 aa, Homo sapiens
  Table A; Target 5540; HLA-C*07:04; ADAM2; ENSG00000104755; CTA
VGFEHVIY

SEQ ID NO: 5541 - protein, 8 aa, Homo sapiens
  Table A; Target 5541; HLA-C*12:03; ADAM2; ENSG00000104755; CTA
VGFEHVIY

SEQ ID NO: 5542 - protein, 8 aa, Homo sapiens
  Table A; Target 5542; HLA-C*16:01; ADAM2; ENSG00000104755; CTA
VGFEHVIY

SEQ ID NO: 5543 - protein, 10 aa, Homo sapiens
  Table A; Target 5543; HLA-A*02:01; ADAM2; ENSG00000104755; CTA
VGFEHVIYQV

SEQ ID NO: 5544 - protein, 10 aa, Homo sapiens
  Table A; Target 5544; HLA-A*02:03; ADAM2; ENSG00000104755; CTA
VGFEHVIYQV

SEQ ID NO: 5545 - protein, 10 aa, Homo sapiens
  Table A; Target 5545; HLA-A*02:04; ADAM2; ENSG00000104755; CTA
VGFEHVIYQV

SEQ ID NO: 5546 - protein, 10 aa, Homo sapiens
  Table A; Target 5546; HLA-A*02:07; ADAM2; ENSG00000104755; CTA
VGFEHVIYQV

SEQ ID NO: 5547 - protein, 10 aa, Homo sapiens
  Table A; Target 5547; HLA-A*68:02; ADAM2; ENSG00000104755; CTA
VGFEHVIYQV

SEQ ID NO: 5548 - protein, 10 aa, Homo sapiens
  Table A; Target 5548; HLA-A*31:01; ADAM2; ENSG00000104755; CTA
VGKFLLQIPR

SEQ ID NO: 5549 - protein, 9 aa, Homo sapiens
  Table A; Target 5549; HLA-A*02:01; ADAM2; ENSG00000104755; CTA
VIEGKPYTV

SEQ ID NO: 5550 - protein, 9 aa, Homo sapiens
  Table A; Target 5550; HLA-A*02:03; ADAM2; ENSG00000104755; CTA
VIEGKPYTV

SEQ ID NO: 5551 - protein, 9 aa, Homo sapiens
  Table A; Target 5551; HLA-A*02:04; ADAM2; ENSG00000104755; CTA
VIEGKPYTV

SEQ ID NO: 5552 - protein, 9 aa, Homo sapiens
  Table A; Target 5552; HLA-A*02:07; ADAM2; ENSG00000104755; CTA
VIEGKPYTV

SEQ ID NO: 5553 - protein, 9 aa, Homo sapiens
  Table A; Target 5553; HLA-B*08:01; ADAM2; ENSG00000104755; CTA
VIEGKPYTV

SEQ ID NO: 5554 - protein, 9 aa, Homo sapiens
  Table A; Target 5554; HLA-B*13:02; ADAM2; ENSG00000104755; CTA
VIEGKPYTV

SEQ ID NO: 5555 - protein, 9 aa, Homo sapiens
  Table A; Target 5555; HLA-B*38:01; ADAM2; ENSG00000104755; CTA
VIEGKPYTV

SEQ ID NO: 5556 - protein, 9 aa, Homo sapiens
  Table A; Target 5556; HLA-B*39:01; ADAM2; ENSG00000104755; CTA
VIEGKPYTV

SEQ ID NO: 5557 - protein, 9 aa, Homo sapiens
  Table A; Target 5557; HLA-B*40:02; ADAM2; ENSG00000104755; CTA
VIEGKPYTV

SEQ ID NO: 5558 - protein, 9 aa, Homo sapiens
  Table A; Target 5558; HLA-B*55:01; ADAM2; ENSG00000104755; CTA
VIEGKPYTV

SEQ ID NO: 5559 - protein, 9 aa, Homo sapiens
  Table A; Target 5559; HLA-C*01:02; ADAM2; ENSG00000104755; CTA
VIEGKPYTV

SEQ ID NO: 5560 - protein, 9 aa, Homo sapiens
  Table A; Target 5560; HLA-C*02:02; ADAM2; ENSG00000104755; CTA
VIEGKPYTV

SEQ ID NO: 5561 - protein, 9 aa, Homo sapiens
  Table A; Target 5561; HLA-C*05:01; ADAM2; ENSG00000104755; CTA
VIEGKPYTV

SEQ ID NO: 5562 - protein, 9 aa, Homo sapiens
  Table A; Target 5562; HLA-C*06:02; ADAM2; ENSG00000104755; CTA
VIEGKPYTV

SEQ ID NO: 5563 - protein, 9 aa, Homo sapiens
  Table A; Target 5563; HLA-C*07:01; ADAM2; ENSG00000104755; CTA
VIEGKPYTV

SEQ ID NO: 5564 - protein, 9 aa, Homo sapiens
  Table A; Target 5564; HLA-C*12:03; ADAM2; ENSG00000104755; CTA
VIEGKPYTV

SEQ ID NO: 5565 - protein, 9 aa, Homo sapiens
  Table A; Target 5565; HLA-C*16:02; ADAM2; ENSG00000104755; CTA
VIEGKPYTV

SEQ ID NO: 5566 - protein, 9 aa, Homo sapiens
  Table A; Target 5566; HLA-A*02:01; ADAM2; ENSG00000104755; CTA
VILAQLLSL

SEQ ID NO: 5567 - protein, 9 aa, Homo sapiens
  Table A; Target 5567; HLA-A*02:04; ADAM2; ENSG00000104755; CTA
VILAQLLSL

SEQ ID NO: 5568 - protein, 9 aa, Homo sapiens
  Table A; Target 5568; HLA-A*02:07; ADAM2; ENSG00000104755; CTA
VILAQLLSL

SEQ ID NO: 5569 - protein, 9 aa, Homo sapiens
  Table A; Target 5569; HLA-A*03:01; ADAM2; ENSG00000104755; CTA
VILAQLLSL

SEQ ID NO: 5570 - protein, 9 aa, Homo sapiens
  Table A; Target 5570; HLA-A*23:01; ADAM2; ENSG00000104755; CTA
VILAQLLSL

SEQ ID NO: 5571 - protein, 9 aa, Homo sapiens
  Table A; Target 5571; HLA-A*24:02; ADAM2; ENSG00000104755; CTA
VILAQLLSL

SEQ ID NO: 5572 - protein, 8 aa, Homo sapiens
  Table A; Target 5572; HLA-A*32:01; ADAM2; ENSG00000104755; CTA
VIVEKQLY

SEQ ID NO: 5573 - protein, 8 aa, Homo sapiens
  Table A; Target 5573; HLA-B*08:01; ADAM2; ENSG00000104755; CTA
VIVEKQLY

SEQ ID NO: 5574 - protein, 8 aa, Homo sapiens
  Table A; Target 5574; HLA-B*15:01; ADAM2; ENSG00000104755; CTA
VIVEKQLY

SEQ ID NO: 5575 - protein, 8 aa, Homo sapiens
  Table A; Target 5575; HLA-B*15:03; ADAM2; ENSG00000104755; CTA
VIVEKQLY

SEQ ID NO: 5576 - protein, 8 aa, Homo sapiens
  Table A; Target 5576; HLA-B*39:01; ADAM2; ENSG00000104755; CTA
VIVEKQLY

SEQ ID NO: 5577 - protein, 8 aa, Homo sapiens
  Table A; Target 5577; HLA-C*07:01; ADAM2; ENSG00000104755; CTA
VIVEKQLY

SEQ ID NO: 5578 - protein, 8 aa, Homo sapiens
  Table A; Target 5578; HLA-C*16:01; ADAM2; ENSG00000104755; CTA
VIVEKQLY

SEQ ID NO: 5579 - protein, 8 aa, Homo sapiens
  Table A; Target 5579; HLA-A*03:01; ADAM2; ENSG00000104755; CTA
VIYQVKHK

SEQ ID NO: 5580 - protein, 9 aa, Homo sapiens
  Table A; Target 5580; HLA-A*03:01; ADAM2; ENSG00000104755; CTA
VIYQVKHKK

SEQ ID NO: 5581 - protein, 9 aa, Homo sapiens
  Table A; Target 5581; HLA-B*15:03; ADAM2; ENSG00000104755; CTA
VKIFSNCSF

SEQ ID NO: 5582 - protein, 11 aa, Homo sapiens
  Table A; Target 5582; HLA-A*02:03; ADAM2; ENSG00000104755; CTA
VLFLLSGLGGL

SEQ ID NO: 5583 - protein, 11 aa, Homo sapiens
  Table A; Target 5583; HLA-A*02:04; ADAM2; ENSG00000104755; CTA
VLFLLSGLGGL

SEQ ID NO: 5584 - protein, 9 aa, Homo sapiens
  Table A; Target 5584; HLA-A*02:01; ADAM2; ENSG00000104755; CTA
VLHPRTISL

SEQ ID NO: 5585 - protein, 9 aa, Homo sapiens
  Table A; Target 5585; HLA-A*02:03; ADAM2; ENSG00000104755; CTA
VLHPRTISL

SEQ ID NO: 5586 - protein, 9 aa, Homo sapiens
  Table A; Target 5586; HLA-A*02:04; ADAM2; ENSG00000104755; CTA
VLHPRTISL

SEQ ID NO: 5587 - protein, 9 aa, Homo sapiens
  Table A; Target 5587; HLA-A*02:07; ADAM2; ENSG00000104755; CTA
VLHPRTISL

SEQ ID NO: 5588 - protein, 9 aa, Homo sapiens
  Table A; Target 5588; HLA-A*03:01; ADAM2; ENSG00000104755; CTA
VLHPRTISL

SEQ ID NO: 5589 - protein, 9 aa, Homo sapiens
  Table A; Target 5589; HLA-A*24:02; ADAM2; ENSG00000104755; CTA
VLHPRTISL

SEQ ID NO: 5590 - protein, 9 aa, Homo sapiens
  Table A; Target 5590; HLA-A*32:01; ADAM2; ENSG00000104755; CTA
VLHPRTISL

SEQ ID NO: 5591 - protein, 9 aa, Homo sapiens
  Table A; Target 5591; HLA-B*07:02; ADAM2; ENSG00000104755; CTA
VLHPRTISL

SEQ ID NO: 5592 - protein, 9 aa, Homo sapiens
  Table A; Target 5592; HLA-B*37:01; ADAM2; ENSG00000104755; CTA
VLHPRTISL

SEQ ID NO: 5593 - protein, 9 aa, Homo sapiens
  Table A; Target 5593; HLA-B*40:02; ADAM2; ENSG00000104755; CTA
VLHPRTISL

SEQ ID NO: 5594 - protein, 9 aa, Homo sapiens
  Table A; Target 5594; HLA-B*46:01; ADAM2; ENSG00000104755; CTA
VLHPRTISL

SEQ ID NO: 5595 - protein, 9 aa, Homo sapiens
  Table A; Target 5595; HLA-C*01:02; ADAM2; ENSG00000104755; CTA
VLHPRTISL

SEQ ID NO: 5596 - protein, 9 aa, Homo sapiens
  Table A; Target 5596; HLA-C*02:02; ADAM2; ENSG00000104755; CTA
VLHPRTISL

SEQ ID NO: 5597 - protein, 9 aa, Homo sapiens
  Table A; Target 5597; HLA-C*03:04; ADAM2; ENSG00000104755; CTA
VLHPRTISL

SEQ ID NO: 5598 - protein, 9 aa, Homo sapiens
  Table A; Target 5598; HLA-C*16:01; ADAM2; ENSG00000104755; CTA
VLHPRTISL

SEQ ID NO: 5599 - protein, 9 aa, Homo sapiens
  Table A; Target 5599; HLA-A*02:01; ADAM2; ENSG00000104755; CTA
VLIAIMVKV

SEQ ID NO: 5600 - protein, 9 aa, Homo sapiens
  Table A; Target 5600; HLA-A*02:03; ADAM2; ENSG00000104755; CTA
VLIAIMVKV

SEQ ID NO: 5601 - protein, 9 aa, Homo sapiens
  Table A; Target 5601; HLA-A*02:04; ADAM2; ENSG00000104755; CTA
VLIAIMVKV

SEQ ID NO: 5602 - protein, 9 aa, Homo sapiens
  Table A; Target 5602; HLA-A*02:07; ADAM2; ENSG00000104755; CTA
VLIAIMVKV

SEQ ID NO: 5603 - protein, 9 aa, Homo sapiens
  Table A; Target 5603; HLA-A*68:02; ADAM2; ENSG00000104755; CTA
VLIAIMVKV

SEQ ID NO: 5604 - protein, 9 aa, Homo sapiens
  Table A; Target 5604; HLA-B*13:02; ADAM2; ENSG00000104755; CTA
VLIAIMVKV

SEQ ID NO: 5605 - protein, 9 aa, Homo sapiens
  Table A; Target 5605; HLA-B*49:01; ADAM2; ENSG00000104755; CTA
VLIAIMVKV

SEQ ID NO: 5606 - protein, 9 aa, Homo sapiens
  Table A; Target 5606; HLA-B*55:01; ADAM2; ENSG00000104755; CTA
VLIAIMVKV

SEQ ID NO: 5607 - protein, 9 aa, Homo sapiens
  Table A; Target 5607; HLA-C*02:02; ADAM2; ENSG00000104755; CTA
VLIAIMVKV

SEQ ID NO: 5608 - protein, 9 aa, Homo sapiens
  Table A; Target 5608; HLA-A*01:01; ADAM2; ENSG00000104755; CTA
VLQFENVSY

SEQ ID NO: 5609 - protein, 9 aa, Homo sapiens
  Table A; Target 5609; HLA-A*03:02; ADAM2; ENSG00000104755; CTA
VLQFENVSY

SEQ ID NO: 5610 - protein, 9 aa, Homo sapiens
  Table A; Target 5610; HLA-A*29:02; ADAM2; ENSG00000104755; CTA
VLQFENVSY

SEQ ID NO: 5611 - protein, 9 aa, Homo sapiens
  Table A; Target 5611; HLA-A*30:02; ADAM2; ENSG00000104755; CTA
VLQFENVSY

SEQ ID NO: 5612 - protein, 9 aa, Homo sapiens
  Table A; Target 5612; HLA-A*32:01; ADAM2; ENSG00000104755; CTA
VLQFENVSY

SEQ ID NO: 5613 - protein, 9 aa, Homo sapiens
  Table A; Target 5613; HLA-B*15:03; ADAM2; ENSG00000104755; CTA
VLQFENVSY

SEQ ID NO: 5614 - protein, 9 aa, Homo sapiens
  Table A; Target 5614; HLA-B*39:01; ADAM2; ENSG00000104755; CTA
VLQFENVSY

SEQ ID NO: 5615 - protein, 9 aa, Homo sapiens
  Table A; Target 5615; HLA-B*46:01; ADAM2; ENSG00000104755; CTA
VLQFENVSY

SEQ ID NO: 5616 - protein, 9 aa, Homo sapiens
  Table A; Target 5616; HLA-B*58:01; ADAM2; ENSG00000104755; CTA
VLQFENVSY

SEQ ID NO: 5617 - protein, 9 aa, Homo sapiens
  Table A; Target 5617; HLA-C*01:02; ADAM2; ENSG00000104755; CTA
VLQFENVSY

SEQ ID NO: 5618 - protein, 9 aa, Homo sapiens
  Table A; Target 5618; HLA-C*02:02; ADAM2; ENSG00000104755; CTA
VLQFENVSY

SEQ ID NO: 5619 - protein, 9 aa, Homo sapiens
  Table A; Target 5619; HLA-C*03:03; ADAM2; ENSG00000104755; CTA
VLQFENVSY

SEQ ID NO: 5620 - protein, 9 aa, Homo sapiens
  Table A; Target 5620; HLA-C*07:01; ADAM2; ENSG00000104755; CTA
VLQFENVSY

SEQ ID NO: 5621 - protein, 9 aa, Homo sapiens
  Table A; Target 5621; HLA-C*07:04; ADAM2; ENSG00000104755; CTA
VLQFENVSY

SEQ ID NO: 5622 - protein, 9 aa, Homo sapiens
  Table A; Target 5622; HLA-C*14:02; ADAM2; ENSG00000104755; CTA
VLQFENVSY

SEQ ID NO: 5623 - protein, 9 aa, Homo sapiens
  Table A; Target 5623; HLA-C*16:01; ADAM2; ENSG00000104755; CTA
VLQFENVSY

SEQ ID NO: 5624 - protein, 9 aa, Homo sapiens
  Table A; Target 5624; HLA-C*16:02; ADAM2; ENSG00000104755; CTA
VLQFENVSY

SEQ ID NO: 5625 - protein, 9 aa, Homo sapiens
  Table A; Target 5625; HLA-C*16:04; ADAM2; ENSG00000104755; CTA
VLQFENVSY

SEQ ID NO: 5626 - protein, 9 aa, Homo sapiens
  Table A; Target 5626; HLA-A*23:01; ADAM2; ENSG00000104755; CTA
VLRPHDVAF

SEQ ID NO: 5627 - protein, 9 aa, Homo sapiens
  Table A; Target 5627; HLA-A*24:02; ADAM2; ENSG00000104755; CTA
VLRPHDVAF

SEQ ID NO: 5628 - protein, 9 aa, Homo sapiens
  Table A; Target 5628; HLA-A*31:01; ADAM2; ENSG00000104755; CTA
VLRPHDVAF

SEQ ID NO: 5629 - protein, 9 aa, Homo sapiens
  Table A; Target 5629; HLA-A*32:01; ADAM2; ENSG00000104755; CTA
VLRPHDVAF

SEQ ID NO: 5630 - protein, 9 aa, Homo sapiens
  Table A; Target 5630; HLA-B*07:02; ADAM2; ENSG00000104755; CTA
VLRPHDVAF

SEQ ID NO: 5631 - protein, 9 aa, Homo sapiens
  Table A; Target 5631; HLA-B*08:01; ADAM2; ENSG00000104755; CTA
VLRPHDVAF

SEQ ID NO: 5632 - protein, 9 aa, Homo sapiens
  Table A; Target 5632; HLA-B*15:01; ADAM2; ENSG00000104755; CTA
VLRPHDVAF

SEQ ID NO: 5633 - protein, 9 aa, Homo sapiens
  Table A; Target 5633; HLA-B*15:03; ADAM2; ENSG00000104755; CTA
VLRPHDVAF

SEQ ID NO: 5634 - protein, 9 aa, Homo sapiens
  Table A; Target 5634; HLA-B*37:01; ADAM2; ENSG00000104755; CTA
VLRPHDVAF

SEQ ID NO: 5635 - protein, 9 aa, Homo sapiens
  Table A; Target 5635; HLA-B*40:02; ADAM2; ENSG00000104755; CTA
VLRPHDVAF

SEQ ID NO: 5636 - protein, 9 aa, Homo sapiens
  Table A; Target 5636; HLA-B*46:01; ADAM2; ENSG00000104755; CTA
VLRPHDVAF

SEQ ID NO: 5637 - protein, 9 aa, Homo sapiens
  Table A; Target 5637; HLA-B*57:01; ADAM2; ENSG00000104755; CTA
VLRPHDVAF

SEQ ID NO: 5638 - protein, 9 aa, Homo sapiens
  Table A; Target 5638; HLA-C*07:04; ADAM2; ENSG00000104755; CTA
VLRPHDVAF

SEQ ID NO: 5639 - protein, 9 aa, Homo sapiens
  Table A; Target 5639; HLA-C*16:01; ADAM2; ENSG00000104755; CTA
VLRPHDVAF

SEQ ID NO: 5640 - protein, 10 aa, Homo sapiens
  Table A; Target 5640; HLA-A*02:03; ADAM2; ENSG00000104755; CTA
VLRPHDVAFL

SEQ ID NO: 5641 - protein, 10 aa, Homo sapiens
  Table A; Target 5641; HLA-A*02:04; ADAM2; ENSG00000104755; CTA
VLRPHDVAFL

SEQ ID NO: 5642 - protein, 10 aa, Homo sapiens
  Table A; Target 5642; HLA-A*03:01; ADAM2; ENSG00000104755; CTA
VLRPHDVAFL

SEQ ID NO: 5643 - protein, 11 aa, Homo sapiens
  Table A; Target 5643; HLA-A*02:04; ADAM2; ENSG00000104755; CTA
VLRPHDVAFLL

SEQ ID NO: 5644 - protein, 11 aa, Homo sapiens
  Table A; Target 5644; HLA-A*03:01; ADAM2; ENSG00000104755; CTA
VLRPHDVAFLL

SEQ ID NO: 5645 - protein, 9 aa, Homo sapiens
  Table A; Target 5645; HLA-A*02:03; ADAM2; ENSG00000104755; CTA
VMVSTCTGL

SEQ ID NO: 5646 - protein, 9 aa, Homo sapiens
  Table A; Target 5646; HLA-B*13:02; ADAM2; ENSG00000104755; CTA
VMVSTCTGL

SEQ ID NO: 5647 - protein, 9 aa, Homo sapiens
  Table A; Target 5647; HLA-B*15:03; ADAM2; ENSG00000104755; CTA
VMVSTCTGL

SEQ ID NO: 5648 - protein, 9 aa, Homo sapiens
  Table A; Target 5648; HLA-B*46:01; ADAM2; ENSG00000104755; CTA
VMVSTCTGL

SEQ ID NO: 5649 - protein, 9 aa, Homo sapiens
  Table A; Target 5649; HLA-B*55:01; ADAM2; ENSG00000104755; CTA
VMVSTCTGL

SEQ ID NO: 5650 - protein, 9 aa, Homo sapiens
  Table A; Target 5650; HLA-C*01:02; ADAM2; ENSG00000104755; CTA
VMVSTCTGL

SEQ ID NO: 5651 - protein, 9 aa, Homo sapiens
  Table A; Target 5651; HLA-C*07:01; ADAM2; ENSG00000104755; CTA
VMVSTCTGL

SEQ ID NO: 5652 - protein, 9 aa, Homo sapiens
  Table A; Target 5652; HLA-C*14:02; ADAM2; ENSG00000104755; CTA
VMVSTCTGL

SEQ ID NO: 5653 - protein, 8 aa, Homo sapiens
  Table A; Target 5653; HLA-B*51:01; ADAM2; ENSG00000104755; CTA
VPEKIRSI

SEQ ID NO: 5654 - protein, 9 aa, Homo sapiens
  Table A; Target 5654; HLA-B*07:02; ADAM2; ENSG00000104755; CTA
VPEKIRSII

SEQ ID NO: 5655 - protein, 9 aa, Homo sapiens
  Table A; Target 5655; HLA-B*51:01; ADAM2; ENSG00000104755; CTA
VPEKIRSII

SEQ ID NO: 5656 - protein, 9 aa, Homo sapiens
  Table A; Target 5656; HLA-A*02:03; ADAM2; ENSG00000104755; CTA
VQITVPEKI

SEQ ID NO: 5657 - protein, 9 aa, Homo sapiens
  Table A; Target 5657; HLA-A*23:01; ADAM2; ENSG00000104755; CTA
VQITVPEKI

SEQ ID NO: 5658 - protein, 9 aa, Homo sapiens
  Table A; Target 5658; HLA-A*24:02; ADAM2; ENSG00000104755; CTA
VQITVPEKI

SEQ ID NO: 5659 - protein, 9 aa, Homo sapiens
  Table A; Target 5659; HLA-A*30:01; ADAM2; ENSG00000104755; CTA
VQITVPEKI

SEQ ID NO: 5660 - protein, 9 aa, Homo sapiens
  Table A; Target 5660; HLA-A*32:01; ADAM2; ENSG00000104755; CTA
VQITVPEKI

SEQ ID NO: 5661 - protein, 9 aa, Homo sapiens
  Table A; Target 5661; HLA-B*13:02; ADAM2; ENSG00000104755; CTA
VQITVPEKI

SEQ ID NO: 5662 - protein, 9 aa, Homo sapiens
  Table A; Target 5662; HLA-B*38:01; ADAM2; ENSG00000104755; CTA
VQITVPEKI

SEQ ID NO: 5663 - protein, 9 aa, Homo sapiens
  Table A; Target 5663; HLA-B*49:01; ADAM2; ENSG00000104755; CTA
VQITVPEKI

SEQ ID NO: 5664 - protein, 9 aa, Homo sapiens
  Table A; Target 5664; HLA-B*58:01; ADAM2; ENSG00000104755; CTA
VQITVPEKI

SEQ ID NO: 5665 - protein, 9 aa, Homo sapiens
  Table A; Target 5665; HLA-C*02:02; ADAM2; ENSG00000104755; CTA
VQITVPEKI

SEQ ID NO: 5666 - protein, 9 aa, Homo sapiens
  Table A; Target 5666; HLA-C*06:02; ADAM2; ENSG00000104755; CTA
VQITVPEKI

SEQ ID NO: 5667 - protein, 9 aa, Homo sapiens
  Table A; Target 5667; HLA-C*16:04; ADAM2; ENSG00000104755; CTA
VQITVPEKI

SEQ ID NO: 5668 - protein, 9 aa, Homo sapiens
  Table A; Target 5668; HLA-A*02:03; ADAM2; ENSG00000104755; CTA
VQTGHPCGL

SEQ ID NO: 5669 - protein, 9 aa, Homo sapiens
  Table A; Target 5669; HLA-B*13:02; ADAM2; ENSG00000104755; CTA
VQTGHPCGL

SEQ ID NO: 5670 - protein, 9 aa, Homo sapiens
  Table A; Target 5670; HLA-B*15:03; ADAM2; ENSG00000104755; CTA
VQTGHPCGL

SEQ ID NO: 5671 - protein, 9 aa, Homo sapiens
  Table A; Target 5671; HLA-B*27:05; ADAM2; ENSG00000104755; CTA
VQTGHPCGL

SEQ ID NO: 5672 - protein, 9 aa, Homo sapiens
  Table A; Target 5672; HLA-C*06:02; ADAM2; ENSG00000104755; CTA
VQTGHPCGL

SEQ ID NO: 5673 - protein, 9 aa, Homo sapiens
  Table A; Target 5673; HLA-C*16:02; ADAM2; ENSG00000104755; CTA
VQTGHPCGL

SEQ ID NO: 5674 - protein, 9 aa, Homo sapiens
  Table A; Target 5674; HLA-A*23:01; ADAM2; ENSG00000104755; CTA
VSFNITIIL

SEQ ID NO: 5675 - protein, 9 aa, Homo sapiens
  Table A; Target 5675; HLA-A*68:02; ADAM2; ENSG00000104755; CTA
VSFNITIIL

SEQ ID NO: 5676 - protein, 9 aa, Homo sapiens
  Table A; Target 5676; HLA-B*57:01; ADAM2; ENSG00000104755; CTA
VSFNITIIL

SEQ ID NO: 5677 - protein, 9 aa, Homo sapiens
  Table A; Target 5677; HLA-C*02:02; ADAM2; ENSG00000104755; CTA
VSFNITIIL

SEQ ID NO: 5678 - protein, 9 aa, Homo sapiens
  Table A; Target 5678; HLA-C*12:03; ADAM2; ENSG00000104755; CTA
VSFNITIIL

SEQ ID NO: 5679 - protein, 8 aa, Homo sapiens
  Table A; Target 5679; HLA-A*01:01; ADAM2; ENSG00000104755; CTA
VSSSYLGY

SEQ ID NO: 5680 - protein, 8 aa, Homo sapiens
  Table A; Target 5680; HLA-A*30:02; ADAM2; ENSG00000104755; CTA
VSSSYLGY

SEQ ID NO: 5681 - protein, 9 aa, Homo sapiens
  Table A; Target 5681; HLA-B*27:05; ADAM2; ENSG00000104755; CTA
VSYGIEPLE

SEQ ID NO: 5682 - protein, 9 aa, Homo sapiens
  Table A; Target 5682; HLA-C*12:03; ADAM2; ENSG00000104755; CTA
VSYGIEPLE

SEQ ID NO: 5683 - protein, 9 aa, Homo sapiens
  Table A; Target 5683; HLA-A*02:01; ADAM2; ENSG00000104755; CTA
VVAQKVFQL

SEQ ID NO: 5684 - protein, 9 aa, Homo sapiens
  Table A; Target 5684; HLA-A*02:03; ADAM2; ENSG00000104755; CTA
VVAQKVFQL

SEQ ID NO: 5685 - protein, 9 aa, Homo sapiens
  Table A; Target 5685; HLA-A*02:04; ADAM2; ENSG00000104755; CTA
VVAQKVFQL

SEQ ID NO: 5686 - protein, 9 aa, Homo sapiens
  Table A; Target 5686; HLA-A*02:07; ADAM2; ENSG00000104755; CTA
VVAQKVFQL

SEQ ID NO: 5687 - protein, 9 aa, Homo sapiens
  Table A; Target 5687; HLA-A*03:01; ADAM2; ENSG00000104755; CTA
VVAQKVFQL

SEQ ID NO: 5688 - protein, 9 aa, Homo sapiens
  Table A; Target 5688; HLA-A*68:02; ADAM2; ENSG00000104755; CTA
VVAQKVFQL

SEQ ID NO: 5689 - protein, 9 aa, Homo sapiens
  Table A; Target 5689; HLA-B*08:01; ADAM2; ENSG00000104755; CTA
VVAQKVFQL

SEQ ID NO: 5690 - protein, 9 aa, Homo sapiens
  Table A; Target 5690; HLA-C*16:02; ADAM2; ENSG00000104755; CTA
VVAQKVFQL

SEQ ID NO: 5691 - protein, 10 aa, Homo sapiens
  Table A; Target 5691; HLA-A*68:02; ADAM2; ENSG00000104755; CTA
VVAQKVFQLI

SEQ ID NO: 5692 - protein, 10 aa, Homo sapiens
  Table A; Target 5692; HLA-B*08:01; ADAM2; ENSG00000104755; CTA
VVLHPRTISL

SEQ ID NO: 5693 - protein, 10 aa, Homo sapiens
  Table A; Target 5693; HLA-C*03:04; ADAM2; ENSG00000104755; CTA
VVLHPRTISL

SEQ ID NO: 5694 - protein, 9 aa, Homo sapiens
  Table A; Target 5694; HLA-C*01:02; ADAM2; ENSG00000104755; CTA
VVMVSTCTG

SEQ ID NO: 5695 - protein, 9 aa, Homo sapiens
  Table A; Target 5695; HLA-C*14:02; ADAM2; ENSG00000104755; CTA
VVMVSTCTG

SEQ ID NO: 5696 - protein, 8 aa, Homo sapiens
  Table A; Target 5696; HLA-C*14:02; ADAM2; ENSG00000104755; CTA
VYREKSNY

SEQ ID NO: 5697 - protein, 9 aa, Homo sapiens
  Table A; Target 5697; HLA-A*24:02; ADAM2; ENSG00000104755; CTA
VYREKSNYV

SEQ ID NO: 5698 - protein, 9 aa, Homo sapiens
  Table A; Target 5698; HLA-A*23:01; ADAM2; ENSG00000104755; CTA
VYSYSGTGI

SEQ ID NO: 5699 - protein, 9 aa, Homo sapiens
  Table A; Target 5699; HLA-A*24:02; ADAM2; ENSG00000104755; CTA
VYSYSGTGI

SEQ ID NO: 5700 - protein, 9 aa, Homo sapiens
  Table A; Target 5700; HLA-C*01:02; ADAM2; ENSG00000104755; CTA
VYSYSGTGI

SEQ ID NO: 5701 - protein, 9 aa, Homo sapiens
  Table A; Target 5701; HLA-C*04:01; ADAM2; ENSG00000104755; CTA
VYSYSGTGI

SEQ ID NO: 5702 - protein, 9 aa, Homo sapiens
  Table A; Target 5702; HLA-C*07:04; ADAM2; ENSG00000104755; CTA
VYSYSGTGI

SEQ ID NO: 5703 - protein, 9 aa, Homo sapiens
  Table A; Target 5703; HLA-C*14:02; ADAM2; ENSG00000104755; CTA
VYSYSGTGI

SEQ ID NO: 5704 - protein, 10 aa, Homo sapiens
  Table A; Target 5704; HLA-C*07:02; ADAM2; ENSG00000104755; CTA
VYSYSGTGIM

SEQ ID NO: 5705 - protein, 10 aa, Homo sapiens
  Table A; Target 5705; HLA-C*14:02; ADAM2; ENSG00000104755; CTA
VYSYSGTGIM

SEQ ID NO: 5706 - protein, 11 aa, Homo sapiens
  Table A; Target 5706; HLA-A*03:02; ADAM2; ENSG00000104755; CTA
VYSYSGTGIMK

SEQ ID NO: 5707 - protein, 8 aa, Homo sapiens
  Table A; Target 5707; HLA-C*07:01; ADAM2; ENSG00000104755; CTA
YAGGVVLH

SEQ ID NO: 5708 - protein, 8 aa, Homo sapiens
  Table A; Target 5708; HLA-C*07:04; ADAM2; ENSG00000104755; CTA
YAGGVVLH

SEQ ID NO: 5709 - protein, 8 aa, Homo sapiens
  Table A; Target 5709; HLA-C*12:03; ADAM2; ENSG00000104755; CTA
YAGGVVLH

SEQ ID NO: 5710 - protein, 9 aa, Homo sapiens
  Table A; Target 5710; HLA-A*68:02; ADAM2; ENSG00000104755; CTA
YAGGVVLHP

SEQ ID NO: 5711 - protein, 9 aa, Homo sapiens
  Table A; Target 5711; HLA-B*54:01; ADAM2; ENSG00000104755; CTA
YAGGVVLHP

SEQ ID NO: 5712 - protein, 9 aa, Homo sapiens
  Table A; Target 5712; HLA-C*02:02; ADAM2; ENSG00000104755; CTA
YAGGVVLHP

SEQ ID NO: 5713 - protein, 9 aa, Homo sapiens
  Table A; Target 5713; HLA-C*06:02; ADAM2; ENSG00000104755; CTA
YAGGVVLHP

SEQ ID NO: 5714 - protein, 9 aa, Homo sapiens
  Table A; Target 5714; HLA-C*07:01; ADAM2; ENSG00000104755; CTA
YAGGVVLHP

SEQ ID NO: 5715 - protein, 9 aa, Homo sapiens
  Table A; Target 5715; HLA-C*12:03; ADAM2; ENSG00000104755; CTA
YAGGVVLHP

SEQ ID NO: 5716 - protein, 9 aa, Homo sapiens
  Table A; Target 5716; HLA-C*16:02; ADAM2; ENSG00000104755; CTA
YAGGVVLHP

SEQ ID NO: 5717 - protein, 9 aa, Homo sapiens
  Table A; Target 5717; HLA-C*16:04; ADAM2; ENSG00000104755; CTA
YAGGVVLHP

SEQ ID NO: 5718 - protein, 10 aa, Homo sapiens
  Table A; Target 5718; HLA-A*31:01; ADAM2; ENSG00000104755; CTA
YAGGVVLHPR

SEQ ID NO: 5719 - protein, 10 aa, Homo sapiens
  Table A; Target 5719; HLA-A*33:01; ADAM2; ENSG00000104755; CTA
YAGGVVLHPR

SEQ ID NO: 5720 - protein, 10 aa, Homo sapiens
  Table A; Target 5720; HLA-A*33:03; ADAM2; ENSG00000104755; CTA
YAGGVVLHPR

SEQ ID NO: 5721 - protein, 10 aa, Homo sapiens
  Table A; Target 5721; HLA-A*68:01; ADAM2; ENSG00000104755; CTA
YAGGVVLHPR

SEQ ID NO: 5722 - protein, 10 aa, Homo sapiens
  Table A; Target 5722; HLA-A*68:02; ADAM2; ENSG00000104755; CTA
YAGGVVLHPR

SEQ ID NO: 5723 - protein, 10 aa, Homo sapiens
  Table A; Target 5723; HLA-C*07:06; ADAM2; ENSG00000104755; CTA
YAGGVVLHPR

SEQ ID NO: 5724 - protein, 8 aa, Homo sapiens
  Table A; Target 5724; HLA-B*07:02; ADAM2; ENSG00000104755; CTA
YANISGHL

SEQ ID NO: 5725 - protein, 8 aa, Homo sapiens
  Table A; Target 5725; HLA-B*08:01; ADAM2; ENSG00000104755; CTA
YANISGHL

SEQ ID NO: 5726 - protein, 8 aa, Homo sapiens
  Table A; Target 5726; HLA-B*35:03; ADAM2; ENSG00000104755; CTA
YANISGHL

SEQ ID NO: 5727 - protein, 8 aa, Homo sapiens
  Table A; Target 5727; HLA-B*40:02; ADAM2; ENSG00000104755; CTA
YANISGHL

SEQ ID NO: 5728 - protein, 8 aa, Homo sapiens
  Table A; Target 5728; HLA-B*46:01; ADAM2; ENSG00000104755; CTA
YANISGHL

SEQ ID NO: 5729 - protein, 8 aa, Homo sapiens
  Table A; Target 5729; HLA-B*51:01; ADAM2; ENSG00000104755; CTA
YANISGHL

SEQ ID NO: 5730 - protein, 8 aa, Homo sapiens
  Table A; Target 5730; HLA-C*01:02; ADAM2; ENSG00000104755; CTA
YANISGHL

SEQ ID NO: 5731 - protein, 8 aa, Homo sapiens
  Table A; Target 5731; HLA-C*02:02; ADAM2; ENSG00000104755; CTA
YANISGHL

SEQ ID NO: 5732 - protein, 8 aa, Homo sapiens
  Table A; Target 5732; HLA-C*03:03; ADAM2; ENSG00000104755; CTA
YANISGHL

SEQ ID NO: 5733 - protein, 8 aa, Homo sapiens
  Table A; Target 5733; HLA-C*03:04; ADAM2; ENSG00000104755; CTA
YANISGHL

SEQ ID NO: 5734 - protein, 8 aa, Homo sapiens
  Table A; Target 5734; HLA-C*04:01; ADAM2; ENSG00000104755; CTA
YANISGHL

SEQ ID NO: 5735 - protein, 8 aa, Homo sapiens
  Table A; Target 5735; HLA-C*05:01; ADAM2; ENSG00000104755; CTA
YANISGHL

SEQ ID NO: 5736 - protein, 8 aa, Homo sapiens
  Table A; Target 5736; HLA-C*07:01; ADAM2; ENSG00000104755; CTA
YANISGHL

SEQ ID NO: 5737 - protein, 8 aa, Homo sapiens
  Table A; Target 5737; HLA-C*07:02; ADAM2; ENSG00000104755; CTA
YANISGHL

SEQ ID NO: 5738 - protein, 8 aa, Homo sapiens
  Table A; Target 5738; HLA-C*07:04; ADAM2; ENSG00000104755; CTA
YANISGHL

SEQ ID NO: 5739 - protein, 8 aa, Homo sapiens
  Table A; Target 5739; HLA-C*12:03; ADAM2; ENSG00000104755; CTA
YANISGHL

SEQ ID NO: 5740 - protein, 8 aa, Homo sapiens
  Table A; Target 5740; HLA-C*14:02; ADAM2; ENSG00000104755; CTA
YANISGHL

SEQ ID NO: 5741 - protein, 8 aa, Homo sapiens
  Table A; Target 5741; HLA-C*16:01; ADAM2; ENSG00000104755; CTA
YANISGHL

SEQ ID NO: 5742 - protein, 8 aa, Homo sapiens
  Table A; Target 5742; HLA-C*16:02; ADAM2; ENSG00000104755; CTA
YANISGHL

SEQ ID NO: 5743 - protein, 8 aa, Homo sapiens
  Table A; Target 5743; HLA-C*16:04; ADAM2; ENSG00000104755; CTA
YANISGHL

SEQ ID NO: 5744 - protein, 9 aa, Homo sapiens
  Table A; Target 5744; HLA-B*46:01; ADAM2; ENSG00000104755; CTA
YANISGHLC

SEQ ID NO: 5745 - protein, 9 aa, Homo sapiens
  Table A; Target 5745; HLA-C*02:02; ADAM2; ENSG00000104755; CTA
YANISGHLC

SEQ ID NO: 5746 - protein, 9 aa, Homo sapiens
  Table A; Target 5746; HLA-C*03:03; ADAM2; ENSG00000104755; CTA
YANISGHLC

SEQ ID NO: 5747 - protein, 9 aa, Homo sapiens
  Table A; Target 5747; HLA-C*03:04; ADAM2; ENSG00000104755; CTA
YANISGHLC

SEQ ID NO: 5748 - protein, 9 aa, Homo sapiens
  Table A; Target 5748; HLA-C*16:02; ADAM2; ENSG00000104755; CTA
YANISGHLC

SEQ ID NO: 5749 - protein, 10 aa, Homo sapiens
  Table A; Target 5749; HLA-B*51:01; ADAM2; ENSG00000104755; CTA
YANISGHLCI

SEQ ID NO: 5750 - protein, 10 aa, Homo sapiens
  Table A; Target 5750; HLA-A*68:02; ADAM2; ENSG00000104755; CTA
YGIEPLESSV

SEQ ID NO: 5751 - protein, 10 aa, Homo sapiens
  Table A; Target 5751; HLA-B*49:01; ADAM2; ENSG00000104755; CTA
YGIEPLESSV

SEQ ID NO: 5752 - protein, 10 aa, Homo sapiens
  Table A; Target 5752; HLA-B*54:01; ADAM2; ENSG00000104755; CTA
YGIEPLESSV

SEQ ID NO: 5753 - protein, 9 aa, Homo sapiens
  Table A; Target 5753; HLA-A*01:01; ADAM2; ENSG00000104755; CTA
YIEGYPKSV

SEQ ID NO: 5754 - protein, 9 aa, Homo sapiens
  Table A; Target 5754; HLA-A*02:01; ADAM2; ENSG00000104755; CTA
YIEGYPKSV

SEQ ID NO: 5755 - protein, 9 aa, Homo sapiens
  Table A; Target 5755; HLA-A*02:03; ADAM2; ENSG00000104755; CTA
YIEGYPKSV

SEQ ID NO: 5756 - protein, 9 aa, Homo sapiens
  Table A; Target 5756; HLA-A*02:04; ADAM2; ENSG00000104755; CTA
YIEGYPKSV

SEQ ID NO: 5757 - protein, 9 aa, Homo sapiens
  Table A; Target 5757; HLA-A*02:07; ADAM2; ENSG00000104755; CTA
YIEGYPKSV

SEQ ID NO: 5758 - protein, 9 aa, Homo sapiens
  Table A; Target 5758; HLA-A*68:02; ADAM2; ENSG00000104755; CTA
YIEGYPKSV

SEQ ID NO: 5759 - protein, 9 aa, Homo sapiens
  Table A; Target 5759; HLA-B*08:01; ADAM2; ENSG00000104755; CTA
YIEGYPKSV

SEQ ID NO: 5760 - protein, 9 aa, Homo sapiens
  Table A; Target 5760; HLA-B*13:02; ADAM2; ENSG00000104755; CTA
YIEGYPKSV

SEQ ID NO: 5761 - protein, 9 aa, Homo sapiens
  Table A; Target 5761; HLA-B*40:02; ADAM2; ENSG00000104755; CTA
YIEGYPKSV

SEQ ID NO: 5762 - protein, 9 aa, Homo sapiens
  Table A; Target 5762; HLA-B*49:01; ADAM2; ENSG00000104755; CTA
YIEGYPKSV

SEQ ID NO: 5763 - protein, 9 aa, Homo sapiens
  Table A; Target 5763; HLA-B*51:01; ADAM2; ENSG00000104755; CTA
YIEGYPKSV

SEQ ID NO: 5764 - protein, 9 aa, Homo sapiens
  Table A; Target 5764; HLA-B*55:01; ADAM2; ENSG00000104755; CTA
YIEGYPKSV

SEQ ID NO: 5765 - protein, 9 aa, Homo sapiens
  Table A; Target 5765; HLA-C*01:02; ADAM2; ENSG00000104755; CTA
YIEGYPKSV

SEQ ID NO: 5766 - protein, 9 aa, Homo sapiens
  Table A; Target 5766; HLA-C*02:02; ADAM2; ENSG00000104755; CTA
YIEGYPKSV

SEQ ID NO: 5767 - protein, 9 aa, Homo sapiens
  Table A; Target 5767; HLA-C*03:03; ADAM2; ENSG00000104755; CTA
YIEGYPKSV

SEQ ID NO: 5768 - protein, 9 aa, Homo sapiens
  Table A; Target 5768; HLA-C*03:04; ADAM2; ENSG00000104755; CTA
YIEGYPKSV

SEQ ID NO: 5769 - protein, 9 aa, Homo sapiens
  Table A; Target 5769; HLA-C*04:01; ADAM2; ENSG00000104755; CTA
YIEGYPKSV

SEQ ID NO: 5770 - protein, 9 aa, Homo sapiens
  Table A; Target 5770; HLA-C*05:01; ADAM2; ENSG00000104755; CTA
YIEGYPKSV

SEQ ID NO: 5771 - protein, 9 aa, Homo sapiens
  Table A; Target 5771; HLA-C*06:02; ADAM2; ENSG00000104755; CTA
YIEGYPKSV

SEQ ID NO: 5772 - protein, 9 aa, Homo sapiens
  Table A; Target 5772; HLA-C*12:03; ADAM2; ENSG00000104755; CTA
YIEGYPKSV

SEQ ID NO: 5773 - protein, 9 aa, Homo sapiens
  Table A; Target 5773; HLA-C*16:02; ADAM2; ENSG00000104755; CTA
YIEGYPKSV

SEQ ID NO: 5774 - protein, 11 aa, Homo sapiens
  Table A; Target 5774; HLA-C*07:04; ADAM2; ENSG00000104755; CTA
YIEGYPKSVVM

SEQ ID NO: 5775 - protein, 9 aa, Homo sapiens
  Table A; Target 5775; HLA-A*01:01; ADAM2; ENSG00000104755; CTA
YIENIYHSK

SEQ ID NO: 5776 - protein, 9 aa, Homo sapiens
  Table A; Target 5776; HLA-A*02:07; ADAM2; ENSG00000104755; CTA
YIENIYHSK

SEQ ID NO: 5777 - protein, 9 aa, Homo sapiens
  Table A; Target 5777; HLA-A*03:02; ADAM2; ENSG00000104755; CTA
YIENIYHSK

SEQ ID NO: 5778 - protein, 9 aa, Homo sapiens
  Table A; Target 5778; HLA-A*11:01; ADAM2; ENSG00000104755; CTA
YIENIYHSK

SEQ ID NO: 5779 - protein, 9 aa, Homo sapiens
  Table A; Target 5779; HLA-A*68:01; ADAM2; ENSG00000104755; CTA
YIENIYHSK

SEQ ID NO: 5780 - protein, 9 aa, Homo sapiens
  Table A; Target 5780; HLA-B*27:02; ADAM2; ENSG00000104755; CTA
YIENIYHSK

SEQ ID NO: 5781 - protein, 10 aa, Homo sapiens
  Table A; Target 5781; HLA-B*15:03; ADAM2; ENSG00000104755; CTA
YKIVIEGKPY

SEQ ID NO: 5782 - protein, 9 aa, Homo sapiens
  Table A; Target 5782; HLA-A*02:03; ADAM2; ENSG00000104755; CTA
YLVLRPHDV

SEQ ID NO: 5783 - protein, 9 aa, Homo sapiens
  Table A; Target 5783; HLA-A*02:04; ADAM2; ENSG00000104755; CTA
YLVLRPHDV

SEQ ID NO: 5784 - protein, 8 aa, Homo sapiens
  Table A; Target 5784; HLA-B*08:01; ADAM2; ENSG00000104755; CTA
YPKSVVMV

SEQ ID NO: 5785 - protein, 8 aa, Homo sapiens
  Table A; Target 5785; HLA-B*51:01; ADAM2; ENSG00000104755; CTA
YPKSVVMV

SEQ ID NO: 5786 - protein, 8 aa, Homo sapiens
  Table A; Target 5786; HLA-B*54:01; ADAM2; ENSG00000104755; CTA
YPKSVVMV

SEQ ID NO: 5787 - protein, 8 aa, Homo sapiens
  Table A; Target 5787; HLA-B*55:01; ADAM2; ENSG00000104755; CTA
YPKSVVMV

SEQ ID NO: 5788 - protein, 8 aa, Homo sapiens
  Table A; Target 5788; HLA-B*56:01; ADAM2; ENSG00000104755; CTA
YPKSVVMV

SEQ ID NO: 5789 - protein, 9 aa, Homo sapiens
  Table A; Target 5789; HLA-B*54:01; ADAM2; ENSG00000104755; CTA
YPKSVVMVS

SEQ ID NO: 5790 - protein, 10 aa, Homo sapiens
  Table A; Target 5790; HLA-B*54:01; ADAM2; ENSG00000104755; CTA
YPKSVVMVST

SEQ ID NO: 5791 - protein, 10 aa, Homo sapiens
  Table A; Target 5791; HLA-B*56:01; ADAM2; ENSG00000104755; CTA
YPKSVVMVST

SEQ ID NO: 5792 - protein, 8 aa, Homo sapiens
  Table A; Target 5792; HLA-A*01:01; ADAM2; ENSG00000104755; CTA
YQGYIEGY

SEQ ID NO: 5793 - protein, 8 aa, Homo sapiens
  Table A; Target 5793; HLA-A*30:02; ADAM2; ENSG00000104755; CTA
YQGYIEGY

SEQ ID NO: 5794 - protein, 8 aa, Homo sapiens
  Table A; Target 5794; HLA-B*15:01; ADAM2; ENSG00000104755; CTA
YQGYIEGY

SEQ ID NO: 5795 - protein, 8 aa, Homo sapiens
  Table A; Target 5795; HLA-B*15:03; ADAM2; ENSG00000104755; CTA
YQGYIEGY

SEQ ID NO: 5796 - protein, 8 aa, Homo sapiens
  Table A; Target 5796; HLA-B*18:01; ADAM2; ENSG00000104755; CTA
YQGYIEGY

SEQ ID NO: 5797 - protein, 8 aa, Homo sapiens
  Table A; Target 5797; HLA-C*07:01; ADAM2; ENSG00000104755; CTA
YQGYIEGY

SEQ ID NO: 5798 - protein, 8 aa, Homo sapiens
  Table A; Target 5798; HLA-C*07:04; ADAM2; ENSG00000104755; CTA
YQGYIEGY

SEQ ID NO: 5799 - protein, 8 aa, Homo sapiens
  Table A; Target 5799; HLA-C*16:04; ADAM2; ENSG00000104755; CTA
YQGYIEGY

SEQ ID NO: 5800 - protein, 10 aa, Homo sapiens
  Table A; Target 5800; HLA-B*27:02; ADAM2; ENSG00000104755; CTA
YQGYIEGYPK

SEQ ID NO: 5801 - protein, 8 aa, Homo sapiens
  Table A; Target 5801; HLA-A*01:01; ADAM2; ENSG00000104755; CTA
YSGTGIMK

SEQ ID NO: 5802 - protein, 8 aa, Homo sapiens
  Table A; Target 5802; HLA-A*03:01; ADAM2; ENSG00000104755; CTA
YSGTGIMK

SEQ ID NO: 5803 - protein, 8 aa, Homo sapiens
  Table A; Target 5803; HLA-A*03:02; ADAM2; ENSG00000104755; CTA
YSGTGIMK

SEQ ID NO: 5804 - protein, 8 aa, Homo sapiens
  Table A; Target 5804; HLA-A*11:01; ADAM2; ENSG00000104755; CTA
YSGTGIMK

SEQ ID NO: 5805 - protein, 8 aa, Homo sapiens
  Table A; Target 5805; HLA-C*16:01; ADAM2; ENSG00000104755; CTA
YSGTGIMK

SEQ ID NO: 5806 - protein, 8 aa, Homo sapiens
  Table A; Target 5806; HLA-B*13:02; ADAM2; ENSG00000104755; CTA
YSYSGTGI

SEQ ID NO: 5807 - protein, 8 aa, Homo sapiens
  Table A; Target 5807; HLA-B*49:01; ADAM2; ENSG00000104755; CTA
YSYSGTGI

SEQ ID NO: 5808 - protein, 8 aa, Homo sapiens
  Table A; Target 5808; HLA-B*51:01; ADAM2; ENSG00000104755; CTA
YSYSGTGI

SEQ ID NO: 5809 - protein, 8 aa, Homo sapiens
  Table A; Target 5809; HLA-C*03:03; ADAM2; ENSG00000104755; CTA
YSYSGTGI

SEQ ID NO: 5810 - protein, 8 aa, Homo sapiens
  Table A; Target 5810; HLA-C*03:04; ADAM2; ENSG00000104755; CTA
YSYSGTGI

SEQ ID NO: 5811 - protein, 8 aa, Homo sapiens
  Table A; Target 5811; HLA-C*05:01; ADAM2; ENSG00000104755; CTA
YSYSGTGI

SEQ ID NO: 5812 - protein, 9 aa, Homo sapiens
  Table A; Target 5812; HLA-A*01:01; ADAM2; ENSG00000104755; CTA
YSYSGTGIM

SEQ ID NO: 5813 - protein, 9 aa, Homo sapiens
  Table A; Target 5813; HLA-B*15:03; ADAM2; ENSG00000104755; CTA
YSYSGTGIM

SEQ ID NO: 5814 - protein, 9 aa, Homo sapiens
  Table A; Target 5814; HLA-B*39:01; ADAM2; ENSG00000104755; CTA
YSYSGTGIM

SEQ ID NO: 5815 - protein, 9 aa, Homo sapiens
  Table A; Target 5815; HLA-B*40:01; ADAM2; ENSG00000104755; CTA
YSYSGTGIM

SEQ ID NO: 5816 - protein, 9 aa, Homo sapiens
  Table A; Target 5816; HLA-B*40:02; ADAM2; ENSG00000104755; CTA
YSYSGTGIM

SEQ ID NO: 5817 - protein, 9 aa, Homo sapiens
  Table A; Target 5817; HLA-B*46:01; ADAM2; ENSG00000104755; CTA
YSYSGTGIM

SEQ ID NO: 5818 - protein, 9 aa, Homo sapiens
  Table A; Target 5818; HLA-C*01:02; ADAM2; ENSG00000104755; CTA
YSYSGTGIM

SEQ ID NO: 5819 - protein, 9 aa, Homo sapiens
  Table A; Target 5819; HLA-C*02:02; ADAM2; ENSG00000104755; CTA
YSYSGTGIM

SEQ ID NO: 5820 - protein, 9 aa, Homo sapiens
  Table A; Target 5820; HLA-C*03:03; ADAM2; ENSG00000104755; CTA
YSYSGTGIM

SEQ ID NO: 5821 - protein, 9 aa, Homo sapiens
  Table A; Target 5821; HLA-C*03:04; ADAM2; ENSG00000104755; CTA
YSYSGTGIM

SEQ ID NO: 5822 - protein, 9 aa, Homo sapiens
  Table A; Target 5822; HLA-C*05:01; ADAM2; ENSG00000104755; CTA
YSYSGTGIM

SEQ ID NO: 5823 - protein, 9 aa, Homo sapiens
  Table A; Target 5823; HLA-C*07:04; ADAM2; ENSG00000104755; CTA
YSYSGTGIM

SEQ ID NO: 5824 - protein, 9 aa, Homo sapiens
  Table A; Target 5824; HLA-C*12:03; ADAM2; ENSG00000104755; CTA
YSYSGTGIM

SEQ ID NO: 5825 - protein, 9 aa, Homo sapiens
  Table A; Target 5825; HLA-C*14:02; ADAM2; ENSG00000104755; CTA
YSYSGTGIM

SEQ ID NO: 5826 - protein, 9 aa, Homo sapiens
  Table A; Target 5826; HLA-C*16:01; ADAM2; ENSG00000104755; CTA
YSYSGTGIM

SEQ ID NO: 5827 - protein, 9 aa, Homo sapiens
  Table A; Target 5827; HLA-C*16:02; ADAM2; ENSG00000104755; CTA
YSYSGTGIM

SEQ ID NO: 5828 - protein, 10 aa, Homo sapiens
  Table A; Target 5828; HLA-A*01:01; ADAM2; ENSG00000104755; CTA
YSYSGTGIMK

SEQ ID NO: 5829 - protein, 10 aa, Homo sapiens
  Table A; Target 5829; HLA-A*03:01; ADAM2; ENSG00000104755; CTA
YSYSGTGIMK

SEQ ID NO: 5830 - protein, 10 aa, Homo sapiens
  Table A; Target 5830; HLA-A*03:02; ADAM2; ENSG00000104755; CTA
YSYSGTGIMK

SEQ ID NO: 5831 - protein, 10 aa, Homo sapiens
  Table A; Target 5831; HLA-A*11:01; ADAM2; ENSG00000104755; CTA
YSYSGTGIMK

SEQ ID NO: 5832 - protein, 10 aa, Homo sapiens
  Table A; Target 5832; HLA-A*68:01; ADAM2; ENSG00000104755; CTA
YSYSGTGIMK

SEQ ID NO: 5833 - protein, 10 aa, Homo sapiens
  Table A; Target 5833; HLA-B*27:02; ADAM2; ENSG00000104755; CTA
YSYSGTGIMK

SEQ ID NO: 5834 - protein, 10 aa, Homo sapiens
  Table A; Target 5834; HLA-C*02:02; ADAM2; ENSG00000104755; CTA
YSYSGTGIMK

SEQ ID NO: 5835 - protein, 10 aa, Homo sapiens
  Table A; Target 5835; HLA-C*03:03; ADAM2; ENSG00000104755; CTA
YSYSGTGIMK

SEQ ID NO: 5836 - protein, 10 aa, Homo sapiens
  Table A; Target 5836; HLA-C*03:04; ADAM2; ENSG00000104755; CTA
YSYSGTGIMK

SEQ ID NO: 5837 - protein, 10 aa, Homo sapiens
  Table A; Target 5837; HLA-C*07:06; ADAM2; ENSG00000104755; CTA
YSYSGTGIMK

SEQ ID NO: 5838 - protein, 10 aa, Homo sapiens
  Table A; Target 5838; HLA-C*12:03; ADAM2; ENSG00000104755; CTA
YSYSGTGIMK

SEQ ID NO: 5839 - protein, 11 aa, Homo sapiens
  Table A; Target 5839; HLA-C*06:02; ADAM2; ENSG00000104755; CTA
YSYSGTGIMKP

SEQ ID NO: 5840 - protein, 8 aa, Homo sapiens
  Table A; Target 5840; HLA-A*11:01; ADAM2; ENSG00000104755; CTA
YTVNLMQK

SEQ ID NO: 5841 - protein, 8 aa, Homo sapiens
  Table A; Target 5841; HLA-C*07:01; ADAM2; ENSG00000104755; CTA
YVGATFQG

SEQ ID NO: 5842 - protein, 9 aa, Homo sapiens
  Table A; Target 5842; HLA-A*01:01; ADAM2; ENSG00000104755; CTA
YVGATFQGK

SEQ ID NO: 5843 - protein, 9 aa, Homo sapiens
  Table A; Target 5843; HLA-A*03:01; ADAM2; ENSG00000104755; CTA
YVGATFQGK

SEQ ID NO: 5844 - protein, 9 aa, Homo sapiens
  Table A; Target 5844; HLA-A*03:02; ADAM2; ENSG00000104755; CTA
YVGATFQGK

SEQ ID NO: 5845 - protein, 9 aa, Homo sapiens
  Table A; Target 5845; HLA-A*11:01; ADAM2; ENSG00000104755; CTA
YVGATFQGK

SEQ ID NO: 5846 - protein, 9 aa, Homo sapiens
  Table A; Target 5846; HLA-A*33:03; ADAM2; ENSG00000104755; CTA
YVGATFQGK

SEQ ID NO: 5847 - protein, 9 aa, Homo sapiens
  Table A; Target 5847; HLA-A*68:01; ADAM2; ENSG00000104755; CTA
YVGATFQGK

SEQ ID NO: 5848 - protein, 9 aa, Homo sapiens
  Table A; Target 5848; HLA-C*07:04; ADAM2; ENSG00000104755; CTA
YVGATFQGK

SEQ ID NO: 5849 - protein, 10 aa, Homo sapiens
  Table A; Target 5849; HLA-A*26:01; ADAM2; ENSG00000104755; CTA
YVGATFQGKM

SEQ ID NO: 5850 - protein, 10 aa, Homo sapiens
  Table A; Target 5850; HLA-A*29:02; ADAM2; ENSG00000104755; CTA
YVGATFQGKM

SEQ ID NO: 5851 - protein, 10 aa, Homo sapiens
  Table A; Target 5851; HLA-C*04:01; ADAM2; ENSG00000104755; CTA
YVGATFQGKM

SEQ ID NO: 5852 - protein, 10 aa, Homo sapiens
  Table A; Target 5852; HLA-C*07:01; ADAM2; ENSG00000104755; CTA
YVGATFQGKM

SEQ ID NO: 5853 - protein, 9 aa, Homo sapiens
  Table A; Target 5853; HLA-A*02:03; ADAM2; ENSG00000104755; CTA
YVGKFLLQI

SEQ ID NO: 5854 - protein, 9 aa, Homo sapiens
  Table A; Target 5854; HLA-A*68:02; ADAM2; ENSG00000104755; CTA
YVGKFLLQI

SEQ ID NO: 5855 - protein, 9 aa, Homo sapiens
  Table A; Target 5855; HLA-B*13:02; ADAM2; ENSG00000104755; CTA
YVGKFLLQI

SEQ ID NO: 5856 - protein, 8 aa, Homo sapiens
  Table A; Target 5856; HLA-C*03:03; ADAM2; ENSG00000104755; CTA
YVQTGHPC

SEQ ID NO: 5857 - protein, 8 aa, Homo sapiens
  Table A; Target 5857; HLA-C*03:04; ADAM2; ENSG00000104755; CTA
YVQTGHPC

SEQ ID NO: 5858 - protein, 10 aa, Homo sapiens
  Table A; Target 5858; HLA-A*02:03; ADAM2; ENSG00000104755; CTA
YVQTGHPCGL

SEQ ID NO: 5859 - protein, 8 aa, Homo sapiens
  Table A; Target 5859; HLA-A*11:01; ADAM7; ENSG00000069206; CTA
ADDTVYRR

SEQ ID NO: 5860 - protein, 8 aa, Homo sapiens
  Table A; Target 5860; HLA-B*37:01; ADAM7; ENSG00000069206; CTA
ADDTVYRR

SEQ ID NO: 5861 - protein, 8 aa, Homo sapiens
  Table A; Target 5861; HLA-C*01:02; ADAM7; ENSG00000069206; CTA
ADPNQSAK

SEQ ID NO: 5862 - protein, 8 aa, Homo sapiens
  Table A; Target 5862; HLA-B*38:01; ADAM7; ENSG00000069206; CTA
AHQLGHNL

SEQ ID NO: 5863 - protein, 10 aa, Homo sapiens
  Table A; Target 5863; HLA-C*04:01; ADAM7; ENSG00000069206; CTA
AHQLGHNLGM

SEQ ID NO: 5864 - protein, 9 aa, Homo sapiens
  Table A; Target 5864; HLA-A*01:01; ADAM7; ENSG00000069206; CTA
AIESHDICY

SEQ ID NO: 5865 - protein, 9 aa, Homo sapiens
  Table A; Target 5865; HLA-A*30:02; ADAM7; ENSG00000069206; CTA
AIESHDICY

SEQ ID NO: 5866 - protein, 9 aa, Homo sapiens
  Table A; Target 5866; HLA-B*15:01; ADAM7; ENSG00000069206; CTA
AIESHDICY

SEQ ID NO: 5867 - protein, 9 aa, Homo sapiens
  Table A; Target 5867; HLA-B*15:03; ADAM7; ENSG00000069206; CTA
AIESHDICY

SEQ ID NO: 5868 - protein, 9 aa, Homo sapiens
  Table A; Target 5868; HLA-C*07:04; ADAM7; ENSG00000069206; CTA
AIESHDICY

SEQ ID NO: 5869 - protein, 10 aa, Homo sapiens
  Table A; Target 5869; HLA-A*03:01; ADAM7; ENSG00000069206; CTA
AIESHDICYK

SEQ ID NO: 5870 - protein, 10 aa, Homo sapiens
  Table A; Target 5870; HLA-A*03:02; ADAM7; ENSG00000069206; CTA
AIESHDICYK

SEQ ID NO: 5871 - protein, 10 aa, Homo sapiens
  Table A; Target 5871; HLA-A*11:01; ADAM7; ENSG00000069206; CTA
AIESHDICYK

SEQ ID NO: 5872 - protein, 9 aa, Homo sapiens
  Table A; Target 5872; HLA-B*07:02; ADAM7; ENSG00000069206; CTA
APVACEETL

SEQ ID NO: 5873 - protein, 9 aa, Homo sapiens
  Table A; Target 5873; HLA-B*35:01; ADAM7; ENSG00000069206; CTA
APVACEETL

SEQ ID NO: 5874 - protein, 9 aa, Homo sapiens
  Table A; Target 5874; HLA-B*35:03; ADAM7; ENSG00000069206; CTA
APVACEETL

SEQ ID NO: 5875 - protein, 9 aa, Homo sapiens
  Table A; Target 5875; HLA-B*55:01; ADAM7; ENSG00000069206; CTA
APVACEETL

SEQ ID NO: 5876 - protein, 9 aa, Homo sapiens
  Table A; Target 5876; HLA-C*03:03; ADAM7; ENSG00000069206; CTA
APVACEETL

SEQ ID NO: 5877 - protein, 9 aa, Homo sapiens
  Table A; Target 5877; HLA-C*07:02; ADAM7; ENSG00000069206; CTA
APVACEETL

SEQ ID NO: 5878 - protein, 9 aa, Homo sapiens
  Table A; Target 5878; HLA-B*58:01; ADAM7; ENSG00000069206; CTA
ASISTCNGL

SEQ ID NO: 5879 - protein, 9 aa, Homo sapiens
  Table A; Target 5879; HLA-B*49:01; ADAM7; ENSG00000069206; CTA
CEEGQAPVA

SEQ ID NO: 5880 - protein, 10 aa, Homo sapiens
  Table A; Target 5880; HLA-B*40:01; ADAM7; ENSG00000069206; CTA
CEEGQAPVAC

SEQ ID NO: 5881 - protein, 10 aa, Homo sapiens
  Table A; Target 5881; HLA-B*49:01; ADAM7; ENSG00000069206; CTA
CEETLHVTNI

SEQ ID NO: 5882 - protein, 11 aa, Homo sapiens
  Table A; Target 5882; HLA-A*29:02; ADAM7; ENSG00000069206; CTA
CFYQGSIVHEY

SEQ ID NO: 5883 - protein, 11 aa, Homo sapiens
  Table A; Target 5883; HLA-A*30:02; ADAM7; ENSG00000069206; CTA
CFYQGSIVHEY

SEQ ID NO: 5884 - protein, 9 aa, Homo sapiens
  Table A; Target 5884; HLA-C*01:02; ADAM7; ENSG00000069206; CTA
CLPYYSTSI

SEQ ID NO: 5885 - protein, 9 aa, Homo sapiens
  Table A; Target 5885; HLA-A*29:02; ADAM7; ENSG00000069206; CTA
CMLNIPFPY

SEQ ID NO: 5886 - protein, 8 aa, Homo sapiens
  Table A; Target 5886; HLA-B*08:01; ADAM7; ENSG00000069206; CTA
CPSGKCVM

SEQ ID NO: 5887 - protein, 9 aa, Homo sapiens
  Table A; Target 5887; HLA-B*08:01; ADAM7; ENSG00000069206; CTA
CQIKKAGSI

SEQ ID NO: 5888 - protein, 9 aa, Homo sapiens
  Table A; Target 5888; HLA-B*13:02; ADAM7; ENSG00000069206; CTA
CQIKKAGSI

SEQ ID NO: 5889 - protein, 9 aa, Homo sapiens
  Table A; Target 5889; HLA-A*01:01; ADAM7; ENSG00000069206; CTA
CSQNQYHQY

SEQ ID NO: 5890 - protein, 9 aa, Homo sapiens
  Table A; Target 5890; HLA-A*29:02; ADAM7; ENSG00000069206; CTA
CSQNQYHQY

SEQ ID NO: 5891 - protein, 9 aa, Homo sapiens
  Table A; Target 5891; HLA-A*30:02; ADAM7; ENSG00000069206; CTA
CSQNQYHQY

SEQ ID NO: 5892 - protein, 9 aa, Homo sapiens
  Table A; Target 5892; HLA-A*32:01; ADAM7; ENSG00000069206; CTA
CSQNQYHQY

SEQ ID NO: 5893 - protein, 9 aa, Homo sapiens
  Table A; Target 5893; HLA-A*33:01; ADAM7; ENSG00000069206; CTA
CSQNQYHQY

SEQ ID NO: 5894 - protein, 9 aa, Homo sapiens
  Table A; Target 5894; HLA-B*15:01; ADAM7; ENSG00000069206; CTA
CSQNQYHQY

SEQ ID NO: 5895 - protein, 9 aa, Homo sapiens
  Table A; Target 5895; HLA-B*39:01; ADAM7; ENSG00000069206; CTA
CSQNQYHQY

SEQ ID NO: 5896 - protein, 9 aa, Homo sapiens
  Table A; Target 5896; HLA-B*58:01; ADAM7; ENSG00000069206; CTA
CSQNQYHQY

SEQ ID NO: 5897 - protein, 9 aa, Homo sapiens
  Table A; Target 5897; HLA-C*01:02; ADAM7; ENSG00000069206; CTA
CSQNQYHQY

SEQ ID NO: 5898 - protein, 9 aa, Homo sapiens
  Table A; Target 5898; HLA-C*12:03; ADAM7; ENSG00000069206; CTA
CSQNQYHQY

SEQ ID NO: 5899 - protein, 9 aa, Homo sapiens
  Table A; Target 5899; HLA-C*16:01; ADAM7; ENSG00000069206; CTA
CSQNQYHQY

SEQ ID NO: 5900 - protein, 9 aa, Homo sapiens
  Table A; Target 5900; HLA-C*16:02; ADAM7; ENSG00000069206; CTA
CSQNQYHQY

SEQ ID NO: 5901 - protein, 9 aa, Homo sapiens
  Table A; Target 5901; HLA-C*16:04; ADAM7; ENSG00000069206; CTA
CSQNQYHQY

SEQ ID NO: 5902 - protein, 10 aa, Homo sapiens
  Table A; Target 5902; HLA-C*06:02; ADAM7; ENSG00000069206; CTA
CSQNQYHQYL

SEQ ID NO: 5903 - protein, 9 aa, Homo sapiens
  Table A; Target 5903; HLA-A*01:01; ADAM7; ENSG00000069206; CTA
CTELNFTRK

SEQ ID NO: 5904 - protein, 9 aa, Homo sapiens
  Table A; Target 5904; HLA-A*03:02; ADAM7; ENSG00000069206; CTA
CTELNFTRK

SEQ ID NO: 5905 - protein, 9 aa, Homo sapiens
  Table A; Target 5905; HLA-A*11:01; ADAM7; ENSG00000069206; CTA
CTELNFTRK

SEQ ID NO: 5906 - protein, 8 aa, Homo sapiens
  Table A; Target 5906; HLA-A*33:01; ADAM7; ENSG00000069206; CTA
DAHTCVLK

SEQ ID NO: 5907 - protein, 8 aa, Homo sapiens
  Table A; Target 5907; HLA-B*18:01; ADAM7; ENSG00000069206; CTA
DDDILKTY

SEQ ID NO: 5908 - protein, 9 aa, Homo sapiens
  Table A; Target 5908; HLA-B*18:01; ADAM7; ENSG00000069206; CTA
DEAIESHDI

SEQ ID NO: 5909 - protein, 9 aa, Homo sapiens
  Table A; Target 5909; HLA-B*38:01; ADAM7; ENSG00000069206; CTA
DEAIESHDI

SEQ ID NO: 5910 - protein, 9 aa, Homo sapiens
  Table A; Target 5910; HLA-B*49:01; ADAM7; ENSG00000069206; CTA
DEAIESHDI

SEQ ID NO: 5911 - protein, 11 aa, Homo sapiens
  Table A; Target 5911; HLA-B*18:01; ADAM7; ENSG00000069206; CTA
DEAIESHDICY

SEQ ID NO: 5912 - protein, 11 aa, Homo sapiens
  Table A; Target 5912; HLA-B*44:03; ADAM7; ENSG00000069206; CTA
DEAIESHDICY

SEQ ID NO: 5913 - protein, 8 aa, Homo sapiens
  Table A; Target 5913; HLA-B*18:01; ADAM7; ENSG00000069206; CTA
DECDFPEM

SEQ ID NO: 5914 - protein, 8 aa, Homo sapiens
  Table A; Target 5914; HLA-B*18:01; ADAM7; ENSG00000069206; CTA
DEGEHLVF

SEQ ID NO: 5915 - protein, 8 aa, Homo sapiens
  Table A; Target 5915; HLA-B*37:01; ADAM7; ENSG00000069206; CTA
DEGEHLVF

SEQ ID NO: 5916 - protein, 8 aa, Homo sapiens
  Table A; Target 5916; HLA-B*44:02; ADAM7; ENSG00000069206; CTA
DEGEHLVF

SEQ ID NO: 5917 - protein, 8 aa, Homo sapiens
  Table A; Target 5917; HLA-B*44:03; ADAM7; ENSG00000069206; CTA
DEGEHLVF

SEQ ID NO: 5918 - protein, 10 aa, Homo sapiens
  Table A; Target 5918; HLA-B*18:01; ADAM7; ENSG00000069206; CTA
DEGEHLVFKY

SEQ ID NO: 5919 - protein, 10 aa, Homo sapiens
  Table A; Target 5919; HLA-B*44:02; ADAM7; ENSG00000069206; CTA
DEGEHLVFKY

SEQ ID NO: 5920 - protein, 10 aa, Homo sapiens
  Table A; Target 5920; HLA-B*44:03; ADAM7; ENSG00000069206; CTA
DEGEHLVFKY

SEQ ID NO: 5921 - protein, 8 aa, Homo sapiens
  Table A; Target 5921; HLA-B*18:01; ADAM7; ENSG00000069206; CTA
DEKYVELF

SEQ ID NO: 5922 - protein, 9 aa, Homo sapiens
  Table A; Target 5922; HLA-B*18:01; ADAM7; ENSG00000069206; CTA
DEQQIRTEP

SEQ ID NO: 5923 - protein, 10 aa, Homo sapiens
  Table A; Target 5923; HLA-B*18:01; ADAM7; ENSG00000069206; CTA
DEQQIRTEPI

SEQ ID NO: 5924 - protein, 8 aa, Homo sapiens
  Table A; Target 5924; HLA-B*35:01; ADAM7; ENSG00000069206; CTA
DFDHVVLL

SEQ ID NO: 5925 - protein, 8 aa, Homo sapiens
  Table A; Target 5925; HLA-B*35:03; ADAM7; ENSG00000069206; CTA
DFDHVVLL

SEQ ID NO: 5926 - protein, 8 aa, Homo sapiens
  Table A; Target 5926; HLA-C*04:01; ADAM7; ENSG00000069206; CTA
DFDHVVLL

SEQ ID NO: 5927 - protein, 9 aa, Homo sapiens
  Table A; Target 5927; HLA-A*25:01; ADAM7; ENSG00000069206; CTA
DGSIPALKF

SEQ ID NO: 5928 - protein, 9 aa, Homo sapiens
  Table A; Target 5928; HLA-A*33:01; ADAM7; ENSG00000069206; CTA
DGSIPALKF

SEQ ID NO: 5929 - protein, 9 aa, Homo sapiens
  Table A; Target 5929; HLA-A*68:01; ADAM7; ENSG00000069206; CTA
DGSIPALKF

SEQ ID NO: 5930 - protein, 9 aa, Homo sapiens
  Table A; Target 5930; HLA-B*18:01; ADAM7; ENSG00000069206; CTA
DGSIPALKF

SEQ ID NO: 5931 - protein, 9 aa, Homo sapiens
  Table A; Target 5931; HLA-B*35:01; ADAM7; ENSG00000069206; CTA
DGSIPALKF

SEQ ID NO: 5932 - protein, 9 aa, Homo sapiens
  Table A; Target 5932; HLA-B*38:01; ADAM7; ENSG00000069206; CTA
DGSIPALKF

SEQ ID NO: 5933 - protein, 9 aa, Homo sapiens
  Table A; Target 5933; HLA-B*44:02; ADAM7; ENSG00000069206; CTA
DGSIPALKF

SEQ ID NO: 5934 - protein, 9 aa, Homo sapiens
  Table A; Target 5934; HLA-B*44:03; ADAM7; ENSG00000069206; CTA
DGSIPALKF

SEQ ID NO: 5935 - protein, 9 aa, Homo sapiens
  Table A; Target 5935; HLA-B*51:01; ADAM7; ENSG00000069206; CTA
DGSIPALKF

SEQ ID NO: 5936 - protein, 9 aa, Homo sapiens
  Table A; Target 5936; HLA-C*04:01; ADAM7; ENSG00000069206; CTA
DGSIPALKF

SEQ ID NO: 5937 - protein, 9 aa, Homo sapiens
  Table A; Target 5937; HLA-C*06:02; ADAM7; ENSG00000069206; CTA
DGSIPALKF

SEQ ID NO: 5938 - protein, 9 aa, Homo sapiens
  Table A; Target 5938; HLA-C*07:01; ADAM7; ENSG00000069206; CTA
DGSIPALKF

SEQ ID NO: 5939 - protein, 9 aa, Homo sapiens
  Table A; Target 5939; HLA-C*07:02; ADAM7; ENSG00000069206; CTA
DGSIPALKF

SEQ ID NO: 5940 - protein, 9 aa, Homo sapiens
  Table A; Target 5940; HLA-C*12:03; ADAM7; ENSG00000069206; CTA
DGSIPALKF

SEQ ID NO: 5941 - protein, 9 aa, Homo sapiens
  Table A; Target 5941; HLA-B*38:01; ADAM7; ENSG00000069206; CTA
DLLPDTNII

SEQ ID NO: 5942 - protein, 11 aa, Homo sapiens
  Table A; Target 5942; HLA-A*33:01; ADAM7; ENSG00000069206; CTA
DLLPDTNIIAN

SEQ ID NO: 5943 - protein, 8 aa, Homo sapiens
  Table A; Target 5943; HLA-B*08:01; ADAM7; ENSG00000069206; CTA
DPQKNATV

SEQ ID NO: 5944 - protein, 8 aa, Homo sapiens
  Table A; Target 5944; HLA-B*51:01; ADAM7; ENSG00000069206; CTA
DPQKNATV

SEQ ID NO: 5945 - protein, 8 aa, Homo sapiens
  Table A; Target 5945; HLA-B*18:01; ADAM7; ENSG00000069206; CTA
DQFRVNGF

SEQ ID NO: 5946 - protein, 9 aa, Homo sapiens
  Table A; Target 5946; HLA-B*51:01; ADAM7; ENSG00000069206; CTA
DSAASISTC

SEQ ID NO: 5947 - protein, 9 aa, Homo sapiens
  Table A; Target 5947; HLA-C*12:03; ADAM7; ENSG00000069206; CTA
DSAASISTC

SEQ ID NO: 5948 - protein, 9 aa, Homo sapiens
  Table A; Target 5948; HLA-A*01:01; ADAM7; ENSG00000069206; CTA
DSDGSIPAL

SEQ ID NO: 5949 - protein, 9 aa, Homo sapiens
  Table A; Target 5949; HLA-A*25:01; ADAM7; ENSG00000069206; CTA
DSDGSIPAL

SEQ ID NO: 5950 - protein, 9 aa, Homo sapiens
  Table A; Target 5950; HLA-B*35:03; ADAM7; ENSG00000069206; CTA
DSDGSIPAL

SEQ ID NO: 5951 - protein, 9 aa, Homo sapiens
  Table A; Target 5951; HLA-B*38:01; ADAM7; ENSG00000069206; CTA
DSDGSIPAL

SEQ ID NO: 5952 - protein, 9 aa, Homo sapiens
  Table A; Target 5952; HLA-B*39:01; ADAM7; ENSG00000069206; CTA
DSDGSIPAL

SEQ ID NO: 5953 - protein, 9 aa, Homo sapiens
  Table A; Target 5953; HLA-C*03:03; ADAM7; ENSG00000069206; CTA
DSDGSIPAL

SEQ ID NO: 5954 - protein, 9 aa, Homo sapiens
  Table A; Target 5954; HLA-C*03:04; ADAM7; ENSG00000069206; CTA
DSDGSIPAL

SEQ ID NO: 5955 - protein, 9 aa, Homo sapiens
  Table A; Target 5955; HLA-C*05:01; ADAM7; ENSG00000069206; CTA
DSDGSIPAL

SEQ ID NO: 5956 - protein, 10 aa, Homo sapiens
  Table A; Target 5956; HLA-A*01:01; ADAM7; ENSG00000069206; CTA
DSDGSIPALK

SEQ ID NO: 5957 - protein, 10 aa, Homo sapiens
  Table A; Target 5957; HLA-A*68:01; ADAM7; ENSG00000069206; CTA
DSDGSIPALK

SEQ ID NO: 5958 - protein, 10 aa, Homo sapiens
  Table A; Target 5958; HLA-B*27:02; ADAM7; ENSG00000069206; CTA
DSDGSIPALK

SEQ ID NO: 5959 - protein, 11 aa, Homo sapiens
  Table A; Target 5959; HLA-A*01:01; ADAM7; ENSG00000069206; CTA
DSDGSIPALKF

SEQ ID NO: 5960 - protein, 11 aa, Homo sapiens
  Table A; Target 5960; HLA-A*33:01; ADAM7; ENSG00000069206; CTA
DSDGSIPALKF

SEQ ID NO: 5961 - protein, 11 aa, Homo sapiens
  Table A; Target 5961; HLA-A*33:01; ADAM7; ENSG00000069206; CTA
DSKIKGIHDEK

SEQ ID NO: 5962 - protein, 9 aa, Homo sapiens
  Table A; Target 5962; HLA-A*01:01; ADAM7; ENSG00000069206; CTA
DSTDIGLVA

SEQ ID NO: 5963 - protein, 9 aa, Homo sapiens
  Table A; Target 5963; HLA-A*26:01; ADAM7; ENSG00000069206; CTA
DSTDIGLVA

SEQ ID NO: 5964 - protein, 9 aa, Homo sapiens
  Table A; Target 5964; HLA-A*33:01; ADAM7; ENSG00000069206; CTA
DSTDIGLVA

SEQ ID NO: 5965 - protein, 9 aa, Homo sapiens
  Table A; Target 5965; HLA-A*68:01; ADAM7; ENSG00000069206; CTA
DSTDIGLVA

SEQ ID NO: 5966 - protein, 9 aa, Homo sapiens
  Table A; Target 5966; HLA-A*68:02; ADAM7; ENSG00000069206; CTA
DSTDIGLVA

SEQ ID NO: 5967 - protein, 9 aa, Homo sapiens
  Table A; Target 5967; HLA-B*39:01; ADAM7; ENSG00000069206; CTA
DSTDIGLVA

SEQ ID NO: 5968 - protein, 9 aa, Homo sapiens
  Table A; Target 5968; HLA-B*54:01; ADAM7; ENSG00000069206; CTA
DSTDIGLVA

SEQ ID NO: 5969 - protein, 9 aa, Homo sapiens
  Table A; Target 5969; HLA-C*07:06; ADAM7; ENSG00000069206; CTA
DSTDIGLVA

SEQ ID NO: 5970 - protein, 9 aa, Homo sapiens
  Table A; Target 5970; HLA-C*12:03; ADAM7; ENSG00000069206; CTA
DSTDIGLVA

SEQ ID NO: 5971 - protein, 8 aa, Homo sapiens
  Table A; Target 5971; HLA-A*33:01; ADAM7; ENSG00000069206; CTA
DTNIIANR

SEQ ID NO: 5972 - protein, 8 aa, Homo sapiens
  Table A; Target 5972; HLA-A*33:03; ADAM7; ENSG00000069206; CTA
DTNIIANR

SEQ ID NO: 5973 - protein, 8 aa, Homo sapiens
  Table A; Target 5973; HLA-A*68:01; ADAM7; ENSG00000069206; CTA
DTNIIANR

SEQ ID NO: 5974 - protein, 8 aa, Homo sapiens
  Table A; Target 5974; HLA-C*07:06; ADAM7; ENSG00000069206; CTA
DTNIIANR

SEQ ID NO: 5975 - protein, 9 aa, Homo sapiens
  Table A; Target 5975; HLA-A*26:01; ADAM7; ENSG00000069206; CTA
DTNIIANRM

SEQ ID NO: 5976 - protein, 9 aa, Homo sapiens
  Table A; Target 5976; HLA-A*33:01; ADAM7; ENSG00000069206; CTA
DTNIIANRM

SEQ ID NO: 5977 - protein, 9 aa, Homo sapiens
  Table A; Target 5977; HLA-A*33:03; ADAM7; ENSG00000069206; CTA
DTNIIANRM

SEQ ID NO: 5978 - protein, 9 aa, Homo sapiens
  Table A; Target 5978; HLA-A*68:01; ADAM7; ENSG00000069206; CTA
DTNIIANRM

SEQ ID NO: 5979 - protein, 9 aa, Homo sapiens
  Table A; Target 5979; HLA-C*07:06; ADAM7; ENSG00000069206; CTA
DTNIIANRM

SEQ ID NO: 5980 - protein, 9 aa, Homo sapiens
  Table A; Target 5980; HLA-A*68:02; ADAM7; ENSG00000069206; CTA
EAFTRHPQI

SEQ ID NO: 5981 - protein, 9 aa, Homo sapiens
  Table A; Target 5981; HLA-B*51:01; ADAM7; ENSG00000069206; CTA
EAFTRHPQI

SEQ ID NO: 5982 - protein, 8 aa, Homo sapiens
  Table A; Target 5982; HLA-B*51:01; ADAM7; ENSG00000069206; CTA
EAIESHDI

SEQ ID NO: 5983 - protein, 9 aa, Homo sapiens
  Table A; Target 5983; HLA-B*35:03; ADAM7; ENSG00000069206; CTA
EAIESHDIC

SEQ ID NO: 5984 - protein, 9 aa, Homo sapiens
  Table A; Target 5984; HLA-C*12:03; ADAM7; ENSG00000069206; CTA
EAIESHDIC

SEQ ID NO: 5985 - protein, 10 aa, Homo sapiens
  Table A; Target 5985; HLA-A*01:01; ADAM7; ENSG00000069206; CTA
EAIESHDICY

SEQ ID NO: 5986 - protein, 10 aa, Homo sapiens
  Table A; Target 5986; HLA-A*25:01; ADAM7; ENSG00000069206; CTA
EAIESHDICY

SEQ ID NO: 5987 - protein, 10 aa, Homo sapiens
  Table A; Target 5987; HLA-A*26:01; ADAM7; ENSG00000069206; CTA
EAIESHDICY

SEQ ID NO: 5988 - protein, 10 aa, Homo sapiens
  Table A; Target 5988; HLA-A*29:02; ADAM7; ENSG00000069206; CTA
EAIESHDICY

SEQ ID NO: 5989 - protein, 10 aa, Homo sapiens
  Table A; Target 5989; HLA-A*33:01; ADAM7; ENSG00000069206; CTA
EAIESHDICY

SEQ ID NO: 5990 - protein, 10 aa, Homo sapiens
  Table A; Target 5990; HLA-A*33:03; ADAM7; ENSG00000069206; CTA
EAIESHDICY

SEQ ID NO: 5991 - protein, 10 aa, Homo sapiens
  Table A; Target 5991; HLA-A*68:01; ADAM7; ENSG00000069206; CTA
EAIESHDICY

SEQ ID NO: 5992 - protein, 10 aa, Homo sapiens
  Table A; Target 5992; HLA-B*15:01; ADAM7; ENSG00000069206; CTA
EAIESHDICY

SEQ ID NO: 5993 - protein, 10 aa, Homo sapiens
  Table A; Target 5993; HLA-B*18:01; ADAM7; ENSG00000069206; CTA
EAIESHDICY

SEQ ID NO: 5994 - protein, 10 aa, Homo sapiens
  Table A; Target 5994; HLA-B*27:02; ADAM7; ENSG00000069206; CTA
EAIESHDICY

SEQ ID NO: 5995 - protein, 10 aa, Homo sapiens
  Table A; Target 5995; HLA-B*35:01; ADAM7; ENSG00000069206; CTA
EAIESHDICY

SEQ ID NO: 5996 - protein, 10 aa, Homo sapiens
  Table A; Target 5996; HLA-B*35:03; ADAM7; ENSG00000069206; CTA
EAIESHDICY

SEQ ID NO: 5997 - protein, 10 aa, Homo sapiens
  Table A; Target 5997; HLA-B*44:03; ADAM7; ENSG00000069206; CTA
EAIESHDICY

SEQ ID NO: 5998 - protein, 10 aa, Homo sapiens
  Table A; Target 5998; HLA-B*46:01; ADAM7; ENSG00000069206; CTA
EAIESHDICY

SEQ ID NO: 5999 - protein, 10 aa, Homo sapiens
  Table A; Target 5999; HLA-B*55:01; ADAM7; ENSG00000069206; CTA
EAIESHDICY

SEQ ID NO: 6000 - protein, 10 aa, Homo sapiens
  Table A; Target 6000; HLA-B*58:01; ADAM7; ENSG00000069206; CTA
EAIESHDICY

SEQ ID NO: 6001 - protein, 10 aa, Homo sapiens
  Table A; Target 6001; HLA-C*02:02; ADAM7; ENSG00000069206; CTA
EAIESHDICY

SEQ ID NO: 6002 - protein, 10 aa, Homo sapiens
  Table A; Target 6002; HLA-C*03:03; ADAM7; ENSG00000069206; CTA
EAIESHDICY

SEQ ID NO: 6003 - protein, 10 aa, Homo sapiens
  Table A; Target 6003; HLA-C*07:06; ADAM7; ENSG00000069206; CTA
EAIESHDICY

SEQ ID NO: 6004 - protein, 10 aa, Homo sapiens
  Table A; Target 6004; HLA-C*12:03; ADAM7; ENSG00000069206; CTA
EAIESHDICY

SEQ ID NO: 6005 - protein, 10 aa, Homo sapiens
  Table A; Target 6005; HLA-C*16:04; ADAM7; ENSG00000069206; CTA
EAIESHDICY

SEQ ID NO: 6006 - protein, 11 aa, Homo sapiens
  Table A; Target 6006; HLA-A*33:01; ADAM7; ENSG00000069206; CTA
EAIESHDICYK

SEQ ID NO: 6007 - protein, 11 aa, Homo sapiens
  Table A; Target 6007; HLA-A*33:03; ADAM7; ENSG00000069206; CTA
EAIESHDICYK

SEQ ID NO: 6008 - protein, 11 aa, Homo sapiens
  Table A; Target 6008; HLA-A*68:01; ADAM7; ENSG00000069206; CTA
EAIESHDICYK

SEQ ID NO: 6009 - protein, 8 aa, Homo sapiens
  Table A; Target 6009; HLA-B*37:01; ADAM7; ENSG00000069206; CTA
EDSKIKGI

SEQ ID NO: 6010 - protein, 9 aa, Homo sapiens
  Table A; Target 6010; HLA-B*44:02; ADAM7; ENSG00000069206; CTA
EEDSKIKGI

SEQ ID NO: 6011 - protein, 9 aa, Homo sapiens
  Table A; Target 6011; HLA-B*44:03; ADAM7; ENSG00000069206; CTA
EEDSKIKGI

SEQ ID NO: 6012 - protein, 9 aa, Homo sapiens
  Table A; Target 6012; HLA-B*49:01; ADAM7; ENSG00000069206; CTA
EEDSKIKGI

SEQ ID NO: 6013 - protein, 8 aa, Homo sapiens
  Table A; Target 6013; HLA-B*18:01; ADAM7; ENSG00000069206; CTA
EEELLYEI

SEQ ID NO: 6014 - protein, 8 aa, Homo sapiens
  Table A; Target 6014; HLA-B*49:01; ADAM7; ENSG00000069206; CTA
EEELLYEI

SEQ ID NO: 6015 - protein, 10 aa, Homo sapiens
  Table A; Target 6015; HLA-B*40:01; ADAM7; ENSG00000069206; CTA
EEELLYEIKL

SEQ ID NO: 6016 - protein, 10 aa, Homo sapiens
  Table A; Target 6016; HLA-B*44:02; ADAM7; ENSG00000069206; CTA
EEELLYEIKL

SEQ ID NO: 6017 - protein, 10 aa, Homo sapiens
  Table A; Target 6017; HLA-B*44:03; ADAM7; ENSG00000069206; CTA
EEELLYEIKL

SEQ ID NO: 6018 - protein, 8 aa, Homo sapiens
  Table A; Target 6018; HLA-B*18:01; ADAM7; ENSG00000069206; CTA
EEGQAPVA

SEQ ID NO: 6019 - protein, 9 aa, Homo sapiens
  Table A; Target 6019; HLA-A*30:01; ADAM7; ENSG00000069206; CTA
EEGQAPVAC

SEQ ID NO: 6020 - protein, 9 aa, Homo sapiens
  Table A; Target 6020; HLA-B*18:01; ADAM7; ENSG00000069206; CTA
EEGQAPVAC

SEQ ID NO: 6021 - protein, 9 aa, Homo sapiens
  Table A; Target 6021; HLA-B*44:03; ADAM7; ENSG00000069206; CTA
EEGQAPVAC

SEQ ID NO: 6022 - protein, 9 aa, Homo sapiens
  Table A; Target 6022; HLA-A*30:01; ADAM7; ENSG00000069206; CTA
EELLYEIKL

SEQ ID NO: 6023 - protein, 9 aa, Homo sapiens
  Table A; Target 6023; HLA-B*18:01; ADAM7; ENSG00000069206; CTA
EELLYEIKL

SEQ ID NO: 6024 - protein, 9 aa, Homo sapiens
  Table A; Target 6024; HLA-B*40:01; ADAM7; ENSG00000069206; CTA
EELLYEIKL

SEQ ID NO: 6025 - protein, 9 aa, Homo sapiens
  Table A; Target 6025; HLA-B*40:02; ADAM7; ENSG00000069206; CTA
EELLYEIKL

SEQ ID NO: 6026 - protein, 9 aa, Homo sapiens
  Table A; Target 6026; HLA-B*44:02; ADAM7; ENSG00000069206; CTA
EELLYEIKL

SEQ ID NO: 6027 - protein, 9 aa, Homo sapiens
  Table A; Target 6027; HLA-B*44:03; ADAM7; ENSG00000069206; CTA
EELLYEIKL

SEQ ID NO: 6028 - protein, 9 aa, Homo sapiens
  Table A; Target 6028; HLA-A*30:01; ADAM7; ENSG00000069206; CTA
EETLHVTNI

SEQ ID NO: 6029 - protein, 9 aa, Homo sapiens
  Table A; Target 6029; HLA-A*68:02; ADAM7; ENSG00000069206; CTA
EETLHVTNI

SEQ ID NO: 6030 - protein, 9 aa, Homo sapiens
  Table A; Target 6030; HLA-B*18:01; ADAM7; ENSG00000069206; CTA
EETLHVTNI

SEQ ID NO: 6031 - protein, 9 aa, Homo sapiens
  Table A; Target 6031; HLA-B*37:01; ADAM7; ENSG00000069206; CTA
EETLHVTNI

SEQ ID NO: 6032 - protein, 9 aa, Homo sapiens
  Table A; Target 6032; HLA-B*38:01; ADAM7; ENSG00000069206; CTA
EETLHVTNI

SEQ ID NO: 6033 - protein, 9 aa, Homo sapiens
  Table A; Target 6033; HLA-B*40:01; ADAM7; ENSG00000069206; CTA
EETLHVTNI

SEQ ID NO: 6034 - protein, 9 aa, Homo sapiens
  Table A; Target 6034; HLA-B*40:02; ADAM7; ENSG00000069206; CTA
EETLHVTNI

SEQ ID NO: 6035 - protein, 9 aa, Homo sapiens
  Table A; Target 6035; HLA-B*44:02; ADAM7; ENSG00000069206; CTA
EETLHVTNI

SEQ ID NO: 6036 - protein, 9 aa, Homo sapiens
  Table A; Target 6036; HLA-B*44:03; ADAM7; ENSG00000069206; CTA
EETLHVTNI

SEQ ID NO: 6037 - protein, 9 aa, Homo sapiens
  Table A; Target 6037; HLA-B*49:01; ADAM7; ENSG00000069206; CTA
EETLHVTNI

SEQ ID NO: 6038 - protein, 9 aa, Homo sapiens
  Table A; Target 6038; HLA-C*16:04; ADAM7; ENSG00000069206; CTA
EETLHVTNI

SEQ ID NO: 6039 - protein, 11 aa, Homo sapiens
  Table A; Target 6039; HLA-B*44:02; ADAM7; ENSG00000069206; CTA
EETLHVTNITI

SEQ ID NO: 6040 - protein, 11 aa, Homo sapiens
  Table A; Target 6040; HLA-A*23:01; ADAM7; ENSG00000069206; CTA
EFLGSNYSETF

SEQ ID NO: 6041 - protein, 11 aa, Homo sapiens
  Table A; Target 6041; HLA-A*24:02; ADAM7; ENSG00000069206; CTA
EFLGSNYSETF

SEQ ID NO: 6042 - protein, 9 aa, Homo sapiens
  Table A; Target 6042; HLA-A*01:01; ADAM7; ENSG00000069206; CTA
EGEHLVFKY

SEQ ID NO: 6043 - protein, 9 aa, Homo sapiens
  Table A; Target 6043; HLA-A*29:02; ADAM7; ENSG00000069206; CTA
EGEHLVFKY

SEQ ID NO: 6044 - protein, 9 aa, Homo sapiens
  Table A; Target 6044; HLA-A*33:01; ADAM7; ENSG00000069206; CTA
EGEHLVFKY

SEQ ID NO: 6045 - protein, 9 aa, Homo sapiens
  Table A; Target 6045; HLA-A*33:01; ADAM7; ENSG00000069206; CTA
EGQQLVRPK

SEQ ID NO: 6046 - protein, 9 aa, Homo sapiens
  Table A; Target 6046; HLA-A*33:03; ADAM7; ENSG00000069206; CTA
EGQQLVRPK

SEQ ID NO: 6047 - protein, 9 aa, Homo sapiens
  Table A; Target 6047; HLA-C*06:02; ADAM7; ENSG00000069206; CTA
EGQQLVRPK

SEQ ID NO: 6048 - protein, 9 aa, Homo sapiens
  Table A; Target 6048; HLA-C*07:02; ADAM7; ENSG00000069206; CTA
EGQQLVRPK

SEQ ID NO: 6049 - protein, 9 aa, Homo sapiens
  Table A; Target 6049; HLA-C*07:06; ADAM7; ENSG00000069206; CTA
EGQQLVRPK

SEQ ID NO: 6050 - protein, 9 aa, Homo sapiens
  Table A; Target 6050; HLA-B*08:01; ADAM7; ENSG00000069206; CTA
EIKLNRKTL

SEQ ID NO: 6051 - protein, 11 aa, Homo sapiens
  Table A; Target 6051; HLA-A*26:01; ADAM7; ENSG00000069206; CTA
ELFDDEAIESH

SEQ ID NO: 6052 - protein, 11 aa, Homo sapiens
  Table A; Target 6052; HLA-A*01:01; ADAM7; ENSG00000069206; CTA
ELFIVADDTVY

SEQ ID NO: 6053 - protein, 11 aa, Homo sapiens
  Table A; Target 6053; HLA-A*26:01; ADAM7; ENSG00000069206; CTA
ELFIVADDTVY

SEQ ID NO: 6054 - protein, 11 aa, Homo sapiens
  Table A; Target 6054; HLA-C*07:01; ADAM7; ENSG00000069206; CTA
ELFIVADDTVY

SEQ ID NO: 6055 - protein, 10 aa, Homo sapiens
  Table A; Target 6055; HLA-A*33:01; ADAM7; ENSG00000069206; CTA
ELLYEIKLNR

SEQ ID NO: 6056 - protein, 10 aa, Homo sapiens
  Table A; Target 6056; HLA-A*33:03; ADAM7; ENSG00000069206; CTA
ELLYEIKLNR

SEQ ID NO: 6057 - protein, 10 aa, Homo sapiens
  Table A; Target 6057; HLA-B*27:02; ADAM7; ENSG00000069206; CTA
ELSSLLGEDK

SEQ ID NO: 6058 - protein, 10 aa, Homo sapiens
  Table A; Target 6058; HLA-A*02:03; ADAM7; ENSG00000069206; CTA
ELYSNIETTL

SEQ ID NO: 6059 - protein, 10 aa, Homo sapiens
  Table A; Target 6059; HLA-A*23:01; ADAM7; ENSG00000069206; CTA
ELYSNIETTL

SEQ ID NO: 6060 - protein, 10 aa, Homo sapiens
  Table A; Target 6060; HLA-A*25:01; ADAM7; ENSG00000069206; CTA
ELYSNIETTL

SEQ ID NO: 6061 - protein, 10 aa, Homo sapiens
  Table A; Target 6061; HLA-A*26:01; ADAM7; ENSG00000069206; CTA
ELYSNIETTL

SEQ ID NO: 6062 - protein, 10 aa, Homo sapiens
  Table A; Target 6062; HLA-A*68:02; ADAM7; ENSG00000069206; CTA
ELYSNIETTL

SEQ ID NO: 6063 - protein, 11 aa, Homo sapiens
  Table A; Target 6063; HLA-A*02:03; ADAM7; ENSG00000069206; CTA
ELYSNIETTLL

SEQ ID NO: 6064 - protein, 9 aa, Homo sapiens
  Table A; Target 6064; HLA-B*35:01; ADAM7; ENSG00000069206; CTA
EPILPEIHF

SEQ ID NO: 6065 - protein, 9 aa, Homo sapiens
  Table A; Target 6065; HLA-B*35:03; ADAM7; ENSG00000069206; CTA
EPILPEIHF

SEQ ID NO: 6066 - protein, 9 aa, Homo sapiens
  Table A; Target 6066; HLA-B*51:01; ADAM7; ENSG00000069206; CTA
EPILPEIHF

SEQ ID NO: 6067 - protein, 9 aa, Homo sapiens
  Table A; Target 6067; HLA-B*55:01; ADAM7; ENSG00000069206; CTA
EPILPEIHF

SEQ ID NO: 6068 - protein, 9 aa, Homo sapiens
  Table A; Target 6068; HLA-A*26:01; ADAM7; ENSG00000069206; CTA
ESHDICYKM

SEQ ID NO: 6069 - protein, 8 aa, Homo sapiens
  Table A; Target 6069; HLA-C*07:01; ADAM7; ENSG00000069206; CTA
ETFYSMKG

SEQ ID NO: 6070 - protein, 10 aa, Homo sapiens
  Table A; Target 6070; HLA-A*68:02; ADAM7; ENSG00000069206; CTA
ETFYSMKGEA

SEQ ID NO: 6071 - protein, 11 aa, Homo sapiens
  Table A; Target 6071; HLA-A*25:01; ADAM7; ENSG00000069206; CTA
ETFYSMKGEAF

SEQ ID NO: 6072 - protein, 11 aa, Homo sapiens
  Table A; Target 6072; HLA-A*26:01; ADAM7; ENSG00000069206; CTA
ETFYSMKGEAF

SEQ ID NO: 6073 - protein, 10 aa, Homo sapiens
  Table A; Target 6073; HLA-A*25:01; ADAM7; ENSG00000069206; CTA
ETLGVENKGY

SEQ ID NO: 6074 - protein, 10 aa, Homo sapiens
  Table A; Target 6074; HLA-A*26:01; ADAM7; ENSG00000069206; CTA
ETLGVENKGY

SEQ ID NO: 6075 - protein, 10 aa, Homo sapiens
  Table A; Target 6075; HLA-B*44:02; ADAM7; ENSG00000069206; CTA
ETLGVENKGY

SEQ ID NO: 6076 - protein, 10 aa, Homo sapiens
  Table A; Target 6076; HLA-B*44:03; ADAM7; ENSG00000069206; CTA
ETLGVENKGY

SEQ ID NO: 6077 - protein, 11 aa, Homo sapiens
  Table A; Target 6077; HLA-A*26:01; ADAM7; ENSG00000069206; CTA
ETLGVENKGYF

SEQ ID NO: 6078 - protein, 11 aa, Homo sapiens
  Table A; Target 6078; HLA-A*33:01; ADAM7; ENSG00000069206; CTA
ETLGVENKGYF

SEQ ID NO: 6079 - protein, 10 aa, Homo sapiens
  Table A; Target 6079; HLA-A*68:02; ADAM7; ENSG00000069206; CTA
ETLHVTNITI

SEQ ID NO: 6080 - protein, 9 aa, Homo sapiens
  Table A; Target 6080; HLA-A*25:01; ADAM7; ENSG00000069206; CTA
ETTLLRFSF

SEQ ID NO: 6081 - protein, 9 aa, Homo sapiens
  Table A; Target 6081; HLA-B*57:01; ADAM7; ENSG00000069206; CTA
ETTLLRFSF

SEQ ID NO: 6082 - protein, 8 aa, Homo sapiens
  Table A; Target 6082; HLA-C*04:01; ADAM7; ENSG00000069206; CTA
EYDSAASI

SEQ ID NO: 6083 - protein, 9 aa, Homo sapiens
  Table A; Target 6083; HLA-A*29:02; ADAM7; ENSG00000069206; CTA
FFRINDQRY

SEQ ID NO: 6084 - protein, 10 aa, Homo sapiens
  Table A; Target 6084; HLA-A*02:01; ADAM7; ENSG00000069206; CTA
FILGVEGQQL

SEQ ID NO: 6085 - protein, 10 aa, Homo sapiens
  Table A; Target 6085; HLA-A*02:03; ADAM7; ENSG00000069206; CTA
FILGVEGQQL

SEQ ID NO: 6086 - protein, 10 aa, Homo sapiens
  Table A; Target 6086; HLA-A*02:04; ADAM7; ENSG00000069206; CTA
FILGVEGQQL

SEQ ID NO: 6087 - protein, 10 aa, Homo sapiens
  Table A; Target 6087; HLA-A*02:07; ADAM7; ENSG00000069206; CTA
FILGVEGQQL

SEQ ID NO: 6088 - protein, 10 aa, Homo sapiens
  Table A; Target 6088; HLA-A*23:01; ADAM7; ENSG00000069206; CTA
FILGVEGQQL

SEQ ID NO: 6089 - protein, 10 aa, Homo sapiens
  Table A; Target 6089; HLA-A*30:01; ADAM7; ENSG00000069206; CTA
FILGVEGQQL

SEQ ID NO: 6090 - protein, 10 aa, Homo sapiens
  Table A; Target 6090; HLA-A*68:02; ADAM7; ENSG00000069206; CTA
FILGVEGQQL

SEQ ID NO: 6091 - protein, 10 aa, Homo sapiens
  Table A; Target 6091; HLA-B*27:05; ADAM7; ENSG00000069206; CTA
FILGVEGQQL

SEQ ID NO: 6092 - protein, 10 aa, Homo sapiens
  Table A; Target 6092; HLA-B*35:03; ADAM7; ENSG00000069206; CTA
FILGVEGQQL

SEQ ID NO: 6093 - protein, 10 aa, Homo sapiens
  Table A; Target 6093; HLA-B*38:01; ADAM7; ENSG00000069206; CTA
FILGVEGQQL

SEQ ID NO: 6094 - protein, 10 aa, Homo sapiens
  Table A; Target 6094; HLA-B*40:01; ADAM7; ENSG00000069206; CTA
FILGVEGQQL

SEQ ID NO: 6095 - protein, 10 aa, Homo sapiens
  Table A; Target 6095; HLA-B*40:02; ADAM7; ENSG00000069206; CTA
FILGVEGQQL

SEQ ID NO: 6096 - protein, 10 aa, Homo sapiens
  Table A; Target 6096; HLA-B*55:01; ADAM7; ENSG00000069206; CTA
FILGVEGQQL

SEQ ID NO: 6097 - protein, 10 aa, Homo sapiens
  Table A; Target 6097; HLA-C*01:02; ADAM7; ENSG00000069206; CTA
FILGVEGQQL

SEQ ID NO: 6098 - protein, 10 aa, Homo sapiens
  Table A; Target 6098; HLA-C*02:02; ADAM7; ENSG00000069206; CTA
FILGVEGQQL

SEQ ID NO: 6099 - protein, 10 aa, Homo sapiens
  Table A; Target 6099; HLA-C*03:03; ADAM7; ENSG00000069206; CTA
FILGVEGQQL

SEQ ID NO: 6100 - protein, 10 aa, Homo sapiens
  Table A; Target 6100; HLA-C*03:04; ADAM7; ENSG00000069206; CTA
FILGVEGQQL

SEQ ID NO: 6101 - protein, 10 aa, Homo sapiens
  Table A; Target 6101; HLA-C*04:01; ADAM7; ENSG00000069206; CTA
FILGVEGQQL

SEQ ID NO: 6102 - protein, 10 aa, Homo sapiens
  Table A; Target 6102; HLA-C*07:04; ADAM7; ENSG00000069206; CTA
FILGVEGQQL

SEQ ID NO: 6103 - protein, 11 aa, Homo sapiens
  Table A; Target 6103; HLA-A*68:02; ADAM7; ENSG00000069206; CTA
FILGVEGQQLV

SEQ ID NO: 6104 - protein, 11 aa, Homo sapiens
  Table A; Target 6104; HLA-B*13:02; ADAM7; ENSG00000069206; CTA
FILGVEGQQLV

SEQ ID NO: 6105 - protein, 9 aa, Homo sapiens
  Table A; Target 6105; HLA-A*01:01; ADAM7; ENSG00000069206; CTA
FIVADDTVY

SEQ ID NO: 6106 - protein, 9 aa, Homo sapiens
  Table A; Target 6106; HLA-A*26:01; ADAM7; ENSG00000069206; CTA
FIVADDTVY

SEQ ID NO: 6107 - protein, 9 aa, Homo sapiens
  Table A; Target 6107; HLA-B*15:01; ADAM7; ENSG00000069206; CTA
FIVADDTVY

SEQ ID NO: 6108 - protein, 9 aa, Homo sapiens
  Table A; Target 6108; HLA-B*15:03; ADAM7; ENSG00000069206; CTA
FIVADDTVY

SEQ ID NO: 6109 - protein, 9 aa, Homo sapiens
  Table A; Target 6109; HLA-B*35:01; ADAM7; ENSG00000069206; CTA
FIVADDTVY

SEQ ID NO: 6110 - protein, 9 aa, Homo sapiens
  Table A; Target 6110; HLA-B*35:03; ADAM7; ENSG00000069206; CTA
FIVADDTVY

SEQ ID NO: 6111 - protein, 9 aa, Homo sapiens
  Table A; Target 6111; HLA-B*39:01; ADAM7; ENSG00000069206; CTA
FIVADDTVY

SEQ ID NO: 6112 - protein, 9 aa, Homo sapiens
  Table A; Target 6112; HLA-B*46:01; ADAM7; ENSG00000069206; CTA
FIVADDTVY

SEQ ID NO: 6113 - protein, 9 aa, Homo sapiens
  Table A; Target 6113; HLA-B*55:01; ADAM7; ENSG00000069206; CTA
FIVADDTVY

SEQ ID NO: 6114 - protein, 9 aa, Homo sapiens
  Table A; Target 6114; HLA-B*58:01; ADAM7; ENSG00000069206; CTA
FIVADDTVY

SEQ ID NO: 6115 - protein, 9 aa, Homo sapiens
  Table A; Target 6115; HLA-C*02:02; ADAM7; ENSG00000069206; CTA
FIVADDTVY

SEQ ID NO: 6116 - protein, 9 aa, Homo sapiens
  Table A; Target 6116; HLA-C*03:03; ADAM7; ENSG00000069206; CTA
FIVADDTVY

SEQ ID NO: 6117 - protein, 9 aa, Homo sapiens
  Table A; Target 6117; HLA-C*07:04; ADAM7; ENSG00000069206; CTA
FIVADDTVY

SEQ ID NO: 6118 - protein, 10 aa, Homo sapiens
  Table A; Target 6118; HLA-A*33:03; ADAM7; ENSG00000069206; CTA
FIVADDTVYR

SEQ ID NO: 6119 - protein, 10 aa, Homo sapiens
  Table A; Target 6119; HLA-A*68:01; ADAM7; ENSG00000069206; CTA
FIVADDTVYR

SEQ ID NO: 6120 - protein, 10 aa, Homo sapiens
  Table A; Target 6120; HLA-A*68:02; ADAM7; ENSG00000069206; CTA
FIVADDTVYR

SEQ ID NO: 6121 - protein, 10 aa, Homo sapiens
  Table A; Target 6121; HLA-B*27:02; ADAM7; ENSG00000069206; CTA
FIVADDTVYR

SEQ ID NO: 6122 - protein, 10 aa, Homo sapiens
  Table A; Target 6122; HLA-C*07:06; ADAM7; ENSG00000069206; CTA
FIVADDTVYR

SEQ ID NO: 6123 - protein, 9 aa, Homo sapiens
  Table A; Target 6123; HLA-B*15:03; ADAM7; ENSG00000069206; CTA
FKYNLRVPY

SEQ ID NO: 6124 - protein, 10 aa, Homo sapiens
  Table A; Target 6124; HLA-C*07:04; ADAM7; ENSG00000069206; CTA
FLGSNYSETF

SEQ ID NO: 6125 - protein, 11 aa, Homo sapiens
  Table A; Target 6125; HLA-A*01:01; ADAM7; ENSG00000069206; CTA
FLGSNYSETFY

SEQ ID NO: 6126 - protein, 11 aa, Homo sapiens
  Table A; Target 6126; HLA-A*29:02; ADAM7; ENSG00000069206; CTA
FLGSNYSETFY

SEQ ID NO: 6127 - protein, 11 aa, Homo sapiens
  Table A; Target 6127; HLA-A*33:01; ADAM7; ENSG00000069206; CTA
FLNKPASKDSR

SEQ ID NO: 6128 - protein, 9 aa, Homo sapiens
  Table A; Target 6128; HLA-A*02:01; ADAM7; ENSG00000069206; CTA
FLYHDSTDI

SEQ ID NO: 6129 - protein, 9 aa, Homo sapiens
  Table A; Target 6129; HLA-A*02:03; ADAM7; ENSG00000069206; CTA
FLYHDSTDI

SEQ ID NO: 6130 - protein, 9 aa, Homo sapiens
  Table A; Target 6130; HLA-A*02:04; ADAM7; ENSG00000069206; CTA
FLYHDSTDI

SEQ ID NO: 6131 - protein, 9 aa, Homo sapiens
  Table A; Target 6131; HLA-B*13:02; ADAM7; ENSG00000069206; CTA
FLYHDSTDI

SEQ ID NO: 6132 - protein, 9 aa, Homo sapiens
  Table A; Target 6132; HLA-B*15:03; ADAM7; ENSG00000069206; CTA
FLYHDSTDI

SEQ ID NO: 6133 - protein, 11 aa, Homo sapiens
  Table A; Target 6133; HLA-A*02:01; ADAM7; ENSG00000069206; CTA
FLYHDSTDIGL

SEQ ID NO: 6134 - protein, 11 aa, Homo sapiens
  Table A; Target 6134; HLA-A*02:03; ADAM7; ENSG00000069206; CTA
FLYHDSTDIGL

SEQ ID NO: 6135 - protein, 11 aa, Homo sapiens
  Table A; Target 6135; HLA-A*02:04; ADAM7; ENSG00000069206; CTA
FLYHDSTDIGL

SEQ ID NO: 6136 - protein, 11 aa, Homo sapiens
  Table A; Target 6136; HLA-A*02:07; ADAM7; ENSG00000069206; CTA
FLYHDSTDIGL

SEQ ID NO: 6137 - protein, 9 aa, Homo sapiens
  Table A; Target 6137; HLA-B*15:03; ADAM7; ENSG00000069206; CTA
FPCKNSEGY

SEQ ID NO: 6138 - protein, 9 aa, Homo sapiens
  Table A; Target 6138; HLA-B*35:01; ADAM7; ENSG00000069206; CTA
FPCKNSEGY

SEQ ID NO: 6139 - protein, 9 aa, Homo sapiens
  Table A; Target 6139; HLA-B*55:01; ADAM7; ENSG00000069206; CTA
FPCKNSEGY

SEQ ID NO: 6140 - protein, 9 aa, Homo sapiens
  Table A; Target 6140; HLA-C*07:01; ADAM7; ENSG00000069206; CTA
FPCKNSEGY

SEQ ID NO: 6141 - protein, 8 aa, Homo sapiens
  Table A; Target 6141; HLA-B*51:01; ADAM7; ENSG00000069206; CTA
FPYNFHDF

SEQ ID NO: 6142 - protein, 8 aa, Homo sapiens
  Table A; Target 6142; HLA-B*54:01; ADAM7; ENSG00000069206; CTA
FPYNFHDF

SEQ ID NO: 6143 - protein, 10 aa, Homo sapiens
  Table A; Target 6143; HLA-B*35:01; ADAM7; ENSG00000069206; CTA
FPYNFHDFQF

SEQ ID NO: 6144 - protein, 10 aa, Homo sapiens
  Table A; Target 6144; HLA-B*54:01; ADAM7; ENSG00000069206; CTA
FPYNFHDFQF

SEQ ID NO: 6145 - protein, 9 aa, Homo sapiens
  Table A; Target 6145; HLA-A*30:02; ADAM7; ENSG00000069206; CTA
FSKCSQNQY

SEQ ID NO: 6146 - protein, 9 aa, Homo sapiens
  Table A; Target 6146; HLA-B*15:03; ADAM7; ENSG00000069206; CTA
FSKCSQNQY

SEQ ID NO: 6147 - protein, 9 aa, Homo sapiens
  Table A; Target 6147; HLA-B*46:01; ADAM7; ENSG00000069206; CTA
FSKCSQNQY

SEQ ID NO: 6148 - protein, 9 aa, Homo sapiens
  Table A; Target 6148; HLA-C*07:04; ADAM7; ENSG00000069206; CTA
FSKCSQNQY

SEQ ID NO: 6149 - protein, 9 aa, Homo sapiens
  Table A; Target 6149; HLA-A*02:07; ADAM7; ENSG00000069206; CTA
FVNMIYKTL

SEQ ID NO: 6150 - protein, 9 aa, Homo sapiens
  Table A; Target 6150; HLA-A*25:01; ADAM7; ENSG00000069206; CTA
FVNMIYKTL

SEQ ID NO: 6151 - protein, 9 aa, Homo sapiens
  Table A; Target 6151; HLA-C*03:04; ADAM7; ENSG00000069206; CTA
FVNMIYKTL

SEQ ID NO: 6152 - protein, 10 aa, Homo sapiens
  Table A; Target 6152; HLA-A*23:01; ADAM7; ENSG00000069206; CTA
FYQGSIVHEY

SEQ ID NO: 6153 - protein, 10 aa, Homo sapiens
  Table A; Target 6153; HLA-A*24:02; ADAM7; ENSG00000069206; CTA
FYQGSIVHEY

SEQ ID NO: 6154 - protein, 10 aa, Homo sapiens
  Table A; Target 6154; HLA-A*26:01; ADAM7; ENSG00000069206; CTA
FYQGSIVHEY

SEQ ID NO: 6155 - protein, 10 aa, Homo sapiens
  Table A; Target 6155; HLA-A*29:02; ADAM7; ENSG00000069206; CTA
FYQGSIVHEY

SEQ ID NO: 6156 - protein, 10 aa, Homo sapiens
  Table A; Target 6156; HLA-A*30:02; ADAM7; ENSG00000069206; CTA
FYQGSIVHEY

SEQ ID NO: 6157 - protein, 10 aa, Homo sapiens
  Table A; Target 6157; HLA-A*33:01; ADAM7; ENSG00000069206; CTA
FYQGSIVHEY

SEQ ID NO: 6158 - protein, 10 aa, Homo sapiens
  Table A; Target 6158; HLA-A*33:03; ADAM7; ENSG00000069206; CTA
FYQGSIVHEY

SEQ ID NO: 6159 - protein, 10 aa, Homo sapiens
  Table A; Target 6159; HLA-B*44:02; ADAM7; ENSG00000069206; CTA
FYQGSIVHEY

SEQ ID NO: 6160 - protein, 10 aa, Homo sapiens
  Table A; Target 6160; HLA-B*46:01; ADAM7; ENSG00000069206; CTA
FYQGSIVHEY

SEQ ID NO: 6161 - protein, 10 aa, Homo sapiens
  Table A; Target 6161; HLA-C*01:02; ADAM7; ENSG00000069206; CTA
FYQGSIVHEY

SEQ ID NO: 6162 - protein, 10 aa, Homo sapiens
  Table A; Target 6162; HLA-C*02:02; ADAM7; ENSG00000069206; CTA
FYQGSIVHEY

SEQ ID NO: 6163 - protein, 10 aa, Homo sapiens
  Table A; Target 6163; HLA-C*14:02; ADAM7; ENSG00000069206; CTA
FYQGSIVHEY

SEQ ID NO: 6164 - protein, 10 aa, Homo sapiens
  Table A; Target 6164; HLA-C*16:04; ADAM7; ENSG00000069206; CTA
FYQGSIVHEY

SEQ ID NO: 6165 - protein, 9 aa, Homo sapiens
  Table A; Target 6165; HLA-A*23:01; ADAM7; ENSG00000069206; CTA
FYSMKGEAF

SEQ ID NO: 6166 - protein, 9 aa, Homo sapiens
  Table A; Target 6166; HLA-A*24:02; ADAM7; ENSG00000069206; CTA
FYSMKGEAF

SEQ ID NO: 6167 - protein, 9 aa, Homo sapiens
  Table A; Target 6167; HLA-C*14:02; ADAM7; ENSG00000069206; CTA
FYSMKGEAF

SEQ ID NO: 6168 - protein, 9 aa, Homo sapiens
  Table A; Target 6168; HLA-C*01:02; ADAM7; ENSG00000069206; CTA
GANYSCTEL

SEQ ID NO: 6169 - protein, 9 aa, Homo sapiens
  Table A; Target 6169; HLA-C*03:04; ADAM7; ENSG00000069206; CTA
GANYSCTEL

SEQ ID NO: 6170 - protein, 9 aa, Homo sapiens
  Table A; Target 6170; HLA-C*16:04; ADAM7; ENSG00000069206; CTA
GANYSCTEL

SEQ ID NO: 6171 - protein, 10 aa, Homo sapiens
  Table A; Target 6171; HLA-B*27:02; ADAM7; ENSG00000069206; CTA
GDNESEEDSK

SEQ ID NO: 6172 - protein, 10 aa, Homo sapiens
  Table A; Target 6172; HLA-B*49:01; ADAM7; ENSG00000069206; CTA
GEAFTRHPQI

SEQ ID NO: 6173 - protein, 9 aa, Homo sapiens
  Table A; Target 6173; HLA-A*30:01; ADAM7; ENSG00000069206; CTA
GECLNMEKV

SEQ ID NO: 6174 - protein, 9 aa, Homo sapiens
  Table A; Target 6174; HLA-B*40:01; ADAM7; ENSG00000069206; CTA
GECLNMEKV

SEQ ID NO: 6175 - protein, 9 aa, Homo sapiens
  Table A; Target 6175; HLA-B*40:02; ADAM7; ENSG00000069206; CTA
GECLNMEKV

SEQ ID NO: 6176 - protein, 9 aa, Homo sapiens
  Table A; Target 6176; HLA-B*49:01; ADAM7; ENSG00000069206; CTA
GECLNMEKV

SEQ ID NO: 6177 - protein, 10 aa, Homo sapiens
  Table A; Target 6177; HLA-B*44:02; ADAM7; ENSG00000069206; CTA
GECLNMEKVY

SEQ ID NO: 6178 - protein, 10 aa, Homo sapiens
  Table A; Target 6178; HLA-B*44:03; ADAM7; ENSG00000069206; CTA
GECLNMEKVY

SEQ ID NO: 6179 - protein, 10 aa, Homo sapiens
  Table A; Target 6179; HLA-C*16:04; ADAM7; ENSG00000069206; CTA
GECLNMEKVY

SEQ ID NO: 6180 - protein, 8 aa, Homo sapiens
  Table A; Target 6180; HLA-A*30:01; ADAM7; ENSG00000069206; CTA
GEDKTYHL

SEQ ID NO: 6181 - protein, 8 aa, Homo sapiens
  Table A; Target 6181; HLA-B*37:01; ADAM7; ENSG00000069206; CTA
GEDKTYHL

SEQ ID NO: 6182 - protein, 8 aa, Homo sapiens
  Table A; Target 6182; HLA-B*38:01; ADAM7; ENSG00000069206; CTA
GEDKTYHL

SEQ ID NO: 6183 - protein, 8 aa, Homo sapiens
  Table A; Target 6183; HLA-B*40:01; ADAM7; ENSG00000069206; CTA
GEDKTYHL

SEQ ID NO: 6184 - protein, 8 aa, Homo sapiens
  Table A; Target 6184; HLA-B*40:02; ADAM7; ENSG00000069206; CTA
GEDKTYHL

SEQ ID NO: 6185 - protein, 8 aa, Homo sapiens
  Table A; Target 6185; HLA-B*44:03; ADAM7; ENSG00000069206; CTA
GEDKTYHL

SEQ ID NO: 6186 - protein, 8 aa, Homo sapiens
  Table A; Target 6186; HLA-B*49:01; ADAM7; ENSG00000069206; CTA
GEDKTYHL

SEQ ID NO: 6187 - protein, 8 aa, Homo sapiens
  Table A; Target 6187; HLA-A*30:01; ADAM7; ENSG00000069206; CTA
GEHLVFKY

SEQ ID NO: 6188 - protein, 8 aa, Homo sapiens
  Table A; Target 6188; HLA-B*18:01; ADAM7; ENSG00000069206; CTA
GEHLVFKY

SEQ ID NO: 6189 - protein, 8 aa, Homo sapiens
  Table A; Target 6189; HLA-B*27:02; ADAM7; ENSG00000069206; CTA
GEHLVFKY

SEQ ID NO: 6190 - protein, 8 aa, Homo sapiens
  Table A; Target 6190; HLA-B*37:01; ADAM7; ENSG00000069206; CTA
GEHLVFKY

SEQ ID NO: 6191 - protein, 8 aa, Homo sapiens
  Table A; Target 6191; HLA-B*40:02; ADAM7; ENSG00000069206; CTA
GEHLVFKY

SEQ ID NO: 6192 - protein, 8 aa, Homo sapiens
  Table A; Target 6192; HLA-B*44:02; ADAM7; ENSG00000069206; CTA
GEHLVFKY

SEQ ID NO: 6193 - protein, 8 aa, Homo sapiens
  Table A; Target 6193; HLA-B*44:03; ADAM7; ENSG00000069206; CTA
GEHLVFKY

SEQ ID NO: 6194 - protein, 8 aa, Homo sapiens
  Table A; Target 6194; HLA-C*07:01; ADAM7; ENSG00000069206; CTA
GEHLVFKY

SEQ ID NO: 6195 - protein, 8 aa, Homo sapiens
  Table A; Target 6195; HLA-C*16:04; ADAM7; ENSG00000069206; CTA
GEHLVFKY

SEQ ID NO: 6196 - protein, 10 aa, Homo sapiens
  Table A; Target 6196; HLA-A*29:02; ADAM7; ENSG00000069206; CTA
GFFRINDQRY

SEQ ID NO: 6197 - protein, 9 aa, Homo sapiens
  Table A; Target 6197; HLA-B*38:01; ADAM7; ENSG00000069206; CTA
GHTHDDDIL

SEQ ID NO: 6198 - protein, 9 aa, Homo sapiens
  Table A; Target 6198; HLA-A*32:01; ADAM7; ENSG00000069206; CTA
GIADPNQSA

SEQ ID NO: 6199 - protein, 10 aa, Homo sapiens
  Table A; Target 6199; HLA-A*03:02; ADAM7; ENSG00000069206; CTA
GIADPNQSAK

SEQ ID NO: 6200 - protein, 10 aa, Homo sapiens
  Table A; Target 6200; HLA-A*11:01; ADAM7; ENSG00000069206; CTA
GIADPNQSAK

SEQ ID NO: 6201 - protein, 10 aa, Homo sapiens
  Table A; Target 6201; HLA-A*26:01; ADAM7; ENSG00000069206; CTA
GIADPNQSAK

SEQ ID NO: 6202 - protein, 10 aa, Homo sapiens
  Table A; Target 6202; HLA-A*68:01; ADAM7; ENSG00000069206; CTA
GIADPNQSAK

SEQ ID NO: 6203 - protein, 10 aa, Homo sapiens
  Table A; Target 6203; HLA-B*27:02; ADAM7; ENSG00000069206; CTA
GIADPNQSAK

SEQ ID NO: 6204 - protein, 10 aa, Homo sapiens
  Table A; Target 6204; HLA-B*27:05; ADAM7; ENSG00000069206; CTA
GIADPNQSAK

SEQ ID NO: 6205 - protein, 10 aa, Homo sapiens
  Table A; Target 6205; HLA-B*39:01; ADAM7; ENSG00000069206; CTA
GIADPNQSAK

SEQ ID NO: 6206 - protein, 10 aa, Homo sapiens
  Table A; Target 6206; HLA-C*01:02; ADAM7; ENSG00000069206; CTA
GIADPNQSAK

SEQ ID NO: 6207 - protein, 10 aa, Homo sapiens
  Table A; Target 6207; HLA-C*02:02; ADAM7; ENSG00000069206; CTA
GIADPNQSAK

SEQ ID NO: 6208 - protein, 10 aa, Homo sapiens
  Table A; Target 6208; HLA-C*03:03; ADAM7; ENSG00000069206; CTA
GIADPNQSAK

SEQ ID NO: 6209 - protein, 10 aa, Homo sapiens
  Table A; Target 6209; HLA-C*06:02; ADAM7; ENSG00000069206; CTA
GIADPNQSAK

SEQ ID NO: 6210 - protein, 10 aa, Homo sapiens
  Table A; Target 6210; HLA-C*07:06; ADAM7; ENSG00000069206; CTA
GIADPNQSAK

SEQ ID NO: 6211 - protein, 9 aa, Homo sapiens
  Table A; Target 6211; HLA-B*13:02; ADAM7; ENSG00000069206; CTA
GIGVLILLV

SEQ ID NO: 6212 - protein, 9 aa, Homo sapiens
  Table A; Target 6212; HLA-A*02:01; ADAM7; ENSG00000069206; CTA
GMVNFVNMI

SEQ ID NO: 6213 - protein, 9 aa, Homo sapiens
  Table A; Target 6213; HLA-A*02:03; ADAM7; ENSG00000069206; CTA
GMVNFVNMI

SEQ ID NO: 6214 - protein, 9 aa, Homo sapiens
  Table A; Target 6214; HLA-B*13:02; ADAM7; ENSG00000069206; CTA
GMVNFVNMI

SEQ ID NO: 6215 - protein, 10 aa, Homo sapiens
  Table A; Target 6215; HLA-A*29:02; ADAM7; ENSG00000069206; CTA
GMVNFVNMIY

SEQ ID NO: 6216 - protein, 10 aa, Homo sapiens
  Table A; Target 6216; HLA-A*30:02; ADAM7; ENSG00000069206; CTA
GMVNFVNMIY

SEQ ID NO: 6217 - protein, 10 aa, Homo sapiens
  Table A; Target 6217; HLA-B*15:01; ADAM7; ENSG00000069206; CTA
GMVNFVNMIY

SEQ ID NO: 6218 - protein, 11 aa, Homo sapiens
  Table A; Target 6218; HLA-A*03:01; ADAM7; ENSG00000069206; CTA
GMVNFVNMIYK

SEQ ID NO: 6219 - protein, 9 aa, Homo sapiens
  Table A; Target 6219; HLA-B*27:05; ADAM7; ENSG00000069206; CTA
GQAPVACEE

SEQ ID NO: 6220 - protein, 11 aa, Homo sapiens
  Table A; Target 6220; HLA-B*13:02; ADAM7; ENSG00000069206; CTA
GQAPVACEETL

SEQ ID NO: 6221 - protein, 11 aa, Homo sapiens
  Table A; Target 6221; HLA-B*27:05; ADAM7; ENSG00000069206; CTA
GQAPVACEETL

SEQ ID NO: 6222 - protein, 11 aa, Homo sapiens
  Table A; Target 6222; HLA-B*38:01; ADAM7; ENSG00000069206; CTA
GQAPVACEETL

SEQ ID NO: 6223 - protein, 8 aa, Homo sapiens
  Table A; Target 6223; HLA-A*03:02; ADAM7; ENSG00000069206; CTA
GQQLVRPK

SEQ ID NO: 6224 - protein, 8 aa, Homo sapiens
  Table A; Target 6224; HLA-A*11:01; ADAM7; ENSG00000069206; CTA
GQQLVRPK

SEQ ID NO: 6225 - protein, 8 aa, Homo sapiens
  Table A; Target 6225; HLA-B*57:01; ADAM7; ENSG00000069206; CTA
GSIPALKF

SEQ ID NO: 6226 - protein, 8 aa, Homo sapiens
  Table A; Target 6226; HLA-B*58:01; ADAM7; ENSG00000069206; CTA
GSIPALKF

SEQ ID NO: 6227 - protein, 10 aa, Homo sapiens
  Table A; Target 6227; HLA-A*11:01; ADAM7; ENSG00000069206; CTA
GSIPALKFSK

SEQ ID NO: 6228 - protein, 10 aa, Homo sapiens
  Table A; Target 6228; HLA-A*31:01; ADAM7; ENSG00000069206; CTA
GSIPALKFSK

SEQ ID NO: 6229 - protein, 10 aa, Homo sapiens
  Table A; Target 6229; HLA-B*57:01; ADAM7; ENSG00000069206; CTA
GSIPALKFSK

SEQ ID NO: 6230 - protein, 9 aa, Homo sapiens
  Table A; Target 6230; HLA-A*01:01; ADAM7; ENSG00000069206; CTA
GSNYSETFY

SEQ ID NO: 6231 - protein, 9 aa, Homo sapiens
  Table A; Target 6231; HLA-A*29:02; ADAM7; ENSG00000069206; CTA
GSNYSETFY

SEQ ID NO: 6232 - protein, 9 aa, Homo sapiens
  Table A; Target 6232; HLA-A*30:02; ADAM7; ENSG00000069206; CTA
GSNYSETFY

SEQ ID NO: 6233 - protein, 9 aa, Homo sapiens
  Table A; Target 6233; HLA-B*15:01; ADAM7; ENSG00000069206; CTA
GSNYSETFY

SEQ ID NO: 6234 - protein, 9 aa, Homo sapiens
  Table A; Target 6234; HLA-B*15:03; ADAM7; ENSG00000069206; CTA
GSNYSETFY

SEQ ID NO: 6235 - protein, 9 aa, Homo sapiens
  Table A; Target 6235; HLA-B*46:01; ADAM7; ENSG00000069206; CTA
GSNYSETFY

SEQ ID NO: 6236 - protein, 9 aa, Homo sapiens
  Table A; Target 6236; HLA-B*58:01; ADAM7; ENSG00000069206; CTA
GSNYSETFY

SEQ ID NO: 6237 - protein, 9 aa, Homo sapiens
  Table A; Target 6237; HLA-C*07:04; ADAM7; ENSG00000069206; CTA
GSNYSETFY

SEQ ID NO: 6238 - protein, 9 aa, Homo sapiens
  Table A; Target 6238; HLA-C*16:04; ADAM7; ENSG00000069206; CTA
GSNYSETFY

SEQ ID NO: 6239 - protein, 9 aa, Homo sapiens
  Table A; Target 6239; HLA-A*68:01; ADAM7; ENSG00000069206; CTA
GVEGQQLVR

SEQ ID NO: 6240 - protein, 9 aa, Homo sapiens
  Table A; Target 6240; HLA-C*07:06; ADAM7; ENSG00000069206; CTA
GVEGQQLVR

SEQ ID NO: 6241 - protein, 11 aa, Homo sapiens
  Table A; Target 6241; HLA-A*03:01; ADAM7; ENSG00000069206; CTA
GVEGQQLVRPK

SEQ ID NO: 6242 - protein, 11 aa, Homo sapiens
  Table A; Target 6242; HLA-A*03:02; ADAM7; ENSG00000069206; CTA
GVEGQQLVRPK

SEQ ID NO: 6243 - protein, 11 aa, Homo sapiens
  Table A; Target 6243; HLA-A*11:01; ADAM7; ENSG00000069206; CTA
GVEGQQLVRPK

SEQ ID NO: 6244 - protein, 11 aa, Homo sapiens
  Table A; Target 6244; HLA-A*31:01; ADAM7; ENSG00000069206; CTA
GVEGQQLVRPK

SEQ ID NO: 6245 - protein, 11 aa, Homo sapiens
  Table A; Target 6245; HLA-B*27:02; ADAM7; ENSG00000069206; CTA
GVEGQQLVRPK

SEQ ID NO: 6246 - protein, 11 aa, Homo sapiens
  Table A; Target 6246; HLA-C*06:02; ADAM7; ENSG00000069206; CTA
GVEGQQLVRPK

SEQ ID NO: 6247 - protein, 9 aa, Homo sapiens
  Table A; Target 6247; HLA-A*29:02; ADAM7; ENSG00000069206; CTA
GVLILLVRY

SEQ ID NO: 6248 - protein, 9 aa, Homo sapiens
  Table A; Target 6248; HLA-A*30:02; ADAM7; ENSG00000069206; CTA
GVLILLVRY

SEQ ID NO: 6249 - protein, 9 aa, Homo sapiens
  Table A; Target 6249; HLA-B*57:01; ADAM7; ENSG00000069206; CTA
GVLILLVRY

SEQ ID NO: 6250 - protein, 9 aa, Homo sapiens
  Table A; Target 6250; HLA-A*23:01; ADAM7; ENSG00000069206; CTA
GYFGDEQQI

SEQ ID NO: 6251 - protein, 9 aa, Homo sapiens
  Table A; Target 6251; HLA-A*24:02; ADAM7; ENSG00000069206; CTA
GYFGDEQQI

SEQ ID NO: 6252 - protein, 9 aa, Homo sapiens
  Table A; Target 6252; HLA-B*13:02; ADAM7; ENSG00000069206; CTA
GYFGDEQQI

SEQ ID NO: 6253 - protein, 9 aa, Homo sapiens
  Table A; Target 6253; HLA-B*38:01; ADAM7; ENSG00000069206; CTA
GYFGDEQQI

SEQ ID NO: 6254 - protein, 9 aa, Homo sapiens
  Table A; Target 6254; HLA-B*18:01; ADAM7; ENSG00000069206; CTA
HDDDILKTY

SEQ ID NO: 6255 - protein, 9 aa, Homo sapiens
  Table A; Target 6255; HLA-B*44:02; ADAM7; ENSG00000069206; CTA
HDDDILKTY

SEQ ID NO: 6256 - protein, 9 aa, Homo sapiens
  Table A; Target 6256; HLA-B*44:03; ADAM7; ENSG00000069206; CTA
HDDDILKTY

SEQ ID NO: 6257 - protein, 9 aa, Homo sapiens
  Table A; Target 6257; HLA-C*16:02; ADAM7; ENSG00000069206; CTA
HDDDILKTY

SEQ ID NO: 6258 - protein, 8 aa, Homo sapiens
  Table A; Target 6258; HLA-B*37:01; ADAM7; ENSG00000069206; CTA
HDSTDIGL

SEQ ID NO: 6259 - protein, 8 aa, Homo sapiens
  Table A; Target 6259; HLA-B*38:01; ADAM7; ENSG00000069206; CTA
HDSTDIGL

SEQ ID NO: 6260 - protein, 8 aa, Homo sapiens
  Table A; Target 6260; HLA-C*07:04; ADAM7; ENSG00000069206; CTA
HDSTDIGL

SEQ ID NO: 6261 - protein, 9 aa, Homo sapiens
  Table A; Target 6261; HLA-A*68:02; ADAM7; ENSG00000069206; CTA
HDSTDIGLV

SEQ ID NO: 6262 - protein, 8 aa, Homo sapiens
  Table A; Target 6262; HLA-A*01:01; ADAM7; ENSG00000069206; CTA
HEDKIELY

SEQ ID NO: 6263 - protein, 8 aa, Homo sapiens
  Table A; Target 6263; HLA-B*18:01; ADAM7; ENSG00000069206; CTA
HEDKIELY

SEQ ID NO: 6264 - protein, 8 aa, Homo sapiens
  Table A; Target 6264; HLA-B*44:02; ADAM7; ENSG00000069206; CTA
HEDKIELY

SEQ ID NO: 6265 - protein, 8 aa, Homo sapiens
  Table A; Target 6265; HLA-B*44:03; ADAM7; ENSG00000069206; CTA
HEDKIELY

SEQ ID NO: 6266 - protein, 9 aa, Homo sapiens
  Table A; Target 6266; HLA-A*23:01; ADAM7; ENSG00000069206; CTA
HEYDSAASI

SEQ ID NO: 6267 - protein, 9 aa, Homo sapiens
  Table A; Target 6267; HLA-A*30:01; ADAM7; ENSG00000069206; CTA
HEYDSAASI

SEQ ID NO: 6268 - protein, 9 aa, Homo sapiens
  Table A; Target 6268; HLA-A*68:02; ADAM7; ENSG00000069206; CTA
HEYDSAASI

SEQ ID NO: 6269 - protein, 9 aa, Homo sapiens
  Table A; Target 6269; HLA-B*13:02; ADAM7; ENSG00000069206; CTA
HEYDSAASI

SEQ ID NO: 6270 - protein, 9 aa, Homo sapiens
  Table A; Target 6270; HLA-B*15:03; ADAM7; ENSG00000069206; CTA
HEYDSAASI

SEQ ID NO: 6271 - protein, 9 aa, Homo sapiens
  Table A; Target 6271; HLA-B*18:01; ADAM7; ENSG00000069206; CTA
HEYDSAASI

SEQ ID NO: 6272 - protein, 9 aa, Homo sapiens
  Table A; Target 6272; HLA-B*27:02; ADAM7; ENSG00000069206; CTA
HEYDSAASI

SEQ ID NO: 6273 - protein, 9 aa, Homo sapiens
  Table A; Target 6273; HLA-B*27:05; ADAM7; ENSG00000069206; CTA
HEYDSAASI

SEQ ID NO: 6274 - protein, 9 aa, Homo sapiens
  Table A; Target 6274; HLA-B*37:01; ADAM7; ENSG00000069206; CTA
HEYDSAASI

SEQ ID NO: 6275 - protein, 9 aa, Homo sapiens
  Table A; Target 6275; HLA-B*38:01; ADAM7; ENSG00000069206; CTA
HEYDSAASI

SEQ ID NO: 6276 - protein, 9 aa, Homo sapiens
  Table A; Target 6276; HLA-B*39:01; ADAM7; ENSG00000069206; CTA
HEYDSAASI

SEQ ID NO: 6277 - protein, 9 aa, Homo sapiens
  Table A; Target 6277; HLA-B*40:01; ADAM7; ENSG00000069206; CTA
HEYDSAASI

SEQ ID NO: 6278 - protein, 9 aa, Homo sapiens
  Table A; Target 6278; HLA-B*40:02; ADAM7; ENSG00000069206; CTA
HEYDSAASI

SEQ ID NO: 6279 - protein, 9 aa, Homo sapiens
  Table A; Target 6279; HLA-B*44:02; ADAM7; ENSG00000069206; CTA
HEYDSAASI

SEQ ID NO: 6280 - protein, 9 aa, Homo sapiens
  Table A; Target 6280; HLA-B*44:03; ADAM7; ENSG00000069206; CTA
HEYDSAASI

SEQ ID NO: 6281 - protein, 9 aa, Homo sapiens
  Table A; Target 6281; HLA-B*49:01; ADAM7; ENSG00000069206; CTA
HEYDSAASI

SEQ ID NO: 6282 - protein, 9 aa, Homo sapiens
  Table A; Target 6282; HLA-B*51:01; ADAM7; ENSG00000069206; CTA
HEYDSAASI

SEQ ID NO: 6283 - protein, 9 aa, Homo sapiens
  Table A; Target 6283; HLA-C*02:02; ADAM7; ENSG00000069206; CTA
HEYDSAASI

SEQ ID NO: 6284 - protein, 9 aa, Homo sapiens
  Table A; Target 6284; HLA-C*03:03; ADAM7; ENSG00000069206; CTA
HEYDSAASI

SEQ ID NO: 6285 - protein, 9 aa, Homo sapiens
  Table A; Target 6285; HLA-C*07:04; ADAM7; ENSG00000069206; CTA
HEYDSAASI

SEQ ID NO: 6286 - protein, 9 aa, Homo sapiens
  Table A; Target 6286; HLA-C*12:03; ADAM7; ENSG00000069206; CTA
HEYDSAASI

SEQ ID NO: 6287 - protein, 9 aa, Homo sapiens
  Table A; Target 6287; HLA-C*16:04; ADAM7; ENSG00000069206; CTA
HEYDSAASI

SEQ ID NO: 6288 - protein, 11 aa, Homo sapiens
  Table A; Target 6288; HLA-A*30:01; ADAM7; ENSG00000069206; CTA
HEYDSAASIST

SEQ ID NO: 6289 - protein, 11 aa, Homo sapiens
  Table A; Target 6289; HLA-B*18:01; ADAM7; ENSG00000069206; CTA
HEYDSAASIST

SEQ ID NO: 6290 - protein, 11 aa, Homo sapiens
  Table A; Target 6290; HLA-B*40:01; ADAM7; ENSG00000069206; CTA
HEYDSAASIST

SEQ ID NO: 6291 - protein, 11 aa, Homo sapiens
  Table A; Target 6291; HLA-B*40:02; ADAM7; ENSG00000069206; CTA
HEYDSAASIST

SEQ ID NO: 6292 - protein, 11 aa, Homo sapiens
  Table A; Target 6292; HLA-B*49:01; ADAM7; ENSG00000069206; CTA
HEYDSAASIST

SEQ ID NO: 6293 - protein, 9 aa, Homo sapiens
  Table A; Target 6293; HLA-A*33:03; ADAM7; ENSG00000069206; CTA
HFLNKPASK

SEQ ID NO: 6294 - protein, 9 aa, Homo sapiens
  Table A; Target 6294; HLA-A*02:03; ADAM7; ENSG00000069206; CTA
HLKDPQKNA

SEQ ID NO: 6295 - protein, 9 aa, Homo sapiens
  Table A; Target 6295; HLA-B*08:01; ADAM7; ENSG00000069206; CTA
HLKDPQKNA

SEQ ID NO: 6296 - protein, 9 aa, Homo sapiens
  Table A; Target 6296; HLA-B*55:01; ADAM7; ENSG00000069206; CTA
HLKDPQKNA

SEQ ID NO: 6297 - protein, 11 aa, Homo sapiens
  Table A; Target 6297; HLA-A*02:03; ADAM7; ENSG00000069206; CTA
HLKDPQKNATV

SEQ ID NO: 6298 - protein, 9 aa, Homo sapiens
  Table A; Target 6298; HLA-B*35:01; ADAM7; ENSG00000069206; CTA
HPQIMDHCF

SEQ ID NO: 6299 - protein, 9 aa, Homo sapiens
  Table A; Target 6299; HLA-B*35:03; ADAM7; ENSG00000069206; CTA
HPQIMDHCF

SEQ ID NO: 6300 - protein, 9 aa, Homo sapiens
  Table A; Target 6300; HLA-C*03:03; ADAM7; ENSG00000069206; CTA
HPQIMDHCF

SEQ ID NO: 6301 - protein, 9 aa, Homo sapiens
  Table A; Target 6301; HLA-A*30:01; ADAM7; ENSG00000069206; CTA
HQLGHNLGM

SEQ ID NO: 6302 - protein, 9 aa, Homo sapiens
  Table A; Target 6302; HLA-B*13:02; ADAM7; ENSG00000069206; CTA
HQLGHNLGM

SEQ ID NO: 6303 - protein, 9 aa, Homo sapiens
  Table A; Target 6303; HLA-B*15:01; ADAM7; ENSG00000069206; CTA
HQLGHNLGM

SEQ ID NO: 6304 - protein, 9 aa, Homo sapiens
  Table A; Target 6304; HLA-B*15:03; ADAM7; ENSG00000069206; CTA
HQLGHNLGM

SEQ ID NO: 6305 - protein, 9 aa, Homo sapiens
  Table A; Target 6305; HLA-B*37:01; ADAM7; ENSG00000069206; CTA
HQLGHNLGM

SEQ ID NO: 6306 - protein, 9 aa, Homo sapiens
  Table A; Target 6306; HLA-C*07:04; ADAM7; ENSG00000069206; CTA
HQLGHNLGM

SEQ ID NO: 6307 - protein, 9 aa, Homo sapiens
  Table A; Target 6307; HLA-A*03:02; ADAM7; ENSG00000069206; CTA
HTHDDDILK

SEQ ID NO: 6308 - protein, 9 aa, Homo sapiens
  Table A; Target 6308; HLA-A*11:01; ADAM7; ENSG00000069206; CTA
HTHDDDILK

SEQ ID NO: 6309 - protein, 9 aa, Homo sapiens
  Table A; Target 6309; HLA-A*68:01; ADAM7; ENSG00000069206; CTA
HTHDDDILK

SEQ ID NO: 6310 - protein, 9 aa, Homo sapiens
  Table A; Target 6310; HLA-C*07:06; ADAM7; ENSG00000069206; CTA
HTHDDDILK

SEQ ID NO: 6311 - protein, 11 aa, Homo sapiens
  Table A; Target 6311; HLA-A*01:01; ADAM7; ENSG00000069206; CTA
HTHDDDILKTY

SEQ ID NO: 6312 - protein, 11 aa, Homo sapiens
  Table A; Target 6312; HLA-A*25:01; ADAM7; ENSG00000069206; CTA
HTHDDDILKTY

SEQ ID NO: 6313 - protein, 11 aa, Homo sapiens
  Table A; Target 6313; HLA-A*26:01; ADAM7; ENSG00000069206; CTA
HTHDDDILKTY

SEQ ID NO: 6314 - protein, 11 aa, Homo sapiens
  Table A; Target 6314; HLA-A*30:02; ADAM7; ENSG00000069206; CTA
HTHDDDILKTY

SEQ ID NO: 6315 - protein, 11 aa, Homo sapiens
  Table A; Target 6315; HLA-B*57:01; ADAM7; ENSG00000069206; CTA
HTHDDDILKTY

SEQ ID NO: 6316 - protein, 9 aa, Homo sapiens
  Table A; Target 6316; HLA-A*33:01; ADAM7; ENSG00000069206; CTA
HVQGISYPG

SEQ ID NO: 6317 - protein, 9 aa, Homo sapiens
  Table A; Target 6317; HLA-C*07:01; ADAM7; ENSG00000069206; CTA
HVQGISYPG

SEQ ID NO: 6318 - protein, 9 aa, Homo sapiens
  Table A; Target 6318; HLA-A*68:02; ADAM7; ENSG00000069206; CTA
HVTLVGIEI

SEQ ID NO: 6319 - protein, 9 aa, Homo sapiens
  Table A; Target 6319; HLA-B*13:02; ADAM7; ENSG00000069206; CTA
HVTLVGIEI

SEQ ID NO: 6320 - protein, 9 aa, Homo sapiens
  Table A; Target 6320; HLA-B*35:03; ADAM7; ENSG00000069206; CTA
HVTLVGIEI

SEQ ID NO: 6321 - protein, 10 aa, Homo sapiens
  Table A; Target 6321; HLA-B*57:01; ADAM7; ENSG00000069206; CTA
HVTLVGIEIW

SEQ ID NO: 6322 - protein, 8 aa, Homo sapiens
  Table A; Target 6322; HLA-B*35:03; ADAM7; ENSG00000069206; CTA
HVTNITIL

SEQ ID NO: 6323 - protein, 9 aa, Homo sapiens
  Table A; Target 6323; HLA-A*02:03; ADAM7; ENSG00000069206; CTA
HVTNITILV

SEQ ID NO: 6324 - protein, 9 aa, Homo sapiens
  Table A; Target 6324; HLA-A*26:01; ADAM7; ENSG00000069206; CTA
HVTNITILV

SEQ ID NO: 6325 - protein, 9 aa, Homo sapiens
  Table A; Target 6325; HLA-A*68:01; ADAM7; ENSG00000069206; CTA
HVTNITILV

SEQ ID NO: 6326 - protein, 9 aa, Homo sapiens
  Table A; Target 6326; HLA-A*68:02; ADAM7; ENSG00000069206; CTA
HVTNITILV

SEQ ID NO: 6327 - protein, 9 aa, Homo sapiens
  Table A; Target 6327; HLA-B*13:02; ADAM7; ENSG00000069206; CTA
HVTNITILV

SEQ ID NO: 6328 - protein, 9 aa, Homo sapiens
  Table A; Target 6328; HLA-C*02:02; ADAM7; ENSG00000069206; CTA
HVTNITILV

SEQ ID NO: 6329 - protein, 10 aa, Homo sapiens
  Table A; Target 6329; HLA-A*68:02; ADAM7; ENSG00000069206; CTA
HVTNITILVV

SEQ ID NO: 6330 - protein, 10 aa, Homo sapiens
  Table A; Target 6330; HLA-B*13:02; ADAM7; ENSG00000069206; CTA
HVTNITILVV

SEQ ID NO: 6331 - protein, 10 aa, Homo sapiens
  Table A; Target 6331; HLA-B*54:01; ADAM7; ENSG00000069206; CTA
HVTNITILVV

SEQ ID NO: 6332 - protein, 11 aa, Homo sapiens
  Table A; Target 6332; HLA-A*68:02; ADAM7; ENSG00000069206; CTA
HVTNITILVVV

SEQ ID NO: 6333 - protein, 9 aa, Homo sapiens
  Table A; Target 6333; HLA-B*57:01; ADAM7; ENSG00000069206; CTA
HVVLLSGKW

SEQ ID NO: 6334 - protein, 8 aa, Homo sapiens
  Table A; Target 6334; HLA-C*05:01; ADAM7; ENSG00000069206; CTA
IADPNQSA

SEQ ID NO: 6335 - protein, 9 aa, Homo sapiens
  Table A; Target 6335; HLA-A*01:01; ADAM7; ENSG00000069206; CTA
IADPNQSAK

SEQ ID NO: 6336 - protein, 9 aa, Homo sapiens
  Table A; Target 6336; HLA-A*03:01; ADAM7; ENSG00000069206; CTA
IADPNQSAK

SEQ ID NO: 6337 - protein, 9 aa, Homo sapiens
  Table A; Target 6337; HLA-A*03:02; ADAM7; ENSG00000069206; CTA
IADPNQSAK

SEQ ID NO: 6338 - protein, 9 aa, Homo sapiens
  Table A; Target 6338; HLA-A*11:01; ADAM7; ENSG00000069206; CTA
IADPNQSAK

SEQ ID NO: 6339 - protein, 9 aa, Homo sapiens
  Table A; Target 6339; HLA-A*31:01; ADAM7; ENSG00000069206; CTA
IADPNQSAK

SEQ ID NO: 6340 - protein, 9 aa, Homo sapiens
  Table A; Target 6340; HLA-A*33:01; ADAM7; ENSG00000069206; CTA
IADPNQSAK

SEQ ID NO: 6341 - protein, 9 aa, Homo sapiens
  Table A; Target 6341; HLA-A*33:03; ADAM7; ENSG00000069206; CTA
IADPNQSAK

SEQ ID NO: 6342 - protein, 9 aa, Homo sapiens
  Table A; Target 6342; HLA-A*68:01; ADAM7; ENSG00000069206; CTA
IADPNQSAK

SEQ ID NO: 6343 - protein, 9 aa, Homo sapiens
  Table A; Target 6343; HLA-B*27:02; ADAM7; ENSG00000069206; CTA
IADPNQSAK

SEQ ID NO: 6344 - protein, 9 aa, Homo sapiens
  Table A; Target 6344; HLA-B*27:05; ADAM7; ENSG00000069206; CTA
IADPNQSAK

SEQ ID NO: 6345 - protein, 9 aa, Homo sapiens
  Table A; Target 6345; HLA-B*35:01; ADAM7; ENSG00000069206; CTA
IADPNQSAK

SEQ ID NO: 6346 - protein, 9 aa, Homo sapiens
  Table A; Target 6346; HLA-B*35:03; ADAM7; ENSG00000069206; CTA
IADPNQSAK

SEQ ID NO: 6347 - protein, 9 aa, Homo sapiens
  Table A; Target 6347; HLA-B*39:01; ADAM7; ENSG00000069206; CTA
IADPNQSAK

SEQ ID NO: 6348 - protein, 9 aa, Homo sapiens
  Table A; Target 6348; HLA-B*46:01; ADAM7; ENSG00000069206; CTA
IADPNQSAK

SEQ ID NO: 6349 - protein, 9 aa, Homo sapiens
  Table A; Target 6349; HLA-B*51:01; ADAM7; ENSG00000069206; CTA
IADPNQSAK

SEQ ID NO: 6350 - protein, 9 aa, Homo sapiens
  Table A; Target 6350; HLA-B*57:01; ADAM7; ENSG00000069206; CTA
IADPNQSAK

SEQ ID NO: 6351 - protein, 9 aa, Homo sapiens
  Table A; Target 6351; HLA-B*58:01; ADAM7; ENSG00000069206; CTA
IADPNQSAK

SEQ ID NO: 6352 - protein, 9 aa, Homo sapiens
  Table A; Target 6352; HLA-C*02:02; ADAM7; ENSG00000069206; CTA
IADPNQSAK

SEQ ID NO: 6353 - protein, 9 aa, Homo sapiens
  Table A; Target 6353; HLA-C*03:03; ADAM7; ENSG00000069206; CTA
IADPNQSAK

SEQ ID NO: 6354 - protein, 9 aa, Homo sapiens
  Table A; Target 6354; HLA-C*03:04; ADAM7; ENSG00000069206; CTA
IADPNQSAK

SEQ ID NO: 6355 - protein, 9 aa, Homo sapiens
  Table A; Target 6355; HLA-C*04:01; ADAM7; ENSG00000069206; CTA
IADPNQSAK

SEQ ID NO: 6356 - protein, 9 aa, Homo sapiens
  Table A; Target 6356; HLA-C*05:01; ADAM7; ENSG00000069206; CTA
IADPNQSAK

SEQ ID NO: 6357 - protein, 9 aa, Homo sapiens
  Table A; Target 6357; HLA-C*07:06; ADAM7; ENSG00000069206; CTA
IADPNQSAK

SEQ ID NO: 6358 - protein, 9 aa, Homo sapiens
  Table A; Target 6358; HLA-C*12:03; ADAM7; ENSG00000069206; CTA
IADPNQSAK

SEQ ID NO: 6359 - protein, 9 aa, Homo sapiens
  Table A; Target 6359; HLA-C*16:02; ADAM7; ENSG00000069206; CTA
IADPNQSAK

SEQ ID NO: 6360 - protein, 9 aa, Homo sapiens
  Table A; Target 6360; HLA-A*23:01; ADAM7; ENSG00000069206; CTA
IANRMAHQL

SEQ ID NO: 6361 - protein, 9 aa, Homo sapiens
  Table A; Target 6361; HLA-A*24:02; ADAM7; ENSG00000069206; CTA
IANRMAHQL

SEQ ID NO: 6362 - protein, 9 aa, Homo sapiens
  Table A; Target 6362; HLA-B*58:01; ADAM7; ENSG00000069206; CTA
IANRMAHQL

SEQ ID NO: 6363 - protein, 9 aa, Homo sapiens
  Table A; Target 6363; HLA-C*03:03; ADAM7; ENSG00000069206; CTA
IANRMAHQL

SEQ ID NO: 6364 - protein, 9 aa, Homo sapiens
  Table A; Target 6364; HLA-C*03:04; ADAM7; ENSG00000069206; CTA
IANRMAHQL

SEQ ID NO: 6365 - protein, 9 aa, Homo sapiens
  Table A; Target 6365; HLA-C*07:06; ADAM7; ENSG00000069206; CTA
IANRMAHQL

SEQ ID NO: 6366 - protein, 9 aa, Homo sapiens
  Table A; Target 6366; HLA-C*16:01; ADAM7; ENSG00000069206; CTA
IANRMAHQL

SEQ ID NO: 6367 - protein, 9 aa, Homo sapiens
  Table A; Target 6367; HLA-C*16:02; ADAM7; ENSG00000069206; CTA
IANRMAHQL

SEQ ID NO: 6368 - protein, 10 aa, Homo sapiens
  Table A; Target 6368; HLA-B*49:01; ADAM7; ENSG00000069206; CTA
IEIWTHEDKI

SEQ ID NO: 6369 - protein, 11 aa, Homo sapiens
  Table A; Target 6369; HLA-A*30:01; ADAM7; ENSG00000069206; CTA
IELYSNIETTL

SEQ ID NO: 6370 - protein, 11 aa, Homo sapiens
  Table A; Target 6370; HLA-B*40:01; ADAM7; ENSG00000069206; CTA
IELYSNIETTL

SEQ ID NO: 6371 - protein, 11 aa, Homo sapiens
  Table A; Target 6371; HLA-B*40:02; ADAM7; ENSG00000069206; CTA
IELYSNIETTL

SEQ ID NO: 6372 - protein, 11 aa, Homo sapiens
  Table A; Target 6372; HLA-B*49:01; ADAM7; ENSG00000069206; CTA
IELYSNIETTL

SEQ ID NO: 6373 - protein, 8 aa, Homo sapiens
  Table A; Target 6373; HLA-B*18:01; ADAM7; ENSG00000069206; CTA
IESHDICY

SEQ ID NO: 6374 - protein, 8 aa, Homo sapiens
  Table A; Target 6374; HLA-C*07:01; ADAM7; ENSG00000069206; CTA
IESHDICY

SEQ ID NO: 6375 - protein, 8 aa, Homo sapiens
  Table A; Target 6375; HLA-B*18:01; ADAM7; ENSG00000069206; CTA
IETTLLRF

SEQ ID NO: 6376 - protein, 8 aa, Homo sapiens
  Table A; Target 6376; HLA-B*37:01; ADAM7; ENSG00000069206; CTA
IETTLLRF

SEQ ID NO: 6377 - protein, 8 aa, Homo sapiens
  Table A; Target 6377; HLA-B*44:02; ADAM7; ENSG00000069206; CTA
IETTLLRF

SEQ ID NO: 6378 - protein, 8 aa, Homo sapiens
  Table A; Target 6378; HLA-B*44:03; ADAM7; ENSG00000069206; CTA
IETTLLRF

SEQ ID NO: 6379 - protein, 10 aa, Homo sapiens
  Table A; Target 6379; HLA-B*44:02; ADAM7; ENSG00000069206; CTA
IETTLLRFSF

SEQ ID NO: 6380 - protein, 8 aa, Homo sapiens
  Table A; Target 6380; HLA-A*23:01; ADAM7; ENSG00000069206; CTA
IFLMILLI

SEQ ID NO: 6381 - protein, 8 aa, Homo sapiens
  Table A; Target 6381; HLA-B*51:01; ADAM7; ENSG00000069206; CTA
IGVLILLV

SEQ ID NO: 6382 - protein, 9 aa, Homo sapiens
  Table A; Target 6382; HLA-A*02:07; ADAM7; ENSG00000069206; CTA
IHDEKYVEL

SEQ ID NO: 6383 - protein, 9 aa, Homo sapiens
  Table A; Target 6383; HLA-B*27:05; ADAM7; ENSG00000069206; CTA
IHDEKYVEL

SEQ ID NO: 6384 - protein, 9 aa, Homo sapiens
  Table A; Target 6384; HLA-B*38:01; ADAM7; ENSG00000069206; CTA
IHDEKYVEL

SEQ ID NO: 6385 - protein, 9 aa, Homo sapiens
  Table A; Target 6385; HLA-B*39:01; ADAM7; ENSG00000069206; CTA
IHDEKYVEL

SEQ ID NO: 6386 - protein, 9 aa, Homo sapiens
  Table A; Target 6386; HLA-B*40:01; ADAM7; ENSG00000069206; CTA
IHDEKYVEL

SEQ ID NO: 6387 - protein, 9 aa, Homo sapiens
  Table A; Target 6387; HLA-C*05:01; ADAM7; ENSG00000069206; CTA
IHDEKYVEL

SEQ ID NO: 6388 - protein, 10 aa, Homo sapiens
  Table A; Target 6388; HLA-B*38:01; ADAM7; ENSG00000069206; CTA
IHDEKYVELF

SEQ ID NO: 6389 - protein, 10 aa, Homo sapiens
  Table A; Target 6389; HLA-B*38:01; ADAM7; ENSG00000069206; CTA
IHVTLVGIEI

SEQ ID NO: 6390 - protein, 9 aa, Homo sapiens
  Table A; Target 6390; HLA-B*38:01; ADAM7; ENSG00000069206; CTA
ILGVEGQQL

SEQ ID NO: 6391 - protein, 9 aa, Homo sapiens
  Table A; Target 6391; HLA-B*55:01; ADAM7; ENSG00000069206; CTA
ILGVEGQQL

SEQ ID NO: 6392 - protein, 9 aa, Homo sapiens
  Table A; Target 6392; HLA-C*01:02; ADAM7; ENSG00000069206; CTA
ILGVEGQQL

SEQ ID NO: 6393 - protein, 9 aa, Homo sapiens
  Table A; Target 6393; HLA-A*02:03; ADAM7; ENSG00000069206; CTA
ILKTYEEEL

SEQ ID NO: 6394 - protein, 9 aa, Homo sapiens
  Table A; Target 6394; HLA-A*02:04; ADAM7; ENSG00000069206; CTA
ILKTYEEEL

SEQ ID NO: 6395 - protein, 9 aa, Homo sapiens
  Table A; Target 6395; HLA-B*15:01; ADAM7; ENSG00000069206; CTA
ILKTYEEEL

SEQ ID NO: 6396 - protein, 9 aa, Homo sapiens
  Table A; Target 6396; HLA-B*46:01; ADAM7; ENSG00000069206; CTA
ILKTYEEEL

SEQ ID NO: 6397 - protein, 9 aa, Homo sapiens
  Table A; Target 6397; HLA-C*01:02; ADAM7; ENSG00000069206; CTA
ILKTYEEEL

SEQ ID NO: 6398 - protein, 9 aa, Homo sapiens
  Table A; Target 6398; HLA-C*16:02; ADAM7; ENSG00000069206; CTA
ILKTYEEEL

SEQ ID NO: 6399 - protein, 11 aa, Homo sapiens
  Table A; Target 6399; HLA-A*29:02; ADAM7; ENSG00000069206; CTA
ILKTYEEELLY

SEQ ID NO: 6400 - protein, 10 aa, Homo sapiens
  Table A; Target 6400; HLA-A*03:02; ADAM7; ENSG00000069206; CTA
ILLIPQVKEK

SEQ ID NO: 6401 - protein, 8 aa, Homo sapiens
  Table A; Target 6401; HLA-A*02:04; ADAM7; ENSG00000069206; CTA
ILPEIHFL

SEQ ID NO: 6402 - protein, 8 aa, Homo sapiens
  Table A; Target 6402; HLA-A*02:07; ADAM7; ENSG00000069206; CTA
ILPEIHFL

SEQ ID NO: 6403 - protein, 10 aa, Homo sapiens
  Table A; Target 6403; HLA-A*02:07; ADAM7; ENSG00000069206; CTA
ILPEIHFLNK

SEQ ID NO: 6404 - protein, 10 aa, Homo sapiens
  Table A; Target 6404; HLA-A*03:01; ADAM7; ENSG00000069206; CTA
ILPEIHFLNK

SEQ ID NO: 6405 - protein, 9 aa, Homo sapiens
  Table A; Target 6405; HLA-A*02:07; ADAM7; ENSG00000069206; CTA
ILVVVLVLV

SEQ ID NO: 6406 - protein, 9 aa, Homo sapiens
  Table A; Target 6406; HLA-B*54:01; ADAM7; ENSG00000069206; CTA
IPALKFSKC

SEQ ID NO: 6407 - protein, 10 aa, Homo sapiens
  Table A; Target 6407; HLA-B*35:01; ADAM7; ENSG00000069206; CTA
IPFPYNFHDF

SEQ ID NO: 6408 - protein, 10 aa, Homo sapiens
  Table A; Target 6408; HLA-B*54:01; ADAM7; ENSG00000069206; CTA
IPFPYNFHDF

SEQ ID NO: 6409 - protein, 10 aa, Homo sapiens
  Table A; Target 6409; HLA-B*57:01; ADAM7; ENSG00000069206; CTA
IPFPYNFHDF

SEQ ID NO: 6410 - protein, 8 aa, Homo sapiens
  Table A; Target 6410; HLA-B*07:02; ADAM7; ENSG00000069206; CTA
IPQVKEKF

SEQ ID NO: 6411 - protein, 8 aa, Homo sapiens
  Table A; Target 6411; HLA-B*08:01; ADAM7; ENSG00000069206; CTA
IPQVKEKF

SEQ ID NO: 6412 - protein, 9 aa, Homo sapiens
  Table A; Target 6412; HLA-A*03:01; ADAM7; ENSG00000069206; CTA
ISYPGGMCL

SEQ ID NO: 6413 - protein, 9 aa, Homo sapiens
  Table A; Target 6413; HLA-A*23:01; ADAM7; ENSG00000069206; CTA
ISYPGGMCL

SEQ ID NO: 6414 - protein, 9 aa, Homo sapiens
  Table A; Target 6414; HLA-A*32:01; ADAM7; ENSG00000069206; CTA
ISYPGGMCL

SEQ ID NO: 6415 - protein, 9 aa, Homo sapiens
  Table A; Target 6415; HLA-B*07:02; ADAM7; ENSG00000069206; CTA
ISYPGGMCL

SEQ ID NO: 6416 - protein, 9 aa, Homo sapiens
  Table A; Target 6416; HLA-B*15:01; ADAM7; ENSG00000069206; CTA
ISYPGGMCL

SEQ ID NO: 6417 - protein, 9 aa, Homo sapiens
  Table A; Target 6417; HLA-B*15:03; ADAM7; ENSG00000069206; CTA
ISYPGGMCL

SEQ ID NO: 6418 - protein, 9 aa, Homo sapiens
  Table A; Target 6418; HLA-B*40:02; ADAM7; ENSG00000069206; CTA
ISYPGGMCL

SEQ ID NO: 6419 - protein, 9 aa, Homo sapiens
  Table A; Target 6419; HLA-B*46:01; ADAM7; ENSG00000069206; CTA
ISYPGGMCL

SEQ ID NO: 6420 - protein, 9 aa, Homo sapiens
  Table A; Target 6420; HLA-B*51:01; ADAM7; ENSG00000069206; CTA
ISYPGGMCL

SEQ ID NO: 6421 - protein, 9 aa, Homo sapiens
  Table A; Target 6421; HLA-B*58:01; ADAM7; ENSG00000069206; CTA
ISYPGGMCL

SEQ ID NO: 6422 - protein, 9 aa, Homo sapiens
  Table A; Target 6422; HLA-C*01:02; ADAM7; ENSG00000069206; CTA
ISYPGGMCL

SEQ ID NO: 6423 - protein, 9 aa, Homo sapiens
  Table A; Target 6423; HLA-C*02:02; ADAM7; ENSG00000069206; CTA
ISYPGGMCL

SEQ ID NO: 6424 - protein, 9 aa, Homo sapiens
  Table A; Target 6424; HLA-C*03:03; ADAM7; ENSG00000069206; CTA
ISYPGGMCL

SEQ ID NO: 6425 - protein, 9 aa, Homo sapiens
  Table A; Target 6425; HLA-C*03:04; ADAM7; ENSG00000069206; CTA
ISYPGGMCL

SEQ ID NO: 6426 - protein, 9 aa, Homo sapiens
  Table A; Target 6426; HLA-C*05:01; ADAM7; ENSG00000069206; CTA
ISYPGGMCL

SEQ ID NO: 6427 - protein, 9 aa, Homo sapiens
  Table A; Target 6427; HLA-C*07:02; ADAM7; ENSG00000069206; CTA
ISYPGGMCL

SEQ ID NO: 6428 - protein, 9 aa, Homo sapiens
  Table A; Target 6428; HLA-C*07:04; ADAM7; ENSG00000069206; CTA
ISYPGGMCL

SEQ ID NO: 6429 - protein, 9 aa, Homo sapiens
  Table A; Target 6429; HLA-C*12:03; ADAM7; ENSG00000069206; CTA
ISYPGGMCL

SEQ ID NO: 6430 - protein, 9 aa, Homo sapiens
  Table A; Target 6430; HLA-C*14:02; ADAM7; ENSG00000069206; CTA
ISYPGGMCL

SEQ ID NO: 6431 - protein, 9 aa, Homo sapiens
  Table A; Target 6431; HLA-C*16:01; ADAM7; ENSG00000069206; CTA
ISYPGGMCL

SEQ ID NO: 6432 - protein, 9 aa, Homo sapiens
  Table A; Target 6432; HLA-C*16:02; ADAM7; ENSG00000069206; CTA
ISYPGGMCL

SEQ ID NO: 6433 - protein, 9 aa, Homo sapiens
  Table A; Target 6433; HLA-C*16:04; ADAM7; ENSG00000069206; CTA
ISYPGGMCL

SEQ ID NO: 6434 - protein, 8 aa, Homo sapiens
  Table A; Target 6434; HLA-B*18:01; ADAM7; ENSG00000069206; CTA
ITILVVVL

SEQ ID NO: 6435 - protein, 9 aa, Homo sapiens
  Table A; Target 6435; HLA-A*68:02; ADAM7; ENSG00000069206; CTA
ITILVVVLV

SEQ ID NO: 6436 - protein, 8 aa, Homo sapiens
  Table A; Target 6436; HLA-B*15:01; ADAM7; ENSG00000069206; CTA
IVADDTVY

SEQ ID NO: 6437 - protein, 8 aa, Homo sapiens
  Table A; Target 6437; HLA-B*15:03; ADAM7; ENSG00000069206; CTA
IVADDTVY

SEQ ID NO: 6438 - protein, 8 aa, Homo sapiens
  Table A; Target 6438; HLA-B*35:01; ADAM7; ENSG00000069206; CTA
IVADDTVY

SEQ ID NO: 6439 - protein, 8 aa, Homo sapiens
  Table A; Target 6439; HLA-B*39:01; ADAM7; ENSG00000069206; CTA
IVADDTVY

SEQ ID NO: 6440 - protein, 8 aa, Homo sapiens
  Table A; Target 6440; HLA-B*46:01; ADAM7; ENSG00000069206; CTA
IVADDTVY

SEQ ID NO: 6441 - protein, 8 aa, Homo sapiens
  Table A; Target 6441; HLA-C*05:01; ADAM7; ENSG00000069206; CTA
IVADDTVY

SEQ ID NO: 6442 - protein, 9 aa, Homo sapiens
  Table A; Target 6442; HLA-A*03:01; ADAM7; ENSG00000069206; CTA
IVADDTVYR

SEQ ID NO: 6443 - protein, 9 aa, Homo sapiens
  Table A; Target 6443; HLA-A*03:02; ADAM7; ENSG00000069206; CTA
IVADDTVYR

SEQ ID NO: 6444 - protein, 9 aa, Homo sapiens
  Table A; Target 6444; HLA-A*11:01; ADAM7; ENSG00000069206; CTA
IVADDTVYR

SEQ ID NO: 6445 - protein, 9 aa, Homo sapiens
  Table A; Target 6445; HLA-A*26:01; ADAM7; ENSG00000069206; CTA
IVADDTVYR

SEQ ID NO: 6446 - protein, 9 aa, Homo sapiens
  Table A; Target 6446; HLA-A*31:01; ADAM7; ENSG00000069206; CTA
IVADDTVYR

SEQ ID NO: 6447 - protein, 9 aa, Homo sapiens
  Table A; Target 6447; HLA-A*33:01; ADAM7; ENSG00000069206; CTA
IVADDTVYR

SEQ ID NO: 6448 - protein, 9 aa, Homo sapiens
  Table A; Target 6448; HLA-A*33:03; ADAM7; ENSG00000069206; CTA
IVADDTVYR

SEQ ID NO: 6449 - protein, 9 aa, Homo sapiens
  Table A; Target 6449; HLA-A*68:01; ADAM7; ENSG00000069206; CTA
IVADDTVYR

SEQ ID NO: 6450 - protein, 9 aa, Homo sapiens
  Table A; Target 6450; HLA-A*68:02; ADAM7; ENSG00000069206; CTA
IVADDTVYR

SEQ ID NO: 6451 - protein, 9 aa, Homo sapiens
  Table A; Target 6451; HLA-B*27:02; ADAM7; ENSG00000069206; CTA
IVADDTVYR

SEQ ID NO: 6452 - protein, 9 aa, Homo sapiens
  Table A; Target 6452; HLA-B*27:05; ADAM7; ENSG00000069206; CTA
IVADDTVYR

SEQ ID NO: 6453 - protein, 9 aa, Homo sapiens
  Table A; Target 6453; HLA-B*38:01; ADAM7; ENSG00000069206; CTA
IVADDTVYR

SEQ ID NO: 6454 - protein, 9 aa, Homo sapiens
  Table A; Target 6454; HLA-B*57:01; ADAM7; ENSG00000069206; CTA
IVADDTVYR

SEQ ID NO: 6455 - protein, 9 aa, Homo sapiens
  Table A; Target 6455; HLA-C*02:02; ADAM7; ENSG00000069206; CTA
IVADDTVYR

SEQ ID NO: 6456 - protein, 9 aa, Homo sapiens
  Table A; Target 6456; HLA-C*07:06; ADAM7; ENSG00000069206; CTA
IVADDTVYR

SEQ ID NO: 6457 - protein, 10 aa, Homo sapiens
  Table A; Target 6457; HLA-A*03:02; ADAM7; ENSG00000069206; CTA
IVADDTVYRR

SEQ ID NO: 6458 - protein, 10 aa, Homo sapiens
  Table A; Target 6458; HLA-A*11:01; ADAM7; ENSG00000069206; CTA
IVADDTVYRR

SEQ ID NO: 6459 - protein, 10 aa, Homo sapiens
  Table A; Target 6459; HLA-A*31:01; ADAM7; ENSG00000069206; CTA
IVADDTVYRR

SEQ ID NO: 6460 - protein, 10 aa, Homo sapiens
  Table A; Target 6460; HLA-A*33:03; ADAM7; ENSG00000069206; CTA
IVADDTVYRR

SEQ ID NO: 6461 - protein, 10 aa, Homo sapiens
  Table A; Target 6461; HLA-A*68:01; ADAM7; ENSG00000069206; CTA
IVADDTVYRR

SEQ ID NO: 6462 - protein, 10 aa, Homo sapiens
  Table A; Target 6462; HLA-A*68:02; ADAM7; ENSG00000069206; CTA
IVADDTVYRR

SEQ ID NO: 6463 - protein, 10 aa, Homo sapiens
  Table A; Target 6463; HLA-C*07:06; ADAM7; ENSG00000069206; CTA
IVADDTVYRR

SEQ ID NO: 6464 - protein, 9 aa, Homo sapiens
  Table A; Target 6464; HLA-B*54:01; ADAM7; ENSG00000069206; CTA
IVHEYDSAA

SEQ ID NO: 6465 - protein, 8 aa, Homo sapiens
  Table A; Target 6465; HLA-B*35:03; ADAM7; ENSG00000069206; CTA
IYCTGGEL

SEQ ID NO: 6466 - protein, 8 aa, Homo sapiens
  Table A; Target 6466; HLA-C*01:02; ADAM7; ENSG00000069206; CTA
IYCTGGEL

SEQ ID NO: 6467 - protein, 8 aa, Homo sapiens
  Table A; Target 6467; HLA-C*03:03; ADAM7; ENSG00000069206; CTA
IYCTGGEL

SEQ ID NO: 6468 - protein, 8 aa, Homo sapiens
  Table A; Target 6468; HLA-C*03:04; ADAM7; ENSG00000069206; CTA
IYCTGGEL

SEQ ID NO: 6469 - protein, 8 aa, Homo sapiens
  Table A; Target 6469; HLA-C*04:01; ADAM7; ENSG00000069206; CTA
IYCTGGEL

SEQ ID NO: 6470 - protein, 8 aa, Homo sapiens
  Table A; Target 6470; HLA-C*14:02; ADAM7; ENSG00000069206; CTA
IYCTGGEL

SEQ ID NO: 6471 - protein, 11 aa, Homo sapiens
  Table A; Target 6471; HLA-A*23:01; ADAM7; ENSG00000069206; CTA
IYCTGGELSSL

SEQ ID NO: 6472 - protein, 11 aa, Homo sapiens
  Table A; Target 6472; HLA-A*24:02; ADAM7; ENSG00000069206; CTA
IYCTGGELSSL

SEQ ID NO: 6473 - protein, 11 aa, Homo sapiens
  Table A; Target 6473; HLA-C*01:02; ADAM7; ENSG00000069206; CTA
IYCTGGELSSL

SEQ ID NO: 6474 - protein, 11 aa, Homo sapiens
  Table A; Target 6474; HLA-C*14:02; ADAM7; ENSG00000069206; CTA
IYCTGGELSSL

SEQ ID NO: 6475 - protein, 9 aa, Homo sapiens
  Table A; Target 6475; HLA-A*23:01; ADAM7; ENSG00000069206; CTA
IYKTLNIHV

SEQ ID NO: 6476 - protein, 9 aa, Homo sapiens
  Table A; Target 6476; HLA-A*24:02; ADAM7; ENSG00000069206; CTA
IYKTLNIHV

SEQ ID NO: 6477 - protein, 11 aa, Homo sapiens
  Table A; Target 6477; HLA-A*23:01; ADAM7; ENSG00000069206; CTA
IYKTLNIHVTL

SEQ ID NO: 6478 - protein, 11 aa, Homo sapiens
  Table A; Target 6478; HLA-A*24:02; ADAM7; ENSG00000069206; CTA
IYKTLNIHVTL

SEQ ID NO: 6479 - protein, 9 aa, Homo sapiens
  Table A; Target 6479; HLA-C*06:02; ADAM7; ENSG00000069206; CTA
KAGSICRPA

SEQ ID NO: 6480 - protein, 10 aa, Homo sapiens
  Table A; Target 6480; HLA-A*30:02; ADAM7; ENSG00000069206; CTA
KCSQNQYHQY

SEQ ID NO: 6481 - protein, 10 aa, Homo sapiens
  Table A; Target 6481; HLA-C*16:02; ADAM7; ENSG00000069206; CTA
KCSQNQYHQY

SEQ ID NO: 6482 - protein, 8 aa, Homo sapiens
  Table A; Target 6482; HLA-B*37:01; ADAM7; ENSG00000069206; CTA
KDFDHVVL

SEQ ID NO: 6483 - protein, 8 aa, Homo sapiens
  Table A; Target 6483; HLA-B*40:01; ADAM7; ENSG00000069206; CTA
KDFDHVVL

SEQ ID NO: 6484 - protein, 8 aa, Homo sapiens
  Table A; Target 6484; HLA-B*40:02; ADAM7; ENSG00000069206; CTA
KDFDHVVL

SEQ ID NO: 6485 - protein, 9 aa, Homo sapiens
  Table A; Target 6485; HLA-A*02:01; ADAM7; ENSG00000069206; CTA
KDFDHVVLL

SEQ ID NO: 6486 - protein, 9 aa, Homo sapiens
  Table A; Target 6486; HLA-A*02:04; ADAM7; ENSG00000069206; CTA
KDFDHVVLL

SEQ ID NO: 6487 - protein, 9 aa, Homo sapiens
  Table A; Target 6487; HLA-A*02:07; ADAM7; ENSG00000069206; CTA
KDFDHVVLL

SEQ ID NO: 6488 - protein, 9 aa, Homo sapiens
  Table A; Target 6488; HLA-A*30:01; ADAM7; ENSG00000069206; CTA
KDFDHVVLL

SEQ ID NO: 6489 - protein, 9 aa, Homo sapiens
  Table A; Target 6489; HLA-A*68:02; ADAM7; ENSG00000069206; CTA
KDFDHVVLL

SEQ ID NO: 6490 - protein, 9 aa, Homo sapiens
  Table A; Target 6490; HLA-B*37:01; ADAM7; ENSG00000069206; CTA
KDFDHVVLL

SEQ ID NO: 6491 - protein, 9 aa, Homo sapiens
  Table A; Target 6491; HLA-B*40:01; ADAM7; ENSG00000069206; CTA
KDFDHVVLL

SEQ ID NO: 6492 - protein, 9 aa, Homo sapiens
  Table A; Target 6492; HLA-B*40:02; ADAM7; ENSG00000069206; CTA
KDFDHVVLL

SEQ ID NO: 6493 - protein, 9 aa, Homo sapiens
  Table A; Target 6493; HLA-B*44:03; ADAM7; ENSG00000069206; CTA
KDFDHVVLL

SEQ ID NO: 6494 - protein, 9 aa, Homo sapiens
  Table A; Target 6494; HLA-C*06:02; ADAM7; ENSG00000069206; CTA
KDFDHVVLL

SEQ ID NO: 6495 - protein, 9 aa, Homo sapiens
  Table A; Target 6495; HLA-C*07:04; ADAM7; ENSG00000069206; CTA
KDFDHVVLL

SEQ ID NO: 6496 - protein, 9 aa, Homo sapiens
  Table A; Target 6496; HLA-C*12:03; ADAM7; ENSG00000069206; CTA
KDFDHVVLL

SEQ ID NO: 6497 - protein, 9 aa, Homo sapiens
  Table A; Target 6497; HLA-B*37:01; ADAM7; ENSG00000069206; CTA
KDLLPDTNI

SEQ ID NO: 6498 - protein, 9 aa, Homo sapiens
  Table A; Target 6498; HLA-B*37:01; ADAM7; ENSG00000069206; CTA
KDPQKNATV

SEQ ID NO: 6499 - protein, 10 aa, Homo sapiens
  Table A; Target 6499; HLA-C*04:01; ADAM7; ENSG00000069206; CTA
KDPQKNATVK

SEQ ID NO: 6500 - protein, 9 aa, Homo sapiens
  Table A; Target 6500; HLA-B*37:01; ADAM7; ENSG00000069206; CTA
KDQFRVNGF

SEQ ID NO: 6501 - protein, 8 aa, Homo sapiens
  Table A; Target 6501; HLA-B*37:01; ADAM7; ENSG00000069206; CTA
KDYKPTCM

SEQ ID NO: 6502 - protein, 8 aa, Homo sapiens
  Table A; Target 6502; HLA-B*40:02; ADAM7; ENSG00000069206; CTA
KDYKPTCM

SEQ ID NO: 6503 - protein, 9 aa, Homo sapiens
  Table A; Target 6503; HLA-B*37:01; ADAM7; ENSG00000069206; CTA
KDYKPTCML

SEQ ID NO: 6504 - protein, 9 aa, Homo sapiens
  Table A; Target 6504; HLA-C*06:02; ADAM7; ENSG00000069206; CTA
KDYKPTCML

SEQ ID NO: 6505 - protein, 11 aa, Homo sapiens
  Table A; Target 6505; HLA-A*23:01; ADAM7; ENSG00000069206; CTA
KFILGVEGQQL

SEQ ID NO: 6506 - protein, 10 aa, Homo sapiens
  Table A; Target 6506; HLA-B*13:02; ADAM7; ENSG00000069206; CTA
KGYFGDEQQI

SEQ ID NO: 6507 - protein, 10 aa, Homo sapiens
  Table A; Target 6507; HLA-B*40:02; ADAM7; ENSG00000069206; CTA
KGYFGDEQQI

SEQ ID NO: 6508 - protein, 10 aa, Homo sapiens
  Table A; Target 6508; HLA-B*49:01; ADAM7; ENSG00000069206; CTA
KGYFGDEQQI

SEQ ID NO: 6509 - protein, 10 aa, Homo sapiens
  Table A; Target 6509; HLA-B*58:01; ADAM7; ENSG00000069206; CTA
KGYFGDEQQI

SEQ ID NO: 6510 - protein, 10 aa, Homo sapiens
  Table A; Target 6510; HLA-C*06:02; ADAM7; ENSG00000069206; CTA
KGYFGDEQQI

SEQ ID NO: 6511 - protein, 10 aa, Homo sapiens
  Table A; Target 6511; HLA-C*07:01; ADAM7; ENSG00000069206; CTA
KGYFGDEQQI

SEQ ID NO: 6512 - protein, 10 aa, Homo sapiens
  Table A; Target 6512; HLA-C*07:04; ADAM7; ENSG00000069206; CTA
KGYFGDEQQI

SEQ ID NO: 6513 - protein, 11 aa, Homo sapiens
  Table A; Target 6513; HLA-A*31:01; ADAM7; ENSG00000069206; CTA
KGYFGDEQQIR

SEQ ID NO: 6514 - protein, 11 aa, Homo sapiens
  Table A; Target 6514; HLA-B*57:01; ADAM7; ENSG00000069206; CTA
KGYFGDEQQIR

SEQ ID NO: 6515 - protein, 8 aa, Homo sapiens
  Table A; Target 6515; HLA-C*05:01; ADAM7; ENSG00000069206; CTA
KLDEGEEC

SEQ ID NO: 6516 - protein, 9 aa, Homo sapiens
  Table A; Target 6516; HLA-A*02:03; ADAM7; ENSG00000069206; CTA
KLNRKTLVL

SEQ ID NO: 6517 - protein, 9 aa, Homo sapiens
  Table A; Target 6517; HLA-A*03:01; ADAM7; ENSG00000069206; CTA
KLNRKTLVL

SEQ ID NO: 6518 - protein, 9 aa, Homo sapiens
  Table A; Target 6518; HLA-B*08:01; ADAM7; ENSG00000069206; CTA
KLNRKTLVL

SEQ ID NO: 6519 - protein, 11 aa, Homo sapiens
  Table A; Target 6519; HLA-A*30:01; ADAM7; ENSG00000069206; CTA
KQVQSPPTETL

SEQ ID NO: 6520 - protein, 11 aa, Homo sapiens
  Table A; Target 6520; HLA-A*32:01; ADAM7; ENSG00000069206; CTA
KQVQSPPTETL

SEQ ID NO: 6521 - protein, 11 aa, Homo sapiens
  Table A; Target 6521; HLA-B*13:02; ADAM7; ENSG00000069206; CTA
KQVQSPPTETL

SEQ ID NO: 6522 - protein, 11 aa, Homo sapiens
  Table A; Target 6522; HLA-B*15:01; ADAM7; ENSG00000069206; CTA
KQVQSPPTETL

SEQ ID NO: 6523 - protein, 11 aa, Homo sapiens
  Table A; Target 6523; HLA-B*15:03; ADAM7; ENSG00000069206; CTA
KQVQSPPTETL

SEQ ID NO: 6524 - protein, 11 aa, Homo sapiens
  Table A; Target 6524; HLA-B*27:05; ADAM7; ENSG00000069206; CTA
KQVQSPPTETL

SEQ ID NO: 6525 - protein, 11 aa, Homo sapiens
  Table A; Target 6525; HLA-B*38:01; ADAM7; ENSG00000069206; CTA
KQVQSPPTETL

SEQ ID NO: 6526 - protein, 11 aa, Homo sapiens
  Table A; Target 6526; HLA-B*39:01; ADAM7; ENSG00000069206; CTA
KQVQSPPTETL

SEQ ID NO: 6527 - protein, 11 aa, Homo sapiens
  Table A; Target 6527; HLA-B*40:01; ADAM7; ENSG00000069206; CTA
KQVQSPPTETL

SEQ ID NO: 6528 - protein, 11 aa, Homo sapiens
  Table A; Target 6528; HLA-B*40:02; ADAM7; ENSG00000069206; CTA
KQVQSPPTETL

SEQ ID NO: 6529 - protein, 11 aa, Homo sapiens
  Table A; Target 6529; HLA-B*58:01; ADAM7; ENSG00000069206; CTA
KQVQSPPTETL

SEQ ID NO: 6530 - protein, 11 aa, Homo sapiens
  Table A; Target 6530; HLA-C*07:04; ADAM7; ENSG00000069206; CTA
KQVQSPPTETL

SEQ ID NO: 6531 - protein, 11 aa, Homo sapiens
  Table A; Target 6531; HLA-C*16:04; ADAM7; ENSG00000069206; CTA
KQVQSPPTETL

SEQ ID NO: 6532 - protein, 9 aa, Homo sapiens
  Table A; Target 6532; HLA-A*02:01; ADAM7; ENSG00000069206; CTA
KTLNIHVTL

SEQ ID NO: 6533 - protein, 9 aa, Homo sapiens
  Table A; Target 6533; HLA-A*02:04; ADAM7; ENSG00000069206; CTA
KTLNIHVTL

SEQ ID NO: 6534 - protein, 9 aa, Homo sapiens
  Table A; Target 6534; HLA-A*02:07; ADAM7; ENSG00000069206; CTA
KTLNIHVTL

SEQ ID NO: 6535 - protein, 9 aa, Homo sapiens
  Table A; Target 6535; HLA-A*23:01; ADAM7; ENSG00000069206; CTA
KTLNIHVTL

SEQ ID NO: 6536 - protein, 9 aa, Homo sapiens
  Table A; Target 6536; HLA-A*24:02; ADAM7; ENSG00000069206; CTA
KTLNIHVTL

SEQ ID NO: 6537 - protein, 9 aa, Homo sapiens
  Table A; Target 6537; HLA-A*31:01; ADAM7; ENSG00000069206; CTA
KTLNIHVTL

SEQ ID NO: 6538 - protein, 9 aa, Homo sapiens
  Table A; Target 6538; HLA-A*32:01; ADAM7; ENSG00000069206; CTA
KTLNIHVTL

SEQ ID NO: 6539 - protein, 9 aa, Homo sapiens
  Table A; Target 6539; HLA-A*68:02; ADAM7; ENSG00000069206; CTA
KTLNIHVTL

SEQ ID NO: 6540 - protein, 9 aa, Homo sapiens
  Table A; Target 6540; HLA-B*40:02; ADAM7; ENSG00000069206; CTA
KTLNIHVTL

SEQ ID NO: 6541 - protein, 9 aa, Homo sapiens
  Table A; Target 6541; HLA-B*57:01; ADAM7; ENSG00000069206; CTA
KTLNIHVTL

SEQ ID NO: 6542 - protein, 9 aa, Homo sapiens
  Table A; Target 6542; HLA-B*58:01; ADAM7; ENSG00000069206; CTA
KTLNIHVTL

SEQ ID NO: 6543 - protein, 9 aa, Homo sapiens
  Table A; Target 6543; HLA-C*02:02; ADAM7; ENSG00000069206; CTA
KTLNIHVTL

SEQ ID NO: 6544 - protein, 9 aa, Homo sapiens
  Table A; Target 6544; HLA-C*03:03; ADAM7; ENSG00000069206; CTA
KTLNIHVTL

SEQ ID NO: 6545 - protein, 9 aa, Homo sapiens
  Table A; Target 6545; HLA-C*03:04; ADAM7; ENSG00000069206; CTA
KTLNIHVTL

SEQ ID NO: 6546 - protein, 9 aa, Homo sapiens
  Table A; Target 6546; HLA-C*07:04; ADAM7; ENSG00000069206; CTA
KTLNIHVTL

SEQ ID NO: 6547 - protein, 9 aa, Homo sapiens
  Table A; Target 6547; HLA-C*12:03; ADAM7; ENSG00000069206; CTA
KTLNIHVTL

SEQ ID NO: 6548 - protein, 9 aa, Homo sapiens
  Table A; Target 6548; HLA-C*16:01; ADAM7; ENSG00000069206; CTA
KTLNIHVTL

SEQ ID NO: 6549 - protein, 9 aa, Homo sapiens
  Table A; Target 6549; HLA-C*16:02; ADAM7; ENSG00000069206; CTA
KTLNIHVTL

SEQ ID NO: 6550 - protein, 9 aa, Homo sapiens
  Table A; Target 6550; HLA-C*16:04; ADAM7; ENSG00000069206; CTA
KTLNIHVTL

SEQ ID NO: 6551 - protein, 8 aa, Homo sapiens
  Table A; Target 6551; HLA-B*57:01; ADAM7; ENSG00000069206; CTA
KTLVLHLL

SEQ ID NO: 6552 - protein, 9 aa, Homo sapiens
  Table A; Target 6552; HLA-A*03:01; ADAM7; ENSG00000069206; CTA
KTLVLHLLR

SEQ ID NO: 6553 - protein, 9 aa, Homo sapiens
  Table A; Target 6553; HLA-A*31:01; ADAM7; ENSG00000069206; CTA
KTLVLHLLR

SEQ ID NO: 6554 - protein, 9 aa, Homo sapiens
  Table A; Target 6554; HLA-B*57:01; ADAM7; ENSG00000069206; CTA
KTLVLHLLR

SEQ ID NO: 6555 - protein, 9 aa, Homo sapiens
  Table A; Target 6555; HLA-A*01:01; ADAM7; ENSG00000069206; CTA
KTYEEELLY

SEQ ID NO: 6556 - protein, 9 aa, Homo sapiens
  Table A; Target 6556; HLA-A*03:01; ADAM7; ENSG00000069206; CTA
KTYEEELLY

SEQ ID NO: 6557 - protein, 9 aa, Homo sapiens
  Table A; Target 6557; HLA-A*11:01; ADAM7; ENSG00000069206; CTA
KTYEEELLY

SEQ ID NO: 6558 - protein, 9 aa, Homo sapiens
  Table A; Target 6558; HLA-A*26:01; ADAM7; ENSG00000069206; CTA
KTYEEELLY

SEQ ID NO: 6559 - protein, 9 aa, Homo sapiens
  Table A; Target 6559; HLA-A*29:02; ADAM7; ENSG00000069206; CTA
KTYEEELLY

SEQ ID NO: 6560 - protein, 9 aa, Homo sapiens
  Table A; Target 6560; HLA-A*30:02; ADAM7; ENSG00000069206; CTA
KTYEEELLY

SEQ ID NO: 6561 - protein, 9 aa, Homo sapiens
  Table A; Target 6561; HLA-B*15:01; ADAM7; ENSG00000069206; CTA
KTYEEELLY

SEQ ID NO: 6562 - protein, 9 aa, Homo sapiens
  Table A; Target 6562; HLA-B*15:03; ADAM7; ENSG00000069206; CTA
KTYEEELLY

SEQ ID NO: 6563 - protein, 9 aa, Homo sapiens
  Table A; Target 6563; HLA-B*57:01; ADAM7; ENSG00000069206; CTA
KTYEEELLY

SEQ ID NO: 6564 - protein, 9 aa, Homo sapiens
  Table A; Target 6564; HLA-B*58:01; ADAM7; ENSG00000069206; CTA
KTYEEELLY

SEQ ID NO: 6565 - protein, 9 aa, Homo sapiens
  Table A; Target 6565; HLA-C*02:02; ADAM7; ENSG00000069206; CTA
KTYEEELLY

SEQ ID NO: 6566 - protein, 9 aa, Homo sapiens
  Table A; Target 6566; HLA-C*12:03; ADAM7; ENSG00000069206; CTA
KTYEEELLY

SEQ ID NO: 6567 - protein, 11 aa, Homo sapiens
  Table A; Target 6567; HLA-A*02:01; ADAM7; ENSG00000069206; CTA
KTYEEELLYEI

SEQ ID NO: 6568 - protein, 11 aa, Homo sapiens
  Table A; Target 6568; HLA-A*68:02; ADAM7; ENSG00000069206; CTA
KTYEEELLYEI

SEQ ID NO: 6569 - protein, 10 aa, Homo sapiens
  Table A; Target 6569; HLA-A*03:01; ADAM7; ENSG00000069206; CTA
KTYHLKDPQK

SEQ ID NO: 6570 - protein, 10 aa, Homo sapiens
  Table A; Target 6570; HLA-A*03:02; ADAM7; ENSG00000069206; CTA
KTYHLKDPQK

SEQ ID NO: 6571 - protein, 10 aa, Homo sapiens
  Table A; Target 6571; HLA-A*11:01; ADAM7; ENSG00000069206; CTA
KTYHLKDPQK

SEQ ID NO: 6572 - protein, 10 aa, Homo sapiens
  Table A; Target 6572; HLA-C*06:02; ADAM7; ENSG00000069206; CTA
KVYISTNCPS

SEQ ID NO: 6573 - protein, 11 aa, Homo sapiens
  Table A; Target 6573; HLA-A*23:01; ADAM7; ENSG00000069206; CTA
KYSDEGEHLVF

SEQ ID NO: 6574 - protein, 11 aa, Homo sapiens
  Table A; Target 6574; HLA-A*24:02; ADAM7; ENSG00000069206; CTA
KYSDEGEHLVF

SEQ ID NO: 6575 - protein, 11 aa, Homo sapiens
  Table A; Target 6575; HLA-A*29:02; ADAM7; ENSG00000069206; CTA
KYSDEGEHLVF

SEQ ID NO: 6576 - protein, 9 aa, Homo sapiens
  Table A; Target 6576; HLA-C*04:01; ADAM7; ENSG00000069206; CTA
LFDDEAIES

SEQ ID NO: 6577 - protein, 10 aa, Homo sapiens
  Table A; Target 6577; HLA-A*29:02; ADAM7; ENSG00000069206; CTA
LFIVADDTVY

SEQ ID NO: 6578 - protein, 10 aa, Homo sapiens
  Table A; Target 6578; HLA-B*15:01; ADAM7; ENSG00000069206; CTA
LFIVADDTVY

SEQ ID NO: 6579 - protein, 10 aa, Homo sapiens
  Table A; Target 6579; HLA-C*14:02; ADAM7; ENSG00000069206; CTA
LFIVADDTVY

SEQ ID NO: 6580 - protein, 8 aa, Homo sapiens
  Table A; Target 6580; HLA-B*08:01; ADAM7; ENSG00000069206; CTA
LGMQHDEF

SEQ ID NO: 6581 - protein, 9 aa, Homo sapiens
  Table A; Target 6581; HLA-B*27:05; ADAM7; ENSG00000069206; CTA
LGSNYSETF

SEQ ID NO: 6582 - protein, 9 aa, Homo sapiens
  Table A; Target 6582; HLA-C*02:02; ADAM7; ENSG00000069206; CTA
LGSNYSETF

SEQ ID NO: 6583 - protein, 9 aa, Homo sapiens
  Table A; Target 6583; HLA-C*07:04; ADAM7; ENSG00000069206; CTA
LGSNYSETF

SEQ ID NO: 6584 - protein, 10 aa, Homo sapiens
  Table A; Target 6584; HLA-B*27:02; ADAM7; ENSG00000069206; CTA
LGSNYSETFY

SEQ ID NO: 6585 - protein, 10 aa, Homo sapiens
  Table A; Target 6585; HLA-B*39:01; ADAM7; ENSG00000069206; CTA
LGSNYSETFY

SEQ ID NO: 6586 - protein, 10 aa, Homo sapiens
  Table A; Target 6586; HLA-C*04:01; ADAM7; ENSG00000069206; CTA
LGSNYSETFY

SEQ ID NO: 6587 - protein, 10 aa, Homo sapiens
  Table A; Target 6587; HLA-C*07:01; ADAM7; ENSG00000069206; CTA
LGSNYSETFY

SEQ ID NO: 6588 - protein, 10 aa, Homo sapiens
  Table A; Target 6588; HLA-C*07:04; ADAM7; ENSG00000069206; CTA
LGSNYSETFY

SEQ ID NO: 6589 - protein, 8 aa, Homo sapiens
  Table A; Target 6589; HLA-C*03:03; ADAM7; ENSG00000069206; CTA
LGVEGQQL

SEQ ID NO: 6590 - protein, 8 aa, Homo sapiens
  Table A; Target 6590; HLA-C*03:04; ADAM7; ENSG00000069206; CTA
LGVEGQQL

SEQ ID NO: 6591 - protein, 8 aa, Homo sapiens
  Table A; Target 6591; HLA-C*05:01; ADAM7; ENSG00000069206; CTA
LGVEGQQL

SEQ ID NO: 6592 - protein, 8 aa, Homo sapiens
  Table A; Target 6592; HLA-C*16:01; ADAM7; ENSG00000069206; CTA
LGVEGQQL

SEQ ID NO: 6593 - protein, 9 aa, Homo sapiens
  Table A; Target 6593; HLA-C*02:02; ADAM7; ENSG00000069206; CTA
LGVENKGYF

SEQ ID NO: 6594 - protein, 9 aa, Homo sapiens
  Table A; Target 6594; HLA-B*38:01; ADAM7; ENSG00000069206; CTA
LHVTNITIL

SEQ ID NO: 6595 - protein, 9 aa, Homo sapiens
  Table A; Target 6595; HLA-A*24:02; ADAM7; ENSG00000069206; CTA
LIPQVKEKF

SEQ ID NO: 6596 - protein, 8 aa, Homo sapiens
  Table A; Target 6596; HLA-C*03:03; ADAM7; ENSG00000069206; CTA
LLGEDKTY

SEQ ID NO: 6597 - protein, 10 aa, Homo sapiens
  Table A; Target 6597; HLA-A*02:03; ADAM7; ENSG00000069206; CTA
LLGEDKTYHL

SEQ ID NO: 6598 - protein, 10 aa, Homo sapiens
  Table A; Target 6598; HLA-A*02:04; ADAM7; ENSG00000069206; CTA
LLGEDKTYHL

SEQ ID NO: 6599 - protein, 10 aa, Homo sapiens
  Table A; Target 6599; HLA-A*02:07; ADAM7; ENSG00000069206; CTA
LLGEDKTYHL

SEQ ID NO: 6600 - protein, 9 aa, Homo sapiens
  Table A; Target 6600; HLA-A*03:01; ADAM7; ENSG00000069206; CTA
LLIPQVKEK

SEQ ID NO: 6601 - protein, 9 aa, Homo sapiens
  Table A; Target 6601; HLA-A*03:02; ADAM7; ENSG00000069206; CTA
LLIPQVKEK

SEQ ID NO: 6602 - protein, 9 aa, Homo sapiens
  Table A; Target 6602; HLA-A*02:07; ADAM7; ENSG00000069206; CTA
LLPDTNIIA

SEQ ID NO: 6603 - protein, 10 aa, Homo sapiens
  Table A; Target 6603; HLA-A*02:07; ADAM7; ENSG00000069206; CTA
LLPDTNIIAN

SEQ ID NO: 6604 - protein, 10 aa, Homo sapiens
  Table A; Target 6604; HLA-C*04:01; ADAM7; ENSG00000069206; CTA
LLPDTNIIAN

SEQ ID NO: 6605 - protein, 10 aa, Homo sapiens
  Table A; Target 6605; HLA-C*07:01; ADAM7; ENSG00000069206; CTA
LLPDTNIIAN

SEQ ID NO: 6606 - protein, 11 aa, Homo sapiens
  Table A; Target 6606; HLA-A*02:07; ADAM7; ENSG00000069206; CTA
LLPDTNIIANR

SEQ ID NO: 6607 - protein, 11 aa, Homo sapiens
  Table A; Target 6607; HLA-A*03:01; ADAM7; ENSG00000069206; CTA
LLPDTNIIANR

SEQ ID NO: 6608 - protein, 11 aa, Homo sapiens
  Table A; Target 6608; HLA-A*31:01; ADAM7; ENSG00000069206; CTA
LLPDTNIIANR

SEQ ID NO: 6609 - protein, 11 aa, Homo sapiens
  Table A; Target 6609; HLA-A*33:03; ADAM7; ENSG00000069206; CTA
LLPDTNIIANR

SEQ ID NO: 6610 - protein, 11 aa, Homo sapiens
  Table A; Target 6610; HLA-A*68:01; ADAM7; ENSG00000069206; CTA
LLPDTNIIANR

SEQ ID NO: 6611 - protein, 11 aa, Homo sapiens
  Table A; Target 6611; HLA-A*68:02; ADAM7; ENSG00000069206; CTA
LLPDTNIIANR

SEQ ID NO: 6612 - protein, 9 aa, Homo sapiens
  Table A; Target 6612; HLA-A*03:01; ADAM7; ENSG00000069206; CTA
LLYEIKLNR

SEQ ID NO: 6613 - protein, 9 aa, Homo sapiens
  Table A; Target 6613; HLA-A*29:02; ADAM7; ENSG00000069206; CTA
LLYEIKLNR

SEQ ID NO: 6614 - protein, 9 aa, Homo sapiens
  Table A; Target 6614; HLA-A*31:01; ADAM7; ENSG00000069206; CTA
LLYEIKLNR

SEQ ID NO: 6615 - protein, 10 aa, Homo sapiens
  Table A; Target 6615; HLA-A*03:01; ADAM7; ENSG00000069206; CTA
LLYEIKLNRK

SEQ ID NO: 6616 - protein, 9 aa, Homo sapiens
  Table A; Target 6616; HLA-A*02:01; ADAM7; ENSG00000069206; CTA
LMILLIPQV

SEQ ID NO: 6617 - protein, 9 aa, Homo sapiens
  Table A; Target 6617; HLA-A*02:03; ADAM7; ENSG00000069206; CTA
LMILLIPQV

SEQ ID NO: 6618 - protein, 9 aa, Homo sapiens
  Table A; Target 6618; HLA-A*02:04; ADAM7; ENSG00000069206; CTA
LMILLIPQV

SEQ ID NO: 6619 - protein, 9 aa, Homo sapiens
  Table A; Target 6619; HLA-A*02:07; ADAM7; ENSG00000069206; CTA
LMILLIPQV

SEQ ID NO: 6620 - protein, 9 aa, Homo sapiens
  Table A; Target 6620; HLA-A*23:01; ADAM7; ENSG00000069206; CTA
LNIPFPYNF

SEQ ID NO: 6621 - protein, 9 aa, Homo sapiens
  Table A; Target 6621; HLA-A*24:02; ADAM7; ENSG00000069206; CTA
LNIPFPYNF

SEQ ID NO: 6622 - protein, 9 aa, Homo sapiens
  Table A; Target 6622; HLA-A*29:02; ADAM7; ENSG00000069206; CTA
LNIPFPYNF

SEQ ID NO: 6623 - protein, 9 aa, Homo sapiens
  Table A; Target 6623; HLA-B*57:01; ADAM7; ENSG00000069206; CTA
LNIPFPYNF

SEQ ID NO: 6624 - protein, 8 aa, Homo sapiens
  Table A; Target 6624; HLA-B*08:01; ADAM7; ENSG00000069206; CTA
LNMEKVYI

SEQ ID NO: 6625 - protein, 8 aa, Homo sapiens
  Table A; Target 6625; HLA-B*55:01; ADAM7; ENSG00000069206; CTA
LPDTNIIA

SEQ ID NO: 6626 - protein, 8 aa, Homo sapiens
  Table A; Target 6626; HLA-B*56:01; ADAM7; ENSG00000069206; CTA
LPDTNIIA

SEQ ID NO: 6627 - protein, 9 aa, Homo sapiens
  Table A; Target 6627; HLA-B*35:01; ADAM7; ENSG00000069206; CTA
LPDTNIIAN

SEQ ID NO: 6628 - protein, 9 aa, Homo sapiens
  Table A; Target 6628; HLA-B*35:03; ADAM7; ENSG00000069206; CTA
LPDTNIIAN

SEQ ID NO: 6629 - protein, 9 aa, Homo sapiens
  Table A; Target 6629; HLA-B*55:01; ADAM7; ENSG00000069206; CTA
LPDTNIIAN

SEQ ID NO: 6630 - protein, 10 aa, Homo sapiens
  Table A; Target 6630; HLA-A*33:03; ADAM7; ENSG00000069206; CTA
LPDTNIIANR

SEQ ID NO: 6631 - protein, 10 aa, Homo sapiens
  Table A; Target 6631; HLA-A*68:01; ADAM7; ENSG00000069206; CTA
LPDTNIIANR

SEQ ID NO: 6632 - protein, 10 aa, Homo sapiens
  Table A; Target 6632; HLA-B*27:02; ADAM7; ENSG00000069206; CTA
LPDTNIIANR

SEQ ID NO: 6633 - protein, 10 aa, Homo sapiens
  Table A; Target 6633; HLA-C*07:06; ADAM7; ENSG00000069206; CTA
LPDTNIIANR

SEQ ID NO: 6634 - protein, 11 aa, Homo sapiens
  Table A; Target 6634; HLA-B*35:01; ADAM7; ENSG00000069206; CTA
LPDTNIIANRM

SEQ ID NO: 6635 - protein, 11 aa, Homo sapiens
  Table A; Target 6635; HLA-B*35:03; ADAM7; ENSG00000069206; CTA
LPDTNIIANRM

SEQ ID NO: 6636 - protein, 11 aa, Homo sapiens
  Table A; Target 6636; HLA-B*55:01; ADAM7; ENSG00000069206; CTA
LPDTNIIANRM

SEQ ID NO: 6637 - protein, 9 aa, Homo sapiens
  Table A; Target 6637; HLA-B*51:01; ADAM7; ENSG00000069206; CTA
LPGCIFLMI

SEQ ID NO: 6638 - protein, 8 aa, Homo sapiens
  Table A; Target 6638; HLA-B*08:01; ADAM7; ENSG00000069206; CTA
LPYYSTSI

SEQ ID NO: 6639 - protein, 8 aa, Homo sapiens
  Table A; Target 6639; HLA-B*35:01; ADAM7; ENSG00000069206; CTA
LPYYSTSI

SEQ ID NO: 6640 - protein, 8 aa, Homo sapiens
  Table A; Target 6640; HLA-B*35:03; ADAM7; ENSG00000069206; CTA
LPYYSTSI

SEQ ID NO: 6641 - protein, 8 aa, Homo sapiens
  Table A; Target 6641; HLA-B*54:01; ADAM7; ENSG00000069206; CTA
LPYYSTSI

SEQ ID NO: 6642 - protein, 8 aa, Homo sapiens
  Table A; Target 6642; HLA-B*56:01; ADAM7; ENSG00000069206; CTA
LPYYSTSI

SEQ ID NO: 6643 - protein, 9 aa, Homo sapiens
  Table A; Target 6643; HLA-B*35:03; ADAM7; ENSG00000069206; CTA
LPYYSTSII

SEQ ID NO: 6644 - protein, 9 aa, Homo sapiens
  Table A; Target 6644; HLA-B*54:01; ADAM7; ENSG00000069206; CTA
LPYYSTSII

SEQ ID NO: 6645 - protein, 9 aa, Homo sapiens
  Table A; Target 6645; HLA-B*56:01; ADAM7; ENSG00000069206; CTA
LPYYSTSII

SEQ ID NO: 6646 - protein, 10 aa, Homo sapiens
  Table A; Target 6646; HLA-B*51:01; ADAM7; ENSG00000069206; CTA
LPYYSTSIIK

SEQ ID NO: 6647 - protein, 9 aa, Homo sapiens
  Table A; Target 6647; HLA-A*29:02; ADAM7; ENSG00000069206; CTA
LRVPYGANY

SEQ ID NO: 6648 - protein, 9 aa, Homo sapiens
  Table A; Target 6648; HLA-A*30:02; ADAM7; ENSG00000069206; CTA
LRVPYGANY

SEQ ID NO: 6649 - protein, 9 aa, Homo sapiens
  Table A; Target 6649; HLA-B*27:02; ADAM7; ENSG00000069206; CTA
LRVPYGANY

SEQ ID NO: 6650 - protein, 9 aa, Homo sapiens
  Table A; Target 6650; HLA-B*27:05; ADAM7; ENSG00000069206; CTA
LRVPYGANY

SEQ ID NO: 6651 - protein, 9 aa, Homo sapiens
  Table A; Target 6651; HLA-B*39:01; ADAM7; ENSG00000069206; CTA
LRVPYGANY

SEQ ID NO: 6652 - protein, 9 aa, Homo sapiens
  Table A; Target 6652; HLA-C*02:02; ADAM7; ENSG00000069206; CTA
LRVPYGANY

SEQ ID NO: 6653 - protein, 9 aa, Homo sapiens
  Table A; Target 6653; HLA-C*06:02; ADAM7; ENSG00000069206; CTA
LRVPYGANY

SEQ ID NO: 6654 - protein, 9 aa, Homo sapiens
  Table A; Target 6654; HLA-C*07:01; ADAM7; ENSG00000069206; CTA
LRVPYGANY

SEQ ID NO: 6655 - protein, 9 aa, Homo sapiens
  Table A; Target 6655; HLA-C*16:04; ADAM7; ENSG00000069206; CTA
LRVPYGANY

SEQ ID NO: 6656 - protein, 11 aa, Homo sapiens
  Table A; Target 6656; HLA-A*01:01; ADAM7; ENSG00000069206; CTA
LSSLLGEDKTY

SEQ ID NO: 6657 - protein, 11 aa, Homo sapiens
  Table A; Target 6657; HLA-C*07:01; ADAM7; ENSG00000069206; CTA
LSSLLGEDKTY

SEQ ID NO: 6658 - protein, 11 aa, Homo sapiens
  Table A; Target 6658; HLA-C*12:03; ADAM7; ENSG00000069206; CTA
LSSLLGEDKTY

SEQ ID NO: 6659 - protein, 11 aa, Homo sapiens
  Table A; Target 6659; HLA-C*16:02; ADAM7; ENSG00000069206; CTA
LSSLLGEDKTY

SEQ ID NO: 6660 - protein, 9 aa, Homo sapiens
  Table A; Target 6660; HLA-A*25:01; ADAM7; ENSG00000069206; CTA
LVIVGIGVL

SEQ ID NO: 6661 - protein, 9 aa, Homo sapiens
  Table A; Target 6661; HLA-C*03:03; ADAM7; ENSG00000069206; CTA
LVIVGIGVL

SEQ ID NO: 6662 - protein, 9 aa, Homo sapiens
  Table A; Target 6662; HLA-C*03:04; ADAM7; ENSG00000069206; CTA
LVIVGIGVL

SEQ ID NO: 6663 - protein, 8 aa, Homo sapiens
  Table A; Target 6663; HLA-C*14:02; ADAM7; ENSG00000069206; CTA
LYHDSTDI

SEQ ID NO: 6664 - protein, 10 aa, Homo sapiens
  Table A; Target 6664; HLA-C*14:02; ADAM7; ENSG00000069206; CTA
LYHDSTDIGL

SEQ ID NO: 6665 - protein, 10 aa, Homo sapiens
  Table A; Target 6665; HLA-A*23:01; ADAM7; ENSG00000069206; CTA
LYSHVQGISY

SEQ ID NO: 6666 - protein, 10 aa, Homo sapiens
  Table A; Target 6666; HLA-A*24:02; ADAM7; ENSG00000069206; CTA
LYSHVQGISY

SEQ ID NO: 6667 - protein, 10 aa, Homo sapiens
  Table A; Target 6667; HLA-A*29:02; ADAM7; ENSG00000069206; CTA
LYSHVQGISY

SEQ ID NO: 6668 - protein, 10 aa, Homo sapiens
  Table A; Target 6668; HLA-A*30:02; ADAM7; ENSG00000069206; CTA
LYSHVQGISY

SEQ ID NO: 6669 - protein, 10 aa, Homo sapiens
  Table A; Target 6669; HLA-B*46:01; ADAM7; ENSG00000069206; CTA
LYSHVQGISY

SEQ ID NO: 6670 - protein, 10 aa, Homo sapiens
  Table A; Target 6670; HLA-B*58:01; ADAM7; ENSG00000069206; CTA
LYSHVQGISY

SEQ ID NO: 6671 - protein, 10 aa, Homo sapiens
  Table A; Target 6671; HLA-C*01:02; ADAM7; ENSG00000069206; CTA
LYSHVQGISY

SEQ ID NO: 6672 - protein, 10 aa, Homo sapiens
  Table A; Target 6672; HLA-C*04:01; ADAM7; ENSG00000069206; CTA
LYSHVQGISY

SEQ ID NO: 6673 - protein, 10 aa, Homo sapiens
  Table A; Target 6673; HLA-C*07:01; ADAM7; ENSG00000069206; CTA
LYSHVQGISY

SEQ ID NO: 6674 - protein, 10 aa, Homo sapiens
  Table A; Target 6674; HLA-C*07:02; ADAM7; ENSG00000069206; CTA
LYSHVQGISY

SEQ ID NO: 6675 - protein, 10 aa, Homo sapiens
  Table A; Target 6675; HLA-C*14:02; ADAM7; ENSG00000069206; CTA
LYSHVQGISY

SEQ ID NO: 6676 - protein, 9 aa, Homo sapiens
  Table A; Target 6676; HLA-A*23:01; ADAM7; ENSG00000069206; CTA
LYSNIETTL

SEQ ID NO: 6677 - protein, 9 aa, Homo sapiens
  Table A; Target 6677; HLA-A*24:02; ADAM7; ENSG00000069206; CTA
LYSNIETTL

SEQ ID NO: 6678 - protein, 9 aa, Homo sapiens
  Table A; Target 6678; HLA-A*32:01; ADAM7; ENSG00000069206; CTA
LYSNIETTL

SEQ ID NO: 6679 - protein, 9 aa, Homo sapiens
  Table A; Target 6679; HLA-B*35:03; ADAM7; ENSG00000069206; CTA
LYSNIETTL

SEQ ID NO: 6680 - protein, 9 aa, Homo sapiens
  Table A; Target 6680; HLA-B*38:01; ADAM7; ENSG00000069206; CTA
LYSNIETTL

SEQ ID NO: 6681 - protein, 9 aa, Homo sapiens
  Table A; Target 6681; HLA-B*58:01; ADAM7; ENSG00000069206; CTA
LYSNIETTL

SEQ ID NO: 6682 - protein, 9 aa, Homo sapiens
  Table A; Target 6682; HLA-C*02:02; ADAM7; ENSG00000069206; CTA
LYSNIETTL

SEQ ID NO: 6683 - protein, 9 aa, Homo sapiens
  Table A; Target 6683; HLA-C*04:01; ADAM7; ENSG00000069206; CTA
LYSNIETTL

SEQ ID NO: 6684 - protein, 9 aa, Homo sapiens
  Table A; Target 6684; HLA-C*07:04; ADAM7; ENSG00000069206; CTA
LYSNIETTL

SEQ ID NO: 6685 - protein, 9 aa, Homo sapiens
  Table A; Target 6685; HLA-C*14:02; ADAM7; ENSG00000069206; CTA
LYSNIETTL

SEQ ID NO: 6686 - protein, 9 aa, Homo sapiens
  Table A; Target 6686; HLA-C*16:01; ADAM7; ENSG00000069206; CTA
LYSNIETTL

SEQ ID NO: 6687 - protein, 9 aa, Homo sapiens
  Table A; Target 6687; HLA-C*16:02; ADAM7; ENSG00000069206; CTA
LYSNIETTL

SEQ ID NO: 6688 - protein, 10 aa, Homo sapiens
  Table A; Target 6688; HLA-A*23:01; ADAM7; ENSG00000069206; CTA
LYSNIETTLL

SEQ ID NO: 6689 - protein, 10 aa, Homo sapiens
  Table A; Target 6689; HLA-A*24:02; ADAM7; ENSG00000069206; CTA
LYSNIETTLL

SEQ ID NO: 6690 - protein, 9 aa, Homo sapiens
  Table A; Target 6690; HLA-A*33:03; ADAM7; ENSG00000069206; CTA
MAHQLGHNL

SEQ ID NO: 6691 - protein, 9 aa, Homo sapiens
  Table A; Target 6691; HLA-A*68:02; ADAM7; ENSG00000069206; CTA
MAHQLGHNL

SEQ ID NO: 6692 - protein, 9 aa, Homo sapiens
  Table A; Target 6692; HLA-B*08:01; ADAM7; ENSG00000069206; CTA
MAHQLGHNL

SEQ ID NO: 6693 - protein, 9 aa, Homo sapiens
  Table A; Target 6693; HLA-B*35:01; ADAM7; ENSG00000069206; CTA
MAHQLGHNL

SEQ ID NO: 6694 - protein, 9 aa, Homo sapiens
  Table A; Target 6694; HLA-B*35:03; ADAM7; ENSG00000069206; CTA
MAHQLGHNL

SEQ ID NO: 6695 - protein, 9 aa, Homo sapiens
  Table A; Target 6695; HLA-B*38:01; ADAM7; ENSG00000069206; CTA
MAHQLGHNL

SEQ ID NO: 6696 - protein, 9 aa, Homo sapiens
  Table A; Target 6696; HLA-B*54:01; ADAM7; ENSG00000069206; CTA
MAHQLGHNL

SEQ ID NO: 6697 - protein, 9 aa, Homo sapiens
  Table A; Target 6697; HLA-C*02:02; ADAM7; ENSG00000069206; CTA
MAHQLGHNL

SEQ ID NO: 6698 - protein, 9 aa, Homo sapiens
  Table A; Target 6698; HLA-C*03:03; ADAM7; ENSG00000069206; CTA
MAHQLGHNL

SEQ ID NO: 6699 - protein, 9 aa, Homo sapiens
  Table A; Target 6699; HLA-C*03:04; ADAM7; ENSG00000069206; CTA
MAHQLGHNL

SEQ ID NO: 6700 - protein, 9 aa, Homo sapiens
  Table A; Target 6700; HLA-C*04:01; ADAM7; ENSG00000069206; CTA
MAHQLGHNL

SEQ ID NO: 6701 - protein, 9 aa, Homo sapiens
  Table A; Target 6701; HLA-C*06:02; ADAM7; ENSG00000069206; CTA
MAHQLGHNL

SEQ ID NO: 6702 - protein, 9 aa, Homo sapiens
  Table A; Target 6702; HLA-C*07:04; ADAM7; ENSG00000069206; CTA
MAHQLGHNL

SEQ ID NO: 6703 - protein, 9 aa, Homo sapiens
  Table A; Target 6703; HLA-C*16:01; ADAM7; ENSG00000069206; CTA
MAHQLGHNL

SEQ ID NO: 6704 - protein, 9 aa, Homo sapiens
  Table A; Target 6704; HLA-C*16:02; ADAM7; ENSG00000069206; CTA
MAHQLGHNL

SEQ ID NO: 6705 - protein, 10 aa, Homo sapiens
  Table A; Target 6705; HLA-A*25:01; ADAM7; ENSG00000069206; CTA
MDSDGSIPAL

SEQ ID NO: 6706 - protein, 10 aa, Homo sapiens
  Table A; Target 6706; HLA-A*30:01; ADAM7; ENSG00000069206; CTA
MDSDGSIPAL

SEQ ID NO: 6707 - protein, 10 aa, Homo sapiens
  Table A; Target 6707; HLA-A*68:02; ADAM7; ENSG00000069206; CTA
MDSDGSIPAL

SEQ ID NO: 6708 - protein, 10 aa, Homo sapiens
  Table A; Target 6708; HLA-B*35:03; ADAM7; ENSG00000069206; CTA
MDSDGSIPAL

SEQ ID NO: 6709 - protein, 10 aa, Homo sapiens
  Table A; Target 6709; HLA-B*38:01; ADAM7; ENSG00000069206; CTA
MDSDGSIPAL

SEQ ID NO: 6710 - protein, 10 aa, Homo sapiens
  Table A; Target 6710; HLA-B*39:01; ADAM7; ENSG00000069206; CTA
MDSDGSIPAL

SEQ ID NO: 6711 - protein, 10 aa, Homo sapiens
  Table A; Target 6711; HLA-B*40:01; ADAM7; ENSG00000069206; CTA
MDSDGSIPAL

SEQ ID NO: 6712 - protein, 8 aa, Homo sapiens
  Table A; Target 6712; HLA-A*02:04; ADAM7; ENSG00000069206; CTA
MILLIPQV

SEQ ID NO: 6713 - protein, 8 aa, Homo sapiens
  Table A; Target 6713; HLA-B*51:01; ADAM7; ENSG00000069206; CTA
MILLIPQV

SEQ ID NO: 6714 - protein, 8 aa, Homo sapiens
  Table A; Target 6714; HLA-B*54:01; ADAM7; ENSG00000069206; CTA
MILLIPQV

SEQ ID NO: 6715 - protein, 8 aa, Homo sapiens
  Table A; Target 6715; HLA-B*51:01; ADAM7; ENSG00000069206; CTA
MIYKTLNI

SEQ ID NO: 6716 - protein, 10 aa, Homo sapiens
  Table A; Target 6716; HLA-A*68:02; ADAM7; ENSG00000069206; CTA
MIYKTLNIHV

SEQ ID NO: 6717 - protein, 8 aa, Homo sapiens
  Table A; Target 6717; HLA-B*51:01; ADAM7; ENSG00000069206; CTA
MVNFVNMI

SEQ ID NO: 6718 - protein, 9 aa, Homo sapiens
  Table A; Target 6718; HLA-A*01:01; ADAM7; ENSG00000069206; CTA
MVNFVNMIY

SEQ ID NO: 6719 - protein, 9 aa, Homo sapiens
  Table A; Target 6719; HLA-A*29:02; ADAM7; ENSG00000069206; CTA
MVNFVNMIY

SEQ ID NO: 6720 - protein, 9 aa, Homo sapiens
  Table A; Target 6720; HLA-A*30:02; ADAM7; ENSG00000069206; CTA
MVNFVNMIY

SEQ ID NO: 6721 - protein, 9 aa, Homo sapiens
  Table A; Target 6721; HLA-B*35:01; ADAM7; ENSG00000069206; CTA
MVNFVNMIY

SEQ ID NO: 6722 - protein, 10 aa, Homo sapiens
  Table A; Target 6722; HLA-A*03:01; ADAM7; ENSG00000069206; CTA
MVNFVNMIYK

SEQ ID NO: 6723 - protein, 10 aa, Homo sapiens
  Table A; Target 6723; HLA-A*03:02; ADAM7; ENSG00000069206; CTA
MVNFVNMIYK

SEQ ID NO: 6724 - protein, 10 aa, Homo sapiens
  Table A; Target 6724; HLA-A*11:01; ADAM7; ENSG00000069206; CTA
MVNFVNMIYK

SEQ ID NO: 6725 - protein, 10 aa, Homo sapiens
  Table A; Target 6725; HLA-B*27:02; ADAM7; ENSG00000069206; CTA
MVNFVNMIYK

SEQ ID NO: 6726 - protein, 9 aa, Homo sapiens
  Table A; Target 6726; HLA-C*16:02; ADAM7; ENSG00000069206; CTA
NATVKCKTI

SEQ ID NO: 6727 - protein, 8 aa, Homo sapiens
  Table A; Target 6727; HLA-B*18:01; ADAM7; ENSG00000069206; CTA
NENPVDGH

SEQ ID NO: 6728 - protein, 10 aa, Homo sapiens
  Table A; Target 6728; HLA-A*30:01; ADAM7; ENSG00000069206; CTA
NENPVDGHGL

SEQ ID NO: 6729 - protein, 10 aa, Homo sapiens
  Table A; Target 6729; HLA-B*18:01; ADAM7; ENSG00000069206; CTA
NENPVDGHGL

SEQ ID NO: 6730 - protein, 10 aa, Homo sapiens
  Table A; Target 6730; HLA-B*27:02; ADAM7; ENSG00000069206; CTA
NENPVDGHGL

SEQ ID NO: 6731 - protein, 10 aa, Homo sapiens
  Table A; Target 6731; HLA-B*27:05; ADAM7; ENSG00000069206; CTA
NENPVDGHGL

SEQ ID NO: 6732 - protein, 10 aa, Homo sapiens
  Table A; Target 6732; HLA-B*37:01; ADAM7; ENSG00000069206; CTA
NENPVDGHGL

SEQ ID NO: 6733 - protein, 10 aa, Homo sapiens
  Table A; Target 6733; HLA-B*38:01; ADAM7; ENSG00000069206; CTA
NENPVDGHGL

SEQ ID NO: 6734 - protein, 10 aa, Homo sapiens
  Table A; Target 6734; HLA-B*39:01; ADAM7; ENSG00000069206; CTA
NENPVDGHGL

SEQ ID NO: 6735 - protein, 10 aa, Homo sapiens
  Table A; Target 6735; HLA-B*40:01; ADAM7; ENSG00000069206; CTA
NENPVDGHGL

SEQ ID NO: 6736 - protein, 10 aa, Homo sapiens
  Table A; Target 6736; HLA-B*40:02; ADAM7; ENSG00000069206; CTA
NENPVDGHGL

SEQ ID NO: 6737 - protein, 10 aa, Homo sapiens
  Table A; Target 6737; HLA-B*44:02; ADAM7; ENSG00000069206; CTA
NENPVDGHGL

SEQ ID NO: 6738 - protein, 10 aa, Homo sapiens
  Table A; Target 6738; HLA-B*44:03; ADAM7; ENSG00000069206; CTA
NENPVDGHGL

SEQ ID NO: 6739 - protein, 10 aa, Homo sapiens
  Table A; Target 6739; HLA-B*49:01; ADAM7; ENSG00000069206; CTA
NENPVDGHGL

SEQ ID NO: 6740 - protein, 10 aa, Homo sapiens
  Table A; Target 6740; HLA-C*16:04; ADAM7; ENSG00000069206; CTA
NENPVDGHGL

SEQ ID NO: 6741 - protein, 9 aa, Homo sapiens
  Table A; Target 6741; HLA-B*49:01; ADAM7; ENSG00000069206; CTA
NESEEDSKI

SEQ ID NO: 6742 - protein, 10 aa, Homo sapiens
  Table A; Target 6742; HLA-A*23:01; ADAM7; ENSG00000069206; CTA
NFVNMIYKTL

SEQ ID NO: 6743 - protein, 8 aa, Homo sapiens
  Table A; Target 6743; HLA-B*08:01; ADAM7; ENSG00000069206; CTA
NGHPHNKL

SEQ ID NO: 6744 - protein, 9 aa, Homo sapiens
  Table A; Target 6744; HLA-A*01:01; ADAM7; ENSG00000069206; CTA
NIETTLLRF

SEQ ID NO: 6745 - protein, 10 aa, Homo sapiens
  Table A; Target 6745; HLA-A*29:02; ADAM7; ENSG00000069206; CTA
NLRVPYGANY

SEQ ID NO: 6746 - protein, 10 aa, Homo sapiens
  Table A; Target 6746; HLA-A*30:02; ADAM7; ENSG00000069206; CTA
NLRVPYGANY

SEQ ID NO: 6747 - protein, 9 aa, Homo sapiens
  Table A; Target 6747; HLA-A*24:02; ADAM7; ENSG00000069206; CTA
NMIYKTLNI

SEQ ID NO: 6748 - protein, 8 aa, Homo sapiens
  Table A; Target 6748; HLA-B*07:02; ADAM7; ENSG00000069206; CTA
NPVDGHGL

SEQ ID NO: 6749 - protein, 8 aa, Homo sapiens
  Table A; Target 6749; HLA-B*08:01; ADAM7; ENSG00000069206; CTA
NPVDGHGL

SEQ ID NO: 6750 - protein, 8 aa, Homo sapiens
  Table A; Target 6750; HLA-B*35:01; ADAM7; ENSG00000069206; CTA
NPVDGHGL

SEQ ID NO: 6751 - protein, 8 aa, Homo sapiens
  Table A; Target 6751; HLA-B*35:03; ADAM7; ENSG00000069206; CTA
NPVDGHGL

SEQ ID NO: 6752 - protein, 8 aa, Homo sapiens
  Table A; Target 6752; HLA-C*01:02; ADAM7; ENSG00000069206; CTA
NPVDGHGL

SEQ ID NO: 6753 - protein, 8 aa, Homo sapiens
  Table A; Target 6753; HLA-C*05:01; ADAM7; ENSG00000069206; CTA
NPVDGHGL

SEQ ID NO: 6754 - protein, 8 aa, Homo sapiens
  Table A; Target 6754; HLA-C*07:02; ADAM7; ENSG00000069206; CTA
NPVDGHGL

SEQ ID NO: 6755 - protein, 10 aa, Homo sapiens
  Table A; Target 6755; HLA-B*07:02; ADAM7; ENSG00000069206; CTA
NPVDGHGLQC

SEQ ID NO: 6756 - protein, 10 aa, Homo sapiens
  Table A; Target 6756; HLA-B*35:01; ADAM7; ENSG00000069206; CTA
NPVDGHGLQC

SEQ ID NO: 6757 - protein, 10 aa, Homo sapiens
  Table A; Target 6757; HLA-B*35:03; ADAM7; ENSG00000069206; CTA
NPVDGHGLQC

SEQ ID NO: 6758 - protein, 10 aa, Homo sapiens
  Table A; Target 6758; HLA-B*54:01; ADAM7; ENSG00000069206; CTA
NPVDGHGLQC

SEQ ID NO: 6759 - protein, 10 aa, Homo sapiens
  Table A; Target 6759; HLA-B*56:01; ADAM7; ENSG00000069206; CTA
NPVDGHGLQC

SEQ ID NO: 6760 - protein, 9 aa, Homo sapiens
  Table A; Target 6760; HLA-A*26:01; ADAM7; ENSG00000069206; CTA
NTKGNKFGY

SEQ ID NO: 6761 - protein, 9 aa, Homo sapiens
  Table A; Target 6761; HLA-A*29:02; ADAM7; ENSG00000069206; CTA
NTKGNKFGY

SEQ ID NO: 6762 - protein, 9 aa, Homo sapiens
  Table A; Target 6762; HLA-A*30:02; ADAM7; ENSG00000069206; CTA
NTKGNKFGY

SEQ ID NO: 6763 - protein, 9 aa, Homo sapiens
  Table A; Target 6763; HLA-A*32:01; ADAM7; ENSG00000069206; CTA
NTKGNKFGY

SEQ ID NO: 6764 - protein, 9 aa, Homo sapiens
  Table A; Target 6764; HLA-A*33:01; ADAM7; ENSG00000069206; CTA
NTKGNKFGY

SEQ ID NO: 6765 - protein, 9 aa, Homo sapiens
  Table A; Target 6765; HLA-A*33:03; ADAM7; ENSG00000069206; CTA
NTKGNKFGY

SEQ ID NO: 6766 - protein, 9 aa, Homo sapiens
  Table A; Target 6766; HLA-A*23:01; ADAM7; ENSG00000069206; CTA
NYSCTELNF

SEQ ID NO: 6767 - protein, 9 aa, Homo sapiens
  Table A; Target 6767; HLA-A*24:02; ADAM7; ENSG00000069206; CTA
NYSCTELNF

SEQ ID NO: 6768 - protein, 9 aa, Homo sapiens
  Table A; Target 6768; HLA-C*14:02; ADAM7; ENSG00000069206; CTA
NYSCTELNF

SEQ ID NO: 6769 - protein, 9 aa, Homo sapiens
  Table A; Target 6769; HLA-A*23:01; ADAM7; ENSG00000069206; CTA
NYSETFYSM

SEQ ID NO: 6770 - protein, 9 aa, Homo sapiens
  Table A; Target 6770; HLA-A*24:02; ADAM7; ENSG00000069206; CTA
NYSETFYSM

SEQ ID NO: 6771 - protein, 9 aa, Homo sapiens
  Table A; Target 6771; HLA-A*29:02; ADAM7; ENSG00000069206; CTA
NYSETFYSM

SEQ ID NO: 6772 - protein, 9 aa, Homo sapiens
  Table A; Target 6772; HLA-A*33:03; ADAM7; ENSG00000069206; CTA
NYSETFYSM

SEQ ID NO: 6773 - protein, 9 aa, Homo sapiens
  Table A; Target 6773; HLA-B*35:01; ADAM7; ENSG00000069206; CTA
NYSETFYSM

SEQ ID NO: 6774 - protein, 9 aa, Homo sapiens
  Table A; Target 6774; HLA-B*35:03; ADAM7; ENSG00000069206; CTA
NYSETFYSM

SEQ ID NO: 6775 - protein, 9 aa, Homo sapiens
  Table A; Target 6775; HLA-C*01:02; ADAM7; ENSG00000069206; CTA
NYSETFYSM

SEQ ID NO: 6776 - protein, 9 aa, Homo sapiens
  Table A; Target 6776; HLA-C*04:01; ADAM7; ENSG00000069206; CTA
NYSETFYSM

SEQ ID NO: 6777 - protein, 9 aa, Homo sapiens
  Table A; Target 6777; HLA-C*14:02; ADAM7; ENSG00000069206; CTA
NYSETFYSM

SEQ ID NO: 6778 - protein, 9 aa, Homo sapiens
  Table A; Target 6778; HLA-A*33:01; ADAM7; ENSG00000069206; CTA
PDTNIIANR

SEQ ID NO: 6779 - protein, 9 aa, Homo sapiens
  Table A; Target 6779; HLA-A*33:03; ADAM7; ENSG00000069206; CTA
PDTNIIANR

SEQ ID NO: 6780 - protein, 9 aa, Homo sapiens
  Table A; Target 6780; HLA-A*68:01; ADAM7; ENSG00000069206; CTA
PDTNIIANR

SEQ ID NO: 6781 - protein, 9 aa, Homo sapiens
  Table A; Target 6781; HLA-A*68:02; ADAM7; ENSG00000069206; CTA
PDTNIIANR

SEQ ID NO: 6782 - protein, 9 aa, Homo sapiens
  Table A; Target 6782; HLA-B*27:02; ADAM7; ENSG00000069206; CTA
PDTNIIANR

SEQ ID NO: 6783 - protein, 9 aa, Homo sapiens
  Table A; Target 6783; HLA-C*07:06; ADAM7; ENSG00000069206; CTA
PDTNIIANR

SEQ ID NO: 6784 - protein, 9 aa, Homo sapiens
  Table A; Target 6784; HLA-A*24:02; ADAM7; ENSG00000069206; CTA
PFPYNFHDF

SEQ ID NO: 6785 - protein, 9 aa, Homo sapiens
  Table A; Target 6785; HLA-A*02:04; ADAM7; ENSG00000069206; CTA
PILPEIHFL

SEQ ID NO: 6786 - protein, 11 aa, Homo sapiens
  Table A; Target 6786; HLA-B*27:02; ADAM7; ENSG00000069206; CTA
PPTETLGVENK

SEQ ID NO: 6787 - protein, 8 aa, Homo sapiens
  Table A; Target 6787; HLA-C*07:02; ADAM7; ENSG00000069206; CTA
PQKNATVK

SEQ ID NO: 6788 - protein, 9 aa, Homo sapiens
  Table A; Target 6788; HLA-A*24:02; ADAM7; ENSG00000069206; CTA
PYNFHDFQF

SEQ ID NO: 6789 - protein, 8 aa, Homo sapiens
  Table A; Target 6789; HLA-A*30:02; ADAM7; ENSG00000069206; CTA
QGSIVHEY

SEQ ID NO: 6790 - protein, 8 aa, Homo sapiens
  Table A; Target 6790; HLA-A*32:01; ADAM7; ENSG00000069206; CTA
QGSIVHEY

SEQ ID NO: 6791 - protein, 8 aa, Homo sapiens
  Table A; Target 6791; HLA-B*15:01; ADAM7; ENSG00000069206; CTA
QGSIVHEY

SEQ ID NO: 6792 - protein, 8 aa, Homo sapiens
  Table A; Target 6792; HLA-B*15:03; ADAM7; ENSG00000069206; CTA
QGSIVHEY

SEQ ID NO: 6793 - protein, 8 aa, Homo sapiens
  Table A; Target 6793; HLA-B*18:01; ADAM7; ENSG00000069206; CTA
QGSIVHEY

SEQ ID NO: 6794 - protein, 8 aa, Homo sapiens
  Table A; Target 6794; HLA-B*35:01; ADAM7; ENSG00000069206; CTA
QGSIVHEY

SEQ ID NO: 6795 - protein, 8 aa, Homo sapiens
  Table A; Target 6795; HLA-B*37:01; ADAM7; ENSG00000069206; CTA
QGSIVHEY

SEQ ID NO: 6796 - protein, 8 aa, Homo sapiens
  Table A; Target 6796; HLA-B*46:01; ADAM7; ENSG00000069206; CTA
QGSIVHEY

SEQ ID NO: 6797 - protein, 8 aa, Homo sapiens
  Table A; Target 6797; HLA-C*07:01; ADAM7; ENSG00000069206; CTA
QGSIVHEY

SEQ ID NO: 6798 - protein, 8 aa, Homo sapiens
  Table A; Target 6798; HLA-C*07:04; ADAM7; ENSG00000069206; CTA
QGSIVHEY

SEQ ID NO: 6799 - protein, 8 aa, Homo sapiens
  Table A; Target 6799; HLA-C*12:03; ADAM7; ENSG00000069206; CTA
QGSIVHEY

SEQ ID NO: 6800 - protein, 8 aa, Homo sapiens
  Table A; Target 6800; HLA-C*16:01; ADAM7; ENSG00000069206; CTA
QGSIVHEY

SEQ ID NO: 6801 - protein, 8 aa, Homo sapiens
  Table A; Target 6801; HLA-C*16:02; ADAM7; ENSG00000069206; CTA
QGSIVHEY

SEQ ID NO: 6802 - protein, 8 aa, Homo sapiens
  Table A; Target 6802; HLA-C*16:04; ADAM7; ENSG00000069206; CTA
QGSIVHEY

SEQ ID NO: 6803 - protein, 8 aa, Homo sapiens
  Table A; Target 6803; HLA-B*08:01; ADAM7; ENSG00000069206; CTA
QIKKAGSI

SEQ ID NO: 6804 - protein, 8 aa, Homo sapiens
  Table A; Target 6804; HLA-C*07:01; ADAM7; ENSG00000069206; CTA
QNQYHQYL

SEQ ID NO: 6805 - protein, 9 aa, Homo sapiens
  Table A; Target 6805; HLA-B*38:01; ADAM7; ENSG00000069206; CTA
QQIRTEPIL

SEQ ID NO: 6806 - protein, 9 aa, Homo sapiens
  Table A; Target 6806; HLA-B*27:02; ADAM7; ENSG00000069206; CTA
QRYLIEPVK

SEQ ID NO: 6807 - protein, 9 aa, Homo sapiens
  Table A; Target 6807; HLA-B*27:05; ADAM7; ENSG00000069206; CTA
QRYLIEPVK

SEQ ID NO: 6808 - protein, 10 aa, Homo sapiens
  Table A; Target 6808; HLA-B*27:02; ADAM7; ENSG00000069206; CTA
QRYLIEPVKY

SEQ ID NO: 6809 - protein, 10 aa, Homo sapiens
  Table A; Target 6809; HLA-B*27:05; ADAM7; ENSG00000069206; CTA
QRYLIEPVKY

SEQ ID NO: 6810 - protein, 10 aa, Homo sapiens
  Table A; Target 6810; HLA-B*44:02; ADAM7; ENSG00000069206; CTA
QRYLIEPVKY

SEQ ID NO: 6811 - protein, 10 aa, Homo sapiens
  Table A; Target 6811; HLA-B*44:03; ADAM7; ENSG00000069206; CTA
QRYLIEPVKY

SEQ ID NO: 6812 - protein, 10 aa, Homo sapiens
  Table A; Target 6812; HLA-C*07:01; ADAM7; ENSG00000069206; CTA
QRYLIEPVKY

SEQ ID NO: 6813 - protein, 10 aa, Homo sapiens
  Table A; Target 6813; HLA-C*16:04; ADAM7; ENSG00000069206; CTA
QRYLIEPVKY

SEQ ID NO: 6814 - protein, 8 aa, Homo sapiens
  Table A; Target 6814; HLA-C*01:02; ADAM7; ENSG00000069206; CTA
QSPPTETL

SEQ ID NO: 6815 - protein, 8 aa, Homo sapiens
  Table A; Target 6815; HLA-B*08:01; ADAM7; ENSG00000069206; CTA
QVKEKFIL

SEQ ID NO: 6816 - protein, 10 aa, Homo sapiens
  Table A; Target 6816; HLA-A*25:01; ADAM7; ENSG00000069206; CTA
QVQSPPTETL

SEQ ID NO: 6817 - protein, 10 aa, Homo sapiens
  Table A; Target 6817; HLA-B*07:02; ADAM7; ENSG00000069206; CTA
QVQSPPTETL

SEQ ID NO: 6818 - protein, 10 aa, Homo sapiens
  Table A; Target 6818; HLA-B*27:05; ADAM7; ENSG00000069206; CTA
QVQSPPTETL

SEQ ID NO: 6819 - protein, 10 aa, Homo sapiens
  Table A; Target 6819; HLA-B*38:01; ADAM7; ENSG00000069206; CTA
QVQSPPTETL

SEQ ID NO: 6820 - protein, 10 aa, Homo sapiens
  Table A; Target 6820; HLA-B*39:01; ADAM7; ENSG00000069206; CTA
QVQSPPTETL

SEQ ID NO: 6821 - protein, 10 aa, Homo sapiens
  Table A; Target 6821; HLA-C*01:02; ADAM7; ENSG00000069206; CTA
QVQSPPTETL

SEQ ID NO: 6822 - protein, 10 aa, Homo sapiens
  Table A; Target 6822; HLA-C*05:01; ADAM7; ENSG00000069206; CTA
QVQSPPTETL

SEQ ID NO: 6823 - protein, 8 aa, Homo sapiens
  Table A; Target 6823; HLA-B*15:01; ADAM7; ENSG00000069206; CTA
REFLGSNY

SEQ ID NO: 6824 - protein, 8 aa, Homo sapiens
  Table A; Target 6824; HLA-B*15:03; ADAM7; ENSG00000069206; CTA
REFLGSNY

SEQ ID NO: 6825 - protein, 8 aa, Homo sapiens
  Table A; Target 6825; HLA-B*18:01; ADAM7; ENSG00000069206; CTA
REFLGSNY

SEQ ID NO: 6826 - protein, 8 aa, Homo sapiens
  Table A; Target 6826; HLA-B*37:01; ADAM7; ENSG00000069206; CTA
REFLGSNY

SEQ ID NO: 6827 - protein, 8 aa, Homo sapiens
  Table A; Target 6827; HLA-B*44:02; ADAM7; ENSG00000069206; CTA
REFLGSNY

SEQ ID NO: 6828 - protein, 8 aa, Homo sapiens
  Table A; Target 6828; HLA-B*44:03; ADAM7; ENSG00000069206; CTA
REFLGSNY

SEQ ID NO: 6829 - protein, 8 aa, Homo sapiens
  Table A; Target 6829; HLA-B*49:01; ADAM7; ENSG00000069206; CTA
REFLGSNY

SEQ ID NO: 6830 - protein, 8 aa, Homo sapiens
  Table A; Target 6830; HLA-C*16:04; ADAM7; ENSG00000069206; CTA
REFLGSNY

SEQ ID NO: 6831 - protein, 10 aa, Homo sapiens
  Table A; Target 6831; HLA-A*31:01; ADAM7; ENSG00000069206; CTA
RGFFRINDQR

SEQ ID NO: 6832 - protein, 11 aa, Homo sapiens
  Table A; Target 6832; HLA-A*03:02; ADAM7; ENSG00000069206; CTA
RGIADPNQSAK

SEQ ID NO: 6833 - protein, 11 aa, Homo sapiens
  Table A; Target 6833; HLA-A*11:01; ADAM7; ENSG00000069206; CTA
RGIADPNQSAK

SEQ ID NO: 6834 - protein, 9 aa, Homo sapiens
  Table A; Target 6834; HLA-A*02:04; ADAM7; ENSG00000069206; CTA
RINDQRYLI

SEQ ID NO: 6835 - protein, 9 aa, Homo sapiens
  Table A; Target 6835; HLA-A*24:02; ADAM7; ENSG00000069206; CTA
RINDQRYLI

SEQ ID NO: 6836 - protein, 9 aa, Homo sapiens
  Table A; Target 6836; HLA-A*02:01; ADAM7; ENSG00000069206; CTA
RIWGMVNFV

SEQ ID NO: 6837 - protein, 9 aa, Homo sapiens
  Table A; Target 6837; HLA-A*02:03; ADAM7; ENSG00000069206; CTA
RIWGMVNFV

SEQ ID NO: 6838 - protein, 9 aa, Homo sapiens
  Table A; Target 6838; HLA-A*02:04; ADAM7; ENSG00000069206; CTA
RIWGMVNFV

SEQ ID NO: 6839 - protein, 9 aa, Homo sapiens
  Table A; Target 6839; HLA-A*02:07; ADAM7; ENSG00000069206; CTA
RIWGMVNFV

SEQ ID NO: 6840 - protein, 10 aa, Homo sapiens
  Table A; Target 6840; HLA-A*30:02; ADAM7; ENSG00000069206; CTA
RSREFLGSNY

SEQ ID NO: 6841 - protein, 10 aa, Homo sapiens
  Table A; Target 6841; HLA-B*57:01; ADAM7; ENSG00000069206; CTA
RSREFLGSNY

SEQ ID NO: 6842 - protein, 9 aa, Homo sapiens
  Table A; Target 6842; HLA-A*02:01; ADAM7; ENSG00000069206; CTA
RTEPILPEI

SEQ ID NO: 6843 - protein, 9 aa, Homo sapiens
  Table A; Target 6843; HLA-A*02:04; ADAM7; ENSG00000069206; CTA
RTEPILPEI

SEQ ID NO: 6844 - protein, 9 aa, Homo sapiens
  Table A; Target 6844; HLA-A*02:07; ADAM7; ENSG00000069206; CTA
RTEPILPEI

SEQ ID NO: 6845 - protein, 9 aa, Homo sapiens
  Table A; Target 6845; HLA-A*24:02; ADAM7; ENSG00000069206; CTA
RTEPILPEI

SEQ ID NO: 6846 - protein, 9 aa, Homo sapiens
  Table A; Target 6846; HLA-A*68:02; ADAM7; ENSG00000069206; CTA
RTEPILPEI

SEQ ID NO: 6847 - protein, 9 aa, Homo sapiens
  Table A; Target 6847; HLA-B*57:01; ADAM7; ENSG00000069206; CTA
RTEPILPEI

SEQ ID NO: 6848 - protein, 9 aa, Homo sapiens
  Table A; Target 6848; HLA-B*58:01; ADAM7; ENSG00000069206; CTA
RTEPILPEI

SEQ ID NO: 6849 - protein, 11 aa, Homo sapiens
  Table A; Target 6849; HLA-B*57:01; ADAM7; ENSG00000069206; CTA
RTEPILPEIHF

SEQ ID NO: 6850 - protein, 8 aa, Homo sapiens
  Table A; Target 6850; HLA-C*01:02; ADAM7; ENSG00000069206; CTA
RVPYGANY

SEQ ID NO: 6851 - protein, 9 aa, Homo sapiens
  Table A; Target 6851; HLA-A*23:01; ADAM7; ENSG00000069206; CTA
RYLIEPVKY

SEQ ID NO: 6852 - protein, 9 aa, Homo sapiens
  Table A; Target 6852; HLA-A*24:02; ADAM7; ENSG00000069206; CTA
RYLIEPVKY

SEQ ID NO: 6853 - protein, 9 aa, Homo sapiens
  Table A; Target 6853; HLA-A*29:02; ADAM7; ENSG00000069206; CTA
RYLIEPVKY

SEQ ID NO: 6854 - protein, 9 aa, Homo sapiens
  Table A; Target 6854; HLA-A*30:02; ADAM7; ENSG00000069206; CTA
RYLIEPVKY

SEQ ID NO: 6855 - protein, 9 aa, Homo sapiens
  Table A; Target 6855; HLA-A*31:01; ADAM7; ENSG00000069206; CTA
RYLIEPVKY

SEQ ID NO: 6856 - protein, 9 aa, Homo sapiens
  Table A; Target 6856; HLA-B*15:03; ADAM7; ENSG00000069206; CTA
RYLIEPVKY

SEQ ID NO: 6857 - protein, 9 aa, Homo sapiens
  Table A; Target 6857; HLA-B*57:01; ADAM7; ENSG00000069206; CTA
RYLIEPVKY

SEQ ID NO: 6858 - protein, 8 aa, Homo sapiens
  Table A; Target 6858; HLA-C*12:03; ADAM7; ENSG00000069206; CTA
SAASISTC

SEQ ID NO: 6859 - protein, 9 aa, Homo sapiens
  Table A; Target 6859; HLA-B*27:05; ADAM7; ENSG00000069206; CTA
SAASISTCN

SEQ ID NO: 6860 - protein, 9 aa, Homo sapiens
  Table A; Target 6860; HLA-A*31:01; ADAM7; ENSG00000069206; CTA
SCTELNFTR

SEQ ID NO: 6861 - protein, 9 aa, Homo sapiens
  Table A; Target 6861; HLA-A*33:03; ADAM7; ENSG00000069206; CTA
SCTELNFTR

SEQ ID NO: 6862 - protein, 9 aa, Homo sapiens
  Table A; Target 6862; HLA-A*68:01; ADAM7; ENSG00000069206; CTA
SCTELNFTR

SEQ ID NO: 6863 - protein, 9 aa, Homo sapiens
  Table A; Target 6863; HLA-C*07:06; ADAM7; ENSG00000069206; CTA
SCTELNFTR

SEQ ID NO: 6864 - protein, 10 aa, Homo sapiens
  Table A; Target 6864; HLA-A*11:01; ADAM7; ENSG00000069206; CTA
SCTELNFTRK

SEQ ID NO: 6865 - protein, 9 aa, Homo sapiens
  Table A; Target 6865; HLA-B*37:01; ADAM7; ENSG00000069206; CTA
SDEGEHLVF

SEQ ID NO: 6866 - protein, 9 aa, Homo sapiens
  Table A; Target 6866; HLA-B*38:01; ADAM7; ENSG00000069206; CTA
SDEGEHLVF

SEQ ID NO: 6867 - protein, 10 aa, Homo sapiens
  Table A; Target 6867; HLA-A*11:01; ADAM7; ENSG00000069206; CTA
SDEGEHLVFK

SEQ ID NO: 6868 - protein, 8 aa, Homo sapiens
  Table A; Target 6868; HLA-A*30:01; ADAM7; ENSG00000069206; CTA
SDGSIPAL

SEQ ID NO: 6869 - protein, 8 aa, Homo sapiens
  Table A; Target 6869; HLA-B*18:01; ADAM7; ENSG00000069206; CTA
SDGSIPAL

SEQ ID NO: 6870 - protein, 8 aa, Homo sapiens
  Table A; Target 6870; HLA-B*37:01; ADAM7; ENSG00000069206; CTA
SDGSIPAL

SEQ ID NO: 6871 - protein, 8 aa, Homo sapiens
  Table A; Target 6871; HLA-B*40:02; ADAM7; ENSG00000069206; CTA
SDGSIPAL

SEQ ID NO: 6872 - protein, 8 aa, Homo sapiens
  Table A; Target 6872; HLA-C*12:03; ADAM7; ENSG00000069206; CTA
SDGSIPAL

SEQ ID NO: 6873 - protein, 9 aa, Homo sapiens
  Table A; Target 6873; HLA-A*03:02; ADAM7; ENSG00000069206; CTA
SDGSIPALK

SEQ ID NO: 6874 - protein, 9 aa, Homo sapiens
  Table A; Target 6874; HLA-A*11:01; ADAM7; ENSG00000069206; CTA
SDGSIPALK

SEQ ID NO: 6875 - protein, 9 aa, Homo sapiens
  Table A; Target 6875; HLA-B*27:02; ADAM7; ENSG00000069206; CTA
SDGSIPALK

SEQ ID NO: 6876 - protein, 10 aa, Homo sapiens
  Table A; Target 6876; HLA-A*23:01; ADAM7; ENSG00000069206; CTA
SDGSIPALKF

SEQ ID NO: 6877 - protein, 10 aa, Homo sapiens
  Table A; Target 6877; HLA-A*24:02; ADAM7; ENSG00000069206; CTA
SDGSIPALKF

SEQ ID NO: 6878 - protein, 10 aa, Homo sapiens
  Table A; Target 6878; HLA-B*18:01; ADAM7; ENSG00000069206; CTA
SDGSIPALKF

SEQ ID NO: 6879 - protein, 10 aa, Homo sapiens
  Table A; Target 6879; HLA-B*37:01; ADAM7; ENSG00000069206; CTA
SDGSIPALKF

SEQ ID NO: 6880 - protein, 10 aa, Homo sapiens
  Table A; Target 6880; HLA-B*44:02; ADAM7; ENSG00000069206; CTA
SDGSIPALKF

SEQ ID NO: 6881 - protein, 10 aa, Homo sapiens
  Table A; Target 6881; HLA-B*44:03; ADAM7; ENSG00000069206; CTA
SDGSIPALKF

SEQ ID NO: 6882 - protein, 10 aa, Homo sapiens
  Table A; Target 6882; HLA-C*07:01; ADAM7; ENSG00000069206; CTA
SDGSIPALKF

SEQ ID NO: 6883 - protein, 10 aa, Homo sapiens
  Table A; Target 6883; HLA-C*16:04; ADAM7; ENSG00000069206; CTA
SDGSIPALKF

SEQ ID NO: 6884 - protein, 10 aa, Homo sapiens
  Table A; Target 6884; HLA-B*44:02; ADAM7; ENSG00000069206; CTA
SEEDSKIKGI

SEQ ID NO: 6885 - protein, 10 aa, Homo sapiens
  Table A; Target 6885; HLA-B*44:03; ADAM7; ENSG00000069206; CTA
SEEDSKIKGI

SEQ ID NO: 6886 - protein, 10 aa, Homo sapiens
  Table A; Target 6886; HLA-B*49:01; ADAM7; ENSG00000069206; CTA
SEEDSKIKGI

SEQ ID NO: 6887 - protein, 9 aa, Homo sapiens
  Table A; Target 6887; HLA-B*40:01; ADAM7; ENSG00000069206; CTA
SELFDDEAI

SEQ ID NO: 6888 - protein, 9 aa, Homo sapiens
  Table A; Target 6888; HLA-B*49:01; ADAM7; ENSG00000069206; CTA
SELFDDEAI

SEQ ID NO: 6889 - protein, 11 aa, Homo sapiens
  Table A; Target 6889; HLA-A*31:01; ADAM7; ENSG00000069206; CTA
SFWQEKILKTR

SEQ ID NO: 6890 - protein, 8 aa, Homo sapiens
  Table A; Target 6890; HLA-B*15:03; ADAM7; ENSG00000069206; CTA
SHVQGISY

SEQ ID NO: 6891 - protein, 8 aa, Homo sapiens
  Table A; Target 6891; HLA-B*39:01; ADAM7; ENSG00000069206; CTA
SHVQGISY

SEQ ID NO: 6892 - protein, 9 aa, Homo sapiens
  Table A; Target 6892; HLA-B*39:01; ADAM7; ENSG00000069206; CTA
SHVQGISYP

SEQ ID NO: 6893 - protein, 9 aa, Homo sapiens
  Table A; Target 6893; HLA-A*30:02; ADAM7; ENSG00000069206; CTA
SLLGEDKTY

SEQ ID NO: 6894 - protein, 9 aa, Homo sapiens
  Table A; Target 6894; HLA-B*15:01; ADAM7; ENSG00000069206; CTA
SLLGEDKTY

SEQ ID NO: 6895 - protein, 9 aa, Homo sapiens
  Table A; Target 6895; HLA-B*15:03; ADAM7; ENSG00000069206; CTA
SLLGEDKTY

SEQ ID NO: 6896 - protein, 9 aa, Homo sapiens
  Table A; Target 6896; HLA-C*03:03; ADAM7; ENSG00000069206; CTA
SLLGEDKTY

SEQ ID NO: 6897 - protein, 11 aa, Homo sapiens
  Table A; Target 6897; HLA-A*02:01; ADAM7; ENSG00000069206; CTA
SLLGEDKTYHL

SEQ ID NO: 6898 - protein, 11 aa, Homo sapiens
  Table A; Target 6898; HLA-A*02:04; ADAM7; ENSG00000069206; CTA
SLLGEDKTYHL

SEQ ID NO: 6899 - protein, 11 aa, Homo sapiens
  Table A; Target 6899; HLA-A*02:07; ADAM7; ENSG00000069206; CTA
SLLGEDKTYHL

SEQ ID NO: 6900 - protein, 9 aa, Homo sapiens
  Table A; Target 6900; HLA-A*31:01; ADAM7; ENSG00000069206; CTA
SMKGEAFTR

SEQ ID NO: 6901 - protein, 9 aa, Homo sapiens
  Table A; Target 6901; HLA-A*33:01; ADAM7; ENSG00000069206; CTA
SMKGEAFTR

SEQ ID NO: 6902 - protein, 9 aa, Homo sapiens
  Table A; Target 6902; HLA-A*33:03; ADAM7; ENSG00000069206; CTA
SMKGEAFTR

SEQ ID NO: 6903 - protein, 9 aa, Homo sapiens
  Table A; Target 6903; HLA-C*07:06; ADAM7; ENSG00000069206; CTA
SMKGEAFTR

SEQ ID NO: 6904 - protein, 9 aa, Homo sapiens
  Table A; Target 6904; HLA-A*33:01; ADAM7; ENSG00000069206; CTA
SNIETTLLR

SEQ ID NO: 6905 - protein, 9 aa, Homo sapiens
  Table A; Target 6905; HLA-A*33:03; ADAM7; ENSG00000069206; CTA
SNIETTLLR

SEQ ID NO: 6906 - protein, 9 aa, Homo sapiens
  Table A; Target 6906; HLA-A*68:01; ADAM7; ENSG00000069206; CTA
SNIETTLLR

SEQ ID NO: 6907 - protein, 9 aa, Homo sapiens
  Table A; Target 6907; HLA-C*07:06; ADAM7; ENSG00000069206; CTA
SNIETTLLR

SEQ ID NO: 6908 - protein, 10 aa, Homo sapiens
  Table A; Target 6908; HLA-A*26:01; ADAM7; ENSG00000069206; CTA
SNIETTLLRF

SEQ ID NO: 6909 - protein, 10 aa, Homo sapiens
  Table A; Target 6909; HLA-A*29:02; ADAM7; ENSG00000069206; CTA
SNIETTLLRF

SEQ ID NO: 6910 - protein, 9 aa, Homo sapiens
  Table A; Target 6910; HLA-B*07:02; ADAM7; ENSG00000069206; CTA
SPACPKDQF

SEQ ID NO: 6911 - protein, 9 aa, Homo sapiens
  Table A; Target 6911; HLA-B*35:01; ADAM7; ENSG00000069206; CTA
SPACPKDQF

SEQ ID NO: 6912 - protein, 9 aa, Homo sapiens
  Table A; Target 6912; HLA-B*55:01; ADAM7; ENSG00000069206; CTA
SPACPKDQF

SEQ ID NO: 6913 - protein, 9 aa, Homo sapiens
  Table A; Target 6913; HLA-C*07:02; ADAM7; ENSG00000069206; CTA
SPACPKDQF

SEQ ID NO: 6914 - protein, 9 aa, Homo sapiens
  Table A; Target 6914; HLA-C*16:01; ADAM7; ENSG00000069206; CTA
SPACPKDQF

SEQ ID NO: 6915 - protein, 9 aa, Homo sapiens
  Table A; Target 6915; HLA-B*51:01; ADAM7; ENSG00000069206; CTA
SPPTETLGV

SEQ ID NO: 6916 - protein, 9 aa, Homo sapiens
  Table A; Target 6916; HLA-B*56:01; ADAM7; ENSG00000069206; CTA
SPPTETLGV

SEQ ID NO: 6917 - protein, 8 aa, Homo sapiens
  Table A; Target 6917; HLA-A*30:02; ADAM7; ENSG00000069206; CTA
SQNQYHQY

SEQ ID NO: 6918 - protein, 8 aa, Homo sapiens
  Table A; Target 6918; HLA-A*32:01; ADAM7; ENSG00000069206; CTA
SQNQYHQY

SEQ ID NO: 6919 - protein, 8 aa, Homo sapiens
  Table A; Target 6919; HLA-B*15:01; ADAM7; ENSG00000069206; CTA
SQNQYHQY

SEQ ID NO: 6920 - protein, 8 aa, Homo sapiens
  Table A; Target 6920; HLA-B*15:03; ADAM7; ENSG00000069206; CTA
SQNQYHQY

SEQ ID NO: 6921 - protein, 8 aa, Homo sapiens
  Table A; Target 6921; HLA-B*44:02; ADAM7; ENSG00000069206; CTA
SQNQYHQY

SEQ ID NO: 6922 - protein, 8 aa, Homo sapiens
  Table A; Target 6922; HLA-C*16:02; ADAM7; ENSG00000069206; CTA
SQNQYHQY

SEQ ID NO: 6923 - protein, 8 aa, Homo sapiens
  Table A; Target 6923; HLA-C*16:04; ADAM7; ENSG00000069206; CTA
SQNQYHQY

SEQ ID NO: 6924 - protein, 9 aa, Homo sapiens
  Table A; Target 6924; HLA-A*02:04; ADAM7; ENSG00000069206; CTA
SQNQYHQYL

SEQ ID NO: 6925 - protein, 9 aa, Homo sapiens
  Table A; Target 6925; HLA-A*24:02; ADAM7; ENSG00000069206; CTA
SQNQYHQYL

SEQ ID NO: 6926 - protein, 9 aa, Homo sapiens
  Table A; Target 6926; HLA-A*31:01; ADAM7; ENSG00000069206; CTA
SQNQYHQYL

SEQ ID NO: 6927 - protein, 9 aa, Homo sapiens
  Table A; Target 6927; HLA-A*32:01; ADAM7; ENSG00000069206; CTA
SQNQYHQYL

SEQ ID NO: 6928 - protein, 9 aa, Homo sapiens
  Table A; Target 6928; HLA-B*13:02; ADAM7; ENSG00000069206; CTA
SQNQYHQYL

SEQ ID NO: 6929 - protein, 9 aa, Homo sapiens
  Table A; Target 6929; HLA-B*15:01; ADAM7; ENSG00000069206; CTA
SQNQYHQYL

SEQ ID NO: 6930 - protein, 9 aa, Homo sapiens
  Table A; Target 6930; HLA-B*27:05; ADAM7; ENSG00000069206; CTA
SQNQYHQYL

SEQ ID NO: 6931 - protein, 9 aa, Homo sapiens
  Table A; Target 6931; HLA-B*37:01; ADAM7; ENSG00000069206; CTA
SQNQYHQYL

SEQ ID NO: 6932 - protein, 9 aa, Homo sapiens
  Table A; Target 6932; HLA-B*38:01; ADAM7; ENSG00000069206; CTA
SQNQYHQYL

SEQ ID NO: 6933 - protein, 9 aa, Homo sapiens
  Table A; Target 6933; HLA-B*39:01; ADAM7; ENSG00000069206; CTA
SQNQYHQYL

SEQ ID NO: 6934 - protein, 9 aa, Homo sapiens
  Table A; Target 6934; HLA-B*44:02; ADAM7; ENSG00000069206; CTA
SQNQYHQYL

SEQ ID NO: 6935 - protein, 9 aa, Homo sapiens
  Table A; Target 6935; HLA-C*02:02; ADAM7; ENSG00000069206; CTA
SQNQYHQYL

SEQ ID NO: 6936 - protein, 9 aa, Homo sapiens
  Table A; Target 6936; HLA-C*04:01; ADAM7; ENSG00000069206; CTA
SQNQYHQYL

SEQ ID NO: 6937 - protein, 9 aa, Homo sapiens
  Table A; Target 6937; HLA-C*07:04; ADAM7; ENSG00000069206; CTA
SQNQYHQYL

SEQ ID NO: 6938 - protein, 9 aa, Homo sapiens
  Table A; Target 6938; HLA-C*12:03; ADAM7; ENSG00000069206; CTA
SQNQYHQYL

SEQ ID NO: 6939 - protein, 9 aa, Homo sapiens
  Table A; Target 6939; HLA-C*16:02; ADAM7; ENSG00000069206; CTA
SQNQYHQYL

SEQ ID NO: 6940 - protein, 9 aa, Homo sapiens
  Table A; Target 6940; HLA-C*16:04; ADAM7; ENSG00000069206; CTA
SQNQYHQYL

SEQ ID NO: 6941 - protein, 10 aa, Homo sapiens
  Table A; Target 6941; HLA-A*03:02; ADAM7; ENSG00000069206; CTA
SQNQYHQYLK

SEQ ID NO: 6942 - protein, 10 aa, Homo sapiens
  Table A; Target 6942; HLA-A*11:01; ADAM7; ENSG00000069206; CTA
SQNQYHQYLK

SEQ ID NO: 6943 - protein, 9 aa, Homo sapiens
  Table A; Target 6943; HLA-B*27:02; ADAM7; ENSG00000069206; CTA
SREFLGSNY

SEQ ID NO: 6944 - protein, 9 aa, Homo sapiens
  Table A; Target 6944; HLA-B*27:05; ADAM7; ENSG00000069206; CTA
SREFLGSNY

SEQ ID NO: 6945 - protein, 9 aa, Homo sapiens
  Table A; Target 6945; HLA-C*16:04; ADAM7; ENSG00000069206; CTA
SREFLGSNY

SEQ ID NO: 6946 - protein, 10 aa, Homo sapiens
  Table A; Target 6946; HLA-A*30:02; ADAM7; ENSG00000069206; CTA
SSLLGEDKTY

SEQ ID NO: 6947 - protein, 10 aa, Homo sapiens
  Table A; Target 6947; HLA-B*57:01; ADAM7; ENSG00000069206; CTA
SSLLGEDKTY

SEQ ID NO: 6948 - protein, 10 aa, Homo sapiens
  Table A; Target 6948; HLA-B*58:01; ADAM7; ENSG00000069206; CTA
SSLLGEDKTY

SEQ ID NO: 6949 - protein, 10 aa, Homo sapiens
  Table A; Target 6949; HLA-C*16:02; ADAM7; ENSG00000069206; CTA
SSLLGEDKTY

SEQ ID NO: 6950 - protein, 8 aa, Homo sapiens
  Table A; Target 6950; HLA-C*03:03; ADAM7; ENSG00000069206; CTA
STDIGLVA

SEQ ID NO: 6951 - protein, 8 aa, Homo sapiens
  Table A; Target 6951; HLA-C*05:01; ADAM7; ENSG00000069206; CTA
STDIGLVA

SEQ ID NO: 6952 - protein, 9 aa, Homo sapiens
  Table A; Target 6952; HLA-A*68:02; ADAM7; ENSG00000069206; CTA
STSIIKDLL

SEQ ID NO: 6953 - protein, 9 aa, Homo sapiens
  Table A; Target 6953; HLA-B*27:05; ADAM7; ENSG00000069206; CTA
STSIIKDLL

SEQ ID NO: 6954 - protein, 8 aa, Homo sapiens
  Table A; Target 6954; HLA-C*14:02; ADAM7; ENSG00000069206; CTA
SYPGGMCL

SEQ ID NO: 6955 - protein, 10 aa, Homo sapiens
  Table A; Target 6955; HLA-A*29:02; ADAM7; ENSG00000069206; CTA
SYPGGMCLPY

SEQ ID NO: 6956 - protein, 9 aa, Homo sapiens
  Table A; Target 6956; HLA-B*40:02; ADAM7; ENSG00000069206; CTA
TDIGLVASG

SEQ ID NO: 6957 - protein, 11 aa, Homo sapiens
  Table A; Target 6957; HLA-A*11:01; ADAM7; ENSG00000069206; CTA
TDIGLVASGTK

SEQ ID NO: 6958 - protein, 11 aa, Homo sapiens
  Table A; Target 6958; HLA-B*27:02; ADAM7; ENSG00000069206; CTA
TDIGLVASGTK

SEQ ID NO: 6959 - protein, 11 aa, Homo sapiens
  Table A; Target 6959; HLA-C*04:01; ADAM7; ENSG00000069206; CTA
TDIGLVASGTK

SEQ ID NO: 6960 - protein, 11 aa, Homo sapiens
  Table A; Target 6960; HLA-C*07:01; ADAM7; ENSG00000069206; CTA
TDIGLVASGTK

SEQ ID NO: 6961 - protein, 10 aa, Homo sapiens
  Table A; Target 6961; HLA-B*49:01; ADAM7; ENSG00000069206; CTA
TELNFTRKTV

SEQ ID NO: 6962 - protein, 8 aa, Homo sapiens
  Table A; Target 6962; HLA-A*30:01; ADAM7; ENSG00000069206; CTA
TEPILPEI

SEQ ID NO: 6963 - protein, 8 aa, Homo sapiens
  Table A; Target 6963; HLA-B*13:02; ADAM7; ENSG00000069206; CTA
TEPILPEI

SEQ ID NO: 6964 - protein, 8 aa, Homo sapiens
  Table A; Target 6964; HLA-B*18:01; ADAM7; ENSG00000069206; CTA
TEPILPEI

SEQ ID NO: 6965 - protein, 8 aa, Homo sapiens
  Table A; Target 6965; HLA-B*49:01; ADAM7; ENSG00000069206; CTA
TEPILPEI

SEQ ID NO: 6966 - protein, 8 aa, Homo sapiens
  Table A; Target 6966; HLA-B*51:01; ADAM7; ENSG00000069206; CTA
TEPILPEI

SEQ ID NO: 6967 - protein, 10 aa, Homo sapiens
  Table A; Target 6967; HLA-B*44:02; ADAM7; ENSG00000069206; CTA
TEPILPEIHF

SEQ ID NO: 6968 - protein, 10 aa, Homo sapiens
  Table A; Target 6968; HLA-B*44:03; ADAM7; ENSG00000069206; CTA
TEPILPEIHF

SEQ ID NO: 6969 - protein, 11 aa, Homo sapiens
  Table A; Target 6969; HLA-B*44:02; ADAM7; ENSG00000069206; CTA
TEPILPEIHFL

SEQ ID NO: 6970 - protein, 11 aa, Homo sapiens
  Table A; Target 6970; HLA-B*44:02; ADAM7; ENSG00000069206; CTA
TETLGVENKGY

SEQ ID NO: 6971 - protein, 11 aa, Homo sapiens
  Table A; Target 6971; HLA-B*44:03; ADAM7; ENSG00000069206; CTA
TETLGVENKGY

SEQ ID NO: 6972 - protein, 11 aa, Homo sapiens
  Table A; Target 6972; HLA-C*16:04; ADAM7; ENSG00000069206; CTA
TETLGVENKGY

SEQ ID NO: 6973 - protein, 10 aa, Homo sapiens
  Table A; Target 6973; HLA-A*23:01; ADAM7; ENSG00000069206; CTA
TFYSMKGEAF

SEQ ID NO: 6974 - protein, 10 aa, Homo sapiens
  Table A; Target 6974; HLA-A*24:02; ADAM7; ENSG00000069206; CTA
TFYSMKGEAF

SEQ ID NO: 6975 - protein, 10 aa, Homo sapiens
  Table A; Target 6975; HLA-C*14:02; ADAM7; ENSG00000069206; CTA
TFYSMKGEAF

SEQ ID NO: 6976 - protein, 9 aa, Homo sapiens
  Table A; Target 6976; HLA-A*03:01; ADAM7; ENSG00000069206; CTA
TGHSPACPK

SEQ ID NO: 6977 - protein, 9 aa, Homo sapiens
  Table A; Target 6977; HLA-A*03:02; ADAM7; ENSG00000069206; CTA
TGHSPACPK

SEQ ID NO: 6978 - protein, 9 aa, Homo sapiens
  Table A; Target 6978; HLA-A*11:01; ADAM7; ENSG00000069206; CTA
TGHSPACPK

SEQ ID NO: 6979 - protein, 9 aa, Homo sapiens
  Table A; Target 6979; HLA-C*04:01; ADAM7; ENSG00000069206; CTA
TGHSPACPK

SEQ ID NO: 6980 - protein, 9 aa, Homo sapiens
  Table A; Target 6980; HLA-C*06:02; ADAM7; ENSG00000069206; CTA
TGHSPACPK

SEQ ID NO: 6981 - protein, 9 aa, Homo sapiens
  Table A; Target 6981; HLA-C*07:06; ADAM7; ENSG00000069206; CTA
TGHSPACPK

SEQ ID NO: 6982 - protein, 9 aa, Homo sapiens
  Table A; Target 6982; HLA-B*38:01; ADAM7; ENSG00000069206; CTA
THDDDILKT

SEQ ID NO: 6983 - protein, 10 aa, Homo sapiens
  Table A; Target 6983; HLA-A*01:01; ADAM7; ENSG00000069206; CTA
THDDDILKTY

SEQ ID NO: 6984 - protein, 10 aa, Homo sapiens
  Table A; Target 6984; HLA-B*38:01; ADAM7; ENSG00000069206; CTA
THDDDILKTY

SEQ ID NO: 6985 - protein, 10 aa, Homo sapiens
  Table A; Target 6985; HLA-B*39:01; ADAM7; ENSG00000069206; CTA
THDDDILKTY

SEQ ID NO: 6986 - protein, 10 aa, Homo sapiens
  Table A; Target 6986; HLA-B*44:02; ADAM7; ENSG00000069206; CTA
THDDDILKTY

SEQ ID NO: 6987 - protein, 8 aa, Homo sapiens
  Table A; Target 6987; HLA-B*38:01; ADAM7; ENSG00000069206; CTA
THEDKIEL

SEQ ID NO: 6988 - protein, 8 aa, Homo sapiens
  Table A; Target 6988; HLA-B*39:01; ADAM7; ENSG00000069206; CTA
THEDKIEL

SEQ ID NO: 6989 - protein, 9 aa, Homo sapiens
  Table A; Target 6989; HLA-A*01:01; ADAM7; ENSG00000069206; CTA
THEDKIELY

SEQ ID NO: 6990 - protein, 9 aa, Homo sapiens
  Table A; Target 6990; HLA-B*38:01; ADAM7; ENSG00000069206; CTA
THEDKIELY

SEQ ID NO: 6991 - protein, 9 aa, Homo sapiens
  Table A; Target 6991; HLA-B*39:01; ADAM7; ENSG00000069206; CTA
THEDKIELY

SEQ ID NO: 6992 - protein, 9 aa, Homo sapiens
  Table A; Target 6992; HLA-C*07:01; ADAM7; ENSG00000069206; CTA
THEDKIELY

SEQ ID NO: 6993 - protein, 9 aa, Homo sapiens
  Table A; Target 6993; HLA-C*12:03; ADAM7; ENSG00000069206; CTA
THEDKIELY

SEQ ID NO: 6994 - protein, 9 aa, Homo sapiens
  Table A; Target 6994; HLA-C*16:02; ADAM7; ENSG00000069206; CTA
THEDKIELY

SEQ ID NO: 6995 - protein, 9 aa, Homo sapiens
  Table A; Target 6995; HLA-A*02:04; ADAM7; ENSG00000069206; CTA
TILVVVLVL

SEQ ID NO: 6996 - protein, 9 aa, Homo sapiens
  Table A; Target 6996; HLA-A*23:01; ADAM7; ENSG00000069206; CTA
TILVVVLVL

SEQ ID NO: 6997 - protein, 9 aa, Homo sapiens
  Table A; Target 6997; HLA-B*08:01; ADAM7; ENSG00000069206; CTA
TLHVTNITI

SEQ ID NO: 6998 - protein, 9 aa, Homo sapiens
  Table A; Target 6998; HLA-B*13:02; ADAM7; ENSG00000069206; CTA
TLHVTNITI

SEQ ID NO: 6999 - protein, 8 aa, Homo sapiens
  Table A; Target 6999; HLA-A*32:01; ADAM7; ENSG00000069206; CTA
TLNIHVTL

SEQ ID NO: 7000 - protein, 8 aa, Homo sapiens
  Table A; Target 7000; HLA-B*08:01; ADAM7; ENSG00000069206; CTA
TLNIHVTL

SEQ ID NO: 7001 - protein, 8 aa, Homo sapiens
  Table A; Target 7001; HLA-B*37:01; ADAM7; ENSG00000069206; CTA
TLNIHVTL

SEQ ID NO: 7002 - protein, 8 aa, Homo sapiens
  Table A; Target 7002; HLA-C*07:04; ADAM7; ENSG00000069206; CTA
TLNIHVTL

SEQ ID NO: 7003 - protein, 9 aa, Homo sapiens
  Table A; Target 7003; HLA-A*02:01; ADAM7; ENSG00000069206; CTA
TLNIHVTLV

SEQ ID NO: 7004 - protein, 9 aa, Homo sapiens
  Table A; Target 7004; HLA-A*02:03; ADAM7; ENSG00000069206; CTA
TLNIHVTLV

SEQ ID NO: 7005 - protein, 9 aa, Homo sapiens
  Table A; Target 7005; HLA-A*02:04; ADAM7; ENSG00000069206; CTA
TLNIHVTLV

SEQ ID NO: 7006 - protein, 9 aa, Homo sapiens
  Table A; Target 7006; HLA-A*02:07; ADAM7; ENSG00000069206; CTA
TLNIHVTLV

SEQ ID NO: 7007 - protein, 9 aa, Homo sapiens
  Table A; Target 7007; HLA-B*08:01; ADAM7; ENSG00000069206; CTA
TLNIHVTLV

SEQ ID NO: 7008 - protein, 9 aa, Homo sapiens
  Table A; Target 7008; HLA-B*13:02; ADAM7; ENSG00000069206; CTA
TLNIHVTLV

SEQ ID NO: 7009 - protein, 9 aa, Homo sapiens
  Table A; Target 7009; HLA-B*37:01; ADAM7; ENSG00000069206; CTA
TLNIHVTLV

SEQ ID NO: 7010 - protein, 9 aa, Homo sapiens
  Table A; Target 7010; HLA-B*55:01; ADAM7; ENSG00000069206; CTA
TLNIHVTLV

SEQ ID NO: 7011 - protein, 8 aa, Homo sapiens
  Table A; Target 7011; HLA-B*08:01; ADAM7; ENSG00000069206; CTA
TSIIKDLL

SEQ ID NO: 7012 - protein, 9 aa, Homo sapiens
  Table A; Target 7012; HLA-B*57:01; ADAM7; ENSG00000069206; CTA
TTLLRFSFW

SEQ ID NO: 7013 - protein, 8 aa, Homo sapiens
  Table A; Target 7013; HLA-B*08:01; ADAM7; ENSG00000069206; CTA
TVKCKTIF

SEQ ID NO: 7014 - protein, 9 aa, Homo sapiens
  Table A; Target 7014; HLA-A*33:03; ADAM7; ENSG00000069206; CTA
TYHLKDPQK

SEQ ID NO: 7015 - protein, 9 aa, Homo sapiens
  Table A; Target 7015; HLA-C*04:01; ADAM7; ENSG00000069206; CTA
TYHLKDPQK

SEQ ID NO: 7016 - protein, 9 aa, Homo sapiens
  Table A; Target 7016; HLA-C*06:02; ADAM7; ENSG00000069206; CTA
TYHLKDPQK

SEQ ID NO: 7017 - protein, 9 aa, Homo sapiens
  Table A; Target 7017; HLA-B*51:01; ADAM7; ENSG00000069206; CTA
VACEETLHV

SEQ ID NO: 7018 - protein, 8 aa, Homo sapiens
  Table A; Target 7018; HLA-A*11:01; ADAM7; ENSG00000069206; CTA
VADDTVYR

SEQ ID NO: 7019 - protein, 8 aa, Homo sapiens
  Table A; Target 7019; HLA-A*33:01; ADAM7; ENSG00000069206; CTA
VADDTVYR

SEQ ID NO: 7020 - protein, 8 aa, Homo sapiens
  Table A; Target 7020; HLA-A*33:03; ADAM7; ENSG00000069206; CTA
VADDTVYR

SEQ ID NO: 7021 - protein, 8 aa, Homo sapiens
  Table A; Target 7021; HLA-A*68:01; ADAM7; ENSG00000069206; CTA
VADDTVYR

SEQ ID NO: 7022 - protein, 8 aa, Homo sapiens
  Table A; Target 7022; HLA-C*04:01; ADAM7; ENSG00000069206; CTA
VADDTVYR

SEQ ID NO: 7023 - protein, 8 aa, Homo sapiens
  Table A; Target 7023; HLA-C*05:01; ADAM7; ENSG00000069206; CTA
VADDTVYR

SEQ ID NO: 7024 - protein, 8 aa, Homo sapiens
  Table A; Target 7024; HLA-C*07:06; ADAM7; ENSG00000069206; CTA
VADDTVYR

SEQ ID NO: 7025 - protein, 9 aa, Homo sapiens
  Table A; Target 7025; HLA-A*01:01; ADAM7; ENSG00000069206; CTA
VADDTVYRR

SEQ ID NO: 7026 - protein, 9 aa, Homo sapiens
  Table A; Target 7026; HLA-A*02:07; ADAM7; ENSG00000069206; CTA
VADDTVYRR

SEQ ID NO: 7027 - protein, 9 aa, Homo sapiens
  Table A; Target 7027; HLA-A*03:02; ADAM7; ENSG00000069206; CTA
VADDTVYRR

SEQ ID NO: 7028 - protein, 9 aa, Homo sapiens
  Table A; Target 7028; HLA-A*11:01; ADAM7; ENSG00000069206; CTA
VADDTVYRR

SEQ ID NO: 7029 - protein, 9 aa, Homo sapiens
  Table A; Target 7029; HLA-A*31:01; ADAM7; ENSG00000069206; CTA
VADDTVYRR

SEQ ID NO: 7030 - protein, 9 aa, Homo sapiens
  Table A; Target 7030; HLA-A*33:01; ADAM7; ENSG00000069206; CTA
VADDTVYRR

SEQ ID NO: 7031 - protein, 9 aa, Homo sapiens
  Table A; Target 7031; HLA-A*33:03; ADAM7; ENSG00000069206; CTA
VADDTVYRR

SEQ ID NO: 7032 - protein, 9 aa, Homo sapiens
  Table A; Target 7032; HLA-A*68:01; ADAM7; ENSG00000069206; CTA
VADDTVYRR

SEQ ID NO: 7033 - protein, 9 aa, Homo sapiens
  Table A; Target 7033; HLA-A*68:02; ADAM7; ENSG00000069206; CTA
VADDTVYRR

SEQ ID NO: 7034 - protein, 9 aa, Homo sapiens
  Table A; Target 7034; HLA-B*27:02; ADAM7; ENSG00000069206; CTA
VADDTVYRR

SEQ ID NO: 7035 - protein, 9 aa, Homo sapiens
  Table A; Target 7035; HLA-B*35:01; ADAM7; ENSG00000069206; CTA
VADDTVYRR

SEQ ID NO: 7036 - protein, 9 aa, Homo sapiens
  Table A; Target 7036; HLA-B*38:01; ADAM7; ENSG00000069206; CTA
VADDTVYRR

SEQ ID NO: 7037 - protein, 9 aa, Homo sapiens
  Table A; Target 7037; HLA-B*57:01; ADAM7; ENSG00000069206; CTA
VADDTVYRR

SEQ ID NO: 7038 - protein, 9 aa, Homo sapiens
  Table A; Target 7038; HLA-C*05:01; ADAM7; ENSG00000069206; CTA
VADDTVYRR

SEQ ID NO: 7039 - protein, 9 aa, Homo sapiens
  Table A; Target 7039; HLA-C*07:06; ADAM7; ENSG00000069206; CTA
VADDTVYRR

SEQ ID NO: 7040 - protein, 9 aa, Homo sapiens
  Table A; Target 7040; HLA-C*16:01; ADAM7; ENSG00000069206; CTA
VADDTVYRR

SEQ ID NO: 7041 - protein, 9 aa, Homo sapiens
  Table A; Target 7041; HLA-C*16:02; ADAM7; ENSG00000069206; CTA
VADDTVYRR

SEQ ID NO: 7042 - protein, 9 aa, Homo sapiens
  Table A; Target 7042; HLA-B*49:01; ADAM7; ENSG00000069206; CTA
VEGQQLVRP

SEQ ID NO: 7043 - protein, 10 aa, Homo sapiens
  Table A; Target 7043; HLA-B*27:02; ADAM7; ENSG00000069206; CTA
VEGQQLVRPK

SEQ ID NO: 7044 - protein, 9 aa, Homo sapiens
  Table A; Target 7044; HLA-A*23:01; ADAM7; ENSG00000069206; CTA
VGIGVLILL

SEQ ID NO: 7045 - protein, 10 aa, Homo sapiens
  Table A; Target 7045; HLA-B*38:01; ADAM7; ENSG00000069206; CTA
VHEYDSAASI

SEQ ID NO: 7046 - protein, 10 aa, Homo sapiens
  Table A; Target 7046; HLA-B*39:01; ADAM7; ENSG00000069206; CTA
VHEYDSAASI

SEQ ID NO: 7047 - protein, 9 aa, Homo sapiens
  Table A; Target 7047; HLA-A*23:01; ADAM7; ENSG00000069206; CTA
VIVGIGVLI

SEQ ID NO: 7048 - protein, 9 aa, Homo sapiens
  Table A; Target 7048; HLA-A*68:02; ADAM7; ENSG00000069206; CTA
VIVGIGVLI

SEQ ID NO: 7049 - protein, 9 aa, Homo sapiens
  Table A; Target 7049; HLA-B*13:02; ADAM7; ENSG00000069206; CTA
VIVGIGVLI

SEQ ID NO: 7050 - protein, 11 aa, Homo sapiens
  Table A; Target 7050; HLA-A*02:04; ADAM7; ENSG00000069206; CTA
VIVGIGVLILL

SEQ ID NO: 7051 - protein, 11 aa, Homo sapiens
  Table A; Target 7051; HLA-A*23:01; ADAM7; ENSG00000069206; CTA
VIVGIGVLILL

SEQ ID NO: 7052 - protein, 9 aa, Homo sapiens
  Table A; Target 7052; HLA-A*31:01; ADAM7; ENSG00000069206; CTA
VLILLVRYR

SEQ ID NO: 7053 - protein, 9 aa, Homo sapiens
  Table A; Target 7053; HLA-A*02:03; ADAM7; ENSG00000069206; CTA
VLKPGFTCA

SEQ ID NO: 7054 - protein, 9 aa, Homo sapiens
  Table A; Target 7054; HLA-B*46:01; ADAM7; ENSG00000069206; CTA
VLKPGFTCA

SEQ ID NO: 7055 - protein, 9 aa, Homo sapiens
  Table A; Target 7055; HLA-A*29:02; ADAM7; ENSG00000069206; CTA
VLLSGKWLY

SEQ ID NO: 7056 - protein, 9 aa, Homo sapiens
  Table A; Target 7056; HLA-A*02:01; ADAM7; ENSG00000069206; CTA
VLVIVGIGV

SEQ ID NO: 7057 - protein, 9 aa, Homo sapiens
  Table A; Target 7057; HLA-A*02:03; ADAM7; ENSG00000069206; CTA
VLVIVGIGV

SEQ ID NO: 7058 - protein, 9 aa, Homo sapiens
  Table A; Target 7058; HLA-A*02:04; ADAM7; ENSG00000069206; CTA
VLVIVGIGV

SEQ ID NO: 7059 - protein, 9 aa, Homo sapiens
  Table A; Target 7059; HLA-A*02:07; ADAM7; ENSG00000069206; CTA
VLVIVGIGV

SEQ ID NO: 7060 - protein, 9 aa, Homo sapiens
  Table A; Target 7060; HLA-B*13:02; ADAM7; ENSG00000069206; CTA
VLVIVGIGV

SEQ ID NO: 7061 - protein, 9 aa, Homo sapiens
  Table A; Target 7061; HLA-B*55:01; ADAM7; ENSG00000069206; CTA
VLVIVGIGV

SEQ ID NO: 7062 - protein, 9 aa, Homo sapiens
  Table A; Target 7062; HLA-A*02:01; ADAM7; ENSG00000069206; CTA
VLVLVIVGI

SEQ ID NO: 7063 - protein, 9 aa, Homo sapiens
  Table A; Target 7063; HLA-A*02:04; ADAM7; ENSG00000069206; CTA
VLVLVIVGI

SEQ ID NO: 7064 - protein, 9 aa, Homo sapiens
  Table A; Target 7064; HLA-A*02:07; ADAM7; ENSG00000069206; CTA
VLVLVIVGI

SEQ ID NO: 7065 - protein, 9 aa, Homo sapiens
  Table A; Target 7065; HLA-A*23:01; ADAM7; ENSG00000069206; CTA
VLVLVIVGI

SEQ ID NO: 7066 - protein, 9 aa, Homo sapiens
  Table A; Target 7066; HLA-B*13:02; ADAM7; ENSG00000069206; CTA
VLVLVIVGI

SEQ ID NO: 7067 - protein, 8 aa, Homo sapiens
  Table A; Target 7067; HLA-C*05:01; ADAM7; ENSG00000069206; CTA
VMDSDGSI

SEQ ID NO: 7068 - protein, 10 aa, Homo sapiens
  Table A; Target 7068; HLA-A*02:01; ADAM7; ENSG00000069206; CTA
VMDSDGSIPA

SEQ ID NO: 7069 - protein, 11 aa, Homo sapiens
  Table A; Target 7069; HLA-A*02:01; ADAM7; ENSG00000069206; CTA
VMDSDGSIPAL

SEQ ID NO: 7070 - protein, 11 aa, Homo sapiens
  Table A; Target 7070; HLA-A*02:07; ADAM7; ENSG00000069206; CTA
VMDSDGSIPAL

SEQ ID NO: 7071 - protein, 11 aa, Homo sapiens
  Table A; Target 7071; HLA-B*38:01; ADAM7; ENSG00000069206; CTA
VMDSDGSIPAL

SEQ ID NO: 7072 - protein, 11 aa, Homo sapiens
  Table A; Target 7072; HLA-B*39:01; ADAM7; ENSG00000069206; CTA
VMDSDGSIPAL

SEQ ID NO: 7073 - protein, 11 aa, Homo sapiens
  Table A; Target 7073; HLA-C*05:01; ADAM7; ENSG00000069206; CTA
VMDSDGSIPAL

SEQ ID NO: 7074 - protein, 9 aa, Homo sapiens
  Table A; Target 7074; HLA-A*11:01; ADAM7; ENSG00000069206; CTA
VNFVNMIYK

SEQ ID NO: 7075 - protein, 8 aa, Homo sapiens
  Table A; Target 7075; HLA-B*08:01; ADAM7; ENSG00000069206; CTA
VNMIYKTL

SEQ ID NO: 7076 - protein, 9 aa, Homo sapiens
  Table A; Target 7076; HLA-B*07:02; ADAM7; ENSG00000069206; CTA
VPYGANYSC

SEQ ID NO: 7077 - protein, 9 aa, Homo sapiens
  Table A; Target 7077; HLA-B*35:03; ADAM7; ENSG00000069206; CTA
VPYGANYSC

SEQ ID NO: 7078 - protein, 9 aa, Homo sapiens
  Table A; Target 7078; HLA-B*51:01; ADAM7; ENSG00000069206; CTA
VPYGANYSC

SEQ ID NO: 7079 - protein, 9 aa, Homo sapiens
  Table A; Target 7079; HLA-B*54:01; ADAM7; ENSG00000069206; CTA
VPYGANYSC

SEQ ID NO: 7080 - protein, 9 aa, Homo sapiens
  Table A; Target 7080; HLA-B*55:01; ADAM7; ENSG00000069206; CTA
VPYGANYSC

SEQ ID NO: 7081 - protein, 9 aa, Homo sapiens
  Table A; Target 7081; HLA-B*56:01; ADAM7; ENSG00000069206; CTA
VPYGANYSC

SEQ ID NO: 7082 - protein, 8 aa, Homo sapiens
  Table A; Target 7082; HLA-C*12:03; ADAM7; ENSG00000069206; CTA
VQGISYPG

SEQ ID NO: 7083 - protein, 9 aa, Homo sapiens
  Table A; Target 7083; HLA-A*02:01; ADAM7; ENSG00000069206; CTA
VQSPPTETL

SEQ ID NO: 7084 - protein, 9 aa, Homo sapiens
  Table A; Target 7084; HLA-A*02:03; ADAM7; ENSG00000069206; CTA
VQSPPTETL

SEQ ID NO: 7085 - protein, 9 aa, Homo sapiens
  Table A; Target 7085; HLA-A*23:01; ADAM7; ENSG00000069206; CTA
VQSPPTETL

SEQ ID NO: 7086 - protein, 9 aa, Homo sapiens
  Table A; Target 7086; HLA-A*24:02; ADAM7; ENSG00000069206; CTA
VQSPPTETL

SEQ ID NO: 7087 - protein, 9 aa, Homo sapiens
  Table A; Target 7087; HLA-A*25:01; ADAM7; ENSG00000069206; CTA
VQSPPTETL

SEQ ID NO: 7088 - protein, 9 aa, Homo sapiens
  Table A; Target 7088; HLA-A*30:01; ADAM7; ENSG00000069206; CTA
VQSPPTETL

SEQ ID NO: 7089 - protein, 9 aa, Homo sapiens
  Table A; Target 7089; HLA-A*32:01; ADAM7; ENSG00000069206; CTA
VQSPPTETL

SEQ ID NO: 7090 - protein, 9 aa, Homo sapiens
  Table A; Target 7090; HLA-B*13:02; ADAM7; ENSG00000069206; CTA
VQSPPTETL

SEQ ID NO: 7091 - protein, 9 aa, Homo sapiens
  Table A; Target 7091; HLA-B*15:03; ADAM7; ENSG00000069206; CTA
VQSPPTETL

SEQ ID NO: 7092 - protein, 9 aa, Homo sapiens
  Table A; Target 7092; HLA-B*27:05; ADAM7; ENSG00000069206; CTA
VQSPPTETL

SEQ ID NO: 7093 - protein, 9 aa, Homo sapiens
  Table A; Target 7093; HLA-B*35:03; ADAM7; ENSG00000069206; CTA
VQSPPTETL

SEQ ID NO: 7094 - protein, 9 aa, Homo sapiens
  Table A; Target 7094; HLA-B*37:01; ADAM7; ENSG00000069206; CTA
VQSPPTETL

SEQ ID NO: 7095 - protein, 9 aa, Homo sapiens
  Table A; Target 7095; HLA-B*38:01; ADAM7; ENSG00000069206; CTA
VQSPPTETL

SEQ ID NO: 7096 - protein, 9 aa, Homo sapiens
  Table A; Target 7096; HLA-B*39:01; ADAM7; ENSG00000069206; CTA
VQSPPTETL

SEQ ID NO: 7097 - protein, 9 aa, Homo sapiens
  Table A; Target 7097; HLA-B*40:01; ADAM7; ENSG00000069206; CTA
VQSPPTETL

SEQ ID NO: 7098 - protein, 9 aa, Homo sapiens
  Table A; Target 7098; HLA-B*40:02; ADAM7; ENSG00000069206; CTA
VQSPPTETL

SEQ ID NO: 7099 - protein, 9 aa, Homo sapiens
  Table A; Target 7099; HLA-B*46:01; ADAM7; ENSG00000069206; CTA
VQSPPTETL

SEQ ID NO: 7100 - protein, 9 aa, Homo sapiens
  Table A; Target 7100; HLA-B*49:01; ADAM7; ENSG00000069206; CTA
VQSPPTETL

SEQ ID NO: 7101 - protein, 9 aa, Homo sapiens
  Table A; Target 7101; HLA-B*58:01; ADAM7; ENSG00000069206; CTA
VQSPPTETL

SEQ ID NO: 7102 - protein, 9 aa, Homo sapiens
  Table A; Target 7102; HLA-C*01:02; ADAM7; ENSG00000069206; CTA
VQSPPTETL

SEQ ID NO: 7103 - protein, 9 aa, Homo sapiens
  Table A; Target 7103; HLA-C*02:02; ADAM7; ENSG00000069206; CTA
VQSPPTETL

SEQ ID NO: 7104 - protein, 9 aa, Homo sapiens
  Table A; Target 7104; HLA-C*03:03; ADAM7; ENSG00000069206; CTA
VQSPPTETL

SEQ ID NO: 7105 - protein, 9 aa, Homo sapiens
  Table A; Target 7105; HLA-C*03:04; ADAM7; ENSG00000069206; CTA
VQSPPTETL

SEQ ID NO: 7106 - protein, 9 aa, Homo sapiens
  Table A; Target 7106; HLA-C*05:01; ADAM7; ENSG00000069206; CTA
VQSPPTETL

SEQ ID NO: 7107 - protein, 9 aa, Homo sapiens
  Table A; Target 7107; HLA-C*06:02; ADAM7; ENSG00000069206; CTA
VQSPPTETL

SEQ ID NO: 7108 - protein, 9 aa, Homo sapiens
  Table A; Target 7108; HLA-C*07:02; ADAM7; ENSG00000069206; CTA
VQSPPTETL

SEQ ID NO: 7109 - protein, 9 aa, Homo sapiens
  Table A; Target 7109; HLA-C*07:04; ADAM7; ENSG00000069206; CTA
VQSPPTETL

SEQ ID NO: 7110 - protein, 9 aa, Homo sapiens
  Table A; Target 7110; HLA-C*12:03; ADAM7; ENSG00000069206; CTA
VQSPPTETL

SEQ ID NO: 7111 - protein, 9 aa, Homo sapiens
  Table A; Target 7111; HLA-C*14:02; ADAM7; ENSG00000069206; CTA
VQSPPTETL

SEQ ID NO: 7112 - protein, 9 aa, Homo sapiens
  Table A; Target 7112; HLA-C*16:04; ADAM7; ENSG00000069206; CTA
VQSPPTETL

SEQ ID NO: 7113 - protein, 11 aa, Homo sapiens
  Table A; Target 7113; HLA-A*02:01; ADAM7; ENSG00000069206; CTA
VQSPPTETLGV

SEQ ID NO: 7114 - protein, 11 aa, Homo sapiens
  Table A; Target 7114; HLA-A*30:01; ADAM7; ENSG00000069206; CTA
VQSPPTETLGV

SEQ ID NO: 7115 - protein, 11 aa, Homo sapiens
  Table A; Target 7115; HLA-B*13:02; ADAM7; ENSG00000069206; CTA
VQSPPTETLGV

SEQ ID NO: 7116 - protein, 11 aa, Homo sapiens
  Table A; Target 7116; HLA-B*38:01; ADAM7; ENSG00000069206; CTA
VQSPPTETLGV

SEQ ID NO: 7117 - protein, 11 aa, Homo sapiens
  Table A; Target 7117; HLA-B*39:01; ADAM7; ENSG00000069206; CTA
VQSPPTETLGV

SEQ ID NO: 7118 - protein, 11 aa, Homo sapiens
  Table A; Target 7118; HLA-C*06:02; ADAM7; ENSG00000069206; CTA
VQSPPTETLGV

SEQ ID NO: 7119 - protein, 9 aa, Homo sapiens
  Table A; Target 7119; HLA-A*24:02; ADAM7; ENSG00000069206; CTA
VRPKKLPLI

SEQ ID NO: 7120 - protein, 8 aa, Homo sapiens
  Table A; Target 7120; HLA-C*03:04; ADAM7; ENSG00000069206; CTA
VTLVGIEI

SEQ ID NO: 7121 - protein, 9 aa, Homo sapiens
  Table A; Target 7121; HLA-B*57:01; ADAM7; ENSG00000069206; CTA
VTLVGIEIW

SEQ ID NO: 7122 - protein, 9 aa, Homo sapiens
  Table A; Target 7122; HLA-B*58:01; ADAM7; ENSG00000069206; CTA
VTLVGIEIW

SEQ ID NO: 7123 - protein, 9 aa, Homo sapiens
  Table A; Target 7123; HLA-A*01:01; ADAM7; ENSG00000069206; CTA
VTNITILVV

SEQ ID NO: 7124 - protein, 9 aa, Homo sapiens
  Table A; Target 7124; HLA-B*13:02; ADAM7; ENSG00000069206; CTA
VTNITILVV

SEQ ID NO: 7125 - protein, 9 aa, Homo sapiens
  Table A; Target 7125; HLA-C*06:02; ADAM7; ENSG00000069206; CTA
VTNITILVV

SEQ ID NO: 7126 - protein, 9 aa, Homo sapiens
  Table A; Target 7126; HLA-C*12:03; ADAM7; ENSG00000069206; CTA
VTNITILVV

SEQ ID NO: 7127 - protein, 9 aa, Homo sapiens
  Table A; Target 7127; HLA-C*16:02; ADAM7; ENSG00000069206; CTA
VTNITILVV

SEQ ID NO: 7128 - protein, 10 aa, Homo sapiens
  Table A; Target 7128; HLA-A*29:02; ADAM7; ENSG00000069206; CTA
VVLLSGKWLY

SEQ ID NO: 7129 - protein, 8 aa, Homo sapiens
  Table A; Target 7129; HLA-B*51:01; ADAM7; ENSG00000069206; CTA
VVVLVLVI

SEQ ID NO: 7130 - protein, 10 aa, Homo sapiens
  Table A; Target 7130; HLA-C*07:01; ADAM7; ENSG00000069206; CTA
VYISTNCPSQ

SEQ ID NO: 7131 - protein, 9 aa, Homo sapiens
  Table A; Target 7131; HLA-A*02:01; ADAM7; ENSG00000069206; CTA
WLYSHVQGI

SEQ ID NO: 7132 - protein, 9 aa, Homo sapiens
  Table A; Target 7132; HLA-A*02:03; ADAM7; ENSG00000069206; CTA
WLYSHVQGI

SEQ ID NO: 7133 - protein, 9 aa, Homo sapiens
  Table A; Target 7133; HLA-A*02:04; ADAM7; ENSG00000069206; CTA
WLYSHVQGI

SEQ ID NO: 7134 - protein, 9 aa, Homo sapiens
  Table A; Target 7134; HLA-A*02:07; ADAM7; ENSG00000069206; CTA
WLYSHVQGI

SEQ ID NO: 7135 - protein, 9 aa, Homo sapiens
  Table A; Target 7135; HLA-B*13:02; ADAM7; ENSG00000069206; CTA
WLYSHVQGI

SEQ ID NO: 7136 - protein, 10 aa, Homo sapiens
  Table A; Target 7136; HLA-A*01:01; ADAM7; ENSG00000069206; CTA
WTHEDKIELY

SEQ ID NO: 7137 - protein, 10 aa, Homo sapiens
  Table A; Target 7137; HLA-C*03:03; ADAM7; ENSG00000069206; CTA
YCTGGELSSL

SEQ ID NO: 7138 - protein, 10 aa, Homo sapiens
  Table A; Target 7138; HLA-C*03:04; ADAM7; ENSG00000069206; CTA
YCTGGELSSL

SEQ ID NO: 7139 - protein, 9 aa, Homo sapiens
  Table A; Target 7139; HLA-B*40:02; ADAM7; ENSG00000069206; CTA
YDSAASIST

SEQ ID NO: 7140 - protein, 9 aa, Homo sapiens
  Table A; Target 7140; HLA-C*07:04; ADAM7; ENSG00000069206; CTA
YDSAASIST

SEQ ID NO: 7141 - protein, 10 aa, Homo sapiens
  Table A; Target 7141; HLA-B*40:02; ADAM7; ENSG00000069206; CTA
YDSAASISTC

SEQ ID NO: 7142 - protein, 10 aa, Homo sapiens
  Table A; Target 7142; HLA-C*12:03; ADAM7; ENSG00000069206; CTA
YDSAASISTC

SEQ ID NO: 7143 - protein, 9 aa, Homo sapiens
  Table A; Target 7143; HLA-A*30:01; ADAM7; ENSG00000069206; CTA
YEEELLYEI

SEQ ID NO: 7144 - protein, 9 aa, Homo sapiens
  Table A; Target 7144; HLA-B*13:02; ADAM7; ENSG00000069206; CTA
YEEELLYEI

SEQ ID NO: 7145 - protein, 9 aa, Homo sapiens
  Table A; Target 7145; HLA-B*18:01; ADAM7; ENSG00000069206; CTA
YEEELLYEI

SEQ ID NO: 7146 - protein, 9 aa, Homo sapiens
  Table A; Target 7146; HLA-B*38:01; ADAM7; ENSG00000069206; CTA
YEEELLYEI

SEQ ID NO: 7147 - protein, 9 aa, Homo sapiens
  Table A; Target 7147; HLA-B*40:01; ADAM7; ENSG00000069206; CTA
YEEELLYEI

SEQ ID NO: 7148 - protein, 9 aa, Homo sapiens
  Table A; Target 7148; HLA-B*49:01; ADAM7; ENSG00000069206; CTA
YEEELLYEI

SEQ ID NO: 7149 - protein, 11 aa, Homo sapiens
  Table A; Target 7149; HLA-A*30:01; ADAM7; ENSG00000069206; CTA
YEEELLYEIKL

SEQ ID NO: 7150 - protein, 11 aa, Homo sapiens
  Table A; Target 7150; HLA-B*40:01; ADAM7; ENSG00000069206; CTA
YEEELLYEIKL

SEQ ID NO: 7151 - protein, 10 aa, Homo sapiens
  Table A; Target 7151; HLA-B*40:02; ADAM7; ENSG00000069206; CTA
YEIKLNRKTL

SEQ ID NO: 7152 - protein, 10 aa, Homo sapiens
  Table A; Target 7152; HLA-C*03:04; ADAM7; ENSG00000069206; CTA
YGANYSCTEL

SEQ ID NO: 7153 - protein, 9 aa, Homo sapiens
  Table A; Target 7153; HLA-A*02:07; ADAM7; ENSG00000069206; CTA
YHDSTDIGL

SEQ ID NO: 7154 - protein, 9 aa, Homo sapiens
  Table A; Target 7154; HLA-B*27:05; ADAM7; ENSG00000069206; CTA
YHDSTDIGL

SEQ ID NO: 7155 - protein, 9 aa, Homo sapiens
  Table A; Target 7155; HLA-B*35:03; ADAM7; ENSG00000069206; CTA
YHDSTDIGL

SEQ ID NO: 7156 - protein, 9 aa, Homo sapiens
  Table A; Target 7156; HLA-B*38:01; ADAM7; ENSG00000069206; CTA
YHDSTDIGL

SEQ ID NO: 7157 - protein, 9 aa, Homo sapiens
  Table A; Target 7157; HLA-B*39:01; ADAM7; ENSG00000069206; CTA
YHDSTDIGL

SEQ ID NO: 7158 - protein, 9 aa, Homo sapiens
  Table A; Target 7158; HLA-B*40:01; ADAM7; ENSG00000069206; CTA
YHDSTDIGL

SEQ ID NO: 7159 - protein, 9 aa, Homo sapiens
  Table A; Target 7159; HLA-B*55:01; ADAM7; ENSG00000069206; CTA
YHDSTDIGL

SEQ ID NO: 7160 - protein, 9 aa, Homo sapiens
  Table A; Target 7160; HLA-C*05:01; ADAM7; ENSG00000069206; CTA
YHDSTDIGL

SEQ ID NO: 7161 - protein, 9 aa, Homo sapiens
  Table A; Target 7161; HLA-C*07:04; ADAM7; ENSG00000069206; CTA
YHDSTDIGL

SEQ ID NO: 7162 - protein, 10 aa, Homo sapiens
  Table A; Target 7162; HLA-B*38:01; ADAM7; ENSG00000069206; CTA
YHDSTDIGLV

SEQ ID NO: 7163 - protein, 10 aa, Homo sapiens
  Table A; Target 7163; HLA-B*39:01; ADAM7; ENSG00000069206; CTA
YHDSTDIGLV

SEQ ID NO: 7164 - protein, 11 aa, Homo sapiens
  Table A; Target 7164; HLA-B*38:01; ADAM7; ENSG00000069206; CTA
YHDSTDIGLVA

SEQ ID NO: 7165 - protein, 8 aa, Homo sapiens
  Table A; Target 7165; HLA-A*01:01; ADAM7; ENSG00000069206; CTA
YLIEPVKY

SEQ ID NO: 7166 - protein, 8 aa, Homo sapiens
  Table A; Target 7166; HLA-A*25:01; ADAM7; ENSG00000069206; CTA
YLIEPVKY

SEQ ID NO: 7167 - protein, 8 aa, Homo sapiens
  Table A; Target 7167; HLA-A*26:01; ADAM7; ENSG00000069206; CTA
YLIEPVKY

SEQ ID NO: 7168 - protein, 8 aa, Homo sapiens
  Table A; Target 7168; HLA-A*29:02; ADAM7; ENSG00000069206; CTA
YLIEPVKY

SEQ ID NO: 7169 - protein, 8 aa, Homo sapiens
  Table A; Target 7169; HLA-A*30:02; ADAM7; ENSG00000069206; CTA
YLIEPVKY

SEQ ID NO: 7170 - protein, 8 aa, Homo sapiens
  Table A; Target 7170; HLA-A*32:01; ADAM7; ENSG00000069206; CTA
YLIEPVKY

SEQ ID NO: 7171 - protein, 8 aa, Homo sapiens
  Table A; Target 7171; HLA-B*08:01; ADAM7; ENSG00000069206; CTA
YLIEPVKY

SEQ ID NO: 7172 - protein, 8 aa, Homo sapiens
  Table A; Target 7172; HLA-B*13:02; ADAM7; ENSG00000069206; CTA
YLIEPVKY

SEQ ID NO: 7173 - protein, 8 aa, Homo sapiens
  Table A; Target 7173; HLA-B*15:01; ADAM7; ENSG00000069206; CTA
YLIEPVKY

SEQ ID NO: 7174 - protein, 8 aa, Homo sapiens
  Table A; Target 7174; HLA-B*15:03; ADAM7; ENSG00000069206; CTA
YLIEPVKY

SEQ ID NO: 7175 - protein, 8 aa, Homo sapiens
  Table A; Target 7175; HLA-B*18:01; ADAM7; ENSG00000069206; CTA
YLIEPVKY

SEQ ID NO: 7176 - protein, 8 aa, Homo sapiens
  Table A; Target 7176; HLA-B*37:01; ADAM7; ENSG00000069206; CTA
YLIEPVKY

SEQ ID NO: 7177 - protein, 8 aa, Homo sapiens
  Table A; Target 7177; HLA-B*39:01; ADAM7; ENSG00000069206; CTA
YLIEPVKY

SEQ ID NO: 7178 - protein, 8 aa, Homo sapiens
  Table A; Target 7178; HLA-B*46:01; ADAM7; ENSG00000069206; CTA
YLIEPVKY

SEQ ID NO: 7179 - protein, 8 aa, Homo sapiens
  Table A; Target 7179; HLA-B*58:01; ADAM7; ENSG00000069206; CTA
YLIEPVKY

SEQ ID NO: 7180 - protein, 8 aa, Homo sapiens
  Table A; Target 7180; HLA-C*02:02; ADAM7; ENSG00000069206; CTA
YLIEPVKY

SEQ ID NO: 7181 - protein, 8 aa, Homo sapiens
  Table A; Target 7181; HLA-C*03:03; ADAM7; ENSG00000069206; CTA
YLIEPVKY

SEQ ID NO: 7182 - protein, 8 aa, Homo sapiens
  Table A; Target 7182; HLA-C*04:01; ADAM7; ENSG00000069206; CTA
YLIEPVKY

SEQ ID NO: 7183 - protein, 8 aa, Homo sapiens
  Table A; Target 7183; HLA-C*05:01; ADAM7; ENSG00000069206; CTA
YLIEPVKY

SEQ ID NO: 7184 - protein, 8 aa, Homo sapiens
  Table A; Target 7184; HLA-C*07:01; ADAM7; ENSG00000069206; CTA
YLIEPVKY

SEQ ID NO: 7185 - protein, 8 aa, Homo sapiens
  Table A; Target 7185; HLA-C*07:04; ADAM7; ENSG00000069206; CTA
YLIEPVKY

SEQ ID NO: 7186 - protein, 8 aa, Homo sapiens
  Table A; Target 7186; HLA-C*12:03; ADAM7; ENSG00000069206; CTA
YLIEPVKY

SEQ ID NO: 7187 - protein, 8 aa, Homo sapiens
  Table A; Target 7187; HLA-C*14:02; ADAM7; ENSG00000069206; CTA
YLIEPVKY

SEQ ID NO: 7188 - protein, 8 aa, Homo sapiens
  Table A; Target 7188; HLA-C*16:01; ADAM7; ENSG00000069206; CTA
YLIEPVKY

SEQ ID NO: 7189 - protein, 8 aa, Homo sapiens
  Table A; Target 7189; HLA-C*16:02; ADAM7; ENSG00000069206; CTA
YLIEPVKY

SEQ ID NO: 7190 - protein, 9 aa, Homo sapiens
  Table A; Target 7190; HLA-B*08:01; ADAM7; ENSG00000069206; CTA
YLKDYKPTC

SEQ ID NO: 7191 - protein, 11 aa, Homo sapiens
  Table A; Target 7191; HLA-A*29:02; ADAM7; ENSG00000069206; CTA
YNLRVPYGANY

SEQ ID NO: 7192 - protein, 9 aa, Homo sapiens
  Table A; Target 7192; HLA-A*01:01; ADAM7; ENSG00000069206; CTA
YQGSIVHEY

SEQ ID NO: 7193 - protein, 9 aa, Homo sapiens
  Table A; Target 7193; HLA-A*03:02; ADAM7; ENSG00000069206; CTA
YQGSIVHEY

SEQ ID NO: 7194 - protein, 9 aa, Homo sapiens
  Table A; Target 7194; HLA-A*23:01; ADAM7; ENSG00000069206; CTA
YQGSIVHEY

SEQ ID NO: 7195 - protein, 9 aa, Homo sapiens
  Table A; Target 7195; HLA-A*24:02; ADAM7; ENSG00000069206; CTA
YQGSIVHEY

SEQ ID NO: 7196 - protein, 9 aa, Homo sapiens
  Table A; Target 7196; HLA-A*25:01; ADAM7; ENSG00000069206; CTA
YQGSIVHEY

SEQ ID NO: 7197 - protein, 9 aa, Homo sapiens
  Table A; Target 7197; HLA-A*26:01; ADAM7; ENSG00000069206; CTA
YQGSIVHEY

SEQ ID NO: 7198 - protein, 9 aa, Homo sapiens
  Table A; Target 7198; HLA-A*29:02; ADAM7; ENSG00000069206; CTA
YQGSIVHEY

SEQ ID NO: 7199 - protein, 9 aa, Homo sapiens
  Table A; Target 7199; HLA-A*30:01; ADAM7; ENSG00000069206; CTA
YQGSIVHEY

SEQ ID NO: 7200 - protein, 9 aa, Homo sapiens
  Table A; Target 7200; HLA-A*30:02; ADAM7; ENSG00000069206; CTA
YQGSIVHEY

SEQ ID NO: 7201 - protein, 9 aa, Homo sapiens
  Table A; Target 7201; HLA-A*32:01; ADAM7; ENSG00000069206; CTA
YQGSIVHEY

SEQ ID NO: 7202 - protein, 9 aa, Homo sapiens
  Table A; Target 7202; HLA-A*33:03; ADAM7; ENSG00000069206; CTA
YQGSIVHEY

SEQ ID NO: 7203 - protein, 9 aa, Homo sapiens
  Table A; Target 7203; HLA-A*68:01; ADAM7; ENSG00000069206; CTA
YQGSIVHEY

SEQ ID NO: 7204 - protein, 9 aa, Homo sapiens
  Table A; Target 7204; HLA-A*68:02; ADAM7; ENSG00000069206; CTA
YQGSIVHEY

SEQ ID NO: 7205 - protein, 9 aa, Homo sapiens
  Table A; Target 7205; HLA-B*13:02; ADAM7; ENSG00000069206; CTA
YQGSIVHEY

SEQ ID NO: 7206 - protein, 9 aa, Homo sapiens
  Table A; Target 7206; HLA-B*15:03; ADAM7; ENSG00000069206; CTA
YQGSIVHEY

SEQ ID NO: 7207 - protein, 9 aa, Homo sapiens
  Table A; Target 7207; HLA-B*18:01; ADAM7; ENSG00000069206; CTA
YQGSIVHEY

SEQ ID NO: 7208 - protein, 9 aa, Homo sapiens
  Table A; Target 7208; HLA-B*27:02; ADAM7; ENSG00000069206; CTA
YQGSIVHEY

SEQ ID NO: 7209 - protein, 9 aa, Homo sapiens
  Table A; Target 7209; HLA-B*27:05; ADAM7; ENSG00000069206; CTA
YQGSIVHEY

SEQ ID NO: 7210 - protein, 9 aa, Homo sapiens
  Table A; Target 7210; HLA-B*35:01; ADAM7; ENSG00000069206; CTA
YQGSIVHEY

SEQ ID NO: 7211 - protein, 9 aa, Homo sapiens
  Table A; Target 7211; HLA-B*37:01; ADAM7; ENSG00000069206; CTA
YQGSIVHEY

SEQ ID NO: 7212 - protein, 9 aa, Homo sapiens
  Table A; Target 7212; HLA-B*38:01; ADAM7; ENSG00000069206; CTA
YQGSIVHEY

SEQ ID NO: 7213 - protein, 9 aa, Homo sapiens
  Table A; Target 7213; HLA-B*39:01; ADAM7; ENSG00000069206; CTA
YQGSIVHEY

SEQ ID NO: 7214 - protein, 9 aa, Homo sapiens
  Table A; Target 7214; HLA-B*40:01; ADAM7; ENSG00000069206; CTA
YQGSIVHEY

SEQ ID NO: 7215 - protein, 9 aa, Homo sapiens
  Table A; Target 7215; HLA-B*44:02; ADAM7; ENSG00000069206; CTA
YQGSIVHEY

SEQ ID NO: 7216 - protein, 9 aa, Homo sapiens
  Table A; Target 7216; HLA-B*44:03; ADAM7; ENSG00000069206; CTA
YQGSIVHEY

SEQ ID NO: 7217 - protein, 9 aa, Homo sapiens
  Table A; Target 7217; HLA-B*46:01; ADAM7; ENSG00000069206; CTA
YQGSIVHEY

SEQ ID NO: 7218 - protein, 9 aa, Homo sapiens
  Table A; Target 7218; HLA-B*57:01; ADAM7; ENSG00000069206; CTA
YQGSIVHEY

SEQ ID NO: 7219 - protein, 9 aa, Homo sapiens
  Table A; Target 7219; HLA-B*58:01; ADAM7; ENSG00000069206; CTA
YQGSIVHEY

SEQ ID NO: 7220 - protein, 9 aa, Homo sapiens
  Table A; Target 7220; HLA-C*01:02; ADAM7; ENSG00000069206; CTA
YQGSIVHEY

SEQ ID NO: 7221 - protein, 9 aa, Homo sapiens
  Table A; Target 7221; HLA-C*02:02; ADAM7; ENSG00000069206; CTA
YQGSIVHEY

SEQ ID NO: 7222 - protein, 9 aa, Homo sapiens
  Table A; Target 7222; HLA-C*03:03; ADAM7; ENSG00000069206; CTA
YQGSIVHEY

SEQ ID NO: 7223 - protein, 9 aa, Homo sapiens
  Table A; Target 7223; HLA-C*03:04; ADAM7; ENSG00000069206; CTA
YQGSIVHEY

SEQ ID NO: 7224 - protein, 9 aa, Homo sapiens
  Table A; Target 7224; HLA-C*04:01; ADAM7; ENSG00000069206; CTA
YQGSIVHEY

SEQ ID NO: 7225 - protein, 9 aa, Homo sapiens
  Table A; Target 7225; HLA-C*06:02; ADAM7; ENSG00000069206; CTA
YQGSIVHEY

SEQ ID NO: 7226 - protein, 9 aa, Homo sapiens
  Table A; Target 7226; HLA-C*07:01; ADAM7; ENSG00000069206; CTA
YQGSIVHEY

SEQ ID NO: 7227 - protein, 9 aa, Homo sapiens
  Table A; Target 7227; HLA-C*07:02; ADAM7; ENSG00000069206; CTA
YQGSIVHEY

SEQ ID NO: 7228 - protein, 9 aa, Homo sapiens
  Table A; Target 7228; HLA-C*07:04; ADAM7; ENSG00000069206; CTA
YQGSIVHEY

SEQ ID NO: 7229 - protein, 9 aa, Homo sapiens
  Table A; Target 7229; HLA-C*07:06; ADAM7; ENSG00000069206; CTA
YQGSIVHEY

SEQ ID NO: 7230 - protein, 9 aa, Homo sapiens
  Table A; Target 7230; HLA-C*12:03; ADAM7; ENSG00000069206; CTA
YQGSIVHEY

SEQ ID NO: 7231 - protein, 9 aa, Homo sapiens
  Table A; Target 7231; HLA-C*14:02; ADAM7; ENSG00000069206; CTA
YQGSIVHEY

SEQ ID NO: 7232 - protein, 9 aa, Homo sapiens
  Table A; Target 7232; HLA-C*16:01; ADAM7; ENSG00000069206; CTA
YQGSIVHEY

SEQ ID NO: 7233 - protein, 9 aa, Homo sapiens
  Table A; Target 7233; HLA-C*16:02; ADAM7; ENSG00000069206; CTA
YQGSIVHEY

SEQ ID NO: 7234 - protein, 9 aa, Homo sapiens
  Table A; Target 7234; HLA-C*16:04; ADAM7; ENSG00000069206; CTA
YQGSIVHEY

SEQ ID NO: 7235 - protein, 10 aa, Homo sapiens
  Table A; Target 7235; HLA-B*27:02; ADAM7; ENSG00000069206; CTA
YSCTELNFTR

SEQ ID NO: 7236 - protein, 8 aa, Homo sapiens
  Table A; Target 7236; HLA-A*01:01; ADAM7; ENSG00000069206; CTA
YSDEGEHL

SEQ ID NO: 7237 - protein, 8 aa, Homo sapiens
  Table A; Target 7237; HLA-C*03:03; ADAM7; ENSG00000069206; CTA
YSDEGEHL

SEQ ID NO: 7238 - protein, 8 aa, Homo sapiens
  Table A; Target 7238; HLA-C*03:04; ADAM7; ENSG00000069206; CTA
YSDEGEHL

SEQ ID NO: 7239 - protein, 8 aa, Homo sapiens
  Table A; Target 7239; HLA-C*05:01; ADAM7; ENSG00000069206; CTA
YSDEGEHL

SEQ ID NO: 7240 - protein, 9 aa, Homo sapiens
  Table A; Target 7240; HLA-A*01:01; ADAM7; ENSG00000069206; CTA
YSDEGEHLV

SEQ ID NO: 7241 - protein, 9 aa, Homo sapiens
  Table A; Target 7241; HLA-A*02:01; ADAM7; ENSG00000069206; CTA
YSDEGEHLV

SEQ ID NO: 7242 - protein, 9 aa, Homo sapiens
  Table A; Target 7242; HLA-A*02:07; ADAM7; ENSG00000069206; CTA
YSDEGEHLV

SEQ ID NO: 7243 - protein, 9 aa, Homo sapiens
  Table A; Target 7243; HLA-B*38:01; ADAM7; ENSG00000069206; CTA
YSDEGEHLV

SEQ ID NO: 7244 - protein, 9 aa, Homo sapiens
  Table A; Target 7244; HLA-B*55:01; ADAM7; ENSG00000069206; CTA
YSDEGEHLV

SEQ ID NO: 7245 - protein, 9 aa, Homo sapiens
  Table A; Target 7245; HLA-C*03:03; ADAM7; ENSG00000069206; CTA
YSDEGEHLV

SEQ ID NO: 7246 - protein, 9 aa, Homo sapiens
  Table A; Target 7246; HLA-C*05:01; ADAM7; ENSG00000069206; CTA
YSDEGEHLV

SEQ ID NO: 7247 - protein, 9 aa, Homo sapiens
  Table A; Target 7247; HLA-C*16:02; ADAM7; ENSG00000069206; CTA
YSDEGEHLV

SEQ ID NO: 7248 - protein, 10 aa, Homo sapiens
  Table A; Target 7248; HLA-A*01:01; ADAM7; ENSG00000069206; CTA
YSDEGEHLVF

SEQ ID NO: 7249 - protein, 10 aa, Homo sapiens
  Table A; Target 7249; HLA-A*02:07; ADAM7; ENSG00000069206; CTA
YSDEGEHLVF

SEQ ID NO: 7250 - protein, 10 aa, Homo sapiens
  Table A; Target 7250; HLA-B*27:02; ADAM7; ENSG00000069206; CTA
YSDEGEHLVF

SEQ ID NO: 7251 - protein, 10 aa, Homo sapiens
  Table A; Target 7251; HLA-B*35:01; ADAM7; ENSG00000069206; CTA
YSDEGEHLVF

SEQ ID NO: 7252 - protein, 10 aa, Homo sapiens
  Table A; Target 7252; HLA-B*38:01; ADAM7; ENSG00000069206; CTA
YSDEGEHLVF

SEQ ID NO: 7253 - protein, 10 aa, Homo sapiens
  Table A; Target 7253; HLA-B*57:01; ADAM7; ENSG00000069206; CTA
YSDEGEHLVF

SEQ ID NO: 7254 - protein, 10 aa, Homo sapiens
  Table A; Target 7254; HLA-B*58:01; ADAM7; ENSG00000069206; CTA
YSDEGEHLVF

SEQ ID NO: 7255 - protein, 10 aa, Homo sapiens
  Table A; Target 7255; HLA-C*02:02; ADAM7; ENSG00000069206; CTA
YSDEGEHLVF

SEQ ID NO: 7256 - protein, 10 aa, Homo sapiens
  Table A; Target 7256; HLA-C*03:03; ADAM7; ENSG00000069206; CTA
YSDEGEHLVF

SEQ ID NO: 7257 - protein, 10 aa, Homo sapiens
  Table A; Target 7257; HLA-C*03:04; ADAM7; ENSG00000069206; CTA
YSDEGEHLVF

SEQ ID NO: 7258 - protein, 10 aa, Homo sapiens
  Table A; Target 7258; HLA-C*05:01; ADAM7; ENSG00000069206; CTA
YSDEGEHLVF

SEQ ID NO: 7259 - protein, 10 aa, Homo sapiens
  Table A; Target 7259; HLA-C*16:04; ADAM7; ENSG00000069206; CTA
YSDEGEHLVF

SEQ ID NO: 7260 - protein, 11 aa, Homo sapiens
  Table A; Target 7260; HLA-A*01:01; ADAM7; ENSG00000069206; CTA
YSDEGEHLVFK

SEQ ID NO: 7261 - protein, 11 aa, Homo sapiens
  Table A; Target 7261; HLA-A*11:01; ADAM7; ENSG00000069206; CTA
YSDEGEHLVFK

SEQ ID NO: 7262 - protein, 9 aa, Homo sapiens
  Table A; Target 7262; HLA-A*01:01; ADAM7; ENSG00000069206; CTA
YSETFYSMK

SEQ ID NO: 7263 - protein, 9 aa, Homo sapiens
  Table A; Target 7263; HLA-A*01:01; ADAM7; ENSG00000069206; CTA
YSHVQGISY

SEQ ID NO: 7264 - protein, 9 aa, Homo sapiens
  Table A; Target 7264; HLA-A*25:01; ADAM7; ENSG00000069206; CTA
YSHVQGISY

SEQ ID NO: 7265 - protein, 9 aa, Homo sapiens
  Table A; Target 7265; HLA-A*26:01; ADAM7; ENSG00000069206; CTA
YSHVQGISY

SEQ ID NO: 7266 - protein, 9 aa, Homo sapiens
  Table A; Target 7266; HLA-A*29:02; ADAM7; ENSG00000069206; CTA
YSHVQGISY

SEQ ID NO: 7267 - protein, 9 aa, Homo sapiens
  Table A; Target 7267; HLA-A*30:02; ADAM7; ENSG00000069206; CTA
YSHVQGISY

SEQ ID NO: 7268 - protein, 9 aa, Homo sapiens
  Table A; Target 7268; HLA-A*32:01; ADAM7; ENSG00000069206; CTA
YSHVQGISY

SEQ ID NO: 7269 - protein, 9 aa, Homo sapiens
  Table A; Target 7269; HLA-B*15:01; ADAM7; ENSG00000069206; CTA
YSHVQGISY

SEQ ID NO: 7270 - protein, 9 aa, Homo sapiens
  Table A; Target 7270; HLA-B*15:03; ADAM7; ENSG00000069206; CTA
YSHVQGISY

SEQ ID NO: 7271 - protein, 9 aa, Homo sapiens
  Table A; Target 7271; HLA-B*18:01; ADAM7; ENSG00000069206; CTA
YSHVQGISY

SEQ ID NO: 7272 - protein, 9 aa, Homo sapiens
  Table A; Target 7272; HLA-B*35:01; ADAM7; ENSG00000069206; CTA
YSHVQGISY

SEQ ID NO: 7273 - protein, 9 aa, Homo sapiens
  Table A; Target 7273; HLA-B*46:01; ADAM7; ENSG00000069206; CTA
YSHVQGISY

SEQ ID NO: 7274 - protein, 9 aa, Homo sapiens
  Table A; Target 7274; HLA-B*57:01; ADAM7; ENSG00000069206; CTA
YSHVQGISY

SEQ ID NO: 7275 - protein, 9 aa, Homo sapiens
  Table A; Target 7275; HLA-B*58:01; ADAM7; ENSG00000069206; CTA
YSHVQGISY

SEQ ID NO: 7276 - protein, 9 aa, Homo sapiens
  Table A; Target 7276; HLA-C*01:02; ADAM7; ENSG00000069206; CTA
YSHVQGISY

SEQ ID NO: 7277 - protein, 9 aa, Homo sapiens
  Table A; Target 7277; HLA-C*02:02; ADAM7; ENSG00000069206; CTA
YSHVQGISY

SEQ ID NO: 7278 - protein, 9 aa, Homo sapiens
  Table A; Target 7278; HLA-C*03:03; ADAM7; ENSG00000069206; CTA
YSHVQGISY

SEQ ID NO: 7279 - protein, 9 aa, Homo sapiens
  Table A; Target 7279; HLA-C*03:04; ADAM7; ENSG00000069206; CTA
YSHVQGISY

SEQ ID NO: 7280 - protein, 9 aa, Homo sapiens
  Table A; Target 7280; HLA-C*07:04; ADAM7; ENSG00000069206; CTA
YSHVQGISY

SEQ ID NO: 7281 - protein, 9 aa, Homo sapiens
  Table A; Target 7281; HLA-C*12:03; ADAM7; ENSG00000069206; CTA
YSHVQGISY

SEQ ID NO: 7282 - protein, 9 aa, Homo sapiens
  Table A; Target 7282; HLA-C*14:02; ADAM7; ENSG00000069206; CTA
YSHVQGISY

SEQ ID NO: 7283 - protein, 9 aa, Homo sapiens
  Table A; Target 7283; HLA-C*16:01; ADAM7; ENSG00000069206; CTA
YSHVQGISY

SEQ ID NO: 7284 - protein, 9 aa, Homo sapiens
  Table A; Target 7284; HLA-C*16:02; ADAM7; ENSG00000069206; CTA
YSHVQGISY

SEQ ID NO: 7285 - protein, 9 aa, Homo sapiens
  Table A; Target 7285; HLA-C*16:04; ADAM7; ENSG00000069206; CTA
YSHVQGISY

SEQ ID NO: 7286 - protein, 8 aa, Homo sapiens
  Table A; Target 7286; HLA-A*32:01; ADAM7; ENSG00000069206; CTA
YSMKGEAF

SEQ ID NO: 7287 - protein, 8 aa, Homo sapiens
  Table A; Target 7287; HLA-B*08:01; ADAM7; ENSG00000069206; CTA
YSMKGEAF

SEQ ID NO: 7288 - protein, 8 aa, Homo sapiens
  Table A; Target 7288; HLA-B*15:01; ADAM7; ENSG00000069206; CTA
YSMKGEAF

SEQ ID NO: 7289 - protein, 8 aa, Homo sapiens
  Table A; Target 7289; HLA-B*15:03; ADAM7; ENSG00000069206; CTA
YSMKGEAF

SEQ ID NO: 7290 - protein, 8 aa, Homo sapiens
  Table A; Target 7290; HLA-B*18:01; ADAM7; ENSG00000069206; CTA
YSMKGEAF

SEQ ID NO: 7291 - protein, 8 aa, Homo sapiens
  Table A; Target 7291; HLA-B*37:01; ADAM7; ENSG00000069206; CTA
YSMKGEAF

SEQ ID NO: 7292 - protein, 8 aa, Homo sapiens
  Table A; Target 7292; HLA-B*39:01; ADAM7; ENSG00000069206; CTA
YSMKGEAF

SEQ ID NO: 7293 - protein, 8 aa, Homo sapiens
  Table A; Target 7293; HLA-B*40:02; ADAM7; ENSG00000069206; CTA
YSMKGEAF

SEQ ID NO: 7294 - protein, 8 aa, Homo sapiens
  Table A; Target 7294; HLA-B*46:01; ADAM7; ENSG00000069206; CTA
YSMKGEAF

SEQ ID NO: 7295 - protein, 8 aa, Homo sapiens
  Table A; Target 7295; HLA-B*57:01; ADAM7; ENSG00000069206; CTA
YSMKGEAF

SEQ ID NO: 7296 - protein, 8 aa, Homo sapiens
  Table A; Target 7296; HLA-B*58:01; ADAM7; ENSG00000069206; CTA
YSMKGEAF

SEQ ID NO: 7297 - protein, 8 aa, Homo sapiens
  Table A; Target 7297; HLA-C*03:03; ADAM7; ENSG00000069206; CTA
YSMKGEAF

SEQ ID NO: 7298 - protein, 8 aa, Homo sapiens
  Table A; Target 7298; HLA-C*03:04; ADAM7; ENSG00000069206; CTA
YSMKGEAF

SEQ ID NO: 7299 - protein, 8 aa, Homo sapiens
  Table A; Target 7299; HLA-C*05:01; ADAM7; ENSG00000069206; CTA
YSMKGEAF

SEQ ID NO: 7300 - protein, 8 aa, Homo sapiens
  Table A; Target 7300; HLA-C*14:02; ADAM7; ENSG00000069206; CTA
YSMKGEAF

SEQ ID NO: 7301 - protein, 8 aa, Homo sapiens
  Table A; Target 7301; HLA-C*16:01; ADAM7; ENSG00000069206; CTA
YSMKGEAF

SEQ ID NO: 7302 - protein, 10 aa, Homo sapiens
  Table A; Target 7302; HLA-A*11:01; ADAM7; ENSG00000069206; CTA
YSMKGEAFTR

SEQ ID NO: 7303 - protein, 10 aa, Homo sapiens
  Table A; Target 7303; HLA-A*31:01; ADAM7; ENSG00000069206; CTA
YSMKGEAFTR

SEQ ID NO: 7304 - protein, 10 aa, Homo sapiens
  Table A; Target 7304; HLA-A*33:01; ADAM7; ENSG00000069206; CTA
YSMKGEAFTR

SEQ ID NO: 7305 - protein, 10 aa, Homo sapiens
  Table A; Target 7305; HLA-A*33:03; ADAM7; ENSG00000069206; CTA
YSMKGEAFTR

SEQ ID NO: 7306 - protein, 10 aa, Homo sapiens
  Table A; Target 7306; HLA-A*68:01; ADAM7; ENSG00000069206; CTA
YSMKGEAFTR

SEQ ID NO: 7307 - protein, 10 aa, Homo sapiens
  Table A; Target 7307; HLA-B*27:02; ADAM7; ENSG00000069206; CTA
YSMKGEAFTR

SEQ ID NO: 7308 - protein, 10 aa, Homo sapiens
  Table A; Target 7308; HLA-B*57:01; ADAM7; ENSG00000069206; CTA
YSMKGEAFTR

SEQ ID NO: 7309 - protein, 10 aa, Homo sapiens
  Table A; Target 7309; HLA-C*07:06; ADAM7; ENSG00000069206; CTA
YSMKGEAFTR

SEQ ID NO: 7310 - protein, 8 aa, Homo sapiens
  Table A; Target 7310; HLA-A*23:01; ADAM7; ENSG00000069206; CTA
YSNIETTL

SEQ ID NO: 7311 - protein, 8 aa, Homo sapiens
  Table A; Target 7311; HLA-B*08:01; ADAM7; ENSG00000069206; CTA
YSNIETTL

SEQ ID NO: 7312 - protein, 8 aa, Homo sapiens
  Table A; Target 7312; HLA-B*46:01; ADAM7; ENSG00000069206; CTA
YSNIETTL

SEQ ID NO: 7313 - protein, 8 aa, Homo sapiens
  Table A; Target 7313; HLA-B*58:01; ADAM7; ENSG00000069206; CTA
YSNIETTL

SEQ ID NO: 7314 - protein, 8 aa, Homo sapiens
  Table A; Target 7314; HLA-C*01:02; ADAM7; ENSG00000069206; CTA
YSNIETTL

SEQ ID NO: 7315 - protein, 8 aa, Homo sapiens
  Table A; Target 7315; HLA-C*03:03; ADAM7; ENSG00000069206; CTA
YSNIETTL

SEQ ID NO: 7316 - protein, 8 aa, Homo sapiens
  Table A; Target 7316; HLA-C*03:04; ADAM7; ENSG00000069206; CTA
YSNIETTL

SEQ ID NO: 7317 - protein, 8 aa, Homo sapiens
  Table A; Target 7317; HLA-C*05:01; ADAM7; ENSG00000069206; CTA
YSNIETTL

SEQ ID NO: 7318 - protein, 8 aa, Homo sapiens
  Table A; Target 7318; HLA-C*07:04; ADAM7; ENSG00000069206; CTA
YSNIETTL

SEQ ID NO: 7319 - protein, 8 aa, Homo sapiens
  Table A; Target 7319; HLA-C*14:02; ADAM7; ENSG00000069206; CTA
YSNIETTL

SEQ ID NO: 7320 - protein, 8 aa, Homo sapiens
  Table A; Target 7320; HLA-C*16:01; ADAM7; ENSG00000069206; CTA
YSNIETTL

SEQ ID NO: 7321 - protein, 9 aa, Homo sapiens
  Table A; Target 7321; HLA-A*01:01; ADAM7; ENSG00000069206; CTA
YSNIETTLL

SEQ ID NO: 7322 - protein, 9 aa, Homo sapiens
  Table A; Target 7322; HLA-B*38:01; ADAM7; ENSG00000069206; CTA
YSNIETTLL

SEQ ID NO: 7323 - protein, 9 aa, Homo sapiens
  Table A; Target 7323; HLA-B*46:01; ADAM7; ENSG00000069206; CTA
YSNIETTLL

SEQ ID NO: 7324 - protein, 9 aa, Homo sapiens
  Table A; Target 7324; HLA-B*58:01; ADAM7; ENSG00000069206; CTA
YSNIETTLL

SEQ ID NO: 7325 - protein, 9 aa, Homo sapiens
  Table A; Target 7325; HLA-C*02:02; ADAM7; ENSG00000069206; CTA
YSNIETTLL

SEQ ID NO: 7326 - protein, 9 aa, Homo sapiens
  Table A; Target 7326; HLA-C*03:03; ADAM7; ENSG00000069206; CTA
YSNIETTLL

SEQ ID NO: 7327 - protein, 9 aa, Homo sapiens
  Table A; Target 7327; HLA-C*03:04; ADAM7; ENSG00000069206; CTA
YSNIETTLL

SEQ ID NO: 7328 - protein, 9 aa, Homo sapiens
  Table A; Target 7328; HLA-C*05:01; ADAM7; ENSG00000069206; CTA
YSNIETTLL

SEQ ID NO: 7329 - protein, 9 aa, Homo sapiens
  Table A; Target 7329; HLA-C*07:04; ADAM7; ENSG00000069206; CTA
YSNIETTLL

SEQ ID NO: 7330 - protein, 10 aa, Homo sapiens
  Table A; Target 7330; HLA-B*27:02; ADAM7; ENSG00000069206; CTA
YSNIETTLLR

SEQ ID NO: 7331 - protein, 11 aa, Homo sapiens
  Table A; Target 7331; HLA-A*01:01; ADAM7; ENSG00000069206; CTA
YSNIETTLLRF

SEQ ID NO: 7332 - protein, 11 aa, Homo sapiens
  Table A; Target 7332; HLA-B*57:01; ADAM7; ENSG00000069206; CTA
YSNIETTLLRF

SEQ ID NO: 7333 - protein, 9 aa, Homo sapiens
  Table A; Target 7333; HLA-A*68:02; ADAM7; ENSG00000069206; CTA
YSTSIIKDL

SEQ ID NO: 7334 - protein, 9 aa, Homo sapiens
  Table A; Target 7334; HLA-B*07:02; ADAM7; ENSG00000069206; CTA
YSTSIIKDL

SEQ ID NO: 7335 - protein, 9 aa, Homo sapiens
  Table A; Target 7335; HLA-B*27:02; ADAM7; ENSG00000069206; CTA
YSTSIIKDL

SEQ ID NO: 7336 - protein, 9 aa, Homo sapiens
  Table A; Target 7336; HLA-B*58:01; ADAM7; ENSG00000069206; CTA
YSTSIIKDL

SEQ ID NO: 7337 - protein, 9 aa, Homo sapiens
  Table A; Target 7337; HLA-C*02:02; ADAM7; ENSG00000069206; CTA
YSTSIIKDL

SEQ ID NO: 7338 - protein, 9 aa, Homo sapiens
  Table A; Target 7338; HLA-C*03:03; ADAM7; ENSG00000069206; CTA
YSTSIIKDL

SEQ ID NO: 7339 - protein, 9 aa, Homo sapiens
  Table A; Target 7339; HLA-C*03:04; ADAM7; ENSG00000069206; CTA
YSTSIIKDL

SEQ ID NO: 7340 - protein, 9 aa, Homo sapiens
  Table A; Target 7340; HLA-C*06:02; ADAM7; ENSG00000069206; CTA
YSTSIIKDL

SEQ ID NO: 7341 - protein, 9 aa, Homo sapiens
  Table A; Target 7341; HLA-C*07:04; ADAM7; ENSG00000069206; CTA
YSTSIIKDL

SEQ ID NO: 7342 - protein, 9 aa, Homo sapiens
  Table A; Target 7342; HLA-C*12:03; ADAM7; ENSG00000069206; CTA
YSTSIIKDL

SEQ ID NO: 7343 - protein, 9 aa, Homo sapiens
  Table A; Target 7343; HLA-C*16:01; ADAM7; ENSG00000069206; CTA
YSTSIIKDL

SEQ ID NO: 7344 - protein, 9 aa, Homo sapiens
  Table A; Target 7344; HLA-C*16:02; ADAM7; ENSG00000069206; CTA
YSTSIIKDL

SEQ ID NO: 7345 - protein, 9 aa, Homo sapiens
  Table A; Target 7345; HLA-C*16:04; ADAM7; ENSG00000069206; CTA
YSTSIIKDL

SEQ ID NO: 7346 - protein, 10 aa, Homo sapiens
  Table A; Target 7346; HLA-A*68:02; ADAM7; ENSG00000069206; CTA
YSTSIIKDLL

SEQ ID NO: 7347 - protein, 10 aa, Homo sapiens
  Table A; Target 7347; HLA-A*23:01; ADAM7; ENSG00000069206; CTA
YYSTSIIKDL

SEQ ID NO: 7348 - protein, 10 aa, Homo sapiens
  Table A; Target 7348; HLA-A*24:02; ADAM7; ENSG00000069206; CTA
YYSTSIIKDL

SEQ ID NO: 7349 - protein, 11 aa, Homo sapiens
  Table A; Target 7349; HLA-A*24:02; ADAM7; ENSG00000069206; CTA
YYSTSIIKDLL

SEQ ID NO: 7350 - protein, 9 aa, Homo sapiens
  Table A; Target 7350; HLA-A*01:01; AFP; ENSG00000081051; TAA
AADIIIGHL

SEQ ID NO: 7351 - protein, 9 aa, Homo sapiens
  Table A; Target 7351; HLA-A*11:01; AFP; ENSG00000081051; TAA
AADIIIGHL

SEQ ID NO: 7352 - protein, 9 aa, Homo sapiens
  Table A; Target 7352; HLA-A*31:01; AFP; ENSG00000081051; TAA
AADIIIGHL

SEQ ID NO: 7353 - protein, 9 aa, Homo sapiens
  Table A; Target 7353; HLA-B*27:05; AFP; ENSG00000081051; TAA
AADIIIGHL

SEQ ID NO: 7354 - protein, 9 aa, Homo sapiens
  Table A; Target 7354; HLA-B*58:01; AFP; ENSG00000081051; TAA
AADIIIGHL

SEQ ID NO: 7355 - protein, 9 aa, Homo sapiens
  Table A; Target 7355; HLA-C*03:04; AFP; ENSG00000081051; TAA
AADIIIGHL

SEQ ID NO: 7356 - protein, 9 aa, Homo sapiens
  Table A; Target 7356; HLA-C*04:01; AFP; ENSG00000081051; TAA
AADIIIGHL

SEQ ID NO: 7357 - protein, 9 aa, Homo sapiens
  Table A; Target 7357; HLA-C*07:06; AFP; ENSG00000081051; TAA
AADIIIGHL

SEQ ID NO: 7358 - protein, 9 aa, Homo sapiens
  Table A; Target 7358; HLA-C*16:02; AFP; ENSG00000081051; TAA
AADIIIGHL

SEQ ID NO: 7359 - protein, 9 aa, Homo sapiens
  Table A; Target 7359; HLA-C*16:04; AFP; ENSG00000081051; TAA
AADIIIGHL

SEQ ID NO: 7360 - protein, 8 aa, Homo sapiens
  Table A; Target 7360; HLA-B*07:02; AFP; ENSG00000081051; TAA
AATVTKEL

SEQ ID NO: 7361 - protein, 8 aa, Homo sapiens
  Table A; Target 7361; HLA-B*15:01; AFP; ENSG00000081051; TAA
AATVTKEL

SEQ ID NO: 7362 - protein, 8 aa, Homo sapiens
  Table A; Target 7362; HLA-B*15:03; AFP; ENSG00000081051; TAA
AATVTKEL

SEQ ID NO: 7363 - protein, 8 aa, Homo sapiens
  Table A; Target 7363; HLA-B*40:02; AFP; ENSG00000081051; TAA
AATVTKEL

SEQ ID NO: 7364 - protein, 8 aa, Homo sapiens
  Table A; Target 7364; HLA-C*02:02; AFP; ENSG00000081051; TAA
AATVTKEL

SEQ ID NO: 7365 - protein, 8 aa, Homo sapiens
  Table A; Target 7365; HLA-C*04:01; AFP; ENSG00000081051; TAA
AATVTKEL

SEQ ID NO: 7366 - protein, 8 aa, Homo sapiens
  Table A; Target 7366; HLA-C*06:02; AFP; ENSG00000081051; TAA
AATVTKEL

SEQ ID NO: 7367 - protein, 8 aa, Homo sapiens
  Table A; Target 7367; HLA-C*07:01; AFP; ENSG00000081051; TAA
AATVTKEL

SEQ ID NO: 7368 - protein, 8 aa, Homo sapiens
  Table A; Target 7368; HLA-C*07:02; AFP; ENSG00000081051; TAA
AATVTKEL

SEQ ID NO: 7369 - protein, 9 aa, Homo sapiens
  Table A; Target 7369; HLA-A*31:01; AFP; ENSG00000081051; TAA
AATVTKELR

SEQ ID NO: 7370 - protein, 9 aa, Homo sapiens
  Table A; Target 7370; HLA-A*33:01; AFP; ENSG00000081051; TAA
AATVTKELR

SEQ ID NO: 7371 - protein, 9 aa, Homo sapiens
  Table A; Target 7371; HLA-A*33:03; AFP; ENSG00000081051; TAA
AATVTKELR

SEQ ID NO: 7372 - protein, 9 aa, Homo sapiens
  Table A; Target 7372; HLA-B*57:01; AFP; ENSG00000081051; TAA
AATVTKELR

SEQ ID NO: 7373 - protein, 9 aa, Homo sapiens
  Table A; Target 7373; HLA-C*16:01; AFP; ENSG00000081051; TAA
AATVTKELR

SEQ ID NO: 7374 - protein, 9 aa, Homo sapiens
  Table A; Target 7374; HLA-C*16:02; AFP; ENSG00000081051; TAA
AATVTKELR

SEQ ID NO: 7375 - protein, 9 aa, Homo sapiens
  Table A; Target 7375; HLA-A*31:01; AFP; ENSG00000081051; TAA
ADFSGLLEK

SEQ ID NO: 7376 - protein, 9 aa, Homo sapiens
  Table A; Target 7376; HLA-A*33:01; AFP; ENSG00000081051; TAA
ADFSGLLEK

SEQ ID NO: 7377 - protein, 9 aa, Homo sapiens
  Table A; Target 7377; HLA-A*68:01; AFP; ENSG00000081051; TAA
ADFSGLLEK

SEQ ID NO: 7378 - protein, 9 aa, Homo sapiens
  Table A; Target 7378; HLA-B*37:01; AFP; ENSG00000081051; TAA
ADFSGLLEK

SEQ ID NO: 7379 - protein, 9 aa, Homo sapiens
  Table A; Target 7379; HLA-B*40:02; AFP; ENSG00000081051; TAA
ADFSGLLEK

SEQ ID NO: 7380 - protein, 9 aa, Homo sapiens
  Table A; Target 7380; HLA-C*04:01; AFP; ENSG00000081051; TAA
ADFSGLLEK

SEQ ID NO: 7381 - protein, 9 aa, Homo sapiens
  Table A; Target 7381; HLA-C*06:02; AFP; ENSG00000081051; TAA
ADFSGLLEK

SEQ ID NO: 7382 - protein, 9 aa, Homo sapiens
  Table A; Target 7382; HLA-C*07:01; AFP; ENSG00000081051; TAA
ADFSGLLEK

SEQ ID NO: 7383 - protein, 9 aa, Homo sapiens
  Table A; Target 7383; HLA-C*07:02; AFP; ENSG00000081051; TAA
ADFSGLLEK

SEQ ID NO: 7384 - protein, 9 aa, Homo sapiens
  Table A; Target 7384; HLA-C*07:06; AFP; ENSG00000081051; TAA
ADFSGLLEK

SEQ ID NO: 7385 - protein, 9 aa, Homo sapiens
  Table A; Target 7385; HLA-C*12:03; AFP; ENSG00000081051; TAA
ADFSGLLEK

SEQ ID NO: 7386 - protein, 9 aa, Homo sapiens
  Table A; Target 7386; HLA-C*16:02; AFP; ENSG00000081051; TAA
ADFSGLLEK

SEQ ID NO: 7387 - protein, 8 aa, Homo sapiens
  Table A; Target 7387; HLA-B*27:05; AFP; ENSG00000081051; TAA
ADIIIGHL

SEQ ID NO: 7388 - protein, 8 aa, Homo sapiens
  Table A; Target 7388; HLA-B*40:01; AFP; ENSG00000081051; TAA
ADIIIGHL

SEQ ID NO: 7389 - protein, 8 aa, Homo sapiens
  Table A; Target 7389; HLA-B*44:03; AFP; ENSG00000081051; TAA
ADIIIGHL

SEQ ID NO: 7390 - protein, 8 aa, Homo sapiens
  Table A; Target 7390; HLA-C*04:01; AFP; ENSG00000081051; TAA
ADIIIGHL

SEQ ID NO: 7391 - protein, 8 aa, Homo sapiens
  Table A; Target 7391; HLA-C*06:02; AFP; ENSG00000081051; TAA
ADIIIGHL

SEQ ID NO: 7392 - protein, 9 aa, Homo sapiens
  Table A; Target 7392; HLA-B*37:01; AFP; ENSG00000081051; TAA
ADIIIGHLC

SEQ ID NO: 7393 - protein, 8 aa, Homo sapiens
  Table A; Target 7393; HLA-B*44:02; AFP; ENSG00000081051; TAA
ADLATIFF

SEQ ID NO: 7394 - protein, 10 aa, Homo sapiens
  Table A; Target 7394; HLA-A*03:02; AFP; ENSG00000081051; TAA
AEEGQKLISK

SEQ ID NO: 7395 - protein, 10 aa, Homo sapiens
  Table A; Target 7395; HLA-A*11:01; AFP; ENSG00000081051; TAA
AEEGQKLISK

SEQ ID NO: 7396 - protein, 10 aa, Homo sapiens
  Table A; Target 7396; HLA-B*27:02; AFP; ENSG00000081051; TAA
AEEGQKLISK

SEQ ID NO: 7397 - protein, 10 aa, Homo sapiens
  Table A; Target 7397; HLA-B*40:01; AFP; ENSG00000081051; TAA
AEEGQKLISK

SEQ ID NO: 7398 - protein, 10 aa, Homo sapiens
  Table A; Target 7398; HLA-B*40:02; AFP; ENSG00000081051; TAA
AEEGQKLISK

SEQ ID NO: 7399 - protein, 10 aa, Homo sapiens
  Table A; Target 7399; HLA-B*44:02; AFP; ENSG00000081051; TAA
AEEGQKLISK

SEQ ID NO: 7400 - protein, 10 aa, Homo sapiens
  Table A; Target 7400; HLA-B*44:03; AFP; ENSG00000081051; TAA
AEEGQKLISK

SEQ ID NO: 7401 - protein, 10 aa, Homo sapiens
  Table A; Target 7401; HLA-B*49:01; AFP; ENSG00000081051; TAA
AEEGQKLISK

SEQ ID NO: 7402 - protein, 8 aa, Homo sapiens
  Table A; Target 7402; HLA-B*18:01; AFP; ENSG00000081051; TAA
AEISLADL

SEQ ID NO: 7403 - protein, 8 aa, Homo sapiens
  Table A; Target 7403; HLA-B*40:02; AFP; ENSG00000081051; TAA
AEISLADL

SEQ ID NO: 7404 - protein, 8 aa, Homo sapiens
  Table A; Target 7404; HLA-B*44:02; AFP; ENSG00000081051; TAA
AEISLADL

SEQ ID NO: 7405 - protein, 9 aa, Homo sapiens
  Table A; Target 7405; HLA-B*44:03; AFP; ENSG00000081051; TAA
AEISLADLA

SEQ ID NO: 7406 - protein, 11 aa, Homo sapiens
  Table A; Target 7406; HLA-B*27:02; AFP; ENSG00000081051; TAA
AEISLADLATI

SEQ ID NO: 7407 - protein, 11 aa, Homo sapiens
  Table A; Target 7407; HLA-B*40:02; AFP; ENSG00000081051; TAA
AEISLADLATI

SEQ ID NO: 7408 - protein, 11 aa, Homo sapiens
  Table A; Target 7408; HLA-C*16:04; AFP; ENSG00000081051; TAA
AEISLADLATI

SEQ ID NO: 7409 - protein, 8 aa, Homo sapiens
  Table A; Target 7409; HLA-B*40:01; AFP; ENSG00000081051; TAA
AENAVECF

SEQ ID NO: 7410 - protein, 8 aa, Homo sapiens
  Table A; Target 7410; HLA-B*40:02; AFP; ENSG00000081051; TAA
AENAVECF

SEQ ID NO: 7411 - protein, 8 aa, Homo sapiens
  Table A; Target 7411; HLA-B*49:01; AFP; ENSG00000081051; TAA
AENAVECF

SEQ ID NO: 7412 - protein, 9 aa, Homo sapiens
  Table A; Target 7412; HLA-B*44:02; AFP; ENSG00000081051; TAA
AENAVECFQ

SEQ ID NO: 7413 - protein, 9 aa, Homo sapiens
  Table A; Target 7413; HLA-C*16:04; AFP; ENSG00000081051; TAA
AENAVECFQ

SEQ ID NO: 7414 - protein, 11 aa, Homo sapiens
  Table A; Target 7414; HLA-B*49:01; AFP; ENSG00000081051; TAA
AENAVECFQTK

SEQ ID NO: 7415 - protein, 10 aa, Homo sapiens
  Table A; Target 7415; HLA-B*40:02; AFP; ENSG00000081051; TAA
AENDEKPEGL

SEQ ID NO: 7416 - protein, 8 aa, Homo sapiens
  Table A; Target 7416; HLA-A*23:01; AFP; ENSG00000081051; TAA
AFLVAYTK

SEQ ID NO: 7417 - protein, 9 aa, Homo sapiens
  Table A; Target 7417; HLA-A*24:02; AFP; ENSG00000081051; TAA
AFSDDKFIF

SEQ ID NO: 7418 - protein, 10 aa, Homo sapiens
  Table A; Target 7418; HLA-A*03:01; AFP; ENSG00000081051; TAA
AITVTKLSQK

SEQ ID NO: 7419 - protein, 10 aa, Homo sapiens
  Table A; Target 7419; HLA-A*03:02; AFP; ENSG00000081051; TAA
AITVTKLSQK

SEQ ID NO: 7420 - protein, 10 aa, Homo sapiens
  Table A; Target 7420; HLA-A*11:01; AFP; ENSG00000081051; TAA
AITVTKLSQK

SEQ ID NO: 7421 - protein, 9 aa, Homo sapiens
  Table A; Target 7421; HLA-B*08:01; AFP; ENSG00000081051; TAA
ALAKRSCGL

SEQ ID NO: 7422 - protein, 9 aa, Homo sapiens
  Table A; Target 7422; HLA-A*23:01; AFP; ENSG00000081051; TAA
ALQTMKQEF

SEQ ID NO: 7423 - protein, 9 aa, Homo sapiens
  Table A; Target 7423; HLA-A*24:02; AFP; ENSG00000081051; TAA
ALQTMKQEF

SEQ ID NO: 7424 - protein, 9 aa, Homo sapiens
  Table A; Target 7424; HLA-A*30:02; AFP; ENSG00000081051; TAA
ALQTMKQEF

SEQ ID NO: 7425 - protein, 9 aa, Homo sapiens
  Table A; Target 7425; HLA-B*46:01; AFP; ENSG00000081051; TAA
ALQTMKQEF

SEQ ID NO: 7426 - protein, 9 aa, Homo sapiens
  Table A; Target 7426; HLA-B*58:01; AFP; ENSG00000081051; TAA
ALQTMKQEF

SEQ ID NO: 7427 - protein, 9 aa, Homo sapiens
  Table A; Target 7427; HLA-C*01:02; AFP; ENSG00000081051; TAA
ALQTMKQEF

SEQ ID NO: 7428 - protein, 9 aa, Homo sapiens
  Table A; Target 7428; HLA-C*07:04; AFP; ENSG00000081051; TAA
ALQTMKQEF

SEQ ID NO: 7429 - protein, 9 aa, Homo sapiens
  Table A; Target 7429; HLA-C*06:02; AFP; ENSG00000081051; TAA
ALTAIEKPT

SEQ ID NO: 7430 - protein, 9 aa, Homo sapiens
  Table A; Target 7430; HLA-B*08:01; AFP; ENSG00000081051; TAA
APQLTSSEL

SEQ ID NO: 7431 - protein, 9 aa, Homo sapiens
  Table A; Target 7431; HLA-C*03:03; AFP; ENSG00000081051; TAA
APQLTSSEL

SEQ ID NO: 7432 - protein, 9 aa, Homo sapiens
  Table A; Target 7432; HLA-C*03:04; AFP; ENSG00000081051; TAA
APQLTSSEL

SEQ ID NO: 7433 - protein, 9 aa, Homo sapiens
  Table A; Target 7433; HLA-C*04:01; AFP; ENSG00000081051; TAA
APQLTSSEL

SEQ ID NO: 7434 - protein, 9 aa, Homo sapiens
  Table A; Target 7434; HLA-C*05:01; AFP; ENSG00000081051; TAA
APQLTSSEL

SEQ ID NO: 7435 - protein, 10 aa, Homo sapiens
  Table A; Target 7435; HLA-B*56:01; AFP; ENSG00000081051; TAA
APQLTSSELM

SEQ ID NO: 7436 - protein, 10 aa, Homo sapiens
  Table A; Target 7436; HLA-C*04:01; AFP; ENSG00000081051; TAA
APQLTSSELM

SEQ ID NO: 7437 - protein, 10 aa, Homo sapiens
  Table A; Target 7437; HLA-C*07:02; AFP; ENSG00000081051; TAA
APQLTSSELM

SEQ ID NO: 7438 - protein, 9 aa, Homo sapiens
  Table A; Target 7438; HLA-A*23:01; AFP; ENSG00000081051; TAA
AQFVQEATY

SEQ ID NO: 7439 - protein, 9 aa, Homo sapiens
  Table A; Target 7439; HLA-B*38:01; AFP; ENSG00000081051; TAA
AQFVQEATY

SEQ ID NO: 7440 - protein, 9 aa, Homo sapiens
  Table A; Target 7440; HLA-B*40:01; AFP; ENSG00000081051; TAA
AQFVQEATY

SEQ ID NO: 7441 - protein, 9 aa, Homo sapiens
  Table A; Target 7441; HLA-C*01:02; AFP; ENSG00000081051; TAA
AQFVQEATY

SEQ ID NO: 7442 - protein, 9 aa, Homo sapiens
  Table A; Target 7442; HLA-C*03:03; AFP; ENSG00000081051; TAA
AQFVQEATY

SEQ ID NO: 7443 - protein, 9 aa, Homo sapiens
  Table A; Target 7443; HLA-C*04:01; AFP; ENSG00000081051; TAA
AQFVQEATY

SEQ ID NO: 7444 - protein, 9 aa, Homo sapiens
  Table A; Target 7444; HLA-C*06:02; AFP; ENSG00000081051; TAA
AQFVQEATY

SEQ ID NO: 7445 - protein, 9 aa, Homo sapiens
  Table A; Target 7445; HLA-C*07:01; AFP; ENSG00000081051; TAA
AQFVQEATY

SEQ ID NO: 7446 - protein, 10 aa, Homo sapiens
  Table A; Target 7446; HLA-A*31:01; AFP; ENSG00000081051; TAA
AQFVQEATYK

SEQ ID NO: 7447 - protein, 9 aa, Homo sapiens
  Table A; Target 7447; HLA-A*32:01; AFP; ENSG00000081051; TAA
AQGVALQTM

SEQ ID NO: 7448 - protein, 9 aa, Homo sapiens
  Table A; Target 7448; HLA-B*38:01; AFP; ENSG00000081051; TAA
AQGVALQTM

SEQ ID NO: 7449 - protein, 9 aa, Homo sapiens
  Table A; Target 7449; HLA-B*39:01; AFP; ENSG00000081051; TAA
AQGVALQTM

SEQ ID NO: 7450 - protein, 9 aa, Homo sapiens
  Table A; Target 7450; HLA-B*40:02; AFP; ENSG00000081051; TAA
AQGVALQTM

SEQ ID NO: 7451 - protein, 9 aa, Homo sapiens
  Table A; Target 7451; HLA-B*44:02; AFP; ENSG00000081051; TAA
AQGVALQTM

SEQ ID NO: 7452 - protein, 9 aa, Homo sapiens
  Table A; Target 7452; HLA-B*46:01; AFP; ENSG00000081051; TAA
AQGVALQTM

SEQ ID NO: 7453 - protein, 9 aa, Homo sapiens
  Table A; Target 7453; HLA-C*04:01; AFP; ENSG00000081051; TAA
AQGVALQTM

SEQ ID NO: 7454 - protein, 9 aa, Homo sapiens
  Table A; Target 7454; HLA-C*16:04; AFP; ENSG00000081051; TAA
AQGVALQTM

SEQ ID NO: 7455 - protein, 10 aa, Homo sapiens
  Table A; Target 7455; HLA-A*03:01; AFP; ENSG00000081051; TAA
AQGVALQTMK

SEQ ID NO: 7456 - protein, 10 aa, Homo sapiens
  Table A; Target 7456; HLA-A*03:02; AFP; ENSG00000081051; TAA
AQGVALQTMK

SEQ ID NO: 7457 - protein, 10 aa, Homo sapiens
  Table A; Target 7457; HLA-A*11:01; AFP; ENSG00000081051; TAA
AQGVALQTMK

SEQ ID NO: 7458 - protein, 10 aa, Homo sapiens
  Table A; Target 7458; HLA-B*27:02; AFP; ENSG00000081051; TAA
AQGVALQTMK

SEQ ID NO: 7459 - protein, 9 aa, Homo sapiens
  Table A; Target 7459; HLA-C*06:02; AFP; ENSG00000081051; TAA
ARYDKIIPS

SEQ ID NO: 7460 - protein, 9 aa, Homo sapiens
  Table A; Target 7460; HLA-A*33:01; AFP; ENSG00000081051; TAA
ASFVHEYSR

SEQ ID NO: 7461 - protein, 9 aa, Homo sapiens
  Table A; Target 7461; HLA-A*33:03; AFP; ENSG00000081051; TAA
ASFVHEYSR

SEQ ID NO: 7462 - protein, 9 aa, Homo sapiens
  Table A; Target 7462; HLA-A*68:01; AFP; ENSG00000081051; TAA
ASFVHEYSR

SEQ ID NO: 7463 - protein, 9 aa, Homo sapiens
  Table A; Target 7463; HLA-B*58:01; AFP; ENSG00000081051; TAA
ASILDSYQC

SEQ ID NO: 7464 - protein, 9 aa, Homo sapiens
  Table A; Target 7464; HLA-C*01:02; AFP; ENSG00000081051; TAA
ATAATCCQL

SEQ ID NO: 7465 - protein, 9 aa, Homo sapiens
  Table A; Target 7465; HLA-C*06:02; AFP; ENSG00000081051; TAA
ATAATCCQL

SEQ ID NO: 7466 - protein, 8 aa, Homo sapiens
  Table A; Target 7466; HLA-B*57:01; AFP; ENSG00000081051; TAA
ATIFFAQF

SEQ ID NO: 7467 - protein, 9 aa, Homo sapiens
  Table A; Target 7467; HLA-A*02:04; AFP; ENSG00000081051; TAA
ATIFFAQFV

SEQ ID NO: 7468 - protein, 9 aa, Homo sapiens
  Table A; Target 7468; HLA-B*13:02; AFP; ENSG00000081051; TAA
ATIFFAQFV

SEQ ID NO: 7469 - protein, 8 aa, Homo sapiens
  Table A; Target 7469; HLA-A*03:01; AFP; ENSG00000081051; TAA
ATYKEVSK

SEQ ID NO: 7470 - protein, 8 aa, Homo sapiens
  Table A; Target 7470; HLA-A*03:02; AFP; ENSG00000081051; TAA
ATYKEVSK

SEQ ID NO: 7471 - protein, 8 aa, Homo sapiens
  Table A; Target 7471; HLA-B*27:05; AFP; ENSG00000081051; TAA
ATYKEVSK

SEQ ID NO: 7472 - protein, 9 aa, Homo sapiens
  Table A; Target 7472; HLA-A*01:01; AFP; ENSG00000081051; TAA
ATYKEVSKM

SEQ ID NO: 7473 - protein, 9 aa, Homo sapiens
  Table A; Target 7473; HLA-A*02:03; AFP; ENSG00000081051; TAA
ATYKEVSKM

SEQ ID NO: 7474 - protein, 9 aa, Homo sapiens
  Table A; Target 7474; HLA-A*30:02; AFP; ENSG00000081051; TAA
ATYKEVSKM

SEQ ID NO: 7475 - protein, 9 aa, Homo sapiens
  Table A; Target 7475; HLA-A*68:01; AFP; ENSG00000081051; TAA
ATYKEVSKM

SEQ ID NO: 7476 - protein, 9 aa, Homo sapiens
  Table A; Target 7476; HLA-B*13:02; AFP; ENSG00000081051; TAA
ATYKEVSKM

SEQ ID NO: 7477 - protein, 9 aa, Homo sapiens
  Table A; Target 7477; HLA-B*15:03; AFP; ENSG00000081051; TAA
ATYKEVSKM

SEQ ID NO: 7478 - protein, 9 aa, Homo sapiens
  Table A; Target 7478; HLA-B*27:05; AFP; ENSG00000081051; TAA
ATYKEVSKM

SEQ ID NO: 7479 - protein, 9 aa, Homo sapiens
  Table A; Target 7479; HLA-B*37:01; AFP; ENSG00000081051; TAA
ATYKEVSKM

SEQ ID NO: 7480 - protein, 9 aa, Homo sapiens
  Table A; Target 7480; HLA-B*44:03; AFP; ENSG00000081051; TAA
ATYKEVSKM

SEQ ID NO: 7481 - protein, 9 aa, Homo sapiens
  Table A; Target 7481; HLA-B*46:01; AFP; ENSG00000081051; TAA
ATYKEVSKM

SEQ ID NO: 7482 - protein, 9 aa, Homo sapiens
  Table A; Target 7482; HLA-B*57:01; AFP; ENSG00000081051; TAA
ATYKEVSKM

SEQ ID NO: 7483 - protein, 9 aa, Homo sapiens
  Table A; Target 7483; HLA-C*03:03; AFP; ENSG00000081051; TAA
ATYKEVSKM

SEQ ID NO: 7484 - protein, 9 aa, Homo sapiens
  Table A; Target 7484; HLA-C*03:04; AFP; ENSG00000081051; TAA
ATYKEVSKM

SEQ ID NO: 7485 - protein, 9 aa, Homo sapiens
  Table A; Target 7485; HLA-C*05:01; AFP; ENSG00000081051; TAA
ATYKEVSKM

SEQ ID NO: 7486 - protein, 9 aa, Homo sapiens
  Table A; Target 7486; HLA-C*06:02; AFP; ENSG00000081051; TAA
ATYKEVSKM

SEQ ID NO: 7487 - protein, 9 aa, Homo sapiens
  Table A; Target 7487; HLA-C*07:01; AFP; ENSG00000081051; TAA
ATYKEVSKM

SEQ ID NO: 7488 - protein, 9 aa, Homo sapiens
  Table A; Target 7488; HLA-C*07:06; AFP; ENSG00000081051; TAA
ATYKEVSKM

SEQ ID NO: 7489 - protein, 9 aa, Homo sapiens
  Table A; Target 7489; HLA-C*16:01; AFP; ENSG00000081051; TAA
ATYKEVSKM

SEQ ID NO: 7490 - protein, 9 aa, Homo sapiens
  Table A; Target 7490; HLA-C*16:04; AFP; ENSG00000081051; TAA
ATYKEVSKM

SEQ ID NO: 7491 - protein, 10 aa, Homo sapiens
  Table A; Target 7491; HLA-A*02:03; AFP; ENSG00000081051; TAA
ATYKEVSKMV

SEQ ID NO: 7492 - protein, 10 aa, Homo sapiens
  Table A; Target 7492; HLA-B*13:02; AFP; ENSG00000081051; TAA
ATYKEVSKMV

SEQ ID NO: 7493 - protein, 11 aa, Homo sapiens
  Table A; Target 7493; HLA-A*01:01; AFP; ENSG00000081051; TAA
ATYKEVSKMVK

SEQ ID NO: 7494 - protein, 11 aa, Homo sapiens
  Table A; Target 7494; HLA-A*33:03; AFP; ENSG00000081051; TAA
ATYKEVSKMVK

SEQ ID NO: 7495 - protein, 11 aa, Homo sapiens
  Table A; Target 7495; HLA-A*68:01; AFP; ENSG00000081051; TAA
ATYKEVSKMVK

SEQ ID NO: 7496 - protein, 11 aa, Homo sapiens
  Table A; Target 7496; HLA-C*06:02; AFP; ENSG00000081051; TAA
ATYKEVSKMVK

SEQ ID NO: 7497 - protein, 9 aa, Homo sapiens
  Table A; Target 7497; HLA-A*02:01; AFP; ENSG00000081051; TAA
AVIADFSGL

SEQ ID NO: 7498 - protein, 9 aa, Homo sapiens
  Table A; Target 7498; HLA-A*02:03; AFP; ENSG00000081051; TAA
AVIADFSGL

SEQ ID NO: 7499 - protein, 9 aa, Homo sapiens
  Table A; Target 7499; HLA-A*02:04; AFP; ENSG00000081051; TAA
AVIADFSGL

SEQ ID NO: 7500 - protein, 9 aa, Homo sapiens
  Table A; Target 7500; HLA-A*30:01; AFP; ENSG00000081051; TAA
AVIADFSGL

SEQ ID NO: 7501 - protein, 9 aa, Homo sapiens
  Table A; Target 7501; HLA-A*32:01; AFP; ENSG00000081051; TAA
AVIADFSGL

SEQ ID NO: 7502 - protein, 9 aa, Homo sapiens
  Table A; Target 7502; HLA-A*68:02; AFP; ENSG00000081051; TAA
AVIADFSGL

SEQ ID NO: 7503 - protein, 9 aa, Homo sapiens
  Table A; Target 7503; HLA-B*13:02; AFP; ENSG00000081051; TAA
AVIADFSGL

SEQ ID NO: 7504 - protein, 9 aa, Homo sapiens
  Table A; Target 7504; HLA-B*15:03; AFP; ENSG00000081051; TAA
AVIADFSGL

SEQ ID NO: 7505 - protein, 9 aa, Homo sapiens
  Table A; Target 7505; HLA-B*27:05; AFP; ENSG00000081051; TAA
AVIADFSGL

SEQ ID NO: 7506 - protein, 9 aa, Homo sapiens
  Table A; Target 7506; HLA-B*40:02; AFP; ENSG00000081051; TAA
AVIADFSGL

SEQ ID NO: 7507 - protein, 9 aa, Homo sapiens
  Table A; Target 7507; HLA-C*02:02; AFP; ENSG00000081051; TAA
AVIADFSGL

SEQ ID NO: 7508 - protein, 9 aa, Homo sapiens
  Table A; Target 7508; HLA-C*05:01; AFP; ENSG00000081051; TAA
AVIADFSGL

SEQ ID NO: 7509 - protein, 9 aa, Homo sapiens
  Table A; Target 7509; HLA-C*14:02; AFP; ENSG00000081051; TAA
AVIADFSGL

SEQ ID NO: 7510 - protein, 9 aa, Homo sapiens
  Table A; Target 7510; HLA-A*25:01; AFP; ENSG00000081051; TAA
AVMKNFGTR

SEQ ID NO: 7511 - protein, 9 aa, Homo sapiens
  Table A; Target 7511; HLA-A*32:01; AFP; ENSG00000081051; TAA
AVMKNFGTR

SEQ ID NO: 7512 - protein, 9 aa, Homo sapiens
  Table A; Target 7512; HLA-A*33:01; AFP; ENSG00000081051; TAA
AVMKNFGTR

SEQ ID NO: 7513 - protein, 9 aa, Homo sapiens
  Table A; Target 7513; HLA-B*57:01; AFP; ENSG00000081051; TAA
AVMKNFGTR

SEQ ID NO: 7514 - protein, 11 aa, Homo sapiens
  Table A; Target 7514; HLA-B*57:01; AFP; ENSG00000081051; TAA
AVMKNFGTRTF

SEQ ID NO: 7515 - protein, 8 aa, Homo sapiens
  Table A; Target 7515; HLA-A*02:04; AFP; ENSG00000081051; TAA
AVSVILRV

SEQ ID NO: 7516 - protein, 8 aa, Homo sapiens
  Table A; Target 7516; HLA-B*56:01; AFP; ENSG00000081051; TAA
AVSVILRV

SEQ ID NO: 7517 - protein, 8 aa, Homo sapiens
  Table A; Target 7517; HLA-C*06:02; AFP; ENSG00000081051; TAA
AVSVILRV

SEQ ID NO: 7518 - protein, 8 aa, Homo sapiens
  Table A; Target 7518; HLA-C*12:03; AFP; ENSG00000081051; TAA
AVSVILRV

SEQ ID NO: 7519 - protein, 8 aa, Homo sapiens
  Table A; Target 7519; HLA-C*16:02; AFP; ENSG00000081051; TAA
AVSVILRV

SEQ ID NO: 7520 - protein, 9 aa, Homo sapiens
  Table A; Target 7520; HLA-A*02:03; AFP; ENSG00000081051; TAA
AVSVILRVA

SEQ ID NO: 7521 - protein, 9 aa, Homo sapiens
  Table A; Target 7521; HLA-A*03:01; AFP; ENSG00000081051; TAA
AVSVILRVA

SEQ ID NO: 7522 - protein, 9 aa, Homo sapiens
  Table A; Target 7522; HLA-B*54:01; AFP; ENSG00000081051; TAA
AVSVILRVA

SEQ ID NO: 7523 - protein, 9 aa, Homo sapiens
  Table A; Target 7523; HLA-B*55:01; AFP; ENSG00000081051; TAA
AVSVILRVA

SEQ ID NO: 7524 - protein, 9 aa, Homo sapiens
  Table A; Target 7524; HLA-C*06:02; AFP; ENSG00000081051; TAA
AVSVILRVA

SEQ ID NO: 7525 - protein, 9 aa, Homo sapiens
  Table A; Target 7525; HLA-C*12:03; AFP; ENSG00000081051; TAA
AVSVILRVA

SEQ ID NO: 7526 - protein, 9 aa, Homo sapiens
  Table A; Target 7526; HLA-C*16:01; AFP; ENSG00000081051; TAA
AVSVILRVA

SEQ ID NO: 7527 - protein, 9 aa, Homo sapiens
  Table A; Target 7527; HLA-C*16:02; AFP; ENSG00000081051; TAA
AVSVILRVA

SEQ ID NO: 7528 - protein, 10 aa, Homo sapiens
  Table A; Target 7528; HLA-A*31:01; AFP; ENSG00000081051; TAA
AVSVILRVAK

SEQ ID NO: 7529 - protein, 10 aa, Homo sapiens
  Table A; Target 7529; HLA-C*07:06; AFP; ENSG00000081051; TAA
AVSVILRVAK

SEQ ID NO: 7530 - protein, 9 aa, Homo sapiens
  Table A; Target 7530; HLA-A*32:01; AFP; ENSG00000081051; TAA
AYEEDRETF

SEQ ID NO: 7531 - protein, 9 aa, Homo sapiens
  Table A; Target 7531; HLA-B*15:03; AFP; ENSG00000081051; TAA
AYEEDRETF

SEQ ID NO: 7532 - protein, 9 aa, Homo sapiens
  Table A; Target 7532; HLA-B*35:01; AFP; ENSG00000081051; TAA
AYEEDRETF

SEQ ID NO: 7533 - protein, 9 aa, Homo sapiens
  Table A; Target 7533; HLA-B*35:03; AFP; ENSG00000081051; TAA
AYEEDRETF

SEQ ID NO: 7534 - protein, 9 aa, Homo sapiens
  Table A; Target 7534; HLA-B*58:01; AFP; ENSG00000081051; TAA
AYEEDRETF

SEQ ID NO: 7535 - protein, 9 aa, Homo sapiens
  Table A; Target 7535; HLA-C*01:02; AFP; ENSG00000081051; TAA
AYEEDRETF

SEQ ID NO: 7536 - protein, 9 aa, Homo sapiens
  Table A; Target 7536; HLA-C*05:01; AFP; ENSG00000081051; TAA
AYEEDRETF

SEQ ID NO: 7537 - protein, 9 aa, Homo sapiens
  Table A; Target 7537; HLA-C*07:04; AFP; ENSG00000081051; TAA
AYEEDRETF

SEQ ID NO: 7538 - protein, 9 aa, Homo sapiens
  Table A; Target 7538; HLA-C*16:01; AFP; ENSG00000081051; TAA
AYEEDRETF

SEQ ID NO: 7539 - protein, 10 aa, Homo sapiens
  Table A; Target 7539; HLA-C*07:01; AFP; ENSG00000081051; TAA
AYEEDRETFM

SEQ ID NO: 7540 - protein, 9 aa, Homo sapiens
  Table A; Target 7540; HLA-C*16:02; AFP; ENSG00000081051; TAA
AYTKKAPQL

SEQ ID NO: 7541 - protein, 9 aa, Homo sapiens
  Table A; Target 7541; HLA-C*14:02; AFP; ENSG00000081051; TAA
CFAEEGQKL

SEQ ID NO: 7542 - protein, 10 aa, Homo sapiens
  Table A; Target 7542; HLA-A*30:02; AFP; ENSG00000081051; TAA
CGLFQKLGEY

SEQ ID NO: 7543 - protein, 11 aa, Homo sapiens
  Table A; Target 7543; HLA-A*11:01; AFP; ENSG00000081051; TAA
CLQDGEKIMSY

SEQ ID NO: 7544 - protein, 11 aa, Homo sapiens
  Table A; Target 7544; HLA-A*29:02; AFP; ENSG00000081051; TAA
CLQDGEKIMSY

SEQ ID NO: 7545 - protein, 11 aa, Homo sapiens
  Table A; Target 7545; HLA-B*46:01; AFP; ENSG00000081051; TAA
CLQDGEKIMSY

SEQ ID NO: 7546 - protein, 11 aa, Homo sapiens
  Table A; Target 7546; HLA-C*01:02; AFP; ENSG00000081051; TAA
CLQDGEKIMSY

SEQ ID NO: 7547 - protein, 11 aa, Homo sapiens
  Table A; Target 7547; HLA-C*12:03; AFP; ENSG00000081051; TAA
CLQDGEKIMSY

SEQ ID NO: 7548 - protein, 11 aa, Homo sapiens
  Table A; Target 7548; HLA-C*14:02; AFP; ENSG00000081051; TAA
CLQDGEKIMSY

SEQ ID NO: 7549 - protein, 11 aa, Homo sapiens
  Table A; Target 7549; HLA-C*16:02; AFP; ENSG00000081051; TAA
CLQDGEKIMSY

SEQ ID NO: 7550 - protein, 8 aa, Homo sapiens
  Table A; Target 7550; HLA-B*15:03; AFP; ENSG00000081051; TAA
CQAQGVAL

SEQ ID NO: 7551 - protein, 8 aa, Homo sapiens
  Table A; Target 7551; HLA-B*37:01; AFP; ENSG00000081051; TAA
CQAQGVAL

SEQ ID NO: 7552 - protein, 8 aa, Homo sapiens
  Table A; Target 7552; HLA-C*03:03; AFP; ENSG00000081051; TAA
CQAQGVAL

SEQ ID NO: 7553 - protein, 11 aa, Homo sapiens
  Table A; Target 7553; HLA-B*15:01; AFP; ENSG00000081051; TAA
CQAQGVALQTM

SEQ ID NO: 7554 - protein, 11 aa, Homo sapiens
  Table A; Target 7554; HLA-B*27:05; AFP; ENSG00000081051; TAA
CQAQGVALQTM

SEQ ID NO: 7555 - protein, 9 aa, Homo sapiens
  Table A; Target 7555; HLA-C*05:01; AFP; ENSG00000081051; TAA
CQDKGEEEL

SEQ ID NO: 7556 - protein, 10 aa, Homo sapiens
  Table A; Target 7556; HLA-B*15:01; AFP; ENSG00000081051; TAA
CQGQEQEVCF

SEQ ID NO: 7557 - protein, 10 aa, Homo sapiens
  Table A; Target 7557; HLA-B*38:01; AFP; ENSG00000081051; TAA
CQGQEQEVCF

SEQ ID NO: 7558 - protein, 10 aa, Homo sapiens
  Table A; Target 7558; HLA-C*07:04; AFP; ENSG00000081051; TAA
CQGQEQEVCF

SEQ ID NO: 7559 - protein, 8 aa, Homo sapiens
  Table A; Target 7559; HLA-A*33:03; AFP; ENSG00000081051; TAA
DALTAIEK

SEQ ID NO: 7560 - protein, 8 aa, Homo sapiens
  Table A; Target 7560; HLA-B*27:02; AFP; ENSG00000081051; TAA
DALTAIEK

SEQ ID NO: 7561 - protein, 8 aa, Homo sapiens
  Table A; Target 7561; HLA-B*35:01; AFP; ENSG00000081051; TAA
DALTAIEK

SEQ ID NO: 7562 - protein, 8 aa, Homo sapiens
  Table A; Target 7562; HLA-C*07:06; AFP; ENSG00000081051; TAA
DALTAIEK

SEQ ID NO: 7563 - protein, 9 aa, Homo sapiens
  Table A; Target 7563; HLA-B*51:01; AFP; ENSG00000081051; TAA
DALTAIEKP

SEQ ID NO: 7564 - protein, 11 aa, Homo sapiens
  Table A; Target 7564; HLA-A*30:01; AFP; ENSG00000081051; TAA
DEKPEGLSPNL

SEQ ID NO: 7565 - protein, 11 aa, Homo sapiens
  Table A; Target 7565; HLA-B*18:01; AFP; ENSG00000081051; TAA
DEKPEGLSPNL

SEQ ID NO: 7566 - protein, 11 aa, Homo sapiens
  Table A; Target 7566; HLA-B*39:01; AFP; ENSG00000081051; TAA
DEKPEGLSPNL

SEQ ID NO: 7567 - protein, 11 aa, Homo sapiens
  Table A; Target 7567; HLA-B*40:02; AFP; ENSG00000081051; TAA
DEKPEGLSPNL

SEQ ID NO: 7568 - protein, 11 aa, Homo sapiens
  Table A; Target 7568; HLA-B*44:02; AFP; ENSG00000081051; TAA
DEKPEGLSPNL

SEQ ID NO: 7569 - protein, 8 aa, Homo sapiens
  Table A; Target 7569; HLA-B*18:01; AFP; ENSG00000081051; TAA
DEQSSGCL

SEQ ID NO: 7570 - protein, 9 aa, Homo sapiens
  Table A; Target 7570; HLA-A*26:01; AFP; ENSG00000081051; TAA
DETYVPPAF

SEQ ID NO: 7571 - protein, 9 aa, Homo sapiens
  Table A; Target 7571; HLA-A*32:01; AFP; ENSG00000081051; TAA
DETYVPPAF

SEQ ID NO: 7572 - protein, 9 aa, Homo sapiens
  Table A; Target 7572; HLA-A*33:03; AFP; ENSG00000081051; TAA
DETYVPPAF

SEQ ID NO: 7573 - protein, 9 aa, Homo sapiens
  Table A; Target 7573; HLA-A*68:01; AFP; ENSG00000081051; TAA
DETYVPPAF

SEQ ID NO: 7574 - protein, 9 aa, Homo sapiens
  Table A; Target 7574; HLA-A*68:02; AFP; ENSG00000081051; TAA
DETYVPPAF

SEQ ID NO: 7575 - protein, 9 aa, Homo sapiens
  Table A; Target 7575; HLA-B*35:03; AFP; ENSG00000081051; TAA
DETYVPPAF

SEQ ID NO: 7576 - protein, 9 aa, Homo sapiens
  Table A; Target 7576; HLA-B*38:01; AFP; ENSG00000081051; TAA
DETYVPPAF

SEQ ID NO: 7577 - protein, 9 aa, Homo sapiens
  Table A; Target 7577; HLA-B*39:01; AFP; ENSG00000081051; TAA
DETYVPPAF

SEQ ID NO: 7578 - protein, 9 aa, Homo sapiens
  Table A; Target 7578; HLA-B*40:02; AFP; ENSG00000081051; TAA
DETYVPPAF

SEQ ID NO: 7579 - protein, 9 aa, Homo sapiens
  Table A; Target 7579; HLA-B*49:01; AFP; ENSG00000081051; TAA
DETYVPPAF

SEQ ID NO: 7580 - protein, 9 aa, Homo sapiens
  Table A; Target 7580; HLA-B*51:01; AFP; ENSG00000081051; TAA
DETYVPPAF

SEQ ID NO: 7581 - protein, 9 aa, Homo sapiens
  Table A; Target 7581; HLA-C*04:01; AFP; ENSG00000081051; TAA
DETYVPPAF

SEQ ID NO: 7582 - protein, 10 aa, Homo sapiens
  Table A; Target 7582; HLA-A*33:03; AFP; ENSG00000081051; TAA
DFNQFSSGEK

SEQ ID NO: 7583 - protein, 8 aa, Homo sapiens
  Table A; Target 7583; HLA-A*33:03; AFP; ENSG00000081051; TAA
DFSGLLEK

SEQ ID NO: 7584 - protein, 8 aa, Homo sapiens
  Table A; Target 7584; HLA-B*27:02; AFP; ENSG00000081051; TAA
DFSGLLEK

SEQ ID NO: 7585 - protein, 8 aa, Homo sapiens
  Table A; Target 7585; HLA-B*35:01; AFP; ENSG00000081051; TAA
DGEKIMSY

SEQ ID NO: 7586 - protein, 9 aa, Homo sapiens
  Table A; Target 7586; HLA-B*51:01; AFP; ENSG00000081051; TAA
DIIIGHLCI

SEQ ID NO: 7587 - protein, 9 aa, Homo sapiens
  Table A; Target 7587; HLA-A*33:01; AFP; ENSG00000081051; TAA
DLATIFFAQ

SEQ ID NO: 7588 - protein, 9 aa, Homo sapiens
  Table A; Target 7588; HLA-A*68:02; AFP; ENSG00000081051; TAA
DLATIFFAQ

SEQ ID NO: 7589 - protein, 10 aa, Homo sapiens
  Table A; Target 7589; HLA-B*38:01; AFP; ENSG00000081051; TAA
DLCQAQGVAL

SEQ ID NO: 7590 - protein, 10 aa, Homo sapiens
  Table A; Target 7590; HLA-C*04:01; AFP; ENSG00000081051; TAA
DLCQAQGVAL

SEQ ID NO: 7591 - protein, 10 aa, Homo sapiens
  Table A; Target 7591; HLA-C*07:01; AFP; ENSG00000081051; TAA
DLCQAQGVAL

SEQ ID NO: 7592 - protein, 9 aa, Homo sapiens
  Table A; Target 7592; HLA-A*25:01; AFP; ENSG00000081051; TAA
DSYQCTAEI

SEQ ID NO: 7593 - protein, 8 aa, Homo sapiens
  Table A; Target 7593; HLA-A*33:01; AFP; ENSG00000081051; TAA
DVAHVHEH

SEQ ID NO: 7594 - protein, 8 aa, Homo sapiens
  Table A; Target 7594; HLA-A*68:01; AFP; ENSG00000081051; TAA
DVAHVHEH

SEQ ID NO: 7595 - protein, 9 aa, Homo sapiens
  Table A; Target 7595; HLA-A*68:02; AFP; ENSG00000081051; TAA
DVAHVHEHC

SEQ ID NO: 7596 - protein, 9 aa, Homo sapiens
  Table A; Target 7596; HLA-B*35:01; AFP; ENSG00000081051; TAA
EATYKEVSK

SEQ ID NO: 7597 - protein, 9 aa, Homo sapiens
  Table A; Target 7597; HLA-B*54:01; AFP; ENSG00000081051; TAA
EATYKEVSK

SEQ ID NO: 7598 - protein, 10 aa, Homo sapiens
  Table A; Target 7598; HLA-A*26:01; AFP; ENSG00000081051; TAA
EATYKEVSKM

SEQ ID NO: 7599 - protein, 10 aa, Homo sapiens
  Table A; Target 7599; HLA-A*68:01; AFP; ENSG00000081051; TAA
EATYKEVSKM

SEQ ID NO: 7600 - protein, 10 aa, Homo sapiens
  Table A; Target 7600; HLA-A*68:02; AFP; ENSG00000081051; TAA
EAVIADFSGL

SEQ ID NO: 7601 - protein, 10 aa, Homo sapiens
  Table A; Target 7601; HLA-A*29:02; AFP; ENSG00000081051; TAA
EAYEEDRETF

SEQ ID NO: 7602 - protein, 10 aa, Homo sapiens
  Table A; Target 7602; HLA-A*33:01; AFP; ENSG00000081051; TAA
EAYEEDRETF

SEQ ID NO: 7603 - protein, 10 aa, Homo sapiens
  Table A; Target 7603; HLA-A*68:01; AFP; ENSG00000081051; TAA
EAYEEDRETF

SEQ ID NO: 7604 - protein, 10 aa, Homo sapiens
  Table A; Target 7604; HLA-B*18:01; AFP; ENSG00000081051; TAA
EAYEEDRETF

SEQ ID NO: 7605 - protein, 10 aa, Homo sapiens
  Table A; Target 7605; HLA-B*39:01; AFP; ENSG00000081051; TAA
EAYEEDRETF

SEQ ID NO: 7606 - protein, 10 aa, Homo sapiens
  Table A; Target 7606; HLA-C*12:03; AFP; ENSG00000081051; TAA
EAYEEDRETF

SEQ ID NO: 7607 - protein, 10 aa, Homo sapiens
  Table A; Target 7607; HLA-C*16:01; AFP; ENSG00000081051; TAA
EAYEEDRETF

SEQ ID NO: 7608 - protein, 11 aa, Homo sapiens
  Table A; Target 7608; HLA-B*35:01; AFP; ENSG00000081051; TAA
EAYEEDRETFM

SEQ ID NO: 7609 - protein, 10 aa, Homo sapiens
  Table A; Target 7609; HLA-A*68:02; AFP; ENSG00000081051; TAA
ECFQTKAATV

SEQ ID NO: 7610 - protein, 10 aa, Homo sapiens
  Table A; Target 7610; HLA-B*51:01; AFP; ENSG00000081051; TAA
ECFQTKAATV

SEQ ID NO: 7611 - protein, 9 aa, Homo sapiens
  Table A; Target 7611; HLA-A*33:01; AFP; ENSG00000081051; TAA
EDRETFMNK

SEQ ID NO: 7612 - protein, 9 aa, Homo sapiens
  Table A; Target 7612; HLA-A*33:03; AFP; ENSG00000081051; TAA
EDRETFMNK

SEQ ID NO: 7613 - protein, 10 aa, Homo sapiens
  Table A; Target 7613; HLA-B*27:02; AFP; ENSG00000081051; TAA
EEDRETFMNK

SEQ ID NO: 7614 - protein, 8 aa, Homo sapiens
  Table A; Target 7614; HLA-B*44:02; AFP; ENSG00000081051; TAA
EEELQKYI

SEQ ID NO: 7615 - protein, 8 aa, Homo sapiens
  Table A; Target 7615; HLA-B*49:01; AFP; ENSG00000081051; TAA
EEELQKYI

SEQ ID NO: 7616 - protein, 9 aa, Homo sapiens
  Table A; Target 7616; HLA-A*33:03; AFP; ENSG00000081051; TAA
EEGQKLISK

SEQ ID NO: 7617 - protein, 9 aa, Homo sapiens
  Table A; Target 7617; HLA-A*68:01; AFP; ENSG00000081051; TAA
EEGQKLISK

SEQ ID NO: 7618 - protein, 11 aa, Homo sapiens
  Table A; Target 7618; HLA-B*44:03; AFP; ENSG00000081051; TAA
EEGQKLISKTR

SEQ ID NO: 7619 - protein, 8 aa, Homo sapiens
  Table A; Target 7619; HLA-B*18:01; AFP; ENSG00000081051; TAA
EEQLEAVI

SEQ ID NO: 7620 - protein, 11 aa, Homo sapiens
  Table A; Target 7620; HLA-B*27:02; AFP; ENSG00000081051; TAA
EEQLEAVIADF

SEQ ID NO: 7621 - protein, 10 aa, Homo sapiens
  Table A; Target 7621; HLA-A*33:03; AFP; ENSG00000081051; TAA
EFLINLVKQK

SEQ ID NO: 7622 - protein, 11 aa, Homo sapiens
  Table A; Target 7622; HLA-A*68:01; AFP; ENSG00000081051; TAA
EGAADIIIGHL

SEQ ID NO: 7623 - protein, 10 aa, Homo sapiens
  Table A; Target 7623; HLA-A*23:01; AFP; ENSG00000081051; TAA
EGLSPNLNRF

SEQ ID NO: 7624 - protein, 10 aa, Homo sapiens
  Table A; Target 7624; HLA-A*24:02; AFP; ENSG00000081051; TAA
EGLSPNLNRF

SEQ ID NO: 7625 - protein, 10 aa, Homo sapiens
  Table A; Target 7625; HLA-A*25:01; AFP; ENSG00000081051; TAA
EGLSPNLNRF

SEQ ID NO: 7626 - protein, 10 aa, Homo sapiens
  Table A; Target 7626; HLA-A*26:01; AFP; ENSG00000081051; TAA
EGLSPNLNRF

SEQ ID NO: 7627 - protein, 10 aa, Homo sapiens
  Table A; Target 7627; HLA-A*33:03; AFP; ENSG00000081051; TAA
EGLSPNLNRF

SEQ ID NO: 7628 - protein, 10 aa, Homo sapiens
  Table A; Target 7628; HLA-A*33:01; AFP; ENSG00000081051; TAA
EGQKLISKTR

SEQ ID NO: 7629 - protein, 9 aa, Homo sapiens
  Table A; Target 7629; HLA-B*13:02; AFP; ENSG00000081051; TAA
EIQKLVLDV

SEQ ID NO: 7630 - protein, 9 aa, Homo sapiens
  Table A; Target 7630; HLA-C*06:02; AFP; ENSG00000081051; TAA
EIQKLVLDV

SEQ ID NO: 7631 - protein, 10 aa, Homo sapiens
  Table A; Target 7631; HLA-A*25:01; AFP; ENSG00000081051; TAA
EISLADLATI

SEQ ID NO: 7632 - protein, 10 aa, Homo sapiens
  Table A; Target 7632; HLA-C*07:01; AFP; ENSG00000081051; TAA
EKCFQTENPL

SEQ ID NO: 7633 - protein, 8 aa, Homo sapiens
  Table A; Target 7633; HLA-C*07:01; AFP; ENSG00000081051; TAA
EKEILEKY

SEQ ID NO: 7634 - protein, 8 aa, Homo sapiens
  Table A; Target 7634; HLA-B*08:01; AFP; ENSG00000081051; TAA
ELMAITRK

SEQ ID NO: 7635 - protein, 9 aa, Homo sapiens
  Table A; Target 7635; HLA-A*24:02; AFP; ENSG00000081051; TAA
ELMAITRKM

SEQ ID NO: 7636 - protein, 9 aa, Homo sapiens
  Table A; Target 7636; HLA-A*33:01; AFP; ENSG00000081051; TAA
ELMAITRKM

SEQ ID NO: 7637 - protein, 9 aa, Homo sapiens
  Table A; Target 7637; HLA-A*68:02; AFP; ENSG00000081051; TAA
ELMAITRKM

SEQ ID NO: 7638 - protein, 9 aa, Homo sapiens
  Table A; Target 7638; HLA-C*07:01; AFP; ENSG00000081051; TAA
ELMAITRKM

SEQ ID NO: 7639 - protein, 11 aa, Homo sapiens
  Table A; Target 7639; HLA-B*54:01; AFP; ENSG00000081051; TAA
ELMAITRKMAA

SEQ ID NO: 7640 - protein, 8 aa, Homo sapiens
  Table A; Target 7640; HLA-B*08:01; AFP; ENSG00000081051; TAA
ELRESSLL

SEQ ID NO: 7641 - protein, 9 aa, Homo sapiens
  Table A; Target 7641; HLA-A*02:04; AFP; ENSG00000081051; TAA
EMTPVNPGV

SEQ ID NO: 7642 - protein, 9 aa, Homo sapiens
  Table A; Target 7642; HLA-A*32:01; AFP; ENSG00000081051; TAA
EMTPVNPGV

SEQ ID NO: 7643 - protein, 9 aa, Homo sapiens
  Table A; Target 7643; HLA-B*38:01; AFP; ENSG00000081051; TAA
EMTPVNPGV

SEQ ID NO: 7644 - protein, 9 aa, Homo sapiens
  Table A; Target 7644; HLA-B*39:01; AFP; ENSG00000081051; TAA
EMTPVNPGV

SEQ ID NO: 7645 - protein, 9 aa, Homo sapiens
  Table A; Target 7645; HLA-B*51:01; AFP; ENSG00000081051; TAA
EMTPVNPGV

SEQ ID NO: 7646 - protein, 9 aa, Homo sapiens
  Table A; Target 7646; HLA-C*02:02; AFP; ENSG00000081051; TAA
EMTPVNPGV

SEQ ID NO: 7647 - protein, 9 aa, Homo sapiens
  Table A; Target 7647; HLA-C*16:01; AFP; ENSG00000081051; TAA
EMTPVNPGV

SEQ ID NO: 7648 - protein, 10 aa, Homo sapiens
  Table A; Target 7648; HLA-A*33:03; AFP; ENSG00000081051; TAA
ENAVECFQTK

SEQ ID NO: 7649 - protein, 10 aa, Homo sapiens
  Table A; Target 7649; HLA-A*68:01; AFP; ENSG00000081051; TAA
ENAVECFQTK

SEQ ID NO: 7650 - protein, 10 aa, Homo sapiens
  Table A; Target 7650; HLA-B*27:02; AFP; ENSG00000081051; TAA
ENAVECFQTK

SEQ ID NO: 7651 - protein, 10 aa, Homo sapiens
  Table A; Target 7651; HLA-C*07:01; AFP; ENSG00000081051; TAA
ENAVECFQTK

SEQ ID NO: 7652 - protein, 9 aa, Homo sapiens
  Table A; Target 7652; HLA-B*18:01; AFP; ENSG00000081051; TAA
EPVTSCEAY

SEQ ID NO: 7653 - protein, 9 aa, Homo sapiens
  Table A; Target 7653; HLA-C*03:03; AFP; ENSG00000081051; TAA
EPVTSCEAY

SEQ ID NO: 7654 - protein, 9 aa, Homo sapiens
  Table A; Target 7654; HLA-A*29:02; AFP; ENSG00000081051; TAA
ETFMNKFIY

SEQ ID NO: 7655 - protein, 9 aa, Homo sapiens
  Table A; Target 7655; HLA-C*07:01; AFP; ENSG00000081051; TAA
ETFMNKFIY

SEQ ID NO: 7656 - protein, 8 aa, Homo sapiens
  Table A; Target 7656; HLA-A*23:01; AFP; ENSG00000081051; TAA
ETYVPPAF

SEQ ID NO: 7657 - protein, 8 aa, Homo sapiens
  Table A; Target 7657; HLA-A*32:01; AFP; ENSG00000081051; TAA
ETYVPPAF

SEQ ID NO: 7658 - protein, 8 aa, Homo sapiens
  Table A; Target 7658; HLA-A*33:01; AFP; ENSG00000081051; TAA
ETYVPPAF

SEQ ID NO: 7659 - protein, 8 aa, Homo sapiens
  Table A; Target 7659; HLA-A*33:03; AFP; ENSG00000081051; TAA
ETYVPPAF

SEQ ID NO: 7660 - protein, 8 aa, Homo sapiens
  Table A; Target 7660; HLA-A*68:01; AFP; ENSG00000081051; TAA
ETYVPPAF

SEQ ID NO: 7661 - protein, 8 aa, Homo sapiens
  Table A; Target 7661; HLA-B*08:01; AFP; ENSG00000081051; TAA
ETYVPPAF

SEQ ID NO: 7662 - protein, 8 aa, Homo sapiens
  Table A; Target 7662; HLA-B*35:01; AFP; ENSG00000081051; TAA
ETYVPPAF

SEQ ID NO: 7663 - protein, 8 aa, Homo sapiens
  Table A; Target 7663; HLA-B*46:01; AFP; ENSG00000081051; TAA
ETYVPPAF

SEQ ID NO: 7664 - protein, 8 aa, Homo sapiens
  Table A; Target 7664; HLA-B*51:01; AFP; ENSG00000081051; TAA
ETYVPPAF

SEQ ID NO: 7665 - protein, 8 aa, Homo sapiens
  Table A; Target 7665; HLA-B*58:01; AFP; ENSG00000081051; TAA
ETYVPPAF

SEQ ID NO: 7666 - protein, 8 aa, Homo sapiens
  Table A; Target 7666; HLA-C*03:03; AFP; ENSG00000081051; TAA
ETYVPPAF

SEQ ID NO: 7667 - protein, 8 aa, Homo sapiens
  Table A; Target 7667; HLA-C*03:04; AFP; ENSG00000081051; TAA
ETYVPPAF

SEQ ID NO: 7668 - protein, 8 aa, Homo sapiens
  Table A; Target 7668; HLA-C*07:01; AFP; ENSG00000081051; TAA
ETYVPPAF

SEQ ID NO: 7669 - protein, 8 aa, Homo sapiens
  Table A; Target 7669; HLA-C*07:02; AFP; ENSG00000081051; TAA
ETYVPPAF

SEQ ID NO: 7670 - protein, 8 aa, Homo sapiens
  Table A; Target 7670; HLA-C*12:03; AFP; ENSG00000081051; TAA
ETYVPPAF

SEQ ID NO: 7671 - protein, 8 aa, Homo sapiens
  Table A; Target 7671; HLA-C*16:04; AFP; ENSG00000081051; TAA
ETYVPPAF

SEQ ID NO: 7672 - protein, 9 aa, Homo sapiens
  Table A; Target 7672; HLA-A*68:02; AFP; ENSG00000081051; TAA
ETYVPPAFS

SEQ ID NO: 7673 - protein, 10 aa, Homo sapiens
  Table A; Target 7673; HLA-A*33:03; AFP; ENSG00000081051; TAA
EVSKMVKDAL

SEQ ID NO: 7674 - protein, 10 aa, Homo sapiens
  Table A; Target 7674; HLA-C*06:02; AFP; ENSG00000081051; TAA
EVSKMVKDAL

SEQ ID NO: 7675 - protein, 10 aa, Homo sapiens
  Table A; Target 7675; HLA-C*07:02; AFP; ENSG00000081051; TAA
EVSKMVKDAL

SEQ ID NO: 7676 - protein, 8 aa, Homo sapiens
  Table A; Target 7676; HLA-A*24:02; AFP; ENSG00000081051; TAA
EYGIASIL

SEQ ID NO: 7677 - protein, 8 aa, Homo sapiens
  Table A; Target 7677; HLA-B*35:03; AFP; ENSG00000081051; TAA
EYGIASIL

SEQ ID NO: 7678 - protein, 8 aa, Homo sapiens
  Table A; Target 7678; HLA-C*07:01; AFP; ENSG00000081051; TAA
EYGIASIL

SEQ ID NO: 7679 - protein, 11 aa, Homo sapiens
  Table A; Target 7679; HLA-A*24:02; AFP; ENSG00000081051; TAA
EYGIASILDSY

SEQ ID NO: 7680 - protein, 11 aa, Homo sapiens
  Table A; Target 7680; HLA-A*33:03; AFP; ENSG00000081051; TAA
EYGIASILDSY

SEQ ID NO: 7681 - protein, 11 aa, Homo sapiens
  Table A; Target 7681; HLA-C*07:01; AFP; ENSG00000081051; TAA
EYGIASILDSY

SEQ ID NO: 7682 - protein, 8 aa, Homo sapiens
  Table A; Target 7682; HLA-A*23:01; AFP; ENSG00000081051; TAA
EYYLQNAF

SEQ ID NO: 7683 - protein, 8 aa, Homo sapiens
  Table A; Target 7683; HLA-A*24:02; AFP; ENSG00000081051; TAA
EYYLQNAF

SEQ ID NO: 7684 - protein, 8 aa, Homo sapiens
  Table A; Target 7684; HLA-A*33:03; AFP; ENSG00000081051; TAA
EYYLQNAF

SEQ ID NO: 7685 - protein, 8 aa, Homo sapiens
  Table A; Target 7685; HLA-B*08:01; AFP; ENSG00000081051; TAA
EYYLQNAF

SEQ ID NO: 7686 - protein, 9 aa, Homo sapiens
  Table A; Target 7686; HLA-A*33:03; AFP; ENSG00000081051; TAA
EYYLQNAFL

SEQ ID NO: 7687 - protein, 9 aa, Homo sapiens
  Table A; Target 7687; HLA-C*07:01; AFP; ENSG00000081051; TAA
EYYLQNAFL

SEQ ID NO: 7688 - protein, 10 aa, Homo sapiens
  Table A; Target 7688; HLA-C*06:02; AFP; ENSG00000081051; TAA
EYYLQNAFLV

SEQ ID NO: 7689 - protein, 10 aa, Homo sapiens
  Table A; Target 7689; HLA-C*07:01; AFP; ENSG00000081051; TAA
EYYLQNAFLV

SEQ ID NO: 7690 - protein, 8 aa, Homo sapiens
  Table A; Target 7690; HLA-B*38:01; AFP; ENSG00000081051; TAA
FAEEGQKL

SEQ ID NO: 7691 - protein, 8 aa, Homo sapiens
  Table A; Target 7691; HLA-B*40:01; AFP; ENSG00000081051; TAA
FAEEGQKL

SEQ ID NO: 7692 - protein, 8 aa, Homo sapiens
  Table A; Target 7692; HLA-C*04:01; AFP; ENSG00000081051; TAA
FAEEGQKL

SEQ ID NO: 7693 - protein, 8 aa, Homo sapiens
  Table A; Target 7693; HLA-C*07:04; AFP; ENSG00000081051; TAA
FAEEGQKL

SEQ ID NO: 7694 - protein, 8 aa, Homo sapiens
  Table A; Target 7694; HLA-C*16:01; AFP; ENSG00000081051; TAA
FAEEGQKL

SEQ ID NO: 7695 - protein, 8 aa, Homo sapiens
  Table A; Target 7695; HLA-C*16:02; AFP; ENSG00000081051; TAA
FAEEGQKL

SEQ ID NO: 7696 - protein, 9 aa, Homo sapiens
  Table A; Target 7696; HLA-B*35:03; AFP; ENSG00000081051; TAA
FAEEGQKLI

SEQ ID NO: 7697 - protein, 9 aa, Homo sapiens
  Table A; Target 7697; HLA-B*39:01; AFP; ENSG00000081051; TAA
FAEEGQKLI

SEQ ID NO: 7698 - protein, 9 aa, Homo sapiens
  Table A; Target 7698; HLA-C*02:02; AFP; ENSG00000081051; TAA
FAEEGQKLI

SEQ ID NO: 7699 - protein, 9 aa, Homo sapiens
  Table A; Target 7699; HLA-C*04:01; AFP; ENSG00000081051; TAA
FAEEGQKLI

SEQ ID NO: 7700 - protein, 9 aa, Homo sapiens
  Table A; Target 7700; HLA-C*12:03; AFP; ENSG00000081051; TAA
FAEEGQKLI

SEQ ID NO: 7701 - protein, 11 aa, Homo sapiens
  Table A; Target 7701; HLA-A*03:01; AFP; ENSG00000081051; TAA
FAEEGQKLISK

SEQ ID NO: 7702 - protein, 11 aa, Homo sapiens
  Table A; Target 7702; HLA-A*03:02; AFP; ENSG00000081051; TAA
FAEEGQKLISK

SEQ ID NO: 7703 - protein, 11 aa, Homo sapiens
  Table A; Target 7703; HLA-A*11:01; AFP; ENSG00000081051; TAA
FAEEGQKLISK

SEQ ID NO: 7704 - protein, 11 aa, Homo sapiens
  Table A; Target 7704; HLA-A*33:01; AFP; ENSG00000081051; TAA
FAEEGQKLISK

SEQ ID NO: 7705 - protein, 11 aa, Homo sapiens
  Table A; Target 7705; HLA-A*68:01; AFP; ENSG00000081051; TAA
FAEEGQKLISK

SEQ ID NO: 7706 - protein, 11 aa, Homo sapiens
  Table A; Target 7706; HLA-B*54:01; AFP; ENSG00000081051; TAA
FAEEGQKLISK

SEQ ID NO: 7707 - protein, 11 aa, Homo sapiens
  Table A; Target 7707; HLA-C*05:01; AFP; ENSG00000081051; TAA
FAEEGQKLISK

SEQ ID NO: 7708 - protein, 11 aa, Homo sapiens
  Table A; Target 7708; HLA-C*07:06; AFP; ENSG00000081051; TAA
FAEEGQKLISK

SEQ ID NO: 7709 - protein, 8 aa, Homo sapiens
  Table A; Target 7709; HLA-B*56:01; AFP; ENSG00000081051; TAA
FAQFVQEA

SEQ ID NO: 7710 - protein, 8 aa, Homo sapiens
  Table A; Target 7710; HLA-C*12:03; AFP; ENSG00000081051; TAA
FAQFVQEA

SEQ ID NO: 7711 - protein, 9 aa, Homo sapiens
  Table A; Target 7711; HLA-B*54:01; AFP; ENSG00000081051; TAA
FAQFVQEAT

SEQ ID NO: 7712 - protein, 10 aa, Homo sapiens
  Table A; Target 7712; HLA-A*26:01; AFP; ENSG00000081051; TAA
FAQFVQEATY

SEQ ID NO: 7713 - protein, 10 aa, Homo sapiens
  Table A; Target 7713; HLA-B*15:01; AFP; ENSG00000081051; TAA
FAQFVQEATY

SEQ ID NO: 7714 - protein, 10 aa, Homo sapiens
  Table A; Target 7714; HLA-B*15:03; AFP; ENSG00000081051; TAA
FAQFVQEATY

SEQ ID NO: 7715 - protein, 10 aa, Homo sapiens
  Table A; Target 7715; HLA-B*18:01; AFP; ENSG00000081051; TAA
FAQFVQEATY

SEQ ID NO: 7716 - protein, 10 aa, Homo sapiens
  Table A; Target 7716; HLA-B*27:02; AFP; ENSG00000081051; TAA
FAQFVQEATY

SEQ ID NO: 7717 - protein, 10 aa, Homo sapiens
  Table A; Target 7717; HLA-B*58:01; AFP; ENSG00000081051; TAA
FAQFVQEATY

SEQ ID NO: 7718 - protein, 10 aa, Homo sapiens
  Table A; Target 7718; HLA-C*01:02; AFP; ENSG00000081051; TAA
FAQFVQEATY

SEQ ID NO: 7719 - protein, 10 aa, Homo sapiens
  Table A; Target 7719; HLA-C*03:04; AFP; ENSG00000081051; TAA
FAQFVQEATY

SEQ ID NO: 7720 - protein, 10 aa, Homo sapiens
  Table A; Target 7720; HLA-C*06:02; AFP; ENSG00000081051; TAA
FAQFVQEATY

SEQ ID NO: 7721 - protein, 10 aa, Homo sapiens
  Table A; Target 7721; HLA-C*07:02; AFP; ENSG00000081051; TAA
FAQFVQEATY

SEQ ID NO: 7722 - protein, 10 aa, Homo sapiens
  Table A; Target 7722; HLA-C*07:04; AFP; ENSG00000081051; TAA
FAQFVQEATY

SEQ ID NO: 7723 - protein, 11 aa, Homo sapiens
  Table A; Target 7723; HLA-A*03:02; AFP; ENSG00000081051; TAA
FAQFVQEATYK

SEQ ID NO: 7724 - protein, 11 aa, Homo sapiens
  Table A; Target 7724; HLA-A*11:01; AFP; ENSG00000081051; TAA
FAQFVQEATYK

SEQ ID NO: 7725 - protein, 9 aa, Homo sapiens
  Table A; Target 7725; HLA-B*54:01; AFP; ENSG00000081051; TAA
FFAQFVQEA

SEQ ID NO: 7726 - protein, 11 aa, Homo sapiens
  Table A; Target 7726; HLA-A*30:02; AFP; ENSG00000081051; TAA
FFAQFVQEATY

SEQ ID NO: 7727 - protein, 8 aa, Homo sapiens
  Table A; Target 7727; HLA-B*54:01; AFP; ENSG00000081051; TAA
FGTRTFQA

SEQ ID NO: 7728 - protein, 9 aa, Homo sapiens
  Table A; Target 7728; HLA-A*24:02; AFP; ENSG00000081051; TAA
FGTRTFQAI

SEQ ID NO: 7729 - protein, 9 aa, Homo sapiens
  Table A; Target 7729; HLA-A*03:02; AFP; ENSG00000081051; TAA
FLASFVHEY

SEQ ID NO: 7730 - protein, 9 aa, Homo sapiens
  Table A; Target 7730; HLA-A*23:01; AFP; ENSG00000081051; TAA
FLASFVHEY

SEQ ID NO: 7731 - protein, 9 aa, Homo sapiens
  Table A; Target 7731; HLA-A*24:02; AFP; ENSG00000081051; TAA
FLASFVHEY

SEQ ID NO: 7732 - protein, 9 aa, Homo sapiens
  Table A; Target 7732; HLA-A*31:01; AFP; ENSG00000081051; TAA
FLASFVHEY

SEQ ID NO: 7733 - protein, 9 aa, Homo sapiens
  Table A; Target 7733; HLA-A*33:03; AFP; ENSG00000081051; TAA
FLASFVHEY

SEQ ID NO: 7734 - protein, 9 aa, Homo sapiens
  Table A; Target 7734; HLA-A*68:01; AFP; ENSG00000081051; TAA
FLASFVHEY

SEQ ID NO: 7735 - protein, 9 aa, Homo sapiens
  Table A; Target 7735; HLA-B*13:02; AFP; ENSG00000081051; TAA
FLASFVHEY

SEQ ID NO: 7736 - protein, 9 aa, Homo sapiens
  Table A; Target 7736; HLA-B*27:02; AFP; ENSG00000081051; TAA
FLASFVHEY

SEQ ID NO: 7737 - protein, 9 aa, Homo sapiens
  Table A; Target 7737; HLA-B*39:01; AFP; ENSG00000081051; TAA
FLASFVHEY

SEQ ID NO: 7738 - protein, 9 aa, Homo sapiens
  Table A; Target 7738; HLA-B*51:01; AFP; ENSG00000081051; TAA
FLASFVHEY

SEQ ID NO: 7739 - protein, 9 aa, Homo sapiens
  Table A; Target 7739; HLA-B*55:01; AFP; ENSG00000081051; TAA
FLASFVHEY

SEQ ID NO: 7740 - protein, 9 aa, Homo sapiens
  Table A; Target 7740; HLA-B*58:01; AFP; ENSG00000081051; TAA
FLASFVHEY

SEQ ID NO: 7741 - protein, 9 aa, Homo sapiens
  Table A; Target 7741; HLA-C*01:02; AFP; ENSG00000081051; TAA
FLASFVHEY

SEQ ID NO: 7742 - protein, 9 aa, Homo sapiens
  Table A; Target 7742; HLA-C*03:03; AFP; ENSG00000081051; TAA
FLASFVHEY

SEQ ID NO: 7743 - protein, 9 aa, Homo sapiens
  Table A; Target 7743; HLA-C*07:01; AFP; ENSG00000081051; TAA
FLASFVHEY

SEQ ID NO: 7744 - protein, 9 aa, Homo sapiens
  Table A; Target 7744; HLA-C*07:06; AFP; ENSG00000081051; TAA
FLASFVHEY

SEQ ID NO: 7745 - protein, 9 aa, Homo sapiens
  Table A; Target 7745; HLA-C*14:02; AFP; ENSG00000081051; TAA
FLASFVHEY

SEQ ID NO: 7746 - protein, 10 aa, Homo sapiens
  Table A; Target 7746; HLA-A*02:03; AFP; ENSG00000081051; TAA
FLGDRDFNQF

SEQ ID NO: 7747 - protein, 10 aa, Homo sapiens
  Table A; Target 7747; HLA-A*02:04; AFP; ENSG00000081051; TAA
FLGDRDFNQF

SEQ ID NO: 7748 - protein, 10 aa, Homo sapiens
  Table A; Target 7748; HLA-A*02:07; AFP; ENSG00000081051; TAA
FLGDRDFNQF

SEQ ID NO: 7749 - protein, 9 aa, Homo sapiens
  Table A; Target 7749; HLA-A*02:03; AFP; ENSG00000081051; TAA
FLINLVKQK

SEQ ID NO: 7750 - protein, 9 aa, Homo sapiens
  Table A; Target 7750; HLA-A*03:01; AFP; ENSG00000081051; TAA
FLINLVKQK

SEQ ID NO: 7751 - protein, 9 aa, Homo sapiens
  Table A; Target 7751; HLA-A*03:02; AFP; ENSG00000081051; TAA
FLINLVKQK

SEQ ID NO: 7752 - protein, 9 aa, Homo sapiens
  Table A; Target 7752; HLA-A*11:01; AFP; ENSG00000081051; TAA
FLINLVKQK

SEQ ID NO: 7753 - protein, 9 aa, Homo sapiens
  Table A; Target 7753; HLA-A*02:07; AFP; ENSG00000081051; TAA
FLLNFTESR

SEQ ID NO: 7754 - protein, 9 aa, Homo sapiens
  Table A; Target 7754; HLA-A*29:02; AFP; ENSG00000081051; TAA
FLLNFTESR

SEQ ID NO: 7755 - protein, 9 aa, Homo sapiens
  Table A; Target 7755; HLA-A*31:01; AFP; ENSG00000081051; TAA
FLLNFTESR

SEQ ID NO: 7756 - protein, 11 aa, Homo sapiens
  Table A; Target 7756; HLA-A*02:07; AFP; ENSG00000081051; TAA
FLLNFTESRTL

SEQ ID NO: 7757 - protein, 9 aa, Homo sapiens
  Table A; Target 7757; HLA-C*02:02; AFP; ENSG00000081051; TAA
FLVAYTKKA

SEQ ID NO: 7758 - protein, 9 aa, Homo sapiens
  Table A; Target 7758; HLA-A*03:01; AFP; ENSG00000081051; TAA
FLYAPTILL

SEQ ID NO: 7759 - protein, 9 aa, Homo sapiens
  Table A; Target 7759; HLA-A*68:02; AFP; ENSG00000081051; TAA
FLYAPTILL

SEQ ID NO: 7760 - protein, 9 aa, Homo sapiens
  Table A; Target 7760; HLA-C*02:02; AFP; ENSG00000081051; TAA
FLYAPTILL

SEQ ID NO: 7761 - protein, 10 aa, Homo sapiens
  Table A; Target 7761; HLA-A*02:03; AFP; ENSG00000081051; TAA
FLYAPTILLW

SEQ ID NO: 7762 - protein, 10 aa, Homo sapiens
  Table A; Target 7762; HLA-A*02:04; AFP; ENSG00000081051; TAA
FLYAPTILLW

SEQ ID NO: 7763 - protein, 10 aa, Homo sapiens
  Table A; Target 7763; HLA-A*24:02; AFP; ENSG00000081051; TAA
FLYAPTILLW

SEQ ID NO: 7764 - protein, 10 aa, Homo sapiens
  Table A; Target 7764; HLA-B*57:01; AFP; ENSG00000081051; TAA
FLYAPTILLW

SEQ ID NO: 7765 - protein, 9 aa, Homo sapiens
  Table A; Target 7765; HLA-A*24:02; AFP; ENSG00000081051; TAA
FMNKFIYEI

SEQ ID NO: 7766 - protein, 9 aa, Homo sapiens
  Table A; Target 7766; HLA-A*68:02; AFP; ENSG00000081051; TAA
FMNKFIYEI

SEQ ID NO: 7767 - protein, 9 aa, Homo sapiens
  Table A; Target 7767; HLA-B*13:02; AFP; ENSG00000081051; TAA
FMNKFIYEI

SEQ ID NO: 7768 - protein, 9 aa, Homo sapiens
  Table A; Target 7768; HLA-B*54:01; AFP; ENSG00000081051; TAA
FMNKFIYEI

SEQ ID NO: 7769 - protein, 8 aa, Homo sapiens
  Table A; Target 7769; HLA-B*27:05; AFP; ENSG00000081051; TAA
FQAITVTK

SEQ ID NO: 7770 - protein, 9 aa, Homo sapiens
  Table A; Target 7770; HLA-A*02:07; AFP; ENSG00000081051; TAA
FQAITVTKL

SEQ ID NO: 7771 - protein, 9 aa, Homo sapiens
  Table A; Target 7771; HLA-A*23:01; AFP; ENSG00000081051; TAA
FQAITVTKL

SEQ ID NO: 7772 - protein, 9 aa, Homo sapiens
  Table A; Target 7772; HLA-A*26:01; AFP; ENSG00000081051; TAA
FQAITVTKL

SEQ ID NO: 7773 - protein, 9 aa, Homo sapiens
  Table A; Target 7773; HLA-B*35:03; AFP; ENSG00000081051; TAA
FQAITVTKL

SEQ ID NO: 7774 - protein, 9 aa, Homo sapiens
  Table A; Target 7774; HLA-B*46:01; AFP; ENSG00000081051; TAA
FQAITVTKL

SEQ ID NO: 7775 - protein, 9 aa, Homo sapiens
  Table A; Target 7775; HLA-B*55:01; AFP; ENSG00000081051; TAA
FQAITVTKL

SEQ ID NO: 7776 - protein, 9 aa, Homo sapiens
  Table A; Target 7776; HLA-C*03:03; AFP; ENSG00000081051; TAA
FQAITVTKL

SEQ ID NO: 7777 - protein, 9 aa, Homo sapiens
  Table A; Target 7777; HLA-C*05:01; AFP; ENSG00000081051; TAA
FQAITVTKL

SEQ ID NO: 7778 - protein, 9 aa, Homo sapiens
  Table A; Target 7778; HLA-C*14:02; AFP; ENSG00000081051; TAA
FQAITVTKL

SEQ ID NO: 7779 - protein, 9 aa, Homo sapiens
  Table A; Target 7779; HLA-C*16:02; AFP; ENSG00000081051; TAA
FQAITVTKL

SEQ ID NO: 7780 - protein, 9 aa, Homo sapiens
  Table A; Target 7780; HLA-C*16:04; AFP; ENSG00000081051; TAA
FQAITVTKL

SEQ ID NO: 7781 - protein, 10 aa, Homo sapiens
  Table A; Target 7781; HLA-B*07:02; AFP; ENSG00000081051; TAA
FQAITVTKLS

SEQ ID NO: 7782 - protein, 10 aa, Homo sapiens
  Table A; Target 7782; HLA-C*04:01; AFP; ENSG00000081051; TAA
FQAITVTKLS

SEQ ID NO: 7783 - protein, 8 aa, Homo sapiens
  Table A; Target 7783; HLA-C*07:01; AFP; ENSG00000081051; TAA
FQKLGEYY

SEQ ID NO: 7784 - protein, 8 aa, Homo sapiens
  Table A; Target 7784; HLA-C*12:03; AFP; ENSG00000081051; TAA
FQKLGEYY

SEQ ID NO: 7785 - protein, 8 aa, Homo sapiens
  Table A; Target 7785; HLA-C*16:04; AFP; ENSG00000081051; TAA
FQKLGEYY

SEQ ID NO: 7786 - protein, 9 aa, Homo sapiens
  Table A; Target 7786; HLA-A*02:04; AFP; ENSG00000081051; TAA
FQKLGEYYL

SEQ ID NO: 7787 - protein, 9 aa, Homo sapiens
  Table A; Target 7787; HLA-C*02:02; AFP; ENSG00000081051; TAA
FQKLGEYYL

SEQ ID NO: 7788 - protein, 9 aa, Homo sapiens
  Table A; Target 7788; HLA-A*02:03; AFP; ENSG00000081051; TAA
FQTENPLEC

SEQ ID NO: 7789 - protein, 9 aa, Homo sapiens
  Table A; Target 7789; HLA-B*27:05; AFP; ENSG00000081051; TAA
FQTENPLEC

SEQ ID NO: 7790 - protein, 9 aa, Homo sapiens
  Table A; Target 7790; HLA-B*54:01; AFP; ENSG00000081051; TAA
FQTENPLEC

SEQ ID NO: 7791 - protein, 9 aa, Homo sapiens
  Table A; Target 7791; HLA-C*06:02; AFP; ENSG00000081051; TAA
FQTENPLEC

SEQ ID NO: 7792 - protein, 8 aa, Homo sapiens
  Table A; Target 7792; HLA-A*02:01; AFP; ENSG00000081051; TAA
FQTKAATV

SEQ ID NO: 7793 - protein, 8 aa, Homo sapiens
  Table A; Target 7793; HLA-A*02:03; AFP; ENSG00000081051; TAA
FQTKAATV

SEQ ID NO: 7794 - protein, 8 aa, Homo sapiens
  Table A; Target 7794; HLA-A*30:01; AFP; ENSG00000081051; TAA
FQTKAATV

SEQ ID NO: 7795 - protein, 8 aa, Homo sapiens
  Table A; Target 7795; HLA-B*39:01; AFP; ENSG00000081051; TAA
FQTKAATV

SEQ ID NO: 7796 - protein, 8 aa, Homo sapiens
  Table A; Target 7796; HLA-B*40:02; AFP; ENSG00000081051; TAA
FQTKAATV

SEQ ID NO: 7797 - protein, 8 aa, Homo sapiens
  Table A; Target 7797; HLA-B*49:01; AFP; ENSG00000081051; TAA
FQTKAATV

SEQ ID NO: 7798 - protein, 8 aa, Homo sapiens
  Table A; Target 7798; HLA-B*51:01; AFP; ENSG00000081051; TAA
FQTKAATV

SEQ ID NO: 7799 - protein, 8 aa, Homo sapiens
  Table A; Target 7799; HLA-C*03:04; AFP; ENSG00000081051; TAA
FQTKAATV

SEQ ID NO: 7800 - protein, 8 aa, Homo sapiens
  Table A; Target 7800; HLA-C*04:01; AFP; ENSG00000081051; TAA
FQTKAATV

SEQ ID NO: 7801 - protein, 8 aa, Homo sapiens
  Table A; Target 7801; HLA-C*06:02; AFP; ENSG00000081051; TAA
FQTKAATV

SEQ ID NO: 7802 - protein, 8 aa, Homo sapiens
  Table A; Target 7802; HLA-C*07:04; AFP; ENSG00000081051; TAA
FQTKAATV

SEQ ID NO: 7803 - protein, 8 aa, Homo sapiens
  Table A; Target 7803; HLA-C*16:02; AFP; ENSG00000081051; TAA
FQTKAATV

SEQ ID NO: 7804 - protein, 9 aa, Homo sapiens
  Table A; Target 7804; HLA-B*39:01; AFP; ENSG00000081051; TAA
FQTKAATVT

SEQ ID NO: 7805 - protein, 9 aa, Homo sapiens
  Table A; Target 7805; HLA-C*07:04; AFP; ENSG00000081051; TAA
FQTKAATVT

SEQ ID NO: 7806 - protein, 10 aa, Homo sapiens
  Table A; Target 7806; HLA-A*03:01; AFP; ENSG00000081051; TAA
FQTKAATVTK

SEQ ID NO: 7807 - protein, 10 aa, Homo sapiens
  Table A; Target 7807; HLA-A*03:02; AFP; ENSG00000081051; TAA
FQTKAATVTK

SEQ ID NO: 7808 - protein, 10 aa, Homo sapiens
  Table A; Target 7808; HLA-A*11:01; AFP; ENSG00000081051; TAA
FQTKAATVTK

SEQ ID NO: 7809 - protein, 10 aa, Homo sapiens
  Table A; Target 7809; HLA-B*07:02; AFP; ENSG00000081051; TAA
FQTKAATVTK

SEQ ID NO: 7810 - protein, 10 aa, Homo sapiens
  Table A; Target 7810; HLA-B*13:02; AFP; ENSG00000081051; TAA
FQTKAATVTK

SEQ ID NO: 7811 - protein, 10 aa, Homo sapiens
  Table A; Target 7811; HLA-B*27:02; AFP; ENSG00000081051; TAA
FQTKAATVTK

SEQ ID NO: 7812 - protein, 10 aa, Homo sapiens
  Table A; Target 7812; HLA-C*02:02; AFP; ENSG00000081051; TAA
FQTKAATVTK

SEQ ID NO: 7813 - protein, 10 aa, Homo sapiens
  Table A; Target 7813; HLA-C*04:01; AFP; ENSG00000081051; TAA
FQTKAATVTK

SEQ ID NO: 7814 - protein, 10 aa, Homo sapiens
  Table A; Target 7814; HLA-C*06:02; AFP; ENSG00000081051; TAA
FQTKAATVTK

SEQ ID NO: 7815 - protein, 10 aa, Homo sapiens
  Table A; Target 7815; HLA-C*07:02; AFP; ENSG00000081051; TAA
FQTKAATVTK

SEQ ID NO: 7816 - protein, 10 aa, Homo sapiens
  Table A; Target 7816; HLA-C*07:06; AFP; ENSG00000081051; TAA
FQTKAATVTK

SEQ ID NO: 7817 - protein, 8 aa, Homo sapiens
  Table A; Target 7817; HLA-B*13:02; AFP; ENSG00000081051; TAA
FQVPEPVT

SEQ ID NO: 7818 - protein, 9 aa, Homo sapiens
  Table A; Target 7818; HLA-A*02:01; AFP; ENSG00000081051; TAA
FQVPEPVTS

SEQ ID NO: 7819 - protein, 9 aa, Homo sapiens
  Table A; Target 7819; HLA-B*39:01; AFP; ENSG00000081051; TAA
FQVPEPVTS

SEQ ID NO: 7820 - protein, 10 aa, Homo sapiens
  Table A; Target 7820; HLA-A*02:01; AFP; ENSG00000081051; TAA
FQVPEPVTSC

SEQ ID NO: 7821 - protein, 10 aa, Homo sapiens
  Table A; Target 7821; HLA-A*02:03; AFP; ENSG00000081051; TAA
FQVPEPVTSC

SEQ ID NO: 7822 - protein, 10 aa, Homo sapiens
  Table A; Target 7822; HLA-B*39:01; AFP; ENSG00000081051; TAA
FQVPEPVTSC

SEQ ID NO: 7823 - protein, 9 aa, Homo sapiens
  Table A; Target 7823; HLA-A*32:01; AFP; ENSG00000081051; TAA
FSSGEKNIF

SEQ ID NO: 7824 - protein, 9 aa, Homo sapiens
  Table A; Target 7824; HLA-B*58:01; AFP; ENSG00000081051; TAA
FSSGEKNIF

SEQ ID NO: 7825 - protein, 9 aa, Homo sapiens
  Table A; Target 7825; HLA-C*02:02; AFP; ENSG00000081051; TAA
FSSGEKNIF

SEQ ID NO: 7826 - protein, 10 aa, Homo sapiens
  Table A; Target 7826; HLA-A*68:02; AFP; ENSG00000081051; TAA
FSSGEKNIFL

SEQ ID NO: 7827 - protein, 10 aa, Homo sapiens
  Table A; Target 7827; HLA-C*07:04; AFP; ENSG00000081051; TAA
FSSGEKNIFL

SEQ ID NO: 7828 - protein, 10 aa, Homo sapiens
  Table A; Target 7828; HLA-A*30:02; AFP; ENSG00000081051; TAA
FSSLVVDETY

SEQ ID NO: 7829 - protein, 10 aa, Homo sapiens
  Table A; Target 7829; HLA-B*27:02; AFP; ENSG00000081051; TAA
FSSLVVDETY

SEQ ID NO: 7830 - protein, 10 aa, Homo sapiens
  Table A; Target 7830; HLA-B*35:01; AFP; ENSG00000081051; TAA
FSSLVVDETY

SEQ ID NO: 7831 - protein, 9 aa, Homo sapiens
  Table A; Target 7831; HLA-C*05:01; AFP; ENSG00000081051; TAA
FTEIQKLVL

SEQ ID NO: 7832 - protein, 9 aa, Homo sapiens
  Table A; Target 7832; HLA-C*16:02; AFP; ENSG00000081051; TAA
FTEIQKLVL

SEQ ID NO: 7833 - protein, 9 aa, Homo sapiens
  Table A; Target 7833; HLA-A*03:01; AFP; ENSG00000081051; TAA
FTESRTLHR

SEQ ID NO: 7834 - protein, 9 aa, Homo sapiens
  Table A; Target 7834; HLA-A*26:01; AFP; ENSG00000081051; TAA
FTKVNFTEI

SEQ ID NO: 7835 - protein, 9 aa, Homo sapiens
  Table A; Target 7835; HLA-A*31:01; AFP; ENSG00000081051; TAA
FTKVNFTEI

SEQ ID NO: 7836 - protein, 9 aa, Homo sapiens
  Table A; Target 7836; HLA-B*08:01; AFP; ENSG00000081051; TAA
FTKVNFTEI

SEQ ID NO: 7837 - protein, 9 aa, Homo sapiens
  Table A; Target 7837; HLA-B*49:01; AFP; ENSG00000081051; TAA
FTKVNFTEI

SEQ ID NO: 7838 - protein, 9 aa, Homo sapiens
  Table A; Target 7838; HLA-B*51:01; AFP; ENSG00000081051; TAA
FTKVNFTEI

SEQ ID NO: 7839 - protein, 9 aa, Homo sapiens
  Table A; Target 7839; HLA-B*54:01; AFP; ENSG00000081051; TAA
FTKVNFTEI

SEQ ID NO: 7840 - protein, 9 aa, Homo sapiens
  Table A; Target 7840; HLA-B*57:01; AFP; ENSG00000081051; TAA
FTKVNFTEI

SEQ ID NO: 7841 - protein, 9 aa, Homo sapiens
  Table A; Target 7841; HLA-C*01:02; AFP; ENSG00000081051; TAA
FTKVNFTEI

SEQ ID NO: 7842 - protein, 9 aa, Homo sapiens
  Table A; Target 7842; HLA-C*12:03; AFP; ENSG00000081051; TAA
FTKVNFTEI

SEQ ID NO: 7843 - protein, 11 aa, Homo sapiens
  Table A; Target 7843; HLA-B*27:02; AFP; ENSG00000081051; TAA
FTKVNFTEIQK

SEQ ID NO: 7844 - protein, 8 aa, Homo sapiens
  Table A; Target 7844; HLA-A*33:03; AFP; ENSG00000081051; TAA
FVQEATYK

SEQ ID NO: 7845 - protein, 8 aa, Homo sapiens
  Table A; Target 7845; HLA-B*27:05; AFP; ENSG00000081051; TAA
FVQEATYK

SEQ ID NO: 7846 - protein, 8 aa, Homo sapiens
  Table A; Target 7846; HLA-C*06:02; AFP; ENSG00000081051; TAA
FVQEATYK

SEQ ID NO: 7847 - protein, 8 aa, Homo sapiens
  Table A; Target 7847; HLA-C*12:03; AFP; ENSG00000081051; TAA
FVQEATYK

SEQ ID NO: 7848 - protein, 8 aa, Homo sapiens
  Table A; Target 7848; HLA-C*14:02; AFP; ENSG00000081051; TAA
FVQEATYK

SEQ ID NO: 7849 - protein, 8 aa, Homo sapiens
  Table A; Target 7849; HLA-C*16:01; AFP; ENSG00000081051; TAA
FVQEATYK

SEQ ID NO: 7850 - protein, 8 aa, Homo sapiens
  Table A; Target 7850; HLA-C*16:02; AFP; ENSG00000081051; TAA
FVQEATYK

SEQ ID NO: 7851 - protein, 10 aa, Homo sapiens
  Table A; Target 7851; HLA-A*02:01; AFP; ENSG00000081051; TAA
FVQEATYKEV

SEQ ID NO: 7852 - protein, 10 aa, Homo sapiens
  Table A; Target 7852; HLA-A*02:04; AFP; ENSG00000081051; TAA
FVQEATYKEV

SEQ ID NO: 7853 - protein, 10 aa, Homo sapiens
  Table A; Target 7853; HLA-A*32:01; AFP; ENSG00000081051; TAA
FVQEATYKEV

SEQ ID NO: 7854 - protein, 10 aa, Homo sapiens
  Table A; Target 7854; HLA-B*46:01; AFP; ENSG00000081051; TAA
FVQEATYKEV

SEQ ID NO: 7855 - protein, 10 aa, Homo sapiens
  Table A; Target 7855; HLA-B*51:01; AFP; ENSG00000081051; TAA
FVQEATYKEV

SEQ ID NO: 7856 - protein, 10 aa, Homo sapiens
  Table A; Target 7856; HLA-C*01:02; AFP; ENSG00000081051; TAA
FVQEATYKEV

SEQ ID NO: 7857 - protein, 10 aa, Homo sapiens
  Table A; Target 7857; HLA-C*03:03; AFP; ENSG00000081051; TAA
FVQEATYKEV

SEQ ID NO: 7858 - protein, 10 aa, Homo sapiens
  Table A; Target 7858; HLA-C*04:01; AFP; ENSG00000081051; TAA
FVQEATYKEV

SEQ ID NO: 7859 - protein, 10 aa, Homo sapiens
  Table A; Target 7859; HLA-C*06:02; AFP; ENSG00000081051; TAA
FVQEATYKEV

SEQ ID NO: 7860 - protein, 10 aa, Homo sapiens
  Table A; Target 7860; HLA-C*12:03; AFP; ENSG00000081051; TAA
FVQEATYKEV

SEQ ID NO: 7861 - protein, 10 aa, Homo sapiens
  Table A; Target 7861; HLA-C*16:02; AFP; ENSG00000081051; TAA
FVQEATYKEV

SEQ ID NO: 7862 - protein, 10 aa, Homo sapiens
  Table A; Target 7862; HLA-C*16:04; AFP; ENSG00000081051; TAA
FVQEATYKEV

SEQ ID NO: 7863 - protein, 11 aa, Homo sapiens
  Table A; Target 7863; HLA-A*33:01; AFP; ENSG00000081051; TAA
FVQEATYKEVS

SEQ ID NO: 7864 - protein, 9 aa, Homo sapiens
  Table A; Target 7864; HLA-A*29:02; AFP; ENSG00000081051; TAA
GAADIIIGH

SEQ ID NO: 7865 - protein, 9 aa, Homo sapiens
  Table A; Target 7865; HLA-A*30:02; AFP; ENSG00000081051; TAA
GAADIIIGH

SEQ ID NO: 7866 - protein, 9 aa, Homo sapiens
  Table A; Target 7866; HLA-A*68:02; AFP; ENSG00000081051; TAA
GAADIIIGH

SEQ ID NO: 7867 - protein, 9 aa, Homo sapiens
  Table A; Target 7867; HLA-B*15:01; AFP; ENSG00000081051; TAA
GAADIIIGH

SEQ ID NO: 7868 - protein, 9 aa, Homo sapiens
  Table A; Target 7868; HLA-B*15:03; AFP; ENSG00000081051; TAA
GAADIIIGH

SEQ ID NO: 7869 - protein, 9 aa, Homo sapiens
  Table A; Target 7869; HLA-B*27:02; AFP; ENSG00000081051; TAA
GAADIIIGH

SEQ ID NO: 7870 - protein, 9 aa, Homo sapiens
  Table A; Target 7870; HLA-B*35:01; AFP; ENSG00000081051; TAA
GAADIIIGH

SEQ ID NO: 7871 - protein, 9 aa, Homo sapiens
  Table A; Target 7871; HLA-B*55:01; AFP; ENSG00000081051; TAA
GAADIIIGH

SEQ ID NO: 7872 - protein, 9 aa, Homo sapiens
  Table A; Target 7872; HLA-B*58:01; AFP; ENSG00000081051; TAA
GAADIIIGH

SEQ ID NO: 7873 - protein, 9 aa, Homo sapiens
  Table A; Target 7873; HLA-C*16:02; AFP; ENSG00000081051; TAA
GAADIIIGH

SEQ ID NO: 7874 - protein, 10 aa, Homo sapiens
  Table A; Target 7874; HLA-A*02:07; AFP; ENSG00000081051; TAA
GAADIIIGHL

SEQ ID NO: 7875 - protein, 10 aa, Homo sapiens
  Table A; Target 7875; HLA-A*03:01; AFP; ENSG00000081051; TAA
GAADIIIGHL

SEQ ID NO: 7876 - protein, 10 aa, Homo sapiens
  Table A; Target 7876; HLA-A*11:01; AFP; ENSG00000081051; TAA
GAADIIIGHL

SEQ ID NO: 7877 - protein, 10 aa, Homo sapiens
  Table A; Target 7877; HLA-A*68:01; AFP; ENSG00000081051; TAA
GAADIIIGHL

SEQ ID NO: 7878 - protein, 10 aa, Homo sapiens
  Table A; Target 7878; HLA-B*38:01; AFP; ENSG00000081051; TAA
GAADIIIGHL

SEQ ID NO: 7879 - protein, 10 aa, Homo sapiens
  Table A; Target 7879; HLA-B*40:01; AFP; ENSG00000081051; TAA
GAADIIIGHL

SEQ ID NO: 7880 - protein, 10 aa, Homo sapiens
  Table A; Target 7880; HLA-B*40:02; AFP; ENSG00000081051; TAA
GAADIIIGHL

SEQ ID NO: 7881 - protein, 10 aa, Homo sapiens
  Table A; Target 7881; HLA-C*02:02; AFP; ENSG00000081051; TAA
GAADIIIGHL

SEQ ID NO: 7882 - protein, 10 aa, Homo sapiens
  Table A; Target 7882; HLA-C*12:03; AFP; ENSG00000081051; TAA
GAADIIIGHL

SEQ ID NO: 7883 - protein, 10 aa, Homo sapiens
  Table A; Target 7883; HLA-C*16:02; AFP; ENSG00000081051; TAA
GAADIIIGHL

SEQ ID NO: 7884 - protein, 10 aa, Homo sapiens
  Table A; Target 7884; HLA-C*16:04; AFP; ENSG00000081051; TAA
GAADIIIGHL

SEQ ID NO: 7885 - protein, 9 aa, Homo sapiens
  Table A; Target 7885; HLA-B*40:01; AFP; ENSG00000081051; TAA
GDEQSSGCL

SEQ ID NO: 7886 - protein, 9 aa, Homo sapiens
  Table A; Target 7886; HLA-B*40:02; AFP; ENSG00000081051; TAA
GDEQSSGCL

SEQ ID NO: 7887 - protein, 8 aa, Homo sapiens
  Table A; Target 7887; HLA-B*40:02; AFP; ENSG00000081051; TAA
GDRDFNQF

SEQ ID NO: 7888 - protein, 8 aa, Homo sapiens
  Table A; Target 7888; HLA-C*07:01; AFP; ENSG00000081051; TAA
GDRDFNQF

SEQ ID NO: 7889 - protein, 8 aa, Homo sapiens
  Table A; Target 7889; HLA-B*15:03; AFP; ENSG00000081051; TAA
GEEELQKY

SEQ ID NO: 7890 - protein, 8 aa, Homo sapiens
  Table A; Target 7890; HLA-B*44:03; AFP; ENSG00000081051; TAA
GEEELQKY

SEQ ID NO: 7891 - protein, 9 aa, Homo sapiens
  Table A; Target 7891; HLA-A*30:01; AFP; ENSG00000081051; TAA
GEEELQKYI

SEQ ID NO: 7892 - protein, 9 aa, Homo sapiens
  Table A; Target 7892; HLA-B*40:02; AFP; ENSG00000081051; TAA
GEEELQKYI

SEQ ID NO: 7893 - protein, 9 aa, Homo sapiens
  Table A; Target 7893; HLA-C*16:04; AFP; ENSG00000081051; TAA
GEEELQKYI

SEQ ID NO: 7894 - protein, 8 aa, Homo sapiens
  Table A; Target 7894; HLA-B*49:01; AFP; ENSG00000081051; TAA
GEGAADII

SEQ ID NO: 7895 - protein, 9 aa, Homo sapiens
  Table A; Target 7895; HLA-A*30:01; AFP; ENSG00000081051; TAA
GEGAADIII

SEQ ID NO: 7896 - protein, 9 aa, Homo sapiens
  Table A; Target 7896; HLA-B*44:03; AFP; ENSG00000081051; TAA
GEGAADIII

SEQ ID NO: 7897 - protein, 8 aa, Homo sapiens
  Table A; Target 7897; HLA-B*40:02; AFP; ENSG00000081051; TAA
GEKIMSYI

SEQ ID NO: 7898 - protein, 9 aa, Homo sapiens
  Table A; Target 7898; HLA-B*40:02; AFP; ENSG00000081051; TAA
GEKNIFLAS

SEQ ID NO: 7899 - protein, 9 aa, Homo sapiens
  Table A; Target 7899; HLA-B*49:01; AFP; ENSG00000081051; TAA
GEKNIFLAS

SEQ ID NO: 7900 - protein, 10 aa, Homo sapiens
  Table A; Target 7900; HLA-B*44:03; AFP; ENSG00000081051; TAA
GEKNIFLASF

SEQ ID NO: 7901 - protein, 8 aa, Homo sapiens
  Table A; Target 7901; HLA-B*40:02; AFP; ENSG00000081051; TAA
GEYYLQNA

SEQ ID NO: 7902 - protein, 9 aa, Homo sapiens
  Table A; Target 7902; HLA-B*27:05; AFP; ENSG00000081051; TAA
GEYYLQNAF

SEQ ID NO: 7903 - protein, 9 aa, Homo sapiens
  Table A; Target 7903; HLA-B*40:02; AFP; ENSG00000081051; TAA
GEYYLQNAF

SEQ ID NO: 7904 - protein, 9 aa, Homo sapiens
  Table A; Target 7904; HLA-C*02:02; AFP; ENSG00000081051; TAA
GEYYLQNAF

SEQ ID NO: 7905 - protein, 9 aa, Homo sapiens
  Table A; Target 7905; HLA-C*07:04; AFP; ENSG00000081051; TAA
GEYYLQNAF

SEQ ID NO: 7906 - protein, 10 aa, Homo sapiens
  Table A; Target 7906; HLA-A*30:01; AFP; ENSG00000081051; TAA
GEYYLQNAFL

SEQ ID NO: 7907 - protein, 10 aa, Homo sapiens
  Table A; Target 7907; HLA-B*40:02; AFP; ENSG00000081051; TAA
GEYYLQNAFL

SEQ ID NO: 7908 - protein, 10 aa, Homo sapiens
  Table A; Target 7908; HLA-B*44:02; AFP; ENSG00000081051; TAA
GEYYLQNAFL

SEQ ID NO: 7909 - protein, 10 aa, Homo sapiens
  Table A; Target 7909; HLA-B*44:03; AFP; ENSG00000081051; TAA
GEYYLQNAFL

SEQ ID NO: 7910 - protein, 11 aa, Homo sapiens
  Table A; Target 7910; HLA-B*49:01; AFP; ENSG00000081051; TAA
GEYYLQNAFLV

SEQ ID NO: 7911 - protein, 9 aa, Homo sapiens
  Table A; Target 7911; HLA-A*03:01; AFP; ENSG00000081051; TAA
GIASILDSY

SEQ ID NO: 7912 - protein, 9 aa, Homo sapiens
  Table A; Target 7912; HLA-A*03:02; AFP; ENSG00000081051; TAA
GIASILDSY

SEQ ID NO: 7913 - protein, 9 aa, Homo sapiens
  Table A; Target 7913; HLA-B*13:02; AFP; ENSG00000081051; TAA
GIASILDSY

SEQ ID NO: 7914 - protein, 9 aa, Homo sapiens
  Table A; Target 7914; HLA-B*18:01; AFP; ENSG00000081051; TAA
GIASILDSY

SEQ ID NO: 7915 - protein, 9 aa, Homo sapiens
  Table A; Target 7915; HLA-B*27:02; AFP; ENSG00000081051; TAA
GIASILDSY

SEQ ID NO: 7916 - protein, 9 aa, Homo sapiens
  Table A; Target 7916; HLA-B*39:01; AFP; ENSG00000081051; TAA
GIASILDSY

SEQ ID NO: 7917 - protein, 9 aa, Homo sapiens
  Table A; Target 7917; HLA-C*01:02; AFP; ENSG00000081051; TAA
GIASILDSY

SEQ ID NO: 7918 - protein, 9 aa, Homo sapiens
  Table A; Target 7918; HLA-C*07:01; AFP; ENSG00000081051; TAA
GIASILDSY

SEQ ID NO: 7919 - protein, 9 aa, Homo sapiens
  Table A; Target 7919; HLA-C*07:06; AFP; ENSG00000081051; TAA
GIASILDSY

SEQ ID NO: 7920 - protein, 9 aa, Homo sapiens
  Table A; Target 7920; HLA-C*12:03; AFP; ENSG00000081051; TAA
GIASILDSY

SEQ ID NO: 7921 - protein, 9 aa, Homo sapiens
  Table A; Target 7921; HLA-C*14:02; AFP; ENSG00000081051; TAA
GIASILDSY

SEQ ID NO: 7922 - protein, 9 aa, Homo sapiens
  Table A; Target 7922; HLA-C*16:01; AFP; ENSG00000081051; TAA
GIASILDSY

SEQ ID NO: 7923 - protein, 9 aa, Homo sapiens
  Table A; Target 7923; HLA-C*16:02; AFP; ENSG00000081051; TAA
GIASILDSY

SEQ ID NO: 7924 - protein, 9 aa, Homo sapiens
  Table A; Target 7924; HLA-A*01:01; AFP; ENSG00000081051; TAA
GLFQKLGEY

SEQ ID NO: 7925 - protein, 9 aa, Homo sapiens
  Table A; Target 7925; HLA-A*02:03; AFP; ENSG00000081051; TAA
GLFQKLGEY

SEQ ID NO: 7926 - protein, 9 aa, Homo sapiens
  Table A; Target 7926; HLA-A*26:01; AFP; ENSG00000081051; TAA
GLFQKLGEY

SEQ ID NO: 7927 - protein, 9 aa, Homo sapiens
  Table A; Target 7927; HLA-A*32:01; AFP; ENSG00000081051; TAA
GLFQKLGEY

SEQ ID NO: 7928 - protein, 9 aa, Homo sapiens
  Table A; Target 7928; HLA-C*02:02; AFP; ENSG00000081051; TAA
GLFQKLGEY

SEQ ID NO: 7929 - protein, 9 aa, Homo sapiens
  Table A; Target 7929; HLA-C*07:04; AFP; ENSG00000081051; TAA
GLFQKLGEY

SEQ ID NO: 7930 - protein, 10 aa, Homo sapiens
  Table A; Target 7930; HLA-A*01:01; AFP; ENSG00000081051; TAA
GLFQKLGEYY

SEQ ID NO: 7931 - protein, 10 aa, Homo sapiens
  Table A; Target 7931; HLA-B*15:01; AFP; ENSG00000081051; TAA
GLFQKLGEYY

SEQ ID NO: 7932 - protein, 10 aa, Homo sapiens
  Table A; Target 7932; HLA-B*44:02; AFP; ENSG00000081051; TAA
GLFQKLGEYY

SEQ ID NO: 7933 - protein, 9 aa, Homo sapiens
  Table A; Target 7933; HLA-A*02:04; AFP; ENSG00000081051; TAA
GLSPNLNRF

SEQ ID NO: 7934 - protein, 9 aa, Homo sapiens
  Table A; Target 7934; HLA-A*29:02; AFP; ENSG00000081051; TAA
GLSPNLNRF

SEQ ID NO: 7935 - protein, 9 aa, Homo sapiens
  Table A; Target 7935; HLA-A*32:01; AFP; ENSG00000081051; TAA
GLSPNLNRF

SEQ ID NO: 7936 - protein, 9 aa, Homo sapiens
  Table A; Target 7936; HLA-B*15:03; AFP; ENSG00000081051; TAA
GLSPNLNRF

SEQ ID NO: 7937 - protein, 9 aa, Homo sapiens
  Table A; Target 7937; HLA-B*58:01; AFP; ENSG00000081051; TAA
GLSPNLNRF

SEQ ID NO: 7938 - protein, 10 aa, Homo sapiens
  Table A; Target 7938; HLA-A*02:01; AFP; ENSG00000081051; TAA
GLSPNLNRFL

SEQ ID NO: 7939 - protein, 8 aa, Homo sapiens
  Table A; Target 7939; HLA-B*15:01; AFP; ENSG00000081051; TAA
GQCCTSSY

SEQ ID NO: 7940 - protein, 8 aa, Homo sapiens
  Table A; Target 7940; HLA-C*07:01; AFP; ENSG00000081051; TAA
GQCCTSSY

SEQ ID NO: 7941 - protein, 8 aa, Homo sapiens
  Table A; Target 7941; HLA-C*05:01; AFP; ENSG00000081051; TAA
GQEQEVCF

SEQ ID NO: 7942 - protein, 9 aa, Homo sapiens
  Table A; Target 7942; HLA-A*33:03; AFP; ENSG00000081051; TAA
GQKLISKTR

SEQ ID NO: 7943 - protein, 10 aa, Homo sapiens
  Table A; Target 7943; HLA-A*03:01; AFP; ENSG00000081051; TAA
GTRTFQAITV

SEQ ID NO: 7944 - protein, 10 aa, Homo sapiens
  Table A; Target 7944; HLA-A*31:01; AFP; ENSG00000081051; TAA
GTRTFQAITV

SEQ ID NO: 7945 - protein, 10 aa, Homo sapiens
  Table A; Target 7945; HLA-B*40:02; AFP; ENSG00000081051; TAA
GTRTFQAITV

SEQ ID NO: 7946 - protein, 10 aa, Homo sapiens
  Table A; Target 7946; HLA-B*57:01; AFP; ENSG00000081051; TAA
GTRTFQAITV

SEQ ID NO: 7947 - protein, 10 aa, Homo sapiens
  Table A; Target 7947; HLA-C*07:02; AFP; ENSG00000081051; TAA
GTRTFQAITV

SEQ ID NO: 7948 - protein, 8 aa, Homo sapiens
  Table A; Target 7948; HLA-B*27:02; AFP; ENSG00000081051; TAA
GYQELLEK

SEQ ID NO: 7949 - protein, 8 aa, Homo sapiens
  Table A; Target 7949; HLA-C*07:01; AFP; ENSG00000081051; TAA
HACAVMKN

SEQ ID NO: 7950 - protein, 9 aa, Homo sapiens
  Table A; Target 7950; HLA-A*33:01; AFP; ENSG00000081051; TAA
HACAVMKNF

SEQ ID NO: 7951 - protein, 9 aa, Homo sapiens
  Table A; Target 7951; HLA-B*57:01; AFP; ENSG00000081051; TAA
HACAVMKNF

SEQ ID NO: 7952 - protein, 8 aa, Homo sapiens
  Table A; Target 7952; HLA-B*18:01; AFP; ENSG00000081051; TAA
HEKEILEK

SEQ ID NO: 7953 - protein, 8 aa, Homo sapiens
  Table A; Target 7953; HLA-B*40:02; AFP; ENSG00000081051; TAA
HEKEILEK

SEQ ID NO: 7954 - protein, 8 aa, Homo sapiens
  Table A; Target 7954; HLA-C*07:01; AFP; ENSG00000081051; TAA
HEKEILEK

SEQ ID NO: 7955 - protein, 9 aa, Homo sapiens
  Table A; Target 7955; HLA-A*26:01; AFP; ENSG00000081051; TAA
HEKEILEKY

SEQ ID NO: 7956 - protein, 9 aa, Homo sapiens
  Table A; Target 7956; HLA-A*33:01; AFP; ENSG00000081051; TAA
HEKEILEKY

SEQ ID NO: 7957 - protein, 9 aa, Homo sapiens
  Table A; Target 7957; HLA-B*08:01; AFP; ENSG00000081051; TAA
HEKEILEKY

SEQ ID NO: 7958 - protein, 9 aa, Homo sapiens
  Table A; Target 7958; HLA-B*15:01; AFP; ENSG00000081051; TAA
HEKEILEKY

SEQ ID NO: 7959 - protein, 9 aa, Homo sapiens
  Table A; Target 7959; HLA-B*35:01; AFP; ENSG00000081051; TAA
HEKEILEKY

SEQ ID NO: 7960 - protein, 9 aa, Homo sapiens
  Table A; Target 7960; HLA-B*37:01; AFP; ENSG00000081051; TAA
HEKEILEKY

SEQ ID NO: 7961 - protein, 9 aa, Homo sapiens
  Table A; Target 7961; HLA-B*40:01; AFP; ENSG00000081051; TAA
HEKEILEKY

SEQ ID NO: 7962 - protein, 9 aa, Homo sapiens
  Table A; Target 7962; HLA-B*40:02; AFP; ENSG00000081051; TAA
HEKEILEKY

SEQ ID NO: 7963 - protein, 9 aa, Homo sapiens
  Table A; Target 7963; HLA-B*49:01; AFP; ENSG00000081051; TAA
HEKEILEKY

SEQ ID NO: 7964 - protein, 9 aa, Homo sapiens
  Table A; Target 7964; HLA-C*07:01; AFP; ENSG00000081051; TAA
HEKEILEKY

SEQ ID NO: 7965 - protein, 9 aa, Homo sapiens
  Table A; Target 7965; HLA-C*12:03; AFP; ENSG00000081051; TAA
HEKEILEKY

SEQ ID NO: 7966 - protein, 8 aa, Homo sapiens
  Table A; Target 7966; HLA-B*18:01; AFP; ENSG00000081051; TAA
HEMTPVNP

SEQ ID NO: 7967 - protein, 8 aa, Homo sapiens
  Table A; Target 7967; HLA-B*49:01; AFP; ENSG00000081051; TAA
HEMTPVNP

SEQ ID NO: 7968 - protein, 8 aa, Homo sapiens
  Table A; Target 7968; HLA-C*07:04; AFP; ENSG00000081051; TAA
HEMTPVNP

SEQ ID NO: 7969 - protein, 9 aa, Homo sapiens
  Table A; Target 7969; HLA-B*40:02; AFP; ENSG00000081051; TAA
HEMTPVNPG

SEQ ID NO: 7970 - protein, 9 aa, Homo sapiens
  Table A; Target 7970; HLA-B*49:01; AFP; ENSG00000081051; TAA
HEMTPVNPG

SEQ ID NO: 7971 - protein, 9 aa, Homo sapiens
  Table A; Target 7971; HLA-C*06:02; AFP; ENSG00000081051; TAA
HEMTPVNPG

SEQ ID NO: 7972 - protein, 10 aa, Homo sapiens
  Table A; Target 7972; HLA-B*13:02; AFP; ENSG00000081051; TAA
HEMTPVNPGV

SEQ ID NO: 7973 - protein, 10 aa, Homo sapiens
  Table A; Target 7973; HLA-B*27:05; AFP; ENSG00000081051; TAA
HEMTPVNPGV

SEQ ID NO: 7974 - protein, 10 aa, Homo sapiens
  Table A; Target 7974; HLA-B*40:02; AFP; ENSG00000081051; TAA
HEMTPVNPGV

SEQ ID NO: 7975 - protein, 10 aa, Homo sapiens
  Table A; Target 7975; HLA-B*44:02; AFP; ENSG00000081051; TAA
HEMTPVNPGV

SEQ ID NO: 7976 - protein, 10 aa, Homo sapiens
  Table A; Target 7976; HLA-B*44:03; AFP; ENSG00000081051; TAA
HEMTPVNPGV

SEQ ID NO: 7977 - protein, 11 aa, Homo sapiens
  Table A; Target 7977; HLA-C*07:01; AFP; ENSG00000081051; TAA
HEMTPVNPGVG

SEQ ID NO: 7978 - protein, 9 aa, Homo sapiens
  Table A; Target 7978; HLA-A*02:04; AFP; ENSG00000081051; TAA
HPFLYAPTI

SEQ ID NO: 7979 - protein, 9 aa, Homo sapiens
  Table A; Target 7979; HLA-A*68:02; AFP; ENSG00000081051; TAA
HPFLYAPTI

SEQ ID NO: 7980 - protein, 9 aa, Homo sapiens
  Table A; Target 7980; HLA-B*13:02; AFP; ENSG00000081051; TAA
HPFLYAPTI

SEQ ID NO: 7981 - protein, 9 aa, Homo sapiens
  Table A; Target 7981; HLA-B*49:01; AFP; ENSG00000081051; TAA
HPFLYAPTI

SEQ ID NO: 7982 - protein, 9 aa, Homo sapiens
  Table A; Target 7982; HLA-B*57:01; AFP; ENSG00000081051; TAA
HPFLYAPTI

SEQ ID NO: 7983 - protein, 10 aa, Homo sapiens
  Table A; Target 7983; HLA-B*07:02; AFP; ENSG00000081051; TAA
HPFLYAPTIL

SEQ ID NO: 7984 - protein, 10 aa, Homo sapiens
  Table A; Target 7984; HLA-B*35:03; AFP; ENSG00000081051; TAA
HPFLYAPTIL

SEQ ID NO: 7985 - protein, 10 aa, Homo sapiens
  Table A; Target 7985; HLA-B*54:01; AFP; ENSG00000081051; TAA
HPFLYAPTIL

SEQ ID NO: 7986 - protein, 8 aa, Homo sapiens
  Table A; Target 7986; HLA-B*35:03; AFP; ENSG00000081051; TAA
HPQLAVSV

SEQ ID NO: 7987 - protein, 8 aa, Homo sapiens
  Table A; Target 7987; HLA-B*55:01; AFP; ENSG00000081051; TAA
HPQLAVSV

SEQ ID NO: 7988 - protein, 9 aa, Homo sapiens
  Table A; Target 7988; HLA-B*08:01; AFP; ENSG00000081051; TAA
HPQLAVSVI

SEQ ID NO: 7989 - protein, 10 aa, Homo sapiens
  Table A; Target 7989; HLA-B*07:02; AFP; ENSG00000081051; TAA
HPQLAVSVIL

SEQ ID NO: 7990 - protein, 10 aa, Homo sapiens
  Table A; Target 7990; HLA-B*35:01; AFP; ENSG00000081051; TAA
HPQLAVSVIL

SEQ ID NO: 7991 - protein, 10 aa, Homo sapiens
  Table A; Target 7991; HLA-C*07:02; AFP; ENSG00000081051; TAA
HPQLAVSVIL

SEQ ID NO: 7992 - protein, 11 aa, Homo sapiens
  Table A; Target 7992; HLA-A*33:03; AFP; ENSG00000081051; TAA
HPQLAVSVILR

SEQ ID NO: 7993 - protein, 11 aa, Homo sapiens
  Table A; Target 7993; HLA-A*68:01; AFP; ENSG00000081051; TAA
HPQLAVSVILR

SEQ ID NO: 7994 - protein, 10 aa, Homo sapiens
  Table A; Target 7994; HLA-B*38:01; AFP; ENSG00000081051; TAA
HRNEYGIASI

SEQ ID NO: 7995 - protein, 8 aa, Homo sapiens
  Table A; Target 7995; HLA-C*03:04; AFP; ENSG00000081051; TAA
IADFSGLL

SEQ ID NO: 7996 - protein, 8 aa, Homo sapiens
  Table A; Target 7996; HLA-C*04:01; AFP; ENSG00000081051; TAA
IADFSGLL

SEQ ID NO: 7997 - protein, 8 aa, Homo sapiens
  Table A; Target 7997; HLA-C*07:04; AFP; ENSG00000081051; TAA
IADFSGLL

SEQ ID NO: 7998 - protein, 10 aa, Homo sapiens
  Table A; Target 7998; HLA-A*68:01; AFP; ENSG00000081051; TAA
IADFSGLLEK

SEQ ID NO: 7999 - protein, 10 aa, Homo sapiens
  Table A; Target 7999; HLA-B*27:05; AFP; ENSG00000081051; TAA
IADFSGLLEK

SEQ ID NO: 8000 - protein, 10 aa, Homo sapiens
  Table A; Target 8000; HLA-C*07:06; AFP; ENSG00000081051; TAA
IADFSGLLEK

SEQ ID NO: 8001 - protein, 9 aa, Homo sapiens
  Table A; Target 8001; HLA-B*57:01; AFP; ENSG00000081051; TAA
IARRHPFLY

SEQ ID NO: 8002 - protein, 8 aa, Homo sapiens
  Table A; Target 8002; HLA-A*01:01; AFP; ENSG00000081051; TAA
IASILDSY

SEQ ID NO: 8003 - protein, 8 aa, Homo sapiens
  Table A; Target 8003; HLA-B*18:01; AFP; ENSG00000081051; TAA
IASILDSY

SEQ ID NO: 8004 - protein, 8 aa, Homo sapiens
  Table A; Target 8004; HLA-B*27:05; AFP; ENSG00000081051; TAA
IASILDSY

SEQ ID NO: 8005 - protein, 8 aa, Homo sapiens
  Table A; Target 8005; HLA-B*55:01; AFP; ENSG00000081051; TAA
IASILDSY

SEQ ID NO: 8006 - protein, 8 aa, Homo sapiens
  Table A; Target 8006; HLA-B*58:01; AFP; ENSG00000081051; TAA
IASILDSY

SEQ ID NO: 8007 - protein, 8 aa, Homo sapiens
  Table A; Target 8007; HLA-C*01:02; AFP; ENSG00000081051; TAA
IASILDSY

SEQ ID NO: 8008 - protein, 8 aa, Homo sapiens
  Table A; Target 8008; HLA-C*02:02; AFP; ENSG00000081051; TAA
IASILDSY

SEQ ID NO: 8009 - protein, 8 aa, Homo sapiens
  Table A; Target 8009; HLA-C*03:03; AFP; ENSG00000081051; TAA
IASILDSY

SEQ ID NO: 8010 - protein, 8 aa, Homo sapiens
  Table A; Target 8010; HLA-C*04:01; AFP; ENSG00000081051; TAA
IASILDSY

SEQ ID NO: 8011 - protein, 8 aa, Homo sapiens
  Table A; Target 8011; HLA-C*12:03; AFP; ENSG00000081051; TAA
IASILDSY

SEQ ID NO: 8012 - protein, 8 aa, Homo sapiens
  Table A; Target 8012; HLA-C*14:02; AFP; ENSG00000081051; TAA
IASILDSY

SEQ ID NO: 8013 - protein, 8 aa, Homo sapiens
  Table A; Target 8013; HLA-C*16:04; AFP; ENSG00000081051; TAA
IASILDSY

SEQ ID NO: 8014 - protein, 9 aa, Homo sapiens
  Table A; Target 8014; HLA-C*04:01; AFP; ENSG00000081051; TAA
IASILDSYQ

SEQ ID NO: 8015 - protein, 10 aa, Homo sapiens
  Table A; Target 8015; HLA-B*40:02; AFP; ENSG00000081051; TAA
IEKPTGDEQS

SEQ ID NO: 8016 - protein, 11 aa, Homo sapiens
  Table A; Target 8016; HLA-A*30:01; AFP; ENSG00000081051; TAA
IEKPTGDEQSS

SEQ ID NO: 8017 - protein, 11 aa, Homo sapiens
  Table A; Target 8017; HLA-B*40:02; AFP; ENSG00000081051; TAA
IEKPTGDEQSS

SEQ ID NO: 8018 - protein, 11 aa, Homo sapiens
  Table A; Target 8018; HLA-C*04:01; AFP; ENSG00000081051; TAA
IEKPTGDEQSS

SEQ ID NO: 8019 - protein, 11 aa, Homo sapiens
  Table A; Target 8019; HLA-C*16:04; AFP; ENSG00000081051; TAA
IEKPTGDEQSS

SEQ ID NO: 8020 - protein, 10 aa, Homo sapiens
  Table A; Target 8020; HLA-A*24:02; AFP; ENSG00000081051; TAA
IFLASFVHEY

SEQ ID NO: 8021 - protein, 10 aa, Homo sapiens
  Table A; Target 8021; HLA-C*07:01; AFP; ENSG00000081051; TAA
IFLASFVHEY

SEQ ID NO: 8022 - protein, 9 aa, Homo sapiens
  Table A; Target 8022; HLA-B*57:01; AFP; ENSG00000081051; TAA
IFLIFLLNF

SEQ ID NO: 8023 - protein, 9 aa, Homo sapiens
  Table A; Target 8023; HLA-A*31:01; AFP; ENSG00000081051; TAA
IIIGHLCIR

SEQ ID NO: 8024 - protein, 9 aa, Homo sapiens
  Table A; Target 8024; HLA-B*55:01; AFP; ENSG00000081051; TAA
ILDSYQCTA

SEQ ID NO: 8025 - protein, 9 aa, Homo sapiens
  Table A; Target 8025; HLA-B*55:01; AFP; ENSG00000081051; TAA
IPLFQVPEP

SEQ ID NO: 8026 - protein, 9 aa, Homo sapiens
  Table A; Target 8026; HLA-B*56:01; AFP; ENSG00000081051; TAA
IPLFQVPEP

SEQ ID NO: 8027 - protein, 10 aa, Homo sapiens
  Table A; Target 8027; HLA-B*56:01; AFP; ENSG00000081051; TAA
IPLFQVPEPV

SEQ ID NO: 8028 - protein, 9 aa, Homo sapiens
  Table A; Target 8028; HLA-A*01:01; AFP; ENSG00000081051; TAA
IQESQALAK

SEQ ID NO: 8029 - protein, 9 aa, Homo sapiens
  Table A; Target 8029; HLA-B*27:02; AFP; ENSG00000081051; TAA
IQESQALAK

SEQ ID NO: 8030 - protein, 9 aa, Homo sapiens
  Table A; Target 8030; HLA-C*07:06; AFP; ENSG00000081051; TAA
IQESQALAK

SEQ ID NO: 8031 - protein, 10 aa, Homo sapiens
  Table A; Target 8031; HLA-A*03:02; AFP; ENSG00000081051; TAA
IQESQALAKR

SEQ ID NO: 8032 - protein, 10 aa, Homo sapiens
  Table A; Target 8032; HLA-A*31:01; AFP; ENSG00000081051; TAA
IQESQALAKR

SEQ ID NO: 8033 - protein, 10 aa, Homo sapiens
  Table A; Target 8033; HLA-A*33:03; AFP; ENSG00000081051; TAA
IQESQALAKR

SEQ ID NO: 8034 - protein, 10 aa, Homo sapiens
  Table A; Target 8034; HLA-A*68:01; AFP; ENSG00000081051; TAA
IQESQALAKR

SEQ ID NO: 8035 - protein, 10 aa, Homo sapiens
  Table A; Target 8035; HLA-B*27:02; AFP; ENSG00000081051; TAA
IQESQALAKR

SEQ ID NO: 8036 - protein, 10 aa, Homo sapiens
  Table A; Target 8036; HLA-B*27:05; AFP; ENSG00000081051; TAA
IQESQALAKR

SEQ ID NO: 8037 - protein, 10 aa, Homo sapiens
  Table A; Target 8037; HLA-C*04:01; AFP; ENSG00000081051; TAA
IQESQALAKR

SEQ ID NO: 8038 - protein, 8 aa, Homo sapiens
  Table A; Target 8038; HLA-C*07:04; AFP; ENSG00000081051; TAA
IQKLVLDV

SEQ ID NO: 8039 - protein, 8 aa, Homo sapiens
  Table A; Target 8039; HLA-B*07:02; AFP; ENSG00000081051; TAA
ISKTRAAL

SEQ ID NO: 8040 - protein, 8 aa, Homo sapiens
  Table A; Target 8040; HLA-C*03:04; AFP; ENSG00000081051; TAA
ISKTRAAL

SEQ ID NO: 8041 - protein, 8 aa, Homo sapiens
  Table A; Target 8041; HLA-C*07:02; AFP; ENSG00000081051; TAA
ISKTRAAL

SEQ ID NO: 8042 - protein, 9 aa, Homo sapiens
  Table A; Target 8042; HLA-A*02:01; AFP; ENSG00000081051; TAA
ISLADLATI

SEQ ID NO: 8043 - protein, 9 aa, Homo sapiens
  Table A; Target 8043; HLA-A*24:02; AFP; ENSG00000081051; TAA
ISLADLATI

SEQ ID NO: 8044 - protein, 9 aa, Homo sapiens
  Table A; Target 8044; HLA-B*51:01; AFP; ENSG00000081051; TAA
ISLADLATI

SEQ ID NO: 8045 - protein, 9 aa, Homo sapiens
  Table A; Target 8045; HLA-B*57:01; AFP; ENSG00000081051; TAA
ISLADLATI

SEQ ID NO: 8046 - protein, 10 aa, Homo sapiens
  Table A; Target 8046; HLA-A*23:01; AFP; ENSG00000081051; TAA
ISLADLATIF

SEQ ID NO: 8047 - protein, 10 aa, Homo sapiens
  Table A; Target 8047; HLA-B*27:02; AFP; ENSG00000081051; TAA
ISLADLATIF

SEQ ID NO: 8048 - protein, 10 aa, Homo sapiens
  Table A; Target 8048; HLA-B*58:01; AFP; ENSG00000081051; TAA
ISLADLATIF

SEQ ID NO: 8049 - protein, 10 aa, Homo sapiens
  Table A; Target 8049; HLA-C*07:01; AFP; ENSG00000081051; TAA
ISLADLATIF

SEQ ID NO: 8050 - protein, 11 aa, Homo sapiens
  Table A; Target 8050; HLA-B*57:01; AFP; ENSG00000081051; TAA
ISLADLATIFF

SEQ ID NO: 8051 - protein, 9 aa, Homo sapiens
  Table A; Target 8051; HLA-B*40:02; AFP; ENSG00000081051; TAA
ITRKMAATA

SEQ ID NO: 8052 - protein, 9 aa, Homo sapiens
  Table A; Target 8052; HLA-C*06:02; AFP; ENSG00000081051; TAA
ITRKMAATA

SEQ ID NO: 8053 - protein, 8 aa, Homo sapiens
  Table A; Target 8053; HLA-C*16:01; AFP; ENSG00000081051; TAA
ITVTKLSQ

SEQ ID NO: 8054 - protein, 9 aa, Homo sapiens
  Table A; Target 8054; HLA-A*31:01; AFP; ENSG00000081051; TAA
ITVTKLSQK

SEQ ID NO: 8055 - protein, 9 aa, Homo sapiens
  Table A; Target 8055; HLA-A*33:03; AFP; ENSG00000081051; TAA
ITVTKLSQK

SEQ ID NO: 8056 - protein, 9 aa, Homo sapiens
  Table A; Target 8056; HLA-B*57:01; AFP; ENSG00000081051; TAA
ITVTKLSQK

SEQ ID NO: 8057 - protein, 10 aa, Homo sapiens
  Table A; Target 8057; HLA-A*32:01; AFP; ENSG00000081051; TAA
ITVTKLSQKF

SEQ ID NO: 8058 - protein, 9 aa, Homo sapiens
  Table A; Target 8058; HLA-A*02:03; AFP; ENSG00000081051; TAA
KAATVTKEL

SEQ ID NO: 8059 - protein, 9 aa, Homo sapiens
  Table A; Target 8059; HLA-A*02:07; AFP; ENSG00000081051; TAA
KAATVTKEL

SEQ ID NO: 8060 - protein, 9 aa, Homo sapiens
  Table A; Target 8060; HLA-A*03:02; AFP; ENSG00000081051; TAA
KAATVTKEL

SEQ ID NO: 8061 - protein, 9 aa, Homo sapiens
  Table A; Target 8061; HLA-A*25:01; AFP; ENSG00000081051; TAA
KAATVTKEL

SEQ ID NO: 8062 - protein, 9 aa, Homo sapiens
  Table A; Target 8062; HLA-A*30:01; AFP; ENSG00000081051; TAA
KAATVTKEL

SEQ ID NO: 8063 - protein, 9 aa, Homo sapiens
  Table A; Target 8063; HLA-A*31:01; AFP; ENSG00000081051; TAA
KAATVTKEL

SEQ ID NO: 8064 - protein, 9 aa, Homo sapiens
  Table A; Target 8064; HLA-B*08:01; AFP; ENSG00000081051; TAA
KAATVTKEL

SEQ ID NO: 8065 - protein, 9 aa, Homo sapiens
  Table A; Target 8065; HLA-B*13:02; AFP; ENSG00000081051; TAA
KAATVTKEL

SEQ ID NO: 8066 - protein, 9 aa, Homo sapiens
  Table A; Target 8066; HLA-B*27:05; AFP; ENSG00000081051; TAA
KAATVTKEL

SEQ ID NO: 8067 - protein, 9 aa, Homo sapiens
  Table A; Target 8067; HLA-B*35:03; AFP; ENSG00000081051; TAA
KAATVTKEL

SEQ ID NO: 8068 - protein, 9 aa, Homo sapiens
  Table A; Target 8068; HLA-B*44:03; AFP; ENSG00000081051; TAA
KAATVTKEL

SEQ ID NO: 8069 - protein, 9 aa, Homo sapiens
  Table A; Target 8069; HLA-B*55:01; AFP; ENSG00000081051; TAA
KAATVTKEL

SEQ ID NO: 8070 - protein, 9 aa, Homo sapiens
  Table A; Target 8070; HLA-C*04:01; AFP; ENSG00000081051; TAA
KAATVTKEL

SEQ ID NO: 8071 - protein, 9 aa, Homo sapiens
  Table A; Target 8071; HLA-C*05:01; AFP; ENSG00000081051; TAA
KAATVTKEL

SEQ ID NO: 8072 - protein, 9 aa, Homo sapiens
  Table A; Target 8072; HLA-C*07:04; AFP; ENSG00000081051; TAA
KAATVTKEL

SEQ ID NO: 8073 - protein, 10 aa, Homo sapiens
  Table A; Target 8073; HLA-A*31:01; AFP; ENSG00000081051; TAA
KAATVTKELR

SEQ ID NO: 8074 - protein, 10 aa, Homo sapiens
  Table A; Target 8074; HLA-A*68:01; AFP; ENSG00000081051; TAA
KAATVTKELR

SEQ ID NO: 8075 - protein, 10 aa, Homo sapiens
  Table A; Target 8075; HLA-B*57:01; AFP; ENSG00000081051; TAA
KAATVTKELR

SEQ ID NO: 8076 - protein, 10 aa, Homo sapiens
  Table A; Target 8076; HLA-C*07:06; AFP; ENSG00000081051; TAA
KAATVTKELR

SEQ ID NO: 8077 - protein, 9 aa, Homo sapiens
  Table A; Target 8077; HLA-A*32:01; AFP; ENSG00000081051; TAA
KAENAVECF

SEQ ID NO: 8078 - protein, 9 aa, Homo sapiens
  Table A; Target 8078; HLA-B*15:03; AFP; ENSG00000081051; TAA
KAENAVECF

SEQ ID NO: 8079 - protein, 9 aa, Homo sapiens
  Table A; Target 8079; HLA-B*38:01; AFP; ENSG00000081051; TAA
KAENAVECF

SEQ ID NO: 8080 - protein, 9 aa, Homo sapiens
  Table A; Target 8080; HLA-B*55:01; AFP; ENSG00000081051; TAA
KAENAVECF

SEQ ID NO: 8081 - protein, 9 aa, Homo sapiens
  Table A; Target 8081; HLA-C*16:04; AFP; ENSG00000081051; TAA
KAENAVECF

SEQ ID NO: 8082 - protein, 10 aa, Homo sapiens
  Table A; Target 8082; HLA-B*40:02; AFP; ENSG00000081051; TAA
KAPQLTSSEL

SEQ ID NO: 8083 - protein, 10 aa, Homo sapiens
  Table A; Target 8083; HLA-B*46:01; AFP; ENSG00000081051; TAA
KAPQLTSSEL

SEQ ID NO: 8084 - protein, 10 aa, Homo sapiens
  Table A; Target 8084; HLA-C*04:01; AFP; ENSG00000081051; TAA
KAPQLTSSEL

SEQ ID NO: 8085 - protein, 10 aa, Homo sapiens
  Table A; Target 8085; HLA-C*06:02; AFP; ENSG00000081051; TAA
KAPQLTSSEL

SEQ ID NO: 8086 - protein, 10 aa, Homo sapiens
  Table A; Target 8086; HLA-C*07:01; AFP; ENSG00000081051; TAA
KAPQLTSSEL

SEQ ID NO: 8087 - protein, 10 aa, Homo sapiens
  Table A; Target 8087; HLA-C*07:02; AFP; ENSG00000081051; TAA
KAPQLTSSEL

SEQ ID NO: 8088 - protein, 10 aa, Homo sapiens
  Table A; Target 8088; HLA-C*14:02; AFP; ENSG00000081051; TAA
KAPQLTSSEL

SEQ ID NO: 8089 - protein, 10 aa, Homo sapiens
  Table A; Target 8089; HLA-C*16:04; AFP; ENSG00000081051; TAA
KAPQLTSSEL

SEQ ID NO: 8090 - protein, 11 aa, Homo sapiens
  Table A; Target 8090; HLA-C*01:02; AFP; ENSG00000081051; TAA
KAPQLTSSELM

SEQ ID NO: 8091 - protein, 11 aa, Homo sapiens
  Table A; Target 8091; HLA-C*07:01; AFP; ENSG00000081051; TAA
KAPQLTSSELM

SEQ ID NO: 8092 - protein, 9 aa, Homo sapiens
  Table A; Target 8092; HLA-A*03:01; AFP; ENSG00000081051; TAA
KDALTAIEK

SEQ ID NO: 8093 - protein, 9 aa, Homo sapiens
  Table A; Target 8093; HLA-A*11:01; AFP; ENSG00000081051; TAA
KDALTAIEK

SEQ ID NO: 8094 - protein, 9 aa, Homo sapiens
  Table A; Target 8094; HLA-B*27:02; AFP; ENSG00000081051; TAA
KDALTAIEK

SEQ ID NO: 8095 - protein, 8 aa, Homo sapiens
  Table A; Target 8095; HLA-B*40:02; AFP; ENSG00000081051; TAA
KELRESSL

SEQ ID NO: 8096 - protein, 9 aa, Homo sapiens
  Table A; Target 8096; HLA-A*30:01; AFP; ENSG00000081051; TAA
KELRESSLL

SEQ ID NO: 8097 - protein, 9 aa, Homo sapiens
  Table A; Target 8097; HLA-B*49:01; AFP; ENSG00000081051; TAA
KELRESSLL

SEQ ID NO: 8098 - protein, 11 aa, Homo sapiens
  Table A; Target 8098; HLA-B*40:01; AFP; ENSG00000081051; TAA
KEVSKMVKDAL

SEQ ID NO: 8099 - protein, 10 aa, Homo sapiens
  Table A; Target 8099; HLA-A*24:02; AFP; ENSG00000081051; TAA
KFTKVNFTEI

SEQ ID NO: 8100 - protein, 9 aa, Homo sapiens
  Table A; Target 8100; HLA-B*58:01; AFP; ENSG00000081051; TAA
KGEEELQKY

SEQ ID NO: 8101 - protein, 9 aa, Homo sapiens
  Table A; Target 8101; HLA-C*16:02; AFP; ENSG00000081051; TAA
KGEEELQKY

SEQ ID NO: 8102 - protein, 9 aa, Homo sapiens
  Table A; Target 8102; HLA-A*31:01; AFP; ENSG00000081051; TAA
KGYQELLEK

SEQ ID NO: 8103 - protein, 9 aa, Homo sapiens
  Table A; Target 8103; HLA-B*27:02; AFP; ENSG00000081051; TAA
KGYQELLEK

SEQ ID NO: 8104 - protein, 9 aa, Homo sapiens
  Table A; Target 8104; HLA-B*27:05; AFP; ENSG00000081051; TAA
KGYQELLEK

SEQ ID NO: 8105 - protein, 9 aa, Homo sapiens
  Table A; Target 8105; HLA-B*57:01; AFP; ENSG00000081051; TAA
KGYQELLEK

SEQ ID NO: 8106 - protein, 11 aa, Homo sapiens
  Table A; Target 8106; HLA-C*06:02; AFP; ENSG00000081051; TAA
KKAPQLTSSEL

SEQ ID NO: 8107 - protein, 10 aa, Homo sapiens
  Table A; Target 8107; HLA-A*02:01; AFP; ENSG00000081051; TAA
KLGEYYLQNA

SEQ ID NO: 8108 - protein, 10 aa, Homo sapiens
  Table A; Target 8108; HLA-A*02:03; AFP; ENSG00000081051; TAA
KLGEYYLQNA

SEQ ID NO: 8109 - protein, 9 aa, Homo sapiens
  Table A; Target 8109; HLA-A*02:03; AFP; ENSG00000081051; TAA
KLISKTRAA

SEQ ID NO: 8110 - protein, 9 aa, Homo sapiens
  Table A; Target 8110; HLA-B*08:01; AFP; ENSG00000081051; TAA
KLISKTRAA

SEQ ID NO: 8111 - protein, 9 aa, Homo sapiens
  Table A; Target 8111; HLA-A*02:04; AFP; ENSG00000081051; TAA
KLSQKFTKV

SEQ ID NO: 8112 - protein, 9 aa, Homo sapiens
  Table A; Target 8112; HLA-A*02:07; AFP; ENSG00000081051; TAA
KLSQKFTKV

SEQ ID NO: 8113 - protein, 9 aa, Homo sapiens
  Table A; Target 8113; HLA-B*55:01; AFP; ENSG00000081051; TAA
KLVLDVAHV

SEQ ID NO: 8114 - protein, 9 aa, Homo sapiens
  Table A; Target 8114; HLA-A*02:03; AFP; ENSG00000081051; TAA
KMAATAATC

SEQ ID NO: 8115 - protein, 9 aa, Homo sapiens
  Table A; Target 8115; HLA-A*32:01; AFP; ENSG00000081051; TAA
KMAATAATC

SEQ ID NO: 8116 - protein, 10 aa, Homo sapiens
  Table A; Target 8116; HLA-A*02:01; AFP; ENSG00000081051; TAA
KMVKDALTAI

SEQ ID NO: 8117 - protein, 10 aa, Homo sapiens
  Table A; Target 8117; HLA-A*02:07; AFP; ENSG00000081051; TAA
KMVKDALTAI

SEQ ID NO: 8118 - protein, 10 aa, Homo sapiens
  Table A; Target 8118; HLA-B*40:02; AFP; ENSG00000081051; TAA
KMVKDALTAI

SEQ ID NO: 8119 - protein, 10 aa, Homo sapiens
  Table A; Target 8119; HLA-B*55:01; AFP; ENSG00000081051; TAA
KMVKDALTAI

SEQ ID NO: 8120 - protein, 8 aa, Homo sapiens
  Table A; Target 8120; HLA-B*57:01; AFP; ENSG00000081051; TAA
KNFGTRTF

SEQ ID NO: 8121 - protein, 8 aa, Homo sapiens
  Table A; Target 8121; HLA-C*06:02; AFP; ENSG00000081051; TAA
KNFGTRTF

SEQ ID NO: 8122 - protein, 8 aa, Homo sapiens
  Table A; Target 8122; HLA-C*12:03; AFP; ENSG00000081051; TAA
KNFGTRTF

SEQ ID NO: 8123 - protein, 10 aa, Homo sapiens
  Table A; Target 8123; HLA-C*06:02; AFP; ENSG00000081051; TAA
KNFGTRTFQA

SEQ ID NO: 8124 - protein, 9 aa, Homo sapiens
  Table A; Target 8124; HLA-B*35:01; AFP; ENSG00000081051; TAA
KPEGLSPNL

SEQ ID NO: 8125 - protein, 9 aa, Homo sapiens
  Table A; Target 8125; HLA-B*55:01; AFP; ENSG00000081051; TAA
KPEGLSPNL

SEQ ID NO: 8126 - protein, 11 aa, Homo sapiens
  Table A; Target 8126; HLA-A*31:01; AFP; ENSG00000081051; TAA
KPEGLSPNLNR

SEQ ID NO: 8127 - protein, 9 aa, Homo sapiens
  Table A; Target 8127; HLA-B*55:01; AFP; ENSG00000081051; TAA
KPQITEEQL

SEQ ID NO: 8128 - protein, 9 aa, Homo sapiens
  Table A; Target 8128; HLA-B*35:01; AFP; ENSG00000081051; TAA
KPTPASIPL

SEQ ID NO: 8129 - protein, 9 aa, Homo sapiens
  Table A; Target 8129; HLA-B*55:01; AFP; ENSG00000081051; TAA
KPTPASIPL

SEQ ID NO: 8130 - protein, 9 aa, Homo sapiens
  Table A; Target 8130; HLA-B*56:01; AFP; ENSG00000081051; TAA
KPTPASIPL

SEQ ID NO: 8131 - protein, 9 aa, Homo sapiens
  Table A; Target 8131; HLA-C*04:01; AFP; ENSG00000081051; TAA
KPTPASIPL

SEQ ID NO: 8132 - protein, 9 aa, Homo sapiens
  Table A; Target 8132; HLA-C*16:01; AFP; ENSG00000081051; TAA
KPTPASIPL

SEQ ID NO: 8133 - protein, 10 aa, Homo sapiens
  Table A; Target 8133; HLA-B*07:02; AFP; ENSG00000081051; TAA
KPTPASIPLF

SEQ ID NO: 8134 - protein, 10 aa, Homo sapiens
  Table A; Target 8134; HLA-B*57:01; AFP; ENSG00000081051; TAA
KPTPASIPLF

SEQ ID NO: 8135 - protein, 10 aa, Homo sapiens
  Table A; Target 8135; HLA-B*58:01; AFP; ENSG00000081051; TAA
KPTPASIPLF

SEQ ID NO: 8136 - protein, 9 aa, Homo sapiens
  Table A; Target 8136; HLA-A*02:07; AFP; ENSG00000081051; TAA
KQEFLINLV

SEQ ID NO: 8137 - protein, 9 aa, Homo sapiens
  Table A; Target 8137; HLA-B*13:02; AFP; ENSG00000081051; TAA
KQEFLINLV

SEQ ID NO: 8138 - protein, 11 aa, Homo sapiens
  Table A; Target 8138; HLA-B*15:01; AFP; ENSG00000081051; TAA
KQKPQITEEQL

SEQ ID NO: 8139 - protein, 11 aa, Homo sapiens
  Table A; Target 8139; HLA-B*40:02; AFP; ENSG00000081051; TAA
KQKPQITEEQL

SEQ ID NO: 8140 - protein, 8 aa, Homo sapiens
  Table A; Target 8140; HLA-B*40:02; AFP; ENSG00000081051; TAA
KTRAALGV

SEQ ID NO: 8141 - protein, 9 aa, Homo sapiens
  Table A; Target 8141; HLA-A*31:01; AFP; ENSG00000081051; TAA
KVNFTEIQK

SEQ ID NO: 8142 - protein, 9 aa, Homo sapiens
  Table A; Target 8142; HLA-A*32:01; AFP; ENSG00000081051; TAA
KVNFTEIQK

SEQ ID NO: 8143 - protein, 10 aa, Homo sapiens
  Table A; Target 8143; HLA-A*02:04; AFP; ENSG00000081051; TAA
KVNFTEIQKL

SEQ ID NO: 8144 - protein, 10 aa, Homo sapiens
  Table A; Target 8144; HLA-A*03:02; AFP; ENSG00000081051; TAA
KVNFTEIQKL

SEQ ID NO: 8145 - protein, 9 aa, Homo sapiens
  Table A; Target 8145; HLA-A*33:03; AFP; ENSG00000081051; TAA
KYIQESQAL

SEQ ID NO: 8146 - protein, 9 aa, Homo sapiens
  Table A; Target 8146; HLA-B*07:02; AFP; ENSG00000081051; TAA
KYIQESQAL

SEQ ID NO: 8147 - protein, 9 aa, Homo sapiens
  Table A; Target 8147; HLA-B*08:01; AFP; ENSG00000081051; TAA
KYIQESQAL

SEQ ID NO: 8148 - protein, 9 aa, Homo sapiens
  Table A; Target 8148; HLA-B*13:02; AFP; ENSG00000081051; TAA
KYIQESQAL

SEQ ID NO: 8149 - protein, 9 aa, Homo sapiens
  Table A; Target 8149; HLA-B*27:02; AFP; ENSG00000081051; TAA
KYIQESQAL

SEQ ID NO: 8150 - protein, 9 aa, Homo sapiens
  Table A; Target 8150; HLA-B*39:01; AFP; ENSG00000081051; TAA
KYIQESQAL

SEQ ID NO: 8151 - protein, 9 aa, Homo sapiens
  Table A; Target 8151; HLA-B*44:02; AFP; ENSG00000081051; TAA
KYIQESQAL

SEQ ID NO: 8152 - protein, 9 aa, Homo sapiens
  Table A; Target 8152; HLA-B*44:03; AFP; ENSG00000081051; TAA
KYIQESQAL

SEQ ID NO: 8153 - protein, 9 aa, Homo sapiens
  Table A; Target 8153; HLA-B*55:01; AFP; ENSG00000081051; TAA
KYIQESQAL

SEQ ID NO: 8154 - protein, 9 aa, Homo sapiens
  Table A; Target 8154; HLA-B*57:01; AFP; ENSG00000081051; TAA
KYIQESQAL

SEQ ID NO: 8155 - protein, 9 aa, Homo sapiens
  Table A; Target 8155; HLA-C*07:04; AFP; ENSG00000081051; TAA
KYIQESQAL

SEQ ID NO: 8156 - protein, 9 aa, Homo sapiens
  Table A; Target 8156; HLA-C*12:03; AFP; ENSG00000081051; TAA
KYIQESQAL

SEQ ID NO: 8157 - protein, 10 aa, Homo sapiens
  Table A; Target 8157; HLA-A*24:02; AFP; ENSG00000081051; TAA
KYIQESQALA

SEQ ID NO: 8158 - protein, 10 aa, Homo sapiens
  Table A; Target 8158; HLA-C*06:02; AFP; ENSG00000081051; TAA
KYIQESQALA

SEQ ID NO: 8159 - protein, 10 aa, Homo sapiens
  Table A; Target 8159; HLA-C*07:02; AFP; ENSG00000081051; TAA
KYIQESQALA

SEQ ID NO: 8160 - protein, 10 aa, Homo sapiens
  Table A; Target 8160; HLA-C*14:02; AFP; ENSG00000081051; TAA
KYIQESQALA

SEQ ID NO: 8161 - protein, 11 aa, Homo sapiens
  Table A; Target 8161; HLA-A*23:01; AFP; ENSG00000081051; TAA
KYIQESQALAK

SEQ ID NO: 8162 - protein, 11 aa, Homo sapiens
  Table A; Target 8162; HLA-A*24:02; AFP; ENSG00000081051; TAA
KYIQESQALAK

SEQ ID NO: 8163 - protein, 11 aa, Homo sapiens
  Table A; Target 8163; HLA-A*29:02; AFP; ENSG00000081051; TAA
KYIQESQALAK

SEQ ID NO: 8164 - protein, 11 aa, Homo sapiens
  Table A; Target 8164; HLA-A*30:02; AFP; ENSG00000081051; TAA
KYIQESQALAK

SEQ ID NO: 8165 - protein, 11 aa, Homo sapiens
  Table A; Target 8165; HLA-A*33:01; AFP; ENSG00000081051; TAA
KYIQESQALAK

SEQ ID NO: 8166 - protein, 11 aa, Homo sapiens
  Table A; Target 8166; HLA-B*27:02; AFP; ENSG00000081051; TAA
KYIQESQALAK

SEQ ID NO: 8167 - protein, 11 aa, Homo sapiens
  Table A; Target 8167; HLA-B*27:05; AFP; ENSG00000081051; TAA
KYIQESQALAK

SEQ ID NO: 8168 - protein, 11 aa, Homo sapiens
  Table A; Target 8168; HLA-B*57:01; AFP; ENSG00000081051; TAA
KYIQESQALAK

SEQ ID NO: 8169 - protein, 11 aa, Homo sapiens
  Table A; Target 8169; HLA-C*06:02; AFP; ENSG00000081051; TAA
KYIQESQALAK

SEQ ID NO: 8170 - protein, 11 aa, Homo sapiens
  Table A; Target 8170; HLA-C*16:02; AFP; ENSG00000081051; TAA
KYIQESQALAK

SEQ ID NO: 8171 - protein, 8 aa, Homo sapiens
  Table A; Target 8171; HLA-B*18:01; AFP; ENSG00000081051; TAA
LADLATIF

SEQ ID NO: 8172 - protein, 8 aa, Homo sapiens
  Table A; Target 8172; HLA-B*35:03; AFP; ENSG00000081051; TAA
LADLATIF

SEQ ID NO: 8173 - protein, 8 aa, Homo sapiens
  Table A; Target 8173; HLA-C*04:01; AFP; ENSG00000081051; TAA
LADLATIF

SEQ ID NO: 8174 - protein, 8 aa, Homo sapiens
  Table A; Target 8174; HLA-C*07:04; AFP; ENSG00000081051; TAA
LADLATIF

SEQ ID NO: 8175 - protein, 9 aa, Homo sapiens
  Table A; Target 8175; HLA-B*35:03; AFP; ENSG00000081051; TAA
LADLATIFF

SEQ ID NO: 8176 - protein, 9 aa, Homo sapiens
  Table A; Target 8176; HLA-B*55:01; AFP; ENSG00000081051; TAA
LADLATIFF

SEQ ID NO: 8177 - protein, 9 aa, Homo sapiens
  Table A; Target 8177; HLA-B*57:01; AFP; ENSG00000081051; TAA
LADLATIFF

SEQ ID NO: 8178 - protein, 9 aa, Homo sapiens
  Table A; Target 8178; HLA-C*03:04; AFP; ENSG00000081051; TAA
LADLATIFF

SEQ ID NO: 8179 - protein, 9 aa, Homo sapiens
  Table A; Target 8179; HLA-B*08:01; AFP; ENSG00000081051; TAA
LAHKKPTPA

SEQ ID NO: 8180 - protein, 8 aa, Homo sapiens
  Table A; Target 8180; HLA-B*08:01; AFP; ENSG00000081051; TAA
LAKRSCGL

SEQ ID NO: 8181 - protein, 8 aa, Homo sapiens
  Table A; Target 8181; HLA-B*27:02; AFP; ENSG00000081051; TAA
LASFVHEY

SEQ ID NO: 8182 - protein, 8 aa, Homo sapiens
  Table A; Target 8182; HLA-B*27:05; AFP; ENSG00000081051; TAA
LASFVHEY

SEQ ID NO: 8183 - protein, 8 aa, Homo sapiens
  Table A; Target 8183; HLA-B*37:01; AFP; ENSG00000081051; TAA
LASFVHEY

SEQ ID NO: 8184 - protein, 8 aa, Homo sapiens
  Table A; Target 8184; HLA-B*54:01; AFP; ENSG00000081051; TAA
LASFVHEY

SEQ ID NO: 8185 - protein, 8 aa, Homo sapiens
  Table A; Target 8185; HLA-B*55:01; AFP; ENSG00000081051; TAA
LASFVHEY

SEQ ID NO: 8186 - protein, 8 aa, Homo sapiens
  Table A; Target 8186; HLA-B*57:01; AFP; ENSG00000081051; TAA
LASFVHEY

SEQ ID NO: 8187 - protein, 8 aa, Homo sapiens
  Table A; Target 8187; HLA-C*04:01; AFP; ENSG00000081051; TAA
LASFVHEY

SEQ ID NO: 8188 - protein, 8 aa, Homo sapiens
  Table A; Target 8188; HLA-C*06:02; AFP; ENSG00000081051; TAA
LASFVHEY

SEQ ID NO: 8189 - protein, 8 aa, Homo sapiens
  Table A; Target 8189; HLA-C*14:02; AFP; ENSG00000081051; TAA
LASFVHEY

SEQ ID NO: 8190 - protein, 9 aa, Homo sapiens
  Table A; Target 8190; HLA-A*24:02; AFP; ENSG00000081051; TAA
LATIFFAQF

SEQ ID NO: 8191 - protein, 9 aa, Homo sapiens
  Table A; Target 8191; HLA-B*35:01; AFP; ENSG00000081051; TAA
LATIFFAQF

SEQ ID NO: 8192 - protein, 9 aa, Homo sapiens
  Table A; Target 8192; HLA-C*16:04; AFP; ENSG00000081051; TAA
LATIFFAQF

SEQ ID NO: 8193 - protein, 9 aa, Homo sapiens
  Table A; Target 8193; HLA-A*02:01; AFP; ENSG00000081051; TAA
LAVSVILRV

SEQ ID NO: 8194 - protein, 9 aa, Homo sapiens
  Table A; Target 8194; HLA-A*02:03; AFP; ENSG00000081051; TAA
LAVSVILRV

SEQ ID NO: 8195 - protein, 9 aa, Homo sapiens
  Table A; Target 8195; HLA-C*16:02; AFP; ENSG00000081051; TAA
LAVSVILRV

SEQ ID NO: 8196 - protein, 10 aa, Homo sapiens
  Table A; Target 8196; HLA-B*56:01; AFP; ENSG00000081051; TAA
LAVSVILRVA

SEQ ID NO: 8197 - protein, 10 aa, Homo sapiens
  Table A; Target 8197; HLA-C*06:02; AFP; ENSG00000081051; TAA
LAVSVILRVA

SEQ ID NO: 8198 - protein, 9 aa, Homo sapiens
  Table A; Target 8198; HLA-B*07:02; AFP; ENSG00000081051; TAA
LCQAQGVAL

SEQ ID NO: 8199 - protein, 9 aa, Homo sapiens
  Table A; Target 8199; HLA-B*35:03; AFP; ENSG00000081051; TAA
LCQAQGVAL

SEQ ID NO: 8200 - protein, 9 aa, Homo sapiens
  Table A; Target 8200; HLA-B*39:01; AFP; ENSG00000081051; TAA
LCQAQGVAL

SEQ ID NO: 8201 - protein, 9 aa, Homo sapiens
  Table A; Target 8201; HLA-B*40:02; AFP; ENSG00000081051; TAA
LCQAQGVAL

SEQ ID NO: 8202 - protein, 9 aa, Homo sapiens
  Table A; Target 8202; HLA-B*46:01; AFP; ENSG00000081051; TAA
LCQAQGVAL

SEQ ID NO: 8203 - protein, 9 aa, Homo sapiens
  Table A; Target 8203; HLA-C*07:02; AFP; ENSG00000081051; TAA
LCQAQGVAL

SEQ ID NO: 8204 - protein, 9 aa, Homo sapiens
  Table A; Target 8204; HLA-C*07:04; AFP; ENSG00000081051; TAA
LCQAQGVAL

SEQ ID NO: 8205 - protein, 9 aa, Homo sapiens
  Table A; Target 8205; HLA-C*16:01; AFP; ENSG00000081051; TAA
LCQAQGVAL

SEQ ID NO: 8206 - protein, 10 aa, Homo sapiens
  Table A; Target 8206; HLA-C*07:01; AFP; ENSG00000081051; TAA
LCQAQGVALQ

SEQ ID NO: 8207 - protein, 8 aa, Homo sapiens
  Table A; Target 8207; HLA-C*07:01; AFP; ENSG00000081051; TAA
LDVAHVHE

SEQ ID NO: 8208 - protein, 9 aa, Homo sapiens
  Table A; Target 8208; HLA-B*37:01; AFP; ENSG00000081051; TAA
LDVAHVHEH

SEQ ID NO: 8209 - protein, 8 aa, Homo sapiens
  Table A; Target 8209; HLA-A*30:01; AFP; ENSG00000081051; TAA
LEAVIADF

SEQ ID NO: 8210 - protein, 8 aa, Homo sapiens
  Table A; Target 8210; HLA-B*40:01; AFP; ENSG00000081051; TAA
LEAVIADF

SEQ ID NO: 8211 - protein, 8 aa, Homo sapiens
  Table A; Target 8211; HLA-B*44:02; AFP; ENSG00000081051; TAA
LEAVIADF

SEQ ID NO: 8212 - protein, 8 aa, Homo sapiens
  Table A; Target 8212; HLA-B*49:01; AFP; ENSG00000081051; TAA
LEAVIADF

SEQ ID NO: 8213 - protein, 11 aa, Homo sapiens
  Table A; Target 8213; HLA-B*40:01; AFP; ENSG00000081051; TAA
LEAVIADFSGL

SEQ ID NO: 8214 - protein, 8 aa, Homo sapiens
  Table A; Target 8214; HLA-B*40:02; AFP; ENSG00000081051; TAA
LENQLPAF

SEQ ID NO: 8215 - protein, 8 aa, Homo sapiens
  Table A; Target 8215; HLA-B*44:02; AFP; ENSG00000081051; TAA
LENQLPAF

SEQ ID NO: 8216 - protein, 9 aa, Homo sapiens
  Table A; Target 8216; HLA-A*30:01; AFP; ENSG00000081051; TAA
LENQLPAFL

SEQ ID NO: 8217 - protein, 9 aa, Homo sapiens
  Table A; Target 8217; HLA-B*40:02; AFP; ENSG00000081051; TAA
LENQLPAFL

SEQ ID NO: 8218 - protein, 8 aa, Homo sapiens
  Table A; Target 8218; HLA-A*29:02; AFP; ENSG00000081051; TAA
LFQKLGEY

SEQ ID NO: 8219 - protein, 8 aa, Homo sapiens
  Table A; Target 8219; HLA-B*46:01; AFP; ENSG00000081051; TAA
LFQKLGEY

SEQ ID NO: 8220 - protein, 8 aa, Homo sapiens
  Table A; Target 8220; HLA-C*04:01; AFP; ENSG00000081051; TAA
LFQKLGEY

SEQ ID NO: 8221 - protein, 8 aa, Homo sapiens
  Table A; Target 8221; HLA-C*07:01; AFP; ENSG00000081051; TAA
LFQKLGEY

SEQ ID NO: 8222 - protein, 9 aa, Homo sapiens
  Table A; Target 8222; HLA-A*02:07; AFP; ENSG00000081051; TAA
LGDRDFNQF

SEQ ID NO: 8223 - protein, 9 aa, Homo sapiens
  Table A; Target 8223; HLA-A*24:02; AFP; ENSG00000081051; TAA
LGDRDFNQF

SEQ ID NO: 8224 - protein, 9 aa, Homo sapiens
  Table A; Target 8224; HLA-B*35:01; AFP; ENSG00000081051; TAA
LGDRDFNQF

SEQ ID NO: 8225 - protein, 9 aa, Homo sapiens
  Table A; Target 8225; HLA-B*55:01; AFP; ENSG00000081051; TAA
LGDRDFNQF

SEQ ID NO: 8226 - protein, 9 aa, Homo sapiens
  Table A; Target 8226; HLA-B*57:01; AFP; ENSG00000081051; TAA
LGDRDFNQF

SEQ ID NO: 8227 - protein, 9 aa, Homo sapiens
  Table A; Target 8227; HLA-C*03:03; AFP; ENSG00000081051; TAA
LGDRDFNQF

SEQ ID NO: 8228 - protein, 8 aa, Homo sapiens
  Table A; Target 8228; HLA-A*03:02; AFP; ENSG00000081051; TAA
LINLVKQK

SEQ ID NO: 8229 - protein, 9 aa, Homo sapiens
  Table A; Target 8229; HLA-B*08:01; AFP; ENSG00000081051; TAA
LISKTRAAL

SEQ ID NO: 8230 - protein, 9 aa, Homo sapiens
  Table A; Target 8230; HLA-A*02:04; AFP; ENSG00000081051; TAA
LLNQHACAV

SEQ ID NO: 8231 - protein, 9 aa, Homo sapiens
  Table A; Target 8231; HLA-B*08:01; AFP; ENSG00000081051; TAA
LLNQHACAV

SEQ ID NO: 8232 - protein, 9 aa, Homo sapiens
  Table A; Target 8232; HLA-B*13:02; AFP; ENSG00000081051; TAA
LLNQHACAV

SEQ ID NO: 8233 - protein, 9 aa, Homo sapiens
  Table A; Target 8233; HLA-B*37:01; AFP; ENSG00000081051; TAA
LLNQHACAV

SEQ ID NO: 8234 - protein, 9 aa, Homo sapiens
  Table A; Target 8234; HLA-B*27:05; AFP; ENSG00000081051; TAA
LNFTESRTL

SEQ ID NO: 8235 - protein, 9 aa, Homo sapiens
  Table A; Target 8235; HLA-B*39:01; AFP; ENSG00000081051; TAA
LNFTESRTL

SEQ ID NO: 8236 - protein, 9 aa, Homo sapiens
  Table A; Target 8236; HLA-C*02:02; AFP; ENSG00000081051; TAA
LNFTESRTL

SEQ ID NO: 8237 - protein, 9 aa, Homo sapiens
  Table A; Target 8237; HLA-C*06:02; AFP; ENSG00000081051; TAA
LNFTESRTL

SEQ ID NO: 8238 - protein, 9 aa, Homo sapiens
  Table A; Target 8238; HLA-C*07:01; AFP; ENSG00000081051; TAA
LNFTESRTL

SEQ ID NO: 8239 - protein, 9 aa, Homo sapiens
  Table A; Target 8239; HLA-C*12:03; AFP; ENSG00000081051; TAA
LNFTESRTL

SEQ ID NO: 8240 - protein, 9 aa, Homo sapiens
  Table A; Target 8240; HLA-C*07:01; AFP; ENSG00000081051; TAA
LNQHACAVM

SEQ ID NO: 8241 - protein, 8 aa, Homo sapiens
  Table A; Target 8241; HLA-B*07:02; AFP; ENSG00000081051; TAA
LPAFLEEL

SEQ ID NO: 8242 - protein, 8 aa, Homo sapiens
  Table A; Target 8242; HLA-B*54:01; AFP; ENSG00000081051; TAA
LPAFLEEL

SEQ ID NO: 8243 - protein, 8 aa, Homo sapiens
  Table A; Target 8243; HLA-B*55:01; AFP; ENSG00000081051; TAA
LPAFLEEL

SEQ ID NO: 8244 - protein, 10 aa, Homo sapiens
  Table A; Target 8244; HLA-A*26:01; AFP; ENSG00000081051; TAA
LQDGEKIMSY

SEQ ID NO: 8245 - protein, 10 aa, Homo sapiens
  Table A; Target 8245; HLA-A*29:02; AFP; ENSG00000081051; TAA
LQDGEKIMSY

SEQ ID NO: 8246 - protein, 10 aa, Homo sapiens
  Table A; Target 8246; HLA-A*32:01; AFP; ENSG00000081051; TAA
LQDGEKIMSY

SEQ ID NO: 8247 - protein, 10 aa, Homo sapiens
  Table A; Target 8247; HLA-B*15:03; AFP; ENSG00000081051; TAA
LQDGEKIMSY

SEQ ID NO: 8248 - protein, 10 aa, Homo sapiens
  Table A; Target 8248; HLA-B*18:01; AFP; ENSG00000081051; TAA
LQDGEKIMSY

SEQ ID NO: 8249 - protein, 10 aa, Homo sapiens
  Table A; Target 8249; HLA-B*35:01; AFP; ENSG00000081051; TAA
LQDGEKIMSY

SEQ ID NO: 8250 - protein, 10 aa, Homo sapiens
  Table A; Target 8250; HLA-B*39:01; AFP; ENSG00000081051; TAA
LQDGEKIMSY

SEQ ID NO: 8251 - protein, 10 aa, Homo sapiens
  Table A; Target 8251; HLA-C*02:02; AFP; ENSG00000081051; TAA
LQDGEKIMSY

SEQ ID NO: 8252 - protein, 10 aa, Homo sapiens
  Table A; Target 8252; HLA-C*05:01; AFP; ENSG00000081051; TAA
LQDGEKIMSY

SEQ ID NO: 8253 - protein, 9 aa, Homo sapiens
  Table A; Target 8253; HLA-A*03:02; AFP; ENSG00000081051; TAA
LQNAFLVAY

SEQ ID NO: 8254 - protein, 9 aa, Homo sapiens
  Table A; Target 8254; HLA-A*11:01; AFP; ENSG00000081051; TAA
LQNAFLVAY

SEQ ID NO: 8255 - protein, 9 aa, Homo sapiens
  Table A; Target 8255; HLA-A*23:01; AFP; ENSG00000081051; TAA
LQNAFLVAY

SEQ ID NO: 8256 - protein, 9 aa, Homo sapiens
  Table A; Target 8256; HLA-A*25:01; AFP; ENSG00000081051; TAA
LQNAFLVAY

SEQ ID NO: 8257 - protein, 9 aa, Homo sapiens
  Table A; Target 8257; HLA-B*07:02; AFP; ENSG00000081051; TAA
LQNAFLVAY

SEQ ID NO: 8258 - protein, 9 aa, Homo sapiens
  Table A; Target 8258; HLA-B*13:02; AFP; ENSG00000081051; TAA
LQNAFLVAY

SEQ ID NO: 8259 - protein, 9 aa, Homo sapiens
  Table A; Target 8259; HLA-B*37:01; AFP; ENSG00000081051; TAA
LQNAFLVAY

SEQ ID NO: 8260 - protein, 9 aa, Homo sapiens
  Table A; Target 8260; HLA-B*54:01; AFP; ENSG00000081051; TAA
LQNAFLVAY

SEQ ID NO: 8261 - protein, 9 aa, Homo sapiens
  Table A; Target 8261; HLA-B*57:01; AFP; ENSG00000081051; TAA
LQNAFLVAY

SEQ ID NO: 8262 - protein, 9 aa, Homo sapiens
  Table A; Target 8262; HLA-B*58:01; AFP; ENSG00000081051; TAA
LQNAFLVAY

SEQ ID NO: 8263 - protein, 9 aa, Homo sapiens
  Table A; Target 8263; HLA-C*03:04; AFP; ENSG00000081051; TAA
LQNAFLVAY

SEQ ID NO: 8264 - protein, 9 aa, Homo sapiens
  Table A; Target 8264; HLA-C*04:01; AFP; ENSG00000081051; TAA
LQNAFLVAY

SEQ ID NO: 8265 - protein, 9 aa, Homo sapiens
  Table A; Target 8265; HLA-C*06:02; AFP; ENSG00000081051; TAA
LQNAFLVAY

SEQ ID NO: 8266 - protein, 11 aa, Homo sapiens
  Table A; Target 8266; HLA-B*27:02; AFP; ENSG00000081051; TAA
LQNAFLVAYTK

SEQ ID NO: 8267 - protein, 8 aa, Homo sapiens
  Table A; Target 8267; HLA-B*08:01; AFP; ENSG00000081051; TAA
LQTMKQEF

SEQ ID NO: 8268 - protein, 8 aa, Homo sapiens
  Table A; Target 8268; HLA-B*15:03; AFP; ENSG00000081051; TAA
LQTMKQEF

SEQ ID NO: 8269 - protein, 8 aa, Homo sapiens
  Table A; Target 8269; HLA-C*07:04; AFP; ENSG00000081051; TAA
LQTMKQEF

SEQ ID NO: 8270 - protein, 8 aa, Homo sapiens
  Table A; Target 8270; HLA-C*16:01; AFP; ENSG00000081051; TAA
LQTMKQEF

SEQ ID NO: 8271 - protein, 10 aa, Homo sapiens
  Table A; Target 8271; HLA-C*06:02; AFP; ENSG00000081051; TAA
LSEDKLLACG

SEQ ID NO: 8272 - protein, 9 aa, Homo sapiens
  Table A; Target 8272; HLA-C*03:03; AFP; ENSG00000081051; TAA
LTSSELMAI

SEQ ID NO: 8273 - protein, 9 aa, Homo sapiens
  Table A; Target 8273; HLA-C*06:02; AFP; ENSG00000081051; TAA
LTSSELMAI

SEQ ID NO: 8274 - protein, 11 aa, Homo sapiens
  Table A; Target 8274; HLA-A*11:01; AFP; ENSG00000081051; TAA
LTSSELMAITR

SEQ ID NO: 8275 - protein, 11 aa, Homo sapiens
  Table A; Target 8275; HLA-A*31:01; AFP; ENSG00000081051; TAA
LTSSELMAITR

SEQ ID NO: 8276 - protein, 11 aa, Homo sapiens
  Table A; Target 8276; HLA-A*68:02; AFP; ENSG00000081051; TAA
LTSSELMAITR

SEQ ID NO: 8277 - protein, 11 aa, Homo sapiens
  Table A; Target 8277; HLA-B*57:01; AFP; ENSG00000081051; TAA
LTSSELMAITR

SEQ ID NO: 8278 - protein, 8 aa, Homo sapiens
  Table A; Target 8278; HLA-A*02:01; AFP; ENSG00000081051; TAA
LVLDVAHV

SEQ ID NO: 8279 - protein, 8 aa, Homo sapiens
  Table A; Target 8279; HLA-A*02:04; AFP; ENSG00000081051; TAA
LVLDVAHV

SEQ ID NO: 8280 - protein, 8 aa, Homo sapiens
  Table A; Target 8280; HLA-A*02:07; AFP; ENSG00000081051; TAA
LVLDVAHV

SEQ ID NO: 8281 - protein, 8 aa, Homo sapiens
  Table A; Target 8281; HLA-A*68:02; AFP; ENSG00000081051; TAA
LVLDVAHV

SEQ ID NO: 8282 - protein, 9 aa, Homo sapiens
  Table A; Target 8282; HLA-A*03:02; AFP; ENSG00000081051; TAA
LVLDVAHVH

SEQ ID NO: 8283 - protein, 9 aa, Homo sapiens
  Table A; Target 8283; HLA-A*11:01; AFP; ENSG00000081051; TAA
LVLDVAHVH

SEQ ID NO: 8284 - protein, 11 aa, Homo sapiens
  Table A; Target 8284; HLA-B*54:01; AFP; ENSG00000081051; TAA
LVVDETYVPPA

SEQ ID NO: 8285 - protein, 9 aa, Homo sapiens
  Table A; Target 8285; HLA-B*44:02; AFP; ENSG00000081051; TAA
LYAPTILLW

SEQ ID NO: 8286 - protein, 8 aa, Homo sapiens
  Table A; Target 8286; HLA-B*54:01; AFP; ENSG00000081051; TAA
MAATAATC

SEQ ID NO: 8287 - protein, 8 aa, Homo sapiens
  Table A; Target 8287; HLA-C*03:03; AFP; ENSG00000081051; TAA
MAATAATC

SEQ ID NO: 8288 - protein, 8 aa, Homo sapiens
  Table A; Target 8288; HLA-C*12:03; AFP; ENSG00000081051; TAA
MAATAATC

SEQ ID NO: 8289 - protein, 9 aa, Homo sapiens
  Table A; Target 8289; HLA-B*35:03; AFP; ENSG00000081051; TAA
MAATAATCC

SEQ ID NO: 8290 - protein, 9 aa, Homo sapiens
  Table A; Target 8290; HLA-C*12:03; AFP; ENSG00000081051; TAA
MAATAATCC

SEQ ID NO: 8291 - protein, 9 aa, Homo sapiens
  Table A; Target 8291; HLA-C*16:02; AFP; ENSG00000081051; TAA
MAATAATCC

SEQ ID NO: 8292 - protein, 8 aa, Homo sapiens
  Table A; Target 8292; HLA-B*08:01; AFP; ENSG00000081051; TAA
MAITRKMA

SEQ ID NO: 8293 - protein, 8 aa, Homo sapiens
  Table A; Target 8293; HLA-B*54:01; AFP; ENSG00000081051; TAA
MAITRKMA

SEQ ID NO: 8294 - protein, 9 aa, Homo sapiens
  Table A; Target 8294; HLA-B*15:03; AFP; ENSG00000081051; TAA
MKNFGTRTF

SEQ ID NO: 8295 - protein, 9 aa, Homo sapiens
  Table A; Target 8295; HLA-A*02:04; AFP; ENSG00000081051; TAA
MKQEFLINL

SEQ ID NO: 8296 - protein, 8 aa, Homo sapiens
  Table A; Target 8296; HLA-B*08:01; AFP; ENSG00000081051; TAA
MNKFIYEI

SEQ ID NO: 8297 - protein, 8 aa, Homo sapiens
  Table A; Target 8297; HLA-C*07:01; AFP; ENSG00000081051; TAA
MNKFIYEI

SEQ ID NO: 8298 - protein, 8 aa, Homo sapiens
  Table A; Target 8298; HLA-B*51:01; AFP; ENSG00000081051; TAA
MTPVNPGV

SEQ ID NO: 8299 - protein, 8 aa, Homo sapiens
  Table A; Target 8299; HLA-C*06:02; AFP; ENSG00000081051; TAA
MTPVNPGV

SEQ ID NO: 8300 - protein, 9 aa, Homo sapiens
  Table A; Target 8300; HLA-C*04:01; AFP; ENSG00000081051; TAA
MTPVNPGVG

SEQ ID NO: 8301 - protein, 10 aa, Homo sapiens
  Table A; Target 8301; HLA-C*04:01; AFP; ENSG00000081051; TAA
MTPVNPGVGQ

SEQ ID NO: 8302 - protein, 10 aa, Homo sapiens
  Table A; Target 8302; HLA-C*07:01; AFP; ENSG00000081051; TAA
MTPVNPGVGQ

SEQ ID NO: 8303 - protein, 10 aa, Homo sapiens
  Table A; Target 8303; HLA-C*07:02; AFP; ENSG00000081051; TAA
MTPVNPGVGQ

SEQ ID NO: 8304 - protein, 8 aa, Homo sapiens
  Table A; Target 8304; HLA-B*54:01; AFP; ENSG00000081051; TAA
MVKDALTA

SEQ ID NO: 8305 - protein, 9 aa, Homo sapiens
  Table A; Target 8305; HLA-A*02:04; AFP; ENSG00000081051; TAA
MVKDALTAI

SEQ ID NO: 8306 - protein, 9 aa, Homo sapiens
  Table A; Target 8306; HLA-A*02:07; AFP; ENSG00000081051; TAA
MVKDALTAI

SEQ ID NO: 8307 - protein, 9 aa, Homo sapiens
  Table A; Target 8307; HLA-A*24:02; AFP; ENSG00000081051; TAA
MVKDALTAI

SEQ ID NO: 8308 - protein, 9 aa, Homo sapiens
  Table A; Target 8308; HLA-A*31:01; AFP; ENSG00000081051; TAA
MVKDALTAI

SEQ ID NO: 8309 - protein, 9 aa, Homo sapiens
  Table A; Target 8309; HLA-A*33:01; AFP; ENSG00000081051; TAA
MVKDALTAI

SEQ ID NO: 8310 - protein, 9 aa, Homo sapiens
  Table A; Target 8310; HLA-B*07:02; AFP; ENSG00000081051; TAA
MVKDALTAI

SEQ ID NO: 8311 - protein, 9 aa, Homo sapiens
  Table A; Target 8311; HLA-B*13:02; AFP; ENSG00000081051; TAA
MVKDALTAI

SEQ ID NO: 8312 - protein, 9 aa, Homo sapiens
  Table A; Target 8312; HLA-B*15:01; AFP; ENSG00000081051; TAA
MVKDALTAI

SEQ ID NO: 8313 - protein, 9 aa, Homo sapiens
  Table A; Target 8313; HLA-B*55:01; AFP; ENSG00000081051; TAA
MVKDALTAI

SEQ ID NO: 8314 - protein, 9 aa, Homo sapiens
  Table A; Target 8314; HLA-B*56:01; AFP; ENSG00000081051; TAA
MVKDALTAI

SEQ ID NO: 8315 - protein, 9 aa, Homo sapiens
  Table A; Target 8315; HLA-C*04:01; AFP; ENSG00000081051; TAA
MVKDALTAI

SEQ ID NO: 8316 - protein, 9 aa, Homo sapiens
  Table A; Target 8316; HLA-C*06:02; AFP; ENSG00000081051; TAA
MVKDALTAI

SEQ ID NO: 8317 - protein, 9 aa, Homo sapiens
  Table A; Target 8317; HLA-C*07:02; AFP; ENSG00000081051; TAA
MVKDALTAI

SEQ ID NO: 8318 - protein, 11 aa, Homo sapiens
  Table A; Target 8318; HLA-B*07:02; AFP; ENSG00000081051; TAA
MVKDALTAIEK

SEQ ID NO: 8319 - protein, 11 aa, Homo sapiens
  Table A; Target 8319; HLA-B*27:02; AFP; ENSG00000081051; TAA
MVKDALTAIEK

SEQ ID NO: 8320 - protein, 11 aa, Homo sapiens
  Table A; Target 8320; HLA-B*57:01; AFP; ENSG00000081051; TAA
MVKDALTAIEK

SEQ ID NO: 8321 - protein, 11 aa, Homo sapiens
  Table A; Target 8321; HLA-C*07:06; AFP; ENSG00000081051; TAA
MVKDALTAIEK

SEQ ID NO: 8322 - protein, 8 aa, Homo sapiens
  Table A; Target 8322; HLA-B*51:01; AFP; ENSG00000081051; TAA
NAFLVAYT

SEQ ID NO: 8323 - protein, 8 aa, Homo sapiens
  Table A; Target 8323; HLA-C*07:01; AFP; ENSG00000081051; TAA
NAFLVAYT

SEQ ID NO: 8324 - protein, 9 aa, Homo sapiens
  Table A; Target 8324; HLA-A*03:02; AFP; ENSG00000081051; TAA
NAFLVAYTK

SEQ ID NO: 8325 - protein, 9 aa, Homo sapiens
  Table A; Target 8325; HLA-A*33:01; AFP; ENSG00000081051; TAA
NAFLVAYTK

SEQ ID NO: 8326 - protein, 9 aa, Homo sapiens
  Table A; Target 8326; HLA-A*68:02; AFP; ENSG00000081051; TAA
NAFLVAYTK

SEQ ID NO: 8327 - protein, 9 aa, Homo sapiens
  Table A; Target 8327; HLA-B*27:02; AFP; ENSG00000081051; TAA
NAFLVAYTK

SEQ ID NO: 8328 - protein, 9 aa, Homo sapiens
  Table A; Target 8328; HLA-B*51:01; AFP; ENSG00000081051; TAA
NAFLVAYTK

SEQ ID NO: 8329 - protein, 9 aa, Homo sapiens
  Table A; Target 8329; HLA-B*54:01; AFP; ENSG00000081051; TAA
NAFLVAYTK

SEQ ID NO: 8330 - protein, 10 aa, Homo sapiens
  Table A; Target 8330; HLA-A*68:01; AFP; ENSG00000081051; TAA
NAFLVAYTKK

SEQ ID NO: 8331 - protein, 10 aa, Homo sapiens
  Table A; Target 8331; HLA-B*27:02; AFP; ENSG00000081051; TAA
NAFLVAYTKK

SEQ ID NO: 8332 - protein, 9 aa, Homo sapiens
  Table A; Target 8332; HLA-A*11:01; AFP; ENSG00000081051; TAA
NAVECFQTK

SEQ ID NO: 8333 - protein, 9 aa, Homo sapiens
  Table A; Target 8333; HLA-A*33:03; AFP; ENSG00000081051; TAA
NAVECFQTK

SEQ ID NO: 8334 - protein, 9 aa, Homo sapiens
  Table A; Target 8334; HLA-B*27:02; AFP; ENSG00000081051; TAA
NAVECFQTK

SEQ ID NO: 8335 - protein, 9 aa, Homo sapiens
  Table A; Target 8335; HLA-B*35:01; AFP; ENSG00000081051; TAA
NAVECFQTK

SEQ ID NO: 8336 - protein, 9 aa, Homo sapiens
  Table A; Target 8336; HLA-B*51:01; AFP; ENSG00000081051; TAA
NAVECFQTK

SEQ ID NO: 8337 - protein, 9 aa, Homo sapiens
  Table A; Target 8337; HLA-B*54:01; AFP; ENSG00000081051; TAA
NAVECFQTK

SEQ ID NO: 8338 - protein, 9 aa, Homo sapiens
  Table A; Target 8338; HLA-C*04:01; AFP; ENSG00000081051; TAA
NAVECFQTK

SEQ ID NO: 8339 - protein, 9 aa, Homo sapiens
  Table A; Target 8339; HLA-C*07:01; AFP; ENSG00000081051; TAA
NAVECFQTK

SEQ ID NO: 8340 - protein, 9 aa, Homo sapiens
  Table A; Target 8340; HLA-C*12:03; AFP; ENSG00000081051; TAA
NAVECFQTK

SEQ ID NO: 8341 - protein, 8 aa, Homo sapiens
  Table A; Target 8341; HLA-B*13:02; AFP; ENSG00000081051; TAA
NEYGIASI

SEQ ID NO: 8342 - protein, 8 aa, Homo sapiens
  Table A; Target 8342; HLA-B*40:01; AFP; ENSG00000081051; TAA
NEYGIASI

SEQ ID NO: 8343 - protein, 8 aa, Homo sapiens
  Table A; Target 8343; HLA-B*40:02; AFP; ENSG00000081051; TAA
NEYGIASI

SEQ ID NO: 8344 - protein, 8 aa, Homo sapiens
  Table A; Target 8344; HLA-B*44:02; AFP; ENSG00000081051; TAA
NEYGIASI

SEQ ID NO: 8345 - protein, 8 aa, Homo sapiens
  Table A; Target 8345; HLA-B*44:03; AFP; ENSG00000081051; TAA
NEYGIASI

SEQ ID NO: 8346 - protein, 8 aa, Homo sapiens
  Table A; Target 8346; HLA-B*51:01; AFP; ENSG00000081051; TAA
NEYGIASI

SEQ ID NO: 8347 - protein, 8 aa, Homo sapiens
  Table A; Target 8347; HLA-C*12:03; AFP; ENSG00000081051; TAA
NEYGIASI

SEQ ID NO: 8348 - protein, 8 aa, Homo sapiens
  Table A; Target 8348; HLA-C*16:04; AFP; ENSG00000081051; TAA
NEYGIASI

SEQ ID NO: 8349 - protein, 9 aa, Homo sapiens
  Table A; Target 8349; HLA-A*68:02; AFP; ENSG00000081051; TAA
NEYGIASIL

SEQ ID NO: 8350 - protein, 9 aa, Homo sapiens
  Table A; Target 8350; HLA-B*15:03; AFP; ENSG00000081051; TAA
NEYGIASIL

SEQ ID NO: 8351 - protein, 9 aa, Homo sapiens
  Table A; Target 8351; HLA-B*27:05; AFP; ENSG00000081051; TAA
NEYGIASIL

SEQ ID NO: 8352 - protein, 9 aa, Homo sapiens
  Table A; Target 8352; HLA-B*38:01; AFP; ENSG00000081051; TAA
NEYGIASIL

SEQ ID NO: 8353 - protein, 9 aa, Homo sapiens
  Table A; Target 8353; HLA-B*46:01; AFP; ENSG00000081051; TAA
NEYGIASIL

SEQ ID NO: 8354 - protein, 9 aa, Homo sapiens
  Table A; Target 8354; HLA-C*01:02; AFP; ENSG00000081051; TAA
NEYGIASIL

SEQ ID NO: 8355 - protein, 9 aa, Homo sapiens
  Table A; Target 8355; HLA-C*03:03; AFP; ENSG00000081051; TAA
NEYGIASIL

SEQ ID NO: 8356 - protein, 9 aa, Homo sapiens
  Table A; Target 8356; HLA-C*03:04; AFP; ENSG00000081051; TAA
NEYGIASIL

SEQ ID NO: 8357 - protein, 9 aa, Homo sapiens
  Table A; Target 8357; HLA-C*06:02; AFP; ENSG00000081051; TAA
NEYGIASIL

SEQ ID NO: 8358 - protein, 9 aa, Homo sapiens
  Table A; Target 8358; HLA-C*07:04; AFP; ENSG00000081051; TAA
NEYGIASIL

SEQ ID NO: 8359 - protein, 9 aa, Homo sapiens
  Table A; Target 8359; HLA-C*16:02; AFP; ENSG00000081051; TAA
NEYGIASIL

SEQ ID NO: 8360 - protein, 10 aa, Homo sapiens
  Table A; Target 8360; HLA-A*23:01; AFP; ENSG00000081051; TAA
NFTEIQKLVL

SEQ ID NO: 8361 - protein, 10 aa, Homo sapiens
  Table A; Target 8361; HLA-A*24:02; AFP; ENSG00000081051; TAA
NFTEIQKLVL

SEQ ID NO: 8362 - protein, 8 aa, Homo sapiens
  Table A; Target 8362; HLA-C*16:02; AFP; ENSG00000081051; TAA
NFTESRTL

SEQ ID NO: 8363 - protein, 11 aa, Homo sapiens
  Table A; Target 8363; HLA-A*30:02; AFP; ENSG00000081051; TAA
NIFLASFVHEY

SEQ ID NO: 8364 - protein, 10 aa, Homo sapiens
  Table A; Target 8364; HLA-B*38:01; AFP; ENSG00000081051; TAA
NQFSSGEKNI

SEQ ID NO: 8365 - protein, 11 aa, Homo sapiens
  Table A; Target 8365; HLA-A*32:01; AFP; ENSG00000081051; TAA
NQFSSGEKNIF

SEQ ID NO: 8366 - protein, 11 aa, Homo sapiens
  Table A; Target 8366; HLA-B*15:01; AFP; ENSG00000081051; TAA
NQFSSGEKNIF

SEQ ID NO: 8367 - protein, 11 aa, Homo sapiens
  Table A; Target 8367; HLA-B*15:03; AFP; ENSG00000081051; TAA
NQFSSGEKNIF

SEQ ID NO: 8368 - protein, 11 aa, Homo sapiens
  Table A; Target 8368; HLA-B*27:05; AFP; ENSG00000081051; TAA
NQFSSGEKNIF

SEQ ID NO: 8369 - protein, 11 aa, Homo sapiens
  Table A; Target 8369; HLA-B*35:01; AFP; ENSG00000081051; TAA
NQFSSGEKNIF

SEQ ID NO: 8370 - protein, 11 aa, Homo sapiens
  Table A; Target 8370; HLA-B*39:01; AFP; ENSG00000081051; TAA
NQFSSGEKNIF

SEQ ID NO: 8371 - protein, 11 aa, Homo sapiens
  Table A; Target 8371; HLA-C*07:04; AFP; ENSG00000081051; TAA
NQFSSGEKNIF

SEQ ID NO: 8372 - protein, 10 aa, Homo sapiens
  Table A; Target 8372; HLA-A*02:04; AFP; ENSG00000081051; TAA
NQLPAFLEEL

SEQ ID NO: 8373 - protein, 10 aa, Homo sapiens
  Table A; Target 8373; HLA-C*04:01; AFP; ENSG00000081051; TAA
PEPVTSCEAY

SEQ ID NO: 8374 - protein, 8 aa, Homo sapiens
  Table A; Target 8374; HLA-A*24:02; AFP; ENSG00000081051; TAA
PFLYAPTI

SEQ ID NO: 8375 - protein, 9 aa, Homo sapiens
  Table A; Target 8375; HLA-A*23:01; AFP; ENSG00000081051; TAA
PFLYAPTIL

SEQ ID NO: 8376 - protein, 9 aa, Homo sapiens
  Table A; Target 8376; HLA-A*24:02; AFP; ENSG00000081051; TAA
PFLYAPTIL

SEQ ID NO: 8377 - protein, 9 aa, Homo sapiens
  Table A; Target 8377; HLA-A*02:03; AFP; ENSG00000081051; TAA
PLFQVPEPV

SEQ ID NO: 8378 - protein, 8 aa, Homo sapiens
  Table A; Target 8378; HLA-B*13:02; AFP; ENSG00000081051; TAA
PQLAVSVI

SEQ ID NO: 8379 - protein, 9 aa, Homo sapiens
  Table A; Target 8379; HLA-A*24:02; AFP; ENSG00000081051; TAA
PQLAVSVIL

SEQ ID NO: 8380 - protein, 10 aa, Homo sapiens
  Table A; Target 8380; HLA-B*27:02; AFP; ENSG00000081051; TAA
PQLAVSVILR

SEQ ID NO: 8381 - protein, 8 aa, Homo sapiens
  Table A; Target 8381; HLA-C*04:01; AFP; ENSG00000081051; TAA
PQLTSSEL

SEQ ID NO: 8382 - protein, 9 aa, Homo sapiens
  Table A; Target 8382; HLA-C*04:01; AFP; ENSG00000081051; TAA
PQLTSSELM

SEQ ID NO: 8383 - protein, 9 aa, Homo sapiens
  Table A; Target 8383; HLA-C*07:02; AFP; ENSG00000081051; TAA
PQLTSSELM

SEQ ID NO: 8384 - protein, 11 aa, Homo sapiens
  Table A; Target 8384; HLA-C*04:01; AFP; ENSG00000081051; TAA
PQLTSSELMAI

SEQ ID NO: 8385 - protein, 8 aa, Homo sapiens
  Table A; Target 8385; HLA-C*04:01; AFP; ENSG00000081051; TAA
PTPASIPL

SEQ ID NO: 8386 - protein, 8 aa, Homo sapiens
  Table A; Target 8386; HLA-C*07:02; AFP; ENSG00000081051; TAA
PTPASIPL

SEQ ID NO: 8387 - protein, 8 aa, Homo sapiens
  Table A; Target 8387; HLA-A*25:01; AFP; ENSG00000081051; TAA
QAITVTKL

SEQ ID NO: 8388 - protein, 8 aa, Homo sapiens
  Table A; Target 8388; HLA-B*07:02; AFP; ENSG00000081051; TAA
QAITVTKL

SEQ ID NO: 8389 - protein, 8 aa, Homo sapiens
  Table A; Target 8389; HLA-B*13:02; AFP; ENSG00000081051; TAA
QAITVTKL

SEQ ID NO: 8390 - protein, 8 aa, Homo sapiens
  Table A; Target 8390; HLA-B*35:01; AFP; ENSG00000081051; TAA
QAITVTKL

SEQ ID NO: 8391 - protein, 8 aa, Homo sapiens
  Table A; Target 8391; HLA-B*37:01; AFP; ENSG00000081051; TAA
QAITVTKL

SEQ ID NO: 8392 - protein, 8 aa, Homo sapiens
  Table A; Target 8392; HLA-B*39:01; AFP; ENSG00000081051; TAA
QAITVTKL

SEQ ID NO: 8393 - protein, 8 aa, Homo sapiens
  Table A; Target 8393; HLA-B*49:01; AFP; ENSG00000081051; TAA
QAITVTKL

SEQ ID NO: 8394 - protein, 8 aa, Homo sapiens
  Table A; Target 8394; HLA-B*55:01; AFP; ENSG00000081051; TAA
QAITVTKL

SEQ ID NO: 8395 - protein, 8 aa, Homo sapiens
  Table A; Target 8395; HLA-C*04:01; AFP; ENSG00000081051; TAA
QAITVTKL

SEQ ID NO: 8396 - protein, 8 aa, Homo sapiens
  Table A; Target 8396; HLA-C*07:04; AFP; ENSG00000081051; TAA
QAITVTKL

SEQ ID NO: 8397 - protein, 8 aa, Homo sapiens
  Table A; Target 8397; HLA-C*14:02; AFP; ENSG00000081051; TAA
QAITVTKL

SEQ ID NO: 8398 - protein, 8 aa, Homo sapiens
  Table A; Target 8398; HLA-C*16:04; AFP; ENSG00000081051; TAA
QAITVTKL

SEQ ID NO: 8399 - protein, 11 aa, Homo sapiens
  Table A; Target 8399; HLA-A*33:01; AFP; ENSG00000081051; TAA
QAITVTKLSQK

SEQ ID NO: 8400 - protein, 11 aa, Homo sapiens
  Table A; Target 8400; HLA-B*27:02; AFP; ENSG00000081051; TAA
QAITVTKLSQK

SEQ ID NO: 8401 - protein, 9 aa, Homo sapiens
  Table A; Target 8401; HLA-C*16:02; AFP; ENSG00000081051; TAA
QAQGVALQT

SEQ ID NO: 8402 - protein, 10 aa, Homo sapiens
  Table A; Target 8402; HLA-A*26:01; AFP; ENSG00000081051; TAA
QAQGVALQTM

SEQ ID NO: 8403 - protein, 10 aa, Homo sapiens
  Table A; Target 8403; HLA-A*68:01; AFP; ENSG00000081051; TAA
QAQGVALQTM

SEQ ID NO: 8404 - protein, 10 aa, Homo sapiens
  Table A; Target 8404; HLA-B*15:01; AFP; ENSG00000081051; TAA
QAQGVALQTM

SEQ ID NO: 8405 - protein, 10 aa, Homo sapiens
  Table A; Target 8405; HLA-B*38:01; AFP; ENSG00000081051; TAA
QAQGVALQTM

SEQ ID NO: 8406 - protein, 10 aa, Homo sapiens
  Table A; Target 8406; HLA-B*39:01; AFP; ENSG00000081051; TAA
QAQGVALQTM

SEQ ID NO: 8407 - protein, 10 aa, Homo sapiens
  Table A; Target 8407; HLA-B*40:02; AFP; ENSG00000081051; TAA
QAQGVALQTM

SEQ ID NO: 8408 - protein, 10 aa, Homo sapiens
  Table A; Target 8408; HLA-B*46:01; AFP; ENSG00000081051; TAA
QAQGVALQTM

SEQ ID NO: 8409 - protein, 10 aa, Homo sapiens
  Table A; Target 8409; HLA-B*55:01; AFP; ENSG00000081051; TAA
QAQGVALQTM

SEQ ID NO: 8410 - protein, 10 aa, Homo sapiens
  Table A; Target 8410; HLA-B*56:01; AFP; ENSG00000081051; TAA
QAQGVALQTM

SEQ ID NO: 8411 - protein, 10 aa, Homo sapiens
  Table A; Target 8411; HLA-C*01:02; AFP; ENSG00000081051; TAA
QAQGVALQTM

SEQ ID NO: 8412 - protein, 10 aa, Homo sapiens
  Table A; Target 8412; HLA-C*05:01; AFP; ENSG00000081051; TAA
QAQGVALQTM

SEQ ID NO: 8413 - protein, 10 aa, Homo sapiens
  Table A; Target 8413; HLA-C*07:01; AFP; ENSG00000081051; TAA
QAQGVALQTM

SEQ ID NO: 8414 - protein, 10 aa, Homo sapiens
  Table A; Target 8414; HLA-C*07:04; AFP; ENSG00000081051; TAA
QAQGVALQTM

SEQ ID NO: 8415 - protein, 10 aa, Homo sapiens
  Table A; Target 8415; HLA-C*12:03; AFP; ENSG00000081051; TAA
QAQGVALQTM

SEQ ID NO: 8416 - protein, 10 aa, Homo sapiens
  Table A; Target 8416; HLA-C*14:02; AFP; ENSG00000081051; TAA
QAQGVALQTM

SEQ ID NO: 8417 - protein, 10 aa, Homo sapiens
  Table A; Target 8417; HLA-C*16:04; AFP; ENSG00000081051; TAA
QAQGVALQTM

SEQ ID NO: 8418 - protein, 11 aa, Homo sapiens
  Table A; Target 8418; HLA-C*07:06; AFP; ENSG00000081051; TAA
QAQGVALQTMK

SEQ ID NO: 8419 - protein, 9 aa, Homo sapiens
  Table A; Target 8419; HLA-C*07:01; AFP; ENSG00000081051; TAA
QDGEKIMSY

SEQ ID NO: 8420 - protein, 9 aa, Homo sapiens
  Table A; Target 8420; HLA-C*16:02; AFP; ENSG00000081051; TAA
QDGEKIMSY

SEQ ID NO: 8421 - protein, 9 aa, Homo sapiens
  Table A; Target 8421; HLA-C*16:04; AFP; ENSG00000081051; TAA
QDGEKIMSY

SEQ ID NO: 8422 - protein, 10 aa, Homo sapiens
  Table A; Target 8422; HLA-B*27:02; AFP; ENSG00000081051; TAA
QDKGEEELQK

SEQ ID NO: 8423 - protein, 11 aa, Homo sapiens
  Table A; Target 8423; HLA-A*30:02; AFP; ENSG00000081051; TAA
QDKGEEELQKY

SEQ ID NO: 8424 - protein, 8 aa, Homo sapiens
  Table A; Target 8424; HLA-B*40:02; AFP; ENSG00000081051; TAA
QDTLSNKI

SEQ ID NO: 8425 - protein, 8 aa, Homo sapiens
  Table A; Target 8425; HLA-C*06:02; AFP; ENSG00000081051; TAA
QDTLSNKI

SEQ ID NO: 8426 - protein, 8 aa, Homo sapiens
  Table A; Target 8426; HLA-C*07:01; AFP; ENSG00000081051; TAA
QDTLSNKI

SEQ ID NO: 8427 - protein, 8 aa, Homo sapiens
  Table A; Target 8427; HLA-C*07:04; AFP; ENSG00000081051; TAA
QDTLSNKI

SEQ ID NO: 8428 - protein, 8 aa, Homo sapiens
  Table A; Target 8428; HLA-C*16:02; AFP; ENSG00000081051; TAA
QEATYKEV

SEQ ID NO: 8429 - protein, 10 aa, Homo sapiens
  Table A; Target 8429; HLA-B*27:02; AFP; ENSG00000081051; TAA
QEATYKEVSK

SEQ ID NO: 8430 - protein, 10 aa, Homo sapiens
  Table A; Target 8430; HLA-C*06:02; AFP; ENSG00000081051; TAA
QEATYKEVSK

SEQ ID NO: 8431 - protein, 11 aa, Homo sapiens
  Table A; Target 8431; HLA-B*40:01; AFP; ENSG00000081051; TAA
QEATYKEVSKM

SEQ ID NO: 8432 - protein, 8 aa, Homo sapiens
  Table A; Target 8432; HLA-B*13:02; AFP; ENSG00000081051; TAA
QEFLINLV

SEQ ID NO: 8433 - protein, 8 aa, Homo sapiens
  Table A; Target 8433; HLA-B*40:02; AFP; ENSG00000081051; TAA
QEFLINLV

SEQ ID NO: 8434 - protein, 8 aa, Homo sapiens
  Table A; Target 8434; HLA-B*44:02; AFP; ENSG00000081051; TAA
QEFLINLV

SEQ ID NO: 8435 - protein, 8 aa, Homo sapiens
  Table A; Target 8435; HLA-B*51:01; AFP; ENSG00000081051; TAA
QEFLINLV

SEQ ID NO: 8436 - protein, 9 aa, Homo sapiens
  Table A; Target 8436; HLA-B*18:01; AFP; ENSG00000081051; TAA
QEFLINLVK

SEQ ID NO: 8437 - protein, 9 aa, Homo sapiens
  Table A; Target 8437; HLA-B*44:02; AFP; ENSG00000081051; TAA
QEFLINLVK

SEQ ID NO: 8438 - protein, 9 aa, Homo sapiens
  Table A; Target 8438; HLA-B*44:03; AFP; ENSG00000081051; TAA
QEFLINLVK

SEQ ID NO: 8439 - protein, 9 aa, Homo sapiens
  Table A; Target 8439; HLA-B*49:01; AFP; ENSG00000081051; TAA
QEFLINLVK

SEQ ID NO: 8440 - protein, 10 aa, Homo sapiens
  Table A; Target 8440; HLA-B*44:02; AFP; ENSG00000081051; TAA
QEFLINLVKQ

SEQ ID NO: 8441 - protein, 10 aa, Homo sapiens
  Table A; Target 8441; HLA-B*44:03; AFP; ENSG00000081051; TAA
QEFLINLVKQ

SEQ ID NO: 8442 - protein, 11 aa, Homo sapiens
  Table A; Target 8442; HLA-B*44:02; AFP; ENSG00000081051; TAA
QEFLINLVKQK

SEQ ID NO: 8443 - protein, 11 aa, Homo sapiens
  Table A; Target 8443; HLA-B*44:03; AFP; ENSG00000081051; TAA
QEFLINLVKQK

SEQ ID NO: 8444 - protein, 8 aa, Homo sapiens
  Table A; Target 8444; HLA-B*18:01; AFP; ENSG00000081051; TAA
QELLEKCF

SEQ ID NO: 8445 - protein, 8 aa, Homo sapiens
  Table A; Target 8445; HLA-B*44:03; AFP; ENSG00000081051; TAA
QELLEKCF

SEQ ID NO: 8446 - protein, 8 aa, Homo sapiens
  Table A; Target 8446; HLA-B*27:02; AFP; ENSG00000081051; TAA
QESQALAK

SEQ ID NO: 8447 - protein, 9 aa, Homo sapiens
  Table A; Target 8447; HLA-A*31:01; AFP; ENSG00000081051; TAA
QESQALAKR

SEQ ID NO: 8448 - protein, 9 aa, Homo sapiens
  Table A; Target 8448; HLA-A*68:01; AFP; ENSG00000081051; TAA
QESQALAKR

SEQ ID NO: 8449 - protein, 9 aa, Homo sapiens
  Table A; Target 8449; HLA-B*27:02; AFP; ENSG00000081051; TAA
QESQALAKR

SEQ ID NO: 8450 - protein, 9 aa, Homo sapiens
  Table A; Target 8450; HLA-B*49:01; AFP; ENSG00000081051; TAA
QESQALAKR

SEQ ID NO: 8451 - protein, 9 aa, Homo sapiens
  Table A; Target 8451; HLA-B*15:01; AFP; ENSG00000081051; TAA
QGQEQEVCF

SEQ ID NO: 8452 - protein, 9 aa, Homo sapiens
  Table A; Target 8452; HLA-B*35:01; AFP; ENSG00000081051; TAA
QGQEQEVCF

SEQ ID NO: 8453 - protein, 9 aa, Homo sapiens
  Table A; Target 8453; HLA-B*38:01; AFP; ENSG00000081051; TAA
QGQEQEVCF

SEQ ID NO: 8454 - protein, 9 aa, Homo sapiens
  Table A; Target 8454; HLA-B*55:01; AFP; ENSG00000081051; TAA
QGQEQEVCF

SEQ ID NO: 8455 - protein, 9 aa, Homo sapiens
  Table A; Target 8455; HLA-C*04:01; AFP; ENSG00000081051; TAA
QGQEQEVCF

SEQ ID NO: 8456 - protein, 9 aa, Homo sapiens
  Table A; Target 8456; HLA-C*07:04; AFP; ENSG00000081051; TAA
QGQEQEVCF

SEQ ID NO: 8457 - protein, 8 aa, Homo sapiens
  Table A; Target 8457; HLA-B*08:01; AFP; ENSG00000081051; TAA
QGVALQTM

SEQ ID NO: 8458 - protein, 8 aa, Homo sapiens
  Table A; Target 8458; HLA-B*18:01; AFP; ENSG00000081051; TAA
QGVALQTM

SEQ ID NO: 8459 - protein, 8 aa, Homo sapiens
  Table A; Target 8459; HLA-B*40:02; AFP; ENSG00000081051; TAA
QGVALQTM

SEQ ID NO: 8460 - protein, 8 aa, Homo sapiens
  Table A; Target 8460; HLA-C*04:01; AFP; ENSG00000081051; TAA
QGVALQTM

SEQ ID NO: 8461 - protein, 8 aa, Homo sapiens
  Table A; Target 8461; HLA-C*07:01; AFP; ENSG00000081051; TAA
QGVALQTM

SEQ ID NO: 8462 - protein, 9 aa, Homo sapiens
  Table A; Target 8462; HLA-A*11:01; AFP; ENSG00000081051; TAA
QGVALQTMK

SEQ ID NO: 8463 - protein, 9 aa, Homo sapiens
  Table A; Target 8463; HLA-C*06:02; AFP; ENSG00000081051; TAA
QGVALQTMK

SEQ ID NO: 8464 - protein, 9 aa, Homo sapiens
  Table A; Target 8464; HLA-C*07:02; AFP; ENSG00000081051; TAA
QGVALQTMK

SEQ ID NO: 8465 - protein, 10 aa, Homo sapiens
  Table A; Target 8465; HLA-C*07:01; AFP; ENSG00000081051; TAA
QGVALQTMKQ

SEQ ID NO: 8466 - protein, 10 aa, Homo sapiens
  Table A; Target 8466; HLA-C*07:02; AFP; ENSG00000081051; TAA
QGVALQTMKQ

SEQ ID NO: 8467 - protein, 8 aa, Homo sapiens
  Table A; Target 8467; HLA-C*04:01; AFP; ENSG00000081051; TAA
QKFTKVNF

SEQ ID NO: 8468 - protein, 8 aa, Homo sapiens
  Table A; Target 8468; HLA-C*07:01; AFP; ENSG00000081051; TAA
QKFTKVNF

SEQ ID NO: 8469 - protein, 10 aa, Homo sapiens
  Table A; Target 8469; HLA-B*38:01; AFP; ENSG00000081051; TAA
QKYIQESQAL

SEQ ID NO: 8470 - protein, 10 aa, Homo sapiens
  Table A; Target 8470; HLA-C*06:02; AFP; ENSG00000081051; TAA
QKYIQESQAL

SEQ ID NO: 8471 - protein, 10 aa, Homo sapiens
  Table A; Target 8471; HLA-C*07:01; AFP; ENSG00000081051; TAA
QKYIQESQAL

SEQ ID NO: 8472 - protein, 9 aa, Homo sapiens
  Table A; Target 8472; HLA-A*03:01; AFP; ENSG00000081051; TAA
QLAVSVILR

SEQ ID NO: 8473 - protein, 9 aa, Homo sapiens
  Table A; Target 8473; HLA-A*31:01; AFP; ENSG00000081051; TAA
QLAVSVILR

SEQ ID NO: 8474 - protein, 9 aa, Homo sapiens
  Table A; Target 8474; HLA-A*33:01; AFP; ENSG00000081051; TAA
QLAVSVILR

SEQ ID NO: 8475 - protein, 9 aa, Homo sapiens
  Table A; Target 8475; HLA-A*33:03; AFP; ENSG00000081051; TAA
QLAVSVILR

SEQ ID NO: 8476 - protein, 10 aa, Homo sapiens
  Table A; Target 8476; HLA-A*02:04; AFP; ENSG00000081051; TAA
QLAVSVILRV

SEQ ID NO: 8477 - protein, 9 aa, Homo sapiens
  Table A; Target 8477; HLA-A*02:07; AFP; ENSG00000081051; TAA
QLEAVIADF

SEQ ID NO: 8478 - protein, 9 aa, Homo sapiens
  Table A; Target 8478; HLA-B*15:01; AFP; ENSG00000081051; TAA
QLEAVIADF

SEQ ID NO: 8479 - protein, 9 aa, Homo sapiens
  Table A; Target 8479; HLA-B*18:01; AFP; ENSG00000081051; TAA
QLEAVIADF

SEQ ID NO: 8480 - protein, 9 aa, Homo sapiens
  Table A; Target 8480; HLA-B*35:01; AFP; ENSG00000081051; TAA
QLEAVIADF

SEQ ID NO: 8481 - protein, 9 aa, Homo sapiens
  Table A; Target 8481; HLA-C*04:01; AFP; ENSG00000081051; TAA
QLEAVIADF

SEQ ID NO: 8482 - protein, 9 aa, Homo sapiens
  Table A; Target 8482; HLA-C*07:04; AFP; ENSG00000081051; TAA
QLEAVIADF

SEQ ID NO: 8483 - protein, 9 aa, Homo sapiens
  Table A; Target 8483; HLA-C*12:03; AFP; ENSG00000081051; TAA
QLEAVIADF

SEQ ID NO: 8484 - protein, 9 aa, Homo sapiens
  Table A; Target 8484; HLA-A*68:02; AFP; ENSG00000081051; TAA
QLPAFLEEL

SEQ ID NO: 8485 - protein, 9 aa, Homo sapiens
  Table A; Target 8485; HLA-B*13:02; AFP; ENSG00000081051; TAA
QLPAFLEEL

SEQ ID NO: 8486 - protein, 9 aa, Homo sapiens
  Table A; Target 8486; HLA-B*46:01; AFP; ENSG00000081051; TAA
QLPAFLEEL

SEQ ID NO: 8487 - protein, 9 aa, Homo sapiens
  Table A; Target 8487; HLA-B*55:01; AFP; ENSG00000081051; TAA
QLPAFLEEL

SEQ ID NO: 8488 - protein, 9 aa, Homo sapiens
  Table A; Target 8488; HLA-B*55:01; AFP; ENSG00000081051; TAA
QLSEDKLLA

SEQ ID NO: 8489 - protein, 10 aa, Homo sapiens
  Table A; Target 8489; HLA-A*02:03; AFP; ENSG00000081051; TAA
QLSEDKLLAC

SEQ ID NO: 8490 - protein, 10 aa, Homo sapiens
  Table A; Target 8490; HLA-A*02:01; AFP; ENSG00000081051; TAA
QLTSSELMAI

SEQ ID NO: 8491 - protein, 10 aa, Homo sapiens
  Table A; Target 8491; HLA-A*02:03; AFP; ENSG00000081051; TAA
QLTSSELMAI

SEQ ID NO: 8492 - protein, 8 aa, Homo sapiens
  Table A; Target 8492; HLA-B*18:01; AFP; ENSG00000081051; TAA
QNAFLVAY

SEQ ID NO: 8493 - protein, 8 aa, Homo sapiens
  Table A; Target 8493; HLA-C*07:01; AFP; ENSG00000081051; TAA
QNAFLVAY

SEQ ID NO: 8494 - protein, 10 aa, Homo sapiens
  Table A; Target 8494; HLA-A*03:02; AFP; ENSG00000081051; TAA
QNAFLVAYTK

SEQ ID NO: 8495 - protein, 9 aa, Homo sapiens
  Table A; Target 8495; HLA-B*27:05; AFP; ENSG00000081051; TAA
QQDTLSNKI

SEQ ID NO: 8496 - protein, 9 aa, Homo sapiens
  Table A; Target 8496; HLA-A*32:01; AFP; ENSG00000081051; TAA
QTKAATVTK

SEQ ID NO: 8497 - protein, 9 aa, Homo sapiens
  Table A; Target 8497; HLA-B*07:02; AFP; ENSG00000081051; TAA
QTKAATVTK

SEQ ID NO: 8498 - protein, 9 aa, Homo sapiens
  Table A; Target 8498; HLA-B*40:02; AFP; ENSG00000081051; TAA
QTKAATVTK

SEQ ID NO: 8499 - protein, 9 aa, Homo sapiens
  Table A; Target 8499; HLA-B*46:01; AFP; ENSG00000081051; TAA
QTKAATVTK

SEQ ID NO: 8500 - protein, 9 aa, Homo sapiens
  Table A; Target 8500; HLA-B*57:01; AFP; ENSG00000081051; TAA
QTKAATVTK

SEQ ID NO: 8501 - protein, 9 aa, Homo sapiens
  Table A; Target 8501; HLA-C*02:02; AFP; ENSG00000081051; TAA
QTKAATVTK

SEQ ID NO: 8502 - protein, 9 aa, Homo sapiens
  Table A; Target 8502; HLA-C*04:01; AFP; ENSG00000081051; TAA
QTKAATVTK

SEQ ID NO: 8503 - protein, 9 aa, Homo sapiens
  Table A; Target 8503; HLA-C*06:02; AFP; ENSG00000081051; TAA
QTKAATVTK

SEQ ID NO: 8504 - protein, 9 aa, Homo sapiens
  Table A; Target 8504; HLA-C*07:01; AFP; ENSG00000081051; TAA
QTKAATVTK

SEQ ID NO: 8505 - protein, 9 aa, Homo sapiens
  Table A; Target 8505; HLA-C*12:03; AFP; ENSG00000081051; TAA
QTKAATVTK

SEQ ID NO: 8506 - protein, 11 aa, Homo sapiens
  Table A; Target 8506; HLA-A*31:01; AFP; ENSG00000081051; TAA
QTKAATVTKEL

SEQ ID NO: 8507 - protein, 11 aa, Homo sapiens
  Table A; Target 8507; HLA-B*40:02; AFP; ENSG00000081051; TAA
QTKAATVTKEL

SEQ ID NO: 8508 - protein, 11 aa, Homo sapiens
  Table A; Target 8508; HLA-C*06:02; AFP; ENSG00000081051; TAA
QTKAATVTKEL

SEQ ID NO: 8509 - protein, 11 aa, Homo sapiens
  Table A; Target 8509; HLA-C*07:02; AFP; ENSG00000081051; TAA
QTKAATVTKEL

SEQ ID NO: 8510 - protein, 9 aa, Homo sapiens
  Table A; Target 8510; HLA-A*68:02; AFP; ENSG00000081051; TAA
QTMKQEFLI

SEQ ID NO: 8511 - protein, 9 aa, Homo sapiens
  Table A; Target 8511; HLA-B*13:02; AFP; ENSG00000081051; TAA
QTMKQEFLI

SEQ ID NO: 8512 - protein, 11 aa, Homo sapiens
  Table A; Target 8512; HLA-A*68:02; AFP; ENSG00000081051; TAA
QTMKQEFLINL

SEQ ID NO: 8513 - protein, 9 aa, Homo sapiens
  Table A; Target 8513; HLA-A*02:03; AFP; ENSG00000081051; TAA
QVPEPVTSC

SEQ ID NO: 8514 - protein, 9 aa, Homo sapiens
  Table A; Target 8514; HLA-A*26:01; AFP; ENSG00000081051; TAA
QVPEPVTSC

SEQ ID NO: 8515 - protein, 9 aa, Homo sapiens
  Table A; Target 8515; HLA-B*46:01; AFP; ENSG00000081051; TAA
QVPEPVTSC

SEQ ID NO: 8516 - protein, 9 aa, Homo sapiens
  Table A; Target 8516; HLA-B*51:01; AFP; ENSG00000081051; TAA
QVPEPVTSC

SEQ ID NO: 8517 - protein, 9 aa, Homo sapiens
  Table A; Target 8517; HLA-B*55:01; AFP; ENSG00000081051; TAA
QVPEPVTSC

SEQ ID NO: 8518 - protein, 9 aa, Homo sapiens
  Table A; Target 8518; HLA-B*56:01; AFP; ENSG00000081051; TAA
QVPEPVTSC

SEQ ID NO: 8519 - protein, 10 aa, Homo sapiens
  Table A; Target 8519; HLA-B*40:02; AFP; ENSG00000081051; TAA
RESSLLNQHA

SEQ ID NO: 8520 - protein, 9 aa, Homo sapiens
  Table A; Target 8520; HLA-B*44:02; AFP; ENSG00000081051; TAA
RETFMNKFI

SEQ ID NO: 8521 - protein, 9 aa, Homo sapiens
  Table A; Target 8521; HLA-B*44:03; AFP; ENSG00000081051; TAA
RETFMNKFI

SEQ ID NO: 8522 - protein, 11 aa, Homo sapiens
  Table A; Target 8522; HLA-A*23:01; AFP; ENSG00000081051; TAA
RFLGDRDFNQF

SEQ ID NO: 8523 - protein, 9 aa, Homo sapiens
  Table A; Target 8523; HLA-A*02:07; AFP; ENSG00000081051; TAA
RHPQLAVSV

SEQ ID NO: 8524 - protein, 9 aa, Homo sapiens
  Table A; Target 8524; HLA-C*01:02; AFP; ENSG00000081051; TAA
RHPQLAVSV

SEQ ID NO: 8525 - protein, 9 aa, Homo sapiens
  Table A; Target 8525; HLA-A*31:01; AFP; ENSG00000081051; TAA
RSCGLFQKL

SEQ ID NO: 8526 - protein, 9 aa, Homo sapiens
  Table A; Target 8526; HLA-B*57:01; AFP; ENSG00000081051; TAA
RSCGLFQKL

SEQ ID NO: 8527 - protein, 9 aa, Homo sapiens
  Table A; Target 8527; HLA-C*06:02; AFP; ENSG00000081051; TAA
RSCGLFQKL

SEQ ID NO: 8528 - protein, 8 aa, Homo sapiens
  Table A; Target 8528; HLA-B*40:02; AFP; ENSG00000081051; TAA
RTFQAITV

SEQ ID NO: 8529 - protein, 8 aa, Homo sapiens
  Table A; Target 8529; HLA-B*58:01; AFP; ENSG00000081051; TAA
RTFQAITV

SEQ ID NO: 8530 - protein, 9 aa, Homo sapiens
  Table A; Target 8530; HLA-B*57:01; AFP; ENSG00000081051; TAA
RTFQAITVT

SEQ ID NO: 8531 - protein, 10 aa, Homo sapiens
  Table A; Target 8531; HLA-A*68:01; AFP; ENSG00000081051; TAA
RTFQAITVTK

SEQ ID NO: 8532 - protein, 10 aa, Homo sapiens
  Table A; Target 8532; HLA-A*68:02; AFP; ENSG00000081051; TAA
RTFQAITVTK

SEQ ID NO: 8533 - protein, 10 aa, Homo sapiens
  Table A; Target 8533; HLA-B*58:01; AFP; ENSG00000081051; TAA
RTFQAITVTK

SEQ ID NO: 8534 - protein, 10 aa, Homo sapiens
  Table A; Target 8534; HLA-C*07:06; AFP; ENSG00000081051; TAA
RTFQAITVTK

SEQ ID NO: 8535 - protein, 11 aa, Homo sapiens
  Table A; Target 8535; HLA-A*02:04; AFP; ENSG00000081051; TAA
RTFQAITVTKL

SEQ ID NO: 8536 - protein, 11 aa, Homo sapiens
  Table A; Target 8536; HLA-A*31:01; AFP; ENSG00000081051; TAA
RTFQAITVTKL

SEQ ID NO: 8537 - protein, 11 aa, Homo sapiens
  Table A; Target 8537; HLA-A*68:02; AFP; ENSG00000081051; TAA
RTFQAITVTKL

SEQ ID NO: 8538 - protein, 8 aa, Homo sapiens
  Table A; Target 8538; HLA-A*32:01; AFP; ENSG00000081051; TAA
RTLHRNEY

SEQ ID NO: 8539 - protein, 8 aa, Homo sapiens
  Table A; Target 8539; HLA-C*16:01; AFP; ENSG00000081051; TAA
RTLHRNEY

SEQ ID NO: 8540 - protein, 9 aa, Homo sapiens
  Table A; Target 8540; HLA-B*58:01; AFP; ENSG00000081051; TAA
RVAKGYQEL

SEQ ID NO: 8541 - protein, 9 aa, Homo sapiens
  Table A; Target 8541; HLA-A*24:02; AFP; ENSG00000081051; TAA
RYDKIIPSC

SEQ ID NO: 8542 - protein, 8 aa, Homo sapiens
  Table A; Target 8542; HLA-B*49:01; AFP; ENSG00000081051; TAA
SEDKLLAC

SEQ ID NO: 8543 - protein, 9 aa, Homo sapiens
  Table A; Target 8543; HLA-B*40:02; AFP; ENSG00000081051; TAA
SEDKLLACG

SEQ ID NO: 8544 - protein, 9 aa, Homo sapiens
  Table A; Target 8544; HLA-B*49:01; AFP; ENSG00000081051; TAA
SEDKLLACG

SEQ ID NO: 8545 - protein, 9 aa, Homo sapiens
  Table A; Target 8545; HLA-B*44:02; AFP; ENSG00000081051; TAA
SEEGRHNCF

SEQ ID NO: 8546 - protein, 9 aa, Homo sapiens
  Table A; Target 8546; HLA-B*44:03; AFP; ENSG00000081051; TAA
SEEGRHNCF

SEQ ID NO: 8547 - protein, 8 aa, Homo sapiens
  Table A; Target 8547; HLA-B*27:02; AFP; ENSG00000081051; TAA
SELMAITR

SEQ ID NO: 8548 - protein, 8 aa, Homo sapiens
  Table A; Target 8548; HLA-B*27:05; AFP; ENSG00000081051; TAA
SELMAITR

SEQ ID NO: 8549 - protein, 8 aa, Homo sapiens
  Table A; Target 8549; HLA-B*40:02; AFP; ENSG00000081051; TAA
SELMAITR

SEQ ID NO: 8550 - protein, 8 aa, Homo sapiens
  Table A; Target 8550; HLA-C*07:04; AFP; ENSG00000081051; TAA
SELMAITR

SEQ ID NO: 8551 - protein, 9 aa, Homo sapiens
  Table A; Target 8551; HLA-A*11:01; AFP; ENSG00000081051; TAA
SELMAITRK

SEQ ID NO: 8552 - protein, 9 aa, Homo sapiens
  Table A; Target 8552; HLA-B*27:05; AFP; ENSG00000081051; TAA
SELMAITRK

SEQ ID NO: 8553 - protein, 9 aa, Homo sapiens
  Table A; Target 8553; HLA-B*37:01; AFP; ENSG00000081051; TAA
SELMAITRK

SEQ ID NO: 8554 - protein, 9 aa, Homo sapiens
  Table A; Target 8554; HLA-B*40:01; AFP; ENSG00000081051; TAA
SELMAITRK

SEQ ID NO: 8555 - protein, 9 aa, Homo sapiens
  Table A; Target 8555; HLA-B*40:02; AFP; ENSG00000081051; TAA
SELMAITRK

SEQ ID NO: 8556 - protein, 9 aa, Homo sapiens
  Table A; Target 8556; HLA-B*44:02; AFP; ENSG00000081051; TAA
SELMAITRK

SEQ ID NO: 8557 - protein, 9 aa, Homo sapiens
  Table A; Target 8557; HLA-B*44:03; AFP; ENSG00000081051; TAA
SELMAITRK

SEQ ID NO: 8558 - protein, 9 aa, Homo sapiens
  Table A; Target 8558; HLA-B*49:01; AFP; ENSG00000081051; TAA
SELMAITRK

SEQ ID NO: 8559 - protein, 9 aa, Homo sapiens
  Table A; Target 8559; HLA-C*04:01; AFP; ENSG00000081051; TAA
SELMAITRK

SEQ ID NO: 8560 - protein, 10 aa, Homo sapiens
  Table A; Target 8560; HLA-A*30:01; AFP; ENSG00000081051; TAA
SELMAITRKM

SEQ ID NO: 8561 - protein, 9 aa, Homo sapiens
  Table A; Target 8561; HLA-B*13:02; AFP; ENSG00000081051; TAA
SKTRAALGV

SEQ ID NO: 8562 - protein, 8 aa, Homo sapiens
  Table A; Target 8562; HLA-A*02:03; AFP; ENSG00000081051; TAA
SLADLATI

SEQ ID NO: 8563 - protein, 9 aa, Homo sapiens
  Table A; Target 8563; HLA-A*02:03; AFP; ENSG00000081051; TAA
SLADLATIF

SEQ ID NO: 8564 - protein, 9 aa, Homo sapiens
  Table A; Target 8564; HLA-A*02:04; AFP; ENSG00000081051; TAA
SLADLATIF

SEQ ID NO: 8565 - protein, 9 aa, Homo sapiens
  Table A; Target 8565; HLA-A*30:01; AFP; ENSG00000081051; TAA
SLADLATIF

SEQ ID NO: 8566 - protein, 9 aa, Homo sapiens
  Table A; Target 8566; HLA-A*30:02; AFP; ENSG00000081051; TAA
SLADLATIF

SEQ ID NO: 8567 - protein, 9 aa, Homo sapiens
  Table A; Target 8567; HLA-B*18:01; AFP; ENSG00000081051; TAA
SLADLATIF

SEQ ID NO: 8568 - protein, 9 aa, Homo sapiens
  Table A; Target 8568; HLA-B*27:02; AFP; ENSG00000081051; TAA
SLADLATIF

SEQ ID NO: 8569 - protein, 9 aa, Homo sapiens
  Table A; Target 8569; HLA-B*35:03; AFP; ENSG00000081051; TAA
SLADLATIF

SEQ ID NO: 8570 - protein, 9 aa, Homo sapiens
  Table A; Target 8570; HLA-B*37:01; AFP; ENSG00000081051; TAA
SLADLATIF

SEQ ID NO: 8571 - protein, 9 aa, Homo sapiens
  Table A; Target 8571; HLA-B*38:01; AFP; ENSG00000081051; TAA
SLADLATIF

SEQ ID NO: 8572 - protein, 9 aa, Homo sapiens
  Table A; Target 8572; HLA-B*58:01; AFP; ENSG00000081051; TAA
SLADLATIF

SEQ ID NO: 8573 - protein, 9 aa, Homo sapiens
  Table A; Target 8573; HLA-C*14:02; AFP; ENSG00000081051; TAA
SLADLATIF

SEQ ID NO: 8574 - protein, 9 aa, Homo sapiens
  Table A; Target 8574; HLA-C*16:01; AFP; ENSG00000081051; TAA
SLADLATIF

SEQ ID NO: 8575 - protein, 9 aa, Homo sapiens
  Table A; Target 8575; HLA-C*16:04; AFP; ENSG00000081051; TAA
SLADLATIF

SEQ ID NO: 8576 - protein, 10 aa, Homo sapiens
  Table A; Target 8576; HLA-A*02:03; AFP; ENSG00000081051; TAA
SLADLATIFF

SEQ ID NO: 8577 - protein, 10 aa, Homo sapiens
  Table A; Target 8577; HLA-A*02:07; AFP; ENSG00000081051; TAA
SLADLATIFF

SEQ ID NO: 8578 - protein, 10 aa, Homo sapiens
  Table A; Target 8578; HLA-A*25:01; AFP; ENSG00000081051; TAA
SLADLATIFF

SEQ ID NO: 8579 - protein, 10 aa, Homo sapiens
  Table A; Target 8579; HLA-A*26:01; AFP; ENSG00000081051; TAA
SLADLATIFF

SEQ ID NO: 8580 - protein, 10 aa, Homo sapiens
  Table A; Target 8580; HLA-A*29:02; AFP; ENSG00000081051; TAA
SLADLATIFF

SEQ ID NO: 8581 - protein, 10 aa, Homo sapiens
  Table A; Target 8581; HLA-A*68:02; AFP; ENSG00000081051; TAA
SLADLATIFF

SEQ ID NO: 8582 - protein, 11 aa, Homo sapiens
  Table A; Target 8582; HLA-A*02:03; AFP; ENSG00000081051; TAA
SLADLATIFFA

SEQ ID NO: 8583 - protein, 11 aa, Homo sapiens
  Table A; Target 8583; HLA-B*13:02; AFP; ENSG00000081051; TAA
SLADLATIFFA

SEQ ID NO: 8584 - protein, 9 aa, Homo sapiens
  Table A; Target 8584; HLA-A*02:01; AFP; ENSG00000081051; TAA
SLLNQHACA

SEQ ID NO: 8585 - protein, 10 aa, Homo sapiens
  Table A; Target 8585; HLA-B*55:01; AFP; ENSG00000081051; TAA
SLLNQHACAV

SEQ ID NO: 8586 - protein, 10 aa, Homo sapiens
  Table A; Target 8586; HLA-C*06:02; AFP; ENSG00000081051; TAA
SLLNQHACAV

SEQ ID NO: 8587 - protein, 8 aa, Homo sapiens
  Table A; Target 8587; HLA-B*39:01; AFP; ENSG00000081051; TAA
SLVVDETY

SEQ ID NO: 8588 - protein, 9 aa, Homo sapiens
  Table A; Target 8588; HLA-A*02:03; AFP; ENSG00000081051; TAA
SLVVDETYV

SEQ ID NO: 8589 - protein, 9 aa, Homo sapiens
  Table A; Target 8589; HLA-A*02:04; AFP; ENSG00000081051; TAA
SLVVDETYV

SEQ ID NO: 8590 - protein, 9 aa, Homo sapiens
  Table A; Target 8590; HLA-B*13:02; AFP; ENSG00000081051; TAA
SLVVDETYV

SEQ ID NO: 8591 - protein, 9 aa, Homo sapiens
  Table A; Target 8591; HLA-B*55:01; AFP; ENSG00000081051; TAA
SLVVDETYV

SEQ ID NO: 8592 - protein, 8 aa, Homo sapiens
  Table A; Target 8592; HLA-C*07:02; AFP; ENSG00000081051; TAA
SPNLNRFL

SEQ ID NO: 8593 - protein, 9 aa, Homo sapiens
  Table A; Target 8593; HLA-A*31:01; AFP; ENSG00000081051; TAA
SQKFTKVNF

SEQ ID NO: 8594 - protein, 9 aa, Homo sapiens
  Table A; Target 8594; HLA-B*08:01; AFP; ENSG00000081051; TAA
SQKFTKVNF

SEQ ID NO: 8595 - protein, 9 aa, Homo sapiens
  Table A; Target 8595; HLA-A*03:01; AFP; ENSG00000081051; TAA
SQQDTLSNK

SEQ ID NO: 8596 - protein, 10 aa, Homo sapiens
  Table A; Target 8596; HLA-B*39:01; AFP; ENSG00000081051; TAA
SQQDTLSNKI

SEQ ID NO: 8597 - protein, 11 aa, Homo sapiens
  Table A; Target 8597; HLA-B*15:01; AFP; ENSG00000081051; TAA
SQSEEGRHNCF

SEQ ID NO: 8598 - protein, 9 aa, Homo sapiens
  Table A; Target 8598; HLA-C*16:01; AFP; ENSG00000081051; TAA
SRTLHRNEY

SEQ ID NO: 8599 - protein, 9 aa, Homo sapiens
  Table A; Target 8599; HLA-A*01:01; AFP; ENSG00000081051; TAA
SSELMAITR

SEQ ID NO: 8600 - protein, 9 aa, Homo sapiens
  Table A; Target 8600; HLA-A*03:02; AFP; ENSG00000081051; TAA
SSELMAITR

SEQ ID NO: 8601 - protein, 9 aa, Homo sapiens
  Table A; Target 8601; HLA-A*31:01; AFP; ENSG00000081051; TAA
SSELMAITR

SEQ ID NO: 8602 - protein, 9 aa, Homo sapiens
  Table A; Target 8602; HLA-A*33:03; AFP; ENSG00000081051; TAA
SSELMAITR

SEQ ID NO: 8603 - protein, 9 aa, Homo sapiens
  Table A; Target 8603; HLA-B*27:02; AFP; ENSG00000081051; TAA
SSELMAITR

SEQ ID NO: 8604 - protein, 9 aa, Homo sapiens
  Table A; Target 8604; HLA-B*57:01; AFP; ENSG00000081051; TAA
SSELMAITR

SEQ ID NO: 8605 - protein, 8 aa, Homo sapiens
  Table A; Target 8605; HLA-C*12:03; AFP; ENSG00000081051; TAA
SSGEKNIF

SEQ ID NO: 8606 - protein, 9 aa, Homo sapiens
  Table A; Target 8606; HLA-A*29:02; AFP; ENSG00000081051; TAA
SSLVVDETY

SEQ ID NO: 8607 - protein, 9 aa, Homo sapiens
  Table A; Target 8607; HLA-A*32:01; AFP; ENSG00000081051; TAA
SSLVVDETY

SEQ ID NO: 8608 - protein, 9 aa, Homo sapiens
  Table A; Target 8608; HLA-B*18:01; AFP; ENSG00000081051; TAA
SSLVVDETY

SEQ ID NO: 8609 - protein, 9 aa, Homo sapiens
  Table A; Target 8609; HLA-B*55:01; AFP; ENSG00000081051; TAA
SSLVVDETY

SEQ ID NO: 8610 - protein, 9 aa, Homo sapiens
  Table A; Target 8610; HLA-C*02:02; AFP; ENSG00000081051; TAA
SSLVVDETY

SEQ ID NO: 8611 - protein, 9 aa, Homo sapiens
  Table A; Target 8611; HLA-C*03:03; AFP; ENSG00000081051; TAA
SSLVVDETY

SEQ ID NO: 8612 - protein, 9 aa, Homo sapiens
  Table A; Target 8612; HLA-C*04:01; AFP; ENSG00000081051; TAA
SSLVVDETY

SEQ ID NO: 8613 - protein, 9 aa, Homo sapiens
  Table A; Target 8613; HLA-C*07:06; AFP; ENSG00000081051; TAA
SSLVVDETY

SEQ ID NO: 8614 - protein, 9 aa, Homo sapiens
  Table A; Target 8614; HLA-C*16:01; AFP; ENSG00000081051; TAA
SSLVVDETY

SEQ ID NO: 8615 - protein, 9 aa, Homo sapiens
  Table A; Target 8615; HLA-C*16:02; AFP; ENSG00000081051; TAA
SSLVVDETY

SEQ ID NO: 8616 - protein, 8 aa, Homo sapiens
  Table A; Target 8616; HLA-B*08:01; AFP; ENSG00000081051; TAA
SVILRVAK

SEQ ID NO: 8617 - protein, 10 aa, Homo sapiens
  Table A; Target 8617; HLA-A*25:01; AFP; ENSG00000081051; TAA
SVILRVAKGY

SEQ ID NO: 8618 - protein, 10 aa, Homo sapiens
  Table A; Target 8618; HLA-A*26:01; AFP; ENSG00000081051; TAA
SVILRVAKGY

SEQ ID NO: 8619 - protein, 9 aa, Homo sapiens
  Table A; Target 8619; HLA-C*16:01; AFP; ENSG00000081051; TAA
SYANRRPCF

SEQ ID NO: 8620 - protein, 10 aa, Homo sapiens
  Table A; Target 8620; HLA-C*01:02; AFP; ENSG00000081051; TAA
SYICSQQDTL

SEQ ID NO: 8621 - protein, 8 aa, Homo sapiens
  Table A; Target 8621; HLA-C*06:02; AFP; ENSG00000081051; TAA
SYQCTAEI

SEQ ID NO: 8622 - protein, 10 aa, Homo sapiens
  Table A; Target 8622; HLA-C*01:02; AFP; ENSG00000081051; TAA
SYQCTAEISL

SEQ ID NO: 8623 - protein, 8 aa, Homo sapiens
  Table A; Target 8623; HLA-B*08:01; AFP; ENSG00000081051; TAA
TAATCCQL

SEQ ID NO: 8624 - protein, 9 aa, Homo sapiens
  Table A; Target 8624; HLA-B*35:03; AFP; ENSG00000081051; TAA
TAEISLADL

SEQ ID NO: 8625 - protein, 9 aa, Homo sapiens
  Table A; Target 8625; HLA-B*39:01; AFP; ENSG00000081051; TAA
TAEISLADL

SEQ ID NO: 8626 - protein, 9 aa, Homo sapiens
  Table A; Target 8626; HLA-C*03:03; AFP; ENSG00000081051; TAA
TAEISLADL

SEQ ID NO: 8627 - protein, 9 aa, Homo sapiens
  Table A; Target 8627; HLA-A*30:01; AFP; ENSG00000081051; TAA
TECCKLTTL

SEQ ID NO: 8628 - protein, 9 aa, Homo sapiens
  Table A; Target 8628; HLA-A*30:01; AFP; ENSG00000081051; TAA
TEEQLEAVI

SEQ ID NO: 8629 - protein, 9 aa, Homo sapiens
  Table A; Target 8629; HLA-B*18:01; AFP; ENSG00000081051; TAA
TEEQLEAVI

SEQ ID NO: 8630 - protein, 9 aa, Homo sapiens
  Table A; Target 8630; HLA-B*38:01; AFP; ENSG00000081051; TAA
TEEQLEAVI

SEQ ID NO: 8631 - protein, 9 aa, Homo sapiens
  Table A; Target 8631; HLA-B*44:02; AFP; ENSG00000081051; TAA
TEEQLEAVI

SEQ ID NO: 8632 - protein, 9 aa, Homo sapiens
  Table A; Target 8632; HLA-B*44:03; AFP; ENSG00000081051; TAA
TEEQLEAVI

SEQ ID NO: 8633 - protein, 8 aa, Homo sapiens
  Table A; Target 8633; HLA-B*44:02; AFP; ENSG00000081051; TAA
TEIQKLVL

SEQ ID NO: 8634 - protein, 8 aa, Homo sapiens
  Table A; Target 8634; HLA-B*44:03; AFP; ENSG00000081051; TAA
TEIQKLVL

SEQ ID NO: 8635 - protein, 10 aa, Homo sapiens
  Table A; Target 8635; HLA-B*40:02; AFP; ENSG00000081051; TAA
TEIQKLVLDV

SEQ ID NO: 8636 - protein, 10 aa, Homo sapiens
  Table A; Target 8636; HLA-B*27:05; AFP; ENSG00000081051; TAA
TENPLECQDK

SEQ ID NO: 8637 - protein, 9 aa, Homo sapiens
  Table A; Target 8637; HLA-A*24:02; AFP; ENSG00000081051; TAA
TFQAITVTK

SEQ ID NO: 8638 - protein, 9 aa, Homo sapiens
  Table A; Target 8638; HLA-A*31:01; AFP; ENSG00000081051; TAA
TFQAITVTK

SEQ ID NO: 8639 - protein, 9 aa, Homo sapiens
  Table A; Target 8639; HLA-B*27:02; AFP; ENSG00000081051; TAA
TFQAITVTK

SEQ ID NO: 8640 - protein, 9 aa, Homo sapiens
  Table A; Target 8640; HLA-B*35:01; AFP; ENSG00000081051; TAA
TFQAITVTK

SEQ ID NO: 8641 - protein, 9 aa, Homo sapiens
  Table A; Target 8641; HLA-B*35:03; AFP; ENSG00000081051; TAA
TFQAITVTK

SEQ ID NO: 8642 - protein, 9 aa, Homo sapiens
  Table A; Target 8642; HLA-C*01:02; AFP; ENSG00000081051; TAA
TFQAITVTK

SEQ ID NO: 8643 - protein, 9 aa, Homo sapiens
  Table A; Target 8643; HLA-C*04:01; AFP; ENSG00000081051; TAA
TFQAITVTK

SEQ ID NO: 8644 - protein, 9 aa, Homo sapiens
  Table A; Target 8644; HLA-C*07:06; AFP; ENSG00000081051; TAA
TFQAITVTK

SEQ ID NO: 8645 - protein, 10 aa, Homo sapiens
  Table A; Target 8645; HLA-A*24:02; AFP; ENSG00000081051; TAA
TFQAITVTKL

SEQ ID NO: 8646 - protein, 8 aa, Homo sapiens
  Table A; Target 8646; HLA-C*05:01; AFP; ENSG00000081051; TAA
TGDEQSSG

SEQ ID NO: 8647 - protein, 8 aa, Homo sapiens
  Table A; Target 8647; HLA-A*68:02; AFP; ENSG00000081051; TAA
TIFFAQFV

SEQ ID NO: 8648 - protein, 11 aa, Homo sapiens
  Table A; Target 8648; HLA-A*68:02; AFP; ENSG00000081051; TAA
TIFFAQFVQEA

SEQ ID NO: 8649 - protein, 10 aa, Homo sapiens
  Table A; Target 8649; HLA-B*07:02; AFP; ENSG00000081051; TAA
TKAATVTKEL

SEQ ID NO: 8650 - protein, 10 aa, Homo sapiens
  Table A; Target 8650; HLA-B*38:01; AFP; ENSG00000081051; TAA
TKAATVTKEL

SEQ ID NO: 8651 - protein, 10 aa, Homo sapiens
  Table A; Target 8651; HLA-B*27:02; AFP; ENSG00000081051; TAA
TKVNFTEIQK

SEQ ID NO: 8652 - protein, 11 aa, Homo sapiens
  Table A; Target 8652; HLA-B*38:01; AFP; ENSG00000081051; TAA
TKVNFTEIQKL

SEQ ID NO: 8653 - protein, 10 aa, Homo sapiens
  Table A; Target 8653; HLA-A*02:04; AFP; ENSG00000081051; TAA
TMKQEFLINL

SEQ ID NO: 8654 - protein, 10 aa, Homo sapiens
  Table A; Target 8654; HLA-A*31:01; AFP; ENSG00000081051; TAA
TMKQEFLINL

SEQ ID NO: 8655 - protein, 8 aa, Homo sapiens
  Table A; Target 8655; HLA-B*35:01; AFP; ENSG00000081051; TAA
TPASIPLF

SEQ ID NO: 8656 - protein, 10 aa, Homo sapiens
  Table A; Target 8656; HLA-A*68:02; AFP; ENSG00000081051; TAA
TPASIPLFQV

SEQ ID NO: 8657 - protein, 10 aa, Homo sapiens
  Table A; Target 8657; HLA-B*54:01; AFP; ENSG00000081051; TAA
TPASIPLFQV

SEQ ID NO: 8658 - protein, 9 aa, Homo sapiens
  Table A; Target 8658; HLA-B*35:03; AFP; ENSG00000081051; TAA
TPVNPGVGQ

SEQ ID NO: 8659 - protein, 9 aa, Homo sapiens
  Table A; Target 8659; HLA-B*54:01; AFP; ENSG00000081051; TAA
TPVNPGVGQ

SEQ ID NO: 8660 - protein, 9 aa, Homo sapiens
  Table A; Target 8660; HLA-B*55:01; AFP; ENSG00000081051; TAA
TPVNPGVGQ

SEQ ID NO: 8661 - protein, 9 aa, Homo sapiens
  Table A; Target 8661; HLA-C*04:01; AFP; ENSG00000081051; TAA
TPVNPGVGQ

SEQ ID NO: 8662 - protein, 9 aa, Homo sapiens
  Table A; Target 8662; HLA-C*07:06; AFP; ENSG00000081051; TAA
TPVNPGVGQ

SEQ ID NO: 8663 - protein, 11 aa, Homo sapiens
  Table A; Target 8663; HLA-B*56:01; AFP; ENSG00000081051; TAA
TPVNPGVGQCC

SEQ ID NO: 8664 - protein, 9 aa, Homo sapiens
  Table A; Target 8664; HLA-C*06:02; AFP; ENSG00000081051; TAA
TRKMAATAA

SEQ ID NO: 8665 - protein, 9 aa, Homo sapiens
  Table A; Target 8665; HLA-A*68:02; AFP; ENSG00000081051; TAA
TRTFQAITV

SEQ ID NO: 8666 - protein, 9 aa, Homo sapiens
  Table A; Target 8666; HLA-B*13:02; AFP; ENSG00000081051; TAA
TRTFQAITV

SEQ ID NO: 8667 - protein, 9 aa, Homo sapiens
  Table A; Target 8667; HLA-C*02:02; AFP; ENSG00000081051; TAA
TRTFQAITV

SEQ ID NO: 8668 - protein, 9 aa, Homo sapiens
  Table A; Target 8668; HLA-C*07:04; AFP; ENSG00000081051; TAA
TRTFQAITV

SEQ ID NO: 8669 - protein, 9 aa, Homo sapiens
  Table A; Target 8669; HLA-C*16:04; AFP; ENSG00000081051; TAA
TRTFQAITV

SEQ ID NO: 8670 - protein, 11 aa, Homo sapiens
  Table A; Target 8670; HLA-B*27:02; AFP; ENSG00000081051; TAA
TRTFQAITVTK

SEQ ID NO: 8671 - protein, 10 aa, Homo sapiens
  Table A; Target 8671; HLA-A*03:02; AFP; ENSG00000081051; TAA
TSSELMAITR

SEQ ID NO: 8672 - protein, 10 aa, Homo sapiens
  Table A; Target 8672; HLA-B*07:02; AFP; ENSG00000081051; TAA
TSSELMAITR

SEQ ID NO: 8673 - protein, 10 aa, Homo sapiens
  Table A; Target 8673; HLA-B*27:05; AFP; ENSG00000081051; TAA
TSSELMAITR

SEQ ID NO: 8674 - protein, 10 aa, Homo sapiens
  Table A; Target 8674; HLA-C*06:02; AFP; ENSG00000081051; TAA
TSSELMAITR

SEQ ID NO: 8675 - protein, 10 aa, Homo sapiens
  Table A; Target 8675; HLA-C*16:02; AFP; ENSG00000081051; TAA
TSSELMAITR

SEQ ID NO: 8676 - protein, 11 aa, Homo sapiens
  Table A; Target 8676; HLA-A*03:02; AFP; ENSG00000081051; TAA
TSSELMAITRK

SEQ ID NO: 8677 - protein, 11 aa, Homo sapiens
  Table A; Target 8677; HLA-A*68:01; AFP; ENSG00000081051; TAA
TSSELMAITRK

SEQ ID NO: 8678 - protein, 9 aa, Homo sapiens
  Table A; Target 8678; HLA-C*06:02; AFP; ENSG00000081051; TAA
TSSYANRRP

SEQ ID NO: 8679 - protein, 9 aa, Homo sapiens
  Table A; Target 8679; HLA-B*08:01; AFP; ENSG00000081051; TAA
TTLERGQCI

SEQ ID NO: 8680 - protein, 10 aa, Homo sapiens
  Table A; Target 8680; HLA-C*07:01; AFP; ENSG00000081051; TAA
TTLERGQCII

SEQ ID NO: 8681 - protein, 11 aa, Homo sapiens
  Table A; Target 8681; HLA-B*07:02; AFP; ENSG00000081051; TAA
TVTKELRESSL

SEQ ID NO: 8682 - protein, 8 aa, Homo sapiens
  Table A; Target 8682; HLA-A*03:01; AFP; ENSG00000081051; TAA
TVTKLSQK

SEQ ID NO: 8683 - protein, 8 aa, Homo sapiens
  Table A; Target 8683; HLA-A*11:01; AFP; ENSG00000081051; TAA
TVTKLSQK

SEQ ID NO: 8684 - protein, 9 aa, Homo sapiens
  Table A; Target 8684; HLA-A*23:01; AFP; ENSG00000081051; TAA
TVTKLSQKF

SEQ ID NO: 8685 - protein, 9 aa, Homo sapiens
  Table A; Target 8685; HLA-A*24:02; AFP; ENSG00000081051; TAA
TVTKLSQKF

SEQ ID NO: 8686 - protein, 9 aa, Homo sapiens
  Table A; Target 8686; HLA-A*29:02; AFP; ENSG00000081051; TAA
TVTKLSQKF

SEQ ID NO: 8687 - protein, 9 aa, Homo sapiens
  Table A; Target 8687; HLA-B*27:02; AFP; ENSG00000081051; TAA
TVTKLSQKF

SEQ ID NO: 8688 - protein, 9 aa, Homo sapiens
  Table A; Target 8688; HLA-B*57:01; AFP; ENSG00000081051; TAA
TVTKLSQKF

SEQ ID NO: 8689 - protein, 9 aa, Homo sapiens
  Table A; Target 8689; HLA-C*07:01; AFP; ENSG00000081051; TAA
TVTKLSQKF

SEQ ID NO: 8690 - protein, 9 aa, Homo sapiens
  Table A; Target 8690; HLA-C*07:04; AFP; ENSG00000081051; TAA
TVTKLSQKF

SEQ ID NO: 8691 - protein, 9 aa, Homo sapiens
  Table A; Target 8691; HLA-C*07:06; AFP; ENSG00000081051; TAA
TVTKLSQKF

SEQ ID NO: 8692 - protein, 8 aa, Homo sapiens
  Table A; Target 8692; HLA-A*23:01; AFP; ENSG00000081051; TAA
TYKEVSKM

SEQ ID NO: 8693 - protein, 8 aa, Homo sapiens
  Table A; Target 8693; HLA-A*24:02; AFP; ENSG00000081051; TAA
TYKEVSKM

SEQ ID NO: 8694 - protein, 8 aa, Homo sapiens
  Table A; Target 8694; HLA-B*40:02; AFP; ENSG00000081051; TAA
TYKEVSKM

SEQ ID NO: 8695 - protein, 8 aa, Homo sapiens
  Table A; Target 8695; HLA-B*46:01; AFP; ENSG00000081051; TAA
TYKEVSKM

SEQ ID NO: 8696 - protein, 8 aa, Homo sapiens
  Table A; Target 8696; HLA-C*01:02; AFP; ENSG00000081051; TAA
TYKEVSKM

SEQ ID NO: 8697 - protein, 8 aa, Homo sapiens
  Table A; Target 8697; HLA-C*04:01; AFP; ENSG00000081051; TAA
TYKEVSKM

SEQ ID NO: 8698 - protein, 8 aa, Homo sapiens
  Table A; Target 8698; HLA-C*06:02; AFP; ENSG00000081051; TAA
TYKEVSKM

SEQ ID NO: 8699 - protein, 8 aa, Homo sapiens
  Table A; Target 8699; HLA-C*07:01; AFP; ENSG00000081051; TAA
TYKEVSKM

SEQ ID NO: 8700 - protein, 8 aa, Homo sapiens
  Table A; Target 8700; HLA-C*07:02; AFP; ENSG00000081051; TAA
TYKEVSKM

SEQ ID NO: 8701 - protein, 8 aa, Homo sapiens
  Table A; Target 8701; HLA-C*12:03; AFP; ENSG00000081051; TAA
TYKEVSKM

SEQ ID NO: 8702 - protein, 8 aa, Homo sapiens
  Table A; Target 8702; HLA-C*16:02; AFP; ENSG00000081051; TAA
TYKEVSKM

SEQ ID NO: 8703 - protein, 9 aa, Homo sapiens
  Table A; Target 8703; HLA-A*31:01; AFP; ENSG00000081051; TAA
TYKEVSKMV

SEQ ID NO: 8704 - protein, 9 aa, Homo sapiens
  Table A; Target 8704; HLA-C*04:01; AFP; ENSG00000081051; TAA
TYKEVSKMV

SEQ ID NO: 8705 - protein, 9 aa, Homo sapiens
  Table A; Target 8705; HLA-C*07:02; AFP; ENSG00000081051; TAA
TYKEVSKMV

SEQ ID NO: 8706 - protein, 10 aa, Homo sapiens
  Table A; Target 8706; HLA-B*40:02; AFP; ENSG00000081051; TAA
TYKEVSKMVK

SEQ ID NO: 8707 - protein, 10 aa, Homo sapiens
  Table A; Target 8707; HLA-C*07:01; AFP; ENSG00000081051; TAA
TYKEVSKMVK

SEQ ID NO: 8708 - protein, 10 aa, Homo sapiens
  Table A; Target 8708; HLA-C*07:02; AFP; ENSG00000081051; TAA
TYKEVSKMVK

SEQ ID NO: 8709 - protein, 11 aa, Homo sapiens
  Table A; Target 8709; HLA-B*27:02; AFP; ENSG00000081051; TAA
TYVPPAFSDDK

SEQ ID NO: 8710 - protein, 8 aa, Homo sapiens
  Table A; Target 8710; HLA-B*07:02; AFP; ENSG00000081051; TAA
VAKGYQEL

SEQ ID NO: 8711 - protein, 8 aa, Homo sapiens
  Table A; Target 8711; HLA-C*03:03; AFP; ENSG00000081051; TAA
VAKGYQEL

SEQ ID NO: 8712 - protein, 8 aa, Homo sapiens
  Table A; Target 8712; HLA-C*07:02; AFP; ENSG00000081051; TAA
VAKGYQEL

SEQ ID NO: 8713 - protein, 8 aa, Homo sapiens
  Table A; Target 8713; HLA-C*12:03; AFP; ENSG00000081051; TAA
VAKGYQEL

SEQ ID NO: 8714 - protein, 8 aa, Homo sapiens
  Table A; Target 8714; HLA-C*16:02; AFP; ENSG00000081051; TAA
VAKGYQEL

SEQ ID NO: 8715 - protein, 9 aa, Homo sapiens
  Table A; Target 8715; HLA-A*24:02; AFP; ENSG00000081051; TAA
VAKGYQELL

SEQ ID NO: 8716 - protein, 9 aa, Homo sapiens
  Table A; Target 8716; HLA-A*31:01; AFP; ENSG00000081051; TAA
VAKGYQELL

SEQ ID NO: 8717 - protein, 9 aa, Homo sapiens
  Table A; Target 8717; HLA-A*32:01; AFP; ENSG00000081051; TAA
VAKGYQELL

SEQ ID NO: 8718 - protein, 9 aa, Homo sapiens
  Table A; Target 8718; HLA-B*08:01; AFP; ENSG00000081051; TAA
VAKGYQELL

SEQ ID NO: 8719 - protein, 9 aa, Homo sapiens
  Table A; Target 8719; HLA-B*40:02; AFP; ENSG00000081051; TAA
VAKGYQELL

SEQ ID NO: 8720 - protein, 9 aa, Homo sapiens
  Table A; Target 8720; HLA-B*57:01; AFP; ENSG00000081051; TAA
VAKGYQELL

SEQ ID NO: 8721 - protein, 9 aa, Homo sapiens
  Table A; Target 8721; HLA-B*58:01; AFP; ENSG00000081051; TAA
VAKGYQELL

SEQ ID NO: 8722 - protein, 9 aa, Homo sapiens
  Table A; Target 8722; HLA-C*01:02; AFP; ENSG00000081051; TAA
VAKGYQELL

SEQ ID NO: 8723 - protein, 9 aa, Homo sapiens
  Table A; Target 8723; HLA-C*03:04; AFP; ENSG00000081051; TAA
VAKGYQELL

SEQ ID NO: 8724 - protein, 9 aa, Homo sapiens
  Table A; Target 8724; HLA-C*06:02; AFP; ENSG00000081051; TAA
VAKGYQELL

SEQ ID NO: 8725 - protein, 9 aa, Homo sapiens
  Table A; Target 8725; HLA-C*07:01; AFP; ENSG00000081051; TAA
VAKGYQELL

SEQ ID NO: 8726 - protein, 9 aa, Homo sapiens
  Table A; Target 8726; HLA-C*07:02; AFP; ENSG00000081051; TAA
VAKGYQELL

SEQ ID NO: 8727 - protein, 9 aa, Homo sapiens
  Table A; Target 8727; HLA-C*16:01; AFP; ENSG00000081051; TAA
VAKGYQELL

SEQ ID NO: 8728 - protein, 9 aa, Homo sapiens
  Table A; Target 8728; HLA-C*16:04; AFP; ENSG00000081051; TAA
VAKGYQELL

SEQ ID NO: 8729 - protein, 8 aa, Homo sapiens
  Table A; Target 8729; HLA-C*06:02; AFP; ENSG00000081051; TAA
VALQTMKQ

SEQ ID NO: 8730 - protein, 10 aa, Homo sapiens
  Table A; Target 8730; HLA-A*23:01; AFP; ENSG00000081051; TAA
VALQTMKQEF

SEQ ID NO: 8731 - protein, 10 aa, Homo sapiens
  Table A; Target 8731; HLA-A*24:02; AFP; ENSG00000081051; TAA
VALQTMKQEF

SEQ ID NO: 8732 - protein, 10 aa, Homo sapiens
  Table A; Target 8732; HLA-B*57:01; AFP; ENSG00000081051; TAA
VALQTMKQEF

SEQ ID NO: 8733 - protein, 10 aa, Homo sapiens
  Table A; Target 8733; HLA-B*58:01; AFP; ENSG00000081051; TAA
VALQTMKQEF

SEQ ID NO: 8734 - protein, 10 aa, Homo sapiens
  Table A; Target 8734; HLA-C*04:01; AFP; ENSG00000081051; TAA
VALQTMKQEF

SEQ ID NO: 8735 - protein, 8 aa, Homo sapiens
  Table A; Target 8735; HLA-B*08:01; AFP; ENSG00000081051; TAA
VAYTKKAP

SEQ ID NO: 8736 - protein, 10 aa, Homo sapiens
  Table A; Target 8736; HLA-B*15:03; AFP; ENSG00000081051; TAA
VCFAEEGQKL

SEQ ID NO: 8737 - protein, 10 aa, Homo sapiens
  Table A; Target 8737; HLA-B*38:01; AFP; ENSG00000081051; TAA
VCFAEEGQKL

SEQ ID NO: 8738 - protein, 10 aa, Homo sapiens
  Table A; Target 8738; HLA-B*18:01; AFP; ENSG00000081051; TAA
VDETYVPPAF

SEQ ID NO: 8739 - protein, 10 aa, Homo sapiens
  Table A; Target 8739; HLA-C*07:01; AFP; ENSG00000081051; TAA
VECFQTKAAT

SEQ ID NO: 8740 - protein, 9 aa, Homo sapiens
  Table A; Target 8740; HLA-B*44:02; AFP; ENSG00000081051; TAA
VESIFLIFL

SEQ ID NO: 8741 - protein, 9 aa, Homo sapiens
  Table A; Target 8741; HLA-B*49:01; AFP; ENSG00000081051; TAA
VESIFLIFL

SEQ ID NO: 8742 - protein, 9 aa, Homo sapiens
  Table A; Target 8742; HLA-A*30:02; AFP; ENSG00000081051; TAA
VGQCCTSSY

SEQ ID NO: 8743 - protein, 9 aa, Homo sapiens
  Table A; Target 8743; HLA-C*04:01; AFP; ENSG00000081051; TAA
VGQCCTSSY

SEQ ID NO: 8744 - protein, 9 aa, Homo sapiens
  Table A; Target 8744; HLA-C*07:01; AFP; ENSG00000081051; TAA
VGQCCTSSY

SEQ ID NO: 8745 - protein, 8 aa, Homo sapiens
  Table A; Target 8745; HLA-C*03:04; AFP; ENSG00000081051; TAA
VIADFSGL

SEQ ID NO: 8746 - protein, 8 aa, Homo sapiens
  Table A; Target 8746; HLA-C*14:02; AFP; ENSG00000081051; TAA
VIADFSGL

SEQ ID NO: 8747 - protein, 9 aa, Homo sapiens
  Table A; Target 8747; HLA-A*01:01; AFP; ENSG00000081051; TAA
VIADFSGLL

SEQ ID NO: 8748 - protein, 9 aa, Homo sapiens
  Table A; Target 8748; HLA-A*02:01; AFP; ENSG00000081051; TAA
VIADFSGLL

SEQ ID NO: 8749 - protein, 9 aa, Homo sapiens
  Table A; Target 8749; HLA-A*02:04; AFP; ENSG00000081051; TAA
VIADFSGLL

SEQ ID NO: 8750 - protein, 9 aa, Homo sapiens
  Table A; Target 8750; HLA-A*02:07; AFP; ENSG00000081051; TAA
VIADFSGLL

SEQ ID NO: 8751 - protein, 9 aa, Homo sapiens
  Table A; Target 8751; HLA-A*03:02; AFP; ENSG00000081051; TAA
VIADFSGLL

SEQ ID NO: 8752 - protein, 9 aa, Homo sapiens
  Table A; Target 8752; HLA-A*25:01; AFP; ENSG00000081051; TAA
VIADFSGLL

SEQ ID NO: 8753 - protein, 9 aa, Homo sapiens
  Table A; Target 8753; HLA-A*32:01; AFP; ENSG00000081051; TAA
VIADFSGLL

SEQ ID NO: 8754 - protein, 9 aa, Homo sapiens
  Table A; Target 8754; HLA-B*07:02; AFP; ENSG00000081051; TAA
VIADFSGLL

SEQ ID NO: 8755 - protein, 9 aa, Homo sapiens
  Table A; Target 8755; HLA-B*15:01; AFP; ENSG00000081051; TAA
VIADFSGLL

SEQ ID NO: 8756 - protein, 9 aa, Homo sapiens
  Table A; Target 8756; HLA-B*39:01; AFP; ENSG00000081051; TAA
VIADFSGLL

SEQ ID NO: 8757 - protein, 9 aa, Homo sapiens
  Table A; Target 8757; HLA-B*40:01; AFP; ENSG00000081051; TAA
VIADFSGLL

SEQ ID NO: 8758 - protein, 9 aa, Homo sapiens
  Table A; Target 8758; HLA-B*40:02; AFP; ENSG00000081051; TAA
VIADFSGLL

SEQ ID NO: 8759 - protein, 9 aa, Homo sapiens
  Table A; Target 8759; HLA-B*46:01; AFP; ENSG00000081051; TAA
VIADFSGLL

SEQ ID NO: 8760 - protein, 9 aa, Homo sapiens
  Table A; Target 8760; HLA-B*58:01; AFP; ENSG00000081051; TAA
VIADFSGLL

SEQ ID NO: 8761 - protein, 9 aa, Homo sapiens
  Table A; Target 8761; HLA-C*01:02; AFP; ENSG00000081051; TAA
VIADFSGLL

SEQ ID NO: 8762 - protein, 9 aa, Homo sapiens
  Table A; Target 8762; HLA-C*02:02; AFP; ENSG00000081051; TAA
VIADFSGLL

SEQ ID NO: 8763 - protein, 9 aa, Homo sapiens
  Table A; Target 8763; HLA-C*05:01; AFP; ENSG00000081051; TAA
VIADFSGLL

SEQ ID NO: 8764 - protein, 9 aa, Homo sapiens
  Table A; Target 8764; HLA-C*06:02; AFP; ENSG00000081051; TAA
VIADFSGLL

SEQ ID NO: 8765 - protein, 9 aa, Homo sapiens
  Table A; Target 8765; HLA-C*07:01; AFP; ENSG00000081051; TAA
VIADFSGLL

SEQ ID NO: 8766 - protein, 9 aa, Homo sapiens
  Table A; Target 8766; HLA-C*07:02; AFP; ENSG00000081051; TAA
VIADFSGLL

SEQ ID NO: 8767 - protein, 9 aa, Homo sapiens
  Table A; Target 8767; HLA-C*12:03; AFP; ENSG00000081051; TAA
VIADFSGLL

SEQ ID NO: 8768 - protein, 9 aa, Homo sapiens
  Table A; Target 8768; HLA-C*14:02; AFP; ENSG00000081051; TAA
VIADFSGLL

SEQ ID NO: 8769 - protein, 9 aa, Homo sapiens
  Table A; Target 8769; HLA-C*16:02; AFP; ENSG00000081051; TAA
VIADFSGLL

SEQ ID NO: 8770 - protein, 9 aa, Homo sapiens
  Table A; Target 8770; HLA-C*16:04; AFP; ENSG00000081051; TAA
VIADFSGLL

SEQ ID NO: 8771 - protein, 11 aa, Homo sapiens
  Table A; Target 8771; HLA-A*01:01; AFP; ENSG00000081051; TAA
VIADFSGLLEK

SEQ ID NO: 8772 - protein, 11 aa, Homo sapiens
  Table A; Target 8772; HLA-A*02:01; AFP; ENSG00000081051; TAA
VIADFSGLLEK

SEQ ID NO: 8773 - protein, 11 aa, Homo sapiens
  Table A; Target 8773; HLA-A*02:03; AFP; ENSG00000081051; TAA
VIADFSGLLEK

SEQ ID NO: 8774 - protein, 11 aa, Homo sapiens
  Table A; Target 8774; HLA-A*33:03; AFP; ENSG00000081051; TAA
VIADFSGLLEK

SEQ ID NO: 8775 - protein, 11 aa, Homo sapiens
  Table A; Target 8775; HLA-A*68:01; AFP; ENSG00000081051; TAA
VIADFSGLLEK

SEQ ID NO: 8776 - protein, 11 aa, Homo sapiens
  Table A; Target 8776; HLA-B*57:01; AFP; ENSG00000081051; TAA
VIADFSGLLEK

SEQ ID NO: 8777 - protein, 11 aa, Homo sapiens
  Table A; Target 8777; HLA-C*01:02; AFP; ENSG00000081051; TAA
VIADFSGLLEK

SEQ ID NO: 8778 - protein, 11 aa, Homo sapiens
  Table A; Target 8778; HLA-C*07:06; AFP; ENSG00000081051; TAA
VIADFSGLLEK

SEQ ID NO: 8779 - protein, 9 aa, Homo sapiens
  Table A; Target 8779; HLA-A*03:01; AFP; ENSG00000081051; TAA
VILRVAKGY

SEQ ID NO: 8780 - protein, 9 aa, Homo sapiens
  Table A; Target 8780; HLA-A*30:02; AFP; ENSG00000081051; TAA
VILRVAKGY

SEQ ID NO: 8781 - protein, 9 aa, Homo sapiens
  Table A; Target 8781; HLA-B*57:01; AFP; ENSG00000081051; TAA
VILRVAKGY

SEQ ID NO: 8782 - protein, 10 aa, Homo sapiens
  Table A; Target 8782; HLA-B*27:02; AFP; ENSG00000081051; TAA
VKDALTAIEK

SEQ ID NO: 8783 - protein, 8 aa, Homo sapiens
  Table A; Target 8783; HLA-A*03:02; AFP; ENSG00000081051; TAA
VLDVAHVH

SEQ ID NO: 8784 - protein, 8 aa, Homo sapiens
  Table A; Target 8784; HLA-C*05:01; AFP; ENSG00000081051; TAA
VLDVAHVH

SEQ ID NO: 8785 - protein, 10 aa, Homo sapiens
  Table A; Target 8785; HLA-A*02:07; AFP; ENSG00000081051; TAA
VLDVAHVHEH

SEQ ID NO: 8786 - protein, 8 aa, Homo sapiens
  Table A; Target 8786; HLA-A*33:03; AFP; ENSG00000081051; TAA
VMKNFGTR

SEQ ID NO: 8787 - protein, 10 aa, Homo sapiens
  Table A; Target 8787; HLA-A*02:03; AFP; ENSG00000081051; TAA
VMKNFGTRTF

SEQ ID NO: 8788 - protein, 10 aa, Homo sapiens
  Table A; Target 8788; HLA-A*23:01; AFP; ENSG00000081051; TAA
VMKNFGTRTF

SEQ ID NO: 8789 - protein, 10 aa, Homo sapiens
  Table A; Target 8789; HLA-A*31:01; AFP; ENSG00000081051; TAA
VMKNFGTRTF

SEQ ID NO: 8790 - protein, 10 aa, Homo sapiens
  Table A; Target 8790; HLA-B*15:01; AFP; ENSG00000081051; TAA
VMKNFGTRTF

SEQ ID NO: 8791 - protein, 8 aa, Homo sapiens
  Table A; Target 8791; HLA-B*27:02; AFP; ENSG00000081051; TAA
VNFTEIQK

SEQ ID NO: 8792 - protein, 9 aa, Homo sapiens
  Table A; Target 8792; HLA-A*24:02; AFP; ENSG00000081051; TAA
VNFTEIQKL

SEQ ID NO: 8793 - protein, 9 aa, Homo sapiens
  Table A; Target 8793; HLA-A*30:01; AFP; ENSG00000081051; TAA
VNFTEIQKL

SEQ ID NO: 8794 - protein, 9 aa, Homo sapiens
  Table A; Target 8794; HLA-A*33:01; AFP; ENSG00000081051; TAA
VNFTEIQKL

SEQ ID NO: 8795 - protein, 9 aa, Homo sapiens
  Table A; Target 8795; HLA-A*33:03; AFP; ENSG00000081051; TAA
VNFTEIQKL

SEQ ID NO: 8796 - protein, 9 aa, Homo sapiens
  Table A; Target 8796; HLA-A*68:02; AFP; ENSG00000081051; TAA
VNFTEIQKL

SEQ ID NO: 8797 - protein, 9 aa, Homo sapiens
  Table A; Target 8797; HLA-B*27:05; AFP; ENSG00000081051; TAA
VNFTEIQKL

SEQ ID NO: 8798 - protein, 9 aa, Homo sapiens
  Table A; Target 8798; HLA-B*38:01; AFP; ENSG00000081051; TAA
VNFTEIQKL

SEQ ID NO: 8799 - protein, 9 aa, Homo sapiens
  Table A; Target 8799; HLA-B*40:02; AFP; ENSG00000081051; TAA
VNFTEIQKL

SEQ ID NO: 8800 - protein, 9 aa, Homo sapiens
  Table A; Target 8800; HLA-B*44:02; AFP; ENSG00000081051; TAA
VNFTEIQKL

SEQ ID NO: 8801 - protein, 9 aa, Homo sapiens
  Table A; Target 8801; HLA-B*44:03; AFP; ENSG00000081051; TAA
VNFTEIQKL

SEQ ID NO: 8802 - protein, 9 aa, Homo sapiens
  Table A; Target 8802; HLA-B*57:01; AFP; ENSG00000081051; TAA
VNFTEIQKL

SEQ ID NO: 8803 - protein, 9 aa, Homo sapiens
  Table A; Target 8803; HLA-C*02:02; AFP; ENSG00000081051; TAA
VNFTEIQKL

SEQ ID NO: 8804 - protein, 9 aa, Homo sapiens
  Table A; Target 8804; HLA-C*06:02; AFP; ENSG00000081051; TAA
VNFTEIQKL

SEQ ID NO: 8805 - protein, 9 aa, Homo sapiens
  Table A; Target 8805; HLA-C*16:02; AFP; ENSG00000081051; TAA
VNFTEIQKL

SEQ ID NO: 8806 - protein, 9 aa, Homo sapiens
  Table A; Target 8806; HLA-C*16:04; AFP; ENSG00000081051; TAA
VNFTEIQKL

SEQ ID NO: 8807 - protein, 8 aa, Homo sapiens
  Table A; Target 8807; HLA-B*55:01; AFP; ENSG00000081051; TAA
VPEPVTSC

SEQ ID NO: 8808 - protein, 10 aa, Homo sapiens
  Table A; Target 8808; HLA-B*54:01; AFP; ENSG00000081051; TAA
VPEPVTSCEA

SEQ ID NO: 8809 - protein, 10 aa, Homo sapiens
  Table A; Target 8809; HLA-B*55:01; AFP; ENSG00000081051; TAA
VPEPVTSCEA

SEQ ID NO: 8810 - protein, 11 aa, Homo sapiens
  Table A; Target 8810; HLA-A*30:02; AFP; ENSG00000081051; TAA
VPEPVTSCEAY

SEQ ID NO: 8811 - protein, 11 aa, Homo sapiens
  Table A; Target 8811; HLA-C*04:01; AFP; ENSG00000081051; TAA
VPEPVTSCEAY

SEQ ID NO: 8812 - protein, 9 aa, Homo sapiens
  Table A; Target 8812; HLA-A*02:03; AFP; ENSG00000081051; TAA
VQEATYKEV

SEQ ID NO: 8813 - protein, 9 aa, Homo sapiens
  Table A; Target 8813; HLA-A*02:07; AFP; ENSG00000081051; TAA
VQEATYKEV

SEQ ID NO: 8814 - protein, 9 aa, Homo sapiens
  Table A; Target 8814; HLA-A*30:01; AFP; ENSG00000081051; TAA
VQEATYKEV

SEQ ID NO: 8815 - protein, 9 aa, Homo sapiens
  Table A; Target 8815; HLA-B*27:05; AFP; ENSG00000081051; TAA
VQEATYKEV

SEQ ID NO: 8816 - protein, 9 aa, Homo sapiens
  Table A; Target 8816; HLA-B*38:01; AFP; ENSG00000081051; TAA
VQEATYKEV

SEQ ID NO: 8817 - protein, 9 aa, Homo sapiens
  Table A; Target 8817; HLA-B*39:01; AFP; ENSG00000081051; TAA
VQEATYKEV

SEQ ID NO: 8818 - protein, 9 aa, Homo sapiens
  Table A; Target 8818; HLA-B*49:01; AFP; ENSG00000081051; TAA
VQEATYKEV

SEQ ID NO: 8819 - protein, 9 aa, Homo sapiens
  Table A; Target 8819; HLA-B*55:01; AFP; ENSG00000081051; TAA
VQEATYKEV

SEQ ID NO: 8820 - protein, 9 aa, Homo sapiens
  Table A; Target 8820; HLA-C*03:04; AFP; ENSG00000081051; TAA
VQEATYKEV

SEQ ID NO: 8821 - protein, 9 aa, Homo sapiens
  Table A; Target 8821; HLA-C*04:01; AFP; ENSG00000081051; TAA
VQEATYKEV

SEQ ID NO: 8822 - protein, 9 aa, Homo sapiens
  Table A; Target 8822; HLA-C*07:01; AFP; ENSG00000081051; TAA
VQEATYKEV

SEQ ID NO: 8823 - protein, 9 aa, Homo sapiens
  Table A; Target 8823; HLA-C*12:03; AFP; ENSG00000081051; TAA
VQEATYKEV

SEQ ID NO: 8824 - protein, 9 aa, Homo sapiens
  Table A; Target 8824; HLA-C*16:04; AFP; ENSG00000081051; TAA
VQEATYKEV

SEQ ID NO: 8825 - protein, 11 aa, Homo sapiens
  Table A; Target 8825; HLA-A*11:01; AFP; ENSG00000081051; TAA
VQEATYKEVSK

SEQ ID NO: 8826 - protein, 9 aa, Homo sapiens
  Table A; Target 8826; HLA-B*08:01; AFP; ENSG00000081051; TAA
VSKMVKDAL

SEQ ID NO: 8827 - protein, 9 aa, Homo sapiens
  Table A; Target 8827; HLA-B*40:02; AFP; ENSG00000081051; TAA
VSKMVKDAL

SEQ ID NO: 8828 - protein, 9 aa, Homo sapiens
  Table A; Target 8828; HLA-C*06:02; AFP; ENSG00000081051; TAA
VSKMVKDAL

SEQ ID NO: 8829 - protein, 9 aa, Homo sapiens
  Table A; Target 8829; HLA-C*07:02; AFP; ENSG00000081051; TAA
VSKMVKDAL

SEQ ID NO: 8830 - protein, 9 aa, Homo sapiens
  Table A; Target 8830; HLA-C*16:01; AFP; ENSG00000081051; TAA
VSKMVKDAL

SEQ ID NO: 8831 - protein, 8 aa, Homo sapiens
  Table A; Target 8831; HLA-B*54:01; AFP; ENSG00000081051; TAA
VSVILRVA

SEQ ID NO: 8832 - protein, 8 aa, Homo sapiens
  Table A; Target 8832; HLA-C*06:02; AFP; ENSG00000081051; TAA
VSVILRVA

SEQ ID NO: 8833 - protein, 8 aa, Homo sapiens
  Table A; Target 8833; HLA-C*16:01; AFP; ENSG00000081051; TAA
VSVILRVA

SEQ ID NO: 8834 - protein, 9 aa, Homo sapiens
  Table A; Target 8834; HLA-A*11:01; AFP; ENSG00000081051; TAA
VSVILRVAK

SEQ ID NO: 8835 - protein, 9 aa, Homo sapiens
  Table A; Target 8835; HLA-B*07:02; AFP; ENSG00000081051; TAA
VSVILRVAK

SEQ ID NO: 8836 - protein, 9 aa, Homo sapiens
  Table A; Target 8836; HLA-B*57:01; AFP; ENSG00000081051; TAA
VSVILRVAK

SEQ ID NO: 8837 - protein, 11 aa, Homo sapiens
  Table A; Target 8837; HLA-C*07:01; AFP; ENSG00000081051; TAA
VSVILRVAKGY

SEQ ID NO: 8838 - protein, 10 aa, Homo sapiens
  Table A; Target 8838; HLA-A*02:03; AFP; ENSG00000081051; TAA
VTKELRESSL

SEQ ID NO: 8839 - protein, 10 aa, Homo sapiens
  Table A; Target 8839; HLA-B*07:02; AFP; ENSG00000081051; TAA
VTKELRESSL

SEQ ID NO: 8840 - protein, 10 aa, Homo sapiens
  Table A; Target 8840; HLA-B*40:02; AFP; ENSG00000081051; TAA
VTKELRESSL

SEQ ID NO: 8841 - protein, 10 aa, Homo sapiens
  Table A; Target 8841; HLA-B*46:01; AFP; ENSG00000081051; TAA
VTKELRESSL

SEQ ID NO: 8842 - protein, 8 aa, Homo sapiens
  Table A; Target 8842; HLA-A*24:02; AFP; ENSG00000081051; TAA
VTKLSQKF

SEQ ID NO: 8843 - protein, 8 aa, Homo sapiens
  Table A; Target 8843; HLA-A*32:01; AFP; ENSG00000081051; TAA
VTKLSQKF

SEQ ID NO: 8844 - protein, 8 aa, Homo sapiens
  Table A; Target 8844; HLA-B*08:01; AFP; ENSG00000081051; TAA
VTKLSQKF

SEQ ID NO: 8845 - protein, 8 aa, Homo sapiens
  Table A; Target 8845; HLA-B*46:01; AFP; ENSG00000081051; TAA
VTKLSQKF

SEQ ID NO: 8846 - protein, 8 aa, Homo sapiens
  Table A; Target 8846; HLA-C*07:02; AFP; ENSG00000081051; TAA
VTKLSQKF

SEQ ID NO: 8847 - protein, 8 aa, Homo sapiens
  Table A; Target 8847; HLA-C*16:01; AFP; ENSG00000081051; TAA
VTKLSQKF

SEQ ID NO: 8848 - protein, 8 aa, Homo sapiens
  Table A; Target 8848; HLA-C*05:01; AFP; ENSG00000081051; TAA
VVDETYVP

SEQ ID NO: 8849 - protein, 9 aa, Homo sapiens
  Table A; Target 8849; HLA-A*02:07; AFP; ENSG00000081051; TAA
VVDETYVPP

SEQ ID NO: 8850 - protein, 10 aa, Homo sapiens
  Table A; Target 8850; HLA-A*02:01; AFP; ENSG00000081051; TAA
VVDETYVPPA

SEQ ID NO: 8851 - protein, 11 aa, Homo sapiens
  Table A; Target 8851; HLA-A*01:01; AFP; ENSG00000081051; TAA
VVDETYVPPAF

SEQ ID NO: 8852 - protein, 11 aa, Homo sapiens
  Table A; Target 8852; HLA-A*02:01; AFP; ENSG00000081051; TAA
VVDETYVPPAF

SEQ ID NO: 8853 - protein, 11 aa, Homo sapiens
  Table A; Target 8853; HLA-A*03:01; AFP; ENSG00000081051; TAA
VVDETYVPPAF

SEQ ID NO: 8854 - protein, 11 aa, Homo sapiens
  Table A; Target 8854; HLA-A*03:02; AFP; ENSG00000081051; TAA
VVDETYVPPAF

SEQ ID NO: 8855 - protein, 11 aa, Homo sapiens
  Table A; Target 8855; HLA-A*68:01; AFP; ENSG00000081051; TAA
VVDETYVPPAF

SEQ ID NO: 8856 - protein, 11 aa, Homo sapiens
  Table A; Target 8856; HLA-B*27:05; AFP; ENSG00000081051; TAA
VVDETYVPPAF

SEQ ID NO: 8857 - protein, 11 aa, Homo sapiens
  Table A; Target 8857; HLA-B*55:01; AFP; ENSG00000081051; TAA
VVDETYVPPAF

SEQ ID NO: 8858 - protein, 9 aa, Homo sapiens
  Table A; Target 8858; HLA-A*02:07; AFP; ENSG00000081051; TAA
WVESIFLIF

SEQ ID NO: 8859 - protein, 9 aa, Homo sapiens
  Table A; Target 8859; HLA-A*29:02; AFP; ENSG00000081051; TAA
WVESIFLIF

SEQ ID NO: 8860 - protein, 8 aa, Homo sapiens
  Table A; Target 8860; HLA-A*24:02; AFP; ENSG00000081051; TAA
YAPTILLW

SEQ ID NO: 8861 - protein, 8 aa, Homo sapiens
  Table A; Target 8861; HLA-B*57:01; AFP; ENSG00000081051; TAA
YAPTILLW

SEQ ID NO: 8862 - protein, 9 aa, Homo sapiens
  Table A; Target 8862; HLA-A*02:07; AFP; ENSG00000081051; TAA
YAPTILLWA

SEQ ID NO: 8863 - protein, 10 aa, Homo sapiens
  Table A; Target 8863; HLA-A*02:07; AFP; ENSG00000081051; TAA
YAPTILLWAA

SEQ ID NO: 8864 - protein, 10 aa, Homo sapiens
  Table A; Target 8864; HLA-B*54:01; AFP; ENSG00000081051; TAA
YAPTILLWAA

SEQ ID NO: 8865 - protein, 8 aa, Homo sapiens
  Table A; Target 8865; HLA-B*37:01; AFP; ENSG00000081051; TAA
YDKIIPSC

SEQ ID NO: 8866 - protein, 8 aa, Homo sapiens
  Table A; Target 8866; HLA-B*40:02; AFP; ENSG00000081051; TAA
YDKIIPSC

SEQ ID NO: 8867 - protein, 8 aa, Homo sapiens
  Table A; Target 8867; HLA-C*06:02; AFP; ENSG00000081051; TAA
YDKIIPSC

SEQ ID NO: 8868 - protein, 8 aa, Homo sapiens
  Table A; Target 8868; HLA-C*07:01; AFP; ENSG00000081051; TAA
YDKIIPSC

SEQ ID NO: 8869 - protein, 8 aa, Homo sapiens
  Table A; Target 8869; HLA-C*12:03; AFP; ENSG00000081051; TAA
YDKIIPSC

SEQ ID NO: 8870 - protein, 9 aa, Homo sapiens
  Table A; Target 8870; HLA-B*40:02; AFP; ENSG00000081051; TAA
YDKIIPSCC

SEQ ID NO: 8871 - protein, 8 aa, Homo sapiens
  Table A; Target 8871; HLA-B*40:01; AFP; ENSG00000081051; TAA
YEEDRETF

SEQ ID NO: 8872 - protein, 8 aa, Homo sapiens
  Table A; Target 8872; HLA-B*44:02; AFP; ENSG00000081051; TAA
YEEDRETF

SEQ ID NO: 8873 - protein, 8 aa, Homo sapiens
  Table A; Target 8873; HLA-B*44:03; AFP; ENSG00000081051; TAA
YEEDRETF

SEQ ID NO: 8874 - protein, 8 aa, Homo sapiens
  Table A; Target 8874; HLA-B*49:01; AFP; ENSG00000081051; TAA
YEEDRETF

SEQ ID NO: 8875 - protein, 9 aa, Homo sapiens
  Table A; Target 8875; HLA-A*02:07; AFP; ENSG00000081051; TAA
YEEDRETFM

SEQ ID NO: 8876 - protein, 9 aa, Homo sapiens
  Table A; Target 8876; HLA-B*18:01; AFP; ENSG00000081051; TAA
YEEDRETFM

SEQ ID NO: 8877 - protein, 9 aa, Homo sapiens
  Table A; Target 8877; HLA-B*38:01; AFP; ENSG00000081051; TAA
YEEDRETFM

SEQ ID NO: 8878 - protein, 9 aa, Homo sapiens
  Table A; Target 8878; HLA-B*44:03; AFP; ENSG00000081051; TAA
YEEDRETFM

SEQ ID NO: 8879 - protein, 9 aa, Homo sapiens
  Table A; Target 8879; HLA-C*02:02; AFP; ENSG00000081051; TAA
YEEDRETFM

SEQ ID NO: 8880 - protein, 9 aa, Homo sapiens
  Table A; Target 8880; HLA-C*03:03; AFP; ENSG00000081051; TAA
YEEDRETFM

SEQ ID NO: 8881 - protein, 9 aa, Homo sapiens
  Table A; Target 8881; HLA-C*03:04; AFP; ENSG00000081051; TAA
YEEDRETFM

SEQ ID NO: 8882 - protein, 9 aa, Homo sapiens
  Table A; Target 8882; HLA-C*07:01; AFP; ENSG00000081051; TAA
YEEDRETFM

SEQ ID NO: 8883 - protein, 9 aa, Homo sapiens
  Table A; Target 8883; HLA-C*07:04; AFP; ENSG00000081051; TAA
YEEDRETFM

SEQ ID NO: 8884 - protein, 9 aa, Homo sapiens
  Table A; Target 8884; HLA-C*12:03; AFP; ENSG00000081051; TAA
YEEDRETFM

SEQ ID NO: 8885 - protein, 9 aa, Homo sapiens
  Table A; Target 8885; HLA-B*37:01; AFP; ENSG00000081051; TAA
YEIARRHPF

SEQ ID NO: 8886 - protein, 10 aa, Homo sapiens
  Table A; Target 8886; HLA-A*25:01; AFP; ENSG00000081051; TAA
YGIASILDSY

SEQ ID NO: 8887 - protein, 10 aa, Homo sapiens
  Table A; Target 8887; HLA-B*07:02; AFP; ENSG00000081051; TAA
YGIASILDSY

SEQ ID NO: 8888 - protein, 10 aa, Homo sapiens
  Table A; Target 8888; HLA-B*15:03; AFP; ENSG00000081051; TAA
YGIASILDSY

SEQ ID NO: 8889 - protein, 10 aa, Homo sapiens
  Table A; Target 8889; HLA-B*18:01; AFP; ENSG00000081051; TAA
YGIASILDSY

SEQ ID NO: 8890 - protein, 10 aa, Homo sapiens
  Table A; Target 8890; HLA-B*55:01; AFP; ENSG00000081051; TAA
YGIASILDSY

SEQ ID NO: 8891 - protein, 10 aa, Homo sapiens
  Table A; Target 8891; HLA-B*58:01; AFP; ENSG00000081051; TAA
YGIASILDSY

SEQ ID NO: 8892 - protein, 10 aa, Homo sapiens
  Table A; Target 8892; HLA-C*04:01; AFP; ENSG00000081051; TAA
YGIASILDSY

SEQ ID NO: 8893 - protein, 10 aa, Homo sapiens
  Table A; Target 8893; HLA-C*07:01; AFP; ENSG00000081051; TAA
YGIASILDSY

SEQ ID NO: 8894 - protein, 10 aa, Homo sapiens
  Table A; Target 8894; HLA-C*14:02; AFP; ENSG00000081051; TAA
YGIASILDSY

SEQ ID NO: 8895 - protein, 9 aa, Homo sapiens
  Table A; Target 8895; HLA-A*02:07; AFP; ENSG00000081051; TAA
YICSQQDTL

SEQ ID NO: 8896 - protein, 9 aa, Homo sapiens
  Table A; Target 8896; HLA-A*30:01; AFP; ENSG00000081051; TAA
YICSQQDTL

SEQ ID NO: 8897 - protein, 9 aa, Homo sapiens
  Table A; Target 8897; HLA-A*68:02; AFP; ENSG00000081051; TAA
YICSQQDTL

SEQ ID NO: 8898 - protein, 9 aa, Homo sapiens
  Table A; Target 8898; HLA-B*27:05; AFP; ENSG00000081051; TAA
YICSQQDTL

SEQ ID NO: 8899 - protein, 9 aa, Homo sapiens
  Table A; Target 8899; HLA-B*40:02; AFP; ENSG00000081051; TAA
YICSQQDTL

SEQ ID NO: 8900 - protein, 9 aa, Homo sapiens
  Table A; Target 8900; HLA-B*58:01; AFP; ENSG00000081051; TAA
YICSQQDTL

SEQ ID NO: 8901 - protein, 9 aa, Homo sapiens
  Table A; Target 8901; HLA-C*01:02; AFP; ENSG00000081051; TAA
YICSQQDTL

SEQ ID NO: 8902 - protein, 9 aa, Homo sapiens
  Table A; Target 8902; HLA-C*05:01; AFP; ENSG00000081051; TAA
YICSQQDTL

SEQ ID NO: 8903 - protein, 9 aa, Homo sapiens
  Table A; Target 8903; HLA-C*06:02; AFP; ENSG00000081051; TAA
YICSQQDTL

SEQ ID NO: 8904 - protein, 9 aa, Homo sapiens
  Table A; Target 8904; HLA-C*07:01; AFP; ENSG00000081051; TAA
YICSQQDTL

SEQ ID NO: 8905 - protein, 9 aa, Homo sapiens
  Table A; Target 8905; HLA-C*07:02; AFP; ENSG00000081051; TAA
YICSQQDTL

SEQ ID NO: 8906 - protein, 9 aa, Homo sapiens
  Table A; Target 8906; HLA-C*12:03; AFP; ENSG00000081051; TAA
YICSQQDTL

SEQ ID NO: 8907 - protein, 9 aa, Homo sapiens
  Table A; Target 8907; HLA-C*14:02; AFP; ENSG00000081051; TAA
YICSQQDTL

SEQ ID NO: 8908 - protein, 9 aa, Homo sapiens
  Table A; Target 8908; HLA-C*16:02; AFP; ENSG00000081051; TAA
YICSQQDTL

SEQ ID NO: 8909 - protein, 8 aa, Homo sapiens
  Table A; Target 8909; HLA-A*02:07; AFP; ENSG00000081051; TAA
YIQESQAL

SEQ ID NO: 8910 - protein, 8 aa, Homo sapiens
  Table A; Target 8910; HLA-A*23:01; AFP; ENSG00000081051; TAA
YIQESQAL

SEQ ID NO: 8911 - protein, 8 aa, Homo sapiens
  Table A; Target 8911; HLA-A*32:01; AFP; ENSG00000081051; TAA
YIQESQAL

SEQ ID NO: 8912 - protein, 8 aa, Homo sapiens
  Table A; Target 8912; HLA-B*07:02; AFP; ENSG00000081051; TAA
YIQESQAL

SEQ ID NO: 8913 - protein, 8 aa, Homo sapiens
  Table A; Target 8913; HLA-B*13:02; AFP; ENSG00000081051; TAA
YIQESQAL

SEQ ID NO: 8914 - protein, 8 aa, Homo sapiens
  Table A; Target 8914; HLA-B*38:01; AFP; ENSG00000081051; TAA
YIQESQAL

SEQ ID NO: 8915 - protein, 8 aa, Homo sapiens
  Table A; Target 8915; HLA-B*58:01; AFP; ENSG00000081051; TAA
YIQESQAL

SEQ ID NO: 8916 - protein, 8 aa, Homo sapiens
  Table A; Target 8916; HLA-C*02:02; AFP; ENSG00000081051; TAA
YIQESQAL

SEQ ID NO: 8917 - protein, 8 aa, Homo sapiens
  Table A; Target 8917; HLA-C*04:01; AFP; ENSG00000081051; TAA
YIQESQAL

SEQ ID NO: 8918 - protein, 8 aa, Homo sapiens
  Table A; Target 8918; HLA-C*06:02; AFP; ENSG00000081051; TAA
YIQESQAL

SEQ ID NO: 8919 - protein, 8 aa, Homo sapiens
  Table A; Target 8919; HLA-C*07:02; AFP; ENSG00000081051; TAA
YIQESQAL

SEQ ID NO: 8920 - protein, 8 aa, Homo sapiens
  Table A; Target 8920; HLA-C*12:03; AFP; ENSG00000081051; TAA
YIQESQAL

SEQ ID NO: 8921 - protein, 9 aa, Homo sapiens
  Table A; Target 8921; HLA-A*02:03; AFP; ENSG00000081051; TAA
YIQESQALA

SEQ ID NO: 8922 - protein, 9 aa, Homo sapiens
  Table A; Target 8922; HLA-B*13:02; AFP; ENSG00000081051; TAA
YIQESQALA

SEQ ID NO: 8923 - protein, 9 aa, Homo sapiens
  Table A; Target 8923; HLA-B*39:01; AFP; ENSG00000081051; TAA
YIQESQALA

SEQ ID NO: 8924 - protein, 9 aa, Homo sapiens
  Table A; Target 8924; HLA-B*54:01; AFP; ENSG00000081051; TAA
YIQESQALA

SEQ ID NO: 8925 - protein, 9 aa, Homo sapiens
  Table A; Target 8925; HLA-B*56:01; AFP; ENSG00000081051; TAA
YIQESQALA

SEQ ID NO: 8926 - protein, 9 aa, Homo sapiens
  Table A; Target 8926; HLA-C*03:03; AFP; ENSG00000081051; TAA
YIQESQALA

SEQ ID NO: 8927 - protein, 10 aa, Homo sapiens
  Table A; Target 8927; HLA-A*26:01; AFP; ENSG00000081051; TAA
YIQESQALAK

SEQ ID NO: 8928 - protein, 10 aa, Homo sapiens
  Table A; Target 8928; HLA-A*33:03; AFP; ENSG00000081051; TAA
YIQESQALAK

SEQ ID NO: 8929 - protein, 10 aa, Homo sapiens
  Table A; Target 8929; HLA-B*27:05; AFP; ENSG00000081051; TAA
YIQESQALAK

SEQ ID NO: 8930 - protein, 10 aa, Homo sapiens
  Table A; Target 8930; HLA-C*06:02; AFP; ENSG00000081051; TAA
YIQESQALAK

SEQ ID NO: 8931 - protein, 11 aa, Homo sapiens
  Table A; Target 8931; HLA-A*02:07; AFP; ENSG00000081051; TAA
YIQESQALAKR

SEQ ID NO: 8932 - protein, 11 aa, Homo sapiens
  Table A; Target 8932; HLA-A*03:01; AFP; ENSG00000081051; TAA
YIQESQALAKR

SEQ ID NO: 8933 - protein, 11 aa, Homo sapiens
  Table A; Target 8933; HLA-A*68:02; AFP; ENSG00000081051; TAA
YIQESQALAKR

SEQ ID NO: 8934 - protein, 11 aa, Homo sapiens
  Table A; Target 8934; HLA-C*04:01; AFP; ENSG00000081051; TAA
YIQESQALAKR

SEQ ID NO: 8935 - protein, 8 aa, Homo sapiens
  Table A; Target 8935; HLA-A*02:01; AFP; ENSG00000081051; TAA
YLQNAFLV

SEQ ID NO: 8936 - protein, 8 aa, Homo sapiens
  Table A; Target 8936; HLA-A*02:07; AFP; ENSG00000081051; TAA
YLQNAFLV

SEQ ID NO: 8937 - protein, 9 aa, Homo sapiens
  Table A; Target 8937; HLA-A*02:03; AFP; ENSG00000081051; TAA
YLQNAFLVA

SEQ ID NO: 8938 - protein, 9 aa, Homo sapiens
  Table A; Target 8938; HLA-A*02:07; AFP; ENSG00000081051; TAA
YLQNAFLVA

SEQ ID NO: 8939 - protein, 9 aa, Homo sapiens
  Table A; Target 8939; HLA-B*13:02; AFP; ENSG00000081051; TAA
YLQNAFLVA

SEQ ID NO: 8940 - protein, 10 aa, Homo sapiens
  Table A; Target 8940; HLA-A*02:03; AFP; ENSG00000081051; TAA
YLQNAFLVAY

SEQ ID NO: 8941 - protein, 10 aa, Homo sapiens
  Table A; Target 8941; HLA-A*02:04; AFP; ENSG00000081051; TAA
YLQNAFLVAY

SEQ ID NO: 8942 - protein, 10 aa, Homo sapiens
  Table A; Target 8942; HLA-A*02:07; AFP; ENSG00000081051; TAA
YLQNAFLVAY

SEQ ID NO: 8943 - protein, 10 aa, Homo sapiens
  Table A; Target 8943; HLA-A*25:01; AFP; ENSG00000081051; TAA
YLQNAFLVAY

SEQ ID NO: 8944 - protein, 10 aa, Homo sapiens
  Table A; Target 8944; HLA-A*26:01; AFP; ENSG00000081051; TAA
YLQNAFLVAY

SEQ ID NO: 8945 - protein, 10 aa, Homo sapiens
  Table A; Target 8945; HLA-B*15:03; AFP; ENSG00000081051; TAA
YLQNAFLVAY

SEQ ID NO: 8946 - protein, 10 aa, Homo sapiens
  Table A; Target 8946; HLA-B*44:02; AFP; ENSG00000081051; TAA
YLQNAFLVAY

SEQ ID NO: 8947 - protein, 10 aa, Homo sapiens
  Table A; Target 8947; HLA-C*02:02; AFP; ENSG00000081051; TAA
YLQNAFLVAY

SEQ ID NO: 8948 - protein, 10 aa, Homo sapiens
  Table A; Target 8948; HLA-C*03:03; AFP; ENSG00000081051; TAA
YLQNAFLVAY

SEQ ID NO: 8949 - protein, 10 aa, Homo sapiens
  Table A; Target 8949; HLA-C*04:01; AFP; ENSG00000081051; TAA
YLQNAFLVAY

SEQ ID NO: 8950 - protein, 10 aa, Homo sapiens
  Table A; Target 8950; HLA-C*07:01; AFP; ENSG00000081051; TAA
YLQNAFLVAY

SEQ ID NO: 8951 - protein, 10 aa, Homo sapiens
  Table A; Target 8951; HLA-C*07:04; AFP; ENSG00000081051; TAA
YLQNAFLVAY

SEQ ID NO: 8952 - protein, 9 aa, Homo sapiens
  Table A; Target 8952; HLA-A*02:01; AFP; ENSG00000081051; TAA
YQCTAEISL

SEQ ID NO: 8953 - protein, 9 aa, Homo sapiens
  Table A; Target 8953; HLA-A*30:01; AFP; ENSG00000081051; TAA
YQCTAEISL

SEQ ID NO: 8954 - protein, 9 aa, Homo sapiens
  Table A; Target 8954; HLA-B*15:01; AFP; ENSG00000081051; TAA
YQCTAEISL

SEQ ID NO: 8955 - protein, 9 aa, Homo sapiens
  Table A; Target 8955; HLA-B*15:03; AFP; ENSG00000081051; TAA
YQCTAEISL

SEQ ID NO: 8956 - protein, 9 aa, Homo sapiens
  Table A; Target 8956; HLA-B*35:03; AFP; ENSG00000081051; TAA
YQCTAEISL

SEQ ID NO: 8957 - protein, 9 aa, Homo sapiens
  Table A; Target 8957; HLA-B*40:02; AFP; ENSG00000081051; TAA
YQCTAEISL

SEQ ID NO: 8958 - protein, 9 aa, Homo sapiens
  Table A; Target 8958; HLA-C*03:04; AFP; ENSG00000081051; TAA
YQCTAEISL

SEQ ID NO: 8959 - protein, 9 aa, Homo sapiens
  Table A; Target 8959; HLA-C*04:01; AFP; ENSG00000081051; TAA
YQCTAEISL

SEQ ID NO: 8960 - protein, 9 aa, Homo sapiens
  Table A; Target 8960; HLA-C*05:01; AFP; ENSG00000081051; TAA
YQCTAEISL

SEQ ID NO: 8961 - protein, 9 aa, Homo sapiens
  Table A; Target 8961; HLA-C*06:02; AFP; ENSG00000081051; TAA
YQCTAEISL

SEQ ID NO: 8962 - protein, 9 aa, Homo sapiens
  Table A; Target 8962; HLA-C*07:02; AFP; ENSG00000081051; TAA
YQCTAEISL

SEQ ID NO: 8963 - protein, 9 aa, Homo sapiens
  Table A; Target 8963; HLA-B*38:01; AFP; ENSG00000081051; TAA
YQELLEKCF

SEQ ID NO: 8964 - protein, 9 aa, Homo sapiens
  Table A; Target 8964; HLA-B*44:02; AFP; ENSG00000081051; TAA
YQELLEKCF

SEQ ID NO: 8965 - protein, 9 aa, Homo sapiens
  Table A; Target 8965; HLA-B*44:03; AFP; ENSG00000081051; TAA
YQELLEKCF

SEQ ID NO: 8966 - protein, 8 aa, Homo sapiens
  Table A; Target 8966; HLA-A*23:01; AFP; ENSG00000081051; TAA
YTKKAPQL

SEQ ID NO: 8967 - protein, 8 aa, Homo sapiens
  Table A; Target 8967; HLA-A*32:01; AFP; ENSG00000081051; TAA
YTKKAPQL

SEQ ID NO: 8968 - protein, 8 aa, Homo sapiens
  Table A; Target 8968; HLA-B*46:01; AFP; ENSG00000081051; TAA
YTKKAPQL

SEQ ID NO: 8969 - protein, 8 aa, Homo sapiens
  Table A; Target 8969; HLA-C*04:01; AFP; ENSG00000081051; TAA
YTKKAPQL

SEQ ID NO: 8970 - protein, 8 aa, Homo sapiens
  Table A; Target 8970; HLA-C*07:02; AFP; ENSG00000081051; TAA
YTKKAPQL

SEQ ID NO: 8971 - protein, 8 aa, Homo sapiens
  Table A; Target 8971; HLA-C*07:04; AFP; ENSG00000081051; TAA
YTKKAPQL

SEQ ID NO: 8972 - protein, 10 aa, Homo sapiens
  Table A; Target 8972; HLA-B*27:02; AFP; ENSG00000081051; TAA
YVPPAFSDDK

SEQ ID NO: 8973 - protein, 11 aa, Homo sapiens
  Table A; Target 8973; HLA-A*02:07; AFP; ENSG00000081051; TAA
YVPPAFSDDKF

SEQ ID NO: 8974 - protein, 8 aa, Homo sapiens
  Table A; Target 8974; HLA-A*24:02; AFP; ENSG00000081051; TAA
YYLQNAFL

SEQ ID NO: 8975 - protein, 9 aa, Homo sapiens
  Table A; Target 8975; HLA-C*07:01; AFP; ENSG00000081051; TAA
YYLQNAFLV

SEQ ID NO: 8976 - protein, 10 aa, Homo sapiens
  Table A; Target 8976; HLA-A*24:02; AFP; ENSG00000081051; TAA
YYLQNAFLVA

SEQ ID NO: 8977 - protein, 9 aa, Homo sapiens
  Table A; Target 8977; HLA-B*40:02; AMELX; ENSG00000125363; CTA
AAFAMPLPP

SEQ ID NO: 8978 - protein, 9 aa, Homo sapiens
  Table A; Target 8978; HLA-B*54:01; AMELX; ENSG00000125363; CTA
AAFAMPLPP

SEQ ID NO: 8979 - protein, 9 aa, Homo sapiens
  Table A; Target 8979; HLA-B*56:01; AMELX; ENSG00000125363; CTA
AAFAMPLPP

SEQ ID NO: 8980 - protein, 9 aa, Homo sapiens
  Table A; Target 8980; HLA-C*04:01; AMELX; ENSG00000125363; CTA
AAFAMPLPP

SEQ ID NO: 8981 - protein, 9 aa, Homo sapiens
  Table A; Target 8981; HLA-C*06:02; AMELX; ENSG00000125363; CTA
AAFAMPLPP

SEQ ID NO: 8982 - protein, 9 aa, Homo sapiens
  Table A; Target 8982; HLA-C*07:01; AMELX; ENSG00000125363; CTA
AAFAMPLPP

SEQ ID NO: 8983 - protein, 9 aa, Homo sapiens
  Table A; Target 8983; HLA-C*07:02; AMELX; ENSG00000125363; CTA
AAFAMPLPP

SEQ ID NO: 8984 - protein, 9 aa, Homo sapiens
  Table A; Target 8984; HLA-C*12:03; AMELX; ENSG00000125363; CTA
AAFAMPLPP

SEQ ID NO: 8985 - protein, 9 aa, Homo sapiens
  Table A; Target 8985; HLA-C*16:04; AMELX; ENSG00000125363; CTA
AAFAMPLPP

SEQ ID NO: 8986 - protein, 10 aa, Homo sapiens
  Table A; Target 8986; HLA-A*11:01; AMELX; ENSG00000125363; CTA
AAFAMPLPPH

SEQ ID NO: 8987 - protein, 8 aa, Homo sapiens
  Table A; Target 8987; HLA-C*04:01; AMELX; ENSG00000125363; CTA
AMPLPPHP

SEQ ID NO: 8988 - protein, 8 aa, Homo sapiens
  Table A; Target 8988; HLA-C*06:02; AMELX; ENSG00000125363; CTA
AMPLPPHP

SEQ ID NO: 8989 - protein, 9 aa, Homo sapiens
  Table A; Target 8989; HLA-A*31:01; AMELX; ENSG00000125363; CTA
AMPLPPHPG

SEQ ID NO: 8990 - protein, 9 aa, Homo sapiens
  Table A; Target 8990; HLA-C*06:02; AMELX; ENSG00000125363; CTA
AMPLPPHPG

SEQ ID NO: 8991 - protein, 9 aa, Homo sapiens
  Table A; Target 8991; HLA-A*32:01; AMELX; ENSG00000125363; CTA
AQQPVIPQQ

SEQ ID NO: 8992 - protein, 9 aa, Homo sapiens
  Table A; Target 8992; HLA-B*13:02; AMELX; ENSG00000125363; CTA
AQQPVIPQQ

SEQ ID NO: 8993 - protein, 9 aa, Homo sapiens
  Table A; Target 8993; HLA-B*15:01; AMELX; ENSG00000125363; CTA
AQQPVIPQQ

SEQ ID NO: 8994 - protein, 9 aa, Homo sapiens
  Table A; Target 8994; HLA-B*39:01; AMELX; ENSG00000125363; CTA
AQQPVIPQQ

SEQ ID NO: 8995 - protein, 11 aa, Homo sapiens
  Table A; Target 8995; HLA-A*30:02; AMELX; ENSG00000125363; CTA
AQQPVIPQQPM

SEQ ID NO: 8996 - protein, 10 aa, Homo sapiens
  Table A; Target 8996; HLA-A*02:03; AMELX; ENSG00000125363; CTA
AQQPYQPQPV

SEQ ID NO: 8997 - protein, 10 aa, Homo sapiens
  Table A; Target 8997; HLA-B*13:02; AMELX; ENSG00000125363; CTA
AQQPYQPQPV

SEQ ID NO: 8998 - protein, 10 aa, Homo sapiens
  Table A; Target 8998; HLA-B*27:05; AMELX; ENSG00000125363; CTA
AQQPYQPQPV

SEQ ID NO: 8999 - protein, 10 aa, Homo sapiens
  Table A; Target 8999; HLA-B*39:01; AMELX; ENSG00000125363; CTA
AQQPYQPQPV

SEQ ID NO: 9000 - protein, 10 aa, Homo sapiens
  Table A; Target 9000; HLA-C*06:02; AMELX; ENSG00000125363; CTA
AQQPYQPQPV

SEQ ID NO: 9001 - protein, 9 aa, Homo sapiens
  Table A; Target 9001; HLA-A*02:04; AMELX; ENSG00000125363; CTA
CLLGAAFAM

SEQ ID NO: 9002 - protein, 9 aa, Homo sapiens
  Table A; Target 9002; HLA-A*29:02; AMELX; ENSG00000125363; CTA
CLLGAAFAM

SEQ ID NO: 9003 - protein, 9 aa, Homo sapiens
  Table A; Target 9003; HLA-C*01:02; AMELX; ENSG00000125363; CTA
CLLGAAFAM

SEQ ID NO: 9004 - protein, 9 aa, Homo sapiens
  Table A; Target 9004; HLA-C*14:02; AMELX; ENSG00000125363; CTA
CLLGAAFAM

SEQ ID NO: 9005 - protein, 10 aa, Homo sapiens
  Table A; Target 9005; HLA-A*68:01; AMELX; ENSG00000125363; CTA
EAWPSTDKTK

SEQ ID NO: 9006 - protein, 11 aa, Homo sapiens
  Table A; Target 9006; HLA-A*33:01; AMELX; ENSG00000125363; CTA
EAWPSTDKTKR

SEQ ID NO: 9007 - protein, 11 aa, Homo sapiens
  Table A; Target 9007; HLA-A*33:03; AMELX; ENSG00000125363; CTA
EAWPSTDKTKR

SEQ ID NO: 9008 - protein, 11 aa, Homo sapiens
  Table A; Target 9008; HLA-A*68:01; AMELX; ENSG00000125363; CTA
EAWPSTDKTKR

SEQ ID NO: 9009 - protein, 11 aa, Homo sapiens
  Table A; Target 9009; HLA-B*35:01; AMELX; ENSG00000125363; CTA
EAWPSTDKTKR

SEQ ID NO: 9010 - protein, 8 aa, Homo sapiens
  Table A; Target 9010; HLA-A*25:01; AMELX; ENSG00000125363; CTA
EVLTPLKW

SEQ ID NO: 9011 - protein, 8 aa, Homo sapiens
  Table A; Target 9011; HLA-B*57:01; AMELX; ENSG00000125363; CTA
EVLTPLKW

SEQ ID NO: 9012 - protein, 9 aa, Homo sapiens
  Table A; Target 9012; HLA-B*27:02; AMELX; ENSG00000125363; CTA
FACLLGAAF

SEQ ID NO: 9013 - protein, 9 aa, Homo sapiens
  Table A; Target 9013; HLA-B*35:01; AMELX; ENSG00000125363; CTA
FACLLGAAF

SEQ ID NO: 9014 - protein, 9 aa, Homo sapiens
  Table A; Target 9014; HLA-B*46:01; AMELX; ENSG00000125363; CTA
FACLLGAAF

SEQ ID NO: 9015 - protein, 9 aa, Homo sapiens
  Table A; Target 9015; HLA-C*02:02; AMELX; ENSG00000125363; CTA
FACLLGAAF

SEQ ID NO: 9016 - protein, 9 aa, Homo sapiens
  Table A; Target 9016; HLA-C*03:03; AMELX; ENSG00000125363; CTA
FACLLGAAF

SEQ ID NO: 9017 - protein, 9 aa, Homo sapiens
  Table A; Target 9017; HLA-C*03:04; AMELX; ENSG00000125363; CTA
FACLLGAAF

SEQ ID NO: 9018 - protein, 8 aa, Homo sapiens
  Table A; Target 9018; HLA-B*54:01; AMELX; ENSG00000125363; CTA
FAMPLPPH

SEQ ID NO: 9019 - protein, 9 aa, Homo sapiens
  Table A; Target 9019; HLA-B*54:01; AMELX; ENSG00000125363; CTA
FAMPLPPHP

SEQ ID NO: 9020 - protein, 10 aa, Homo sapiens
  Table A; Target 9020; HLA-A*31:01; AMELX; ENSG00000125363; CTA
FAMPLPPHPG

SEQ ID NO: 9021 - protein, 10 aa, Homo sapiens
  Table A; Target 9021; HLA-B*54:01; AMELX; ENSG00000125363; CTA
FAMPLPPHPG

SEQ ID NO: 9022 - protein, 10 aa, Homo sapiens
  Table A; Target 9022; HLA-C*12:03; AMELX; ENSG00000125363; CTA
FAMPLPPHPG

SEQ ID NO: 9023 - protein, 8 aa, Homo sapiens
  Table A; Target 9023; HLA-B*54:01; AMELX; ENSG00000125363; CTA
FPMQPLPP

SEQ ID NO: 9024 - protein, 9 aa, Homo sapiens
  Table A; Target 9024; HLA-B*07:02; AMELX; ENSG00000125363; CTA
FPMQPLPPM

SEQ ID NO: 9025 - protein, 9 aa, Homo sapiens
  Table A; Target 9025; HLA-B*35:01; AMELX; ENSG00000125363; CTA
FPMQPLPPM

SEQ ID NO: 9026 - protein, 9 aa, Homo sapiens
  Table A; Target 9026; HLA-B*35:03; AMELX; ENSG00000125363; CTA
FPMQPLPPM

SEQ ID NO: 9027 - protein, 9 aa, Homo sapiens
  Table A; Target 9027; HLA-B*51:01; AMELX; ENSG00000125363; CTA
FPMQPLPPM

SEQ ID NO: 9028 - protein, 9 aa, Homo sapiens
  Table A; Target 9028; HLA-B*54:01; AMELX; ENSG00000125363; CTA
FPMQPLPPM

SEQ ID NO: 9029 - protein, 9 aa, Homo sapiens
  Table A; Target 9029; HLA-B*55:01; AMELX; ENSG00000125363; CTA
FPMQPLPPM

SEQ ID NO: 9030 - protein, 9 aa, Homo sapiens
  Table A; Target 9030; HLA-B*56:01; AMELX; ENSG00000125363; CTA
FPMQPLPPM

SEQ ID NO: 9031 - protein, 10 aa, Homo sapiens
  Table A; Target 9031; HLA-B*35:03; AMELX; ENSG00000125363; CTA
FPMQPLPPML

SEQ ID NO: 9032 - protein, 10 aa, Homo sapiens
  Table A; Target 9032; HLA-B*54:01; AMELX; ENSG00000125363; CTA
FPMQPLPPML

SEQ ID NO: 9033 - protein, 10 aa, Homo sapiens
  Table A; Target 9033; HLA-B*56:01; AMELX; ENSG00000125363; CTA
FPMQPLPPML

SEQ ID NO: 9034 - protein, 9 aa, Homo sapiens
  Table A; Target 9034; HLA-A*02:01; AMELX; ENSG00000125363; CTA
FSYEVLTPL

SEQ ID NO: 9035 - protein, 9 aa, Homo sapiens
  Table A; Target 9035; HLA-A*02:07; AMELX; ENSG00000125363; CTA
FSYEVLTPL

SEQ ID NO: 9036 - protein, 9 aa, Homo sapiens
  Table A; Target 9036; HLA-A*68:02; AMELX; ENSG00000125363; CTA
FSYEVLTPL

SEQ ID NO: 9037 - protein, 9 aa, Homo sapiens
  Table A; Target 9037; HLA-B*46:01; AMELX; ENSG00000125363; CTA
FSYEVLTPL

SEQ ID NO: 9038 - protein, 9 aa, Homo sapiens
  Table A; Target 9038; HLA-B*54:01; AMELX; ENSG00000125363; CTA
FSYEVLTPL

SEQ ID NO: 9039 - protein, 9 aa, Homo sapiens
  Table A; Target 9039; HLA-C*02:02; AMELX; ENSG00000125363; CTA
FSYEVLTPL

SEQ ID NO: 9040 - protein, 9 aa, Homo sapiens
  Table A; Target 9040; HLA-C*03:03; AMELX; ENSG00000125363; CTA
FSYEVLTPL

SEQ ID NO: 9041 - protein, 9 aa, Homo sapiens
  Table A; Target 9041; HLA-C*03:04; AMELX; ENSG00000125363; CTA
FSYEVLTPL

SEQ ID NO: 9042 - protein, 9 aa, Homo sapiens
  Table A; Target 9042; HLA-C*16:04; AMELX; ENSG00000125363; CTA
FSYEVLTPL

SEQ ID NO: 9043 - protein, 11 aa, Homo sapiens
  Table A; Target 9043; HLA-B*57:01; AMELX; ENSG00000125363; CTA
FSYEVLTPLKW

SEQ ID NO: 9044 - protein, 8 aa, Homo sapiens
  Table A; Target 9044; HLA-C*03:04; AMELX; ENSG00000125363; CTA
GAAFAMPL

SEQ ID NO: 9045 - protein, 10 aa, Homo sapiens
  Table A; Target 9045; HLA-C*06:02; AMELX; ENSG00000125363; CTA
GAAFAMPLPP

SEQ ID NO: 9046 - protein, 10 aa, Homo sapiens
  Table A; Target 9046; HLA-C*07:02; AMELX; ENSG00000125363; CTA
GAAFAMPLPP

SEQ ID NO: 9047 - protein, 10 aa, Homo sapiens
  Table A; Target 9047; HLA-A*29:02; AMELX; ENSG00000125363; CTA
GHPGYINFSY

SEQ ID NO: 9048 - protein, 8 aa, Homo sapiens
  Table A; Target 9048; HLA-B*13:02; AMELX; ENSG00000125363; CTA
GQHSMTPI

SEQ ID NO: 9049 - protein, 9 aa, Homo sapiens
  Table A; Target 9049; HLA-A*23:01; AMELX; ENSG00000125363; CTA
GYINFSYEV

SEQ ID NO: 9050 - protein, 9 aa, Homo sapiens
  Table A; Target 9050; HLA-A*24:02; AMELX; ENSG00000125363; CTA
GYINFSYEV

SEQ ID NO: 9051 - protein, 9 aa, Homo sapiens
  Table A; Target 9051; HLA-A*29:02; AMELX; ENSG00000125363; CTA
GYINFSYEV

SEQ ID NO: 9052 - protein, 9 aa, Homo sapiens
  Table A; Target 9052; HLA-C*14:02; AMELX; ENSG00000125363; CTA
GYINFSYEV

SEQ ID NO: 9053 - protein, 9 aa, Homo sapiens
  Table A; Target 9053; HLA-B*54:01; AMELX; ENSG00000125363; CTA
HHHIPVVPA

SEQ ID NO: 9054 - protein, 8 aa, Homo sapiens
  Table A; Target 9054; HLA-B*38:01; AMELX; ENSG00000125363; CTA
HHQIIPVL

SEQ ID NO: 9055 - protein, 8 aa, Homo sapiens
  Table A; Target 9055; HLA-B*39:01; AMELX; ENSG00000125363; CTA
HHQIIPVL

SEQ ID NO: 9056 - protein, 8 aa, Homo sapiens
  Table A; Target 9056; HLA-C*07:04; AMELX; ENSG00000125363; CTA
HHQIIPVL

SEQ ID NO: 9057 - protein, 9 aa, Homo sapiens
  Table A; Target 9057; HLA-A*29:02; AMELX; ENSG00000125363; CTA
HPGYINFSY

SEQ ID NO: 9058 - protein, 9 aa, Homo sapiens
  Table A; Target 9058; HLA-B*35:01; AMELX; ENSG00000125363; CTA
HPGYINFSY

SEQ ID NO: 9059 - protein, 9 aa, Homo sapiens
  Table A; Target 9059; HLA-B*55:01; AMELX; ENSG00000125363; CTA
HPGYINFSY

SEQ ID NO: 9060 - protein, 10 aa, Homo sapiens
  Table A; Target 9060; HLA-B*54:01; AMELX; ENSG00000125363; CTA
HPMQPLPPQP

SEQ ID NO: 9061 - protein, 9 aa, Homo sapiens
  Table A; Target 9061; HLA-B*54:01; AMELX; ENSG00000125363; CTA
HPPTHTLQP

SEQ ID NO: 9062 - protein, 9 aa, Homo sapiens
  Table A; Target 9062; HLA-B*13:02; AMELX; ENSG00000125363; CTA
HQIIPVLSQ

SEQ ID NO: 9063 - protein, 9 aa, Homo sapiens
  Table A; Target 9063; HLA-B*27:05; AMELX; ENSG00000125363; CTA
HQIIPVLSQ

SEQ ID NO: 9064 - protein, 9 aa, Homo sapiens
  Table A; Target 9064; HLA-B*54:01; AMELX; ENSG00000125363; CTA
HQPNLPPPA

SEQ ID NO: 9065 - protein, 8 aa, Homo sapiens
  Table A; Target 9065; HLA-A*11:01; AMELX; ENSG00000125363; CTA
HSMTPIQH

SEQ ID NO: 9066 - protein, 9 aa, Homo sapiens
  Table A; Target 9066; HLA-A*31:01; AMELX; ENSG00000125363; CTA
HSMTPIQHH

SEQ ID NO: 9067 - protein, 9 aa, Homo sapiens
  Table A; Target 9067; HLA-A*33:01; AMELX; ENSG00000125363; CTA
HSMTPIQHH

SEQ ID NO: 9068 - protein, 9 aa, Homo sapiens
  Table A; Target 9068; HLA-A*33:03; AMELX; ENSG00000125363; CTA
HSMTPIQHH

SEQ ID NO: 9069 - protein, 9 aa, Homo sapiens
  Table A; Target 9069; HLA-A*02:03; AMELX; ENSG00000125363; CTA
ILFACLLGA

SEQ ID NO: 9070 - protein, 9 aa, Homo sapiens
  Table A; Target 9070; HLA-B*07:02; AMELX; ENSG00000125363; CTA
IPQQPMMPV

SEQ ID NO: 9071 - protein, 9 aa, Homo sapiens
  Table A; Target 9071; HLA-B*51:01; AMELX; ENSG00000125363; CTA
IPQQPMMPV

SEQ ID NO: 9072 - protein, 9 aa, Homo sapiens
  Table A; Target 9072; HLA-B*54:01; AMELX; ENSG00000125363; CTA
IPQQPMMPV

SEQ ID NO: 9073 - protein, 9 aa, Homo sapiens
  Table A; Target 9073; HLA-B*56:01; AMELX; ENSG00000125363; CTA
IPQQPMMPV

SEQ ID NO: 9074 - protein, 9 aa, Homo sapiens
  Table A; Target 9074; HLA-C*07:02; AMELX; ENSG00000125363; CTA
IPQQPMMPV

SEQ ID NO: 9075 - protein, 10 aa, Homo sapiens
  Table A; Target 9075; HLA-B*56:01; AMELX; ENSG00000125363; CTA
IPQQPMMPVP

SEQ ID NO: 9076 - protein, 10 aa, Homo sapiens
  Table A; Target 9076; HLA-B*54:01; AMELX; ENSG00000125363; CTA
IPVLSQQHPP

SEQ ID NO: 9077 - protein, 10 aa, Homo sapiens
  Table A; Target 9077; HLA-B*56:01; AMELX; ENSG00000125363; CTA
IPVLSQQHPP

SEQ ID NO: 9078 - protein, 9 aa, Homo sapiens
  Table A; Target 9078; HLA-B*54:01; AMELX; ENSG00000125363; CTA
IPVVPAQQP

SEQ ID NO: 9079 - protein, 9 aa, Homo sapiens
  Table A; Target 9079; HLA-B*55:01; AMELX; ENSG00000125363; CTA
IPVVPAQQP

SEQ ID NO: 9080 - protein, 9 aa, Homo sapiens
  Table A; Target 9080; HLA-B*56:01; AMELX; ENSG00000125363; CTA
IPVVPAQQP

SEQ ID NO: 9081 - protein, 10 aa, Homo sapiens
  Table A; Target 9081; HLA-B*56:01; AMELX; ENSG00000125363; CTA
IPVVPAQQPV

SEQ ID NO: 9082 - protein, 11 aa, Homo sapiens
  Table A; Target 9082; HLA-B*51:01; AMELX; ENSG00000125363; CTA
IPVVPAQQPVI

SEQ ID NO: 9083 - protein, 11 aa, Homo sapiens
  Table A; Target 9083; HLA-B*54:01; AMELX; ENSG00000125363; CTA
IPVVPAQQPVI

SEQ ID NO: 9084 - protein, 11 aa, Homo sapiens
  Table A; Target 9084; HLA-B*56:01; AMELX; ENSG00000125363; CTA
IPVVPAQQPVI

SEQ ID NO: 9085 - protein, 8 aa, Homo sapiens
  Table A; Target 9085; HLA-B*15:03; AMELX; ENSG00000125363; CTA
IQHHQPNL

SEQ ID NO: 9086 - protein, 8 aa, Homo sapiens
  Table A; Target 9086; HLA-C*06:02; AMELX; ENSG00000125363; CTA
IRPPYPSY

SEQ ID NO: 9087 - protein, 8 aa, Homo sapiens
  Table A; Target 9087; HLA-C*07:01; AMELX; ENSG00000125363; CTA
IRPPYPSY

SEQ ID NO: 9088 - protein, 8 aa, Homo sapiens
  Table A; Target 9088; HLA-C*07:02; AMELX; ENSG00000125363; CTA
IRPPYPSY

SEQ ID NO: 9089 - protein, 10 aa, Homo sapiens
  Table A; Target 9089; HLA-A*29:02; AMELX; ENSG00000125363; CTA
IRPPYPSYGY

SEQ ID NO: 9090 - protein, 10 aa, Homo sapiens
  Table A; Target 9090; HLA-C*07:01; AMELX; ENSG00000125363; CTA
IRPPYPSYGY

SEQ ID NO: 9091 - protein, 10 aa, Homo sapiens
  Table A; Target 9091; HLA-C*07:02; AMELX; ENSG00000125363; CTA
IRPPYPSYGY

SEQ ID NO: 9092 - protein, 9 aa, Homo sapiens
  Table A; Target 9092; HLA-C*03:04; AMELX; ENSG00000125363; CTA
LGAAFAMPL

SEQ ID NO: 9093 - protein, 9 aa, Homo sapiens
  Table A; Target 9093; HLA-C*06:02; AMELX; ENSG00000125363; CTA
LGAAFAMPL

SEQ ID NO: 9094 - protein, 9 aa, Homo sapiens
  Table A; Target 9094; HLA-C*07:01; AMELX; ENSG00000125363; CTA
LGAAFAMPL

SEQ ID NO: 9095 - protein, 9 aa, Homo sapiens
  Table A; Target 9095; HLA-C*07:02; AMELX; ENSG00000125363; CTA
LGAAFAMPL

SEQ ID NO: 9096 - protein, 9 aa, Homo sapiens
  Table A; Target 9096; HLA-C*07:04; AMELX; ENSG00000125363; CTA
LGAAFAMPL

SEQ ID NO: 9097 - protein, 9 aa, Homo sapiens
  Table A; Target 9097; HLA-C*12:03; AMELX; ENSG00000125363; CTA
LGAAFAMPL

SEQ ID NO: 9098 - protein, 9 aa, Homo sapiens
  Table A; Target 9098; HLA-A*02:04; AMELX; ENSG00000125363; CTA
LHHQIIPVL

SEQ ID NO: 9099 - protein, 9 aa, Homo sapiens
  Table A; Target 9099; HLA-A*24:02; AMELX; ENSG00000125363; CTA
LHHQIIPVL

SEQ ID NO: 9100 - protein, 9 aa, Homo sapiens
  Table A; Target 9100; HLA-A*68:02; AMELX; ENSG00000125363; CTA
LHHQIIPVL

SEQ ID NO: 9101 - protein, 9 aa, Homo sapiens
  Table A; Target 9101; HLA-B*38:01; AMELX; ENSG00000125363; CTA
LHHQIIPVL

SEQ ID NO: 9102 - protein, 9 aa, Homo sapiens
  Table A; Target 9102; HLA-B*39:01; AMELX; ENSG00000125363; CTA
LHHQIIPVL

SEQ ID NO: 9103 - protein, 9 aa, Homo sapiens
  Table A; Target 9103; HLA-C*06:02; AMELX; ENSG00000125363; CTA
LHHQIIPVL

SEQ ID NO: 9104 - protein, 8 aa, Homo sapiens
  Table A; Target 9104; HLA-C*07:01; AMELX; ENSG00000125363; CTA
LLGAAFAM

SEQ ID NO: 9105 - protein, 8 aa, Homo sapiens
  Table A; Target 9105; HLA-C*07:02; AMELX; ENSG00000125363; CTA
LLGAAFAM

SEQ ID NO: 9106 - protein, 8 aa, Homo sapiens
  Table A; Target 9106; HLA-C*07:04; AMELX; ENSG00000125363; CTA
LLGAAFAM

SEQ ID NO: 9107 - protein, 8 aa, Homo sapiens
  Table A; Target 9107; HLA-C*14:02; AMELX; ENSG00000125363; CTA
LLGAAFAM

SEQ ID NO: 9108 - protein, 8 aa, Homo sapiens
  Table A; Target 9108; HLA-B*54:01; AMELX; ENSG00000125363; CTA
LPDLTLEA

SEQ ID NO: 9109 - protein, 9 aa, Homo sapiens
  Table A; Target 9109; HLA-B*35:01; AMELX; ENSG00000125363; CTA
LPDLTLEAW

SEQ ID NO: 9110 - protein, 9 aa, Homo sapiens
  Table A; Target 9110; HLA-B*55:01; AMELX; ENSG00000125363; CTA
LPDLTLEAW

SEQ ID NO: 9111 - protein, 8 aa, Homo sapiens
  Table A; Target 9111; HLA-B*51:01; AMELX; ENSG00000125363; CTA
LPPMLPDL

SEQ ID NO: 9112 - protein, 10 aa, Homo sapiens
  Table A; Target 9112; HLA-B*35:03; AMELX; ENSG00000125363; CTA
LPPMLPDLTL

SEQ ID NO: 9113 - protein, 10 aa, Homo sapiens
  Table A; Target 9113; HLA-B*51:01; AMELX; ENSG00000125363; CTA
LPPMLPDLTL

SEQ ID NO: 9114 - protein, 8 aa, Homo sapiens
  Table A; Target 9114; HLA-B*51:01; AMELX; ENSG00000125363; CTA
LPPPAQQP

SEQ ID NO: 9115 - protein, 9 aa, Homo sapiens
  Table A; Target 9115; HLA-A*26:01; AMELX; ENSG00000125363; CTA
LPPPAQQPY

SEQ ID NO: 9116 - protein, 9 aa, Homo sapiens
  Table A; Target 9116; HLA-A*29:02; AMELX; ENSG00000125363; CTA
LPPPAQQPY

SEQ ID NO: 9117 - protein, 9 aa, Homo sapiens
  Table A; Target 9117; HLA-B*07:02; AMELX; ENSG00000125363; CTA
LPPPAQQPY

SEQ ID NO: 9118 - protein, 9 aa, Homo sapiens
  Table A; Target 9118; HLA-B*35:01; AMELX; ENSG00000125363; CTA
LPPPAQQPY

SEQ ID NO: 9119 - protein, 9 aa, Homo sapiens
  Table A; Target 9119; HLA-B*35:03; AMELX; ENSG00000125363; CTA
LPPPAQQPY

SEQ ID NO: 9120 - protein, 9 aa, Homo sapiens
  Table A; Target 9120; HLA-B*51:01; AMELX; ENSG00000125363; CTA
LPPPAQQPY

SEQ ID NO: 9121 - protein, 9 aa, Homo sapiens
  Table A; Target 9121; HLA-B*55:01; AMELX; ENSG00000125363; CTA
LPPPAQQPY

SEQ ID NO: 9122 - protein, 9 aa, Homo sapiens
  Table A; Target 9122; HLA-B*56:01; AMELX; ENSG00000125363; CTA
LPPPAQQPY

SEQ ID NO: 9123 - protein, 9 aa, Homo sapiens
  Table A; Target 9123; HLA-C*01:02; AMELX; ENSG00000125363; CTA
LPPPAQQPY

SEQ ID NO: 9124 - protein, 9 aa, Homo sapiens
  Table A; Target 9124; HLA-C*03:03; AMELX; ENSG00000125363; CTA
LPPPAQQPY

SEQ ID NO: 9125 - protein, 9 aa, Homo sapiens
  Table A; Target 9125; HLA-C*04:01; AMELX; ENSG00000125363; CTA
LPPPAQQPY

SEQ ID NO: 9126 - protein, 9 aa, Homo sapiens
  Table A; Target 9126; HLA-C*07:02; AMELX; ENSG00000125363; CTA
LPPPAQQPY

SEQ ID NO: 9127 - protein, 9 aa, Homo sapiens
  Table A; Target 9127; HLA-C*14:02; AMELX; ENSG00000125363; CTA
LPPPAQQPY

SEQ ID NO: 9128 - protein, 9 aa, Homo sapiens
  Table A; Target 9128; HLA-B*51:01; AMELX; ENSG00000125363; CTA
LPPQPPLPP

SEQ ID NO: 9129 - protein, 9 aa, Homo sapiens
  Table A; Target 9129; HLA-B*54:01; AMELX; ENSG00000125363; CTA
LPPQPPLPP

SEQ ID NO: 9130 - protein, 9 aa, Homo sapiens
  Table A; Target 9130; HLA-B*56:01; AMELX; ENSG00000125363; CTA
LPPQPPLPP

SEQ ID NO: 9131 - protein, 10 aa, Homo sapiens
  Table A; Target 9131; HLA-B*35:01; AMELX; ENSG00000125363; CTA
LPPQPPLPPM

SEQ ID NO: 9132 - protein, 10 aa, Homo sapiens
  Table A; Target 9132; HLA-B*35:03; AMELX; ENSG00000125363; CTA
LPPQPPLPPM

SEQ ID NO: 9133 - protein, 10 aa, Homo sapiens
  Table A; Target 9133; HLA-B*51:01; AMELX; ENSG00000125363; CTA
LPPQPPLPPM

SEQ ID NO: 9134 - protein, 10 aa, Homo sapiens
  Table A; Target 9134; HLA-B*54:01; AMELX; ENSG00000125363; CTA
LPPQPPLPPM

SEQ ID NO: 9135 - protein, 10 aa, Homo sapiens
  Table A; Target 9135; HLA-B*56:01; AMELX; ENSG00000125363; CTA
LPPQPPLPPM

SEQ ID NO: 9136 - protein, 9 aa, Homo sapiens
  Table A; Target 9136; HLA-A*02:07; AMELX; ENSG00000125363; CTA
MLPDLTLEA

SEQ ID NO: 9137 - protein, 10 aa, Homo sapiens
  Table A; Target 9137; HLA-A*02:07; AMELX; ENSG00000125363; CTA
MLPDLTLEAW

SEQ ID NO: 9138 - protein, 10 aa, Homo sapiens
  Table A; Target 9138; HLA-A*25:01; AMELX; ENSG00000125363; CTA
MLPDLTLEAW

SEQ ID NO: 9139 - protein, 10 aa, Homo sapiens
  Table A; Target 9139; HLA-A*02:07; AMELX; ENSG00000125363; CTA
MMPVPGQHSM

SEQ ID NO: 9140 - protein, 10 aa, Homo sapiens
  Table A; Target 9140; HLA-C*01:02; AMELX; ENSG00000125363; CTA
MMPVPGQHSM

SEQ ID NO: 9141 - protein, 10 aa, Homo sapiens
  Table A; Target 9141; HLA-C*04:01; AMELX; ENSG00000125363; CTA
MMPVPGQHSM

SEQ ID NO: 9142 - protein, 8 aa, Homo sapiens
  Table A; Target 9142; HLA-B*54:01; AMELX; ENSG00000125363; CTA
MPLPPHPG

SEQ ID NO: 9143 - protein, 8 aa, Homo sapiens
  Table A; Target 9143; HLA-C*04:01; AMELX; ENSG00000125363; CTA
MPLPPHPG

SEQ ID NO: 9144 - protein, 8 aa, Homo sapiens
  Table A; Target 9144; HLA-C*07:01; AMELX; ENSG00000125363; CTA
MPLPPHPG

SEQ ID NO: 9145 - protein, 9 aa, Homo sapiens
  Table A; Target 9145; HLA-B*07:02; AMELX; ENSG00000125363; CTA
MPLPPHPGH

SEQ ID NO: 9146 - protein, 9 aa, Homo sapiens
  Table A; Target 9146; HLA-B*35:01; AMELX; ENSG00000125363; CTA
MPLPPHPGH

SEQ ID NO: 9147 - protein, 9 aa, Homo sapiens
  Table A; Target 9147; HLA-B*35:03; AMELX; ENSG00000125363; CTA
MPLPPHPGH

SEQ ID NO: 9148 - protein, 9 aa, Homo sapiens
  Table A; Target 9148; HLA-B*51:01; AMELX; ENSG00000125363; CTA
MPLPPHPGH

SEQ ID NO: 9149 - protein, 9 aa, Homo sapiens
  Table A; Target 9149; HLA-B*54:01; AMELX; ENSG00000125363; CTA
MPLPPHPGH

SEQ ID NO: 9150 - protein, 9 aa, Homo sapiens
  Table A; Target 9150; HLA-B*55:01; AMELX; ENSG00000125363; CTA
MPLPPHPGH

SEQ ID NO: 9151 - protein, 10 aa, Homo sapiens
  Table A; Target 9151; HLA-B*54:01; AMELX; ENSG00000125363; CTA
MPLPPHPGHP

SEQ ID NO: 9152 - protein, 11 aa, Homo sapiens
  Table A; Target 9152; HLA-B*54:01; AMELX; ENSG00000125363; CTA
MPLPPHPGHPG

SEQ ID NO: 9153 - protein, 9 aa, Homo sapiens
  Table A; Target 9153; HLA-A*25:01; AMELX; ENSG00000125363; CTA
MPVPGQHSM

SEQ ID NO: 9154 - protein, 9 aa, Homo sapiens
  Table A; Target 9154; HLA-A*30:01; AMELX; ENSG00000125363; CTA
MPVPGQHSM

SEQ ID NO: 9155 - protein, 9 aa, Homo sapiens
  Table A; Target 9155; HLA-B*07:02; AMELX; ENSG00000125363; CTA
MPVPGQHSM

SEQ ID NO: 9156 - protein, 9 aa, Homo sapiens
  Table A; Target 9156; HLA-B*08:01; AMELX; ENSG00000125363; CTA
MPVPGQHSM

SEQ ID NO: 9157 - protein, 9 aa, Homo sapiens
  Table A; Target 9157; HLA-B*35:03; AMELX; ENSG00000125363; CTA
MPVPGQHSM

SEQ ID NO: 9158 - protein, 9 aa, Homo sapiens
  Table A; Target 9158; HLA-B*38:01; AMELX; ENSG00000125363; CTA
MPVPGQHSM

SEQ ID NO: 9159 - protein, 9 aa, Homo sapiens
  Table A; Target 9159; HLA-B*39:01; AMELX; ENSG00000125363; CTA
MPVPGQHSM

SEQ ID NO: 9160 - protein, 9 aa, Homo sapiens
  Table A; Target 9160; HLA-B*46:01; AMELX; ENSG00000125363; CTA
MPVPGQHSM

SEQ ID NO: 9161 - protein, 9 aa, Homo sapiens
  Table A; Target 9161; HLA-B*51:01; AMELX; ENSG00000125363; CTA
MPVPGQHSM

SEQ ID NO: 9162 - protein, 9 aa, Homo sapiens
  Table A; Target 9162; HLA-B*54:01; AMELX; ENSG00000125363; CTA
MPVPGQHSM

SEQ ID NO: 9163 - protein, 9 aa, Homo sapiens
  Table A; Target 9163; HLA-B*55:01; AMELX; ENSG00000125363; CTA
MPVPGQHSM

SEQ ID NO: 9164 - protein, 9 aa, Homo sapiens
  Table A; Target 9164; HLA-B*56:01; AMELX; ENSG00000125363; CTA
MPVPGQHSM

SEQ ID NO: 9165 - protein, 9 aa, Homo sapiens
  Table A; Target 9165; HLA-B*58:01; AMELX; ENSG00000125363; CTA
MPVPGQHSM

SEQ ID NO: 9166 - protein, 9 aa, Homo sapiens
  Table A; Target 9166; HLA-C*03:03; AMELX; ENSG00000125363; CTA
MPVPGQHSM

SEQ ID NO: 9167 - protein, 9 aa, Homo sapiens
  Table A; Target 9167; HLA-C*03:04; AMELX; ENSG00000125363; CTA
MPVPGQHSM

SEQ ID NO: 9168 - protein, 9 aa, Homo sapiens
  Table A; Target 9168; HLA-C*04:01; AMELX; ENSG00000125363; CTA
MPVPGQHSM

SEQ ID NO: 9169 - protein, 9 aa, Homo sapiens
  Table A; Target 9169; HLA-C*07:02; AMELX; ENSG00000125363; CTA
MPVPGQHSM

SEQ ID NO: 9170 - protein, 9 aa, Homo sapiens
  Table A; Target 9170; HLA-C*14:02; AMELX; ENSG00000125363; CTA
MPVPGQHSM

SEQ ID NO: 9171 - protein, 9 aa, Homo sapiens
  Table A; Target 9171; HLA-C*16:01; AMELX; ENSG00000125363; CTA
MPVPGQHSM

SEQ ID NO: 9172 - protein, 9 aa, Homo sapiens
  Table A; Target 9172; HLA-C*16:02; AMELX; ENSG00000125363; CTA
MPVPGQHSM

SEQ ID NO: 9173 - protein, 10 aa, Homo sapiens
  Table A; Target 9173; HLA-B*54:01; AMELX; ENSG00000125363; CTA
MPVPGQHSMT

SEQ ID NO: 9174 - protein, 11 aa, Homo sapiens
  Table A; Target 9174; HLA-B*54:01; AMELX; ENSG00000125363; CTA
MPVPGQHSMTP

SEQ ID NO: 9175 - protein, 11 aa, Homo sapiens
  Table A; Target 9175; HLA-B*55:01; AMELX; ENSG00000125363; CTA
MPVPGQHSMTP

SEQ ID NO: 9176 - protein, 11 aa, Homo sapiens
  Table A; Target 9176; HLA-B*56:01; AMELX; ENSG00000125363; CTA
MPVPGQHSMTP

SEQ ID NO: 9177 - protein, 8 aa, Homo sapiens
  Table A; Target 9177; HLA-B*13:02; AMELX; ENSG00000125363; CTA
MQPLPPML

SEQ ID NO: 9178 - protein, 10 aa, Homo sapiens
  Table A; Target 9178; HLA-A*02:07; AMELX; ENSG00000125363; CTA
MQPQPPVHPM

SEQ ID NO: 9179 - protein, 10 aa, Homo sapiens
  Table A; Target 9179; HLA-C*04:01; AMELX; ENSG00000125363; CTA
MQPQPPVHPM

SEQ ID NO: 9180 - protein, 10 aa, Homo sapiens
  Table A; Target 9180; HLA-C*06:02; AMELX; ENSG00000125363; CTA
MQPQPPVHPM

SEQ ID NO: 9181 - protein, 10 aa, Homo sapiens
  Table A; Target 9181; HLA-C*07:04; AMELX; ENSG00000125363; CTA
MQPQPPVHPM

SEQ ID NO: 9182 - protein, 9 aa, Homo sapiens
  Table A; Target 9182; HLA-C*01:02; AMELX; ENSG00000125363; CTA
NLPPPAQQP

SEQ ID NO: 9183 - protein, 10 aa, Homo sapiens
  Table A; Target 9183; HLA-A*01:01; AMELX; ENSG00000125363; CTA
NLPPPAQQPY

SEQ ID NO: 9184 - protein, 10 aa, Homo sapiens
  Table A; Target 9184; HLA-A*29:02; AMELX; ENSG00000125363; CTA
NLPPPAQQPY

SEQ ID NO: 9185 - protein, 10 aa, Homo sapiens
  Table A; Target 9185; HLA-A*30:02; AMELX; ENSG00000125363; CTA
NLPPPAQQPY

SEQ ID NO: 9186 - protein, 10 aa, Homo sapiens
  Table A; Target 9186; HLA-B*15:01; AMELX; ENSG00000125363; CTA
NLPPPAQQPY

SEQ ID NO: 9187 - protein, 10 aa, Homo sapiens
  Table A; Target 9187; HLA-B*46:01; AMELX; ENSG00000125363; CTA
NLPPPAQQPY

SEQ ID NO: 9188 - protein, 10 aa, Homo sapiens
  Table A; Target 9188; HLA-C*01:02; AMELX; ENSG00000125363; CTA
NLPPPAQQPY

SEQ ID NO: 9189 - protein, 10 aa, Homo sapiens
  Table A; Target 9189; HLA-C*14:02; AMELX; ENSG00000125363; CTA
NLPPPAQQPY

SEQ ID NO: 9190 - protein, 10 aa, Homo sapiens
  Table A; Target 9190; HLA-C*16:01; AMELX; ENSG00000125363; CTA
NLPPPAQQPY

SEQ ID NO: 9191 - protein, 9 aa, Homo sapiens
  Table A; Target 9191; HLA-A*02:07; AMELX; ENSG00000125363; CTA
PLPPMLPDL

SEQ ID NO: 9192 - protein, 11 aa, Homo sapiens
  Table A; Target 9192; HLA-A*24:02; AMELX; ENSG00000125363; CTA
PMMPVPGQHSM

SEQ ID NO: 9193 - protein, 11 aa, Homo sapiens
  Table A; Target 9193; HLA-A*29:02; AMELX; ENSG00000125363; CTA
PNLPPPAQQPY

SEQ ID NO: 9194 - protein, 11 aa, Homo sapiens
  Table A; Target 9194; HLA-A*30:02; AMELX; ENSG00000125363; CTA
PNLPPPAQQPY

SEQ ID NO: 9195 - protein, 11 aa, Homo sapiens
  Table A; Target 9195; HLA-B*07:02; AMELX; ENSG00000125363; CTA
PNLPPPAQQPY

SEQ ID NO: 9196 - protein, 11 aa, Homo sapiens
  Table A; Target 9196; HLA-C*04:01; AMELX; ENSG00000125363; CTA
PNLPPPAQQPY

SEQ ID NO: 9197 - protein, 11 aa, Homo sapiens
  Table A; Target 9197; HLA-C*07:02; AMELX; ENSG00000125363; CTA
PNLPPPAQQPY

SEQ ID NO: 9198 - protein, 9 aa, Homo sapiens
  Table A; Target 9198; HLA-B*07:02; AMELX; ENSG00000125363; CTA
PPMLPDLTL

SEQ ID NO: 9199 - protein, 9 aa, Homo sapiens
  Table A; Target 9199; HLA-B*35:03; AMELX; ENSG00000125363; CTA
PPMLPDLTL

SEQ ID NO: 9200 - protein, 9 aa, Homo sapiens
  Table A; Target 9200; HLA-C*04:01; AMELX; ENSG00000125363; CTA
PPQPPLPPM

SEQ ID NO: 9201 - protein, 9 aa, Homo sapiens
  Table A; Target 9201; HLA-A*24:02; AMELX; ENSG00000125363; CTA
PQPPLPPMF

SEQ ID NO: 9202 - protein, 9 aa, Homo sapiens
  Table A; Target 9202; HLA-A*23:01; AMELX; ENSG00000125363; CTA
PVIPQQPMM

SEQ ID NO: 9203 - protein, 8 aa, Homo sapiens
  Table A; Target 9203; HLA-B*07:02; AMELX; ENSG00000125363; CTA
PVPGQHSM

SEQ ID NO: 9204 - protein, 10 aa, Homo sapiens
  Table A; Target 9204; HLA-C*07:02; AMELX; ENSG00000125363; CTA
PVPGQHSMTP

SEQ ID NO: 9205 - protein, 8 aa, Homo sapiens
  Table A; Target 9205; HLA-B*38:01; AMELX; ENSG00000125363; CTA
QHPPTHTL

SEQ ID NO: 9206 - protein, 9 aa, Homo sapiens
  Table A; Target 9206; HLA-B*38:01; AMELX; ENSG00000125363; CTA
QHSMTPIQH

SEQ ID NO: 9207 - protein, 9 aa, Homo sapiens
  Table A; Target 9207; HLA-A*26:01; AMELX; ENSG00000125363; CTA
QIIPVLSQQ

SEQ ID NO: 9208 - protein, 9 aa, Homo sapiens
  Table A; Target 9208; HLA-A*31:01; AMELX; ENSG00000125363; CTA
QIIPVLSQQ

SEQ ID NO: 9209 - protein, 8 aa, Homo sapiens
  Table A; Target 9209; HLA-B*08:01; AMELX; ENSG00000125363; CTA
QPHHHIPV

SEQ ID NO: 9210 - protein, 9 aa, Homo sapiens
  Table A; Target 9210; HLA-B*07:02; AMELX; ENSG00000125363; CTA
QPHHHIPVV

SEQ ID NO: 9211 - protein, 9 aa, Homo sapiens
  Table A; Target 9211; HLA-B*51:01; AMELX; ENSG00000125363; CTA
QPHHHIPVV

SEQ ID NO: 9212 - protein, 9 aa, Homo sapiens
  Table A; Target 9212; HLA-B*54:01; AMELX; ENSG00000125363; CTA
QPHHHIPVV

SEQ ID NO: 9213 - protein, 9 aa, Homo sapiens
  Table A; Target 9213; HLA-B*55:01; AMELX; ENSG00000125363; CTA
QPHHHIPVV

SEQ ID NO: 9214 - protein, 9 aa, Homo sapiens
  Table A; Target 9214; HLA-B*56:01; AMELX; ENSG00000125363; CTA
QPHHHIPVV

SEQ ID NO: 9215 - protein, 11 aa, Homo sapiens
  Table A; Target 9215; HLA-B*54:01; AMELX; ENSG00000125363; CTA
QPHHHIPVVPA

SEQ ID NO: 9216 - protein, 9 aa, Homo sapiens
  Table A; Target 9216; HLA-A*23:01; AMELX; ENSG00000125363; CTA
QPLPPQPPL

SEQ ID NO: 9217 - protein, 9 aa, Homo sapiens
  Table A; Target 9217; HLA-B*07:02; AMELX; ENSG00000125363; CTA
QPLPPQPPL

SEQ ID NO: 9218 - protein, 9 aa, Homo sapiens
  Table A; Target 9218; HLA-B*35:01; AMELX; ENSG00000125363; CTA
QPLPPQPPL

SEQ ID NO: 9219 - protein, 9 aa, Homo sapiens
  Table A; Target 9219; HLA-B*35:03; AMELX; ENSG00000125363; CTA
QPLPPQPPL

SEQ ID NO: 9220 - protein, 9 aa, Homo sapiens
  Table A; Target 9220; HLA-B*51:01; AMELX; ENSG00000125363; CTA
QPLPPQPPL

SEQ ID NO: 9221 - protein, 9 aa, Homo sapiens
  Table A; Target 9221; HLA-B*54:01; AMELX; ENSG00000125363; CTA
QPLPPQPPL

SEQ ID NO: 9222 - protein, 9 aa, Homo sapiens
  Table A; Target 9222; HLA-B*55:01; AMELX; ENSG00000125363; CTA
QPLPPQPPL

SEQ ID NO: 9223 - protein, 9 aa, Homo sapiens
  Table A; Target 9223; HLA-B*56:01; AMELX; ENSG00000125363; CTA
QPLPPQPPL

SEQ ID NO: 9224 - protein, 9 aa, Homo sapiens
  Table A; Target 9224; HLA-B*58:01; AMELX; ENSG00000125363; CTA
QPLPPQPPL

SEQ ID NO: 9225 - protein, 9 aa, Homo sapiens
  Table A; Target 9225; HLA-C*03:03; AMELX; ENSG00000125363; CTA
QPLPPQPPL

SEQ ID NO: 9226 - protein, 9 aa, Homo sapiens
  Table A; Target 9226; HLA-C*03:04; AMELX; ENSG00000125363; CTA
QPLPPQPPL

SEQ ID NO: 9227 - protein, 9 aa, Homo sapiens
  Table A; Target 9227; HLA-C*04:01; AMELX; ENSG00000125363; CTA
QPLPPQPPL

SEQ ID NO: 9228 - protein, 9 aa, Homo sapiens
  Table A; Target 9228; HLA-C*07:02; AMELX; ENSG00000125363; CTA
QPLPPQPPL

SEQ ID NO: 9229 - protein, 9 aa, Homo sapiens
  Table A; Target 9229; HLA-B*07:02; AMELX; ENSG00000125363; CTA
QPMQPQPPV

SEQ ID NO: 9230 - protein, 9 aa, Homo sapiens
  Table A; Target 9230; HLA-B*35:01; AMELX; ENSG00000125363; CTA
QPMQPQPPV

SEQ ID NO: 9231 - protein, 9 aa, Homo sapiens
  Table A; Target 9231; HLA-B*35:03; AMELX; ENSG00000125363; CTA
QPMQPQPPV

SEQ ID NO: 9232 - protein, 9 aa, Homo sapiens
  Table A; Target 9232; HLA-B*51:01; AMELX; ENSG00000125363; CTA
QPMQPQPPV

SEQ ID NO: 9233 - protein, 9 aa, Homo sapiens
  Table A; Target 9233; HLA-B*54:01; AMELX; ENSG00000125363; CTA
QPMQPQPPV

SEQ ID NO: 9234 - protein, 9 aa, Homo sapiens
  Table A; Target 9234; HLA-B*55:01; AMELX; ENSG00000125363; CTA
QPMQPQPPV

SEQ ID NO: 9235 - protein, 9 aa, Homo sapiens
  Table A; Target 9235; HLA-B*56:01; AMELX; ENSG00000125363; CTA
QPMQPQPPV

SEQ ID NO: 9236 - protein, 9 aa, Homo sapiens
  Table A; Target 9236; HLA-C*04:01; AMELX; ENSG00000125363; CTA
QPMQPQPPV

SEQ ID NO: 9237 - protein, 9 aa, Homo sapiens
  Table A; Target 9237; HLA-C*07:02; AMELX; ENSG00000125363; CTA
QPMQPQPPV

SEQ ID NO: 9238 - protein, 10 aa, Homo sapiens
  Table A; Target 9238; HLA-B*56:01; AMELX; ENSG00000125363; CTA
QPMQPQPPVH

SEQ ID NO: 9239 - protein, 8 aa, Homo sapiens
  Table A; Target 9239; HLA-B*54:01; AMELX; ENSG00000125363; CTA
QPNLPPPA

SEQ ID NO: 9240 - protein, 8 aa, Homo sapiens
  Table A; Target 9240; HLA-B*55:01; AMELX; ENSG00000125363; CTA
QPNLPPPA

SEQ ID NO: 9241 - protein, 8 aa, Homo sapiens
  Table A; Target 9241; HLA-B*56:01; AMELX; ENSG00000125363; CTA
QPNLPPPA

SEQ ID NO: 9242 - protein, 9 aa, Homo sapiens
  Table A; Target 9242; HLA-B*07:02; AMELX; ENSG00000125363; CTA
QPNLPPPAQ

SEQ ID NO: 9243 - protein, 9 aa, Homo sapiens
  Table A; Target 9243; HLA-B*35:01; AMELX; ENSG00000125363; CTA
QPNLPPPAQ

SEQ ID NO: 9244 - protein, 9 aa, Homo sapiens
  Table A; Target 9244; HLA-B*54:01; AMELX; ENSG00000125363; CTA
QPNLPPPAQ

SEQ ID NO: 9245 - protein, 9 aa, Homo sapiens
  Table A; Target 9245; HLA-B*55:01; AMELX; ENSG00000125363; CTA
QPNLPPPAQ

SEQ ID NO: 9246 - protein, 9 aa, Homo sapiens
  Table A; Target 9246; HLA-B*56:01; AMELX; ENSG00000125363; CTA
QPNLPPPAQ

SEQ ID NO: 9247 - protein, 8 aa, Homo sapiens
  Table A; Target 9247; HLA-B*07:02; AMELX; ENSG00000125363; CTA
QPQPHQPM

SEQ ID NO: 9248 - protein, 8 aa, Homo sapiens
  Table A; Target 9248; HLA-B*08:01; AMELX; ENSG00000125363; CTA
QPQPHQPM

SEQ ID NO: 9249 - protein, 9 aa, Homo sapiens
  Table A; Target 9249; HLA-A*30:02; AMELX; ENSG00000125363; CTA
QPQPPVHPM

SEQ ID NO: 9250 - protein, 9 aa, Homo sapiens
  Table A; Target 9250; HLA-A*31:01; AMELX; ENSG00000125363; CTA
QPQPPVHPM

SEQ ID NO: 9251 - protein, 9 aa, Homo sapiens
  Table A; Target 9251; HLA-A*33:03; AMELX; ENSG00000125363; CTA
QPQPPVHPM

SEQ ID NO: 9252 - protein, 9 aa, Homo sapiens
  Table A; Target 9252; HLA-B*07:02; AMELX; ENSG00000125363; CTA
QPQPPVHPM

SEQ ID NO: 9253 - protein, 9 aa, Homo sapiens
  Table A; Target 9253; HLA-B*08:01; AMELX; ENSG00000125363; CTA
QPQPPVHPM

SEQ ID NO: 9254 - protein, 9 aa, Homo sapiens
  Table A; Target 9254; HLA-B*35:01; AMELX; ENSG00000125363; CTA
QPQPPVHPM

SEQ ID NO: 9255 - protein, 9 aa, Homo sapiens
  Table A; Target 9255; HLA-B*35:03; AMELX; ENSG00000125363; CTA
QPQPPVHPM

SEQ ID NO: 9256 - protein, 9 aa, Homo sapiens
  Table A; Target 9256; HLA-B*37:01; AMELX; ENSG00000125363; CTA
QPQPPVHPM

SEQ ID NO: 9257 - protein, 9 aa, Homo sapiens
  Table A; Target 9257; HLA-B*54:01; AMELX; ENSG00000125363; CTA
QPQPPVHPM

SEQ ID NO: 9258 - protein, 9 aa, Homo sapiens
  Table A; Target 9258; HLA-B*55:01; AMELX; ENSG00000125363; CTA
QPQPPVHPM

SEQ ID NO: 9259 - protein, 9 aa, Homo sapiens
  Table A; Target 9259; HLA-B*56:01; AMELX; ENSG00000125363; CTA
QPQPPVHPM

SEQ ID NO: 9260 - protein, 9 aa, Homo sapiens
  Table A; Target 9260; HLA-C*01:02; AMELX; ENSG00000125363; CTA
QPQPPVHPM

SEQ ID NO: 9261 - protein, 9 aa, Homo sapiens
  Table A; Target 9261; HLA-C*03:03; AMELX; ENSG00000125363; CTA
QPQPPVHPM

SEQ ID NO: 9262 - protein, 9 aa, Homo sapiens
  Table A; Target 9262; HLA-C*03:04; AMELX; ENSG00000125363; CTA
QPQPPVHPM

SEQ ID NO: 9263 - protein, 9 aa, Homo sapiens
  Table A; Target 9263; HLA-C*04:01; AMELX; ENSG00000125363; CTA
QPQPPVHPM

SEQ ID NO: 9264 - protein, 9 aa, Homo sapiens
  Table A; Target 9264; HLA-C*07:02; AMELX; ENSG00000125363; CTA
QPQPPVHPM

SEQ ID NO: 9265 - protein, 9 aa, Homo sapiens
  Table A; Target 9265; HLA-C*14:02; AMELX; ENSG00000125363; CTA
QPQPPVHPM

SEQ ID NO: 9266 - protein, 9 aa, Homo sapiens
  Table A; Target 9266; HLA-C*16:01; AMELX; ENSG00000125363; CTA
QPQPPVHPM

SEQ ID NO: 9267 - protein, 9 aa, Homo sapiens
  Table A; Target 9267; HLA-C*16:02; AMELX; ENSG00000125363; CTA
QPQPPVHPM

SEQ ID NO: 9268 - protein, 9 aa, Homo sapiens
  Table A; Target 9268; HLA-B*54:01; AMELX; ENSG00000125363; CTA
QPQPVQPQP

SEQ ID NO: 9269 - protein, 9 aa, Homo sapiens
  Table A; Target 9269; HLA-B*55:01; AMELX; ENSG00000125363; CTA
QPQPVQPQP

SEQ ID NO: 9270 - protein, 9 aa, Homo sapiens
  Table A; Target 9270; HLA-B*56:01; AMELX; ENSG00000125363; CTA
QPQPVQPQP

SEQ ID NO: 9271 - protein, 9 aa, Homo sapiens
  Table A; Target 9271; HLA-C*16:02; AMELX; ENSG00000125363; CTA
QPQPVQPQP

SEQ ID NO: 9272 - protein, 10 aa, Homo sapiens
  Table A; Target 9272; HLA-C*04:01; AMELX; ENSG00000125363; CTA
QPQPVQPQPH

SEQ ID NO: 9273 - protein, 9 aa, Homo sapiens
  Table A; Target 9273; HLA-B*07:02; AMELX; ENSG00000125363; CTA
QPVIPQQPM

SEQ ID NO: 9274 - protein, 9 aa, Homo sapiens
  Table A; Target 9274; HLA-B*35:01; AMELX; ENSG00000125363; CTA
QPVIPQQPM

SEQ ID NO: 9275 - protein, 9 aa, Homo sapiens
  Table A; Target 9275; HLA-B*35:03; AMELX; ENSG00000125363; CTA
QPVIPQQPM

SEQ ID NO: 9276 - protein, 9 aa, Homo sapiens
  Table A; Target 9276; HLA-B*54:01; AMELX; ENSG00000125363; CTA
QPVIPQQPM

SEQ ID NO: 9277 - protein, 9 aa, Homo sapiens
  Table A; Target 9277; HLA-B*55:01; AMELX; ENSG00000125363; CTA
QPVIPQQPM

SEQ ID NO: 9278 - protein, 9 aa, Homo sapiens
  Table A; Target 9278; HLA-B*56:01; AMELX; ENSG00000125363; CTA
QPVIPQQPM

SEQ ID NO: 9279 - protein, 9 aa, Homo sapiens
  Table A; Target 9279; HLA-C*01:02; AMELX; ENSG00000125363; CTA
QPVIPQQPM

SEQ ID NO: 9280 - protein, 9 aa, Homo sapiens
  Table A; Target 9280; HLA-C*03:03; AMELX; ENSG00000125363; CTA
QPVIPQQPM

SEQ ID NO: 9281 - protein, 9 aa, Homo sapiens
  Table A; Target 9281; HLA-C*03:04; AMELX; ENSG00000125363; CTA
QPVIPQQPM

SEQ ID NO: 9282 - protein, 9 aa, Homo sapiens
  Table A; Target 9282; HLA-C*07:01; AMELX; ENSG00000125363; CTA
QPVIPQQPM

SEQ ID NO: 9283 - protein, 9 aa, Homo sapiens
  Table A; Target 9283; HLA-C*07:02; AMELX; ENSG00000125363; CTA
QPVIPQQPM

SEQ ID NO: 9284 - protein, 9 aa, Homo sapiens
  Table A; Target 9284; HLA-C*07:04; AMELX; ENSG00000125363; CTA
QPVIPQQPM

SEQ ID NO: 9285 - protein, 9 aa, Homo sapiens
  Table A; Target 9285; HLA-C*16:01; AMELX; ENSG00000125363; CTA
QPVIPQQPM

SEQ ID NO: 9286 - protein, 10 aa, Homo sapiens
  Table A; Target 9286; HLA-B*35:03; AMELX; ENSG00000125363; CTA
QPVIPQQPMM

SEQ ID NO: 9287 - protein, 10 aa, Homo sapiens
  Table A; Target 9287; HLA-B*56:01; AMELX; ENSG00000125363; CTA
QPVQPQPHQP

SEQ ID NO: 9288 - protein, 11 aa, Homo sapiens
  Table A; Target 9288; HLA-B*35:01; AMELX; ENSG00000125363; CTA
QPVQPQPHQPM

SEQ ID NO: 9289 - protein, 11 aa, Homo sapiens
  Table A; Target 9289; HLA-B*35:03; AMELX; ENSG00000125363; CTA
QPVQPQPHQPM

SEQ ID NO: 9290 - protein, 11 aa, Homo sapiens
  Table A; Target 9290; HLA-B*55:01; AMELX; ENSG00000125363; CTA
QPVQPQPHQPM

SEQ ID NO: 9291 - protein, 8 aa, Homo sapiens
  Table A; Target 9291; HLA-B*51:01; AMELX; ENSG00000125363; CTA
QPYQPQPV

SEQ ID NO: 9292 - protein, 8 aa, Homo sapiens
  Table A; Target 9292; HLA-B*56:01; AMELX; ENSG00000125363; CTA
QPYQPQPV

SEQ ID NO: 9293 - protein, 9 aa, Homo sapiens
  Table A; Target 9293; HLA-B*35:01; AMELX; ENSG00000125363; CTA
QPYQPQPVQ

SEQ ID NO: 9294 - protein, 9 aa, Homo sapiens
  Table A; Target 9294; HLA-B*51:01; AMELX; ENSG00000125363; CTA
QPYQPQPVQ

SEQ ID NO: 9295 - protein, 9 aa, Homo sapiens
  Table A; Target 9295; HLA-B*54:01; AMELX; ENSG00000125363; CTA
QPYQPQPVQ

SEQ ID NO: 9296 - protein, 9 aa, Homo sapiens
  Table A; Target 9296; HLA-B*55:01; AMELX; ENSG00000125363; CTA
QPYQPQPVQ

SEQ ID NO: 9297 - protein, 9 aa, Homo sapiens
  Table A; Target 9297; HLA-B*56:01; AMELX; ENSG00000125363; CTA
QPYQPQPVQ

SEQ ID NO: 9298 - protein, 10 aa, Homo sapiens
  Table A; Target 9298; HLA-B*56:01; AMELX; ENSG00000125363; CTA
QPYQPQPVQP

SEQ ID NO: 9299 - protein, 9 aa, Homo sapiens
  Table A; Target 9299; HLA-A*02:01; AMELX; ENSG00000125363; CTA
QQHPPTHTL

SEQ ID NO: 9300 - protein, 9 aa, Homo sapiens
  Table A; Target 9300; HLA-A*02:03; AMELX; ENSG00000125363; CTA
QQHPPTHTL

SEQ ID NO: 9301 - protein, 9 aa, Homo sapiens
  Table A; Target 9301; HLA-A*02:04; AMELX; ENSG00000125363; CTA
QQHPPTHTL

SEQ ID NO: 9302 - protein, 9 aa, Homo sapiens
  Table A; Target 9302; HLA-A*02:07; AMELX; ENSG00000125363; CTA
QQHPPTHTL

SEQ ID NO: 9303 - protein, 9 aa, Homo sapiens
  Table A; Target 9303; HLA-A*23:01; AMELX; ENSG00000125363; CTA
QQHPPTHTL

SEQ ID NO: 9304 - protein, 9 aa, Homo sapiens
  Table A; Target 9304; HLA-A*24:02; AMELX; ENSG00000125363; CTA
QQHPPTHTL

SEQ ID NO: 9305 - protein, 9 aa, Homo sapiens
  Table A; Target 9305; HLA-A*25:01; AMELX; ENSG00000125363; CTA
QQHPPTHTL

SEQ ID NO: 9306 - protein, 9 aa, Homo sapiens
  Table A; Target 9306; HLA-A*30:01; AMELX; ENSG00000125363; CTA
QQHPPTHTL

SEQ ID NO: 9307 - protein, 9 aa, Homo sapiens
  Table A; Target 9307; HLA-A*30:02; AMELX; ENSG00000125363; CTA
QQHPPTHTL

SEQ ID NO: 9308 - protein, 9 aa, Homo sapiens
  Table A; Target 9308; HLA-A*31:01; AMELX; ENSG00000125363; CTA
QQHPPTHTL

SEQ ID NO: 9309 - protein, 9 aa, Homo sapiens
  Table A; Target 9309; HLA-A*32:01; AMELX; ENSG00000125363; CTA
QQHPPTHTL

SEQ ID NO: 9310 - protein, 9 aa, Homo sapiens
  Table A; Target 9310; HLA-A*68:02; AMELX; ENSG00000125363; CTA
QQHPPTHTL

SEQ ID NO: 9311 - protein, 9 aa, Homo sapiens
  Table A; Target 9311; HLA-B*07:02; AMELX; ENSG00000125363; CTA
QQHPPTHTL

SEQ ID NO: 9312 - protein, 9 aa, Homo sapiens
  Table A; Target 9312; HLA-B*08:01; AMELX; ENSG00000125363; CTA
QQHPPTHTL

SEQ ID NO: 9313 - protein, 9 aa, Homo sapiens
  Table A; Target 9313; HLA-B*13:02; AMELX; ENSG00000125363; CTA
QQHPPTHTL

SEQ ID NO: 9314 - protein, 9 aa, Homo sapiens
  Table A; Target 9314; HLA-B*15:01; AMELX; ENSG00000125363; CTA
QQHPPTHTL

SEQ ID NO: 9315 - protein, 9 aa, Homo sapiens
  Table A; Target 9315; HLA-B*15:03; AMELX; ENSG00000125363; CTA
QQHPPTHTL

SEQ ID NO: 9316 - protein, 9 aa, Homo sapiens
  Table A; Target 9316; HLA-B*18:01; AMELX; ENSG00000125363; CTA
QQHPPTHTL

SEQ ID NO: 9317 - protein, 9 aa, Homo sapiens
  Table A; Target 9317; HLA-B*27:05; AMELX; ENSG00000125363; CTA
QQHPPTHTL

SEQ ID NO: 9318 - protein, 9 aa, Homo sapiens
  Table A; Target 9318; HLA-B*35:01; AMELX; ENSG00000125363; CTA
QQHPPTHTL

SEQ ID NO: 9319 - protein, 9 aa, Homo sapiens
  Table A; Target 9319; HLA-B*35:03; AMELX; ENSG00000125363; CTA
QQHPPTHTL

SEQ ID NO: 9320 - protein, 9 aa, Homo sapiens
  Table A; Target 9320; HLA-B*37:01; AMELX; ENSG00000125363; CTA
QQHPPTHTL

SEQ ID NO: 9321 - protein, 9 aa, Homo sapiens
  Table A; Target 9321; HLA-B*38:01; AMELX; ENSG00000125363; CTA
QQHPPTHTL

SEQ ID NO: 9322 - protein, 9 aa, Homo sapiens
  Table A; Target 9322; HLA-B*39:01; AMELX; ENSG00000125363; CTA
QQHPPTHTL

SEQ ID NO: 9323 - protein, 9 aa, Homo sapiens
  Table A; Target 9323; HLA-B*40:01; AMELX; ENSG00000125363; CTA
QQHPPTHTL

SEQ ID NO: 9324 - protein, 9 aa, Homo sapiens
  Table A; Target 9324; HLA-B*40:02; AMELX; ENSG00000125363; CTA
QQHPPTHTL

SEQ ID NO: 9325 - protein, 9 aa, Homo sapiens
  Table A; Target 9325; HLA-B*44:02; AMELX; ENSG00000125363; CTA
QQHPPTHTL

SEQ ID NO: 9326 - protein, 9 aa, Homo sapiens
  Table A; Target 9326; HLA-B*44:03; AMELX; ENSG00000125363; CTA
QQHPPTHTL

SEQ ID NO: 9327 - protein, 9 aa, Homo sapiens
  Table A; Target 9327; HLA-B*46:01; AMELX; ENSG00000125363; CTA
QQHPPTHTL

SEQ ID NO: 9328 - protein, 9 aa, Homo sapiens
  Table A; Target 9328; HLA-B*49:01; AMELX; ENSG00000125363; CTA
QQHPPTHTL

SEQ ID NO: 9329 - protein, 9 aa, Homo sapiens
  Table A; Target 9329; HLA-B*51:01; AMELX; ENSG00000125363; CTA
QQHPPTHTL

SEQ ID NO: 9330 - protein, 9 aa, Homo sapiens
  Table A; Target 9330; HLA-B*55:01; AMELX; ENSG00000125363; CTA
QQHPPTHTL

SEQ ID NO: 9331 - protein, 9 aa, Homo sapiens
  Table A; Target 9331; HLA-B*57:01; AMELX; ENSG00000125363; CTA
QQHPPTHTL

SEQ ID NO: 9332 - protein, 9 aa, Homo sapiens
  Table A; Target 9332; HLA-B*58:01; AMELX; ENSG00000125363; CTA
QQHPPTHTL

SEQ ID NO: 9333 - protein, 9 aa, Homo sapiens
  Table A; Target 9333; HLA-C*01:02; AMELX; ENSG00000125363; CTA
QQHPPTHTL

SEQ ID NO: 9334 - protein, 9 aa, Homo sapiens
  Table A; Target 9334; HLA-C*02:02; AMELX; ENSG00000125363; CTA
QQHPPTHTL

SEQ ID NO: 9335 - protein, 9 aa, Homo sapiens
  Table A; Target 9335; HLA-C*03:03; AMELX; ENSG00000125363; CTA
QQHPPTHTL

SEQ ID NO: 9336 - protein, 9 aa, Homo sapiens
  Table A; Target 9336; HLA-C*03:04; AMELX; ENSG00000125363; CTA
QQHPPTHTL

SEQ ID NO: 9337 - protein, 9 aa, Homo sapiens
  Table A; Target 9337; HLA-C*04:01; AMELX; ENSG00000125363; CTA
QQHPPTHTL

SEQ ID NO: 9338 - protein, 9 aa, Homo sapiens
  Table A; Target 9338; HLA-C*05:01; AMELX; ENSG00000125363; CTA
QQHPPTHTL

SEQ ID NO: 9339 - protein, 9 aa, Homo sapiens
  Table A; Target 9339; HLA-C*06:02; AMELX; ENSG00000125363; CTA
QQHPPTHTL

SEQ ID NO: 9340 - protein, 9 aa, Homo sapiens
  Table A; Target 9340; HLA-C*07:02; AMELX; ENSG00000125363; CTA
QQHPPTHTL

SEQ ID NO: 9341 - protein, 9 aa, Homo sapiens
  Table A; Target 9341; HLA-C*07:04; AMELX; ENSG00000125363; CTA
QQHPPTHTL

SEQ ID NO: 9342 - protein, 9 aa, Homo sapiens
  Table A; Target 9342; HLA-C*12:03; AMELX; ENSG00000125363; CTA
QQHPPTHTL

SEQ ID NO: 9343 - protein, 9 aa, Homo sapiens
  Table A; Target 9343; HLA-C*14:02; AMELX; ENSG00000125363; CTA
QQHPPTHTL

SEQ ID NO: 9344 - protein, 9 aa, Homo sapiens
  Table A; Target 9344; HLA-C*16:01; AMELX; ENSG00000125363; CTA
QQHPPTHTL

SEQ ID NO: 9345 - protein, 9 aa, Homo sapiens
  Table A; Target 9345; HLA-C*16:02; AMELX; ENSG00000125363; CTA
QQHPPTHTL

SEQ ID NO: 9346 - protein, 9 aa, Homo sapiens
  Table A; Target 9346; HLA-C*16:04; AMELX; ENSG00000125363; CTA
QQHPPTHTL

SEQ ID NO: 9347 - protein, 9 aa, Homo sapiens
  Table A; Target 9347; HLA-B*13:02; AMELX; ENSG00000125363; CTA
QQPVIPQQP

SEQ ID NO: 9348 - protein, 10 aa, Homo sapiens
  Table A; Target 9348; HLA-B*15:01; AMELX; ENSG00000125363; CTA
QQPVIPQQPM

SEQ ID NO: 9349 - protein, 10 aa, Homo sapiens
  Table A; Target 9349; HLA-B*15:03; AMELX; ENSG00000125363; CTA
QQPVIPQQPM

SEQ ID NO: 9350 - protein, 10 aa, Homo sapiens
  Table A; Target 9350; HLA-C*07:04; AMELX; ENSG00000125363; CTA
QQPVIPQQPM

SEQ ID NO: 9351 - protein, 9 aa, Homo sapiens
  Table A; Target 9351; HLA-B*13:02; AMELX; ENSG00000125363; CTA
QQPYQPQPV

SEQ ID NO: 9352 - protein, 10 aa, Homo sapiens
  Table A; Target 9352; HLA-A*01:01; AMELX; ENSG00000125363; CTA
QSIRPPYPSY

SEQ ID NO: 9353 - protein, 10 aa, Homo sapiens
  Table A; Target 9353; HLA-A*25:01; AMELX; ENSG00000125363; CTA
QSIRPPYPSY

SEQ ID NO: 9354 - protein, 10 aa, Homo sapiens
  Table A; Target 9354; HLA-A*26:01; AMELX; ENSG00000125363; CTA
QSIRPPYPSY

SEQ ID NO: 9355 - protein, 10 aa, Homo sapiens
  Table A; Target 9355; HLA-A*29:02; AMELX; ENSG00000125363; CTA
QSIRPPYPSY

SEQ ID NO: 9356 - protein, 10 aa, Homo sapiens
  Table A; Target 9356; HLA-A*30:02; AMELX; ENSG00000125363; CTA
QSIRPPYPSY

SEQ ID NO: 9357 - protein, 10 aa, Homo sapiens
  Table A; Target 9357; HLA-B*57:01; AMELX; ENSG00000125363; CTA
QSIRPPYPSY

SEQ ID NO: 9358 - protein, 10 aa, Homo sapiens
  Table A; Target 9358; HLA-B*58:01; AMELX; ENSG00000125363; CTA
QSIRPPYPSY

SEQ ID NO: 9359 - protein, 10 aa, Homo sapiens
  Table A; Target 9359; HLA-C*06:02; AMELX; ENSG00000125363; CTA
QSIRPPYPSY

SEQ ID NO: 9360 - protein, 10 aa, Homo sapiens
  Table A; Target 9360; HLA-C*16:01; AMELX; ENSG00000125363; CTA
QSIRPPYPSY

SEQ ID NO: 9361 - protein, 10 aa, Homo sapiens
  Table A; Target 9361; HLA-C*16:02; AMELX; ENSG00000125363; CTA
QSIRPPYPSY

SEQ ID NO: 9362 - protein, 9 aa, Homo sapiens
  Table A; Target 9362; HLA-A*29:02; AMELX; ENSG00000125363; CTA
RPPYPSYGY

SEQ ID NO: 9363 - protein, 9 aa, Homo sapiens
  Table A; Target 9363; HLA-B*35:01; AMELX; ENSG00000125363; CTA
RPPYPSYGY

SEQ ID NO: 9364 - protein, 9 aa, Homo sapiens
  Table A; Target 9364; HLA-B*55:01; AMELX; ENSG00000125363; CTA
RPPYPSYGY

SEQ ID NO: 9365 - protein, 9 aa, Homo sapiens
  Table A; Target 9365; HLA-A*03:01; AMELX; ENSG00000125363; CTA
SIRPPYPSY

SEQ ID NO: 9366 - protein, 9 aa, Homo sapiens
  Table A; Target 9366; HLA-A*23:01; AMELX; ENSG00000125363; CTA
SIRPPYPSY

SEQ ID NO: 9367 - protein, 9 aa, Homo sapiens
  Table A; Target 9367; HLA-A*25:01; AMELX; ENSG00000125363; CTA
SIRPPYPSY

SEQ ID NO: 9368 - protein, 9 aa, Homo sapiens
  Table A; Target 9368; HLA-A*26:01; AMELX; ENSG00000125363; CTA
SIRPPYPSY

SEQ ID NO: 9369 - protein, 9 aa, Homo sapiens
  Table A; Target 9369; HLA-A*29:02; AMELX; ENSG00000125363; CTA
SIRPPYPSY

SEQ ID NO: 9370 - protein, 9 aa, Homo sapiens
  Table A; Target 9370; HLA-A*30:02; AMELX; ENSG00000125363; CTA
SIRPPYPSY

SEQ ID NO: 9371 - protein, 9 aa, Homo sapiens
  Table A; Target 9371; HLA-A*31:01; AMELX; ENSG00000125363; CTA
SIRPPYPSY

SEQ ID NO: 9372 - protein, 9 aa, Homo sapiens
  Table A; Target 9372; HLA-A*32:01; AMELX; ENSG00000125363; CTA
SIRPPYPSY

SEQ ID NO: 9373 - protein, 9 aa, Homo sapiens
  Table A; Target 9373; HLA-A*33:01; AMELX; ENSG00000125363; CTA
SIRPPYPSY

SEQ ID NO: 9374 - protein, 9 aa, Homo sapiens
  Table A; Target 9374; HLA-B*07:02; AMELX; ENSG00000125363; CTA
SIRPPYPSY

SEQ ID NO: 9375 - protein, 9 aa, Homo sapiens
  Table A; Target 9375; HLA-B*08:01; AMELX; ENSG00000125363; CTA
SIRPPYPSY

SEQ ID NO: 9376 - protein, 9 aa, Homo sapiens
  Table A; Target 9376; HLA-B*15:01; AMELX; ENSG00000125363; CTA
SIRPPYPSY

SEQ ID NO: 9377 - protein, 9 aa, Homo sapiens
  Table A; Target 9377; HLA-B*15:03; AMELX; ENSG00000125363; CTA
SIRPPYPSY

SEQ ID NO: 9378 - protein, 9 aa, Homo sapiens
  Table A; Target 9378; HLA-B*35:01; AMELX; ENSG00000125363; CTA
SIRPPYPSY

SEQ ID NO: 9379 - protein, 9 aa, Homo sapiens
  Table A; Target 9379; HLA-B*44:02; AMELX; ENSG00000125363; CTA
SIRPPYPSY

SEQ ID NO: 9380 - protein, 9 aa, Homo sapiens
  Table A; Target 9380; HLA-B*44:03; AMELX; ENSG00000125363; CTA
SIRPPYPSY

SEQ ID NO: 9381 - protein, 9 aa, Homo sapiens
  Table A; Target 9381; HLA-B*46:01; AMELX; ENSG00000125363; CTA
SIRPPYPSY

SEQ ID NO: 9382 - protein, 9 aa, Homo sapiens
  Table A; Target 9382; HLA-B*54:01; AMELX; ENSG00000125363; CTA
SIRPPYPSY

SEQ ID NO: 9383 - protein, 9 aa, Homo sapiens
  Table A; Target 9383; HLA-B*57:01; AMELX; ENSG00000125363; CTA
SIRPPYPSY

SEQ ID NO: 9384 - protein, 9 aa, Homo sapiens
  Table A; Target 9384; HLA-B*58:01; AMELX; ENSG00000125363; CTA
SIRPPYPSY

SEQ ID NO: 9385 - protein, 9 aa, Homo sapiens
  Table A; Target 9385; HLA-C*01:02; AMELX; ENSG00000125363; CTA
SIRPPYPSY

SEQ ID NO: 9386 - protein, 9 aa, Homo sapiens
  Table A; Target 9386; HLA-C*02:02; AMELX; ENSG00000125363; CTA
SIRPPYPSY

SEQ ID NO: 9387 - protein, 9 aa, Homo sapiens
  Table A; Target 9387; HLA-C*06:02; AMELX; ENSG00000125363; CTA
SIRPPYPSY

SEQ ID NO: 9388 - protein, 9 aa, Homo sapiens
  Table A; Target 9388; HLA-C*07:02; AMELX; ENSG00000125363; CTA
SIRPPYPSY

SEQ ID NO: 9389 - protein, 9 aa, Homo sapiens
  Table A; Target 9389; HLA-C*07:04; AMELX; ENSG00000125363; CTA
SIRPPYPSY

SEQ ID NO: 9390 - protein, 9 aa, Homo sapiens
  Table A; Target 9390; HLA-C*16:01; AMELX; ENSG00000125363; CTA
SIRPPYPSY

SEQ ID NO: 9391 - protein, 10 aa, Homo sapiens
  Table A; Target 9391; HLA-A*31:01; AMELX; ENSG00000125363; CTA
SIRPPYPSYG

SEQ ID NO: 9392 - protein, 11 aa, Homo sapiens
  Table A; Target 9392; HLA-A*29:02; AMELX; ENSG00000125363; CTA
SIRPPYPSYGY

SEQ ID NO: 9393 - protein, 11 aa, Homo sapiens
  Table A; Target 9393; HLA-A*30:02; AMELX; ENSG00000125363; CTA
SIRPPYPSYGY

SEQ ID NO: 9394 - protein, 11 aa, Homo sapiens
  Table A; Target 9394; HLA-A*31:01; AMELX; ENSG00000125363; CTA
SIRPPYPSYGY

SEQ ID NO: 9395 - protein, 10 aa, Homo sapiens
  Table A; Target 9395; HLA-B*15:01; AMELX; ENSG00000125363; CTA
SQQHPPTHTL

SEQ ID NO: 9396 - protein, 10 aa, Homo sapiens
  Table A; Target 9396; HLA-B*38:01; AMELX; ENSG00000125363; CTA
SQQHPPTHTL

SEQ ID NO: 9397 - protein, 10 aa, Homo sapiens
  Table A; Target 9397; HLA-B*39:01; AMELX; ENSG00000125363; CTA
SQQHPPTHTL

SEQ ID NO: 9398 - protein, 8 aa, Homo sapiens
  Table A; Target 9398; HLA-C*04:01; AMELX; ENSG00000125363; CTA
SYEVLTPL

SEQ ID NO: 9399 - protein, 8 aa, Homo sapiens
  Table A; Target 9399; HLA-C*14:02; AMELX; ENSG00000125363; CTA
SYEVLTPL

SEQ ID NO: 9400 - protein, 9 aa, Homo sapiens
  Table A; Target 9400; HLA-B*27:02; AMELX; ENSG00000125363; CTA
SYEVLTPLK

SEQ ID NO: 9401 - protein, 10 aa, Homo sapiens
  Table A; Target 9401; HLA-A*23:01; AMELX; ENSG00000125363; CTA
SYEVLTPLKW

SEQ ID NO: 9402 - protein, 10 aa, Homo sapiens
  Table A; Target 9402; HLA-A*24:02; AMELX; ENSG00000125363; CTA
SYEVLTPLKW

SEQ ID NO: 9403 - protein, 10 aa, Homo sapiens
  Table A; Target 9403; HLA-A*29:02; AMELX; ENSG00000125363; CTA
SYEVLTPLKW

SEQ ID NO: 9404 - protein, 10 aa, Homo sapiens
  Table A; Target 9404; HLA-B*44:02; AMELX; ENSG00000125363; CTA
SYEVLTPLKW

SEQ ID NO: 9405 - protein, 10 aa, Homo sapiens
  Table A; Target 9405; HLA-B*44:03; AMELX; ENSG00000125363; CTA
SYEVLTPLKW

SEQ ID NO: 9406 - protein, 10 aa, Homo sapiens
  Table A; Target 9406; HLA-B*57:01; AMELX; ENSG00000125363; CTA
SYEVLTPLKW

SEQ ID NO: 9407 - protein, 10 aa, Homo sapiens
  Table A; Target 9407; HLA-C*16:04; AMELX; ENSG00000125363; CTA
SYEVLTPLKW

SEQ ID NO: 9408 - protein, 10 aa, Homo sapiens
  Table A; Target 9408; HLA-A*03:02; AMELX; ENSG00000125363; CTA
TLEAWPSTDK

SEQ ID NO: 9409 - protein, 11 aa, Homo sapiens
  Table A; Target 9409; HLA-A*02:04; AMELX; ENSG00000125363; CTA
TLQPHHHIPVV

SEQ ID NO: 9410 - protein, 8 aa, Homo sapiens
  Table A; Target 9410; HLA-B*08:01; AMELX; ENSG00000125363; CTA
TPIQHHQP

SEQ ID NO: 9411 - protein, 10 aa, Homo sapiens
  Table A; Target 9411; HLA-B*07:02; AMELX; ENSG00000125363; CTA
TPIQHHQPNL

SEQ ID NO: 9412 - protein, 10 aa, Homo sapiens
  Table A; Target 9412; HLA-B*35:01; AMELX; ENSG00000125363; CTA
TPIQHHQPNL

SEQ ID NO: 9413 - protein, 10 aa, Homo sapiens
  Table A; Target 9413; HLA-B*35:03; AMELX; ENSG00000125363; CTA
TPIQHHQPNL

SEQ ID NO: 9414 - protein, 10 aa, Homo sapiens
  Table A; Target 9414; HLA-C*07:02; AMELX; ENSG00000125363; CTA
TPIQHHQPNL

SEQ ID NO: 9415 - protein, 9 aa, Homo sapiens
  Table A; Target 9415; HLA-B*08:01; AMELX; ENSG00000125363; CTA
TPLKWYQSI

SEQ ID NO: 9416 - protein, 9 aa, Homo sapiens
  Table A; Target 9416; HLA-B*51:01; AMELX; ENSG00000125363; CTA
TPLKWYQSI

SEQ ID NO: 9417 - protein, 9 aa, Homo sapiens
  Table A; Target 9417; HLA-B*54:01; AMELX; ENSG00000125363; CTA
TPLKWYQSI

SEQ ID NO: 9418 - protein, 8 aa, Homo sapiens
  Table A; Target 9418; HLA-B*07:02; AMELX; ENSG00000125363; CTA
VPAQQPVI

SEQ ID NO: 9419 - protein, 8 aa, Homo sapiens
  Table A; Target 9419; HLA-B*08:01; AMELX; ENSG00000125363; CTA
VPAQQPVI

SEQ ID NO: 9420 - protein, 8 aa, Homo sapiens
  Table A; Target 9420; HLA-B*35:03; AMELX; ENSG00000125363; CTA
VPAQQPVI

SEQ ID NO: 9421 - protein, 8 aa, Homo sapiens
  Table A; Target 9421; HLA-B*51:01; AMELX; ENSG00000125363; CTA
VPAQQPVI

SEQ ID NO: 9422 - protein, 8 aa, Homo sapiens
  Table A; Target 9422; HLA-B*55:01; AMELX; ENSG00000125363; CTA
VPAQQPVI

SEQ ID NO: 9423 - protein, 8 aa, Homo sapiens
  Table A; Target 9423; HLA-B*56:01; AMELX; ENSG00000125363; CTA
VPAQQPVI

SEQ ID NO: 9424 - protein, 9 aa, Homo sapiens
  Table A; Target 9424; HLA-B*56:01; AMELX; ENSG00000125363; CTA
VPAQQPVIP

SEQ ID NO: 9425 - protein, 9 aa, Homo sapiens
  Table A; Target 9425; HLA-A*32:01; AMELX; ENSG00000125363; CTA
VQPQPHQPM

SEQ ID NO: 9426 - protein, 9 aa, Homo sapiens
  Table A; Target 9426; HLA-B*07:02; AMELX; ENSG00000125363; CTA
VQPQPHQPM

SEQ ID NO: 9427 - protein, 9 aa, Homo sapiens
  Table A; Target 9427; HLA-B*08:01; AMELX; ENSG00000125363; CTA
VQPQPHQPM

SEQ ID NO: 9428 - protein, 9 aa, Homo sapiens
  Table A; Target 9428; HLA-B*15:01; AMELX; ENSG00000125363; CTA
VQPQPHQPM

SEQ ID NO: 9429 - protein, 9 aa, Homo sapiens
  Table A; Target 9429; HLA-B*15:03; AMELX; ENSG00000125363; CTA
VQPQPHQPM

SEQ ID NO: 9430 - protein, 9 aa, Homo sapiens
  Table A; Target 9430; HLA-B*37:01; AMELX; ENSG00000125363; CTA
VQPQPHQPM

SEQ ID NO: 9431 - protein, 9 aa, Homo sapiens
  Table A; Target 9431; HLA-B*46:01; AMELX; ENSG00000125363; CTA
VQPQPHQPM

SEQ ID NO: 9432 - protein, 9 aa, Homo sapiens
  Table A; Target 9432; HLA-C*01:02; AMELX; ENSG00000125363; CTA
VQPQPHQPM

SEQ ID NO: 9433 - protein, 9 aa, Homo sapiens
  Table A; Target 9433; HLA-C*03:04; AMELX; ENSG00000125363; CTA
VQPQPHQPM

SEQ ID NO: 9434 - protein, 9 aa, Homo sapiens
  Table A; Target 9434; HLA-C*07:04; AMELX; ENSG00000125363; CTA
VQPQPHQPM

SEQ ID NO: 9435 - protein, 9 aa, Homo sapiens
  Table A; Target 9435; HLA-C*14:02; AMELX; ENSG00000125363; CTA
VQPQPHQPM

SEQ ID NO: 9436 - protein, 9 aa, Homo sapiens
  Table A; Target 9436; HLA-C*16:01; AMELX; ENSG00000125363; CTA
VQPQPHQPM

SEQ ID NO: 9437 - protein, 9 aa, Homo sapiens
  Table A; Target 9437; HLA-A*02:07; AMELX; ENSG00000125363; CTA
VVPAQQPVI

SEQ ID NO: 9438 - protein, 9 aa, Homo sapiens
  Table A; Target 9438; HLA-A*23:01; AMELX; ENSG00000125363; CTA
VVPAQQPVI

SEQ ID NO: 9439 - protein, 9 aa, Homo sapiens
  Table A; Target 9439; HLA-A*24:02; AMELX; ENSG00000125363; CTA
VVPAQQPVI

SEQ ID NO: 9440 - protein, 9 aa, Homo sapiens
  Table A; Target 9440; HLA-B*13:02; AMELX; ENSG00000125363; CTA
VVPAQQPVI

SEQ ID NO: 9441 - protein, 9 aa, Homo sapiens
  Table A; Target 9441; HLA-B*51:01; AMELX; ENSG00000125363; CTA
VVPAQQPVI

SEQ ID NO: 9442 - protein, 9 aa, Homo sapiens
  Table A; Target 9442; HLA-A*29:02; AMELX; ENSG00000125363; CTA
WYQSIRPPY

SEQ ID NO: 9443 - protein, 9 aa, Homo sapiens
  Table A; Target 9443; HLA-A*30:02; AMELX; ENSG00000125363; CTA
WYQSIRPPY

SEQ ID NO: 9444 - protein, 8 aa, Homo sapiens
  Table A; Target 9444; HLA-B*18:01; AMELX; ENSG00000125363; CTA
YEVLTPLK

SEQ ID NO: 9445 - protein, 8 aa, Homo sapiens
  Table A; Target 9445; HLA-B*49:01; AMELX; ENSG00000125363; CTA
YEVLTPLK

SEQ ID NO: 9446 - protein, 9 aa, Homo sapiens
  Table A; Target 9446; HLA-A*24:02; AMELX; ENSG00000125363; CTA
YEVLTPLKW

SEQ ID NO: 9447 - protein, 9 aa, Homo sapiens
  Table A; Target 9447; HLA-A*30:01; AMELX; ENSG00000125363; CTA
YEVLTPLKW

SEQ ID NO: 9448 - protein, 9 aa, Homo sapiens
  Table A; Target 9448; HLA-B*18:01; AMELX; ENSG00000125363; CTA
YEVLTPLKW

SEQ ID NO: 9449 - protein, 9 aa, Homo sapiens
  Table A; Target 9449; HLA-B*40:02; AMELX; ENSG00000125363; CTA
YEVLTPLKW

SEQ ID NO: 9450 - protein, 9 aa, Homo sapiens
  Table A; Target 9450; HLA-B*44:02; AMELX; ENSG00000125363; CTA
YEVLTPLKW

SEQ ID NO: 9451 - protein, 9 aa, Homo sapiens
  Table A; Target 9451; HLA-B*44:03; AMELX; ENSG00000125363; CTA
YEVLTPLKW

SEQ ID NO: 9452 - protein, 9 aa, Homo sapiens
  Table A; Target 9452; HLA-B*49:01; AMELX; ENSG00000125363; CTA
YEVLTPLKW

SEQ ID NO: 9453 - protein, 9 aa, Homo sapiens
  Table A; Target 9453; HLA-B*57:01; AMELX; ENSG00000125363; CTA
YEVLTPLKW

SEQ ID NO: 9454 - protein, 9 aa, Homo sapiens
  Table A; Target 9454; HLA-C*16:04; AMELX; ENSG00000125363; CTA
YEVLTPLKW

SEQ ID NO: 9455 - protein, 10 aa, Homo sapiens
  Table A; Target 9455; HLA-B*44:02; AMELX; ENSG00000125363; CTA
YEVLTPLKWY

SEQ ID NO: 9456 - protein, 10 aa, Homo sapiens
  Table A; Target 9456; HLA-B*44:03; AMELX; ENSG00000125363; CTA
YEVLTPLKWY

SEQ ID NO: 9457 - protein, 10 aa, Homo sapiens
  Table A; Target 9457; HLA-C*07:01; AMELX; ENSG00000125363; CTA
YEVLTPLKWY

SEQ ID NO: 9458 - protein, 9 aa, Homo sapiens
  Table A; Target 9458; HLA-A*25:01; AMELX; ENSG00000125363; CTA
YGYEPMGGW

SEQ ID NO: 9459 - protein, 8 aa, Homo sapiens
  Table A; Target 9459; HLA-B*54:01; AMELX; ENSG00000125363; CTA
YPSYGYEP

SEQ ID NO: 9460 - protein, 9 aa, Homo sapiens
  Table A; Target 9460; HLA-B*27:02; AMELX; ENSG00000125363; CTA
YPSYGYEPM

SEQ ID NO: 9461 - protein, 9 aa, Homo sapiens
  Table A; Target 9461; HLA-B*35:01; AMELX; ENSG00000125363; CTA
YPSYGYEPM

SEQ ID NO: 9462 - protein, 9 aa, Homo sapiens
  Table A; Target 9462; HLA-B*35:03; AMELX; ENSG00000125363; CTA
YPSYGYEPM

SEQ ID NO: 9463 - protein, 9 aa, Homo sapiens
  Table A; Target 9463; HLA-B*54:01; AMELX; ENSG00000125363; CTA
YPSYGYEPM

SEQ ID NO: 9464 - protein, 9 aa, Homo sapiens
  Table A; Target 9464; HLA-B*55:01; AMELX; ENSG00000125363; CTA
YPSYGYEPM

SEQ ID NO: 9465 - protein, 8 aa, Homo sapiens
  Table A; Target 9465; HLA-A*32:01; AMELX; ENSG00000125363; CTA
YQSIRPPY

SEQ ID NO: 9466 - protein, 8 aa, Homo sapiens
  Table A; Target 9466; HLA-B*15:01; AMELX; ENSG00000125363; CTA
YQSIRPPY

SEQ ID NO: 9467 - protein, 8 aa, Homo sapiens
  Table A; Target 9467; HLA-B*15:03; AMELX; ENSG00000125363; CTA
YQSIRPPY

SEQ ID NO: 9468 - protein, 8 aa, Homo sapiens
  Table A; Target 9468; HLA-B*37:01; AMELX; ENSG00000125363; CTA
YQSIRPPY

SEQ ID NO: 9469 - protein, 8 aa, Homo sapiens
  Table A; Target 9469; HLA-C*07:04; AMELX; ENSG00000125363; CTA
YQSIRPPY

SEQ ID NO: 9470 - protein, 8 aa, Homo sapiens
  Table A; Target 9470; HLA-C*16:01; AMELX; ENSG00000125363; CTA
YQSIRPPY

SEQ ID NO: 9471 - protein, 8 aa, Homo sapiens
  Table A; Target 9471; HLA-C*16:02; AMELX; ENSG00000125363; CTA
YQSIRPPY

SEQ ID NO: 9472 - protein, 8 aa, Homo sapiens
  Table A; Target 9472; HLA-B*37:01; BPIFA2; ENSG00000131050; CTA
AEKLLNNV

SEQ ID NO: 9473 - protein, 8 aa, Homo sapiens
  Table A; Target 9473; HLA-B*40:02; BPIFA2; ENSG00000131050; CTA
AEKLLNNV

SEQ ID NO: 9474 - protein, 8 aa, Homo sapiens
  Table A; Target 9474; HLA-B*49:01; BPIFA2; ENSG00000131050; CTA
AEKLLNNV

SEQ ID NO: 9475 - protein, 9 aa, Homo sapiens
  Table A; Target 9475; HLA-A*30:01; BPIFA2; ENSG00000131050; CTA
AEKLLNNVI

SEQ ID NO: 9476 - protein, 9 aa, Homo sapiens
  Table A; Target 9476; HLA-B*13:02; BPIFA2; ENSG00000131050; CTA
AEKLLNNVI

SEQ ID NO: 9477 - protein, 9 aa, Homo sapiens
  Table A; Target 9477; HLA-B*18:01; BPIFA2; ENSG00000131050; CTA
AEKLLNNVI

SEQ ID NO: 9478 - protein, 9 aa, Homo sapiens
  Table A; Target 9478; HLA-B*27:02; BPIFA2; ENSG00000131050; CTA
AEKLLNNVI

SEQ ID NO: 9479 - protein, 9 aa, Homo sapiens
  Table A; Target 9479; HLA-B*37:01; BPIFA2; ENSG00000131050; CTA
AEKLLNNVI

SEQ ID NO: 9480 - protein, 9 aa, Homo sapiens
  Table A; Target 9480; HLA-B*40:01; BPIFA2; ENSG00000131050; CTA
AEKLLNNVI

SEQ ID NO: 9481 - protein, 9 aa, Homo sapiens
  Table A; Target 9481; HLA-B*40:02; BPIFA2; ENSG00000131050; CTA
AEKLLNNVI

SEQ ID NO: 9482 - protein, 9 aa, Homo sapiens
  Table A; Target 9482; HLA-B*44:02; BPIFA2; ENSG00000131050; CTA
AEKLLNNVI

SEQ ID NO: 9483 - protein, 9 aa, Homo sapiens
  Table A; Target 9483; HLA-B*44:03; BPIFA2; ENSG00000131050; CTA
AEKLLNNVI

SEQ ID NO: 9484 - protein, 9 aa, Homo sapiens
  Table A; Target 9484; HLA-B*49:01; BPIFA2; ENSG00000131050; CTA
AEKLLNNVI

SEQ ID NO: 9485 - protein, 9 aa, Homo sapiens
  Table A; Target 9485; HLA-C*06:02; BPIFA2; ENSG00000131050; CTA
AEKLLNNVI

SEQ ID NO: 9486 - protein, 9 aa, Homo sapiens
  Table A; Target 9486; HLA-C*07:01; BPIFA2; ENSG00000131050; CTA
AEKLLNNVI

SEQ ID NO: 9487 - protein, 9 aa, Homo sapiens
  Table A; Target 9487; HLA-C*07:02; BPIFA2; ENSG00000131050; CTA
AEKLLNNVI

SEQ ID NO: 9488 - protein, 9 aa, Homo sapiens
  Table A; Target 9488; HLA-C*12:03; BPIFA2; ENSG00000131050; CTA
AEKLLNNVI

SEQ ID NO: 9489 - protein, 9 aa, Homo sapiens
  Table A; Target 9489; HLA-C*16:04; BPIFA2; ENSG00000131050; CTA
AEKLLNNVI

SEQ ID NO: 9490 - protein, 10 aa, Homo sapiens
  Table A; Target 9490; HLA-B*40:02; BPIFA2; ENSG00000131050; CTA
AEKLLNNVIS

SEQ ID NO: 9491 - protein, 11 aa, Homo sapiens
  Table A; Target 9491; HLA-B*40:02; BPIFA2; ENSG00000131050; CTA
AEKLLNNVISK

SEQ ID NO: 9492 - protein, 11 aa, Homo sapiens
  Table A; Target 9492; HLA-B*44:02; BPIFA2; ENSG00000131050; CTA
AEKLLNNVISK

SEQ ID NO: 9493 - protein, 10 aa, Homo sapiens
  Table A; Target 9493; HLA-A*30:01; BPIFA2; ENSG00000131050; CTA
AEPIDDGKGL

SEQ ID NO: 9494 - protein, 10 aa, Homo sapiens
  Table A; Target 9494; HLA-B*27:02; BPIFA2; ENSG00000131050; CTA
AEPIDDGKGL

SEQ ID NO: 9495 - protein, 10 aa, Homo sapiens
  Table A; Target 9495; HLA-B*37:01; BPIFA2; ENSG00000131050; CTA
AEPIDDGKGL

SEQ ID NO: 9496 - protein, 10 aa, Homo sapiens
  Table A; Target 9496; HLA-B*40:01; BPIFA2; ENSG00000131050; CTA
AEPIDDGKGL

SEQ ID NO: 9497 - protein, 10 aa, Homo sapiens
  Table A; Target 9497; HLA-B*40:02; BPIFA2; ENSG00000131050; CTA
AEPIDDGKGL

SEQ ID NO: 9498 - protein, 10 aa, Homo sapiens
  Table A; Target 9498; HLA-B*44:02; BPIFA2; ENSG00000131050; CTA
AEPIDDGKGL

SEQ ID NO: 9499 - protein, 10 aa, Homo sapiens
  Table A; Target 9499; HLA-B*44:03; BPIFA2; ENSG00000131050; CTA
AEPIDDGKGL

SEQ ID NO: 9500 - protein, 10 aa, Homo sapiens
  Table A; Target 9500; HLA-B*49:01; BPIFA2; ENSG00000131050; CTA
AEPIDDGKGL

SEQ ID NO: 9501 - protein, 10 aa, Homo sapiens
  Table A; Target 9501; HLA-C*04:01; BPIFA2; ENSG00000131050; CTA
AEPIDDGKGL

SEQ ID NO: 9502 - protein, 10 aa, Homo sapiens
  Table A; Target 9502; HLA-C*16:04; BPIFA2; ENSG00000131050; CTA
AEPIDDGKGL

SEQ ID NO: 9503 - protein, 8 aa, Homo sapiens
  Table A; Target 9503; HLA-B*07:02; BPIFA2; ENSG00000131050; CTA
AGPIIGQI

SEQ ID NO: 9504 - protein, 8 aa, Homo sapiens
  Table A; Target 9504; HLA-B*51:01; BPIFA2; ENSG00000131050; CTA
AGPIIGQI

SEQ ID NO: 9505 - protein, 8 aa, Homo sapiens
  Table A; Target 9505; HLA-C*07:02; BPIFA2; ENSG00000131050; CTA
AGPIIGQI

SEQ ID NO: 9506 - protein, 9 aa, Homo sapiens
  Table A; Target 9506; HLA-B*13:02; BPIFA2; ENSG00000131050; CTA
AGPIIGQII

SEQ ID NO: 9507 - protein, 9 aa, Homo sapiens
  Table A; Target 9507; HLA-B*51:01; BPIFA2; ENSG00000131050; CTA
AGPIIGQII

SEQ ID NO: 9508 - protein, 9 aa, Homo sapiens
  Table A; Target 9508; HLA-C*01:02; BPIFA2; ENSG00000131050; CTA
AGPIIGQII

SEQ ID NO: 9509 - protein, 9 aa, Homo sapiens
  Table A; Target 9509; HLA-C*04:01; BPIFA2; ENSG00000131050; CTA
AGPIIGQII

SEQ ID NO: 9510 - protein, 9 aa, Homo sapiens
  Table A; Target 9510; HLA-C*06:02; BPIFA2; ENSG00000131050; CTA
AGPIIGQII

SEQ ID NO: 9511 - protein, 9 aa, Homo sapiens
  Table A; Target 9511; HLA-C*07:01; BPIFA2; ENSG00000131050; CTA
AGPIIGQII

SEQ ID NO: 9512 - protein, 9 aa, Homo sapiens
  Table A; Target 9512; HLA-C*07:02; BPIFA2; ENSG00000131050; CTA
AGPIIGQII

SEQ ID NO: 9513 - protein, 9 aa, Homo sapiens
  Table A; Target 9513; HLA-C*12:03; BPIFA2; ENSG00000131050; CTA
AGPIIGQII

SEQ ID NO: 9514 - protein, 11 aa, Homo sapiens
  Table A; Target 9514; HLA-A*02:04; BPIFA2; ENSG00000131050; CTA
AGPIIGQIINL

SEQ ID NO: 9515 - protein, 11 aa, Homo sapiens
  Table A; Target 9515; HLA-B*38:01; BPIFA2; ENSG00000131050; CTA
AKQKAQEAEKL

SEQ ID NO: 9516 - protein, 8 aa, Homo sapiens
  Table A; Target 9516; HLA-C*05:01; BPIFA2; ENSG00000131050; CTA
AQEAEKLL

SEQ ID NO: 9517 - protein, 9 aa, Homo sapiens
  Table A; Target 9517; HLA-A*01:01; BPIFA2; ENSG00000131050; CTA
ASDPTSISL

SEQ ID NO: 9518 - protein, 9 aa, Homo sapiens
  Table A; Target 9518; HLA-A*02:01; BPIFA2; ENSG00000131050; CTA
ASDPTSISL

SEQ ID NO: 9519 - protein, 9 aa, Homo sapiens
  Table A; Target 9519; HLA-A*02:07; BPIFA2; ENSG00000131050; CTA
ASDPTSISL

SEQ ID NO: 9520 - protein, 9 aa, Homo sapiens
  Table A; Target 9520; HLA-A*03:01; BPIFA2; ENSG00000131050; CTA
ASDPTSISL

SEQ ID NO: 9521 - protein, 9 aa, Homo sapiens
  Table A; Target 9521; HLA-A*03:02; BPIFA2; ENSG00000131050; CTA
ASDPTSISL

SEQ ID NO: 9522 - protein, 9 aa, Homo sapiens
  Table A; Target 9522; HLA-A*11:01; BPIFA2; ENSG00000131050; CTA
ASDPTSISL

SEQ ID NO: 9523 - protein, 9 aa, Homo sapiens
  Table A; Target 9523; HLA-A*25:01; BPIFA2; ENSG00000131050; CTA
ASDPTSISL

SEQ ID NO: 9524 - protein, 9 aa, Homo sapiens
  Table A; Target 9524; HLA-A*30:01; BPIFA2; ENSG00000131050; CTA
ASDPTSISL

SEQ ID NO: 9525 - protein, 9 aa, Homo sapiens
  Table A; Target 9525; HLA-A*31:01; BPIFA2; ENSG00000131050; CTA
ASDPTSISL

SEQ ID NO: 9526 - protein, 9 aa, Homo sapiens
  Table A; Target 9526; HLA-A*32:01; BPIFA2; ENSG00000131050; CTA
ASDPTSISL

SEQ ID NO: 9527 - protein, 9 aa, Homo sapiens
  Table A; Target 9527; HLA-A*68:01; BPIFA2; ENSG00000131050; CTA
ASDPTSISL

SEQ ID NO: 9528 - protein, 9 aa, Homo sapiens
  Table A; Target 9528; HLA-A*68:02; BPIFA2; ENSG00000131050; CTA
ASDPTSISL

SEQ ID NO: 9529 - protein, 9 aa, Homo sapiens
  Table A; Target 9529; HLA-B*07:02; BPIFA2; ENSG00000131050; CTA
ASDPTSISL

SEQ ID NO: 9530 - protein, 9 aa, Homo sapiens
  Table A; Target 9530; HLA-B*13:02; BPIFA2; ENSG00000131050; CTA
ASDPTSISL

SEQ ID NO: 9531 - protein, 9 aa, Homo sapiens
  Table A; Target 9531; HLA-B*15:01; BPIFA2; ENSG00000131050; CTA
ASDPTSISL

SEQ ID NO: 9532 - protein, 9 aa, Homo sapiens
  Table A; Target 9532; HLA-B*15:03; BPIFA2; ENSG00000131050; CTA
ASDPTSISL

SEQ ID NO: 9533 - protein, 9 aa, Homo sapiens
  Table A; Target 9533; HLA-B*27:02; BPIFA2; ENSG00000131050; CTA
ASDPTSISL

SEQ ID NO: 9534 - protein, 9 aa, Homo sapiens
  Table A; Target 9534; HLA-B*27:05; BPIFA2; ENSG00000131050; CTA
ASDPTSISL

SEQ ID NO: 9535 - protein, 9 aa, Homo sapiens
  Table A; Target 9535; HLA-B*35:01; BPIFA2; ENSG00000131050; CTA
ASDPTSISL

SEQ ID NO: 9536 - protein, 9 aa, Homo sapiens
  Table A; Target 9536; HLA-B*35:03; BPIFA2; ENSG00000131050; CTA
ASDPTSISL

SEQ ID NO: 9537 - protein, 9 aa, Homo sapiens
  Table A; Target 9537; HLA-B*38:01; BPIFA2; ENSG00000131050; CTA
ASDPTSISL

SEQ ID NO: 9538 - protein, 9 aa, Homo sapiens
  Table A; Target 9538; HLA-B*39:01; BPIFA2; ENSG00000131050; CTA
ASDPTSISL

SEQ ID NO: 9539 - protein, 9 aa, Homo sapiens
  Table A; Target 9539; HLA-B*40:01; BPIFA2; ENSG00000131050; CTA
ASDPTSISL

SEQ ID NO: 9540 - protein, 9 aa, Homo sapiens
  Table A; Target 9540; HLA-B*40:02; BPIFA2; ENSG00000131050; CTA
ASDPTSISL

SEQ ID NO: 9541 - protein, 9 aa, Homo sapiens
  Table A; Target 9541; HLA-B*44:02; BPIFA2; ENSG00000131050; CTA
ASDPTSISL

SEQ ID NO: 9542 - protein, 9 aa, Homo sapiens
  Table A; Target 9542; HLA-B*44:03; BPIFA2; ENSG00000131050; CTA
ASDPTSISL

SEQ ID NO: 9543 - protein, 9 aa, Homo sapiens
  Table A; Target 9543; HLA-B*46:01; BPIFA2; ENSG00000131050; CTA
ASDPTSISL

SEQ ID NO: 9544 - protein, 9 aa, Homo sapiens
  Table A; Target 9544; HLA-B*55:01; BPIFA2; ENSG00000131050; CTA
ASDPTSISL

SEQ ID NO: 9545 - protein, 9 aa, Homo sapiens
  Table A; Target 9545; HLA-B*57:01; BPIFA2; ENSG00000131050; CTA
ASDPTSISL

SEQ ID NO: 9546 - protein, 9 aa, Homo sapiens
  Table A; Target 9546; HLA-B*58:01; BPIFA2; ENSG00000131050; CTA
ASDPTSISL

SEQ ID NO: 9547 - protein, 9 aa, Homo sapiens
  Table A; Target 9547; HLA-C*01:02; BPIFA2; ENSG00000131050; CTA
ASDPTSISL

SEQ ID NO: 9548 - protein, 9 aa, Homo sapiens
  Table A; Target 9548; HLA-C*02:02; BPIFA2; ENSG00000131050; CTA
ASDPTSISL

SEQ ID NO: 9549 - protein, 9 aa, Homo sapiens
  Table A; Target 9549; HLA-C*03:03; BPIFA2; ENSG00000131050; CTA
ASDPTSISL

SEQ ID NO: 9550 - protein, 9 aa, Homo sapiens
  Table A; Target 9550; HLA-C*03:04; BPIFA2; ENSG00000131050; CTA
ASDPTSISL

SEQ ID NO: 9551 - protein, 9 aa, Homo sapiens
  Table A; Target 9551; HLA-C*04:01; BPIFA2; ENSG00000131050; CTA
ASDPTSISL

SEQ ID NO: 9552 - protein, 9 aa, Homo sapiens
  Table A; Target 9552; HLA-C*05:01; BPIFA2; ENSG00000131050; CTA
ASDPTSISL

SEQ ID NO: 9553 - protein, 9 aa, Homo sapiens
  Table A; Target 9553; HLA-C*06:02; BPIFA2; ENSG00000131050; CTA
ASDPTSISL

SEQ ID NO: 9554 - protein, 9 aa, Homo sapiens
  Table A; Target 9554; HLA-C*07:02; BPIFA2; ENSG00000131050; CTA
ASDPTSISL

SEQ ID NO: 9555 - protein, 9 aa, Homo sapiens
  Table A; Target 9555; HLA-C*07:04; BPIFA2; ENSG00000131050; CTA
ASDPTSISL

SEQ ID NO: 9556 - protein, 9 aa, Homo sapiens
  Table A; Target 9556; HLA-C*07:06; BPIFA2; ENSG00000131050; CTA
ASDPTSISL

SEQ ID NO: 9557 - protein, 9 aa, Homo sapiens
  Table A; Target 9557; HLA-C*12:03; BPIFA2; ENSG00000131050; CTA
ASDPTSISL

SEQ ID NO: 9558 - protein, 9 aa, Homo sapiens
  Table A; Target 9558; HLA-C*14:02; BPIFA2; ENSG00000131050; CTA
ASDPTSISL

SEQ ID NO: 9559 - protein, 9 aa, Homo sapiens
  Table A; Target 9559; HLA-C*16:01; BPIFA2; ENSG00000131050; CTA
ASDPTSISL

SEQ ID NO: 9560 - protein, 9 aa, Homo sapiens
  Table A; Target 9560; HLA-C*16:02; BPIFA2; ENSG00000131050; CTA
ASDPTSISL

SEQ ID NO: 9561 - protein, 9 aa, Homo sapiens
  Table A; Target 9561; HLA-C*16:04; BPIFA2; ENSG00000131050; CTA
ASDPTSISL

SEQ ID NO: 9562 - protein, 10 aa, Homo sapiens
  Table A; Target 9562; HLA-A*01:01; BPIFA2; ENSG00000131050; CTA
ASDPTSISLS

SEQ ID NO: 9563 - protein, 11 aa, Homo sapiens
  Table A; Target 9563; HLA-A*01:01; BPIFA2; ENSG00000131050; CTA
ASDPTSISLSL

SEQ ID NO: 9564 - protein, 11 aa, Homo sapiens
  Table A; Target 9564; HLA-A*02:07; BPIFA2; ENSG00000131050; CTA
ASDPTSISLSL

SEQ ID NO: 9565 - protein, 11 aa, Homo sapiens
  Table A; Target 9565; HLA-A*03:01; BPIFA2; ENSG00000131050; CTA
ASDPTSISLSL

SEQ ID NO: 9566 - protein, 11 aa, Homo sapiens
  Table A; Target 9566; HLA-A*03:02; BPIFA2; ENSG00000131050; CTA
ASDPTSISLSL

SEQ ID NO: 9567 - protein, 11 aa, Homo sapiens
  Table A; Target 9567; HLA-A*11:01; BPIFA2; ENSG00000131050; CTA
ASDPTSISLSL

SEQ ID NO: 9568 - protein, 11 aa, Homo sapiens
  Table A; Target 9568; HLA-A*68:01; BPIFA2; ENSG00000131050; CTA
ASDPTSISLSL

SEQ ID NO: 9569 - protein, 11 aa, Homo sapiens
  Table A; Target 9569; HLA-B*38:01; BPIFA2; ENSG00000131050; CTA
ASDPTSISLSL

SEQ ID NO: 9570 - protein, 11 aa, Homo sapiens
  Table A; Target 9570; HLA-B*40:01; BPIFA2; ENSG00000131050; CTA
ASDPTSISLSL

SEQ ID NO: 9571 - protein, 11 aa, Homo sapiens
  Table A; Target 9571; HLA-B*58:01; BPIFA2; ENSG00000131050; CTA
ASDPTSISLSL

SEQ ID NO: 9572 - protein, 11 aa, Homo sapiens
  Table A; Target 9572; HLA-C*03:03; BPIFA2; ENSG00000131050; CTA
ASDPTSISLSL

SEQ ID NO: 9573 - protein, 11 aa, Homo sapiens
  Table A; Target 9573; HLA-C*03:04; BPIFA2; ENSG00000131050; CTA
ASDPTSISLSL

SEQ ID NO: 9574 - protein, 11 aa, Homo sapiens
  Table A; Target 9574; HLA-C*05:01; BPIFA2; ENSG00000131050; CTA
ASDPTSISLSL

SEQ ID NO: 9575 - protein, 11 aa, Homo sapiens
  Table A; Target 9575; HLA-C*07:02; BPIFA2; ENSG00000131050; CTA
ASDPTSISLSL

SEQ ID NO: 9576 - protein, 11 aa, Homo sapiens
  Table A; Target 9576; HLA-C*12:03; BPIFA2; ENSG00000131050; CTA
ASDPTSISLSL

SEQ ID NO: 9577 - protein, 11 aa, Homo sapiens
  Table A; Target 9577; HLA-C*16:04; BPIFA2; ENSG00000131050; CTA
ASDPTSISLSL

SEQ ID NO: 9578 - protein, 9 aa, Homo sapiens
  Table A; Target 9578; HLA-A*01:01; BPIFA2; ENSG00000131050; CTA
ASLDLLTAV

SEQ ID NO: 9579 - protein, 9 aa, Homo sapiens
  Table A; Target 9579; HLA-A*02:01; BPIFA2; ENSG00000131050; CTA
ASLDLLTAV

SEQ ID NO: 9580 - protein, 9 aa, Homo sapiens
  Table A; Target 9580; HLA-A*02:03; BPIFA2; ENSG00000131050; CTA
ASLDLLTAV

SEQ ID NO: 9581 - protein, 9 aa, Homo sapiens
  Table A; Target 9581; HLA-A*02:04; BPIFA2; ENSG00000131050; CTA
ASLDLLTAV

SEQ ID NO: 9582 - protein, 9 aa, Homo sapiens
  Table A; Target 9582; HLA-A*02:07; BPIFA2; ENSG00000131050; CTA
ASLDLLTAV

SEQ ID NO: 9583 - protein, 9 aa, Homo sapiens
  Table A; Target 9583; HLA-A*03:01; BPIFA2; ENSG00000131050; CTA
ASLDLLTAV

SEQ ID NO: 9584 - protein, 9 aa, Homo sapiens
  Table A; Target 9584; HLA-A*03:02; BPIFA2; ENSG00000131050; CTA
ASLDLLTAV

SEQ ID NO: 9585 - protein, 9 aa, Homo sapiens
  Table A; Target 9585; HLA-A*11:01; BPIFA2; ENSG00000131050; CTA
ASLDLLTAV

SEQ ID NO: 9586 - protein, 9 aa, Homo sapiens
  Table A; Target 9586; HLA-A*23:01; BPIFA2; ENSG00000131050; CTA
ASLDLLTAV

SEQ ID NO: 9587 - protein, 9 aa, Homo sapiens
  Table A; Target 9587; HLA-A*30:01; BPIFA2; ENSG00000131050; CTA
ASLDLLTAV

SEQ ID NO: 9588 - protein, 9 aa, Homo sapiens
  Table A; Target 9588; HLA-A*31:01; BPIFA2; ENSG00000131050; CTA
ASLDLLTAV

SEQ ID NO: 9589 - protein, 9 aa, Homo sapiens
  Table A; Target 9589; HLA-A*32:01; BPIFA2; ENSG00000131050; CTA
ASLDLLTAV

SEQ ID NO: 9590 - protein, 9 aa, Homo sapiens
  Table A; Target 9590; HLA-A*68:02; BPIFA2; ENSG00000131050; CTA
ASLDLLTAV

SEQ ID NO: 9591 - protein, 9 aa, Homo sapiens
  Table A; Target 9591; HLA-B*13:02; BPIFA2; ENSG00000131050; CTA
ASLDLLTAV

SEQ ID NO: 9592 - protein, 9 aa, Homo sapiens
  Table A; Target 9592; HLA-B*15:01; BPIFA2; ENSG00000131050; CTA
ASLDLLTAV

SEQ ID NO: 9593 - protein, 9 aa, Homo sapiens
  Table A; Target 9593; HLA-B*15:03; BPIFA2; ENSG00000131050; CTA
ASLDLLTAV

SEQ ID NO: 9594 - protein, 9 aa, Homo sapiens
  Table A; Target 9594; HLA-B*27:05; BPIFA2; ENSG00000131050; CTA
ASLDLLTAV

SEQ ID NO: 9595 - protein, 9 aa, Homo sapiens
  Table A; Target 9595; HLA-B*39:01; BPIFA2; ENSG00000131050; CTA
ASLDLLTAV

SEQ ID NO: 9596 - protein, 9 aa, Homo sapiens
  Table A; Target 9596; HLA-B*40:01; BPIFA2; ENSG00000131050; CTA
ASLDLLTAV

SEQ ID NO: 9597 - protein, 9 aa, Homo sapiens
  Table A; Target 9597; HLA-B*40:02; BPIFA2; ENSG00000131050; CTA
ASLDLLTAV

SEQ ID NO: 9598 - protein, 9 aa, Homo sapiens
  Table A; Target 9598; HLA-B*46:01; BPIFA2; ENSG00000131050; CTA
ASLDLLTAV

SEQ ID NO: 9599 - protein, 9 aa, Homo sapiens
  Table A; Target 9599; HLA-B*49:01; BPIFA2; ENSG00000131050; CTA
ASLDLLTAV

SEQ ID NO: 9600 - protein, 9 aa, Homo sapiens
  Table A; Target 9600; HLA-B*54:01; BPIFA2; ENSG00000131050; CTA
ASLDLLTAV

SEQ ID NO: 9601 - protein, 9 aa, Homo sapiens
  Table A; Target 9601; HLA-B*55:01; BPIFA2; ENSG00000131050; CTA
ASLDLLTAV

SEQ ID NO: 9602 - protein, 9 aa, Homo sapiens
  Table A; Target 9602; HLA-B*56:01; BPIFA2; ENSG00000131050; CTA
ASLDLLTAV

SEQ ID NO: 9603 - protein, 9 aa, Homo sapiens
  Table A; Target 9603; HLA-B*58:01; BPIFA2; ENSG00000131050; CTA
ASLDLLTAV

SEQ ID NO: 9604 - protein, 9 aa, Homo sapiens
  Table A; Target 9604; HLA-C*01:02; BPIFA2; ENSG00000131050; CTA
ASLDLLTAV

SEQ ID NO: 9605 - protein, 9 aa, Homo sapiens
  Table A; Target 9605; HLA-C*02:02; BPIFA2; ENSG00000131050; CTA
ASLDLLTAV

SEQ ID NO: 9606 - protein, 9 aa, Homo sapiens
  Table A; Target 9606; HLA-C*03:03; BPIFA2; ENSG00000131050; CTA
ASLDLLTAV

SEQ ID NO: 9607 - protein, 9 aa, Homo sapiens
  Table A; Target 9607; HLA-C*03:04; BPIFA2; ENSG00000131050; CTA
ASLDLLTAV

SEQ ID NO: 9608 - protein, 9 aa, Homo sapiens
  Table A; Target 9608; HLA-C*04:01; BPIFA2; ENSG00000131050; CTA
ASLDLLTAV

SEQ ID NO: 9609 - protein, 9 aa, Homo sapiens
  Table A; Target 9609; HLA-C*06:02; BPIFA2; ENSG00000131050; CTA
ASLDLLTAV

SEQ ID NO: 9610 - protein, 9 aa, Homo sapiens
  Table A; Target 9610; HLA-C*07:01; BPIFA2; ENSG00000131050; CTA
ASLDLLTAV

SEQ ID NO: 9611 - protein, 9 aa, Homo sapiens
  Table A; Target 9611; HLA-C*07:02; BPIFA2; ENSG00000131050; CTA
ASLDLLTAV

SEQ ID NO: 9612 - protein, 9 aa, Homo sapiens
  Table A; Target 9612; HLA-C*12:03; BPIFA2; ENSG00000131050; CTA
ASLDLLTAV

SEQ ID NO: 9613 - protein, 9 aa, Homo sapiens
  Table A; Target 9613; HLA-C*14:02; BPIFA2; ENSG00000131050; CTA
ASLDLLTAV

SEQ ID NO: 9614 - protein, 9 aa, Homo sapiens
  Table A; Target 9614; HLA-C*16:02; BPIFA2; ENSG00000131050; CTA
ASLDLLTAV

SEQ ID NO: 9615 - protein, 9 aa, Homo sapiens
  Table A; Target 9615; HLA-C*16:04; BPIFA2; ENSG00000131050; CTA
ASLDLLTAV

SEQ ID NO: 9616 - protein, 11 aa, Homo sapiens
  Table A; Target 9616; HLA-A*23:01; BPIFA2; ENSG00000131050; CTA
ASLDLLTAVTI

SEQ ID NO: 9617 - protein, 11 aa, Homo sapiens
  Table A; Target 9617; HLA-B*13:02; BPIFA2; ENSG00000131050; CTA
ASLDLLTAVTI

SEQ ID NO: 9618 - protein, 11 aa, Homo sapiens
  Table A; Target 9618; HLA-B*57:01; BPIFA2; ENSG00000131050; CTA
ASLDLLTAVTI

SEQ ID NO: 9619 - protein, 11 aa, Homo sapiens
  Table A; Target 9619; HLA-B*58:01; BPIFA2; ENSG00000131050; CTA
ASLDLLTAVTI

SEQ ID NO: 9620 - protein, 11 aa, Homo sapiens
  Table A; Target 9620; HLA-C*04:01; BPIFA2; ENSG00000131050; CTA
ASLDLLTAVTI

SEQ ID NO: 9621 - protein, 11 aa, Homo sapiens
  Table A; Target 9621; HLA-C*12:03; BPIFA2; ENSG00000131050; CTA
ASLDLLTAVTI

SEQ ID NO: 9622 - protein, 8 aa, Homo sapiens
  Table A; Target 9622; HLA-C*04:01; BPIFA2; ENSG00000131050; CTA
AWQLAKQK

SEQ ID NO: 9623 - protein, 8 aa, Homo sapiens
  Table A; Target 9623; HLA-C*06:02; BPIFA2; ENSG00000131050; CTA
AWQLAKQK

SEQ ID NO: 9624 - protein, 8 aa, Homo sapiens
  Table A; Target 9624; HLA-B*51:01; BPIFA2; ENSG00000131050; CTA
CASDPTSI

SEQ ID NO: 9625 - protein, 8 aa, Homo sapiens
  Table A; Target 9625; HLA-C*05:01; BPIFA2; ENSG00000131050; CTA
CASDPTSI

SEQ ID NO: 9626 - protein, 8 aa, Homo sapiens
  Table A; Target 9626; HLA-C*12:03; BPIFA2; ENSG00000131050; CTA
CASDPTSI

SEQ ID NO: 9627 - protein, 10 aa, Homo sapiens
  Table A; Target 9627; HLA-A*03:01; BPIFA2; ENSG00000131050; CTA
CASDPTSISL

SEQ ID NO: 9628 - protein, 10 aa, Homo sapiens
  Table A; Target 9628; HLA-A*03:02; BPIFA2; ENSG00000131050; CTA
CASDPTSISL

SEQ ID NO: 9629 - protein, 10 aa, Homo sapiens
  Table A; Target 9629; HLA-A*11:01; BPIFA2; ENSG00000131050; CTA
CASDPTSISL

SEQ ID NO: 9630 - protein, 10 aa, Homo sapiens
  Table A; Target 9630; HLA-A*30:01; BPIFA2; ENSG00000131050; CTA
CASDPTSISL

SEQ ID NO: 9631 - protein, 10 aa, Homo sapiens
  Table A; Target 9631; HLA-A*68:01; BPIFA2; ENSG00000131050; CTA
CASDPTSISL

SEQ ID NO: 9632 - protein, 10 aa, Homo sapiens
  Table A; Target 9632; HLA-A*68:02; BPIFA2; ENSG00000131050; CTA
CASDPTSISL

SEQ ID NO: 9633 - protein, 10 aa, Homo sapiens
  Table A; Target 9633; HLA-B*07:02; BPIFA2; ENSG00000131050; CTA
CASDPTSISL

SEQ ID NO: 9634 - protein, 10 aa, Homo sapiens
  Table A; Target 9634; HLA-B*27:05; BPIFA2; ENSG00000131050; CTA
CASDPTSISL

SEQ ID NO: 9635 - protein, 10 aa, Homo sapiens
  Table A; Target 9635; HLA-B*35:03; BPIFA2; ENSG00000131050; CTA
CASDPTSISL

SEQ ID NO: 9636 - protein, 10 aa, Homo sapiens
  Table A; Target 9636; HLA-B*38:01; BPIFA2; ENSG00000131050; CTA
CASDPTSISL

SEQ ID NO: 9637 - protein, 10 aa, Homo sapiens
  Table A; Target 9637; HLA-B*39:01; BPIFA2; ENSG00000131050; CTA
CASDPTSISL

SEQ ID NO: 9638 - protein, 10 aa, Homo sapiens
  Table A; Target 9638; HLA-B*40:01; BPIFA2; ENSG00000131050; CTA
CASDPTSISL

SEQ ID NO: 9639 - protein, 10 aa, Homo sapiens
  Table A; Target 9639; HLA-B*55:01; BPIFA2; ENSG00000131050; CTA
CASDPTSISL

SEQ ID NO: 9640 - protein, 10 aa, Homo sapiens
  Table A; Target 9640; HLA-B*58:01; BPIFA2; ENSG00000131050; CTA
CASDPTSISL

SEQ ID NO: 9641 - protein, 10 aa, Homo sapiens
  Table A; Target 9641; HLA-C*01:02; BPIFA2; ENSG00000131050; CTA
CASDPTSISL

SEQ ID NO: 9642 - protein, 10 aa, Homo sapiens
  Table A; Target 9642; HLA-C*02:02; BPIFA2; ENSG00000131050; CTA
CASDPTSISL

SEQ ID NO: 9643 - protein, 10 aa, Homo sapiens
  Table A; Target 9643; HLA-C*03:03; BPIFA2; ENSG00000131050; CTA
CASDPTSISL

SEQ ID NO: 9644 - protein, 10 aa, Homo sapiens
  Table A; Target 9644; HLA-C*03:04; BPIFA2; ENSG00000131050; CTA
CASDPTSISL

SEQ ID NO: 9645 - protein, 10 aa, Homo sapiens
  Table A; Target 9645; HLA-C*05:01; BPIFA2; ENSG00000131050; CTA
CASDPTSISL

SEQ ID NO: 9646 - protein, 10 aa, Homo sapiens
  Table A; Target 9646; HLA-C*07:02; BPIFA2; ENSG00000131050; CTA
CASDPTSISL

SEQ ID NO: 9647 - protein, 10 aa, Homo sapiens
  Table A; Target 9647; HLA-C*07:04; BPIFA2; ENSG00000131050; CTA
CASDPTSISL

SEQ ID NO: 9648 - protein, 10 aa, Homo sapiens
  Table A; Target 9648; HLA-C*07:06; BPIFA2; ENSG00000131050; CTA
CASDPTSISL

SEQ ID NO: 9649 - protein, 10 aa, Homo sapiens
  Table A; Target 9649; HLA-C*12:03; BPIFA2; ENSG00000131050; CTA
CASDPTSISL

SEQ ID NO: 9650 - protein, 10 aa, Homo sapiens
  Table A; Target 9650; HLA-C*14:02; BPIFA2; ENSG00000131050; CTA
CASDPTSISL

SEQ ID NO: 9651 - protein, 10 aa, Homo sapiens
  Table A; Target 9651; HLA-C*16:02; BPIFA2; ENSG00000131050; CTA
CASDPTSISL

SEQ ID NO: 9652 - protein, 10 aa, Homo sapiens
  Table A; Target 9652; HLA-C*16:04; BPIFA2; ENSG00000131050; CTA
CASDPTSISL

SEQ ID NO: 9653 - protein, 11 aa, Homo sapiens
  Table A; Target 9653; HLA-C*07:01; BPIFA2; ENSG00000131050; CTA
CGVLTGTSESL

SEQ ID NO: 9654 - protein, 8 aa, Homo sapiens
  Table A; Target 9654; HLA-B*40:02; BPIFA2; ENSG00000131050; CTA
DDGKGLNL

SEQ ID NO: 9655 - protein, 8 aa, Homo sapiens
  Table A; Target 9655; HLA-C*07:01; BPIFA2; ENSG00000131050; CTA
DDGKGLNL

SEQ ID NO: 9656 - protein, 10 aa, Homo sapiens
  Table A; Target 9656; HLA-B*18:01; BPIFA2; ENSG00000131050; CTA
DDGKGLNLSF

SEQ ID NO: 9657 - protein, 10 aa, Homo sapiens
  Table A; Target 9657; HLA-B*44:03; BPIFA2; ENSG00000131050; CTA
DDGKGLNLSF

SEQ ID NO: 9658 - protein, 9 aa, Homo sapiens
  Table A; Target 9658; HLA-A*25:01; BPIFA2; ENSG00000131050; CTA
DGKGLNLSF

SEQ ID NO: 9659 - protein, 9 aa, Homo sapiens
  Table A; Target 9659; HLA-A*26:01; BPIFA2; ENSG00000131050; CTA
DGKGLNLSF

SEQ ID NO: 9660 - protein, 9 aa, Homo sapiens
  Table A; Target 9660; HLA-A*33:01; BPIFA2; ENSG00000131050; CTA
DGKGLNLSF

SEQ ID NO: 9661 - protein, 9 aa, Homo sapiens
  Table A; Target 9661; HLA-B*08:01; BPIFA2; ENSG00000131050; CTA
DGKGLNLSF

SEQ ID NO: 9662 - protein, 9 aa, Homo sapiens
  Table A; Target 9662; HLA-B*18:01; BPIFA2; ENSG00000131050; CTA
DGKGLNLSF

SEQ ID NO: 9663 - protein, 9 aa, Homo sapiens
  Table A; Target 9663; HLA-C*07:02; BPIFA2; ENSG00000131050; CTA
DGKGLNLSF

SEQ ID NO: 9664 - protein, 10 aa, Homo sapiens
  Table A; Target 9664; HLA-A*33:01; BPIFA2; ENSG00000131050; CTA
DIFGLKISNS

SEQ ID NO: 9665 - protein, 9 aa, Homo sapiens
  Table A; Target 9665; HLA-A*33:01; BPIFA2; ENSG00000131050; CTA
DKHSQIINK

SEQ ID NO: 9666 - protein, 11 aa, Homo sapiens
  Table A; Target 9666; HLA-A*25:01; BPIFA2; ENSG00000131050; CTA
DLGVLQKSSAW

SEQ ID NO: 9667 - protein, 11 aa, Homo sapiens
  Table A; Target 9667; HLA-C*07:01; BPIFA2; ENSG00000131050; CTA
DLGVLQKSSAW

SEQ ID NO: 9668 - protein, 8 aa, Homo sapiens
  Table A; Target 9668; HLA-A*23:01; BPIFA2; ENSG00000131050; CTA
DLLTAVTI

SEQ ID NO: 9669 - protein, 8 aa, Homo sapiens
  Table A; Target 9669; HLA-A*33:01; BPIFA2; ENSG00000131050; CTA
DLLTAVTI

SEQ ID NO: 9670 - protein, 8 aa, Homo sapiens
  Table A; Target 9670; HLA-B*08:01; BPIFA2; ENSG00000131050; CTA
DLLTAVTI

SEQ ID NO: 9671 - protein, 8 aa, Homo sapiens
  Table A; Target 9671; HLA-B*18:01; BPIFA2; ENSG00000131050; CTA
DLLTAVTI

SEQ ID NO: 9672 - protein, 8 aa, Homo sapiens
  Table A; Target 9672; HLA-B*35:03; BPIFA2; ENSG00000131050; CTA
DLLTAVTI

SEQ ID NO: 9673 - protein, 8 aa, Homo sapiens
  Table A; Target 9673; HLA-B*38:01; BPIFA2; ENSG00000131050; CTA
DLLTAVTI

SEQ ID NO: 9674 - protein, 8 aa, Homo sapiens
  Table A; Target 9674; HLA-B*51:01; BPIFA2; ENSG00000131050; CTA
DLLTAVTI

SEQ ID NO: 9675 - protein, 8 aa, Homo sapiens
  Table A; Target 9675; HLA-C*04:01; BPIFA2; ENSG00000131050; CTA
DLLTAVTI

SEQ ID NO: 9676 - protein, 8 aa, Homo sapiens
  Table A; Target 9676; HLA-C*07:01; BPIFA2; ENSG00000131050; CTA
DLLTAVTI

SEQ ID NO: 9677 - protein, 8 aa, Homo sapiens
  Table A; Target 9677; HLA-C*07:04; BPIFA2; ENSG00000131050; CTA
DLLTAVTI

SEQ ID NO: 9678 - protein, 10 aa, Homo sapiens
  Table A; Target 9678; HLA-C*07:01; BPIFA2; ENSG00000131050; CTA
DLLTAVTIET

SEQ ID NO: 9679 - protein, 8 aa, Homo sapiens
  Table A; Target 9679; HLA-B*27:02; BPIFA2; ENSG00000131050; CTA
DLSNVVDK

SEQ ID NO: 9680 - protein, 9 aa, Homo sapiens
  Table A; Target 9680; HLA-A*02:03; BPIFA2; ENSG00000131050; CTA
DLSNVVDKL

SEQ ID NO: 9681 - protein, 9 aa, Homo sapiens
  Table A; Target 9681; HLA-A*02:04; BPIFA2; ENSG00000131050; CTA
DLSNVVDKL

SEQ ID NO: 9682 - protein, 9 aa, Homo sapiens
  Table A; Target 9682; HLA-A*02:07; BPIFA2; ENSG00000131050; CTA
DLSNVVDKL

SEQ ID NO: 9683 - protein, 9 aa, Homo sapiens
  Table A; Target 9683; HLA-A*25:01; BPIFA2; ENSG00000131050; CTA
DLSNVVDKL

SEQ ID NO: 9684 - protein, 9 aa, Homo sapiens
  Table A; Target 9684; HLA-A*26:01; BPIFA2; ENSG00000131050; CTA
DLSNVVDKL

SEQ ID NO: 9685 - protein, 9 aa, Homo sapiens
  Table A; Target 9685; HLA-A*33:01; BPIFA2; ENSG00000131050; CTA
DLSNVVDKL

SEQ ID NO: 9686 - protein, 9 aa, Homo sapiens
  Table A; Target 9686; HLA-A*68:01; BPIFA2; ENSG00000131050; CTA
DLSNVVDKL

SEQ ID NO: 9687 - protein, 9 aa, Homo sapiens
  Table A; Target 9687; HLA-A*68:02; BPIFA2; ENSG00000131050; CTA
DLSNVVDKL

SEQ ID NO: 9688 - protein, 9 aa, Homo sapiens
  Table A; Target 9688; HLA-B*27:05; BPIFA2; ENSG00000131050; CTA
DLSNVVDKL

SEQ ID NO: 9689 - protein, 9 aa, Homo sapiens
  Table A; Target 9689; HLA-B*35:03; BPIFA2; ENSG00000131050; CTA
DLSNVVDKL

SEQ ID NO: 9690 - protein, 9 aa, Homo sapiens
  Table A; Target 9690; HLA-B*38:01; BPIFA2; ENSG00000131050; CTA
DLSNVVDKL

SEQ ID NO: 9691 - protein, 9 aa, Homo sapiens
  Table A; Target 9691; HLA-B*39:01; BPIFA2; ENSG00000131050; CTA
DLSNVVDKL

SEQ ID NO: 9692 - protein, 9 aa, Homo sapiens
  Table A; Target 9692; HLA-B*55:01; BPIFA2; ENSG00000131050; CTA
DLSNVVDKL

SEQ ID NO: 9693 - protein, 9 aa, Homo sapiens
  Table A; Target 9693; HLA-C*06:02; BPIFA2; ENSG00000131050; CTA
DLSNVVDKL

SEQ ID NO: 9694 - protein, 9 aa, Homo sapiens
  Table A; Target 9694; HLA-C*07:01; BPIFA2; ENSG00000131050; CTA
DNLGNDLSN

SEQ ID NO: 9695 - protein, 10 aa, Homo sapiens
  Table A; Target 9695; HLA-A*33:01; BPIFA2; ENSG00000131050; CTA
DNLGNDLSNV

SEQ ID NO: 9696 - protein, 10 aa, Homo sapiens
  Table A; Target 9696; HLA-C*07:01; BPIFA2; ENSG00000131050; CTA
DNLGNDLSNV

SEQ ID NO: 9697 - protein, 11 aa, Homo sapiens
  Table A; Target 9697; HLA-C*07:01; BPIFA2; ENSG00000131050; CTA
DNLGNDLSNVV

SEQ ID NO: 9698 - protein, 9 aa, Homo sapiens
  Table A; Target 9698; HLA-A*33:01; BPIFA2; ENSG00000131050; CTA
DNPQHKTQL

SEQ ID NO: 9699 - protein, 9 aa, Homo sapiens
  Table A; Target 9699; HLA-B*08:01; BPIFA2; ENSG00000131050; CTA
DNPQHKTQL

SEQ ID NO: 9700 - protein, 8 aa, Homo sapiens
  Table A; Target 9700; HLA-B*08:01; BPIFA2; ENSG00000131050; CTA
DNTLKGIL

SEQ ID NO: 9701 - protein, 10 aa, Homo sapiens
  Table A; Target 9701; HLA-A*33:01; BPIFA2; ENSG00000131050; CTA
DNTLKGILEK

SEQ ID NO: 9702 - protein, 8 aa, Homo sapiens
  Table A; Target 9702; HLA-B*08:01; BPIFA2; ENSG00000131050; CTA
DPQTHQPV

SEQ ID NO: 9703 - protein, 8 aa, Homo sapiens
  Table A; Target 9703; HLA-B*51:01; BPIFA2; ENSG00000131050; CTA
DPQTHQPV

SEQ ID NO: 9704 - protein, 8 aa, Homo sapiens
  Table A; Target 9704; HLA-C*07:01; BPIFA2; ENSG00000131050; CTA
DPQTHQPV

SEQ ID NO: 9705 - protein, 9 aa, Homo sapiens
  Table A; Target 9705; HLA-B*35:01; BPIFA2; ENSG00000131050; CTA
DPQTHQPVA

SEQ ID NO: 9706 - protein, 9 aa, Homo sapiens
  Table A; Target 9706; HLA-B*35:03; BPIFA2; ENSG00000131050; CTA
DPQTHQPVA

SEQ ID NO: 9707 - protein, 9 aa, Homo sapiens
  Table A; Target 9707; HLA-B*51:01; BPIFA2; ENSG00000131050; CTA
DPQTHQPVA

SEQ ID NO: 9708 - protein, 9 aa, Homo sapiens
  Table A; Target 9708; HLA-B*54:01; BPIFA2; ENSG00000131050; CTA
DPQTHQPVA

SEQ ID NO: 9709 - protein, 9 aa, Homo sapiens
  Table A; Target 9709; HLA-B*55:01; BPIFA2; ENSG00000131050; CTA
DPQTHQPVA

SEQ ID NO: 9710 - protein, 9 aa, Homo sapiens
  Table A; Target 9710; HLA-B*56:01; BPIFA2; ENSG00000131050; CTA
DPQTHQPVA

SEQ ID NO: 9711 - protein, 9 aa, Homo sapiens
  Table A; Target 9711; HLA-C*03:03; BPIFA2; ENSG00000131050; CTA
DPQTHQPVA

SEQ ID NO: 9712 - protein, 9 aa, Homo sapiens
  Table A; Target 9712; HLA-C*12:03; BPIFA2; ENSG00000131050; CTA
DPQTHQPVA

SEQ ID NO: 9713 - protein, 10 aa, Homo sapiens
  Table A; Target 9713; HLA-B*07:02; BPIFA2; ENSG00000131050; CTA
DPQTHQPVAV

SEQ ID NO: 9714 - protein, 10 aa, Homo sapiens
  Table A; Target 9714; HLA-B*35:03; BPIFA2; ENSG00000131050; CTA
DPQTHQPVAV

SEQ ID NO: 9715 - protein, 10 aa, Homo sapiens
  Table A; Target 9715; HLA-B*51:01; BPIFA2; ENSG00000131050; CTA
DPQTHQPVAV

SEQ ID NO: 9716 - protein, 10 aa, Homo sapiens
  Table A; Target 9716; HLA-B*54:01; BPIFA2; ENSG00000131050; CTA
DPQTHQPVAV

SEQ ID NO: 9717 - protein, 10 aa, Homo sapiens
  Table A; Target 9717; HLA-B*56:01; BPIFA2; ENSG00000131050; CTA
DPQTHQPVAV

SEQ ID NO: 9718 - protein, 10 aa, Homo sapiens
  Table A; Target 9718; HLA-C*07:02; BPIFA2; ENSG00000131050; CTA
DPQTHQPVAV

SEQ ID NO: 9719 - protein, 11 aa, Homo sapiens
  Table A; Target 9719; HLA-B*35:03; BPIFA2; ENSG00000131050; CTA
DPQTHQPVAVL

SEQ ID NO: 9720 - protein, 9 aa, Homo sapiens
  Table A; Target 9720; HLA-A*23:01; BPIFA2; ENSG00000131050; CTA
DPTSISLSL

SEQ ID NO: 9721 - protein, 9 aa, Homo sapiens
  Table A; Target 9721; HLA-A*25:01; BPIFA2; ENSG00000131050; CTA
DPTSISLSL

SEQ ID NO: 9722 - protein, 9 aa, Homo sapiens
  Table A; Target 9722; HLA-A*26:01; BPIFA2; ENSG00000131050; CTA
DPTSISLSL

SEQ ID NO: 9723 - protein, 9 aa, Homo sapiens
  Table A; Target 9723; HLA-A*33:03; BPIFA2; ENSG00000131050; CTA
DPTSISLSL

SEQ ID NO: 9724 - protein, 9 aa, Homo sapiens
  Table A; Target 9724; HLA-A*68:01; BPIFA2; ENSG00000131050; CTA
DPTSISLSL

SEQ ID NO: 9725 - protein, 9 aa, Homo sapiens
  Table A; Target 9725; HLA-A*68:02; BPIFA2; ENSG00000131050; CTA
DPTSISLSL

SEQ ID NO: 9726 - protein, 9 aa, Homo sapiens
  Table A; Target 9726; HLA-B*07:02; BPIFA2; ENSG00000131050; CTA
DPTSISLSL

SEQ ID NO: 9727 - protein, 9 aa, Homo sapiens
  Table A; Target 9727; HLA-B*08:01; BPIFA2; ENSG00000131050; CTA
DPTSISLSL

SEQ ID NO: 9728 - protein, 9 aa, Homo sapiens
  Table A; Target 9728; HLA-B*18:01; BPIFA2; ENSG00000131050; CTA
DPTSISLSL

SEQ ID NO: 9729 - protein, 9 aa, Homo sapiens
  Table A; Target 9729; HLA-B*35:01; BPIFA2; ENSG00000131050; CTA
DPTSISLSL

SEQ ID NO: 9730 - protein, 9 aa, Homo sapiens
  Table A; Target 9730; HLA-B*35:03; BPIFA2; ENSG00000131050; CTA
DPTSISLSL

SEQ ID NO: 9731 - protein, 9 aa, Homo sapiens
  Table A; Target 9731; HLA-B*38:01; BPIFA2; ENSG00000131050; CTA
DPTSISLSL

SEQ ID NO: 9732 - protein, 9 aa, Homo sapiens
  Table A; Target 9732; HLA-B*39:01; BPIFA2; ENSG00000131050; CTA
DPTSISLSL

SEQ ID NO: 9733 - protein, 9 aa, Homo sapiens
  Table A; Target 9733; HLA-B*51:01; BPIFA2; ENSG00000131050; CTA
DPTSISLSL

SEQ ID NO: 9734 - protein, 9 aa, Homo sapiens
  Table A; Target 9734; HLA-B*54:01; BPIFA2; ENSG00000131050; CTA
DPTSISLSL

SEQ ID NO: 9735 - protein, 9 aa, Homo sapiens
  Table A; Target 9735; HLA-B*55:01; BPIFA2; ENSG00000131050; CTA
DPTSISLSL

SEQ ID NO: 9736 - protein, 9 aa, Homo sapiens
  Table A; Target 9736; HLA-B*56:01; BPIFA2; ENSG00000131050; CTA
DPTSISLSL

SEQ ID NO: 9737 - protein, 9 aa, Homo sapiens
  Table A; Target 9737; HLA-C*07:02; BPIFA2; ENSG00000131050; CTA
DPTSISLSL

SEQ ID NO: 9738 - protein, 9 aa, Homo sapiens
  Table A; Target 9738; HLA-C*07:06; BPIFA2; ENSG00000131050; CTA
DPTSISLSL

SEQ ID NO: 9739 - protein, 10 aa, Homo sapiens
  Table A; Target 9739; HLA-A*25:01; BPIFA2; ENSG00000131050; CTA
DPTSISLSLL

SEQ ID NO: 9740 - protein, 10 aa, Homo sapiens
  Table A; Target 9740; HLA-B*35:01; BPIFA2; ENSG00000131050; CTA
DPTSISLSLL

SEQ ID NO: 9741 - protein, 10 aa, Homo sapiens
  Table A; Target 9741; HLA-B*35:03; BPIFA2; ENSG00000131050; CTA
DPTSISLSLL

SEQ ID NO: 9742 - protein, 10 aa, Homo sapiens
  Table A; Target 9742; HLA-C*07:01; BPIFA2; ENSG00000131050; CTA
DPTSISLSLL

SEQ ID NO: 9743 - protein, 11 aa, Homo sapiens
  Table A; Target 9743; HLA-A*33:01; BPIFA2; ENSG00000131050; CTA
DVKAEPIDDGK

SEQ ID NO: 9744 - protein, 11 aa, Homo sapiens
  Table A; Target 9744; HLA-A*33:03; BPIFA2; ENSG00000131050; CTA
DVKAEPIDDGK

SEQ ID NO: 9745 - protein, 11 aa, Homo sapiens
  Table A; Target 9745; HLA-A*68:01; BPIFA2; ENSG00000131050; CTA
DVKAEPIDDGK

SEQ ID NO: 9746 - protein, 8 aa, Homo sapiens
  Table A; Target 9746; HLA-A*25:01; BPIFA2; ENSG00000131050; CTA
DVNVIQQV

SEQ ID NO: 9747 - protein, 8 aa, Homo sapiens
  Table A; Target 9747; HLA-A*26:01; BPIFA2; ENSG00000131050; CTA
DVNVIQQV

SEQ ID NO: 9748 - protein, 8 aa, Homo sapiens
  Table A; Target 9748; HLA-A*33:01; BPIFA2; ENSG00000131050; CTA
DVNVIQQV

SEQ ID NO: 9749 - protein, 8 aa, Homo sapiens
  Table A; Target 9749; HLA-A*68:02; BPIFA2; ENSG00000131050; CTA
DVNVIQQV

SEQ ID NO: 9750 - protein, 8 aa, Homo sapiens
  Table A; Target 9750; HLA-B*08:01; BPIFA2; ENSG00000131050; CTA
DVNVIQQV

SEQ ID NO: 9751 - protein, 8 aa, Homo sapiens
  Table A; Target 9751; HLA-B*18:01; BPIFA2; ENSG00000131050; CTA
DVNVIQQV

SEQ ID NO: 9752 - protein, 8 aa, Homo sapiens
  Table A; Target 9752; HLA-B*40:02; BPIFA2; ENSG00000131050; CTA
DVNVIQQV

SEQ ID NO: 9753 - protein, 8 aa, Homo sapiens
  Table A; Target 9753; HLA-B*51:01; BPIFA2; ENSG00000131050; CTA
DVNVIQQV

SEQ ID NO: 9754 - protein, 8 aa, Homo sapiens
  Table A; Target 9754; HLA-C*04:01; BPIFA2; ENSG00000131050; CTA
DVNVIQQV

SEQ ID NO: 9755 - protein, 8 aa, Homo sapiens
  Table A; Target 9755; HLA-C*06:02; BPIFA2; ENSG00000131050; CTA
DVNVIQQV

SEQ ID NO: 9756 - protein, 8 aa, Homo sapiens
  Table A; Target 9756; HLA-C*07:01; BPIFA2; ENSG00000131050; CTA
DVNVIQQV

SEQ ID NO: 9757 - protein, 8 aa, Homo sapiens
  Table A; Target 9757; HLA-C*07:06; BPIFA2; ENSG00000131050; CTA
DVNVIQQV

SEQ ID NO: 9758 - protein, 8 aa, Homo sapiens
  Table A; Target 9758; HLA-C*12:03; BPIFA2; ENSG00000131050; CTA
DVNVIQQV

SEQ ID NO: 9759 - protein, 9 aa, Homo sapiens
  Table A; Target 9759; HLA-A*25:01; BPIFA2; ENSG00000131050; CTA
DVNVIQQVV

SEQ ID NO: 9760 - protein, 9 aa, Homo sapiens
  Table A; Target 9760; HLA-A*26:01; BPIFA2; ENSG00000131050; CTA
DVNVIQQVV

SEQ ID NO: 9761 - protein, 9 aa, Homo sapiens
  Table A; Target 9761; HLA-A*32:01; BPIFA2; ENSG00000131050; CTA
DVNVIQQVV

SEQ ID NO: 9762 - protein, 9 aa, Homo sapiens
  Table A; Target 9762; HLA-A*33:01; BPIFA2; ENSG00000131050; CTA
DVNVIQQVV

SEQ ID NO: 9763 - protein, 9 aa, Homo sapiens
  Table A; Target 9763; HLA-A*33:03; BPIFA2; ENSG00000131050; CTA
DVNVIQQVV

SEQ ID NO: 9764 - protein, 9 aa, Homo sapiens
  Table A; Target 9764; HLA-A*68:01; BPIFA2; ENSG00000131050; CTA
DVNVIQQVV

SEQ ID NO: 9765 - protein, 9 aa, Homo sapiens
  Table A; Target 9765; HLA-A*68:02; BPIFA2; ENSG00000131050; CTA
DVNVIQQVV

SEQ ID NO: 9766 - protein, 9 aa, Homo sapiens
  Table A; Target 9766; HLA-B*08:01; BPIFA2; ENSG00000131050; CTA
DVNVIQQVV

SEQ ID NO: 9767 - protein, 9 aa, Homo sapiens
  Table A; Target 9767; HLA-B*13:02; BPIFA2; ENSG00000131050; CTA
DVNVIQQVV

SEQ ID NO: 9768 - protein, 9 aa, Homo sapiens
  Table A; Target 9768; HLA-B*18:01; BPIFA2; ENSG00000131050; CTA
DVNVIQQVV

SEQ ID NO: 9769 - protein, 9 aa, Homo sapiens
  Table A; Target 9769; HLA-B*27:05; BPIFA2; ENSG00000131050; CTA
DVNVIQQVV

SEQ ID NO: 9770 - protein, 9 aa, Homo sapiens
  Table A; Target 9770; HLA-B*35:01; BPIFA2; ENSG00000131050; CTA
DVNVIQQVV

SEQ ID NO: 9771 - protein, 9 aa, Homo sapiens
  Table A; Target 9771; HLA-B*35:03; BPIFA2; ENSG00000131050; CTA
DVNVIQQVV

SEQ ID NO: 9772 - protein, 9 aa, Homo sapiens
  Table A; Target 9772; HLA-B*38:01; BPIFA2; ENSG00000131050; CTA
DVNVIQQVV

SEQ ID NO: 9773 - protein, 9 aa, Homo sapiens
  Table A; Target 9773; HLA-B*39:01; BPIFA2; ENSG00000131050; CTA
DVNVIQQVV

SEQ ID NO: 9774 - protein, 9 aa, Homo sapiens
  Table A; Target 9774; HLA-B*44:02; BPIFA2; ENSG00000131050; CTA
DVNVIQQVV

SEQ ID NO: 9775 - protein, 9 aa, Homo sapiens
  Table A; Target 9775; HLA-B*51:01; BPIFA2; ENSG00000131050; CTA
DVNVIQQVV

SEQ ID NO: 9776 - protein, 9 aa, Homo sapiens
  Table A; Target 9776; HLA-B*54:01; BPIFA2; ENSG00000131050; CTA
DVNVIQQVV

SEQ ID NO: 9777 - protein, 9 aa, Homo sapiens
  Table A; Target 9777; HLA-C*01:02; BPIFA2; ENSG00000131050; CTA
DVNVIQQVV

SEQ ID NO: 9778 - protein, 9 aa, Homo sapiens
  Table A; Target 9778; HLA-C*02:02; BPIFA2; ENSG00000131050; CTA
DVNVIQQVV

SEQ ID NO: 9779 - protein, 9 aa, Homo sapiens
  Table A; Target 9779; HLA-C*03:03; BPIFA2; ENSG00000131050; CTA
DVNVIQQVV

SEQ ID NO: 9780 - protein, 9 aa, Homo sapiens
  Table A; Target 9780; HLA-C*04:01; BPIFA2; ENSG00000131050; CTA
DVNVIQQVV

SEQ ID NO: 9781 - protein, 9 aa, Homo sapiens
  Table A; Target 9781; HLA-C*06:02; BPIFA2; ENSG00000131050; CTA
DVNVIQQVV

SEQ ID NO: 9782 - protein, 9 aa, Homo sapiens
  Table A; Target 9782; HLA-C*07:01; BPIFA2; ENSG00000131050; CTA
DVNVIQQVV

SEQ ID NO: 9783 - protein, 9 aa, Homo sapiens
  Table A; Target 9783; HLA-C*07:02; BPIFA2; ENSG00000131050; CTA
DVNVIQQVV

SEQ ID NO: 9784 - protein, 9 aa, Homo sapiens
  Table A; Target 9784; HLA-C*07:04; BPIFA2; ENSG00000131050; CTA
DVNVIQQVV

SEQ ID NO: 9785 - protein, 9 aa, Homo sapiens
  Table A; Target 9785; HLA-C*07:06; BPIFA2; ENSG00000131050; CTA
DVNVIQQVV

SEQ ID NO: 9786 - protein, 9 aa, Homo sapiens
  Table A; Target 9786; HLA-C*12:03; BPIFA2; ENSG00000131050; CTA
DVNVIQQVV

SEQ ID NO: 9787 - protein, 9 aa, Homo sapiens
  Table A; Target 9787; HLA-C*16:04; BPIFA2; ENSG00000131050; CTA
DVNVIQQVV

SEQ ID NO: 9788 - protein, 9 aa, Homo sapiens
  Table A; Target 9788; HLA-A*33:03; BPIFA2; ENSG00000131050; CTA
EAEKLLNNV

SEQ ID NO: 9789 - protein, 9 aa, Homo sapiens
  Table A; Target 9789; HLA-A*68:02; BPIFA2; ENSG00000131050; CTA
EAEKLLNNV

SEQ ID NO: 9790 - protein, 9 aa, Homo sapiens
  Table A; Target 9790; HLA-B*51:01; BPIFA2; ENSG00000131050; CTA
EAEKLLNNV

SEQ ID NO: 9791 - protein, 10 aa, Homo sapiens
  Table A; Target 9791; HLA-B*38:01; BPIFA2; ENSG00000131050; CTA
EAEKLLNNVI

SEQ ID NO: 9792 - protein, 10 aa, Homo sapiens
  Table A; Target 9792; HLA-C*07:01; BPIFA2; ENSG00000131050; CTA
EAEKLLNNVI

SEQ ID NO: 9793 - protein, 9 aa, Homo sapiens
  Table A; Target 9793; HLA-B*38:01; BPIFA2; ENSG00000131050; CTA
ECASDPTSI

SEQ ID NO: 9794 - protein, 9 aa, Homo sapiens
  Table A; Target 9794; HLA-B*39:01; BPIFA2; ENSG00000131050; CTA
ECASDPTSI

SEQ ID NO: 9795 - protein, 9 aa, Homo sapiens
  Table A; Target 9795; HLA-C*07:01; BPIFA2; ENSG00000131050; CTA
ECASDPTSI

SEQ ID NO: 9796 - protein, 11 aa, Homo sapiens
  Table A; Target 9796; HLA-A*68:01; BPIFA2; ENSG00000131050; CTA
ECASDPTSISL

SEQ ID NO: 9797 - protein, 11 aa, Homo sapiens
  Table A; Target 9797; HLA-A*68:02; BPIFA2; ENSG00000131050; CTA
ECASDPTSISL

SEQ ID NO: 9798 - protein, 11 aa, Homo sapiens
  Table A; Target 9798; HLA-B*35:03; BPIFA2; ENSG00000131050; CTA
ECASDPTSISL

SEQ ID NO: 9799 - protein, 11 aa, Homo sapiens
  Table A; Target 9799; HLA-C*07:01; BPIFA2; ENSG00000131050; CTA
ECASDPTSISL

SEQ ID NO: 9800 - protein, 10 aa, Homo sapiens
  Table A; Target 9800; HLA-B*27:05; BPIFA2; ENSG00000131050; CTA
EGLETVDNTL

SEQ ID NO: 9801 - protein, 10 aa, Homo sapiens
  Table A; Target 9801; HLA-B*35:03; BPIFA2; ENSG00000131050; CTA
EGLETVDNTL

SEQ ID NO: 9802 - protein, 10 aa, Homo sapiens
  Table A; Target 9802; HLA-B*38:01; BPIFA2; ENSG00000131050; CTA
EGLETVDNTL

SEQ ID NO: 9803 - protein, 10 aa, Homo sapiens
  Table A; Target 9803; HLA-C*07:06; BPIFA2; ENSG00000131050; CTA
EGLETVDNTL

SEQ ID NO: 9804 - protein, 11 aa, Homo sapiens
  Table A; Target 9804; HLA-A*03:02; BPIFA2; ENSG00000131050; CTA
EGLETVDNTLK

SEQ ID NO: 9805 - protein, 11 aa, Homo sapiens
  Table A; Target 9805; HLA-A*11:01; BPIFA2; ENSG00000131050; CTA
EGLETVDNTLK

SEQ ID NO: 9806 - protein, 11 aa, Homo sapiens
  Table A; Target 9806; HLA-A*33:01; BPIFA2; ENSG00000131050; CTA
EGLETVDNTLK

SEQ ID NO: 9807 - protein, 11 aa, Homo sapiens
  Table A; Target 9807; HLA-A*33:03; BPIFA2; ENSG00000131050; CTA
EGLETVDNTLK

SEQ ID NO: 9808 - protein, 11 aa, Homo sapiens
  Table A; Target 9808; HLA-A*68:01; BPIFA2; ENSG00000131050; CTA
EGLETVDNTLK

SEQ ID NO: 9809 - protein, 11 aa, Homo sapiens
  Table A; Target 9809; HLA-B*27:02; BPIFA2; ENSG00000131050; CTA
EGLETVDNTLK

SEQ ID NO: 9810 - protein, 11 aa, Homo sapiens
  Table A; Target 9810; HLA-B*27:05; BPIFA2; ENSG00000131050; CTA
EGLETVDNTLK

SEQ ID NO: 9811 - protein, 11 aa, Homo sapiens
  Table A; Target 9811; HLA-C*04:01; BPIFA2; ENSG00000131050; CTA
EGLETVDNTLK

SEQ ID NO: 9812 - protein, 11 aa, Homo sapiens
  Table A; Target 9812; HLA-C*07:01; BPIFA2; ENSG00000131050; CTA
EGLETVDNTLK

SEQ ID NO: 9813 - protein, 11 aa, Homo sapiens
  Table A; Target 9813; HLA-C*07:06; BPIFA2; ENSG00000131050; CTA
EGLETVDNTLK

SEQ ID NO: 9814 - protein, 10 aa, Homo sapiens
  Table A; Target 9814; HLA-A*68:02; BPIFA2; ENSG00000131050; CTA
EICPLIRIFI

SEQ ID NO: 9815 - protein, 9 aa, Homo sapiens
  Table A; Target 9815; HLA-A*25:01; BPIFA2; ENSG00000131050; CTA
EPIDDGKGL

SEQ ID NO: 9816 - protein, 9 aa, Homo sapiens
  Table A; Target 9816; HLA-A*26:01; BPIFA2; ENSG00000131050; CTA
EPIDDGKGL

SEQ ID NO: 9817 - protein, 9 aa, Homo sapiens
  Table A; Target 9817; HLA-A*33:03; BPIFA2; ENSG00000131050; CTA
EPIDDGKGL

SEQ ID NO: 9818 - protein, 9 aa, Homo sapiens
  Table A; Target 9818; HLA-A*68:01; BPIFA2; ENSG00000131050; CTA
EPIDDGKGL

SEQ ID NO: 9819 - protein, 9 aa, Homo sapiens
  Table A; Target 9819; HLA-B*07:02; BPIFA2; ENSG00000131050; CTA
EPIDDGKGL

SEQ ID NO: 9820 - protein, 9 aa, Homo sapiens
  Table A; Target 9820; HLA-B*08:01; BPIFA2; ENSG00000131050; CTA
EPIDDGKGL

SEQ ID NO: 9821 - protein, 9 aa, Homo sapiens
  Table A; Target 9821; HLA-B*18:01; BPIFA2; ENSG00000131050; CTA
EPIDDGKGL

SEQ ID NO: 9822 - protein, 9 aa, Homo sapiens
  Table A; Target 9822; HLA-B*35:01; BPIFA2; ENSG00000131050; CTA
EPIDDGKGL

SEQ ID NO: 9823 - protein, 9 aa, Homo sapiens
  Table A; Target 9823; HLA-B*35:03; BPIFA2; ENSG00000131050; CTA
EPIDDGKGL

SEQ ID NO: 9824 - protein, 9 aa, Homo sapiens
  Table A; Target 9824; HLA-B*38:01; BPIFA2; ENSG00000131050; CTA
EPIDDGKGL

SEQ ID NO: 9825 - protein, 9 aa, Homo sapiens
  Table A; Target 9825; HLA-B*39:01; BPIFA2; ENSG00000131050; CTA
EPIDDGKGL

SEQ ID NO: 9826 - protein, 9 aa, Homo sapiens
  Table A; Target 9826; HLA-B*44:02; BPIFA2; ENSG00000131050; CTA
EPIDDGKGL

SEQ ID NO: 9827 - protein, 9 aa, Homo sapiens
  Table A; Target 9827; HLA-B*44:03; BPIFA2; ENSG00000131050; CTA
EPIDDGKGL

SEQ ID NO: 9828 - protein, 9 aa, Homo sapiens
  Table A; Target 9828; HLA-B*55:01; BPIFA2; ENSG00000131050; CTA
EPIDDGKGL

SEQ ID NO: 9829 - protein, 9 aa, Homo sapiens
  Table A; Target 9829; HLA-C*01:02; BPIFA2; ENSG00000131050; CTA
EPIDDGKGL

SEQ ID NO: 9830 - protein, 9 aa, Homo sapiens
  Table A; Target 9830; HLA-C*03:03; BPIFA2; ENSG00000131050; CTA
EPIDDGKGL

SEQ ID NO: 9831 - protein, 9 aa, Homo sapiens
  Table A; Target 9831; HLA-C*07:02; BPIFA2; ENSG00000131050; CTA
EPIDDGKGL

SEQ ID NO: 9832 - protein, 9 aa, Homo sapiens
  Table A; Target 9832; HLA-C*07:06; BPIFA2; ENSG00000131050; CTA
EPIDDGKGL

SEQ ID NO: 9833 - protein, 11 aa, Homo sapiens
  Table A; Target 9833; HLA-A*23:01; BPIFA2; ENSG00000131050; CTA
EPIDDGKGLNL

SEQ ID NO: 9834 - protein, 11 aa, Homo sapiens
  Table A; Target 9834; HLA-A*24:02; BPIFA2; ENSG00000131050; CTA
EPIDDGKGLNL

SEQ ID NO: 9835 - protein, 11 aa, Homo sapiens
  Table A; Target 9835; HLA-A*25:01; BPIFA2; ENSG00000131050; CTA
EPIDDGKGLNL

SEQ ID NO: 9836 - protein, 11 aa, Homo sapiens
  Table A; Target 9836; HLA-A*26:01; BPIFA2; ENSG00000131050; CTA
EPIDDGKGLNL

SEQ ID NO: 9837 - protein, 11 aa, Homo sapiens
  Table A; Target 9837; HLA-A*33:03; BPIFA2; ENSG00000131050; CTA
EPIDDGKGLNL

SEQ ID NO: 9838 - protein, 11 aa, Homo sapiens
  Table A; Target 9838; HLA-A*68:01; BPIFA2; ENSG00000131050; CTA
EPIDDGKGLNL

SEQ ID NO: 9839 - protein, 11 aa, Homo sapiens
  Table A; Target 9839; HLA-A*68:02; BPIFA2; ENSG00000131050; CTA
EPIDDGKGLNL

SEQ ID NO: 9840 - protein, 11 aa, Homo sapiens
  Table A; Target 9840; HLA-B*07:02; BPIFA2; ENSG00000131050; CTA
EPIDDGKGLNL

SEQ ID NO: 9841 - protein, 11 aa, Homo sapiens
  Table A; Target 9841; HLA-B*27:05; BPIFA2; ENSG00000131050; CTA
EPIDDGKGLNL

SEQ ID NO: 9842 - protein, 11 aa, Homo sapiens
  Table A; Target 9842; HLA-B*35:01; BPIFA2; ENSG00000131050; CTA
EPIDDGKGLNL

SEQ ID NO: 9843 - protein, 11 aa, Homo sapiens
  Table A; Target 9843; HLA-B*35:03; BPIFA2; ENSG00000131050; CTA
EPIDDGKGLNL

SEQ ID NO: 9844 - protein, 11 aa, Homo sapiens
  Table A; Target 9844; HLA-B*38:01; BPIFA2; ENSG00000131050; CTA
EPIDDGKGLNL

SEQ ID NO: 9845 - protein, 11 aa, Homo sapiens
  Table A; Target 9845; HLA-B*39:01; BPIFA2; ENSG00000131050; CTA
EPIDDGKGLNL

SEQ ID NO: 9846 - protein, 11 aa, Homo sapiens
  Table A; Target 9846; HLA-B*40:02; BPIFA2; ENSG00000131050; CTA
EPIDDGKGLNL

SEQ ID NO: 9847 - protein, 11 aa, Homo sapiens
  Table A; Target 9847; HLA-B*44:02; BPIFA2; ENSG00000131050; CTA
EPIDDGKGLNL

SEQ ID NO: 9848 - protein, 11 aa, Homo sapiens
  Table A; Target 9848; HLA-B*44:03; BPIFA2; ENSG00000131050; CTA
EPIDDGKGLNL

SEQ ID NO: 9849 - protein, 11 aa, Homo sapiens
  Table A; Target 9849; HLA-B*54:01; BPIFA2; ENSG00000131050; CTA
EPIDDGKGLNL

SEQ ID NO: 9850 - protein, 11 aa, Homo sapiens
  Table A; Target 9850; HLA-B*55:01; BPIFA2; ENSG00000131050; CTA
EPIDDGKGLNL

SEQ ID NO: 9851 - protein, 11 aa, Homo sapiens
  Table A; Target 9851; HLA-C*04:01; BPIFA2; ENSG00000131050; CTA
EPIDDGKGLNL

SEQ ID NO: 9852 - protein, 11 aa, Homo sapiens
  Table A; Target 9852; HLA-C*07:02; BPIFA2; ENSG00000131050; CTA
EPIDDGKGLNL

SEQ ID NO: 9853 - protein, 11 aa, Homo sapiens
  Table A; Target 9853; HLA-C*07:06; BPIFA2; ENSG00000131050; CTA
EPIDDGKGLNL

SEQ ID NO: 9854 - protein, 11 aa, Homo sapiens
  Table A; Target 9854; HLA-C*12:03; BPIFA2; ENSG00000131050; CTA
EPIDDGKGLNL

SEQ ID NO: 9855 - protein, 8 aa, Homo sapiens
  Table A; Target 9855; HLA-B*07:02; BPIFA2; ENSG00000131050; CTA
EPVLHEGL

SEQ ID NO: 9856 - protein, 8 aa, Homo sapiens
  Table A; Target 9856; HLA-B*08:01; BPIFA2; ENSG00000131050; CTA
EPVLHEGL

SEQ ID NO: 9857 - protein, 8 aa, Homo sapiens
  Table A; Target 9857; HLA-B*35:01; BPIFA2; ENSG00000131050; CTA
EPVLHEGL

SEQ ID NO: 9858 - protein, 8 aa, Homo sapiens
  Table A; Target 9858; HLA-B*35:03; BPIFA2; ENSG00000131050; CTA
EPVLHEGL

SEQ ID NO: 9859 - protein, 8 aa, Homo sapiens
  Table A; Target 9859; HLA-C*07:01; BPIFA2; ENSG00000131050; CTA
EPVLHEGL

SEQ ID NO: 9860 - protein, 11 aa, Homo sapiens
  Table A; Target 9860; HLA-A*68:02; BPIFA2; ENSG00000131050; CTA
EPVLHEGLETV

SEQ ID NO: 9861 - protein, 11 aa, Homo sapiens
  Table A; Target 9861; HLA-B*54:01; BPIFA2; ENSG00000131050; CTA
EPVLHEGLETV

SEQ ID NO: 9862 - protein, 11 aa, Homo sapiens
  Table A; Target 9862; HLA-B*56:01; BPIFA2; ENSG00000131050; CTA
EPVLHEGLETV

SEQ ID NO: 9863 - protein, 9 aa, Homo sapiens
  Table A; Target 9863; HLA-A*01:01; BPIFA2; ENSG00000131050; CTA
ETDPQTHQP

SEQ ID NO: 9864 - protein, 10 aa, Homo sapiens
  Table A; Target 9864; HLA-A*01:01; BPIFA2; ENSG00000131050; CTA
ETDPQTHQPV

SEQ ID NO: 9865 - protein, 10 aa, Homo sapiens
  Table A; Target 9865; HLA-A*11:01; BPIFA2; ENSG00000131050; CTA
ETDPQTHQPV

SEQ ID NO: 9866 - protein, 10 aa, Homo sapiens
  Table A; Target 9866; HLA-A*25:01; BPIFA2; ENSG00000131050; CTA
ETDPQTHQPV

SEQ ID NO: 9867 - protein, 10 aa, Homo sapiens
  Table A; Target 9867; HLA-A*26:01; BPIFA2; ENSG00000131050; CTA
ETDPQTHQPV

SEQ ID NO: 9868 - protein, 10 aa, Homo sapiens
  Table A; Target 9868; HLA-A*33:01; BPIFA2; ENSG00000131050; CTA
ETDPQTHQPV

SEQ ID NO: 9869 - protein, 10 aa, Homo sapiens
  Table A; Target 9869; HLA-A*33:03; BPIFA2; ENSG00000131050; CTA
ETDPQTHQPV

SEQ ID NO: 9870 - protein, 10 aa, Homo sapiens
  Table A; Target 9870; HLA-A*68:01; BPIFA2; ENSG00000131050; CTA
ETDPQTHQPV

SEQ ID NO: 9871 - protein, 10 aa, Homo sapiens
  Table A; Target 9871; HLA-A*68:02; BPIFA2; ENSG00000131050; CTA
ETDPQTHQPV

SEQ ID NO: 9872 - protein, 10 aa, Homo sapiens
  Table A; Target 9872; HLA-B*27:05; BPIFA2; ENSG00000131050; CTA
ETDPQTHQPV

SEQ ID NO: 9873 - protein, 10 aa, Homo sapiens
  Table A; Target 9873; HLA-B*38:01; BPIFA2; ENSG00000131050; CTA
ETDPQTHQPV

SEQ ID NO: 9874 - protein, 10 aa, Homo sapiens
  Table A; Target 9874; HLA-B*39:01; BPIFA2; ENSG00000131050; CTA
ETDPQTHQPV

SEQ ID NO: 9875 - protein, 10 aa, Homo sapiens
  Table A; Target 9875; HLA-B*40:02; BPIFA2; ENSG00000131050; CTA
ETDPQTHQPV

SEQ ID NO: 9876 - protein, 10 aa, Homo sapiens
  Table A; Target 9876; HLA-C*04:01; BPIFA2; ENSG00000131050; CTA
ETDPQTHQPV

SEQ ID NO: 9877 - protein, 10 aa, Homo sapiens
  Table A; Target 9877; HLA-C*05:01; BPIFA2; ENSG00000131050; CTA
ETDPQTHQPV

SEQ ID NO: 9878 - protein, 10 aa, Homo sapiens
  Table A; Target 9878; HLA-C*06:02; BPIFA2; ENSG00000131050; CTA
ETDPQTHQPV

SEQ ID NO: 9879 - protein, 10 aa, Homo sapiens
  Table A; Target 9879; HLA-C*07:01; BPIFA2; ENSG00000131050; CTA
ETDPQTHQPV

SEQ ID NO: 9880 - protein, 10 aa, Homo sapiens
  Table A; Target 9880; HLA-C*07:02; BPIFA2; ENSG00000131050; CTA
ETDPQTHQPV

SEQ ID NO: 9881 - protein, 10 aa, Homo sapiens
  Table A; Target 9881; HLA-C*07:04; BPIFA2; ENSG00000131050; CTA
ETDPQTHQPV

SEQ ID NO: 9882 - protein, 10 aa, Homo sapiens
  Table A; Target 9882; HLA-C*07:06; BPIFA2; ENSG00000131050; CTA
ETDPQTHQPV

SEQ ID NO: 9883 - protein, 10 aa, Homo sapiens
  Table A; Target 9883; HLA-C*12:03; BPIFA2; ENSG00000131050; CTA
ETDPQTHQPV

SEQ ID NO: 9884 - protein, 10 aa, Homo sapiens
  Table A; Target 9884; HLA-C*16:02; BPIFA2; ENSG00000131050; CTA
ETDPQTHQPV

SEQ ID NO: 9885 - protein, 11 aa, Homo sapiens
  Table A; Target 9885; HLA-A*01:01; BPIFA2; ENSG00000131050; CTA
ETDPQTHQPVA

SEQ ID NO: 9886 - protein, 8 aa, Homo sapiens
  Table A; Target 9886; HLA-A*11:01; BPIFA2; ENSG00000131050; CTA
ETVDNTLK

SEQ ID NO: 9887 - protein, 8 aa, Homo sapiens
  Table A; Target 9887; HLA-A*33:01; BPIFA2; ENSG00000131050; CTA
ETVDNTLK

SEQ ID NO: 9888 - protein, 8 aa, Homo sapiens
  Table A; Target 9888; HLA-A*33:03; BPIFA2; ENSG00000131050; CTA
ETVDNTLK

SEQ ID NO: 9889 - protein, 8 aa, Homo sapiens
  Table A; Target 9889; HLA-A*68:01; BPIFA2; ENSG00000131050; CTA
ETVDNTLK

SEQ ID NO: 9890 - protein, 9 aa, Homo sapiens
  Table A; Target 9890; HLA-A*01:01; BPIFA2; ENSG00000131050; CTA
ETVDNTLKG

SEQ ID NO: 9891 - protein, 9 aa, Homo sapiens
  Table A; Target 9891; HLA-A*25:01; BPIFA2; ENSG00000131050; CTA
ETVDNTLKG

SEQ ID NO: 9892 - protein, 9 aa, Homo sapiens
  Table A; Target 9892; HLA-A*26:01; BPIFA2; ENSG00000131050; CTA
ETVDNTLKG

SEQ ID NO: 9893 - protein, 9 aa, Homo sapiens
  Table A; Target 9893; HLA-A*68:01; BPIFA2; ENSG00000131050; CTA
ETVDNTLKG

SEQ ID NO: 9894 - protein, 10 aa, Homo sapiens
  Table A; Target 9894; HLA-A*25:01; BPIFA2; ENSG00000131050; CTA
ETVDNTLKGI

SEQ ID NO: 9895 - protein, 10 aa, Homo sapiens
  Table A; Target 9895; HLA-A*26:01; BPIFA2; ENSG00000131050; CTA
ETVDNTLKGI

SEQ ID NO: 9896 - protein, 10 aa, Homo sapiens
  Table A; Target 9896; HLA-A*33:03; BPIFA2; ENSG00000131050; CTA
ETVDNTLKGI

SEQ ID NO: 9897 - protein, 10 aa, Homo sapiens
  Table A; Target 9897; HLA-A*68:01; BPIFA2; ENSG00000131050; CTA
ETVDNTLKGI

SEQ ID NO: 9898 - protein, 10 aa, Homo sapiens
  Table A; Target 9898; HLA-A*68:02; BPIFA2; ENSG00000131050; CTA
ETVDNTLKGI

SEQ ID NO: 9899 - protein, 11 aa, Homo sapiens
  Table A; Target 9899; HLA-A*25:01; BPIFA2; ENSG00000131050; CTA
ETVDNTLKGIL

SEQ ID NO: 9900 - protein, 11 aa, Homo sapiens
  Table A; Target 9900; HLA-A*26:01; BPIFA2; ENSG00000131050; CTA
ETVDNTLKGIL

SEQ ID NO: 9901 - protein, 11 aa, Homo sapiens
  Table A; Target 9901; HLA-A*68:01; BPIFA2; ENSG00000131050; CTA
ETVDNTLKGIL

SEQ ID NO: 9902 - protein, 11 aa, Homo sapiens
  Table A; Target 9902; HLA-A*68:02; BPIFA2; ENSG00000131050; CTA
ETVDNTLKGIL

SEQ ID NO: 9903 - protein, 11 aa, Homo sapiens
  Table A; Target 9903; HLA-B*40:02; BPIFA2; ENSG00000131050; CTA
ETVDNTLKGIL

SEQ ID NO: 9904 - protein, 11 aa, Homo sapiens
  Table A; Target 9904; HLA-C*06:02; BPIFA2; ENSG00000131050; CTA
ETVDNTLKGIL

SEQ ID NO: 9905 - protein, 11 aa, Homo sapiens
  Table A; Target 9905; HLA-C*07:01; BPIFA2; ENSG00000131050; CTA
ETVDNTLKGIL

SEQ ID NO: 9906 - protein, 11 aa, Homo sapiens
  Table A; Target 9906; HLA-C*12:03; BPIFA2; ENSG00000131050; CTA
ETVDNTLKGIL

SEQ ID NO: 9907 - protein, 9 aa, Homo sapiens
  Table A; Target 9907; HLA-A*02:01; BPIFA2; ENSG00000131050; CTA
FGLKISNSL

SEQ ID NO: 9908 - protein, 9 aa, Homo sapiens
  Table A; Target 9908; HLA-A*02:04; BPIFA2; ENSG00000131050; CTA
FGLKISNSL

SEQ ID NO: 9909 - protein, 9 aa, Homo sapiens
  Table A; Target 9909; HLA-A*23:01; BPIFA2; ENSG00000131050; CTA
FGLKISNSL

SEQ ID NO: 9910 - protein, 9 aa, Homo sapiens
  Table A; Target 9910; HLA-A*24:02; BPIFA2; ENSG00000131050; CTA
FGLKISNSL

SEQ ID NO: 9911 - protein, 9 aa, Homo sapiens
  Table A; Target 9911; HLA-A*30:01; BPIFA2; ENSG00000131050; CTA
FGLKISNSL

SEQ ID NO: 9912 - protein, 9 aa, Homo sapiens
  Table A; Target 9912; HLA-A*32:01; BPIFA2; ENSG00000131050; CTA
FGLKISNSL

SEQ ID NO: 9913 - protein, 9 aa, Homo sapiens
  Table A; Target 9913; HLA-B*07:02; BPIFA2; ENSG00000131050; CTA
FGLKISNSL

SEQ ID NO: 9914 - protein, 9 aa, Homo sapiens
  Table A; Target 9914; HLA-B*08:01; BPIFA2; ENSG00000131050; CTA
FGLKISNSL

SEQ ID NO: 9915 - protein, 9 aa, Homo sapiens
  Table A; Target 9915; HLA-B*15:03; BPIFA2; ENSG00000131050; CTA
FGLKISNSL

SEQ ID NO: 9916 - protein, 9 aa, Homo sapiens
  Table A; Target 9916; HLA-B*27:05; BPIFA2; ENSG00000131050; CTA
FGLKISNSL

SEQ ID NO: 9917 - protein, 9 aa, Homo sapiens
  Table A; Target 9917; HLA-B*35:03; BPIFA2; ENSG00000131050; CTA
FGLKISNSL

SEQ ID NO: 9918 - protein, 9 aa, Homo sapiens
  Table A; Target 9918; HLA-B*38:01; BPIFA2; ENSG00000131050; CTA
FGLKISNSL

SEQ ID NO: 9919 - protein, 9 aa, Homo sapiens
  Table A; Target 9919; HLA-B*39:01; BPIFA2; ENSG00000131050; CTA
FGLKISNSL

SEQ ID NO: 9920 - protein, 9 aa, Homo sapiens
  Table A; Target 9920; HLA-B*40:01; BPIFA2; ENSG00000131050; CTA
FGLKISNSL

SEQ ID NO: 9921 - protein, 9 aa, Homo sapiens
  Table A; Target 9921; HLA-B*40:02; BPIFA2; ENSG00000131050; CTA
FGLKISNSL

SEQ ID NO: 9922 - protein, 9 aa, Homo sapiens
  Table A; Target 9922; HLA-B*46:01; BPIFA2; ENSG00000131050; CTA
FGLKISNSL

SEQ ID NO: 9923 - protein, 9 aa, Homo sapiens
  Table A; Target 9923; HLA-B*58:01; BPIFA2; ENSG00000131050; CTA
FGLKISNSL

SEQ ID NO: 9924 - protein, 9 aa, Homo sapiens
  Table A; Target 9924; HLA-C*01:02; BPIFA2; ENSG00000131050; CTA
FGLKISNSL

SEQ ID NO: 9925 - protein, 9 aa, Homo sapiens
  Table A; Target 9925; HLA-C*02:02; BPIFA2; ENSG00000131050; CTA
FGLKISNSL

SEQ ID NO: 9926 - protein, 9 aa, Homo sapiens
  Table A; Target 9926; HLA-C*03:03; BPIFA2; ENSG00000131050; CTA
FGLKISNSL

SEQ ID NO: 9927 - protein, 9 aa, Homo sapiens
  Table A; Target 9927; HLA-C*03:04; BPIFA2; ENSG00000131050; CTA
FGLKISNSL

SEQ ID NO: 9928 - protein, 9 aa, Homo sapiens
  Table A; Target 9928; HLA-C*06:02; BPIFA2; ENSG00000131050; CTA
FGLKISNSL

SEQ ID NO: 9929 - protein, 9 aa, Homo sapiens
  Table A; Target 9929; HLA-C*07:02; BPIFA2; ENSG00000131050; CTA
FGLKISNSL

SEQ ID NO: 9930 - protein, 9 aa, Homo sapiens
  Table A; Target 9930; HLA-C*12:03; BPIFA2; ENSG00000131050; CTA
FGLKISNSL

SEQ ID NO: 9931 - protein, 9 aa, Homo sapiens
  Table A; Target 9931; HLA-C*14:02; BPIFA2; ENSG00000131050; CTA
FGLKISNSL

SEQ ID NO: 9932 - protein, 9 aa, Homo sapiens
  Table A; Target 9932; HLA-C*16:01; BPIFA2; ENSG00000131050; CTA
FGLKISNSL

SEQ ID NO: 9933 - protein, 9 aa, Homo sapiens
  Table A; Target 9933; HLA-C*16:04; BPIFA2; ENSG00000131050; CTA
FGLKISNSL

SEQ ID NO: 9934 - protein, 9 aa, Homo sapiens
  Table A; Target 9934; HLA-A*02:01; BPIFA2; ENSG00000131050; CTA
FIHSLDVNV

SEQ ID NO: 9935 - protein, 9 aa, Homo sapiens
  Table A; Target 9935; HLA-A*02:03; BPIFA2; ENSG00000131050; CTA
FIHSLDVNV

SEQ ID NO: 9936 - protein, 9 aa, Homo sapiens
  Table A; Target 9936; HLA-A*02:04; BPIFA2; ENSG00000131050; CTA
FIHSLDVNV

SEQ ID NO: 9937 - protein, 9 aa, Homo sapiens
  Table A; Target 9937; HLA-A*02:07; BPIFA2; ENSG00000131050; CTA
FIHSLDVNV

SEQ ID NO: 9938 - protein, 9 aa, Homo sapiens
  Table A; Target 9938; HLA-A*68:02; BPIFA2; ENSG00000131050; CTA
FIHSLDVNV

SEQ ID NO: 9939 - protein, 9 aa, Homo sapiens
  Table A; Target 9939; HLA-B*13:02; BPIFA2; ENSG00000131050; CTA
FIHSLDVNV

SEQ ID NO: 9940 - protein, 10 aa, Homo sapiens
  Table A; Target 9940; HLA-A*02:03; BPIFA2; ENSG00000131050; CTA
FIHSLDVNVI

SEQ ID NO: 9941 - protein, 10 aa, Homo sapiens
  Table A; Target 9941; HLA-A*68:02; BPIFA2; ENSG00000131050; CTA
FIHSLDVNVI

SEQ ID NO: 9942 - protein, 8 aa, Homo sapiens
  Table A; Target 9942; HLA-B*07:02; BPIFA2; ENSG00000131050; CTA
FPVTANVT

SEQ ID NO: 9943 - protein, 8 aa, Homo sapiens
  Table A; Target 9943; HLA-B*08:01; BPIFA2; ENSG00000131050; CTA
FPVTANVT

SEQ ID NO: 9944 - protein, 8 aa, Homo sapiens
  Table A; Target 9944; HLA-B*35:01; BPIFA2; ENSG00000131050; CTA
FPVTANVT

SEQ ID NO: 9945 - protein, 8 aa, Homo sapiens
  Table A; Target 9945; HLA-B*35:03; BPIFA2; ENSG00000131050; CTA
FPVTANVT

SEQ ID NO: 9946 - protein, 8 aa, Homo sapiens
  Table A; Target 9946; HLA-B*51:01; BPIFA2; ENSG00000131050; CTA
FPVTANVT

SEQ ID NO: 9947 - protein, 8 aa, Homo sapiens
  Table A; Target 9947; HLA-B*54:01; BPIFA2; ENSG00000131050; CTA
FPVTANVT

SEQ ID NO: 9948 - protein, 8 aa, Homo sapiens
  Table A; Target 9948; HLA-B*55:01; BPIFA2; ENSG00000131050; CTA
FPVTANVT

SEQ ID NO: 9949 - protein, 8 aa, Homo sapiens
  Table A; Target 9949; HLA-B*56:01; BPIFA2; ENSG00000131050; CTA
FPVTANVT

SEQ ID NO: 9950 - protein, 8 aa, Homo sapiens
  Table A; Target 9950; HLA-C*03:03; BPIFA2; ENSG00000131050; CTA
FPVTANVT

SEQ ID NO: 9951 - protein, 8 aa, Homo sapiens
  Table A; Target 9951; HLA-C*04:01; BPIFA2; ENSG00000131050; CTA
FPVTANVT

SEQ ID NO: 9952 - protein, 8 aa, Homo sapiens
  Table A; Target 9952; HLA-C*07:01; BPIFA2; ENSG00000131050; CTA
FPVTANVT

SEQ ID NO: 9953 - protein, 8 aa, Homo sapiens
  Table A; Target 9953; HLA-C*07:02; BPIFA2; ENSG00000131050; CTA
FPVTANVT

SEQ ID NO: 9954 - protein, 8 aa, Homo sapiens
  Table A; Target 9954; HLA-C*07:04; BPIFA2; ENSG00000131050; CTA
FPVTANVT

SEQ ID NO: 9955 - protein, 8 aa, Homo sapiens
  Table A; Target 9955; HLA-C*12:03; BPIFA2; ENSG00000131050; CTA
FPVTANVT

SEQ ID NO: 9956 - protein, 8 aa, Homo sapiens
  Table A; Target 9956; HLA-C*14:02; BPIFA2; ENSG00000131050; CTA
FPVTANVT

SEQ ID NO: 9957 - protein, 8 aa, Homo sapiens
  Table A; Target 9957; HLA-C*16:01; BPIFA2; ENSG00000131050; CTA
FPVTANVT

SEQ ID NO: 9958 - protein, 8 aa, Homo sapiens
  Table A; Target 9958; HLA-C*16:02; BPIFA2; ENSG00000131050; CTA
FPVTANVT

SEQ ID NO: 9959 - protein, 9 aa, Homo sapiens
  Table A; Target 9959; HLA-A*02:01; BPIFA2; ENSG00000131050; CTA
FPVTANVTV

SEQ ID NO: 9960 - protein, 9 aa, Homo sapiens
  Table A; Target 9960; HLA-A*02:03; BPIFA2; ENSG00000131050; CTA
FPVTANVTV

SEQ ID NO: 9961 - protein, 9 aa, Homo sapiens
  Table A; Target 9961; HLA-A*02:07; BPIFA2; ENSG00000131050; CTA
FPVTANVTV

SEQ ID NO: 9962 - protein, 9 aa, Homo sapiens
  Table A; Target 9962; HLA-A*23:01; BPIFA2; ENSG00000131050; CTA
FPVTANVTV

SEQ ID NO: 9963 - protein, 9 aa, Homo sapiens
  Table A; Target 9963; HLA-A*26:01; BPIFA2; ENSG00000131050; CTA
FPVTANVTV

SEQ ID NO: 9964 - protein, 9 aa, Homo sapiens
  Table A; Target 9964; HLA-A*30:01; BPIFA2; ENSG00000131050; CTA
FPVTANVTV

SEQ ID NO: 9965 - protein, 9 aa, Homo sapiens
  Table A; Target 9965; HLA-A*33:03; BPIFA2; ENSG00000131050; CTA
FPVTANVTV

SEQ ID NO: 9966 - protein, 9 aa, Homo sapiens
  Table A; Target 9966; HLA-A*68:01; BPIFA2; ENSG00000131050; CTA
FPVTANVTV

SEQ ID NO: 9967 - protein, 9 aa, Homo sapiens
  Table A; Target 9967; HLA-A*68:02; BPIFA2; ENSG00000131050; CTA
FPVTANVTV

SEQ ID NO: 9968 - protein, 9 aa, Homo sapiens
  Table A; Target 9968; HLA-B*07:02; BPIFA2; ENSG00000131050; CTA
FPVTANVTV

SEQ ID NO: 9969 - protein, 9 aa, Homo sapiens
  Table A; Target 9969; HLA-B*08:01; BPIFA2; ENSG00000131050; CTA
FPVTANVTV

SEQ ID NO: 9970 - protein, 9 aa, Homo sapiens
  Table A; Target 9970; HLA-B*13:02; BPIFA2; ENSG00000131050; CTA
FPVTANVTV

SEQ ID NO: 9971 - protein, 9 aa, Homo sapiens
  Table A; Target 9971; HLA-B*18:01; BPIFA2; ENSG00000131050; CTA
FPVTANVTV

SEQ ID NO: 9972 - protein, 9 aa, Homo sapiens
  Table A; Target 9972; HLA-B*27:02; BPIFA2; ENSG00000131050; CTA
FPVTANVTV

SEQ ID NO: 9973 - protein, 9 aa, Homo sapiens
  Table A; Target 9973; HLA-B*27:05; BPIFA2; ENSG00000131050; CTA
FPVTANVTV

SEQ ID NO: 9974 - protein, 9 aa, Homo sapiens
  Table A; Target 9974; HLA-B*35:01; BPIFA2; ENSG00000131050; CTA
FPVTANVTV

SEQ ID NO: 9975 - protein, 9 aa, Homo sapiens
  Table A; Target 9975; HLA-B*35:03; BPIFA2; ENSG00000131050; CTA
FPVTANVTV

SEQ ID NO: 9976 - protein, 9 aa, Homo sapiens
  Table A; Target 9976; HLA-B*38:01; BPIFA2; ENSG00000131050; CTA
FPVTANVTV

SEQ ID NO: 9977 - protein, 9 aa, Homo sapiens
  Table A; Target 9977; HLA-B*39:01; BPIFA2; ENSG00000131050; CTA
FPVTANVTV

SEQ ID NO: 9978 - protein, 9 aa, Homo sapiens
  Table A; Target 9978; HLA-B*40:02; BPIFA2; ENSG00000131050; CTA
FPVTANVTV

SEQ ID NO: 9979 - protein, 9 aa, Homo sapiens
  Table A; Target 9979; HLA-B*46:01; BPIFA2; ENSG00000131050; CTA
FPVTANVTV

SEQ ID NO: 9980 - protein, 9 aa, Homo sapiens
  Table A; Target 9980; HLA-B*49:01; BPIFA2; ENSG00000131050; CTA
FPVTANVTV

SEQ ID NO: 9981 - protein, 9 aa, Homo sapiens
  Table A; Target 9981; HLA-B*51:01; BPIFA2; ENSG00000131050; CTA
FPVTANVTV

SEQ ID NO: 9982 - protein, 9 aa, Homo sapiens
  Table A; Target 9982; HLA-B*54:01; BPIFA2; ENSG00000131050; CTA
FPVTANVTV

SEQ ID NO: 9983 - protein, 9 aa, Homo sapiens
  Table A; Target 9983; HLA-B*55:01; BPIFA2; ENSG00000131050; CTA
FPVTANVTV

SEQ ID NO: 9984 - protein, 9 aa, Homo sapiens
  Table A; Target 9984; HLA-B*56:01; BPIFA2; ENSG00000131050; CTA
FPVTANVTV

SEQ ID NO: 9985 - protein, 9 aa, Homo sapiens
  Table A; Target 9985; HLA-B*58:01; BPIFA2; ENSG00000131050; CTA
FPVTANVTV

SEQ ID NO: 9986 - protein, 9 aa, Homo sapiens
  Table A; Target 9986; HLA-C*01:02; BPIFA2; ENSG00000131050; CTA
FPVTANVTV

SEQ ID NO: 9987 - protein, 9 aa, Homo sapiens
  Table A; Target 9987; HLA-C*02:02; BPIFA2; ENSG00000131050; CTA
FPVTANVTV

SEQ ID NO: 9988 - protein, 9 aa, Homo sapiens
  Table A; Target 9988; HLA-C*03:03; BPIFA2; ENSG00000131050; CTA
FPVTANVTV

SEQ ID NO: 9989 - protein, 9 aa, Homo sapiens
  Table A; Target 9989; HLA-C*03:04; BPIFA2; ENSG00000131050; CTA
FPVTANVTV

SEQ ID NO: 9990 - protein, 9 aa, Homo sapiens
  Table A; Target 9990; HLA-C*04:01; BPIFA2; ENSG00000131050; CTA
FPVTANVTV

SEQ ID NO: 9991 - protein, 9 aa, Homo sapiens
  Table A; Target 9991; HLA-C*05:01; BPIFA2; ENSG00000131050; CTA
FPVTANVTV

SEQ ID NO: 9992 - protein, 9 aa, Homo sapiens
  Table A; Target 9992; HLA-C*06:02; BPIFA2; ENSG00000131050; CTA
FPVTANVTV

SEQ ID NO: 9993 - protein, 9 aa, Homo sapiens
  Table A; Target 9993; HLA-C*07:01; BPIFA2; ENSG00000131050; CTA
FPVTANVTV

SEQ ID NO: 9994 - protein, 9 aa, Homo sapiens
  Table A; Target 9994; HLA-C*07:02; BPIFA2; ENSG00000131050; CTA
FPVTANVTV

SEQ ID NO: 9995 - protein, 9 aa, Homo sapiens
  Table A; Target 9995; HLA-C*07:04; BPIFA2; ENSG00000131050; CTA
FPVTANVTV

SEQ ID NO: 9996 - protein, 9 aa, Homo sapiens
  Table A; Target 9996; HLA-C*07:06; BPIFA2; ENSG00000131050; CTA
FPVTANVTV

SEQ ID NO: 9997 - protein, 9 aa, Homo sapiens
  Table A; Target 9997; HLA-C*12:03; BPIFA2; ENSG00000131050; CTA
FPVTANVTV

SEQ ID NO: 9998 - protein, 9 aa, Homo sapiens
  Table A; Target 9998; HLA-C*14:02; BPIFA2; ENSG00000131050; CTA
FPVTANVTV

SEQ ID NO: 9999 - protein, 9 aa, Homo sapiens
  Table A; Target 9999; HLA-C*16:01; BPIFA2; ENSG00000131050; CTA
FPVTANVTV

SEQ ID NO: 10000 - protein, 9 aa, Homo sapiens
  Table A; Target 10000; HLA-C*16:02; BPIFA2; ENSG00000131050; CTA
FPVTANVTV

SEQ ID NO: 10001 - protein, 9 aa, Homo sapiens
  Table A; Target 10001; HLA-C*16:04; BPIFA2; ENSG00000131050; CTA
FPVTANVTV

SEQ ID NO: 10002 - protein, 10 aa, Homo sapiens
  Table A; Target 10002; HLA-B*35:01; BPIFA2; ENSG00000131050; CTA
FPVTANVTVA

SEQ ID NO: 10003 - protein, 10 aa, Homo sapiens
  Table A; Target 10003; HLA-B*35:03; BPIFA2; ENSG00000131050; CTA
FPVTANVTVA

SEQ ID NO: 10004 - protein, 10 aa, Homo sapiens
  Table A; Target 10004; HLA-B*51:01; BPIFA2; ENSG00000131050; CTA
FPVTANVTVA

SEQ ID NO: 10005 - protein, 10 aa, Homo sapiens
  Table A; Target 10005; HLA-B*54:01; BPIFA2; ENSG00000131050; CTA
FPVTANVTVA

SEQ ID NO: 10006 - protein, 10 aa, Homo sapiens
  Table A; Target 10006; HLA-B*55:01; BPIFA2; ENSG00000131050; CTA
FPVTANVTVA

SEQ ID NO: 10007 - protein, 10 aa, Homo sapiens
  Table A; Target 10007; HLA-B*56:01; BPIFA2; ENSG00000131050; CTA
FPVTANVTVA

SEQ ID NO: 10008 - protein, 10 aa, Homo sapiens
  Table A; Target 10008; HLA-C*12:03; BPIFA2; ENSG00000131050; CTA
FPVTANVTVA

SEQ ID NO: 10009 - protein, 11 aa, Homo sapiens
  Table A; Target 10009; HLA-A*68:02; BPIFA2; ENSG00000131050; CTA
FPVTANVTVAG

SEQ ID NO: 10010 - protein, 11 aa, Homo sapiens
  Table A; Target 10010; HLA-B*27:02; BPIFA2; ENSG00000131050; CTA
FPVTANVTVAG

SEQ ID NO: 10011 - protein, 11 aa, Homo sapiens
  Table A; Target 10011; HLA-B*35:01; BPIFA2; ENSG00000131050; CTA
FPVTANVTVAG

SEQ ID NO: 10012 - protein, 11 aa, Homo sapiens
  Table A; Target 10012; HLA-B*35:03; BPIFA2; ENSG00000131050; CTA
FPVTANVTVAG

SEQ ID NO: 10013 - protein, 11 aa, Homo sapiens
  Table A; Target 10013; HLA-B*54:01; BPIFA2; ENSG00000131050; CTA
FPVTANVTVAG

SEQ ID NO: 10014 - protein, 11 aa, Homo sapiens
  Table A; Target 10014; HLA-B*55:01; BPIFA2; ENSG00000131050; CTA
FPVTANVTVAG

SEQ ID NO: 10015 - protein, 11 aa, Homo sapiens
  Table A; Target 10015; HLA-B*56:01; BPIFA2; ENSG00000131050; CTA
FPVTANVTVAG

SEQ ID NO: 10016 - protein, 11 aa, Homo sapiens
  Table A; Target 10016; HLA-C*07:02; BPIFA2; ENSG00000131050; CTA
FPVTANVTVAG

SEQ ID NO: 10017 - protein, 8 aa, Homo sapiens
  Table A; Target 10017; HLA-C*07:04; BPIFA2; ENSG00000131050; CTA
FVNSVINT

SEQ ID NO: 10018 - protein, 9 aa, Homo sapiens
  Table A; Target 10018; HLA-A*01:01; BPIFA2; ENSG00000131050; CTA
FVNSVINTL

SEQ ID NO: 10019 - protein, 9 aa, Homo sapiens
  Table A; Target 10019; HLA-A*02:01; BPIFA2; ENSG00000131050; CTA
FVNSVINTL

SEQ ID NO: 10020 - protein, 9 aa, Homo sapiens
  Table A; Target 10020; HLA-A*02:03; BPIFA2; ENSG00000131050; CTA
FVNSVINTL

SEQ ID NO: 10021 - protein, 9 aa, Homo sapiens
  Table A; Target 10021; HLA-A*02:04; BPIFA2; ENSG00000131050; CTA
FVNSVINTL

SEQ ID NO: 10022 - protein, 9 aa, Homo sapiens
  Table A; Target 10022; HLA-A*02:07; BPIFA2; ENSG00000131050; CTA
FVNSVINTL

SEQ ID NO: 10023 - protein, 9 aa, Homo sapiens
  Table A; Target 10023; HLA-A*03:01; BPIFA2; ENSG00000131050; CTA
FVNSVINTL

SEQ ID NO: 10024 - protein, 9 aa, Homo sapiens
  Table A; Target 10024; HLA-A*03:02; BPIFA2; ENSG00000131050; CTA
FVNSVINTL

SEQ ID NO: 10025 - protein, 9 aa, Homo sapiens
  Table A; Target 10025; HLA-A*11:01; BPIFA2; ENSG00000131050; CTA
FVNSVINTL

SEQ ID NO: 10026 - protein, 9 aa, Homo sapiens
  Table A; Target 10026; HLA-A*23:01; BPIFA2; ENSG00000131050; CTA
FVNSVINTL

SEQ ID NO: 10027 - protein, 9 aa, Homo sapiens
  Table A; Target 10027; HLA-A*24:02; BPIFA2; ENSG00000131050; CTA
FVNSVINTL

SEQ ID NO: 10028 - protein, 9 aa, Homo sapiens
  Table A; Target 10028; HLA-A*25:01; BPIFA2; ENSG00000131050; CTA
FVNSVINTL

SEQ ID NO: 10029 - protein, 9 aa, Homo sapiens
  Table A; Target 10029; HLA-A*26:01; BPIFA2; ENSG00000131050; CTA
FVNSVINTL

SEQ ID NO: 10030 - protein, 9 aa, Homo sapiens
  Table A; Target 10030; HLA-A*29:02; BPIFA2; ENSG00000131050; CTA
FVNSVINTL

SEQ ID NO: 10031 - protein, 9 aa, Homo sapiens
  Table A; Target 10031; HLA-A*30:01; BPIFA2; ENSG00000131050; CTA
FVNSVINTL

SEQ ID NO: 10032 - protein, 9 aa, Homo sapiens
  Table A; Target 10032; HLA-A*30:02; BPIFA2; ENSG00000131050; CTA
FVNSVINTL

SEQ ID NO: 10033 - protein, 9 aa, Homo sapiens
  Table A; Target 10033; HLA-A*31:01; BPIFA2; ENSG00000131050; CTA
FVNSVINTL

SEQ ID NO: 10034 - protein, 9 aa, Homo sapiens
  Table A; Target 10034; HLA-A*32:01; BPIFA2; ENSG00000131050; CTA
FVNSVINTL

SEQ ID NO: 10035 - protein, 9 aa, Homo sapiens
  Table A; Target 10035; HLA-A*33:01; BPIFA2; ENSG00000131050; CTA
FVNSVINTL

SEQ ID NO: 10036 - protein, 9 aa, Homo sapiens
  Table A; Target 10036; HLA-A*33:03; BPIFA2; ENSG00000131050; CTA
FVNSVINTL

SEQ ID NO: 10037 - protein, 9 aa, Homo sapiens
  Table A; Target 10037; HLA-A*68:01; BPIFA2; ENSG00000131050; CTA
FVNSVINTL

SEQ ID NO: 10038 - protein, 9 aa, Homo sapiens
  Table A; Target 10038; HLA-A*68:02; BPIFA2; ENSG00000131050; CTA
FVNSVINTL

SEQ ID NO: 10039 - protein, 9 aa, Homo sapiens
  Table A; Target 10039; HLA-B*07:02; BPIFA2; ENSG00000131050; CTA
FVNSVINTL

SEQ ID NO: 10040 - protein, 9 aa, Homo sapiens
  Table A; Target 10040; HLA-B*08:01; BPIFA2; ENSG00000131050; CTA
FVNSVINTL

SEQ ID NO: 10041 - protein, 9 aa, Homo sapiens
  Table A; Target 10041; HLA-B*13:02; BPIFA2; ENSG00000131050; CTA
FVNSVINTL

SEQ ID NO: 10042 - protein, 9 aa, Homo sapiens
  Table A; Target 10042; HLA-B*15:01; BPIFA2; ENSG00000131050; CTA
FVNSVINTL

SEQ ID NO: 10043 - protein, 9 aa, Homo sapiens
  Table A; Target 10043; HLA-B*15:03; BPIFA2; ENSG00000131050; CTA
FVNSVINTL

SEQ ID NO: 10044 - protein, 9 aa, Homo sapiens
  Table A; Target 10044; HLA-B*18:01; BPIFA2; ENSG00000131050; CTA
FVNSVINTL

SEQ ID NO: 10045 - protein, 9 aa, Homo sapiens
  Table A; Target 10045; HLA-B*27:02; BPIFA2; ENSG00000131050; CTA
FVNSVINTL

SEQ ID NO: 10046 - protein, 9 aa, Homo sapiens
  Table A; Target 10046; HLA-B*27:05; BPIFA2; ENSG00000131050; CTA
FVNSVINTL

SEQ ID NO: 10047 - protein, 9 aa, Homo sapiens
  Table A; Target 10047; HLA-B*35:01; BPIFA2; ENSG00000131050; CTA
FVNSVINTL

SEQ ID NO: 10048 - protein, 9 aa, Homo sapiens
  Table A; Target 10048; HLA-B*35:03; BPIFA2; ENSG00000131050; CTA
FVNSVINTL

SEQ ID NO: 10049 - protein, 9 aa, Homo sapiens
  Table A; Target 10049; HLA-B*37:01; BPIFA2; ENSG00000131050; CTA
FVNSVINTL

SEQ ID NO: 10050 - protein, 9 aa, Homo sapiens
  Table A; Target 10050; HLA-B*38:01; BPIFA2; ENSG00000131050; CTA
FVNSVINTL

SEQ ID NO: 10051 - protein, 9 aa, Homo sapiens
  Table A; Target 10051; HLA-B*39:01; BPIFA2; ENSG00000131050; CTA
FVNSVINTL

SEQ ID NO: 10052 - protein, 9 aa, Homo sapiens
  Table A; Target 10052; HLA-B*40:01; BPIFA2; ENSG00000131050; CTA
FVNSVINTL

SEQ ID NO: 10053 - protein, 9 aa, Homo sapiens
  Table A; Target 10053; HLA-B*40:02; BPIFA2; ENSG00000131050; CTA
FVNSVINTL

SEQ ID NO: 10054 - protein, 9 aa, Homo sapiens
  Table A; Target 10054; HLA-B*44:02; BPIFA2; ENSG00000131050; CTA
FVNSVINTL

SEQ ID NO: 10055 - protein, 9 aa, Homo sapiens
  Table A; Target 10055; HLA-B*44:03; BPIFA2; ENSG00000131050; CTA
FVNSVINTL

SEQ ID NO: 10056 - protein, 9 aa, Homo sapiens
  Table A; Target 10056; HLA-B*46:01; BPIFA2; ENSG00000131050; CTA
FVNSVINTL

SEQ ID NO: 10057 - protein, 9 aa, Homo sapiens
  Table A; Target 10057; HLA-B*49:01; BPIFA2; ENSG00000131050; CTA
FVNSVINTL

SEQ ID NO: 10058 - protein, 9 aa, Homo sapiens
  Table A; Target 10058; HLA-B*51:01; BPIFA2; ENSG00000131050; CTA
FVNSVINTL

SEQ ID NO: 10059 - protein, 9 aa, Homo sapiens
  Table A; Target 10059; HLA-B*54:01; BPIFA2; ENSG00000131050; CTA
FVNSVINTL

SEQ ID NO: 10060 - protein, 9 aa, Homo sapiens
  Table A; Target 10060; HLA-B*55:01; BPIFA2; ENSG00000131050; CTA
FVNSVINTL

SEQ ID NO: 10061 - protein, 9 aa, Homo sapiens
  Table A; Target 10061; HLA-B*56:01; BPIFA2; ENSG00000131050; CTA
FVNSVINTL

SEQ ID NO: 10062 - protein, 9 aa, Homo sapiens
  Table A; Target 10062; HLA-B*57:01; BPIFA2; ENSG00000131050; CTA
FVNSVINTL

SEQ ID NO: 10063 - protein, 9 aa, Homo sapiens
  Table A; Target 10063; HLA-B*58:01; BPIFA2; ENSG00000131050; CTA
FVNSVINTL

SEQ ID NO: 10064 - protein, 9 aa, Homo sapiens
  Table A; Target 10064; HLA-C*01:02; BPIFA2; ENSG00000131050; CTA
FVNSVINTL

SEQ ID NO: 10065 - protein, 9 aa, Homo sapiens
  Table A; Target 10065; HLA-C*02:02; BPIFA2; ENSG00000131050; CTA
FVNSVINTL

SEQ ID NO: 10066 - protein, 9 aa, Homo sapiens
  Table A; Target 10066; HLA-C*03:03; BPIFA2; ENSG00000131050; CTA
FVNSVINTL

SEQ ID NO: 10067 - protein, 9 aa, Homo sapiens
  Table A; Target 10067; HLA-C*03:04; BPIFA2; ENSG00000131050; CTA
FVNSVINTL

SEQ ID NO: 10068 - protein, 9 aa, Homo sapiens
  Table A; Target 10068; HLA-C*04:01; BPIFA2; ENSG00000131050; CTA
FVNSVINTL

SEQ ID NO: 10069 - protein, 9 aa, Homo sapiens
  Table A; Target 10069; HLA-C*05:01; BPIFA2; ENSG00000131050; CTA
FVNSVINTL

SEQ ID NO: 10070 - protein, 9 aa, Homo sapiens
  Table A; Target 10070; HLA-C*06:02; BPIFA2; ENSG00000131050; CTA
FVNSVINTL

SEQ ID NO: 10071 - protein, 9 aa, Homo sapiens
  Table A; Target 10071; HLA-C*07:02; BPIFA2; ENSG00000131050; CTA
FVNSVINTL

SEQ ID NO: 10072 - protein, 9 aa, Homo sapiens
  Table A; Target 10072; HLA-C*07:04; BPIFA2; ENSG00000131050; CTA
FVNSVINTL

SEQ ID NO: 10073 - protein, 9 aa, Homo sapiens
  Table A; Target 10073; HLA-C*07:06; BPIFA2; ENSG00000131050; CTA
FVNSVINTL

SEQ ID NO: 10074 - protein, 9 aa, Homo sapiens
  Table A; Target 10074; HLA-C*12:03; BPIFA2; ENSG00000131050; CTA
FVNSVINTL

SEQ ID NO: 10075 - protein, 9 aa, Homo sapiens
  Table A; Target 10075; HLA-C*14:02; BPIFA2; ENSG00000131050; CTA
FVNSVINTL

SEQ ID NO: 10076 - protein, 9 aa, Homo sapiens
  Table A; Target 10076; HLA-C*16:01; BPIFA2; ENSG00000131050; CTA
FVNSVINTL

SEQ ID NO: 10077 - protein, 9 aa, Homo sapiens
  Table A; Target 10077; HLA-C*16:02; BPIFA2; ENSG00000131050; CTA
FVNSVINTL

SEQ ID NO: 10078 - protein, 9 aa, Homo sapiens
  Table A; Target 10078; HLA-C*16:04; BPIFA2; ENSG00000131050; CTA
FVNSVINTL

SEQ ID NO: 10079 - protein, 10 aa, Homo sapiens
  Table A; Target 10079; HLA-A*01:01; BPIFA2; ENSG00000131050; CTA
FVNSVINTLK

SEQ ID NO: 10080 - protein, 10 aa, Homo sapiens
  Table A; Target 10080; HLA-A*03:01; BPIFA2; ENSG00000131050; CTA
FVNSVINTLK

SEQ ID NO: 10081 - protein, 10 aa, Homo sapiens
  Table A; Target 10081; HLA-A*03:02; BPIFA2; ENSG00000131050; CTA
FVNSVINTLK

SEQ ID NO: 10082 - protein, 10 aa, Homo sapiens
  Table A; Target 10082; HLA-A*11:01; BPIFA2; ENSG00000131050; CTA
FVNSVINTLK

SEQ ID NO: 10083 - protein, 10 aa, Homo sapiens
  Table A; Target 10083; HLA-A*26:01; BPIFA2; ENSG00000131050; CTA
FVNSVINTLK

SEQ ID NO: 10084 - protein, 10 aa, Homo sapiens
  Table A; Target 10084; HLA-A*29:02; BPIFA2; ENSG00000131050; CTA
FVNSVINTLK

SEQ ID NO: 10085 - protein, 10 aa, Homo sapiens
  Table A; Target 10085; HLA-A*31:01; BPIFA2; ENSG00000131050; CTA
FVNSVINTLK

SEQ ID NO: 10086 - protein, 10 aa, Homo sapiens
  Table A; Target 10086; HLA-A*32:01; BPIFA2; ENSG00000131050; CTA
FVNSVINTLK

SEQ ID NO: 10087 - protein, 10 aa, Homo sapiens
  Table A; Target 10087; HLA-A*33:01; BPIFA2; ENSG00000131050; CTA
FVNSVINTLK

SEQ ID NO: 10088 - protein, 10 aa, Homo sapiens
  Table A; Target 10088; HLA-A*33:03; BPIFA2; ENSG00000131050; CTA
FVNSVINTLK

SEQ ID NO: 10089 - protein, 10 aa, Homo sapiens
  Table A; Target 10089; HLA-A*68:01; BPIFA2; ENSG00000131050; CTA
FVNSVINTLK

SEQ ID NO: 10090 - protein, 10 aa, Homo sapiens
  Table A; Target 10090; HLA-A*68:02; BPIFA2; ENSG00000131050; CTA
FVNSVINTLK

SEQ ID NO: 10091 - protein, 10 aa, Homo sapiens
  Table A; Target 10091; HLA-B*27:02; BPIFA2; ENSG00000131050; CTA
FVNSVINTLK

SEQ ID NO: 10092 - protein, 10 aa, Homo sapiens
  Table A; Target 10092; HLA-B*27:05; BPIFA2; ENSG00000131050; CTA
FVNSVINTLK

SEQ ID NO: 10093 - protein, 10 aa, Homo sapiens
  Table A; Target 10093; HLA-B*57:01; BPIFA2; ENSG00000131050; CTA
FVNSVINTLK

SEQ ID NO: 10094 - protein, 10 aa, Homo sapiens
  Table A; Target 10094; HLA-C*02:02; BPIFA2; ENSG00000131050; CTA
FVNSVINTLK

SEQ ID NO: 10095 - protein, 10 aa, Homo sapiens
  Table A; Target 10095; HLA-C*04:01; BPIFA2; ENSG00000131050; CTA
FVNSVINTLK

SEQ ID NO: 10096 - protein, 10 aa, Homo sapiens
  Table A; Target 10096; HLA-C*06:02; BPIFA2; ENSG00000131050; CTA
FVNSVINTLK

SEQ ID NO: 10097 - protein, 10 aa, Homo sapiens
  Table A; Target 10097; HLA-C*07:01; BPIFA2; ENSG00000131050; CTA
FVNSVINTLK

SEQ ID NO: 10098 - protein, 10 aa, Homo sapiens
  Table A; Target 10098; HLA-C*07:02; BPIFA2; ENSG00000131050; CTA
FVNSVINTLK

SEQ ID NO: 10099 - protein, 10 aa, Homo sapiens
  Table A; Target 10099; HLA-C*07:06; BPIFA2; ENSG00000131050; CTA
FVNSVINTLK

SEQ ID NO: 10100 - protein, 10 aa, Homo sapiens
  Table A; Target 10100; HLA-A*30:01; BPIFA2; ENSG00000131050; CTA
GECASDPTSI

SEQ ID NO: 10101 - protein, 10 aa, Homo sapiens
  Table A; Target 10101; HLA-B*40:01; BPIFA2; ENSG00000131050; CTA
GECASDPTSI

SEQ ID NO: 10102 - protein, 10 aa, Homo sapiens
  Table A; Target 10102; HLA-B*40:02; BPIFA2; ENSG00000131050; CTA
GECASDPTSI

SEQ ID NO: 10103 - protein, 10 aa, Homo sapiens
  Table A; Target 10103; HLA-B*49:01; BPIFA2; ENSG00000131050; CTA
GECASDPTSI

SEQ ID NO: 10104 - protein, 10 aa, Homo sapiens
  Table A; Target 10104; HLA-C*07:01; BPIFA2; ENSG00000131050; CTA
GECASDPTSI

SEQ ID NO: 10105 - protein, 10 aa, Homo sapiens
  Table A; Target 10105; HLA-C*07:02; BPIFA2; ENSG00000131050; CTA
GECASDPTSI

SEQ ID NO: 10106 - protein, 10 aa, Homo sapiens
  Table A; Target 10106; HLA-C*16:04; BPIFA2; ENSG00000131050; CTA
GECASDPTSI

SEQ ID NO: 10107 - protein, 9 aa, Homo sapiens
  Table A; Target 10107; HLA-A*02:01; BPIFA2; ENSG00000131050; CTA
GLETVDNTL

SEQ ID NO: 10108 - protein, 9 aa, Homo sapiens
  Table A; Target 10108; HLA-A*02:04; BPIFA2; ENSG00000131050; CTA
GLETVDNTL

SEQ ID NO: 10109 - protein, 9 aa, Homo sapiens
  Table A; Target 10109; HLA-A*02:07; BPIFA2; ENSG00000131050; CTA
GLETVDNTL

SEQ ID NO: 10110 - protein, 9 aa, Homo sapiens
  Table A; Target 10110; HLA-B*13:02; BPIFA2; ENSG00000131050; CTA
GLETVDNTL

SEQ ID NO: 10111 - protein, 9 aa, Homo sapiens
  Table A; Target 10111; HLA-B*27:05; BPIFA2; ENSG00000131050; CTA
GLETVDNTL

SEQ ID NO: 10112 - protein, 9 aa, Homo sapiens
  Table A; Target 10112; HLA-B*35:03; BPIFA2; ENSG00000131050; CTA
GLETVDNTL

SEQ ID NO: 10113 - protein, 9 aa, Homo sapiens
  Table A; Target 10113; HLA-B*38:01; BPIFA2; ENSG00000131050; CTA
GLETVDNTL

SEQ ID NO: 10114 - protein, 9 aa, Homo sapiens
  Table A; Target 10114; HLA-B*39:01; BPIFA2; ENSG00000131050; CTA
GLETVDNTL

SEQ ID NO: 10115 - protein, 9 aa, Homo sapiens
  Table A; Target 10115; HLA-B*40:01; BPIFA2; ENSG00000131050; CTA
GLETVDNTL

SEQ ID NO: 10116 - protein, 9 aa, Homo sapiens
  Table A; Target 10116; HLA-B*40:02; BPIFA2; ENSG00000131050; CTA
GLETVDNTL

SEQ ID NO: 10117 - protein, 9 aa, Homo sapiens
  Table A; Target 10117; HLA-B*55:01; BPIFA2; ENSG00000131050; CTA
GLETVDNTL

SEQ ID NO: 10118 - protein, 9 aa, Homo sapiens
  Table A; Target 10118; HLA-C*05:01; BPIFA2; ENSG00000131050; CTA
GLETVDNTL

SEQ ID NO: 10119 - protein, 10 aa, Homo sapiens
  Table A; Target 10119; HLA-A*01:01; BPIFA2; ENSG00000131050; CTA
GLETVDNTLK

SEQ ID NO: 10120 - protein, 10 aa, Homo sapiens
  Table A; Target 10120; HLA-A*03:01; BPIFA2; ENSG00000131050; CTA
GLETVDNTLK

SEQ ID NO: 10121 - protein, 10 aa, Homo sapiens
  Table A; Target 10121; HLA-A*03:02; BPIFA2; ENSG00000131050; CTA
GLETVDNTLK

SEQ ID NO: 10122 - protein, 10 aa, Homo sapiens
  Table A; Target 10122; HLA-A*11:01; BPIFA2; ENSG00000131050; CTA
GLETVDNTLK

SEQ ID NO: 10123 - protein, 10 aa, Homo sapiens
  Table A; Target 10123; HLA-B*27:02; BPIFA2; ENSG00000131050; CTA
GLETVDNTLK

SEQ ID NO: 10124 - protein, 10 aa, Homo sapiens
  Table A; Target 10124; HLA-B*27:05; BPIFA2; ENSG00000131050; CTA
GLETVDNTLK

SEQ ID NO: 10125 - protein, 8 aa, Homo sapiens
  Table A; Target 10125; HLA-B*08:01; BPIFA2; ENSG00000131050; CTA
GLKISNSL

SEQ ID NO: 10126 - protein, 9 aa, Homo sapiens
  Table A; Target 10126; HLA-A*02:03; BPIFA2; ENSG00000131050; CTA
GLKISNSLI

SEQ ID NO: 10127 - protein, 10 aa, Homo sapiens
  Table A; Target 10127; HLA-A*02:01; BPIFA2; ENSG00000131050; CTA
GLNLSFPVTA

SEQ ID NO: 10128 - protein, 10 aa, Homo sapiens
  Table A; Target 10128; HLA-A*02:03; BPIFA2; ENSG00000131050; CTA
GLNLSFPVTA

SEQ ID NO: 10129 - protein, 10 aa, Homo sapiens
  Table A; Target 10129; HLA-A*02:04; BPIFA2; ENSG00000131050; CTA
GLNLSFPVTA

SEQ ID NO: 10130 - protein, 10 aa, Homo sapiens
  Table A; Target 10130; HLA-B*55:01; BPIFA2; ENSG00000131050; CTA
GLNLSFPVTA

SEQ ID NO: 10131 - protein, 10 aa, Homo sapiens
  Table A; Target 10131; HLA-B*56:01; BPIFA2; ENSG00000131050; CTA
GLNLSFPVTA

SEQ ID NO: 10132 - protein, 10 aa, Homo sapiens
  Table A; Target 10132; HLA-B*27:02; BPIFA2; ENSG00000131050; CTA
GNDLSNVVDK

SEQ ID NO: 10133 - protein, 8 aa, Homo sapiens
  Table A; Target 10133; HLA-B*07:02; BPIFA2; ENSG00000131050; CTA
GPIIGQII

SEQ ID NO: 10134 - protein, 8 aa, Homo sapiens
  Table A; Target 10134; HLA-B*35:03; BPIFA2; ENSG00000131050; CTA
GPIIGQII

SEQ ID NO: 10135 - protein, 8 aa, Homo sapiens
  Table A; Target 10135; HLA-B*51:01; BPIFA2; ENSG00000131050; CTA
GPIIGQII

SEQ ID NO: 10136 - protein, 8 aa, Homo sapiens
  Table A; Target 10136; HLA-B*56:01; BPIFA2; ENSG00000131050; CTA
GPIIGQII

SEQ ID NO: 10137 - protein, 10 aa, Homo sapiens
  Table A; Target 10137; HLA-A*02:04; BPIFA2; ENSG00000131050; CTA
GPIIGQIINL

SEQ ID NO: 10138 - protein, 10 aa, Homo sapiens
  Table A; Target 10138; HLA-B*07:02; BPIFA2; ENSG00000131050; CTA
GPIIGQIINL

SEQ ID NO: 10139 - protein, 10 aa, Homo sapiens
  Table A; Target 10139; HLA-B*35:03; BPIFA2; ENSG00000131050; CTA
GPIIGQIINL

SEQ ID NO: 10140 - protein, 10 aa, Homo sapiens
  Table A; Target 10140; HLA-B*40:01; BPIFA2; ENSG00000131050; CTA
GPIIGQIINL

SEQ ID NO: 10141 - protein, 10 aa, Homo sapiens
  Table A; Target 10141; HLA-B*56:01; BPIFA2; ENSG00000131050; CTA
GPIIGQIINL

SEQ ID NO: 10142 - protein, 10 aa, Homo sapiens
  Table A; Target 10142; HLA-C*07:02; BPIFA2; ENSG00000131050; CTA
GPIIGQIINL

SEQ ID NO: 10143 - protein, 11 aa, Homo sapiens
  Table A; Target 10143; HLA-A*11:01; BPIFA2; ENSG00000131050; CTA
GPIIGQIINLK

SEQ ID NO: 10144 - protein, 8 aa, Homo sapiens
  Table A; Target 10144; HLA-B*13:02; BPIFA2; ENSG00000131050; CTA
GQIINLKA

SEQ ID NO: 10145 - protein, 10 aa, Homo sapiens
  Table A; Target 10145; HLA-B*13:02; BPIFA2; ENSG00000131050; CTA
GQIINLKASL

SEQ ID NO: 10146 - protein, 10 aa, Homo sapiens
  Table A; Target 10146; HLA-B*15:01; BPIFA2; ENSG00000131050; CTA
GQIINLKASL

SEQ ID NO: 10147 - protein, 10 aa, Homo sapiens
  Table A; Target 10147; HLA-B*15:03; BPIFA2; ENSG00000131050; CTA
GQIINLKASL

SEQ ID NO: 10148 - protein, 10 aa, Homo sapiens
  Table A; Target 10148; HLA-A*68:02; BPIFA2; ENSG00000131050; CTA
GTSESLLDNL

SEQ ID NO: 10149 - protein, 10 aa, Homo sapiens
  Table A; Target 10149; HLA-B*27:05; BPIFA2; ENSG00000131050; CTA
GTSESLLDNL

SEQ ID NO: 10150 - protein, 10 aa, Homo sapiens
  Table A; Target 10150; HLA-B*39:01; BPIFA2; ENSG00000131050; CTA
GTSESLLDNL

SEQ ID NO: 10151 - protein, 9 aa, Homo sapiens
  Table A; Target 10151; HLA-A*03:01; BPIFA2; ENSG00000131050; CTA
GVLQKSSAW

SEQ ID NO: 10152 - protein, 9 aa, Homo sapiens
  Table A; Target 10152; HLA-A*24:02; BPIFA2; ENSG00000131050; CTA
GVLQKSSAW

SEQ ID NO: 10153 - protein, 9 aa, Homo sapiens
  Table A; Target 10153; HLA-A*25:01; BPIFA2; ENSG00000131050; CTA
GVLQKSSAW

SEQ ID NO: 10154 - protein, 9 aa, Homo sapiens
  Table A; Target 10154; HLA-A*26:01; BPIFA2; ENSG00000131050; CTA
GVLQKSSAW

SEQ ID NO: 10155 - protein, 9 aa, Homo sapiens
  Table A; Target 10155; HLA-A*29:02; BPIFA2; ENSG00000131050; CTA
GVLQKSSAW

SEQ ID NO: 10156 - protein, 9 aa, Homo sapiens
  Table A; Target 10156; HLA-A*30:02; BPIFA2; ENSG00000131050; CTA
GVLQKSSAW

SEQ ID NO: 10157 - protein, 9 aa, Homo sapiens
  Table A; Target 10157; HLA-A*31:01; BPIFA2; ENSG00000131050; CTA
GVLQKSSAW

SEQ ID NO: 10158 - protein, 9 aa, Homo sapiens
  Table A; Target 10158; HLA-A*32:01; BPIFA2; ENSG00000131050; CTA
GVLQKSSAW

SEQ ID NO: 10159 - protein, 9 aa, Homo sapiens
  Table A; Target 10159; HLA-A*33:03; BPIFA2; ENSG00000131050; CTA
GVLQKSSAW

SEQ ID NO: 10160 - protein, 9 aa, Homo sapiens
  Table A; Target 10160; HLA-B*08:01; BPIFA2; ENSG00000131050; CTA
GVLQKSSAW

SEQ ID NO: 10161 - protein, 9 aa, Homo sapiens
  Table A; Target 10161; HLA-B*15:01; BPIFA2; ENSG00000131050; CTA
GVLQKSSAW

SEQ ID NO: 10162 - protein, 9 aa, Homo sapiens
  Table A; Target 10162; HLA-B*27:02; BPIFA2; ENSG00000131050; CTA
GVLQKSSAW

SEQ ID NO: 10163 - protein, 9 aa, Homo sapiens
  Table A; Target 10163; HLA-B*44:02; BPIFA2; ENSG00000131050; CTA
GVLQKSSAW

SEQ ID NO: 10164 - protein, 9 aa, Homo sapiens
  Table A; Target 10164; HLA-B*44:03; BPIFA2; ENSG00000131050; CTA
GVLQKSSAW

SEQ ID NO: 10165 - protein, 9 aa, Homo sapiens
  Table A; Target 10165; HLA-B*46:01; BPIFA2; ENSG00000131050; CTA
GVLQKSSAW

SEQ ID NO: 10166 - protein, 9 aa, Homo sapiens
  Table A; Target 10166; HLA-B*57:01; BPIFA2; ENSG00000131050; CTA
GVLQKSSAW

SEQ ID NO: 10167 - protein, 9 aa, Homo sapiens
  Table A; Target 10167; HLA-B*58:01; BPIFA2; ENSG00000131050; CTA
GVLQKSSAW

SEQ ID NO: 10168 - protein, 9 aa, Homo sapiens
  Table A; Target 10168; HLA-C*02:02; BPIFA2; ENSG00000131050; CTA
GVLQKSSAW

SEQ ID NO: 10169 - protein, 9 aa, Homo sapiens
  Table A; Target 10169; HLA-C*07:04; BPIFA2; ENSG00000131050; CTA
GVLQKSSAW

SEQ ID NO: 10170 - protein, 9 aa, Homo sapiens
  Table A; Target 10170; HLA-C*16:01; BPIFA2; ENSG00000131050; CTA
GVLQKSSAW

SEQ ID NO: 10171 - protein, 9 aa, Homo sapiens
  Table A; Target 10171; HLA-C*16:04; BPIFA2; ENSG00000131050; CTA
GVLQKSSAW

SEQ ID NO: 10172 - protein, 11 aa, Homo sapiens
  Table A; Target 10172; HLA-A*02:04; BPIFA2; ENSG00000131050; CTA
GVLQKSSAWQL

SEQ ID NO: 10173 - protein, 11 aa, Homo sapiens
  Table A; Target 10173; HLA-A*31:01; BPIFA2; ENSG00000131050; CTA
GVLQKSSAWQL

SEQ ID NO: 10174 - protein, 9 aa, Homo sapiens
  Table A; Target 10174; HLA-B*27:05; BPIFA2; ENSG00000131050; CTA
GVLTGTSES

SEQ ID NO: 10175 - protein, 10 aa, Homo sapiens
  Table A; Target 10175; HLA-A*03:01; BPIFA2; ENSG00000131050; CTA
GVLTGTSESL

SEQ ID NO: 10176 - protein, 10 aa, Homo sapiens
  Table A; Target 10176; HLA-A*25:01; BPIFA2; ENSG00000131050; CTA
GVLTGTSESL

SEQ ID NO: 10177 - protein, 10 aa, Homo sapiens
  Table A; Target 10177; HLA-A*30:01; BPIFA2; ENSG00000131050; CTA
GVLTGTSESL

SEQ ID NO: 10178 - protein, 10 aa, Homo sapiens
  Table A; Target 10178; HLA-A*32:01; BPIFA2; ENSG00000131050; CTA
GVLTGTSESL

SEQ ID NO: 10179 - protein, 10 aa, Homo sapiens
  Table A; Target 10179; HLA-B*15:01; BPIFA2; ENSG00000131050; CTA
GVLTGTSESL

SEQ ID NO: 10180 - protein, 10 aa, Homo sapiens
  Table A; Target 10180; HLA-B*27:05; BPIFA2; ENSG00000131050; CTA
GVLTGTSESL

SEQ ID NO: 10181 - protein, 10 aa, Homo sapiens
  Table A; Target 10181; HLA-B*40:01; BPIFA2; ENSG00000131050; CTA
GVLTGTSESL

SEQ ID NO: 10182 - protein, 10 aa, Homo sapiens
  Table A; Target 10182; HLA-B*40:02; BPIFA2; ENSG00000131050; CTA
GVLTGTSESL

SEQ ID NO: 10183 - protein, 10 aa, Homo sapiens
  Table A; Target 10183; HLA-B*55:01; BPIFA2; ENSG00000131050; CTA
GVLTGTSESL

SEQ ID NO: 10184 - protein, 10 aa, Homo sapiens
  Table A; Target 10184; HLA-B*58:01; BPIFA2; ENSG00000131050; CTA
GVLTGTSESL

SEQ ID NO: 10185 - protein, 10 aa, Homo sapiens
  Table A; Target 10185; HLA-C*01:02; BPIFA2; ENSG00000131050; CTA
GVLTGTSESL

SEQ ID NO: 10186 - protein, 10 aa, Homo sapiens
  Table A; Target 10186; HLA-C*07:02; BPIFA2; ENSG00000131050; CTA
GVLTGTSESL

SEQ ID NO: 10187 - protein, 10 aa, Homo sapiens
  Table A; Target 10187; HLA-C*07:04; BPIFA2; ENSG00000131050; CTA
GVLTGTSESL

SEQ ID NO: 10188 - protein, 10 aa, Homo sapiens
  Table A; Target 10188; HLA-C*14:02; BPIFA2; ENSG00000131050; CTA
GVLTGTSESL

SEQ ID NO: 10189 - protein, 11 aa, Homo sapiens
  Table A; Target 10189; HLA-A*02:01; BPIFA2; ENSG00000131050; CTA
GVLTGTSESLL

SEQ ID NO: 10190 - protein, 11 aa, Homo sapiens
  Table A; Target 10190; HLA-A*03:01; BPIFA2; ENSG00000131050; CTA
GVLTGTSESLL

SEQ ID NO: 10191 - protein, 11 aa, Homo sapiens
  Table A; Target 10191; HLA-A*03:02; BPIFA2; ENSG00000131050; CTA
GVLTGTSESLL

SEQ ID NO: 10192 - protein, 11 aa, Homo sapiens
  Table A; Target 10192; HLA-A*11:01; BPIFA2; ENSG00000131050; CTA
GVLTGTSESLL

SEQ ID NO: 10193 - protein, 11 aa, Homo sapiens
  Table A; Target 10193; HLA-A*23:01; BPIFA2; ENSG00000131050; CTA
GVLTGTSESLL

SEQ ID NO: 10194 - protein, 11 aa, Homo sapiens
  Table A; Target 10194; HLA-A*31:01; BPIFA2; ENSG00000131050; CTA
GVLTGTSESLL

SEQ ID NO: 10195 - protein, 11 aa, Homo sapiens
  Table A; Target 10195; HLA-B*13:02; BPIFA2; ENSG00000131050; CTA
GVLTGTSESLL

SEQ ID NO: 10196 - protein, 11 aa, Homo sapiens
  Table A; Target 10196; HLA-B*27:05; BPIFA2; ENSG00000131050; CTA
GVLTGTSESLL

SEQ ID NO: 10197 - protein, 11 aa, Homo sapiens
  Table A; Target 10197; HLA-B*39:01; BPIFA2; ENSG00000131050; CTA
GVLTGTSESLL

SEQ ID NO: 10198 - protein, 11 aa, Homo sapiens
  Table A; Target 10198; HLA-B*40:01; BPIFA2; ENSG00000131050; CTA
GVLTGTSESLL

SEQ ID NO: 10199 - protein, 11 aa, Homo sapiens
  Table A; Target 10199; HLA-B*58:01; BPIFA2; ENSG00000131050; CTA
GVLTGTSESLL

SEQ ID NO: 10200 - protein, 11 aa, Homo sapiens
  Table A; Target 10200; HLA-C*04:01; BPIFA2; ENSG00000131050; CTA
GVLTGTSESLL

SEQ ID NO: 10201 - protein, 11 aa, Homo sapiens
  Table A; Target 10201; HLA-C*07:01; BPIFA2; ENSG00000131050; CTA
GVLTGTSESLL

SEQ ID NO: 10202 - protein, 11 aa, Homo sapiens
  Table A; Target 10202; HLA-C*07:02; BPIFA2; ENSG00000131050; CTA
GVLTGTSESLL

SEQ ID NO: 10203 - protein, 11 aa, Homo sapiens
  Table A; Target 10203; HLA-C*07:04; BPIFA2; ENSG00000131050; CTA
GVLTGTSESLL

SEQ ID NO: 10204 - protein, 11 aa, Homo sapiens
  Table A; Target 10204; HLA-A*30:01; BPIFA2; ENSG00000131050; CTA
HEGLETVDNTL

SEQ ID NO: 10205 - protein, 11 aa, Homo sapiens
  Table A; Target 10205; HLA-B*27:02; BPIFA2; ENSG00000131050; CTA
HEGLETVDNTL

SEQ ID NO: 10206 - protein, 11 aa, Homo sapiens
  Table A; Target 10206; HLA-B*27:05; BPIFA2; ENSG00000131050; CTA
HEGLETVDNTL

SEQ ID NO: 10207 - protein, 11 aa, Homo sapiens
  Table A; Target 10207; HLA-B*35:03; BPIFA2; ENSG00000131050; CTA
HEGLETVDNTL

SEQ ID NO: 10208 - protein, 11 aa, Homo sapiens
  Table A; Target 10208; HLA-B*38:01; BPIFA2; ENSG00000131050; CTA
HEGLETVDNTL

SEQ ID NO: 10209 - protein, 11 aa, Homo sapiens
  Table A; Target 10209; HLA-B*39:01; BPIFA2; ENSG00000131050; CTA
HEGLETVDNTL

SEQ ID NO: 10210 - protein, 11 aa, Homo sapiens
  Table A; Target 10210; HLA-B*40:01; BPIFA2; ENSG00000131050; CTA
HEGLETVDNTL

SEQ ID NO: 10211 - protein, 11 aa, Homo sapiens
  Table A; Target 10211; HLA-B*40:02; BPIFA2; ENSG00000131050; CTA
HEGLETVDNTL

SEQ ID NO: 10212 - protein, 11 aa, Homo sapiens
  Table A; Target 10212; HLA-B*44:02; BPIFA2; ENSG00000131050; CTA
HEGLETVDNTL

SEQ ID NO: 10213 - protein, 11 aa, Homo sapiens
  Table A; Target 10213; HLA-B*44:03; BPIFA2; ENSG00000131050; CTA
HEGLETVDNTL

SEQ ID NO: 10214 - protein, 11 aa, Homo sapiens
  Table A; Target 10214; HLA-B*49:01; BPIFA2; ENSG00000131050; CTA
HEGLETVDNTL

SEQ ID NO: 10215 - protein, 11 aa, Homo sapiens
  Table A; Target 10215; HLA-C*07:01; BPIFA2; ENSG00000131050; CTA
HEGLETVDNTL

SEQ ID NO: 10216 - protein, 11 aa, Homo sapiens
  Table A; Target 10216; HLA-C*07:04; BPIFA2; ENSG00000131050; CTA
HEGLETVDNTL

SEQ ID NO: 10217 - protein, 9 aa, Homo sapiens
  Table A; Target 10217; HLA-B*13:02; BPIFA2; ENSG00000131050; CTA
HKTQLQTLI

SEQ ID NO: 10218 - protein, 8 aa, Homo sapiens
  Table A; Target 10218; HLA-B*13:02; BPIFA2; ENSG00000131050; CTA
HSLDVNVI

SEQ ID NO: 10219 - protein, 8 aa, Homo sapiens
  Table A; Target 10219; HLA-B*51:01; BPIFA2; ENSG00000131050; CTA
HSLDVNVI

SEQ ID NO: 10220 - protein, 8 aa, Homo sapiens
  Table A; Target 10220; HLA-C*07:01; BPIFA2; ENSG00000131050; CTA
HSLDVNVI

SEQ ID NO: 10221 - protein, 8 aa, Homo sapiens
  Table A; Target 10221; HLA-C*07:04; BPIFA2; ENSG00000131050; CTA
HSLDVNVI

SEQ ID NO: 10222 - protein, 8 aa, Homo sapiens
  Table A; Target 10222; HLA-C*12:03; BPIFA2; ENSG00000131050; CTA
HSLDVNVI

SEQ ID NO: 10223 - protein, 9 aa, Homo sapiens
  Table A; Target 10223; HLA-C*07:01; BPIFA2; ENSG00000131050; CTA
HSLDVNVIQ

SEQ ID NO: 10224 - protein, 9 aa, Homo sapiens
  Table A; Target 10224; HLA-C*12:03; BPIFA2; ENSG00000131050; CTA
HSLDVNVIQ

SEQ ID NO: 10225 - protein, 10 aa, Homo sapiens
  Table A; Target 10225; HLA-A*68:01; BPIFA2; ENSG00000131050; CTA
HSLDVNVIQQ

SEQ ID NO: 10226 - protein, 10 aa, Homo sapiens
  Table A; Target 10226; HLA-C*07:01; BPIFA2; ENSG00000131050; CTA
HSLDVNVIQQ

SEQ ID NO: 10227 - protein, 11 aa, Homo sapiens
  Table A; Target 10227; HLA-A*02:01; BPIFA2; ENSG00000131050; CTA
HSLDVNVIQQV

SEQ ID NO: 10228 - protein, 11 aa, Homo sapiens
  Table A; Target 10228; HLA-A*02:07; BPIFA2; ENSG00000131050; CTA
HSLDVNVIQQV

SEQ ID NO: 10229 - protein, 11 aa, Homo sapiens
  Table A; Target 10229; HLA-A*68:01; BPIFA2; ENSG00000131050; CTA
HSLDVNVIQQV

SEQ ID NO: 10230 - protein, 11 aa, Homo sapiens
  Table A; Target 10230; HLA-A*68:02; BPIFA2; ENSG00000131050; CTA
HSLDVNVIQQV

SEQ ID NO: 10231 - protein, 11 aa, Homo sapiens
  Table A; Target 10231; HLA-B*13:02; BPIFA2; ENSG00000131050; CTA
HSLDVNVIQQV

SEQ ID NO: 10232 - protein, 8 aa, Homo sapiens
  Table A; Target 10232; HLA-B*08:01; BPIFA2; ENSG00000131050; CTA
HSQIINKF

SEQ ID NO: 10233 - protein, 8 aa, Homo sapiens
  Table A; Target 10233; HLA-B*18:01; BPIFA2; ENSG00000131050; CTA
HSQIINKF

SEQ ID NO: 10234 - protein, 8 aa, Homo sapiens
  Table A; Target 10234; HLA-B*37:01; BPIFA2; ENSG00000131050; CTA
HSQIINKF

SEQ ID NO: 10235 - protein, 8 aa, Homo sapiens
  Table A; Target 10235; HLA-B*40:02; BPIFA2; ENSG00000131050; CTA
HSQIINKF

SEQ ID NO: 10236 - protein, 8 aa, Homo sapiens
  Table A; Target 10236; HLA-B*57:01; BPIFA2; ENSG00000131050; CTA
HSQIINKF

SEQ ID NO: 10237 - protein, 8 aa, Homo sapiens
  Table A; Target 10237; HLA-B*58:01; BPIFA2; ENSG00000131050; CTA
HSQIINKF

SEQ ID NO: 10238 - protein, 8 aa, Homo sapiens
  Table A; Target 10238; HLA-C*06:02; BPIFA2; ENSG00000131050; CTA
HSQIINKF

SEQ ID NO: 10239 - protein, 8 aa, Homo sapiens
  Table A; Target 10239; HLA-C*07:01; BPIFA2; ENSG00000131050; CTA
HSQIINKF

SEQ ID NO: 10240 - protein, 8 aa, Homo sapiens
  Table A; Target 10240; HLA-C*07:04; BPIFA2; ENSG00000131050; CTA
HSQIINKF

SEQ ID NO: 10241 - protein, 8 aa, Homo sapiens
  Table A; Target 10241; HLA-C*12:03; BPIFA2; ENSG00000131050; CTA
HSQIINKF

SEQ ID NO: 10242 - protein, 9 aa, Homo sapiens
  Table A; Target 10242; HLA-A*68:02; BPIFA2; ENSG00000131050; CTA
HSQIINKFV

SEQ ID NO: 10243 - protein, 9 aa, Homo sapiens
  Table A; Target 10243; HLA-C*06:02; BPIFA2; ENSG00000131050; CTA
HSQIINKFV

SEQ ID NO: 10244 - protein, 9 aa, Homo sapiens
  Table A; Target 10244; HLA-C*07:01; BPIFA2; ENSG00000131050; CTA
HSQIINKFV

SEQ ID NO: 10245 - protein, 10 aa, Homo sapiens
  Table A; Target 10245; HLA-C*07:01; BPIFA2; ENSG00000131050; CTA
HSQIINKFVN

SEQ ID NO: 10246 - protein, 9 aa, Homo sapiens
  Table A; Target 10246; HLA-A*02:07; BPIFA2; ENSG00000131050; CTA
IDDGKGLNL

SEQ ID NO: 10247 - protein, 9 aa, Homo sapiens
  Table A; Target 10247; HLA-A*30:01; BPIFA2; ENSG00000131050; CTA
IDDGKGLNL

SEQ ID NO: 10248 - protein, 9 aa, Homo sapiens
  Table A; Target 10248; HLA-B*37:01; BPIFA2; ENSG00000131050; CTA
IDDGKGLNL

SEQ ID NO: 10249 - protein, 9 aa, Homo sapiens
  Table A; Target 10249; HLA-B*38:01; BPIFA2; ENSG00000131050; CTA
IDDGKGLNL

SEQ ID NO: 10250 - protein, 9 aa, Homo sapiens
  Table A; Target 10250; HLA-B*39:01; BPIFA2; ENSG00000131050; CTA
IDDGKGLNL

SEQ ID NO: 10251 - protein, 9 aa, Homo sapiens
  Table A; Target 10251; HLA-B*40:01; BPIFA2; ENSG00000131050; CTA
IDDGKGLNL

SEQ ID NO: 10252 - protein, 9 aa, Homo sapiens
  Table A; Target 10252; HLA-B*40:02; BPIFA2; ENSG00000131050; CTA
IDDGKGLNL

SEQ ID NO: 10253 - protein, 9 aa, Homo sapiens
  Table A; Target 10253; HLA-C*03:04; BPIFA2; ENSG00000131050; CTA
IDDGKGLNL

SEQ ID NO: 10254 - protein, 9 aa, Homo sapiens
  Table A; Target 10254; HLA-C*05:01; BPIFA2; ENSG00000131050; CTA
IDDGKGLNL

SEQ ID NO: 10255 - protein, 8 aa, Homo sapiens
  Table A; Target 10255; HLA-B*18:01; BPIFA2; ENSG00000131050; CTA
IETDPQTH

SEQ ID NO: 10256 - protein, 8 aa, Homo sapiens
  Table A; Target 10256; HLA-C*07:01; BPIFA2; ENSG00000131050; CTA
IETDPQTH

SEQ ID NO: 10257 - protein, 8 aa, Homo sapiens
  Table A; Target 10257; HLA-C*16:02; BPIFA2; ENSG00000131050; CTA
IETDPQTH

SEQ ID NO: 10258 - protein, 9 aa, Homo sapiens
  Table A; Target 10258; HLA-B*27:05; BPIFA2; ENSG00000131050; CTA
IETDPQTHQ

SEQ ID NO: 10259 - protein, 9 aa, Homo sapiens
  Table A; Target 10259; HLA-B*44:02; BPIFA2; ENSG00000131050; CTA
IETDPQTHQ

SEQ ID NO: 10260 - protein, 9 aa, Homo sapiens
  Table A; Target 10260; HLA-B*49:01; BPIFA2; ENSG00000131050; CTA
IETDPQTHQ

SEQ ID NO: 10261 - protein, 10 aa, Homo sapiens
  Table A; Target 10261; HLA-A*30:01; BPIFA2; ENSG00000131050; CTA
IETDPQTHQP

SEQ ID NO: 10262 - protein, 10 aa, Homo sapiens
  Table A; Target 10262; HLA-B*44:02; BPIFA2; ENSG00000131050; CTA
IETDPQTHQP

SEQ ID NO: 10263 - protein, 10 aa, Homo sapiens
  Table A; Target 10263; HLA-B*44:03; BPIFA2; ENSG00000131050; CTA
IETDPQTHQP

SEQ ID NO: 10264 - protein, 10 aa, Homo sapiens
  Table A; Target 10264; HLA-B*49:01; BPIFA2; ENSG00000131050; CTA
IETDPQTHQP

SEQ ID NO: 10265 - protein, 10 aa, Homo sapiens
  Table A; Target 10265; HLA-C*16:02; BPIFA2; ENSG00000131050; CTA
IETDPQTHQP

SEQ ID NO: 10266 - protein, 11 aa, Homo sapiens
  Table A; Target 10266; HLA-A*30:01; BPIFA2; ENSG00000131050; CTA
IETDPQTHQPV

SEQ ID NO: 10267 - protein, 11 aa, Homo sapiens
  Table A; Target 10267; HLA-A*68:02; BPIFA2; ENSG00000131050; CTA
IETDPQTHQPV

SEQ ID NO: 10268 - protein, 11 aa, Homo sapiens
  Table A; Target 10268; HLA-B*13:02; BPIFA2; ENSG00000131050; CTA
IETDPQTHQPV

SEQ ID NO: 10269 - protein, 11 aa, Homo sapiens
  Table A; Target 10269; HLA-B*18:01; BPIFA2; ENSG00000131050; CTA
IETDPQTHQPV

SEQ ID NO: 10270 - protein, 11 aa, Homo sapiens
  Table A; Target 10270; HLA-B*27:05; BPIFA2; ENSG00000131050; CTA
IETDPQTHQPV

SEQ ID NO: 10271 - protein, 11 aa, Homo sapiens
  Table A; Target 10271; HLA-B*39:01; BPIFA2; ENSG00000131050; CTA
IETDPQTHQPV

SEQ ID NO: 10272 - protein, 11 aa, Homo sapiens
  Table A; Target 10272; HLA-B*40:01; BPIFA2; ENSG00000131050; CTA
IETDPQTHQPV

SEQ ID NO: 10273 - protein, 11 aa, Homo sapiens
  Table A; Target 10273; HLA-B*40:02; BPIFA2; ENSG00000131050; CTA
IETDPQTHQPV

SEQ ID NO: 10274 - protein, 11 aa, Homo sapiens
  Table A; Target 10274; HLA-B*49:01; BPIFA2; ENSG00000131050; CTA
IETDPQTHQPV

SEQ ID NO: 10275 - protein, 11 aa, Homo sapiens
  Table A; Target 10275; HLA-C*04:01; BPIFA2; ENSG00000131050; CTA
IETDPQTHQPV

SEQ ID NO: 10276 - protein, 11 aa, Homo sapiens
  Table A; Target 10276; HLA-C*06:02; BPIFA2; ENSG00000131050; CTA
IETDPQTHQPV

SEQ ID NO: 10277 - protein, 11 aa, Homo sapiens
  Table A; Target 10277; HLA-C*07:01; BPIFA2; ENSG00000131050; CTA
IETDPQTHQPV

SEQ ID NO: 10278 - protein, 11 aa, Homo sapiens
  Table A; Target 10278; HLA-C*07:02; BPIFA2; ENSG00000131050; CTA
IETDPQTHQPV

SEQ ID NO: 10279 - protein, 11 aa, Homo sapiens
  Table A; Target 10279; HLA-C*12:03; BPIFA2; ENSG00000131050; CTA
IETDPQTHQPV

SEQ ID NO: 10280 - protein, 11 aa, Homo sapiens
  Table A; Target 10280; HLA-C*16:01; BPIFA2; ENSG00000131050; CTA
IETDPQTHQPV

SEQ ID NO: 10281 - protein, 11 aa, Homo sapiens
  Table A; Target 10281; HLA-C*16:02; BPIFA2; ENSG00000131050; CTA
IETDPQTHQPV

SEQ ID NO: 10282 - protein, 9 aa, Homo sapiens
  Table A; Target 10282; HLA-C*07:01; BPIFA2; ENSG00000131050; CTA
IFIHSLDVN

SEQ ID NO: 10283 - protein, 11 aa, Homo sapiens
  Table A; Target 10283; HLA-A*24:02; BPIFA2; ENSG00000131050; CTA
IFIHSLDVNVI

SEQ ID NO: 10284 - protein, 8 aa, Homo sapiens
  Table A; Target 10284; HLA-A*03:02; BPIFA2; ENSG00000131050; CTA
IGQIINLK

SEQ ID NO: 10285 - protein, 8 aa, Homo sapiens
  Table A; Target 10285; HLA-A*11:01; BPIFA2; ENSG00000131050; CTA
IGQIINLK

SEQ ID NO: 10286 - protein, 9 aa, Homo sapiens
  Table A; Target 10286; HLA-C*06:02; BPIFA2; ENSG00000131050; CTA
IGQIINLKA

SEQ ID NO: 10287 - protein, 8 aa, Homo sapiens
  Table A; Target 10287; HLA-B*38:01; BPIFA2; ENSG00000131050; CTA
IHSLDVNV

SEQ ID NO: 10288 - protein, 9 aa, Homo sapiens
  Table A; Target 10288; HLA-B*27:05; BPIFA2; ENSG00000131050; CTA
IHSLDVNVI

SEQ ID NO: 10289 - protein, 9 aa, Homo sapiens
  Table A; Target 10289; HLA-B*38:01; BPIFA2; ENSG00000131050; CTA
IHSLDVNVI

SEQ ID NO: 10290 - protein, 9 aa, Homo sapiens
  Table A; Target 10290; HLA-B*39:01; BPIFA2; ENSG00000131050; CTA
IHSLDVNVI

SEQ ID NO: 10291 - protein, 9 aa, Homo sapiens
  Table A; Target 10291; HLA-C*07:04; BPIFA2; ENSG00000131050; CTA
IHSLDVNVI

SEQ ID NO: 10292 - protein, 8 aa, Homo sapiens
  Table A; Target 10292; HLA-A*02:03; BPIFA2; ENSG00000131050; CTA
IIGQIINL

SEQ ID NO: 10293 - protein, 8 aa, Homo sapiens
  Table A; Target 10293; HLA-A*02:04; BPIFA2; ENSG00000131050; CTA
IIGQIINL

SEQ ID NO: 10294 - protein, 8 aa, Homo sapiens
  Table A; Target 10294; HLA-A*23:01; BPIFA2; ENSG00000131050; CTA
IIGQIINL

SEQ ID NO: 10295 - protein, 8 aa, Homo sapiens
  Table A; Target 10295; HLA-B*27:05; BPIFA2; ENSG00000131050; CTA
IIGQIINL

SEQ ID NO: 10296 - protein, 8 aa, Homo sapiens
  Table A; Target 10296; HLA-C*01:02; BPIFA2; ENSG00000131050; CTA
IIGQIINL

SEQ ID NO: 10297 - protein, 8 aa, Homo sapiens
  Table A; Target 10297; HLA-C*06:02; BPIFA2; ENSG00000131050; CTA
IIGQIINL

SEQ ID NO: 10298 - protein, 8 aa, Homo sapiens
  Table A; Target 10298; HLA-C*07:04; BPIFA2; ENSG00000131050; CTA
IIGQIINL

SEQ ID NO: 10299 - protein, 9 aa, Homo sapiens
  Table A; Target 10299; HLA-A*03:01; BPIFA2; ENSG00000131050; CTA
IIGQIINLK

SEQ ID NO: 10300 - protein, 9 aa, Homo sapiens
  Table A; Target 10300; HLA-A*03:02; BPIFA2; ENSG00000131050; CTA
IIGQIINLK

SEQ ID NO: 10301 - protein, 9 aa, Homo sapiens
  Table A; Target 10301; HLA-A*11:01; BPIFA2; ENSG00000131050; CTA
IIGQIINLK

SEQ ID NO: 10302 - protein, 9 aa, Homo sapiens
  Table A; Target 10302; HLA-A*33:03; BPIFA2; ENSG00000131050; CTA
IIGQIINLK

SEQ ID NO: 10303 - protein, 9 aa, Homo sapiens
  Table A; Target 10303; HLA-A*68:01; BPIFA2; ENSG00000131050; CTA
IIGQIINLK

SEQ ID NO: 10304 - protein, 9 aa, Homo sapiens
  Table A; Target 10304; HLA-B*27:02; BPIFA2; ENSG00000131050; CTA
IIGQIINLK

SEQ ID NO: 10305 - protein, 9 aa, Homo sapiens
  Table A; Target 10305; HLA-C*07:06; BPIFA2; ENSG00000131050; CTA
IIGQIINLK

SEQ ID NO: 10306 - protein, 9 aa, Homo sapiens
  Table A; Target 10306; HLA-A*02:01; BPIFA2; ENSG00000131050; CTA
IINKFVNSV

SEQ ID NO: 10307 - protein, 9 aa, Homo sapiens
  Table A; Target 10307; HLA-A*02:03; BPIFA2; ENSG00000131050; CTA
IINKFVNSV

SEQ ID NO: 10308 - protein, 9 aa, Homo sapiens
  Table A; Target 10308; HLA-A*02:04; BPIFA2; ENSG00000131050; CTA
IINKFVNSV

SEQ ID NO: 10309 - protein, 9 aa, Homo sapiens
  Table A; Target 10309; HLA-A*02:07; BPIFA2; ENSG00000131050; CTA
IINKFVNSV

SEQ ID NO: 10310 - protein, 9 aa, Homo sapiens
  Table A; Target 10310; HLA-A*30:01; BPIFA2; ENSG00000131050; CTA
IINKFVNSV

SEQ ID NO: 10311 - protein, 9 aa, Homo sapiens
  Table A; Target 10311; HLA-A*31:01; BPIFA2; ENSG00000131050; CTA
IINKFVNSV

SEQ ID NO: 10312 - protein, 9 aa, Homo sapiens
  Table A; Target 10312; HLA-A*32:01; BPIFA2; ENSG00000131050; CTA
IINKFVNSV

SEQ ID NO: 10313 - protein, 9 aa, Homo sapiens
  Table A; Target 10313; HLA-A*68:02; BPIFA2; ENSG00000131050; CTA
IINKFVNSV

SEQ ID NO: 10314 - protein, 9 aa, Homo sapiens
  Table A; Target 10314; HLA-B*08:01; BPIFA2; ENSG00000131050; CTA
IINKFVNSV

SEQ ID NO: 10315 - protein, 9 aa, Homo sapiens
  Table A; Target 10315; HLA-B*13:02; BPIFA2; ENSG00000131050; CTA
IINKFVNSV

SEQ ID NO: 10316 - protein, 9 aa, Homo sapiens
  Table A; Target 10316; HLA-B*37:01; BPIFA2; ENSG00000131050; CTA
IINKFVNSV

SEQ ID NO: 10317 - protein, 9 aa, Homo sapiens
  Table A; Target 10317; HLA-B*40:02; BPIFA2; ENSG00000131050; CTA
IINKFVNSV

SEQ ID NO: 10318 - protein, 9 aa, Homo sapiens
  Table A; Target 10318; HLA-B*46:01; BPIFA2; ENSG00000131050; CTA
IINKFVNSV

SEQ ID NO: 10319 - protein, 9 aa, Homo sapiens
  Table A; Target 10319; HLA-B*49:01; BPIFA2; ENSG00000131050; CTA
IINKFVNSV

SEQ ID NO: 10320 - protein, 9 aa, Homo sapiens
  Table A; Target 10320; HLA-B*51:01; BPIFA2; ENSG00000131050; CTA
IINKFVNSV

SEQ ID NO: 10321 - protein, 9 aa, Homo sapiens
  Table A; Target 10321; HLA-B*54:01; BPIFA2; ENSG00000131050; CTA
IINKFVNSV

SEQ ID NO: 10322 - protein, 9 aa, Homo sapiens
  Table A; Target 10322; HLA-B*55:01; BPIFA2; ENSG00000131050; CTA
IINKFVNSV

SEQ ID NO: 10323 - protein, 9 aa, Homo sapiens
  Table A; Target 10323; HLA-B*58:01; BPIFA2; ENSG00000131050; CTA
IINKFVNSV

SEQ ID NO: 10324 - protein, 9 aa, Homo sapiens
  Table A; Target 10324; HLA-C*01:02; BPIFA2; ENSG00000131050; CTA
IINKFVNSV

SEQ ID NO: 10325 - protein, 9 aa, Homo sapiens
  Table A; Target 10325; HLA-C*02:02; BPIFA2; ENSG00000131050; CTA
IINKFVNSV

SEQ ID NO: 10326 - protein, 9 aa, Homo sapiens
  Table A; Target 10326; HLA-C*06:02; BPIFA2; ENSG00000131050; CTA
IINKFVNSV

SEQ ID NO: 10327 - protein, 9 aa, Homo sapiens
  Table A; Target 10327; HLA-C*12:03; BPIFA2; ENSG00000131050; CTA
IINKFVNSV

SEQ ID NO: 10328 - protein, 9 aa, Homo sapiens
  Table A; Target 10328; HLA-C*16:02; BPIFA2; ENSG00000131050; CTA
IINKFVNSV

SEQ ID NO: 10329 - protein, 8 aa, Homo sapiens
  Table A; Target 10329; HLA-A*32:01; BPIFA2; ENSG00000131050; CTA
IINLKASL

SEQ ID NO: 10330 - protein, 8 aa, Homo sapiens
  Table A; Target 10330; HLA-B*07:02; BPIFA2; ENSG00000131050; CTA
IINLKASL

SEQ ID NO: 10331 - protein, 8 aa, Homo sapiens
  Table A; Target 10331; HLA-B*08:01; BPIFA2; ENSG00000131050; CTA
IINLKASL

SEQ ID NO: 10332 - protein, 8 aa, Homo sapiens
  Table A; Target 10332; HLA-C*01:02; BPIFA2; ENSG00000131050; CTA
IINLKASL

SEQ ID NO: 10333 - protein, 8 aa, Homo sapiens
  Table A; Target 10333; HLA-C*07:02; BPIFA2; ENSG00000131050; CTA
IINLKASL

SEQ ID NO: 10334 - protein, 8 aa, Homo sapiens
  Table A; Target 10334; HLA-C*14:02; BPIFA2; ENSG00000131050; CTA
IINLKASL

SEQ ID NO: 10335 - protein, 8 aa, Homo sapiens
  Table A; Target 10335; HLA-C*16:01; BPIFA2; ENSG00000131050; CTA
IINLKASL

SEQ ID NO: 10336 - protein, 9 aa, Homo sapiens
  Table A; Target 10336; HLA-A*01:01; BPIFA2; ENSG00000131050; CTA
ILDVKAEPI

SEQ ID NO: 10337 - protein, 9 aa, Homo sapiens
  Table A; Target 10337; HLA-A*02:01; BPIFA2; ENSG00000131050; CTA
ILDVKAEPI

SEQ ID NO: 10338 - protein, 9 aa, Homo sapiens
  Table A; Target 10338; HLA-A*02:07; BPIFA2; ENSG00000131050; CTA
ILDVKAEPI

SEQ ID NO: 10339 - protein, 9 aa, Homo sapiens
  Table A; Target 10339; HLA-A*24:02; BPIFA2; ENSG00000131050; CTA
ILDVKAEPI

SEQ ID NO: 10340 - protein, 9 aa, Homo sapiens
  Table A; Target 10340; HLA-B*08:01; BPIFA2; ENSG00000131050; CTA
ILDVKAEPI

SEQ ID NO: 10341 - protein, 9 aa, Homo sapiens
  Table A; Target 10341; HLA-B*13:02; BPIFA2; ENSG00000131050; CTA
ILDVKAEPI

SEQ ID NO: 10342 - protein, 9 aa, Homo sapiens
  Table A; Target 10342; HLA-B*35:03; BPIFA2; ENSG00000131050; CTA
ILDVKAEPI

SEQ ID NO: 10343 - protein, 9 aa, Homo sapiens
  Table A; Target 10343; HLA-B*38:01; BPIFA2; ENSG00000131050; CTA
ILDVKAEPI

SEQ ID NO: 10344 - protein, 9 aa, Homo sapiens
  Table A; Target 10344; HLA-B*55:01; BPIFA2; ENSG00000131050; CTA
ILDVKAEPI

SEQ ID NO: 10345 - protein, 9 aa, Homo sapiens
  Table A; Target 10345; HLA-C*04:01; BPIFA2; ENSG00000131050; CTA
ILDVKAEPI

SEQ ID NO: 10346 - protein, 9 aa, Homo sapiens
  Table A; Target 10346; HLA-C*05:01; BPIFA2; ENSG00000131050; CTA
ILDVKAEPI

SEQ ID NO: 10347 - protein, 9 aa, Homo sapiens
  Table A; Target 10347; HLA-C*06:02; BPIFA2; ENSG00000131050; CTA
ILDVKAEPI

SEQ ID NO: 10348 - protein, 9 aa, Homo sapiens
  Table A; Target 10348; HLA-C*07:01; BPIFA2; ENSG00000131050; CTA
ILDVKAEPI

SEQ ID NO: 10349 - protein, 9 aa, Homo sapiens
  Table A; Target 10349; HLA-C*07:04; BPIFA2; ENSG00000131050; CTA
ILDVKAEPI

SEQ ID NO: 10350 - protein, 9 aa, Homo sapiens
  Table A; Target 10350; HLA-A*02:07; BPIFA2; ENSG00000131050; CTA
ILEKLKVDL

SEQ ID NO: 10351 - protein, 9 aa, Homo sapiens
  Table A; Target 10351; HLA-C*07:04; BPIFA2; ENSG00000131050; CTA
ILEKLKVDL

SEQ ID NO: 10352 - protein, 8 aa, Homo sapiens
  Table A; Target 10352; HLA-B*08:01; BPIFA2; ENSG00000131050; CTA
INKFVNSV

SEQ ID NO: 10353 - protein, 8 aa, Homo sapiens
  Table A; Target 10353; HLA-C*06:02; BPIFA2; ENSG00000131050; CTA
INKFVNSV

SEQ ID NO: 10354 - protein, 8 aa, Homo sapiens
  Table A; Target 10354; HLA-C*07:01; BPIFA2; ENSG00000131050; CTA
INKFVNSV

SEQ ID NO: 10355 - protein, 8 aa, Homo sapiens
  Table A; Target 10355; HLA-C*16:02; BPIFA2; ENSG00000131050; CTA
INKFVNSV

SEQ ID NO: 10356 - protein, 9 aa, Homo sapiens
  Table A; Target 10356; HLA-C*07:01; BPIFA2; ENSG00000131050; CTA
INKFVNSVI

SEQ ID NO: 10357 - protein, 9 aa, Homo sapiens
  Table A; Target 10357; HLA-C*07:02; BPIFA2; ENSG00000131050; CTA
INKFVNSVI

SEQ ID NO: 10358 - protein, 10 aa, Homo sapiens
  Table A; Target 10358; HLA-C*07:01; BPIFA2; ENSG00000131050; CTA
INKFVNSVIN

SEQ ID NO: 10359 - protein, 8 aa, Homo sapiens
  Table A; Target 10359; HLA-B*08:01; BPIFA2; ENSG00000131050; CTA
INTLKSTV

SEQ ID NO: 10360 - protein, 8 aa, Homo sapiens
  Table A; Target 10360; HLA-C*07:01; BPIFA2; ENSG00000131050; CTA
INTLKSTV

SEQ ID NO: 10361 - protein, 8 aa, Homo sapiens
  Table A; Target 10361; HLA-C*07:02; BPIFA2; ENSG00000131050; CTA
INTLKSTV

SEQ ID NO: 10362 - protein, 8 aa, Homo sapiens
  Table A; Target 10362; HLA-C*16:01; BPIFA2; ENSG00000131050; CTA
INTLKSTV

SEQ ID NO: 10363 - protein, 8 aa, Homo sapiens
  Table A; Target 10363; HLA-C*16:02; BPIFA2; ENSG00000131050; CTA
INTLKSTV

SEQ ID NO: 10364 - protein, 9 aa, Homo sapiens
  Table A; Target 10364; HLA-C*04:01; BPIFA2; ENSG00000131050; CTA
IQQVVDNPQ

SEQ ID NO: 10365 - protein, 10 aa, Homo sapiens
  Table A; Target 10365; HLA-C*04:01; BPIFA2; ENSG00000131050; CTA
IQQVVDNPQH

SEQ ID NO: 10366 - protein, 11 aa, Homo sapiens
  Table A; Target 10366; HLA-A*03:02; BPIFA2; ENSG00000131050; CTA
IQQVVDNPQHK

SEQ ID NO: 10367 - protein, 11 aa, Homo sapiens
  Table A; Target 10367; HLA-A*11:01; BPIFA2; ENSG00000131050; CTA
IQQVVDNPQHK

SEQ ID NO: 10368 - protein, 11 aa, Homo sapiens
  Table A; Target 10368; HLA-A*31:01; BPIFA2; ENSG00000131050; CTA
IQQVVDNPQHK

SEQ ID NO: 10369 - protein, 11 aa, Homo sapiens
  Table A; Target 10369; HLA-C*04:01; BPIFA2; ENSG00000131050; CTA
IQQVVDNPQHK

SEQ ID NO: 10370 - protein, 8 aa, Homo sapiens
  Table A; Target 10370; HLA-C*06:02; BPIFA2; ENSG00000131050; CTA
IRIFIHSL

SEQ ID NO: 10371 - protein, 8 aa, Homo sapiens
  Table A; Target 10371; HLA-C*06:02; BPIFA2; ENSG00000131050; CTA
ISKLLPTN

SEQ ID NO: 10372 - protein, 8 aa, Homo sapiens
  Table A; Target 10372; HLA-C*07:01; BPIFA2; ENSG00000131050; CTA
ISKLLPTN

SEQ ID NO: 10373 - protein, 9 aa, Homo sapiens
  Table A; Target 10373; HLA-C*06:02; BPIFA2; ENSG00000131050; CTA
ISKLLPTNT

SEQ ID NO: 10374 - protein, 8 aa, Homo sapiens
  Table A; Target 10374; HLA-A*11:01; BPIFA2; ENSG00000131050; CTA
ISLSLLDK

SEQ ID NO: 10375 - protein, 9 aa, Homo sapiens
  Table A; Target 10375; HLA-A*01:01; BPIFA2; ENSG00000131050; CTA
ISNSLILDV

SEQ ID NO: 10376 - protein, 9 aa, Homo sapiens
  Table A; Target 10376; HLA-A*02:01; BPIFA2; ENSG00000131050; CTA
ISNSLILDV

SEQ ID NO: 10377 - protein, 9 aa, Homo sapiens
  Table A; Target 10377; HLA-A*02:03; BPIFA2; ENSG00000131050; CTA
ISNSLILDV

SEQ ID NO: 10378 - protein, 9 aa, Homo sapiens
  Table A; Target 10378; HLA-A*02:04; BPIFA2; ENSG00000131050; CTA
ISNSLILDV

SEQ ID NO: 10379 - protein, 9 aa, Homo sapiens
  Table A; Target 10379; HLA-A*02:07; BPIFA2; ENSG00000131050; CTA
ISNSLILDV

SEQ ID NO: 10380 - protein, 9 aa, Homo sapiens
  Table A; Target 10380; HLA-A*03:01; BPIFA2; ENSG00000131050; CTA
ISNSLILDV

SEQ ID NO: 10381 - protein, 9 aa, Homo sapiens
  Table A; Target 10381; HLA-A*11:01; BPIFA2; ENSG00000131050; CTA
ISNSLILDV

SEQ ID NO: 10382 - protein, 9 aa, Homo sapiens
  Table A; Target 10382; HLA-A*30:01; BPIFA2; ENSG00000131050; CTA
ISNSLILDV

SEQ ID NO: 10383 - protein, 9 aa, Homo sapiens
  Table A; Target 10383; HLA-A*68:02; BPIFA2; ENSG00000131050; CTA
ISNSLILDV

SEQ ID NO: 10384 - protein, 9 aa, Homo sapiens
  Table A; Target 10384; HLA-B*13:02; BPIFA2; ENSG00000131050; CTA
ISNSLILDV

SEQ ID NO: 10385 - protein, 9 aa, Homo sapiens
  Table A; Target 10385; HLA-B*27:02; BPIFA2; ENSG00000131050; CTA
ISNSLILDV

SEQ ID NO: 10386 - protein, 9 aa, Homo sapiens
  Table A; Target 10386; HLA-B*40:02; BPIFA2; ENSG00000131050; CTA
ISNSLILDV

SEQ ID NO: 10387 - protein, 9 aa, Homo sapiens
  Table A; Target 10387; HLA-B*49:01; BPIFA2; ENSG00000131050; CTA
ISNSLILDV

SEQ ID NO: 10388 - protein, 9 aa, Homo sapiens
  Table A; Target 10388; HLA-B*51:01; BPIFA2; ENSG00000131050; CTA
ISNSLILDV

SEQ ID NO: 10389 - protein, 9 aa, Homo sapiens
  Table A; Target 10389; HLA-B*54:01; BPIFA2; ENSG00000131050; CTA
ISNSLILDV

SEQ ID NO: 10390 - protein, 9 aa, Homo sapiens
  Table A; Target 10390; HLA-B*56:01; BPIFA2; ENSG00000131050; CTA
ISNSLILDV

SEQ ID NO: 10391 - protein, 9 aa, Homo sapiens
  Table A; Target 10391; HLA-B*57:01; BPIFA2; ENSG00000131050; CTA
ISNSLILDV

SEQ ID NO: 10392 - protein, 9 aa, Homo sapiens
  Table A; Target 10392; HLA-B*58:01; BPIFA2; ENSG00000131050; CTA
ISNSLILDV

SEQ ID NO: 10393 - protein, 9 aa, Homo sapiens
  Table A; Target 10393; HLA-C*02:02; BPIFA2; ENSG00000131050; CTA
ISNSLILDV

SEQ ID NO: 10394 - protein, 9 aa, Homo sapiens
  Table A; Target 10394; HLA-C*04:01; BPIFA2; ENSG00000131050; CTA
ISNSLILDV

SEQ ID NO: 10395 - protein, 9 aa, Homo sapiens
  Table A; Target 10395; HLA-C*06:02; BPIFA2; ENSG00000131050; CTA
ISNSLILDV

SEQ ID NO: 10396 - protein, 9 aa, Homo sapiens
  Table A; Target 10396; HLA-C*07:01; BPIFA2; ENSG00000131050; CTA
ISNSLILDV

SEQ ID NO: 10397 - protein, 9 aa, Homo sapiens
  Table A; Target 10397; HLA-C*07:02; BPIFA2; ENSG00000131050; CTA
ISNSLILDV

SEQ ID NO: 10398 - protein, 9 aa, Homo sapiens
  Table A; Target 10398; HLA-C*12:03; BPIFA2; ENSG00000131050; CTA
ISNSLILDV

SEQ ID NO: 10399 - protein, 9 aa, Homo sapiens
  Table A; Target 10399; HLA-C*16:02; BPIFA2; ENSG00000131050; CTA
ISNSLILDV

SEQ ID NO: 10400 - protein, 9 aa, Homo sapiens
  Table A; Target 10400; HLA-C*16:04; BPIFA2; ENSG00000131050; CTA
ISNSLILDV

SEQ ID NO: 10401 - protein, 10 aa, Homo sapiens
  Table A; Target 10401; HLA-A*01:01; BPIFA2; ENSG00000131050; CTA
ISNSLILDVK

SEQ ID NO: 10402 - protein, 10 aa, Homo sapiens
  Table A; Target 10402; HLA-A*03:01; BPIFA2; ENSG00000131050; CTA
ISNSLILDVK

SEQ ID NO: 10403 - protein, 10 aa, Homo sapiens
  Table A; Target 10403; HLA-A*03:02; BPIFA2; ENSG00000131050; CTA
ISNSLILDVK

SEQ ID NO: 10404 - protein, 10 aa, Homo sapiens
  Table A; Target 10404; HLA-A*11:01; BPIFA2; ENSG00000131050; CTA
ISNSLILDVK

SEQ ID NO: 10405 - protein, 10 aa, Homo sapiens
  Table A; Target 10405; HLA-B*27:02; BPIFA2; ENSG00000131050; CTA
ISNSLILDVK

SEQ ID NO: 10406 - protein, 10 aa, Homo sapiens
  Table A; Target 10406; HLA-B*57:01; BPIFA2; ENSG00000131050; CTA
ISNSLILDVK

SEQ ID NO: 10407 - protein, 11 aa, Homo sapiens
  Table A; Target 10407; HLA-C*04:01; BPIFA2; ENSG00000131050; CTA
KAEPIDDGKGL

SEQ ID NO: 10408 - protein, 8 aa, Homo sapiens
  Table A; Target 10408; HLA-A*32:01; BPIFA2; ENSG00000131050; CTA
KAQEAEKL

SEQ ID NO: 10409 - protein, 8 aa, Homo sapiens
  Table A; Target 10409; HLA-B*58:01; BPIFA2; ENSG00000131050; CTA
KAQEAEKL

SEQ ID NO: 10410 - protein, 8 aa, Homo sapiens
  Table A; Target 10410; HLA-C*01:02; BPIFA2; ENSG00000131050; CTA
KAQEAEKL

SEQ ID NO: 10411 - protein, 8 aa, Homo sapiens
  Table A; Target 10411; HLA-C*03:04; BPIFA2; ENSG00000131050; CTA
KAQEAEKL

SEQ ID NO: 10412 - protein, 8 aa, Homo sapiens
  Table A; Target 10412; HLA-C*05:01; BPIFA2; ENSG00000131050; CTA
KAQEAEKL

SEQ ID NO: 10413 - protein, 8 aa, Homo sapiens
  Table A; Target 10413; HLA-C*06:02; BPIFA2; ENSG00000131050; CTA
KAQEAEKL

SEQ ID NO: 10414 - protein, 8 aa, Homo sapiens
  Table A; Target 10414; HLA-C*07:02; BPIFA2; ENSG00000131050; CTA
KAQEAEKL

SEQ ID NO: 10415 - protein, 8 aa, Homo sapiens
  Table A; Target 10415; HLA-C*16:01; BPIFA2; ENSG00000131050; CTA
KAQEAEKL

SEQ ID NO: 10416 - protein, 8 aa, Homo sapiens
  Table A; Target 10416; HLA-C*16:02; BPIFA2; ENSG00000131050; CTA
KAQEAEKL

SEQ ID NO: 10417 - protein, 9 aa, Homo sapiens
  Table A; Target 10417; HLA-A*31:01; BPIFA2; ENSG00000131050; CTA
KAQEAEKLL

SEQ ID NO: 10418 - protein, 9 aa, Homo sapiens
  Table A; Target 10418; HLA-A*32:01; BPIFA2; ENSG00000131050; CTA
KAQEAEKLL

SEQ ID NO: 10419 - protein, 9 aa, Homo sapiens
  Table A; Target 10419; HLA-B*07:02; BPIFA2; ENSG00000131050; CTA
KAQEAEKLL

SEQ ID NO: 10420 - protein, 9 aa, Homo sapiens
  Table A; Target 10420; HLA-B*15:01; BPIFA2; ENSG00000131050; CTA
KAQEAEKLL

SEQ ID NO: 10421 - protein, 9 aa, Homo sapiens
  Table A; Target 10421; HLA-B*38:01; BPIFA2; ENSG00000131050; CTA
KAQEAEKLL

SEQ ID NO: 10422 - protein, 9 aa, Homo sapiens
  Table A; Target 10422; HLA-B*40:01; BPIFA2; ENSG00000131050; CTA
KAQEAEKLL

SEQ ID NO: 10423 - protein, 9 aa, Homo sapiens
  Table A; Target 10423; HLA-B*40:02; BPIFA2; ENSG00000131050; CTA
KAQEAEKLL

SEQ ID NO: 10424 - protein, 9 aa, Homo sapiens
  Table A; Target 10424; HLA-B*57:01; BPIFA2; ENSG00000131050; CTA
KAQEAEKLL

SEQ ID NO: 10425 - protein, 9 aa, Homo sapiens
  Table A; Target 10425; HLA-B*58:01; BPIFA2; ENSG00000131050; CTA
KAQEAEKLL

SEQ ID NO: 10426 - protein, 9 aa, Homo sapiens
  Table A; Target 10426; HLA-C*01:02; BPIFA2; ENSG00000131050; CTA
KAQEAEKLL

SEQ ID NO: 10427 - protein, 9 aa, Homo sapiens
  Table A; Target 10427; HLA-C*03:03; BPIFA2; ENSG00000131050; CTA
KAQEAEKLL

SEQ ID NO: 10428 - protein, 9 aa, Homo sapiens
  Table A; Target 10428; HLA-C*03:04; BPIFA2; ENSG00000131050; CTA
KAQEAEKLL

SEQ ID NO: 10429 - protein, 9 aa, Homo sapiens
  Table A; Target 10429; HLA-C*04:01; BPIFA2; ENSG00000131050; CTA
KAQEAEKLL

SEQ ID NO: 10430 - protein, 9 aa, Homo sapiens
  Table A; Target 10430; HLA-C*05:01; BPIFA2; ENSG00000131050; CTA
KAQEAEKLL

SEQ ID NO: 10431 - protein, 9 aa, Homo sapiens
  Table A; Target 10431; HLA-C*06:02; BPIFA2; ENSG00000131050; CTA
KAQEAEKLL

SEQ ID NO: 10432 - protein, 9 aa, Homo sapiens
  Table A; Target 10432; HLA-C*07:01; BPIFA2; ENSG00000131050; CTA
KAQEAEKLL

SEQ ID NO: 10433 - protein, 9 aa, Homo sapiens
  Table A; Target 10433; HLA-C*07:04; BPIFA2; ENSG00000131050; CTA
KAQEAEKLL

SEQ ID NO: 10434 - protein, 9 aa, Homo sapiens
  Table A; Target 10434; HLA-C*12:03; BPIFA2; ENSG00000131050; CTA
KAQEAEKLL

SEQ ID NO: 10435 - protein, 9 aa, Homo sapiens
  Table A; Target 10435; HLA-C*16:01; BPIFA2; ENSG00000131050; CTA
KAQEAEKLL

SEQ ID NO: 10436 - protein, 9 aa, Homo sapiens
  Table A; Target 10436; HLA-C*16:02; BPIFA2; ENSG00000131050; CTA
KAQEAEKLL

SEQ ID NO: 10437 - protein, 9 aa, Homo sapiens
  Table A; Target 10437; HLA-C*16:04; BPIFA2; ENSG00000131050; CTA
KAQEAEKLL

SEQ ID NO: 10438 - protein, 10 aa, Homo sapiens
  Table A; Target 10438; HLA-C*06:02; BPIFA2; ENSG00000131050; CTA
KAQEAEKLLN

SEQ ID NO: 10439 - protein, 10 aa, Homo sapiens
  Table A; Target 10439; HLA-C*07:01; BPIFA2; ENSG00000131050; CTA
KAQEAEKLLN

SEQ ID NO: 10440 - protein, 10 aa, Homo sapiens
  Table A; Target 10440; HLA-C*16:02; BPIFA2; ENSG00000131050; CTA
KAQEAEKLLN

SEQ ID NO: 10441 - protein, 11 aa, Homo sapiens
  Table A; Target 10441; HLA-A*31:01; BPIFA2; ENSG00000131050; CTA
KAQEAEKLLNN

SEQ ID NO: 10442 - protein, 11 aa, Homo sapiens
  Table A; Target 10442; HLA-C*06:02; BPIFA2; ENSG00000131050; CTA
KAQEAEKLLNN

SEQ ID NO: 10443 - protein, 9 aa, Homo sapiens
  Table A; Target 10443; HLA-B*54:01; BPIFA2; ENSG00000131050; CTA
KASLDLLTA

SEQ ID NO: 10444 - protein, 9 aa, Homo sapiens
  Table A; Target 10444; HLA-B*56:01; BPIFA2; ENSG00000131050; CTA
KASLDLLTA

SEQ ID NO: 10445 - protein, 9 aa, Homo sapiens
  Table A; Target 10445; HLA-B*58:01; BPIFA2; ENSG00000131050; CTA
KASLDLLTA

SEQ ID NO: 10446 - protein, 9 aa, Homo sapiens
  Table A; Target 10446; HLA-C*03:04; BPIFA2; ENSG00000131050; CTA
KASLDLLTA

SEQ ID NO: 10447 - protein, 9 aa, Homo sapiens
  Table A; Target 10447; HLA-C*06:02; BPIFA2; ENSG00000131050; CTA
KASLDLLTA

SEQ ID NO: 10448 - protein, 9 aa, Homo sapiens
  Table A; Target 10448; HLA-C*16:02; BPIFA2; ENSG00000131050; CTA
KASLDLLTA

SEQ ID NO: 10449 - protein, 10 aa, Homo sapiens
  Table A; Target 10449; HLA-B*07:02; BPIFA2; ENSG00000131050; CTA
KASLDLLTAV

SEQ ID NO: 10450 - protein, 10 aa, Homo sapiens
  Table A; Target 10450; HLA-B*40:02; BPIFA2; ENSG00000131050; CTA
KASLDLLTAV

SEQ ID NO: 10451 - protein, 10 aa, Homo sapiens
  Table A; Target 10451; HLA-B*56:01; BPIFA2; ENSG00000131050; CTA
KASLDLLTAV

SEQ ID NO: 10452 - protein, 10 aa, Homo sapiens
  Table A; Target 10452; HLA-C*06:02; BPIFA2; ENSG00000131050; CTA
KASLDLLTAV

SEQ ID NO: 10453 - protein, 10 aa, Homo sapiens
  Table A; Target 10453; HLA-C*07:02; BPIFA2; ENSG00000131050; CTA
KASLDLLTAV

SEQ ID NO: 10454 - protein, 10 aa, Homo sapiens
  Table A; Target 10454; HLA-C*16:02; BPIFA2; ENSG00000131050; CTA
KASLDLLTAV

SEQ ID NO: 10455 - protein, 10 aa, Homo sapiens
  Table A; Target 10455; HLA-C*16:04; BPIFA2; ENSG00000131050; CTA
KASLDLLTAV

SEQ ID NO: 10456 - protein, 9 aa, Homo sapiens
  Table A; Target 10456; HLA-B*44:02; BPIFA2; ENSG00000131050; CTA
KEICPLIRI

SEQ ID NO: 10457 - protein, 9 aa, Homo sapiens
  Table A; Target 10457; HLA-B*44:03; BPIFA2; ENSG00000131050; CTA
KEICPLIRI

SEQ ID NO: 10458 - protein, 9 aa, Homo sapiens
  Table A; Target 10458; HLA-B*49:01; BPIFA2; ENSG00000131050; CTA
KEICPLIRI

SEQ ID NO: 10459 - protein, 10 aa, Homo sapiens
  Table A; Target 10459; HLA-B*44:02; BPIFA2; ENSG00000131050; CTA
KEICPLIRIF

SEQ ID NO: 10460 - protein, 10 aa, Homo sapiens
  Table A; Target 10460; HLA-A*23:01; BPIFA2; ENSG00000131050; CTA
KFVNSVINTL

SEQ ID NO: 10461 - protein, 10 aa, Homo sapiens
  Table A; Target 10461; HLA-A*24:02; BPIFA2; ENSG00000131050; CTA
KFVNSVINTL

SEQ ID NO: 10462 - protein, 10 aa, Homo sapiens
  Table A; Target 10462; HLA-A*30:01; BPIFA2; ENSG00000131050; CTA
KFVNSVINTL

SEQ ID NO: 10463 - protein, 10 aa, Homo sapiens
  Table A; Target 10463; HLA-B*07:02; BPIFA2; ENSG00000131050; CTA
KFVNSVINTL

SEQ ID NO: 10464 - protein, 10 aa, Homo sapiens
  Table A; Target 10464; HLA-B*15:03; BPIFA2; ENSG00000131050; CTA
KFVNSVINTL

SEQ ID NO: 10465 - protein, 10 aa, Homo sapiens
  Table A; Target 10465; HLA-B*40:01; BPIFA2; ENSG00000131050; CTA
KFVNSVINTL

SEQ ID NO: 10466 - protein, 10 aa, Homo sapiens
  Table A; Target 10466; HLA-B*40:02; BPIFA2; ENSG00000131050; CTA
KFVNSVINTL

SEQ ID NO: 10467 - protein, 10 aa, Homo sapiens
  Table A; Target 10467; HLA-B*58:01; BPIFA2; ENSG00000131050; CTA
KFVNSVINTL

SEQ ID NO: 10468 - protein, 10 aa, Homo sapiens
  Table A; Target 10468; HLA-C*01:02; BPIFA2; ENSG00000131050; CTA
KFVNSVINTL

SEQ ID NO: 10469 - protein, 10 aa, Homo sapiens
  Table A; Target 10469; HLA-C*04:01; BPIFA2; ENSG00000131050; CTA
KFVNSVINTL

SEQ ID NO: 10470 - protein, 10 aa, Homo sapiens
  Table A; Target 10470; HLA-C*06:02; BPIFA2; ENSG00000131050; CTA
KFVNSVINTL

SEQ ID NO: 10471 - protein, 10 aa, Homo sapiens
  Table A; Target 10471; HLA-C*07:02; BPIFA2; ENSG00000131050; CTA
KFVNSVINTL

SEQ ID NO: 10472 - protein, 10 aa, Homo sapiens
  Table A; Target 10472; HLA-C*07:04; BPIFA2; ENSG00000131050; CTA
KFVNSVINTL

SEQ ID NO: 10473 - protein, 10 aa, Homo sapiens
  Table A; Target 10473; HLA-C*12:03; BPIFA2; ENSG00000131050; CTA
KFVNSVINTL

SEQ ID NO: 10474 - protein, 10 aa, Homo sapiens
  Table A; Target 10474; HLA-C*14:02; BPIFA2; ENSG00000131050; CTA
KFVNSVINTL

SEQ ID NO: 10475 - protein, 10 aa, Homo sapiens
  Table A; Target 10475; HLA-C*16:01; BPIFA2; ENSG00000131050; CTA
KFVNSVINTL

SEQ ID NO: 10476 - protein, 10 aa, Homo sapiens
  Table A; Target 10476; HLA-C*16:02; BPIFA2; ENSG00000131050; CTA
KFVNSVINTL

SEQ ID NO: 10477 - protein, 11 aa, Homo sapiens
  Table A; Target 10477; HLA-A*23:01; BPIFA2; ENSG00000131050; CTA
KFVNSVINTLK

SEQ ID NO: 10478 - protein, 11 aa, Homo sapiens
  Table A; Target 10478; HLA-A*31:01; BPIFA2; ENSG00000131050; CTA
KFVNSVINTLK

SEQ ID NO: 10479 - protein, 11 aa, Homo sapiens
  Table A; Target 10479; HLA-C*04:01; BPIFA2; ENSG00000131050; CTA
KFVNSVINTLK

SEQ ID NO: 10480 - protein, 11 aa, Homo sapiens
  Table A; Target 10480; HLA-C*06:02; BPIFA2; ENSG00000131050; CTA
KFVNSVINTLK

SEQ ID NO: 10481 - protein, 11 aa, Homo sapiens
  Table A; Target 10481; HLA-C*07:01; BPIFA2; ENSG00000131050; CTA
KFVNSVINTLK

SEQ ID NO: 10482 - protein, 8 aa, Homo sapiens
  Table A; Target 10482; HLA-A*03:01; BPIFA2; ENSG00000131050; CTA
KHSQIINK

SEQ ID NO: 10483 - protein, 8 aa, Homo sapiens
  Table A; Target 10483; HLA-A*03:02; BPIFA2; ENSG00000131050; CTA
KHSQIINK

SEQ ID NO: 10484 - protein, 8 aa, Homo sapiens
  Table A; Target 10484; HLA-A*31:01; BPIFA2; ENSG00000131050; CTA
KHSQIINK

SEQ ID NO: 10485 - protein, 9 aa, Homo sapiens
  Table A; Target 10485; HLA-A*23:01; BPIFA2; ENSG00000131050; CTA
KHSQIINKF

SEQ ID NO: 10486 - protein, 9 aa, Homo sapiens
  Table A; Target 10486; HLA-A*24:02; BPIFA2; ENSG00000131050; CTA
KHSQIINKF

SEQ ID NO: 10487 - protein, 9 aa, Homo sapiens
  Table A; Target 10487; HLA-A*31:01; BPIFA2; ENSG00000131050; CTA
KHSQIINKF

SEQ ID NO: 10488 - protein, 9 aa, Homo sapiens
  Table A; Target 10488; HLA-A*32:01; BPIFA2; ENSG00000131050; CTA
KHSQIINKF

SEQ ID NO: 10489 - protein, 9 aa, Homo sapiens
  Table A; Target 10489; HLA-B*15:03; BPIFA2; ENSG00000131050; CTA
KHSQIINKF

SEQ ID NO: 10490 - protein, 9 aa, Homo sapiens
  Table A; Target 10490; HLA-B*27:05; BPIFA2; ENSG00000131050; CTA
KHSQIINKF

SEQ ID NO: 10491 - protein, 9 aa, Homo sapiens
  Table A; Target 10491; HLA-B*38:01; BPIFA2; ENSG00000131050; CTA
KHSQIINKF

SEQ ID NO: 10492 - protein, 9 aa, Homo sapiens
  Table A; Target 10492; HLA-B*44:02; BPIFA2; ENSG00000131050; CTA
KHSQIINKF

SEQ ID NO: 10493 - protein, 9 aa, Homo sapiens
  Table A; Target 10493; HLA-B*44:03; BPIFA2; ENSG00000131050; CTA
KHSQIINKF

SEQ ID NO: 10494 - protein, 9 aa, Homo sapiens
  Table A; Target 10494; HLA-B*57:01; BPIFA2; ENSG00000131050; CTA
KHSQIINKF

SEQ ID NO: 10495 - protein, 9 aa, Homo sapiens
  Table A; Target 10495; HLA-B*58:01; BPIFA2; ENSG00000131050; CTA
KHSQIINKF

SEQ ID NO: 10496 - protein, 9 aa, Homo sapiens
  Table A; Target 10496; HLA-C*02:02; BPIFA2; ENSG00000131050; CTA
KHSQIINKF

SEQ ID NO: 10497 - protein, 9 aa, Homo sapiens
  Table A; Target 10497; HLA-C*04:01; BPIFA2; ENSG00000131050; CTA
KHSQIINKF

SEQ ID NO: 10498 - protein, 9 aa, Homo sapiens
  Table A; Target 10498; HLA-C*06:02; BPIFA2; ENSG00000131050; CTA
KHSQIINKF

SEQ ID NO: 10499 - protein, 9 aa, Homo sapiens
  Table A; Target 10499; HLA-C*07:04; BPIFA2; ENSG00000131050; CTA
KHSQIINKF

SEQ ID NO: 10500 - protein, 9 aa, Homo sapiens
  Table A; Target 10500; HLA-C*12:03; BPIFA2; ENSG00000131050; CTA
KHSQIINKF

SEQ ID NO: 10501 - protein, 9 aa, Homo sapiens
  Table A; Target 10501; HLA-C*16:04; BPIFA2; ENSG00000131050; CTA
KHSQIINKF

SEQ ID NO: 10502 - protein, 10 aa, Homo sapiens
  Table A; Target 10502; HLA-A*02:03; BPIFA2; ENSG00000131050; CTA
KISNSLILDV

SEQ ID NO: 10503 - protein, 10 aa, Homo sapiens
  Table A; Target 10503; HLA-B*13:02; BPIFA2; ENSG00000131050; CTA
KISNSLILDV

SEQ ID NO: 10504 - protein, 10 aa, Homo sapiens
  Table A; Target 10504; HLA-C*06:02; BPIFA2; ENSG00000131050; CTA
KISNSLILDV

SEQ ID NO: 10505 - protein, 11 aa, Homo sapiens
  Table A; Target 10505; HLA-A*03:01; BPIFA2; ENSG00000131050; CTA
KISNSLILDVK

SEQ ID NO: 10506 - protein, 11 aa, Homo sapiens
  Table A; Target 10506; HLA-A*03:02; BPIFA2; ENSG00000131050; CTA
KISNSLILDVK

SEQ ID NO: 10507 - protein, 11 aa, Homo sapiens
  Table A; Target 10507; HLA-A*11:01; BPIFA2; ENSG00000131050; CTA
KISNSLILDVK

SEQ ID NO: 10508 - protein, 9 aa, Homo sapiens
  Table A; Target 10508; HLA-A*02:07; BPIFA2; ENSG00000131050; CTA
KLEPVLHEG

SEQ ID NO: 10509 - protein, 10 aa, Homo sapiens
  Table A; Target 10509; HLA-A*02:07; BPIFA2; ENSG00000131050; CTA
KLEPVLHEGL

SEQ ID NO: 10510 - protein, 9 aa, Homo sapiens
  Table A; Target 10510; HLA-A*02:03; BPIFA2; ENSG00000131050; CTA
KLKVDLGVL

SEQ ID NO: 10511 - protein, 9 aa, Homo sapiens
  Table A; Target 10511; HLA-A*02:04; BPIFA2; ENSG00000131050; CTA
KLKVDLGVL

SEQ ID NO: 10512 - protein, 9 aa, Homo sapiens
  Table A; Target 10512; HLA-A*03:01; BPIFA2; ENSG00000131050; CTA
KLKVDLGVL

SEQ ID NO: 10513 - protein, 9 aa, Homo sapiens
  Table A; Target 10513; HLA-B*40:02; BPIFA2; ENSG00000131050; CTA
KLKVDLGVL

SEQ ID NO: 10514 - protein, 9 aa, Homo sapiens
  Table A; Target 10514; HLA-C*04:01; BPIFA2; ENSG00000131050; CTA
KLKVDLGVL

SEQ ID NO: 10515 - protein, 11 aa, Homo sapiens
  Table A; Target 10515; HLA-A*03:01; BPIFA2; ENSG00000131050; CTA
KLKVDLGVLQK

SEQ ID NO: 10516 - protein, 11 aa, Homo sapiens
  Table A; Target 10516; HLA-A*03:02; BPIFA2; ENSG00000131050; CTA
KLKVDLGVLQK

SEQ ID NO: 10517 - protein, 11 aa, Homo sapiens
  Table A; Target 10517; HLA-A*31:01; BPIFA2; ENSG00000131050; CTA
KLKVDLGVLQK

SEQ ID NO: 10518 - protein, 9 aa, Homo sapiens
  Table A; Target 10518; HLA-A*02:01; BPIFA2; ENSG00000131050; CTA
KLLNNVISK

SEQ ID NO: 10519 - protein, 9 aa, Homo sapiens
  Table A; Target 10519; HLA-A*02:03; BPIFA2; ENSG00000131050; CTA
KLLNNVISK

SEQ ID NO: 10520 - protein, 9 aa, Homo sapiens
  Table A; Target 10520; HLA-A*02:04; BPIFA2; ENSG00000131050; CTA
KLLNNVISK

SEQ ID NO: 10521 - protein, 9 aa, Homo sapiens
  Table A; Target 10521; HLA-A*02:07; BPIFA2; ENSG00000131050; CTA
KLLNNVISK

SEQ ID NO: 10522 - protein, 9 aa, Homo sapiens
  Table A; Target 10522; HLA-A*03:01; BPIFA2; ENSG00000131050; CTA
KLLNNVISK

SEQ ID NO: 10523 - protein, 9 aa, Homo sapiens
  Table A; Target 10523; HLA-A*03:02; BPIFA2; ENSG00000131050; CTA
KLLNNVISK

SEQ ID NO: 10524 - protein, 9 aa, Homo sapiens
  Table A; Target 10524; HLA-A*11:01; BPIFA2; ENSG00000131050; CTA
KLLNNVISK

SEQ ID NO: 10525 - protein, 9 aa, Homo sapiens
  Table A; Target 10525; HLA-A*31:01; BPIFA2; ENSG00000131050; CTA
KLLNNVISK

SEQ ID NO: 10526 - protein, 9 aa, Homo sapiens
  Table A; Target 10526; HLA-A*32:01; BPIFA2; ENSG00000131050; CTA
KLLNNVISK

SEQ ID NO: 10527 - protein, 9 aa, Homo sapiens
  Table A; Target 10527; HLA-A*33:01; BPIFA2; ENSG00000131050; CTA
KLLNNVISK

SEQ ID NO: 10528 - protein, 9 aa, Homo sapiens
  Table A; Target 10528; HLA-B*13:02; BPIFA2; ENSG00000131050; CTA
KLLNNVISK

SEQ ID NO: 10529 - protein, 9 aa, Homo sapiens
  Table A; Target 10529; HLA-B*27:02; BPIFA2; ENSG00000131050; CTA
KLLNNVISK

SEQ ID NO: 10530 - protein, 9 aa, Homo sapiens
  Table A; Target 10530; HLA-B*27:05; BPIFA2; ENSG00000131050; CTA
KLLNNVISK

SEQ ID NO: 10531 - protein, 9 aa, Homo sapiens
  Table A; Target 10531; HLA-B*55:01; BPIFA2; ENSG00000131050; CTA
KLLNNVISK

SEQ ID NO: 10532 - protein, 9 aa, Homo sapiens
  Table A; Target 10532; HLA-B*57:01; BPIFA2; ENSG00000131050; CTA
KLLNNVISK

SEQ ID NO: 10533 - protein, 9 aa, Homo sapiens
  Table A; Target 10533; HLA-C*06:02; BPIFA2; ENSG00000131050; CTA
KLLNNVISK

SEQ ID NO: 10534 - protein, 9 aa, Homo sapiens
  Table A; Target 10534; HLA-C*07:01; BPIFA2; ENSG00000131050; CTA
KLLNNVISK

SEQ ID NO: 10535 - protein, 9 aa, Homo sapiens
  Table A; Target 10535; HLA-C*16:01; BPIFA2; ENSG00000131050; CTA
KLLNNVISK

SEQ ID NO: 10536 - protein, 10 aa, Homo sapiens
  Table A; Target 10536; HLA-A*02:01; BPIFA2; ENSG00000131050; CTA
KLLNNVISKL

SEQ ID NO: 10537 - protein, 10 aa, Homo sapiens
  Table A; Target 10537; HLA-A*02:03; BPIFA2; ENSG00000131050; CTA
KLLNNVISKL

SEQ ID NO: 10538 - protein, 10 aa, Homo sapiens
  Table A; Target 10538; HLA-A*02:04; BPIFA2; ENSG00000131050; CTA
KLLNNVISKL

SEQ ID NO: 10539 - protein, 10 aa, Homo sapiens
  Table A; Target 10539; HLA-A*02:07; BPIFA2; ENSG00000131050; CTA
KLLNNVISKL

SEQ ID NO: 10540 - protein, 10 aa, Homo sapiens
  Table A; Target 10540; HLA-A*03:01; BPIFA2; ENSG00000131050; CTA
KLLNNVISKL

SEQ ID NO: 10541 - protein, 10 aa, Homo sapiens
  Table A; Target 10541; HLA-A*03:02; BPIFA2; ENSG00000131050; CTA
KLLNNVISKL

SEQ ID NO: 10542 - protein, 10 aa, Homo sapiens
  Table A; Target 10542; HLA-A*31:01; BPIFA2; ENSG00000131050; CTA
KLLNNVISKL

SEQ ID NO: 10543 - protein, 11 aa, Homo sapiens
  Table A; Target 10543; HLA-A*02:01; BPIFA2; ENSG00000131050; CTA
KLLNNVISKLL

SEQ ID NO: 10544 - protein, 9 aa, Homo sapiens
  Table A; Target 10544; HLA-A*02:01; BPIFA2; ENSG00000131050; CTA
KLLPTNTDI

SEQ ID NO: 10545 - protein, 9 aa, Homo sapiens
  Table A; Target 10545; HLA-A*02:03; BPIFA2; ENSG00000131050; CTA
KLLPTNTDI

SEQ ID NO: 10546 - protein, 9 aa, Homo sapiens
  Table A; Target 10546; HLA-A*02:04; BPIFA2; ENSG00000131050; CTA
KLLPTNTDI

SEQ ID NO: 10547 - protein, 9 aa, Homo sapiens
  Table A; Target 10547; HLA-A*02:07; BPIFA2; ENSG00000131050; CTA
KLLPTNTDI

SEQ ID NO: 10548 - protein, 9 aa, Homo sapiens
  Table A; Target 10548; HLA-A*23:01; BPIFA2; ENSG00000131050; CTA
KLLPTNTDI

SEQ ID NO: 10549 - protein, 9 aa, Homo sapiens
  Table A; Target 10549; HLA-A*30:01; BPIFA2; ENSG00000131050; CTA
KLLPTNTDI

SEQ ID NO: 10550 - protein, 9 aa, Homo sapiens
  Table A; Target 10550; HLA-A*32:01; BPIFA2; ENSG00000131050; CTA
KLLPTNTDI

SEQ ID NO: 10551 - protein, 9 aa, Homo sapiens
  Table A; Target 10551; HLA-B*13:02; BPIFA2; ENSG00000131050; CTA
KLLPTNTDI

SEQ ID NO: 10552 - protein, 9 aa, Homo sapiens
  Table A; Target 10552; HLA-B*55:01; BPIFA2; ENSG00000131050; CTA
KLLPTNTDI

SEQ ID NO: 10553 - protein, 9 aa, Homo sapiens
  Table A; Target 10553; HLA-B*58:01; BPIFA2; ENSG00000131050; CTA
KLLPTNTDI

SEQ ID NO: 10554 - protein, 10 aa, Homo sapiens
  Table A; Target 10554; HLA-A*02:04; BPIFA2; ENSG00000131050; CTA
KLLPTNTDIF

SEQ ID NO: 10555 - protein, 10 aa, Homo sapiens
  Table A; Target 10555; HLA-A*23:01; BPIFA2; ENSG00000131050; CTA
KLLPTNTDIF

SEQ ID NO: 10556 - protein, 10 aa, Homo sapiens
  Table A; Target 10556; HLA-A*24:02; BPIFA2; ENSG00000131050; CTA
KLLPTNTDIF

SEQ ID NO: 10557 - protein, 10 aa, Homo sapiens
  Table A; Target 10557; HLA-A*30:02; BPIFA2; ENSG00000131050; CTA
KLLPTNTDIF

SEQ ID NO: 10558 - protein, 10 aa, Homo sapiens
  Table A; Target 10558; HLA-A*32:01; BPIFA2; ENSG00000131050; CTA
KLLPTNTDIF

SEQ ID NO: 10559 - protein, 10 aa, Homo sapiens
  Table A; Target 10559; HLA-B*15:01; BPIFA2; ENSG00000131050; CTA
KLLPTNTDIF

SEQ ID NO: 10560 - protein, 10 aa, Homo sapiens
  Table A; Target 10560; HLA-B*15:03; BPIFA2; ENSG00000131050; CTA
KLLPTNTDIF

SEQ ID NO: 10561 - protein, 10 aa, Homo sapiens
  Table A; Target 10561; HLA-B*57:01; BPIFA2; ENSG00000131050; CTA
KLLPTNTDIF

SEQ ID NO: 10562 - protein, 10 aa, Homo sapiens
  Table A; Target 10562; HLA-B*58:01; BPIFA2; ENSG00000131050; CTA
KLLPTNTDIF

SEQ ID NO: 10563 - protein, 10 aa, Homo sapiens
  Table A; Target 10563; HLA-C*07:01; BPIFA2; ENSG00000131050; CTA
KLLPTNTDIF

SEQ ID NO: 10564 - protein, 10 aa, Homo sapiens
  Table A; Target 10564; HLA-C*07:02; BPIFA2; ENSG00000131050; CTA
KLLPTNTDIF

SEQ ID NO: 10565 - protein, 10 aa, Homo sapiens
  Table A; Target 10565; HLA-C*12:03; BPIFA2; ENSG00000131050; CTA
KLLPTNTDIF

SEQ ID NO: 10566 - protein, 11 aa, Homo sapiens
  Table A; Target 10566; HLA-A*02:01; BPIFA2; ENSG00000131050; CTA
KLLPTNTDIFG

SEQ ID NO: 10567 - protein, 11 aa, Homo sapiens
  Table A; Target 10567; HLA-C*04:01; BPIFA2; ENSG00000131050; CTA
KLLPTNTDIFG

SEQ ID NO: 10568 - protein, 11 aa, Homo sapiens
  Table A; Target 10568; HLA-C*07:01; BPIFA2; ENSG00000131050; CTA
KLLPTNTDIFG

SEQ ID NO: 10569 - protein, 9 aa, Homo sapiens
  Table A; Target 10569; HLA-C*06:02; BPIFA2; ENSG00000131050; CTA
KLVLLCGVL

SEQ ID NO: 10570 - protein, 9 aa, Homo sapiens
  Table A; Target 10570; HLA-C*07:01; BPIFA2; ENSG00000131050; CTA
KLVLLCGVL

SEQ ID NO: 10571 - protein, 10 aa, Homo sapiens
  Table A; Target 10571; HLA-B*40:01; BPIFA2; ENSG00000131050; CTA
KQKAQEAEKL

SEQ ID NO: 10572 - protein, 10 aa, Homo sapiens
  Table A; Target 10572; HLA-B*40:02; BPIFA2; ENSG00000131050; CTA
KQKAQEAEKL

SEQ ID NO: 10573 - protein, 11 aa, Homo sapiens
  Table A; Target 10573; HLA-A*31:01; BPIFA2; ENSG00000131050; CTA
KQKAQEAEKLL

SEQ ID NO: 10574 - protein, 11 aa, Homo sapiens
  Table A; Target 10574; HLA-C*04:01; BPIFA2; ENSG00000131050; CTA
KQKAQEAEKLL

SEQ ID NO: 10575 - protein, 11 aa, Homo sapiens
  Table A; Target 10575; HLA-C*07:02; BPIFA2; ENSG00000131050; CTA
KQKAQEAEKLL

SEQ ID NO: 10576 - protein, 9 aa, Homo sapiens
  Table A; Target 10576; HLA-A*03:01; BPIFA2; ENSG00000131050; CTA
KSSAWQLAK

SEQ ID NO: 10577 - protein, 9 aa, Homo sapiens
  Table A; Target 10577; HLA-A*03:02; BPIFA2; ENSG00000131050; CTA
KSSAWQLAK

SEQ ID NO: 10578 - protein, 9 aa, Homo sapiens
  Table A; Target 10578; HLA-A*11:01; BPIFA2; ENSG00000131050; CTA
KSSAWQLAK

SEQ ID NO: 10579 - protein, 9 aa, Homo sapiens
  Table A; Target 10579; HLA-A*31:01; BPIFA2; ENSG00000131050; CTA
KSSAWQLAK

SEQ ID NO: 10580 - protein, 9 aa, Homo sapiens
  Table A; Target 10580; HLA-B*27:02; BPIFA2; ENSG00000131050; CTA
KSSAWQLAK

SEQ ID NO: 10581 - protein, 9 aa, Homo sapiens
  Table A; Target 10581; HLA-B*57:01; BPIFA2; ENSG00000131050; CTA
KSSAWQLAK

SEQ ID NO: 10582 - protein, 9 aa, Homo sapiens
  Table A; Target 10582; HLA-C*06:02; BPIFA2; ENSG00000131050; CTA
KSSAWQLAK

SEQ ID NO: 10583 - protein, 9 aa, Homo sapiens
  Table A; Target 10583; HLA-C*07:01; BPIFA2; ENSG00000131050; CTA
KSSAWQLAK

SEQ ID NO: 10584 - protein, 10 aa, Homo sapiens
  Table A; Target 10584; HLA-C*07:01; BPIFA2; ENSG00000131050; CTA
KSSAWQLAKQ

SEQ ID NO: 10585 - protein, 11 aa, Homo sapiens
  Table A; Target 10585; HLA-A*03:02; BPIFA2; ENSG00000131050; CTA
KSSAWQLAKQK

SEQ ID NO: 10586 - protein, 11 aa, Homo sapiens
  Table A; Target 10586; HLA-C*04:01; BPIFA2; ENSG00000131050; CTA
KSSAWQLAKQK

SEQ ID NO: 10587 - protein, 11 aa, Homo sapiens
  Table A; Target 10587; HLA-C*06:02; BPIFA2; ENSG00000131050; CTA
KSSAWQLAKQK

SEQ ID NO: 10588 - protein, 8 aa, Homo sapiens
  Table A; Target 10588; HLA-A*32:01; BPIFA2; ENSG00000131050; CTA
KSTVSSLL

SEQ ID NO: 10589 - protein, 8 aa, Homo sapiens
  Table A; Target 10589; HLA-B*07:02; BPIFA2; ENSG00000131050; CTA
KSTVSSLL

SEQ ID NO: 10590 - protein, 8 aa, Homo sapiens
  Table A; Target 10590; HLA-B*40:02; BPIFA2; ENSG00000131050; CTA
KSTVSSLL

SEQ ID NO: 10591 - protein, 8 aa, Homo sapiens
  Table A; Target 10591; HLA-B*57:01; BPIFA2; ENSG00000131050; CTA
KSTVSSLL

SEQ ID NO: 10592 - protein, 8 aa, Homo sapiens
  Table A; Target 10592; HLA-B*58:01; BPIFA2; ENSG00000131050; CTA
KSTVSSLL

SEQ ID NO: 10593 - protein, 8 aa, Homo sapiens
  Table A; Target 10593; HLA-C*03:03; BPIFA2; ENSG00000131050; CTA
KSTVSSLL

SEQ ID NO: 10594 - protein, 8 aa, Homo sapiens
  Table A; Target 10594; HLA-C*03:04; BPIFA2; ENSG00000131050; CTA
KSTVSSLL

SEQ ID NO: 10595 - protein, 8 aa, Homo sapiens
  Table A; Target 10595; HLA-C*04:01; BPIFA2; ENSG00000131050; CTA
KSTVSSLL

SEQ ID NO: 10596 - protein, 8 aa, Homo sapiens
  Table A; Target 10596; HLA-C*06:02; BPIFA2; ENSG00000131050; CTA
KSTVSSLL

SEQ ID NO: 10597 - protein, 8 aa, Homo sapiens
  Table A; Target 10597; HLA-C*07:01; BPIFA2; ENSG00000131050; CTA
KSTVSSLL

SEQ ID NO: 10598 - protein, 8 aa, Homo sapiens
  Table A; Target 10598; HLA-C*07:02; BPIFA2; ENSG00000131050; CTA
KSTVSSLL

SEQ ID NO: 10599 - protein, 8 aa, Homo sapiens
  Table A; Target 10599; HLA-C*07:04; BPIFA2; ENSG00000131050; CTA
KSTVSSLL

SEQ ID NO: 10600 - protein, 8 aa, Homo sapiens
  Table A; Target 10600; HLA-C*16:01; BPIFA2; ENSG00000131050; CTA
KSTVSSLL

SEQ ID NO: 10601 - protein, 8 aa, Homo sapiens
  Table A; Target 10601; HLA-C*16:02; BPIFA2; ENSG00000131050; CTA
KSTVSSLL

SEQ ID NO: 10602 - protein, 9 aa, Homo sapiens
  Table A; Target 10602; HLA-C*06:02; BPIFA2; ENSG00000131050; CTA
KSTVSSLLQ

SEQ ID NO: 10603 - protein, 9 aa, Homo sapiens
  Table A; Target 10603; HLA-C*07:01; BPIFA2; ENSG00000131050; CTA
KSTVSSLLQ

SEQ ID NO: 10604 - protein, 10 aa, Homo sapiens
  Table A; Target 10604; HLA-A*03:01; BPIFA2; ENSG00000131050; CTA
KSTVSSLLQK

SEQ ID NO: 10605 - protein, 10 aa, Homo sapiens
  Table A; Target 10605; HLA-A*03:02; BPIFA2; ENSG00000131050; CTA
KSTVSSLLQK

SEQ ID NO: 10606 - protein, 10 aa, Homo sapiens
  Table A; Target 10606; HLA-A*11:01; BPIFA2; ENSG00000131050; CTA
KSTVSSLLQK

SEQ ID NO: 10607 - protein, 10 aa, Homo sapiens
  Table A; Target 10607; HLA-C*07:02; BPIFA2; ENSG00000131050; CTA
KSTVSSLLQK

SEQ ID NO: 10608 - protein, 8 aa, Homo sapiens
  Table A; Target 10608; HLA-C*04:01; BPIFA2; ENSG00000131050; CTA
KVDLGVLQ

SEQ ID NO: 10609 - protein, 9 aa, Homo sapiens
  Table A; Target 10609; HLA-A*01:01; BPIFA2; ENSG00000131050; CTA
KVDLGVLQK

SEQ ID NO: 10610 - protein, 9 aa, Homo sapiens
  Table A; Target 10610; HLA-A*02:07; BPIFA2; ENSG00000131050; CTA
KVDLGVLQK

SEQ ID NO: 10611 - protein, 9 aa, Homo sapiens
  Table A; Target 10611; HLA-A*03:01; BPIFA2; ENSG00000131050; CTA
KVDLGVLQK

SEQ ID NO: 10612 - protein, 9 aa, Homo sapiens
  Table A; Target 10612; HLA-A*03:02; BPIFA2; ENSG00000131050; CTA
KVDLGVLQK

SEQ ID NO: 10613 - protein, 9 aa, Homo sapiens
  Table A; Target 10613; HLA-A*11:01; BPIFA2; ENSG00000131050; CTA
KVDLGVLQK

SEQ ID NO: 10614 - protein, 9 aa, Homo sapiens
  Table A; Target 10614; HLA-A*31:01; BPIFA2; ENSG00000131050; CTA
KVDLGVLQK

SEQ ID NO: 10615 - protein, 9 aa, Homo sapiens
  Table A; Target 10615; HLA-A*32:01; BPIFA2; ENSG00000131050; CTA
KVDLGVLQK

SEQ ID NO: 10616 - protein, 9 aa, Homo sapiens
  Table A; Target 10616; HLA-A*33:03; BPIFA2; ENSG00000131050; CTA
KVDLGVLQK

SEQ ID NO: 10617 - protein, 9 aa, Homo sapiens
  Table A; Target 10617; HLA-A*68:01; BPIFA2; ENSG00000131050; CTA
KVDLGVLQK

SEQ ID NO: 10618 - protein, 9 aa, Homo sapiens
  Table A; Target 10618; HLA-B*07:02; BPIFA2; ENSG00000131050; CTA
KVDLGVLQK

SEQ ID NO: 10619 - protein, 9 aa, Homo sapiens
  Table A; Target 10619; HLA-B*13:02; BPIFA2; ENSG00000131050; CTA
KVDLGVLQK

SEQ ID NO: 10620 - protein, 9 aa, Homo sapiens
  Table A; Target 10620; HLA-B*27:02; BPIFA2; ENSG00000131050; CTA
KVDLGVLQK

SEQ ID NO: 10621 - protein, 9 aa, Homo sapiens
  Table A; Target 10621; HLA-B*27:05; BPIFA2; ENSG00000131050; CTA
KVDLGVLQK

SEQ ID NO: 10622 - protein, 9 aa, Homo sapiens
  Table A; Target 10622; HLA-B*40:02; BPIFA2; ENSG00000131050; CTA
KVDLGVLQK

SEQ ID NO: 10623 - protein, 9 aa, Homo sapiens
  Table A; Target 10623; HLA-B*57:01; BPIFA2; ENSG00000131050; CTA
KVDLGVLQK

SEQ ID NO: 10624 - protein, 9 aa, Homo sapiens
  Table A; Target 10624; HLA-B*58:01; BPIFA2; ENSG00000131050; CTA
KVDLGVLQK

SEQ ID NO: 10625 - protein, 9 aa, Homo sapiens
  Table A; Target 10625; HLA-C*01:02; BPIFA2; ENSG00000131050; CTA
KVDLGVLQK

SEQ ID NO: 10626 - protein, 9 aa, Homo sapiens
  Table A; Target 10626; HLA-C*04:01; BPIFA2; ENSG00000131050; CTA
KVDLGVLQK

SEQ ID NO: 10627 - protein, 9 aa, Homo sapiens
  Table A; Target 10627; HLA-C*05:01; BPIFA2; ENSG00000131050; CTA
KVDLGVLQK

SEQ ID NO: 10628 - protein, 9 aa, Homo sapiens
  Table A; Target 10628; HLA-C*06:02; BPIFA2; ENSG00000131050; CTA
KVDLGVLQK

SEQ ID NO: 10629 - protein, 9 aa, Homo sapiens
  Table A; Target 10629; HLA-C*07:01; BPIFA2; ENSG00000131050; CTA
KVDLGVLQK

SEQ ID NO: 10630 - protein, 9 aa, Homo sapiens
  Table A; Target 10630; HLA-C*07:04; BPIFA2; ENSG00000131050; CTA
KVDLGVLQK

SEQ ID NO: 10631 - protein, 9 aa, Homo sapiens
  Table A; Target 10631; HLA-C*07:06; BPIFA2; ENSG00000131050; CTA
KVDLGVLQK

SEQ ID NO: 10632 - protein, 9 aa, Homo sapiens
  Table A; Target 10632; HLA-C*12:03; BPIFA2; ENSG00000131050; CTA
KVDLGVLQK

SEQ ID NO: 10633 - protein, 9 aa, Homo sapiens
  Table A; Target 10633; HLA-C*16:02; BPIFA2; ENSG00000131050; CTA
KVDLGVLQK

SEQ ID NO: 10634 - protein, 10 aa, Homo sapiens
  Table A; Target 10634; HLA-C*04:01; BPIFA2; ENSG00000131050; CTA
KVDLGVLQKS

SEQ ID NO: 10635 - protein, 10 aa, Homo sapiens
  Table A; Target 10635; HLA-C*06:02; BPIFA2; ENSG00000131050; CTA
KVDLGVLQKS

SEQ ID NO: 10636 - protein, 10 aa, Homo sapiens
  Table A; Target 10636; HLA-C*07:02; BPIFA2; ENSG00000131050; CTA
KVDLGVLQKS

SEQ ID NO: 10637 - protein, 11 aa, Homo sapiens
  Table A; Target 10637; HLA-C*04:01; BPIFA2; ENSG00000131050; CTA
KVDLGVLQKSS

SEQ ID NO: 10638 - protein, 9 aa, Homo sapiens
  Table A; Target 10638; HLA-B*08:01; BPIFA2; ENSG00000131050; CTA
LAKQKAQEA

SEQ ID NO: 10639 - protein, 9 aa, Homo sapiens
  Table A; Target 10639; HLA-B*46:01; BPIFA2; ENSG00000131050; CTA
LAKQKAQEA

SEQ ID NO: 10640 - protein, 9 aa, Homo sapiens
  Table A; Target 10640; HLA-B*54:01; BPIFA2; ENSG00000131050; CTA
LAKQKAQEA

SEQ ID NO: 10641 - protein, 8 aa, Homo sapiens
  Table A; Target 10641; HLA-C*07:01; BPIFA2; ENSG00000131050; CTA
LDKHSQII

SEQ ID NO: 10642 - protein, 8 aa, Homo sapiens
  Table A; Target 10642; HLA-C*12:03; BPIFA2; ENSG00000131050; CTA
LDKHSQII

SEQ ID NO: 10643 - protein, 10 aa, Homo sapiens
  Table A; Target 10643; HLA-C*04:01; BPIFA2; ENSG00000131050; CTA
LDKHSQIINK

SEQ ID NO: 10644 - protein, 9 aa, Homo sapiens
  Table A; Target 10644; HLA-A*23:01; BPIFA2; ENSG00000131050; CTA
LDLLTAVTI

SEQ ID NO: 10645 - protein, 9 aa, Homo sapiens
  Table A; Target 10645; HLA-A*30:01; BPIFA2; ENSG00000131050; CTA
LDLLTAVTI

SEQ ID NO: 10646 - protein, 9 aa, Homo sapiens
  Table A; Target 10646; HLA-B*13:02; BPIFA2; ENSG00000131050; CTA
LDLLTAVTI

SEQ ID NO: 10647 - protein, 9 aa, Homo sapiens
  Table A; Target 10647; HLA-B*37:01; BPIFA2; ENSG00000131050; CTA
LDLLTAVTI

SEQ ID NO: 10648 - protein, 9 aa, Homo sapiens
  Table A; Target 10648; HLA-B*40:02; BPIFA2; ENSG00000131050; CTA
LDLLTAVTI

SEQ ID NO: 10649 - protein, 9 aa, Homo sapiens
  Table A; Target 10649; HLA-B*49:01; BPIFA2; ENSG00000131050; CTA
LDLLTAVTI

SEQ ID NO: 10650 - protein, 9 aa, Homo sapiens
  Table A; Target 10650; HLA-B*51:01; BPIFA2; ENSG00000131050; CTA
LDLLTAVTI

SEQ ID NO: 10651 - protein, 9 aa, Homo sapiens
  Table A; Target 10651; HLA-C*04:01; BPIFA2; ENSG00000131050; CTA
LDLLTAVTI

SEQ ID NO: 10652 - protein, 9 aa, Homo sapiens
  Table A; Target 10652; HLA-C*07:01; BPIFA2; ENSG00000131050; CTA
LDLLTAVTI

SEQ ID NO: 10653 - protein, 9 aa, Homo sapiens
  Table A; Target 10653; HLA-C*07:04; BPIFA2; ENSG00000131050; CTA
LDLLTAVTI

SEQ ID NO: 10654 - protein, 8 aa, Homo sapiens
  Table A; Target 10654; HLA-B*37:01; BPIFA2; ENSG00000131050; CTA
LDNLGNDL

SEQ ID NO: 10655 - protein, 8 aa, Homo sapiens
  Table A; Target 10655; HLA-B*40:02; BPIFA2; ENSG00000131050; CTA
LDNLGNDL

SEQ ID NO: 10656 - protein, 8 aa, Homo sapiens
  Table A; Target 10656; HLA-C*01:02; BPIFA2; ENSG00000131050; CTA
LDNLGNDL

SEQ ID NO: 10657 - protein, 8 aa, Homo sapiens
  Table A; Target 10657; HLA-C*03:04; BPIFA2; ENSG00000131050; CTA
LDNLGNDL

SEQ ID NO: 10658 - protein, 8 aa, Homo sapiens
  Table A; Target 10658; HLA-C*06:02; BPIFA2; ENSG00000131050; CTA
LDNLGNDL

SEQ ID NO: 10659 - protein, 8 aa, Homo sapiens
  Table A; Target 10659; HLA-C*07:01; BPIFA2; ENSG00000131050; CTA
LDNLGNDL

SEQ ID NO: 10660 - protein, 8 aa, Homo sapiens
  Table A; Target 10660; HLA-C*07:04; BPIFA2; ENSG00000131050; CTA
LDNLGNDL

SEQ ID NO: 10661 - protein, 10 aa, Homo sapiens
  Table A; Target 10661; HLA-C*04:01; BPIFA2; ENSG00000131050; CTA
LDNLGNDLSN

SEQ ID NO: 10662 - protein, 10 aa, Homo sapiens
  Table A; Target 10662; HLA-C*07:01; BPIFA2; ENSG00000131050; CTA
LDNLGNDLSN

SEQ ID NO: 10663 - protein, 8 aa, Homo sapiens
  Table A; Target 10663; HLA-B*18:01; BPIFA2; ENSG00000131050; CTA
LDVKAEPI

SEQ ID NO: 10664 - protein, 8 aa, Homo sapiens
  Table A; Target 10664; HLA-B*37:01; BPIFA2; ENSG00000131050; CTA
LDVKAEPI

SEQ ID NO: 10665 - protein, 8 aa, Homo sapiens
  Table A; Target 10665; HLA-B*40:02; BPIFA2; ENSG00000131050; CTA
LDVKAEPI

SEQ ID NO: 10666 - protein, 8 aa, Homo sapiens
  Table A; Target 10666; HLA-C*04:01; BPIFA2; ENSG00000131050; CTA
LDVKAEPI

SEQ ID NO: 10667 - protein, 8 aa, Homo sapiens
  Table A; Target 10667; HLA-C*06:02; BPIFA2; ENSG00000131050; CTA
LDVKAEPI

SEQ ID NO: 10668 - protein, 8 aa, Homo sapiens
  Table A; Target 10668; HLA-C*07:01; BPIFA2; ENSG00000131050; CTA
LDVKAEPI

SEQ ID NO: 10669 - protein, 8 aa, Homo sapiens
  Table A; Target 10669; HLA-C*07:04; BPIFA2; ENSG00000131050; CTA
LDVKAEPI

SEQ ID NO: 10670 - protein, 8 aa, Homo sapiens
  Table A; Target 10670; HLA-B*40:02; BPIFA2; ENSG00000131050; CTA
LDVNVIQQ

SEQ ID NO: 10671 - protein, 8 aa, Homo sapiens
  Table A; Target 10671; HLA-C*04:01; BPIFA2; ENSG00000131050; CTA
LDVNVIQQ

SEQ ID NO: 10672 - protein, 8 aa, Homo sapiens
  Table A; Target 10672; HLA-C*06:02; BPIFA2; ENSG00000131050; CTA
LDVNVIQQ

SEQ ID NO: 10673 - protein, 8 aa, Homo sapiens
  Table A; Target 10673; HLA-C*07:01; BPIFA2; ENSG00000131050; CTA
LDVNVIQQ

SEQ ID NO: 10674 - protein, 8 aa, Homo sapiens
  Table A; Target 10674; HLA-C*07:04; BPIFA2; ENSG00000131050; CTA
LDVNVIQQ

SEQ ID NO: 10675 - protein, 8 aa, Homo sapiens
  Table A; Target 10675; HLA-C*12:03; BPIFA2; ENSG00000131050; CTA
LDVNVIQQ

SEQ ID NO: 10676 - protein, 9 aa, Homo sapiens
  Table A; Target 10676; HLA-A*02:01; BPIFA2; ENSG00000131050; CTA
LDVNVIQQV

SEQ ID NO: 10677 - protein, 9 aa, Homo sapiens
  Table A; Target 10677; HLA-A*02:03; BPIFA2; ENSG00000131050; CTA
LDVNVIQQV

SEQ ID NO: 10678 - protein, 9 aa, Homo sapiens
  Table A; Target 10678; HLA-A*02:04; BPIFA2; ENSG00000131050; CTA
LDVNVIQQV

SEQ ID NO: 10679 - protein, 9 aa, Homo sapiens
  Table A; Target 10679; HLA-A*02:07; BPIFA2; ENSG00000131050; CTA
LDVNVIQQV

SEQ ID NO: 10680 - protein, 9 aa, Homo sapiens
  Table A; Target 10680; HLA-A*23:01; BPIFA2; ENSG00000131050; CTA
LDVNVIQQV

SEQ ID NO: 10681 - protein, 9 aa, Homo sapiens
  Table A; Target 10681; HLA-A*30:01; BPIFA2; ENSG00000131050; CTA
LDVNVIQQV

SEQ ID NO: 10682 - protein, 9 aa, Homo sapiens
  Table A; Target 10682; HLA-A*68:01; BPIFA2; ENSG00000131050; CTA
LDVNVIQQV

SEQ ID NO: 10683 - protein, 9 aa, Homo sapiens
  Table A; Target 10683; HLA-A*68:02; BPIFA2; ENSG00000131050; CTA
LDVNVIQQV

SEQ ID NO: 10684 - protein, 9 aa, Homo sapiens
  Table A; Target 10684; HLA-B*07:02; BPIFA2; ENSG00000131050; CTA
LDVNVIQQV

SEQ ID NO: 10685 - protein, 9 aa, Homo sapiens
  Table A; Target 10685; HLA-B*13:02; BPIFA2; ENSG00000131050; CTA
LDVNVIQQV

SEQ ID NO: 10686 - protein, 9 aa, Homo sapiens
  Table A; Target 10686; HLA-B*27:02; BPIFA2; ENSG00000131050; CTA
LDVNVIQQV

SEQ ID NO: 10687 - protein, 9 aa, Homo sapiens
  Table A; Target 10687; HLA-B*37:01; BPIFA2; ENSG00000131050; CTA
LDVNVIQQV

SEQ ID NO: 10688 - protein, 9 aa, Homo sapiens
  Table A; Target 10688; HLA-B*38:01; BPIFA2; ENSG00000131050; CTA
LDVNVIQQV

SEQ ID NO: 10689 - protein, 9 aa, Homo sapiens
  Table A; Target 10689; HLA-B*40:02; BPIFA2; ENSG00000131050; CTA
LDVNVIQQV

SEQ ID NO: 10690 - protein, 9 aa, Homo sapiens
  Table A; Target 10690; HLA-B*44:02; BPIFA2; ENSG00000131050; CTA
LDVNVIQQV

SEQ ID NO: 10691 - protein, 9 aa, Homo sapiens
  Table A; Target 10691; HLA-B*44:03; BPIFA2; ENSG00000131050; CTA
LDVNVIQQV

SEQ ID NO: 10692 - protein, 9 aa, Homo sapiens
  Table A; Target 10692; HLA-B*49:01; BPIFA2; ENSG00000131050; CTA
LDVNVIQQV

SEQ ID NO: 10693 - protein, 9 aa, Homo sapiens
  Table A; Target 10693; HLA-B*51:01; BPIFA2; ENSG00000131050; CTA
LDVNVIQQV

SEQ ID NO: 10694 - protein, 9 aa, Homo sapiens
  Table A; Target 10694; HLA-B*55:01; BPIFA2; ENSG00000131050; CTA
LDVNVIQQV

SEQ ID NO: 10695 - protein, 9 aa, Homo sapiens
  Table A; Target 10695; HLA-B*56:01; BPIFA2; ENSG00000131050; CTA
LDVNVIQQV

SEQ ID NO: 10696 - protein, 9 aa, Homo sapiens
  Table A; Target 10696; HLA-C*02:02; BPIFA2; ENSG00000131050; CTA
LDVNVIQQV

SEQ ID NO: 10697 - protein, 9 aa, Homo sapiens
  Table A; Target 10697; HLA-C*04:01; BPIFA2; ENSG00000131050; CTA
LDVNVIQQV

SEQ ID NO: 10698 - protein, 9 aa, Homo sapiens
  Table A; Target 10698; HLA-C*06:02; BPIFA2; ENSG00000131050; CTA
LDVNVIQQV

SEQ ID NO: 10699 - protein, 9 aa, Homo sapiens
  Table A; Target 10699; HLA-C*07:01; BPIFA2; ENSG00000131050; CTA
LDVNVIQQV

SEQ ID NO: 10700 - protein, 9 aa, Homo sapiens
  Table A; Target 10700; HLA-C*07:02; BPIFA2; ENSG00000131050; CTA
LDVNVIQQV

SEQ ID NO: 10701 - protein, 9 aa, Homo sapiens
  Table A; Target 10701; HLA-C*07:04; BPIFA2; ENSG00000131050; CTA
LDVNVIQQV

SEQ ID NO: 10702 - protein, 9 aa, Homo sapiens
  Table A; Target 10702; HLA-C*12:03; BPIFA2; ENSG00000131050; CTA
LDVNVIQQV

SEQ ID NO: 10703 - protein, 9 aa, Homo sapiens
  Table A; Target 10703; HLA-C*16:02; BPIFA2; ENSG00000131050; CTA
LDVNVIQQV

SEQ ID NO: 10704 - protein, 9 aa, Homo sapiens
  Table A; Target 10704; HLA-C*16:04; BPIFA2; ENSG00000131050; CTA
LDVNVIQQV

SEQ ID NO: 10705 - protein, 10 aa, Homo sapiens
  Table A; Target 10705; HLA-A*68:02; BPIFA2; ENSG00000131050; CTA
LDVNVIQQVV

SEQ ID NO: 10706 - protein, 10 aa, Homo sapiens
  Table A; Target 10706; HLA-C*06:02; BPIFA2; ENSG00000131050; CTA
LDVNVIQQVV

SEQ ID NO: 10707 - protein, 10 aa, Homo sapiens
  Table A; Target 10707; HLA-C*07:01; BPIFA2; ENSG00000131050; CTA
LDVNVIQQVV

SEQ ID NO: 10708 - protein, 8 aa, Homo sapiens
  Table A; Target 10708; HLA-B*08:01; BPIFA2; ENSG00000131050; CTA
LEKLKVDL

SEQ ID NO: 10709 - protein, 8 aa, Homo sapiens
  Table A; Target 10709; HLA-B*37:01; BPIFA2; ENSG00000131050; CTA
LEKLKVDL

SEQ ID NO: 10710 - protein, 8 aa, Homo sapiens
  Table A; Target 10710; HLA-B*40:02; BPIFA2; ENSG00000131050; CTA
LEKLKVDL

SEQ ID NO: 10711 - protein, 11 aa, Homo sapiens
  Table A; Target 10711; HLA-B*40:02; BPIFA2; ENSG00000131050; CTA
LEKLKVDLGVL

SEQ ID NO: 10712 - protein, 9 aa, Homo sapiens
  Table A; Target 10712; HLA-A*02:07; BPIFA2; ENSG00000131050; CTA
LEPVLHEGL

SEQ ID NO: 10713 - protein, 9 aa, Homo sapiens
  Table A; Target 10713; HLA-A*30:01; BPIFA2; ENSG00000131050; CTA
LEPVLHEGL

SEQ ID NO: 10714 - protein, 9 aa, Homo sapiens
  Table A; Target 10714; HLA-B*18:01; BPIFA2; ENSG00000131050; CTA
LEPVLHEGL

SEQ ID NO: 10715 - protein, 9 aa, Homo sapiens
  Table A; Target 10715; HLA-B*37:01; BPIFA2; ENSG00000131050; CTA
LEPVLHEGL

SEQ ID NO: 10716 - protein, 9 aa, Homo sapiens
  Table A; Target 10716; HLA-B*40:01; BPIFA2; ENSG00000131050; CTA
LEPVLHEGL

SEQ ID NO: 10717 - protein, 9 aa, Homo sapiens
  Table A; Target 10717; HLA-B*40:02; BPIFA2; ENSG00000131050; CTA
LEPVLHEGL

SEQ ID NO: 10718 - protein, 9 aa, Homo sapiens
  Table A; Target 10718; HLA-B*44:02; BPIFA2; ENSG00000131050; CTA
LEPVLHEGL

SEQ ID NO: 10719 - protein, 9 aa, Homo sapiens
  Table A; Target 10719; HLA-B*44:03; BPIFA2; ENSG00000131050; CTA
LEPVLHEGL

SEQ ID NO: 10720 - protein, 9 aa, Homo sapiens
  Table A; Target 10720; HLA-B*49:01; BPIFA2; ENSG00000131050; CTA
LEPVLHEGL

SEQ ID NO: 10721 - protein, 9 aa, Homo sapiens
  Table A; Target 10721; HLA-C*07:01; BPIFA2; ENSG00000131050; CTA
LEPVLHEGL

SEQ ID NO: 10722 - protein, 9 aa, Homo sapiens
  Table A; Target 10722; HLA-C*07:04; BPIFA2; ENSG00000131050; CTA
LEPVLHEGL

SEQ ID NO: 10723 - protein, 8 aa, Homo sapiens
  Table A; Target 10723; HLA-A*30:01; BPIFA2; ENSG00000131050; CTA
LETVDNTL

SEQ ID NO: 10724 - protein, 8 aa, Homo sapiens
  Table A; Target 10724; HLA-B*18:01; BPIFA2; ENSG00000131050; CTA
LETVDNTL

SEQ ID NO: 10725 - protein, 8 aa, Homo sapiens
  Table A; Target 10725; HLA-B*27:05; BPIFA2; ENSG00000131050; CTA
LETVDNTL

SEQ ID NO: 10726 - protein, 8 aa, Homo sapiens
  Table A; Target 10726; HLA-B*35:03; BPIFA2; ENSG00000131050; CTA
LETVDNTL

SEQ ID NO: 10727 - protein, 8 aa, Homo sapiens
  Table A; Target 10727; HLA-B*37:01; BPIFA2; ENSG00000131050; CTA
LETVDNTL

SEQ ID NO: 10728 - protein, 8 aa, Homo sapiens
  Table A; Target 10728; HLA-B*39:01; BPIFA2; ENSG00000131050; CTA
LETVDNTL

SEQ ID NO: 10729 - protein, 8 aa, Homo sapiens
  Table A; Target 10729; HLA-B*40:01; BPIFA2; ENSG00000131050; CTA
LETVDNTL

SEQ ID NO: 10730 - protein, 8 aa, Homo sapiens
  Table A; Target 10730; HLA-B*40:02; BPIFA2; ENSG00000131050; CTA
LETVDNTL

SEQ ID NO: 10731 - protein, 8 aa, Homo sapiens
  Table A; Target 10731; HLA-B*49:01; BPIFA2; ENSG00000131050; CTA
LETVDNTL

SEQ ID NO: 10732 - protein, 8 aa, Homo sapiens
  Table A; Target 10732; HLA-C*07:04; BPIFA2; ENSG00000131050; CTA
LETVDNTL

SEQ ID NO: 10733 - protein, 9 aa, Homo sapiens
  Table A; Target 10733; HLA-B*27:02; BPIFA2; ENSG00000131050; CTA
LETVDNTLK

SEQ ID NO: 10734 - protein, 9 aa, Homo sapiens
  Table A; Target 10734; HLA-B*27:05; BPIFA2; ENSG00000131050; CTA
LETVDNTLK

SEQ ID NO: 10735 - protein, 9 aa, Homo sapiens
  Table A; Target 10735; HLA-B*40:01; BPIFA2; ENSG00000131050; CTA
LETVDNTLK

SEQ ID NO: 10736 - protein, 9 aa, Homo sapiens
  Table A; Target 10736; HLA-B*49:01; BPIFA2; ENSG00000131050; CTA
LETVDNTLK

SEQ ID NO: 10737 - protein, 9 aa, Homo sapiens
  Table A; Target 10737; HLA-C*04:01; BPIFA2; ENSG00000131050; CTA
LETVDNTLK

SEQ ID NO: 10738 - protein, 9 aa, Homo sapiens
  Table A; Target 10738; HLA-C*07:01; BPIFA2; ENSG00000131050; CTA
LETVDNTLK

SEQ ID NO: 10739 - protein, 9 aa, Homo sapiens
  Table A; Target 10739; HLA-B*13:02; BPIFA2; ENSG00000131050; CTA
LGNDLSNVV

SEQ ID NO: 10740 - protein, 9 aa, Homo sapiens
  Table A; Target 10740; HLA-B*27:05; BPIFA2; ENSG00000131050; CTA
LGNDLSNVV

SEQ ID NO: 10741 - protein, 9 aa, Homo sapiens
  Table A; Target 10741; HLA-B*39:01; BPIFA2; ENSG00000131050; CTA
LGNDLSNVV

SEQ ID NO: 10742 - protein, 9 aa, Homo sapiens
  Table A; Target 10742; HLA-B*51:01; BPIFA2; ENSG00000131050; CTA
LGNDLSNVV

SEQ ID NO: 10743 - protein, 9 aa, Homo sapiens
  Table A; Target 10743; HLA-C*06:02; BPIFA2; ENSG00000131050; CTA
LGNDLSNVV

SEQ ID NO: 10744 - protein, 9 aa, Homo sapiens
  Table A; Target 10744; HLA-C*07:01; BPIFA2; ENSG00000131050; CTA
LGNDLSNVV

SEQ ID NO: 10745 - protein, 9 aa, Homo sapiens
  Table A; Target 10745; HLA-C*12:03; BPIFA2; ENSG00000131050; CTA
LGNDLSNVV

SEQ ID NO: 10746 - protein, 9 aa, Homo sapiens
  Table A; Target 10746; HLA-C*16:02; BPIFA2; ENSG00000131050; CTA
LGNDLSNVV

SEQ ID NO: 10747 - protein, 11 aa, Homo sapiens
  Table A; Target 10747; HLA-A*03:02; BPIFA2; ENSG00000131050; CTA
LGNDLSNVVDK

SEQ ID NO: 10748 - protein, 11 aa, Homo sapiens
  Table A; Target 10748; HLA-A*11:01; BPIFA2; ENSG00000131050; CTA
LGNDLSNVVDK

SEQ ID NO: 10749 - protein, 11 aa, Homo sapiens
  Table A; Target 10749; HLA-B*27:02; BPIFA2; ENSG00000131050; CTA
LGNDLSNVVDK

SEQ ID NO: 10750 - protein, 9 aa, Homo sapiens
  Table A; Target 10750; HLA-B*54:01; BPIFA2; ENSG00000131050; CTA
LGVLQKSSA

SEQ ID NO: 10751 - protein, 10 aa, Homo sapiens
  Table A; Target 10751; HLA-B*57:01; BPIFA2; ENSG00000131050; CTA
LGVLQKSSAW

SEQ ID NO: 10752 - protein, 10 aa, Homo sapiens
  Table A; Target 10752; HLA-B*58:01; BPIFA2; ENSG00000131050; CTA
LGVLQKSSAW

SEQ ID NO: 10753 - protein, 10 aa, Homo sapiens
  Table A; Target 10753; HLA-C*07:01; BPIFA2; ENSG00000131050; CTA
LGVLQKSSAW

SEQ ID NO: 10754 - protein, 10 aa, Homo sapiens
  Table A; Target 10754; HLA-A*02:01; BPIFA2; ENSG00000131050; CTA
LILDVKAEPI

SEQ ID NO: 10755 - protein, 10 aa, Homo sapiens
  Table A; Target 10755; HLA-A*02:03; BPIFA2; ENSG00000131050; CTA
LILDVKAEPI

SEQ ID NO: 10756 - protein, 10 aa, Homo sapiens
  Table A; Target 10756; HLA-A*02:04; BPIFA2; ENSG00000131050; CTA
LILDVKAEPI

SEQ ID NO: 10757 - protein, 10 aa, Homo sapiens
  Table A; Target 10757; HLA-A*02:07; BPIFA2; ENSG00000131050; CTA
LILDVKAEPI

SEQ ID NO: 10758 - protein, 10 aa, Homo sapiens
  Table A; Target 10758; HLA-A*24:02; BPIFA2; ENSG00000131050; CTA
LILDVKAEPI

SEQ ID NO: 10759 - protein, 10 aa, Homo sapiens
  Table A; Target 10759; HLA-A*68:02; BPIFA2; ENSG00000131050; CTA
LILDVKAEPI

SEQ ID NO: 10760 - protein, 10 aa, Homo sapiens
  Table A; Target 10760; HLA-B*07:02; BPIFA2; ENSG00000131050; CTA
LILDVKAEPI

SEQ ID NO: 10761 - protein, 10 aa, Homo sapiens
  Table A; Target 10761; HLA-B*27:02; BPIFA2; ENSG00000131050; CTA
LILDVKAEPI

SEQ ID NO: 10762 - protein, 10 aa, Homo sapiens
  Table A; Target 10762; HLA-B*40:02; BPIFA2; ENSG00000131050; CTA
LILDVKAEPI

SEQ ID NO: 10763 - protein, 10 aa, Homo sapiens
  Table A; Target 10763; HLA-B*57:01; BPIFA2; ENSG00000131050; CTA
LILDVKAEPI

SEQ ID NO: 10764 - protein, 10 aa, Homo sapiens
  Table A; Target 10764; HLA-C*02:02; BPIFA2; ENSG00000131050; CTA
LILDVKAEPI

SEQ ID NO: 10765 - protein, 10 aa, Homo sapiens
  Table A; Target 10765; HLA-C*04:01; BPIFA2; ENSG00000131050; CTA
LILDVKAEPI

SEQ ID NO: 10766 - protein, 10 aa, Homo sapiens
  Table A; Target 10766; HLA-C*06:02; BPIFA2; ENSG00000131050; CTA
LILDVKAEPI

SEQ ID NO: 10767 - protein, 10 aa, Homo sapiens
  Table A; Target 10767; HLA-C*07:01; BPIFA2; ENSG00000131050; CTA
LILDVKAEPI

SEQ ID NO: 10768 - protein, 10 aa, Homo sapiens
  Table A; Target 10768; HLA-C*07:02; BPIFA2; ENSG00000131050; CTA
LILDVKAEPI

SEQ ID NO: 10769 - protein, 10 aa, Homo sapiens
  Table A; Target 10769; HLA-C*07:04; BPIFA2; ENSG00000131050; CTA
LILDVKAEPI

SEQ ID NO: 10770 - protein, 9 aa, Homo sapiens
  Table A; Target 10770; HLA-A*02:03; BPIFA2; ENSG00000131050; CTA
LIRIFIHSL

SEQ ID NO: 10771 - protein, 9 aa, Homo sapiens
  Table A; Target 10771; HLA-A*02:04; BPIFA2; ENSG00000131050; CTA
LIRIFIHSL

SEQ ID NO: 10772 - protein, 8 aa, Homo sapiens
  Table A; Target 10772; HLA-B*15:03; BPIFA2; ENSG00000131050; CTA
LKSTVSSL

SEQ ID NO: 10773 - protein, 9 aa, Homo sapiens
  Table A; Target 10773; HLA-B*15:03; BPIFA2; ENSG00000131050; CTA
LKSTVSSLL

SEQ ID NO: 10774 - protein, 9 aa, Homo sapiens
  Table A; Target 10774; HLA-B*38:01; BPIFA2; ENSG00000131050; CTA
LKSTVSSLL

SEQ ID NO: 10775 - protein, 9 aa, Homo sapiens
  Table A; Target 10775; HLA-C*06:02; BPIFA2; ENSG00000131050; CTA
LKSTVSSLL

SEQ ID NO: 10776 - protein, 10 aa, Homo sapiens
  Table A; Target 10776; HLA-B*27:02; BPIFA2; ENSG00000131050; CTA
LKVDLGVLQK

SEQ ID NO: 10777 - protein, 10 aa, Homo sapiens
  Table A; Target 10777; HLA-C*07:01; BPIFA2; ENSG00000131050; CTA
LKVDLGVLQK

SEQ ID NO: 10778 - protein, 9 aa, Homo sapiens
  Table A; Target 10778; HLA-A*02:01; BPIFA2; ENSG00000131050; CTA
LLCGVLTGT

SEQ ID NO: 10779 - protein, 9 aa, Homo sapiens
  Table A; Target 10779; HLA-A*02:03; BPIFA2; ENSG00000131050; CTA
LLCGVLTGT

SEQ ID NO: 10780 - protein, 8 aa, Homo sapiens
  Table A; Target 10780; HLA-C*05:01; BPIFA2; ENSG00000131050; CTA
LLDKHSQI

SEQ ID NO: 10781 - protein, 9 aa, Homo sapiens
  Table A; Target 10781; HLA-A*01:01; BPIFA2; ENSG00000131050; CTA
LLDKHSQII

SEQ ID NO: 10782 - protein, 9 aa, Homo sapiens
  Table A; Target 10782; HLA-A*02:01; BPIFA2; ENSG00000131050; CTA
LLDKHSQII

SEQ ID NO: 10783 - protein, 9 aa, Homo sapiens
  Table A; Target 10783; HLA-A*02:07; BPIFA2; ENSG00000131050; CTA
LLDKHSQII

SEQ ID NO: 10784 - protein, 9 aa, Homo sapiens
  Table A; Target 10784; HLA-B*13:02; BPIFA2; ENSG00000131050; CTA
LLDKHSQII

SEQ ID NO: 10785 - protein, 9 aa, Homo sapiens
  Table A; Target 10785; HLA-B*38:01; BPIFA2; ENSG00000131050; CTA
LLDKHSQII

SEQ ID NO: 10786 - protein, 9 aa, Homo sapiens
  Table A; Target 10786; HLA-B*55:01; BPIFA2; ENSG00000131050; CTA
LLDKHSQII

SEQ ID NO: 10787 - protein, 9 aa, Homo sapiens
  Table A; Target 10787; HLA-C*07:01; BPIFA2; ENSG00000131050; CTA
LLDKHSQII

SEQ ID NO: 10788 - protein, 11 aa, Homo sapiens
  Table A; Target 10788; HLA-A*03:01; BPIFA2; ENSG00000131050; CTA
LLDKHSQIINK

SEQ ID NO: 10789 - protein, 11 aa, Homo sapiens
  Table A; Target 10789; HLA-A*03:02; BPIFA2; ENSG00000131050; CTA
LLDKHSQIINK

SEQ ID NO: 10790 - protein, 9 aa, Homo sapiens
  Table A; Target 10790; HLA-A*01:01; BPIFA2; ENSG00000131050; CTA
LLDNLGNDL

SEQ ID NO: 10791 - protein, 9 aa, Homo sapiens
  Table A; Target 10791; HLA-A*02:01; BPIFA2; ENSG00000131050; CTA
LLDNLGNDL

SEQ ID NO: 10792 - protein, 9 aa, Homo sapiens
  Table A; Target 10792; HLA-A*02:07; BPIFA2; ENSG00000131050; CTA
LLDNLGNDL

SEQ ID NO: 10793 - protein, 9 aa, Homo sapiens
  Table A; Target 10793; HLA-B*27:05; BPIFA2; ENSG00000131050; CTA
LLDNLGNDL

SEQ ID NO: 10794 - protein, 9 aa, Homo sapiens
  Table A; Target 10794; HLA-B*35:03; BPIFA2; ENSG00000131050; CTA
LLDNLGNDL

SEQ ID NO: 10795 - protein, 9 aa, Homo sapiens
  Table A; Target 10795; HLA-B*38:01; BPIFA2; ENSG00000131050; CTA
LLDNLGNDL

SEQ ID NO: 10796 - protein, 9 aa, Homo sapiens
  Table A; Target 10796; HLA-B*39:01; BPIFA2; ENSG00000131050; CTA
LLDNLGNDL

SEQ ID NO: 10797 - protein, 9 aa, Homo sapiens
  Table A; Target 10797; HLA-B*55:01; BPIFA2; ENSG00000131050; CTA
LLDNLGNDL

SEQ ID NO: 10798 - protein, 9 aa, Homo sapiens
  Table A; Target 10798; HLA-C*04:01; BPIFA2; ENSG00000131050; CTA
LLDNLGNDL

SEQ ID NO: 10799 - protein, 9 aa, Homo sapiens
  Table A; Target 10799; HLA-C*05:01; BPIFA2; ENSG00000131050; CTA
LLDNLGNDL

SEQ ID NO: 10800 - protein, 9 aa, Homo sapiens
  Table A; Target 10800; HLA-C*07:04; BPIFA2; ENSG00000131050; CTA
LLDNLGNDL

SEQ ID NO: 10801 - protein, 10 aa, Homo sapiens
  Table A; Target 10801; HLA-A*02:01; BPIFA2; ENSG00000131050; CTA
LLDNLGNDLS

SEQ ID NO: 10802 - protein, 8 aa, Homo sapiens
  Table A; Target 10802; HLA-A*03:01; BPIFA2; ENSG00000131050; CTA
LLNNVISK

SEQ ID NO: 10803 - protein, 8 aa, Homo sapiens
  Table A; Target 10803; HLA-A*03:02; BPIFA2; ENSG00000131050; CTA
LLNNVISK

SEQ ID NO: 10804 - protein, 8 aa, Homo sapiens
  Table A; Target 10804; HLA-A*11:01; BPIFA2; ENSG00000131050; CTA
LLNNVISK

SEQ ID NO: 10805 - protein, 8 aa, Homo sapiens
  Table A; Target 10805; HLA-B*27:02; BPIFA2; ENSG00000131050; CTA
LLNNVISK

SEQ ID NO: 10806 - protein, 8 aa, Homo sapiens
  Table A; Target 10806; HLA-B*27:05; BPIFA2; ENSG00000131050; CTA
LLNNVISK

SEQ ID NO: 10807 - protein, 8 aa, Homo sapiens
  Table A; Target 10807; HLA-C*01:02; BPIFA2; ENSG00000131050; CTA
LLNNVISK

SEQ ID NO: 10808 - protein, 9 aa, Homo sapiens
  Table A; Target 10808; HLA-A*02:01; BPIFA2; ENSG00000131050; CTA
LLNNVISKL

SEQ ID NO: 10809 - protein, 9 aa, Homo sapiens
  Table A; Target 10809; HLA-A*02:03; BPIFA2; ENSG00000131050; CTA
LLNNVISKL

SEQ ID NO: 10810 - protein, 9 aa, Homo sapiens
  Table A; Target 10810; HLA-A*02:04; BPIFA2; ENSG00000131050; CTA
LLNNVISKL

SEQ ID NO: 10811 - protein, 9 aa, Homo sapiens
  Table A; Target 10811; HLA-A*02:07; BPIFA2; ENSG00000131050; CTA
LLNNVISKL

SEQ ID NO: 10812 - protein, 9 aa, Homo sapiens
  Table A; Target 10812; HLA-A*03:01; BPIFA2; ENSG00000131050; CTA
LLNNVISKL

SEQ ID NO: 10813 - protein, 9 aa, Homo sapiens
  Table A; Target 10813; HLA-A*03:02; BPIFA2; ENSG00000131050; CTA
LLNNVISKL

SEQ ID NO: 10814 - protein, 9 aa, Homo sapiens
  Table A; Target 10814; HLA-A*23:01; BPIFA2; ENSG00000131050; CTA
LLNNVISKL

SEQ ID NO: 10815 - protein, 9 aa, Homo sapiens
  Table A; Target 10815; HLA-A*24:02; BPIFA2; ENSG00000131050; CTA
LLNNVISKL

SEQ ID NO: 10816 - protein, 9 aa, Homo sapiens
  Table A; Target 10816; HLA-A*25:01; BPIFA2; ENSG00000131050; CTA
LLNNVISKL

SEQ ID NO: 10817 - protein, 9 aa, Homo sapiens
  Table A; Target 10817; HLA-A*29:02; BPIFA2; ENSG00000131050; CTA
LLNNVISKL

SEQ ID NO: 10818 - protein, 9 aa, Homo sapiens
  Table A; Target 10818; HLA-A*30:01; BPIFA2; ENSG00000131050; CTA
LLNNVISKL

SEQ ID NO: 10819 - protein, 9 aa, Homo sapiens
  Table A; Target 10819; HLA-A*31:01; BPIFA2; ENSG00000131050; CTA
LLNNVISKL

SEQ ID NO: 10820 - protein, 9 aa, Homo sapiens
  Table A; Target 10820; HLA-A*32:01; BPIFA2; ENSG00000131050; CTA
LLNNVISKL

SEQ ID NO: 10821 - protein, 9 aa, Homo sapiens
  Table A; Target 10821; HLA-A*68:02; BPIFA2; ENSG00000131050; CTA
LLNNVISKL

SEQ ID NO: 10822 - protein, 9 aa, Homo sapiens
  Table A; Target 10822; HLA-B*08:01; BPIFA2; ENSG00000131050; CTA
LLNNVISKL

SEQ ID NO: 10823 - protein, 9 aa, Homo sapiens
  Table A; Target 10823; HLA-B*13:02; BPIFA2; ENSG00000131050; CTA
LLNNVISKL

SEQ ID NO: 10824 - protein, 9 aa, Homo sapiens
  Table A; Target 10824; HLA-B*15:01; BPIFA2; ENSG00000131050; CTA
LLNNVISKL

SEQ ID NO: 10825 - protein, 9 aa, Homo sapiens
  Table A; Target 10825; HLA-B*27:05; BPIFA2; ENSG00000131050; CTA
LLNNVISKL

SEQ ID NO: 10826 - protein, 9 aa, Homo sapiens
  Table A; Target 10826; HLA-B*38:01; BPIFA2; ENSG00000131050; CTA
LLNNVISKL

SEQ ID NO: 10827 - protein, 9 aa, Homo sapiens
  Table A; Target 10827; HLA-B*40:01; BPIFA2; ENSG00000131050; CTA
LLNNVISKL

SEQ ID NO: 10828 - protein, 9 aa, Homo sapiens
  Table A; Target 10828; HLA-B*40:02; BPIFA2; ENSG00000131050; CTA
LLNNVISKL

SEQ ID NO: 10829 - protein, 9 aa, Homo sapiens
  Table A; Target 10829; HLA-B*44:02; BPIFA2; ENSG00000131050; CTA
LLNNVISKL

SEQ ID NO: 10830 - protein, 9 aa, Homo sapiens
  Table A; Target 10830; HLA-B*46:01; BPIFA2; ENSG00000131050; CTA
LLNNVISKL

SEQ ID NO: 10831 - protein, 9 aa, Homo sapiens
  Table A; Target 10831; HLA-B*55:01; BPIFA2; ENSG00000131050; CTA
LLNNVISKL

SEQ ID NO: 10832 - protein, 9 aa, Homo sapiens
  Table A; Target 10832; HLA-B*58:01; BPIFA2; ENSG00000131050; CTA
LLNNVISKL

SEQ ID NO: 10833 - protein, 9 aa, Homo sapiens
  Table A; Target 10833; HLA-C*01:02; BPIFA2; ENSG00000131050; CTA
LLNNVISKL

SEQ ID NO: 10834 - protein, 9 aa, Homo sapiens
  Table A; Target 10834; HLA-C*02:02; BPIFA2; ENSG00000131050; CTA
LLNNVISKL

SEQ ID NO: 10835 - protein, 9 aa, Homo sapiens
  Table A; Target 10835; HLA-C*03:04; BPIFA2; ENSG00000131050; CTA
LLNNVISKL

SEQ ID NO: 10836 - protein, 9 aa, Homo sapiens
  Table A; Target 10836; HLA-C*06:02; BPIFA2; ENSG00000131050; CTA
LLNNVISKL

SEQ ID NO: 10837 - protein, 9 aa, Homo sapiens
  Table A; Target 10837; HLA-C*07:04; BPIFA2; ENSG00000131050; CTA
LLNNVISKL

SEQ ID NO: 10838 - protein, 9 aa, Homo sapiens
  Table A; Target 10838; HLA-C*12:03; BPIFA2; ENSG00000131050; CTA
LLNNVISKL

SEQ ID NO: 10839 - protein, 9 aa, Homo sapiens
  Table A; Target 10839; HLA-C*14:02; BPIFA2; ENSG00000131050; CTA
LLNNVISKL

SEQ ID NO: 10840 - protein, 9 aa, Homo sapiens
  Table A; Target 10840; HLA-C*16:02; BPIFA2; ENSG00000131050; CTA
LLNNVISKL

SEQ ID NO: 10841 - protein, 10 aa, Homo sapiens
  Table A; Target 10841; HLA-A*02:04; BPIFA2; ENSG00000131050; CTA
LLNNVISKLL

SEQ ID NO: 10842 - protein, 9 aa, Homo sapiens
  Table A; Target 10842; HLA-A*02:07; BPIFA2; ENSG00000131050; CTA
LLPTNTDIF

SEQ ID NO: 10843 - protein, 9 aa, Homo sapiens
  Table A; Target 10843; HLA-A*23:01; BPIFA2; ENSG00000131050; CTA
LLPTNTDIF

SEQ ID NO: 10844 - protein, 9 aa, Homo sapiens
  Table A; Target 10844; HLA-A*24:02; BPIFA2; ENSG00000131050; CTA
LLPTNTDIF

SEQ ID NO: 10845 - protein, 9 aa, Homo sapiens
  Table A; Target 10845; HLA-A*29:02; BPIFA2; ENSG00000131050; CTA
LLPTNTDIF

SEQ ID NO: 10846 - protein, 9 aa, Homo sapiens
  Table A; Target 10846; HLA-B*15:01; BPIFA2; ENSG00000131050; CTA
LLPTNTDIF

SEQ ID NO: 10847 - protein, 9 aa, Homo sapiens
  Table A; Target 10847; HLA-B*46:01; BPIFA2; ENSG00000131050; CTA
LLPTNTDIF

SEQ ID NO: 10848 - protein, 9 aa, Homo sapiens
  Table A; Target 10848; HLA-C*01:02; BPIFA2; ENSG00000131050; CTA
LLPTNTDIF

SEQ ID NO: 10849 - protein, 9 aa, Homo sapiens
  Table A; Target 10849; HLA-C*07:01; BPIFA2; ENSG00000131050; CTA
LLPTNTDIF

SEQ ID NO: 10850 - protein, 9 aa, Homo sapiens
  Table A; Target 10850; HLA-C*07:04; BPIFA2; ENSG00000131050; CTA
LLPTNTDIF

SEQ ID NO: 10851 - protein, 9 aa, Homo sapiens
  Table A; Target 10851; HLA-C*12:03; BPIFA2; ENSG00000131050; CTA
LLPTNTDIF

SEQ ID NO: 10852 - protein, 11 aa, Homo sapiens
  Table A; Target 10852; HLA-A*02:01; BPIFA2; ENSG00000131050; CTA
LLPTNTDIFGL

SEQ ID NO: 10853 - protein, 11 aa, Homo sapiens
  Table A; Target 10853; HLA-A*02:03; BPIFA2; ENSG00000131050; CTA
LLPTNTDIFGL

SEQ ID NO: 10854 - protein, 11 aa, Homo sapiens
  Table A; Target 10854; HLA-A*02:04; BPIFA2; ENSG00000131050; CTA
LLPTNTDIFGL

SEQ ID NO: 10855 - protein, 11 aa, Homo sapiens
  Table A; Target 10855; HLA-A*02:07; BPIFA2; ENSG00000131050; CTA
LLPTNTDIFGL

SEQ ID NO: 10856 - protein, 11 aa, Homo sapiens
  Table A; Target 10856; HLA-A*03:01; BPIFA2; ENSG00000131050; CTA
LLPTNTDIFGL

SEQ ID NO: 10857 - protein, 11 aa, Homo sapiens
  Table A; Target 10857; HLA-A*24:02; BPIFA2; ENSG00000131050; CTA
LLPTNTDIFGL

SEQ ID NO: 10858 - protein, 11 aa, Homo sapiens
  Table A; Target 10858; HLA-C*06:02; BPIFA2; ENSG00000131050; CTA
LLPTNTDIFGL

SEQ ID NO: 10859 - protein, 11 aa, Homo sapiens
  Table A; Target 10859; HLA-C*07:01; BPIFA2; ENSG00000131050; CTA
LLPTNTDIFGL

SEQ ID NO: 10860 - protein, 11 aa, Homo sapiens
  Table A; Target 10860; HLA-C*07:02; BPIFA2; ENSG00000131050; CTA
LLPTNTDIFGL

SEQ ID NO: 10861 - protein, 9 aa, Homo sapiens
  Table A; Target 10861; HLA-A*02:01; BPIFA2; ENSG00000131050; CTA
LLQKEICPL

SEQ ID NO: 10862 - protein, 9 aa, Homo sapiens
  Table A; Target 10862; HLA-A*02:03; BPIFA2; ENSG00000131050; CTA
LLQKEICPL

SEQ ID NO: 10863 - protein, 9 aa, Homo sapiens
  Table A; Target 10863; HLA-A*02:04; BPIFA2; ENSG00000131050; CTA
LLQKEICPL

SEQ ID NO: 10864 - protein, 9 aa, Homo sapiens
  Table A; Target 10864; HLA-B*40:02; BPIFA2; ENSG00000131050; CTA
LLQKEICPL

SEQ ID NO: 10865 - protein, 9 aa, Homo sapiens
  Table A; Target 10865; HLA-B*55:01; BPIFA2; ENSG00000131050; CTA
LLQKEICPL

SEQ ID NO: 10866 - protein, 9 aa, Homo sapiens
  Table A; Target 10866; HLA-C*04:01; BPIFA2; ENSG00000131050; CTA
LLQKEICPL

SEQ ID NO: 10867 - protein, 9 aa, Homo sapiens
  Table A; Target 10867; HLA-C*06:02; BPIFA2; ENSG00000131050; CTA
LLQKEICPL

SEQ ID NO: 10868 - protein, 9 aa, Homo sapiens
  Table A; Target 10868; HLA-C*07:01; BPIFA2; ENSG00000131050; CTA
LLQKEICPL

SEQ ID NO: 10869 - protein, 9 aa, Homo sapiens
  Table A; Target 10869; HLA-C*07:04; BPIFA2; ENSG00000131050; CTA
LLQKEICPL

SEQ ID NO: 10870 - protein, 9 aa, Homo sapiens
  Table A; Target 10870; HLA-A*02:01; BPIFA2; ENSG00000131050; CTA
LLTAVTIET

SEQ ID NO: 10871 - protein, 9 aa, Homo sapiens
  Table A; Target 10871; HLA-A*02:03; BPIFA2; ENSG00000131050; CTA
LLTAVTIET

SEQ ID NO: 10872 - protein, 9 aa, Homo sapiens
  Table A; Target 10872; HLA-A*02:04; BPIFA2; ENSG00000131050; CTA
LLTAVTIET

SEQ ID NO: 10873 - protein, 9 aa, Homo sapiens
  Table A; Target 10873; HLA-A*68:02; BPIFA2; ENSG00000131050; CTA
LLTAVTIET

SEQ ID NO: 10874 - protein, 9 aa, Homo sapiens
  Table A; Target 10874; HLA-B*13:02; BPIFA2; ENSG00000131050; CTA
LLTAVTIET

SEQ ID NO: 10875 - protein, 9 aa, Homo sapiens
  Table A; Target 10875; HLA-B*27:05; BPIFA2; ENSG00000131050; CTA
LLTAVTIET

SEQ ID NO: 10876 - protein, 9 aa, Homo sapiens
  Table A; Target 10876; HLA-B*46:01; BPIFA2; ENSG00000131050; CTA
LLTAVTIET

SEQ ID NO: 10877 - protein, 9 aa, Homo sapiens
  Table A; Target 10877; HLA-B*55:01; BPIFA2; ENSG00000131050; CTA
LLTAVTIET

SEQ ID NO: 10878 - protein, 9 aa, Homo sapiens
  Table A; Target 10878; HLA-C*06:02; BPIFA2; ENSG00000131050; CTA
LLTAVTIET

SEQ ID NO: 10879 - protein, 9 aa, Homo sapiens
  Table A; Target 10879; HLA-C*07:01; BPIFA2; ENSG00000131050; CTA
LLTAVTIET

SEQ ID NO: 10880 - protein, 9 aa, Homo sapiens
  Table A; Target 10880; HLA-C*07:02; BPIFA2; ENSG00000131050; CTA
LLTAVTIET

SEQ ID NO: 10881 - protein, 9 aa, Homo sapiens
  Table A; Target 10881; HLA-C*07:04; BPIFA2; ENSG00000131050; CTA
LLTAVTIET

SEQ ID NO: 10882 - protein, 9 aa, Homo sapiens
  Table A; Target 10882; HLA-C*16:02; BPIFA2; ENSG00000131050; CTA
LLTAVTIET

SEQ ID NO: 10883 - protein, 9 aa, Homo sapiens
  Table A; Target 10883; HLA-B*54:01; BPIFA2; ENSG00000131050; CTA
LNLSFPVTA

SEQ ID NO: 10884 - protein, 8 aa, Homo sapiens
  Table A; Target 10884; HLA-B*08:01; BPIFA2; ENSG00000131050; CTA
LNNVISKL

SEQ ID NO: 10885 - protein, 8 aa, Homo sapiens
  Table A; Target 10885; HLA-B*27:05; BPIFA2; ENSG00000131050; CTA
LNNVISKL

SEQ ID NO: 10886 - protein, 8 aa, Homo sapiens
  Table A; Target 10886; HLA-C*04:01; BPIFA2; ENSG00000131050; CTA
LNNVISKL

SEQ ID NO: 10887 - protein, 8 aa, Homo sapiens
  Table A; Target 10887; HLA-C*06:02; BPIFA2; ENSG00000131050; CTA
LNNVISKL

SEQ ID NO: 10888 - protein, 8 aa, Homo sapiens
  Table A; Target 10888; HLA-C*07:01; BPIFA2; ENSG00000131050; CTA
LNNVISKL

SEQ ID NO: 10889 - protein, 8 aa, Homo sapiens
  Table A; Target 10889; HLA-C*07:02; BPIFA2; ENSG00000131050; CTA
LNNVISKL

SEQ ID NO: 10890 - protein, 8 aa, Homo sapiens
  Table A; Target 10890; HLA-C*07:04; BPIFA2; ENSG00000131050; CTA
LNNVISKL

SEQ ID NO: 10891 - protein, 8 aa, Homo sapiens
  Table A; Target 10891; HLA-C*12:03; BPIFA2; ENSG00000131050; CTA
LNNVISKL

SEQ ID NO: 10892 - protein, 8 aa, Homo sapiens
  Table A; Target 10892; HLA-B*27:02; BPIFA2; ENSG00000131050; CTA
LPTNTDIF

SEQ ID NO: 10893 - protein, 8 aa, Homo sapiens
  Table A; Target 10893; HLA-B*35:01; BPIFA2; ENSG00000131050; CTA
LPTNTDIF

SEQ ID NO: 10894 - protein, 8 aa, Homo sapiens
  Table A; Target 10894; HLA-B*35:03; BPIFA2; ENSG00000131050; CTA
LPTNTDIF

SEQ ID NO: 10895 - protein, 8 aa, Homo sapiens
  Table A; Target 10895; HLA-B*51:01; BPIFA2; ENSG00000131050; CTA
LPTNTDIF

SEQ ID NO: 10896 - protein, 8 aa, Homo sapiens
  Table A; Target 10896; HLA-B*54:01; BPIFA2; ENSG00000131050; CTA
LPTNTDIF

SEQ ID NO: 10897 - protein, 8 aa, Homo sapiens
  Table A; Target 10897; HLA-B*55:01; BPIFA2; ENSG00000131050; CTA
LPTNTDIF

SEQ ID NO: 10898 - protein, 8 aa, Homo sapiens
  Table A; Target 10898; HLA-C*03:03; BPIFA2; ENSG00000131050; CTA
LPTNTDIF

SEQ ID NO: 10899 - protein, 8 aa, Homo sapiens
  Table A; Target 10899; HLA-C*04:01; BPIFA2; ENSG00000131050; CTA
LPTNTDIF

SEQ ID NO: 10900 - protein, 8 aa, Homo sapiens
  Table A; Target 10900; HLA-C*07:01; BPIFA2; ENSG00000131050; CTA
LPTNTDIF

SEQ ID NO: 10901 - protein, 8 aa, Homo sapiens
  Table A; Target 10901; HLA-C*07:02; BPIFA2; ENSG00000131050; CTA
LPTNTDIF

SEQ ID NO: 10902 - protein, 10 aa, Homo sapiens
  Table A; Target 10902; HLA-A*68:01; BPIFA2; ENSG00000131050; CTA
LPTNTDIFGL

SEQ ID NO: 10903 - protein, 10 aa, Homo sapiens
  Table A; Target 10903; HLA-A*68:02; BPIFA2; ENSG00000131050; CTA
LPTNTDIFGL

SEQ ID NO: 10904 - protein, 10 aa, Homo sapiens
  Table A; Target 10904; HLA-B*07:02; BPIFA2; ENSG00000131050; CTA
LPTNTDIFGL

SEQ ID NO: 10905 - protein, 10 aa, Homo sapiens
  Table A; Target 10905; HLA-B*27:02; BPIFA2; ENSG00000131050; CTA
LPTNTDIFGL

SEQ ID NO: 10906 - protein, 10 aa, Homo sapiens
  Table A; Target 10906; HLA-B*35:01; BPIFA2; ENSG00000131050; CTA
LPTNTDIFGL

SEQ ID NO: 10907 - protein, 10 aa, Homo sapiens
  Table A; Target 10907; HLA-B*35:03; BPIFA2; ENSG00000131050; CTA
LPTNTDIFGL

SEQ ID NO: 10908 - protein, 10 aa, Homo sapiens
  Table A; Target 10908; HLA-B*54:01; BPIFA2; ENSG00000131050; CTA
LPTNTDIFGL

SEQ ID NO: 10909 - protein, 10 aa, Homo sapiens
  Table A; Target 10909; HLA-B*55:01; BPIFA2; ENSG00000131050; CTA
LPTNTDIFGL

SEQ ID NO: 10910 - protein, 10 aa, Homo sapiens
  Table A; Target 10910; HLA-C*04:01; BPIFA2; ENSG00000131050; CTA
LPTNTDIFGL

SEQ ID NO: 10911 - protein, 10 aa, Homo sapiens
  Table A; Target 10911; HLA-C*07:01; BPIFA2; ENSG00000131050; CTA
LPTNTDIFGL

SEQ ID NO: 10912 - protein, 10 aa, Homo sapiens
  Table A; Target 10912; HLA-C*07:02; BPIFA2; ENSG00000131050; CTA
LPTNTDIFGL

SEQ ID NO: 10913 - protein, 10 aa, Homo sapiens
  Table A; Target 10913; HLA-C*07:06; BPIFA2; ENSG00000131050; CTA
LPTNTDIFGL

SEQ ID NO: 10914 - protein, 11 aa, Homo sapiens
  Table A; Target 10914; HLA-B*27:02; BPIFA2; ENSG00000131050; CTA
LPTNTDIFGLK

SEQ ID NO: 10915 - protein, 8 aa, Homo sapiens
  Table A; Target 10915; HLA-B*08:01; BPIFA2; ENSG00000131050; CTA
LQKEICPL

SEQ ID NO: 10916 - protein, 9 aa, Homo sapiens
  Table A; Target 10916; HLA-A*24:02; BPIFA2; ENSG00000131050; CTA
LQKEICPLI

SEQ ID NO: 10917 - protein, 9 aa, Homo sapiens
  Table A; Target 10917; HLA-B*13:02; BPIFA2; ENSG00000131050; CTA
LQKEICPLI

SEQ ID NO: 10918 - protein, 9 aa, Homo sapiens
  Table A; Target 10918; HLA-B*40:02; BPIFA2; ENSG00000131050; CTA
LQKEICPLI

SEQ ID NO: 10919 - protein, 9 aa, Homo sapiens
  Table A; Target 10919; HLA-C*06:02; BPIFA2; ENSG00000131050; CTA
LQKEICPLI

SEQ ID NO: 10920 - protein, 9 aa, Homo sapiens
  Table A; Target 10920; HLA-C*07:01; BPIFA2; ENSG00000131050; CTA
LQKEICPLI

SEQ ID NO: 10921 - protein, 9 aa, Homo sapiens
  Table A; Target 10921; HLA-A*02:03; BPIFA2; ENSG00000131050; CTA
LQKSSAWQL

SEQ ID NO: 10922 - protein, 9 aa, Homo sapiens
  Table A; Target 10922; HLA-A*02:04; BPIFA2; ENSG00000131050; CTA
LQKSSAWQL

SEQ ID NO: 10923 - protein, 9 aa, Homo sapiens
  Table A; Target 10923; HLA-A*24:02; BPIFA2; ENSG00000131050; CTA
LQKSSAWQL

SEQ ID NO: 10924 - protein, 9 aa, Homo sapiens
  Table A; Target 10924; HLA-A*31:01; BPIFA2; ENSG00000131050; CTA
LQKSSAWQL

SEQ ID NO: 10925 - protein, 9 aa, Homo sapiens
  Table A; Target 10925; HLA-B*13:02; BPIFA2; ENSG00000131050; CTA
LQKSSAWQL

SEQ ID NO: 10926 - protein, 9 aa, Homo sapiens
  Table A; Target 10926; HLA-B*40:02; BPIFA2; ENSG00000131050; CTA
LQKSSAWQL

SEQ ID NO: 10927 - protein, 9 aa, Homo sapiens
  Table A; Target 10927; HLA-C*07:04; BPIFA2; ENSG00000131050; CTA
LQKSSAWQL

SEQ ID NO: 10928 - protein, 9 aa, Homo sapiens
  Table A; Target 10928; HLA-C*14:02; BPIFA2; ENSG00000131050; CTA
LQKSSAWQL

SEQ ID NO: 10929 - protein, 9 aa, Homo sapiens
  Table A; Target 10929; HLA-A*02:01; BPIFA2; ENSG00000131050; CTA
LQLWKLVLL

SEQ ID NO: 10930 - protein, 9 aa, Homo sapiens
  Table A; Target 10930; HLA-A*02:04; BPIFA2; ENSG00000131050; CTA
LQLWKLVLL

SEQ ID NO: 10931 - protein, 9 aa, Homo sapiens
  Table A; Target 10931; HLA-A*02:07; BPIFA2; ENSG00000131050; CTA
LQLWKLVLL

SEQ ID NO: 10932 - protein, 9 aa, Homo sapiens
  Table A; Target 10932; HLA-A*24:02; BPIFA2; ENSG00000131050; CTA
LQLWKLVLL

SEQ ID NO: 10933 - protein, 8 aa, Homo sapiens
  Table A; Target 10933; HLA-C*06:02; BPIFA2; ENSG00000131050; CTA
LSFPVTAN

SEQ ID NO: 10934 - protein, 8 aa, Homo sapiens
  Table A; Target 10934; HLA-C*07:01; BPIFA2; ENSG00000131050; CTA
LSFPVTAN

SEQ ID NO: 10935 - protein, 8 aa, Homo sapiens
  Table A; Target 10935; HLA-C*12:03; BPIFA2; ENSG00000131050; CTA
LSFPVTAN

SEQ ID NO: 10936 - protein, 9 aa, Homo sapiens
  Table A; Target 10936; HLA-A*01:01; BPIFA2; ENSG00000131050; CTA
LSFPVTANV

SEQ ID NO: 10937 - protein, 9 aa, Homo sapiens
  Table A; Target 10937; HLA-A*02:01; BPIFA2; ENSG00000131050; CTA
LSFPVTANV

SEQ ID NO: 10938 - protein, 9 aa, Homo sapiens
  Table A; Target 10938; HLA-A*02:03; BPIFA2; ENSG00000131050; CTA
LSFPVTANV

SEQ ID NO: 10939 - protein, 9 aa, Homo sapiens
  Table A; Target 10939; HLA-A*02:04; BPIFA2; ENSG00000131050; CTA
LSFPVTANV

SEQ ID NO: 10940 - protein, 9 aa, Homo sapiens
  Table A; Target 10940; HLA-A*02:07; BPIFA2; ENSG00000131050; CTA
LSFPVTANV

SEQ ID NO: 10941 - protein, 9 aa, Homo sapiens
  Table A; Target 10941; HLA-A*23:01; BPIFA2; ENSG00000131050; CTA
LSFPVTANV

SEQ ID NO: 10942 - protein, 9 aa, Homo sapiens
  Table A; Target 10942; HLA-A*26:01; BPIFA2; ENSG00000131050; CTA
LSFPVTANV

SEQ ID NO: 10943 - protein, 9 aa, Homo sapiens
  Table A; Target 10943; HLA-A*30:01; BPIFA2; ENSG00000131050; CTA
LSFPVTANV

SEQ ID NO: 10944 - protein, 9 aa, Homo sapiens
  Table A; Target 10944; HLA-A*31:01; BPIFA2; ENSG00000131050; CTA
LSFPVTANV

SEQ ID NO: 10945 - protein, 9 aa, Homo sapiens
  Table A; Target 10945; HLA-A*32:01; BPIFA2; ENSG00000131050; CTA
LSFPVTANV

SEQ ID NO: 10946 - protein, 9 aa, Homo sapiens
  Table A; Target 10946; HLA-A*68:02; BPIFA2; ENSG00000131050; CTA
LSFPVTANV

SEQ ID NO: 10947 - protein, 9 aa, Homo sapiens
  Table A; Target 10947; HLA-B*13:02; BPIFA2; ENSG00000131050; CTA
LSFPVTANV

SEQ ID NO: 10948 - protein, 9 aa, Homo sapiens
  Table A; Target 10948; HLA-B*27:05; BPIFA2; ENSG00000131050; CTA
LSFPVTANV

SEQ ID NO: 10949 - protein, 9 aa, Homo sapiens
  Table A; Target 10949; HLA-B*40:02; BPIFA2; ENSG00000131050; CTA
LSFPVTANV

SEQ ID NO: 10950 - protein, 9 aa, Homo sapiens
  Table A; Target 10950; HLA-B*46:01; BPIFA2; ENSG00000131050; CTA
LSFPVTANV

SEQ ID NO: 10951 - protein, 9 aa, Homo sapiens
  Table A; Target 10951; HLA-B*49:01; BPIFA2; ENSG00000131050; CTA
LSFPVTANV

SEQ ID NO: 10952 - protein, 9 aa, Homo sapiens
  Table A; Target 10952; HLA-B*51:01; BPIFA2; ENSG00000131050; CTA
LSFPVTANV

SEQ ID NO: 10953 - protein, 9 aa, Homo sapiens
  Table A; Target 10953; HLA-B*54:01; BPIFA2; ENSG00000131050; CTA
LSFPVTANV

SEQ ID NO: 10954 - protein, 9 aa, Homo sapiens
  Table A; Target 10954; HLA-B*56:01; BPIFA2; ENSG00000131050; CTA
LSFPVTANV

SEQ ID NO: 10955 - protein, 9 aa, Homo sapiens
  Table A; Target 10955; HLA-B*57:01; BPIFA2; ENSG00000131050; CTA
LSFPVTANV

SEQ ID NO: 10956 - protein, 9 aa, Homo sapiens
  Table A; Target 10956; HLA-B*58:01; BPIFA2; ENSG00000131050; CTA
LSFPVTANV

SEQ ID NO: 10957 - protein, 9 aa, Homo sapiens
  Table A; Target 10957; HLA-C*01:02; BPIFA2; ENSG00000131050; CTA
LSFPVTANV

SEQ ID NO: 10958 - protein, 9 aa, Homo sapiens
  Table A; Target 10958; HLA-C*02:02; BPIFA2; ENSG00000131050; CTA
LSFPVTANV

SEQ ID NO: 10959 - protein, 9 aa, Homo sapiens
  Table A; Target 10959; HLA-C*03:03; BPIFA2; ENSG00000131050; CTA
LSFPVTANV

SEQ ID NO: 10960 - protein, 9 aa, Homo sapiens
  Table A; Target 10960; HLA-C*03:04; BPIFA2; ENSG00000131050; CTA
LSFPVTANV

SEQ ID NO: 10961 - protein, 9 aa, Homo sapiens
  Table A; Target 10961; HLA-C*05:01; BPIFA2; ENSG00000131050; CTA
LSFPVTANV

SEQ ID NO: 10962 - protein, 9 aa, Homo sapiens
  Table A; Target 10962; HLA-C*06:02; BPIFA2; ENSG00000131050; CTA
LSFPVTANV

SEQ ID NO: 10963 - protein, 9 aa, Homo sapiens
  Table A; Target 10963; HLA-C*07:01; BPIFA2; ENSG00000131050; CTA
LSFPVTANV

SEQ ID NO: 10964 - protein, 9 aa, Homo sapiens
  Table A; Target 10964; HLA-C*07:02; BPIFA2; ENSG00000131050; CTA
LSFPVTANV

SEQ ID NO: 10965 - protein, 9 aa, Homo sapiens
  Table A; Target 10965; HLA-C*07:06; BPIFA2; ENSG00000131050; CTA
LSFPVTANV

SEQ ID NO: 10966 - protein, 9 aa, Homo sapiens
  Table A; Target 10966; HLA-C*12:03; BPIFA2; ENSG00000131050; CTA
LSFPVTANV

SEQ ID NO: 10967 - protein, 9 aa, Homo sapiens
  Table A; Target 10967; HLA-C*16:01; BPIFA2; ENSG00000131050; CTA
LSFPVTANV

SEQ ID NO: 10968 - protein, 9 aa, Homo sapiens
  Table A; Target 10968; HLA-C*16:02; BPIFA2; ENSG00000131050; CTA
LSFPVTANV

SEQ ID NO: 10969 - protein, 9 aa, Homo sapiens
  Table A; Target 10969; HLA-C*16:04; BPIFA2; ENSG00000131050; CTA
LSFPVTANV

SEQ ID NO: 10970 - protein, 10 aa, Homo sapiens
  Table A; Target 10970; HLA-C*04:01; BPIFA2; ENSG00000131050; CTA
LSFPVTANVT

SEQ ID NO: 10971 - protein, 10 aa, Homo sapiens
  Table A; Target 10971; HLA-C*06:02; BPIFA2; ENSG00000131050; CTA
LSFPVTANVT

SEQ ID NO: 10972 - protein, 10 aa, Homo sapiens
  Table A; Target 10972; HLA-C*07:01; BPIFA2; ENSG00000131050; CTA
LSFPVTANVT

SEQ ID NO: 10973 - protein, 10 aa, Homo sapiens
  Table A; Target 10973; HLA-C*07:02; BPIFA2; ENSG00000131050; CTA
LSFPVTANVT

SEQ ID NO: 10974 - protein, 11 aa, Homo sapiens
  Table A; Target 10974; HLA-A*01:01; BPIFA2; ENSG00000131050; CTA
LSFPVTANVTV

SEQ ID NO: 10975 - protein, 11 aa, Homo sapiens
  Table A; Target 10975; HLA-A*02:01; BPIFA2; ENSG00000131050; CTA
LSFPVTANVTV

SEQ ID NO: 10976 - protein, 11 aa, Homo sapiens
  Table A; Target 10976; HLA-A*02:03; BPIFA2; ENSG00000131050; CTA
LSFPVTANVTV

SEQ ID NO: 10977 - protein, 11 aa, Homo sapiens
  Table A; Target 10977; HLA-A*02:04; BPIFA2; ENSG00000131050; CTA
LSFPVTANVTV

SEQ ID NO: 10978 - protein, 11 aa, Homo sapiens
  Table A; Target 10978; HLA-A*02:07; BPIFA2; ENSG00000131050; CTA
LSFPVTANVTV

SEQ ID NO: 10979 - protein, 11 aa, Homo sapiens
  Table A; Target 10979; HLA-A*30:01; BPIFA2; ENSG00000131050; CTA
LSFPVTANVTV

SEQ ID NO: 10980 - protein, 11 aa, Homo sapiens
  Table A; Target 10980; HLA-A*68:01; BPIFA2; ENSG00000131050; CTA
LSFPVTANVTV

SEQ ID NO: 10981 - protein, 11 aa, Homo sapiens
  Table A; Target 10981; HLA-A*68:02; BPIFA2; ENSG00000131050; CTA
LSFPVTANVTV

SEQ ID NO: 10982 - protein, 11 aa, Homo sapiens
  Table A; Target 10982; HLA-B*13:02; BPIFA2; ENSG00000131050; CTA
LSFPVTANVTV

SEQ ID NO: 10983 - protein, 11 aa, Homo sapiens
  Table A; Target 10983; HLA-B*27:02; BPIFA2; ENSG00000131050; CTA
LSFPVTANVTV

SEQ ID NO: 10984 - protein, 11 aa, Homo sapiens
  Table A; Target 10984; HLA-B*27:05; BPIFA2; ENSG00000131050; CTA
LSFPVTANVTV

SEQ ID NO: 10985 - protein, 11 aa, Homo sapiens
  Table A; Target 10985; HLA-B*40:02; BPIFA2; ENSG00000131050; CTA
LSFPVTANVTV

SEQ ID NO: 10986 - protein, 11 aa, Homo sapiens
  Table A; Target 10986; HLA-B*46:01; BPIFA2; ENSG00000131050; CTA
LSFPVTANVTV

SEQ ID NO: 10987 - protein, 11 aa, Homo sapiens
  Table A; Target 10987; HLA-B*51:01; BPIFA2; ENSG00000131050; CTA
LSFPVTANVTV

SEQ ID NO: 10988 - protein, 11 aa, Homo sapiens
  Table A; Target 10988; HLA-B*54:01; BPIFA2; ENSG00000131050; CTA
LSFPVTANVTV

SEQ ID NO: 10989 - protein, 11 aa, Homo sapiens
  Table A; Target 10989; HLA-B*56:01; BPIFA2; ENSG00000131050; CTA
LSFPVTANVTV

SEQ ID NO: 10990 - protein, 11 aa, Homo sapiens
  Table A; Target 10990; HLA-B*57:01; BPIFA2; ENSG00000131050; CTA
LSFPVTANVTV

SEQ ID NO: 10991 - protein, 11 aa, Homo sapiens
  Table A; Target 10991; HLA-B*58:01; BPIFA2; ENSG00000131050; CTA
LSFPVTANVTV

SEQ ID NO: 10992 - protein, 11 aa, Homo sapiens
  Table A; Target 10992; HLA-C*02:02; BPIFA2; ENSG00000131050; CTA
LSFPVTANVTV

SEQ ID NO: 10993 - protein, 11 aa, Homo sapiens
  Table A; Target 10993; HLA-C*04:01; BPIFA2; ENSG00000131050; CTA
LSFPVTANVTV

SEQ ID NO: 10994 - protein, 11 aa, Homo sapiens
  Table A; Target 10994; HLA-C*06:02; BPIFA2; ENSG00000131050; CTA
LSFPVTANVTV

SEQ ID NO: 10995 - protein, 11 aa, Homo sapiens
  Table A; Target 10995; HLA-C*07:01; BPIFA2; ENSG00000131050; CTA
LSFPVTANVTV

SEQ ID NO: 10996 - protein, 11 aa, Homo sapiens
  Table A; Target 10996; HLA-C*12:03; BPIFA2; ENSG00000131050; CTA
LSFPVTANVTV

SEQ ID NO: 10997 - protein, 11 aa, Homo sapiens
  Table A; Target 10997; HLA-C*16:02; BPIFA2; ENSG00000131050; CTA
LSFPVTANVTV

SEQ ID NO: 10998 - protein, 11 aa, Homo sapiens
  Table A; Target 10998; HLA-C*16:04; BPIFA2; ENSG00000131050; CTA
LSFPVTANVTV

SEQ ID NO: 10999 - protein, 8 aa, Homo sapiens
  Table A; Target 10999; HLA-B*58:01; BPIFA2; ENSG00000131050; CTA
LSNVVDKL

SEQ ID NO: 11000 - protein, 8 aa, Homo sapiens
  Table A; Target 11000; HLA-C*01:02; BPIFA2; ENSG00000131050; CTA
LSNVVDKL

SEQ ID NO: 11001 - protein, 8 aa, Homo sapiens
  Table A; Target 11001; HLA-C*03:04; BPIFA2; ENSG00000131050; CTA
LSNVVDKL

SEQ ID NO: 11002 - protein, 8 aa, Homo sapiens
  Table A; Target 11002; HLA-C*06:02; BPIFA2; ENSG00000131050; CTA
LSNVVDKL

SEQ ID NO: 11003 - protein, 8 aa, Homo sapiens
  Table A; Target 11003; HLA-C*07:04; BPIFA2; ENSG00000131050; CTA
LSNVVDKL

SEQ ID NO: 11004 - protein, 8 aa, Homo sapiens
  Table A; Target 11004; HLA-C*12:03; BPIFA2; ENSG00000131050; CTA
LSNVVDKL

SEQ ID NO: 11005 - protein, 8 aa, Homo sapiens
  Table A; Target 11005; HLA-C*16:01; BPIFA2; ENSG00000131050; CTA
LSNVVDKL

SEQ ID NO: 11006 - protein, 8 aa, Homo sapiens
  Table A; Target 11006; HLA-C*16:02; BPIFA2; ENSG00000131050; CTA
LSNVVDKL

SEQ ID NO: 11007 - protein, 8 aa, Homo sapiens
  Table A; Target 11007; HLA-C*01:02; BPIFA2; ENSG00000131050; CTA
LTGTSESL

SEQ ID NO: 11008 - protein, 8 aa, Homo sapiens
  Table A; Target 11008; HLA-C*03:03; BPIFA2; ENSG00000131050; CTA
LTGTSESL

SEQ ID NO: 11009 - protein, 8 aa, Homo sapiens
  Table A; Target 11009; HLA-C*03:04; BPIFA2; ENSG00000131050; CTA
LTGTSESL

SEQ ID NO: 11010 - protein, 8 aa, Homo sapiens
  Table A; Target 11010; HLA-C*05:01; BPIFA2; ENSG00000131050; CTA
LTGTSESL

SEQ ID NO: 11011 - protein, 8 aa, Homo sapiens
  Table A; Target 11011; HLA-C*14:02; BPIFA2; ENSG00000131050; CTA
LTGTSESL

SEQ ID NO: 11012 - protein, 9 aa, Homo sapiens
  Table A; Target 11012; HLA-A*02:04; BPIFA2; ENSG00000131050; CTA
MLQLWKLVL

SEQ ID NO: 11013 - protein, 10 aa, Homo sapiens
  Table A; Target 11013; HLA-A*02:04; BPIFA2; ENSG00000131050; CTA
MLQLWKLVLL

SEQ ID NO: 11014 - protein, 9 aa, Homo sapiens
  Table A; Target 11014; HLA-A*03:02; BPIFA2; ENSG00000131050; CTA
NDLSNVVDK

SEQ ID NO: 11015 - protein, 9 aa, Homo sapiens
  Table A; Target 11015; HLA-A*11:01; BPIFA2; ENSG00000131050; CTA
NDLSNVVDK

SEQ ID NO: 11016 - protein, 9 aa, Homo sapiens
  Table A; Target 11016; HLA-B*27:02; BPIFA2; ENSG00000131050; CTA
NDLSNVVDK

SEQ ID NO: 11017 - protein, 9 aa, Homo sapiens
  Table A; Target 11017; HLA-C*04:01; BPIFA2; ENSG00000131050; CTA
NDLSNVVDK

SEQ ID NO: 11018 - protein, 9 aa, Homo sapiens
  Table A; Target 11018; HLA-C*07:01; BPIFA2; ENSG00000131050; CTA
NDLSNVVDK

SEQ ID NO: 11019 - protein, 9 aa, Homo sapiens
  Table A; Target 11019; HLA-C*12:03; BPIFA2; ENSG00000131050; CTA
NDLSNVVDK

SEQ ID NO: 11020 - protein, 10 aa, Homo sapiens
  Table A; Target 11020; HLA-C*07:02; BPIFA2; ENSG00000131050; CTA
NDLSNVVDKL

SEQ ID NO: 11021 - protein, 11 aa, Homo sapiens
  Table A; Target 11021; HLA-B*38:01; BPIFA2; ENSG00000131050; CTA
NKFVNSVINTL

SEQ ID NO: 11022 - protein, 9 aa, Homo sapiens
  Table A; Target 11022; HLA-A*02:01; BPIFA2; ENSG00000131050; CTA
NLGNDLSNV

SEQ ID NO: 11023 - protein, 9 aa, Homo sapiens
  Table A; Target 11023; HLA-A*02:03; BPIFA2; ENSG00000131050; CTA
NLGNDLSNV

SEQ ID NO: 11024 - protein, 9 aa, Homo sapiens
  Table A; Target 11024; HLA-A*02:07; BPIFA2; ENSG00000131050; CTA
NLGNDLSNV

SEQ ID NO: 11025 - protein, 9 aa, Homo sapiens
  Table A; Target 11025; HLA-B*55:01; BPIFA2; ENSG00000131050; CTA
NLGNDLSNV

SEQ ID NO: 11026 - protein, 8 aa, Homo sapiens
  Table A; Target 11026; HLA-B*08:01; BPIFA2; ENSG00000131050; CTA
NLKASLDL

SEQ ID NO: 11027 - protein, 9 aa, Homo sapiens
  Table A; Target 11027; HLA-A*02:03; BPIFA2; ENSG00000131050; CTA
NLKASLDLL

SEQ ID NO: 11028 - protein, 9 aa, Homo sapiens
  Table A; Target 11028; HLA-A*02:04; BPIFA2; ENSG00000131050; CTA
NLKASLDLL

SEQ ID NO: 11029 - protein, 9 aa, Homo sapiens
  Table A; Target 11029; HLA-A*02:07; BPIFA2; ENSG00000131050; CTA
NLKASLDLL

SEQ ID NO: 11030 - protein, 9 aa, Homo sapiens
  Table A; Target 11030; HLA-C*07:02; BPIFA2; ENSG00000131050; CTA
NLKASLDLL

SEQ ID NO: 11031 - protein, 11 aa, Homo sapiens
  Table A; Target 11031; HLA-A*02:03; BPIFA2; ENSG00000131050; CTA
NLKASLDLLTA

SEQ ID NO: 11032 - protein, 9 aa, Homo sapiens
  Table A; Target 11032; HLA-C*06:02; BPIFA2; ENSG00000131050; CTA
NLSFPVTAN

SEQ ID NO: 11033 - protein, 9 aa, Homo sapiens
  Table A; Target 11033; HLA-C*07:04; BPIFA2; ENSG00000131050; CTA
NLSFPVTAN

SEQ ID NO: 11034 - protein, 10 aa, Homo sapiens
  Table A; Target 11034; HLA-A*02:03; BPIFA2; ENSG00000131050; CTA
NLSFPVTANV

SEQ ID NO: 11035 - protein, 10 aa, Homo sapiens
  Table A; Target 11035; HLA-A*68:02; BPIFA2; ENSG00000131050; CTA
NLSFPVTANV

SEQ ID NO: 11036 - protein, 11 aa, Homo sapiens
  Table A; Target 11036; HLA-C*06:02; BPIFA2; ENSG00000131050; CTA
NLSFPVTANVT

SEQ ID NO: 11037 - protein, 8 aa, Homo sapiens
  Table A; Target 11037; HLA-C*07:01; BPIFA2; ENSG00000131050; CTA
NNVISKLL

SEQ ID NO: 11038 - protein, 8 aa, Homo sapiens
  Table A; Target 11038; HLA-B*07:02; BPIFA2; ENSG00000131050; CTA
NPQHKTQL

SEQ ID NO: 11039 - protein, 8 aa, Homo sapiens
  Table A; Target 11039; HLA-B*08:01; BPIFA2; ENSG00000131050; CTA
NPQHKTQL

SEQ ID NO: 11040 - protein, 8 aa, Homo sapiens
  Table A; Target 11040; HLA-C*07:02; BPIFA2; ENSG00000131050; CTA
NPQHKTQL

SEQ ID NO: 11041 - protein, 11 aa, Homo sapiens
  Table A; Target 11041; HLA-B*07:02; BPIFA2; ENSG00000131050; CTA
NPQHKTQLQTL

SEQ ID NO: 11042 - protein, 11 aa, Homo sapiens
  Table A; Target 11042; HLA-C*07:02; BPIFA2; ENSG00000131050; CTA
NPQHKTQLQTL

SEQ ID NO: 11043 - protein, 8 aa, Homo sapiens
  Table A; Target 11043; HLA-B*27:02; BPIFA2; ENSG00000131050; CTA
NSLILDVK

SEQ ID NO: 11044 - protein, 8 aa, Homo sapiens
  Table A; Target 11044; HLA-C*07:02; BPIFA2; ENSG00000131050; CTA
NSLILDVK

SEQ ID NO: 11045 - protein, 9 aa, Homo sapiens
  Table A; Target 11045; HLA-B*54:01; BPIFA2; ENSG00000131050; CTA
NSLILDVKA

SEQ ID NO: 11046 - protein, 8 aa, Homo sapiens
  Table A; Target 11046; HLA-A*11:01; BPIFA2; ENSG00000131050; CTA
NSVINTLK

SEQ ID NO: 11047 - protein, 8 aa, Homo sapiens
  Table A; Target 11047; HLA-A*33:01; BPIFA2; ENSG00000131050; CTA
NSVINTLK

SEQ ID NO: 11048 - protein, 8 aa, Homo sapiens
  Table A; Target 11048; HLA-C*06:02; BPIFA2; ENSG00000131050; CTA
NSVINTLK

SEQ ID NO: 11049 - protein, 8 aa, Homo sapiens
  Table A; Target 11049; HLA-C*07:01; BPIFA2; ENSG00000131050; CTA
NSVINTLK

SEQ ID NO: 11050 - protein, 10 aa, Homo sapiens
  Table A; Target 11050; HLA-C*07:01; BPIFA2; ENSG00000131050; CTA
NSVINTLKST

SEQ ID NO: 11051 - protein, 11 aa, Homo sapiens
  Table A; Target 11051; HLA-C*06:02; BPIFA2; ENSG00000131050; CTA
NSVINTLKSTV

SEQ ID NO: 11052 - protein, 11 aa, Homo sapiens
  Table A; Target 11052; HLA-C*07:01; BPIFA2; ENSG00000131050; CTA
NSVINTLKSTV

SEQ ID NO: 11053 - protein, 8 aa, Homo sapiens
  Table A; Target 11053; HLA-A*01:01; BPIFA2; ENSG00000131050; CTA
NTDIFGLK

SEQ ID NO: 11054 - protein, 8 aa, Homo sapiens
  Table A; Target 11054; HLA-A*11:01; BPIFA2; ENSG00000131050; CTA
NTDIFGLK

SEQ ID NO: 11055 - protein, 9 aa, Homo sapiens
  Table A; Target 11055; HLA-A*01:01; BPIFA2; ENSG00000131050; CTA
NTDIFGLKI

SEQ ID NO: 11056 - protein, 9 aa, Homo sapiens
  Table A; Target 11056; HLA-A*02:07; BPIFA2; ENSG00000131050; CTA
NTDIFGLKI

SEQ ID NO: 11057 - protein, 9 aa, Homo sapiens
  Table A; Target 11057; HLA-A*68:02; BPIFA2; ENSG00000131050; CTA
NTDIFGLKI

SEQ ID NO: 11058 - protein, 9 aa, Homo sapiens
  Table A; Target 11058; HLA-B*38:01; BPIFA2; ENSG00000131050; CTA
NTDIFGLKI

SEQ ID NO: 11059 - protein, 9 aa, Homo sapiens
  Table A; Target 11059; HLA-C*05:01; BPIFA2; ENSG00000131050; CTA
NTDIFGLKI

SEQ ID NO: 11060 - protein, 8 aa, Homo sapiens
  Table A; Target 11060; HLA-C*04:01; BPIFA2; ENSG00000131050; CTA
NTLKGILE

SEQ ID NO: 11061 - protein, 9 aa, Homo sapiens
  Table A; Target 11061; HLA-A*01:01; BPIFA2; ENSG00000131050; CTA
NTLKGILEK

SEQ ID NO: 11062 - protein, 9 aa, Homo sapiens
  Table A; Target 11062; HLA-A*03:01; BPIFA2; ENSG00000131050; CTA
NTLKGILEK

SEQ ID NO: 11063 - protein, 9 aa, Homo sapiens
  Table A; Target 11063; HLA-A*03:02; BPIFA2; ENSG00000131050; CTA
NTLKGILEK

SEQ ID NO: 11064 - protein, 9 aa, Homo sapiens
  Table A; Target 11064; HLA-A*11:01; BPIFA2; ENSG00000131050; CTA
NTLKGILEK

SEQ ID NO: 11065 - protein, 9 aa, Homo sapiens
  Table A; Target 11065; HLA-A*33:01; BPIFA2; ENSG00000131050; CTA
NTLKGILEK

SEQ ID NO: 11066 - protein, 9 aa, Homo sapiens
  Table A; Target 11066; HLA-A*33:03; BPIFA2; ENSG00000131050; CTA
NTLKGILEK

SEQ ID NO: 11067 - protein, 9 aa, Homo sapiens
  Table A; Target 11067; HLA-A*68:01; BPIFA2; ENSG00000131050; CTA
NTLKGILEK

SEQ ID NO: 11068 - protein, 9 aa, Homo sapiens
  Table A; Target 11068; HLA-B*40:02; BPIFA2; ENSG00000131050; CTA
NTLKGILEK

SEQ ID NO: 11069 - protein, 9 aa, Homo sapiens
  Table A; Target 11069; HLA-C*07:06; BPIFA2; ENSG00000131050; CTA
NTLKGILEK

SEQ ID NO: 11070 - protein, 10 aa, Homo sapiens
  Table A; Target 11070; HLA-A*02:04; BPIFA2; ENSG00000131050; CTA
NTLKGILEKL

SEQ ID NO: 11071 - protein, 10 aa, Homo sapiens
  Table A; Target 11071; HLA-A*33:01; BPIFA2; ENSG00000131050; CTA
NTLKGILEKL

SEQ ID NO: 11072 - protein, 10 aa, Homo sapiens
  Table A; Target 11072; HLA-A*33:03; BPIFA2; ENSG00000131050; CTA
NTLKGILEKL

SEQ ID NO: 11073 - protein, 10 aa, Homo sapiens
  Table A; Target 11073; HLA-A*68:01; BPIFA2; ENSG00000131050; CTA
NTLKGILEKL

SEQ ID NO: 11074 - protein, 10 aa, Homo sapiens
  Table A; Target 11074; HLA-A*68:02; BPIFA2; ENSG00000131050; CTA
NTLKGILEKL

SEQ ID NO: 11075 - protein, 10 aa, Homo sapiens
  Table A; Target 11075; HLA-C*01:02; BPIFA2; ENSG00000131050; CTA
NTLKSTVSSL

SEQ ID NO: 11076 - protein, 11 aa, Homo sapiens
  Table A; Target 11076; HLA-C*04:01; BPIFA2; ENSG00000131050; CTA
NVIQQVVDNPQ

SEQ ID NO: 11077 - protein, 9 aa, Homo sapiens
  Table A; Target 11077; HLA-A*02:01; BPIFA2; ENSG00000131050; CTA
NVISKLLPT

SEQ ID NO: 11078 - protein, 9 aa, Homo sapiens
  Table A; Target 11078; HLA-A*02:03; BPIFA2; ENSG00000131050; CTA
NVISKLLPT

SEQ ID NO: 11079 - protein, 9 aa, Homo sapiens
  Table A; Target 11079; HLA-A*26:01; BPIFA2; ENSG00000131050; CTA
NVISKLLPT

SEQ ID NO: 11080 - protein, 9 aa, Homo sapiens
  Table A; Target 11080; HLA-B*54:01; BPIFA2; ENSG00000131050; CTA
NVISKLLPT

SEQ ID NO: 11081 - protein, 9 aa, Homo sapiens
  Table A; Target 11081; HLA-C*06:02; BPIFA2; ENSG00000131050; CTA
NVISKLLPT

SEQ ID NO: 11082 - protein, 8 aa, Homo sapiens
  Table A; Target 11082; HLA-B*07:02; BPIFA2; ENSG00000131050; CTA
NVTVAGPI

SEQ ID NO: 11083 - protein, 8 aa, Homo sapiens
  Table A; Target 11083; HLA-C*01:02; BPIFA2; ENSG00000131050; CTA
NVTVAGPI

SEQ ID NO: 11084 - protein, 8 aa, Homo sapiens
  Table A; Target 11084; HLA-C*04:01; BPIFA2; ENSG00000131050; CTA
NVTVAGPI

SEQ ID NO: 11085 - protein, 8 aa, Homo sapiens
  Table A; Target 11085; HLA-C*07:01; BPIFA2; ENSG00000131050; CTA
NVTVAGPI

SEQ ID NO: 11086 - protein, 8 aa, Homo sapiens
  Table A; Target 11086; HLA-C*14:02; BPIFA2; ENSG00000131050; CTA
NVTVAGPI

SEQ ID NO: 11087 - protein, 9 aa, Homo sapiens
  Table A; Target 11087; HLA-A*23:01; BPIFA2; ENSG00000131050; CTA
NVTVAGPII

SEQ ID NO: 11088 - protein, 9 aa, Homo sapiens
  Table A; Target 11088; HLA-A*24:02; BPIFA2; ENSG00000131050; CTA
NVTVAGPII

SEQ ID NO: 11089 - protein, 9 aa, Homo sapiens
  Table A; Target 11089; HLA-A*25:01; BPIFA2; ENSG00000131050; CTA
NVTVAGPII

SEQ ID NO: 11090 - protein, 9 aa, Homo sapiens
  Table A; Target 11090; HLA-B*07:02; BPIFA2; ENSG00000131050; CTA
NVTVAGPII

SEQ ID NO: 11091 - protein, 9 aa, Homo sapiens
  Table A; Target 11091; HLA-B*13:02; BPIFA2; ENSG00000131050; CTA
NVTVAGPII

SEQ ID NO: 11092 - protein, 9 aa, Homo sapiens
  Table A; Target 11092; HLA-B*35:01; BPIFA2; ENSG00000131050; CTA
NVTVAGPII

SEQ ID NO: 11093 - protein, 9 aa, Homo sapiens
  Table A; Target 11093; HLA-B*35:03; BPIFA2; ENSG00000131050; CTA
NVTVAGPII

SEQ ID NO: 11094 - protein, 9 aa, Homo sapiens
  Table A; Target 11094; HLA-B*38:01; BPIFA2; ENSG00000131050; CTA
NVTVAGPII

SEQ ID NO: 11095 - protein, 9 aa, Homo sapiens
  Table A; Target 11095; HLA-B*39:01; BPIFA2; ENSG00000131050; CTA
NVTVAGPII

SEQ ID NO: 11096 - protein, 9 aa, Homo sapiens
  Table A; Target 11096; HLA-B*51:01; BPIFA2; ENSG00000131050; CTA
NVTVAGPII

SEQ ID NO: 11097 - protein, 9 aa, Homo sapiens
  Table A; Target 11097; HLA-B*55:01; BPIFA2; ENSG00000131050; CTA
NVTVAGPII

SEQ ID NO: 11098 - protein, 9 aa, Homo sapiens
  Table A; Target 11098; HLA-C*01:02; BPIFA2; ENSG00000131050; CTA
NVTVAGPII

SEQ ID NO: 11099 - protein, 9 aa, Homo sapiens
  Table A; Target 11099; HLA-C*03:03; BPIFA2; ENSG00000131050; CTA
NVTVAGPII

SEQ ID NO: 11100 - protein, 9 aa, Homo sapiens
  Table A; Target 11100; HLA-C*03:04; BPIFA2; ENSG00000131050; CTA
NVTVAGPII

SEQ ID NO: 11101 - protein, 9 aa, Homo sapiens
  Table A; Target 11101; HLA-C*04:01; BPIFA2; ENSG00000131050; CTA
NVTVAGPII

SEQ ID NO: 11102 - protein, 9 aa, Homo sapiens
  Table A; Target 11102; HLA-C*06:02; BPIFA2; ENSG00000131050; CTA
NVTVAGPII

SEQ ID NO: 11103 - protein, 9 aa, Homo sapiens
  Table A; Target 11103; HLA-C*07:01; BPIFA2; ENSG00000131050; CTA
NVTVAGPII

SEQ ID NO: 11104 - protein, 9 aa, Homo sapiens
  Table A; Target 11104; HLA-C*07:04; BPIFA2; ENSG00000131050; CTA
NVTVAGPII

SEQ ID NO: 11105 - protein, 9 aa, Homo sapiens
  Table A; Target 11105; HLA-C*12:03; BPIFA2; ENSG00000131050; CTA
NVTVAGPII

SEQ ID NO: 11106 - protein, 9 aa, Homo sapiens
  Table A; Target 11106; HLA-C*14:02; BPIFA2; ENSG00000131050; CTA
NVTVAGPII

SEQ ID NO: 11107 - protein, 9 aa, Homo sapiens
  Table A; Target 11107; HLA-C*16:01; BPIFA2; ENSG00000131050; CTA
NVTVAGPII

SEQ ID NO: 11108 - protein, 10 aa, Homo sapiens
  Table A; Target 11108; HLA-C*07:01; BPIFA2; ENSG00000131050; CTA
NVTVAGPIIG

SEQ ID NO: 11109 - protein, 9 aa, Homo sapiens
  Table A; Target 11109; HLA-A*02:01; BPIFA2; ENSG00000131050; CTA
NVVDKLEPV

SEQ ID NO: 11110 - protein, 9 aa, Homo sapiens
  Table A; Target 11110; HLA-A*02:03; BPIFA2; ENSG00000131050; CTA
NVVDKLEPV

SEQ ID NO: 11111 - protein, 9 aa, Homo sapiens
  Table A; Target 11111; HLA-A*02:04; BPIFA2; ENSG00000131050; CTA
NVVDKLEPV

SEQ ID NO: 11112 - protein, 9 aa, Homo sapiens
  Table A; Target 11112; HLA-A*02:07; BPIFA2; ENSG00000131050; CTA
NVVDKLEPV

SEQ ID NO: 11113 - protein, 9 aa, Homo sapiens
  Table A; Target 11113; HLA-A*25:01; BPIFA2; ENSG00000131050; CTA
NVVDKLEPV

SEQ ID NO: 11114 - protein, 9 aa, Homo sapiens
  Table A; Target 11114; HLA-A*26:01; BPIFA2; ENSG00000131050; CTA
NVVDKLEPV

SEQ ID NO: 11115 - protein, 9 aa, Homo sapiens
  Table A; Target 11115; HLA-A*68:01; BPIFA2; ENSG00000131050; CTA
NVVDKLEPV

SEQ ID NO: 11116 - protein, 9 aa, Homo sapiens
  Table A; Target 11116; HLA-A*68:02; BPIFA2; ENSG00000131050; CTA
NVVDKLEPV

SEQ ID NO: 11117 - protein, 9 aa, Homo sapiens
  Table A; Target 11117; HLA-B*08:01; BPIFA2; ENSG00000131050; CTA
NVVDKLEPV

SEQ ID NO: 11118 - protein, 9 aa, Homo sapiens
  Table A; Target 11118; HLA-B*46:01; BPIFA2; ENSG00000131050; CTA
NVVDKLEPV

SEQ ID NO: 11119 - protein, 9 aa, Homo sapiens
  Table A; Target 11119; HLA-B*54:01; BPIFA2; ENSG00000131050; CTA
NVVDKLEPV

SEQ ID NO: 11120 - protein, 9 aa, Homo sapiens
  Table A; Target 11120; HLA-B*55:01; BPIFA2; ENSG00000131050; CTA
NVVDKLEPV

SEQ ID NO: 11121 - protein, 9 aa, Homo sapiens
  Table A; Target 11121; HLA-B*56:01; BPIFA2; ENSG00000131050; CTA
NVVDKLEPV

SEQ ID NO: 11122 - protein, 9 aa, Homo sapiens
  Table A; Target 11122; HLA-C*01:02; BPIFA2; ENSG00000131050; CTA
NVVDKLEPV

SEQ ID NO: 11123 - protein, 9 aa, Homo sapiens
  Table A; Target 11123; HLA-C*02:02; BPIFA2; ENSG00000131050; CTA
NVVDKLEPV

SEQ ID NO: 11124 - protein, 9 aa, Homo sapiens
  Table A; Target 11124; HLA-C*03:04; BPIFA2; ENSG00000131050; CTA
NVVDKLEPV

SEQ ID NO: 11125 - protein, 9 aa, Homo sapiens
  Table A; Target 11125; HLA-C*06:02; BPIFA2; ENSG00000131050; CTA
NVVDKLEPV

SEQ ID NO: 11126 - protein, 9 aa, Homo sapiens
  Table A; Target 11126; HLA-C*07:06; BPIFA2; ENSG00000131050; CTA
NVVDKLEPV

SEQ ID NO: 11127 - protein, 10 aa, Homo sapiens
  Table A; Target 11127; HLA-A*02:01; BPIFA2; ENSG00000131050; CTA
NVVDKLEPVL

SEQ ID NO: 11128 - protein, 10 aa, Homo sapiens
  Table A; Target 11128; HLA-A*02:04; BPIFA2; ENSG00000131050; CTA
NVVDKLEPVL

SEQ ID NO: 11129 - protein, 10 aa, Homo sapiens
  Table A; Target 11129; HLA-A*02:07; BPIFA2; ENSG00000131050; CTA
NVVDKLEPVL

SEQ ID NO: 11130 - protein, 10 aa, Homo sapiens
  Table A; Target 11130; HLA-A*25:01; BPIFA2; ENSG00000131050; CTA
NVVDKLEPVL

SEQ ID NO: 11131 - protein, 10 aa, Homo sapiens
  Table A; Target 11131; HLA-A*26:01; BPIFA2; ENSG00000131050; CTA
NVVDKLEPVL

SEQ ID NO: 11132 - protein, 10 aa, Homo sapiens
  Table A; Target 11132; HLA-A*68:01; BPIFA2; ENSG00000131050; CTA
NVVDKLEPVL

SEQ ID NO: 11133 - protein, 10 aa, Homo sapiens
  Table A; Target 11133; HLA-A*68:02; BPIFA2; ENSG00000131050; CTA
NVVDKLEPVL

SEQ ID NO: 11134 - protein, 10 aa, Homo sapiens
  Table A; Target 11134; HLA-B*35:01; BPIFA2; ENSG00000131050; CTA
NVVDKLEPVL

SEQ ID NO: 11135 - protein, 10 aa, Homo sapiens
  Table A; Target 11135; HLA-B*35:03; BPIFA2; ENSG00000131050; CTA
NVVDKLEPVL

SEQ ID NO: 11136 - protein, 10 aa, Homo sapiens
  Table A; Target 11136; HLA-B*38:01; BPIFA2; ENSG00000131050; CTA
NVVDKLEPVL

SEQ ID NO: 11137 - protein, 10 aa, Homo sapiens
  Table A; Target 11137; HLA-B*55:01; BPIFA2; ENSG00000131050; CTA
NVVDKLEPVL

SEQ ID NO: 11138 - protein, 10 aa, Homo sapiens
  Table A; Target 11138; HLA-C*06:02; BPIFA2; ENSG00000131050; CTA
NVVDKLEPVL

SEQ ID NO: 11139 - protein, 10 aa, Homo sapiens
  Table A; Target 11139; HLA-C*07:01; BPIFA2; ENSG00000131050; CTA
NVVDKLEPVL

SEQ ID NO: 11140 - protein, 8 aa, Homo sapiens
  Table A; Target 11140; HLA-C*05:01; BPIFA2; ENSG00000131050; CTA
PIDDGKGL

SEQ ID NO: 11141 - protein, 10 aa, Homo sapiens
  Table A; Target 11141; HLA-A*01:01; BPIFA2; ENSG00000131050; CTA
PIDDGKGLNL

SEQ ID NO: 11142 - protein, 10 aa, Homo sapiens
  Table A; Target 11142; HLA-A*02:07; BPIFA2; ENSG00000131050; CTA
PIDDGKGLNL

SEQ ID NO: 11143 - protein, 10 aa, Homo sapiens
  Table A; Target 11143; HLA-C*05:01; BPIFA2; ENSG00000131050; CTA
PIDDGKGLNL

SEQ ID NO: 11144 - protein, 9 aa, Homo sapiens
  Table A; Target 11144; HLA-A*02:03; BPIFA2; ENSG00000131050; CTA
PIIGQIINL

SEQ ID NO: 11145 - protein, 9 aa, Homo sapiens
  Table A; Target 11145; HLA-A*02:04; BPIFA2; ENSG00000131050; CTA
PIIGQIINL

SEQ ID NO: 11146 - protein, 9 aa, Homo sapiens
  Table A; Target 11146; HLA-A*02:07; BPIFA2; ENSG00000131050; CTA
PIIGQIINL

SEQ ID NO: 11147 - protein, 9 aa, Homo sapiens
  Table A; Target 11147; HLA-A*23:01; BPIFA2; ENSG00000131050; CTA
PIIGQIINL

SEQ ID NO: 11148 - protein, 9 aa, Homo sapiens
  Table A; Target 11148; HLA-A*24:02; BPIFA2; ENSG00000131050; CTA
PIIGQIINL

SEQ ID NO: 11149 - protein, 9 aa, Homo sapiens
  Table A; Target 11149; HLA-A*68:02; BPIFA2; ENSG00000131050; CTA
PIIGQIINL

SEQ ID NO: 11150 - protein, 9 aa, Homo sapiens
  Table A; Target 11150; HLA-C*07:04; BPIFA2; ENSG00000131050; CTA
PIIGQIINL

SEQ ID NO: 11151 - protein, 10 aa, Homo sapiens
  Table A; Target 11151; HLA-A*03:01; BPIFA2; ENSG00000131050; CTA
PIIGQIINLK

SEQ ID NO: 11152 - protein, 10 aa, Homo sapiens
  Table A; Target 11152; HLA-A*11:01; BPIFA2; ENSG00000131050; CTA
PIIGQIINLK

SEQ ID NO: 11153 - protein, 10 aa, Homo sapiens
  Table A; Target 11153; HLA-C*06:02; BPIFA2; ENSG00000131050; CTA
PIIGQIINLK

SEQ ID NO: 11154 - protein, 10 aa, Homo sapiens
  Table A; Target 11154; HLA-C*07:02; BPIFA2; ENSG00000131050; CTA
PQHKTQLQTL

SEQ ID NO: 11155 - protein, 9 aa, Homo sapiens
  Table A; Target 11155; HLA-A*02:03; BPIFA2; ENSG00000131050; CTA
PQTHQPVAV

SEQ ID NO: 11156 - protein, 9 aa, Homo sapiens
  Table A; Target 11156; HLA-B*07:02; BPIFA2; ENSG00000131050; CTA
PQTHQPVAV

SEQ ID NO: 11157 - protein, 9 aa, Homo sapiens
  Table A; Target 11157; HLA-B*13:02; BPIFA2; ENSG00000131050; CTA
PQTHQPVAV

SEQ ID NO: 11158 - protein, 9 aa, Homo sapiens
  Table A; Target 11158; HLA-C*06:02; BPIFA2; ENSG00000131050; CTA
PQTHQPVAV

SEQ ID NO: 11159 - protein, 9 aa, Homo sapiens
  Table A; Target 11159; HLA-C*07:02; BPIFA2; ENSG00000131050; CTA
PQTHQPVAV

SEQ ID NO: 11160 - protein, 10 aa, Homo sapiens
  Table A; Target 11160; HLA-C*07:02; BPIFA2; ENSG00000131050; CTA
PQTHQPVAVL

SEQ ID NO: 11161 - protein, 9 aa, Homo sapiens
  Table A; Target 11161; HLA-C*07:01; BPIFA2; ENSG00000131050; CTA
PTNTDIFGL

SEQ ID NO: 11162 - protein, 10 aa, Homo sapiens
  Table A; Target 11162; HLA-A*03:01; BPIFA2; ENSG00000131050; CTA
PTNTDIFGLK

SEQ ID NO: 11163 - protein, 10 aa, Homo sapiens
  Table A; Target 11163; HLA-A*11:01; BPIFA2; ENSG00000131050; CTA
PTNTDIFGLK

SEQ ID NO: 11164 - protein, 8 aa, Homo sapiens
  Table A; Target 11164; HLA-C*07:01; BPIFA2; ENSG00000131050; CTA
PTSISLSL

SEQ ID NO: 11165 - protein, 8 aa, Homo sapiens
  Table A; Target 11165; HLA-C*07:02; BPIFA2; ENSG00000131050; CTA
PTSISLSL

SEQ ID NO: 11166 - protein, 9 aa, Homo sapiens
  Table A; Target 11166; HLA-A*01:01; BPIFA2; ENSG00000131050; CTA
PTSISLSLL

SEQ ID NO: 11167 - protein, 9 aa, Homo sapiens
  Table A; Target 11167; HLA-B*07:02; BPIFA2; ENSG00000131050; CTA
PTSISLSLL

SEQ ID NO: 11168 - protein, 9 aa, Homo sapiens
  Table A; Target 11168; HLA-C*04:01; BPIFA2; ENSG00000131050; CTA
PTSISLSLL

SEQ ID NO: 11169 - protein, 9 aa, Homo sapiens
  Table A; Target 11169; HLA-C*07:02; BPIFA2; ENSG00000131050; CTA
PTSISLSLL

SEQ ID NO: 11170 - protein, 11 aa, Homo sapiens
  Table A; Target 11170; HLA-B*27:02; BPIFA2; ENSG00000131050; CTA
PTSISLSLLDK

SEQ ID NO: 11171 - protein, 8 aa, Homo sapiens
  Table A; Target 11171; HLA-B*27:05; BPIFA2; ENSG00000131050; CTA
PVTANVTV

SEQ ID NO: 11172 - protein, 8 aa, Homo sapiens
  Table A; Target 11172; HLA-C*04:01; BPIFA2; ENSG00000131050; CTA
PVTANVTV

SEQ ID NO: 11173 - protein, 8 aa, Homo sapiens
  Table A; Target 11173; HLA-C*06:02; BPIFA2; ENSG00000131050; CTA
PVTANVTV

SEQ ID NO: 11174 - protein, 8 aa, Homo sapiens
  Table A; Target 11174; HLA-C*07:01; BPIFA2; ENSG00000131050; CTA
PVTANVTV

SEQ ID NO: 11175 - protein, 8 aa, Homo sapiens
  Table A; Target 11175; HLA-C*07:02; BPIFA2; ENSG00000131050; CTA
PVTANVTV

SEQ ID NO: 11176 - protein, 8 aa, Homo sapiens
  Table A; Target 11176; HLA-C*16:02; BPIFA2; ENSG00000131050; CTA
PVTANVTV

SEQ ID NO: 11177 - protein, 10 aa, Homo sapiens
  Table A; Target 11177; HLA-B*07:02; BPIFA2; ENSG00000131050; CTA
PVTANVTVAG

SEQ ID NO: 11178 - protein, 10 aa, Homo sapiens
  Table A; Target 11178; HLA-C*07:01; BPIFA2; ENSG00000131050; CTA
PVTANVTVAG

SEQ ID NO: 11179 - protein, 10 aa, Homo sapiens
  Table A; Target 11179; HLA-C*07:02; BPIFA2; ENSG00000131050; CTA
PVTANVTVAG

SEQ ID NO: 11180 - protein, 10 aa, Homo sapiens
  Table A; Target 11180; HLA-A*30:01; BPIFA2; ENSG00000131050; CTA
QEAEKLLNNV

SEQ ID NO: 11181 - protein, 10 aa, Homo sapiens
  Table A; Target 11181; HLA-A*68:02; BPIFA2; ENSG00000131050; CTA
QEAEKLLNNV

SEQ ID NO: 11182 - protein, 10 aa, Homo sapiens
  Table A; Target 11182; HLA-B*40:02; BPIFA2; ENSG00000131050; CTA
QEAEKLLNNV

SEQ ID NO: 11183 - protein, 10 aa, Homo sapiens
  Table A; Target 11183; HLA-B*49:01; BPIFA2; ENSG00000131050; CTA
QEAEKLLNNV

SEQ ID NO: 11184 - protein, 11 aa, Homo sapiens
  Table A; Target 11184; HLA-A*30:01; BPIFA2; ENSG00000131050; CTA
QEAEKLLNNVI

SEQ ID NO: 11185 - protein, 11 aa, Homo sapiens
  Table A; Target 11185; HLA-B*27:05; BPIFA2; ENSG00000131050; CTA
QEAEKLLNNVI

SEQ ID NO: 11186 - protein, 11 aa, Homo sapiens
  Table A; Target 11186; HLA-B*38:01; BPIFA2; ENSG00000131050; CTA
QEAEKLLNNVI

SEQ ID NO: 11187 - protein, 11 aa, Homo sapiens
  Table A; Target 11187; HLA-B*40:01; BPIFA2; ENSG00000131050; CTA
QEAEKLLNNVI

SEQ ID NO: 11188 - protein, 11 aa, Homo sapiens
  Table A; Target 11188; HLA-B*40:02; BPIFA2; ENSG00000131050; CTA
QEAEKLLNNVI

SEQ ID NO: 11189 - protein, 11 aa, Homo sapiens
  Table A; Target 11189; HLA-B*44:02; BPIFA2; ENSG00000131050; CTA
QEAEKLLNNVI

SEQ ID NO: 11190 - protein, 11 aa, Homo sapiens
  Table A; Target 11190; HLA-B*44:03; BPIFA2; ENSG00000131050; CTA
QEAEKLLNNVI

SEQ ID NO: 11191 - protein, 11 aa, Homo sapiens
  Table A; Target 11191; HLA-B*49:01; BPIFA2; ENSG00000131050; CTA
QEAEKLLNNVI

SEQ ID NO: 11192 - protein, 11 aa, Homo sapiens
  Table A; Target 11192; HLA-C*06:02; BPIFA2; ENSG00000131050; CTA
QEAEKLLNNVI

SEQ ID NO: 11193 - protein, 11 aa, Homo sapiens
  Table A; Target 11193; HLA-C*07:01; BPIFA2; ENSG00000131050; CTA
QEAEKLLNNVI

SEQ ID NO: 11194 - protein, 11 aa, Homo sapiens
  Table A; Target 11194; HLA-C*12:03; BPIFA2; ENSG00000131050; CTA
QEAEKLLNNVI

SEQ ID NO: 11195 - protein, 9 aa, Homo sapiens
  Table A; Target 11195; HLA-B*38:01; BPIFA2; ENSG00000131050; CTA
QHKTQLQTL

SEQ ID NO: 11196 - protein, 9 aa, Homo sapiens
  Table A; Target 11196; HLA-B*39:01; BPIFA2; ENSG00000131050; CTA
QHKTQLQTL

SEQ ID NO: 11197 - protein, 10 aa, Homo sapiens
  Table A; Target 11197; HLA-A*02:01; BPIFA2; ENSG00000131050; CTA
QIINKFVNSV

SEQ ID NO: 11198 - protein, 10 aa, Homo sapiens
  Table A; Target 11198; HLA-A*02:03; BPIFA2; ENSG00000131050; CTA
QIINKFVNSV

SEQ ID NO: 11199 - protein, 10 aa, Homo sapiens
  Table A; Target 11199; HLA-A*02:04; BPIFA2; ENSG00000131050; CTA
QIINKFVNSV

SEQ ID NO: 11200 - protein, 10 aa, Homo sapiens
  Table A; Target 11200; HLA-A*68:02; BPIFA2; ENSG00000131050; CTA
QIINKFVNSV

SEQ ID NO: 11201 - protein, 9 aa, Homo sapiens
  Table A; Target 11201; HLA-A*02:04; BPIFA2; ENSG00000131050; CTA
QIINLKASL

SEQ ID NO: 11202 - protein, 9 aa, Homo sapiens
  Table A; Target 11202; HLA-A*23:01; BPIFA2; ENSG00000131050; CTA
QIINLKASL

SEQ ID NO: 11203 - protein, 9 aa, Homo sapiens
  Table A; Target 11203; HLA-A*25:01; BPIFA2; ENSG00000131050; CTA
QIINLKASL

SEQ ID NO: 11204 - protein, 9 aa, Homo sapiens
  Table A; Target 11204; HLA-A*32:01; BPIFA2; ENSG00000131050; CTA
QIINLKASL

SEQ ID NO: 11205 - protein, 9 aa, Homo sapiens
  Table A; Target 11205; HLA-B*07:02; BPIFA2; ENSG00000131050; CTA
QIINLKASL

SEQ ID NO: 11206 - protein, 9 aa, Homo sapiens
  Table A; Target 11206; HLA-B*08:01; BPIFA2; ENSG00000131050; CTA
QIINLKASL

SEQ ID NO: 11207 - protein, 9 aa, Homo sapiens
  Table A; Target 11207; HLA-B*15:01; BPIFA2; ENSG00000131050; CTA
QIINLKASL

SEQ ID NO: 11208 - protein, 9 aa, Homo sapiens
  Table A; Target 11208; HLA-B*27:05; BPIFA2; ENSG00000131050; CTA
QIINLKASL

SEQ ID NO: 11209 - protein, 9 aa, Homo sapiens
  Table A; Target 11209; HLA-B*44:03; BPIFA2; ENSG00000131050; CTA
QIINLKASL

SEQ ID NO: 11210 - protein, 9 aa, Homo sapiens
  Table A; Target 11210; HLA-B*46:01; BPIFA2; ENSG00000131050; CTA
QIINLKASL

SEQ ID NO: 11211 - protein, 9 aa, Homo sapiens
  Table A; Target 11211; HLA-B*58:01; BPIFA2; ENSG00000131050; CTA
QIINLKASL

SEQ ID NO: 11212 - protein, 9 aa, Homo sapiens
  Table A; Target 11212; HLA-C*01:02; BPIFA2; ENSG00000131050; CTA
QIINLKASL

SEQ ID NO: 11213 - protein, 9 aa, Homo sapiens
  Table A; Target 11213; HLA-C*03:03; BPIFA2; ENSG00000131050; CTA
QIINLKASL

SEQ ID NO: 11214 - protein, 9 aa, Homo sapiens
  Table A; Target 11214; HLA-C*03:04; BPIFA2; ENSG00000131050; CTA
QIINLKASL

SEQ ID NO: 11215 - protein, 9 aa, Homo sapiens
  Table A; Target 11215; HLA-C*07:02; BPIFA2; ENSG00000131050; CTA
QIINLKASL

SEQ ID NO: 11216 - protein, 9 aa, Homo sapiens
  Table A; Target 11216; HLA-C*07:04; BPIFA2; ENSG00000131050; CTA
QIINLKASL

SEQ ID NO: 11217 - protein, 9 aa, Homo sapiens
  Table A; Target 11217; HLA-C*14:02; BPIFA2; ENSG00000131050; CTA
QIINLKASL

SEQ ID NO: 11218 - protein, 9 aa, Homo sapiens
  Table A; Target 11218; HLA-B*15:03; BPIFA2; ENSG00000131050; CTA
QKAQEAEKL

SEQ ID NO: 11219 - protein, 9 aa, Homo sapiens
  Table A; Target 11219; HLA-B*38:01; BPIFA2; ENSG00000131050; CTA
QKAQEAEKL

SEQ ID NO: 11220 - protein, 9 aa, Homo sapiens
  Table A; Target 11220; HLA-B*39:01; BPIFA2; ENSG00000131050; CTA
QKAQEAEKL

SEQ ID NO: 11221 - protein, 8 aa, Homo sapiens
  Table A; Target 11221; HLA-A*02:01; BPIFA2; ENSG00000131050; CTA
QLWKLVLL

SEQ ID NO: 11222 - protein, 8 aa, Homo sapiens
  Table A; Target 11222; HLA-A*02:04; BPIFA2; ENSG00000131050; CTA
QLWKLVLL

SEQ ID NO: 11223 - protein, 8 aa, Homo sapiens
  Table A; Target 11223; HLA-A*02:07; BPIFA2; ENSG00000131050; CTA
QLWKLVLL

SEQ ID NO: 11224 - protein, 9 aa, Homo sapiens
  Table A; Target 11224; HLA-A*02:01; BPIFA2; ENSG00000131050; CTA
QLWKLVLLC

SEQ ID NO: 11225 - protein, 9 aa, Homo sapiens
  Table A; Target 11225; HLA-B*07:02; BPIFA2; ENSG00000131050; CTA
QPVAVLGEC

SEQ ID NO: 11226 - protein, 9 aa, Homo sapiens
  Table A; Target 11226; HLA-B*35:01; BPIFA2; ENSG00000131050; CTA
QPVAVLGEC

SEQ ID NO: 11227 - protein, 9 aa, Homo sapiens
  Table A; Target 11227; HLA-B*35:03; BPIFA2; ENSG00000131050; CTA
QPVAVLGEC

SEQ ID NO: 11228 - protein, 9 aa, Homo sapiens
  Table A; Target 11228; HLA-B*54:01; BPIFA2; ENSG00000131050; CTA
QPVAVLGEC

SEQ ID NO: 11229 - protein, 9 aa, Homo sapiens
  Table A; Target 11229; HLA-B*55:01; BPIFA2; ENSG00000131050; CTA
QPVAVLGEC

SEQ ID NO: 11230 - protein, 9 aa, Homo sapiens
  Table A; Target 11230; HLA-B*56:01; BPIFA2; ENSG00000131050; CTA
QPVAVLGEC

SEQ ID NO: 11231 - protein, 10 aa, Homo sapiens
  Table A; Target 11231; HLA-B*35:01; BPIFA2; ENSG00000131050; CTA
QPVAVLGECA

SEQ ID NO: 11232 - protein, 10 aa, Homo sapiens
  Table A; Target 11232; HLA-B*35:03; BPIFA2; ENSG00000131050; CTA
QPVAVLGECA

SEQ ID NO: 11233 - protein, 10 aa, Homo sapiens
  Table A; Target 11233; HLA-B*54:01; BPIFA2; ENSG00000131050; CTA
QPVAVLGECA

SEQ ID NO: 11234 - protein, 10 aa, Homo sapiens
  Table A; Target 11234; HLA-B*55:01; BPIFA2; ENSG00000131050; CTA
QPVAVLGECA

SEQ ID NO: 11235 - protein, 10 aa, Homo sapiens
  Table A; Target 11235; HLA-B*56:01; BPIFA2; ENSG00000131050; CTA
QPVAVLGECA

SEQ ID NO: 11236 - protein, 10 aa, Homo sapiens
  Table A; Target 11236; HLA-C*04:01; BPIFA2; ENSG00000131050; CTA
QPVAVLGECA

SEQ ID NO: 11237 - protein, 10 aa, Homo sapiens
  Table A; Target 11237; HLA-C*06:02; BPIFA2; ENSG00000131050; CTA
QPVAVLGECA

SEQ ID NO: 11238 - protein, 9 aa, Homo sapiens
  Table A; Target 11238; HLA-B*15:01; BPIFA2; ENSG00000131050; CTA
QQVVDNPQH

SEQ ID NO: 11239 - protein, 9 aa, Homo sapiens
  Table A; Target 11239; HLA-B*27:05; BPIFA2; ENSG00000131050; CTA
QQVVDNPQH

SEQ ID NO: 11240 - protein, 9 aa, Homo sapiens
  Table A; Target 11240; HLA-B*39:01; BPIFA2; ENSG00000131050; CTA
QQVVDNPQH

SEQ ID NO: 11241 - protein, 9 aa, Homo sapiens
  Table A; Target 11241; HLA-C*07:01; BPIFA2; ENSG00000131050; CTA
QQVVDNPQH

SEQ ID NO: 11242 - protein, 8 aa, Homo sapiens
  Table A; Target 11242; HLA-B*08:01; BPIFA2; ENSG00000131050; CTA
QTHQPVAV

SEQ ID NO: 11243 - protein, 8 aa, Homo sapiens
  Table A; Target 11243; HLA-B*13:02; BPIFA2; ENSG00000131050; CTA
QTHQPVAV

SEQ ID NO: 11244 - protein, 8 aa, Homo sapiens
  Table A; Target 11244; HLA-C*06:02; BPIFA2; ENSG00000131050; CTA
QTHQPVAV

SEQ ID NO: 11245 - protein, 9 aa, Homo sapiens
  Table A; Target 11245; HLA-A*25:01; BPIFA2; ENSG00000131050; CTA
QTHQPVAVL

SEQ ID NO: 11246 - protein, 9 aa, Homo sapiens
  Table A; Target 11246; HLA-A*31:01; BPIFA2; ENSG00000131050; CTA
QTHQPVAVL

SEQ ID NO: 11247 - protein, 9 aa, Homo sapiens
  Table A; Target 11247; HLA-A*32:01; BPIFA2; ENSG00000131050; CTA
QTHQPVAVL

SEQ ID NO: 11248 - protein, 9 aa, Homo sapiens
  Table A; Target 11248; HLA-A*33:01; BPIFA2; ENSG00000131050; CTA
QTHQPVAVL

SEQ ID NO: 11249 - protein, 9 aa, Homo sapiens
  Table A; Target 11249; HLA-A*33:03; BPIFA2; ENSG00000131050; CTA
QTHQPVAVL

SEQ ID NO: 11250 - protein, 9 aa, Homo sapiens
  Table A; Target 11250; HLA-A*68:01; BPIFA2; ENSG00000131050; CTA
QTHQPVAVL

SEQ ID NO: 11251 - protein, 9 aa, Homo sapiens
  Table A; Target 11251; HLA-A*68:02; BPIFA2; ENSG00000131050; CTA
QTHQPVAVL

SEQ ID NO: 11252 - protein, 9 aa, Homo sapiens
  Table A; Target 11252; HLA-B*35:03; BPIFA2; ENSG00000131050; CTA
QTHQPVAVL

SEQ ID NO: 11253 - protein, 9 aa, Homo sapiens
  Table A; Target 11253; HLA-B*38:01; BPIFA2; ENSG00000131050; CTA
QTHQPVAVL

SEQ ID NO: 11254 - protein, 9 aa, Homo sapiens
  Table A; Target 11254; HLA-B*39:01; BPIFA2; ENSG00000131050; CTA
QTHQPVAVL

SEQ ID NO: 11255 - protein, 9 aa, Homo sapiens
  Table A; Target 11255; HLA-B*40:02; BPIFA2; ENSG00000131050; CTA
QTHQPVAVL

SEQ ID NO: 11256 - protein, 9 aa, Homo sapiens
  Table A; Target 11256; HLA-B*46:01; BPIFA2; ENSG00000131050; CTA
QTHQPVAVL

SEQ ID NO: 11257 - protein, 9 aa, Homo sapiens
  Table A; Target 11257; HLA-B*57:01; BPIFA2; ENSG00000131050; CTA
QTHQPVAVL

SEQ ID NO: 11258 - protein, 9 aa, Homo sapiens
  Table A; Target 11258; HLA-B*58:01; BPIFA2; ENSG00000131050; CTA
QTHQPVAVL

SEQ ID NO: 11259 - protein, 9 aa, Homo sapiens
  Table A; Target 11259; HLA-C*01:02; BPIFA2; ENSG00000131050; CTA
QTHQPVAVL

SEQ ID NO: 11260 - protein, 9 aa, Homo sapiens
  Table A; Target 11260; HLA-C*02:02; BPIFA2; ENSG00000131050; CTA
QTHQPVAVL

SEQ ID NO: 11261 - protein, 9 aa, Homo sapiens
  Table A; Target 11261; HLA-C*03:03; BPIFA2; ENSG00000131050; CTA
QTHQPVAVL

SEQ ID NO: 11262 - protein, 9 aa, Homo sapiens
  Table A; Target 11262; HLA-C*03:04; BPIFA2; ENSG00000131050; CTA
QTHQPVAVL

SEQ ID NO: 11263 - protein, 9 aa, Homo sapiens
  Table A; Target 11263; HLA-C*05:01; BPIFA2; ENSG00000131050; CTA
QTHQPVAVL

SEQ ID NO: 11264 - protein, 9 aa, Homo sapiens
  Table A; Target 11264; HLA-C*06:02; BPIFA2; ENSG00000131050; CTA
QTHQPVAVL

SEQ ID NO: 11265 - protein, 9 aa, Homo sapiens
  Table A; Target 11265; HLA-C*07:01; BPIFA2; ENSG00000131050; CTA
QTHQPVAVL

SEQ ID NO: 11266 - protein, 9 aa, Homo sapiens
  Table A; Target 11266; HLA-C*07:02; BPIFA2; ENSG00000131050; CTA
QTHQPVAVL

SEQ ID NO: 11267 - protein, 9 aa, Homo sapiens
  Table A; Target 11267; HLA-C*07:04; BPIFA2; ENSG00000131050; CTA
QTHQPVAVL

SEQ ID NO: 11268 - protein, 9 aa, Homo sapiens
  Table A; Target 11268; HLA-C*12:03; BPIFA2; ENSG00000131050; CTA
QTHQPVAVL

SEQ ID NO: 11269 - protein, 9 aa, Homo sapiens
  Table A; Target 11269; HLA-A*01:01; BPIFA2; ENSG00000131050; CTA
QVVDNPQHK

SEQ ID NO: 11270 - protein, 9 aa, Homo sapiens
  Table A; Target 11270; HLA-A*03:01; BPIFA2; ENSG00000131050; CTA
QVVDNPQHK

SEQ ID NO: 11271 - protein, 9 aa, Homo sapiens
  Table A; Target 11271; HLA-A*03:02; BPIFA2; ENSG00000131050; CTA
QVVDNPQHK

SEQ ID NO: 11272 - protein, 9 aa, Homo sapiens
  Table A; Target 11272; HLA-A*11:01; BPIFA2; ENSG00000131050; CTA
QVVDNPQHK

SEQ ID NO: 11273 - protein, 9 aa, Homo sapiens
  Table A; Target 11273; HLA-A*25:01; BPIFA2; ENSG00000131050; CTA
QVVDNPQHK

SEQ ID NO: 11274 - protein, 9 aa, Homo sapiens
  Table A; Target 11274; HLA-A*26:01; BPIFA2; ENSG00000131050; CTA
QVVDNPQHK

SEQ ID NO: 11275 - protein, 9 aa, Homo sapiens
  Table A; Target 11275; HLA-A*31:01; BPIFA2; ENSG00000131050; CTA
QVVDNPQHK

SEQ ID NO: 11276 - protein, 9 aa, Homo sapiens
  Table A; Target 11276; HLA-A*33:03; BPIFA2; ENSG00000131050; CTA
QVVDNPQHK

SEQ ID NO: 11277 - protein, 9 aa, Homo sapiens
  Table A; Target 11277; HLA-A*68:01; BPIFA2; ENSG00000131050; CTA
QVVDNPQHK

SEQ ID NO: 11278 - protein, 9 aa, Homo sapiens
  Table A; Target 11278; HLA-C*07:06; BPIFA2; ENSG00000131050; CTA
QVVDNPQHK

SEQ ID NO: 11279 - protein, 10 aa, Homo sapiens
  Table A; Target 11279; HLA-A*32:01; BPIFA2; ENSG00000131050; CTA
QVVDNPQHKT

SEQ ID NO: 11280 - protein, 10 aa, Homo sapiens
  Table A; Target 11280; HLA-B*58:01; BPIFA2; ENSG00000131050; CTA
QVVDNPQHKT

SEQ ID NO: 11281 - protein, 10 aa, Homo sapiens
  Table A; Target 11281; HLA-C*06:02; BPIFA2; ENSG00000131050; CTA
QVVDNPQHKT

SEQ ID NO: 11282 - protein, 10 aa, Homo sapiens
  Table A; Target 11282; HLA-C*07:01; BPIFA2; ENSG00000131050; CTA
QVVDNPQHKT

SEQ ID NO: 11283 - protein, 10 aa, Homo sapiens
  Table A; Target 11283; HLA-C*07:02; BPIFA2; ENSG00000131050; CTA
QVVDNPQHKT

SEQ ID NO: 11284 - protein, 9 aa, Homo sapiens
  Table A; Target 11284; HLA-A*02:03; BPIFA2; ENSG00000131050; CTA
RIFIHSLDV

SEQ ID NO: 11285 - protein, 9 aa, Homo sapiens
  Table A; Target 11285; HLA-A*03:01; BPIFA2; ENSG00000131050; CTA
SAWQLAKQK

SEQ ID NO: 11286 - protein, 9 aa, Homo sapiens
  Table A; Target 11286; HLA-A*03:02; BPIFA2; ENSG00000131050; CTA
SAWQLAKQK

SEQ ID NO: 11287 - protein, 9 aa, Homo sapiens
  Table A; Target 11287; HLA-A*11:01; BPIFA2; ENSG00000131050; CTA
SAWQLAKQK

SEQ ID NO: 11288 - protein, 9 aa, Homo sapiens
  Table A; Target 11288; HLA-A*31:01; BPIFA2; ENSG00000131050; CTA
SAWQLAKQK

SEQ ID NO: 11289 - protein, 9 aa, Homo sapiens
  Table A; Target 11289; HLA-A*33:01; BPIFA2; ENSG00000131050; CTA
SAWQLAKQK

SEQ ID NO: 11290 - protein, 9 aa, Homo sapiens
  Table A; Target 11290; HLA-B*27:02; BPIFA2; ENSG00000131050; CTA
SAWQLAKQK

SEQ ID NO: 11291 - protein, 9 aa, Homo sapiens
  Table A; Target 11291; HLA-B*57:01; BPIFA2; ENSG00000131050; CTA
SAWQLAKQK

SEQ ID NO: 11292 - protein, 9 aa, Homo sapiens
  Table A; Target 11292; HLA-C*06:02; BPIFA2; ENSG00000131050; CTA
SAWQLAKQK

SEQ ID NO: 11293 - protein, 9 aa, Homo sapiens
  Table A; Target 11293; HLA-C*07:06; BPIFA2; ENSG00000131050; CTA
SAWQLAKQK

SEQ ID NO: 11294 - protein, 9 aa, Homo sapiens
  Table A; Target 11294; HLA-C*12:03; BPIFA2; ENSG00000131050; CTA
SAWQLAKQK

SEQ ID NO: 11295 - protein, 9 aa, Homo sapiens
  Table A; Target 11295; HLA-C*16:02; BPIFA2; ENSG00000131050; CTA
SAWQLAKQK

SEQ ID NO: 11296 - protein, 10 aa, Homo sapiens
  Table A; Target 11296; HLA-B*54:01; BPIFA2; ENSG00000131050; CTA
SAWQLAKQKA

SEQ ID NO: 11297 - protein, 8 aa, Homo sapiens
  Table A; Target 11297; HLA-A*30:01; BPIFA2; ENSG00000131050; CTA
SDPTSISL

SEQ ID NO: 11298 - protein, 8 aa, Homo sapiens
  Table A; Target 11298; HLA-B*07:02; BPIFA2; ENSG00000131050; CTA
SDPTSISL

SEQ ID NO: 11299 - protein, 8 aa, Homo sapiens
  Table A; Target 11299; HLA-B*37:01; BPIFA2; ENSG00000131050; CTA
SDPTSISL

SEQ ID NO: 11300 - protein, 8 aa, Homo sapiens
  Table A; Target 11300; HLA-B*40:01; BPIFA2; ENSG00000131050; CTA
SDPTSISL

SEQ ID NO: 11301 - protein, 8 aa, Homo sapiens
  Table A; Target 11301; HLA-B*40:02; BPIFA2; ENSG00000131050; CTA
SDPTSISL

SEQ ID NO: 11302 - protein, 8 aa, Homo sapiens
  Table A; Target 11302; HLA-C*01:02; BPIFA2; ENSG00000131050; CTA
SDPTSISL

SEQ ID NO: 11303 - protein, 8 aa, Homo sapiens
  Table A; Target 11303; HLA-C*04:01; BPIFA2; ENSG00000131050; CTA
SDPTSISL

SEQ ID NO: 11304 - protein, 8 aa, Homo sapiens
  Table A; Target 11304; HLA-C*06:02; BPIFA2; ENSG00000131050; CTA
SDPTSISL

SEQ ID NO: 11305 - protein, 8 aa, Homo sapiens
  Table A; Target 11305; HLA-C*07:01; BPIFA2; ENSG00000131050; CTA
SDPTSISL

SEQ ID NO: 11306 - protein, 8 aa, Homo sapiens
  Table A; Target 11306; HLA-C*07:02; BPIFA2; ENSG00000131050; CTA
SDPTSISL

SEQ ID NO: 11307 - protein, 10 aa, Homo sapiens
  Table A; Target 11307; HLA-A*30:01; BPIFA2; ENSG00000131050; CTA
SDPTSISLSL

SEQ ID NO: 11308 - protein, 10 aa, Homo sapiens
  Table A; Target 11308; HLA-B*07:02; BPIFA2; ENSG00000131050; CTA
SDPTSISLSL

SEQ ID NO: 11309 - protein, 10 aa, Homo sapiens
  Table A; Target 11309; HLA-B*40:01; BPIFA2; ENSG00000131050; CTA
SDPTSISLSL

SEQ ID NO: 11310 - protein, 10 aa, Homo sapiens
  Table A; Target 11310; HLA-B*40:02; BPIFA2; ENSG00000131050; CTA
SDPTSISLSL

SEQ ID NO: 11311 - protein, 10 aa, Homo sapiens
  Table A; Target 11311; HLA-C*07:02; BPIFA2; ENSG00000131050; CTA
SDPTSISLSL

SEQ ID NO: 11312 - protein, 8 aa, Homo sapiens
  Table A; Target 11312; HLA-A*30:01; BPIFA2; ENSG00000131050; CTA
SESLLDNL

SEQ ID NO: 11313 - protein, 8 aa, Homo sapiens
  Table A; Target 11313; HLA-B*18:01; BPIFA2; ENSG00000131050; CTA
SESLLDNL

SEQ ID NO: 11314 - protein, 8 aa, Homo sapiens
  Table A; Target 11314; HLA-B*37:01; BPIFA2; ENSG00000131050; CTA
SESLLDNL

SEQ ID NO: 11315 - protein, 8 aa, Homo sapiens
  Table A; Target 11315; HLA-B*40:01; BPIFA2; ENSG00000131050; CTA
SESLLDNL

SEQ ID NO: 11316 - protein, 8 aa, Homo sapiens
  Table A; Target 11316; HLA-B*40:02; BPIFA2; ENSG00000131050; CTA
SESLLDNL

SEQ ID NO: 11317 - protein, 8 aa, Homo sapiens
  Table A; Target 11317; HLA-B*49:01; BPIFA2; ENSG00000131050; CTA
SESLLDNL

SEQ ID NO: 11318 - protein, 8 aa, Homo sapiens
  Table A; Target 11318; HLA-C*01:02; BPIFA2; ENSG00000131050; CTA
SFPVTANV

SEQ ID NO: 11319 - protein, 8 aa, Homo sapiens
  Table A; Target 11319; HLA-C*04:01; BPIFA2; ENSG00000131050; CTA
SFPVTANV

SEQ ID NO: 11320 - protein, 8 aa, Homo sapiens
  Table A; Target 11320; HLA-C*14:02; BPIFA2; ENSG00000131050; CTA
SFPVTANV

SEQ ID NO: 11321 - protein, 9 aa, Homo sapiens
  Table A; Target 11321; HLA-C*01:02; BPIFA2; ENSG00000131050; CTA
SFPVTANVT

SEQ ID NO: 11322 - protein, 9 aa, Homo sapiens
  Table A; Target 11322; HLA-C*14:02; BPIFA2; ENSG00000131050; CTA
SFPVTANVT

SEQ ID NO: 11323 - protein, 10 aa, Homo sapiens
  Table A; Target 11323; HLA-C*01:02; BPIFA2; ENSG00000131050; CTA
SFPVTANVTV

SEQ ID NO: 11324 - protein, 10 aa, Homo sapiens
  Table A; Target 11324; HLA-C*04:01; BPIFA2; ENSG00000131050; CTA
SFPVTANVTV

SEQ ID NO: 11325 - protein, 10 aa, Homo sapiens
  Table A; Target 11325; HLA-C*14:02; BPIFA2; ENSG00000131050; CTA
SFPVTANVTV

SEQ ID NO: 11326 - protein, 9 aa, Homo sapiens
  Table A; Target 11326; HLA-A*03:01; BPIFA2; ENSG00000131050; CTA
SISLSLLDK

SEQ ID NO: 11327 - protein, 9 aa, Homo sapiens
  Table A; Target 11327; HLA-A*03:02; BPIFA2; ENSG00000131050; CTA
SISLSLLDK

SEQ ID NO: 11328 - protein, 9 aa, Homo sapiens
  Table A; Target 11328; HLA-A*11:01; BPIFA2; ENSG00000131050; CTA
SISLSLLDK

SEQ ID NO: 11329 - protein, 8 aa, Homo sapiens
  Table A; Target 11329; HLA-A*02:01; BPIFA2; ENSG00000131050; CTA
SLDLLTAV

SEQ ID NO: 11330 - protein, 8 aa, Homo sapiens
  Table A; Target 11330; HLA-A*02:04; BPIFA2; ENSG00000131050; CTA
SLDLLTAV

SEQ ID NO: 11331 - protein, 8 aa, Homo sapiens
  Table A; Target 11331; HLA-A*02:07; BPIFA2; ENSG00000131050; CTA
SLDLLTAV

SEQ ID NO: 11332 - protein, 8 aa, Homo sapiens
  Table A; Target 11332; HLA-B*13:02; BPIFA2; ENSG00000131050; CTA
SLDLLTAV

SEQ ID NO: 11333 - protein, 8 aa, Homo sapiens
  Table A; Target 11333; HLA-B*55:01; BPIFA2; ENSG00000131050; CTA
SLDLLTAV

SEQ ID NO: 11334 - protein, 8 aa, Homo sapiens
  Table A; Target 11334; HLA-C*04:01; BPIFA2; ENSG00000131050; CTA
SLDLLTAV

SEQ ID NO: 11335 - protein, 8 aa, Homo sapiens
  Table A; Target 11335; HLA-C*05:01; BPIFA2; ENSG00000131050; CTA
SLDLLTAV

SEQ ID NO: 11336 - protein, 9 aa, Homo sapiens
  Table A; Target 11336; HLA-B*27:05; BPIFA2; ENSG00000131050; CTA
SLDLLTAVT

SEQ ID NO: 11337 - protein, 10 aa, Homo sapiens
  Table A; Target 11337; HLA-A*02:01; BPIFA2; ENSG00000131050; CTA
SLDLLTAVTI

SEQ ID NO: 11338 - protein, 10 aa, Homo sapiens
  Table A; Target 11338; HLA-A*02:03; BPIFA2; ENSG00000131050; CTA
SLDLLTAVTI

SEQ ID NO: 11339 - protein, 10 aa, Homo sapiens
  Table A; Target 11339; HLA-A*02:04; BPIFA2; ENSG00000131050; CTA
SLDLLTAVTI

SEQ ID NO: 11340 - protein, 10 aa, Homo sapiens
  Table A; Target 11340; HLA-A*02:07; BPIFA2; ENSG00000131050; CTA
SLDLLTAVTI

SEQ ID NO: 11341 - protein, 10 aa, Homo sapiens
  Table A; Target 11341; HLA-B*13:02; BPIFA2; ENSG00000131050; CTA
SLDLLTAVTI

SEQ ID NO: 11342 - protein, 10 aa, Homo sapiens
  Table A; Target 11342; HLA-B*38:01; BPIFA2; ENSG00000131050; CTA
SLDLLTAVTI

SEQ ID NO: 11343 - protein, 10 aa, Homo sapiens
  Table A; Target 11343; HLA-B*40:01; BPIFA2; ENSG00000131050; CTA
SLDLLTAVTI

SEQ ID NO: 11344 - protein, 10 aa, Homo sapiens
  Table A; Target 11344; HLA-B*49:01; BPIFA2; ENSG00000131050; CTA
SLDLLTAVTI

SEQ ID NO: 11345 - protein, 10 aa, Homo sapiens
  Table A; Target 11345; HLA-B*55:01; BPIFA2; ENSG00000131050; CTA
SLDLLTAVTI

SEQ ID NO: 11346 - protein, 10 aa, Homo sapiens
  Table A; Target 11346; HLA-C*04:01; BPIFA2; ENSG00000131050; CTA
SLDLLTAVTI

SEQ ID NO: 11347 - protein, 10 aa, Homo sapiens
  Table A; Target 11347; HLA-C*05:01; BPIFA2; ENSG00000131050; CTA
SLDLLTAVTI

SEQ ID NO: 11348 - protein, 10 aa, Homo sapiens
  Table A; Target 11348; HLA-C*07:04; BPIFA2; ENSG00000131050; CTA
SLDLLTAVTI

SEQ ID NO: 11349 - protein, 9 aa, Homo sapiens
  Table A; Target 11349; HLA-A*02:07; BPIFA2; ENSG00000131050; CTA
SLDVNVIQQ

SEQ ID NO: 11350 - protein, 9 aa, Homo sapiens
  Table A; Target 11350; HLA-C*04:01; BPIFA2; ENSG00000131050; CTA
SLDVNVIQQ

SEQ ID NO: 11351 - protein, 10 aa, Homo sapiens
  Table A; Target 11351; HLA-A*01:01; BPIFA2; ENSG00000131050; CTA
SLDVNVIQQV

SEQ ID NO: 11352 - protein, 10 aa, Homo sapiens
  Table A; Target 11352; HLA-A*02:01; BPIFA2; ENSG00000131050; CTA
SLDVNVIQQV

SEQ ID NO: 11353 - protein, 10 aa, Homo sapiens
  Table A; Target 11353; HLA-A*02:03; BPIFA2; ENSG00000131050; CTA
SLDVNVIQQV

SEQ ID NO: 11354 - protein, 10 aa, Homo sapiens
  Table A; Target 11354; HLA-A*02:04; BPIFA2; ENSG00000131050; CTA
SLDVNVIQQV

SEQ ID NO: 11355 - protein, 10 aa, Homo sapiens
  Table A; Target 11355; HLA-A*02:07; BPIFA2; ENSG00000131050; CTA
SLDVNVIQQV

SEQ ID NO: 11356 - protein, 10 aa, Homo sapiens
  Table A; Target 11356; HLA-A*68:02; BPIFA2; ENSG00000131050; CTA
SLDVNVIQQV

SEQ ID NO: 11357 - protein, 10 aa, Homo sapiens
  Table A; Target 11357; HLA-B*13:02; BPIFA2; ENSG00000131050; CTA
SLDVNVIQQV

SEQ ID NO: 11358 - protein, 10 aa, Homo sapiens
  Table A; Target 11358; HLA-B*38:01; BPIFA2; ENSG00000131050; CTA
SLDVNVIQQV

SEQ ID NO: 11359 - protein, 10 aa, Homo sapiens
  Table A; Target 11359; HLA-B*55:01; BPIFA2; ENSG00000131050; CTA
SLDVNVIQQV

SEQ ID NO: 11360 - protein, 10 aa, Homo sapiens
  Table A; Target 11360; HLA-C*04:01; BPIFA2; ENSG00000131050; CTA
SLDVNVIQQV

SEQ ID NO: 11361 - protein, 10 aa, Homo sapiens
  Table A; Target 11361; HLA-C*05:01; BPIFA2; ENSG00000131050; CTA
SLDVNVIQQV

SEQ ID NO: 11362 - protein, 11 aa, Homo sapiens
  Table A; Target 11362; HLA-A*02:01; BPIFA2; ENSG00000131050; CTA
SLDVNVIQQVV

SEQ ID NO: 11363 - protein, 11 aa, Homo sapiens
  Table A; Target 11363; HLA-A*02:07; BPIFA2; ENSG00000131050; CTA
SLDVNVIQQVV

SEQ ID NO: 11364 - protein, 11 aa, Homo sapiens
  Table A; Target 11364; HLA-A*02:01; BPIFA2; ENSG00000131050; CTA
SLILDVKAEPI

SEQ ID NO: 11365 - protein, 11 aa, Homo sapiens
  Table A; Target 11365; HLA-A*02:03; BPIFA2; ENSG00000131050; CTA
SLILDVKAEPI

SEQ ID NO: 11366 - protein, 11 aa, Homo sapiens
  Table A; Target 11366; HLA-C*06:02; BPIFA2; ENSG00000131050; CTA
SLILDVKAEPI

SEQ ID NO: 11367 - protein, 9 aa, Homo sapiens
  Table A; Target 11367; HLA-A*02:01; BPIFA2; ENSG00000131050; CTA
SLLDKHSQI

SEQ ID NO: 11368 - protein, 9 aa, Homo sapiens
  Table A; Target 11368; HLA-A*02:03; BPIFA2; ENSG00000131050; CTA
SLLDKHSQI

SEQ ID NO: 11369 - protein, 9 aa, Homo sapiens
  Table A; Target 11369; HLA-A*02:04; BPIFA2; ENSG00000131050; CTA
SLLDKHSQI

SEQ ID NO: 11370 - protein, 9 aa, Homo sapiens
  Table A; Target 11370; HLA-A*02:07; BPIFA2; ENSG00000131050; CTA
SLLDKHSQI

SEQ ID NO: 11371 - protein, 9 aa, Homo sapiens
  Table A; Target 11371; HLA-A*23:01; BPIFA2; ENSG00000131050; CTA
SLLDKHSQI

SEQ ID NO: 11372 - protein, 9 aa, Homo sapiens
  Table A; Target 11372; HLA-A*24:02; BPIFA2; ENSG00000131050; CTA
SLLDKHSQI

SEQ ID NO: 11373 - protein, 9 aa, Homo sapiens
  Table A; Target 11373; HLA-A*31:01; BPIFA2; ENSG00000131050; CTA
SLLDKHSQI

SEQ ID NO: 11374 - protein, 9 aa, Homo sapiens
  Table A; Target 11374; HLA-B*08:01; BPIFA2; ENSG00000131050; CTA
SLLDKHSQI

SEQ ID NO: 11375 - protein, 9 aa, Homo sapiens
  Table A; Target 11375; HLA-B*13:02; BPIFA2; ENSG00000131050; CTA
SLLDKHSQI

SEQ ID NO: 11376 - protein, 9 aa, Homo sapiens
  Table A; Target 11376; HLA-B*55:01; BPIFA2; ENSG00000131050; CTA
SLLDKHSQI

SEQ ID NO: 11377 - protein, 10 aa, Homo sapiens
  Table A; Target 11377; HLA-A*02:01; BPIFA2; ENSG00000131050; CTA
SLLDKHSQII

SEQ ID NO: 11378 - protein, 10 aa, Homo sapiens
  Table A; Target 11378; HLA-A*02:03; BPIFA2; ENSG00000131050; CTA
SLLDKHSQII

SEQ ID NO: 11379 - protein, 10 aa, Homo sapiens
  Table A; Target 11379; HLA-A*02:01; BPIFA2; ENSG00000131050; CTA
SLLDNLGNDL

SEQ ID NO: 11380 - protein, 10 aa, Homo sapiens
  Table A; Target 11380; HLA-A*02:03; BPIFA2; ENSG00000131050; CTA
SLLDNLGNDL

SEQ ID NO: 11381 - protein, 10 aa, Homo sapiens
  Table A; Target 11381; HLA-A*02:04; BPIFA2; ENSG00000131050; CTA
SLLDNLGNDL

SEQ ID NO: 11382 - protein, 10 aa, Homo sapiens
  Table A; Target 11382; HLA-C*01:02; BPIFA2; ENSG00000131050; CTA
SLLDNLGNDL

SEQ ID NO: 11383 - protein, 10 aa, Homo sapiens
  Table A; Target 11383; HLA-A*02:04; BPIFA2; ENSG00000131050; CTA
SLLQKEICPL

SEQ ID NO: 11384 - protein, 8 aa, Homo sapiens
  Table A; Target 11384; HLA-C*06:02; BPIFA2; ENSG00000131050; CTA
SNSLILDV

SEQ ID NO: 11385 - protein, 9 aa, Homo sapiens
  Table A; Target 11385; HLA-A*03:02; BPIFA2; ENSG00000131050; CTA
SNSLILDVK

SEQ ID NO: 11386 - protein, 9 aa, Homo sapiens
  Table A; Target 11386; HLA-A*11:01; BPIFA2; ENSG00000131050; CTA
SNSLILDVK

SEQ ID NO: 11387 - protein, 9 aa, Homo sapiens
  Table A; Target 11387; HLA-B*27:02; BPIFA2; ENSG00000131050; CTA
SNSLILDVK

SEQ ID NO: 11388 - protein, 9 aa, Homo sapiens
  Table A; Target 11388; HLA-B*27:05; BPIFA2; ENSG00000131050; CTA
SNSLILDVK

SEQ ID NO: 11389 - protein, 8 aa, Homo sapiens
  Table A; Target 11389; HLA-B*13:02; BPIFA2; ENSG00000131050; CTA
SQIINKFV

SEQ ID NO: 11390 - protein, 8 aa, Homo sapiens
  Table A; Target 11390; HLA-C*06:02; BPIFA2; ENSG00000131050; CTA
SQIINKFV

SEQ ID NO: 11391 - protein, 11 aa, Homo sapiens
  Table A; Target 11391; HLA-A*02:03; BPIFA2; ENSG00000131050; CTA
SQIINKFVNSV

SEQ ID NO: 11392 - protein, 8 aa, Homo sapiens
  Table A; Target 11392; HLA-A*11:01; BPIFA2; ENSG00000131050; CTA
SSAWQLAK

SEQ ID NO: 11393 - protein, 10 aa, Homo sapiens
  Table A; Target 11393; HLA-A*03:01; BPIFA2; ENSG00000131050; CTA
SSAWQLAKQK

SEQ ID NO: 11394 - protein, 10 aa, Homo sapiens
  Table A; Target 11394; HLA-A*03:02; BPIFA2; ENSG00000131050; CTA
SSAWQLAKQK

SEQ ID NO: 11395 - protein, 10 aa, Homo sapiens
  Table A; Target 11395; HLA-A*11:01; BPIFA2; ENSG00000131050; CTA
SSAWQLAKQK

SEQ ID NO: 11396 - protein, 10 aa, Homo sapiens
  Table A; Target 11396; HLA-C*06:02; BPIFA2; ENSG00000131050; CTA
SSAWQLAKQK

SEQ ID NO: 11397 - protein, 10 aa, Homo sapiens
  Table A; Target 11397; HLA-C*07:06; BPIFA2; ENSG00000131050; CTA
SSAWQLAKQK

SEQ ID NO: 11398 - protein, 8 aa, Homo sapiens
  Table A; Target 11398; HLA-B*58:01; BPIFA2; ENSG00000131050; CTA
SSLLQKEI

SEQ ID NO: 11399 - protein, 8 aa, Homo sapiens
  Table A; Target 11399; HLA-C*06:02; BPIFA2; ENSG00000131050; CTA
STVSSLLQ

SEQ ID NO: 11400 - protein, 8 aa, Homo sapiens
  Table A; Target 11400; HLA-C*07:01; BPIFA2; ENSG00000131050; CTA
STVSSLLQ

SEQ ID NO: 11401 - protein, 9 aa, Homo sapiens
  Table A; Target 11401; HLA-A*01:01; BPIFA2; ENSG00000131050; CTA
STVSSLLQK

SEQ ID NO: 11402 - protein, 9 aa, Homo sapiens
  Table A; Target 11402; HLA-A*03:01; BPIFA2; ENSG00000131050; CTA
STVSSLLQK

SEQ ID NO: 11403 - protein, 9 aa, Homo sapiens
  Table A; Target 11403; HLA-A*03:02; BPIFA2; ENSG00000131050; CTA
STVSSLLQK

SEQ ID NO: 11404 - protein, 9 aa, Homo sapiens
  Table A; Target 11404; HLA-A*11:01; BPIFA2; ENSG00000131050; CTA
STVSSLLQK

SEQ ID NO: 11405 - protein, 9 aa, Homo sapiens
  Table A; Target 11405; HLA-A*26:01; BPIFA2; ENSG00000131050; CTA
STVSSLLQK

SEQ ID NO: 11406 - protein, 9 aa, Homo sapiens
  Table A; Target 11406; HLA-A*31:01; BPIFA2; ENSG00000131050; CTA
STVSSLLQK

SEQ ID NO: 11407 - protein, 9 aa, Homo sapiens
  Table A; Target 11407; HLA-A*33:01; BPIFA2; ENSG00000131050; CTA
STVSSLLQK

SEQ ID NO: 11408 - protein, 9 aa, Homo sapiens
  Table A; Target 11408; HLA-A*33:03; BPIFA2; ENSG00000131050; CTA
STVSSLLQK

SEQ ID NO: 11409 - protein, 9 aa, Homo sapiens
  Table A; Target 11409; HLA-A*68:01; BPIFA2; ENSG00000131050; CTA
STVSSLLQK

SEQ ID NO: 11410 - protein, 9 aa, Homo sapiens
  Table A; Target 11410; HLA-A*68:02; BPIFA2; ENSG00000131050; CTA
STVSSLLQK

SEQ ID NO: 11411 - protein, 9 aa, Homo sapiens
  Table A; Target 11411; HLA-B*13:02; BPIFA2; ENSG00000131050; CTA
STVSSLLQK

SEQ ID NO: 11412 - protein, 9 aa, Homo sapiens
  Table A; Target 11412; HLA-B*27:02; BPIFA2; ENSG00000131050; CTA
STVSSLLQK

SEQ ID NO: 11413 - protein, 9 aa, Homo sapiens
  Table A; Target 11413; HLA-B*27:05; BPIFA2; ENSG00000131050; CTA
STVSSLLQK

SEQ ID NO: 11414 - protein, 9 aa, Homo sapiens
  Table A; Target 11414; HLA-B*57:01; BPIFA2; ENSG00000131050; CTA
STVSSLLQK

SEQ ID NO: 11415 - protein, 9 aa, Homo sapiens
  Table A; Target 11415; HLA-C*06:02; BPIFA2; ENSG00000131050; CTA
STVSSLLQK

SEQ ID NO: 11416 - protein, 9 aa, Homo sapiens
  Table A; Target 11416; HLA-C*07:06; BPIFA2; ENSG00000131050; CTA
STVSSLLQK

SEQ ID NO: 11417 - protein, 10 aa, Homo sapiens
  Table A; Target 11417; HLA-C*06:02; BPIFA2; ENSG00000131050; CTA
STVSSLLQKE

SEQ ID NO: 11418 - protein, 11 aa, Homo sapiens
  Table A; Target 11418; HLA-C*06:02; BPIFA2; ENSG00000131050; CTA
STVSSLLQKEI

SEQ ID NO: 11419 - protein, 9 aa, Homo sapiens
  Table A; Target 11419; HLA-C*16:02; BPIFA2; ENSG00000131050; CTA
SVINTLKST

SEQ ID NO: 11420 - protein, 10 aa, Homo sapiens
  Table A; Target 11420; HLA-A*02:03; BPIFA2; ENSG00000131050; CTA
SVINTLKSTV

SEQ ID NO: 11421 - protein, 10 aa, Homo sapiens
  Table A; Target 11421; HLA-A*02:07; BPIFA2; ENSG00000131050; CTA
SVINTLKSTV

SEQ ID NO: 11422 - protein, 10 aa, Homo sapiens
  Table A; Target 11422; HLA-A*03:01; BPIFA2; ENSG00000131050; CTA
SVINTLKSTV

SEQ ID NO: 11423 - protein, 10 aa, Homo sapiens
  Table A; Target 11423; HLA-A*11:01; BPIFA2; ENSG00000131050; CTA
SVINTLKSTV

SEQ ID NO: 11424 - protein, 10 aa, Homo sapiens
  Table A; Target 11424; HLA-A*25:01; BPIFA2; ENSG00000131050; CTA
SVINTLKSTV

SEQ ID NO: 11425 - protein, 10 aa, Homo sapiens
  Table A; Target 11425; HLA-A*26:01; BPIFA2; ENSG00000131050; CTA
SVINTLKSTV

SEQ ID NO: 11426 - protein, 10 aa, Homo sapiens
  Table A; Target 11426; HLA-A*31:01; BPIFA2; ENSG00000131050; CTA
SVINTLKSTV

SEQ ID NO: 11427 - protein, 10 aa, Homo sapiens
  Table A; Target 11427; HLA-A*32:01; BPIFA2; ENSG00000131050; CTA
SVINTLKSTV

SEQ ID NO: 11428 - protein, 10 aa, Homo sapiens
  Table A; Target 11428; HLA-A*68:01; BPIFA2; ENSG00000131050; CTA
SVINTLKSTV

SEQ ID NO: 11429 - protein, 10 aa, Homo sapiens
  Table A; Target 11429; HLA-A*68:02; BPIFA2; ENSG00000131050; CTA
SVINTLKSTV

SEQ ID NO: 11430 - protein, 10 aa, Homo sapiens
  Table A; Target 11430; HLA-B*07:02; BPIFA2; ENSG00000131050; CTA
SVINTLKSTV

SEQ ID NO: 11431 - protein, 10 aa, Homo sapiens
  Table A; Target 11431; HLA-B*13:02; BPIFA2; ENSG00000131050; CTA
SVINTLKSTV

SEQ ID NO: 11432 - protein, 10 aa, Homo sapiens
  Table A; Target 11432; HLA-B*40:02; BPIFA2; ENSG00000131050; CTA
SVINTLKSTV

SEQ ID NO: 11433 - protein, 10 aa, Homo sapiens
  Table A; Target 11433; HLA-B*51:01; BPIFA2; ENSG00000131050; CTA
SVINTLKSTV

SEQ ID NO: 11434 - protein, 10 aa, Homo sapiens
  Table A; Target 11434; HLA-B*55:01; BPIFA2; ENSG00000131050; CTA
SVINTLKSTV

SEQ ID NO: 11435 - protein, 10 aa, Homo sapiens
  Table A; Target 11435; HLA-B*56:01; BPIFA2; ENSG00000131050; CTA
SVINTLKSTV

SEQ ID NO: 11436 - protein, 10 aa, Homo sapiens
  Table A; Target 11436; HLA-C*01:02; BPIFA2; ENSG00000131050; CTA
SVINTLKSTV

SEQ ID NO: 11437 - protein, 10 aa, Homo sapiens
  Table A; Target 11437; HLA-C*02:02; BPIFA2; ENSG00000131050; CTA
SVINTLKSTV

SEQ ID NO: 11438 - protein, 10 aa, Homo sapiens
  Table A; Target 11438; HLA-C*06:02; BPIFA2; ENSG00000131050; CTA
SVINTLKSTV

SEQ ID NO: 11439 - protein, 10 aa, Homo sapiens
  Table A; Target 11439; HLA-C*07:02; BPIFA2; ENSG00000131050; CTA
SVINTLKSTV

SEQ ID NO: 11440 - protein, 10 aa, Homo sapiens
  Table A; Target 11440; HLA-C*07:06; BPIFA2; ENSG00000131050; CTA
SVINTLKSTV

SEQ ID NO: 11441 - protein, 10 aa, Homo sapiens
  Table A; Target 11441; HLA-C*12:03; BPIFA2; ENSG00000131050; CTA
SVINTLKSTV

SEQ ID NO: 11442 - protein, 10 aa, Homo sapiens
  Table A; Target 11442; HLA-C*16:02; BPIFA2; ENSG00000131050; CTA
SVINTLKSTV

SEQ ID NO: 11443 - protein, 10 aa, Homo sapiens
  Table A; Target 11443; HLA-C*16:04; BPIFA2; ENSG00000131050; CTA
SVINTLKSTV

SEQ ID NO: 11444 - protein, 10 aa, Homo sapiens
  Table A; Target 11444; HLA-B*27:02; BPIFA2; ENSG00000131050; CTA
TAVTIETDPQ

SEQ ID NO: 11445 - protein, 10 aa, Homo sapiens
  Table A; Target 11445; HLA-C*07:01; BPIFA2; ENSG00000131050; CTA
TAVTIETDPQ

SEQ ID NO: 11446 - protein, 11 aa, Homo sapiens
  Table A; Target 11446; HLA-C*04:01; BPIFA2; ENSG00000131050; CTA
TAVTIETDPQT

SEQ ID NO: 11447 - protein, 8 aa, Homo sapiens
  Table A; Target 11447; HLA-A*30:01; BPIFA2; ENSG00000131050; CTA
TDIFGLKI

SEQ ID NO: 11448 - protein, 8 aa, Homo sapiens
  Table A; Target 11448; HLA-B*40:02; BPIFA2; ENSG00000131050; CTA
TDIFGLKI

SEQ ID NO: 11449 - protein, 8 aa, Homo sapiens
  Table A; Target 11449; HLA-B*44:02; BPIFA2; ENSG00000131050; CTA
TDIFGLKI

SEQ ID NO: 11450 - protein, 8 aa, Homo sapiens
  Table A; Target 11450; HLA-B*44:03; BPIFA2; ENSG00000131050; CTA
TDIFGLKI

SEQ ID NO: 11451 - protein, 8 aa, Homo sapiens
  Table A; Target 11451; HLA-B*49:01; BPIFA2; ENSG00000131050; CTA
TDIFGLKI

SEQ ID NO: 11452 - protein, 8 aa, Homo sapiens
  Table A; Target 11452; HLA-B*51:01; BPIFA2; ENSG00000131050; CTA
TDIFGLKI

SEQ ID NO: 11453 - protein, 8 aa, Homo sapiens
  Table A; Target 11453; HLA-C*06:02; BPIFA2; ENSG00000131050; CTA
TDIFGLKI

SEQ ID NO: 11454 - protein, 8 aa, Homo sapiens
  Table A; Target 11454; HLA-C*07:01; BPIFA2; ENSG00000131050; CTA
TDIFGLKI

SEQ ID NO: 11455 - protein, 10 aa, Homo sapiens
  Table A; Target 11455; HLA-C*04:01; BPIFA2; ENSG00000131050; CTA
TDIFGLKISN

SEQ ID NO: 11456 - protein, 9 aa, Homo sapiens
  Table A; Target 11456; HLA-B*37:01; BPIFA2; ENSG00000131050; CTA
TDPQTHQPV

SEQ ID NO: 11457 - protein, 9 aa, Homo sapiens
  Table A; Target 11457; HLA-C*04:01; BPIFA2; ENSG00000131050; CTA
TDPQTHQPV

SEQ ID NO: 11458 - protein, 9 aa, Homo sapiens
  Table A; Target 11458; HLA-C*06:02; BPIFA2; ENSG00000131050; CTA
TDPQTHQPV

SEQ ID NO: 11459 - protein, 9 aa, Homo sapiens
  Table A; Target 11459; HLA-C*07:01; BPIFA2; ENSG00000131050; CTA
TDPQTHQPV

SEQ ID NO: 11460 - protein, 9 aa, Homo sapiens
  Table A; Target 11460; HLA-C*07:02; BPIFA2; ENSG00000131050; CTA
TDPQTHQPV

SEQ ID NO: 11461 - protein, 10 aa, Homo sapiens
  Table A; Target 11461; HLA-C*04:01; BPIFA2; ENSG00000131050; CTA
TDPQTHQPVA

SEQ ID NO: 11462 - protein, 10 aa, Homo sapiens
  Table A; Target 11462; HLA-C*06:02; BPIFA2; ENSG00000131050; CTA
TDPQTHQPVA

SEQ ID NO: 11463 - protein, 10 aa, Homo sapiens
  Table A; Target 11463; HLA-C*07:02; BPIFA2; ENSG00000131050; CTA
TDPQTHQPVA

SEQ ID NO: 11464 - protein, 11 aa, Homo sapiens
  Table A; Target 11464; HLA-C*04:01; BPIFA2; ENSG00000131050; CTA
TDPQTHQPVAV

SEQ ID NO: 11465 - protein, 10 aa, Homo sapiens
  Table A; Target 11465; HLA-C*07:01; BPIFA2; ENSG00000131050; CTA
TGTSESLLDN

SEQ ID NO: 11466 - protein, 11 aa, Homo sapiens
  Table A; Target 11466; HLA-B*27:05; BPIFA2; ENSG00000131050; CTA
TGTSESLLDNL

SEQ ID NO: 11467 - protein, 11 aa, Homo sapiens
  Table A; Target 11467; HLA-B*38:01; BPIFA2; ENSG00000131050; CTA
TGTSESLLDNL

SEQ ID NO: 11468 - protein, 11 aa, Homo sapiens
  Table A; Target 11468; HLA-B*39:01; BPIFA2; ENSG00000131050; CTA
TGTSESLLDNL

SEQ ID NO: 11469 - protein, 8 aa, Homo sapiens
  Table A; Target 11469; HLA-B*27:05; BPIFA2; ENSG00000131050; CTA
THQPVAVL

SEQ ID NO: 11470 - protein, 8 aa, Homo sapiens
  Table A; Target 11470; HLA-B*38:01; BPIFA2; ENSG00000131050; CTA
THQPVAVL

SEQ ID NO: 11471 - protein, 8 aa, Homo sapiens
  Table A; Target 11471; HLA-B*39:01; BPIFA2; ENSG00000131050; CTA
THQPVAVL

SEQ ID NO: 11472 - protein, 9 aa, Homo sapiens
  Table A; Target 11472; HLA-B*38:01; BPIFA2; ENSG00000131050; CTA
THQPVAVLG

SEQ ID NO: 11473 - protein, 9 aa, Homo sapiens
  Table A; Target 11473; HLA-B*39:01; BPIFA2; ENSG00000131050; CTA
THQPVAVLG

SEQ ID NO: 11474 - protein, 8 aa, Homo sapiens
  Table A; Target 11474; HLA-A*03:01; BPIFA2; ENSG00000131050; CTA
TLKGILEK

SEQ ID NO: 11475 - protein, 8 aa, Homo sapiens
  Table A; Target 11475; HLA-C*06:02; BPIFA2; ENSG00000131050; CTA
TLKGILEK

SEQ ID NO: 11476 - protein, 9 aa, Homo sapiens
  Table A; Target 11476; HLA-A*02:01; BPIFA2; ENSG00000131050; CTA
TLKGILEKL

SEQ ID NO: 11477 - protein, 9 aa, Homo sapiens
  Table A; Target 11477; HLA-A*02:03; BPIFA2; ENSG00000131050; CTA
TLKGILEKL

SEQ ID NO: 11478 - protein, 9 aa, Homo sapiens
  Table A; Target 11478; HLA-A*02:04; BPIFA2; ENSG00000131050; CTA
TLKGILEKL

SEQ ID NO: 11479 - protein, 9 aa, Homo sapiens
  Table A; Target 11479; HLA-A*02:07; BPIFA2; ENSG00000131050; CTA
TLKGILEKL

SEQ ID NO: 11480 - protein, 9 aa, Homo sapiens
  Table A; Target 11480; HLA-A*03:01; BPIFA2; ENSG00000131050; CTA
TLKGILEKL

SEQ ID NO: 11481 - protein, 9 aa, Homo sapiens
  Table A; Target 11481; HLA-A*31:01; BPIFA2; ENSG00000131050; CTA
TLKGILEKL

SEQ ID NO: 11482 - protein, 9 aa, Homo sapiens
  Table A; Target 11482; HLA-A*33:03; BPIFA2; ENSG00000131050; CTA
TLKGILEKL

SEQ ID NO: 11483 - protein, 9 aa, Homo sapiens
  Table A; Target 11483; HLA-A*68:02; BPIFA2; ENSG00000131050; CTA
TLKGILEKL

SEQ ID NO: 11484 - protein, 9 aa, Homo sapiens
  Table A; Target 11484; HLA-B*08:01; BPIFA2; ENSG00000131050; CTA
TLKGILEKL

SEQ ID NO: 11485 - protein, 9 aa, Homo sapiens
  Table A; Target 11485; HLA-B*27:05; BPIFA2; ENSG00000131050; CTA
TLKGILEKL

SEQ ID NO: 11486 - protein, 9 aa, Homo sapiens
  Table A; Target 11486; HLA-B*40:02; BPIFA2; ENSG00000131050; CTA
TLKGILEKL

SEQ ID NO: 11487 - protein, 9 aa, Homo sapiens
  Table A; Target 11487; HLA-B*46:01; BPIFA2; ENSG00000131050; CTA
TLKGILEKL

SEQ ID NO: 11488 - protein, 9 aa, Homo sapiens
  Table A; Target 11488; HLA-B*55:01; BPIFA2; ENSG00000131050; CTA
TLKGILEKL

SEQ ID NO: 11489 - protein, 9 aa, Homo sapiens
  Table A; Target 11489; HLA-C*01:02; BPIFA2; ENSG00000131050; CTA
TLKGILEKL

SEQ ID NO: 11490 - protein, 9 aa, Homo sapiens
  Table A; Target 11490; HLA-C*04:01; BPIFA2; ENSG00000131050; CTA
TLKGILEKL

SEQ ID NO: 11491 - protein, 9 aa, Homo sapiens
  Table A; Target 11491; HLA-C*06:02; BPIFA2; ENSG00000131050; CTA
TLKGILEKL

SEQ ID NO: 11492 - protein, 9 aa, Homo sapiens
  Table A; Target 11492; HLA-C*07:02; BPIFA2; ENSG00000131050; CTA
TLKGILEKL

SEQ ID NO: 11493 - protein, 9 aa, Homo sapiens
  Table A; Target 11493; HLA-A*02:03; BPIFA2; ENSG00000131050; CTA
TLKSTVSSL

SEQ ID NO: 11494 - protein, 9 aa, Homo sapiens
  Table A; Target 11494; HLA-A*02:04; BPIFA2; ENSG00000131050; CTA
TLKSTVSSL

SEQ ID NO: 11495 - protein, 9 aa, Homo sapiens
  Table A; Target 11495; HLA-A*03:01; BPIFA2; ENSG00000131050; CTA
TLKSTVSSL

SEQ ID NO: 11496 - protein, 9 aa, Homo sapiens
  Table A; Target 11496; HLA-A*25:01; BPIFA2; ENSG00000131050; CTA
TLKSTVSSL

SEQ ID NO: 11497 - protein, 9 aa, Homo sapiens
  Table A; Target 11497; HLA-A*26:01; BPIFA2; ENSG00000131050; CTA
TLKSTVSSL

SEQ ID NO: 11498 - protein, 9 aa, Homo sapiens
  Table A; Target 11498; HLA-A*30:01; BPIFA2; ENSG00000131050; CTA
TLKSTVSSL

SEQ ID NO: 11499 - protein, 9 aa, Homo sapiens
  Table A; Target 11499; HLA-A*31:01; BPIFA2; ENSG00000131050; CTA
TLKSTVSSL

SEQ ID NO: 11500 - protein, 9 aa, Homo sapiens
  Table A; Target 11500; HLA-A*32:01; BPIFA2; ENSG00000131050; CTA
TLKSTVSSL

SEQ ID NO: 11501 - protein, 9 aa, Homo sapiens
  Table A; Target 11501; HLA-B*07:02; BPIFA2; ENSG00000131050; CTA
TLKSTVSSL

SEQ ID NO: 11502 - protein, 9 aa, Homo sapiens
  Table A; Target 11502; HLA-B*08:01; BPIFA2; ENSG00000131050; CTA
TLKSTVSSL

SEQ ID NO: 11503 - protein, 9 aa, Homo sapiens
  Table A; Target 11503; HLA-B*15:01; BPIFA2; ENSG00000131050; CTA
TLKSTVSSL

SEQ ID NO: 11504 - protein, 9 aa, Homo sapiens
  Table A; Target 11504; HLA-B*15:03; BPIFA2; ENSG00000131050; CTA
TLKSTVSSL

SEQ ID NO: 11505 - protein, 9 aa, Homo sapiens
  Table A; Target 11505; HLA-B*37:01; BPIFA2; ENSG00000131050; CTA
TLKSTVSSL

SEQ ID NO: 11506 - protein, 9 aa, Homo sapiens
  Table A; Target 11506; HLA-B*40:02; BPIFA2; ENSG00000131050; CTA
TLKSTVSSL

SEQ ID NO: 11507 - protein, 9 aa, Homo sapiens
  Table A; Target 11507; HLA-B*46:01; BPIFA2; ENSG00000131050; CTA
TLKSTVSSL

SEQ ID NO: 11508 - protein, 9 aa, Homo sapiens
  Table A; Target 11508; HLA-B*55:01; BPIFA2; ENSG00000131050; CTA
TLKSTVSSL

SEQ ID NO: 11509 - protein, 9 aa, Homo sapiens
  Table A; Target 11509; HLA-C*01:02; BPIFA2; ENSG00000131050; CTA
TLKSTVSSL

SEQ ID NO: 11510 - protein, 9 aa, Homo sapiens
  Table A; Target 11510; HLA-C*02:02; BPIFA2; ENSG00000131050; CTA
TLKSTVSSL

SEQ ID NO: 11511 - protein, 9 aa, Homo sapiens
  Table A; Target 11511; HLA-C*06:02; BPIFA2; ENSG00000131050; CTA
TLKSTVSSL

SEQ ID NO: 11512 - protein, 9 aa, Homo sapiens
  Table A; Target 11512; HLA-C*07:02; BPIFA2; ENSG00000131050; CTA
TLKSTVSSL

SEQ ID NO: 11513 - protein, 9 aa, Homo sapiens
  Table A; Target 11513; HLA-C*07:04; BPIFA2; ENSG00000131050; CTA
TLKSTVSSL

SEQ ID NO: 11514 - protein, 9 aa, Homo sapiens
  Table A; Target 11514; HLA-C*12:03; BPIFA2; ENSG00000131050; CTA
TLKSTVSSL

SEQ ID NO: 11515 - protein, 9 aa, Homo sapiens
  Table A; Target 11515; HLA-C*14:02; BPIFA2; ENSG00000131050; CTA
TLKSTVSSL

SEQ ID NO: 11516 - protein, 9 aa, Homo sapiens
  Table A; Target 11516; HLA-C*16:02; BPIFA2; ENSG00000131050; CTA
TLKSTVSSL

SEQ ID NO: 11517 - protein, 10 aa, Homo sapiens
  Table A; Target 11517; HLA-A*02:03; BPIFA2; ENSG00000131050; CTA
TLKSTVSSLL

SEQ ID NO: 11518 - protein, 10 aa, Homo sapiens
  Table A; Target 11518; HLA-A*03:01; BPIFA2; ENSG00000131050; CTA
TLKSTVSSLL

SEQ ID NO: 11519 - protein, 10 aa, Homo sapiens
  Table A; Target 11519; HLA-A*31:01; BPIFA2; ENSG00000131050; CTA
TLKSTVSSLL

SEQ ID NO: 11520 - protein, 10 aa, Homo sapiens
  Table A; Target 11520; HLA-B*07:02; BPIFA2; ENSG00000131050; CTA
TLKSTVSSLL

SEQ ID NO: 11521 - protein, 10 aa, Homo sapiens
  Table A; Target 11521; HLA-C*06:02; BPIFA2; ENSG00000131050; CTA
TLKSTVSSLL

SEQ ID NO: 11522 - protein, 10 aa, Homo sapiens
  Table A; Target 11522; HLA-C*07:01; BPIFA2; ENSG00000131050; CTA
TLKSTVSSLL

SEQ ID NO: 11523 - protein, 10 aa, Homo sapiens
  Table A; Target 11523; HLA-C*07:02; BPIFA2; ENSG00000131050; CTA
TLKSTVSSLL

SEQ ID NO: 11524 - protein, 10 aa, Homo sapiens
  Table A; Target 11524; HLA-C*07:04; BPIFA2; ENSG00000131050; CTA
TLKSTVSSLL

SEQ ID NO: 11525 - protein, 11 aa, Homo sapiens
  Table A; Target 11525; HLA-C*04:01; BPIFA2; ENSG00000131050; CTA
TLKSTVSSLLQ

SEQ ID NO: 11526 - protein, 11 aa, Homo sapiens
  Table A; Target 11526; HLA-C*06:02; BPIFA2; ENSG00000131050; CTA
TLKSTVSSLLQ

SEQ ID NO: 11527 - protein, 11 aa, Homo sapiens
  Table A; Target 11527; HLA-C*07:01; BPIFA2; ENSG00000131050; CTA
TLKSTVSSLLQ

SEQ ID NO: 11528 - protein, 9 aa, Homo sapiens
  Table A; Target 11528; HLA-A*11:01; BPIFA2; ENSG00000131050; CTA
TNTDIFGLK

SEQ ID NO: 11529 - protein, 9 aa, Homo sapiens
  Table A; Target 11529; HLA-A*29:02; BPIFA2; ENSG00000131050; CTA
TNTDIFGLK

SEQ ID NO: 11530 - protein, 9 aa, Homo sapiens
  Table A; Target 11530; HLA-A*33:01; BPIFA2; ENSG00000131050; CTA
TNTDIFGLK

SEQ ID NO: 11531 - protein, 9 aa, Homo sapiens
  Table A; Target 11531; HLA-A*33:03; BPIFA2; ENSG00000131050; CTA
TNTDIFGLK

SEQ ID NO: 11532 - protein, 9 aa, Homo sapiens
  Table A; Target 11532; HLA-A*68:01; BPIFA2; ENSG00000131050; CTA
TNTDIFGLK

SEQ ID NO: 11533 - protein, 9 aa, Homo sapiens
  Table A; Target 11533; HLA-A*68:02; BPIFA2; ENSG00000131050; CTA
TNTDIFGLK

SEQ ID NO: 11534 - protein, 9 aa, Homo sapiens
  Table A; Target 11534; HLA-B*27:02; BPIFA2; ENSG00000131050; CTA
TNTDIFGLK

SEQ ID NO: 11535 - protein, 9 aa, Homo sapiens
  Table A; Target 11535; HLA-B*27:05; BPIFA2; ENSG00000131050; CTA
TNTDIFGLK

SEQ ID NO: 11536 - protein, 9 aa, Homo sapiens
  Table A; Target 11536; HLA-C*07:06; BPIFA2; ENSG00000131050; CTA
TNTDIFGLK

SEQ ID NO: 11537 - protein, 10 aa, Homo sapiens
  Table A; Target 11537; HLA-A*68:02; BPIFA2; ENSG00000131050; CTA
TNTDIFGLKI

SEQ ID NO: 11538 - protein, 9 aa, Homo sapiens
  Table A; Target 11538; HLA-B*27:05; BPIFA2; ENSG00000131050; CTA
TSESLLDNL

SEQ ID NO: 11539 - protein, 9 aa, Homo sapiens
  Table A; Target 11539; HLA-B*39:01; BPIFA2; ENSG00000131050; CTA
TSESLLDNL

SEQ ID NO: 11540 - protein, 9 aa, Homo sapiens
  Table A; Target 11540; HLA-C*05:01; BPIFA2; ENSG00000131050; CTA
TSESLLDNL

SEQ ID NO: 11541 - protein, 11 aa, Homo sapiens
  Table A; Target 11541; HLA-C*07:01; BPIFA2; ENSG00000131050; CTA
TSESLLDNLGN

SEQ ID NO: 11542 - protein, 10 aa, Homo sapiens
  Table A; Target 11542; HLA-A*11:01; BPIFA2; ENSG00000131050; CTA
TSISLSLLDK

SEQ ID NO: 11543 - protein, 10 aa, Homo sapiens
  Table A; Target 11543; HLA-A*68:01; BPIFA2; ENSG00000131050; CTA
TSISLSLLDK

SEQ ID NO: 11544 - protein, 10 aa, Homo sapiens
  Table A; Target 11544; HLA-B*27:02; BPIFA2; ENSG00000131050; CTA
TSISLSLLDK

SEQ ID NO: 11545 - protein, 9 aa, Homo sapiens
  Table A; Target 11545; HLA-A*03:01; BPIFA2; ENSG00000131050; CTA
TVAGPIIGQ

SEQ ID NO: 11546 - protein, 9 aa, Homo sapiens
  Table A; Target 11546; HLA-A*03:02; BPIFA2; ENSG00000131050; CTA
TVAGPIIGQ

SEQ ID NO: 11547 - protein, 9 aa, Homo sapiens
  Table A; Target 11547; HLA-A*11:01; BPIFA2; ENSG00000131050; CTA
TVAGPIIGQ

SEQ ID NO: 11548 - protein, 9 aa, Homo sapiens
  Table A; Target 11548; HLA-A*26:01; BPIFA2; ENSG00000131050; CTA
TVAGPIIGQ

SEQ ID NO: 11549 - protein, 9 aa, Homo sapiens
  Table A; Target 11549; HLA-A*31:01; BPIFA2; ENSG00000131050; CTA
TVAGPIIGQ

SEQ ID NO: 11550 - protein, 9 aa, Homo sapiens
  Table A; Target 11550; HLA-A*33:01; BPIFA2; ENSG00000131050; CTA
TVAGPIIGQ

SEQ ID NO: 11551 - protein, 9 aa, Homo sapiens
  Table A; Target 11551; HLA-A*33:03; BPIFA2; ENSG00000131050; CTA
TVAGPIIGQ

SEQ ID NO: 11552 - protein, 9 aa, Homo sapiens
  Table A; Target 11552; HLA-A*68:01; BPIFA2; ENSG00000131050; CTA
TVAGPIIGQ

SEQ ID NO: 11553 - protein, 9 aa, Homo sapiens
  Table A; Target 11553; HLA-A*68:02; BPIFA2; ENSG00000131050; CTA
TVAGPIIGQ

SEQ ID NO: 11554 - protein, 9 aa, Homo sapiens
  Table A; Target 11554; HLA-B*27:05; BPIFA2; ENSG00000131050; CTA
TVAGPIIGQ

SEQ ID NO: 11555 - protein, 9 aa, Homo sapiens
  Table A; Target 11555; HLA-C*04:01; BPIFA2; ENSG00000131050; CTA
TVAGPIIGQ

SEQ ID NO: 11556 - protein, 9 aa, Homo sapiens
  Table A; Target 11556; HLA-C*06:02; BPIFA2; ENSG00000131050; CTA
TVAGPIIGQ

SEQ ID NO: 11557 - protein, 9 aa, Homo sapiens
  Table A; Target 11557; HLA-C*07:01; BPIFA2; ENSG00000131050; CTA
TVAGPIIGQ

SEQ ID NO: 11558 - protein, 9 aa, Homo sapiens
  Table A; Target 11558; HLA-C*07:04; BPIFA2; ENSG00000131050; CTA
TVAGPIIGQ

SEQ ID NO: 11559 - protein, 9 aa, Homo sapiens
  Table A; Target 11559; HLA-C*07:06; BPIFA2; ENSG00000131050; CTA
TVAGPIIGQ

SEQ ID NO: 11560 - protein, 9 aa, Homo sapiens
  Table A; Target 11560; HLA-C*12:03; BPIFA2; ENSG00000131050; CTA
TVAGPIIGQ

SEQ ID NO: 11561 - protein, 10 aa, Homo sapiens
  Table A; Target 11561; HLA-A*02:03; BPIFA2; ENSG00000131050; CTA
TVAGPIIGQI

SEQ ID NO: 11562 - protein, 10 aa, Homo sapiens
  Table A; Target 11562; HLA-A*25:01; BPIFA2; ENSG00000131050; CTA
TVAGPIIGQI

SEQ ID NO: 11563 - protein, 10 aa, Homo sapiens
  Table A; Target 11563; HLA-A*26:01; BPIFA2; ENSG00000131050; CTA
TVAGPIIGQI

SEQ ID NO: 11564 - protein, 10 aa, Homo sapiens
  Table A; Target 11564; HLA-A*30:01; BPIFA2; ENSG00000131050; CTA
TVAGPIIGQI

SEQ ID NO: 11565 - protein, 10 aa, Homo sapiens
  Table A; Target 11565; HLA-A*33:03; BPIFA2; ENSG00000131050; CTA
TVAGPIIGQI

SEQ ID NO: 11566 - protein, 10 aa, Homo sapiens
  Table A; Target 11566; HLA-A*68:01; BPIFA2; ENSG00000131050; CTA
TVAGPIIGQI

SEQ ID NO: 11567 - protein, 10 aa, Homo sapiens
  Table A; Target 11567; HLA-A*68:02; BPIFA2; ENSG00000131050; CTA
TVAGPIIGQI

SEQ ID NO: 11568 - protein, 10 aa, Homo sapiens
  Table A; Target 11568; HLA-B*13:02; BPIFA2; ENSG00000131050; CTA
TVAGPIIGQI

SEQ ID NO: 11569 - protein, 10 aa, Homo sapiens
  Table A; Target 11569; HLA-B*27:05; BPIFA2; ENSG00000131050; CTA
TVAGPIIGQI

SEQ ID NO: 11570 - protein, 10 aa, Homo sapiens
  Table A; Target 11570; HLA-B*38:01; BPIFA2; ENSG00000131050; CTA
TVAGPIIGQI

SEQ ID NO: 11571 - protein, 10 aa, Homo sapiens
  Table A; Target 11571; HLA-C*06:02; BPIFA2; ENSG00000131050; CTA
TVAGPIIGQI

SEQ ID NO: 11572 - protein, 10 aa, Homo sapiens
  Table A; Target 11572; HLA-C*07:06; BPIFA2; ENSG00000131050; CTA
TVAGPIIGQI

SEQ ID NO: 11573 - protein, 10 aa, Homo sapiens
  Table A; Target 11573; HLA-C*12:03; BPIFA2; ENSG00000131050; CTA
TVAGPIIGQI

SEQ ID NO: 11574 - protein, 11 aa, Homo sapiens
  Table A; Target 11574; HLA-A*02:07; BPIFA2; ENSG00000131050; CTA
TVAGPIIGQII

SEQ ID NO: 11575 - protein, 11 aa, Homo sapiens
  Table A; Target 11575; HLA-A*30:01; BPIFA2; ENSG00000131050; CTA
TVAGPIIGQII

SEQ ID NO: 11576 - protein, 11 aa, Homo sapiens
  Table A; Target 11576; HLA-A*68:01; BPIFA2; ENSG00000131050; CTA
TVAGPIIGQII

SEQ ID NO: 11577 - protein, 11 aa, Homo sapiens
  Table A; Target 11577; HLA-A*68:02; BPIFA2; ENSG00000131050; CTA
TVAGPIIGQII

SEQ ID NO: 11578 - protein, 11 aa, Homo sapiens
  Table A; Target 11578; HLA-B*13:02; BPIFA2; ENSG00000131050; CTA
TVAGPIIGQII

SEQ ID NO: 11579 - protein, 11 aa, Homo sapiens
  Table A; Target 11579; HLA-B*27:05; BPIFA2; ENSG00000131050; CTA
TVAGPIIGQII

SEQ ID NO: 11580 - protein, 11 aa, Homo sapiens
  Table A; Target 11580; HLA-B*35:03; BPIFA2; ENSG00000131050; CTA
TVAGPIIGQII

SEQ ID NO: 11581 - protein, 11 aa, Homo sapiens
  Table A; Target 11581; HLA-B*38:01; BPIFA2; ENSG00000131050; CTA
TVAGPIIGQII

SEQ ID NO: 11582 - protein, 11 aa, Homo sapiens
  Table A; Target 11582; HLA-C*04:01; BPIFA2; ENSG00000131050; CTA
TVAGPIIGQII

SEQ ID NO: 11583 - protein, 11 aa, Homo sapiens
  Table A; Target 11583; HLA-C*06:02; BPIFA2; ENSG00000131050; CTA
TVAGPIIGQII

SEQ ID NO: 11584 - protein, 11 aa, Homo sapiens
  Table A; Target 11584; HLA-C*07:06; BPIFA2; ENSG00000131050; CTA
TVAGPIIGQII

SEQ ID NO: 11585 - protein, 11 aa, Homo sapiens
  Table A; Target 11585; HLA-C*16:04; BPIFA2; ENSG00000131050; CTA
TVAGPIIGQII

SEQ ID NO: 11586 - protein, 9 aa, Homo sapiens
  Table A; Target 11586; HLA-A*02:07; BPIFA2; ENSG00000131050; CTA
TVDNTLKGI

SEQ ID NO: 11587 - protein, 9 aa, Homo sapiens
  Table A; Target 11587; HLA-B*38:01; BPIFA2; ENSG00000131050; CTA
TVDNTLKGI

SEQ ID NO: 11588 - protein, 9 aa, Homo sapiens
  Table A; Target 11588; HLA-C*04:01; BPIFA2; ENSG00000131050; CTA
TVDNTLKGI

SEQ ID NO: 11589 - protein, 9 aa, Homo sapiens
  Table A; Target 11589; HLA-C*05:01; BPIFA2; ENSG00000131050; CTA
TVDNTLKGI

SEQ ID NO: 11590 - protein, 10 aa, Homo sapiens
  Table A; Target 11590; HLA-A*02:07; BPIFA2; ENSG00000131050; CTA
TVDNTLKGIL

SEQ ID NO: 11591 - protein, 10 aa, Homo sapiens
  Table A; Target 11591; HLA-B*07:02; BPIFA2; ENSG00000131050; CTA
TVDNTLKGIL

SEQ ID NO: 11592 - protein, 10 aa, Homo sapiens
  Table A; Target 11592; HLA-B*35:03; BPIFA2; ENSG00000131050; CTA
TVDNTLKGIL

SEQ ID NO: 11593 - protein, 10 aa, Homo sapiens
  Table A; Target 11593; HLA-B*38:01; BPIFA2; ENSG00000131050; CTA
TVDNTLKGIL

SEQ ID NO: 11594 - protein, 10 aa, Homo sapiens
  Table A; Target 11594; HLA-C*04:01; BPIFA2; ENSG00000131050; CTA
TVDNTLKGIL

SEQ ID NO: 11595 - protein, 10 aa, Homo sapiens
  Table A; Target 11595; HLA-C*05:01; BPIFA2; ENSG00000131050; CTA
TVDNTLKGIL

SEQ ID NO: 11596 - protein, 10 aa, Homo sapiens
  Table A; Target 11596; HLA-C*07:01; BPIFA2; ENSG00000131050; CTA
TVDNTLKGIL

SEQ ID NO: 11597 - protein, 10 aa, Homo sapiens
  Table A; Target 11597; HLA-C*07:02; BPIFA2; ENSG00000131050; CTA
TVDNTLKGIL

SEQ ID NO: 11598 - protein, 8 aa, Homo sapiens
  Table A; Target 11598; HLA-A*03:01; BPIFA2; ENSG00000131050; CTA
TVSSLLQK

SEQ ID NO: 11599 - protein, 8 aa, Homo sapiens
  Table A; Target 11599; HLA-A*03:02; BPIFA2; ENSG00000131050; CTA
TVSSLLQK

SEQ ID NO: 11600 - protein, 8 aa, Homo sapiens
  Table A; Target 11600; HLA-A*11:01; BPIFA2; ENSG00000131050; CTA
TVSSLLQK

SEQ ID NO: 11601 - protein, 8 aa, Homo sapiens
  Table A; Target 11601; HLA-A*33:03; BPIFA2; ENSG00000131050; CTA
TVSSLLQK

SEQ ID NO: 11602 - protein, 8 aa, Homo sapiens
  Table A; Target 11602; HLA-A*68:01; BPIFA2; ENSG00000131050; CTA
TVSSLLQK

SEQ ID NO: 11603 - protein, 8 aa, Homo sapiens
  Table A; Target 11603; HLA-B*27:02; BPIFA2; ENSG00000131050; CTA
TVSSLLQK

SEQ ID NO: 11604 - protein, 8 aa, Homo sapiens
  Table A; Target 11604; HLA-B*27:05; BPIFA2; ENSG00000131050; CTA
TVSSLLQK

SEQ ID NO: 11605 - protein, 8 aa, Homo sapiens
  Table A; Target 11605; HLA-C*06:02; BPIFA2; ENSG00000131050; CTA
TVSSLLQK

SEQ ID NO: 11606 - protein, 9 aa, Homo sapiens
  Table A; Target 11606; HLA-C*06:02; BPIFA2; ENSG00000131050; CTA
TVSSLLQKE

SEQ ID NO: 11607 - protein, 10 aa, Homo sapiens
  Table A; Target 11607; HLA-A*68:02; BPIFA2; ENSG00000131050; CTA
TVSSLLQKEI

SEQ ID NO: 11608 - protein, 10 aa, Homo sapiens
  Table A; Target 11608; HLA-B*13:02; BPIFA2; ENSG00000131050; CTA
TVSSLLQKEI

SEQ ID NO: 11609 - protein, 10 aa, Homo sapiens
  Table A; Target 11609; HLA-C*06:02; BPIFA2; ENSG00000131050; CTA
TVSSLLQKEI

SEQ ID NO: 11610 - protein, 10 aa, Homo sapiens
  Table A; Target 11610; HLA-C*07:01; BPIFA2; ENSG00000131050; CTA
TVSSLLQKEI

SEQ ID NO: 11611 - protein, 10 aa, Homo sapiens
  Table A; Target 11611; HLA-C*16:02; BPIFA2; ENSG00000131050; CTA
TVSSLLQKEI

SEQ ID NO: 11612 - protein, 8 aa, Homo sapiens
  Table A; Target 11612; HLA-A*11:01; BPIFA2; ENSG00000131050; CTA
VAGPIIGQ

SEQ ID NO: 11613 - protein, 8 aa, Homo sapiens
  Table A; Target 11613; HLA-C*06:02; BPIFA2; ENSG00000131050; CTA
VAGPIIGQ

SEQ ID NO: 11614 - protein, 8 aa, Homo sapiens
  Table A; Target 11614; HLA-C*07:01; BPIFA2; ENSG00000131050; CTA
VAGPIIGQ

SEQ ID NO: 11615 - protein, 8 aa, Homo sapiens
  Table A; Target 11615; HLA-C*12:03; BPIFA2; ENSG00000131050; CTA
VAGPIIGQ

SEQ ID NO: 11616 - protein, 9 aa, Homo sapiens
  Table A; Target 11616; HLA-A*02:03; BPIFA2; ENSG00000131050; CTA
VAGPIIGQI

SEQ ID NO: 11617 - protein, 9 aa, Homo sapiens
  Table A; Target 11617; HLA-A*02:04; BPIFA2; ENSG00000131050; CTA
VAGPIIGQI

SEQ ID NO: 11618 - protein, 9 aa, Homo sapiens
  Table A; Target 11618; HLA-A*02:07; BPIFA2; ENSG00000131050; CTA
VAGPIIGQI

SEQ ID NO: 11619 - protein, 9 aa, Homo sapiens
  Table A; Target 11619; HLA-A*23:01; BPIFA2; ENSG00000131050; CTA
VAGPIIGQI

SEQ ID NO: 11620 - protein, 9 aa, Homo sapiens
  Table A; Target 11620; HLA-A*24:02; BPIFA2; ENSG00000131050; CTA
VAGPIIGQI

SEQ ID NO: 11621 - protein, 9 aa, Homo sapiens
  Table A; Target 11621; HLA-A*25:01; BPIFA2; ENSG00000131050; CTA
VAGPIIGQI

SEQ ID NO: 11622 - protein, 9 aa, Homo sapiens
  Table A; Target 11622; HLA-A*26:01; BPIFA2; ENSG00000131050; CTA
VAGPIIGQI

SEQ ID NO: 11623 - protein, 9 aa, Homo sapiens
  Table A; Target 11623; HLA-A*30:01; BPIFA2; ENSG00000131050; CTA
VAGPIIGQI

SEQ ID NO: 11624 - protein, 9 aa, Homo sapiens
  Table A; Target 11624; HLA-A*31:01; BPIFA2; ENSG00000131050; CTA
VAGPIIGQI

SEQ ID NO: 11625 - protein, 9 aa, Homo sapiens
  Table A; Target 11625; HLA-A*32:01; BPIFA2; ENSG00000131050; CTA
VAGPIIGQI

SEQ ID NO: 11626 - protein, 9 aa, Homo sapiens
  Table A; Target 11626; HLA-A*33:03; BPIFA2; ENSG00000131050; CTA
VAGPIIGQI

SEQ ID NO: 11627 - protein, 9 aa, Homo sapiens
  Table A; Target 11627; HLA-A*68:01; BPIFA2; ENSG00000131050; CTA
VAGPIIGQI

SEQ ID NO: 11628 - protein, 9 aa, Homo sapiens
  Table A; Target 11628; HLA-A*68:02; BPIFA2; ENSG00000131050; CTA
VAGPIIGQI

SEQ ID NO: 11629 - protein, 9 aa, Homo sapiens
  Table A; Target 11629; HLA-B*07:02; BPIFA2; ENSG00000131050; CTA
VAGPIIGQI

SEQ ID NO: 11630 - protein, 9 aa, Homo sapiens
  Table A; Target 11630; HLA-B*13:02; BPIFA2; ENSG00000131050; CTA
VAGPIIGQI

SEQ ID NO: 11631 - protein, 9 aa, Homo sapiens
  Table A; Target 11631; HLA-B*15:03; BPIFA2; ENSG00000131050; CTA
VAGPIIGQI

SEQ ID NO: 11632 - protein, 9 aa, Homo sapiens
  Table A; Target 11632; HLA-B*27:02; BPIFA2; ENSG00000131050; CTA
VAGPIIGQI

SEQ ID NO: 11633 - protein, 9 aa, Homo sapiens
  Table A; Target 11633; HLA-B*27:05; BPIFA2; ENSG00000131050; CTA
VAGPIIGQI

SEQ ID NO: 11634 - protein, 9 aa, Homo sapiens
  Table A; Target 11634; HLA-B*35:03; BPIFA2; ENSG00000131050; CTA
VAGPIIGQI

SEQ ID NO: 11635 - protein, 9 aa, Homo sapiens
  Table A; Target 11635; HLA-B*38:01; BPIFA2; ENSG00000131050; CTA
VAGPIIGQI

SEQ ID NO: 11636 - protein, 9 aa, Homo sapiens
  Table A; Target 11636; HLA-B*39:01; BPIFA2; ENSG00000131050; CTA
VAGPIIGQI

SEQ ID NO: 11637 - protein, 9 aa, Homo sapiens
  Table A; Target 11637; HLA-B*40:01; BPIFA2; ENSG00000131050; CTA
VAGPIIGQI

SEQ ID NO: 11638 - protein, 9 aa, Homo sapiens
  Table A; Target 11638; HLA-B*40:02; BPIFA2; ENSG00000131050; CTA
VAGPIIGQI

SEQ ID NO: 11639 - protein, 9 aa, Homo sapiens
  Table A; Target 11639; HLA-B*44:03; BPIFA2; ENSG00000131050; CTA
VAGPIIGQI

SEQ ID NO: 11640 - protein, 9 aa, Homo sapiens
  Table A; Target 11640; HLA-B*46:01; BPIFA2; ENSG00000131050; CTA
VAGPIIGQI

SEQ ID NO: 11641 - protein, 9 aa, Homo sapiens
  Table A; Target 11641; HLA-B*49:01; BPIFA2; ENSG00000131050; CTA
VAGPIIGQI

SEQ ID NO: 11642 - protein, 9 aa, Homo sapiens
  Table A; Target 11642; HLA-B*51:01; BPIFA2; ENSG00000131050; CTA
VAGPIIGQI

SEQ ID NO: 11643 - protein, 9 aa, Homo sapiens
  Table A; Target 11643; HLA-B*57:01; BPIFA2; ENSG00000131050; CTA
VAGPIIGQI

SEQ ID NO: 11644 - protein, 9 aa, Homo sapiens
  Table A; Target 11644; HLA-B*58:01; BPIFA2; ENSG00000131050; CTA
VAGPIIGQI

SEQ ID NO: 11645 - protein, 9 aa, Homo sapiens
  Table A; Target 11645; HLA-C*02:02; BPIFA2; ENSG00000131050; CTA
VAGPIIGQI

SEQ ID NO: 11646 - protein, 9 aa, Homo sapiens
  Table A; Target 11646; HLA-C*03:03; BPIFA2; ENSG00000131050; CTA
VAGPIIGQI

SEQ ID NO: 11647 - protein, 9 aa, Homo sapiens
  Table A; Target 11647; HLA-C*03:04; BPIFA2; ENSG00000131050; CTA
VAGPIIGQI

SEQ ID NO: 11648 - protein, 9 aa, Homo sapiens
  Table A; Target 11648; HLA-C*04:01; BPIFA2; ENSG00000131050; CTA
VAGPIIGQI

SEQ ID NO: 11649 - protein, 9 aa, Homo sapiens
  Table A; Target 11649; HLA-C*05:01; BPIFA2; ENSG00000131050; CTA
VAGPIIGQI

SEQ ID NO: 11650 - protein, 9 aa, Homo sapiens
  Table A; Target 11650; HLA-C*06:02; BPIFA2; ENSG00000131050; CTA
VAGPIIGQI

SEQ ID NO: 11651 - protein, 9 aa, Homo sapiens
  Table A; Target 11651; HLA-C*07:01; BPIFA2; ENSG00000131050; CTA
VAGPIIGQI

SEQ ID NO: 11652 - protein, 9 aa, Homo sapiens
  Table A; Target 11652; HLA-C*07:02; BPIFA2; ENSG00000131050; CTA
VAGPIIGQI

SEQ ID NO: 11653 - protein, 9 aa, Homo sapiens
  Table A; Target 11653; HLA-C*07:04; BPIFA2; ENSG00000131050; CTA
VAGPIIGQI

SEQ ID NO: 11654 - protein, 9 aa, Homo sapiens
  Table A; Target 11654; HLA-C*07:06; BPIFA2; ENSG00000131050; CTA
VAGPIIGQI

SEQ ID NO: 11655 - protein, 9 aa, Homo sapiens
  Table A; Target 11655; HLA-C*12:03; BPIFA2; ENSG00000131050; CTA
VAGPIIGQI

SEQ ID NO: 11656 - protein, 9 aa, Homo sapiens
  Table A; Target 11656; HLA-C*16:02; BPIFA2; ENSG00000131050; CTA
VAGPIIGQI

SEQ ID NO: 11657 - protein, 9 aa, Homo sapiens
  Table A; Target 11657; HLA-C*16:04; BPIFA2; ENSG00000131050; CTA
VAGPIIGQI

SEQ ID NO: 11658 - protein, 10 aa, Homo sapiens
  Table A; Target 11658; HLA-A*23:01; BPIFA2; ENSG00000131050; CTA
VAGPIIGQII

SEQ ID NO: 11659 - protein, 10 aa, Homo sapiens
  Table A; Target 11659; HLA-A*24:02; BPIFA2; ENSG00000131050; CTA
VAGPIIGQII

SEQ ID NO: 11660 - protein, 10 aa, Homo sapiens
  Table A; Target 11660; HLA-A*30:01; BPIFA2; ENSG00000131050; CTA
VAGPIIGQII

SEQ ID NO: 11661 - protein, 10 aa, Homo sapiens
  Table A; Target 11661; HLA-A*68:02; BPIFA2; ENSG00000131050; CTA
VAGPIIGQII

SEQ ID NO: 11662 - protein, 10 aa, Homo sapiens
  Table A; Target 11662; HLA-B*35:03; BPIFA2; ENSG00000131050; CTA
VAGPIIGQII

SEQ ID NO: 11663 - protein, 10 aa, Homo sapiens
  Table A; Target 11663; HLA-B*38:01; BPIFA2; ENSG00000131050; CTA
VAGPIIGQII

SEQ ID NO: 11664 - protein, 10 aa, Homo sapiens
  Table A; Target 11664; HLA-B*44:02; BPIFA2; ENSG00000131050; CTA
VAGPIIGQII

SEQ ID NO: 11665 - protein, 10 aa, Homo sapiens
  Table A; Target 11665; HLA-B*51:01; BPIFA2; ENSG00000131050; CTA
VAGPIIGQII

SEQ ID NO: 11666 - protein, 10 aa, Homo sapiens
  Table A; Target 11666; HLA-B*57:01; BPIFA2; ENSG00000131050; CTA
VAGPIIGQII

SEQ ID NO: 11667 - protein, 10 aa, Homo sapiens
  Table A; Target 11667; HLA-B*58:01; BPIFA2; ENSG00000131050; CTA
VAGPIIGQII

SEQ ID NO: 11668 - protein, 10 aa, Homo sapiens
  Table A; Target 11668; HLA-C*02:02; BPIFA2; ENSG00000131050; CTA
VAGPIIGQII

SEQ ID NO: 11669 - protein, 10 aa, Homo sapiens
  Table A; Target 11669; HLA-C*03:03; BPIFA2; ENSG00000131050; CTA
VAGPIIGQII

SEQ ID NO: 11670 - protein, 10 aa, Homo sapiens
  Table A; Target 11670; HLA-C*04:01; BPIFA2; ENSG00000131050; CTA
VAGPIIGQII

SEQ ID NO: 11671 - protein, 10 aa, Homo sapiens
  Table A; Target 11671; HLA-C*07:01; BPIFA2; ENSG00000131050; CTA
VAGPIIGQII

SEQ ID NO: 11672 - protein, 10 aa, Homo sapiens
  Table A; Target 11672; HLA-C*12:03; BPIFA2; ENSG00000131050; CTA
VAGPIIGQII

SEQ ID NO: 11673 - protein, 10 aa, Homo sapiens
  Table A; Target 11673; HLA-C*16:02; BPIFA2; ENSG00000131050; CTA
VAGPIIGQII

SEQ ID NO: 11674 - protein, 10 aa, Homo sapiens
  Table A; Target 11674; HLA-C*16:04; BPIFA2; ENSG00000131050; CTA
VAGPIIGQII

SEQ ID NO: 11675 - protein, 8 aa, Homo sapiens
  Table A; Target 11675; HLA-B*54:01; BPIFA2; ENSG00000131050; CTA
VAVLGECA

SEQ ID NO: 11676 - protein, 8 aa, Homo sapiens
  Table A; Target 11676; HLA-A*30:01; BPIFA2; ENSG00000131050; CTA
VDKLEPVL

SEQ ID NO: 11677 - protein, 8 aa, Homo sapiens
  Table A; Target 11677; HLA-B*07:02; BPIFA2; ENSG00000131050; CTA
VDKLEPVL

SEQ ID NO: 11678 - protein, 8 aa, Homo sapiens
  Table A; Target 11678; HLA-B*08:01; BPIFA2; ENSG00000131050; CTA
VDKLEPVL

SEQ ID NO: 11679 - protein, 8 aa, Homo sapiens
  Table A; Target 11679; HLA-B*15:03; BPIFA2; ENSG00000131050; CTA
VDKLEPVL

SEQ ID NO: 11680 - protein, 8 aa, Homo sapiens
  Table A; Target 11680; HLA-B*18:01; BPIFA2; ENSG00000131050; CTA
VDKLEPVL

SEQ ID NO: 11681 - protein, 8 aa, Homo sapiens
  Table A; Target 11681; HLA-B*37:01; BPIFA2; ENSG00000131050; CTA
VDKLEPVL

SEQ ID NO: 11682 - protein, 8 aa, Homo sapiens
  Table A; Target 11682; HLA-B*40:01; BPIFA2; ENSG00000131050; CTA
VDKLEPVL

SEQ ID NO: 11683 - protein, 8 aa, Homo sapiens
  Table A; Target 11683; HLA-B*40:02; BPIFA2; ENSG00000131050; CTA
VDKLEPVL

SEQ ID NO: 11684 - protein, 8 aa, Homo sapiens
  Table A; Target 11684; HLA-C*04:01; BPIFA2; ENSG00000131050; CTA
VDKLEPVL

SEQ ID NO: 11685 - protein, 8 aa, Homo sapiens
  Table A; Target 11685; HLA-C*06:02; BPIFA2; ENSG00000131050; CTA
VDKLEPVL

SEQ ID NO: 11686 - protein, 8 aa, Homo sapiens
  Table A; Target 11686; HLA-C*07:01; BPIFA2; ENSG00000131050; CTA
VDKLEPVL

SEQ ID NO: 11687 - protein, 8 aa, Homo sapiens
  Table A; Target 11687; HLA-C*07:02; BPIFA2; ENSG00000131050; CTA
VDKLEPVL

SEQ ID NO: 11688 - protein, 8 aa, Homo sapiens
  Table A; Target 11688; HLA-C*07:04; BPIFA2; ENSG00000131050; CTA
VDKLEPVL

SEQ ID NO: 11689 - protein, 8 aa, Homo sapiens
  Table A; Target 11689; HLA-C*12:03; BPIFA2; ENSG00000131050; CTA
VDKLEPVL

SEQ ID NO: 11690 - protein, 8 aa, Homo sapiens
  Table A; Target 11690; HLA-C*16:01; BPIFA2; ENSG00000131050; CTA
VDKLEPVL

SEQ ID NO: 11691 - protein, 8 aa, Homo sapiens
  Table A; Target 11691; HLA-C*16:02; BPIFA2; ENSG00000131050; CTA
VDKLEPVL

SEQ ID NO: 11692 - protein, 9 aa, Homo sapiens
  Table A; Target 11692; HLA-C*07:01; BPIFA2; ENSG00000131050; CTA
VDKLEPVLH

SEQ ID NO: 11693 - protein, 9 aa, Homo sapiens
  Table A; Target 11693; HLA-C*12:03; BPIFA2; ENSG00000131050; CTA
VDKLEPVLH

SEQ ID NO: 11694 - protein, 8 aa, Homo sapiens
  Table A; Target 11694; HLA-A*03:01; BPIFA2; ENSG00000131050; CTA
VDLGVLQK

SEQ ID NO: 11695 - protein, 8 aa, Homo sapiens
  Table A; Target 11695; HLA-A*03:02; BPIFA2; ENSG00000131050; CTA
VDLGVLQK

SEQ ID NO: 11696 - protein, 8 aa, Homo sapiens
  Table A; Target 11696; HLA-A*11:01; BPIFA2; ENSG00000131050; CTA
VDLGVLQK

SEQ ID NO: 11697 - protein, 8 aa, Homo sapiens
  Table A; Target 11697; HLA-B*07:02; BPIFA2; ENSG00000131050; CTA
VDLGVLQK

SEQ ID NO: 11698 - protein, 8 aa, Homo sapiens
  Table A; Target 11698; HLA-B*27:02; BPIFA2; ENSG00000131050; CTA
VDLGVLQK

SEQ ID NO: 11699 - protein, 8 aa, Homo sapiens
  Table A; Target 11699; HLA-B*27:05; BPIFA2; ENSG00000131050; CTA
VDLGVLQK

SEQ ID NO: 11700 - protein, 8 aa, Homo sapiens
  Table A; Target 11700; HLA-B*37:01; BPIFA2; ENSG00000131050; CTA
VDLGVLQK

SEQ ID NO: 11701 - protein, 8 aa, Homo sapiens
  Table A; Target 11701; HLA-B*40:02; BPIFA2; ENSG00000131050; CTA
VDLGVLQK

SEQ ID NO: 11702 - protein, 8 aa, Homo sapiens
  Table A; Target 11702; HLA-C*04:01; BPIFA2; ENSG00000131050; CTA
VDLGVLQK

SEQ ID NO: 11703 - protein, 8 aa, Homo sapiens
  Table A; Target 11703; HLA-C*06:02; BPIFA2; ENSG00000131050; CTA
VDLGVLQK

SEQ ID NO: 11704 - protein, 8 aa, Homo sapiens
  Table A; Target 11704; HLA-C*07:01; BPIFA2; ENSG00000131050; CTA
VDLGVLQK

SEQ ID NO: 11705 - protein, 8 aa, Homo sapiens
  Table A; Target 11705; HLA-C*07:02; BPIFA2; ENSG00000131050; CTA
VDLGVLQK

SEQ ID NO: 11706 - protein, 8 aa, Homo sapiens
  Table A; Target 11706; HLA-C*07:04; BPIFA2; ENSG00000131050; CTA
VDLGVLQK

SEQ ID NO: 11707 - protein, 8 aa, Homo sapiens
  Table A; Target 11707; HLA-C*12:03; BPIFA2; ENSG00000131050; CTA
VDLGVLQK

SEQ ID NO: 11708 - protein, 9 aa, Homo sapiens
  Table A; Target 11708; HLA-B*40:02; BPIFA2; ENSG00000131050; CTA
VDLGVLQKS

SEQ ID NO: 11709 - protein, 9 aa, Homo sapiens
  Table A; Target 11709; HLA-C*04:01; BPIFA2; ENSG00000131050; CTA
VDLGVLQKS

SEQ ID NO: 11710 - protein, 9 aa, Homo sapiens
  Table A; Target 11710; HLA-C*06:02; BPIFA2; ENSG00000131050; CTA
VDLGVLQKS

SEQ ID NO: 11711 - protein, 9 aa, Homo sapiens
  Table A; Target 11711; HLA-C*07:01; BPIFA2; ENSG00000131050; CTA
VDLGVLQKS

SEQ ID NO: 11712 - protein, 9 aa, Homo sapiens
  Table A; Target 11712; HLA-C*07:02; BPIFA2; ENSG00000131050; CTA
VDLGVLQKS

SEQ ID NO: 11713 - protein, 9 aa, Homo sapiens
  Table A; Target 11713; HLA-C*12:03; BPIFA2; ENSG00000131050; CTA
VDLGVLQKS

SEQ ID NO: 11714 - protein, 10 aa, Homo sapiens
  Table A; Target 11714; HLA-C*07:01; BPIFA2; ENSG00000131050; CTA
VDLGVLQKSS

SEQ ID NO: 11715 - protein, 11 aa, Homo sapiens
  Table A; Target 11715; HLA-C*04:01; BPIFA2; ENSG00000131050; CTA
VDLGVLQKSSA

SEQ ID NO: 11716 - protein, 11 aa, Homo sapiens
  Table A; Target 11716; HLA-C*06:02; BPIFA2; ENSG00000131050; CTA
VDLGVLQKSSA

SEQ ID NO: 11717 - protein, 8 aa, Homo sapiens
  Table A; Target 11717; HLA-A*32:01; BPIFA2; ENSG00000131050; CTA
VDNPQHKT

SEQ ID NO: 11718 - protein, 8 aa, Homo sapiens
  Table A; Target 11718; HLA-B*07:02; BPIFA2; ENSG00000131050; CTA
VDNPQHKT

SEQ ID NO: 11719 - protein, 8 aa, Homo sapiens
  Table A; Target 11719; HLA-B*37:01; BPIFA2; ENSG00000131050; CTA
VDNPQHKT

SEQ ID NO: 11720 - protein, 8 aa, Homo sapiens
  Table A; Target 11720; HLA-B*40:02; BPIFA2; ENSG00000131050; CTA
VDNPQHKT

SEQ ID NO: 11721 - protein, 8 aa, Homo sapiens
  Table A; Target 11721; HLA-C*04:01; BPIFA2; ENSG00000131050; CTA
VDNPQHKT

SEQ ID NO: 11722 - protein, 8 aa, Homo sapiens
  Table A; Target 11722; HLA-C*06:02; BPIFA2; ENSG00000131050; CTA
VDNPQHKT

SEQ ID NO: 11723 - protein, 8 aa, Homo sapiens
  Table A; Target 11723; HLA-C*07:01; BPIFA2; ENSG00000131050; CTA
VDNPQHKT

SEQ ID NO: 11724 - protein, 8 aa, Homo sapiens
  Table A; Target 11724; HLA-C*07:04; BPIFA2; ENSG00000131050; CTA
VDNPQHKT

SEQ ID NO: 11725 - protein, 8 aa, Homo sapiens
  Table A; Target 11725; HLA-C*16:02; BPIFA2; ENSG00000131050; CTA
VDNPQHKT

SEQ ID NO: 11726 - protein, 9 aa, Homo sapiens
  Table A; Target 11726; HLA-C*04:01; BPIFA2; ENSG00000131050; CTA
VDNPQHKTQ

SEQ ID NO: 11727 - protein, 9 aa, Homo sapiens
  Table A; Target 11727; HLA-C*06:02; BPIFA2; ENSG00000131050; CTA
VDNPQHKTQ

SEQ ID NO: 11728 - protein, 9 aa, Homo sapiens
  Table A; Target 11728; HLA-C*07:01; BPIFA2; ENSG00000131050; CTA
VDNPQHKTQ

SEQ ID NO: 11729 - protein, 9 aa, Homo sapiens
  Table A; Target 11729; HLA-C*12:03; BPIFA2; ENSG00000131050; CTA
VDNPQHKTQ

SEQ ID NO: 11730 - protein, 9 aa, Homo sapiens
  Table A; Target 11730; HLA-C*16:02; BPIFA2; ENSG00000131050; CTA
VDNPQHKTQ

SEQ ID NO: 11731 - protein, 10 aa, Homo sapiens
  Table A; Target 11731; HLA-A*03:01; BPIFA2; ENSG00000131050; CTA
VDNPQHKTQL

SEQ ID NO: 11732 - protein, 10 aa, Homo sapiens
  Table A; Target 11732; HLA-A*30:01; BPIFA2; ENSG00000131050; CTA
VDNPQHKTQL

SEQ ID NO: 11733 - protein, 10 aa, Homo sapiens
  Table A; Target 11733; HLA-A*31:01; BPIFA2; ENSG00000131050; CTA
VDNPQHKTQL

SEQ ID NO: 11734 - protein, 10 aa, Homo sapiens
  Table A; Target 11734; HLA-B*07:02; BPIFA2; ENSG00000131050; CTA
VDNPQHKTQL

SEQ ID NO: 11735 - protein, 10 aa, Homo sapiens
  Table A; Target 11735; HLA-B*37:01; BPIFA2; ENSG00000131050; CTA
VDNPQHKTQL

SEQ ID NO: 11736 - protein, 10 aa, Homo sapiens
  Table A; Target 11736; HLA-B*40:01; BPIFA2; ENSG00000131050; CTA
VDNPQHKTQL

SEQ ID NO: 11737 - protein, 10 aa, Homo sapiens
  Table A; Target 11737; HLA-B*40:02; BPIFA2; ENSG00000131050; CTA
VDNPQHKTQL

SEQ ID NO: 11738 - protein, 10 aa, Homo sapiens
  Table A; Target 11738; HLA-C*04:01; BPIFA2; ENSG00000131050; CTA
VDNPQHKTQL

SEQ ID NO: 11739 - protein, 10 aa, Homo sapiens
  Table A; Target 11739; HLA-C*06:02; BPIFA2; ENSG00000131050; CTA
VDNPQHKTQL

SEQ ID NO: 11740 - protein, 10 aa, Homo sapiens
  Table A; Target 11740; HLA-C*07:01; BPIFA2; ENSG00000131050; CTA
VDNPQHKTQL

SEQ ID NO: 11741 - protein, 10 aa, Homo sapiens
  Table A; Target 11741; HLA-C*07:02; BPIFA2; ENSG00000131050; CTA
VDNPQHKTQL

SEQ ID NO: 11742 - protein, 10 aa, Homo sapiens
  Table A; Target 11742; HLA-C*12:03; BPIFA2; ENSG00000131050; CTA
VDNPQHKTQL

SEQ ID NO: 11743 - protein, 10 aa, Homo sapiens
  Table A; Target 11743; HLA-C*16:02; BPIFA2; ENSG00000131050; CTA
VDNPQHKTQL

SEQ ID NO: 11744 - protein, 9 aa, Homo sapiens
  Table A; Target 11744; HLA-B*40:02; BPIFA2; ENSG00000131050; CTA
VDNTLKGIL

SEQ ID NO: 11745 - protein, 11 aa, Homo sapiens
  Table A; Target 11745; HLA-A*11:01; BPIFA2; ENSG00000131050; CTA
VDNTLKGILEK

SEQ ID NO: 11746 - protein, 11 aa, Homo sapiens
  Table A; Target 11746; HLA-B*27:02; BPIFA2; ENSG00000131050; CTA
VDNTLKGILEK

SEQ ID NO: 11747 - protein, 9 aa, Homo sapiens
  Table A; Target 11747; HLA-A*02:01; BPIFA2; ENSG00000131050; CTA
VINTLKSTV

SEQ ID NO: 11748 - protein, 9 aa, Homo sapiens
  Table A; Target 11748; HLA-A*02:03; BPIFA2; ENSG00000131050; CTA
VINTLKSTV

SEQ ID NO: 11749 - protein, 9 aa, Homo sapiens
  Table A; Target 11749; HLA-A*02:04; BPIFA2; ENSG00000131050; CTA
VINTLKSTV

SEQ ID NO: 11750 - protein, 9 aa, Homo sapiens
  Table A; Target 11750; HLA-A*02:07; BPIFA2; ENSG00000131050; CTA
VINTLKSTV

SEQ ID NO: 11751 - protein, 9 aa, Homo sapiens
  Table A; Target 11751; HLA-A*23:01; BPIFA2; ENSG00000131050; CTA
VINTLKSTV

SEQ ID NO: 11752 - protein, 9 aa, Homo sapiens
  Table A; Target 11752; HLA-A*24:02; BPIFA2; ENSG00000131050; CTA
VINTLKSTV

SEQ ID NO: 11753 - protein, 9 aa, Homo sapiens
  Table A; Target 11753; HLA-A*31:01; BPIFA2; ENSG00000131050; CTA
VINTLKSTV

SEQ ID NO: 11754 - protein, 9 aa, Homo sapiens
  Table A; Target 11754; HLA-A*32:01; BPIFA2; ENSG00000131050; CTA
VINTLKSTV

SEQ ID NO: 11755 - protein, 9 aa, Homo sapiens
  Table A; Target 11755; HLA-A*68:02; BPIFA2; ENSG00000131050; CTA
VINTLKSTV

SEQ ID NO: 11756 - protein, 9 aa, Homo sapiens
  Table A; Target 11756; HLA-B*07:02; BPIFA2; ENSG00000131050; CTA
VINTLKSTV

SEQ ID NO: 11757 - protein, 9 aa, Homo sapiens
  Table A; Target 11757; HLA-B*08:01; BPIFA2; ENSG00000131050; CTA
VINTLKSTV

SEQ ID NO: 11758 - protein, 9 aa, Homo sapiens
  Table A; Target 11758; HLA-B*13:02; BPIFA2; ENSG00000131050; CTA
VINTLKSTV

SEQ ID NO: 11759 - protein, 9 aa, Homo sapiens
  Table A; Target 11759; HLA-B*15:01; BPIFA2; ENSG00000131050; CTA
VINTLKSTV

SEQ ID NO: 11760 - protein, 9 aa, Homo sapiens
  Table A; Target 11760; HLA-B*27:05; BPIFA2; ENSG00000131050; CTA
VINTLKSTV

SEQ ID NO: 11761 - protein, 9 aa, Homo sapiens
  Table A; Target 11761; HLA-B*40:02; BPIFA2; ENSG00000131050; CTA
VINTLKSTV

SEQ ID NO: 11762 - protein, 9 aa, Homo sapiens
  Table A; Target 11762; HLA-B*46:01; BPIFA2; ENSG00000131050; CTA
VINTLKSTV

SEQ ID NO: 11763 - protein, 9 aa, Homo sapiens
  Table A; Target 11763; HLA-B*51:01; BPIFA2; ENSG00000131050; CTA
VINTLKSTV

SEQ ID NO: 11764 - protein, 9 aa, Homo sapiens
  Table A; Target 11764; HLA-B*55:01; BPIFA2; ENSG00000131050; CTA
VINTLKSTV

SEQ ID NO: 11765 - protein, 9 aa, Homo sapiens
  Table A; Target 11765; HLA-B*56:01; BPIFA2; ENSG00000131050; CTA
VINTLKSTV

SEQ ID NO: 11766 - protein, 9 aa, Homo sapiens
  Table A; Target 11766; HLA-B*58:01; BPIFA2; ENSG00000131050; CTA
VINTLKSTV

SEQ ID NO: 11767 - protein, 9 aa, Homo sapiens
  Table A; Target 11767; HLA-C*01:02; BPIFA2; ENSG00000131050; CTA
VINTLKSTV

SEQ ID NO: 11768 - protein, 9 aa, Homo sapiens
  Table A; Target 11768; HLA-C*02:02; BPIFA2; ENSG00000131050; CTA
VINTLKSTV

SEQ ID NO: 11769 - protein, 9 aa, Homo sapiens
  Table A; Target 11769; HLA-C*04:01; BPIFA2; ENSG00000131050; CTA
VINTLKSTV

SEQ ID NO: 11770 - protein, 9 aa, Homo sapiens
  Table A; Target 11770; HLA-C*05:01; BPIFA2; ENSG00000131050; CTA
VINTLKSTV

SEQ ID NO: 11771 - protein, 9 aa, Homo sapiens
  Table A; Target 11771; HLA-C*06:02; BPIFA2; ENSG00000131050; CTA
VINTLKSTV

SEQ ID NO: 11772 - protein, 9 aa, Homo sapiens
  Table A; Target 11772; HLA-C*07:01; BPIFA2; ENSG00000131050; CTA
VINTLKSTV

SEQ ID NO: 11773 - protein, 9 aa, Homo sapiens
  Table A; Target 11773; HLA-C*07:02; BPIFA2; ENSG00000131050; CTA
VINTLKSTV

SEQ ID NO: 11774 - protein, 9 aa, Homo sapiens
  Table A; Target 11774; HLA-C*07:04; BPIFA2; ENSG00000131050; CTA
VINTLKSTV

SEQ ID NO: 11775 - protein, 9 aa, Homo sapiens
  Table A; Target 11775; HLA-C*12:03; BPIFA2; ENSG00000131050; CTA
VINTLKSTV

SEQ ID NO: 11776 - protein, 9 aa, Homo sapiens
  Table A; Target 11776; HLA-C*14:02; BPIFA2; ENSG00000131050; CTA
VINTLKSTV

SEQ ID NO: 11777 - protein, 9 aa, Homo sapiens
  Table A; Target 11777; HLA-C*16:01; BPIFA2; ENSG00000131050; CTA
VINTLKSTV

SEQ ID NO: 11778 - protein, 9 aa, Homo sapiens
  Table A; Target 11778; HLA-C*16:02; BPIFA2; ENSG00000131050; CTA
VINTLKSTV

SEQ ID NO: 11779 - protein, 9 aa, Homo sapiens
  Table A; Target 11779; HLA-C*16:04; BPIFA2; ENSG00000131050; CTA
VINTLKSTV

SEQ ID NO: 11780 - protein, 10 aa, Homo sapiens
  Table A; Target 11780; HLA-A*31:01; BPIFA2; ENSG00000131050; CTA
VINTLKSTVS

SEQ ID NO: 11781 - protein, 10 aa, Homo sapiens
  Table A; Target 11781; HLA-C*07:04; BPIFA2; ENSG00000131050; CTA
VINTLKSTVS

SEQ ID NO: 11782 - protein, 10 aa, Homo sapiens
  Table A; Target 11782; HLA-A*03:02; BPIFA2; ENSG00000131050; CTA
VIQQVVDNPQ

SEQ ID NO: 11783 - protein, 10 aa, Homo sapiens
  Table A; Target 11783; HLA-C*06:02; BPIFA2; ENSG00000131050; CTA
VIQQVVDNPQ

SEQ ID NO: 11784 - protein, 10 aa, Homo sapiens
  Table A; Target 11784; HLA-B*27:02; BPIFA2; ENSG00000131050; CTA
VKAEPIDDGK

SEQ ID NO: 11785 - protein, 9 aa, Homo sapiens
  Table A; Target 11785; HLA-A*02:01; BPIFA2; ENSG00000131050; CTA
VLHEGLETV

SEQ ID NO: 11786 - protein, 9 aa, Homo sapiens
  Table A; Target 11786; HLA-A*02:03; BPIFA2; ENSG00000131050; CTA
VLHEGLETV

SEQ ID NO: 11787 - protein, 9 aa, Homo sapiens
  Table A; Target 11787; HLA-A*02:04; BPIFA2; ENSG00000131050; CTA
VLHEGLETV

SEQ ID NO: 11788 - protein, 9 aa, Homo sapiens
  Table A; Target 11788; HLA-A*02:07; BPIFA2; ENSG00000131050; CTA
VLHEGLETV

SEQ ID NO: 11789 - protein, 9 aa, Homo sapiens
  Table A; Target 11789; HLA-A*30:01; BPIFA2; ENSG00000131050; CTA
VLHEGLETV

SEQ ID NO: 11790 - protein, 9 aa, Homo sapiens
  Table A; Target 11790; HLA-A*32:01; BPIFA2; ENSG00000131050; CTA
VLHEGLETV

SEQ ID NO: 11791 - protein, 9 aa, Homo sapiens
  Table A; Target 11791; HLA-A*68:02; BPIFA2; ENSG00000131050; CTA
VLHEGLETV

SEQ ID NO: 11792 - protein, 9 aa, Homo sapiens
  Table A; Target 11792; HLA-B*08:01; BPIFA2; ENSG00000131050; CTA
VLHEGLETV

SEQ ID NO: 11793 - protein, 9 aa, Homo sapiens
  Table A; Target 11793; HLA-B*13:02; BPIFA2; ENSG00000131050; CTA
VLHEGLETV

SEQ ID NO: 11794 - protein, 9 aa, Homo sapiens
  Table A; Target 11794; HLA-B*15:01; BPIFA2; ENSG00000131050; CTA
VLHEGLETV

SEQ ID NO: 11795 - protein, 9 aa, Homo sapiens
  Table A; Target 11795; HLA-B*15:03; BPIFA2; ENSG00000131050; CTA
VLHEGLETV

SEQ ID NO: 11796 - protein, 9 aa, Homo sapiens
  Table A; Target 11796; HLA-B*37:01; BPIFA2; ENSG00000131050; CTA
VLHEGLETV

SEQ ID NO: 11797 - protein, 9 aa, Homo sapiens
  Table A; Target 11797; HLA-B*40:02; BPIFA2; ENSG00000131050; CTA
VLHEGLETV

SEQ ID NO: 11798 - protein, 9 aa, Homo sapiens
  Table A; Target 11798; HLA-B*46:01; BPIFA2; ENSG00000131050; CTA
VLHEGLETV

SEQ ID NO: 11799 - protein, 9 aa, Homo sapiens
  Table A; Target 11799; HLA-B*49:01; BPIFA2; ENSG00000131050; CTA
VLHEGLETV

SEQ ID NO: 11800 - protein, 9 aa, Homo sapiens
  Table A; Target 11800; HLA-B*51:01; BPIFA2; ENSG00000131050; CTA
VLHEGLETV

SEQ ID NO: 11801 - protein, 9 aa, Homo sapiens
  Table A; Target 11801; HLA-B*55:01; BPIFA2; ENSG00000131050; CTA
VLHEGLETV

SEQ ID NO: 11802 - protein, 9 aa, Homo sapiens
  Table A; Target 11802; HLA-B*56:01; BPIFA2; ENSG00000131050; CTA
VLHEGLETV

SEQ ID NO: 11803 - protein, 9 aa, Homo sapiens
  Table A; Target 11803; HLA-C*01:02; BPIFA2; ENSG00000131050; CTA
VLHEGLETV

SEQ ID NO: 11804 - protein, 9 aa, Homo sapiens
  Table A; Target 11804; HLA-C*02:02; BPIFA2; ENSG00000131050; CTA
VLHEGLETV

SEQ ID NO: 11805 - protein, 9 aa, Homo sapiens
  Table A; Target 11805; HLA-C*03:04; BPIFA2; ENSG00000131050; CTA
VLHEGLETV

SEQ ID NO: 11806 - protein, 9 aa, Homo sapiens
  Table A; Target 11806; HLA-C*05:01; BPIFA2; ENSG00000131050; CTA
VLHEGLETV

SEQ ID NO: 11807 - protein, 9 aa, Homo sapiens
  Table A; Target 11807; HLA-C*06:02; BPIFA2; ENSG00000131050; CTA
VLHEGLETV

SEQ ID NO: 11808 - protein, 9 aa, Homo sapiens
  Table A; Target 11808; HLA-C*14:02; BPIFA2; ENSG00000131050; CTA
VLHEGLETV

SEQ ID NO: 11809 - protein, 9 aa, Homo sapiens
  Table A; Target 11809; HLA-C*16:02; BPIFA2; ENSG00000131050; CTA
VLHEGLETV

SEQ ID NO: 11810 - protein, 10 aa, Homo sapiens
  Table A; Target 11810; HLA-A*02:01; BPIFA2; ENSG00000131050; CTA
VLLCGVLTGT

SEQ ID NO: 11811 - protein, 10 aa, Homo sapiens
  Table A; Target 11811; HLA-A*02:03; BPIFA2; ENSG00000131050; CTA
VLLCGVLTGT

SEQ ID NO: 11812 - protein, 10 aa, Homo sapiens
  Table A; Target 11812; HLA-C*06:02; BPIFA2; ENSG00000131050; CTA
VLLCGVLTGT

SEQ ID NO: 11813 - protein, 10 aa, Homo sapiens
  Table A; Target 11813; HLA-C*07:02; BPIFA2; ENSG00000131050; CTA
VLLCGVLTGT

SEQ ID NO: 11814 - protein, 8 aa, Homo sapiens
  Table A; Target 11814; HLA-A*32:01; BPIFA2; ENSG00000131050; CTA
VLQKSSAW

SEQ ID NO: 11815 - protein, 8 aa, Homo sapiens
  Table A; Target 11815; HLA-B*08:01; BPIFA2; ENSG00000131050; CTA
VLQKSSAW

SEQ ID NO: 11816 - protein, 8 aa, Homo sapiens
  Table A; Target 11816; HLA-B*15:01; BPIFA2; ENSG00000131050; CTA
VLQKSSAW

SEQ ID NO: 11817 - protein, 8 aa, Homo sapiens
  Table A; Target 11817; HLA-B*58:01; BPIFA2; ENSG00000131050; CTA
VLQKSSAW

SEQ ID NO: 11818 - protein, 8 aa, Homo sapiens
  Table A; Target 11818; HLA-C*04:01; BPIFA2; ENSG00000131050; CTA
VLQKSSAW

SEQ ID NO: 11819 - protein, 8 aa, Homo sapiens
  Table A; Target 11819; HLA-C*07:01; BPIFA2; ENSG00000131050; CTA
VLQKSSAW

SEQ ID NO: 11820 - protein, 8 aa, Homo sapiens
  Table A; Target 11820; HLA-C*07:04; BPIFA2; ENSG00000131050; CTA
VLQKSSAW

SEQ ID NO: 11821 - protein, 10 aa, Homo sapiens
  Table A; Target 11821; HLA-A*02:04; BPIFA2; ENSG00000131050; CTA
VLQKSSAWQL

SEQ ID NO: 11822 - protein, 9 aa, Homo sapiens
  Table A; Target 11822; HLA-A*02:01; BPIFA2; ENSG00000131050; CTA
VLTGTSESL

SEQ ID NO: 11823 - protein, 9 aa, Homo sapiens
  Table A; Target 11823; HLA-A*02:03; BPIFA2; ENSG00000131050; CTA
VLTGTSESL

SEQ ID NO: 11824 - protein, 9 aa, Homo sapiens
  Table A; Target 11824; HLA-A*02:04; BPIFA2; ENSG00000131050; CTA
VLTGTSESL

SEQ ID NO: 11825 - protein, 9 aa, Homo sapiens
  Table A; Target 11825; HLA-A*02:07; BPIFA2; ENSG00000131050; CTA
VLTGTSESL

SEQ ID NO: 11826 - protein, 9 aa, Homo sapiens
  Table A; Target 11826; HLA-A*23:01; BPIFA2; ENSG00000131050; CTA
VLTGTSESL

SEQ ID NO: 11827 - protein, 9 aa, Homo sapiens
  Table A; Target 11827; HLA-A*24:02; BPIFA2; ENSG00000131050; CTA
VLTGTSESL

SEQ ID NO: 11828 - protein, 9 aa, Homo sapiens
  Table A; Target 11828; HLA-A*30:01; BPIFA2; ENSG00000131050; CTA
VLTGTSESL

SEQ ID NO: 11829 - protein, 9 aa, Homo sapiens
  Table A; Target 11829; HLA-A*32:01; BPIFA2; ENSG00000131050; CTA
VLTGTSESL

SEQ ID NO: 11830 - protein, 9 aa, Homo sapiens
  Table A; Target 11830; HLA-B*07:02; BPIFA2; ENSG00000131050; CTA
VLTGTSESL

SEQ ID NO: 11831 - protein, 9 aa, Homo sapiens
  Table A; Target 11831; HLA-B*08:01; BPIFA2; ENSG00000131050; CTA
VLTGTSESL

SEQ ID NO: 11832 - protein, 9 aa, Homo sapiens
  Table A; Target 11832; HLA-B*13:02; BPIFA2; ENSG00000131050; CTA
VLTGTSESL

SEQ ID NO: 11833 - protein, 9 aa, Homo sapiens
  Table A; Target 11833; HLA-B*15:01; BPIFA2; ENSG00000131050; CTA
VLTGTSESL

SEQ ID NO: 11834 - protein, 9 aa, Homo sapiens
  Table A; Target 11834; HLA-B*15:03; BPIFA2; ENSG00000131050; CTA
VLTGTSESL

SEQ ID NO: 11835 - protein, 9 aa, Homo sapiens
  Table A; Target 11835; HLA-B*27:05; BPIFA2; ENSG00000131050; CTA
VLTGTSESL

SEQ ID NO: 11836 - protein, 9 aa, Homo sapiens
  Table A; Target 11836; HLA-B*35:03; BPIFA2; ENSG00000131050; CTA
VLTGTSESL

SEQ ID NO: 11837 - protein, 9 aa, Homo sapiens
  Table A; Target 11837; HLA-B*38:01; BPIFA2; ENSG00000131050; CTA
VLTGTSESL

SEQ ID NO: 11838 - protein, 9 aa, Homo sapiens
  Table A; Target 11838; HLA-B*39:01; BPIFA2; ENSG00000131050; CTA
VLTGTSESL

SEQ ID NO: 11839 - protein, 9 aa, Homo sapiens
  Table A; Target 11839; HLA-B*40:01; BPIFA2; ENSG00000131050; CTA
VLTGTSESL

SEQ ID NO: 11840 - protein, 9 aa, Homo sapiens
  Table A; Target 11840; HLA-B*40:02; BPIFA2; ENSG00000131050; CTA
VLTGTSESL

SEQ ID NO: 11841 - protein, 9 aa, Homo sapiens
  Table A; Target 11841; HLA-B*46:01; BPIFA2; ENSG00000131050; CTA
VLTGTSESL

SEQ ID NO: 11842 - protein, 9 aa, Homo sapiens
  Table A; Target 11842; HLA-B*55:01; BPIFA2; ENSG00000131050; CTA
VLTGTSESL

SEQ ID NO: 11843 - protein, 9 aa, Homo sapiens
  Table A; Target 11843; HLA-B*58:01; BPIFA2; ENSG00000131050; CTA
VLTGTSESL

SEQ ID NO: 11844 - protein, 9 aa, Homo sapiens
  Table A; Target 11844; HLA-C*01:02; BPIFA2; ENSG00000131050; CTA
VLTGTSESL

SEQ ID NO: 11845 - protein, 9 aa, Homo sapiens
  Table A; Target 11845; HLA-C*02:02; BPIFA2; ENSG00000131050; CTA
VLTGTSESL

SEQ ID NO: 11846 - protein, 9 aa, Homo sapiens
  Table A; Target 11846; HLA-C*03:03; BPIFA2; ENSG00000131050; CTA
VLTGTSESL

SEQ ID NO: 11847 - protein, 9 aa, Homo sapiens
  Table A; Target 11847; HLA-C*03:04; BPIFA2; ENSG00000131050; CTA
VLTGTSESL

SEQ ID NO: 11848 - protein, 9 aa, Homo sapiens
  Table A; Target 11848; HLA-C*04:01; BPIFA2; ENSG00000131050; CTA
VLTGTSESL

SEQ ID NO: 11849 - protein, 9 aa, Homo sapiens
  Table A; Target 11849; HLA-C*05:01; BPIFA2; ENSG00000131050; CTA
VLTGTSESL

SEQ ID NO: 11850 - protein, 9 aa, Homo sapiens
  Table A; Target 11850; HLA-C*06:02; BPIFA2; ENSG00000131050; CTA
VLTGTSESL

SEQ ID NO: 11851 - protein, 9 aa, Homo sapiens
  Table A; Target 11851; HLA-C*07:02; BPIFA2; ENSG00000131050; CTA
VLTGTSESL

SEQ ID NO: 11852 - protein, 9 aa, Homo sapiens
  Table A; Target 11852; HLA-C*07:04; BPIFA2; ENSG00000131050; CTA
VLTGTSESL

SEQ ID NO: 11853 - protein, 9 aa, Homo sapiens
  Table A; Target 11853; HLA-C*14:02; BPIFA2; ENSG00000131050; CTA
VLTGTSESL

SEQ ID NO: 11854 - protein, 9 aa, Homo sapiens
  Table A; Target 11854; HLA-C*16:01; BPIFA2; ENSG00000131050; CTA
VLTGTSESL

SEQ ID NO: 11855 - protein, 9 aa, Homo sapiens
  Table A; Target 11855; HLA-C*16:02; BPIFA2; ENSG00000131050; CTA
VLTGTSESL

SEQ ID NO: 11856 - protein, 10 aa, Homo sapiens
  Table A; Target 11856; HLA-A*02:01; BPIFA2; ENSG00000131050; CTA
VLTGTSESLL

SEQ ID NO: 11857 - protein, 10 aa, Homo sapiens
  Table A; Target 11857; HLA-A*02:03; BPIFA2; ENSG00000131050; CTA
VLTGTSESLL

SEQ ID NO: 11858 - protein, 10 aa, Homo sapiens
  Table A; Target 11858; HLA-B*55:01; BPIFA2; ENSG00000131050; CTA
VLTGTSESLL

SEQ ID NO: 11859 - protein, 10 aa, Homo sapiens
  Table A; Target 11859; HLA-C*07:02; BPIFA2; ENSG00000131050; CTA
VLTGTSESLL

SEQ ID NO: 11860 - protein, 10 aa, Homo sapiens
  Table A; Target 11860; HLA-C*07:04; BPIFA2; ENSG00000131050; CTA
VLTGTSESLL

SEQ ID NO: 11861 - protein, 8 aa, Homo sapiens
  Table A; Target 11861; HLA-A*23:01; BPIFA2; ENSG00000131050; CTA
VNSVINTL

SEQ ID NO: 11862 - protein, 8 aa, Homo sapiens
  Table A; Target 11862; HLA-A*24:02; BPIFA2; ENSG00000131050; CTA
VNSVINTL

SEQ ID NO: 11863 - protein, 8 aa, Homo sapiens
  Table A; Target 11863; HLA-A*32:01; BPIFA2; ENSG00000131050; CTA
VNSVINTL

SEQ ID NO: 11864 - protein, 8 aa, Homo sapiens
  Table A; Target 11864; HLA-B*07:02; BPIFA2; ENSG00000131050; CTA
VNSVINTL

SEQ ID NO: 11865 - protein, 8 aa, Homo sapiens
  Table A; Target 11865; HLA-B*08:01; BPIFA2; ENSG00000131050; CTA
VNSVINTL

SEQ ID NO: 11866 - protein, 8 aa, Homo sapiens
  Table A; Target 11866; HLA-B*15:01; BPIFA2; ENSG00000131050; CTA
VNSVINTL

SEQ ID NO: 11867 - protein, 8 aa, Homo sapiens
  Table A; Target 11867; HLA-B*18:01; BPIFA2; ENSG00000131050; CTA
VNSVINTL

SEQ ID NO: 11868 - protein, 8 aa, Homo sapiens
  Table A; Target 11868; HLA-B*27:05; BPIFA2; ENSG00000131050; CTA
VNSVINTL

SEQ ID NO: 11869 - protein, 8 aa, Homo sapiens
  Table A; Target 11869; HLA-B*37:01; BPIFA2; ENSG00000131050; CTA
VNSVINTL

SEQ ID NO: 11870 - protein, 8 aa, Homo sapiens
  Table A; Target 11870; HLA-B*39:01; BPIFA2; ENSG00000131050; CTA
VNSVINTL

SEQ ID NO: 11871 - protein, 8 aa, Homo sapiens
  Table A; Target 11871; HLA-B*40:02; BPIFA2; ENSG00000131050; CTA
VNSVINTL

SEQ ID NO: 11872 - protein, 8 aa, Homo sapiens
  Table A; Target 11872; HLA-C*01:02; BPIFA2; ENSG00000131050; CTA
VNSVINTL

SEQ ID NO: 11873 - protein, 8 aa, Homo sapiens
  Table A; Target 11873; HLA-C*03:03; BPIFA2; ENSG00000131050; CTA
VNSVINTL

SEQ ID NO: 11874 - protein, 8 aa, Homo sapiens
  Table A; Target 11874; HLA-C*03:04; BPIFA2; ENSG00000131050; CTA
VNSVINTL

SEQ ID NO: 11875 - protein, 8 aa, Homo sapiens
  Table A; Target 11875; HLA-C*04:01; BPIFA2; ENSG00000131050; CTA
VNSVINTL

SEQ ID NO: 11876 - protein, 8 aa, Homo sapiens
  Table A; Target 11876; HLA-C*05:01; BPIFA2; ENSG00000131050; CTA
VNSVINTL

SEQ ID NO: 11877 - protein, 8 aa, Homo sapiens
  Table A; Target 11877; HLA-C*06:02; BPIFA2; ENSG00000131050; CTA
VNSVINTL

SEQ ID NO: 11878 - protein, 8 aa, Homo sapiens
  Table A; Target 11878; HLA-C*07:01; BPIFA2; ENSG00000131050; CTA
VNSVINTL

SEQ ID NO: 11879 - protein, 8 aa, Homo sapiens
  Table A; Target 11879; HLA-C*07:02; BPIFA2; ENSG00000131050; CTA
VNSVINTL

SEQ ID NO: 11880 - protein, 8 aa, Homo sapiens
  Table A; Target 11880; HLA-C*07:04; BPIFA2; ENSG00000131050; CTA
VNSVINTL

SEQ ID NO: 11881 - protein, 8 aa, Homo sapiens
  Table A; Target 11881; HLA-C*12:03; BPIFA2; ENSG00000131050; CTA
VNSVINTL

SEQ ID NO: 11882 - protein, 8 aa, Homo sapiens
  Table A; Target 11882; HLA-C*14:02; BPIFA2; ENSG00000131050; CTA
VNSVINTL

SEQ ID NO: 11883 - protein, 8 aa, Homo sapiens
  Table A; Target 11883; HLA-C*16:01; BPIFA2; ENSG00000131050; CTA
VNSVINTL

SEQ ID NO: 11884 - protein, 8 aa, Homo sapiens
  Table A; Target 11884; HLA-C*16:02; BPIFA2; ENSG00000131050; CTA
VNSVINTL

SEQ ID NO: 11885 - protein, 8 aa, Homo sapiens
  Table A; Target 11885; HLA-C*16:04; BPIFA2; ENSG00000131050; CTA
VNSVINTL

SEQ ID NO: 11886 - protein, 9 aa, Homo sapiens
  Table A; Target 11886; HLA-A*01:01; BPIFA2; ENSG00000131050; CTA
VNSVINTLK

SEQ ID NO: 11887 - protein, 9 aa, Homo sapiens
  Table A; Target 11887; HLA-A*03:01; BPIFA2; ENSG00000131050; CTA
VNSVINTLK

SEQ ID NO: 11888 - protein, 9 aa, Homo sapiens
  Table A; Target 11888; HLA-A*03:02; BPIFA2; ENSG00000131050; CTA
VNSVINTLK

SEQ ID NO: 11889 - protein, 9 aa, Homo sapiens
  Table A; Target 11889; HLA-A*11:01; BPIFA2; ENSG00000131050; CTA
VNSVINTLK

SEQ ID NO: 11890 - protein, 9 aa, Homo sapiens
  Table A; Target 11890; HLA-A*33:01; BPIFA2; ENSG00000131050; CTA
VNSVINTLK

SEQ ID NO: 11891 - protein, 9 aa, Homo sapiens
  Table A; Target 11891; HLA-A*33:03; BPIFA2; ENSG00000131050; CTA
VNSVINTLK

SEQ ID NO: 11892 - protein, 9 aa, Homo sapiens
  Table A; Target 11892; HLA-A*68:01; BPIFA2; ENSG00000131050; CTA
VNSVINTLK

SEQ ID NO: 11893 - protein, 9 aa, Homo sapiens
  Table A; Target 11893; HLA-A*68:02; BPIFA2; ENSG00000131050; CTA
VNSVINTLK

SEQ ID NO: 11894 - protein, 9 aa, Homo sapiens
  Table A; Target 11894; HLA-B*27:02; BPIFA2; ENSG00000131050; CTA
VNSVINTLK

SEQ ID NO: 11895 - protein, 9 aa, Homo sapiens
  Table A; Target 11895; HLA-B*27:05; BPIFA2; ENSG00000131050; CTA
VNSVINTLK

SEQ ID NO: 11896 - protein, 9 aa, Homo sapiens
  Table A; Target 11896; HLA-B*57:01; BPIFA2; ENSG00000131050; CTA
VNSVINTLK

SEQ ID NO: 11897 - protein, 9 aa, Homo sapiens
  Table A; Target 11897; HLA-C*04:01; BPIFA2; ENSG00000131050; CTA
VNSVINTLK

SEQ ID NO: 11898 - protein, 9 aa, Homo sapiens
  Table A; Target 11898; HLA-C*06:02; BPIFA2; ENSG00000131050; CTA
VNSVINTLK

SEQ ID NO: 11899 - protein, 9 aa, Homo sapiens
  Table A; Target 11899; HLA-C*07:01; BPIFA2; ENSG00000131050; CTA
VNSVINTLK

SEQ ID NO: 11900 - protein, 9 aa, Homo sapiens
  Table A; Target 11900; HLA-C*07:02; BPIFA2; ENSG00000131050; CTA
VNSVINTLK

SEQ ID NO: 11901 - protein, 9 aa, Homo sapiens
  Table A; Target 11901; HLA-C*07:06; BPIFA2; ENSG00000131050; CTA
VNSVINTLK

SEQ ID NO: 11902 - protein, 9 aa, Homo sapiens
  Table A; Target 11902; HLA-C*12:03; BPIFA2; ENSG00000131050; CTA
VNSVINTLK

SEQ ID NO: 11903 - protein, 8 aa, Homo sapiens
  Table A; Target 11903; HLA-C*04:01; BPIFA2; ENSG00000131050; CTA
VNVIQQVV

SEQ ID NO: 11904 - protein, 8 aa, Homo sapiens
  Table A; Target 11904; HLA-C*06:02; BPIFA2; ENSG00000131050; CTA
VNVIQQVV

SEQ ID NO: 11905 - protein, 8 aa, Homo sapiens
  Table A; Target 11905; HLA-C*07:01; BPIFA2; ENSG00000131050; CTA
VNVIQQVV

SEQ ID NO: 11906 - protein, 8 aa, Homo sapiens
  Table A; Target 11906; HLA-C*07:02; BPIFA2; ENSG00000131050; CTA
VNVIQQVV

SEQ ID NO: 11907 - protein, 8 aa, Homo sapiens
  Table A; Target 11907; HLA-C*12:03; BPIFA2; ENSG00000131050; CTA
VNVIQQVV

SEQ ID NO: 11908 - protein, 10 aa, Homo sapiens
  Table A; Target 11908; HLA-C*04:01; BPIFA2; ENSG00000131050; CTA
VNVIQQVVDN

SEQ ID NO: 11909 - protein, 10 aa, Homo sapiens
  Table A; Target 11909; HLA-C*06:02; BPIFA2; ENSG00000131050; CTA
VNVIQQVVDN

SEQ ID NO: 11910 - protein, 10 aa, Homo sapiens
  Table A; Target 11910; HLA-C*07:01; BPIFA2; ENSG00000131050; CTA
VNVIQQVVDN

SEQ ID NO: 11911 - protein, 9 aa, Homo sapiens
  Table A; Target 11911; HLA-B*07:02; BPIFA2; ENSG00000131050; CTA
VSSLLQKEI

SEQ ID NO: 11912 - protein, 9 aa, Homo sapiens
  Table A; Target 11912; HLA-B*13:02; BPIFA2; ENSG00000131050; CTA
VSSLLQKEI

SEQ ID NO: 11913 - protein, 9 aa, Homo sapiens
  Table A; Target 11913; HLA-B*57:01; BPIFA2; ENSG00000131050; CTA
VSSLLQKEI

SEQ ID NO: 11914 - protein, 9 aa, Homo sapiens
  Table A; Target 11914; HLA-B*58:01; BPIFA2; ENSG00000131050; CTA
VSSLLQKEI

SEQ ID NO: 11915 - protein, 9 aa, Homo sapiens
  Table A; Target 11915; HLA-C*06:02; BPIFA2; ENSG00000131050; CTA
VSSLLQKEI

SEQ ID NO: 11916 - protein, 9 aa, Homo sapiens
  Table A; Target 11916; HLA-C*07:01; BPIFA2; ENSG00000131050; CTA
VSSLLQKEI

SEQ ID NO: 11917 - protein, 9 aa, Homo sapiens
  Table A; Target 11917; HLA-C*07:02; BPIFA2; ENSG00000131050; CTA
VSSLLQKEI

SEQ ID NO: 11918 - protein, 9 aa, Homo sapiens
  Table A; Target 11918; HLA-C*12:03; BPIFA2; ENSG00000131050; CTA
VSSLLQKEI

SEQ ID NO: 11919 - protein, 9 aa, Homo sapiens
  Table A; Target 11919; HLA-C*16:01; BPIFA2; ENSG00000131050; CTA
VSSLLQKEI

SEQ ID NO: 11920 - protein, 9 aa, Homo sapiens
  Table A; Target 11920; HLA-C*16:02; BPIFA2; ENSG00000131050; CTA
VSSLLQKEI

SEQ ID NO: 11921 - protein, 9 aa, Homo sapiens
  Table A; Target 11921; HLA-C*16:04; BPIFA2; ENSG00000131050; CTA
VSSLLQKEI

SEQ ID NO: 11922 - protein, 10 aa, Homo sapiens
  Table A; Target 11922; HLA-C*06:02; BPIFA2; ENSG00000131050; CTA
VTANVTVAGP

SEQ ID NO: 11923 - protein, 11 aa, Homo sapiens
  Table A; Target 11923; HLA-A*01:01; BPIFA2; ENSG00000131050; CTA
VTANVTVAGPI

SEQ ID NO: 11924 - protein, 8 aa, Homo sapiens
  Table A; Target 11924; HLA-C*03:03; BPIFA2; ENSG00000131050; CTA
VTIETDPQ

SEQ ID NO: 11925 - protein, 9 aa, Homo sapiens
  Table A; Target 11925; HLA-A*02:01; BPIFA2; ENSG00000131050; CTA
VTIETDPQT

SEQ ID NO: 11926 - protein, 9 aa, Homo sapiens
  Table A; Target 11926; HLA-B*35:03; BPIFA2; ENSG00000131050; CTA
VTIETDPQT

SEQ ID NO: 11927 - protein, 9 aa, Homo sapiens
  Table A; Target 11927; HLA-B*58:01; BPIFA2; ENSG00000131050; CTA
VTIETDPQT

SEQ ID NO: 11928 - protein, 9 aa, Homo sapiens
  Table A; Target 11928; HLA-C*03:03; BPIFA2; ENSG00000131050; CTA
VTIETDPQT

SEQ ID NO: 11929 - protein, 9 aa, Homo sapiens
  Table A; Target 11929; HLA-C*03:04; BPIFA2; ENSG00000131050; CTA
VTIETDPQT

SEQ ID NO: 11930 - protein, 9 aa, Homo sapiens
  Table A; Target 11930; HLA-C*04:01; BPIFA2; ENSG00000131050; CTA
VTIETDPQT

SEQ ID NO: 11931 - protein, 9 aa, Homo sapiens
  Table A; Target 11931; HLA-C*06:02; BPIFA2; ENSG00000131050; CTA
VTIETDPQT

SEQ ID NO: 11932 - protein, 9 aa, Homo sapiens
  Table A; Target 11932; HLA-C*07:01; BPIFA2; ENSG00000131050; CTA
VTIETDPQT

SEQ ID NO: 11933 - protein, 9 aa, Homo sapiens
  Table A; Target 11933; HLA-C*07:02; BPIFA2; ENSG00000131050; CTA
VTIETDPQT

SEQ ID NO: 11934 - protein, 9 aa, Homo sapiens
  Table A; Target 11934; HLA-C*07:04; BPIFA2; ENSG00000131050; CTA
VTIETDPQT

SEQ ID NO: 11935 - protein, 9 aa, Homo sapiens
  Table A; Target 11935; HLA-C*12:03; BPIFA2; ENSG00000131050; CTA
VTIETDPQT

SEQ ID NO: 11936 - protein, 9 aa, Homo sapiens
  Table A; Target 11936; HLA-C*16:02; BPIFA2; ENSG00000131050; CTA
VTIETDPQT

SEQ ID NO: 11937 - protein, 10 aa, Homo sapiens
  Table A; Target 11937; HLA-A*03:02; BPIFA2; ENSG00000131050; CTA
VTIETDPQTH

SEQ ID NO: 11938 - protein, 10 aa, Homo sapiens
  Table A; Target 11938; HLA-A*11:01; BPIFA2; ENSG00000131050; CTA
VTIETDPQTH

SEQ ID NO: 11939 - protein, 10 aa, Homo sapiens
  Table A; Target 11939; HLA-A*25:01; BPIFA2; ENSG00000131050; CTA
VTIETDPQTH

SEQ ID NO: 11940 - protein, 10 aa, Homo sapiens
  Table A; Target 11940; HLA-A*68:01; BPIFA2; ENSG00000131050; CTA
VTIETDPQTH

SEQ ID NO: 11941 - protein, 10 aa, Homo sapiens
  Table A; Target 11941; HLA-B*27:05; BPIFA2; ENSG00000131050; CTA
VTIETDPQTH

SEQ ID NO: 11942 - protein, 10 aa, Homo sapiens
  Table A; Target 11942; HLA-B*57:01; BPIFA2; ENSG00000131050; CTA
VTIETDPQTH

SEQ ID NO: 11943 - protein, 10 aa, Homo sapiens
  Table A; Target 11943; HLA-B*58:01; BPIFA2; ENSG00000131050; CTA
VTIETDPQTH

SEQ ID NO: 11944 - protein, 10 aa, Homo sapiens
  Table A; Target 11944; HLA-C*06:02; BPIFA2; ENSG00000131050; CTA
VTIETDPQTH

SEQ ID NO: 11945 - protein, 10 aa, Homo sapiens
  Table A; Target 11945; HLA-C*07:01; BPIFA2; ENSG00000131050; CTA
VTIETDPQTH

SEQ ID NO: 11946 - protein, 10 aa, Homo sapiens
  Table A; Target 11946; HLA-C*07:06; BPIFA2; ENSG00000131050; CTA
VTIETDPQTH

SEQ ID NO: 11947 - protein, 10 aa, Homo sapiens
  Table A; Target 11947; HLA-C*12:03; BPIFA2; ENSG00000131050; CTA
VTIETDPQTH

SEQ ID NO: 11948 - protein, 10 aa, Homo sapiens
  Table A; Target 11948; HLA-C*16:02; BPIFA2; ENSG00000131050; CTA
VTIETDPQTH

SEQ ID NO: 11949 - protein, 8 aa, Homo sapiens
  Table A; Target 11949; HLA-A*23:01; BPIFA2; ENSG00000131050; CTA
VTVAGPII

SEQ ID NO: 11950 - protein, 8 aa, Homo sapiens
  Table A; Target 11950; HLA-B*40:02; BPIFA2; ENSG00000131050; CTA
VTVAGPII

SEQ ID NO: 11951 - protein, 8 aa, Homo sapiens
  Table A; Target 11951; HLA-B*51:01; BPIFA2; ENSG00000131050; CTA
VTVAGPII

SEQ ID NO: 11952 - protein, 8 aa, Homo sapiens
  Table A; Target 11952; HLA-B*58:01; BPIFA2; ENSG00000131050; CTA
VTVAGPII

SEQ ID NO: 11953 - protein, 8 aa, Homo sapiens
  Table A; Target 11953; HLA-C*03:03; BPIFA2; ENSG00000131050; CTA
VTVAGPII

SEQ ID NO: 11954 - protein, 8 aa, Homo sapiens
  Table A; Target 11954; HLA-C*03:04; BPIFA2; ENSG00000131050; CTA
VTVAGPII

SEQ ID NO: 11955 - protein, 8 aa, Homo sapiens
  Table A; Target 11955; HLA-C*04:01; BPIFA2; ENSG00000131050; CTA
VTVAGPII

SEQ ID NO: 11956 - protein, 8 aa, Homo sapiens
  Table A; Target 11956; HLA-C*06:02; BPIFA2; ENSG00000131050; CTA
VTVAGPII

SEQ ID NO: 11957 - protein, 8 aa, Homo sapiens
  Table A; Target 11957; HLA-C*07:01; BPIFA2; ENSG00000131050; CTA
VTVAGPII

SEQ ID NO: 11958 - protein, 8 aa, Homo sapiens
  Table A; Target 11958; HLA-C*12:03; BPIFA2; ENSG00000131050; CTA
VTVAGPII

SEQ ID NO: 11959 - protein, 8 aa, Homo sapiens
  Table A; Target 11959; HLA-C*16:01; BPIFA2; ENSG00000131050; CTA
VTVAGPII

SEQ ID NO: 11960 - protein, 10 aa, Homo sapiens
  Table A; Target 11960; HLA-A*11:01; BPIFA2; ENSG00000131050; CTA
VTVAGPIIGQ

SEQ ID NO: 11961 - protein, 10 aa, Homo sapiens
  Table A; Target 11961; HLA-A*26:01; BPIFA2; ENSG00000131050; CTA
VTVAGPIIGQ

SEQ ID NO: 11962 - protein, 10 aa, Homo sapiens
  Table A; Target 11962; HLA-A*31:01; BPIFA2; ENSG00000131050; CTA
VTVAGPIIGQ

SEQ ID NO: 11963 - protein, 10 aa, Homo sapiens
  Table A; Target 11963; HLA-A*68:02; BPIFA2; ENSG00000131050; CTA
VTVAGPIIGQ

SEQ ID NO: 11964 - protein, 10 aa, Homo sapiens
  Table A; Target 11964; HLA-B*07:02; BPIFA2; ENSG00000131050; CTA
VTVAGPIIGQ

SEQ ID NO: 11965 - protein, 10 aa, Homo sapiens
  Table A; Target 11965; HLA-B*27:02; BPIFA2; ENSG00000131050; CTA
VTVAGPIIGQ

SEQ ID NO: 11966 - protein, 10 aa, Homo sapiens
  Table A; Target 11966; HLA-B*57:01; BPIFA2; ENSG00000131050; CTA
VTVAGPIIGQ

SEQ ID NO: 11967 - protein, 10 aa, Homo sapiens
  Table A; Target 11967; HLA-C*04:01; BPIFA2; ENSG00000131050; CTA
VTVAGPIIGQ

SEQ ID NO: 11968 - protein, 10 aa, Homo sapiens
  Table A; Target 11968; HLA-C*06:02; BPIFA2; ENSG00000131050; CTA
VTVAGPIIGQ

SEQ ID NO: 11969 - protein, 10 aa, Homo sapiens
  Table A; Target 11969; HLA-C*07:01; BPIFA2; ENSG00000131050; CTA
VTVAGPIIGQ

SEQ ID NO: 11970 - protein, 10 aa, Homo sapiens
  Table A; Target 11970; HLA-C*07:02; BPIFA2; ENSG00000131050; CTA
VTVAGPIIGQ

SEQ ID NO: 11971 - protein, 10 aa, Homo sapiens
  Table A; Target 11971; HLA-C*12:03; BPIFA2; ENSG00000131050; CTA
VTVAGPIIGQ

SEQ ID NO: 11972 - protein, 11 aa, Homo sapiens
  Table A; Target 11972; HLA-A*02:03; BPIFA2; ENSG00000131050; CTA
VTVAGPIIGQI

SEQ ID NO: 11973 - protein, 11 aa, Homo sapiens
  Table A; Target 11973; HLA-A*26:01; BPIFA2; ENSG00000131050; CTA
VTVAGPIIGQI

SEQ ID NO: 11974 - protein, 11 aa, Homo sapiens
  Table A; Target 11974; HLA-A*68:02; BPIFA2; ENSG00000131050; CTA
VTVAGPIIGQI

SEQ ID NO: 11975 - protein, 11 aa, Homo sapiens
  Table A; Target 11975; HLA-C*06:02; BPIFA2; ENSG00000131050; CTA
VTVAGPIIGQI

SEQ ID NO: 11976 - protein, 8 aa, Homo sapiens
  Table A; Target 11976; HLA-C*05:01; BPIFA2; ENSG00000131050; CTA
VVDKLEPV

SEQ ID NO: 11977 - protein, 9 aa, Homo sapiens
  Table A; Target 11977; HLA-A*01:01; BPIFA2; ENSG00000131050; CTA
VVDKLEPVL

SEQ ID NO: 11978 - protein, 9 aa, Homo sapiens
  Table A; Target 11978; HLA-A*02:01; BPIFA2; ENSG00000131050; CTA
VVDKLEPVL

SEQ ID NO: 11979 - protein, 9 aa, Homo sapiens
  Table A; Target 11979; HLA-A*02:04; BPIFA2; ENSG00000131050; CTA
VVDKLEPVL

SEQ ID NO: 11980 - protein, 9 aa, Homo sapiens
  Table A; Target 11980; HLA-A*02:07; BPIFA2; ENSG00000131050; CTA
VVDKLEPVL

SEQ ID NO: 11981 - protein, 9 aa, Homo sapiens
  Table A; Target 11981; HLA-A*03:02; BPIFA2; ENSG00000131050; CTA
VVDKLEPVL

SEQ ID NO: 11982 - protein, 9 aa, Homo sapiens
  Table A; Target 11982; HLA-A*23:01; BPIFA2; ENSG00000131050; CTA
VVDKLEPVL

SEQ ID NO: 11983 - protein, 9 aa, Homo sapiens
  Table A; Target 11983; HLA-A*24:02; BPIFA2; ENSG00000131050; CTA
VVDKLEPVL

SEQ ID NO: 11984 - protein, 9 aa, Homo sapiens
  Table A; Target 11984; HLA-A*30:01; BPIFA2; ENSG00000131050; CTA
VVDKLEPVL

SEQ ID NO: 11985 - protein, 9 aa, Homo sapiens
  Table A; Target 11985; HLA-A*32:01; BPIFA2; ENSG00000131050; CTA
VVDKLEPVL

SEQ ID NO: 11986 - protein, 9 aa, Homo sapiens
  Table A; Target 11986; HLA-A*68:02; BPIFA2; ENSG00000131050; CTA
VVDKLEPVL

SEQ ID NO: 11987 - protein, 9 aa, Homo sapiens
  Table A; Target 11987; HLA-B*07:02; BPIFA2; ENSG00000131050; CTA
VVDKLEPVL

SEQ ID NO: 11988 - protein, 9 aa, Homo sapiens
  Table A; Target 11988; HLA-B*13:02; BPIFA2; ENSG00000131050; CTA
VVDKLEPVL

SEQ ID NO: 11989 - protein, 9 aa, Homo sapiens
  Table A; Target 11989; HLA-B*27:05; BPIFA2; ENSG00000131050; CTA
VVDKLEPVL

SEQ ID NO: 11990 - protein, 9 aa, Homo sapiens
  Table A; Target 11990; HLA-B*35:01; BPIFA2; ENSG00000131050; CTA
VVDKLEPVL

SEQ ID NO: 11991 - protein, 9 aa, Homo sapiens
  Table A; Target 11991; HLA-B*35:03; BPIFA2; ENSG00000131050; CTA
VVDKLEPVL

SEQ ID NO: 11992 - protein, 9 aa, Homo sapiens
  Table A; Target 11992; HLA-B*38:01; BPIFA2; ENSG00000131050; CTA
VVDKLEPVL

SEQ ID NO: 11993 - protein, 9 aa, Homo sapiens
  Table A; Target 11993; HLA-B*39:01; BPIFA2; ENSG00000131050; CTA
VVDKLEPVL

SEQ ID NO: 11994 - protein, 9 aa, Homo sapiens
  Table A; Target 11994; HLA-B*40:01; BPIFA2; ENSG00000131050; CTA
VVDKLEPVL

SEQ ID NO: 11995 - protein, 9 aa, Homo sapiens
  Table A; Target 11995; HLA-B*40:02; BPIFA2; ENSG00000131050; CTA
VVDKLEPVL

SEQ ID NO: 11996 - protein, 9 aa, Homo sapiens
  Table A; Target 11996; HLA-B*51:01; BPIFA2; ENSG00000131050; CTA
VVDKLEPVL

SEQ ID NO: 11997 - protein, 9 aa, Homo sapiens
  Table A; Target 11997; HLA-B*55:01; BPIFA2; ENSG00000131050; CTA
VVDKLEPVL

SEQ ID NO: 11998 - protein, 9 aa, Homo sapiens
  Table A; Target 11998; HLA-B*57:01; BPIFA2; ENSG00000131050; CTA
VVDKLEPVL

SEQ ID NO: 11999 - protein, 9 aa, Homo sapiens
  Table A; Target 11999; HLA-B*58:01; BPIFA2; ENSG00000131050; CTA
VVDKLEPVL

SEQ ID NO: 12000 - protein, 9 aa, Homo sapiens
  Table A; Target 12000; HLA-C*02:02; BPIFA2; ENSG00000131050; CTA
VVDKLEPVL

SEQ ID NO: 12001 - protein, 9 aa, Homo sapiens
  Table A; Target 12001; HLA-C*03:03; BPIFA2; ENSG00000131050; CTA
VVDKLEPVL

SEQ ID NO: 12002 - protein, 9 aa, Homo sapiens
  Table A; Target 12002; HLA-C*03:04; BPIFA2; ENSG00000131050; CTA
VVDKLEPVL

SEQ ID NO: 12003 - protein, 9 aa, Homo sapiens
  Table A; Target 12003; HLA-C*04:01; BPIFA2; ENSG00000131050; CTA
VVDKLEPVL

SEQ ID NO: 12004 - protein, 9 aa, Homo sapiens
  Table A; Target 12004; HLA-C*05:01; BPIFA2; ENSG00000131050; CTA
VVDKLEPVL

SEQ ID NO: 12005 - protein, 9 aa, Homo sapiens
  Table A; Target 12005; HLA-C*06:02; BPIFA2; ENSG00000131050; CTA
VVDKLEPVL

SEQ ID NO: 12006 - protein, 9 aa, Homo sapiens
  Table A; Target 12006; HLA-C*07:01; BPIFA2; ENSG00000131050; CTA
VVDKLEPVL

SEQ ID NO: 12007 - protein, 9 aa, Homo sapiens
  Table A; Target 12007; HLA-C*07:02; BPIFA2; ENSG00000131050; CTA
VVDKLEPVL

SEQ ID NO: 12008 - protein, 9 aa, Homo sapiens
  Table A; Target 12008; HLA-C*07:04; BPIFA2; ENSG00000131050; CTA
VVDKLEPVL

SEQ ID NO: 12009 - protein, 9 aa, Homo sapiens
  Table A; Target 12009; HLA-C*12:03; BPIFA2; ENSG00000131050; CTA
VVDKLEPVL

SEQ ID NO: 12010 - protein, 9 aa, Homo sapiens
  Table A; Target 12010; HLA-C*16:02; BPIFA2; ENSG00000131050; CTA
VVDKLEPVL

SEQ ID NO: 12011 - protein, 10 aa, Homo sapiens
  Table A; Target 12011; HLA-A*01:01; BPIFA2; ENSG00000131050; CTA
VVDKLEPVLH

SEQ ID NO: 12012 - protein, 8 aa, Homo sapiens
  Table A; Target 12012; HLA-A*01:01; BPIFA2; ENSG00000131050; CTA
VVDNPQHK

SEQ ID NO: 12013 - protein, 8 aa, Homo sapiens
  Table A; Target 12013; HLA-A*03:01; BPIFA2; ENSG00000131050; CTA
VVDNPQHK

SEQ ID NO: 12014 - protein, 8 aa, Homo sapiens
  Table A; Target 12014; HLA-A*03:02; BPIFA2; ENSG00000131050; CTA
VVDNPQHK

SEQ ID NO: 12015 - protein, 8 aa, Homo sapiens
  Table A; Target 12015; HLA-A*11:01; BPIFA2; ENSG00000131050; CTA
VVDNPQHK

SEQ ID NO: 12016 - protein, 8 aa, Homo sapiens
  Table A; Target 12016; HLA-C*04:01; BPIFA2; ENSG00000131050; CTA
VVDNPQHK

SEQ ID NO: 12017 - protein, 8 aa, Homo sapiens
  Table A; Target 12017; HLA-C*05:01; BPIFA2; ENSG00000131050; CTA
VVDNPQHK

SEQ ID NO: 12018 - protein, 9 aa, Homo sapiens
  Table A; Target 12018; HLA-A*01:01; BPIFA2; ENSG00000131050; CTA
VVDNPQHKT

SEQ ID NO: 12019 - protein, 9 aa, Homo sapiens
  Table A; Target 12019; HLA-A*02:07; BPIFA2; ENSG00000131050; CTA
VVDNPQHKT

SEQ ID NO: 12020 - protein, 9 aa, Homo sapiens
  Table A; Target 12020; HLA-A*03:02; BPIFA2; ENSG00000131050; CTA
VVDNPQHKT

SEQ ID NO: 12021 - protein, 9 aa, Homo sapiens
  Table A; Target 12021; HLA-A*32:01; BPIFA2; ENSG00000131050; CTA
VVDNPQHKT

SEQ ID NO: 12022 - protein, 9 aa, Homo sapiens
  Table A; Target 12022; HLA-B*27:05; BPIFA2; ENSG00000131050; CTA
VVDNPQHKT

SEQ ID NO: 12023 - protein, 9 aa, Homo sapiens
  Table A; Target 12023; HLA-B*38:01; BPIFA2; ENSG00000131050; CTA
VVDNPQHKT

SEQ ID NO: 12024 - protein, 9 aa, Homo sapiens
  Table A; Target 12024; HLA-B*55:01; BPIFA2; ENSG00000131050; CTA
VVDNPQHKT

SEQ ID NO: 12025 - protein, 9 aa, Homo sapiens
  Table A; Target 12025; HLA-B*58:01; BPIFA2; ENSG00000131050; CTA
VVDNPQHKT

SEQ ID NO: 12026 - protein, 9 aa, Homo sapiens
  Table A; Target 12026; HLA-C*05:01; BPIFA2; ENSG00000131050; CTA
VVDNPQHKT

SEQ ID NO: 12027 - protein, 9 aa, Homo sapiens
  Table A; Target 12027; HLA-C*06:02; BPIFA2; ENSG00000131050; CTA
VVDNPQHKT

SEQ ID NO: 12028 - protein, 9 aa, Homo sapiens
  Table A; Target 12028; HLA-C*16:02; BPIFA2; ENSG00000131050; CTA
VVDNPQHKT

SEQ ID NO: 12029 - protein, 10 aa, Homo sapiens
  Table A; Target 12029; HLA-C*12:03; BPIFA2; ENSG00000131050; CTA
VVDNPQHKTQ

SEQ ID NO: 12030 - protein, 10 aa, Homo sapiens
  Table A; Target 12030; HLA-C*16:02; BPIFA2; ENSG00000131050; CTA
VVDNPQHKTQ

SEQ ID NO: 12031 - protein, 11 aa, Homo sapiens
  Table A; Target 12031; HLA-A*01:01; BPIFA2; ENSG00000131050; CTA
VVDNPQHKTQL

SEQ ID NO: 12032 - protein, 11 aa, Homo sapiens
  Table A; Target 12032; HLA-A*02:01; BPIFA2; ENSG00000131050; CTA
VVDNPQHKTQL

SEQ ID NO: 12033 - protein, 11 aa, Homo sapiens
  Table A; Target 12033; HLA-A*02:07; BPIFA2; ENSG00000131050; CTA
VVDNPQHKTQL

SEQ ID NO: 12034 - protein, 11 aa, Homo sapiens
  Table A; Target 12034; HLA-A*03:01; BPIFA2; ENSG00000131050; CTA
VVDNPQHKTQL

SEQ ID NO: 12035 - protein, 11 aa, Homo sapiens
  Table A; Target 12035; HLA-A*23:01; BPIFA2; ENSG00000131050; CTA
VVDNPQHKTQL

SEQ ID NO: 12036 - protein, 11 aa, Homo sapiens
  Table A; Target 12036; HLA-A*24:02; BPIFA2; ENSG00000131050; CTA
VVDNPQHKTQL

SEQ ID NO: 12037 - protein, 11 aa, Homo sapiens
  Table A; Target 12037; HLA-A*31:01; BPIFA2; ENSG00000131050; CTA
VVDNPQHKTQL

SEQ ID NO: 12038 - protein, 11 aa, Homo sapiens
  Table A; Target 12038; HLA-A*32:01; BPIFA2; ENSG00000131050; CTA
VVDNPQHKTQL

SEQ ID NO: 12039 - protein, 11 aa, Homo sapiens
  Table A; Target 12039; HLA-A*68:02; BPIFA2; ENSG00000131050; CTA
VVDNPQHKTQL

SEQ ID NO: 12040 - protein, 11 aa, Homo sapiens
  Table A; Target 12040; HLA-B*27:05; BPIFA2; ENSG00000131050; CTA
VVDNPQHKTQL

SEQ ID NO: 12041 - protein, 11 aa, Homo sapiens
  Table A; Target 12041; HLA-B*35:03; BPIFA2; ENSG00000131050; CTA
VVDNPQHKTQL

SEQ ID NO: 12042 - protein, 11 aa, Homo sapiens
  Table A; Target 12042; HLA-B*38:01; BPIFA2; ENSG00000131050; CTA
VVDNPQHKTQL

SEQ ID NO: 12043 - protein, 11 aa, Homo sapiens
  Table A; Target 12043; HLA-B*55:01; BPIFA2; ENSG00000131050; CTA
VVDNPQHKTQL

SEQ ID NO: 12044 - protein, 11 aa, Homo sapiens
  Table A; Target 12044; HLA-C*03:04; BPIFA2; ENSG00000131050; CTA
VVDNPQHKTQL

SEQ ID NO: 12045 - protein, 11 aa, Homo sapiens
  Table A; Target 12045; HLA-C*04:01; BPIFA2; ENSG00000131050; CTA
VVDNPQHKTQL

SEQ ID NO: 12046 - protein, 11 aa, Homo sapiens
  Table A; Target 12046; HLA-C*05:01; BPIFA2; ENSG00000131050; CTA
VVDNPQHKTQL

SEQ ID NO: 12047 - protein, 11 aa, Homo sapiens
  Table A; Target 12047; HLA-C*07:04; BPIFA2; ENSG00000131050; CTA
VVDNPQHKTQL

SEQ ID NO: 12048 - protein, 11 aa, Homo sapiens
  Table A; Target 12048; HLA-C*12:03; BPIFA2; ENSG00000131050; CTA
VVDNPQHKTQL

SEQ ID NO: 12049 - protein, 11 aa, Homo sapiens
  Table A; Target 12049; HLA-C*16:02; BPIFA2; ENSG00000131050; CTA
VVDNPQHKTQL

SEQ ID NO: 12050 - protein, 10 aa, Homo sapiens
  Table A; Target 12050; HLA-A*11:01; BSND; ENSG00000162399; TAA
AAYDQSLPDF

SEQ ID NO: 12051 - protein, 10 aa, Homo sapiens
  Table A; Target 12051; HLA-A*23:01; BSND; ENSG00000162399; TAA
AAYDQSLPDF

SEQ ID NO: 12052 - protein, 10 aa, Homo sapiens
  Table A; Target 12052; HLA-A*25:01; BSND; ENSG00000162399; TAA
AAYDQSLPDF

SEQ ID NO: 12053 - protein, 10 aa, Homo sapiens
  Table A; Target 12053; HLA-A*26:01; BSND; ENSG00000162399; TAA
AAYDQSLPDF

SEQ ID NO: 12054 - protein, 10 aa, Homo sapiens
  Table A; Target 12054; HLA-A*30:02; BSND; ENSG00000162399; TAA
AAYDQSLPDF

SEQ ID NO: 12055 - protein, 10 aa, Homo sapiens
  Table A; Target 12055; HLA-B*46:01; BSND; ENSG00000162399; TAA
AAYDQSLPDF

SEQ ID NO: 12056 - protein, 10 aa, Homo sapiens
  Table A; Target 12056; HLA-B*58:01; BSND; ENSG00000162399; TAA
AAYDQSLPDF

SEQ ID NO: 12057 - protein, 10 aa, Homo sapiens
  Table A; Target 12057; HLA-C*02:02; BSND; ENSG00000162399; TAA
AAYDQSLPDF

SEQ ID NO: 12058 - protein, 10 aa, Homo sapiens
  Table A; Target 12058; HLA-C*16:04; BSND; ENSG00000162399; TAA
AAYDQSLPDF

SEQ ID NO: 12059 - protein, 9 aa, Homo sapiens
  Table A; Target 12059; HLA-C*01:02; BSND; ENSG00000162399; TAA
ACPQGPAPL

SEQ ID NO: 12060 - protein, 8 aa, Homo sapiens
  Table A; Target 12060; HLA-B*37:01; BSND; ENSG00000162399; TAA
ADEKTFRI

SEQ ID NO: 12061 - protein, 8 aa, Homo sapiens
  Table A; Target 12061; HLA-B*37:01; BSND; ENSG00000162399; TAA
ADSDFQGI

SEQ ID NO: 12062 - protein, 9 aa, Homo sapiens
  Table A; Target 12062; HLA-B*37:01; BSND; ENSG00000162399; TAA
ADSDFQGIL

SEQ ID NO: 12063 - protein, 9 aa, Homo sapiens
  Table A; Target 12063; HLA-B*40:01; BSND; ENSG00000162399; TAA
ADSDFQGIL

SEQ ID NO: 12064 - protein, 8 aa, Homo sapiens
  Table A; Target 12064; HLA-B*40:02; BSND; ENSG00000162399; TAA
AEMKSPSP

SEQ ID NO: 12065 - protein, 8 aa, Homo sapiens
  Table A; Target 12065; HLA-B*49:01; BSND; ENSG00000162399; TAA
AEMKSPSP

SEQ ID NO: 12066 - protein, 10 aa, Homo sapiens
  Table A; Target 12066; HLA-B*49:01; BSND; ENSG00000162399; TAA
AEMKSPSPQP

SEQ ID NO: 12067 - protein, 9 aa, Homo sapiens
  Table A; Target 12067; HLA-A*03:01; BSND; ENSG00000162399; TAA
ALGTFLMSH

SEQ ID NO: 12068 - protein, 9 aa, Homo sapiens
  Table A; Target 12068; HLA-A*03:02; BSND; ENSG00000162399; TAA
ALGTFLMSH

SEQ ID NO: 12069 - protein, 8 aa, Homo sapiens
  Table A; Target 12069; HLA-A*02:01; BSND; ENSG00000162399; TAA
ALIDAPTL

SEQ ID NO: 12070 - protein, 8 aa, Homo sapiens
  Table A; Target 12070; HLA-A*02:03; BSND; ENSG00000162399; TAA
ALIDAPTL

SEQ ID NO: 12071 - protein, 8 aa, Homo sapiens
  Table A; Target 12071; HLA-A*02:04; BSND; ENSG00000162399; TAA
ALIDAPTL

SEQ ID NO: 12072 - protein, 8 aa, Homo sapiens
  Table A; Target 12072; HLA-A*02:07; BSND; ENSG00000162399; TAA
ALIDAPTL

SEQ ID NO: 12073 - protein, 8 aa, Homo sapiens
  Table A; Target 12073; HLA-A*23:01; BSND; ENSG00000162399; TAA
ALIDAPTL

SEQ ID NO: 12074 - protein, 8 aa, Homo sapiens
  Table A; Target 12074; HLA-A*30:01; BSND; ENSG00000162399; TAA
ALIDAPTL

SEQ ID NO: 12075 - protein, 8 aa, Homo sapiens
  Table A; Target 12075; HLA-A*32:01; BSND; ENSG00000162399; TAA
ALIDAPTL

SEQ ID NO: 12076 - protein, 8 aa, Homo sapiens
  Table A; Target 12076; HLA-B*13:02; BSND; ENSG00000162399; TAA
ALIDAPTL

SEQ ID NO: 12077 - protein, 8 aa, Homo sapiens
  Table A; Target 12077; HLA-B*15:01; BSND; ENSG00000162399; TAA
ALIDAPTL

SEQ ID NO: 12078 - protein, 8 aa, Homo sapiens
  Table A; Target 12078; HLA-B*27:05; BSND; ENSG00000162399; TAA
ALIDAPTL

SEQ ID NO: 12079 - protein, 8 aa, Homo sapiens
  Table A; Target 12079; HLA-B*37:01; BSND; ENSG00000162399; TAA
ALIDAPTL

SEQ ID NO: 12080 - protein, 8 aa, Homo sapiens
  Table A; Target 12080; HLA-B*39:01; BSND; ENSG00000162399; TAA
ALIDAPTL

SEQ ID NO: 12081 - protein, 8 aa, Homo sapiens
  Table A; Target 12081; HLA-B*40:01; BSND; ENSG00000162399; TAA
ALIDAPTL

SEQ ID NO: 12082 - protein, 8 aa, Homo sapiens
  Table A; Target 12082; HLA-B*40:02; BSND; ENSG00000162399; TAA
ALIDAPTL

SEQ ID NO: 12083 - protein, 8 aa, Homo sapiens
  Table A; Target 12083; HLA-B*46:01; BSND; ENSG00000162399; TAA
ALIDAPTL

SEQ ID NO: 12084 - protein, 8 aa, Homo sapiens
  Table A; Target 12084; HLA-B*55:01; BSND; ENSG00000162399; TAA
ALIDAPTL

SEQ ID NO: 12085 - protein, 8 aa, Homo sapiens
  Table A; Target 12085; HLA-B*58:01; BSND; ENSG00000162399; TAA
ALIDAPTL

SEQ ID NO: 12086 - protein, 8 aa, Homo sapiens
  Table A; Target 12086; HLA-C*01:02; BSND; ENSG00000162399; TAA
ALIDAPTL

SEQ ID NO: 12087 - protein, 8 aa, Homo sapiens
  Table A; Target 12087; HLA-C*02:02; BSND; ENSG00000162399; TAA
ALIDAPTL

SEQ ID NO: 12088 - protein, 8 aa, Homo sapiens
  Table A; Target 12088; HLA-C*03:03; BSND; ENSG00000162399; TAA
ALIDAPTL

SEQ ID NO: 12089 - protein, 8 aa, Homo sapiens
  Table A; Target 12089; HLA-C*03:04; BSND; ENSG00000162399; TAA
ALIDAPTL

SEQ ID NO: 12090 - protein, 8 aa, Homo sapiens
  Table A; Target 12090; HLA-C*14:02; BSND; ENSG00000162399; TAA
ALIDAPTL

SEQ ID NO: 12091 - protein, 8 aa, Homo sapiens
  Table A; Target 12091; HLA-C*16:02; BSND; ENSG00000162399; TAA
ALIDAPTL

SEQ ID NO: 12092 - protein, 9 aa, Homo sapiens
  Table A; Target 12092; HLA-A*29:02; BSND; ENSG00000162399; TAA
ALPNNWQRY

SEQ ID NO: 12093 - protein, 8 aa, Homo sapiens
  Table A; Target 12093; HLA-A*02:01; BSND; ENSG00000162399; TAA
AMGSVMVI

SEQ ID NO: 12094 - protein, 8 aa, Homo sapiens
  Table A; Target 12094; HLA-A*02:03; BSND; ENSG00000162399; TAA
AMGSVMVI

SEQ ID NO: 12095 - protein, 8 aa, Homo sapiens
  Table A; Target 12095; HLA-A*30:01; BSND; ENSG00000162399; TAA
AMGSVMVI

SEQ ID NO: 12096 - protein, 8 aa, Homo sapiens
  Table A; Target 12096; HLA-A*32:01; BSND; ENSG00000162399; TAA
AMGSVMVI

SEQ ID NO: 12097 - protein, 8 aa, Homo sapiens
  Table A; Target 12097; HLA-B*13:02; BSND; ENSG00000162399; TAA
AMGSVMVI

SEQ ID NO: 12098 - protein, 8 aa, Homo sapiens
  Table A; Target 12098; HLA-C*07:01; BSND; ENSG00000162399; TAA
AMGSVMVI

SEQ ID NO: 12099 - protein, 8 aa, Homo sapiens
  Table A; Target 12099; HLA-C*07:04; BSND; ENSG00000162399; TAA
AMGSVMVI

SEQ ID NO: 12100 - protein, 8 aa, Homo sapiens
  Table A; Target 12100; HLA-C*12:03; BSND; ENSG00000162399; TAA
AMGSVMVI

SEQ ID NO: 12101 - protein, 9 aa, Homo sapiens
  Table A; Target 12101; HLA-B*07:02; BSND; ENSG00000162399; TAA
APEMGQPKL

SEQ ID NO: 12102 - protein, 9 aa, Homo sapiens
  Table A; Target 12102; HLA-B*35:01; BSND; ENSG00000162399; TAA
APEMGQPKL

SEQ ID NO: 12103 - protein, 9 aa, Homo sapiens
  Table A; Target 12103; HLA-B*35:03; BSND; ENSG00000162399; TAA
APEMGQPKL

SEQ ID NO: 12104 - protein, 9 aa, Homo sapiens
  Table A; Target 12104; HLA-B*38:01; BSND; ENSG00000162399; TAA
APEMGQPKL

SEQ ID NO: 12105 - protein, 9 aa, Homo sapiens
  Table A; Target 12105; HLA-B*39:01; BSND; ENSG00000162399; TAA
APEMGQPKL

SEQ ID NO: 12106 - protein, 9 aa, Homo sapiens
  Table A; Target 12106; HLA-B*40:01; BSND; ENSG00000162399; TAA
APEMGQPKL

SEQ ID NO: 12107 - protein, 9 aa, Homo sapiens
  Table A; Target 12107; HLA-B*55:01; BSND; ENSG00000162399; TAA
APEMGQPKL

SEQ ID NO: 12108 - protein, 9 aa, Homo sapiens
  Table A; Target 12108; HLA-C*07:02; BSND; ENSG00000162399; TAA
APEMGQPKL

SEQ ID NO: 12109 - protein, 9 aa, Homo sapiens
  Table A; Target 12109; HLA-C*05:01; BSND; ENSG00000162399; TAA
ASDTGGEEP

SEQ ID NO: 12110 - protein, 11 aa, Homo sapiens
  Table A; Target 12110; HLA-A*01:01; BSND; ENSG00000162399; TAA
ASDTGGEEPEK

SEQ ID NO: 12111 - protein, 9 aa, Homo sapiens
  Table A; Target 12111; HLA-A*23:01; BSND; ENSG00000162399; TAA
AWMEAAVVI

SEQ ID NO: 12112 - protein, 9 aa, Homo sapiens
  Table A; Target 12112; HLA-A*24:02; BSND; ENSG00000162399; TAA
AWMEAAVVI

SEQ ID NO: 12113 - protein, 9 aa, Homo sapiens
  Table A; Target 12113; HLA-A*23:01; BSND; ENSG00000162399; TAA
AYDQSLPDF

SEQ ID NO: 12114 - protein, 9 aa, Homo sapiens
  Table A; Target 12114; HLA-A*24:02; BSND; ENSG00000162399; TAA
AYDQSLPDF

SEQ ID NO: 12115 - protein, 9 aa, Homo sapiens
  Table A; Target 12115; HLA-A*32:01; BSND; ENSG00000162399; TAA
AYDQSLPDF

SEQ ID NO: 12116 - protein, 9 aa, Homo sapiens
  Table A; Target 12116; HLA-B*35:01; BSND; ENSG00000162399; TAA
AYDQSLPDF

SEQ ID NO: 12117 - protein, 9 aa, Homo sapiens
  Table A; Target 12117; HLA-B*35:03; BSND; ENSG00000162399; TAA
AYDQSLPDF

SEQ ID NO: 12118 - protein, 9 aa, Homo sapiens
  Table A; Target 12118; HLA-B*55:01; BSND; ENSG00000162399; TAA
AYDQSLPDF

SEQ ID NO: 12119 - protein, 9 aa, Homo sapiens
  Table A; Target 12119; HLA-C*04:01; BSND; ENSG00000162399; TAA
AYDQSLPDF

SEQ ID NO: 12120 - protein, 9 aa, Homo sapiens
  Table A; Target 12120; HLA-C*05:01; BSND; ENSG00000162399; TAA
AYDQSLPDF

SEQ ID NO: 12121 - protein, 9 aa, Homo sapiens
  Table A; Target 12121; HLA-C*07:04; BSND; ENSG00000162399; TAA
AYDQSLPDF

SEQ ID NO: 12122 - protein, 9 aa, Homo sapiens
  Table A; Target 12122; HLA-C*14:02; BSND; ENSG00000162399; TAA
AYDQSLPDF

SEQ ID NO: 12123 - protein, 9 aa, Homo sapiens
  Table A; Target 12123; HLA-B*07:02; BSND; ENSG00000162399; TAA
CPLDRFQDF

SEQ ID NO: 12124 - protein, 9 aa, Homo sapiens
  Table A; Target 12124; HLA-B*54:01; BSND; ENSG00000162399; TAA
CPQGPAPLA

SEQ ID NO: 12125 - protein, 9 aa, Homo sapiens
  Table A; Target 12125; HLA-B*55:01; BSND; ENSG00000162399; TAA
CPQGPAPLA

SEQ ID NO: 12126 - protein, 9 aa, Homo sapiens
  Table A; Target 12126; HLA-B*56:01; BSND; ENSG00000162399; TAA
CPQGPAPLA

SEQ ID NO: 12127 - protein, 9 aa, Homo sapiens
  Table A; Target 12127; HLA-B*18:01; BSND; ENSG00000162399; TAA
DEKTFRIGF

SEQ ID NO: 12128 - protein, 9 aa, Homo sapiens
  Table A; Target 12128; HLA-B*44:02; BSND; ENSG00000162399; TAA
DEKTFRIGF

SEQ ID NO: 12129 - protein, 9 aa, Homo sapiens
  Table A; Target 12129; HLA-B*44:03; BSND; ENSG00000162399; TAA
DEKTFRIGF

SEQ ID NO: 12130 - protein, 9 aa, Homo sapiens
  Table A; Target 12130; HLA-A*25:01; BSND; ENSG00000162399; TAA
DEPQEGQQW

SEQ ID NO: 12131 - protein, 9 aa, Homo sapiens
  Table A; Target 12131; HLA-B*18:01; BSND; ENSG00000162399; TAA
DEPQEGQQW

SEQ ID NO: 12132 - protein, 9 aa, Homo sapiens
  Table A; Target 12132; HLA-B*44:02; BSND; ENSG00000162399; TAA
DEPQEGQQW

SEQ ID NO: 12133 - protein, 9 aa, Homo sapiens
  Table A; Target 12133; HLA-B*44:03; BSND; ENSG00000162399; TAA
DEPQEGQQW

SEQ ID NO: 12134 - protein, 9 aa, Homo sapiens
  Table A; Target 12134; HLA-C*16:04; BSND; ENSG00000162399; TAA
DEPQEGQQW

SEQ ID NO: 12135 - protein, 9 aa, Homo sapiens
  Table A; Target 12135; HLA-B*18:01; BSND; ENSG00000162399; TAA
DESEGERRL

SEQ ID NO: 12136 - protein, 9 aa, Homo sapiens
  Table A; Target 12136; HLA-B*38:01; BSND; ENSG00000162399; TAA
DESEGERRL

SEQ ID NO: 12137 - protein, 9 aa, Homo sapiens
  Table A; Target 12137; HLA-B*40:01; BSND; ENSG00000162399; TAA
DESEGERRL

SEQ ID NO: 12138 - protein, 9 aa, Homo sapiens
  Table A; Target 12138; HLA-B*44:02; BSND; ENSG00000162399; TAA
DESEGERRL

SEQ ID NO: 12139 - protein, 9 aa, Homo sapiens
  Table A; Target 12139; HLA-B*44:03; BSND; ENSG00000162399; TAA
DESEGERRL

SEQ ID NO: 12140 - protein, 9 aa, Homo sapiens
  Table A; Target 12140; HLA-A*33:01; BSND; ENSG00000162399; TAA
DFQGILSPK

SEQ ID NO: 12141 - protein, 9 aa, Homo sapiens
  Table A; Target 12141; HLA-A*33:03; BSND; ENSG00000162399; TAA
DFQGILSPK

SEQ ID NO: 12142 - protein, 9 aa, Homo sapiens
  Table A; Target 12142; HLA-A*68:01; BSND; ENSG00000162399; TAA
DFQGILSPK

SEQ ID NO: 12143 - protein, 9 aa, Homo sapiens
  Table A; Target 12143; HLA-B*27:02; BSND; ENSG00000162399; TAA
DFQGILSPK

SEQ ID NO: 12144 - protein, 9 aa, Homo sapiens
  Table A; Target 12144; HLA-C*07:06; BSND; ENSG00000162399; TAA
DFQGILSPK

SEQ ID NO: 12145 - protein, 9 aa, Homo sapiens
  Table A; Target 12145; HLA-A*68:02; BSND; ENSG00000162399; TAA
DFSHIQMKV

SEQ ID NO: 12146 - protein, 10 aa, Homo sapiens
  Table A; Target 12146; HLA-A*25:01; BSND; ENSG00000162399; TAA
DLLPDKELGF

SEQ ID NO: 12147 - protein, 10 aa, Homo sapiens
  Table A; Target 12147; HLA-B*38:01; BSND; ENSG00000162399; TAA
DQSLPDFSHI

SEQ ID NO: 12148 - protein, 9 aa, Homo sapiens
  Table A; Target 12148; HLA-A*25:01; BSND; ENSG00000162399; TAA
DRPQVYGTF

SEQ ID NO: 12149 - protein, 10 aa, Homo sapiens
  Table A; Target 12149; HLA-B*27:02; BSND; ENSG00000162399; TAA
DRPQVYGTFY

SEQ ID NO: 12150 - protein, 10 aa, Homo sapiens
  Table A; Target 12150; HLA-C*07:01; BSND; ENSG00000162399; TAA
DRPQVYGTFY

SEQ ID NO: 12151 - protein, 8 aa, Homo sapiens
  Table A; Target 12151; HLA-C*05:01; BSND; ENSG00000162399; TAA
DSDFQGIL

SEQ ID NO: 12152 - protein, 9 aa, Homo sapiens
  Table A; Target 12152; HLA-A*01:01; BSND; ENSG00000162399; TAA
DSDFQGILS

SEQ ID NO: 12153 - protein, 11 aa, Homo sapiens
  Table A; Target 12153; HLA-A*01:01; BSND; ENSG00000162399; TAA
DSDFQGILSPK

SEQ ID NO: 12154 - protein, 11 aa, Homo sapiens
  Table A; Target 12154; HLA-A*03:02; BSND; ENSG00000162399; TAA
DSDFQGILSPK

SEQ ID NO: 12155 - protein, 11 aa, Homo sapiens
  Table A; Target 12155; HLA-A*11:01; BSND; ENSG00000162399; TAA
DSDFQGILSPK

SEQ ID NO: 12156 - protein, 11 aa, Homo sapiens
  Table A; Target 12156; HLA-A*33:01; BSND; ENSG00000162399; TAA
DSDFQGILSPK

SEQ ID NO: 12157 - protein, 11 aa, Homo sapiens
  Table A; Target 12157; HLA-A*68:01; BSND; ENSG00000162399; TAA
DSDFQGILSPK

SEQ ID NO: 12158 - protein, 11 aa, Homo sapiens
  Table A; Target 12158; HLA-B*27:02; BSND; ENSG00000162399; TAA
DSDFQGILSPK

SEQ ID NO: 12159 - protein, 8 aa, Homo sapiens
  Table A; Target 12159; HLA-A*03:01; BSND; ENSG00000162399; TAA
EAAVVIHK

SEQ ID NO: 12160 - protein, 8 aa, Homo sapiens
  Table A; Target 12160; HLA-A*03:02; BSND; ENSG00000162399; TAA
EAAVVIHK

SEQ ID NO: 12161 - protein, 8 aa, Homo sapiens
  Table A; Target 12161; HLA-A*11:01; BSND; ENSG00000162399; TAA
EAAVVIHK

SEQ ID NO: 12162 - protein, 8 aa, Homo sapiens
  Table A; Target 12162; HLA-A*33:01; BSND; ENSG00000162399; TAA
EAAVVIHK

SEQ ID NO: 12163 - protein, 8 aa, Homo sapiens
  Table A; Target 12163; HLA-A*33:03; BSND; ENSG00000162399; TAA
EAAVVIHK

SEQ ID NO: 12164 - protein, 8 aa, Homo sapiens
  Table A; Target 12164; HLA-A*68:01; BSND; ENSG00000162399; TAA
EAAVVIHK

SEQ ID NO: 12165 - protein, 8 aa, Homo sapiens
  Table A; Target 12165; HLA-B*27:02; BSND; ENSG00000162399; TAA
EAAVVIHK

SEQ ID NO: 12166 - protein, 8 aa, Homo sapiens
  Table A; Target 12166; HLA-B*51:01; BSND; ENSG00000162399; TAA
EAAVVIHK

SEQ ID NO: 12167 - protein, 8 aa, Homo sapiens
  Table A; Target 12167; HLA-C*07:01; BSND; ENSG00000162399; TAA
EAAVVIHK

SEQ ID NO: 12168 - protein, 8 aa, Homo sapiens
  Table A; Target 12168; HLA-C*07:06; BSND; ENSG00000162399; TAA
EAAVVIHK

SEQ ID NO: 12169 - protein, 9 aa, Homo sapiens
  Table A; Target 12169; HLA-A*26:01; BSND; ENSG00000162399; TAA
EAAVVIHKG

SEQ ID NO: 12170 - protein, 9 aa, Homo sapiens
  Table A; Target 12170; HLA-A*33:01; BSND; ENSG00000162399; TAA
EAAVVIHKG

SEQ ID NO: 12171 - protein, 9 aa, Homo sapiens
  Table A; Target 12171; HLA-A*33:03; BSND; ENSG00000162399; TAA
EAAVVIHKG

SEQ ID NO: 12172 - protein, 9 aa, Homo sapiens
  Table A; Target 12172; HLA-A*68:01; BSND; ENSG00000162399; TAA
EAAVVIHKG

SEQ ID NO: 12173 - protein, 9 aa, Homo sapiens
  Table A; Target 12173; HLA-A*68:02; BSND; ENSG00000162399; TAA
EAAVVIHKG

SEQ ID NO: 12174 - protein, 9 aa, Homo sapiens
  Table A; Target 12174; HLA-B*51:01; BSND; ENSG00000162399; TAA
EAAVVIHKG

SEQ ID NO: 12175 - protein, 8 aa, Homo sapiens
  Table A; Target 12175; HLA-B*35:03; BSND; ENSG00000162399; TAA
EAAYDQSL

SEQ ID NO: 12176 - protein, 11 aa, Homo sapiens
  Table A; Target 12176; HLA-A*26:01; BSND; ENSG00000162399; TAA
EAAYDQSLPDF

SEQ ID NO: 12177 - protein, 10 aa, Homo sapiens
  Table A; Target 12177; HLA-B*27:02; BSND; ENSG00000162399; TAA
EDEPQEGQQW

SEQ ID NO: 12178 - protein, 10 aa, Homo sapiens
  Table A; Target 12178; HLA-B*44:02; BSND; ENSG00000162399; TAA
EDEPQEGQQW

SEQ ID NO: 12179 - protein, 10 aa, Homo sapiens
  Table A; Target 12179; HLA-B*44:03; BSND; ENSG00000162399; TAA
EDEPQEGQQW

SEQ ID NO: 12180 - protein, 9 aa, Homo sapiens
  Table A; Target 12180; HLA-A*25:01; BSND; ENSG00000162399; TAA
EEAAYDQSL

SEQ ID NO: 12181 - protein, 9 aa, Homo sapiens
  Table A; Target 12181; HLA-A*30:01; BSND; ENSG00000162399; TAA
EEAAYDQSL

SEQ ID NO: 12182 - protein, 9 aa, Homo sapiens
  Table A; Target 12182; HLA-B*18:01; BSND; ENSG00000162399; TAA
EEAAYDQSL

SEQ ID NO: 12183 - protein, 9 aa, Homo sapiens
  Table A; Target 12183; HLA-B*35:03; BSND; ENSG00000162399; TAA
EEAAYDQSL

SEQ ID NO: 12184 - protein, 9 aa, Homo sapiens
  Table A; Target 12184; HLA-B*38:01; BSND; ENSG00000162399; TAA
EEAAYDQSL

SEQ ID NO: 12185 - protein, 9 aa, Homo sapiens
  Table A; Target 12185; HLA-B*39:01; BSND; ENSG00000162399; TAA
EEAAYDQSL

SEQ ID NO: 12186 - protein, 9 aa, Homo sapiens
  Table A; Target 12186; HLA-B*40:01; BSND; ENSG00000162399; TAA
EEAAYDQSL

SEQ ID NO: 12187 - protein, 9 aa, Homo sapiens
  Table A; Target 12187; HLA-B*40:02; BSND; ENSG00000162399; TAA
EEAAYDQSL

SEQ ID NO: 12188 - protein, 9 aa, Homo sapiens
  Table A; Target 12188; HLA-B*44:02; BSND; ENSG00000162399; TAA
EEAAYDQSL

SEQ ID NO: 12189 - protein, 9 aa, Homo sapiens
  Table A; Target 12189; HLA-B*44:03; BSND; ENSG00000162399; TAA
EEAAYDQSL

SEQ ID NO: 12190 - protein, 9 aa, Homo sapiens
  Table A; Target 12190; HLA-B*49:01; BSND; ENSG00000162399; TAA
EEAAYDQSL

SEQ ID NO: 12191 - protein, 9 aa, Homo sapiens
  Table A; Target 12191; HLA-C*16:04; BSND; ENSG00000162399; TAA
EEAAYDQSL

SEQ ID NO: 12192 - protein, 8 aa, Homo sapiens
  Table A; Target 12192; HLA-B*18:01; BSND; ENSG00000162399; TAA
EEDLYYGL

SEQ ID NO: 12193 - protein, 9 aa, Homo sapiens
  Table A; Target 12193; HLA-B*18:01; BSND; ENSG00000162399; TAA
EEEDLYYGL

SEQ ID NO: 12194 - protein, 9 aa, Homo sapiens
  Table A; Target 12194; HLA-B*40:01; BSND; ENSG00000162399; TAA
EEEDLYYGL

SEQ ID NO: 12195 - protein, 9 aa, Homo sapiens
  Table A; Target 12195; HLA-B*44:02; BSND; ENSG00000162399; TAA
EEEDLYYGL

SEQ ID NO: 12196 - protein, 9 aa, Homo sapiens
  Table A; Target 12196; HLA-B*44:03; BSND; ENSG00000162399; TAA
EEEDLYYGL

SEQ ID NO: 12197 - protein, 10 aa, Homo sapiens
  Table A; Target 12197; HLA-A*25:01; BSND; ENSG00000162399; TAA
EGGPGDVQAW

SEQ ID NO: 12198 - protein, 10 aa, Homo sapiens
  Table A; Target 12198; HLA-B*44:02; BSND; ENSG00000162399; TAA
EGGPGDVQAW

SEQ ID NO: 12199 - protein, 10 aa, Homo sapiens
  Table A; Target 12199; HLA-B*44:03; BSND; ENSG00000162399; TAA
EGGPGDVQAW

SEQ ID NO: 12200 - protein, 10 aa, Homo sapiens
  Table A; Target 12200; HLA-C*16:04; BSND; ENSG00000162399; TAA
EGGPGDVQAW

SEQ ID NO: 12201 - protein, 10 aa, Homo sapiens
  Table A; Target 12201; HLA-A*33:03; BSND; ENSG00000162399; TAA
EIALPNNWQR

SEQ ID NO: 12202 - protein, 10 aa, Homo sapiens
  Table A; Target 12202; HLA-A*68:01; BSND; ENSG00000162399; TAA
EIALPNNWQR

SEQ ID NO: 12203 - protein, 11 aa, Homo sapiens
  Table A; Target 12203; HLA-A*01:01; BSND; ENSG00000162399; TAA
EIALPNNWQRY

SEQ ID NO: 12204 - protein, 11 aa, Homo sapiens
  Table A; Target 12204; HLA-A*26:01; BSND; ENSG00000162399; TAA
EIALPNNWQRY

SEQ ID NO: 12205 - protein, 11 aa, Homo sapiens
  Table A; Target 12205; HLA-A*30:02; BSND; ENSG00000162399; TAA
EMKSPSPQPPY

SEQ ID NO: 12206 - protein, 10 aa, Homo sapiens
  Table A; Target 12206; HLA-B*55:01; BSND; ENSG00000162399; TAA
EPEKEEEDLY

SEQ ID NO: 12207 - protein, 10 aa, Homo sapiens
  Table A; Target 12207; HLA-C*03:03; BSND; ENSG00000162399; TAA
EPEKEEEDLY

SEQ ID NO: 12208 - protein, 9 aa, Homo sapiens
  Table A; Target 12208; HLA-A*02:01; BSND; ENSG00000162399; TAA
FALIDAPTL

SEQ ID NO: 12209 - protein, 9 aa, Homo sapiens
  Table A; Target 12209; HLA-A*02:04; BSND; ENSG00000162399; TAA
FALIDAPTL

SEQ ID NO: 12210 - protein, 9 aa, Homo sapiens
  Table A; Target 12210; HLA-A*02:07; BSND; ENSG00000162399; TAA
FALIDAPTL

SEQ ID NO: 12211 - protein, 9 aa, Homo sapiens
  Table A; Target 12211; HLA-A*23:01; BSND; ENSG00000162399; TAA
FALIDAPTL

SEQ ID NO: 12212 - protein, 9 aa, Homo sapiens
  Table A; Target 12212; HLA-A*24:02; BSND; ENSG00000162399; TAA
FALIDAPTL

SEQ ID NO: 12213 - protein, 9 aa, Homo sapiens
  Table A; Target 12213; HLA-A*30:01; BSND; ENSG00000162399; TAA
FALIDAPTL

SEQ ID NO: 12214 - protein, 9 aa, Homo sapiens
  Table A; Target 12214; HLA-B*07:02; BSND; ENSG00000162399; TAA
FALIDAPTL

SEQ ID NO: 12215 - protein, 9 aa, Homo sapiens
  Table A; Target 12215; HLA-B*08:01; BSND; ENSG00000162399; TAA
FALIDAPTL

SEQ ID NO: 12216 - protein, 9 aa, Homo sapiens
  Table A; Target 12216; HLA-B*15:03; BSND; ENSG00000162399; TAA
FALIDAPTL

SEQ ID NO: 12217 - protein, 9 aa, Homo sapiens
  Table A; Target 12217; HLA-B*27:02; BSND; ENSG00000162399; TAA
FALIDAPTL

SEQ ID NO: 12218 - protein, 9 aa, Homo sapiens
  Table A; Target 12218; HLA-B*27:05; BSND; ENSG00000162399; TAA
FALIDAPTL

SEQ ID NO: 12219 - protein, 9 aa, Homo sapiens
  Table A; Target 12219; HLA-B*35:01; BSND; ENSG00000162399; TAA
FALIDAPTL

SEQ ID NO: 12220 - protein, 9 aa, Homo sapiens
  Table A; Target 12220; HLA-B*35:03; BSND; ENSG00000162399; TAA
FALIDAPTL

SEQ ID NO: 12221 - protein, 9 aa, Homo sapiens
  Table A; Target 12221; HLA-B*38:01; BSND; ENSG00000162399; TAA
FALIDAPTL

SEQ ID NO: 12222 - protein, 9 aa, Homo sapiens
  Table A; Target 12222; HLA-B*39:01; BSND; ENSG00000162399; TAA
FALIDAPTL

SEQ ID NO: 12223 - protein, 9 aa, Homo sapiens
  Table A; Target 12223; HLA-B*40:01; BSND; ENSG00000162399; TAA
FALIDAPTL

SEQ ID NO: 12224 - protein, 9 aa, Homo sapiens
  Table A; Target 12224; HLA-B*40:02; BSND; ENSG00000162399; TAA
FALIDAPTL

SEQ ID NO: 12225 - protein, 9 aa, Homo sapiens
  Table A; Target 12225; HLA-B*46:01; BSND; ENSG00000162399; TAA
FALIDAPTL

SEQ ID NO: 12226 - protein, 9 aa, Homo sapiens
  Table A; Target 12226; HLA-B*51:01; BSND; ENSG00000162399; TAA
FALIDAPTL

SEQ ID NO: 12227 - protein, 9 aa, Homo sapiens
  Table A; Target 12227; HLA-B*54:01; BSND; ENSG00000162399; TAA
FALIDAPTL

SEQ ID NO: 12228 - protein, 9 aa, Homo sapiens
  Table A; Target 12228; HLA-B*55:01; BSND; ENSG00000162399; TAA
FALIDAPTL

SEQ ID NO: 12229 - protein, 9 aa, Homo sapiens
  Table A; Target 12229; HLA-B*58:01; BSND; ENSG00000162399; TAA
FALIDAPTL

SEQ ID NO: 12230 - protein, 9 aa, Homo sapiens
  Table A; Target 12230; HLA-C*01:02; BSND; ENSG00000162399; TAA
FALIDAPTL

SEQ ID NO: 12231 - protein, 9 aa, Homo sapiens
  Table A; Target 12231; HLA-C*02:02; BSND; ENSG00000162399; TAA
FALIDAPTL

SEQ ID NO: 12232 - protein, 9 aa, Homo sapiens
  Table A; Target 12232; HLA-C*03:03; BSND; ENSG00000162399; TAA
FALIDAPTL

SEQ ID NO: 12233 - protein, 9 aa, Homo sapiens
  Table A; Target 12233; HLA-C*03:04; BSND; ENSG00000162399; TAA
FALIDAPTL

SEQ ID NO: 12234 - protein, 9 aa, Homo sapiens
  Table A; Target 12234; HLA-C*05:01; BSND; ENSG00000162399; TAA
FALIDAPTL

SEQ ID NO: 12235 - protein, 9 aa, Homo sapiens
  Table A; Target 12235; HLA-C*06:02; BSND; ENSG00000162399; TAA
FALIDAPTL

SEQ ID NO: 12236 - protein, 9 aa, Homo sapiens
  Table A; Target 12236; HLA-C*07:01; BSND; ENSG00000162399; TAA
FALIDAPTL

SEQ ID NO: 12237 - protein, 9 aa, Homo sapiens
  Table A; Target 12237; HLA-C*07:04; BSND; ENSG00000162399; TAA
FALIDAPTL

SEQ ID NO: 12238 - protein, 9 aa, Homo sapiens
  Table A; Target 12238; HLA-C*12:03; BSND; ENSG00000162399; TAA
FALIDAPTL

SEQ ID NO: 12239 - protein, 9 aa, Homo sapiens
  Table A; Target 12239; HLA-C*14:02; BSND; ENSG00000162399; TAA
FALIDAPTL

SEQ ID NO: 12240 - protein, 9 aa, Homo sapiens
  Table A; Target 12240; HLA-C*16:01; BSND; ENSG00000162399; TAA
FALIDAPTL

SEQ ID NO: 12241 - protein, 9 aa, Homo sapiens
  Table A; Target 12241; HLA-C*16:02; BSND; ENSG00000162399; TAA
FALIDAPTL

SEQ ID NO: 12242 - protein, 9 aa, Homo sapiens
  Table A; Target 12242; HLA-C*16:04; BSND; ENSG00000162399; TAA
FALIDAPTL

SEQ ID NO: 12243 - protein, 9 aa, Homo sapiens
  Table A; Target 12243; HLA-A*02:04; BSND; ENSG00000162399; TAA
FIVLGLFLL

SEQ ID NO: 12244 - protein, 9 aa, Homo sapiens
  Table A; Target 12244; HLA-A*02:01; BSND; ENSG00000162399; TAA
FLLALGTFL

SEQ ID NO: 12245 - protein, 9 aa, Homo sapiens
  Table A; Target 12245; HLA-A*02:03; BSND; ENSG00000162399; TAA
FLLALGTFL

SEQ ID NO: 12246 - protein, 9 aa, Homo sapiens
  Table A; Target 12246; HLA-A*02:04; BSND; ENSG00000162399; TAA
FLLALGTFL

SEQ ID NO: 12247 - protein, 9 aa, Homo sapiens
  Table A; Target 12247; HLA-A*02:07; BSND; ENSG00000162399; TAA
FLLALGTFL

SEQ ID NO: 12248 - protein, 10 aa, Homo sapiens
  Table A; Target 12248; HLA-A*02:01; BSND; ENSG00000162399; TAA
FLLALGTFLM

SEQ ID NO: 12249 - protein, 10 aa, Homo sapiens
  Table A; Target 12249; HLA-A*02:04; BSND; ENSG00000162399; TAA
FLLALGTFLM

SEQ ID NO: 12250 - protein, 10 aa, Homo sapiens
  Table A; Target 12250; HLA-A*02:01; BSND; ENSG00000162399; TAA
FLMSHDRPQV

SEQ ID NO: 12251 - protein, 10 aa, Homo sapiens
  Table A; Target 12251; HLA-A*02:03; BSND; ENSG00000162399; TAA
FLMSHDRPQV

SEQ ID NO: 12252 - protein, 10 aa, Homo sapiens
  Table A; Target 12252; HLA-A*02:04; BSND; ENSG00000162399; TAA
FLMSHDRPQV

SEQ ID NO: 12253 - protein, 11 aa, Homo sapiens
  Table A; Target 12253; HLA-A*01:01; BSND; ENSG00000162399; TAA
FLMSHDRPQVY

SEQ ID NO: 12254 - protein, 11 aa, Homo sapiens
  Table A; Target 12254; HLA-A*29:02; BSND; ENSG00000162399; TAA
FLMSHDRPQVY

SEQ ID NO: 12255 - protein, 8 aa, Homo sapiens
  Table A; Target 12255; HLA-B*27:02; BSND; ENSG00000162399; TAA
FQGILSPK

SEQ ID NO: 12256 - protein, 9 aa, Homo sapiens
  Table A; Target 12256; HLA-B*27:05; BSND; ENSG00000162399; TAA
FQGILSPKA

SEQ ID NO: 12257 - protein, 11 aa, Homo sapiens
  Table A; Target 12257; HLA-A*02:07; BSND; ENSG00000162399; TAA
FVPADSDFQGI

SEQ ID NO: 12258 - protein, 8 aa, Homo sapiens
  Table A; Target 12258; HLA-B*35:03; BSND; ENSG00000162399; TAA
FYAMGSVM

SEQ ID NO: 12259 - protein, 8 aa, Homo sapiens
  Table A; Target 12259; HLA-B*46:01; BSND; ENSG00000162399; TAA
FYAMGSVM

SEQ ID NO: 12260 - protein, 8 aa, Homo sapiens
  Table A; Target 12260; HLA-C*01:02; BSND; ENSG00000162399; TAA
FYAMGSVM

SEQ ID NO: 12261 - protein, 8 aa, Homo sapiens
  Table A; Target 12261; HLA-C*03:03; BSND; ENSG00000162399; TAA
FYAMGSVM

SEQ ID NO: 12262 - protein, 8 aa, Homo sapiens
  Table A; Target 12262; HLA-C*03:04; BSND; ENSG00000162399; TAA
FYAMGSVM

SEQ ID NO: 12263 - protein, 8 aa, Homo sapiens
  Table A; Target 12263; HLA-C*04:01; BSND; ENSG00000162399; TAA
FYAMGSVM

SEQ ID NO: 12264 - protein, 8 aa, Homo sapiens
  Table A; Target 12264; HLA-C*12:03; BSND; ENSG00000162399; TAA
FYAMGSVM

SEQ ID NO: 12265 - protein, 8 aa, Homo sapiens
  Table A; Target 12265; HLA-C*14:02; BSND; ENSG00000162399; TAA
FYAMGSVM

SEQ ID NO: 12266 - protein, 8 aa, Homo sapiens
  Table A; Target 12266; HLA-C*16:01; BSND; ENSG00000162399; TAA
FYAMGSVM

SEQ ID NO: 12267 - protein, 10 aa, Homo sapiens
  Table A; Target 12267; HLA-A*24:02; BSND; ENSG00000162399; TAA
FYAMGSVMVI

SEQ ID NO: 12268 - protein, 9 aa, Homo sapiens
  Table A; Target 12268; HLA-A*11:01; BSND; ENSG00000162399; TAA
GAGDLLPDK

SEQ ID NO: 12269 - protein, 11 aa, Homo sapiens
  Table A; Target 12269; HLA-B*37:01; BSND; ENSG00000162399; TAA
GDLLPDKELGF

SEQ ID NO: 12270 - protein, 10 aa, Homo sapiens
  Table A; Target 12270; HLA-B*40:01; BSND; ENSG00000162399; TAA
GEGGPGDVQA

SEQ ID NO: 12271 - protein, 11 aa, Homo sapiens
  Table A; Target 12271; HLA-A*30:01; BSND; ENSG00000162399; TAA
GEGGPGDVQAW

SEQ ID NO: 12272 - protein, 11 aa, Homo sapiens
  Table A; Target 12272; HLA-B*27:02; BSND; ENSG00000162399; TAA
GEGGPGDVQAW

SEQ ID NO: 12273 - protein, 11 aa, Homo sapiens
  Table A; Target 12273; HLA-B*40:01; BSND; ENSG00000162399; TAA
GEGGPGDVQAW

SEQ ID NO: 12274 - protein, 11 aa, Homo sapiens
  Table A; Target 12274; HLA-B*44:02; BSND; ENSG00000162399; TAA
GEGGPGDVQAW

SEQ ID NO: 12275 - protein, 11 aa, Homo sapiens
  Table A; Target 12275; HLA-B*44:03; BSND; ENSG00000162399; TAA
GEGGPGDVQAW

SEQ ID NO: 12276 - protein, 11 aa, Homo sapiens
  Table A; Target 12276; HLA-B*49:01; BSND; ENSG00000162399; TAA
GEGGPGDVQAW

SEQ ID NO: 12277 - protein, 11 aa, Homo sapiens
  Table A; Target 12277; HLA-B*57:01; BSND; ENSG00000162399; TAA
GEGGPGDVQAW

SEQ ID NO: 12278 - protein, 11 aa, Homo sapiens
  Table A; Target 12278; HLA-C*12:03; BSND; ENSG00000162399; TAA
GEGGPGDVQAW

SEQ ID NO: 12279 - protein, 11 aa, Homo sapiens
  Table A; Target 12279; HLA-C*16:04; BSND; ENSG00000162399; TAA
GEGGPGDVQAW

SEQ ID NO: 12280 - protein, 9 aa, Homo sapiens
  Table A; Target 12280; HLA-B*44:02; BSND; ENSG00000162399; TAA
GERRLTQSW

SEQ ID NO: 12281 - protein, 9 aa, Homo sapiens
  Table A; Target 12281; HLA-B*44:03; BSND; ENSG00000162399; TAA
GERRLTQSW

SEQ ID NO: 12282 - protein, 11 aa, Homo sapiens
  Table A; Target 12282; HLA-A*02:04; BSND; ENSG00000162399; TAA
GLFLLALGTFL

SEQ ID NO: 12283 - protein, 9 aa, Homo sapiens
  Table A; Target 12283; HLA-A*02:01; BSND; ENSG00000162399; TAA
GLLENGLAA

SEQ ID NO: 12284 - protein, 9 aa, Homo sapiens
  Table A; Target 12284; HLA-A*02:03; BSND; ENSG00000162399; TAA
GLLENGLAA

SEQ ID NO: 12285 - protein, 9 aa, Homo sapiens
  Table A; Target 12285; HLA-A*02:04; BSND; ENSG00000162399; TAA
GLLENGLAA

SEQ ID NO: 12286 - protein, 9 aa, Homo sapiens
  Table A; Target 12286; HLA-B*13:02; BSND; ENSG00000162399; TAA
GLLENGLAA

SEQ ID NO: 12287 - protein, 9 aa, Homo sapiens
  Table A; Target 12287; HLA-B*55:01; BSND; ENSG00000162399; TAA
GLLENGLAA

SEQ ID NO: 12288 - protein, 9 aa, Homo sapiens
  Table A; Target 12288; HLA-C*14:02; BSND; ENSG00000162399; TAA
GLLENGLAA

SEQ ID NO: 12289 - protein, 11 aa, Homo sapiens
  Table A; Target 12289; HLA-A*02:01; BSND; ENSG00000162399; TAA
GLLENGLAAEM

SEQ ID NO: 12290 - protein, 11 aa, Homo sapiens
  Table A; Target 12290; HLA-A*02:04; BSND; ENSG00000162399; TAA
GLLENGLAAEM

SEQ ID NO: 12291 - protein, 11 aa, Homo sapiens
  Table A; Target 12291; HLA-A*29:02; BSND; ENSG00000162399; TAA
GLLENGLAAEM

SEQ ID NO: 12292 - protein, 9 aa, Homo sapiens
  Table A; Target 12292; HLA-C*01:02; BSND; ENSG00000162399; TAA
GLPDGAGDL

SEQ ID NO: 12293 - protein, 10 aa, Homo sapiens
  Table A; Target 12293; HLA-A*02:07; BSND; ENSG00000162399; TAA
GLPDGAGDLL

SEQ ID NO: 12294 - protein, 10 aa, Homo sapiens
  Table A; Target 12294; HLA-B*40:01; BSND; ENSG00000162399; TAA
GLPDGAGDLL

SEQ ID NO: 12295 - protein, 9 aa, Homo sapiens
  Table A; Target 12295; HLA-C*05:01; BSND; ENSG00000162399; TAA
GSDESEGER

SEQ ID NO: 12296 - protein, 11 aa, Homo sapiens
  Table A; Target 12296; HLA-C*05:01; BSND; ENSG00000162399; TAA
GSDESEGERRL

SEQ ID NO: 12297 - protein, 9 aa, Homo sapiens
  Table A; Target 12297; HLA-A*31:01; BSND; ENSG00000162399; TAA
GTFLMSHDR

SEQ ID NO: 12298 - protein, 9 aa, Homo sapiens
  Table A; Target 12298; HLA-B*57:01; BSND; ENSG00000162399; TAA
GTFLMSHDR

SEQ ID NO: 12299 - protein, 10 aa, Homo sapiens
  Table A; Target 12299; HLA-B*37:01; BSND; ENSG00000162399; TAA
HDRPQVYGTF

SEQ ID NO: 12300 - protein, 10 aa, Homo sapiens
  Table A; Target 12300; HLA-B*40:02; BSND; ENSG00000162399; TAA
HDRPQVYGTF

SEQ ID NO: 12301 - protein, 10 aa, Homo sapiens
  Table A; Target 12301; HLA-B*44:02; BSND; ENSG00000162399; TAA
HDRPQVYGTF

SEQ ID NO: 12302 - protein, 10 aa, Homo sapiens
  Table A; Target 12302; HLA-B*57:01; BSND; ENSG00000162399; TAA
HDRPQVYGTF

SEQ ID NO: 12303 - protein, 10 aa, Homo sapiens
  Table A; Target 12303; HLA-C*04:01; BSND; ENSG00000162399; TAA
HDRPQVYGTF

SEQ ID NO: 12304 - protein, 9 aa, Homo sapiens
  Table A; Target 12304; HLA-A*01:01; BSND; ENSG00000162399; TAA
HIQMKVMSY

SEQ ID NO: 12305 - protein, 9 aa, Homo sapiens
  Table A; Target 12305; HLA-A*03:01; BSND; ENSG00000162399; TAA
HIQMKVMSY

SEQ ID NO: 12306 - protein, 9 aa, Homo sapiens
  Table A; Target 12306; HLA-A*25:01; BSND; ENSG00000162399; TAA
HIQMKVMSY

SEQ ID NO: 12307 - protein, 9 aa, Homo sapiens
  Table A; Target 12307; HLA-A*26:01; BSND; ENSG00000162399; TAA
HIQMKVMSY

SEQ ID NO: 12308 - protein, 9 aa, Homo sapiens
  Table A; Target 12308; HLA-A*29:02; BSND; ENSG00000162399; TAA
HIQMKVMSY

SEQ ID NO: 12309 - protein, 9 aa, Homo sapiens
  Table A; Target 12309; HLA-A*30:02; BSND; ENSG00000162399; TAA
HIQMKVMSY

SEQ ID NO: 12310 - protein, 9 aa, Homo sapiens
  Table A; Target 12310; HLA-A*32:01; BSND; ENSG00000162399; TAA
HIQMKVMSY

SEQ ID NO: 12311 - protein, 9 aa, Homo sapiens
  Table A; Target 12311; HLA-B*08:01; BSND; ENSG00000162399; TAA
HIQMKVMSY

SEQ ID NO: 12312 - protein, 9 aa, Homo sapiens
  Table A; Target 12312; HLA-B*15:01; BSND; ENSG00000162399; TAA
HIQMKVMSY

SEQ ID NO: 12313 - protein, 9 aa, Homo sapiens
  Table A; Target 12313; HLA-B*35:01; BSND; ENSG00000162399; TAA
HIQMKVMSY

SEQ ID NO: 12314 - protein, 9 aa, Homo sapiens
  Table A; Target 12314; HLA-B*46:01; BSND; ENSG00000162399; TAA
HIQMKVMSY

SEQ ID NO: 12315 - protein, 9 aa, Homo sapiens
  Table A; Target 12315; HLA-C*03:03; BSND; ENSG00000162399; TAA
HIQMKVMSY

SEQ ID NO: 12316 - protein, 9 aa, Homo sapiens
  Table A; Target 12316; HLA-C*07:01; BSND; ENSG00000162399; TAA
HIQMKVMSY

SEQ ID NO: 12317 - protein, 9 aa, Homo sapiens
  Table A; Target 12317; HLA-C*07:04; BSND; ENSG00000162399; TAA
HIQMKVMSY

SEQ ID NO: 12318 - protein, 9 aa, Homo sapiens
  Table A; Target 12318; HLA-C*12:03; BSND; ENSG00000162399; TAA
HIQMKVMSY

SEQ ID NO: 12319 - protein, 9 aa, Homo sapiens
  Table A; Target 12319; HLA-C*16:01; BSND; ENSG00000162399; TAA
HIQMKVMSY

SEQ ID NO: 12320 - protein, 9 aa, Homo sapiens
  Table A; Target 12320; HLA-C*16:02; BSND; ENSG00000162399; TAA
HIQMKVMSY

SEQ ID NO: 12321 - protein, 9 aa, Homo sapiens
  Table A; Target 12321; HLA-B*27:05; BSND; ENSG00000162399; TAA
HRSLLAPEM

SEQ ID NO: 12322 - protein, 9 aa, Homo sapiens
  Table A; Target 12322; HLA-A*31:01; BSND; ENSG00000162399; TAA
IALPNNWQR

SEQ ID NO: 12323 - protein, 9 aa, Homo sapiens
  Table A; Target 12323; HLA-B*57:01; BSND; ENSG00000162399; TAA
IALPNNWQR

SEQ ID NO: 12324 - protein, 10 aa, Homo sapiens
  Table A; Target 12324; HLA-A*29:02; BSND; ENSG00000162399; TAA
IALPNNWQRY

SEQ ID NO: 12325 - protein, 10 aa, Homo sapiens
  Table A; Target 12325; HLA-A*30:02; BSND; ENSG00000162399; TAA
IALPNNWQRY

SEQ ID NO: 12326 - protein, 10 aa, Homo sapiens
  Table A; Target 12326; HLA-B*57:01; BSND; ENSG00000162399; TAA
IALPNNWQRY

SEQ ID NO: 12327 - protein, 8 aa, Homo sapiens
  Table A; Target 12327; HLA-B*51:01; BSND; ENSG00000162399; TAA
IGFIVLGL

SEQ ID NO: 12328 - protein, 9 aa, Homo sapiens
  Table A; Target 12328; HLA-A*02:01; BSND; ENSG00000162399; TAA
ILSPKAMGL

SEQ ID NO: 12329 - protein, 9 aa, Homo sapiens
  Table A; Target 12329; HLA-A*02:03; BSND; ENSG00000162399; TAA
ILSPKAMGL

SEQ ID NO: 12330 - protein, 9 aa, Homo sapiens
  Table A; Target 12330; HLA-A*02:04; BSND; ENSG00000162399; TAA
ILSPKAMGL

SEQ ID NO: 12331 - protein, 9 aa, Homo sapiens
  Table A; Target 12331; HLA-A*02:07; BSND; ENSG00000162399; TAA
ILSPKAMGL

SEQ ID NO: 12332 - protein, 9 aa, Homo sapiens
  Table A; Target 12332; HLA-A*03:01; BSND; ENSG00000162399; TAA
ILSPKAMGL

SEQ ID NO: 12333 - protein, 9 aa, Homo sapiens
  Table A; Target 12333; HLA-A*32:01; BSND; ENSG00000162399; TAA
ILSPKAMGL

SEQ ID NO: 12334 - protein, 9 aa, Homo sapiens
  Table A; Target 12334; HLA-B*08:01; BSND; ENSG00000162399; TAA
ILSPKAMGL

SEQ ID NO: 12335 - protein, 9 aa, Homo sapiens
  Table A; Target 12335; HLA-B*13:02; BSND; ENSG00000162399; TAA
ILSPKAMGL

SEQ ID NO: 12336 - protein, 9 aa, Homo sapiens
  Table A; Target 12336; HLA-B*37:01; BSND; ENSG00000162399; TAA
ILSPKAMGL

SEQ ID NO: 12337 - protein, 9 aa, Homo sapiens
  Table A; Target 12337; HLA-C*16:02; BSND; ENSG00000162399; TAA
ILSPKAMGL

SEQ ID NO: 12338 - protein, 10 aa, Homo sapiens
  Table A; Target 12338; HLA-A*02:03; BSND; ENSG00000162399; TAA
ILSPKAMGLL

SEQ ID NO: 12339 - protein, 8 aa, Homo sapiens
  Table A; Target 12339; HLA-A*30:02; BSND; ENSG00000162399; TAA
IQMKVMSY

SEQ ID NO: 12340 - protein, 8 aa, Homo sapiens
  Table A; Target 12340; HLA-A*32:01; BSND; ENSG00000162399; TAA
IQMKVMSY

SEQ ID NO: 12341 - protein, 8 aa, Homo sapiens
  Table A; Target 12341; HLA-B*08:01; BSND; ENSG00000162399; TAA
IQMKVMSY

SEQ ID NO: 12342 - protein, 8 aa, Homo sapiens
  Table A; Target 12342; HLA-B*13:02; BSND; ENSG00000162399; TAA
IQMKVMSY

SEQ ID NO: 12343 - protein, 8 aa, Homo sapiens
  Table A; Target 12343; HLA-B*15:01; BSND; ENSG00000162399; TAA
IQMKVMSY

SEQ ID NO: 12344 - protein, 8 aa, Homo sapiens
  Table A; Target 12344; HLA-B*15:03; BSND; ENSG00000162399; TAA
IQMKVMSY

SEQ ID NO: 12345 - protein, 8 aa, Homo sapiens
  Table A; Target 12345; HLA-B*18:01; BSND; ENSG00000162399; TAA
IQMKVMSY

SEQ ID NO: 12346 - protein, 8 aa, Homo sapiens
  Table A; Target 12346; HLA-B*37:01; BSND; ENSG00000162399; TAA
IQMKVMSY

SEQ ID NO: 12347 - protein, 8 aa, Homo sapiens
  Table A; Target 12347; HLA-B*39:01; BSND; ENSG00000162399; TAA
IQMKVMSY

SEQ ID NO: 12348 - protein, 8 aa, Homo sapiens
  Table A; Target 12348; HLA-B*46:01; BSND; ENSG00000162399; TAA
IQMKVMSY

SEQ ID NO: 12349 - protein, 8 aa, Homo sapiens
  Table A; Target 12349; HLA-B*58:01; BSND; ENSG00000162399; TAA
IQMKVMSY

SEQ ID NO: 12350 - protein, 8 aa, Homo sapiens
  Table A; Target 12350; HLA-C*02:02; BSND; ENSG00000162399; TAA
IQMKVMSY

SEQ ID NO: 12351 - protein, 8 aa, Homo sapiens
  Table A; Target 12351; HLA-C*07:01; BSND; ENSG00000162399; TAA
IQMKVMSY

SEQ ID NO: 12352 - protein, 8 aa, Homo sapiens
  Table A; Target 12352; HLA-C*07:04; BSND; ENSG00000162399; TAA
IQMKVMSY

SEQ ID NO: 12353 - protein, 8 aa, Homo sapiens
  Table A; Target 12353; HLA-C*14:02; BSND; ENSG00000162399; TAA
IQMKVMSY

SEQ ID NO: 12354 - protein, 8 aa, Homo sapiens
  Table A; Target 12354; HLA-C*16:01; BSND; ENSG00000162399; TAA
IQMKVMSY

SEQ ID NO: 12355 - protein, 8 aa, Homo sapiens
  Table A; Target 12355; HLA-C*16:02; BSND; ENSG00000162399; TAA
IQMKVMSY

SEQ ID NO: 12356 - protein, 8 aa, Homo sapiens
  Table A; Target 12356; HLA-C*16:04; BSND; ENSG00000162399; TAA
IQMKVMSY

SEQ ID NO: 12357 - protein, 8 aa, Homo sapiens
  Table A; Target 12357; HLA-A*02:04; BSND; ENSG00000162399; TAA
IVLGLFLL

SEQ ID NO: 12358 - protein, 9 aa, Homo sapiens
  Table A; Target 12358; HLA-A*29:02; BSND; ENSG00000162399; TAA
IVLGLFLLA

SEQ ID NO: 12359 - protein, 9 aa, Homo sapiens
  Table A; Target 12359; HLA-B*54:01; BSND; ENSG00000162399; TAA
IVLGLFLLA

SEQ ID NO: 12360 - protein, 10 aa, Homo sapiens
  Table A; Target 12360; HLA-A*32:01; BSND; ENSG00000162399; TAA
KAMGLLENGL

SEQ ID NO: 12361 - protein, 10 aa, Homo sapiens
  Table A; Target 12361; HLA-C*16:04; BSND; ENSG00000162399; TAA
KAMGLLENGL

SEQ ID NO: 12362 - protein, 10 aa, Homo sapiens
  Table A; Target 12362; HLA-B*40:01; BSND; ENSG00000162399; TAA
KEEEDLYYGL

SEQ ID NO: 12363 - protein, 9 aa, Homo sapiens
  Table A; Target 12363; HLA-B*40:02; BSND; ENSG00000162399; TAA
KELGFEPDT

SEQ ID NO: 12364 - protein, 9 aa, Homo sapiens
  Table A; Target 12364; HLA-A*01:01; BSND; ENSG00000162399; TAA
KSPSPQPPY

SEQ ID NO: 12365 - protein, 9 aa, Homo sapiens
  Table A; Target 12365; HLA-A*03:01; BSND; ENSG00000162399; TAA
KSPSPQPPY

SEQ ID NO: 12366 - protein, 9 aa, Homo sapiens
  Table A; Target 12366; HLA-A*03:02; BSND; ENSG00000162399; TAA
KSPSPQPPY

SEQ ID NO: 12367 - protein, 9 aa, Homo sapiens
  Table A; Target 12367; HLA-A*11:01; BSND; ENSG00000162399; TAA
KSPSPQPPY

SEQ ID NO: 12368 - protein, 9 aa, Homo sapiens
  Table A; Target 12368; HLA-A*29:02; BSND; ENSG00000162399; TAA
KSPSPQPPY

SEQ ID NO: 12369 - protein, 9 aa, Homo sapiens
  Table A; Target 12369; HLA-A*30:02; BSND; ENSG00000162399; TAA
KSPSPQPPY

SEQ ID NO: 12370 - protein, 9 aa, Homo sapiens
  Table A; Target 12370; HLA-A*31:01; BSND; ENSG00000162399; TAA
KSPSPQPPY

SEQ ID NO: 12371 - protein, 9 aa, Homo sapiens
  Table A; Target 12371; HLA-A*32:01; BSND; ENSG00000162399; TAA
KSPSPQPPY

SEQ ID NO: 12372 - protein, 9 aa, Homo sapiens
  Table A; Target 12372; HLA-B*07:02; BSND; ENSG00000162399; TAA
KSPSPQPPY

SEQ ID NO: 12373 - protein, 9 aa, Homo sapiens
  Table A; Target 12373; HLA-B*15:01; BSND; ENSG00000162399; TAA
KSPSPQPPY

SEQ ID NO: 12374 - protein, 9 aa, Homo sapiens
  Table A; Target 12374; HLA-B*15:03; BSND; ENSG00000162399; TAA
KSPSPQPPY

SEQ ID NO: 12375 - protein, 9 aa, Homo sapiens
  Table A; Target 12375; HLA-B*46:01; BSND; ENSG00000162399; TAA
KSPSPQPPY

SEQ ID NO: 12376 - protein, 9 aa, Homo sapiens
  Table A; Target 12376; HLA-B*57:01; BSND; ENSG00000162399; TAA
KSPSPQPPY

SEQ ID NO: 12377 - protein, 9 aa, Homo sapiens
  Table A; Target 12377; HLA-B*58:01; BSND; ENSG00000162399; TAA
KSPSPQPPY

SEQ ID NO: 12378 - protein, 9 aa, Homo sapiens
  Table A; Target 12378; HLA-C*01:02; BSND; ENSG00000162399; TAA
KSPSPQPPY

SEQ ID NO: 12379 - protein, 9 aa, Homo sapiens
  Table A; Target 12379; HLA-C*04:01; BSND; ENSG00000162399; TAA
KSPSPQPPY

SEQ ID NO: 12380 - protein, 9 aa, Homo sapiens
  Table A; Target 12380; HLA-C*06:02; BSND; ENSG00000162399; TAA
KSPSPQPPY

SEQ ID NO: 12381 - protein, 9 aa, Homo sapiens
  Table A; Target 12381; HLA-C*07:01; BSND; ENSG00000162399; TAA
KSPSPQPPY

SEQ ID NO: 12382 - protein, 9 aa, Homo sapiens
  Table A; Target 12382; HLA-C*07:02; BSND; ENSG00000162399; TAA
KSPSPQPPY

SEQ ID NO: 12383 - protein, 9 aa, Homo sapiens
  Table A; Target 12383; HLA-C*07:04; BSND; ENSG00000162399; TAA
KSPSPQPPY

SEQ ID NO: 12384 - protein, 9 aa, Homo sapiens
  Table A; Target 12384; HLA-C*16:01; BSND; ENSG00000162399; TAA
KSPSPQPPY

SEQ ID NO: 12385 - protein, 10 aa, Homo sapiens
  Table A; Target 12385; HLA-A*02:01; BSND; ENSG00000162399; TAA
KSPSPQPPYV

SEQ ID NO: 12386 - protein, 10 aa, Homo sapiens
  Table A; Target 12386; HLA-A*02:07; BSND; ENSG00000162399; TAA
KSPSPQPPYV

SEQ ID NO: 12387 - protein, 10 aa, Homo sapiens
  Table A; Target 12387; HLA-B*58:01; BSND; ENSG00000162399; TAA
KSPSPQPPYV

SEQ ID NO: 12388 - protein, 10 aa, Homo sapiens
  Table A; Target 12388; HLA-C*06:02; BSND; ENSG00000162399; TAA
KSPSPQPPYV

SEQ ID NO: 12389 - protein, 10 aa, Homo sapiens
  Table A; Target 12389; HLA-C*07:02; BSND; ENSG00000162399; TAA
KSPSPQPPYV

SEQ ID NO: 12390 - protein, 11 aa, Homo sapiens
  Table A; Target 12390; HLA-A*31:01; BSND; ENSG00000162399; TAA
KSPSPQPPYVR

SEQ ID NO: 12391 - protein, 9 aa, Homo sapiens
  Table A; Target 12391; HLA-A*02:04; BSND; ENSG00000162399; TAA
KTFRIGFIV

SEQ ID NO: 12392 - protein, 9 aa, Homo sapiens
  Table A; Target 12392; HLA-A*68:02; BSND; ENSG00000162399; TAA
KTFRIGFIV

SEQ ID NO: 12393 - protein, 9 aa, Homo sapiens
  Table A; Target 12393; HLA-B*57:01; BSND; ENSG00000162399; TAA
KTFRIGFIV

SEQ ID NO: 12394 - protein, 10 aa, Homo sapiens
  Table A; Target 12394; HLA-A*03:01; BSND; ENSG00000162399; TAA
KTFRIGFIVL

SEQ ID NO: 12395 - protein, 10 aa, Homo sapiens
  Table A; Target 12395; HLA-A*68:02; BSND; ENSG00000162399; TAA
KTFRIGFIVL

SEQ ID NO: 12396 - protein, 10 aa, Homo sapiens
  Table A; Target 12396; HLA-B*57:01; BSND; ENSG00000162399; TAA
KTFRIGFIVL

SEQ ID NO: 12397 - protein, 10 aa, Homo sapiens
  Table A; Target 12397; HLA-A*31:01; BSND; ENSG00000162399; TAA
KVMSYSEDHR

SEQ ID NO: 12398 - protein, 9 aa, Homo sapiens
  Table A; Target 12398; HLA-A*11:01; BSND; ENSG00000162399; TAA
LAPEMGQPK

SEQ ID NO: 12399 - protein, 9 aa, Homo sapiens
  Table A; Target 12399; HLA-C*01:02; BSND; ENSG00000162399; TAA
LAPEMGQPK

SEQ ID NO: 12400 - protein, 9 aa, Homo sapiens
  Table A; Target 12400; HLA-C*04:01; BSND; ENSG00000162399; TAA
LAPEMGQPK

SEQ ID NO: 12401 - protein, 9 aa, Homo sapiens
  Table A; Target 12401; HLA-C*06:02; BSND; ENSG00000162399; TAA
LAPEMGQPK

SEQ ID NO: 12402 - protein, 9 aa, Homo sapiens
  Table A; Target 12402; HLA-C*07:02; BSND; ENSG00000162399; TAA
LAPEMGQPK

SEQ ID NO: 12403 - protein, 9 aa, Homo sapiens
  Table A; Target 12403; HLA-C*07:06; BSND; ENSG00000162399; TAA
LAPEMGQPK

SEQ ID NO: 12404 - protein, 10 aa, Homo sapiens
  Table A; Target 12404; HLA-A*02:07; BSND; ENSG00000162399; TAA
LAPEMGQPKL

SEQ ID NO: 12405 - protein, 11 aa, Homo sapiens
  Table A; Target 12405; HLA-B*27:02; BSND; ENSG00000162399; TAA
LEDEPQEGQQW

SEQ ID NO: 12406 - protein, 11 aa, Homo sapiens
  Table A; Target 12406; HLA-B*38:01; BSND; ENSG00000162399; TAA
LEDEPQEGQQW

SEQ ID NO: 12407 - protein, 11 aa, Homo sapiens
  Table A; Target 12407; HLA-B*40:01; BSND; ENSG00000162399; TAA
LEDEPQEGQQW

SEQ ID NO: 12408 - protein, 11 aa, Homo sapiens
  Table A; Target 12408; HLA-B*44:02; BSND; ENSG00000162399; TAA
LEDEPQEGQQW

SEQ ID NO: 12409 - protein, 11 aa, Homo sapiens
  Table A; Target 12409; HLA-B*44:03; BSND; ENSG00000162399; TAA
LEDEPQEGQQW

SEQ ID NO: 12410 - protein, 11 aa, Homo sapiens
  Table A; Target 12410; HLA-C*16:04; BSND; ENSG00000162399; TAA
LEDEPQEGQQW

SEQ ID NO: 12411 - protein, 9 aa, Homo sapiens
  Table A; Target 12411; HLA-A*30:01; BSND; ENSG00000162399; TAA
LENGLAAEM

SEQ ID NO: 12412 - protein, 9 aa, Homo sapiens
  Table A; Target 12412; HLA-B*15:03; BSND; ENSG00000162399; TAA
LENGLAAEM

SEQ ID NO: 12413 - protein, 9 aa, Homo sapiens
  Table A; Target 12413; HLA-B*18:01; BSND; ENSG00000162399; TAA
LENGLAAEM

SEQ ID NO: 12414 - protein, 9 aa, Homo sapiens
  Table A; Target 12414; HLA-B*27:02; BSND; ENSG00000162399; TAA
LENGLAAEM

SEQ ID NO: 12415 - protein, 9 aa, Homo sapiens
  Table A; Target 12415; HLA-B*27:05; BSND; ENSG00000162399; TAA
LENGLAAEM

SEQ ID NO: 12416 - protein, 9 aa, Homo sapiens
  Table A; Target 12416; HLA-B*35:01; BSND; ENSG00000162399; TAA
LENGLAAEM

SEQ ID NO: 12417 - protein, 9 aa, Homo sapiens
  Table A; Target 12417; HLA-B*37:01; BSND; ENSG00000162399; TAA
LENGLAAEM

SEQ ID NO: 12418 - protein, 9 aa, Homo sapiens
  Table A; Target 12418; HLA-B*39:01; BSND; ENSG00000162399; TAA
LENGLAAEM

SEQ ID NO: 12419 - protein, 9 aa, Homo sapiens
  Table A; Target 12419; HLA-B*40:01; BSND; ENSG00000162399; TAA
LENGLAAEM

SEQ ID NO: 12420 - protein, 9 aa, Homo sapiens
  Table A; Target 12420; HLA-B*40:02; BSND; ENSG00000162399; TAA
LENGLAAEM

SEQ ID NO: 12421 - protein, 9 aa, Homo sapiens
  Table A; Target 12421; HLA-B*44:02; BSND; ENSG00000162399; TAA
LENGLAAEM

SEQ ID NO: 12422 - protein, 9 aa, Homo sapiens
  Table A; Target 12422; HLA-B*44:03; BSND; ENSG00000162399; TAA
LENGLAAEM

SEQ ID NO: 12423 - protein, 9 aa, Homo sapiens
  Table A; Target 12423; HLA-B*49:01; BSND; ENSG00000162399; TAA
LENGLAAEM

SEQ ID NO: 12424 - protein, 9 aa, Homo sapiens
  Table A; Target 12424; HLA-C*01:02; BSND; ENSG00000162399; TAA
LENGLAAEM

SEQ ID NO: 12425 - protein, 9 aa, Homo sapiens
  Table A; Target 12425; HLA-C*02:02; BSND; ENSG00000162399; TAA
LENGLAAEM

SEQ ID NO: 12426 - protein, 9 aa, Homo sapiens
  Table A; Target 12426; HLA-C*04:01; BSND; ENSG00000162399; TAA
LENGLAAEM

SEQ ID NO: 12427 - protein, 9 aa, Homo sapiens
  Table A; Target 12427; HLA-C*06:02; BSND; ENSG00000162399; TAA
LENGLAAEM

SEQ ID NO: 12428 - protein, 9 aa, Homo sapiens
  Table A; Target 12428; HLA-C*07:01; BSND; ENSG00000162399; TAA
LENGLAAEM

SEQ ID NO: 12429 - protein, 9 aa, Homo sapiens
  Table A; Target 12429; HLA-C*07:04; BSND; ENSG00000162399; TAA
LENGLAAEM

SEQ ID NO: 12430 - protein, 9 aa, Homo sapiens
  Table A; Target 12430; HLA-C*12:03; BSND; ENSG00000162399; TAA
LENGLAAEM

SEQ ID NO: 12431 - protein, 9 aa, Homo sapiens
  Table A; Target 12431; HLA-C*14:02; BSND; ENSG00000162399; TAA
LENGLAAEM

SEQ ID NO: 12432 - protein, 9 aa, Homo sapiens
  Table A; Target 12432; HLA-C*16:04; BSND; ENSG00000162399; TAA
LENGLAAEM

SEQ ID NO: 12433 - protein, 10 aa, Homo sapiens
  Table A; Target 12433; HLA-B*27:02; BSND; ENSG00000162399; TAA
LENGLAAEMK

SEQ ID NO: 12434 - protein, 9 aa, Homo sapiens
  Table A; Target 12434; HLA-A*23:01; BSND; ENSG00000162399; TAA
LFLLALGTF

SEQ ID NO: 12435 - protein, 9 aa, Homo sapiens
  Table A; Target 12435; HLA-A*02:04; BSND; ENSG00000162399; TAA
LLALGTFLM

SEQ ID NO: 12436 - protein, 10 aa, Homo sapiens
  Table A; Target 12436; HLA-A*03:01; BSND; ENSG00000162399; TAA
LLAPEMGQPK

SEQ ID NO: 12437 - protein, 10 aa, Homo sapiens
  Table A; Target 12437; HLA-A*03:02; BSND; ENSG00000162399; TAA
LLAPEMGQPK

SEQ ID NO: 12438 - protein, 10 aa, Homo sapiens
  Table A; Target 12438; HLA-A*11:01; BSND; ENSG00000162399; TAA
LLAPEMGQPK

SEQ ID NO: 12439 - protein, 10 aa, Homo sapiens
  Table A; Target 12439; HLA-A*68:01; BSND; ENSG00000162399; TAA
LLAPEMGQPK

SEQ ID NO: 12440 - protein, 10 aa, Homo sapiens
  Table A; Target 12440; HLA-B*27:02; BSND; ENSG00000162399; TAA
LLAPEMGQPK

SEQ ID NO: 12441 - protein, 10 aa, Homo sapiens
  Table A; Target 12441; HLA-B*27:05; BSND; ENSG00000162399; TAA
LLAPEMGQPK

SEQ ID NO: 12442 - protein, 10 aa, Homo sapiens
  Table A; Target 12442; HLA-C*04:01; BSND; ENSG00000162399; TAA
LLAPEMGQPK

SEQ ID NO: 12443 - protein, 10 aa, Homo sapiens
  Table A; Target 12443; HLA-C*06:02; BSND; ENSG00000162399; TAA
LLAPEMGQPK

SEQ ID NO: 12444 - protein, 10 aa, Homo sapiens
  Table A; Target 12444; HLA-C*07:06; BSND; ENSG00000162399; TAA
LLAPEMGQPK

SEQ ID NO: 12445 - protein, 11 aa, Homo sapiens
  Table A; Target 12445; HLA-A*02:01; BSND; ENSG00000162399; TAA
LLAPEMGQPKL

SEQ ID NO: 12446 - protein, 11 aa, Homo sapiens
  Table A; Target 12446; HLA-A*02:04; BSND; ENSG00000162399; TAA
LLAPEMGQPKL

SEQ ID NO: 12447 - protein, 11 aa, Homo sapiens
  Table A; Target 12447; HLA-A*02:07; BSND; ENSG00000162399; TAA
LLAPEMGQPKL

SEQ ID NO: 12448 - protein, 10 aa, Homo sapiens
  Table A; Target 12448; HLA-A*01:01; BSND; ENSG00000162399; TAA
LLENGLAAEM

SEQ ID NO: 12449 - protein, 10 aa, Homo sapiens
  Table A; Target 12449; HLA-C*05:01; BSND; ENSG00000162399; TAA
LLENGLAAEM

SEQ ID NO: 12450 - protein, 10 aa, Homo sapiens
  Table A; Target 12450; HLA-C*07:01; BSND; ENSG00000162399; TAA
LLENGLAAEM

SEQ ID NO: 12451 - protein, 10 aa, Homo sapiens
  Table A; Target 12451; HLA-C*07:02; BSND; ENSG00000162399; TAA
LLENGLAAEM

SEQ ID NO: 12452 - protein, 10 aa, Homo sapiens
  Table A; Target 12452; HLA-C*07:04; BSND; ENSG00000162399; TAA
LLENGLAAEM

SEQ ID NO: 12453 - protein, 9 aa, Homo sapiens
  Table A; Target 12453; HLA-A*02:07; BSND; ENSG00000162399; TAA
LLPDKELGF

SEQ ID NO: 12454 - protein, 9 aa, Homo sapiens
  Table A; Target 12454; HLA-A*24:02; BSND; ENSG00000162399; TAA
LLPDKELGF

SEQ ID NO: 12455 - protein, 9 aa, Homo sapiens
  Table A; Target 12455; HLA-A*29:02; BSND; ENSG00000162399; TAA
LLPDKELGF

SEQ ID NO: 12456 - protein, 10 aa, Homo sapiens
  Table A; Target 12456; HLA-A*01:01; BSND; ENSG00000162399; TAA
LMSHDRPQVY

SEQ ID NO: 12457 - protein, 10 aa, Homo sapiens
  Table A; Target 12457; HLA-A*29:02; BSND; ENSG00000162399; TAA
LMSHDRPQVY

SEQ ID NO: 12458 - protein, 10 aa, Homo sapiens
  Table A; Target 12458; HLA-A*30:02; BSND; ENSG00000162399; TAA
LMSHDRPQVY

SEQ ID NO: 12459 - protein, 9 aa, Homo sapiens
  Table A; Target 12459; HLA-B*07:02; BSND; ENSG00000162399; TAA
LPDFSHIQM

SEQ ID NO: 12460 - protein, 9 aa, Homo sapiens
  Table A; Target 12460; HLA-B*35:01; BSND; ENSG00000162399; TAA
LPDFSHIQM

SEQ ID NO: 12461 - protein, 9 aa, Homo sapiens
  Table A; Target 12461; HLA-B*35:03; BSND; ENSG00000162399; TAA
LPDFSHIQM

SEQ ID NO: 12462 - protein, 9 aa, Homo sapiens
  Table A; Target 12462; HLA-B*38:01; BSND; ENSG00000162399; TAA
LPDFSHIQM

SEQ ID NO: 12463 - protein, 9 aa, Homo sapiens
  Table A; Target 12463; HLA-B*51:01; BSND; ENSG00000162399; TAA
LPDFSHIQM

SEQ ID NO: 12464 - protein, 9 aa, Homo sapiens
  Table A; Target 12464; HLA-B*54:01; BSND; ENSG00000162399; TAA
LPDFSHIQM

SEQ ID NO: 12465 - protein, 9 aa, Homo sapiens
  Table A; Target 12465; HLA-B*55:01; BSND; ENSG00000162399; TAA
LPDFSHIQM

SEQ ID NO: 12466 - protein, 9 aa, Homo sapiens
  Table A; Target 12466; HLA-C*03:03; BSND; ENSG00000162399; TAA
LPDFSHIQM

SEQ ID NO: 12467 - protein, 9 aa, Homo sapiens
  Table A; Target 12467; HLA-C*04:01; BSND; ENSG00000162399; TAA
LPDFSHIQM

SEQ ID NO: 12468 - protein, 9 aa, Homo sapiens
  Table A; Target 12468; HLA-C*05:01; BSND; ENSG00000162399; TAA
LPDFSHIQM

SEQ ID NO: 12469 - protein, 9 aa, Homo sapiens
  Table A; Target 12469; HLA-C*07:02; BSND; ENSG00000162399; TAA
LPDFSHIQM

SEQ ID NO: 12470 - protein, 11 aa, Homo sapiens
  Table A; Target 12470; HLA-B*54:01; BSND; ENSG00000162399; TAA
LPDFSHIQMKV

SEQ ID NO: 12471 - protein, 8 aa, Homo sapiens
  Table A; Target 12471; HLA-B*35:03; BSND; ENSG00000162399; TAA
LPDGAGDL

SEQ ID NO: 12472 - protein, 8 aa, Homo sapiens
  Table A; Target 12472; HLA-C*05:01; BSND; ENSG00000162399; TAA
LPDGAGDL

SEQ ID NO: 12473 - protein, 9 aa, Homo sapiens
  Table A; Target 12473; HLA-B*07:02; BSND; ENSG00000162399; TAA
LPDGAGDLL

SEQ ID NO: 12474 - protein, 9 aa, Homo sapiens
  Table A; Target 12474; HLA-B*35:01; BSND; ENSG00000162399; TAA
LPDGAGDLL

SEQ ID NO: 12475 - protein, 9 aa, Homo sapiens
  Table A; Target 12475; HLA-B*35:03; BSND; ENSG00000162399; TAA
LPDGAGDLL

SEQ ID NO: 12476 - protein, 9 aa, Homo sapiens
  Table A; Target 12476; HLA-B*38:01; BSND; ENSG00000162399; TAA
LPDGAGDLL

SEQ ID NO: 12477 - protein, 9 aa, Homo sapiens
  Table A; Target 12477; HLA-B*39:01; BSND; ENSG00000162399; TAA
LPDGAGDLL

SEQ ID NO: 12478 - protein, 9 aa, Homo sapiens
  Table A; Target 12478; HLA-B*55:01; BSND; ENSG00000162399; TAA
LPDGAGDLL

SEQ ID NO: 12479 - protein, 9 aa, Homo sapiens
  Table A; Target 12479; HLA-C*03:03; BSND; ENSG00000162399; TAA
LPDGAGDLL

SEQ ID NO: 12480 - protein, 9 aa, Homo sapiens
  Table A; Target 12480; HLA-C*04:01; BSND; ENSG00000162399; TAA
LPDGAGDLL

SEQ ID NO: 12481 - protein, 9 aa, Homo sapiens
  Table A; Target 12481; HLA-C*05:01; BSND; ENSG00000162399; TAA
LPDGAGDLL

SEQ ID NO: 12482 - protein, 9 aa, Homo sapiens
  Table A; Target 12482; HLA-C*07:02; BSND; ENSG00000162399; TAA
LPDGAGDLL

SEQ ID NO: 12483 - protein, 9 aa, Homo sapiens
  Table A; Target 12483; HLA-C*07:04; BSND; ENSG00000162399; TAA
LPDGAGDLL

SEQ ID NO: 12484 - protein, 8 aa, Homo sapiens
  Table A; Target 12484; HLA-B*55:01; BSND; ENSG00000162399; TAA
LPDKELGF

SEQ ID NO: 12485 - protein, 8 aa, Homo sapiens
  Table A; Target 12485; HLA-C*05:01; BSND; ENSG00000162399; TAA
LPDKELGF

SEQ ID NO: 12486 - protein, 8 aa, Homo sapiens
  Table A; Target 12486; HLA-C*01:02; BSND; ENSG00000162399; TAA
LSPKAMGL

SEQ ID NO: 12487 - protein, 10 aa, Homo sapiens
  Table A; Target 12487; HLA-C*07:01; BSND; ENSG00000162399; TAA
MDSSEGSSPN

SEQ ID NO: 12488 - protein, 11 aa, Homo sapiens
  Table A; Target 12488; HLA-B*39:01; BSND; ENSG00000162399; TAA
MDSSEGSSPNA

SEQ ID NO: 12489 - protein, 8 aa, Homo sapiens
  Table A; Target 12489; HLA-B*18:01; BSND; ENSG00000162399; TAA
MEAAVVIH

SEQ ID NO: 12490 - protein, 8 aa, Homo sapiens
  Table A; Target 12490; HLA-C*07:04; BSND; ENSG00000162399; TAA
MEAAVVIH

SEQ ID NO: 12491 - protein, 9 aa, Homo sapiens
  Table A; Target 12491; HLA-A*01:01; BSND; ENSG00000162399; TAA
MEAAVVIHK

SEQ ID NO: 12492 - protein, 9 aa, Homo sapiens
  Table A; Target 12492; HLA-A*03:01; BSND; ENSG00000162399; TAA
MEAAVVIHK

SEQ ID NO: 12493 - protein, 9 aa, Homo sapiens
  Table A; Target 12493; HLA-A*03:02; BSND; ENSG00000162399; TAA
MEAAVVIHK

SEQ ID NO: 12494 - protein, 9 aa, Homo sapiens
  Table A; Target 12494; HLA-A*11:01; BSND; ENSG00000162399; TAA
MEAAVVIHK

SEQ ID NO: 12495 - protein, 9 aa, Homo sapiens
  Table A; Target 12495; HLA-A*33:01; BSND; ENSG00000162399; TAA
MEAAVVIHK

SEQ ID NO: 12496 - protein, 9 aa, Homo sapiens
  Table A; Target 12496; HLA-A*33:03; BSND; ENSG00000162399; TAA
MEAAVVIHK

SEQ ID NO: 12497 - protein, 9 aa, Homo sapiens
  Table A; Target 12497; HLA-A*68:01; BSND; ENSG00000162399; TAA
MEAAVVIHK

SEQ ID NO: 12498 - protein, 9 aa, Homo sapiens
  Table A; Target 12498; HLA-A*68:02; BSND; ENSG00000162399; TAA
MEAAVVIHK

SEQ ID NO: 12499 - protein, 9 aa, Homo sapiens
  Table A; Target 12499; HLA-B*07:02; BSND; ENSG00000162399; TAA
MEAAVVIHK

SEQ ID NO: 12500 - protein, 9 aa, Homo sapiens
  Table A; Target 12500; HLA-B*27:02; BSND; ENSG00000162399; TAA
MEAAVVIHK

SEQ ID NO: 12501 - protein, 9 aa, Homo sapiens
  Table A; Target 12501; HLA-B*27:05; BSND; ENSG00000162399; TAA
MEAAVVIHK

SEQ ID NO: 12502 - protein, 9 aa, Homo sapiens
  Table A; Target 12502; HLA-B*40:02; BSND; ENSG00000162399; TAA
MEAAVVIHK

SEQ ID NO: 12503 - protein, 9 aa, Homo sapiens
  Table A; Target 12503; HLA-B*44:02; BSND; ENSG00000162399; TAA
MEAAVVIHK

SEQ ID NO: 12504 - protein, 9 aa, Homo sapiens
  Table A; Target 12504; HLA-B*44:03; BSND; ENSG00000162399; TAA
MEAAVVIHK

SEQ ID NO: 12505 - protein, 9 aa, Homo sapiens
  Table A; Target 12505; HLA-B*49:01; BSND; ENSG00000162399; TAA
MEAAVVIHK

SEQ ID NO: 12506 - protein, 9 aa, Homo sapiens
  Table A; Target 12506; HLA-C*04:01; BSND; ENSG00000162399; TAA
MEAAVVIHK

SEQ ID NO: 12507 - protein, 9 aa, Homo sapiens
  Table A; Target 12507; HLA-C*07:01; BSND; ENSG00000162399; TAA
MEAAVVIHK

SEQ ID NO: 12508 - protein, 9 aa, Homo sapiens
  Table A; Target 12508; HLA-C*07:04; BSND; ENSG00000162399; TAA
MEAAVVIHK

SEQ ID NO: 12509 - protein, 9 aa, Homo sapiens
  Table A; Target 12509; HLA-C*07:06; BSND; ENSG00000162399; TAA
MEAAVVIHK

SEQ ID NO: 12510 - protein, 10 aa, Homo sapiens
  Table A; Target 12510; HLA-B*40:02; BSND; ENSG00000162399; TAA
MEAAVVIHKG

SEQ ID NO: 12511 - protein, 10 aa, Homo sapiens
  Table A; Target 12511; HLA-B*44:02; BSND; ENSG00000162399; TAA
MEAAVVIHKG

SEQ ID NO: 12512 - protein, 10 aa, Homo sapiens
  Table A; Target 12512; HLA-B*44:03; BSND; ENSG00000162399; TAA
MEAAVVIHKG

SEQ ID NO: 12513 - protein, 10 aa, Homo sapiens
  Table A; Target 12513; HLA-B*49:01; BSND; ENSG00000162399; TAA
MEAAVVIHKG

SEQ ID NO: 12514 - protein, 10 aa, Homo sapiens
  Table A; Target 12514; HLA-C*04:01; BSND; ENSG00000162399; TAA
MEAAVVIHKG

SEQ ID NO: 12515 - protein, 10 aa, Homo sapiens
  Table A; Target 12515; HLA-B*54:01; BSND; ENSG00000162399; TAA
MGLLENGLAA

SEQ ID NO: 12516 - protein, 10 aa, Homo sapiens
  Table A; Target 12516; HLA-A*30:02; BSND; ENSG00000162399; TAA
MKSPSPQPPY

SEQ ID NO: 12517 - protein, 10 aa, Homo sapiens
  Table A; Target 12517; HLA-B*15:03; BSND; ENSG00000162399; TAA
MKSPSPQPPY

SEQ ID NO: 12518 - protein, 8 aa, Homo sapiens
  Table A; Target 12518; HLA-C*06:02; BSND; ENSG00000162399; TAA
MSHDRPQV

SEQ ID NO: 12519 - protein, 8 aa, Homo sapiens
  Table A; Target 12519; HLA-C*16:01; BSND; ENSG00000162399; TAA
MSHDRPQV

SEQ ID NO: 12520 - protein, 9 aa, Homo sapiens
  Table A; Target 12520; HLA-A*01:01; BSND; ENSG00000162399; TAA
MSHDRPQVY

SEQ ID NO: 12521 - protein, 9 aa, Homo sapiens
  Table A; Target 12521; HLA-A*25:01; BSND; ENSG00000162399; TAA
MSHDRPQVY

SEQ ID NO: 12522 - protein, 9 aa, Homo sapiens
  Table A; Target 12522; HLA-A*26:01; BSND; ENSG00000162399; TAA
MSHDRPQVY

SEQ ID NO: 12523 - protein, 9 aa, Homo sapiens
  Table A; Target 12523; HLA-A*29:02; BSND; ENSG00000162399; TAA
MSHDRPQVY

SEQ ID NO: 12524 - protein, 9 aa, Homo sapiens
  Table A; Target 12524; HLA-A*30:02; BSND; ENSG00000162399; TAA
MSHDRPQVY

SEQ ID NO: 12525 - protein, 9 aa, Homo sapiens
  Table A; Target 12525; HLA-A*32:01; BSND; ENSG00000162399; TAA
MSHDRPQVY

SEQ ID NO: 12526 - protein, 9 aa, Homo sapiens
  Table A; Target 12526; HLA-B*15:01; BSND; ENSG00000162399; TAA
MSHDRPQVY

SEQ ID NO: 12527 - protein, 9 aa, Homo sapiens
  Table A; Target 12527; HLA-B*15:03; BSND; ENSG00000162399; TAA
MSHDRPQVY

SEQ ID NO: 12528 - protein, 9 aa, Homo sapiens
  Table A; Target 12528; HLA-B*18:01; BSND; ENSG00000162399; TAA
MSHDRPQVY

SEQ ID NO: 12529 - protein, 9 aa, Homo sapiens
  Table A; Target 12529; HLA-B*35:01; BSND; ENSG00000162399; TAA
MSHDRPQVY

SEQ ID NO: 12530 - protein, 9 aa, Homo sapiens
  Table A; Target 12530; HLA-B*44:02; BSND; ENSG00000162399; TAA
MSHDRPQVY

SEQ ID NO: 12531 - protein, 9 aa, Homo sapiens
  Table A; Target 12531; HLA-B*44:03; BSND; ENSG00000162399; TAA
MSHDRPQVY

SEQ ID NO: 12532 - protein, 9 aa, Homo sapiens
  Table A; Target 12532; HLA-B*46:01; BSND; ENSG00000162399; TAA
MSHDRPQVY

SEQ ID NO: 12533 - protein, 9 aa, Homo sapiens
  Table A; Target 12533; HLA-B*55:01; BSND; ENSG00000162399; TAA
MSHDRPQVY

SEQ ID NO: 12534 - protein, 9 aa, Homo sapiens
  Table A; Target 12534; HLA-B*57:01; BSND; ENSG00000162399; TAA
MSHDRPQVY

SEQ ID NO: 12535 - protein, 9 aa, Homo sapiens
  Table A; Target 12535; HLA-B*58:01; BSND; ENSG00000162399; TAA
MSHDRPQVY

SEQ ID NO: 12536 - protein, 9 aa, Homo sapiens
  Table A; Target 12536; HLA-C*02:02; BSND; ENSG00000162399; TAA
MSHDRPQVY

SEQ ID NO: 12537 - protein, 9 aa, Homo sapiens
  Table A; Target 12537; HLA-C*03:04; BSND; ENSG00000162399; TAA
MSHDRPQVY

SEQ ID NO: 12538 - protein, 9 aa, Homo sapiens
  Table A; Target 12538; HLA-C*07:04; BSND; ENSG00000162399; TAA
MSHDRPQVY

SEQ ID NO: 12539 - protein, 9 aa, Homo sapiens
  Table A; Target 12539; HLA-C*12:03; BSND; ENSG00000162399; TAA
MSHDRPQVY

SEQ ID NO: 12540 - protein, 9 aa, Homo sapiens
  Table A; Target 12540; HLA-C*16:01; BSND; ENSG00000162399; TAA
MSHDRPQVY

SEQ ID NO: 12541 - protein, 9 aa, Homo sapiens
  Table A; Target 12541; HLA-C*16:02; BSND; ENSG00000162399; TAA
MSHDRPQVY

SEQ ID NO: 12542 - protein, 9 aa, Homo sapiens
  Table A; Target 12542; HLA-C*16:04; BSND; ENSG00000162399; TAA
MSHDRPQVY

SEQ ID NO: 12543 - protein, 10 aa, Homo sapiens
  Table A; Target 12543; HLA-B*57:01; BSND; ENSG00000162399; TAA
MSYSEDHRSL

SEQ ID NO: 12544 - protein, 10 aa, Homo sapiens
  Table A; Target 12544; HLA-C*03:04; BSND; ENSG00000162399; TAA
MSYSEDHRSL

SEQ ID NO: 12545 - protein, 10 aa, Homo sapiens
  Table A; Target 12545; HLA-A*25:01; BSND; ENSG00000162399; TAA
MVIGGIIWSM

SEQ ID NO: 12546 - protein, 10 aa, Homo sapiens
  Table A; Target 12546; HLA-A*26:01; BSND; ENSG00000162399; TAA
MVIGGIIWSM

SEQ ID NO: 12547 - protein, 10 aa, Homo sapiens
  Table A; Target 12547; HLA-A*68:02; BSND; ENSG00000162399; TAA
MVIGGIIWSM

SEQ ID NO: 12548 - protein, 10 aa, Homo sapiens
  Table A; Target 12548; HLA-B*35:01; BSND; ENSG00000162399; TAA
MVIGGIIWSM

SEQ ID NO: 12549 - protein, 10 aa, Homo sapiens
  Table A; Target 12549; HLA-B*35:03; BSND; ENSG00000162399; TAA
MVIGGIIWSM

SEQ ID NO: 12550 - protein, 10 aa, Homo sapiens
  Table A; Target 12550; HLA-B*54:01; BSND; ENSG00000162399; TAA
MVIGGIIWSM

SEQ ID NO: 12551 - protein, 9 aa, Homo sapiens
  Table A; Target 12551; HLA-C*16:01; BSND; ENSG00000162399; TAA
NASPHDREE

SEQ ID NO: 12552 - protein, 8 aa, Homo sapiens
  Table A; Target 12552; HLA-B*37:01; BSND; ENSG00000162399; TAA
PDFSHIQM

SEQ ID NO: 12553 - protein, 8 aa, Homo sapiens
  Table A; Target 12553; HLA-C*04:01; BSND; ENSG00000162399; TAA
PDFSHIQM

SEQ ID NO: 12554 - protein, 8 aa, Homo sapiens
  Table A; Target 12554; HLA-C*07:01; BSND; ENSG00000162399; TAA
PDFSHIQM

SEQ ID NO: 12555 - protein, 8 aa, Homo sapiens
  Table A; Target 12555; HLA-B*40:02; BSND; ENSG00000162399; TAA
PEMGQPKL

SEQ ID NO: 12556 - protein, 8 aa, Homo sapiens
  Table A; Target 12556; HLA-C*04:01; BSND; ENSG00000162399; TAA
PEMGQPKL

SEQ ID NO: 12557 - protein, 8 aa, Homo sapiens
  Table A; Target 12557; HLA-C*06:02; BSND; ENSG00000162399; TAA
PEMGQPKL

SEQ ID NO: 12558 - protein, 8 aa, Homo sapiens
  Table A; Target 12558; HLA-C*07:02; BSND; ENSG00000162399; TAA
PEMGQPKL

SEQ ID NO: 12559 - protein, 8 aa, Homo sapiens
  Table A; Target 12559; HLA-C*12:03; BSND; ENSG00000162399; TAA
PEMGQPKL

SEQ ID NO: 12560 - protein, 10 aa, Homo sapiens
  Table A; Target 12560; HLA-C*07:02; BSND; ENSG00000162399; TAA
PEMGQPKLGT

SEQ ID NO: 12561 - protein, 10 aa, Homo sapiens
  Table A; Target 12561; HLA-A*23:01; BSND; ENSG00000162399; TAA
PQGPAPLASF

SEQ ID NO: 12562 - protein, 10 aa, Homo sapiens
  Table A; Target 12562; HLA-A*24:02; BSND; ENSG00000162399; TAA
PQGPAPLASF

SEQ ID NO: 12563 - protein, 10 aa, Homo sapiens
  Table A; Target 12563; HLA-A*30:02; BSND; ENSG00000162399; TAA
PQGPAPLASF

SEQ ID NO: 12564 - protein, 10 aa, Homo sapiens
  Table A; Target 12564; HLA-B*07:02; BSND; ENSG00000162399; TAA
PQGPAPLASF

SEQ ID NO: 12565 - protein, 10 aa, Homo sapiens
  Table A; Target 12565; HLA-B*15:01; BSND; ENSG00000162399; TAA
PQGPAPLASF

SEQ ID NO: 12566 - protein, 10 aa, Homo sapiens
  Table A; Target 12566; HLA-B*15:03; BSND; ENSG00000162399; TAA
PQGPAPLASF

SEQ ID NO: 12567 - protein, 10 aa, Homo sapiens
  Table A; Target 12567; HLA-B*38:01; BSND; ENSG00000162399; TAA
PQGPAPLASF

SEQ ID NO: 12568 - protein, 10 aa, Homo sapiens
  Table A; Target 12568; HLA-C*07:04; BSND; ENSG00000162399; TAA
PQGPAPLASF

SEQ ID NO: 12569 - protein, 9 aa, Homo sapiens
  Table A; Target 12569; HLA-A*24:02; BSND; ENSG00000162399; TAA
PQPPYVRLW

SEQ ID NO: 12570 - protein, 8 aa, Homo sapiens
  Table A; Target 12570; HLA-B*15:01; BSND; ENSG00000162399; TAA
PQVYGTFY

SEQ ID NO: 12571 - protein, 8 aa, Homo sapiens
  Table A; Target 12571; HLA-B*15:03; BSND; ENSG00000162399; TAA
PQVYGTFY

SEQ ID NO: 12572 - protein, 8 aa, Homo sapiens
  Table A; Target 12572; HLA-C*07:04; BSND; ENSG00000162399; TAA
PQVYGTFY

SEQ ID NO: 12573 - protein, 9 aa, Homo sapiens
  Table A; Target 12573; HLA-B*51:01; BSND; ENSG00000162399; TAA
QAWMEAAVV

SEQ ID NO: 12574 - protein, 8 aa, Homo sapiens
  Table A; Target 12574; HLA-B*08:01; BSND; ENSG00000162399; TAA
QCYPKITF

SEQ ID NO: 12575 - protein, 9 aa, Homo sapiens
  Table A; Target 12575; HLA-A*02:03; BSND; ENSG00000162399; TAA
QCYPKITFV

SEQ ID NO: 12576 - protein, 9 aa, Homo sapiens
  Table A; Target 12576; HLA-B*13:02; BSND; ENSG00000162399; TAA
QCYPKITFV

SEQ ID NO: 12577 - protein, 10 aa, Homo sapiens
  Table A; Target 12577; HLA-B*40:01; BSND; ENSG00000162399; TAA
QEGQQWEIAL

SEQ ID NO: 12578 - protein, 9 aa, Homo sapiens
  Table A; Target 12578; HLA-A*24:02; BSND; ENSG00000162399; TAA
QGPAPLASF

SEQ ID NO: 12579 - protein, 9 aa, Homo sapiens
  Table A; Target 12579; HLA-A*25:01; BSND; ENSG00000162399; TAA
QGPAPLASF

SEQ ID NO: 12580 - protein, 9 aa, Homo sapiens
  Table A; Target 12580; HLA-B*15:03; BSND; ENSG00000162399; TAA
QGPAPLASF

SEQ ID NO: 12581 - protein, 9 aa, Homo sapiens
  Table A; Target 12581; HLA-B*46:01; BSND; ENSG00000162399; TAA
QGPAPLASF

SEQ ID NO: 12582 - protein, 9 aa, Homo sapiens
  Table A; Target 12582; HLA-B*51:01; BSND; ENSG00000162399; TAA
QGPAPLASF

SEQ ID NO: 12583 - protein, 9 aa, Homo sapiens
  Table A; Target 12583; HLA-C*01:02; BSND; ENSG00000162399; TAA
QGPAPLASF

SEQ ID NO: 12584 - protein, 9 aa, Homo sapiens
  Table A; Target 12584; HLA-C*14:02; BSND; ENSG00000162399; TAA
QGPAPLASF

SEQ ID NO: 12585 - protein, 9 aa, Homo sapiens
  Table A; Target 12585; HLA-A*24:02; BSND; ENSG00000162399; TAA
QSLPDFSHI

SEQ ID NO: 12586 - protein, 9 aa, Homo sapiens
  Table A; Target 12586; HLA-B*57:01; BSND; ENSG00000162399; TAA
QSLPDFSHI

SEQ ID NO: 12587 - protein, 9 aa, Homo sapiens
  Table A; Target 12587; HLA-A*02:01; BSND; ENSG00000162399; TAA
QSWPGPLAC

SEQ ID NO: 12588 - protein, 9 aa, Homo sapiens
  Table A; Target 12588; HLA-B*56:01; BSND; ENSG00000162399; TAA
QSWPGPLAC

SEQ ID NO: 12589 - protein, 9 aa, Homo sapiens
  Table A; Target 12589; HLA-B*35:01; BSND; ENSG00000162399; TAA
QVYGTFYAM

SEQ ID NO: 12590 - protein, 9 aa, Homo sapiens
  Table A; Target 12590; HLA-A*02:04; BSND; ENSG00000162399; TAA
RIGFIVLGL

SEQ ID NO: 12591 - protein, 8 aa, Homo sapiens
  Table A; Target 12591; HLA-B*07:02; BSND; ENSG00000162399; TAA
RPQVYGTF

SEQ ID NO: 12592 - protein, 8 aa, Homo sapiens
  Table A; Target 12592; HLA-C*07:02; BSND; ENSG00000162399; TAA
RPQVYGTF

SEQ ID NO: 12593 - protein, 9 aa, Homo sapiens
  Table A; Target 12593; HLA-A*29:02; BSND; ENSG00000162399; TAA
RPQVYGTFY

SEQ ID NO: 12594 - protein, 9 aa, Homo sapiens
  Table A; Target 12594; HLA-A*30:02; BSND; ENSG00000162399; TAA
RPQVYGTFY

SEQ ID NO: 12595 - protein, 9 aa, Homo sapiens
  Table A; Target 12595; HLA-B*07:02; BSND; ENSG00000162399; TAA
RPQVYGTFY

SEQ ID NO: 12596 - protein, 9 aa, Homo sapiens
  Table A; Target 12596; HLA-B*15:01; BSND; ENSG00000162399; TAA
RPQVYGTFY

SEQ ID NO: 12597 - protein, 9 aa, Homo sapiens
  Table A; Target 12597; HLA-B*35:01; BSND; ENSG00000162399; TAA
RPQVYGTFY

SEQ ID NO: 12598 - protein, 9 aa, Homo sapiens
  Table A; Target 12598; HLA-B*55:01; BSND; ENSG00000162399; TAA
RPQVYGTFY

SEQ ID NO: 12599 - protein, 8 aa, Homo sapiens
  Table A; Target 12599; HLA-B*58:01; BSND; ENSG00000162399; TAA
RSLLAPEM

SEQ ID NO: 12600 - protein, 8 aa, Homo sapiens
  Table A; Target 12600; HLA-C*16:01; BSND; ENSG00000162399; TAA
RSLLAPEM

SEQ ID NO: 12601 - protein, 10 aa, Homo sapiens
  Table A; Target 12601; HLA-A*03:01; BSND; ENSG00000162399; TAA
SDFQGILSPK

SEQ ID NO: 12602 - protein, 10 aa, Homo sapiens
  Table A; Target 12602; HLA-A*03:02; BSND; ENSG00000162399; TAA
SDFQGILSPK

SEQ ID NO: 12603 - protein, 10 aa, Homo sapiens
  Table A; Target 12603; HLA-A*11:01; BSND; ENSG00000162399; TAA
SDFQGILSPK

SEQ ID NO: 12604 - protein, 10 aa, Homo sapiens
  Table A; Target 12604; HLA-B*27:02; BSND; ENSG00000162399; TAA
SDFQGILSPK

SEQ ID NO: 12605 - protein, 8 aa, Homo sapiens
  Table A; Target 12605; HLA-B*37:01; BSND; ENSG00000162399; TAA
SEDHRSLL

SEQ ID NO: 12606 - protein, 8 aa, Homo sapiens
  Table A; Target 12606; HLA-B*40:01; BSND; ENSG00000162399; TAA
SEDHRSLL

SEQ ID NO: 12607 - protein, 9 aa, Homo sapiens
  Table A; Target 12607; HLA-B*49:01; BSND; ENSG00000162399; TAA
SEDHRSLLA

SEQ ID NO: 12608 - protein, 11 aa, Homo sapiens
  Table A; Target 12608; HLA-B*44:02; BSND; ENSG00000162399; TAA
SEGERRLTQSW

SEQ ID NO: 12609 - protein, 11 aa, Homo sapiens
  Table A; Target 12609; HLA-B*44:03; BSND; ENSG00000162399; TAA
SEGERRLTQSW

SEQ ID NO: 12610 - protein, 8 aa, Homo sapiens
  Table A; Target 12610; HLA-B*38:01; BSND; ENSG00000162399; TAA
SHDRPQVY

SEQ ID NO: 12611 - protein, 8 aa, Homo sapiens
  Table A; Target 12611; HLA-B*39:01; BSND; ENSG00000162399; TAA
SHDRPQVY

SEQ ID NO: 12612 - protein, 11 aa, Homo sapiens
  Table A; Target 12612; HLA-B*38:01; BSND; ENSG00000162399; TAA
SHDRPQVYGTF

SEQ ID NO: 12613 - protein, 11 aa, Homo sapiens
  Table A; Target 12613; HLA-A*03:01; BSND; ENSG00000162399; TAA
SLLAPEMGQPK

SEQ ID NO: 12614 - protein, 11 aa, Homo sapiens
  Table A; Target 12614; HLA-A*03:02; BSND; ENSG00000162399; TAA
SLLAPEMGQPK

SEQ ID NO: 12615 - protein, 11 aa, Homo sapiens
  Table A; Target 12615; HLA-A*11:01; BSND; ENSG00000162399; TAA
SLLAPEMGQPK

SEQ ID NO: 12616 - protein, 11 aa, Homo sapiens
  Table A; Target 12616; HLA-A*31:01; BSND; ENSG00000162399; TAA
SLLAPEMGQPK

SEQ ID NO: 12617 - protein, 11 aa, Homo sapiens
  Table A; Target 12617; HLA-B*27:02; BSND; ENSG00000162399; TAA
SLLAPEMGQPK

SEQ ID NO: 12618 - protein, 11 aa, Homo sapiens
  Table A; Target 12618; HLA-B*27:05; BSND; ENSG00000162399; TAA
SLLAPEMGQPK

SEQ ID NO: 12619 - protein, 11 aa, Homo sapiens
  Table A; Target 12619; HLA-C*06:02; BSND; ENSG00000162399; TAA
SLLAPEMGQPK

SEQ ID NO: 12620 - protein, 8 aa, Homo sapiens
  Table A; Target 12620; HLA-A*02:07; BSND; ENSG00000162399; TAA
SLPDFSHI

SEQ ID NO: 12621 - protein, 10 aa, Homo sapiens
  Table A; Target 12621; HLA-A*02:01; BSND; ENSG00000162399; TAA
SLPDFSHIQM

SEQ ID NO: 12622 - protein, 10 aa, Homo sapiens
  Table A; Target 12622; HLA-A*02:03; BSND; ENSG00000162399; TAA
SLPDFSHIQM

SEQ ID NO: 12623 - protein, 10 aa, Homo sapiens
  Table A; Target 12623; HLA-A*02:04; BSND; ENSG00000162399; TAA
SLPDFSHIQM

SEQ ID NO: 12624 - protein, 10 aa, Homo sapiens
  Table A; Target 12624; HLA-A*02:07; BSND; ENSG00000162399; TAA
SLPDFSHIQM

SEQ ID NO: 12625 - protein, 10 aa, Homo sapiens
  Table A; Target 12625; HLA-A*03:01; BSND; ENSG00000162399; TAA
SLPDFSHIQM

SEQ ID NO: 12626 - protein, 10 aa, Homo sapiens
  Table A; Target 12626; HLA-A*26:01; BSND; ENSG00000162399; TAA
SLPDFSHIQM

SEQ ID NO: 12627 - protein, 10 aa, Homo sapiens
  Table A; Target 12627; HLA-A*29:02; BSND; ENSG00000162399; TAA
SLPDFSHIQM

SEQ ID NO: 12628 - protein, 10 aa, Homo sapiens
  Table A; Target 12628; HLA-A*31:01; BSND; ENSG00000162399; TAA
SLPDFSHIQM

SEQ ID NO: 12629 - protein, 10 aa, Homo sapiens
  Table A; Target 12629; HLA-B*46:01; BSND; ENSG00000162399; TAA
SLPDFSHIQM

SEQ ID NO: 12630 - protein, 10 aa, Homo sapiens
  Table A; Target 12630; HLA-C*01:02; BSND; ENSG00000162399; TAA
SLPDFSHIQM

SEQ ID NO: 12631 - protein, 10 aa, Homo sapiens
  Table A; Target 12631; HLA-C*07:04; BSND; ENSG00000162399; TAA
SLPDFSHIQM

SEQ ID NO: 12632 - protein, 11 aa, Homo sapiens
  Table A; Target 12632; HLA-A*02:01; BSND; ENSG00000162399; TAA
SLPDFSHIQMK

SEQ ID NO: 12633 - protein, 11 aa, Homo sapiens
  Table A; Target 12633; HLA-A*02:03; BSND; ENSG00000162399; TAA
SLPDFSHIQMK

SEQ ID NO: 12634 - protein, 11 aa, Homo sapiens
  Table A; Target 12634; HLA-A*02:07; BSND; ENSG00000162399; TAA
SLPDFSHIQMK

SEQ ID NO: 12635 - protein, 11 aa, Homo sapiens
  Table A; Target 12635; HLA-A*03:01; BSND; ENSG00000162399; TAA
SLPDFSHIQMK

SEQ ID NO: 12636 - protein, 11 aa, Homo sapiens
  Table A; Target 12636; HLA-A*03:02; BSND; ENSG00000162399; TAA
SLPDFSHIQMK

SEQ ID NO: 12637 - protein, 11 aa, Homo sapiens
  Table A; Target 12637; HLA-A*11:01; BSND; ENSG00000162399; TAA
SLPDFSHIQMK

SEQ ID NO: 12638 - protein, 11 aa, Homo sapiens
  Table A; Target 12638; HLA-A*31:01; BSND; ENSG00000162399; TAA
SLPDFSHIQMK

SEQ ID NO: 12639 - protein, 8 aa, Homo sapiens
  Table A; Target 12639; HLA-B*07:02; BSND; ENSG00000162399; TAA
SPKAMGLL

SEQ ID NO: 12640 - protein, 8 aa, Homo sapiens
  Table A; Target 12640; HLA-B*08:01; BSND; ENSG00000162399; TAA
SPKAMGLL

SEQ ID NO: 12641 - protein, 8 aa, Homo sapiens
  Table A; Target 12641; HLA-C*07:02; BSND; ENSG00000162399; TAA
SPKAMGLL

SEQ ID NO: 12642 - protein, 9 aa, Homo sapiens
  Table A; Target 12642; HLA-A*33:03; BSND; ENSG00000162399; TAA
SPNASPHDR

SEQ ID NO: 12643 - protein, 9 aa, Homo sapiens
  Table A; Target 12643; HLA-C*07:06; BSND; ENSG00000162399; TAA
SPNASPHDR

SEQ ID NO: 12644 - protein, 8 aa, Homo sapiens
  Table A; Target 12644; HLA-B*56:01; BSND; ENSG00000162399; TAA
SPQPPYVR

SEQ ID NO: 12645 - protein, 9 aa, Homo sapiens
  Table A; Target 12645; HLA-B*07:02; BSND; ENSG00000162399; TAA
SPQPPYVRL

SEQ ID NO: 12646 - protein, 9 aa, Homo sapiens
  Table A; Target 12646; HLA-C*07:02; BSND; ENSG00000162399; TAA
SPQPPYVRL

SEQ ID NO: 12647 - protein, 10 aa, Homo sapiens
  Table A; Target 12647; HLA-B*44:02; BSND; ENSG00000162399; TAA
SPQPPYVRLW

SEQ ID NO: 12648 - protein, 10 aa, Homo sapiens
  Table A; Target 12648; HLA-B*57:01; BSND; ENSG00000162399; TAA
SPQPPYVRLW

SEQ ID NO: 12649 - protein, 9 aa, Homo sapiens
  Table A; Target 12649; HLA-B*56:01; BSND; ENSG00000162399; TAA
SPQQEPQGC

SEQ ID NO: 12650 - protein, 10 aa, Homo sapiens
  Table A; Target 12650; HLA-A*33:03; BSND; ENSG00000162399; TAA
SPQQEPQGCR

SEQ ID NO: 12651 - protein, 8 aa, Homo sapiens
  Table A; Target 12651; HLA-B*35:01; BSND; ENSG00000162399; TAA
SPSPQPPY

SEQ ID NO: 12652 - protein, 9 aa, Homo sapiens
  Table A; Target 12652; HLA-A*02:01; BSND; ENSG00000162399; TAA
SPSPQPPYV

SEQ ID NO: 12653 - protein, 9 aa, Homo sapiens
  Table A; Target 12653; HLA-B*07:02; BSND; ENSG00000162399; TAA
SPSPQPPYV

SEQ ID NO: 12654 - protein, 9 aa, Homo sapiens
  Table A; Target 12654; HLA-B*13:02; BSND; ENSG00000162399; TAA
SPSPQPPYV

SEQ ID NO: 12655 - protein, 9 aa, Homo sapiens
  Table A; Target 12655; HLA-B*35:03; BSND; ENSG00000162399; TAA
SPSPQPPYV

SEQ ID NO: 12656 - protein, 9 aa, Homo sapiens
  Table A; Target 12656; HLA-B*51:01; BSND; ENSG00000162399; TAA
SPSPQPPYV

SEQ ID NO: 12657 - protein, 9 aa, Homo sapiens
  Table A; Target 12657; HLA-B*54:01; BSND; ENSG00000162399; TAA
SPSPQPPYV

SEQ ID NO: 12658 - protein, 9 aa, Homo sapiens
  Table A; Target 12658; HLA-B*55:01; BSND; ENSG00000162399; TAA
SPSPQPPYV

SEQ ID NO: 12659 - protein, 9 aa, Homo sapiens
  Table A; Target 12659; HLA-B*56:01; BSND; ENSG00000162399; TAA
SPSPQPPYV

SEQ ID NO: 12660 - protein, 9 aa, Homo sapiens
  Table A; Target 12660; HLA-C*07:02; BSND; ENSG00000162399; TAA
SPSPQPPYV

SEQ ID NO: 12661 - protein, 9 aa, Homo sapiens
  Table A; Target 12661; HLA-C*12:03; BSND; ENSG00000162399; TAA
SPSPQPPYV

SEQ ID NO: 12662 - protein, 9 aa, Homo sapiens
  Table A; Target 12662; HLA-C*16:02; BSND; ENSG00000162399; TAA
SPSPQPPYV

SEQ ID NO: 12663 - protein, 10 aa, Homo sapiens
  Table A; Target 12663; HLA-A*68:01; BSND; ENSG00000162399; TAA
SPSPQPPYVR

SEQ ID NO: 12664 - protein, 10 aa, Homo sapiens
  Table A; Target 12664; HLA-B*56:01; BSND; ENSG00000162399; TAA
SPSPQPPYVR

SEQ ID NO: 12665 - protein, 10 aa, Homo sapiens
  Table A; Target 12665; HLA-C*07:06; BSND; ENSG00000162399; TAA
SPSPQPPYVR

SEQ ID NO: 12666 - protein, 11 aa, Homo sapiens
  Table A; Target 12666; HLA-C*07:02; BSND; ENSG00000162399; TAA
SPSPQPPYVRL

SEQ ID NO: 12667 - protein, 10 aa, Homo sapiens
  Table A; Target 12667; HLA-A*25:01; BSND; ENSG00000162399; TAA
SVMVIGGIIW

SEQ ID NO: 12668 - protein, 10 aa, Homo sapiens
  Table A; Target 12668; HLA-B*44:02; BSND; ENSG00000162399; TAA
SVMVIGGIIW

SEQ ID NO: 12669 - protein, 10 aa, Homo sapiens
  Table A; Target 12669; HLA-B*57:01; BSND; ENSG00000162399; TAA
SVMVIGGIIW

SEQ ID NO: 12670 - protein, 9 aa, Homo sapiens
  Table A; Target 12670; HLA-A*24:02; BSND; ENSG00000162399; TAA
SYSEDHRSL

SEQ ID NO: 12671 - protein, 9 aa, Homo sapiens
  Table A; Target 12671; HLA-C*01:02; BSND; ENSG00000162399; TAA
SYSEDHRSL

SEQ ID NO: 12672 - protein, 9 aa, Homo sapiens
  Table A; Target 12672; HLA-C*14:02; BSND; ENSG00000162399; TAA
SYSEDHRSL

SEQ ID NO: 12673 - protein, 9 aa, Homo sapiens
  Table A; Target 12673; HLA-C*16:01; BSND; ENSG00000162399; TAA
SYSEDHRSL

SEQ ID NO: 12674 - protein, 9 aa, Homo sapiens
  Table A; Target 12674; HLA-C*16:02; BSND; ENSG00000162399; TAA
SYSEDHRSL

SEQ ID NO: 12675 - protein, 10 aa, Homo sapiens
  Table A; Target 12675; HLA-A*24:02; BSND; ENSG00000162399; TAA
SYSEDHRSLL

SEQ ID NO: 12676 - protein, 9 aa, Homo sapiens
  Table A; Target 12676; HLA-A*23:01; BSND; ENSG00000162399; TAA
TFVPADSDF

SEQ ID NO: 12677 - protein, 9 aa, Homo sapiens
  Table A; Target 12677; HLA-C*04:01; BSND; ENSG00000162399; TAA
TFVPADSDF

SEQ ID NO: 12678 - protein, 9 aa, Homo sapiens
  Table A; Target 12678; HLA-C*14:02; BSND; ENSG00000162399; TAA
TFVPADSDF

SEQ ID NO: 12679 - protein, 9 aa, Homo sapiens
  Table A; Target 12679; HLA-B*15:03; BSND; ENSG00000162399; TAA
TFYAMGSVM

SEQ ID NO: 12680 - protein, 9 aa, Homo sapiens
  Table A; Target 12680; HLA-B*18:01; BSND; ENSG00000162399; TAA
TFYAMGSVM

SEQ ID NO: 12681 - protein, 9 aa, Homo sapiens
  Table A; Target 12681; HLA-B*35:01; BSND; ENSG00000162399; TAA
TFYAMGSVM

SEQ ID NO: 12682 - protein, 9 aa, Homo sapiens
  Table A; Target 12682; HLA-B*35:03; BSND; ENSG00000162399; TAA
TFYAMGSVM

SEQ ID NO: 12683 - protein, 9 aa, Homo sapiens
  Table A; Target 12683; HLA-B*39:01; BSND; ENSG00000162399; TAA
TFYAMGSVM

SEQ ID NO: 12684 - protein, 9 aa, Homo sapiens
  Table A; Target 12684; HLA-B*40:01; BSND; ENSG00000162399; TAA
TFYAMGSVM

SEQ ID NO: 12685 - protein, 9 aa, Homo sapiens
  Table A; Target 12685; HLA-B*46:01; BSND; ENSG00000162399; TAA
TFYAMGSVM

SEQ ID NO: 12686 - protein, 9 aa, Homo sapiens
  Table A; Target 12686; HLA-B*49:01; BSND; ENSG00000162399; TAA
TFYAMGSVM

SEQ ID NO: 12687 - protein, 9 aa, Homo sapiens
  Table A; Target 12687; HLA-C*01:02; BSND; ENSG00000162399; TAA
TFYAMGSVM

SEQ ID NO: 12688 - protein, 9 aa, Homo sapiens
  Table A; Target 12688; HLA-C*04:01; BSND; ENSG00000162399; TAA
TFYAMGSVM

SEQ ID NO: 12689 - protein, 9 aa, Homo sapiens
  Table A; Target 12689; HLA-C*12:03; BSND; ENSG00000162399; TAA
TFYAMGSVM

SEQ ID NO: 12690 - protein, 9 aa, Homo sapiens
  Table A; Target 12690; HLA-C*14:02; BSND; ENSG00000162399; TAA
TFYAMGSVM

SEQ ID NO: 12691 - protein, 10 aa, Homo sapiens
  Table A; Target 12691; HLA-C*04:01; BSND; ENSG00000162399; TAA
TFYAMGSVMV

SEQ ID NO: 12692 - protein, 9 aa, Homo sapiens
  Table A; Target 12692; HLA-B*13:02; BSND; ENSG00000162399; TAA
TQSWPGPLA

SEQ ID NO: 12693 - protein, 9 aa, Homo sapiens
  Table A; Target 12693; HLA-A*02:04; BSND; ENSG00000162399; TAA
VIGGIIWSM

SEQ ID NO: 12694 - protein, 9 aa, Homo sapiens
  Table A; Target 12694; HLA-A*02:07; BSND; ENSG00000162399; TAA
VIGGIIWSM

SEQ ID NO: 12695 - protein, 9 aa, Homo sapiens
  Table A; Target 12695; HLA-A*02:04; BSND; ENSG00000162399; TAA
VLGLFLLAL

SEQ ID NO: 12696 - protein, 9 aa, Homo sapiens
  Table A; Target 12696; HLA-B*57:01; BSND; ENSG00000162399; TAA
VMVIGGIIW

SEQ ID NO: 12697 - protein, 10 aa, Homo sapiens
  Table A; Target 12697; HLA-B*51:01; BSND; ENSG00000162399; TAA
VPADSDFQGI

SEQ ID NO: 12698 - protein, 11 aa, Homo sapiens
  Table A; Target 12698; HLA-B*07:02; BSND; ENSG00000162399; TAA
VPADSDFQGIL

SEQ ID NO: 12699 - protein, 11 aa, Homo sapiens
  Table A; Target 12699; HLA-B*35:01; BSND; ENSG00000162399; TAA
VPADSDFQGIL

SEQ ID NO: 12700 - protein, 11 aa, Homo sapiens
  Table A; Target 12700; HLA-B*35:03; BSND; ENSG00000162399; TAA
VPADSDFQGIL

SEQ ID NO: 12701 - protein, 11 aa, Homo sapiens
  Table A; Target 12701; HLA-C*07:02; BSND; ENSG00000162399; TAA
VPADSDFQGIL

SEQ ID NO: 12702 - protein, 9 aa, Homo sapiens
  Table A; Target 12702; HLA-B*13:02; BSND; ENSG00000162399; TAA
VQAWMEAAV

SEQ ID NO: 12703 - protein, 8 aa, Homo sapiens
  Table A; Target 12703; HLA-A*23:01; BSND; ENSG00000162399; TAA
VYGTFYAM

SEQ ID NO: 12704 - protein, 8 aa, Homo sapiens
  Table A; Target 12704; HLA-A*24:02; BSND; ENSG00000162399; TAA
VYGTFYAM

SEQ ID NO: 12705 - protein, 8 aa, Homo sapiens
  Table A; Target 12705; HLA-C*14:02; BSND; ENSG00000162399; TAA
VYGTFYAM

SEQ ID NO: 12706 - protein, 10 aa, Homo sapiens
  Table A; Target 12706; HLA-A*30:01; BSND; ENSG00000162399; TAA
WEEAAYDQSL

SEQ ID NO: 12707 - protein, 10 aa, Homo sapiens
  Table A; Target 12707; HLA-B*40:01; BSND; ENSG00000162399; TAA
WEEAAYDQSL

SEQ ID NO: 12708 - protein, 10 aa, Homo sapiens
  Table A; Target 12708; HLA-B*40:02; BSND; ENSG00000162399; TAA
WEEAAYDQSL

SEQ ID NO: 12709 - protein, 9 aa, Homo sapiens
  Table A; Target 12709; HLA-B*18:01; BSND; ENSG00000162399; TAA
WEIALPNNW

SEQ ID NO: 12710 - protein, 9 aa, Homo sapiens
  Table A; Target 12710; HLA-B*44:02; BSND; ENSG00000162399; TAA
WEIALPNNW

SEQ ID NO: 12711 - protein, 9 aa, Homo sapiens
  Table A; Target 12711; HLA-B*44:03; BSND; ENSG00000162399; TAA
WEIALPNNW

SEQ ID NO: 12712 - protein, 9 aa, Homo sapiens
  Table A; Target 12712; HLA-C*16:04; BSND; ENSG00000162399; TAA
WEIALPNNW

SEQ ID NO: 12713 - protein, 8 aa, Homo sapiens
  Table A; Target 12713; HLA-C*04:01; BSND; ENSG00000162399; TAA
WMEAAVVI

SEQ ID NO: 12714 - protein, 8 aa, Homo sapiens
  Table A; Target 12714; HLA-B*08:01; BSND; ENSG00000162399; TAA
YAMGSVMV

SEQ ID NO: 12715 - protein, 8 aa, Homo sapiens
  Table A; Target 12715; HLA-B*13:02; BSND; ENSG00000162399; TAA
YAMGSVMV

SEQ ID NO: 12716 - protein, 8 aa, Homo sapiens
  Table A; Target 12716; HLA-B*49:01; BSND; ENSG00000162399; TAA
YAMGSVMV

SEQ ID NO: 12717 - protein, 8 aa, Homo sapiens
  Table A; Target 12717; HLA-B*51:01; BSND; ENSG00000162399; TAA
YAMGSVMV

SEQ ID NO: 12718 - protein, 8 aa, Homo sapiens
  Table A; Target 12718; HLA-B*54:01; BSND; ENSG00000162399; TAA
YAMGSVMV

SEQ ID NO: 12719 - protein, 8 aa, Homo sapiens
  Table A; Target 12719; HLA-B*56:01; BSND; ENSG00000162399; TAA
YAMGSVMV

SEQ ID NO: 12720 - protein, 8 aa, Homo sapiens
  Table A; Target 12720; HLA-C*02:02; BSND; ENSG00000162399; TAA
YAMGSVMV

SEQ ID NO: 12721 - protein, 8 aa, Homo sapiens
  Table A; Target 12721; HLA-C*03:03; BSND; ENSG00000162399; TAA
YAMGSVMV

SEQ ID NO: 12722 - protein, 8 aa, Homo sapiens
  Table A; Target 12722; HLA-C*12:03; BSND; ENSG00000162399; TAA
YAMGSVMV

SEQ ID NO: 12723 - protein, 9 aa, Homo sapiens
  Table A; Target 12723; HLA-A*01:01; BSND; ENSG00000162399; TAA
YAMGSVMVI

SEQ ID NO: 12724 - protein, 9 aa, Homo sapiens
  Table A; Target 12724; HLA-A*02:01; BSND; ENSG00000162399; TAA
YAMGSVMVI

SEQ ID NO: 12725 - protein, 9 aa, Homo sapiens
  Table A; Target 12725; HLA-A*02:03; BSND; ENSG00000162399; TAA
YAMGSVMVI

SEQ ID NO: 12726 - protein, 9 aa, Homo sapiens
  Table A; Target 12726; HLA-A*23:01; BSND; ENSG00000162399; TAA
YAMGSVMVI

SEQ ID NO: 12727 - protein, 9 aa, Homo sapiens
  Table A; Target 12727; HLA-A*24:02; BSND; ENSG00000162399; TAA
YAMGSVMVI

SEQ ID NO: 12728 - protein, 9 aa, Homo sapiens
  Table A; Target 12728; HLA-A*25:01; BSND; ENSG00000162399; TAA
YAMGSVMVI

SEQ ID NO: 12729 - protein, 9 aa, Homo sapiens
  Table A; Target 12729; HLA-A*26:01; BSND; ENSG00000162399; TAA
YAMGSVMVI

SEQ ID NO: 12730 - protein, 9 aa, Homo sapiens
  Table A; Target 12730; HLA-A*30:01; BSND; ENSG00000162399; TAA
YAMGSVMVI

SEQ ID NO: 12731 - protein, 9 aa, Homo sapiens
  Table A; Target 12731; HLA-A*32:01; BSND; ENSG00000162399; TAA
YAMGSVMVI

SEQ ID NO: 12732 - protein, 9 aa, Homo sapiens
  Table A; Target 12732; HLA-A*68:02; BSND; ENSG00000162399; TAA
YAMGSVMVI

SEQ ID NO: 12733 - protein, 9 aa, Homo sapiens
  Table A; Target 12733; HLA-B*07:02; BSND; ENSG00000162399; TAA
YAMGSVMVI

SEQ ID NO: 12734 - protein, 9 aa, Homo sapiens
  Table A; Target 12734; HLA-B*08:01; BSND; ENSG00000162399; TAA
YAMGSVMVI

SEQ ID NO: 12735 - protein, 9 aa, Homo sapiens
  Table A; Target 12735; HLA-B*13:02; BSND; ENSG00000162399; TAA
YAMGSVMVI

SEQ ID NO: 12736 - protein, 9 aa, Homo sapiens
  Table A; Target 12736; HLA-B*15:03; BSND; ENSG00000162399; TAA
YAMGSVMVI

SEQ ID NO: 12737 - protein, 9 aa, Homo sapiens
  Table A; Target 12737; HLA-B*35:01; BSND; ENSG00000162399; TAA
YAMGSVMVI

SEQ ID NO: 12738 - protein, 9 aa, Homo sapiens
  Table A; Target 12738; HLA-B*35:03; BSND; ENSG00000162399; TAA
YAMGSVMVI

SEQ ID NO: 12739 - protein, 9 aa, Homo sapiens
  Table A; Target 12739; HLA-B*38:01; BSND; ENSG00000162399; TAA
YAMGSVMVI

SEQ ID NO: 12740 - protein, 9 aa, Homo sapiens
  Table A; Target 12740; HLA-B*39:01; BSND; ENSG00000162399; TAA
YAMGSVMVI

SEQ ID NO: 12741 - protein, 9 aa, Homo sapiens
  Table A; Target 12741; HLA-B*40:01; BSND; ENSG00000162399; TAA
YAMGSVMVI

SEQ ID NO: 12742 - protein, 9 aa, Homo sapiens
  Table A; Target 12742; HLA-B*40:02; BSND; ENSG00000162399; TAA
YAMGSVMVI

SEQ ID NO: 12743 - protein, 9 aa, Homo sapiens
  Table A; Target 12743; HLA-B*46:01; BSND; ENSG00000162399; TAA
YAMGSVMVI

SEQ ID NO: 12744 - protein, 9 aa, Homo sapiens
  Table A; Target 12744; HLA-B*49:01; BSND; ENSG00000162399; TAA
YAMGSVMVI

SEQ ID NO: 12745 - protein, 9 aa, Homo sapiens
  Table A; Target 12745; HLA-B*51:01; BSND; ENSG00000162399; TAA
YAMGSVMVI

SEQ ID NO: 12746 - protein, 9 aa, Homo sapiens
  Table A; Target 12746; HLA-B*54:01; BSND; ENSG00000162399; TAA
YAMGSVMVI

SEQ ID NO: 12747 - protein, 9 aa, Homo sapiens
  Table A; Target 12747; HLA-B*56:01; BSND; ENSG00000162399; TAA
YAMGSVMVI

SEQ ID NO: 12748 - protein, 9 aa, Homo sapiens
  Table A; Target 12748; HLA-B*57:01; BSND; ENSG00000162399; TAA
YAMGSVMVI

SEQ ID NO: 12749 - protein, 9 aa, Homo sapiens
  Table A; Target 12749; HLA-B*58:01; BSND; ENSG00000162399; TAA
YAMGSVMVI

SEQ ID NO: 12750 - protein, 9 aa, Homo sapiens
  Table A; Target 12750; HLA-C*01:02; BSND; ENSG00000162399; TAA
YAMGSVMVI

SEQ ID NO: 12751 - protein, 9 aa, Homo sapiens
  Table A; Target 12751; HLA-C*02:02; BSND; ENSG00000162399; TAA
YAMGSVMVI

SEQ ID NO: 12752 - protein, 9 aa, Homo sapiens
  Table A; Target 12752; HLA-C*03:03; BSND; ENSG00000162399; TAA
YAMGSVMVI

SEQ ID NO: 12753 - protein, 9 aa, Homo sapiens
  Table A; Target 12753; HLA-C*03:04; BSND; ENSG00000162399; TAA
YAMGSVMVI

SEQ ID NO: 12754 - protein, 9 aa, Homo sapiens
  Table A; Target 12754; HLA-C*04:01; BSND; ENSG00000162399; TAA
YAMGSVMVI

SEQ ID NO: 12755 - protein, 9 aa, Homo sapiens
  Table A; Target 12755; HLA-C*05:01; BSND; ENSG00000162399; TAA
YAMGSVMVI

SEQ ID NO: 12756 - protein, 9 aa, Homo sapiens
  Table A; Target 12756; HLA-C*07:04; BSND; ENSG00000162399; TAA
YAMGSVMVI

SEQ ID NO: 12757 - protein, 9 aa, Homo sapiens
  Table A; Target 12757; HLA-C*07:06; BSND; ENSG00000162399; TAA
YAMGSVMVI

SEQ ID NO: 12758 - protein, 9 aa, Homo sapiens
  Table A; Target 12758; HLA-C*12:03; BSND; ENSG00000162399; TAA
YAMGSVMVI

SEQ ID NO: 12759 - protein, 9 aa, Homo sapiens
  Table A; Target 12759; HLA-C*14:02; BSND; ENSG00000162399; TAA
YAMGSVMVI

SEQ ID NO: 12760 - protein, 9 aa, Homo sapiens
  Table A; Target 12760; HLA-C*16:01; BSND; ENSG00000162399; TAA
YAMGSVMVI

SEQ ID NO: 12761 - protein, 9 aa, Homo sapiens
  Table A; Target 12761; HLA-C*16:02; BSND; ENSG00000162399; TAA
YAMGSVMVI

SEQ ID NO: 12762 - protein, 9 aa, Homo sapiens
  Table A; Target 12762; HLA-C*16:04; BSND; ENSG00000162399; TAA
YAMGSVMVI

SEQ ID NO: 12763 - protein, 8 aa, Homo sapiens
  Table A; Target 12763; HLA-B*37:01; BSND; ENSG00000162399; TAA
YDQSLPDF

SEQ ID NO: 12764 - protein, 8 aa, Homo sapiens
  Table A; Target 12764; HLA-C*07:01; BSND; ENSG00000162399; TAA
YDQSLPDF

SEQ ID NO: 12765 - protein, 11 aa, Homo sapiens
  Table A; Target 12765; HLA-B*38:01; BSND; ENSG00000162399; TAA
YGLPDGAGDLL

SEQ ID NO: 12766 - protein, 11 aa, Homo sapiens
  Table A; Target 12766; HLA-B*39:01; BSND; ENSG00000162399; TAA
YGLPDGAGDLL

SEQ ID NO: 12767 - protein, 8 aa, Homo sapiens
  Table A; Target 12767; HLA-B*54:01; BSND; ENSG00000162399; TAA
YPKITFVP

SEQ ID NO: 12768 - protein, 9 aa, Homo sapiens
  Table A; Target 12768; HLA-B*40:02; BSND; ENSG00000162399; TAA
YPKITFVPA

SEQ ID NO: 12769 - protein, 9 aa, Homo sapiens
  Table A; Target 12769; HLA-B*54:01; BSND; ENSG00000162399; TAA
YPKITFVPA

SEQ ID NO: 12770 - protein, 9 aa, Homo sapiens
  Table A; Target 12770; HLA-B*55:01; BSND; ENSG00000162399; TAA
YPKITFVPA

SEQ ID NO: 12771 - protein, 9 aa, Homo sapiens
  Table A; Target 12771; HLA-B*56:01; BSND; ENSG00000162399; TAA
YPKITFVPA

SEQ ID NO: 12772 - protein, 9 aa, Homo sapiens
  Table A; Target 12772; HLA-B*07:02; BSND; ENSG00000162399; TAA
YPRTKVEEK

SEQ ID NO: 12773 - protein, 11 aa, Homo sapiens
  Table A; Target 12773; HLA-B*54:01; BSND; ENSG00000162399; TAA
YPRTKVEEKEA

SEQ ID NO: 12774 - protein, 8 aa, Homo sapiens
  Table A; Target 12774; HLA-B*08:01; BSND; ENSG00000162399; TAA
YSEDHRSL

SEQ ID NO: 12775 - protein, 8 aa, Homo sapiens
  Table A; Target 12775; HLA-C*01:02; BSND; ENSG00000162399; TAA
YSEDHRSL

SEQ ID NO: 12776 - protein, 8 aa, Homo sapiens
  Table A; Target 12776; HLA-C*03:03; BSND; ENSG00000162399; TAA
YSEDHRSL

SEQ ID NO: 12777 - protein, 8 aa, Homo sapiens
  Table A; Target 12777; HLA-C*03:04; BSND; ENSG00000162399; TAA
YSEDHRSL

SEQ ID NO: 12778 - protein, 8 aa, Homo sapiens
  Table A; Target 12778; HLA-C*05:01; BSND; ENSG00000162399; TAA
YSEDHRSL

SEQ ID NO: 12779 - protein, 8 aa, Homo sapiens
  Table A; Target 12779; HLA-C*12:03; BSND; ENSG00000162399; TAA
YSEDHRSL

SEQ ID NO: 12780 - protein, 8 aa, Homo sapiens
  Table A; Target 12780; HLA-C*16:01; BSND; ENSG00000162399; TAA
YSEDHRSL

SEQ ID NO: 12781 - protein, 8 aa, Homo sapiens
  Table A; Target 12781; HLA-C*16:02; BSND; ENSG00000162399; TAA
YSEDHRSL

SEQ ID NO: 12782 - protein, 9 aa, Homo sapiens
  Table A; Target 12782; HLA-A*01:01; BSND; ENSG00000162399; TAA
YSEDHRSLL

SEQ ID NO: 12783 - protein, 9 aa, Homo sapiens
  Table A; Target 12783; HLA-B*40:01; BSND; ENSG00000162399; TAA
YSEDHRSLL

SEQ ID NO: 12784 - protein, 9 aa, Homo sapiens
  Table A; Target 12784; HLA-C*03:03; BSND; ENSG00000162399; TAA
YSEDHRSLL

SEQ ID NO: 12785 - protein, 9 aa, Homo sapiens
  Table A; Target 12785; HLA-C*03:04; BSND; ENSG00000162399; TAA
YSEDHRSLL

SEQ ID NO: 12786 - protein, 9 aa, Homo sapiens
  Table A; Target 12786; HLA-C*05:01; BSND; ENSG00000162399; TAA
YSEDHRSLL

SEQ ID NO: 12787 - protein, 9 aa, Homo sapiens
  Table A; Target 12787; HLA-C*12:03; BSND; ENSG00000162399; TAA
YSEDHRSLL

SEQ ID NO: 12788 - protein, 9 aa, Homo sapiens
  Table A; Target 12788; HLA-C*16:02; BSND; ENSG00000162399; TAA
YSEDHRSLL

SEQ ID NO: 12789 - protein, 8 aa, Homo sapiens
  Table A; Target 12789; HLA-C*14:02; BSND; ENSG00000162399; TAA
YYGLPDGA

SEQ ID NO: 12790 - protein, 10 aa, Homo sapiens
  Table A; Target 12790; HLA-B*56:01; C6orf222; ENSG00000189325; TAA
AAAALRSGEA

SEQ ID NO: 12791 - protein, 9 aa, Homo sapiens
  Table A; Target 12791; HLA-B*56:01; C6orf222; ENSG00000189325; TAA
AAALRSGEA

SEQ ID NO: 12792 - protein, 9 aa, Homo sapiens
  Table A; Target 12792; HLA-C*16:01; C6orf222; ENSG00000189325; TAA
AAALRSGEA

SEQ ID NO: 12793 - protein, 9 aa, Homo sapiens
  Table A; Target 12793; HLA-C*03:03; C6orf222; ENSG00000189325; TAA
AADVSSPEA

SEQ ID NO: 12794 - protein, 9 aa, Homo sapiens
  Table A; Target 12794; HLA-C*03:04; C6orf222; ENSG00000189325; TAA
AADVSSPEA

SEQ ID NO: 12795 - protein, 9 aa, Homo sapiens
  Table A; Target 12795; HLA-C*05:01; C6orf222; ENSG00000189325; TAA
AADVSSPEA

SEQ ID NO: 12796 - protein, 10 aa, Homo sapiens
  Table A; Target 12796; HLA-B*58:01; C6orf222; ENSG00000189325; TAA
AADVSSPEAW

SEQ ID NO: 12797 - protein, 10 aa, Homo sapiens
  Table A; Target 12797; HLA-C*05:01; C6orf222; ENSG00000189325; TAA
AADVSSPEAW

SEQ ID NO: 12798 - protein, 10 aa, Homo sapiens
  Table A; Target 12798; HLA-C*16:04; C6orf222; ENSG00000189325; TAA
AADVSSPEAW

SEQ ID NO: 12799 - protein, 9 aa, Homo sapiens
  Table A; Target 12799; HLA-B*56:01; C6orf222; ENSG00000189325; TAA
AAGAASPEA

SEQ ID NO: 12800 - protein, 9 aa, Homo sapiens
  Table A; Target 12800; HLA-C*03:03; C6orf222; ENSG00000189325; TAA
AAGAASPEA

SEQ ID NO: 12801 - protein, 9 aa, Homo sapiens
  Table A; Target 12801; HLA-C*03:04; C6orf222; ENSG00000189325; TAA
AAGAASPEA

SEQ ID NO: 12802 - protein, 8 aa, Homo sapiens
  Table A; Target 12802; HLA-A*33:03; C6orf222; ENSG00000189325; TAA
AAGEPALR

SEQ ID NO: 12803 - protein, 8 aa, Homo sapiens
  Table A; Target 12803; HLA-A*68:01; C6orf222; ENSG00000189325; TAA
AAGEPALR

SEQ ID NO: 12804 - protein, 8 aa, Homo sapiens
  Table A; Target 12804; HLA-C*07:06; C6orf222; ENSG00000189325; TAA
AAGEPALR

SEQ ID NO: 12805 - protein, 9 aa, Homo sapiens
  Table A; Target 12805; HLA-A*03:01; C6orf222; ENSG00000189325; TAA
AAGEPALRK

SEQ ID NO: 12806 - protein, 9 aa, Homo sapiens
  Table A; Target 12806; HLA-A*03:02; C6orf222; ENSG00000189325; TAA
AAGEPALRK

SEQ ID NO: 12807 - protein, 9 aa, Homo sapiens
  Table A; Target 12807; HLA-A*11:01; C6orf222; ENSG00000189325; TAA
AAGEPALRK

SEQ ID NO: 12808 - protein, 9 aa, Homo sapiens
  Table A; Target 12808; HLA-C*07:06; C6orf222; ENSG00000189325; TAA
AAGEPALRK

SEQ ID NO: 12809 - protein, 10 aa, Homo sapiens
  Table A; Target 12809; HLA-A*03:01; C6orf222; ENSG00000189325; TAA
AAGEPALRKK

SEQ ID NO: 12810 - protein, 10 aa, Homo sapiens
  Table A; Target 12810; HLA-A*03:02; C6orf222; ENSG00000189325; TAA
AAGEPALRKK

SEQ ID NO: 12811 - protein, 10 aa, Homo sapiens
  Table A; Target 12811; HLA-A*11:01; C6orf222; ENSG00000189325; TAA
AAGEPALRKK

SEQ ID NO: 12812 - protein, 9 aa, Homo sapiens
  Table A; Target 12812; HLA-A*32:01; C6orf222; ENSG00000189325; TAA
AASPEARRP

SEQ ID NO: 12813 - protein, 9 aa, Homo sapiens
  Table A; Target 12813; HLA-C*16:01; C6orf222; ENSG00000189325; TAA
AASPEARRP

SEQ ID NO: 12814 - protein, 9 aa, Homo sapiens
  Table A; Target 12814; HLA-C*16:02; C6orf222; ENSG00000189325; TAA
AASPEARRP

SEQ ID NO: 12815 - protein, 10 aa, Homo sapiens
  Table A; Target 12815; HLA-A*03:02; C6orf222; ENSG00000189325; TAA
AASPEARRPK

SEQ ID NO: 12816 - protein, 10 aa, Homo sapiens
  Table A; Target 12816; HLA-C*16:01; C6orf222; ENSG00000189325; TAA
AASPEARRPK

SEQ ID NO: 12817 - protein, 11 aa, Homo sapiens
  Table A; Target 12817; HLA-A*03:02; C6orf222; ENSG00000189325; TAA
ACESKEIIIQK

SEQ ID NO: 12818 - protein, 11 aa, Homo sapiens
  Table A; Target 12818; HLA-A*11:01; C6orf222; ENSG00000189325; TAA
ACESKEIIIQK

SEQ ID NO: 12819 - protein, 9 aa, Homo sapiens
  Table A; Target 12819; HLA-A*25:01; C6orf222; ENSG00000189325; TAA
ADVSSPEAW

SEQ ID NO: 12820 - protein, 9 aa, Homo sapiens
  Table A; Target 12820; HLA-B*27:02; C6orf222; ENSG00000189325; TAA
ADVSSPEAW

SEQ ID NO: 12821 - protein, 9 aa, Homo sapiens
  Table A; Target 12821; HLA-B*37:01; C6orf222; ENSG00000189325; TAA
ADVSSPEAW

SEQ ID NO: 12822 - protein, 9 aa, Homo sapiens
  Table A; Target 12822; HLA-B*44:02; C6orf222; ENSG00000189325; TAA
ADVSSPEAW

SEQ ID NO: 12823 - protein, 9 aa, Homo sapiens
  Table A; Target 12823; HLA-B*44:03; C6orf222; ENSG00000189325; TAA
ADVSSPEAW

SEQ ID NO: 12824 - protein, 9 aa, Homo sapiens
  Table A; Target 12824; HLA-C*16:04; C6orf222; ENSG00000189325; TAA
ADVSSPEAW

SEQ ID NO: 12825 - protein, 9 aa, Homo sapiens
  Table A; Target 12825; HLA-B*49:01; C6orf222; ENSG00000189325; TAA
AEAHCTTAA

SEQ ID NO: 12826 - protein, 8 aa, Homo sapiens
  Table A; Target 12826; HLA-A*30:01; C6orf222; ENSG00000189325; TAA
AEGEPVVI

SEQ ID NO: 12827 - protein, 8 aa, Homo sapiens
  Table A; Target 12827; HLA-B*40:01; C6orf222; ENSG00000189325; TAA
AEGEPVVI

SEQ ID NO: 12828 - protein, 8 aa, Homo sapiens
  Table A; Target 12828; HLA-B*44:02; C6orf222; ENSG00000189325; TAA
AEGEPVVI

SEQ ID NO: 12829 - protein, 8 aa, Homo sapiens
  Table A; Target 12829; HLA-B*44:03; C6orf222; ENSG00000189325; TAA
AEGEPVVI

SEQ ID NO: 12830 - protein, 8 aa, Homo sapiens
  Table A; Target 12830; HLA-B*49:01; C6orf222; ENSG00000189325; TAA
AEGEPVVI

SEQ ID NO: 12831 - protein, 8 aa, Homo sapiens
  Table A; Target 12831; HLA-C*03:04; C6orf222; ENSG00000189325; TAA
AGAPGPSV

SEQ ID NO: 12832 - protein, 9 aa, Homo sapiens
  Table A; Target 12832; HLA-B*39:01; C6orf222; ENSG00000189325; TAA
AGAPGPSVL

SEQ ID NO: 12833 - protein, 9 aa, Homo sapiens
  Table A; Target 12833; HLA-C*02:02; C6orf222; ENSG00000189325; TAA
AGAPGPSVL

SEQ ID NO: 12834 - protein, 9 aa, Homo sapiens
  Table A; Target 12834; HLA-C*03:03; C6orf222; ENSG00000189325; TAA
AGAPGPSVL

SEQ ID NO: 12835 - protein, 9 aa, Homo sapiens
  Table A; Target 12835; HLA-C*03:04; C6orf222; ENSG00000189325; TAA
AGAPGPSVL

SEQ ID NO: 12836 - protein, 9 aa, Homo sapiens
  Table A; Target 12836; HLA-A*11:01; C6orf222; ENSG00000189325; TAA
AGEPALRKK

SEQ ID NO: 12837 - protein, 8 aa, Homo sapiens
  Table A; Target 12837; HLA-B*37:01; C6orf222; ENSG00000189325; TAA
AGSNSHAM

SEQ ID NO: 12838 - protein, 8 aa, Homo sapiens
  Table A; Target 12838; HLA-C*03:04; C6orf222; ENSG00000189325; TAA
AGSNSHAM

SEQ ID NO: 12839 - protein, 8 aa, Homo sapiens
  Table A; Target 12839; HLA-C*16:01; C6orf222; ENSG00000189325; TAA
AGSNSHAM

SEQ ID NO: 12840 - protein, 9 aa, Homo sapiens
  Table A; Target 12840; HLA-A*02:01; C6orf222; ENSG00000189325; TAA
AIIQMIVEL

SEQ ID NO: 12841 - protein, 9 aa, Homo sapiens
  Table A; Target 12841; HLA-A*02:04; C6orf222; ENSG00000189325; TAA
AIIQMIVEL

SEQ ID NO: 12842 - protein, 9 aa, Homo sapiens
  Table A; Target 12842; HLA-A*02:07; C6orf222; ENSG00000189325; TAA
AIIQMIVEL

SEQ ID NO: 12843 - protein, 9 aa, Homo sapiens
  Table A; Target 12843; HLA-A*30:01; C6orf222; ENSG00000189325; TAA
AIIQMIVEL

SEQ ID NO: 12844 - protein, 9 aa, Homo sapiens
  Table A; Target 12844; HLA-B*15:01; C6orf222; ENSG00000189325; TAA
AIIQMIVEL

SEQ ID NO: 12845 - protein, 9 aa, Homo sapiens
  Table A; Target 12845; HLA-B*35:03; C6orf222; ENSG00000189325; TAA
AIIQMIVEL

SEQ ID NO: 12846 - protein, 9 aa, Homo sapiens
  Table A; Target 12846; HLA-B*40:01; C6orf222; ENSG00000189325; TAA
AIIQMIVEL

SEQ ID NO: 12847 - protein, 9 aa, Homo sapiens
  Table A; Target 12847; HLA-B*58:01; C6orf222; ENSG00000189325; TAA
AIIQMIVEL

SEQ ID NO: 12848 - protein, 9 aa, Homo sapiens
  Table A; Target 12848; HLA-A*02:01; C6orf222; ENSG00000189325; TAA
ALDVSPHAT

SEQ ID NO: 12849 - protein, 9 aa, Homo sapiens
  Table A; Target 12849; HLA-B*55:01; C6orf222; ENSG00000189325; TAA
ALDVSPHAT

SEQ ID NO: 12850 - protein, 9 aa, Homo sapiens
  Table A; Target 12850; HLA-A*02:01; C6orf222; ENSG00000189325; TAA
ALPNPAPAV

SEQ ID NO: 12851 - protein, 9 aa, Homo sapiens
  Table A; Target 12851; HLA-A*02:03; C6orf222; ENSG00000189325; TAA
ALPNPAPAV

SEQ ID NO: 12852 - protein, 9 aa, Homo sapiens
  Table A; Target 12852; HLA-A*02:04; C6orf222; ENSG00000189325; TAA
ALPNPAPAV

SEQ ID NO: 12853 - protein, 9 aa, Homo sapiens
  Table A; Target 12853; HLA-A*02:07; C6orf222; ENSG00000189325; TAA
ALPNPAPAV

SEQ ID NO: 12854 - protein, 9 aa, Homo sapiens
  Table A; Target 12854; HLA-A*24:02; C6orf222; ENSG00000189325; TAA
ALPNPAPAV

SEQ ID NO: 12855 - protein, 9 aa, Homo sapiens
  Table A; Target 12855; HLA-A*32:01; C6orf222; ENSG00000189325; TAA
ALPNPAPAV

SEQ ID NO: 12856 - protein, 9 aa, Homo sapiens
  Table A; Target 12856; HLA-B*13:02; C6orf222; ENSG00000189325; TAA
ALPNPAPAV

SEQ ID NO: 12857 - protein, 9 aa, Homo sapiens
  Table A; Target 12857; HLA-B*37:01; C6orf222; ENSG00000189325; TAA
ALPNPAPAV

SEQ ID NO: 12858 - protein, 9 aa, Homo sapiens
  Table A; Target 12858; HLA-B*40:02; C6orf222; ENSG00000189325; TAA
ALPNPAPAV

SEQ ID NO: 12859 - protein, 9 aa, Homo sapiens
  Table A; Target 12859; HLA-B*46:01; C6orf222; ENSG00000189325; TAA
ALPNPAPAV

SEQ ID NO: 12860 - protein, 9 aa, Homo sapiens
  Table A; Target 12860; HLA-B*55:01; C6orf222; ENSG00000189325; TAA
ALPNPAPAV

SEQ ID NO: 12861 - protein, 9 aa, Homo sapiens
  Table A; Target 12861; HLA-C*01:02; C6orf222; ENSG00000189325; TAA
ALPNPAPAV

SEQ ID NO: 12862 - protein, 9 aa, Homo sapiens
  Table A; Target 12862; HLA-C*06:02; C6orf222; ENSG00000189325; TAA
ALPNPAPAV

SEQ ID NO: 12863 - protein, 9 aa, Homo sapiens
  Table A; Target 12863; HLA-C*14:02; C6orf222; ENSG00000189325; TAA
ALPNPAPAV

SEQ ID NO: 12864 - protein, 9 aa, Homo sapiens
  Table A; Target 12864; HLA-C*16:04; C6orf222; ENSG00000189325; TAA
ALPNPAPAV

SEQ ID NO: 12865 - protein, 10 aa, Homo sapiens
  Table A; Target 12865; HLA-A*03:01; C6orf222; ENSG00000189325; TAA
ALPNPAPAVR

SEQ ID NO: 12866 - protein, 10 aa, Homo sapiens
  Table A; Target 12866; HLA-A*03:02; C6orf222; ENSG00000189325; TAA
ALPNPAPAVR

SEQ ID NO: 12867 - protein, 10 aa, Homo sapiens
  Table A; Target 12867; HLA-A*31:01; C6orf222; ENSG00000189325; TAA
ALPNPAPAVR

SEQ ID NO: 12868 - protein, 11 aa, Homo sapiens
  Table A; Target 12868; HLA-A*03:01; C6orf222; ENSG00000189325; TAA
ALPNPAPAVRK

SEQ ID NO: 12869 - protein, 11 aa, Homo sapiens
  Table A; Target 12869; HLA-A*03:02; C6orf222; ENSG00000189325; TAA
ALPNPAPAVRK

SEQ ID NO: 12870 - protein, 11 aa, Homo sapiens
  Table A; Target 12870; HLA-A*11:01; C6orf222; ENSG00000189325; TAA
ALPNPAPAVRK

SEQ ID NO: 12871 - protein, 9 aa, Homo sapiens
  Table A; Target 12871; HLA-B*07:02; C6orf222; ENSG00000189325; TAA
ALRSGEADL

SEQ ID NO: 12872 - protein, 9 aa, Homo sapiens
  Table A; Target 12872; HLA-B*15:01; C6orf222; ENSG00000189325; TAA
ALRSGEADL

SEQ ID NO: 12873 - protein, 9 aa, Homo sapiens
  Table A; Target 12873; HLA-C*01:02; C6orf222; ENSG00000189325; TAA
ALRSGEADL

SEQ ID NO: 12874 - protein, 9 aa, Homo sapiens
  Table A; Target 12874; HLA-C*07:02; C6orf222; ENSG00000189325; TAA
APGKGSESW

SEQ ID NO: 12875 - protein, 9 aa, Homo sapiens
  Table A; Target 12875; HLA-B*56:01; C6orf222; ENSG00000189325; TAA
APGPSVLPT

SEQ ID NO: 12876 - protein, 10 aa, Homo sapiens
  Table A; Target 12876; HLA-B*56:01; C6orf222; ENSG00000189325; TAA
APGPSVLPTP

SEQ ID NO: 12877 - protein, 11 aa, Homo sapiens
  Table A; Target 12877; HLA-B*56:01; C6orf222; ENSG00000189325; TAA
APGPSVLPTPS

SEQ ID NO: 12878 - protein, 11 aa, Homo sapiens
  Table A; Target 12878; HLA-B*56:01; C6orf222; ENSG00000189325; TAA
APSAEAHCTTA

SEQ ID NO: 12879 - protein, 10 aa, Homo sapiens
  Table A; Target 12879; HLA-B*07:02; C6orf222; ENSG00000189325; TAA
APSQARGHTP

SEQ ID NO: 12880 - protein, 10 aa, Homo sapiens
  Table A; Target 12880; HLA-B*56:01; C6orf222; ENSG00000189325; TAA
APSQARGHTP

SEQ ID NO: 12881 - protein, 10 aa, Homo sapiens
  Table A; Target 12881; HLA-C*07:02; C6orf222; ENSG00000189325; TAA
APSQARGHTP

SEQ ID NO: 12882 - protein, 10 aa, Homo sapiens
  Table A; Target 12882; HLA-A*11:01; C6orf222; ENSG00000189325; TAA
ASEYKEFIQK

SEQ ID NO: 12883 - protein, 9 aa, Homo sapiens
  Table A; Target 12883; HLA-C*16:01; C6orf222; ENSG00000189325; TAA
ASPEARRPK

SEQ ID NO: 12884 - protein, 8 aa, Homo sapiens
  Table A; Target 12884; HLA-C*01:02; C6orf222; ENSG00000189325; TAA
ASQLGVAL

SEQ ID NO: 12885 - protein, 8 aa, Homo sapiens
  Table A; Target 12885; HLA-C*03:03; C6orf222; ENSG00000189325; TAA
ASQLGVAL

SEQ ID NO: 12886 - protein, 8 aa, Homo sapiens
  Table A; Target 12886; HLA-C*03:04; C6orf222; ENSG00000189325; TAA
ASQLGVAL

SEQ ID NO: 12887 - protein, 8 aa, Homo sapiens
  Table A; Target 12887; HLA-C*14:02; C6orf222; ENSG00000189325; TAA
ASQLGVAL

SEQ ID NO: 12888 - protein, 8 aa, Homo sapiens
  Table A; Target 12888; HLA-C*16:01; C6orf222; ENSG00000189325; TAA
ASQLGVAL

SEQ ID NO: 12889 - protein, 9 aa, Homo sapiens
  Table A; Target 12889; HLA-A*03:01; C6orf222; ENSG00000189325; TAA
ATLRSQVAH

SEQ ID NO: 12890 - protein, 9 aa, Homo sapiens
  Table A; Target 12890; HLA-A*11:01; C6orf222; ENSG00000189325; TAA
ATLRSQVAH

SEQ ID NO: 12891 - protein, 11 aa, Homo sapiens
  Table A; Target 12891; HLA-A*30:01; C6orf222; ENSG00000189325; TAA
CESKEIIIQKL

SEQ ID NO: 12892 - protein, 11 aa, Homo sapiens
  Table A; Target 12892; HLA-B*40:01; C6orf222; ENSG00000189325; TAA
CESKEIIIQKL

SEQ ID NO: 12893 - protein, 8 aa, Homo sapiens
  Table A; Target 12893; HLA-B*51:01; C6orf222; ENSG00000189325; TAA
DAIIQMIV

SEQ ID NO: 12894 - protein, 8 aa, Homo sapiens
  Table A; Target 12894; HLA-B*51:01; C6orf222; ENSG00000189325; TAA
DGQLGQQI

SEQ ID NO: 12895 - protein, 10 aa, Homo sapiens
  Table A; Target 12895; HLA-A*33:01; C6orf222; ENSG00000189325; TAA
DGQLGQQIRR

SEQ ID NO: 12896 - protein, 10 aa, Homo sapiens
  Table A; Target 12896; HLA-A*68:01; C6orf222; ENSG00000189325; TAA
DGQLGQQIRR

SEQ ID NO: 12897 - protein, 8 aa, Homo sapiens
  Table A; Target 12897; HLA-B*51:01; C6orf222; ENSG00000189325; TAA
DGTGALDV

SEQ ID NO: 12898 - protein, 9 aa, Homo sapiens
  Table A; Target 12898; HLA-A*33:01; C6orf222; ENSG00000189325; TAA
DHQSFLIKV

SEQ ID NO: 12899 - protein, 9 aa, Homo sapiens
  Table A; Target 12899; HLA-A*68:02; C6orf222; ENSG00000189325; TAA
DHQSFLIKV

SEQ ID NO: 12900 - protein, 9 aa, Homo sapiens
  Table A; Target 12900; HLA-B*38:01; C6orf222; ENSG00000189325; TAA
DHQSFLIKV

SEQ ID NO: 12901 - protein, 9 aa, Homo sapiens
  Table A; Target 12901; HLA-B*51:01; C6orf222; ENSG00000189325; TAA
DHQSFLIKV

SEQ ID NO: 12902 - protein, 9 aa, Homo sapiens
  Table A; Target 12902; HLA-B*13:02; C6orf222; ENSG00000189325; TAA
DQDAIIQMI

SEQ ID NO: 12903 - protein, 9 aa, Homo sapiens
  Table A; Target 12903; HLA-B*38:01; C6orf222; ENSG00000189325; TAA
DQDAIIQMI

SEQ ID NO: 12904 - protein, 9 aa, Homo sapiens
  Table A; Target 12904; HLA-B*51:01; C6orf222; ENSG00000189325; TAA
DQDAIIQMI

SEQ ID NO: 12905 - protein, 9 aa, Homo sapiens
  Table A; Target 12905; HLA-A*68:01; C6orf222; ENSG00000189325; TAA
DQPNITSPK

SEQ ID NO: 12906 - protein, 9 aa, Homo sapiens
  Table A; Target 12906; HLA-B*38:01; C6orf222; ENSG00000189325; TAA
DQWEEEQSL

SEQ ID NO: 12907 - protein, 9 aa, Homo sapiens
  Table A; Target 12907; HLA-B*39:01; C6orf222; ENSG00000189325; TAA
DQWEEEQSL

SEQ ID NO: 12908 - protein, 8 aa, Homo sapiens
  Table A; Target 12908; HLA-C*05:01; C6orf222; ENSG00000189325; TAA
DSDHQSFL

SEQ ID NO: 12909 - protein, 8 aa, Homo sapiens
  Table A; Target 12909; HLA-B*51:01; C6orf222; ENSG00000189325; TAA
DSSLSKLV

SEQ ID NO: 12910 - protein, 9 aa, Homo sapiens
  Table A; Target 12910; HLA-B*54:01; C6orf222; ENSG00000189325; TAA
DSSLSKLVA

SEQ ID NO: 12911 - protein, 8 aa, Homo sapiens
  Table A; Target 12911; HLA-A*33:01; C6orf222; ENSG00000189325; TAA
DTKKGWLK

SEQ ID NO: 12912 - protein, 8 aa, Homo sapiens
  Table A; Target 12912; HLA-A*25:01; C6orf222; ENSG00000189325; TAA
DVSLANKF

SEQ ID NO: 12913 - protein, 8 aa, Homo sapiens
  Table A; Target 12913; HLA-A*33:03; C6orf222; ENSG00000189325; TAA
DVSLANKF

SEQ ID NO: 12914 - protein, 8 aa, Homo sapiens
  Table A; Target 12914; HLA-B*07:02; C6orf222; ENSG00000189325; TAA
DVSLANKF

SEQ ID NO: 12915 - protein, 8 aa, Homo sapiens
  Table A; Target 12915; HLA-B*08:01; C6orf222; ENSG00000189325; TAA
DVSLANKF

SEQ ID NO: 12916 - protein, 8 aa, Homo sapiens
  Table A; Target 12916; HLA-B*18:01; C6orf222; ENSG00000189325; TAA
DVSLANKF

SEQ ID NO: 12917 - protein, 8 aa, Homo sapiens
  Table A; Target 12917; HLA-B*35:01; C6orf222; ENSG00000189325; TAA
DVSLANKF

SEQ ID NO: 12918 - protein, 8 aa, Homo sapiens
  Table A; Target 12918; HLA-C*04:01; C6orf222; ENSG00000189325; TAA
DVSLANKF

SEQ ID NO: 12919 - protein, 8 aa, Homo sapiens
  Table A; Target 12919; HLA-C*07:01; C6orf222; ENSG00000189325; TAA
DVSLANKF

SEQ ID NO: 12920 - protein, 9 aa, Homo sapiens
  Table A; Target 12920; HLA-A*26:01; C6orf222; ENSG00000189325; TAA
DVSPHATGH

SEQ ID NO: 12921 - protein, 9 aa, Homo sapiens
  Table A; Target 12921; HLA-C*07:06; C6orf222; ENSG00000189325; TAA
DVSPHATGH

SEQ ID NO: 12922 - protein, 8 aa, Homo sapiens
  Table A; Target 12922; HLA-A*25:01; C6orf222; ENSG00000189325; TAA
DVSSPEAW

SEQ ID NO: 12923 - protein, 10 aa, Homo sapiens
  Table A; Target 12923; HLA-A*33:01; C6orf222; ENSG00000189325; TAA
DVSSPEAWPP

SEQ ID NO: 12924 - protein, 11 aa, Homo sapiens
  Table A; Target 12924; HLA-A*11:01; C6orf222; ENSG00000189325; TAA
DVSSPEAWPPK

SEQ ID NO: 12925 - protein, 11 aa, Homo sapiens
  Table A; Target 12925; HLA-A*33:01; C6orf222; ENSG00000189325; TAA
DVSSPEAWPPK

SEQ ID NO: 12926 - protein, 11 aa, Homo sapiens
  Table A; Target 12926; HLA-A*68:01; C6orf222; ENSG00000189325; TAA
DVSSPEAWPPK

SEQ ID NO: 12927 - protein, 8 aa, Homo sapiens
  Table A; Target 12927; HLA-B*35:03; C6orf222; ENSG00000189325; TAA
EAAGEPAL

SEQ ID NO: 12928 - protein, 9 aa, Homo sapiens
  Table A; Target 12928; HLA-A*33:01; C6orf222; ENSG00000189325; TAA
EAAGEPALR

SEQ ID NO: 12929 - protein, 9 aa, Homo sapiens
  Table A; Target 12929; HLA-A*33:03; C6orf222; ENSG00000189325; TAA
EAAGEPALR

SEQ ID NO: 12930 - protein, 9 aa, Homo sapiens
  Table A; Target 12930; HLA-A*68:01; C6orf222; ENSG00000189325; TAA
EAAGEPALR

SEQ ID NO: 12931 - protein, 9 aa, Homo sapiens
  Table A; Target 12931; HLA-C*07:06; C6orf222; ENSG00000189325; TAA
EAAGEPALR

SEQ ID NO: 12932 - protein, 10 aa, Homo sapiens
  Table A; Target 12932; HLA-A*33:01; C6orf222; ENSG00000189325; TAA
EAAGEPALRK

SEQ ID NO: 12933 - protein, 10 aa, Homo sapiens
  Table A; Target 12933; HLA-A*33:03; C6orf222; ENSG00000189325; TAA
EAAGEPALRK

SEQ ID NO: 12934 - protein, 10 aa, Homo sapiens
  Table A; Target 12934; HLA-A*68:01; C6orf222; ENSG00000189325; TAA
EAAGEPALRK

SEQ ID NO: 12935 - protein, 10 aa, Homo sapiens
  Table A; Target 12935; HLA-C*07:06; C6orf222; ENSG00000189325; TAA
EAAGEPALRK

SEQ ID NO: 12936 - protein, 11 aa, Homo sapiens
  Table A; Target 12936; HLA-A*33:01; C6orf222; ENSG00000189325; TAA
EAAGEPALRKK

SEQ ID NO: 12937 - protein, 11 aa, Homo sapiens
  Table A; Target 12937; HLA-A*33:03; C6orf222; ENSG00000189325; TAA
EAAGEPALRKK

SEQ ID NO: 12938 - protein, 11 aa, Homo sapiens
  Table A; Target 12938; HLA-A*68:01; C6orf222; ENSG00000189325; TAA
EAAGEPALRKK

SEQ ID NO: 12939 - protein, 11 aa, Homo sapiens
  Table A; Target 12939; HLA-C*07:06; C6orf222; ENSG00000189325; TAA
EAAGEPALRKK

SEQ ID NO: 12940 - protein, 8 aa, Homo sapiens
  Table A; Target 12940; HLA-A*33:03; C6orf222; ENSG00000189325; TAA
EADLGPAR

SEQ ID NO: 12941 - protein, 9 aa, Homo sapiens
  Table A; Target 12941; HLA-A*33:01; C6orf222; ENSG00000189325; TAA
EADLGPARR

SEQ ID NO: 12942 - protein, 9 aa, Homo sapiens
  Table A; Target 12942; HLA-A*33:03; C6orf222; ENSG00000189325; TAA
EADLGPARR

SEQ ID NO: 12943 - protein, 9 aa, Homo sapiens
  Table A; Target 12943; HLA-A*68:01; C6orf222; ENSG00000189325; TAA
EADLGPARR

SEQ ID NO: 12944 - protein, 9 aa, Homo sapiens
  Table A; Target 12944; HLA-C*05:01; C6orf222; ENSG00000189325; TAA
EADLGPARR

SEQ ID NO: 12945 - protein, 9 aa, Homo sapiens
  Table A; Target 12945; HLA-C*07:06; C6orf222; ENSG00000189325; TAA
EADLGPARR

SEQ ID NO: 12946 - protein, 9 aa, Homo sapiens
  Table A; Target 12946; HLA-A*25:01; C6orf222; ENSG00000189325; TAA
EAGAPGPSV

SEQ ID NO: 12947 - protein, 9 aa, Homo sapiens
  Table A; Target 12947; HLA-A*26:01; C6orf222; ENSG00000189325; TAA
EAGAPGPSV

SEQ ID NO: 12948 - protein, 9 aa, Homo sapiens
  Table A; Target 12948; HLA-B*35:03; C6orf222; ENSG00000189325; TAA
EAGAPGPSV

SEQ ID NO: 12949 - protein, 9 aa, Homo sapiens
  Table A; Target 12949; HLA-B*39:01; C6orf222; ENSG00000189325; TAA
EAGAPGPSV

SEQ ID NO: 12950 - protein, 9 aa, Homo sapiens
  Table A; Target 12950; HLA-B*51:01; C6orf222; ENSG00000189325; TAA
EAGAPGPSV

SEQ ID NO: 12951 - protein, 9 aa, Homo sapiens
  Table A; Target 12951; HLA-C*03:03; C6orf222; ENSG00000189325; TAA
EAGAPGPSV

SEQ ID NO: 12952 - protein, 9 aa, Homo sapiens
  Table A; Target 12952; HLA-C*05:01; C6orf222; ENSG00000189325; TAA
EAGAPGPSV

SEQ ID NO: 12953 - protein, 9 aa, Homo sapiens
  Table A; Target 12953; HLA-B*07:02; C6orf222; ENSG00000189325; TAA
EARGREEGL

SEQ ID NO: 12954 - protein, 9 aa, Homo sapiens
  Table A; Target 12954; HLA-B*08:01; C6orf222; ENSG00000189325; TAA
EARGREEGL

SEQ ID NO: 12955 - protein, 11 aa, Homo sapiens
  Table A; Target 12955; HLA-A*33:01; C6orf222; ENSG00000189325; TAA
EARGREEGLSK

SEQ ID NO: 12956 - protein, 10 aa, Homo sapiens
  Table A; Target 12956; HLA-A*25:01; C6orf222; ENSG00000189325; TAA
EAWPPKKSSF

SEQ ID NO: 12957 - protein, 10 aa, Homo sapiens
  Table A; Target 12957; HLA-A*03:01; C6orf222; ENSG00000189325; TAA
EDQPNITSPK

SEQ ID NO: 12958 - protein, 10 aa, Homo sapiens
  Table A; Target 12958; HLA-A*03:02; C6orf222; ENSG00000189325; TAA
EDQPNITSPK

SEQ ID NO: 12959 - protein, 10 aa, Homo sapiens
  Table A; Target 12959; HLA-A*11:01; C6orf222; ENSG00000189325; TAA
EDQPNITSPK

SEQ ID NO: 12960 - protein, 10 aa, Homo sapiens
  Table A; Target 12960; HLA-A*33:01; C6orf222; ENSG00000189325; TAA
EDQPNITSPK

SEQ ID NO: 12961 - protein, 10 aa, Homo sapiens
  Table A; Target 12961; HLA-A*33:03; C6orf222; ENSG00000189325; TAA
EDQPNITSPK

SEQ ID NO: 12962 - protein, 10 aa, Homo sapiens
  Table A; Target 12962; HLA-A*68:01; C6orf222; ENSG00000189325; TAA
EDQPNITSPK

SEQ ID NO: 12963 - protein, 10 aa, Homo sapiens
  Table A; Target 12963; HLA-B*27:02; C6orf222; ENSG00000189325; TAA
EDQPNITSPK

SEQ ID NO: 12964 - protein, 10 aa, Homo sapiens
  Table A; Target 12964; HLA-B*27:05; C6orf222; ENSG00000189325; TAA
EDQPNITSPK

SEQ ID NO: 12965 - protein, 10 aa, Homo sapiens
  Table A; Target 12965; HLA-C*07:06; C6orf222; ENSG00000189325; TAA
EDQPNITSPK

SEQ ID NO: 12966 - protein, 8 aa, Homo sapiens
  Table A; Target 12966; HLA-B*37:01; C6orf222; ENSG00000189325; TAA
EDSDHQSF

SEQ ID NO: 12967 - protein, 9 aa, Homo sapiens
  Table A; Target 12967; HLA-B*37:01; C6orf222; ENSG00000189325; TAA
EDSDHQSFL

SEQ ID NO: 12968 - protein, 10 aa, Homo sapiens
  Table A; Target 12968; HLA-A*30:01; C6orf222; ENSG00000189325; TAA
EEEQSLASQL

SEQ ID NO: 12969 - protein, 10 aa, Homo sapiens
  Table A; Target 12969; HLA-B*40:01; C6orf222; ENSG00000189325; TAA
EEEQSLASQL

SEQ ID NO: 12970 - protein, 11 aa, Homo sapiens
  Table A; Target 12970; HLA-B*40:01; C6orf222; ENSG00000189325; TAA
EEGLSKAAAAL

SEQ ID NO: 12971 - protein, 11 aa, Homo sapiens
  Table A; Target 12971; HLA-A*25:01; C6orf222; ENSG00000189325; TAA
EELPLDRASEY

SEQ ID NO: 12972 - protein, 11 aa, Homo sapiens
  Table A; Target 12972; HLA-A*26:01; C6orf222; ENSG00000189325; TAA
EELPLDRASEY

SEQ ID NO: 12973 - protein, 11 aa, Homo sapiens
  Table A; Target 12973; HLA-A*30:02; C6orf222; ENSG00000189325; TAA
EELPLDRASEY

SEQ ID NO: 12974 - protein, 11 aa, Homo sapiens
  Table A; Target 12974; HLA-B*18:01; C6orf222; ENSG00000189325; TAA
EELPLDRASEY

SEQ ID NO: 12975 - protein, 11 aa, Homo sapiens
  Table A; Target 12975; HLA-B*27:02; C6orf222; ENSG00000189325; TAA
EELPLDRASEY

SEQ ID NO: 12976 - protein, 11 aa, Homo sapiens
  Table A; Target 12976; HLA-B*44:02; C6orf222; ENSG00000189325; TAA
EELPLDRASEY

SEQ ID NO: 12977 - protein, 11 aa, Homo sapiens
  Table A; Target 12977; HLA-B*44:03; C6orf222; ENSG00000189325; TAA
EELPLDRASEY

SEQ ID NO: 12978 - protein, 11 aa, Homo sapiens
  Table A; Target 12978; HLA-C*16:04; C6orf222; ENSG00000189325; TAA
EELPLDRASEY

SEQ ID NO: 12979 - protein, 9 aa, Homo sapiens
  Table A; Target 12979; HLA-A*30:01; C6orf222; ENSG00000189325; TAA
EEQSLASQL

SEQ ID NO: 12980 - protein, 9 aa, Homo sapiens
  Table A; Target 12980; HLA-B*18:01; C6orf222; ENSG00000189325; TAA
EEQSLASQL

SEQ ID NO: 12981 - protein, 9 aa, Homo sapiens
  Table A; Target 12981; HLA-B*40:01; C6orf222; ENSG00000189325; TAA
EEQSLASQL

SEQ ID NO: 12982 - protein, 9 aa, Homo sapiens
  Table A; Target 12982; HLA-B*40:02; C6orf222; ENSG00000189325; TAA
EEQSLASQL

SEQ ID NO: 12983 - protein, 9 aa, Homo sapiens
  Table A; Target 12983; HLA-B*44:02; C6orf222; ENSG00000189325; TAA
EEQSLASQL

SEQ ID NO: 12984 - protein, 9 aa, Homo sapiens
  Table A; Target 12984; HLA-B*44:03; C6orf222; ENSG00000189325; TAA
EEQSLASQL

SEQ ID NO: 12985 - protein, 9 aa, Homo sapiens
  Table A; Target 12985; HLA-B*18:01; C6orf222; ENSG00000189325; TAA
EEVGVENPA

SEQ ID NO: 12986 - protein, 9 aa, Homo sapiens
  Table A; Target 12986; HLA-A*23:01; C6orf222; ENSG00000189325; TAA
EFIQKIISM

SEQ ID NO: 12987 - protein, 9 aa, Homo sapiens
  Table A; Target 12987; HLA-A*25:01; C6orf222; ENSG00000189325; TAA
EFIQKIISM

SEQ ID NO: 12988 - protein, 9 aa, Homo sapiens
  Table A; Target 12988; HLA-A*26:01; C6orf222; ENSG00000189325; TAA
EFIQKIISM

SEQ ID NO: 12989 - protein, 9 aa, Homo sapiens
  Table A; Target 12989; HLA-A*33:03; C6orf222; ENSG00000189325; TAA
EFIQKIISM

SEQ ID NO: 12990 - protein, 9 aa, Homo sapiens
  Table A; Target 12990; HLA-B*08:01; C6orf222; ENSG00000189325; TAA
EFIQKIISM

SEQ ID NO: 12991 - protein, 9 aa, Homo sapiens
  Table A; Target 12991; HLA-C*14:02; C6orf222; ENSG00000189325; TAA
EFIQKIISM

SEQ ID NO: 12992 - protein, 9 aa, Homo sapiens
  Table A; Target 12992; HLA-A*33:03; C6orf222; ENSG00000189325; TAA
EFSDSSLSK

SEQ ID NO: 12993 - protein, 10 aa, Homo sapiens
  Table A; Target 12993; HLA-A*25:01; C6orf222; ENSG00000189325; TAA
EFSDSSLSKL

SEQ ID NO: 12994 - protein, 11 aa, Homo sapiens
  Table A; Target 12994; HLA-A*33:01; C6orf222; ENSG00000189325; TAA
EGLSKAAAALR

SEQ ID NO: 12995 - protein, 11 aa, Homo sapiens
  Table A; Target 12995; HLA-A*33:03; C6orf222; ENSG00000189325; TAA
EGLSKAAAALR

SEQ ID NO: 12996 - protein, 10 aa, Homo sapiens
  Table A; Target 12996; HLA-A*25:01; C6orf222; ENSG00000189325; TAA
EIIIQKLVAL

SEQ ID NO: 12997 - protein, 10 aa, Homo sapiens
  Table A; Target 12997; HLA-B*08:01; C6orf222; ENSG00000189325; TAA
EIIIQKLVAL

SEQ ID NO: 12998 - protein, 10 aa, Homo sapiens
  Table A; Target 12998; HLA-A*01:01; C6orf222; ENSG00000189325; TAA
ELPLDRASEY

SEQ ID NO: 12999 - protein, 10 aa, Homo sapiens
  Table A; Target 12999; HLA-A*25:01; C6orf222; ENSG00000189325; TAA
ELPLDRASEY

SEQ ID NO: 13000 - protein, 10 aa, Homo sapiens
  Table A; Target 13000; HLA-A*26:01; C6orf222; ENSG00000189325; TAA
ELPLDRASEY

SEQ ID NO: 13001 - protein, 8 aa, Homo sapiens
  Table A; Target 13001; HLA-A*33:03; C6orf222; ENSG00000189325; TAA
ENPAPHCR

SEQ ID NO: 13002 - protein, 11 aa, Homo sapiens
  Table A; Target 13002; HLA-B*35:01; C6orf222; ENSG00000189325; TAA
EPLEAAGEPAL

SEQ ID NO: 13003 - protein, 11 aa, Homo sapiens
  Table A; Target 13003; HLA-B*35:03; C6orf222; ENSG00000189325; TAA
EPLEAAGEPAL

SEQ ID NO: 13004 - protein, 11 aa, Homo sapiens
  Table A; Target 13004; HLA-B*39:01; C6orf222; ENSG00000189325; TAA
EPLEAAGEPAL

SEQ ID NO: 13005 - protein, 11 aa, Homo sapiens
  Table A; Target 13005; HLA-B*55:01; C6orf222; ENSG00000189325; TAA
EPLEAAGEPAL

SEQ ID NO: 13006 - protein, 10 aa, Homo sapiens
  Table A; Target 13006; HLA-B*35:03; C6orf222; ENSG00000189325; TAA
EPLPAEGEPV

SEQ ID NO: 13007 - protein, 11 aa, Homo sapiens
  Table A; Target 13007; HLA-B*35:03; C6orf222; ENSG00000189325; TAA
EPLPAEGEPVV

SEQ ID NO: 13008 - protein, 11 aa, Homo sapiens
  Table A; Target 13008; HLA-B*51:01; C6orf222; ENSG00000189325; TAA
EPLPAEGEPVV

SEQ ID NO: 13009 - protein, 8 aa, Homo sapiens
  Table A; Target 13009; HLA-B*54:01; C6orf222; ENSG00000189325; TAA
EPVVISEA

SEQ ID NO: 13010 - protein, 10 aa, Homo sapiens
  Table A; Target 13010; HLA-B*39:01; C6orf222; ENSG00000189325; TAA
EQQGEEQPQV

SEQ ID NO: 13011 - protein, 8 aa, Homo sapiens
  Table A; Target 13011; HLA-B*39:01; C6orf222; ENSG00000189325; TAA
EQSLASQL

SEQ ID NO: 13012 - protein, 10 aa, Homo sapiens
  Table A; Target 13012; HLA-B*13:02; C6orf222; ENSG00000189325; TAA
EQSLASQLGV

SEQ ID NO: 13013 - protein, 9 aa, Homo sapiens
  Table A; Target 13013; HLA-A*33:01; C6orf222; ENSG00000189325; TAA
ESKEIIIQK

SEQ ID NO: 13014 - protein, 9 aa, Homo sapiens
  Table A; Target 13014; HLA-A*33:03; C6orf222; ENSG00000189325; TAA
ESKEIIIQK

SEQ ID NO: 13015 - protein, 9 aa, Homo sapiens
  Table A; Target 13015; HLA-A*68:01; C6orf222; ENSG00000189325; TAA
ESKEIIIQK

SEQ ID NO: 13016 - protein, 9 aa, Homo sapiens
  Table A; Target 13016; HLA-C*07:06; C6orf222; ENSG00000189325; TAA
ESKEIIIQK

SEQ ID NO: 13017 - protein, 10 aa, Homo sapiens
  Table A; Target 13017; HLA-A*25:01; C6orf222; ENSG00000189325; TAA
ESKEIIIQKL

SEQ ID NO: 13018 - protein, 10 aa, Homo sapiens
  Table A; Target 13018; HLA-A*26:01; C6orf222; ENSG00000189325; TAA
ESKEIIIQKL

SEQ ID NO: 13019 - protein, 10 aa, Homo sapiens
  Table A; Target 13019; HLA-A*33:03; C6orf222; ENSG00000189325; TAA
ESKEIIIQKL

SEQ ID NO: 13020 - protein, 10 aa, Homo sapiens
  Table A; Target 13020; HLA-A*68:01; C6orf222; ENSG00000189325; TAA
ESKEIIIQKL

SEQ ID NO: 13021 - protein, 10 aa, Homo sapiens
  Table A; Target 13021; HLA-A*68:02; C6orf222; ENSG00000189325; TAA
ESKEIIIQKL

SEQ ID NO: 13022 - protein, 11 aa, Homo sapiens
  Table A; Target 13022; HLA-A*33:03; C6orf222; ENSG00000189325; TAA
ETGDFLPSEQR

SEQ ID NO: 13023 - protein, 11 aa, Homo sapiens
  Table A; Target 13023; HLA-A*68:01; C6orf222; ENSG00000189325; TAA
ETGDFLPSEQR

SEQ ID NO: 13024 - protein, 10 aa, Homo sapiens
  Table A; Target 13024; HLA-A*25:01; C6orf222; ENSG00000189325; TAA
EVDGQLGQQI

SEQ ID NO: 13025 - protein, 10 aa, Homo sapiens
  Table A; Target 13025; HLA-A*26:01; C6orf222; ENSG00000189325; TAA
EVDGQLGQQI

SEQ ID NO: 13026 - protein, 10 aa, Homo sapiens
  Table A; Target 13026; HLA-A*68:01; C6orf222; ENSG00000189325; TAA
EVDGQLGQQI

SEQ ID NO: 13027 - protein, 10 aa, Homo sapiens
  Table A; Target 13027; HLA-A*68:02; C6orf222; ENSG00000189325; TAA
EVDGQLGQQI

SEQ ID NO: 13028 - protein, 10 aa, Homo sapiens
  Table A; Target 13028; HLA-B*38:01; C6orf222; ENSG00000189325; TAA
EVDGQLGQQI

SEQ ID NO: 13029 - protein, 10 aa, Homo sapiens
  Table A; Target 13029; HLA-C*05:01; C6orf222; ENSG00000189325; TAA
EVDGQLGQQI

SEQ ID NO: 13030 - protein, 11 aa, Homo sapiens
  Table A; Target 13030; HLA-A*33:03; C6orf222; ENSG00000189325; TAA
EVDGQLGQQIR

SEQ ID NO: 13031 - protein, 11 aa, Homo sapiens
  Table A; Target 13031; HLA-A*68:01; C6orf222; ENSG00000189325; TAA
EVDGQLGQQIR

SEQ ID NO: 13032 - protein, 11 aa, Homo sapiens
  Table A; Target 13032; HLA-C*07:06; C6orf222; ENSG00000189325; TAA
EVDGQLGQQIR

SEQ ID NO: 13033 - protein, 8 aa, Homo sapiens
  Table A; Target 13033; HLA-A*33:01; C6orf222; ENSG00000189325; TAA
EYKEFIQK

SEQ ID NO: 13034 - protein, 8 aa, Homo sapiens
  Table A; Target 13034; HLA-A*33:03; C6orf222; ENSG00000189325; TAA
EYKEFIQK

SEQ ID NO: 13035 - protein, 9 aa, Homo sapiens
  Table A; Target 13035; HLA-A*23:01; C6orf222; ENSG00000189325; TAA
EYKEFIQKI

SEQ ID NO: 13036 - protein, 9 aa, Homo sapiens
  Table A; Target 13036; HLA-A*24:02; C6orf222; ENSG00000189325; TAA
EYKEFIQKI

SEQ ID NO: 13037 - protein, 9 aa, Homo sapiens
  Table A; Target 13037; HLA-A*33:03; C6orf222; ENSG00000189325; TAA
EYKEFIQKI

SEQ ID NO: 13038 - protein, 9 aa, Homo sapiens
  Table A; Target 13038; HLA-A*32:01; C6orf222; ENSG00000189325; TAA
FAGSNSHAM

SEQ ID NO: 13039 - protein, 9 aa, Homo sapiens
  Table A; Target 13039; HLA-B*08:01; C6orf222; ENSG00000189325; TAA
FAGSNSHAM

SEQ ID NO: 13040 - protein, 9 aa, Homo sapiens
  Table A; Target 13040; HLA-B*15:01; C6orf222; ENSG00000189325; TAA
FAGSNSHAM

SEQ ID NO: 13041 - protein, 9 aa, Homo sapiens
  Table A; Target 13041; HLA-B*15:03; C6orf222; ENSG00000189325; TAA
FAGSNSHAM

SEQ ID NO: 13042 - protein, 9 aa, Homo sapiens
  Table A; Target 13042; HLA-B*27:05; C6orf222; ENSG00000189325; TAA
FAGSNSHAM

SEQ ID NO: 13043 - protein, 9 aa, Homo sapiens
  Table A; Target 13043; HLA-B*35:01; C6orf222; ENSG00000189325; TAA
FAGSNSHAM

SEQ ID NO: 13044 - protein, 9 aa, Homo sapiens
  Table A; Target 13044; HLA-B*35:03; C6orf222; ENSG00000189325; TAA
FAGSNSHAM

SEQ ID NO: 13045 - protein, 9 aa, Homo sapiens
  Table A; Target 13045; HLA-B*39:01; C6orf222; ENSG00000189325; TAA
FAGSNSHAM

SEQ ID NO: 13046 - protein, 9 aa, Homo sapiens
  Table A; Target 13046; HLA-B*40:01; C6orf222; ENSG00000189325; TAA
FAGSNSHAM

SEQ ID NO: 13047 - protein, 9 aa, Homo sapiens
  Table A; Target 13047; HLA-B*46:01; C6orf222; ENSG00000189325; TAA
FAGSNSHAM

SEQ ID NO: 13048 - protein, 9 aa, Homo sapiens
  Table A; Target 13048; HLA-B*54:01; C6orf222; ENSG00000189325; TAA
FAGSNSHAM

SEQ ID NO: 13049 - protein, 9 aa, Homo sapiens
  Table A; Target 13049; HLA-B*55:01; C6orf222; ENSG00000189325; TAA
FAGSNSHAM

SEQ ID NO: 13050 - protein, 9 aa, Homo sapiens
  Table A; Target 13050; HLA-B*58:01; C6orf222; ENSG00000189325; TAA
FAGSNSHAM

SEQ ID NO: 13051 - protein, 9 aa, Homo sapiens
  Table A; Target 13051; HLA-C*01:02; C6orf222; ENSG00000189325; TAA
FAGSNSHAM

SEQ ID NO: 13052 - protein, 9 aa, Homo sapiens
  Table A; Target 13052; HLA-C*02:02; C6orf222; ENSG00000189325; TAA
FAGSNSHAM

SEQ ID NO: 13053 - protein, 9 aa, Homo sapiens
  Table A; Target 13053; HLA-C*03:03; C6orf222; ENSG00000189325; TAA
FAGSNSHAM

SEQ ID NO: 13054 - protein, 9 aa, Homo sapiens
  Table A; Target 13054; HLA-C*03:04; C6orf222; ENSG00000189325; TAA
FAGSNSHAM

SEQ ID NO: 13055 - protein, 9 aa, Homo sapiens
  Table A; Target 13055; HLA-C*07:02; C6orf222; ENSG00000189325; TAA
FAGSNSHAM

SEQ ID NO: 13056 - protein, 9 aa, Homo sapiens
  Table A; Target 13056; HLA-C*07:04; C6orf222; ENSG00000189325; TAA
FAGSNSHAM

SEQ ID NO: 13057 - protein, 9 aa, Homo sapiens
  Table A; Target 13057; HLA-C*07:06; C6orf222; ENSG00000189325; TAA
FAGSNSHAM

SEQ ID NO: 13058 - protein, 9 aa, Homo sapiens
  Table A; Target 13058; HLA-C*12:03; C6orf222; ENSG00000189325; TAA
FAGSNSHAM

SEQ ID NO: 13059 - protein, 9 aa, Homo sapiens
  Table A; Target 13059; HLA-C*14:02; C6orf222; ENSG00000189325; TAA
FAGSNSHAM

SEQ ID NO: 13060 - protein, 9 aa, Homo sapiens
  Table A; Target 13060; HLA-C*16:01; C6orf222; ENSG00000189325; TAA
FAGSNSHAM

SEQ ID NO: 13061 - protein, 9 aa, Homo sapiens
  Table A; Target 13061; HLA-C*16:02; C6orf222; ENSG00000189325; TAA
FAGSNSHAM

SEQ ID NO: 13062 - protein, 9 aa, Homo sapiens
  Table A; Target 13062; HLA-C*16:04; C6orf222; ENSG00000189325; TAA
FAGSNSHAM

SEQ ID NO: 13063 - protein, 9 aa, Homo sapiens
  Table A; Target 13063; HLA-A*23:01; C6orf222; ENSG00000189325; TAA
FDVSLANKF

SEQ ID NO: 13064 - protein, 9 aa, Homo sapiens
  Table A; Target 13064; HLA-A*24:02; C6orf222; ENSG00000189325; TAA
FDVSLANKF

SEQ ID NO: 13065 - protein, 9 aa, Homo sapiens
  Table A; Target 13065; HLA-A*30:01; C6orf222; ENSG00000189325; TAA
FDVSLANKF

SEQ ID NO: 13066 - protein, 9 aa, Homo sapiens
  Table A; Target 13066; HLA-B*18:01; C6orf222; ENSG00000189325; TAA
FDVSLANKF

SEQ ID NO: 13067 - protein, 9 aa, Homo sapiens
  Table A; Target 13067; HLA-B*37:01; C6orf222; ENSG00000189325; TAA
FDVSLANKF

SEQ ID NO: 13068 - protein, 9 aa, Homo sapiens
  Table A; Target 13068; HLA-B*40:02; C6orf222; ENSG00000189325; TAA
FDVSLANKF

SEQ ID NO: 13069 - protein, 9 aa, Homo sapiens
  Table A; Target 13069; HLA-B*44:02; C6orf222; ENSG00000189325; TAA
FDVSLANKF

SEQ ID NO: 13070 - protein, 9 aa, Homo sapiens
  Table A; Target 13070; HLA-B*44:03; C6orf222; ENSG00000189325; TAA
FDVSLANKF

SEQ ID NO: 13071 - protein, 9 aa, Homo sapiens
  Table A; Target 13071; HLA-C*02:02; C6orf222; ENSG00000189325; TAA
FDVSLANKF

SEQ ID NO: 13072 - protein, 9 aa, Homo sapiens
  Table A; Target 13072; HLA-C*06:02; C6orf222; ENSG00000189325; TAA
FDVSLANKF

SEQ ID NO: 13073 - protein, 9 aa, Homo sapiens
  Table A; Target 13073; HLA-C*07:01; C6orf222; ENSG00000189325; TAA
FDVSLANKF

SEQ ID NO: 13074 - protein, 9 aa, Homo sapiens
  Table A; Target 13074; HLA-C*07:04; C6orf222; ENSG00000189325; TAA
FDVSLANKF

SEQ ID NO: 13075 - protein, 9 aa, Homo sapiens
  Table A; Target 13075; HLA-C*12:03; C6orf222; ENSG00000189325; TAA
FDVSLANKF

SEQ ID NO: 13076 - protein, 9 aa, Homo sapiens
  Table A; Target 13076; HLA-C*16:04; C6orf222; ENSG00000189325; TAA
FDVSLANKF

SEQ ID NO: 13077 - protein, 10 aa, Homo sapiens
  Table A; Target 13077; HLA-C*04:01; C6orf222; ENSG00000189325; TAA
FFYEFSDSSL

SEQ ID NO: 13078 - protein, 10 aa, Homo sapiens
  Table A; Target 13078; HLA-C*14:02; C6orf222; ENSG00000189325; TAA
FFYEFSDSSL

SEQ ID NO: 13079 - protein, 8 aa, Homo sapiens
  Table A; Target 13079; HLA-B*46:01; C6orf222; ENSG00000189325; TAA
FIQKIISM

SEQ ID NO: 13080 - protein, 9 aa, Homo sapiens
  Table A; Target 13080; HLA-A*02:03; C6orf222; ENSG00000189325; TAA
FIQKIISML

SEQ ID NO: 13081 - protein, 9 aa, Homo sapiens
  Table A; Target 13081; HLA-A*02:04; C6orf222; ENSG00000189325; TAA
FIQKIISML

SEQ ID NO: 13082 - protein, 9 aa, Homo sapiens
  Table A; Target 13082; HLA-A*02:07; C6orf222; ENSG00000189325; TAA
FIQKIISML

SEQ ID NO: 13083 - protein, 10 aa, Homo sapiens
  Table A; Target 13083; HLA-A*02:01; C6orf222; ENSG00000189325; TAA
FLIKVDGTGA

SEQ ID NO: 13084 - protein, 10 aa, Homo sapiens
  Table A; Target 13084; HLA-A*02:03; C6orf222; ENSG00000189325; TAA
FLIKVDGTGA

SEQ ID NO: 13085 - protein, 11 aa, Homo sapiens
  Table A; Target 13085; HLA-A*02:01; C6orf222; ENSG00000189325; TAA
FLIKVDGTGAL

SEQ ID NO: 13086 - protein, 11 aa, Homo sapiens
  Table A; Target 13086; HLA-A*02:03; C6orf222; ENSG00000189325; TAA
FLIKVDGTGAL

SEQ ID NO: 13087 - protein, 11 aa, Homo sapiens
  Table A; Target 13087; HLA-A*02:04; C6orf222; ENSG00000189325; TAA
FLIKVDGTGAL

SEQ ID NO: 13088 - protein, 11 aa, Homo sapiens
  Table A; Target 13088; HLA-A*02:07; C6orf222; ENSG00000189325; TAA
FLIKVDGTGAL

SEQ ID NO: 13089 - protein, 11 aa, Homo sapiens
  Table A; Target 13089; HLA-B*46:01; C6orf222; ENSG00000189325; TAA
FLIKVDGTGAL

SEQ ID NO: 13090 - protein, 11 aa, Homo sapiens
  Table A; Target 13090; HLA-C*01:02; C6orf222; ENSG00000189325; TAA
FLIKVDGTGAL

SEQ ID NO: 13091 - protein, 10 aa, Homo sapiens
  Table A; Target 13091; HLA-B*35:03; C6orf222; ENSG00000189325; TAA
FPYREDQPNI

SEQ ID NO: 13092 - protein, 10 aa, Homo sapiens
  Table A; Target 13092; HLA-B*51:01; C6orf222; ENSG00000189325; TAA
FPYREDQPNI

SEQ ID NO: 13093 - protein, 10 aa, Homo sapiens
  Table A; Target 13093; HLA-B*54:01; C6orf222; ENSG00000189325; TAA
FPYREDQPNI

SEQ ID NO: 13094 - protein, 10 aa, Homo sapiens
  Table A; Target 13094; HLA-B*55:01; C6orf222; ENSG00000189325; TAA
FPYREDQPNI

SEQ ID NO: 13095 - protein, 8 aa, Homo sapiens
  Table A; Target 13095; HLA-A*01:01; C6orf222; ENSG00000189325; TAA
FSDSSLSK

SEQ ID NO: 13096 - protein, 9 aa, Homo sapiens
  Table A; Target 13096; HLA-A*01:01; C6orf222; ENSG00000189325; TAA
FSDSSLSKL

SEQ ID NO: 13097 - protein, 9 aa, Homo sapiens
  Table A; Target 13097; HLA-A*02:07; C6orf222; ENSG00000189325; TAA
FSDSSLSKL

SEQ ID NO: 13098 - protein, 9 aa, Homo sapiens
  Table A; Target 13098; HLA-B*38:01; C6orf222; ENSG00000189325; TAA
FSDSSLSKL

SEQ ID NO: 13099 - protein, 9 aa, Homo sapiens
  Table A; Target 13099; HLA-B*39:01; C6orf222; ENSG00000189325; TAA
FSDSSLSKL

SEQ ID NO: 13100 - protein, 9 aa, Homo sapiens
  Table A; Target 13100; HLA-B*40:01; C6orf222; ENSG00000189325; TAA
FSDSSLSKL

SEQ ID NO: 13101 - protein, 9 aa, Homo sapiens
  Table A; Target 13101; HLA-C*03:03; C6orf222; ENSG00000189325; TAA
FSDSSLSKL

SEQ ID NO: 13102 - protein, 9 aa, Homo sapiens
  Table A; Target 13102; HLA-C*03:04; C6orf222; ENSG00000189325; TAA
FSDSSLSKL

SEQ ID NO: 13103 - protein, 9 aa, Homo sapiens
  Table A; Target 13103; HLA-C*04:01; C6orf222; ENSG00000189325; TAA
FSDSSLSKL

SEQ ID NO: 13104 - protein, 9 aa, Homo sapiens
  Table A; Target 13104; HLA-C*05:01; C6orf222; ENSG00000189325; TAA
FSDSSLSKL

SEQ ID NO: 13105 - protein, 9 aa, Homo sapiens
  Table A; Target 13105; HLA-C*07:04; C6orf222; ENSG00000189325; TAA
FSDSSLSKL

SEQ ID NO: 13106 - protein, 10 aa, Homo sapiens
  Table A; Target 13106; HLA-A*01:01; C6orf222; ENSG00000189325; TAA
FSDSSLSKLV

SEQ ID NO: 13107 - protein, 10 aa, Homo sapiens
  Table A; Target 13107; HLA-A*31:01; C6orf222; ENSG00000189325; TAA
FVRTGPEEPR

SEQ ID NO: 13108 - protein, 10 aa, Homo sapiens
  Table A; Target 13108; HLA-A*33:01; C6orf222; ENSG00000189325; TAA
FVRTGPEEPR

SEQ ID NO: 13109 - protein, 10 aa, Homo sapiens
  Table A; Target 13109; HLA-A*33:03; C6orf222; ENSG00000189325; TAA
FVRTGPEEPR

SEQ ID NO: 13110 - protein, 10 aa, Homo sapiens
  Table A; Target 13110; HLA-A*68:01; C6orf222; ENSG00000189325; TAA
FVRTGPEEPR

SEQ ID NO: 13111 - protein, 10 aa, Homo sapiens
  Table A; Target 13111; HLA-B*57:01; C6orf222; ENSG00000189325; TAA
FVRTGPEEPR

SEQ ID NO: 13112 - protein, 10 aa, Homo sapiens
  Table A; Target 13112; HLA-C*07:06; C6orf222; ENSG00000189325; TAA
FVRTGPEEPR

SEQ ID NO: 13113 - protein, 9 aa, Homo sapiens
  Table A; Target 13113; HLA-B*35:03; C6orf222; ENSG00000189325; TAA
FYEFSDSSL

SEQ ID NO: 13114 - protein, 9 aa, Homo sapiens
  Table A; Target 13114; HLA-C*01:02; C6orf222; ENSG00000189325; TAA
FYEFSDSSL

SEQ ID NO: 13115 - protein, 9 aa, Homo sapiens
  Table A; Target 13115; HLA-C*04:01; C6orf222; ENSG00000189325; TAA
FYEFSDSSL

SEQ ID NO: 13116 - protein, 9 aa, Homo sapiens
  Table A; Target 13116; HLA-C*05:01; C6orf222; ENSG00000189325; TAA
FYEFSDSSL

SEQ ID NO: 13117 - protein, 9 aa, Homo sapiens
  Table A; Target 13117; HLA-C*14:02; C6orf222; ENSG00000189325; TAA
FYEFSDSSL

SEQ ID NO: 13118 - protein, 11 aa, Homo sapiens
  Table A; Target 13118; HLA-A*25:01; C6orf222; ENSG00000189325; TAA
GAADVSSPEAW

SEQ ID NO: 13119 - protein, 11 aa, Homo sapiens
  Table A; Target 13119; HLA-B*44:03; C6orf222; ENSG00000189325; TAA
GAADVSSPEAW

SEQ ID NO: 13120 - protein, 11 aa, Homo sapiens
  Table A; Target 13120; HLA-B*57:01; C6orf222; ENSG00000189325; TAA
GAADVSSPEAW

SEQ ID NO: 13121 - protein, 11 aa, Homo sapiens
  Table A; Target 13121; HLA-B*58:01; C6orf222; ENSG00000189325; TAA
GAADVSSPEAW

SEQ ID NO: 13122 - protein, 11 aa, Homo sapiens
  Table A; Target 13122; HLA-C*16:04; C6orf222; ENSG00000189325; TAA
GAADVSSPEAW

SEQ ID NO: 13123 - protein, 10 aa, Homo sapiens
  Table A; Target 13123; HLA-B*39:01; C6orf222; ENSG00000189325; TAA
GAAGAASPEA

SEQ ID NO: 13124 - protein, 9 aa, Homo sapiens
  Table A; Target 13124; HLA-C*07:06; C6orf222; ENSG00000189325; TAA
GAASPEARR

SEQ ID NO: 13125 - protein, 10 aa, Homo sapiens
  Table A; Target 13125; HLA-C*16:01; C6orf222; ENSG00000189325; TAA
GAASPEARRP

SEQ ID NO: 13126 - protein, 10 aa, Homo sapiens
  Table A; Target 13126; HLA-C*16:02; C6orf222; ENSG00000189325; TAA
GAASPEARRP

SEQ ID NO: 13127 - protein, 11 aa, Homo sapiens
  Table A; Target 13127; HLA-C*16:01; C6orf222; ENSG00000189325; TAA
GAASPEARRPK

SEQ ID NO: 13128 - protein, 9 aa, Homo sapiens
  Table A; Target 13128; HLA-B*54:01; C6orf222; ENSG00000189325; TAA
GALDVSPHA

SEQ ID NO: 13129 - protein, 9 aa, Homo sapiens
  Table A; Target 13129; HLA-C*16:04; C6orf222; ENSG00000189325; TAA
GALDVSPHA

SEQ ID NO: 13130 - protein, 9 aa, Homo sapiens
  Table A; Target 13130; HLA-B*27:02; C6orf222; ENSG00000189325; TAA
GEADLGPAR

SEQ ID NO: 13131 - protein, 9 aa, Homo sapiens
  Table A; Target 13131; HLA-B*27:05; C6orf222; ENSG00000189325; TAA
GEADLGPAR

SEQ ID NO: 13132 - protein, 9 aa, Homo sapiens
  Table A; Target 13132; HLA-B*44:02; C6orf222; ENSG00000189325; TAA
GEADLGPAR

SEQ ID NO: 13133 - protein, 9 aa, Homo sapiens
  Table A; Target 13133; HLA-B*44:03; C6orf222; ENSG00000189325; TAA
GEADLGPAR

SEQ ID NO: 13134 - protein, 9 aa, Homo sapiens
  Table A; Target 13134; HLA-C*02:02; C6orf222; ENSG00000189325; TAA
GEADLGPAR

SEQ ID NO: 13135 - protein, 9 aa, Homo sapiens
  Table A; Target 13135; HLA-C*16:04; C6orf222; ENSG00000189325; TAA
GEADLGPAR

SEQ ID NO: 13136 - protein, 10 aa, Homo sapiens
  Table A; Target 13136; HLA-B*44:02; C6orf222; ENSG00000189325; TAA
GEADLGPARR

SEQ ID NO: 13137 - protein, 10 aa, Homo sapiens
  Table A; Target 13137; HLA-B*44:03; C6orf222; ENSG00000189325; TAA
GEADLGPARR

SEQ ID NO: 13138 - protein, 9 aa, Homo sapiens
  Table A; Target 13138; HLA-A*30:01; C6orf222; ENSG00000189325; TAA
GEDSDHQSF

SEQ ID NO: 13139 - protein, 9 aa, Homo sapiens
  Table A; Target 13139; HLA-B*15:03; C6orf222; ENSG00000189325; TAA
GEDSDHQSF

SEQ ID NO: 13140 - protein, 9 aa, Homo sapiens
  Table A; Target 13140; HLA-B*18:01; C6orf222; ENSG00000189325; TAA
GEDSDHQSF

SEQ ID NO: 13141 - protein, 9 aa, Homo sapiens
  Table A; Target 13141; HLA-B*27:02; C6orf222; ENSG00000189325; TAA
GEDSDHQSF

SEQ ID NO: 13142 - protein, 9 aa, Homo sapiens
  Table A; Target 13142; HLA-B*37:01; C6orf222; ENSG00000189325; TAA
GEDSDHQSF

SEQ ID NO: 13143 - protein, 9 aa, Homo sapiens
  Table A; Target 13143; HLA-B*38:01; C6orf222; ENSG00000189325; TAA
GEDSDHQSF

SEQ ID NO: 13144 - protein, 9 aa, Homo sapiens
  Table A; Target 13144; HLA-B*40:01; C6orf222; ENSG00000189325; TAA
GEDSDHQSF

SEQ ID NO: 13145 - protein, 9 aa, Homo sapiens
  Table A; Target 13145; HLA-B*44:02; C6orf222; ENSG00000189325; TAA
GEDSDHQSF

SEQ ID NO: 13146 - protein, 9 aa, Homo sapiens
  Table A; Target 13146; HLA-B*44:03; C6orf222; ENSG00000189325; TAA
GEDSDHQSF

SEQ ID NO: 13147 - protein, 9 aa, Homo sapiens
  Table A; Target 13147; HLA-B*49:01; C6orf222; ENSG00000189325; TAA
GEDSDHQSF

SEQ ID NO: 13148 - protein, 9 aa, Homo sapiens
  Table A; Target 13148; HLA-C*16:04; C6orf222; ENSG00000189325; TAA
GEDSDHQSF

SEQ ID NO: 13149 - protein, 10 aa, Homo sapiens
  Table A; Target 13149; HLA-A*30:01; C6orf222; ENSG00000189325; TAA
GEDSDHQSFL

SEQ ID NO: 13150 - protein, 10 aa, Homo sapiens
  Table A; Target 13150; HLA-B*40:01; C6orf222; ENSG00000189325; TAA
GEDSDHQSFL

SEQ ID NO: 13151 - protein, 10 aa, Homo sapiens
  Table A; Target 13151; HLA-B*49:01; C6orf222; ENSG00000189325; TAA
GEDSDHQSFL

SEQ ID NO: 13152 - protein, 11 aa, Homo sapiens
  Table A; Target 13152; HLA-B*49:01; C6orf222; ENSG00000189325; TAA
GEDSDHQSFLI

SEQ ID NO: 13153 - protein, 9 aa, Homo sapiens
  Table A; Target 13153; HLA-A*30:01; C6orf222; ENSG00000189325; TAA
GEPVVISEA

SEQ ID NO: 13154 - protein, 9 aa, Homo sapiens
  Table A; Target 13154; HLA-B*40:01; C6orf222; ENSG00000189325; TAA
GEPVVISEA

SEQ ID NO: 13155 - protein, 9 aa, Homo sapiens
  Table A; Target 13155; HLA-B*49:01; C6orf222; ENSG00000189325; TAA
GEPVVISEA

SEQ ID NO: 13156 - protein, 10 aa, Homo sapiens
  Table A; Target 13156; HLA-A*30:02; C6orf222; ENSG00000189325; TAA
GHRPSISSSY

SEQ ID NO: 13157 - protein, 10 aa, Homo sapiens
  Table A; Target 13157; HLA-A*32:01; C6orf222; ENSG00000189325; TAA
GHRPSISSSY

SEQ ID NO: 13158 - protein, 10 aa, Homo sapiens
  Table A; Target 13158; HLA-B*15:01; C6orf222; ENSG00000189325; TAA
GHRPSISSSY

SEQ ID NO: 13159 - protein, 10 aa, Homo sapiens
  Table A; Target 13159; HLA-B*15:03; C6orf222; ENSG00000189325; TAA
GHRPSISSSY

SEQ ID NO: 13160 - protein, 10 aa, Homo sapiens
  Table A; Target 13160; HLA-B*27:05; C6orf222; ENSG00000189325; TAA
GHTPEGAPQL

SEQ ID NO: 13161 - protein, 10 aa, Homo sapiens
  Table A; Target 13161; HLA-B*38:01; C6orf222; ENSG00000189325; TAA
GHTPEGAPQL

SEQ ID NO: 13162 - protein, 10 aa, Homo sapiens
  Table A; Target 13162; HLA-B*39:01; C6orf222; ENSG00000189325; TAA
GHTPEGAPQL

SEQ ID NO: 13163 - protein, 9 aa, Homo sapiens
  Table A; Target 13163; HLA-A*02:03; C6orf222; ENSG00000189325; TAA
GLSKAAAAL

SEQ ID NO: 13164 - protein, 9 aa, Homo sapiens
  Table A; Target 13164; HLA-A*03:02; C6orf222; ENSG00000189325; TAA
GLSKAAAAL

SEQ ID NO: 13165 - protein, 9 aa, Homo sapiens
  Table A; Target 13165; HLA-B*07:02; C6orf222; ENSG00000189325; TAA
GLSKAAAAL

SEQ ID NO: 13166 - protein, 9 aa, Homo sapiens
  Table A; Target 13166; HLA-C*01:02; C6orf222; ENSG00000189325; TAA
GLSKAAAAL

SEQ ID NO: 13167 - protein, 10 aa, Homo sapiens
  Table A; Target 13167; HLA-A*03:02; C6orf222; ENSG00000189325; TAA
GLSKAAAALR

SEQ ID NO: 13168 - protein, 9 aa, Homo sapiens
  Table A; Target 13168; HLA-A*31:01; C6orf222; ENSG00000189325; TAA
GQLGQQIRR

SEQ ID NO: 13169 - protein, 9 aa, Homo sapiens
  Table A; Target 13169; HLA-B*13:02; C6orf222; ENSG00000189325; TAA
GSNSHAMCI

SEQ ID NO: 13170 - protein, 9 aa, Homo sapiens
  Table A; Target 13170; HLA-B*27:05; C6orf222; ENSG00000189325; TAA
GVALPNPAP

SEQ ID NO: 13171 - protein, 9 aa, Homo sapiens
  Table A; Target 13171; HLA-C*06:02; C6orf222; ENSG00000189325; TAA
GVALPNPAP

SEQ ID NO: 13172 - protein, 10 aa, Homo sapiens
  Table A; Target 13172; HLA-B*56:01; C6orf222; ENSG00000189325; TAA
GVALPNPAPA

SEQ ID NO: 13173 - protein, 10 aa, Homo sapiens
  Table A; Target 13173; HLA-A*03:02; C6orf222; ENSG00000189325; TAA
GVENPAPHCR

SEQ ID NO: 13174 - protein, 10 aa, Homo sapiens
  Table A; Target 13174; HLA-A*31:01; C6orf222; ENSG00000189325; TAA
GVENPAPHCR

SEQ ID NO: 13175 - protein, 10 aa, Homo sapiens
  Table A; Target 13175; HLA-A*68:01; C6orf222; ENSG00000189325; TAA
GVENPAPHCR

SEQ ID NO: 13176 - protein, 10 aa, Homo sapiens
  Table A; Target 13176; HLA-C*07:06; C6orf222; ENSG00000189325; TAA
GVENPAPHCR

SEQ ID NO: 13177 - protein, 9 aa, Homo sapiens
  Table A; Target 13177; HLA-A*24:02; C6orf222; ENSG00000189325; TAA
GWLKTMLNF

SEQ ID NO: 13178 - protein, 8 aa, Homo sapiens
  Table A; Target 13178; HLA-B*51:01; C6orf222; ENSG00000189325; TAA
HAAEVTKA

SEQ ID NO: 13179 - protein, 8 aa, Homo sapiens
  Table A; Target 13179; HLA-B*54:01; C6orf222; ENSG00000189325; TAA
HAAEVTKA

SEQ ID NO: 13180 - protein, 8 aa, Homo sapiens
  Table A; Target 13180; HLA-B*56:01; C6orf222; ENSG00000189325; TAA
HAAEVTKA

SEQ ID NO: 13181 - protein, 8 aa, Homo sapiens
  Table A; Target 13181; HLA-C*12:03; C6orf222; ENSG00000189325; TAA
HAAEVTKA

SEQ ID NO: 13182 - protein, 9 aa, Homo sapiens
  Table A; Target 13182; HLA-A*32:01; C6orf222; ENSG00000189325; TAA
HAAEVTKAA

SEQ ID NO: 13183 - protein, 9 aa, Homo sapiens
  Table A; Target 13183; HLA-A*68:01; C6orf222; ENSG00000189325; TAA
HAAEVTKAA

SEQ ID NO: 13184 - protein, 9 aa, Homo sapiens
  Table A; Target 13184; HLA-A*68:02; C6orf222; ENSG00000189325; TAA
HAAEVTKAA

SEQ ID NO: 13185 - protein, 9 aa, Homo sapiens
  Table A; Target 13185; HLA-B*35:01; C6orf222; ENSG00000189325; TAA
HAAEVTKAA

SEQ ID NO: 13186 - protein, 9 aa, Homo sapiens
  Table A; Target 13186; HLA-B*35:03; C6orf222; ENSG00000189325; TAA
HAAEVTKAA

SEQ ID NO: 13187 - protein, 9 aa, Homo sapiens
  Table A; Target 13187; HLA-B*46:01; C6orf222; ENSG00000189325; TAA
HAAEVTKAA

SEQ ID NO: 13188 - protein, 9 aa, Homo sapiens
  Table A; Target 13188; HLA-B*51:01; C6orf222; ENSG00000189325; TAA
HAAEVTKAA

SEQ ID NO: 13189 - protein, 9 aa, Homo sapiens
  Table A; Target 13189; HLA-B*54:01; C6orf222; ENSG00000189325; TAA
HAAEVTKAA

SEQ ID NO: 13190 - protein, 9 aa, Homo sapiens
  Table A; Target 13190; HLA-B*55:01; C6orf222; ENSG00000189325; TAA
HAAEVTKAA

SEQ ID NO: 13191 - protein, 9 aa, Homo sapiens
  Table A; Target 13191; HLA-B*56:01; C6orf222; ENSG00000189325; TAA
HAAEVTKAA

SEQ ID NO: 13192 - protein, 9 aa, Homo sapiens
  Table A; Target 13192; HLA-C*02:02; C6orf222; ENSG00000189325; TAA
HAAEVTKAA

SEQ ID NO: 13193 - protein, 9 aa, Homo sapiens
  Table A; Target 13193; HLA-C*03:03; C6orf222; ENSG00000189325; TAA
HAAEVTKAA

SEQ ID NO: 13194 - protein, 9 aa, Homo sapiens
  Table A; Target 13194; HLA-C*03:04; C6orf222; ENSG00000189325; TAA
HAAEVTKAA

SEQ ID NO: 13195 - protein, 9 aa, Homo sapiens
  Table A; Target 13195; HLA-C*07:06; C6orf222; ENSG00000189325; TAA
HAAEVTKAA

SEQ ID NO: 13196 - protein, 9 aa, Homo sapiens
  Table A; Target 13196; HLA-C*12:03; C6orf222; ENSG00000189325; TAA
HAAEVTKAA

SEQ ID NO: 13197 - protein, 9 aa, Homo sapiens
  Table A; Target 13197; HLA-C*16:01; C6orf222; ENSG00000189325; TAA
HAAEVTKAA

SEQ ID NO: 13198 - protein, 9 aa, Homo sapiens
  Table A; Target 13198; HLA-C*16:02; C6orf222; ENSG00000189325; TAA
HAAEVTKAA

SEQ ID NO: 13199 - protein, 9 aa, Homo sapiens
  Table A; Target 13199; HLA-C*16:04; C6orf222; ENSG00000189325; TAA
HAAEVTKAA

SEQ ID NO: 13200 - protein, 8 aa, Homo sapiens
  Table A; Target 13200; HLA-B*13:02; C6orf222; ENSG00000189325; TAA
HQSFLIKV

SEQ ID NO: 13201 - protein, 9 aa, Homo sapiens
  Table A; Target 13201; HLA-A*26:01; C6orf222; ENSG00000189325; TAA
HRPSISSSY

SEQ ID NO: 13202 - protein, 9 aa, Homo sapiens
  Table A; Target 13202; HLA-A*30:02; C6orf222; ENSG00000189325; TAA
HRPSISSSY

SEQ ID NO: 13203 - protein, 9 aa, Homo sapiens
  Table A; Target 13203; HLA-A*32:01; C6orf222; ENSG00000189325; TAA
HRPSISSSY

SEQ ID NO: 13204 - protein, 9 aa, Homo sapiens
  Table A; Target 13204; HLA-B*07:02; C6orf222; ENSG00000189325; TAA
HRPSISSSY

SEQ ID NO: 13205 - protein, 9 aa, Homo sapiens
  Table A; Target 13205; HLA-B*15:01; C6orf222; ENSG00000189325; TAA
HRPSISSSY

SEQ ID NO: 13206 - protein, 9 aa, Homo sapiens
  Table A; Target 13206; HLA-B*15:03; C6orf222; ENSG00000189325; TAA
HRPSISSSY

SEQ ID NO: 13207 - protein, 9 aa, Homo sapiens
  Table A; Target 13207; HLA-B*27:02; C6orf222; ENSG00000189325; TAA
HRPSISSSY

SEQ ID NO: 13208 - protein, 9 aa, Homo sapiens
  Table A; Target 13208; HLA-B*27:05; C6orf222; ENSG00000189325; TAA
HRPSISSSY

SEQ ID NO: 13209 - protein, 9 aa, Homo sapiens
  Table A; Target 13209; HLA-B*39:01; C6orf222; ENSG00000189325; TAA
HRPSISSSY

SEQ ID NO: 13210 - protein, 9 aa, Homo sapiens
  Table A; Target 13210; HLA-B*46:01; C6orf222; ENSG00000189325; TAA
HRPSISSSY

SEQ ID NO: 13211 - protein, 9 aa, Homo sapiens
  Table A; Target 13211; HLA-C*01:02; C6orf222; ENSG00000189325; TAA
HRPSISSSY

SEQ ID NO: 13212 - protein, 9 aa, Homo sapiens
  Table A; Target 13212; HLA-C*02:02; C6orf222; ENSG00000189325; TAA
HRPSISSSY

SEQ ID NO: 13213 - protein, 9 aa, Homo sapiens
  Table A; Target 13213; HLA-C*06:02; C6orf222; ENSG00000189325; TAA
HRPSISSSY

SEQ ID NO: 13214 - protein, 9 aa, Homo sapiens
  Table A; Target 13214; HLA-C*07:01; C6orf222; ENSG00000189325; TAA
HRPSISSSY

SEQ ID NO: 13215 - protein, 9 aa, Homo sapiens
  Table A; Target 13215; HLA-C*07:02; C6orf222; ENSG00000189325; TAA
HRPSISSSY

SEQ ID NO: 13216 - protein, 9 aa, Homo sapiens
  Table A; Target 13216; HLA-C*07:04; C6orf222; ENSG00000189325; TAA
HRPSISSSY

SEQ ID NO: 13217 - protein, 9 aa, Homo sapiens
  Table A; Target 13217; HLA-C*16:04; C6orf222; ENSG00000189325; TAA
HRPSISSSY

SEQ ID NO: 13218 - protein, 9 aa, Homo sapiens
  Table A; Target 13218; HLA-B*07:02; C6orf222; ENSG00000189325; TAA
HRPSTSSSL

SEQ ID NO: 13219 - protein, 9 aa, Homo sapiens
  Table A; Target 13219; HLA-B*27:05; C6orf222; ENSG00000189325; TAA
HRPSTSSSL

SEQ ID NO: 13220 - protein, 9 aa, Homo sapiens
  Table A; Target 13220; HLA-B*39:01; C6orf222; ENSG00000189325; TAA
HRPSTSSSL

SEQ ID NO: 13221 - protein, 9 aa, Homo sapiens
  Table A; Target 13221; HLA-C*01:02; C6orf222; ENSG00000189325; TAA
HRPSTSSSL

SEQ ID NO: 13222 - protein, 9 aa, Homo sapiens
  Table A; Target 13222; HLA-C*06:02; C6orf222; ENSG00000189325; TAA
HRPSTSSSL

SEQ ID NO: 13223 - protein, 9 aa, Homo sapiens
  Table A; Target 13223; HLA-C*07:02; C6orf222; ENSG00000189325; TAA
HRPSTSSSL

SEQ ID NO: 13224 - protein, 9 aa, Homo sapiens
  Table A; Target 13224; HLA-A*01:01; C6orf222; ENSG00000189325; TAA
HSDSPAPSA

SEQ ID NO: 13225 - protein, 9 aa, Homo sapiens
  Table A; Target 13225; HLA-B*54:01; C6orf222; ENSG00000189325; TAA
HSDSPAPSA

SEQ ID NO: 13226 - protein, 9 aa, Homo sapiens
  Table A; Target 13226; HLA-C*03:03; C6orf222; ENSG00000189325; TAA
HSDSPAPSA

SEQ ID NO: 13227 - protein, 9 aa, Homo sapiens
  Table A; Target 13227; HLA-C*05:01; C6orf222; ENSG00000189325; TAA
HSDSPAPSA

SEQ ID NO: 13228 - protein, 9 aa, Homo sapiens
  Table A; Target 13228; HLA-A*02:07; C6orf222; ENSG00000189325; TAA
HTPEGAPQL

SEQ ID NO: 13229 - protein, 9 aa, Homo sapiens
  Table A; Target 13229; HLA-A*24:02; C6orf222; ENSG00000189325; TAA
HTPEGAPQL

SEQ ID NO: 13230 - protein, 9 aa, Homo sapiens
  Table A; Target 13230; HLA-A*25:01; C6orf222; ENSG00000189325; TAA
HTPEGAPQL

SEQ ID NO: 13231 - protein, 9 aa, Homo sapiens
  Table A; Target 13231; HLA-A*26:01; C6orf222; ENSG00000189325; TAA
HTPEGAPQL

SEQ ID NO: 13232 - protein, 9 aa, Homo sapiens
  Table A; Target 13232; HLA-A*68:01; C6orf222; ENSG00000189325; TAA
HTPEGAPQL

SEQ ID NO: 13233 - protein, 9 aa, Homo sapiens
  Table A; Target 13233; HLA-A*68:02; C6orf222; ENSG00000189325; TAA
HTPEGAPQL

SEQ ID NO: 13234 - protein, 9 aa, Homo sapiens
  Table A; Target 13234; HLA-B*35:03; C6orf222; ENSG00000189325; TAA
HTPEGAPQL

SEQ ID NO: 13235 - protein, 9 aa, Homo sapiens
  Table A; Target 13235; HLA-B*38:01; C6orf222; ENSG00000189325; TAA
HTPEGAPQL

SEQ ID NO: 13236 - protein, 9 aa, Homo sapiens
  Table A; Target 13236; HLA-B*39:01; C6orf222; ENSG00000189325; TAA
HTPEGAPQL

SEQ ID NO: 13237 - protein, 9 aa, Homo sapiens
  Table A; Target 13237; HLA-B*58:01; C6orf222; ENSG00000189325; TAA
HTPEGAPQL

SEQ ID NO: 13238 - protein, 9 aa, Homo sapiens
  Table A; Target 13238; HLA-C*01:02; C6orf222; ENSG00000189325; TAA
HTPEGAPQL

SEQ ID NO: 13239 - protein, 9 aa, Homo sapiens
  Table A; Target 13239; HLA-C*03:03; C6orf222; ENSG00000189325; TAA
HTPEGAPQL

SEQ ID NO: 13240 - protein, 9 aa, Homo sapiens
  Table A; Target 13240; HLA-C*03:04; C6orf222; ENSG00000189325; TAA
HTPEGAPQL

SEQ ID NO: 13241 - protein, 9 aa, Homo sapiens
  Table A; Target 13241; HLA-C*05:01; C6orf222; ENSG00000189325; TAA
HTPEGAPQL

SEQ ID NO: 13242 - protein, 9 aa, Homo sapiens
  Table A; Target 13242; HLA-C*07:06; C6orf222; ENSG00000189325; TAA
HTPEGAPQL

SEQ ID NO: 13243 - protein, 9 aa, Homo sapiens
  Table A; Target 13243; HLA-C*16:02; C6orf222; ENSG00000189325; TAA
HTPEGAPQL

SEQ ID NO: 13244 - protein, 9 aa, Homo sapiens
  Table A; Target 13244; HLA-A*29:02; C6orf222; ENSG00000189325; TAA
HYNCTQFPY

SEQ ID NO: 13245 - protein, 9 aa, Homo sapiens
  Table A; Target 13245; HLA-A*02:01; C6orf222; ENSG00000189325; TAA
IIIQKLVAL

SEQ ID NO: 13246 - protein, 9 aa, Homo sapiens
  Table A; Target 13246; HLA-A*02:03; C6orf222; ENSG00000189325; TAA
IIIQKLVAL

SEQ ID NO: 13247 - protein, 9 aa, Homo sapiens
  Table A; Target 13247; HLA-A*02:04; C6orf222; ENSG00000189325; TAA
IIIQKLVAL

SEQ ID NO: 13248 - protein, 9 aa, Homo sapiens
  Table A; Target 13248; HLA-A*02:07; C6orf222; ENSG00000189325; TAA
IIIQKLVAL

SEQ ID NO: 13249 - protein, 9 aa, Homo sapiens
  Table A; Target 13249; HLA-A*23:01; C6orf222; ENSG00000189325; TAA
IIIQKLVAL

SEQ ID NO: 13250 - protein, 9 aa, Homo sapiens
  Table A; Target 13250; HLA-B*08:01; C6orf222; ENSG00000189325; TAA
IIIQKLVAL

SEQ ID NO: 13251 - protein, 9 aa, Homo sapiens
  Table A; Target 13251; HLA-B*46:01; C6orf222; ENSG00000189325; TAA
IIIQKLVAL

SEQ ID NO: 13252 - protein, 9 aa, Homo sapiens
  Table A; Target 13252; HLA-C*01:02; C6orf222; ENSG00000189325; TAA
IIIQKLVAL

SEQ ID NO: 13253 - protein, 9 aa, Homo sapiens
  Table A; Target 13253; HLA-C*03:03; C6orf222; ENSG00000189325; TAA
IIIQKLVAL

SEQ ID NO: 13254 - protein, 9 aa, Homo sapiens
  Table A; Target 13254; HLA-C*03:04; C6orf222; ENSG00000189325; TAA
IIIQKLVAL

SEQ ID NO: 13255 - protein, 9 aa, Homo sapiens
  Table A; Target 13255; HLA-C*14:02; C6orf222; ENSG00000189325; TAA
IIIQKLVAL

SEQ ID NO: 13256 - protein, 9 aa, Homo sapiens
  Table A; Target 13256; HLA-A*02:04; C6orf222; ENSG00000189325; TAA
IIQKLVALL

SEQ ID NO: 13257 - protein, 9 aa, Homo sapiens
  Table A; Target 13257; HLA-A*02:04; C6orf222; ENSG00000189325; TAA
IIQMIVELL

SEQ ID NO: 13258 - protein, 9 aa, Homo sapiens
  Table A; Target 13258; HLA-B*38:01; C6orf222; ENSG00000189325; TAA
IIQMIVELL

SEQ ID NO: 13259 - protein, 10 aa, Homo sapiens
  Table A; Target 13259; HLA-B*27:02; C6orf222; ENSG00000189325; TAA
IIQMIVELLK

SEQ ID NO: 13260 - protein, 9 aa, Homo sapiens
  Table A; Target 13260; HLA-B*15:03; C6orf222; ENSG00000189325; TAA
IKVDGTGAL

SEQ ID NO: 13261 - protein, 9 aa, Homo sapiens
  Table A; Target 13261; HLA-B*39:01; C6orf222; ENSG00000189325; TAA
IKVDGTGAL

SEQ ID NO: 13262 - protein, 9 aa, Homo sapiens
  Table A; Target 13262; HLA-C*03:03; C6orf222; ENSG00000189325; TAA
IKVDGTGAL

SEQ ID NO: 13263 - protein, 9 aa, Homo sapiens
  Table A; Target 13263; HLA-A*01:01; C6orf222; ENSG00000189325; TAA
ILMGLRDHY

SEQ ID NO: 13264 - protein, 9 aa, Homo sapiens
  Table A; Target 13264; HLA-A*29:02; C6orf222; ENSG00000189325; TAA
ILMGLRDHY

SEQ ID NO: 13265 - protein, 9 aa, Homo sapiens
  Table A; Target 13265; HLA-A*30:02; C6orf222; ENSG00000189325; TAA
ILMGLRDHY

SEQ ID NO: 13266 - protein, 8 aa, Homo sapiens
  Table A; Target 13266; HLA-B*08:01; C6orf222; ENSG00000189325; TAA
IQKIISML

SEQ ID NO: 13267 - protein, 8 aa, Homo sapiens
  Table A; Target 13267; HLA-B*15:01; C6orf222; ENSG00000189325; TAA
IQKIISML

SEQ ID NO: 13268 - protein, 8 aa, Homo sapiens
  Table A; Target 13268; HLA-B*15:03; C6orf222; ENSG00000189325; TAA
IQKIISML

SEQ ID NO: 13269 - protein, 8 aa, Homo sapiens
  Table A; Target 13269; HLA-B*40:02; C6orf222; ENSG00000189325; TAA
IQKIISML

SEQ ID NO: 13270 - protein, 8 aa, Homo sapiens
  Table A; Target 13270; HLA-C*07:04; C6orf222; ENSG00000189325; TAA
IQKIISML

SEQ ID NO: 13271 - protein, 8 aa, Homo sapiens
  Table A; Target 13271; HLA-B*15:01; C6orf222; ENSG00000189325; TAA
IQKLVALL

SEQ ID NO: 13272 - protein, 8 aa, Homo sapiens
  Table A; Target 13272; HLA-B*13:02; C6orf222; ENSG00000189325; TAA
IQMIVELL

SEQ ID NO: 13273 - protein, 8 aa, Homo sapiens
  Table A; Target 13273; HLA-B*15:01; C6orf222; ENSG00000189325; TAA
IQMIVELL

SEQ ID NO: 13274 - protein, 8 aa, Homo sapiens
  Table A; Target 13274; HLA-B*15:03; C6orf222; ENSG00000189325; TAA
IQMIVELL

SEQ ID NO: 13275 - protein, 8 aa, Homo sapiens
  Table A; Target 13275; HLA-B*37:01; C6orf222; ENSG00000189325; TAA
IQMIVELL

SEQ ID NO: 13276 - protein, 8 aa, Homo sapiens
  Table A; Target 13276; HLA-C*05:01; C6orf222; ENSG00000189325; TAA
ISEAPSQA

SEQ ID NO: 13277 - protein, 9 aa, Homo sapiens
  Table A; Target 13277; HLA-A*01:01; C6orf222; ENSG00000189325; TAA
ISEAPSQAR

SEQ ID NO: 13278 - protein, 9 aa, Homo sapiens
  Table A; Target 13278; HLA-A*68:01; C6orf222; ENSG00000189325; TAA
ISEAPSQAR

SEQ ID NO: 13279 - protein, 9 aa, Homo sapiens
  Table A; Target 13279; HLA-C*07:06; C6orf222; ENSG00000189325; TAA
ISEAPSQAR

SEQ ID NO: 13280 - protein, 11 aa, Homo sapiens
  Table A; Target 13280; HLA-A*03:02; C6orf222; ENSG00000189325; TAA
ISSSYGLEEPK

SEQ ID NO: 13281 - protein, 11 aa, Homo sapiens
  Table A; Target 13281; HLA-A*11:01; C6orf222; ENSG00000189325; TAA
ISSSYGLEEPK

SEQ ID NO: 13282 - protein, 11 aa, Homo sapiens
  Table A; Target 13282; HLA-B*27:02; C6orf222; ENSG00000189325; TAA
ISSSYGLEEPK

SEQ ID NO: 13283 - protein, 9 aa, Homo sapiens
  Table A; Target 13283; HLA-C*16:01; C6orf222; ENSG00000189325; TAA
KAAAALRSG

SEQ ID NO: 13284 - protein, 9 aa, Homo sapiens
  Table A; Target 13284; HLA-C*16:02; C6orf222; ENSG00000189325; TAA
KAAAALRSG

SEQ ID NO: 13285 - protein, 10 aa, Homo sapiens
  Table A; Target 13285; HLA-B*57:01; C6orf222; ENSG00000189325; TAA
KALHWTTSDW

SEQ ID NO: 13286 - protein, 10 aa, Homo sapiens
  Table A; Target 13286; HLA-A*30:01; C6orf222; ENSG00000189325; TAA
KEFIQKIISM

SEQ ID NO: 13287 - protein, 10 aa, Homo sapiens
  Table A; Target 13287; HLA-B*37:01; C6orf222; ENSG00000189325; TAA
KEFIQKIISM

SEQ ID NO: 13288 - protein, 10 aa, Homo sapiens
  Table A; Target 13288; HLA-B*40:01; C6orf222; ENSG00000189325; TAA
KEFIQKIISM

SEQ ID NO: 13289 - protein, 10 aa, Homo sapiens
  Table A; Target 13289; HLA-B*40:02; C6orf222; ENSG00000189325; TAA
KEFIQKIISM

SEQ ID NO: 13290 - protein, 11 aa, Homo sapiens
  Table A; Target 13290; HLA-B*40:01; C6orf222; ENSG00000189325; TAA
KEGISQHPEPL

SEQ ID NO: 13291 - protein, 8 aa, Homo sapiens
  Table A; Target 13291; HLA-A*30:01; C6orf222; ENSG00000189325; TAA
KEIIIQKL

SEQ ID NO: 13292 - protein, 8 aa, Homo sapiens
  Table A; Target 13292; HLA-B*18:01; C6orf222; ENSG00000189325; TAA
KEIIIQKL

SEQ ID NO: 13293 - protein, 8 aa, Homo sapiens
  Table A; Target 13293; HLA-B*37:01; C6orf222; ENSG00000189325; TAA
KEIIIQKL

SEQ ID NO: 13294 - protein, 8 aa, Homo sapiens
  Table A; Target 13294; HLA-B*40:01; C6orf222; ENSG00000189325; TAA
KEIIIQKL

SEQ ID NO: 13295 - protein, 8 aa, Homo sapiens
  Table A; Target 13295; HLA-B*40:02; C6orf222; ENSG00000189325; TAA
KEIIIQKL

SEQ ID NO: 13296 - protein, 8 aa, Homo sapiens
  Table A; Target 13296; HLA-B*44:02; C6orf222; ENSG00000189325; TAA
KEIIIQKL

SEQ ID NO: 13297 - protein, 8 aa, Homo sapiens
  Table A; Target 13297; HLA-B*44:03; C6orf222; ENSG00000189325; TAA
KEIIIQKL

SEQ ID NO: 13298 - protein, 8 aa, Homo sapiens
  Table A; Target 13298; HLA-B*49:01; C6orf222; ENSG00000189325; TAA
KEIIIQKL

SEQ ID NO: 13299 - protein, 9 aa, Homo sapiens
  Table A; Target 13299; HLA-B*44:02; C6orf222; ENSG00000189325; TAA
KEIIIQKLV

SEQ ID NO: 13300 - protein, 9 aa, Homo sapiens
  Table A; Target 13300; HLA-B*44:03; C6orf222; ENSG00000189325; TAA
KEIIIQKLV

SEQ ID NO: 13301 - protein, 9 aa, Homo sapiens
  Table A; Target 13301; HLA-B*49:01; C6orf222; ENSG00000189325; TAA
KEIIIQKLV

SEQ ID NO: 13302 - protein, 9 aa, Homo sapiens
  Table A; Target 13302; HLA-A*02:01; C6orf222; ENSG00000189325; TAA
KLVALLQEV

SEQ ID NO: 13303 - protein, 9 aa, Homo sapiens
  Table A; Target 13303; HLA-A*02:03; C6orf222; ENSG00000189325; TAA
KLVALLQEV

SEQ ID NO: 13304 - protein, 9 aa, Homo sapiens
  Table A; Target 13304; HLA-A*02:04; C6orf222; ENSG00000189325; TAA
KLVALLQEV

SEQ ID NO: 13305 - protein, 9 aa, Homo sapiens
  Table A; Target 13305; HLA-A*02:07; C6orf222; ENSG00000189325; TAA
KLVALLQEV

SEQ ID NO: 13306 - protein, 9 aa, Homo sapiens
  Table A; Target 13306; HLA-B*13:02; C6orf222; ENSG00000189325; TAA
KLVALLQEV

SEQ ID NO: 13307 - protein, 9 aa, Homo sapiens
  Table A; Target 13307; HLA-B*55:01; C6orf222; ENSG00000189325; TAA
KLVALLQEV

SEQ ID NO: 13308 - protein, 10 aa, Homo sapiens
  Table A; Target 13308; HLA-B*07:02; C6orf222; ENSG00000189325; TAA
KPDQDAIIQM

SEQ ID NO: 13309 - protein, 10 aa, Homo sapiens
  Table A; Target 13309; HLA-B*35:01; C6orf222; ENSG00000189325; TAA
KPDQDAIIQM

SEQ ID NO: 13310 - protein, 10 aa, Homo sapiens
  Table A; Target 13310; HLA-B*35:03; C6orf222; ENSG00000189325; TAA
KPDQDAIIQM

SEQ ID NO: 13311 - protein, 10 aa, Homo sapiens
  Table A; Target 13311; HLA-B*55:01; C6orf222; ENSG00000189325; TAA
KPDQDAIIQM

SEQ ID NO: 13312 - protein, 9 aa, Homo sapiens
  Table A; Target 13312; HLA-C*06:02; C6orf222; ENSG00000189325; TAA
KRTSKTNPK

SEQ ID NO: 13313 - protein, 9 aa, Homo sapiens
  Table A; Target 13313; HLA-A*32:01; C6orf222; ENSG00000189325; TAA
KSQEKKTSL

SEQ ID NO: 13314 - protein, 9 aa, Homo sapiens
  Table A; Target 13314; HLA-B*08:01; C6orf222; ENSG00000189325; TAA
KSQEKKTSL

SEQ ID NO: 13315 - protein, 9 aa, Homo sapiens
  Table A; Target 13315; HLA-C*16:01; C6orf222; ENSG00000189325; TAA
KSQEKKTSL

SEQ ID NO: 13316 - protein, 9 aa, Homo sapiens
  Table A; Target 13316; HLA-A*32:01; C6orf222; ENSG00000189325; TAA
KSQEKRSSF

SEQ ID NO: 13317 - protein, 9 aa, Homo sapiens
  Table A; Target 13317; HLA-B*58:01; C6orf222; ENSG00000189325; TAA
KSQEKRSSF

SEQ ID NO: 13318 - protein, 9 aa, Homo sapiens
  Table A; Target 13318; HLA-C*16:01; C6orf222; ENSG00000189325; TAA
KSQEKRSSF

SEQ ID NO: 13319 - protein, 9 aa, Homo sapiens
  Table A; Target 13319; HLA-B*13:02; C6orf222; ENSG00000189325; TAA
KSSFLPLCV

SEQ ID NO: 13320 - protein, 9 aa, Homo sapiens
  Table A; Target 13320; HLA-A*31:01; C6orf222; ENSG00000189325; TAA
KTMLNFFVR

SEQ ID NO: 13321 - protein, 8 aa, Homo sapiens
  Table A; Target 13321; HLA-C*05:01; C6orf222; ENSG00000189325; TAA
KVDGTGAL

SEQ ID NO: 13322 - protein, 10 aa, Homo sapiens
  Table A; Target 13322; HLA-C*05:01; C6orf222; ENSG00000189325; TAA
KVDGTGALDV

SEQ ID NO: 13323 - protein, 9 aa, Homo sapiens
  Table A; Target 13323; HLA-B*08:01; C6orf222; ENSG00000189325; TAA
LAEKKARSL

SEQ ID NO: 13324 - protein, 9 aa, Homo sapiens
  Table A; Target 13324; HLA-A*30:01; C6orf222; ENSG00000189325; TAA
LASQLGVAL

SEQ ID NO: 13325 - protein, 9 aa, Homo sapiens
  Table A; Target 13325; HLA-B*07:02; C6orf222; ENSG00000189325; TAA
LASQLGVAL

SEQ ID NO: 13326 - protein, 9 aa, Homo sapiens
  Table A; Target 13326; HLA-B*08:01; C6orf222; ENSG00000189325; TAA
LASQLGVAL

SEQ ID NO: 13327 - protein, 9 aa, Homo sapiens
  Table A; Target 13327; HLA-B*27:02; C6orf222; ENSG00000189325; TAA
LASQLGVAL

SEQ ID NO: 13328 - protein, 9 aa, Homo sapiens
  Table A; Target 13328; HLA-B*27:05; C6orf222; ENSG00000189325; TAA
LASQLGVAL

SEQ ID NO: 13329 - protein, 9 aa, Homo sapiens
  Table A; Target 13329; HLA-B*35:01; C6orf222; ENSG00000189325; TAA
LASQLGVAL

SEQ ID NO: 13330 - protein, 9 aa, Homo sapiens
  Table A; Target 13330; HLA-B*35:03; C6orf222; ENSG00000189325; TAA
LASQLGVAL

SEQ ID NO: 13331 - protein, 9 aa, Homo sapiens
  Table A; Target 13331; HLA-B*38:01; C6orf222; ENSG00000189325; TAA
LASQLGVAL

SEQ ID NO: 13332 - protein, 9 aa, Homo sapiens
  Table A; Target 13332; HLA-B*39:01; C6orf222; ENSG00000189325; TAA
LASQLGVAL

SEQ ID NO: 13333 - protein, 9 aa, Homo sapiens
  Table A; Target 13333; HLA-B*40:01; C6orf222; ENSG00000189325; TAA
LASQLGVAL

SEQ ID NO: 13334 - protein, 9 aa, Homo sapiens
  Table A; Target 13334; HLA-B*46:01; C6orf222; ENSG00000189325; TAA
LASQLGVAL

SEQ ID NO: 13335 - protein, 9 aa, Homo sapiens
  Table A; Target 13335; HLA-B*54:01; C6orf222; ENSG00000189325; TAA
LASQLGVAL

SEQ ID NO: 13336 - protein, 9 aa, Homo sapiens
  Table A; Target 13336; HLA-B*56:01; C6orf222; ENSG00000189325; TAA
LASQLGVAL

SEQ ID NO: 13337 - protein, 9 aa, Homo sapiens
  Table A; Target 13337; HLA-C*01:02; C6orf222; ENSG00000189325; TAA
LASQLGVAL

SEQ ID NO: 13338 - protein, 9 aa, Homo sapiens
  Table A; Target 13338; HLA-C*02:02; C6orf222; ENSG00000189325; TAA
LASQLGVAL

SEQ ID NO: 13339 - protein, 9 aa, Homo sapiens
  Table A; Target 13339; HLA-C*03:03; C6orf222; ENSG00000189325; TAA
LASQLGVAL

SEQ ID NO: 13340 - protein, 9 aa, Homo sapiens
  Table A; Target 13340; HLA-C*03:04; C6orf222; ENSG00000189325; TAA
LASQLGVAL

SEQ ID NO: 13341 - protein, 9 aa, Homo sapiens
  Table A; Target 13341; HLA-C*05:01; C6orf222; ENSG00000189325; TAA
LASQLGVAL

SEQ ID NO: 13342 - protein, 9 aa, Homo sapiens
  Table A; Target 13342; HLA-C*07:04; C6orf222; ENSG00000189325; TAA
LASQLGVAL

SEQ ID NO: 13343 - protein, 9 aa, Homo sapiens
  Table A; Target 13343; HLA-C*07:06; C6orf222; ENSG00000189325; TAA
LASQLGVAL

SEQ ID NO: 13344 - protein, 9 aa, Homo sapiens
  Table A; Target 13344; HLA-C*12:03; C6orf222; ENSG00000189325; TAA
LASQLGVAL

SEQ ID NO: 13345 - protein, 9 aa, Homo sapiens
  Table A; Target 13345; HLA-C*14:02; C6orf222; ENSG00000189325; TAA
LASQLGVAL

SEQ ID NO: 13346 - protein, 9 aa, Homo sapiens
  Table A; Target 13346; HLA-C*16:01; C6orf222; ENSG00000189325; TAA
LASQLGVAL

SEQ ID NO: 13347 - protein, 9 aa, Homo sapiens
  Table A; Target 13347; HLA-C*16:02; C6orf222; ENSG00000189325; TAA
LASQLGVAL

SEQ ID NO: 13348 - protein, 9 aa, Homo sapiens
  Table A; Target 13348; HLA-C*16:04; C6orf222; ENSG00000189325; TAA
LASQLGVAL

SEQ ID NO: 13349 - protein, 9 aa, Homo sapiens
  Table A; Target 13349; HLA-A*30:01; C6orf222; ENSG00000189325; TAA
LEAAGEPAL

SEQ ID NO: 13350 - protein, 9 aa, Homo sapiens
  Table A; Target 13350; HLA-B*18:01; C6orf222; ENSG00000189325; TAA
LEAAGEPAL

SEQ ID NO: 13351 - protein, 9 aa, Homo sapiens
  Table A; Target 13351; HLA-B*35:03; C6orf222; ENSG00000189325; TAA
LEAAGEPAL

SEQ ID NO: 13352 - protein, 9 aa, Homo sapiens
  Table A; Target 13352; HLA-B*37:01; C6orf222; ENSG00000189325; TAA
LEAAGEPAL

SEQ ID NO: 13353 - protein, 9 aa, Homo sapiens
  Table A; Target 13353; HLA-B*38:01; C6orf222; ENSG00000189325; TAA
LEAAGEPAL

SEQ ID NO: 13354 - protein, 9 aa, Homo sapiens
  Table A; Target 13354; HLA-B*39:01; C6orf222; ENSG00000189325; TAA
LEAAGEPAL

SEQ ID NO: 13355 - protein, 9 aa, Homo sapiens
  Table A; Target 13355; HLA-B*40:01; C6orf222; ENSG00000189325; TAA
LEAAGEPAL

SEQ ID NO: 13356 - protein, 9 aa, Homo sapiens
  Table A; Target 13356; HLA-B*40:02; C6orf222; ENSG00000189325; TAA
LEAAGEPAL

SEQ ID NO: 13357 - protein, 9 aa, Homo sapiens
  Table A; Target 13357; HLA-B*44:02; C6orf222; ENSG00000189325; TAA
LEAAGEPAL

SEQ ID NO: 13358 - protein, 9 aa, Homo sapiens
  Table A; Target 13358; HLA-B*44:03; C6orf222; ENSG00000189325; TAA
LEAAGEPAL

SEQ ID NO: 13359 - protein, 9 aa, Homo sapiens
  Table A; Target 13359; HLA-B*49:01; C6orf222; ENSG00000189325; TAA
LEAAGEPAL

SEQ ID NO: 13360 - protein, 9 aa, Homo sapiens
  Table A; Target 13360; HLA-C*02:02; C6orf222; ENSG00000189325; TAA
LEAAGEPAL

SEQ ID NO: 13361 - protein, 9 aa, Homo sapiens
  Table A; Target 13361; HLA-C*03:04; C6orf222; ENSG00000189325; TAA
LEAAGEPAL

SEQ ID NO: 13362 - protein, 9 aa, Homo sapiens
  Table A; Target 13362; HLA-C*16:04; C6orf222; ENSG00000189325; TAA
LEAAGEPAL

SEQ ID NO: 13363 - protein, 9 aa, Homo sapiens
  Table A; Target 13363; HLA-B*49:01; C6orf222; ENSG00000189325; TAA
LEEPKVQEA

SEQ ID NO: 13364 - protein, 9 aa, Homo sapiens
  Table A; Target 13364; HLA-B*57:01; C6orf222; ENSG00000189325; TAA
LLKRVGDQW

SEQ ID NO: 13365 - protein, 9 aa, Homo sapiens
  Table A; Target 13365; HLA-A*02:01; C6orf222; ENSG00000189325; TAA
LLQEVDGQL

SEQ ID NO: 13366 - protein, 9 aa, Homo sapiens
  Table A; Target 13366; HLA-A*02:04; C6orf222; ENSG00000189325; TAA
LLQEVDGQL

SEQ ID NO: 13367 - protein, 9 aa, Homo sapiens
  Table A; Target 13367; HLA-A*02:07; C6orf222; ENSG00000189325; TAA
LLQEVDGQL

SEQ ID NO: 13368 - protein, 9 aa, Homo sapiens
  Table A; Target 13368; HLA-C*05:01; C6orf222; ENSG00000189325; TAA
LLQEVDGQL

SEQ ID NO: 13369 - protein, 9 aa, Homo sapiens
  Table A; Target 13369; HLA-B*07:02; C6orf222; ENSG00000189325; TAA
LPAEGEPVV

SEQ ID NO: 13370 - protein, 9 aa, Homo sapiens
  Table A; Target 13370; HLA-B*35:01; C6orf222; ENSG00000189325; TAA
LPAEGEPVV

SEQ ID NO: 13371 - protein, 9 aa, Homo sapiens
  Table A; Target 13371; HLA-B*35:03; C6orf222; ENSG00000189325; TAA
LPAEGEPVV

SEQ ID NO: 13372 - protein, 9 aa, Homo sapiens
  Table A; Target 13372; HLA-B*51:01; C6orf222; ENSG00000189325; TAA
LPAEGEPVV

SEQ ID NO: 13373 - protein, 9 aa, Homo sapiens
  Table A; Target 13373; HLA-B*54:01; C6orf222; ENSG00000189325; TAA
LPAEGEPVV

SEQ ID NO: 13374 - protein, 9 aa, Homo sapiens
  Table A; Target 13374; HLA-B*55:01; C6orf222; ENSG00000189325; TAA
LPAEGEPVV

SEQ ID NO: 13375 - protein, 9 aa, Homo sapiens
  Table A; Target 13375; HLA-B*56:01; C6orf222; ENSG00000189325; TAA
LPAEGEPVV

SEQ ID NO: 13376 - protein, 9 aa, Homo sapiens
  Table A; Target 13376; HLA-C*03:03; C6orf222; ENSG00000189325; TAA
LPAEGEPVV

SEQ ID NO: 13377 - protein, 10 aa, Homo sapiens
  Table A; Target 13377; HLA-B*35:01; C6orf222; ENSG00000189325; TAA
LPAEGEPVVI

SEQ ID NO: 13378 - protein, 10 aa, Homo sapiens
  Table A; Target 13378; HLA-B*35:03; C6orf222; ENSG00000189325; TAA
LPAEGEPVVI

SEQ ID NO: 13379 - protein, 10 aa, Homo sapiens
  Table A; Target 13379; HLA-B*51:01; C6orf222; ENSG00000189325; TAA
LPAEGEPVVI

SEQ ID NO: 13380 - protein, 10 aa, Homo sapiens
  Table A; Target 13380; HLA-B*54:01; C6orf222; ENSG00000189325; TAA
LPAEGEPVVI

SEQ ID NO: 13381 - protein, 10 aa, Homo sapiens
  Table A; Target 13381; HLA-B*55:01; C6orf222; ENSG00000189325; TAA
LPAEGEPVVI

SEQ ID NO: 13382 - protein, 10 aa, Homo sapiens
  Table A; Target 13382; HLA-B*56:01; C6orf222; ENSG00000189325; TAA
LPAEGEPVVI

SEQ ID NO: 13383 - protein, 10 aa, Homo sapiens
  Table A; Target 13383; HLA-C*05:01; C6orf222; ENSG00000189325; TAA
LPAEGEPVVI

SEQ ID NO: 13384 - protein, 9 aa, Homo sapiens
  Table A; Target 13384; HLA-A*01:01; C6orf222; ENSG00000189325; TAA
LPLDRASEY

SEQ ID NO: 13385 - protein, 9 aa, Homo sapiens
  Table A; Target 13385; HLA-A*26:01; C6orf222; ENSG00000189325; TAA
LPLDRASEY

SEQ ID NO: 13386 - protein, 9 aa, Homo sapiens
  Table A; Target 13386; HLA-A*29:02; C6orf222; ENSG00000189325; TAA
LPLDRASEY

SEQ ID NO: 13387 - protein, 9 aa, Homo sapiens
  Table A; Target 13387; HLA-A*30:02; C6orf222; ENSG00000189325; TAA
LPLDRASEY

SEQ ID NO: 13388 - protein, 9 aa, Homo sapiens
  Table A; Target 13388; HLA-B*07:02; C6orf222; ENSG00000189325; TAA
LPLDRASEY

SEQ ID NO: 13389 - protein, 9 aa, Homo sapiens
  Table A; Target 13389; HLA-B*08:01; C6orf222; ENSG00000189325; TAA
LPLDRASEY

SEQ ID NO: 13390 - protein, 9 aa, Homo sapiens
  Table A; Target 13390; HLA-B*15:01; C6orf222; ENSG00000189325; TAA
LPLDRASEY

SEQ ID NO: 13391 - protein, 9 aa, Homo sapiens
  Table A; Target 13391; HLA-B*15:03; C6orf222; ENSG00000189325; TAA
LPLDRASEY

SEQ ID NO: 13392 - protein, 9 aa, Homo sapiens
  Table A; Target 13392; HLA-B*18:01; C6orf222; ENSG00000189325; TAA
LPLDRASEY

SEQ ID NO: 13393 - protein, 9 aa, Homo sapiens
  Table A; Target 13393; HLA-B*35:01; C6orf222; ENSG00000189325; TAA
LPLDRASEY

SEQ ID NO: 13394 - protein, 9 aa, Homo sapiens
  Table A; Target 13394; HLA-B*35:03; C6orf222; ENSG00000189325; TAA
LPLDRASEY

SEQ ID NO: 13395 - protein, 9 aa, Homo sapiens
  Table A; Target 13395; HLA-B*39:01; C6orf222; ENSG00000189325; TAA
LPLDRASEY

SEQ ID NO: 13396 - protein, 9 aa, Homo sapiens
  Table A; Target 13396; HLA-B*46:01; C6orf222; ENSG00000189325; TAA
LPLDRASEY

SEQ ID NO: 13397 - protein, 9 aa, Homo sapiens
  Table A; Target 13397; HLA-B*51:01; C6orf222; ENSG00000189325; TAA
LPLDRASEY

SEQ ID NO: 13398 - protein, 9 aa, Homo sapiens
  Table A; Target 13398; HLA-B*54:01; C6orf222; ENSG00000189325; TAA
LPLDRASEY

SEQ ID NO: 13399 - protein, 9 aa, Homo sapiens
  Table A; Target 13399; HLA-B*55:01; C6orf222; ENSG00000189325; TAA
LPLDRASEY

SEQ ID NO: 13400 - protein, 9 aa, Homo sapiens
  Table A; Target 13400; HLA-C*01:02; C6orf222; ENSG00000189325; TAA
LPLDRASEY

SEQ ID NO: 13401 - protein, 9 aa, Homo sapiens
  Table A; Target 13401; HLA-C*02:02; C6orf222; ENSG00000189325; TAA
LPLDRASEY

SEQ ID NO: 13402 - protein, 9 aa, Homo sapiens
  Table A; Target 13402; HLA-C*03:03; C6orf222; ENSG00000189325; TAA
LPLDRASEY

SEQ ID NO: 13403 - protein, 9 aa, Homo sapiens
  Table A; Target 13403; HLA-C*05:01; C6orf222; ENSG00000189325; TAA
LPLDRASEY

SEQ ID NO: 13404 - protein, 9 aa, Homo sapiens
  Table A; Target 13404; HLA-C*07:02; C6orf222; ENSG00000189325; TAA
LPLDRASEY

SEQ ID NO: 13405 - protein, 9 aa, Homo sapiens
  Table A; Target 13405; HLA-C*07:04; C6orf222; ENSG00000189325; TAA
LPLDRASEY

SEQ ID NO: 13406 - protein, 9 aa, Homo sapiens
  Table A; Target 13406; HLA-C*14:02; C6orf222; ENSG00000189325; TAA
LPLDRASEY

SEQ ID NO: 13407 - protein, 9 aa, Homo sapiens
  Table A; Target 13407; HLA-C*16:01; C6orf222; ENSG00000189325; TAA
LPLDRASEY

SEQ ID NO: 13408 - protein, 9 aa, Homo sapiens
  Table A; Target 13408; HLA-C*16:02; C6orf222; ENSG00000189325; TAA
LPLDRASEY

SEQ ID NO: 13409 - protein, 8 aa, Homo sapiens
  Table A; Target 13409; HLA-B*07:02; C6orf222; ENSG00000189325; TAA
LPNPAPAV

SEQ ID NO: 13410 - protein, 8 aa, Homo sapiens
  Table A; Target 13410; HLA-B*35:01; C6orf222; ENSG00000189325; TAA
LPNPAPAV

SEQ ID NO: 13411 - protein, 8 aa, Homo sapiens
  Table A; Target 13411; HLA-B*35:03; C6orf222; ENSG00000189325; TAA
LPNPAPAV

SEQ ID NO: 13412 - protein, 8 aa, Homo sapiens
  Table A; Target 13412; HLA-B*51:01; C6orf222; ENSG00000189325; TAA
LPNPAPAV

SEQ ID NO: 13413 - protein, 8 aa, Homo sapiens
  Table A; Target 13413; HLA-B*54:01; C6orf222; ENSG00000189325; TAA
LPNPAPAV

SEQ ID NO: 13414 - protein, 8 aa, Homo sapiens
  Table A; Target 13414; HLA-B*55:01; C6orf222; ENSG00000189325; TAA
LPNPAPAV

SEQ ID NO: 13415 - protein, 8 aa, Homo sapiens
  Table A; Target 13415; HLA-B*56:01; C6orf222; ENSG00000189325; TAA
LPNPAPAV

SEQ ID NO: 13416 - protein, 8 aa, Homo sapiens
  Table A; Target 13416; HLA-C*07:02; C6orf222; ENSG00000189325; TAA
LPNPAPAV

SEQ ID NO: 13417 - protein, 8 aa, Homo sapiens
  Table A; Target 13417; HLA-C*16:02; C6orf222; ENSG00000189325; TAA
LPNPAPAV

SEQ ID NO: 13418 - protein, 9 aa, Homo sapiens
  Table A; Target 13418; HLA-A*31:01; C6orf222; ENSG00000189325; TAA
LPNPAPAVR

SEQ ID NO: 13419 - protein, 9 aa, Homo sapiens
  Table A; Target 13419; HLA-A*33:01; C6orf222; ENSG00000189325; TAA
LPNPAPAVR

SEQ ID NO: 13420 - protein, 9 aa, Homo sapiens
  Table A; Target 13420; HLA-A*33:03; C6orf222; ENSG00000189325; TAA
LPNPAPAVR

SEQ ID NO: 13421 - protein, 9 aa, Homo sapiens
  Table A; Target 13421; HLA-A*68:01; C6orf222; ENSG00000189325; TAA
LPNPAPAVR

SEQ ID NO: 13422 - protein, 9 aa, Homo sapiens
  Table A; Target 13422; HLA-B*07:02; C6orf222; ENSG00000189325; TAA
LPNPAPAVR

SEQ ID NO: 13423 - protein, 9 aa, Homo sapiens
  Table A; Target 13423; HLA-B*35:01; C6orf222; ENSG00000189325; TAA
LPNPAPAVR

SEQ ID NO: 13424 - protein, 9 aa, Homo sapiens
  Table A; Target 13424; HLA-B*35:03; C6orf222; ENSG00000189325; TAA
LPNPAPAVR

SEQ ID NO: 13425 - protein, 9 aa, Homo sapiens
  Table A; Target 13425; HLA-B*51:01; C6orf222; ENSG00000189325; TAA
LPNPAPAVR

SEQ ID NO: 13426 - protein, 9 aa, Homo sapiens
  Table A; Target 13426; HLA-B*54:01; C6orf222; ENSG00000189325; TAA
LPNPAPAVR

SEQ ID NO: 13427 - protein, 9 aa, Homo sapiens
  Table A; Target 13427; HLA-B*55:01; C6orf222; ENSG00000189325; TAA
LPNPAPAVR

SEQ ID NO: 13428 - protein, 9 aa, Homo sapiens
  Table A; Target 13428; HLA-B*56:01; C6orf222; ENSG00000189325; TAA
LPNPAPAVR

SEQ ID NO: 13429 - protein, 9 aa, Homo sapiens
  Table A; Target 13429; HLA-C*07:06; C6orf222; ENSG00000189325; TAA
LPNPAPAVR

SEQ ID NO: 13430 - protein, 10 aa, Homo sapiens
  Table A; Target 13430; HLA-A*03:02; C6orf222; ENSG00000189325; TAA
LPNPAPAVRK

SEQ ID NO: 13431 - protein, 10 aa, Homo sapiens
  Table A; Target 13431; HLA-B*35:01; C6orf222; ENSG00000189325; TAA
LPNPAPAVRK

SEQ ID NO: 13432 - protein, 10 aa, Homo sapiens
  Table A; Target 13432; HLA-B*51:01; C6orf222; ENSG00000189325; TAA
LPNPAPAVRK

SEQ ID NO: 13433 - protein, 10 aa, Homo sapiens
  Table A; Target 13433; HLA-B*56:01; C6orf222; ENSG00000189325; TAA
LPNPAPAVRK

SEQ ID NO: 13434 - protein, 9 aa, Homo sapiens
  Table A; Target 13434; HLA-B*54:01; C6orf222; ENSG00000189325; TAA
LPTAPSRKA

SEQ ID NO: 13435 - protein, 9 aa, Homo sapiens
  Table A; Target 13435; HLA-B*55:01; C6orf222; ENSG00000189325; TAA
LPTAPSRKA

SEQ ID NO: 13436 - protein, 9 aa, Homo sapiens
  Table A; Target 13436; HLA-B*56:01; C6orf222; ENSG00000189325; TAA
LPTAPSRKA

SEQ ID NO: 13437 - protein, 10 aa, Homo sapiens
  Table A; Target 13437; HLA-B*07:02; C6orf222; ENSG00000189325; TAA
LPTAPSRKAL

SEQ ID NO: 13438 - protein, 10 aa, Homo sapiens
  Table A; Target 13438; HLA-C*07:02; C6orf222; ENSG00000189325; TAA
LPTAPSRKAL

SEQ ID NO: 13439 - protein, 8 aa, Homo sapiens
  Table A; Target 13439; HLA-C*05:01; C6orf222; ENSG00000189325; TAA
LQEVDGQL

SEQ ID NO: 13440 - protein, 8 aa, Homo sapiens
  Table A; Target 13440; HLA-B*08:01; C6orf222; ENSG00000189325; TAA
LSKAAAAL

SEQ ID NO: 13441 - protein, 8 aa, Homo sapiens
  Table A; Target 13441; HLA-B*46:01; C6orf222; ENSG00000189325; TAA
LSKAAAAL

SEQ ID NO: 13442 - protein, 8 aa, Homo sapiens
  Table A; Target 13442; HLA-C*03:04; C6orf222; ENSG00000189325; TAA
LSKAAAAL

SEQ ID NO: 13443 - protein, 9 aa, Homo sapiens
  Table A; Target 13443; HLA-A*31:01; C6orf222; ENSG00000189325; TAA
LSKAAAALR

SEQ ID NO: 13444 - protein, 9 aa, Homo sapiens
  Table A; Target 13444; HLA-A*33:01; C6orf222; ENSG00000189325; TAA
LSKAAAALR

SEQ ID NO: 13445 - protein, 9 aa, Homo sapiens
  Table A; Target 13445; HLA-A*33:03; C6orf222; ENSG00000189325; TAA
LSKAAAALR

SEQ ID NO: 13446 - protein, 9 aa, Homo sapiens
  Table A; Target 13446; HLA-C*07:06; C6orf222; ENSG00000189325; TAA
LSKAAAALR

SEQ ID NO: 13447 - protein, 8 aa, Homo sapiens
  Table A; Target 13447; HLA-B*08:01; C6orf222; ENSG00000189325; TAA
LSKLVATL

SEQ ID NO: 13448 - protein, 8 aa, Homo sapiens
  Table A; Target 13448; HLA-B*40:02; C6orf222; ENSG00000189325; TAA
LSKLVATL

SEQ ID NO: 13449 - protein, 8 aa, Homo sapiens
  Table A; Target 13449; HLA-B*46:01; C6orf222; ENSG00000189325; TAA
LSKLVATL

SEQ ID NO: 13450 - protein, 8 aa, Homo sapiens
  Table A; Target 13450; HLA-C*07:04; C6orf222; ENSG00000189325; TAA
LSKLVATL

SEQ ID NO: 13451 - protein, 9 aa, Homo sapiens
  Table A; Target 13451; HLA-A*31:01; C6orf222; ENSG00000189325; TAA
LSKLVATLR

SEQ ID NO: 13452 - protein, 9 aa, Homo sapiens
  Table A; Target 13452; HLA-A*33:01; C6orf222; ENSG00000189325; TAA
LSKLVATLR

SEQ ID NO: 13453 - protein, 9 aa, Homo sapiens
  Table A; Target 13453; HLA-A*33:03; C6orf222; ENSG00000189325; TAA
LSKLVATLR

SEQ ID NO: 13454 - protein, 9 aa, Homo sapiens
  Table A; Target 13454; HLA-B*57:01; C6orf222; ENSG00000189325; TAA
LSKLVATLR

SEQ ID NO: 13455 - protein, 9 aa, Homo sapiens
  Table A; Target 13455; HLA-A*11:01; C6orf222; ENSG00000189325; TAA
LSLPTAPSR

SEQ ID NO: 13456 - protein, 9 aa, Homo sapiens
  Table A; Target 13456; HLA-A*31:01; C6orf222; ENSG00000189325; TAA
LSLPTAPSR

SEQ ID NO: 13457 - protein, 9 aa, Homo sapiens
  Table A; Target 13457; HLA-B*57:01; C6orf222; ENSG00000189325; TAA
LSLPTAPSR

SEQ ID NO: 13458 - protein, 9 aa, Homo sapiens
  Table A; Target 13458; HLA-B*58:01; C6orf222; ENSG00000189325; TAA
LSLPTAPSR

SEQ ID NO: 13459 - protein, 9 aa, Homo sapiens
  Table A; Target 13459; HLA-C*07:06; C6orf222; ENSG00000189325; TAA
LSLPTAPSR

SEQ ID NO: 13460 - protein, 10 aa, Homo sapiens
  Table A; Target 13460; HLA-A*03:01; C6orf222; ENSG00000189325; TAA
LSLPTAPSRK

SEQ ID NO: 13461 - protein, 10 aa, Homo sapiens
  Table A; Target 13461; HLA-A*11:01; C6orf222; ENSG00000189325; TAA
LSLPTAPSRK

SEQ ID NO: 13462 - protein, 9 aa, Homo sapiens
  Table A; Target 13462; HLA-A*02:03; C6orf222; ENSG00000189325; TAA
LVATLRSQV

SEQ ID NO: 13463 - protein, 9 aa, Homo sapiens
  Table A; Target 13463; HLA-A*32:01; C6orf222; ENSG00000189325; TAA
LVATLRSQV

SEQ ID NO: 13464 - protein, 8 aa, Homo sapiens
  Table A; Target 13464; HLA-C*14:02; C6orf222; ENSG00000189325; TAA
LYQFDVSL

SEQ ID NO: 13465 - protein, 11 aa, Homo sapiens
  Table A; Target 13465; HLA-B*27:02; C6orf222; ENSG00000189325; TAA
LYQFDVSLANK

SEQ ID NO: 13466 - protein, 9 aa, Homo sapiens
  Table A; Target 13466; HLA-B*15:03; C6orf222; ENSG00000189325; TAA
NKFAGSNSH

SEQ ID NO: 13467 - protein, 9 aa, Homo sapiens
  Table A; Target 13467; HLA-C*05:01; C6orf222; ENSG00000189325; TAA
PAEGEPVVI

SEQ ID NO: 13468 - protein, 8 aa, Homo sapiens
  Table A; Target 13468; HLA-A*01:01; C6orf222; ENSG00000189325; TAA
PLDRASEY

SEQ ID NO: 13469 - protein, 11 aa, Homo sapiens
  Table A; Target 13469; HLA-B*27:02; C6orf222; ENSG00000189325; TAA
PLEAAGEPALR

SEQ ID NO: 13470 - protein, 9 aa, Homo sapiens
  Table A; Target 13470; HLA-B*07:02; C6orf222; ENSG00000189325; TAA
PSVLPTPSE

SEQ ID NO: 13471 - protein, 9 aa, Homo sapiens
  Table A; Target 13471; HLA-C*07:02; C6orf222; ENSG00000189325; TAA
PTAPSRKAL

SEQ ID NO: 13472 - protein, 9 aa, Homo sapiens
  Table A; Target 13472; HLA-C*16:02; C6orf222; ENSG00000189325; TAA
PTAPSRKAL

SEQ ID NO: 13473 - protein, 9 aa, Homo sapiens
  Table A; Target 13473; HLA-A*24:02; C6orf222; ENSG00000189325; TAA
PYREDQPNI

SEQ ID NO: 13474 - protein, 8 aa, Homo sapiens
  Table A; Target 13474; HLA-B*37:01; C6orf222; ENSG00000189325; TAA
QDAIIQMI

SEQ ID NO: 13475 - protein, 10 aa, Homo sapiens
  Table A; Target 13475; HLA-B*40:01; C6orf222; ENSG00000189325; TAA
QEARGREEGL

SEQ ID NO: 13476 - protein, 11 aa, Homo sapiens
  Table A; Target 13476; HLA-B*27:02; C6orf222; ENSG00000189325; TAA
QEPGEELPLDR

SEQ ID NO: 13477 - protein, 9 aa, Homo sapiens
  Table A; Target 13477; HLA-B*44:02; C6orf222; ENSG00000189325; TAA
QEVDGQLGQ

SEQ ID NO: 13478 - protein, 9 aa, Homo sapiens
  Table A; Target 13478; HLA-B*44:03; C6orf222; ENSG00000189325; TAA
QEVDGQLGQ

SEQ ID NO: 13479 - protein, 9 aa, Homo sapiens
  Table A; Target 13479; HLA-B*49:01; C6orf222; ENSG00000189325; TAA
QEVDGQLGQ

SEQ ID NO: 13480 - protein, 11 aa, Homo sapiens
  Table A; Target 13480; HLA-A*30:01; C6orf222; ENSG00000189325; TAA
QEVDGQLGQQI

SEQ ID NO: 13481 - protein, 11 aa, Homo sapiens
  Table A; Target 13481; HLA-B*13:02; C6orf222; ENSG00000189325; TAA
QEVDGQLGQQI

SEQ ID NO: 13482 - protein, 11 aa, Homo sapiens
  Table A; Target 13482; HLA-B*27:02; C6orf222; ENSG00000189325; TAA
QEVDGQLGQQI

SEQ ID NO: 13483 - protein, 11 aa, Homo sapiens
  Table A; Target 13483; HLA-B*38:01; C6orf222; ENSG00000189325; TAA
QEVDGQLGQQI

SEQ ID NO: 13484 - protein, 11 aa, Homo sapiens
  Table A; Target 13484; HLA-B*39:01; C6orf222; ENSG00000189325; TAA
QEVDGQLGQQI

SEQ ID NO: 13485 - protein, 11 aa, Homo sapiens
  Table A; Target 13485; HLA-B*40:01; C6orf222; ENSG00000189325; TAA
QEVDGQLGQQI

SEQ ID NO: 13486 - protein, 11 aa, Homo sapiens
  Table A; Target 13486; HLA-B*40:02; C6orf222; ENSG00000189325; TAA
QEVDGQLGQQI

SEQ ID NO: 13487 - protein, 11 aa, Homo sapiens
  Table A; Target 13487; HLA-B*44:02; C6orf222; ENSG00000189325; TAA
QEVDGQLGQQI

SEQ ID NO: 13488 - protein, 11 aa, Homo sapiens
  Table A; Target 13488; HLA-B*44:03; C6orf222; ENSG00000189325; TAA
QEVDGQLGQQI

SEQ ID NO: 13489 - protein, 11 aa, Homo sapiens
  Table A; Target 13489; HLA-B*49:01; C6orf222; ENSG00000189325; TAA
QEVDGQLGQQI

SEQ ID NO: 13490 - protein, 11 aa, Homo sapiens
  Table A; Target 13490; HLA-C*16:04; C6orf222; ENSG00000189325; TAA
QEVDGQLGQQI

SEQ ID NO: 13491 - protein, 9 aa, Homo sapiens
  Table A; Target 13491; HLA-C*04:01; C6orf222; ENSG00000189325; TAA
QFDVSLANK

SEQ ID NO: 13492 - protein, 10 aa, Homo sapiens
  Table A; Target 13492; HLA-A*23:01; C6orf222; ENSG00000189325; TAA
QFDVSLANKF

SEQ ID NO: 13493 - protein, 10 aa, Homo sapiens
  Table A; Target 13493; HLA-A*24:02; C6orf222; ENSG00000189325; TAA
QFDVSLANKF

SEQ ID NO: 13494 - protein, 10 aa, Homo sapiens
  Table A; Target 13494; HLA-A*29:02; C6orf222; ENSG00000189325; TAA
QFDVSLANKF

SEQ ID NO: 13495 - protein, 10 aa, Homo sapiens
  Table A; Target 13495; HLA-B*35:01; C6orf222; ENSG00000189325; TAA
QFDVSLANKF

SEQ ID NO: 13496 - protein, 10 aa, Homo sapiens
  Table A; Target 13496; HLA-B*35:03; C6orf222; ENSG00000189325; TAA
QFDVSLANKF

SEQ ID NO: 13497 - protein, 10 aa, Homo sapiens
  Table A; Target 13497; HLA-B*38:01; C6orf222; ENSG00000189325; TAA
QFDVSLANKF

SEQ ID NO: 13498 - protein, 10 aa, Homo sapiens
  Table A; Target 13498; HLA-B*55:01; C6orf222; ENSG00000189325; TAA
QFDVSLANKF

SEQ ID NO: 13499 - protein, 10 aa, Homo sapiens
  Table A; Target 13499; HLA-C*04:01; C6orf222; ENSG00000189325; TAA
QFDVSLANKF

SEQ ID NO: 13500 - protein, 9 aa, Homo sapiens
  Table A; Target 13500; HLA-B*07:02; C6orf222; ENSG00000189325; TAA
QPNITSPKV

SEQ ID NO: 13501 - protein, 9 aa, Homo sapiens
  Table A; Target 13501; HLA-B*51:01; C6orf222; ENSG00000189325; TAA
QPNITSPKV

SEQ ID NO: 13502 - protein, 9 aa, Homo sapiens
  Table A; Target 13502; HLA-B*55:01; C6orf222; ENSG00000189325; TAA
QPNITSPKV

SEQ ID NO: 13503 - protein, 9 aa, Homo sapiens
  Table A; Target 13503; HLA-B*56:01; C6orf222; ENSG00000189325; TAA
QPNITSPKV

SEQ ID NO: 13504 - protein, 9 aa, Homo sapiens
  Table A; Target 13504; HLA-C*07:02; C6orf222; ENSG00000189325; TAA
QPNITSPKV

SEQ ID NO: 13505 - protein, 9 aa, Homo sapiens
  Table A; Target 13505; HLA-B*56:01; C6orf222; ENSG00000189325; TAA
QPQVQQEEV

SEQ ID NO: 13506 - protein, 9 aa, Homo sapiens
  Table A; Target 13506; HLA-A*02:01; C6orf222; ENSG00000189325; TAA
QQGEEQPQV

SEQ ID NO: 13507 - protein, 9 aa, Homo sapiens
  Table A; Target 13507; HLA-B*13:02; C6orf222; ENSG00000189325; TAA
QQGEEQPQV

SEQ ID NO: 13508 - protein, 9 aa, Homo sapiens
  Table A; Target 13508; HLA-B*39:01; C6orf222; ENSG00000189325; TAA
QQGEEQPQV

SEQ ID NO: 13509 - protein, 9 aa, Homo sapiens
  Table A; Target 13509; HLA-B*13:02; C6orf222; ENSG00000189325; TAA
QSLASQLGV

SEQ ID NO: 13510 - protein, 10 aa, Homo sapiens
  Table A; Target 13510; HLA-B*40:01; C6orf222; ENSG00000189325; TAA
REEGLSKAAA

SEQ ID NO: 13511 - protein, 10 aa, Homo sapiens
  Table A; Target 13511; HLA-B*40:02; C6orf222; ENSG00000189325; TAA
REEGLSKAAA

SEQ ID NO: 13512 - protein, 9 aa, Homo sapiens
  Table A; Target 13512; HLA-A*02:01; C6orf222; ENSG00000189325; TAA
RLYQFDVSL

SEQ ID NO: 13513 - protein, 9 aa, Homo sapiens
  Table A; Target 13513; HLA-A*02:03; C6orf222; ENSG00000189325; TAA
RLYQFDVSL

SEQ ID NO: 13514 - protein, 9 aa, Homo sapiens
  Table A; Target 13514; HLA-A*02:04; C6orf222; ENSG00000189325; TAA
RLYQFDVSL

SEQ ID NO: 13515 - protein, 9 aa, Homo sapiens
  Table A; Target 13515; HLA-A*02:07; C6orf222; ENSG00000189325; TAA
RLYQFDVSL

SEQ ID NO: 13516 - protein, 9 aa, Homo sapiens
  Table A; Target 13516; HLA-A*03:01; C6orf222; ENSG00000189325; TAA
RLYQFDVSL

SEQ ID NO: 13517 - protein, 9 aa, Homo sapiens
  Table A; Target 13517; HLA-B*13:02; C6orf222; ENSG00000189325; TAA
RLYQFDVSL

SEQ ID NO: 13518 - protein, 10 aa, Homo sapiens
  Table A; Target 13518; HLA-A*02:03; C6orf222; ENSG00000189325; TAA
RLYQFDVSLA

SEQ ID NO: 13519 - protein, 10 aa, Homo sapiens
  Table A; Target 13519; HLA-B*07:02; C6orf222; ENSG00000189325; TAA
RPQAPGKGSE

SEQ ID NO: 13520 - protein, 9 aa, Homo sapiens
  Table A; Target 13520; HLA-B*07:02; C6orf222; ENSG00000189325; TAA
RPSFLPLCV

SEQ ID NO: 13521 - protein, 9 aa, Homo sapiens
  Table A; Target 13521; HLA-B*56:01; C6orf222; ENSG00000189325; TAA
RPSFLPLCV

SEQ ID NO: 13522 - protein, 8 aa, Homo sapiens
  Table A; Target 13522; HLA-B*07:02; C6orf222; ENSG00000189325; TAA
RPSISSSY

SEQ ID NO: 13523 - protein, 10 aa, Homo sapiens
  Table A; Target 13523; HLA-B*07:02; C6orf222; ENSG00000189325; TAA
RPSISSSYGL

SEQ ID NO: 13524 - protein, 8 aa, Homo sapiens
  Table A; Target 13524; HLA-B*07:02; C6orf222; ENSG00000189325; TAA
RPSTSSSL

SEQ ID NO: 13525 - protein, 8 aa, Homo sapiens
  Table A; Target 13525; HLA-C*07:02; C6orf222; ENSG00000189325; TAA
RPSTSSSL

SEQ ID NO: 13526 - protein, 11 aa, Homo sapiens
  Table A; Target 13526; HLA-A*31:01; C6orf222; ENSG00000189325; TAA
RSGEADLGPAR

SEQ ID NO: 13527 - protein, 11 aa, Homo sapiens
  Table A; Target 13527; HLA-A*03:02; C6orf222; ENSG00000189325; TAA
RSLDRPQAPGK

SEQ ID NO: 13528 - protein, 9 aa, Homo sapiens
  Table A; Target 13528; HLA-A*03:02; C6orf222; ENSG00000189325; TAA
RSQVAHSSK

SEQ ID NO: 13529 - protein, 10 aa, Homo sapiens
  Table A; Target 13529; HLA-A*03:01; C6orf222; ENSG00000189325; TAA
RTGPEEPREK

SEQ ID NO: 13530 - protein, 10 aa, Homo sapiens
  Table A; Target 13530; HLA-A*03:02; C6orf222; ENSG00000189325; TAA
RTGPEEPREK

SEQ ID NO: 13531 - protein, 10 aa, Homo sapiens
  Table A; Target 13531; HLA-A*11:01; C6orf222; ENSG00000189325; TAA
RTGPEEPREK

SEQ ID NO: 13532 - protein, 10 aa, Homo sapiens
  Table A; Target 13532; HLA-B*57:01; C6orf222; ENSG00000189325; TAA
RTGPEEPREK

SEQ ID NO: 13533 - protein, 9 aa, Homo sapiens
  Table A; Target 13533; HLA-A*03:02; C6orf222; ENSG00000189325; TAA
RTSKTNPKK

SEQ ID NO: 13534 - protein, 8 aa, Homo sapiens
  Table A; Target 13534; HLA-B*37:01; C6orf222; ENSG00000189325; TAA
SDHQSFLI

SEQ ID NO: 13535 - protein, 8 aa, Homo sapiens
  Table A; Target 13535; HLA-B*37:01; C6orf222; ENSG00000189325; TAA
SDSPAPSA

SEQ ID NO: 13536 - protein, 8 aa, Homo sapiens
  Table A; Target 13536; HLA-B*37:01; C6orf222; ENSG00000189325; TAA
SDSSLSKL

SEQ ID NO: 13537 - protein, 9 aa, Homo sapiens
  Table A; Target 13537; HLA-B*37:01; C6orf222; ENSG00000189325; TAA
SDSSLSKLV

SEQ ID NO: 13538 - protein, 9 aa, Homo sapiens
  Table A; Target 13538; HLA-C*06:02; C6orf222; ENSG00000189325; TAA
SDSSLSKLV

SEQ ID NO: 13539 - protein, 9 aa, Homo sapiens
  Table A; Target 13539; HLA-C*16:02; C6orf222; ENSG00000189325; TAA
SDSSLSKLV

SEQ ID NO: 13540 - protein, 9 aa, Homo sapiens
  Table A; Target 13540; HLA-B*44:03; C6orf222; ENSG00000189325; TAA
SEAPSQARG

SEQ ID NO: 13541 - protein, 10 aa, Homo sapiens
  Table A; Target 13541; HLA-B*40:01; C6orf222; ENSG00000189325; TAA
SESQEPGEEL

SEQ ID NO: 13542 - protein, 9 aa, Homo sapiens
  Table A; Target 13542; HLA-A*03:01; C6orf222; ENSG00000189325; TAA
SEYKEFIQK

SEQ ID NO: 13543 - protein, 9 aa, Homo sapiens
  Table A; Target 13543; HLA-A*03:02; C6orf222; ENSG00000189325; TAA
SEYKEFIQK

SEQ ID NO: 13544 - protein, 9 aa, Homo sapiens
  Table A; Target 13544; HLA-A*11:01; C6orf222; ENSG00000189325; TAA
SEYKEFIQK

SEQ ID NO: 13545 - protein, 9 aa, Homo sapiens
  Table A; Target 13545; HLA-B*49:01; C6orf222; ENSG00000189325; TAA
SEYKEFIQK

SEQ ID NO: 13546 - protein, 10 aa, Homo sapiens
  Table A; Target 13546; HLA-A*30:01; C6orf222; ENSG00000189325; TAA
SEYKEFIQKI

SEQ ID NO: 13547 - protein, 10 aa, Homo sapiens
  Table A; Target 13547; HLA-B*44:02; C6orf222; ENSG00000189325; TAA
SEYKEFIQKI

SEQ ID NO: 13548 - protein, 10 aa, Homo sapiens
  Table A; Target 13548; HLA-B*44:03; C6orf222; ENSG00000189325; TAA
SEYKEFIQKI

SEQ ID NO: 13549 - protein, 10 aa, Homo sapiens
  Table A; Target 13549; HLA-B*49:01; C6orf222; ENSG00000189325; TAA
SEYKEFIQKI

SEQ ID NO: 13550 - protein, 11 aa, Homo sapiens
  Table A; Target 13550; HLA-A*30:02; C6orf222; ENSG00000189325; TAA
SGHRPSISSSY

SEQ ID NO: 13551 - protein, 11 aa, Homo sapiens
  Table A; Target 13551; HLA-B*15:03; C6orf222; ENSG00000189325; TAA
SGHRPSISSSY

SEQ ID NO: 13552 - protein, 11 aa, Homo sapiens
  Table A; Target 13552; HLA-B*46:01; C6orf222; ENSG00000189325; TAA
SGHRPSISSSY

SEQ ID NO: 13553 - protein, 9 aa, Homo sapiens
  Table A; Target 13553; HLA-B*38:01; C6orf222; ENSG00000189325; TAA
SKEIIIQKL

SEQ ID NO: 13554 - protein, 8 aa, Homo sapiens
  Table A; Target 13554; HLA-B*13:02; C6orf222; ENSG00000189325; TAA
SLASQLGV

SEQ ID NO: 13555 - protein, 9 aa, Homo sapiens
  Table A; Target 13555; HLA-A*02:03; C6orf222; ENSG00000189325; TAA
SLASQLGVA

SEQ ID NO: 13556 - protein, 10 aa, Homo sapiens
  Table A; Target 13556; HLA-A*02:01; C6orf222; ENSG00000189325; TAA
SLASQLGVAL

SEQ ID NO: 13557 - protein, 10 aa, Homo sapiens
  Table A; Target 13557; HLA-A*02:03; C6orf222; ENSG00000189325; TAA
SLASQLGVAL

SEQ ID NO: 13558 - protein, 10 aa, Homo sapiens
  Table A; Target 13558; HLA-A*02:04; C6orf222; ENSG00000189325; TAA
SLASQLGVAL

SEQ ID NO: 13559 - protein, 9 aa, Homo sapiens
  Table A; Target 13559; HLA-A*02:01; C6orf222; ENSG00000189325; TAA
SLDPEDLEC

SEQ ID NO: 13560 - protein, 10 aa, Homo sapiens
  Table A; Target 13560; HLA-A*03:02; C6orf222; ENSG00000189325; TAA
SLDRPQAPGK

SEQ ID NO: 13561 - protein, 9 aa, Homo sapiens
  Table A; Target 13561; HLA-A*03:01; C6orf222; ENSG00000189325; TAA
SLPTAPSRK

SEQ ID NO: 13562 - protein, 9 aa, Homo sapiens
  Table A; Target 13562; HLA-A*03:02; C6orf222; ENSG00000189325; TAA
SLPTAPSRK

SEQ ID NO: 13563 - protein, 11 aa, Homo sapiens
  Table A; Target 13563; HLA-C*01:02; C6orf222; ENSG00000189325; TAA
SLPTAPSRKAL

SEQ ID NO: 13564 - protein, 9 aa, Homo sapiens
  Table A; Target 13564; HLA-A*02:01; C6orf222; ENSG00000189325; TAA
SLSKLVATL

SEQ ID NO: 13565 - protein, 9 aa, Homo sapiens
  Table A; Target 13565; HLA-A*02:03; C6orf222; ENSG00000189325; TAA
SLSKLVATL

SEQ ID NO: 13566 - protein, 9 aa, Homo sapiens
  Table A; Target 13566; HLA-A*02:04; C6orf222; ENSG00000189325; TAA
SLSKLVATL

SEQ ID NO: 13567 - protein, 9 aa, Homo sapiens
  Table A; Target 13567; HLA-A*02:07; C6orf222; ENSG00000189325; TAA
SLSKLVATL

SEQ ID NO: 13568 - protein, 9 aa, Homo sapiens
  Table A; Target 13568; HLA-A*03:02; C6orf222; ENSG00000189325; TAA
SLSKLVATL

SEQ ID NO: 13569 - protein, 9 aa, Homo sapiens
  Table A; Target 13569; HLA-A*68:02; C6orf222; ENSG00000189325; TAA
SLSKLVATL

SEQ ID NO: 13570 - protein, 9 aa, Homo sapiens
  Table A; Target 13570; HLA-B*08:01; C6orf222; ENSG00000189325; TAA
SLSKLVATL

SEQ ID NO: 13571 - protein, 9 aa, Homo sapiens
  Table A; Target 13571; HLA-B*13:02; C6orf222; ENSG00000189325; TAA
SLSKLVATL

SEQ ID NO: 13572 - protein, 9 aa, Homo sapiens
  Table A; Target 13572; HLA-B*37:01; C6orf222; ENSG00000189325; TAA
SLSKLVATL

SEQ ID NO: 13573 - protein, 9 aa, Homo sapiens
  Table A; Target 13573; HLA-B*55:01; C6orf222; ENSG00000189325; TAA
SLSKLVATL

SEQ ID NO: 13574 - protein, 8 aa, Homo sapiens
  Table A; Target 13574; HLA-B*55:01; C6orf222; ENSG00000189325; TAA
SPAPSAEA

SEQ ID NO: 13575 - protein, 8 aa, Homo sapiens
  Table A; Target 13575; HLA-B*56:01; C6orf222; ENSG00000189325; TAA
SPAPSAEA

SEQ ID NO: 13576 - protein, 9 aa, Homo sapiens
  Table A; Target 13576; HLA-B*07:02; C6orf222; ENSG00000189325; TAA
SPAPSAEAH

SEQ ID NO: 13577 - protein, 9 aa, Homo sapiens
  Table A; Target 13577; HLA-B*35:01; C6orf222; ENSG00000189325; TAA
SPAPSAEAH

SEQ ID NO: 13578 - protein, 9 aa, Homo sapiens
  Table A; Target 13578; HLA-B*35:03; C6orf222; ENSG00000189325; TAA
SPAPSAEAH

SEQ ID NO: 13579 - protein, 9 aa, Homo sapiens
  Table A; Target 13579; HLA-C*07:02; C6orf222; ENSG00000189325; TAA
SPAPSAEAH

SEQ ID NO: 13580 - protein, 10 aa, Homo sapiens
  Table A; Target 13580; HLA-B*56:01; C6orf222; ENSG00000189325; TAA
SPAPSAEAHC

SEQ ID NO: 13581 - protein, 8 aa, Homo sapiens
  Table A; Target 13581; HLA-B*08:01; C6orf222; ENSG00000189325; TAA
SQEKKTSL

SEQ ID NO: 13582 - protein, 8 aa, Homo sapiens
  Table A; Target 13582; HLA-A*32:01; C6orf222; ENSG00000189325; TAA
SQEKRSSF

SEQ ID NO: 13583 - protein, 8 aa, Homo sapiens
  Table A; Target 13583; HLA-B*37:01; C6orf222; ENSG00000189325; TAA
SQEKRSSF

SEQ ID NO: 13584 - protein, 8 aa, Homo sapiens
  Table A; Target 13584; HLA-C*05:01; C6orf222; ENSG00000189325; TAA
SQEPGEEL

SEQ ID NO: 13585 - protein, 10 aa, Homo sapiens
  Table A; Target 13585; HLA-B*38:01; C6orf222; ENSG00000189325; TAA
SQEPGEELPL

SEQ ID NO: 13586 - protein, 10 aa, Homo sapiens
  Table A; Target 13586; HLA-B*39:01; C6orf222; ENSG00000189325; TAA
SQEPGEELPL

SEQ ID NO: 13587 - protein, 9 aa, Homo sapiens
  Table A; Target 13587; HLA-B*13:02; C6orf222; ENSG00000189325; TAA
SQHPEPLEA

SEQ ID NO: 13588 - protein, 9 aa, Homo sapiens
  Table A; Target 13588; HLA-B*39:01; C6orf222; ENSG00000189325; TAA
SQHPEPLEA

SEQ ID NO: 13589 - protein, 9 aa, Homo sapiens
  Table A; Target 13589; HLA-A*30:01; C6orf222; ENSG00000189325; TAA
SQVAHSSKL

SEQ ID NO: 13590 - protein, 9 aa, Homo sapiens
  Table A; Target 13590; HLA-B*13:02; C6orf222; ENSG00000189325; TAA
SQVAHSSKL

SEQ ID NO: 13591 - protein, 9 aa, Homo sapiens
  Table A; Target 13591; HLA-B*15:01; C6orf222; ENSG00000189325; TAA
SQVAHSSKL

SEQ ID NO: 13592 - protein, 9 aa, Homo sapiens
  Table A; Target 13592; HLA-B*15:03; C6orf222; ENSG00000189325; TAA
SQVAHSSKL

SEQ ID NO: 13593 - protein, 9 aa, Homo sapiens
  Table A; Target 13593; HLA-B*27:05; C6orf222; ENSG00000189325; TAA
SQVAHSSKL

SEQ ID NO: 13594 - protein, 9 aa, Homo sapiens
  Table A; Target 13594; HLA-B*37:01; C6orf222; ENSG00000189325; TAA
SQVAHSSKL

SEQ ID NO: 13595 - protein, 9 aa, Homo sapiens
  Table A; Target 13595; HLA-B*38:01; C6orf222; ENSG00000189325; TAA
SQVAHSSKL

SEQ ID NO: 13596 - protein, 9 aa, Homo sapiens
  Table A; Target 13596; HLA-B*39:01; C6orf222; ENSG00000189325; TAA
SQVAHSSKL

SEQ ID NO: 13597 - protein, 9 aa, Homo sapiens
  Table A; Target 13597; HLA-B*40:01; C6orf222; ENSG00000189325; TAA
SQVAHSSKL

SEQ ID NO: 13598 - protein, 9 aa, Homo sapiens
  Table A; Target 13598; HLA-C*02:02; C6orf222; ENSG00000189325; TAA
SQVAHSSKL

SEQ ID NO: 13599 - protein, 9 aa, Homo sapiens
  Table A; Target 13599; HLA-C*03:03; C6orf222; ENSG00000189325; TAA
SQVAHSSKL

SEQ ID NO: 13600 - protein, 9 aa, Homo sapiens
  Table A; Target 13600; HLA-C*03:04; C6orf222; ENSG00000189325; TAA
SQVAHSSKL

SEQ ID NO: 13601 - protein, 8 aa, Homo sapiens
  Table A; Target 13601; HLA-B*13:02; C6orf222; ENSG00000189325; TAA
SSFLPLCV

SEQ ID NO: 13602 - protein, 11 aa, Homo sapiens
  Table A; Target 13602; HLA-A*31:01; C6orf222; ENSG00000189325; TAA
SSLSKLVATLR

SEQ ID NO: 13603 - protein, 9 aa, Homo sapiens
  Table A; Target 13603; HLA-A*11:01; C6orf222; ENSG00000189325; TAA
SSPEAWPPK

SEQ ID NO: 13604 - protein, 10 aa, Homo sapiens
  Table A; Target 13604; HLA-A*11:01; C6orf222; ENSG00000189325; TAA
SSPEAWPPKK

SEQ ID NO: 13605 - protein, 10 aa, Homo sapiens
  Table A; Target 13605; HLA-B*27:02; C6orf222; ENSG00000189325; TAA
SSSYGLEEPK

SEQ ID NO: 13606 - protein, 9 aa, Homo sapiens
  Table A; Target 13606; HLA-A*03:01; C6orf222; ENSG00000189325; TAA
SSYGLEEPK

SEQ ID NO: 13607 - protein, 9 aa, Homo sapiens
  Table A; Target 13607; HLA-A*03:02; C6orf222; ENSG00000189325; TAA
SSYGLEEPK

SEQ ID NO: 13608 - protein, 9 aa, Homo sapiens
  Table A; Target 13608; HLA-A*11:01; C6orf222; ENSG00000189325; TAA
SSYGLEEPK

SEQ ID NO: 13609 - protein, 9 aa, Homo sapiens
  Table A; Target 13609; HLA-B*27:02; C6orf222; ENSG00000189325; TAA
SSYGLEEPK

SEQ ID NO: 13610 - protein, 9 aa, Homo sapiens
  Table A; Target 13610; HLA-B*27:05; C6orf222; ENSG00000189325; TAA
SSYGLEEPK

SEQ ID NO: 13611 - protein, 9 aa, Homo sapiens
  Table A; Target 13611; HLA-C*07:06; C6orf222; ENSG00000189325; TAA
SSYGLEEPK

SEQ ID NO: 13612 - protein, 10 aa, Homo sapiens
  Table A; Target 13612; HLA-A*02:01; C6orf222; ENSG00000189325; TAA
SSYGLEEPKV

SEQ ID NO: 13613 - protein, 10 aa, Homo sapiens
  Table A; Target 13613; HLA-B*13:02; C6orf222; ENSG00000189325; TAA
SSYGLEEPKV

SEQ ID NO: 13614 - protein, 10 aa, Homo sapiens
  Table A; Target 13614; HLA-C*06:02; C6orf222; ENSG00000189325; TAA
SSYGLEEPKV

SEQ ID NO: 13615 - protein, 10 aa, Homo sapiens
  Table A; Target 13615; HLA-C*12:03; C6orf222; ENSG00000189325; TAA
SSYGLEEPKV

SEQ ID NO: 13616 - protein, 9 aa, Homo sapiens
  Table A; Target 13616; HLA-C*03:03; C6orf222; ENSG00000189325; TAA
TAAAPTPEE

SEQ ID NO: 13617 - protein, 9 aa, Homo sapiens
  Table A; Target 13617; HLA-C*03:04; C6orf222; ENSG00000189325; TAA
TAAAPTPEE

SEQ ID NO: 13618 - protein, 8 aa, Homo sapiens
  Table A; Target 13618; HLA-B*08:01; C6orf222; ENSG00000189325; TAA
TAPSRKAL

SEQ ID NO: 13619 - protein, 10 aa, Homo sapiens
  Table A; Target 13619; HLA-A*30:01; C6orf222; ENSG00000189325; TAA
TEAGAPGPSV

SEQ ID NO: 13620 - protein, 10 aa, Homo sapiens
  Table A; Target 13620; HLA-B*39:01; C6orf222; ENSG00000189325; TAA
TEAGAPGPSV

SEQ ID NO: 13621 - protein, 10 aa, Homo sapiens
  Table A; Target 13621; HLA-B*40:01; C6orf222; ENSG00000189325; TAA
TEAGAPGPSV

SEQ ID NO: 13622 - protein, 10 aa, Homo sapiens
  Table A; Target 13622; HLA-B*40:02; C6orf222; ENSG00000189325; TAA
TEAGAPGPSV

SEQ ID NO: 13623 - protein, 10 aa, Homo sapiens
  Table A; Target 13623; HLA-B*49:01; C6orf222; ENSG00000189325; TAA
TEAGAPGPSV

SEQ ID NO: 13624 - protein, 10 aa, Homo sapiens
  Table A; Target 13624; HLA-C*16:04; C6orf222; ENSG00000189325; TAA
TEAGAPGPSV

SEQ ID NO: 13625 - protein, 11 aa, Homo sapiens
  Table A; Target 13625; HLA-A*30:01; C6orf222; ENSG00000189325; TAA
TEAGAPGPSVL

SEQ ID NO: 13626 - protein, 11 aa, Homo sapiens
  Table A; Target 13626; HLA-B*39:01; C6orf222; ENSG00000189325; TAA
TEAGAPGPSVL

SEQ ID NO: 13627 - protein, 11 aa, Homo sapiens
  Table A; Target 13627; HLA-B*40:01; C6orf222; ENSG00000189325; TAA
TEAGAPGPSVL

SEQ ID NO: 13628 - protein, 11 aa, Homo sapiens
  Table A; Target 13628; HLA-B*49:01; C6orf222; ENSG00000189325; TAA
TEAGAPGPSVL

SEQ ID NO: 13629 - protein, 8 aa, Homo sapiens
  Table A; Target 13629; HLA-A*31:01; C6orf222; ENSG00000189325; TAA
TMLNFFVR

SEQ ID NO: 13630 - protein, 8 aa, Homo sapiens
  Table A; Target 13630; HLA-C*05:01; C6orf222; ENSG00000189325; TAA
TPEETGDF

SEQ ID NO: 13631 - protein, 9 aa, Homo sapiens
  Table A; Target 13631; HLA-B*35:03; C6orf222; ENSG00000189325; TAA
TPEETGDFL

SEQ ID NO: 13632 - protein, 8 aa, Homo sapiens
  Table A; Target 13632; HLA-B*35:03; C6orf222; ENSG00000189325; TAA
TPEGAPQL

SEQ ID NO: 13633 - protein, 8 aa, Homo sapiens
  Table A; Target 13633; HLA-C*06:02; C6orf222; ENSG00000189325; TAA
TSKTNPKK

SEQ ID NO: 13634 - protein, 9 aa, Homo sapiens
  Table A; Target 13634; HLA-A*02:01; C6orf222; ENSG00000189325; TAA
VALPNPAPA

SEQ ID NO: 13635 - protein, 9 aa, Homo sapiens
  Table A; Target 13635; HLA-A*02:03; C6orf222; ENSG00000189325; TAA
VALPNPAPA

SEQ ID NO: 13636 - protein, 9 aa, Homo sapiens
  Table A; Target 13636; HLA-B*39:01; C6orf222; ENSG00000189325; TAA
VALPNPAPA

SEQ ID NO: 13637 - protein, 9 aa, Homo sapiens
  Table A; Target 13637; HLA-B*46:01; C6orf222; ENSG00000189325; TAA
VALPNPAPA

SEQ ID NO: 13638 - protein, 9 aa, Homo sapiens
  Table A; Target 13638; HLA-B*54:01; C6orf222; ENSG00000189325; TAA
VALPNPAPA

SEQ ID NO: 13639 - protein, 9 aa, Homo sapiens
  Table A; Target 13639; HLA-B*56:01; C6orf222; ENSG00000189325; TAA
VALPNPAPA

SEQ ID NO: 13640 - protein, 9 aa, Homo sapiens
  Table A; Target 13640; HLA-C*01:02; C6orf222; ENSG00000189325; TAA
VALPNPAPA

SEQ ID NO: 13641 - protein, 9 aa, Homo sapiens
  Table A; Target 13641; HLA-C*02:02; C6orf222; ENSG00000189325; TAA
VALPNPAPA

SEQ ID NO: 13642 - protein, 9 aa, Homo sapiens
  Table A; Target 13642; HLA-C*03:03; C6orf222; ENSG00000189325; TAA
VALPNPAPA

SEQ ID NO: 13643 - protein, 9 aa, Homo sapiens
  Table A; Target 13643; HLA-C*03:04; C6orf222; ENSG00000189325; TAA
VALPNPAPA

SEQ ID NO: 13644 - protein, 9 aa, Homo sapiens
  Table A; Target 13644; HLA-C*05:01; C6orf222; ENSG00000189325; TAA
VALPNPAPA

SEQ ID NO: 13645 - protein, 9 aa, Homo sapiens
  Table A; Target 13645; HLA-C*12:03; C6orf222; ENSG00000189325; TAA
VALPNPAPA

SEQ ID NO: 13646 - protein, 9 aa, Homo sapiens
  Table A; Target 13646; HLA-C*16:04; C6orf222; ENSG00000189325; TAA
VALPNPAPA

SEQ ID NO: 13647 - protein, 10 aa, Homo sapiens
  Table A; Target 13647; HLA-A*23:01; C6orf222; ENSG00000189325; TAA
VALPNPAPAV

SEQ ID NO: 13648 - protein, 10 aa, Homo sapiens
  Table A; Target 13648; HLA-B*46:01; C6orf222; ENSG00000189325; TAA
VALPNPAPAV

SEQ ID NO: 13649 - protein, 10 aa, Homo sapiens
  Table A; Target 13649; HLA-B*51:01; C6orf222; ENSG00000189325; TAA
VALPNPAPAV

SEQ ID NO: 13650 - protein, 10 aa, Homo sapiens
  Table A; Target 13650; HLA-B*54:01; C6orf222; ENSG00000189325; TAA
VALPNPAPAV

SEQ ID NO: 13651 - protein, 10 aa, Homo sapiens
  Table A; Target 13651; HLA-B*56:01; C6orf222; ENSG00000189325; TAA
VALPNPAPAV

SEQ ID NO: 13652 - protein, 10 aa, Homo sapiens
  Table A; Target 13652; HLA-C*03:03; C6orf222; ENSG00000189325; TAA
VALPNPAPAV

SEQ ID NO: 13653 - protein, 10 aa, Homo sapiens
  Table A; Target 13653; HLA-C*03:04; C6orf222; ENSG00000189325; TAA
VALPNPAPAV

SEQ ID NO: 13654 - protein, 10 aa, Homo sapiens
  Table A; Target 13654; HLA-C*06:02; C6orf222; ENSG00000189325; TAA
VALPNPAPAV

SEQ ID NO: 13655 - protein, 10 aa, Homo sapiens
  Table A; Target 13655; HLA-C*16:04; C6orf222; ENSG00000189325; TAA
VALPNPAPAV

SEQ ID NO: 13656 - protein, 11 aa, Homo sapiens
  Table A; Target 13656; HLA-A*31:01; C6orf222; ENSG00000189325; TAA
VALPNPAPAVR

SEQ ID NO: 13657 - protein, 11 aa, Homo sapiens
  Table A; Target 13657; HLA-A*33:01; C6orf222; ENSG00000189325; TAA
VALPNPAPAVR

SEQ ID NO: 13658 - protein, 11 aa, Homo sapiens
  Table A; Target 13658; HLA-A*33:03; C6orf222; ENSG00000189325; TAA
VALPNPAPAVR

SEQ ID NO: 13659 - protein, 11 aa, Homo sapiens
  Table A; Target 13659; HLA-A*68:01; C6orf222; ENSG00000189325; TAA
VALPNPAPAVR

SEQ ID NO: 13660 - protein, 11 aa, Homo sapiens
  Table A; Target 13660; HLA-B*57:01; C6orf222; ENSG00000189325; TAA
VALPNPAPAVR

SEQ ID NO: 13661 - protein, 11 aa, Homo sapiens
  Table A; Target 13661; HLA-C*07:06; C6orf222; ENSG00000189325; TAA
VALPNPAPAVR

SEQ ID NO: 13662 - protein, 8 aa, Homo sapiens
  Table A; Target 13662; HLA-B*08:01; C6orf222; ENSG00000189325; TAA
VATLRSQV

SEQ ID NO: 13663 - protein, 8 aa, Homo sapiens
  Table A; Target 13663; HLA-B*51:01; C6orf222; ENSG00000189325; TAA
VATLRSQV

SEQ ID NO: 13664 - protein, 8 aa, Homo sapiens
  Table A; Target 13664; HLA-C*16:01; C6orf222; ENSG00000189325; TAA
VATLRSQV

SEQ ID NO: 13665 - protein, 8 aa, Homo sapiens
  Table A; Target 13665; HLA-C*16:02; C6orf222; ENSG00000189325; TAA
VATLRSQV

SEQ ID NO: 13666 - protein, 9 aa, Homo sapiens
  Table A; Target 13666; HLA-B*08:01; C6orf222; ENSG00000189325; TAA
VATLRSQVA

SEQ ID NO: 13667 - protein, 9 aa, Homo sapiens
  Table A; Target 13667; HLA-B*54:01; C6orf222; ENSG00000189325; TAA
VATLRSQVA

SEQ ID NO: 13668 - protein, 9 aa, Homo sapiens
  Table A; Target 13668; HLA-C*03:04; C6orf222; ENSG00000189325; TAA
VATLRSQVA

SEQ ID NO: 13669 - protein, 9 aa, Homo sapiens
  Table A; Target 13669; HLA-C*16:01; C6orf222; ENSG00000189325; TAA
VATLRSQVA

SEQ ID NO: 13670 - protein, 9 aa, Homo sapiens
  Table A; Target 13670; HLA-C*16:02; C6orf222; ENSG00000189325; TAA
VATLRSQVA

SEQ ID NO: 13671 - protein, 9 aa, Homo sapiens
  Table A; Target 13671; HLA-B*13:02; C6orf222; ENSG00000189325; TAA
VDGQLGQQI

SEQ ID NO: 13672 - protein, 11 aa, Homo sapiens
  Table A; Target 13672; HLA-B*44:02; C6orf222; ENSG00000189325; TAA
VELLKRVGDQW

SEQ ID NO: 13673 - protein, 11 aa, Homo sapiens
  Table A; Target 13673; HLA-B*44:03; C6orf222; ENSG00000189325; TAA
VELLKRVGDQW

SEQ ID NO: 13674 - protein, 8 aa, Homo sapiens
  Table A; Target 13674; HLA-B*18:01; C6orf222; ENSG00000189325; TAA
VENPAPHC

SEQ ID NO: 13675 - protein, 8 aa, Homo sapiens
  Table A; Target 13675; HLA-B*49:01; C6orf222; ENSG00000189325; TAA
VENPAPHC

SEQ ID NO: 13676 - protein, 9 aa, Homo sapiens
  Table A; Target 13676; HLA-A*30:01; C6orf222; ENSG00000189325; TAA
VENPAPHCR

SEQ ID NO: 13677 - protein, 9 aa, Homo sapiens
  Table A; Target 13677; HLA-A*30:02; C6orf222; ENSG00000189325; TAA
VENPAPHCR

SEQ ID NO: 13678 - protein, 9 aa, Homo sapiens
  Table A; Target 13678; HLA-A*31:01; C6orf222; ENSG00000189325; TAA
VENPAPHCR

SEQ ID NO: 13679 - protein, 9 aa, Homo sapiens
  Table A; Target 13679; HLA-A*32:01; C6orf222; ENSG00000189325; TAA
VENPAPHCR

SEQ ID NO: 13680 - protein, 9 aa, Homo sapiens
  Table A; Target 13680; HLA-A*33:01; C6orf222; ENSG00000189325; TAA
VENPAPHCR

SEQ ID NO: 13681 - protein, 9 aa, Homo sapiens
  Table A; Target 13681; HLA-A*33:03; C6orf222; ENSG00000189325; TAA
VENPAPHCR

SEQ ID NO: 13682 - protein, 9 aa, Homo sapiens
  Table A; Target 13682; HLA-B*18:01; C6orf222; ENSG00000189325; TAA
VENPAPHCR

SEQ ID NO: 13683 - protein, 9 aa, Homo sapiens
  Table A; Target 13683; HLA-B*40:01; C6orf222; ENSG00000189325; TAA
VENPAPHCR

SEQ ID NO: 13684 - protein, 9 aa, Homo sapiens
  Table A; Target 13684; HLA-B*44:02; C6orf222; ENSG00000189325; TAA
VENPAPHCR

SEQ ID NO: 13685 - protein, 9 aa, Homo sapiens
  Table A; Target 13685; HLA-B*44:03; C6orf222; ENSG00000189325; TAA
VENPAPHCR

SEQ ID NO: 13686 - protein, 9 aa, Homo sapiens
  Table A; Target 13686; HLA-B*57:01; C6orf222; ENSG00000189325; TAA
VENPAPHCR

SEQ ID NO: 13687 - protein, 9 aa, Homo sapiens
  Table A; Target 13687; HLA-C*02:02; C6orf222; ENSG00000189325; TAA
VENPAPHCR

SEQ ID NO: 13688 - protein, 9 aa, Homo sapiens
  Table A; Target 13688; HLA-C*07:06; C6orf222; ENSG00000189325; TAA
VENPAPHCR

SEQ ID NO: 13689 - protein, 9 aa, Homo sapiens
  Table A; Target 13689; HLA-C*16:04; C6orf222; ENSG00000189325; TAA
VENPAPHCR

SEQ ID NO: 13690 - protein, 9 aa, Homo sapiens
  Table A; Target 13690; HLA-B*46:01; C6orf222; ENSG00000189325; TAA
VGVENPAPH

SEQ ID NO: 13691 - protein, 9 aa, Homo sapiens
  Table A; Target 13691; HLA-C*12:03; C6orf222; ENSG00000189325; TAA
VGVENPAPH

SEQ ID NO: 13692 - protein, 9 aa, Homo sapiens
  Table A; Target 13692; HLA-A*02:03; C6orf222; ENSG00000189325; TAA
VISEAPSQA

SEQ ID NO: 13693 - protein, 10 aa, Homo sapiens
  Table A; Target 13693; HLA-A*68:01; C6orf222; ENSG00000189325; TAA
VISEAPSQAR

SEQ ID NO: 13694 - protein, 10 aa, Homo sapiens
  Table A; Target 13694; HLA-C*07:06; C6orf222; ENSG00000189325; TAA
VISEAPSQAR

SEQ ID NO: 13695 - protein, 9 aa, Homo sapiens
  Table A; Target 13695; HLA-C*05:01; C6orf222; ENSG00000189325; TAA
VQEAPSTEA

SEQ ID NO: 13696 - protein, 9 aa, Homo sapiens
  Table A; Target 13696; HLA-B*27:05; C6orf222; ENSG00000189325; TAA
VRTGPEEPR

SEQ ID NO: 13697 - protein, 8 aa, Homo sapiens
  Table A; Target 13697; HLA-C*16:01; C6orf222; ENSG00000189325; TAA
VSGHRPSI

SEQ ID NO: 13698 - protein, 10 aa, Homo sapiens
  Table A; Target 13698; HLA-A*03:01; C6orf222; ENSG00000189325; TAA
VSSPEAWPPK

SEQ ID NO: 13699 - protein, 10 aa, Homo sapiens
  Table A; Target 13699; HLA-A*03:02; C6orf222; ENSG00000189325; TAA
VSSPEAWPPK

SEQ ID NO: 13700 - protein, 10 aa, Homo sapiens
  Table A; Target 13700; HLA-A*11:01; C6orf222; ENSG00000189325; TAA
VSSPEAWPPK

SEQ ID NO: 13701 - protein, 10 aa, Homo sapiens
  Table A; Target 13701; HLA-B*27:02; C6orf222; ENSG00000189325; TAA
VSSPEAWPPK

SEQ ID NO: 13702 - protein, 11 aa, Homo sapiens
  Table A; Target 13702; HLA-A*31:01; C6orf222; ENSG00000189325; TAA
VTKAAQDQEAR

SEQ ID NO: 13703 - protein, 11 aa, Homo sapiens
  Table A; Target 13703; HLA-A*33:01; C6orf222; ENSG00000189325; TAA
VTKAAQDQEAR

SEQ ID NO: 13704 - protein, 11 aa, Homo sapiens
  Table A; Target 13704; HLA-A*33:03; C6orf222; ENSG00000189325; TAA
VTKAAQDQEAR

SEQ ID NO: 13705 - protein, 11 aa, Homo sapiens
  Table A; Target 13705; HLA-A*68:01; C6orf222; ENSG00000189325; TAA
VTKAAQDQEAR

SEQ ID NO: 13706 - protein, 11 aa, Homo sapiens
  Table A; Target 13706; HLA-B*57:01; C6orf222; ENSG00000189325; TAA
VTKAAQDQEAR

SEQ ID NO: 13707 - protein, 9 aa, Homo sapiens
  Table A; Target 13707; HLA-A*26:01; C6orf222; ENSG00000189325; TAA
VVISEAPSQ

SEQ ID NO: 13708 - protein, 9 aa, Homo sapiens
  Table A; Target 13708; HLA-C*03:03; C6orf222; ENSG00000189325; TAA
VVISEAPSQ

SEQ ID NO: 13709 - protein, 10 aa, Homo sapiens
  Table A; Target 13709; HLA-A*02:03; C6orf222; ENSG00000189325; TAA
VVISEAPSQA

SEQ ID NO: 13710 - protein, 11 aa, Homo sapiens
  Table A; Target 13710; HLA-A*03:02; C6orf222; ENSG00000189325; TAA
VVISEAPSQAR

SEQ ID NO: 13711 - protein, 11 aa, Homo sapiens
  Table A; Target 13711; HLA-A*11:01; C6orf222; ENSG00000189325; TAA
VVISEAPSQAR

SEQ ID NO: 13712 - protein, 11 aa, Homo sapiens
  Table A; Target 13712; HLA-A*31:01; C6orf222; ENSG00000189325; TAA
VVISEAPSQAR

SEQ ID NO: 13713 - protein, 11 aa, Homo sapiens
  Table A; Target 13713; HLA-A*33:01; C6orf222; ENSG00000189325; TAA
VVISEAPSQAR

SEQ ID NO: 13714 - protein, 11 aa, Homo sapiens
  Table A; Target 13714; HLA-A*33:03; C6orf222; ENSG00000189325; TAA
VVISEAPSQAR

SEQ ID NO: 13715 - protein, 11 aa, Homo sapiens
  Table A; Target 13715; HLA-A*68:01; C6orf222; ENSG00000189325; TAA
VVISEAPSQAR

SEQ ID NO: 13716 - protein, 11 aa, Homo sapiens
  Table A; Target 13716; HLA-C*07:06; C6orf222; ENSG00000189325; TAA
VVISEAPSQAR

SEQ ID NO: 13717 - protein, 11 aa, Homo sapiens
  Table A; Target 13717; HLA-A*30:01; C6orf222; ENSG00000189325; TAA
WEEEQSLASQL

SEQ ID NO: 13718 - protein, 11 aa, Homo sapiens
  Table A; Target 13718; HLA-B*40:01; C6orf222; ENSG00000189325; TAA
WEEEQSLASQL

SEQ ID NO: 13719 - protein, 8 aa, Homo sapiens
  Table A; Target 13719; HLA-B*08:01; C6orf222; ENSG00000189325; TAA
WPPKKSSF

SEQ ID NO: 13720 - protein, 8 aa, Homo sapiens
  Table A; Target 13720; HLA-A*30:01; C6orf222; ENSG00000189325; TAA
YEFSDSSL

SEQ ID NO: 13721 - protein, 8 aa, Homo sapiens
  Table A; Target 13721; HLA-B*15:03; C6orf222; ENSG00000189325; TAA
YEFSDSSL

SEQ ID NO: 13722 - protein, 8 aa, Homo sapiens
  Table A; Target 13722; HLA-B*18:01; C6orf222; ENSG00000189325; TAA
YEFSDSSL

SEQ ID NO: 13723 - protein, 8 aa, Homo sapiens
  Table A; Target 13723; HLA-B*37:01; C6orf222; ENSG00000189325; TAA
YEFSDSSL

SEQ ID NO: 13724 - protein, 8 aa, Homo sapiens
  Table A; Target 13724; HLA-B*39:01; C6orf222; ENSG00000189325; TAA
YEFSDSSL

SEQ ID NO: 13725 - protein, 8 aa, Homo sapiens
  Table A; Target 13725; HLA-B*40:01; C6orf222; ENSG00000189325; TAA
YEFSDSSL

SEQ ID NO: 13726 - protein, 8 aa, Homo sapiens
  Table A; Target 13726; HLA-B*40:02; C6orf222; ENSG00000189325; TAA
YEFSDSSL

SEQ ID NO: 13727 - protein, 8 aa, Homo sapiens
  Table A; Target 13727; HLA-B*44:03; C6orf222; ENSG00000189325; TAA
YEFSDSSL

SEQ ID NO: 13728 - protein, 8 aa, Homo sapiens
  Table A; Target 13728; HLA-B*49:01; C6orf222; ENSG00000189325; TAA
YEFSDSSL

SEQ ID NO: 13729 - protein, 8 aa, Homo sapiens
  Table A; Target 13729; HLA-C*02:02; C6orf222; ENSG00000189325; TAA
YEFSDSSL

SEQ ID NO: 13730 - protein, 8 aa, Homo sapiens
  Table A; Target 13730; HLA-C*03:03; C6orf222; ENSG00000189325; TAA
YEFSDSSL

SEQ ID NO: 13731 - protein, 8 aa, Homo sapiens
  Table A; Target 13731; HLA-C*03:04; C6orf222; ENSG00000189325; TAA
YEFSDSSL

SEQ ID NO: 13732 - protein, 8 aa, Homo sapiens
  Table A; Target 13732; HLA-C*14:02; C6orf222; ENSG00000189325; TAA
YEFSDSSL

SEQ ID NO: 13733 - protein, 8 aa, Homo sapiens
  Table A; Target 13733; HLA-C*16:04; C6orf222; ENSG00000189325; TAA
YEFSDSSL

SEQ ID NO: 13734 - protein, 9 aa, Homo sapiens
  Table A; Target 13734; HLA-B*49:01; C6orf222; ENSG00000189325; TAA
YEFSDSSLS

SEQ ID NO: 13735 - protein, 10 aa, Homo sapiens
  Table A; Target 13735; HLA-B*27:02; C6orf222; ENSG00000189325; TAA
YEFSDSSLSK

SEQ ID NO: 13736 - protein, 10 aa, Homo sapiens
  Table A; Target 13736; HLA-B*49:01; C6orf222; ENSG00000189325; TAA
YEFSDSSLSK

SEQ ID NO: 13737 - protein, 11 aa, Homo sapiens
  Table A; Target 13737; HLA-A*30:01; C6orf222; ENSG00000189325; TAA
YEFSDSSLSKL

SEQ ID NO: 13738 - protein, 11 aa, Homo sapiens
  Table A; Target 13738; HLA-B*18:01; C6orf222; ENSG00000189325; TAA
YEFSDSSLSKL

SEQ ID NO: 13739 - protein, 11 aa, Homo sapiens
  Table A; Target 13739; HLA-B*40:01; C6orf222; ENSG00000189325; TAA
YEFSDSSLSKL

SEQ ID NO: 13740 - protein, 11 aa, Homo sapiens
  Table A; Target 13740; HLA-B*40:02; C6orf222; ENSG00000189325; TAA
YEFSDSSLSKL

SEQ ID NO: 13741 - protein, 11 aa, Homo sapiens
  Table A; Target 13741; HLA-B*44:02; C6orf222; ENSG00000189325; TAA
YEFSDSSLSKL

SEQ ID NO: 13742 - protein, 11 aa, Homo sapiens
  Table A; Target 13742; HLA-B*44:03; C6orf222; ENSG00000189325; TAA
YEFSDSSLSKL

SEQ ID NO: 13743 - protein, 11 aa, Homo sapiens
  Table A; Target 13743; HLA-B*49:01; C6orf222; ENSG00000189325; TAA
YEFSDSSLSKL

SEQ ID NO: 13744 - protein, 11 aa, Homo sapiens
  Table A; Target 13744; HLA-C*02:02; C6orf222; ENSG00000189325; TAA
YEFSDSSLSKL

SEQ ID NO: 13745 - protein, 8 aa, Homo sapiens
  Table A; Target 13745; HLA-B*51:01; C6orf222; ENSG00000189325; TAA
YGLEEPKV

SEQ ID NO: 13746 - protein, 8 aa, Homo sapiens
  Table A; Target 13746; HLA-A*02:03; C6orf222; ENSG00000189325; TAA
YQFDVSLA

SEQ ID NO: 13747 - protein, 8 aa, Homo sapiens
  Table A; Target 13747; HLA-B*13:02; C6orf222; ENSG00000189325; TAA
YQFDVSLA

SEQ ID NO: 13748 - protein, 9 aa, Homo sapiens
  Table A; Target 13748; HLA-B*13:02; C6orf222; ENSG00000189325; TAA
YQFDVSLAN

SEQ ID NO: 13749 - protein, 10 aa, Homo sapiens
  Table A; Target 13749; HLA-A*03:01; C6orf222; ENSG00000189325; TAA
YQFDVSLANK

SEQ ID NO: 13750 - protein, 10 aa, Homo sapiens
  Table A; Target 13750; HLA-A*03:02; C6orf222; ENSG00000189325; TAA
YQFDVSLANK

SEQ ID NO: 13751 - protein, 10 aa, Homo sapiens
  Table A; Target 13751; HLA-A*11:01; C6orf222; ENSG00000189325; TAA
YQFDVSLANK

SEQ ID NO: 13752 - protein, 10 aa, Homo sapiens
  Table A; Target 13752; HLA-A*31:01; C6orf222; ENSG00000189325; TAA
YQFDVSLANK

SEQ ID NO: 13753 - protein, 10 aa, Homo sapiens
  Table A; Target 13753; HLA-A*68:01; C6orf222; ENSG00000189325; TAA
YQFDVSLANK

SEQ ID NO: 13754 - protein, 10 aa, Homo sapiens
  Table A; Target 13754; HLA-A*68:02; C6orf222; ENSG00000189325; TAA
YQFDVSLANK

SEQ ID NO: 13755 - protein, 10 aa, Homo sapiens
  Table A; Target 13755; HLA-B*13:02; C6orf222; ENSG00000189325; TAA
YQFDVSLANK

SEQ ID NO: 13756 - protein, 10 aa, Homo sapiens
  Table A; Target 13756; HLA-B*27:02; C6orf222; ENSG00000189325; TAA
YQFDVSLANK

SEQ ID NO: 13757 - protein, 10 aa, Homo sapiens
  Table A; Target 13757; HLA-B*27:05; C6orf222; ENSG00000189325; TAA
YQFDVSLANK

SEQ ID NO: 13758 - protein, 10 aa, Homo sapiens
  Table A; Target 13758; HLA-C*07:06; C6orf222; ENSG00000189325; TAA
YQFDVSLANK

SEQ ID NO: 13759 - protein, 11 aa, Homo sapiens
  Table A; Target 13759; HLA-A*02:07; C6orf222; ENSG00000189325; TAA
YQFDVSLANKF

SEQ ID NO: 13760 - protein, 11 aa, Homo sapiens
  Table A; Target 13760; HLA-A*23:01; C6orf222; ENSG00000189325; TAA
YQFDVSLANKF

SEQ ID NO: 13761 - protein, 11 aa, Homo sapiens
  Table A; Target 13761; HLA-A*24:02; C6orf222; ENSG00000189325; TAA
YQFDVSLANKF

SEQ ID NO: 13762 - protein, 11 aa, Homo sapiens
  Table A; Target 13762; HLA-A*26:01; C6orf222; ENSG00000189325; TAA
YQFDVSLANKF

SEQ ID NO: 13763 - protein, 11 aa, Homo sapiens
  Table A; Target 13763; HLA-A*29:02; C6orf222; ENSG00000189325; TAA
YQFDVSLANKF

SEQ ID NO: 13764 - protein, 11 aa, Homo sapiens
  Table A; Target 13764; HLA-A*30:01; C6orf222; ENSG00000189325; TAA
YQFDVSLANKF

SEQ ID NO: 13765 - protein, 11 aa, Homo sapiens
  Table A; Target 13765; HLA-A*30:02; C6orf222; ENSG00000189325; TAA
YQFDVSLANKF

SEQ ID NO: 13766 - protein, 11 aa, Homo sapiens
  Table A; Target 13766; HLA-A*32:01; C6orf222; ENSG00000189325; TAA
YQFDVSLANKF

SEQ ID NO: 13767 - protein, 11 aa, Homo sapiens
  Table A; Target 13767; HLA-A*68:01; C6orf222; ENSG00000189325; TAA
YQFDVSLANKF

SEQ ID NO: 13768 - protein, 11 aa, Homo sapiens
  Table A; Target 13768; HLA-B*13:02; C6orf222; ENSG00000189325; TAA
YQFDVSLANKF

SEQ ID NO: 13769 - protein, 11 aa, Homo sapiens
  Table A; Target 13769; HLA-B*15:01; C6orf222; ENSG00000189325; TAA
YQFDVSLANKF

SEQ ID NO: 13770 - protein, 11 aa, Homo sapiens
  Table A; Target 13770; HLA-B*15:03; C6orf222; ENSG00000189325; TAA
YQFDVSLANKF

SEQ ID NO: 13771 - protein, 11 aa, Homo sapiens
  Table A; Target 13771; HLA-B*18:01; C6orf222; ENSG00000189325; TAA
YQFDVSLANKF

SEQ ID NO: 13772 - protein, 11 aa, Homo sapiens
  Table A; Target 13772; HLA-B*27:05; C6orf222; ENSG00000189325; TAA
YQFDVSLANKF

SEQ ID NO: 13773 - protein, 11 aa, Homo sapiens
  Table A; Target 13773; HLA-B*38:01; C6orf222; ENSG00000189325; TAA
YQFDVSLANKF

SEQ ID NO: 13774 - protein, 11 aa, Homo sapiens
  Table A; Target 13774; HLA-B*39:01; C6orf222; ENSG00000189325; TAA
YQFDVSLANKF

SEQ ID NO: 13775 - protein, 11 aa, Homo sapiens
  Table A; Target 13775; HLA-B*44:02; C6orf222; ENSG00000189325; TAA
YQFDVSLANKF

SEQ ID NO: 13776 - protein, 11 aa, Homo sapiens
  Table A; Target 13776; HLA-B*44:03; C6orf222; ENSG00000189325; TAA
YQFDVSLANKF

SEQ ID NO: 13777 - protein, 11 aa, Homo sapiens
  Table A; Target 13777; HLA-B*57:01; C6orf222; ENSG00000189325; TAA
YQFDVSLANKF

SEQ ID NO: 13778 - protein, 11 aa, Homo sapiens
  Table A; Target 13778; HLA-C*02:02; C6orf222; ENSG00000189325; TAA
YQFDVSLANKF

SEQ ID NO: 13779 - protein, 11 aa, Homo sapiens
  Table A; Target 13779; HLA-C*06:02; C6orf222; ENSG00000189325; TAA
YQFDVSLANKF

SEQ ID NO: 13780 - protein, 11 aa, Homo sapiens
  Table A; Target 13780; HLA-C*07:04; C6orf222; ENSG00000189325; TAA
YQFDVSLANKF

SEQ ID NO: 13781 - protein, 11 aa, Homo sapiens
  Table A; Target 13781; HLA-C*12:03; C6orf222; ENSG00000189325; TAA
YQFDVSLANKF

SEQ ID NO: 13782 - protein, 11 aa, Homo sapiens
  Table A; Target 13782; HLA-C*16:04; C6orf222; ENSG00000189325; TAA
YQFDVSLANKF

SEQ ID NO: 13783 - protein, 8 aa, Homo sapiens
  Table A; Target 13783; HLA-A*03:01; CLDN16; ENSG00000113946; TAA
AAGVSMAK

SEQ ID NO: 13784 - protein, 8 aa, Homo sapiens
  Table A; Target 13784; HLA-A*03:02; CLDN16; ENSG00000113946; TAA
AAGVSMAK

SEQ ID NO: 13785 - protein, 8 aa, Homo sapiens
  Table A; Target 13785; HLA-A*11:01; CLDN16; ENSG00000113946; TAA
AAGVSMAK

SEQ ID NO: 13786 - protein, 8 aa, Homo sapiens
  Table A; Target 13786; HLA-B*27:02; CLDN16; ENSG00000113946; TAA
AAGVSMAK

SEQ ID NO: 13787 - protein, 8 aa, Homo sapiens
  Table A; Target 13787; HLA-B*27:05; CLDN16; ENSG00000113946; TAA
AAGVSMAK

SEQ ID NO: 13788 - protein, 8 aa, Homo sapiens
  Table A; Target 13788; HLA-B*46:01; CLDN16; ENSG00000113946; TAA
AAGVSMAK

SEQ ID NO: 13789 - protein, 8 aa, Homo sapiens
  Table A; Target 13789; HLA-B*58:01; CLDN16; ENSG00000113946; TAA
AAGVSMAK

SEQ ID NO: 13790 - protein, 8 aa, Homo sapiens
  Table A; Target 13790; HLA-C*01:02; CLDN16; ENSG00000113946; TAA
AAGVSMAK

SEQ ID NO: 13791 - protein, 8 aa, Homo sapiens
  Table A; Target 13791; HLA-C*03:04; CLDN16; ENSG00000113946; TAA
AAGVSMAK

SEQ ID NO: 13792 - protein, 8 aa, Homo sapiens
  Table A; Target 13792; HLA-C*06:02; CLDN16; ENSG00000113946; TAA
AAGVSMAK

SEQ ID NO: 13793 - protein, 8 aa, Homo sapiens
  Table A; Target 13793; HLA-C*07:01; CLDN16; ENSG00000113946; TAA
AAGVSMAK

SEQ ID NO: 13794 - protein, 8 aa, Homo sapiens
  Table A; Target 13794; HLA-C*07:02; CLDN16; ENSG00000113946; TAA
AAGVSMAK

SEQ ID NO: 13795 - protein, 8 aa, Homo sapiens
  Table A; Target 13795; HLA-C*07:06; CLDN16; ENSG00000113946; TAA
AAGVSMAK

SEQ ID NO: 13796 - protein, 8 aa, Homo sapiens
  Table A; Target 13796; HLA-C*12:03; CLDN16; ENSG00000113946; TAA
AAGVSMAK

SEQ ID NO: 13797 - protein, 8 aa, Homo sapiens
  Table A; Target 13797; HLA-C*16:01; CLDN16; ENSG00000113946; TAA
AAGVSMAK

SEQ ID NO: 13798 - protein, 10 aa, Homo sapiens
  Table A; Target 13798; HLA-A*30:02; CLDN16; ENSG00000113946; TAA
AAGVSMAKSY

SEQ ID NO: 13799 - protein, 10 aa, Homo sapiens
  Table A; Target 13799; HLA-B*44:02; CLDN16; ENSG00000113946; TAA
AAGVSMAKSY

SEQ ID NO: 13800 - protein, 10 aa, Homo sapiens
  Table A; Target 13800; HLA-B*44:03; CLDN16; ENSG00000113946; TAA
AAGVSMAKSY

SEQ ID NO: 13801 - protein, 10 aa, Homo sapiens
  Table A; Target 13801; HLA-C*04:01; CLDN16; ENSG00000113946; TAA
AAGVSMAKSY

SEQ ID NO: 13802 - protein, 10 aa, Homo sapiens
  Table A; Target 13802; HLA-C*07:01; CLDN16; ENSG00000113946; TAA
AAGVSMAKSY

SEQ ID NO: 13803 - protein, 10 aa, Homo sapiens
  Table A; Target 13803; HLA-C*12:03; CLDN16; ENSG00000113946; TAA
AAGVSMAKSY

SEQ ID NO: 13804 - protein, 10 aa, Homo sapiens
  Table A; Target 13804; HLA-C*16:02; CLDN16; ENSG00000113946; TAA
AAGVSMAKSY

SEQ ID NO: 13805 - protein, 10 aa, Homo sapiens
  Table A; Target 13805; HLA-C*16:04; CLDN16; ENSG00000113946; TAA
AAGVSMAKSY

SEQ ID NO: 13806 - protein, 10 aa, Homo sapiens
  Table A; Target 13806; HLA-A*03:02; CLDN16; ENSG00000113946; TAA
ADDSLEVSTK

SEQ ID NO: 13807 - protein, 10 aa, Homo sapiens
  Table A; Target 13807; HLA-A*11:01; CLDN16; ENSG00000113946; TAA
ADDSLEVSTK

SEQ ID NO: 13808 - protein, 10 aa, Homo sapiens
  Table A; Target 13808; HLA-B*27:02; CLDN16; ENSG00000113946; TAA
ADDSLEVSTK

SEQ ID NO: 13809 - protein, 9 aa, Homo sapiens
  Table A; Target 13809; HLA-B*37:01; CLDN16; ENSG00000113946; TAA
ADILAGFGF

SEQ ID NO: 13810 - protein, 9 aa, Homo sapiens
  Table A; Target 13810; HLA-B*44:02; CLDN16; ENSG00000113946; TAA
ADILAGFGF

SEQ ID NO: 13811 - protein, 9 aa, Homo sapiens
  Table A; Target 13811; HLA-B*44:03; CLDN16; ENSG00000113946; TAA
ADILAGFGF

SEQ ID NO: 13812 - protein, 8 aa, Homo sapiens
  Table A; Target 13812; HLA-B*37:01; CLDN16; ENSG00000113946; TAA
AEHPLKLV

SEQ ID NO: 13813 - protein, 8 aa, Homo sapiens
  Table A; Target 13813; HLA-B*44:03; CLDN16; ENSG00000113946; TAA
AEHPLKLV

SEQ ID NO: 13814 - protein, 8 aa, Homo sapiens
  Table A; Target 13814; HLA-B*49:01; CLDN16; ENSG00000113946; TAA
AEHPLKLV

SEQ ID NO: 13815 - protein, 9 aa, Homo sapiens
  Table A; Target 13815; HLA-A*30:01; CLDN16; ENSG00000113946; TAA
AEHPLKLVV

SEQ ID NO: 13816 - protein, 9 aa, Homo sapiens
  Table A; Target 13816; HLA-B*13:02; CLDN16; ENSG00000113946; TAA
AEHPLKLVV

SEQ ID NO: 13817 - protein, 9 aa, Homo sapiens
  Table A; Target 13817; HLA-B*18:01; CLDN16; ENSG00000113946; TAA
AEHPLKLVV

SEQ ID NO: 13818 - protein, 9 aa, Homo sapiens
  Table A; Target 13818; HLA-B*37:01; CLDN16; ENSG00000113946; TAA
AEHPLKLVV

SEQ ID NO: 13819 - protein, 9 aa, Homo sapiens
  Table A; Target 13819; HLA-B*40:01; CLDN16; ENSG00000113946; TAA
AEHPLKLVV

SEQ ID NO: 13820 - protein, 9 aa, Homo sapiens
  Table A; Target 13820; HLA-B*40:02; CLDN16; ENSG00000113946; TAA
AEHPLKLVV

SEQ ID NO: 13821 - protein, 9 aa, Homo sapiens
  Table A; Target 13821; HLA-B*44:02; CLDN16; ENSG00000113946; TAA
AEHPLKLVV

SEQ ID NO: 13822 - protein, 9 aa, Homo sapiens
  Table A; Target 13822; HLA-B*44:03; CLDN16; ENSG00000113946; TAA
AEHPLKLVV

SEQ ID NO: 13823 - protein, 9 aa, Homo sapiens
  Table A; Target 13823; HLA-B*49:01; CLDN16; ENSG00000113946; TAA
AEHPLKLVV

SEQ ID NO: 13824 - protein, 9 aa, Homo sapiens
  Table A; Target 13824; HLA-C*02:02; CLDN16; ENSG00000113946; TAA
AEHPLKLVV

SEQ ID NO: 13825 - protein, 9 aa, Homo sapiens
  Table A; Target 13825; HLA-C*16:04; CLDN16; ENSG00000113946; TAA
AEHPLKLVV

SEQ ID NO: 13826 - protein, 10 aa, Homo sapiens
  Table A; Target 13826; HLA-A*30:01; CLDN16; ENSG00000113946; TAA
AEHPLKLVVT

SEQ ID NO: 13827 - protein, 10 aa, Homo sapiens
  Table A; Target 13827; HLA-B*40:02; CLDN16; ENSG00000113946; TAA
AEHPLKLVVT

SEQ ID NO: 13828 - protein, 10 aa, Homo sapiens
  Table A; Target 13828; HLA-B*49:01; CLDN16; ENSG00000113946; TAA
AEHPLKLVVT

SEQ ID NO: 13829 - protein, 9 aa, Homo sapiens
  Table A; Target 13829; HLA-A*23:01; CLDN16; ENSG00000113946; TAA
AFFSAGFLI

SEQ ID NO: 13830 - protein, 9 aa, Homo sapiens
  Table A; Target 13830; HLA-A*24:02; CLDN16; ENSG00000113946; TAA
AFFSAGFLI

SEQ ID NO: 13831 - protein, 10 aa, Homo sapiens
  Table A; Target 13831; HLA-A*29:02; CLDN16; ENSG00000113946; TAA
AFFSAGFLIV

SEQ ID NO: 13832 - protein, 9 aa, Homo sapiens
  Table A; Target 13832; HLA-A*02:03; CLDN16; ENSG00000113946; TAA
AGFGFLTLL

SEQ ID NO: 13833 - protein, 9 aa, Homo sapiens
  Table A; Target 13833; HLA-A*02:04; CLDN16; ENSG00000113946; TAA
AGFGFLTLL

SEQ ID NO: 13834 - protein, 9 aa, Homo sapiens
  Table A; Target 13834; HLA-A*24:02; CLDN16; ENSG00000113946; TAA
AGFLIVATW

SEQ ID NO: 13835 - protein, 9 aa, Homo sapiens
  Table A; Target 13835; HLA-A*25:01; CLDN16; ENSG00000113946; TAA
AGFLIVATW

SEQ ID NO: 13836 - protein, 9 aa, Homo sapiens
  Table A; Target 13836; HLA-A*32:01; CLDN16; ENSG00000113946; TAA
AGFLIVATW

SEQ ID NO: 13837 - protein, 9 aa, Homo sapiens
  Table A; Target 13837; HLA-B*44:02; CLDN16; ENSG00000113946; TAA
AGFLIVATW

SEQ ID NO: 13838 - protein, 9 aa, Homo sapiens
  Table A; Target 13838; HLA-B*44:03; CLDN16; ENSG00000113946; TAA
AGFLIVATW

SEQ ID NO: 13839 - protein, 9 aa, Homo sapiens
  Table A; Target 13839; HLA-B*57:01; CLDN16; ENSG00000113946; TAA
AGFLIVATW

SEQ ID NO: 13840 - protein, 9 aa, Homo sapiens
  Table A; Target 13840; HLA-B*58:01; CLDN16; ENSG00000113946; TAA
AGFLIVATW

SEQ ID NO: 13841 - protein, 9 aa, Homo sapiens
  Table A; Target 13841; HLA-C*02:02; CLDN16; ENSG00000113946; TAA
AGFLIVATW

SEQ ID NO: 13842 - protein, 9 aa, Homo sapiens
  Table A; Target 13842; HLA-C*12:03; CLDN16; ENSG00000113946; TAA
AGFLIVATW

SEQ ID NO: 13843 - protein, 9 aa, Homo sapiens
  Table A; Target 13843; HLA-C*16:04; CLDN16; ENSG00000113946; TAA
AGFLIVATW

SEQ ID NO: 13844 - protein, 11 aa, Homo sapiens
  Table A; Target 13844; HLA-A*30:02; CLDN16; ENSG00000113946; TAA
AGTPGIIGSVW

SEQ ID NO: 13845 - protein, 11 aa, Homo sapiens
  Table A; Target 13845; HLA-B*44:02; CLDN16; ENSG00000113946; TAA
AGTPGIIGSVW

SEQ ID NO: 13846 - protein, 11 aa, Homo sapiens
  Table A; Target 13846; HLA-B*44:03; CLDN16; ENSG00000113946; TAA
AGTPGIIGSVW

SEQ ID NO: 13847 - protein, 11 aa, Homo sapiens
  Table A; Target 13847; HLA-B*57:01; CLDN16; ENSG00000113946; TAA
AGTPGIIGSVW

SEQ ID NO: 13848 - protein, 11 aa, Homo sapiens
  Table A; Target 13848; HLA-B*58:01; CLDN16; ENSG00000113946; TAA
AGTPGIIGSVW

SEQ ID NO: 13849 - protein, 9 aa, Homo sapiens
  Table A; Target 13849; HLA-A*26:01; CLDN16; ENSG00000113946; TAA
AGVSMAKSY

SEQ ID NO: 13850 - protein, 9 aa, Homo sapiens
  Table A; Target 13850; HLA-A*29:02; CLDN16; ENSG00000113946; TAA
AGVSMAKSY

SEQ ID NO: 13851 - protein, 9 aa, Homo sapiens
  Table A; Target 13851; HLA-A*30:02; CLDN16; ENSG00000113946; TAA
AGVSMAKSY

SEQ ID NO: 13852 - protein, 9 aa, Homo sapiens
  Table A; Target 13852; HLA-A*32:01; CLDN16; ENSG00000113946; TAA
AGVSMAKSY

SEQ ID NO: 13853 - protein, 9 aa, Homo sapiens
  Table A; Target 13853; HLA-B*07:02; CLDN16; ENSG00000113946; TAA
AGVSMAKSY

SEQ ID NO: 13854 - protein, 9 aa, Homo sapiens
  Table A; Target 13854; HLA-B*15:01; CLDN16; ENSG00000113946; TAA
AGVSMAKSY

SEQ ID NO: 13855 - protein, 9 aa, Homo sapiens
  Table A; Target 13855; HLA-B*15:03; CLDN16; ENSG00000113946; TAA
AGVSMAKSY

SEQ ID NO: 13856 - protein, 9 aa, Homo sapiens
  Table A; Target 13856; HLA-B*18:01; CLDN16; ENSG00000113946; TAA
AGVSMAKSY

SEQ ID NO: 13857 - protein, 9 aa, Homo sapiens
  Table A; Target 13857; HLA-B*27:02; CLDN16; ENSG00000113946; TAA
AGVSMAKSY

SEQ ID NO: 13858 - protein, 9 aa, Homo sapiens
  Table A; Target 13858; HLA-B*27:05; CLDN16; ENSG00000113946; TAA
AGVSMAKSY

SEQ ID NO: 13859 - protein, 9 aa, Homo sapiens
  Table A; Target 13859; HLA-B*39:01; CLDN16; ENSG00000113946; TAA
AGVSMAKSY

SEQ ID NO: 13860 - protein, 9 aa, Homo sapiens
  Table A; Target 13860; HLA-B*40:02; CLDN16; ENSG00000113946; TAA
AGVSMAKSY

SEQ ID NO: 13861 - protein, 9 aa, Homo sapiens
  Table A; Target 13861; HLA-B*44:02; CLDN16; ENSG00000113946; TAA
AGVSMAKSY

SEQ ID NO: 13862 - protein, 9 aa, Homo sapiens
  Table A; Target 13862; HLA-B*44:03; CLDN16; ENSG00000113946; TAA
AGVSMAKSY

SEQ ID NO: 13863 - protein, 9 aa, Homo sapiens
  Table A; Target 13863; HLA-B*46:01; CLDN16; ENSG00000113946; TAA
AGVSMAKSY

SEQ ID NO: 13864 - protein, 9 aa, Homo sapiens
  Table A; Target 13864; HLA-B*58:01; CLDN16; ENSG00000113946; TAA
AGVSMAKSY

SEQ ID NO: 13865 - protein, 9 aa, Homo sapiens
  Table A; Target 13865; HLA-C*01:02; CLDN16; ENSG00000113946; TAA
AGVSMAKSY

SEQ ID NO: 13866 - protein, 9 aa, Homo sapiens
  Table A; Target 13866; HLA-C*02:02; CLDN16; ENSG00000113946; TAA
AGVSMAKSY

SEQ ID NO: 13867 - protein, 9 aa, Homo sapiens
  Table A; Target 13867; HLA-C*04:01; CLDN16; ENSG00000113946; TAA
AGVSMAKSY

SEQ ID NO: 13868 - protein, 9 aa, Homo sapiens
  Table A; Target 13868; HLA-C*06:02; CLDN16; ENSG00000113946; TAA
AGVSMAKSY

SEQ ID NO: 13869 - protein, 9 aa, Homo sapiens
  Table A; Target 13869; HLA-C*07:01; CLDN16; ENSG00000113946; TAA
AGVSMAKSY

SEQ ID NO: 13870 - protein, 9 aa, Homo sapiens
  Table A; Target 13870; HLA-C*07:02; CLDN16; ENSG00000113946; TAA
AGVSMAKSY

SEQ ID NO: 13871 - protein, 9 aa, Homo sapiens
  Table A; Target 13871; HLA-C*12:03; CLDN16; ENSG00000113946; TAA
AGVSMAKSY

SEQ ID NO: 13872 - protein, 9 aa, Homo sapiens
  Table A; Target 13872; HLA-C*14:02; CLDN16; ENSG00000113946; TAA
AGVSMAKSY

SEQ ID NO: 13873 - protein, 9 aa, Homo sapiens
  Table A; Target 13873; HLA-C*16:01; CLDN16; ENSG00000113946; TAA
AGVSMAKSY

SEQ ID NO: 13874 - protein, 9 aa, Homo sapiens
  Table A; Target 13874; HLA-C*16:02; CLDN16; ENSG00000113946; TAA
AGVSMAKSY

SEQ ID NO: 13875 - protein, 9 aa, Homo sapiens
  Table A; Target 13875; HLA-C*16:04; CLDN16; ENSG00000113946; TAA
AGVSMAKSY

SEQ ID NO: 13876 - protein, 8 aa, Homo sapiens
  Table A; Target 13876; HLA-B*13:02; CLDN16; ENSG00000113946; TAA
ALMITADI

SEQ ID NO: 13877 - protein, 9 aa, Homo sapiens
  Table A; Target 13877; HLA-A*02:04; CLDN16; ENSG00000113946; TAA
ALMITADIL

SEQ ID NO: 13878 - protein, 9 aa, Homo sapiens
  Table A; Target 13878; HLA-B*40:02; CLDN16; ENSG00000113946; TAA
ALMITADIL

SEQ ID NO: 13879 - protein, 9 aa, Homo sapiens
  Table A; Target 13879; HLA-C*07:04; CLDN16; ENSG00000113946; TAA
ALMITADIL

SEQ ID NO: 13880 - protein, 9 aa, Homo sapiens
  Table A; Target 13880; HLA-B*07:02; CLDN16; ENSG00000113946; TAA
APRTETAKM

SEQ ID NO: 13881 - protein, 9 aa, Homo sapiens
  Table A; Target 13881; HLA-B*35:01; CLDN16; ENSG00000113946; TAA
APRTETAKM

SEQ ID NO: 13882 - protein, 9 aa, Homo sapiens
  Table A; Target 13882; HLA-B*55:01; CLDN16; ENSG00000113946; TAA
APRTETAKM

SEQ ID NO: 13883 - protein, 9 aa, Homo sapiens
  Table A; Target 13883; HLA-B*56:01; CLDN16; ENSG00000113946; TAA
APRTETAKM

SEQ ID NO: 13884 - protein, 9 aa, Homo sapiens
  Table A; Target 13884; HLA-C*07:02; CLDN16; ENSG00000113946; TAA
APRTETAKM

SEQ ID NO: 13885 - protein, 10 aa, Homo sapiens
  Table A; Target 13885; HLA-A*30:02; CLDN16; ENSG00000113946; TAA
APRTETAKMY

SEQ ID NO: 13886 - protein, 10 aa, Homo sapiens
  Table A; Target 13886; HLA-B*07:02; CLDN16; ENSG00000113946; TAA
APRTETAKMY

SEQ ID NO: 13887 - protein, 10 aa, Homo sapiens
  Table A; Target 13887; HLA-C*07:02; CLDN16; ENSG00000113946; TAA
APRTETAKMY

SEQ ID NO: 13888 - protein, 11 aa, Homo sapiens
  Table A; Target 13888; HLA-B*07:02; CLDN16; ENSG00000113946; TAA
APRTETAKMYA

SEQ ID NO: 13889 - protein, 11 aa, Homo sapiens
  Table A; Target 13889; HLA-B*54:01; CLDN16; ENSG00000113946; TAA
APRTETAKMYA

SEQ ID NO: 13890 - protein, 11 aa, Homo sapiens
  Table A; Target 13890; HLA-B*55:01; CLDN16; ENSG00000113946; TAA
APRTETAKMYA

SEQ ID NO: 13891 - protein, 11 aa, Homo sapiens
  Table A; Target 13891; HLA-B*56:01; CLDN16; ENSG00000113946; TAA
APRTETAKMYA

SEQ ID NO: 13892 - protein, 11 aa, Homo sapiens
  Table A; Target 13892; HLA-C*07:02; CLDN16; ENSG00000113946; TAA
APRTETAKMYA

SEQ ID NO: 13893 - protein, 9 aa, Homo sapiens
  Table A; Target 13893; HLA-A*01:01; CLDN16; ENSG00000113946; TAA
ATMRDLLQY

SEQ ID NO: 13894 - protein, 9 aa, Homo sapiens
  Table A; Target 13894; HLA-A*03:01; CLDN16; ENSG00000113946; TAA
ATMRDLLQY

SEQ ID NO: 13895 - protein, 9 aa, Homo sapiens
  Table A; Target 13895; HLA-A*03:02; CLDN16; ENSG00000113946; TAA
ATMRDLLQY

SEQ ID NO: 13896 - protein, 9 aa, Homo sapiens
  Table A; Target 13896; HLA-A*11:01; CLDN16; ENSG00000113946; TAA
ATMRDLLQY

SEQ ID NO: 13897 - protein, 9 aa, Homo sapiens
  Table A; Target 13897; HLA-A*25:01; CLDN16; ENSG00000113946; TAA
ATMRDLLQY

SEQ ID NO: 13898 - protein, 9 aa, Homo sapiens
  Table A; Target 13898; HLA-A*26:01; CLDN16; ENSG00000113946; TAA
ATMRDLLQY

SEQ ID NO: 13899 - protein, 9 aa, Homo sapiens
  Table A; Target 13899; HLA-A*29:02; CLDN16; ENSG00000113946; TAA
ATMRDLLQY

SEQ ID NO: 13900 - protein, 9 aa, Homo sapiens
  Table A; Target 13900; HLA-A*30:02; CLDN16; ENSG00000113946; TAA
ATMRDLLQY

SEQ ID NO: 13901 - protein, 9 aa, Homo sapiens
  Table A; Target 13901; HLA-A*32:01; CLDN16; ENSG00000113946; TAA
ATMRDLLQY

SEQ ID NO: 13902 - protein, 9 aa, Homo sapiens
  Table A; Target 13902; HLA-B*15:01; CLDN16; ENSG00000113946; TAA
ATMRDLLQY

SEQ ID NO: 13903 - protein, 9 aa, Homo sapiens
  Table A; Target 13903; HLA-B*44:03; CLDN16; ENSG00000113946; TAA
ATMRDLLQY

SEQ ID NO: 13904 - protein, 9 aa, Homo sapiens
  Table A; Target 13904; HLA-B*46:01; CLDN16; ENSG00000113946; TAA
ATMRDLLQY

SEQ ID NO: 13905 - protein, 9 aa, Homo sapiens
  Table A; Target 13905; HLA-B*57:01; CLDN16; ENSG00000113946; TAA
ATMRDLLQY

SEQ ID NO: 13906 - protein, 9 aa, Homo sapiens
  Table A; Target 13906; HLA-B*58:01; CLDN16; ENSG00000113946; TAA
ATMRDLLQY

SEQ ID NO: 13907 - protein, 9 aa, Homo sapiens
  Table A; Target 13907; HLA-C*02:02; CLDN16; ENSG00000113946; TAA
ATMRDLLQY

SEQ ID NO: 13908 - protein, 9 aa, Homo sapiens
  Table A; Target 13908; HLA-C*07:06; CLDN16; ENSG00000113946; TAA
ATMRDLLQY

SEQ ID NO: 13909 - protein, 9 aa, Homo sapiens
  Table A; Target 13909; HLA-C*16:01; CLDN16; ENSG00000113946; TAA
ATMRDLLQY

SEQ ID NO: 13910 - protein, 9 aa, Homo sapiens
  Table A; Target 13910; HLA-C*16:02; CLDN16; ENSG00000113946; TAA
ATMRDLLQY

SEQ ID NO: 13911 - protein, 9 aa, Homo sapiens
  Table A; Target 13911; HLA-C*16:04; CLDN16; ENSG00000113946; TAA
ATMRDLLQY

SEQ ID NO: 13912 - protein, 10 aa, Homo sapiens
  Table A; Target 13912; HLA-B*57:01; CLDN16; ENSG00000113946; TAA
ATMRDLLQYI

SEQ ID NO: 13913 - protein, 8 aa, Homo sapiens
  Table A; Target 13913; HLA-A*11:01; CLDN16; ENSG00000113946; TAA
AVDVYVER

SEQ ID NO: 13914 - protein, 8 aa, Homo sapiens
  Table A; Target 13914; HLA-A*31:01; CLDN16; ENSG00000113946; TAA
AVDVYVER

SEQ ID NO: 13915 - protein, 8 aa, Homo sapiens
  Table A; Target 13915; HLA-A*33:03; CLDN16; ENSG00000113946; TAA
AVDVYVER

SEQ ID NO: 13916 - protein, 8 aa, Homo sapiens
  Table A; Target 13916; HLA-C*05:01; CLDN16; ENSG00000113946; TAA
AVDVYVER

SEQ ID NO: 13917 - protein, 8 aa, Homo sapiens
  Table A; Target 13917; HLA-C*07:06; CLDN16; ENSG00000113946; TAA
AVDVYVER

SEQ ID NO: 13918 - protein, 9 aa, Homo sapiens
  Table A; Target 13918; HLA-A*02:07; CLDN16; ENSG00000113946; TAA
AVDVYVERS

SEQ ID NO: 13919 - protein, 11 aa, Homo sapiens
  Table A; Target 13919; HLA-B*07:02; CLDN16; ENSG00000113946; TAA
AVDVYVERSTL

SEQ ID NO: 13920 - protein, 11 aa, Homo sapiens
  Table A; Target 13920; HLA-C*05:01; CLDN16; ENSG00000113946; TAA
AVDVYVERSTL

SEQ ID NO: 13921 - protein, 9 aa, Homo sapiens
  Table A; Target 13921; HLA-A*23:01; CLDN16; ENSG00000113946; TAA
AYSAAGVSM

SEQ ID NO: 13922 - protein, 9 aa, Homo sapiens
  Table A; Target 13922; HLA-A*24:02; CLDN16; ENSG00000113946; TAA
AYSAAGVSM

SEQ ID NO: 13923 - protein, 9 aa, Homo sapiens
  Table A; Target 13923; HLA-A*30:01; CLDN16; ENSG00000113946; TAA
AYSAAGVSM

SEQ ID NO: 13924 - protein, 9 aa, Homo sapiens
  Table A; Target 13924; HLA-A*30:02; CLDN16; ENSG00000113946; TAA
AYSAAGVSM

SEQ ID NO: 13925 - protein, 9 aa, Homo sapiens
  Table A; Target 13925; HLA-A*32:01; CLDN16; ENSG00000113946; TAA
AYSAAGVSM

SEQ ID NO: 13926 - protein, 9 aa, Homo sapiens
  Table A; Target 13926; HLA-B*07:02; CLDN16; ENSG00000113946; TAA
AYSAAGVSM

SEQ ID NO: 13927 - protein, 9 aa, Homo sapiens
  Table A; Target 13927; HLA-B*15:01; CLDN16; ENSG00000113946; TAA
AYSAAGVSM

SEQ ID NO: 13928 - protein, 9 aa, Homo sapiens
  Table A; Target 13928; HLA-B*15:03; CLDN16; ENSG00000113946; TAA
AYSAAGVSM

SEQ ID NO: 13929 - protein, 9 aa, Homo sapiens
  Table A; Target 13929; HLA-B*27:05; CLDN16; ENSG00000113946; TAA
AYSAAGVSM

SEQ ID NO: 13930 - protein, 9 aa, Homo sapiens
  Table A; Target 13930; HLA-B*35:01; CLDN16; ENSG00000113946; TAA
AYSAAGVSM

SEQ ID NO: 13931 - protein, 9 aa, Homo sapiens
  Table A; Target 13931; HLA-B*35:03; CLDN16; ENSG00000113946; TAA
AYSAAGVSM

SEQ ID NO: 13932 - protein, 9 aa, Homo sapiens
  Table A; Target 13932; HLA-B*37:01; CLDN16; ENSG00000113946; TAA
AYSAAGVSM

SEQ ID NO: 13933 - protein, 9 aa, Homo sapiens
  Table A; Target 13933; HLA-B*38:01; CLDN16; ENSG00000113946; TAA
AYSAAGVSM

SEQ ID NO: 13934 - protein, 9 aa, Homo sapiens
  Table A; Target 13934; HLA-B*39:01; CLDN16; ENSG00000113946; TAA
AYSAAGVSM

SEQ ID NO: 13935 - protein, 9 aa, Homo sapiens
  Table A; Target 13935; HLA-B*40:02; CLDN16; ENSG00000113946; TAA
AYSAAGVSM

SEQ ID NO: 13936 - protein, 9 aa, Homo sapiens
  Table A; Target 13936; HLA-B*46:01; CLDN16; ENSG00000113946; TAA
AYSAAGVSM

SEQ ID NO: 13937 - protein, 9 aa, Homo sapiens
  Table A; Target 13937; HLA-B*55:01; CLDN16; ENSG00000113946; TAA
AYSAAGVSM

SEQ ID NO: 13938 - protein, 9 aa, Homo sapiens
  Table A; Target 13938; HLA-C*01:02; CLDN16; ENSG00000113946; TAA
AYSAAGVSM

SEQ ID NO: 13939 - protein, 9 aa, Homo sapiens
  Table A; Target 13939; HLA-C*02:02; CLDN16; ENSG00000113946; TAA
AYSAAGVSM

SEQ ID NO: 13940 - protein, 9 aa, Homo sapiens
  Table A; Target 13940; HLA-C*03:03; CLDN16; ENSG00000113946; TAA
AYSAAGVSM

SEQ ID NO: 13941 - protein, 9 aa, Homo sapiens
  Table A; Target 13941; HLA-C*03:04; CLDN16; ENSG00000113946; TAA
AYSAAGVSM

SEQ ID NO: 13942 - protein, 9 aa, Homo sapiens
  Table A; Target 13942; HLA-C*04:01; CLDN16; ENSG00000113946; TAA
AYSAAGVSM

SEQ ID NO: 13943 - protein, 9 aa, Homo sapiens
  Table A; Target 13943; HLA-C*05:01; CLDN16; ENSG00000113946; TAA
AYSAAGVSM

SEQ ID NO: 13944 - protein, 9 aa, Homo sapiens
  Table A; Target 13944; HLA-C*07:02; CLDN16; ENSG00000113946; TAA
AYSAAGVSM

SEQ ID NO: 13945 - protein, 9 aa, Homo sapiens
  Table A; Target 13945; HLA-C*07:04; CLDN16; ENSG00000113946; TAA
AYSAAGVSM

SEQ ID NO: 13946 - protein, 9 aa, Homo sapiens
  Table A; Target 13946; HLA-C*12:03; CLDN16; ENSG00000113946; TAA
AYSAAGVSM

SEQ ID NO: 13947 - protein, 9 aa, Homo sapiens
  Table A; Target 13947; HLA-C*14:02; CLDN16; ENSG00000113946; TAA
AYSAAGVSM

SEQ ID NO: 13948 - protein, 9 aa, Homo sapiens
  Table A; Target 13948; HLA-C*16:01; CLDN16; ENSG00000113946; TAA
AYSAAGVSM

SEQ ID NO: 13949 - protein, 9 aa, Homo sapiens
  Table A; Target 13949; HLA-C*16:02; CLDN16; ENSG00000113946; TAA
AYSAAGVSM

SEQ ID NO: 13950 - protein, 9 aa, Homo sapiens
  Table A; Target 13950; HLA-C*16:04; CLDN16; ENSG00000113946; TAA
AYSAAGVSM

SEQ ID NO: 13951 - protein, 10 aa, Homo sapiens
  Table A; Target 13951; HLA-B*27:05; CLDN16; ENSG00000113946; TAA
AYSAAGVSMA

SEQ ID NO: 13952 - protein, 10 aa, Homo sapiens
  Table A; Target 13952; HLA-C*04:01; CLDN16; ENSG00000113946; TAA
AYSAAGVSMA

SEQ ID NO: 13953 - protein, 10 aa, Homo sapiens
  Table A; Target 13953; HLA-C*07:02; CLDN16; ENSG00000113946; TAA
AYSAAGVSMA

SEQ ID NO: 13954 - protein, 10 aa, Homo sapiens
  Table A; Target 13954; HLA-C*14:02; CLDN16; ENSG00000113946; TAA
AYSAAGVSMA

SEQ ID NO: 13955 - protein, 11 aa, Homo sapiens
  Table A; Target 13955; HLA-A*03:01; CLDN16; ENSG00000113946; TAA
AYSAAGVSMAK

SEQ ID NO: 13956 - protein, 11 aa, Homo sapiens
  Table A; Target 13956; HLA-A*03:02; CLDN16; ENSG00000113946; TAA
AYSAAGVSMAK

SEQ ID NO: 13957 - protein, 11 aa, Homo sapiens
  Table A; Target 13957; HLA-A*11:01; CLDN16; ENSG00000113946; TAA
AYSAAGVSMAK

SEQ ID NO: 13958 - protein, 11 aa, Homo sapiens
  Table A; Target 13958; HLA-A*30:02; CLDN16; ENSG00000113946; TAA
AYSAAGVSMAK

SEQ ID NO: 13959 - protein, 11 aa, Homo sapiens
  Table A; Target 13959; HLA-A*31:01; CLDN16; ENSG00000113946; TAA
AYSAAGVSMAK

SEQ ID NO: 13960 - protein, 11 aa, Homo sapiens
  Table A; Target 13960; HLA-B*27:02; CLDN16; ENSG00000113946; TAA
AYSAAGVSMAK

SEQ ID NO: 13961 - protein, 11 aa, Homo sapiens
  Table A; Target 13961; HLA-B*27:05; CLDN16; ENSG00000113946; TAA
AYSAAGVSMAK

SEQ ID NO: 13962 - protein, 11 aa, Homo sapiens
  Table A; Target 13962; HLA-C*06:02; CLDN16; ENSG00000113946; TAA
AYSAAGVSMAK

SEQ ID NO: 13963 - protein, 11 aa, Homo sapiens
  Table A; Target 13963; HLA-C*07:02; CLDN16; ENSG00000113946; TAA
AYSAAGVSMAK

SEQ ID NO: 13964 - protein, 8 aa, Homo sapiens
  Table A; Target 13964; HLA-C*14:02; CLDN16; ENSG00000113946; TAA
CFLAGAVL

SEQ ID NO: 13965 - protein, 8 aa, Homo sapiens
  Table A; Target 13965; HLA-A*23:01; CLDN16; ENSG00000113946; TAA
CFVAGATL

SEQ ID NO: 13966 - protein, 8 aa, Homo sapiens
  Table A; Target 13966; HLA-C*14:02; CLDN16; ENSG00000113946; TAA
CFVAGATL

SEQ ID NO: 13967 - protein, 9 aa, Homo sapiens
  Table A; Target 13967; HLA-A*23:01; CLDN16; ENSG00000113946; TAA
CFVAGATLL

SEQ ID NO: 13968 - protein, 9 aa, Homo sapiens
  Table A; Target 13968; HLA-A*24:02; CLDN16; ENSG00000113946; TAA
CFVAGATLL

SEQ ID NO: 13969 - protein, 9 aa, Homo sapiens
  Table A; Target 13969; HLA-C*14:02; CLDN16; ENSG00000113946; TAA
CFVAGATLL

SEQ ID NO: 13970 - protein, 10 aa, Homo sapiens
  Table A; Target 13970; HLA-A*23:01; CLDN16; ENSG00000113946; TAA
CFVAGATLLI

SEQ ID NO: 13971 - protein, 10 aa, Homo sapiens
  Table A; Target 13971; HLA-B*39:01; CLDN16; ENSG00000113946; TAA
CHPDGLLATM

SEQ ID NO: 13972 - protein, 9 aa, Homo sapiens
  Table A; Target 13972; HLA-B*27:02; CLDN16; ENSG00000113946; TAA
DDSLEVSTK

SEQ ID NO: 13973 - protein, 9 aa, Homo sapiens
  Table A; Target 13973; HLA-C*07:01; CLDN16; ENSG00000113946; TAA
DDSLEVSTK

SEQ ID NO: 13974 - protein, 11 aa, Homo sapiens
  Table A; Target 13974; HLA-A*33:01; CLDN16; ENSG00000113946; TAA
DDSLEVSTKCR

SEQ ID NO: 13975 - protein, 8 aa, Homo sapiens
  Table A; Target 13975; HLA-B*18:01; CLDN16; ENSG00000113946; TAA
DEYDSILA

SEQ ID NO: 13976 - protein, 8 aa, Homo sapiens
  Table A; Target 13976; HLA-B*49:01; CLDN16; ENSG00000113946; TAA
DEYDSILA

SEQ ID NO: 13977 - protein, 9 aa, Homo sapiens
  Table A; Target 13977; HLA-B*18:01; CLDN16; ENSG00000113946; TAA
DEYDSILAE

SEQ ID NO: 13978 - protein, 10 aa, Homo sapiens
  Table A; Target 13978; HLA-B*18:01; CLDN16; ENSG00000113946; TAA
DEYDSILAEH

SEQ ID NO: 13979 - protein, 9 aa, Homo sapiens
  Table A; Target 13979; HLA-B*18:01; CLDN16; ENSG00000113946; TAA
DGIRTCDEY

SEQ ID NO: 13980 - protein, 9 aa, Homo sapiens
  Table A; Target 13980; HLA-A*33:01; CLDN16; ENSG00000113946; TAA
DILAGFGFL

SEQ ID NO: 13981 - protein, 9 aa, Homo sapiens
  Table A; Target 13981; HLA-A*25:01; CLDN16; ENSG00000113946; TAA
DLLQYIACF

SEQ ID NO: 13982 - protein, 9 aa, Homo sapiens
  Table A; Target 13982; HLA-A*26:01; CLDN16; ENSG00000113946; TAA
DLLQYIACF

SEQ ID NO: 13983 - protein, 9 aa, Homo sapiens
  Table A; Target 13983; HLA-A*33:01; CLDN16; ENSG00000113946; TAA
DLLQYIACF

SEQ ID NO: 13984 - protein, 9 aa, Homo sapiens
  Table A; Target 13984; HLA-B*18:01; CLDN16; ENSG00000113946; TAA
DLLQYIACF

SEQ ID NO: 13985 - protein, 9 aa, Homo sapiens
  Table A; Target 13985; HLA-A*25:01; CLDN16; ENSG00000113946; TAA
DSILAEHPL

SEQ ID NO: 13986 - protein, 9 aa, Homo sapiens
  Table A; Target 13986; HLA-A*33:01; CLDN16; ENSG00000113946; TAA
DSILAEHPL

SEQ ID NO: 13987 - protein, 9 aa, Homo sapiens
  Table A; Target 13987; HLA-A*33:03; CLDN16; ENSG00000113946; TAA
DSILAEHPL

SEQ ID NO: 13988 - protein, 9 aa, Homo sapiens
  Table A; Target 13988; HLA-A*68:01; CLDN16; ENSG00000113946; TAA
DSILAEHPL

SEQ ID NO: 13989 - protein, 9 aa, Homo sapiens
  Table A; Target 13989; HLA-B*35:03; CLDN16; ENSG00000113946; TAA
DSILAEHPL

SEQ ID NO: 13990 - protein, 9 aa, Homo sapiens
  Table A; Target 13990; HLA-B*40:02; CLDN16; ENSG00000113946; TAA
DSILAEHPL

SEQ ID NO: 13991 - protein, 9 aa, Homo sapiens
  Table A; Target 13991; HLA-C*03:03; CLDN16; ENSG00000113946; TAA
DSILAEHPL

SEQ ID NO: 13992 - protein, 8 aa, Homo sapiens
  Table A; Target 13992; HLA-A*33:01; CLDN16; ENSG00000113946; TAA
DSLEVSTK

SEQ ID NO: 13993 - protein, 8 aa, Homo sapiens
  Table A; Target 13993; HLA-B*27:02; CLDN16; ENSG00000113946; TAA
DSLEVSTK

SEQ ID NO: 13994 - protein, 8 aa, Homo sapiens
  Table A; Target 13994; HLA-B*51:01; CLDN16; ENSG00000113946; TAA
DSLEVSTK

SEQ ID NO: 13995 - protein, 10 aa, Homo sapiens
  Table A; Target 13995; HLA-A*33:01; CLDN16; ENSG00000113946; TAA
DSLEVSTKCR

SEQ ID NO: 13996 - protein, 10 aa, Homo sapiens
  Table A; Target 13996; HLA-A*33:03; CLDN16; ENSG00000113946; TAA
DSLEVSTKCR

SEQ ID NO: 13997 - protein, 10 aa, Homo sapiens
  Table A; Target 13997; HLA-A*68:01; CLDN16; ENSG00000113946; TAA
DSLEVSTKCR

SEQ ID NO: 13998 - protein, 10 aa, Homo sapiens
  Table A; Target 13998; HLA-C*07:06; CLDN16; ENSG00000113946; TAA
DSLEVSTKCR

SEQ ID NO: 13999 - protein, 9 aa, Homo sapiens
  Table A; Target 13999; HLA-A*33:01; CLDN16; ENSG00000113946; TAA
DTRHLSGAR

SEQ ID NO: 14000 - protein, 9 aa, Homo sapiens
  Table A; Target 14000; HLA-A*33:03; CLDN16; ENSG00000113946; TAA
DTRHLSGAR

SEQ ID NO: 14001 - protein, 10 aa, Homo sapiens
  Table A; Target 14001; HLA-A*01:01; CLDN16; ENSG00000113946; TAA
DVGPERNYPY

SEQ ID NO: 14002 - protein, 10 aa, Homo sapiens
  Table A; Target 14002; HLA-A*25:01; CLDN16; ENSG00000113946; TAA
DVGPERNYPY

SEQ ID NO: 14003 - protein, 10 aa, Homo sapiens
  Table A; Target 14003; HLA-A*26:01; CLDN16; ENSG00000113946; TAA
DVGPERNYPY

SEQ ID NO: 14004 - protein, 10 aa, Homo sapiens
  Table A; Target 14004; HLA-A*29:02; CLDN16; ENSG00000113946; TAA
DVGPERNYPY

SEQ ID NO: 14005 - protein, 10 aa, Homo sapiens
  Table A; Target 14005; HLA-A*30:02; CLDN16; ENSG00000113946; TAA
DVGPERNYPY

SEQ ID NO: 14006 - protein, 10 aa, Homo sapiens
  Table A; Target 14006; HLA-A*33:01; CLDN16; ENSG00000113946; TAA
DVGPERNYPY

SEQ ID NO: 14007 - protein, 10 aa, Homo sapiens
  Table A; Target 14007; HLA-A*33:03; CLDN16; ENSG00000113946; TAA
DVGPERNYPY

SEQ ID NO: 14008 - protein, 10 aa, Homo sapiens
  Table A; Target 14008; HLA-A*68:01; CLDN16; ENSG00000113946; TAA
DVGPERNYPY

SEQ ID NO: 14009 - protein, 10 aa, Homo sapiens
  Table A; Target 14009; HLA-B*35:01; CLDN16; ENSG00000113946; TAA
DVGPERNYPY

SEQ ID NO: 14010 - protein, 10 aa, Homo sapiens
  Table A; Target 14010; HLA-C*03:03; CLDN16; ENSG00000113946; TAA
DVGPERNYPY

SEQ ID NO: 14011 - protein, 10 aa, Homo sapiens
  Table A; Target 14011; HLA-C*07:01; CLDN16; ENSG00000113946; TAA
DVGPERNYPY

SEQ ID NO: 14012 - protein, 9 aa, Homo sapiens
  Table A; Target 14012; HLA-A*25:01; CLDN16; ENSG00000113946; TAA
DVYVERSTL

SEQ ID NO: 14013 - protein, 9 aa, Homo sapiens
  Table A; Target 14013; HLA-A*26:01; CLDN16; ENSG00000113946; TAA
DVYVERSTL

SEQ ID NO: 14014 - protein, 9 aa, Homo sapiens
  Table A; Target 14014; HLA-A*33:01; CLDN16; ENSG00000113946; TAA
DVYVERSTL

SEQ ID NO: 14015 - protein, 9 aa, Homo sapiens
  Table A; Target 14015; HLA-A*33:03; CLDN16; ENSG00000113946; TAA
DVYVERSTL

SEQ ID NO: 14016 - protein, 9 aa, Homo sapiens
  Table A; Target 14016; HLA-A*68:01; CLDN16; ENSG00000113946; TAA
DVYVERSTL

SEQ ID NO: 14017 - protein, 9 aa, Homo sapiens
  Table A; Target 14017; HLA-A*68:02; CLDN16; ENSG00000113946; TAA
DVYVERSTL

SEQ ID NO: 14018 - protein, 9 aa, Homo sapiens
  Table A; Target 14018; HLA-B*07:02; CLDN16; ENSG00000113946; TAA
DVYVERSTL

SEQ ID NO: 14019 - protein, 9 aa, Homo sapiens
  Table A; Target 14019; HLA-B*08:01; CLDN16; ENSG00000113946; TAA
DVYVERSTL

SEQ ID NO: 14020 - protein, 9 aa, Homo sapiens
  Table A; Target 14020; HLA-B*18:01; CLDN16; ENSG00000113946; TAA
DVYVERSTL

SEQ ID NO: 14021 - protein, 9 aa, Homo sapiens
  Table A; Target 14021; HLA-B*35:01; CLDN16; ENSG00000113946; TAA
DVYVERSTL

SEQ ID NO: 14022 - protein, 9 aa, Homo sapiens
  Table A; Target 14022; HLA-B*35:03; CLDN16; ENSG00000113946; TAA
DVYVERSTL

SEQ ID NO: 14023 - protein, 9 aa, Homo sapiens
  Table A; Target 14023; HLA-B*38:01; CLDN16; ENSG00000113946; TAA
DVYVERSTL

SEQ ID NO: 14024 - protein, 9 aa, Homo sapiens
  Table A; Target 14024; HLA-B*40:02; CLDN16; ENSG00000113946; TAA
DVYVERSTL

SEQ ID NO: 14025 - protein, 9 aa, Homo sapiens
  Table A; Target 14025; HLA-B*51:01; CLDN16; ENSG00000113946; TAA
DVYVERSTL

SEQ ID NO: 14026 - protein, 9 aa, Homo sapiens
  Table A; Target 14026; HLA-C*01:02; CLDN16; ENSG00000113946; TAA
DVYVERSTL

SEQ ID NO: 14027 - protein, 9 aa, Homo sapiens
  Table A; Target 14027; HLA-C*03:03; CLDN16; ENSG00000113946; TAA
DVYVERSTL

SEQ ID NO: 14028 - protein, 9 aa, Homo sapiens
  Table A; Target 14028; HLA-C*03:04; CLDN16; ENSG00000113946; TAA
DVYVERSTL

SEQ ID NO: 14029 - protein, 9 aa, Homo sapiens
  Table A; Target 14029; HLA-C*05:01; CLDN16; ENSG00000113946; TAA
DVYVERSTL

SEQ ID NO: 14030 - protein, 9 aa, Homo sapiens
  Table A; Target 14030; HLA-C*07:02; CLDN16; ENSG00000113946; TAA
DVYVERSTL

SEQ ID NO: 14031 - protein, 9 aa, Homo sapiens
  Table A; Target 14031; HLA-C*07:06; CLDN16; ENSG00000113946; TAA
DVYVERSTL

SEQ ID NO: 14032 - protein, 9 aa, Homo sapiens
  Table A; Target 14032; HLA-C*12:03; CLDN16; ENSG00000113946; TAA
DVYVERSTL

SEQ ID NO: 14033 - protein, 10 aa, Homo sapiens
  Table A; Target 14033; HLA-A*26:01; CLDN16; ENSG00000113946; TAA
DVYVERSTLV

SEQ ID NO: 14034 - protein, 11 aa, Homo sapiens
  Table A; Target 14034; HLA-A*25:01; CLDN16; ENSG00000113946; TAA
DVYVERSTLVL

SEQ ID NO: 14035 - protein, 8 aa, Homo sapiens
  Table A; Target 14035; HLA-B*08:01; CLDN16; ENSG00000113946; TAA
EPYIKVRI

SEQ ID NO: 14036 - protein, 8 aa, Homo sapiens
  Table A; Target 14036; HLA-B*51:01; CLDN16; ENSG00000113946; TAA
EPYIKVRI

SEQ ID NO: 14037 - protein, 8 aa, Homo sapiens
  Table A; Target 14037; HLA-A*68:02; CLDN16; ENSG00000113946; TAA
ETAKMYAV

SEQ ID NO: 14038 - protein, 11 aa, Homo sapiens
  Table A; Target 14038; HLA-A*33:03; CLDN16; ENSG00000113946; TAA
ETAKMYAVDTR

SEQ ID NO: 14039 - protein, 11 aa, Homo sapiens
  Table A; Target 14039; HLA-A*68:01; CLDN16; ENSG00000113946; TAA
ETAKMYAVDTR

SEQ ID NO: 14040 - protein, 8 aa, Homo sapiens
  Table A; Target 14040; HLA-A*33:03; CLDN16; ENSG00000113946; TAA
ETQKTDTR

SEQ ID NO: 14041 - protein, 9 aa, Homo sapiens
  Table A; Target 14041; HLA-A*33:01; CLDN16; ENSG00000113946; TAA
EYDSILAEH

SEQ ID NO: 14042 - protein, 9 aa, Homo sapiens
  Table A; Target 14042; HLA-A*33:03; CLDN16; ENSG00000113946; TAA
EYDSILAEH

SEQ ID NO: 14043 - protein, 11 aa, Homo sapiens
  Table A; Target 14043; HLA-A*24:02; CLDN16; ENSG00000113946; TAA
EYDSILAEHPL

SEQ ID NO: 14044 - protein, 11 aa, Homo sapiens
  Table A; Target 14044; HLA-A*33:03; CLDN16; ENSG00000113946; TAA
EYDSILAEHPL

SEQ ID NO: 14045 - protein, 8 aa, Homo sapiens
  Table A; Target 14045; HLA-B*46:01; CLDN16; ENSG00000113946; TAA
FAFFSAGF

SEQ ID NO: 14046 - protein, 8 aa, Homo sapiens
  Table A; Target 14046; HLA-C*03:04; CLDN16; ENSG00000113946; TAA
FAFFSAGF

SEQ ID NO: 14047 - protein, 10 aa, Homo sapiens
  Table A; Target 14047; HLA-A*68:02; CLDN16; ENSG00000113946; TAA
FAFFSAGFLI

SEQ ID NO: 14048 - protein, 11 aa, Homo sapiens
  Table A; Target 14048; HLA-B*54:01; CLDN16; ENSG00000113946; TAA
FAFFSAGFLIV

SEQ ID NO: 14049 - protein, 9 aa, Homo sapiens
  Table A; Target 14049; HLA-A*29:02; CLDN16; ENSG00000113946; TAA
FFAFFSAGF

SEQ ID NO: 14050 - protein, 8 aa, Homo sapiens
  Table A; Target 14050; HLA-A*23:01; CLDN16; ENSG00000113946; TAA
FFSAGFLI

SEQ ID NO: 14051 - protein, 9 aa, Homo sapiens
  Table A; Target 14051; HLA-A*29:02; CLDN16; ENSG00000113946; TAA
FFSAGFLIV

SEQ ID NO: 14052 - protein, 8 aa, Homo sapiens
  Table A; Target 14052; HLA-B*51:01; CLDN16; ENSG00000113946; TAA
FGFLTLLL

SEQ ID NO: 14053 - protein, 10 aa, Homo sapiens
  Table A; Target 14053; HLA-B*15:03; CLDN16; ENSG00000113946; TAA
FKDVGPERNY

SEQ ID NO: 14054 - protein, 9 aa, Homo sapiens
  Table A; Target 14054; HLA-A*02:01; CLDN16; ENSG00000113946; TAA
FLAGAVLTC

SEQ ID NO: 14055 - protein, 9 aa, Homo sapiens
  Table A; Target 14055; HLA-A*02:03; CLDN16; ENSG00000113946; TAA
FLAGAVLTC

SEQ ID NO: 14056 - protein, 9 aa, Homo sapiens
  Table A; Target 14056; HLA-A*02:04; CLDN16; ENSG00000113946; TAA
FLAGAVLTC

SEQ ID NO: 14057 - protein, 9 aa, Homo sapiens
  Table A; Target 14057; HLA-B*13:02; CLDN16; ENSG00000113946; TAA
FLAGAVLTC

SEQ ID NO: 14058 - protein, 9 aa, Homo sapiens
  Table A; Target 14058; HLA-B*55:01; CLDN16; ENSG00000113946; TAA
FLAGAVLTC

SEQ ID NO: 14059 - protein, 9 aa, Homo sapiens
  Table A; Target 14059; HLA-C*02:02; CLDN16; ENSG00000113946; TAA
FLAGAVLTC

SEQ ID NO: 14060 - protein, 9 aa, Homo sapiens
  Table A; Target 14060; HLA-C*07:04; CLDN16; ENSG00000113946; TAA
FLAGAVLTC

SEQ ID NO: 14061 - protein, 9 aa, Homo sapiens
  Table A; Target 14061; HLA-C*12:03; CLDN16; ENSG00000113946; TAA
FLAGAVLTC

SEQ ID NO: 14062 - protein, 8 aa, Homo sapiens
  Table A; Target 14062; HLA-A*02:07; CLDN16; ENSG00000113946; TAA
FLPDEPYI

SEQ ID NO: 14063 - protein, 10 aa, Homo sapiens
  Table A; Target 14063; HLA-A*02:01; CLDN16; ENSG00000113946; TAA
FLPDEPYIKV

SEQ ID NO: 14064 - protein, 10 aa, Homo sapiens
  Table A; Target 14064; HLA-A*02:03; CLDN16; ENSG00000113946; TAA
FLPDEPYIKV

SEQ ID NO: 14065 - protein, 10 aa, Homo sapiens
  Table A; Target 14065; HLA-A*02:04; CLDN16; ENSG00000113946; TAA
FLPDEPYIKV

SEQ ID NO: 14066 - protein, 10 aa, Homo sapiens
  Table A; Target 14066; HLA-A*02:07; CLDN16; ENSG00000113946; TAA
FLPDEPYIKV

SEQ ID NO: 14067 - protein, 10 aa, Homo sapiens
  Table A; Target 14067; HLA-A*68:02; CLDN16; ENSG00000113946; TAA
FLPDEPYIKV

SEQ ID NO: 14068 - protein, 10 aa, Homo sapiens
  Table A; Target 14068; HLA-B*13:02; CLDN16; ENSG00000113946; TAA
FLPDEPYIKV

SEQ ID NO: 14069 - protein, 10 aa, Homo sapiens
  Table A; Target 14069; HLA-C*02:02; CLDN16; ENSG00000113946; TAA
FLPDEPYIKV

SEQ ID NO: 14070 - protein, 9 aa, Homo sapiens
  Table A; Target 14070; HLA-A*68:02; CLDN16; ENSG00000113946; TAA
FSAGFLIVA

SEQ ID NO: 14071 - protein, 9 aa, Homo sapiens
  Table A; Target 14071; HLA-B*54:01; CLDN16; ENSG00000113946; TAA
FSAGFLIVA

SEQ ID NO: 14072 - protein, 11 aa, Homo sapiens
  Table A; Target 14072; HLA-B*57:01; CLDN16; ENSG00000113946; TAA
FSAGFLIVATW

SEQ ID NO: 14073 - protein, 8 aa, Homo sapiens
  Table A; Target 14073; HLA-C*02:02; CLDN16; ENSG00000113946; TAA
FVAGATLL

SEQ ID NO: 14074 - protein, 8 aa, Homo sapiens
  Table A; Target 14074; HLA-C*03:03; CLDN16; ENSG00000113946; TAA
FVAGATLL

SEQ ID NO: 14075 - protein, 8 aa, Homo sapiens
  Table A; Target 14075; HLA-C*03:04; CLDN16; ENSG00000113946; TAA
FVAGATLL

SEQ ID NO: 14076 - protein, 8 aa, Homo sapiens
  Table A; Target 14076; HLA-C*05:01; CLDN16; ENSG00000113946; TAA
FVAGATLL

SEQ ID NO: 14077 - protein, 8 aa, Homo sapiens
  Table A; Target 14077; HLA-C*07:04; CLDN16; ENSG00000113946; TAA
FVAGATLL

SEQ ID NO: 14078 - protein, 9 aa, Homo sapiens
  Table A; Target 14078; HLA-A*01:01; CLDN16; ENSG00000113946; TAA
FVAGATLLI

SEQ ID NO: 14079 - protein, 9 aa, Homo sapiens
  Table A; Target 14079; HLA-A*02:03; CLDN16; ENSG00000113946; TAA
FVAGATLLI

SEQ ID NO: 14080 - protein, 9 aa, Homo sapiens
  Table A; Target 14080; HLA-A*02:07; CLDN16; ENSG00000113946; TAA
FVAGATLLI

SEQ ID NO: 14081 - protein, 9 aa, Homo sapiens
  Table A; Target 14081; HLA-A*23:01; CLDN16; ENSG00000113946; TAA
FVAGATLLI

SEQ ID NO: 14082 - protein, 9 aa, Homo sapiens
  Table A; Target 14082; HLA-A*24:02; CLDN16; ENSG00000113946; TAA
FVAGATLLI

SEQ ID NO: 14083 - protein, 9 aa, Homo sapiens
  Table A; Target 14083; HLA-A*25:01; CLDN16; ENSG00000113946; TAA
FVAGATLLI

SEQ ID NO: 14084 - protein, 9 aa, Homo sapiens
  Table A; Target 14084; HLA-A*26:01; CLDN16; ENSG00000113946; TAA
FVAGATLLI

SEQ ID NO: 14085 - protein, 9 aa, Homo sapiens
  Table A; Target 14085; HLA-A*29:02; CLDN16; ENSG00000113946; TAA
FVAGATLLI

SEQ ID NO: 14086 - protein, 9 aa, Homo sapiens
  Table A; Target 14086; HLA-A*30:01; CLDN16; ENSG00000113946; TAA
FVAGATLLI

SEQ ID NO: 14087 - protein, 9 aa, Homo sapiens
  Table A; Target 14087; HLA-A*68:02; CLDN16; ENSG00000113946; TAA
FVAGATLLI

SEQ ID NO: 14088 - protein, 9 aa, Homo sapiens
  Table A; Target 14088; HLA-B*13:02; CLDN16; ENSG00000113946; TAA
FVAGATLLI

SEQ ID NO: 14089 - protein, 9 aa, Homo sapiens
  Table A; Target 14089; HLA-B*51:01; CLDN16; ENSG00000113946; TAA
FVAGATLLI

SEQ ID NO: 14090 - protein, 9 aa, Homo sapiens
  Table A; Target 14090; HLA-C*02:02; CLDN16; ENSG00000113946; TAA
FVAGATLLI

SEQ ID NO: 14091 - protein, 9 aa, Homo sapiens
  Table A; Target 14091; HLA-C*07:04; CLDN16; ENSG00000113946; TAA
FVAGATLLI

SEQ ID NO: 14092 - protein, 10 aa, Homo sapiens
  Table A; Target 14092; HLA-B*54:01; CLDN16; ENSG00000113946; TAA
FVAGATLLIA

SEQ ID NO: 14093 - protein, 11 aa, Homo sapiens
  Table A; Target 14093; HLA-B*54:01; CLDN16; ENSG00000113946; TAA
FVAGATLLIAG

SEQ ID NO: 14094 - protein, 9 aa, Homo sapiens
  Table A; Target 14094; HLA-B*15:03; CLDN16; ENSG00000113946; TAA
GAVLTCCLY

SEQ ID NO: 14095 - protein, 9 aa, Homo sapiens
  Table A; Target 14095; HLA-C*07:01; CLDN16; ENSG00000113946; TAA
GAVLTCCLY

SEQ ID NO: 14096 - protein, 9 aa, Homo sapiens
  Table A; Target 14096; HLA-B*07:02; CLDN16; ENSG00000113946; TAA
GCFLAGAVL

SEQ ID NO: 14097 - protein, 9 aa, Homo sapiens
  Table A; Target 14097; HLA-B*15:01; CLDN16; ENSG00000113946; TAA
GCFLAGAVL

SEQ ID NO: 14098 - protein, 9 aa, Homo sapiens
  Table A; Target 14098; HLA-B*15:03; CLDN16; ENSG00000113946; TAA
GCFLAGAVL

SEQ ID NO: 14099 - protein, 9 aa, Homo sapiens
  Table A; Target 14099; HLA-B*46:01; CLDN16; ENSG00000113946; TAA
GCFLAGAVL

SEQ ID NO: 14100 - protein, 9 aa, Homo sapiens
  Table A; Target 14100; HLA-C*01:02; CLDN16; ENSG00000113946; TAA
GCFLAGAVL

SEQ ID NO: 14101 - protein, 9 aa, Homo sapiens
  Table A; Target 14101; HLA-C*03:03; CLDN16; ENSG00000113946; TAA
GCFLAGAVL

SEQ ID NO: 14102 - protein, 9 aa, Homo sapiens
  Table A; Target 14102; HLA-C*03:04; CLDN16; ENSG00000113946; TAA
GCFLAGAVL

SEQ ID NO: 14103 - protein, 9 aa, Homo sapiens
  Table A; Target 14103; HLA-C*07:02; CLDN16; ENSG00000113946; TAA
GCFLAGAVL

SEQ ID NO: 14104 - protein, 9 aa, Homo sapiens
  Table A; Target 14104; HLA-A*29:02; CLDN16; ENSG00000113946; TAA
GFGFLTLLL

SEQ ID NO: 14105 - protein, 9 aa, Homo sapiens
  Table A; Target 14105; HLA-A*02:04; CLDN16; ENSG00000113946; TAA
GIIGSVWYA

SEQ ID NO: 14106 - protein, 9 aa, Homo sapiens
  Table A; Target 14106; HLA-A*26:01; CLDN16; ENSG00000113946; TAA
GMAGSLGCF

SEQ ID NO: 14107 - protein, 9 aa, Homo sapiens
  Table A; Target 14107; HLA-A*30:02; CLDN16; ENSG00000113946; TAA
GMAGSLGCF

SEQ ID NO: 14108 - protein, 9 aa, Homo sapiens
  Table A; Target 14108; HLA-B*15:01; CLDN16; ENSG00000113946; TAA
GMAGSLGCF

SEQ ID NO: 14109 - protein, 9 aa, Homo sapiens
  Table A; Target 14109; HLA-B*15:03; CLDN16; ENSG00000113946; TAA
GMAGSLGCF

SEQ ID NO: 14110 - protein, 9 aa, Homo sapiens
  Table A; Target 14110; HLA-B*46:01; CLDN16; ENSG00000113946; TAA
GMAGSLGCF

SEQ ID NO: 14111 - protein, 10 aa, Homo sapiens
  Table A; Target 14111; HLA-B*07:02; CLDN16; ENSG00000113946; TAA
GPERNYPYSL

SEQ ID NO: 14112 - protein, 10 aa, Homo sapiens
  Table A; Target 14112; HLA-C*07:02; CLDN16; ENSG00000113946; TAA
GPERNYPYSL

SEQ ID NO: 14113 - protein, 9 aa, Homo sapiens
  Table A; Target 14113; HLA-A*02:03; CLDN16; ENSG00000113946; TAA
GTPGIIGSV

SEQ ID NO: 14114 - protein, 9 aa, Homo sapiens
  Table A; Target 14114; HLA-A*02:07; CLDN16; ENSG00000113946; TAA
GTPGIIGSV

SEQ ID NO: 14115 - protein, 9 aa, Homo sapiens
  Table A; Target 14115; HLA-A*26:01; CLDN16; ENSG00000113946; TAA
GTPGIIGSV

SEQ ID NO: 14116 - protein, 9 aa, Homo sapiens
  Table A; Target 14116; HLA-A*68:02; CLDN16; ENSG00000113946; TAA
GTPGIIGSV

SEQ ID NO: 14117 - protein, 9 aa, Homo sapiens
  Table A; Target 14117; HLA-B*13:02; CLDN16; ENSG00000113946; TAA
GTPGIIGSV

SEQ ID NO: 14118 - protein, 10 aa, Homo sapiens
  Table A; Target 14118; HLA-A*25:01; CLDN16; ENSG00000113946; TAA
GTPGIIGSVW

SEQ ID NO: 14119 - protein, 10 aa, Homo sapiens
  Table A; Target 14119; HLA-A*26:01; CLDN16; ENSG00000113946; TAA
GTPGIIGSVW

SEQ ID NO: 14120 - protein, 10 aa, Homo sapiens
  Table A; Target 14120; HLA-A*29:02; CLDN16; ENSG00000113946; TAA
GTPGIIGSVW

SEQ ID NO: 14121 - protein, 10 aa, Homo sapiens
  Table A; Target 14121; HLA-A*32:01; CLDN16; ENSG00000113946; TAA
GTPGIIGSVW

SEQ ID NO: 14122 - protein, 10 aa, Homo sapiens
  Table A; Target 14122; HLA-B*44:02; CLDN16; ENSG00000113946; TAA
GTPGIIGSVW

SEQ ID NO: 14123 - protein, 10 aa, Homo sapiens
  Table A; Target 14123; HLA-B*44:03; CLDN16; ENSG00000113946; TAA
GTPGIIGSVW

SEQ ID NO: 14124 - protein, 10 aa, Homo sapiens
  Table A; Target 14124; HLA-B*57:01; CLDN16; ENSG00000113946; TAA
GTPGIIGSVW

SEQ ID NO: 14125 - protein, 10 aa, Homo sapiens
  Table A; Target 14125; HLA-B*58:01; CLDN16; ENSG00000113946; TAA
GTPGIIGSVW

SEQ ID NO: 14126 - protein, 11 aa, Homo sapiens
  Table A; Target 14126; HLA-A*29:02; CLDN16; ENSG00000113946; TAA
GTPGIIGSVWY

SEQ ID NO: 14127 - protein, 8 aa, Homo sapiens
  Table A; Target 14127; HLA-A*30:02; CLDN16; ENSG00000113946; TAA
GVSMAKSY

SEQ ID NO: 14128 - protein, 8 aa, Homo sapiens
  Table A; Target 14128; HLA-A*32:01; CLDN16; ENSG00000113946; TAA
GVSMAKSY

SEQ ID NO: 14129 - protein, 8 aa, Homo sapiens
  Table A; Target 14129; HLA-B*15:01; CLDN16; ENSG00000113946; TAA
GVSMAKSY

SEQ ID NO: 14130 - protein, 8 aa, Homo sapiens
  Table A; Target 14130; HLA-C*04:01; CLDN16; ENSG00000113946; TAA
GVSMAKSY

SEQ ID NO: 14131 - protein, 8 aa, Homo sapiens
  Table A; Target 14131; HLA-C*07:01; CLDN16; ENSG00000113946; TAA
GVSMAKSY

SEQ ID NO: 14132 - protein, 8 aa, Homo sapiens
  Table A; Target 14132; HLA-C*12:03; CLDN16; ENSG00000113946; TAA
GVSMAKSY

SEQ ID NO: 14133 - protein, 8 aa, Homo sapiens
  Table A; Target 14133; HLA-C*16:01; CLDN16; ENSG00000113946; TAA
GVSMAKSY

SEQ ID NO: 14134 - protein, 8 aa, Homo sapiens
  Table A; Target 14134; HLA-C*16:02; CLDN16; ENSG00000113946; TAA
GVSMAKSY

SEQ ID NO: 14135 - protein, 9 aa, Homo sapiens
  Table A; Target 14135; HLA-C*07:04; CLDN16; ENSG00000113946; TAA
GVSMAKSYS

SEQ ID NO: 14136 - protein, 9 aa, Homo sapiens
  Table A; Target 14136; HLA-A*03:02; CLDN16; ENSG00000113946; TAA
HCQVPETQK

SEQ ID NO: 14137 - protein, 9 aa, Homo sapiens
  Table A; Target 14137; HLA-A*11:01; CLDN16; ENSG00000113946; TAA
HCQVPETQK

SEQ ID NO: 14138 - protein, 9 aa, Homo sapiens
  Table A; Target 14138; HLA-C*07:06; CLDN16; ENSG00000113946; TAA
HCQVPETQK

SEQ ID NO: 14139 - protein, 10 aa, Homo sapiens
  Table A; Target 14139; HLA-C*04:01; CLDN16; ENSG00000113946; TAA
HCQVPETQKT

SEQ ID NO: 14140 - protein, 8 aa, Homo sapiens
  Table A; Target 14140; HLA-A*03:02; CLDN16; ENSG00000113946; TAA
HLQQGVRK

SEQ ID NO: 14141 - protein, 9 aa, Homo sapiens
  Table A; Target 14141; HLA-A*02:03; CLDN16; ENSG00000113946; TAA
HLSGARAGV

SEQ ID NO: 14142 - protein, 9 aa, Homo sapiens
  Table A; Target 14142; HLA-A*29:02; CLDN16; ENSG00000113946; TAA
HNIFLGIQY

SEQ ID NO: 14143 - protein, 9 aa, Homo sapiens
  Table A; Target 14143; HLA-B*35:01; CLDN16; ENSG00000113946; TAA
HNIFLGIQY

SEQ ID NO: 14144 - protein, 9 aa, Homo sapiens
  Table A; Target 14144; HLA-A*32:01; CLDN16; ENSG00000113946; TAA
HPDGLLATM

SEQ ID NO: 14145 - protein, 9 aa, Homo sapiens
  Table A; Target 14145; HLA-B*07:02; CLDN16; ENSG00000113946; TAA
HPDGLLATM

SEQ ID NO: 14146 - protein, 9 aa, Homo sapiens
  Table A; Target 14146; HLA-B*08:01; CLDN16; ENSG00000113946; TAA
HPDGLLATM

SEQ ID NO: 14147 - protein, 9 aa, Homo sapiens
  Table A; Target 14147; HLA-B*18:01; CLDN16; ENSG00000113946; TAA
HPDGLLATM

SEQ ID NO: 14148 - protein, 9 aa, Homo sapiens
  Table A; Target 14148; HLA-B*35:01; CLDN16; ENSG00000113946; TAA
HPDGLLATM

SEQ ID NO: 14149 - protein, 9 aa, Homo sapiens
  Table A; Target 14149; HLA-B*35:03; CLDN16; ENSG00000113946; TAA
HPDGLLATM

SEQ ID NO: 14150 - protein, 9 aa, Homo sapiens
  Table A; Target 14150; HLA-B*38:01; CLDN16; ENSG00000113946; TAA
HPDGLLATM

SEQ ID NO: 14151 - protein, 9 aa, Homo sapiens
  Table A; Target 14151; HLA-B*51:01; CLDN16; ENSG00000113946; TAA
HPDGLLATM

SEQ ID NO: 14152 - protein, 9 aa, Homo sapiens
  Table A; Target 14152; HLA-B*54:01; CLDN16; ENSG00000113946; TAA
HPDGLLATM

SEQ ID NO: 14153 - protein, 9 aa, Homo sapiens
  Table A; Target 14153; HLA-B*55:01; CLDN16; ENSG00000113946; TAA
HPDGLLATM

SEQ ID NO: 14154 - protein, 9 aa, Homo sapiens
  Table A; Target 14154; HLA-B*56:01; CLDN16; ENSG00000113946; TAA
HPDGLLATM

SEQ ID NO: 14155 - protein, 9 aa, Homo sapiens
  Table A; Target 14155; HLA-C*03:03; CLDN16; ENSG00000113946; TAA
HPDGLLATM

SEQ ID NO: 14156 - protein, 9 aa, Homo sapiens
  Table A; Target 14156; HLA-C*04:01; CLDN16; ENSG00000113946; TAA
HPDGLLATM

SEQ ID NO: 14157 - protein, 9 aa, Homo sapiens
  Table A; Target 14157; HLA-C*05:01; CLDN16; ENSG00000113946; TAA
HPDGLLATM

SEQ ID NO: 14158 - protein, 9 aa, Homo sapiens
  Table A; Target 14158; HLA-C*07:04; CLDN16; ENSG00000113946; TAA
HPDGLLATM

SEQ ID NO: 14159 - protein, 9 aa, Homo sapiens
  Table A; Target 14159; HLA-C*07:06; CLDN16; ENSG00000113946; TAA
HPDGLLATM

SEQ ID NO: 14160 - protein, 8 aa, Homo sapiens
  Table A; Target 14160; HLA-B*08:01; CLDN16; ENSG00000113946; TAA
HPLKLVVT

SEQ ID NO: 14161 - protein, 8 aa, Homo sapiens
  Table A; Target 14161; HLA-B*54:01; CLDN16; ENSG00000113946; TAA
HPLKLVVT

SEQ ID NO: 14162 - protein, 8 aa, Homo sapiens
  Table A; Target 14162; HLA-B*55:01; CLDN16; ENSG00000113946; TAA
HPLKLVVT

SEQ ID NO: 14163 - protein, 9 aa, Homo sapiens
  Table A; Target 14163; HLA-A*31:01; CLDN16; ENSG00000113946; TAA
HPLKLVVTR

SEQ ID NO: 14164 - protein, 9 aa, Homo sapiens
  Table A; Target 14164; HLA-A*33:01; CLDN16; ENSG00000113946; TAA
HPLKLVVTR

SEQ ID NO: 14165 - protein, 9 aa, Homo sapiens
  Table A; Target 14165; HLA-A*33:03; CLDN16; ENSG00000113946; TAA
HPLKLVVTR

SEQ ID NO: 14166 - protein, 9 aa, Homo sapiens
  Table A; Target 14166; HLA-A*68:01; CLDN16; ENSG00000113946; TAA
HPLKLVVTR

SEQ ID NO: 14167 - protein, 9 aa, Homo sapiens
  Table A; Target 14167; HLA-B*35:01; CLDN16; ENSG00000113946; TAA
HPLKLVVTR

SEQ ID NO: 14168 - protein, 9 aa, Homo sapiens
  Table A; Target 14168; HLA-B*51:01; CLDN16; ENSG00000113946; TAA
HPLKLVVTR

SEQ ID NO: 14169 - protein, 9 aa, Homo sapiens
  Table A; Target 14169; HLA-B*54:01; CLDN16; ENSG00000113946; TAA
HPLKLVVTR

SEQ ID NO: 14170 - protein, 9 aa, Homo sapiens
  Table A; Target 14170; HLA-B*55:01; CLDN16; ENSG00000113946; TAA
HPLKLVVTR

SEQ ID NO: 14171 - protein, 9 aa, Homo sapiens
  Table A; Target 14171; HLA-B*56:01; CLDN16; ENSG00000113946; TAA
HPLKLVVTR

SEQ ID NO: 14172 - protein, 9 aa, Homo sapiens
  Table A; Target 14172; HLA-C*07:06; CLDN16; ENSG00000113946; TAA
HPLKLVVTR

SEQ ID NO: 14173 - protein, 10 aa, Homo sapiens
  Table A; Target 14173; HLA-B*54:01; CLDN16; ENSG00000113946; TAA
HPLKLVVTRA

SEQ ID NO: 14174 - protein, 8 aa, Homo sapiens
  Table A; Target 14174; HLA-C*05:01; CLDN16; ENSG00000113946; TAA
IAGTPGII

SEQ ID NO: 14175 - protein, 8 aa, Homo sapiens
  Table A; Target 14175; HLA-C*07:01; CLDN16; ENSG00000113946; TAA
IAGTPGII

SEQ ID NO: 14176 - protein, 8 aa, Homo sapiens
  Table A; Target 14176; HLA-C*12:03; CLDN16; ENSG00000113946; TAA
IAGTPGII

SEQ ID NO: 14177 - protein, 9 aa, Homo sapiens
  Table A; Target 14177; HLA-A*30:01; CLDN16; ENSG00000113946; TAA
ICFVAGATL

SEQ ID NO: 14178 - protein, 9 aa, Homo sapiens
  Table A; Target 14178; HLA-B*07:02; CLDN16; ENSG00000113946; TAA
ICFVAGATL

SEQ ID NO: 14179 - protein, 9 aa, Homo sapiens
  Table A; Target 14179; HLA-B*15:01; CLDN16; ENSG00000113946; TAA
ICFVAGATL

SEQ ID NO: 14180 - protein, 9 aa, Homo sapiens
  Table A; Target 14180; HLA-B*15:03; CLDN16; ENSG00000113946; TAA
ICFVAGATL

SEQ ID NO: 14181 - protein, 9 aa, Homo sapiens
  Table A; Target 14181; HLA-B*40:01; CLDN16; ENSG00000113946; TAA
ICFVAGATL

SEQ ID NO: 14182 - protein, 9 aa, Homo sapiens
  Table A; Target 14182; HLA-B*40:02; CLDN16; ENSG00000113946; TAA
ICFVAGATL

SEQ ID NO: 14183 - protein, 9 aa, Homo sapiens
  Table A; Target 14183; HLA-B*46:01; CLDN16; ENSG00000113946; TAA
ICFVAGATL

SEQ ID NO: 14184 - protein, 9 aa, Homo sapiens
  Table A; Target 14184; HLA-C*01:02; CLDN16; ENSG00000113946; TAA
ICFVAGATL

SEQ ID NO: 14185 - protein, 9 aa, Homo sapiens
  Table A; Target 14185; HLA-C*03:03; CLDN16; ENSG00000113946; TAA
ICFVAGATL

SEQ ID NO: 14186 - protein, 9 aa, Homo sapiens
  Table A; Target 14186; HLA-C*03:04; CLDN16; ENSG00000113946; TAA
ICFVAGATL

SEQ ID NO: 14187 - protein, 9 aa, Homo sapiens
  Table A; Target 14187; HLA-C*07:02; CLDN16; ENSG00000113946; TAA
ICFVAGATL

SEQ ID NO: 14188 - protein, 9 aa, Homo sapiens
  Table A; Target 14188; HLA-C*07:04; CLDN16; ENSG00000113946; TAA
ICFVAGATL

SEQ ID NO: 14189 - protein, 9 aa, Homo sapiens
  Table A; Target 14189; HLA-C*14:02; CLDN16; ENSG00000113946; TAA
ICFVAGATL

SEQ ID NO: 14190 - protein, 9 aa, Homo sapiens
  Table A; Target 14190; HLA-C*16:02; CLDN16; ENSG00000113946; TAA
ICFVAGATL

SEQ ID NO: 14191 - protein, 10 aa, Homo sapiens
  Table A; Target 14191; HLA-C*01:02; CLDN16; ENSG00000113946; TAA
ICFVAGATLL

SEQ ID NO: 14192 - protein, 9 aa, Homo sapiens
  Table A; Target 14192; HLA-A*23:01; CLDN16; ENSG00000113946; TAA
IFLGIQYKF

SEQ ID NO: 14193 - protein, 9 aa, Homo sapiens
  Table A; Target 14193; HLA-A*24:02; CLDN16; ENSG00000113946; TAA
IFLGIQYKF

SEQ ID NO: 14194 - protein, 9 aa, Homo sapiens
  Table A; Target 14194; HLA-A*29:02; CLDN16; ENSG00000113946; TAA
IFLGIQYKF

SEQ ID NO: 14195 - protein, 9 aa, Homo sapiens
  Table A; Target 14195; HLA-B*57:01; CLDN16; ENSG00000113946; TAA
IFLGIQYKF

SEQ ID NO: 14196 - protein, 9 aa, Homo sapiens
  Table A; Target 14196; HLA-A*02:07; CLDN16; ENSG00000113946; TAA
IIGSVWYAV

SEQ ID NO: 14197 - protein, 8 aa, Homo sapiens
  Table A; Target 14197; HLA-A*03:01; CLDN16; ENSG00000113946; TAA
ILAEHPLK

SEQ ID NO: 14198 - protein, 9 aa, Homo sapiens
  Table A; Target 14198; HLA-A*01:01; CLDN16; ENSG00000113946; TAA
ILAEHPLKL

SEQ ID NO: 14199 - protein, 9 aa, Homo sapiens
  Table A; Target 14199; HLA-A*02:01; CLDN16; ENSG00000113946; TAA
ILAEHPLKL

SEQ ID NO: 14200 - protein, 9 aa, Homo sapiens
  Table A; Target 14200; HLA-A*02:03; CLDN16; ENSG00000113946; TAA
ILAEHPLKL

SEQ ID NO: 14201 - protein, 9 aa, Homo sapiens
  Table A; Target 14201; HLA-A*02:04; CLDN16; ENSG00000113946; TAA
ILAEHPLKL

SEQ ID NO: 14202 - protein, 9 aa, Homo sapiens
  Table A; Target 14202; HLA-A*02:07; CLDN16; ENSG00000113946; TAA
ILAEHPLKL

SEQ ID NO: 14203 - protein, 9 aa, Homo sapiens
  Table A; Target 14203; HLA-A*03:01; CLDN16; ENSG00000113946; TAA
ILAEHPLKL

SEQ ID NO: 14204 - protein, 9 aa, Homo sapiens
  Table A; Target 14204; HLA-A*03:02; CLDN16; ENSG00000113946; TAA
ILAEHPLKL

SEQ ID NO: 14205 - protein, 9 aa, Homo sapiens
  Table A; Target 14205; HLA-A*23:01; CLDN16; ENSG00000113946; TAA
ILAEHPLKL

SEQ ID NO: 14206 - protein, 9 aa, Homo sapiens
  Table A; Target 14206; HLA-A*24:02; CLDN16; ENSG00000113946; TAA
ILAEHPLKL

SEQ ID NO: 14207 - protein, 9 aa, Homo sapiens
  Table A; Target 14207; HLA-A*26:01; CLDN16; ENSG00000113946; TAA
ILAEHPLKL

SEQ ID NO: 14208 - protein, 9 aa, Homo sapiens
  Table A; Target 14208; HLA-A*29:02; CLDN16; ENSG00000113946; TAA
ILAEHPLKL

SEQ ID NO: 14209 - protein, 9 aa, Homo sapiens
  Table A; Target 14209; HLA-A*30:01; CLDN16; ENSG00000113946; TAA
ILAEHPLKL

SEQ ID NO: 14210 - protein, 9 aa, Homo sapiens
  Table A; Target 14210; HLA-A*31:01; CLDN16; ENSG00000113946; TAA
ILAEHPLKL

SEQ ID NO: 14211 - protein, 9 aa, Homo sapiens
  Table A; Target 14211; HLA-A*32:01; CLDN16; ENSG00000113946; TAA
ILAEHPLKL

SEQ ID NO: 14212 - protein, 9 aa, Homo sapiens
  Table A; Target 14212; HLA-A*68:02; CLDN16; ENSG00000113946; TAA
ILAEHPLKL

SEQ ID NO: 14213 - protein, 9 aa, Homo sapiens
  Table A; Target 14213; HLA-B*08:01; CLDN16; ENSG00000113946; TAA
ILAEHPLKL

SEQ ID NO: 14214 - protein, 9 aa, Homo sapiens
  Table A; Target 14214; HLA-B*13:02; CLDN16; ENSG00000113946; TAA
ILAEHPLKL

SEQ ID NO: 14215 - protein, 9 aa, Homo sapiens
  Table A; Target 14215; HLA-B*15:01; CLDN16; ENSG00000113946; TAA
ILAEHPLKL

SEQ ID NO: 14216 - protein, 9 aa, Homo sapiens
  Table A; Target 14216; HLA-B*27:05; CLDN16; ENSG00000113946; TAA
ILAEHPLKL

SEQ ID NO: 14217 - protein, 9 aa, Homo sapiens
  Table A; Target 14217; HLA-B*35:03; CLDN16; ENSG00000113946; TAA
ILAEHPLKL

SEQ ID NO: 14218 - protein, 9 aa, Homo sapiens
  Table A; Target 14218; HLA-B*37:01; CLDN16; ENSG00000113946; TAA
ILAEHPLKL

SEQ ID NO: 14219 - protein, 9 aa, Homo sapiens
  Table A; Target 14219; HLA-B*38:01; CLDN16; ENSG00000113946; TAA
ILAEHPLKL

SEQ ID NO: 14220 - protein, 9 aa, Homo sapiens
  Table A; Target 14220; HLA-B*40:01; CLDN16; ENSG00000113946; TAA
ILAEHPLKL

SEQ ID NO: 14221 - protein, 9 aa, Homo sapiens
  Table A; Target 14221; HLA-B*51:01; CLDN16; ENSG00000113946; TAA
ILAEHPLKL

SEQ ID NO: 14222 - protein, 9 aa, Homo sapiens
  Table A; Target 14222; HLA-B*55:01; CLDN16; ENSG00000113946; TAA
ILAEHPLKL

SEQ ID NO: 14223 - protein, 9 aa, Homo sapiens
  Table A; Target 14223; HLA-B*58:01; CLDN16; ENSG00000113946; TAA
ILAEHPLKL

SEQ ID NO: 14224 - protein, 9 aa, Homo sapiens
  Table A; Target 14224; HLA-C*02:02; CLDN16; ENSG00000113946; TAA
ILAEHPLKL

SEQ ID NO: 14225 - protein, 9 aa, Homo sapiens
  Table A; Target 14225; HLA-C*03:03; CLDN16; ENSG00000113946; TAA
ILAEHPLKL

SEQ ID NO: 14226 - protein, 9 aa, Homo sapiens
  Table A; Target 14226; HLA-C*03:04; CLDN16; ENSG00000113946; TAA
ILAEHPLKL

SEQ ID NO: 14227 - protein, 9 aa, Homo sapiens
  Table A; Target 14227; HLA-C*05:01; CLDN16; ENSG00000113946; TAA
ILAEHPLKL

SEQ ID NO: 14228 - protein, 9 aa, Homo sapiens
  Table A; Target 14228; HLA-C*06:02; CLDN16; ENSG00000113946; TAA
ILAEHPLKL

SEQ ID NO: 14229 - protein, 9 aa, Homo sapiens
  Table A; Target 14229; HLA-C*07:04; CLDN16; ENSG00000113946; TAA
ILAEHPLKL

SEQ ID NO: 14230 - protein, 9 aa, Homo sapiens
  Table A; Target 14230; HLA-C*12:03; CLDN16; ENSG00000113946; TAA
ILAEHPLKL

SEQ ID NO: 14231 - protein, 9 aa, Homo sapiens
  Table A; Target 14231; HLA-C*14:02; CLDN16; ENSG00000113946; TAA
ILAEHPLKL

SEQ ID NO: 14232 - protein, 9 aa, Homo sapiens
  Table A; Target 14232; HLA-C*16:01; CLDN16; ENSG00000113946; TAA
ILAEHPLKL

SEQ ID NO: 14233 - protein, 9 aa, Homo sapiens
  Table A; Target 14233; HLA-C*16:02; CLDN16; ENSG00000113946; TAA
ILAEHPLKL

SEQ ID NO: 14234 - protein, 9 aa, Homo sapiens
  Table A; Target 14234; HLA-C*16:04; CLDN16; ENSG00000113946; TAA
ILAEHPLKL

SEQ ID NO: 14235 - protein, 10 aa, Homo sapiens
  Table A; Target 14235; HLA-A*02:01; CLDN16; ENSG00000113946; TAA
ILAEHPLKLV

SEQ ID NO: 14236 - protein, 10 aa, Homo sapiens
  Table A; Target 14236; HLA-A*02:03; CLDN16; ENSG00000113946; TAA
ILAEHPLKLV

SEQ ID NO: 14237 - protein, 10 aa, Homo sapiens
  Table A; Target 14237; HLA-A*02:04; CLDN16; ENSG00000113946; TAA
ILAEHPLKLV

SEQ ID NO: 14238 - protein, 10 aa, Homo sapiens
  Table A; Target 14238; HLA-A*02:07; CLDN16; ENSG00000113946; TAA
ILAEHPLKLV

SEQ ID NO: 14239 - protein, 11 aa, Homo sapiens
  Table A; Target 14239; HLA-A*02:01; CLDN16; ENSG00000113946; TAA
ILAEHPLKLVV

SEQ ID NO: 14240 - protein, 11 aa, Homo sapiens
  Table A; Target 14240; HLA-A*02:03; CLDN16; ENSG00000113946; TAA
ILAEHPLKLVV

SEQ ID NO: 14241 - protein, 11 aa, Homo sapiens
  Table A; Target 14241; HLA-A*02:04; CLDN16; ENSG00000113946; TAA
ILAEHPLKLVV

SEQ ID NO: 14242 - protein, 10 aa, Homo sapiens
  Table A; Target 14242; HLA-A*02:01; CLDN16; ENSG00000113946; TAA
ILAGFGFLTL

SEQ ID NO: 14243 - protein, 10 aa, Homo sapiens
  Table A; Target 14243; HLA-A*02:03; CLDN16; ENSG00000113946; TAA
ILAGFGFLTL

SEQ ID NO: 14244 - protein, 10 aa, Homo sapiens
  Table A; Target 14244; HLA-A*02:04; CLDN16; ENSG00000113946; TAA
ILAGFGFLTL

SEQ ID NO: 14245 - protein, 10 aa, Homo sapiens
  Table A; Target 14245; HLA-A*02:07; CLDN16; ENSG00000113946; TAA
ILAGFGFLTL

SEQ ID NO: 14246 - protein, 10 aa, Homo sapiens
  Table A; Target 14246; HLA-A*03:01; CLDN16; ENSG00000113946; TAA
ILAGFGFLTL

SEQ ID NO: 14247 - protein, 10 aa, Homo sapiens
  Table A; Target 14247; HLA-A*23:01; CLDN16; ENSG00000113946; TAA
ILAGFGFLTL

SEQ ID NO: 14248 - protein, 11 aa, Homo sapiens
  Table A; Target 14248; HLA-A*02:01; CLDN16; ENSG00000113946; TAA
ILAGFGFLTLL

SEQ ID NO: 14249 - protein, 11 aa, Homo sapiens
  Table A; Target 14249; HLA-A*02:03; CLDN16; ENSG00000113946; TAA
ILAGFGFLTLL

SEQ ID NO: 14250 - protein, 11 aa, Homo sapiens
  Table A; Target 14250; HLA-A*02:04; CLDN16; ENSG00000113946; TAA
ILAGFGFLTLL

SEQ ID NO: 14251 - protein, 9 aa, Homo sapiens
  Table A; Target 14251; HLA-A*01:01; CLDN16; ENSG00000113946; TAA
ITADILAGF

SEQ ID NO: 14252 - protein, 9 aa, Homo sapiens
  Table A; Target 14252; HLA-A*02:01; CLDN16; ENSG00000113946; TAA
ITADILAGF

SEQ ID NO: 14253 - protein, 9 aa, Homo sapiens
  Table A; Target 14253; HLA-A*02:03; CLDN16; ENSG00000113946; TAA
ITADILAGF

SEQ ID NO: 14254 - protein, 9 aa, Homo sapiens
  Table A; Target 14254; HLA-A*02:07; CLDN16; ENSG00000113946; TAA
ITADILAGF

SEQ ID NO: 14255 - protein, 9 aa, Homo sapiens
  Table A; Target 14255; HLA-A*03:02; CLDN16; ENSG00000113946; TAA
ITADILAGF

SEQ ID NO: 14256 - protein, 9 aa, Homo sapiens
  Table A; Target 14256; HLA-A*11:01; CLDN16; ENSG00000113946; TAA
ITADILAGF

SEQ ID NO: 14257 - protein, 9 aa, Homo sapiens
  Table A; Target 14257; HLA-A*23:01; CLDN16; ENSG00000113946; TAA
ITADILAGF

SEQ ID NO: 14258 - protein, 9 aa, Homo sapiens
  Table A; Target 14258; HLA-A*24:02; CLDN16; ENSG00000113946; TAA
ITADILAGF

SEQ ID NO: 14259 - protein, 9 aa, Homo sapiens
  Table A; Target 14259; HLA-A*25:01; CLDN16; ENSG00000113946; TAA
ITADILAGF

SEQ ID NO: 14260 - protein, 9 aa, Homo sapiens
  Table A; Target 14260; HLA-A*26:01; CLDN16; ENSG00000113946; TAA
ITADILAGF

SEQ ID NO: 14261 - protein, 9 aa, Homo sapiens
  Table A; Target 14261; HLA-A*29:02; CLDN16; ENSG00000113946; TAA
ITADILAGF

SEQ ID NO: 14262 - protein, 9 aa, Homo sapiens
  Table A; Target 14262; HLA-A*30:02; CLDN16; ENSG00000113946; TAA
ITADILAGF

SEQ ID NO: 14263 - protein, 9 aa, Homo sapiens
  Table A; Target 14263; HLA-A*31:01; CLDN16; ENSG00000113946; TAA
ITADILAGF

SEQ ID NO: 14264 - protein, 9 aa, Homo sapiens
  Table A; Target 14264; HLA-A*32:01; CLDN16; ENSG00000113946; TAA
ITADILAGF

SEQ ID NO: 14265 - protein, 9 aa, Homo sapiens
  Table A; Target 14265; HLA-A*33:01; CLDN16; ENSG00000113946; TAA
ITADILAGF

SEQ ID NO: 14266 - protein, 9 aa, Homo sapiens
  Table A; Target 14266; HLA-A*33:03; CLDN16; ENSG00000113946; TAA
ITADILAGF

SEQ ID NO: 14267 - protein, 9 aa, Homo sapiens
  Table A; Target 14267; HLA-A*68:01; CLDN16; ENSG00000113946; TAA
ITADILAGF

SEQ ID NO: 14268 - protein, 9 aa, Homo sapiens
  Table A; Target 14268; HLA-A*68:02; CLDN16; ENSG00000113946; TAA
ITADILAGF

SEQ ID NO: 14269 - protein, 9 aa, Homo sapiens
  Table A; Target 14269; HLA-B*15:01; CLDN16; ENSG00000113946; TAA
ITADILAGF

SEQ ID NO: 14270 - protein, 9 aa, Homo sapiens
  Table A; Target 14270; HLA-B*15:03; CLDN16; ENSG00000113946; TAA
ITADILAGF

SEQ ID NO: 14271 - protein, 9 aa, Homo sapiens
  Table A; Target 14271; HLA-B*27:05; CLDN16; ENSG00000113946; TAA
ITADILAGF

SEQ ID NO: 14272 - protein, 9 aa, Homo sapiens
  Table A; Target 14272; HLA-B*35:01; CLDN16; ENSG00000113946; TAA
ITADILAGF

SEQ ID NO: 14273 - protein, 9 aa, Homo sapiens
  Table A; Target 14273; HLA-B*44:03; CLDN16; ENSG00000113946; TAA
ITADILAGF

SEQ ID NO: 14274 - protein, 9 aa, Homo sapiens
  Table A; Target 14274; HLA-B*46:01; CLDN16; ENSG00000113946; TAA
ITADILAGF

SEQ ID NO: 14275 - protein, 9 aa, Homo sapiens
  Table A; Target 14275; HLA-B*57:01; CLDN16; ENSG00000113946; TAA
ITADILAGF

SEQ ID NO: 14276 - protein, 9 aa, Homo sapiens
  Table A; Target 14276; HLA-B*58:01; CLDN16; ENSG00000113946; TAA
ITADILAGF

SEQ ID NO: 14277 - protein, 9 aa, Homo sapiens
  Table A; Target 14277; HLA-C*01:02; CLDN16; ENSG00000113946; TAA
ITADILAGF

SEQ ID NO: 14278 - protein, 9 aa, Homo sapiens
  Table A; Target 14278; HLA-C*02:02; CLDN16; ENSG00000113946; TAA
ITADILAGF

SEQ ID NO: 14279 - protein, 9 aa, Homo sapiens
  Table A; Target 14279; HLA-C*03:04; CLDN16; ENSG00000113946; TAA
ITADILAGF

SEQ ID NO: 14280 - protein, 9 aa, Homo sapiens
  Table A; Target 14280; HLA-C*04:01; CLDN16; ENSG00000113946; TAA
ITADILAGF

SEQ ID NO: 14281 - protein, 9 aa, Homo sapiens
  Table A; Target 14281; HLA-C*07:04; CLDN16; ENSG00000113946; TAA
ITADILAGF

SEQ ID NO: 14282 - protein, 9 aa, Homo sapiens
  Table A; Target 14282; HLA-C*07:06; CLDN16; ENSG00000113946; TAA
ITADILAGF

SEQ ID NO: 14283 - protein, 9 aa, Homo sapiens
  Table A; Target 14283; HLA-C*12:03; CLDN16; ENSG00000113946; TAA
ITADILAGF

SEQ ID NO: 14284 - protein, 9 aa, Homo sapiens
  Table A; Target 14284; HLA-C*16:01; CLDN16; ENSG00000113946; TAA
ITADILAGF

SEQ ID NO: 14285 - protein, 9 aa, Homo sapiens
  Table A; Target 14285; HLA-C*16:02; CLDN16; ENSG00000113946; TAA
ITADILAGF

SEQ ID NO: 14286 - protein, 9 aa, Homo sapiens
  Table A; Target 14286; HLA-C*16:04; CLDN16; ENSG00000113946; TAA
ITADILAGF

SEQ ID NO: 14287 - protein, 11 aa, Homo sapiens
  Table A; Target 14287; HLA-A*26:01; CLDN16; ENSG00000113946; TAA
ITADILAGFGF

SEQ ID NO: 14288 - protein, 11 aa, Homo sapiens
  Table A; Target 14288; HLA-B*57:01; CLDN16; ENSG00000113946; TAA
ITADILAGFGF

SEQ ID NO: 14289 - protein, 9 aa, Homo sapiens
  Table A; Target 14289; HLA-A*24:02; CLDN16; ENSG00000113946; TAA
IVATWTDCW

SEQ ID NO: 14290 - protein, 9 aa, Homo sapiens
  Table A; Target 14290; HLA-A*25:01; CLDN16; ENSG00000113946; TAA
IVATWTDCW

SEQ ID NO: 14291 - protein, 9 aa, Homo sapiens
  Table A; Target 14291; HLA-B*57:01; CLDN16; ENSG00000113946; TAA
IVATWTDCW

SEQ ID NO: 14292 - protein, 9 aa, Homo sapiens
  Table A; Target 14292; HLA-B*58:01; CLDN16; ENSG00000113946; TAA
IVATWTDCW

SEQ ID NO: 14293 - protein, 8 aa, Homo sapiens
  Table A; Target 14293; HLA-B*13:02; CLDN16; ENSG00000113946; TAA
KAYSAAGV

SEQ ID NO: 14294 - protein, 8 aa, Homo sapiens
  Table A; Target 14294; HLA-B*37:01; CLDN16; ENSG00000113946; TAA
KAYSAAGV

SEQ ID NO: 14295 - protein, 8 aa, Homo sapiens
  Table A; Target 14295; HLA-B*51:01; CLDN16; ENSG00000113946; TAA
KAYSAAGV

SEQ ID NO: 14296 - protein, 8 aa, Homo sapiens
  Table A; Target 14296; HLA-C*02:02; CLDN16; ENSG00000113946; TAA
KAYSAAGV

SEQ ID NO: 14297 - protein, 8 aa, Homo sapiens
  Table A; Target 14297; HLA-C*06:02; CLDN16; ENSG00000113946; TAA
KAYSAAGV

SEQ ID NO: 14298 - protein, 8 aa, Homo sapiens
  Table A; Target 14298; HLA-C*12:03; CLDN16; ENSG00000113946; TAA
KAYSAAGV

SEQ ID NO: 14299 - protein, 8 aa, Homo sapiens
  Table A; Target 14299; HLA-C*16:02; CLDN16; ENSG00000113946; TAA
KAYSAAGV

SEQ ID NO: 14300 - protein, 8 aa, Homo sapiens
  Table A; Target 14300; HLA-C*16:04; CLDN16; ENSG00000113946; TAA
KAYSAAGV

SEQ ID NO: 14301 - protein, 10 aa, Homo sapiens
  Table A; Target 14301; HLA-A*03:01; CLDN16; ENSG00000113946; TAA
KAYSAAGVSM

SEQ ID NO: 14302 - protein, 10 aa, Homo sapiens
  Table A; Target 14302; HLA-A*03:02; CLDN16; ENSG00000113946; TAA
KAYSAAGVSM

SEQ ID NO: 14303 - protein, 10 aa, Homo sapiens
  Table A; Target 14303; HLA-A*11:01; CLDN16; ENSG00000113946; TAA
KAYSAAGVSM

SEQ ID NO: 14304 - protein, 10 aa, Homo sapiens
  Table A; Target 14304; HLA-A*23:01; CLDN16; ENSG00000113946; TAA
KAYSAAGVSM

SEQ ID NO: 14305 - protein, 10 aa, Homo sapiens
  Table A; Target 14305; HLA-A*25:01; CLDN16; ENSG00000113946; TAA
KAYSAAGVSM

SEQ ID NO: 14306 - protein, 10 aa, Homo sapiens
  Table A; Target 14306; HLA-A*26:01; CLDN16; ENSG00000113946; TAA
KAYSAAGVSM

SEQ ID NO: 14307 - protein, 10 aa, Homo sapiens
  Table A; Target 14307; HLA-A*30:01; CLDN16; ENSG00000113946; TAA
KAYSAAGVSM

SEQ ID NO: 14308 - protein, 10 aa, Homo sapiens
  Table A; Target 14308; HLA-A*30:02; CLDN16; ENSG00000113946; TAA
KAYSAAGVSM

SEQ ID NO: 14309 - protein, 10 aa, Homo sapiens
  Table A; Target 14309; HLA-A*31:01; CLDN16; ENSG00000113946; TAA
KAYSAAGVSM

SEQ ID NO: 14310 - protein, 10 aa, Homo sapiens
  Table A; Target 14310; HLA-A*32:01; CLDN16; ENSG00000113946; TAA
KAYSAAGVSM

SEQ ID NO: 14311 - protein, 10 aa, Homo sapiens
  Table A; Target 14311; HLA-B*07:02; CLDN16; ENSG00000113946; TAA
KAYSAAGVSM

SEQ ID NO: 14312 - protein, 10 aa, Homo sapiens
  Table A; Target 14312; HLA-B*08:01; CLDN16; ENSG00000113946; TAA
KAYSAAGVSM

SEQ ID NO: 14313 - protein, 10 aa, Homo sapiens
  Table A; Target 14313; HLA-B*13:02; CLDN16; ENSG00000113946; TAA
KAYSAAGVSM

SEQ ID NO: 14314 - protein, 10 aa, Homo sapiens
  Table A; Target 14314; HLA-B*15:01; CLDN16; ENSG00000113946; TAA
KAYSAAGVSM

SEQ ID NO: 14315 - protein, 10 aa, Homo sapiens
  Table A; Target 14315; HLA-B*15:03; CLDN16; ENSG00000113946; TAA
KAYSAAGVSM

SEQ ID NO: 14316 - protein, 10 aa, Homo sapiens
  Table A; Target 14316; HLA-B*27:02; CLDN16; ENSG00000113946; TAA
KAYSAAGVSM

SEQ ID NO: 14317 - protein, 10 aa, Homo sapiens
  Table A; Target 14317; HLA-B*27:05; CLDN16; ENSG00000113946; TAA
KAYSAAGVSM

SEQ ID NO: 14318 - protein, 10 aa, Homo sapiens
  Table A; Target 14318; HLA-B*35:01; CLDN16; ENSG00000113946; TAA
KAYSAAGVSM

SEQ ID NO: 14319 - protein, 10 aa, Homo sapiens
  Table A; Target 14319; HLA-B*35:03; CLDN16; ENSG00000113946; TAA
KAYSAAGVSM

SEQ ID NO: 14320 - protein, 10 aa, Homo sapiens
  Table A; Target 14320; HLA-B*37:01; CLDN16; ENSG00000113946; TAA
KAYSAAGVSM

SEQ ID NO: 14321 - protein, 10 aa, Homo sapiens
  Table A; Target 14321; HLA-B*38:01; CLDN16; ENSG00000113946; TAA
KAYSAAGVSM

SEQ ID NO: 14322 - protein, 10 aa, Homo sapiens
  Table A; Target 14322; HLA-B*39:01; CLDN16; ENSG00000113946; TAA
KAYSAAGVSM

SEQ ID NO: 14323 - protein, 10 aa, Homo sapiens
  Table A; Target 14323; HLA-B*40:01; CLDN16; ENSG00000113946; TAA
KAYSAAGVSM

SEQ ID NO: 14324 - protein, 10 aa, Homo sapiens
  Table A; Target 14324; HLA-B*40:02; CLDN16; ENSG00000113946; TAA
KAYSAAGVSM

SEQ ID NO: 14325 - protein, 10 aa, Homo sapiens
  Table A; Target 14325; HLA-B*46:01; CLDN16; ENSG00000113946; TAA
KAYSAAGVSM

SEQ ID NO: 14326 - protein, 10 aa, Homo sapiens
  Table A; Target 14326; HLA-B*51:01; CLDN16; ENSG00000113946; TAA
KAYSAAGVSM

SEQ ID NO: 14327 - protein, 10 aa, Homo sapiens
  Table A; Target 14327; HLA-B*54:01; CLDN16; ENSG00000113946; TAA
KAYSAAGVSM

SEQ ID NO: 14328 - protein, 10 aa, Homo sapiens
  Table A; Target 14328; HLA-B*55:01; CLDN16; ENSG00000113946; TAA
KAYSAAGVSM

SEQ ID NO: 14329 - protein, 10 aa, Homo sapiens
  Table A; Target 14329; HLA-B*56:01; CLDN16; ENSG00000113946; TAA
KAYSAAGVSM

SEQ ID NO: 14330 - protein, 10 aa, Homo sapiens
  Table A; Target 14330; HLA-B*57:01; CLDN16; ENSG00000113946; TAA
KAYSAAGVSM

SEQ ID NO: 14331 - protein, 10 aa, Homo sapiens
  Table A; Target 14331; HLA-B*58:01; CLDN16; ENSG00000113946; TAA
KAYSAAGVSM

SEQ ID NO: 14332 - protein, 10 aa, Homo sapiens
  Table A; Target 14332; HLA-C*01:02; CLDN16; ENSG00000113946; TAA
KAYSAAGVSM

SEQ ID NO: 14333 - protein, 10 aa, Homo sapiens
  Table A; Target 14333; HLA-C*02:02; CLDN16; ENSG00000113946; TAA
KAYSAAGVSM

SEQ ID NO: 14334 - protein, 10 aa, Homo sapiens
  Table A; Target 14334; HLA-C*03:03; CLDN16; ENSG00000113946; TAA
KAYSAAGVSM

SEQ ID NO: 14335 - protein, 10 aa, Homo sapiens
  Table A; Target 14335; HLA-C*03:04; CLDN16; ENSG00000113946; TAA
KAYSAAGVSM

SEQ ID NO: 14336 - protein, 10 aa, Homo sapiens
  Table A; Target 14336; HLA-C*04:01; CLDN16; ENSG00000113946; TAA
KAYSAAGVSM

SEQ ID NO: 14337 - protein, 10 aa, Homo sapiens
  Table A; Target 14337; HLA-C*05:01; CLDN16; ENSG00000113946; TAA
KAYSAAGVSM

SEQ ID NO: 14338 - protein, 10 aa, Homo sapiens
  Table A; Target 14338; HLA-C*06:02; CLDN16; ENSG00000113946; TAA
KAYSAAGVSM

SEQ ID NO: 14339 - protein, 10 aa, Homo sapiens
  Table A; Target 14339; HLA-C*07:01; CLDN16; ENSG00000113946; TAA
KAYSAAGVSM

SEQ ID NO: 14340 - protein, 10 aa, Homo sapiens
  Table A; Target 14340; HLA-C*07:02; CLDN16; ENSG00000113946; TAA
KAYSAAGVSM

SEQ ID NO: 14341 - protein, 10 aa, Homo sapiens
  Table A; Target 14341; HLA-C*07:04; CLDN16; ENSG00000113946; TAA
KAYSAAGVSM

SEQ ID NO: 14342 - protein, 10 aa, Homo sapiens
  Table A; Target 14342; HLA-C*07:06; CLDN16; ENSG00000113946; TAA
KAYSAAGVSM

SEQ ID NO: 14343 - protein, 10 aa, Homo sapiens
  Table A; Target 14343; HLA-C*12:03; CLDN16; ENSG00000113946; TAA
KAYSAAGVSM

SEQ ID NO: 14344 - protein, 10 aa, Homo sapiens
  Table A; Target 14344; HLA-C*14:02; CLDN16; ENSG00000113946; TAA
KAYSAAGVSM

SEQ ID NO: 14345 - protein, 10 aa, Homo sapiens
  Table A; Target 14345; HLA-C*16:01; CLDN16; ENSG00000113946; TAA
KAYSAAGVSM

SEQ ID NO: 14346 - protein, 10 aa, Homo sapiens
  Table A; Target 14346; HLA-C*16:02; CLDN16; ENSG00000113946; TAA
KAYSAAGVSM

SEQ ID NO: 14347 - protein, 10 aa, Homo sapiens
  Table A; Target 14347; HLA-C*16:04; CLDN16; ENSG00000113946; TAA
KAYSAAGVSM

SEQ ID NO: 14348 - protein, 11 aa, Homo sapiens
  Table A; Target 14348; HLA-A*02:01; CLDN16; ENSG00000113946; TAA
KAYSAAGVSMA

SEQ ID NO: 14349 - protein, 11 aa, Homo sapiens
  Table A; Target 14349; HLA-B*55:01; CLDN16; ENSG00000113946; TAA
KAYSAAGVSMA

SEQ ID NO: 14350 - protein, 11 aa, Homo sapiens
  Table A; Target 14350; HLA-B*56:01; CLDN16; ENSG00000113946; TAA
KAYSAAGVSMA

SEQ ID NO: 14351 - protein, 11 aa, Homo sapiens
  Table A; Target 14351; HLA-C*06:02; CLDN16; ENSG00000113946; TAA
KAYSAAGVSMA

SEQ ID NO: 14352 - protein, 11 aa, Homo sapiens
  Table A; Target 14352; HLA-C*16:04; CLDN16; ENSG00000113946; TAA
KAYSAAGVSMA

SEQ ID NO: 14353 - protein, 9 aa, Homo sapiens
  Table A; Target 14353; HLA-A*30:02; CLDN16; ENSG00000113946; TAA
KDVGPERNY

SEQ ID NO: 14354 - protein, 9 aa, Homo sapiens
  Table A; Target 14354; HLA-B*44:02; CLDN16; ENSG00000113946; TAA
KDVGPERNY

SEQ ID NO: 14355 - protein, 9 aa, Homo sapiens
  Table A; Target 14355; HLA-B*44:03; CLDN16; ENSG00000113946; TAA
KDVGPERNY

SEQ ID NO: 14356 - protein, 9 aa, Homo sapiens
  Table A; Target 14356; HLA-C*16:01; CLDN16; ENSG00000113946; TAA
KDVGPERNY

SEQ ID NO: 14357 - protein, 9 aa, Homo sapiens
  Table A; Target 14357; HLA-C*16:02; CLDN16; ENSG00000113946; TAA
KDVGPERNY

SEQ ID NO: 14358 - protein, 10 aa, Homo sapiens
  Table A; Target 14358; HLA-C*06:02; CLDN16; ENSG00000113946; TAA
KDVGPERNYP

SEQ ID NO: 14359 - protein, 9 aa, Homo sapiens
  Table A; Target 14359; HLA-A*23:01; CLDN16; ENSG00000113946; TAA
KFLPDEPYI

SEQ ID NO: 14360 - protein, 9 aa, Homo sapiens
  Table A; Target 14360; HLA-A*24:02; CLDN16; ENSG00000113946; TAA
KFLPDEPYI

SEQ ID NO: 14361 - protein, 8 aa, Homo sapiens
  Table A; Target 14361; HLA-B*08:01; CLDN16; ENSG00000113946; TAA
KLVVTRAL

SEQ ID NO: 14362 - protein, 9 aa, Homo sapiens
  Table A; Target 14362; HLA-A*02:01; CLDN16; ENSG00000113946; TAA
KMYAVDTRV

SEQ ID NO: 14363 - protein, 9 aa, Homo sapiens
  Table A; Target 14363; HLA-A*02:03; CLDN16; ENSG00000113946; TAA
KMYAVDTRV

SEQ ID NO: 14364 - protein, 9 aa, Homo sapiens
  Table A; Target 14364; HLA-A*02:04; CLDN16; ENSG00000113946; TAA
KMYAVDTRV

SEQ ID NO: 14365 - protein, 9 aa, Homo sapiens
  Table A; Target 14365; HLA-A*02:07; CLDN16; ENSG00000113946; TAA
KMYAVDTRV

SEQ ID NO: 14366 - protein, 9 aa, Homo sapiens
  Table A; Target 14366; HLA-A*03:01; CLDN16; ENSG00000113946; TAA
KMYAVDTRV

SEQ ID NO: 14367 - protein, 9 aa, Homo sapiens
  Table A; Target 14367; HLA-A*03:02; CLDN16; ENSG00000113946; TAA
KMYAVDTRV

SEQ ID NO: 14368 - protein, 9 aa, Homo sapiens
  Table A; Target 14368; HLA-A*23:01; CLDN16; ENSG00000113946; TAA
KMYAVDTRV

SEQ ID NO: 14369 - protein, 9 aa, Homo sapiens
  Table A; Target 14369; HLA-A*24:02; CLDN16; ENSG00000113946; TAA
KMYAVDTRV

SEQ ID NO: 14370 - protein, 9 aa, Homo sapiens
  Table A; Target 14370; HLA-A*30:01; CLDN16; ENSG00000113946; TAA
KMYAVDTRV

SEQ ID NO: 14371 - protein, 9 aa, Homo sapiens
  Table A; Target 14371; HLA-A*31:01; CLDN16; ENSG00000113946; TAA
KMYAVDTRV

SEQ ID NO: 14372 - protein, 9 aa, Homo sapiens
  Table A; Target 14372; HLA-A*32:01; CLDN16; ENSG00000113946; TAA
KMYAVDTRV

SEQ ID NO: 14373 - protein, 9 aa, Homo sapiens
  Table A; Target 14373; HLA-A*68:02; CLDN16; ENSG00000113946; TAA
KMYAVDTRV

SEQ ID NO: 14374 - protein, 9 aa, Homo sapiens
  Table A; Target 14374; HLA-B*13:02; CLDN16; ENSG00000113946; TAA
KMYAVDTRV

SEQ ID NO: 14375 - protein, 9 aa, Homo sapiens
  Table A; Target 14375; HLA-B*15:03; CLDN16; ENSG00000113946; TAA
KMYAVDTRV

SEQ ID NO: 14376 - protein, 9 aa, Homo sapiens
  Table A; Target 14376; HLA-B*27:05; CLDN16; ENSG00000113946; TAA
KMYAVDTRV

SEQ ID NO: 14377 - protein, 9 aa, Homo sapiens
  Table A; Target 14377; HLA-B*37:01; CLDN16; ENSG00000113946; TAA
KMYAVDTRV

SEQ ID NO: 14378 - protein, 9 aa, Homo sapiens
  Table A; Target 14378; HLA-B*38:01; CLDN16; ENSG00000113946; TAA
KMYAVDTRV

SEQ ID NO: 14379 - protein, 9 aa, Homo sapiens
  Table A; Target 14379; HLA-B*40:02; CLDN16; ENSG00000113946; TAA
KMYAVDTRV

SEQ ID NO: 14380 - protein, 9 aa, Homo sapiens
  Table A; Target 14380; HLA-B*46:01; CLDN16; ENSG00000113946; TAA
KMYAVDTRV

SEQ ID NO: 14381 - protein, 9 aa, Homo sapiens
  Table A; Target 14381; HLA-B*49:01; CLDN16; ENSG00000113946; TAA
KMYAVDTRV

SEQ ID NO: 14382 - protein, 9 aa, Homo sapiens
  Table A; Target 14382; HLA-B*51:01; CLDN16; ENSG00000113946; TAA
KMYAVDTRV

SEQ ID NO: 14383 - protein, 9 aa, Homo sapiens
  Table A; Target 14383; HLA-B*55:01; CLDN16; ENSG00000113946; TAA
KMYAVDTRV

SEQ ID NO: 14384 - protein, 9 aa, Homo sapiens
  Table A; Target 14384; HLA-B*56:01; CLDN16; ENSG00000113946; TAA
KMYAVDTRV

SEQ ID NO: 14385 - protein, 9 aa, Homo sapiens
  Table A; Target 14385; HLA-B*57:01; CLDN16; ENSG00000113946; TAA
KMYAVDTRV

SEQ ID NO: 14386 - protein, 9 aa, Homo sapiens
  Table A; Target 14386; HLA-B*58:01; CLDN16; ENSG00000113946; TAA
KMYAVDTRV

SEQ ID NO: 14387 - protein, 9 aa, Homo sapiens
  Table A; Target 14387; HLA-C*02:02; CLDN16; ENSG00000113946; TAA
KMYAVDTRV

SEQ ID NO: 14388 - protein, 9 aa, Homo sapiens
  Table A; Target 14388; HLA-C*04:01; CLDN16; ENSG00000113946; TAA
KMYAVDTRV

SEQ ID NO: 14389 - protein, 9 aa, Homo sapiens
  Table A; Target 14389; HLA-C*06:02; CLDN16; ENSG00000113946; TAA
KMYAVDTRV

SEQ ID NO: 14390 - protein, 9 aa, Homo sapiens
  Table A; Target 14390; HLA-C*07:02; CLDN16; ENSG00000113946; TAA
KMYAVDTRV

SEQ ID NO: 14391 - protein, 9 aa, Homo sapiens
  Table A; Target 14391; HLA-C*12:03; CLDN16; ENSG00000113946; TAA
KMYAVDTRV

SEQ ID NO: 14392 - protein, 9 aa, Homo sapiens
  Table A; Target 14392; HLA-C*16:02; CLDN16; ENSG00000113946; TAA
KMYAVDTRV

SEQ ID NO: 14393 - protein, 9 aa, Homo sapiens
  Table A; Target 14393; HLA-C*16:04; CLDN16; ENSG00000113946; TAA
KMYAVDTRV

SEQ ID NO: 14394 - protein, 9 aa, Homo sapiens
  Table A; Target 14394; HLA-C*06:02; CLDN16; ENSG00000113946; TAA
KSYSAPRTE

SEQ ID NO: 14395 - protein, 9 aa, Homo sapiens
  Table A; Target 14395; HLA-C*12:03; CLDN16; ENSG00000113946; TAA
KSYSAPRTE

SEQ ID NO: 14396 - protein, 10 aa, Homo sapiens
  Table A; Target 14396; HLA-C*06:02; CLDN16; ENSG00000113946; TAA
KSYSAPRTET

SEQ ID NO: 14397 - protein, 11 aa, Homo sapiens
  Table A; Target 14397; HLA-A*32:01; CLDN16; ENSG00000113946; TAA
KSYSAPRTETA

SEQ ID NO: 14398 - protein, 8 aa, Homo sapiens
  Table A; Target 14398; HLA-C*03:03; CLDN16; ENSG00000113946; TAA
LAEHPLKL

SEQ ID NO: 14399 - protein, 8 aa, Homo sapiens
  Table A; Target 14399; HLA-C*03:04; CLDN16; ENSG00000113946; TAA
LAEHPLKL

SEQ ID NO: 14400 - protein, 8 aa, Homo sapiens
  Table A; Target 14400; HLA-C*05:01; CLDN16; ENSG00000113946; TAA
LAEHPLKL

SEQ ID NO: 14401 - protein, 9 aa, Homo sapiens
  Table A; Target 14401; HLA-B*51:01; CLDN16; ENSG00000113946; TAA
LAEHPLKLV

SEQ ID NO: 14402 - protein, 8 aa, Homo sapiens
  Table A; Target 14402; HLA-C*12:03; CLDN16; ENSG00000113946; TAA
LAGAVLTC

SEQ ID NO: 14403 - protein, 8 aa, Homo sapiens
  Table A; Target 14403; HLA-C*16:01; CLDN16; ENSG00000113946; TAA
LATMRDLL

SEQ ID NO: 14404 - protein, 9 aa, Homo sapiens
  Table A; Target 14404; HLA-A*31:01; CLDN16; ENSG00000113946; TAA
LFKDVGPER

SEQ ID NO: 14405 - protein, 9 aa, Homo sapiens
  Table A; Target 14405; HLA-A*33:01; CLDN16; ENSG00000113946; TAA
LFKDVGPER

SEQ ID NO: 14406 - protein, 9 aa, Homo sapiens
  Table A; Target 14406; HLA-A*33:03; CLDN16; ENSG00000113946; TAA
LFKDVGPER

SEQ ID NO: 14407 - protein, 9 aa, Homo sapiens
  Table A; Target 14407; HLA-C*07:06; CLDN16; ENSG00000113946; TAA
LFKDVGPER

SEQ ID NO: 14408 - protein, 11 aa, Homo sapiens
  Table A; Target 14408; HLA-A*29:02; CLDN16; ENSG00000113946; TAA
LFKDVGPERNY

SEQ ID NO: 14409 - protein, 11 aa, Homo sapiens
  Table A; Target 14409; HLA-A*30:02; CLDN16; ENSG00000113946; TAA
LFKDVGPERNY

SEQ ID NO: 14410 - protein, 11 aa, Homo sapiens
  Table A; Target 14410; HLA-A*01:01; CLDN16; ENSG00000113946; TAA
LLATMRDLLQY

SEQ ID NO: 14411 - protein, 9 aa, Homo sapiens
  Table A; Target 14411; HLA-A*02:01; CLDN16; ENSG00000113946; TAA
LLIAGTPGI

SEQ ID NO: 14412 - protein, 9 aa, Homo sapiens
  Table A; Target 14412; HLA-A*02:03; CLDN16; ENSG00000113946; TAA
LLIAGTPGI

SEQ ID NO: 14413 - protein, 9 aa, Homo sapiens
  Table A; Target 14413; HLA-A*02:04; CLDN16; ENSG00000113946; TAA
LLIAGTPGI

SEQ ID NO: 14414 - protein, 9 aa, Homo sapiens
  Table A; Target 14414; HLA-A*02:07; CLDN16; ENSG00000113946; TAA
LLIAGTPGI

SEQ ID NO: 14415 - protein, 9 aa, Homo sapiens
  Table A; Target 14415; HLA-A*23:01; CLDN16; ENSG00000113946; TAA
LLIAGTPGI

SEQ ID NO: 14416 - protein, 9 aa, Homo sapiens
  Table A; Target 14416; HLA-B*13:02; CLDN16; ENSG00000113946; TAA
LLIAGTPGI

SEQ ID NO: 14417 - protein, 9 aa, Homo sapiens
  Table A; Target 14417; HLA-B*46:01; CLDN16; ENSG00000113946; TAA
LLIAGTPGI

SEQ ID NO: 14418 - protein, 9 aa, Homo sapiens
  Table A; Target 14418; HLA-B*55:01; CLDN16; ENSG00000113946; TAA
LLIAGTPGI

SEQ ID NO: 14419 - protein, 9 aa, Homo sapiens
  Table A; Target 14419; HLA-A*01:01; CLDN16; ENSG00000113946; TAA
LLVTACLYY

SEQ ID NO: 14420 - protein, 9 aa, Homo sapiens
  Table A; Target 14420; HLA-A*29:02; CLDN16; ENSG00000113946; TAA
LLVTACLYY

SEQ ID NO: 14421 - protein, 9 aa, Homo sapiens
  Table A; Target 14421; HLA-C*07:01; CLDN16; ENSG00000113946; TAA
LLVTACLYY

SEQ ID NO: 14422 - protein, 9 aa, Homo sapiens
  Table A; Target 14422; HLA-A*01:01; CLDN16; ENSG00000113946; TAA
LPDEPYIKV

SEQ ID NO: 14423 - protein, 9 aa, Homo sapiens
  Table A; Target 14423; HLA-A*02:07; CLDN16; ENSG00000113946; TAA
LPDEPYIKV

SEQ ID NO: 14424 - protein, 9 aa, Homo sapiens
  Table A; Target 14424; HLA-A*68:02; CLDN16; ENSG00000113946; TAA
LPDEPYIKV

SEQ ID NO: 14425 - protein, 9 aa, Homo sapiens
  Table A; Target 14425; HLA-B*07:02; CLDN16; ENSG00000113946; TAA
LPDEPYIKV

SEQ ID NO: 14426 - protein, 9 aa, Homo sapiens
  Table A; Target 14426; HLA-B*13:02; CLDN16; ENSG00000113946; TAA
LPDEPYIKV

SEQ ID NO: 14427 - protein, 9 aa, Homo sapiens
  Table A; Target 14427; HLA-B*35:01; CLDN16; ENSG00000113946; TAA
LPDEPYIKV

SEQ ID NO: 14428 - protein, 9 aa, Homo sapiens
  Table A; Target 14428; HLA-B*35:03; CLDN16; ENSG00000113946; TAA
LPDEPYIKV

SEQ ID NO: 14429 - protein, 9 aa, Homo sapiens
  Table A; Target 14429; HLA-B*38:01; CLDN16; ENSG00000113946; TAA
LPDEPYIKV

SEQ ID NO: 14430 - protein, 9 aa, Homo sapiens
  Table A; Target 14430; HLA-B*51:01; CLDN16; ENSG00000113946; TAA
LPDEPYIKV

SEQ ID NO: 14431 - protein, 9 aa, Homo sapiens
  Table A; Target 14431; HLA-B*54:01; CLDN16; ENSG00000113946; TAA
LPDEPYIKV

SEQ ID NO: 14432 - protein, 9 aa, Homo sapiens
  Table A; Target 14432; HLA-B*55:01; CLDN16; ENSG00000113946; TAA
LPDEPYIKV

SEQ ID NO: 14433 - protein, 9 aa, Homo sapiens
  Table A; Target 14433; HLA-B*56:01; CLDN16; ENSG00000113946; TAA
LPDEPYIKV

SEQ ID NO: 14434 - protein, 9 aa, Homo sapiens
  Table A; Target 14434; HLA-C*03:03; CLDN16; ENSG00000113946; TAA
LPDEPYIKV

SEQ ID NO: 14435 - protein, 9 aa, Homo sapiens
  Table A; Target 14435; HLA-C*04:01; CLDN16; ENSG00000113946; TAA
LPDEPYIKV

SEQ ID NO: 14436 - protein, 9 aa, Homo sapiens
  Table A; Target 14436; HLA-C*05:01; CLDN16; ENSG00000113946; TAA
LPDEPYIKV

SEQ ID NO: 14437 - protein, 9 aa, Homo sapiens
  Table A; Target 14437; HLA-C*07:02; CLDN16; ENSG00000113946; TAA
LPDEPYIKV

SEQ ID NO: 14438 - protein, 8 aa, Homo sapiens
  Table A; Target 14438; HLA-C*07:01; CLDN16; ENSG00000113946; TAA
LVTACLYY

SEQ ID NO: 14439 - protein, 9 aa, Homo sapiens
  Table A; Target 14439; HLA-A*31:01; CLDN16; ENSG00000113946; TAA
LYYSYCNSR

SEQ ID NO: 14440 - protein, 9 aa, Homo sapiens
  Table A; Target 14440; HLA-A*33:01; CLDN16; ENSG00000113946; TAA
LYYSYCNSR

SEQ ID NO: 14441 - protein, 8 aa, Homo sapiens
  Table A; Target 14441; HLA-C*07:01; CLDN16; ENSG00000113946; TAA
MAGSLGCF

SEQ ID NO: 14442 - protein, 9 aa, Homo sapiens
  Table A; Target 14442; HLA-C*07:01; CLDN16; ENSG00000113946; TAA
MAGSLGCFL

SEQ ID NO: 14443 - protein, 9 aa, Homo sapiens
  Table A; Target 14443; HLA-A*31:01; CLDN16; ENSG00000113946; TAA
MAKSYSAPR

SEQ ID NO: 14444 - protein, 9 aa, Homo sapiens
  Table A; Target 14444; HLA-A*33:01; CLDN16; ENSG00000113946; TAA
MAKSYSAPR

SEQ ID NO: 14445 - protein, 9 aa, Homo sapiens
  Table A; Target 14445; HLA-A*33:03; CLDN16; ENSG00000113946; TAA
MAKSYSAPR

SEQ ID NO: 14446 - protein, 9 aa, Homo sapiens
  Table A; Target 14446; HLA-A*68:01; CLDN16; ENSG00000113946; TAA
MAKSYSAPR

SEQ ID NO: 14447 - protein, 9 aa, Homo sapiens
  Table A; Target 14447; HLA-C*07:06; CLDN16; ENSG00000113946; TAA
MAKSYSAPR

SEQ ID NO: 14448 - protein, 10 aa, Homo sapiens
  Table A; Target 14448; HLA-A*25:01; CLDN16; ENSG00000113946; TAA
MITADILAGF

SEQ ID NO: 14449 - protein, 10 aa, Homo sapiens
  Table A; Target 14449; HLA-A*26:01; CLDN16; ENSG00000113946; TAA
MITADILAGF

SEQ ID NO: 14450 - protein, 10 aa, Homo sapiens
  Table A; Target 14450; HLA-A*68:02; CLDN16; ENSG00000113946; TAA
MITADILAGF

SEQ ID NO: 14451 - protein, 10 aa, Homo sapiens
  Table A; Target 14451; HLA-C*07:01; CLDN16; ENSG00000113946; TAA
MITADILAGF

SEQ ID NO: 14452 - protein, 9 aa, Homo sapiens
  Table A; Target 14452; HLA-A*01:01; CLDN16; ENSG00000113946; TAA
MTSRTPLLV

SEQ ID NO: 14453 - protein, 9 aa, Homo sapiens
  Table A; Target 14453; HLA-A*68:02; CLDN16; ENSG00000113946; TAA
MTSRTPLLV

SEQ ID NO: 14454 - protein, 8 aa, Homo sapiens
  Table A; Target 14454; HLA-B*35:03; CLDN16; ENSG00000113946; TAA
MVNADDSL

SEQ ID NO: 14455 - protein, 8 aa, Homo sapiens
  Table A; Target 14455; HLA-C*04:01; CLDN16; ENSG00000113946; TAA
MYAVDTRV

SEQ ID NO: 14456 - protein, 8 aa, Homo sapiens
  Table A; Target 14456; HLA-C*06:02; CLDN16; ENSG00000113946; TAA
MYAVDTRV

SEQ ID NO: 14457 - protein, 8 aa, Homo sapiens
  Table A; Target 14457; HLA-C*07:01; CLDN16; ENSG00000113946; TAA
MYAVDTRV

SEQ ID NO: 14458 - protein, 8 aa, Homo sapiens
  Table A; Target 14458; HLA-C*14:02; CLDN16; ENSG00000113946; TAA
MYAVDTRV

SEQ ID NO: 14459 - protein, 8 aa, Homo sapiens
  Table A; Target 14459; HLA-C*16:02; CLDN16; ENSG00000113946; TAA
MYAVDTRV

SEQ ID NO: 14460 - protein, 8 aa, Homo sapiens
  Table A; Target 14460; HLA-A*01:01; CLDN16; ENSG00000113946; TAA
NADDSLEV

SEQ ID NO: 14461 - protein, 8 aa, Homo sapiens
  Table A; Target 14461; HLA-B*35:03; CLDN16; ENSG00000113946; TAA
NADDSLEV

SEQ ID NO: 14462 - protein, 8 aa, Homo sapiens
  Table A; Target 14462; HLA-B*51:01; CLDN16; ENSG00000113946; TAA
NADDSLEV

SEQ ID NO: 14463 - protein, 8 aa, Homo sapiens
  Table A; Target 14463; HLA-C*03:03; CLDN16; ENSG00000113946; TAA
NADDSLEV

SEQ ID NO: 14464 - protein, 8 aa, Homo sapiens
  Table A; Target 14464; HLA-C*03:04; CLDN16; ENSG00000113946; TAA
NADDSLEV

SEQ ID NO: 14465 - protein, 8 aa, Homo sapiens
  Table A; Target 14465; HLA-C*05:01; CLDN16; ENSG00000113946; TAA
NADDSLEV

SEQ ID NO: 14466 - protein, 9 aa, Homo sapiens
  Table A; Target 14466; HLA-C*05:01; CLDN16; ENSG00000113946; TAA
NADDSLEVS

SEQ ID NO: 14467 - protein, 10 aa, Homo sapiens
  Table A; Target 14467; HLA-C*05:01; CLDN16; ENSG00000113946; TAA
NADDSLEVST

SEQ ID NO: 14468 - protein, 11 aa, Homo sapiens
  Table A; Target 14468; HLA-A*68:01; CLDN16; ENSG00000113946; TAA
NADDSLEVSTK

SEQ ID NO: 14469 - protein, 11 aa, Homo sapiens
  Table A; Target 14469; HLA-B*27:02; CLDN16; ENSG00000113946; TAA
NADDSLEVSTK

SEQ ID NO: 14470 - protein, 11 aa, Homo sapiens
  Table A; Target 14470; HLA-B*27:05; CLDN16; ENSG00000113946; TAA
NADDSLEVSTK

SEQ ID NO: 14471 - protein, 11 aa, Homo sapiens
  Table A; Target 14471; HLA-C*05:01; CLDN16; ENSG00000113946; TAA
NADDSLEVSTK

SEQ ID NO: 14472 - protein, 11 aa, Homo sapiens
  Table A; Target 14472; HLA-C*07:06; CLDN16; ENSG00000113946; TAA
NADDSLEVSTK

SEQ ID NO: 14473 - protein, 9 aa, Homo sapiens
  Table A; Target 14473; HLA-A*02:03; CLDN16; ENSG00000113946; TAA
NAFDGIRTC

SEQ ID NO: 14474 - protein, 9 aa, Homo sapiens
  Table A; Target 14474; HLA-B*46:01; CLDN16; ENSG00000113946; TAA
NAFDGIRTC

SEQ ID NO: 14475 - protein, 9 aa, Homo sapiens
  Table A; Target 14475; HLA-B*51:01; CLDN16; ENSG00000113946; TAA
NAFDGIRTC

SEQ ID NO: 14476 - protein, 9 aa, Homo sapiens
  Table A; Target 14476; HLA-B*54:01; CLDN16; ENSG00000113946; TAA
NAFDGIRTC

SEQ ID NO: 14477 - protein, 9 aa, Homo sapiens
  Table A; Target 14477; HLA-B*56:01; CLDN16; ENSG00000113946; TAA
NAFDGIRTC

SEQ ID NO: 14478 - protein, 9 aa, Homo sapiens
  Table A; Target 14478; HLA-C*02:02; CLDN16; ENSG00000113946; TAA
NAFDGIRTC

SEQ ID NO: 14479 - protein, 9 aa, Homo sapiens
  Table A; Target 14479; HLA-C*03:03; CLDN16; ENSG00000113946; TAA
NAFDGIRTC

SEQ ID NO: 14480 - protein, 9 aa, Homo sapiens
  Table A; Target 14480; HLA-C*03:04; CLDN16; ENSG00000113946; TAA
NAFDGIRTC

SEQ ID NO: 14481 - protein, 9 aa, Homo sapiens
  Table A; Target 14481; HLA-C*12:03; CLDN16; ENSG00000113946; TAA
NAFDGIRTC

SEQ ID NO: 14482 - protein, 9 aa, Homo sapiens
  Table A; Target 14482; HLA-C*16:01; CLDN16; ENSG00000113946; TAA
NAFDGIRTC

SEQ ID NO: 14483 - protein, 9 aa, Homo sapiens
  Table A; Target 14483; HLA-C*16:02; CLDN16; ENSG00000113946; TAA
NAFDGIRTC

SEQ ID NO: 14484 - protein, 9 aa, Homo sapiens
  Table A; Target 14484; HLA-C*16:04; CLDN16; ENSG00000113946; TAA
NAFDGIRTC

SEQ ID NO: 14485 - protein, 8 aa, Homo sapiens
  Table A; Target 14485; HLA-B*15:01; CLDN16; ENSG00000113946; TAA
NIFLGIQY

SEQ ID NO: 14486 - protein, 8 aa, Homo sapiens
  Table A; Target 14486; HLA-B*15:03; CLDN16; ENSG00000113946; TAA
NIFLGIQY

SEQ ID NO: 14487 - protein, 8 aa, Homo sapiens
  Table A; Target 14487; HLA-B*18:01; CLDN16; ENSG00000113946; TAA
NIFLGIQY

SEQ ID NO: 14488 - protein, 8 aa, Homo sapiens
  Table A; Target 14488; HLA-B*35:01; CLDN16; ENSG00000113946; TAA
NIFLGIQY

SEQ ID NO: 14489 - protein, 8 aa, Homo sapiens
  Table A; Target 14489; HLA-C*01:02; CLDN16; ENSG00000113946; TAA
NIFLGIQY

SEQ ID NO: 14490 - protein, 8 aa, Homo sapiens
  Table A; Target 14490; HLA-C*07:01; CLDN16; ENSG00000113946; TAA
NIFLGIQY

SEQ ID NO: 14491 - protein, 8 aa, Homo sapiens
  Table A; Target 14491; HLA-C*07:04; CLDN16; ENSG00000113946; TAA
NIFLGIQY

SEQ ID NO: 14492 - protein, 9 aa, Homo sapiens
  Table A; Target 14492; HLA-A*03:01; CLDN16; ENSG00000113946; TAA
NIFLGIQYK

SEQ ID NO: 14493 - protein, 9 aa, Homo sapiens
  Table A; Target 14493; HLA-A*03:02; CLDN16; ENSG00000113946; TAA
NIFLGIQYK

SEQ ID NO: 14494 - protein, 9 aa, Homo sapiens
  Table A; Target 14494; HLA-A*11:01; CLDN16; ENSG00000113946; TAA
NIFLGIQYK

SEQ ID NO: 14495 - protein, 8 aa, Homo sapiens
  Table A; Target 14495; HLA-C*04:01; CLDN16; ENSG00000113946; TAA
PDGLLATM

SEQ ID NO: 14496 - protein, 8 aa, Homo sapiens
  Table A; Target 14496; HLA-C*07:01; CLDN16; ENSG00000113946; TAA
PDGLLATM

SEQ ID NO: 14497 - protein, 8 aa, Homo sapiens
  Table A; Target 14497; HLA-C*07:02; CLDN16; ENSG00000113946; TAA
PDGLLATM

SEQ ID NO: 14498 - protein, 9 aa, Homo sapiens
  Table A; Target 14498; HLA-A*29:02; CLDN16; ENSG00000113946; TAA
PLLVTACLY

SEQ ID NO: 14499 - protein, 9 aa, Homo sapiens
  Table A; Target 14499; HLA-B*07:02; CLDN16; ENSG00000113946; TAA
PRTETAKMY

SEQ ID NO: 14500 - protein, 9 aa, Homo sapiens
  Table A; Target 14500; HLA-C*07:01; CLDN16; ENSG00000113946; TAA
PRTETAKMY

SEQ ID NO: 14501 - protein, 9 aa, Homo sapiens
  Table A; Target 14501; HLA-A*24:02; CLDN16; ENSG00000113946; TAA
PYIKVRICF

SEQ ID NO: 14502 - protein, 8 aa, Homo sapiens
  Table A; Target 14502; HLA-B*07:02; CLDN16; ENSG00000113946; TAA
PYSLRKAY

SEQ ID NO: 14503 - protein, 11 aa, Homo sapiens
  Table A; Target 14503; HLA-A*68:01; CLDN16; ENSG00000113946; TAA
QVPETQKTDTR

SEQ ID NO: 14504 - protein, 9 aa, Homo sapiens
  Table A; Target 14504; HLA-A*23:01; CLDN16; ENSG00000113946; TAA
QYIACFFAF

SEQ ID NO: 14505 - protein, 9 aa, Homo sapiens
  Table A; Target 14505; HLA-A*24:02; CLDN16; ENSG00000113946; TAA
QYIACFFAF

SEQ ID NO: 14506 - protein, 11 aa, Homo sapiens
  Table A; Target 14506; HLA-B*15:03; CLDN16; ENSG00000113946; TAA
RKAYSAAGVSM

SEQ ID NO: 14507 - protein, 9 aa, Homo sapiens
  Table A; Target 14507; HLA-A*03:01; CLDN16; ENSG00000113946; TAA
RNYPYSLRK

SEQ ID NO: 14508 - protein, 9 aa, Homo sapiens
  Table A; Target 14508; HLA-B*07:02; CLDN16; ENSG00000113946; TAA
RPVFSHCQV

SEQ ID NO: 14509 - protein, 9 aa, Homo sapiens
  Table A; Target 14509; HLA-B*56:01; CLDN16; ENSG00000113946; TAA
RPVFSHCQV

SEQ ID NO: 14510 - protein, 9 aa, Homo sapiens
  Table A; Target 14510; HLA-B*57:01; CLDN16; ENSG00000113946; TAA
RSTLVLHNI

SEQ ID NO: 14511 - protein, 9 aa, Homo sapiens
  Table A; Target 14511; HLA-B*58:01; CLDN16; ENSG00000113946; TAA
RSTLVLHNI

SEQ ID NO: 14512 - protein, 10 aa, Homo sapiens
  Table A; Target 14512; HLA-B*57:01; CLDN16; ENSG00000113946; TAA
RSTLVLHNIF

SEQ ID NO: 14513 - protein, 9 aa, Homo sapiens
  Table A; Target 14513; HLA-C*01:02; CLDN16; ENSG00000113946; TAA
RTPLLVTAC

SEQ ID NO: 14514 - protein, 8 aa, Homo sapiens
  Table A; Target 14514; HLA-C*12:03; CLDN16; ENSG00000113946; TAA
SAAGVSMA

SEQ ID NO: 14515 - protein, 9 aa, Homo sapiens
  Table A; Target 14515; HLA-A*03:01; CLDN16; ENSG00000113946; TAA
SAAGVSMAK

SEQ ID NO: 14516 - protein, 9 aa, Homo sapiens
  Table A; Target 14516; HLA-A*03:02; CLDN16; ENSG00000113946; TAA
SAAGVSMAK

SEQ ID NO: 14517 - protein, 9 aa, Homo sapiens
  Table A; Target 14517; HLA-A*11:01; CLDN16; ENSG00000113946; TAA
SAAGVSMAK

SEQ ID NO: 14518 - protein, 9 aa, Homo sapiens
  Table A; Target 14518; HLA-A*25:01; CLDN16; ENSG00000113946; TAA
SAAGVSMAK

SEQ ID NO: 14519 - protein, 9 aa, Homo sapiens
  Table A; Target 14519; HLA-A*26:01; CLDN16; ENSG00000113946; TAA
SAAGVSMAK

SEQ ID NO: 14520 - protein, 9 aa, Homo sapiens
  Table A; Target 14520; HLA-A*30:02; CLDN16; ENSG00000113946; TAA
SAAGVSMAK

SEQ ID NO: 14521 - protein, 9 aa, Homo sapiens
  Table A; Target 14521; HLA-A*31:01; CLDN16; ENSG00000113946; TAA
SAAGVSMAK

SEQ ID NO: 14522 - protein, 9 aa, Homo sapiens
  Table A; Target 14522; HLA-A*32:01; CLDN16; ENSG00000113946; TAA
SAAGVSMAK

SEQ ID NO: 14523 - protein, 9 aa, Homo sapiens
  Table A; Target 14523; HLA-A*33:01; CLDN16; ENSG00000113946; TAA
SAAGVSMAK

SEQ ID NO: 14524 - protein, 9 aa, Homo sapiens
  Table A; Target 14524; HLA-A*33:03; CLDN16; ENSG00000113946; TAA
SAAGVSMAK

SEQ ID NO: 14525 - protein, 9 aa, Homo sapiens
  Table A; Target 14525; HLA-A*68:01; CLDN16; ENSG00000113946; TAA
SAAGVSMAK

SEQ ID NO: 14526 - protein, 9 aa, Homo sapiens
  Table A; Target 14526; HLA-A*68:02; CLDN16; ENSG00000113946; TAA
SAAGVSMAK

SEQ ID NO: 14527 - protein, 9 aa, Homo sapiens
  Table A; Target 14527; HLA-B*07:02; CLDN16; ENSG00000113946; TAA
SAAGVSMAK

SEQ ID NO: 14528 - protein, 9 aa, Homo sapiens
  Table A; Target 14528; HLA-B*13:02; CLDN16; ENSG00000113946; TAA
SAAGVSMAK

SEQ ID NO: 14529 - protein, 9 aa, Homo sapiens
  Table A; Target 14529; HLA-B*27:02; CLDN16; ENSG00000113946; TAA
SAAGVSMAK

SEQ ID NO: 14530 - protein, 9 aa, Homo sapiens
  Table A; Target 14530; HLA-B*27:05; CLDN16; ENSG00000113946; TAA
SAAGVSMAK

SEQ ID NO: 14531 - protein, 9 aa, Homo sapiens
  Table A; Target 14531; HLA-B*35:01; CLDN16; ENSG00000113946; TAA
SAAGVSMAK

SEQ ID NO: 14532 - protein, 9 aa, Homo sapiens
  Table A; Target 14532; HLA-B*35:03; CLDN16; ENSG00000113946; TAA
SAAGVSMAK

SEQ ID NO: 14533 - protein, 9 aa, Homo sapiens
  Table A; Target 14533; HLA-B*46:01; CLDN16; ENSG00000113946; TAA
SAAGVSMAK

SEQ ID NO: 14534 - protein, 9 aa, Homo sapiens
  Table A; Target 14534; HLA-B*51:01; CLDN16; ENSG00000113946; TAA
SAAGVSMAK

SEQ ID NO: 14535 - protein, 9 aa, Homo sapiens
  Table A; Target 14535; HLA-B*54:01; CLDN16; ENSG00000113946; TAA
SAAGVSMAK

SEQ ID NO: 14536 - protein, 9 aa, Homo sapiens
  Table A; Target 14536; HLA-B*56:01; CLDN16; ENSG00000113946; TAA
SAAGVSMAK

SEQ ID NO: 14537 - protein, 9 aa, Homo sapiens
  Table A; Target 14537; HLA-B*57:01; CLDN16; ENSG00000113946; TAA
SAAGVSMAK

SEQ ID NO: 14538 - protein, 9 aa, Homo sapiens
  Table A; Target 14538; HLA-B*58:01; CLDN16; ENSG00000113946; TAA
SAAGVSMAK

SEQ ID NO: 14539 - protein, 9 aa, Homo sapiens
  Table A; Target 14539; HLA-C*01:02; CLDN16; ENSG00000113946; TAA
SAAGVSMAK

SEQ ID NO: 14540 - protein, 9 aa, Homo sapiens
  Table A; Target 14540; HLA-C*02:02; CLDN16; ENSG00000113946; TAA
SAAGVSMAK

SEQ ID NO: 14541 - protein, 9 aa, Homo sapiens
  Table A; Target 14541; HLA-C*03:03; CLDN16; ENSG00000113946; TAA
SAAGVSMAK

SEQ ID NO: 14542 - protein, 9 aa, Homo sapiens
  Table A; Target 14542; HLA-C*03:04; CLDN16; ENSG00000113946; TAA
SAAGVSMAK

SEQ ID NO: 14543 - protein, 9 aa, Homo sapiens
  Table A; Target 14543; HLA-C*04:01; CLDN16; ENSG00000113946; TAA
SAAGVSMAK

SEQ ID NO: 14544 - protein, 9 aa, Homo sapiens
  Table A; Target 14544; HLA-C*05:01; CLDN16; ENSG00000113946; TAA
SAAGVSMAK

SEQ ID NO: 14545 - protein, 9 aa, Homo sapiens
  Table A; Target 14545; HLA-C*06:02; CLDN16; ENSG00000113946; TAA
SAAGVSMAK

SEQ ID NO: 14546 - protein, 9 aa, Homo sapiens
  Table A; Target 14546; HLA-C*07:01; CLDN16; ENSG00000113946; TAA
SAAGVSMAK

SEQ ID NO: 14547 - protein, 9 aa, Homo sapiens
  Table A; Target 14547; HLA-C*07:02; CLDN16; ENSG00000113946; TAA
SAAGVSMAK

SEQ ID NO: 14548 - protein, 9 aa, Homo sapiens
  Table A; Target 14548; HLA-C*07:04; CLDN16; ENSG00000113946; TAA
SAAGVSMAK

SEQ ID NO: 14549 - protein, 9 aa, Homo sapiens
  Table A; Target 14549; HLA-C*07:06; CLDN16; ENSG00000113946; TAA
SAAGVSMAK

SEQ ID NO: 14550 - protein, 9 aa, Homo sapiens
  Table A; Target 14550; HLA-C*12:03; CLDN16; ENSG00000113946; TAA
SAAGVSMAK

SEQ ID NO: 14551 - protein, 9 aa, Homo sapiens
  Table A; Target 14551; HLA-C*16:01; CLDN16; ENSG00000113946; TAA
SAAGVSMAK

SEQ ID NO: 14552 - protein, 9 aa, Homo sapiens
  Table A; Target 14552; HLA-C*16:02; CLDN16; ENSG00000113946; TAA
SAAGVSMAK

SEQ ID NO: 14553 - protein, 9 aa, Homo sapiens
  Table A; Target 14553; HLA-C*16:04; CLDN16; ENSG00000113946; TAA
SAAGVSMAK

SEQ ID NO: 14554 - protein, 10 aa, Homo sapiens
  Table A; Target 14554; HLA-C*06:02; CLDN16; ENSG00000113946; TAA
SAAGVSMAKS

SEQ ID NO: 14555 - protein, 11 aa, Homo sapiens
  Table A; Target 14555; HLA-A*25:01; CLDN16; ENSG00000113946; TAA
SAAGVSMAKSY

SEQ ID NO: 14556 - protein, 11 aa, Homo sapiens
  Table A; Target 14556; HLA-A*26:01; CLDN16; ENSG00000113946; TAA
SAAGVSMAKSY

SEQ ID NO: 14557 - protein, 11 aa, Homo sapiens
  Table A; Target 14557; HLA-A*29:02; CLDN16; ENSG00000113946; TAA
SAAGVSMAKSY

SEQ ID NO: 14558 - protein, 11 aa, Homo sapiens
  Table A; Target 14558; HLA-A*30:02; CLDN16; ENSG00000113946; TAA
SAAGVSMAKSY

SEQ ID NO: 14559 - protein, 11 aa, Homo sapiens
  Table A; Target 14559; HLA-A*32:01; CLDN16; ENSG00000113946; TAA
SAAGVSMAKSY

SEQ ID NO: 14560 - protein, 11 aa, Homo sapiens
  Table A; Target 14560; HLA-A*68:01; CLDN16; ENSG00000113946; TAA
SAAGVSMAKSY

SEQ ID NO: 14561 - protein, 11 aa, Homo sapiens
  Table A; Target 14561; HLA-B*15:01; CLDN16; ENSG00000113946; TAA
SAAGVSMAKSY

SEQ ID NO: 14562 - protein, 11 aa, Homo sapiens
  Table A; Target 14562; HLA-B*27:05; CLDN16; ENSG00000113946; TAA
SAAGVSMAKSY

SEQ ID NO: 14563 - protein, 11 aa, Homo sapiens
  Table A; Target 14563; HLA-B*35:01; CLDN16; ENSG00000113946; TAA
SAAGVSMAKSY

SEQ ID NO: 14564 - protein, 11 aa, Homo sapiens
  Table A; Target 14564; HLA-B*44:02; CLDN16; ENSG00000113946; TAA
SAAGVSMAKSY

SEQ ID NO: 14565 - protein, 11 aa, Homo sapiens
  Table A; Target 14565; HLA-B*44:03; CLDN16; ENSG00000113946; TAA
SAAGVSMAKSY

SEQ ID NO: 14566 - protein, 11 aa, Homo sapiens
  Table A; Target 14566; HLA-B*46:01; CLDN16; ENSG00000113946; TAA
SAAGVSMAKSY

SEQ ID NO: 14567 - protein, 11 aa, Homo sapiens
  Table A; Target 14567; HLA-B*55:01; CLDN16; ENSG00000113946; TAA
SAAGVSMAKSY

SEQ ID NO: 14568 - protein, 11 aa, Homo sapiens
  Table A; Target 14568; HLA-B*58:01; CLDN16; ENSG00000113946; TAA
SAAGVSMAKSY

SEQ ID NO: 14569 - protein, 11 aa, Homo sapiens
  Table A; Target 14569; HLA-C*02:02; CLDN16; ENSG00000113946; TAA
SAAGVSMAKSY

SEQ ID NO: 14570 - protein, 11 aa, Homo sapiens
  Table A; Target 14570; HLA-C*03:03; CLDN16; ENSG00000113946; TAA
SAAGVSMAKSY

SEQ ID NO: 14571 - protein, 11 aa, Homo sapiens
  Table A; Target 14571; HLA-C*03:04; CLDN16; ENSG00000113946; TAA
SAAGVSMAKSY

SEQ ID NO: 14572 - protein, 11 aa, Homo sapiens
  Table A; Target 14572; HLA-C*04:01; CLDN16; ENSG00000113946; TAA
SAAGVSMAKSY

SEQ ID NO: 14573 - protein, 11 aa, Homo sapiens
  Table A; Target 14573; HLA-C*06:02; CLDN16; ENSG00000113946; TAA
SAAGVSMAKSY

SEQ ID NO: 14574 - protein, 11 aa, Homo sapiens
  Table A; Target 14574; HLA-C*07:01; CLDN16; ENSG00000113946; TAA
SAAGVSMAKSY

SEQ ID NO: 14575 - protein, 11 aa, Homo sapiens
  Table A; Target 14575; HLA-C*07:04; CLDN16; ENSG00000113946; TAA
SAAGVSMAKSY

SEQ ID NO: 14576 - protein, 11 aa, Homo sapiens
  Table A; Target 14576; HLA-C*07:06; CLDN16; ENSG00000113946; TAA
SAAGVSMAKSY

SEQ ID NO: 14577 - protein, 11 aa, Homo sapiens
  Table A; Target 14577; HLA-C*12:03; CLDN16; ENSG00000113946; TAA
SAAGVSMAKSY

SEQ ID NO: 14578 - protein, 11 aa, Homo sapiens
  Table A; Target 14578; HLA-C*16:01; CLDN16; ENSG00000113946; TAA
SAAGVSMAKSY

SEQ ID NO: 14579 - protein, 11 aa, Homo sapiens
  Table A; Target 14579; HLA-C*16:02; CLDN16; ENSG00000113946; TAA
SAAGVSMAKSY

SEQ ID NO: 14580 - protein, 11 aa, Homo sapiens
  Table A; Target 14580; HLA-C*16:04; CLDN16; ENSG00000113946; TAA
SAAGVSMAKSY

SEQ ID NO: 14581 - protein, 10 aa, Homo sapiens
  Table A; Target 14581; HLA-A*25:01; CLDN16; ENSG00000113946; TAA
SAGFLIVATW

SEQ ID NO: 14582 - protein, 10 aa, Homo sapiens
  Table A; Target 14582; HLA-B*44:02; CLDN16; ENSG00000113946; TAA
SAGFLIVATW

SEQ ID NO: 14583 - protein, 10 aa, Homo sapiens
  Table A; Target 14583; HLA-B*44:03; CLDN16; ENSG00000113946; TAA
SAGFLIVATW

SEQ ID NO: 14584 - protein, 10 aa, Homo sapiens
  Table A; Target 14584; HLA-B*57:01; CLDN16; ENSG00000113946; TAA
SAGFLIVATW

SEQ ID NO: 14585 - protein, 9 aa, Homo sapiens
  Table A; Target 14585; HLA-A*11:01; CLDN16; ENSG00000113946; TAA
SAPRTETAK

SEQ ID NO: 14586 - protein, 9 aa, Homo sapiens
  Table A; Target 14586; HLA-C*01:02; CLDN16; ENSG00000113946; TAA
SAPRTETAK

SEQ ID NO: 14587 - protein, 9 aa, Homo sapiens
  Table A; Target 14587; HLA-A*03:01; CLDN16; ENSG00000113946; TAA
SILAEHPLK

SEQ ID NO: 14588 - protein, 9 aa, Homo sapiens
  Table A; Target 14588; HLA-A*03:02; CLDN16; ENSG00000113946; TAA
SILAEHPLK

SEQ ID NO: 14589 - protein, 9 aa, Homo sapiens
  Table A; Target 14589; HLA-A*11:01; CLDN16; ENSG00000113946; TAA
SILAEHPLK

SEQ ID NO: 14590 - protein, 10 aa, Homo sapiens
  Table A; Target 14590; HLA-A*02:01; CLDN16; ENSG00000113946; TAA
SILAEHPLKL

SEQ ID NO: 14591 - protein, 10 aa, Homo sapiens
  Table A; Target 14591; HLA-A*02:03; CLDN16; ENSG00000113946; TAA
SILAEHPLKL

SEQ ID NO: 14592 - protein, 10 aa, Homo sapiens
  Table A; Target 14592; HLA-A*02:04; CLDN16; ENSG00000113946; TAA
SILAEHPLKL

SEQ ID NO: 14593 - protein, 10 aa, Homo sapiens
  Table A; Target 14593; HLA-A*03:01; CLDN16; ENSG00000113946; TAA
SILAEHPLKL

SEQ ID NO: 14594 - protein, 10 aa, Homo sapiens
  Table A; Target 14594; HLA-A*03:01; CLDN16; ENSG00000113946; TAA
SMAKSYSAPR

SEQ ID NO: 14595 - protein, 10 aa, Homo sapiens
  Table A; Target 14595; HLA-C*07:06; CLDN16; ENSG00000113946; TAA
SMAKSYSAPR

SEQ ID NO: 14596 - protein, 8 aa, Homo sapiens
  Table A; Target 14596; HLA-C*06:02; CLDN16; ENSG00000113946; TAA
SRHLQQGV

SEQ ID NO: 14597 - protein, 9 aa, Homo sapiens
  Table A; Target 14597; HLA-B*27:05; CLDN16; ENSG00000113946; TAA
SRHLQQGVR

SEQ ID NO: 14598 - protein, 10 aa, Homo sapiens
  Table A; Target 14598; HLA-B*27:05; CLDN16; ENSG00000113946; TAA
SRHLQQGVRK

SEQ ID NO: 14599 - protein, 9 aa, Homo sapiens
  Table A; Target 14599; HLA-B*27:05; CLDN16; ENSG00000113946; TAA
SRTPLLVTA

SEQ ID NO: 14600 - protein, 9 aa, Homo sapiens
  Table A; Target 14600; HLA-B*57:01; CLDN16; ENSG00000113946; TAA
STLVLHNIF

SEQ ID NO: 14601 - protein, 10 aa, Homo sapiens
  Table A; Target 14601; HLA-A*68:02; CLDN16; ENSG00000113946; TAA
STLVLHNIFL

SEQ ID NO: 14602 - protein, 9 aa, Homo sapiens
  Table A; Target 14602; HLA-A*29:02; CLDN16; ENSG00000113946; TAA
SVWYAVDVY

SEQ ID NO: 14603 - protein, 9 aa, Homo sapiens
  Table A; Target 14603; HLA-A*30:02; CLDN16; ENSG00000113946; TAA
SVWYAVDVY

SEQ ID NO: 14604 - protein, 9 aa, Homo sapiens
  Table A; Target 14604; HLA-B*35:01; CLDN16; ENSG00000113946; TAA
SVWYAVDVY

SEQ ID NO: 14605 - protein, 10 aa, Homo sapiens
  Table A; Target 14605; HLA-A*02:07; CLDN16; ENSG00000113946; TAA
SVWYAVDVYV

SEQ ID NO: 14606 - protein, 10 aa, Homo sapiens
  Table A; Target 14606; HLA-A*68:02; CLDN16; ENSG00000113946; TAA
SVWYAVDVYV

SEQ ID NO: 14607 - protein, 10 aa, Homo sapiens
  Table A; Target 14607; HLA-C*14:02; CLDN16; ENSG00000113946; TAA
SYSAPRTETA

SEQ ID NO: 14608 - protein, 11 aa, Homo sapiens
  Table A; Target 14608; HLA-C*07:02; CLDN16; ENSG00000113946; TAA
SYSAPRTETAK

SEQ ID NO: 14609 - protein, 8 aa, Homo sapiens
  Table A; Target 14609; HLA-C*07:01; CLDN16; ENSG00000113946; TAA
TACLYYSY

SEQ ID NO: 14610 - protein, 8 aa, Homo sapiens
  Table A; Target 14610; HLA-C*05:01; CLDN16; ENSG00000113946; TAA
TADILAGF

SEQ ID NO: 14611 - protein, 10 aa, Homo sapiens
  Table A; Target 14611; HLA-C*05:01; CLDN16; ENSG00000113946; TAA
TADILAGFGF

SEQ ID NO: 14612 - protein, 10 aa, Homo sapiens
  Table A; Target 14612; HLA-A*68:01; CLDN16; ENSG00000113946; TAA
TAKMYAVDTR

SEQ ID NO: 14613 - protein, 9 aa, Homo sapiens
  Table A; Target 14613; HLA-B*35:03; CLDN16; ENSG00000113946; TAA
TCDEYDSIL

SEQ ID NO: 14614 - protein, 9 aa, Homo sapiens
  Table A; Target 14614; HLA-C*05:01; CLDN16; ENSG00000113946; TAA
TCDEYDSIL

SEQ ID NO: 14615 - protein, 8 aa, Homo sapiens
  Table A; Target 14615; HLA-C*06:02; CLDN16; ENSG00000113946; TAA
TETAKMYA

SEQ ID NO: 14616 - protein, 9 aa, Homo sapiens
  Table A; Target 14616; HLA-A*30:01; CLDN16; ENSG00000113946; TAA
TETAKMYAV

SEQ ID NO: 14617 - protein, 9 aa, Homo sapiens
  Table A; Target 14617; HLA-B*08:01; CLDN16; ENSG00000113946; TAA
TETAKMYAV

SEQ ID NO: 14618 - protein, 9 aa, Homo sapiens
  Table A; Target 14618; HLA-B*13:02; CLDN16; ENSG00000113946; TAA
TETAKMYAV

SEQ ID NO: 14619 - protein, 9 aa, Homo sapiens
  Table A; Target 14619; HLA-B*18:01; CLDN16; ENSG00000113946; TAA
TETAKMYAV

SEQ ID NO: 14620 - protein, 9 aa, Homo sapiens
  Table A; Target 14620; HLA-B*37:01; CLDN16; ENSG00000113946; TAA
TETAKMYAV

SEQ ID NO: 14621 - protein, 9 aa, Homo sapiens
  Table A; Target 14621; HLA-B*40:01; CLDN16; ENSG00000113946; TAA
TETAKMYAV

SEQ ID NO: 14622 - protein, 9 aa, Homo sapiens
  Table A; Target 14622; HLA-B*40:02; CLDN16; ENSG00000113946; TAA
TETAKMYAV

SEQ ID NO: 14623 - protein, 9 aa, Homo sapiens
  Table A; Target 14623; HLA-B*44:03; CLDN16; ENSG00000113946; TAA
TETAKMYAV

SEQ ID NO: 14624 - protein, 9 aa, Homo sapiens
  Table A; Target 14624; HLA-B*49:01; CLDN16; ENSG00000113946; TAA
TETAKMYAV

SEQ ID NO: 14625 - protein, 9 aa, Homo sapiens
  Table A; Target 14625; HLA-C*16:02; CLDN16; ENSG00000113946; TAA
TETAKMYAV

SEQ ID NO: 14626 - protein, 9 aa, Homo sapiens
  Table A; Target 14626; HLA-C*01:02; CLDN16; ENSG00000113946; TAA
TLLIAGTPG

SEQ ID NO: 14627 - protein, 9 aa, Homo sapiens
  Table A; Target 14627; HLA-A*02:01; CLDN16; ENSG00000113946; TAA
TLLLGLDCV

SEQ ID NO: 14628 - protein, 9 aa, Homo sapiens
  Table A; Target 14628; HLA-A*02:04; CLDN16; ENSG00000113946; TAA
TLLLGLDCV

SEQ ID NO: 14629 - protein, 9 aa, Homo sapiens
  Table A; Target 14629; HLA-A*02:01; CLDN16; ENSG00000113946; TAA
TLVLHNIFL

SEQ ID NO: 14630 - protein, 9 aa, Homo sapiens
  Table A; Target 14630; HLA-A*02:03; CLDN16; ENSG00000113946; TAA
TLVLHNIFL

SEQ ID NO: 14631 - protein, 9 aa, Homo sapiens
  Table A; Target 14631; HLA-A*02:04; CLDN16; ENSG00000113946; TAA
TLVLHNIFL

SEQ ID NO: 14632 - protein, 9 aa, Homo sapiens
  Table A; Target 14632; HLA-A*02:03; CLDN16; ENSG00000113946; TAA
TMRDLLQYI

SEQ ID NO: 14633 - protein, 9 aa, Homo sapiens
  Table A; Target 14633; HLA-A*02:04; CLDN16; ENSG00000113946; TAA
TMRDLLQYI

SEQ ID NO: 14634 - protein, 8 aa, Homo sapiens
  Table A; Target 14634; HLA-B*56:01; CLDN16; ENSG00000113946; TAA
TPGIIGSV

SEQ ID NO: 14635 - protein, 9 aa, Homo sapiens
  Table A; Target 14635; HLA-A*25:01; CLDN16; ENSG00000113946; TAA
TPGIIGSVW

SEQ ID NO: 14636 - protein, 9 aa, Homo sapiens
  Table A; Target 14636; HLA-B*07:02; CLDN16; ENSG00000113946; TAA
TPGIIGSVW

SEQ ID NO: 14637 - protein, 9 aa, Homo sapiens
  Table A; Target 14637; HLA-B*35:01; CLDN16; ENSG00000113946; TAA
TPGIIGSVW

SEQ ID NO: 14638 - protein, 9 aa, Homo sapiens
  Table A; Target 14638; HLA-B*35:03; CLDN16; ENSG00000113946; TAA
TPGIIGSVW

SEQ ID NO: 14639 - protein, 9 aa, Homo sapiens
  Table A; Target 14639; HLA-B*38:01; CLDN16; ENSG00000113946; TAA
TPGIIGSVW

SEQ ID NO: 14640 - protein, 9 aa, Homo sapiens
  Table A; Target 14640; HLA-B*44:02; CLDN16; ENSG00000113946; TAA
TPGIIGSVW

SEQ ID NO: 14641 - protein, 9 aa, Homo sapiens
  Table A; Target 14641; HLA-B*44:03; CLDN16; ENSG00000113946; TAA
TPGIIGSVW

SEQ ID NO: 14642 - protein, 9 aa, Homo sapiens
  Table A; Target 14642; HLA-B*57:01; CLDN16; ENSG00000113946; TAA
TPGIIGSVW

SEQ ID NO: 14643 - protein, 9 aa, Homo sapiens
  Table A; Target 14643; HLA-B*58:01; CLDN16; ENSG00000113946; TAA
TPGIIGSVW

SEQ ID NO: 14644 - protein, 9 aa, Homo sapiens
  Table A; Target 14644; HLA-C*07:02; CLDN16; ENSG00000113946; TAA
TPGIIGSVW

SEQ ID NO: 14645 - protein, 9 aa, Homo sapiens
  Table A; Target 14645; HLA-C*07:06; CLDN16; ENSG00000113946; TAA
TPGIIGSVW

SEQ ID NO: 14646 - protein, 8 aa, Homo sapiens
  Table A; Target 14646; HLA-B*54:01; CLDN16; ENSG00000113946; TAA
TPLLVTAC

SEQ ID NO: 14647 - protein, 8 aa, Homo sapiens
  Table A; Target 14647; HLA-B*55:01; CLDN16; ENSG00000113946; TAA
TPLLVTAC

SEQ ID NO: 14648 - protein, 8 aa, Homo sapiens
  Table A; Target 14648; HLA-B*56:01; CLDN16; ENSG00000113946; TAA
TPLLVTAC

SEQ ID NO: 14649 - protein, 9 aa, Homo sapiens
  Table A; Target 14649; HLA-B*07:02; CLDN16; ENSG00000113946; TAA
TPLLVTACL

SEQ ID NO: 14650 - protein, 9 aa, Homo sapiens
  Table A; Target 14650; HLA-B*35:01; CLDN16; ENSG00000113946; TAA
TPLLVTACL

SEQ ID NO: 14651 - protein, 9 aa, Homo sapiens
  Table A; Target 14651; HLA-B*35:03; CLDN16; ENSG00000113946; TAA
TPLLVTACL

SEQ ID NO: 14652 - protein, 9 aa, Homo sapiens
  Table A; Target 14652; HLA-B*54:01; CLDN16; ENSG00000113946; TAA
TPLLVTACL

SEQ ID NO: 14653 - protein, 9 aa, Homo sapiens
  Table A; Target 14653; HLA-B*56:01; CLDN16; ENSG00000113946; TAA
TPLLVTACL

SEQ ID NO: 14654 - protein, 9 aa, Homo sapiens
  Table A; Target 14654; HLA-C*07:02; CLDN16; ENSG00000113946; TAA
TPLLVTACL

SEQ ID NO: 14655 - protein, 10 aa, Homo sapiens
  Table A; Target 14655; HLA-B*35:01; CLDN16; ENSG00000113946; TAA
TPLLVTACLY

SEQ ID NO: 14656 - protein, 10 aa, Homo sapiens
  Table A; Target 14656; HLA-C*07:01; CLDN16; ENSG00000113946; TAA
TPLLVTACLY

SEQ ID NO: 14657 - protein, 9 aa, Homo sapiens
  Table A; Target 14657; HLA-A*32:01; CLDN16; ENSG00000113946; TAA
TQKTDTRHL

SEQ ID NO: 14658 - protein, 8 aa, Homo sapiens
  Table A; Target 14658; HLA-B*51:01; CLDN16; ENSG00000113946; TAA
TSRTPLLV

SEQ ID NO: 14659 - protein, 10 aa, Homo sapiens
  Table A; Target 14659; HLA-A*31:01; CLDN16; ENSG00000113946; TAA
TSRTPLLVTA

SEQ ID NO: 14660 - protein, 10 aa, Homo sapiens
  Table A; Target 14660; HLA-B*40:02; CLDN16; ENSG00000113946; TAA
TSRTPLLVTA

SEQ ID NO: 14661 - protein, 10 aa, Homo sapiens
  Table A; Target 14661; HLA-B*54:01; CLDN16; ENSG00000113946; TAA
TSRTPLLVTA

SEQ ID NO: 14662 - protein, 10 aa, Homo sapiens
  Table A; Target 14662; HLA-B*56:01; CLDN16; ENSG00000113946; TAA
TSRTPLLVTA

SEQ ID NO: 14663 - protein, 10 aa, Homo sapiens
  Table A; Target 14663; HLA-C*06:02; CLDN16; ENSG00000113946; TAA
TSRTPLLVTA

SEQ ID NO: 14664 - protein, 10 aa, Homo sapiens
  Table A; Target 14664; HLA-C*07:02; CLDN16; ENSG00000113946; TAA
TSRTPLLVTA

SEQ ID NO: 14665 - protein, 8 aa, Homo sapiens
  Table A; Target 14665; HLA-A*23:01; CLDN16; ENSG00000113946; TAA
VAGATLLI

SEQ ID NO: 14666 - protein, 8 aa, Homo sapiens
  Table A; Target 14666; HLA-B*13:02; CLDN16; ENSG00000113946; TAA
VAGATLLI

SEQ ID NO: 14667 - protein, 8 aa, Homo sapiens
  Table A; Target 14667; HLA-B*51:01; CLDN16; ENSG00000113946; TAA
VAGATLLI

SEQ ID NO: 14668 - protein, 8 aa, Homo sapiens
  Table A; Target 14668; HLA-C*07:01; CLDN16; ENSG00000113946; TAA
VAGATLLI

SEQ ID NO: 14669 - protein, 10 aa, Homo sapiens
  Table A; Target 14669; HLA-A*30:01; CLDN16; ENSG00000113946; TAA
VDVYVERSTL

SEQ ID NO: 14670 - protein, 10 aa, Homo sapiens
  Table A; Target 14670; HLA-B*07:02; CLDN16; ENSG00000113946; TAA
VDVYVERSTL

SEQ ID NO: 14671 - protein, 10 aa, Homo sapiens
  Table A; Target 14671; HLA-B*40:02; CLDN16; ENSG00000113946; TAA
VDVYVERSTL

SEQ ID NO: 14672 - protein, 8 aa, Homo sapiens
  Table A; Target 14672; HLA-B*18:01; CLDN16; ENSG00000113946; TAA
VERSTLVL

SEQ ID NO: 14673 - protein, 8 aa, Homo sapiens
  Table A; Target 14673; HLA-B*40:02; CLDN16; ENSG00000113946; TAA
VERSTLVL

SEQ ID NO: 14674 - protein, 9 aa, Homo sapiens
  Table A; Target 14674; HLA-A*24:02; CLDN16; ENSG00000113946; TAA
VGPERNYPY

SEQ ID NO: 14675 - protein, 9 aa, Homo sapiens
  Table A; Target 14675; HLA-A*29:02; CLDN16; ENSG00000113946; TAA
VGPERNYPY

SEQ ID NO: 14676 - protein, 9 aa, Homo sapiens
  Table A; Target 14676; HLA-A*30:02; CLDN16; ENSG00000113946; TAA
VGPERNYPY

SEQ ID NO: 14677 - protein, 9 aa, Homo sapiens
  Table A; Target 14677; HLA-B*07:02; CLDN16; ENSG00000113946; TAA
VGPERNYPY

SEQ ID NO: 14678 - protein, 9 aa, Homo sapiens
  Table A; Target 14678; HLA-B*08:01; CLDN16; ENSG00000113946; TAA
VGPERNYPY

SEQ ID NO: 14679 - protein, 9 aa, Homo sapiens
  Table A; Target 14679; HLA-B*15:01; CLDN16; ENSG00000113946; TAA
VGPERNYPY

SEQ ID NO: 14680 - protein, 9 aa, Homo sapiens
  Table A; Target 14680; HLA-B*15:03; CLDN16; ENSG00000113946; TAA
VGPERNYPY

SEQ ID NO: 14681 - protein, 9 aa, Homo sapiens
  Table A; Target 14681; HLA-B*46:01; CLDN16; ENSG00000113946; TAA
VGPERNYPY

SEQ ID NO: 14682 - protein, 9 aa, Homo sapiens
  Table A; Target 14682; HLA-C*01:02; CLDN16; ENSG00000113946; TAA
VGPERNYPY

SEQ ID NO: 14683 - protein, 9 aa, Homo sapiens
  Table A; Target 14683; HLA-C*02:02; CLDN16; ENSG00000113946; TAA
VGPERNYPY

SEQ ID NO: 14684 - protein, 9 aa, Homo sapiens
  Table A; Target 14684; HLA-C*06:02; CLDN16; ENSG00000113946; TAA
VGPERNYPY

SEQ ID NO: 14685 - protein, 9 aa, Homo sapiens
  Table A; Target 14685; HLA-C*07:01; CLDN16; ENSG00000113946; TAA
VGPERNYPY

SEQ ID NO: 14686 - protein, 9 aa, Homo sapiens
  Table A; Target 14686; HLA-C*07:02; CLDN16; ENSG00000113946; TAA
VGPERNYPY

SEQ ID NO: 14687 - protein, 9 aa, Homo sapiens
  Table A; Target 14687; HLA-C*07:04; CLDN16; ENSG00000113946; TAA
VGPERNYPY

SEQ ID NO: 14688 - protein, 9 aa, Homo sapiens
  Table A; Target 14688; HLA-C*12:03; CLDN16; ENSG00000113946; TAA
VGPERNYPY

SEQ ID NO: 14689 - protein, 9 aa, Homo sapiens
  Table A; Target 14689; HLA-C*14:02; CLDN16; ENSG00000113946; TAA
VGPERNYPY

SEQ ID NO: 14690 - protein, 9 aa, Homo sapiens
  Table A; Target 14690; HLA-C*16:01; CLDN16; ENSG00000113946; TAA
VGPERNYPY

SEQ ID NO: 14691 - protein, 11 aa, Homo sapiens
  Table A; Target 14691; HLA-A*02:07; CLDN16; ENSG00000113946; TAA
VGPERNYPYSL

SEQ ID NO: 14692 - protein, 9 aa, Homo sapiens
  Table A; Target 14692; HLA-B*15:03; CLDN16; ENSG00000113946; TAA
VKFLPDEPY

SEQ ID NO: 14693 - protein, 9 aa, Homo sapiens
  Table A; Target 14693; HLA-A*02:01; CLDN16; ENSG00000113946; TAA
VLHNIFLGI

SEQ ID NO: 14694 - protein, 9 aa, Homo sapiens
  Table A; Target 14694; HLA-A*02:03; CLDN16; ENSG00000113946; TAA
VLHNIFLGI

SEQ ID NO: 14695 - protein, 9 aa, Homo sapiens
  Table A; Target 14695; HLA-A*02:04; CLDN16; ENSG00000113946; TAA
VLHNIFLGI

SEQ ID NO: 14696 - protein, 9 aa, Homo sapiens
  Table A; Target 14696; HLA-A*02:07; CLDN16; ENSG00000113946; TAA
VLHNIFLGI

SEQ ID NO: 14697 - protein, 9 aa, Homo sapiens
  Table A; Target 14697; HLA-A*24:02; CLDN16; ENSG00000113946; TAA
VLHNIFLGI

SEQ ID NO: 14698 - protein, 9 aa, Homo sapiens
  Table A; Target 14698; HLA-A*68:02; CLDN16; ENSG00000113946; TAA
VLHNIFLGI

SEQ ID NO: 14699 - protein, 9 aa, Homo sapiens
  Table A; Target 14699; HLA-B*13:02; CLDN16; ENSG00000113946; TAA
VLHNIFLGI

SEQ ID NO: 14700 - protein, 9 aa, Homo sapiens
  Table A; Target 14700; HLA-B*08:01; CLDN16; ENSG00000113946; TAA
VSMAKSYSA

SEQ ID NO: 14701 - protein, 9 aa, Homo sapiens
  Table A; Target 14701; HLA-B*54:01; CLDN16; ENSG00000113946; TAA
VSMAKSYSA

SEQ ID NO: 14702 - protein, 9 aa, Homo sapiens
  Table A; Target 14702; HLA-B*56:01; CLDN16; ENSG00000113946; TAA
VSMAKSYSA

SEQ ID NO: 14703 - protein, 11 aa, Homo sapiens
  Table A; Target 14703; HLA-A*31:01; CLDN16; ENSG00000113946; TAA
VSMAKSYSAPR

SEQ ID NO: 14704 - protein, 11 aa, Homo sapiens
  Table A; Target 14704; HLA-A*33:01; CLDN16; ENSG00000113946; TAA
VSMAKSYSAPR

SEQ ID NO: 14705 - protein, 9 aa, Homo sapiens
  Table A; Target 14705; HLA-A*01:01; CLDN16; ENSG00000113946; TAA
VTACLYYSY

SEQ ID NO: 14706 - protein, 9 aa, Homo sapiens
  Table A; Target 14706; HLA-A*29:02; CLDN16; ENSG00000113946; TAA
VTACLYYSY

SEQ ID NO: 14707 - protein, 9 aa, Homo sapiens
  Table A; Target 14707; HLA-A*30:02; CLDN16; ENSG00000113946; TAA
VTACLYYSY

SEQ ID NO: 14708 - protein, 8 aa, Homo sapiens
  Table A; Target 14708; HLA-B*13:02; CLDN16; ENSG00000113946; TAA
VVTRALMI

SEQ ID NO: 14709 - protein, 8 aa, Homo sapiens
  Table A; Target 14709; HLA-B*51:01; CLDN16; ENSG00000113946; TAA
VVTRALMI

SEQ ID NO: 14710 - protein, 10 aa, Homo sapiens
  Table A; Target 14710; HLA-B*54:01; CLDN16; ENSG00000113946; TAA
VVTRALMITA

SEQ ID NO: 14711 - protein, 10 aa, Homo sapiens
  Table A; Target 14711; HLA-B*56:01; CLDN16; ENSG00000113946; TAA
VVTRALMITA

SEQ ID NO: 14712 - protein, 8 aa, Homo sapiens
  Table A; Target 14712; HLA-A*23:01; CLDN16; ENSG00000113946; TAA
VYVERSTL

SEQ ID NO: 14713 - protein, 8 aa, Homo sapiens
  Table A; Target 14713; HLA-A*24:02; CLDN16; ENSG00000113946; TAA
VYVERSTL

SEQ ID NO: 14714 - protein, 8 aa, Homo sapiens
  Table A; Target 14714; HLA-A*32:01; CLDN16; ENSG00000113946; TAA
VYVERSTL

SEQ ID NO: 14715 - protein, 8 aa, Homo sapiens
  Table A; Target 14715; HLA-B*07:02; CLDN16; ENSG00000113946; TAA
VYVERSTL

SEQ ID NO: 14716 - protein, 8 aa, Homo sapiens
  Table A; Target 14716; HLA-B*08:01; CLDN16; ENSG00000113946; TAA
VYVERSTL

SEQ ID NO: 14717 - protein, 8 aa, Homo sapiens
  Table A; Target 14717; HLA-B*15:03; CLDN16; ENSG00000113946; TAA
VYVERSTL

SEQ ID NO: 14718 - protein, 8 aa, Homo sapiens
  Table A; Target 14718; HLA-B*46:01; CLDN16; ENSG00000113946; TAA
VYVERSTL

SEQ ID NO: 14719 - protein, 8 aa, Homo sapiens
  Table A; Target 14719; HLA-C*01:02; CLDN16; ENSG00000113946; TAA
VYVERSTL

SEQ ID NO: 14720 - protein, 8 aa, Homo sapiens
  Table A; Target 14720; HLA-C*03:04; CLDN16; ENSG00000113946; TAA
VYVERSTL

SEQ ID NO: 14721 - protein, 8 aa, Homo sapiens
  Table A; Target 14721; HLA-C*04:01; CLDN16; ENSG00000113946; TAA
VYVERSTL

SEQ ID NO: 14722 - protein, 8 aa, Homo sapiens
  Table A; Target 14722; HLA-C*07:01; CLDN16; ENSG00000113946; TAA
VYVERSTL

SEQ ID NO: 14723 - protein, 8 aa, Homo sapiens
  Table A; Target 14723; HLA-C*07:02; CLDN16; ENSG00000113946; TAA
VYVERSTL

SEQ ID NO: 14724 - protein, 8 aa, Homo sapiens
  Table A; Target 14724; HLA-C*14:02; CLDN16; ENSG00000113946; TAA
VYVERSTL

SEQ ID NO: 14725 - protein, 8 aa, Homo sapiens
  Table A; Target 14725; HLA-C*16:01; CLDN16; ENSG00000113946; TAA
VYVERSTL

SEQ ID NO: 14726 - protein, 8 aa, Homo sapiens
  Table A; Target 14726; HLA-C*16:02; CLDN16; ENSG00000113946; TAA
VYVERSTL

SEQ ID NO: 14727 - protein, 9 aa, Homo sapiens
  Table A; Target 14727; HLA-A*23:01; CLDN16; ENSG00000113946; TAA
VYVERSTLV

SEQ ID NO: 14728 - protein, 9 aa, Homo sapiens
  Table A; Target 14728; HLA-A*24:02; CLDN16; ENSG00000113946; TAA
VYVERSTLV

SEQ ID NO: 14729 - protein, 9 aa, Homo sapiens
  Table A; Target 14729; HLA-C*04:01; CLDN16; ENSG00000113946; TAA
VYVERSTLV

SEQ ID NO: 14730 - protein, 9 aa, Homo sapiens
  Table A; Target 14730; HLA-C*14:02; CLDN16; ENSG00000113946; TAA
VYVERSTLV

SEQ ID NO: 14731 - protein, 9 aa, Homo sapiens
  Table A; Target 14731; HLA-C*16:01; CLDN16; ENSG00000113946; TAA
VYVERSTLV

SEQ ID NO: 14732 - protein, 9 aa, Homo sapiens
  Table A; Target 14732; HLA-C*16:02; CLDN16; ENSG00000113946; TAA
VYVERSTLV

SEQ ID NO: 14733 - protein, 10 aa, Homo sapiens
  Table A; Target 14733; HLA-A*23:01; CLDN16; ENSG00000113946; TAA
VYVERSTLVL

SEQ ID NO: 14734 - protein, 10 aa, Homo sapiens
  Table A; Target 14734; HLA-A*24:02; CLDN16; ENSG00000113946; TAA
VYVERSTLVL

SEQ ID NO: 14735 - protein, 10 aa, Homo sapiens
  Table A; Target 14735; HLA-C*14:02; CLDN16; ENSG00000113946; TAA
VYVERSTLVL

SEQ ID NO: 14736 - protein, 8 aa, Homo sapiens
  Table A; Target 14736; HLA-B*18:01; CLDN16; ENSG00000113946; TAA
WECVTNAF

SEQ ID NO: 14737 - protein, 8 aa, Homo sapiens
  Table A; Target 14737; HLA-C*12:03; CLDN16; ENSG00000113946; TAA
YAVDVYVE

SEQ ID NO: 14738 - protein, 9 aa, Homo sapiens
  Table A; Target 14738; HLA-A*02:07; CLDN16; ENSG00000113946; TAA
YAVDVYVER

SEQ ID NO: 14739 - protein, 9 aa, Homo sapiens
  Table A; Target 14739; HLA-A*11:01; CLDN16; ENSG00000113946; TAA
YAVDVYVER

SEQ ID NO: 14740 - protein, 9 aa, Homo sapiens
  Table A; Target 14740; HLA-A*25:01; CLDN16; ENSG00000113946; TAA
YAVDVYVER

SEQ ID NO: 14741 - protein, 9 aa, Homo sapiens
  Table A; Target 14741; HLA-A*26:01; CLDN16; ENSG00000113946; TAA
YAVDVYVER

SEQ ID NO: 14742 - protein, 9 aa, Homo sapiens
  Table A; Target 14742; HLA-A*31:01; CLDN16; ENSG00000113946; TAA
YAVDVYVER

SEQ ID NO: 14743 - protein, 9 aa, Homo sapiens
  Table A; Target 14743; HLA-A*33:01; CLDN16; ENSG00000113946; TAA
YAVDVYVER

SEQ ID NO: 14744 - protein, 9 aa, Homo sapiens
  Table A; Target 14744; HLA-A*33:03; CLDN16; ENSG00000113946; TAA
YAVDVYVER

SEQ ID NO: 14745 - protein, 9 aa, Homo sapiens
  Table A; Target 14745; HLA-A*68:01; CLDN16; ENSG00000113946; TAA
YAVDVYVER

SEQ ID NO: 14746 - protein, 9 aa, Homo sapiens
  Table A; Target 14746; HLA-A*68:02; CLDN16; ENSG00000113946; TAA
YAVDVYVER

SEQ ID NO: 14747 - protein, 9 aa, Homo sapiens
  Table A; Target 14747; HLA-B*27:02; CLDN16; ENSG00000113946; TAA
YAVDVYVER

SEQ ID NO: 14748 - protein, 9 aa, Homo sapiens
  Table A; Target 14748; HLA-B*27:05; CLDN16; ENSG00000113946; TAA
YAVDVYVER

SEQ ID NO: 14749 - protein, 9 aa, Homo sapiens
  Table A; Target 14749; HLA-B*35:01; CLDN16; ENSG00000113946; TAA
YAVDVYVER

SEQ ID NO: 14750 - protein, 9 aa, Homo sapiens
  Table A; Target 14750; HLA-B*35:03; CLDN16; ENSG00000113946; TAA
YAVDVYVER

SEQ ID NO: 14751 - protein, 9 aa, Homo sapiens
  Table A; Target 14751; HLA-B*39:01; CLDN16; ENSG00000113946; TAA
YAVDVYVER

SEQ ID NO: 14752 - protein, 9 aa, Homo sapiens
  Table A; Target 14752; HLA-B*46:01; CLDN16; ENSG00000113946; TAA
YAVDVYVER

SEQ ID NO: 14753 - protein, 9 aa, Homo sapiens
  Table A; Target 14753; HLA-B*51:01; CLDN16; ENSG00000113946; TAA
YAVDVYVER

SEQ ID NO: 14754 - protein, 9 aa, Homo sapiens
  Table A; Target 14754; HLA-B*54:01; CLDN16; ENSG00000113946; TAA
YAVDVYVER

SEQ ID NO: 14755 - protein, 9 aa, Homo sapiens
  Table A; Target 14755; HLA-B*57:01; CLDN16; ENSG00000113946; TAA
YAVDVYVER

SEQ ID NO: 14756 - protein, 9 aa, Homo sapiens
  Table A; Target 14756; HLA-C*02:02; CLDN16; ENSG00000113946; TAA
YAVDVYVER

SEQ ID NO: 14757 - protein, 9 aa, Homo sapiens
  Table A; Target 14757; HLA-C*03:03; CLDN16; ENSG00000113946; TAA
YAVDVYVER

SEQ ID NO: 14758 - protein, 9 aa, Homo sapiens
  Table A; Target 14758; HLA-C*03:04; CLDN16; ENSG00000113946; TAA
YAVDVYVER

SEQ ID NO: 14759 - protein, 9 aa, Homo sapiens
  Table A; Target 14759; HLA-C*05:01; CLDN16; ENSG00000113946; TAA
YAVDVYVER

SEQ ID NO: 14760 - protein, 9 aa, Homo sapiens
  Table A; Target 14760; HLA-C*07:06; CLDN16; ENSG00000113946; TAA
YAVDVYVER

SEQ ID NO: 14761 - protein, 9 aa, Homo sapiens
  Table A; Target 14761; HLA-C*12:03; CLDN16; ENSG00000113946; TAA
YAVDVYVER

SEQ ID NO: 14762 - protein, 9 aa, Homo sapiens
  Table A; Target 14762; HLA-C*16:02; CLDN16; ENSG00000113946; TAA
YAVDVYVER

SEQ ID NO: 14763 - protein, 9 aa, Homo sapiens
  Table A; Target 14763; HLA-C*16:04; CLDN16; ENSG00000113946; TAA
YAVDVYVER

SEQ ID NO: 14764 - protein, 8 aa, Homo sapiens
  Table A; Target 14764; HLA-B*18:01; CLDN16; ENSG00000113946; TAA
YDSILAEH

SEQ ID NO: 14765 - protein, 8 aa, Homo sapiens
  Table A; Target 14765; HLA-B*37:01; CLDN16; ENSG00000113946; TAA
YDSILAEH

SEQ ID NO: 14766 - protein, 10 aa, Homo sapiens
  Table A; Target 14766; HLA-B*37:01; CLDN16; ENSG00000113946; TAA
YDSILAEHPL

SEQ ID NO: 14767 - protein, 10 aa, Homo sapiens
  Table A; Target 14767; HLA-B*40:02; CLDN16; ENSG00000113946; TAA
YDSILAEHPL

SEQ ID NO: 14768 - protein, 10 aa, Homo sapiens
  Table A; Target 14768; HLA-C*04:01; CLDN16; ENSG00000113946; TAA
YDSILAEHPL

SEQ ID NO: 14769 - protein, 10 aa, Homo sapiens
  Table A; Target 14769; HLA-C*06:02; CLDN16; ENSG00000113946; TAA
YDSILAEHPL

SEQ ID NO: 14770 - protein, 10 aa, Homo sapiens
  Table A; Target 14770; HLA-C*07:01; CLDN16; ENSG00000113946; TAA
YDSILAEHPL

SEQ ID NO: 14771 - protein, 10 aa, Homo sapiens
  Table A; Target 14771; HLA-C*07:04; CLDN16; ENSG00000113946; TAA
YDSILAEHPL

SEQ ID NO: 14772 - protein, 9 aa, Homo sapiens
  Table A; Target 14772; HLA-A*02:03; CLDN16; ENSG00000113946; TAA
YIKVRICFV

SEQ ID NO: 14773 - protein, 10 aa, Homo sapiens
  Table A; Target 14773; HLA-A*01:01; CLDN16; ENSG00000113946; TAA
YLFKDVGPER

SEQ ID NO: 14774 - protein, 10 aa, Homo sapiens
  Table A; Target 14774; HLA-A*02:01; CLDN16; ENSG00000113946; TAA
YLFKDVGPER

SEQ ID NO: 14775 - protein, 10 aa, Homo sapiens
  Table A; Target 14775; HLA-A*02:03; CLDN16; ENSG00000113946; TAA
YLFKDVGPER

SEQ ID NO: 14776 - protein, 10 aa, Homo sapiens
  Table A; Target 14776; HLA-A*02:07; CLDN16; ENSG00000113946; TAA
YLFKDVGPER

SEQ ID NO: 14777 - protein, 10 aa, Homo sapiens
  Table A; Target 14777; HLA-A*26:01; CLDN16; ENSG00000113946; TAA
YLFKDVGPER

SEQ ID NO: 14778 - protein, 8 aa, Homo sapiens
  Table A; Target 14778; HLA-B*51:01; CLDN16; ENSG00000113946; TAA
YPYSLRKA

SEQ ID NO: 14779 - protein, 8 aa, Homo sapiens
  Table A; Target 14779; HLA-B*54:01; CLDN16; ENSG00000113946; TAA
YPYSLRKA

SEQ ID NO: 14780 - protein, 8 aa, Homo sapiens
  Table A; Target 14780; HLA-B*55:01; CLDN16; ENSG00000113946; TAA
YPYSLRKA

SEQ ID NO: 14781 - protein, 8 aa, Homo sapiens
  Table A; Target 14781; HLA-B*56:01; CLDN16; ENSG00000113946; TAA
YPYSLRKA

SEQ ID NO: 14782 - protein, 9 aa, Homo sapiens
  Table A; Target 14782; HLA-A*29:02; CLDN16; ENSG00000113946; TAA
YPYSLRKAY

SEQ ID NO: 14783 - protein, 9 aa, Homo sapiens
  Table A; Target 14783; HLA-B*35:01; CLDN16; ENSG00000113946; TAA
YPYSLRKAY

SEQ ID NO: 14784 - protein, 9 aa, Homo sapiens
  Table A; Target 14784; HLA-B*51:01; CLDN16; ENSG00000113946; TAA
YPYSLRKAY

SEQ ID NO: 14785 - protein, 9 aa, Homo sapiens
  Table A; Target 14785; HLA-B*54:01; CLDN16; ENSG00000113946; TAA
YPYSLRKAY

SEQ ID NO: 14786 - protein, 9 aa, Homo sapiens
  Table A; Target 14786; HLA-B*55:01; CLDN16; ENSG00000113946; TAA
YPYSLRKAY

SEQ ID NO: 14787 - protein, 9 aa, Homo sapiens
  Table A; Target 14787; HLA-C*02:02; CLDN16; ENSG00000113946; TAA
YPYSLRKAY

SEQ ID NO: 14788 - protein, 10 aa, Homo sapiens
  Table A; Target 14788; HLA-B*54:01; CLDN16; ENSG00000113946; TAA
YPYSLRKAYS

SEQ ID NO: 14789 - protein, 11 aa, Homo sapiens
  Table A; Target 14789; HLA-B*08:01; CLDN16; ENSG00000113946; TAA
YPYSLRKAYSA

SEQ ID NO: 14790 - protein, 11 aa, Homo sapiens
  Table A; Target 14790; HLA-B*54:01; CLDN16; ENSG00000113946; TAA
YPYSLRKAYSA

SEQ ID NO: 14791 - protein, 11 aa, Homo sapiens
  Table A; Target 14791; HLA-B*56:01; CLDN16; ENSG00000113946; TAA
YPYSLRKAYSA

SEQ ID NO: 14792 - protein, 8 aa, Homo sapiens
  Table A; Target 14792; HLA-A*26:01; CLDN16; ENSG00000113946; TAA
YSAAGVSM

SEQ ID NO: 14793 - protein, 8 aa, Homo sapiens
  Table A; Target 14793; HLA-A*30:01; CLDN16; ENSG00000113946; TAA
YSAAGVSM

SEQ ID NO: 14794 - protein, 8 aa, Homo sapiens
  Table A; Target 14794; HLA-A*32:01; CLDN16; ENSG00000113946; TAA
YSAAGVSM

SEQ ID NO: 14795 - protein, 8 aa, Homo sapiens
  Table A; Target 14795; HLA-B*07:02; CLDN16; ENSG00000113946; TAA
YSAAGVSM

SEQ ID NO: 14796 - protein, 8 aa, Homo sapiens
  Table A; Target 14796; HLA-B*08:01; CLDN16; ENSG00000113946; TAA
YSAAGVSM

SEQ ID NO: 14797 - protein, 8 aa, Homo sapiens
  Table A; Target 14797; HLA-B*15:01; CLDN16; ENSG00000113946; TAA
YSAAGVSM

SEQ ID NO: 14798 - protein, 8 aa, Homo sapiens
  Table A; Target 14798; HLA-B*15:03; CLDN16; ENSG00000113946; TAA
YSAAGVSM

SEQ ID NO: 14799 - protein, 8 aa, Homo sapiens
  Table A; Target 14799; HLA-B*18:01; CLDN16; ENSG00000113946; TAA
YSAAGVSM

SEQ ID NO: 14800 - protein, 8 aa, Homo sapiens
  Table A; Target 14800; HLA-B*27:05; CLDN16; ENSG00000113946; TAA
YSAAGVSM

SEQ ID NO: 14801 - protein, 8 aa, Homo sapiens
  Table A; Target 14801; HLA-B*35:01; CLDN16; ENSG00000113946; TAA
YSAAGVSM

SEQ ID NO: 14802 - protein, 8 aa, Homo sapiens
  Table A; Target 14802; HLA-B*35:03; CLDN16; ENSG00000113946; TAA
YSAAGVSM

SEQ ID NO: 14803 - protein, 8 aa, Homo sapiens
  Table A; Target 14803; HLA-B*37:01; CLDN16; ENSG00000113946; TAA
YSAAGVSM

SEQ ID NO: 14804 - protein, 8 aa, Homo sapiens
  Table A; Target 14804; HLA-B*38:01; CLDN16; ENSG00000113946; TAA
YSAAGVSM

SEQ ID NO: 14805 - protein, 8 aa, Homo sapiens
  Table A; Target 14805; HLA-B*39:01; CLDN16; ENSG00000113946; TAA
YSAAGVSM

SEQ ID NO: 14806 - protein, 8 aa, Homo sapiens
  Table A; Target 14806; HLA-B*40:02; CLDN16; ENSG00000113946; TAA
YSAAGVSM

SEQ ID NO: 14807 - protein, 8 aa, Homo sapiens
  Table A; Target 14807; HLA-B*46:01; CLDN16; ENSG00000113946; TAA
YSAAGVSM

SEQ ID NO: 14808 - protein, 8 aa, Homo sapiens
  Table A; Target 14808; HLA-B*51:01; CLDN16; ENSG00000113946; TAA
YSAAGVSM

SEQ ID NO: 14809 - protein, 8 aa, Homo sapiens
  Table A; Target 14809; HLA-B*54:01; CLDN16; ENSG00000113946; TAA
YSAAGVSM

SEQ ID NO: 14810 - protein, 8 aa, Homo sapiens
  Table A; Target 14810; HLA-B*58:01; CLDN16; ENSG00000113946; TAA
YSAAGVSM

SEQ ID NO: 14811 - protein, 8 aa, Homo sapiens
  Table A; Target 14811; HLA-C*01:02; CLDN16; ENSG00000113946; TAA
YSAAGVSM

SEQ ID NO: 14812 - protein, 8 aa, Homo sapiens
  Table A; Target 14812; HLA-C*02:02; CLDN16; ENSG00000113946; TAA
YSAAGVSM

SEQ ID NO: 14813 - protein, 8 aa, Homo sapiens
  Table A; Target 14813; HLA-C*03:03; CLDN16; ENSG00000113946; TAA
YSAAGVSM

SEQ ID NO: 14814 - protein, 8 aa, Homo sapiens
  Table A; Target 14814; HLA-C*03:04; CLDN16; ENSG00000113946; TAA
YSAAGVSM

SEQ ID NO: 14815 - protein, 8 aa, Homo sapiens
  Table A; Target 14815; HLA-C*04:01; CLDN16; ENSG00000113946; TAA
YSAAGVSM

SEQ ID NO: 14816 - protein, 8 aa, Homo sapiens
  Table A; Target 14816; HLA-C*05:01; CLDN16; ENSG00000113946; TAA
YSAAGVSM

SEQ ID NO: 14817 - protein, 8 aa, Homo sapiens
  Table A; Target 14817; HLA-C*07:04; CLDN16; ENSG00000113946; TAA
YSAAGVSM

SEQ ID NO: 14818 - protein, 8 aa, Homo sapiens
  Table A; Target 14818; HLA-C*12:03; CLDN16; ENSG00000113946; TAA
YSAAGVSM

SEQ ID NO: 14819 - protein, 8 aa, Homo sapiens
  Table A; Target 14819; HLA-C*14:02; CLDN16; ENSG00000113946; TAA
YSAAGVSM

SEQ ID NO: 14820 - protein, 8 aa, Homo sapiens
  Table A; Target 14820; HLA-C*16:01; CLDN16; ENSG00000113946; TAA
YSAAGVSM

SEQ ID NO: 14821 - protein, 8 aa, Homo sapiens
  Table A; Target 14821; HLA-C*16:02; CLDN16; ENSG00000113946; TAA
YSAAGVSM

SEQ ID NO: 14822 - protein, 8 aa, Homo sapiens
  Table A; Target 14822; HLA-C*16:04; CLDN16; ENSG00000113946; TAA
YSAAGVSM

SEQ ID NO: 14823 - protein, 9 aa, Homo sapiens
  Table A; Target 14823; HLA-A*01:01; CLDN16; ENSG00000113946; TAA
YSAAGVSMA

SEQ ID NO: 14824 - protein, 9 aa, Homo sapiens
  Table A; Target 14824; HLA-A*02:01; CLDN16; ENSG00000113946; TAA
YSAAGVSMA

SEQ ID NO: 14825 - protein, 9 aa, Homo sapiens
  Table A; Target 14825; HLA-A*02:03; CLDN16; ENSG00000113946; TAA
YSAAGVSMA

SEQ ID NO: 14826 - protein, 9 aa, Homo sapiens
  Table A; Target 14826; HLA-B*27:05; CLDN16; ENSG00000113946; TAA
YSAAGVSMA

SEQ ID NO: 14827 - protein, 9 aa, Homo sapiens
  Table A; Target 14827; HLA-B*39:01; CLDN16; ENSG00000113946; TAA
YSAAGVSMA

SEQ ID NO: 14828 - protein, 9 aa, Homo sapiens
  Table A; Target 14828; HLA-B*54:01; CLDN16; ENSG00000113946; TAA
YSAAGVSMA

SEQ ID NO: 14829 - protein, 9 aa, Homo sapiens
  Table A; Target 14829; HLA-B*56:01; CLDN16; ENSG00000113946; TAA
YSAAGVSMA

SEQ ID NO: 14830 - protein, 9 aa, Homo sapiens
  Table A; Target 14830; HLA-C*02:02; CLDN16; ENSG00000113946; TAA
YSAAGVSMA

SEQ ID NO: 14831 - protein, 9 aa, Homo sapiens
  Table A; Target 14831; HLA-C*06:02; CLDN16; ENSG00000113946; TAA
YSAAGVSMA

SEQ ID NO: 14832 - protein, 9 aa, Homo sapiens
  Table A; Target 14832; HLA-C*07:04; CLDN16; ENSG00000113946; TAA
YSAAGVSMA

SEQ ID NO: 14833 - protein, 9 aa, Homo sapiens
  Table A; Target 14833; HLA-C*12:03; CLDN16; ENSG00000113946; TAA
YSAAGVSMA

SEQ ID NO: 14834 - protein, 9 aa, Homo sapiens
  Table A; Target 14834; HLA-C*14:02; CLDN16; ENSG00000113946; TAA
YSAAGVSMA

SEQ ID NO: 14835 - protein, 9 aa, Homo sapiens
  Table A; Target 14835; HLA-C*16:02; CLDN16; ENSG00000113946; TAA
YSAAGVSMA

SEQ ID NO: 14836 - protein, 10 aa, Homo sapiens
  Table A; Target 14836; HLA-A*01:01; CLDN16; ENSG00000113946; TAA
YSAAGVSMAK

SEQ ID NO: 14837 - protein, 10 aa, Homo sapiens
  Table A; Target 14837; HLA-A*03:01; CLDN16; ENSG00000113946; TAA
YSAAGVSMAK

SEQ ID NO: 14838 - protein, 10 aa, Homo sapiens
  Table A; Target 14838; HLA-A*03:02; CLDN16; ENSG00000113946; TAA
YSAAGVSMAK

SEQ ID NO: 14839 - protein, 10 aa, Homo sapiens
  Table A; Target 14839; HLA-A*11:01; CLDN16; ENSG00000113946; TAA
YSAAGVSMAK

SEQ ID NO: 14840 - protein, 10 aa, Homo sapiens
  Table A; Target 14840; HLA-A*33:01; CLDN16; ENSG00000113946; TAA
YSAAGVSMAK

SEQ ID NO: 14841 - protein, 10 aa, Homo sapiens
  Table A; Target 14841; HLA-A*33:03; CLDN16; ENSG00000113946; TAA
YSAAGVSMAK

SEQ ID NO: 14842 - protein, 10 aa, Homo sapiens
  Table A; Target 14842; HLA-A*68:01; CLDN16; ENSG00000113946; TAA
YSAAGVSMAK

SEQ ID NO: 14843 - protein, 10 aa, Homo sapiens
  Table A; Target 14843; HLA-A*68:02; CLDN16; ENSG00000113946; TAA
YSAAGVSMAK

SEQ ID NO: 14844 - protein, 10 aa, Homo sapiens
  Table A; Target 14844; HLA-B*07:02; CLDN16; ENSG00000113946; TAA
YSAAGVSMAK

SEQ ID NO: 14845 - protein, 10 aa, Homo sapiens
  Table A; Target 14845; HLA-B*13:02; CLDN16; ENSG00000113946; TAA
YSAAGVSMAK

SEQ ID NO: 14846 - protein, 10 aa, Homo sapiens
  Table A; Target 14846; HLA-B*27:02; CLDN16; ENSG00000113946; TAA
YSAAGVSMAK

SEQ ID NO: 14847 - protein, 10 aa, Homo sapiens
  Table A; Target 14847; HLA-B*27:05; CLDN16; ENSG00000113946; TAA
YSAAGVSMAK

SEQ ID NO: 14848 - protein, 10 aa, Homo sapiens
  Table A; Target 14848; HLA-C*01:02; CLDN16; ENSG00000113946; TAA
YSAAGVSMAK

SEQ ID NO: 14849 - protein, 10 aa, Homo sapiens
  Table A; Target 14849; HLA-C*02:02; CLDN16; ENSG00000113946; TAA
YSAAGVSMAK

SEQ ID NO: 14850 - protein, 10 aa, Homo sapiens
  Table A; Target 14850; HLA-C*03:03; CLDN16; ENSG00000113946; TAA
YSAAGVSMAK

SEQ ID NO: 14851 - protein, 10 aa, Homo sapiens
  Table A; Target 14851; HLA-C*06:02; CLDN16; ENSG00000113946; TAA
YSAAGVSMAK

SEQ ID NO: 14852 - protein, 10 aa, Homo sapiens
  Table A; Target 14852; HLA-C*07:01; CLDN16; ENSG00000113946; TAA
YSAAGVSMAK

SEQ ID NO: 14853 - protein, 10 aa, Homo sapiens
  Table A; Target 14853; HLA-C*07:02; CLDN16; ENSG00000113946; TAA
YSAAGVSMAK

SEQ ID NO: 14854 - protein, 10 aa, Homo sapiens
  Table A; Target 14854; HLA-C*07:06; CLDN16; ENSG00000113946; TAA
YSAAGVSMAK

SEQ ID NO: 14855 - protein, 10 aa, Homo sapiens
  Table A; Target 14855; HLA-C*16:04; CLDN16; ENSG00000113946; TAA
YSAAGVSMAK

SEQ ID NO: 14856 - protein, 8 aa, Homo sapiens
  Table A; Target 14856; HLA-C*16:01; CLDN16; ENSG00000113946; TAA
YSAPRTET

SEQ ID NO: 14857 - protein, 8 aa, Homo sapiens
  Table A; Target 14857; HLA-C*16:02; CLDN16; ENSG00000113946; TAA
YSAPRTET

SEQ ID NO: 14858 - protein, 9 aa, Homo sapiens
  Table A; Target 14858; HLA-A*01:01; CLDN16; ENSG00000113946; TAA
YSAPRTETA

SEQ ID NO: 14859 - protein, 9 aa, Homo sapiens
  Table A; Target 14859; HLA-A*02:01; CLDN16; ENSG00000113946; TAA
YSAPRTETA

SEQ ID NO: 14860 - protein, 9 aa, Homo sapiens
  Table A; Target 14860; HLA-A*02:03; CLDN16; ENSG00000113946; TAA
YSAPRTETA

SEQ ID NO: 14861 - protein, 9 aa, Homo sapiens
  Table A; Target 14861; HLA-A*32:01; CLDN16; ENSG00000113946; TAA
YSAPRTETA

SEQ ID NO: 14862 - protein, 9 aa, Homo sapiens
  Table A; Target 14862; HLA-A*68:02; CLDN16; ENSG00000113946; TAA
YSAPRTETA

SEQ ID NO: 14863 - protein, 9 aa, Homo sapiens
  Table A; Target 14863; HLA-B*08:01; CLDN16; ENSG00000113946; TAA
YSAPRTETA

SEQ ID NO: 14864 - protein, 9 aa, Homo sapiens
  Table A; Target 14864; HLA-B*40:02; CLDN16; ENSG00000113946; TAA
YSAPRTETA

SEQ ID NO: 14865 - protein, 9 aa, Homo sapiens
  Table A; Target 14865; HLA-B*46:01; CLDN16; ENSG00000113946; TAA
YSAPRTETA

SEQ ID NO: 14866 - protein, 9 aa, Homo sapiens
  Table A; Target 14866; HLA-B*54:01; CLDN16; ENSG00000113946; TAA
YSAPRTETA

SEQ ID NO: 14867 - protein, 9 aa, Homo sapiens
  Table A; Target 14867; HLA-B*55:01; CLDN16; ENSG00000113946; TAA
YSAPRTETA

SEQ ID NO: 14868 - protein, 9 aa, Homo sapiens
  Table A; Target 14868; HLA-B*56:01; CLDN16; ENSG00000113946; TAA
YSAPRTETA

SEQ ID NO: 14869 - protein, 9 aa, Homo sapiens
  Table A; Target 14869; HLA-B*58:01; CLDN16; ENSG00000113946; TAA
YSAPRTETA

SEQ ID NO: 14870 - protein, 9 aa, Homo sapiens
  Table A; Target 14870; HLA-C*01:02; CLDN16; ENSG00000113946; TAA
YSAPRTETA

SEQ ID NO: 14871 - protein, 9 aa, Homo sapiens
  Table A; Target 14871; HLA-C*02:02; CLDN16; ENSG00000113946; TAA
YSAPRTETA

SEQ ID NO: 14872 - protein, 9 aa, Homo sapiens
  Table A; Target 14872; HLA-C*03:03; CLDN16; ENSG00000113946; TAA
YSAPRTETA

SEQ ID NO: 14873 - protein, 9 aa, Homo sapiens
  Table A; Target 14873; HLA-C*03:04; CLDN16; ENSG00000113946; TAA
YSAPRTETA

SEQ ID NO: 14874 - protein, 9 aa, Homo sapiens
  Table A; Target 14874; HLA-C*06:02; CLDN16; ENSG00000113946; TAA
YSAPRTETA

SEQ ID NO: 14875 - protein, 9 aa, Homo sapiens
  Table A; Target 14875; HLA-C*07:04; CLDN16; ENSG00000113946; TAA
YSAPRTETA

SEQ ID NO: 14876 - protein, 9 aa, Homo sapiens
  Table A; Target 14876; HLA-C*12:03; CLDN16; ENSG00000113946; TAA
YSAPRTETA

SEQ ID NO: 14877 - protein, 9 aa, Homo sapiens
  Table A; Target 14877; HLA-C*16:01; CLDN16; ENSG00000113946; TAA
YSAPRTETA

SEQ ID NO: 14878 - protein, 9 aa, Homo sapiens
  Table A; Target 14878; HLA-C*16:02; CLDN16; ENSG00000113946; TAA
YSAPRTETA

SEQ ID NO: 14879 - protein, 10 aa, Homo sapiens
  Table A; Target 14879; HLA-A*01:01; CLDN16; ENSG00000113946; TAA
YSAPRTETAK

SEQ ID NO: 14880 - protein, 10 aa, Homo sapiens
  Table A; Target 14880; HLA-A*03:02; CLDN16; ENSG00000113946; TAA
YSAPRTETAK

SEQ ID NO: 14881 - protein, 11 aa, Homo sapiens
  Table A; Target 14881; HLA-A*01:01; CLDN16; ENSG00000113946; TAA
YSAPRTETAKM

SEQ ID NO: 14882 - protein, 9 aa, Homo sapiens
  Table A; Target 14882; HLA-B*08:01; CLDN16; ENSG00000113946; TAA
YSLRKAYSA

SEQ ID NO: 14883 - protein, 9 aa, Homo sapiens
  Table A; Target 14883; HLA-B*54:01; CLDN16; ENSG00000113946; TAA
YSLRKAYSA

SEQ ID NO: 14884 - protein, 9 aa, Homo sapiens
  Table A; Target 14884; HLA-C*03:03; CLDN16; ENSG00000113946; TAA
YSYCNSRHL

SEQ ID NO: 14885 - protein, 8 aa, Homo sapiens
  Table A; Target 14885; HLA-C*05:01; CLDN16; ENSG00000113946; TAA
YVERSTLV

SEQ ID NO: 14886 - protein, 9 aa, Homo sapiens
  Table A; Target 14886; HLA-A*01:01; CLDN16; ENSG00000113946; TAA
YVERSTLVL

SEQ ID NO: 14887 - protein, 9 aa, Homo sapiens
  Table A; Target 14887; HLA-A*02:07; CLDN16; ENSG00000113946; TAA
YVERSTLVL

SEQ ID NO: 14888 - protein, 9 aa, Homo sapiens
  Table A; Target 14888; HLA-B*08:01; CLDN16; ENSG00000113946; TAA
YVERSTLVL

SEQ ID NO: 14889 - protein, 9 aa, Homo sapiens
  Table A; Target 14889; HLA-B*35:03; CLDN16; ENSG00000113946; TAA
YVERSTLVL

SEQ ID NO: 14890 - protein, 9 aa, Homo sapiens
  Table A; Target 14890; HLA-B*38:01; CLDN16; ENSG00000113946; TAA
YVERSTLVL

SEQ ID NO: 14891 - protein, 9 aa, Homo sapiens
  Table A; Target 14891; HLA-B*40:01; CLDN16; ENSG00000113946; TAA
YVERSTLVL

SEQ ID NO: 14892 - protein, 9 aa, Homo sapiens
  Table A; Target 14892; HLA-C*03:03; CLDN16; ENSG00000113946; TAA
YVERSTLVL

SEQ ID NO: 14893 - protein, 9 aa, Homo sapiens
  Table A; Target 14893; HLA-C*03:04; CLDN16; ENSG00000113946; TAA
YVERSTLVL

SEQ ID NO: 14894 - protein, 9 aa, Homo sapiens
  Table A; Target 14894; HLA-C*05:01; CLDN16; ENSG00000113946; TAA
YVERSTLVL

SEQ ID NO: 14895 - protein, 9 aa, Homo sapiens
  Table A; Target 14895; HLA-C*07:04; CLDN16; ENSG00000113946; TAA
YVERSTLVL

SEQ ID NO: 14896 - protein, 9 aa, Homo sapiens
  Table A; Target 14896; HLA-C*12:03; CLDN6; ENSG00000184697; TAA
AASGLLLLG

SEQ ID NO: 14897 - protein, 10 aa, Homo sapiens
  Table A; Target 14897; HLA-C*04:01; CLDN6; ENSG00000184697; TAA
AASGLLLLGG

SEQ ID NO: 14898 - protein, 10 aa, Homo sapiens
  Table A; Target 14898; HLA-C*07:02; CLDN6; ENSG00000184697; TAA
AASGLLLLGG

SEQ ID NO: 14899 - protein, 11 aa, Homo sapiens
  Table A; Target 14899; HLA-C*04:01; CLDN6; ENSG00000184697; TAA
AASGLLLLGGG

SEQ ID NO: 14900 - protein, 8 aa, Homo sapiens
  Table A; Target 14900; HLA-B*37:01; CLDN6; ENSG00000184697; TAA
AEAQKREL

SEQ ID NO: 14901 - protein, 8 aa, Homo sapiens
  Table A; Target 14901; HLA-B*44:03; CLDN6; ENSG00000184697; TAA
AEAQKREL

SEQ ID NO: 14902 - protein, 8 aa, Homo sapiens
  Table A; Target 14902; HLA-C*16:01; CLDN6; ENSG00000184697; TAA
AEAQKREL

SEQ ID NO: 14903 - protein, 9 aa, Homo sapiens
  Table A; Target 14903; HLA-A*23:01; CLDN6; ENSG00000184697; TAA
AFIGNSIVV

SEQ ID NO: 14904 - protein, 9 aa, Homo sapiens
  Table A; Target 14904; HLA-B*49:01; CLDN6; ENSG00000184697; TAA
AFIGNSIVV

SEQ ID NO: 14905 - protein, 9 aa, Homo sapiens
  Table A; Target 14905; HLA-C*14:02; CLDN6; ENSG00000184697; TAA
AFIGNSIVV

SEQ ID NO: 14906 - protein, 10 aa, Homo sapiens
  Table A; Target 14906; HLA-C*14:02; CLDN6; ENSG00000184697; TAA
AFIGNSIVVA

SEQ ID NO: 14907 - protein, 8 aa, Homo sapiens
  Table A; Target 14907; HLA-B*13:02; CLDN6; ENSG00000184697; TAA
AGMQILGV

SEQ ID NO: 14908 - protein, 9 aa, Homo sapiens
  Table A; Target 14908; HLA-A*01:01; CLDN6; ENSG00000184697; TAA
AISRGPSEY

SEQ ID NO: 14909 - protein, 9 aa, Homo sapiens
  Table A; Target 14909; HLA-A*30:02; CLDN6; ENSG00000184697; TAA
AISRGPSEY

SEQ ID NO: 14910 - protein, 9 aa, Homo sapiens
  Table A; Target 14910; HLA-A*32:01; CLDN6; ENSG00000184697; TAA
AISRGPSEY

SEQ ID NO: 14911 - protein, 9 aa, Homo sapiens
  Table A; Target 14911; HLA-B*15:01; CLDN6; ENSG00000184697; TAA
AISRGPSEY

SEQ ID NO: 14912 - protein, 9 aa, Homo sapiens
  Table A; Target 14912; HLA-B*15:03; CLDN6; ENSG00000184697; TAA
AISRGPSEY

SEQ ID NO: 14913 - protein, 9 aa, Homo sapiens
  Table A; Target 14913; HLA-B*46:01; CLDN6; ENSG00000184697; TAA
AISRGPSEY

SEQ ID NO: 14914 - protein, 9 aa, Homo sapiens
  Table A; Target 14914; HLA-C*01:02; CLDN6; ENSG00000184697; TAA
AISRGPSEY

SEQ ID NO: 14915 - protein, 9 aa, Homo sapiens
  Table A; Target 14915; HLA-C*07:04; CLDN6; ENSG00000184697; TAA
AISRGPSEY

SEQ ID NO: 14916 - protein, 9 aa, Homo sapiens
  Table A; Target 14916; HLA-C*16:01; CLDN6; ENSG00000184697; TAA
AISRGPSEY

SEQ ID NO: 14917 - protein, 9 aa, Homo sapiens
  Table A; Target 14917; HLA-A*02:07; CLDN6; ENSG00000184697; TAA
ALCVIALLV

SEQ ID NO: 14918 - protein, 9 aa, Homo sapiens
  Table A; Target 14918; HLA-B*13:02; CLDN6; ENSG00000184697; TAA
ALCVIALLV

SEQ ID NO: 14919 - protein, 8 aa, Homo sapiens
  Table A; Target 14919; HLA-A*03:01; CLDN6; ENSG00000184697; TAA
ALFGLLVY

SEQ ID NO: 14920 - protein, 8 aa, Homo sapiens
  Table A; Target 14920; HLA-A*29:02; CLDN6; ENSG00000184697; TAA
ALFGLLVY

SEQ ID NO: 14921 - protein, 9 aa, Homo sapiens
  Table A; Target 14921; HLA-A*02:03; CLDN6; ENSG00000184697; TAA
ALFGLLVYL

SEQ ID NO: 14922 - protein, 9 aa, Homo sapiens
  Table A; Target 14922; HLA-A*02:04; CLDN6; ENSG00000184697; TAA
ALFGLLVYL

SEQ ID NO: 14923 - protein, 9 aa, Homo sapiens
  Table A; Target 14923; HLA-A*02:07; CLDN6; ENSG00000184697; TAA
ALFGLLVYL

SEQ ID NO: 14924 - protein, 9 aa, Homo sapiens
  Table A; Target 14924; HLA-A*03:01; CLDN6; ENSG00000184697; TAA
ALFGLLVYL

SEQ ID NO: 14925 - protein, 9 aa, Homo sapiens
  Table A; Target 14925; HLA-A*29:02; CLDN6; ENSG00000184697; TAA
ALFGLLVYL

SEQ ID NO: 14926 - protein, 9 aa, Homo sapiens
  Table A; Target 14926; HLA-A*31:01; CLDN6; ENSG00000184697; TAA
ALFGLLVYL

SEQ ID NO: 14927 - protein, 9 aa, Homo sapiens
  Table A; Target 14927; HLA-A*68:02; CLDN6; ENSG00000184697; TAA
ALFGLLVYL

SEQ ID NO: 14928 - protein, 9 aa, Homo sapiens
  Table A; Target 14928; HLA-B*13:02; CLDN6; ENSG00000184697; TAA
ALFGLLVYL

SEQ ID NO: 14929 - protein, 10 aa, Homo sapiens
  Table A; Target 14929; HLA-A*02:03; CLDN6; ENSG00000184697; TAA
ALFGLLVYLA

SEQ ID NO: 14930 - protein, 10 aa, Homo sapiens
  Table A; Target 14930; HLA-A*02:04; CLDN6; ENSG00000184697; TAA
ALFGLLVYLA

SEQ ID NO: 14931 - protein, 9 aa, Homo sapiens
  Table A; Target 14931; HLA-A*02:01; CLDN6; ENSG00000184697; TAA
ALLVALFGL

SEQ ID NO: 14932 - protein, 9 aa, Homo sapiens
  Table A; Target 14932; HLA-A*02:04; CLDN6; ENSG00000184697; TAA
ALLVALFGL

SEQ ID NO: 14933 - protein, 9 aa, Homo sapiens
  Table A; Target 14933; HLA-A*02:07; CLDN6; ENSG00000184697; TAA
ALLVALFGL

SEQ ID NO: 14934 - protein, 9 aa, Homo sapiens
  Table A; Target 14934; HLA-A*02:01; CLDN6; ENSG00000184697; TAA
ALPMWKVTA

SEQ ID NO: 14935 - protein, 9 aa, Homo sapiens
  Table A; Target 14935; HLA-A*02:04; CLDN6; ENSG00000184697; TAA
ALPMWKVTA

SEQ ID NO: 14936 - protein, 9 aa, Homo sapiens
  Table A; Target 14936; HLA-A*02:07; CLDN6; ENSG00000184697; TAA
ALPMWKVTA

SEQ ID NO: 14937 - protein, 9 aa, Homo sapiens
  Table A; Target 14937; HLA-A*02:01; CLDN6; ENSG00000184697; TAA
ALPQDLQAA

SEQ ID NO: 14938 - protein, 9 aa, Homo sapiens
  Table A; Target 14938; HLA-A*02:03; CLDN6; ENSG00000184697; TAA
ALPQDLQAA

SEQ ID NO: 14939 - protein, 9 aa, Homo sapiens
  Table A; Target 14939; HLA-A*02:04; CLDN6; ENSG00000184697; TAA
ALPQDLQAA

SEQ ID NO: 14940 - protein, 9 aa, Homo sapiens
  Table A; Target 14940; HLA-A*02:07; CLDN6; ENSG00000184697; TAA
ALPQDLQAA

SEQ ID NO: 14941 - protein, 9 aa, Homo sapiens
  Table A; Target 14941; HLA-B*13:02; CLDN6; ENSG00000184697; TAA
ALPQDLQAA

SEQ ID NO: 14942 - protein, 9 aa, Homo sapiens
  Table A; Target 14942; HLA-B*55:01; CLDN6; ENSG00000184697; TAA
ALPQDLQAA

SEQ ID NO: 14943 - protein, 9 aa, Homo sapiens
  Table A; Target 14943; HLA-C*01:02; CLDN6; ENSG00000184697; TAA
ALPQDLQAA

SEQ ID NO: 14944 - protein, 11 aa, Homo sapiens
  Table A; Target 14944; HLA-A*02:07; CLDN6; ENSG00000184697; TAA
ALPQDLQAARA

SEQ ID NO: 14945 - protein, 10 aa, Homo sapiens
  Table A; Target 14945; HLA-B*07:02; CLDN6; ENSG00000184697; TAA
APAISRGPSE

SEQ ID NO: 14946 - protein, 10 aa, Homo sapiens
  Table A; Target 14946; HLA-C*07:02; CLDN6; ENSG00000184697; TAA
APAISRGPSE

SEQ ID NO: 14947 - protein, 11 aa, Homo sapiens
  Table A; Target 14947; HLA-A*01:01; CLDN6; ENSG00000184697; TAA
APAISRGPSEY

SEQ ID NO: 14948 - protein, 11 aa, Homo sapiens
  Table A; Target 14948; HLA-B*07:02; CLDN6; ENSG00000184697; TAA
APAISRGPSEY

SEQ ID NO: 14949 - protein, 11 aa, Homo sapiens
  Table A; Target 14949; HLA-B*35:01; CLDN6; ENSG00000184697; TAA
APAISRGPSEY

SEQ ID NO: 14950 - protein, 11 aa, Homo sapiens
  Table A; Target 14950; HLA-C*07:02; CLDN6; ENSG00000184697; TAA
APAISRGPSEY

SEQ ID NO: 14951 - protein, 10 aa, Homo sapiens
  Table A; Target 14951; HLA-B*15:01; CLDN6; ENSG00000184697; TAA
AQKRELGASL

SEQ ID NO: 14952 - protein, 10 aa, Homo sapiens
  Table A; Target 14952; HLA-B*15:03; CLDN6; ENSG00000184697; TAA
AQKRELGASL

SEQ ID NO: 14953 - protein, 10 aa, Homo sapiens
  Table A; Target 14953; HLA-B*40:02; CLDN6; ENSG00000184697; TAA
AQKRELGASL

SEQ ID NO: 14954 - protein, 11 aa, Homo sapiens
  Table A; Target 14954; HLA-A*30:02; CLDN6; ENSG00000184697; TAA
AQKRELGASLY

SEQ ID NO: 14955 - protein, 11 aa, Homo sapiens
  Table A; Target 14955; HLA-B*15:01; CLDN6; ENSG00000184697; TAA
AQKRELGASLY

SEQ ID NO: 14956 - protein, 11 aa, Homo sapiens
  Table A; Target 14956; HLA-B*15:03; CLDN6; ENSG00000184697; TAA
AQKRELGASLY

SEQ ID NO: 14957 - protein, 9 aa, Homo sapiens
  Table A; Target 14957; HLA-B*27:05; CLDN6; ENSG00000184697; TAA
ARALCVIAL

SEQ ID NO: 14958 - protein, 9 aa, Homo sapiens
  Table A; Target 14958; HLA-C*06:02; CLDN6; ENSG00000184697; TAA
ARALCVIAL

SEQ ID NO: 14959 - protein, 9 aa, Homo sapiens
  Table A; Target 14959; HLA-C*07:02; CLDN6; ENSG00000184697; TAA
ARALCVIAL

SEQ ID NO: 14960 - protein, 9 aa, Homo sapiens
  Table A; Target 14960; HLA-B*27:02; CLDN6; ENSG00000184697; TAA
ARLVLTSGI

SEQ ID NO: 14961 - protein, 10 aa, Homo sapiens
  Table A; Target 14961; HLA-B*27:02; CLDN6; ENSG00000184697; TAA
ARYSTSAPAI

SEQ ID NO: 14962 - protein, 10 aa, Homo sapiens
  Table A; Target 14962; HLA-B*27:05; CLDN6; ENSG00000184697; TAA
ARYSTSAPAI

SEQ ID NO: 14963 - protein, 10 aa, Homo sapiens
  Table A; Target 14963; HLA-C*06:02; CLDN6; ENSG00000184697; TAA
ARYSTSAPAI

SEQ ID NO: 14964 - protein, 10 aa, Homo sapiens
  Table A; Target 14964; HLA-C*07:02; CLDN6; ENSG00000184697; TAA
ARYSTSAPAI

SEQ ID NO: 14965 - protein, 10 aa, Homo sapiens
  Table A; Target 14965; HLA-C*16:04; CLDN6; ENSG00000184697; TAA
ARYSTSAPAI

SEQ ID NO: 14966 - protein, 8 aa, Homo sapiens
  Table A; Target 14966; HLA-C*12:03; CLDN6; ENSG00000184697; TAA
ASAGMQIL

SEQ ID NO: 14967 - protein, 8 aa, Homo sapiens
  Table A; Target 14967; HLA-C*16:01; CLDN6; ENSG00000184697; TAA
ASAGMQIL

SEQ ID NO: 14968 - protein, 9 aa, Homo sapiens
  Table A; Target 14968; HLA-C*06:02; CLDN6; ENSG00000184697; TAA
ASAGMQILG

SEQ ID NO: 14969 - protein, 10 aa, Homo sapiens
  Table A; Target 14969; HLA-A*02:03; CLDN6; ENSG00000184697; TAA
ASAGMQILGV

SEQ ID NO: 14970 - protein, 10 aa, Homo sapiens
  Table A; Target 14970; HLA-B*13:02; CLDN6; ENSG00000184697; TAA
ASAGMQILGV

SEQ ID NO: 14971 - protein, 11 aa, Homo sapiens
  Table A; Target 14971; HLA-C*02:02; CLDN6; ENSG00000184697; TAA
ASAGMQILGVV

SEQ ID NO: 14972 - protein, 9 aa, Homo sapiens
  Table A; Target 14972; HLA-B*54:01; CLDN6; ENSG00000184697; TAA
ASLYLGWAA

SEQ ID NO: 14973 - protein, 10 aa, Homo sapiens
  Table A; Target 14973; HLA-C*04:01; CLDN6; ENSG00000184697; TAA
CPSGGSQGPS

SEQ ID NO: 14974 - protein, 9 aa, Homo sapiens
  Table A; Target 14974; HLA-A*02:01; CLDN6; ENSG00000184697; TAA
CVIALLVAL

SEQ ID NO: 14975 - protein, 9 aa, Homo sapiens
  Table A; Target 14975; HLA-A*02:04; CLDN6; ENSG00000184697; TAA
CVIALLVAL

SEQ ID NO: 14976 - protein, 9 aa, Homo sapiens
  Table A; Target 14976; HLA-A*31:01; CLDN6; ENSG00000184697; TAA
CVIALLVAL

SEQ ID NO: 14977 - protein, 9 aa, Homo sapiens
  Table A; Target 14977; HLA-A*68:02; CLDN6; ENSG00000184697; TAA
CVIALLVAL

SEQ ID NO: 14978 - protein, 9 aa, Homo sapiens
  Table A; Target 14978; HLA-B*35:03; CLDN6; ENSG00000184697; TAA
CVIALLVAL

SEQ ID NO: 14979 - protein, 9 aa, Homo sapiens
  Table A; Target 14979; HLA-B*46:01; CLDN6; ENSG00000184697; TAA
CVIALLVAL

SEQ ID NO: 14980 - protein, 9 aa, Homo sapiens
  Table A; Target 14980; HLA-A*26:01; CLDN6; ENSG00000184697; TAA
CVVQSTGQM

SEQ ID NO: 14981 - protein, 9 aa, Homo sapiens
  Table A; Target 14981; HLA-B*15:01; CLDN6; ENSG00000184697; TAA
CVVQSTGQM

SEQ ID NO: 14982 - protein, 9 aa, Homo sapiens
  Table A; Target 14982; HLA-B*27:05; CLDN6; ENSG00000184697; TAA
CVVQSTGQM

SEQ ID NO: 14983 - protein, 9 aa, Homo sapiens
  Table A; Target 14983; HLA-C*01:02; CLDN6; ENSG00000184697; TAA
CVVQSTGQM

SEQ ID NO: 14984 - protein, 9 aa, Homo sapiens
  Table A; Target 14984; HLA-C*04:01; CLDN6; ENSG00000184697; TAA
CVVQSTGQM

SEQ ID NO: 14985 - protein, 9 aa, Homo sapiens
  Table A; Target 14985; HLA-C*07:04; CLDN6; ENSG00000184697; TAA
CVVQSTGQM

SEQ ID NO: 14986 - protein, 9 aa, Homo sapiens
  Table A; Target 14986; HLA-C*14:02; CLDN6; ENSG00000184697; TAA
CVVQSTGQM

SEQ ID NO: 14987 - protein, 8 aa, Homo sapiens
  Table A; Target 14987; HLA-B*08:01; CLDN6; ENSG00000184697; TAA
DLQAARAL

SEQ ID NO: 14988 - protein, 8 aa, Homo sapiens
  Table A; Target 14988; HLA-C*07:01; CLDN6; ENSG00000184697; TAA
DSKARLVL

SEQ ID NO: 14989 - protein, 9 aa, Homo sapiens
  Table A; Target 14989; HLA-B*08:01; CLDN6; ENSG00000184697; TAA
DSKARLVLT

SEQ ID NO: 14990 - protein, 9 aa, Homo sapiens
  Table A; Target 14990; HLA-B*08:01; CLDN6; ENSG00000184697; TAA
EAQKRELGA

SEQ ID NO: 14991 - protein, 9 aa, Homo sapiens
  Table A; Target 14991; HLA-B*54:01; CLDN6; ENSG00000184697; TAA
EAQKRELGA

SEQ ID NO: 14992 - protein, 9 aa, Homo sapiens
  Table A; Target 14992; HLA-B*40:02; CLDN6; ENSG00000184697; TAA
EEKDSKARL

SEQ ID NO: 14993 - protein, 9 aa, Homo sapiens
  Table A; Target 14993; HLA-B*44:02; CLDN6; ENSG00000184697; TAA
EEKDSKARL

SEQ ID NO: 14994 - protein, 9 aa, Homo sapiens
  Table A; Target 14994; HLA-B*44:03; CLDN6; ENSG00000184697; TAA
EEKDSKARL

SEQ ID NO: 14995 - protein, 11 aa, Homo sapiens
  Table A; Target 14995; HLA-B*40:02; CLDN6; ENSG00000184697; TAA
EEKDSKARLVL

SEQ ID NO: 14996 - protein, 8 aa, Homo sapiens
  Table A; Target 14996; HLA-C*07:01; CLDN6; ENSG00000184697; TAA
ELGASLYL

SEQ ID NO: 14997 - protein, 10 aa, Homo sapiens
  Table A; Target 14997; HLA-A*25:01; CLDN6; ENSG00000184697; TAA
ELGASLYLGW

SEQ ID NO: 14998 - protein, 10 aa, Homo sapiens
  Table A; Target 14998; HLA-B*44:02; CLDN6; ENSG00000184697; TAA
ELGASLYLGW

SEQ ID NO: 14999 - protein, 10 aa, Homo sapiens
  Table A; Target 14999; HLA-B*44:03; CLDN6; ENSG00000184697; TAA
ELGASLYLGW

SEQ ID NO: 15000 - protein, 8 aa, Homo sapiens
  Table A; Target 15000; HLA-B*54:01; CLDN6; ENSG00000184697; TAA
FGLLVYLA

SEQ ID NO: 15001 - protein, 8 aa, Homo sapiens
  Table A; Target 15001; HLA-B*39:01; CLDN6; ENSG00000184697; TAA
FIGNSIVV

SEQ ID NO: 15002 - protein, 8 aa, Homo sapiens
  Table A; Target 15002; HLA-C*01:02; CLDN6; ENSG00000184697; TAA
FIGNSIVV

SEQ ID NO: 15003 - protein, 8 aa, Homo sapiens
  Table A; Target 15003; HLA-C*02:02; CLDN6; ENSG00000184697; TAA
FIGNSIVV

SEQ ID NO: 15004 - protein, 8 aa, Homo sapiens
  Table A; Target 15004; HLA-C*03:04; CLDN6; ENSG00000184697; TAA
FIGNSIVV

SEQ ID NO: 15005 - protein, 8 aa, Homo sapiens
  Table A; Target 15005; HLA-C*07:04; CLDN6; ENSG00000184697; TAA
FIGNSIVV

SEQ ID NO: 15006 - protein, 8 aa, Homo sapiens
  Table A; Target 15006; HLA-C*12:03; CLDN6; ENSG00000184697; TAA
FIGNSIVV

SEQ ID NO: 15007 - protein, 9 aa, Homo sapiens
  Table A; Target 15007; HLA-B*54:01; CLDN6; ENSG00000184697; TAA
FIGNSIVVA

SEQ ID NO: 15008 - protein, 9 aa, Homo sapiens
  Table A; Target 15008; HLA-C*07:04; CLDN6; ENSG00000184697; TAA
FIGNSIVVA

SEQ ID NO: 15009 - protein, 11 aa, Homo sapiens
  Table A; Target 15009; HLA-A*68:02; CLDN6; ENSG00000184697; TAA
FIGNSIVVAQV

SEQ ID NO: 15010 - protein, 9 aa, Homo sapiens
  Table A; Target 15010; HLA-A*02:01; CLDN6; ENSG00000184697; TAA
FVISGVLTL

SEQ ID NO: 15011 - protein, 9 aa, Homo sapiens
  Table A; Target 15011; HLA-A*02:03; CLDN6; ENSG00000184697; TAA
FVISGVLTL

SEQ ID NO: 15012 - protein, 9 aa, Homo sapiens
  Table A; Target 15012; HLA-A*02:04; CLDN6; ENSG00000184697; TAA
FVISGVLTL

SEQ ID NO: 15013 - protein, 9 aa, Homo sapiens
  Table A; Target 15013; HLA-A*02:07; CLDN6; ENSG00000184697; TAA
FVISGVLTL

SEQ ID NO: 15014 - protein, 9 aa, Homo sapiens
  Table A; Target 15014; HLA-A*23:01; CLDN6; ENSG00000184697; TAA
FVISGVLTL

SEQ ID NO: 15015 - protein, 9 aa, Homo sapiens
  Table A; Target 15015; HLA-A*25:01; CLDN6; ENSG00000184697; TAA
FVISGVLTL

SEQ ID NO: 15016 - protein, 9 aa, Homo sapiens
  Table A; Target 15016; HLA-A*26:01; CLDN6; ENSG00000184697; TAA
FVISGVLTL

SEQ ID NO: 15017 - protein, 9 aa, Homo sapiens
  Table A; Target 15017; HLA-A*30:01; CLDN6; ENSG00000184697; TAA
FVISGVLTL

SEQ ID NO: 15018 - protein, 9 aa, Homo sapiens
  Table A; Target 15018; HLA-A*32:01; CLDN6; ENSG00000184697; TAA
FVISGVLTL

SEQ ID NO: 15019 - protein, 9 aa, Homo sapiens
  Table A; Target 15019; HLA-A*68:02; CLDN6; ENSG00000184697; TAA
FVISGVLTL

SEQ ID NO: 15020 - protein, 9 aa, Homo sapiens
  Table A; Target 15020; HLA-B*13:02; CLDN6; ENSG00000184697; TAA
FVISGVLTL

SEQ ID NO: 15021 - protein, 9 aa, Homo sapiens
  Table A; Target 15021; HLA-B*35:03; CLDN6; ENSG00000184697; TAA
FVISGVLTL

SEQ ID NO: 15022 - protein, 9 aa, Homo sapiens
  Table A; Target 15022; HLA-B*39:01; CLDN6; ENSG00000184697; TAA
FVISGVLTL

SEQ ID NO: 15023 - protein, 9 aa, Homo sapiens
  Table A; Target 15023; HLA-B*40:01; CLDN6; ENSG00000184697; TAA
FVISGVLTL

SEQ ID NO: 15024 - protein, 9 aa, Homo sapiens
  Table A; Target 15024; HLA-B*46:01; CLDN6; ENSG00000184697; TAA
FVISGVLTL

SEQ ID NO: 15025 - protein, 9 aa, Homo sapiens
  Table A; Target 15025; HLA-B*49:01; CLDN6; ENSG00000184697; TAA
FVISGVLTL

SEQ ID NO: 15026 - protein, 9 aa, Homo sapiens
  Table A; Target 15026; HLA-B*51:01; CLDN6; ENSG00000184697; TAA
FVISGVLTL

SEQ ID NO: 15027 - protein, 9 aa, Homo sapiens
  Table A; Target 15027; HLA-C*01:02; CLDN6; ENSG00000184697; TAA
FVISGVLTL

SEQ ID NO: 15028 - protein, 9 aa, Homo sapiens
  Table A; Target 15028; HLA-C*02:02; CLDN6; ENSG00000184697; TAA
FVISGVLTL

SEQ ID NO: 15029 - protein, 9 aa, Homo sapiens
  Table A; Target 15029; HLA-C*03:03; CLDN6; ENSG00000184697; TAA
FVISGVLTL

SEQ ID NO: 15030 - protein, 9 aa, Homo sapiens
  Table A; Target 15030; HLA-C*03:04; CLDN6; ENSG00000184697; TAA
FVISGVLTL

SEQ ID NO: 15031 - protein, 9 aa, Homo sapiens
  Table A; Target 15031; HLA-C*07:04; CLDN6; ENSG00000184697; TAA
FVISGVLTL

SEQ ID NO: 15032 - protein, 9 aa, Homo sapiens
  Table A; Target 15032; HLA-C*14:02; CLDN6; ENSG00000184697; TAA
FVISGVLTL

SEQ ID NO: 15033 - protein, 10 aa, Homo sapiens
  Table A; Target 15033; HLA-A*02:03; CLDN6; ENSG00000184697; TAA
FVISGVLTLI

SEQ ID NO: 15034 - protein, 10 aa, Homo sapiens
  Table A; Target 15034; HLA-A*02:07; CLDN6; ENSG00000184697; TAA
FVISGVLTLI

SEQ ID NO: 15035 - protein, 10 aa, Homo sapiens
  Table A; Target 15035; HLA-A*68:02; CLDN6; ENSG00000184697; TAA
FVISGVLTLI

SEQ ID NO: 15036 - protein, 9 aa, Homo sapiens
  Table A; Target 15036; HLA-A*02:01; CLDN6; ENSG00000184697; TAA
FYNPLVAEA

SEQ ID NO: 15037 - protein, 9 aa, Homo sapiens
  Table A; Target 15037; HLA-A*02:04; CLDN6; ENSG00000184697; TAA
FYNPLVAEA

SEQ ID NO: 15038 - protein, 9 aa, Homo sapiens
  Table A; Target 15038; HLA-A*23:01; CLDN6; ENSG00000184697; TAA
FYNPLVAEA

SEQ ID NO: 15039 - protein, 9 aa, Homo sapiens
  Table A; Target 15039; HLA-A*24:02; CLDN6; ENSG00000184697; TAA
FYNPLVAEA

SEQ ID NO: 15040 - protein, 9 aa, Homo sapiens
  Table A; Target 15040; HLA-A*29:02; CLDN6; ENSG00000184697; TAA
FYNPLVAEA

SEQ ID NO: 15041 - protein, 9 aa, Homo sapiens
  Table A; Target 15041; HLA-A*33:01; CLDN6; ENSG00000184697; TAA
FYNPLVAEA

SEQ ID NO: 15042 - protein, 9 aa, Homo sapiens
  Table A; Target 15042; HLA-A*33:03; CLDN6; ENSG00000184697; TAA
FYNPLVAEA

SEQ ID NO: 15043 - protein, 9 aa, Homo sapiens
  Table A; Target 15043; HLA-B*54:01; CLDN6; ENSG00000184697; TAA
FYNPLVAEA

SEQ ID NO: 15044 - protein, 9 aa, Homo sapiens
  Table A; Target 15044; HLA-B*56:01; CLDN6; ENSG00000184697; TAA
FYNPLVAEA

SEQ ID NO: 15045 - protein, 9 aa, Homo sapiens
  Table A; Target 15045; HLA-C*01:02; CLDN6; ENSG00000184697; TAA
FYNPLVAEA

SEQ ID NO: 15046 - protein, 9 aa, Homo sapiens
  Table A; Target 15046; HLA-C*02:02; CLDN6; ENSG00000184697; TAA
FYNPLVAEA

SEQ ID NO: 15047 - protein, 9 aa, Homo sapiens
  Table A; Target 15047; HLA-C*07:02; CLDN6; ENSG00000184697; TAA
FYNPLVAEA

SEQ ID NO: 15048 - protein, 9 aa, Homo sapiens
  Table A; Target 15048; HLA-C*14:02; CLDN6; ENSG00000184697; TAA
FYNPLVAEA

SEQ ID NO: 15049 - protein, 11 aa, Homo sapiens
  Table A; Target 15049; HLA-A*29:02; CLDN6; ENSG00000184697; TAA
FYNPLVAEAQK

SEQ ID NO: 15050 - protein, 11 aa, Homo sapiens
  Table A; Target 15050; HLA-A*31:01; CLDN6; ENSG00000184697; TAA
FYNPLVAEAQK

SEQ ID NO: 15051 - protein, 11 aa, Homo sapiens
  Table A; Target 15051; HLA-A*33:01; CLDN6; ENSG00000184697; TAA
FYNPLVAEAQK

SEQ ID NO: 15052 - protein, 11 aa, Homo sapiens
  Table A; Target 15052; HLA-A*33:03; CLDN6; ENSG00000184697; TAA
FYNPLVAEAQK

SEQ ID NO: 15053 - protein, 11 aa, Homo sapiens
  Table A; Target 15053; HLA-B*27:02; CLDN6; ENSG00000184697; TAA
FYNPLVAEAQK

SEQ ID NO: 15054 - protein, 9 aa, Homo sapiens
  Table A; Target 15054; HLA-A*30:02; CLDN6; ENSG00000184697; TAA
GGSQGPSHY

SEQ ID NO: 15055 - protein, 9 aa, Homo sapiens
  Table A; Target 15055; HLA-B*15:03; CLDN6; ENSG00000184697; TAA
GGSQGPSHY

SEQ ID NO: 15056 - protein, 9 aa, Homo sapiens
  Table A; Target 15056; HLA-C*07:04; CLDN6; ENSG00000184697; TAA
GGSQGPSHY

SEQ ID NO: 15057 - protein, 9 aa, Homo sapiens
  Table A; Target 15057; HLA-C*16:04; CLDN6; ENSG00000184697; TAA
GGSQGPSHY

SEQ ID NO: 15058 - protein, 10 aa, Homo sapiens
  Table A; Target 15058; HLA-B*27:05; CLDN6; ENSG00000184697; TAA
GGSQGPSHYM

SEQ ID NO: 15059 - protein, 10 aa, Homo sapiens
  Table A; Target 15059; HLA-C*04:01; CLDN6; ENSG00000184697; TAA
GGSQGPSHYM

SEQ ID NO: 15060 - protein, 10 aa, Homo sapiens
  Table A; Target 15060; HLA-C*16:02; CLDN6; ENSG00000184697; TAA
GGSQGPSHYM

SEQ ID NO: 15061 - protein, 9 aa, Homo sapiens
  Table A; Target 15061; HLA-A*02:01; CLDN6; ENSG00000184697; TAA
GIVFVISGV

SEQ ID NO: 15062 - protein, 9 aa, Homo sapiens
  Table A; Target 15062; HLA-A*02:03; CLDN6; ENSG00000184697; TAA
GIVFVISGV

SEQ ID NO: 15063 - protein, 9 aa, Homo sapiens
  Table A; Target 15063; HLA-A*02:04; CLDN6; ENSG00000184697; TAA
GIVFVISGV

SEQ ID NO: 15064 - protein, 9 aa, Homo sapiens
  Table A; Target 15064; HLA-A*02:07; CLDN6; ENSG00000184697; TAA
GIVFVISGV

SEQ ID NO: 15065 - protein, 9 aa, Homo sapiens
  Table A; Target 15065; HLA-A*68:02; CLDN6; ENSG00000184697; TAA
GIVFVISGV

SEQ ID NO: 15066 - protein, 9 aa, Homo sapiens
  Table A; Target 15066; HLA-B*13:02; CLDN6; ENSG00000184697; TAA
GIVFVISGV

SEQ ID NO: 15067 - protein, 9 aa, Homo sapiens
  Table A; Target 15067; HLA-B*27:05; CLDN6; ENSG00000184697; TAA
GIVFVISGV

SEQ ID NO: 15068 - protein, 9 aa, Homo sapiens
  Table A; Target 15068; HLA-B*49:01; CLDN6; ENSG00000184697; TAA
GIVFVISGV

SEQ ID NO: 15069 - protein, 9 aa, Homo sapiens
  Table A; Target 15069; HLA-B*55:01; CLDN6; ENSG00000184697; TAA
GIVFVISGV

SEQ ID NO: 15070 - protein, 10 aa, Homo sapiens
  Table A; Target 15070; HLA-A*02:04; CLDN6; ENSG00000184697; TAA
GLLLLGGGLL

SEQ ID NO: 15071 - protein, 9 aa, Homo sapiens
  Table A; Target 15071; HLA-A*02:01; CLDN6; ENSG00000184697; TAA
GLLVYLAGA

SEQ ID NO: 15072 - protein, 9 aa, Homo sapiens
  Table A; Target 15072; HLA-A*02:03; CLDN6; ENSG00000184697; TAA
GLLVYLAGA

SEQ ID NO: 15073 - protein, 9 aa, Homo sapiens
  Table A; Target 15073; HLA-A*02:04; CLDN6; ENSG00000184697; TAA
GLLVYLAGA

SEQ ID NO: 15074 - protein, 9 aa, Homo sapiens
  Table A; Target 15074; HLA-B*55:01; CLDN6; ENSG00000184697; TAA
GLLVYLAGA

SEQ ID NO: 15075 - protein, 10 aa, Homo sapiens
  Table A; Target 15075; HLA-A*03:01; CLDN6; ENSG00000184697; TAA
GLLVYLAGAK

SEQ ID NO: 15076 - protein, 9 aa, Homo sapiens
  Table A; Target 15076; HLA-B*15:01; CLDN6; ENSG00000184697; TAA
GMQILGVVL

SEQ ID NO: 15077 - protein, 9 aa, Homo sapiens
  Table A; Target 15077; HLA-C*07:04; CLDN6; ENSG00000184697; TAA
GMQILGVVL

SEQ ID NO: 15078 - protein, 9 aa, Homo sapiens
  Table A; Target 15078; HLA-A*02:01; CLDN6; ENSG00000184697; TAA
GNSIVVAQV

SEQ ID NO: 15079 - protein, 9 aa, Homo sapiens
  Table A; Target 15079; HLA-A*02:03; CLDN6; ENSG00000184697; TAA
GNSIVVAQV

SEQ ID NO: 15080 - protein, 9 aa, Homo sapiens
  Table A; Target 15080; HLA-A*30:01; CLDN6; ENSG00000184697; TAA
GNSIVVAQV

SEQ ID NO: 15081 - protein, 9 aa, Homo sapiens
  Table A; Target 15081; HLA-A*68:02; CLDN6; ENSG00000184697; TAA
GNSIVVAQV

SEQ ID NO: 15082 - protein, 9 aa, Homo sapiens
  Table A; Target 15082; HLA-B*13:02; CLDN6; ENSG00000184697; TAA
GNSIVVAQV

SEQ ID NO: 15083 - protein, 9 aa, Homo sapiens
  Table A; Target 15083; HLA-B*27:05; CLDN6; ENSG00000184697; TAA
GNSIVVAQV

SEQ ID NO: 15084 - protein, 9 aa, Homo sapiens
  Table A; Target 15084; HLA-B*37:01; CLDN6; ENSG00000184697; TAA
GNSIVVAQV

SEQ ID NO: 15085 - protein, 9 aa, Homo sapiens
  Table A; Target 15085; HLA-C*06:02; CLDN6; ENSG00000184697; TAA
GNSIVVAQV

SEQ ID NO: 15086 - protein, 8 aa, Homo sapiens
  Table A; Target 15086; HLA-B*27:02; CLDN6; ENSG00000184697; TAA
GPSEYPTK

SEQ ID NO: 15087 - protein, 10 aa, Homo sapiens
  Table A; Target 15087; HLA-A*30:02; CLDN6; ENSG00000184697; TAA
GPSEYPTKNY

SEQ ID NO: 15088 - protein, 10 aa, Homo sapiens
  Table A; Target 15088; HLA-B*35:01; CLDN6; ENSG00000184697; TAA
GPSEYPTKNY

SEQ ID NO: 15089 - protein, 10 aa, Homo sapiens
  Table A; Target 15089; HLA-B*44:03; CLDN6; ENSG00000184697; TAA
GPSEYPTKNY

SEQ ID NO: 15090 - protein, 10 aa, Homo sapiens
  Table A; Target 15090; HLA-C*04:01; CLDN6; ENSG00000184697; TAA
GPSEYPTKNY

SEQ ID NO: 15091 - protein, 10 aa, Homo sapiens
  Table A; Target 15091; HLA-C*12:03; CLDN6; ENSG00000184697; TAA
GPSEYPTKNY

SEQ ID NO: 15092 - protein, 11 aa, Homo sapiens
  Table A; Target 15092; HLA-A*68:01; CLDN6; ENSG00000184697; TAA
GPSEYPTKNYV

SEQ ID NO: 15093 - protein, 11 aa, Homo sapiens
  Table A; Target 15093; HLA-A*68:02; CLDN6; ENSG00000184697; TAA
GPSEYPTKNYV

SEQ ID NO: 15094 - protein, 11 aa, Homo sapiens
  Table A; Target 15094; HLA-B*07:02; CLDN6; ENSG00000184697; TAA
GPSEYPTKNYV

SEQ ID NO: 15095 - protein, 11 aa, Homo sapiens
  Table A; Target 15095; HLA-B*27:05; CLDN6; ENSG00000184697; TAA
GPSEYPTKNYV

SEQ ID NO: 15096 - protein, 11 aa, Homo sapiens
  Table A; Target 15096; HLA-B*51:01; CLDN6; ENSG00000184697; TAA
GPSEYPTKNYV

SEQ ID NO: 15097 - protein, 11 aa, Homo sapiens
  Table A; Target 15097; HLA-B*55:01; CLDN6; ENSG00000184697; TAA
GPSEYPTKNYV

SEQ ID NO: 15098 - protein, 11 aa, Homo sapiens
  Table A; Target 15098; HLA-B*56:01; CLDN6; ENSG00000184697; TAA
GPSEYPTKNYV

SEQ ID NO: 15099 - protein, 11 aa, Homo sapiens
  Table A; Target 15099; HLA-C*06:02; CLDN6; ENSG00000184697; TAA
GPSEYPTKNYV

SEQ ID NO: 15100 - protein, 11 aa, Homo sapiens
  Table A; Target 15100; HLA-C*12:03; CLDN6; ENSG00000184697; TAA
GPSEYPTKNYV

SEQ ID NO: 15101 - protein, 11 aa, Homo sapiens
  Table A; Target 15101; HLA-C*16:02; CLDN6; ENSG00000184697; TAA
GPSEYPTKNYV

SEQ ID NO: 15102 - protein, 9 aa, Homo sapiens
  Table A; Target 15102; HLA-A*29:02; CLDN6; ENSG00000184697; TAA
GPSHYMARY

SEQ ID NO: 15103 - protein, 9 aa, Homo sapiens
  Table A; Target 15103; HLA-A*30:02; CLDN6; ENSG00000184697; TAA
GPSHYMARY

SEQ ID NO: 15104 - protein, 8 aa, Homo sapiens
  Table A; Target 15104; HLA-B*15:01; CLDN6; ENSG00000184697; TAA
GQMQCKVY

SEQ ID NO: 15105 - protein, 8 aa, Homo sapiens
  Table A; Target 15105; HLA-B*15:03; CLDN6; ENSG00000184697; TAA
GQMQCKVY

SEQ ID NO: 15106 - protein, 8 aa, Homo sapiens
  Table A; Target 15106; HLA-A*30:02; CLDN6; ENSG00000184697; TAA
GSQGPSHY

SEQ ID NO: 15107 - protein, 8 aa, Homo sapiens
  Table A; Target 15107; HLA-C*16:02; CLDN6; ENSG00000184697; TAA
GSQGPSHY

SEQ ID NO: 15108 - protein, 9 aa, Homo sapiens
  Table A; Target 15108; HLA-A*30:02; CLDN6; ENSG00000184697; TAA
GSQGPSHYM

SEQ ID NO: 15109 - protein, 9 aa, Homo sapiens
  Table A; Target 15109; HLA-A*32:01; CLDN6; ENSG00000184697; TAA
GSQGPSHYM

SEQ ID NO: 15110 - protein, 9 aa, Homo sapiens
  Table A; Target 15110; HLA-B*15:01; CLDN6; ENSG00000184697; TAA
GSQGPSHYM

SEQ ID NO: 15111 - protein, 9 aa, Homo sapiens
  Table A; Target 15111; HLA-B*27:05; CLDN6; ENSG00000184697; TAA
GSQGPSHYM

SEQ ID NO: 15112 - protein, 9 aa, Homo sapiens
  Table A; Target 15112; HLA-B*46:01; CLDN6; ENSG00000184697; TAA
GSQGPSHYM

SEQ ID NO: 15113 - protein, 9 aa, Homo sapiens
  Table A; Target 15113; HLA-B*58:01; CLDN6; ENSG00000184697; TAA
GSQGPSHYM

SEQ ID NO: 15114 - protein, 9 aa, Homo sapiens
  Table A; Target 15114; HLA-C*03:03; CLDN6; ENSG00000184697; TAA
GSQGPSHYM

SEQ ID NO: 15115 - protein, 9 aa, Homo sapiens
  Table A; Target 15115; HLA-C*03:04; CLDN6; ENSG00000184697; TAA
GSQGPSHYM

SEQ ID NO: 15116 - protein, 9 aa, Homo sapiens
  Table A; Target 15116; HLA-C*04:01; CLDN6; ENSG00000184697; TAA
GSQGPSHYM

SEQ ID NO: 15117 - protein, 9 aa, Homo sapiens
  Table A; Target 15117; HLA-C*06:02; CLDN6; ENSG00000184697; TAA
GSQGPSHYM

SEQ ID NO: 15118 - protein, 9 aa, Homo sapiens
  Table A; Target 15118; HLA-C*07:01; CLDN6; ENSG00000184697; TAA
GSQGPSHYM

SEQ ID NO: 15119 - protein, 9 aa, Homo sapiens
  Table A; Target 15119; HLA-C*07:04; CLDN6; ENSG00000184697; TAA
GSQGPSHYM

SEQ ID NO: 15120 - protein, 9 aa, Homo sapiens
  Table A; Target 15120; HLA-C*12:03; CLDN6; ENSG00000184697; TAA
GSQGPSHYM

SEQ ID NO: 15121 - protein, 9 aa, Homo sapiens
  Table A; Target 15121; HLA-C*16:01; CLDN6; ENSG00000184697; TAA
GSQGPSHYM

SEQ ID NO: 15122 - protein, 9 aa, Homo sapiens
  Table A; Target 15122; HLA-C*16:02; CLDN6; ENSG00000184697; TAA
GSQGPSHYM

SEQ ID NO: 15123 - protein, 11 aa, Homo sapiens
  Table A; Target 15123; HLA-A*11:01; CLDN6; ENSG00000184697; TAA
GSQGPSHYMAR

SEQ ID NO: 15124 - protein, 11 aa, Homo sapiens
  Table A; Target 15124; HLA-A*31:01; CLDN6; ENSG00000184697; TAA
GSQGPSHYMAR

SEQ ID NO: 15125 - protein, 11 aa, Homo sapiens
  Table A; Target 15125; HLA-A*33:01; CLDN6; ENSG00000184697; TAA
GSQGPSHYMAR

SEQ ID NO: 15126 - protein, 9 aa, Homo sapiens
  Table A; Target 15126; HLA-A*02:01; CLDN6; ENSG00000184697; TAA
GVLTLIPVC

SEQ ID NO: 15127 - protein, 10 aa, Homo sapiens
  Table A; Target 15127; HLA-A*25:01; CLDN6; ENSG00000184697; TAA
GVLTLIPVCW

SEQ ID NO: 15128 - protein, 10 aa, Homo sapiens
  Table A; Target 15128; HLA-B*44:02; CLDN6; ENSG00000184697; TAA
GVLTLIPVCW

SEQ ID NO: 15129 - protein, 10 aa, Homo sapiens
  Table A; Target 15129; HLA-B*57:01; CLDN6; ENSG00000184697; TAA
GVLTLIPVCW

SEQ ID NO: 15130 - protein, 9 aa, Homo sapiens
  Table A; Target 15130; HLA-A*25:01; CLDN6; ENSG00000184697; TAA
GVVLTLLGW

SEQ ID NO: 15131 - protein, 9 aa, Homo sapiens
  Table A; Target 15131; HLA-B*57:01; CLDN6; ENSG00000184697; TAA
GVVLTLLGW

SEQ ID NO: 15132 - protein, 9 aa, Homo sapiens
  Table A; Target 15132; HLA-B*58:01; CLDN6; ENSG00000184697; TAA
GVVLTLLGW

SEQ ID NO: 15133 - protein, 8 aa, Homo sapiens
  Table A; Target 15133; HLA-A*23:01; CLDN6; ENSG00000184697; TAA
IALLVALF

SEQ ID NO: 15134 - protein, 8 aa, Homo sapiens
  Table A; Target 15134; HLA-B*51:01; CLDN6; ENSG00000184697; TAA
IALLVALF

SEQ ID NO: 15135 - protein, 8 aa, Homo sapiens
  Table A; Target 15135; HLA-B*57:01; CLDN6; ENSG00000184697; TAA
IALLVALF

SEQ ID NO: 15136 - protein, 8 aa, Homo sapiens
  Table A; Target 15136; HLA-B*54:01; CLDN6; ENSG00000184697; TAA
IGNSIVVA

SEQ ID NO: 15137 - protein, 9 aa, Homo sapiens
  Table A; Target 15137; HLA-A*03:02; CLDN6; ENSG00000184697; TAA
IGNSIVVAQ

SEQ ID NO: 15138 - protein, 9 aa, Homo sapiens
  Table A; Target 15138; HLA-A*31:01; CLDN6; ENSG00000184697; TAA
IGNSIVVAQ

SEQ ID NO: 15139 - protein, 9 aa, Homo sapiens
  Table A; Target 15139; HLA-A*33:01; CLDN6; ENSG00000184697; TAA
IGNSIVVAQ

SEQ ID NO: 15140 - protein, 9 aa, Homo sapiens
  Table A; Target 15140; HLA-A*33:03; CLDN6; ENSG00000184697; TAA
IGNSIVVAQ

SEQ ID NO: 15141 - protein, 9 aa, Homo sapiens
  Table A; Target 15141; HLA-B*07:02; CLDN6; ENSG00000184697; TAA
IGNSIVVAQ

SEQ ID NO: 15142 - protein, 9 aa, Homo sapiens
  Table A; Target 15142; HLA-B*27:02; CLDN6; ENSG00000184697; TAA
IGNSIVVAQ

SEQ ID NO: 15143 - protein, 9 aa, Homo sapiens
  Table A; Target 15143; HLA-B*27:05; CLDN6; ENSG00000184697; TAA
IGNSIVVAQ

SEQ ID NO: 15144 - protein, 9 aa, Homo sapiens
  Table A; Target 15144; HLA-B*35:01; CLDN6; ENSG00000184697; TAA
IGNSIVVAQ

SEQ ID NO: 15145 - protein, 9 aa, Homo sapiens
  Table A; Target 15145; HLA-C*01:02; CLDN6; ENSG00000184697; TAA
IGNSIVVAQ

SEQ ID NO: 15146 - protein, 9 aa, Homo sapiens
  Table A; Target 15146; HLA-C*04:01; CLDN6; ENSG00000184697; TAA
IGNSIVVAQ

SEQ ID NO: 15147 - protein, 9 aa, Homo sapiens
  Table A; Target 15147; HLA-C*06:02; CLDN6; ENSG00000184697; TAA
IGNSIVVAQ

SEQ ID NO: 15148 - protein, 9 aa, Homo sapiens
  Table A; Target 15148; HLA-C*07:01; CLDN6; ENSG00000184697; TAA
IGNSIVVAQ

SEQ ID NO: 15149 - protein, 9 aa, Homo sapiens
  Table A; Target 15149; HLA-C*07:02; CLDN6; ENSG00000184697; TAA
IGNSIVVAQ

SEQ ID NO: 15150 - protein, 9 aa, Homo sapiens
  Table A; Target 15150; HLA-C*07:04; CLDN6; ENSG00000184697; TAA
IGNSIVVAQ

SEQ ID NO: 15151 - protein, 9 aa, Homo sapiens
  Table A; Target 15151; HLA-C*12:03; CLDN6; ENSG00000184697; TAA
IGNSIVVAQ

SEQ ID NO: 15152 - protein, 9 aa, Homo sapiens
  Table A; Target 15152; HLA-C*14:02; CLDN6; ENSG00000184697; TAA
IGNSIVVAQ

SEQ ID NO: 15153 - protein, 9 aa, Homo sapiens
  Table A; Target 15153; HLA-C*16:02; CLDN6; ENSG00000184697; TAA
IGNSIVVAQ

SEQ ID NO: 15154 - protein, 9 aa, Homo sapiens
  Table A; Target 15154; HLA-A*03:01; CLDN6; ENSG00000184697; TAA
IIRDFYNPL

SEQ ID NO: 15155 - protein, 9 aa, Homo sapiens
  Table A; Target 15155; HLA-A*31:01; CLDN6; ENSG00000184697; TAA
IIRDFYNPL

SEQ ID NO: 15156 - protein, 9 aa, Homo sapiens
  Table A; Target 15156; HLA-C*01:02; CLDN6; ENSG00000184697; TAA
IIRDFYNPL

SEQ ID NO: 15157 - protein, 10 aa, Homo sapiens
  Table A; Target 15157; HLA-A*02:03; CLDN6; ENSG00000184697; TAA
IIRDFYNPLV

SEQ ID NO: 15158 - protein, 8 aa, Homo sapiens
  Table A; Target 15158; HLA-A*02:01; CLDN6; ENSG00000184697; TAA
ILGVVLTL

SEQ ID NO: 15159 - protein, 8 aa, Homo sapiens
  Table A; Target 15159; HLA-A*02:03; CLDN6; ENSG00000184697; TAA
ILGVVLTL

SEQ ID NO: 15160 - protein, 8 aa, Homo sapiens
  Table A; Target 15160; HLA-A*02:04; CLDN6; ENSG00000184697; TAA
ILGVVLTL

SEQ ID NO: 15161 - protein, 8 aa, Homo sapiens
  Table A; Target 15161; HLA-A*23:01; CLDN6; ENSG00000184697; TAA
ILGVVLTL

SEQ ID NO: 15162 - protein, 8 aa, Homo sapiens
  Table A; Target 15162; HLA-C*07:04; CLDN6; ENSG00000184697; TAA
ILGVVLTL

SEQ ID NO: 15163 - protein, 8 aa, Homo sapiens
  Table A; Target 15163; HLA-C*12:03; CLDN6; ENSG00000184697; TAA
ILGVVLTL

SEQ ID NO: 15164 - protein, 9 aa, Homo sapiens
  Table A; Target 15164; HLA-A*02:01; CLDN6; ENSG00000184697; TAA
ILGVVLTLL

SEQ ID NO: 15165 - protein, 9 aa, Homo sapiens
  Table A; Target 15165; HLA-A*02:03; CLDN6; ENSG00000184697; TAA
ILGVVLTLL

SEQ ID NO: 15166 - protein, 9 aa, Homo sapiens
  Table A; Target 15166; HLA-A*02:04; CLDN6; ENSG00000184697; TAA
ILGVVLTLL

SEQ ID NO: 15167 - protein, 9 aa, Homo sapiens
  Table A; Target 15167; HLA-A*02:07; CLDN6; ENSG00000184697; TAA
ILGVVLTLL

SEQ ID NO: 15168 - protein, 9 aa, Homo sapiens
  Table A; Target 15168; HLA-A*24:02; CLDN6; ENSG00000184697; TAA
ILGVVLTLL

SEQ ID NO: 15169 - protein, 8 aa, Homo sapiens
  Table A; Target 15169; HLA-A*30:02; CLDN6; ENSG00000184697; TAA
ISRGPSEY

SEQ ID NO: 15170 - protein, 8 aa, Homo sapiens
  Table A; Target 15170; HLA-B*15:01; CLDN6; ENSG00000184697; TAA
ISRGPSEY

SEQ ID NO: 15171 - protein, 8 aa, Homo sapiens
  Table A; Target 15171; HLA-B*15:03; CLDN6; ENSG00000184697; TAA
ISRGPSEY

SEQ ID NO: 15172 - protein, 8 aa, Homo sapiens
  Table A; Target 15172; HLA-B*46:01; CLDN6; ENSG00000184697; TAA
ISRGPSEY

SEQ ID NO: 15173 - protein, 8 aa, Homo sapiens
  Table A; Target 15173; HLA-C*16:01; CLDN6; ENSG00000184697; TAA
ISRGPSEY

SEQ ID NO: 15174 - protein, 8 aa, Homo sapiens
  Table A; Target 15174; HLA-C*16:02; CLDN6; ENSG00000184697; TAA
ISRGPSEY

SEQ ID NO: 15175 - protein, 10 aa, Homo sapiens
  Table A; Target 15175; HLA-C*06:02; CLDN6; ENSG00000184697; TAA
ISRGPSEYPT

SEQ ID NO: 15176 - protein, 10 aa, Homo sapiens
  Table A; Target 15176; HLA-C*07:02; CLDN6; ENSG00000184697; TAA
ISRGPSEYPT

SEQ ID NO: 15177 - protein, 11 aa, Homo sapiens
  Table A; Target 15177; HLA-A*03:02; CLDN6; ENSG00000184697; TAA
ISRGPSEYPTK

SEQ ID NO: 15178 - protein, 8 aa, Homo sapiens
  Table A; Target 15178; HLA-A*02:03; CLDN6; ENSG00000184697; TAA
IVFVISGV

SEQ ID NO: 15179 - protein, 8 aa, Homo sapiens
  Table A; Target 15179; HLA-B*51:01; CLDN6; ENSG00000184697; TAA
IVFVISGV

SEQ ID NO: 15180 - protein, 9 aa, Homo sapiens
  Table A; Target 15180; HLA-A*23:01; CLDN6; ENSG00000184697; TAA
IVFVISGVL

SEQ ID NO: 15181 - protein, 9 aa, Homo sapiens
  Table A; Target 15181; HLA-A*25:01; CLDN6; ENSG00000184697; TAA
IVFVISGVL

SEQ ID NO: 15182 - protein, 9 aa, Homo sapiens
  Table A; Target 15182; HLA-B*07:02; CLDN6; ENSG00000184697; TAA
IVFVISGVL

SEQ ID NO: 15183 - protein, 9 aa, Homo sapiens
  Table A; Target 15183; HLA-B*15:03; CLDN6; ENSG00000184697; TAA
IVFVISGVL

SEQ ID NO: 15184 - protein, 9 aa, Homo sapiens
  Table A; Target 15184; HLA-B*35:01; CLDN6; ENSG00000184697; TAA
IVFVISGVL

SEQ ID NO: 15185 - protein, 9 aa, Homo sapiens
  Table A; Target 15185; HLA-B*35:03; CLDN6; ENSG00000184697; TAA
IVFVISGVL

SEQ ID NO: 15186 - protein, 9 aa, Homo sapiens
  Table A; Target 15186; HLA-B*40:01; CLDN6; ENSG00000184697; TAA
IVFVISGVL

SEQ ID NO: 15187 - protein, 9 aa, Homo sapiens
  Table A; Target 15187; HLA-B*46:01; CLDN6; ENSG00000184697; TAA
IVFVISGVL

SEQ ID NO: 15188 - protein, 9 aa, Homo sapiens
  Table A; Target 15188; HLA-C*01:02; CLDN6; ENSG00000184697; TAA
IVFVISGVL

SEQ ID NO: 15189 - protein, 9 aa, Homo sapiens
  Table A; Target 15189; HLA-C*02:02; CLDN6; ENSG00000184697; TAA
IVFVISGVL

SEQ ID NO: 15190 - protein, 9 aa, Homo sapiens
  Table A; Target 15190; HLA-C*03:03; CLDN6; ENSG00000184697; TAA
IVFVISGVL

SEQ ID NO: 15191 - protein, 9 aa, Homo sapiens
  Table A; Target 15191; HLA-C*03:04; CLDN6; ENSG00000184697; TAA
IVFVISGVL

SEQ ID NO: 15192 - protein, 9 aa, Homo sapiens
  Table A; Target 15192; HLA-C*07:02; CLDN6; ENSG00000184697; TAA
IVFVISGVL

SEQ ID NO: 15193 - protein, 9 aa, Homo sapiens
  Table A; Target 15193; HLA-C*12:03; CLDN6; ENSG00000184697; TAA
IVFVISGVL

SEQ ID NO: 15194 - protein, 9 aa, Homo sapiens
  Table A; Target 15194; HLA-C*16:04; CLDN6; ENSG00000184697; TAA
IVFVISGVL

SEQ ID NO: 15195 - protein, 11 aa, Homo sapiens
  Table A; Target 15195; HLA-A*68:02; CLDN6; ENSG00000184697; TAA
IVFVISGVLTL

SEQ ID NO: 15196 - protein, 8 aa, Homo sapiens
  Table A; Target 15196; HLA-B*57:01; CLDN6; ENSG00000184697; TAA
IVVAQVVW

SEQ ID NO: 15197 - protein, 8 aa, Homo sapiens
  Table A; Target 15197; HLA-B*58:01; CLDN6; ENSG00000184697; TAA
IVVAQVVW

SEQ ID NO: 15198 - protein, 8 aa, Homo sapiens
  Table A; Target 15198; HLA-B*37:01; CLDN6; ENSG00000184697; TAA
KDSKARLV

SEQ ID NO: 15199 - protein, 8 aa, Homo sapiens
  Table A; Target 15199; HLA-C*06:02; CLDN6; ENSG00000184697; TAA
KDSKARLV

SEQ ID NO: 15200 - protein, 9 aa, Homo sapiens
  Table A; Target 15200; HLA-B*37:01; CLDN6; ENSG00000184697; TAA
KDSKARLVL

SEQ ID NO: 15201 - protein, 9 aa, Homo sapiens
  Table A; Target 15201; HLA-B*40:02; CLDN6; ENSG00000184697; TAA
KDSKARLVL

SEQ ID NO: 15202 - protein, 9 aa, Homo sapiens
  Table A; Target 15202; HLA-C*06:02; CLDN6; ENSG00000184697; TAA
KDSKARLVL

SEQ ID NO: 15203 - protein, 9 aa, Homo sapiens
  Table A; Target 15203; HLA-A*01:01; CLDN6; ENSG00000184697; TAA
KRELGASLY

SEQ ID NO: 15204 - protein, 9 aa, Homo sapiens
  Table A; Target 15204; HLA-C*06:02; CLDN6; ENSG00000184697; TAA
KRELGASLY

SEQ ID NO: 15205 - protein, 9 aa, Homo sapiens
  Table A; Target 15205; HLA-C*07:01; CLDN6; ENSG00000184697; TAA
KRELGASLY

SEQ ID NO: 15206 - protein, 9 aa, Homo sapiens
  Table A; Target 15206; HLA-C*16:04; CLDN6; ENSG00000184697; TAA
KRELGASLY

SEQ ID NO: 15207 - protein, 10 aa, Homo sapiens
  Table A; Target 15207; HLA-A*32:01; CLDN6; ENSG00000184697; TAA
KVTAFIGNSI

SEQ ID NO: 15208 - protein, 10 aa, Homo sapiens
  Table A; Target 15208; HLA-B*13:02; CLDN6; ENSG00000184697; TAA
KVTAFIGNSI

SEQ ID NO: 15209 - protein, 10 aa, Homo sapiens
  Table A; Target 15209; HLA-B*58:01; CLDN6; ENSG00000184697; TAA
KVTAFIGNSI

SEQ ID NO: 15210 - protein, 10 aa, Homo sapiens
  Table A; Target 15210; HLA-C*06:02; CLDN6; ENSG00000184697; TAA
KVTAFIGNSI

SEQ ID NO: 15211 - protein, 9 aa, Homo sapiens
  Table A; Target 15211; HLA-A*02:01; CLDN6; ENSG00000184697; TAA
KVYDSLLAL

SEQ ID NO: 15212 - protein, 9 aa, Homo sapiens
  Table A; Target 15212; HLA-A*02:03; CLDN6; ENSG00000184697; TAA
KVYDSLLAL

SEQ ID NO: 15213 - protein, 9 aa, Homo sapiens
  Table A; Target 15213; HLA-A*02:04; CLDN6; ENSG00000184697; TAA
KVYDSLLAL

SEQ ID NO: 15214 - protein, 9 aa, Homo sapiens
  Table A; Target 15214; HLA-A*02:07; CLDN6; ENSG00000184697; TAA
KVYDSLLAL

SEQ ID NO: 15215 - protein, 9 aa, Homo sapiens
  Table A; Target 15215; HLA-A*03:01; CLDN6; ENSG00000184697; TAA
KVYDSLLAL

SEQ ID NO: 15216 - protein, 9 aa, Homo sapiens
  Table A; Target 15216; HLA-A*03:02; CLDN6; ENSG00000184697; TAA
KVYDSLLAL

SEQ ID NO: 15217 - protein, 9 aa, Homo sapiens
  Table A; Target 15217; HLA-A*11:01; CLDN6; ENSG00000184697; TAA
KVYDSLLAL

SEQ ID NO: 15218 - protein, 9 aa, Homo sapiens
  Table A; Target 15218; HLA-A*23:01; CLDN6; ENSG00000184697; TAA
KVYDSLLAL

SEQ ID NO: 15219 - protein, 9 aa, Homo sapiens
  Table A; Target 15219; HLA-A*25:01; CLDN6; ENSG00000184697; TAA
KVYDSLLAL

SEQ ID NO: 15220 - protein, 9 aa, Homo sapiens
  Table A; Target 15220; HLA-A*26:01; CLDN6; ENSG00000184697; TAA
KVYDSLLAL

SEQ ID NO: 15221 - protein, 9 aa, Homo sapiens
  Table A; Target 15221; HLA-A*29:02; CLDN6; ENSG00000184697; TAA
KVYDSLLAL

SEQ ID NO: 15222 - protein, 9 aa, Homo sapiens
  Table A; Target 15222; HLA-A*31:01; CLDN6; ENSG00000184697; TAA
KVYDSLLAL

SEQ ID NO: 15223 - protein, 9 aa, Homo sapiens
  Table A; Target 15223; HLA-A*32:01; CLDN6; ENSG00000184697; TAA
KVYDSLLAL

SEQ ID NO: 15224 - protein, 9 aa, Homo sapiens
  Table A; Target 15224; HLA-A*68:02; CLDN6; ENSG00000184697; TAA
KVYDSLLAL

SEQ ID NO: 15225 - protein, 9 aa, Homo sapiens
  Table A; Target 15225; HLA-B*13:02; CLDN6; ENSG00000184697; TAA
KVYDSLLAL

SEQ ID NO: 15226 - protein, 9 aa, Homo sapiens
  Table A; Target 15226; HLA-B*40:02; CLDN6; ENSG00000184697; TAA
KVYDSLLAL

SEQ ID NO: 15227 - protein, 9 aa, Homo sapiens
  Table A; Target 15227; HLA-B*46:01; CLDN6; ENSG00000184697; TAA
KVYDSLLAL

SEQ ID NO: 15228 - protein, 9 aa, Homo sapiens
  Table A; Target 15228; HLA-B*57:01; CLDN6; ENSG00000184697; TAA
KVYDSLLAL

SEQ ID NO: 15229 - protein, 9 aa, Homo sapiens
  Table A; Target 15229; HLA-B*58:01; CLDN6; ENSG00000184697; TAA
KVYDSLLAL

SEQ ID NO: 15230 - protein, 9 aa, Homo sapiens
  Table A; Target 15230; HLA-C*01:02; CLDN6; ENSG00000184697; TAA
KVYDSLLAL

SEQ ID NO: 15231 - protein, 9 aa, Homo sapiens
  Table A; Target 15231; HLA-C*02:02; CLDN6; ENSG00000184697; TAA
KVYDSLLAL

SEQ ID NO: 15232 - protein, 9 aa, Homo sapiens
  Table A; Target 15232; HLA-C*03:03; CLDN6; ENSG00000184697; TAA
KVYDSLLAL

SEQ ID NO: 15233 - protein, 9 aa, Homo sapiens
  Table A; Target 15233; HLA-C*03:04; CLDN6; ENSG00000184697; TAA
KVYDSLLAL

SEQ ID NO: 15234 - protein, 9 aa, Homo sapiens
  Table A; Target 15234; HLA-C*12:03; CLDN6; ENSG00000184697; TAA
KVYDSLLAL

SEQ ID NO: 15235 - protein, 11 aa, Homo sapiens
  Table A; Target 15235; HLA-A*03:01; CLDN6; ENSG00000184697; TAA
KVYDSLLALPQ

SEQ ID NO: 15236 - protein, 9 aa, Homo sapiens
  Table A; Target 15236; HLA-A*02:01; CLDN6; ENSG00000184697; TAA
LALPQDLQA

SEQ ID NO: 15237 - protein, 9 aa, Homo sapiens
  Table A; Target 15237; HLA-B*27:05; CLDN6; ENSG00000184697; TAA
LALPQDLQA

SEQ ID NO: 15238 - protein, 9 aa, Homo sapiens
  Table A; Target 15238; HLA-B*35:03; CLDN6; ENSG00000184697; TAA
LALPQDLQA

SEQ ID NO: 15239 - protein, 9 aa, Homo sapiens
  Table A; Target 15239; HLA-B*54:01; CLDN6; ENSG00000184697; TAA
LALPQDLQA

SEQ ID NO: 15240 - protein, 9 aa, Homo sapiens
  Table A; Target 15240; HLA-B*55:01; CLDN6; ENSG00000184697; TAA
LALPQDLQA

SEQ ID NO: 15241 - protein, 9 aa, Homo sapiens
  Table A; Target 15241; HLA-B*56:01; CLDN6; ENSG00000184697; TAA
LALPQDLQA

SEQ ID NO: 15242 - protein, 9 aa, Homo sapiens
  Table A; Target 15242; HLA-C*03:03; CLDN6; ENSG00000184697; TAA
LALPQDLQA

SEQ ID NO: 15243 - protein, 9 aa, Homo sapiens
  Table A; Target 15243; HLA-C*03:04; CLDN6; ENSG00000184697; TAA
LALPQDLQA

SEQ ID NO: 15244 - protein, 10 aa, Homo sapiens
  Table A; Target 15244; HLA-A*02:01; CLDN6; ENSG00000184697; TAA
LALPQDLQAA

SEQ ID NO: 15245 - protein, 10 aa, Homo sapiens
  Table A; Target 15245; HLA-B*27:05; CLDN6; ENSG00000184697; TAA
LALPQDLQAA

SEQ ID NO: 15246 - protein, 10 aa, Homo sapiens
  Table A; Target 15246; HLA-B*46:01; CLDN6; ENSG00000184697; TAA
LALPQDLQAA

SEQ ID NO: 15247 - protein, 10 aa, Homo sapiens
  Table A; Target 15247; HLA-B*54:01; CLDN6; ENSG00000184697; TAA
LALPQDLQAA

SEQ ID NO: 15248 - protein, 10 aa, Homo sapiens
  Table A; Target 15248; HLA-B*55:01; CLDN6; ENSG00000184697; TAA
LALPQDLQAA

SEQ ID NO: 15249 - protein, 10 aa, Homo sapiens
  Table A; Target 15249; HLA-B*56:01; CLDN6; ENSG00000184697; TAA
LALPQDLQAA

SEQ ID NO: 15250 - protein, 10 aa, Homo sapiens
  Table A; Target 15250; HLA-C*03:04; CLDN6; ENSG00000184697; TAA
LALPQDLQAA

SEQ ID NO: 15251 - protein, 10 aa, Homo sapiens
  Table A; Target 15251; HLA-C*04:01; CLDN6; ENSG00000184697; TAA
LALPQDLQAA

SEQ ID NO: 15252 - protein, 10 aa, Homo sapiens
  Table A; Target 15252; HLA-C*06:02; CLDN6; ENSG00000184697; TAA
LALPQDLQAA

SEQ ID NO: 15253 - protein, 10 aa, Homo sapiens
  Table A; Target 15253; HLA-C*07:01; CLDN6; ENSG00000184697; TAA
LALPQDLQAA

SEQ ID NO: 15254 - protein, 11 aa, Homo sapiens
  Table A; Target 15254; HLA-A*11:01; CLDN6; ENSG00000184697; TAA
LALPQDLQAAR

SEQ ID NO: 15255 - protein, 11 aa, Homo sapiens
  Table A; Target 15255; HLA-A*29:02; CLDN6; ENSG00000184697; TAA
LALPQDLQAAR

SEQ ID NO: 15256 - protein, 11 aa, Homo sapiens
  Table A; Target 15256; HLA-A*31:01; CLDN6; ENSG00000184697; TAA
LALPQDLQAAR

SEQ ID NO: 15257 - protein, 11 aa, Homo sapiens
  Table A; Target 15257; HLA-A*33:01; CLDN6; ENSG00000184697; TAA
LALPQDLQAAR

SEQ ID NO: 15258 - protein, 11 aa, Homo sapiens
  Table A; Target 15258; HLA-A*33:03; CLDN6; ENSG00000184697; TAA
LALPQDLQAAR

SEQ ID NO: 15259 - protein, 11 aa, Homo sapiens
  Table A; Target 15259; HLA-A*68:01; CLDN6; ENSG00000184697; TAA
LALPQDLQAAR

SEQ ID NO: 15260 - protein, 11 aa, Homo sapiens
  Table A; Target 15260; HLA-B*27:02; CLDN6; ENSG00000184697; TAA
LALPQDLQAAR

SEQ ID NO: 15261 - protein, 11 aa, Homo sapiens
  Table A; Target 15261; HLA-B*27:05; CLDN6; ENSG00000184697; TAA
LALPQDLQAAR

SEQ ID NO: 15262 - protein, 11 aa, Homo sapiens
  Table A; Target 15262; HLA-B*57:01; CLDN6; ENSG00000184697; TAA
LALPQDLQAAR

SEQ ID NO: 15263 - protein, 11 aa, Homo sapiens
  Table A; Target 15263; HLA-C*07:06; CLDN6; ENSG00000184697; TAA
LALPQDLQAAR

SEQ ID NO: 15264 - protein, 9 aa, Homo sapiens
  Table A; Target 15264; HLA-B*57:01; CLDN6; ENSG00000184697; TAA
LGASLYLGW

SEQ ID NO: 15265 - protein, 11 aa, Homo sapiens
  Table A; Target 15265; HLA-A*02:01; CLDN6; ENSG00000184697; TAA
LLALPQDLQAA

SEQ ID NO: 15266 - protein, 11 aa, Homo sapiens
  Table A; Target 15266; HLA-A*02:03; CLDN6; ENSG00000184697; TAA
LLALPQDLQAA

SEQ ID NO: 15267 - protein, 11 aa, Homo sapiens
  Table A; Target 15267; HLA-A*02:04; CLDN6; ENSG00000184697; TAA
LLALPQDLQAA

SEQ ID NO: 15268 - protein, 11 aa, Homo sapiens
  Table A; Target 15268; HLA-B*54:01; CLDN6; ENSG00000184697; TAA
LLALPQDLQAA

SEQ ID NO: 15269 - protein, 11 aa, Homo sapiens
  Table A; Target 15269; HLA-C*06:02; CLDN6; ENSG00000184697; TAA
LLALPQDLQAA

SEQ ID NO: 15270 - protein, 8 aa, Homo sapiens
  Table A; Target 15270; HLA-A*02:03; CLDN6; ENSG00000184697; TAA
LLGWVNGL

SEQ ID NO: 15271 - protein, 8 aa, Homo sapiens
  Table A; Target 15271; HLA-A*02:04; CLDN6; ENSG00000184697; TAA
LLGWVNGL

SEQ ID NO: 15272 - protein, 9 aa, Homo sapiens
  Table A; Target 15272; HLA-A*02:03; CLDN6; ENSG00000184697; TAA
LLGWVNGLV

SEQ ID NO: 15273 - protein, 9 aa, Homo sapiens
  Table A; Target 15273; HLA-A*02:01; CLDN6; ENSG00000184697; TAA
LLLGGGLLC

SEQ ID NO: 15274 - protein, 10 aa, Homo sapiens
  Table A; Target 15274; HLA-A*02:01; CLDN6; ENSG00000184697; TAA
LLLGGGLLCC

SEQ ID NO: 15275 - protein, 9 aa, Homo sapiens
  Table A; Target 15275; HLA-A*02:04; CLDN6; ENSG00000184697; TAA
LLLLGGGLL

SEQ ID NO: 15276 - protein, 8 aa, Homo sapiens
  Table A; Target 15276; HLA-A*02:04; CLDN6; ENSG00000184697; TAA
LLVALFGL

SEQ ID NO: 15277 - protein, 9 aa, Homo sapiens
  Table A; Target 15277; HLA-A*02:07; CLDN6; ENSG00000184697; TAA
LLVALFGLL

SEQ ID NO: 15278 - protein, 9 aa, Homo sapiens
  Table A; Target 15278; HLA-A*03:01; CLDN6; ENSG00000184697; TAA
LLVYLAGAK

SEQ ID NO: 15279 - protein, 9 aa, Homo sapiens
  Table A; Target 15279; HLA-B*27:02; CLDN6; ENSG00000184697; TAA
LLVYLAGAK

SEQ ID NO: 15280 - protein, 8 aa, Homo sapiens
  Table A; Target 15280; HLA-B*08:01; CLDN6; ENSG00000184697; TAA
LPMWKVTA

SEQ ID NO: 15281 - protein, 8 aa, Homo sapiens
  Table A; Target 15281; HLA-B*54:01; CLDN6; ENSG00000184697; TAA
LPMWKVTA

SEQ ID NO: 15282 - protein, 8 aa, Homo sapiens
  Table A; Target 15282; HLA-B*55:01; CLDN6; ENSG00000184697; TAA
LPMWKVTA

SEQ ID NO: 15283 - protein, 8 aa, Homo sapiens
  Table A; Target 15283; HLA-B*56:01; CLDN6; ENSG00000184697; TAA
LPMWKVTA

SEQ ID NO: 15284 - protein, 9 aa, Homo sapiens
  Table A; Target 15284; HLA-B*07:02; CLDN6; ENSG00000184697; TAA
LPMWKVTAF

SEQ ID NO: 15285 - protein, 9 aa, Homo sapiens
  Table A; Target 15285; HLA-B*08:01; CLDN6; ENSG00000184697; TAA
LPMWKVTAF

SEQ ID NO: 15286 - protein, 9 aa, Homo sapiens
  Table A; Target 15286; HLA-B*35:01; CLDN6; ENSG00000184697; TAA
LPMWKVTAF

SEQ ID NO: 15287 - protein, 9 aa, Homo sapiens
  Table A; Target 15287; HLA-B*35:03; CLDN6; ENSG00000184697; TAA
LPMWKVTAF

SEQ ID NO: 15288 - protein, 9 aa, Homo sapiens
  Table A; Target 15288; HLA-B*51:01; CLDN6; ENSG00000184697; TAA
LPMWKVTAF

SEQ ID NO: 15289 - protein, 9 aa, Homo sapiens
  Table A; Target 15289; HLA-B*54:01; CLDN6; ENSG00000184697; TAA
LPMWKVTAF

SEQ ID NO: 15290 - protein, 9 aa, Homo sapiens
  Table A; Target 15290; HLA-B*55:01; CLDN6; ENSG00000184697; TAA
LPMWKVTAF

SEQ ID NO: 15291 - protein, 9 aa, Homo sapiens
  Table A; Target 15291; HLA-B*56:01; CLDN6; ENSG00000184697; TAA
LPMWKVTAF

SEQ ID NO: 15292 - protein, 9 aa, Homo sapiens
  Table A; Target 15292; HLA-C*07:02; CLDN6; ENSG00000184697; TAA
LPMWKVTAF

SEQ ID NO: 15293 - protein, 8 aa, Homo sapiens
  Table A; Target 15293; HLA-B*54:01; CLDN6; ENSG00000184697; TAA
LPQDLQAA

SEQ ID NO: 15294 - protein, 8 aa, Homo sapiens
  Table A; Target 15294; HLA-B*55:01; CLDN6; ENSG00000184697; TAA
LPQDLQAA

SEQ ID NO: 15295 - protein, 8 aa, Homo sapiens
  Table A; Target 15295; HLA-B*56:01; CLDN6; ENSG00000184697; TAA
LPQDLQAA

SEQ ID NO: 15296 - protein, 9 aa, Homo sapiens
  Table A; Target 15296; HLA-A*33:01; CLDN6; ENSG00000184697; TAA
LPQDLQAAR

SEQ ID NO: 15297 - protein, 9 aa, Homo sapiens
  Table A; Target 15297; HLA-A*33:03; CLDN6; ENSG00000184697; TAA
LPQDLQAAR

SEQ ID NO: 15298 - protein, 9 aa, Homo sapiens
  Table A; Target 15298; HLA-A*68:01; CLDN6; ENSG00000184697; TAA
LPQDLQAAR

SEQ ID NO: 15299 - protein, 9 aa, Homo sapiens
  Table A; Target 15299; HLA-B*27:02; CLDN6; ENSG00000184697; TAA
LPQDLQAAR

SEQ ID NO: 15300 - protein, 9 aa, Homo sapiens
  Table A; Target 15300; HLA-B*35:01; CLDN6; ENSG00000184697; TAA
LPQDLQAAR

SEQ ID NO: 15301 - protein, 9 aa, Homo sapiens
  Table A; Target 15301; HLA-B*35:03; CLDN6; ENSG00000184697; TAA
LPQDLQAAR

SEQ ID NO: 15302 - protein, 9 aa, Homo sapiens
  Table A; Target 15302; HLA-B*54:01; CLDN6; ENSG00000184697; TAA
LPQDLQAAR

SEQ ID NO: 15303 - protein, 9 aa, Homo sapiens
  Table A; Target 15303; HLA-B*55:01; CLDN6; ENSG00000184697; TAA
LPQDLQAAR

SEQ ID NO: 15304 - protein, 9 aa, Homo sapiens
  Table A; Target 15304; HLA-B*56:01; CLDN6; ENSG00000184697; TAA
LPQDLQAAR

SEQ ID NO: 15305 - protein, 9 aa, Homo sapiens
  Table A; Target 15305; HLA-C*07:06; CLDN6; ENSG00000184697; TAA
LPQDLQAAR

SEQ ID NO: 15306 - protein, 10 aa, Homo sapiens
  Table A; Target 15306; HLA-B*54:01; CLDN6; ENSG00000184697; TAA
LPQDLQAARA

SEQ ID NO: 15307 - protein, 10 aa, Homo sapiens
  Table A; Target 15307; HLA-B*55:01; CLDN6; ENSG00000184697; TAA
LPQDLQAARA

SEQ ID NO: 15308 - protein, 10 aa, Homo sapiens
  Table A; Target 15308; HLA-B*56:01; CLDN6; ENSG00000184697; TAA
LPQDLQAARA

SEQ ID NO: 15309 - protein, 11 aa, Homo sapiens
  Table A; Target 15309; HLA-B*07:02; CLDN6; ENSG00000184697; TAA
LPQDLQAARAL

SEQ ID NO: 15310 - protein, 11 aa, Homo sapiens
  Table A; Target 15310; HLA-B*35:01; CLDN6; ENSG00000184697; TAA
LPQDLQAARAL

SEQ ID NO: 15311 - protein, 11 aa, Homo sapiens
  Table A; Target 15311; HLA-B*35:03; CLDN6; ENSG00000184697; TAA
LPQDLQAARAL

SEQ ID NO: 15312 - protein, 11 aa, Homo sapiens
  Table A; Target 15312; HLA-B*54:01; CLDN6; ENSG00000184697; TAA
LPQDLQAARAL

SEQ ID NO: 15313 - protein, 11 aa, Homo sapiens
  Table A; Target 15313; HLA-B*55:01; CLDN6; ENSG00000184697; TAA
LPQDLQAARAL

SEQ ID NO: 15314 - protein, 11 aa, Homo sapiens
  Table A; Target 15314; HLA-B*56:01; CLDN6; ENSG00000184697; TAA
LPQDLQAARAL

SEQ ID NO: 15315 - protein, 11 aa, Homo sapiens
  Table A; Target 15315; HLA-C*01:02; CLDN6; ENSG00000184697; TAA
LPQDLQAARAL

SEQ ID NO: 15316 - protein, 11 aa, Homo sapiens
  Table A; Target 15316; HLA-C*04:01; CLDN6; ENSG00000184697; TAA
LPQDLQAARAL

SEQ ID NO: 15317 - protein, 11 aa, Homo sapiens
  Table A; Target 15317; HLA-C*07:02; CLDN6; ENSG00000184697; TAA
LPQDLQAARAL

SEQ ID NO: 15318 - protein, 11 aa, Homo sapiens
  Table A; Target 15318; HLA-C*14:02; CLDN6; ENSG00000184697; TAA
LPQDLQAARAL

SEQ ID NO: 15319 - protein, 9 aa, Homo sapiens
  Table A; Target 15319; HLA-B*08:01; CLDN6; ENSG00000184697; TAA
LQAARALCV

SEQ ID NO: 15320 - protein, 9 aa, Homo sapiens
  Table A; Target 15320; HLA-B*13:02; CLDN6; ENSG00000184697; TAA
LQAARALCV

SEQ ID NO: 15321 - protein, 8 aa, Homo sapiens
  Table A; Target 15321; HLA-B*57:01; CLDN6; ENSG00000184697; TAA
LTLIPVCW

SEQ ID NO: 15322 - protein, 9 aa, Homo sapiens
  Table A; Target 15322; HLA-A*02:01; CLDN6; ENSG00000184697; TAA
LTSGIVFVI

SEQ ID NO: 15323 - protein, 9 aa, Homo sapiens
  Table A; Target 15323; HLA-A*02:03; CLDN6; ENSG00000184697; TAA
LTSGIVFVI

SEQ ID NO: 15324 - protein, 9 aa, Homo sapiens
  Table A; Target 15324; HLA-A*02:04; CLDN6; ENSG00000184697; TAA
LTSGIVFVI

SEQ ID NO: 15325 - protein, 9 aa, Homo sapiens
  Table A; Target 15325; HLA-A*02:07; CLDN6; ENSG00000184697; TAA
LTSGIVFVI

SEQ ID NO: 15326 - protein, 9 aa, Homo sapiens
  Table A; Target 15326; HLA-A*23:01; CLDN6; ENSG00000184697; TAA
LTSGIVFVI

SEQ ID NO: 15327 - protein, 9 aa, Homo sapiens
  Table A; Target 15327; HLA-A*24:02; CLDN6; ENSG00000184697; TAA
LTSGIVFVI

SEQ ID NO: 15328 - protein, 9 aa, Homo sapiens
  Table A; Target 15328; HLA-A*68:01; CLDN6; ENSG00000184697; TAA
LTSGIVFVI

SEQ ID NO: 15329 - protein, 9 aa, Homo sapiens
  Table A; Target 15329; HLA-B*13:02; CLDN6; ENSG00000184697; TAA
LTSGIVFVI

SEQ ID NO: 15330 - protein, 9 aa, Homo sapiens
  Table A; Target 15330; HLA-B*27:02; CLDN6; ENSG00000184697; TAA
LTSGIVFVI

SEQ ID NO: 15331 - protein, 9 aa, Homo sapiens
  Table A; Target 15331; HLA-B*57:01; CLDN6; ENSG00000184697; TAA
LTSGIVFVI

SEQ ID NO: 15332 - protein, 9 aa, Homo sapiens
  Table A; Target 15332; HLA-C*02:02; CLDN6; ENSG00000184697; TAA
LTSGIVFVI

SEQ ID NO: 15333 - protein, 9 aa, Homo sapiens
  Table A; Target 15333; HLA-C*04:01; CLDN6; ENSG00000184697; TAA
LTSGIVFVI

SEQ ID NO: 15334 - protein, 9 aa, Homo sapiens
  Table A; Target 15334; HLA-C*06:02; CLDN6; ENSG00000184697; TAA
LTSGIVFVI

SEQ ID NO: 15335 - protein, 9 aa, Homo sapiens
  Table A; Target 15335; HLA-C*07:01; CLDN6; ENSG00000184697; TAA
LTSGIVFVI

SEQ ID NO: 15336 - protein, 9 aa, Homo sapiens
  Table A; Target 15336; HLA-C*07:04; CLDN6; ENSG00000184697; TAA
LTSGIVFVI

SEQ ID NO: 15337 - protein, 9 aa, Homo sapiens
  Table A; Target 15337; HLA-C*12:03; CLDN6; ENSG00000184697; TAA
LTSGIVFVI

SEQ ID NO: 15338 - protein, 10 aa, Homo sapiens
  Table A; Target 15338; HLA-C*16:01; CLDN6; ENSG00000184697; TAA
LVAEAQKREL

SEQ ID NO: 15339 - protein, 9 aa, Homo sapiens
  Table A; Target 15339; HLA-A*01:01; CLDN6; ENSG00000184697; TAA
LVALFGLLV

SEQ ID NO: 15340 - protein, 9 aa, Homo sapiens
  Table A; Target 15340; HLA-A*68:02; CLDN6; ENSG00000184697; TAA
LVALFGLLV

SEQ ID NO: 15341 - protein, 9 aa, Homo sapiens
  Table A; Target 15341; HLA-B*13:02; CLDN6; ENSG00000184697; TAA
LVALFGLLV

SEQ ID NO: 15342 - protein, 10 aa, Homo sapiens
  Table A; Target 15342; HLA-A*01:01; CLDN6; ENSG00000184697; TAA
LVALFGLLVY

SEQ ID NO: 15343 - protein, 10 aa, Homo sapiens
  Table A; Target 15343; HLA-A*29:02; CLDN6; ENSG00000184697; TAA
LVALFGLLVY

SEQ ID NO: 15344 - protein, 11 aa, Homo sapiens
  Table A; Target 15344; HLA-A*02:04; CLDN6; ENSG00000184697; TAA
LVALFGLLVYL

SEQ ID NO: 15345 - protein, 9 aa, Homo sapiens
  Table A; Target 15345; HLA-A*23:01; CLDN6; ENSG00000184697; TAA
LVLTSGIVF

SEQ ID NO: 15346 - protein, 9 aa, Homo sapiens
  Table A; Target 15346; HLA-A*29:02; CLDN6; ENSG00000184697; TAA
LVLTSGIVF

SEQ ID NO: 15347 - protein, 9 aa, Homo sapiens
  Table A; Target 15347; HLA-A*32:01; CLDN6; ENSG00000184697; TAA
LVLTSGIVF

SEQ ID NO: 15348 - protein, 9 aa, Homo sapiens
  Table A; Target 15348; HLA-B*15:01; CLDN6; ENSG00000184697; TAA
LVLTSGIVF

SEQ ID NO: 15349 - protein, 9 aa, Homo sapiens
  Table A; Target 15349; HLA-B*15:03; CLDN6; ENSG00000184697; TAA
LVLTSGIVF

SEQ ID NO: 15350 - protein, 9 aa, Homo sapiens
  Table A; Target 15350; HLA-B*46:01; CLDN6; ENSG00000184697; TAA
LVLTSGIVF

SEQ ID NO: 15351 - protein, 9 aa, Homo sapiens
  Table A; Target 15351; HLA-B*57:01; CLDN6; ENSG00000184697; TAA
LVLTSGIVF

SEQ ID NO: 15352 - protein, 9 aa, Homo sapiens
  Table A; Target 15352; HLA-C*02:02; CLDN6; ENSG00000184697; TAA
LVLTSGIVF

SEQ ID NO: 15353 - protein, 9 aa, Homo sapiens
  Table A; Target 15353; HLA-C*03:03; CLDN6; ENSG00000184697; TAA
LVLTSGIVF

SEQ ID NO: 15354 - protein, 9 aa, Homo sapiens
  Table A; Target 15354; HLA-C*03:04; CLDN6; ENSG00000184697; TAA
LVLTSGIVF

SEQ ID NO: 15355 - protein, 9 aa, Homo sapiens
  Table A; Target 15355; HLA-C*04:01; CLDN6; ENSG00000184697; TAA
LVLTSGIVF

SEQ ID NO: 15356 - protein, 9 aa, Homo sapiens
  Table A; Target 15356; HLA-C*07:04; CLDN6; ENSG00000184697; TAA
LVLTSGIVF

SEQ ID NO: 15357 - protein, 10 aa, Homo sapiens
  Table A; Target 15357; HLA-A*02:01; CLDN6; ENSG00000184697; TAA
LVLTSGIVFV

SEQ ID NO: 15358 - protein, 10 aa, Homo sapiens
  Table A; Target 15358; HLA-A*02:04; CLDN6; ENSG00000184697; TAA
LVLTSGIVFV

SEQ ID NO: 15359 - protein, 10 aa, Homo sapiens
  Table A; Target 15359; HLA-A*68:02; CLDN6; ENSG00000184697; TAA
LVLTSGIVFV

SEQ ID NO: 15360 - protein, 8 aa, Homo sapiens
  Table A; Target 15360; HLA-A*03:01; CLDN6; ENSG00000184697; TAA
LVYLAGAK

SEQ ID NO: 15361 - protein, 8 aa, Homo sapiens
  Table A; Target 15361; HLA-B*54:01; CLDN6; ENSG00000184697; TAA
MARYSTSA

SEQ ID NO: 15362 - protein, 9 aa, Homo sapiens
  Table A; Target 15362; HLA-B*54:01; CLDN6; ENSG00000184697; TAA
MARYSTSAP

SEQ ID NO: 15363 - protein, 10 aa, Homo sapiens
  Table A; Target 15363; HLA-B*54:01; CLDN6; ENSG00000184697; TAA
MARYSTSAPA

SEQ ID NO: 15364 - protein, 8 aa, Homo sapiens
  Table A; Target 15364; HLA-B*51:01; CLDN6; ENSG00000184697; TAA
MASAGMQI

SEQ ID NO: 15365 - protein, 8 aa, Homo sapiens
  Table A; Target 15365; HLA-C*03:04; CLDN6; ENSG00000184697; TAA
MASAGMQI

SEQ ID NO: 15366 - protein, 8 aa, Homo sapiens
  Table A; Target 15366; HLA-C*16:02; CLDN6; ENSG00000184697; TAA
MASAGMQI

SEQ ID NO: 15367 - protein, 9 aa, Homo sapiens
  Table A; Target 15367; HLA-B*35:01; CLDN6; ENSG00000184697; TAA
MASAGMQIL

SEQ ID NO: 15368 - protein, 9 aa, Homo sapiens
  Table A; Target 15368; HLA-B*35:03; CLDN6; ENSG00000184697; TAA
MASAGMQIL

SEQ ID NO: 15369 - protein, 9 aa, Homo sapiens
  Table A; Target 15369; HLA-B*38:01; CLDN6; ENSG00000184697; TAA
MASAGMQIL

SEQ ID NO: 15370 - protein, 9 aa, Homo sapiens
  Table A; Target 15370; HLA-C*02:02; CLDN6; ENSG00000184697; TAA
MASAGMQIL

SEQ ID NO: 15371 - protein, 9 aa, Homo sapiens
  Table A; Target 15371; HLA-C*03:03; CLDN6; ENSG00000184697; TAA
MASAGMQIL

SEQ ID NO: 15372 - protein, 9 aa, Homo sapiens
  Table A; Target 15372; HLA-C*03:04; CLDN6; ENSG00000184697; TAA
MASAGMQIL

SEQ ID NO: 15373 - protein, 9 aa, Homo sapiens
  Table A; Target 15373; HLA-C*07:04; CLDN6; ENSG00000184697; TAA
MASAGMQIL

SEQ ID NO: 15374 - protein, 9 aa, Homo sapiens
  Table A; Target 15374; HLA-C*07:06; CLDN6; ENSG00000184697; TAA
MASAGMQIL

SEQ ID NO: 15375 - protein, 9 aa, Homo sapiens
  Table A; Target 15375; HLA-C*12:03; CLDN6; ENSG00000184697; TAA
MASAGMQIL

SEQ ID NO: 15376 - protein, 9 aa, Homo sapiens
  Table A; Target 15376; HLA-B*38:01; CLDN6; ENSG00000184697; TAA
MQCKVYDSL

SEQ ID NO: 15377 - protein, 8 aa, Homo sapiens
  Table A; Target 15377; HLA-A*30:01; CLDN6; ENSG00000184697; TAA
MQILGVVL

SEQ ID NO: 15378 - protein, 8 aa, Homo sapiens
  Table A; Target 15378; HLA-B*08:01; CLDN6; ENSG00000184697; TAA
MQILGVVL

SEQ ID NO: 15379 - protein, 8 aa, Homo sapiens
  Table A; Target 15379; HLA-B*15:01; CLDN6; ENSG00000184697; TAA
MQILGVVL

SEQ ID NO: 15380 - protein, 8 aa, Homo sapiens
  Table A; Target 15380; HLA-B*15:03; CLDN6; ENSG00000184697; TAA
MQILGVVL

SEQ ID NO: 15381 - protein, 8 aa, Homo sapiens
  Table A; Target 15381; HLA-B*18:01; CLDN6; ENSG00000184697; TAA
MQILGVVL

SEQ ID NO: 15382 - protein, 8 aa, Homo sapiens
  Table A; Target 15382; HLA-B*27:05; CLDN6; ENSG00000184697; TAA
MQILGVVL

SEQ ID NO: 15383 - protein, 8 aa, Homo sapiens
  Table A; Target 15383; HLA-B*35:03; CLDN6; ENSG00000184697; TAA
MQILGVVL

SEQ ID NO: 15384 - protein, 8 aa, Homo sapiens
  Table A; Target 15384; HLA-B*38:01; CLDN6; ENSG00000184697; TAA
MQILGVVL

SEQ ID NO: 15385 - protein, 8 aa, Homo sapiens
  Table A; Target 15385; HLA-B*39:01; CLDN6; ENSG00000184697; TAA
MQILGVVL

SEQ ID NO: 15386 - protein, 8 aa, Homo sapiens
  Table A; Target 15386; HLA-B*40:01; CLDN6; ENSG00000184697; TAA
MQILGVVL

SEQ ID NO: 15387 - protein, 8 aa, Homo sapiens
  Table A; Target 15387; HLA-B*40:02; CLDN6; ENSG00000184697; TAA
MQILGVVL

SEQ ID NO: 15388 - protein, 8 aa, Homo sapiens
  Table A; Target 15388; HLA-C*03:03; CLDN6; ENSG00000184697; TAA
MQILGVVL

SEQ ID NO: 15389 - protein, 8 aa, Homo sapiens
  Table A; Target 15389; HLA-C*03:04; CLDN6; ENSG00000184697; TAA
MQILGVVL

SEQ ID NO: 15390 - protein, 8 aa, Homo sapiens
  Table A; Target 15390; HLA-C*07:04; CLDN6; ENSG00000184697; TAA
MQILGVVL

SEQ ID NO: 15391 - protein, 8 aa, Homo sapiens
  Table A; Target 15391; HLA-C*14:02; CLDN6; ENSG00000184697; TAA
MQILGVVL

SEQ ID NO: 15392 - protein, 9 aa, Homo sapiens
  Table A; Target 15392; HLA-B*27:05; CLDN6; ENSG00000184697; TAA
MQILGVVLT

SEQ ID NO: 15393 - protein, 10 aa, Homo sapiens
  Table A; Target 15393; HLA-B*38:01; CLDN6; ENSG00000184697; TAA
MQILGVVLTL

SEQ ID NO: 15394 - protein, 10 aa, Homo sapiens
  Table A; Target 15394; HLA-B*40:02; CLDN6; ENSG00000184697; TAA
MQILGVVLTL

SEQ ID NO: 15395 - protein, 10 aa, Homo sapiens
  Table A; Target 15395; HLA-C*07:01; CLDN6; ENSG00000184697; TAA
MSCVVQSTGQ

SEQ ID NO: 15396 - protein, 11 aa, Homo sapiens
  Table A; Target 15396; HLA-C*04:01; CLDN6; ENSG00000184697; TAA
MSCVVQSTGQM

SEQ ID NO: 15397 - protein, 11 aa, Homo sapiens
  Table A; Target 15397; HLA-C*07:01; CLDN6; ENSG00000184697; TAA
MSCVVQSTGQM

SEQ ID NO: 15398 - protein, 8 aa, Homo sapiens
  Table A; Target 15398; HLA-B*08:01; CLDN6; ENSG00000184697; TAA
NGLVSCAL

SEQ ID NO: 15399 - protein, 8 aa, Homo sapiens
  Table A; Target 15399; HLA-C*01:02; CLDN6; ENSG00000184697; TAA
NGLVSCAL

SEQ ID NO: 15400 - protein, 8 aa, Homo sapiens
  Table A; Target 15400; HLA-C*14:02; CLDN6; ENSG00000184697; TAA
NGLVSCAL

SEQ ID NO: 15401 - protein, 9 aa, Homo sapiens
  Table A; Target 15401; HLA-B*35:01; CLDN6; ENSG00000184697; TAA
NPLVAEAQK

SEQ ID NO: 15402 - protein, 8 aa, Homo sapiens
  Table A; Target 15402; HLA-B*51:01; CLDN6; ENSG00000184697; TAA
NSIVVAQV

SEQ ID NO: 15403 - protein, 9 aa, Homo sapiens
  Table A; Target 15403; HLA-A*68:02; CLDN6; ENSG00000184697; TAA
NSIVVAQVV

SEQ ID NO: 15404 - protein, 9 aa, Homo sapiens
  Table A; Target 15404; HLA-B*13:02; CLDN6; ENSG00000184697; TAA
NSIVVAQVV

SEQ ID NO: 15405 - protein, 9 aa, Homo sapiens
  Table A; Target 15405; HLA-C*02:02; CLDN6; ENSG00000184697; TAA
NSIVVAQVV

SEQ ID NO: 15406 - protein, 9 aa, Homo sapiens
  Table A; Target 15406; HLA-C*12:03; CLDN6; ENSG00000184697; TAA
NSIVVAQVV

SEQ ID NO: 15407 - protein, 10 aa, Homo sapiens
  Table A; Target 15407; HLA-B*44:02; CLDN6; ENSG00000184697; TAA
NSIVVAQVVW

SEQ ID NO: 15408 - protein, 10 aa, Homo sapiens
  Table A; Target 15408; HLA-B*57:01; CLDN6; ENSG00000184697; TAA
NSIVVAQVVW

SEQ ID NO: 15409 - protein, 10 aa, Homo sapiens
  Table A; Target 15409; HLA-B*58:01; CLDN6; ENSG00000184697; TAA
NSIVVAQVVW

SEQ ID NO: 15410 - protein, 10 aa, Homo sapiens
  Table A; Target 15410; HLA-C*04:01; CLDN6; ENSG00000184697; TAA
PQDLQAARAL

SEQ ID NO: 15411 - protein, 9 aa, Homo sapiens
  Table A; Target 15411; HLA-A*01:01; CLDN6; ENSG00000184697; TAA
PSEYPTKNY

SEQ ID NO: 15412 - protein, 9 aa, Homo sapiens
  Table A; Target 15412; HLA-A*30:02; CLDN6; ENSG00000184697; TAA
PSEYPTKNY

SEQ ID NO: 15413 - protein, 9 aa, Homo sapiens
  Table A; Target 15413; HLA-B*07:02; CLDN6; ENSG00000184697; TAA
PSEYPTKNY

SEQ ID NO: 15414 - protein, 9 aa, Homo sapiens
  Table A; Target 15414; HLA-C*04:01; CLDN6; ENSG00000184697; TAA
PSEYPTKNY

SEQ ID NO: 15415 - protein, 9 aa, Homo sapiens
  Table A; Target 15415; HLA-C*06:02; CLDN6; ENSG00000184697; TAA
PSEYPTKNY

SEQ ID NO: 15416 - protein, 9 aa, Homo sapiens
  Table A; Target 15416; HLA-C*07:01; CLDN6; ENSG00000184697; TAA
PSEYPTKNY

SEQ ID NO: 15417 - protein, 9 aa, Homo sapiens
  Table A; Target 15417; HLA-C*16:02; CLDN6; ENSG00000184697; TAA
PSEYPTKNY

SEQ ID NO: 15418 - protein, 10 aa, Homo sapiens
  Table A; Target 15418; HLA-A*01:01; CLDN6; ENSG00000184697; TAA
PSEYPTKNYV

SEQ ID NO: 15419 - protein, 10 aa, Homo sapiens
  Table A; Target 15419; HLA-B*07:02; CLDN6; ENSG00000184697; TAA
PSEYPTKNYV

SEQ ID NO: 15420 - protein, 10 aa, Homo sapiens
  Table A; Target 15420; HLA-C*04:01; CLDN6; ENSG00000184697; TAA
PSEYPTKNYV

SEQ ID NO: 15421 - protein, 10 aa, Homo sapiens
  Table A; Target 15421; HLA-C*06:02; CLDN6; ENSG00000184697; TAA
PSEYPTKNYV

SEQ ID NO: 15422 - protein, 10 aa, Homo sapiens
  Table A; Target 15422; HLA-C*07:01; CLDN6; ENSG00000184697; TAA
PSEYPTKNYV

SEQ ID NO: 15423 - protein, 10 aa, Homo sapiens
  Table A; Target 15423; HLA-C*07:02; CLDN6; ENSG00000184697; TAA
PSEYPTKNYV

SEQ ID NO: 15424 - protein, 11 aa, Homo sapiens
  Table A; Target 15424; HLA-A*01:01; CLDN6; ENSG00000184697; TAA
PSGGSQGPSHY

SEQ ID NO: 15425 - protein, 11 aa, Homo sapiens
  Table A; Target 15425; HLA-C*07:01; CLDN6; ENSG00000184697; TAA
PSGGSQGPSHY

SEQ ID NO: 15426 - protein, 8 aa, Homo sapiens
  Table A; Target 15426; HLA-B*51:01; CLDN6; ENSG00000184697; TAA
QAARALCV

SEQ ID NO: 15427 - protein, 9 aa, Homo sapiens
  Table A; Target 15427; HLA-B*51:01; CLDN6; ENSG00000184697; TAA
QAARALCVI

SEQ ID NO: 15428 - protein, 9 aa, Homo sapiens
  Table A; Target 15428; HLA-C*06:02; CLDN6; ENSG00000184697; TAA
QAARALCVI

SEQ ID NO: 15429 - protein, 9 aa, Homo sapiens
  Table A; Target 15429; HLA-C*07:01; CLDN6; ENSG00000184697; TAA
QAARALCVI

SEQ ID NO: 15430 - protein, 9 aa, Homo sapiens
  Table A; Target 15430; HLA-A*30:01; CLDN6; ENSG00000184697; TAA
QDLQAARAL

SEQ ID NO: 15431 - protein, 9 aa, Homo sapiens
  Table A; Target 15431; HLA-B*37:01; CLDN6; ENSG00000184697; TAA
QDLQAARAL

SEQ ID NO: 15432 - protein, 9 aa, Homo sapiens
  Table A; Target 15432; HLA-B*40:02; CLDN6; ENSG00000184697; TAA
QDLQAARAL

SEQ ID NO: 15433 - protein, 8 aa, Homo sapiens
  Table A; Target 15433; HLA-C*07:01; CLDN6; ENSG00000184697; TAA
QGPSHYMA

SEQ ID NO: 15434 - protein, 10 aa, Homo sapiens
  Table A; Target 15434; HLA-C*07:02; CLDN6; ENSG00000184697; TAA
QGPSHYMARY

SEQ ID NO: 15435 - protein, 9 aa, Homo sapiens
  Table A; Target 15435; HLA-A*02:01; CLDN6; ENSG00000184697; TAA
QILGVVLTL

SEQ ID NO: 15436 - protein, 9 aa, Homo sapiens
  Table A; Target 15436; HLA-A*02:03; CLDN6; ENSG00000184697; TAA
QILGVVLTL

SEQ ID NO: 15437 - protein, 9 aa, Homo sapiens
  Table A; Target 15437; HLA-A*02:04; CLDN6; ENSG00000184697; TAA
QILGVVLTL

SEQ ID NO: 15438 - protein, 9 aa, Homo sapiens
  Table A; Target 15438; HLA-A*02:07; CLDN6; ENSG00000184697; TAA
QILGVVLTL

SEQ ID NO: 15439 - protein, 9 aa, Homo sapiens
  Table A; Target 15439; HLA-A*03:01; CLDN6; ENSG00000184697; TAA
QILGVVLTL

SEQ ID NO: 15440 - protein, 9 aa, Homo sapiens
  Table A; Target 15440; HLA-A*23:01; CLDN6; ENSG00000184697; TAA
QILGVVLTL

SEQ ID NO: 15441 - protein, 9 aa, Homo sapiens
  Table A; Target 15441; HLA-A*24:02; CLDN6; ENSG00000184697; TAA
QILGVVLTL

SEQ ID NO: 15442 - protein, 9 aa, Homo sapiens
  Table A; Target 15442; HLA-A*25:01; CLDN6; ENSG00000184697; TAA
QILGVVLTL

SEQ ID NO: 15443 - protein, 9 aa, Homo sapiens
  Table A; Target 15443; HLA-A*29:02; CLDN6; ENSG00000184697; TAA
QILGVVLTL

SEQ ID NO: 15444 - protein, 9 aa, Homo sapiens
  Table A; Target 15444; HLA-A*30:01; CLDN6; ENSG00000184697; TAA
QILGVVLTL

SEQ ID NO: 15445 - protein, 9 aa, Homo sapiens
  Table A; Target 15445; HLA-A*31:01; CLDN6; ENSG00000184697; TAA
QILGVVLTL

SEQ ID NO: 15446 - protein, 9 aa, Homo sapiens
  Table A; Target 15446; HLA-A*32:01; CLDN6; ENSG00000184697; TAA
QILGVVLTL

SEQ ID NO: 15447 - protein, 9 aa, Homo sapiens
  Table A; Target 15447; HLA-A*68:02; CLDN6; ENSG00000184697; TAA
QILGVVLTL

SEQ ID NO: 15448 - protein, 9 aa, Homo sapiens
  Table A; Target 15448; HLA-B*13:02; CLDN6; ENSG00000184697; TAA
QILGVVLTL

SEQ ID NO: 15449 - protein, 9 aa, Homo sapiens
  Table A; Target 15449; HLA-B*35:01; CLDN6; ENSG00000184697; TAA
QILGVVLTL

SEQ ID NO: 15450 - protein, 9 aa, Homo sapiens
  Table A; Target 15450; HLA-B*35:03; CLDN6; ENSG00000184697; TAA
QILGVVLTL

SEQ ID NO: 15451 - protein, 9 aa, Homo sapiens
  Table A; Target 15451; HLA-B*38:01; CLDN6; ENSG00000184697; TAA
QILGVVLTL

SEQ ID NO: 15452 - protein, 9 aa, Homo sapiens
  Table A; Target 15452; HLA-B*40:02; CLDN6; ENSG00000184697; TAA
QILGVVLTL

SEQ ID NO: 15453 - protein, 9 aa, Homo sapiens
  Table A; Target 15453; HLA-B*44:03; CLDN6; ENSG00000184697; TAA
QILGVVLTL

SEQ ID NO: 15454 - protein, 9 aa, Homo sapiens
  Table A; Target 15454; HLA-B*51:01; CLDN6; ENSG00000184697; TAA
QILGVVLTL

SEQ ID NO: 15455 - protein, 9 aa, Homo sapiens
  Table A; Target 15455; HLA-B*58:01; CLDN6; ENSG00000184697; TAA
QILGVVLTL

SEQ ID NO: 15456 - protein, 9 aa, Homo sapiens
  Table A; Target 15456; HLA-C*01:02; CLDN6; ENSG00000184697; TAA
QILGVVLTL

SEQ ID NO: 15457 - protein, 9 aa, Homo sapiens
  Table A; Target 15457; HLA-C*02:02; CLDN6; ENSG00000184697; TAA
QILGVVLTL

SEQ ID NO: 15458 - protein, 9 aa, Homo sapiens
  Table A; Target 15458; HLA-C*03:03; CLDN6; ENSG00000184697; TAA
QILGVVLTL

SEQ ID NO: 15459 - protein, 9 aa, Homo sapiens
  Table A; Target 15459; HLA-C*03:04; CLDN6; ENSG00000184697; TAA
QILGVVLTL

SEQ ID NO: 15460 - protein, 9 aa, Homo sapiens
  Table A; Target 15460; HLA-C*07:04; CLDN6; ENSG00000184697; TAA
QILGVVLTL

SEQ ID NO: 15461 - protein, 9 aa, Homo sapiens
  Table A; Target 15461; HLA-C*07:06; CLDN6; ENSG00000184697; TAA
QILGVVLTL

SEQ ID NO: 15462 - protein, 10 aa, Homo sapiens
  Table A; Target 15462; HLA-A*02:04; CLDN6; ENSG00000184697; TAA
QILGVVLTLL

SEQ ID NO: 15463 - protein, 9 aa, Homo sapiens
  Table A; Target 15463; HLA-B*15:03; CLDN6; ENSG00000184697; TAA
QKRELGASL

SEQ ID NO: 15464 - protein, 10 aa, Homo sapiens
  Table A; Target 15464; HLA-B*15:03; CLDN6; ENSG00000184697; TAA
QKRELGASLY

SEQ ID NO: 15465 - protein, 9 aa, Homo sapiens
  Table A; Target 15465; HLA-A*11:01; CLDN6; ENSG00000184697; TAA
QSTGQMQCK

SEQ ID NO: 15466 - protein, 10 aa, Homo sapiens
  Table A; Target 15466; HLA-C*06:02; CLDN6; ENSG00000184697; TAA
QSTGQMQCKV

SEQ ID NO: 15467 - protein, 8 aa, Homo sapiens
  Table A; Target 15467; HLA-B*37:01; CLDN6; ENSG00000184697; TAA
RDFYNPLV

SEQ ID NO: 15468 - protein, 8 aa, Homo sapiens
  Table A; Target 15468; HLA-A*30:02; CLDN6; ENSG00000184697; TAA
RELGASLY

SEQ ID NO: 15469 - protein, 8 aa, Homo sapiens
  Table A; Target 15469; HLA-B*15:03; CLDN6; ENSG00000184697; TAA
RELGASLY

SEQ ID NO: 15470 - protein, 8 aa, Homo sapiens
  Table A; Target 15470; HLA-B*18:01; CLDN6; ENSG00000184697; TAA
RELGASLY

SEQ ID NO: 15471 - protein, 8 aa, Homo sapiens
  Table A; Target 15471; HLA-B*37:01; CLDN6; ENSG00000184697; TAA
RELGASLY

SEQ ID NO: 15472 - protein, 8 aa, Homo sapiens
  Table A; Target 15472; HLA-B*44:02; CLDN6; ENSG00000184697; TAA
RELGASLY

SEQ ID NO: 15473 - protein, 8 aa, Homo sapiens
  Table A; Target 15473; HLA-B*44:03; CLDN6; ENSG00000184697; TAA
RELGASLY

SEQ ID NO: 15474 - protein, 8 aa, Homo sapiens
  Table A; Target 15474; HLA-C*16:04; CLDN6; ENSG00000184697; TAA
RELGASLY

SEQ ID NO: 15475 - protein, 9 aa, Homo sapiens
  Table A; Target 15475; HLA-A*30:01; CLDN6; ENSG00000184697; TAA
RELGASLYL

SEQ ID NO: 15476 - protein, 9 aa, Homo sapiens
  Table A; Target 15476; HLA-B*37:01; CLDN6; ENSG00000184697; TAA
RELGASLYL

SEQ ID NO: 15477 - protein, 9 aa, Homo sapiens
  Table A; Target 15477; HLA-B*40:01; CLDN6; ENSG00000184697; TAA
RELGASLYL

SEQ ID NO: 15478 - protein, 9 aa, Homo sapiens
  Table A; Target 15478; HLA-B*40:02; CLDN6; ENSG00000184697; TAA
RELGASLYL

SEQ ID NO: 15479 - protein, 9 aa, Homo sapiens
  Table A; Target 15479; HLA-B*44:02; CLDN6; ENSG00000184697; TAA
RELGASLYL

SEQ ID NO: 15480 - protein, 9 aa, Homo sapiens
  Table A; Target 15480; HLA-B*44:03; CLDN6; ENSG00000184697; TAA
RELGASLYL

SEQ ID NO: 15481 - protein, 9 aa, Homo sapiens
  Table A; Target 15481; HLA-B*49:01; CLDN6; ENSG00000184697; TAA
RELGASLYL

SEQ ID NO: 15482 - protein, 11 aa, Homo sapiens
  Table A; Target 15482; HLA-B*44:02; CLDN6; ENSG00000184697; TAA
RELGASLYLGW

SEQ ID NO: 15483 - protein, 11 aa, Homo sapiens
  Table A; Target 15483; HLA-B*44:03; CLDN6; ENSG00000184697; TAA
RELGASLYLGW

SEQ ID NO: 15484 - protein, 11 aa, Homo sapiens
  Table A; Target 15484; HLA-B*57:01; CLDN6; ENSG00000184697; TAA
RELGASLYLGW

SEQ ID NO: 15485 - protein, 11 aa, Homo sapiens
  Table A; Target 15485; HLA-A*30:02; CLDN6; ENSG00000184697; TAA
RGPSEYPTKNY

SEQ ID NO: 15486 - protein, 11 aa, Homo sapiens
  Table A; Target 15486; HLA-A*02:04; CLDN6; ENSG00000184697; TAA
RLVLTSGIVFV

SEQ ID NO: 15487 - protein, 9 aa, Homo sapiens
  Table A; Target 15487; HLA-A*23:01; CLDN6; ENSG00000184697; TAA
RYSTSAPAI

SEQ ID NO: 15488 - protein, 9 aa, Homo sapiens
  Table A; Target 15488; HLA-B*07:02; CLDN6; ENSG00000184697; TAA
RYSTSAPAI

SEQ ID NO: 15489 - protein, 9 aa, Homo sapiens
  Table A; Target 15489; HLA-B*13:02; CLDN6; ENSG00000184697; TAA
RYSTSAPAI

SEQ ID NO: 15490 - protein, 9 aa, Homo sapiens
  Table A; Target 15490; HLA-B*15:03; CLDN6; ENSG00000184697; TAA
RYSTSAPAI

SEQ ID NO: 15491 - protein, 9 aa, Homo sapiens
  Table A; Target 15491; HLA-B*58:01; CLDN6; ENSG00000184697; TAA
RYSTSAPAI

SEQ ID NO: 15492 - protein, 9 aa, Homo sapiens
  Table A; Target 15492; HLA-C*04:01; CLDN6; ENSG00000184697; TAA
RYSTSAPAI

SEQ ID NO: 15493 - protein, 9 aa, Homo sapiens
  Table A; Target 15493; HLA-C*06:02; CLDN6; ENSG00000184697; TAA
RYSTSAPAI

SEQ ID NO: 15494 - protein, 9 aa, Homo sapiens
  Table A; Target 15494; HLA-C*07:02; CLDN6; ENSG00000184697; TAA
RYSTSAPAI

SEQ ID NO: 15495 - protein, 9 aa, Homo sapiens
  Table A; Target 15495; HLA-C*14:02; CLDN6; ENSG00000184697; TAA
RYSTSAPAI

SEQ ID NO: 15496 - protein, 9 aa, Homo sapiens
  Table A; Target 15496; HLA-C*16:02; CLDN6; ENSG00000184697; TAA
RYSTSAPAI

SEQ ID NO: 15497 - protein, 11 aa, Homo sapiens
  Table A; Target 15497; HLA-A*03:01; CLDN6; ENSG00000184697; TAA
RYSTSAPAISR

SEQ ID NO: 15498 - protein, 11 aa, Homo sapiens
  Table A; Target 15498; HLA-A*03:02; CLDN6; ENSG00000184697; TAA
RYSTSAPAISR

SEQ ID NO: 15499 - protein, 11 aa, Homo sapiens
  Table A; Target 15499; HLA-A*31:01; CLDN6; ENSG00000184697; TAA
RYSTSAPAISR

SEQ ID NO: 15500 - protein, 11 aa, Homo sapiens
  Table A; Target 15500; HLA-A*33:01; CLDN6; ENSG00000184697; TAA
RYSTSAPAISR

SEQ ID NO: 15501 - protein, 11 aa, Homo sapiens
  Table A; Target 15501; HLA-A*33:03; CLDN6; ENSG00000184697; TAA
RYSTSAPAISR

SEQ ID NO: 15502 - protein, 9 aa, Homo sapiens
  Table A; Target 15502; HLA-A*02:01; CLDN6; ENSG00000184697; TAA
SAGMQILGV

SEQ ID NO: 15503 - protein, 9 aa, Homo sapiens
  Table A; Target 15503; HLA-A*02:03; CLDN6; ENSG00000184697; TAA
SAGMQILGV

SEQ ID NO: 15504 - protein, 9 aa, Homo sapiens
  Table A; Target 15504; HLA-A*68:02; CLDN6; ENSG00000184697; TAA
SAGMQILGV

SEQ ID NO: 15505 - protein, 9 aa, Homo sapiens
  Table A; Target 15505; HLA-B*13:02; CLDN6; ENSG00000184697; TAA
SAGMQILGV

SEQ ID NO: 15506 - protein, 9 aa, Homo sapiens
  Table A; Target 15506; HLA-B*51:01; CLDN6; ENSG00000184697; TAA
SAGMQILGV

SEQ ID NO: 15507 - protein, 9 aa, Homo sapiens
  Table A; Target 15507; HLA-B*54:01; CLDN6; ENSG00000184697; TAA
SAGMQILGV

SEQ ID NO: 15508 - protein, 9 aa, Homo sapiens
  Table A; Target 15508; HLA-C*06:02; CLDN6; ENSG00000184697; TAA
SAGMQILGV

SEQ ID NO: 15509 - protein, 9 aa, Homo sapiens
  Table A; Target 15509; HLA-C*12:03; CLDN6; ENSG00000184697; TAA
SAGMQILGV

SEQ ID NO: 15510 - protein, 9 aa, Homo sapiens
  Table A; Target 15510; HLA-C*16:02; CLDN6; ENSG00000184697; TAA
SAGMQILGV

SEQ ID NO: 15511 - protein, 9 aa, Homo sapiens
  Table A; Target 15511; HLA-C*06:02; CLDN6; ENSG00000184697; TAA
SAPAISRGP

SEQ ID NO: 15512 - protein, 9 aa, Homo sapiens
  Table A; Target 15512; HLA-C*16:02; CLDN6; ENSG00000184697; TAA
SAPAISRGP

SEQ ID NO: 15513 - protein, 10 aa, Homo sapiens
  Table A; Target 15513; HLA-C*04:01; CLDN6; ENSG00000184697; TAA
SCVVQSTGQM

SEQ ID NO: 15514 - protein, 10 aa, Homo sapiens
  Table A; Target 15514; HLA-C*07:01; CLDN6; ENSG00000184697; TAA
SCVVQSTGQM

SEQ ID NO: 15515 - protein, 8 aa, Homo sapiens
  Table A; Target 15515; HLA-B*15:03; CLDN6; ENSG00000184697; TAA
SEYPTKNY

SEQ ID NO: 15516 - protein, 8 aa, Homo sapiens
  Table A; Target 15516; HLA-B*18:01; CLDN6; ENSG00000184697; TAA
SEYPTKNY

SEQ ID NO: 15517 - protein, 8 aa, Homo sapiens
  Table A; Target 15517; HLA-B*37:01; CLDN6; ENSG00000184697; TAA
SEYPTKNY

SEQ ID NO: 15518 - protein, 8 aa, Homo sapiens
  Table A; Target 15518; HLA-B*44:02; CLDN6; ENSG00000184697; TAA
SEYPTKNY

SEQ ID NO: 15519 - protein, 8 aa, Homo sapiens
  Table A; Target 15519; HLA-B*44:03; CLDN6; ENSG00000184697; TAA
SEYPTKNY

SEQ ID NO: 15520 - protein, 8 aa, Homo sapiens
  Table A; Target 15520; HLA-B*49:01; CLDN6; ENSG00000184697; TAA
SEYPTKNY

SEQ ID NO: 15521 - protein, 8 aa, Homo sapiens
  Table A; Target 15521; HLA-C*02:02; CLDN6; ENSG00000184697; TAA
SEYPTKNY

SEQ ID NO: 15522 - protein, 8 aa, Homo sapiens
  Table A; Target 15522; HLA-C*16:04; CLDN6; ENSG00000184697; TAA
SEYPTKNY

SEQ ID NO: 15523 - protein, 9 aa, Homo sapiens
  Table A; Target 15523; HLA-A*02:03; CLDN6; ENSG00000184697; TAA
SEYPTKNYV

SEQ ID NO: 15524 - protein, 9 aa, Homo sapiens
  Table A; Target 15524; HLA-A*30:01; CLDN6; ENSG00000184697; TAA
SEYPTKNYV

SEQ ID NO: 15525 - protein, 9 aa, Homo sapiens
  Table A; Target 15525; HLA-A*68:02; CLDN6; ENSG00000184697; TAA
SEYPTKNYV

SEQ ID NO: 15526 - protein, 9 aa, Homo sapiens
  Table A; Target 15526; HLA-B*13:02; CLDN6; ENSG00000184697; TAA
SEYPTKNYV

SEQ ID NO: 15527 - protein, 9 aa, Homo sapiens
  Table A; Target 15527; HLA-B*18:01; CLDN6; ENSG00000184697; TAA
SEYPTKNYV

SEQ ID NO: 15528 - protein, 9 aa, Homo sapiens
  Table A; Target 15528; HLA-B*37:01; CLDN6; ENSG00000184697; TAA
SEYPTKNYV

SEQ ID NO: 15529 - protein, 9 aa, Homo sapiens
  Table A; Target 15529; HLA-B*38:01; CLDN6; ENSG00000184697; TAA
SEYPTKNYV

SEQ ID NO: 15530 - protein, 9 aa, Homo sapiens
  Table A; Target 15530; HLA-B*40:01; CLDN6; ENSG00000184697; TAA
SEYPTKNYV

SEQ ID NO: 15531 - protein, 9 aa, Homo sapiens
  Table A; Target 15531; HLA-B*40:02; CLDN6; ENSG00000184697; TAA
SEYPTKNYV

SEQ ID NO: 15532 - protein, 9 aa, Homo sapiens
  Table A; Target 15532; HLA-B*44:02; CLDN6; ENSG00000184697; TAA
SEYPTKNYV

SEQ ID NO: 15533 - protein, 9 aa, Homo sapiens
  Table A; Target 15533; HLA-B*44:03; CLDN6; ENSG00000184697; TAA
SEYPTKNYV

SEQ ID NO: 15534 - protein, 9 aa, Homo sapiens
  Table A; Target 15534; HLA-B*51:01; CLDN6; ENSG00000184697; TAA
SEYPTKNYV

SEQ ID NO: 15535 - protein, 9 aa, Homo sapiens
  Table A; Target 15535; HLA-C*02:02; CLDN6; ENSG00000184697; TAA
SEYPTKNYV

SEQ ID NO: 15536 - protein, 9 aa, Homo sapiens
  Table A; Target 15536; HLA-C*06:02; CLDN6; ENSG00000184697; TAA
SEYPTKNYV

SEQ ID NO: 15537 - protein, 9 aa, Homo sapiens
  Table A; Target 15537; HLA-C*12:03; CLDN6; ENSG00000184697; TAA
SEYPTKNYV

SEQ ID NO: 15538 - protein, 9 aa, Homo sapiens
  Table A; Target 15538; HLA-C*16:02; CLDN6; ENSG00000184697; TAA
SEYPTKNYV

SEQ ID NO: 15539 - protein, 9 aa, Homo sapiens
  Table A; Target 15539; HLA-C*16:04; CLDN6; ENSG00000184697; TAA
SEYPTKNYV

SEQ ID NO: 15540 - protein, 10 aa, Homo sapiens
  Table A; Target 15540; HLA-A*30:02; CLDN6; ENSG00000184697; TAA
SGGSQGPSHY

SEQ ID NO: 15541 - protein, 11 aa, Homo sapiens
  Table A; Target 15541; HLA-C*04:01; CLDN6; ENSG00000184697; TAA
SGGSQGPSHYM

SEQ ID NO: 15542 - protein, 9 aa, Homo sapiens
  Table A; Target 15542; HLA-A*25:01; CLDN6; ENSG00000184697; TAA
SIVVAQVVW

SEQ ID NO: 15543 - protein, 9 aa, Homo sapiens
  Table A; Target 15543; HLA-B*44:02; CLDN6; ENSG00000184697; TAA
SIVVAQVVW

SEQ ID NO: 15544 - protein, 9 aa, Homo sapiens
  Table A; Target 15544; HLA-B*44:03; CLDN6; ENSG00000184697; TAA
SIVVAQVVW

SEQ ID NO: 15545 - protein, 9 aa, Homo sapiens
  Table A; Target 15545; HLA-B*57:01; CLDN6; ENSG00000184697; TAA
SIVVAQVVW

SEQ ID NO: 15546 - protein, 9 aa, Homo sapiens
  Table A; Target 15546; HLA-B*58:01; CLDN6; ENSG00000184697; TAA
SIVVAQVVW

SEQ ID NO: 15547 - protein, 9 aa, Homo sapiens
  Table A; Target 15547; HLA-A*02:01; CLDN6; ENSG00000184697; TAA
SLLALPQDL

SEQ ID NO: 15548 - protein, 9 aa, Homo sapiens
  Table A; Target 15548; HLA-A*02:03; CLDN6; ENSG00000184697; TAA
SLLALPQDL

SEQ ID NO: 15549 - protein, 9 aa, Homo sapiens
  Table A; Target 15549; HLA-A*02:04; CLDN6; ENSG00000184697; TAA
SLLALPQDL

SEQ ID NO: 15550 - protein, 9 aa, Homo sapiens
  Table A; Target 15550; HLA-B*55:01; CLDN6; ENSG00000184697; TAA
SLLALPQDL

SEQ ID NO: 15551 - protein, 11 aa, Homo sapiens
  Table A; Target 15551; HLA-A*02:04; CLDN6; ENSG00000184697; TAA
SLLALPQDLQA

SEQ ID NO: 15552 - protein, 8 aa, Homo sapiens
  Table A; Target 15552; HLA-B*54:01; CLDN6; ENSG00000184697; TAA
SLYLGWAA

SEQ ID NO: 15553 - protein, 10 aa, Homo sapiens
  Table A; Target 15553; HLA-A*02:04; CLDN6; ENSG00000184697; TAA
SLYLGWAASG

SEQ ID NO: 15554 - protein, 8 aa, Homo sapiens
  Table A; Target 15554; HLA-A*30:02; CLDN6; ENSG00000184697; TAA
SQGPSHYM

SEQ ID NO: 15555 - protein, 8 aa, Homo sapiens
  Table A; Target 15555; HLA-A*32:01; CLDN6; ENSG00000184697; TAA
SQGPSHYM

SEQ ID NO: 15556 - protein, 8 aa, Homo sapiens
  Table A; Target 15556; HLA-B*13:02; CLDN6; ENSG00000184697; TAA
SQGPSHYM

SEQ ID NO: 15557 - protein, 8 aa, Homo sapiens
  Table A; Target 15557; HLA-B*15:01; CLDN6; ENSG00000184697; TAA
SQGPSHYM

SEQ ID NO: 15558 - protein, 8 aa, Homo sapiens
  Table A; Target 15558; HLA-B*15:03; CLDN6; ENSG00000184697; TAA
SQGPSHYM

SEQ ID NO: 15559 - protein, 8 aa, Homo sapiens
  Table A; Target 15559; HLA-B*27:05; CLDN6; ENSG00000184697; TAA
SQGPSHYM

SEQ ID NO: 15560 - protein, 8 aa, Homo sapiens
  Table A; Target 15560; HLA-B*37:01; CLDN6; ENSG00000184697; TAA
SQGPSHYM

SEQ ID NO: 15561 - protein, 8 aa, Homo sapiens
  Table A; Target 15561; HLA-B*38:01; CLDN6; ENSG00000184697; TAA
SQGPSHYM

SEQ ID NO: 15562 - protein, 8 aa, Homo sapiens
  Table A; Target 15562; HLA-B*39:01; CLDN6; ENSG00000184697; TAA
SQGPSHYM

SEQ ID NO: 15563 - protein, 8 aa, Homo sapiens
  Table A; Target 15563; HLA-C*01:02; CLDN6; ENSG00000184697; TAA
SQGPSHYM

SEQ ID NO: 15564 - protein, 8 aa, Homo sapiens
  Table A; Target 15564; HLA-C*02:02; CLDN6; ENSG00000184697; TAA
SQGPSHYM

SEQ ID NO: 15565 - protein, 8 aa, Homo sapiens
  Table A; Target 15565; HLA-C*04:01; CLDN6; ENSG00000184697; TAA
SQGPSHYM

SEQ ID NO: 15566 - protein, 8 aa, Homo sapiens
  Table A; Target 15566; HLA-C*06:02; CLDN6; ENSG00000184697; TAA
SQGPSHYM

SEQ ID NO: 15567 - protein, 8 aa, Homo sapiens
  Table A; Target 15567; HLA-C*07:01; CLDN6; ENSG00000184697; TAA
SQGPSHYM

SEQ ID NO: 15568 - protein, 8 aa, Homo sapiens
  Table A; Target 15568; HLA-C*07:02; CLDN6; ENSG00000184697; TAA
SQGPSHYM

SEQ ID NO: 15569 - protein, 8 aa, Homo sapiens
  Table A; Target 15569; HLA-C*07:04; CLDN6; ENSG00000184697; TAA
SQGPSHYM

SEQ ID NO: 15570 - protein, 8 aa, Homo sapiens
  Table A; Target 15570; HLA-C*12:03; CLDN6; ENSG00000184697; TAA
SQGPSHYM

SEQ ID NO: 15571 - protein, 8 aa, Homo sapiens
  Table A; Target 15571; HLA-C*16:01; CLDN6; ENSG00000184697; TAA
SQGPSHYM

SEQ ID NO: 15572 - protein, 8 aa, Homo sapiens
  Table A; Target 15572; HLA-C*16:02; CLDN6; ENSG00000184697; TAA
SQGPSHYM

SEQ ID NO: 15573 - protein, 9 aa, Homo sapiens
  Table A; Target 15573; HLA-B*13:02; CLDN6; ENSG00000184697; TAA
SQGPSHYMA

SEQ ID NO: 15574 - protein, 9 aa, Homo sapiens
  Table A; Target 15574; HLA-B*27:05; CLDN6; ENSG00000184697; TAA
SQGPSHYMA

SEQ ID NO: 15575 - protein, 10 aa, Homo sapiens
  Table A; Target 15575; HLA-A*31:01; CLDN6; ENSG00000184697; TAA
SQGPSHYMAR

SEQ ID NO: 15576 - protein, 11 aa, Homo sapiens
  Table A; Target 15576; HLA-A*30:02; CLDN6; ENSG00000184697; TAA
SQGPSHYMARY

SEQ ID NO: 15577 - protein, 9 aa, Homo sapiens
  Table A; Target 15577; HLA-C*06:02; CLDN6; ENSG00000184697; TAA
SRGPSEYPT

SEQ ID NO: 15578 - protein, 10 aa, Homo sapiens
  Table A; Target 15578; HLA-B*27:05; CLDN6; ENSG00000184697; TAA
SRGPSEYPTK

SEQ ID NO: 15579 - protein, 9 aa, Homo sapiens
  Table A; Target 15579; HLA-C*06:02; CLDN6; ENSG00000184697; TAA
STGQMQCKV

SEQ ID NO: 15580 - protein, 10 aa, Homo sapiens
  Table A; Target 15580; HLA-C*07:01; CLDN6; ENSG00000184697; TAA
STGQMQCKVY

SEQ ID NO: 15581 - protein, 9 aa, Homo sapiens
  Table A; Target 15581; HLA-A*03:02; CLDN6; ENSG00000184697; TAA
STSAPAISR

SEQ ID NO: 15582 - protein, 9 aa, Homo sapiens
  Table A; Target 15582; HLA-A*31:01; CLDN6; ENSG00000184697; TAA
STSAPAISR

SEQ ID NO: 15583 - protein, 9 aa, Homo sapiens
  Table A; Target 15583; HLA-A*33:01; CLDN6; ENSG00000184697; TAA
STSAPAISR

SEQ ID NO: 15584 - protein, 9 aa, Homo sapiens
  Table A; Target 15584; HLA-A*33:03; CLDN6; ENSG00000184697; TAA
STSAPAISR

SEQ ID NO: 15585 - protein, 9 aa, Homo sapiens
  Table A; Target 15585; HLA-A*68:02; CLDN6; ENSG00000184697; TAA
STSAPAISR

SEQ ID NO: 15586 - protein, 9 aa, Homo sapiens
  Table A; Target 15586; HLA-B*13:02; CLDN6; ENSG00000184697; TAA
STSAPAISR

SEQ ID NO: 15587 - protein, 9 aa, Homo sapiens
  Table A; Target 15587; HLA-B*27:02; CLDN6; ENSG00000184697; TAA
STSAPAISR

SEQ ID NO: 15588 - protein, 9 aa, Homo sapiens
  Table A; Target 15588; HLA-B*27:05; CLDN6; ENSG00000184697; TAA
STSAPAISR

SEQ ID NO: 15589 - protein, 9 aa, Homo sapiens
  Table A; Target 15589; HLA-B*57:01; CLDN6; ENSG00000184697; TAA
STSAPAISR

SEQ ID NO: 15590 - protein, 11 aa, Homo sapiens
  Table A; Target 15590; HLA-C*06:02; CLDN6; ENSG00000184697; TAA
STSAPAISRGP

SEQ ID NO: 15591 - protein, 8 aa, Homo sapiens
  Table A; Target 15591; HLA-B*08:01; CLDN6; ENSG00000184697; TAA
TAFIGNSI

SEQ ID NO: 15592 - protein, 8 aa, Homo sapiens
  Table A; Target 15592; HLA-B*13:02; CLDN6; ENSG00000184697; TAA
TAFIGNSI

SEQ ID NO: 15593 - protein, 8 aa, Homo sapiens
  Table A; Target 15593; HLA-B*15:03; CLDN6; ENSG00000184697; TAA
TAFIGNSI

SEQ ID NO: 15594 - protein, 8 aa, Homo sapiens
  Table A; Target 15594; HLA-B*35:01; CLDN6; ENSG00000184697; TAA
TAFIGNSI

SEQ ID NO: 15595 - protein, 8 aa, Homo sapiens
  Table A; Target 15595; HLA-B*35:03; CLDN6; ENSG00000184697; TAA
TAFIGNSI

SEQ ID NO: 15596 - protein, 8 aa, Homo sapiens
  Table A; Target 15596; HLA-B*38:01; CLDN6; ENSG00000184697; TAA
TAFIGNSI

SEQ ID NO: 15597 - protein, 8 aa, Homo sapiens
  Table A; Target 15597; HLA-B*39:01; CLDN6; ENSG00000184697; TAA
TAFIGNSI

SEQ ID NO: 15598 - protein, 8 aa, Homo sapiens
  Table A; Target 15598; HLA-B*46:01; CLDN6; ENSG00000184697; TAA
TAFIGNSI

SEQ ID NO: 15599 - protein, 8 aa, Homo sapiens
  Table A; Target 15599; HLA-B*49:01; CLDN6; ENSG00000184697; TAA
TAFIGNSI

SEQ ID NO: 15600 - protein, 8 aa, Homo sapiens
  Table A; Target 15600; HLA-B*54:01; CLDN6; ENSG00000184697; TAA
TAFIGNSI

SEQ ID NO: 15601 - protein, 8 aa, Homo sapiens
  Table A; Target 15601; HLA-B*58:01; CLDN6; ENSG00000184697; TAA
TAFIGNSI

SEQ ID NO: 15602 - protein, 8 aa, Homo sapiens
  Table A; Target 15602; HLA-C*01:02; CLDN6; ENSG00000184697; TAA
TAFIGNSI

SEQ ID NO: 15603 - protein, 8 aa, Homo sapiens
  Table A; Target 15603; HLA-C*02:02; CLDN6; ENSG00000184697; TAA
TAFIGNSI

SEQ ID NO: 15604 - protein, 8 aa, Homo sapiens
  Table A; Target 15604; HLA-C*03:03; CLDN6; ENSG00000184697; TAA
TAFIGNSI

SEQ ID NO: 15605 - protein, 8 aa, Homo sapiens
  Table A; Target 15605; HLA-C*03:04; CLDN6; ENSG00000184697; TAA
TAFIGNSI

SEQ ID NO: 15606 - protein, 8 aa, Homo sapiens
  Table A; Target 15606; HLA-C*05:01; CLDN6; ENSG00000184697; TAA
TAFIGNSI

SEQ ID NO: 15607 - protein, 8 aa, Homo sapiens
  Table A; Target 15607; HLA-C*07:04; CLDN6; ENSG00000184697; TAA
TAFIGNSI

SEQ ID NO: 15608 - protein, 8 aa, Homo sapiens
  Table A; Target 15608; HLA-C*12:03; CLDN6; ENSG00000184697; TAA
TAFIGNSI

SEQ ID NO: 15609 - protein, 8 aa, Homo sapiens
  Table A; Target 15609; HLA-C*14:02; CLDN6; ENSG00000184697; TAA
TAFIGNSI

SEQ ID NO: 15610 - protein, 8 aa, Homo sapiens
  Table A; Target 15610; HLA-C*16:02; CLDN6; ENSG00000184697; TAA
TAFIGNSI

SEQ ID NO: 15611 - protein, 8 aa, Homo sapiens
  Table A; Target 15611; HLA-C*16:04; CLDN6; ENSG00000184697; TAA
TAFIGNSI

SEQ ID NO: 15612 - protein, 9 aa, Homo sapiens
  Table A; Target 15612; HLA-A*68:02; CLDN6; ENSG00000184697; TAA
TAFIGNSIV

SEQ ID NO: 15613 - protein, 9 aa, Homo sapiens
  Table A; Target 15613; HLA-B*13:02; CLDN6; ENSG00000184697; TAA
TAFIGNSIV

SEQ ID NO: 15614 - protein, 9 aa, Homo sapiens
  Table A; Target 15614; HLA-B*35:01; CLDN6; ENSG00000184697; TAA
TAFIGNSIV

SEQ ID NO: 15615 - protein, 9 aa, Homo sapiens
  Table A; Target 15615; HLA-B*35:03; CLDN6; ENSG00000184697; TAA
TAFIGNSIV

SEQ ID NO: 15616 - protein, 9 aa, Homo sapiens
  Table A; Target 15616; HLA-B*39:01; CLDN6; ENSG00000184697; TAA
TAFIGNSIV

SEQ ID NO: 15617 - protein, 9 aa, Homo sapiens
  Table A; Target 15617; HLA-B*46:01; CLDN6; ENSG00000184697; TAA
TAFIGNSIV

SEQ ID NO: 15618 - protein, 9 aa, Homo sapiens
  Table A; Target 15618; HLA-B*49:01; CLDN6; ENSG00000184697; TAA
TAFIGNSIV

SEQ ID NO: 15619 - protein, 9 aa, Homo sapiens
  Table A; Target 15619; HLA-B*51:01; CLDN6; ENSG00000184697; TAA
TAFIGNSIV

SEQ ID NO: 15620 - protein, 9 aa, Homo sapiens
  Table A; Target 15620; HLA-B*54:01; CLDN6; ENSG00000184697; TAA
TAFIGNSIV

SEQ ID NO: 15621 - protein, 9 aa, Homo sapiens
  Table A; Target 15621; HLA-B*56:01; CLDN6; ENSG00000184697; TAA
TAFIGNSIV

SEQ ID NO: 15622 - protein, 9 aa, Homo sapiens
  Table A; Target 15622; HLA-C*01:02; CLDN6; ENSG00000184697; TAA
TAFIGNSIV

SEQ ID NO: 15623 - protein, 9 aa, Homo sapiens
  Table A; Target 15623; HLA-C*02:02; CLDN6; ENSG00000184697; TAA
TAFIGNSIV

SEQ ID NO: 15624 - protein, 9 aa, Homo sapiens
  Table A; Target 15624; HLA-C*03:03; CLDN6; ENSG00000184697; TAA
TAFIGNSIV

SEQ ID NO: 15625 - protein, 9 aa, Homo sapiens
  Table A; Target 15625; HLA-C*03:04; CLDN6; ENSG00000184697; TAA
TAFIGNSIV

SEQ ID NO: 15626 - protein, 9 aa, Homo sapiens
  Table A; Target 15626; HLA-C*05:01; CLDN6; ENSG00000184697; TAA
TAFIGNSIV

SEQ ID NO: 15627 - protein, 9 aa, Homo sapiens
  Table A; Target 15627; HLA-C*06:02; CLDN6; ENSG00000184697; TAA
TAFIGNSIV

SEQ ID NO: 15628 - protein, 9 aa, Homo sapiens
  Table A; Target 15628; HLA-C*07:01; CLDN6; ENSG00000184697; TAA
TAFIGNSIV

SEQ ID NO: 15629 - protein, 9 aa, Homo sapiens
  Table A; Target 15629; HLA-C*12:03; CLDN6; ENSG00000184697; TAA
TAFIGNSIV

SEQ ID NO: 15630 - protein, 9 aa, Homo sapiens
  Table A; Target 15630; HLA-C*16:02; CLDN6; ENSG00000184697; TAA
TAFIGNSIV

SEQ ID NO: 15631 - protein, 9 aa, Homo sapiens
  Table A; Target 15631; HLA-C*16:04; CLDN6; ENSG00000184697; TAA
TAFIGNSIV

SEQ ID NO: 15632 - protein, 10 aa, Homo sapiens
  Table A; Target 15632; HLA-A*68:02; CLDN6; ENSG00000184697; TAA
TAFIGNSIVV

SEQ ID NO: 15633 - protein, 10 aa, Homo sapiens
  Table A; Target 15633; HLA-B*51:01; CLDN6; ENSG00000184697; TAA
TAFIGNSIVV

SEQ ID NO: 15634 - protein, 10 aa, Homo sapiens
  Table A; Target 15634; HLA-B*54:01; CLDN6; ENSG00000184697; TAA
TAFIGNSIVV

SEQ ID NO: 15635 - protein, 10 aa, Homo sapiens
  Table A; Target 15635; HLA-B*56:01; CLDN6; ENSG00000184697; TAA
TAFIGNSIVV

SEQ ID NO: 15636 - protein, 10 aa, Homo sapiens
  Table A; Target 15636; HLA-C*02:02; CLDN6; ENSG00000184697; TAA
TAFIGNSIVV

SEQ ID NO: 15637 - protein, 10 aa, Homo sapiens
  Table A; Target 15637; HLA-C*12:03; CLDN6; ENSG00000184697; TAA
TAFIGNSIVV

SEQ ID NO: 15638 - protein, 11 aa, Homo sapiens
  Table A; Target 15638; HLA-B*54:01; CLDN6; ENSG00000184697; TAA
TAFIGNSIVVA

SEQ ID NO: 15639 - protein, 11 aa, Homo sapiens
  Table A; Target 15639; HLA-B*56:01; CLDN6; ENSG00000184697; TAA
TAFIGNSIVVA

SEQ ID NO: 15640 - protein, 11 aa, Homo sapiens
  Table A; Target 15640; HLA-C*12:03; CLDN6; ENSG00000184697; TAA
TAFIGNSIVVA

SEQ ID NO: 15641 - protein, 9 aa, Homo sapiens
  Table A; Target 15641; HLA-A*30:02; CLDN6; ENSG00000184697; TAA
TAHAIIRDF

SEQ ID NO: 15642 - protein, 9 aa, Homo sapiens
  Table A; Target 15642; HLA-B*35:01; CLDN6; ENSG00000184697; TAA
TAHAIIRDF

SEQ ID NO: 15643 - protein, 9 aa, Homo sapiens
  Table A; Target 15643; HLA-B*44:02; CLDN6; ENSG00000184697; TAA
TAHAIIRDF

SEQ ID NO: 15644 - protein, 9 aa, Homo sapiens
  Table A; Target 15644; HLA-B*44:03; CLDN6; ENSG00000184697; TAA
TAHAIIRDF

SEQ ID NO: 15645 - protein, 9 aa, Homo sapiens
  Table A; Target 15645; HLA-B*46:01; CLDN6; ENSG00000184697; TAA
TAHAIIRDF

SEQ ID NO: 15646 - protein, 9 aa, Homo sapiens
  Table A; Target 15646; HLA-B*57:01; CLDN6; ENSG00000184697; TAA
TAHAIIRDF

SEQ ID NO: 15647 - protein, 9 aa, Homo sapiens
  Table A; Target 15647; HLA-B*58:01; CLDN6; ENSG00000184697; TAA
TAHAIIRDF

SEQ ID NO: 15648 - protein, 9 aa, Homo sapiens
  Table A; Target 15648; HLA-C*02:02; CLDN6; ENSG00000184697; TAA
TAHAIIRDF

SEQ ID NO: 15649 - protein, 9 aa, Homo sapiens
  Table A; Target 15649; HLA-C*06:02; CLDN6; ENSG00000184697; TAA
TAHAIIRDF

SEQ ID NO: 15650 - protein, 9 aa, Homo sapiens
  Table A; Target 15650; HLA-C*12:03; CLDN6; ENSG00000184697; TAA
TAHAIIRDF

SEQ ID NO: 15651 - protein, 9 aa, Homo sapiens
  Table A; Target 15651; HLA-C*16:01; CLDN6; ENSG00000184697; TAA
TAHAIIRDF

SEQ ID NO: 15652 - protein, 9 aa, Homo sapiens
  Table A; Target 15652; HLA-C*16:02; CLDN6; ENSG00000184697; TAA
TAHAIIRDF

SEQ ID NO: 15653 - protein, 9 aa, Homo sapiens
  Table A; Target 15653; HLA-C*16:04; CLDN6; ENSG00000184697; TAA
TAHAIIRDF

SEQ ID NO: 15654 - protein, 10 aa, Homo sapiens
  Table A; Target 15654; HLA-A*01:01; CLDN6; ENSG00000184697; TAA
TAHAIIRDFY

SEQ ID NO: 15655 - protein, 10 aa, Homo sapiens
  Table A; Target 15655; HLA-A*29:02; CLDN6; ENSG00000184697; TAA
TAHAIIRDFY

SEQ ID NO: 15656 - protein, 10 aa, Homo sapiens
  Table A; Target 15656; HLA-A*30:02; CLDN6; ENSG00000184697; TAA
TAHAIIRDFY

SEQ ID NO: 15657 - protein, 11 aa, Homo sapiens
  Table A; Target 15657; HLA-C*07:01; CLDN6; ENSG00000184697; TAA
TCPSGGSQGPS

SEQ ID NO: 15658 - protein, 8 aa, Homo sapiens
  Table A; Target 15658; HLA-C*06:02; CLDN6; ENSG00000184697; TAA
TGQMQCKV

SEQ ID NO: 15659 - protein, 9 aa, Homo sapiens
  Table A; Target 15659; HLA-A*30:02; CLDN6; ENSG00000184697; TAA
TGQMQCKVY

SEQ ID NO: 15660 - protein, 9 aa, Homo sapiens
  Table A; Target 15660; HLA-C*04:01; CLDN6; ENSG00000184697; TAA
TGQMQCKVY

SEQ ID NO: 15661 - protein, 9 aa, Homo sapiens
  Table A; Target 15661; HLA-C*06:02; CLDN6; ENSG00000184697; TAA
TGQMQCKVY

SEQ ID NO: 15662 - protein, 9 aa, Homo sapiens
  Table A; Target 15662; HLA-C*07:01; CLDN6; ENSG00000184697; TAA
TGQMQCKVY

SEQ ID NO: 15663 - protein, 9 aa, Homo sapiens
  Table A; Target 15663; HLA-C*12:03; CLDN6; ENSG00000184697; TAA
TGQMQCKVY

SEQ ID NO: 15664 - protein, 9 aa, Homo sapiens
  Table A; Target 15664; HLA-C*16:01; CLDN6; ENSG00000184697; TAA
TGQMQCKVY

SEQ ID NO: 15665 - protein, 9 aa, Homo sapiens
  Table A; Target 15665; HLA-C*16:02; CLDN6; ENSG00000184697; TAA
TGQMQCKVY

SEQ ID NO: 15666 - protein, 9 aa, Homo sapiens
  Table A; Target 15666; HLA-A*02:01; CLDN6; ENSG00000184697; TAA
TLIPVCWTA

SEQ ID NO: 15667 - protein, 9 aa, Homo sapiens
  Table A; Target 15667; HLA-A*02:01; CLDN6; ENSG00000184697; TAA
TLLGWVNGL

SEQ ID NO: 15668 - protein, 9 aa, Homo sapiens
  Table A; Target 15668; HLA-A*02:03; CLDN6; ENSG00000184697; TAA
TLLGWVNGL

SEQ ID NO: 15669 - protein, 9 aa, Homo sapiens
  Table A; Target 15669; HLA-A*02:04; CLDN6; ENSG00000184697; TAA
TLLGWVNGL

SEQ ID NO: 15670 - protein, 9 aa, Homo sapiens
  Table A; Target 15670; HLA-A*02:07; CLDN6; ENSG00000184697; TAA
TLLGWVNGL

SEQ ID NO: 15671 - protein, 8 aa, Homo sapiens
  Table A; Target 15671; HLA-A*03:02; CLDN6; ENSG00000184697; TAA
TSAPAISR

SEQ ID NO: 15672 - protein, 8 aa, Homo sapiens
  Table A; Target 15672; HLA-A*11:01; CLDN6; ENSG00000184697; TAA
TSAPAISR

SEQ ID NO: 15673 - protein, 8 aa, Homo sapiens
  Table A; Target 15673; HLA-A*31:01; CLDN6; ENSG00000184697; TAA
TSAPAISR

SEQ ID NO: 15674 - protein, 8 aa, Homo sapiens
  Table A; Target 15674; HLA-A*33:01; CLDN6; ENSG00000184697; TAA
TSAPAISR

SEQ ID NO: 15675 - protein, 8 aa, Homo sapiens
  Table A; Target 15675; HLA-A*33:03; CLDN6; ENSG00000184697; TAA
TSAPAISR

SEQ ID NO: 15676 - protein, 8 aa, Homo sapiens
  Table A; Target 15676; HLA-A*68:01; CLDN6; ENSG00000184697; TAA
TSAPAISR

SEQ ID NO: 15677 - protein, 8 aa, Homo sapiens
  Table A; Target 15677; HLA-C*07:06; CLDN6; ENSG00000184697; TAA
TSAPAISR

SEQ ID NO: 15678 - protein, 10 aa, Homo sapiens
  Table A; Target 15678; HLA-C*06:02; CLDN6; ENSG00000184697; TAA
TSAPAISRGP

SEQ ID NO: 15679 - protein, 11 aa, Homo sapiens
  Table A; Target 15679; HLA-C*04:01; CLDN6; ENSG00000184697; TAA
TSAPAISRGPS

SEQ ID NO: 15680 - protein, 8 aa, Homo sapiens
  Table A; Target 15680; HLA-B*13:02; CLDN6; ENSG00000184697; TAA
TSGIVFVI

SEQ ID NO: 15681 - protein, 8 aa, Homo sapiens
  Table A; Target 15681; HLA-C*06:02; CLDN6; ENSG00000184697; TAA
TSGIVFVI

SEQ ID NO: 15682 - protein, 8 aa, Homo sapiens
  Table A; Target 15682; HLA-C*07:01; CLDN6; ENSG00000184697; TAA
TSGIVFVI

SEQ ID NO: 15683 - protein, 8 aa, Homo sapiens
  Table A; Target 15683; HLA-C*12:03; CLDN6; ENSG00000184697; TAA
TSGIVFVI

SEQ ID NO: 15684 - protein, 9 aa, Homo sapiens
  Table A; Target 15684; HLA-B*07:02; CLDN6; ENSG00000184697; TAA
VAEAQKREL

SEQ ID NO: 15685 - protein, 9 aa, Homo sapiens
  Table A; Target 15685; HLA-B*08:01; CLDN6; ENSG00000184697; TAA
VAEAQKREL

SEQ ID NO: 15686 - protein, 9 aa, Homo sapiens
  Table A; Target 15686; HLA-B*46:01; CLDN6; ENSG00000184697; TAA
VAEAQKREL

SEQ ID NO: 15687 - protein, 9 aa, Homo sapiens
  Table A; Target 15687; HLA-B*51:01; CLDN6; ENSG00000184697; TAA
VAEAQKREL

SEQ ID NO: 15688 - protein, 9 aa, Homo sapiens
  Table A; Target 15688; HLA-B*58:01; CLDN6; ENSG00000184697; TAA
VAEAQKREL

SEQ ID NO: 15689 - protein, 9 aa, Homo sapiens
  Table A; Target 15689; HLA-C*01:02; CLDN6; ENSG00000184697; TAA
VAEAQKREL

SEQ ID NO: 15690 - protein, 9 aa, Homo sapiens
  Table A; Target 15690; HLA-C*03:03; CLDN6; ENSG00000184697; TAA
VAEAQKREL

SEQ ID NO: 15691 - protein, 9 aa, Homo sapiens
  Table A; Target 15691; HLA-C*03:04; CLDN6; ENSG00000184697; TAA
VAEAQKREL

SEQ ID NO: 15692 - protein, 9 aa, Homo sapiens
  Table A; Target 15692; HLA-C*05:01; CLDN6; ENSG00000184697; TAA
VAEAQKREL

SEQ ID NO: 15693 - protein, 9 aa, Homo sapiens
  Table A; Target 15693; HLA-C*07:02; CLDN6; ENSG00000184697; TAA
VAEAQKREL

SEQ ID NO: 15694 - protein, 9 aa, Homo sapiens
  Table A; Target 15694; HLA-C*14:02; CLDN6; ENSG00000184697; TAA
VAEAQKREL

SEQ ID NO: 15695 - protein, 9 aa, Homo sapiens
  Table A; Target 15695; HLA-C*16:01; CLDN6; ENSG00000184697; TAA
VAEAQKREL

SEQ ID NO: 15696 - protein, 9 aa, Homo sapiens
  Table A; Target 15696; HLA-C*16:02; CLDN6; ENSG00000184697; TAA
VAEAQKREL

SEQ ID NO: 15697 - protein, 8 aa, Homo sapiens
  Table A; Target 15697; HLA-B*51:01; CLDN6; ENSG00000184697; TAA
VALFGLLV

SEQ ID NO: 15698 - protein, 9 aa, Homo sapiens
  Table A; Target 15698; HLA-A*01:01; CLDN6; ENSG00000184697; TAA
VALFGLLVY

SEQ ID NO: 15699 - protein, 9 aa, Homo sapiens
  Table A; Target 15699; HLA-A*03:01; CLDN6; ENSG00000184697; TAA
VALFGLLVY

SEQ ID NO: 15700 - protein, 9 aa, Homo sapiens
  Table A; Target 15700; HLA-A*29:02; CLDN6; ENSG00000184697; TAA
VALFGLLVY

SEQ ID NO: 15701 - protein, 9 aa, Homo sapiens
  Table A; Target 15701; HLA-B*15:03; CLDN6; ENSG00000184697; TAA
VALFGLLVY

SEQ ID NO: 15702 - protein, 9 aa, Homo sapiens
  Table A; Target 15702; HLA-B*35:01; CLDN6; ENSG00000184697; TAA
VALFGLLVY

SEQ ID NO: 15703 - protein, 9 aa, Homo sapiens
  Table A; Target 15703; HLA-B*46:01; CLDN6; ENSG00000184697; TAA
VALFGLLVY

SEQ ID NO: 15704 - protein, 9 aa, Homo sapiens
  Table A; Target 15704; HLA-B*57:01; CLDN6; ENSG00000184697; TAA
VALFGLLVY

SEQ ID NO: 15705 - protein, 9 aa, Homo sapiens
  Table A; Target 15705; HLA-C*02:02; CLDN6; ENSG00000184697; TAA
VALFGLLVY

SEQ ID NO: 15706 - protein, 9 aa, Homo sapiens
  Table A; Target 15706; HLA-C*07:01; CLDN6; ENSG00000184697; TAA
VALFGLLVY

SEQ ID NO: 15707 - protein, 9 aa, Homo sapiens
  Table A; Target 15707; HLA-C*12:03; CLDN6; ENSG00000184697; TAA
VALFGLLVY

SEQ ID NO: 15708 - protein, 10 aa, Homo sapiens
  Table A; Target 15708; HLA-A*02:01; CLDN6; ENSG00000184697; TAA
VALFGLLVYL

SEQ ID NO: 15709 - protein, 10 aa, Homo sapiens
  Table A; Target 15709; HLA-A*02:04; CLDN6; ENSG00000184697; TAA
VALFGLLVYL

SEQ ID NO: 15710 - protein, 10 aa, Homo sapiens
  Table A; Target 15710; HLA-A*24:02; CLDN6; ENSG00000184697; TAA
VALFGLLVYL

SEQ ID NO: 15711 - protein, 10 aa, Homo sapiens
  Table A; Target 15711; HLA-B*57:01; CLDN6; ENSG00000184697; TAA
VAQVVWEGLW

SEQ ID NO: 15712 - protein, 10 aa, Homo sapiens
  Table A; Target 15712; HLA-B*40:01; CLDN6; ENSG00000184697; TAA
VEEKDSKARL

SEQ ID NO: 15713 - protein, 10 aa, Homo sapiens
  Table A; Target 15713; HLA-B*40:02; CLDN6; ENSG00000184697; TAA
VEEKDSKARL

SEQ ID NO: 15714 - protein, 10 aa, Homo sapiens
  Table A; Target 15714; HLA-B*44:03; CLDN6; ENSG00000184697; TAA
VEEKDSKARL

SEQ ID NO: 15715 - protein, 8 aa, Homo sapiens
  Table A; Target 15715; HLA-A*23:01; CLDN6; ENSG00000184697; TAA
VFVISGVL

SEQ ID NO: 15716 - protein, 8 aa, Homo sapiens
  Table A; Target 15716; HLA-C*14:02; CLDN6; ENSG00000184697; TAA
VFVISGVL

SEQ ID NO: 15717 - protein, 10 aa, Homo sapiens
  Table A; Target 15717; HLA-A*23:01; CLDN6; ENSG00000184697; TAA
VFVISGVLTL

SEQ ID NO: 15718 - protein, 11 aa, Homo sapiens
  Table A; Target 15718; HLA-A*23:01; CLDN6; ENSG00000184697; TAA
VFVISGVLTLI

SEQ ID NO: 15719 - protein, 9 aa, Homo sapiens
  Table A; Target 15719; HLA-A*23:01; CLDN6; ENSG00000184697; TAA
VIALLVALF

SEQ ID NO: 15720 - protein, 9 aa, Homo sapiens
  Table A; Target 15720; HLA-A*24:02; CLDN6; ENSG00000184697; TAA
VIALLVALF

SEQ ID NO: 15721 - protein, 9 aa, Homo sapiens
  Table A; Target 15721; HLA-A*29:02; CLDN6; ENSG00000184697; TAA
VIALLVALF

SEQ ID NO: 15722 - protein, 9 aa, Homo sapiens
  Table A; Target 15722; HLA-B*57:01; CLDN6; ENSG00000184697; TAA
VIALLVALF

SEQ ID NO: 15723 - protein, 9 aa, Homo sapiens
  Table A; Target 15723; HLA-A*02:01; CLDN6; ENSG00000184697; TAA
VISGVLTLI

SEQ ID NO: 15724 - protein, 9 aa, Homo sapiens
  Table A; Target 15724; HLA-A*02:03; CLDN6; ENSG00000184697; TAA
VISGVLTLI

SEQ ID NO: 15725 - protein, 9 aa, Homo sapiens
  Table A; Target 15725; HLA-A*02:04; CLDN6; ENSG00000184697; TAA
VISGVLTLI

SEQ ID NO: 15726 - protein, 9 aa, Homo sapiens
  Table A; Target 15726; HLA-A*02:07; CLDN6; ENSG00000184697; TAA
VISGVLTLI

SEQ ID NO: 15727 - protein, 9 aa, Homo sapiens
  Table A; Target 15727; HLA-A*23:01; CLDN6; ENSG00000184697; TAA
VISGVLTLI

SEQ ID NO: 15728 - protein, 9 aa, Homo sapiens
  Table A; Target 15728; HLA-A*24:02; CLDN6; ENSG00000184697; TAA
VISGVLTLI

SEQ ID NO: 15729 - protein, 9 aa, Homo sapiens
  Table A; Target 15729; HLA-A*32:01; CLDN6; ENSG00000184697; TAA
VISGVLTLI

SEQ ID NO: 15730 - protein, 9 aa, Homo sapiens
  Table A; Target 15730; HLA-B*13:02; CLDN6; ENSG00000184697; TAA
VISGVLTLI

SEQ ID NO: 15731 - protein, 9 aa, Homo sapiens
  Table A; Target 15731; HLA-A*24:02; CLDN6; ENSG00000184697; TAA
VLTLIPVCW

SEQ ID NO: 15732 - protein, 9 aa, Homo sapiens
  Table A; Target 15732; HLA-B*44:02; CLDN6; ENSG00000184697; TAA
VLTLIPVCW

SEQ ID NO: 15733 - protein, 9 aa, Homo sapiens
  Table A; Target 15733; HLA-B*57:01; CLDN6; ENSG00000184697; TAA
VLTLIPVCW

SEQ ID NO: 15734 - protein, 8 aa, Homo sapiens
  Table A; Target 15734; HLA-A*23:01; CLDN6; ENSG00000184697; TAA
VLTSGIVF

SEQ ID NO: 15735 - protein, 8 aa, Homo sapiens
  Table A; Target 15735; HLA-A*32:01; CLDN6; ENSG00000184697; TAA
VLTSGIVF

SEQ ID NO: 15736 - protein, 8 aa, Homo sapiens
  Table A; Target 15736; HLA-B*15:01; CLDN6; ENSG00000184697; TAA
VLTSGIVF

SEQ ID NO: 15737 - protein, 8 aa, Homo sapiens
  Table A; Target 15737; HLA-B*15:03; CLDN6; ENSG00000184697; TAA
VLTSGIVF

SEQ ID NO: 15738 - protein, 8 aa, Homo sapiens
  Table A; Target 15738; HLA-B*39:01; CLDN6; ENSG00000184697; TAA
VLTSGIVF

SEQ ID NO: 15739 - protein, 8 aa, Homo sapiens
  Table A; Target 15739; HLA-B*46:01; CLDN6; ENSG00000184697; TAA
VLTSGIVF

SEQ ID NO: 15740 - protein, 8 aa, Homo sapiens
  Table A; Target 15740; HLA-C*03:04; CLDN6; ENSG00000184697; TAA
VLTSGIVF

SEQ ID NO: 15741 - protein, 8 aa, Homo sapiens
  Table A; Target 15741; HLA-C*07:04; CLDN6; ENSG00000184697; TAA
VLTSGIVF

SEQ ID NO: 15742 - protein, 8 aa, Homo sapiens
  Table A; Target 15742; HLA-C*16:01; CLDN6; ENSG00000184697; TAA
VLTSGIVF

SEQ ID NO: 15743 - protein, 9 aa, Homo sapiens
  Table A; Target 15743; HLA-A*02:03; CLDN6; ENSG00000184697; TAA
VLTSGIVFV

SEQ ID NO: 15744 - protein, 9 aa, Homo sapiens
  Table A; Target 15744; HLA-A*02:04; CLDN6; ENSG00000184697; TAA
VLTSGIVFV

SEQ ID NO: 15745 - protein, 9 aa, Homo sapiens
  Table A; Target 15745; HLA-A*02:07; CLDN6; ENSG00000184697; TAA
VLTSGIVFV

SEQ ID NO: 15746 - protein, 9 aa, Homo sapiens
  Table A; Target 15746; HLA-A*68:02; CLDN6; ENSG00000184697; TAA
VLTSGIVFV

SEQ ID NO: 15747 - protein, 9 aa, Homo sapiens
  Table A; Target 15747; HLA-B*13:02; CLDN6; ENSG00000184697; TAA
VLTSGIVFV

SEQ ID NO: 15748 - protein, 9 aa, Homo sapiens
  Table A; Target 15748; HLA-B*55:01; CLDN6; ENSG00000184697; TAA
VLTSGIVFV

SEQ ID NO: 15749 - protein, 10 aa, Homo sapiens
  Table A; Target 15749; HLA-A*02:01; CLDN6; ENSG00000184697; TAA
VLTSGIVFVI

SEQ ID NO: 15750 - protein, 10 aa, Homo sapiens
  Table A; Target 15750; HLA-A*02:03; CLDN6; ENSG00000184697; TAA
VLTSGIVFVI

SEQ ID NO: 15751 - protein, 10 aa, Homo sapiens
  Table A; Target 15751; HLA-A*02:04; CLDN6; ENSG00000184697; TAA
VLTSGIVFVI

SEQ ID NO: 15752 - protein, 10 aa, Homo sapiens
  Table A; Target 15752; HLA-A*23:01; CLDN6; ENSG00000184697; TAA
VLTSGIVFVI

SEQ ID NO: 15753 - protein, 9 aa, Homo sapiens
  Table A; Target 15753; HLA-C*07:02; CLDN6; ENSG00000184697; TAA
VNGLVSCAL

SEQ ID NO: 15754 - protein, 9 aa, Homo sapiens
  Table A; Target 15754; HLA-B*13:02; CLDN6; ENSG00000184697; TAA
VQSTGQMQC

SEQ ID NO: 15755 - protein, 10 aa, Homo sapiens
  Table A; Target 15755; HLA-A*03:01; CLDN6; ENSG00000184697; TAA
VQSTGQMQCK

SEQ ID NO: 15756 - protein, 10 aa, Homo sapiens
  Table A; Target 15756; HLA-A*03:02; CLDN6; ENSG00000184697; TAA
VQSTGQMQCK

SEQ ID NO: 15757 - protein, 10 aa, Homo sapiens
  Table A; Target 15757; HLA-A*11:01; CLDN6; ENSG00000184697; TAA
VQSTGQMQCK

SEQ ID NO: 15758 - protein, 10 aa, Homo sapiens
  Table A; Target 15758; HLA-B*27:02; CLDN6; ENSG00000184697; TAA
VQSTGQMQCK

SEQ ID NO: 15759 - protein, 10 aa, Homo sapiens
  Table A; Target 15759; HLA-C*06:02; CLDN6; ENSG00000184697; TAA
VQSTGQMQCK

SEQ ID NO: 15760 - protein, 9 aa, Homo sapiens
  Table A; Target 15760; HLA-A*02:03; CLDN6; ENSG00000184697; TAA
VTAFIGNSI

SEQ ID NO: 15761 - protein, 9 aa, Homo sapiens
  Table A; Target 15761; HLA-A*30:01; CLDN6; ENSG00000184697; TAA
VTAFIGNSI

SEQ ID NO: 15762 - protein, 9 aa, Homo sapiens
  Table A; Target 15762; HLA-A*32:01; CLDN6; ENSG00000184697; TAA
VTAFIGNSI

SEQ ID NO: 15763 - protein, 9 aa, Homo sapiens
  Table A; Target 15763; HLA-A*68:02; CLDN6; ENSG00000184697; TAA
VTAFIGNSI

SEQ ID NO: 15764 - protein, 9 aa, Homo sapiens
  Table A; Target 15764; HLA-B*13:02; CLDN6; ENSG00000184697; TAA
VTAFIGNSI

SEQ ID NO: 15765 - protein, 9 aa, Homo sapiens
  Table A; Target 15765; HLA-B*38:01; CLDN6; ENSG00000184697; TAA
VTAFIGNSI

SEQ ID NO: 15766 - protein, 9 aa, Homo sapiens
  Table A; Target 15766; HLA-B*39:01; CLDN6; ENSG00000184697; TAA
VTAFIGNSI

SEQ ID NO: 15767 - protein, 9 aa, Homo sapiens
  Table A; Target 15767; HLA-B*46:01; CLDN6; ENSG00000184697; TAA
VTAFIGNSI

SEQ ID NO: 15768 - protein, 9 aa, Homo sapiens
  Table A; Target 15768; HLA-B*51:01; CLDN6; ENSG00000184697; TAA
VTAFIGNSI

SEQ ID NO: 15769 - protein, 9 aa, Homo sapiens
  Table A; Target 15769; HLA-B*58:01; CLDN6; ENSG00000184697; TAA
VTAFIGNSI

SEQ ID NO: 15770 - protein, 9 aa, Homo sapiens
  Table A; Target 15770; HLA-C*01:02; CLDN6; ENSG00000184697; TAA
VTAFIGNSI

SEQ ID NO: 15771 - protein, 9 aa, Homo sapiens
  Table A; Target 15771; HLA-C*02:02; CLDN6; ENSG00000184697; TAA
VTAFIGNSI

SEQ ID NO: 15772 - protein, 9 aa, Homo sapiens
  Table A; Target 15772; HLA-C*03:03; CLDN6; ENSG00000184697; TAA
VTAFIGNSI

SEQ ID NO: 15773 - protein, 9 aa, Homo sapiens
  Table A; Target 15773; HLA-C*03:04; CLDN6; ENSG00000184697; TAA
VTAFIGNSI

SEQ ID NO: 15774 - protein, 9 aa, Homo sapiens
  Table A; Target 15774; HLA-C*06:02; CLDN6; ENSG00000184697; TAA
VTAFIGNSI

SEQ ID NO: 15775 - protein, 9 aa, Homo sapiens
  Table A; Target 15775; HLA-C*07:04; CLDN6; ENSG00000184697; TAA
VTAFIGNSI

SEQ ID NO: 15776 - protein, 9 aa, Homo sapiens
  Table A; Target 15776; HLA-C*12:03; CLDN6; ENSG00000184697; TAA
VTAFIGNSI

SEQ ID NO: 15777 - protein, 9 aa, Homo sapiens
  Table A; Target 15777; HLA-C*16:01; CLDN6; ENSG00000184697; TAA
VTAFIGNSI

SEQ ID NO: 15778 - protein, 9 aa, Homo sapiens
  Table A; Target 15778; HLA-C*16:02; CLDN6; ENSG00000184697; TAA
VTAFIGNSI

SEQ ID NO: 15779 - protein, 9 aa, Homo sapiens
  Table A; Target 15779; HLA-C*16:04; CLDN6; ENSG00000184697; TAA
VTAFIGNSI

SEQ ID NO: 15780 - protein, 10 aa, Homo sapiens
  Table A; Target 15780; HLA-A*68:02; CLDN6; ENSG00000184697; TAA
VTAFIGNSIV

SEQ ID NO: 15781 - protein, 11 aa, Homo sapiens
  Table A; Target 15781; HLA-A*68:02; CLDN6; ENSG00000184697; TAA
VTAFIGNSIVV

SEQ ID NO: 15782 - protein, 10 aa, Homo sapiens
  Table A; Target 15782; HLA-A*68:02; CLDN6; ENSG00000184697; TAA
VVAQVVWEGL

SEQ ID NO: 15783 - protein, 11 aa, Homo sapiens
  Table A; Target 15783; HLA-B*57:01; CLDN6; ENSG00000184697; TAA
VVAQVVWEGLW

SEQ ID NO: 15784 - protein, 8 aa, Homo sapiens
  Table A; Target 15784; HLA-B*57:01; CLDN6; ENSG00000184697; TAA
VVLTLLGW

SEQ ID NO: 15785 - protein, 8 aa, Homo sapiens
  Table A; Target 15785; HLA-B*39:01; CLDN6; ENSG00000184697; TAA
VVQSTGQM

SEQ ID NO: 15786 - protein, 8 aa, Homo sapiens
  Table A; Target 15786; HLA-C*01:02; CLDN6; ENSG00000184697; TAA
VVQSTGQM

SEQ ID NO: 15787 - protein, 8 aa, Homo sapiens
  Table A; Target 15787; HLA-C*04:01; CLDN6; ENSG00000184697; TAA
VVQSTGQM

SEQ ID NO: 15788 - protein, 8 aa, Homo sapiens
  Table A; Target 15788; HLA-C*05:01; CLDN6; ENSG00000184697; TAA
VVQSTGQM

SEQ ID NO: 15789 - protein, 8 aa, Homo sapiens
  Table A; Target 15789; HLA-C*14:02; CLDN6; ENSG00000184697; TAA
VVQSTGQM

SEQ ID NO: 15790 - protein, 9 aa, Homo sapiens
  Table A; Target 15790; HLA-C*01:02; CLDN6; ENSG00000184697; TAA
VVQSTGQMQ

SEQ ID NO: 15791 - protein, 10 aa, Homo sapiens
  Table A; Target 15791; HLA-C*01:02; CLDN6; ENSG00000184697; TAA
VVQSTGQMQC

SEQ ID NO: 15792 - protein, 11 aa, Homo sapiens
  Table A; Target 15792; HLA-A*03:01; CLDN6; ENSG00000184697; TAA
VVQSTGQMQCK

SEQ ID NO: 15793 - protein, 11 aa, Homo sapiens
  Table A; Target 15793; HLA-A*03:02; CLDN6; ENSG00000184697; TAA
VVQSTGQMQCK

SEQ ID NO: 15794 - protein, 11 aa, Homo sapiens
  Table A; Target 15794; HLA-A*31:01; CLDN6; ENSG00000184697; TAA
VVQSTGQMQCK

SEQ ID NO: 15795 - protein, 11 aa, Homo sapiens
  Table A; Target 15795; HLA-A*68:01; CLDN6; ENSG00000184697; TAA
VVQSTGQMQCK

SEQ ID NO: 15796 - protein, 11 aa, Homo sapiens
  Table A; Target 15796; HLA-B*27:02; CLDN6; ENSG00000184697; TAA
VVQSTGQMQCK

SEQ ID NO: 15797 - protein, 11 aa, Homo sapiens
  Table A; Target 15797; HLA-B*27:05; CLDN6; ENSG00000184697; TAA
VVQSTGQMQCK

SEQ ID NO: 15798 - protein, 11 aa, Homo sapiens
  Table A; Target 15798; HLA-C*06:02; CLDN6; ENSG00000184697; TAA
VVQSTGQMQCK

SEQ ID NO: 15799 - protein, 11 aa, Homo sapiens
  Table A; Target 15799; HLA-C*07:06; CLDN6; ENSG00000184697; TAA
VVQSTGQMQCK

SEQ ID NO: 15800 - protein, 8 aa, Homo sapiens
  Table A; Target 15800; HLA-A*23:01; CLDN6; ENSG00000184697; TAA
VYDSLLAL

SEQ ID NO: 15801 - protein, 8 aa, Homo sapiens
  Table A; Target 15801; HLA-C*04:01; CLDN6; ENSG00000184697; TAA
VYDSLLAL

SEQ ID NO: 15802 - protein, 8 aa, Homo sapiens
  Table A; Target 15802; HLA-C*14:02; CLDN6; ENSG00000184697; TAA
VYDSLLAL

SEQ ID NO: 15803 - protein, 10 aa, Homo sapiens
  Table A; Target 15803; HLA-C*06:02; CLDN6; ENSG00000184697; TAA
VYLAGAKCTT

SEQ ID NO: 15804 - protein, 10 aa, Homo sapiens
  Table A; Target 15804; HLA-C*07:01; CLDN6; ENSG00000184697; TAA
VYLAGAKCTT

SEQ ID NO: 15805 - protein, 10 aa, Homo sapiens
  Table A; Target 15805; HLA-C*07:02; CLDN6; ENSG00000184697; TAA
VYLAGAKCTT

SEQ ID NO: 15806 - protein, 8 aa, Homo sapiens
  Table A; Target 15806; HLA-B*51:01; CLDN6; ENSG00000184697; TAA
WAASGLLL

SEQ ID NO: 15807 - protein, 8 aa, Homo sapiens
  Table A; Target 15807; HLA-C*03:03; CLDN6; ENSG00000184697; TAA
WAASGLLL

SEQ ID NO: 15808 - protein, 8 aa, Homo sapiens
  Table A; Target 15808; HLA-C*03:04; CLDN6; ENSG00000184697; TAA
WAASGLLL

SEQ ID NO: 15809 - protein, 9 aa, Homo sapiens
  Table A; Target 15809; HLA-C*03:04; CLDN6; ENSG00000184697; TAA
WAASGLLLL

SEQ ID NO: 15810 - protein, 9 aa, Homo sapiens
  Table A; Target 15810; HLA-C*06:02; CLDN6; ENSG00000184697; TAA
YLAGAKCTT

SEQ ID NO: 15811 - protein, 9 aa, Homo sapiens
  Table A; Target 15811; HLA-A*02:03; CLDN6; ENSG00000184697; TAA
YLGWAASGL

SEQ ID NO: 15812 - protein, 9 aa, Homo sapiens
  Table A; Target 15812; HLA-A*02:04; CLDN6; ENSG00000184697; TAA
YLGWAASGL

SEQ ID NO: 15813 - protein, 9 aa, Homo sapiens
  Table A; Target 15813; HLA-A*02:07; CLDN6; ENSG00000184697; TAA
YLGWAASGL

SEQ ID NO: 15814 - protein, 11 aa, Homo sapiens
  Table A; Target 15814; HLA-A*02:04; CLDN6; ENSG00000184697; TAA
YLGWAASGLLL

SEQ ID NO: 15815 - protein, 9 aa, Homo sapiens
  Table A; Target 15815; HLA-A*02:01; CLDN6; ENSG00000184697; TAA
YMARYSTSA

SEQ ID NO: 15816 - protein, 9 aa, Homo sapiens
  Table A; Target 15816; HLA-A*02:03; CLDN6; ENSG00000184697; TAA
YMARYSTSA

SEQ ID NO: 15817 - protein, 9 aa, Homo sapiens
  Table A; Target 15817; HLA-B*46:01; CLDN6; ENSG00000184697; TAA
YMARYSTSA

SEQ ID NO: 15818 - protein, 9 aa, Homo sapiens
  Table A; Target 15818; HLA-B*54:01; CLDN6; ENSG00000184697; TAA
YMARYSTSA

SEQ ID NO: 15819 - protein, 9 aa, Homo sapiens
  Table A; Target 15819; HLA-B*55:01; CLDN6; ENSG00000184697; TAA
YMARYSTSA

SEQ ID NO: 15820 - protein, 8 aa, Homo sapiens
  Table A; Target 15820; HLA-B*54:01; CLDN6; ENSG00000184697; TAA
YNPLVAEA

SEQ ID NO: 15821 - protein, 10 aa, Homo sapiens
  Table A; Target 15821; HLA-B*27:02; CLDN6; ENSG00000184697; TAA
YNPLVAEAQK

SEQ ID NO: 15822 - protein, 10 aa, Homo sapiens
  Table A; Target 15822; HLA-C*07:02; CLDN6; ENSG00000184697; TAA
YNPLVAEAQK

SEQ ID NO: 15823 - protein, 8 aa, Homo sapiens
  Table A; Target 15823; HLA-A*02:01; CLDN6; ENSG00000184697; TAA
YSTSAPAI

SEQ ID NO: 15824 - protein, 8 aa, Homo sapiens
  Table A; Target 15824; HLA-A*23:01; CLDN6; ENSG00000184697; TAA
YSTSAPAI

SEQ ID NO: 15825 - protein, 8 aa, Homo sapiens
  Table A; Target 15825; HLA-A*30:01; CLDN6; ENSG00000184697; TAA
YSTSAPAI

SEQ ID NO: 15826 - protein, 8 aa, Homo sapiens
  Table A; Target 15826; HLA-A*32:01; CLDN6; ENSG00000184697; TAA
YSTSAPAI

SEQ ID NO: 15827 - protein, 8 aa, Homo sapiens
  Table A; Target 15827; HLA-B*07:02; CLDN6; ENSG00000184697; TAA
YSTSAPAI

SEQ ID NO: 15828 - protein, 8 aa, Homo sapiens
  Table A; Target 15828; HLA-B*13:02; CLDN6; ENSG00000184697; TAA
YSTSAPAI

SEQ ID NO: 15829 - protein, 8 aa, Homo sapiens
  Table A; Target 15829; HLA-B*27:05; CLDN6; ENSG00000184697; TAA
YSTSAPAI

SEQ ID NO: 15830 - protein, 8 aa, Homo sapiens
  Table A; Target 15830; HLA-B*39:01; CLDN6; ENSG00000184697; TAA
YSTSAPAI

SEQ ID NO: 15831 - protein, 8 aa, Homo sapiens
  Table A; Target 15831; HLA-B*40:01; CLDN6; ENSG00000184697; TAA
YSTSAPAI

SEQ ID NO: 15832 - protein, 8 aa, Homo sapiens
  Table A; Target 15832; HLA-B*40:02; CLDN6; ENSG00000184697; TAA
YSTSAPAI

SEQ ID NO: 15833 - protein, 8 aa, Homo sapiens
  Table A; Target 15833; HLA-B*46:01; CLDN6; ENSG00000184697; TAA
YSTSAPAI

SEQ ID NO: 15834 - protein, 8 aa, Homo sapiens
  Table A; Target 15834; HLA-B*49:01; CLDN6; ENSG00000184697; TAA
YSTSAPAI

SEQ ID NO: 15835 - protein, 8 aa, Homo sapiens
  Table A; Target 15835; HLA-B*51:01; CLDN6; ENSG00000184697; TAA
YSTSAPAI

SEQ ID NO: 15836 - protein, 8 aa, Homo sapiens
  Table A; Target 15836; HLA-B*54:01; CLDN6; ENSG00000184697; TAA
YSTSAPAI

SEQ ID NO: 15837 - protein, 8 aa, Homo sapiens
  Table A; Target 15837; HLA-B*55:01; CLDN6; ENSG00000184697; TAA
YSTSAPAI

SEQ ID NO: 15838 - protein, 8 aa, Homo sapiens
  Table A; Target 15838; HLA-B*58:01; CLDN6; ENSG00000184697; TAA
YSTSAPAI

SEQ ID NO: 15839 - protein, 8 aa, Homo sapiens
  Table A; Target 15839; HLA-C*01:02; CLDN6; ENSG00000184697; TAA
YSTSAPAI

SEQ ID NO: 15840 - protein, 8 aa, Homo sapiens
  Table A; Target 15840; HLA-C*02:02; CLDN6; ENSG00000184697; TAA
YSTSAPAI

SEQ ID NO: 15841 - protein, 8 aa, Homo sapiens
  Table A; Target 15841; HLA-C*03:03; CLDN6; ENSG00000184697; TAA
YSTSAPAI

SEQ ID NO: 15842 - protein, 8 aa, Homo sapiens
  Table A; Target 15842; HLA-C*03:04; CLDN6; ENSG00000184697; TAA
YSTSAPAI

SEQ ID NO: 15843 - protein, 8 aa, Homo sapiens
  Table A; Target 15843; HLA-C*04:01; CLDN6; ENSG00000184697; TAA
YSTSAPAI

SEQ ID NO: 15844 - protein, 8 aa, Homo sapiens
  Table A; Target 15844; HLA-C*05:01; CLDN6; ENSG00000184697; TAA
YSTSAPAI

SEQ ID NO: 15845 - protein, 8 aa, Homo sapiens
  Table A; Target 15845; HLA-C*06:02; CLDN6; ENSG00000184697; TAA
YSTSAPAI

SEQ ID NO: 15846 - protein, 8 aa, Homo sapiens
  Table A; Target 15846; HLA-C*07:01; CLDN6; ENSG00000184697; TAA
YSTSAPAI

SEQ ID NO: 15847 - protein, 8 aa, Homo sapiens
  Table A; Target 15847; HLA-C*07:02; CLDN6; ENSG00000184697; TAA
YSTSAPAI

SEQ ID NO: 15848 - protein, 8 aa, Homo sapiens
  Table A; Target 15848; HLA-C*12:03; CLDN6; ENSG00000184697; TAA
YSTSAPAI

SEQ ID NO: 15849 - protein, 8 aa, Homo sapiens
  Table A; Target 15849; HLA-C*14:02; CLDN6; ENSG00000184697; TAA
YSTSAPAI

SEQ ID NO: 15850 - protein, 8 aa, Homo sapiens
  Table A; Target 15850; HLA-C*16:01; CLDN6; ENSG00000184697; TAA
YSTSAPAI

SEQ ID NO: 15851 - protein, 8 aa, Homo sapiens
  Table A; Target 15851; HLA-C*16:02; CLDN6; ENSG00000184697; TAA
YSTSAPAI

SEQ ID NO: 15852 - protein, 8 aa, Homo sapiens
  Table A; Target 15852; HLA-C*16:04; CLDN6; ENSG00000184697; TAA
YSTSAPAI

SEQ ID NO: 15853 - protein, 10 aa, Homo sapiens
  Table A; Target 15853; HLA-A*03:01; CLDN6; ENSG00000184697; TAA
YSTSAPAISR

SEQ ID NO: 15854 - protein, 10 aa, Homo sapiens
  Table A; Target 15854; HLA-A*11:01; CLDN6; ENSG00000184697; TAA
YSTSAPAISR

SEQ ID NO: 15855 - protein, 10 aa, Homo sapiens
  Table A; Target 15855; HLA-A*31:01; CLDN6; ENSG00000184697; TAA
YSTSAPAISR

SEQ ID NO: 15856 - protein, 10 aa, Homo sapiens
  Table A; Target 15856; HLA-A*33:01; CLDN6; ENSG00000184697; TAA
YSTSAPAISR

SEQ ID NO: 15857 - protein, 10 aa, Homo sapiens
  Table A; Target 15857; HLA-A*33:03; CLDN6; ENSG00000184697; TAA
YSTSAPAISR

SEQ ID NO: 15858 - protein, 10 aa, Homo sapiens
  Table A; Target 15858; HLA-A*68:02; CLDN6; ENSG00000184697; TAA
YSTSAPAISR

SEQ ID NO: 15859 - protein, 10 aa, Homo sapiens
  Table A; Target 15859; HLA-B*27:02; CLDN6; ENSG00000184697; TAA
YSTSAPAISR

SEQ ID NO: 15860 - protein, 10 aa, Homo sapiens
  Table A; Target 15860; HLA-B*54:01; CLDN6; ENSG00000184697; TAA
YSTSAPAISR

SEQ ID NO: 15861 - protein, 10 aa, Homo sapiens
  Table A; Target 15861; HLA-B*57:01; CLDN6; ENSG00000184697; TAA
YSTSAPAISR

SEQ ID NO: 15862 - protein, 10 aa, Homo sapiens
  Table A; Target 15862; HLA-C*07:02; CLDN6; ENSG00000184697; TAA
YSTSAPAISR

SEQ ID NO: 15863 - protein, 10 aa, Homo sapiens
  Table A; Target 15863; HLA-C*07:06; CLDN6; ENSG00000184697; TAA
YSTSAPAISR

SEQ ID NO: 15864 - protein, 9 aa, Homo sapiens
  Table A; Target 15864; HLA-B*15:03; CLEC3A; ENSG00000166509; TAA
AKNGLVICI

SEQ ID NO: 15865 - protein, 8 aa, Homo sapiens
  Table A; Target 15865; HLA-A*02:03; CLEC3A; ENSG00000166509; TAA
ALKEIQAL

SEQ ID NO: 15866 - protein, 8 aa, Homo sapiens
  Table A; Target 15866; HLA-A*02:04; CLEC3A; ENSG00000166509; TAA
ALKEIQAL

SEQ ID NO: 15867 - protein, 8 aa, Homo sapiens
  Table A; Target 15867; HLA-B*08:01; CLEC3A; ENSG00000166509; TAA
ALKEIQAL

SEQ ID NO: 15868 - protein, 8 aa, Homo sapiens
  Table A; Target 15868; HLA-B*15:01; CLEC3A; ENSG00000166509; TAA
ALKEIQAL

SEQ ID NO: 15869 - protein, 8 aa, Homo sapiens
  Table A; Target 15869; HLA-B*37:01; CLEC3A; ENSG00000166509; TAA
ALKEIQAL

SEQ ID NO: 15870 - protein, 10 aa, Homo sapiens
  Table A; Target 15870; HLA-A*02:03; CLEC3A; ENSG00000166509; TAA
ALKEIQALQT

SEQ ID NO: 15871 - protein, 11 aa, Homo sapiens
  Table A; Target 15871; HLA-A*02:01; CLEC3A; ENSG00000166509; TAA
ALKEIQALQTV

SEQ ID NO: 15872 - protein, 11 aa, Homo sapiens
  Table A; Target 15872; HLA-A*02:03; CLEC3A; ENSG00000166509; TAA
ALKEIQALQTV

SEQ ID NO: 15873 - protein, 11 aa, Homo sapiens
  Table A; Target 15873; HLA-A*02:04; CLEC3A; ENSG00000166509; TAA
ALKEIQALQTV

SEQ ID NO: 15874 - protein, 11 aa, Homo sapiens
  Table A; Target 15874; HLA-A*02:07; CLEC3A; ENSG00000166509; TAA
ALKEIQALQTV

SEQ ID NO: 15875 - protein, 11 aa, Homo sapiens
  Table A; Target 15875; HLA-B*13:02; CLEC3A; ENSG00000166509; TAA
ALKEIQALQTV

SEQ ID NO: 15876 - protein, 11 aa, Homo sapiens
  Table A; Target 15876; HLA-B*55:01; CLEC3A; ENSG00000166509; TAA
ALKEIQALQTV

SEQ ID NO: 15877 - protein, 8 aa, Homo sapiens
  Table A; Target 15877; HLA-C*16:02; CLEC3A; ENSG00000166509; TAA
ASEGLKHF

SEQ ID NO: 15878 - protein, 11 aa, Homo sapiens
  Table A; Target 15878; HLA-A*03:01; CLEC3A; ENSG00000166509; TAA
CVLFSQSAQGK

SEQ ID NO: 15879 - protein, 11 aa, Homo sapiens
  Table A; Target 15879; HLA-A*03:02; CLEC3A; ENSG00000166509; TAA
CVLFSQSAQGK

SEQ ID NO: 15880 - protein, 11 aa, Homo sapiens
  Table A; Target 15880; HLA-A*11:01; CLEC3A; ENSG00000166509; TAA
CVLFSQSAQGK

SEQ ID NO: 15881 - protein, 8 aa, Homo sapiens
  Table A; Target 15881; HLA-C*14:02; CLEC3A; ENSG00000166509; TAA
CYLASEGL

SEQ ID NO: 15882 - protein, 11 aa, Homo sapiens
  Table A; Target 15882; HLA-A*24:02; CLEC3A; ENSG00000166509; TAA
CYLASEGLKHF

SEQ ID NO: 15883 - protein, 9 aa, Homo sapiens
  Table A; Target 15883; HLA-A*25:01; CLEC3A; ENSG00000166509; TAA
DEINALQDY

SEQ ID NO: 15884 - protein, 9 aa, Homo sapiens
  Table A; Target 15884; HLA-A*26:01; CLEC3A; ENSG00000166509; TAA
DEINALQDY

SEQ ID NO: 15885 - protein, 9 aa, Homo sapiens
  Table A; Target 15885; HLA-A*30:01; CLEC3A; ENSG00000166509; TAA
DEINALQDY

SEQ ID NO: 15886 - protein, 9 aa, Homo sapiens
  Table A; Target 15886; HLA-B*15:03; CLEC3A; ENSG00000166509; TAA
DEINALQDY

SEQ ID NO: 15887 - protein, 9 aa, Homo sapiens
  Table A; Target 15887; HLA-B*18:01; CLEC3A; ENSG00000166509; TAA
DEINALQDY

SEQ ID NO: 15888 - protein, 9 aa, Homo sapiens
  Table A; Target 15888; HLA-B*27:02; CLEC3A; ENSG00000166509; TAA
DEINALQDY

SEQ ID NO: 15889 - protein, 9 aa, Homo sapiens
  Table A; Target 15889; HLA-B*27:05; CLEC3A; ENSG00000166509; TAA
DEINALQDY

SEQ ID NO: 15890 - protein, 9 aa, Homo sapiens
  Table A; Target 15890; HLA-B*35:01; CLEC3A; ENSG00000166509; TAA
DEINALQDY

SEQ ID NO: 15891 - protein, 9 aa, Homo sapiens
  Table A; Target 15891; HLA-B*39:01; CLEC3A; ENSG00000166509; TAA
DEINALQDY

SEQ ID NO: 15892 - protein, 9 aa, Homo sapiens
  Table A; Target 15892; HLA-B*40:01; CLEC3A; ENSG00000166509; TAA
DEINALQDY

SEQ ID NO: 15893 - protein, 9 aa, Homo sapiens
  Table A; Target 15893; HLA-B*44:02; CLEC3A; ENSG00000166509; TAA
DEINALQDY

SEQ ID NO: 15894 - protein, 9 aa, Homo sapiens
  Table A; Target 15894; HLA-B*44:03; CLEC3A; ENSG00000166509; TAA
DEINALQDY

SEQ ID NO: 15895 - protein, 9 aa, Homo sapiens
  Table A; Target 15895; HLA-C*04:01; CLEC3A; ENSG00000166509; TAA
DEINALQDY

SEQ ID NO: 15896 - protein, 9 aa, Homo sapiens
  Table A; Target 15896; HLA-C*07:01; CLEC3A; ENSG00000166509; TAA
DEINALQDY

SEQ ID NO: 15897 - protein, 9 aa, Homo sapiens
  Table A; Target 15897; HLA-C*12:03; CLEC3A; ENSG00000166509; TAA
DEINALQDY

SEQ ID NO: 15898 - protein, 9 aa, Homo sapiens
  Table A; Target 15898; HLA-C*16:04; CLEC3A; ENSG00000166509; TAA
DEINALQDY

SEQ ID NO: 15899 - protein, 11 aa, Homo sapiens
  Table A; Target 15899; HLA-B*27:02; CLEC3A; ENSG00000166509; TAA
DEINALQDYGK

SEQ ID NO: 15900 - protein, 11 aa, Homo sapiens
  Table A; Target 15900; HLA-B*27:05; CLEC3A; ENSG00000166509; TAA
DEINALQDYGK

SEQ ID NO: 15901 - protein, 11 aa, Homo sapiens
  Table A; Target 15901; HLA-C*04:01; CLEC3A; ENSG00000166509; TAA
DEINALQDYGK

SEQ ID NO: 15902 - protein, 8 aa, Homo sapiens
  Table A; Target 15902; HLA-B*08:01; CLEC3A; ENSG00000166509; TAA
DGDLKTQI

SEQ ID NO: 15903 - protein, 8 aa, Homo sapiens
  Table A; Target 15903; HLA-B*51:01; CLEC3A; ENSG00000166509; TAA
DGDLKTQI

SEQ ID NO: 15904 - protein, 8 aa, Homo sapiens
  Table A; Target 15904; HLA-A*33:01; CLEC3A; ENSG00000166509; TAA
DLKTQIEK

SEQ ID NO: 15905 - protein, 8 aa, Homo sapiens
  Table A; Target 15905; HLA-B*08:01; CLEC3A; ENSG00000166509; TAA
DLKTQIEK

SEQ ID NO: 15906 - protein, 9 aa, Homo sapiens
  Table A; Target 15906; HLA-A*02:03; CLEC3A; ENSG00000166509; TAA
DLKTQIEKL

SEQ ID NO: 15907 - protein, 9 aa, Homo sapiens
  Table A; Target 15907; HLA-A*25:01; CLEC3A; ENSG00000166509; TAA
DLKTQIEKL

SEQ ID NO: 15908 - protein, 9 aa, Homo sapiens
  Table A; Target 15908; HLA-A*26:01; CLEC3A; ENSG00000166509; TAA
DLKTQIEKL

SEQ ID NO: 15909 - protein, 9 aa, Homo sapiens
  Table A; Target 15909; HLA-A*33:01; CLEC3A; ENSG00000166509; TAA
DLKTQIEKL

SEQ ID NO: 15910 - protein, 9 aa, Homo sapiens
  Table A; Target 15910; HLA-B*08:01; CLEC3A; ENSG00000166509; TAA
DLKTQIEKL

SEQ ID NO: 15911 - protein, 9 aa, Homo sapiens
  Table A; Target 15911; HLA-A*33:01; CLEC3A; ENSG00000166509; TAA
DQTTSHTSR

SEQ ID NO: 15912 - protein, 9 aa, Homo sapiens
  Table A; Target 15912; HLA-A*33:03; CLEC3A; ENSG00000166509; TAA
DQTTSHTSR

SEQ ID NO: 15913 - protein, 9 aa, Homo sapiens
  Table A; Target 15913; HLA-A*68:01; CLEC3A; ENSG00000166509; TAA
DQTTSHTSR

SEQ ID NO: 15914 - protein, 9 aa, Homo sapiens
  Table A; Target 15914; HLA-B*39:01; CLEC3A; ENSG00000166509; TAA
DQTTSHTSR

SEQ ID NO: 15915 - protein, 9 aa, Homo sapiens
  Table A; Target 15915; HLA-C*07:06; CLEC3A; ENSG00000166509; TAA
DQTTSHTSR

SEQ ID NO: 15916 - protein, 10 aa, Homo sapiens
  Table A; Target 15916; HLA-B*38:01; CLEC3A; ENSG00000166509; TAA
DQTTSHTSRL

SEQ ID NO: 15917 - protein, 9 aa, Homo sapiens
  Table A; Target 15917; HLA-B*27:05; CLEC3A; ENSG00000166509; TAA
DRAQPNGGK

SEQ ID NO: 15918 - protein, 9 aa, Homo sapiens
  Table A; Target 15918; HLA-A*03:02; CLEC3A; ENSG00000166509; TAA
DVNGIAISF

SEQ ID NO: 15919 - protein, 9 aa, Homo sapiens
  Table A; Target 15919; HLA-A*23:01; CLEC3A; ENSG00000166509; TAA
DVNGIAISF

SEQ ID NO: 15920 - protein, 9 aa, Homo sapiens
  Table A; Target 15920; HLA-A*25:01; CLEC3A; ENSG00000166509; TAA
DVNGIAISF

SEQ ID NO: 15921 - protein, 9 aa, Homo sapiens
  Table A; Target 15921; HLA-A*26:01; CLEC3A; ENSG00000166509; TAA
DVNGIAISF

SEQ ID NO: 15922 - protein, 9 aa, Homo sapiens
  Table A; Target 15922; HLA-A*29:02; CLEC3A; ENSG00000166509; TAA
DVNGIAISF

SEQ ID NO: 15923 - protein, 9 aa, Homo sapiens
  Table A; Target 15923; HLA-A*31:01; CLEC3A; ENSG00000166509; TAA
DVNGIAISF

SEQ ID NO: 15924 - protein, 9 aa, Homo sapiens
  Table A; Target 15924; HLA-A*32:01; CLEC3A; ENSG00000166509; TAA
DVNGIAISF

SEQ ID NO: 15925 - protein, 9 aa, Homo sapiens
  Table A; Target 15925; HLA-A*33:01; CLEC3A; ENSG00000166509; TAA
DVNGIAISF

SEQ ID NO: 15926 - protein, 9 aa, Homo sapiens
  Table A; Target 15926; HLA-A*33:03; CLEC3A; ENSG00000166509; TAA
DVNGIAISF

SEQ ID NO: 15927 - protein, 9 aa, Homo sapiens
  Table A; Target 15927; HLA-A*68:01; CLEC3A; ENSG00000166509; TAA
DVNGIAISF

SEQ ID NO: 15928 - protein, 9 aa, Homo sapiens
  Table A; Target 15928; HLA-A*68:02; CLEC3A; ENSG00000166509; TAA
DVNGIAISF

SEQ ID NO: 15929 - protein, 9 aa, Homo sapiens
  Table A; Target 15929; HLA-B*15:01; CLEC3A; ENSG00000166509; TAA
DVNGIAISF

SEQ ID NO: 15930 - protein, 9 aa, Homo sapiens
  Table A; Target 15930; HLA-B*15:03; CLEC3A; ENSG00000166509; TAA
DVNGIAISF

SEQ ID NO: 15931 - protein, 9 aa, Homo sapiens
  Table A; Target 15931; HLA-B*18:01; CLEC3A; ENSG00000166509; TAA
DVNGIAISF

SEQ ID NO: 15932 - protein, 9 aa, Homo sapiens
  Table A; Target 15932; HLA-B*27:02; CLEC3A; ENSG00000166509; TAA
DVNGIAISF

SEQ ID NO: 15933 - protein, 9 aa, Homo sapiens
  Table A; Target 15933; HLA-B*35:01; CLEC3A; ENSG00000166509; TAA
DVNGIAISF

SEQ ID NO: 15934 - protein, 9 aa, Homo sapiens
  Table A; Target 15934; HLA-B*35:03; CLEC3A; ENSG00000166509; TAA
DVNGIAISF

SEQ ID NO: 15935 - protein, 9 aa, Homo sapiens
  Table A; Target 15935; HLA-B*38:01; CLEC3A; ENSG00000166509; TAA
DVNGIAISF

SEQ ID NO: 15936 - protein, 9 aa, Homo sapiens
  Table A; Target 15936; HLA-B*39:01; CLEC3A; ENSG00000166509; TAA
DVNGIAISF

SEQ ID NO: 15937 - protein, 9 aa, Homo sapiens
  Table A; Target 15937; HLA-B*44:02; CLEC3A; ENSG00000166509; TAA
DVNGIAISF

SEQ ID NO: 15938 - protein, 9 aa, Homo sapiens
  Table A; Target 15938; HLA-B*44:03; CLEC3A; ENSG00000166509; TAA
DVNGIAISF

SEQ ID NO: 15939 - protein, 9 aa, Homo sapiens
  Table A; Target 15939; HLA-C*02:02; CLEC3A; ENSG00000166509; TAA
DVNGIAISF

SEQ ID NO: 15940 - protein, 9 aa, Homo sapiens
  Table A; Target 15940; HLA-C*07:04; CLEC3A; ENSG00000166509; TAA
DVNGIAISF

SEQ ID NO: 15941 - protein, 9 aa, Homo sapiens
  Table A; Target 15941; HLA-C*07:06; CLEC3A; ENSG00000166509; TAA
DVNGIAISF

SEQ ID NO: 15942 - protein, 9 aa, Homo sapiens
  Table A; Target 15942; HLA-C*16:04; CLEC3A; ENSG00000166509; TAA
DVNGIAISF

SEQ ID NO: 15943 - protein, 10 aa, Homo sapiens
  Table A; Target 15943; HLA-A*25:01; CLEC3A; ENSG00000166509; TAA
DVNGIAISFL

SEQ ID NO: 15944 - protein, 10 aa, Homo sapiens
  Table A; Target 15944; HLA-A*26:01; CLEC3A; ENSG00000166509; TAA
DVNGIAISFL

SEQ ID NO: 15945 - protein, 10 aa, Homo sapiens
  Table A; Target 15945; HLA-A*33:01; CLEC3A; ENSG00000166509; TAA
DVNGIAISFL

SEQ ID NO: 15946 - protein, 10 aa, Homo sapiens
  Table A; Target 15946; HLA-A*68:01; CLEC3A; ENSG00000166509; TAA
DVNGIAISFL

SEQ ID NO: 15947 - protein, 10 aa, Homo sapiens
  Table A; Target 15947; HLA-A*68:02; CLEC3A; ENSG00000166509; TAA
DVNGIAISFL

SEQ ID NO: 15948 - protein, 9 aa, Homo sapiens
  Table A; Target 15948; HLA-A*33:01; CLEC3A; ENSG00000166509; TAA
EANEDCISK

SEQ ID NO: 15949 - protein, 9 aa, Homo sapiens
  Table A; Target 15949; HLA-A*33:03; CLEC3A; ENSG00000166509; TAA
EANEDCISK

SEQ ID NO: 15950 - protein, 9 aa, Homo sapiens
  Table A; Target 15950; HLA-A*68:01; CLEC3A; ENSG00000166509; TAA
EANEDCISK

SEQ ID NO: 15951 - protein, 9 aa, Homo sapiens
  Table A; Target 15951; HLA-C*07:06; CLEC3A; ENSG00000166509; TAA
EANEDCISK

SEQ ID NO: 15952 - protein, 9 aa, Homo sapiens
  Table A; Target 15952; HLA-A*33:01; CLEC3A; ENSG00000166509; TAA
EGLKHFHEA

SEQ ID NO: 15953 - protein, 9 aa, Homo sapiens
  Table A; Target 15953; HLA-B*54:01; CLEC3A; ENSG00000166509; TAA
EGLKHFHEA

SEQ ID NO: 15954 - protein, 10 aa, Homo sapiens
  Table A; Target 15954; HLA-A*03:02; CLEC3A; ENSG00000166509; TAA
EINALQDYGK

SEQ ID NO: 15955 - protein, 10 aa, Homo sapiens
  Table A; Target 15955; HLA-A*33:03; CLEC3A; ENSG00000166509; TAA
EINALQDYGK

SEQ ID NO: 15956 - protein, 10 aa, Homo sapiens
  Table A; Target 15956; HLA-A*68:01; CLEC3A; ENSG00000166509; TAA
EINALQDYGK

SEQ ID NO: 15957 - protein, 10 aa, Homo sapiens
  Table A; Target 15957; HLA-A*68:02; CLEC3A; ENSG00000166509; TAA
EINALQDYGK

SEQ ID NO: 15958 - protein, 10 aa, Homo sapiens
  Table A; Target 15958; HLA-B*27:02; CLEC3A; ENSG00000166509; TAA
EINALQDYGK

SEQ ID NO: 15959 - protein, 11 aa, Homo sapiens
  Table A; Target 15959; HLA-A*33:01; CLEC3A; ENSG00000166509; TAA
EINALQDYGKR

SEQ ID NO: 15960 - protein, 11 aa, Homo sapiens
  Table A; Target 15960; HLA-A*33:03; CLEC3A; ENSG00000166509; TAA
EINALQDYGKR

SEQ ID NO: 15961 - protein, 11 aa, Homo sapiens
  Table A; Target 15961; HLA-A*68:01; CLEC3A; ENSG00000166509; TAA
EINALQDYGKR

SEQ ID NO: 15962 - protein, 9 aa, Homo sapiens
  Table A; Target 15962; HLA-C*12:03; CLEC3A; ENSG00000166509; TAA
EIQALQTVC

SEQ ID NO: 15963 - protein, 11 aa, Homo sapiens
  Table A; Target 15963; HLA-A*33:01; CLEC3A; ENSG00000166509; TAA
EIQALQTVCLR

SEQ ID NO: 15964 - protein, 11 aa, Homo sapiens
  Table A; Target 15964; HLA-A*33:03; CLEC3A; ENSG00000166509; TAA
EIQALQTVCLR

SEQ ID NO: 15965 - protein, 11 aa, Homo sapiens
  Table A; Target 15965; HLA-A*68:01; CLEC3A; ENSG00000166509; TAA
EIQALQTVCLR

SEQ ID NO: 15966 - protein, 11 aa, Homo sapiens
  Table A; Target 15966; HLA-A*25:01; CLEC3A; ENSG00000166509; TAA
EVNALKEIQAL

SEQ ID NO: 15967 - protein, 11 aa, Homo sapiens
  Table A; Target 15967; HLA-A*26:01; CLEC3A; ENSG00000166509; TAA
EVNALKEIQAL

SEQ ID NO: 15968 - protein, 11 aa, Homo sapiens
  Table A; Target 15968; HLA-A*68:01; CLEC3A; ENSG00000166509; TAA
EVNALKEIQAL

SEQ ID NO: 15969 - protein, 11 aa, Homo sapiens
  Table A; Target 15969; HLA-A*68:02; CLEC3A; ENSG00000166509; TAA
EVNALKEIQAL

SEQ ID NO: 15970 - protein, 9 aa, Homo sapiens
  Table A; Target 15970; HLA-B*27:05; CLEC3A; ENSG00000166509; TAA
FHEANEDCI

SEQ ID NO: 15971 - protein, 9 aa, Homo sapiens
  Table A; Target 15971; HLA-B*38:01; CLEC3A; ENSG00000166509; TAA
FHEANEDCI

SEQ ID NO: 15972 - protein, 9 aa, Homo sapiens
  Table A; Target 15972; HLA-B*39:01; CLEC3A; ENSG00000166509; TAA
FHEANEDCI

SEQ ID NO: 15973 - protein, 9 aa, Homo sapiens
  Table A; Target 15973; HLA-A*25:01; CLEC3A; ENSG00000166509; TAA
FSQSAQGKW

SEQ ID NO: 15974 - protein, 9 aa, Homo sapiens
  Table A; Target 15974; HLA-A*32:01; CLEC3A; ENSG00000166509; TAA
FSQSAQGKW

SEQ ID NO: 15975 - protein, 9 aa, Homo sapiens
  Table A; Target 15975; HLA-B*44:02; CLEC3A; ENSG00000166509; TAA
FSQSAQGKW

SEQ ID NO: 15976 - protein, 9 aa, Homo sapiens
  Table A; Target 15976; HLA-B*57:01; CLEC3A; ENSG00000166509; TAA
FSQSAQGKW

SEQ ID NO: 15977 - protein, 9 aa, Homo sapiens
  Table A; Target 15977; HLA-B*58:01; CLEC3A; ENSG00000166509; TAA
FSQSAQGKW

SEQ ID NO: 15978 - protein, 9 aa, Homo sapiens
  Table A; Target 15978; HLA-C*06:02; CLEC3A; ENSG00000166509; TAA
FSQSAQGKW

SEQ ID NO: 15979 - protein, 9 aa, Homo sapiens
  Table A; Target 15979; HLA-C*12:03; CLEC3A; ENSG00000166509; TAA
FSQSAQGKW

SEQ ID NO: 15980 - protein, 9 aa, Homo sapiens
  Table A; Target 15980; HLA-C*16:02; CLEC3A; ENSG00000166509; TAA
FSQSAQGKW

SEQ ID NO: 15981 - protein, 9 aa, Homo sapiens
  Table A; Target 15981; HLA-A*01:01; CLEC3A; ENSG00000166509; TAA
FVDVNGIAI

SEQ ID NO: 15982 - protein, 9 aa, Homo sapiens
  Table A; Target 15982; HLA-A*02:01; CLEC3A; ENSG00000166509; TAA
FVDVNGIAI

SEQ ID NO: 15983 - protein, 9 aa, Homo sapiens
  Table A; Target 15983; HLA-A*02:07; CLEC3A; ENSG00000166509; TAA
FVDVNGIAI

SEQ ID NO: 15984 - protein, 9 aa, Homo sapiens
  Table A; Target 15984; HLA-A*25:01; CLEC3A; ENSG00000166509; TAA
FVDVNGIAI

SEQ ID NO: 15985 - protein, 9 aa, Homo sapiens
  Table A; Target 15985; HLA-A*30:01; CLEC3A; ENSG00000166509; TAA
FVDVNGIAI

SEQ ID NO: 15986 - protein, 9 aa, Homo sapiens
  Table A; Target 15986; HLA-A*68:02; CLEC3A; ENSG00000166509; TAA
FVDVNGIAI

SEQ ID NO: 15987 - protein, 9 aa, Homo sapiens
  Table A; Target 15987; HLA-B*13:02; CLEC3A; ENSG00000166509; TAA
FVDVNGIAI

SEQ ID NO: 15988 - protein, 9 aa, Homo sapiens
  Table A; Target 15988; HLA-B*27:05; CLEC3A; ENSG00000166509; TAA
FVDVNGIAI

SEQ ID NO: 15989 - protein, 9 aa, Homo sapiens
  Table A; Target 15989; HLA-B*35:01; CLEC3A; ENSG00000166509; TAA
FVDVNGIAI

SEQ ID NO: 15990 - protein, 9 aa, Homo sapiens
  Table A; Target 15990; HLA-B*35:03; CLEC3A; ENSG00000166509; TAA
FVDVNGIAI

SEQ ID NO: 15991 - protein, 9 aa, Homo sapiens
  Table A; Target 15991; HLA-B*38:01; CLEC3A; ENSG00000166509; TAA
FVDVNGIAI

SEQ ID NO: 15992 - protein, 9 aa, Homo sapiens
  Table A; Target 15992; HLA-B*39:01; CLEC3A; ENSG00000166509; TAA
FVDVNGIAI

SEQ ID NO: 15993 - protein, 9 aa, Homo sapiens
  Table A; Target 15993; HLA-B*40:01; CLEC3A; ENSG00000166509; TAA
FVDVNGIAI

SEQ ID NO: 15994 - protein, 9 aa, Homo sapiens
  Table A; Target 15994; HLA-B*40:02; CLEC3A; ENSG00000166509; TAA
FVDVNGIAI

SEQ ID NO: 15995 - protein, 9 aa, Homo sapiens
  Table A; Target 15995; HLA-B*46:01; CLEC3A; ENSG00000166509; TAA
FVDVNGIAI

SEQ ID NO: 15996 - protein, 9 aa, Homo sapiens
  Table A; Target 15996; HLA-B*49:01; CLEC3A; ENSG00000166509; TAA
FVDVNGIAI

SEQ ID NO: 15997 - protein, 9 aa, Homo sapiens
  Table A; Target 15997; HLA-B*51:01; CLEC3A; ENSG00000166509; TAA
FVDVNGIAI

SEQ ID NO: 15998 - protein, 9 aa, Homo sapiens
  Table A; Target 15998; HLA-B*55:01; CLEC3A; ENSG00000166509; TAA
FVDVNGIAI

SEQ ID NO: 15999 - protein, 9 aa, Homo sapiens
  Table A; Target 15999; HLA-B*58:01; CLEC3A; ENSG00000166509; TAA
FVDVNGIAI

SEQ ID NO: 16000 - protein, 9 aa, Homo sapiens
  Table A; Target 16000; HLA-C*01:02; CLEC3A; ENSG00000166509; TAA
FVDVNGIAI

SEQ ID NO: 16001 - protein, 9 aa, Homo sapiens
  Table A; Target 16001; HLA-C*02:02; CLEC3A; ENSG00000166509; TAA
FVDVNGIAI

SEQ ID NO: 16002 - protein, 9 aa, Homo sapiens
  Table A; Target 16002; HLA-C*03:03; CLEC3A; ENSG00000166509; TAA
FVDVNGIAI

SEQ ID NO: 16003 - protein, 9 aa, Homo sapiens
  Table A; Target 16003; HLA-C*03:04; CLEC3A; ENSG00000166509; TAA
FVDVNGIAI

SEQ ID NO: 16004 - protein, 9 aa, Homo sapiens
  Table A; Target 16004; HLA-C*04:01; CLEC3A; ENSG00000166509; TAA
FVDVNGIAI

SEQ ID NO: 16005 - protein, 9 aa, Homo sapiens
  Table A; Target 16005; HLA-C*05:01; CLEC3A; ENSG00000166509; TAA
FVDVNGIAI

SEQ ID NO: 16006 - protein, 9 aa, Homo sapiens
  Table A; Target 16006; HLA-C*07:02; CLEC3A; ENSG00000166509; TAA
FVDVNGIAI

SEQ ID NO: 16007 - protein, 9 aa, Homo sapiens
  Table A; Target 16007; HLA-C*07:04; CLEC3A; ENSG00000166509; TAA
FVDVNGIAI

SEQ ID NO: 16008 - protein, 11 aa, Homo sapiens
  Table A; Target 16008; HLA-A*01:01; CLEC3A; ENSG00000166509; TAA
FVDVNGIAISF

SEQ ID NO: 16009 - protein, 11 aa, Homo sapiens
  Table A; Target 16009; HLA-A*02:07; CLEC3A; ENSG00000166509; TAA
FVDVNGIAISF

SEQ ID NO: 16010 - protein, 11 aa, Homo sapiens
  Table A; Target 16010; HLA-B*35:01; CLEC3A; ENSG00000166509; TAA
FVDVNGIAISF

SEQ ID NO: 16011 - protein, 11 aa, Homo sapiens
  Table A; Target 16011; HLA-B*38:01; CLEC3A; ENSG00000166509; TAA
FVDVNGIAISF

SEQ ID NO: 16012 - protein, 11 aa, Homo sapiens
  Table A; Target 16012; HLA-C*02:02; CLEC3A; ENSG00000166509; TAA
FVDVNGIAISF

SEQ ID NO: 16013 - protein, 11 aa, Homo sapiens
  Table A; Target 16013; HLA-C*05:01; CLEC3A; ENSG00000166509; TAA
FVDVNGIAISF

SEQ ID NO: 16014 - protein, 9 aa, Homo sapiens
  Table A; Target 16014; HLA-A*03:02; CLEC3A; ENSG00000166509; TAA
GDLKTQIEK

SEQ ID NO: 16015 - protein, 9 aa, Homo sapiens
  Table A; Target 16015; HLA-A*11:01; CLEC3A; ENSG00000166509; TAA
GDLKTQIEK

SEQ ID NO: 16016 - protein, 10 aa, Homo sapiens
  Table A; Target 16016; HLA-A*30:01; CLEC3A; ENSG00000166509; TAA
GDLKTQIEKL

SEQ ID NO: 16017 - protein, 10 aa, Homo sapiens
  Table A; Target 16017; HLA-B*40:01; CLEC3A; ENSG00000166509; TAA
GDLKTQIEKL

SEQ ID NO: 16018 - protein, 10 aa, Homo sapiens
  Table A; Target 16018; HLA-B*40:02; CLEC3A; ENSG00000166509; TAA
GDLKTQIEKL

SEQ ID NO: 16019 - protein, 11 aa, Homo sapiens
  Table A; Target 16019; HLA-B*44:02; CLEC3A; ENSG00000166509; TAA
GDLKTQIEKLW

SEQ ID NO: 16020 - protein, 9 aa, Homo sapiens
  Table A; Target 16020; HLA-A*25:01; CLEC3A; ENSG00000166509; TAA
GIAISFLNW

SEQ ID NO: 16021 - protein, 9 aa, Homo sapiens
  Table A; Target 16021; HLA-B*44:03; CLEC3A; ENSG00000166509; TAA
GIAISFLNW

SEQ ID NO: 16022 - protein, 9 aa, Homo sapiens
  Table A; Target 16022; HLA-B*57:01; CLEC3A; ENSG00000166509; TAA
GIAISFLNW

SEQ ID NO: 16023 - protein, 10 aa, Homo sapiens
  Table A; Target 16023; HLA-A*03:01; CLEC3A; ENSG00000166509; TAA
GINDMVTEGK

SEQ ID NO: 16024 - protein, 10 aa, Homo sapiens
  Table A; Target 16024; HLA-A*03:02; CLEC3A; ENSG00000166509; TAA
GINDMVTEGK

SEQ ID NO: 16025 - protein, 10 aa, Homo sapiens
  Table A; Target 16025; HLA-A*11:01; CLEC3A; ENSG00000166509; TAA
GINDMVTEGK

SEQ ID NO: 16026 - protein, 10 aa, Homo sapiens
  Table A; Target 16026; HLA-B*27:02; CLEC3A; ENSG00000166509; TAA
GINDMVTEGK

SEQ ID NO: 16027 - protein, 9 aa, Homo sapiens
  Table A; Target 16027; HLA-B*13:02; CLEC3A; ENSG00000166509; TAA
GKFVDVNGI

SEQ ID NO: 16028 - protein, 9 aa, Homo sapiens
  Table A; Target 16028; HLA-B*15:03; CLEC3A; ENSG00000166509; TAA
GKFVDVNGI

SEQ ID NO: 16029 - protein, 9 aa, Homo sapiens
  Table A; Target 16029; HLA-B*38:01; CLEC3A; ENSG00000166509; TAA
GKFVDVNGI

SEQ ID NO: 16030 - protein, 9 aa, Homo sapiens
  Table A; Target 16030; HLA-B*15:03; CLEC3A; ENSG00000166509; TAA
GKRENCVLF

SEQ ID NO: 16031 - protein, 9 aa, Homo sapiens
  Table A; Target 16031; HLA-B*13:02; CLEC3A; ENSG00000166509; TAA
GLVICILVI

SEQ ID NO: 16032 - protein, 8 aa, Homo sapiens
  Table A; Target 16032; HLA-B*49:01; CLEC3A; ENSG00000166509; TAA
HEANEDCI

SEQ ID NO: 16033 - protein, 10 aa, Homo sapiens
  Table A; Target 16033; HLA-B*27:02; CLEC3A; ENSG00000166509; TAA
HEANEDCISK

SEQ ID NO: 16034 - protein, 8 aa, Homo sapiens
  Table A; Target 16034; HLA-B*57:01; CLEC3A; ENSG00000166509; TAA
IAISFLNW

SEQ ID NO: 16035 - protein, 8 aa, Homo sapiens
  Table A; Target 16035; HLA-B*40:02; CLEC3A; ENSG00000166509; TAA
IEKLWTEV

SEQ ID NO: 16036 - protein, 8 aa, Homo sapiens
  Table A; Target 16036; HLA-B*49:01; CLEC3A; ENSG00000166509; TAA
IEKLWTEV

SEQ ID NO: 16037 - protein, 11 aa, Homo sapiens
  Table A; Target 16037; HLA-A*30:01; CLEC3A; ENSG00000166509; TAA
IEKLWTEVNAL

SEQ ID NO: 16038 - protein, 11 aa, Homo sapiens
  Table A; Target 16038; HLA-B*40:02; CLEC3A; ENSG00000166509; TAA
IEKLWTEVNAL

SEQ ID NO: 16039 - protein, 8 aa, Homo sapiens
  Table A; Target 16039; HLA-A*23:01; CLEC3A; ENSG00000166509; TAA
ILVITLLL

SEQ ID NO: 16040 - protein, 9 aa, Homo sapiens
  Table A; Target 16040; HLA-B*27:02; CLEC3A; ENSG00000166509; TAA
INALQDYGK

SEQ ID NO: 16041 - protein, 8 aa, Homo sapiens
  Table A; Target 16041; HLA-B*07:02; CLEC3A; ENSG00000166509; TAA
IPRNSDEI

SEQ ID NO: 16042 - protein, 8 aa, Homo sapiens
  Table A; Target 16042; HLA-B*51:01; CLEC3A; ENSG00000166509; TAA
IPRNSDEI

SEQ ID NO: 16043 - protein, 8 aa, Homo sapiens
  Table A; Target 16043; HLA-B*56:01; CLEC3A; ENSG00000166509; TAA
IPRNSDEI

SEQ ID NO: 16044 - protein, 10 aa, Homo sapiens
  Table A; Target 16044; HLA-B*56:01; CLEC3A; ENSG00000166509; TAA
IPRNSDEINA

SEQ ID NO: 16045 - protein, 11 aa, Homo sapiens
  Table A; Target 16045; HLA-B*07:02; CLEC3A; ENSG00000166509; TAA
IPRNSDEINAL

SEQ ID NO: 16046 - protein, 11 aa, Homo sapiens
  Table A; Target 16046; HLA-B*35:01; CLEC3A; ENSG00000166509; TAA
IPRNSDEINAL

SEQ ID NO: 16047 - protein, 11 aa, Homo sapiens
  Table A; Target 16047; HLA-B*35:03; CLEC3A; ENSG00000166509; TAA
IPRNSDEINAL

SEQ ID NO: 16048 - protein, 11 aa, Homo sapiens
  Table A; Target 16048; HLA-B*51:01; CLEC3A; ENSG00000166509; TAA
IPRNSDEINAL

SEQ ID NO: 16049 - protein, 11 aa, Homo sapiens
  Table A; Target 16049; HLA-B*54:01; CLEC3A; ENSG00000166509; TAA
IPRNSDEINAL

SEQ ID NO: 16050 - protein, 11 aa, Homo sapiens
  Table A; Target 16050; HLA-B*55:01; CLEC3A; ENSG00000166509; TAA
IPRNSDEINAL

SEQ ID NO: 16051 - protein, 11 aa, Homo sapiens
  Table A; Target 16051; HLA-B*56:01; CLEC3A; ENSG00000166509; TAA
IPRNSDEINAL

SEQ ID NO: 16052 - protein, 11 aa, Homo sapiens
  Table A; Target 16052; HLA-C*07:02; CLEC3A; ENSG00000166509; TAA
IPRNSDEINAL

SEQ ID NO: 16053 - protein, 9 aa, Homo sapiens
  Table A; Target 16053; HLA-A*30:01; CLEC3A; ENSG00000166509; TAA
IQALQTVCL

SEQ ID NO: 16054 - protein, 9 aa, Homo sapiens
  Table A; Target 16054; HLA-B*13:02; CLEC3A; ENSG00000166509; TAA
IQALQTVCL

SEQ ID NO: 16055 - protein, 9 aa, Homo sapiens
  Table A; Target 16055; HLA-B*15:01; CLEC3A; ENSG00000166509; TAA
IQALQTVCL

SEQ ID NO: 16056 - protein, 9 aa, Homo sapiens
  Table A; Target 16056; HLA-B*15:03; CLEC3A; ENSG00000166509; TAA
IQALQTVCL

SEQ ID NO: 16057 - protein, 9 aa, Homo sapiens
  Table A; Target 16057; HLA-B*27:05; CLEC3A; ENSG00000166509; TAA
IQALQTVCL

SEQ ID NO: 16058 - protein, 9 aa, Homo sapiens
  Table A; Target 16058; HLA-B*38:01; CLEC3A; ENSG00000166509; TAA
IQALQTVCL

SEQ ID NO: 16059 - protein, 9 aa, Homo sapiens
  Table A; Target 16059; HLA-B*39:01; CLEC3A; ENSG00000166509; TAA
IQALQTVCL

SEQ ID NO: 16060 - protein, 9 aa, Homo sapiens
  Table A; Target 16060; HLA-B*40:01; CLEC3A; ENSG00000166509; TAA
IQALQTVCL

SEQ ID NO: 16061 - protein, 9 aa, Homo sapiens
  Table A; Target 16061; HLA-C*06:02; CLEC3A; ENSG00000166509; TAA
IQALQTVCL

SEQ ID NO: 16062 - protein, 9 aa, Homo sapiens
  Table A; Target 16062; HLA-C*07:04; CLEC3A; ENSG00000166509; TAA
IQALQTVCL

SEQ ID NO: 16063 - protein, 9 aa, Homo sapiens
  Table A; Target 16063; HLA-A*02:03; CLEC3A; ENSG00000166509; TAA
ISKGGILVI

SEQ ID NO: 16064 - protein, 9 aa, Homo sapiens
  Table A; Target 16064; HLA-A*23:01; CLEC3A; ENSG00000166509; TAA
ISKGGILVI

SEQ ID NO: 16065 - protein, 9 aa, Homo sapiens
  Table A; Target 16065; HLA-A*30:01; CLEC3A; ENSG00000166509; TAA
ISKGGILVI

SEQ ID NO: 16066 - protein, 9 aa, Homo sapiens
  Table A; Target 16066; HLA-A*32:01; CLEC3A; ENSG00000166509; TAA
ISKGGILVI

SEQ ID NO: 16067 - protein, 9 aa, Homo sapiens
  Table A; Target 16067; HLA-B*13:02; CLEC3A; ENSG00000166509; TAA
ISKGGILVI

SEQ ID NO: 16068 - protein, 9 aa, Homo sapiens
  Table A; Target 16068; HLA-B*40:02; CLEC3A; ENSG00000166509; TAA
ISKGGILVI

SEQ ID NO: 16069 - protein, 9 aa, Homo sapiens
  Table A; Target 16069; HLA-B*46:01; CLEC3A; ENSG00000166509; TAA
ISKGGILVI

SEQ ID NO: 16070 - protein, 9 aa, Homo sapiens
  Table A; Target 16070; HLA-B*51:01; CLEC3A; ENSG00000166509; TAA
ISKGGILVI

SEQ ID NO: 16071 - protein, 9 aa, Homo sapiens
  Table A; Target 16071; HLA-B*57:01; CLEC3A; ENSG00000166509; TAA
ISKGGILVI

SEQ ID NO: 16072 - protein, 9 aa, Homo sapiens
  Table A; Target 16072; HLA-C*02:02; CLEC3A; ENSG00000166509; TAA
ISKGGILVI

SEQ ID NO: 16073 - protein, 9 aa, Homo sapiens
  Table A; Target 16073; HLA-C*06:02; CLEC3A; ENSG00000166509; TAA
ISKGGILVI

SEQ ID NO: 16074 - protein, 9 aa, Homo sapiens
  Table A; Target 16074; HLA-C*12:03; CLEC3A; ENSG00000166509; TAA
ISKGGILVI

SEQ ID NO: 16075 - protein, 9 aa, Homo sapiens
  Table A; Target 16075; HLA-C*16:02; CLEC3A; ENSG00000166509; TAA
ISKGGILVI

SEQ ID NO: 16076 - protein, 11 aa, Homo sapiens
  Table A; Target 16076; HLA-A*31:01; CLEC3A; ENSG00000166509; TAA
ISKGGILVIPR

SEQ ID NO: 16077 - protein, 9 aa, Homo sapiens
  Table A; Target 16077; HLA-B*40:02; CLEC3A; ENSG00000166509; TAA
KCYLASEGL

SEQ ID NO: 16078 - protein, 9 aa, Homo sapiens
  Table A; Target 16078; HLA-C*06:02; CLEC3A; ENSG00000166509; TAA
KCYLASEGL

SEQ ID NO: 16079 - protein, 10 aa, Homo sapiens
  Table A; Target 16079; HLA-A*03:01; CLEC3A; ENSG00000166509; TAA
KCYLASEGLK

SEQ ID NO: 16080 - protein, 9 aa, Homo sapiens
  Table A; Target 16080; HLA-B*40:02; CLEC3A; ENSG00000166509; TAA
KDGDLKTQI

SEQ ID NO: 16081 - protein, 11 aa, Homo sapiens
  Table A; Target 16081; HLA-A*03:02; CLEC3A; ENSG00000166509; TAA
KDGDLKTQIEK

SEQ ID NO: 16082 - protein, 9 aa, Homo sapiens
  Table A; Target 16082; HLA-A*02:01; CLEC3A; ENSG00000166509; TAA
KEIQALQTV

SEQ ID NO: 16083 - protein, 9 aa, Homo sapiens
  Table A; Target 16083; HLA-A*02:03; CLEC3A; ENSG00000166509; TAA
KEIQALQTV

SEQ ID NO: 16084 - protein, 9 aa, Homo sapiens
  Table A; Target 16084; HLA-A*02:07; CLEC3A; ENSG00000166509; TAA
KEIQALQTV

SEQ ID NO: 16085 - protein, 9 aa, Homo sapiens
  Table A; Target 16085; HLA-A*30:01; CLEC3A; ENSG00000166509; TAA
KEIQALQTV

SEQ ID NO: 16086 - protein, 9 aa, Homo sapiens
  Table A; Target 16086; HLA-B*13:02; CLEC3A; ENSG00000166509; TAA
KEIQALQTV

SEQ ID NO: 16087 - protein, 9 aa, Homo sapiens
  Table A; Target 16087; HLA-B*18:01; CLEC3A; ENSG00000166509; TAA
KEIQALQTV

SEQ ID NO: 16088 - protein, 9 aa, Homo sapiens
  Table A; Target 16088; HLA-B*37:01; CLEC3A; ENSG00000166509; TAA
KEIQALQTV

SEQ ID NO: 16089 - protein, 9 aa, Homo sapiens
  Table A; Target 16089; HLA-B*40:01; CLEC3A; ENSG00000166509; TAA
KEIQALQTV

SEQ ID NO: 16090 - protein, 9 aa, Homo sapiens
  Table A; Target 16090; HLA-B*40:02; CLEC3A; ENSG00000166509; TAA
KEIQALQTV

SEQ ID NO: 16091 - protein, 9 aa, Homo sapiens
  Table A; Target 16091; HLA-B*44:02; CLEC3A; ENSG00000166509; TAA
KEIQALQTV

SEQ ID NO: 16092 - protein, 9 aa, Homo sapiens
  Table A; Target 16092; HLA-B*44:03; CLEC3A; ENSG00000166509; TAA
KEIQALQTV

SEQ ID NO: 16093 - protein, 9 aa, Homo sapiens
  Table A; Target 16093; HLA-B*49:01; CLEC3A; ENSG00000166509; TAA
KEIQALQTV

SEQ ID NO: 16094 - protein, 9 aa, Homo sapiens
  Table A; Target 16094; HLA-B*55:01; CLEC3A; ENSG00000166509; TAA
KEIQALQTV

SEQ ID NO: 16095 - protein, 9 aa, Homo sapiens
  Table A; Target 16095; HLA-C*02:02; CLEC3A; ENSG00000166509; TAA
KEIQALQTV

SEQ ID NO: 16096 - protein, 9 aa, Homo sapiens
  Table A; Target 16096; HLA-C*06:02; CLEC3A; ENSG00000166509; TAA
KEIQALQTV

SEQ ID NO: 16097 - protein, 9 aa, Homo sapiens
  Table A; Target 16097; HLA-C*16:04; CLEC3A; ENSG00000166509; TAA
KEIQALQTV

SEQ ID NO: 16098 - protein, 10 aa, Homo sapiens
  Table A; Target 16098; HLA-A*30:01; CLEC3A; ENSG00000166509; TAA
KEIQALQTVC

SEQ ID NO: 16099 - protein, 10 aa, Homo sapiens
  Table A; Target 16099; HLA-B*40:01; CLEC3A; ENSG00000166509; TAA
KEIQALQTVC

SEQ ID NO: 16100 - protein, 10 aa, Homo sapiens
  Table A; Target 16100; HLA-B*40:02; CLEC3A; ENSG00000166509; TAA
KEIQALQTVC

SEQ ID NO: 16101 - protein, 10 aa, Homo sapiens
  Table A; Target 16101; HLA-B*49:01; CLEC3A; ENSG00000166509; TAA
KEIQALQTVC

SEQ ID NO: 16102 - protein, 11 aa, Homo sapiens
  Table A; Target 16102; HLA-A*30:01; CLEC3A; ENSG00000166509; TAA
KEIQALQTVCL

SEQ ID NO: 16103 - protein, 11 aa, Homo sapiens
  Table A; Target 16103; HLA-B*40:01; CLEC3A; ENSG00000166509; TAA
KEIQALQTVCL

SEQ ID NO: 16104 - protein, 11 aa, Homo sapiens
  Table A; Target 16104; HLA-B*40:02; CLEC3A; ENSG00000166509; TAA
KEIQALQTVCL

SEQ ID NO: 16105 - protein, 11 aa, Homo sapiens
  Table A; Target 16105; HLA-B*44:02; CLEC3A; ENSG00000166509; TAA
KEIQALQTVCL

SEQ ID NO: 16106 - protein, 11 aa, Homo sapiens
  Table A; Target 16106; HLA-B*44:03; CLEC3A; ENSG00000166509; TAA
KEIQALQTVCL

SEQ ID NO: 16107 - protein, 11 aa, Homo sapiens
  Table A; Target 16107; HLA-B*49:01; CLEC3A; ENSG00000166509; TAA
KEIQALQTVCL

SEQ ID NO: 16108 - protein, 8 aa, Homo sapiens
  Table A; Target 16108; HLA-A*23:01; CLEC3A; ENSG00000166509; TAA
KFVDVNGI

SEQ ID NO: 16109 - protein, 10 aa, Homo sapiens
  Table A; Target 16109; HLA-A*23:01; CLEC3A; ENSG00000166509; TAA
KFVDVNGIAI

SEQ ID NO: 16110 - protein, 10 aa, Homo sapiens
  Table A; Target 16110; HLA-A*24:02; CLEC3A; ENSG00000166509; TAA
KFVDVNGIAI

SEQ ID NO: 16111 - protein, 10 aa, Homo sapiens
  Table A; Target 16111; HLA-B*40:02; CLEC3A; ENSG00000166509; TAA
KFVDVNGIAI

SEQ ID NO: 16112 - protein, 10 aa, Homo sapiens
  Table A; Target 16112; HLA-C*04:01; CLEC3A; ENSG00000166509; TAA
KFVDVNGIAI

SEQ ID NO: 16113 - protein, 10 aa, Homo sapiens
  Table A; Target 16113; HLA-C*06:02; CLEC3A; ENSG00000166509; TAA
KFVDVNGIAI

SEQ ID NO: 16114 - protein, 10 aa, Homo sapiens
  Table A; Target 16114; HLA-C*07:01; CLEC3A; ENSG00000166509; TAA
KFVDVNGIAI

SEQ ID NO: 16115 - protein, 10 aa, Homo sapiens
  Table A; Target 16115; HLA-C*14:02; CLEC3A; ENSG00000166509; TAA
KFVDVNGIAI

SEQ ID NO: 16116 - protein, 9 aa, Homo sapiens
  Table A; Target 16116; HLA-A*31:01; CLEC3A; ENSG00000166509; TAA
KGGILVIPR

SEQ ID NO: 16117 - protein, 9 aa, Homo sapiens
  Table A; Target 16117; HLA-A*02:01; CLEC3A; ENSG00000166509; TAA
KLWTEVNAL

SEQ ID NO: 16118 - protein, 9 aa, Homo sapiens
  Table A; Target 16118; HLA-A*02:03; CLEC3A; ENSG00000166509; TAA
KLWTEVNAL

SEQ ID NO: 16119 - protein, 9 aa, Homo sapiens
  Table A; Target 16119; HLA-A*02:04; CLEC3A; ENSG00000166509; TAA
KLWTEVNAL

SEQ ID NO: 16120 - protein, 9 aa, Homo sapiens
  Table A; Target 16120; HLA-A*02:07; CLEC3A; ENSG00000166509; TAA
KLWTEVNAL

SEQ ID NO: 16121 - protein, 9 aa, Homo sapiens
  Table A; Target 16121; HLA-A*03:01; CLEC3A; ENSG00000166509; TAA
KLWTEVNAL

SEQ ID NO: 16122 - protein, 9 aa, Homo sapiens
  Table A; Target 16122; HLA-A*30:01; CLEC3A; ENSG00000166509; TAA
KLWTEVNAL

SEQ ID NO: 16123 - protein, 9 aa, Homo sapiens
  Table A; Target 16123; HLA-A*31:01; CLEC3A; ENSG00000166509; TAA
KLWTEVNAL

SEQ ID NO: 16124 - protein, 9 aa, Homo sapiens
  Table A; Target 16124; HLA-B*15:03; CLEC3A; ENSG00000166509; TAA
KLWTEVNAL

SEQ ID NO: 16125 - protein, 9 aa, Homo sapiens
  Table A; Target 16125; HLA-B*37:01; CLEC3A; ENSG00000166509; TAA
KLWTEVNAL

SEQ ID NO: 16126 - protein, 9 aa, Homo sapiens
  Table A; Target 16126; HLA-B*40:01; CLEC3A; ENSG00000166509; TAA
KLWTEVNAL

SEQ ID NO: 16127 - protein, 9 aa, Homo sapiens
  Table A; Target 16127; HLA-B*40:02; CLEC3A; ENSG00000166509; TAA
KLWTEVNAL

SEQ ID NO: 16128 - protein, 9 aa, Homo sapiens
  Table A; Target 16128; HLA-B*55:01; CLEC3A; ENSG00000166509; TAA
KLWTEVNAL

SEQ ID NO: 16129 - protein, 9 aa, Homo sapiens
  Table A; Target 16129; HLA-C*01:02; CLEC3A; ENSG00000166509; TAA
KLWTEVNAL

SEQ ID NO: 16130 - protein, 9 aa, Homo sapiens
  Table A; Target 16130; HLA-C*06:02; CLEC3A; ENSG00000166509; TAA
KLWTEVNAL

SEQ ID NO: 16131 - protein, 10 aa, Homo sapiens
  Table A; Target 16131; HLA-A*03:01; CLEC3A; ENSG00000166509; TAA
KLWTEVNALK

SEQ ID NO: 16132 - protein, 10 aa, Homo sapiens
  Table A; Target 16132; HLA-A*03:02; CLEC3A; ENSG00000166509; TAA
KLWTEVNALK

SEQ ID NO: 16133 - protein, 8 aa, Homo sapiens
  Table A; Target 16133; HLA-B*57:01; CLEC3A; ENSG00000166509; TAA
KTQIEKLW

SEQ ID NO: 16134 - protein, 9 aa, Homo sapiens
  Table A; Target 16134; HLA-B*57:01; CLEC3A; ENSG00000166509; TAA
LASEGLKHF

SEQ ID NO: 16135 - protein, 9 aa, Homo sapiens
  Table A; Target 16135; HLA-C*02:02; CLEC3A; ENSG00000166509; TAA
LASEGLKHF

SEQ ID NO: 16136 - protein, 9 aa, Homo sapiens
  Table A; Target 16136; HLA-C*07:01; CLEC3A; ENSG00000166509; TAA
LASEGLKHF

SEQ ID NO: 16137 - protein, 9 aa, Homo sapiens
  Table A; Target 16137; HLA-C*12:03; CLEC3A; ENSG00000166509; TAA
LASEGLKHF

SEQ ID NO: 16138 - protein, 9 aa, Homo sapiens
  Table A; Target 16138; HLA-C*16:01; CLEC3A; ENSG00000166509; TAA
LASEGLKHF

SEQ ID NO: 16139 - protein, 9 aa, Homo sapiens
  Table A; Target 16139; HLA-C*16:02; CLEC3A; ENSG00000166509; TAA
LASEGLKHF

SEQ ID NO: 16140 - protein, 10 aa, Homo sapiens
  Table A; Target 16140; HLA-A*31:01; CLEC3A; ENSG00000166509; TAA
LDQTTSHTSR

SEQ ID NO: 16141 - protein, 10 aa, Homo sapiens
  Table A; Target 16141; HLA-A*33:01; CLEC3A; ENSG00000166509; TAA
LDQTTSHTSR

SEQ ID NO: 16142 - protein, 10 aa, Homo sapiens
  Table A; Target 16142; HLA-A*68:01; CLEC3A; ENSG00000166509; TAA
LDQTTSHTSR

SEQ ID NO: 16143 - protein, 10 aa, Homo sapiens
  Table A; Target 16143; HLA-B*27:02; CLEC3A; ENSG00000166509; TAA
LDQTTSHTSR

SEQ ID NO: 16144 - protein, 10 aa, Homo sapiens
  Table A; Target 16144; HLA-C*07:01; CLEC3A; ENSG00000166509; TAA
LDQTTSHTSR

SEQ ID NO: 16145 - protein, 10 aa, Homo sapiens
  Table A; Target 16145; HLA-C*07:02; CLEC3A; ENSG00000166509; TAA
LDQTTSHTSR

SEQ ID NO: 16146 - protein, 10 aa, Homo sapiens
  Table A; Target 16146; HLA-C*07:06; CLEC3A; ENSG00000166509; TAA
LDQTTSHTSR

SEQ ID NO: 16147 - protein, 10 aa, Homo sapiens
  Table A; Target 16147; HLA-C*16:02; CLEC3A; ENSG00000166509; TAA
LDQTTSHTSR

SEQ ID NO: 16148 - protein, 9 aa, Homo sapiens
  Table A; Target 16148; HLA-B*27:05; CLEC3A; ENSG00000166509; TAA
LGINDMVTE

SEQ ID NO: 16149 - protein, 8 aa, Homo sapiens
  Table A; Target 16149; HLA-C*05:01; CLEC3A; ENSG00000166509; TAA
LLDQTTSH

SEQ ID NO: 16150 - protein, 9 aa, Homo sapiens
  Table A; Target 16150; HLA-A*01:01; CLEC3A; ENSG00000166509; TAA
LLDQTTSHT

SEQ ID NO: 16151 - protein, 9 aa, Homo sapiens
  Table A; Target 16151; HLA-A*02:01; CLEC3A; ENSG00000166509; TAA
LLDQTTSHT

SEQ ID NO: 16152 - protein, 9 aa, Homo sapiens
  Table A; Target 16152; HLA-A*02:07; CLEC3A; ENSG00000166509; TAA
LLDQTTSHT

SEQ ID NO: 16153 - protein, 9 aa, Homo sapiens
  Table A; Target 16153; HLA-C*04:01; CLEC3A; ENSG00000166509; TAA
LLDQTTSHT

SEQ ID NO: 16154 - protein, 11 aa, Homo sapiens
  Table A; Target 16154; HLA-A*01:01; CLEC3A; ENSG00000166509; TAA
LLDQTTSHTSR

SEQ ID NO: 16155 - protein, 11 aa, Homo sapiens
  Table A; Target 16155; HLA-A*02:07; CLEC3A; ENSG00000166509; TAA
LLDQTTSHTSR

SEQ ID NO: 16156 - protein, 11 aa, Homo sapiens
  Table A; Target 16156; HLA-A*03:01; CLEC3A; ENSG00000166509; TAA
LLDQTTSHTSR

SEQ ID NO: 16157 - protein, 11 aa, Homo sapiens
  Table A; Target 16157; HLA-A*03:02; CLEC3A; ENSG00000166509; TAA
LLDQTTSHTSR

SEQ ID NO: 16158 - protein, 11 aa, Homo sapiens
  Table A; Target 16158; HLA-A*31:01; CLEC3A; ENSG00000166509; TAA
LLDQTTSHTSR

SEQ ID NO: 16159 - protein, 11 aa, Homo sapiens
  Table A; Target 16159; HLA-A*33:01; CLEC3A; ENSG00000166509; TAA
LLDQTTSHTSR

SEQ ID NO: 16160 - protein, 11 aa, Homo sapiens
  Table A; Target 16160; HLA-A*68:01; CLEC3A; ENSG00000166509; TAA
LLDQTTSHTSR

SEQ ID NO: 16161 - protein, 11 aa, Homo sapiens
  Table A; Target 16161; HLA-B*27:02; CLEC3A; ENSG00000166509; TAA
LLDQTTSHTSR

SEQ ID NO: 16162 - protein, 11 aa, Homo sapiens
  Table A; Target 16162; HLA-B*55:01; CLEC3A; ENSG00000166509; TAA
LLDQTTSHTSR

SEQ ID NO: 16163 - protein, 11 aa, Homo sapiens
  Table A; Target 16163; HLA-C*04:01; CLEC3A; ENSG00000166509; TAA
LLDQTTSHTSR

SEQ ID NO: 16164 - protein, 11 aa, Homo sapiens
  Table A; Target 16164; HLA-C*05:01; CLEC3A; ENSG00000166509; TAA
LLDQTTSHTSR

SEQ ID NO: 16165 - protein, 9 aa, Homo sapiens
  Table A; Target 16165; HLA-A*02:01; CLEC3A; ENSG00000166509; TAA
LLLDQTTSH

SEQ ID NO: 16166 - protein, 9 aa, Homo sapiens
  Table A; Target 16166; HLA-A*03:01; CLEC3A; ENSG00000166509; TAA
LLLDQTTSH

SEQ ID NO: 16167 - protein, 9 aa, Homo sapiens
  Table A; Target 16167; HLA-A*32:01; CLEC3A; ENSG00000166509; TAA
LLLDQTTSH

SEQ ID NO: 16168 - protein, 9 aa, Homo sapiens
  Table A; Target 16168; HLA-B*46:01; CLEC3A; ENSG00000166509; TAA
LLLDQTTSH

SEQ ID NO: 16169 - protein, 9 aa, Homo sapiens
  Table A; Target 16169; HLA-B*55:01; CLEC3A; ENSG00000166509; TAA
LLLDQTTSH

SEQ ID NO: 16170 - protein, 9 aa, Homo sapiens
  Table A; Target 16170; HLA-C*01:02; CLEC3A; ENSG00000166509; TAA
LLLDQTTSH

SEQ ID NO: 16171 - protein, 9 aa, Homo sapiens
  Table A; Target 16171; HLA-C*14:02; CLEC3A; ENSG00000166509; TAA
LLLDQTTSH

SEQ ID NO: 16172 - protein, 10 aa, Homo sapiens
  Table A; Target 16172; HLA-C*04:01; CLEC3A; ENSG00000166509; TAA
LLLDQTTSHT

SEQ ID NO: 16173 - protein, 10 aa, Homo sapiens
  Table A; Target 16173; HLA-C*06:02; CLEC3A; ENSG00000166509; TAA
LLLDQTTSHT

SEQ ID NO: 16174 - protein, 10 aa, Homo sapiens
  Table A; Target 16174; HLA-C*07:01; CLEC3A; ENSG00000166509; TAA
LLLDQTTSHT

SEQ ID NO: 16175 - protein, 11 aa, Homo sapiens
  Table A; Target 16175; HLA-B*27:05; CLEC3A; ENSG00000166509; TAA
LLLDQTTSHTS

SEQ ID NO: 16176 - protein, 9 aa, Homo sapiens
  Table A; Target 16176; HLA-B*38:01; CLEC3A; ENSG00000166509; TAA
LQDYGKRSL

SEQ ID NO: 16177 - protein, 9 aa, Homo sapiens
  Table A; Target 16177; HLA-C*03:04; CLEC3A; ENSG00000166509; TAA
LQDYGKRSL

SEQ ID NO: 16178 - protein, 8 aa, Homo sapiens
  Table A; Target 16178; HLA-C*14:02; CLEC3A; ENSG00000166509; TAA
LWTEVNAL

SEQ ID NO: 16179 - protein, 8 aa, Homo sapiens
  Table A; Target 16179; HLA-B*08:01; CLEC3A; ENSG00000166509; TAA
MAKNGLVI

SEQ ID NO: 16180 - protein, 8 aa, Homo sapiens
  Table A; Target 16180; HLA-B*46:01; CLEC3A; ENSG00000166509; TAA
MAKNGLVI

SEQ ID NO: 16181 - protein, 8 aa, Homo sapiens
  Table A; Target 16181; HLA-B*51:01; CLEC3A; ENSG00000166509; TAA
MAKNGLVI

SEQ ID NO: 16182 - protein, 8 aa, Homo sapiens
  Table A; Target 16182; HLA-C*03:03; CLEC3A; ENSG00000166509; TAA
MAKNGLVI

SEQ ID NO: 16183 - protein, 8 aa, Homo sapiens
  Table A; Target 16183; HLA-C*03:04; CLEC3A; ENSG00000166509; TAA
MAKNGLVI

SEQ ID NO: 16184 - protein, 8 aa, Homo sapiens
  Table A; Target 16184; HLA-C*16:02; CLEC3A; ENSG00000166509; TAA
MVTEGKFV

SEQ ID NO: 16185 - protein, 10 aa, Homo sapiens
  Table A; Target 16185; HLA-A*68:02; CLEC3A; ENSG00000166509; TAA
MVTEGKFVDV

SEQ ID NO: 16186 - protein, 9 aa, Homo sapiens
  Table A; Target 16186; HLA-A*02:04; CLEC3A; ENSG00000166509; TAA
NALKEIQAL

SEQ ID NO: 16187 - protein, 9 aa, Homo sapiens
  Table A; Target 16187; HLA-A*23:01; CLEC3A; ENSG00000166509; TAA
NALKEIQAL

SEQ ID NO: 16188 - protein, 9 aa, Homo sapiens
  Table A; Target 16188; HLA-A*25:01; CLEC3A; ENSG00000166509; TAA
NALKEIQAL

SEQ ID NO: 16189 - protein, 9 aa, Homo sapiens
  Table A; Target 16189; HLA-A*30:01; CLEC3A; ENSG00000166509; TAA
NALKEIQAL

SEQ ID NO: 16190 - protein, 9 aa, Homo sapiens
  Table A; Target 16190; HLA-A*33:01; CLEC3A; ENSG00000166509; TAA
NALKEIQAL

SEQ ID NO: 16191 - protein, 9 aa, Homo sapiens
  Table A; Target 16191; HLA-B*07:02; CLEC3A; ENSG00000166509; TAA
NALKEIQAL

SEQ ID NO: 16192 - protein, 9 aa, Homo sapiens
  Table A; Target 16192; HLA-B*08:01; CLEC3A; ENSG00000166509; TAA
NALKEIQAL

SEQ ID NO: 16193 - protein, 9 aa, Homo sapiens
  Table A; Target 16193; HLA-B*18:01; CLEC3A; ENSG00000166509; TAA
NALKEIQAL

SEQ ID NO: 16194 - protein, 9 aa, Homo sapiens
  Table A; Target 16194; HLA-B*27:05; CLEC3A; ENSG00000166509; TAA
NALKEIQAL

SEQ ID NO: 16195 - protein, 9 aa, Homo sapiens
  Table A; Target 16195; HLA-B*35:01; CLEC3A; ENSG00000166509; TAA
NALKEIQAL

SEQ ID NO: 16196 - protein, 9 aa, Homo sapiens
  Table A; Target 16196; HLA-B*35:03; CLEC3A; ENSG00000166509; TAA
NALKEIQAL

SEQ ID NO: 16197 - protein, 9 aa, Homo sapiens
  Table A; Target 16197; HLA-B*38:01; CLEC3A; ENSG00000166509; TAA
NALKEIQAL

SEQ ID NO: 16198 - protein, 9 aa, Homo sapiens
  Table A; Target 16198; HLA-B*39:01; CLEC3A; ENSG00000166509; TAA
NALKEIQAL

SEQ ID NO: 16199 - protein, 9 aa, Homo sapiens
  Table A; Target 16199; HLA-B*40:01; CLEC3A; ENSG00000166509; TAA
NALKEIQAL

SEQ ID NO: 16200 - protein, 9 aa, Homo sapiens
  Table A; Target 16200; HLA-B*40:02; CLEC3A; ENSG00000166509; TAA
NALKEIQAL

SEQ ID NO: 16201 - protein, 9 aa, Homo sapiens
  Table A; Target 16201; HLA-B*46:01; CLEC3A; ENSG00000166509; TAA
NALKEIQAL

SEQ ID NO: 16202 - protein, 9 aa, Homo sapiens
  Table A; Target 16202; HLA-B*51:01; CLEC3A; ENSG00000166509; TAA
NALKEIQAL

SEQ ID NO: 16203 - protein, 9 aa, Homo sapiens
  Table A; Target 16203; HLA-B*54:01; CLEC3A; ENSG00000166509; TAA
NALKEIQAL

SEQ ID NO: 16204 - protein, 9 aa, Homo sapiens
  Table A; Target 16204; HLA-B*55:01; CLEC3A; ENSG00000166509; TAA
NALKEIQAL

SEQ ID NO: 16205 - protein, 9 aa, Homo sapiens
  Table A; Target 16205; HLA-B*58:01; CLEC3A; ENSG00000166509; TAA
NALKEIQAL

SEQ ID NO: 16206 - protein, 9 aa, Homo sapiens
  Table A; Target 16206; HLA-C*01:02; CLEC3A; ENSG00000166509; TAA
NALKEIQAL

SEQ ID NO: 16207 - protein, 9 aa, Homo sapiens
  Table A; Target 16207; HLA-C*02:02; CLEC3A; ENSG00000166509; TAA
NALKEIQAL

SEQ ID NO: 16208 - protein, 9 aa, Homo sapiens
  Table A; Target 16208; HLA-C*03:03; CLEC3A; ENSG00000166509; TAA
NALKEIQAL

SEQ ID NO: 16209 - protein, 9 aa, Homo sapiens
  Table A; Target 16209; HLA-C*03:04; CLEC3A; ENSG00000166509; TAA
NALKEIQAL

SEQ ID NO: 16210 - protein, 9 aa, Homo sapiens
  Table A; Target 16210; HLA-C*05:01; CLEC3A; ENSG00000166509; TAA
NALKEIQAL

SEQ ID NO: 16211 - protein, 9 aa, Homo sapiens
  Table A; Target 16211; HLA-C*07:04; CLEC3A; ENSG00000166509; TAA
NALKEIQAL

SEQ ID NO: 16212 - protein, 9 aa, Homo sapiens
  Table A; Target 16212; HLA-C*07:06; CLEC3A; ENSG00000166509; TAA
NALKEIQAL

SEQ ID NO: 16213 - protein, 9 aa, Homo sapiens
  Table A; Target 16213; HLA-C*14:02; CLEC3A; ENSG00000166509; TAA
NALKEIQAL

SEQ ID NO: 16214 - protein, 9 aa, Homo sapiens
  Table A; Target 16214; HLA-C*16:01; CLEC3A; ENSG00000166509; TAA
NALKEIQAL

SEQ ID NO: 16215 - protein, 9 aa, Homo sapiens
  Table A; Target 16215; HLA-C*16:02; CLEC3A; ENSG00000166509; TAA
NALKEIQAL

SEQ ID NO: 16216 - protein, 8 aa, Homo sapiens
  Table A; Target 16216; HLA-B*27:02; CLEC3A; ENSG00000166509; TAA
NALQDYGK

SEQ ID NO: 16217 - protein, 9 aa, Homo sapiens
  Table A; Target 16217; HLA-A*33:01; CLEC3A; ENSG00000166509; TAA
NALQDYGKR

SEQ ID NO: 16218 - protein, 9 aa, Homo sapiens
  Table A; Target 16218; HLA-B*54:01; CLEC3A; ENSG00000166509; TAA
NCVLFSQSA

SEQ ID NO: 16219 - protein, 8 aa, Homo sapiens
  Table A; Target 16219; HLA-B*37:01; CLEC3A; ENSG00000166509; TAA
NDMVTEGK

SEQ ID NO: 16220 - protein, 9 aa, Homo sapiens
  Table A; Target 16220; HLA-B*18:01; CLEC3A; ENSG00000166509; TAA
NDMVTEGKF

SEQ ID NO: 16221 - protein, 9 aa, Homo sapiens
  Table A; Target 16221; HLA-B*37:01; CLEC3A; ENSG00000166509; TAA
NDMVTEGKF

SEQ ID NO: 16222 - protein, 9 aa, Homo sapiens
  Table A; Target 16222; HLA-B*44:02; CLEC3A; ENSG00000166509; TAA
NDMVTEGKF

SEQ ID NO: 16223 - protein, 9 aa, Homo sapiens
  Table A; Target 16223; HLA-B*44:03; CLEC3A; ENSG00000166509; TAA
NDMVTEGKF

SEQ ID NO: 16224 - protein, 8 aa, Homo sapiens
  Table A; Target 16224; HLA-C*03:04; CLEC3A; ENSG00000166509; TAA
NSDEINAL

SEQ ID NO: 16225 - protein, 8 aa, Homo sapiens
  Table A; Target 16225; HLA-C*04:01; CLEC3A; ENSG00000166509; TAA
NSDEINAL

SEQ ID NO: 16226 - protein, 8 aa, Homo sapiens
  Table A; Target 16226; HLA-C*05:01; CLEC3A; ENSG00000166509; TAA
NSDEINAL

SEQ ID NO: 16227 - protein, 9 aa, Homo sapiens
  Table A; Target 16227; HLA-A*01:01; CLEC3A; ENSG00000166509; TAA
NSDEINALQ

SEQ ID NO: 16228 - protein, 11 aa, Homo sapiens
  Table A; Target 16228; HLA-A*01:01; CLEC3A; ENSG00000166509; TAA
NSDEINALQDY

SEQ ID NO: 16229 - protein, 11 aa, Homo sapiens
  Table A; Target 16229; HLA-C*05:01; CLEC3A; ENSG00000166509; TAA
NSDEINALQDY

SEQ ID NO: 16230 - protein, 10 aa, Homo sapiens
  Table A; Target 16230; HLA-B*38:01; CLEC3A; ENSG00000166509; TAA
PRNSDEINAL

SEQ ID NO: 16231 - protein, 10 aa, Homo sapiens
  Table A; Target 16231; HLA-B*39:01; CLEC3A; ENSG00000166509; TAA
PRNSDEINAL

SEQ ID NO: 16232 - protein, 8 aa, Homo sapiens
  Table A; Target 16232; HLA-B*08:01; CLEC3A; ENSG00000166509; TAA
QALQTVCL

SEQ ID NO: 16233 - protein, 8 aa, Homo sapiens
  Table A; Target 16233; HLA-B*35:03; CLEC3A; ENSG00000166509; TAA
QALQTVCL

SEQ ID NO: 16234 - protein, 8 aa, Homo sapiens
  Table A; Target 16234; HLA-B*51:01; CLEC3A; ENSG00000166509; TAA
QALQTVCL

SEQ ID NO: 16235 - protein, 9 aa, Homo sapiens
  Table A; Target 16235; HLA-A*31:01; CLEC3A; ENSG00000166509; TAA
QALQTVCLR

SEQ ID NO: 16236 - protein, 9 aa, Homo sapiens
  Table A; Target 16236; HLA-A*33:01; CLEC3A; ENSG00000166509; TAA
QALQTVCLR

SEQ ID NO: 16237 - protein, 9 aa, Homo sapiens
  Table A; Target 16237; HLA-A*33:03; CLEC3A; ENSG00000166509; TAA
QALQTVCLR

SEQ ID NO: 16238 - protein, 9 aa, Homo sapiens
  Table A; Target 16238; HLA-A*68:01; CLEC3A; ENSG00000166509; TAA
QALQTVCLR

SEQ ID NO: 16239 - protein, 9 aa, Homo sapiens
  Table A; Target 16239; HLA-B*27:02; CLEC3A; ENSG00000166509; TAA
QALQTVCLR

SEQ ID NO: 16240 - protein, 9 aa, Homo sapiens
  Table A; Target 16240; HLA-C*07:01; CLEC3A; ENSG00000166509; TAA
QALQTVCLR

SEQ ID NO: 16241 - protein, 9 aa, Homo sapiens
  Table A; Target 16241; HLA-C*07:06; CLEC3A; ENSG00000166509; TAA
QALQTVCLR

SEQ ID NO: 16242 - protein, 8 aa, Homo sapiens
  Table A; Target 16242; HLA-B*08:01; CLEC3A; ENSG00000166509; TAA
QDYGKRSL

SEQ ID NO: 16243 - protein, 8 aa, Homo sapiens
  Table A; Target 16243; HLA-B*37:01; CLEC3A; ENSG00000166509; TAA
QDYGKRSL

SEQ ID NO: 16244 - protein, 9 aa, Homo sapiens
  Table A; Target 16244; HLA-C*06:02; CLEC3A; ENSG00000166509; TAA
QDYGKRSLP

SEQ ID NO: 16245 - protein, 10 aa, Homo sapiens
  Table A; Target 16245; HLA-B*07:02; CLEC3A; ENSG00000166509; TAA
QPNGGKRENC

SEQ ID NO: 16246 - protein, 8 aa, Homo sapiens
  Table A; Target 16246; HLA-A*31:01; CLEC3A; ENSG00000166509; TAA
QTTSHTSR

SEQ ID NO: 16247 - protein, 8 aa, Homo sapiens
  Table A; Target 16247; HLA-A*33:01; CLEC3A; ENSG00000166509; TAA
QTTSHTSR

SEQ ID NO: 16248 - protein, 8 aa, Homo sapiens
  Table A; Target 16248; HLA-A*33:03; CLEC3A; ENSG00000166509; TAA
QTTSHTSR

SEQ ID NO: 16249 - protein, 9 aa, Homo sapiens
  Table A; Target 16249; HLA-A*25:01; CLEC3A; ENSG00000166509; TAA
QTTSHTSRL

SEQ ID NO: 16250 - protein, 9 aa, Homo sapiens
  Table A; Target 16250; HLA-A*26:01; CLEC3A; ENSG00000166509; TAA
QTTSHTSRL

SEQ ID NO: 16251 - protein, 9 aa, Homo sapiens
  Table A; Target 16251; HLA-A*32:01; CLEC3A; ENSG00000166509; TAA
QTTSHTSRL

SEQ ID NO: 16252 - protein, 9 aa, Homo sapiens
  Table A; Target 16252; HLA-A*68:02; CLEC3A; ENSG00000166509; TAA
QTTSHTSRL

SEQ ID NO: 16253 - protein, 9 aa, Homo sapiens
  Table A; Target 16253; HLA-B*58:01; CLEC3A; ENSG00000166509; TAA
QTTSHTSRL

SEQ ID NO: 16254 - protein, 9 aa, Homo sapiens
  Table A; Target 16254; HLA-C*06:02; CLEC3A; ENSG00000166509; TAA
QTTSHTSRL

SEQ ID NO: 16255 - protein, 9 aa, Homo sapiens
  Table A; Target 16255; HLA-C*12:03; CLEC3A; ENSG00000166509; TAA
QTTSHTSRL

SEQ ID NO: 16256 - protein, 9 aa, Homo sapiens
  Table A; Target 16256; HLA-C*16:01; CLEC3A; ENSG00000166509; TAA
QTTSHTSRL

SEQ ID NO: 16257 - protein, 9 aa, Homo sapiens
  Table A; Target 16257; HLA-C*16:02; CLEC3A; ENSG00000166509; TAA
QTTSHTSRL

SEQ ID NO: 16258 - protein, 10 aa, Homo sapiens
  Table A; Target 16258; HLA-A*03:01; CLEC3A; ENSG00000166509; TAA
QTTSHTSRLK

SEQ ID NO: 16259 - protein, 10 aa, Homo sapiens
  Table A; Target 16259; HLA-A*03:02; CLEC3A; ENSG00000166509; TAA
QTTSHTSRLK

SEQ ID NO: 16260 - protein, 10 aa, Homo sapiens
  Table A; Target 16260; HLA-A*11:01; CLEC3A; ENSG00000166509; TAA
QTTSHTSRLK

SEQ ID NO: 16261 - protein, 10 aa, Homo sapiens
  Table A; Target 16261; HLA-C*06:02; CLEC3A; ENSG00000166509; TAA
QTTSHTSRLK

SEQ ID NO: 16262 - protein, 9 aa, Homo sapiens
  Table A; Target 16262; HLA-A*31:01; CLEC3A; ENSG00000166509; TAA
RAQPNGGKR

SEQ ID NO: 16263 - protein, 9 aa, Homo sapiens
  Table A; Target 16263; HLA-A*30:02; CLEC3A; ENSG00000166509; TAA
RSLPGVNDF

SEQ ID NO: 16264 - protein, 9 aa, Homo sapiens
  Table A; Target 16264; HLA-A*32:01; CLEC3A; ENSG00000166509; TAA
RSLPGVNDF

SEQ ID NO: 16265 - protein, 9 aa, Homo sapiens
  Table A; Target 16265; HLA-B*57:01; CLEC3A; ENSG00000166509; TAA
RSLPGVNDF

SEQ ID NO: 16266 - protein, 9 aa, Homo sapiens
  Table A; Target 16266; HLA-B*58:01; CLEC3A; ENSG00000166509; TAA
RSLPGVNDF

SEQ ID NO: 16267 - protein, 10 aa, Homo sapiens
  Table A; Target 16267; HLA-A*30:02; CLEC3A; ENSG00000166509; TAA
RSLPGVNDFW

SEQ ID NO: 16268 - protein, 10 aa, Homo sapiens
  Table A; Target 16268; HLA-B*57:01; CLEC3A; ENSG00000166509; TAA
RSLPGVNDFW

SEQ ID NO: 16269 - protein, 10 aa, Homo sapiens
  Table A; Target 16269; HLA-B*58:01; CLEC3A; ENSG00000166509; TAA
RSLPGVNDFW

SEQ ID NO: 16270 - protein, 9 aa, Homo sapiens
  Table A; Target 16270; HLA-B*07:02; CLEC3A; ENSG00000166509; TAA
RVRDKDGDL

SEQ ID NO: 16271 - protein, 10 aa, Homo sapiens
  Table A; Target 16271; HLA-A*03:01; CLEC3A; ENSG00000166509; TAA
RVRDKDGDLK

SEQ ID NO: 16272 - protein, 9 aa, Homo sapiens
  Table A; Target 16272; HLA-A*24:02; CLEC3A; ENSG00000166509; TAA
SLPGVNDFW

SEQ ID NO: 16273 - protein, 11 aa, Homo sapiens
  Table A; Target 16273; HLA-A*02:07; CLEC3A; ENSG00000166509; TAA
SLPGVNDFWLG

SEQ ID NO: 16274 - protein, 8 aa, Homo sapiens
  Table A; Target 16274; HLA-A*32:01; CLEC3A; ENSG00000166509; TAA
SQSAQGKW

SEQ ID NO: 16275 - protein, 8 aa, Homo sapiens
  Table A; Target 16275; HLA-B*58:01; CLEC3A; ENSG00000166509; TAA
SQSAQGKW

SEQ ID NO: 16276 - protein, 9 aa, Homo sapiens
  Table A; Target 16276; HLA-B*57:01; CLEC3A; ENSG00000166509; TAA
SSKRYICEF

SEQ ID NO: 16277 - protein, 8 aa, Homo sapiens
  Table A; Target 16277; HLA-A*30:01; CLEC3A; ENSG00000166509; TAA
TEGKFVDV

SEQ ID NO: 16278 - protein, 8 aa, Homo sapiens
  Table A; Target 16278; HLA-B*18:01; CLEC3A; ENSG00000166509; TAA
TEGKFVDV

SEQ ID NO: 16279 - protein, 8 aa, Homo sapiens
  Table A; Target 16279; HLA-B*37:01; CLEC3A; ENSG00000166509; TAA
TEGKFVDV

SEQ ID NO: 16280 - protein, 8 aa, Homo sapiens
  Table A; Target 16280; HLA-B*40:01; CLEC3A; ENSG00000166509; TAA
TEGKFVDV

SEQ ID NO: 16281 - protein, 8 aa, Homo sapiens
  Table A; Target 16281; HLA-B*40:02; CLEC3A; ENSG00000166509; TAA
TEGKFVDV

SEQ ID NO: 16282 - protein, 8 aa, Homo sapiens
  Table A; Target 16282; HLA-B*49:01; CLEC3A; ENSG00000166509; TAA
TEGKFVDV

SEQ ID NO: 16283 - protein, 11 aa, Homo sapiens
  Table A; Target 16283; HLA-B*49:01; CLEC3A; ENSG00000166509; TAA
TEGKFVDVNGI

SEQ ID NO: 16284 - protein, 9 aa, Homo sapiens
  Table A; Target 16284; HLA-A*30:01; CLEC3A; ENSG00000166509; TAA
TEVNALKEI

SEQ ID NO: 16285 - protein, 9 aa, Homo sapiens
  Table A; Target 16285; HLA-B*13:02; CLEC3A; ENSG00000166509; TAA
TEVNALKEI

SEQ ID NO: 16286 - protein, 9 aa, Homo sapiens
  Table A; Target 16286; HLA-B*18:01; CLEC3A; ENSG00000166509; TAA
TEVNALKEI

SEQ ID NO: 16287 - protein, 9 aa, Homo sapiens
  Table A; Target 16287; HLA-B*27:02; CLEC3A; ENSG00000166509; TAA
TEVNALKEI

SEQ ID NO: 16288 - protein, 9 aa, Homo sapiens
  Table A; Target 16288; HLA-B*38:01; CLEC3A; ENSG00000166509; TAA
TEVNALKEI

SEQ ID NO: 16289 - protein, 9 aa, Homo sapiens
  Table A; Target 16289; HLA-B*40:01; CLEC3A; ENSG00000166509; TAA
TEVNALKEI

SEQ ID NO: 16290 - protein, 9 aa, Homo sapiens
  Table A; Target 16290; HLA-B*40:02; CLEC3A; ENSG00000166509; TAA
TEVNALKEI

SEQ ID NO: 16291 - protein, 9 aa, Homo sapiens
  Table A; Target 16291; HLA-B*44:02; CLEC3A; ENSG00000166509; TAA
TEVNALKEI

SEQ ID NO: 16292 - protein, 9 aa, Homo sapiens
  Table A; Target 16292; HLA-B*44:03; CLEC3A; ENSG00000166509; TAA
TEVNALKEI

SEQ ID NO: 16293 - protein, 9 aa, Homo sapiens
  Table A; Target 16293; HLA-B*49:01; CLEC3A; ENSG00000166509; TAA
TEVNALKEI

SEQ ID NO: 16294 - protein, 9 aa, Homo sapiens
  Table A; Target 16294; HLA-C*02:02; CLEC3A; ENSG00000166509; TAA
TEVNALKEI

SEQ ID NO: 16295 - protein, 9 aa, Homo sapiens
  Table A; Target 16295; HLA-C*06:02; CLEC3A; ENSG00000166509; TAA
TEVNALKEI

SEQ ID NO: 16296 - protein, 9 aa, Homo sapiens
  Table A; Target 16296; HLA-C*12:03; CLEC3A; ENSG00000166509; TAA
TEVNALKEI

SEQ ID NO: 16297 - protein, 9 aa, Homo sapiens
  Table A; Target 16297; HLA-C*16:02; CLEC3A; ENSG00000166509; TAA
TEVNALKEI

SEQ ID NO: 16298 - protein, 9 aa, Homo sapiens
  Table A; Target 16298; HLA-C*16:04; CLEC3A; ENSG00000166509; TAA
TEVNALKEI

SEQ ID NO: 16299 - protein, 11 aa, Homo sapiens
  Table A; Target 16299; HLA-A*30:01; CLEC3A; ENSG00000166509; TAA
TEVNALKEIQA

SEQ ID NO: 16300 - protein, 11 aa, Homo sapiens
  Table A; Target 16300; HLA-B*40:02; CLEC3A; ENSG00000166509; TAA
TEVNALKEIQA

SEQ ID NO: 16301 - protein, 11 aa, Homo sapiens
  Table A; Target 16301; HLA-C*04:01; CLEC3A; ENSG00000166509; TAA
TLLLDQTTSHT

SEQ ID NO: 16302 - protein, 11 aa, Homo sapiens
  Table A; Target 16302; HLA-C*07:01; CLEC3A; ENSG00000166509; TAA
TLLLDQTTSHT

SEQ ID NO: 16303 - protein, 10 aa, Homo sapiens
  Table A; Target 16303; HLA-A*02:03; CLEC3A; ENSG00000166509; TAA
TQIEKLWTEV

SEQ ID NO: 16304 - protein, 8 aa, Homo sapiens
  Table A; Target 16304; HLA-A*11:01; CLEC3A; ENSG00000166509; TAA
TSHTSRLK

SEQ ID NO: 16305 - protein, 8 aa, Homo sapiens
  Table A; Target 16305; HLA-C*04:01; CLEC3A; ENSG00000166509; TAA
TSHTSRLK

SEQ ID NO: 16306 - protein, 8 aa, Homo sapiens
  Table A; Target 16306; HLA-C*06:02; CLEC3A; ENSG00000166509; TAA
TSHTSRLK

SEQ ID NO: 16307 - protein, 8 aa, Homo sapiens
  Table A; Target 16307; HLA-C*07:02; CLEC3A; ENSG00000166509; TAA
TSHTSRLK

SEQ ID NO: 16308 - protein, 8 aa, Homo sapiens
  Table A; Target 16308; HLA-C*16:01; CLEC3A; ENSG00000166509; TAA
TSHTSRLK

SEQ ID NO: 16309 - protein, 8 aa, Homo sapiens
  Table A; Target 16309; HLA-C*16:02; CLEC3A; ENSG00000166509; TAA
TTSHTSRL

SEQ ID NO: 16310 - protein, 9 aa, Homo sapiens
  Table A; Target 16310; HLA-A*03:01; CLEC3A; ENSG00000166509; TAA
TTSHTSRLK

SEQ ID NO: 16311 - protein, 9 aa, Homo sapiens
  Table A; Target 16311; HLA-A*03:02; CLEC3A; ENSG00000166509; TAA
TTSHTSRLK

SEQ ID NO: 16312 - protein, 9 aa, Homo sapiens
  Table A; Target 16312; HLA-A*11:01; CLEC3A; ENSG00000166509; TAA
TTSHTSRLK

SEQ ID NO: 16313 - protein, 9 aa, Homo sapiens
  Table A; Target 16313; HLA-A*68:01; CLEC3A; ENSG00000166509; TAA
TTSHTSRLK

SEQ ID NO: 16314 - protein, 9 aa, Homo sapiens
  Table A; Target 16314; HLA-C*06:02; CLEC3A; ENSG00000166509; TAA
TTSHTSRLK

SEQ ID NO: 16315 - protein, 9 aa, Homo sapiens
  Table A; Target 16315; HLA-C*16:01; CLEC3A; ENSG00000166509; TAA
TTSHTSRLK

SEQ ID NO: 16316 - protein, 9 aa, Homo sapiens
  Table A; Target 16316; HLA-C*16:02; CLEC3A; ENSG00000166509; TAA
TTSHTSRLK

SEQ ID NO: 16317 - protein, 8 aa, Homo sapiens
  Table A; Target 16317; HLA-A*30:01; CLEC3A; ENSG00000166509; TAA
VDVNGIAI

SEQ ID NO: 16318 - protein, 8 aa, Homo sapiens
  Table A; Target 16318; HLA-B*37:01; CLEC3A; ENSG00000166509; TAA
VDVNGIAI

SEQ ID NO: 16319 - protein, 8 aa, Homo sapiens
  Table A; Target 16319; HLA-B*40:02; CLEC3A; ENSG00000166509; TAA
VDVNGIAI

SEQ ID NO: 16320 - protein, 10 aa, Homo sapiens
  Table A; Target 16320; HLA-A*23:01; CLEC3A; ENSG00000166509; TAA
VDVNGIAISF

SEQ ID NO: 16321 - protein, 10 aa, Homo sapiens
  Table A; Target 16321; HLA-B*18:01; CLEC3A; ENSG00000166509; TAA
VDVNGIAISF

SEQ ID NO: 16322 - protein, 10 aa, Homo sapiens
  Table A; Target 16322; HLA-B*27:02; CLEC3A; ENSG00000166509; TAA
VDVNGIAISF

SEQ ID NO: 16323 - protein, 10 aa, Homo sapiens
  Table A; Target 16323; HLA-B*37:01; CLEC3A; ENSG00000166509; TAA
VDVNGIAISF

SEQ ID NO: 16324 - protein, 10 aa, Homo sapiens
  Table A; Target 16324; HLA-B*44:02; CLEC3A; ENSG00000166509; TAA
VDVNGIAISF

SEQ ID NO: 16325 - protein, 10 aa, Homo sapiens
  Table A; Target 16325; HLA-B*44:03; CLEC3A; ENSG00000166509; TAA
VDVNGIAISF

SEQ ID NO: 16326 - protein, 10 aa, Homo sapiens
  Table A; Target 16326; HLA-B*57:01; CLEC3A; ENSG00000166509; TAA
VDVNGIAISF

SEQ ID NO: 16327 - protein, 10 aa, Homo sapiens
  Table A; Target 16327; HLA-B*58:01; CLEC3A; ENSG00000166509; TAA
VDVNGIAISF

SEQ ID NO: 16328 - protein, 10 aa, Homo sapiens
  Table A; Target 16328; HLA-C*07:01; CLEC3A; ENSG00000166509; TAA
VDVNGIAISF

SEQ ID NO: 16329 - protein, 10 aa, Homo sapiens
  Table A; Target 16329; HLA-C*12:03; CLEC3A; ENSG00000166509; TAA
VDVNGIAISF

SEQ ID NO: 16330 - protein, 10 aa, Homo sapiens
  Table A; Target 16330; HLA-C*16:04; CLEC3A; ENSG00000166509; TAA
VDVNGIAISF

SEQ ID NO: 16331 - protein, 9 aa, Homo sapiens
  Table A; Target 16331; HLA-A*02:01; CLEC3A; ENSG00000166509; TAA
VLFSQSAQG

SEQ ID NO: 16332 - protein, 9 aa, Homo sapiens
  Table A; Target 16332; HLA-A*02:03; CLEC3A; ENSG00000166509; TAA
VLFSQSAQG

SEQ ID NO: 16333 - protein, 10 aa, Homo sapiens
  Table A; Target 16333; HLA-A*03:01; CLEC3A; ENSG00000166509; TAA
VLFSQSAQGK

SEQ ID NO: 16334 - protein, 10 aa, Homo sapiens
  Table A; Target 16334; HLA-A*03:02; CLEC3A; ENSG00000166509; TAA
VLFSQSAQGK

SEQ ID NO: 16335 - protein, 10 aa, Homo sapiens
  Table A; Target 16335; HLA-A*11:01; CLEC3A; ENSG00000166509; TAA
VLFSQSAQGK

SEQ ID NO: 16336 - protein, 10 aa, Homo sapiens
  Table A; Target 16336; HLA-B*27:05; CLEC3A; ENSG00000166509; TAA
VLFSQSAQGK

SEQ ID NO: 16337 - protein, 11 aa, Homo sapiens
  Table A; Target 16337; HLA-A*03:01; CLEC3A; ENSG00000166509; TAA
VLFSQSAQGKW

SEQ ID NO: 16338 - protein, 11 aa, Homo sapiens
  Table A; Target 16338; HLA-A*24:02; CLEC3A; ENSG00000166509; TAA
VLFSQSAQGKW

SEQ ID NO: 16339 - protein, 11 aa, Homo sapiens
  Table A; Target 16339; HLA-A*29:02; CLEC3A; ENSG00000166509; TAA
VLFSQSAQGKW

SEQ ID NO: 16340 - protein, 11 aa, Homo sapiens
  Table A; Target 16340; HLA-A*32:01; CLEC3A; ENSG00000166509; TAA
VLFSQSAQGKW

SEQ ID NO: 16341 - protein, 11 aa, Homo sapiens
  Table A; Target 16341; HLA-B*44:02; CLEC3A; ENSG00000166509; TAA
VLFSQSAQGKW

SEQ ID NO: 16342 - protein, 11 aa, Homo sapiens
  Table A; Target 16342; HLA-B*44:03; CLEC3A; ENSG00000166509; TAA
VLFSQSAQGKW

SEQ ID NO: 16343 - protein, 11 aa, Homo sapiens
  Table A; Target 16343; HLA-B*57:01; CLEC3A; ENSG00000166509; TAA
VLFSQSAQGKW

SEQ ID NO: 16344 - protein, 11 aa, Homo sapiens
  Table A; Target 16344; HLA-B*58:01; CLEC3A; ENSG00000166509; TAA
VLFSQSAQGKW

SEQ ID NO: 16345 - protein, 11 aa, Homo sapiens
  Table A; Target 16345; HLA-C*16:02; CLEC3A; ENSG00000166509; TAA
VLFSQSAQGKW

SEQ ID NO: 16346 - protein, 11 aa, Homo sapiens
  Table A; Target 16346; HLA-C*16:04; CLEC3A; ENSG00000166509; TAA
VLFSQSAQGKW

SEQ ID NO: 16347 - protein, 8 aa, Homo sapiens
  Table A; Target 16347; HLA-B*18:01; CLEC3A; ENSG00000166509; TAA
VNGIAISF

SEQ ID NO: 16348 - protein, 8 aa, Homo sapiens
  Table A; Target 16348; HLA-B*37:01; CLEC3A; ENSG00000166509; TAA
VNGIAISF

SEQ ID NO: 16349 - protein, 9 aa, Homo sapiens
  Table A; Target 16349; HLA-A*01:01; CLEC3A; ENSG00000166509; TAA
VTEGKFVDV

SEQ ID NO: 16350 - protein, 9 aa, Homo sapiens
  Table A; Target 16350; HLA-A*02:07; CLEC3A; ENSG00000166509; TAA
VTEGKFVDV

SEQ ID NO: 16351 - protein, 9 aa, Homo sapiens
  Table A; Target 16351; HLA-A*68:02; CLEC3A; ENSG00000166509; TAA
VTEGKFVDV

SEQ ID NO: 16352 - protein, 9 aa, Homo sapiens
  Table A; Target 16352; HLA-C*04:01; CLEC3A; ENSG00000166509; TAA
VTEGKFVDV

SEQ ID NO: 16353 - protein, 9 aa, Homo sapiens
  Table A; Target 16353; HLA-C*05:01; CLEC3A; ENSG00000166509; TAA
VTEGKFVDV

SEQ ID NO: 16354 - protein, 9 aa, Homo sapiens
  Table A; Target 16354; HLA-C*06:02; CLEC3A; ENSG00000166509; TAA
VTEGKFVDV

SEQ ID NO: 16355 - protein, 9 aa, Homo sapiens
  Table A; Target 16355; HLA-C*07:04; CLEC3A; ENSG00000166509; TAA
VTEGKFVDV

SEQ ID NO: 16356 - protein, 9 aa, Homo sapiens
  Table A; Target 16356; HLA-C*12:03; CLEC3A; ENSG00000166509; TAA
VTEGKFVDV

SEQ ID NO: 16357 - protein, 9 aa, Homo sapiens
  Table A; Target 16357; HLA-C*16:02; CLEC3A; ENSG00000166509; TAA
VTEGKFVDV

SEQ ID NO: 16358 - protein, 10 aa, Homo sapiens
  Table A; Target 16358; HLA-C*07:01; CLEC3A; ENSG00000166509; TAA
VTEGKFVDVN

SEQ ID NO: 16359 - protein, 9 aa, Homo sapiens
  Table A; Target 16359; HLA-A*01:01; CLEC3A; ENSG00000166509; TAA
YLASEGLKH

SEQ ID NO: 16360 - protein, 9 aa, Homo sapiens
  Table A; Target 16360; HLA-A*03:01; CLEC3A; ENSG00000166509; TAA
YLASEGLKH

SEQ ID NO: 16361 - protein, 9 aa, Homo sapiens
  Table A; Target 16361; HLA-A*29:02; CLEC3A; ENSG00000166509; TAA
YLASEGLKH

SEQ ID NO: 16362 - protein, 10 aa, Homo sapiens
  Table A; Target 16362; HLA-A*02:01; CLEC3A; ENSG00000166509; TAA
YLASEGLKHF

SEQ ID NO: 16363 - protein, 10 aa, Homo sapiens
  Table A; Target 16363; HLA-A*02:03; CLEC3A; ENSG00000166509; TAA
YLASEGLKHF

SEQ ID NO: 16364 - protein, 10 aa, Homo sapiens
  Table A; Target 16364; HLA-A*02:04; CLEC3A; ENSG00000166509; TAA
YLASEGLKHF

SEQ ID NO: 16365 - protein, 10 aa, Homo sapiens
  Table A; Target 16365; HLA-A*02:07; CLEC3A; ENSG00000166509; TAA
YLASEGLKHF

SEQ ID NO: 16366 - protein, 10 aa, Homo sapiens
  Table A; Target 16366; HLA-A*24:02; CLEC3A; ENSG00000166509; TAA
YLASEGLKHF

SEQ ID NO: 16367 - protein, 10 aa, Homo sapiens
  Table A; Target 16367; HLA-A*25:01; CLEC3A; ENSG00000166509; TAA
YLASEGLKHF

SEQ ID NO: 16368 - protein, 10 aa, Homo sapiens
  Table A; Target 16368; HLA-A*26:01; CLEC3A; ENSG00000166509; TAA
YLASEGLKHF

SEQ ID NO: 16369 - protein, 10 aa, Homo sapiens
  Table A; Target 16369; HLA-A*29:02; CLEC3A; ENSG00000166509; TAA
YLASEGLKHF

SEQ ID NO: 16370 - protein, 10 aa, Homo sapiens
  Table A; Target 16370; HLA-A*33:01; CLEC3A; ENSG00000166509; TAA
YLASEGLKHF

SEQ ID NO: 16371 - protein, 10 aa, Homo sapiens
  Table A; Target 16371; HLA-C*07:01; CLEC3A; ENSG00000166509; TAA
YLASEGLKHF

SEQ ID NO: 16372 - protein, 9 aa, Homo sapiens
  Table A; Target 16372; HLA-B*13:02; COL23A1; ENSG00000050767; TAA
AAACLLLGV

SEQ ID NO: 16373 - protein, 9 aa, Homo sapiens
  Table A; Target 16373; HLA-A*32:01; COL23A1; ENSG00000050767; TAA
AAALQGRVA

SEQ ID NO: 16374 - protein, 9 aa, Homo sapiens
  Table A; Target 16374; HLA-B*46:01; COL23A1; ENSG00000050767; TAA
AAALQGRVA

SEQ ID NO: 16375 - protein, 9 aa, Homo sapiens
  Table A; Target 16375; HLA-B*54:01; COL23A1; ENSG00000050767; TAA
AAALQGRVA

SEQ ID NO: 16376 - protein, 9 aa, Homo sapiens
  Table A; Target 16376; HLA-B*55:01; COL23A1; ENSG00000050767; TAA
AAALQGRVA

SEQ ID NO: 16377 - protein, 9 aa, Homo sapiens
  Table A; Target 16377; HLA-B*56:01; COL23A1; ENSG00000050767; TAA
AAALQGRVA

SEQ ID NO: 16378 - protein, 9 aa, Homo sapiens
  Table A; Target 16378; HLA-C*02:02; COL23A1; ENSG00000050767; TAA
AAALQGRVA

SEQ ID NO: 16379 - protein, 9 aa, Homo sapiens
  Table A; Target 16379; HLA-C*03:03; COL23A1; ENSG00000050767; TAA
AAALQGRVA

SEQ ID NO: 16380 - protein, 9 aa, Homo sapiens
  Table A; Target 16380; HLA-C*03:04; COL23A1; ENSG00000050767; TAA
AAALQGRVA

SEQ ID NO: 16381 - protein, 9 aa, Homo sapiens
  Table A; Target 16381; HLA-C*12:03; COL23A1; ENSG00000050767; TAA
AAALQGRVA

SEQ ID NO: 16382 - protein, 9 aa, Homo sapiens
  Table A; Target 16382; HLA-C*16:01; COL23A1; ENSG00000050767; TAA
AAALQGRVA

SEQ ID NO: 16383 - protein, 9 aa, Homo sapiens
  Table A; Target 16383; HLA-C*16:02; COL23A1; ENSG00000050767; TAA
AAALQGRVA

SEQ ID NO: 16384 - protein, 10 aa, Homo sapiens
  Table A; Target 16384; HLA-B*54:01; COL23A1; ENSG00000050767; TAA
AAALQGRVAA

SEQ ID NO: 16385 - protein, 10 aa, Homo sapiens
  Table A; Target 16385; HLA-B*56:01; COL23A1; ENSG00000050767; TAA
AAALQGRVAA

SEQ ID NO: 16386 - protein, 11 aa, Homo sapiens
  Table A; Target 16386; HLA-B*07:02; COL23A1; ENSG00000050767; TAA
AAALQGRVAAL

SEQ ID NO: 16387 - protein, 11 aa, Homo sapiens
  Table A; Target 16387; HLA-C*01:02; COL23A1; ENSG00000050767; TAA
AAALQGRVAAL

SEQ ID NO: 16388 - protein, 11 aa, Homo sapiens
  Table A; Target 16388; HLA-C*03:04; COL23A1; ENSG00000050767; TAA
AAALQGRVAAL

SEQ ID NO: 16389 - protein, 11 aa, Homo sapiens
  Table A; Target 16389; HLA-C*07:02; COL23A1; ENSG00000050767; TAA
AAALQGRVAAL

SEQ ID NO: 16390 - protein, 11 aa, Homo sapiens
  Table A; Target 16390; HLA-C*16:01; COL23A1; ENSG00000050767; TAA
AAALQGRVAAL

SEQ ID NO: 16391 - protein, 10 aa, Homo sapiens
  Table A; Target 16391; HLA-B*54:01; COL23A1; ENSG00000050767; TAA
AACLLLGVQA

SEQ ID NO: 16392 - protein, 11 aa, Homo sapiens
  Table A; Target 16392; HLA-B*56:01; COL23A1; ENSG00000050767; TAA
AAGGGGGGRSA

SEQ ID NO: 16393 - protein, 9 aa, Homo sapiens
  Table A; Target 16393; HLA-A*11:01; COL23A1; ENSG00000050767; TAA
AAGPPGPPG

SEQ ID NO: 16394 - protein, 9 aa, Homo sapiens
  Table A; Target 16394; HLA-C*03:03; COL23A1; ENSG00000050767; TAA
AAGPPGPPG

SEQ ID NO: 16395 - protein, 9 aa, Homo sapiens
  Table A; Target 16395; HLA-C*03:04; COL23A1; ENSG00000050767; TAA
AAGPPGPPG

SEQ ID NO: 16396 - protein, 9 aa, Homo sapiens
  Table A; Target 16396; HLA-C*16:01; COL23A1; ENSG00000050767; TAA
AAGPPGPPG

SEQ ID NO: 16397 - protein, 11 aa, Homo sapiens
  Table A; Target 16397; HLA-C*04:01; COL23A1; ENSG00000050767; TAA
AAGPPGPPGPP

SEQ ID NO: 16398 - protein, 11 aa, Homo sapiens
  Table A; Target 16398; HLA-C*06:02; COL23A1; ENSG00000050767; TAA
AAGPPGPPGPP

SEQ ID NO: 16399 - protein, 8 aa, Homo sapiens
  Table A; Target 16399; HLA-C*16:01; COL23A1; ENSG00000050767; TAA
AAGPRGAP

SEQ ID NO: 16400 - protein, 8 aa, Homo sapiens
  Table A; Target 16400; HLA-C*16:02; COL23A1; ENSG00000050767; TAA
AAGPRGAP

SEQ ID NO: 16401 - protein, 10 aa, Homo sapiens
  Table A; Target 16401; HLA-B*58:01; COL23A1; ENSG00000050767; TAA
AAGPRGAPGL

SEQ ID NO: 16402 - protein, 11 aa, Homo sapiens
  Table A; Target 16402; HLA-A*03:01; COL23A1; ENSG00000050767; TAA
AAGPRGAPGLK

SEQ ID NO: 16403 - protein, 11 aa, Homo sapiens
  Table A; Target 16403; HLA-A*03:02; COL23A1; ENSG00000050767; TAA
AAGPRGAPGLK

SEQ ID NO: 16404 - protein, 11 aa, Homo sapiens
  Table A; Target 16404; HLA-A*11:01; COL23A1; ENSG00000050767; TAA
AAGPRGAPGLK

SEQ ID NO: 16405 - protein, 9 aa, Homo sapiens
  Table A; Target 16405; HLA-B*35:03; COL23A1; ENSG00000050767; TAA
AALEEEREL

SEQ ID NO: 16406 - protein, 9 aa, Homo sapiens
  Table A; Target 16406; HLA-B*58:01; COL23A1; ENSG00000050767; TAA
AALEEEREL

SEQ ID NO: 16407 - protein, 9 aa, Homo sapiens
  Table A; Target 16407; HLA-C*03:03; COL23A1; ENSG00000050767; TAA
AALEEEREL

SEQ ID NO: 16408 - protein, 9 aa, Homo sapiens
  Table A; Target 16408; HLA-C*03:04; COL23A1; ENSG00000050767; TAA
AALEEEREL

SEQ ID NO: 16409 - protein, 9 aa, Homo sapiens
  Table A; Target 16409; HLA-C*16:01; COL23A1; ENSG00000050767; TAA
AALEEEREL

SEQ ID NO: 16410 - protein, 9 aa, Homo sapiens
  Table A; Target 16410; HLA-C*16:02; COL23A1; ENSG00000050767; TAA
AALEEEREL

SEQ ID NO: 16411 - protein, 10 aa, Homo sapiens
  Table A; Target 16411; HLA-B*40:01; COL23A1; ENSG00000050767; TAA
AALEEERELL

SEQ ID NO: 16412 - protein, 11 aa, Homo sapiens
  Table A; Target 16412; HLA-A*11:01; COL23A1; ENSG00000050767; TAA
AALEEERELLR

SEQ ID NO: 16413 - protein, 11 aa, Homo sapiens
  Table A; Target 16413; HLA-A*29:02; COL23A1; ENSG00000050767; TAA
AALEEERELLR

SEQ ID NO: 16414 - protein, 11 aa, Homo sapiens
  Table A; Target 16414; HLA-A*31:01; COL23A1; ENSG00000050767; TAA
AALEEERELLR

SEQ ID NO: 16415 - protein, 11 aa, Homo sapiens
  Table A; Target 16415; HLA-A*33:03; COL23A1; ENSG00000050767; TAA
AALEEERELLR

SEQ ID NO: 16416 - protein, 11 aa, Homo sapiens
  Table A; Target 16416; HLA-B*57:01; COL23A1; ENSG00000050767; TAA
AALEEERELLR

SEQ ID NO: 16417 - protein, 8 aa, Homo sapiens
  Table A; Target 16417; HLA-C*03:03; COL23A1; ENSG00000050767; TAA
AALQGRVA

SEQ ID NO: 16418 - protein, 8 aa, Homo sapiens
  Table A; Target 16418; HLA-C*03:04; COL23A1; ENSG00000050767; TAA
AALQGRVA

SEQ ID NO: 16419 - protein, 8 aa, Homo sapiens
  Table A; Target 16419; HLA-C*16:01; COL23A1; ENSG00000050767; TAA
AALQGRVA

SEQ ID NO: 16420 - protein, 9 aa, Homo sapiens
  Table A; Target 16420; HLA-A*32:01; COL23A1; ENSG00000050767; TAA
AALQGRVAA

SEQ ID NO: 16421 - protein, 9 aa, Homo sapiens
  Table A; Target 16421; HLA-B*08:01; COL23A1; ENSG00000050767; TAA
AALQGRVAA

SEQ ID NO: 16422 - protein, 9 aa, Homo sapiens
  Table A; Target 16422; HLA-B*46:01; COL23A1; ENSG00000050767; TAA
AALQGRVAA

SEQ ID NO: 16423 - protein, 9 aa, Homo sapiens
  Table A; Target 16423; HLA-B*54:01; COL23A1; ENSG00000050767; TAA
AALQGRVAA

SEQ ID NO: 16424 - protein, 9 aa, Homo sapiens
  Table A; Target 16424; HLA-B*55:01; COL23A1; ENSG00000050767; TAA
AALQGRVAA

SEQ ID NO: 16425 - protein, 9 aa, Homo sapiens
  Table A; Target 16425; HLA-B*56:01; COL23A1; ENSG00000050767; TAA
AALQGRVAA

SEQ ID NO: 16426 - protein, 9 aa, Homo sapiens
  Table A; Target 16426; HLA-C*01:02; COL23A1; ENSG00000050767; TAA
AALQGRVAA

SEQ ID NO: 16427 - protein, 9 aa, Homo sapiens
  Table A; Target 16427; HLA-C*03:03; COL23A1; ENSG00000050767; TAA
AALQGRVAA

SEQ ID NO: 16428 - protein, 9 aa, Homo sapiens
  Table A; Target 16428; HLA-C*03:04; COL23A1; ENSG00000050767; TAA
AALQGRVAA

SEQ ID NO: 16429 - protein, 9 aa, Homo sapiens
  Table A; Target 16429; HLA-C*16:01; COL23A1; ENSG00000050767; TAA
AALQGRVAA

SEQ ID NO: 16430 - protein, 10 aa, Homo sapiens
  Table A; Target 16430; HLA-A*02:04; COL23A1; ENSG00000050767; TAA
AALQGRVAAL

SEQ ID NO: 16431 - protein, 10 aa, Homo sapiens
  Table A; Target 16431; HLA-B*07:02; COL23A1; ENSG00000050767; TAA
AALQGRVAAL

SEQ ID NO: 16432 - protein, 10 aa, Homo sapiens
  Table A; Target 16432; HLA-B*08:01; COL23A1; ENSG00000050767; TAA
AALQGRVAAL

SEQ ID NO: 16433 - protein, 10 aa, Homo sapiens
  Table A; Target 16433; HLA-B*37:01; COL23A1; ENSG00000050767; TAA
AALQGRVAAL

SEQ ID NO: 16434 - protein, 10 aa, Homo sapiens
  Table A; Target 16434; HLA-B*40:02; COL23A1; ENSG00000050767; TAA
AALQGRVAAL

SEQ ID NO: 16435 - protein, 10 aa, Homo sapiens
  Table A; Target 16435; HLA-B*46:01; COL23A1; ENSG00000050767; TAA
AALQGRVAAL

SEQ ID NO: 16436 - protein, 10 aa, Homo sapiens
  Table A; Target 16436; HLA-C*01:02; COL23A1; ENSG00000050767; TAA
AALQGRVAAL

SEQ ID NO: 16437 - protein, 10 aa, Homo sapiens
  Table A; Target 16437; HLA-C*03:03; COL23A1; ENSG00000050767; TAA
AALQGRVAAL

SEQ ID NO: 16438 - protein, 10 aa, Homo sapiens
  Table A; Target 16438; HLA-C*03:04; COL23A1; ENSG00000050767; TAA
AALQGRVAAL

SEQ ID NO: 16439 - protein, 10 aa, Homo sapiens
  Table A; Target 16439; HLA-C*07:02; COL23A1; ENSG00000050767; TAA
AALQGRVAAL

SEQ ID NO: 16440 - protein, 10 aa, Homo sapiens
  Table A; Target 16440; HLA-C*14:02; COL23A1; ENSG00000050767; TAA
AALQGRVAAL

SEQ ID NO: 16441 - protein, 10 aa, Homo sapiens
  Table A; Target 16441; HLA-C*16:01; COL23A1; ENSG00000050767; TAA
AALQGRVAAL

SEQ ID NO: 16442 - protein, 9 aa, Homo sapiens
  Table A; Target 16442; HLA-B*44:02; COL23A1; ENSG00000050767; TAA
AEPHLERLL

SEQ ID NO: 16443 - protein, 9 aa, Homo sapiens
  Table A; Target 16443; HLA-B*44:03; COL23A1; ENSG00000050767; TAA
AEPHLERLL

SEQ ID NO: 16444 - protein, 10 aa, Homo sapiens
  Table A; Target 16444; HLA-A*25:01; COL23A1; ENSG00000050767; TAA
AGPPGALDAW

SEQ ID NO: 16445 - protein, 10 aa, Homo sapiens
  Table A; Target 16445; HLA-A*30:02; COL23A1; ENSG00000050767; TAA
AGPPGALDAW

SEQ ID NO: 16446 - protein, 10 aa, Homo sapiens
  Table A; Target 16446; HLA-B*57:01; COL23A1; ENSG00000050767; TAA
AGPPGALDAW

SEQ ID NO: 16447 - protein, 10 aa, Homo sapiens
  Table A; Target 16447; HLA-B*58:01; COL23A1; ENSG00000050767; TAA
AGPPGALDAW

SEQ ID NO: 16448 - protein, 9 aa, Homo sapiens
  Table A; Target 16448; HLA-B*39:01; COL23A1; ENSG00000050767; TAA
AGPPGPPGP

SEQ ID NO: 16449 - protein, 9 aa, Homo sapiens
  Table A; Target 16449; HLA-C*04:01; COL23A1; ENSG00000050767; TAA
AGPPGPPGP

SEQ ID NO: 16450 - protein, 10 aa, Homo sapiens
  Table A; Target 16450; HLA-C*04:01; COL23A1; ENSG00000050767; TAA
AGPPGPPGPP

SEQ ID NO: 16451 - protein, 10 aa, Homo sapiens
  Table A; Target 16451; HLA-C*06:02; COL23A1; ENSG00000050767; TAA
AGPPGPPGPP

SEQ ID NO: 16452 - protein, 10 aa, Homo sapiens
  Table A; Target 16452; HLA-C*07:02; COL23A1; ENSG00000050767; TAA
AGPPGPPGPP

SEQ ID NO: 16453 - protein, 11 aa, Homo sapiens
  Table A; Target 16453; HLA-C*06:02; COL23A1; ENSG00000050767; TAA
AGPPGPPGPPG

SEQ ID NO: 16454 - protein, 11 aa, Homo sapiens
  Table A; Target 16454; HLA-C*07:02; COL23A1; ENSG00000050767; TAA
AGPPGPPGPPG

SEQ ID NO: 16455 - protein, 9 aa, Homo sapiens
  Table A; Target 16455; HLA-C*01:02; COL23A1; ENSG00000050767; TAA
AGPRGAPGL

SEQ ID NO: 16456 - protein, 9 aa, Homo sapiens
  Table A; Target 16456; HLA-B*07:02; COL23A1; ENSG00000050767; TAA
AGSRAVSAL

SEQ ID NO: 16457 - protein, 9 aa, Homo sapiens
  Table A; Target 16457; HLA-B*37:01; COL23A1; ENSG00000050767; TAA
AGSRAVSAL

SEQ ID NO: 16458 - protein, 9 aa, Homo sapiens
  Table A; Target 16458; HLA-B*40:01; COL23A1; ENSG00000050767; TAA
AGSRAVSAL

SEQ ID NO: 16459 - protein, 9 aa, Homo sapiens
  Table A; Target 16459; HLA-B*40:02; COL23A1; ENSG00000050767; TAA
AGSRAVSAL

SEQ ID NO: 16460 - protein, 9 aa, Homo sapiens
  Table A; Target 16460; HLA-C*01:02; COL23A1; ENSG00000050767; TAA
AGSRAVSAL

SEQ ID NO: 16461 - protein, 9 aa, Homo sapiens
  Table A; Target 16461; HLA-C*03:03; COL23A1; ENSG00000050767; TAA
AGSRAVSAL

SEQ ID NO: 16462 - protein, 9 aa, Homo sapiens
  Table A; Target 16462; HLA-C*03:04; COL23A1; ENSG00000050767; TAA
AGSRAVSAL

SEQ ID NO: 16463 - protein, 9 aa, Homo sapiens
  Table A; Target 16463; HLA-C*06:02; COL23A1; ENSG00000050767; TAA
AGSRAVSAL

SEQ ID NO: 16464 - protein, 9 aa, Homo sapiens
  Table A; Target 16464; HLA-C*07:02; COL23A1; ENSG00000050767; TAA
AGSRAVSAL

SEQ ID NO: 16465 - protein, 9 aa, Homo sapiens
  Table A; Target 16465; HLA-C*07:04; COL23A1; ENSG00000050767; TAA
AGSRAVSAL

SEQ ID NO: 16466 - protein, 9 aa, Homo sapiens
  Table A; Target 16466; HLA-C*14:02; COL23A1; ENSG00000050767; TAA
AGSRAVSAL

SEQ ID NO: 16467 - protein, 9 aa, Homo sapiens
  Table A; Target 16467; HLA-C*16:01; COL23A1; ENSG00000050767; TAA
AGSRAVSAL

SEQ ID NO: 16468 - protein, 9 aa, Homo sapiens
  Table A; Target 16468; HLA-C*16:02; COL23A1; ENSG00000050767; TAA
AGSRAVSAL

SEQ ID NO: 16469 - protein, 10 aa, Homo sapiens
  Table A; Target 16469; HLA-A*02:01; COL23A1; ENSG00000050767; TAA
ALDAWAEPHL

SEQ ID NO: 16470 - protein, 10 aa, Homo sapiens
  Table A; Target 16470; HLA-A*02:04; COL23A1; ENSG00000050767; TAA
ALDAWAEPHL

SEQ ID NO: 16471 - protein, 10 aa, Homo sapiens
  Table A; Target 16471; HLA-A*02:07; COL23A1; ENSG00000050767; TAA
ALDAWAEPHL

SEQ ID NO: 16472 - protein, 9 aa, Homo sapiens
  Table A; Target 16472; HLA-A*02:07; COL23A1; ENSG00000050767; TAA
ALEEERELL

SEQ ID NO: 16473 - protein, 9 aa, Homo sapiens
  Table A; Target 16473; HLA-B*38:01; COL23A1; ENSG00000050767; TAA
ALEEERELL

SEQ ID NO: 16474 - protein, 9 aa, Homo sapiens
  Table A; Target 16474; HLA-B*55:01; COL23A1; ENSG00000050767; TAA
ALEEERELL

SEQ ID NO: 16475 - protein, 9 aa, Homo sapiens
  Table A; Target 16475; HLA-C*05:01; COL23A1; ENSG00000050767; TAA
ALEEERELL

SEQ ID NO: 16476 - protein, 10 aa, Homo sapiens
  Table A; Target 16476; HLA-A*01:01; COL23A1; ENSG00000050767; TAA
ALEEERELLR

SEQ ID NO: 16477 - protein, 9 aa, Homo sapiens
  Table A; Target 16477; HLA-A*02:01; COL23A1; ENSG00000050767; TAA
ALQGRVAAL

SEQ ID NO: 16478 - protein, 9 aa, Homo sapiens
  Table A; Target 16478; HLA-A*02:03; COL23A1; ENSG00000050767; TAA
ALQGRVAAL

SEQ ID NO: 16479 - protein, 9 aa, Homo sapiens
  Table A; Target 16479; HLA-A*02:04; COL23A1; ENSG00000050767; TAA
ALQGRVAAL

SEQ ID NO: 16480 - protein, 9 aa, Homo sapiens
  Table A; Target 16480; HLA-A*02:07; COL23A1; ENSG00000050767; TAA
ALQGRVAAL

SEQ ID NO: 16481 - protein, 9 aa, Homo sapiens
  Table A; Target 16481; HLA-A*32:01; COL23A1; ENSG00000050767; TAA
ALQGRVAAL

SEQ ID NO: 16482 - protein, 9 aa, Homo sapiens
  Table A; Target 16482; HLA-B*07:02; COL23A1; ENSG00000050767; TAA
ALQGRVAAL

SEQ ID NO: 16483 - protein, 9 aa, Homo sapiens
  Table A; Target 16483; HLA-B*08:01; COL23A1; ENSG00000050767; TAA
ALQGRVAAL

SEQ ID NO: 16484 - protein, 9 aa, Homo sapiens
  Table A; Target 16484; HLA-B*15:01; COL23A1; ENSG00000050767; TAA
ALQGRVAAL

SEQ ID NO: 16485 - protein, 9 aa, Homo sapiens
  Table A; Target 16485; HLA-B*37:01; COL23A1; ENSG00000050767; TAA
ALQGRVAAL

SEQ ID NO: 16486 - protein, 9 aa, Homo sapiens
  Table A; Target 16486; HLA-B*46:01; COL23A1; ENSG00000050767; TAA
ALQGRVAAL

SEQ ID NO: 16487 - protein, 9 aa, Homo sapiens
  Table A; Target 16487; HLA-B*55:01; COL23A1; ENSG00000050767; TAA
ALQGRVAAL

SEQ ID NO: 16488 - protein, 9 aa, Homo sapiens
  Table A; Target 16488; HLA-C*01:02; COL23A1; ENSG00000050767; TAA
ALQGRVAAL

SEQ ID NO: 16489 - protein, 9 aa, Homo sapiens
  Table A; Target 16489; HLA-C*03:03; COL23A1; ENSG00000050767; TAA
ALQGRVAAL

SEQ ID NO: 16490 - protein, 9 aa, Homo sapiens
  Table A; Target 16490; HLA-C*07:02; COL23A1; ENSG00000050767; TAA
ALQGRVAAL

SEQ ID NO: 16491 - protein, 9 aa, Homo sapiens
  Table A; Target 16491; HLA-C*14:02; COL23A1; ENSG00000050767; TAA
ALQGRVAAL

SEQ ID NO: 16492 - protein, 9 aa, Homo sapiens
  Table A; Target 16492; HLA-C*16:01; COL23A1; ENSG00000050767; TAA
ALQGRVAAL

SEQ ID NO: 16493 - protein, 9 aa, Homo sapiens
  Table A; Target 16493; HLA-C*16:02; COL23A1; ENSG00000050767; TAA
ALQGRVAAL

SEQ ID NO: 16494 - protein, 8 aa, Homo sapiens
  Table A; Target 16494; HLA-A*03:02; COL23A1; ENSG00000050767; TAA
AQGPAGPK

SEQ ID NO: 16495 - protein, 8 aa, Homo sapiens
  Table A; Target 16495; HLA-A*11:01; COL23A1; ENSG00000050767; TAA
AQGPAGPK

SEQ ID NO: 16496 - protein, 11 aa, Homo sapiens
  Table A; Target 16496; HLA-C*04:01; COL23A1; ENSG00000050767; TAA
AQLIVEPGPPG

SEQ ID NO: 16497 - protein, 10 aa, Homo sapiens
  Table A; Target 16497; HLA-B*27:05; COL23A1; ENSG00000050767; TAA
ARGPPGDTGK

SEQ ID NO: 16498 - protein, 9 aa, Homo sapiens
  Table A; Target 16498; HLA-A*01:01; COL23A1; ENSG00000050767; TAA
ASDSLQESL

SEQ ID NO: 16499 - protein, 9 aa, Homo sapiens
  Table A; Target 16499; HLA-A*02:07; COL23A1; ENSG00000050767; TAA
ASDSLQESL

SEQ ID NO: 16500 - protein, 9 aa, Homo sapiens
  Table A; Target 16500; HLA-B*38:01; COL23A1; ENSG00000050767; TAA
ASDSLQESL

SEQ ID NO: 16501 - protein, 9 aa, Homo sapiens
  Table A; Target 16501; HLA-B*58:01; COL23A1; ENSG00000050767; TAA
ASDSLQESL

SEQ ID NO: 16502 - protein, 9 aa, Homo sapiens
  Table A; Target 16502; HLA-C*05:01; COL23A1; ENSG00000050767; TAA
ASDSLQESL

SEQ ID NO: 16503 - protein, 9 aa, Homo sapiens
  Table A; Target 16503; HLA-A*32:01; COL23A1; ENSG00000050767; TAA
ATTAGSRAV

SEQ ID NO: 16504 - protein, 9 aa, Homo sapiens
  Table A; Target 16504; HLA-B*13:02; COL23A1; ENSG00000050767; TAA
ATTAGSRAV

SEQ ID NO: 16505 - protein, 9 aa, Homo sapiens
  Table A; Target 16505; HLA-C*03:04; COL23A1; ENSG00000050767; TAA
ATTAGSRAV

SEQ ID NO: 16506 - protein, 9 aa, Homo sapiens
  Table A; Target 16506; HLA-C*06:02; COL23A1; ENSG00000050767; TAA
ATTAGSRAV

SEQ ID NO: 16507 - protein, 9 aa, Homo sapiens
  Table A; Target 16507; HLA-C*16:01; COL23A1; ENSG00000050767; TAA
ATTAGSRAV

SEQ ID NO: 16508 - protein, 9 aa, Homo sapiens
  Table A; Target 16508; HLA-C*16:02; COL23A1; ENSG00000050767; TAA
ATTAGSRAV

SEQ ID NO: 16509 - protein, 9 aa, Homo sapiens
  Table A; Target 16509; HLA-A*03:01; COL23A1; ENSG00000050767; TAA
AVSALCLLL

SEQ ID NO: 16510 - protein, 9 aa, Homo sapiens
  Table A; Target 16510; HLA-A*29:02; COL23A1; ENSG00000050767; TAA
AVSALCLLL

SEQ ID NO: 16511 - protein, 9 aa, Homo sapiens
  Table A; Target 16511; HLA-B*13:02; COL23A1; ENSG00000050767; TAA
AVSALCLLL

SEQ ID NO: 16512 - protein, 9 aa, Homo sapiens
  Table A; Target 16512; HLA-A*02:01; COL23A1; ENSG00000050767; TAA
CLLLGVQAA

SEQ ID NO: 16513 - protein, 9 aa, Homo sapiens
  Table A; Target 16513; HLA-A*02:03; COL23A1; ENSG00000050767; TAA
CLLLGVQAA

SEQ ID NO: 16514 - protein, 9 aa, Homo sapiens
  Table A; Target 16514; HLA-B*55:01; COL23A1; ENSG00000050767; TAA
CLLLGVQAA

SEQ ID NO: 16515 - protein, 8 aa, Homo sapiens
  Table A; Target 16515; HLA-B*51:01; COL23A1; ENSG00000050767; TAA
DAGKGNAA

SEQ ID NO: 16516 - protein, 8 aa, Homo sapiens
  Table A; Target 16516; HLA-B*35:03; COL23A1; ENSG00000050767; TAA
DAWAEPHL

SEQ ID NO: 16517 - protein, 8 aa, Homo sapiens
  Table A; Target 16517; HLA-B*51:01; COL23A1; ENSG00000050767; TAA
DAWAEPHL

SEQ ID NO: 16518 - protein, 9 aa, Homo sapiens
  Table A; Target 16518; HLA-A*33:01; COL23A1; ENSG00000050767; TAA
DAWAEPHLE

SEQ ID NO: 16519 - protein, 10 aa, Homo sapiens
  Table A; Target 16519; HLA-A*33:01; COL23A1; ENSG00000050767; TAA
DAWAEPHLER

SEQ ID NO: 16520 - protein, 10 aa, Homo sapiens
  Table A; Target 16520; HLA-A*33:03; COL23A1; ENSG00000050767; TAA
DAWAEPHLER

SEQ ID NO: 16521 - protein, 10 aa, Homo sapiens
  Table A; Target 16521; HLA-C*07:06; COL23A1; ENSG00000050767; TAA
DAWAEPHLER

SEQ ID NO: 16522 - protein, 10 aa, Homo sapiens
  Table A; Target 16522; HLA-A*33:01; COL23A1; ENSG00000050767; TAA
DGKPGLPGPK

SEQ ID NO: 16523 - protein, 10 aa, Homo sapiens
  Table A; Target 16523; HLA-C*07:02; COL23A1; ENSG00000050767; TAA
DGKPGLPGPK

SEQ ID NO: 16524 - protein, 8 aa, Homo sapiens
  Table A; Target 16524; HLA-B*08:01; COL23A1; ENSG00000050767; TAA
DGLAKIRT

SEQ ID NO: 16525 - protein, 9 aa, Homo sapiens
  Table A; Target 16525; HLA-B*08:01; COL23A1; ENSG00000050767; TAA
DGLAKIRTA

SEQ ID NO: 16526 - protein, 9 aa, Homo sapiens
  Table A; Target 16526; HLA-B*51:01; COL23A1; ENSG00000050767; TAA
DGLAKIRTA

SEQ ID NO: 16527 - protein, 9 aa, Homo sapiens
  Table A; Target 16527; HLA-B*54:01; COL23A1; ENSG00000050767; TAA
DGLAKIRTA

SEQ ID NO: 16528 - protein, 10 aa, Homo sapiens
  Table A; Target 16528; HLA-A*33:01; COL23A1; ENSG00000050767; TAA
DGLAKIRTAR

SEQ ID NO: 16529 - protein, 9 aa, Homo sapiens
  Table A; Target 16529; HLA-A*25:01; COL23A1; ENSG00000050767; TAA
DGLPVPGCW

SEQ ID NO: 16530 - protein, 8 aa, Homo sapiens
  Table A; Target 16530; HLA-B*08:01; COL23A1; ENSG00000050767; TAA
DGRILDAL

SEQ ID NO: 16531 - protein, 8 aa, Homo sapiens
  Table A; Target 16531; HLA-B*18:01; COL23A1; ENSG00000050767; TAA
DGRILDAL

SEQ ID NO: 16532 - protein, 8 aa, Homo sapiens
  Table A; Target 16532; HLA-B*51:01; COL23A1; ENSG00000050767; TAA
DGRILDAL

SEQ ID NO: 16533 - protein, 8 aa, Homo sapiens
  Table A; Target 16533; HLA-B*51:01; COL23A1; ENSG00000050767; TAA
DGYPGPLG

SEQ ID NO: 16534 - protein, 9 aa, Homo sapiens
  Table A; Target 16534; HLA-A*23:01; COL23A1; ENSG00000050767; TAA
DGYPGPLGL

SEQ ID NO: 16535 - protein, 9 aa, Homo sapiens
  Table A; Target 16535; HLA-A*25:01; COL23A1; ENSG00000050767; TAA
DGYPGPLGL

SEQ ID NO: 16536 - protein, 9 aa, Homo sapiens
  Table A; Target 16536; HLA-A*26:01; COL23A1; ENSG00000050767; TAA
DGYPGPLGL

SEQ ID NO: 16537 - protein, 9 aa, Homo sapiens
  Table A; Target 16537; HLA-A*30:01; COL23A1; ENSG00000050767; TAA
DGYPGPLGL

SEQ ID NO: 16538 - protein, 9 aa, Homo sapiens
  Table A; Target 16538; HLA-A*33:01; COL23A1; ENSG00000050767; TAA
DGYPGPLGL

SEQ ID NO: 16539 - protein, 9 aa, Homo sapiens
  Table A; Target 16539; HLA-A*33:03; COL23A1; ENSG00000050767; TAA
DGYPGPLGL

SEQ ID NO: 16540 - protein, 9 aa, Homo sapiens
  Table A; Target 16540; HLA-A*68:01; COL23A1; ENSG00000050767; TAA
DGYPGPLGL

SEQ ID NO: 16541 - protein, 9 aa, Homo sapiens
  Table A; Target 16541; HLA-A*68:02; COL23A1; ENSG00000050767; TAA
DGYPGPLGL

SEQ ID NO: 16542 - protein, 9 aa, Homo sapiens
  Table A; Target 16542; HLA-B*07:02; COL23A1; ENSG00000050767; TAA
DGYPGPLGL

SEQ ID NO: 16543 - protein, 9 aa, Homo sapiens
  Table A; Target 16543; HLA-B*08:01; COL23A1; ENSG00000050767; TAA
DGYPGPLGL

SEQ ID NO: 16544 - protein, 9 aa, Homo sapiens
  Table A; Target 16544; HLA-B*13:02; COL23A1; ENSG00000050767; TAA
DGYPGPLGL

SEQ ID NO: 16545 - protein, 9 aa, Homo sapiens
  Table A; Target 16545; HLA-B*15:03; COL23A1; ENSG00000050767; TAA
DGYPGPLGL

SEQ ID NO: 16546 - protein, 9 aa, Homo sapiens
  Table A; Target 16546; HLA-B*18:01; COL23A1; ENSG00000050767; TAA
DGYPGPLGL

SEQ ID NO: 16547 - protein, 9 aa, Homo sapiens
  Table A; Target 16547; HLA-B*27:05; COL23A1; ENSG00000050767; TAA
DGYPGPLGL

SEQ ID NO: 16548 - protein, 9 aa, Homo sapiens
  Table A; Target 16548; HLA-B*35:01; COL23A1; ENSG00000050767; TAA
DGYPGPLGL

SEQ ID NO: 16549 - protein, 9 aa, Homo sapiens
  Table A; Target 16549; HLA-B*35:03; COL23A1; ENSG00000050767; TAA
DGYPGPLGL

SEQ ID NO: 16550 - protein, 9 aa, Homo sapiens
  Table A; Target 16550; HLA-B*38:01; COL23A1; ENSG00000050767; TAA
DGYPGPLGL

SEQ ID NO: 16551 - protein, 9 aa, Homo sapiens
  Table A; Target 16551; HLA-B*39:01; COL23A1; ENSG00000050767; TAA
DGYPGPLGL

SEQ ID NO: 16552 - protein, 9 aa, Homo sapiens
  Table A; Target 16552; HLA-B*40:02; COL23A1; ENSG00000050767; TAA
DGYPGPLGL

SEQ ID NO: 16553 - protein, 9 aa, Homo sapiens
  Table A; Target 16553; HLA-B*49:01; COL23A1; ENSG00000050767; TAA
DGYPGPLGL

SEQ ID NO: 16554 - protein, 9 aa, Homo sapiens
  Table A; Target 16554; HLA-B*51:01; COL23A1; ENSG00000050767; TAA
DGYPGPLGL

SEQ ID NO: 16555 - protein, 9 aa, Homo sapiens
  Table A; Target 16555; HLA-C*01:02; COL23A1; ENSG00000050767; TAA
DGYPGPLGL

SEQ ID NO: 16556 - protein, 9 aa, Homo sapiens
  Table A; Target 16556; HLA-C*02:02; COL23A1; ENSG00000050767; TAA
DGYPGPLGL

SEQ ID NO: 16557 - protein, 9 aa, Homo sapiens
  Table A; Target 16557; HLA-C*03:03; COL23A1; ENSG00000050767; TAA
DGYPGPLGL

SEQ ID NO: 16558 - protein, 9 aa, Homo sapiens
  Table A; Target 16558; HLA-C*03:04; COL23A1; ENSG00000050767; TAA
DGYPGPLGL

SEQ ID NO: 16559 - protein, 9 aa, Homo sapiens
  Table A; Target 16559; HLA-C*05:01; COL23A1; ENSG00000050767; TAA
DGYPGPLGL

SEQ ID NO: 16560 - protein, 9 aa, Homo sapiens
  Table A; Target 16560; HLA-C*06:02; COL23A1; ENSG00000050767; TAA
DGYPGPLGL

SEQ ID NO: 16561 - protein, 9 aa, Homo sapiens
  Table A; Target 16561; HLA-C*07:01; COL23A1; ENSG00000050767; TAA
DGYPGPLGL

SEQ ID NO: 16562 - protein, 9 aa, Homo sapiens
  Table A; Target 16562; HLA-C*07:02; COL23A1; ENSG00000050767; TAA
DGYPGPLGL

SEQ ID NO: 16563 - protein, 9 aa, Homo sapiens
  Table A; Target 16563; HLA-C*07:04; COL23A1; ENSG00000050767; TAA
DGYPGPLGL

SEQ ID NO: 16564 - protein, 9 aa, Homo sapiens
  Table A; Target 16564; HLA-C*07:06; COL23A1; ENSG00000050767; TAA
DGYPGPLGL

SEQ ID NO: 16565 - protein, 9 aa, Homo sapiens
  Table A; Target 16565; HLA-C*12:03; COL23A1; ENSG00000050767; TAA
DGYPGPLGL

SEQ ID NO: 16566 - protein, 9 aa, Homo sapiens
  Table A; Target 16566; HLA-C*16:02; COL23A1; ENSG00000050767; TAA
DGYPGPLGL

SEQ ID NO: 16567 - protein, 9 aa, Homo sapiens
  Table A; Target 16567; HLA-C*16:04; COL23A1; ENSG00000050767; TAA
DGYPGPLGL

SEQ ID NO: 16568 - protein, 11 aa, Homo sapiens
  Table A; Target 16568; HLA-C*04:01; COL23A1; ENSG00000050767; TAA
DGYPGPLGLDG

SEQ ID NO: 16569 - protein, 9 aa, Homo sapiens
  Table A; Target 16569; HLA-B*35:03; COL23A1; ENSG00000050767; TAA
DPGPPGQSG

SEQ ID NO: 16570 - protein, 10 aa, Homo sapiens
  Table A; Target 16570; HLA-A*68:01; COL23A1; ENSG00000050767; TAA
DPGPPGQSGR

SEQ ID NO: 16571 - protein, 10 aa, Homo sapiens
  Table A; Target 16571; HLA-C*07:06; COL23A1; ENSG00000050767; TAA
DPGPPGQSGR

SEQ ID NO: 16572 - protein, 10 aa, Homo sapiens
  Table A; Target 16572; HLA-A*33:01; COL23A1; ENSG00000050767; TAA
DSLQESLAQL

SEQ ID NO: 16573 - protein, 10 aa, Homo sapiens
  Table A; Target 16573; HLA-A*33:01; COL23A1; ENSG00000050767; TAA
DTVVIDYDGR

SEQ ID NO: 16574 - protein, 10 aa, Homo sapiens
  Table A; Target 16574; HLA-A*68:01; COL23A1; ENSG00000050767; TAA
DTVVIDYDGR

SEQ ID NO: 16575 - protein, 10 aa, Homo sapiens
  Table A; Target 16575; HLA-B*27:02; COL23A1; ENSG00000050767; TAA
DTVVIDYDGR

SEQ ID NO: 16576 - protein, 11 aa, Homo sapiens
  Table A; Target 16576; HLA-A*68:02; COL23A1; ENSG00000050767; TAA
DTVVIDYDGRI

SEQ ID NO: 16577 - protein, 8 aa, Homo sapiens
  Table A; Target 16577; HLA-B*08:01; COL23A1; ENSG00000050767; TAA
EPHLERLL

SEQ ID NO: 16578 - protein, 10 aa, Homo sapiens
  Table A; Target 16578; HLA-A*25:01; COL23A1; ENSG00000050767; TAA
EQGDTVVIDY

SEQ ID NO: 16579 - protein, 10 aa, Homo sapiens
  Table A; Target 16579; HLA-A*26:01; COL23A1; ENSG00000050767; TAA
EQGDTVVIDY

SEQ ID NO: 16580 - protein, 10 aa, Homo sapiens
  Table A; Target 16580; HLA-B*44:02; COL23A1; ENSG00000050767; TAA
EQGDTVVIDY

SEQ ID NO: 16581 - protein, 10 aa, Homo sapiens
  Table A; Target 16581; HLA-B*44:03; COL23A1; ENSG00000050767; TAA
EQGDTVVIDY

SEQ ID NO: 16582 - protein, 10 aa, Homo sapiens
  Table A; Target 16582; HLA-C*07:04; COL23A1; ENSG00000050767; TAA
EQGDTVVIDY

SEQ ID NO: 16583 - protein, 9 aa, Homo sapiens
  Table A; Target 16583; HLA-B*39:01; COL23A1; ENSG00000050767; TAA
ERAGGGGDA

SEQ ID NO: 16584 - protein, 10 aa, Homo sapiens
  Table A; Target 16584; HLA-B*39:01; COL23A1; ENSG00000050767; TAA
ERAGGGGDAG

SEQ ID NO: 16585 - protein, 11 aa, Homo sapiens
  Table A; Target 16585; HLA-A*68:01; COL23A1; ENSG00000050767; TAA
ESASDSLQESL

SEQ ID NO: 16586 - protein, 9 aa, Homo sapiens
  Table A; Target 16586; HLA-B*27:05; COL23A1; ENSG00000050767; TAA
GAAGPPGPP

SEQ ID NO: 16587 - protein, 9 aa, Homo sapiens
  Table A; Target 16587; HLA-C*06:02; COL23A1; ENSG00000050767; TAA
GAAGPPGPP

SEQ ID NO: 16588 - protein, 9 aa, Homo sapiens
  Table A; Target 16588; HLA-B*07:02; COL23A1; ENSG00000050767; TAA
GAAGPRGAP

SEQ ID NO: 16589 - protein, 9 aa, Homo sapiens
  Table A; Target 16589; HLA-C*07:02; COL23A1; ENSG00000050767; TAA
GAAGPRGAP

SEQ ID NO: 16590 - protein, 9 aa, Homo sapiens
  Table A; Target 16590; HLA-C*16:01; COL23A1; ENSG00000050767; TAA
GAAGPRGAP

SEQ ID NO: 16591 - protein, 9 aa, Homo sapiens
  Table A; Target 16591; HLA-C*07:06; COL23A1; ENSG00000050767; TAA
GAPGDFGPR

SEQ ID NO: 16592 - protein, 9 aa, Homo sapiens
  Table A; Target 16592; HLA-A*03:01; COL23A1; ENSG00000050767; TAA
GAQGPAGPK

SEQ ID NO: 16593 - protein, 9 aa, Homo sapiens
  Table A; Target 16593; HLA-A*03:02; COL23A1; ENSG00000050767; TAA
GAQGPAGPK

SEQ ID NO: 16594 - protein, 9 aa, Homo sapiens
  Table A; Target 16594; HLA-A*11:01; COL23A1; ENSG00000050767; TAA
GAQGPAGPK

SEQ ID NO: 16595 - protein, 9 aa, Homo sapiens
  Table A; Target 16595; HLA-C*07:06; COL23A1; ENSG00000050767; TAA
GAQGPAGPK

SEQ ID NO: 16596 - protein, 8 aa, Homo sapiens
  Table A; Target 16596; HLA-B*18:01; COL23A1; ENSG00000050767; TAA
GDTVVIDY

SEQ ID NO: 16597 - protein, 8 aa, Homo sapiens
  Table A; Target 16597; HLA-B*37:01; COL23A1; ENSG00000050767; TAA
GDTVVIDY

SEQ ID NO: 16598 - protein, 8 aa, Homo sapiens
  Table A; Target 16598; HLA-C*07:04; COL23A1; ENSG00000050767; TAA
GDTVVIDY

SEQ ID NO: 16599 - protein, 8 aa, Homo sapiens
  Table A; Target 16599; HLA-C*16:02; COL23A1; ENSG00000050767; TAA
GDTVVIDY

SEQ ID NO: 16600 - protein, 8 aa, Homo sapiens
  Table A; Target 16600; HLA-B*40:01; COL23A1; ENSG00000050767; TAA
GEAGEMGL

SEQ ID NO: 16601 - protein, 8 aa, Homo sapiens
  Table A; Target 16601; HLA-B*44:03; COL23A1; ENSG00000050767; TAA
GEAGEMGL

SEQ ID NO: 16602 - protein, 11 aa, Homo sapiens
  Table A; Target 16602; HLA-A*30:01; COL23A1; ENSG00000050767; TAA
GEAGEMGLSGL

SEQ ID NO: 16603 - protein, 11 aa, Homo sapiens
  Table A; Target 16603; HLA-B*40:01; COL23A1; ENSG00000050767; TAA
GEAGEMGLSGL

SEQ ID NO: 16604 - protein, 11 aa, Homo sapiens
  Table A; Target 16604; HLA-B*49:01; COL23A1; ENSG00000050767; TAA
GEAGEMGLSGL

SEQ ID NO: 16605 - protein, 11 aa, Homo sapiens
  Table A; Target 16605; HLA-A*30:01; COL23A1; ENSG00000050767; TAA
GEKGESASDSL

SEQ ID NO: 16606 - protein, 11 aa, Homo sapiens
  Table A; Target 16606; HLA-B*39:01; COL23A1; ENSG00000050767; TAA
GEKGESASDSL

SEQ ID NO: 16607 - protein, 11 aa, Homo sapiens
  Table A; Target 16607; HLA-B*40:01; COL23A1; ENSG00000050767; TAA
GEKGESASDSL

SEQ ID NO: 16608 - protein, 11 aa, Homo sapiens
  Table A; Target 16608; HLA-B*40:02; COL23A1; ENSG00000050767; TAA
GEKGESASDSL

SEQ ID NO: 16609 - protein, 9 aa, Homo sapiens
  Table A; Target 16609; HLA-B*40:02; COL23A1; ENSG00000050767; TAA
GELGLPGAP

SEQ ID NO: 16610 - protein, 11 aa, Homo sapiens
  Table A; Target 16610; HLA-B*44:02; COL23A1; ENSG00000050767; TAA
GELGLPGAPGI

SEQ ID NO: 16611 - protein, 11 aa, Homo sapiens
  Table A; Target 16611; HLA-B*44:03; COL23A1; ENSG00000050767; TAA
GELGLPGAPGI

SEQ ID NO: 16612 - protein, 11 aa, Homo sapiens
  Table A; Target 16612; HLA-B*49:01; COL23A1; ENSG00000050767; TAA
GELGLPGAPGI

SEQ ID NO: 16613 - protein, 8 aa, Homo sapiens
  Table A; Target 16613; HLA-B*37:01; COL23A1; ENSG00000050767; TAA
GEMGLSGL

SEQ ID NO: 16614 - protein, 8 aa, Homo sapiens
  Table A; Target 16614; HLA-B*40:01; COL23A1; ENSG00000050767; TAA
GEMGLSGL

SEQ ID NO: 16615 - protein, 8 aa, Homo sapiens
  Table A; Target 16615; HLA-B*49:01; COL23A1; ENSG00000050767; TAA
GEMGLSGL

SEQ ID NO: 16616 - protein, 9 aa, Homo sapiens
  Table A; Target 16616; HLA-B*49:01; COL23A1; ENSG00000050767; TAA
GEMGLSGLP

SEQ ID NO: 16617 - protein, 10 aa, Homo sapiens
  Table A; Target 16617; HLA-B*40:02; COL23A1; ENSG00000050767; TAA
GEMGLSGLPG

SEQ ID NO: 16618 - protein, 10 aa, Homo sapiens
  Table A; Target 16618; HLA-B*49:01; COL23A1; ENSG00000050767; TAA
GEMGLSGLPG

SEQ ID NO: 16619 - protein, 11 aa, Homo sapiens
  Table A; Target 16619; HLA-A*30:01; COL23A1; ENSG00000050767; TAA
GEMGLSGLPGA

SEQ ID NO: 16620 - protein, 9 aa, Homo sapiens
  Table A; Target 16620; HLA-B*40:02; COL23A1; ENSG00000050767; TAA
GEMGPKGPP

SEQ ID NO: 16621 - protein, 10 aa, Homo sapiens
  Table A; Target 16621; HLA-C*04:01; COL23A1; ENSG00000050767; TAA
GEMGPKGPPG

SEQ ID NO: 16622 - protein, 8 aa, Homo sapiens
  Table A; Target 16622; HLA-B*40:01; COL23A1; ENSG00000050767; TAA
GEPGPAGL

SEQ ID NO: 16623 - protein, 8 aa, Homo sapiens
  Table A; Target 16623; HLA-B*37:01; COL23A1; ENSG00000050767; TAA
GEPGPPGL

SEQ ID NO: 16624 - protein, 8 aa, Homo sapiens
  Table A; Target 16624; HLA-B*40:01; COL23A1; ENSG00000050767; TAA
GEPGPPGL

SEQ ID NO: 16625 - protein, 9 aa, Homo sapiens
  Table A; Target 16625; HLA-B*40:01; COL23A1; ENSG00000050767; TAA
GEPGQDGEM

SEQ ID NO: 16626 - protein, 11 aa, Homo sapiens
  Table A; Target 16626; HLA-C*04:01; COL23A1; ENSG00000050767; TAA
GEPGQDGEMGP

SEQ ID NO: 16627 - protein, 9 aa, Homo sapiens
  Table A; Target 16627; HLA-A*30:01; COL23A1; ENSG00000050767; TAA
GEQGDTVVI

SEQ ID NO: 16628 - protein, 9 aa, Homo sapiens
  Table A; Target 16628; HLA-B*13:02; COL23A1; ENSG00000050767; TAA
GEQGDTVVI

SEQ ID NO: 16629 - protein, 9 aa, Homo sapiens
  Table A; Target 16629; HLA-B*40:01; COL23A1; ENSG00000050767; TAA
GEQGDTVVI

SEQ ID NO: 16630 - protein, 9 aa, Homo sapiens
  Table A; Target 16630; HLA-B*40:02; COL23A1; ENSG00000050767; TAA
GEQGDTVVI

SEQ ID NO: 16631 - protein, 9 aa, Homo sapiens
  Table A; Target 16631; HLA-B*44:02; COL23A1; ENSG00000050767; TAA
GEQGDTVVI

SEQ ID NO: 16632 - protein, 9 aa, Homo sapiens
  Table A; Target 16632; HLA-B*44:03; COL23A1; ENSG00000050767; TAA
GEQGDTVVI

SEQ ID NO: 16633 - protein, 9 aa, Homo sapiens
  Table A; Target 16633; HLA-B*49:01; COL23A1; ENSG00000050767; TAA
GEQGDTVVI

SEQ ID NO: 16634 - protein, 11 aa, Homo sapiens
  Table A; Target 16634; HLA-A*30:02; COL23A1; ENSG00000050767; TAA
GEQGDTVVIDY

SEQ ID NO: 16635 - protein, 11 aa, Homo sapiens
  Table A; Target 16635; HLA-B*27:02; COL23A1; ENSG00000050767; TAA
GEQGDTVVIDY

SEQ ID NO: 16636 - protein, 11 aa, Homo sapiens
  Table A; Target 16636; HLA-B*39:01; COL23A1; ENSG00000050767; TAA
GEQGDTVVIDY

SEQ ID NO: 16637 - protein, 11 aa, Homo sapiens
  Table A; Target 16637; HLA-B*44:02; COL23A1; ENSG00000050767; TAA
GEQGDTVVIDY

SEQ ID NO: 16638 - protein, 11 aa, Homo sapiens
  Table A; Target 16638; HLA-B*44:03; COL23A1; ENSG00000050767; TAA
GEQGDTVVIDY

SEQ ID NO: 16639 - protein, 11 aa, Homo sapiens
  Table A; Target 16639; HLA-C*16:04; COL23A1; ENSG00000050767; TAA
GEQGDTVVIDY

SEQ ID NO: 16640 - protein, 11 aa, Homo sapiens
  Table A; Target 16640; HLA-C*06:02; COL23A1; ENSG00000050767; TAA
GERGPSGLPGP

SEQ ID NO: 16641 - protein, 8 aa, Homo sapiens
  Table A; Target 16641; HLA-A*30:01; COL23A1; ENSG00000050767; TAA
GESASDSL

SEQ ID NO: 16642 - protein, 8 aa, Homo sapiens
  Table A; Target 16642; HLA-B*37:01; COL23A1; ENSG00000050767; TAA
GESASDSL

SEQ ID NO: 16643 - protein, 8 aa, Homo sapiens
  Table A; Target 16643; HLA-B*40:01; COL23A1; ENSG00000050767; TAA
GESASDSL

SEQ ID NO: 16644 - protein, 9 aa, Homo sapiens
  Table A; Target 16644; HLA-A*03:02; COL23A1; ENSG00000050767; TAA
GIDGEKGPK

SEQ ID NO: 16645 - protein, 9 aa, Homo sapiens
  Table A; Target 16645; HLA-A*11:01; COL23A1; ENSG00000050767; TAA
GIDGEKGPK

SEQ ID NO: 16646 - protein, 9 aa, Homo sapiens
  Table A; Target 16646; HLA-C*01:02; COL23A1; ENSG00000050767; TAA
GIPGAKGEL

SEQ ID NO: 16647 - protein, 8 aa, Homo sapiens
  Table A; Target 16647; HLA-A*02:03; COL23A1; ENSG00000050767; TAA
GLAKIRTA

SEQ ID NO: 16648 - protein, 9 aa, Homo sapiens
  Table A; Target 16648; HLA-A*03:01; COL23A1; ENSG00000050767; TAA
GLAKIRTAR

SEQ ID NO: 16649 - protein, 9 aa, Homo sapiens
  Table A; Target 16649; HLA-A*03:02; COL23A1; ENSG00000050767; TAA
GLDGAKGEK

SEQ ID NO: 16650 - protein, 9 aa, Homo sapiens
  Table A; Target 16650; HLA-A*03:01; COL23A1; ENSG00000050767; TAA
GLIGLPGTK

SEQ ID NO: 16651 - protein, 9 aa, Homo sapiens
  Table A; Target 16651; HLA-A*03:02; COL23A1; ENSG00000050767; TAA
GLIGLPGTK

SEQ ID NO: 16652 - protein, 9 aa, Homo sapiens
  Table A; Target 16652; HLA-B*15:01; COL23A1; ENSG00000050767; TAA
GLKGEAGEM

SEQ ID NO: 16653 - protein, 9 aa, Homo sapiens
  Table A; Target 16653; HLA-B*46:01; COL23A1; ENSG00000050767; TAA
GLKGEAGEM

SEQ ID NO: 16654 - protein, 11 aa, Homo sapiens
  Table A; Target 16654; HLA-A*02:01; COL23A1; ENSG00000050767; TAA
GLKGEAGEMGL

SEQ ID NO: 16655 - protein, 11 aa, Homo sapiens
  Table A; Target 16655; HLA-A*02:03; COL23A1; ENSG00000050767; TAA
GLKGEAGEMGL

SEQ ID NO: 16656 - protein, 10 aa, Homo sapiens
  Table A; Target 16656; HLA-A*02:03; COL23A1; ENSG00000050767; TAA
GLKGEQGDTV

SEQ ID NO: 16657 - protein, 11 aa, Homo sapiens
  Table A; Target 16657; HLA-A*02:07; COL23A1; ENSG00000050767; TAA
GLPGPVGPPGL

SEQ ID NO: 16658 - protein, 9 aa, Homo sapiens
  Table A; Target 16658; HLA-A*03:01; COL23A1; ENSG00000050767; TAA
GLQGIQGPK

SEQ ID NO: 16659 - protein, 9 aa, Homo sapiens
  Table A; Target 16659; HLA-A*03:02; COL23A1; ENSG00000050767; TAA
GLQGIQGPK

SEQ ID NO: 16660 - protein, 9 aa, Homo sapiens
  Table A; Target 16660; HLA-A*11:01; COL23A1; ENSG00000050767; TAA
GLQGIQGPK

SEQ ID NO: 16661 - protein, 9 aa, Homo sapiens
  Table A; Target 16661; HLA-B*27:05; COL23A1; ENSG00000050767; TAA
GLQGIQGPK

SEQ ID NO: 16662 - protein, 9 aa, Homo sapiens
  Table A; Target 16662; HLA-B*56:01; COL23A1; ENSG00000050767; TAA
GPAGLKGEA

SEQ ID NO: 16663 - protein, 9 aa, Homo sapiens
  Table A; Target 16663; HLA-B*07:02; COL23A1; ENSG00000050767; TAA
GPAGPKGEP

SEQ ID NO: 16664 - protein, 9 aa, Homo sapiens
  Table A; Target 16664; HLA-C*07:02; COL23A1; ENSG00000050767; TAA
GPAGPKGEP

SEQ ID NO: 16665 - protein, 9 aa, Homo sapiens
  Table A; Target 16665; HLA-B*07:02; COL23A1; ENSG00000050767; TAA
GPKGEPGSM

SEQ ID NO: 16666 - protein, 9 aa, Homo sapiens
  Table A; Target 16666; HLA-C*07:02; COL23A1; ENSG00000050767; TAA
GPKGEPGSM

SEQ ID NO: 16667 - protein, 9 aa, Homo sapiens
  Table A; Target 16667; HLA-C*07:02; COL23A1; ENSG00000050767; TAA
GPKGPPGPK

SEQ ID NO: 16668 - protein, 10 aa, Homo sapiens
  Table A; Target 16668; HLA-B*56:01; COL23A1; ENSG00000050767; TAA
GPMGLQGIQG

SEQ ID NO: 16669 - protein, 9 aa, Homo sapiens
  Table A; Target 16669; HLA-B*07:02; COL23A1; ENSG00000050767; TAA
GPPGPPGPM

SEQ ID NO: 16670 - protein, 9 aa, Homo sapiens
  Table A; Target 16670; HLA-C*07:02; COL23A1; ENSG00000050767; TAA
GPPGPPGPM

SEQ ID NO: 16671 - protein, 8 aa, Homo sapiens
  Table A; Target 16671; HLA-B*07:02; COL23A1; ENSG00000050767; TAA
GPRGAPGL

SEQ ID NO: 16672 - protein, 8 aa, Homo sapiens
  Table A; Target 16672; HLA-C*07:02; COL23A1; ENSG00000050767; TAA
GPRGAPGL

SEQ ID NO: 16673 - protein, 9 aa, Homo sapiens
  Table A; Target 16673; HLA-B*07:02; COL23A1; ENSG00000050767; TAA
GPRGAPGLK

SEQ ID NO: 16674 - protein, 10 aa, Homo sapiens
  Table A; Target 16674; HLA-B*07:02; COL23A1; ENSG00000050767; TAA
GPRGAPGLKG

SEQ ID NO: 16675 - protein, 9 aa, Homo sapiens
  Table A; Target 16675; HLA-B*07:02; COL23A1; ENSG00000050767; TAA
GPRGAQGPA

SEQ ID NO: 16676 - protein, 9 aa, Homo sapiens
  Table A; Target 16676; HLA-C*07:02; COL23A1; ENSG00000050767; TAA
GPRGAQGPA

SEQ ID NO: 16677 - protein, 11 aa, Homo sapiens
  Table A; Target 16677; HLA-B*07:02; COL23A1; ENSG00000050767; TAA
GPRGAQGPAGP

SEQ ID NO: 16678 - protein, 11 aa, Homo sapiens
  Table A; Target 16678; HLA-C*07:02; COL23A1; ENSG00000050767; TAA
GPRGAQGPAGP

SEQ ID NO: 16679 - protein, 9 aa, Homo sapiens
  Table A; Target 16679; HLA-B*07:02; COL23A1; ENSG00000050767; TAA
GPSGLPGPV

SEQ ID NO: 16680 - protein, 9 aa, Homo sapiens
  Table A; Target 16680; HLA-B*56:01; COL23A1; ENSG00000050767; TAA
GPSGLPGPV

SEQ ID NO: 16681 - protein, 10 aa, Homo sapiens
  Table A; Target 16681; HLA-B*56:01; COL23A1; ENSG00000050767; TAA
GPSGLPGPVG

SEQ ID NO: 16682 - protein, 11 aa, Homo sapiens
  Table A; Target 16682; HLA-B*56:01; COL23A1; ENSG00000050767; TAA
GPVGPPGLIGL

SEQ ID NO: 16683 - protein, 9 aa, Homo sapiens
  Table A; Target 16683; HLA-C*07:04; COL23A1; ENSG00000050767; TAA
GQKGEPGPP

SEQ ID NO: 16684 - protein, 11 aa, Homo sapiens
  Table A; Target 16684; HLA-B*27:05; COL23A1; ENSG00000050767; TAA
GRDGYPGPLGL

SEQ ID NO: 16685 - protein, 9 aa, Homo sapiens
  Table A; Target 16685; HLA-B*27:05; COL23A1; ENSG00000050767; TAA
GRSATTAGS

SEQ ID NO: 16686 - protein, 10 aa, Homo sapiens
  Table A; Target 16686; HLA-B*27:05; COL23A1; ENSG00000050767; TAA
GRSATTAGSR

SEQ ID NO: 16687 - protein, 10 aa, Homo sapiens
  Table A; Target 16687; HLA-B*27:02; COL23A1; ENSG00000050767; TAA
GRVAALEEER

SEQ ID NO: 16688 - protein, 10 aa, Homo sapiens
  Table A; Target 16688; HLA-B*27:05; COL23A1; ENSG00000050767; TAA
GRVAALEEER

SEQ ID NO: 16689 - protein, 9 aa, Homo sapiens
  Table A; Target 16689; HLA-A*03:01; COL23A1; ENSG00000050767; TAA
GTDGAAGPR

SEQ ID NO: 16690 - protein, 9 aa, Homo sapiens
  Table A; Target 16690; HLA-A*03:02; COL23A1; ENSG00000050767; TAA
GTDGAAGPR

SEQ ID NO: 16691 - protein, 9 aa, Homo sapiens
  Table A; Target 16691; HLA-A*11:01; COL23A1; ENSG00000050767; TAA
GTDGAAGPR

SEQ ID NO: 16692 - protein, 9 aa, Homo sapiens
  Table A; Target 16692; HLA-A*31:01; COL23A1; ENSG00000050767; TAA
GTDGAAGPR

SEQ ID NO: 16693 - protein, 9 aa, Homo sapiens
  Table A; Target 16693; HLA-A*33:03; COL23A1; ENSG00000050767; TAA
GTDGAAGPR

SEQ ID NO: 16694 - protein, 9 aa, Homo sapiens
  Table A; Target 16694; HLA-A*68:01; COL23A1; ENSG00000050767; TAA
GTDGAAGPR

SEQ ID NO: 16695 - protein, 9 aa, Homo sapiens
  Table A; Target 16695; HLA-C*07:06; COL23A1; ENSG00000050767; TAA
GTDGAAGPR

SEQ ID NO: 16696 - protein, 10 aa, Homo sapiens
  Table A; Target 16696; HLA-A*11:01; COL23A1; ENSG00000050767; TAA
GTPSQPGPPG

SEQ ID NO: 16697 - protein, 9 aa, Homo sapiens
  Table A; Target 16697; HLA-A*03:01; COL23A1; ENSG00000050767; TAA
GVDGAPGPK

SEQ ID NO: 16698 - protein, 9 aa, Homo sapiens
  Table A; Target 16698; HLA-A*03:02; COL23A1; ENSG00000050767; TAA
GVDGAPGPK

SEQ ID NO: 16699 - protein, 9 aa, Homo sapiens
  Table A; Target 16699; HLA-A*11:01; COL23A1; ENSG00000050767; TAA
GVDGAPGPK

SEQ ID NO: 16700 - protein, 9 aa, Homo sapiens
  Table A; Target 16700; HLA-A*68:01; COL23A1; ENSG00000050767; TAA
GVDGAPGPK

SEQ ID NO: 16701 - protein, 9 aa, Homo sapiens
  Table A; Target 16701; HLA-C*05:01; COL23A1; ENSG00000050767; TAA
GVDGAPGPK

SEQ ID NO: 16702 - protein, 10 aa, Homo sapiens
  Table A; Target 16702; HLA-A*03:02; COL23A1; ENSG00000050767; TAA
GVQAAALQGR

SEQ ID NO: 16703 - protein, 10 aa, Homo sapiens
  Table A; Target 16703; HLA-A*11:01; COL23A1; ENSG00000050767; TAA
GVQAAALQGR

SEQ ID NO: 16704 - protein, 10 aa, Homo sapiens
  Table A; Target 16704; HLA-A*31:01; COL23A1; ENSG00000050767; TAA
GVQAAALQGR

SEQ ID NO: 16705 - protein, 10 aa, Homo sapiens
  Table A; Target 16705; HLA-A*33:03; COL23A1; ENSG00000050767; TAA
GVQAAALQGR

SEQ ID NO: 16706 - protein, 10 aa, Homo sapiens
  Table A; Target 16706; HLA-A*68:01; COL23A1; ENSG00000050767; TAA
GVQAAALQGR

SEQ ID NO: 16707 - protein, 10 aa, Homo sapiens
  Table A; Target 16707; HLA-C*07:06; COL23A1; ENSG00000050767; TAA
GVQAAALQGR

SEQ ID NO: 16708 - protein, 8 aa, Homo sapiens
  Table A; Target 16708; HLA-C*03:04; COL23A1; ENSG00000050767; TAA
IDYDGRIL

SEQ ID NO: 16709 - protein, 11 aa, Homo sapiens
  Table A; Target 16709; HLA-A*30:01; COL23A1; ENSG00000050767; TAA
IDYDGRILDAL

SEQ ID NO: 16710 - protein, 11 aa, Homo sapiens
  Table A; Target 16710; HLA-B*40:01; COL23A1; ENSG00000050767; TAA
IDYDGRILDAL

SEQ ID NO: 16711 - protein, 11 aa, Homo sapiens
  Table A; Target 16711; HLA-B*40:02; COL23A1; ENSG00000050767; TAA
IDYDGRILDAL

SEQ ID NO: 16712 - protein, 11 aa, Homo sapiens
  Table A; Target 16712; HLA-C*06:02; COL23A1; ENSG00000050767; TAA
IDYDGRILDAL

SEQ ID NO: 16713 - protein, 8 aa, Homo sapiens
  Table A; Target 16713; HLA-B*07:02; COL23A1; ENSG00000050767; TAA
IPGAKGEL

SEQ ID NO: 16714 - protein, 8 aa, Homo sapiens
  Table A; Target 16714; HLA-B*08:01; COL23A1; ENSG00000050767; TAA
IPGAKGEL

SEQ ID NO: 16715 - protein, 8 aa, Homo sapiens
  Table A; Target 16715; HLA-C*07:02; COL23A1; ENSG00000050767; TAA
IPGAKGEL

SEQ ID NO: 16716 - protein, 10 aa, Homo sapiens
  Table A; Target 16716; HLA-B*07:02; COL23A1; ENSG00000050767; TAA
IVEPGPPGPP

SEQ ID NO: 16717 - protein, 10 aa, Homo sapiens
  Table A; Target 16717; HLA-B*27:05; COL23A1; ENSG00000050767; TAA
IVEPGPPGPP

SEQ ID NO: 16718 - protein, 10 aa, Homo sapiens
  Table A; Target 16718; HLA-C*04:01; COL23A1; ENSG00000050767; TAA
IVEPGPPGPP

SEQ ID NO: 16719 - protein, 10 aa, Homo sapiens
  Table A; Target 16719; HLA-C*05:01; COL23A1; ENSG00000050767; TAA
IVEPGPPGPP

SEQ ID NO: 16720 - protein, 10 aa, Homo sapiens
  Table A; Target 16720; HLA-C*06:02; COL23A1; ENSG00000050767; TAA
IVEPGPPGPP

SEQ ID NO: 16721 - protein, 10 aa, Homo sapiens
  Table A; Target 16721; HLA-C*07:02; COL23A1; ENSG00000050767; TAA
IVEPGPPGPP

SEQ ID NO: 16722 - protein, 10 aa, Homo sapiens
  Table A; Target 16722; HLA-C*07:04; COL23A1; ENSG00000050767; TAA
IVEPGPPGPP

SEQ ID NO: 16723 - protein, 10 aa, Homo sapiens
  Table A; Target 16723; HLA-A*31:01; COL23A1; ENSG00000050767; TAA
KGAPGDFGPR

SEQ ID NO: 16724 - protein, 9 aa, Homo sapiens
  Table A; Target 16724; HLA-A*32:01; COL23A1; ENSG00000050767; TAA
KGASGERGP

SEQ ID NO: 16725 - protein, 9 aa, Homo sapiens
  Table A; Target 16725; HLA-A*03:02; COL23A1; ENSG00000050767; TAA
KGEPGVPGK

SEQ ID NO: 16726 - protein, 9 aa, Homo sapiens
  Table A; Target 16726; HLA-A*32:01; COL23A1; ENSG00000050767; TAA
KGPPGPQGP

SEQ ID NO: 16727 - protein, 10 aa, Homo sapiens
  Table A; Target 16727; HLA-C*04:01; COL23A1; ENSG00000050767; TAA
KGPPGPQGPP

SEQ ID NO: 16728 - protein, 10 aa, Homo sapiens
  Table A; Target 16728; HLA-C*06:02; COL23A1; ENSG00000050767; TAA
KGPPGPQGPP

SEQ ID NO: 16729 - protein, 10 aa, Homo sapiens
  Table A; Target 16729; HLA-C*07:02; COL23A1; ENSG00000050767; TAA
KGPPGPQGPP

SEQ ID NO: 16730 - protein, 11 aa, Homo sapiens
  Table A; Target 16730; HLA-C*06:02; COL23A1; ENSG00000050767; TAA
KGPPGPQGPPG

SEQ ID NO: 16731 - protein, 8 aa, Homo sapiens
  Table A; Target 16731; HLA-A*02:07; COL23A1; ENSG00000050767; TAA
KLDGLAKI

SEQ ID NO: 16732 - protein, 8 aa, Homo sapiens
  Table A; Target 16732; HLA-B*40:01; COL23A1; ENSG00000050767; TAA
LEEERELL

SEQ ID NO: 16733 - protein, 9 aa, Homo sapiens
  Table A; Target 16733; HLA-A*02:01; COL23A1; ENSG00000050767; TAA
LGLPGAPGI

SEQ ID NO: 16734 - protein, 9 aa, Homo sapiens
  Table A; Target 16734; HLA-B*13:02; COL23A1; ENSG00000050767; TAA
LGLPGAPGI

SEQ ID NO: 16735 - protein, 9 aa, Homo sapiens
  Table A; Target 16735; HLA-B*51:01; COL23A1; ENSG00000050767; TAA
LGLPGAPGI

SEQ ID NO: 16736 - protein, 8 aa, Homo sapiens
  Table A; Target 16736; HLA-C*03:03; COL23A1; ENSG00000050767; TAA
LGVQAAAL

SEQ ID NO: 16737 - protein, 8 aa, Homo sapiens
  Table A; Target 16737; HLA-C*03:04; COL23A1; ENSG00000050767; TAA
LGVQAAAL

SEQ ID NO: 16738 - protein, 8 aa, Homo sapiens
  Table A; Target 16738; HLA-C*16:01; COL23A1; ENSG00000050767; TAA
LGVQAAAL

SEQ ID NO: 16739 - protein, 9 aa, Homo sapiens
  Table A; Target 16739; HLA-C*03:03; COL23A1; ENSG00000050767; TAA
LIVEPGPPG

SEQ ID NO: 16740 - protein, 9 aa, Homo sapiens
  Table A; Target 16740; HLA-C*03:04; COL23A1; ENSG00000050767; TAA
LIVEPGPPG

SEQ ID NO: 16741 - protein, 9 aa, Homo sapiens
  Table A; Target 16741; HLA-A*02:03; COL23A1; ENSG00000050767; TAA
LLGVQAAAL

SEQ ID NO: 16742 - protein, 9 aa, Homo sapiens
  Table A; Target 16742; HLA-A*02:04; COL23A1; ENSG00000050767; TAA
LLGVQAAAL

SEQ ID NO: 16743 - protein, 9 aa, Homo sapiens
  Table A; Target 16743; HLA-B*08:01; COL23A1; ENSG00000050767; TAA
LLGVQAAAL

SEQ ID NO: 16744 - protein, 9 aa, Homo sapiens
  Table A; Target 16744; HLA-C*01:02; COL23A1; ENSG00000050767; TAA
LLGVQAAAL

SEQ ID NO: 16745 - protein, 9 aa, Homo sapiens
  Table A; Target 16745; HLA-C*07:02; COL23A1; ENSG00000050767; TAA
LLGVQAAAL

SEQ ID NO: 16746 - protein, 9 aa, Homo sapiens
  Table A; Target 16746; HLA-C*07:04; COL23A1; ENSG00000050767; TAA
LLGVQAAAL

SEQ ID NO: 16747 - protein, 9 aa, Homo sapiens
  Table A; Target 16747; HLA-C*14:02; COL23A1; ENSG00000050767; TAA
LLGVQAAAL

SEQ ID NO: 16748 - protein, 8 aa, Homo sapiens
  Table A; Target 16748; HLA-A*02:01; COL23A1; ENSG00000050767; TAA
LLLGVQAA

SEQ ID NO: 16749 - protein, 9 aa, Homo sapiens
  Table A; Target 16749; HLA-A*02:01; COL23A1; ENSG00000050767; TAA
LLLGVQAAA

SEQ ID NO: 16750 - protein, 9 aa, Homo sapiens
  Table A; Target 16750; HLA-A*02:04; COL23A1; ENSG00000050767; TAA
LLLGVQAAA

SEQ ID NO: 16751 - protein, 9 aa, Homo sapiens
  Table A; Target 16751; HLA-B*54:01; COL23A1; ENSG00000050767; TAA
LLLGVQAAA

SEQ ID NO: 16752 - protein, 10 aa, Homo sapiens
  Table A; Target 16752; HLA-A*02:04; COL23A1; ENSG00000050767; TAA
LLLGVQAAAL

SEQ ID NO: 16753 - protein, 10 aa, Homo sapiens
  Table A; Target 16753; HLA-A*02:07; COL23A1; ENSG00000050767; TAA
LLLGVQAAAL

SEQ ID NO: 16754 - protein, 10 aa, Homo sapiens
  Table A; Target 16754; HLA-C*07:02; COL23A1; ENSG00000050767; TAA
LLLGVQAAAL

SEQ ID NO: 16755 - protein, 10 aa, Homo sapiens
  Table A; Target 16755; HLA-C*07:04; COL23A1; ENSG00000050767; TAA
LLLGVQAAAL

SEQ ID NO: 16756 - protein, 9 aa, Homo sapiens
  Table A; Target 16756; HLA-A*02:01; COL23A1; ENSG00000050767; TAA
LLLSVGSAA

SEQ ID NO: 16757 - protein, 9 aa, Homo sapiens
  Table A; Target 16757; HLA-A*02:03; COL23A1; ENSG00000050767; TAA
LLLSVGSAA

SEQ ID NO: 16758 - protein, 9 aa, Homo sapiens
  Table A; Target 16758; HLA-B*54:01; COL23A1; ENSG00000050767; TAA
LLLSVGSAA

SEQ ID NO: 16759 - protein, 9 aa, Homo sapiens
  Table A; Target 16759; HLA-B*55:01; COL23A1; ENSG00000050767; TAA
LLLSVGSAA

SEQ ID NO: 16760 - protein, 9 aa, Homo sapiens
  Table A; Target 16760; HLA-C*03:03; COL23A1; ENSG00000050767; TAA
LLLSVGSAA

SEQ ID NO: 16761 - protein, 9 aa, Homo sapiens
  Table A; Target 16761; HLA-C*14:02; COL23A1; ENSG00000050767; TAA
LLLSVGSAA

SEQ ID NO: 16762 - protein, 10 aa, Homo sapiens
  Table A; Target 16762; HLA-A*02:01; COL23A1; ENSG00000050767; TAA
LLLSVGSAAA

SEQ ID NO: 16763 - protein, 10 aa, Homo sapiens
  Table A; Target 16763; HLA-A*02:03; COL23A1; ENSG00000050767; TAA
LLLSVGSAAA

SEQ ID NO: 16764 - protein, 9 aa, Homo sapiens
  Table A; Target 16764; HLA-A*02:03; COL23A1; ENSG00000050767; TAA
LLREKLDGL

SEQ ID NO: 16765 - protein, 9 aa, Homo sapiens
  Table A; Target 16765; HLA-A*02:04; COL23A1; ENSG00000050767; TAA
LLREKLDGL

SEQ ID NO: 16766 - protein, 9 aa, Homo sapiens
  Table A; Target 16766; HLA-A*02:07; COL23A1; ENSG00000050767; TAA
LLREKLDGL

SEQ ID NO: 16767 - protein, 9 aa, Homo sapiens
  Table A; Target 16767; HLA-B*08:01; COL23A1; ENSG00000050767; TAA
LLREKLDGL

SEQ ID NO: 16768 - protein, 8 aa, Homo sapiens
  Table A; Target 16768; HLA-C*01:02; COL23A1; ENSG00000050767; TAA
LLSVGSAA

SEQ ID NO: 16769 - protein, 8 aa, Homo sapiens
  Table A; Target 16769; HLA-C*14:02; COL23A1; ENSG00000050767; TAA
LLSVGSAA

SEQ ID NO: 16770 - protein, 9 aa, Homo sapiens
  Table A; Target 16770; HLA-A*02:01; COL23A1; ENSG00000050767; TAA
LLSVGSAAA

SEQ ID NO: 16771 - protein, 9 aa, Homo sapiens
  Table A; Target 16771; HLA-A*02:03; COL23A1; ENSG00000050767; TAA
LLSVGSAAA

SEQ ID NO: 16772 - protein, 9 aa, Homo sapiens
  Table A; Target 16772; HLA-B*39:01; COL23A1; ENSG00000050767; TAA
LLSVGSAAA

SEQ ID NO: 16773 - protein, 9 aa, Homo sapiens
  Table A; Target 16773; HLA-C*14:02; COL23A1; ENSG00000050767; TAA
LLSVGSAAA

SEQ ID NO: 16774 - protein, 9 aa, Homo sapiens
  Table A; Target 16774; HLA-B*07:02; COL23A1; ENSG00000050767; TAA
LPGPVGPPG

SEQ ID NO: 16775 - protein, 9 aa, Homo sapiens
  Table A; Target 16775; HLA-B*35:01; COL23A1; ENSG00000050767; TAA
LPGPVGPPG

SEQ ID NO: 16776 - protein, 9 aa, Homo sapiens
  Table A; Target 16776; HLA-B*35:03; COL23A1; ENSG00000050767; TAA
LPGPVGPPG

SEQ ID NO: 16777 - protein, 9 aa, Homo sapiens
  Table A; Target 16777; HLA-B*54:01; COL23A1; ENSG00000050767; TAA
LPGPVGPPG

SEQ ID NO: 16778 - protein, 9 aa, Homo sapiens
  Table A; Target 16778; HLA-B*56:01; COL23A1; ENSG00000050767; TAA
LPGPVGPPG

SEQ ID NO: 16779 - protein, 9 aa, Homo sapiens
  Table A; Target 16779; HLA-C*04:01; COL23A1; ENSG00000050767; TAA
LPGPVGPPG

SEQ ID NO: 16780 - protein, 10 aa, Homo sapiens
  Table A; Target 16780; HLA-B*07:02; COL23A1; ENSG00000050767; TAA
LPGPVGPPGL

SEQ ID NO: 16781 - protein, 10 aa, Homo sapiens
  Table A; Target 16781; HLA-B*35:03; COL23A1; ENSG00000050767; TAA
LPGPVGPPGL

SEQ ID NO: 16782 - protein, 10 aa, Homo sapiens
  Table A; Target 16782; HLA-B*56:01; COL23A1; ENSG00000050767; TAA
LPGPVGPPGL

SEQ ID NO: 16783 - protein, 8 aa, Homo sapiens
  Table A; Target 16783; HLA-C*05:01; COL23A1; ENSG00000050767; TAA
LQESLAQL

SEQ ID NO: 16784 - protein, 9 aa, Homo sapiens
  Table A; Target 16784; HLA-B*13:02; COL23A1; ENSG00000050767; TAA
LQESLAQLI

SEQ ID NO: 16785 - protein, 9 aa, Homo sapiens
  Table A; Target 16785; HLA-B*38:01; COL23A1; ENSG00000050767; TAA
LQESLAQLI

SEQ ID NO: 16786 - protein, 9 aa, Homo sapiens
  Table A; Target 16786; HLA-C*07:04; COL23A1; ENSG00000050767; TAA
LQESLAQLI

SEQ ID NO: 16787 - protein, 8 aa, Homo sapiens
  Table A; Target 16787; HLA-A*32:01; COL23A1; ENSG00000050767; TAA
LQGRVAAL

SEQ ID NO: 16788 - protein, 8 aa, Homo sapiens
  Table A; Target 16788; HLA-B*08:01; COL23A1; ENSG00000050767; TAA
LQGRVAAL

SEQ ID NO: 16789 - protein, 8 aa, Homo sapiens
  Table A; Target 16789; HLA-B*15:01; COL23A1; ENSG00000050767; TAA
LQGRVAAL

SEQ ID NO: 16790 - protein, 8 aa, Homo sapiens
  Table A; Target 16790; HLA-C*07:04; COL23A1; ENSG00000050767; TAA
LQGRVAAL

SEQ ID NO: 16791 - protein, 8 aa, Homo sapiens
  Table A; Target 16791; HLA-C*12:03; COL23A1; ENSG00000050767; TAA
LQGRVAAL

SEQ ID NO: 16792 - protein, 10 aa, Homo sapiens
  Table A; Target 16792; HLA-C*07:02; COL23A1; ENSG00000050767; TAA
LSGLPGADGL

SEQ ID NO: 16793 - protein, 9 aa, Homo sapiens
  Table A; Target 16793; HLA-C*03:03; COL23A1; ENSG00000050767; TAA
LSVGSAAAC

SEQ ID NO: 16794 - protein, 9 aa, Homo sapiens
  Table A; Target 16794; HLA-C*03:04; COL23A1; ENSG00000050767; TAA
LSVGSAAAC

SEQ ID NO: 16795 - protein, 10 aa, Homo sapiens
  Table A; Target 16795; HLA-B*07:02; COL23A1; ENSG00000050767; TAA
LSVGSAAACL

SEQ ID NO: 16796 - protein, 9 aa, Homo sapiens
  Table A; Target 16796; HLA-B*54:01; COL23A1; ENSG00000050767; TAA
MGLSGLPGA

SEQ ID NO: 16797 - protein, 9 aa, Homo sapiens
  Table A; Target 16797; HLA-B*56:01; COL23A1; ENSG00000050767; TAA
MGLSGLPGA

SEQ ID NO: 16798 - protein, 10 aa, Homo sapiens
  Table A; Target 16798; HLA-C*07:02; COL23A1; ENSG00000050767; TAA
MGPKGPPGPK

SEQ ID NO: 16799 - protein, 10 aa, Homo sapiens
  Table A; Target 16799; HLA-A*33:01; COL23A1; ENSG00000050767; TAA
NAAGGGGGGR

SEQ ID NO: 16800 - protein, 10 aa, Homo sapiens
  Table A; Target 16800; HLA-A*33:03; COL23A1; ENSG00000050767; TAA
NAAGGGGGGR

SEQ ID NO: 16801 - protein, 10 aa, Homo sapiens
  Table A; Target 16801; HLA-A*68:01; COL23A1; ENSG00000050767; TAA
NAAGGGGGGR

SEQ ID NO: 16802 - protein, 10 aa, Homo sapiens
  Table A; Target 16802; HLA-C*07:06; COL23A1; ENSG00000050767; TAA
NAAGGGGGGR

SEQ ID NO: 16803 - protein, 10 aa, Homo sapiens
  Table A; Target 16803; HLA-B*27:02; COL23A1; ENSG00000050767; TAA
NGVDGAPGPK

SEQ ID NO: 16804 - protein, 10 aa, Homo sapiens
  Table A; Target 16804; HLA-C*07:02; COL23A1; ENSG00000050767; TAA
PGPPGPPGPM

SEQ ID NO: 16805 - protein, 10 aa, Homo sapiens
  Table A; Target 16805; HLA-C*07:02; COL23A1; ENSG00000050767; TAA
PGPPGPPGPP

SEQ ID NO: 16806 - protein, 10 aa, Homo sapiens
  Table A; Target 16806; HLA-B*27:02; COL23A1; ENSG00000050767; TAA
PGQDGEMGPK

SEQ ID NO: 16807 - protein, 10 aa, Homo sapiens
  Table A; Target 16807; HLA-A*03:02; COL23A1; ENSG00000050767; TAA
PSQPGPPGPK

SEQ ID NO: 16808 - protein, 10 aa, Homo sapiens
  Table A; Target 16808; HLA-A*11:01; COL23A1; ENSG00000050767; TAA
PSQPGPPGPK

SEQ ID NO: 16809 - protein, 9 aa, Homo sapiens
  Table A; Target 16809; HLA-C*16:02; COL23A1; ENSG00000050767; TAA
QAAALQGRV

SEQ ID NO: 16810 - protein, 10 aa, Homo sapiens
  Table A; Target 16810; HLA-B*54:01; COL23A1; ENSG00000050767; TAA
QAAALQGRVA

SEQ ID NO: 16811 - protein, 10 aa, Homo sapiens
  Table A; Target 16811; HLA-B*56:01; COL23A1; ENSG00000050767; TAA
QAAALQGRVA

SEQ ID NO: 16812 - protein, 10 aa, Homo sapiens
  Table A; Target 16812; HLA-C*06:02; COL23A1; ENSG00000050767; TAA
QAAALQGRVA

SEQ ID NO: 16813 - protein, 10 aa, Homo sapiens
  Table A; Target 16813; HLA-C*07:01; COL23A1; ENSG00000050767; TAA
QAAALQGRVA

SEQ ID NO: 16814 - protein, 10 aa, Homo sapiens
  Table A; Target 16814; HLA-C*12:03; COL23A1; ENSG00000050767; TAA
QAAALQGRVA

SEQ ID NO: 16815 - protein, 10 aa, Homo sapiens
  Table A; Target 16815; HLA-C*16:01; COL23A1; ENSG00000050767; TAA
QAAALQGRVA

SEQ ID NO: 16816 - protein, 10 aa, Homo sapiens
  Table A; Target 16816; HLA-C*16:02; COL23A1; ENSG00000050767; TAA
QAAALQGRVA

SEQ ID NO: 16817 - protein, 11 aa, Homo sapiens
  Table A; Target 16817; HLA-B*54:01; COL23A1; ENSG00000050767; TAA
QAAALQGRVAA

SEQ ID NO: 16818 - protein, 11 aa, Homo sapiens
  Table A; Target 16818; HLA-B*56:01; COL23A1; ENSG00000050767; TAA
QAAALQGRVAA

SEQ ID NO: 16819 - protein, 8 aa, Homo sapiens
  Table A; Target 16819; HLA-B*13:02; COL23A1; ENSG00000050767; TAA
QESLAQLI

SEQ ID NO: 16820 - protein, 8 aa, Homo sapiens
  Table A; Target 16820; HLA-B*18:01; COL23A1; ENSG00000050767; TAA
QESLAQLI

SEQ ID NO: 16821 - protein, 8 aa, Homo sapiens
  Table A; Target 16821; HLA-B*37:01; COL23A1; ENSG00000050767; TAA
QESLAQLI

SEQ ID NO: 16822 - protein, 8 aa, Homo sapiens
  Table A; Target 16822; HLA-B*44:02; COL23A1; ENSG00000050767; TAA
QESLAQLI

SEQ ID NO: 16823 - protein, 8 aa, Homo sapiens
  Table A; Target 16823; HLA-B*49:01; COL23A1; ENSG00000050767; TAA
QESLAQLI

SEQ ID NO: 16824 - protein, 9 aa, Homo sapiens
  Table A; Target 16824; HLA-A*30:01; COL23A1; ENSG00000050767; TAA
QESLAQLIV

SEQ ID NO: 16825 - protein, 9 aa, Homo sapiens
  Table A; Target 16825; HLA-B*13:02; COL23A1; ENSG00000050767; TAA
QESLAQLIV

SEQ ID NO: 16826 - protein, 9 aa, Homo sapiens
  Table A; Target 16826; HLA-B*18:01; COL23A1; ENSG00000050767; TAA
QESLAQLIV

SEQ ID NO: 16827 - protein, 9 aa, Homo sapiens
  Table A; Target 16827; HLA-B*49:01; COL23A1; ENSG00000050767; TAA
QESLAQLIV

SEQ ID NO: 16828 - protein, 9 aa, Homo sapiens
  Table A; Target 16828; HLA-A*01:01; COL23A1; ENSG00000050767; TAA
QGDTVVIDY

SEQ ID NO: 16829 - protein, 9 aa, Homo sapiens
  Table A; Target 16829; HLA-B*35:01; COL23A1; ENSG00000050767; TAA
QGDTVVIDY

SEQ ID NO: 16830 - protein, 9 aa, Homo sapiens
  Table A; Target 16830; HLA-B*55:01; COL23A1; ENSG00000050767; TAA
QGDTVVIDY

SEQ ID NO: 16831 - protein, 10 aa, Homo sapiens
  Table A; Target 16831; HLA-C*04:01; COL23A1; ENSG00000050767; TAA
QGQDGAAGPP

SEQ ID NO: 16832 - protein, 10 aa, Homo sapiens
  Table A; Target 16832; HLA-C*06:02; COL23A1; ENSG00000050767; TAA
QLIVEPGPPG

SEQ ID NO: 16833 - protein, 8 aa, Homo sapiens
  Table A; Target 16833; HLA-A*32:01; COL23A1; ENSG00000050767; TAA
RAGPPGAL

SEQ ID NO: 16834 - protein, 8 aa, Homo sapiens
  Table A; Target 16834; HLA-B*07:02; COL23A1; ENSG00000050767; TAA
RAGPPGAL

SEQ ID NO: 16835 - protein, 8 aa, Homo sapiens
  Table A; Target 16835; HLA-C*03:04; COL23A1; ENSG00000050767; TAA
RAGPPGAL

SEQ ID NO: 16836 - protein, 8 aa, Homo sapiens
  Table A; Target 16836; HLA-C*05:01; COL23A1; ENSG00000050767; TAA
RAGPPGAL

SEQ ID NO: 16837 - protein, 8 aa, Homo sapiens
  Table A; Target 16837; HLA-C*12:03; COL23A1; ENSG00000050767; TAA
RAGPPGAL

SEQ ID NO: 16838 - protein, 11 aa, Homo sapiens
  Table A; Target 16838; HLA-A*24:02; COL23A1; ENSG00000050767; TAA
RAGPPGALDAW

SEQ ID NO: 16839 - protein, 11 aa, Homo sapiens
  Table A; Target 16839; HLA-A*25:01; COL23A1; ENSG00000050767; TAA
RAGPPGALDAW

SEQ ID NO: 16840 - protein, 11 aa, Homo sapiens
  Table A; Target 16840; HLA-A*30:02; COL23A1; ENSG00000050767; TAA
RAGPPGALDAW

SEQ ID NO: 16841 - protein, 11 aa, Homo sapiens
  Table A; Target 16841; HLA-A*31:01; COL23A1; ENSG00000050767; TAA
RAGPPGALDAW

SEQ ID NO: 16842 - protein, 11 aa, Homo sapiens
  Table A; Target 16842; HLA-A*32:01; COL23A1; ENSG00000050767; TAA
RAGPPGALDAW

SEQ ID NO: 16843 - protein, 11 aa, Homo sapiens
  Table A; Target 16843; HLA-B*44:02; COL23A1; ENSG00000050767; TAA
RAGPPGALDAW

SEQ ID NO: 16844 - protein, 11 aa, Homo sapiens
  Table A; Target 16844; HLA-B*44:03; COL23A1; ENSG00000050767; TAA
RAGPPGALDAW

SEQ ID NO: 16845 - protein, 11 aa, Homo sapiens
  Table A; Target 16845; HLA-B*57:01; COL23A1; ENSG00000050767; TAA
RAGPPGALDAW

SEQ ID NO: 16846 - protein, 11 aa, Homo sapiens
  Table A; Target 16846; HLA-B*58:01; COL23A1; ENSG00000050767; TAA
RAGPPGALDAW

SEQ ID NO: 16847 - protein, 11 aa, Homo sapiens
  Table A; Target 16847; HLA-C*16:04; COL23A1; ENSG00000050767; TAA
RAGPPGALDAW

SEQ ID NO: 16848 - protein, 8 aa, Homo sapiens
  Table A; Target 16848; HLA-C*03:04; COL23A1; ENSG00000050767; TAA
RAVSALCL

SEQ ID NO: 16849 - protein, 8 aa, Homo sapiens
  Table A; Target 16849; HLA-B*37:01; COL23A1; ENSG00000050767; TAA
REAPSECV

SEQ ID NO: 16850 - protein, 8 aa, Homo sapiens
  Table A; Target 16850; HLA-B*49:01; COL23A1; ENSG00000050767; TAA
REAPSECV

SEQ ID NO: 16851 - protein, 9 aa, Homo sapiens
  Table A; Target 16851; HLA-A*30:01; COL23A1; ENSG00000050767; TAA
REAPSECVC

SEQ ID NO: 16852 - protein, 9 aa, Homo sapiens
  Table A; Target 16852; HLA-B*40:01; COL23A1; ENSG00000050767; TAA
REAPSECVC

SEQ ID NO: 16853 - protein, 9 aa, Homo sapiens
  Table A; Target 16853; HLA-B*40:02; COL23A1; ENSG00000050767; TAA
REAPSECVC

SEQ ID NO: 16854 - protein, 10 aa, Homo sapiens
  Table A; Target 16854; HLA-B*40:02; COL23A1; ENSG00000050767; TAA
REKLDGLAKI

SEQ ID NO: 16855 - protein, 10 aa, Homo sapiens
  Table A; Target 16855; HLA-B*44:02; COL23A1; ENSG00000050767; TAA
REKLDGLAKI

SEQ ID NO: 16856 - protein, 10 aa, Homo sapiens
  Table A; Target 16856; HLA-B*49:01; COL23A1; ENSG00000050767; TAA
REKLDGLAKI

SEQ ID NO: 16857 - protein, 10 aa, Homo sapiens
  Table A; Target 16857; HLA-A*03:01; COL23A1; ENSG00000050767; TAA
RGAQGPAGPK

SEQ ID NO: 16858 - protein, 10 aa, Homo sapiens
  Table A; Target 16858; HLA-A*03:02; COL23A1; ENSG00000050767; TAA
RGAQGPAGPK

SEQ ID NO: 16859 - protein, 10 aa, Homo sapiens
  Table A; Target 16859; HLA-C*06:02; COL23A1; ENSG00000050767; TAA
RILDALKGPP

SEQ ID NO: 16860 - protein, 10 aa, Homo sapiens
  Table A; Target 16860; HLA-A*02:04; COL23A1; ENSG00000050767; TAA
RLLREKLDGL

SEQ ID NO: 16861 - protein, 11 aa, Homo sapiens
  Table A; Target 16861; HLA-C*06:02; COL23A1; ENSG00000050767; TAA
RSATTAGSRAV

SEQ ID NO: 16862 - protein, 9 aa, Homo sapiens
  Table A; Target 16862; HLA-A*02:01; COL23A1; ENSG00000050767; TAA
SALCLLLSV

SEQ ID NO: 16863 - protein, 9 aa, Homo sapiens
  Table A; Target 16863; HLA-B*51:01; COL23A1; ENSG00000050767; TAA
SALCLLLSV

SEQ ID NO: 16864 - protein, 10 aa, Homo sapiens
  Table A; Target 16864; HLA-B*35:03; COL23A1; ENSG00000050767; TAA
SASDSLQESL

SEQ ID NO: 16865 - protein, 10 aa, Homo sapiens
  Table A; Target 16865; HLA-B*38:01; COL23A1; ENSG00000050767; TAA
SASDSLQESL

SEQ ID NO: 16866 - protein, 10 aa, Homo sapiens
  Table A; Target 16866; HLA-B*39:01; COL23A1; ENSG00000050767; TAA
SASDSLQESL

SEQ ID NO: 16867 - protein, 10 aa, Homo sapiens
  Table A; Target 16867; HLA-C*07:06; COL23A1; ENSG00000050767; TAA
SASDSLQESL

SEQ ID NO: 16868 - protein, 8 aa, Homo sapiens
  Table A; Target 16868; HLA-C*07:06; COL23A1; ENSG00000050767; TAA
SATTAGSR

SEQ ID NO: 16869 - protein, 9 aa, Homo sapiens
  Table A; Target 16869; HLA-C*16:01; COL23A1; ENSG00000050767; TAA
SATTAGSRA

SEQ ID NO: 16870 - protein, 9 aa, Homo sapiens
  Table A; Target 16870; HLA-C*16:02; COL23A1; ENSG00000050767; TAA
SATTAGSRA

SEQ ID NO: 16871 - protein, 10 aa, Homo sapiens
  Table A; Target 16871; HLA-C*03:04; COL23A1; ENSG00000050767; TAA
SATTAGSRAV

SEQ ID NO: 16872 - protein, 10 aa, Homo sapiens
  Table A; Target 16872; HLA-C*06:02; COL23A1; ENSG00000050767; TAA
SATTAGSRAV

SEQ ID NO: 16873 - protein, 10 aa, Homo sapiens
  Table A; Target 16873; HLA-C*16:01; COL23A1; ENSG00000050767; TAA
SATTAGSRAV

SEQ ID NO: 16874 - protein, 10 aa, Homo sapiens
  Table A; Target 16874; HLA-C*16:02; COL23A1; ENSG00000050767; TAA
SATTAGSRAV

SEQ ID NO: 16875 - protein, 11 aa, Homo sapiens
  Table A; Target 16875; HLA-C*16:01; COL23A1; ENSG00000050767; TAA
SATTAGSRAVS

SEQ ID NO: 16876 - protein, 8 aa, Homo sapiens
  Table A; Target 16876; HLA-B*37:01; COL23A1; ENSG00000050767; TAA
SDSLQESL

SEQ ID NO: 16877 - protein, 8 aa, Homo sapiens
  Table A; Target 16877; HLA-B*38:01; COL23A1; ENSG00000050767; TAA
SDSLQESL

SEQ ID NO: 16878 - protein, 9 aa, Homo sapiens
  Table A; Target 16878; HLA-B*39:01; COL23A1; ENSG00000050767; TAA
SGLPGADGL

SEQ ID NO: 16879 - protein, 9 aa, Homo sapiens
  Table A; Target 16879; HLA-C*01:02; COL23A1; ENSG00000050767; TAA
SGLPGADGL

SEQ ID NO: 16880 - protein, 10 aa, Homo sapiens
  Table A; Target 16880; HLA-A*11:01; COL23A1; ENSG00000050767; TAA
SGLPGADGLK

SEQ ID NO: 16881 - protein, 10 aa, Homo sapiens
  Table A; Target 16881; HLA-B*27:02; COL23A1; ENSG00000050767; TAA
SGLPGADGLK

SEQ ID NO: 16882 - protein, 9 aa, Homo sapiens
  Table A; Target 16882; HLA-A*31:01; COL23A1; ENSG00000050767; TAA
SGLPGPVGP

SEQ ID NO: 16883 - protein, 9 aa, Homo sapiens
  Table A; Target 16883; HLA-A*02:01; COL23A1; ENSG00000050767; TAA
SLQESLAQL

SEQ ID NO: 16884 - protein, 9 aa, Homo sapiens
  Table A; Target 16884; HLA-A*02:03; COL23A1; ENSG00000050767; TAA
SLQESLAQL

SEQ ID NO: 16885 - protein, 9 aa, Homo sapiens
  Table A; Target 16885; HLA-A*02:04; COL23A1; ENSG00000050767; TAA
SLQESLAQL

SEQ ID NO: 16886 - protein, 9 aa, Homo sapiens
  Table A; Target 16886; HLA-A*02:07; COL23A1; ENSG00000050767; TAA
SLQESLAQL

SEQ ID NO: 16887 - protein, 9 aa, Homo sapiens
  Table A; Target 16887; HLA-B*55:01; COL23A1; ENSG00000050767; TAA
SLQESLAQL

SEQ ID NO: 16888 - protein, 9 aa, Homo sapiens
  Table A; Target 16888; HLA-C*01:02; COL23A1; ENSG00000050767; TAA
SLQESLAQL

SEQ ID NO: 16889 - protein, 9 aa, Homo sapiens
  Table A; Target 16889; HLA-C*14:02; COL23A1; ENSG00000050767; TAA
SLQESLAQL

SEQ ID NO: 16890 - protein, 10 aa, Homo sapiens
  Table A; Target 16890; HLA-B*13:02; COL23A1; ENSG00000050767; TAA
SLQESLAQLI

SEQ ID NO: 16891 - protein, 9 aa, Homo sapiens
  Table A; Target 16891; HLA-A*11:01; COL23A1; ENSG00000050767; TAA
SQPGPPGPK

SEQ ID NO: 16892 - protein, 9 aa, Homo sapiens
  Table A; Target 16892; HLA-B*27:05; COL23A1; ENSG00000050767; TAA
SRAVSALCL

SEQ ID NO: 16893 - protein, 9 aa, Homo sapiens
  Table A; Target 16893; HLA-B*07:02; COL23A1; ENSG00000050767; TAA
SVGSAAACL

SEQ ID NO: 16894 - protein, 9 aa, Homo sapiens
  Table A; Target 16894; HLA-B*35:03; COL23A1; ENSG00000050767; TAA
SVGSAAACL

SEQ ID NO: 16895 - protein, 9 aa, Homo sapiens
  Table A; Target 16895; HLA-C*01:02; COL23A1; ENSG00000050767; TAA
SVGSAAACL

SEQ ID NO: 16896 - protein, 9 aa, Homo sapiens
  Table A; Target 16896; HLA-C*07:04; COL23A1; ENSG00000050767; TAA
SVGSAAACL

SEQ ID NO: 16897 - protein, 9 aa, Homo sapiens
  Table A; Target 16897; HLA-B*08:01; COL23A1; ENSG00000050767; TAA
TAGSRAVSA

SEQ ID NO: 16898 - protein, 9 aa, Homo sapiens
  Table A; Target 16898; HLA-B*54:01; COL23A1; ENSG00000050767; TAA
TAGSRAVSA

SEQ ID NO: 16899 - protein, 9 aa, Homo sapiens
  Table A; Target 16899; HLA-B*55:01; COL23A1; ENSG00000050767; TAA
TAGSRAVSA

SEQ ID NO: 16900 - protein, 9 aa, Homo sapiens
  Table A; Target 16900; HLA-B*56:01; COL23A1; ENSG00000050767; TAA
TAGSRAVSA

SEQ ID NO: 16901 - protein, 9 aa, Homo sapiens
  Table A; Target 16901; HLA-C*01:02; COL23A1; ENSG00000050767; TAA
TAGSRAVSA

SEQ ID NO: 16902 - protein, 9 aa, Homo sapiens
  Table A; Target 16902; HLA-C*03:04; COL23A1; ENSG00000050767; TAA
TAGSRAVSA

SEQ ID NO: 16903 - protein, 9 aa, Homo sapiens
  Table A; Target 16903; HLA-C*12:03; COL23A1; ENSG00000050767; TAA
TAGSRAVSA

SEQ ID NO: 16904 - protein, 9 aa, Homo sapiens
  Table A; Target 16904; HLA-C*14:02; COL23A1; ENSG00000050767; TAA
TAGSRAVSA

SEQ ID NO: 16905 - protein, 9 aa, Homo sapiens
  Table A; Target 16905; HLA-C*16:01; COL23A1; ENSG00000050767; TAA
TAGSRAVSA

SEQ ID NO: 16906 - protein, 10 aa, Homo sapiens
  Table A; Target 16906; HLA-B*07:02; COL23A1; ENSG00000050767; TAA
TAGSRAVSAL

SEQ ID NO: 16907 - protein, 10 aa, Homo sapiens
  Table A; Target 16907; HLA-C*01:02; COL23A1; ENSG00000050767; TAA
TAGSRAVSAL

SEQ ID NO: 16908 - protein, 10 aa, Homo sapiens
  Table A; Target 16908; HLA-C*07:02; COL23A1; ENSG00000050767; TAA
TAGSRAVSAL

SEQ ID NO: 16909 - protein, 9 aa, Homo sapiens
  Table A; Target 16909; HLA-C*16:02; COL23A1; ENSG00000050767; TAA
TAREAPSEC

SEQ ID NO: 16910 - protein, 10 aa, Homo sapiens
  Table A; Target 16910; HLA-B*51:01; COL23A1; ENSG00000050767; TAA
TAREAPSECV

SEQ ID NO: 16911 - protein, 9 aa, Homo sapiens
  Table A; Target 16911; HLA-B*07:02; COL23A1; ENSG00000050767; TAA
TPSQPGPPG

SEQ ID NO: 16912 - protein, 9 aa, Homo sapiens
  Table A; Target 16912; HLA-B*56:01; COL23A1; ENSG00000050767; TAA
TPSQPGPPG

SEQ ID NO: 16913 - protein, 9 aa, Homo sapiens
  Table A; Target 16913; HLA-C*04:01; COL23A1; ENSG00000050767; TAA
TPSQPGPPG

SEQ ID NO: 16914 - protein, 8 aa, Homo sapiens
  Table A; Target 16914; HLA-C*06:02; COL23A1; ENSG00000050767; TAA
TTAGSRAV

SEQ ID NO: 16915 - protein, 8 aa, Homo sapiens
  Table A; Target 16915; HLA-C*16:01; COL23A1; ENSG00000050767; TAA
TTAGSRAV

SEQ ID NO: 16916 - protein, 8 aa, Homo sapiens
  Table A; Target 16916; HLA-C*16:02; COL23A1; ENSG00000050767; TAA
TTAGSRAV

SEQ ID NO: 16917 - protein, 10 aa, Homo sapiens
  Table A; Target 16917; HLA-B*56:01; COL23A1; ENSG00000050767; TAA
TTAGSRAVSA

SEQ ID NO: 16918 - protein, 11 aa, Homo sapiens
  Table A; Target 16918; HLA-A*25:01; COL23A1; ENSG00000050767; TAA
TTAGSRAVSAL

SEQ ID NO: 16919 - protein, 11 aa, Homo sapiens
  Table A; Target 16919; HLA-A*68:01; COL23A1; ENSG00000050767; TAA
TTAGSRAVSAL

SEQ ID NO: 16920 - protein, 11 aa, Homo sapiens
  Table A; Target 16920; HLA-A*68:02; COL23A1; ENSG00000050767; TAA
TTAGSRAVSAL

SEQ ID NO: 16921 - protein, 11 aa, Homo sapiens
  Table A; Target 16921; HLA-B*07:02; COL23A1; ENSG00000050767; TAA
TTAGSRAVSAL

SEQ ID NO: 16922 - protein, 11 aa, Homo sapiens
  Table A; Target 16922; HLA-B*27:05; COL23A1; ENSG00000050767; TAA
TTAGSRAVSAL

SEQ ID NO: 16923 - protein, 11 aa, Homo sapiens
  Table A; Target 16923; HLA-C*01:02; COL23A1; ENSG00000050767; TAA
TTAGSRAVSAL

SEQ ID NO: 16924 - protein, 11 aa, Homo sapiens
  Table A; Target 16924; HLA-C*06:02; COL23A1; ENSG00000050767; TAA
TTAGSRAVSAL

SEQ ID NO: 16925 - protein, 11 aa, Homo sapiens
  Table A; Target 16925; HLA-C*07:02; COL23A1; ENSG00000050767; TAA
TTAGSRAVSAL

SEQ ID NO: 16926 - protein, 11 aa, Homo sapiens
  Table A; Target 16926; HLA-C*12:03; COL23A1; ENSG00000050767; TAA
TTAGSRAVSAL

SEQ ID NO: 16927 - protein, 9 aa, Homo sapiens
  Table A; Target 16927; HLA-A*68:01; COL23A1; ENSG00000050767; TAA
TVVIDYDGR

SEQ ID NO: 16928 - protein, 10 aa, Homo sapiens
  Table A; Target 16928; HLA-C*03:03; COL23A1; ENSG00000050767; TAA
VAALEEEREL

SEQ ID NO: 16929 - protein, 8 aa, Homo sapiens
  Table A; Target 16929; HLA-A*03:02; COL23A1; ENSG00000050767; TAA
VDGAPGPK

SEQ ID NO: 16930 - protein, 8 aa, Homo sapiens
  Table A; Target 16930; HLA-A*11:01; COL23A1; ENSG00000050767; TAA
VDGAPGPK

SEQ ID NO: 16931 - protein, 8 aa, Homo sapiens
  Table A; Target 16931; HLA-B*27:02; COL23A1; ENSG00000050767; TAA
VDGAPGPK

SEQ ID NO: 16932 - protein, 9 aa, Homo sapiens
  Table A; Target 16932; HLA-B*40:02; COL23A1; ENSG00000050767; TAA
VEPGPPGPP

SEQ ID NO: 16933 - protein, 9 aa, Homo sapiens
  Table A; Target 16933; HLA-C*04:01; COL23A1; ENSG00000050767; TAA
VEPGPPGPP

SEQ ID NO: 16934 - protein, 9 aa, Homo sapiens
  Table A; Target 16934; HLA-C*06:02; COL23A1; ENSG00000050767; TAA
VEPGPPGPP

SEQ ID NO: 16935 - protein, 9 aa, Homo sapiens
  Table A; Target 16935; HLA-C*07:02; COL23A1; ENSG00000050767; TAA
VEPGPPGPP

SEQ ID NO: 16936 - protein, 9 aa, Homo sapiens
  Table A; Target 16936; HLA-C*07:04; COL23A1; ENSG00000050767; TAA
VEPGPPGPP

SEQ ID NO: 16937 - protein, 9 aa, Homo sapiens
  Table A; Target 16937; HLA-C*12:03; COL23A1; ENSG00000050767; TAA
VEPGPPGPP

SEQ ID NO: 16938 - protein, 9 aa, Homo sapiens
  Table A; Target 16938; HLA-A*02:07; COL23A1; ENSG00000050767; TAA
VGPPGLIGL

SEQ ID NO: 16939 - protein, 9 aa, Homo sapiens
  Table A; Target 16939; HLA-C*01:02; COL23A1; ENSG00000050767; TAA
VGPPGLIGL

SEQ ID NO: 16940 - protein, 9 aa, Homo sapiens
  Table A; Target 16940; HLA-B*07:02; COL23A1; ENSG00000050767; TAA
VGSAAACLL

SEQ ID NO: 16941 - protein, 10 aa, Homo sapiens
  Table A; Target 16941; HLA-B*07:02; COL23A1; ENSG00000050767; TAA
VGSAAACLLL

SEQ ID NO: 16942 - protein, 9 aa, Homo sapiens
  Table A; Target 16942; HLA-C*03:03; COL23A1; ENSG00000050767; TAA
VIDYDGRIL

SEQ ID NO: 16943 - protein, 9 aa, Homo sapiens
  Table A; Target 16943; HLA-C*03:04; COL23A1; ENSG00000050767; TAA
VIDYDGRIL

SEQ ID NO: 16944 - protein, 9 aa, Homo sapiens
  Table A; Target 16944; HLA-A*31:01; COL23A1; ENSG00000050767; TAA
VQAAALQGR

SEQ ID NO: 16945 - protein, 9 aa, Homo sapiens
  Table A; Target 16945; HLA-A*33:03; COL23A1; ENSG00000050767; TAA
VQAAALQGR

SEQ ID NO: 16946 - protein, 9 aa, Homo sapiens
  Table A; Target 16946; HLA-C*07:06; COL23A1; ENSG00000050767; TAA
VQAAALQGR

SEQ ID NO: 16947 - protein, 10 aa, Homo sapiens
  Table A; Target 16947; HLA-B*13:02; COL23A1; ENSG00000050767; TAA
VQAAALQGRV

SEQ ID NO: 16948 - protein, 9 aa, Homo sapiens
  Table A; Target 16948; HLA-A*30:01; COL23A1; ENSG00000050767; TAA
YDGRILDAL

SEQ ID NO: 16949 - protein, 9 aa, Homo sapiens
  Table A; Target 16949; HLA-A*68:02; COL23A1; ENSG00000050767; TAA
YDGRILDAL

SEQ ID NO: 16950 - protein, 9 aa, Homo sapiens
  Table A; Target 16950; HLA-B*40:01; COL23A1; ENSG00000050767; TAA
YDGRILDAL

SEQ ID NO: 16951 - protein, 9 aa, Homo sapiens
  Table A; Target 16951; HLA-B*40:02; COL23A1; ENSG00000050767; TAA
YDGRILDAL

SEQ ID NO: 16952 - protein, 9 aa, Homo sapiens
  Table A; Target 16952; HLA-B*54:01; COL23A1; ENSG00000050767; TAA
YPGPLGLDG

SEQ ID NO: 16953 - protein, 9 aa, Homo sapiens
  Table A; Target 16953; HLA-B*56:01; COL23A1; ENSG00000050767; TAA
YPGPLGLDG

SEQ ID NO: 16954 - protein, 10 aa, Homo sapiens
  Table A; Target 16954; HLA-B*27:02; COL23A1; ENSG00000050767; TAA
YPGPLGLDGK

SEQ ID NO: 16955 - protein, 10 aa, Homo sapiens
  Table A; Target 16955; HLA-B*35:01; COL23A1; ENSG00000050767; TAA
YPGPLGLDGK

SEQ ID NO: 16956 - protein, 9 aa, Homo sapiens
  Table A; Target 16956; HLA-A*23:01; COX7B2; ENSG00000170516; TAA
AFCVATWVF

SEQ ID NO: 16957 - protein, 9 aa, Homo sapiens
  Table A; Target 16957; HLA-A*24:02; COX7B2; ENSG00000170516; TAA
AFCVATWVF

SEQ ID NO: 16958 - protein, 10 aa, Homo sapiens
  Table A; Target 16958; HLA-A*02:01; COX7B2; ENSG00000170516; TAA
ALSSLKIQSI

SEQ ID NO: 16959 - protein, 10 aa, Homo sapiens
  Table A; Target 16959; HLA-A*02:03; COX7B2; ENSG00000170516; TAA
ALSSLKIQSI

SEQ ID NO: 16960 - protein, 10 aa, Homo sapiens
  Table A; Target 16960; HLA-A*02:04; COX7B2; ENSG00000170516; TAA
ALSSLKIQSI

SEQ ID NO: 16961 - protein, 10 aa, Homo sapiens
  Table A; Target 16961; HLA-A*32:01; COX7B2; ENSG00000170516; TAA
ALSSLKIQSI

SEQ ID NO: 16962 - protein, 10 aa, Homo sapiens
  Table A; Target 16962; HLA-B*13:02; COX7B2; ENSG00000170516; TAA
ALSSLKIQSI

SEQ ID NO: 16963 - protein, 10 aa, Homo sapiens
  Table A; Target 16963; HLA-B*55:01; COX7B2; ENSG00000170516; TAA
ALSSLKIQSI

SEQ ID NO: 16964 - protein, 9 aa, Homo sapiens
  Table A; Target 16964; HLA-B*27:02; COX7B2; ENSG00000170516; TAA
ARNALSSLK

SEQ ID NO: 16965 - protein, 9 aa, Homo sapiens
  Table A; Target 16965; HLA-B*27:05; COX7B2; ENSG00000170516; TAA
ARNALSSLK

SEQ ID NO: 16966 - protein, 9 aa, Homo sapiens
  Table A; Target 16966; HLA-C*16:04; COX7B2; ENSG00000170516; TAA
ARNALSSLK

SEQ ID NO: 16967 - protein, 8 aa, Homo sapiens
  Table A; Target 16967; HLA-B*13:02; COX7B2; ENSG00000170516; TAA
ASGTAFCV

SEQ ID NO: 16968 - protein, 8 aa, Homo sapiens
  Table A; Target 16968; HLA-C*06:02; COX7B2; ENSG00000170516; TAA
ASGTAFCV

SEQ ID NO: 16969 - protein, 11 aa, Homo sapiens
  Table A; Target 16969; HLA-B*57:01; COX7B2; ENSG00000170516; TAA
ASGTAFCVATW

SEQ ID NO: 16970 - protein, 8 aa, Homo sapiens
  Table A; Target 16970; HLA-A*31:01; COX7B2; ENSG00000170516; TAA
ATQIGIEW

SEQ ID NO: 16971 - protein, 8 aa, Homo sapiens
  Table A; Target 16971; HLA-A*32:01; COX7B2; ENSG00000170516; TAA
ATQIGIEW

SEQ ID NO: 16972 - protein, 8 aa, Homo sapiens
  Table A; Target 16972; HLA-B*57:01; COX7B2; ENSG00000170516; TAA
ATQIGIEW

SEQ ID NO: 16973 - protein, 8 aa, Homo sapiens
  Table A; Target 16973; HLA-B*58:01; COX7B2; ENSG00000170516; TAA
ATQIGIEW

SEQ ID NO: 16974 - protein, 8 aa, Homo sapiens
  Table A; Target 16974; HLA-C*16:01; COX7B2; ENSG00000170516; TAA
ATQIGIEW

SEQ ID NO: 16975 - protein, 9 aa, Homo sapiens
  Table A; Target 16975; HLA-A*03:01; COX7B2; ENSG00000170516; TAA
AVLASGTAF

SEQ ID NO: 16976 - protein, 9 aa, Homo sapiens
  Table A; Target 16976; HLA-A*03:02; COX7B2; ENSG00000170516; TAA
AVLASGTAF

SEQ ID NO: 16977 - protein, 9 aa, Homo sapiens
  Table A; Target 16977; HLA-A*11:01; COX7B2; ENSG00000170516; TAA
AVLASGTAF

SEQ ID NO: 16978 - protein, 9 aa, Homo sapiens
  Table A; Target 16978; HLA-A*23:01; COX7B2; ENSG00000170516; TAA
AVLASGTAF

SEQ ID NO: 16979 - protein, 9 aa, Homo sapiens
  Table A; Target 16979; HLA-A*24:02; COX7B2; ENSG00000170516; TAA
AVLASGTAF

SEQ ID NO: 16980 - protein, 9 aa, Homo sapiens
  Table A; Target 16980; HLA-A*25:01; COX7B2; ENSG00000170516; TAA
AVLASGTAF

SEQ ID NO: 16981 - protein, 9 aa, Homo sapiens
  Table A; Target 16981; HLA-A*26:01; COX7B2; ENSG00000170516; TAA
AVLASGTAF

SEQ ID NO: 16982 - protein, 9 aa, Homo sapiens
  Table A; Target 16982; HLA-A*29:02; COX7B2; ENSG00000170516; TAA
AVLASGTAF

SEQ ID NO: 16983 - protein, 9 aa, Homo sapiens
  Table A; Target 16983; HLA-A*30:02; COX7B2; ENSG00000170516; TAA
AVLASGTAF

SEQ ID NO: 16984 - protein, 9 aa, Homo sapiens
  Table A; Target 16984; HLA-A*31:01; COX7B2; ENSG00000170516; TAA
AVLASGTAF

SEQ ID NO: 16985 - protein, 9 aa, Homo sapiens
  Table A; Target 16985; HLA-A*32:01; COX7B2; ENSG00000170516; TAA
AVLASGTAF

SEQ ID NO: 16986 - protein, 9 aa, Homo sapiens
  Table A; Target 16986; HLA-B*07:02; COX7B2; ENSG00000170516; TAA
AVLASGTAF

SEQ ID NO: 16987 - protein, 9 aa, Homo sapiens
  Table A; Target 16987; HLA-B*08:01; COX7B2; ENSG00000170516; TAA
AVLASGTAF

SEQ ID NO: 16988 - protein, 9 aa, Homo sapiens
  Table A; Target 16988; HLA-B*13:02; COX7B2; ENSG00000170516; TAA
AVLASGTAF

SEQ ID NO: 16989 - protein, 9 aa, Homo sapiens
  Table A; Target 16989; HLA-B*15:03; COX7B2; ENSG00000170516; TAA
AVLASGTAF

SEQ ID NO: 16990 - protein, 9 aa, Homo sapiens
  Table A; Target 16990; HLA-B*27:05; COX7B2; ENSG00000170516; TAA
AVLASGTAF

SEQ ID NO: 16991 - protein, 9 aa, Homo sapiens
  Table A; Target 16991; HLA-B*35:01; COX7B2; ENSG00000170516; TAA
AVLASGTAF

SEQ ID NO: 16992 - protein, 9 aa, Homo sapiens
  Table A; Target 16992; HLA-B*35:03; COX7B2; ENSG00000170516; TAA
AVLASGTAF

SEQ ID NO: 16993 - protein, 9 aa, Homo sapiens
  Table A; Target 16993; HLA-B*37:01; COX7B2; ENSG00000170516; TAA
AVLASGTAF

SEQ ID NO: 16994 - protein, 9 aa, Homo sapiens
  Table A; Target 16994; HLA-B*38:01; COX7B2; ENSG00000170516; TAA
AVLASGTAF

SEQ ID NO: 16995 - protein, 9 aa, Homo sapiens
  Table A; Target 16995; HLA-B*39:01; COX7B2; ENSG00000170516; TAA
AVLASGTAF

SEQ ID NO: 16996 - protein, 9 aa, Homo sapiens
  Table A; Target 16996; HLA-B*40:02; COX7B2; ENSG00000170516; TAA
AVLASGTAF

SEQ ID NO: 16997 - protein, 9 aa, Homo sapiens
  Table A; Target 16997; HLA-B*44:02; COX7B2; ENSG00000170516; TAA
AVLASGTAF

SEQ ID NO: 16998 - protein, 9 aa, Homo sapiens
  Table A; Target 16998; HLA-B*44:03; COX7B2; ENSG00000170516; TAA
AVLASGTAF

SEQ ID NO: 16999 - protein, 9 aa, Homo sapiens
  Table A; Target 16999; HLA-B*46:01; COX7B2; ENSG00000170516; TAA
AVLASGTAF

SEQ ID NO: 17000 - protein, 9 aa, Homo sapiens
  Table A; Target 17000; HLA-B*55:01; COX7B2; ENSG00000170516; TAA
AVLASGTAF

SEQ ID NO: 17001 - protein, 9 aa, Homo sapiens
  Table A; Target 17001; HLA-B*57:01; COX7B2; ENSG00000170516; TAA
AVLASGTAF

SEQ ID NO: 17002 - protein, 9 aa, Homo sapiens
  Table A; Target 17002; HLA-B*58:01; COX7B2; ENSG00000170516; TAA
AVLASGTAF

SEQ ID NO: 17003 - protein, 9 aa, Homo sapiens
  Table A; Target 17003; HLA-C*01:02; COX7B2; ENSG00000170516; TAA
AVLASGTAF

SEQ ID NO: 17004 - protein, 9 aa, Homo sapiens
  Table A; Target 17004; HLA-C*02:02; COX7B2; ENSG00000170516; TAA
AVLASGTAF

SEQ ID NO: 17005 - protein, 9 aa, Homo sapiens
  Table A; Target 17005; HLA-C*03:03; COX7B2; ENSG00000170516; TAA
AVLASGTAF

SEQ ID NO: 17006 - protein, 9 aa, Homo sapiens
  Table A; Target 17006; HLA-C*03:04; COX7B2; ENSG00000170516; TAA
AVLASGTAF

SEQ ID NO: 17007 - protein, 9 aa, Homo sapiens
  Table A; Target 17007; HLA-C*04:01; COX7B2; ENSG00000170516; TAA
AVLASGTAF

SEQ ID NO: 17008 - protein, 9 aa, Homo sapiens
  Table A; Target 17008; HLA-C*05:01; COX7B2; ENSG00000170516; TAA
AVLASGTAF

SEQ ID NO: 17009 - protein, 9 aa, Homo sapiens
  Table A; Target 17009; HLA-C*07:02; COX7B2; ENSG00000170516; TAA
AVLASGTAF

SEQ ID NO: 17010 - protein, 9 aa, Homo sapiens
  Table A; Target 17010; HLA-C*07:04; COX7B2; ENSG00000170516; TAA
AVLASGTAF

SEQ ID NO: 17011 - protein, 9 aa, Homo sapiens
  Table A; Target 17011; HLA-C*07:06; COX7B2; ENSG00000170516; TAA
AVLASGTAF

SEQ ID NO: 17012 - protein, 9 aa, Homo sapiens
  Table A; Target 17012; HLA-C*14:02; COX7B2; ENSG00000170516; TAA
AVLASGTAF

SEQ ID NO: 17013 - protein, 9 aa, Homo sapiens
  Table A; Target 17013; HLA-C*16:01; COX7B2; ENSG00000170516; TAA
AVLASGTAF

SEQ ID NO: 17014 - protein, 9 aa, Homo sapiens
  Table A; Target 17014; HLA-C*16:04; COX7B2; ENSG00000170516; TAA
AVLASGTAF

SEQ ID NO: 17015 - protein, 11 aa, Homo sapiens
  Table A; Target 17015; HLA-A*02:01; COX7B2; ENSG00000170516; TAA
AVLASGTAFCV

SEQ ID NO: 17016 - protein, 11 aa, Homo sapiens
  Table A; Target 17016; HLA-B*13:02; COX7B2; ENSG00000170516; TAA
AVLASGTAFCV

SEQ ID NO: 17017 - protein, 9 aa, Homo sapiens
  Table A; Target 17017; HLA-A*02:04; COX7B2; ENSG00000170516; TAA
CVATWVFTA

SEQ ID NO: 17018 - protein, 8 aa, Homo sapiens
  Table A; Target 17018; HLA-B*15:03; COX7B2; ENSG00000170516; TAA
DKYGNAVL

SEQ ID NO: 17019 - protein, 9 aa, Homo sapiens
  Table A; Target 17019; HLA-B*15:03; COX7B2; ENSG00000170516; TAA
DKYGNAVLA

SEQ ID NO: 17020 - protein, 9 aa, Homo sapiens
  Table A; Target 17020; HLA-C*12:03; COX7B2; ENSG00000170516; TAA
DKYGNAVLA

SEQ ID NO: 17021 - protein, 9 aa, Homo sapiens
  Table A; Target 17021; HLA-A*33:01; COX7B2; ENSG00000170516; TAA
EWNLSPVGR

SEQ ID NO: 17022 - protein, 9 aa, Homo sapiens
  Table A; Target 17022; HLA-A*33:03; COX7B2; ENSG00000170516; TAA
EWNLSPVGR

SEQ ID NO: 17023 - protein, 9 aa, Homo sapiens
  Table A; Target 17023; HLA-B*38:01; COX7B2; ENSG00000170516; TAA
FHDKYGNAV

SEQ ID NO: 17024 - protein, 9 aa, Homo sapiens
  Table A; Target 17024; HLA-B*39:01; COX7B2; ENSG00000170516; TAA
FHDKYGNAV

SEQ ID NO: 17025 - protein, 10 aa, Homo sapiens
  Table A; Target 17025; HLA-B*38:01; COX7B2; ENSG00000170516; TAA
FHDKYGNAVL

SEQ ID NO: 17026 - protein, 10 aa, Homo sapiens
  Table A; Target 17026; HLA-B*39:01; COX7B2; ENSG00000170516; TAA
FHDKYGNAVL

SEQ ID NO: 17027 - protein, 8 aa, Homo sapiens
  Table A; Target 17027; HLA-B*07:02; COX7B2; ENSG00000170516; TAA
FPLARNAL

SEQ ID NO: 17028 - protein, 8 aa, Homo sapiens
  Table A; Target 17028; HLA-B*35:01; COX7B2; ENSG00000170516; TAA
FPLARNAL

SEQ ID NO: 17029 - protein, 8 aa, Homo sapiens
  Table A; Target 17029; HLA-B*35:03; COX7B2; ENSG00000170516; TAA
FPLARNAL

SEQ ID NO: 17030 - protein, 8 aa, Homo sapiens
  Table A; Target 17030; HLA-B*54:01; COX7B2; ENSG00000170516; TAA
FPLARNAL

SEQ ID NO: 17031 - protein, 8 aa, Homo sapiens
  Table A; Target 17031; HLA-B*55:01; COX7B2; ENSG00000170516; TAA
FPLARNAL

SEQ ID NO: 17032 - protein, 8 aa, Homo sapiens
  Table A; Target 17032; HLA-B*56:01; COX7B2; ENSG00000170516; TAA
FPLARNAL

SEQ ID NO: 17033 - protein, 8 aa, Homo sapiens
  Table A; Target 17033; HLA-C*07:02; COX7B2; ENSG00000170516; TAA
FPLARNAL

SEQ ID NO: 17034 - protein, 8 aa, Homo sapiens
  Table A; Target 17034; HLA-C*16:01; COX7B2; ENSG00000170516; TAA
FPLARNAL

SEQ ID NO: 17035 - protein, 9 aa, Homo sapiens
  Table A; Target 17035; HLA-B*54:01; COX7B2; ENSG00000170516; TAA
FPLARNALS

SEQ ID NO: 17036 - protein, 10 aa, Homo sapiens
  Table A; Target 17036; HLA-B*54:01; COX7B2; ENSG00000170516; TAA
FPLARNALSS

SEQ ID NO: 17037 - protein, 11 aa, Homo sapiens
  Table A; Target 17037; HLA-B*07:02; COX7B2; ENSG00000170516; TAA
FPLARNALSSL

SEQ ID NO: 17038 - protein, 11 aa, Homo sapiens
  Table A; Target 17038; HLA-B*08:01; COX7B2; ENSG00000170516; TAA
FPLARNALSSL

SEQ ID NO: 17039 - protein, 11 aa, Homo sapiens
  Table A; Target 17039; HLA-B*35:01; COX7B2; ENSG00000170516; TAA
FPLARNALSSL

SEQ ID NO: 17040 - protein, 11 aa, Homo sapiens
  Table A; Target 17040; HLA-B*35:03; COX7B2; ENSG00000170516; TAA
FPLARNALSSL

SEQ ID NO: 17041 - protein, 11 aa, Homo sapiens
  Table A; Target 17041; HLA-B*51:01; COX7B2; ENSG00000170516; TAA
FPLARNALSSL

SEQ ID NO: 17042 - protein, 11 aa, Homo sapiens
  Table A; Target 17042; HLA-B*54:01; COX7B2; ENSG00000170516; TAA
FPLARNALSSL

SEQ ID NO: 17043 - protein, 11 aa, Homo sapiens
  Table A; Target 17043; HLA-B*55:01; COX7B2; ENSG00000170516; TAA
FPLARNALSSL

SEQ ID NO: 17044 - protein, 11 aa, Homo sapiens
  Table A; Target 17044; HLA-C*04:01; COX7B2; ENSG00000170516; TAA
FPLARNALSSL

SEQ ID NO: 17045 - protein, 11 aa, Homo sapiens
  Table A; Target 17045; HLA-C*07:02; COX7B2; ENSG00000170516; TAA
FPLARNALSSL

SEQ ID NO: 17046 - protein, 8 aa, Homo sapiens
  Table A; Target 17046; HLA-A*68:02; COX7B2; ENSG00000170516; TAA
FTATQIGI

SEQ ID NO: 17047 - protein, 10 aa, Homo sapiens
  Table A; Target 17047; HLA-A*01:01; COX7B2; ENSG00000170516; TAA
FTATQIGIEW

SEQ ID NO: 17048 - protein, 10 aa, Homo sapiens
  Table A; Target 17048; HLA-A*24:02; COX7B2; ENSG00000170516; TAA
FTATQIGIEW

SEQ ID NO: 17049 - protein, 10 aa, Homo sapiens
  Table A; Target 17049; HLA-A*25:01; COX7B2; ENSG00000170516; TAA
FTATQIGIEW

SEQ ID NO: 17050 - protein, 10 aa, Homo sapiens
  Table A; Target 17050; HLA-A*26:01; COX7B2; ENSG00000170516; TAA
FTATQIGIEW

SEQ ID NO: 17051 - protein, 10 aa, Homo sapiens
  Table A; Target 17051; HLA-A*29:02; COX7B2; ENSG00000170516; TAA
FTATQIGIEW

SEQ ID NO: 17052 - protein, 10 aa, Homo sapiens
  Table A; Target 17052; HLA-A*31:01; COX7B2; ENSG00000170516; TAA
FTATQIGIEW

SEQ ID NO: 17053 - protein, 10 aa, Homo sapiens
  Table A; Target 17053; HLA-A*32:01; COX7B2; ENSG00000170516; TAA
FTATQIGIEW

SEQ ID NO: 17054 - protein, 10 aa, Homo sapiens
  Table A; Target 17054; HLA-A*33:01; COX7B2; ENSG00000170516; TAA
FTATQIGIEW

SEQ ID NO: 17055 - protein, 10 aa, Homo sapiens
  Table A; Target 17055; HLA-A*33:03; COX7B2; ENSG00000170516; TAA
FTATQIGIEW

SEQ ID NO: 17056 - protein, 10 aa, Homo sapiens
  Table A; Target 17056; HLA-A*68:01; COX7B2; ENSG00000170516; TAA
FTATQIGIEW

SEQ ID NO: 17057 - protein, 10 aa, Homo sapiens
  Table A; Target 17057; HLA-A*68:02; COX7B2; ENSG00000170516; TAA
FTATQIGIEW

SEQ ID NO: 17058 - protein, 10 aa, Homo sapiens
  Table A; Target 17058; HLA-B*27:02; COX7B2; ENSG00000170516; TAA
FTATQIGIEW

SEQ ID NO: 17059 - protein, 10 aa, Homo sapiens
  Table A; Target 17059; HLA-B*27:05; COX7B2; ENSG00000170516; TAA
FTATQIGIEW

SEQ ID NO: 17060 - protein, 10 aa, Homo sapiens
  Table A; Target 17060; HLA-B*35:01; COX7B2; ENSG00000170516; TAA
FTATQIGIEW

SEQ ID NO: 17061 - protein, 10 aa, Homo sapiens
  Table A; Target 17061; HLA-B*44:02; COX7B2; ENSG00000170516; TAA
FTATQIGIEW

SEQ ID NO: 17062 - protein, 10 aa, Homo sapiens
  Table A; Target 17062; HLA-B*44:03; COX7B2; ENSG00000170516; TAA
FTATQIGIEW

SEQ ID NO: 17063 - protein, 10 aa, Homo sapiens
  Table A; Target 17063; HLA-B*58:01; COX7B2; ENSG00000170516; TAA
FTATQIGIEW

SEQ ID NO: 17064 - protein, 10 aa, Homo sapiens
  Table A; Target 17064; HLA-C*02:02; COX7B2; ENSG00000170516; TAA
FTATQIGIEW

SEQ ID NO: 17065 - protein, 10 aa, Homo sapiens
  Table A; Target 17065; HLA-C*04:01; COX7B2; ENSG00000170516; TAA
FTATQIGIEW

SEQ ID NO: 17066 - protein, 10 aa, Homo sapiens
  Table A; Target 17066; HLA-C*07:06; COX7B2; ENSG00000170516; TAA
FTATQIGIEW

SEQ ID NO: 17067 - protein, 10 aa, Homo sapiens
  Table A; Target 17067; HLA-C*12:03; COX7B2; ENSG00000170516; TAA
FTATQIGIEW

SEQ ID NO: 17068 - protein, 10 aa, Homo sapiens
  Table A; Target 17068; HLA-C*16:01; COX7B2; ENSG00000170516; TAA
FTATQIGIEW

SEQ ID NO: 17069 - protein, 10 aa, Homo sapiens
  Table A; Target 17069; HLA-C*16:04; COX7B2; ENSG00000170516; TAA
FTATQIGIEW

SEQ ID NO: 17070 - protein, 11 aa, Homo sapiens
  Table A; Target 17070; HLA-B*15:01; COX7B2; ENSG00000170516; TAA
GNAVLASGTAF

SEQ ID NO: 17071 - protein, 11 aa, Homo sapiens
  Table A; Target 17071; HLA-B*15:03; COX7B2; ENSG00000170516; TAA
GNAVLASGTAF

SEQ ID NO: 17072 - protein, 11 aa, Homo sapiens
  Table A; Target 17072; HLA-B*27:02; COX7B2; ENSG00000170516; TAA
GNAVLASGTAF

SEQ ID NO: 17073 - protein, 11 aa, Homo sapiens
  Table A; Target 17073; HLA-B*27:05; COX7B2; ENSG00000170516; TAA
GNAVLASGTAF

SEQ ID NO: 17074 - protein, 11 aa, Homo sapiens
  Table A; Target 17074; HLA-B*39:01; COX7B2; ENSG00000170516; TAA
GNAVLASGTAF

SEQ ID NO: 17075 - protein, 11 aa, Homo sapiens
  Table A; Target 17075; HLA-C*04:01; COX7B2; ENSG00000170516; TAA
GNAVLASGTAF

SEQ ID NO: 17076 - protein, 11 aa, Homo sapiens
  Table A; Target 17076; HLA-C*07:04; COX7B2; ENSG00000170516; TAA
GNAVLASGTAF

SEQ ID NO: 17077 - protein, 11 aa, Homo sapiens
  Table A; Target 17077; HLA-C*12:03; COX7B2; ENSG00000170516; TAA
GNAVLASGTAF

SEQ ID NO: 17078 - protein, 11 aa, Homo sapiens
  Table A; Target 17078; HLA-C*16:04; COX7B2; ENSG00000170516; TAA
GNAVLASGTAF

SEQ ID NO: 17079 - protein, 8 aa, Homo sapiens
  Table A; Target 17079; HLA-C*16:04; COX7B2; ENSG00000170516; TAA
GRVTPKEW

SEQ ID NO: 17080 - protein, 9 aa, Homo sapiens
  Table A; Target 17080; HLA-B*27:05; COX7B2; ENSG00000170516; TAA
GRVTPKEWK

SEQ ID NO: 17081 - protein, 9 aa, Homo sapiens
  Table A; Target 17081; HLA-A*24:02; COX7B2; ENSG00000170516; TAA
GTAFCVATW

SEQ ID NO: 17082 - protein, 9 aa, Homo sapiens
  Table A; Target 17082; HLA-A*25:01; COX7B2; ENSG00000170516; TAA
GTAFCVATW

SEQ ID NO: 17083 - protein, 9 aa, Homo sapiens
  Table A; Target 17083; HLA-A*26:01; COX7B2; ENSG00000170516; TAA
GTAFCVATW

SEQ ID NO: 17084 - protein, 9 aa, Homo sapiens
  Table A; Target 17084; HLA-A*32:01; COX7B2; ENSG00000170516; TAA
GTAFCVATW

SEQ ID NO: 17085 - protein, 9 aa, Homo sapiens
  Table A; Target 17085; HLA-B*44:02; COX7B2; ENSG00000170516; TAA
GTAFCVATW

SEQ ID NO: 17086 - protein, 9 aa, Homo sapiens
  Table A; Target 17086; HLA-B*44:03; COX7B2; ENSG00000170516; TAA
GTAFCVATW

SEQ ID NO: 17087 - protein, 9 aa, Homo sapiens
  Table A; Target 17087; HLA-B*57:01; COX7B2; ENSG00000170516; TAA
GTAFCVATW

SEQ ID NO: 17088 - protein, 9 aa, Homo sapiens
  Table A; Target 17088; HLA-B*58:01; COX7B2; ENSG00000170516; TAA
GTAFCVATW

SEQ ID NO: 17089 - protein, 9 aa, Homo sapiens
  Table A; Target 17089; HLA-C*12:03; COX7B2; ENSG00000170516; TAA
GTAFCVATW

SEQ ID NO: 17090 - protein, 9 aa, Homo sapiens
  Table A; Target 17090; HLA-C*16:04; COX7B2; ENSG00000170516; TAA
GTAFCVATW

SEQ ID NO: 17091 - protein, 8 aa, Homo sapiens
  Table A; Target 17091; HLA-B*08:01; COX7B2; ENSG00000170516; TAA
HDKYGNAV

SEQ ID NO: 17092 - protein, 8 aa, Homo sapiens
  Table A; Target 17092; HLA-B*37:01; COX7B2; ENSG00000170516; TAA
HDKYGNAV

SEQ ID NO: 17093 - protein, 8 aa, Homo sapiens
  Table A; Target 17093; HLA-B*40:02; COX7B2; ENSG00000170516; TAA
HDKYGNAV

SEQ ID NO: 17094 - protein, 8 aa, Homo sapiens
  Table A; Target 17094; HLA-C*16:02; COX7B2; ENSG00000170516; TAA
HDKYGNAV

SEQ ID NO: 17095 - protein, 9 aa, Homo sapiens
  Table A; Target 17095; HLA-B*37:01; COX7B2; ENSG00000170516; TAA
HDKYGNAVL

SEQ ID NO: 17096 - protein, 9 aa, Homo sapiens
  Table A; Target 17096; HLA-B*40:02; COX7B2; ENSG00000170516; TAA
HDKYGNAVL

SEQ ID NO: 17097 - protein, 9 aa, Homo sapiens
  Table A; Target 17097; HLA-C*07:01; COX7B2; ENSG00000170516; TAA
HDKYGNAVL

SEQ ID NO: 17098 - protein, 8 aa, Homo sapiens
  Table A; Target 17098; HLA-C*07:01; COX7B2; ENSG00000170516; TAA
HSPDFHDK

SEQ ID NO: 17099 - protein, 9 aa, Homo sapiens
  Table A; Target 17099; HLA-A*01:01; COX7B2; ENSG00000170516; TAA
HSPDFHDKY

SEQ ID NO: 17100 - protein, 9 aa, Homo sapiens
  Table A; Target 17100; HLA-A*24:02; COX7B2; ENSG00000170516; TAA
HSPDFHDKY

SEQ ID NO: 17101 - protein, 9 aa, Homo sapiens
  Table A; Target 17101; HLA-A*26:01; COX7B2; ENSG00000170516; TAA
HSPDFHDKY

SEQ ID NO: 17102 - protein, 9 aa, Homo sapiens
  Table A; Target 17102; HLA-A*29:02; COX7B2; ENSG00000170516; TAA
HSPDFHDKY

SEQ ID NO: 17103 - protein, 9 aa, Homo sapiens
  Table A; Target 17103; HLA-A*30:02; COX7B2; ENSG00000170516; TAA
HSPDFHDKY

SEQ ID NO: 17104 - protein, 9 aa, Homo sapiens
  Table A; Target 17104; HLA-B*35:01; COX7B2; ENSG00000170516; TAA
HSPDFHDKY

SEQ ID NO: 17105 - protein, 8 aa, Homo sapiens
  Table A; Target 17105; HLA-B*18:01; COX7B2; ENSG00000170516; TAA
IEWNLSPV

SEQ ID NO: 17106 - protein, 8 aa, Homo sapiens
  Table A; Target 17106; HLA-B*49:01; COX7B2; ENSG00000170516; TAA
IEWNLSPV

SEQ ID NO: 17107 - protein, 9 aa, Homo sapiens
  Table A; Target 17107; HLA-B*18:01; COX7B2; ENSG00000170516; TAA
IEWNLSPVG

SEQ ID NO: 17108 - protein, 9 aa, Homo sapiens
  Table A; Target 17108; HLA-B*40:02; COX7B2; ENSG00000170516; TAA
IEWNLSPVG

SEQ ID NO: 17109 - protein, 9 aa, Homo sapiens
  Table A; Target 17109; HLA-B*49:01; COX7B2; ENSG00000170516; TAA
IEWNLSPVG

SEQ ID NO: 17110 - protein, 8 aa, Homo sapiens
  Table A; Target 17110; HLA-A*30:01; COX7B2; ENSG00000170516; TAA
IQSILQSM

SEQ ID NO: 17111 - protein, 8 aa, Homo sapiens
  Table A; Target 17111; HLA-B*08:01; COX7B2; ENSG00000170516; TAA
IQSILQSM

SEQ ID NO: 17112 - protein, 8 aa, Homo sapiens
  Table A; Target 17112; HLA-B*13:02; COX7B2; ENSG00000170516; TAA
IQSILQSM

SEQ ID NO: 17113 - protein, 8 aa, Homo sapiens
  Table A; Target 17113; HLA-B*15:01; COX7B2; ENSG00000170516; TAA
IQSILQSM

SEQ ID NO: 17114 - protein, 8 aa, Homo sapiens
  Table A; Target 17114; HLA-B*15:03; COX7B2; ENSG00000170516; TAA
IQSILQSM

SEQ ID NO: 17115 - protein, 8 aa, Homo sapiens
  Table A; Target 17115; HLA-B*18:01; COX7B2; ENSG00000170516; TAA
IQSILQSM

SEQ ID NO: 17116 - protein, 8 aa, Homo sapiens
  Table A; Target 17116; HLA-B*27:05; COX7B2; ENSG00000170516; TAA
IQSILQSM

SEQ ID NO: 17117 - protein, 8 aa, Homo sapiens
  Table A; Target 17117; HLA-B*37:01; COX7B2; ENSG00000170516; TAA
IQSILQSM

SEQ ID NO: 17118 - protein, 8 aa, Homo sapiens
  Table A; Target 17118; HLA-B*38:01; COX7B2; ENSG00000170516; TAA
IQSILQSM

SEQ ID NO: 17119 - protein, 8 aa, Homo sapiens
  Table A; Target 17119; HLA-B*39:01; COX7B2; ENSG00000170516; TAA
IQSILQSM

SEQ ID NO: 17120 - protein, 8 aa, Homo sapiens
  Table A; Target 17120; HLA-B*40:02; COX7B2; ENSG00000170516; TAA
IQSILQSM

SEQ ID NO: 17121 - protein, 8 aa, Homo sapiens
  Table A; Target 17121; HLA-B*46:01; COX7B2; ENSG00000170516; TAA
IQSILQSM

SEQ ID NO: 17122 - protein, 8 aa, Homo sapiens
  Table A; Target 17122; HLA-C*04:01; COX7B2; ENSG00000170516; TAA
IQSILQSM

SEQ ID NO: 17123 - protein, 8 aa, Homo sapiens
  Table A; Target 17123; HLA-C*06:02; COX7B2; ENSG00000170516; TAA
IQSILQSM

SEQ ID NO: 17124 - protein, 8 aa, Homo sapiens
  Table A; Target 17124; HLA-C*07:01; COX7B2; ENSG00000170516; TAA
IQSILQSM

SEQ ID NO: 17125 - protein, 8 aa, Homo sapiens
  Table A; Target 17125; HLA-C*07:04; COX7B2; ENSG00000170516; TAA
IQSILQSM

SEQ ID NO: 17126 - protein, 8 aa, Homo sapiens
  Table A; Target 17126; HLA-C*14:02; COX7B2; ENSG00000170516; TAA
IQSILQSM

SEQ ID NO: 17127 - protein, 8 aa, Homo sapiens
  Table A; Target 17127; HLA-C*16:02; COX7B2; ENSG00000170516; TAA
IQSILQSM

SEQ ID NO: 17128 - protein, 9 aa, Homo sapiens
  Table A; Target 17128; HLA-B*13:02; COX7B2; ENSG00000170516; TAA
IQSILQSMA

SEQ ID NO: 17129 - protein, 9 aa, Homo sapiens
  Table A; Target 17129; HLA-B*27:05; COX7B2; ENSG00000170516; TAA
IQSILQSMA

SEQ ID NO: 17130 - protein, 9 aa, Homo sapiens
  Table A; Target 17130; HLA-C*06:02; COX7B2; ENSG00000170516; TAA
IQSILQSMA

SEQ ID NO: 17131 - protein, 10 aa, Homo sapiens
  Table A; Target 17131; HLA-A*31:01; COX7B2; ENSG00000170516; TAA
IQSILQSMAR

SEQ ID NO: 17132 - protein, 10 aa, Homo sapiens
  Table A; Target 17132; HLA-B*27:02; COX7B2; ENSG00000170516; TAA
IQSILQSMAR

SEQ ID NO: 17133 - protein, 10 aa, Homo sapiens
  Table A; Target 17133; HLA-C*04:01; COX7B2; ENSG00000170516; TAA
IQSILQSMAR

SEQ ID NO: 17134 - protein, 10 aa, Homo sapiens
  Table A; Target 17134; HLA-C*06:02; COX7B2; ENSG00000170516; TAA
IQSILQSMAR

SEQ ID NO: 17135 - protein, 10 aa, Homo sapiens
  Table A; Target 17135; HLA-A*30:02; COX7B2; ENSG00000170516; TAA
KHSPDFHDKY

SEQ ID NO: 17136 - protein, 9 aa, Homo sapiens
  Table A; Target 17136; HLA-A*02:01; COX7B2; ENSG00000170516; TAA
KIQSILQSM

SEQ ID NO: 17137 - protein, 9 aa, Homo sapiens
  Table A; Target 17137; HLA-A*02:03; COX7B2; ENSG00000170516; TAA
KIQSILQSM

SEQ ID NO: 17138 - protein, 9 aa, Homo sapiens
  Table A; Target 17138; HLA-A*02:04; COX7B2; ENSG00000170516; TAA
KIQSILQSM

SEQ ID NO: 17139 - protein, 9 aa, Homo sapiens
  Table A; Target 17139; HLA-A*02:07; COX7B2; ENSG00000170516; TAA
KIQSILQSM

SEQ ID NO: 17140 - protein, 9 aa, Homo sapiens
  Table A; Target 17140; HLA-A*03:01; COX7B2; ENSG00000170516; TAA
KIQSILQSM

SEQ ID NO: 17141 - protein, 9 aa, Homo sapiens
  Table A; Target 17141; HLA-A*03:02; COX7B2; ENSG00000170516; TAA
KIQSILQSM

SEQ ID NO: 17142 - protein, 9 aa, Homo sapiens
  Table A; Target 17142; HLA-A*23:01; COX7B2; ENSG00000170516; TAA
KIQSILQSM

SEQ ID NO: 17143 - protein, 9 aa, Homo sapiens
  Table A; Target 17143; HLA-A*24:02; COX7B2; ENSG00000170516; TAA
KIQSILQSM

SEQ ID NO: 17144 - protein, 9 aa, Homo sapiens
  Table A; Target 17144; HLA-A*26:01; COX7B2; ENSG00000170516; TAA
KIQSILQSM

SEQ ID NO: 17145 - protein, 9 aa, Homo sapiens
  Table A; Target 17145; HLA-A*29:02; COX7B2; ENSG00000170516; TAA
KIQSILQSM

SEQ ID NO: 17146 - protein, 9 aa, Homo sapiens
  Table A; Target 17146; HLA-A*30:01; COX7B2; ENSG00000170516; TAA
KIQSILQSM

SEQ ID NO: 17147 - protein, 9 aa, Homo sapiens
  Table A; Target 17147; HLA-A*30:02; COX7B2; ENSG00000170516; TAA
KIQSILQSM

SEQ ID NO: 17148 - protein, 9 aa, Homo sapiens
  Table A; Target 17148; HLA-A*31:01; COX7B2; ENSG00000170516; TAA
KIQSILQSM

SEQ ID NO: 17149 - protein, 9 aa, Homo sapiens
  Table A; Target 17149; HLA-A*32:01; COX7B2; ENSG00000170516; TAA
KIQSILQSM

SEQ ID NO: 17150 - protein, 9 aa, Homo sapiens
  Table A; Target 17150; HLA-B*07:02; COX7B2; ENSG00000170516; TAA
KIQSILQSM

SEQ ID NO: 17151 - protein, 9 aa, Homo sapiens
  Table A; Target 17151; HLA-B*08:01; COX7B2; ENSG00000170516; TAA
KIQSILQSM

SEQ ID NO: 17152 - protein, 9 aa, Homo sapiens
  Table A; Target 17152; HLA-B*13:02; COX7B2; ENSG00000170516; TAA
KIQSILQSM

SEQ ID NO: 17153 - protein, 9 aa, Homo sapiens
  Table A; Target 17153; HLA-B*15:01; COX7B2; ENSG00000170516; TAA
KIQSILQSM

SEQ ID NO: 17154 - protein, 9 aa, Homo sapiens
  Table A; Target 17154; HLA-B*15:03; COX7B2; ENSG00000170516; TAA
KIQSILQSM

SEQ ID NO: 17155 - protein, 9 aa, Homo sapiens
  Table A; Target 17155; HLA-B*27:05; COX7B2; ENSG00000170516; TAA
KIQSILQSM

SEQ ID NO: 17156 - protein, 9 aa, Homo sapiens
  Table A; Target 17156; HLA-B*37:01; COX7B2; ENSG00000170516; TAA
KIQSILQSM

SEQ ID NO: 17157 - protein, 9 aa, Homo sapiens
  Table A; Target 17157; HLA-B*40:01; COX7B2; ENSG00000170516; TAA
KIQSILQSM

SEQ ID NO: 17158 - protein, 9 aa, Homo sapiens
  Table A; Target 17158; HLA-B*40:02; COX7B2; ENSG00000170516; TAA
KIQSILQSM

SEQ ID NO: 17159 - protein, 9 aa, Homo sapiens
  Table A; Target 17159; HLA-B*44:03; COX7B2; ENSG00000170516; TAA
KIQSILQSM

SEQ ID NO: 17160 - protein, 9 aa, Homo sapiens
  Table A; Target 17160; HLA-B*46:01; COX7B2; ENSG00000170516; TAA
KIQSILQSM

SEQ ID NO: 17161 - protein, 9 aa, Homo sapiens
  Table A; Target 17161; HLA-B*55:01; COX7B2; ENSG00000170516; TAA
KIQSILQSM

SEQ ID NO: 17162 - protein, 9 aa, Homo sapiens
  Table A; Target 17162; HLA-B*56:01; COX7B2; ENSG00000170516; TAA
KIQSILQSM

SEQ ID NO: 17163 - protein, 9 aa, Homo sapiens
  Table A; Target 17163; HLA-B*57:01; COX7B2; ENSG00000170516; TAA
KIQSILQSM

SEQ ID NO: 17164 - protein, 9 aa, Homo sapiens
  Table A; Target 17164; HLA-B*58:01; COX7B2; ENSG00000170516; TAA
KIQSILQSM

SEQ ID NO: 17165 - protein, 9 aa, Homo sapiens
  Table A; Target 17165; HLA-C*01:02; COX7B2; ENSG00000170516; TAA
KIQSILQSM

SEQ ID NO: 17166 - protein, 9 aa, Homo sapiens
  Table A; Target 17166; HLA-C*02:02; COX7B2; ENSG00000170516; TAA
KIQSILQSM

SEQ ID NO: 17167 - protein, 9 aa, Homo sapiens
  Table A; Target 17167; HLA-C*03:03; COX7B2; ENSG00000170516; TAA
KIQSILQSM

SEQ ID NO: 17168 - protein, 9 aa, Homo sapiens
  Table A; Target 17168; HLA-C*03:04; COX7B2; ENSG00000170516; TAA
KIQSILQSM

SEQ ID NO: 17169 - protein, 9 aa, Homo sapiens
  Table A; Target 17169; HLA-C*04:01; COX7B2; ENSG00000170516; TAA
KIQSILQSM

SEQ ID NO: 17170 - protein, 9 aa, Homo sapiens
  Table A; Target 17170; HLA-C*05:01; COX7B2; ENSG00000170516; TAA
KIQSILQSM

SEQ ID NO: 17171 - protein, 9 aa, Homo sapiens
  Table A; Target 17171; HLA-C*06:02; COX7B2; ENSG00000170516; TAA
KIQSILQSM

SEQ ID NO: 17172 - protein, 9 aa, Homo sapiens
  Table A; Target 17172; HLA-C*07:01; COX7B2; ENSG00000170516; TAA
KIQSILQSM

SEQ ID NO: 17173 - protein, 9 aa, Homo sapiens
  Table A; Target 17173; HLA-C*07:02; COX7B2; ENSG00000170516; TAA
KIQSILQSM

SEQ ID NO: 17174 - protein, 9 aa, Homo sapiens
  Table A; Target 17174; HLA-C*07:04; COX7B2; ENSG00000170516; TAA
KIQSILQSM

SEQ ID NO: 17175 - protein, 9 aa, Homo sapiens
  Table A; Target 17175; HLA-C*12:03; COX7B2; ENSG00000170516; TAA
KIQSILQSM

SEQ ID NO: 17176 - protein, 9 aa, Homo sapiens
  Table A; Target 17176; HLA-C*14:02; COX7B2; ENSG00000170516; TAA
KIQSILQSM

SEQ ID NO: 17177 - protein, 9 aa, Homo sapiens
  Table A; Target 17177; HLA-C*16:01; COX7B2; ENSG00000170516; TAA
KIQSILQSM

SEQ ID NO: 17178 - protein, 9 aa, Homo sapiens
  Table A; Target 17178; HLA-C*16:02; COX7B2; ENSG00000170516; TAA
KIQSILQSM

SEQ ID NO: 17179 - protein, 9 aa, Homo sapiens
  Table A; Target 17179; HLA-C*16:04; COX7B2; ENSG00000170516; TAA
KIQSILQSM

SEQ ID NO: 17180 - protein, 11 aa, Homo sapiens
  Table A; Target 17180; HLA-A*03:01; COX7B2; ENSG00000170516; TAA
KIQSILQSMAR

SEQ ID NO: 17181 - protein, 11 aa, Homo sapiens
  Table A; Target 17181; HLA-A*03:02; COX7B2; ENSG00000170516; TAA
KIQSILQSMAR

SEQ ID NO: 17182 - protein, 11 aa, Homo sapiens
  Table A; Target 17182; HLA-A*11:01; COX7B2; ENSG00000170516; TAA
KIQSILQSMAR

SEQ ID NO: 17183 - protein, 11 aa, Homo sapiens
  Table A; Target 17183; HLA-A*31:01; COX7B2; ENSG00000170516; TAA
KIQSILQSMAR

SEQ ID NO: 17184 - protein, 11 aa, Homo sapiens
  Table A; Target 17184; HLA-C*06:02; COX7B2; ENSG00000170516; TAA
KIQSILQSMAR

SEQ ID NO: 17185 - protein, 8 aa, Homo sapiens
  Table A; Target 17185; HLA-C*14:02; COX7B2; ENSG00000170516; TAA
KYGNAVLA

SEQ ID NO: 17186 - protein, 9 aa, Homo sapiens
  Table A; Target 17186; HLA-C*07:01; COX7B2; ENSG00000170516; TAA
KYGNAVLAS

SEQ ID NO: 17187 - protein, 9 aa, Homo sapiens
  Table A; Target 17187; HLA-C*07:02; COX7B2; ENSG00000170516; TAA
KYGNAVLAS

SEQ ID NO: 17188 - protein, 10 aa, Homo sapiens
  Table A; Target 17188; HLA-C*07:02; COX7B2; ENSG00000170516; TAA
KYGNAVLASG

SEQ ID NO: 17189 - protein, 9 aa, Homo sapiens
  Table A; Target 17189; HLA-A*02:03; COX7B2; ENSG00000170516; TAA
LARNALSSL

SEQ ID NO: 17190 - protein, 9 aa, Homo sapiens
  Table A; Target 17190; HLA-A*32:01; COX7B2; ENSG00000170516; TAA
LARNALSSL

SEQ ID NO: 17191 - protein, 9 aa, Homo sapiens
  Table A; Target 17191; HLA-B*07:02; COX7B2; ENSG00000170516; TAA
LARNALSSL

SEQ ID NO: 17192 - protein, 9 aa, Homo sapiens
  Table A; Target 17192; HLA-B*08:01; COX7B2; ENSG00000170516; TAA
LARNALSSL

SEQ ID NO: 17193 - protein, 9 aa, Homo sapiens
  Table A; Target 17193; HLA-B*15:01; COX7B2; ENSG00000170516; TAA
LARNALSSL

SEQ ID NO: 17194 - protein, 9 aa, Homo sapiens
  Table A; Target 17194; HLA-B*15:03; COX7B2; ENSG00000170516; TAA
LARNALSSL

SEQ ID NO: 17195 - protein, 9 aa, Homo sapiens
  Table A; Target 17195; HLA-B*40:02; COX7B2; ENSG00000170516; TAA
LARNALSSL

SEQ ID NO: 17196 - protein, 9 aa, Homo sapiens
  Table A; Target 17196; HLA-B*46:01; COX7B2; ENSG00000170516; TAA
LARNALSSL

SEQ ID NO: 17197 - protein, 9 aa, Homo sapiens
  Table A; Target 17197; HLA-B*51:01; COX7B2; ENSG00000170516; TAA
LARNALSSL

SEQ ID NO: 17198 - protein, 9 aa, Homo sapiens
  Table A; Target 17198; HLA-B*54:01; COX7B2; ENSG00000170516; TAA
LARNALSSL

SEQ ID NO: 17199 - protein, 9 aa, Homo sapiens
  Table A; Target 17199; HLA-C*01:02; COX7B2; ENSG00000170516; TAA
LARNALSSL

SEQ ID NO: 17200 - protein, 9 aa, Homo sapiens
  Table A; Target 17200; HLA-C*03:03; COX7B2; ENSG00000170516; TAA
LARNALSSL

SEQ ID NO: 17201 - protein, 9 aa, Homo sapiens
  Table A; Target 17201; HLA-C*03:04; COX7B2; ENSG00000170516; TAA
LARNALSSL

SEQ ID NO: 17202 - protein, 9 aa, Homo sapiens
  Table A; Target 17202; HLA-C*06:02; COX7B2; ENSG00000170516; TAA
LARNALSSL

SEQ ID NO: 17203 - protein, 9 aa, Homo sapiens
  Table A; Target 17203; HLA-C*07:02; COX7B2; ENSG00000170516; TAA
LARNALSSL

SEQ ID NO: 17204 - protein, 9 aa, Homo sapiens
  Table A; Target 17204; HLA-C*07:04; COX7B2; ENSG00000170516; TAA
LARNALSSL

SEQ ID NO: 17205 - protein, 9 aa, Homo sapiens
  Table A; Target 17205; HLA-C*12:03; COX7B2; ENSG00000170516; TAA
LARNALSSL

SEQ ID NO: 17206 - protein, 9 aa, Homo sapiens
  Table A; Target 17206; HLA-C*14:02; COX7B2; ENSG00000170516; TAA
LARNALSSL

SEQ ID NO: 17207 - protein, 9 aa, Homo sapiens
  Table A; Target 17207; HLA-C*16:01; COX7B2; ENSG00000170516; TAA
LARNALSSL

SEQ ID NO: 17208 - protein, 9 aa, Homo sapiens
  Table A; Target 17208; HLA-C*16:02; COX7B2; ENSG00000170516; TAA
LARNALSSL

SEQ ID NO: 17209 - protein, 9 aa, Homo sapiens
  Table A; Target 17209; HLA-A*68:02; COX7B2; ENSG00000170516; TAA
LASGTAFCV

SEQ ID NO: 17210 - protein, 9 aa, Homo sapiens
  Table A; Target 17210; HLA-B*07:02; COX7B2; ENSG00000170516; TAA
LASGTAFCV

SEQ ID NO: 17211 - protein, 9 aa, Homo sapiens
  Table A; Target 17211; HLA-B*13:02; COX7B2; ENSG00000170516; TAA
LASGTAFCV

SEQ ID NO: 17212 - protein, 9 aa, Homo sapiens
  Table A; Target 17212; HLA-B*35:03; COX7B2; ENSG00000170516; TAA
LASGTAFCV

SEQ ID NO: 17213 - protein, 9 aa, Homo sapiens
  Table A; Target 17213; HLA-B*51:01; COX7B2; ENSG00000170516; TAA
LASGTAFCV

SEQ ID NO: 17214 - protein, 9 aa, Homo sapiens
  Table A; Target 17214; HLA-B*54:01; COX7B2; ENSG00000170516; TAA
LASGTAFCV

SEQ ID NO: 17215 - protein, 9 aa, Homo sapiens
  Table A; Target 17215; HLA-B*56:01; COX7B2; ENSG00000170516; TAA
LASGTAFCV

SEQ ID NO: 17216 - protein, 9 aa, Homo sapiens
  Table A; Target 17216; HLA-C*02:02; COX7B2; ENSG00000170516; TAA
LASGTAFCV

SEQ ID NO: 17217 - protein, 9 aa, Homo sapiens
  Table A; Target 17217; HLA-C*03:04; COX7B2; ENSG00000170516; TAA
LASGTAFCV

SEQ ID NO: 17218 - protein, 9 aa, Homo sapiens
  Table A; Target 17218; HLA-C*04:01; COX7B2; ENSG00000170516; TAA
LASGTAFCV

SEQ ID NO: 17219 - protein, 9 aa, Homo sapiens
  Table A; Target 17219; HLA-C*06:02; COX7B2; ENSG00000170516; TAA
LASGTAFCV

SEQ ID NO: 17220 - protein, 9 aa, Homo sapiens
  Table A; Target 17220; HLA-C*07:01; COX7B2; ENSG00000170516; TAA
LASGTAFCV

SEQ ID NO: 17221 - protein, 9 aa, Homo sapiens
  Table A; Target 17221; HLA-C*07:02; COX7B2; ENSG00000170516; TAA
LASGTAFCV

SEQ ID NO: 17222 - protein, 9 aa, Homo sapiens
  Table A; Target 17222; HLA-C*07:04; COX7B2; ENSG00000170516; TAA
LASGTAFCV

SEQ ID NO: 17223 - protein, 9 aa, Homo sapiens
  Table A; Target 17223; HLA-C*12:03; COX7B2; ENSG00000170516; TAA
LASGTAFCV

SEQ ID NO: 17224 - protein, 9 aa, Homo sapiens
  Table A; Target 17224; HLA-C*16:01; COX7B2; ENSG00000170516; TAA
LASGTAFCV

SEQ ID NO: 17225 - protein, 9 aa, Homo sapiens
  Table A; Target 17225; HLA-C*16:02; COX7B2; ENSG00000170516; TAA
LASGTAFCV

SEQ ID NO: 17226 - protein, 9 aa, Homo sapiens
  Table A; Target 17226; HLA-C*16:04; COX7B2; ENSG00000170516; TAA
LASGTAFCV

SEQ ID NO: 17227 - protein, 10 aa, Homo sapiens
  Table A; Target 17227; HLA-B*54:01; COX7B2; ENSG00000170516; TAA
LASGTAFCVA

SEQ ID NO: 17228 - protein, 10 aa, Homo sapiens
  Table A; Target 17228; HLA-B*15:03; COX7B2; ENSG00000170516; TAA
LKIQSILQSM

SEQ ID NO: 17229 - protein, 8 aa, Homo sapiens
  Table A; Target 17229; HLA-C*16:01; COX7B2; ENSG00000170516; TAA
LSPVGRVT

SEQ ID NO: 17230 - protein, 10 aa, Homo sapiens
  Table A; Target 17230; HLA-A*03:01; COX7B2; ENSG00000170516; TAA
LSPVGRVTPK

SEQ ID NO: 17231 - protein, 10 aa, Homo sapiens
  Table A; Target 17231; HLA-C*01:02; COX7B2; ENSG00000170516; TAA
LSPVGRVTPK

SEQ ID NO: 17232 - protein, 10 aa, Homo sapiens
  Table A; Target 17232; HLA-C*07:02; COX7B2; ENSG00000170516; TAA
LSPVGRVTPK

SEQ ID NO: 17233 - protein, 9 aa, Homo sapiens
  Table A; Target 17233; HLA-A*02:03; COX7B2; ENSG00000170516; TAA
LSSLKIQSI

SEQ ID NO: 17234 - protein, 9 aa, Homo sapiens
  Table A; Target 17234; HLA-B*08:01; COX7B2; ENSG00000170516; TAA
LSSLKIQSI

SEQ ID NO: 17235 - protein, 9 aa, Homo sapiens
  Table A; Target 17235; HLA-B*13:02; COX7B2; ENSG00000170516; TAA
LSSLKIQSI

SEQ ID NO: 17236 - protein, 9 aa, Homo sapiens
  Table A; Target 17236; HLA-B*37:01; COX7B2; ENSG00000170516; TAA
LSSLKIQSI

SEQ ID NO: 17237 - protein, 9 aa, Homo sapiens
  Table A; Target 17237; HLA-B*54:01; COX7B2; ENSG00000170516; TAA
LSSLKIQSI

SEQ ID NO: 17238 - protein, 9 aa, Homo sapiens
  Table A; Target 17238; HLA-B*58:01; COX7B2; ENSG00000170516; TAA
LSSLKIQSI

SEQ ID NO: 17239 - protein, 9 aa, Homo sapiens
  Table A; Target 17239; HLA-C*06:02; COX7B2; ENSG00000170516; TAA
LSSLKIQSI

SEQ ID NO: 17240 - protein, 9 aa, Homo sapiens
  Table A; Target 17240; HLA-C*16:02; COX7B2; ENSG00000170516; TAA
LSSLKIQSI

SEQ ID NO: 17241 - protein, 10 aa, Homo sapiens
  Table A; Target 17241; HLA-C*07:02; COX7B2; ENSG00000170516; TAA
LSSLKIQSIL

SEQ ID NO: 17242 - protein, 8 aa, Homo sapiens
  Table A; Target 17242; HLA-C*07:01; COX7B2; ENSG00000170516; TAA
MARHSHVK

SEQ ID NO: 17243 - protein, 9 aa, Homo sapiens
  Table A; Target 17243; HLA-A*24:02; COX7B2; ENSG00000170516; TAA
MFPLARNAL

SEQ ID NO: 17244 - protein, 9 aa, Homo sapiens
  Table A; Target 17244; HLA-B*07:02; COX7B2; ENSG00000170516; TAA
MFPLARNAL

SEQ ID NO: 17245 - protein, 9 aa, Homo sapiens
  Table A; Target 17245; HLA-B*08:01; COX7B2; ENSG00000170516; TAA
MFPLARNAL

SEQ ID NO: 17246 - protein, 9 aa, Homo sapiens
  Table A; Target 17246; HLA-C*01:02; COX7B2; ENSG00000170516; TAA
MFPLARNAL

SEQ ID NO: 17247 - protein, 9 aa, Homo sapiens
  Table A; Target 17247; HLA-C*07:02; COX7B2; ENSG00000170516; TAA
MFPLARNAL

SEQ ID NO: 17248 - protein, 9 aa, Homo sapiens
  Table A; Target 17248; HLA-C*14:02; COX7B2; ENSG00000170516; TAA
MFPLARNAL

SEQ ID NO: 17249 - protein, 9 aa, Homo sapiens
  Table A; Target 17249; HLA-A*02:03; COX7B2; ENSG00000170516; TAA
MMFPLARNA

SEQ ID NO: 17250 - protein, 9 aa, Homo sapiens
  Table A; Target 17250; HLA-B*54:01; COX7B2; ENSG00000170516; TAA
MMFPLARNA

SEQ ID NO: 17251 - protein, 10 aa, Homo sapiens
  Table A; Target 17251; HLA-A*02:03; COX7B2; ENSG00000170516; TAA
MMFPLARNAL

SEQ ID NO: 17252 - protein, 10 aa, Homo sapiens
  Table A; Target 17252; HLA-A*02:04; COX7B2; ENSG00000170516; TAA
MMFPLARNAL

SEQ ID NO: 17253 - protein, 10 aa, Homo sapiens
  Table A; Target 17253; HLA-A*02:07; COX7B2; ENSG00000170516; TAA
MMFPLARNAL

SEQ ID NO: 17254 - protein, 10 aa, Homo sapiens
  Table A; Target 17254; HLA-A*31:01; COX7B2; ENSG00000170516; TAA
MMFPLARNAL

SEQ ID NO: 17255 - protein, 10 aa, Homo sapiens
  Table A; Target 17255; HLA-A*68:02; COX7B2; ENSG00000170516; TAA
MMFPLARNAL

SEQ ID NO: 17256 - protein, 10 aa, Homo sapiens
  Table A; Target 17256; HLA-B*54:01; COX7B2; ENSG00000170516; TAA
MMFPLARNAL

SEQ ID NO: 17257 - protein, 10 aa, Homo sapiens
  Table A; Target 17257; HLA-C*07:02; COX7B2; ENSG00000170516; TAA
MMFPLARNAL

SEQ ID NO: 17258 - protein, 9 aa, Homo sapiens
  Table A; Target 17258; HLA-C*07:01; COX7B2; ENSG00000170516; TAA
NALSSLKIQ

SEQ ID NO: 17259 - protein, 9 aa, Homo sapiens
  Table A; Target 17259; HLA-C*12:03; COX7B2; ENSG00000170516; TAA
NALSSLKIQ

SEQ ID NO: 17260 - protein, 9 aa, Homo sapiens
  Table A; Target 17260; HLA-B*54:01; COX7B2; ENSG00000170516; TAA
NAVLASGTA

SEQ ID NO: 17261 - protein, 9 aa, Homo sapiens
  Table A; Target 17261; HLA-B*56:01; COX7B2; ENSG00000170516; TAA
NAVLASGTA

SEQ ID NO: 17262 - protein, 9 aa, Homo sapiens
  Table A; Target 17262; HLA-C*03:04; COX7B2; ENSG00000170516; TAA
NAVLASGTA

SEQ ID NO: 17263 - protein, 10 aa, Homo sapiens
  Table A; Target 17263; HLA-A*23:01; COX7B2; ENSG00000170516; TAA
NAVLASGTAF

SEQ ID NO: 17264 - protein, 10 aa, Homo sapiens
  Table A; Target 17264; HLA-A*25:01; COX7B2; ENSG00000170516; TAA
NAVLASGTAF

SEQ ID NO: 17265 - protein, 10 aa, Homo sapiens
  Table A; Target 17265; HLA-B*07:02; COX7B2; ENSG00000170516; TAA
NAVLASGTAF

SEQ ID NO: 17266 - protein, 10 aa, Homo sapiens
  Table A; Target 17266; HLA-B*15:01; COX7B2; ENSG00000170516; TAA
NAVLASGTAF

SEQ ID NO: 17267 - protein, 10 aa, Homo sapiens
  Table A; Target 17267; HLA-B*15:03; COX7B2; ENSG00000170516; TAA
NAVLASGTAF

SEQ ID NO: 17268 - protein, 10 aa, Homo sapiens
  Table A; Target 17268; HLA-B*27:02; COX7B2; ENSG00000170516; TAA
NAVLASGTAF

SEQ ID NO: 17269 - protein, 10 aa, Homo sapiens
  Table A; Target 17269; HLA-B*35:01; COX7B2; ENSG00000170516; TAA
NAVLASGTAF

SEQ ID NO: 17270 - protein, 10 aa, Homo sapiens
  Table A; Target 17270; HLA-B*35:03; COX7B2; ENSG00000170516; TAA
NAVLASGTAF

SEQ ID NO: 17271 - protein, 10 aa, Homo sapiens
  Table A; Target 17271; HLA-B*38:01; COX7B2; ENSG00000170516; TAA
NAVLASGTAF

SEQ ID NO: 17272 - protein, 10 aa, Homo sapiens
  Table A; Target 17272; HLA-B*39:01; COX7B2; ENSG00000170516; TAA
NAVLASGTAF

SEQ ID NO: 17273 - protein, 10 aa, Homo sapiens
  Table A; Target 17273; HLA-B*40:01; COX7B2; ENSG00000170516; TAA
NAVLASGTAF

SEQ ID NO: 17274 - protein, 10 aa, Homo sapiens
  Table A; Target 17274; HLA-B*46:01; COX7B2; ENSG00000170516; TAA
NAVLASGTAF

SEQ ID NO: 17275 - protein, 10 aa, Homo sapiens
  Table A; Target 17275; HLA-B*55:01; COX7B2; ENSG00000170516; TAA
NAVLASGTAF

SEQ ID NO: 17276 - protein, 10 aa, Homo sapiens
  Table A; Target 17276; HLA-B*58:01; COX7B2; ENSG00000170516; TAA
NAVLASGTAF

SEQ ID NO: 17277 - protein, 10 aa, Homo sapiens
  Table A; Target 17277; HLA-C*01:02; COX7B2; ENSG00000170516; TAA
NAVLASGTAF

SEQ ID NO: 17278 - protein, 10 aa, Homo sapiens
  Table A; Target 17278; HLA-C*02:02; COX7B2; ENSG00000170516; TAA
NAVLASGTAF

SEQ ID NO: 17279 - protein, 10 aa, Homo sapiens
  Table A; Target 17279; HLA-C*03:03; COX7B2; ENSG00000170516; TAA
NAVLASGTAF

SEQ ID NO: 17280 - protein, 10 aa, Homo sapiens
  Table A; Target 17280; HLA-C*03:04; COX7B2; ENSG00000170516; TAA
NAVLASGTAF

SEQ ID NO: 17281 - protein, 10 aa, Homo sapiens
  Table A; Target 17281; HLA-C*04:01; COX7B2; ENSG00000170516; TAA
NAVLASGTAF

SEQ ID NO: 17282 - protein, 10 aa, Homo sapiens
  Table A; Target 17282; HLA-C*05:01; COX7B2; ENSG00000170516; TAA
NAVLASGTAF

SEQ ID NO: 17283 - protein, 10 aa, Homo sapiens
  Table A; Target 17283; HLA-C*07:04; COX7B2; ENSG00000170516; TAA
NAVLASGTAF

SEQ ID NO: 17284 - protein, 10 aa, Homo sapiens
  Table A; Target 17284; HLA-C*07:06; COX7B2; ENSG00000170516; TAA
NAVLASGTAF

SEQ ID NO: 17285 - protein, 10 aa, Homo sapiens
  Table A; Target 17285; HLA-C*14:02; COX7B2; ENSG00000170516; TAA
NAVLASGTAF

SEQ ID NO: 17286 - protein, 10 aa, Homo sapiens
  Table A; Target 17286; HLA-C*16:01; COX7B2; ENSG00000170516; TAA
NAVLASGTAF

SEQ ID NO: 17287 - protein, 10 aa, Homo sapiens
  Table A; Target 17287; HLA-C*16:04; COX7B2; ENSG00000170516; TAA
NAVLASGTAF

SEQ ID NO: 17288 - protein, 8 aa, Homo sapiens
  Table A; Target 17288; HLA-A*02:03; COX7B2; ENSG00000170516; TAA
NLSPVGRV

SEQ ID NO: 17289 - protein, 9 aa, Homo sapiens
  Table A; Target 17289; HLA-C*06:02; COX7B2; ENSG00000170516; TAA
NLSPVGRVT

SEQ ID NO: 17290 - protein, 9 aa, Homo sapiens
  Table A; Target 17290; HLA-C*16:01; COX7B2; ENSG00000170516; TAA
NLSPVGRVT

SEQ ID NO: 17291 - protein, 9 aa, Homo sapiens
  Table A; Target 17291; HLA-C*16:02; COX7B2; ENSG00000170516; TAA
NLSPVGRVT

SEQ ID NO: 17292 - protein, 11 aa, Homo sapiens
  Table A; Target 17292; HLA-A*03:01; COX7B2; ENSG00000170516; TAA
NLSPVGRVTPK

SEQ ID NO: 17293 - protein, 11 aa, Homo sapiens
  Table A; Target 17293; HLA-A*03:02; COX7B2; ENSG00000170516; TAA
NLSPVGRVTPK

SEQ ID NO: 17294 - protein, 11 aa, Homo sapiens
  Table A; Target 17294; HLA-A*31:01; COX7B2; ENSG00000170516; TAA
NLSPVGRVTPK

SEQ ID NO: 17295 - protein, 10 aa, Homo sapiens
  Table A; Target 17295; HLA-C*07:02; COX7B2; ENSG00000170516; TAA
PLARNALSSL

SEQ ID NO: 17296 - protein, 8 aa, Homo sapiens
  Table A; Target 17296; HLA-A*03:02; COX7B2; ENSG00000170516; TAA
PVGRVTPK

SEQ ID NO: 17297 - protein, 8 aa, Homo sapiens
  Table A; Target 17297; HLA-A*11:01; COX7B2; ENSG00000170516; TAA
PVGRVTPK

SEQ ID NO: 17298 - protein, 8 aa, Homo sapiens
  Table A; Target 17298; HLA-C*04:01; COX7B2; ENSG00000170516; TAA
PVGRVTPK

SEQ ID NO: 17299 - protein, 8 aa, Homo sapiens
  Table A; Target 17299; HLA-C*06:02; COX7B2; ENSG00000170516; TAA
PVGRVTPK

SEQ ID NO: 17300 - protein, 8 aa, Homo sapiens
  Table A; Target 17300; HLA-C*07:01; COX7B2; ENSG00000170516; TAA
PVGRVTPK

SEQ ID NO: 17301 - protein, 8 aa, Homo sapiens
  Table A; Target 17301; HLA-C*07:02; COX7B2; ENSG00000170516; TAA
PVGRVTPK

SEQ ID NO: 17302 - protein, 9 aa, Homo sapiens
  Table A; Target 17302; HLA-A*01:01; COX7B2; ENSG00000170516; TAA
QSILQSMAR

SEQ ID NO: 17303 - protein, 9 aa, Homo sapiens
  Table A; Target 17303; HLA-A*11:01; COX7B2; ENSG00000170516; TAA
QSILQSMAR

SEQ ID NO: 17304 - protein, 9 aa, Homo sapiens
  Table A; Target 17304; HLA-A*31:01; COX7B2; ENSG00000170516; TAA
QSILQSMAR

SEQ ID NO: 17305 - protein, 9 aa, Homo sapiens
  Table A; Target 17305; HLA-A*33:03; COX7B2; ENSG00000170516; TAA
QSILQSMAR

SEQ ID NO: 17306 - protein, 9 aa, Homo sapiens
  Table A; Target 17306; HLA-A*68:01; COX7B2; ENSG00000170516; TAA
QSILQSMAR

SEQ ID NO: 17307 - protein, 9 aa, Homo sapiens
  Table A; Target 17307; HLA-C*07:06; COX7B2; ENSG00000170516; TAA
QSILQSMAR

SEQ ID NO: 17308 - protein, 11 aa, Homo sapiens
  Table A; Target 17308; HLA-C*06:02; COX7B2; ENSG00000170516; TAA
QSILQSMARHS

SEQ ID NO: 17309 - protein, 9 aa, Homo sapiens
  Table A; Target 17309; HLA-B*38:01; COX7B2; ENSG00000170516; TAA
SHVKHSPDF

SEQ ID NO: 17310 - protein, 8 aa, Homo sapiens
  Table A; Target 17310; HLA-A*31:01; COX7B2; ENSG00000170516; TAA
SILQSMAR

SEQ ID NO: 17311 - protein, 8 aa, Homo sapiens
  Table A; Target 17311; HLA-B*08:01; COX7B2; ENSG00000170516; TAA
SLKIQSIL

SEQ ID NO: 17312 - protein, 9 aa, Homo sapiens
  Table A; Target 17312; HLA-B*07:02; COX7B2; ENSG00000170516; TAA
SLKIQSILQ

SEQ ID NO: 17313 - protein, 9 aa, Homo sapiens
  Table A; Target 17313; HLA-C*04:01; COX7B2; ENSG00000170516; TAA
SLKIQSILQ

SEQ ID NO: 17314 - protein, 9 aa, Homo sapiens
  Table A; Target 17314; HLA-C*06:02; COX7B2; ENSG00000170516; TAA
SLKIQSILQ

SEQ ID NO: 17315 - protein, 9 aa, Homo sapiens
  Table A; Target 17315; HLA-C*07:01; COX7B2; ENSG00000170516; TAA
SLKIQSILQ

SEQ ID NO: 17316 - protein, 11 aa, Homo sapiens
  Table A; Target 17316; HLA-A*02:03; COX7B2; ENSG00000170516; TAA
SLKIQSILQSM

SEQ ID NO: 17317 - protein, 11 aa, Homo sapiens
  Table A; Target 17317; HLA-A*31:01; COX7B2; ENSG00000170516; TAA
SLKIQSILQSM

SEQ ID NO: 17318 - protein, 11 aa, Homo sapiens
  Table A; Target 17318; HLA-C*06:02; COX7B2; ENSG00000170516; TAA
SLKIQSILQSM

SEQ ID NO: 17319 - protein, 9 aa, Homo sapiens
  Table A; Target 17319; HLA-A*03:01; COX7B2; ENSG00000170516; TAA
SMARHSHVK

SEQ ID NO: 17320 - protein, 9 aa, Homo sapiens
  Table A; Target 17320; HLA-A*03:02; COX7B2; ENSG00000170516; TAA
SMARHSHVK

SEQ ID NO: 17321 - protein, 8 aa, Homo sapiens
  Table A; Target 17321; HLA-A*01:01; COX7B2; ENSG00000170516; TAA
SPDFHDKY

SEQ ID NO: 17322 - protein, 8 aa, Homo sapiens
  Table A; Target 17322; HLA-B*35:01; COX7B2; ENSG00000170516; TAA
SPDFHDKY

SEQ ID NO: 17323 - protein, 8 aa, Homo sapiens
  Table A; Target 17323; HLA-B*55:01; COX7B2; ENSG00000170516; TAA
SPDFHDKY

SEQ ID NO: 17324 - protein, 8 aa, Homo sapiens
  Table A; Target 17324; HLA-C*03:03; COX7B2; ENSG00000170516; TAA
SPDFHDKY

SEQ ID NO: 17325 - protein, 8 aa, Homo sapiens
  Table A; Target 17325; HLA-C*04:01; COX7B2; ENSG00000170516; TAA
SPDFHDKY

SEQ ID NO: 17326 - protein, 8 aa, Homo sapiens
  Table A; Target 17326; HLA-C*07:01; COX7B2; ENSG00000170516; TAA
SPDFHDKY

SEQ ID NO: 17327 - protein, 8 aa, Homo sapiens
  Table A; Target 17327; HLA-B*07:02; COX7B2; ENSG00000170516; TAA
SPVGRVTP

SEQ ID NO: 17328 - protein, 8 aa, Homo sapiens
  Table A; Target 17328; HLA-B*08:01; COX7B2; ENSG00000170516; TAA
SPVGRVTP

SEQ ID NO: 17329 - protein, 8 aa, Homo sapiens
  Table A; Target 17329; HLA-B*56:01; COX7B2; ENSG00000170516; TAA
SPVGRVTP

SEQ ID NO: 17330 - protein, 9 aa, Homo sapiens
  Table A; Target 17330; HLA-A*03:01; COX7B2; ENSG00000170516; TAA
SPVGRVTPK

SEQ ID NO: 17331 - protein, 9 aa, Homo sapiens
  Table A; Target 17331; HLA-A*03:02; COX7B2; ENSG00000170516; TAA
SPVGRVTPK

SEQ ID NO: 17332 - protein, 9 aa, Homo sapiens
  Table A; Target 17332; HLA-A*11:01; COX7B2; ENSG00000170516; TAA
SPVGRVTPK

SEQ ID NO: 17333 - protein, 9 aa, Homo sapiens
  Table A; Target 17333; HLA-A*31:01; COX7B2; ENSG00000170516; TAA
SPVGRVTPK

SEQ ID NO: 17334 - protein, 9 aa, Homo sapiens
  Table A; Target 17334; HLA-A*68:01; COX7B2; ENSG00000170516; TAA
SPVGRVTPK

SEQ ID NO: 17335 - protein, 9 aa, Homo sapiens
  Table A; Target 17335; HLA-B*07:02; COX7B2; ENSG00000170516; TAA
SPVGRVTPK

SEQ ID NO: 17336 - protein, 9 aa, Homo sapiens
  Table A; Target 17336; HLA-B*08:01; COX7B2; ENSG00000170516; TAA
SPVGRVTPK

SEQ ID NO: 17337 - protein, 9 aa, Homo sapiens
  Table A; Target 17337; HLA-B*35:01; COX7B2; ENSG00000170516; TAA
SPVGRVTPK

SEQ ID NO: 17338 - protein, 9 aa, Homo sapiens
  Table A; Target 17338; HLA-B*55:01; COX7B2; ENSG00000170516; TAA
SPVGRVTPK

SEQ ID NO: 17339 - protein, 9 aa, Homo sapiens
  Table A; Target 17339; HLA-B*56:01; COX7B2; ENSG00000170516; TAA
SPVGRVTPK

SEQ ID NO: 17340 - protein, 9 aa, Homo sapiens
  Table A; Target 17340; HLA-C*04:01; COX7B2; ENSG00000170516; TAA
SPVGRVTPK

SEQ ID NO: 17341 - protein, 9 aa, Homo sapiens
  Table A; Target 17341; HLA-C*06:02; COX7B2; ENSG00000170516; TAA
SPVGRVTPK

SEQ ID NO: 17342 - protein, 9 aa, Homo sapiens
  Table A; Target 17342; HLA-C*07:02; COX7B2; ENSG00000170516; TAA
SPVGRVTPK

SEQ ID NO: 17343 - protein, 9 aa, Homo sapiens
  Table A; Target 17343; HLA-C*07:06; COX7B2; ENSG00000170516; TAA
SPVGRVTPK

SEQ ID NO: 17344 - protein, 9 aa, Homo sapiens
  Table A; Target 17344; HLA-C*16:01; COX7B2; ENSG00000170516; TAA
SPVGRVTPK

SEQ ID NO: 17345 - protein, 8 aa, Homo sapiens
  Table A; Target 17345; HLA-B*08:01; COX7B2; ENSG00000170516; TAA
SSLKIQSI

SEQ ID NO: 17346 - protein, 8 aa, Homo sapiens
  Table A; Target 17346; HLA-B*13:02; COX7B2; ENSG00000170516; TAA
SSLKIQSI

SEQ ID NO: 17347 - protein, 8 aa, Homo sapiens
  Table A; Target 17347; HLA-B*51:01; COX7B2; ENSG00000170516; TAA
SSLKIQSI

SEQ ID NO: 17348 - protein, 8 aa, Homo sapiens
  Table A; Target 17348; HLA-B*58:01; COX7B2; ENSG00000170516; TAA
SSLKIQSI

SEQ ID NO: 17349 - protein, 9 aa, Homo sapiens
  Table A; Target 17349; HLA-B*08:01; COX7B2; ENSG00000170516; TAA
SSLKIQSIL

SEQ ID NO: 17350 - protein, 9 aa, Homo sapiens
  Table A; Target 17350; HLA-B*40:02; COX7B2; ENSG00000170516; TAA
SSLKIQSIL

SEQ ID NO: 17351 - protein, 9 aa, Homo sapiens
  Table A; Target 17351; HLA-B*57:01; COX7B2; ENSG00000170516; TAA
SSLKIQSIL

SEQ ID NO: 17352 - protein, 9 aa, Homo sapiens
  Table A; Target 17352; HLA-B*58:01; COX7B2; ENSG00000170516; TAA
SSLKIQSIL

SEQ ID NO: 17353 - protein, 9 aa, Homo sapiens
  Table A; Target 17353; HLA-C*02:02; COX7B2; ENSG00000170516; TAA
SSLKIQSIL

SEQ ID NO: 17354 - protein, 9 aa, Homo sapiens
  Table A; Target 17354; HLA-C*03:04; COX7B2; ENSG00000170516; TAA
SSLKIQSIL

SEQ ID NO: 17355 - protein, 9 aa, Homo sapiens
  Table A; Target 17355; HLA-C*06:02; COX7B2; ENSG00000170516; TAA
SSLKIQSIL

SEQ ID NO: 17356 - protein, 9 aa, Homo sapiens
  Table A; Target 17356; HLA-C*07:02; COX7B2; ENSG00000170516; TAA
SSLKIQSIL

SEQ ID NO: 17357 - protein, 9 aa, Homo sapiens
  Table A; Target 17357; HLA-C*12:03; COX7B2; ENSG00000170516; TAA
SSLKIQSIL

SEQ ID NO: 17358 - protein, 9 aa, Homo sapiens
  Table A; Target 17358; HLA-C*16:01; COX7B2; ENSG00000170516; TAA
SSLKIQSIL

SEQ ID NO: 17359 - protein, 8 aa, Homo sapiens
  Table A; Target 17359; HLA-A*25:01; COX7B2; ENSG00000170516; TAA
TAFCVATW

SEQ ID NO: 17360 - protein, 8 aa, Homo sapiens
  Table A; Target 17360; HLA-B*51:01; COX7B2; ENSG00000170516; TAA
TAFCVATW

SEQ ID NO: 17361 - protein, 8 aa, Homo sapiens
  Table A; Target 17361; HLA-B*57:01; COX7B2; ENSG00000170516; TAA
TAFCVATW

SEQ ID NO: 17362 - protein, 8 aa, Homo sapiens
  Table A; Target 17362; HLA-B*58:01; COX7B2; ENSG00000170516; TAA
TAFCVATW

SEQ ID NO: 17363 - protein, 9 aa, Homo sapiens
  Table A; Target 17363; HLA-A*68:02; COX7B2; ENSG00000170516; TAA
TAFCVATWV

SEQ ID NO: 17364 - protein, 9 aa, Homo sapiens
  Table A; Target 17364; HLA-A*23:01; COX7B2; ENSG00000170516; TAA
TATQIGIEW

SEQ ID NO: 17365 - protein, 9 aa, Homo sapiens
  Table A; Target 17365; HLA-A*24:02; COX7B2; ENSG00000170516; TAA
TATQIGIEW

SEQ ID NO: 17366 - protein, 9 aa, Homo sapiens
  Table A; Target 17366; HLA-A*25:01; COX7B2; ENSG00000170516; TAA
TATQIGIEW

SEQ ID NO: 17367 - protein, 9 aa, Homo sapiens
  Table A; Target 17367; HLA-A*26:01; COX7B2; ENSG00000170516; TAA
TATQIGIEW

SEQ ID NO: 17368 - protein, 9 aa, Homo sapiens
  Table A; Target 17368; HLA-A*29:02; COX7B2; ENSG00000170516; TAA
TATQIGIEW

SEQ ID NO: 17369 - protein, 9 aa, Homo sapiens
  Table A; Target 17369; HLA-A*31:01; COX7B2; ENSG00000170516; TAA
TATQIGIEW

SEQ ID NO: 17370 - protein, 9 aa, Homo sapiens
  Table A; Target 17370; HLA-A*32:01; COX7B2; ENSG00000170516; TAA
TATQIGIEW

SEQ ID NO: 17371 - protein, 9 aa, Homo sapiens
  Table A; Target 17371; HLA-A*33:01; COX7B2; ENSG00000170516; TAA
TATQIGIEW

SEQ ID NO: 17372 - protein, 9 aa, Homo sapiens
  Table A; Target 17372; HLA-A*33:03; COX7B2; ENSG00000170516; TAA
TATQIGIEW

SEQ ID NO: 17373 - protein, 9 aa, Homo sapiens
  Table A; Target 17373; HLA-A*68:01; COX7B2; ENSG00000170516; TAA
TATQIGIEW

SEQ ID NO: 17374 - protein, 9 aa, Homo sapiens
  Table A; Target 17374; HLA-A*68:02; COX7B2; ENSG00000170516; TAA
TATQIGIEW

SEQ ID NO: 17375 - protein, 9 aa, Homo sapiens
  Table A; Target 17375; HLA-B*27:02; COX7B2; ENSG00000170516; TAA
TATQIGIEW

SEQ ID NO: 17376 - protein, 9 aa, Homo sapiens
  Table A; Target 17376; HLA-B*27:05; COX7B2; ENSG00000170516; TAA
TATQIGIEW

SEQ ID NO: 17377 - protein, 9 aa, Homo sapiens
  Table A; Target 17377; HLA-B*35:03; COX7B2; ENSG00000170516; TAA
TATQIGIEW

SEQ ID NO: 17378 - protein, 9 aa, Homo sapiens
  Table A; Target 17378; HLA-B*38:01; COX7B2; ENSG00000170516; TAA
TATQIGIEW

SEQ ID NO: 17379 - protein, 9 aa, Homo sapiens
  Table A; Target 17379; HLA-B*39:01; COX7B2; ENSG00000170516; TAA
TATQIGIEW

SEQ ID NO: 17380 - protein, 9 aa, Homo sapiens
  Table A; Target 17380; HLA-B*44:02; COX7B2; ENSG00000170516; TAA
TATQIGIEW

SEQ ID NO: 17381 - protein, 9 aa, Homo sapiens
  Table A; Target 17381; HLA-B*44:03; COX7B2; ENSG00000170516; TAA
TATQIGIEW

SEQ ID NO: 17382 - protein, 9 aa, Homo sapiens
  Table A; Target 17382; HLA-B*46:01; COX7B2; ENSG00000170516; TAA
TATQIGIEW

SEQ ID NO: 17383 - protein, 9 aa, Homo sapiens
  Table A; Target 17383; HLA-B*54:01; COX7B2; ENSG00000170516; TAA
TATQIGIEW

SEQ ID NO: 17384 - protein, 9 aa, Homo sapiens
  Table A; Target 17384; HLA-B*55:01; COX7B2; ENSG00000170516; TAA
TATQIGIEW

SEQ ID NO: 17385 - protein, 9 aa, Homo sapiens
  Table A; Target 17385; HLA-B*58:01; COX7B2; ENSG00000170516; TAA
TATQIGIEW

SEQ ID NO: 17386 - protein, 9 aa, Homo sapiens
  Table A; Target 17386; HLA-C*02:02; COX7B2; ENSG00000170516; TAA
TATQIGIEW

SEQ ID NO: 17387 - protein, 9 aa, Homo sapiens
  Table A; Target 17387; HLA-C*03:03; COX7B2; ENSG00000170516; TAA
TATQIGIEW

SEQ ID NO: 17388 - protein, 9 aa, Homo sapiens
  Table A; Target 17388; HLA-C*03:04; COX7B2; ENSG00000170516; TAA
TATQIGIEW

SEQ ID NO: 17389 - protein, 9 aa, Homo sapiens
  Table A; Target 17389; HLA-C*04:01; COX7B2; ENSG00000170516; TAA
TATQIGIEW

SEQ ID NO: 17390 - protein, 9 aa, Homo sapiens
  Table A; Target 17390; HLA-C*07:04; COX7B2; ENSG00000170516; TAA
TATQIGIEW

SEQ ID NO: 17391 - protein, 9 aa, Homo sapiens
  Table A; Target 17391; HLA-C*07:06; COX7B2; ENSG00000170516; TAA
TATQIGIEW

SEQ ID NO: 17392 - protein, 9 aa, Homo sapiens
  Table A; Target 17392; HLA-C*12:03; COX7B2; ENSG00000170516; TAA
TATQIGIEW

SEQ ID NO: 17393 - protein, 9 aa, Homo sapiens
  Table A; Target 17393; HLA-C*16:01; COX7B2; ENSG00000170516; TAA
TATQIGIEW

SEQ ID NO: 17394 - protein, 9 aa, Homo sapiens
  Table A; Target 17394; HLA-C*16:02; COX7B2; ENSG00000170516; TAA
TATQIGIEW

SEQ ID NO: 17395 - protein, 9 aa, Homo sapiens
  Table A; Target 17395; HLA-C*16:04; COX7B2; ENSG00000170516; TAA
TATQIGIEW

SEQ ID NO: 17396 - protein, 9 aa, Homo sapiens
  Table A; Target 17396; HLA-A*02:01; COX7B2; ENSG00000170516; TAA
TQIGIEWNL

SEQ ID NO: 17397 - protein, 9 aa, Homo sapiens
  Table A; Target 17397; HLA-A*02:04; COX7B2; ENSG00000170516; TAA
TQIGIEWNL

SEQ ID NO: 17398 - protein, 9 aa, Homo sapiens
  Table A; Target 17398; HLA-A*02:07; COX7B2; ENSG00000170516; TAA
TQIGIEWNL

SEQ ID NO: 17399 - protein, 9 aa, Homo sapiens
  Table A; Target 17399; HLA-A*23:01; COX7B2; ENSG00000170516; TAA
TQIGIEWNL

SEQ ID NO: 17400 - protein, 9 aa, Homo sapiens
  Table A; Target 17400; HLA-A*24:02; COX7B2; ENSG00000170516; TAA
TQIGIEWNL

SEQ ID NO: 17401 - protein, 9 aa, Homo sapiens
  Table A; Target 17401; HLA-A*30:01; COX7B2; ENSG00000170516; TAA
TQIGIEWNL

SEQ ID NO: 17402 - protein, 9 aa, Homo sapiens
  Table A; Target 17402; HLA-A*31:01; COX7B2; ENSG00000170516; TAA
TQIGIEWNL

SEQ ID NO: 17403 - protein, 9 aa, Homo sapiens
  Table A; Target 17403; HLA-A*68:02; COX7B2; ENSG00000170516; TAA
TQIGIEWNL

SEQ ID NO: 17404 - protein, 9 aa, Homo sapiens
  Table A; Target 17404; HLA-B*27:05; COX7B2; ENSG00000170516; TAA
TQIGIEWNL

SEQ ID NO: 17405 - protein, 9 aa, Homo sapiens
  Table A; Target 17405; HLA-B*35:03; COX7B2; ENSG00000170516; TAA
TQIGIEWNL

SEQ ID NO: 17406 - protein, 9 aa, Homo sapiens
  Table A; Target 17406; HLA-B*39:01; COX7B2; ENSG00000170516; TAA
TQIGIEWNL

SEQ ID NO: 17407 - protein, 9 aa, Homo sapiens
  Table A; Target 17407; HLA-B*40:02; COX7B2; ENSG00000170516; TAA
TQIGIEWNL

SEQ ID NO: 17408 - protein, 9 aa, Homo sapiens
  Table A; Target 17408; HLA-C*06:02; COX7B2; ENSG00000170516; TAA
TQIGIEWNL

SEQ ID NO: 17409 - protein, 9 aa, Homo sapiens
  Table A; Target 17409; HLA-A*23:01; COX7B2; ENSG00000170516; TAA
TWVFTATQI

SEQ ID NO: 17410 - protein, 9 aa, Homo sapiens
  Table A; Target 17410; HLA-A*24:02; COX7B2; ENSG00000170516; TAA
TWVFTATQI

SEQ ID NO: 17411 - protein, 9 aa, Homo sapiens
  Table A; Target 17411; HLA-C*04:01; COX7B2; ENSG00000170516; TAA
TWVFTATQI

SEQ ID NO: 17412 - protein, 9 aa, Homo sapiens
  Table A; Target 17412; HLA-C*06:02; COX7B2; ENSG00000170516; TAA
TWVFTATQI

SEQ ID NO: 17413 - protein, 8 aa, Homo sapiens
  Table A; Target 17413; HLA-B*54:01; COX7B2; ENSG00000170516; TAA
VATWVFTA

SEQ ID NO: 17414 - protein, 8 aa, Homo sapiens
  Table A; Target 17414; HLA-B*56:01; COX7B2; ENSG00000170516; TAA
VATWVFTA

SEQ ID NO: 17415 - protein, 9 aa, Homo sapiens
  Table A; Target 17415; HLA-B*54:01; COX7B2; ENSG00000170516; TAA
VATWVFTAT

SEQ ID NO: 17416 - protein, 9 aa, Homo sapiens
  Table A; Target 17416; HLA-A*23:01; COX7B2; ENSG00000170516; TAA
VFTATQIGI

SEQ ID NO: 17417 - protein, 9 aa, Homo sapiens
  Table A; Target 17417; HLA-A*24:02; COX7B2; ENSG00000170516; TAA
VFTATQIGI

SEQ ID NO: 17418 - protein, 9 aa, Homo sapiens
  Table A; Target 17418; HLA-A*30:01; COX7B2; ENSG00000170516; TAA
VFTATQIGI

SEQ ID NO: 17419 - protein, 9 aa, Homo sapiens
  Table A; Target 17419; HLA-B*13:02; COX7B2; ENSG00000170516; TAA
VFTATQIGI

SEQ ID NO: 17420 - protein, 9 aa, Homo sapiens
  Table A; Target 17420; HLA-C*04:01; COX7B2; ENSG00000170516; TAA
VFTATQIGI

SEQ ID NO: 17421 - protein, 9 aa, Homo sapiens
  Table A; Target 17421; HLA-C*07:01; COX7B2; ENSG00000170516; TAA
VFTATQIGI

SEQ ID NO: 17422 - protein, 9 aa, Homo sapiens
  Table A; Target 17422; HLA-C*14:02; COX7B2; ENSG00000170516; TAA
VFTATQIGI

SEQ ID NO: 17423 - protein, 11 aa, Homo sapiens
  Table A; Target 17423; HLA-A*23:01; COX7B2; ENSG00000170516; TAA
VFTATQIGIEW

SEQ ID NO: 17424 - protein, 11 aa, Homo sapiens
  Table A; Target 17424; HLA-A*24:02; COX7B2; ENSG00000170516; TAA
VFTATQIGIEW

SEQ ID NO: 17425 - protein, 9 aa, Homo sapiens
  Table A; Target 17425; HLA-B*57:01; COX7B2; ENSG00000170516; TAA
VGRVTPKEW

SEQ ID NO: 17426 - protein, 8 aa, Homo sapiens
  Table A; Target 17426; HLA-A*23:01; COX7B2; ENSG00000170516; TAA
VLASGTAF

SEQ ID NO: 17427 - protein, 8 aa, Homo sapiens
  Table A; Target 17427; HLA-A*32:01; COX7B2; ENSG00000170516; TAA
VLASGTAF

SEQ ID NO: 17428 - protein, 8 aa, Homo sapiens
  Table A; Target 17428; HLA-B*07:02; COX7B2; ENSG00000170516; TAA
VLASGTAF

SEQ ID NO: 17429 - protein, 8 aa, Homo sapiens
  Table A; Target 17429; HLA-B*08:01; COX7B2; ENSG00000170516; TAA
VLASGTAF

SEQ ID NO: 17430 - protein, 8 aa, Homo sapiens
  Table A; Target 17430; HLA-B*15:01; COX7B2; ENSG00000170516; TAA
VLASGTAF

SEQ ID NO: 17431 - protein, 8 aa, Homo sapiens
  Table A; Target 17431; HLA-B*15:03; COX7B2; ENSG00000170516; TAA
VLASGTAF

SEQ ID NO: 17432 - protein, 8 aa, Homo sapiens
  Table A; Target 17432; HLA-B*37:01; COX7B2; ENSG00000170516; TAA
VLASGTAF

SEQ ID NO: 17433 - protein, 8 aa, Homo sapiens
  Table A; Target 17433; HLA-B*39:01; COX7B2; ENSG00000170516; TAA
VLASGTAF

SEQ ID NO: 17434 - protein, 8 aa, Homo sapiens
  Table A; Target 17434; HLA-B*46:01; COX7B2; ENSG00000170516; TAA
VLASGTAF

SEQ ID NO: 17435 - protein, 8 aa, Homo sapiens
  Table A; Target 17435; HLA-C*01:02; COX7B2; ENSG00000170516; TAA
VLASGTAF

SEQ ID NO: 17436 - protein, 8 aa, Homo sapiens
  Table A; Target 17436; HLA-C*02:02; COX7B2; ENSG00000170516; TAA
VLASGTAF

SEQ ID NO: 17437 - protein, 8 aa, Homo sapiens
  Table A; Target 17437; HLA-C*03:03; COX7B2; ENSG00000170516; TAA
VLASGTAF

SEQ ID NO: 17438 - protein, 8 aa, Homo sapiens
  Table A; Target 17438; HLA-C*03:04; COX7B2; ENSG00000170516; TAA
VLASGTAF

SEQ ID NO: 17439 - protein, 8 aa, Homo sapiens
  Table A; Target 17439; HLA-C*04:01; COX7B2; ENSG00000170516; TAA
VLASGTAF

SEQ ID NO: 17440 - protein, 8 aa, Homo sapiens
  Table A; Target 17440; HLA-C*05:01; COX7B2; ENSG00000170516; TAA
VLASGTAF

SEQ ID NO: 17441 - protein, 8 aa, Homo sapiens
  Table A; Target 17441; HLA-C*07:04; COX7B2; ENSG00000170516; TAA
VLASGTAF

SEQ ID NO: 17442 - protein, 8 aa, Homo sapiens
  Table A; Target 17442; HLA-C*14:02; COX7B2; ENSG00000170516; TAA
VLASGTAF

SEQ ID NO: 17443 - protein, 8 aa, Homo sapiens
  Table A; Target 17443; HLA-C*16:01; COX7B2; ENSG00000170516; TAA
VLASGTAF

SEQ ID NO: 17444 - protein, 9 aa, Homo sapiens
  Table A; Target 17444; HLA-A*02:01; COX7B2; ENSG00000170516; TAA
VLASGTAFC

SEQ ID NO: 17445 - protein, 9 aa, Homo sapiens
  Table A; Target 17445; HLA-A*02:03; COX7B2; ENSG00000170516; TAA
VLASGTAFC

SEQ ID NO: 17446 - protein, 10 aa, Homo sapiens
  Table A; Target 17446; HLA-A*02:01; COX7B2; ENSG00000170516; TAA
VLASGTAFCV

SEQ ID NO: 17447 - protein, 10 aa, Homo sapiens
  Table A; Target 17447; HLA-A*02:03; COX7B2; ENSG00000170516; TAA
VLASGTAFCV

SEQ ID NO: 17448 - protein, 10 aa, Homo sapiens
  Table A; Target 17448; HLA-A*02:04; COX7B2; ENSG00000170516; TAA
VLASGTAFCV

SEQ ID NO: 17449 - protein, 10 aa, Homo sapiens
  Table A; Target 17449; HLA-B*13:02; COX7B2; ENSG00000170516; TAA
VLASGTAFCV

SEQ ID NO: 17450 - protein, 10 aa, Homo sapiens
  Table A; Target 17450; HLA-B*55:01; COX7B2; ENSG00000170516; TAA
VLASGTAFCV

SEQ ID NO: 17451 - protein, 10 aa, Homo sapiens
  Table A; Target 17451; HLA-C*06:02; COX7B2; ENSG00000170516; TAA
VLASGTAFCV

SEQ ID NO: 17452 - protein, 11 aa, Homo sapiens
  Table A; Target 17452; HLA-A*02:01; COX7B2; ENSG00000170516; TAA
VLASGTAFCVA

SEQ ID NO: 17453 - protein, 11 aa, Homo sapiens
  Table A; Target 17453; HLA-A*02:03; COX7B2; ENSG00000170516; TAA
VLASGTAFCVA

SEQ ID NO: 17454 - protein, 11 aa, Homo sapiens
  Table A; Target 17454; HLA-C*06:02; COX7B2; ENSG00000170516; TAA
VLASGTAFCVA

SEQ ID NO: 17455 - protein, 8 aa, Homo sapiens
  Table A; Target 17455; HLA-A*33:03; COX7B2; ENSG00000170516; TAA
WNLSPVGR

SEQ ID NO: 17456 - protein, 8 aa, Homo sapiens
  Table A; Target 17456; HLA-B*51:01; COX7B2; ENSG00000170516; TAA
WVFTATQI

SEQ ID NO: 17457 - protein, 9 aa, Homo sapiens
  Table A; Target 17457; HLA-B*27:05; COX7B2; ENSG00000170516; TAA
YGNAVLASG

SEQ ID NO: 17458 - protein, 9 aa, Homo sapiens
  Table A; Target 17458; HLA-B*46:01; COX7B2; ENSG00000170516; TAA
YGNAVLASG

SEQ ID NO: 17459 - protein, 9 aa, Homo sapiens
  Table A; Target 17459; HLA-B*54:01; COX7B2; ENSG00000170516; TAA
YGNAVLASG

SEQ ID NO: 17460 - protein, 9 aa, Homo sapiens
  Table A; Target 17460; HLA-B*56:01; COX7B2; ENSG00000170516; TAA
YGNAVLASG

SEQ ID NO: 17461 - protein, 9 aa, Homo sapiens
  Table A; Target 17461; HLA-C*07:02; COX7B2; ENSG00000170516; TAA
YGNAVLASG

SEQ ID NO: 17462 - protein, 9 aa, Homo sapiens
  Table A; Target 17462; HLA-C*14:02; COX7B2; ENSG00000170516; TAA
YGNAVLASG

SEQ ID NO: 17463 - protein, 10 aa, Homo sapiens
  Table A; Target 17463; HLA-C*06:02; COX7B2; ENSG00000170516; TAA
YGNAVLASGT

SEQ ID NO: 17464 - protein, 8 aa, Homo sapiens
  Table A; Target 17464; HLA-B*08:01; CRYGC; ENSG00000163254; CTA
AGSLRRVV

SEQ ID NO: 17465 - protein, 8 aa, Homo sapiens
  Table A; Target 17465; HLA-C*16:01; CRYGC; ENSG00000163254; CTA
AGSLRRVV

SEQ ID NO: 17466 - protein, 11 aa, Homo sapiens
  Table A; Target 17466; HLA-A*30:02; CRYGC; ENSG00000163254; CTA
AGSLRRVVDLY

SEQ ID NO: 17467 - protein, 11 aa, Homo sapiens
  Table A; Target 17467; HLA-C*07:01; CRYGC; ENSG00000163254; CTA
AGSLRRVVDLY

SEQ ID NO: 17468 - protein, 9 aa, Homo sapiens
  Table A; Target 17468; HLA-A*02:01; CRYGC; ENSG00000163254; CTA
AMDAKAGSL

SEQ ID NO: 17469 - protein, 9 aa, Homo sapiens
  Table A; Target 17469; HLA-A*02:03; CRYGC; ENSG00000163254; CTA
AMDAKAGSL

SEQ ID NO: 17470 - protein, 9 aa, Homo sapiens
  Table A; Target 17470; HLA-A*02:07; CRYGC; ENSG00000163254; CTA
AMDAKAGSL

SEQ ID NO: 17471 - protein, 9 aa, Homo sapiens
  Table A; Target 17471; HLA-A*03:01; CRYGC; ENSG00000163254; CTA
AMDAKAGSL

SEQ ID NO: 17472 - protein, 9 aa, Homo sapiens
  Table A; Target 17472; HLA-A*03:02; CRYGC; ENSG00000163254; CTA
AMDAKAGSL

SEQ ID NO: 17473 - protein, 9 aa, Homo sapiens
  Table A; Target 17473; HLA-B*07:02; CRYGC; ENSG00000163254; CTA
AMDAKAGSL

SEQ ID NO: 17474 - protein, 9 aa, Homo sapiens
  Table A; Target 17474; HLA-B*08:01; CRYGC; ENSG00000163254; CTA
AMDAKAGSL

SEQ ID NO: 17475 - protein, 9 aa, Homo sapiens
  Table A; Target 17475; HLA-B*37:01; CRYGC; ENSG00000163254; CTA
AMDAKAGSL

SEQ ID NO: 17476 - protein, 9 aa, Homo sapiens
  Table A; Target 17476; HLA-B*38:01; CRYGC; ENSG00000163254; CTA
AMDAKAGSL

SEQ ID NO: 17477 - protein, 9 aa, Homo sapiens
  Table A; Target 17477; HLA-B*40:01; CRYGC; ENSG00000163254; CTA
AMDAKAGSL

SEQ ID NO: 17478 - protein, 9 aa, Homo sapiens
  Table A; Target 17478; HLA-B*55:01; CRYGC; ENSG00000163254; CTA
AMDAKAGSL

SEQ ID NO: 17479 - protein, 9 aa, Homo sapiens
  Table A; Target 17479; HLA-C*01:02; CRYGC; ENSG00000163254; CTA
AMDAKAGSL

SEQ ID NO: 17480 - protein, 9 aa, Homo sapiens
  Table A; Target 17480; HLA-C*03:04; CRYGC; ENSG00000163254; CTA
AMDAKAGSL

SEQ ID NO: 17481 - protein, 9 aa, Homo sapiens
  Table A; Target 17481; HLA-C*04:01; CRYGC; ENSG00000163254; CTA
AMDAKAGSL

SEQ ID NO: 17482 - protein, 9 aa, Homo sapiens
  Table A; Target 17482; HLA-C*05:01; CRYGC; ENSG00000163254; CTA
AMDAKAGSL

SEQ ID NO: 17483 - protein, 9 aa, Homo sapiens
  Table A; Target 17483; HLA-C*07:02; CRYGC; ENSG00000163254; CTA
AMDAKAGSL

SEQ ID NO: 17484 - protein, 9 aa, Homo sapiens
  Table A; Target 17484; HLA-C*14:02; CRYGC; ENSG00000163254; CTA
AMDAKAGSL

SEQ ID NO: 17485 - protein, 10 aa, Homo sapiens
  Table A; Target 17485; HLA-A*03:01; CRYGC; ENSG00000163254; CTA
AMDAKAGSLR

SEQ ID NO: 17486 - protein, 10 aa, Homo sapiens
  Table A; Target 17486; HLA-A*31:01; CRYGC; ENSG00000163254; CTA
AMDAKAGSLR

SEQ ID NO: 17487 - protein, 9 aa, Homo sapiens
  Table A; Target 17487; HLA-A*03:01; CRYGC; ENSG00000163254; CTA
CLIPQTVSH

SEQ ID NO: 17488 - protein, 9 aa, Homo sapiens
  Table A; Target 17488; HLA-A*03:02; CRYGC; ENSG00000163254; CTA
CLIPQTVSH

SEQ ID NO: 17489 - protein, 9 aa, Homo sapiens
  Table A; Target 17489; HLA-A*32:01; CRYGC; ENSG00000163254; CTA
CLIPQTVSH

SEQ ID NO: 17490 - protein, 9 aa, Homo sapiens
  Table A; Target 17490; HLA-B*15:01; CRYGC; ENSG00000163254; CTA
CLIPQTVSH

SEQ ID NO: 17491 - protein, 9 aa, Homo sapiens
  Table A; Target 17491; HLA-B*15:03; CRYGC; ENSG00000163254; CTA
CLIPQTVSH

SEQ ID NO: 17492 - protein, 9 aa, Homo sapiens
  Table A; Target 17492; HLA-B*46:01; CRYGC; ENSG00000163254; CTA
CLIPQTVSH

SEQ ID NO: 17493 - protein, 9 aa, Homo sapiens
  Table A; Target 17493; HLA-C*01:02; CRYGC; ENSG00000163254; CTA
CLIPQTVSH

SEQ ID NO: 17494 - protein, 9 aa, Homo sapiens
  Table A; Target 17494; HLA-C*14:02; CRYGC; ENSG00000163254; CTA
CLIPQTVSH

SEQ ID NO: 17495 - protein, 10 aa, Homo sapiens
  Table A; Target 17495; HLA-A*31:01; CRYGC; ENSG00000163254; CTA
CLIPQTVSHR

SEQ ID NO: 17496 - protein, 11 aa, Homo sapiens
  Table A; Target 17496; HLA-A*02:01; CRYGC; ENSG00000163254; CTA
CLIPQTVSHRL

SEQ ID NO: 17497 - protein, 11 aa, Homo sapiens
  Table A; Target 17497; HLA-A*02:04; CRYGC; ENSG00000163254; CTA
CLIPQTVSHRL

SEQ ID NO: 17498 - protein, 8 aa, Homo sapiens
  Table A; Target 17498; HLA-A*33:01; CRYGC; ENSG00000163254; CTA
DAKAGSLR

SEQ ID NO: 17499 - protein, 8 aa, Homo sapiens
  Table A; Target 17499; HLA-A*33:03; CRYGC; ENSG00000163254; CTA
DAKAGSLR

SEQ ID NO: 17500 - protein, 8 aa, Homo sapiens
  Table A; Target 17500; HLA-A*68:01; CRYGC; ENSG00000163254; CTA
DAKAGSLR

SEQ ID NO: 17501 - protein, 8 aa, Homo sapiens
  Table A; Target 17501; HLA-C*07:06; CRYGC; ENSG00000163254; CTA
DAKAGSLR

SEQ ID NO: 17502 - protein, 9 aa, Homo sapiens
  Table A; Target 17502; HLA-A*33:01; CRYGC; ENSG00000163254; CTA
DAKAGSLRR

SEQ ID NO: 17503 - protein, 9 aa, Homo sapiens
  Table A; Target 17503; HLA-A*33:03; CRYGC; ENSG00000163254; CTA
DAKAGSLRR

SEQ ID NO: 17504 - protein, 9 aa, Homo sapiens
  Table A; Target 17504; HLA-A*68:01; CRYGC; ENSG00000163254; CTA
DAKAGSLRR

SEQ ID NO: 17505 - protein, 9 aa, Homo sapiens
  Table A; Target 17505; HLA-A*26:01; CRYGC; ENSG00000163254; CTA
DCPNLQPYF

SEQ ID NO: 17506 - protein, 9 aa, Homo sapiens
  Table A; Target 17506; HLA-A*33:01; CRYGC; ENSG00000163254; CTA
DCPNLQPYF

SEQ ID NO: 17507 - protein, 9 aa, Homo sapiens
  Table A; Target 17507; HLA-C*07:01; CRYGC; ENSG00000163254; CTA
DCPNLQPYF

SEQ ID NO: 17508 - protein, 11 aa, Homo sapiens
  Table A; Target 17508; HLA-A*33:01; CRYGC; ENSG00000163254; CTA
DCPNLQPYFSR

SEQ ID NO: 17509 - protein, 9 aa, Homo sapiens
  Table A; Target 17509; HLA-C*07:01; CRYGC; ENSG00000163254; CTA
DRAFQGRSY

SEQ ID NO: 17510 - protein, 9 aa, Homo sapiens
  Table A; Target 17510; HLA-A*33:01; CRYGC; ENSG00000163254; CTA
EDCPSIQDR

SEQ ID NO: 17511 - protein, 9 aa, Homo sapiens
  Table A; Target 17511; HLA-A*33:03; CRYGC; ENSG00000163254; CTA
EDCPSIQDR

SEQ ID NO: 17512 - protein, 8 aa, Homo sapiens
  Table A; Target 17512; HLA-B*37:01; CRYGC; ENSG00000163254; CTA
EDHKGLMM

SEQ ID NO: 17513 - protein, 8 aa, Homo sapiens
  Table A; Target 17513; HLA-A*33:01; CRYGC; ENSG00000163254; CTA
EDRAFQGR

SEQ ID NO: 17514 - protein, 8 aa, Homo sapiens
  Table A; Target 17514; HLA-A*33:03; CRYGC; ENSG00000163254; CTA
EDRAFQGR

SEQ ID NO: 17515 - protein, 10 aa, Homo sapiens
  Table A; Target 17515; HLA-A*25:01; CRYGC; ENSG00000163254; CTA
EDRAFQGRSY

SEQ ID NO: 17516 - protein, 10 aa, Homo sapiens
  Table A; Target 17516; HLA-B*44:02; CRYGC; ENSG00000163254; CTA
EDRAFQGRSY

SEQ ID NO: 17517 - protein, 8 aa, Homo sapiens
  Table A; Target 17517; HLA-B*08:01; CRYGC; ENSG00000163254; CTA
EIRSLHVL

SEQ ID NO: 17518 - protein, 10 aa, Homo sapiens
  Table A; Target 17518; HLA-A*26:01; CRYGC; ENSG00000163254; CTA
ELPNYRGRQY

SEQ ID NO: 17519 - protein, 9 aa, Homo sapiens
  Table A; Target 17519; HLA-A*26:01; CRYGC; ENSG00000163254; CTA
ELSEDCPSI

SEQ ID NO: 17520 - protein, 9 aa, Homo sapiens
  Table A; Target 17520; HLA-B*38:01; CRYGC; ENSG00000163254; CTA
ELSEDCPSI

SEQ ID NO: 17521 - protein, 9 aa, Homo sapiens
  Table A; Target 17521; HLA-B*39:01; CRYGC; ENSG00000163254; CTA
ELSEDCPSI

SEQ ID NO: 17522 - protein, 10 aa, Homo sapiens
  Table A; Target 17522; HLA-B*07:02; CRYGC; ENSG00000163254; CTA
ERPNYQGQQY

SEQ ID NO: 17523 - protein, 10 aa, Homo sapiens
  Table A; Target 17523; HLA-B*27:02; CRYGC; ENSG00000163254; CTA
ERPNYQGQQY

SEQ ID NO: 17524 - protein, 10 aa, Homo sapiens
  Table A; Target 17524; HLA-B*27:05; CRYGC; ENSG00000163254; CTA
ERPNYQGQQY

SEQ ID NO: 17525 - protein, 10 aa, Homo sapiens
  Table A; Target 17525; HLA-C*07:01; CRYGC; ENSG00000163254; CTA
ERPNYQGQQY

SEQ ID NO: 17526 - protein, 10 aa, Homo sapiens
  Table A; Target 17526; HLA-C*16:04; CRYGC; ENSG00000163254; CTA
ERPNYQGQQY

SEQ ID NO: 17527 - protein, 9 aa, Homo sapiens
  Table A; Target 17527; HLA-A*25:01; CRYGC; ENSG00000163254; CTA
ETTTDCPNL

SEQ ID NO: 17528 - protein, 9 aa, Homo sapiens
  Table A; Target 17528; HLA-A*26:01; CRYGC; ENSG00000163254; CTA
ETTTDCPNL

SEQ ID NO: 17529 - protein, 9 aa, Homo sapiens
  Table A; Target 17529; HLA-C*06:02; CRYGC; ENSG00000163254; CTA
ETTTDCPNL

SEQ ID NO: 17530 - protein, 8 aa, Homo sapiens
  Table A; Target 17530; HLA-A*33:03; CRYGC; ENSG00000163254; CTA
EYPDYQQW

SEQ ID NO: 17531 - protein, 11 aa, Homo sapiens
  Table A; Target 17531; HLA-A*24:02; CRYGC; ENSG00000163254; CTA
EYPDYQQWMGL

SEQ ID NO: 17532 - protein, 9 aa, Homo sapiens
  Table A; Target 17532; HLA-A*02:04; CRYGC; ENSG00000163254; CTA
FHLSEIRSL

SEQ ID NO: 17533 - protein, 9 aa, Homo sapiens
  Table A; Target 17533; HLA-B*38:01; CRYGC; ENSG00000163254; CTA
FHLSEIRSL

SEQ ID NO: 17534 - protein, 9 aa, Homo sapiens
  Table A; Target 17534; HLA-C*12:03; CRYGC; ENSG00000163254; CTA
FHLSEIRSL

SEQ ID NO: 17535 - protein, 8 aa, Homo sapiens
  Table A; Target 17535; HLA-C*07:04; CRYGC; ENSG00000163254; CTA
FQGRSYET

SEQ ID NO: 17536 - protein, 10 aa, Homo sapiens
  Table A; Target 17536; HLA-A*31:01; CRYGC; ENSG00000163254; CTA
FYEDRAFQGR

SEQ ID NO: 17537 - protein, 10 aa, Homo sapiens
  Table A; Target 17537; HLA-A*33:01; CRYGC; ENSG00000163254; CTA
FYEDRAFQGR

SEQ ID NO: 17538 - protein, 10 aa, Homo sapiens
  Table A; Target 17538; HLA-A*33:03; CRYGC; ENSG00000163254; CTA
FYEDRAFQGR

SEQ ID NO: 17539 - protein, 9 aa, Homo sapiens
  Table A; Target 17539; HLA-B*27:05; CRYGC; ENSG00000163254; CTA
GAMDAKAGS

SEQ ID NO: 17540 - protein, 10 aa, Homo sapiens
  Table A; Target 17540; HLA-A*02:03; CRYGC; ENSG00000163254; CTA
GAMDAKAGSL

SEQ ID NO: 17541 - protein, 10 aa, Homo sapiens
  Table A; Target 17541; HLA-A*03:01; CRYGC; ENSG00000163254; CTA
GAMDAKAGSL

SEQ ID NO: 17542 - protein, 10 aa, Homo sapiens
  Table A; Target 17542; HLA-A*25:01; CRYGC; ENSG00000163254; CTA
GAMDAKAGSL

SEQ ID NO: 17543 - protein, 10 aa, Homo sapiens
  Table A; Target 17543; HLA-A*26:01; CRYGC; ENSG00000163254; CTA
GAMDAKAGSL

SEQ ID NO: 17544 - protein, 10 aa, Homo sapiens
  Table A; Target 17544; HLA-A*30:01; CRYGC; ENSG00000163254; CTA
GAMDAKAGSL

SEQ ID NO: 17545 - protein, 10 aa, Homo sapiens
  Table A; Target 17545; HLA-B*07:02; CRYGC; ENSG00000163254; CTA
GAMDAKAGSL

SEQ ID NO: 17546 - protein, 10 aa, Homo sapiens
  Table A; Target 17546; HLA-B*08:01; CRYGC; ENSG00000163254; CTA
GAMDAKAGSL

SEQ ID NO: 17547 - protein, 10 aa, Homo sapiens
  Table A; Target 17547; HLA-B*15:01; CRYGC; ENSG00000163254; CTA
GAMDAKAGSL

SEQ ID NO: 17548 - protein, 10 aa, Homo sapiens
  Table A; Target 17548; HLA-B*15:03; CRYGC; ENSG00000163254; CTA
GAMDAKAGSL

SEQ ID NO: 17549 - protein, 10 aa, Homo sapiens
  Table A; Target 17549; HLA-B*27:05; CRYGC; ENSG00000163254; CTA
GAMDAKAGSL

SEQ ID NO: 17550 - protein, 10 aa, Homo sapiens
  Table A; Target 17550; HLA-B*39:01; CRYGC; ENSG00000163254; CTA
GAMDAKAGSL

SEQ ID NO: 17551 - protein, 10 aa, Homo sapiens
  Table A; Target 17551; HLA-B*40:01; CRYGC; ENSG00000163254; CTA
GAMDAKAGSL

SEQ ID NO: 17552 - protein, 10 aa, Homo sapiens
  Table A; Target 17552; HLA-B*40:02; CRYGC; ENSG00000163254; CTA
GAMDAKAGSL

SEQ ID NO: 17553 - protein, 10 aa, Homo sapiens
  Table A; Target 17553; HLA-B*46:01; CRYGC; ENSG00000163254; CTA
GAMDAKAGSL

SEQ ID NO: 17554 - protein, 10 aa, Homo sapiens
  Table A; Target 17554; HLA-B*55:01; CRYGC; ENSG00000163254; CTA
GAMDAKAGSL

SEQ ID NO: 17555 - protein, 10 aa, Homo sapiens
  Table A; Target 17555; HLA-B*58:01; CRYGC; ENSG00000163254; CTA
GAMDAKAGSL

SEQ ID NO: 17556 - protein, 10 aa, Homo sapiens
  Table A; Target 17556; HLA-C*01:02; CRYGC; ENSG00000163254; CTA
GAMDAKAGSL

SEQ ID NO: 17557 - protein, 10 aa, Homo sapiens
  Table A; Target 17557; HLA-C*02:02; CRYGC; ENSG00000163254; CTA
GAMDAKAGSL

SEQ ID NO: 17558 - protein, 10 aa, Homo sapiens
  Table A; Target 17558; HLA-C*03:03; CRYGC; ENSG00000163254; CTA
GAMDAKAGSL

SEQ ID NO: 17559 - protein, 10 aa, Homo sapiens
  Table A; Target 17559; HLA-C*03:04; CRYGC; ENSG00000163254; CTA
GAMDAKAGSL

SEQ ID NO: 17560 - protein, 10 aa, Homo sapiens
  Table A; Target 17560; HLA-C*05:01; CRYGC; ENSG00000163254; CTA
GAMDAKAGSL

SEQ ID NO: 17561 - protein, 10 aa, Homo sapiens
  Table A; Target 17561; HLA-C*06:02; CRYGC; ENSG00000163254; CTA
GAMDAKAGSL

SEQ ID NO: 17562 - protein, 10 aa, Homo sapiens
  Table A; Target 17562; HLA-C*07:01; CRYGC; ENSG00000163254; CTA
GAMDAKAGSL

SEQ ID NO: 17563 - protein, 10 aa, Homo sapiens
  Table A; Target 17563; HLA-C*07:02; CRYGC; ENSG00000163254; CTA
GAMDAKAGSL

SEQ ID NO: 17564 - protein, 10 aa, Homo sapiens
  Table A; Target 17564; HLA-C*12:03; CRYGC; ENSG00000163254; CTA
GAMDAKAGSL

SEQ ID NO: 17565 - protein, 10 aa, Homo sapiens
  Table A; Target 17565; HLA-C*14:02; CRYGC; ENSG00000163254; CTA
GAMDAKAGSL

SEQ ID NO: 17566 - protein, 10 aa, Homo sapiens
  Table A; Target 17566; HLA-C*16:01; CRYGC; ENSG00000163254; CTA
GAMDAKAGSL

SEQ ID NO: 17567 - protein, 10 aa, Homo sapiens
  Table A; Target 17567; HLA-C*16:02; CRYGC; ENSG00000163254; CTA
GAMDAKAGSL

SEQ ID NO: 17568 - protein, 10 aa, Homo sapiens
  Table A; Target 17568; HLA-C*16:04; CRYGC; ENSG00000163254; CTA
GAMDAKAGSL

SEQ ID NO: 17569 - protein, 11 aa, Homo sapiens
  Table A; Target 17569; HLA-A*03:01; CRYGC; ENSG00000163254; CTA
GAMDAKAGSLR

SEQ ID NO: 17570 - protein, 11 aa, Homo sapiens
  Table A; Target 17570; HLA-A*03:02; CRYGC; ENSG00000163254; CTA
GAMDAKAGSLR

SEQ ID NO: 17571 - protein, 11 aa, Homo sapiens
  Table A; Target 17571; HLA-A*11:01; CRYGC; ENSG00000163254; CTA
GAMDAKAGSLR

SEQ ID NO: 17572 - protein, 11 aa, Homo sapiens
  Table A; Target 17572; HLA-A*31:01; CRYGC; ENSG00000163254; CTA
GAMDAKAGSLR

SEQ ID NO: 17573 - protein, 11 aa, Homo sapiens
  Table A; Target 17573; HLA-A*33:01; CRYGC; ENSG00000163254; CTA
GAMDAKAGSLR

SEQ ID NO: 17574 - protein, 11 aa, Homo sapiens
  Table A; Target 17574; HLA-A*33:03; CRYGC; ENSG00000163254; CTA
GAMDAKAGSLR

SEQ ID NO: 17575 - protein, 11 aa, Homo sapiens
  Table A; Target 17575; HLA-A*68:01; CRYGC; ENSG00000163254; CTA
GAMDAKAGSLR

SEQ ID NO: 17576 - protein, 11 aa, Homo sapiens
  Table A; Target 17576; HLA-C*07:06; CRYGC; ENSG00000163254; CTA
GAMDAKAGSLR

SEQ ID NO: 17577 - protein, 8 aa, Homo sapiens
  Table A; Target 17577; HLA-B*27:05; CRYGC; ENSG00000163254; CTA
GEYPDYQQ

SEQ ID NO: 17578 - protein, 9 aa, Homo sapiens
  Table A; Target 17578; HLA-A*23:01; CRYGC; ENSG00000163254; CTA
GEYPDYQQW

SEQ ID NO: 17579 - protein, 9 aa, Homo sapiens
  Table A; Target 17579; HLA-A*25:01; CRYGC; ENSG00000163254; CTA
GEYPDYQQW

SEQ ID NO: 17580 - protein, 9 aa, Homo sapiens
  Table A; Target 17580; HLA-A*30:01; CRYGC; ENSG00000163254; CTA
GEYPDYQQW

SEQ ID NO: 17581 - protein, 9 aa, Homo sapiens
  Table A; Target 17581; HLA-B*15:03; CRYGC; ENSG00000163254; CTA
GEYPDYQQW

SEQ ID NO: 17582 - protein, 9 aa, Homo sapiens
  Table A; Target 17582; HLA-B*18:01; CRYGC; ENSG00000163254; CTA
GEYPDYQQW

SEQ ID NO: 17583 - protein, 9 aa, Homo sapiens
  Table A; Target 17583; HLA-B*27:02; CRYGC; ENSG00000163254; CTA
GEYPDYQQW

SEQ ID NO: 17584 - protein, 9 aa, Homo sapiens
  Table A; Target 17584; HLA-B*27:05; CRYGC; ENSG00000163254; CTA
GEYPDYQQW

SEQ ID NO: 17585 - protein, 9 aa, Homo sapiens
  Table A; Target 17585; HLA-B*37:01; CRYGC; ENSG00000163254; CTA
GEYPDYQQW

SEQ ID NO: 17586 - protein, 9 aa, Homo sapiens
  Table A; Target 17586; HLA-B*38:01; CRYGC; ENSG00000163254; CTA
GEYPDYQQW

SEQ ID NO: 17587 - protein, 9 aa, Homo sapiens
  Table A; Target 17587; HLA-B*40:01; CRYGC; ENSG00000163254; CTA
GEYPDYQQW

SEQ ID NO: 17588 - protein, 9 aa, Homo sapiens
  Table A; Target 17588; HLA-B*40:02; CRYGC; ENSG00000163254; CTA
GEYPDYQQW

SEQ ID NO: 17589 - protein, 9 aa, Homo sapiens
  Table A; Target 17589; HLA-B*49:01; CRYGC; ENSG00000163254; CTA
GEYPDYQQW

SEQ ID NO: 17590 - protein, 9 aa, Homo sapiens
  Table A; Target 17590; HLA-B*57:01; CRYGC; ENSG00000163254; CTA
GEYPDYQQW

SEQ ID NO: 17591 - protein, 9 aa, Homo sapiens
  Table A; Target 17591; HLA-B*58:01; CRYGC; ENSG00000163254; CTA
GEYPDYQQW

SEQ ID NO: 17592 - protein, 9 aa, Homo sapiens
  Table A; Target 17592; HLA-C*02:02; CRYGC; ENSG00000163254; CTA
GEYPDYQQW

SEQ ID NO: 17593 - protein, 9 aa, Homo sapiens
  Table A; Target 17593; HLA-C*16:04; CRYGC; ENSG00000163254; CTA
GEYPDYQQW

SEQ ID NO: 17594 - protein, 10 aa, Homo sapiens
  Table A; Target 17594; HLA-A*30:01; CRYGC; ENSG00000163254; CTA
GEYPDYQQWM

SEQ ID NO: 17595 - protein, 10 aa, Homo sapiens
  Table A; Target 17595; HLA-B*40:01; CRYGC; ENSG00000163254; CTA
GEYPDYQQWM

SEQ ID NO: 17596 - protein, 10 aa, Homo sapiens
  Table A; Target 17596; HLA-B*40:02; CRYGC; ENSG00000163254; CTA
GEYPDYQQWM

SEQ ID NO: 17597 - protein, 10 aa, Homo sapiens
  Table A; Target 17597; HLA-B*44:02; CRYGC; ENSG00000163254; CTA
GEYPDYQQWM

SEQ ID NO: 17598 - protein, 10 aa, Homo sapiens
  Table A; Target 17598; HLA-B*44:03; CRYGC; ENSG00000163254; CTA
GEYPDYQQWM

SEQ ID NO: 17599 - protein, 10 aa, Homo sapiens
  Table A; Target 17599; HLA-B*49:01; CRYGC; ENSG00000163254; CTA
GEYPDYQQWM

SEQ ID NO: 17600 - protein, 9 aa, Homo sapiens
  Table A; Target 17600; HLA-A*02:01; CRYGC; ENSG00000163254; CTA
GLSDSIRSC

SEQ ID NO: 17601 - protein, 9 aa, Homo sapiens
  Table A; Target 17601; HLA-A*02:03; CRYGC; ENSG00000163254; CTA
GLSDSIRSC

SEQ ID NO: 17602 - protein, 9 aa, Homo sapiens
  Table A; Target 17602; HLA-A*02:04; CRYGC; ENSG00000163254; CTA
GLSDSIRSC

SEQ ID NO: 17603 - protein, 9 aa, Homo sapiens
  Table A; Target 17603; HLA-A*03:01; CRYGC; ENSG00000163254; CTA
GLSDSIRSC

SEQ ID NO: 17604 - protein, 9 aa, Homo sapiens
  Table A; Target 17604; HLA-A*32:01; CRYGC; ENSG00000163254; CTA
GLSDSIRSC

SEQ ID NO: 17605 - protein, 9 aa, Homo sapiens
  Table A; Target 17605; HLA-B*13:02; CRYGC; ENSG00000163254; CTA
GLSDSIRSC

SEQ ID NO: 17606 - protein, 9 aa, Homo sapiens
  Table A; Target 17606; HLA-B*55:01; CRYGC; ENSG00000163254; CTA
GLSDSIRSC

SEQ ID NO: 17607 - protein, 9 aa, Homo sapiens
  Table A; Target 17607; HLA-C*06:02; CRYGC; ENSG00000163254; CTA
GLSDSIRSC

SEQ ID NO: 17608 - protein, 10 aa, Homo sapiens
  Table A; Target 17608; HLA-A*01:01; CRYGC; ENSG00000163254; CTA
GSLRRVVDLY

SEQ ID NO: 17609 - protein, 10 aa, Homo sapiens
  Table A; Target 17609; HLA-A*29:02; CRYGC; ENSG00000163254; CTA
GSLRRVVDLY

SEQ ID NO: 17610 - protein, 10 aa, Homo sapiens
  Table A; Target 17610; HLA-A*30:02; CRYGC; ENSG00000163254; CTA
GSLRRVVDLY

SEQ ID NO: 17611 - protein, 10 aa, Homo sapiens
  Table A; Target 17611; HLA-B*57:01; CRYGC; ENSG00000163254; CTA
GSLRRVVDLY

SEQ ID NO: 17612 - protein, 10 aa, Homo sapiens
  Table A; Target 17612; HLA-C*07:01; CRYGC; ENSG00000163254; CTA
GSLRRVVDLY

SEQ ID NO: 17613 - protein, 8 aa, Homo sapiens
  Table A; Target 17613; HLA-A*02:03; CRYGC; ENSG00000163254; CTA
HLSEIRSL

SEQ ID NO: 17614 - protein, 8 aa, Homo sapiens
  Table A; Target 17614; HLA-A*02:04; CRYGC; ENSG00000163254; CTA
HLSEIRSL

SEQ ID NO: 17615 - protein, 8 aa, Homo sapiens
  Table A; Target 17615; HLA-B*08:01; CRYGC; ENSG00000163254; CTA
HLSEIRSL

SEQ ID NO: 17616 - protein, 8 aa, Homo sapiens
  Table A; Target 17616; HLA-B*37:01; CRYGC; ENSG00000163254; CTA
HLSEIRSL

SEQ ID NO: 17617 - protein, 8 aa, Homo sapiens
  Table A; Target 17617; HLA-C*16:01; CRYGC; ENSG00000163254; CTA
HLSEIRSL

SEQ ID NO: 17618 - protein, 8 aa, Homo sapiens
  Table A; Target 17618; HLA-C*16:02; CRYGC; ENSG00000163254; CTA
HLSEIRSL

SEQ ID NO: 17619 - protein, 10 aa, Homo sapiens
  Table A; Target 17619; HLA-A*02:03; CRYGC; ENSG00000163254; CTA
HLSEIRSLHV

SEQ ID NO: 17620 - protein, 11 aa, Homo sapiens
  Table A; Target 17620; HLA-A*02:03; CRYGC; ENSG00000163254; CTA
HLSEIRSLHVL

SEQ ID NO: 17621 - protein, 11 aa, Homo sapiens
  Table A; Target 17621; HLA-A*02:04; CRYGC; ENSG00000163254; CTA
HLSEIRSLHVL

SEQ ID NO: 17622 - protein, 9 aa, Homo sapiens
  Table A; Target 17622; HLA-A*02:04; CRYGC; ENSG00000163254; CTA
HVLEGCWVL

SEQ ID NO: 17623 - protein, 10 aa, Homo sapiens
  Table A; Target 17623; HLA-A*29:02; CRYGC; ENSG00000163254; CTA
HVLEGCWVLY

SEQ ID NO: 17624 - protein, 8 aa, Homo sapiens
  Table A; Target 17624; HLA-A*33:01; CRYGC; ENSG00000163254; CTA
IPQTVSHR

SEQ ID NO: 17625 - protein, 8 aa, Homo sapiens
  Table A; Target 17625; HLA-A*33:03; CRYGC; ENSG00000163254; CTA
IPQTVSHR

SEQ ID NO: 17626 - protein, 8 aa, Homo sapiens
  Table A; Target 17626; HLA-C*07:06; CRYGC; ENSG00000163254; CTA
IPQTVSHR

SEQ ID NO: 17627 - protein, 9 aa, Homo sapiens
  Table A; Target 17627; HLA-A*23:01; CRYGC; ENSG00000163254; CTA
IPQTVSHRL

SEQ ID NO: 17628 - protein, 9 aa, Homo sapiens
  Table A; Target 17628; HLA-A*24:02; CRYGC; ENSG00000163254; CTA
IPQTVSHRL

SEQ ID NO: 17629 - protein, 9 aa, Homo sapiens
  Table A; Target 17629; HLA-A*33:03; CRYGC; ENSG00000163254; CTA
IPQTVSHRL

SEQ ID NO: 17630 - protein, 9 aa, Homo sapiens
  Table A; Target 17630; HLA-B*07:02; CRYGC; ENSG00000163254; CTA
IPQTVSHRL

SEQ ID NO: 17631 - protein, 9 aa, Homo sapiens
  Table A; Target 17631; HLA-B*08:01; CRYGC; ENSG00000163254; CTA
IPQTVSHRL

SEQ ID NO: 17632 - protein, 9 aa, Homo sapiens
  Table A; Target 17632; HLA-B*27:05; CRYGC; ENSG00000163254; CTA
IPQTVSHRL

SEQ ID NO: 17633 - protein, 9 aa, Homo sapiens
  Table A; Target 17633; HLA-B*35:01; CRYGC; ENSG00000163254; CTA
IPQTVSHRL

SEQ ID NO: 17634 - protein, 9 aa, Homo sapiens
  Table A; Target 17634; HLA-B*35:03; CRYGC; ENSG00000163254; CTA
IPQTVSHRL

SEQ ID NO: 17635 - protein, 9 aa, Homo sapiens
  Table A; Target 17635; HLA-B*38:01; CRYGC; ENSG00000163254; CTA
IPQTVSHRL

SEQ ID NO: 17636 - protein, 9 aa, Homo sapiens
  Table A; Target 17636; HLA-B*51:01; CRYGC; ENSG00000163254; CTA
IPQTVSHRL

SEQ ID NO: 17637 - protein, 9 aa, Homo sapiens
  Table A; Target 17637; HLA-B*55:01; CRYGC; ENSG00000163254; CTA
IPQTVSHRL

SEQ ID NO: 17638 - protein, 9 aa, Homo sapiens
  Table A; Target 17638; HLA-B*56:01; CRYGC; ENSG00000163254; CTA
IPQTVSHRL

SEQ ID NO: 17639 - protein, 9 aa, Homo sapiens
  Table A; Target 17639; HLA-C*03:03; CRYGC; ENSG00000163254; CTA
IPQTVSHRL

SEQ ID NO: 17640 - protein, 9 aa, Homo sapiens
  Table A; Target 17640; HLA-C*04:01; CRYGC; ENSG00000163254; CTA
IPQTVSHRL

SEQ ID NO: 17641 - protein, 9 aa, Homo sapiens
  Table A; Target 17641; HLA-C*06:02; CRYGC; ENSG00000163254; CTA
IPQTVSHRL

SEQ ID NO: 17642 - protein, 9 aa, Homo sapiens
  Table A; Target 17642; HLA-C*07:02; CRYGC; ENSG00000163254; CTA
IPQTVSHRL

SEQ ID NO: 17643 - protein, 9 aa, Homo sapiens
  Table A; Target 17643; HLA-C*07:06; CRYGC; ENSG00000163254; CTA
IPQTVSHRL

SEQ ID NO: 17644 - protein, 9 aa, Homo sapiens
  Table A; Target 17644; HLA-C*16:01; CRYGC; ENSG00000163254; CTA
IPQTVSHRL

SEQ ID NO: 17645 - protein, 9 aa, Homo sapiens
  Table A; Target 17645; HLA-C*16:02; CRYGC; ENSG00000163254; CTA
IPQTVSHRL

SEQ ID NO: 17646 - protein, 9 aa, Homo sapiens
  Table A; Target 17646; HLA-B*57:01; CRYGC; ENSG00000163254; CTA
ITFYEDRAF

SEQ ID NO: 17647 - protein, 9 aa, Homo sapiens
  Table A; Target 17647; HLA-C*06:02; CRYGC; ENSG00000163254; CTA
KAGSLRRVV

SEQ ID NO: 17648 - protein, 9 aa, Homo sapiens
  Table A; Target 17648; HLA-C*16:01; CRYGC; ENSG00000163254; CTA
KAGSLRRVV

SEQ ID NO: 17649 - protein, 9 aa, Homo sapiens
  Table A; Target 17649; HLA-C*16:02; CRYGC; ENSG00000163254; CTA
KAGSLRRVV

SEQ ID NO: 17650 - protein, 10 aa, Homo sapiens
  Table A; Target 17650; HLA-A*02:07; CRYGC; ENSG00000163254; CTA
LIPQTVSHRL

SEQ ID NO: 17651 - protein, 9 aa, Homo sapiens
  Table A; Target 17651; HLA-C*16:01; CRYGC; ENSG00000163254; CTA
LPNYRGRQY

SEQ ID NO: 17652 - protein, 8 aa, Homo sapiens
  Table A; Target 17652; HLA-C*07:01; CRYGC; ENSG00000163254; CTA
LRRVVDLY

SEQ ID NO: 17653 - protein, 8 aa, Homo sapiens
  Table A; Target 17653; HLA-C*07:02; CRYGC; ENSG00000163254; CTA
LRRVVDLY

SEQ ID NO: 17654 - protein, 9 aa, Homo sapiens
  Table A; Target 17654; HLA-A*01:01; CRYGC; ENSG00000163254; CTA
LSEIRSLHV

SEQ ID NO: 17655 - protein, 8 aa, Homo sapiens
  Table A; Target 17655; HLA-A*33:01; CRYGC; ENSG00000163254; CTA
LYELPNYR

SEQ ID NO: 17656 - protein, 8 aa, Homo sapiens
  Table A; Target 17656; HLA-A*30:01; CRYGC; ENSG00000163254; CTA
MDAKAGSL

SEQ ID NO: 17657 - protein, 8 aa, Homo sapiens
  Table A; Target 17657; HLA-B*07:02; CRYGC; ENSG00000163254; CTA
MDAKAGSL

SEQ ID NO: 17658 - protein, 8 aa, Homo sapiens
  Table A; Target 17658; HLA-B*18:01; CRYGC; ENSG00000163254; CTA
MDAKAGSL

SEQ ID NO: 17659 - protein, 8 aa, Homo sapiens
  Table A; Target 17659; HLA-B*37:01; CRYGC; ENSG00000163254; CTA
MDAKAGSL

SEQ ID NO: 17660 - protein, 8 aa, Homo sapiens
  Table A; Target 17660; HLA-B*40:01; CRYGC; ENSG00000163254; CTA
MDAKAGSL

SEQ ID NO: 17661 - protein, 8 aa, Homo sapiens
  Table A; Target 17661; HLA-B*40:02; CRYGC; ENSG00000163254; CTA
MDAKAGSL

SEQ ID NO: 17662 - protein, 8 aa, Homo sapiens
  Table A; Target 17662; HLA-B*51:01; CRYGC; ENSG00000163254; CTA
MDAKAGSL

SEQ ID NO: 17663 - protein, 8 aa, Homo sapiens
  Table A; Target 17663; HLA-C*03:03; CRYGC; ENSG00000163254; CTA
MDAKAGSL

SEQ ID NO: 17664 - protein, 8 aa, Homo sapiens
  Table A; Target 17664; HLA-C*03:04; CRYGC; ENSG00000163254; CTA
MDAKAGSL

SEQ ID NO: 17665 - protein, 8 aa, Homo sapiens
  Table A; Target 17665; HLA-C*04:01; CRYGC; ENSG00000163254; CTA
MDAKAGSL

SEQ ID NO: 17666 - protein, 8 aa, Homo sapiens
  Table A; Target 17666; HLA-C*06:02; CRYGC; ENSG00000163254; CTA
MDAKAGSL

SEQ ID NO: 17667 - protein, 8 aa, Homo sapiens
  Table A; Target 17667; HLA-C*07:01; CRYGC; ENSG00000163254; CTA
MDAKAGSL

SEQ ID NO: 17668 - protein, 8 aa, Homo sapiens
  Table A; Target 17668; HLA-C*07:02; CRYGC; ENSG00000163254; CTA
MDAKAGSL

SEQ ID NO: 17669 - protein, 8 aa, Homo sapiens
  Table A; Target 17669; HLA-C*07:04; CRYGC; ENSG00000163254; CTA
MDAKAGSL

SEQ ID NO: 17670 - protein, 8 aa, Homo sapiens
  Table A; Target 17670; HLA-C*12:03; CRYGC; ENSG00000163254; CTA
MDAKAGSL

SEQ ID NO: 17671 - protein, 8 aa, Homo sapiens
  Table A; Target 17671; HLA-C*16:02; CRYGC; ENSG00000163254; CTA
MDAKAGSL

SEQ ID NO: 17672 - protein, 9 aa, Homo sapiens
  Table A; Target 17672; HLA-A*33:01; CRYGC; ENSG00000163254; CTA
MDAKAGSLR

SEQ ID NO: 17673 - protein, 9 aa, Homo sapiens
  Table A; Target 17673; HLA-A*33:03; CRYGC; ENSG00000163254; CTA
MDAKAGSLR

SEQ ID NO: 17674 - protein, 9 aa, Homo sapiens
  Table A; Target 17674; HLA-A*68:01; CRYGC; ENSG00000163254; CTA
MDAKAGSLR

SEQ ID NO: 17675 - protein, 9 aa, Homo sapiens
  Table A; Target 17675; HLA-C*04:01; CRYGC; ENSG00000163254; CTA
MDAKAGSLR

SEQ ID NO: 17676 - protein, 9 aa, Homo sapiens
  Table A; Target 17676; HLA-C*07:01; CRYGC; ENSG00000163254; CTA
MDAKAGSLR

SEQ ID NO: 17677 - protein, 9 aa, Homo sapiens
  Table A; Target 17677; HLA-C*07:06; CRYGC; ENSG00000163254; CTA
MDAKAGSLR

SEQ ID NO: 17678 - protein, 10 aa, Homo sapiens
  Table A; Target 17678; HLA-B*49:01; CRYGC; ENSG00000163254; CTA
MELSEDCPSI

SEQ ID NO: 17679 - protein, 10 aa, Homo sapiens
  Table A; Target 17679; HLA-C*07:01; CRYGC; ENSG00000163254; CTA
MELSEDCPSI

SEQ ID NO: 17680 - protein, 8 aa, Homo sapiens
  Table A; Target 17680; HLA-A*03:01; CRYGC; ENSG00000163254; CTA
MLYERPNY

SEQ ID NO: 17681 - protein, 8 aa, Homo sapiens
  Table A; Target 17681; HLA-A*29:02; CRYGC; ENSG00000163254; CTA
MLYERPNY

SEQ ID NO: 17682 - protein, 8 aa, Homo sapiens
  Table A; Target 17682; HLA-B*08:01; CRYGC; ENSG00000163254; CTA
MLYERPNY

SEQ ID NO: 17683 - protein, 8 aa, Homo sapiens
  Table A; Target 17683; HLA-B*15:03; CRYGC; ENSG00000163254; CTA
MLYERPNY

SEQ ID NO: 17684 - protein, 8 aa, Homo sapiens
  Table A; Target 17684; HLA-C*16:01; CRYGC; ENSG00000163254; CTA
MLYERPNY

SEQ ID NO: 17685 - protein, 9 aa, Homo sapiens
  Table A; Target 17685; HLA-A*02:03; CRYGC; ENSG00000163254; CTA
MLYERPNYQ

SEQ ID NO: 17686 - protein, 9 aa, Homo sapiens
  Table A; Target 17686; HLA-A*03:01; CRYGC; ENSG00000163254; CTA
MLYERPNYQ

SEQ ID NO: 17687 - protein, 10 aa, Homo sapiens
  Table A; Target 17687; HLA-A*25:01; CRYGC; ENSG00000163254; CTA
NSIRVESGCW

SEQ ID NO: 17688 - protein, 10 aa, Homo sapiens
  Table A; Target 17688; HLA-B*57:01; CRYGC; ENSG00000163254; CTA
NSIRVESGCW

SEQ ID NO: 17689 - protein, 10 aa, Homo sapiens
  Table A; Target 17689; HLA-B*58:01; CRYGC; ENSG00000163254; CTA
NSIRVESGCW

SEQ ID NO: 17690 - protein, 8 aa, Homo sapiens
  Table A; Target 17690; HLA-C*04:01; CRYGC; ENSG00000163254; CTA
NYQGQQYL

SEQ ID NO: 17691 - protein, 8 aa, Homo sapiens
  Table A; Target 17691; HLA-C*14:02; CRYGC; ENSG00000163254; CTA
NYQGQQYL

SEQ ID NO: 17692 - protein, 9 aa, Homo sapiens
  Table A; Target 17692; HLA-A*23:01; CRYGC; ENSG00000163254; CTA
NYQGQQYLL

SEQ ID NO: 17693 - protein, 9 aa, Homo sapiens
  Table A; Target 17693; HLA-A*24:02; CRYGC; ENSG00000163254; CTA
NYQGQQYLL

SEQ ID NO: 17694 - protein, 9 aa, Homo sapiens
  Table A; Target 17694; HLA-A*29:02; CRYGC; ENSG00000163254; CTA
NYQGQQYLL

SEQ ID NO: 17695 - protein, 9 aa, Homo sapiens
  Table A; Target 17695; HLA-A*33:03; CRYGC; ENSG00000163254; CTA
NYQGQQYLL

SEQ ID NO: 17696 - protein, 9 aa, Homo sapiens
  Table A; Target 17696; HLA-B*35:03; CRYGC; ENSG00000163254; CTA
NYQGQQYLL

SEQ ID NO: 17697 - protein, 9 aa, Homo sapiens
  Table A; Target 17697; HLA-C*04:01; CRYGC; ENSG00000163254; CTA
NYQGQQYLL

SEQ ID NO: 17698 - protein, 9 aa, Homo sapiens
  Table A; Target 17698; HLA-C*14:02; CRYGC; ENSG00000163254; CTA
NYQGQQYLL

SEQ ID NO: 17699 - protein, 9 aa, Homo sapiens
  Table A; Target 17699; HLA-C*16:02; CRYGC; ENSG00000163254; CTA
NYQGQQYLL

SEQ ID NO: 17700 - protein, 10 aa, Homo sapiens
  Table A; Target 17700; HLA-A*31:01; CRYGC; ENSG00000163254; CTA
NYQGQQYLLR

SEQ ID NO: 17701 - protein, 10 aa, Homo sapiens
  Table A; Target 17701; HLA-A*33:01; CRYGC; ENSG00000163254; CTA
NYQGQQYLLR

SEQ ID NO: 17702 - protein, 10 aa, Homo sapiens
  Table A; Target 17702; HLA-A*33:03; CRYGC; ENSG00000163254; CTA
NYQGQQYLLR

SEQ ID NO: 17703 - protein, 11 aa, Homo sapiens
  Table A; Target 17703; HLA-A*31:01; CRYGC; ENSG00000163254; CTA
NYQGQQYLLRR

SEQ ID NO: 17704 - protein, 11 aa, Homo sapiens
  Table A; Target 17704; HLA-A*33:01; CRYGC; ENSG00000163254; CTA
NYQGQQYLLRR

SEQ ID NO: 17705 - protein, 9 aa, Homo sapiens
  Table A; Target 17705; HLA-A*33:01; CRYGC; ENSG00000163254; CTA
PNLQPYFSR

SEQ ID NO: 17706 - protein, 8 aa, Homo sapiens
  Table A; Target 17706; HLA-B*15:01; CRYGC; ENSG00000163254; CTA
PNYQGQQY

SEQ ID NO: 17707 - protein, 8 aa, Homo sapiens
  Table A; Target 17707; HLA-B*15:03; CRYGC; ENSG00000163254; CTA
PNYQGQQY

SEQ ID NO: 17708 - protein, 8 aa, Homo sapiens
  Table A; Target 17708; HLA-B*27:05; CRYGC; ENSG00000163254; CTA
PNYQGQQY

SEQ ID NO: 17709 - protein, 8 aa, Homo sapiens
  Table A; Target 17709; HLA-B*39:01; CRYGC; ENSG00000163254; CTA
PNYQGQQY

SEQ ID NO: 17710 - protein, 8 aa, Homo sapiens
  Table A; Target 17710; HLA-C*04:01; CRYGC; ENSG00000163254; CTA
PNYQGQQY

SEQ ID NO: 17711 - protein, 8 aa, Homo sapiens
  Table A; Target 17711; HLA-C*06:02; CRYGC; ENSG00000163254; CTA
PNYQGQQY

SEQ ID NO: 17712 - protein, 8 aa, Homo sapiens
  Table A; Target 17712; HLA-C*07:01; CRYGC; ENSG00000163254; CTA
PNYQGQQY

SEQ ID NO: 17713 - protein, 8 aa, Homo sapiens
  Table A; Target 17713; HLA-C*07:02; CRYGC; ENSG00000163254; CTA
PNYQGQQY

SEQ ID NO: 17714 - protein, 8 aa, Homo sapiens
  Table A; Target 17714; HLA-C*07:04; CRYGC; ENSG00000163254; CTA
PNYQGQQY

SEQ ID NO: 17715 - protein, 8 aa, Homo sapiens
  Table A; Target 17715; HLA-C*12:03; CRYGC; ENSG00000163254; CTA
PNYQGQQY

SEQ ID NO: 17716 - protein, 8 aa, Homo sapiens
  Table A; Target 17716; HLA-C*14:02; CRYGC; ENSG00000163254; CTA
PNYQGQQY

SEQ ID NO: 17717 - protein, 8 aa, Homo sapiens
  Table A; Target 17717; HLA-C*16:02; CRYGC; ENSG00000163254; CTA
PNYQGQQY

SEQ ID NO: 17718 - protein, 9 aa, Homo sapiens
  Table A; Target 17718; HLA-C*07:02; CRYGC; ENSG00000163254; CTA
PNYQGQQYL

SEQ ID NO: 17719 - protein, 10 aa, Homo sapiens
  Table A; Target 17719; HLA-C*07:02; CRYGC; ENSG00000163254; CTA
PNYQGQQYLL

SEQ ID NO: 17720 - protein, 11 aa, Homo sapiens
  Table A; Target 17720; HLA-A*33:01; CRYGC; ENSG00000163254; CTA
PNYQGQQYLLR

SEQ ID NO: 17721 - protein, 8 aa, Homo sapiens
  Table A; Target 17721; HLA-C*04:01; CRYGC; ENSG00000163254; CTA
PQTVSHRL

SEQ ID NO: 17722 - protein, 9 aa, Homo sapiens
  Table A; Target 17722; HLA-A*24:02; CRYGC; ENSG00000163254; CTA
PYFSRCNSI

SEQ ID NO: 17723 - protein, 9 aa, Homo sapiens
  Table A; Target 17723; HLA-B*27:02; CRYGC; ENSG00000163254; CTA
QDWGAMDAK

SEQ ID NO: 17724 - protein, 9 aa, Homo sapiens
  Table A; Target 17724; HLA-A*31:01; CRYGC; ENSG00000163254; CTA
QGQQYLLRR

SEQ ID NO: 17725 - protein, 10 aa, Homo sapiens
  Table A; Target 17725; HLA-B*51:01; CRYGC; ENSG00000163254; CTA
QPYFSRCNSI

SEQ ID NO: 17726 - protein, 10 aa, Homo sapiens
  Table A; Target 17726; HLA-B*13:02; CRYGC; ENSG00000163254; CTA
QQWMGLSDSI

SEQ ID NO: 17727 - protein, 10 aa, Homo sapiens
  Table A; Target 17727; HLA-B*38:01; CRYGC; ENSG00000163254; CTA
QQWMGLSDSI

SEQ ID NO: 17728 - protein, 9 aa, Homo sapiens
  Table A; Target 17728; HLA-A*23:01; CRYGC; ENSG00000163254; CTA
QYLLRPQEY

SEQ ID NO: 17729 - protein, 9 aa, Homo sapiens
  Table A; Target 17729; HLA-A*24:02; CRYGC; ENSG00000163254; CTA
QYLLRPQEY

SEQ ID NO: 17730 - protein, 9 aa, Homo sapiens
  Table A; Target 17730; HLA-A*29:02; CRYGC; ENSG00000163254; CTA
QYLLRPQEY

SEQ ID NO: 17731 - protein, 9 aa, Homo sapiens
  Table A; Target 17731; HLA-A*30:02; CRYGC; ENSG00000163254; CTA
QYLLRPQEY

SEQ ID NO: 17732 - protein, 9 aa, Homo sapiens
  Table A; Target 17732; HLA-A*31:01; CRYGC; ENSG00000163254; CTA
QYLLRPQEY

SEQ ID NO: 17733 - protein, 9 aa, Homo sapiens
  Table A; Target 17733; HLA-A*32:01; CRYGC; ENSG00000163254; CTA
QYLLRPQEY

SEQ ID NO: 17734 - protein, 9 aa, Homo sapiens
  Table A; Target 17734; HLA-A*33:03; CRYGC; ENSG00000163254; CTA
QYLLRPQEY

SEQ ID NO: 17735 - protein, 9 aa, Homo sapiens
  Table A; Target 17735; HLA-B*15:03; CRYGC; ENSG00000163254; CTA
QYLLRPQEY

SEQ ID NO: 17736 - protein, 9 aa, Homo sapiens
  Table A; Target 17736; HLA-B*57:01; CRYGC; ENSG00000163254; CTA
QYLLRPQEY

SEQ ID NO: 17737 - protein, 9 aa, Homo sapiens
  Table A; Target 17737; HLA-C*04:01; CRYGC; ENSG00000163254; CTA
QYLLRPQEY

SEQ ID NO: 17738 - protein, 9 aa, Homo sapiens
  Table A; Target 17738; HLA-C*07:01; CRYGC; ENSG00000163254; CTA
QYLLRPQEY

SEQ ID NO: 17739 - protein, 9 aa, Homo sapiens
  Table A; Target 17739; HLA-C*07:02; CRYGC; ENSG00000163254; CTA
QYLLRPQEY

SEQ ID NO: 17740 - protein, 9 aa, Homo sapiens
  Table A; Target 17740; HLA-C*14:02; CRYGC; ENSG00000163254; CTA
QYLLRPQEY

SEQ ID NO: 17741 - protein, 9 aa, Homo sapiens
  Table A; Target 17741; HLA-C*16:01; CRYGC; ENSG00000163254; CTA
QYLLRPQEY

SEQ ID NO: 17742 - protein, 10 aa, Homo sapiens
  Table A; Target 17742; HLA-A*31:01; CRYGC; ENSG00000163254; CTA
QYLLRPQEYR

SEQ ID NO: 17743 - protein, 8 aa, Homo sapiens
  Table A; Target 17743; HLA-A*30:02; CRYGC; ENSG00000163254; CTA
RAFQGRSY

SEQ ID NO: 17744 - protein, 8 aa, Homo sapiens
  Table A; Target 17744; HLA-A*32:01; CRYGC; ENSG00000163254; CTA
RAFQGRSY

SEQ ID NO: 17745 - protein, 8 aa, Homo sapiens
  Table A; Target 17745; HLA-B*15:01; CRYGC; ENSG00000163254; CTA
RAFQGRSY

SEQ ID NO: 17746 - protein, 8 aa, Homo sapiens
  Table A; Target 17746; HLA-B*15:03; CRYGC; ENSG00000163254; CTA
RAFQGRSY

SEQ ID NO: 17747 - protein, 8 aa, Homo sapiens
  Table A; Target 17747; HLA-B*46:01; CRYGC; ENSG00000163254; CTA
RAFQGRSY

SEQ ID NO: 17748 - protein, 8 aa, Homo sapiens
  Table A; Target 17748; HLA-B*57:01; CRYGC; ENSG00000163254; CTA
RAFQGRSY

SEQ ID NO: 17749 - protein, 8 aa, Homo sapiens
  Table A; Target 17749; HLA-B*58:01; CRYGC; ENSG00000163254; CTA
RAFQGRSY

SEQ ID NO: 17750 - protein, 8 aa, Homo sapiens
  Table A; Target 17750; HLA-C*01:02; CRYGC; ENSG00000163254; CTA
RAFQGRSY

SEQ ID NO: 17751 - protein, 8 aa, Homo sapiens
  Table A; Target 17751; HLA-C*02:02; CRYGC; ENSG00000163254; CTA
RAFQGRSY

SEQ ID NO: 17752 - protein, 8 aa, Homo sapiens
  Table A; Target 17752; HLA-C*03:04; CRYGC; ENSG00000163254; CTA
RAFQGRSY

SEQ ID NO: 17753 - protein, 8 aa, Homo sapiens
  Table A; Target 17753; HLA-C*16:01; CRYGC; ENSG00000163254; CTA
RAFQGRSY

SEQ ID NO: 17754 - protein, 8 aa, Homo sapiens
  Table A; Target 17754; HLA-C*16:02; CRYGC; ENSG00000163254; CTA
RAFQGRSY

SEQ ID NO: 17755 - protein, 11 aa, Homo sapiens
  Table A; Target 17755; HLA-A*03:02; CRYGC; ENSG00000163254; CTA
RCQDWGAMDAK

SEQ ID NO: 17756 - protein, 10 aa, Homo sapiens
  Table A; Target 17756; HLA-B*57:01; CRYGC; ENSG00000163254; CTA
RGEYPDYQQW

SEQ ID NO: 17757 - protein, 9 aa, Homo sapiens
  Table A; Target 17757; HLA-A*03:01; CRYGC; ENSG00000163254; CTA
RLYEREDHK

SEQ ID NO: 17758 - protein, 9 aa, Homo sapiens
  Table A; Target 17758; HLA-A*03:02; CRYGC; ENSG00000163254; CTA
RPNYQGQQY

SEQ ID NO: 17759 - protein, 9 aa, Homo sapiens
  Table A; Target 17759; HLA-A*26:01; CRYGC; ENSG00000163254; CTA
RPNYQGQQY

SEQ ID NO: 17760 - protein, 9 aa, Homo sapiens
  Table A; Target 17760; HLA-A*30:02; CRYGC; ENSG00000163254; CTA
RPNYQGQQY

SEQ ID NO: 17761 - protein, 9 aa, Homo sapiens
  Table A; Target 17761; HLA-A*32:01; CRYGC; ENSG00000163254; CTA
RPNYQGQQY

SEQ ID NO: 17762 - protein, 9 aa, Homo sapiens
  Table A; Target 17762; HLA-B*07:02; CRYGC; ENSG00000163254; CTA
RPNYQGQQY

SEQ ID NO: 17763 - protein, 9 aa, Homo sapiens
  Table A; Target 17763; HLA-B*15:01; CRYGC; ENSG00000163254; CTA
RPNYQGQQY

SEQ ID NO: 17764 - protein, 9 aa, Homo sapiens
  Table A; Target 17764; HLA-B*15:03; CRYGC; ENSG00000163254; CTA
RPNYQGQQY

SEQ ID NO: 17765 - protein, 9 aa, Homo sapiens
  Table A; Target 17765; HLA-B*35:01; CRYGC; ENSG00000163254; CTA
RPNYQGQQY

SEQ ID NO: 17766 - protein, 9 aa, Homo sapiens
  Table A; Target 17766; HLA-B*55:01; CRYGC; ENSG00000163254; CTA
RPNYQGQQY

SEQ ID NO: 17767 - protein, 9 aa, Homo sapiens
  Table A; Target 17767; HLA-B*56:01; CRYGC; ENSG00000163254; CTA
RPNYQGQQY

SEQ ID NO: 17768 - protein, 9 aa, Homo sapiens
  Table A; Target 17768; HLA-C*01:02; CRYGC; ENSG00000163254; CTA
RPNYQGQQY

SEQ ID NO: 17769 - protein, 9 aa, Homo sapiens
  Table A; Target 17769; HLA-C*04:01; CRYGC; ENSG00000163254; CTA
RPNYQGQQY

SEQ ID NO: 17770 - protein, 9 aa, Homo sapiens
  Table A; Target 17770; HLA-C*07:02; CRYGC; ENSG00000163254; CTA
RPNYQGQQY

SEQ ID NO: 17771 - protein, 9 aa, Homo sapiens
  Table A; Target 17771; HLA-C*07:06; CRYGC; ENSG00000163254; CTA
RPNYQGQQY

SEQ ID NO: 17772 - protein, 9 aa, Homo sapiens
  Table A; Target 17772; HLA-C*14:02; CRYGC; ENSG00000163254; CTA
RPNYQGQQY

SEQ ID NO: 17773 - protein, 9 aa, Homo sapiens
  Table A; Target 17773; HLA-C*16:01; CRYGC; ENSG00000163254; CTA
RPNYQGQQY

SEQ ID NO: 17774 - protein, 9 aa, Homo sapiens
  Table A; Target 17774; HLA-C*16:02; CRYGC; ENSG00000163254; CTA
RPNYQGQQY

SEQ ID NO: 17775 - protein, 10 aa, Homo sapiens
  Table A; Target 17775; HLA-B*07:02; CRYGC; ENSG00000163254; CTA
RPNYQGQQYL

SEQ ID NO: 17776 - protein, 10 aa, Homo sapiens
  Table A; Target 17776; HLA-B*56:01; CRYGC; ENSG00000163254; CTA
RPNYQGQQYL

SEQ ID NO: 17777 - protein, 10 aa, Homo sapiens
  Table A; Target 17777; HLA-C*07:02; CRYGC; ENSG00000163254; CTA
RPNYQGQQYL

SEQ ID NO: 17778 - protein, 11 aa, Homo sapiens
  Table A; Target 17778; HLA-B*07:02; CRYGC; ENSG00000163254; CTA
RPNYQGQQYLL

SEQ ID NO: 17779 - protein, 10 aa, Homo sapiens
  Table A; Target 17779; HLA-A*30:02; CRYGC; ENSG00000163254; CTA
RQYLLRPQEY

SEQ ID NO: 17780 - protein, 10 aa, Homo sapiens
  Table A; Target 17780; HLA-B*15:01; CRYGC; ENSG00000163254; CTA
RQYLLRPQEY

SEQ ID NO: 17781 - protein, 10 aa, Homo sapiens
  Table A; Target 17781; HLA-B*15:03; CRYGC; ENSG00000163254; CTA
RQYLLRPQEY

SEQ ID NO: 17782 - protein, 10 aa, Homo sapiens
  Table A; Target 17782; HLA-B*44:02; CRYGC; ENSG00000163254; CTA
RQYLLRPQEY

SEQ ID NO: 17783 - protein, 10 aa, Homo sapiens
  Table A; Target 17783; HLA-B*44:03; CRYGC; ENSG00000163254; CTA
RQYLLRPQEY

SEQ ID NO: 17784 - protein, 10 aa, Homo sapiens
  Table A; Target 17784; HLA-B*57:01; CRYGC; ENSG00000163254; CTA
RQYLLRPQEY

SEQ ID NO: 17785 - protein, 10 aa, Homo sapiens
  Table A; Target 17785; HLA-C*16:04; CRYGC; ENSG00000163254; CTA
RQYLLRPQEY

SEQ ID NO: 17786 - protein, 11 aa, Homo sapiens
  Table A; Target 17786; HLA-A*31:01; CRYGC; ENSG00000163254; CTA
RQYLLRPQEYR

SEQ ID NO: 17787 - protein, 10 aa, Homo sapiens
  Table A; Target 17787; HLA-B*57:01; CRYGC; ENSG00000163254; CTA
RSLHVLEGCW

SEQ ID NO: 17788 - protein, 10 aa, Homo sapiens
  Table A; Target 17788; HLA-A*01:01; CRYGC; ENSG00000163254; CTA
RVESGCWMLY

SEQ ID NO: 17789 - protein, 9 aa, Homo sapiens
  Table A; Target 17789; HLA-B*37:01; CRYGC; ENSG00000163254; CTA
SDSIRSCCL

SEQ ID NO: 17790 - protein, 11 aa, Homo sapiens
  Table A; Target 17790; HLA-B*38:01; CRYGC; ENSG00000163254; CTA
SEDCPSIQDRF

SEQ ID NO: 17791 - protein, 11 aa, Homo sapiens
  Table A; Target 17791; HLA-B*44:02; CRYGC; ENSG00000163254; CTA
SEDCPSIQDRF

SEQ ID NO: 17792 - protein, 11 aa, Homo sapiens
  Table A; Target 17792; HLA-B*44:03; CRYGC; ENSG00000163254; CTA
SEDCPSIQDRF

SEQ ID NO: 17793 - protein, 8 aa, Homo sapiens
  Table A; Target 17793; HLA-B*40:02; CRYGC; ENSG00000163254; CTA
SEIRSLHV

SEQ ID NO: 17794 - protein, 8 aa, Homo sapiens
  Table A; Target 17794; HLA-B*49:01; CRYGC; ENSG00000163254; CTA
SEIRSLHV

SEQ ID NO: 17795 - protein, 9 aa, Homo sapiens
  Table A; Target 17795; HLA-A*30:01; CRYGC; ENSG00000163254; CTA
SEIRSLHVL

SEQ ID NO: 17796 - protein, 9 aa, Homo sapiens
  Table A; Target 17796; HLA-B*18:01; CRYGC; ENSG00000163254; CTA
SEIRSLHVL

SEQ ID NO: 17797 - protein, 9 aa, Homo sapiens
  Table A; Target 17797; HLA-B*37:01; CRYGC; ENSG00000163254; CTA
SEIRSLHVL

SEQ ID NO: 17798 - protein, 9 aa, Homo sapiens
  Table A; Target 17798; HLA-B*40:01; CRYGC; ENSG00000163254; CTA
SEIRSLHVL

SEQ ID NO: 17799 - protein, 9 aa, Homo sapiens
  Table A; Target 17799; HLA-B*40:02; CRYGC; ENSG00000163254; CTA
SEIRSLHVL

SEQ ID NO: 17800 - protein, 9 aa, Homo sapiens
  Table A; Target 17800; HLA-B*44:02; CRYGC; ENSG00000163254; CTA
SEIRSLHVL

SEQ ID NO: 17801 - protein, 9 aa, Homo sapiens
  Table A; Target 17801; HLA-B*44:03; CRYGC; ENSG00000163254; CTA
SEIRSLHVL

SEQ ID NO: 17802 - protein, 9 aa, Homo sapiens
  Table A; Target 17802; HLA-B*49:01; CRYGC; ENSG00000163254; CTA
SEIRSLHVL

SEQ ID NO: 17803 - protein, 9 aa, Homo sapiens
  Table A; Target 17803; HLA-C*02:02; CRYGC; ENSG00000163254; CTA
SEIRSLHVL

SEQ ID NO: 17804 - protein, 9 aa, Homo sapiens
  Table A; Target 17804; HLA-C*16:04; CRYGC; ENSG00000163254; CTA
SEIRSLHVL

SEQ ID NO: 17805 - protein, 9 aa, Homo sapiens
  Table A; Target 17805; HLA-A*01:01; CRYGC; ENSG00000163254; CTA
SLRRVVDLY

SEQ ID NO: 17806 - protein, 9 aa, Homo sapiens
  Table A; Target 17806; HLA-A*29:02; CRYGC; ENSG00000163254; CTA
SLRRVVDLY

SEQ ID NO: 17807 - protein, 9 aa, Homo sapiens
  Table A; Target 17807; HLA-A*30:02; CRYGC; ENSG00000163254; CTA
SLRRVVDLY

SEQ ID NO: 17808 - protein, 9 aa, Homo sapiens
  Table A; Target 17808; HLA-B*15:03; CRYGC; ENSG00000163254; CTA
SLRRVVDLY

SEQ ID NO: 17809 - protein, 9 aa, Homo sapiens
  Table A; Target 17809; HLA-B*46:01; CRYGC; ENSG00000163254; CTA
SLRRVVDLY

SEQ ID NO: 17810 - protein, 9 aa, Homo sapiens
  Table A; Target 17810; HLA-B*57:01; CRYGC; ENSG00000163254; CTA
SLRRVVDLY

SEQ ID NO: 17811 - protein, 9 aa, Homo sapiens
  Table A; Target 17811; HLA-C*07:01; CRYGC; ENSG00000163254; CTA
SLRRVVDLY

SEQ ID NO: 17812 - protein, 9 aa, Homo sapiens
  Table A; Target 17812; HLA-B*18:01; CRYGC; ENSG00000163254; CTA
TDCPNLQPY

SEQ ID NO: 17813 - protein, 9 aa, Homo sapiens
  Table A; Target 17813; HLA-C*04:01; CRYGC; ENSG00000163254; CTA
TDCPNLQPY

SEQ ID NO: 17814 - protein, 9 aa, Homo sapiens
  Table A; Target 17814; HLA-C*07:01; CRYGC; ENSG00000163254; CTA
TDCPNLQPY

SEQ ID NO: 17815 - protein, 10 aa, Homo sapiens
  Table A; Target 17815; HLA-C*04:01; CRYGC; ENSG00000163254; CTA
TDCPNLQPYF

SEQ ID NO: 17816 - protein, 10 aa, Homo sapiens
  Table A; Target 17816; HLA-C*07:01; CRYGC; ENSG00000163254; CTA
TDCPNLQPYF

SEQ ID NO: 17817 - protein, 8 aa, Homo sapiens
  Table A; Target 17817; HLA-C*14:02; CRYGC; ENSG00000163254; CTA
TFYEDRAF

SEQ ID NO: 17818 - protein, 11 aa, Homo sapiens
  Table A; Target 17818; HLA-A*31:01; CRYGC; ENSG00000163254; CTA
TFYEDRAFQGR

SEQ ID NO: 17819 - protein, 11 aa, Homo sapiens
  Table A; Target 17819; HLA-A*33:03; CRYGC; ENSG00000163254; CTA
TFYEDRAFQGR

SEQ ID NO: 17820 - protein, 10 aa, Homo sapiens
  Table A; Target 17820; HLA-A*01:01; CRYGC; ENSG00000163254; CTA
TTDCPNLQPY

SEQ ID NO: 17821 - protein, 10 aa, Homo sapiens
  Table A; Target 17821; HLA-C*07:01; CRYGC; ENSG00000163254; CTA
TTDCPNLQPY

SEQ ID NO: 17822 - protein, 11 aa, Homo sapiens
  Table A; Target 17822; HLA-A*01:01; CRYGC; ENSG00000163254; CTA
TTDCPNLQPYF

SEQ ID NO: 17823 - protein, 9 aa, Homo sapiens
  Table A; Target 17823; HLA-B*57:01; CRYGC; ENSG00000163254; CTA
TVSHRLRLY

SEQ ID NO: 17824 - protein, 9 aa, Homo sapiens
  Table A; Target 17824; HLA-A*01:01; CRYGC; ENSG00000163254; CTA
VLEGCWVLY

SEQ ID NO: 17825 - protein, 9 aa, Homo sapiens
  Table A; Target 17825; HLA-A*29:02; CRYGC; ENSG00000163254; CTA
VLEGCWVLY

SEQ ID NO: 17826 - protein, 8 aa, Homo sapiens
  Table A; Target 17826; HLA-A*03:01; CRYGC; ENSG00000163254; CTA
VLYELPNY

SEQ ID NO: 17827 - protein, 8 aa, Homo sapiens
  Table A; Target 17827; HLA-A*29:02; CRYGC; ENSG00000163254; CTA
VLYELPNY

SEQ ID NO: 17828 - protein, 8 aa, Homo sapiens
  Table A; Target 17828; HLA-A*30:02; CRYGC; ENSG00000163254; CTA
VLYELPNY

SEQ ID NO: 17829 - protein, 8 aa, Homo sapiens
  Table A; Target 17829; HLA-A*32:01; CRYGC; ENSG00000163254; CTA
VLYELPNY

SEQ ID NO: 17830 - protein, 8 aa, Homo sapiens
  Table A; Target 17830; HLA-B*15:01; CRYGC; ENSG00000163254; CTA
VLYELPNY

SEQ ID NO: 17831 - protein, 8 aa, Homo sapiens
  Table A; Target 17831; HLA-B*15:03; CRYGC; ENSG00000163254; CTA
VLYELPNY

SEQ ID NO: 17832 - protein, 8 aa, Homo sapiens
  Table A; Target 17832; HLA-B*46:01; CRYGC; ENSG00000163254; CTA
VLYELPNY

SEQ ID NO: 17833 - protein, 8 aa, Homo sapiens
  Table A; Target 17833; HLA-C*02:02; CRYGC; ENSG00000163254; CTA
VLYELPNY

SEQ ID NO: 17834 - protein, 8 aa, Homo sapiens
  Table A; Target 17834; HLA-C*07:01; CRYGC; ENSG00000163254; CTA
VLYELPNY

SEQ ID NO: 17835 - protein, 8 aa, Homo sapiens
  Table A; Target 17835; HLA-C*12:03; CRYGC; ENSG00000163254; CTA
VLYELPNY

SEQ ID NO: 17836 - protein, 8 aa, Homo sapiens
  Table A; Target 17836; HLA-C*14:02; CRYGC; ENSG00000163254; CTA
VLYELPNY

SEQ ID NO: 17837 - protein, 8 aa, Homo sapiens
  Table A; Target 17837; HLA-C*16:01; CRYGC; ENSG00000163254; CTA
VLYELPNY

SEQ ID NO: 17838 - protein, 8 aa, Homo sapiens
  Table A; Target 17838; HLA-C*16:02; CRYGC; ENSG00000163254; CTA
VLYELPNY

SEQ ID NO: 17839 - protein, 8 aa, Homo sapiens
  Table A; Target 17839; HLA-C*16:04; CRYGC; ENSG00000163254; CTA
VLYELPNY

SEQ ID NO: 17840 - protein, 9 aa, Homo sapiens
  Table A; Target 17840; HLA-A*01:01; CRYGC; ENSG00000163254; CTA
VLYELPNYR

SEQ ID NO: 17841 - protein, 9 aa, Homo sapiens
  Table A; Target 17841; HLA-A*02:03; CRYGC; ENSG00000163254; CTA
VLYELPNYR

SEQ ID NO: 17842 - protein, 9 aa, Homo sapiens
  Table A; Target 17842; HLA-A*02:04; CRYGC; ENSG00000163254; CTA
VLYELPNYR

SEQ ID NO: 17843 - protein, 9 aa, Homo sapiens
  Table A; Target 17843; HLA-A*02:07; CRYGC; ENSG00000163254; CTA
VLYELPNYR

SEQ ID NO: 17844 - protein, 9 aa, Homo sapiens
  Table A; Target 17844; HLA-A*03:01; CRYGC; ENSG00000163254; CTA
VLYELPNYR

SEQ ID NO: 17845 - protein, 9 aa, Homo sapiens
  Table A; Target 17845; HLA-A*03:02; CRYGC; ENSG00000163254; CTA
VLYELPNYR

SEQ ID NO: 17846 - protein, 9 aa, Homo sapiens
  Table A; Target 17846; HLA-A*11:01; CRYGC; ENSG00000163254; CTA
VLYELPNYR

SEQ ID NO: 17847 - protein, 9 aa, Homo sapiens
  Table A; Target 17847; HLA-A*31:01; CRYGC; ENSG00000163254; CTA
VLYELPNYR

SEQ ID NO: 17848 - protein, 9 aa, Homo sapiens
  Table A; Target 17848; HLA-A*33:01; CRYGC; ENSG00000163254; CTA
VLYELPNYR

SEQ ID NO: 17849 - protein, 9 aa, Homo sapiens
  Table A; Target 17849; HLA-A*33:03; CRYGC; ENSG00000163254; CTA
VLYELPNYR

SEQ ID NO: 17850 - protein, 9 aa, Homo sapiens
  Table A; Target 17850; HLA-A*68:01; CRYGC; ENSG00000163254; CTA
VLYELPNYR

SEQ ID NO: 17851 - protein, 9 aa, Homo sapiens
  Table A; Target 17851; HLA-C*02:02; CRYGC; ENSG00000163254; CTA
VLYELPNYR

SEQ ID NO: 17852 - protein, 9 aa, Homo sapiens
  Table A; Target 17852; HLA-C*07:06; CRYGC; ENSG00000163254; CTA
VLYELPNYR

SEQ ID NO: 17853 - protein, 9 aa, Homo sapiens
  Table A; Target 17853; HLA-C*12:03; CRYGC; ENSG00000163254; CTA
VLYELPNYR

SEQ ID NO: 17854 - protein, 10 aa, Homo sapiens
  Table A; Target 17854; HLA-A*02:01; CRYGC; ENSG00000163254; CTA
VLYELPNYRG

SEQ ID NO: 17855 - protein, 11 aa, Homo sapiens
  Table A; Target 17855; HLA-A*03:01; CRYGC; ENSG00000163254; CTA
VLYELPNYRGR

SEQ ID NO: 17856 - protein, 11 aa, Homo sapiens
  Table A; Target 17856; HLA-A*31:01; CRYGC; ENSG00000163254; CTA
VLYELPNYRGR

SEQ ID NO: 17857 - protein, 8 aa, Homo sapiens
  Table A; Target 17857; HLA-B*57:01; CRYGC; ENSG00000163254; CTA
VSHRLRLY

SEQ ID NO: 17858 - protein, 9 aa, Homo sapiens
  Table A; Target 17858; HLA-A*29:02; CRYGC; ENSG00000163254; CTA
WMLYERPNY

SEQ ID NO: 17859 - protein, 9 aa, Homo sapiens
  Table A; Target 17859; HLA-A*29:02; CRYGC; ENSG00000163254; CTA
WVLYELPNY

SEQ ID NO: 17860 - protein, 9 aa, Homo sapiens
  Table A; Target 17860; HLA-A*01:01; CRYGC; ENSG00000163254; CTA
YEDRAFQGR

SEQ ID NO: 17861 - protein, 9 aa, Homo sapiens
  Table A; Target 17861; HLA-A*02:07; CRYGC; ENSG00000163254; CTA
YEDRAFQGR

SEQ ID NO: 17862 - protein, 9 aa, Homo sapiens
  Table A; Target 17862; HLA-A*31:01; CRYGC; ENSG00000163254; CTA
YEDRAFQGR

SEQ ID NO: 17863 - protein, 9 aa, Homo sapiens
  Table A; Target 17863; HLA-B*44:02; CRYGC; ENSG00000163254; CTA
YEDRAFQGR

SEQ ID NO: 17864 - protein, 9 aa, Homo sapiens
  Table A; Target 17864; HLA-B*44:03; CRYGC; ENSG00000163254; CTA
YEDRAFQGR

SEQ ID NO: 17865 - protein, 9 aa, Homo sapiens
  Table A; Target 17865; HLA-B*49:01; CRYGC; ENSG00000163254; CTA
YEDRAFQGR

SEQ ID NO: 17866 - protein, 11 aa, Homo sapiens
  Table A; Target 17866; HLA-A*01:01; CRYGC; ENSG00000163254; CTA
YEDRAFQGRSY

SEQ ID NO: 17867 - protein, 11 aa, Homo sapiens
  Table A; Target 17867; HLA-B*44:02; CRYGC; ENSG00000163254; CTA
YEDRAFQGRSY

SEQ ID NO: 17868 - protein, 11 aa, Homo sapiens
  Table A; Target 17868; HLA-B*44:03; CRYGC; ENSG00000163254; CTA
YEDRAFQGRSY

SEQ ID NO: 17869 - protein, 11 aa, Homo sapiens
  Table A; Target 17869; HLA-C*16:04; CRYGC; ENSG00000163254; CTA
YEDRAFQGRSY

SEQ ID NO: 17870 - protein, 11 aa, Homo sapiens
  Table A; Target 17870; HLA-B*44:02; CRYGC; ENSG00000163254; CTA
YELPNYRGRQY

SEQ ID NO: 17871 - protein, 11 aa, Homo sapiens
  Table A; Target 17871; HLA-B*44:03; CRYGC; ENSG00000163254; CTA
YELPNYRGRQY

SEQ ID NO: 17872 - protein, 9 aa, Homo sapiens
  Table A; Target 17872; HLA-B*37:01; CRYGC; ENSG00000163254; CTA
YEREDHKGL

SEQ ID NO: 17873 - protein, 9 aa, Homo sapiens
  Table A; Target 17873; HLA-B*40:01; CRYGC; ENSG00000163254; CTA
YEREDHKGL

SEQ ID NO: 17874 - protein, 9 aa, Homo sapiens
  Table A; Target 17874; HLA-B*40:02; CRYGC; ENSG00000163254; CTA
YEREDHKGL

SEQ ID NO: 17875 - protein, 9 aa, Homo sapiens
  Table A; Target 17875; HLA-B*44:02; CRYGC; ENSG00000163254; CTA
YEREDHKGL

SEQ ID NO: 17876 - protein, 9 aa, Homo sapiens
  Table A; Target 17876; HLA-B*49:01; CRYGC; ENSG00000163254; CTA
YEREDHKGL

SEQ ID NO: 17877 - protein, 8 aa, Homo sapiens
  Table A; Target 17877; HLA-B*40:02; CRYGC; ENSG00000163254; CTA
YERPNYQG

SEQ ID NO: 17878 - protein, 11 aa, Homo sapiens
  Table A; Target 17878; HLA-A*01:01; CRYGC; ENSG00000163254; CTA
YERPNYQGQQY

SEQ ID NO: 17879 - protein, 11 aa, Homo sapiens
  Table A; Target 17879; HLA-A*29:02; CRYGC; ENSG00000163254; CTA
YERPNYQGQQY

SEQ ID NO: 17880 - protein, 11 aa, Homo sapiens
  Table A; Target 17880; HLA-A*30:02; CRYGC; ENSG00000163254; CTA
YERPNYQGQQY

SEQ ID NO: 17881 - protein, 11 aa, Homo sapiens
  Table A; Target 17881; HLA-A*32:01; CRYGC; ENSG00000163254; CTA
YERPNYQGQQY

SEQ ID NO: 17882 - protein, 11 aa, Homo sapiens
  Table A; Target 17882; HLA-B*15:01; CRYGC; ENSG00000163254; CTA
YERPNYQGQQY

SEQ ID NO: 17883 - protein, 11 aa, Homo sapiens
  Table A; Target 17883; HLA-B*15:03; CRYGC; ENSG00000163254; CTA
YERPNYQGQQY

SEQ ID NO: 17884 - protein, 11 aa, Homo sapiens
  Table A; Target 17884; HLA-B*18:01; CRYGC; ENSG00000163254; CTA
YERPNYQGQQY

SEQ ID NO: 17885 - protein, 11 aa, Homo sapiens
  Table A; Target 17885; HLA-B*27:02; CRYGC; ENSG00000163254; CTA
YERPNYQGQQY

SEQ ID NO: 17886 - protein, 11 aa, Homo sapiens
  Table A; Target 17886; HLA-B*37:01; CRYGC; ENSG00000163254; CTA
YERPNYQGQQY

SEQ ID NO: 17887 - protein, 11 aa, Homo sapiens
  Table A; Target 17887; HLA-B*38:01; CRYGC; ENSG00000163254; CTA
YERPNYQGQQY

SEQ ID NO: 17888 - protein, 11 aa, Homo sapiens
  Table A; Target 17888; HLA-B*40:02; CRYGC; ENSG00000163254; CTA
YERPNYQGQQY

SEQ ID NO: 17889 - protein, 11 aa, Homo sapiens
  Table A; Target 17889; HLA-B*44:02; CRYGC; ENSG00000163254; CTA
YERPNYQGQQY

SEQ ID NO: 17890 - protein, 11 aa, Homo sapiens
  Table A; Target 17890; HLA-B*44:03; CRYGC; ENSG00000163254; CTA
YERPNYQGQQY

SEQ ID NO: 17891 - protein, 11 aa, Homo sapiens
  Table A; Target 17891; HLA-C*02:02; CRYGC; ENSG00000163254; CTA
YERPNYQGQQY

SEQ ID NO: 17892 - protein, 11 aa, Homo sapiens
  Table A; Target 17892; HLA-C*07:01; CRYGC; ENSG00000163254; CTA
YERPNYQGQQY

SEQ ID NO: 17893 - protein, 11 aa, Homo sapiens
  Table A; Target 17893; HLA-C*16:04; CRYGC; ENSG00000163254; CTA
YERPNYQGQQY

SEQ ID NO: 17894 - protein, 8 aa, Homo sapiens
  Table A; Target 17894; HLA-B*40:02; CRYGC; ENSG00000163254; CTA
YETTTDCP

SEQ ID NO: 17895 - protein, 8 aa, Homo sapiens
  Table A; Target 17895; HLA-B*49:01; CRYGC; ENSG00000163254; CTA
YETTTDCP

SEQ ID NO: 17896 - protein, 10 aa, Homo sapiens
  Table A; Target 17896; HLA-A*30:01; CRYGC; ENSG00000163254; CTA
YETTTDCPNL

SEQ ID NO: 17897 - protein, 10 aa, Homo sapiens
  Table A; Target 17897; HLA-B*27:05; CRYGC; ENSG00000163254; CTA
YETTTDCPNL

SEQ ID NO: 17898 - protein, 10 aa, Homo sapiens
  Table A; Target 17898; HLA-B*39:01; CRYGC; ENSG00000163254; CTA
YETTTDCPNL

SEQ ID NO: 17899 - protein, 10 aa, Homo sapiens
  Table A; Target 17899; HLA-B*40:01; CRYGC; ENSG00000163254; CTA
YETTTDCPNL

SEQ ID NO: 17900 - protein, 10 aa, Homo sapiens
  Table A; Target 17900; HLA-B*40:02; CRYGC; ENSG00000163254; CTA
YETTTDCPNL

SEQ ID NO: 17901 - protein, 10 aa, Homo sapiens
  Table A; Target 17901; HLA-C*07:01; CRYGC; ENSG00000163254; CTA
YETTTDCPNL

SEQ ID NO: 17902 - protein, 10 aa, Homo sapiens
  Table A; Target 17902; HLA-C*16:04; CRYGC; ENSG00000163254; CTA
YETTTDCPNL

SEQ ID NO: 17903 - protein, 8 aa, Homo sapiens
  Table A; Target 17903; HLA-A*01:01; CRYGC; ENSG00000163254; CTA
YLLRPQEY

SEQ ID NO: 17904 - protein, 8 aa, Homo sapiens
  Table A; Target 17904; HLA-A*29:02; CRYGC; ENSG00000163254; CTA
YLLRPQEY

SEQ ID NO: 17905 - protein, 8 aa, Homo sapiens
  Table A; Target 17905; HLA-A*32:01; CRYGC; ENSG00000163254; CTA
YLLRPQEY

SEQ ID NO: 17906 - protein, 8 aa, Homo sapiens
  Table A; Target 17906; HLA-B*08:01; CRYGC; ENSG00000163254; CTA
YLLRPQEY

SEQ ID NO: 17907 - protein, 8 aa, Homo sapiens
  Table A; Target 17907; HLA-B*15:01; CRYGC; ENSG00000163254; CTA
YLLRPQEY

SEQ ID NO: 17908 - protein, 8 aa, Homo sapiens
  Table A; Target 17908; HLA-B*15:03; CRYGC; ENSG00000163254; CTA
YLLRPQEY

SEQ ID NO: 17909 - protein, 8 aa, Homo sapiens
  Table A; Target 17909; HLA-B*46:01; CRYGC; ENSG00000163254; CTA
YLLRPQEY

SEQ ID NO: 17910 - protein, 8 aa, Homo sapiens
  Table A; Target 17910; HLA-B*57:01; CRYGC; ENSG00000163254; CTA
YLLRPQEY

SEQ ID NO: 17911 - protein, 8 aa, Homo sapiens
  Table A; Target 17911; HLA-B*58:01; CRYGC; ENSG00000163254; CTA
YLLRPQEY

SEQ ID NO: 17912 - protein, 8 aa, Homo sapiens
  Table A; Target 17912; HLA-C*07:01; CRYGC; ENSG00000163254; CTA
YLLRPQEY

SEQ ID NO: 17913 - protein, 8 aa, Homo sapiens
  Table A; Target 17913; HLA-C*07:02; CRYGC; ENSG00000163254; CTA
YLLRPQEY

SEQ ID NO: 17914 - protein, 8 aa, Homo sapiens
  Table A; Target 17914; HLA-C*07:04; CRYGC; ENSG00000163254; CTA
YLLRPQEY

SEQ ID NO: 17915 - protein, 8 aa, Homo sapiens
  Table A; Target 17915; HLA-C*16:01; CRYGC; ENSG00000163254; CTA
YLLRPQEY

SEQ ID NO: 17916 - protein, 9 aa, Homo sapiens
  Table A; Target 17916; HLA-A*33:01; CRYGC; ENSG00000163254; CTA
YLLRPQEYR

SEQ ID NO: 17917 - protein, 10 aa, Homo sapiens
  Table A; Target 17917; HLA-A*02:04; CRYGC; ENSG00000163254; CTA
YLLRPQEYRR

SEQ ID NO: 17918 - protein, 9 aa, Homo sapiens
  Table A; Target 17918; HLA-B*54:01; CRYGC; ENSG00000163254; CTA
YPDYQQWMG

SEQ ID NO: 17919 - protein, 10 aa, Homo sapiens
  Table A; Target 17919; HLA-B*35:03; CRYGC; ENSG00000163254; CTA
YPDYQQWMGL

SEQ ID NO: 17920 - protein, 8 aa, Homo sapiens
  Table A; Target 17920; HLA-A*02:01; CRYGC; ENSG00000163254; CTA
YQGQQYLL

SEQ ID NO: 17921 - protein, 8 aa, Homo sapiens
  Table A; Target 17921; HLA-A*02:04; CRYGC; ENSG00000163254; CTA
YQGQQYLL

SEQ ID NO: 17922 - protein, 8 aa, Homo sapiens
  Table A; Target 17922; HLA-A*23:01; CRYGC; ENSG00000163254; CTA
YQGQQYLL

SEQ ID NO: 17923 - protein, 8 aa, Homo sapiens
  Table A; Target 17923; HLA-A*30:01; CRYGC; ENSG00000163254; CTA
YQGQQYLL

SEQ ID NO: 17924 - protein, 8 aa, Homo sapiens
  Table A; Target 17924; HLA-B*13:02; CRYGC; ENSG00000163254; CTA
YQGQQYLL

SEQ ID NO: 17925 - protein, 8 aa, Homo sapiens
  Table A; Target 17925; HLA-B*15:01; CRYGC; ENSG00000163254; CTA
YQGQQYLL

SEQ ID NO: 17926 - protein, 8 aa, Homo sapiens
  Table A; Target 17926; HLA-B*27:05; CRYGC; ENSG00000163254; CTA
YQGQQYLL

SEQ ID NO: 17927 - protein, 8 aa, Homo sapiens
  Table A; Target 17927; HLA-B*38:01; CRYGC; ENSG00000163254; CTA
YQGQQYLL

SEQ ID NO: 17928 - protein, 8 aa, Homo sapiens
  Table A; Target 17928; HLA-B*39:01; CRYGC; ENSG00000163254; CTA
YQGQQYLL

SEQ ID NO: 17929 - protein, 8 aa, Homo sapiens
  Table A; Target 17929; HLA-C*06:02; CRYGC; ENSG00000163254; CTA
YQGQQYLL

SEQ ID NO: 17930 - protein, 8 aa, Homo sapiens
  Table A; Target 17930; HLA-C*07:02; CRYGC; ENSG00000163254; CTA
YQGQQYLL

SEQ ID NO: 17931 - protein, 8 aa, Homo sapiens
  Table A; Target 17931; HLA-C*07:04; CRYGC; ENSG00000163254; CTA
YQGQQYLL

SEQ ID NO: 17932 - protein, 8 aa, Homo sapiens
  Table A; Target 17932; HLA-C*12:03; CRYGC; ENSG00000163254; CTA
YQGQQYLL

SEQ ID NO: 17933 - protein, 9 aa, Homo sapiens
  Table A; Target 17933; HLA-A*29:02; CRYGC; ENSG00000163254; CTA
YQGQQYLLR

SEQ ID NO: 17934 - protein, 9 aa, Homo sapiens
  Table A; Target 17934; HLA-A*31:01; CRYGC; ENSG00000163254; CTA
YQGQQYLLR

SEQ ID NO: 17935 - protein, 9 aa, Homo sapiens
  Table A; Target 17935; HLA-C*07:06; CRYGC; ENSG00000163254; CTA
YQGQQYLLR

SEQ ID NO: 17936 - protein, 9 aa, Homo sapiens
  Table A; Target 17936; HLA-A*30:01; CSAG1; ENSG00000198930; TAA
ACWPAFTVL

SEQ ID NO: 17937 - protein, 9 aa, Homo sapiens
  Table A; Target 17937; HLA-B*15:03; CSAG1; ENSG00000198930; TAA
ACWPAFTVL

SEQ ID NO: 17938 - protein, 9 aa, Homo sapiens
  Table A; Target 17938; HLA-A*33:03; CSAG1; ENSG00000198930; TAA
AFTVLGEAR

SEQ ID NO: 17939 - protein, 9 aa, Homo sapiens
  Table A; Target 17939; HLA-C*14:02; CSAG1; ENSG00000198930; TAA
AFTVLGEAR

SEQ ID NO: 17940 - protein, 9 aa, Homo sapiens
  Table A; Target 17940; HLA-A*11:01; CSAG1; ENSG00000198930; TAA
ASSPFSNNH

SEQ ID NO: 17941 - protein, 9 aa, Homo sapiens
  Table A; Target 17941; HLA-A*30:02; CSAG1; ENSG00000198930; TAA
ASSPFSNNH

SEQ ID NO: 17942 - protein, 9 aa, Homo sapiens
  Table A; Target 17942; HLA-C*16:02; CSAG1; ENSG00000198930; TAA
ASSPFSNNH

SEQ ID NO: 17943 - protein, 9 aa, Homo sapiens
  Table A; Target 17943; HLA-C*16:01; CSAG1; ENSG00000198930; TAA
ATTACWPAF

SEQ ID NO: 17944 - protein, 9 aa, Homo sapiens
  Table A; Target 17944; HLA-A*25:01; CSAG1; ENSG00000198930; TAA
DQVDWSRLY

SEQ ID NO: 17945 - protein, 9 aa, Homo sapiens
  Table A; Target 17945; HLA-A*26:01; CSAG1; ENSG00000198930; TAA
DQVDWSRLY

SEQ ID NO: 17946 - protein, 9 aa, Homo sapiens
  Table A; Target 17946; HLA-A*29:02; CSAG1; ENSG00000198930; TAA
DQVDWSRLY

SEQ ID NO: 17947 - protein, 9 aa, Homo sapiens
  Table A; Target 17947; HLA-B*15:01; CSAG1; ENSG00000198930; TAA
DQVDWSRLY

SEQ ID NO: 17948 - protein, 9 aa, Homo sapiens
  Table A; Target 17948; HLA-B*15:03; CSAG1; ENSG00000198930; TAA
DQVDWSRLY

SEQ ID NO: 17949 - protein, 9 aa, Homo sapiens
  Table A; Target 17949; HLA-B*18:01; CSAG1; ENSG00000198930; TAA
DQVDWSRLY

SEQ ID NO: 17950 - protein, 9 aa, Homo sapiens
  Table A; Target 17950; HLA-B*44:02; CSAG1; ENSG00000198930; TAA
DQVDWSRLY

SEQ ID NO: 17951 - protein, 9 aa, Homo sapiens
  Table A; Target 17951; HLA-B*44:03; CSAG1; ENSG00000198930; TAA
DQVDWSRLY

SEQ ID NO: 17952 - protein, 9 aa, Homo sapiens
  Table A; Target 17952; HLA-C*07:01; CSAG1; ENSG00000198930; TAA
DQVDWSRLY

SEQ ID NO: 17953 - protein, 9 aa, Homo sapiens
  Table A; Target 17953; HLA-C*07:04; CSAG1; ENSG00000198930; TAA
DQVDWSRLY

SEQ ID NO: 17954 - protein, 9 aa, Homo sapiens
  Table A; Target 17954; HLA-C*12:03; CSAG1; ENSG00000198930; TAA
DQVDWSRLY

SEQ ID NO: 17955 - protein, 9 aa, Homo sapiens
  Table A; Target 17955; HLA-A*31:01; CSAG1; ENSG00000198930; TAA
DTGLVKMSR

SEQ ID NO: 17956 - protein, 9 aa, Homo sapiens
  Table A; Target 17956; HLA-A*33:01; CSAG1; ENSG00000198930; TAA
DTGLVKMSR

SEQ ID NO: 17957 - protein, 9 aa, Homo sapiens
  Table A; Target 17957; HLA-A*33:03; CSAG1; ENSG00000198930; TAA
DTGLVKMSR

SEQ ID NO: 17958 - protein, 9 aa, Homo sapiens
  Table A; Target 17958; HLA-A*68:01; CSAG1; ENSG00000198930; TAA
DTGLVKMSR

SEQ ID NO: 17959 - protein, 9 aa, Homo sapiens
  Table A; Target 17959; HLA-C*07:06; CSAG1; ENSG00000198930; TAA
DTGLVKMSR

SEQ ID NO: 17960 - protein, 9 aa, Homo sapiens
  Table A; Target 17960; HLA-A*25:01; CSAG1; ENSG00000198930; TAA
EARGDQVDW

SEQ ID NO: 17961 - protein, 9 aa, Homo sapiens
  Table A; Target 17961; HLA-A*33:03; CSAG1; ENSG00000198930; TAA
EARGDQVDW

SEQ ID NO: 17962 - protein, 9 aa, Homo sapiens
  Table A; Target 17962; HLA-B*57:01; CSAG1; ENSG00000198930; TAA
EARGDQVDW

SEQ ID NO: 17963 - protein, 9 aa, Homo sapiens
  Table A; Target 17963; HLA-C*07:06; CSAG1; ENSG00000198930; TAA
EARGDQVDW

SEQ ID NO: 17964 - protein, 11 aa, Homo sapiens
  Table A; Target 17964; HLA-A*33:01; CSAG1; ENSG00000198930; TAA
EARGDQVDWSR

SEQ ID NO: 17965 - protein, 11 aa, Homo sapiens
  Table A; Target 17965; HLA-A*33:03; CSAG1; ENSG00000198930; TAA
EARGDQVDWSR

SEQ ID NO: 17966 - protein, 8 aa, Homo sapiens
  Table A; Target 17966; HLA-C*16:01; CSAG1; ENSG00000198930; TAA
FSNNHPST

SEQ ID NO: 17967 - protein, 9 aa, Homo sapiens
  Table A; Target 17967; HLA-A*32:01; CSAG1; ENSG00000198930; TAA
FSNNHPSTP

SEQ ID NO: 17968 - protein, 9 aa, Homo sapiens
  Table A; Target 17968; HLA-C*16:01; CSAG1; ENSG00000198930; TAA
FSNNHPSTP

SEQ ID NO: 17969 - protein, 9 aa, Homo sapiens
  Table A; Target 17969; HLA-C*16:02; CSAG1; ENSG00000198930; TAA
FSNNHPSTP

SEQ ID NO: 17970 - protein, 10 aa, Homo sapiens
  Table A; Target 17970; HLA-A*03:01; CSAG1; ENSG00000198930; TAA
FSNNHPSTPK

SEQ ID NO: 17971 - protein, 10 aa, Homo sapiens
  Table A; Target 17971; HLA-A*03:02; CSAG1; ENSG00000198930; TAA
FSNNHPSTPK

SEQ ID NO: 17972 - protein, 10 aa, Homo sapiens
  Table A; Target 17972; HLA-A*11:01; CSAG1; ENSG00000198930; TAA
FSNNHPSTPK

SEQ ID NO: 17973 - protein, 10 aa, Homo sapiens
  Table A; Target 17973; HLA-A*68:01; CSAG1; ENSG00000198930; TAA
FSNNHPSTPK

SEQ ID NO: 17974 - protein, 10 aa, Homo sapiens
  Table A; Target 17974; HLA-B*44:02; CSAG1; ENSG00000198930; TAA
GDQVDWSRLY

SEQ ID NO: 17975 - protein, 10 aa, Homo sapiens
  Table A; Target 17975; HLA-C*07:01; CSAG1; ENSG00000198930; TAA
GDQVDWSRLY

SEQ ID NO: 17976 - protein, 8 aa, Homo sapiens
  Table A; Target 17976; HLA-B*49:01; CSAG1; ENSG00000198930; TAA
GEARGDQV

SEQ ID NO: 17977 - protein, 10 aa, Homo sapiens
  Table A; Target 17977; HLA-A*30:01; CSAG1; ENSG00000198930; TAA
GEARGDQVDW

SEQ ID NO: 17978 - protein, 10 aa, Homo sapiens
  Table A; Target 17978; HLA-B*27:02; CSAG1; ENSG00000198930; TAA
GEARGDQVDW

SEQ ID NO: 17979 - protein, 10 aa, Homo sapiens
  Table A; Target 17979; HLA-B*40:01; CSAG1; ENSG00000198930; TAA
GEARGDQVDW

SEQ ID NO: 17980 - protein, 10 aa, Homo sapiens
  Table A; Target 17980; HLA-B*44:02; CSAG1; ENSG00000198930; TAA
GEARGDQVDW

SEQ ID NO: 17981 - protein, 10 aa, Homo sapiens
  Table A; Target 17981; HLA-B*44:03; CSAG1; ENSG00000198930; TAA
GEARGDQVDW

SEQ ID NO: 17982 - protein, 10 aa, Homo sapiens
  Table A; Target 17982; HLA-B*57:01; CSAG1; ENSG00000198930; TAA
GEARGDQVDW

SEQ ID NO: 17983 - protein, 10 aa, Homo sapiens
  Table A; Target 17983; HLA-B*58:01; CSAG1; ENSG00000198930; TAA
GEARGDQVDW

SEQ ID NO: 17984 - protein, 10 aa, Homo sapiens
  Table A; Target 17984; HLA-C*16:04; CSAG1; ENSG00000198930; TAA
GEARGDQVDW

SEQ ID NO: 17985 - protein, 9 aa, Homo sapiens
  Table A; Target 17985; HLA-B*55:01; CSAG1; ENSG00000198930; TAA
GPVKEVPGT

SEQ ID NO: 17986 - protein, 9 aa, Homo sapiens
  Table A; Target 17986; HLA-B*56:01; CSAG1; ENSG00000198930; TAA
GPVKEVPGT

SEQ ID NO: 17987 - protein, 11 aa, Homo sapiens
  Table A; Target 17987; HLA-B*56:01; CSAG1; ENSG00000198930; TAA
GPVKEVPGTKG

SEQ ID NO: 17988 - protein, 10 aa, Homo sapiens
  Table A; Target 17988; HLA-B*40:02; CSAG1; ENSG00000198930; TAA
KEVPGTKGSP

SEQ ID NO: 17989 - protein, 11 aa, Homo sapiens
  Table A; Target 17989; HLA-C*07:02; CSAG1; ENSG00000198930; TAA
KGPVKEVPGTK

SEQ ID NO: 17990 - protein, 8 aa, Homo sapiens
  Table A; Target 17990; HLA-B*07:02; CSAG1; ENSG00000198930; TAA
KPRASSPF

SEQ ID NO: 17991 - protein, 8 aa, Homo sapiens
  Table A; Target 17991; HLA-C*07:02; CSAG1; ENSG00000198930; TAA
KPRASSPF

SEQ ID NO: 17992 - protein, 9 aa, Homo sapiens
  Table A; Target 17992; HLA-A*03:01; CSAG1; ENSG00000198930; TAA
LYRDTGLVK

SEQ ID NO: 17993 - protein, 9 aa, Homo sapiens
  Table A; Target 17993; HLA-A*33:01; CSAG1; ENSG00000198930; TAA
LYRDTGLVK

SEQ ID NO: 17994 - protein, 9 aa, Homo sapiens
  Table A; Target 17994; HLA-A*33:03; CSAG1; ENSG00000198930; TAA
LYRDTGLVK

SEQ ID NO: 17995 - protein, 9 aa, Homo sapiens
  Table A; Target 17995; HLA-C*14:02; CSAG1; ENSG00000198930; TAA
LYRDTGLVK

SEQ ID NO: 17996 - protein, 10 aa, Homo sapiens
  Table A; Target 17996; HLA-A*23:01; CSAG1; ENSG00000198930; TAA
LYRDTGLVKM

SEQ ID NO: 17997 - protein, 10 aa, Homo sapiens
  Table A; Target 17997; HLA-A*24:02; CSAG1; ENSG00000198930; TAA
LYRDTGLVKM

SEQ ID NO: 17998 - protein, 10 aa, Homo sapiens
  Table A; Target 17998; HLA-A*31:01; CSAG1; ENSG00000198930; TAA
LYRDTGLVKM

SEQ ID NO: 17999 - protein, 10 aa, Homo sapiens
  Table A; Target 17999; HLA-A*33:01; CSAG1; ENSG00000198930; TAA
LYRDTGLVKM

SEQ ID NO: 18000 - protein, 10 aa, Homo sapiens
  Table A; Target 18000; HLA-B*40:02; CSAG1; ENSG00000198930; TAA
LYRDTGLVKM

SEQ ID NO: 18001 - protein, 10 aa, Homo sapiens
  Table A; Target 18001; HLA-C*14:02; CSAG1; ENSG00000198930; TAA
LYRDTGLVKM

SEQ ID NO: 18002 - protein, 8 aa, Homo sapiens
  Table A; Target 18002; HLA-B*58:01; CSAG1; ENSG00000198930; TAA
MSATTACW

SEQ ID NO: 18003 - protein, 8 aa, Homo sapiens
  Table A; Target 18003; HLA-A*33:01; CSAG1; ENSG00000198930; TAA
NNHPSTPK

SEQ ID NO: 18004 - protein, 8 aa, Homo sapiens
  Table A; Target 18004; HLA-C*04:01; CSAG1; ENSG00000198930; TAA
NNHPSTPK

SEQ ID NO: 18005 - protein, 9 aa, Homo sapiens
  Table A; Target 18005; HLA-A*33:01; CSAG1; ENSG00000198930; TAA
NNHPSTPKR

SEQ ID NO: 18006 - protein, 9 aa, Homo sapiens
  Table A; Target 18006; HLA-A*33:03; CSAG1; ENSG00000198930; TAA
NNHPSTPKR

SEQ ID NO: 18007 - protein, 10 aa, Homo sapiens
  Table A; Target 18007; HLA-A*68:01; CSAG1; ENSG00000198930; TAA
PAFTVLGEAR

SEQ ID NO: 18008 - protein, 10 aa, Homo sapiens
  Table A; Target 18008; HLA-B*27:02; CSAG1; ENSG00000198930; TAA
PAFTVLGEAR

SEQ ID NO: 18009 - protein, 9 aa, Homo sapiens
  Table A; Target 18009; HLA-A*03:01; CSAG1; ENSG00000198930; TAA
QVDWSRLYR

SEQ ID NO: 18010 - protein, 9 aa, Homo sapiens
  Table A; Target 18010; HLA-A*31:01; CSAG1; ENSG00000198930; TAA
QVDWSRLYR

SEQ ID NO: 18011 - protein, 8 aa, Homo sapiens
  Table A; Target 18011; HLA-B*37:01; CSAG1; ENSG00000198930; TAA
RDTGLVKM

SEQ ID NO: 18012 - protein, 8 aa, Homo sapiens
  Table A; Target 18012; HLA-B*40:02; CSAG1; ENSG00000198930; TAA
RDTGLVKM

SEQ ID NO: 18013 - protein, 8 aa, Homo sapiens
  Table A; Target 18013; HLA-C*06:02; CSAG1; ENSG00000198930; TAA
RDTGLVKM

SEQ ID NO: 18014 - protein, 8 aa, Homo sapiens
  Table A; Target 18014; HLA-C*07:01; CSAG1; ENSG00000198930; TAA
RDTGLVKM

SEQ ID NO: 18015 - protein, 8 aa, Homo sapiens
  Table A; Target 18015; HLA-C*16:02; CSAG1; ENSG00000198930; TAA
RDTGLVKM

SEQ ID NO: 18016 - protein, 10 aa, Homo sapiens
  Table A; Target 18016; HLA-A*31:01; CSAG1; ENSG00000198930; TAA
RDTGLVKMSR

SEQ ID NO: 18017 - protein, 9 aa, Homo sapiens
  Table A; Target 18017; HLA-A*02:03; CSAG1; ENSG00000198930; TAA
REKGPVKEV

SEQ ID NO: 18018 - protein, 9 aa, Homo sapiens
  Table A; Target 18018; HLA-B*37:01; CSAG1; ENSG00000198930; TAA
REKGPVKEV

SEQ ID NO: 18019 - protein, 9 aa, Homo sapiens
  Table A; Target 18019; HLA-B*40:02; CSAG1; ENSG00000198930; TAA
REKGPVKEV

SEQ ID NO: 18020 - protein, 9 aa, Homo sapiens
  Table A; Target 18020; HLA-B*49:01; CSAG1; ENSG00000198930; TAA
REKGPVKEV

SEQ ID NO: 18021 - protein, 10 aa, Homo sapiens
  Table A; Target 18021; HLA-B*40:02; CSAG1; ENSG00000198930; TAA
REKGPVKEVP

SEQ ID NO: 18022 - protein, 9 aa, Homo sapiens
  Table A; Target 18022; HLA-B*15:03; CSAG1; ENSG00000198930; TAA
RKPRASSPF

SEQ ID NO: 18023 - protein, 9 aa, Homo sapiens
  Table A; Target 18023; HLA-A*02:03; CSAG1; ENSG00000198930; TAA
RLYRDTGLV

SEQ ID NO: 18024 - protein, 9 aa, Homo sapiens
  Table A; Target 18024; HLA-A*02:04; CSAG1; ENSG00000198930; TAA
RLYRDTGLV

SEQ ID NO: 18025 - protein, 10 aa, Homo sapiens
  Table A; Target 18025; HLA-A*03:01; CSAG1; ENSG00000198930; TAA
RLYRDTGLVK

SEQ ID NO: 18026 - protein, 10 aa, Homo sapiens
  Table A; Target 18026; HLA-A*03:02; CSAG1; ENSG00000198930; TAA
RLYRDTGLVK

SEQ ID NO: 18027 - protein, 10 aa, Homo sapiens
  Table A; Target 18027; HLA-A*11:01; CSAG1; ENSG00000198930; TAA
RLYRDTGLVK

SEQ ID NO: 18028 - protein, 10 aa, Homo sapiens
  Table A; Target 18028; HLA-A*31:01; CSAG1; ENSG00000198930; TAA
RLYRDTGLVK

SEQ ID NO: 18029 - protein, 11 aa, Homo sapiens
  Table A; Target 18029; HLA-A*02:01; CSAG1; ENSG00000198930; TAA
RLYRDTGLVKM

SEQ ID NO: 18030 - protein, 11 aa, Homo sapiens
  Table A; Target 18030; HLA-A*02:03; CSAG1; ENSG00000198930; TAA
RLYRDTGLVKM

SEQ ID NO: 18031 - protein, 11 aa, Homo sapiens
  Table A; Target 18031; HLA-A*02:04; CSAG1; ENSG00000198930; TAA
RLYRDTGLVKM

SEQ ID NO: 18032 - protein, 11 aa, Homo sapiens
  Table A; Target 18032; HLA-A*02:07; CSAG1; ENSG00000198930; TAA
RLYRDTGLVKM

SEQ ID NO: 18033 - protein, 11 aa, Homo sapiens
  Table A; Target 18033; HLA-A*03:01; CSAG1; ENSG00000198930; TAA
RLYRDTGLVKM

SEQ ID NO: 18034 - protein, 11 aa, Homo sapiens
  Table A; Target 18034; HLA-A*31:01; CSAG1; ENSG00000198930; TAA
RLYRDTGLVKM

SEQ ID NO: 18035 - protein, 11 aa, Homo sapiens
  Table A; Target 18035; HLA-B*57:01; CSAG1; ENSG00000198930; TAA
RLYRDTGLVKM

SEQ ID NO: 18036 - protein, 9 aa, Homo sapiens
  Table A; Target 18036; HLA-B*54:01; CSAG1; ENSG00000198930; TAA
SATTACWPA

SEQ ID NO: 18037 - protein, 9 aa, Homo sapiens
  Table A; Target 18037; HLA-A*03:01; CSAG1; ENSG00000198930; TAA
SNNHPSTPK

SEQ ID NO: 18038 - protein, 9 aa, Homo sapiens
  Table A; Target 18038; HLA-A*03:02; CSAG1; ENSG00000198930; TAA
SNNHPSTPK

SEQ ID NO: 18039 - protein, 9 aa, Homo sapiens
  Table A; Target 18039; HLA-A*11:01; CSAG1; ENSG00000198930; TAA
SNNHPSTPK

SEQ ID NO: 18040 - protein, 9 aa, Homo sapiens
  Table A; Target 18040; HLA-A*33:01; CSAG1; ENSG00000198930; TAA
SNNHPSTPK

SEQ ID NO: 18041 - protein, 9 aa, Homo sapiens
  Table A; Target 18041; HLA-A*33:03; CSAG1; ENSG00000198930; TAA
SNNHPSTPK

SEQ ID NO: 18042 - protein, 9 aa, Homo sapiens
  Table A; Target 18042; HLA-B*27:05; CSAG1; ENSG00000198930; TAA
SNNHPSTPK

SEQ ID NO: 18043 - protein, 9 aa, Homo sapiens
  Table A; Target 18043; HLA-C*07:06; CSAG1; ENSG00000198930; TAA
SNNHPSTPK

SEQ ID NO: 18044 - protein, 8 aa, Homo sapiens
  Table A; Target 18044; HLA-B*56:01; CSAG1; ENSG00000198930; TAA
SPFSNNHP

SEQ ID NO: 18045 - protein, 9 aa, Homo sapiens
  Table A; Target 18045; HLA-B*54:01; CSAG1; ENSG00000198930; TAA
SPFSNNHPS

SEQ ID NO: 18046 - protein, 9 aa, Homo sapiens
  Table A; Target 18046; HLA-B*55:01; CSAG1; ENSG00000198930; TAA
SPFSNNHPS

SEQ ID NO: 18047 - protein, 9 aa, Homo sapiens
  Table A; Target 18047; HLA-B*56:01; CSAG1; ENSG00000198930; TAA
SPFSNNHPS

SEQ ID NO: 18048 - protein, 9 aa, Homo sapiens
  Table A; Target 18048; HLA-C*04:01; CSAG1; ENSG00000198930; TAA
SPFSNNHPS

SEQ ID NO: 18049 - protein, 9 aa, Homo sapiens
  Table A; Target 18049; HLA-C*06:02; CSAG1; ENSG00000198930; TAA
SPFSNNHPS

SEQ ID NO: 18050 - protein, 9 aa, Homo sapiens
  Table A; Target 18050; HLA-C*07:01; CSAG1; ENSG00000198930; TAA
SPFSNNHPS

SEQ ID NO: 18051 - protein, 10 aa, Homo sapiens
  Table A; Target 18051; HLA-B*07:02; CSAG1; ENSG00000198930; TAA
SPFSNNHPST

SEQ ID NO: 18052 - protein, 10 aa, Homo sapiens
  Table A; Target 18052; HLA-B*54:01; CSAG1; ENSG00000198930; TAA
SPFSNNHPST

SEQ ID NO: 18053 - protein, 10 aa, Homo sapiens
  Table A; Target 18053; HLA-B*55:01; CSAG1; ENSG00000198930; TAA
SPFSNNHPST

SEQ ID NO: 18054 - protein, 10 aa, Homo sapiens
  Table A; Target 18054; HLA-B*56:01; CSAG1; ENSG00000198930; TAA
SPFSNNHPST

SEQ ID NO: 18055 - protein, 10 aa, Homo sapiens
  Table A; Target 18055; HLA-C*07:02; CSAG1; ENSG00000198930; TAA
SPFSNNHPST

SEQ ID NO: 18056 - protein, 11 aa, Homo sapiens
  Table A; Target 18056; HLA-B*07:02; CSAG1; ENSG00000198930; TAA
SPFSNNHPSTP

SEQ ID NO: 18057 - protein, 11 aa, Homo sapiens
  Table A; Target 18057; HLA-B*54:01; CSAG1; ENSG00000198930; TAA
SPFSNNHPSTP

SEQ ID NO: 18058 - protein, 11 aa, Homo sapiens
  Table A; Target 18058; HLA-B*55:01; CSAG1; ENSG00000198930; TAA
SPFSNNHPSTP

SEQ ID NO: 18059 - protein, 11 aa, Homo sapiens
  Table A; Target 18059; HLA-B*56:01; CSAG1; ENSG00000198930; TAA
SPFSNNHPSTP

SEQ ID NO: 18060 - protein, 11 aa, Homo sapiens
  Table A; Target 18060; HLA-C*07:02; CSAG1; ENSG00000198930; TAA
SPFSNNHPSTP

SEQ ID NO: 18061 - protein, 9 aa, Homo sapiens
  Table A; Target 18061; HLA-A*68:02; CSAG1; ENSG00000198930; TAA
TACWPAFTV

SEQ ID NO: 18062 - protein, 9 aa, Homo sapiens
  Table A; Target 18062; HLA-B*51:01; CSAG1; ENSG00000198930; TAA
TACWPAFTV

SEQ ID NO: 18063 - protein, 9 aa, Homo sapiens
  Table A; Target 18063; HLA-B*54:01; CSAG1; ENSG00000198930; TAA
TACWPAFTV

SEQ ID NO: 18064 - protein, 10 aa, Homo sapiens
  Table A; Target 18064; HLA-A*68:02; CSAG1; ENSG00000198930; TAA
TTACWPAFTV

SEQ ID NO: 18065 - protein, 10 aa, Homo sapiens
  Table A; Target 18065; HLA-A*02:01; CSAG1; ENSG00000198930; TAA
VLGEARGDQV

SEQ ID NO: 18066 - protein, 10 aa, Homo sapiens
  Table A; Target 18066; HLA-A*02:03; CSAG1; ENSG00000198930; TAA
VLGEARGDQV

SEQ ID NO: 18067 - protein, 10 aa, Homo sapiens
  Table A; Target 18067; HLA-A*02:07; CSAG1; ENSG00000198930; TAA
VLGEARGDQV

SEQ ID NO: 18068 - protein, 10 aa, Homo sapiens
  Table A; Target 18068; HLA-B*55:01; CSAG1; ENSG00000198930; TAA
VLGEARGDQV

SEQ ID NO: 18069 - protein, 10 aa, Homo sapiens
  Table A; Target 18069; HLA-B*54:01; CSAG1; ENSG00000198930; TAA
WPAFTVLGEA

SEQ ID NO: 18070 - protein, 10 aa, Homo sapiens
  Table A; Target 18070; HLA-B*56:01; CSAG1; ENSG00000198930; TAA
WPAFTVLGEA

SEQ ID NO: 18071 - protein, 9 aa, Homo sapiens
  Table A; Target 18071; HLA-A*01:01; CSAG1; ENSG00000198930; TAA
YRDTGLVKM

SEQ ID NO: 18072 - protein, 9 aa, Homo sapiens
  Table A; Target 18072; HLA-A*02:01; CSAG1; ENSG00000198930; TAA
YRDTGLVKM

SEQ ID NO: 18073 - protein, 9 aa, Homo sapiens
  Table A; Target 18073; HLA-A*02:07; CSAG1; ENSG00000198930; TAA
YRDTGLVKM

SEQ ID NO: 18074 - protein, 9 aa, Homo sapiens
  Table A; Target 18074; HLA-B*27:05; CSAG1; ENSG00000198930; TAA
YRDTGLVKM

SEQ ID NO: 18075 - protein, 9 aa, Homo sapiens
  Table A; Target 18075; HLA-B*38:01; CSAG1; ENSG00000198930; TAA
YRDTGLVKM

SEQ ID NO: 18076 - protein, 9 aa, Homo sapiens
  Table A; Target 18076; HLA-B*39:01; CSAG1; ENSG00000198930; TAA
YRDTGLVKM

SEQ ID NO: 18077 - protein, 9 aa, Homo sapiens
  Table A; Target 18077; HLA-B*40:01; CSAG1; ENSG00000198930; TAA
YRDTGLVKM

SEQ ID NO: 18078 - protein, 9 aa, Homo sapiens
  Table A; Target 18078; HLA-B*55:01; CSAG1; ENSG00000198930; TAA
YRDTGLVKM

SEQ ID NO: 18079 - protein, 9 aa, Homo sapiens
  Table A; Target 18079; HLA-C*02:02; CSAG1; ENSG00000198930; TAA
YRDTGLVKM

SEQ ID NO: 18080 - protein, 9 aa, Homo sapiens
  Table A; Target 18080; HLA-C*04:01; CSAG1; ENSG00000198930; TAA
YRDTGLVKM

SEQ ID NO: 18081 - protein, 9 aa, Homo sapiens
  Table A; Target 18081; HLA-C*05:01; CSAG1; ENSG00000198930; TAA
YRDTGLVKM

SEQ ID NO: 18082 - protein, 9 aa, Homo sapiens
  Table A; Target 18082; HLA-C*06:02; CSAG1; ENSG00000198930; TAA
YRDTGLVKM

SEQ ID NO: 18083 - protein, 9 aa, Homo sapiens
  Table A; Target 18083; HLA-C*07:02; CSAG1; ENSG00000198930; TAA
YRDTGLVKM

SEQ ID NO: 18084 - protein, 9 aa, Homo sapiens
  Table A; Target 18084; HLA-C*07:04; CSAG1; ENSG00000198930; TAA
YRDTGLVKM

SEQ ID NO: 18085 - protein, 9 aa, Homo sapiens
  Table A; Target 18085; HLA-C*12:03; CSAG1; ENSG00000198930; TAA
YRDTGLVKM

SEQ ID NO: 18086 - protein, 9 aa, Homo sapiens
  Table A; Target 18086; HLA-C*16:02; CSAG1; ENSG00000198930; TAA
YRDTGLVKM

SEQ ID NO: 18087 - protein, 9 aa, Homo sapiens
  Table A; Target 18087; HLA-C*16:04; CSAG1; ENSG00000198930; TAA
YRDTGLVKM

SEQ ID NO: 18088 - protein, 9 aa, Homo sapiens
  Table A; Target 18088; HLA-C*03:04; CT62; ENSG00000225362; TAA
AAQRLHVEL

SEQ ID NO: 18089 - protein, 9 aa, Homo sapiens
  Table A; Target 18089; HLA-C*12:03; CT62; ENSG00000225362; TAA
AAQRLHVEL

SEQ ID NO: 18090 - protein, 9 aa, Homo sapiens
  Table A; Target 18090; HLA-C*16:01; CT62; ENSG00000225362; TAA
AAQRLHVEL

SEQ ID NO: 18091 - protein, 9 aa, Homo sapiens
  Table A; Target 18091; HLA-C*16:02; CT62; ENSG00000225362; TAA
AAQRLHVEL

SEQ ID NO: 18092 - protein, 10 aa, Homo sapiens
  Table A; Target 18092; HLA-B*57:01; CT62; ENSG00000225362; TAA
AAQRLHVELW

SEQ ID NO: 18093 - protein, 8 aa, Homo sapiens
  Table A; Target 18093; HLA-B*37:01; CT62; ENSG00000225362; TAA
ADLQSEFL

SEQ ID NO: 18094 - protein, 8 aa, Homo sapiens
  Table A; Target 18094; HLA-B*08:01; CT62; ENSG00000225362; TAA
AQRLHVEL

SEQ ID NO: 18095 - protein, 8 aa, Homo sapiens
  Table A; Target 18095; HLA-B*37:01; CT62; ENSG00000225362; TAA
AQRLHVEL

SEQ ID NO: 18096 - protein, 9 aa, Homo sapiens
  Table A; Target 18096; HLA-B*44:02; CT62; ENSG00000225362; TAA
AQRLHVELW

SEQ ID NO: 18097 - protein, 9 aa, Homo sapiens
  Table A; Target 18097; HLA-B*44:03; CT62; ENSG00000225362; TAA
AQRLHVELW

SEQ ID NO: 18098 - protein, 9 aa, Homo sapiens
  Table A; Target 18098; HLA-B*57:01; CT62; ENSG00000225362; TAA
AQRLHVELW

SEQ ID NO: 18099 - protein, 8 aa, Homo sapiens
  Table A; Target 18099; HLA-A*32:01; CT62; ENSG00000225362; TAA
ATLQVISF

SEQ ID NO: 18100 - protein, 8 aa, Homo sapiens
  Table A; Target 18100; HLA-B*37:01; CT62; ENSG00000225362; TAA
ATLQVISF

SEQ ID NO: 18101 - protein, 8 aa, Homo sapiens
  Table A; Target 18101; HLA-B*57:01; CT62; ENSG00000225362; TAA
ATLQVISF

SEQ ID NO: 18102 - protein, 8 aa, Homo sapiens
  Table A; Target 18102; HLA-B*58:01; CT62; ENSG00000225362; TAA
ATLQVISF

SEQ ID NO: 18103 - protein, 10 aa, Homo sapiens
  Table A; Target 18103; HLA-A*30:02; CT62; ENSG00000225362; TAA
ATLQVISFSF

SEQ ID NO: 18104 - protein, 10 aa, Homo sapiens
  Table A; Target 18104; HLA-B*57:01; CT62; ENSG00000225362; TAA
ATLQVISFSF

SEQ ID NO: 18105 - protein, 9 aa, Homo sapiens
  Table A; Target 18105; HLA-A*23:01; CT62; ENSG00000225362; TAA
AYSHTHRTF

SEQ ID NO: 18106 - protein, 9 aa, Homo sapiens
  Table A; Target 18106; HLA-A*24:02; CT62; ENSG00000225362; TAA
AYSHTHRTF

SEQ ID NO: 18107 - protein, 9 aa, Homo sapiens
  Table A; Target 18107; HLA-C*14:02; CT62; ENSG00000225362; TAA
AYSHTHRTF

SEQ ID NO: 18108 - protein, 9 aa, Homo sapiens
  Table A; Target 18108; HLA-C*16:01; CT62; ENSG00000225362; TAA
AYSHTHRTF

SEQ ID NO: 18109 - protein, 9 aa, Homo sapiens
  Table A; Target 18109; HLA-C*16:02; CT62; ENSG00000225362; TAA
AYSHTHRTF

SEQ ID NO: 18110 - protein, 9 aa, Homo sapiens
  Table A; Target 18110; HLA-A*31:01; CT62; ENSG00000225362; TAA
CGSQPAAQR

SEQ ID NO: 18111 - protein, 9 aa, Homo sapiens
  Table A; Target 18111; HLA-A*33:01; CT62; ENSG00000225362; TAA
CGSQPAAQR

SEQ ID NO: 18112 - protein, 9 aa, Homo sapiens
  Table A; Target 18112; HLA-A*68:01; CT62; ENSG00000225362; TAA
CGSQPAAQR

SEQ ID NO: 18113 - protein, 9 aa, Homo sapiens
  Table A; Target 18113; HLA-C*07:06; CT62; ENSG00000225362; TAA
CGSQPAAQR

SEQ ID NO: 18114 - protein, 8 aa, Homo sapiens
  Table A; Target 18114; HLA-A*33:01; CT62; ENSG00000225362; TAA
DMSKMVSR

SEQ ID NO: 18115 - protein, 8 aa, Homo sapiens
  Table A; Target 18115; HLA-A*33:03; CT62; ENSG00000225362; TAA
DMSKMVSR

SEQ ID NO: 18116 - protein, 9 aa, Homo sapiens
  Table A; Target 18116; HLA-A*33:01; CT62; ENSG00000225362; TAA
DMSKMVSRR

SEQ ID NO: 18117 - protein, 9 aa, Homo sapiens
  Table A; Target 18117; HLA-A*33:03; CT62; ENSG00000225362; TAA
DMSKMVSRR

SEQ ID NO: 18118 - protein, 9 aa, Homo sapiens
  Table A; Target 18118; HLA-A*68:01; CT62; ENSG00000225362; TAA
DMSKMVSRR

SEQ ID NO: 18119 - protein, 9 aa, Homo sapiens
  Table A; Target 18119; HLA-A*25:01; CT62; ENSG00000225362; TAA
DSHEVSGSL

SEQ ID NO: 18120 - protein, 9 aa, Homo sapiens
  Table A; Target 18120; HLA-A*33:01; CT62; ENSG00000225362; TAA
DSHEVSGSL

SEQ ID NO: 18121 - protein, 9 aa, Homo sapiens
  Table A; Target 18121; HLA-B*35:03; CT62; ENSG00000225362; TAA
DSHEVSGSL

SEQ ID NO: 18122 - protein, 9 aa, Homo sapiens
  Table A; Target 18122; HLA-B*51:01; CT62; ENSG00000225362; TAA
DSHEVSGSL

SEQ ID NO: 18123 - protein, 9 aa, Homo sapiens
  Table A; Target 18123; HLA-C*01:02; CT62; ENSG00000225362; TAA
DSHEVSGSL

SEQ ID NO: 18124 - protein, 9 aa, Homo sapiens
  Table A; Target 18124; HLA-C*03:04; CT62; ENSG00000225362; TAA
DSHEVSGSL

SEQ ID NO: 18125 - protein, 11 aa, Homo sapiens
  Table A; Target 18125; HLA-A*33:01; CT62; ENSG00000225362; TAA
DSHEVSGSLQA

SEQ ID NO: 18126 - protein, 9 aa, Homo sapiens
  Table A; Target 18126; HLA-A*11:01; CT62; ENSG00000225362; TAA
EDMSKMVSR

SEQ ID NO: 18127 - protein, 9 aa, Homo sapiens
  Table A; Target 18127; HLA-A*25:01; CT62; ENSG00000225362; TAA
EDMSKMVSR

SEQ ID NO: 18128 - protein, 9 aa, Homo sapiens
  Table A; Target 18128; HLA-A*26:01; CT62; ENSG00000225362; TAA
EDMSKMVSR

SEQ ID NO: 18129 - protein, 9 aa, Homo sapiens
  Table A; Target 18129; HLA-A*31:01; CT62; ENSG00000225362; TAA
EDMSKMVSR

SEQ ID NO: 18130 - protein, 9 aa, Homo sapiens
  Table A; Target 18130; HLA-A*33:01; CT62; ENSG00000225362; TAA
EDMSKMVSR

SEQ ID NO: 18131 - protein, 9 aa, Homo sapiens
  Table A; Target 18131; HLA-A*68:02; CT62; ENSG00000225362; TAA
EDMSKMVSR

SEQ ID NO: 18132 - protein, 9 aa, Homo sapiens
  Table A; Target 18132; HLA-B*40:02; CT62; ENSG00000225362; TAA
EDMSKMVSR

SEQ ID NO: 18133 - protein, 9 aa, Homo sapiens
  Table A; Target 18133; HLA-C*07:01; CT62; ENSG00000225362; TAA
EDMSKMVSR

SEQ ID NO: 18134 - protein, 9 aa, Homo sapiens
  Table A; Target 18134; HLA-C*07:06; CT62; ENSG00000225362; TAA
EDMSKMVSR

SEQ ID NO: 18135 - protein, 10 aa, Homo sapiens
  Table A; Target 18135; HLA-A*33:01; CT62; ENSG00000225362; TAA
EDMSKMVSRR

SEQ ID NO: 18136 - protein, 10 aa, Homo sapiens
  Table A; Target 18136; HLA-A*33:03; CT62; ENSG00000225362; TAA
EDMSKMVSRR

SEQ ID NO: 18137 - protein, 10 aa, Homo sapiens
  Table A; Target 18137; HLA-A*68:01; CT62; ENSG00000225362; TAA
EDMSKMVSRR

SEQ ID NO: 18138 - protein, 10 aa, Homo sapiens
  Table A; Target 18138; HLA-A*25:01; CT62; ENSG00000225362; TAA
EVSGSLQATL

SEQ ID NO: 18139 - protein, 10 aa, Homo sapiens
  Table A; Target 18139; HLA-A*26:01; CT62; ENSG00000225362; TAA
EVSGSLQATL

SEQ ID NO: 18140 - protein, 10 aa, Homo sapiens
  Table A; Target 18140; HLA-A*33:03; CT62; ENSG00000225362; TAA
EVSGSLQATL

SEQ ID NO: 18141 - protein, 10 aa, Homo sapiens
  Table A; Target 18141; HLA-A*68:01; CT62; ENSG00000225362; TAA
EVSGSLQATL

SEQ ID NO: 18142 - protein, 10 aa, Homo sapiens
  Table A; Target 18142; HLA-A*68:02; CT62; ENSG00000225362; TAA
EVSGSLQATL

SEQ ID NO: 18143 - protein, 10 aa, Homo sapiens
  Table A; Target 18143; HLA-B*27:05; CT62; ENSG00000225362; TAA
EVSGSLQATL

SEQ ID NO: 18144 - protein, 10 aa, Homo sapiens
  Table A; Target 18144; HLA-C*07:06; CT62; ENSG00000225362; TAA
EVSGSLQATL

SEQ ID NO: 18145 - protein, 8 aa, Homo sapiens
  Table A; Target 18145; HLA-B*51:01; CT62; ENSG00000225362; TAA
FPFLLHTC

SEQ ID NO: 18146 - protein, 8 aa, Homo sapiens
  Table A; Target 18146; HLA-B*54:01; CT62; ENSG00000225362; TAA
FPFLLHTC

SEQ ID NO: 18147 - protein, 8 aa, Homo sapiens
  Table A; Target 18147; HLA-B*56:01; CT62; ENSG00000225362; TAA
FPFLLHTC

SEQ ID NO: 18148 - protein, 9 aa, Homo sapiens
  Table A; Target 18148; HLA-B*54:01; CT62; ENSG00000225362; TAA
FPFLLHTCS

SEQ ID NO: 18149 - protein, 9 aa, Homo sapiens
  Table A; Target 18149; HLA-B*54:01; CT62; ENSG00000225362; TAA
FSCGSQPAA

SEQ ID NO: 18150 - protein, 9 aa, Homo sapiens
  Table A; Target 18150; HLA-C*03:03; CT62; ENSG00000225362; TAA
FSCGSQPAA

SEQ ID NO: 18151 - protein, 10 aa, Homo sapiens
  Table A; Target 18151; HLA-C*07:01; CT62; ENSG00000225362; TAA
FSCGSQPAAQ

SEQ ID NO: 18152 - protein, 10 aa, Homo sapiens
  Table A; Target 18152; HLA-C*07:02; CT62; ENSG00000225362; TAA
FSCGSQPAAQ

SEQ ID NO: 18153 - protein, 11 aa, Homo sapiens
  Table A; Target 18153; HLA-A*68:01; CT62; ENSG00000225362; TAA
FSCGSQPAAQR

SEQ ID NO: 18154 - protein, 9 aa, Homo sapiens
  Table A; Target 18154; HLA-A*68:02; CT62; ENSG00000225362; TAA
FSFPFLLHT

SEQ ID NO: 18155 - protein, 9 aa, Homo sapiens
  Table A; Target 18155; HLA-B*54:01; CT62; ENSG00000225362; TAA
FSFPFLLHT

SEQ ID NO: 18156 - protein, 9 aa, Homo sapiens
  Table A; Target 18156; HLA-B*13:02; CT62; ENSG00000225362; TAA
GSLQATLQV

SEQ ID NO: 18157 - protein, 8 aa, Homo sapiens
  Table A; Target 18157; HLA-A*31:01; CT62; ENSG00000225362; TAA
GSQPAAQR

SEQ ID NO: 18158 - protein, 9 aa, Homo sapiens
  Table A; Target 18158; HLA-A*03:02; CT62; ENSG00000225362; TAA
GSQPAAQRL

SEQ ID NO: 18159 - protein, 9 aa, Homo sapiens
  Table A; Target 18159; HLA-A*11:01; CT62; ENSG00000225362; TAA
GSQPAAQRL

SEQ ID NO: 18160 - protein, 9 aa, Homo sapiens
  Table A; Target 18160; HLA-A*31:01; CT62; ENSG00000225362; TAA
GSQPAAQRL

SEQ ID NO: 18161 - protein, 9 aa, Homo sapiens
  Table A; Target 18161; HLA-B*07:02; CT62; ENSG00000225362; TAA
GSQPAAQRL

SEQ ID NO: 18162 - protein, 9 aa, Homo sapiens
  Table A; Target 18162; HLA-B*58:01; CT62; ENSG00000225362; TAA
GSQPAAQRL

SEQ ID NO: 18163 - protein, 9 aa, Homo sapiens
  Table A; Target 18163; HLA-C*01:02; CT62; ENSG00000225362; TAA
GSQPAAQRL

SEQ ID NO: 18164 - protein, 9 aa, Homo sapiens
  Table A; Target 18164; HLA-C*06:02; CT62; ENSG00000225362; TAA
GSQPAAQRL

SEQ ID NO: 18165 - protein, 9 aa, Homo sapiens
  Table A; Target 18165; HLA-C*07:06; CT62; ENSG00000225362; TAA
GSQPAAQRL

SEQ ID NO: 18166 - protein, 9 aa, Homo sapiens
  Table A; Target 18166; HLA-C*16:01; CT62; ENSG00000225362; TAA
GSQPAAQRL

SEQ ID NO: 18167 - protein, 9 aa, Homo sapiens
  Table A; Target 18167; HLA-C*16:02; CT62; ENSG00000225362; TAA
GSQPAAQRL

SEQ ID NO: 18168 - protein, 8 aa, Homo sapiens
  Table A; Target 18168; HLA-C*04:01; CT62; ENSG00000225362; TAA
HEVSGSLQ

SEQ ID NO: 18169 - protein, 8 aa, Homo sapiens
  Table A; Target 18169; HLA-C*07:01; CT62; ENSG00000225362; TAA
HEVSGSLQ

SEQ ID NO: 18170 - protein, 9 aa, Homo sapiens
  Table A; Target 18170; HLA-B*13:02; CT62; ENSG00000225362; TAA
HEVSGSLQA

SEQ ID NO: 18171 - protein, 9 aa, Homo sapiens
  Table A; Target 18171; HLA-B*18:01; CT62; ENSG00000225362; TAA
HEVSGSLQA

SEQ ID NO: 18172 - protein, 9 aa, Homo sapiens
  Table A; Target 18172; HLA-B*40:01; CT62; ENSG00000225362; TAA
HEVSGSLQA

SEQ ID NO: 18173 - protein, 9 aa, Homo sapiens
  Table A; Target 18173; HLA-B*40:02; CT62; ENSG00000225362; TAA
HEVSGSLQA

SEQ ID NO: 18174 - protein, 9 aa, Homo sapiens
  Table A; Target 18174; HLA-B*44:03; CT62; ENSG00000225362; TAA
HEVSGSLQA

SEQ ID NO: 18175 - protein, 9 aa, Homo sapiens
  Table A; Target 18175; HLA-B*54:01; CT62; ENSG00000225362; TAA
HEVSGSLQA

SEQ ID NO: 18176 - protein, 9 aa, Homo sapiens
  Table A; Target 18176; HLA-B*56:01; CT62; ENSG00000225362; TAA
HEVSGSLQA

SEQ ID NO: 18177 - protein, 10 aa, Homo sapiens
  Table A; Target 18177; HLA-A*30:01; CT62; ENSG00000225362; TAA
HEVSGSLQAT

SEQ ID NO: 18178 - protein, 10 aa, Homo sapiens
  Table A; Target 18178; HLA-B*40:01; CT62; ENSG00000225362; TAA
HEVSGSLQAT

SEQ ID NO: 18179 - protein, 10 aa, Homo sapiens
  Table A; Target 18179; HLA-B*40:02; CT62; ENSG00000225362; TAA
HEVSGSLQAT

SEQ ID NO: 18180 - protein, 10 aa, Homo sapiens
  Table A; Target 18180; HLA-B*49:01; CT62; ENSG00000225362; TAA
HEVSGSLQAT

SEQ ID NO: 18181 - protein, 10 aa, Homo sapiens
  Table A; Target 18181; HLA-C*07:01; CT62; ENSG00000225362; TAA
HEVSGSLQAT

SEQ ID NO: 18182 - protein, 11 aa, Homo sapiens
  Table A; Target 18182; HLA-A*23:01; CT62; ENSG00000225362; TAA
HEVSGSLQATL

SEQ ID NO: 18183 - protein, 11 aa, Homo sapiens
  Table A; Target 18183; HLA-B*18:01; CT62; ENSG00000225362; TAA
HEVSGSLQATL

SEQ ID NO: 18184 - protein, 11 aa, Homo sapiens
  Table A; Target 18184; HLA-B*38:01; CT62; ENSG00000225362; TAA
HEVSGSLQATL

SEQ ID NO: 18185 - protein, 11 aa, Homo sapiens
  Table A; Target 18185; HLA-B*39:01; CT62; ENSG00000225362; TAA
HEVSGSLQATL

SEQ ID NO: 18186 - protein, 11 aa, Homo sapiens
  Table A; Target 18186; HLA-B*40:02; CT62; ENSG00000225362; TAA
HEVSGSLQATL

SEQ ID NO: 18187 - protein, 11 aa, Homo sapiens
  Table A; Target 18187; HLA-B*44:02; CT62; ENSG00000225362; TAA
HEVSGSLQATL

SEQ ID NO: 18188 - protein, 11 aa, Homo sapiens
  Table A; Target 18188; HLA-B*44:03; CT62; ENSG00000225362; TAA
HEVSGSLQATL

SEQ ID NO: 18189 - protein, 11 aa, Homo sapiens
  Table A; Target 18189; HLA-B*49:01; CT62; ENSG00000225362; TAA
HEVSGSLQATL

SEQ ID NO: 18190 - protein, 11 aa, Homo sapiens
  Table A; Target 18190; HLA-C*16:04; CT62; ENSG00000225362; TAA
HEVSGSLQATL

SEQ ID NO: 18191 - protein, 9 aa, Homo sapiens
  Table A; Target 18191; HLA-A*01:01; CT62; ENSG00000225362; TAA
HLTDQPSAY

SEQ ID NO: 18192 - protein, 9 aa, Homo sapiens
  Table A; Target 18192; HLA-A*03:01; CT62; ENSG00000225362; TAA
HLTDQPSAY

SEQ ID NO: 18193 - protein, 9 aa, Homo sapiens
  Table A; Target 18193; HLA-A*25:01; CT62; ENSG00000225362; TAA
HLTDQPSAY

SEQ ID NO: 18194 - protein, 9 aa, Homo sapiens
  Table A; Target 18194; HLA-A*26:01; CT62; ENSG00000225362; TAA
HLTDQPSAY

SEQ ID NO: 18195 - protein, 9 aa, Homo sapiens
  Table A; Target 18195; HLA-A*29:02; CT62; ENSG00000225362; TAA
HLTDQPSAY

SEQ ID NO: 18196 - protein, 9 aa, Homo sapiens
  Table A; Target 18196; HLA-A*30:02; CT62; ENSG00000225362; TAA
HLTDQPSAY

SEQ ID NO: 18197 - protein, 9 aa, Homo sapiens
  Table A; Target 18197; HLA-A*32:01; CT62; ENSG00000225362; TAA
HLTDQPSAY

SEQ ID NO: 18198 - protein, 9 aa, Homo sapiens
  Table A; Target 18198; HLA-A*68:01; CT62; ENSG00000225362; TAA
HLTDQPSAY

SEQ ID NO: 18199 - protein, 9 aa, Homo sapiens
  Table A; Target 18199; HLA-B*15:01; CT62; ENSG00000225362; TAA
HLTDQPSAY

SEQ ID NO: 18200 - protein, 9 aa, Homo sapiens
  Table A; Target 18200; HLA-B*15:03; CT62; ENSG00000225362; TAA
HLTDQPSAY

SEQ ID NO: 18201 - protein, 9 aa, Homo sapiens
  Table A; Target 18201; HLA-B*18:01; CT62; ENSG00000225362; TAA
HLTDQPSAY

SEQ ID NO: 18202 - protein, 9 aa, Homo sapiens
  Table A; Target 18202; HLA-B*27:05; CT62; ENSG00000225362; TAA
HLTDQPSAY

SEQ ID NO: 18203 - protein, 9 aa, Homo sapiens
  Table A; Target 18203; HLA-B*35:01; CT62; ENSG00000225362; TAA
HLTDQPSAY

SEQ ID NO: 18204 - protein, 9 aa, Homo sapiens
  Table A; Target 18204; HLA-B*39:01; CT62; ENSG00000225362; TAA
HLTDQPSAY

SEQ ID NO: 18205 - protein, 9 aa, Homo sapiens
  Table A; Target 18205; HLA-B*44:03; CT62; ENSG00000225362; TAA
HLTDQPSAY

SEQ ID NO: 18206 - protein, 9 aa, Homo sapiens
  Table A; Target 18206; HLA-B*46:01; CT62; ENSG00000225362; TAA
HLTDQPSAY

SEQ ID NO: 18207 - protein, 9 aa, Homo sapiens
  Table A; Target 18207; HLA-B*55:01; CT62; ENSG00000225362; TAA
HLTDQPSAY

SEQ ID NO: 18208 - protein, 9 aa, Homo sapiens
  Table A; Target 18208; HLA-C*02:02; CT62; ENSG00000225362; TAA
HLTDQPSAY

SEQ ID NO: 18209 - protein, 9 aa, Homo sapiens
  Table A; Target 18209; HLA-C*07:04; CT62; ENSG00000225362; TAA
HLTDQPSAY

SEQ ID NO: 18210 - protein, 9 aa, Homo sapiens
  Table A; Target 18210; HLA-C*07:06; CT62; ENSG00000225362; TAA
HLTDQPSAY

SEQ ID NO: 18211 - protein, 9 aa, Homo sapiens
  Table A; Target 18211; HLA-C*14:02; CT62; ENSG00000225362; TAA
HLTDQPSAY

SEQ ID NO: 18212 - protein, 9 aa, Homo sapiens
  Table A; Target 18212; HLA-C*16:01; CT62; ENSG00000225362; TAA
HLTDQPSAY

SEQ ID NO: 18213 - protein, 9 aa, Homo sapiens
  Table A; Target 18213; HLA-C*16:02; CT62; ENSG00000225362; TAA
HLTDQPSAY

SEQ ID NO: 18214 - protein, 9 aa, Homo sapiens
  Table A; Target 18214; HLA-C*16:04; CT62; ENSG00000225362; TAA
HLTDQPSAY

SEQ ID NO: 18215 - protein, 10 aa, Homo sapiens
  Table A; Target 18215; HLA-B*27:05; CT62; ENSG00000225362; TAA
HLTDQPSAYS

SEQ ID NO: 18216 - protein, 8 aa, Homo sapiens
  Table A; Target 18216; HLA-B*54:01; CT62; ENSG00000225362; TAA
HPLSHPTS

SEQ ID NO: 18217 - protein, 9 aa, Homo sapiens
  Table A; Target 18217; HLA-B*07:02; CT62; ENSG00000225362; TAA
HPLSHPTSG

SEQ ID NO: 18218 - protein, 9 aa, Homo sapiens
  Table A; Target 18218; HLA-B*35:01; CT62; ENSG00000225362; TAA
HPLSHPTSG

SEQ ID NO: 18219 - protein, 9 aa, Homo sapiens
  Table A; Target 18219; HLA-B*35:03; CT62; ENSG00000225362; TAA
HPLSHPTSG

SEQ ID NO: 18220 - protein, 9 aa, Homo sapiens
  Table A; Target 18220; HLA-B*54:01; CT62; ENSG00000225362; TAA
HPLSHPTSG

SEQ ID NO: 18221 - protein, 9 aa, Homo sapiens
  Table A; Target 18221; HLA-B*55:01; CT62; ENSG00000225362; TAA
HPLSHPTSG

SEQ ID NO: 18222 - protein, 9 aa, Homo sapiens
  Table A; Target 18222; HLA-B*56:01; CT62; ENSG00000225362; TAA
HPLSHPTSG

SEQ ID NO: 18223 - protein, 11 aa, Homo sapiens
  Table A; Target 18223; HLA-A*33:01; CT62; ENSG00000225362; TAA
HPLSHPTSGQR

SEQ ID NO: 18224 - protein, 11 aa, Homo sapiens
  Table A; Target 18224; HLA-A*33:03; CT62; ENSG00000225362; TAA
HPLSHPTSGQR

SEQ ID NO: 18225 - protein, 8 aa, Homo sapiens
  Table A; Target 18225; HLA-B*27:02; CT62; ENSG00000225362; TAA
HSSEDMSK

SEQ ID NO: 18226 - protein, 9 aa, Homo sapiens
  Table A; Target 18226; HLA-A*26:01; CT62; ENSG00000225362; TAA
HSSEDMSKM

SEQ ID NO: 18227 - protein, 9 aa, Homo sapiens
  Table A; Target 18227; HLA-B*27:05; CT62; ENSG00000225362; TAA
HSSEDMSKM

SEQ ID NO: 18228 - protein, 9 aa, Homo sapiens
  Table A; Target 18228; HLA-B*35:01; CT62; ENSG00000225362; TAA
HSSEDMSKM

SEQ ID NO: 18229 - protein, 9 aa, Homo sapiens
  Table A; Target 18229; HLA-B*35:03; CT62; ENSG00000225362; TAA
HSSEDMSKM

SEQ ID NO: 18230 - protein, 9 aa, Homo sapiens
  Table A; Target 18230; HLA-C*02:02; CT62; ENSG00000225362; TAA
HSSEDMSKM

SEQ ID NO: 18231 - protein, 9 aa, Homo sapiens
  Table A; Target 18231; HLA-C*03:03; CT62; ENSG00000225362; TAA
HSSEDMSKM

SEQ ID NO: 18232 - protein, 9 aa, Homo sapiens
  Table A; Target 18232; HLA-C*03:04; CT62; ENSG00000225362; TAA
HSSEDMSKM

SEQ ID NO: 18233 - protein, 9 aa, Homo sapiens
  Table A; Target 18233; HLA-C*04:01; CT62; ENSG00000225362; TAA
HSSEDMSKM

SEQ ID NO: 18234 - protein, 9 aa, Homo sapiens
  Table A; Target 18234; HLA-C*05:01; CT62; ENSG00000225362; TAA
HSSEDMSKM

SEQ ID NO: 18235 - protein, 9 aa, Homo sapiens
  Table A; Target 18235; HLA-C*07:01; CT62; ENSG00000225362; TAA
HSSEDMSKM

SEQ ID NO: 18236 - protein, 9 aa, Homo sapiens
  Table A; Target 18236; HLA-C*07:04; CT62; ENSG00000225362; TAA
HSSEDMSKM

SEQ ID NO: 18237 - protein, 9 aa, Homo sapiens
  Table A; Target 18237; HLA-C*07:06; CT62; ENSG00000225362; TAA
HSSEDMSKM

SEQ ID NO: 18238 - protein, 9 aa, Homo sapiens
  Table A; Target 18238; HLA-C*12:03; CT62; ENSG00000225362; TAA
HSSEDMSKM

SEQ ID NO: 18239 - protein, 9 aa, Homo sapiens
  Table A; Target 18239; HLA-C*16:02; CT62; ENSG00000225362; TAA
HSSEDMSKM

SEQ ID NO: 18240 - protein, 10 aa, Homo sapiens
  Table A; Target 18240; HLA-C*04:01; CT62; ENSG00000225362; TAA
HSSEDMSKMV

SEQ ID NO: 18241 - protein, 10 aa, Homo sapiens
  Table A; Target 18241; HLA-C*06:02; CT62; ENSG00000225362; TAA
HSSEDMSKMV

SEQ ID NO: 18242 - protein, 10 aa, Homo sapiens
  Table A; Target 18242; HLA-C*07:01; CT62; ENSG00000225362; TAA
HSSEDMSKMV

SEQ ID NO: 18243 - protein, 9 aa, Homo sapiens
  Table A; Target 18243; HLA-A*03:01; CT62; ENSG00000225362; TAA
HTCSHPLSH

SEQ ID NO: 18244 - protein, 9 aa, Homo sapiens
  Table A; Target 18244; HLA-B*57:01; CT62; ENSG00000225362; TAA
HTHRTFSHF

SEQ ID NO: 18245 - protein, 9 aa, Homo sapiens
  Table A; Target 18245; HLA-A*02:01; CT62; ENSG00000225362; TAA
ISFSFPFLL

SEQ ID NO: 18246 - protein, 9 aa, Homo sapiens
  Table A; Target 18246; HLA-A*02:04; CT62; ENSG00000225362; TAA
ISFSFPFLL

SEQ ID NO: 18247 - protein, 9 aa, Homo sapiens
  Table A; Target 18247; HLA-A*02:07; CT62; ENSG00000225362; TAA
ISFSFPFLL

SEQ ID NO: 18248 - protein, 9 aa, Homo sapiens
  Table A; Target 18248; HLA-A*24:02; CT62; ENSG00000225362; TAA
ISFSFPFLL

SEQ ID NO: 18249 - protein, 9 aa, Homo sapiens
  Table A; Target 18249; HLA-A*29:02; CT62; ENSG00000225362; TAA
ISFSFPFLL

SEQ ID NO: 18250 - protein, 9 aa, Homo sapiens
  Table A; Target 18250; HLA-A*31:01; CT62; ENSG00000225362; TAA
ISFSFPFLL

SEQ ID NO: 18251 - protein, 9 aa, Homo sapiens
  Table A; Target 18251; HLA-A*68:02; CT62; ENSG00000225362; TAA
ISFSFPFLL

SEQ ID NO: 18252 - protein, 9 aa, Homo sapiens
  Table A; Target 18252; HLA-B*57:01; CT62; ENSG00000225362; TAA
ISFSFPFLL

SEQ ID NO: 18253 - protein, 9 aa, Homo sapiens
  Table A; Target 18253; HLA-C*02:02; CT62; ENSG00000225362; TAA
ISFSFPFLL

SEQ ID NO: 18254 - protein, 10 aa, Homo sapiens
  Table A; Target 18254; HLA-B*40:01; CT62; ENSG00000225362; TAA
KDSHEVSGSL

SEQ ID NO: 18255 - protein, 10 aa, Homo sapiens
  Table A; Target 18255; HLA-B*40:02; CT62; ENSG00000225362; TAA
KDSHEVSGSL

SEQ ID NO: 18256 - protein, 10 aa, Homo sapiens
  Table A; Target 18256; HLA-C*16:02; CT62; ENSG00000225362; TAA
KDSHEVSGSL

SEQ ID NO: 18257 - protein, 8 aa, Homo sapiens
  Table A; Target 18257; HLA-B*13:02; CT62; ENSG00000225362; TAA
LQATLQVI

SEQ ID NO: 18258 - protein, 8 aa, Homo sapiens
  Table A; Target 18258; HLA-B*51:01; CT62; ENSG00000225362; TAA
LQATLQVI

SEQ ID NO: 18259 - protein, 8 aa, Homo sapiens
  Table A; Target 18259; HLA-C*06:02; CT62; ENSG00000225362; TAA
LQATLQVI

SEQ ID NO: 18260 - protein, 10 aa, Homo sapiens
  Table A; Target 18260; HLA-B*15:01; CT62; ENSG00000225362; TAA
LQATLQVISF

SEQ ID NO: 18261 - protein, 10 aa, Homo sapiens
  Table A; Target 18261; HLA-C*07:04; CT62; ENSG00000225362; TAA
LQATLQVISF

SEQ ID NO: 18262 - protein, 8 aa, Homo sapiens
  Table A; Target 18262; HLA-B*15:01; CT62; ENSG00000225362; TAA
LQVISFSF

SEQ ID NO: 18263 - protein, 8 aa, Homo sapiens
  Table A; Target 18263; HLA-B*15:03; CT62; ENSG00000225362; TAA
LQVISFSF

SEQ ID NO: 18264 - protein, 9 aa, Homo sapiens
  Table A; Target 18264; HLA-A*03:01; CT62; ENSG00000225362; TAA
LTCNPQLGK

SEQ ID NO: 18265 - protein, 9 aa, Homo sapiens
  Table A; Target 18265; HLA-A*03:02; CT62; ENSG00000225362; TAA
LTCNPQLGK

SEQ ID NO: 18266 - protein, 9 aa, Homo sapiens
  Table A; Target 18266; HLA-A*11:01; CT62; ENSG00000225362; TAA
LTCNPQLGK

SEQ ID NO: 18267 - protein, 8 aa, Homo sapiens
  Table A; Target 18267; HLA-A*30:02; CT62; ENSG00000225362; TAA
LTDQPSAY

SEQ ID NO: 18268 - protein, 8 aa, Homo sapiens
  Table A; Target 18268; HLA-C*04:01; CT62; ENSG00000225362; TAA
LTDQPSAY

SEQ ID NO: 18269 - protein, 8 aa, Homo sapiens
  Table A; Target 18269; HLA-C*05:01; CT62; ENSG00000225362; TAA
LTDQPSAY

SEQ ID NO: 18270 - protein, 8 aa, Homo sapiens
  Table A; Target 18270; HLA-C*07:04; CT62; ENSG00000225362; TAA
LTDQPSAY

SEQ ID NO: 18271 - protein, 8 aa, Homo sapiens
  Table A; Target 18271; HLA-C*16:02; CT62; ENSG00000225362; TAA
LTDQPSAY

SEQ ID NO: 18272 - protein, 10 aa, Homo sapiens
  Table A; Target 18272; HLA-A*01:01; CT62; ENSG00000225362; TAA
LTDQPSAYSH

SEQ ID NO: 18273 - protein, 9 aa, Homo sapiens
  Table A; Target 18273; HLA-A*24:02; CT62; ENSG00000225362; TAA
LYLTCNPQL

SEQ ID NO: 18274 - protein, 9 aa, Homo sapiens
  Table A; Target 18274; HLA-C*04:01; CT62; ENSG00000225362; TAA
LYLTCNPQL

SEQ ID NO: 18275 - protein, 9 aa, Homo sapiens
  Table A; Target 18275; HLA-C*14:02; CT62; ENSG00000225362; TAA
LYLTCNPQL

SEQ ID NO: 18276 - protein, 8 aa, Homo sapiens
  Table A; Target 18276; HLA-A*31:01; CT62; ENSG00000225362; TAA
MMHTTSYR

SEQ ID NO: 18277 - protein, 8 aa, Homo sapiens
  Table A; Target 18277; HLA-A*33:01; CT62; ENSG00000225362; TAA
MMHTTSYR

SEQ ID NO: 18278 - protein, 8 aa, Homo sapiens
  Table A; Target 18278; HLA-A*33:03; CT62; ENSG00000225362; TAA
MMHTTSYR

SEQ ID NO: 18279 - protein, 8 aa, Homo sapiens
  Table A; Target 18279; HLA-C*04:01; CT62; ENSG00000225362; TAA
MMHTTSYR

SEQ ID NO: 18280 - protein, 8 aa, Homo sapiens
  Table A; Target 18280; HLA-C*07:01; CT62; ENSG00000225362; TAA
MMHTTSYR

SEQ ID NO: 18281 - protein, 8 aa, Homo sapiens
  Table A; Target 18281; HLA-B*35:01; CT62; ENSG00000225362; TAA
NADLQSEF

SEQ ID NO: 18282 - protein, 8 aa, Homo sapiens
  Table A; Target 18282; HLA-B*35:03; CT62; ENSG00000225362; TAA
NADLQSEF

SEQ ID NO: 18283 - protein, 8 aa, Homo sapiens
  Table A; Target 18283; HLA-B*55:01; CT62; ENSG00000225362; TAA
NADLQSEF

SEQ ID NO: 18284 - protein, 8 aa, Homo sapiens
  Table A; Target 18284; HLA-C*03:04; CT62; ENSG00000225362; TAA
NADLQSEF

SEQ ID NO: 18285 - protein, 8 aa, Homo sapiens
  Table A; Target 18285; HLA-C*04:01; CT62; ENSG00000225362; TAA
NADLQSEF

SEQ ID NO: 18286 - protein, 8 aa, Homo sapiens
  Table A; Target 18286; HLA-C*07:04; CT62; ENSG00000225362; TAA
NADLQSEF

SEQ ID NO: 18287 - protein, 9 aa, Homo sapiens
  Table A; Target 18287; HLA-A*01:01; CT62; ENSG00000225362; TAA
NADLQSEFL

SEQ ID NO: 18288 - protein, 9 aa, Homo sapiens
  Table A; Target 18288; HLA-A*02:07; CT62; ENSG00000225362; TAA
NADLQSEFL

SEQ ID NO: 18289 - protein, 9 aa, Homo sapiens
  Table A; Target 18289; HLA-B*35:01; CT62; ENSG00000225362; TAA
NADLQSEFL

SEQ ID NO: 18290 - protein, 9 aa, Homo sapiens
  Table A; Target 18290; HLA-B*35:03; CT62; ENSG00000225362; TAA
NADLQSEFL

SEQ ID NO: 18291 - protein, 9 aa, Homo sapiens
  Table A; Target 18291; HLA-B*38:01; CT62; ENSG00000225362; TAA
NADLQSEFL

SEQ ID NO: 18292 - protein, 9 aa, Homo sapiens
  Table A; Target 18292; HLA-B*39:01; CT62; ENSG00000225362; TAA
NADLQSEFL

SEQ ID NO: 18293 - protein, 9 aa, Homo sapiens
  Table A; Target 18293; HLA-B*55:01; CT62; ENSG00000225362; TAA
NADLQSEFL

SEQ ID NO: 18294 - protein, 9 aa, Homo sapiens
  Table A; Target 18294; HLA-C*04:01; CT62; ENSG00000225362; TAA
NADLQSEFL

SEQ ID NO: 18295 - protein, 9 aa, Homo sapiens
  Table A; Target 18295; HLA-C*07:04; CT62; ENSG00000225362; TAA
NADLQSEFL

SEQ ID NO: 18296 - protein, 8 aa, Homo sapiens
  Table A; Target 18296; HLA-B*08:01; CT62; ENSG00000225362; TAA
NVKDSHEV

SEQ ID NO: 18297 - protein, 8 aa, Homo sapiens
  Table A; Target 18297; HLA-B*46:01; CT62; ENSG00000225362; TAA
NVKDSHEV

SEQ ID NO: 18298 - protein, 8 aa, Homo sapiens
  Table A; Target 18298; HLA-C*01:02; CT62; ENSG00000225362; TAA
NVKDSHEV

SEQ ID NO: 18299 - protein, 8 aa, Homo sapiens
  Table A; Target 18299; HLA-C*06:02; CT62; ENSG00000225362; TAA
NVKDSHEV

SEQ ID NO: 18300 - protein, 8 aa, Homo sapiens
  Table A; Target 18300; HLA-C*12:03; CT62; ENSG00000225362; TAA
NVKDSHEV

SEQ ID NO: 18301 - protein, 8 aa, Homo sapiens
  Table A; Target 18301; HLA-C*16:02; CT62; ENSG00000225362; TAA
NVKDSHEV

SEQ ID NO: 18302 - protein, 9 aa, Homo sapiens
  Table A; Target 18302; HLA-C*04:01; CT62; ENSG00000225362; TAA
PPHLTDQPS

SEQ ID NO: 18303 - protein, 10 aa, Homo sapiens
  Table A; Target 18303; HLA-B*56:01; CT62; ENSG00000225362; TAA
PPHLTDQPSA

SEQ ID NO: 18304 - protein, 9 aa, Homo sapiens
  Table A; Target 18304; HLA-A*23:01; CT62; ENSG00000225362; TAA
QATLQVISF

SEQ ID NO: 18305 - protein, 9 aa, Homo sapiens
  Table A; Target 18305; HLA-A*24:02; CT62; ENSG00000225362; TAA
QATLQVISF

SEQ ID NO: 18306 - protein, 9 aa, Homo sapiens
  Table A; Target 18306; HLA-A*25:01; CT62; ENSG00000225362; TAA
QATLQVISF

SEQ ID NO: 18307 - protein, 9 aa, Homo sapiens
  Table A; Target 18307; HLA-A*32:01; CT62; ENSG00000225362; TAA
QATLQVISF

SEQ ID NO: 18308 - protein, 9 aa, Homo sapiens
  Table A; Target 18308; HLA-B*08:01; CT62; ENSG00000225362; TAA
QATLQVISF

SEQ ID NO: 18309 - protein, 9 aa, Homo sapiens
  Table A; Target 18309; HLA-B*15:01; CT62; ENSG00000225362; TAA
QATLQVISF

SEQ ID NO: 18310 - protein, 9 aa, Homo sapiens
  Table A; Target 18310; HLA-B*15:03; CT62; ENSG00000225362; TAA
QATLQVISF

SEQ ID NO: 18311 - protein, 9 aa, Homo sapiens
  Table A; Target 18311; HLA-B*18:01; CT62; ENSG00000225362; TAA
QATLQVISF

SEQ ID NO: 18312 - protein, 9 aa, Homo sapiens
  Table A; Target 18312; HLA-B*35:01; CT62; ENSG00000225362; TAA
QATLQVISF

SEQ ID NO: 18313 - protein, 9 aa, Homo sapiens
  Table A; Target 18313; HLA-B*35:03; CT62; ENSG00000225362; TAA
QATLQVISF

SEQ ID NO: 18314 - protein, 9 aa, Homo sapiens
  Table A; Target 18314; HLA-B*37:01; CT62; ENSG00000225362; TAA
QATLQVISF

SEQ ID NO: 18315 - protein, 9 aa, Homo sapiens
  Table A; Target 18315; HLA-B*38:01; CT62; ENSG00000225362; TAA
QATLQVISF

SEQ ID NO: 18316 - protein, 9 aa, Homo sapiens
  Table A; Target 18316; HLA-B*39:01; CT62; ENSG00000225362; TAA
QATLQVISF

SEQ ID NO: 18317 - protein, 9 aa, Homo sapiens
  Table A; Target 18317; HLA-B*44:03; CT62; ENSG00000225362; TAA
QATLQVISF

SEQ ID NO: 18318 - protein, 9 aa, Homo sapiens
  Table A; Target 18318; HLA-B*46:01; CT62; ENSG00000225362; TAA
QATLQVISF

SEQ ID NO: 18319 - protein, 9 aa, Homo sapiens
  Table A; Target 18319; HLA-B*51:01; CT62; ENSG00000225362; TAA
QATLQVISF

SEQ ID NO: 18320 - protein, 9 aa, Homo sapiens
  Table A; Target 18320; HLA-B*54:01; CT62; ENSG00000225362; TAA
QATLQVISF

SEQ ID NO: 18321 - protein, 9 aa, Homo sapiens
  Table A; Target 18321; HLA-B*55:01; CT62; ENSG00000225362; TAA
QATLQVISF

SEQ ID NO: 18322 - protein, 9 aa, Homo sapiens
  Table A; Target 18322; HLA-B*57:01; CT62; ENSG00000225362; TAA
QATLQVISF

SEQ ID NO: 18323 - protein, 9 aa, Homo sapiens
  Table A; Target 18323; HLA-B*58:01; CT62; ENSG00000225362; TAA
QATLQVISF

SEQ ID NO: 18324 - protein, 9 aa, Homo sapiens
  Table A; Target 18324; HLA-C*02:02; CT62; ENSG00000225362; TAA
QATLQVISF

SEQ ID NO: 18325 - protein, 9 aa, Homo sapiens
  Table A; Target 18325; HLA-C*03:03; CT62; ENSG00000225362; TAA
QATLQVISF

SEQ ID NO: 18326 - protein, 9 aa, Homo sapiens
  Table A; Target 18326; HLA-C*03:04; CT62; ENSG00000225362; TAA
QATLQVISF

SEQ ID NO: 18327 - protein, 9 aa, Homo sapiens
  Table A; Target 18327; HLA-C*07:04; CT62; ENSG00000225362; TAA
QATLQVISF

SEQ ID NO: 18328 - protein, 9 aa, Homo sapiens
  Table A; Target 18328; HLA-C*07:06; CT62; ENSG00000225362; TAA
QATLQVISF

SEQ ID NO: 18329 - protein, 9 aa, Homo sapiens
  Table A; Target 18329; HLA-C*12:03; CT62; ENSG00000225362; TAA
QATLQVISF

SEQ ID NO: 18330 - protein, 9 aa, Homo sapiens
  Table A; Target 18330; HLA-C*16:01; CT62; ENSG00000225362; TAA
QATLQVISF

SEQ ID NO: 18331 - protein, 9 aa, Homo sapiens
  Table A; Target 18331; HLA-C*16:02; CT62; ENSG00000225362; TAA
QATLQVISF

SEQ ID NO: 18332 - protein, 9 aa, Homo sapiens
  Table A; Target 18332; HLA-C*16:04; CT62; ENSG00000225362; TAA
QATLQVISF

SEQ ID NO: 18333 - protein, 9 aa, Homo sapiens
  Table A; Target 18333; HLA-B*07:02; CT62; ENSG00000225362; TAA
QPAAQRLHV

SEQ ID NO: 18334 - protein, 9 aa, Homo sapiens
  Table A; Target 18334; HLA-B*51:01; CT62; ENSG00000225362; TAA
QPAAQRLHV

SEQ ID NO: 18335 - protein, 9 aa, Homo sapiens
  Table A; Target 18335; HLA-B*56:01; CT62; ENSG00000225362; TAA
QPAAQRLHV

SEQ ID NO: 18336 - protein, 9 aa, Homo sapiens
  Table A; Target 18336; HLA-C*07:02; CT62; ENSG00000225362; TAA
QPAAQRLHV

SEQ ID NO: 18337 - protein, 11 aa, Homo sapiens
  Table A; Target 18337; HLA-B*07:02; CT62; ENSG00000225362; TAA
QPAAQRLHVEL

SEQ ID NO: 18338 - protein, 11 aa, Homo sapiens
  Table A; Target 18338; HLA-C*07:02; CT62; ENSG00000225362; TAA
QPAAQRLHVEL

SEQ ID NO: 18339 - protein, 9 aa, Homo sapiens
  Table A; Target 18339; HLA-B*35:01; CT62; ENSG00000225362; TAA
QPSAYSHTH

SEQ ID NO: 18340 - protein, 9 aa, Homo sapiens
  Table A; Target 18340; HLA-B*55:01; CT62; ENSG00000225362; TAA
QPSAYSHTH

SEQ ID NO: 18341 - protein, 9 aa, Homo sapiens
  Table A; Target 18341; HLA-A*03:01; CT62; ENSG00000225362; TAA
QVISFSFPF

SEQ ID NO: 18342 - protein, 9 aa, Homo sapiens
  Table A; Target 18342; HLA-A*26:01; CT62; ENSG00000225362; TAA
QVISFSFPF

SEQ ID NO: 18343 - protein, 9 aa, Homo sapiens
  Table A; Target 18343; HLA-A*29:02; CT62; ENSG00000225362; TAA
QVISFSFPF

SEQ ID NO: 18344 - protein, 9 aa, Homo sapiens
  Table A; Target 18344; HLA-A*31:01; CT62; ENSG00000225362; TAA
QVISFSFPF

SEQ ID NO: 18345 - protein, 9 aa, Homo sapiens
  Table A; Target 18345; HLA-B*57:01; CT62; ENSG00000225362; TAA
QVISFSFPF

SEQ ID NO: 18346 - protein, 10 aa, Homo sapiens
  Table A; Target 18346; HLA-A*68:02; CT62; ENSG00000225362; TAA
QVISFSFPFL

SEQ ID NO: 18347 - protein, 9 aa, Homo sapiens
  Table A; Target 18347; HLA-A*02:04; CT62; ENSG00000225362; TAA
RLHVELWNA

SEQ ID NO: 18348 - protein, 8 aa, Homo sapiens
  Table A; Target 18348; HLA-A*33:01; CT62; ENSG00000225362; TAA
SAYSHTHR

SEQ ID NO: 18349 - protein, 10 aa, Homo sapiens
  Table A; Target 18349; HLA-B*57:01; CT62; ENSG00000225362; TAA
SAYSHTHRTF

SEQ ID NO: 18350 - protein, 10 aa, Homo sapiens
  Table A; Target 18350; HLA-C*02:02; CT62; ENSG00000225362; TAA
SAYSHTHRTF

SEQ ID NO: 18351 - protein, 10 aa, Homo sapiens
  Table A; Target 18351; HLA-A*33:01; CT62; ENSG00000225362; TAA
SCGSQPAAQR

SEQ ID NO: 18352 - protein, 10 aa, Homo sapiens
  Table A; Target 18352; HLA-A*33:03; CT62; ENSG00000225362; TAA
SCGSQPAAQR

SEQ ID NO: 18353 - protein, 10 aa, Homo sapiens
  Table A; Target 18353; HLA-A*68:01; CT62; ENSG00000225362; TAA
SCGSQPAAQR

SEQ ID NO: 18354 - protein, 10 aa, Homo sapiens
  Table A; Target 18354; HLA-C*07:06; CT62; ENSG00000225362; TAA
SCGSQPAAQR

SEQ ID NO: 18355 - protein, 8 aa, Homo sapiens
  Table A; Target 18355; HLA-B*44:03; CT62; ENSG00000225362; TAA
SEDMSKMV

SEQ ID NO: 18356 - protein, 8 aa, Homo sapiens
  Table A; Target 18356; HLA-B*49:01; CT62; ENSG00000225362; TAA
SEDMSKMV

SEQ ID NO: 18357 - protein, 8 aa, Homo sapiens
  Table A; Target 18357; HLA-C*04:01; CT62; ENSG00000225362; TAA
SEDMSKMV

SEQ ID NO: 18358 - protein, 10 aa, Homo sapiens
  Table A; Target 18358; HLA-B*27:02; CT62; ENSG00000225362; TAA
SEDMSKMVSR

SEQ ID NO: 18359 - protein, 10 aa, Homo sapiens
  Table A; Target 18359; HLA-B*40:01; CT62; ENSG00000225362; TAA
SEDMSKMVSR

SEQ ID NO: 18360 - protein, 10 aa, Homo sapiens
  Table A; Target 18360; HLA-B*40:02; CT62; ENSG00000225362; TAA
SEDMSKMVSR

SEQ ID NO: 18361 - protein, 8 aa, Homo sapiens
  Table A; Target 18361; HLA-A*30:01; CT62; ENSG00000225362; TAA
SEFLCPCL

SEQ ID NO: 18362 - protein, 8 aa, Homo sapiens
  Table A; Target 18362; HLA-B*18:01; CT62; ENSG00000225362; TAA
SEFLCPCL

SEQ ID NO: 18363 - protein, 8 aa, Homo sapiens
  Table A; Target 18363; HLA-B*40:02; CT62; ENSG00000225362; TAA
SEFLCPCL

SEQ ID NO: 18364 - protein, 9 aa, Homo sapiens
  Table A; Target 18364; HLA-A*29:02; CT62; ENSG00000225362; TAA
SFSFPFLLH

SEQ ID NO: 18365 - protein, 8 aa, Homo sapiens
  Table A; Target 18365; HLA-B*38:01; CT62; ENSG00000225362; TAA
SHEVSGSL

SEQ ID NO: 18366 - protein, 8 aa, Homo sapiens
  Table A; Target 18366; HLA-B*39:01; CT62; ENSG00000225362; TAA
SHEVSGSL

SEQ ID NO: 18367 - protein, 9 aa, Homo sapiens
  Table A; Target 18367; HLA-B*38:01; CT62; ENSG00000225362; TAA
SHEVSGSLQ

SEQ ID NO: 18368 - protein, 10 aa, Homo sapiens
  Table A; Target 18368; HLA-B*38:01; CT62; ENSG00000225362; TAA
SHEVSGSLQA

SEQ ID NO: 18369 - protein, 10 aa, Homo sapiens
  Table A; Target 18369; HLA-B*39:01; CT62; ENSG00000225362; TAA
SHEVSGSLQA

SEQ ID NO: 18370 - protein, 10 aa, Homo sapiens
  Table A; Target 18370; HLA-B*27:05; CT62; ENSG00000225362; TAA
SHSSEDMSKM

SEQ ID NO: 18371 - protein, 10 aa, Homo sapiens
  Table A; Target 18371; HLA-B*38:01; CT62; ENSG00000225362; TAA
SHSSEDMSKM

SEQ ID NO: 18372 - protein, 10 aa, Homo sapiens
  Table A; Target 18372; HLA-B*39:01; CT62; ENSG00000225362; TAA
SHSSEDMSKM

SEQ ID NO: 18373 - protein, 9 aa, Homo sapiens
  Table A; Target 18373; HLA-A*02:01; CT62; ENSG00000225362; TAA
SLQATLQVI

SEQ ID NO: 18374 - protein, 9 aa, Homo sapiens
  Table A; Target 18374; HLA-A*02:03; CT62; ENSG00000225362; TAA
SLQATLQVI

SEQ ID NO: 18375 - protein, 9 aa, Homo sapiens
  Table A; Target 18375; HLA-A*02:04; CT62; ENSG00000225362; TAA
SLQATLQVI

SEQ ID NO: 18376 - protein, 9 aa, Homo sapiens
  Table A; Target 18376; HLA-A*02:07; CT62; ENSG00000225362; TAA
SLQATLQVI

SEQ ID NO: 18377 - protein, 9 aa, Homo sapiens
  Table A; Target 18377; HLA-A*30:01; CT62; ENSG00000225362; TAA
SLQATLQVI

SEQ ID NO: 18378 - protein, 9 aa, Homo sapiens
  Table A; Target 18378; HLA-A*32:01; CT62; ENSG00000225362; TAA
SLQATLQVI

SEQ ID NO: 18379 - protein, 9 aa, Homo sapiens
  Table A; Target 18379; HLA-B*13:02; CT62; ENSG00000225362; TAA
SLQATLQVI

SEQ ID NO: 18380 - protein, 9 aa, Homo sapiens
  Table A; Target 18380; HLA-B*15:01; CT62; ENSG00000225362; TAA
SLQATLQVI

SEQ ID NO: 18381 - protein, 9 aa, Homo sapiens
  Table A; Target 18381; HLA-B*55:01; CT62; ENSG00000225362; TAA
SLQATLQVI

SEQ ID NO: 18382 - protein, 9 aa, Homo sapiens
  Table A; Target 18382; HLA-C*06:02; CT62; ENSG00000225362; TAA
SLQATLQVI

SEQ ID NO: 18383 - protein, 11 aa, Homo sapiens
  Table A; Target 18383; HLA-B*54:01; CT62; ENSG00000225362; TAA
SPPHLTDQPSA

SEQ ID NO: 18384 - protein, 11 aa, Homo sapiens
  Table A; Target 18384; HLA-B*55:01; CT62; ENSG00000225362; TAA
SPPHLTDQPSA

SEQ ID NO: 18385 - protein, 11 aa, Homo sapiens
  Table A; Target 18385; HLA-B*56:01; CT62; ENSG00000225362; TAA
SPPHLTDQPSA

SEQ ID NO: 18386 - protein, 10 aa, Homo sapiens
  Table A; Target 18386; HLA-B*13:02; CT62; ENSG00000225362; TAA
SQPAAQRLHV

SEQ ID NO: 18387 - protein, 8 aa, Homo sapiens
  Table A; Target 18387; HLA-C*05:01; CT62; ENSG00000225362; TAA
SSEDMSKM

SEQ ID NO: 18388 - protein, 9 aa, Homo sapiens
  Table A; Target 18388; HLA-C*05:01; CT62; ENSG00000225362; TAA
SSEDMSKMV

SEQ ID NO: 18389 - protein, 9 aa, Homo sapiens
  Table A; Target 18389; HLA-C*06:02; CT62; ENSG00000225362; TAA
SSEDMSKMV

SEQ ID NO: 18390 - protein, 9 aa, Homo sapiens
  Table A; Target 18390; HLA-C*16:02; CT62; ENSG00000225362; TAA
SSEDMSKMV

SEQ ID NO: 18391 - protein, 11 aa, Homo sapiens
  Table A; Target 18391; HLA-A*03:02; CT62; ENSG00000225362; TAA
SSEDMSKMVSR

SEQ ID NO: 18392 - protein, 11 aa, Homo sapiens
  Table A; Target 18392; HLA-A*11:01; CT62; ENSG00000225362; TAA
SSEDMSKMVSR

SEQ ID NO: 18393 - protein, 11 aa, Homo sapiens
  Table A; Target 18393; HLA-A*31:01; CT62; ENSG00000225362; TAA
SSEDMSKMVSR

SEQ ID NO: 18394 - protein, 11 aa, Homo sapiens
  Table A; Target 18394; HLA-A*33:01; CT62; ENSG00000225362; TAA
SSEDMSKMVSR

SEQ ID NO: 18395 - protein, 11 aa, Homo sapiens
  Table A; Target 18395; HLA-A*33:03; CT62; ENSG00000225362; TAA
SSEDMSKMVSR

SEQ ID NO: 18396 - protein, 11 aa, Homo sapiens
  Table A; Target 18396; HLA-A*68:01; CT62; ENSG00000225362; TAA
SSEDMSKMVSR

SEQ ID NO: 18397 - protein, 11 aa, Homo sapiens
  Table A; Target 18397; HLA-C*07:06; CT62; ENSG00000225362; TAA
SSEDMSKMVSR

SEQ ID NO: 18398 - protein, 9 aa, Homo sapiens
  Table A; Target 18398; HLA-A*31:01; CT62; ENSG00000225362; TAA
TCNPQLGKR

SEQ ID NO: 18399 - protein, 9 aa, Homo sapiens
  Table A; Target 18399; HLA-A*33:01; CT62; ENSG00000225362; TAA
TCNPQLGKR

SEQ ID NO: 18400 - protein, 9 aa, Homo sapiens
  Table A; Target 18400; HLA-A*33:03; CT62; ENSG00000225362; TAA
TCNPQLGKR

SEQ ID NO: 18401 - protein, 9 aa, Homo sapiens
  Table A; Target 18401; HLA-A*03:02; CT62; ENSG00000225362; TAA
TDQPSAYSH

SEQ ID NO: 18402 - protein, 10 aa, Homo sapiens
  Table A; Target 18402; HLA-C*04:01; CT62; ENSG00000225362; TAA
TDQPSAYSHT

SEQ ID NO: 18403 - protein, 9 aa, Homo sapiens
  Table A; Target 18403; HLA-A*23:01; CT62; ENSG00000225362; TAA
TLQVISFSF

SEQ ID NO: 18404 - protein, 10 aa, Homo sapiens
  Table A; Target 18404; HLA-A*02:01; CT62; ENSG00000225362; TAA
TLYLTCNPQL

SEQ ID NO: 18405 - protein, 10 aa, Homo sapiens
  Table A; Target 18405; HLA-C*06:02; CT62; ENSG00000225362; TAA
TLYLTCNPQL

SEQ ID NO: 18406 - protein, 9 aa, Homo sapiens
  Table A; Target 18406; HLA-B*58:01; CT62; ENSG00000225362; TAA
VSGSLQATL

SEQ ID NO: 18407 - protein, 9 aa, Homo sapiens
  Table A; Target 18407; HLA-C*01:02; CT62; ENSG00000225362; TAA
VSGSLQATL

SEQ ID NO: 18408 - protein, 9 aa, Homo sapiens
  Table A; Target 18408; HLA-A*26:01; CT62; ENSG00000225362; TAA
WNADLQSEF

SEQ ID NO: 18409 - protein, 8 aa, Homo sapiens
  Table A; Target 18409; HLA-A*02:01; CT62; ENSG00000225362; TAA
YLTCNPQL

SEQ ID NO: 18410 - protein, 8 aa, Homo sapiens
  Table A; Target 18410; HLA-B*13:02; CT62; ENSG00000225362; TAA
YLTCNPQL

SEQ ID NO: 18411 - protein, 8 aa, Homo sapiens
  Table A; Target 18411; HLA-C*16:02; CT62; ENSG00000225362; TAA
YLTCNPQL

SEQ ID NO: 18412 - protein, 9 aa, Homo sapiens
  Table A; Target 18412; HLA-C*06:02; CT62; ENSG00000225362; TAA
YRRLSPPHL

SEQ ID NO: 18413 - protein, 8 aa, Homo sapiens
  Table A; Target 18413; HLA-B*08:01; CT62; ENSG00000225362; TAA
YSHTHRTF

SEQ ID NO: 18414 - protein, 8 aa, Homo sapiens
  Table A; Target 18414; HLA-B*57:01; CT62; ENSG00000225362; TAA
YSHTHRTF

SEQ ID NO: 18415 - protein, 8 aa, Homo sapiens
  Table A; Target 18415; HLA-C*16:01; CT62; ENSG00000225362; TAA
YSHTHRTF

SEQ ID NO: 18416 - protein, 10 aa, Homo sapiens
  Table A; Target 18416; HLA-C*07:02; CT83; ENSG00000204019; CTA
AVYDLSRDIL

SEQ ID NO: 18417 - protein, 9 aa, Homo sapiens
  Table A; Target 18417; HLA-B*44:03; CT83; ENSG00000204019; CTA
EHTLLSKGF

SEQ ID NO: 18418 - protein, 9 aa, Homo sapiens
  Table A; Target 18418; HLA-A*68:01; CT83; ENSG00000204019; CTA
ELEHTLLSK

SEQ ID NO: 18419 - protein, 9 aa, Homo sapiens
  Table A; Target 18419; HLA-B*15:01; CT83; ENSG00000204019; CTA
EMSSNSTAL

SEQ ID NO: 18420 - protein, 8 aa, Homo sapiens
  Table A; Target 18420; HLA-B*08:01; CT83; ENSG00000204019; CTA
FQRNTGEM

SEQ ID NO: 18421 - protein, 8 aa, Homo sapiens
  Table A; Target 18421; HLA-C*01:02; CT83; ENSG00000204019; CTA
FQRNTGEM

SEQ ID NO: 18422 - protein, 8 aa, Homo sapiens
  Table A; Target 18422; HLA-C*07:02; CT83; ENSG00000204019; CTA
FQRNTGEM

SEQ ID NO: 18423 - protein, 10 aa, Homo sapiens
  Table A; Target 18423; HLA-B*37:01; CT83; ENSG00000204019; CTA
GEMSSNSTAL

SEQ ID NO: 18424 - protein, 11 aa, Homo sapiens
  Table A; Target 18424; HLA-A*02:03; CT83; ENSG00000204019; CTA
GLINSNTDNNL

SEQ ID NO: 18425 - protein, 8 aa, Homo sapiens
  Table A; Target 18425; HLA-C*07:01; CT83; ENSG00000204019; CTA
HTLLSKGF

SEQ ID NO: 18426 - protein, 8 aa, Homo sapiens
  Table A; Target 18426; HLA-B*08:01; CT83; ENSG00000204019; CTA
IARQKRIL

SEQ ID NO: 18427 - protein, 9 aa, Homo sapiens
  Table A; Target 18427; HLA-B*58:01; CT83; ENSG00000204019; CTA
ILNNFPHSI

SEQ ID NO: 18428 - protein, 9 aa, Homo sapiens
  Table A; Target 18428; HLA-B*38:01; CT83; ENSG00000204019; CTA
INSNTDNNL

SEQ ID NO: 18429 - protein, 9 aa, Homo sapiens
  Table A; Target 18429; HLA-C*06:02; CT83; ENSG00000204019; CTA
KGFRGASPH

SEQ ID NO: 18430 - protein, 10 aa, Homo sapiens
  Table A; Target 18430; HLA-A*31:01; CT83; ENSG00000204019; CTA
KGFRGASPHR

SEQ ID NO: 18431 - protein, 9 aa, Homo sapiens
  Table A; Target 18431; HLA-C*16:01; CT83; ENSG00000204019; CTA
KLVELEHTL

SEQ ID NO: 18432 - protein, 9 aa, Homo sapiens
  Table A; Target 18432; HLA-C*06:02; CT83; ENSG00000204019; CTA
LASSILCAL

SEQ ID NO: 18433 - protein, 10 aa, Homo sapiens
  Table A; Target 18433; HLA-B*39:01; CT83; ENSG00000204019; CTA
LINSNTDNNL

SEQ ID NO: 18434 - protein, 9 aa, Homo sapiens
  Table A; Target 18434; HLA-A*31:01; CT83; ENSG00000204019; CTA
LSRDILNNF

SEQ ID NO: 18435 - protein, 9 aa, Homo sapiens
  Table A; Target 18435; HLA-C*04:01; CT83; ENSG00000204019; CTA
LVELEHTLL

SEQ ID NO: 18436 - protein, 9 aa, Homo sapiens
  Table A; Target 18436; HLA-C*07:04; CT83; ENSG00000204019; CTA
LVELEHTLL

SEQ ID NO: 18437 - protein, 10 aa, Homo sapiens
  Table A; Target 18437; HLA-A*03:01; CT83; ENSG00000204019; CTA
LVNLSMVENK

SEQ ID NO: 18438 - protein, 9 aa, Homo sapiens
  Table A; Target 18438; HLA-A*25:01; CT83; ENSG00000204019; CTA
LVRPSSSGL

SEQ ID NO: 18439 - protein, 9 aa, Homo sapiens
  Table A; Target 18439; HLA-B*40:01; CT83; ENSG00000204019; CTA
MVENKLVEL

SEQ ID NO: 18440 - protein, 9 aa, Homo sapiens
  Table A; Target 18440; HLA-C*03:03; CT83; ENSG00000204019; CTA
MVENKLVEL

SEQ ID NO: 18441 - protein, 9 aa, Homo sapiens
  Table A; Target 18441; HLA-B*38:01; CT83; ENSG00000204019; CTA
NLSMVENKL

SEQ ID NO: 18442 - protein, 8 aa, Homo sapiens
  Table A; Target 18442; HLA-C*12:03; CT83; ENSG00000204019; CTA
NNFPHSIA

SEQ ID NO: 18443 - protein, 9 aa, Homo sapiens
  Table A; Target 18443; HLA-A*29:02; CT83; ENSG00000204019; CTA
NNFPHSIAR

SEQ ID NO: 18444 - protein, 8 aa, Homo sapiens
  Table A; Target 18444; HLA-B*51:01; CT83; ENSG00000204019; CTA
NSTALALV

SEQ ID NO: 18445 - protein, 9 aa, Homo sapiens
  Table A; Target 18445; HLA-A*11:01; CT83; ENSG00000204019; CTA
NTDNNLAVY

SEQ ID NO: 18446 - protein, 11 aa, Homo sapiens
  Table A; Target 18446; HLA-B*38:01; CT83; ENSG00000204019; CTA
NTDNNLAVYDL

SEQ ID NO: 18447 - protein, 11 aa, Homo sapiens
  Table A; Target 18447; HLA-B*07:02; CT83; ENSG00000204019; CTA
RPSSSGLINSN

SEQ ID NO: 18448 - protein, 9 aa, Homo sapiens
  Table A; Target 18448; HLA-A*03:02; CT83; ENSG00000204019; CTA
SSNSTALAL

SEQ ID NO: 18449 - protein, 11 aa, Homo sapiens
  Table A; Target 18449; HLA-B*27:02; CT83; ENSG00000204019; CTA
SSNSTALALVR

SEQ ID NO: 18450 - protein, 8 aa, Homo sapiens
  Table A; Target 18450; HLA-A*11:01; CT83; ENSG00000204019; CTA
STALALVR

SEQ ID NO: 18451 - protein, 8 aa, Homo sapiens
  Table A; Target 18451; HLA-C*07:06; CT83; ENSG00000204019; CTA
STALALVR

SEQ ID NO: 18452 - protein, 10 aa, Homo sapiens
  Table A; Target 18452; HLA-B*07:02; CT83; ENSG00000204019; CTA
STALALVRPS

SEQ ID NO: 18453 - protein, 9 aa, Homo sapiens
  Table A; Target 18453; HLA-A*33:03; CT83; ENSG00000204019; CTA
TALALVRPS

SEQ ID NO: 18454 - protein, 9 aa, Homo sapiens
  Table A; Target 18454; HLA-B*27:05; CT83; ENSG00000204019; CTA
TALALVRPS

SEQ ID NO: 18455 - protein, 9 aa, Homo sapiens
  Table A; Target 18455; HLA-B*54:01; CT83; ENSG00000204019; CTA
TALALVRPS

SEQ ID NO: 18456 - protein, 8 aa, Homo sapiens
  Table A; Target 18456; HLA-B*44:02; CT83; ENSG00000204019; CTA
VELEHTLL

SEQ ID NO: 18457 - protein, 9 aa, Homo sapiens
  Table A; Target 18457; HLA-C*07:02; CT83; ENSG00000204019; CTA
VRPSSSGLI

SEQ ID NO: 18458 - protein, 9 aa, Homo sapiens
  Table A; Target 18458; HLA-A*02:07; CTAG2; ENSG00000126890; TAA
AAPLPRPGA

SEQ ID NO: 18459 - protein, 9 aa, Homo sapiens
  Table A; Target 18459; HLA-B*54:01; CTAG2; ENSG00000126890; TAA
AAPLPRPGA

SEQ ID NO: 18460 - protein, 9 aa, Homo sapiens
  Table A; Target 18460; HLA-B*56:01; CTAG2; ENSG00000126890; TAA
AAPLPRPGA

SEQ ID NO: 18461 - protein, 9 aa, Homo sapiens
  Table A; Target 18461; HLA-C*16:01; CTAG2; ENSG00000126890; TAA
AAPLPRPGA

SEQ ID NO: 18462 - protein, 11 aa, Homo sapiens
  Table A; Target 18462; HLA-B*07:02; CTAG2; ENSG00000126890; TAA
AAPLPRPGAVL

SEQ ID NO: 18463 - protein, 11 aa, Homo sapiens
  Table A; Target 18463; HLA-C*01:02; CTAG2; ENSG00000126890; TAA
AAPLPRPGAVL

SEQ ID NO: 18464 - protein, 11 aa, Homo sapiens
  Table A; Target 18464; HLA-C*03:04; CTAG2; ENSG00000126890; TAA
AAPLPRPGAVL

SEQ ID NO: 18465 - protein, 11 aa, Homo sapiens
  Table A; Target 18465; HLA-C*07:02; CTAG2; ENSG00000126890; TAA
AAPLPRPGAVL

SEQ ID NO: 18466 - protein, 11 aa, Homo sapiens
  Table A; Target 18466; HLA-C*16:01; CTAG2; ENSG00000126890; TAA
AAPLPRPGAVL

SEQ ID NO: 18467 - protein, 9 aa, Homo sapiens
  Table A; Target 18467; HLA-A*30:01; CTAG2; ENSG00000126890; TAA
ADGPGGPGI

SEQ ID NO: 18468 - protein, 9 aa, Homo sapiens
  Table A; Target 18468; HLA-B*13:02; CTAG2; ENSG00000126890; TAA
ADGPGGPGI

SEQ ID NO: 18469 - protein, 9 aa, Homo sapiens
  Table A; Target 18469; HLA-B*37:01; CTAG2; ENSG00000126890; TAA
ADGPGGPGI

SEQ ID NO: 18470 - protein, 9 aa, Homo sapiens
  Table A; Target 18470; HLA-B*38:01; CTAG2; ENSG00000126890; TAA
ADGPGGPGI

SEQ ID NO: 18471 - protein, 9 aa, Homo sapiens
  Table A; Target 18471; HLA-B*44:02; CTAG2; ENSG00000126890; TAA
ADGPGGPGI

SEQ ID NO: 18472 - protein, 9 aa, Homo sapiens
  Table A; Target 18472; HLA-B*44:03; CTAG2; ENSG00000126890; TAA
ADGPGGPGI

SEQ ID NO: 18473 - protein, 9 aa, Homo sapiens
  Table A; Target 18473; HLA-B*49:01; CTAG2; ENSG00000126890; TAA
ADGPGGPGI

SEQ ID NO: 18474 - protein, 10 aa, Homo sapiens
  Table A; Target 18474; HLA-B*40:01; CTAG2; ENSG00000126890; TAA
AEGQGTGGST

SEQ ID NO: 18475 - protein, 10 aa, Homo sapiens
  Table A; Target 18475; HLA-B*44:03; CTAG2; ENSG00000126890; TAA
AEGQGTGGST

SEQ ID NO: 18476 - protein, 10 aa, Homo sapiens
  Table A; Target 18476; HLA-C*16:02; CTAG2; ENSG00000126890; TAA
AEGQGTGGST

SEQ ID NO: 18477 - protein, 11 aa, Homo sapiens
  Table A; Target 18477; HLA-B*49:01; CTAG2; ENSG00000126890; TAA
AEGQGTGGSTG

SEQ ID NO: 18478 - protein, 9 aa, Homo sapiens
  Table A; Target 18478; HLA-A*32:01; CTAG2; ENSG00000126890; TAA
AGAARASGP

SEQ ID NO: 18479 - protein, 9 aa, Homo sapiens
  Table A; Target 18479; HLA-C*07:04; CTAG2; ENSG00000126890; TAA
AGAARASGP

SEQ ID NO: 18480 - protein, 9 aa, Homo sapiens
  Table A; Target 18480; HLA-C*16:01; CTAG2; ENSG00000126890; TAA
AGAARASGP

SEQ ID NO: 18481 - protein, 9 aa, Homo sapiens
  Table A; Target 18481; HLA-C*16:02; CTAG2; ENSG00000126890; TAA
AGAARASGP

SEQ ID NO: 18482 - protein, 9 aa, Homo sapiens
  Table A; Target 18482; HLA-C*16:01; CTAG2; ENSG00000126890; TAA
AGATGGRGP

SEQ ID NO: 18483 - protein, 8 aa, Homo sapiens
  Table A; Target 18483; HLA-B*54:01; CTAG2; ENSG00000126890; TAA
APLPRPGA

SEQ ID NO: 18484 - protein, 8 aa, Homo sapiens
  Table A; Target 18484; HLA-B*55:01; CTAG2; ENSG00000126890; TAA
APLPRPGA

SEQ ID NO: 18485 - protein, 8 aa, Homo sapiens
  Table A; Target 18485; HLA-B*56:01; CTAG2; ENSG00000126890; TAA
APLPRPGA

SEQ ID NO: 18486 - protein, 9 aa, Homo sapiens
  Table A; Target 18486; HLA-B*07:02; CTAG2; ENSG00000126890; TAA
APLPRPGAV

SEQ ID NO: 18487 - protein, 9 aa, Homo sapiens
  Table A; Target 18487; HLA-B*08:01; CTAG2; ENSG00000126890; TAA
APLPRPGAV

SEQ ID NO: 18488 - protein, 9 aa, Homo sapiens
  Table A; Target 18488; HLA-B*37:01; CTAG2; ENSG00000126890; TAA
APLPRPGAV

SEQ ID NO: 18489 - protein, 9 aa, Homo sapiens
  Table A; Target 18489; HLA-B*51:01; CTAG2; ENSG00000126890; TAA
APLPRPGAV

SEQ ID NO: 18490 - protein, 9 aa, Homo sapiens
  Table A; Target 18490; HLA-B*54:01; CTAG2; ENSG00000126890; TAA
APLPRPGAV

SEQ ID NO: 18491 - protein, 9 aa, Homo sapiens
  Table A; Target 18491; HLA-B*55:01; CTAG2; ENSG00000126890; TAA
APLPRPGAV

SEQ ID NO: 18492 - protein, 9 aa, Homo sapiens
  Table A; Target 18492; HLA-B*56:01; CTAG2; ENSG00000126890; TAA
APLPRPGAV

SEQ ID NO: 18493 - protein, 9 aa, Homo sapiens
  Table A; Target 18493; HLA-C*07:02; CTAG2; ENSG00000126890; TAA
APLPRPGAV

SEQ ID NO: 18494 - protein, 10 aa, Homo sapiens
  Table A; Target 18494; HLA-B*07:02; CTAG2; ENSG00000126890; TAA
APLPRPGAVL

SEQ ID NO: 18495 - protein, 10 aa, Homo sapiens
  Table A; Target 18495; HLA-B*35:01; CTAG2; ENSG00000126890; TAA
APLPRPGAVL

SEQ ID NO: 18496 - protein, 10 aa, Homo sapiens
  Table A; Target 18496; HLA-B*35:03; CTAG2; ENSG00000126890; TAA
APLPRPGAVL

SEQ ID NO: 18497 - protein, 10 aa, Homo sapiens
  Table A; Target 18497; HLA-B*55:01; CTAG2; ENSG00000126890; TAA
APLPRPGAVL

SEQ ID NO: 18498 - protein, 10 aa, Homo sapiens
  Table A; Target 18498; HLA-B*56:01; CTAG2; ENSG00000126890; TAA
APLPRPGAVL

SEQ ID NO: 18499 - protein, 10 aa, Homo sapiens
  Table A; Target 18499; HLA-C*07:02; CTAG2; ENSG00000126890; TAA
APLPRPGAVL

SEQ ID NO: 18500 - protein, 11 aa, Homo sapiens
  Table A; Target 18500; HLA-A*03:02; CTAG2; ENSG00000126890; TAA
APLPRPGAVLK

SEQ ID NO: 18501 - protein, 9 aa, Homo sapiens
  Table A; Target 18501; HLA-B*07:02; CTAG2; ENSG00000126890; TAA
APRGPHGGA

SEQ ID NO: 18502 - protein, 9 aa, Homo sapiens
  Table A; Target 18502; HLA-B*54:01; CTAG2; ENSG00000126890; TAA
APRGPHGGA

SEQ ID NO: 18503 - protein, 9 aa, Homo sapiens
  Table A; Target 18503; HLA-B*55:01; CTAG2; ENSG00000126890; TAA
APRGPHGGA

SEQ ID NO: 18504 - protein, 9 aa, Homo sapiens
  Table A; Target 18504; HLA-B*56:01; CTAG2; ENSG00000126890; TAA
APRGPHGGA

SEQ ID NO: 18505 - protein, 9 aa, Homo sapiens
  Table A; Target 18505; HLA-C*07:02; CTAG2; ENSG00000126890; TAA
APRGPHGGA

SEQ ID NO: 18506 - protein, 10 aa, Homo sapiens
  Table A; Target 18506; HLA-B*07:02; CTAG2; ENSG00000126890; TAA
APRGPHGGAA

SEQ ID NO: 18507 - protein, 10 aa, Homo sapiens
  Table A; Target 18507; HLA-B*54:01; CTAG2; ENSG00000126890; TAA
APRGPHGGAA

SEQ ID NO: 18508 - protein, 10 aa, Homo sapiens
  Table A; Target 18508; HLA-B*55:01; CTAG2; ENSG00000126890; TAA
APRGPHGGAA

SEQ ID NO: 18509 - protein, 10 aa, Homo sapiens
  Table A; Target 18509; HLA-B*56:01; CTAG2; ENSG00000126890; TAA
APRGPHGGAA

SEQ ID NO: 18510 - protein, 10 aa, Homo sapiens
  Table A; Target 18510; HLA-C*07:02; CTAG2; ENSG00000126890; TAA
APRGPHGGAA

SEQ ID NO: 18511 - protein, 11 aa, Homo sapiens
  Table A; Target 18511; HLA-B*07:02; CTAG2; ENSG00000126890; TAA
APRGPHGGAAS

SEQ ID NO: 18512 - protein, 11 aa, Homo sapiens
  Table A; Target 18512; HLA-C*07:02; CTAG2; ENSG00000126890; TAA
APRGPHGGAAS

SEQ ID NO: 18513 - protein, 11 aa, Homo sapiens
  Table A; Target 18513; HLA-B*15:01; CTAG2; ENSG00000126890; TAA
AQGDGCRGVAF

SEQ ID NO: 18514 - protein, 9 aa, Homo sapiens
  Table A; Target 18514; HLA-C*06:02; CTAG2; ENSG00000126890; TAA
ARRPDSRLL

SEQ ID NO: 18515 - protein, 9 aa, Homo sapiens
  Table A; Target 18515; HLA-C*16:01; CTAG2; ENSG00000126890; TAA
ASGPRGGAP

SEQ ID NO: 18516 - protein, 10 aa, Homo sapiens
  Table A; Target 18516; HLA-A*31:01; CTAG2; ENSG00000126890; TAA
ASGPRGGAPR

SEQ ID NO: 18517 - protein, 10 aa, Homo sapiens
  Table A; Target 18517; HLA-A*33:01; CTAG2; ENSG00000126890; TAA
ASGPRGGAPR

SEQ ID NO: 18518 - protein, 10 aa, Homo sapiens
  Table A; Target 18518; HLA-A*33:03; CTAG2; ENSG00000126890; TAA
ASGPRGGAPR

SEQ ID NO: 18519 - protein, 10 aa, Homo sapiens
  Table A; Target 18519; HLA-A*68:01; CTAG2; ENSG00000126890; TAA
ASGPRGGAPR

SEQ ID NO: 18520 - protein, 10 aa, Homo sapiens
  Table A; Target 18520; HLA-C*07:06; CTAG2; ENSG00000126890; TAA
ASGPRGGAPR

SEQ ID NO: 18521 - protein, 8 aa, Homo sapiens
  Table A; Target 18521; HLA-C*01:02; CTAG2; ENSG00000126890; TAA
ASPEGQKA

SEQ ID NO: 18522 - protein, 8 aa, Homo sapiens
  Table A; Target 18522; HLA-A*02:01; CTAG2; ENSG00000126890; TAA
AVLKDFTV

SEQ ID NO: 18523 - protein, 8 aa, Homo sapiens
  Table A; Target 18523; HLA-B*13:02; CTAG2; ENSG00000126890; TAA
AVLKDFTV

SEQ ID NO: 18524 - protein, 8 aa, Homo sapiens
  Table A; Target 18524; HLA-B*51:01; CTAG2; ENSG00000126890; TAA
DAAPLPRP

SEQ ID NO: 18525 - protein, 8 aa, Homo sapiens
  Table A; Target 18525; HLA-B*54:01; CTAG2; ENSG00000126890; TAA
DAAPLPRP

SEQ ID NO: 18526 - protein, 9 aa, Homo sapiens
  Table A; Target 18526; HLA-A*33:01; CTAG2; ENSG00000126890; TAA
DAAPLPRPG

SEQ ID NO: 18527 - protein, 9 aa, Homo sapiens
  Table A; Target 18527; HLA-C*04:01; CTAG2; ENSG00000126890; TAA
DAAPLPRPG

SEQ ID NO: 18528 - protein, 9 aa, Homo sapiens
  Table A; Target 18528; HLA-C*06:02; CTAG2; ENSG00000126890; TAA
DAAPLPRPG

SEQ ID NO: 18529 - protein, 9 aa, Homo sapiens
  Table A; Target 18529; HLA-C*07:01; CTAG2; ENSG00000126890; TAA
DAAPLPRPG

SEQ ID NO: 18530 - protein, 9 aa, Homo sapiens
  Table A; Target 18530; HLA-C*07:02; CTAG2; ENSG00000126890; TAA
DAAPLPRPG

SEQ ID NO: 18531 - protein, 9 aa, Homo sapiens
  Table A; Target 18531; HLA-C*12:03; CTAG2; ENSG00000126890; TAA
DAAPLPRPG

SEQ ID NO: 18532 - protein, 9 aa, Homo sapiens
  Table A; Target 18532; HLA-C*16:01; CTAG2; ENSG00000126890; TAA
DAAPLPRPG

SEQ ID NO: 18533 - protein, 9 aa, Homo sapiens
  Table A; Target 18533; HLA-C*16:02; CTAG2; ENSG00000126890; TAA
DAAPLPRPG

SEQ ID NO: 18534 - protein, 10 aa, Homo sapiens
  Table A; Target 18534; HLA-A*25:01; CTAG2; ENSG00000126890; TAA
DAAPLPRPGA

SEQ ID NO: 18535 - protein, 10 aa, Homo sapiens
  Table A; Target 18535; HLA-A*26:01; CTAG2; ENSG00000126890; TAA
DAAPLPRPGA

SEQ ID NO: 18536 - protein, 10 aa, Homo sapiens
  Table A; Target 18536; HLA-B*51:01; CTAG2; ENSG00000126890; TAA
DAAPLPRPGA

SEQ ID NO: 18537 - protein, 10 aa, Homo sapiens
  Table A; Target 18537; HLA-B*54:01; CTAG2; ENSG00000126890; TAA
DAAPLPRPGA

SEQ ID NO: 18538 - protein, 11 aa, Homo sapiens
  Table A; Target 18538; HLA-B*51:01; CTAG2; ENSG00000126890; TAA
DAAPLPRPGAV

SEQ ID NO: 18539 - protein, 10 aa, Homo sapiens
  Table A; Target 18539; HLA-B*38:01; CTAG2; ENSG00000126890; TAA
DADGPGGPGI

SEQ ID NO: 18540 - protein, 10 aa, Homo sapiens
  Table A; Target 18540; HLA-B*51:01; CTAG2; ENSG00000126890; TAA
DADGPGGPGI

SEQ ID NO: 18541 - protein, 10 aa, Homo sapiens
  Table A; Target 18541; HLA-C*05:01; CTAG2; ENSG00000126890; TAA
DADGPGGPGI

SEQ ID NO: 18542 - protein, 9 aa, Homo sapiens
  Table A; Target 18542; HLA-A*23:01; CTAG2; ENSG00000126890; TAA
DFTVSGNLL

SEQ ID NO: 18543 - protein, 9 aa, Homo sapiens
  Table A; Target 18543; HLA-A*24:02; CTAG2; ENSG00000126890; TAA
DFTVSGNLL

SEQ ID NO: 18544 - protein, 9 aa, Homo sapiens
  Table A; Target 18544; HLA-C*04:01; CTAG2; ENSG00000126890; TAA
DFTVSGNLL

SEQ ID NO: 18545 - protein, 9 aa, Homo sapiens
  Table A; Target 18545; HLA-C*14:02; CTAG2; ENSG00000126890; TAA
DFTVSGNLL

SEQ ID NO: 18546 - protein, 10 aa, Homo sapiens
  Table A; Target 18546; HLA-A*23:01; CTAG2; ENSG00000126890; TAA
DFTVSGNLLF

SEQ ID NO: 18547 - protein, 10 aa, Homo sapiens
  Table A; Target 18547; HLA-A*24:02; CTAG2; ENSG00000126890; TAA
DFTVSGNLLF

SEQ ID NO: 18548 - protein, 8 aa, Homo sapiens
  Table A; Target 18548; HLA-B*08:01; CTAG2; ENSG00000126890; TAA
DGCRGVAF

SEQ ID NO: 18549 - protein, 8 aa, Homo sapiens
  Table A; Target 18549; HLA-B*18:01; CTAG2; ENSG00000126890; TAA
DGCRGVAF

SEQ ID NO: 18550 - protein, 8 aa, Homo sapiens
  Table A; Target 18550; HLA-B*51:01; CTAG2; ENSG00000126890; TAA
DGPGGPGI

SEQ ID NO: 18551 - protein, 9 aa, Homo sapiens
  Table A; Target 18551; HLA-A*33:01; CTAG2; ENSG00000126890; TAA
DLRTPKHKV

SEQ ID NO: 18552 - protein, 9 aa, Homo sapiens
  Table A; Target 18552; HLA-B*08:01; CTAG2; ENSG00000126890; TAA
DLRTPKHKV

SEQ ID NO: 18553 - protein, 8 aa, Homo sapiens
  Table A; Target 18553; HLA-B*51:01; CTAG2; ENSG00000126890; TAA
EAELVRRI

SEQ ID NO: 18554 - protein, 9 aa, Homo sapiens
  Table A; Target 18554; HLA-B*08:01; CTAG2; ENSG00000126890; TAA
EAELVRRIL

SEQ ID NO: 18555 - protein, 9 aa, Homo sapiens
  Table A; Target 18555; HLA-B*08:01; CTAG2; ENSG00000126890; TAA
EGAGRMRVV

SEQ ID NO: 18556 - protein, 9 aa, Homo sapiens
  Table A; Target 18556; HLA-A*33:01; CTAG2; ENSG00000126890; TAA
ELVRRILSR

SEQ ID NO: 18557 - protein, 9 aa, Homo sapiens
  Table A; Target 18557; HLA-A*33:03; CTAG2; ENSG00000126890; TAA
ELVRRILSR

SEQ ID NO: 18558 - protein, 9 aa, Homo sapiens
  Table A; Target 18558; HLA-B*08:01; CTAG2; ENSG00000126890; TAA
ELVRRILSR

SEQ ID NO: 18559 - protein, 9 aa, Homo sapiens
  Table A; Target 18559; HLA-A*01:01; CTAG2; ENSG00000126890; TAA
FSSPMEAEL

SEQ ID NO: 18560 - protein, 9 aa, Homo sapiens
  Table A; Target 18560; HLA-A*02:01; CTAG2; ENSG00000126890; TAA
FSSPMEAEL

SEQ ID NO: 18561 - protein, 9 aa, Homo sapiens
  Table A; Target 18561; HLA-A*30:01; CTAG2; ENSG00000126890; TAA
FSSPMEAEL

SEQ ID NO: 18562 - protein, 9 aa, Homo sapiens
  Table A; Target 18562; HLA-A*68:02; CTAG2; ENSG00000126890; TAA
FSSPMEAEL

SEQ ID NO: 18563 - protein, 9 aa, Homo sapiens
  Table A; Target 18563; HLA-B*27:05; CTAG2; ENSG00000126890; TAA
FSSPMEAEL

SEQ ID NO: 18564 - protein, 9 aa, Homo sapiens
  Table A; Target 18564; HLA-B*35:01; CTAG2; ENSG00000126890; TAA
FSSPMEAEL

SEQ ID NO: 18565 - protein, 9 aa, Homo sapiens
  Table A; Target 18565; HLA-B*35:03; CTAG2; ENSG00000126890; TAA
FSSPMEAEL

SEQ ID NO: 18566 - protein, 9 aa, Homo sapiens
  Table A; Target 18566; HLA-B*38:01; CTAG2; ENSG00000126890; TAA
FSSPMEAEL

SEQ ID NO: 18567 - protein, 9 aa, Homo sapiens
  Table A; Target 18567; HLA-B*39:01; CTAG2; ENSG00000126890; TAA
FSSPMEAEL

SEQ ID NO: 18568 - protein, 9 aa, Homo sapiens
  Table A; Target 18568; HLA-B*40:01; CTAG2; ENSG00000126890; TAA
FSSPMEAEL

SEQ ID NO: 18569 - protein, 9 aa, Homo sapiens
  Table A; Target 18569; HLA-B*46:01; CTAG2; ENSG00000126890; TAA
FSSPMEAEL

SEQ ID NO: 18570 - protein, 9 aa, Homo sapiens
  Table A; Target 18570; HLA-B*55:01; CTAG2; ENSG00000126890; TAA
FSSPMEAEL

SEQ ID NO: 18571 - protein, 9 aa, Homo sapiens
  Table A; Target 18571; HLA-B*58:01; CTAG2; ENSG00000126890; TAA
FSSPMEAEL

SEQ ID NO: 18572 - protein, 9 aa, Homo sapiens
  Table A; Target 18572; HLA-C*01:02; CTAG2; ENSG00000126890; TAA
FSSPMEAEL

SEQ ID NO: 18573 - protein, 9 aa, Homo sapiens
  Table A; Target 18573; HLA-C*02:02; CTAG2; ENSG00000126890; TAA
FSSPMEAEL

SEQ ID NO: 18574 - protein, 9 aa, Homo sapiens
  Table A; Target 18574; HLA-C*03:03; CTAG2; ENSG00000126890; TAA
FSSPMEAEL

SEQ ID NO: 18575 - protein, 9 aa, Homo sapiens
  Table A; Target 18575; HLA-C*03:04; CTAG2; ENSG00000126890; TAA
FSSPMEAEL

SEQ ID NO: 18576 - protein, 9 aa, Homo sapiens
  Table A; Target 18576; HLA-C*05:01; CTAG2; ENSG00000126890; TAA
FSSPMEAEL

SEQ ID NO: 18577 - protein, 9 aa, Homo sapiens
  Table A; Target 18577; HLA-C*07:04; CTAG2; ENSG00000126890; TAA
FSSPMEAEL

SEQ ID NO: 18578 - protein, 9 aa, Homo sapiens
  Table A; Target 18578; HLA-C*07:06; CTAG2; ENSG00000126890; TAA
FSSPMEAEL

SEQ ID NO: 18579 - protein, 9 aa, Homo sapiens
  Table A; Target 18579; HLA-C*12:03; CTAG2; ENSG00000126890; TAA
FSSPMEAEL

SEQ ID NO: 18580 - protein, 9 aa, Homo sapiens
  Table A; Target 18580; HLA-C*14:02; CTAG2; ENSG00000126890; TAA
FSSPMEAEL

SEQ ID NO: 18581 - protein, 9 aa, Homo sapiens
  Table A; Target 18581; HLA-C*16:01; CTAG2; ENSG00000126890; TAA
FSSPMEAEL

SEQ ID NO: 18582 - protein, 9 aa, Homo sapiens
  Table A; Target 18582; HLA-C*16:02; CTAG2; ENSG00000126890; TAA
FSSPMEAEL

SEQ ID NO: 18583 - protein, 9 aa, Homo sapiens
  Table A; Target 18583; HLA-C*16:04; CTAG2; ENSG00000126890; TAA
FSSPMEAEL

SEQ ID NO: 18584 - protein, 8 aa, Homo sapiens
  Table A; Target 18584; HLA-B*39:01; CTAG2; ENSG00000126890; TAA
FTVSGNLL

SEQ ID NO: 18585 - protein, 8 aa, Homo sapiens
  Table A; Target 18585; HLA-B*46:01; CTAG2; ENSG00000126890; TAA
FTVSGNLL

SEQ ID NO: 18586 - protein, 8 aa, Homo sapiens
  Table A; Target 18586; HLA-C*01:02; CTAG2; ENSG00000126890; TAA
FTVSGNLL

SEQ ID NO: 18587 - protein, 8 aa, Homo sapiens
  Table A; Target 18587; HLA-C*02:02; CTAG2; ENSG00000126890; TAA
FTVSGNLL

SEQ ID NO: 18588 - protein, 8 aa, Homo sapiens
  Table A; Target 18588; HLA-C*03:03; CTAG2; ENSG00000126890; TAA
FTVSGNLL

SEQ ID NO: 18589 - protein, 8 aa, Homo sapiens
  Table A; Target 18589; HLA-C*03:04; CTAG2; ENSG00000126890; TAA
FTVSGNLL

SEQ ID NO: 18590 - protein, 8 aa, Homo sapiens
  Table A; Target 18590; HLA-C*04:01; CTAG2; ENSG00000126890; TAA
FTVSGNLL

SEQ ID NO: 18591 - protein, 8 aa, Homo sapiens
  Table A; Target 18591; HLA-C*07:04; CTAG2; ENSG00000126890; TAA
FTVSGNLL

SEQ ID NO: 18592 - protein, 8 aa, Homo sapiens
  Table A; Target 18592; HLA-C*12:03; CTAG2; ENSG00000126890; TAA
FTVSGNLL

SEQ ID NO: 18593 - protein, 8 aa, Homo sapiens
  Table A; Target 18593; HLA-C*14:02; CTAG2; ENSG00000126890; TAA
FTVSGNLL

SEQ ID NO: 18594 - protein, 9 aa, Homo sapiens
  Table A; Target 18594; HLA-A*01:01; CTAG2; ENSG00000126890; TAA
FTVSGNLLF

SEQ ID NO: 18595 - protein, 9 aa, Homo sapiens
  Table A; Target 18595; HLA-A*23:01; CTAG2; ENSG00000126890; TAA
FTVSGNLLF

SEQ ID NO: 18596 - protein, 9 aa, Homo sapiens
  Table A; Target 18596; HLA-A*24:02; CTAG2; ENSG00000126890; TAA
FTVSGNLLF

SEQ ID NO: 18597 - protein, 9 aa, Homo sapiens
  Table A; Target 18597; HLA-A*25:01; CTAG2; ENSG00000126890; TAA
FTVSGNLLF

SEQ ID NO: 18598 - protein, 9 aa, Homo sapiens
  Table A; Target 18598; HLA-A*26:01; CTAG2; ENSG00000126890; TAA
FTVSGNLLF

SEQ ID NO: 18599 - protein, 9 aa, Homo sapiens
  Table A; Target 18599; HLA-A*29:02; CTAG2; ENSG00000126890; TAA
FTVSGNLLF

SEQ ID NO: 18600 - protein, 9 aa, Homo sapiens
  Table A; Target 18600; HLA-B*57:01; CTAG2; ENSG00000126890; TAA
FTVSGNLLF

SEQ ID NO: 18601 - protein, 9 aa, Homo sapiens
  Table A; Target 18601; HLA-B*58:01; CTAG2; ENSG00000126890; TAA
FTVSGNLLF

SEQ ID NO: 18602 - protein, 9 aa, Homo sapiens
  Table A; Target 18602; HLA-C*02:02; CTAG2; ENSG00000126890; TAA
FTVSGNLLF

SEQ ID NO: 18603 - protein, 9 aa, Homo sapiens
  Table A; Target 18603; HLA-C*03:03; CTAG2; ENSG00000126890; TAA
FTVSGNLLF

SEQ ID NO: 18604 - protein, 9 aa, Homo sapiens
  Table A; Target 18604; HLA-C*03:04; CTAG2; ENSG00000126890; TAA
FTVSGNLLF

SEQ ID NO: 18605 - protein, 10 aa, Homo sapiens
  Table A; Target 18605; HLA-A*26:01; CTAG2; ENSG00000126890; TAA
FTVSGNLLFM

SEQ ID NO: 18606 - protein, 10 aa, Homo sapiens
  Table A; Target 18606; HLA-A*68:02; CTAG2; ENSG00000126890; TAA
FTVSGNLLFM

SEQ ID NO: 18607 - protein, 9 aa, Homo sapiens
  Table A; Target 18607; HLA-A*68:01; CTAG2; ENSG00000126890; TAA
GAARASGPR

SEQ ID NO: 18608 - protein, 9 aa, Homo sapiens
  Table A; Target 18608; HLA-C*07:06; CTAG2; ENSG00000126890; TAA
GAARASGPR

SEQ ID NO: 18609 - protein, 9 aa, Homo sapiens
  Table A; Target 18609; HLA-C*07:06; CTAG2; ENSG00000126890; TAA
GAASAQDGR

SEQ ID NO: 18610 - protein, 8 aa, Homo sapiens
  Table A; Target 18610; HLA-C*06:02; CTAG2; ENSG00000126890; TAA
GAGRMRVV

SEQ ID NO: 18611 - protein, 8 aa, Homo sapiens
  Table A; Target 18611; HLA-C*12:03; CTAG2; ENSG00000126890; TAA
GAGRMRVV

SEQ ID NO: 18612 - protein, 8 aa, Homo sapiens
  Table A; Target 18612; HLA-C*16:02; CTAG2; ENSG00000126890; TAA
GAGRMRVV

SEQ ID NO: 18613 - protein, 10 aa, Homo sapiens
  Table A; Target 18613; HLA-B*57:01; CTAG2; ENSG00000126890; TAA
GAGRMRVVGW

SEQ ID NO: 18614 - protein, 8 aa, Homo sapiens
  Table A; Target 18614; HLA-C*16:01; CTAG2; ENSG00000126890; TAA
GATGGRGP

SEQ ID NO: 18615 - protein, 8 aa, Homo sapiens
  Table A; Target 18615; HLA-C*16:02; CTAG2; ENSG00000126890; TAA
GATGGRGP

SEQ ID NO: 18616 - protein, 9 aa, Homo sapiens
  Table A; Target 18616; HLA-B*13:02; CTAG2; ENSG00000126890; TAA
GAVLKDFTV

SEQ ID NO: 18617 - protein, 9 aa, Homo sapiens
  Table A; Target 18617; HLA-C*16:04; CTAG2; ENSG00000126890; TAA
GAVLKDFTV

SEQ ID NO: 18618 - protein, 9 aa, Homo sapiens
  Table A; Target 18618; HLA-B*37:01; CTAG2; ENSG00000126890; TAA
GDGCRGVAF

SEQ ID NO: 18619 - protein, 11 aa, Homo sapiens
  Table A; Target 18619; HLA-B*44:02; CTAG2; ENSG00000126890; TAA
GEAGATGGRGP

SEQ ID NO: 18620 - protein, 11 aa, Homo sapiens
  Table A; Target 18620; HLA-B*44:03; CTAG2; ENSG00000126890; TAA
GEAGATGGRGP

SEQ ID NO: 18621 - protein, 11 aa, Homo sapiens
  Table A; Target 18621; HLA-C*06:02; CTAG2; ENSG00000126890; TAA
GEAGATGGRGP

SEQ ID NO: 18622 - protein, 11 aa, Homo sapiens
  Table A; Target 18622; HLA-C*16:04; CTAG2; ENSG00000126890; TAA
GEAGATGGRGP

SEQ ID NO: 18623 - protein, 10 aa, Homo sapiens
  Table A; Target 18623; HLA-B*39:01; CTAG2; ENSG00000126890; TAA
GIPDGPGGNA

SEQ ID NO: 18624 - protein, 10 aa, Homo sapiens
  Table A; Target 18624; HLA-C*01:02; CTAG2; ENSG00000126890; TAA
GIPDGPGGNA

SEQ ID NO: 18625 - protein, 11 aa, Homo sapiens
  Table A; Target 18625; HLA-A*03:02; CTAG2; ENSG00000126890; TAA
GLGSASPEGQK

SEQ ID NO: 18626 - protein, 11 aa, Homo sapiens
  Table A; Target 18626; HLA-A*68:01; CTAG2; ENSG00000126890; TAA
GPGEAGATGGR

SEQ ID NO: 18627 - protein, 9 aa, Homo sapiens
  Table A; Target 18627; HLA-B*07:02; CTAG2; ENSG00000126890; TAA
GPHGGAASA

SEQ ID NO: 18628 - protein, 9 aa, Homo sapiens
  Table A; Target 18628; HLA-B*54:01; CTAG2; ENSG00000126890; TAA
GPHGGAASA

SEQ ID NO: 18629 - protein, 9 aa, Homo sapiens
  Table A; Target 18629; HLA-B*55:01; CTAG2; ENSG00000126890; TAA
GPHGGAASA

SEQ ID NO: 18630 - protein, 9 aa, Homo sapiens
  Table A; Target 18630; HLA-B*56:01; CTAG2; ENSG00000126890; TAA
GPHGGAASA

SEQ ID NO: 18631 - protein, 9 aa, Homo sapiens
  Table A; Target 18631; HLA-C*07:02; CTAG2; ENSG00000126890; TAA
GPHGGAASA

SEQ ID NO: 18632 - protein, 9 aa, Homo sapiens
  Table A; Target 18632; HLA-A*33:01; CTAG2; ENSG00000126890; TAA
GPRGAGAAR

SEQ ID NO: 18633 - protein, 9 aa, Homo sapiens
  Table A; Target 18633; HLA-A*33:03; CTAG2; ENSG00000126890; TAA
GPRGAGAAR

SEQ ID NO: 18634 - protein, 9 aa, Homo sapiens
  Table A; Target 18634; HLA-B*07:02; CTAG2; ENSG00000126890; TAA
GPRGAGAAR

SEQ ID NO: 18635 - protein, 9 aa, Homo sapiens
  Table A; Target 18635; HLA-C*07:02; CTAG2; ENSG00000126890; TAA
GPRGAGAAR

SEQ ID NO: 18636 - protein, 10 aa, Homo sapiens
  Table A; Target 18636; HLA-B*07:02; CTAG2; ENSG00000126890; TAA
GPRGAGAARA

SEQ ID NO: 18637 - protein, 10 aa, Homo sapiens
  Table A; Target 18637; HLA-B*56:01; CTAG2; ENSG00000126890; TAA
GPRGAGAARA

SEQ ID NO: 18638 - protein, 10 aa, Homo sapiens
  Table A; Target 18638; HLA-C*07:02; CTAG2; ENSG00000126890; TAA
GPRGAGAARA

SEQ ID NO: 18639 - protein, 11 aa, Homo sapiens
  Table A; Target 18639; HLA-B*07:02; CTAG2; ENSG00000126890; TAA
GPRGAGAARAS

SEQ ID NO: 18640 - protein, 10 aa, Homo sapiens
  Table A; Target 18640; HLA-B*07:02; CTAG2; ENSG00000126890; TAA
GPRGGAPRGP

SEQ ID NO: 18641 - protein, 10 aa, Homo sapiens
  Table A; Target 18641; HLA-C*06:02; CTAG2; ENSG00000126890; TAA
GPRGGAPRGP

SEQ ID NO: 18642 - protein, 10 aa, Homo sapiens
  Table A; Target 18642; HLA-C*07:02; CTAG2; ENSG00000126890; TAA
GPRGGAPRGP

SEQ ID NO: 18643 - protein, 9 aa, Homo sapiens
  Table A; Target 18643; HLA-B*27:05; CTAG2; ENSG00000126890; TAA
GRGPRGAGA

SEQ ID NO: 18644 - protein, 11 aa, Homo sapiens
  Table A; Target 18644; HLA-B*27:05; CTAG2; ENSG00000126890; TAA
GRGPRGAGAAR

SEQ ID NO: 18645 - protein, 9 aa, Homo sapiens
  Table A; Target 18645; HLA-A*03:02; CTAG2; ENSG00000126890; TAA
GSASPEGQK

SEQ ID NO: 18646 - protein, 9 aa, Homo sapiens
  Table A; Target 18646; HLA-A*11:01; CTAG2; ENSG00000126890; TAA
GSASPEGQK

SEQ ID NO: 18647 - protein, 9 aa, Homo sapiens
  Table A; Target 18647; HLA-C*07:06; CTAG2; ENSG00000126890; TAA
GSASPEGQK

SEQ ID NO: 18648 - protein, 10 aa, Homo sapiens
  Table A; Target 18648; HLA-B*39:01; CTAG2; ENSG00000126890; TAA
GSASPEGQKA

SEQ ID NO: 18649 - protein, 11 aa, Homo sapiens
  Table A; Target 18649; HLA-A*31:01; CTAG2; ENSG00000126890; TAA
GSASPEGQKAR

SEQ ID NO: 18650 - protein, 11 aa, Homo sapiens
  Table A; Target 18650; HLA-A*68:01; CTAG2; ENSG00000126890; TAA
GSASPEGQKAR

SEQ ID NO: 18651 - protein, 11 aa, Homo sapiens
  Table A; Target 18651; HLA-C*07:06; CTAG2; ENSG00000126890; TAA
GSASPEGQKAR

SEQ ID NO: 18652 - protein, 11 aa, Homo sapiens
  Table A; Target 18652; HLA-A*31:01; CTAG2; ENSG00000126890; TAA
ILSRDAAPLPR

SEQ ID NO: 18653 - protein, 9 aa, Homo sapiens
  Table A; Target 18653; HLA-B*07:02; CTAG2; ENSG00000126890; TAA
IPDGPGGNA

SEQ ID NO: 18654 - protein, 9 aa, Homo sapiens
  Table A; Target 18654; HLA-B*55:01; CTAG2; ENSG00000126890; TAA
IPDGPGGNA

SEQ ID NO: 18655 - protein, 9 aa, Homo sapiens
  Table A; Target 18655; HLA-B*56:01; CTAG2; ENSG00000126890; TAA
IPDGPGGNA

SEQ ID NO: 18656 - protein, 9 aa, Homo sapiens
  Table A; Target 18656; HLA-C*05:01; CTAG2; ENSG00000126890; TAA
IPDGPGGNA

SEQ ID NO: 18657 - protein, 9 aa, Homo sapiens
  Table A; Target 18657; HLA-A*03:01; CTAG2; ENSG00000126890; TAA
ITMPFSSPM

SEQ ID NO: 18658 - protein, 9 aa, Homo sapiens
  Table A; Target 18658; HLA-A*11:01; CTAG2; ENSG00000126890; TAA
ITMPFSSPM

SEQ ID NO: 18659 - protein, 9 aa, Homo sapiens
  Table A; Target 18659; HLA-A*25:01; CTAG2; ENSG00000126890; TAA
ITMPFSSPM

SEQ ID NO: 18660 - protein, 9 aa, Homo sapiens
  Table A; Target 18660; HLA-A*26:01; CTAG2; ENSG00000126890; TAA
ITMPFSSPM

SEQ ID NO: 18661 - protein, 9 aa, Homo sapiens
  Table A; Target 18661; HLA-A*30:02; CTAG2; ENSG00000126890; TAA
ITMPFSSPM

SEQ ID NO: 18662 - protein, 9 aa, Homo sapiens
  Table A; Target 18662; HLA-A*31:01; CTAG2; ENSG00000126890; TAA
ITMPFSSPM

SEQ ID NO: 18663 - protein, 9 aa, Homo sapiens
  Table A; Target 18663; HLA-A*32:01; CTAG2; ENSG00000126890; TAA
ITMPFSSPM

SEQ ID NO: 18664 - protein, 9 aa, Homo sapiens
  Table A; Target 18664; HLA-B*07:02; CTAG2; ENSG00000126890; TAA
ITMPFSSPM

SEQ ID NO: 18665 - protein, 9 aa, Homo sapiens
  Table A; Target 18665; HLA-B*15:01; CTAG2; ENSG00000126890; TAA
ITMPFSSPM

SEQ ID NO: 18666 - protein, 9 aa, Homo sapiens
  Table A; Target 18666; HLA-B*15:03; CTAG2; ENSG00000126890; TAA
ITMPFSSPM

SEQ ID NO: 18667 - protein, 9 aa, Homo sapiens
  Table A; Target 18667; HLA-B*40:02; CTAG2; ENSG00000126890; TAA
ITMPFSSPM

SEQ ID NO: 18668 - protein, 9 aa, Homo sapiens
  Table A; Target 18668; HLA-B*46:01; CTAG2; ENSG00000126890; TAA
ITMPFSSPM

SEQ ID NO: 18669 - protein, 9 aa, Homo sapiens
  Table A; Target 18669; HLA-B*57:01; CTAG2; ENSG00000126890; TAA
ITMPFSSPM

SEQ ID NO: 18670 - protein, 9 aa, Homo sapiens
  Table A; Target 18670; HLA-B*58:01; CTAG2; ENSG00000126890; TAA
ITMPFSSPM

SEQ ID NO: 18671 - protein, 9 aa, Homo sapiens
  Table A; Target 18671; HLA-C*01:02; CTAG2; ENSG00000126890; TAA
ITMPFSSPM

SEQ ID NO: 18672 - protein, 9 aa, Homo sapiens
  Table A; Target 18672; HLA-C*02:02; CTAG2; ENSG00000126890; TAA
ITMPFSSPM

SEQ ID NO: 18673 - protein, 9 aa, Homo sapiens
  Table A; Target 18673; HLA-C*03:03; CTAG2; ENSG00000126890; TAA
ITMPFSSPM

SEQ ID NO: 18674 - protein, 9 aa, Homo sapiens
  Table A; Target 18674; HLA-C*03:04; CTAG2; ENSG00000126890; TAA
ITMPFSSPM

SEQ ID NO: 18675 - protein, 9 aa, Homo sapiens
  Table A; Target 18675; HLA-C*04:01; CTAG2; ENSG00000126890; TAA
ITMPFSSPM

SEQ ID NO: 18676 - protein, 9 aa, Homo sapiens
  Table A; Target 18676; HLA-C*06:02; CTAG2; ENSG00000126890; TAA
ITMPFSSPM

SEQ ID NO: 18677 - protein, 9 aa, Homo sapiens
  Table A; Target 18677; HLA-C*07:01; CTAG2; ENSG00000126890; TAA
ITMPFSSPM

SEQ ID NO: 18678 - protein, 9 aa, Homo sapiens
  Table A; Target 18678; HLA-C*07:02; CTAG2; ENSG00000126890; TAA
ITMPFSSPM

SEQ ID NO: 18679 - protein, 9 aa, Homo sapiens
  Table A; Target 18679; HLA-C*07:04; CTAG2; ENSG00000126890; TAA
ITMPFSSPM

SEQ ID NO: 18680 - protein, 9 aa, Homo sapiens
  Table A; Target 18680; HLA-C*12:03; CTAG2; ENSG00000126890; TAA
ITMPFSSPM

SEQ ID NO: 18681 - protein, 9 aa, Homo sapiens
  Table A; Target 18681; HLA-C*14:02; CTAG2; ENSG00000126890; TAA
ITMPFSSPM

SEQ ID NO: 18682 - protein, 9 aa, Homo sapiens
  Table A; Target 18682; HLA-C*16:01; CTAG2; ENSG00000126890; TAA
ITMPFSSPM

SEQ ID NO: 18683 - protein, 9 aa, Homo sapiens
  Table A; Target 18683; HLA-C*16:04; CTAG2; ENSG00000126890; TAA
ITMPFSSPM

SEQ ID NO: 18684 - protein, 9 aa, Homo sapiens
  Table A; Target 18684; HLA-A*30:01; CTAG2; ENSG00000126890; TAA
KDFTVSGNL

SEQ ID NO: 18685 - protein, 9 aa, Homo sapiens
  Table A; Target 18685; HLA-B*37:01; CTAG2; ENSG00000126890; TAA
KDFTVSGNL

SEQ ID NO: 18686 - protein, 9 aa, Homo sapiens
  Table A; Target 18686; HLA-B*40:01; CTAG2; ENSG00000126890; TAA
KDFTVSGNL

SEQ ID NO: 18687 - protein, 9 aa, Homo sapiens
  Table A; Target 18687; HLA-B*40:02; CTAG2; ENSG00000126890; TAA
KDFTVSGNL

SEQ ID NO: 18688 - protein, 9 aa, Homo sapiens
  Table A; Target 18688; HLA-C*06:02; CTAG2; ENSG00000126890; TAA
KDFTVSGNL

SEQ ID NO: 18689 - protein, 10 aa, Homo sapiens
  Table A; Target 18689; HLA-A*30:01; CTAG2; ENSG00000126890; TAA
KDFTVSGNLL

SEQ ID NO: 18690 - protein, 10 aa, Homo sapiens
  Table A; Target 18690; HLA-B*37:01; CTAG2; ENSG00000126890; TAA
KDFTVSGNLL

SEQ ID NO: 18691 - protein, 10 aa, Homo sapiens
  Table A; Target 18691; HLA-B*40:01; CTAG2; ENSG00000126890; TAA
KDFTVSGNLL

SEQ ID NO: 18692 - protein, 10 aa, Homo sapiens
  Table A; Target 18692; HLA-B*40:02; CTAG2; ENSG00000126890; TAA
KDFTVSGNLL

SEQ ID NO: 18693 - protein, 10 aa, Homo sapiens
  Table A; Target 18693; HLA-C*06:02; CTAG2; ENSG00000126890; TAA
KDFTVSGNLL

SEQ ID NO: 18694 - protein, 11 aa, Homo sapiens
  Table A; Target 18694; HLA-A*23:01; CTAG2; ENSG00000126890; TAA
KDFTVSGNLLF

SEQ ID NO: 18695 - protein, 11 aa, Homo sapiens
  Table A; Target 18695; HLA-B*57:01; CTAG2; ENSG00000126890; TAA
KDFTVSGNLLF

SEQ ID NO: 18696 - protein, 9 aa, Homo sapiens
  Table A; Target 18696; HLA-A*32:01; CTAG2; ENSG00000126890; TAA
KVSEQRPGT

SEQ ID NO: 18697 - protein, 10 aa, Homo sapiens
  Table A; Target 18697; HLA-C*07:02; CTAG2; ENSG00000126890; TAA
LGSASPEGQK

SEQ ID NO: 18698 - protein, 8 aa, Homo sapiens
  Table A; Target 18698; HLA-B*08:01; CTAG2; ENSG00000126890; TAA
LLQLHITM

SEQ ID NO: 18699 - protein, 8 aa, Homo sapiens
  Table A; Target 18699; HLA-C*07:04; CTAG2; ENSG00000126890; TAA
LLQLHITM

SEQ ID NO: 18700 - protein, 8 aa, Homo sapiens
  Table A; Target 18700; HLA-B*07:02; CTAG2; ENSG00000126890; TAA
LPRPGAVL

SEQ ID NO: 18701 - protein, 8 aa, Homo sapiens
  Table A; Target 18701; HLA-B*08:01; CTAG2; ENSG00000126890; TAA
LPRPGAVL

SEQ ID NO: 18702 - protein, 8 aa, Homo sapiens
  Table A; Target 18702; HLA-B*35:03; CTAG2; ENSG00000126890; TAA
LPRPGAVL

SEQ ID NO: 18703 - protein, 8 aa, Homo sapiens
  Table A; Target 18703; HLA-B*51:01; CTAG2; ENSG00000126890; TAA
LPRPGAVL

SEQ ID NO: 18704 - protein, 8 aa, Homo sapiens
  Table A; Target 18704; HLA-C*07:02; CTAG2; ENSG00000126890; TAA
LPRPGAVL

SEQ ID NO: 18705 - protein, 9 aa, Homo sapiens
  Table A; Target 18705; HLA-B*51:01; CTAG2; ENSG00000126890; TAA
LPRPGAVLK

SEQ ID NO: 18706 - protein, 9 aa, Homo sapiens
  Table A; Target 18706; HLA-B*56:01; CTAG2; ENSG00000126890; TAA
LPRPGAVLK

SEQ ID NO: 18707 - protein, 9 aa, Homo sapiens
  Table A; Target 18707; HLA-A*24:02; CTAG2; ENSG00000126890; TAA
LQLHITMPF

SEQ ID NO: 18708 - protein, 9 aa, Homo sapiens
  Table A; Target 18708; HLA-B*57:01; CTAG2; ENSG00000126890; TAA
LQLHITMPF

SEQ ID NO: 18709 - protein, 9 aa, Homo sapiens
  Table A; Target 18709; HLA-C*06:02; CTAG2; ENSG00000126890; TAA
LSRDAAPLP

SEQ ID NO: 18710 - protein, 10 aa, Homo sapiens
  Table A; Target 18710; HLA-A*31:01; CTAG2; ENSG00000126890; TAA
LSRDAAPLPR

SEQ ID NO: 18711 - protein, 10 aa, Homo sapiens
  Table A; Target 18711; HLA-A*33:03; CTAG2; ENSG00000126890; TAA
LSRDAAPLPR

SEQ ID NO: 18712 - protein, 10 aa, Homo sapiens
  Table A; Target 18712; HLA-A*68:01; CTAG2; ENSG00000126890; TAA
LSRDAAPLPR

SEQ ID NO: 18713 - protein, 10 aa, Homo sapiens
  Table A; Target 18713; HLA-B*57:01; CTAG2; ENSG00000126890; TAA
LSRDAAPLPR

SEQ ID NO: 18714 - protein, 9 aa, Homo sapiens
  Table A; Target 18714; HLA-B*44:02; CTAG2; ENSG00000126890; TAA
MEAELVRRI

SEQ ID NO: 18715 - protein, 9 aa, Homo sapiens
  Table A; Target 18715; HLA-B*44:03; CTAG2; ENSG00000126890; TAA
MEAELVRRI

SEQ ID NO: 18716 - protein, 9 aa, Homo sapiens
  Table A; Target 18716; HLA-B*49:01; CTAG2; ENSG00000126890; TAA
MEAELVRRI

SEQ ID NO: 18717 - protein, 8 aa, Homo sapiens
  Table A; Target 18717; HLA-B*51:01; CTAG2; ENSG00000126890; TAA
MPFSSPME

SEQ ID NO: 18718 - protein, 9 aa, Homo sapiens
  Table A; Target 18718; HLA-A*02:01; CTAG2; ENSG00000126890; TAA
MPFSSPMEA

SEQ ID NO: 18719 - protein, 9 aa, Homo sapiens
  Table A; Target 18719; HLA-A*02:03; CTAG2; ENSG00000126890; TAA
MPFSSPMEA

SEQ ID NO: 18720 - protein, 9 aa, Homo sapiens
  Table A; Target 18720; HLA-B*07:02; CTAG2; ENSG00000126890; TAA
MPFSSPMEA

SEQ ID NO: 18721 - protein, 9 aa, Homo sapiens
  Table A; Target 18721; HLA-B*35:01; CTAG2; ENSG00000126890; TAA
MPFSSPMEA

SEQ ID NO: 18722 - protein, 9 aa, Homo sapiens
  Table A; Target 18722; HLA-B*35:03; CTAG2; ENSG00000126890; TAA
MPFSSPMEA

SEQ ID NO: 18723 - protein, 9 aa, Homo sapiens
  Table A; Target 18723; HLA-B*51:01; CTAG2; ENSG00000126890; TAA
MPFSSPMEA

SEQ ID NO: 18724 - protein, 9 aa, Homo sapiens
  Table A; Target 18724; HLA-B*54:01; CTAG2; ENSG00000126890; TAA
MPFSSPMEA

SEQ ID NO: 18725 - protein, 9 aa, Homo sapiens
  Table A; Target 18725; HLA-B*55:01; CTAG2; ENSG00000126890; TAA
MPFSSPMEA

SEQ ID NO: 18726 - protein, 9 aa, Homo sapiens
  Table A; Target 18726; HLA-B*56:01; CTAG2; ENSG00000126890; TAA
MPFSSPMEA

SEQ ID NO: 18727 - protein, 9 aa, Homo sapiens
  Table A; Target 18727; HLA-C*04:01; CTAG2; ENSG00000126890; TAA
MPFSSPMEA

SEQ ID NO: 18728 - protein, 9 aa, Homo sapiens
  Table A; Target 18728; HLA-C*07:02; CTAG2; ENSG00000126890; TAA
MPFSSPMEA

SEQ ID NO: 18729 - protein, 9 aa, Homo sapiens
  Table A; Target 18729; HLA-C*12:03; CTAG2; ENSG00000126890; TAA
MPFSSPMEA

SEQ ID NO: 18730 - protein, 10 aa, Homo sapiens
  Table A; Target 18730; HLA-B*35:01; CTAG2; ENSG00000126890; TAA
MPFSSPMEAE

SEQ ID NO: 18731 - protein, 11 aa, Homo sapiens
  Table A; Target 18731; HLA-A*68:02; CTAG2; ENSG00000126890; TAA
MPFSSPMEAEL

SEQ ID NO: 18732 - protein, 11 aa, Homo sapiens
  Table A; Target 18732; HLA-B*07:02; CTAG2; ENSG00000126890; TAA
MPFSSPMEAEL

SEQ ID NO: 18733 - protein, 11 aa, Homo sapiens
  Table A; Target 18733; HLA-B*35:01; CTAG2; ENSG00000126890; TAA
MPFSSPMEAEL

SEQ ID NO: 18734 - protein, 11 aa, Homo sapiens
  Table A; Target 18734; HLA-B*35:03; CTAG2; ENSG00000126890; TAA
MPFSSPMEAEL

SEQ ID NO: 18735 - protein, 11 aa, Homo sapiens
  Table A; Target 18735; HLA-B*51:01; CTAG2; ENSG00000126890; TAA
MPFSSPMEAEL

SEQ ID NO: 18736 - protein, 11 aa, Homo sapiens
  Table A; Target 18736; HLA-B*54:01; CTAG2; ENSG00000126890; TAA
MPFSSPMEAEL

SEQ ID NO: 18737 - protein, 11 aa, Homo sapiens
  Table A; Target 18737; HLA-B*55:01; CTAG2; ENSG00000126890; TAA
MPFSSPMEAEL

SEQ ID NO: 18738 - protein, 11 aa, Homo sapiens
  Table A; Target 18738; HLA-B*56:01; CTAG2; ENSG00000126890; TAA
MPFSSPMEAEL

SEQ ID NO: 18739 - protein, 11 aa, Homo sapiens
  Table A; Target 18739; HLA-C*03:03; CTAG2; ENSG00000126890; TAA
MPFSSPMEAEL

SEQ ID NO: 18740 - protein, 9 aa, Homo sapiens
  Table A; Target 18740; HLA-A*02:01; CTAG2; ENSG00000126890; TAA
NVMFSAPHI

SEQ ID NO: 18741 - protein, 9 aa, Homo sapiens
  Table A; Target 18741; HLA-A*02:03; CTAG2; ENSG00000126890; TAA
NVMFSAPHI

SEQ ID NO: 18742 - protein, 9 aa, Homo sapiens
  Table A; Target 18742; HLA-A*02:04; CTAG2; ENSG00000126890; TAA
NVMFSAPHI

SEQ ID NO: 18743 - protein, 9 aa, Homo sapiens
  Table A; Target 18743; HLA-A*02:07; CTAG2; ENSG00000126890; TAA
NVMFSAPHI

SEQ ID NO: 18744 - protein, 9 aa, Homo sapiens
  Table A; Target 18744; HLA-A*23:01; CTAG2; ENSG00000126890; TAA
NVMFSAPHI

SEQ ID NO: 18745 - protein, 9 aa, Homo sapiens
  Table A; Target 18745; HLA-A*24:02; CTAG2; ENSG00000126890; TAA
NVMFSAPHI

SEQ ID NO: 18746 - protein, 9 aa, Homo sapiens
  Table A; Target 18746; HLA-A*25:01; CTAG2; ENSG00000126890; TAA
NVMFSAPHI

SEQ ID NO: 18747 - protein, 9 aa, Homo sapiens
  Table A; Target 18747; HLA-A*26:01; CTAG2; ENSG00000126890; TAA
NVMFSAPHI

SEQ ID NO: 18748 - protein, 9 aa, Homo sapiens
  Table A; Target 18748; HLA-A*68:02; CTAG2; ENSG00000126890; TAA
NVMFSAPHI

SEQ ID NO: 18749 - protein, 9 aa, Homo sapiens
  Table A; Target 18749; HLA-B*13:02; CTAG2; ENSG00000126890; TAA
NVMFSAPHI

SEQ ID NO: 18750 - protein, 9 aa, Homo sapiens
  Table A; Target 18750; HLA-B*35:03; CTAG2; ENSG00000126890; TAA
NVMFSAPHI

SEQ ID NO: 18751 - protein, 9 aa, Homo sapiens
  Table A; Target 18751; HLA-B*38:01; CTAG2; ENSG00000126890; TAA
NVMFSAPHI

SEQ ID NO: 18752 - protein, 9 aa, Homo sapiens
  Table A; Target 18752; HLA-B*44:03; CTAG2; ENSG00000126890; TAA
NVMFSAPHI

SEQ ID NO: 18753 - protein, 9 aa, Homo sapiens
  Table A; Target 18753; HLA-B*51:01; CTAG2; ENSG00000126890; TAA
NVMFSAPHI

SEQ ID NO: 18754 - protein, 9 aa, Homo sapiens
  Table A; Target 18754; HLA-B*54:01; CTAG2; ENSG00000126890; TAA
NVMFSAPHI

SEQ ID NO: 18755 - protein, 9 aa, Homo sapiens
  Table A; Target 18755; HLA-B*55:01; CTAG2; ENSG00000126890; TAA
NVMFSAPHI

SEQ ID NO: 18756 - protein, 9 aa, Homo sapiens
  Table A; Target 18756; HLA-C*04:01; CTAG2; ENSG00000126890; TAA
NVMFSAPHI

SEQ ID NO: 18757 - protein, 9 aa, Homo sapiens
  Table A; Target 18757; HLA-C*06:02; CTAG2; ENSG00000126890; TAA
NVMFSAPHI

SEQ ID NO: 18758 - protein, 9 aa, Homo sapiens
  Table A; Target 18758; HLA-C*07:01; CTAG2; ENSG00000126890; TAA
NVMFSAPHI

SEQ ID NO: 18759 - protein, 9 aa, Homo sapiens
  Table A; Target 18759; HLA-C*07:02; CTAG2; ENSG00000126890; TAA
NVMFSAPHI

SEQ ID NO: 18760 - protein, 9 aa, Homo sapiens
  Table A; Target 18760; HLA-A*24:02; CTAG2; ENSG00000126890; TAA
PLPRPGAVL

SEQ ID NO: 18761 - protein, 9 aa, Homo sapiens
  Table A; Target 18761; HLA-C*06:02; CTAG2; ENSG00000126890; TAA
PRGGAPRGP

SEQ ID NO: 18762 - protein, 9 aa, Homo sapiens
  Table A; Target 18762; HLA-C*07:02; CTAG2; ENSG00000126890; TAA
PRGGAPRGP

SEQ ID NO: 18763 - protein, 11 aa, Homo sapiens
  Table A; Target 18763; HLA-C*04:01; CTAG2; ENSG00000126890; TAA
QAEGQGTGGST

SEQ ID NO: 18764 - protein, 11 aa, Homo sapiens
  Table A; Target 18764; HLA-C*07:01; CTAG2; ENSG00000126890; TAA
QAEGQGTGGST

SEQ ID NO: 18765 - protein, 10 aa, Homo sapiens
  Table A; Target 18765; HLA-C*06:02; CTAG2; ENSG00000126890; TAA
QRPGTPGPPP

SEQ ID NO: 18766 - protein, 10 aa, Homo sapiens
  Table A; Target 18766; HLA-C*16:02; CTAG2; ENSG00000126890; TAA
RASGPRGGAP

SEQ ID NO: 18767 - protein, 11 aa, Homo sapiens
  Table A; Target 18767; HLA-A*31:01; CTAG2; ENSG00000126890; TAA
RASGPRGGAPR

SEQ ID NO: 18768 - protein, 8 aa, Homo sapiens
  Table A; Target 18768; HLA-A*03:01; CTAG2; ENSG00000126890; TAA
RDAAPLPR

SEQ ID NO: 18769 - protein, 11 aa, Homo sapiens
  Table A; Target 18769; HLA-A*32:01; CTAG2; ENSG00000126890; TAA
RGAGAARASGP

SEQ ID NO: 18770 - protein, 11 aa, Homo sapiens
  Table A; Target 18770; HLA-C*06:02; CTAG2; ENSG00000126890; TAA
RGAGAARASGP

SEQ ID NO: 18771 - protein, 10 aa, Homo sapiens
  Table A; Target 18771; HLA-A*31:01; CTAG2; ENSG00000126890; TAA
RGPRGAGAAR

SEQ ID NO: 18772 - protein, 10 aa, Homo sapiens
  Table A; Target 18772; HLA-C*01:02; CTAG2; ENSG00000126890; TAA
RGPRGAGAAR

SEQ ID NO: 18773 - protein, 9 aa, Homo sapiens
  Table A; Target 18773; HLA-B*57:01; CTAG2; ENSG00000126890; TAA
RGVAFNVMF

SEQ ID NO: 18774 - protein, 9 aa, Homo sapiens
  Table A; Target 18774; HLA-A*02:04; CTAG2; ENSG00000126890; TAA
RLLQLHITM

SEQ ID NO: 18775 - protein, 9 aa, Homo sapiens
  Table A; Target 18775; HLA-A*31:01; CTAG2; ENSG00000126890; TAA
RMRVVGWGL

SEQ ID NO: 18776 - protein, 9 aa, Homo sapiens
  Table A; Target 18776; HLA-B*07:02; CTAG2; ENSG00000126890; TAA
RPDSRLLQL

SEQ ID NO: 18777 - protein, 9 aa, Homo sapiens
  Table A; Target 18777; HLA-B*08:01; CTAG2; ENSG00000126890; TAA
RPDSRLLQL

SEQ ID NO: 18778 - protein, 9 aa, Homo sapiens
  Table A; Target 18778; HLA-C*07:02; CTAG2; ENSG00000126890; TAA
RPDSRLLQL

SEQ ID NO: 18779 - protein, 9 aa, Homo sapiens
  Table A; Target 18779; HLA-B*07:02; CTAG2; ENSG00000126890; TAA
RPGTPGPPP

SEQ ID NO: 18780 - protein, 9 aa, Homo sapiens
  Table A; Target 18780; HLA-B*55:01; CTAG2; ENSG00000126890; TAA
RPGTPGPPP

SEQ ID NO: 18781 - protein, 9 aa, Homo sapiens
  Table A; Target 18781; HLA-B*56:01; CTAG2; ENSG00000126890; TAA
RPGTPGPPP

SEQ ID NO: 18782 - protein, 9 aa, Homo sapiens
  Table A; Target 18782; HLA-C*07:02; CTAG2; ENSG00000126890; TAA
RPGTPGPPP

SEQ ID NO: 18783 - protein, 10 aa, Homo sapiens
  Table A; Target 18783; HLA-A*24:02; CTAG2; ENSG00000126890; TAA
RRPDSRLLQL

SEQ ID NO: 18784 - protein, 10 aa, Homo sapiens
  Table A; Target 18784; HLA-A*68:01; CTAG2; ENSG00000126890; TAA
SASPEGQKAR

SEQ ID NO: 18785 - protein, 10 aa, Homo sapiens
  Table A; Target 18785; HLA-C*07:06; CTAG2; ENSG00000126890; TAA
SASPEGQKAR

SEQ ID NO: 18786 - protein, 9 aa, Homo sapiens
  Table A; Target 18786; HLA-B*51:01; CTAG2; ENSG00000126890; TAA
SGNLLFMSV

SEQ ID NO: 18787 - protein, 9 aa, Homo sapiens
  Table A; Target 18787; HLA-B*54:01; CTAG2; ENSG00000126890; TAA
SGNLLFMSV

SEQ ID NO: 18788 - protein, 9 aa, Homo sapiens
  Table A; Target 18788; HLA-B*56:01; CTAG2; ENSG00000126890; TAA
SGNLLFMSV

SEQ ID NO: 18789 - protein, 9 aa, Homo sapiens
  Table A; Target 18789; HLA-C*06:02; CTAG2; ENSG00000126890; TAA
SGNLLFMSV

SEQ ID NO: 18790 - protein, 8 aa, Homo sapiens
  Table A; Target 18790; HLA-C*01:02; CTAG2; ENSG00000126890; TAA
SGPRGGAP

SEQ ID NO: 18791 - protein, 9 aa, Homo sapiens
  Table A; Target 18791; HLA-C*01:02; CTAG2; ENSG00000126890; TAA
SGPRGGAPR

SEQ ID NO: 18792 - protein, 11 aa, Homo sapiens
  Table A; Target 18792; HLA-C*06:02; CTAG2; ENSG00000126890; TAA
SGPRGGAPRGP

SEQ ID NO: 18793 - protein, 11 aa, Homo sapiens
  Table A; Target 18793; HLA-C*07:02; CTAG2; ENSG00000126890; TAA
SGPRGGAPRGP

SEQ ID NO: 18794 - protein, 10 aa, Homo sapiens
  Table A; Target 18794; HLA-B*07:02; CTAG2; ENSG00000126890; TAA
SPEGQKARDL

SEQ ID NO: 18795 - protein, 10 aa, Homo sapiens
  Table A; Target 18795; HLA-C*07:02; CTAG2; ENSG00000126890; TAA
SPEGQKARDL

SEQ ID NO: 18796 - protein, 8 aa, Homo sapiens
  Table A; Target 18796; HLA-B*51:01; CTAG2; ENSG00000126890; TAA
SPMEAELV

SEQ ID NO: 18797 - protein, 8 aa, Homo sapiens
  Table A; Target 18797; HLA-B*56:01; CTAG2; ENSG00000126890; TAA
SPMEAELV

SEQ ID NO: 18798 - protein, 9 aa, Homo sapiens
  Table A; Target 18798; HLA-A*33:03; CTAG2; ENSG00000126890; TAA
SPMEAELVR

SEQ ID NO: 18799 - protein, 9 aa, Homo sapiens
  Table A; Target 18799; HLA-A*68:01; CTAG2; ENSG00000126890; TAA
SPMEAELVR

SEQ ID NO: 18800 - protein, 9 aa, Homo sapiens
  Table A; Target 18800; HLA-B*35:01; CTAG2; ENSG00000126890; TAA
SPMEAELVR

SEQ ID NO: 18801 - protein, 9 aa, Homo sapiens
  Table A; Target 18801; HLA-B*35:03; CTAG2; ENSG00000126890; TAA
SPMEAELVR

SEQ ID NO: 18802 - protein, 9 aa, Homo sapiens
  Table A; Target 18802; HLA-B*54:01; CTAG2; ENSG00000126890; TAA
SPMEAELVR

SEQ ID NO: 18803 - protein, 9 aa, Homo sapiens
  Table A; Target 18803; HLA-B*55:01; CTAG2; ENSG00000126890; TAA
SPMEAELVR

SEQ ID NO: 18804 - protein, 9 aa, Homo sapiens
  Table A; Target 18804; HLA-B*56:01; CTAG2; ENSG00000126890; TAA
SPMEAELVR

SEQ ID NO: 18805 - protein, 9 aa, Homo sapiens
  Table A; Target 18805; HLA-C*03:03; CTAG2; ENSG00000126890; TAA
SPMEAELVR

SEQ ID NO: 18806 - protein, 9 aa, Homo sapiens
  Table A; Target 18806; HLA-C*07:06; CTAG2; ENSG00000126890; TAA
SPMEAELVR

SEQ ID NO: 18807 - protein, 10 aa, Homo sapiens
  Table A; Target 18807; HLA-A*33:03; CTAG2; ENSG00000126890; TAA
SPMEAELVRR

SEQ ID NO: 18808 - protein, 10 aa, Homo sapiens
  Table A; Target 18808; HLA-A*68:01; CTAG2; ENSG00000126890; TAA
SPMEAELVRR

SEQ ID NO: 18809 - protein, 10 aa, Homo sapiens
  Table A; Target 18809; HLA-B*55:01; CTAG2; ENSG00000126890; TAA
SPMEAELVRR

SEQ ID NO: 18810 - protein, 10 aa, Homo sapiens
  Table A; Target 18810; HLA-C*07:06; CTAG2; ENSG00000126890; TAA
SPMEAELVRR

SEQ ID NO: 18811 - protein, 9 aa, Homo sapiens
  Table A; Target 18811; HLA-B*27:02; CTAG2; ENSG00000126890; TAA
SRDAAPLPR

SEQ ID NO: 18812 - protein, 9 aa, Homo sapiens
  Table A; Target 18812; HLA-B*27:05; CTAG2; ENSG00000126890; TAA
SRDAAPLPR

SEQ ID NO: 18813 - protein, 8 aa, Homo sapiens
  Table A; Target 18813; HLA-C*01:02; CTAG2; ENSG00000126890; TAA
SSPMEAEL

SEQ ID NO: 18814 - protein, 10 aa, Homo sapiens
  Table A; Target 18814; HLA-C*07:06; CTAG2; ENSG00000126890; TAA
SSPMEAELVR

SEQ ID NO: 18815 - protein, 8 aa, Homo sapiens
  Table A; Target 18815; HLA-C*01:02; CTAG2; ENSG00000126890; TAA
TMPFSSPM

SEQ ID NO: 18816 - protein, 9 aa, Homo sapiens
  Table A; Target 18816; HLA-B*35:03; CTAG2; ENSG00000126890; TAA
TPGPPPPEG

SEQ ID NO: 18817 - protein, 9 aa, Homo sapiens
  Table A; Target 18817; HLA-B*54:01; CTAG2; ENSG00000126890; TAA
TPGPPPPEG

SEQ ID NO: 18818 - protein, 9 aa, Homo sapiens
  Table A; Target 18818; HLA-B*55:01; CTAG2; ENSG00000126890; TAA
TPGPPPPEG

SEQ ID NO: 18819 - protein, 9 aa, Homo sapiens
  Table A; Target 18819; HLA-B*56:01; CTAG2; ENSG00000126890; TAA
TPGPPPPEG

SEQ ID NO: 18820 - protein, 10 aa, Homo sapiens
  Table A; Target 18820; HLA-B*56:01; CTAG2; ENSG00000126890; TAA
TPGPPPPEGA

SEQ ID NO: 18821 - protein, 9 aa, Homo sapiens
  Table A; Target 18821; HLA-A*02:03; CTAG2; ENSG00000126890; TAA
TVSGNLLFM

SEQ ID NO: 18822 - protein, 9 aa, Homo sapiens
  Table A; Target 18822; HLA-A*03:01; CTAG2; ENSG00000126890; TAA
TVSGNLLFM

SEQ ID NO: 18823 - protein, 9 aa, Homo sapiens
  Table A; Target 18823; HLA-A*26:01; CTAG2; ENSG00000126890; TAA
TVSGNLLFM

SEQ ID NO: 18824 - protein, 9 aa, Homo sapiens
  Table A; Target 18824; HLA-A*29:02; CTAG2; ENSG00000126890; TAA
TVSGNLLFM

SEQ ID NO: 18825 - protein, 9 aa, Homo sapiens
  Table A; Target 18825; HLA-A*68:02; CTAG2; ENSG00000126890; TAA
TVSGNLLFM

SEQ ID NO: 18826 - protein, 9 aa, Homo sapiens
  Table A; Target 18826; HLA-B*13:02; CTAG2; ENSG00000126890; TAA
TVSGNLLFM

SEQ ID NO: 18827 - protein, 9 aa, Homo sapiens
  Table A; Target 18827; HLA-C*07:04; CTAG2; ENSG00000126890; TAA
TVSGNLLFM

SEQ ID NO: 18828 - protein, 9 aa, Homo sapiens
  Table A; Target 18828; HLA-C*07:06; CTAG2; ENSG00000126890; TAA
TVSGNLLFM

SEQ ID NO: 18829 - protein, 11 aa, Homo sapiens
  Table A; Target 18829; HLA-A*68:02; CTAG2; ENSG00000126890; TAA
TVSGNLLFMSV

SEQ ID NO: 18830 - protein, 9 aa, Homo sapiens
  Table A; Target 18830; HLA-B*54:01; CTAG2; ENSG00000126890; TAA
VAFNVMFSA

SEQ ID NO: 18831 - protein, 9 aa, Homo sapiens
  Table A; Target 18831; HLA-B*56:01; CTAG2; ENSG00000126890; TAA
VAFNVMFSA

SEQ ID NO: 18832 - protein, 9 aa, Homo sapiens
  Table A; Target 18832; HLA-A*02:03; CTAG2; ENSG00000126890; TAA
VLKDFTVSG

SEQ ID NO: 18833 - protein, 9 aa, Homo sapiens
  Table A; Target 18833; HLA-A*31:01; CTAG2; ENSG00000126890; TAA
VLKDFTVSG

SEQ ID NO: 18834 - protein, 9 aa, Homo sapiens
  Table A; Target 18834; HLA-B*46:01; CTAG2; ENSG00000126890; TAA
VLKDFTVSG

SEQ ID NO: 18835 - protein, 10 aa, Homo sapiens
  Table A; Target 18835; HLA-A*02:03; CTAG2; ENSG00000126890; TAA
VLKDFTVSGN

SEQ ID NO: 18836 - protein, 11 aa, Homo sapiens
  Table A; Target 18836; HLA-A*02:03; CTAG2; ENSG00000126890; TAA
VLKDFTVSGNL

SEQ ID NO: 18837 - protein, 8 aa, Homo sapiens
  Table A; Target 18837; HLA-A*02:01; CTAG2; ENSG00000126890; TAA
VMFSAPHI

SEQ ID NO: 18838 - protein, 8 aa, Homo sapiens
  Table A; Target 18838; HLA-A*02:03; CTAG2; ENSG00000126890; TAA
VMFSAPHI

SEQ ID NO: 18839 - protein, 8 aa, Homo sapiens
  Table A; Target 18839; HLA-A*02:04; CTAG2; ENSG00000126890; TAA
VMFSAPHI

SEQ ID NO: 18840 - protein, 8 aa, Homo sapiens
  Table A; Target 18840; HLA-A*02:07; CTAG2; ENSG00000126890; TAA
VMFSAPHI

SEQ ID NO: 18841 - protein, 8 aa, Homo sapiens
  Table A; Target 18841; HLA-A*23:01; CTAG2; ENSG00000126890; TAA
VMFSAPHI

SEQ ID NO: 18842 - protein, 8 aa, Homo sapiens
  Table A; Target 18842; HLA-A*24:02; CTAG2; ENSG00000126890; TAA
VMFSAPHI

SEQ ID NO: 18843 - protein, 8 aa, Homo sapiens
  Table A; Target 18843; HLA-B*07:02; CTAG2; ENSG00000126890; TAA
VMFSAPHI

SEQ ID NO: 18844 - protein, 8 aa, Homo sapiens
  Table A; Target 18844; HLA-B*13:02; CTAG2; ENSG00000126890; TAA
VMFSAPHI

SEQ ID NO: 18845 - protein, 8 aa, Homo sapiens
  Table A; Target 18845; HLA-B*37:01; CTAG2; ENSG00000126890; TAA
VMFSAPHI

SEQ ID NO: 18846 - protein, 8 aa, Homo sapiens
  Table A; Target 18846; HLA-B*40:02; CTAG2; ENSG00000126890; TAA
VMFSAPHI

SEQ ID NO: 18847 - protein, 8 aa, Homo sapiens
  Table A; Target 18847; HLA-B*46:01; CTAG2; ENSG00000126890; TAA
VMFSAPHI

SEQ ID NO: 18848 - protein, 8 aa, Homo sapiens
  Table A; Target 18848; HLA-B*49:01; CTAG2; ENSG00000126890; TAA
VMFSAPHI

SEQ ID NO: 18849 - protein, 8 aa, Homo sapiens
  Table A; Target 18849; HLA-B*51:01; CTAG2; ENSG00000126890; TAA
VMFSAPHI

SEQ ID NO: 18850 - protein, 8 aa, Homo sapiens
  Table A; Target 18850; HLA-B*55:01; CTAG2; ENSG00000126890; TAA
VMFSAPHI

SEQ ID NO: 18851 - protein, 8 aa, Homo sapiens
  Table A; Target 18851; HLA-B*58:01; CTAG2; ENSG00000126890; TAA
VMFSAPHI

SEQ ID NO: 18852 - protein, 8 aa, Homo sapiens
  Table A; Target 18852; HLA-C*02:02; CTAG2; ENSG00000126890; TAA
VMFSAPHI

SEQ ID NO: 18853 - protein, 8 aa, Homo sapiens
  Table A; Target 18853; HLA-C*04:01; CTAG2; ENSG00000126890; TAA
VMFSAPHI

SEQ ID NO: 18854 - protein, 8 aa, Homo sapiens
  Table A; Target 18854; HLA-C*06:02; CTAG2; ENSG00000126890; TAA
VMFSAPHI

SEQ ID NO: 18855 - protein, 8 aa, Homo sapiens
  Table A; Target 18855; HLA-C*07:01; CTAG2; ENSG00000126890; TAA
VMFSAPHI

SEQ ID NO: 18856 - protein, 8 aa, Homo sapiens
  Table A; Target 18856; HLA-C*07:02; CTAG2; ENSG00000126890; TAA
VMFSAPHI

SEQ ID NO: 18857 - protein, 8 aa, Homo sapiens
  Table A; Target 18857; HLA-C*07:04; CTAG2; ENSG00000126890; TAA
VMFSAPHI

SEQ ID NO: 18858 - protein, 8 aa, Homo sapiens
  Table A; Target 18858; HLA-C*12:03; CTAG2; ENSG00000126890; TAA
VMFSAPHI

SEQ ID NO: 18859 - protein, 8 aa, Homo sapiens
  Table A; Target 18859; HLA-C*16:02; CTAG2; ENSG00000126890; TAA
VMFSAPHI

SEQ ID NO: 18860 - protein, 8 aa, Homo sapiens
  Table A; Target 18860; HLA-C*16:04; CTAG2; ENSG00000126890; TAA
VMFSAPHI

SEQ ID NO: 18861 - protein, 10 aa, Homo sapiens
  Table A; Target 18861; HLA-A*03:02; CTCFL; ENSG00000124092; CTA
AAAEEASTTK

SEQ ID NO: 18862 - protein, 10 aa, Homo sapiens
  Table A; Target 18862; HLA-A*11:01; CTCFL; ENSG00000124092; CTA
AAAEEASTTK

SEQ ID NO: 18863 - protein, 10 aa, Homo sapiens
  Table A; Target 18863; HLA-B*27:02; CTCFL; ENSG00000124092; CTA
AAAEEASTTK

SEQ ID NO: 18864 - protein, 10 aa, Homo sapiens
  Table A; Target 18864; HLA-C*07:06; CTCFL; ENSG00000124092; CTA
AAAEEASTTK

SEQ ID NO: 18865 - protein, 9 aa, Homo sapiens
  Table A; Target 18865; HLA-A*03:02; CTCFL; ENSG00000124092; CTA
AAEEASTTK

SEQ ID NO: 18866 - protein, 9 aa, Homo sapiens
  Table A; Target 18866; HLA-A*11:01; CTCFL; ENSG00000124092; CTA
AAEEASTTK

SEQ ID NO: 18867 - protein, 9 aa, Homo sapiens
  Table A; Target 18867; HLA-C*05:01; CTCFL; ENSG00000124092; CTA
AAEEASTTK

SEQ ID NO: 18868 - protein, 9 aa, Homo sapiens
  Table A; Target 18868; HLA-C*07:06; CTCFL; ENSG00000124092; CTA
AAEEASTTK

SEQ ID NO: 18869 - protein, 10 aa, Homo sapiens
  Table A; Target 18869; HLA-C*05:01; CTCFL; ENSG00000124092; CTA
AAEEASTTKG

SEQ ID NO: 18870 - protein, 8 aa, Homo sapiens
  Table A; Target 18870; HLA-B*08:01; CTCFL; ENSG00000124092; CTA
AAELKCRY

SEQ ID NO: 18871 - protein, 8 aa, Homo sapiens
  Table A; Target 18871; HLA-C*16:01; CTCFL; ENSG00000124092; CTA
AAELKCRY

SEQ ID NO: 18872 - protein, 8 aa, Homo sapiens
  Table A; Target 18872; HLA-B*58:01; CTCFL; ENSG00000124092; CTA
AATEISVL

SEQ ID NO: 18873 - protein, 8 aa, Homo sapiens
  Table A; Target 18873; HLA-C*01:02; CTCFL; ENSG00000124092; CTA
AATEISVL

SEQ ID NO: 18874 - protein, 8 aa, Homo sapiens
  Table A; Target 18874; HLA-C*03:03; CTCFL; ENSG00000124092; CTA
AATEISVL

SEQ ID NO: 18875 - protein, 8 aa, Homo sapiens
  Table A; Target 18875; HLA-C*03:04; CTCFL; ENSG00000124092; CTA
AATEISVL

SEQ ID NO: 18876 - protein, 8 aa, Homo sapiens
  Table A; Target 18876; HLA-C*05:01; CTCFL; ENSG00000124092; CTA
AATEISVL

SEQ ID NO: 18877 - protein, 8 aa, Homo sapiens
  Table A; Target 18877; HLA-C*12:03; CTCFL; ENSG00000124092; CTA
AATEISVL

SEQ ID NO: 18878 - protein, 8 aa, Homo sapiens
  Table A; Target 18878; HLA-C*16:01; CTCFL; ENSG00000124092; CTA
AATEISVL

SEQ ID NO: 18879 - protein, 8 aa, Homo sapiens
  Table A; Target 18879; HLA-C*16:02; CTCFL; ENSG00000124092; CTA
AATEISVL

SEQ ID NO: 18880 - protein, 9 aa, Homo sapiens
  Table A; Target 18880; HLA-C*16:02; CTCFL; ENSG00000124092; CTA
ADAEKAKST

SEQ ID NO: 18881 - protein, 9 aa, Homo sapiens
  Table A; Target 18881; HLA-B*49:01; CTCFL; ENSG00000124092; CTA
AEEASTTKG

SEQ ID NO: 18882 - protein, 8 aa, Homo sapiens
  Table A; Target 18882; HLA-B*08:01; CTCFL; ENSG00000124092; CTA
AERTKEQL

SEQ ID NO: 18883 - protein, 8 aa, Homo sapiens
  Table A; Target 18883; HLA-B*37:01; CTCFL; ENSG00000124092; CTA
AERTKEQL

SEQ ID NO: 18884 - protein, 9 aa, Homo sapiens
  Table A; Target 18884; HLA-B*37:01; CTCFL; ENSG00000124092; CTA
AERTKEQLF

SEQ ID NO: 18885 - protein, 9 aa, Homo sapiens
  Table A; Target 18885; HLA-B*40:02; CTCFL; ENSG00000124092; CTA
AERTKEQLF

SEQ ID NO: 18886 - protein, 9 aa, Homo sapiens
  Table A; Target 18886; HLA-B*44:02; CTCFL; ENSG00000124092; CTA
AERTKEQLF

SEQ ID NO: 18887 - protein, 9 aa, Homo sapiens
  Table A; Target 18887; HLA-B*44:03; CTCFL; ENSG00000124092; CTA
AERTKEQLF

SEQ ID NO: 18888 - protein, 9 aa, Homo sapiens
  Table A; Target 18888; HLA-C*16:04; CTCFL; ENSG00000124092; CTA
AERTKEQLF

SEQ ID NO: 18889 - protein, 8 aa, Homo sapiens
  Table A; Target 18889; HLA-B*37:01; CTCFL; ENSG00000124092; CTA
AERTSGAF

SEQ ID NO: 18890 - protein, 9 aa, Homo sapiens
  Table A; Target 18890; HLA-B*27:02; CTCFL; ENSG00000124092; CTA
AETTGLIKL

SEQ ID NO: 18891 - protein, 9 aa, Homo sapiens
  Table A; Target 18891; HLA-B*37:01; CTCFL; ENSG00000124092; CTA
AETTGLIKL

SEQ ID NO: 18892 - protein, 9 aa, Homo sapiens
  Table A; Target 18892; HLA-B*40:02; CTCFL; ENSG00000124092; CTA
AETTGLIKL

SEQ ID NO: 18893 - protein, 9 aa, Homo sapiens
  Table A; Target 18893; HLA-B*44:02; CTCFL; ENSG00000124092; CTA
AETTGLIKL

SEQ ID NO: 18894 - protein, 9 aa, Homo sapiens
  Table A; Target 18894; HLA-B*49:01; CTCFL; ENSG00000124092; CTA
AETTGLIKL

SEQ ID NO: 18895 - protein, 9 aa, Homo sapiens
  Table A; Target 18895; HLA-C*02:02; CTCFL; ENSG00000124092; CTA
AETTGLIKL

SEQ ID NO: 18896 - protein, 9 aa, Homo sapiens
  Table A; Target 18896; HLA-C*16:04; CTCFL; ENSG00000124092; CTA
AETTGLIKL

SEQ ID NO: 18897 - protein, 8 aa, Homo sapiens
  Table A; Target 18897; HLA-C*01:02; CTCFL; ENSG00000124092; CTA
AFVTSGEL

SEQ ID NO: 18898 - protein, 8 aa, Homo sapiens
  Table A; Target 18898; HLA-C*14:02; CTCFL; ENSG00000124092; CTA
AFVTSGEL

SEQ ID NO: 18899 - protein, 8 aa, Homo sapiens
  Table A; Target 18899; HLA-C*16:01; CTCFL; ENSG00000124092; CTA
AFVTSGEL

SEQ ID NO: 18900 - protein, 9 aa, Homo sapiens
  Table A; Target 18900; HLA-C*14:02; CTCFL; ENSG00000124092; CTA
AFVTSGELV

SEQ ID NO: 18901 - protein, 8 aa, Homo sapiens
  Table A; Target 18901; HLA-B*37:01; CTCFL; ENSG00000124092; CTA
AISIQQEL

SEQ ID NO: 18902 - protein, 8 aa, Homo sapiens
  Table A; Target 18902; HLA-C*16:01; CTCFL; ENSG00000124092; CTA
AISIQQEL

SEQ ID NO: 18903 - protein, 9 aa, Homo sapiens
  Table A; Target 18903; HLA-A*01:01; CTCFL; ENSG00000124092; CTA
AISIQQELY

SEQ ID NO: 18904 - protein, 9 aa, Homo sapiens
  Table A; Target 18904; HLA-A*29:02; CTCFL; ENSG00000124092; CTA
AISIQQELY

SEQ ID NO: 18905 - protein, 9 aa, Homo sapiens
  Table A; Target 18905; HLA-A*30:02; CTCFL; ENSG00000124092; CTA
AISIQQELY

SEQ ID NO: 18906 - protein, 9 aa, Homo sapiens
  Table A; Target 18906; HLA-A*32:01; CTCFL; ENSG00000124092; CTA
AISIQQELY

SEQ ID NO: 18907 - protein, 9 aa, Homo sapiens
  Table A; Target 18907; HLA-B*15:01; CTCFL; ENSG00000124092; CTA
AISIQQELY

SEQ ID NO: 18908 - protein, 9 aa, Homo sapiens
  Table A; Target 18908; HLA-B*15:03; CTCFL; ENSG00000124092; CTA
AISIQQELY

SEQ ID NO: 18909 - protein, 9 aa, Homo sapiens
  Table A; Target 18909; HLA-B*58:01; CTCFL; ENSG00000124092; CTA
AISIQQELY

SEQ ID NO: 18910 - protein, 9 aa, Homo sapiens
  Table A; Target 18910; HLA-C*07:04; CTCFL; ENSG00000124092; CTA
AISIQQELY

SEQ ID NO: 18911 - protein, 9 aa, Homo sapiens
  Table A; Target 18911; HLA-C*16:04; CTCFL; ENSG00000124092; CTA
AISIQQELY

SEQ ID NO: 18912 - protein, 8 aa, Homo sapiens
  Table A; Target 18912; HLA-A*02:01; CTCFL; ENSG00000124092; CTA
ALEENVMV

SEQ ID NO: 18913 - protein, 9 aa, Homo sapiens
  Table A; Target 18913; HLA-A*02:01; CTCFL; ENSG00000124092; CTA
ALEENVMVA

SEQ ID NO: 18914 - protein, 9 aa, Homo sapiens
  Table A; Target 18914; HLA-A*02:03; CTCFL; ENSG00000124092; CTA
ALEENVMVA

SEQ ID NO: 18915 - protein, 9 aa, Homo sapiens
  Table A; Target 18915; HLA-B*55:01; CTCFL; ENSG00000124092; CTA
ALEENVMVA

SEQ ID NO: 18916 - protein, 8 aa, Homo sapiens
  Table A; Target 18916; HLA-A*29:02; CTCFL; ENSG00000124092; CTA
ANFIPTVY

SEQ ID NO: 18917 - protein, 8 aa, Homo sapiens
  Table A; Target 18917; HLA-A*30:02; CTCFL; ENSG00000124092; CTA
ANFIPTVY

SEQ ID NO: 18918 - protein, 8 aa, Homo sapiens
  Table A; Target 18918; HLA-B*15:01; CTCFL; ENSG00000124092; CTA
ANFIPTVY

SEQ ID NO: 18919 - protein, 8 aa, Homo sapiens
  Table A; Target 18919; HLA-B*15:03; CTCFL; ENSG00000124092; CTA
ANFIPTVY

SEQ ID NO: 18920 - protein, 8 aa, Homo sapiens
  Table A; Target 18920; HLA-B*18:01; CTCFL; ENSG00000124092; CTA
ANFIPTVY

SEQ ID NO: 18921 - protein, 8 aa, Homo sapiens
  Table A; Target 18921; HLA-B*39:01; CTCFL; ENSG00000124092; CTA
ANFIPTVY

SEQ ID NO: 18922 - protein, 8 aa, Homo sapiens
  Table A; Target 18922; HLA-B*46:01; CTCFL; ENSG00000124092; CTA
ANFIPTVY

SEQ ID NO: 18923 - protein, 8 aa, Homo sapiens
  Table A; Target 18923; HLA-C*07:01; CTCFL; ENSG00000124092; CTA
ANFIPTVY

SEQ ID NO: 18924 - protein, 8 aa, Homo sapiens
  Table A; Target 18924; HLA-C*12:03; CTCFL; ENSG00000124092; CTA
ANFIPTVY

SEQ ID NO: 18925 - protein, 9 aa, Homo sapiens
  Table A; Target 18925; HLA-A*03:01; CTCFL; ENSG00000124092; CTA
ANFIPTVYK

SEQ ID NO: 18926 - protein, 9 aa, Homo sapiens
  Table A; Target 18926; HLA-A*03:02; CTCFL; ENSG00000124092; CTA
ANFIPTVYK

SEQ ID NO: 18927 - protein, 9 aa, Homo sapiens
  Table A; Target 18927; HLA-A*11:01; CTCFL; ENSG00000124092; CTA
ANFIPTVYK

SEQ ID NO: 18928 - protein, 9 aa, Homo sapiens
  Table A; Target 18928; HLA-B*27:05; CTCFL; ENSG00000124092; CTA
ANFIPTVYK

SEQ ID NO: 18929 - protein, 9 aa, Homo sapiens
  Table A; Target 18929; HLA-C*04:01; CTCFL; ENSG00000124092; CTA
ANFIPTVYK

SEQ ID NO: 18930 - protein, 9 aa, Homo sapiens
  Table A; Target 18930; HLA-A*30:02; CTCFL; ENSG00000124092; CTA
APSEESEKY

SEQ ID NO: 18931 - protein, 9 aa, Homo sapiens
  Table A; Target 18931; HLA-B*15:01; CTCFL; ENSG00000124092; CTA
APSEESEKY

SEQ ID NO: 18932 - protein, 9 aa, Homo sapiens
  Table A; Target 18932; HLA-B*15:03; CTCFL; ENSG00000124092; CTA
APSEESEKY

SEQ ID NO: 18933 - protein, 9 aa, Homo sapiens
  Table A; Target 18933; HLA-B*35:01; CTCFL; ENSG00000124092; CTA
APSEESEKY

SEQ ID NO: 18934 - protein, 9 aa, Homo sapiens
  Table A; Target 18934; HLA-C*03:03; CTCFL; ENSG00000124092; CTA
APSEESEKY

SEQ ID NO: 18935 - protein, 11 aa, Homo sapiens
  Table A; Target 18935; HLA-B*07:02; CTCFL; ENSG00000124092; CTA
APSEESEKYIL

SEQ ID NO: 18936 - protein, 11 aa, Homo sapiens
  Table A; Target 18936; HLA-B*35:01; CTCFL; ENSG00000124092; CTA
APSEESEKYIL

SEQ ID NO: 18937 - protein, 11 aa, Homo sapiens
  Table A; Target 18937; HLA-B*35:03; CTCFL; ENSG00000124092; CTA
APSEESEKYIL

SEQ ID NO: 18938 - protein, 11 aa, Homo sapiens
  Table A; Target 18938; HLA-B*55:01; CTCFL; ENSG00000124092; CTA
APSEESEKYIL

SEQ ID NO: 18939 - protein, 9 aa, Homo sapiens
  Table A; Target 18939; HLA-A*01:01; CTCFL; ENSG00000124092; CTA
ASEDSKLAV

SEQ ID NO: 18940 - protein, 9 aa, Homo sapiens
  Table A; Target 18940; HLA-C*01:02; CTCFL; ENSG00000124092; CTA
ASEDSKLAV

SEQ ID NO: 18941 - protein, 9 aa, Homo sapiens
  Table A; Target 18941; HLA-C*05:01; CTCFL; ENSG00000124092; CTA
ASEDSKLAV

SEQ ID NO: 18942 - protein, 9 aa, Homo sapiens
  Table A; Target 18942; HLA-C*16:02; CTCFL; ENSG00000124092; CTA
ASEDSKLAV

SEQ ID NO: 18943 - protein, 8 aa, Homo sapiens
  Table A; Target 18943; HLA-A*23:01; CTCFL; ENSG00000124092; CTA
ASRDTYKL

SEQ ID NO: 18944 - protein, 9 aa, Homo sapiens
  Table A; Target 18944; HLA-C*06:02; CTCFL; ENSG00000124092; CTA
ASRDTYKLK

SEQ ID NO: 18945 - protein, 9 aa, Homo sapiens
  Table A; Target 18945; HLA-B*58:01; CTCFL; ENSG00000124092; CTA
ASTTKGEQF

SEQ ID NO: 18946 - protein, 9 aa, Homo sapiens
  Table A; Target 18946; HLA-C*16:01; CTCFL; ENSG00000124092; CTA
ASTTKGEQF

SEQ ID NO: 18947 - protein, 9 aa, Homo sapiens
  Table A; Target 18947; HLA-C*16:02; CTCFL; ENSG00000124092; CTA
ASTTKGEQF

SEQ ID NO: 18948 - protein, 8 aa, Homo sapiens
  Table A; Target 18948; HLA-B*40:02; CTCFL; ENSG00000124092; CTA
ASVEASKL

SEQ ID NO: 18949 - protein, 8 aa, Homo sapiens
  Table A; Target 18949; HLA-B*58:01; CTCFL; ENSG00000124092; CTA
ASVEASKL

SEQ ID NO: 18950 - protein, 8 aa, Homo sapiens
  Table A; Target 18950; HLA-C*01:02; CTCFL; ENSG00000124092; CTA
ASVEASKL

SEQ ID NO: 18951 - protein, 8 aa, Homo sapiens
  Table A; Target 18951; HLA-C*03:03; CTCFL; ENSG00000124092; CTA
ASVEASKL

SEQ ID NO: 18952 - protein, 8 aa, Homo sapiens
  Table A; Target 18952; HLA-C*03:04; CTCFL; ENSG00000124092; CTA
ASVEASKL

SEQ ID NO: 18953 - protein, 8 aa, Homo sapiens
  Table A; Target 18953; HLA-C*05:01; CTCFL; ENSG00000124092; CTA
ASVEASKL

SEQ ID NO: 18954 - protein, 8 aa, Homo sapiens
  Table A; Target 18954; HLA-C*06:02; CTCFL; ENSG00000124092; CTA
ASVEASKL

SEQ ID NO: 18955 - protein, 8 aa, Homo sapiens
  Table A; Target 18955; HLA-C*12:03; CTCFL; ENSG00000124092; CTA
ASVEASKL

SEQ ID NO: 18956 - protein, 8 aa, Homo sapiens
  Table A; Target 18956; HLA-C*16:01; CTCFL; ENSG00000124092; CTA
ASVEASKL

SEQ ID NO: 18957 - protein, 8 aa, Homo sapiens
  Table A; Target 18957; HLA-C*16:02; CTCFL; ENSG00000124092; CTA
ASVEASKL

SEQ ID NO: 18958 - protein, 9 aa, Homo sapiens
  Table A; Target 18958; HLA-A*03:01; CTCFL; ENSG00000124092; CTA
ASVEASKLK

SEQ ID NO: 18959 - protein, 9 aa, Homo sapiens
  Table A; Target 18959; HLA-A*03:02; CTCFL; ENSG00000124092; CTA
ASVEASKLK

SEQ ID NO: 18960 - protein, 9 aa, Homo sapiens
  Table A; Target 18960; HLA-C*06:02; CTCFL; ENSG00000124092; CTA
ASVEASKLK

SEQ ID NO: 18961 - protein, 9 aa, Homo sapiens
  Table A; Target 18961; HLA-C*07:06; CTCFL; ENSG00000124092; CTA
ASVEASKLK

SEQ ID NO: 18962 - protein, 9 aa, Homo sapiens
  Table A; Target 18962; HLA-C*16:02; CTCFL; ENSG00000124092; CTA
ASVEASKLK

SEQ ID NO: 18963 - protein, 10 aa, Homo sapiens
  Table A; Target 18963; HLA-A*01:01; CTCFL; ENSG00000124092; CTA
ATEISVLSEQ

SEQ ID NO: 18964 - protein, 11 aa, Homo sapiens
  Table A; Target 18964; HLA-A*01:01; CTCFL; ENSG00000124092; CTA
ATEISVLSEQF

SEQ ID NO: 18965 - protein, 10 aa, Homo sapiens
  Table A; Target 18965; HLA-A*33:03; CTCFL; ENSG00000124092; CTA
ATKGQKEAAK

SEQ ID NO: 18966 - protein, 9 aa, Homo sapiens
  Table A; Target 18966; HLA-C*01:02; CTCFL; ENSG00000124092; CTA
AVELQDMSL

SEQ ID NO: 18967 - protein, 9 aa, Homo sapiens
  Table A; Target 18967; HLA-A*02:04; CTCFL; ENSG00000124092; CTA
AVFHERYAL

SEQ ID NO: 18968 - protein, 11 aa, Homo sapiens
  Table A; Target 18968; HLA-A*29:02; CTCFL; ENSG00000124092; CTA
AYSAAELKCRY

SEQ ID NO: 18969 - protein, 9 aa, Homo sapiens
  Table A; Target 18969; HLA-C*16:02; CTCFL; ENSG00000124092; CTA
CATIIARKS

SEQ ID NO: 18970 - protein, 8 aa, Homo sapiens
  Table A; Target 18970; HLA-A*30:01; CTCFL; ENSG00000124092; CTA
CEMLLNTM

SEQ ID NO: 18971 - protein, 8 aa, Homo sapiens
  Table A; Target 18971; HLA-B*18:01; CTCFL; ENSG00000124092; CTA
CEMLLNTM

SEQ ID NO: 18972 - protein, 8 aa, Homo sapiens
  Table A; Target 18972; HLA-B*37:01; CTCFL; ENSG00000124092; CTA
CEMLLNTM

SEQ ID NO: 18973 - protein, 8 aa, Homo sapiens
  Table A; Target 18973; HLA-B*49:01; CTCFL; ENSG00000124092; CTA
CEMLLNTM

SEQ ID NO: 18974 - protein, 9 aa, Homo sapiens
  Table A; Target 18974; HLA-A*01:01; CTCFL; ENSG00000124092; CTA
CSAVFHERY

SEQ ID NO: 18975 - protein, 9 aa, Homo sapiens
  Table A; Target 18975; HLA-A*29:02; CTCFL; ENSG00000124092; CTA
CSAVFHERY

SEQ ID NO: 18976 - protein, 9 aa, Homo sapiens
  Table A; Target 18976; HLA-A*30:02; CTCFL; ENSG00000124092; CTA
CSAVFHERY

SEQ ID NO: 18977 - protein, 9 aa, Homo sapiens
  Table A; Target 18977; HLA-C*16:01; CTCFL; ENSG00000124092; CTA
CSAVFHERY

SEQ ID NO: 18978 - protein, 9 aa, Homo sapiens
  Table A; Target 18978; HLA-A*01:01; CTCFL; ENSG00000124092; CTA
CSYASRDTY

SEQ ID NO: 18979 - protein, 9 aa, Homo sapiens
  Table A; Target 18979; HLA-A*30:02; CTCFL; ENSG00000124092; CTA
CSYASRDTY

SEQ ID NO: 18980 - protein, 9 aa, Homo sapiens
  Table A; Target 18980; HLA-A*32:01; CTCFL; ENSG00000124092; CTA
CSYASRDTY

SEQ ID NO: 18981 - protein, 9 aa, Homo sapiens
  Table A; Target 18981; HLA-B*15:01; CTCFL; ENSG00000124092; CTA
CSYASRDTY

SEQ ID NO: 18982 - protein, 9 aa, Homo sapiens
  Table A; Target 18982; HLA-B*15:03; CTCFL; ENSG00000124092; CTA
CSYASRDTY

SEQ ID NO: 18983 - protein, 9 aa, Homo sapiens
  Table A; Target 18983; HLA-B*46:01; CTCFL; ENSG00000124092; CTA
CSYASRDTY

SEQ ID NO: 18984 - protein, 9 aa, Homo sapiens
  Table A; Target 18984; HLA-B*58:01; CTCFL; ENSG00000124092; CTA
CSYASRDTY

SEQ ID NO: 18985 - protein, 9 aa, Homo sapiens
  Table A; Target 18985; HLA-C*01:02; CTCFL; ENSG00000124092; CTA
CSYASRDTY

SEQ ID NO: 18986 - protein, 9 aa, Homo sapiens
  Table A; Target 18986; HLA-C*02:02; CTCFL; ENSG00000124092; CTA
CSYASRDTY

SEQ ID NO: 18987 - protein, 9 aa, Homo sapiens
  Table A; Target 18987; HLA-C*12:03; CTCFL; ENSG00000124092; CTA
CSYASRDTY

SEQ ID NO: 18988 - protein, 9 aa, Homo sapiens
  Table A; Target 18988; HLA-C*16:01; CTCFL; ENSG00000124092; CTA
CSYASRDTY

SEQ ID NO: 18989 - protein, 9 aa, Homo sapiens
  Table A; Target 18989; HLA-C*16:02; CTCFL; ENSG00000124092; CTA
CSYASRDTY

SEQ ID NO: 18990 - protein, 9 aa, Homo sapiens
  Table A; Target 18990; HLA-C*16:04; CTCFL; ENSG00000124092; CTA
CSYASRDTY

SEQ ID NO: 18991 - protein, 10 aa, Homo sapiens
  Table A; Target 18991; HLA-A*03:01; CTCFL; ENSG00000124092; CTA
CSYASRDTYK

SEQ ID NO: 18992 - protein, 11 aa, Homo sapiens
  Table A; Target 18992; HLA-A*30:02; CTCFL; ENSG00000124092; CTA
CVAISIQQELY

SEQ ID NO: 18993 - protein, 8 aa, Homo sapiens
  Table A; Target 18993; HLA-B*18:01; CTCFL; ENSG00000124092; CTA
DANFIPTV

SEQ ID NO: 18994 - protein, 8 aa, Homo sapiens
  Table A; Target 18994; HLA-B*54:01; CTCFL; ENSG00000124092; CTA
DANFIPTV

SEQ ID NO: 18995 - protein, 9 aa, Homo sapiens
  Table A; Target 18995; HLA-A*01:01; CTCFL; ENSG00000124092; CTA
DANFIPTVY

SEQ ID NO: 18996 - protein, 9 aa, Homo sapiens
  Table A; Target 18996; HLA-A*25:01; CTCFL; ENSG00000124092; CTA
DANFIPTVY

SEQ ID NO: 18997 - protein, 9 aa, Homo sapiens
  Table A; Target 18997; HLA-A*26:01; CTCFL; ENSG00000124092; CTA
DANFIPTVY

SEQ ID NO: 18998 - protein, 9 aa, Homo sapiens
  Table A; Target 18998; HLA-A*29:02; CTCFL; ENSG00000124092; CTA
DANFIPTVY

SEQ ID NO: 18999 - protein, 9 aa, Homo sapiens
  Table A; Target 18999; HLA-A*33:01; CTCFL; ENSG00000124092; CTA
DANFIPTVY

SEQ ID NO: 19000 - protein, 9 aa, Homo sapiens
  Table A; Target 19000; HLA-A*33:03; CTCFL; ENSG00000124092; CTA
DANFIPTVY

SEQ ID NO: 19001 - protein, 9 aa, Homo sapiens
  Table A; Target 19001; HLA-A*68:01; CTCFL; ENSG00000124092; CTA
DANFIPTVY

SEQ ID NO: 19002 - protein, 9 aa, Homo sapiens
  Table A; Target 19002; HLA-B*15:01; CTCFL; ENSG00000124092; CTA
DANFIPTVY

SEQ ID NO: 19003 - protein, 9 aa, Homo sapiens
  Table A; Target 19003; HLA-B*15:03; CTCFL; ENSG00000124092; CTA
DANFIPTVY

SEQ ID NO: 19004 - protein, 9 aa, Homo sapiens
  Table A; Target 19004; HLA-B*18:01; CTCFL; ENSG00000124092; CTA
DANFIPTVY

SEQ ID NO: 19005 - protein, 9 aa, Homo sapiens
  Table A; Target 19005; HLA-B*35:03; CTCFL; ENSG00000124092; CTA
DANFIPTVY

SEQ ID NO: 19006 - protein, 9 aa, Homo sapiens
  Table A; Target 19006; HLA-B*39:01; CTCFL; ENSG00000124092; CTA
DANFIPTVY

SEQ ID NO: 19007 - protein, 9 aa, Homo sapiens
  Table A; Target 19007; HLA-B*46:01; CTCFL; ENSG00000124092; CTA
DANFIPTVY

SEQ ID NO: 19008 - protein, 9 aa, Homo sapiens
  Table A; Target 19008; HLA-B*51:01; CTCFL; ENSG00000124092; CTA
DANFIPTVY

SEQ ID NO: 19009 - protein, 9 aa, Homo sapiens
  Table A; Target 19009; HLA-B*54:01; CTCFL; ENSG00000124092; CTA
DANFIPTVY

SEQ ID NO: 19010 - protein, 9 aa, Homo sapiens
  Table A; Target 19010; HLA-B*55:01; CTCFL; ENSG00000124092; CTA
DANFIPTVY

SEQ ID NO: 19011 - protein, 9 aa, Homo sapiens
  Table A; Target 19011; HLA-C*01:02; CTCFL; ENSG00000124092; CTA
DANFIPTVY

SEQ ID NO: 19012 - protein, 9 aa, Homo sapiens
  Table A; Target 19012; HLA-C*02:02; CTCFL; ENSG00000124092; CTA
DANFIPTVY

SEQ ID NO: 19013 - protein, 9 aa, Homo sapiens
  Table A; Target 19013; HLA-C*03:03; CTCFL; ENSG00000124092; CTA
DANFIPTVY

SEQ ID NO: 19014 - protein, 9 aa, Homo sapiens
  Table A; Target 19014; HLA-C*07:01; CTCFL; ENSG00000124092; CTA
DANFIPTVY

SEQ ID NO: 19015 - protein, 9 aa, Homo sapiens
  Table A; Target 19015; HLA-C*07:04; CTCFL; ENSG00000124092; CTA
DANFIPTVY

SEQ ID NO: 19016 - protein, 9 aa, Homo sapiens
  Table A; Target 19016; HLA-C*07:06; CTCFL; ENSG00000124092; CTA
DANFIPTVY

SEQ ID NO: 19017 - protein, 9 aa, Homo sapiens
  Table A; Target 19017; HLA-C*12:03; CTCFL; ENSG00000124092; CTA
DANFIPTVY

SEQ ID NO: 19018 - protein, 9 aa, Homo sapiens
  Table A; Target 19018; HLA-C*16:04; CTCFL; ENSG00000124092; CTA
DANFIPTVY

SEQ ID NO: 19019 - protein, 10 aa, Homo sapiens
  Table A; Target 19019; HLA-A*11:01; CTCFL; ENSG00000124092; CTA
DANFIPTVYK

SEQ ID NO: 19020 - protein, 10 aa, Homo sapiens
  Table A; Target 19020; HLA-A*33:01; CTCFL; ENSG00000124092; CTA
DANFIPTVYK

SEQ ID NO: 19021 - protein, 10 aa, Homo sapiens
  Table A; Target 19021; HLA-A*33:03; CTCFL; ENSG00000124092; CTA
DANFIPTVYK

SEQ ID NO: 19022 - protein, 10 aa, Homo sapiens
  Table A; Target 19022; HLA-A*68:01; CTCFL; ENSG00000124092; CTA
DANFIPTVYK

SEQ ID NO: 19023 - protein, 10 aa, Homo sapiens
  Table A; Target 19023; HLA-A*68:02; CTCFL; ENSG00000124092; CTA
DANFIPTVYK

SEQ ID NO: 19024 - protein, 10 aa, Homo sapiens
  Table A; Target 19024; HLA-B*27:02; CTCFL; ENSG00000124092; CTA
DANFIPTVYK

SEQ ID NO: 19025 - protein, 8 aa, Homo sapiens
  Table A; Target 19025; HLA-B*18:01; CTCFL; ENSG00000124092; CTA
DEAAAEEA

SEQ ID NO: 19026 - protein, 8 aa, Homo sapiens
  Table A; Target 19026; HLA-B*18:01; CTCFL; ENSG00000124092; CTA
DEGVTCEM

SEQ ID NO: 19027 - protein, 8 aa, Homo sapiens
  Table A; Target 19027; HLA-B*18:01; CTCFL; ENSG00000124092; CTA
DEIVLTVS

SEQ ID NO: 19028 - protein, 9 aa, Homo sapiens
  Table A; Target 19028; HLA-B*18:01; CTCFL; ENSG00000124092; CTA
DEIVLTVSN

SEQ ID NO: 19029 - protein, 9 aa, Homo sapiens
  Table A; Target 19029; HLA-B*18:01; CTCFL; ENSG00000124092; CTA
DERSDEIVL

SEQ ID NO: 19030 - protein, 9 aa, Homo sapiens
  Table A; Target 19030; HLA-B*40:01; CTCFL; ENSG00000124092; CTA
DERSDEIVL

SEQ ID NO: 19031 - protein, 9 aa, Homo sapiens
  Table A; Target 19031; HLA-B*40:02; CTCFL; ENSG00000124092; CTA
DERSDEIVL

SEQ ID NO: 19032 - protein, 8 aa, Homo sapiens
  Table A; Target 19032; HLA-A*33:01; CTCFL; ENSG00000124092; CTA
DSKLAVSL

SEQ ID NO: 19033 - protein, 8 aa, Homo sapiens
  Table A; Target 19033; HLA-B*18:01; CTCFL; ENSG00000124092; CTA
DSKLAVSL

SEQ ID NO: 19034 - protein, 8 aa, Homo sapiens
  Table A; Target 19034; HLA-B*40:02; CTCFL; ENSG00000124092; CTA
DSKLAVSL

SEQ ID NO: 19035 - protein, 8 aa, Homo sapiens
  Table A; Target 19035; HLA-B*51:01; CTCFL; ENSG00000124092; CTA
DSKLAVSL

SEQ ID NO: 19036 - protein, 10 aa, Homo sapiens
  Table A; Target 19036; HLA-A*33:01; CTCFL; ENSG00000124092; CTA
DTYKLKRHMR

SEQ ID NO: 19037 - protein, 9 aa, Homo sapiens
  Table A; Target 19037; HLA-A*33:01; CTCFL; ENSG00000124092; CTA
DVCMFTSSR

SEQ ID NO: 19038 - protein, 9 aa, Homo sapiens
  Table A; Target 19038; HLA-A*33:03; CTCFL; ENSG00000124092; CTA
DVCMFTSSR

SEQ ID NO: 19039 - protein, 9 aa, Homo sapiens
  Table A; Target 19039; HLA-A*68:01; CTCFL; ENSG00000124092; CTA
DVCMFTSSR

SEQ ID NO: 19040 - protein, 11 aa, Homo sapiens
  Table A; Target 19040; HLA-A*26:01; CTCFL; ENSG00000124092; CTA
EAAAEEASTTK

SEQ ID NO: 19041 - protein, 11 aa, Homo sapiens
  Table A; Target 19041; HLA-A*33:03; CTCFL; ENSG00000124092; CTA
EAAAEEASTTK

SEQ ID NO: 19042 - protein, 11 aa, Homo sapiens
  Table A; Target 19042; HLA-A*68:01; CTCFL; ENSG00000124092; CTA
EAAAEEASTTK

SEQ ID NO: 19043 - protein, 11 aa, Homo sapiens
  Table A; Target 19043; HLA-B*27:02; CTCFL; ENSG00000124092; CTA
EAAAEEASTTK

SEQ ID NO: 19044 - protein, 11 aa, Homo sapiens
  Table A; Target 19044; HLA-B*39:01; CTCFL; ENSG00000124092; CTA
EAAAEEASTTK

SEQ ID NO: 19045 - protein, 11 aa, Homo sapiens
  Table A; Target 19045; HLA-C*07:06; CTCFL; ENSG00000124092; CTA
EAAAEEASTTK

SEQ ID NO: 19046 - protein, 9 aa, Homo sapiens
  Table A; Target 19046; HLA-B*55:01; CTCFL; ENSG00000124092; CTA
EAERTSGAF

SEQ ID NO: 19047 - protein, 9 aa, Homo sapiens
  Table A; Target 19047; HLA-C*05:01; CTCFL; ENSG00000124092; CTA
EAERTSGAF

SEQ ID NO: 19048 - protein, 9 aa, Homo sapiens
  Table A; Target 19048; HLA-A*33:03; CTCFL; ENSG00000124092; CTA
EAKSAASGK

SEQ ID NO: 19049 - protein, 11 aa, Homo sapiens
  Table A; Target 19049; HLA-A*33:01; CTCFL; ENSG00000124092; CTA
EAKSAASGKGR

SEQ ID NO: 19050 - protein, 11 aa, Homo sapiens
  Table A; Target 19050; HLA-A*33:03; CTCFL; ENSG00000124092; CTA
EAKSAASGKGR

SEQ ID NO: 19051 - protein, 11 aa, Homo sapiens
  Table A; Target 19051; HLA-A*68:01; CTCFL; ENSG00000124092; CTA
EAKSAASGKGR

SEQ ID NO: 19052 - protein, 10 aa, Homo sapiens
  Table A; Target 19052; HLA-A*25:01; CTCFL; ENSG00000124092; CTA
EASTTKGEQF

SEQ ID NO: 19053 - protein, 10 aa, Homo sapiens
  Table A; Target 19053; HLA-A*25:01; CTCFL; ENSG00000124092; CTA
EAVELQDMSL

SEQ ID NO: 19054 - protein, 10 aa, Homo sapiens
  Table A; Target 19054; HLA-A*68:01; CTCFL; ENSG00000124092; CTA
EAVELQDMSL

SEQ ID NO: 19055 - protein, 10 aa, Homo sapiens
  Table A; Target 19055; HLA-A*68:02; CTCFL; ENSG00000124092; CTA
EAVELQDMSL

SEQ ID NO: 19056 - protein, 10 aa, Homo sapiens
  Table A; Target 19056; HLA-B*35:01; CTCFL; ENSG00000124092; CTA
EAVELQDMSL

SEQ ID NO: 19057 - protein, 10 aa, Homo sapiens
  Table A; Target 19057; HLA-B*35:03; CTCFL; ENSG00000124092; CTA
EAVELQDMSL

SEQ ID NO: 19058 - protein, 10 aa, Homo sapiens
  Table A; Target 19058; HLA-C*07:06; CTCFL; ENSG00000124092; CTA
EAVELQDMSL

SEQ ID NO: 19059 - protein, 11 aa, Homo sapiens
  Table A; Target 19059; HLA-A*25:01; CTCFL; ENSG00000124092; CTA
EAVELQDMSLL

SEQ ID NO: 19060 - protein, 11 aa, Homo sapiens
  Table A; Target 19060; HLA-A*26:01; CTCFL; ENSG00000124092; CTA
EAVELQDMSLL

SEQ ID NO: 19061 - protein, 11 aa, Homo sapiens
  Table A; Target 19061; HLA-A*68:02; CTCFL; ENSG00000124092; CTA
EAVELQDMSLL

SEQ ID NO: 19062 - protein, 11 aa, Homo sapiens
  Table A; Target 19062; HLA-C*04:01; CTCFL; ENSG00000124092; CTA
EDQPTAGQADA

SEQ ID NO: 19063 - protein, 9 aa, Homo sapiens
  Table A; Target 19063; HLA-A*30:01; CTCFL; ENSG00000124092; CTA
EDSKLAVSL

SEQ ID NO: 19064 - protein, 9 aa, Homo sapiens
  Table A; Target 19064; HLA-A*68:02; CTCFL; ENSG00000124092; CTA
EDSKLAVSL

SEQ ID NO: 19065 - protein, 9 aa, Homo sapiens
  Table A; Target 19065; HLA-B*18:01; CTCFL; ENSG00000124092; CTA
EDSKLAVSL

SEQ ID NO: 19066 - protein, 9 aa, Homo sapiens
  Table A; Target 19066; HLA-B*27:05; CTCFL; ENSG00000124092; CTA
EDSKLAVSL

SEQ ID NO: 19067 - protein, 9 aa, Homo sapiens
  Table A; Target 19067; HLA-B*37:01; CTCFL; ENSG00000124092; CTA
EDSKLAVSL

SEQ ID NO: 19068 - protein, 9 aa, Homo sapiens
  Table A; Target 19068; HLA-B*38:01; CTCFL; ENSG00000124092; CTA
EDSKLAVSL

SEQ ID NO: 19069 - protein, 9 aa, Homo sapiens
  Table A; Target 19069; HLA-B*39:01; CTCFL; ENSG00000124092; CTA
EDSKLAVSL

SEQ ID NO: 19070 - protein, 9 aa, Homo sapiens
  Table A; Target 19070; HLA-B*40:01; CTCFL; ENSG00000124092; CTA
EDSKLAVSL

SEQ ID NO: 19071 - protein, 9 aa, Homo sapiens
  Table A; Target 19071; HLA-B*40:02; CTCFL; ENSG00000124092; CTA
EDSKLAVSL

SEQ ID NO: 19072 - protein, 9 aa, Homo sapiens
  Table A; Target 19072; HLA-B*44:02; CTCFL; ENSG00000124092; CTA
EDSKLAVSL

SEQ ID NO: 19073 - protein, 9 aa, Homo sapiens
  Table A; Target 19073; HLA-B*44:03; CTCFL; ENSG00000124092; CTA
EDSKLAVSL

SEQ ID NO: 19074 - protein, 9 aa, Homo sapiens
  Table A; Target 19074; HLA-C*07:01; CTCFL; ENSG00000124092; CTA
EDSKLAVSL

SEQ ID NO: 19075 - protein, 11 aa, Homo sapiens
  Table A; Target 19075; HLA-A*25:01; CTCFL; ENSG00000124092; CTA
EEASTTKGEQF

SEQ ID NO: 19076 - protein, 11 aa, Homo sapiens
  Table A; Target 19076; HLA-A*26:01; CTCFL; ENSG00000124092; CTA
EEASTTKGEQF

SEQ ID NO: 19077 - protein, 11 aa, Homo sapiens
  Table A; Target 19077; HLA-B*18:01; CTCFL; ENSG00000124092; CTA
EEASTTKGEQF

SEQ ID NO: 19078 - protein, 11 aa, Homo sapiens
  Table A; Target 19078; HLA-B*27:02; CTCFL; ENSG00000124092; CTA
EEASTTKGEQF

SEQ ID NO: 19079 - protein, 11 aa, Homo sapiens
  Table A; Target 19079; HLA-B*38:01; CTCFL; ENSG00000124092; CTA
EEASTTKGEQF

SEQ ID NO: 19080 - protein, 11 aa, Homo sapiens
  Table A; Target 19080; HLA-B*40:01; CTCFL; ENSG00000124092; CTA
EEASTTKGEQF

SEQ ID NO: 19081 - protein, 11 aa, Homo sapiens
  Table A; Target 19081; HLA-B*44:02; CTCFL; ENSG00000124092; CTA
EEASTTKGEQF

SEQ ID NO: 19082 - protein, 11 aa, Homo sapiens
  Table A; Target 19082; HLA-C*16:04; CTCFL; ENSG00000124092; CTA
EEASTTKGEQF

SEQ ID NO: 19083 - protein, 9 aa, Homo sapiens
  Table A; Target 19083; HLA-B*40:01; CTCFL; ENSG00000124092; CTA
EEEQEKNQL

SEQ ID NO: 19084 - protein, 9 aa, Homo sapiens
  Table A; Target 19084; HLA-B*44:02; CTCFL; ENSG00000124092; CTA
EEEQEKNQL

SEQ ID NO: 19085 - protein, 9 aa, Homo sapiens
  Table A; Target 19085; HLA-B*44:03; CTCFL; ENSG00000124092; CTA
EEEQEKNQL

SEQ ID NO: 19086 - protein, 10 aa, Homo sapiens
  Table A; Target 19086; HLA-B*40:01; CTCFL; ENSG00000124092; CTA
EEEQEKNQLL

SEQ ID NO: 19087 - protein, 10 aa, Homo sapiens
  Table A; Target 19087; HLA-B*44:02; CTCFL; ENSG00000124092; CTA
EEEQEKNQLL

SEQ ID NO: 19088 - protein, 10 aa, Homo sapiens
  Table A; Target 19088; HLA-B*44:03; CTCFL; ENSG00000124092; CTA
EEEQEKNQLL

SEQ ID NO: 19089 - protein, 8 aa, Homo sapiens
  Table A; Target 19089; HLA-B*18:01; CTCFL; ENSG00000124092; CTA
EEGPRQSL

SEQ ID NO: 19090 - protein, 8 aa, Homo sapiens
  Table A; Target 19090; HLA-B*37:01; CTCFL; ENSG00000124092; CTA
EEGPRQSL

SEQ ID NO: 19091 - protein, 8 aa, Homo sapiens
  Table A; Target 19091; HLA-B*40:01; CTCFL; ENSG00000124092; CTA
EEGPRQSL

SEQ ID NO: 19092 - protein, 8 aa, Homo sapiens
  Table A; Target 19092; HLA-B*44:02; CTCFL; ENSG00000124092; CTA
EEGPRQSL

SEQ ID NO: 19093 - protein, 8 aa, Homo sapiens
  Table A; Target 19093; HLA-B*44:03; CTCFL; ENSG00000124092; CTA
EEGPRQSL

SEQ ID NO: 19094 - protein, 8 aa, Homo sapiens
  Table A; Target 19094; HLA-B*44:02; CTCFL; ENSG00000124092; CTA
EEQEKNQL

SEQ ID NO: 19095 - protein, 9 aa, Homo sapiens
  Table A; Target 19095; HLA-A*30:01; CTCFL; ENSG00000124092; CTA
EEQEKNQLL

SEQ ID NO: 19096 - protein, 9 aa, Homo sapiens
  Table A; Target 19096; HLA-B*37:01; CTCFL; ENSG00000124092; CTA
EEQEKNQLL

SEQ ID NO: 19097 - protein, 9 aa, Homo sapiens
  Table A; Target 19097; HLA-B*38:01; CTCFL; ENSG00000124092; CTA
EEQEKNQLL

SEQ ID NO: 19098 - protein, 9 aa, Homo sapiens
  Table A; Target 19098; HLA-B*40:01; CTCFL; ENSG00000124092; CTA
EEQEKNQLL

SEQ ID NO: 19099 - protein, 9 aa, Homo sapiens
  Table A; Target 19099; HLA-B*40:02; CTCFL; ENSG00000124092; CTA
EEQEKNQLL

SEQ ID NO: 19100 - protein, 9 aa, Homo sapiens
  Table A; Target 19100; HLA-B*44:02; CTCFL; ENSG00000124092; CTA
EEQEKNQLL

SEQ ID NO: 19101 - protein, 9 aa, Homo sapiens
  Table A; Target 19101; HLA-B*44:03; CTCFL; ENSG00000124092; CTA
EEQEKNQLL

SEQ ID NO: 19102 - protein, 9 aa, Homo sapiens
  Table A; Target 19102; HLA-B*49:01; CTCFL; ENSG00000124092; CTA
EEQEKNQLL

SEQ ID NO: 19103 - protein, 9 aa, Homo sapiens
  Table A; Target 19103; HLA-C*16:04; CTCFL; ENSG00000124092; CTA
EEQEKNQLL

SEQ ID NO: 19104 - protein, 8 aa, Homo sapiens
  Table A; Target 19104; HLA-B*08:01; CTCFL; ENSG00000124092; CTA
EESEKYIL

SEQ ID NO: 19105 - protein, 8 aa, Homo sapiens
  Table A; Target 19105; HLA-B*18:01; CTCFL; ENSG00000124092; CTA
EESEKYIL

SEQ ID NO: 19106 - protein, 8 aa, Homo sapiens
  Table A; Target 19106; HLA-B*37:01; CTCFL; ENSG00000124092; CTA
EESEKYIL

SEQ ID NO: 19107 - protein, 10 aa, Homo sapiens
  Table A; Target 19107; HLA-A*30:01; CTCFL; ENSG00000124092; CTA
EESEKYILTL

SEQ ID NO: 19108 - protein, 10 aa, Homo sapiens
  Table A; Target 19108; HLA-B*40:01; CTCFL; ENSG00000124092; CTA
EESEKYILTL

SEQ ID NO: 19109 - protein, 10 aa, Homo sapiens
  Table A; Target 19109; HLA-B*44:02; CTCFL; ENSG00000124092; CTA
EESEKYILTL

SEQ ID NO: 19110 - protein, 10 aa, Homo sapiens
  Table A; Target 19110; HLA-B*44:03; CTCFL; ENSG00000124092; CTA
EESEKYILTL

SEQ ID NO: 19111 - protein, 9 aa, Homo sapiens
  Table A; Target 19111; HLA-A*30:01; CTCFL; ENSG00000124092; CTA
EEVDEGVTC

SEQ ID NO: 19112 - protein, 9 aa, Homo sapiens
  Table A; Target 19112; HLA-B*39:01; CTCFL; ENSG00000124092; CTA
EEVDEGVTC

SEQ ID NO: 19113 - protein, 9 aa, Homo sapiens
  Table A; Target 19113; HLA-B*40:01; CTCFL; ENSG00000124092; CTA
EEVDEGVTC

SEQ ID NO: 19114 - protein, 9 aa, Homo sapiens
  Table A; Target 19114; HLA-B*49:01; CTCFL; ENSG00000124092; CTA
EEVDEGVTC

SEQ ID NO: 19115 - protein, 11 aa, Homo sapiens
  Table A; Target 19115; HLA-A*26:01; CTCFL; ENSG00000124092; CTA
EEVDEGVTCEM

SEQ ID NO: 19116 - protein, 11 aa, Homo sapiens
  Table A; Target 19116; HLA-A*30:01; CTCFL; ENSG00000124092; CTA
EEVDEGVTCEM

SEQ ID NO: 19117 - protein, 11 aa, Homo sapiens
  Table A; Target 19117; HLA-B*18:01; CTCFL; ENSG00000124092; CTA
EEVDEGVTCEM

SEQ ID NO: 19118 - protein, 11 aa, Homo sapiens
  Table A; Target 19118; HLA-B*40:01; CTCFL; ENSG00000124092; CTA
EEVDEGVTCEM

SEQ ID NO: 19119 - protein, 11 aa, Homo sapiens
  Table A; Target 19119; HLA-B*44:03; CTCFL; ENSG00000124092; CTA
EEVDEGVTCEM

SEQ ID NO: 19120 - protein, 8 aa, Homo sapiens
  Table A; Target 19120; HLA-B*18:01; CTCFL; ENSG00000124092; CTA
EEVELVLA

SEQ ID NO: 19121 - protein, 9 aa, Homo sapiens
  Table A; Target 19121; HLA-B*18:01; CTCFL; ENSG00000124092; CTA
EEVELVLAP

SEQ ID NO: 19122 - protein, 9 aa, Homo sapiens
  Table A; Target 19122; HLA-C*07:06; CTCFL; ENSG00000124092; CTA
EGVQVVVQQ

SEQ ID NO: 19123 - protein, 9 aa, Homo sapiens
  Table A; Target 19123; HLA-A*25:01; CTCFL; ENSG00000124092; CTA
EISVLSEQF

SEQ ID NO: 19124 - protein, 9 aa, Homo sapiens
  Table A; Target 19124; HLA-A*26:01; CTCFL; ENSG00000124092; CTA
EISVLSEQF

SEQ ID NO: 19125 - protein, 9 aa, Homo sapiens
  Table A; Target 19125; HLA-B*18:01; CTCFL; ENSG00000124092; CTA
EISVLSEQF

SEQ ID NO: 19126 - protein, 9 aa, Homo sapiens
  Table A; Target 19126; HLA-B*44:02; CTCFL; ENSG00000124092; CTA
EISVLSEQF

SEQ ID NO: 19127 - protein, 9 aa, Homo sapiens
  Table A; Target 19127; HLA-B*44:03; CTCFL; ENSG00000124092; CTA
EISVLSEQF

SEQ ID NO: 19128 - protein, 11 aa, Homo sapiens
  Table A; Target 19128; HLA-A*68:01; CTCFL; ENSG00000124092; CTA
EISVLSEQFTK

SEQ ID NO: 19129 - protein, 11 aa, Homo sapiens
  Table A; Target 19129; HLA-B*27:02; CTCFL; ENSG00000124092; CTA
EISVLSEQFTK

SEQ ID NO: 19130 - protein, 9 aa, Homo sapiens
  Table A; Target 19130; HLA-A*33:01; CTCFL; ENSG00000124092; CTA
EKNQLLAER

SEQ ID NO: 19131 - protein, 9 aa, Homo sapiens
  Table A; Target 19131; HLA-A*33:03; CTCFL; ENSG00000124092; CTA
EKNQLLAER

SEQ ID NO: 19132 - protein, 8 aa, Homo sapiens
  Table A; Target 19132; HLA-B*08:01; CTCFL; ENSG00000124092; CTA
ELMPEKGL

SEQ ID NO: 19133 - protein, 9 aa, Homo sapiens
  Table A; Target 19133; HLA-A*33:03; CTCFL; ENSG00000124092; CTA
ELMPEKGLK

SEQ ID NO: 19134 - protein, 10 aa, Homo sapiens
  Table A; Target 19134; HLA-A*25:01; CTCFL; ENSG00000124092; CTA
ELQDMSLLSI

SEQ ID NO: 19135 - protein, 8 aa, Homo sapiens
  Table A; Target 19135; HLA-B*08:01; CTCFL; ENSG00000124092; CTA
ELYSPQEM

SEQ ID NO: 19136 - protein, 10 aa, Homo sapiens
  Table A; Target 19136; HLA-A*02:01; CTCFL; ENSG00000124092; CTA
ELYSPQEMEV

SEQ ID NO: 19137 - protein, 10 aa, Homo sapiens
  Table A; Target 19137; HLA-A*02:03; CTCFL; ENSG00000124092; CTA
ELYSPQEMEV

SEQ ID NO: 19138 - protein, 10 aa, Homo sapiens
  Table A; Target 19138; HLA-A*26:01; CTCFL; ENSG00000124092; CTA
ELYSPQEMEV

SEQ ID NO: 19139 - protein, 10 aa, Homo sapiens
  Table A; Target 19139; HLA-B*13:02; CTCFL; ENSG00000124092; CTA
ELYSPQEMEV

SEQ ID NO: 19140 - protein, 11 aa, Homo sapiens
  Table A; Target 19140; HLA-B*38:01; CTCFL; ENSG00000124092; CTA
ELYSPQEMEVL

SEQ ID NO: 19141 - protein, 8 aa, Homo sapiens
  Table A; Target 19141; HLA-A*33:03; CTCFL; ENSG00000124092; CTA
EMFPVACR

SEQ ID NO: 19142 - protein, 9 aa, Homo sapiens
  Table A; Target 19142; HLA-A*01:01; CTCFL; ENSG00000124092; CTA
EMLLNTMDK

SEQ ID NO: 19143 - protein, 9 aa, Homo sapiens
  Table A; Target 19143; HLA-C*07:01; CTCFL; ENSG00000124092; CTA
EMLLNTMDK

SEQ ID NO: 19144 - protein, 8 aa, Homo sapiens
  Table A; Target 19144; HLA-B*18:01; CTCFL; ENSG00000124092; CTA
EQFPGEMF

SEQ ID NO: 19145 - protein, 10 aa, Homo sapiens
  Table A; Target 19145; HLA-A*02:03; CTCFL; ENSG00000124092; CTA
EQFPGEMFPV

SEQ ID NO: 19146 - protein, 10 aa, Homo sapiens
  Table A; Target 19146; HLA-A*26:01; CTCFL; ENSG00000124092; CTA
EQFPGEMFPV

SEQ ID NO: 19147 - protein, 10 aa, Homo sapiens
  Table A; Target 19147; HLA-A*68:02; CTCFL; ENSG00000124092; CTA
EQFPGEMFPV

SEQ ID NO: 19148 - protein, 11 aa, Homo sapiens
  Table A; Target 19148; HLA-A*68:02; CTCFL; ENSG00000124092; CTA
EQFPGEMFPVA

SEQ ID NO: 19149 - protein, 9 aa, Homo sapiens
  Table A; Target 19149; HLA-A*25:01; CTCFL; ENSG00000124092; CTA
EQFTKIKEL

SEQ ID NO: 19150 - protein, 9 aa, Homo sapiens
  Table A; Target 19150; HLA-A*26:01; CTCFL; ENSG00000124092; CTA
EQFTKIKEL

SEQ ID NO: 19151 - protein, 9 aa, Homo sapiens
  Table A; Target 19151; HLA-A*68:02; CTCFL; ENSG00000124092; CTA
EQFTKIKEL

SEQ ID NO: 19152 - protein, 9 aa, Homo sapiens
  Table A; Target 19152; HLA-B*08:01; CTCFL; ENSG00000124092; CTA
EQFTKIKEL

SEQ ID NO: 19153 - protein, 9 aa, Homo sapiens
  Table A; Target 19153; HLA-B*44:03; CTCFL; ENSG00000124092; CTA
EQFTKIKEL

SEQ ID NO: 19154 - protein, 9 aa, Homo sapiens
  Table A; Target 19154; HLA-C*16:04; CTCFL; ENSG00000124092; CTA
EQFTKIKEL

SEQ ID NO: 19155 - protein, 9 aa, Homo sapiens
  Table A; Target 19155; HLA-A*68:02; CTCFL; ENSG00000124092; CTA
EQLFFVETM

SEQ ID NO: 19156 - protein, 9 aa, Homo sapiens
  Table A; Target 19156; HLA-B*13:02; CTCFL; ENSG00000124092; CTA
EQLFFVETM

SEQ ID NO: 19157 - protein, 9 aa, Homo sapiens
  Table A; Target 19157; HLA-B*18:01; CTCFL; ENSG00000124092; CTA
EQLFFVETM

SEQ ID NO: 19158 - protein, 9 aa, Homo sapiens
  Table A; Target 19158; HLA-B*27:05; CTCFL; ENSG00000124092; CTA
EQLFFVETM

SEQ ID NO: 19159 - protein, 9 aa, Homo sapiens
  Table A; Target 19159; HLA-B*35:01; CTCFL; ENSG00000124092; CTA
EQLFFVETM

SEQ ID NO: 19160 - protein, 9 aa, Homo sapiens
  Table A; Target 19160; HLA-B*38:01; CTCFL; ENSG00000124092; CTA
EQLFFVETM

SEQ ID NO: 19161 - protein, 9 aa, Homo sapiens
  Table A; Target 19161; HLA-B*39:01; CTCFL; ENSG00000124092; CTA
EQLFFVETM

SEQ ID NO: 19162 - protein, 9 aa, Homo sapiens
  Table A; Target 19162; HLA-C*07:01; CTCFL; ENSG00000124092; CTA
EQLFFVETM

SEQ ID NO: 19163 - protein, 10 aa, Homo sapiens
  Table A; Target 19163; HLA-A*68:02; CTCFL; ENSG00000124092; CTA
ERSDEIVLTV

SEQ ID NO: 19164 - protein, 9 aa, Homo sapiens
  Table A; Target 19164; HLA-A*01:01; CTCFL; ENSG00000124092; CTA
ESEKYILTL

SEQ ID NO: 19165 - protein, 8 aa, Homo sapiens
  Table A; Target 19165; HLA-A*33:03; CTCFL; ENSG00000124092; CTA
ETMSGDER

SEQ ID NO: 19166 - protein, 8 aa, Homo sapiens
  Table A; Target 19166; HLA-A*68:02; CTCFL; ENSG00000124092; CTA
ETTGLIKL

SEQ ID NO: 19167 - protein, 8 aa, Homo sapiens
  Table A; Target 19167; HLA-C*05:01; CTCFL; ENSG00000124092; CTA
EVDEGVTC

SEQ ID NO: 19168 - protein, 10 aa, Homo sapiens
  Table A; Target 19168; HLA-A*25:01; CTCFL; ENSG00000124092; CTA
EVDEGVTCEM

SEQ ID NO: 19169 - protein, 10 aa, Homo sapiens
  Table A; Target 19169; HLA-A*26:01; CTCFL; ENSG00000124092; CTA
EVDEGVTCEM

SEQ ID NO: 19170 - protein, 10 aa, Homo sapiens
  Table A; Target 19170; HLA-B*35:01; CTCFL; ENSG00000124092; CTA
EVDEGVTCEM

SEQ ID NO: 19171 - protein, 10 aa, Homo sapiens
  Table A; Target 19171; HLA-B*35:03; CTCFL; ENSG00000124092; CTA
EVDEGVTCEM

SEQ ID NO: 19172 - protein, 10 aa, Homo sapiens
  Table A; Target 19172; HLA-B*39:01; CTCFL; ENSG00000124092; CTA
EVDEGVTCEM

SEQ ID NO: 19173 - protein, 10 aa, Homo sapiens
  Table A; Target 19173; HLA-C*05:01; CTCFL; ENSG00000124092; CTA
EVDEGVTCEM

SEQ ID NO: 19174 - protein, 10 aa, Homo sapiens
  Table A; Target 19174; HLA-C*07:06; CTCFL; ENSG00000124092; CTA
EVDEGVTCEM

SEQ ID NO: 19175 - protein, 8 aa, Homo sapiens
  Table A; Target 19175; HLA-B*08:01; CTCFL; ENSG00000124092; CTA
EVLQFHAL

SEQ ID NO: 19176 - protein, 9 aa, Homo sapiens
  Table A; Target 19176; HLA-B*35:03; CTCFL; ENSG00000124092; CTA
FHALEENVM

SEQ ID NO: 19177 - protein, 9 aa, Homo sapiens
  Table A; Target 19177; HLA-B*39:01; CTCFL; ENSG00000124092; CTA
FHALEENVM

SEQ ID NO: 19178 - protein, 10 aa, Homo sapiens
  Table A; Target 19178; HLA-B*38:01; CTCFL; ENSG00000124092; CTA
FHALEENVMV

SEQ ID NO: 19179 - protein, 8 aa, Homo sapiens
  Table A; Target 19179; HLA-B*54:01; CTCFL; ENSG00000124092; CTA
FPGEMFPV

SEQ ID NO: 19180 - protein, 9 aa, Homo sapiens
  Table A; Target 19180; HLA-B*35:01; CTCFL; ENSG00000124092; CTA
FPGEMFPVA

SEQ ID NO: 19181 - protein, 9 aa, Homo sapiens
  Table A; Target 19181; HLA-B*35:03; CTCFL; ENSG00000124092; CTA
FPGEMFPVA

SEQ ID NO: 19182 - protein, 9 aa, Homo sapiens
  Table A; Target 19182; HLA-B*51:01; CTCFL; ENSG00000124092; CTA
FPGEMFPVA

SEQ ID NO: 19183 - protein, 9 aa, Homo sapiens
  Table A; Target 19183; HLA-B*54:01; CTCFL; ENSG00000124092; CTA
FPGEMFPVA

SEQ ID NO: 19184 - protein, 9 aa, Homo sapiens
  Table A; Target 19184; HLA-B*55:01; CTCFL; ENSG00000124092; CTA
FPGEMFPVA

SEQ ID NO: 19185 - protein, 9 aa, Homo sapiens
  Table A; Target 19185; HLA-B*56:01; CTCFL; ENSG00000124092; CTA
FPGEMFPVA

SEQ ID NO: 19186 - protein, 10 aa, Homo sapiens
  Table A; Target 19186; HLA-B*35:03; CTCFL; ENSG00000124092; CTA
FPGEMFPVAC

SEQ ID NO: 19187 - protein, 10 aa, Homo sapiens
  Table A; Target 19187; HLA-B*54:01; CTCFL; ENSG00000124092; CTA
FPGEMFPVAC

SEQ ID NO: 19188 - protein, 10 aa, Homo sapiens
  Table A; Target 19188; HLA-B*56:01; CTCFL; ENSG00000124092; CTA
FPGEMFPVAC

SEQ ID NO: 19189 - protein, 10 aa, Homo sapiens
  Table A; Target 19189; HLA-B*54:01; CTCFL; ENSG00000124092; CTA
FPVACRETTA

SEQ ID NO: 19190 - protein, 10 aa, Homo sapiens
  Table A; Target 19190; HLA-B*56:01; CTCFL; ENSG00000124092; CTA
FPVACRETTA

SEQ ID NO: 19191 - protein, 9 aa, Homo sapiens
  Table A; Target 19191; HLA-B*08:01; CTCFL; ENSG00000124092; CTA
FTKIKELEL

SEQ ID NO: 19192 - protein, 9 aa, Homo sapiens
  Table A; Target 19192; HLA-A*01:01; CTCFL; ENSG00000124092; CTA
FTQSGTMKI

SEQ ID NO: 19193 - protein, 9 aa, Homo sapiens
  Table A; Target 19193; HLA-A*25:01; CTCFL; ENSG00000124092; CTA
FTQSGTMKI

SEQ ID NO: 19194 - protein, 9 aa, Homo sapiens
  Table A; Target 19194; HLA-A*32:01; CTCFL; ENSG00000124092; CTA
FTQSGTMKI

SEQ ID NO: 19195 - protein, 9 aa, Homo sapiens
  Table A; Target 19195; HLA-A*68:02; CTCFL; ENSG00000124092; CTA
FTQSGTMKI

SEQ ID NO: 19196 - protein, 9 aa, Homo sapiens
  Table A; Target 19196; HLA-B*13:02; CTCFL; ENSG00000124092; CTA
FTQSGTMKI

SEQ ID NO: 19197 - protein, 9 aa, Homo sapiens
  Table A; Target 19197; HLA-B*49:01; CTCFL; ENSG00000124092; CTA
FTQSGTMKI

(The sequence listing continues in the following parts.)
